(19) United States
(12) Patent Application Publication
(10) Pub. No.: US 2018/0118836 A1
(43) Pub. Date: May 3, 2018

(54) BISPECIFIC CHECKPOINT INHIBITOR ANTIBODIES

(71) Applicant: Xencor, Inc., Monrovia, CA (US)

(72) Inventors: Matthew Bernett, Monrovia, CA (US); Gregory Moore, Azusa, CA (US); John Desjarlais, Pasadena, CA (US); Michael Hedvart, Encino, CA (US); Christine Bonzon, Los Angeles, CA (US); Alex Nisthal, Morovia, CA (US)

(21) Appl. No.: 15/623,314

(22) Filed: Jun. 14, 2017

Related U.S. Application Data
(60) Provisional application No. 62/350,145, filed on Jun. 14, 2016.
(60) Provisional application No. 62/353,511, filed on Jun. 22, 2016.
(60) Provisional application No. 62/420,500, filed on Nov. 10, 2016.

(51) Int. Cl. C07K 16/28; C07K 14/735; C12N 15/861

(52) U.S. Cl. CPC C07K 16/2863; C07K 14/70535; A61K 2039/572; C07K 2317/31; C12N 15/8613

(57) ABSTRACT

The present invention is directed to bispecific, heterodimeric checkpoint antibodies.

### CROSS REFERENCE TO RELATED APPLICATIONS

[0001] This application claims priority to U.S. Provisional Patent Application No. 62/350,145, filed Jun. 14, 2016, U.S. Provisional Patent Application No. 62/353,511, filed Jun. 22, 2016 and U.S. Provisional Patent Application No. 62/420,500, filed Nov. 10, 2016, the contents of which are expressly fully incorporated by reference in their entirety.

### SEQUENCE LISTING

[0002] The instant application contains a Sequence Listing which has been submitted electronically in ASCII format and is hereby incorporated by reference in its entirety. Said ASCII copy, created on Oct. 10, 2017, is named 067461-5191-WO_SUBSTITUTE_SEQUENCE_LISTING.TEXT and is 33,716,785 kilobytes in size.

### BACKGROUND OF THE INVENTION

[0003] Checkpoint receptors such as CTLA-4, PD-1 (programmed cell death 1), TIM-3 (T cell immunoglobulin and mucin domain 3), LAG-3 (lymphocyte-activation gene 3), TIGIT (T cell immunoreceptor with Ig and ITIM domains), and others, inhibit the activation, proliferation, and/or effector activities of T cells and other cell types. Guided by the hypothesis that checkpoint receptors suppress the endogenous T cell response against tumor cells, preclinical and clinical studies of anti-CTLA4 and anti-PD1 antibodies, including nivolumab, pembrolizumab, ipilimumab, and tremelimumab, have indeed demonstrated that checkpoint blockade results in impressive anti-tumor responses, stimulating endogenous T cells to attack tumor cells, leading to long-term cancer remissions in a fraction of patients with a variety of malignancies. Unfortunately, only a subset of patients responds to these therapies, with response rates generally ranging from 10 to 30% and sometimes higher for each monotherapy, depending on the indication and other factors. Therapeutic combination of these agents, for example ipilimumab plus nivolumab, leads to even higher response rates, approaching 60% in some cases. Preclinical studies have shown additional synergies between anti-PD-1 antibodies and/or anti-CTLA-4 antibodies with blockade of more recently identified checkpoint receptors, including LAG-3, TIM-3, BTLA and TIGIT. While the potential of multiple checkpoint blockade is very promising, combination therapy with such agents is expected to carry a high financial burden. Moreover, autoimmune toxicities of combination therapies, for example nivolumab plus ipilimumab, are significantly elevated compared to monotherapy, causing many patients to halt the therapy.

[0004] A number of studies (Ahmadzadeh et al., Blood 114:1537 (2009), Matsuzaki et al., PNAS 107(17):7875-7880 (2010), Fourcade et al., Cancer Res. 72(4):887-896 (2012) and Gros et al., J. Clinical Invest. 124(5):2246 (2014)) examining tumor-infiltrating lymphocytes (TILs) have shown that TILs commonly express multiple checkpoint receptors. Moreover, it is likely that TILs that express multiple checkpoints are in fact the most tumor-reactive. In contrast, non-tumor reactive T cells in the periphery are more likely to express a single checkpoint. Checkpoint blockade with monospecific full-length antibodies is likely nondiscriminatory with regards to de-repression of tumor-reactive TILs versus autoantigen-reactive single expressing T cells that are assumed to contribute to autoimmune toxicities.

[0005] Accordingly, the invention is directed to bispecific antibodies that bind to two different checkpoint inhibitor proteins.

### I. BRIEF SUMMARY OF THE INVENTION

[0006] The present invention provides bispecific heterodimeric antibodies that bind to two different checkpoint cell surface receptors such as human PD-1, human CTLA-4, human TIM-3, human LAG-3 and human TIGIT. Thus, in some aspects, suitable bispecific antibodies bind PD-1 and CTLA-4, PD-1 and TIM-3, PD-1 and LAG-3, PD-1 and TIGIT, PD-1 and BTLA, CTLA-4 and TIM-3, CTLA-4 and LAG-3, CTLA-4 and TIGIT, CTLA-4 and BTLA, TIM-3 and LAG-3, TIM-3 and TIGIT, TIM-3 and BTLA, LAG-3 and TIGIT, LAG-3 and BTLA and TIGIT and BTLA.

[0007] In one aspect, the invention provides bottle opener formats that comprise: a) a first monomer (the “scFv monomer”, sometimes referred to as the “scFv heavy chain”) that comprises a scFv with a variable heavy and variable light domain linked using a charged scFv linker (with the +H sequence of FIG. 7 being preferred in some embodiments), an Fc domain comprising the skew variants S364K/E357Q, the ablation variants E233P/L234V/L235A/G236del/S267K, and an Fv that binds to a checkpoint receptor as outlined herein; b) a second monomer (the “Fab monomer” or “heavy chain”) that comprises an Fc domain with the skew variants L368D/K370S, the pI variants N208D/Q295E/N384D/Q418E/N421D, the ablation variants E233P/L234V/L235A/G236del/S267K, and a variable heavy domain that, with the variable light domain, makes up an Fv that binds to a second checkpoint receptor as outlined herein; and c) a light chain. In this particular embodiment, suitable monomer Fv pairs include (Fabs listed first, scFvs second) PD-1 and CTLA-4, CTLA-4 and PD-1, PD-1 and TIM-3, TIM-3 and PD-1, PD-1 and LAG-3, LAG-3×PD1, PD-1 and TIGIT, TIGIT and PD-1, PD-1 and BTLA, BTLA and PD-1, CTLA-4 and TIM-3, TIM-3 and CTLA-4, CTLA-4 and LAG-3, LAG-3 and CTLA-4, CTLA-4 and TIGIT, TIGIT and CTLA-4, CTLA-4 and BTLA, BTLA and CTLA-4, TIM-3 and LAG-3, LAG-3 and TIM-3, TIM-3 and TIGIT, TIGIT and TIM-3, TIM-3 and BTLA, BTLA and TIM-3, LAG-3 and TIGIT, TIGIT and LAG-3, LAG-3 and BTLA, BTLA and LAG-3, BTLA and TIGIT, and TIGIT and BTLA.

[0008] Other aspects of the invention are provided herein.

### II. BRIEF DESCRIPTION OF THE DRAWINGS

[0009] FIG. 1A-1I depict several formats of the present invention. The first is the “bottle opener” format, with a first and a second anti-antigen binding domain. Additionally, mAb-Fv, mAb-scFv, Central-scFv, Central-Fv, one armed central-scFv, one scFv-mAb, scFv-mAb and a dual scFv format are all shown. For all of the scFv domains depicted, they can be either N- to C-terminus variable heavy-(optional linker)-variable light, or the opposite. In addition, for the one armed scFv-mAb, the scFv can be attached either to the N-terminus of a heavy chain monomer or to the N-terminus of the light chain.

[0010] FIG. 2A-2D depict the antigen sequences for a number of antigens of use in the invention, including both human and cynomolgus monkey in many cases, to facilitate the development of antigen binding domains that bind to both for ease of clinical development.

[0011] FIG. 3A-3F depict useful pairs of heterodimerization variant sets (including skew and pI variants). On FIG. 3E, there are variants for which there are no corresponding “monomer 2” variants; these are pI variants which can be used alone on either monomer, or included on the Fab side of a bottle opener, for example, and an appropriate charged scFv linker can be used on the second monomer that utilizes a scFv as the second antigen binding domain. Suitable charged linkers are shown in FIG. 7.

[0012] FIG. 4 depict a list of isosteric variant antibody constant regions and their respective substitutions. pI_(−) indicates lower pI variants, while pI_(+) indicates higher pI variants. These can be optionally and independently combined with other heterodimerization variants of the invention (and other variant types as well, as outlined herein).

[0013] FIG. 5 depict useful ablation variants that ablate FcγR binding (sometimes referred to as “knock outs” or “KO” variants). Generally, ablation variants are found on both monomers, although in some cases they may be on only one monomer.

[0014] FIG. 6A-6B show two particularly useful embodiments of the invention, that can be used for either the format of FIG. 1A or FIG. 1F. For the FIG. 1A format, the “non-Fv” components of this embodiment are shown in FIG. 37A, although the other formats of can be used as well (and that of FIG. 38 as well).

[0015] FIG. 7A-7B depicts a number of charged scFv linkers that find use in increasing or decreasing the pI of heterodimeric antibodies that utilize one or more scFv as a component. The (+H) positive linker finds particular use herein, particularly with anti-CD3 vl and vh sequences shown herein. A single prior art scFv linker with a single charge is referenced as “Whitlow”, from Whitlow et al., Protein Engineering 6(8):989-995 (1993). It should be noted that this linker was used for reducing aggregation and enhancing proteolytic stability in scFvs.

[0016] FIG. 8 depicts a list of engineered heterodimer-skewing Fc variants with heterodimer yields (determined by HPLC-CIEX) and thermal stabilities (determined by DSC). Not determined thermal stability is denoted by “n.d.”.

[0017] FIG. 9A-9E depict a select number of PD-1 ABDs, with additional anti-PD-1 ABDs being listed as SEQ ID NOs: 6209-11464, SEQ ID NOs: 11465-17134, SEQ ID NOs: 33003-33072, SEQ ID NOs: 33073-35394 and SEQ ID NOs: 36127-36146. The CDRs are underlined, the scFv linker is double underlined (in the sequences, the scFv linker is a positively charged scFv (GKPGS)₄ linker (SEQ ID NO: 37755), although as will be appreciated by those in the art, this linker can be replaced by other linkers, including uncharged or negatively charged linkers, some of which are depicted in FIG. 7), and the slashes indicate the border(s) of the variable domains. In addition, the naming convention illustrates the orientation of the scFv from N- to C-terminus. That is, “H1.279_L1.194” shows that the orientation is vh-scFv linker-vl (from N- to C-terminus, with optional domain linkers on one or both sides, depending on the format used), although these sequences may also be used in the opposite orientation, (from N- to C-terminus) vl-linker-vh. Similarly, “L1.194_H1.279” shows that the orientation is vl-scFv linker-vh (from N- to C-terminus, again with optional domain linkers), with the opposite orientation also included within the invention. As noted herein and is true for every sequence herein containing CDRs, the exact identification of the CDR locations may be slightly different depending on the numbering used as is shown in Table 1, and thus included herein are not only the CDRs that are underlined but also CDRs included within the vh and vl domains using other numbering systems. Furthermore, as for all the sequences in the Figures, these vh and vl sequences can be used either in a scFv format or in a Fab format.

[0018] FIG. 10A-10PP depict a number of CTLA-4 ABDs, with additional anti-CTLA-4 ABDs being listed as SEQ ID NOs: 21-2918, SEQ ID NOs: 2919-6208, SEQ ID NOs: 36739-36818 and SEQ ID NOs: 35395-35416. The CDRs are underlined, the scFv linker is double underlined (in the sequences, the scFv linker is a positively charged scFv (GKPGS)₄ linker (SEQ ID NO: 37755), although as will be appreciated by those in the art, this linker can be replaced by other linkers, including uncharged or negatively charged linkers, some of which are depicted in FIG. 7), and the slashes indicate the border(s) of the variable domains. As above, the naming convention illustrates the orientation of the scFv from N- to C-terminus; in the sequences listed in this figure, they are all oriented as vh-scFv linker-vl (from N- to C-terminus), although these sequences may also be used in the opposite orientation, (from N- to C-terminus) vl-linker-vh; additionally, some of the sequences in SEQ ID NOs: 21-2918, SEQ ID NOs: 2919-6208, SEQ ID NOs: 36739-36818 and SEQ ID NOs: 35395-35416 are in the opposite orientation. As noted herein and is true for every sequence herein containing CDRs, the exact identification of the CDR locations may be slightly different depending on the numbering used as is shown in Table 1, and thus included herein are not only the CDRs that are underlined but also CDRs included within the vh and vl domains using other numbering systems. Furthermore, as for all the sequences in the Figures, these vh and vl sequences can be used either in a scFv format or in a Fab format. In particular, many of the the figures include the XENP identifier for both the scFv format as well as the Fab format; see for example FIG. 10A, that shows that XENP19235 is the molecule using the Fab format and XENP 19769 is the scFv molecule.

[0019] FIGS. 11A-11N depict a number of LAG-3 ABDs, with additional anti-LAG-3 ABDs being listed as SEQ ID NOs: 17135-20764, SEQ ID NOs: 36819-36962, SEQ ID NOs: 35417-35606, SEQ ID NOs: 25194-32793 and SEQ ID NOs: 32794-33002. The CDRs are underlined, the scFv linker is double underlined (in the sequences, the scFv linker is a positively charged scFv (GKPGS)₄ linker, although as will be appreciated by those in the art, this linker can be replaced by other linkers, including uncharged or negatively charged linkers, some of which are depicted in FIG. 7), and the slashes indicate the border(s) of the variable domains. As above, the naming convention illustrates the orientation of the scFv from N- to C-terminus; in the sequences listed in this figure, they are all oriented as vh-scFv linker-vl (from N- to C-terminus), although these sequences may also be used in the opposite orientation, (from N- to C-terminus) vl-linker-vh; additionally, some of the sequences in SEQ ID NOs: 17135-20764, SEQ ID NOs: 36819-36962, SEQ ID NOs: 35417-35606, SEQ ID NOs: 25194-32793 and SEQ ID NOs: 32794-33002 are in the opposite orientation. As noted herein and is true for every sequence herein containing CDRs, the exact identification of the CDR locations may be slightly different depending on the numbering used as is shown in Table 1, and thus included herein are not only the CDRs that are underlined but also CDRs included within the vh and vl domains using other numbering systems. Furthermore, as for all the sequences in the Figures, these vh and vl sequences can be used either in a scFv format or in a Fab format.

[0020] FIG. 12A-12C depict a number of BTLA ABDs, with additional anti-BTLA ABDs being listed as SEQ ID NOs: 20885-21503 and SEQ ID NOs: 36707-36738. The CDRs are underlined, the scFv linker is double underlined (in the sequences, the scFv linker is a positively charged scFv (GKPGS)₄ linker, although as will be appreciated by those in the art, this linker can be replaced by other linkers, including uncharged or negatively charged linkers, some of which are depicted in FIG. 7), and the slashes indicate the border(s) of the variable domains. As above, the naming convention illustrates the orientation of the scFv from N- to C-terminus; in the sequences listed in this figure, they are all oriented as vh-scFv linker-vl (from N- to C-terminus), although these sequences may also be used in the opposite orientation, (from N- to C-terminus) vl-linker-vh; additionally, some of the sequences in SEQ ID NOs: 20885-21503 and SEQ ID NOs: 36707-36738 are in the opposite orientation. As noted herein and is true for every sequence herein containing CDRs, the exact identification of the CDR locations may be slightly different depending on the numbering used as is shown in Table 1, and thus included herein are not only the CDRs that are underlined but also CDRs included within the vh and vl domains using other numbering systems. Furthermore, as for all the sequences in the Figures, these vh and vl sequences can be used either in a scFv format or in a Fab format.

[0021] FIG. 13A-13I depict a number of TIM-3 ABDs, with additional anti-TIM-3 ABDs being listed as SEQ ID NOs: 20765-20884, SEQ ID NOs: 37587-37698 and SEQ ID NOs: 36347-36706. The CDRs are underlined, the scFv linker is double underlined (in the sequences, the scFv linker is a positively charged scFv (GKPGS)₄ linker, although as will be appreciated by those in the art, this linker can be replaced by other linkers, including uncharged or negatively charged linkers, some of which are depicted in FIG. 7), and the slashes indicate the border(s) of the variable domains. As above, the naming convention illustrates the orientation of the scFv from N- to C-terminus; in the sequences listed in this figure, they are all oriented as vh-scFv linker-vl (from N- to C-terminus), although these sequences may also be used in the opposite orientation, (from N- to C-terminus) vl-linker-vh; additionally, some of the sequences in SEQ ID NOs: 20765-20884, SEQ ID NOs: 37587-37698 and SEQ ID NOs: 36347-36706 are in the opposite orientation. As noted herein and is true for every sequence herein containing CDRs, the exact identification of the CDR locations may be slightly different depending on the numbering used as is shown in Table 1, and thus included herein are not only the CDRs that are underlined but also CDRs included within the vh and vl domains using other numbering systems. Furthermore, as for all the sequences in the Figures, these vh and vl sequences can be used either in a scFv format or in a Fab format.

[0022] FIG. 14A-14I depicts the amino acid sequences of specific anti-CTLA-4×anti-PD-1 antibodies in the bottle opener format (Fab-scFv-Fc). The antibodies are named using the Fab variable region first and the scFv variable region second, separated by a dash, followed by the chain designation (Fab-Fc heavy chain, scFv-Fc heavy chain or light chain). CDRs are underlined and slashes indicate the border(s) of the variable regions. The scFv domain has different orientations (N- to C-terminus) of either vh-linker-vl or vl-linker-vh as indicated, although this can be reversed. In addition, each sequence outlined herein can include or exclude the M428L/N434S variants in one or preferably both Fc domains, which results in longer half-life in serum.

[0023] FIG. 15A-15K depicts the amino acid sequences of specific anti-LAG-3×anti-PD-1 Fab-scFv-Fc bispecific antibodies. The antibodies are named using the Fab variable region first and the scFv variable region second, separated by a dash, followed by the chain designation (Fab-Fc heavy chain, scFv-Fc heavy chain or light chain). CDRs are underlined and slashes indicate the border(s) of the variable regions. The scFv domains have the orientation (N- to C-terminus) vl-linker-vh, although this can be reversed. In addition, each sequence outlined herein can include or exclude the M428L/N434S variants in one or preferably both Fc domains, which results in longer half-life in serum.

[0024] FIG. 16A-16D depicts the amino acid sequences of specific anti-BTLA×anti-PD-1 Fab-scFv-Fc bispecific antibodies. The antibodies are named using the Fab variable region first and the scFv variable region second, separated by a dash, followed by the chain designation (Fab-Fc heavy chain, scFv-Fc heavy chain or light chain). CDRs are underlined and slashes indicate the border(s) of the variable regions. The scFv domains have the orientation (N- to C-terminus) vl-linker-vh, although this can be reversed. In addition, each sequence outlined herein can include or exclude the M428L/N434S variants in one or preferably both Fc domains, which results in longer half-life in serum.

[0025] FIG. 17A-17O depicts the amino acid sequences of specific anti-LAG-3×anti-CTLA-4 Fab-scFv-Fc bispecific antibodies. The antibodies are named using the Fab variable region first and the scFv variable region second, separated by a dash, followed by the chain designation (Fab-Fc heavy chain, scFv-Fc heavy chain or light chain). CDRs are underlined and slashes indicate the border(s) of the variable regions. The scFv domains have the orientation (N- to C-terminus) vh-linker-vl, although this can be reversed. In addition, each sequence outlined herein can include or exclude the M428L/N434S variants in one or preferably both Fc domains, which results in longer half-life in serum.

[0026] FIG. 18 shows the results of some anti-LAG-3 hybridoma screening. 1 μg of human LAG-3-hIg in 10 μL was mixed with 50 μL of hybridoma supernatant (diluted 2-fold, 8 times in RPMI media with 10% FBS) for 20 minutes at room temperature. 40 μL of Daudi or Ramos cells (which endogenously express MHC-II) were added and incubated at 4° C. for 30 minutes. The cells were then washed and incubated with anti-human-Fc-Alexa647 secondary antibody for 30 minutes. Cells were then washed and analyzed by FACS for Alexa647.

[0027] FIG. 19A-19B depict cytokine release assays (A:IL-2, B: IFNγ) after SEB stimulation of human PBMCs and treatment with an anti-CTLA-4×anti-PD-1 bispecific antibody.

[0028] FIG. 20A-20C depict CD45+ events and CD8+ events on Day 14 after human PBMCs were engrated into NSG mice on Day 0 followed by dosing with the indicated test articles on Day 1.

[0029] FIG. 21A-21B depicts T cell binding in an SEB-stimulated PBMC assay by chimeric antibodies generated from anti-TIM-3 hybridomas.

[0030] FIG. 22 depicts some anti-TIM-3 antigen binding domain engineering data from three experiments. This depicts XENP code for bivalent embodiments, the derivative clone, the designations of the vh and vl engineered domains, the KD binding constant, association constant and dissociation constant against human TIM-3 as measured by Octet.

[0031] FIG. 23A-23N depicts some anti-PD-1 antigen binding domain engineering data. This depicts the XENP code for the bivalent and scFv embodiments, the designation of the vh and vl engineered domains, the scFv orientation (N- to C-terminal), the KD binding constant against human PD-1 as measured by Octet, and the Tm of the scFv.

[0032] FIG. 24A-24G depicts the results of some anti-CTLA-4 Fab screening. This depicts the XENP code for the Fab and scFv embodiments, the designation of the vh and vl engineered domains, the KD binding constant against human and cyno CTLA-4 as measured by Octet, and the Tm of the scFv and Fab. Additionally, the number of sequence 9-mers that were an exact match to at least one human VH or VL germline are depicted as a measure of humanness for the variable regions of both Fabs and scFvs.

[0033] FIG. 25 depicts a mixed lymphocyte reaction looking enhancement of IL-2 release by nivolumab (anti-PD-1 monoclonal antibody, marketed as Opdivo®) alone, ipilimumab alone (anti-CTLA-4 monoclonal antibody, marketed as Yervoy®), a prototype anti-CTLA-4×anti-PD-1 bispecific based on the nivolumab and ipilimumab arms, and a “one-armed” combination control.

[0034] FIG. 26 depicts mixed lymphocyte reaction looking at enhancement of IL-2 release by anti-CTLA-4×anti-PD-1 bispecific antibodies with variant anti-CTLA-4 Fab arms and variant anti-PD-1 scFv arms, as well as nivolumab alone, ipilimumab alone, and a prototype anti-CTLA-4×anti-PD-1 bispecific based on the nivolumab and ipilimumab arms as controls.

[0035] FIG. 27 shows that anti-CTLA-4×anti-PD-1 bispecifics enhance engraftment (as measured by human CD45 counts) in human PBMC-engrafted NSG mice. Enhancement is greater than that seen with nivolumab (XENP16432) alone (dashed line).

[0036] FIG. 28 depicts the correlation between body weight and CD45 cell count in Graft-versus-Host disease, demonstrating that CD45 cell levels are predictive of disease.

[0037] FIG. 29 depicts the correlation between CD45 cell count and IFNγ release in the study depicted in FIG. 27.

[0038] FIG. 30 shows that anti-CTLA-4×anti-PD-1 bispecifics enhance engraftment (as measured by human CD45 counts) in human PBMC-engrafted NSG mice. Enhancement is greater than that seen with nivolumab (XENP 16432) alone (dashed line).

[0039] FIG. 31 depicts the correlation between CD45 cell count and IFNγ release in the study depicted in FIG. 30.

[0040] FIG. 32 shows the comparison of test article effects between the studies depicted in FIGS. 27 and 30 demonstrating the consistent superiority of anti-PD-1×anti-CTLA-4 bispecific checkpoint antibodies over nivolumab alone.

[0041] FIG. 33A-33B show the results of mixed lymphocyte reactions to evaluate anti-CTLA-4×anti-PD-1, anti-LAG-3×anti-PD-1, and anti-LAG-3×anti-CTLA-4 bispecifics. Analyte levels were normalized to those induced by nivolumab alone (values greater than one represent an enhancement relative to nivolumab).

[0042] FIG. 34 shows SEB reactions to evaluate anti-LAG-3×anti-CTLA-4 bispecifics. The anti-LAG-3×anti-CTLA-4 bispecific itself enhances the IL-2 response relative to control, although it is inferior to nivolumab alone. However, the anti-LAG-3×anti-CTLA-4 bispecific combined with nivolumab leads to significantly higher IL-2 response than either alone.

[0043] FIG. 35 Anti-CTLA-4×anti-PD-1, anti-LAG-3×anti-PD-1, anti-BTLA×anti-PD-1, and anti-LAG-3×anti-CTLA-4 bispecifics enhance engraftment (as measured by human CD45 counts) in human PBMC-engrafted NSG mice. Enhancement is greater than that seen with nivolumab (XENP 16432) alone. Also, the anti-LAG-3×anti-CTLA-4 bispecific combines with nivolumab to yield the highest engraftment levels.

[0044] FIG. 36A-36B show that the anti-BTLA×anti-PD-1 bispecifics require disruption of the HVEM/BTLA interaction to possess equivalent de-repressive activity as nivolumab.

[0045] FIG. 37A-37E shows the sequences of several useful bottle opener format backbones based on human IgG1, without the Fv sequences (e.g. the scFv and the vh and vl for the Fab side). Bottle opener backbone 1 is based on human IgG1 (356E/358M allotype), and includes the S364K/E357Q:L368D/K370S skew variants, the N208D/Q295E/N384D/Q418E/N421D pI variants on the Fab side and the E233P/L234V/L235A/G236del/S267K ablation variants on both chains. Bottle opener backbone 2 is based on human IgG1 (356E/358M allotype), and includes different skew variants, the N208D/Q295E/N384D/Q418E/N421D pI variants on the Fab side and the E233P/L234V/L235A/G236del/S267K ablation variants on both chains. Bottle opener backbone 3 is based on human IgG1 (356E/358M allotype), and includes different skew variants, the N208D/Q295E/N384D/Q418E/N421D pI variants on the Fab side and the E233P/L234V/L235A/G236del/S267K ablation variants on both chains. Bottle opener backbone 4 is based on human IgG1 (356E/358M allotype), and includes different skew variants, the N208D/Q295E/N384D/Q418E/N421D pI variants on the Fab side and the E233P/L234V/L235A/G236del/S267K ablation variants on both chains. Bottle opener backbone 5 is based on human IgG1 (356D/358L allotype), and includes the S364K/E357Q:L368D/K370S skew variants, the N208D/Q295E/N384D/Q418E/N421D pI variants on the Fab side and the E233P/L234V/L235A/G236del/S267K ablation variants on both chains. Bottle opener backbone 6 is based on human IgG1 (356E/358M allotype), and includes the S364K/E357Q:L368D/K370S skew variants, N208D/Q295E/N384D/Q418E/N421D pI variants on the Fab side and the E233P/L234V/L235A/G236del/S267K ablation variants on both chains, as well as an N297A variant on both chains. Bottle opener backbone 7 is identical to 6 except the mutation is N297S. Alternative formats for bottle opener backbones 6 and 7 can exclude the ablation variants E233P/L234V/L235A/G236del/S267K in both chains. Backbone 8 is based on human IgG4, and includes the S364K/E357Q:L368D/K370S skew variants, the N208D/Q295E/N384D/Q418E/N421D pI variants on the Fab side and the E233P/L234V/L235A/G236del/S267K ablation variants on both chains, as well as a S228P (EU numbering, this is S241P in Kabat) variant on both chains that ablates Fab arm exchange as is known in the art. Alternative formats for bottle opener backbone 8 can exclude the ablation variants E233P/L234V/L235A/G236del/S267K in both chains Backbone 9 is based on human IgG2, and includes the S364K/E357Q:L368D/K370S skew variants, the N208D/Q295E/N384D/Q418E/N421D pI variants on the Fab side. Backbone 10 is based on human IgG2, and includes the S364K/E357Q:L368D/K370S skew variants, the N208D/Q295E/N384D/Q418E/N421D pI variants on the Fab side as well as a S267K variant on both chains.

[0046] As will be appreciated by those in the art and outlined below, these sequences can be used with any vh and vl pairs outlined herein, with one monomer including a scFv (optionally including a charged scFv linker) and the other monomer including the Fab sequences (e.g. a vh attached to the “Fab side heavy chain” and a vl attached to the “constant light chain”). That is, any Fv sequences outlined herein for anti-CTLA-4, anti-PD-1, anti-LAG-3, anti-TIM-3, anti-TIGIT and anti-BTLA, whether as scFv (again, optionally with charged scFv linkers) or as Fabs, can be incorporated into these FIG. 37 backbones in any combination. The constant light chain depicted in FIG. 37A can be used for all of the constructs in the figure, although the kappa constant light chain can also be substituted.

[0047] It should be noted that these bottle opener backbones find use in the Central-scFv format of FIG. 1F, where an additional, second Fab (vh-CH1 and vl-constant light) with the same antigen binding as the first Fab is added to the N-terminus of the scFv on the “bottle opener side”.

[0048] Included within each of these backbones are sequences that are 90, 95, 98 and 99% identical (as defined herein) to the recited sequences, and/or contain from 1, 2, 3, 4, 5, 6, 7, 8, 9 or 10 additional amino acid substitutions (as compared to the “parent” of the Figure, which, as will be appreciated by those in the art, already contain a number of amino acid modifications as compared to the parental human IgG1 (or IgG2 or IgG4, depending on the backbone). That is, the recited backbones may contain additional amino acid modifications (generally amino acid substitutions) in addition to the skew, pI and ablation variants contained within the backbones of this figure.

[0049] FIG. 38A-38 D shows the sequences of a mAb-scFv backbone of use in the invention, to which the Fv sequences of the invention are added. mAb-scFv backbone 1 is based on human IgG1 (356E/358M allotype), and includes the S364K/E357Q:L368D/K370S skew variants, the N208D/Q295E/N384D/Q418E/N421D pI variants on the Fab side and the E233P/L234V/L235A/G236del/S267K ablation variants on both chains. Backbone 2 is based on human IgG1 (356D/358L allotype), and includes the S364K/E357Q:L368D/K370S skew variants, the N208D/Q295E/N384D/Q418E/N421D pI variants on the Fab side and the E233P/L234V/L235A/G236del/S267K ablation variants on both chains. Backbone 3 is based on human IgG1 (356E/358M allotype), and includes the S364K/E357Q:L368D/K370S skew variants, N208D/Q295E/N384D/Q418E/N421D pI variants on the Fab side and the E233P/L234V/L235A/G236del/S267K ablation variants on both chains, as well as an N297A variant on both chains. Backbone 4 is identical to 3 except the mutation is N297S. Alternative formats for mAb-scFv backbones 3 and 4 can exclude the ablation variants E233P/L234V/L235A/G236del/S267K in both chains. Backbone 5 is based on human IgG4, and includes the S364K/E357Q:L368D/K370S skew variants, the N208D/Q295E/N384D/Q418E/N421D pI variants on the Fab side and the E233P/L234V/L235A/G236del/S267K ablation variants on both chains, as well as a S228P (EU numbering, this is S241P in Kabat) variant on both chains that ablates Fab arm exchange as is known in the art Backbone 6 is based on human IgG2, and includes the S364K/E357Q:L368D/K370S skew variants, the N208D/Q295E/N384D/Q418E/N421D pI variants on the Fab side. Backbone 7 is based on human IgG2, and includes the S364K/E357Q:L368D/K370S skew variants, the N208D/Q295E/N384D/Q418E/N421D pI variants on the Fab side as well as a S267K variant on both chains.

[0050] As will be appreciated by those in the art and outlined below, these sequences can be used with any vh and vl pairs outlined herein, with one monomer including both a Fab and an scFv (optionally including a charged scFv linker) and the other monomer including the Fab sequence (e.g. a vh attached to the “Fab side heavy chain” and a vl attached to the “constant light chain”). That is, any Fv sequences outlined herein for anti-CTLA-4, anti-PD-1, anti-LAG-3, anti-TIM-3, anti-TIGIT and anti-BTLA, whether as scFv (again, optionally with charged scFv linkers) or as Fabs, can be incorporated into this FIG. 38 backbone in any combination. The monomer 1 side is the Fab-scFv pI negative side, and includes the heterodimerization variants L368D/K370S, the isosteric pI variants N208D/Q295E/N384D/Q418E/N421D, the ablation variants E233P/L234V/L235A/G236del/S267K, (all relative to IgG1). The monomer 2 side is the scFv pI positive side, and includes the heterodimerization variants 364K/E357Q. However, other skew variant pairs can be substituted, particularly [S364K/E357Q:L368D/K370S]; [L368D/K370S:S364K]; [L368E/K370S:S364K]; [T411T/E360E/Q362E:D401K]; [L368D/K370S:S364K/E357L], [K370S:S364K/E357Q], [T366S/L368A/Y407V:T366W] and [T366S/L368A/Y407V/Y394C:T366W/S354C].

[0051] The constant light chain depicted in FIG. 38A can be used for all of the constructs in the figure, although the kappa constant light chain can also be substituted.

[0052] It should be noted that these mAb-scFv backbones find use in the both the mAb-Fv format of FIG. 1H (where one monomer comprises a vl at the C-terminus and the other a vh at the C-terminus) as well as the scFv-mAb format of FIG. 1E (with a scFv domain added to the C-terminus of one of the monomers).

[0053] Included within each of these backbones are sequences that are 90, 95, 98 and 99% identical (as defined herein) to the recited sequences, and/or contain from 1, 2, 3, 4, 5, 6, 7, 8, 9 or 10 additional amino acid substitutions (as compared to the “parent” of the Figure, which, as will be appreciated by those in the art, already contain a number of amino acid modifications as compared to the parental human IgG1 (or IgG2 or IgG4, depending on the backbone). That is, the recited backbones may contain additional amino acid modifications (generally amino acid substitutions) in addition to the skew, pI and ablation variants contained within the backbones of this figure.

[0054] FIG. 39A-39B depicts a matrix of possible combinations for the bispecific checkpoint antibodies of the present invention. In FIG. 39A, the combinations are not bound by format, and any format of FIG. 1 can be used. An “A” in a box means that the CDRs from the first ABD (listed on the X axis) can be combined with the CDRs of the second ABD (listed on Y axis). A “B” in the box means the vh and vl chains from the first ABD can be combined with the vh and vl chains from the second ABD. A “C” in the box means that the CDRs from the first ABD can be combined with the vh and vl chains from the second ABD. A “D” in the box means that the vh and vl chains from the first ABD can be combined with the CDRs from the second ABD. An “E” in the box means that the PD-1 ABD is selected from the group of 1G6_H1.279_L1.194; 1G6_H1.280_L1.224; 1G6_L1.194_H1.279; 1G6_L1.210_H1.288; and 2E9_H1L1. An “F” in the box means that the CTLA-4 ABD is selected from the group of [CTLA-4]_H0.25_L0; [CTLA-4]_H0.26_L0; [CTLA-4]_H0.27_L0; [CTLA-4]_H0.29_L0; [CTLA-4]_H0.38_L0; [CTLA-4]_H0.39_L0; 0[CTLA-4]_H0.40_L0; [CTLA-4]_H0.70_L0; [CTLA-4]_H0L0.22; [CTLA-4]_H2L0; [CTLA-4]_H3.21_L0.124; [CTLA-4]_H3.21_L0.129; [CTLA-4]_H3.21_L0.132; [CTLA-4]_H3.23_L0.124; [CTLA-4]_H3.23_L0.129; [CTLA-4]_H3.23_L0.132; [CTLA-4]_H3.25_L0.124; [CTLA-4]_H3.25_L0.129; [CTLA-4]_H3.25_L0.132; [CTLA-4]_H3.4_L0.118; [CTLA-4]_H3.4_L0.119; [CTLA-4]_H3.4_L0.12; [CTLA-4]_H3.4_L0.121; [CTLA-4]_H3.4_L0.122; [CTLA-4]_H3.4_L0.123; [CTLA-4]_H3.4_L0.124; [CTLA-4]_H3.4_L0.125; [CTLA-4]_H3.4_L0.126; [CTLA-4]_H3.4_L0.127; [CTLA-4]_H3.4_L0.128; [CTLA-4]_H3.4_L0.129; [CTLA-4]_H3.4_L0.130; [CTLA-4]_H3.4_L0.131; [CTLA-4]_H3.4_L0.132; [CTLA-4]_H3.5_L2.1; [CTLA-4]_H3.5_L2.2; [CTLA-4]_H3.5_L2.3; [CTLA-4]_H3_L0; [CTLA-4]_H3_L0.22; [CTLA-4]_H3_L0.44; [CTLA-4]_H3_L0.67; and [CTLA-4]_H3_L0.74. A “G” in the box means that the TIM-3 ABD is selected from the group of 1D10_H0L0; 1D12_H0L0; 3H3_H1_L2.1; 6C8_H0L0; 6D9_H0_1D12_L0; 7A9_H0L0; 7B11_H0L0; 7B11var_H0L0; and 7C2_H0L0. An “H” in the box means that the LAG-3 ABD is selected from the group of identifiers 2A11_H0L0; 2A11_H1.125_L2.113; 2A11_H1.144_L2.142; 2A11_H1_L2.122; 2A11_H1_L2.123; 2A11_H1_L2.124; 2A11_H1_L2.25; 2A11_H1_L2.47; 2A11_H1_L2.50; 2A11_H1_L2.91; 2A11_H1_L2.93; 2A11_H1_L2.97; 2A11_H1L1; 2A11_H1L2; 2A11_H2L2; 2A11_H3L1; 2A11_H3L2; 2A11_H4L1; 2A11_H4L2; 7G8_H0L0; 7G8_H1L1; 7G8_H3.18_L1.11; 7G8_H3.23_L1.11; 7G8_H3.28_L1; 7G8_H3.28_L1.11; 7G8_H3.28_L1.13; 7G8_H3.30_L1.34; 7G8_H3.30_L1.34; and 7G8_H3L1. An “I” in box means that A “J” in the box means that the BTLA ABD is selected from the group 9C6_H0L0; 9C6_H1.1_L1; and 9C6_H1.1_L1. FIG. 39B is identical to FIG. 39A except that FIG. 39B is specific to the bottle opener format. In B, when the first ABD binds PD-1, the first ABD is the scFv monomer, and the other ABD (CTLA-4, LAG-3, TIGIT, TIM-3 and BTLA) are in the Fab monomer. In B, when the first ABD binds CTLA-4, it is in the scFv monomer (except when combined with PD-1, when it is the Fab side), with the other ABD (CTLA-4, LAG-3, TIGIT, TIM-3 and BTLA) are in the Fab monomer.

[0055] FIG. 40 depicts a matrix of possible bottle opener format combinations. A “Q” in the box means that the first ABD domain (again, listed on the X axis) is the scFv and the second ABD (again, listed on the Y axis) is the Fab side. An “R” in the box means that the first ABD is the Fab side and the second ABD is the scFv. An “S” in the box means that the first ABD is anti-PD-1 and is the scFv side. A “T” in the box means that the first ABD is anti-CTLA-4 and is the scFv side. A “U” in the box means that the first ABD is anti-TIM-3 and is the scFv side. A “V” in the box means that the first ABD is anti LAG-3 and is the scFv side. A “W” in the box means that the first ABD is anti TIGIT and is the scFv side. An “X” in the box means that the first ABD is anti-BTLA and is the scFv side. In addition, each combination outlined in FIG. 39 can use the CDRs, scFvs and vh and vl combinations of FIG. 38. In addition, particular embodiments of the bottle opener backbones of FIG. 39 are the sequences of FIG. 36.

[0056] FIG. 41A-41B depicts a schematic associated with the benefit that a bispecific checkpoint antibody can provide over combination therapies using two different antibodies or drugs.

[0057] FIG. 42 depicts a similar schematic, showing that because tumor TILs co-express multiple checkpoints, a bivalent binding increases avidity, enhancing anti-tumor activity and avoiding peripheral toxicity.

[0058] FIG. 43 shows that bispecific checkpoint antibodies of the invention (e.g. anti-LAG-3×anti-CTLA-4) can be combined with other monospecific checkpoint antibodies (e.g. nivolumab, pemobrolizumab).

[0059] FIG. 44 shows that PD-1 and CTLA-4 are coexpressed in a variety of tumor types, including bladder, breast, colon, prostate, lung, melanoma and ovarian cancer.

[0060] FIG. 45A-45C depicts a comparison of the enhancement of IL-2 B) by anti-PD-1 bivalent and anti-CTLA-4×anti-PD-1 and C) and one-arm anti-PD-1+one-arm anti-CTLA-4 and anti-CTLA-4×anti-PD-1 in an SEB-stimulated PBMC assay as well as C) a control experiment without SEB stimulation.

[0061] FIG. 46A-46B depicts blocking of PD-1 to ligands PD-L1 and PD-L2 by an exemplary anti-CTLA-4×anti-PD-1 bispecific in comparison to one-arm anti-PD-1 and one-arm anti-CTLA-4 antibodies.

[0062] FIG. 47 depicts T cell binding in an SEB-stimulated PBMC assay by an exemplary anti-CTLA-4×anti-PD-1 bispecific antibody.

[0063] FIG. 48 shows that anti-CTLA-4×anti-PD-1 bispecifics enhance engraftment (as measured by human CD45 counts) in human PBMC-engrafted NSG mice. Enhancement is greater than that seen with nivolumab (XENP16432) alone.

[0064] FIG. 49 shows that the anti-BTLA×anti-PD-1 bispecific candidates bind more avidly to T cells compared to “one-armed” controls in an SEB-stimulated PBMC assay.

[0065] FIG. 50A-50B show that anti-BTLA×anti-PD-1 chimeric bispecific promotes IL-2 secretion from SEB stimulated PBMCs. PBMCs were stimulated with 10 ng/mL SEB for 3 days with indicated test articles. Cell supematants were collected and assayed with MSD for indicated analyte. A: 20 μg/mL test article; B 5 μg/mL test article.

[0066] FIG. 51A-51B show that anti-BTLA×anti-PD-1 chimeric bispecific promotes IFNγ secretion from SEB stimulated PBMCs. PBMCs were stimulated with 10 ng/mL SEB for 3 days with indicated test articles. Cell supernatants were collected and assayed with MSD for indicated analyte. A: 20 μg/mL test article; B 5 μg/mL test article.

[0067] FIG. 52A-52B shows that anti-BTLA×anti-PD-1 bispecific antibodies (chimeric and with humanized/optimized anti-BTLA Fab arms) promotes IL-2 secretion and IFN-γ from SEB stimulated PBMCs. Both panels were PBMCs stimulated with 10 ng/mL SEB for 3 days with indicated 20 μg/mL test articles. Cell supernatants were collected 72 hours later and assayed for indicated analyte.

[0068] FIG. 53A-53F shows the time course (Days 10, 14 and 22) enhancement in CD45 cell counts and IFNγ secretion by an exemplary anti-BTLA×anti-PD-1 bispecific antibody in a GVHD study.

[0069] FIG. 54 depicts some 9C6 anti-BTLA antigen binding domain engineering data. This depicts XENP code for bivalent embodiments, the designations of the vh and vl engineered domains, and the KD binding constant against human BTLA as measured by Octet.

[0070] FIG. 55A-55E depicts some 2A11 anti-LAG-3 antigen binding domain engineering data. This depicts XENP code for Fab embodiments, the designations of the vh and vl engineered domains, the KD binding constant against human LAG-3 as measured by Octet and the Tm of the Fab.

[0071] FIG. 56A-56K depicts some 7G8 anti-LAG-3 antigen binding domain engineering data. This depicts XENP code for Fab embodiments, the designations of the vh and vl engineered domains, the KD binding constant against human LAG-3 as measured by Octet and the Tm of the Fab.

[0072] FIG. 57A-57B depicts the Kds for anti-LAG-3×anti-CTLA-4 bispecific, heterodimeric bottle opener formats based on either optimized 2A11 or 7G8 anti-LAG-3 Fab arms as measured by Octet.

[0073] FIG. 58 shows that anti-LAG-3 (7G8)×anti-CTLA-4 and anti-LAG-3 (2A11)×anti-CTLA-4 bispecifics bind more avidly than one-armed anti-LAG-3 controls. PBMCs were stimulated with 100 ng/mL SEB for 3 days. Cells were then treated with the indicated test articles for 30 min at 4C degrees and washed twice. Cells were then treated with an anti-CD3-FITC and anti-human-Fc-APC antibody. Cells were then washed twice and analyzed by flow cytometry.

[0074] FIG. 59A-59B shows that 7G8 based anti-LAG-3×anti-CTLA-4 bispecifics exhibit more selective function on PBMCs than 2A11 based anti-LAG-3×anti-CTLA-4 bispecifics as indicated by enhancement in IL-2 and IFNγ release. PBMCs were stimulated with 500 ng/mL of SEB for 2 days. Cells were then washed twice in culture medium and stimulated with 500 ng/mL SEB in combination with the indicated amounts of test articles. Cells were assayed for the indicated analyte (either IL-2 or IFN-γ) 24 hours after treatment. Each point represents a unique donor tested in technical singlet.

[0075] FIG. 60A-60B depicts mixed lymphocyte reactions (MLRs) with anti-LAG-3×anti-CTLA-4 bispecific antibodies. 40 unique MLR reactions were made in the presence of 20 ug/mL of indicated test articles. Cell supematants were then assayed by MSD 6 days after treatment for A: IL-2 and B: IFNγ.

[0076] FIG. 61A-61B shows enhancement of IL-2 and IFNγ release by additional anti-LAG-3×anti-CTLA-4 candidates in the SEB assays. PBMCs were stimulated with 500 ng/mL SEB for 2 days. Cells were then washed twice in culture medium and stimulated with 500 ng/mL SEB in combination with indicated amounts of test articles. Cells were assayed for indicated analyte (either IL-2 or IFN-γ) 24 hours after treatment. Each point represents a unique donor tested in technical singlet.

[0077] FIG. 62A-62B depicts the Kds for anti-LAG-3×anti-PD-1 bispecific, heterodimeric bottle opener formats based on either optimized 2A11 or 7G8 anti-LAG-3 Fab arms as measured by Octet.

[0078] FIG. 63A-63B depicts the ability of humanized/optimized 7G8 and 2A11 anti-LAG-3 clones to block LAG-3 binding to Daudi cells endogenously expressing MHC-II.

[0079] FIG. 64A-64B depicts anti-LAG-3×anti-PD-1 candidate function on SEB stimulated T cells. PBMCs were stimulated with 500 ng/ml SEB for 2 days. Cells were then washed twice in culture medium and stimulated with 500 ng/mL SEB in combination with indicated amounts of test articles. Cells were assayed for indicated analyte 24 h after treatment. Each point represents a unique donor tested in technical singlet.

[0080] FIG. 65 are graphs, showing that tumor infiltrating lymphocytes (TILs) co-express multiple checkpoint receptors in various tumors. In particular, the graphs show that various tumors coexpress PD-1 and CTLA-4, PD-1 and BTLA, PD-1 and LAG-3; and LAG-3 and CTLA-4. The results shown are based upon data generated by the TCGA Research network: http://cancergenome.nih.gov/

[0081] FIG. 66 shows that subject bispecific antibodies provided herein selectively target dual-checkpoint positive T cells. Bispeicifc PD-1×LAG-3 antibodies are used to show PD-1 and LAG-3 receptor occupancy in CD3+ T-cells stimulated with staphylococcal enterotoxin B (SEB) as compared to a negative control.

[0082] FIG. 67A-67F are graphs showing that component antibody domains of the subject antibodies provided herein are capable of blocking checkpoint receptor/ligand interactions. In particular, a bispecific antibody comprising a 1G6 anti-PD-1 scFv arm is capable of blocking PD-1/PD-L1 and PD-1/PD-L2 interactions; 7G8 anti-LAG-3 one arm is capable of blocking LAG-3/MHC II interaction; a bispecific antibody comprising an exemplary anti-PD-1 Fab arm is capable of blocking CTLA-4/CD80 and CTLA-4/CD86 interactions; and a bispecific antibody comprising a 9C6 anti-BTLA Fab arm is capable of blocking BTLA/HVEM interaction.

[0083] FIG. 68 compares the enhancement of IL-2 release by an exemplary anti-CTLA-4×anti-PD-1 bispecific antibody and nivolumab.

[0084] FIG. 69 compares the enhancement of IL-2 release by an exemplary anti-LAG-3×anti-CTLA-4 bispecific antibody, the same bispecific antibody in combination with nivolumab, and nivolumab alone.

[0085] FIG. 70 compares the enhancement of IL-2 release by an exemplary anti-LAG-3×anti-PD-1 bispecific antibody and nivolumab.

[0086] FIG. 71 compares the enhancement of IL-2 release by an exemplary anti-BTLA×anti-PD-1 bispecific antibody and nivolumab.

[0087] FIG. 72 compares the enhancement of GVHD (as indicated by CD45 cell count) by an exemplary anti-PD-1×anti-CTLA-4 bispecific antibody, nivolumab alone, and nivolumab in combination with ipilimumab.

[0088] FIG. 73 compares the enhancement of GVHD (as indicated by CD45 cell count) by an exemplary anti-BTLA×anti-PD-1 bispecific antibody and nivolumab.

[0089] FIG. 74 compares the enhancement of GVHD (as indicated by CD45 cell count) by an exemplary anti-LAG-3×anti-CTLA-4 bispecific antibody, the same bispecific antibody in combination with nivolumab, and nivolumab alone.

[0090] FIG. 75 compares the enhancement of GVHD (as indicated by CD45 cell count) by an exemplary anti-LAG-3×anti-PD-1 bispecific antibody and nivolumab.

[0091] FIGS. 76A-76D depicts two studies, showing that anti-CTLA-4×anti-PD-1 bispecific antibodies can promote in vivo T cell mediated anti-tumor efficacy. KG1a-luc cancer cells were engrafted into mice. Twenty-one days later, huPMCs were engrafted into the same mice and weekly antibody treatments (anti-CTLA-4×anti-PD-1 bispecific antibodies; anti-PD-1 bivalent antibodies; or anti-PD-1 bivalent antibody+anti-CTLA-4 bivalent antibody) were administered. IVIS cancer cell imaging was conducted on the mice to assess tumor size, as determined by change in tumor flux.

### III. DETAILED DESCRIPTION OF THE INVENTION

### A. Incorporation of Materials

[0092] 1. Figures and Legends

[0093] All the figures and accompanying legends of U.S. Ser. Nos. 62,350,145, 62/353,511 and 62/420,500 are expressly and independently incorporated by reference herein in their entirety, particularly for the amino acid sequences depicted therein.

[0094] 2. Sequences

[0095] Reference is made to the accompanying sequence listing as following: anti-PD-1 sequences suitable for use as ABDs include SEQ ID NOs: 6209-11464 (PD-1 scFv sequences, although the Fv sequences therein can be formatted as Fabs), SEQ ID NOs: 11465-17134 (PD-1 Fab sequences, although the Fv sequences therein can be formatted as scFvs), SEQ ID NOs: 33003-33072 (additional PD-1 Fab sequences, although the Fv sequences therein can be formatted as scFvs), SEQ ID NOs: 33073-35394 (additional PD-1 scFv sequences, although the Fv sequences therein can be formatted as Fabs) and SEQ ID NOs: 36127-36146 (PD-1 bivalent constructs, which can be formatted as either scFvs or Fabs). Anti-CTLA-4 sequences suitable for use as ABDs include SEQ ID NOs: 21-2918 (CTLA-4 scFv sequences, although the Fv sequences therein can be formatted as Fabs), SEQ ID NOs: 2919-6208 (CTLA-4 Fab sequences, although the Fv sequences therein can be formatted as scFvs), SEQ ID NOs: 36739-36818 (additional CTLA-4 Fab sequences, although the Fv sequences therein can be formatted as scFvs) and SEQ ID NOs: 35395-35416 (CTLA-4 one armed constructs, which can be formatted as either Fabs or scFvs). Anti-LAG-3 sequences suitable for use as ABDs include SEQ ID NOs: 17135-20764 (LAG-3 Fabs, although the Fv sequences therein can be formatted as scFvs), SEQ ID NOs: 36819-36962 (additional LAG-3 Fabs although the Fv sequences therein can be formatted as scFvs), SEQ ID NOs: 35417-35606 (additional LAG-3 Fabs although the Fv sequences therein can be formatted as scFvs), SEQ ID NOs: 25194-32793 (additional LAG-3 Fabs although the Fv sequences therein can be formatted as scFvs) and SEQ ID NOs: 32794-33002 (one armed LAG-3 constructs which can be formatted as either Fabs or scFvs). Anti-TIM-3 sequences suitable for use as ABDs include SEQ ID NOs: 20765-20884 (TIM-3 Fabs, although the Fv sequences therein can be formatted as scFvs), SEQ ID NOs: 37587-37698 (additional TIM-3 Fabs, the Fv sequences therein can be formatted as scFvs) and SEQ ID NOs: 36347-36706 (bivalent TIM-3 constructs which can be formatted as either Fabs or scFvs). Anti-BTLA sequences suitable for use as ABDs include SEQ ID NOs: 20885-21503 (BTLA Fabs although the Fv sequences therein can be formatted as scFvs) and SEQ ID NOs: 36707-36738 (additional BTLA Fabs although the Fv sequences therein can be formatted as scFvs). Anti-TIGIT sequences suitable for use as ABDs include SEQ ID NOs: 21504-21523 (TIGIT Fab although the Fv sequences therein can be formatted as scFvs) and SEQ ID NOs: 37435-37586 (additional TIGIT Fabs although the Fv sequences therein can be formatted as scFvs).

[0096] Bispecific antibodies of the invention include LAG3×CTLA4 constructs of SEQ ID NOs: 35607-35866 and SEQ ID NOs: 21524-22620. PD-1×CTLA4 constructs include those listed as SEQ ID NOs: 36167-36346 and SEQ ID NOs: 23316-23735. PD-1×TIM3 constructs include those listed as SEQ ID NOs: 25174-25193. PD-1×LAG3 constructs include those listed as SEQ ID NOs: 35867-36126 and SEQ ID NOs: 23736-25133. PD-1×TIGIT constructs include those listed as SEQ ID NOs: 25134-25173. PD-1×BTLA constructs include those listed as SEQ ID NOs: 22724-23315 and SEQ ID NOs: 36147-36166. CTLA4×BTLA constructs include those listed as SEQ ID NOs: 22624-22723. Finally, the names for XENP23552, XENP22841, XENP22842, XENP22843, XENP22844, XENP22845, XENP22846, XENP22847, XENP22848, XENP22849, XENP22850, XENP22851, XENP22852, XENP22858, XENP22854, XENP22855 all should have included the “M428L/N434S” notation in the title, which were inadvertantly left off.

### B. Overview

[0097] Therapeutic antibodies directed against immune checkpoint inhibitors such as PD-1 are showing great promise in limited circumstances in the clinic for the treatment of cancer. Cancer can be considered as an inability of the patient to recognize and eliminate cancerous cells. In many instances, these transformed (e.g. cancerous) cells counteract immunosurveillance. There are natural control mechanisms that limit T-cell activation in the body to prevent unrestrained T-cell activity, which can be exploited by cancerous cells to evade or suppress the immune response. Restoring the capacity of immune effector cells-especially T cells-to recognize and eliminate cancer is the goal of immunotherapy. The field of immuno-oncology, sometimes referred to as “immunotherapy” is rapidly evolving, with several recent approvals of T cell checkpoint inhibitory antibodies such as Yervoy, Keytruda and Opdivo. These antibodies are generally referred to as “checkpoint inhibitors” because they block normally negative regulators of T cell immunity. It is generally understood that a variety of immunomodulatory signals, both costimulatory and coinhibitory, can be used to orchestrate an optimal antigen-specific immune response.

[0098] Generally, these monoclonal antibodies bind to checkpoint inhibitor proteins such as CTLA-4 and PD-1, which under normal circumstances prevent or suppress activation of cytotoxic T cells (CTLs). By inhibiting the checkpoint protein, for example through the use of antibodies that bind these proteins, an increased T cell response against tumors can be achieved. That is, these cancer checkpoint proteins suppress the immune response; when the proteins are blocked, for example using antibodies to the checkpoint protein, the immune system is activated, leading to immune stimulation, resulting in treatment of conditions such as cancer and infectious disease.

[0099] However, as discussed above, studies have shown that TILs commonly express multiple checkpoint receptors; this may suggest that single checkpoint blockade could be insufficient to promote a complete T cell response. Moreover, it is likely that TILs that express multiple checkpoints are in fact the most tumor-reactive, thus suggesting that therapies that engage more than one checkpoint antigen could be very useful.

[0100] Accordingly, the present invention provides bispecific checkpoint antibodies, that bind to cells expressing the two antigens and methods of activating T cells and/or NK cells to treat diseases such as cancer and infectious diseases, and other conditions where increased immune activity results in treatment.

[0101] Thus, the invention is directed, in some instances, to solving the issue of toxicity and expense of administering multiple antibodies by providing bispecific antibodies that bind to two different checkpoint inhibitor molecules on a single cell and advantageously requiring administration of only one therapeutic substance.

[0102] Bispecific antibodies, which can bind two different targets simultaneously, offer the potential to improve the selectivity of targeting TILs vs peripheral T cells, while also reducing cost of therapy. The bivalent interaction of an antibody with two targets on a cell surface should—in some cases—lead to a higher binding avidity relative to a monovalent interaction with one target at a time. Because of this, normal bivalent antibodies tend to have high avidity for their target on a cell surface. With bispecific antibodies, the potential exists to create higher selectivity for cells that simultaneously express two different targets, utilizing the higher avidity afforded by simultaneous binding to both targets.

[0103] Accordingly, the present invention is directed to novel constructs to provide heterodimeric antibodies that allow binding to more than one checkpoint antigen or ligand, e.g. to allow for bispecific binding. Hence, for example, an anti-PD1×anti-CTLA4 (PD1×CTLA4) bispecific antibody is expected to be more selective for PDI+CTLA4+ double positive TILs versus single positive PD1-only or CTLA4-only T cells. Selective blockade of double-positive TILs versus single positive T cells is therefore expected to improve the therapeutic index of combined checkpoint blockade. This is similarly true for the other possible combinations as outlined herein. Accordingly, suitable bispecific antibodies of the invention bind PD-1 and CTLA-4, PD-1 and TIM-3, PD-1 and LAG-3, PD-1 and TIGIT, PD-1 and BTLA, CTLA-4 and TIM-3, CTLA-4 and LAG-3, CTLA-4 and TIGIT, CTLA-4 and BTLA, TIM-3 and LAG-3, TIM-3 and TIGIT, TIM-3 and BTLA, LAG-3 and TIGIT, LAG-3 and BTLA and TIGIT and BTLA. Note that generally these bispecific antibodies are named “anti-PD-1×anti-CTLA-4”, or generally simplistically or for ease (and thus interchangeably) as “PD-1×CTLA-4”, etc. for each pair.

[0104] The heterodimeric bispecific checkpoint antibodies of the invention are useful to treat a variety of types of cancers. As will be appreciated by those in the art, in contrast to traditional monoclonal antibodies that bind to tumor antigens, or to the newer classes of bispecific antibodies that bind, for example, CD3 and tumor antigens (such as described in U.S. Ser. No. 15/141,350, for example), checkpoint antibodies are used to increase the immune response but are not generally tumor specific in their action. That is, the bispecific checkpoint antibodies of the invention inhibit the suppression of the immune system, generally leading to T cell activation, which in turn leads to greater immune response to cancerous cells and thus treatment. Such antibodies can therefore be expected to find utility for treatment of a wide variety of tumor types. For example, the FDA recently approved Keytruda®, an anti-PD-1 monospecific antibody on the basis of a genetic feature, rather than a tumor type.

[0105] As discussed below, there are a variety of ways that T cell activation can be measured. Functional effects of the bispecific checkpoint antibodies on NK and T-cells can be assessed in vitro (and in some cases in vivo, as described more fully below) by measuring changes in the following parameters: proliferation, cytokine release and cell-surface makers. For NK cells, increases in cell proliferation, cytotoxicity (ability to kill target cells as measured by increases in CD107a, granzyme, and perform expression, or by directly measuring target cells killing), cytokine production (e.g. IFN-γ and TNF), and cell surface receptor expression (e.g. CD25) is indicative of immune modulation, e.g. enhanced killing of cancer cells. For T-cells, increases in proliferation, increases in expression of cell surface markers of activation (e.g. CD25, CD69, CD137, and PD1), cytotoxicity (ability to kill target cells), and cytokine production (e.g. IL-2, IL-4, IL-6, IFN-γ, TNF-α, IL-10, IL-17A) are indicative of immune modulation, e.g. enhanced killing of cancer cells. Accordingly, assessment of treatment can be done using assays that evaluate one or more of the following: (i) increases in immune response, (ii) increases in activation of αβ and/or γδ T cells, (iii) increases in cytotoxic T cell activity, (iv) increases in NK and/or NKT cell activity, (v) alleviation of αβ and/or γδ T-cell suppression, (vi) increases in pro-inflammatory cytokine secretion, (vii) increases in IL-2 secretion; (viii) increases in interferon-γ production, (ix) increases in Th1 response, (x) decreases in Th2 response, (xi) decreases in cell number and/or activity of at least one of regulatory T cells and cells (xii) increases of tumor immune infiltrates.

[0106] Thus, in some embodiments the invention provides the use of bispecific checkpoint antibodies to perform one or more of the following in a subject in need thereof: (a) upregulating pro-inflammatory cytokines; (b) increasing T-cell proliferation, expansion or tumor infiltration; (c) increasing interferon-γ, TNF-α and other cytokine production by T-cells; (d) increasing IL-2 secretion; (e) stimulating antibody responses; (f) inhibiting cancer cell growth; (g) promoting antigenic specific T cell immunity; (h) promoting CD4+ and/or CD8+ T cell activation; (i) alleviating T-cell suppression; (j) promoting NK cell activity; (k) promoting apoptosis or lysis of cancer cells; and/or (l) cytotoxic or cytostatic effect on cancer cells.

[0107] Accordingly, the present invention provides bispecific, heterodimeric checkpoint antibodies. The heterodimeric antibody constructs are based on the self-assembling nature of the two Fc domains of the heavy chains of antibodies, e.g. two “monomers” that assemble into a “dimer”. Heterodimeric antibodies are made by altering the amino acid sequence of each monomer as more fully discussed below. Thus, the present invention is generally directed to the creation of heterodimeric antibodies, which can co-engage checkpoint antigens in several ways, relying on amino acid variants in the constant regions that are different on each chain to promote heterodimeric formation and/or allow for ease of purification of heterodimers over the homodimers.

[0108] Thus, the present invention provides bispecific checkpoint antibodies. An ongoing problem in antibody technologies is the desire for “bispecific” antibodies that bind to two (or more) different antigens simultaneously, in general thus allowing the different antigens to be brought into proximity and resulting in new functionalities and new therapies.

[0109] In general, these antibodies are made by including genes for each heavy and light chain into the host cells (generally, in the present invention, genes for two heavy chain monomers and a light chain as outlined herein). This generally results in the formation of the desired heterodimer (A-B), as well as the two homodimers (A-A and B-B). However, a major obstacle in the formation of bispecific antibodies is the difficulty in purifying the heterodimeric antibodies away from the homodimeric antibodies and/or biasing the formation of the heterodimer over the formation of the homodimers.

[0110] To solve this issue, there are a number of mechanisms that can be used to generate the heterodimers of the present invention. In addition, as will be appreciated by those in the art, these mechanisms can be combined to ensure high heterodimerization. Thus, amino acid variants that lead to the production of heterodimeric antibodies are referred to as “heterodimerization variants”. As discussed below, heterodimerization variants can include steric variants (e.g. the “knobs and holes” or “skew” variants described below and the “charge pairs” variants described below) as well as “pI variants”, which allows purification of homodimers away from heterodimers.

[0111] One mechanism, generally referred to in the art as “knobs and holes” (“KIH”) or sometimes herein as “skew” variants, referring to amino acid engineering that creates steric and/or electrostatic influences to favor heterodimeric formation and disfavor homodimeric formation can also optionally be used, as described in Ridgway et al., Protein Engineering 9(7):617 (1996); Atwell et al., J. Mol. Biol. 1997 270:26; U.S. Pat. No. 8,216,805, US 2012/0149876, all of which are hereby incorporated by reference in their entirety. The Figures identify a number of “monomer A-monomer B” pairs that include “knobs and holes” amino acid substitutions. In addition, as described in Merchant et al., Nature Biotech. 16:677 (1998), these “knobs and hole” mutations can be combined with disulfide bonds to skew formation to heterodimerization. Of use in the present invention are T366S/L368A/Y407V paired with T366W, as well as this variant with a bridging disulfide, T366S/L368A/Y407V/Y349C paired with T366W/S354C, particularly in combination with other heterodimerization variants including pI variants as outlined below.

[0112] An additional mechanism that finds use in the generation of heterodimeric antibodies is sometimes referred to as “electrostatic steering” or “charge pairs” as described in Gunasekaran et al., J. Biol. Chem. 285(25): 19637 (2010), hereby incorporated by reference in its entirety. This is sometimes referred to herein as “charge pairs”. In this embodiment, electrostatics are used to skew the formation towards heterodimerization. As those in the art will appreciate, these may also have have an effect on pI, and thus on purification, and thus could in some cases also be considered pI variants. However, as these were generated to force heterodimerization and were not used as purification tools, they are classified as “steric variants”. These include, but are not limited to, D221E/P228E/L368E paired with D221R/P228R/K409R (e.g. these are “monomer corresponding sets) and C220E/P228E/368E paired with C220R/E224R/P228R/K409R and others shown in the Figures.

[0113] In the present invention, in some embodiments, pI variants are used to alter the pI of one or both of the monomers and thus allowing the isoelectric separation of A-A, A-B and B-B dimeric proteins.

[0114] In the present invention, there are several basic mechanisms that can lead to ease of purifying heterodimeric proteins; one relies on the use of pI variants, such that each monomer has a different pI, thus allowing the isoelectric purification of A-A, A-B and B-B dimeric proteins. Alternatively, some scaffold formats, such as the “triple F” format, also allows separation on the basis of size. As is further outlined below, it is also possible to “skew” the formation of heterodimers over homodimers. Thus, a combination of steric heterodimerization variants and pI or charge pair variants find particular use in the invention. Additionally, as more fully outlined below, scaffolds that utilize scFv(s) such as the Triple F format can include charged scFv linkers (either positive or negative), that give a further pI boost for purification purposes. As will be appreciated by those in the art, some Triple F formats are useful with just charged scFv linkers and no additional pI adjustments, although the invention does provide the use of skew variants with charged scFv linkers as well (and combinations of Fc, FcRn and KO variants discussed herein).

[0115] In the present invention that utilizes pI as a separation mechanism to allow the purification of heterodimeric proteins, amino acid variants can be introduced into one or both of the monomer polypeptides; that is, the pI of one of the monomers (referred to herein for simplicity as “monomer A”) can be engineered away from monomer B, or both monomer A and B can be changed, with the pI of monomer A increasing and the pI of monomer B decreasing. As is outlined more fully below, the pI changes of either or both monomers can be done by removing or adding a charged residue (e.g. a neutral amino acid is replaced by a positively or negatively charged amino acid residue, e.g. glycine to glutamic acid), changing a charged residue from positive or negative to the opposite charge (e.g. aspartic acid to lysine) or changing a charged residue to a neutral residue (e.g. loss of a charge; lysine to serine). A number of these variants are shown in the Figures. In addition, suitable pI variants for use in the creation of heterodimeric antibodies herein are those that are isotypic, e.g. importing pI variants from different IgG isotypes such that pI is changed without introducing significant immunogenicity; see FIG. 29 from US Publication No. 20140288275, hereby incorporated by reference in its entirety.

[0116] Accordingly, in this embodiment of the present invention provides for creating a sufficient change in pI in at least one of the monomers such that heterodimers can be separated from homodimers. As will be appreciated by those in the art, and as discussed further below, this can be done by using a “wild type” heavy chain constant region and a variant region that has been engineered to either increase or decrease it's pI (wt A-+B or wt A-−B), or by increasing one region and decreasing the other region (A+-B− or A-B+).

[0117] Thus, in general, a component of some embodiments of the present invention are amino acid variants in the constant regions of antibodies that are directed to altering the isoelectric point (pI) of at least one, if not both, of the monomers of a dimeric protein to form “pI heterodimers” (when the protein is an antibody, these are referred to as “pI antibodies”) by incorporating amino acid substitutions (“pI variants” or “pI substitutions”) into one or both of the monomers. As shown herein, the separation of the heterodimers from the two homodimers can be accomplished if the pIs of the two monomers differ by as little as 0.1 pH unit, with 0.2, 0.3, 0.4 and 0.5 or greater all finding use in the present invention.

[0118] As will be appreciated by those in the art, the number of pI variants to be included on each or both monomer(s) to get good separation will depend in part on the starting pI of the scFv and Fab of interest. That is, to determine which monomer to engineer or in which “direction” (e.g. more positive or more negative), the Fv sequences of the two target antigens are calculated and a decision is made from there. As is known in the art, different Fvs will have different starting pIs which are exploited in the present invention. In general, as outlined herein, the pIs are engineered to result in a total pI difference of each monomer of at least about 0.1 logs, with 0.2 to 0.5 being preferred as outlined herein.

[0119] Furthermore, as will be appreciated by those in the art and outlined herein, in some cases (depending on the format) heterodimers can be separated from homodimers on the basis of size (e.g. molecular weight). For example, as shown in some embodiments of FIG. 1, some formats result in homodimers and heterodimers with different sizes (e.g. for bottle openers, one homodimer is a “dual scFv” format, one homodimer is a standard antibody, and the heterodimer has one Fab and one scFv.

[0120] In addition, as depicted in FIG. 1, it will be recognized that it is possible that some antigens are bound bivalently (e.g. two antigen binding sites to a single antigen). As will be appreciated, any combination of Fab and scFvs can be utilized to achieve the desired result and combinations.

[0121] In the case where pI variants are used to achieve purified heterodimers over homodimers, by using the constant region(s) of the heavy chain(s), a more modular approach to designing and purifying multispecific proteins, including antibodies, is provided. Thus, in some embodiments, heterodimerization variants (including skew and purification heterodimerization variants) are not included in the variable regions, such that each individual antibody must be engineered. In addition, in some embodiments, the possibility of immunogenicity resulting from the pI variants is significantly reduced by importing pI variants from different IgG isotypes such that pI is changed without introducing significant immunogenicity. Thus, an additional problem to be solved is the elucidation of low pI constant domains with high human sequence content, e.g. the minimization or avoidance of non-human residues at any particular position.

[0122] A side benefit that can occur with this pI engineering is also the extension of serum half-life and increased FcRn binding. That is, as described in U.S. Ser. No. 13/194,904 (incorporated by reference in its entirety), lowering the pI of antibody constant domains (including those found in antibodies and Fc fusions) can lead to longer serum retention in vivo. These pI variants for increased serum half life also facilitate pI changes for purification.

[0123] In addition, it should be noted that the pI variants of the heterodimerization variants give an additional benefit for the analytics and quality control process of bispecific antibodies, as the ability to either eliminate, minimize and distinguish when homodimers are present is significant. Similarly, the ability to reliably test the reproducibility of the heterodimeric protein production is important.

[0124] As will be appreciated by those in the art and discussed more fully below, the heterodimeric fusion proteins of the present invention can take on a wide variety of configurations, as are generally depicted in FIG. 1. Some figures depict “single ended” configurations, where there is one type of specificity on one “arm” of the molecule and a different specificity on the other “arm”. Other figures depict “dual ended” configurations, where there is at least one type of specificity at the “top” of the molecule and one or more different specificities at the “bottom” of the molecule. Thus, the present invention is directed to novel immunoglobulin compositions that co-engage a first and a second antigen. First and second antigens of the invention are herein referred to as antigen-1 and antigen-2 respectively (or “checkpoint-1” and “checkpoint-2”).

[0125] One heterodimeric scaffold that finds particular use in the present invention is the “triple F” or “bottle opener” scaffold format as depicted in FIG. 1A. In this embodiment, one heavy chain of the antibody contains an single chain Fv (“scFv”, as defined below) and the other heavy chain is a “regular” FAb format, comprising a variable heavy chain and a light chain. This structure is sometimes referred to herein as “triple F” format (scFv-FAb-Fc) or the “bottle-opener” format, due to a rough visual similarity to a bottle-opener (see FIG. 1A). The two chains are brought together by the use of amino acid variants in the constant regions (e.g. the Fc domain and/or the hinge region) that promote the formation of heterodimeric antibodies as is described more fully below.

[0126] There are several distinct advantages to the present “triple F” format. As is known in the art, antibody analogs relying on two scFv constructs often have stability and aggregation problems, which can be alleviated in the present invention by the addition of a “regular” heavy and light chain pairing. In addition, as opposed to formats that rely on two heavy chains and two light chains, there is no issue with the incorrect pairing of heavy and light chains (e.g. heavy 1 pairing with light 2, etc.)

[0127] Furthermore, as outlined herein, additional amino acid variants may be introduced into the bispecific antibodies of the invention, to add additional functionalities. For example, amino acid changes within the Fc region can be added (either to one monomer or both) to facilitate increased ADCC or CDC (e.g. altered binding to Fcγ receptors) as well as to increase binding to FcRn and/or increase serum half-life of the resulting molecules. As is further described herein and as will be appreciated by those in the art, any and all of the variants outlined herein can be optionally and independently combined with other variants.

[0128] Similarly, another category of functional variants are “Fcγ ablation variants” or “Fc knock out (FcKO or KO) variants. In these embodiments, for some therapeutic applications, it is desirable to reduce or remove the normal binding of the Fc domain to one or more or all of the Fcγ receptors (e.g. FcγR1, FcγRIIa, FcγRIIb, FcγRIIIa, etc.) to avoid additional mechanisms of action. That is, for example, it is generally desirable to ablate FcγRIIIa binding to eliminate or significantly reduce ADCC activity. Suitable ablation variants are shown in FIG. 5.

### C. Nomenclature

[0129] The bispecific antibodies of the invention are listed in several different formats. Each polypeptide is given a unique “XENP” number, although as will be appreciated in the art, a longer sequence might contain a shorter one. For example, the heavy chain of the scFv side monomer of a bottle opener format for a given sequence will have a first XENP number, while the scFv domain will have a different XENP number. Some molecules have three polypeptides, so the XENP number, with the components, is used as a name. Thus, the molecule XENP20717, which is in bottle opener format, comprises three sequences, generally referred to as “XENP20717 HC-Fab”, XENP20717 HC-scFv” and “XENP20717 LC” or equivalents, although one of skill in the art would be able to identify these easily through sequence alignment. These XENP numbers are in the sequence listing as well as identifiers, and used in the Figures. In addition, one molecule, comprising the three components, gives rise to multiple sequence identifiers. For example, the listing of the Fab monomer has the full length sequence, the variable heavy sequence and the three CDRs of the variable heavy sequence; the light chain has a full length sequence, a variable light sequence and the three CDRs of the variable light sequence; and the scFv-Fc domain has a full length sequence, an scFv sequence, a variable light sequence, 3 light CDRs, a scFv linker, a variable heavy sequence and 3 heavy CDRs; note that all molecules herein with a scFv domain use a single charged scFv linker (+H), although others can be used. In addition, the naming nomenclature of particular variable domains uses a “Hx.xx_Ly.yy” type of format, with the numbers being unique identifiers to particular variable chain sequences. Thus, the variable domain of the Fab side of XENP22841 is “7G8_H3.30_L1.34”, which indicates that the variable heavy domain H3.30 was combined with the light domain L1.34. In the case that these sequences are used as scFvs, the designation “7G8_H3.30_L1.34”, indicates that the variable heavy domain H3.30 was combined with the light domain L1.34 and is in vh-linker-vl orientation, from N- to C-terminus. This molecule with the identical sequences of the heavy and light variable domains but in the reverse order would be named “7G8_L1.34_H3.30”. Similarly, different constructs may “mix and match” the heavy and light chains as will be evident from the sequence listing and the Figures.

### D. Definitions

[0130] In order that the application may be more completely understood, several definitions are set forth below. Such definitions are meant to encompass grammatical equivalents.

[0131] By “ablation” herein is meant a decrease or removal of activity. Thus for example, “ablating FcγR binding” means the Fc region amino acid variant has less than 50% starting binding as compared to an Fc region not containing the specific variant, with more than 70-80-90-95-98% loss of activity being preferred, and in general, with the activity being below the level of detectable binding in a Biacore, SPR or BLI assay. Of particular use in the ablation of FcγR binding are those shown in FIG. 5, which generally are added to both monomers.

[0132] By “ADCC” or “antibody dependent cell-mediated cytotoxicity” as used herein is meant the cell-mediated reaction wherein nonspecific cytotoxic cells that express FcγRs recognize bound antibody on a target cell and subsequently cause lysis of the target cell. ADCC is correlated with binding to FcγRIIIa; increased binding to FcγRIIIa leads to an increase in ADCC activity.

[0133] By “ADCP” or antibody dependent cell-mediated phagocytosis as used herein is meant the cell-mediated reaction wherein nonspecific phagocytic cells that express FcγRs recognize bound antibody on a target cell and subsequently cause phagocytosis of the target cell.

[0134] By “antigen binding domain” or “ABD” herein is meant a set of six Complementary Determining Regions (CDRs) that, when present as part of a polypeptide sequence, specifically binds a target antigen as discussed herein. Thus, a “checkpoint antigen binding domain” binds a target checkpoint antigen as outlined herein. As is known in the art, these CDRs are generally present as a first set of variable heavy CDRs (vhCDRs or VHCDRs) and a second set of variable light CDRs (vlCDRs or VLCDRs), each comprising three CDRs: vhCDR1, vhCDR2, vhCDR3 for the heavy chain and vlCDR1, vlCDR2 and vlCDR3 for the light. The CDRs are present in the variable heavy and variable light domains, respectively, and together form an Fv region. (See Table 1 and related discussion above for CDR numbering schemes). Thus, in some cases, the six CDRs of the antigen binding domain are contributed by a variable heavy and a variable light domain. In a “Fab” format, the set of 6 CDRs are contributed by two different polypeptide sequences, the variable heavy domain (vh or VH; containing the vhCDR1, vhCDR2 and vhCDR3) and the variable light domain (vl or VL; containing the vlCDR1, vlCDR2 and vlCDR3), with the C-terminus of the vh domain being attached to the N-terminus of the CH1 domain of the heavy chain and the C-terminus of the vl domain being attached to the N-terminus of the constant light domain (and thus forming the light chain). In a scFv format, the vh and vl domains are covalently attached, generally through the use of a linker (a “scFv linker”) as outlined herein, into a single polypeptide sequence, which can be either (starting from the N-terminus) vh-linker-vl or vl-linker-vh, with the former being generally preferred (including optional domain linkers on each side, depending on the format used (e.g. from FIG. 1). In general, the C-terminus of the scFv domain is attached to the N-terminus of the hinge in the second monomer.

[0135] By “modification” herein is meant an amino acid substitution, insertion, and/or deletion in a polypeptide sequence or an alteration to a moiety chemically linked to a protein.

[0136] For example, a modification may be an altered carbohydrate or PEG structure attached to a protein. By “amino acid modification” herein is meant an amino acid substitution, insertion, and/or deletion in a polypeptide sequence. For clarity, unless otherwise noted, the amino acid modification is always to an amino acid coded for by DNA, e.g. the 20 amino acids that have codons in DNA and RNA.

[0137] By “amino acid substitution” or “substitution” herein is meant the replacement of an amino acid at a particular position in a parent polypeptide sequence with a different amino acid. In particular, in some embodiments, the substitution is to an amino acid that is not naturally occurring at the particular position, either not naturally occurring within the organism or in any organism. For example, the substitution E272Y refers to a variant polypeptide, in this case an Fc variant, in which the glutamic acid at position 272 is replaced with tyrosine. For clarity, a protein which has been engineered to change the nucleic acid coding sequence but not change the starting amino acid (for example exchanging CGG (encoding arginine) to CGA (still encoding arginine) to increase host organism expression levels) is not an “amino acid substitution”; that is, despite the creation of a new gene encoding the same protein, if the protein has the same amino acid at the particular position that it started with, it is not an amino acid substitution.

[0138] By “amino acid insertion” or “insertion” as used herein is meant the addition of an amino acid sequence at a particular position in a parent polypeptide sequence. For example, −233E or 233E designates an insertion of glutamic acid after position 233 and before position 234. Additionally, −233ADE or A233ADE designates an insertion of AlaAspGlu after position 233 and before position 234.

[0139] By “amino acid deletion” or “deletion” as used herein is meant the removal of an amino acid sequence at a particular position in a parent polypeptide sequence. For example, E233- or E233#, E233( ) or E233del designates a deletion of glutamic acid at position 233. Additionally, EDA233- or EDA233# designates a deletion of the sequence GluAspAla that begins at position 233.

[0140] By “variant protein” or “protein variant”, or “variant” as used herein is meant a protein that differs from that of a parent protein by virtue of at least one amino acid modification. The protein variant has at least one amino acid modification compared to the parent protein, yet not so many that the variant protein will not align with the parental protein using an alignment program such as that described below. In general, variant proteins (such as variant Fc domains, etc., outlined herein, are generally at least 75, 80, 85, 90, 91, 92, 93, 94, 95, 96, 97, 98 or 99% identical to the parent protein, using the alignment programs described below, such as BLAST.

[0141] As described below, in some embodiments the parent polypeptide, for example an Fc parent polypeptide, is a human wild type sequence, such as the heavy constant domain or Fc region from IgG1, IgG2, IgG3 or IgG4, although human sequences with variants can also serve as “parent polypeptides”, for example the IgG1/2 hybrid of US Publication 2006/0134105 can be included. The protein variant sequence herein will preferably possess at least about 80% identity with a parent protein sequence, and most preferably at least about 90% identity, more preferably at least about 95-98-99% identity. Accordingly, by “antibody variant” or “variant antibody” as used herein is meant an antibody that differs from a parent antibody by virtue of at least one amino acid modification, “IgG variant” or “variant IgG” as used herein is meant an antibody that differs from a parent IgG (again, in many cases, from a human IgG sequence) by virtue of at least one amino acid modification, and “immunoglobulin variant” or “variant immunoglobulin” as used herein is meant an immunoglobulin sequence that differs from that of a parent immunoglobulin sequence by virtue of at least one amino acid modification. “Fc variant” or “variant Fc” as used herein is meant a protein comprising an amino acid modification in an Fc domain as compared to an Fc domain of human IgG1, IgG2 or IgG4.

[0142] The Fc variants of the present invention are defined according to the amino acid modifications that compose them. Thus, for example, N434S or 434S is an Fc variant with the substitution serine at position 434 relative to the parent Fc polypeptide, wherein the numbering is according to the EU index. Likewise, M428L/N434S defines an Fc variant with the substitutions M428L and N434S relative to the parent Fc polypeptide. The identity of the WT amino acid may be unspecified, in which case the aforementioned variant is referred to as 428L/434S. It is noted that the order in which substitutions are provided is arbitrary, that is to say that, for example, N434S/M428L is the same Fc variant as M428L/N434S, and so on. For all positions discussed in the present invention that relate to antibodies, unless otherwise noted, amino acid position numbering is according to the EU index. The EU index or EU index as in Kabat or EU numbering scheme refers to the numbering of the EU antibody. Kabat et al. collected numerous primary sequences of the variable regions of heavy chains and light chains. Based on the degree of conservation of the sequences, they classified individual primary sequences into the CDR and the framework and made a list thereof (see SEQUENCES OF IMMUNOLOGICAL INTEREST, 5th edition, NIH publication, No. 91-3242, E. A. Kabat et al., entirely incorporated by reference). See also Edelman et al., 1969, Proc Natl Acad Sci USA 63:78-85, hereby entirely incorporated by reference. The modification can be an addition, deletion, or substitution.

[0143] By “protein” herein is meant at least two covalently attached amino acids, which includes proteins, polypeptides, oligopeptides and peptides. In addition, polypeptides that make up the antibodies of the invention may include synthetic derivatization of one or more side chains or termini, glycosylation, PEGylation, circular permutation, cyclization, linkers to other molecules, fusion to proteins or protein domains, and addition of peptide tags or labels.

[0144] By “residue” as used herein is meant a position in a protein and its associated amino acid identity. For example, Asparagine 297 (also referred to as Asn297 or N297) is a residue at position 297 in the human antibody IgG1.

[0145] By “Fab” or “Fab region” as used herein is meant the polypeptide that comprises the VH, CH1, VL, and CL immunoglobulin domains, generally on two different polypeptide chains (e.g. VH—CH1 on one chain and VL-CL on the other). Fab may refer to this region in isolation, or this region in the context of a bispecific antibody of the invention. In the context of a Fab, the Fab comprises an Fv region in addition to the CH1 and CL domains.

[0146] By “Fv” or “Fv fragment” or “Fv region” as used herein is meant a polypeptide that comprises the VL and VH domains of an ABD. Fv regions can be formatted as both Fabs (as discussed above, generally two different polypeptides that also include the constant regions as outlined above) and scFvs, where the vl and vh domains are combined (generally with a linker as discussed herein) to form an scFv.

[0147] By “single chain Fv” or “scFv” herein is meant a variable heavy domain covalently attached to a variable light domain, generally using a scFv linker as discussed herein, to form a scFv or scFv domain. A scFv domain can be in either orientation from N- to C-terminus (vh-linker-vl or vl-linker-vh). In the sequences depicted in the sequence listing and in the figures, the order of the vh and vl domain is indicated in the name, e.g. H.X_L.Y means N- to C-terminal is vh-linker-vl, and L.Y_H.X is vl-linker-vh.

[0148] By “IgG subclass modification” or “isotype modification” as used herein is meant an amino acid modification that converts one amino acid of one IgG isotype to the corresponding amino acid in a different, aligned IgG isotype. For example, because IgG1 comprises a tyrosine and IgG2 a phenylalanine at EU position 296, a F296Y substitution in IgG2 is considered an IgG subclass modification.

[0149] By “non-naturally occurring modification” as used herein is meant an amino acid modification that is not isotypic. For example, because none of the human IgGs comprise a serine at position 434, the substitution 434S in IgG1, IgG2, IgG3, or IgG4 (or hybrids thereof) is considered a non-naturally occurring modification.

[0150] By “amino acid” and “amino acid identity” as used herein is meant one of the 20 naturally occurring amino acids that are coded for by DNA and RNA.

[0151] By “effector function” as used herein is meant a biochemical event that results from the interaction of an antibody Fc region with an Fc receptor or ligand. Effector functions include but are not limited to ADCC, ADCP, and CDC.

[0152] By “IgG Fc ligand” as used herein is meant a molecule, preferably a polypeptide, from any organism that binds to the Fc region of an IgG antibody to form an Fc/Fc ligand complex. Fc ligands include but are not limited to FcγRIs, FcγRIIs, FcγRIIIs, FcRn, C1q, C3, mannan binding lectin, mannose receptor, staphylococcal protein A, streptococcal protein G, and viral FcγR. Fc ligands also include Fc receptor homologs (FcRH), which are a family of Fc receptors that are homologous to the FcγRs (Davis et al., 2002, Immunological Reviews 190:123-136, entirely incorporated by reference). Fc ligands may include undiscovered molecules that bind Fc. Particular IgG Fc ligands are FcRn and Fc gamma receptors. By “Fc ligand” as used herein is meant a molecule, preferably a polypeptide, from any organism that binds to the Fc region of an antibody to form an Fc/Fc ligand complex.

[0153] By “Fc gamma receptor”, “FcγR” or “FcgammaR” as used herein is meant any member of the family of proteins that bind the IgG antibody Fc region and is encoded by an FcγR gene. In humans this family includes but is not limited to FcγRI (CD64), including isoforms FcγRIa, FcγRIb, and FcγRIc; FcγRII (CD32), including isoforms FcγRIIa (including allotypes H131 and R131), FcγRIIb (including FcγRIIb-1 and FcγRIIb-2), and FcγRIIc; and FcγRIII (CD16), including isoforms FcγRIIIa (including allotypes V158 and F158) and FcγRIIIb (including allotypes FcγRIIb-NA1 and FcγRIIb-NA2) (Jefferis et al., 2002, Immunol Lett 82:57-65, entirely incorporated by reference), as well as any undiscovered human FcγRs or FcγR isoforms or allotypes. An FcγR may be from any organism, including but not limited to humans, mice, rats, rabbits, and monkeys. Mouse FcγRs include but are not limited to FcγRI (CD64), FcγRII (CD32), FcγRIII (CD16), and FcγRIII-2 (CD16-2), as well as any undiscovered mouse FcγRs or FcγR isoforms or allotypes.

[0154] By “FcRn” or “neonatal Fc Receptor” as used herein is meant a protein that binds the IgG antibody Fc region and is encoded at least in part by an FcRn gene. The FcRn may be from any organism, including but not limited to humans, mice, rats, rabbits, and monkeys. As is known in the art, the functional FcRn protein comprises two polypeptides, often referred to as the heavy chain and light chain. The light chain is beta-2-microglobulin and the heavy chain is encoded by the FcRn gene. Unless otherwise noted herein, FcRn or an FcRn protein refers to the complex of FcRn heavy chain with beta-2-microglobulin. A variety of FcRn variants used to increase binding to the FcRn receptor, and in some cases, to increase serum half-life. An “FcRn variant” is one that increases binding to the FcRn receptor, and suitable FcRn variants are shown below.

[0155] By “parent polypeptide” as used herein is meant a starting polypeptide that is subsequently modified to generate a variant. The parent polypeptide may be a naturally occurring polypeptide, or a variant or engineered version of a naturally occurring polypeptide. Accordingly, by “parent immunoglobulin” as used herein is meant an unmodified immunoglobulin polypeptide that is modified to generate a variant, and by “parent antibody” as used herein is meant an unmodified antibody that is modified to generate a variant antibody. It should be noted that “parent antibody” includes known commercial, recombinantly produced antibodies as outlined below. In this context, a “parent Fc domain” will be relative to the recited variant; thus, a “variant human IgG1 Fc domain” is compared to the parent Fc domain of human IgG1, a “variant human IgG4 Fc domain” is compared to the parent Fc domain human IgG4, etc.

[0156] By “Fc” or “Fc region” or “Fc domain” as used herein is meant the polypeptide comprising the CH2-CH3 domains of an IgG molecule, and in some cases, inclusive of the hinge. In EU numbering for human IgG1, the CH2-CH3 domain comprises amino acids 231 to 447, and the hinge is 216 to 230. Thus the definition of “Fc domain” includes both amino acids 231-447 (CH2-CH3) or 216-447 (hinge-CH2-CH3), or fragments thereof. An “Fc fragment” in this context may contain fewer amino acids from either or both of the N- and C-termini but still retains the ability to form a dimer with another Fc domain or Fc fragment as can be detected using standard methods, generally based on size (e.g. non-denaturing chromatography, size exclusion chromatography, etc.) Human IgG Fc domains are of particular use in the present invention, and can be the Fc domain from human IgG1, IgG2 or IgG4.

[0157] A “variant Fc domain” contains amino acid modifications as compared to a parental Fc domain. Thus, a “variant human IgG1 Fc domain” is one that contains amino acid modifications (generally amino acid substitutions, although in the case of ablation variants, amino acid deletions are included) as compared to the human IgG1 Fc domain. In general, variant Fc domains have at least about 80, 85, 90, 95, 97, 98 or 99 percent identity to the corresponding parental human IgG Fc domain (using the identity algorithms discussed below, with one embodiment utilizing the BLAST algorithm as is known in the art, using default parameters). Alternatively, the variant Fc domains can have from 1, 2, 3, 4, 5, 6, 7, 8, 9, 10, 11, 12, 13, 14, 15, 16, 11, 12, 13, 14, 15, 16, 17, 18, 19 or 20 amino acid modifications as compared to the parental Fc domain. Additionally, as discussed herein, the variant Fc domains herein still retain the ability to form a dimer with another Fc domain as measured using known techniques as described herein, such as non-denaturing gel electrophoresis.

[0158] By “heavy chain constant region” herein is meant the CH1-hinge-CH2-CH3 portion of an antibody (or fragments thereof), excluding the variable heavy domain; in EU numbering of human IgG1 this is amino acids 118-447 By “heavy chain constant region fragment” herein is meant a heavy chain constant region that contains fewer amino acids from either or both of the N- and C-termini but still retains the ability to form a dimer with another heavy chain constant region.

[0159] By “position” as used herein is meant a location in the sequence of a protein. Positions may be numbered sequentially, or according to an established format, for example the EU index for antibody numbering.

[0160] By “target antigen” as used herein is meant the molecule that is bound specifically by the antigen binding domain comprising the variable regions of a given antibody. As discussed below, in the present case the target antigens are checkpoint inhibitor proteins.

[0161] By “strandedness” in the context of the monomers of the heterodimeric antibodies of the invention herein is meant that, similar to the two strands of DNA that “match”, heterodimerization variants are incorporated into each monomer so as to preserve the ability to “match” to form heterodimers. For example, if some pI variants are engineered into monomer A (e.g. making the pI higher) then steric variants that are “charge pairs” that can be utilized as well do not interfere with the pI variants, e.g. the charge variants that make a pI higher are put on the same “strand” or “monomer” to preserve both functionalities. Similarly, for “skew” variants that come in pairs of a set as more fully outlined below, the skilled artisan will consider pI in deciding into which strand or monomer one set of the pair will go, such that pI separation is maximized using the pI of the skews as well.

[0162] By “target cell” as used herein is meant a cell that expresses a target antigen.

[0163] By “host cell” in the context of producing a bispecific antibody according to the invention herein is meant a cell that contains the exogeneous nucleic acids encoding the components of the bispecific antibody and is capable of expressing the bispecific antibody under suitable conditions. Suitable host cells are discussed below.

[0164] By “variable region” or “variable domain” as used herein is meant the region of an immunoglobulin that comprises one or more Ig domains substantially encoded by any of the Vκ, Vλ, and/or VH genes that make up the kappa, lambda, and heavy chain immunoglobulin genetic loci respectively, and contains the CDRs that confer antigen specificity. Thus, a “variable heavy domain” pairs with a “variable light domain” to form an antigen binding domain (“ABD”). In addition, each variable domain comprises three hypervariable regions (“complementary determining regions,” “CDRs”) (vhCDR1, vhCDR2 and vhCDR3 for the variable heavy domain and vlCDR1, vlCDR2 and vlCDR3 for the variable light domain) and four framework (FR) regions, arranged from amino-terminus to carboxy-terminus in the following order: FR1-CDR1-FR2-CDR2-FR3-CDR3-FR4.

[0165] By “wild type or WT” herein is meant an amino acid sequence or a nucleotide sequence that is found in nature, including allelic variations. A WT protein has an amino acid sequence or a nucleotide sequence that has not been intentionally modified.

[0166] The invention provides a number of antibody domains that have sequence identity to human antibody domains. Sequence identity between two similar sequences (e.g., antibody variable domains) can be measured by algorithms such as that of Smith, T. F. & Waterman, M. S. (1981) “Comparison Of Biosequences,” Adv. Appl. Math. 2:482 [local homology algorithm]; Needleman, S. B. & Wunsch, C D. (1970) “A General Method Applicable To The Search For Similarities In The Amino Acid Sequence Of Two Proteins,” J. Mol. Biol. 48:443 [homology alignment algorithm], Pearson, W. R. & Lipman, D. J. (1988) “Improved Tools For Biological Sequence Comparison,” Proc. Natl. Acad. Sci. (U.S.A.) 85:2444 [search for similarity method]; or Altschul, S. F. et al, (1990) “Basic Local Alignment Search Tool,” J. Mol. Biol. 215:403-10, the “BLAST” algorithm, see https://blast.ncbi.nlm.nih.gov/Blast.cgi. When using any of the aforementioned algorithms, the default parameters (for Window length, gap penalty, etc) are used. In one embodiment, sequence identity is done using the BLAST algorithm, using default parameters

[0167] The antibodies of the present invention are generally isolated or recombinant. “Isolated,” when used to describe the various polypeptides disclosed herein, means a polypeptide that has been identified and separated and/or recovered from a cell or cell culture from which it was expressed. Ordinarily, an isolated polypeptide will be prepared by at least one purification step. An “isolated antibody,” refers to an antibody which is substantially free of other antibodies having different antigenic specificities. “Recombinant” means the antibodies are generated using recombinant nucleic acid techniques in exogeneous host cells, and they can be isolated as well.

[0168] “Specific binding” or “specifically binds to” or is “specific for” a particular antigen or an epitope means binding that is measurably different from a non-specific interaction. Specific binding can be measured, for example, by determining binding of a molecule compared to binding of a control molecule, which generally is a molecule of similar structure that does not have binding activity. For example, specific binding can be determined by competition with a control molecule that is similar to the target.

[0169] Specific binding for a particular antigen or an epitope can be exhibited, for example, by an antibody having a KD for an antigen or epitope of at least about 10⁻⁴ M, at least about 10⁻⁵ M, at least about 10⁻⁶ M, at least about 10⁻⁷ M, at least about 10⁻⁸ M, at least about 10⁻⁹ M, alternatively at least about 10⁻¹⁰ M, at least about 10⁻¹¹ M, at least about 10⁻¹² M, or greater, where KD refers to a dissociation rate of a particular antibody-antigen interaction. Typically, an antibody that specifically binds an antigen will have a KD that is 20-, 50-, 100-, 500-, 1000-, 5,000-, 10,000- or more times greater for a control molecule relative to the antigen or epitope.

[0170] Also, specific binding for a particular antigen or an epitope can be exhibited, for example, by an antibody having a KA or Ka for an antigen or epitope of at least 20-, 50-, 100-, 500-, 1000-, 5,000-, 10,000- or more times greater for the epitope relative to a control, where KA or Ka refers to an association rate of a particular antibody-antigen interaction. Binding affinity is generally measured using a Biacore, SPR or BLI assay.

### E. Antibodies

[0171] The present invention relates to the generation of bispecific checkpoint antibodies that bind two different checkpoint antigens as discussed herein. As is discussed below, the term “antibody” is used generally. Antibodies that find use in the present invention can take on a number of formats as described herein, including traditional antibodies as well as antibody derivatives, fragments and mimetics, described herein and depicted in the figures.

[0172] Traditional antibody structural units typically comprise a tetramer. Each tetramer is typically composed of two identical pairs of polypeptide chains, each pair having one “light” (typically having a molecular weight of about 25 kDa) and one “heavy” chain (typically having a molecular weight of about 50-70 kDa). Human light chains are classified as kappa and lambda light chains. The present invention is directed to bispecific antibodies that generally are based on the IgG class, which has several subclasses, including, but not limited to IgG1, IgG2, IgG3, and IgG4. In general, IgG1, IgG2 and IgG4 are used more frequently than IgG3. It should be noted that IgG1 has different allotypes with polymorphisms at 356 (D or E) and 358 (L or M). The sequences depicted herein use the 356E/358M allotype, however the other allotype is included herein. That is, any sequence inclusive of an IgG1 Fc domain included herein can have 356D/358L replacing the 356E/358M allotype.

[0173] In addition, many of the antibodies herein have at least one of the cysteines at position 220 replaced by a serine; generally this is the on the “scFv monomer” side for most of the sequences depicted herein, although it can also be on the “Fab monomer” side, or both, to reduce disulfide formation. Specifically included within the sequences herein are one or both of these cysteines replaced (C220S).

[0174] Thus, “isotype” as used herein is meant any of the subclasses of immunoglobulins defined by the chemical and antigenic characteristics of their constant regions. It should be understood that therapeutic antibodies can also comprise hybrids of isotypes and/or subclasses. For example, as shown in US Publication 2009/0163699, incorporated by reference, the present invention the use of human IgG1/G2 hybrids.

[0175] The hypervariable region generally encompasses amino acid residues from about amino acid residues 24-34 (LCDR1; “L” denotes light chain), 50-56 (LCDR2) and 89-97 (LCDR3) in the light chain variable region and around about 31-35B (HCDR1; “H” denotes heavy chain), 50-65 (HCDR2), and 95-102 (HCDR3) in the heavy chain variable region; Kabat et al., SEQUENCES OF PROTEINS OF IMMUNOLOGICAL INTEREST, 5th Ed. Public Health Service, National Institutes of Health, Bethesda, Md. (1991) and/or those residues forming a hypervariable loop (e.g. residues 26-32 (LCDR1), 50-52 (LCDR2) and 91-96 (LCDR3) in the light chain variable region and 26-32 (HCDR1), 53-55 (HCDR2) and 96-101 (HCDR3) in the heavy chain variable region; Chothia and Lesk (1987) J. Mol. Biol. 196:901-917. Specific CDRs of the invention are described below.

[0176] As will be appreciated by those in the art, the exact numbering and placement of the CDRs can be different among different numbering systems. However, it should be understood that the disclosure of a variable heavy and/or variable light sequence includes the disclosure of the associated (inherent) CDRs. Accordingly, the disclosure of each variable heavy region is a disclosure of the vhCDRs (e.g. vhCDR1, vhCDR2 and vhCDR3) and the disclosure of each variable light region is a disclosure of the vlCDRs (e.g. vlCDR1, vlCDR2 and vlCDR3). A useful comparison of CDR numbering is as below, see Lafranc et al., Dev. Comp. Immunol. 27(1):55-77 (2003):

TABLE 1

| | Kabat + | | | | | | |
|---|---|---|---|---|---|---|---|
| | Chothia | IMGT | Kabat | AbM | Chothia | Contact | Xencor |
| vhCDR1 | 26-35 | 27-38 | 31-35 | 26-35 | 26-32 | 30-35 | 27-35 |
| vhCDR2 | 50-65 | 56-65 | 50-65 | 50-58 | 52-56 | 47-58 | 54-61 |
| vhCDR3 | 95-102 | 105- | 95-102 | 95-102 | 95-102 | 93-101 | 103- |
| | | 117 | | | | | 116 |
| vlCDR1 | 24-34 | 27-38 | 24-34 | 24-34 | 24-34 | 30-36 | 27-38 |
| vlCDR2 | 50-56 | 56-65 | 50-56 | 50-56 | 50-56 | 46-55 | 56-62 |
| vlCDR3 | 89-97 | 105- | 89-97 | 89-97 | 89-97 | 89-96 | 97- |
| | | 117 | | | | | 105 |

[0177] Throughout the present specification, the Kabat numbering system is generally used when referring to a residue in the variable domain (approximately, residues 1-107 of the light chain variable region and residues 1-113 of the heavy chain variable region) and the EU numbering system for Fc regions (e.g, Kabat et al., supra (1991)).

[0178] Another type of Ig domain of the heavy chain is the hinge region. By “hinge” or “hinge region” or “antibody hinge region” or “hinge domain” herein is meant the flexible polypeptide comprising the amino acids between the first and second constant domains of an antibody. Structurally, the IgG CH1 domain ends at EU position 215, and the IgG CH2 domain begins at residue EU position 231. Thus for IgG the antibody hinge is herein defined to include positions 216 (E216 in IgG1) to 230 (p²³⁰ in IgG1), wherein the numbering is according to the EU index as in Kabat. In some cases, a “hinge fragment” is used, which contains fewer amino acids at either or both of the N- and C-termini of the hinge domain. As noted herein, pI variants can be made in the hinge region as well.

[0179] The light chain generally comprises two domains, the variable light domain (containing the light chain CDRs and together with the variable heavy domains forming the Fv region), and a constant light chain region (often referred to as CL or Cκ).

[0180] Another region of interest for additional substitutions, outlined below, is the Fc region.

[0181] The present invention provides a large number of different CDR sets. In this case, a “full CDR set” comprises the three variable light and three variable heavy CDRs, e.g. a vlCDR1, vlCDR2, vlCDR3, vhCDR1, vhCDR2 and vhCDR3. These can be part of a larger variable light or variable heavy domain, respectfully. In addition, as more fully outlined herein, the variable heavy and variable light domains can be on separate polypeptide chains, when a heavy and light chain is used (for example when Fabs are used), or on a single polypeptide chain in the case of scFv sequences.

[0182] The CDRs contribute to the formation of the antigen-binding, or more specifically, epitope binding site of antibodies. “Epitope” refers to a determinant that interacts with a specific antigen binding site in the variable region of an antibody molecule known as a paratope. Epitopes are groupings of molecules such as amino acids or sugar side chains and usually have specific structural characteristics, as well as specific charge characteristics. A single antigen may have more than one epitope.

[0183] The epitope may comprise amino acid residues directly involved in the binding (also called immunodominant component of the epitope) and other amino acid residues, which are not directly involved in the binding, such as amino acid residues which are effectively blocked by the specifically antigen binding peptide; in other words, the amino acid residue is within the footprint of the specifically antigen binding peptide.

[0184] Epitopes may be either conformational or linear. A conformational epitope is produced by spatially juxtaposed amino acids from different segments of the linear polypeptide chain. A linear epitope is one produced by adjacent amino acid residues in a polypeptide chain. Conformational and nonconformational epitopes may be distinguished in that the binding to the former but not the latter is lost in the presence of denaturing solvents.

[0185] An epitope typically includes at least 3, and more usually, at least 5 or 8-10 amino acids in a unique spatial conformation. Antibodies that recognize the same epitope can be verified in a simple immunoassay showing the ability of one antibody to block the binding of another antibody to a target antigen, for example “binning.” As outlined below, the invention not only includes the enumerated antigen binding domains and antibodies herein, but those that compete for binding with the epitopes bound by the enumerated antigen binding domains.

[0186] Thus, the present invention provides different antibody domains. As described herein and known in the art, the heterodimeric antibodies of the invention comprise different domains within the heavy and light chains, which can be overlapping as well. These domains include, but are not limited to, the Fc domain, the CH1 domain, the CH2 domain, the CH3 domain, the hinge domain, the heavy constant domain (CH1-hinge-Fc domain or CH1-hinge-CH2-CH3), the variable heavy domain, the variable light domain, the light constant domain, Fab domains and scFv domains.

[0187] Thus, the “Fc domain” includes the —CH2-CH3 domain, and optionally a hinge domain (—H—CH2-CH3). In the embodiments herein, when a scFv is attached to an Fc domain, it is the C-terminus of the scFv construct that is attached to all or part of the hinge of the Fc domain; for example, it is generally attached to the sequence EPKS which is the beginning of the hinge. The heavy chain comprises a variable heavy domain and a constant domain, which includes a CH1-optional hinge-Fc domain comprising a CH2-CH3. The light chain comprises a variable light chain and the light constant domain. A scFv comprises a variable heavy chain, an scFv linker, and a variable light domain. In most of the constructs and sequences outlined herein, the C-terminus of the variable heavy chain is attached to the N-terminus of the scFv linker, the C-terminus of which is attached to the N-terminus of a variable light chain (N-vh-linker-vl-C) although that can be switched (N-vl-linker-vh-C).

[0188] Some embodiments of the invention comprise at least one scFv domain, which, while not naturally occurring, generally includes a variable heavy domain and a variable light domain, linked together by a scFv linker. As outlined herein, while the scFv domain is generally from N- to C-terminus oriented as vh-scFv linker-vl, this can be reversed for any of the scFv domains (or those constructed using vh and vl sequences from Fabs), to vl-scFv linker-vh, with optional linkers at one or both ends depending on the format (see generally FIG. 1).

[0189] As shown herein, there are a number of suitable linkers (for use as either domain linkers or scFv linkers) that can be used to covalently attach the recited domains, including traditional peptide bonds, generated by recombinant techniques. In some embodiments, the linker peptide may predominantly include the following amino acid residues: Gly, Ser, Ala, or Thr. The linker peptide should have a length that is adequate to link two molecules in such a way that they assume the correct conformation relative to one another so that they retain the desired activity. In one embodiment, the linker is from about 1 to 50 amino acids in length, preferably about 1 to 30 amino acids in length. In one embodiment, linkers of 1 to 20 amino acids in length may be used, with from about 5 to about 10 amino acids finding use in some embodiments. Useful linkers include glycine-serine polymers, including for example (GS)n, (GSGGS)n (SEQ ID NO: 37756), (GGGGS)n (SEQ ID NO: 37757), and (GGGS)n (SEQ ID NO: 37758), where n is an integer of at least one (and generally from 3 to 4), glycine-alanine polymers, alanine-serine polymers, and other flexible linkers. Alternatively, a variety of nonproteinaceous polymers, including but not limited to polyethylene glycol (PEG), polypropylene glycol, polyoxyalkylenes, or copolymers of polyethylene glycol and polypropylene glycol, may find use as linkers.

[0190] Other linker sequences may include any sequence of any length of CL/CH1 domain but not all residues of CL/CH1 domain; for example the first 5-12 amino acid residues of the CL/CH1 domains. Linkers can be derived from immunoglobulin light chain, for example Cκ or Cλ. Linkers can be derived from immunoglobulin heavy chains of any isotype, including for example Cγ1, Cγ2, Cγ3, Cγ4, Cα1, Cα2, Cδ, Cε, and Cμ. Linker sequences may also be derived from other proteins such as Ig-like proteins (e.g. TCR, FcR, KIR), hinge region-derived sequences, and other natural sequences from other proteins.

[0191] In some embodiments, the linker is a “domain linker”, used to link any two domains as outlined herein together. For example, in FIG. 1F, there may be a domain linker that attaches the C-terminus of the CH1 domain of the Fab to the N-terminus of the scFv, with another optional domain linker attaching the C-terminus of the scFv to the CH2 domain (although in many embodiments the hinge is used as this domain linker). While any suitable linker can be used, many embodiments utilize a glycine-serine polymer as the domain linker, including for example (GS)n, (GSGGS)n (SEQ ID NO: 37756), (GGGGS)n (SEQ ID NO: 37757), and (GGGS)n (SEQ ID NO: 37758), where n is an integer of at least one (and generally from 3 to 4 to 5) as well as any peptide sequence that allows for recombinant attachment of the two domains with sufficient length and flexibility to allow each domain to retain its biological function. In some cases, and with attention being paid to “strandedness”, as outlined below, charged domain linkers, as used in some embodiments of scFv linkers can be used.

[0192] In some embodiments, the linker is a scFv linker, used to covalently attach the vh and vl domains as discussed herein. In many cases, the scFv linker is a charged scFv linker, a number of which are shown in

[0193] FIG. 7. Accordingly, the present invention further provides charged scFv linkers, to facilitate the separation in pI between a first and a second monomer. That is, by incorporating a charged scFv linker, either positive or negative (or both, in the case of scaffolds that use scFvs on different monomers), this allows the monomer comprising the charged linker to alter the pI without making further changes in the Fc domains. These charged linkers can be substituted into any scFv containing standard linkers. Again, as will be appreciated by those in the art, charged scFv linkers are used on the correct “strand” or monomer, according to the desired changes in pI. For example, as discussed herein, to make triple F format heterodimeric antibody, the original pI of the Fv region for each of the desired antigen binding domains are calculated, and one is chosen to make an scFv, and depending on the pI, either positive or negative linkers are chosen.

[0194] Charged domain linkers can also be used to increase the pI separation of the monomers of the invention as well, and thus those included in

[0195] FIG. 7 can be used in any embodiment herein where a linker is utilized.

[0196] In particular, the formats depicted in FIG. 1 are antibodies, usually referred to as “heterodimeric antibodies”, meaning that the protein has at least two associated Fc sequences self-assembled into a heterodimeric Fc domain and at least two Fv regions, whether as Fabs or as scFvs.

### F. Chimeric and Humanized Antibodies

[0197] In certain embodiments, the antibodies of the invention comprise a heavy chain variable region from a particular germline heavy chain immunoglobulin gene and/or a light chain variable region from a particular germline light chain immunoglobulin gene. For example, such antibodies may comprise or consist of a human antibody comprising heavy or light chain variable regions that are “the product of” or “derived from” a particular germline sequence. A human antibody that is “the product of” or “derived from” a human germline immunoglobulin sequence can be identified as such by comparing the amino acid sequence of the human antibody to the amino acid sequences of human germline immunoglobulins and selecting the human germline immunoglobulin sequence that is closest in sequence (i.e., greatest % identity) to the sequence of the human antibody (using the methods outlined herein). A human antibody that is “the product of” or “derived from” a particular human germline immunoglobulin sequence may contain amino acid differences as compared to the germline sequence, due to, for example, naturally-occurring somatic mutations or intentional introduction of site-directed mutation. However, a humanized antibody typically is at least 90% identical in amino acids sequence to an amino acid sequence encoded by a human germline immunoglobulin gene and contains amino acid residues that identify the antibody as being derived from human sequences when compared to the germline immunoglobulin amino acid sequences of other species (e.g., murine germline sequences). In certain cases, a humanized antibody may be at least 95, 96, 97, 98 or 99%, or even at least 96%, 97%, 98%, or 99% identical in amino acid sequence to the amino acid sequence encoded by the germline immunoglobulin gene. Typically, a humanized antibody derived from a particular human germline sequence will display no more than 10-20 amino acid differences from the amino acid sequence encoded by the human germline immunoglobulin gene (prior to the introduction of any skew, pI and ablation variants herein; that is, the number of variants is generally low, prior to the introduction of the variants of the invention). In certain cases, the humanized antibody may display no more than 5, or even no more than 4, 3, 2, or 1 amino acid difference from the amino acid sequence encoded by the germline immunoglobulin gene (again, prior to the introduction of any skew, pI and ablation variants herein; that is, the number of variants is generally low, prior to the introduction of the variants of the invention).

[0198] In one embodiment, the parent antibody has been affinity matured, as is known in the art. Structure-based methods may be employed for humanization and affinity maturation, for example as described in U.S. Ser. No. 11/004,590. Selection based methods may be employed to humanize and/or affinity mature antibody variable regions, including but not limited to methods described in Wu et al., 1999, J. Mol. Biol. 294:151-162; Baca et al., 1997, J. Biol. Chem. 272(16):10678-10684; Rosok et al., 1996, J. Biol. Chem. 271(37): 22611-22618; Rader et al., 1998, Proc. Natl. Acad. Sci. USA 95: 8910-8915; Krauss et al., 2003, Protein Engineering 16(10):753-759, all entirely incorporated by reference. Other humanization methods may involve the grafting of only parts of the CDRs, including but not limited to methods described in U.S. Ser. No. 09/810,510; Tan et al., 2002, J. Immunol. 169:1119-1125; De Pascalis et al., 2002, J. Immunol. 169:3076-3084, all entirely incorporated by reference.

### IV. HETERODIMERIC ANTIBODIES

[0199] Accordingly, in some embodiments the present invention provides heterodimeric checkpoint antibodies that rely on the use of two different heavy chain variant Fc sequences, that will self-assemble to form heterodimeric Fc domains and heterodimeric antibodies.

[0200] The present invention is directed to novel constructs to provide heterodimeric antibodies that allow binding to more than one checkpoint antigen or ligand, e.g. to allow for bispecific binding. The heterodimeric antibody constructs are based on the self-assembling nature of the two Fc domains of the heavy chains of antibodies, e.g. two “monomers” that assemble into a “dimer”. Heterodimeric antibodies are made by altering the amino acid sequence of each monomer as more fully discussed below. Thus, the present invention is generally directed to the creation of heterodimeric checkpoint antibodies which can co-engage antigens in several ways, relying on amino acid variants in the constant regions that are different on each chain to promote heterodimeric formation and/or allow for ease of purification of heterodimers over the homodimers.

[0201] Thus, the present invention provides bispecific antibodies. An ongoing problem in antibody technologies is the desire for “bispecific” antibodies that bind to two different antigens simultaneously, in general thus allowing the different antigens to be brought into proximity and resulting in new functionalities and new therapies. In general, these antibodies are made by including genes for each heavy and light chain into the host cells. This generally results in the formation of the desired heterodimer (A-B), as well as the two homodimers (A-A and B-B (not including the light chain heterodimeric issues)). However, a major obstacle in the formation of bispecific antibodies is the difficulty in purifying the heterodimeric antibodies away from the homodimeric antibodies and/or biasing the formation of the heterodimer over the formation of the homodimers.

[0202] There are a number of mechanisms that can be used to generate the heterodimers of the present invention. In addition, as will be appreciated by those in the art, these mechanisms can be combined to ensure high heterodimerization. Thus, amino acid variants that lead to the production of heterodimers are referred to as “heterodimerization variants”. As discussed below, heterodimerization variants can include steric variants (e.g. the “knobs and holes” or “skew” variants described below and the “charge pairs” variants described below) as well as “pI variants”, which allows purification of homodimers away from heterodimers. As is generally described in WO2014/145806, hereby incorporated by reference in its entirety and specifically as below for the discussion of “heterodimerization variants”, useful mechanisms for heterodimerization include “knobs and holes” (“KIH”; sometimes herein as “skew” variants (see discussion in WO2014/145806), “electrostatic steering” or “charge pairs” as described in WO2014/145806, pI variants as described in WO2014/145806, and general additional Fc variants as outlined in WO2014/145806 and below.

[0203] In the present invention, there are several basic mechanisms that can lead to ease of purifying heterodimeric antibodies; one relies on the use of pI variants, such that each monomer has a different pI, thus allowing the isoelectric purification of A-A, A-B and B-B dimeric proteins. Alternatively, some scaffold formats, such as the “triple F” format, also allows separation on the basis of size. As is further outlined below, it is also possible to “skew” the formation of heterodimers over homodimers. Thus, a combination of steric heterodimerization variants and pI or charge pair variants find particular use in the invention.

[0204] In general, embodiments of particular use in the present invention rely on sets of variants that include skew variants, which encourage heterodimerization formation over homodimerization formation, coupled with pI variants, which increase the pI difference between the two monomers to facilitate purification of heterodimers away from homodimers.

[0205] Additionally, as more fully outlined below, depending on the format of the heterodimer antibody, pI variants can be either contained within the constant and/or Fc domains of a monomer, or charged linkers, either domain linkers or scFv linkers, can be used.

[0206] That is, scaffolds that utilize scFv(s) such as the Triple F format can include charged scFv linkers (either positive or negative), that give a further pI boost for purification purposes. As will be appreciated by those in the art, some Triple F formats are useful with just charged scFv linkers and no additional pI adjustments, although the invention does provide pI variants that are on one or both of the monomers, and/or charged domain linkers as well. In addition, additional amino acid engineering for alternative functionalities may also confer pI changes, such as Fc, FcRn and KO variants.

[0207] In the present invention that utilizes pI as a separation mechanism to allow the purification of heterodimeric proteins, amino acid variants can be introduced into one or both of the monomer polypeptides; that is, the pI of one of the monomers (referred to herein for simplicity as “monomer A”) can be engineered away from monomer B, or both monomer A and B change be changed, with the pI of monomer A increasing and the pI of monomer B decreasing. As discussed, the pI changes of either or both monomers can be done by removing or adding a charged residue (e.g. a neutral amino acid is replaced by a positively or negatively charged amino acid residue, e.g. glycine to glutamic acid), changing a charged residue from positive or negative to the opposite charge (e.g. aspartic acid to lysine) or changing a charged residue to a neutral residue (e.g. loss of a charge; lysine to serine.). A number of these variants are shown in the Figures.

[0208] Accordingly, this embodiment of the present invention provides for creating a sufficient change in pI in at least one of the monomers such that heterodimers can be separated from homodimers. As will be appreciated by those in the art, and as discussed further below, this can be done by using a “wild type” heavy chain constant region and a variant region that has been engineered to either increase or decrease its pI (wt A-+B or wt A-−B), or by increasing one region and decreasing the other region (A+-B− or A-B+).

[0209] Thus, in general, a component of some embodiments of the present invention are amino acid variants in the constant regions of antibodies that are directed to altering the isoelectric point (pI) of at least one, if not both, of the monomers of a dimeric protein to form “pI antibodies” by incorporating amino acid substitutions (“pI variants” or “pI substitutions”) into one or both of the monomers. As shown herein, the separation of the heterodimers from the two homodimers can be accomplished if the pIs of the two monomers differ by as little as 0.1 pH unit, with 0.2, 0.3, 0.4 and 0.5 or greater all finding use in the present invention.

[0210] As will be appreciated by those in the art, the number of pI variants to be included on each or both monomer(s) to get good separation will depend in part on the starting pI of the components, for example in the triple F format, the starting pI of the scFv and Fab of interest. That is, to determine which monomer to engineer or in which “direction” (e.g. more positive or more negative), the Fv sequences of the two target antigens are calculated and a decision is made from there. As is known in the art, different Fvs will have different starting pIs which are exploited in the present invention. In general, as outlined herein, the pIs are engineered to result in a total pI difference of each monomer of at least about 0.1 logs, with 0.2 to 0.5 being preferred as outlined herein.

[0211] Furthermore, as will be appreciated by those in the art and outlined herein, in some embodiments, heterodimers can be separated from homodimers on the basis of size. As shown in FIG. 1 for example, several of the formats allow separation of heterodimers and homodimers on the basis of size.

### A. Heterodimerization Variants

[0212] The present invention provides heterodimeric proteins, including heterodimeric antibodies in a variety of formats, which utilize heterodimeric variants to allow for heterodimeric formation and/or purification away from homodimers.

[0213] There are a number of suitable pairs of sets of heterodimerization skew variants. These variants come in “pairs” of “sets”. That is, one set of the pair is incorporated into the first monomer and the other set of the pair is incorporated into the second monomer. It should be noted that these sets do not necessarily behave as “knobs in holes” variants, with a one-to-one correspondence between a residue on one monomer and a residue on the other; that is, these pairs of sets form an interface between the two monomers that encourages heterodimer formation and discourages homodimer formation, allowing the percentage of heterodimers that spontaneously form under biological conditions to be over 90%, rather than the expected 50% (25% homodimer A/A:50% heterodimer A/B:25% homodimer B/B).

### B. Steric Variants

[0214] In some embodiments, the formation of heterodimers can be facilitated by the addition of steric variants. That is, by changing amino acids in each heavy chain, different heavy chains are more likely to associate to form the heterodimeric structure than to form homodimers with the same Fc amino acid sequences. Suitable steric variants are included in in the Figures.

[0215] One mechanism is generally referred to in the art as “knobs and holes”, referring to amino acid engineering that creates steric influences to favor heterodimeric formation and disfavor homodimeric formation can also optionally be used; this is sometimes referred to as “knobs and holes”, as described in U.S. Ser. No. 61/596,846, Ridgway et al., Protein Engineering 9(7):617 (1996); Atwell et al., J. Mol. Biol. 1997 270:26; U.S. Pat. No. 8,216,805, all of which are hereby incorporated by reference in their entirety. The Figures identify a number of “monomer A-monomer B” pairs that rely on “knobs and holes”. In addition, as described in Merchant et al., Nature Biotech. 16:677 (1998), these “knobs and hole” mutations can be combined with disulfide bonds to skew formation to heterodimerization.

[0216] An additional mechanism that finds use in the generation of heterodimers is sometimes referred to as “electrostatic steering” as described in Gunasekaran et al., J. Biol. Chem. 285(25):19637 (2010), hereby incorporated by reference in its entirety. This is sometimes referred to herein as “charge pairs”. In this embodiment, electrostatics are used to skew the formation towards heterodimerization. As those in the art will appreciate, these may also have have an effect on pI, and thus on purification, and thus could in some cases also be considered pI variants. However, as these were generated to force heterodimerization and were not used as purification tools, they are classified as “steric variants”. These include, but are not limited to, D221E/P228E/L368E paired with D221R/P228R/K409R (e.g. these are “monomer corresponding sets) and C220E/P228E/368E paired with C220R/E224R/P228R/K409R.

[0217] Additional monomer A and monomer B variants that can be combined with other variants, optionally and independently in any amount, such as pI variants outlined herein or other steric variants that are shown in FIG. 37 of US 2012/0149876, the figure and legend and SEQ ID NOs of which are incorporated expressly by reference herein.

[0218] In some embodiments, the steric variants outlined herein can be optionally and independently incorporated with any pI variant (or other variants such as Fc variants, FcRn variants, etc.) into one or both monomers, and can be independently and optionally included or excluded from the proteins of the invention.

[0219] A list of suitable skew variants is found in FIG. 3 and FIG. 8 showing some pairs of particular utility in many embodiments. Of particular use in many embodiments are the pairs of sets including, but not limited to, S364K/E357Q:L368D/K370S; L368D/K370S:S364K; L368E/K370S:S364K; T411T/E360E/Q362E:D401K; L368D/K370S:S364K/E357L, K370S:S364K/E357Q and T366S/L368A/Y407V:T366W (optionally including a bridging disulfide, T366S/L368A/Y407V/Y349C:T366W/S354C). In terms of nomenclature, the pair “S364K/E357Q:L368D/K370S” means that one of the monomers has the double variant set S364K/E357Q and the other has the double variant set L368D/K370S; as above, the “strandedness” of these pairs depends on the starting pI.

### C. pI (Isoelectric Point) Variants for Heterodimers

[0220] In general, as will be appreciated by those in the art, there are two general categories of pI variants: those that increase the pI of the protein (basic changes) and those that decrease the pI of the protein (acidic changes). As described herein, all combinations of these variants can be done: one monomer may be wild type, or a variant that does not display a significantly different pI from wild-type, and the other can be either more basic or more acidic. Alternatively, each monomer is changed, one to more basic and one to more acidic.

[0221] Preferred combinations of pI variants are shown in FIG. 4. As outlined herein and shown in the figures, these changes are shown relative to IgG1, but all isotypes can be altered this way, as well as isotype hybrids. In the case where the heavy chain constant domain is from IgG2-4, R133E and R133Q can also be used.

[0222] In one embodiment, for example in the FIGS. 1A, E, F, G, H and I formats, a preferred combination of pI variants has one monomer (the negative Fab side) comprising 208D/295E/384D/418E/421D variants (N208D/Q295E/N384D/Q418E/N421D when relative to human IgG1) and a second monomer (the positive scFv side) comprising a positively charged scFv linker, including (GKPGS)₄ (SEQ ID NO: 37755). However, as will be appreciated by those in the art, the first monomer includes a CH1 domain, including position 208. Accordingly, in constructs that do not include a CH1 domain (for example for antibodies that do not utilize a CH1 domain on one of the domains, for example in a dual scFv format or a “one armed” format such as those depicted in FIG. 1B, C or D), a preferred negative pI variant Fc set includes 295E/384D/418E/421D variants (Q295E/N384D/Q418E/N421D when relative to human IgG1).

[0223] Accordingly, in some embodiments, one monomer has a set of substitutions from FIG. 4 and the other monomer has a charged linker (either in the form of a charged scFv linker because that monomer comprises an scFv or a charged domain linker, as the format dictates, which can be selected from those depicted in FIG. 7).

[0224] 1. Isotypic Variants

[0225] In addition, many embodiments of the invention rely on the “importation” of pI amino acids at particular positions from one IgG isotype into another, thus reducing or eliminating the possibility of unwanted immunogenicity being introduced into the variants. A number of these are shown in FIG. 21 of US Publ. 2014/0370013, hereby incorporated by reference. That is, IgG1 is a common isotype for therapeutic antibodies for a variety of reasons, including high effector function. However, the heavy constant region of IgG1 has a higher pI than that of IgG2 (8.10 versus 7.31). By introducing IgG2 residues at particular positions into the IgG1 backbone, the pI of the resulting monomer is lowered (or increased) and additionally exhibits longer serum half-life. For example, IgG1 has a glycine (pI 5.97) at position 137, and IgG2 has a glutamic acid (pI 3.22); importing the glutamic acid will affect the pI of the resulting protein. As is described below, a number of amino acid substitutions are generally required to significant affect the pI of the variant antibody. However, it should be noted as discussed below that even changes in IgG2 molecules allow for increased serum half-life.

[0226] In other embodiments, non-isotypic amino acid changes are made, either to reduce the overall charge state of the resulting protein (e.g. by changing a higher pI amino acid to a lower pI amino acid), or to allow accommodations in structure for stability, etc. as is more further described below.

[0227] In addition, by pI engineering both the heavy and light constant domains, significant changes in each monomer of the heterodimer can be seen. As discussed herein, having the pIs of the two monomers differ by at least 0.5 can allow separation by ion exchange chromatography or isoelectric focusing, or other methods sensitive to isoelectric point.

### D. Calculating pI

[0228] The pI of each monomer can depend on the pI of the variant heavy chain constant domain and the pI of the total monomer, including the variant heavy chain constant domain and the fusion partner. Thus, in some embodiments, the change in pI is calculated on the basis of the variant heavy chain constant domain, using the chart in the FIG. 19 of US Pub. 2014/0370013. As discussed herein, which monomer to engineer is generally decided by the inherent pI of the Fv and scaffold regions. Alternatively, the pI of each monomer can be compared.

### E. pI Variants that Also Confer Better FcRn In Vivo Binding

[0229] In the case where the pI variant decreases the pI of the monomer, they can have the added benefit of improving serum retention in vivo.

[0230] Although still under examination, Fc regions are believed to have longer half-lives in vivo, because binding to FcRn at pH 6 in an endosome sequesters the Fc (Ghetie and Ward, 1997 Immunol Today. 18(12): 592-598, entirely incorporated by reference). The endosomal compartment then recycles the Fc to the cell surface. Once the compartment opens to the extracellular space, the higher pH, ˜7.4, induces the release of Fc back into the blood. In mice, Dall′ Acqua et al. showed that Fc mutants with increased FcRn binding at pH 6 and pH 7.4 actually had reduced serum concentrations and the same half life as wild-type Fc (Dall′ Acqua et al. 2002, J. Immunol. 169:5171-5180, entirely incorporated by reference). The increased affinity of Fc for FcRn at pH 7.4 is thought to forbid the release of the Fc back into the blood. Therefore, the Fc mutations that will increase Fc's half-life in vivo will ideally increase FcRn binding at the lower pH while still allowing release of Fc at higher pH. The amino acid histidine changes its charge state in the pH range of 6.0 to 7.4. Therefore, it is not surprising to find His residues at important positions in the Fc/FcRn complex.

[0231] Recently it has been suggested that antibodies with variable regions that have lower isoelectric points may also have longer serum half-lives (Igawa et al., 2010 PEDS. 23(5): 385-392, entirely incorporated by reference). However, the mechanism of this is still poorly understood. Moreover, variable regions differ from antibody to antibody. Constant region variants with reduced pI and extended half-life would provide a more modular approach to improving the pharmacokinetic properties of antibodies, as described herein.

### F. Additional Fc Variants for Additional Functionality

[0232] In addition to pI amino acid variants, there are a number of useful Fc amino acid modification that can be made for a variety of reasons, including, but not limited to, altering binding to one or more FcγR receptors, altered binding to FcRn receptors, etc.

[0233] Accordingly, the proteins of the invention can include amino acid modifications, including the heterodimerization variants outlined herein, which includes the pI variants and steric variants. Each set of variants can be independently and optionally included or excluded from any particular heterodimeric protein.

### G. FcγR Variants

[0234] Accordingly, there are a number of useful Fc substitutions that can be made to alter binding to one or more of the FcγR receptors. Substitutions that result in increased binding as well as decreased binding can be useful. For example, it is known that increased binding to FcγRIIIa results in increased ADCC (antibody dependent cell-mediated cytotoxicity; the cell-mediated reaction wherein nonspecific cytotoxic cells that express FcγRs recognize bound antibody on a target cell and subsequently cause lysis of the target cell). Similarly, decreased binding to FcγRIIb (an inhibitory receptor) can be beneficial as well in some circumstances. Amino acid substitutions that find use in the present invention include those listed in U.S. Ser. No. 11/124,620 (particularly FIG. 41), Ser. Nos. 11/174,287, 11/396,495, 11/538,406, all of which are expressly incorporated herein by reference in their entirety and specifically for the variants disclosed therein. Particular variants that find use include, but are not limited to, 236A, 239D, 239E, 332E, 332D, 239D/332E, 267D, 267E, 328F, 267E/328F, 236A/332E, 239D/332E/330Y, 239D, 332E/330L, 243A, 243L, 264A, 264V and 299T.

[0235] In addition, there are additional Fc substitutions that find use in increased binding to the FcRn receptor and increased serum half life, as specifically disclosed in U.S. Ser. No. 12/341,769, hereby incorporated by reference in its entirety, including, but not limited to, 434S, 434A, 428L, 308F, 2591, 428L/434S, 2591/308F, 4361/428L, 4361 or V/434S, 436V/428L and 2591/308F/428L.

### H. Ablation Variants

[0236] Similarly, another category of functional variants are “FcγR ablation variants” or “Fc knock out (FcKO or KO)” variants. In these embodiments, for some therapeutic applications, it is desirable to reduce or remove the normal binding of the Fc domain to one or more or all of the Fcγ receptors (e.g. FcγR1, FcγRIIa, FcγRIIb, FcγRIIIa, etc.) to avoid additional mechanisms of action. That is, for example, in many embodiments, particularly in the use of bispecific checkpoint antibodies desirable to ablate FcγRIIIa binding to eliminate or significantly reduce ADCC activity such that one of the Fc domains comprises one or more Fcγ receptor ablation variants. These ablation variants are depicted in FIG. 5, and each can be independently and optionally included or excluded, with preferred aspects utilizing ablation variants selected from the group consisting of G236R/L328R, E233P/L234V/L235A/G236del/S239K, E233P/L234V/L235A/G236del/S267K, E233P/L234V/L235A/G236del/S239K/A327G, E233P/L234V/L235A/G236del/S267K/A327G and E233P/L234V/L235A/G236del. It should be noted that the ablation variants referenced herein ablate FcγR binding but generally not FcRn binding.

[0237] As is known in the art, the Fc domain of human IgG1 has the highest binding to the Fcγ receptors, and thus ablation variants can be used when the constant domain (or Fc domain) in the backbone of the heterodimeric antibody is IgG1. Alternatively, or in addition to ablation variants in an IgG1 background, mutations at the glycosylation position 297 (generally to A or S) can significantly ablate binding to FcγRIIIa, for example. Human IgG2 and IgG4 have naturally reduced binding to the Fcγ receptors, and thus those backbones can be used with or without the ablation variants.

### I. Combination of Heterodimeric and Fc Variants

[0238] As will be appreciated by those in the art, all of the recited heterodimerization variants (including skew and/or pI variants) can be optionally and independently combined in any way, as long as they retain their “strandedness” or “monomer partition”. In addition, all of these variants can be combined into any of the heterodimerization formats.

[0239] In the case of pI variants, while embodiments finding particular use are shown in the Figures, other combinations can be generated, following the basic rule of altering the pI difference between two monomers to facilitate purification.

[0240] In addition, any of the heterodimerization variants, skew and pI, are also independently and optionally combined with Fc ablation variants, Fc variants, FcRn variants, as generally outlined herein.

### V. USEFUL FORMATS OF THE INVENTION

[0241] As will be appreciated by those in the art and discussed more fully below, the bispecific heterodimeric antibodies of the present invention can take on a wide variety of configurations, as are generally depicted in FIG. 1. Some figures depict “single ended” configurations, where there is one type of specificity on one “arm” of the molecule and a different specificity on the other “arm”. Other figures depict “dual ended” configurations, where there is at least one type of specificity at the “top” of the molecule and one or more different specificities at the “bottom” of the molecule. Thus, the present invention is directed to novel immunoglobulin compositions that co-engage a different first and a second antigen.

[0242] As will be appreciated by those in the art, the heterodimeric formats of the invention can have different valencies as well as be bispecific. That is, heterodimeric antibodies of the invention can be bivalent and bispecific, wherein one checkpoint target is bound by one ABD and the other checkpoint target is bound by a second ABD. The heterodimeric antibodies can also be trivalent and bispecific, wherein the first antigen is bound by two ABDs and the second antigen by a second ABD.

### A. Bottle Opener Format

[0243] One heterodimeric scaffold that finds particular use in the present invention is the “triple F” or “bottle opener” scaffold format as shown in FIG. 1A. In this embodiment, one heavy chain of the antibody contains a single chain Fv (“scFv”, as defined below) and the other heavy chain is a “regular” Fab format, comprising a variable heavy chain and a light chain. This structure is sometimes referred to herein as “triple F” format (scFv-Fab-Fc) or the “bottle-opener” format, due to a rough visual similarity to a bottle-opener (see FIG. 1A). The two chains are brought together by the use of amino acid variants in the constant regions (e.g. the Fc domain, the CH1 domain and/or the hinge region) that promote the formation of heterodimeric antibodies as is described more fully below.

[0244] There are several distinct advantages to the present “triple F” format. As is known in the art, antibody analogs relying on two scFv constructs often have stability and aggregation problems, which can be alleviated in the present invention by the addition of a “regular” heavy and light chain pairing. In addition, as opposed to formats that rely on two heavy chains and two light chains, there is no issue with the incorrect pairing of heavy and light chains (e.g. heavy 1 pairing with light 2, etc.).

[0245] Many of the embodiments outlined herein rely in general on the bottle opener format that comprises a first monomer comprising an scFv, comprising a variable heavy and a variable light domain, covalently attached using an scFv linker (charged, in many but not all instances), where the scFv is covalently attached to the N-terminus of a first Fc domain usually through a domain linker (which, as outlined herein can either be un-charged or charged and can be exogeneous or endogeneous (e.g. all or part of the native hinge domain). The second monomer of the bottle opener format is a heavy chain, and the composition further comprises a light chain.

[0246] In addition, the Fc domains of the bottle opener format generally comprise skew variants (e.g. a set of amino acid substitutions as shown in FIG. 3 and FIG. 8, with particularly useful skew variants being selected from the group consisting of S364K/E357Q:L368D/K370S; L368D/K370S:S364K; L368E/K370S:S364K; T411T/E360E/Q362E:D401K; L368D/K370S:S364K/E357L, K370S:S364K/E357Q, T366S/L368A/Y407V:T366W and T366S/L368A/Y407V/Y349C:T366W/S354C), optionally ablation variants (including those shown in FIG. 5), optionally charged scFv linkers (including those shown in FIG. 7) and the heavy chain comprises pI variants (including those shown in FIG. 4).

[0247] In some embodiments, the bottle opener format includes skew variants, pI variants, and ablation variants. Accordingly, some embodiments include bottle opener formats that comprise: a) a first monomer (the “scFv monomer”) that comprises a charged scFv linker (with the +H sequence of FIG. 7 being preferred in some embodiments), the skew variants S364K/E357Q, the ablation variants E233P/L234V/L235A/G236del/S267K, and an Fv that binds to a checkpoint receptor as outlined herein; b) a second monomer (the “Fab monomer”) that comprises the skew variants L368D/K370S, the pI variants N208D/Q295E/N384D/Q418E/N421D, the ablation variants E233P/L234V/L235A/G236del/S267K, and a variable heavy domain that, with the variable light domain, makes up an Fv that binds to a second checkpoint receptor as outlined herein; and c) a light chain. In this particular embodiment, suitable monomer Fv pairs include (Fabs listed first, scFvs second) PD-1 and CTLA-4, CTLA-4 and PD-1, PD-1 and TIM-3, TIM-3 and PD-1, PD-1 and LAG-3, LAG-3×PD1, PD-1 and TIGIT, TIGIT and PD-1, PD-1 and BTLA, BTLA and PD-1, CTLA-4 and TIM-3, TIM-3 and CTLA-4, CTLA-4 and LAG-3, LAG-3 and CTLA-4, CTLA-4 and TIGIT, TIGIT and CTLA-4, CTLA-4 and BTLA, BTLA and CTLA-4, TIM-3 and LAG-3, LAG-3 and TIM-3, TIM-3 and TIGIT, TIGIT and TIM-3, TIM-3 and BTLA, BTLA and TIM-3. LAG-3 and TIGIT, TIGIT and LAG-3, LAG-3 and BTLA, BTLA and LAG-3, BTLA and TIGIT, and TIGIT and BTLA. In this particular embodiment, a bottle opener with these variants have the scFv side comprising the ABD 1G6_L1.194_H1.279 that binds to PD-1 finds particular use. In this particular embodiment, a bottle opener with these variants have the scFv side comprising the [CTLA-4]_H3.23_L0.129 ABD that binds to CTLA-4 finds particular use.

[0248] Of particular use in some embodiments, particularly in the bottle opener format, are CTLA-4×PD-1, LAG-3×PD-1, BTLA×PD-1, TIM-3×PD-1 and LAG-3×CTLA-4.

[0249] The ABD sequences for these combinations can be as disclosed in the sequence listing or as shown in FIGS. 9 to 13, and in any combination as shown in FIG. 39 and FIG. 40.

[0250] In some embodiments, the bottle opener format includes skew variants, pI variants, ablation variants and FcRn variants. Accordingly, some embodiments include bottle opener formats that comprise: a) a first monomer (the “scFv monomer”) that comprises a charged scFv linker (with the +H sequence of FIG. 7 being preferred in some embodiments), the skew variants S364K/E357Q, the ablation variants E233P/L234V/L235A/G236del/S267K, the FcRn variants M428L/N434S and an Fv that binds to a checkpoint inhibitor as outlined herein; b) a second monomer (the “Fab monomer”) that comprises the skew variants L368D/K370S, the pI variants N208D/Q295E/N384D/Q418E/N421D, the ablation variants E233P/L234V/L235A/G236del/S267K, the FcRn variants M428L/N434S and a variable heavy domain that, with the variable light domain, makes up an Fv that binds to a second checkpoint inhibitor as outlined herein; and c) a light chain. In this particular embodiment, suitable Fv pairs include (Fabs listed first, scFvs second) PD-1 and CTLA-4, CTLA-4 and PD-1, PD-1 and TIM-3, TIM-3 and PD-1, PD-1 and LAG-3, LAG-3×PD1, PD-1 and TIGIT, TIGIT and PD-1, PD-1 and BTLA, BTLA and PD-1, CTLA-4 and TIM-3, TIM-3 and CTLA-4, CTLA-4 and LAG-3, LAG-3 and CTLA-4, CTLA-4 and TIGIT, TIGIT and CTLA-4, CTLA-4 and BTLA, BTLA and CTLA-4, TIM-3 and LAG-3, LAG-3 and TIM-3, TIM-3 and TIGIT, TIGIT and TIM-3, TIM-3 and BTLA, BTLA and TIM-3. LAG-3 and TIGIT, TIGIT and LAG-3, LAG-3 and BTLA, BTLA and LAG-3, BTLA and TIGIT, and TIGIT and BTLA. In this particular embodiment, a bottle opener with these variants have the scFv side comprising the ABD 1G6_L1.194_H1.279 that binds to PD-1 finds particular use. In this particular embodiment, a bottle opener with these variants have the scFv side comprising the [CTLA-4]_H3.23_L0.129 ABD that binds to CTLA-4 finds particular use.

[0251] Of particular use in some embodiments, particularly in the bottle opener format, are CTLA-4×PD-1, LAG-3×PD-1, BTLA×PD-1, TIM-3×PD-1 and LAG-3×CTLA-4.

[0252] Specifically, FIG. 37 shows some bottle opener “backbone” sequences that are missing the Fv sequences that can be used in the present invention. That is, Fv sequences for the scFv portion and the Fab portion can be used from any combination of PD-1 and CTLA-4, PD-1 and TIM-3, PD-1 and LAG-3, PD-1 and TIGIT, PD-1 and BTLA, CTLA-4 and TIM-3, CTLA-4 and LAG-3, CTLA-4 and TIGIT, CTLA-4 and BTLA, TIM-3 and LAG-3, TIM-3 and TIGIT, TIM-3 and BTLA, LAG-3 and TIGIT, LAG-3 and BTLA and TIGIT and BTLA. The sequences can be any of those disclosed herein in the sequence listing and/or in FIGS. 9 to 13.

[0253] For bottle opener backbone 1 from FIG. 37, specific Fv combinations of use in the present invention include PD-1 and CTLA-4, PD-1 and TIM-3, PD-1 and LAG-3, PD-1 and TIGIT, PD-1 and BTLA, CTLA-4 and TIM-3, CTLA-4 and LAG-3, CTLA-4 and TIGIT, CTLA-4 and BTLA, TIM-3 and LAG-3, TIM-3 and TIGIT, TIM-3 and BTLA, LAG-3 and TIGIT, LAG-3 and BTLA and TIGIT and BTLA. The sequences can be any of those disclosed herein in the sequence listing and/or in FIGS. 9 to 13.

[0254] For bottle opener backbone 1 from FIG. 37, specific Fv combinations of use in the present invention include CTLA-4 (Fab)×PD-1 (scFv), PD-1 (Fab)×CTLA-4 (scFv), LAG-3 (Fab)×PD-1 (scFv), BTLA (Fab)×PD-1 (scFv) and LAG-3 (Fab)×CTLA-4 (scFv).

[0255] For bottle opener backbone 1 from FIG. 37 (optionally including the 428L/434S variants), specific ABDs that bind human PD-1 include, but are not limited to, 1G6_H1.279_L1.194, 1G6_H1.280_L1.224; 1G6_L1.194_H1.279, 1G6_L1.210_H1.288 and 2E9_H1L1, as well as those listed in SEQ ID NOs: 6209-11464, SEQ ID NOs: 11465-17134, SEQ ID NOs: 33003-33072, SEQ ID NOs: 33073-35394 and SEQ ID NOs: 36127-36146.

[0256] For bottle opener backbone 1 from FIG. 37 (optionally including the 428L/434S variants), specific ABDs that bind human CTLA-4 include, but are not limited to, [CTLA-4]_H0.25_L0; [CTLA-4]_H0.26_L0; [CTLA-4]_H0.27_L0; [CTLA-4]_H0.29_L0; [CTLA-4]_H0.38_L0; [CTLA-4]_H0.39_L0; [CTLA-4]_H0.40L0; [CTLA-4]_H0.70_L0; [CTLA-4]_H0_L0.22; [CTLA-4]_H2_L0; [CTLA-4]_H3.21_L0.124; [CTLA-4]_H3.21_L0.129; [CTLA-4]_H3.21_L0.132; [CTLA-4]_H3.23_L0.124; [CTLA-4]_H3.23_L0.129; [CTLA-4]_H3.23_L0.132; [CTLA-4]_H3.25_L0.124; [CTLA-4]_H3.25_L0.129; [CTLA-4]_H3.25_L0.132; [CTLA-4]_H3.4_L0.118; [CTLA-4]_H3.4_L0.119; [CTLA-4]_H3.4_L0.12; [CTLA-4]_H3.4_L0.121; [CTLA-4]_H3.4_L0.122; [CTLA-4]_H3.4_L0.123; [CTLA-4]_H3.4_L0.124; [CTLA-4]_H3.4_L0.125; [CTLA-4]_H3.4_L0.126; [CTLA-4]_H3.4_L0.127; [CTLA-4]_H3.4_L0.128; [CTLA-4]_H3.4_L0.129; [CTLA-4]_H3.4_L0.130; [CTLA-4]_H3.4_L0.131; [CTLA-4]_H3.4_L0.132; [CTLA-4]_H3.5_L2.1; [CTLA-4]_H3.5_L2.2; [CTLA-4]_H3.5_L2.3; [CTLA-4]_H3_L0; [CTLA-4]_H3_L0.22; [CTLA-4]_H3_L0.44; [CTLA-4]_H3_L0.67 and [CTLA-4]_H3_L0.74, as well as those listed in SEQ ID NOs: 21-2918, SEQ ID NOs: 2919-6208, SEQ ID NOs: 36739-36818 and SEQ ID NOs: 35395-35416.

[0257] For bottle opener backbone 1 from FIG. 37 (optionally including the 428L/434S variants), specific ABDs that bind human LAG-3 include, but are not limited to, 2A11_H0L0; 2A11_H1.125_L2.113; 2A11_H1.144_L2.142; 2A11_H1_L2.122; 2A11_H1_L2.123; 2A11_H1_L2.124; 2A11_H1_L2.25; 2A11_H1_L2.47; 2A11_H1_L2.50; 2A11_H1_L2.91; 2A11_H1_L2.93; 2A11_H1_L2.97; 2A11_H1L1; 2A11_H1L2; 2A11_H2L2; 2A11_H3L1; 2A11_H3L2; 2A11_H4L1; 2A11_H4L2; 7G8_H0L0; 7G8_H1L1; 7G8_H3.18_L1.11; 7G8_H3.23_L1.11; 7G8_H3.28_L1; 7G8_H3.28_L1.11; 7G8_H3.28_L1.13; 7G8_H3.30_L1.34; 7G8_H3.30_L1.34; and 7G8_H3L1, as well as those listed in SEQ ID NOs: 17135-20764, SEQ ID NOs: 36819-36962, SEQ ID NOs: 35417-35606, SEQ ID NOs: 25194-32793 and SEQ ID NOs: 32794-33002.

[0258] For bottle opener backbone 1 from FIG. 37 (optionally including the 428L/434S variants), specific ABDs that bind human BTLA include, but are not limited to, 9C6_H0L0; 9C6_H1.1L1; and 9C6_H1.11_L1, as well as those listed in SEQ ID SEQ ID NOs: 20885-21503 and SEQ ID NOs: 36707-36738.

[0259] For bottle opener backbone 1 from FIG. 37 (optionally including the 428L/434S variants), specific ABDs that bind human TIM-3 include, but are not limited to, 1D10_H0L0; 1D12_H0L0; 3H3_H1_L2.1; 6C8_H0L0; 6D9_H0_1D12_L0; 7A9_H0L0; 7B11_H0L0; 7B11var_H0L0 and 7C2_H0L0, as well as those listed in SEQ ID NOs: 20765-20884, SEQ ID NOs: 37587-37698 and SEQ ID NOs: 36347-36706.

[0260] Specific bottle opener embodiments are outlined below.

### B. mAb-Fv Format

[0261] One heterodimeric scaffold that finds particular use in the present invention is the mAb-Fv format shown in FIG. 1H. In this embodiment, the format relies on the use of a C-terminal attachment of an “extra” variable heavy domain to one monomer and the C-terminal attachment of an “extra” variable light domain to the other monomer, thus forming a third antigen binding domain, wherein the Fab portions of the two monomers bind one checkpoint target and the “extra” scFv domain binds a different checkpoint target.

[0262] In this embodiment, the first monomer comprises a first heavy chain, comprising a first variable heavy domain and a first constant heavy domain comprising a first Fc domain, with a first variable light domain covalently attached to the C-terminus of the first Fc domain using a domain linker (vh1-CH1-hinge-CH2-CH3-[optional linker]-vl2). The second monomer comprises a second variable heavy domain of the second constant heavy domain comprising a second Fc domain, and a third variable heavy domain covalently attached to the C-terminus of the second Fc domain using a domain linker (vh1-CH1-hinge-CH2-CH3-[optional linker]-vh2. The two C-terminally attached variable domains make up a scFv. This embodiment further utilizes a common light chain comprising a variable light domain and a constant light domain, which associates with the heavy chains to form two identical Fabs. As for many of the embodiments herein, these constructs include skew variants, pI variants, ablation variants, additional Fc variants, etc. as desired and described herein. In this embodiment, suitable Fv pairs include (Fabs listed first, scFvs second) PD-1 and CTLA-4, CTLA-4 and PD-1, PD-1 and TIM-3, TIM-3 and PD-1, PD-1 and LAG-3, LAG-3×PD1, PD-1 and TIGIT, TIGIT and PD-1, PD-1 and BTLA, BTLA and PD-1, CTLA-4 and TIM-3, TIM-3 and CTLA-4, CTLA-4 and LAG-3, LAG-3 and CTLA-4, CTLA-4 and TIGIT, TIGIT and CTLA-4, CTLA-4 and BTLA, BTLA and CTLA-4, TIM-3 and LAG-3, LAG-3 and TIM-3, TIM-3 and TIGIT, TIGIT and TIM-3, TIM-3 and BTLA, BTLA and TIM-3. LAG-3 and TIGIT, TIGIT and LAG-3, LAG-3 and BTLA, BTLA and LAG-3, BTLA and TIGIT, and TIGIT and BTLA.

[0263] The ABD sequences for these combinations can be as disclosed in the sequence listing or as shown in FIGS. 9 to 13, and in any combination as shown in FIG. 39 and FIG. 40.

[0264] In addition, the Fc domains of the mAb-Fv format comprise skew variants (e.g. a set of amino acid substitutions as shown in FIG. 3 and FIG. 8, with particularly useful skew variants being selected from the group consisting of S364K/E357Q:L368D/K370S; L368D/K370S:S364K; L368E/K370S:S364K; T411T/E360E/Q362E:D401K; L368D/K370S:S364K/E357L, K370S:S364K/E357Q, T366S/L368A/Y407V:T366W and T366S/L368A/Y407V/Y349C:T366W/S354C), optionally ablation variants (including those shown in FIG. 5), optionally charged scFv linkers (including those shown in FIG. 7) and the heavy chain comprises pI variants (including those shown in FIG. 4).

[0265] In some embodiments, the mAb-Fv format includes skew variants, pI variants, and ablation variants. Accordingly, some embodiments include bottle opener formats that comprise: a) a first monomer that comprises the skew variants S364K/E357Q, the ablation variants E233P/L234V/L235A/G236del/S267K, and a first variable heavy domain that, with the first variable light domain of the light chain, makes up an Fv that binds to a first checkpoint inhibitor, and a second variable heavy domain; b) a second monomer that comprises the skew variants L368D/K370S, the pI variants N208D/Q295E/N384D/Q418E/N421D, the ablation variants E233P/L234V/L235A/G236del/S267K, and a first variable heavy domain that, with the first variable light domain, makes up the Fv that binds to the first checkpoint inhibitor as outlined herein, and a second variable light chain, that together with the second variable heavy chain forms an Fv (ABD) that binds a second checkpoint inhibitors; and c) a light chain comprising a first variable light domain and a constant light domain. Of particular use in some embodiments in this format, are (Fab-scFv order) CTLA-4×PD-1, LAG-3×PD-1, BTLA×PD-1, and LAG-3×CTLA-4.

[0266] In some embodiments, the mAb-Fv format includes skew variants, pI variants, ablation variants and FcRn variants. Accordingly, some embodiments include bottle opener formats that comprise: a) a first monomer that comprises the skew variants S364K/E357Q, the ablation variants E233P/L234V/L235A/G236del/S267K, the FcRn variants M428L/N434S and a first variable heavy domain that, with the first variable light domain of the light chain, makes up an Fv that binds to a first checkpoint inhibitor, and a second variable heavy domain; b) a second monomer that comprises the skew variants L368D/K370S, the pI variants N208D/Q295E/N384D/Q418E/N421D, the ablation variants E233P/L234V/L235A/G236del/S267K, the FcRn variants M428L/N434S and a first variable heavy domain that, with the first variable light domain, makes up the Fv that binds to the first checkpoint inhibitor as outlined herein, and a second variable light chain, that together with the second variable heavy chain forms an Fv (ABD) that binds a second checkpoint inhibitors; and c) a light chain comprising a first variable light domain and a constant light domain. Of particular use in some embodiments in this format, are (Fab-scFv order) CTLA-4×PD-1, LAG-3×PD-1, BTLA×PD-1, and LAG-3×CTLA-4.

[0267] For mAb-Fv sequences that are similar to the mAb-scFv backbone 1 (optionally including M428L/N434S) from FIG. 38, specific ABDs that bind human PD-1 include, but are not limited to, 1G6_H1.279_L1.194, 1G6_H1.280_L1.224; 1G6_L1.194_H1.279, 1G6_L1.210_H1.288 and 2E9_H1L1, as well as those listed in SEQ ID NOs: 6209-11464, SEQ ID NOs: 11465-17134, SEQ ID NOs: 33003-33072, SEQ ID NOs: 33073-35394 and SEQ ID NOs: 36127-36146.

[0268] For mAb-Fv sequences that are similar to the mAb-scFv backbone 1 (optionally including M428L/N434S) from FIG. 38, specific ABDs that bind human CTLA-4 include, but are not limited to, [CTLA-4]_H0.25_L0; [CTLA-4]_H0.26_L0; [CTLA-4]_H0.27_L0; [CTLA-4]_H0.29_L0; [CTLA-4]_H0.38_L0; [CTLA-4]_H0.39_L0; [CTLA-4]_H0.40_L0; [CTLA-4]_H0.70_L0; [CTLA-4]_H0_L0.22; [CTLA-4]_H2_L0; [CTLA-4]_H3.21_L0.124; [CTLA-4]_H3.21_L0.129; [CTLA-4]_H3.21_L0.132; [CTLA-4]_H3.23_L0.124; [CTLA-4]_H3.23_L0.129; [CTLA-4]_H3.23_L0.132; [CTLA-4]_H3.25_L0.124; [CTLA-4]_H3.25_L0.129; [CTLA-4]_H3.25_L0.132; [CTLA-4]_H3.4_L0.118; [CTLA-4]_H3.4_L0.119; [CTLA-4]_H3.4_L0.12; [CTLA-4]_H3.4_L0.121; [CTLA-4]_H3.4_L0.122; [CTLA-4]_H3.4_L0.123; [CTLA-4]_H3.4_L0.124; [CTLA-4]_H3.4_L0.125; [CTLA-4]_H3.4_L0.126; [CTLA-4]_H3.4_L0.127; [CTLA-4]_H3.4_L0.128; [CTLA-4]_H3.4_L0.129; [CTLA-4]_H3.4_L0.130; [CTLA-4]_H3.4_L0.131; [CTLA-4]_H3.4_L0.132; [CTLA-4]_H3.5_L2.1; [CTLA-4]_H3.5_L2.2; [CTLA-4]_H3.5_L2.3; [CTLA-4]_H3_L0; [CTLA-4]_H3_L0.22; [CTLA-4]_H3_L0.44; [CTLA-4]_H3_L0.67 and [CTLA-4]_H3_L0.74, as well as those listed in SEQ ID NOs: 21-2918, SEQ ID NOs: 2919-6208, SEQ ID NOs: 36739-36818 and SEQ ID NOs: 35395-35416.

[0269] For mAb-Fv sequences that are similar to the mAb-scFv backbone 1 (optionally including M428L/N434S) from FIG. 38, specific ABDs that bind human LAG-3 include, but are not limited to, 2A11_H0L0; 2A11_H1.125_L2.113; 2A11_H1.144_L2.142; 2A11_H1_L2.122; 2A11_H1_L2.123; 2A11_H1_L2.124; 2A11_H1_L2.25; 2A11_H1_L2.47; 2A11_H1L2.50; 2A11_H1L2.91; 2A11H1_L2.93; 2A11_H1L2.97; 2A11_H1L1; 2A11_H1L2; 2A11_H2L2; 2A11_H3L1; 2A11_H3L2; 2A11_H4L1; 2A11_H4L2; 7G8_H0L0; 7G8_H1L1; 7G8_H3.18_L1.11; 7G8_H3.23_L1.11; 7G8_H3.28_L1; 7G8_H3.28_L1.11; 7G8_H3.28_L1.13; 7G8_H3.30_L1.34; 7G8_H3.30_L1.34; and 7G8_H3L1, as well as those listed in SEQ ID NOs: 17135-20764, SEQ ID NOs: 36819-36962, SEQ ID NOs: 35417-35606, SEQ ID NOs: 25194-32793 and SEQ ID NOs: 32794-33002.

[0270] For mAb-Fv sequences that are similar to the mAb-scFv backbone 1 (optionally including M428L/N434S) from FIG. 38, specific ABDs that bind human BTLA include, but are not limited to, 9C6_H0L0; 9C6_H1.1_L1; and 9C6_H1.11_L1, as well as those listed in SEQ ID NOs: 20885-21503 and SEQ ID NOs: 36707-36738.

[0271] For mAb-Fv sequences that are similar to the mAb-scFv backbone 1 (optionally including M428L/N434S) from FIG. 38, specific ABDs that bind human TIM-3 include, but are not limited to, 1D10_H0L0; 1D12_H0L0; 3H3_H1_L2.1; 6C8_H0L0; 6D9_H0_1D12_L0; 7A9_H0L0; 7B11_H0L0; 7B11var_H0L0 and 7C2_H0L0, as well as those listed in SEQ ID NOs: 20765-20884, SEQ ID NOs: 37587-37698 and SEQ ID NOs: 36347-36706.

### C. mAb-scFv

[0272] One heterodimeric scaffold that finds particular use in the present invention is the mAb-scFv format shown in FIG. 1I. In this embodiment, the format relies on the use of a C-terminal attachment of an scFv to one of the monomers, thus forming a third antigen binding domain, wherein the Fab portions of the two monomers bind one checkpoint target and the “extra” scFv domain binds a different checkpoint target.

[0273] In this embodiment, the first monomer comprises a first heavy chain (comprising a variable heavy domain and a constant domain), with a C-terminally covalently attached scFv comprising a scFv variable light domain, an scFv linker and a scFv variable heavy domain in either orientation (vh1-CH1-hinge-CH2-CH3-[optional linker]-vh2-scFv linker-vl2 or vh1-CH1-hinge-CH2-CH3-[optional linker]-vl2-scFv linker-vh2). This embodiment further utilizes a common light chain comprising a variable light domain and a constant light domain, which associates with the heavy chains to form two identical Fabs that bind one of the target antigens. As for many of the embodiments herein, these constructs include skew variants, pI variants, ablation variants, additional Fc variants, etc. as desired and described herein. In this embodiment, suitable Fv pairs include (Fabs listed first, scFvs second) PD-1 and CTLA-4, CTLA-4 and PD-1, PD-1 and TIM-3, TIM-3 and PD-1, PD-1 and LAG-3, LAG-3×PD1, PD-1 and TIGIT, TIGIT and PD-1, PD-1 and BTLA, BTLA and PD-1, CTLA-4 and TIM-3, TIM-3 and CTLA-4, CTLA-4 and LAG-3, LAG-3 and CTLA-4, CTLA-4 and TIGIT, TIGIT and CTLA-4, CTLA-4 and BTLA, BTLA and CTLA-4, TIM-3 and LAG-3, LAG-3 and TIM-3, TIM-3 and TIGIT, TIGIT and TIM-3, TIM-3 and BTLA, BTLA and TIM-3. LAG-3 and TIGIT, TIGIT and LAG-3, LAG-3 and BTLA, BTLA and LAG-3, BTLA and TIGIT, and TIGIT and BTLA.

[0274] The ABD sequences for these combinations can be as disclosed in the sequence listing or as shown in FIGS. 9 to 13, and in any combination as shown in FIG. 39 and FIG. 40.

[0275] In addition, the Fc domains of the mAb-scFv format generally comprise skew variants (e.g. a set of amino acid substitutions as shown in FIG. 3 and FIG. 8, with particularly useful skew variants being selected from the group consisting of S364K/E357Q:L368D/K370S; L368D/K370S:S364K; L368E/K370S:S364K; T411T/E360E/Q362E:D401K; L368D/K370S:S364K/E357L, K370S:S364K/E357Q, T366S/L368A/Y407V:T366W and T366S/L368A/Y407V/Y349C:T366W/S354C), optionally ablation variants (including those shown in FIG. 5), optionally charged scFv linkers (including those shown in FIG. 7) and the heavy chain comprises pI variants (including those shown in FIG. 4).

[0276] In some embodiments, the mAb-scFv format includes skew variants, pI variants, and ablation variants. Accordingly, some embodiments include bottle opener formats that comprise: a) a first monomer that comprises the skew variants S364K/E357Q, the ablation variants E233P/L234V/L235A/G236del/S267K, and a first variable heavy domain that, with the first variable light domain of the light chain, makes up an Fv that binds to a first checkpoint inhibitor, and a second variable heavy domain; b) a second monomer that comprises the skew variants L368D/K370S, the pI variants N208D/Q295E/N384D/Q418E/N421D, the ablation variants E233P/L234V/L235A/G236del/S267K, and a first variable heavy domain that, with the first variable light domain, makes up the Fv that binds to the first checkpoint inhibitor as outlined herein, and a second variable light chain, that together with the second variable heavy chain forms an Fv (ABD) that binds a second checkpoint inhibitors; and c) a light chain comprising a first variable light domain and a constant light domain. Of particular use in some embodiments in this format, are (Fab-scFv order) CTLA-4×PD-1, LAG-3×PD-1, BTLA×PD-1, and LAG-3×CTLA-4.

[0277] In some embodiments, the mAb-scFv format includes skew variants, pI variants, ablation variants and FcRn variants. Accordingly, some embodiments include bottle opener formats that comprise: a) a first monomer that comprises the skew variants S364K/E357Q, the ablation variants E233P/L234V/L235A/G236del/S267K, the FcRn variants M428L/N434S and a first variable heavy domain that, with the first variable light domain of the light chain, makes up an Fv that binds to a first checkpoint inhibitor, and a second variable heavy domain; b) a second monomer that comprises the skew variants L368D/K370S, the pI variants N208D/Q295E/N384D/Q418E/N421D, the ablation variants E233P/L234V/L235A/G236del/S267K, the FcRn variants M428L/N434S and a first variable heavy domain that, with the first variable light domain, makes up the Fv that binds to the first checkpoint inhibitor as outlined herein, and a second variable light chain, that together with the second variable heavy chain forms an Fv (ABD) that binds a second checkpoint inhibitors; and c) a light chain comprising a first variable light domain and a constant light domain. In mAb-scFv formats, specific Fv combinations of use in the present invention include CTLA-4 (Fab)×PD-1 (scFv), PD-1 (Fab)×CTLA-4 (scFv), LAG-3 (Fab)×PD-1 (scFv), BTLA (Fab)×PD-1 (scFv) and LAG-3 (Fab)×CTLA-4 (scFv).

[0278] In mAb-scFv backbone 1 (optionally including M428L/N434S) from FIG. 38, specific ABDs that bind human PD-1 include, but are not limited to, 1G6_H1.279_L1.194, 1G6_H1.280_L1.224; 1G6_L1.194_H1.279, 1G6_L1.210_H1.288 and 2E9_H1L1, as well as those listed in SEQ ID NOs: 6209-11464, SEQ ID NOs: 11465-17134, SEQ ID NOs: 33003-33072, SEQ ID NOs: 33073-35394 and SEQ ID NOs: 36127-36146.

[0279] In mAb-scFv backbone 1 (optionally including M428L/N434S) from FIG. 38, specific ABDs that bind human CTLA-4 include, but are not limited to, [CTLA-4]_H0.25_L0; [CTLA-4]_H0.26_L0; [CTLA-4]_H0.27_L0; [CTLA-4]_H0.29L0; [CTLA-4]_H0.38_L0; [CTLA-4]_H0.39L0; [CTLA-4]_H0.40L0; [CTLA-4]_H0.70L0; [CTLA-4]_H0_L0.22; [CTLA-4]_H2_L0; [CTLA-4]_H3.21_L0.124; [CTLA-4]_H3.21_L0.129; [CTLA-4]_H3.21_L0.132; [CTLA-4]_H3.23_L0.124; [CTLA-4]_H3.23_L0.129; [CTLA-4]_H3.23_L0.132; [CTLA-4]_H3.25_L0.124; [CTLA-4]_H3.25_L0.129; [CTLA-4]_H3.25_L0.132; [CTLA-4]_H3.4_L0.118; [CTLA-4]_H3.4_L0.119; [CTLA-4]_H3.4_L0.12; [CTLA-4]_H3.4_L0.121; [CTLA-4]_H3.4_L0.122; [CTLA-4]_H3.4_L0.123; [CTLA-4]_H3.4_L0.124; [CTLA-4]_H3.4_L0.125; [CTLA-4]_H3.4_L0.126; [CTLA-4]_H3.4_L0.127; [CTLA-4]_H3.4_L0.128; [CTLA-4]_H3.4_L0.129; [CTLA-4]_H3.4_L0.130; [CTLA-4]_H3.4_L0.131; [CTLA-4]_H3.4_L0.132; [CTLA-4]_H3.5_L2.1; [CTLA-4]_H3.5_L2.2; [CTLA-4]_H3.5_L2.3; [CTLA-4]_H3_L0; [CTLA-4]_H3_L0.22; [CTLA-4]_H3_L0.44; [CTLA-4]_H3_L0.67 and [CTLA-4]_H3_L0.74, as well as those listed in SEQ ID NOs: 21-2918, SEQ ID NOs: 2919-6208, SEQ ID NOs: 36739-36818 and SEQ ID NOs: 35395-35416.

[0280] In mAb-scFv backbone 1 (optionally including M428L/N434S) from FIG. 38, specific ABDs that bind human LAG-3 include, but are not limited to, 2A11_H0L0; 2A11_H1.125_L2.113; 2A11_H1.144_L2.142; 2A11_H1_L2.122; 2A11_H1_L2.123; 2A11_H1_L2.124; 2A11_H1_L2.25; 2A11_H1_L2.47; 2A11H1_L2.50; 2A11_H1_L2.91; 2A11_H1_L2.93; 2A11_H1_L2.97; 2A11_H1L1; 2A11_H1L2; 2A11_H2L2; 2A11_H3L1; 2A11_H3L2; 2A11_H4L1; 2A11_H4L2; 7G8_H0L0; 7G8_H1L1; 7G8_H3.18_L1.11; 7G8_H3.23_L1.11; 7G8_H3.28_L1; 7G8_H3.28_L1.11; 7G8_H3.28_L1.13; 7G8_H3.30_L1.34; 7G8_H3.30_L1.34; and 7G8_H3L1, as well as those listed in SEQ ID NOs: 17135-20764, SEQ ID NOs: 36819-36962, SEQ ID NOs: 35417-35606, SEQ ID NOs: 25194-32793 and SEQ ID NOs: 32794-33002.

[0281] In mAb-scFv backbone 1 (optionally including M428L/N434S) from FIG. 38, specific ABDs that bind human BTLA include, but are not limited to, 9C6_H0L0; 9C6_H1.1_L1; and 9C6_H1.11_L1, as well as those listed in SEQ ID NOs: 20885-21503 and SEQ ID NOs: 36707-36738.

[0282] In mAb-scFv backbone 1 (optionally including M428L/N434S) from FIG. 38, specific ABDs that bind human TIM-3 include, but are not limited to, 1D10_H0L0; 1D12_H0L0; 3H3_H1_L2.1; 6C8_H0L0; 6D9_H0_1D12_L0; 7A9_H0L0; 7B11_H0L0; 7B11var_H0L0 and 7C2_H0L0, as well as those listed in SEQ ID NOs: 20765-20884, SEQ ID NOs: 37587-37698 and SEQ ID NOs: 36347-36706.

### D. Central scFv

[0283] One heterodimeric scaffold that finds particular use in the present invention is the Central-scFv format shown in FIG. 1F. In this embodiment, the format relies on the use of an inserted scFv domain thus forming a third antigen binding domain, wherein the Fab portions of the two monomers bind one checkpoint target and the “extra” scFv domain binds another. The scFv domain is inserted between the Fc domain and the CH1-Fv region of one of the monomers, thus providing a third antigen binding domain.

[0284] In this embodiment, one monomer comprises a first heavy chain comprising a first variable heavy domain, a CH1 domain (and optional hinge) and Fc domain, with a scFv comprising a scFv variable light domain, an scFv linker and a scFv variable heavy domain. The scFv is covalently attached between the C-terminus of the CH1 domain of the heavy constant domain and the N-terminus of the first Fc domain using optional domain linkers (vh1-CH1-[optional linker]-vh2-scFv linker-vl2-[optional linker including the hinge]-CH2-CH3, or the opposite orientation for the scFv, vh1-CH1-[optional linker]-vl2-scFv linker-vh2-[optional linker including the hinge]-CH2-CH3). The other monomer is a standard Fab side. This embodiment further utilizes a common light chain comprising a variable light domain and a constant light domain, which associates with the heavy chains to form two identical Fabs that bind a checkpoint inhibitor. As for many of the embodiments herein, these constructs include skew variants, pI variants, ablation variants, additional Fc variants, etc. as desired and described herein. In this embodiment, suitable Fv pairs include (Fabs listed first, scFvs second) PD-1 and CTLA-4, CTLA-4 and PD-1, PD-1 and TIM-3, TIM-3 and PD-1, PD-1 and LAG-3, LAG-3×PD1, PD-1 and TIGIT, TIGIT and PD-1, PD-1 and BTLA, BTLA and PD-1, CTLA-4 and TIM-3, TIM-3 and CTLA-4, CTLA-4 and LAG-3, LAG-3 and CTLA-4, CTLA-4 and TIGIT, TIGIT and CTLA-4, CTLA-4 and BTLA, BTLA and CTLA-4, TIM-3 and LAG-3, LAG-3 and TIM-3, TIM-3 and TIGIT, TIGIT and TIM-3, TIM-3 and BTLA, BTLA and TIM-3. LAG-3 and TIGIT, TIGIT and LAG-3, LAG-3 and BTLA, BTLA and LAG-3, BTLA and TIGIT, and TIGIT and BTLA.

[0285] The ABD sequences for these combinations can be as disclosed in the sequence listing or as shown in FIGS. 9 to 13, and in any combination as shown in FIG. 39 and FIG. 40.

[0286] In addition, the Fc domains of the central scFv format generally comprise skew variants (e.g. a set of amino acid substitutions as shown in FIG. 3 and FIG. 8, with particularly useful skew variants being selected from the group consisting of S364K/E357Q:L368D/K370S; L368D/K370S:S364K; L368E/K370S:S364K; T411T/E360E/Q362E:D401K; L368D/K370S:S364K/E357L, K370S:S364K/E357Q, T366S/L368A/Y407V: T366W and T366S/L368A/Y407V/Y349C:T366W/S354C), optionally ablation variants (including those shown in FIG. 5), optionally charged scFv linkers (including those shown in FIG. 7) and the heavy chain comprises pI variants (including those shown in FIG. 4).

[0287] In some embodiments, the central scFv format includes skew variants, pI variants, and ablation variants. Accordingly, some embodiments include bottle opener formats that comprise: a) a first monomer that comprises the skew variants S364K/E357Q, the ablation variants E233P/L234V/L235A/G236del/S267K, and a first variable heavy domain that, with the first variable light domain of the light chain, makes up an Fv that binds to a first checkpoint inhibitor, and a second variable heavy domain; b) a second monomer that comprises the skew variants L368D/K370S, the pI variants N208D/Q295E/N384D/Q418E/N421D, the ablation variants E233P/L234V/L235A/G236del/S267K, and a first variable heavy domain that, with the first variable light domain, makes up the Fv that binds to the first checkpoint inhibitor as outlined herein, and a second variable light chain, that together with the second variable heavy chain forms an Fv (ABD) that binds a second checkpoint inhibitors; and c) a light chain comprising a first variable light domain and a constant light domain. In this embodiment, suitable Fv pairs include (Fabs listed first, scFvs second) CTLA-4×PD-1, PD-1×CTLA-4, LAG-3×PD-1, BTLA×PD-1, and LAG-3×CTLA-4.

[0288] In some embodiments, the central scFv format includes skew variants, pI variants, ablation variants and FcRn variants. Accordingly, some embodiments include bottle opener formats that comprise: a) a first monomer that comprises the skew variants S364K/E357Q, the ablation variants E233P/L234V/L235A/G236del/S267K, the FcRn variants M428L/N434S and a first variable heavy domain that, with the first variable light domain of the light chain, makes up an Fv that binds to a first checkpoint inhibitor, and a second variable heavy domain; b) a second monomer that comprises the skew variants L368D/K370S, the pI variants N208D/Q295E/N384D/Q418E/N421D, the ablation variants E233P/L234V/L235A/G236del/S267K, the FcRn variants M428L/N434S and a first variable heavy domain that, with the first variable light domain, makes up the Fv that binds to the first checkpoint inhibitor as outlined herein, and a second variable light chain, that together with the second variable heavy chain forms an Fv (ABD) that binds a second checkpoint inhibitors; and c) a light chain comprising a first variable light domain and a constant light domain. In this embodiment, suitable Fv pairs include (Fabs listed first, scFvs second) CTLA-4×PD-1, PD-1×CTLA-4, LAG-3×PD-1, BTLA×PD-1, and LAG-3×CTLA-4.

[0289] For central-scFv sequences that are similar to/utilize the bottle opener backbone 1 of FIG. 37 (optionally including M428L/N434S), specific Fv combinations of use in the present invention include CTLA-4 (Fab)×PD-1 (scFv), PD-1 (Fab)×CTLA-4 (scFv), LAG-3 (Fab)×PD-1 (scFv), BTLA (Fab)×PD-1 (scFv) and LAG-3 (Fab)×CTLA-4 (scFv).

[0290] For central-scFv sequences that are similar to/utilize the bottle opener backbone 1 of FIG. 37, (optionally including M428L/N434S), specific ABDs that bind human PD-1 include, but are not limited to, 1G6_H1.279_L1.194, 1G6_H1.280_L1.224; 1G6_L1.194_H1.279, 1G6_L1.210_H1.288 and 2E9_H1L1, as well as those listed in SEQ ID NOs: 6209-11464, SEQ ID NOs: 11465-17134, SEQ ID NOs: 33003-33072, SEQ ID NOs: 33073-35394 and SEQ ID NOs: 36127-36146.

[0291] For central-scFv sequences that are similar to/utilize the bottle opener backbone 1 of FIG. 37 (optionally including M428L/N434S), specific ABDs that bind human CTLA-4 include, but are not limited to, [CTLA-4]_H0.25_L0; [CTLA-4]_H0.26_L0; [CTLA-4]_H0.27_L0; [CTLA-4]_H0.29_L0; [CTLA-4]_H0.38_L0; [CTLA-4]_H0.39_L0; [CTLA-4]_H0.40_L0; [CTLA-4]_H0.70_L0; [CTLA-4]_H0_L0.22; [CTLA-4]_H2_L0; [CTLA-4]_H3.21_L0.124; [CTLA-4]_H3.21_L0.129; [CTLA-4]_H3.21_L0.132; [CTLA-4]_H3.23_L0.124; [CTLA-4]_H3.23_L0.129; [CTLA-4]_H3.23_L0.132; [CTLA-4]_H3.25_L0.124; [CTLA-4]_H3.25_L0.129; [CTLA-4]_H3.25_L0.132; [CTLA-4]_H3.4_L0.118; [CTLA-4]_H3.4_L0.119; [CTLA-4]_H3.4_L0.12; [CTLA-4]_H3.4_L0.121; [CTLA-4]_H3.4_L0.122; [CTLA-4]_H3.4_L0.123; [CTLA-4]_H3.4_L0.124; [CTLA-4]_H3.4_L0.125; [CTLA-4]_H3.4_L0.126; [CTLA-4]_H3.4_L0.127; [CTLA-4]_H3.4_L0.128; [CTLA-4]_H3.4_L0.129; [CTLA-4]_H3.4_L0.130; [CTLA-4]_H3.4_L0.131; [CTLA-4]_H3.4_L0.132; [CTLA-4]_H3.5_L2.1; [CTLA-4]_H3.5_L2.2; [CTLA-4]_H3.5_L2.3; [CTLA-4]_H3_L0; [CTLA-4]_H3_L0.22; [CTLA-4]_H3_L0.44; [CTLA-4]_H3_L0.67 and [CTLA-4]_H3_L0.74, as well as those listed in SEQ ID NOs: 21-2918, SEQ ID NOs: 2919-6208, SEQ ID NOs: 36739-36818 and SEQ ID NOs: 35395-35416.

[0292] For central-scFv sequences that are similar to/utilize the bottle opener backbone 1 of FIG. 37 (optionally including M428L/N434S), specific ABDs that bind human LAG-3 include, but are not limited to, 2A11_H0L0; 2A11_H1.125_L2.113; 2A11_H1.144_L2.142; 2A11H1_L2.122; 2A11_H1_L2.123; 2A11_H1L2.124; 2A11_H1_L2.25; 2A11_H1_L2.47; 2A11_H1L2.50; 2A11_H1L2.91; 2A11_H1_L2.93; 2A11_H1_L2.97; 2A11_H1L1; 2A11_H1L2; 2A11_H2L2; 2A11_H3L1; 2A11_H3L2; 2A11_H4L1; 2A11_H4L2; 7G8_H0L0; 7G8_H1L1; 7G8_H3.18_L1.11; 7G8_H3.23_L1.11; 7G8_H3.28_L1; 7G8_H3.28_L1.11; 7G8_H3.28_L1.13; 7G8_H3.30_L1.34; 7G8_H3.30_L1.34; and 7G8_H3L1, as well as those listed in SEQ ID NOs: 17135-20764, SEQ ID NOs: 36819-36962, SEQ ID NOs: 35417-35606, SEQ ID NOs: 25194-32793 and SEQ ID NOs: 32794-33002.

[0293] For central-scFv sequences that are similar to/utilize the bottle opener backbone 1 of FIG. 37 (optionally including M428L/N434S), specific ABDs that bind human BTLA include, but are not limited to, 9C6_H0L0; 9C6_H1.1_L1; and 9C6_H1.11_L1, as well as those listed in SEQ ID NOs: 20885-21503 and SEQ ID NOs: 36707-36738.

[0294] For central-scFv sequences that are similar to/utilize the bottle opener backbone 1 of FIG. 37 (optionally including M428L/N434S), specific ABDs that bind human TIM-3 include, but are not limited to, 1D10_H0L0; 1D12_H0L0; 3H3_H1_L2.1; 6C8_H0L0; 6D9_H0_1D12_L0; 7A9_H0L0; 7B11_H0L0; 7B11var_H0L0 and 7C2_H0L0, as well as those listed in SEQ ID NOs: 20765-20884, SEQ ID NOs: 37587-37698 and SEQ ID NOs: 36347-36706.

### E. Central-Fv Format

[0295] One heterodimeric scaffold that finds particular use in the present invention is the Central-Fv format shown in FIG. 1G. In this embodiment, the format relies on the use of an inserted scFv domain thus forming a third antigen binding domain, wherein the Fab portions of the two monomers bind one checkpoint target and the “extra” scFv domain binds another. The scFv domain is inserted between the Fc domain and the CH1-Fv region of the monomers, thus providing a third antigen binding domain, wherein each monomer contains a component of the scFv (e.g. one monomer comprises a variable heavy domain and the other a variable light domain).

[0296] In this embodiment, one monomer comprises a first heavy chain comprising a first variable heavy domain, a CH1 domain, and Fc domain and an additional variable light domain. The light domain is covalently attached between the C-terminus of the CH1 domain of the heavy constant domain and the N-terminus of the first Fc domain using domain linkers (vh1-CH1-[optional linker]-vl2-hinge-CH2-CH3). The other monomer comprises a first heavy chain comprising a first variable heavy domain, a CH1 domain and Fc domain and an additional variable heavy domain (vh1-CH1-[optional linker]-vh2-hinge-CH2-CH3). The light domain is covalently attached between the C-terminus of the CH1 domain of the heavy constant domain and the N-terminus of the first Fc domain using domain linkers. This embodiment further utilizes a common light chain comprising a variable light domain and a constant light domain, that associates with the heavy chains to form two identical Fabs that bind a TTA. As for many of the embodiments herein, these constructs include skew variants, pI variants, ablation variants, additional Fc variants, etc. as desired and described herein. In this embodiment, suitable Fv pairs include (Fabs listed first, scFvs second) PD-1 and CTLA-4, CTLA-4 and PD-1, PD-1 and TIM-3, TIM-3 and PD-1, PD-1 and LAG-3, LAG-3×PD1, PD-1 and TIGIT, TIGIT and PD-1, PD-1 and BTLA, BTLA and PD-1, CTLA-4 and TIM-3, TIM-3 and CTLA-4, CTLA-4 and LAG-3, LAG-3 and CTLA-4, CTLA-4 and TIGIT, TIGIT and CTLA-4, CTLA-4 and BTLA, BTLA and CTLA-4, TIM-3 and LAG-3, LAG-3 and TIM-3, TIM-3 and TIGIT, TIGIT and TIM-3, TIM-3 and BTLA, BTLA and TIM-3. LAG-3 and TIGIT, TIGIT and LAG-3, LAG-3 and BTLA, BTLA and LAG-3, BTLA and TIGIT, and TIGIT and BTLA.

[0297] The ABD sequences for these combinations can be as disclosed in the sequence listing or as shown in FIGS. 9 to 13, and in any combination as shown in FIG. 39 and FIG. 40.

[0298] In central-scFv formats, specific Fv combinations of use in the present invention include CTLA-4 (Fab)×PD-1 (scFv), PD-1 (Fab)×CTLA-4 (scFv), LAG-3 (Fab)×PD-1 (scFv), BTLA (Fab)×PD-1 (scFv) and LAG-3 (Fab)×CTLA-4 (scFv).

[0299] In central-scFv formats, specific ABDs that bind human PD-1 include, but are not limited to, 1G6_H1.279_L1.194, 1G6_H1.280_L1.224; 1G6_L1.194_H1.279, 1G6_L1.210_H1.288 and 2E9_H1L1, as well as those listed in SEQ ID NOs: 6209-11464, SEQ ID NOs: 11465-17134, SEQ ID NOs: 33003-33072, SEQ ID NOs: 33073-35394 and SEQ ID NOs: 36127-36146.

[0300] In central-scFv formats, specific ABDs that bind human CTLA-4 include, but are not limited to, [CTLA-4]_H0.25_L0; [CTLA-4]_H0.26_L0; [CTLA-4]_H0.27_L0; [CTLA-4]_H0.29_L0; [CTLA-4]_H0.38_L0; [CTLA-4]_H0.39L0; [CTLA-4]_H0.40_L0; [CTLA-4]_H0.70_L0; [CTLA-4]_H0L0.22; [CTLA-4]_H2_L0; [CTLA-4]_H3.21_L0.124; [CTLA-4]_H3.21_L0.129; [CTLA-4]_H3.21_L0.132; [CTLA-4]_H3.23_L0.124; [CTLA-4]_H3.23_L0.129; [CTLA-4]_H3.23_L0.132; [CTLA-4]_H3.25_L0.124; [CTLA-4]_H3.25_L0.129; [CTLA-4]_H3.25_L0.132; [CTLA-4]_H3.4_L0.118; [CTLA-4]_H3.4_L0.119; [CTLA-4]_H3.4_L0.12; [CTLA-4]_H3.4_L0.121; [CTLA-4]_H3.4_L0.122; [CTLA-4]_H3.4_L0.123; [CTLA-4]_H3.4_L0.124; [CTLA-4]_H3.4_L0.125; [CTLA-4]_H3.4_L0.126; [CTLA-4]_H3.4_L0.127; [CTLA-4]_H3.4_L0.128; [CTLA-4]_H3.4_L0.129; [CTLA-4]_H3.4_L0.130; [CTLA-4]_H3.4_L0.131; [CTLA-4]_H3.4_L0.132; [CTLA-4]_H3.5_L2.1; [CTLA-4]_H3.5_L2.2; [CTLA-4]_H3.5_L2.3; [CTLA-4]_H3_L0; [CTLA-4]_H3_L0.22; [CTLA-4]_H3_L0.44; [CTLA-4]_H3_L0.67 and [CTLA-4]_H3_L0.74, as well as those listed in SEQ ID NOs: 21-2918, SEQ ID NOs: 2919-6208, SEQ ID NOs: 36739-36818 and SEQ ID NOs: 35395-35416.

[0301] In central-scFv formats, specific ABDs that bind human LAG-3 include, but are not limited to, 2A11_H0L0; 2A11_H1.125_L2.113; 2A11_H1.144_L2.142; 2A11_H1_L2.122; 2A11_H1_L2.123; 2A11_H1_L2.124; 2A11_H1_L2.25; 2A11_H1_L2.47; 2A11H1_L2.50; 2A11_H1_L2.91; 2A11H1_L2.93; 2A11_H1L2.97; 2A11_H1L1; 2A11_H1L2; 2A11_H2L2; 2A11_H3L1; 2A11_H3L2; 2A11_H4L1; 2A11_H4L2; 7G8_H0L0; 7G8_H1L1; 7G8_H3.18L1.11; 7G8_H3.23_L1.11; 7G8_H3.28_L1; 7G8_H3.28_L1.11; 7G8_H3.28_L1.13; 7G8_H3.30_L1.34; 7G8_H3.30_L1.34; and 7G8_H3L1, as well as those listed in SEQ ID NOs: 17135-20764, SEQ ID NOs: 36819-36962, SEQ ID NOs: 35417-35606, SEQ ID NOs: 25194-32793 and SEQ ID NOs: 32794-33002.

[0302] In central-scFv formats, specific ABDs that bind human BTLA include, but are not limited to, 9C6_H0L0; 9C6H1.1_L1; and 9C6_H1.11_L1, as well as those listed in SEQ ID NOs: 20885-21503 and SEQ ID NOs: 36707-36738.

[0303] In central-scFv formats, specific ABDs that bind human TIM-3 include, but are not limited to, 1D10_H0L0; 1D12_H0L0; 3H3_H1_L2.1; 6C8_H0L0; 6D9_H0_1D12_L0; 7A9_H0L0; 7B11_H0L0; 7B11var_H0L0 and 7C2_H0L0, as well as those listed in SEQ ID NOs: 20765-20884, SEQ ID NOs: 37587-37698 and SEQ ID NOs: 36347-36706.

### F. One Armed Central-scFv

[0304] One heterodimeric scaffold that finds particular use in the present invention is the one armed central-scFv format shown in FIG. 1C. In this embodiment, one monomer comprises just an Fc domain, while the other monomer uses an inserted scFv domain thus forming the second antigen binding domain. In this format, either the Fab portion binds one checkpoint target and the scFv binds another. The scFv domain is inserted between the Fc domain and the CH1-Fv region of one of the monomers.

[0305] In this embodiment, one monomer comprises a first heavy chain comprising a first variable heavy domain, a CH1 domain and Fc domain, with a scFv comprising a scFv variable light domain, an scFv linker and a scFv variable heavy domain. The scFv is covalently attached between the C-terminus of the CH1 domain of the heavy constant domain and the N-terminus of the first Fc domain using domain linkers. The second monomer comprises an Fc domain. This embodiment further utilizes a light chain comprising a variable light domain and a constant light domain, that associates with the heavy chain to form a Fab. As for many of the embodiments herein, these constructs include skew variants, pI variants, ablation variants, additional Fc variants, etc. as desired and described herein. In this embodiment, suitable Fv pairs include (Fabs listed first, scFvs second) PD-1 and CTLA-4, CTLA-4 and PD-1, PD-1 and TIM-3, TIM-3 and PD-1, PD-1 and LAG-3, LAG-3×PD1, PD-1 and TIGIT, TIGIT and PD-1, PD-1 and BTLA, BTLA and PD-1, CTLA-4 and TIM-3, TIM-3 and CTLA-4, CTLA-4 and LAG-3, LAG-3 and CTLA-4, CTLA-4 and TIGIT, TIGIT and CTLA-4, CTLA-4 and BTLA, BTLA and CTLA-4, TIM-3 and LAG-3, LAG-3 and TIM-3, TIM-3 and TIGIT, TIGIT and TIM-3, TIM-3 and BTLA, BTLA and TIM-3. LAG-3 and TIGIT, TIGIT and LAG-3, LAG-3 and BTLA, BTLA and LAG-3, BTLA and TIGIT, and TIGIT and BTLA.

[0306] The ABD sequences for these combinations can be as disclosed in the sequence listing or as shown in FIGS. 9 to 13, and in any combination as shown in FIG. 39 and FIG. 40.

[0307] In addition, the Fc domains of the one armed central-scFv format generally comprise skew variants (e.g. a set of amino acid substitutions as shown in FIG. 3 and FIG. 8, with particularly useful skew variants being selected from the group consisting of S364K/E357Q:L368D/K370S; L368D/K370S:S364K; L368E/K370S:S364K; T411T/E360E/Q362E:D401K; L368D/K370S:S364K/E357L, K370S:S364K/E357Q, T366S/L368A/Y407V:T366W and T366S/L368A/Y407V/Y349C:T366W/S354C), optionally ablation variants (including those shown in FIG. 5), optionally charged scFv linkers (including those shown in FIG. 7) and the heavy chain comprises pI variants (including those shown in FIG. 4).

[0308] In some embodiments, the one armed central-scFv format includes skew variants, pI variants, and ablation variants. Accordingly, some embodiments include bottle opener formats that comprise: a) a first monomer that comprises the skew variants S364K/E357Q, the ablation variants E233P/L234V/L235A/G236del/S267K, and a first variable heavy domain that, with the first variable light domain of the light chain, makes up an Fv that binds to a first checkpoint inhibitor, and a second variable heavy domain; b) a second monomer that comprises the skew variants L368D/K370S, the pI variants N208D/Q295E/N384D/Q418E/N421D, the ablation variants E233P/L234V/L235A/G236del/S267K, and a first variable heavy domain that, with the first variable light domain, makes up the Fv that binds to the first checkpoint inhibitor as outlined herein, and a second variable light chain, that together with the second variable heavy chain forms an Fv (ABD) that binds a second checkpoint inhibitors; and c) a light chain comprising a first variable light domain and a constant light domain. In this embodiment, suitable Fv pairs include (Fabs listed first, scFvs second) CTLA-4×PD-1, PD-1×CTLA-4, LAG-3×PD-1, BTLA×PD-1, and LAG-3×CTLA-4.

[0309] In some embodiments, the one armed central-scFv format includes skew variants, pI variants, ablation variants and FcRn variants. Accordingly, some embodiments include bottle opener formats that comprise: a) a first monomer that comprises the skew variants S364K/E357Q, the ablation variants E233P/L234V/L235A/G236del/S267K, the FcRn variants M428L/N434S and a first variable heavy domain that, with the first variable light domain of the light chain, makes up an Fv that binds to a first checkpoint inhibitor, and a second variable heavy domain; b) a second monomer that comprises the skew variants L368D/K370S, the pI variants N208D/Q295E/N384D/Q418E/N421D, the ablation variants E233P/L234V/L235A/G236del/S267K, the FcRn variants M428L/N434S and a first variable heavy domain that, with the first variable light domain, makes up the Fv that binds to the first checkpoint inhibitor as outlined herein, and a second variable light chain, that together with the second variable heavy chain forms an Fv (ABD) that binds a second checkpoint inhibitors; and c) a light chain comprising a first variable light domain and a constant light domain. In this embodiment, suitable Fv pairs include (Fabs listed first, scFvs second) CTLA-4×PD-1, PD-1×CTLA-4, LAG-3×PD-1, BTLA×PD-1, and LAG-3×CTLA-4.

[0310] In one armed central-scFv formats, specific ABDs that bind human PD-1 include, but are not limited to, 1G6_H1.279_L1.194, 1G6_H1.280_L1.224; 1G6_L1.194_H1.279, 1G6_L1.210_H1.288 and 2E9_H1L1, as well as those listed in SEQ ID NOs: 6209-11464, SEQ ID NOs: 11465-17134, SEQ ID NOs: 33003-33072, SEQ ID NOs: 33073-35394 and SEQ ID NOs: 36127-36146.

[0311] In one armed central-scFv formats, specific ABDs that bind human CTLA-4 include, but are not limited to, [CTLA-4]_H0.25_L0; [CTLA-4]_H0.26_L0; [CTLA-4]_H0.27_L0; [CTLA-4]_H0.29_L0; [CTLA-4]_H0.38_L0; [CTLA-4]_H0.39L0; [CTLA-4]_H0.40_L0; [CTLA-4]_H0.70L0; [CTLA-4]_H0_L0.22; [CTLA-4]_H2_L0; [CTLA-4]_H3.21_L0.124; [CTLA-4]_H3.21_L0.129; [CTLA-4]_H3.21_L0.132; [CTLA-4]_H3.23_L0.124; [CTLA-4]_H3.23_L0.129; [CTLA-4]_H3.23_L0.132; [CTLA-4]_H3.25_L0.124; [CTLA-4]_H3.25_L0.129; [CTLA-4]_H3.25_L0.132; [CTLA-4]_H3.4_L0.118; [CTLA-4]_H3.4_L0.119; [CTLA-4]_H3.4_L0.12; [CTLA-4]_H3.4_L0.121; [CTLA-4]_H3.4_L0.122; [CTLA-4]_H3.4_L0.123; [CTLA-4]_H3.4_L0.124; [CTLA-4]_H3.4_L0.125; [CTLA-4]_H3.4_L0.126; [CTLA-4]_H3.4_L0.127; [CTLA-4]_H3.4_L0.128; [CTLA-4]_H3.4_L0.129; [CTLA-4]_H3.4_L0.130; [CTLA-4]_H3.4_L0.131; [CTLA-4]_H3.4_L0.132; [CTLA-4]_H3.5_L2.1; [CTLA-4]_H3.5_L2.2; [CTLA-4]_H3.5_L2.3; [CTLA-4]_H3_L0; [CTLA-4]_H3_L0.22; [CTLA-4]_H3_L0.44; [CTLA-4]_H3_L0.67 and [CTLA-4]_H3_L0.74, as well as those listed in SEQ ID NOs: 21-2918, SEQ ID NOs: 2919-6208, SEQ ID NOs: 36739-36818 and SEQ ID NOs: 35395-35416.

[0312] In one armed central-scFv formats, specific ABDs that bind human LAG-3 include, but are not limited to, 2A11_H0L0; 2A11_H1.125_L2.113; 2A11_H1.144_L2.142; 2A11_H1_L2.122; 2A11_H_L2.123; 2A11_H1L2.124; 2A11_H1L2.25; 2A11_H1_L2.47; 2A11_H1_L2.50; 2A11_H1_L2.91; 2A11_H1_L2.93; 2A11_H1_L2.97; 2A11_H1L1; 2A11_H1L2; 2A11_H2L2; 2A11_H3L1; 2A11_H3L2; 2A11_H4L1; 2A11_H4L2; 7G8_H0L0; 7G8_H1L1; 7G8_H3.18_L1.11; 7G8_H3.23_L1.11; 7G8_H3.28_L1; 7G8_H3.28_L1.11; 7G8_H3.28_L1.13; 7G8_H3.30_L1.34; 7G8_H3.30_L1.34; and 7G8_H3L1, as well as those listed in SEQ ID NOs: 17135-20764, SEQ ID NOs: 36819-36962, SEQ ID NOs: 35417-35606, SEQ ID NOs: 25194-32793 and SEQ ID NOs: 32794-33002.

[0313] In one armed central-scFv formats, specific ABDs that bind human BTLA include, but are not limited to, 9C6_H0L0; 9C6_H1.1_L1; and 9C6_H1.11_L1, as well as those listed in SEQ ID NOs: 20885-21503 and SEQ ID NOs: 36707-36738.

[0314] In one armed central-scFv formats, specific ABDs that bind human TIM-3 include, but are not limited to, 1D10_H0L0; 1D12_H0L0; 3H3_H1_L2.1; 6C8_H0L0; 6D9_H0_1D12_L0; 7A9_H0L0; 7B11_H0L0; 7B11var_H0L0 and 7C2_H0L0, as well as those listed in SEQ ID NOs: 20765-20884, SEQ ID NOs: 37587-37698 and SEQ ID NOs: 36347-36706.

### G. One Armed scFv-mAb

[0315] One heterodimeric scaffold that finds particular use in the present invention is the one armed scFv-mAb format shown in FIG. 1D. In this embodiment, one monomer comprises just an Fc domain, while the other monomer uses a scFv domain attached at the N-terminus of the heavy chain, generally through the use of a linker: vh-scFv linker-vl-[optional domain linker]-CH1-hinge-CH2-CH3 or (in the opposite orientation) vl-scFv linker-vh-[optional domain linker]-CH1-hinge-CH2-CH3. In this format, either the Fab portion binds one checkpoint target and the scFv binds another. This embodiment further utilizes a light chain comprising a variable light domain and a constant light domain, that associates with the heavy chain to form a Fab. As for many of the embodiments herein, these constructs include skew variants, pI variants, ablation variants, additional Fc variants, etc. as desired and described herein. In this embodiment, suitable Fv pairs include (Fabs listed first, scFvs second) PD-1 and CTLA-4, CTLA-4 and PD-1, PD-1 and TIM-3, TIM-3 and PD-1, PD-1 and LAG-3, LAG-3×PD1, PD-1 and TIGIT, TIGIT and PD-1, PD-1 and BTLA, BTLA and PD-1, CTLA-4 and TIM-3, TIM-3 and CTLA-4, CTLA-4 and LAG-3, LAG-3 and CTLA-4, CTLA-4 and TIGIT, TIGIT and CTLA-4, CTLA-4 and BTLA, BTLA and CTLA-4, TIM-3 and LAG-3, LAG-3 and TIM-3, TIM-3 and TIGIT, TIGIT and TIM-3, TIM-3 and BTLA, BTLA and TIM-3. LAG-3 and TIGIT, TIGIT and LAG-3, LAG-3 and BTLA, BTLA and LAG-3, BTLA and TIGIT, and TIGIT and BTLA.

[0316] The ABD sequences for these combinations can be as disclosed in the sequence listing or as shown in FIGS. 9 to 13, and in any combination as shown in FIG. 39 and FIG. 40.

[0317] In addition, the Fc domains of the comprise skew variants (e.g. a set of amino acid substitutions as shown in FIG. 3 and FIG. 8, with particularly useful skew variants being selected from the group consisting of S364K/E357Q:L368D/K370S; L368D/K370S:S364K; L368E/K370S:S364K; T411T/E360E/Q362E:D401K; L368D/K370S:S364K/E357L, K370S:S364K/E357Q, T366S/L368A/Y407V:T366W and T366S/L368A/Y407V/Y349C:T366W/S354C), optionally ablation variants (including those shown in FIG. 5), optionally charged scFv linkers (including those shown in FIG. 7) and the heavy chain comprises pI variants (including those shown in FIG. 4).

[0318] In some embodiments, the one armed scFv-mAb format includes skew variants, pI variants, and ablation variants. Accordingly, some embodiments include bottle opener formats that comprise: a) a first monomer that comprises the skew variants S364K/E357Q, the ablation variants E233P/L234V/L235A/G236del/S267K, and a first variable heavy domain that, with the first variable light domain of the light chain, makes up an Fv that binds to a first checkpoint inhibitor, and a second variable heavy domain; b) a second monomer that comprises the skew variants L368D/K370S, the pI variants N208D/Q295E/N384D/Q418E/N421D, the ablation variants E233P/L234V/L235A/G236del/S267K, and a first variable heavy domain that, with the first variable light domain, makes up the Fv that binds to the first checkpoint inhibitor as outlined herein, and a second variable light chain, that together with the second variable heavy chain forms an Fv (ABD) that binds a second checkpoint inhibitors; and c) a light chain comprising a first variable light domain and a constant light domain. In this embodiment, suitable Fv pairs include (Fabs listed first, scFvs second) CTLA-4×PD-1, PD-1×CTLA-4, LAG-3×PD-1, BTLA×PD-1, and LAG-3×CTLA-4.

[0319] In some embodiments, the one armed scFv-mAb format includes skew variants, pI variants, ablation variants and FcRn variants. Accordingly, some embodiments include bottle opener formats that comprise: a) a first monomer that comprises the skew variants S364K/E357Q, the ablation variants E233P/L234V/L235A/G236del/S267K, the FcRn variants M428L/N434S and a first variable heavy domain that, with the first variable light domain of the light chain, makes up an Fv that binds to a first checkpoint inhibitor, and a second variable heavy domain; b) a second monomer that comprises the skew variants L368D/K370S, the pI variants N208D/Q295E/N384D/Q418E/N421D, the ablation variants E233P/L234V/L235A/G236del/S267K, the FcRn variants M428L/N434S and a first variable heavy domain that, with the first variable light domain, makes up the Fv that binds to the first checkpoint inhibitor as outlined herein, and a second variable light chain, that together with the second variable heavy chain forms an Fv (ABD) that binds a second checkpoint inhibitors; and c) a light chain comprising a first variable light domain and a constant light domain. In this embodiment, suitable Fv pairs include (Fabs listed first, scFvs second) CTLA-4×PD-1, PD-1×CTLA-4, LAG-3×PD-1, BTLA×PD-1, and LAG-3×CTLA-4.

[0320] In one armed scFv-mAb formats, specific ABDs that bind human PD-1 include, but are not limited to, 1G6_H1.279_L1.194, 1G6_H1.280_L1.224; 1G6_L1.194_H1.279, 1G6_L1.210_H1.288 and 2E9_H1L1, as well as those listed in SEQ ID NOs: 6209-11464, SEQ ID NOs: 11465-17134, SEQ ID NOs: 33003-33072, SEQ ID NOs: 33073-35394 and SEQ ID NOs: 36127-36146.

[0321] In one armed scFv-mAb formats, specific ABDs that bind human CTLA-4 include, but are not limited to, [CTLA-4]_H0.25_L0; [CTLA-4]_H0.26_L0; [CTLA-4]_H0.27_L0; [CTLA-4]_H0.29_L0; [CTLA-4]_H0.38_L0; [CTLA-4]_H0.39_L0; [CTLA-4]_H0.40_L0; [CTLA-4]_H0.70L0; [CTLA-4]_H0_L0.22; [CTLA-4]_H2_L0; [CTLA-4]_H3.21_L0.124; [CTLA-4]_H3.21_L0.129; [CTLA-4]_H3.21_L0.132; [CTLA-4]_H3.23_L0.124; [CTLA-4]_H3.23_L0.129; [CTLA-4]_H3.23_L0.132; [CTLA-4]_H3.25_L0.124; [CTLA-4]_H3.25_L0.129; [CTLA-4]_H3.25_L0.132; [CTLA-4]_H3.4_L0.118; [CTLA-4]_H3.4_L0.119; [CTLA-4]_H3.4_L0.12; [CTLA-4]_H3.4_L0.121; [CTLA-4]_H3.4_L0.122; [CTLA-4]_H3.4_L0.123; [CTLA-4]_H3.4_L0.124; [CTLA-4]_H3.4_L0.125; [CTLA-4]_H3.4_L0.126; [CTLA-4]_H3.4_L0.127; [CTLA-4]_H3.4_L0.128; [CTLA-4]_H3.4_L0.129; [CTLA-4]_H3.4_L0.130; [CTLA-4]_H3.4_L0.131; [CTLA-4]_H3.4_L0.132; [CTLA-4]_H3.5_L2.1; [CTLA-4]_H3.5_L2.2; [CTLA-4]_H3.5_L2.3; [CTLA-4]_H3_L0; [CTLA-4]_H3_L0.22; [CTLA-4]_H3_L0.44; [CTLA-4]_H3_L0.67 and [CTLA-4]_H3_L0.74, as well as those listed in SEQ ID NOs: 21-2918, SEQ ID NOs: 2919-6208, SEQ ID NOs: 36739-36818 and SEQ ID NOs: 35395-35416.

[0322] In one armed scFv-mAb formats, specific ABDs that bind human LAG-3 include, but are not limited to, 2A11_H0L0; 2A11_H1.125_L2.113; 2A11_H1.144_L2.142; 2A11_H1_L2.122; 2A11_H1_L2.123; 2A11_H1_L2.124; 2A11_H1_L2.25; 2A11_H1_L2.47; 2A11H1_L2.50; 2A11_H1_L2.91; 2A11_H1_L2.93; 2A11_H1_L2.97; 2A11_H1L1; 2A11_H1L2; 2A11_H2L2; 2A11_H3L1; 2A11_H3L2; 2A11_H4L1; 2A11_H4L2; 7G8_H0L0; 7G8_H1L1; 7G8_H3.18_L1.11; 7G8_H3.23_L1.11; 7G8_H3.28_L1; 7G8_H3.28_L1.11; 7G8_H3.28_L1.13; 7G8_H3.30_L1.34; 7G8_H3.30_L1.34; and 7G8_H3L1, as well as those listed in SEQ ID NOs: 17135-20764, SEQ ID NOs: 36819-36962, SEQ ID NOs: 35417-35606, SEQ ID NOs: 25194-32793 and SEQ ID NOs: 32794-33002.

[0323] In one armed scFv-mAb formats, specific ABDs that bind human BTLA include, but are not limited to, 9C6_H0L0; 9C6_H1.1_L1; and 9C6_H1.11_L1, as well as those listed in SEQ ID NOs: 20885-21503 and SEQ ID NOs: 36707-36738.

[0324] In one armed scFv-mAb formats, specific ABDs that bind human TIM-3 include, but are not limited to, 1D10_H0L0; 1D12_H0L0; 3H3_H1_L2.1; 6C8_H0L0; 6D9_H0_1D12_L0; 7A9_H0L0; 7B11_H0L0; 7B11var_H0L0 and 7C2_H0L0, as well as those listed in SEQ ID NOs: 20765-20884, SEQ ID NOs: 37587-37698 and SEQ ID NOs: 36347-36706.

### H. scFv-mAb Format

[0325] One heterodimeric scaffold that finds particular use in the present invention is the mAb-scFv format shown in FIG. 1E. In this embodiment, the format relies on the use of a N-terminal attachment of a scFv to one of the monomers, thus forming a third antigen binding domain, wherein the Fab portions of the two monomers bind one checkpoint target and the “extra” scFv domain binds a different checkpoint target.

[0326] In this embodiment, the first monomer comprises a first heavy chain (comprising a variable heavy domain and a constant domain), with a N-terminally covalently attached scFv comprising a scFv variable light domain, an scFv linker and a scFv variable heavy domain in either orientation ((vh1-scFv linker-vl1-[optional domain linker]-vh2-CH1-hinge-CH2-CH3) or (with the scFv in the opposite orientation) ((vl1-scFv linker-vh1-[optional domain linker]-vh2-CH1-hinge-CH2-CH3)). This embodiment further utilizes a common light chain comprising a variable light domain and a constant light domain, that associates with the heavy chains to form two identical Fabs that bind one of the target antigens. As for many of the embodiments herein, these constructs include skew variants, pI variants, ablation variants, additional Fc variants, etc. as desired and described herein. In this embodiment, suitable Fv pairs include (Fabs listed first, scFvs second) PD-1 and CTLA-4, CTLA-4 and PD-1, PD-1 and TIM-3, TIM-3 and PD-1, PD-1 and LAG-3, LAG-3×PD1, PD-1 and TIGIT, TIGIT and PD-1, PD-1 and BTLA, BTLA and PD-1, CTLA-4 and TIM-3, TIM-3 and CTLA-4, CTLA-4 and LAG-3, LAG-3 and CTLA-4, CTLA-4 and TIGIT, TIGIT and CTLA-4, CTLA-4 and BTLA, BTLA and CTLA-4, TIM-3 and LAG-3, LAG-3 and TIM-3, TIM-3 and TIGIT, TIGIT and TIM-3, TIM-3 and BTLA, BTLA and TIM-3. LAG-3 and TIGIT, TIGIT and LAG-3, LAG-3 and BTLA, BTLA and LAG-3, BTLA and TIGIT, and TIGIT and BTLA.

[0327] The ABD sequences for these combinations can be as disclosed in the sequence listing or as shown in FIGS. 9 to 13, and in any combination as shown in FIG. 39 and FIG. 40.

[0328] In addition, the Fc domains of the scFv-mAb format comprise skew variants (e.g. a set of amino acid substitutions as shown in FIG. 3 and FIG. 8, with particularly useful skew variants being selected from the group consisting of S364K/E357Q:L368D/K370S; L368D/K370S:S364K; L368E/K370S:S364K; T411T/E360E/Q362E:D401K; L368D/K370S:S364K/E357L, K370S:S364K/E357Q, T366S/L368A/Y407V:T366W and T366S/L368A/Y407V/Y349C:T366W/S354C), optionally ablation variants (including those shown in FIG. 5), optionally charged scFv linkers (including those shown in FIG. 7) and the heavy chain comprises pI variants (including those shown in FIG. 4).

[0329] In some embodiments, the mAb-scFv format includes skew variants, pI variants, and ablation variants. Accordingly, some embodiments include bottle opener formats that comprise: a) a first monomer that comprises the skew variants S364K/E357Q, the ablation variants E233P/L234V/L235A/G236del/S267K, and a first variable heavy domain that, with the first variable light domain of the light chain, makes up an Fv that binds to a first checkpoint inhibitor, and a second variable heavy domain; b) a second monomer that comprises the skew variants L368D/K370S, the pI variants N208D/Q295E/N384D/Q418E/N421D, the ablation variants E233P/L234V/L235A/G236del/S267K, and a first variable heavy domain that, with the first variable light domain, makes up the Fv that binds to the first checkpoint inhibitor as outlined herein, and a second variable light chain, that together with the second variable heavy chain forms an Fv (ABD) that binds a second checkpoint inhibitors; and c) a light chain comprising a first variable light domain and a constant light domain. Of particular use in some embodiments in this format, are (Fab-scFv order) CTLA-4×PD-1, LAG-3×PD-1, BTLA×PD-1, and LAG-3×CTLA-4.

[0330] In some embodiments, the mAb-scFv format includes skew variants, pI variants, ablation variants and FcRn variants. Accordingly, some embodiments include bottle opener formats that comprise: a) a first monomer that comprises the skew variants S364K/E357Q, the ablation variants E233P/L234V/L235A/G236del/S267K, the FcRn variants M428L/N434S and a first variable heavy domain that, with the first variable light domain of the light chain, makes up an Fv that binds to a first checkpoint inhibitor, and a second variable heavy domain; b) a second monomer that comprises the skew variants L368D/K370S, the pI variants N208D/Q295E/N384D/Q418E/N421D, the ablation variants E233P/L234V/L235A/G236del/S267K, the FcRn variants M428L/N434S and a first variable heavy domain that, with the first variable light domain, makes up the Fv that binds to the first checkpoint inhibitor as outlined herein, and a second variable light chain, that together with the second variable heavy chain forms an Fv (ABD) that binds a second checkpoint inhibitors; and c) a light chain comprising a first variable light domain and a constant light domain. Of particular use in some embodiments in this format, are (Fab-scFv order) CTLA-4×PD-1, LAG-3×PD-1, BTLA×PD-1, and LAG-3×CTLA-4.

[0331] For the mAb-scFv format backbone 1 (optionally including M428L/N434S) from FIG. 38, specific ABDs that bind human PD-1 include, but are not limited to, 1G6_H1.279_L1.194, 1G6_H1.280_L1.224; 1G6_L1.194_H1.279, 1G6_L1.210_H1.288 and 2E9_H1L1, as well as those listed in SEQ ID NOs: 6209-11464, SEQ ID NOs: 11465-17134, SEQ ID NOs: 33003-33072, SEQ ID NOs: 33073-35394 and SEQ ID NOs: 36127-36146.

[0332] For the mAb-scFv format backbone 1 (optionally including M428L/N434S) from FIG. 38, specific ABDs that bind human CTLA-4 include, but are not limited to, [CTLA-4]_H0.25_L0; [CTLA-4]_H0.26_L0; [CTLA-4]_H0.27_L0; [CTLA-4]_H0.29_L0; [CTLA-4]_H0.38_L0; [CTLA-4]_H0.39_L0; [CTLA-4]_H0.40L0; [CTLA-4]_H0.70_L0; [CTLA-4]_H0L0.22; [CTLA-4]_H2_L0; [CTLA-4]_H3.21_L0.124; [CTLA-4]_H3.21_L0.129; [CTLA-4]_H3.21_L0.132; [CTLA-4]_H3.23_L0.124; [CTLA-4]_H3.23_L0.129; [CTLA-4]_H3.23_L0.132; [CTLA-4]_H3.25_L0.124; [CTLA-4]_H3.25_L0.129; [CTLA-4]_H3.25_L0.132; [CTLA-4]_H3.4_L0.118; [CTLA-4]_H3.4_L0.119; [CTLA-4]_H3.4_L0.12; [CTLA-4]_H3.4_L0.121; [CTLA-4]_H3.4_L0.122; [CTLA-4]_H3.4_L0.123; [CTLA-4]_H3.4_L0.124; [CTLA-4]_H3.4_L0.125; [CTLA-4]_H3.4_L0.126; [CTLA-4]_H3.4_L0.127; [CTLA-4]_H3.4_L0.128; [CTLA-4]_H3.4_L0.129; [CTLA-4]_H3.4_L0.130; [CTLA-4]_H3.4_L0.131; [CTLA-4]_H3.4_L0.132; [CTLA-4]_H3.5_L2.1; [CTLA-4]_H3.5_L2.2; [CTLA-4]_H3.5_L2.3; [CTLA-4]_H3_L0; [CTLA-4]_H3_L0.22; [CTLA-4]_H3_L0.44; [CTLA-4]_H3_L0.67 and [CTLA-4]_H3_L0.74, as well as those listed in SEQ ID NOs: 21-2918, SEQ ID NOs: 2919-6208, SEQ ID NOs: 36739-36818 and SEQ ID NOs: 35395-35416.

[0333] For the mAb-scFv format backbone 1 (optionally including M428L/N434S) from FIG. 38, specific ABDs that bind human LAG-3 include, but are not limited to, 2A11_H0L0; 2A11_H1.125_L2.113; 2A11_H1.144_L2.142; 2A11_H1_L2.122; 2A11_H1_L2.123; 2A11_H1_L2.124; 2A11_H1_L2.25; 2A11_H1_L2.47; 2A11_H1_L2.50; 2A11_H1_L2.91; 2A11_H1_L2.93; 2A11_H1_L2.97; 2A11_H1L1; 2A11_H1L2; 2A11_H2L2; 2A11_H3L1; 2A11_H3L2; 2A11_H4L1; 2A11_H4L2; 7G8_H0L0; 7G8_H1L1; 7G8_H3.18_L1.11; 7G8_H3.23_L1.11; 7G8_H3.28_L1; 7G8_H3.28L1.11; 7G8_H3.28_L1.13; 7G8_H3.30_L1.34; 7G8_H3.30_L1.34; and 7G8_H3L1, as well as those listed in SEQ ID NOs: 17135-20764, SEQ ID NOs: 36819-36962, SEQ ID NOs: 35417-35606, SEQ ID NOs: 25194-32793 and SEQ ID NOs: 32794-33002.

[0334] For the mAb-scFv format backbone 1 (optionally including M428L/N434S) from FIG. 38, specific ABDs that bind human BTLA include, but are not limited to, 9C6_H0L0; 9C6_H1.1_L1; and 9C6_H1.11_L1, as well as those listed in SEQ ID NOs: 20885-21503 and SEQ ID NOs: 36707-36738.

[0335] For the mAb-scFv format backbone 1 (optionally including M428L/N434S) from FIG. 38, specific ABDs that bind human TIM-3 include, but are not limited to, 1D10_H0L0; 1D12_H0L0; 3H3_H1_L2.1; 6C8_H0L0; 6D9_H0_1D12_L0; 7A9_H0L0; 7B11_H0L0; 7B11var_H0L0 and 7C2_H0L0, as well as those listed in SEQ ID NOs: 20765-20884, SEQ ID NOs: 37587-37698 and SEQ ID NOs: 36347-36706.

### I. Dual scFv Formats

[0336] The present invention also provides dual scFv formats as are known in the art and shown in FIG. 1B. In this embodiment, the heterodimeric bispecific antibody is made up of two scFv-Fc monomers (both in either (vh-scFv linker-vl-[optional domain linker]-CH2-CH3) format or (vl-scFv linker-vh-[optional domain linker]-CH2-CH3) format, or with one monomer in one orientation and the other in the other orientation.

[0337] In this case, all ABDs are in the scFv format, with any combination of PD-1 and CTLA-4, PD-1 and TIM-3, PD-1 and LAG-3, PD-1 and TIGIT, PD-1 and BTLA, CTLA-4 and TIM-3, CTLA-4 and LAG-3, CTLA-4 and TIGIT, CTLA-4 and BTLA, TIM-3 and LAG-3, TIM-3 and TIGIT, TIM-3 and BTLA, LAG-3 and TIGIT, LAG-3 and BTLA and TIGIT and BTLA being useful. The ABD sequences for these combinations can be as disclosed in the sequence listing or as shown in FIGS. 9 to 13, and in any combination as shown in FIG. 39 and FIG. 40.

[0338] In addition, the Fc domains of the dual scFv format comprise skew variants (e.g. a set of amino acid substitutions as shown in FIG. 3 and FIG. 8, with particularly useful skew variants being selected from the group consisting of S364K/E357Q:L368D/K370S; L368D/K370S:S364K; L368E/K370S:S364K; T411T/E360E/Q362E:D401K; L368D/K370S:S364K/E357L, K370S:S364K/E357Q, T366S/L368A/Y407V:T366W and T366S/L368A/Y407V/Y349C:T366W/S354C), optionally ablation variants (including those shown in FIG. 5), optionally charged scFv linkers (including those shown in FIG. 7) and the heavy chain comprises pI variants (including those shown in FIG. 4).

[0339] In some embodiments, the dual scFv format includes skew variants, pI variants, and ablation variants. Accordingly, some embodiments include bottle opener formats that comprise: a) a first monomer that comprises the skew variants S364K/E357Q, the ablation variants E233P/L234V/L235A/G236del/S267K, and a first variable heavy domain that, with the first variable light domain of the light chain, makes up an Fv that binds to a first checkpoint inhibitor, and a second variable heavy domain; b) a second monomer that comprises the skew variants L368D/K370S, the pI variants N208D/Q295E/N384D/Q418E/N421D, the ablation variants E233P/L234V/L235A/G236del/S267K, and a first variable heavy domain that, with the first variable light domain, makes up the Fv that binds to the first checkpoint inhibitor as outlined herein, and a second variable light chain, that together with the second variable heavy chain forms an Fv (ABD) that binds a second checkpoint inhibitors; and c) a light chain comprising a first variable light domain and a constant light domain. Of particular use in some embodiments in this format, are (Fab-scFv order) CTLA-4×PD-1, LAG-3×PD-1, BTLA×PD-1, and LAG-3×CTLA-4.

[0340] In some embodiments, the dual scFv format includes skew variants, pI variants, ablation variants and FcRn variants. Accordingly, some embodiments include bottle opener formats that comprise: a) a first monomer that comprises the skew variants S364K/E357Q, the ablation variants E233P/L234V/L235A/G236del/S267K, the FcRn variants M428L/N434S and a first variable heavy domain that, with the first variable light domain of the light chain, makes up an Fv that binds to a first checkpoint inhibitor, and a second variable heavy domain; b) a second monomer that comprises the skew variants L368D/K370S, the pI variants N208D/Q295E/N384D/Q418E/N421D, the ablation variants E233P/L234V/L235A/G236del/S267K, the FcRn variants M428L/N434S and a first variable heavy domain that, with the first variable light domain, makes up the Fv that binds to the first checkpoint inhibitor as outlined herein, and a second variable light chain, that together with the second variable heavy chain forms an Fv (ABD) that binds a second checkpoint inhibitors; and c) a light chain comprising a first variable light domain and a constant light domain. Of particular use in some embodiments in this format, are (Fab-scFv order) CTLA-4×PD-1, LAG-3×PD-1, BTLA×PD-1, and LAG-3×CTLA-4.

### J. Non-Heterodimeric Bispecific Antibodies

[0341] As will be appreciated by those in the art, the Fv sequences outlined herein can also be used in both monospecific antibodies (e.g. “traditional monoclonal antibodies”) or non-heterodimeric bispecific formats.

[0342] Suitable non-heterodimeric bispecific formats are known in the art, and include a number of different formats as generally depicted in Spiess et al., Molecular Immunology (67):95-106 (2015) and Kontermann, mAbs 4:2, 182-197 (2012), both of which are expressly incorporated by reference and in particular for the figures, legends and citations to the formats therein.

### K. Monospecific, Monoclonal Antibodies

[0343] As will be appreciated by those in the art, the novel Fv sequences outlined herein can also be used in both monospecific antibodies (e.g. “traditional monoclonal antibodies”) or non-heterodimeric bispecific formats. Accordingly, the present invention provides monoclonal (monospecific) antibodies comprising the 6 CDRs and/or the vh and vl sequences from the figures, generally with IgG1, IgG2, IgG3 or IgG4 constant regions, with IgG1, IgG2 and IgG4 (including IgG4 constant regions comprising a S228P amino acid substitution) finding particular use in some embodiments. That is, any sequence herein with a “H_L” designation can be linked to the constant region of a human IgG1 antibody.

### VI. ANTIGEN BINDING DOMAINS TO TARGET ANTIGENS

[0344] The bispecific antibodies of the invention have two different antigen binding domains (ABDs) that bind to two different target checkpoint antigens (“target pairs”), in either bivalent, bispecific formats or trivalent, bispecific formats as generally shown in FIG. 1. Suitable target checkpoint antigens include human (and sometimes cyno) PD-1, CTLA-4, TIM-3, LAG-3, TIGIT and BTLA, the sequences of which are shown in FIG. 2. Accordingly, suitable bispecific antibodies bind PD-1 and CTLA-4, PD-1 and TIM-3, PD-1 and LAG-3, PD-1 and TIGIT, PD-1 and BTLA, CTLA-4 and TIM-3, CTLA-4 and LAG-3, CTLA-4 and TIGIT, CTLA-4 and BTLA, TIM-3 and LAG-3, TIM-3 and TIGIT, TIM-3 and BTLA, LAG-3 and TIGIT, LAG-3 and BTLA and TIGIT and BTLA. Note that generally these bispecific antibodies are named “anti-PD-1×anti-CTLA-4”, or generally simplistically or for ease (and thus interchangeably) as “PD-1×CTLA-4”, etc. for each pair. Note that unless specified herein, the order of the antigen list in the name does not confer structure; that is a PD-1×CTLA-4 bottle opener antibody can have the scFv bind to PD-1 or CTLA-4, although in some cases, the order specifies structure as indicated.

[0345] As is more fully outlined herein, these combinations of ABDs can be in a variety of formats, as outlined below, generally in combinations where one ABD is in a Fab format and the other is in an scFv format. As discussed herein and shown in FIG. 1, some formats use a single Fab and a single scFv (FIGS. 1A, C and D), and some formats use two Fabs and a single scFv (FIGS. 1E, F, G, H and I).

### A. Antigen Binding Domains

[0346] As discussed herein, the bispecific checkpoint heterodimeric antibodies of the invention include two antigen binding domains (ABDs), each of which bind to a different checkpoint protein. As outlined herein, these heterodimeric antibodies can be bispecific and bivalent (each antigen is bound by a single ABD, for example, in the format depicted in FIG. 1A), or bispecific and trivalent (one antigen is bound by a single ABD and the other is bound by two ABDs, for example as depicted in FIG. 1F).

[0347] In addition, in general, one of the ABDs comprises a scFv as outlined herein, in an orientation from N- to C-terminus of vh-scFv linker-vl or vl-scFv linker-vh. One or both of the other ABDs, according to the format, generally is a Fab, comprising a vh domain on one protein chain (generally as a component of a heavy chain) and a vl on another protein chain (generally as a component of a light chain).

[0348] The invention provides a number of ABDs that bind to a number of different checkpoint proteins, as outlined below. As will be appreciated by those in the art, any set of 6 CDRs or vh and vl domains can be in the scFv format or in the Fab format, which is then added to the heavy and light constant domains, where the heavy constant domains comprise variants (including within the CH1 domain as well as the Fc domain). The scFv sequences contained in the sequence listing utilize a particular charged linker, but as outlined herein, uncharged or other charged linkers can be used, including those depicted in FIG. 7.

[0349] In addition, as discussed above, the numbering used in the Sequence Listing for the identification of the CDRs is Kabat, however, different numbering can be used, which will change the amino acid sequences of the CDRs as shown in Table 1.

[0350] For all of the variable heavy and light domains listed herein, further variants can be made. As outlined herein, in some embodiments the set of 6 CDRs can have from 0, 1, 2, 3, 4 or 5 amino acid modifications (with amino acid substitutions finding particular use), as well as changes in the framework regions of the variable heavy and light domains, as long as the frameworks (excluding the CDRs) retain at least about 80, 85 or 90% identity to a human germline sequence selected from those listed in FIG. 1 of U.S. Pat. No. 7,657,380, which Figure and Legend is incorporated by reference in its entirety herein. Thus, for example, the identical CDRs as described herein can be combined with different framework sequences from human germline sequences, as long as the framework regions retain at least 80, 85 or 90% identity to a human germline sequence selected from those listed in FIG. 1 of U.S. Pat. No. 7,657,380. Alternatively, the CDRs can have amino acid modifications (e.g. from 1, 2, 3, 4 or 5 amino acid modifications in the set of CDRs (that is, the CDRs can be modified as long as the total number of changes in the set of 6 CDRs is less than 6 amino acid modifications, with any combination of CDRs being changed; e.g. there may be one change in vlCDR1, two in vhCDR2, none in vhCDR3, etc.)), as well as having framework region changes, as long as the framework regions retain at least 80, 85 or 90% identity to a human germline sequence selected from those listed in FIG. 1 of U.S. Pat. No. 7,657,380.

### B. PD-1 Antigen Binding Domains

[0351] In some embodiments, one of the ABDs binds PD-1. Suitable sets of 6 CDRs and/or vh and vl domains, as well as scFv sequences, are depicted in SEQ ID NOs: 6209-11464, SEQ ID NOs: 11465-17134, SEQ ID NOs: 33003-33072, SEQ ID NOs: 33073-35394 and SEQ ID NOs: 36127-36146. ABD sequences of particular interest in some embodiments are shown in FIG. 9 and include those sequences in the sequence listing with the identifiers 1G6_H1.279_L1.194; 1G6_H1.280_L1.224; 1G6_L1.194_H1.279; 1G66L1.210_H1.288; and 2E9_H1L1.

[0352] As will be appreciated by those in the art, suitable anti-PD-1 ABDs can comprise a set of 6 CDRs as depicted in these sequences and Figures, either as they are underlined or, in the case where a different numbering scheme is used as described herein and as shown in Table 1, as the CDRs that are identified using other alignments within the vh and vl sequences of SEQ ID NOs: 6209-11464, SEQ ID NOs: 11465-17134, SEQ ID NOs: 33003-33072, SEQ ID NOs: 33073-35394 and SEQ ID NOs: 36127-36146. Suitable ABDs can also include the entire vh and vl sequences as depicted in these sequences and Figures, used as scFvs or as Fabs. In many of the embodiments herein that contain an Fv to PD-1, it is the scFv monomer that binds PD-1. As discussed herein, the other of the target pair when PD-1 is one of the antigens is selected from CTLA-4 (suitable sequences are depicted in SEQ ID NOs: 21-2918, SEQ ID NOs: 2919-6208, SEQ ID NOs: 36739-36818 and SEQ ID NOs: 35395-35416 (which can be scFv sequences, CDR sequence sets or vh and vl sequences)), TIM-3 (suitable sequences are depicted in SEQ ID NOs: 20765-20884, SEQ ID NOs: 37587-37698 and SEQ ID NOs: 36347-36706 (which can be scFv sequences, CDR sequence sets or vh and vl sequences)), LAG-3 (suitable sequences are depicted in SEQ ID NOs: 17135-20764, SEQ ID NOs: 36819-36962, SEQ ID NOs: 35417-35606, SEQ ID NOs: 25194-32793 and SEQ ID NOs: 32794-33002 (which can be scFv sequences, CDR sequence sets or vh and vl sequences)), BTLA (suitable sequences are depicted in SEQ ID NOs: 20885-21503 and SEQ ID NOs: 36707-36738 (which can be scFv sequences, CDR sequence sets or vh and vl sequences)), and TIGIT (suitable sequences are depicted in SEQ ID NOs: 21504-21523 and SEQ ID NOs: 37435-37586 (which can be scFv sequences, CDR sequence sets or vh and vl sequences)).

[0353] Particularly useful ABDs that bind human PD-1 include, but are not limited to, 1G6_H1.279_L1.194, 1G6_H1.280_L1.224; 1G6_L1.194_H1.279, 1G6_L1.210_H1.288 and 2E9_H1L1.

[0354] In addition to the parental CDR sets disclosed in the sequence listing that form an ABD to PD-1, the invention provides variant CDR sets. In one embodiment, a set of 6 CDRs can have 1, 2, 3, 4 or 5 amino acid changes from the parental CDRs, as long as the ABD is still able to bind to the target antigen, as measured by at least one of a Biacore, surface plasmon resonance (SPR) and/or BLI (biolayer interferometry, e.g. Octet assay) assay, with the latter finding particular use in many embodiments.

[0355] In addition to the parental variable heavy and variable light domains disclosed herein that form an ABD to PD-1, the invention provides variant vh and vl domains. In one embodiment, the variant vh and vl domains each can have from 1, 2, 3, 4, 5, 6, 7, 8, 9 or 10 amino acid changes from the parental vh and vl domain, as long as the ABD is still able to bind to the target antigen, as measured at least one of a Biacore, surface plasmon resonance (SPR) and/or BLI (biolayer interferometry, e.g. Octet assay) assay, with the latter finding particular use in many embodiments. In another embodiment, the variant vh and vl are at least 90, 95, 97, 98 or 99% identical to the respective parental vh or vl, as long as the ABD is still able to bind to the target antigen, as measured by at least one of a Biacore, surface plasmon resonance (SPR) and/or BLI (biolayer interferometry, e.g. Octet assay) assay, with the latter finding particular use in many embodiments.

[0356] Specific preferred embodiments include the 1G6_L1.194_H1.279 anti-PD-1 Fv, in a scFv format, included within any of the bottle opener format backbones of FIG. 37.

[0357] Specific preferred embodiments include the 1G6_L1.194_H1.279 anti-PD-1 Fv, in a scFv format, included within any of the mAb-scFv format backbones of FIG. 38.

### C. CTLA-4 Antigen Binding Domains

[0358] In some embodiments, one of the ABDs binds CTLA-4. Suitable sets of 6 CDRs and/or vh and vl domains, as well as scFv sequences, are depicted in SEQ ID NOs: 21-2918, SEQ ID NOs: 2919-6208, SEQ ID NOs: 36739-36818 and SEQ ID NOs: 35395-35416. ABD sequences of particular interest in some embodiments are shown in FIG. 10 and also include those sequences in the sequence listing with the identifiers [CTLA-4]_H0.25_L0; [CTLA-4]_H0.26_L0; [CTLA-4]_H0.27_L0; [CTLA-4]_H0.29L0; [CTLA-4]_H0.38_L0; [CTLA-4]_H0.39_L0; 0[CTLA-4]_H0.40_L0; [CTLA-4]_H0.70L0; [CTLA-4]_H0_L0.22; [CTLA-4]_H2L0; [CTLA-4]_H3.21_L0.124; [CTLA-4]_H3.21_L0.129; [CTLA-4]_H3.21_L0.132; [CTLA-4]_H3.23_L0.124; [CTLA-4]_H3.23_L0.129; [CTLA-4]_H3.23_L0.132; [CTLA-4]_H3.25_L0.124; [CTLA-4]_H3.25_L0.129; [CTLA-4]_H3.25_L0.132; [CTLA-4]_H3.4_L0.118; [CTLA-4]_H3.4_L0.119; [CTLA-4]_H3.4_L0.12; [CTLA-4]_H3.4_L0.121; [CTLA-4]_H3.4_L0.122; [CTLA-4]_H3.4_L0.123; [CTLA-4]_H3.4_L0.124; [CTLA-4]_H3.4_L0.125; [CTLA-4]_H3.4_L0.126; [CTLA-4]_H3.4_L0.127; [CTLA-4]_H3.4_L0.128; [CTLA-4]_H3.4_L0.129; [CTLA-4]_H3.4_L0.130; [CTLA-4]_H3.4_L0.131; [CTLA-4]_H3.4_L0.132; [CTLA-4]_H3.5_L2.1; [CTLA-4]_H3.5_L2.2; [CTLA-4]_H3.5_L2.3; [CTLA-4]_H3L0; [CTLA-4]_H3_L0.22; [CTLA-4]_H3_L0.44; [CTLA-4]_H3_L0.67; and [CTLA-4]_H3_L0.74.

[0359] As will be appreciated by those in the art, suitable anti-CTLA-4 ABDs can comprise a set of 6 CDRs as depicted in these sequences and Figures, either as they are underlined or, in the case where a different numbering scheme is used as described herein and as shown in Table 1, as the CDRs that are identified using other alignments within the vh and vl sequences of SEQ ID NOs: 21-2918, SEQ ID NOs: 2919-6208, SEQ ID NOs: 36739-36818 and SEQ ID NOs: 35395-35416. Suitable ABDs can also include the entire vh and vl sequences as depicted in these sequences and Figures, used as scFvs or as Fabs. In many of the embodiments herein that contain an Fv to CTLA-4, it is the scFv monomer that binds CTLA-4. As discussed herein, the other of the target pair when CTLA-4 is one of the antigens is selected from PD-1 (suitable sequences are depicted in SEQ ID NOs: 6209-11464, SEQ ID NOs: 11465-17134, SEQ ID NOs: 33003-33072, SEQ ID NOs: 33073-35394 and SEQ ID NOs: 36127-36146 (which can be scFv sequences, CDR sequence sets or vh and vl sequences)), TIM-3 (suitable sequences are depicted in SEQ ID NOs: 20765-20884, SEQ ID NOs: 37587-37698 and SEQ ID NOs: 36347-36706 (which can be scFv sequences, CDR sequence sets or vh and vl sequences)), LAG-3 (suitable sequences are depicted in SEQ ID NOs: 17135-20764, SEQ ID NOs: 36819-36962, SEQ ID NOs: 35417-35606, SEQ ID NOs: 25194-32793 and SEQ ID NOs: 32794-33002 (which can be scFv sequences, CDR sequence sets or vh and vl sequences)), BTLA (suitable sequences are depicted in SEQ ID NOs: 20885-21503 and SEQ ID NOs: 36707-36738 (which can be scFv sequences, CDR sequence sets or vh and vl sequences)), and TIGIT (suitable sequences are depicted in SEQ ID NOs: 21504-21523 and SEQ ID NOs: 37435-37586 (which can be scFv sequences, CDR sequence sets or vh and vl sequences)).

[0360] In addition to the parental CDR sets disclosed in the sequence listing that form an ABD to CTLA-4, the invention provides variant CDR sets. In one embodiment, a set of 6 CDRs can have 1, 2, 3, 4 or 5 amino acid changes from the parental CDRs, as long as the ABD is still able to bind to the target antigen, as measured by at least one of a Biacore, surface plasmon resonance (SPR) and/or BLI (biolayer interferometry, e.g. Octet assay) assay, with the latter finding particular use in many embodiments.

[0361] In addition to the parental variable heavy and variable light domains disclosed herein that form an ABD to CTLA-4, the invention provides variant vh and vl domains. In one embodiment, the variant vh and vl domains each can have from 1, 2, 3, 4, 5, 6, 7, 8, 9 or 10 amino acid changes from the parental vh and vl domain, as long as the ABD is still able to bind to the target antigen, as measured by at least one of a Biacore, surface plasmon resonance (SPR) and/or BLI (biolayer interferometry, e.g. Octet assay) assay, with the latter finding particular use in many embodiments. In another embodiment, the variant vh and vl are at least 90, 95, 97, 98 or 99% identical to the respective parental vh or vl, as long as the ABD is still able to bind to the target antigen, as measured by at least one of a Biacore, surface plasmon resonance (SPR) and/or BLI (biolayer interferometry, e.g. Octet assay) assay, with the latter finding particular use in many embodiments.

[0362] Specific preferred embodiments include the [CTLA-4]_H3_L0.22 anti-CTLA-4 Fv, in a Fab format, included within any of the bottle opener format backbones of FIG. 37.

[0363] Specific preferred embodiments include the [CTLA-4]_H3_L0.22 anti-CTLA-4 Fv, in a scFv format, included within any of the bottle opener format backbones of FIG. 37.

[0364] Specific preferred embodiments include the [CTLA-4]_H3_L0.22 anti-CTLA-4 Fv, in a scFv format, included within any of the mAb-scFv format backbones of FIG. 38.

[0365] Specific preferred embodiments include the [CTLA-4]_H3_L0.22 anti-CTLA-4 Fv, in a Fab format, included within any of the mAb-scFv format backbones of FIG. 38.

### D. TIM-3 Antigen Binding Domains

[0366] In some embodiments, one of the ABDs binds TIM-3. Suitable sets of 6 CDRs and/or vh and vl domains, as well as scFv sequences, are depicted SEQ ID NOs: 20765-20884, SEQ ID NOs: 37587-37698 and SEQ ID NOs: 36347-36706. ABD sequences of particular interest in some embodiments include those sequences in the sequence listing with the identifiers 1D10_H0L0; 1D12_H0L0; 3H3_H1_L2.1; 6C8_H0L0; 6D9_H0_1D12_L0; 7A9_H0L0; 7B11_H0L0; 7B11var_H0L0; and 7C2_H0L0.

[0367] As will be appreciated by those in the art, suitable anti-TIM-3 ABDs can comprise a set of 6 CDRs as depicted in these sequences and Figures, either as they are underlined or, in the case where a different numbering scheme is used as described herein and as shown in Table 1, as the CDRs that are identified using other alignments within the vh and vl sequences of SEQ ID NOs: 20765-20884, SEQ ID NOs: 37587-37698 and SEQ ID NOs: 36347-36706. Suitable ABDs can also include the entire vh and vl sequences as depicted in these sequences and Figures, used as scFvs or as Fabs. In many of the embodiments herein that contain an Fv to TIM-3, it is the Fab monomer that binds TIM-3. As discussed herein, the other of the target pair when TIM-3 is one of the antigens is selected from PD-1 (suitable sequences are depicted in SEQ ID NOs: 6209-11464, SEQ ID NOs: 11465-17134, SEQ ID NOs: 33003-33072, SEQ ID NOs: 33073-35394 and SEQ ID NOs: 36127-36146 (which can be scFv sequences, CDR sequence sets or vh and vl sequences)), CTLA-4 (suitable sequences are depicted in SEQ ID NOs: 21-2918, SEQ ID NOs: 2919-6208, SEQ ID NOs: 36739-36818 and SEQ ID NOs: 35395-35416 (which can be scFv sequences, CDR sequence sets or vh and vl sequences)), LAG-3 (suitable sequences are depicted in SEQ ID NOs: 17135-20764, SEQ ID NOs: 36819-36962, SEQ ID NOs: 35417-35606, SEQ ID NOs: 25194-32793 and SEQ ID NOs: 32794-33002 (which can be scFv sequences, CDR sequence sets or vh and vl sequences)), BTLA (suitable sequences are depicted in SEQ ID NOs: 20885-21503 and SEQ ID NOs: 36707-36738 (which can be scFv sequences, CDR sequence sets or vh and vl sequences)), and TIGIT (suitable sequences are depicted in SEQ ID NOs: 21504-21523 and SEQ ID NOs: 37435-37586 (which can be scFv sequences, CDR sequence sets or vh and vl sequences)).

[0368] In addition to the parental CDR sets disclosed in the sequence listing that form an ABD to TIM-3, the invention provides variant CDR sets. In one embodiment, a set of 6 CDRs can have 1, 2, 3, 4 or 5 amino acid changes from the parental CDRs, as long as the ABD is still able to bind to the target antigen, as measured by at least one of a Biacore, surface plasmon resonance (SPR) and/or BLI (biolayer interferometry, e.g. Octet assay) assay, with the latter finding particular use in many embodiments.

[0369] In addition to the parental variable heavy and variable light domains disclosed herein that form an ABD to TIM-3, the invention provides variant vh and vl domains. In one embodiment, the variant vh and vl domains each can have from 1, 2, 3, 4, 5, 6, 7, 8, 9 or 10 amino acid changes from the parental vh and vl domain, as long as the ABD is still able to bind to the target antigen, as measured at least one of a Biacore, surface plasmon resonance (SPR) and/or BLI (biolayer interferometry, e.g. Octet assay) assay, with the latter finding particular use in many embodiments. In another embodiment, the variant vh and vl are at least 90, 95, 97, 98 or 99% identical to the respective parental vh or vl, as long as the ABD is still able to bind to the target antigen, as measured by at least one of a Biacore, surface plasmon resonance (SPR) and/or BLI (biolayer interferometry, e.g. Octet assay) assay, with the latter finding particular use in many embodiments.

[0370] LAG-3 Antigen Binding Domains

[0371] In some embodiments, one of the ABDs binds LAG-3. Suitable sets of 6 CDRs and/or vh and vl domains, as well as scFv sequences, are depicted SEQ ID NOs: 17135-20764, SEQ ID NOs: 36819-36962, SEQ ID NOs: 35417-35606, SEQ ID NOs: 25194-32793 and SEQ ID NOs: 32794-33002. ABD sequences of particular interest in some embodiments are shown in FIG. 11 and also include those sequences in the sequence listing with the identifiers 2A11_H0L0; 2A11_H1.125_L2.113; 2A11_H1.144_L2.142; 2A11_H1_L2.122; 2A11_H1_L2.123; 2A11_H1_L2.124; 2A11_H1_L2.25; 2A11_H1_L2.47; 2A11_H1_L2.50; 2A11_H1L2.91; 2A11H1_L2.93; 2A11_H1L2.97; 2A11_H1L1; 2A11_H1L2; 2A11_H2L2; 2A11_H3L1; 2A11_H3L2; 2A11_H4L1; 2A11_H4L2; 7G8_H0L0; 7G8_H1L1; 7G8_H3.18_L1.11; 7G8_H3.23_L1.11; 7G8_H3.28_L1; 7G8_H3.28_L1.11; 7G8_H3.28_L1.13; 7G8_H3.30_L1.34; 7G8_H3.30_L1.34; and 7G8_H3L1.

[0372] As will be appreciated by those in the art, suitable anti-LAG-3 ABDs can comprise a set of 6 CDRs as depicted in these sequences and Figures, either as they are underlined or, in the case where a different numbering scheme is used as described herein and as shown in Table 1, as the CDRs that are identified using other alignments within the vh and vl sequences of SEQ ID NOs: 17135-20764, SEQ ID NOs: 36819-36962, SEQ ID NOs: 35417-35606, SEQ ID NOs: 25194-32793 and SEQ ID NOs: 32794-33002. Suitable ABDs can also include the entire vh and vl sequences as depicted in these sequences and Figures, used as scFvs or as Fabs. In many of the embodiments herein that contain an Fv to LAG-3, it is the Fab monomer that binds LAG-3. As discussed herein, the other of the target pair when LAG-3 is one of the antigens is selected from PD-1 (suitable sequences are depicted in SEQ ID NOs: 6209-11464, SEQ ID NOs: 11465-17134, SEQ ID NOs: 33003-33072, SEQ ID NOs: 33073-35394 and SEQ ID NOs: 36127-36146 (which can be scFv sequences, CDR sequence sets or vh and vl sequences)), CTLA-4 (suitable sequences are depicted in SEQ ID NOs: 21-2918, SEQ ID NOs: 2919-6208, SEQ ID NOs: 36739-36818 and SEQ ID NOs: 35395-35416 (which can be scFv sequences, CDR sequence sets or vh and vl sequences)), TIM-3 (suitable sequences are depicted in SEQ ID NOs: 20765-20884, SEQ ID NOs: 37587-37698 and SEQ ID NOs: 36347-36706 (which can be scFv sequences, CDR sequence sets or vh and vl sequences)), BTLA (suitable sequences are depicted in SEQ ID NOs: 20885-21503 and SEQ ID NOs: 36707-36738 (which can be scFv sequences, CDR sequence sets or vh and vl sequences)), and TIGIT (suitable sequences are depicted in SEQ ID NOs: 21504-21523 and SEQ ID NOs: 37435-37586 (which can be scFv sequences, CDR sequence sets or vh and vl sequences).

[0373] In addition to the parental CDR sets disclosed in the sequence listing that form an ABD to LAG-3, the invention provides variant CDR sets. In one embodiment, a set of 6 CDRs can have 1, 2, 3, 4 or 5 amino acid changes from the parental CDRs, as long as the ABD is still able to bind to the target antigen, as measured by at least one of a Biacore, surface plasmon resonance (SPR) and/or BLI (biolayer interferometry, e.g. Octet assay) assay, with the latter finding particular use in many embodiments.

[0374] In addition to the parental variable heavy and variable light domains disclosed herein that form an ABD to LAG-3, the invention provides variant vh and vl domains. In one embodiment, the variant vh and vl domains each can have from 1, 2, 3, 4, 5, 6, 7, 8, 9 or 10 amino acid changes from the parental vh and vl domain, as long as the ABD is still able to bind to the target antigen, as measured by at least one of a Biacore, surface plasmon resonance (SPR) and/or BLI (biolayer interferometry, e.g. Octet assay) assay, with the latter finding particular use in many embodiments. In another embodiment, the variant vh and vl are at least 90, 95, 97, 98 or 99% identical to the respective parental vh or vl, as long as the ABD is still able to bind to the target antigen, as measured by at least one of a Biacore, surface plasmon resonance (SPR) and/or BLI (biolayer interferometry, e.g. Octet assay) assay, with the latter finding particular use in many embodiments.

[0375] Specific preferred embodiments include the 7G8_H3.30_L1.34 anti-LAG-3 Fv, in a Fab format, included within any of the bottle opener format backbones of FIG. 37.

[0376] Specific preferred embodiments include the 7G8_H3.30_L1.34 anti-LAG-3 Fv, in a scFv format, included within any of the bottle opener format backbones of FIG. 37.

### E. BTLA Antigen Binding Domains

[0377] In some embodiments, one of the ABDs binds BTLA. Suitable sets of 6 CDRs and/or vh and vl domains, as well as scFv sequences, are depicted in SEQ ID NOs: 20885-21503 and SEQ ID NOs: 36707-36738. ABD sequences of particular interest in some embodiments are shown in FIG. 12 and also include those sequences in the sequence listing with the identifiers 9C6_H0L0; 9C6_H1.1_L1; and 9C6_H1.11_L1.

[0378] As will be appreciated by those in the art, suitable anti-BTLA ABDs can comprise a set of 6 CDRs as depicted in these sequences and Figures, either as they are underlined or, in the case where a different numbering scheme is used as described herein and as shown in Table 1, as the CDRs that are identified using other alignments within the vh and vl sequences SEQ ID NOs: 20885-21503 and SEQ ID NOs: 36707-36738. Suitable ABDs can also include the entire vh and vl sequences as depicted in these sequences and Figures, used as scFvs or as Fabs. In many of the embodiments herein that contain an Fv to BTLA, it is the Fab monomer that binds BTLA. As discussed herein, the other of the target pair when LAG-3 is one of the antigens is selected from PD-1 (suitable sequences are depicted in SEQ ID NOs: 6209-11464, SEQ ID NOs: 11465-17134, SEQ ID NOs: 33003-33072, SEQ ID NOs: 33073-35394 and SEQ ID NOs: 36127-36146 (which can be scFv sequences, CDR sequence sets or vh and vl sequences)), CTLA-4 (suitable sequences are depicted in SEQ ID NOs: 21-2918, SEQ ID NOs: 2919-6208, SEQ ID NOs: 36739-36818 and SEQ ID NOs: 35395-35416 (which can be scFv sequences, CDR sequence sets or vh and vl sequences)), TIM-3 (suitable sequences are depicted in SEQ ID NOs: 20765-20884, SEQ ID NOs: 37587-37698 and SEQ ID NOs: 36347-36706 (which can be scFv sequences, CDR sequence sets or vh and vl sequences)), LAG-3 (suitable sequences are depicted in SEQ ID NOs: 17135-20764, SEQ ID NOs: 36819-36962, SEQ ID NOs: 35417-35606, SEQ ID NOs: 25194-32793 and SEQ ID NOs: 32794-33002 (which can be scFv sequences, CDR sequence sets or vh and vl sequences)), and TIGIT (suitable sequences are depicted in SEQ ID NOs: 21504-21523 and SEQ ID NOs: 37435-37586 (which can be scFv sequences, CDR sequence sets or vh and vl sequences)).

[0379] In addition to the parental CDR sets disclosed in the sequence listing that form an ABD to BTLA, the invention provides variant CDR sets. In one embodiment, a set of 6 CDRs can have 1, 2, 3, 4 or 5 amino acid changes from the parental CDRs, as long as the ABD is still able to bind to the target antigen, as measured at least one of a Biacore, surface plasmon resonance (SPR) and/or BLI (biolayer interferometry, e.g. Octet assay) assay, with the latter finding particular use in many embodiments.

[0380] In addition to the parental variable heavy and variable light domains disclosed herein that form an ABD to BTLA, the invention provides variant vh and vl domains. In one embodiment, the variant vh and vl domains each can have from 1, 2, 3, 4, 5, 6, 7, 8, 9 or 10 amino acid changes from the parental vh and vl domain, as long as the ABD is still able to bind to the target antigen, as measured by at least one of a Biacore, surface plasmon resonance (SPR) and/or BLI (biolayer interferometry, e.g. Octet assay) assay, with the latter finding particular use in many embodiments. In another embodiment, the variant vh and vl are at least 90, 95, 97, 98 or 99% identical to the respective parental vh or vl, as long as the ABD is still able to bind to the target antigen, as measured by at least one of a Biacore, surface plasmon resonance (SPR) and/or BLI (biolayer interferometry, e.g. Octet assay) assay, with the latter finding particular use in many embodiments.

[0381] Specific preferred embodiments include the 9C6_H1.1_L1 anti-LAG-3 Fv, in a Fab format, included within any of the bottle opener format backbones of FIG. 37.

[0382] Specific preferred embodiments include the 7G8_H3.30_L1.34 anti-LAG-3 Fv, in a scFv format, included within any of the bottle opener format backbones of FIG. 37.

### F. TIGIT Antigen Binding Domains

[0383] In some embodiments, one of the ABDs binds TIGIT. Suitable sets of 6 CDRs and/or vh and vl domains, as well as scFv sequences, are depicted in SEQ ID NOs: 21504-21523 and SEQ ID NOs: 37435-37586.

[0384] As will be appreciated by those in the art, suitable anti-TIGIT ABDs can comprise a set of 6 CDRs as depicted in these sequences and Figures, either as they are underlined or, in the case where a different numbering scheme is used as described herein and as shown in Table 1, as the CDRs that are identified using other alignments within the vh and vl sequences of SEQ ID NOs: 21504-21523 and SEQ ID NOs: 37435-37586. Suitable ABDs can also include the entire vh and vl sequences as depicted in these sequences and Figures, used as scFvs or as Fabs. In many of the embodiments herein that contain an Fv to TIGIT, it is the Fab monomer that binds TIGIT. As discussed herein, the other of the target pair when LAG-3 is one of the antigens is selected from PD-1 (suitable sequences are depicted in SEQ ID NOs: 6209-11464, SEQ ID NOs: 11465-17134, SEQ ID NOs: 33003-33072, SEQ ID NOs: 33073-35394 and SEQ ID NOs: 36127-36146 (which can be scFv sequences, CDR sequence sets or vh and vl sequences)), CTLA-4 (suitable sequences are depicted in SEQ ID NOs: 21-2918, SEQ ID NOs: 2919-6208, SEQ ID NOs: 36739-36818 and SEQ ID NOs: 35395-35416 (which can be scFv sequences, CDR sequence sets or vh and vl sequences)), TIM-3 (suitable sequences are depicted in SEQ ID NOs: 20765-20884, SEQ ID NOs: 37587-37698 and SEQ ID NOs: 36347-36706 (which can be scFv sequences, CDR sequence sets or vh and vl sequences)), LAG-3 (suitable sequences are depicted in SEQ ID NOs: 17135-20764, SEQ ID NOs: 36819-36962, SEQ ID NOs: 35417-35606, SEQ ID NOs: 25194-32793 and SEQ ID NOs: 32794-33002 (which can be scFv sequences, CDR sequence sets or vh and vl sequences)), and BTLA (suitable sequences are depicted in SEQ ID NOs: 20885-21503 and SEQ ID NOs: 36707-36738 (which can be scFv sequences, CDR sequence sets or vh and vl sequences)).

### G. Specific Bispecific Embodiments

[0385] The invention provides a number of particular bispecific antibodies as outlined below.

[0386] 1. LAG-3×CTLA-4

[0387] In some embodiments, the invention provides bispecific heterodimeric antibodies comprising a first ABD that binds human LAG-3 and a second ABD that binds human CTLA-4, and can be in any format shown in FIG. 1. Most of the disclosure refers to a bottle opener format with the Fab being the LAG-3 side and the CLTA-4 side being the scFv side, but this can be reversed for all of the embodiments herein.

[0388] In one embodiment, the LAG-3×CTLA-4 bispecific antibody is in the bottle opener format of FIG. 1A, wherein the CTLA-4 ABD is the scFv. In another embodiment, the LAG-3×CTLA-4 bispecific antibody is in the central-scFv format of FIG. 1F, with the LAG-3 ABD being the Fab components. In another embodiment, the LAG-3×CTLA-4 bispecific antibody is in the central-scFv format of FIG. 1F, with the CTLA-4 ABD being the scFv.

[0389] The LAG-3×CTLA-4 bispecific antibodies (in either the bottle opener format or the central-scFv format) generally include skew variants, pI variants and ablation variants as outlined herein. That is, in either format, the Fc domains of the two monomers can comprise skew variants (e.g. a set of amino acid substitutions as shown in FIG. 3 and FIG. 8), optionally ablation variants (including those shown in FIG. 5), and the monomer comprising the Fab side (e.g. the heavy chain constant domain) comprises pI variants (including those shown in FIG. 4).

[0390] In some embodiments, the LAG-3×CTLA-4 bispecific antibody comprises Fc domains with skew variants, with particularly useful skew variants being selected from the group consisting of S364K/E357Q:L368D/K370S; L368D/K370S:S364K; L368E/K370S:S364K; T411T/E360E/Q362E:D401K; L368D/K370S:S364K/E357L, K370S: S364K/E357Q, T366S/L368A/Y407V:T366W and T366S/L368A/Y407V/Y349C:T366W/S354C.

[0391] In some embodiments, the LAG-3×CTLA-4 antibody includes skew variants, pI variants, and ablation variants. Accordingly, some embodiments include bottle opener formats that comprise: a) a first monomer (the “scFv monomer”) that comprises a charged scFv linker (with the +H sequence of FIG. 7 being preferred in some embodiments), the skew variants S364K/E357Q, the ablation variants E233P/L234V/L235A/G236del/S267K, and an Fv that binds to a checkpoint inhibitor as outlined herein; b) a second monomer (the “Fab monomer”) that comprises the skew variants L368D/K370S, the pI variants N208D/Q295E/N384D/Q418E/N421D, the ablation variants E233P/L234V/L235A/G236del/S267K, and a variable heavy domain that, with the variable light domain, makes up an Fv that binds to a second checkpoint inhibitor as outlined herein; and c) a light chain. A specific example of this embodiment utilizes the LAG-3 Fab 7G8_H3.30_L1.34 and the CTLA-4 scFv [CTLA-4]_H3.23_L0.129, although any of the CTLA-4 or LAG-3 Fvs in the sequence listing can be paired in any combination and used.

[0392] In some embodiments, the LAG-3×CTLA-4 antibody includes skew variants, pI variants, ablation variants and FcRn variants. Accordingly, some embodiments include bottle opener formats that comprise: a) a first monomer (the “scFv monomer”) that comprises a charged scFv linker (with the +H sequence of FIG. 7 being preferred in some embodiments), the skew variants S364K/E357Q, the ablation variants E233P/L234V/L235A/G236del/S267K, the FcRn variants M428L/N434S and an Fv that binds to a checkpoint inhibitor as outlined herein; b) a second monomer (the “Fab monomer”) that comprises the skew variants L368D/K370S, the pI variants N208D/Q295E/N384D/Q418E/N421D, the ablation variants E233P/L234V/L235A/G236del/S267K, the FcRn variants M428L/N434S and a variable heavy domain that, with the variable light domain, makes up an Fv that binds to a second checkpoint inhibitor as outlined herein; and c) a light chain. A specific example of this embodiment utilizes the LAG-3 Fab 7G8_H3.30_L1.34 and the CTLA-4 scFv [CTLA-4]_H3.23_L0.129, although any of the CTLA-4 or LAG-3 Fvs in the sequence listing can be paired in any combination and used.

[0393] Additional embodiments include any of the backbones from FIG. 37 with the LAG-3 Fab 7G8_H3.30_L1.34 and the CTLA-4 scFv [CTLA-4]_H3.23_L0.129.

[0394] Additional embodiments include any of the backbones from FIG. 38 with the LAG-3 Fab 7G8_H3.30_L1.34 and the CTLA-4 scFv [CTLA-4]_H3.23_L0.129.

[0395] In some embodiments, for LAG-3×CLTA-4 bispecific antibodies, the Fv for the LAG-3 Fab side is selected from those sequences in the sequence listing with the identifiers 2A11_H0L0; 2A11_H1.125_L2.113; 2A11_H1.144_L2.142; 2A11_H1_L2.122; 2A11_H1_L2.123; 2A11_H1_L2.124; 2A11_H1_L2.25; 2A11_H1_L2.47; 2A11_H1_L2.50; 2A11_H1_L2.91; 2A11_H1_L2.93; 2A11_H1_L2.97; 2A11_H1L1; 2A11_H1L2; 2A11_H2L2; 2A11_H3L1; 2A11_H3L2; 2A11_H4L1; 2A11_H4L2; 7G8_H0L0; 7G8_H1L1; 7G8_H3.18_L1.11; 7G8_H3.23_L1.11; 7G8_H3.28_L1; 7G8_H3.28_L1.11; 7G8_H3.28_L1.13; 7G8_H3.30_L1.34; 7G8_H3.30_L1.34; and 7G8_H3L1. The Fv for the CTLA-4 scFv side is selected from those sequences in the sequence listing with the identifiers [CTLA-4]_H0.25_L0; [CTLA-4]_H0.26_L0; [CTLA-4]_H0.27L0; [CTLA-4]_H0.29_L0; [CTLA-4]_H0.38_L0; [CTLA-4]_H0.39L0; 0[CTLA-4]_H0.40_L0; [CTLA-4]_H0.70_L0; [CTLA-4]_H0_L0.22; [CTLA-4]_H2_L0; [CTLA-4]_H3.21_L0.124; [CTLA-4]_H3.21_L0.129; [CTLA-4]_H3.21_L0.132; [CTLA-4]_H3.23_L0.124; [CTLA-4]_H3.23_L0.129; [CTLA-4]_H3.23_L0.132; [CTLA-4]_H3.25_L0.124; [CTLA-4]_H3.25_L0.129; [CTLA-4]_H3.25_L0.132; [CTLA-4]_H3.4_L0.118; [CTLA-4]_H3.4_L0.119; [CTLA-4]_H3.4_L0.12; [CTLA-4]_H3.4_L0.121; [CTLA-4]_H3.4_L0.122; [CTLA-4]_H3.4_L0.123; [CTLA-4]_H3.4_L0.124; [CTLA-4]_H3.4_L0.125; [CTLA-4]_H3.4_L0.126; [CTLA-4]_H3.4_L0.127; [CTLA-4]_H3.4_L0.128; [CTLA-4]_H3.4_L0.129; [CTLA-4]_H3.4_L0.130; [CTLA-4]_H3.4_L0.131; [CTLA-4]_H3.4_L0.132; [CTLA-4]_H3.5_L2.1; [CTLA-4]_H3.5_L2.2; [CTLA-4]_H3.5_L2.3; [CTLA-4]_H3_L0; [CTLA-4]_H3_L0.22; [CTLA-4]_H3_L0.44; [CTLA-4]_H3_L0.67; and [CTLA-4]_H3L0.74.

[0396] In some embodiments, the LAG-3×CTLA-4 bispecific antibody is selected from those constructs listed in SEQ ID NOs: 35607-35866 and SEQ ID NOs: 21524-22620.

[0397] In some embodiments, the LAG-3×CTLA-4 bispecific antibody is selected from XENP20206, XENP21582, XENP21584, XENP21588, XENP22123, XENP22124, XENP22125, XENP22604, XENP22672, XENP22847, XENP22847, XENP22841 and XENP22849.

[0398] 2. BTLA×PD-1

[0399] In some embodiments, the invention provides bispecific heterodimeric antibodies comprising a first ABD that binds human BTLA and a second ABD that binds human PD-1, and can be in any format shown in FIG. 1. Most of the disclosure refers to a bottle opener format with the Fab being the BTLA side and the PD-1 side being the scFv side, but this can be reversed for all of the embodiments herein.

[0400] In one embodiment, the BTLA×PD-1 bispecific antibody is in the bottle opener format of FIG. 1A, wherein the PD-1 ABD is the scFv. In another embodiment, the BTLA×PD-1 bispecific antibody is in the central-scFv format of FIG. 1F, with the BTLA ABD being the Fab components. In another embodiment, the BTLA×PD-1 bispecific antibody is in the central-scFv format of FIG. 1F, with the PD-1 ABD being the scFv.

[0401] The BTLA×PD-1 bispecific antibodies (in either the bottle opener format or the central-scFv format) generally include skew variants, pI variants and ablation variants as outlined herein. That is, in either format, the Fc domains of the two monomers can comprise skew variants (e.g. a set of amino acid substitutions as shown in FIG. 3 and FIG. 8), optionally ablation variants (including those shown in FIG. 5), and the monomer comprising the Fab side (e.g. the heavy chain constant domain) comprises pI variants (including those shown in FIG. 4).

[0402] In some embodiments, the BTLA×PD-1 bispecific antibody comprises Fc domains with skew variants, with particularly useful skew variants being selected from the group consisting of S364K/E357Q:L368D/K370S; L368D/K370S:S364K; L368E/K370S:S364K; T411T/E360E/Q362E:D401K; L368D/K370S:S364K/E357L, K370S:S364K/E357Q, T366S/L368A/Y407V:T366W and T366S/L368A/Y407V/Y349C:T366W/S354C.

[0403] In some embodiments, the BTLA×PD-1 antibody includes skew variants, pI variants, and ablation variants. Accordingly, some embodiments include bottle opener formats that comprise: a) a first monomer (the “scFv monomer”) that comprises a charged scFv linker (with the +H sequence of FIG. 7 being preferred in some embodiments), the skew variants S364K/E357Q, the ablation variants E233P/L234V/L235A/G236del/S267K, and an Fv that binds to a checkpoint inhibitor as outlined herein; b) a second monomer (the “Fab monomer”) that comprises the skew variants L368D/K370S, the pI variants N208D/Q295E/N384D/Q418E/N421D, the ablation variants E233P/L234V/L235A/G236del/S267K, and a variable heavy domain that, with the variable light domain, makes up an Fv that binds to a second checkpoint inhibitor as outlined herein; and c) a light chain. A specific example of this embodiment utilizes the BTLA Fab 9C6_H1.1_L1 and the PD-1 scFv 1G6_L1.194_H1.279 although any of the BTLA or PD-1 Fvs in the sequence listing can be paired in any combination and used.

[0404] In some embodiments, the BTLA×PD-1 antibody includes skew variants, pI variants, ablation variants and FcRn variants. Accordingly, some embodiments include bottle opener formats that comprise: a) a first monomer (the “scFv monomer”) that comprises a charged scFv linker (with the +H sequence of FIG. 7 being preferred in some embodiments), the skew variants S364K/E357Q, the ablation variants E233P/L234V/L235A/G236del/S267K, the FcRn variants M428L/N434S and an Fv that binds to a checkpoint inhibitor as outlined herein; b) a second monomer (the “Fab monomer”) that comprises the skew variants L368D/K370S, the pI variants N208D/Q295E/N384D/Q418E/N421D, the ablation variants E233P/L234V/L235A/G236del/S267K, the FcRn variants M428L/N434S and a variable heavy domain that, with the variable light domain, makes up an Fv that binds to a second checkpoint inhibitor as outlined herein; and c) a light chain. A specific example of this embodiment utilizes the BTLA Fab 9C6_H1.1_L1 and the PD-1 scFv 1G6_L1.194_H1.279 although any of the BTLA or PD-1 Fvs in the sequence listing can be paired in any combination and used.

[0405] Additional embodiments include any of the backbones from FIG. 37 with the BTLA Fab 9C6_H1.1_L1 and the PD-1 scFv 1G6_L1.194_H1.279.

[0406] Additional embodiments include any of the backbones from FIG. 38 with the BTLA Fab 9C6_H1.1_L1 and the PD-1 scFv 1G6_L1.194_H1.279.

[0407] In some embodiments, for BTLA×PD-1 bispecific antibodies, the Fv for the BTLA Fab side is selected from those sequences in the sequence listing with the identifiers 9C6_H0L0, 9C6_H1.1_L1, 9C6_H1.11_L1. The Fv for the PD-1 scFv side is selected from those sequences in the sequence listing with the identifiers 1G6_H1.279_L1.194; 1G6_H1.280_L1.224; 1G6_L1.194_H1.279; 1G6_L1.210_H1.288; and 2E9_H1L1.

[0408] In some embodiments, the BTLA×PD-1 bispecific antibody is selected from constructs include those listed as SEQ ID NOs: 22724-23315 and SEQ ID NOs: 36147-36166.

[0409] In some embodiments, the BTLA×PD-1 bispecific antibody is selected from XENP20895, XENP21220, XENP21221 and XENP22858.

[0410] 3. CTLA-4×PD-1

[0411] In some embodiments, the invention provides bispecific heterodimeric antibodies comprising a first ABD that binds human CTLA-4 and a second ABD that binds human PD-1, and can be in any format shown in FIG. 1. Most of the disclosure refers to a bottle opener format with the Fab being the CTLA-4 side and the PD-1 side being the scFv side, but this can be reversed for all of the embodiments herein.

[0412] In one embodiment, the CTLA-4×PD-1 bispecific antibody is in the bottle opener format of FIG. 1A, wherein the PD-1 ABD is the scFv. In another embodiment, the CTLA-4×PD-1 bispecific antibody is in the central-scFv format of FIG. 1F, with the CTLA-4 ABD being the Fab components. In another embodiment, the CTLA-4×PD-1 bispecific antibody is in the central-scFv format of FIG. 1F, with the PD-1 ABD being the scFv.

[0413] The CTLA-4×PD-1 bispecific antibodies (in either the bottle opener format or the central-scFv format) generally include skew variants, pI variants and ablation variants as outlined herein. That is, in either format, the Fc domains of the two monomers can comprise skew variants (e.g. a set of amino acid substitutions as shown in FIG. 3 and FIG. 8), optionally ablation variants (including those shown in FIG. 5), and the monomer comprising the Fab side (e.g. the heavy chain constant domain) comprises pI variants (including those shown in FIG. 4).

[0414] In some embodiments, the CTLA-4×PD-1 bispecific antibody comprises Fc domains with skew variants, with particularly useful skew variants being selected from the group consisting of S364K/E357Q:L368D/K370S; L368D/K370S:S364K; L368E/K370S:S364K; T411T/E360E/Q362E:D401K; L368D/K370S:S364K/E357L, K370S:S364K/E357Q, T366S/L368A/Y407V:T366W and T366S/L368A/Y407V/Y349C:T366W/S354C.

[0415] In some embodiments, the CTLA-4×PD-1 antibody includes skew variants, pI variants, and ablation variants. Accordingly, some embodiments include bottle opener formats that comprise: a) a first monomer (the “scFv monomer”) that comprises a charged scFv linker (with the +H sequence of FIG. 7 being preferred in some embodiments), the skew variants S364K/E357Q, the ablation variants E233P/L234V/L235A/G236del/S267K, and an Fv that binds to a checkpoint inhibitor as outlined herein; b) a second monomer (the “Fab monomer”) that comprises the skew variants L368D/K370S, the pI variants N208D/Q295E/N384D/Q418E/N421D, the ablation variants E233P/L234V/L235A/G236del/S267K, and a variable heavy domain that, with the variable light domain, makes up an Fv that binds to a second checkpoint inhibitor as outlined herein; and c) a light chain. A specific example of this embodiment utilizes the CTLA-4 Fab [CTLA-4]_H3_L0.22 and the PD-1 scFv 1G6_L1.194_H1.279 although any of the CTLA-4 or PD-1 Fvs in the sequence listing can be paired in any combination and used.

[0416] In some embodiments, the CTLA-4×PD-1 antibody includes skew variants, pI variants, ablation variants and FcRn variants. Accordingly, some embodiments include bottle opener formats that comprise: a) a first monomer (the “scFv monomer”) that comprises a charged scFv linker (with the +H sequence of FIG. 7 being preferred in some embodiments), the skew variants S364K/E357Q, the ablation variants E233P/L234V/L235A/G236del/S267K, the FcRn variants M428L/N434S and an Fv that binds to a checkpoint inhibitor as outlined herein; b) a second monomer (the “Fab monomer”) that comprises the skew variants L368D/K370S, the pI variants N208D/Q295E/N384D/Q418E/N421D, the ablation variants E233P/L234V/L235A/G236del/S267K, the FcRn variants M428L/N434S and a variable heavy domain that, with the variable light domain, makes up an Fv that binds to a second checkpoint inhibitor as outlined herein; and c) a light chain. A specific example of this embodiment utilizes the CTLA-4 Fab [CTLA-4]_H3_L0.22 and the PD-1 scFv 1G6_L1.194_H1.279 although any of the CTLA-4 or PD-1 Fvs in the sequence listing can be paired in any combination and used.

[0417] Additional embodiments include any of the backbones from FIG. 37 with the CTLA-4 Fab [CTLA-4]_H3_L0.22 and the PD-1 scFv 1G6_L1.194_H1.279.

[0418] Additional embodiments include any of the backbones from FIG. 38 with the CTLA-4 Fab [CTLA-4]_H3_L0.22 and the PD-1 scFv 1G6_L1.194_H1.279.

[0419] In some embodiments, for CTLA-4×PD-1 bispecific antibodies, the Fv for the CTLA-4 Fab side is selected from those sequences in the sequence listing with the identifiers with the identifiers [CTLA-4]_H0.25_L0; [CTLA-4]_H0.26_L0; [CTLA-4]_H0.27_L0; [CTLA-4]_H0.29L0; [CTLA-4]_H0.38_L0; [CTLA-4]_H0.39_L0; 0[CTLA-4]_H0.40_L0; [CTLA-4]_H0.70L0; [CTLA-4]_H0L0.22; [CTLA-4]_H2L0; [CTLA-4]_H3.21_L0.124; [CTLA-4]_H3.21_L0.129; [CTLA-4]_H3.21_L0.132; [CTLA-4]_H3.23_L0.124; [CTLA-4]_H3.23_L0.129; [CTLA-4]_H3.23_L0.132; [CTLA-4]_H3.25_L0.124; [CTLA-4]_H3.25_L0.129; [CTLA-4]_H3.25_L0.132; [CTLA-4]_H3.4_L0.118; [CTLA-4]_H3.4_L0.119; [CTLA-4]_H3.4_L0.12; [CTLA-4]_H3.4_L0.121; [CTLA-4]_H3.4_L0.122; [CTLA-4]_H3.4_L0.123; [CTLA-4]_H3.4_L0.124; [CTLA-4]_H3.4_L0.125; [CTLA-4]_H3.4_L0.126; [CTLA-4]_H3.4_L0.127; [CTLA-4]_H3.4_L0.128; [CTLA-4]_H3.4_L0.129; [CTLA-4]_H3.4_L0.130; [CTLA-4]_H3.4_L0.131; [CTLA-4]_H3.4_L0.132; [CTLA-4]_H3.5_L2.1; [CTLA-4]_H3.5_L2.2; [CTLA-4]_H3.5_L2.3; [CTLA-4]_H3_L0; [CTLA-4]_H3L0.22; [CTLA-4]_H3_L0.44; [CTLA-4]_H3_L0.67; and [CTLA-4]_H3_L0.74. The Fv for the PD-1 scFv side is selected from those sequences in the sequence listing with the identifiers identifiers 1G6_H1.279_L1.194; 1G6_H1.280_L1.224; 1G6_L1.194_H1.279; 1G6_L1.210_H1.288; and 2E9_H1L1.

[0420] In some embodiments, the CTLA-4×PD-1 bispecific antibody is selected from those listed as SEQ ID NOs: 36167-36346 and SEQ ID NOs: 23316-23735.

[0421] In some embodiments, the CTLA-4×PD-1 bispecific antibody is selected from XENP19738, XENP19739, XENP19741, XENP20053, XENP20066, XENP20130, XENP20146, XENP20717 and XENP22836.

[0422] 4. LAG-3×PD-1

[0423] In some embodiments, the invention provides bispecific heterodimeric antibodies comprising a first ABD that binds human LAG-3 and a second ABD that binds human PD-1, and can be in any format shown in FIG. 1. Most of the disclosure refers to a bottle opener format with the Fab being the LAG-3 side and the PD-1 side being the scFv side, but this can be reversed for all of the embodiments herein.

[0424] In one embodiment, the LAG-3×PD-1 bispecific antibody is in the bottle opener format of FIG. 1A, wherein the PD-1 ABD is the scFv. In another embodiment, the LAG-3×PD-1 bispecific antibody is in the central-scFv format of FIG. 1F, with the LAG-3 ABD being the Fab components. In another embodiment, the LAG-3×PD-1 bispecific antibody is in the central-scFv format of FIG. 1F, with the PD-1 ABD being the scFv.

[0425] The LAG-3×PD-1 bispecific antibodies (in either the bottle opener format or the central-scFv format) generally include skew variants, pI variants and ablation variants as outlined herein. That is, in either format, the Fc domains of the two monomers can comprise skew variants (e.g. a set of amino acid substitutions as shown in FIG. 3 and FIG. 8), optionally ablation variants (including those shown in FIG. 5), and the monomer comprising the Fab side (e.g. the heavy chain constant domain) comprises pI variants (including those shown in FIG. 4).

[0426] In some embodiments, the LAG-3×PD-1 bispecific antibody comprises Fc domains with skew variants, with particularly useful skew variants being selected from the group consisting of S364K/E357Q:L368D/K370S; L368D/K370S:S364K; L368E/K370S:S364K; T411T/E360E/Q362E:D401K; L368D/K370S:S364K/E357L, K370S:S364K/E357Q, T366S/L368A/Y407V:T366W and T366S/L368A/Y407V/Y349C:T366W/S354C.

[0427] In some embodiments, the LAG-3×PD-1 antibody includes skew variants, pI variants, and ablation variants. Accordingly, some embodiments include bottle opener formats that comprise: a) a first monomer (the “scFv monomer”) that comprises a charged scFv linker (with the +H sequence of FIG. 7 being preferred in some embodiments), the skew variants S364K/E357Q, the ablation variants E233P/L234V/L235A/G236del/S267K, and an Fv that binds to a checkpoint inhibitor as outlined herein; b) a second monomer (the “Fab monomer”) that comprises the skew variants L368D/K370S, the pI variants N208D/Q295E/N384D/Q418E/N421D, the ablation variants E233P/L234V/L235A/G236del/S267K, and a variable heavy domain that, with the variable light domain, makes up an Fv that binds to a second checkpoint inhibitor as outlined herein; and c) a light chain. A specific example of this embodiment utilizes the LAG-3 Fab 7G8_H3.30_L1.34 and the PD-1 scFv 1G6_L1.194_H1.279 although any of the LAG-3 or PD-1 Fvs in the sequence listing can be paired in any combination and used.

[0428] In some embodiments, the LAG-3×PD-1 antibody includes skew variants, pI variants, ablation variants and FcRn variants. Accordingly, some embodiments include bottle opener formats that comprise: a) a first monomer (the “scFv monomer”) that comprises a charged scFv linker (with the +H sequence of FIG. 7 being preferred in some embodiments), the skew variants S364K/E357Q, the ablation variants E233P/L234V/L235A/G236del/S267K, the FcRn variants M428L/N434S and an Fv that binds to a checkpoint inhibitor as outlined herein; b) a second monomer (the “Fab monomer”) that comprises the skew variants L368D/K370S, the pI variants N208D/Q295E/N384D/Q418E/N421D, the ablation variants E233P/L234V/L235A/G236del/S267K, the FcRn variants M428L/N434S and a variable heavy domain that, with the variable light domain, makes up an Fv that binds to a second checkpoint inhibitor as outlined herein; and c) a light chain. A specific example of this embodiment utilizes the LAG-3 Fab 7G8_H3.30_L1.34 and the PD-1 scFv 1G6_L1.194_H1.279 although any of the LAG-3 or PD-1 Fvs in the sequence listing can be paired in any combination and used.

[0429] Additional embodiments include any of the backbones from FIG. 37 with the LAG-3 Fab 7G8_H3.30_L1.34 and the PD-1 scFv 1G6_L1.194_H1.279.

[0430] Additional embodiments include any of the backbones from FIG. 38 with the LAG-3 Fab 7G8_H3.30_L1.34 and the PD-1 scFv 1G6_L1.194_H1.279.

[0431] In some embodiments, for LAG-3×PD-1 bispecific antibodies, the Fv for the LAG-3 Fab side is selected from those sequences in the sequence listing with the identifiers 2A11_H0L0; 2A11_H1.125_L2.113; 2A11_H1.144_L2.142; 2A11_H1_L2.122; 2A11_H1_L2.123; 2A11_H1_L2.124; 2A11_H1_L2.25; 2A11_H1_L2.47; 2A11_H1_L2.50; 2A11_H1_L2.91; 2A11_H1_L2.93; 2A11_H1_L2.97; 2A11_H1L1; 2A11_H1L2; 2A11_H2L2; 2A11_H3L1; 2A11_H3L2; 2A11_H4L1; 2A11_H4L2; 7G8_H0L0; 7G8_H1L1; 7G8_H3.18_L1.11; 7G8_H3.23_L1.11; 7G8_H3.28_L1; 7G8_H3.28_L1.11; 7G8_H3.28_L1.13; 7G8_H3.30_L1.34; 7G8_H3.30_L1.34; and 7G8_H3L1. The Fv for the PD-1 scFv side is selected from those sequences in the sequence listing with the identifiers identifiers 1G6_H1.279_L1.194; 1G6_H1.280_L1.224; 1G6_L1.194_H1.279; 1G6_L1.210_H1.288; and 2E9_H1L1.

[0432] In some embodiments, the LAG-3×PD-1 bispecific antibody is selected from constructs include those listed as SEQ ID NOs: 35867-36126 and SEQ ID NOs: 23736-25133.

[0433] In some embodiments, the LAG-3×PD-1 bispecific antibody is selected from XENP20206, XENP21582, XENP21584, XENP21588, XENP22123, XENP22124, XENP22125, XENP22604, XENP22672, XENP22847, XENP22847 and XENP22849

[0434] 5. TIGIT×PD-1

[0435] In some embodiments, the TIGIT×PD-1 bispecific antibody is selected from those constructs listed in SEQ ID NOs: 25134-25173.

[0436] 6. TIM-3×PD-1

[0437] In some embodiments, the invention provides bispecific heterodimeric antibodies comprising a first ABD that binds human TIM-3 and a second ABD that binds human PD-1, and can be in any format shown in FIG. 1. Most of the disclosure refers to a bottle opener format with the Fab being the TIM-3 side and the PD-1 side being the scFv side, but this can be reversed for all of the embodiments herein.

[0438] In one embodiment, the TIM-3×PD-1 bispecific antibody is in the bottle opener format of FIG. 1A, wherein the PD-1 ABD is the scFv. In another embodiment, the TIM-3×PD-1 bispecific antibody is in the central-scFv format of FIG. 1F, with the TIM-3 ABD being the Fab components. In another embodiment, the TIM-3×PD-1 bispecific antibody is in the central-scFv format of FIG. 1F, with the PD-1 ABD being the scFv.

[0439] The TIM-3×PD-1 bispecific antibodies (in either the bottle opener format or the central-scFv format) generally include skew variants, pI variants and ablation variants as outlined herein. That is, in either format, the Fc domains of the two monomers can comprise skew variants (e.g. a set of amino acid substitutions as shown in FIG. 3 and FIG. 8), optionally ablation variants (including those shown in FIG. 5), and the monomer comprising the Fab side (e.g. the heavy chain constant domain) comprises pI variants (including those shown in FIG. 4).

[0440] In some embodiments, the TIM-3×PD-1 bispecific antibody comprises Fc domains with skew variants, with particularly useful skew variants being selected from the group consisting of S364K/E357Q:L368D/K370S; L368D/K370S:S364K; L368E/K370S:S364K; T411T/E360E/Q362E:D401K; L368D/K370S:S364K/E357L, K370S:S364K/E357Q, T366S/L368A/Y407V:T366W and T366S/L368A/Y407V/Y349C:T366W/S354C.

[0441] In some embodiments, the TIM-3×PD-1 antibody includes skew variants, pI variants, and ablation variants. Accordingly, some embodiments include bottle opener formats that comprise: a) a first monomer (the “scFv monomer”) that comprises a charged scFv linker (with the +H sequence of FIG. 7 being preferred in some embodiments), the skew variants S364K/E357Q, the ablation variants E233P/L234V/L235A/G236del/S267K, and an Fv that binds to a checkpoint inhibitor as outlined herein; b) a second monomer (the “Fab monomer”) that comprises the skew variants L368D/K370S, the pI variants N208D/Q295E/N384D/Q418E/N421D, the ablation variants E233P/L234V/L235A/G236del/S267K, and a variable heavy domain that, with the variable light domain, makes up an Fv that binds to a second checkpoint inhibitor as outlined herein; and c) a light chain. A specific example of this embodiment utilizes the PD-1 scFv 1G6_L1.194_H1.279 although any of the TIM-3 or PD-1 Fvs in the sequence listing can be paired in any combination and used.

[0442] In some embodiments, the TIM-3×PD-1 antibody includes skew variants, pI variants, ablation variants and FcRn variants. Accordingly, some embodiments include bottle opener formats that comprise: a) a first monomer (the “scFv monomer”) that comprises a charged scFv linker (with the +H sequence of FIG. 7 being preferred in some embodiments), the skew variants S364K/E357Q, the ablation variants E233P/L234V/L235A/G236del/S267K, the FcRn variants M428L/N434S and an Fv that binds to a checkpoint inhibitor as outlined herein; b) a second monomer (the “Fab monomer”) that comprises the skew variants L368D/K370S, the pI variants N208D/Q295E/N384D/Q418E/N421D, the ablation variants E233P/L234V/L235A/G236del/S267K, the FcRn variants M428L/N434S and a variable heavy domain that, with the variable light domain, makes up an Fv that binds to a second checkpoint inhibitor as outlined herein; and c) a light chain. A specific example of this embodiment utilizes the PD-1 scFv 1G6_L1.194_H1.279 although any of the TIM-3 or PD-1 Fvs in the sequence listing can be paired in any combination and used.

[0443] Additional embodiments include any of the backbones from FIG. 37 with a TIM-3 Fab side and the PD-1 scFv 1G6_L1.194_H1.279.

[0444] Additional embodiments include any of the backbones from FIG. 38 with TIM-3 Fab side and the PD-1 scFv 1G6_L1.194_H1.279.

[0445] In some embodiments, for TIM-3 Fab side×PD-1 bispecific antibodies, the Fv for the TIM-3 Fab side Fab side is selected from those sequences in the sequence listing with the identifiers 1D10_H0L0; 1D12_H0L0; 3H3_H1_L2.1; 6C8_H0L0; 6D9_H0_1D12_L0; 7A9_H0L0; 7B11_H0L0; 7B11var_H0L0; and 7C2_H0L0. The Fv for the PD-1 scFv side is selected from those sequences in the sequence listing with the identifiers identifiers 1G6_H1.279_L1.194; 1G6_H1.280_L1.224; 1G6_L1.194_H1.279; 1G6_L1.210_H1.288; and 2E9_H1L1.

[0446] In addition, the antibodies of the invention include those that bind to either the same epitope as the antigen binding domains outlined herein, or compete for binding with the antigen binding domains outlined herein. In some embodiments, the bispecific checkpoint antibody can contain one of the ABDs outlined herein and a second ABD that competes for binding with one of the ABDs outlined herein. In some embodiments both ABDs compete for binding with the corresponding ABD outlined herein. Binding competition is generally determined using at least one of a Biacore, surface plasmon resonance (SPR) and/or BLI (biolayer interferometry, e.g. Octet assay) assay, with the latter finding particular use in many embodiments.

### VII. USEFUL EMBODIMENTS

[0447] In one embodiment, a particular combination of skew and pI variants that finds use in the present invention is T366S/L368A/Y407V:T366W (optionally including a bridging disulfide, T366S/L368A/Y407V/Y349C:T366W/S354C) with one monomer comprises Q295E/N384D/Q418E/N481D and the other a positively charged scFv linker (when the format includes an scFv domain). As will be appreciated in the art, the “knobs in holes” variants do not change pI, and thus can be used on either monomer.

### VIII. NUCLEIC ACIDS OF THE INVENTION

[0448] The invention further provides nucleic acid compositions encoding the bispecific antibodies of the invention (or, in the case of “monospecific” antibodies, nucleic acids encoding those as well).

[0449] As will be appreciated by those in the art, the nucleic acid compositions will depend on the format and scaffold of the heterodimeric protein. Thus, for example, when the format requires three amino acid sequences, such as for all the formats depicted in FIG. 1 except for the dual scFv format, three nucleic acid sequences can be incorporated into one or more expression vectors for expression. Similarly, some formats (e.g. dual scFv formats such as disclosed in FIG. 1) only two nucleic acids are needed; again, they can be put into one or two expression vectors.

[0450] As is known in the art, the nucleic acids encoding the components of the invention can be incorporated into expression vectors as is known in the art, and depending on the host cells used to produce the heterodimeric antibodies of the invention. Generally the nucleic acids are operably linked to any number of regulatory elements (promoters, origin of replication, selectable markers, ribosomal binding sites, inducers, etc.). The expression vectors can be extra-chromosomal or integrating vectors.

[0451] The nucleic acids and/or expression vectors of the invention are then transformed into any number of different types of host cells as is well known in the art, including mammalian, bacterial, yeast, insect and/or fungal cells, with mammalian cells (e.g. CHO cells), finding use in many embodiments.

[0452] In some embodiments, nucleic acids encoding each monomer and the optional nucleic acid encoding a light chain, as applicable depending on the format, are each contained within a single expression vector, generally under different or the same promoter controls. In embodiments of particular use in the present invention, each of these two or three nucleic acids are contained on a different expression vector. As shown herein and in 62/025,931, hereby incorporated by reference, different vector ratios can be used to drive heterodimer formation. That is, surprisingly, while the proteins comprise first monomer:second monomer:light chains (in the case of many of the embodiments herein that have three polypeptides comprising the heterodimeric antibody) in a 1:1:2 ratio, these are not the ratios that give the best results.

[0453] The heterodimeric antibodies of the invention are made by culturing host cells comprising the expression vector(s) as is well known in the art. Once produced, traditional antibody purification steps are done, including an ion exchange chromotography step. As discussed herein, having the pIs of the two monomers differ by at least 0.5 can allow separation by ion exchange chromatography or isoelectric focusing, or other methods sensitive to isoelectric point. That is, the inclusion of pI substitutions that alter the isoelectric point (pI) of each monomer so that such that each monomer has a different pI and the heterodimer also has a distinct pI, thus facilitating isoelectric purification of the “triple F” heterodimer (e.g., anionic exchange columns, cationic exchange columns). These substitutions also aid in the determination and monitoring of any contaminating dual scFv-Fc and mAb homodimers post-purification (e.g., IEF gels, cIEF, and analytical IEX columns).

### IX. BIOLOGICAL AND BIOCHEMICAL FUNCTIONALITY OF THE HETERODIMERIC CHECKPOINT ANTIBODIES

[0454] Generally the bispecific checkpoint antibodies of the invention are administered to patients with cancer, and efficacy is assessed, in a number of ways as described herein. Thus, while standard assays of efficacy can be run, such as cancer load, size of tumor, evaluation of presence or extent of metastasis, etc., immuno-oncology treatments can be assessed on the basis of immune status evaluations as well. This can be done in a number of ways, including both in vitro and in vivo assays. For example, evaluation of changes in immune status (e.g. presence of ICOS+ CD4+ T cells following ipi treatment) along with “old fashioned” measurements such as tumor burden, size, invasiveness, LN involvement, metastasis, etc. can be done. Thus, any or all of the following can be evaluated: the inhibitory effects of the checkpoints on CD4+ T cell activation or proliferation, CD8+ T (CTL) cell activation or proliferation, CD8+ T cell-mediated cytotoxic activity and/or CTL mediated cell depletion, NK cell activity and NK mediated cell depletion, the potentiating effects of the checkpoints on Treg cell differentiation and proliferation and Treg- or myeloid derived suppressor cell (MDSC)-mediated immunosuppression or immune tolerance, and/or the effects of the checkpoints on proinflammatory cytokine production by immune cells, e.g., IL-2, IFN-γ or TNF-α production by T or other immune cells.

[0455] In some embodiments, assessment of treatment is done by evaluating immune cell proliferation, using for example, CFSE dilution method, Ki67 intracellular staining of immune effector cells, and 3H-Thymidine incorporation method,

[0456] In some embodiments, assessment of treatment is done by evaluating the increase in gene expression or increased protein levels of activation-associated markers, including one or more of: CD25, CD69, CD137, ICOS, PD1, GITR, OX40, and cell degranulation measured by surface expression of CD107A.

[0457] In general, gene expression assays are done as is known in the art.

[0458] In general, protein expression measurements are also similarly done as is known in the art.

[0459] In some embodiments, assessment of treatment is done by assessing cytotoxic activity measured by target cell viability detection via estimating numerous cell parameters such as enzyme activity (including protease activity), cell membrane permeability, cell adherence, ATP production, co-enzyme production, and nucleotide uptake activity. Specific examples of these assays include, but are not limited to, Trypan Blue or PI staining, 51Cr or 35S release method, LDH activity, MTT and/or WST assays, Calcein-AM assay, Luminescent based assay, and others.

[0460] In some embodiments, assessment of treatment is done by assessing T cell activity measured by cytokine production, measure either intracellularly in culture supernatant using cytokines including, but not limited to, IFNγ, TNFα, GM-CSF, IL2, IL6, IL4, IL5, IL10, IL13 using well known techniques.

[0461] Accordingly, assessment of treatment can be done using assays that evaluate one or more of the following: (i) increases in immune response, (ii) increases in activation of αβ and/or γδ T cells, (iii) increases in cytotoxic T cell activity, (iv) increases in NK and/or NKT cell activity, (v) alleviation of αβ and/or γδ T-cell suppression, (vi) increases in pro-inflammatory cytokine secretion, (vii) increases in IL-2 secretion; (viii) increases in interferon-γ production, (ix) increases in Th1 response, (x) decreases in Th2 response, (xi) decreases or eliminates cell number and/or activity of at least one of regulatory T cells (Tregs.

[0462] Assays to Measure Efficacy

[0463] In some embodiments, T cell activation is assessed using a Mixed Lymphocyte Reaction (MLR) assay as is known in the art. An increase in activity indicates immunostimulatory activity. Appropriate increases in activity are outlined below.

[0464] In one embodiment, the signaling pathway assay measures increases or decreases in immune response as measured for an example by phosphorylation or de-phosphorylation of different factors, or by measuring other post translational modifications.

[0465] An increase in activity indicates immunostimulatory activity. Appropriate increases in activity are outlined below.

[0466] In one embodiment, the signaling pathway assay measures increases or decreases in activation of αβ and/or γδ T cells as measured for an example by cytokine secretion or by proliferation or by changes in expression of activation markers like for an example CD137, CD107a, PD1, etc. An increase in activity indicates immunostimulatory activity. Appropriate increases in activity are outlined below.

[0467] In one embodiment, the signaling pathway assay measures increases or decreases in cytotoxic T cell activity as measured for an example by direct killing of target cells like for an example cancer cells or by cytokine secretion or by proliferation or by changes in expression of activation markers like for an example CD137, CD107a, PD1, etc. An increase in activity indicates immunostimulatory activity. Appropriate increases in activity are outlined below.

[0468] In one embodiment, the signaling pathway assay measures increases or decreases in NK and/or NKT cell activity as measured for an example by direct killing of target cells like for an example cancer cells or by cytokine secretion or by changes in expression of activation markers like for an example CD107a, etc. An increase in activity indicates immunostimulatory activity. Appropriate increases in activity are outlined below.

[0469] In one embodiment, the signaling pathway assay measures increases or decreases in αβ and/or γδ T-cell suppression, as measured for an example by cytokine secretion or by proliferation or by changes in expression of activation markers like for an example CD137, CD107a, PD1, etc. An increase in activity indicates immunostimulatory activity. Appropriate increases in activity are outlined below.

[0470] In one embodiment, the signaling pathway assay measures increases or decreases in pro-inflammatory cytokine secretion as measured for example by ELISA or by Luminex or by Multiplex bead based methods or by intracellular staining and FACS analysis or by Alispot etc. An increase in activity indicates immunostimulatory activity. Appropriate increases in activity are outlined below.

[0471] In one embodiment, the signaling pathway assay measures increases or decreases in IL-2 secretion as measured for example by ELISA or by Luminex or by Multiplex bead based methods or by intracellular staining and FACS analysis or by Alispot etc. An increase in activity indicates immunostimulatory activity. Appropriate increases in activity are outlined below.

[0472] In one embodiment, the signaling pathway assay measures increases or decreases in interferon-γ production as measured for example by ELISA or by Luminex or by Multiplex bead based methods or by intracellular staining and FACS analysis or by Alispot etc. An increase in activity indicates immunostimulatory activity. Appropriate increases in activity are outlined below.

[0473] In one embodiment, the signaling pathway assay measures increases or decreases in Th1 response as measured for an example by cytokine secretion or by changes in expression of activation markers. An increase in activity indicates immunostimulatory activity. Appropriate increases in activity are outlined below.

[0474] In one embodiment, the signaling pathway assay measures increases or decreases in Th2 response as measured for an example by cytokine secretion or by changes in expression of activation markers. An increase in activity indicates immunostimulatory activity. Appropriate increases in activity are outlined below.

[0475] In one embodiment, the signaling pathway assay measures increases or decreases cell number and/or activity of at least one of regulatory T cells (Tregs), as measured for example by flow cytometry or by IHC. A decrease in response indicates immunostimulatory activity. Appropriate decreases are the same as for increases, outlined below.

[0476] In one embodiment, the signaling pathway assay measures increases or decreases in M2 macrophages cell numbers, as measured for example by flow cytometry or by IHC. A decrease in response indicates immunostimulatory activity. Appropriate decreases are the same as for increases, outlined below.

[0477] In one embodiment, the signaling pathway assay measures increases or decreases in M2 macrophage pro-tumorigenic activity, as measured for an example by cytokine secretion or by changes in expression of activation markers. A decrease in response indicates immunostimulatory activity. Appropriate decreases are the same as for increases, outlined below.

[0478] In one embodiment, the signaling pathway assay measures increases or decreases in N2 neutrophils increase, as measured for example by flow cytometry or by IHC. A decrease in response indicates immunostimulatory activity. Appropriate decreases are the same as for increases, outlined below.

[0479] In one embodiment, the signaling pathway assay measures increases or decreases in N2 neutrophils pro-tumorigenic activity, as measured for an example by cytokine secretion or by changes in expression of activation markers. A decrease in response indicates immunostimulatory activity. Appropriate decreases are the same as for increases, outlined below.

[0480] In one embodiment, the signaling pathway assay measures increases or decreases in inhibition of T cell activation, as measured for an example by cytokine secretion or by proliferation or by changes in expression of activation markers like for an example CD137, CD107a, PD1, etc. An increase in activity indicates immunostimulatory activity. Appropriate increases in activity are outlined below.

[0481] In one embodiment, the signaling pathway assay measures increases or decreases in inhibition of CTL activation as measured for an example by direct killing of target cells like for an example cancer cells or by cytokine secretion or by proliferation or by changes in expression of activation markers like for an example CD137, CD107a, PD1, etc. An increase in activity indicates immunostimulatory activity. Appropriate increases in activity are outlined below.

[0482] In one embodiment, the signaling pathway assay measures increases or decreases in αβ and/or γδ T cell exhaustion as measured for an example by changes in expression of activation markers. A decrease in response indicates immunostimulatory activity. Appropriate decreases are the same as for increases, outlined below.

[0483] In one embodiment, the signaling pathway assay measures increases or decreases αβ and/or γδ T cell response as measured for an example by cytokine secretion or by proliferation or by changes in expression of activation markers like for an example CD137, CD107a, PD1, etc. An increase in activity indicates immunostimulatory activity. Appropriate increases in activity are outlined below.

[0484] In one embodiment, the signaling pathway assay measures increases or decreases in stimulation of antigen-specific memory responses as measured for an example by cytokine secretion or by proliferation or by changes in expression of activation markers like for an example CD45RA, CCR7 etc. An increase in activity indicates immunostimulatory activity. Appropriate increases in activity are outlined below.

[0485] In one embodiment, the signaling pathway assay measures increases or decreases in apoptosis or lysis of cancer cells as measured for an example by cytotoxicity assays such as for an example MTT, Cr release, Calcine AM, or by flow cytometry based assays like for an example CFSE dilution or propidium iodide staining etc. An increase in activity indicates immunostimulatory activity. Appropriate increases in activity are outlined below.

[0486] In one embodiment, the signaling pathway assay measures increases or decreases in stimulation of cytotoxic or cytostatic effect on cancer cells. as measured for an example by cytotoxicity assays such as for an example MTT, Cr release, Calcine AM, or by flow cytometry based assays like for an example CFSE dilution or propidium iodide staining etc. An increase in activity indicates immunostimulatory activity. Appropriate increases in activity are outlined below.

[0487] In one embodiment, the signaling pathway assay measures increases or decreases direct killing of cancer cells as measured for an example by cytotoxicity assays such as for an example MTT, Cr release, Calcine AM, or by flow cytometry based assays like for an example CFSE dilution or propidium iodide staining etc. An increase in activity indicates immunostimulatory activity. Appropriate increases in activity are outlined below.

[0488] In one embodiment, the signaling pathway assay measures increases or decreases Th17 activity as measured for an example by cytokine secretion or by proliferation or by changes in expression of activation markers. An increase in activity indicates immunostimulatory activity. Appropriate increases in activity are outlined below.

[0489] In one embodiment, the signaling pathway assay measures increases or decreases in induction of complement dependent cytotoxicity and/or antibody dependent cell-mediated cytotoxicity, as measured for an example by cytotoxicity assays such as for an example MTT, Cr release, Calcine AM, or by flow cytometry based assays like for an example CFSE dilution or propidium iodide staining etc. An increase in activity indicates immunostimulatory activity. Appropriate increases in activity are outlined below.

[0490] In one embodiment, T cell activation is measured for an example by direct killing of target cells like for an example cancer cells or by cytokine secretion or by proliferation or by changes in expression of activation markers like for an example CD137, CD107a, PD1, etc. For T-cells, increases in proliferation, cell surface markers of activation (e.g. CD25, CD69, CD137, PD1), cytotoxicity (ability to kill target cells), and cytokine production (e.g. IL-2, IL-4, IL-6, IFNγ, TNF-α, IL-10, IL-17A) would be indicative of immune modulation that would be consistent with enhanced killing of cancer cells.

[0491] In one embodiment, NK cell activation is measured for example by direct killing of target cells like for an example cancer cells or by cytokine secretion or by changes in expression of activation markers like for an example CD107a, etc. For NK cells, increases in proliferation, cytotoxicity (ability to kill target cells and increases CD107a, granzyme, and perform expression), cytokine production (e.g. IFNγ and TNF), and cell surface receptor expression (e.g. CD25) would be indicative of immune modulation that would be consistent with enhanced killing of cancer cells.

[0492] In one embodiment, γδ T cell activation is measured for example by cytokine secretion or by proliferation or by changes in expression of activation markers.

[0493] In one embodiment, Th1 cell activation is measured for example by cytokine secretion or by changes in expression of activation markers.

[0494] Appropriate increases in activity or response (or decreases, as appropriate as outlined above), are increases of 10%, 20%, 30%, 40%, 50%, 60%, 70%, 80%, 90%, 95% or 98 to 99% percent over the signal in either a reference sample or in control samples, for example test samples that do not contain an antibody of the invention. Similarly, increases of at least one-, two-, three-, four- or five-fold as compared to reference or control samples show efficacy.

### X. TREATMENTS

[0495] Once made, the compositions of the invention find use in a number of oncology applications, by treating cancer, generally by inhibiting the suppression of T cell activation (e.g. T cells are no longer suppressed) with the binding of the bispecific checkpoint antibodies of the invention.

[0496] Accordingly, the heterodimeric compositions of the invention find use in the treatment of these cancers.

### XI. COMBINATION THERAPIES

[0497] In some embodiments, when the bispecific checkpoint does not include an anti-PD-1 antigen binding domain, the bispecific antibody can be co-administered with a separate anti-PD-1 antibody such as pembrolizumab (Keytruda®) or nivolumab (Opdivo®). Co-administration can be done simultaneously or sequentially, as will be appreciated by those in the art.

[0498] That is, a CTLA-4×LAG-3 bispecific checkpoint antibody disclosed herein, or such as any of those that incorporate anti-LAG-3 sequences and anti-CTLA-4 sequences from the sequence listing, and in particular XENP22602, XENP 22675, XENP22841 or XENP 22843, can be co-administered with an anti-PD-1 antibody.

[0499] Similarly, a BTLA×CTLA-4 bispecific checkpoint disclosed herein, or such as any of those that incorporate anti-BTLA sequences and anti-CTLA-4 sequences from the sequence listing, can be co-administered with an anti-PD-1 antibody.

[0500] A CTLA-4×TIM-3 bispecific checkpoint antibody such as any of those that incorporate anti-TIM-3 sequences and anti-CTLA-4 sequences from the sequence listing, can be co-administered with an anti-PD-1 antibody.

[0501] A CTLA-4 and TIGIT bispecific checkpoint antibody such as any of those that incorporate anti-CTLA-4 and anti-TIGIT sequences from the sequence listing, can be co-administered with an anti-PD-1 antibody.

[0502] A TIM-3 and LAG-3 bispecific checkpoint antibody such as any of those that incorporate anti-TIM-3 sequences and anti-LAG-3 sequences from the sequence listing, can be co-administered with an anti-PD-1 antibody.

[0503] A TIM-3 and TIGIT bispecific checkpoint antibody such as any of those that incorporate anti-TIM-3 sequences and anti-TIGIT sequences from the sequence listing, can be co-administered with an anti-PD-1 antibody.

[0504] A TIM-3 and BTLA bispecific checkpoint antibody such as any of those that incorporate anti-TIM-3 and anti-BTLA sequences from the sequence listing, can be co-administered with an anti-PD-1 antibody.

[0505] A LAG-3 and TIGIT bispecific checkpoint antibody such as any of those that incorporate anti-LAG-3 sequences and anti-TIGIT sequences from the sequence listing, can be co-administered with an anti-PD-1 antibody.

[0506] A LAG-3 and BTLA bispecific checkpoint antibody such as any of those that incorporate anti-LAG-3 sequences and anti-BTLA sequences from the sequence listing, can be co-administered with an anti-PD-1 antibody.

[0507] A TIGIT and BTLA bispecific checkpoint antibody such as any of those that incorporate anti-TIGIT sequences and anti-BTLA sequences from the sequence listing, can be co-administered with an anti-PD-1 antibody.

### XII. ANTIBODY COMPOSITIONS FOR IN VIVO ADMINISTRATION

[0508] Formulations of the antibodies used in accordance with the present invention are prepared for storage by mixing an antibody having the desired degree of purity with optional pharmaceutically acceptable carriers, excipients or stabilizers (as generally outlined in Remington's Pharmaceutical Sciences 16th edition, Osol, A. Ed. [1980]), in the form of lyophilized formulations or aqueous solutions. Acceptable carriers, buffers, excipients, or stabilizers are nontoxic to recipients at the dosages and concentrations employed, and include buffers such as phosphate, citrate, and other organic acids; antioxidants including ascorbic acid and methionine; preservatives (such as octadecyldimethylbenzyl ammonium chloride; hexamethonium chloride; benzalkonium chloride, benzethonium chloride; phenol, butyl or benzyl alcohol; alkyl parabens such as methyl or propyl paraben; catechol; resorcinol; cyclohexanol; 3-pentanol; and m-cresol); low molecular weight (less than about 10 residues) polypeptides; proteins, such as serum albumin, gelatin, or immunoglobulins; hydrophilic polymers such as polyvinylpyrrolidone; amino acids such as glycine, glutamine, asparagine, histidine, arginine, or lysine; monosaccharides, disaccharides, and other carbohydrates including glucose, mannose, or dextrins; chelating agents such as EDTA; sugars such as sucrose, mannitol, trehalose or sorbitol; salt-forming counter-ions such as sodium; metal complexes (e.g. Zn-protein complexes); and/or non-ionic surfactants such as TWEEN™, PLURONICS™ or polyethylene glycol (PEG).

### Administrative Modalities

[0509] The antibodies and chemotherapeutic agents of the invention are administered to a subject, in accord with known methods, such as intravenous administration as a bolus or by continuous infusion over a period of time.

[0510] Treatment Modalities

[0511] In the methods of the invention, therapy is used to provide a positive therapeutic response with respect to a disease or condition. By “positive therapeutic response” is intended an improvement in the disease or condition, and/or an improvement in the symptoms associated with the disease or condition. For example, a positive therapeutic response would refer to one or more of the following improvements in the disease: (1) a reduction in the number of neoplastic cells; (2) an increase in neoplastic cell death; (3) inhibition of neoplastic cell survival; (5) inhibition (i.e., slowing to some extent, preferably halting) of tumor growth; (6) an increased patient survival rate; and (7) some relief from one or more symptoms associated with the disease or condition.

[0512] Positive therapeutic responses in any given disease or condition can be determined by standardized response criteria specific to that disease or condition. Tumor response can be assessed for changes in tumor morphology (i.e., overall tumor burden, tumor size, and the like) using screening techniques such as magnetic resonance imaging (MRI) scan, x-radiographic imaging, computed tomographic (CT) scan, bone scan imaging, endoscopy, and tumor biopsy sampling including bone marrow aspiration (BMA) and counting of tumor cells in the circulation.

[0513] In addition to these positive therapeutic responses, the subject undergoing therapy may experience the beneficial effect of an improvement in the symptoms associated with the disease.

[0514] Treatment according to the present invention includes a “therapeutically effective amount” of the medicaments used. A “therapeutically effective amount” refers to an amount effective, at dosages and for periods of time necessary, to achieve a desired therapeutic result.

[0515] A therapeutically effective amount may vary according to factors such as the disease state, age, sex, and weight of the individual, and the ability of the medicaments to elicit a desired response in the individual. A therapeutically effective amount is also one in which any toxic or detrimental effects of the antibody or antibody portion are outweighed by the therapeutically beneficial effects.

[0516] A “therapeutically effective amount” for tumor therapy may also be measured by its ability to stabilize the progression of disease. The ability of a compound to inhibit cancer may be evaluated in an animal model system predictive of efficacy in human tumors.

[0517] Alternatively, this property of a composition may be evaluated by examining the ability of the compound to inhibit cell growth or to induce apoptosis by in vitro assays known to the skilled practitioner. A therapeutically effective amount of a therapeutic compound may decrease tumor size, or otherwise ameliorate symptoms in a subject. One of ordinary skill in the art would be able to determine such amounts based on such factors as the subject's size, the severity of the subject's symptoms, and the particular composition or route of administration selected.

[0518] Dosage regimens are adjusted to provide the optimum desired response (e.g., a therapeutic response). For example, a single bolus may be administered, several divided doses may be administered over time or the dose may be proportionally reduced or increased as indicated by the exigencies of the therapeutic situation. Parenteral compositions may be formulated in dosage unit form for ease of administration and uniformity of dosage. Dosage unit form as used herein refers to physically discrete units suited as unitary dosages for the subjects to be treated; each unit contains a predetermined quantity of active compound calculated to produce the desired therapeutic effect in association with the required pharmaceutical carrier.

[0519] The specification for the dosage unit forms of the present invention are dictated by and directly dependent on (a) the unique characteristics of the active compound and the particular therapeutic effect to be achieved, and (b) the limitations inherent in the art of compounding such an active compound for the treatment of sensitivity in individuals.

[0520] The efficient dosages and the dosage regimens for the bispecific antibodies used in the present invention depend on the disease or condition to be treated and may be determined by the persons skilled in the art.

[0521] An exemplary, non-limiting range for a therapeutically effective amount of an bispecific antibody used in the present invention is about 0.1-100 mg/kg.

[0522] All cited references are herein expressly incorporated by reference in their entirety.

[0523] Whereas particular embodiments of the invention have been described above for purposes of illustration, it will be appreciated by those skilled in the art that numerous variations of the details may be made without departing from the invention as described in the appended claims.

### EXAMPLES

[0524] Examples are provided below to illustrate the present invention. These examples are not meant to constrain the present invention to any particular application or theory of operation. For all constant region positions discussed in the present invention, numbering is according to the EU index as in Kabat (Kabat et al., 1991, Sequences of Proteins of Immunological Interest, 5th Ed., United States Public Health Service, National Institutes of Health, Bethesda, entirely incorporated by reference). Those skilled in the art of antibodies will appreciate that this convention consists of nonsequential numbering in specific regions of an immunoglobulin sequence, enabling a normalized reference to conserved positions in immunoglobulin families. Accordingly, the positions of any given immunoglobulin as defined by the EU index will not necessarily correspond to its sequential sequence.

[0525] General and specific scientific techniques are outlined in US Publications 2015/0307629, 2014/0288275 and WO2014/145806, all of which are expressly incorporated by reference in their entirety and particularly for the techniques outlined therein.

### A. Example 1: TILs from Multiple Cancer Types Co-Express Immune Checkpoint Receptors

[0526] To investigate potential associations between PD-1, CTLA-4, LAG-3, and BTLA, RNA sequencing data from The Cancer Genome Atlas project (TCGA) were used for analysis. V2 RSEM data were downloaded from FireBrowse (http://firebrowse.org/). Analysis was performed using R with custom routines. The correlation between PD-1 and CTLA-4 expression is depicted in FIG. 66, along with calculated R2 values (FIG. 1; square of the Pearson correlation coefficient). FIG. 66 further shows the correlation between PD-1 and LAG-3 expression, PD-1 and BTLA expression, and LAG-3 and CTLA-4 expression.

[0527] FIG. 44 shows that PD-1 and CTLA-4 were co-expressed in cancers including bladder, breast, colon, prostate, melanoma, ovarian and lung cancer. shows that the sets PD-1 and CTLA-4, PD-1 and LAG-3, PD-1 and BTLA, and LAG-3 and CTLA-4 were co-expressed in cancers including bladder, breast, colon, head & neck, kidney, lung-adeno, lung squamous, ovarian, pancreatic, prostate, and melanoma cancer.

### B. Example 2: Bispecific Immune Checkpoint Antibodies are Superior to Monospecific Immune Checkpoint Antibodies

[0528] Prototype immune checkpoint antibodies (e.g. nivolumab and ipilimumab) and bispecific immune checkpoint antibodies based on the prototype antibodies were produced to demonstrate the effect of dual checkpoint blockades.

[0529] Unless otherwise stated, bispecifics are named herein using the Fab variable region first and the scFv variable region second. Amino acid sequences for the prototype antibodies are listed in the sequence listing. DNA encoding the heavy and light chains were generated by gene synthesis (Blue Heron Biotechnology, Bothell, Wash.), subcloned using standard molecular biology techniques into the expression vector pTT5 containing bivalent or bispecific constant regions and transiently transfected in HEK293E cells. Antibodies were purified by Protein A chromatography (and cation exchange chromatography for bispecific antibodies). Purity was assessed by size exclusion chromatography, analytical cation exchange chromatography and capillary isoelectric focusing.

[0530] 1. Double-Positive Cells are Selectively Occupied by Bispecific Immune Checkpoint Antibodies

[0531] Selective targeting of tumor-reactive TILs expressing multiple immune checkpoint receptors (as shown in Example 1) over non-tumor reactive T cells expressing single immune checkpoint receptors could enhance anti-tumor activity while avoiding peripheral toxicity (as depicted in FIG. 42).

[0532] An SEB-stimulated PBMC assay was used to investigate binding of bispecific immune checkpoint antibodies to T cells. The SEB-stimulated PBMC assay is an in vitro method for assaying T helper (TH) cell proliferation and for generating a population of cytotoxic T lymphocytes (CTLs). When PBMCs are stimulated with staphylococcal enterotoxin B (SEB), TH cell populations expand, followed by expansion of a CTL population. PBMCs were stimulated with 100 ng/mL SEB for 3 days and then treated with a prototype anti-LAG-3×anti-PD-1 bispecific antibody and a negative control (Numax bivalent) for 30 minutes at 4° C. Following treatment, cells were incubated with APC-labelled one-arm anti-LAG-3 antibody, FITC-labelled one-arm anti-PD-1 antibody and BV605-labelled anti-CD3 antibody for 30 minutes at 4° C. Scatter plots of the CD3⁺ T cells are depicted in FIG. 67. The data show that double-positive cells expressing both PD-1 and LAG-3 are selectively occupied by the anti-LAG-3×anti-PD-1 bispecific demonstrating that bispecific immune checkpoint antibodies selectively target T cells expressing multiple checkpoint receptors.

[0533] 2. Anti-CTLA-4×Anti-PD-1 Bispecific Enhances IL-2 Response in a Mixed Lymphocyte Reaction

[0534] Prototype immune checkpoint antibodies XENP16432 (nivolumab) and XENP 16433 (ipilimumab), bispecific immune checkpoint antibody XENP16004 based on nivolumab and ipilimumab, and a one-arm (monospecific, monovalent) combination control were tested in a mixed-lymphocyte reaction (also known as a mixed-leukocyte reaction or MLR). The MLR is another in vitro method for assaying T helper (TH) cell proliferation and for generating a population of cytotoxic T lymphocytes (CTLs). When allogeneic (different MHC haplotype) lymphocytes are cultured together, TH cell populations expand, followed by expansion of a CTL population. Interleukin-2 (IL-2) secretion was used to monitor T cell activation.

[0535] Different sets of human PBMCs were purified from leukapheresis of different anonymous healthy volunteers (HemaCare, VanNuys, CA) using Ficoll-Paque™ Plus density gradients. PBMCs from two donors were mixed and then treated with 20 μg/mL of the indicated test articles. Supernatant was collected and concentration of IL-2 was measured using an IL-2 ELISA and data are shown in

[0536] depicts the results of some anti-CTLA-4 Fab screening. This depicts the XENP code for the Fab and scFv embodiments, the designation of the vh and vl engineered domains, the KD binding constant against human and cyno CTLA-4 as measured by Octet, and the Tm of the scFv and Fab. Additionally, the number of sequence 9-mers that were an exact match to at least one human VH or VL germline are depicted as a measure of humanness for the variable regions of both Fabs and scFvs.

[0537] FIG. 25A. For each column, each data point is a separate reaction with a different donor-donor combination.

[0538] The data show that the prototype anti-PD-1×anti-CTLA-4 bispecific antibody enhanced IL-2 response to a greater extent than nivolumab and ipilimumab alone. Notably, the one-arm combination (each monovalent arm of the bispecific added separately) is inferior to the anti-PD-1×anti-CTLA-4 bispecific, suggesting more avid binding of the bispecific to double-positive PD-1+CTLA-4+ cells which is consistent with the finding depicted in FIG. 67 for an anti-LAG-3×anti-PD-1 bispecific antibody.

[0539] 3. Additional Bispecific Immune Checkpoint Antibodies Enhance IL-2 Response in a Mixed Lymphocyte Reaction

[0540] Additional prototype immune checkpoint antibodies and bispecific immune checkpoint antibodies directed towards additional immune checkpoint receptors were tested in a MLR assay as described above. Two sets of MLRs were created where 20 donors were targeting 1 recipient donor and another set of 20 donors targeting another 1 recipient donor totaling 40 MLR reactions. Reactions were incubated with 20 μg/mL of indicated test articles for 6 days. Data depicting fold increase of IL-2 and IFNγ (as assayed by ELISA) following treatment with the indicated test articles over treatment with anti-PD-1 bivalent (XENP 16432) are shown in FIG. 32. The data show that additional bispecific immune checkpoint antibodies were also superior to nivolumab alone in activating T cells.

[0541] 4. Triple Immune Checkpoint Blockade—Anti-PD-1 Bivalent and Anti-LAG-3×Anti-CTLA-4 Bispecific Antibodies are Synergistic in Enhancing IL-2 Response in an SEB-Stimulated PBMC Assay

[0542] It was hypothesized that a triple immune checkpoint blockade such as with an anti-PD-1 bivalent and an anti-LAG-3×anti-CTLA-4 bispecific as depicted in FIG. 43 would provide additional benefit in enhancing T cell activation. To test the hypothesis, prototype immune checkpoint antibodies XENP 16432 (nivolumab), prototype bispecific anti-LAG-3×anti-CTLA-4 immune checkpoint antibody XENP16430 based on 25F7 and ipilimumab, and a combination of XENP16432 and XENP 16430 were tested in a SEB-stimulated PBMC assay.

[0543] Human PBMCs from multiple donors were stimulated with 10 ng/ml of SEB for 72 h with 20 μg/mL of indicated test articles. Following treatment, cell supernatants were assayed for IL-2 by ELISA. Data are shown in FIG. 33 for fold increase in IL-2 over Numax bivalent. Each point indicates a donor represented in technical singlet.

[0544] The data show that the anti-LAG-3×anti-CTLA-4 bispecific checkpoint antibody (XENP16430) alone enhanced the IL-2 response relative to control (Numax bivalent), although enhancement is lower than nivolumab (XENP 16432) alone. However, the anti-CTLA-4×anti-LAG-3 bispecific in combination with nivolumab leads to significantly higher IL-2 response than either alone.

[0545] 5. Blocking of Checkpoint Receptor/Ligand Interaction is Necessary for T Cell Activation

[0546] Prototype anti-BTLA antibodies 4A7, E8D9 and 8D5 were screened for their ability to block BTLA interaction with its ligand HVEM using Octet, a BioLayer Interferometry (BLI)-based method. Experimental steps for Octet generally included the following: Immobilization (capture of ligand or test article onto a biosensor); Association (dipping of ligand- or test article-coated biosensors into wells containing serial dilutions of the corresponding test article or ligand); and Dissociation (returning of biosensors to well containing buffer) in order to determine the monovalent affinity of the test articles. A reference well containing buffer alone was also included in the method for background correction during data processing. 500 nM of each anti-BTLA antibody and 100 nM BTLA-Fc were incubated for over an hour. Anti-Penta-HIS (HIS1K) biosensors were used to capture HVEM-Fc-His and then dipped into antibody/BTLA mixture to measure residual BTLA/HVEM binding. As depicted in FIG. 35B, 8D5 did not block BTLA/HVEM interaction while 4A7 and E8D9 blocked BTLA/HVEM interaction.

[0547] The prototype anti-BTLA antibodies and anti-BTLA×anti-PD-1 bispecific antibodies with anti-BTLA Fab arms based on the prototype antibodies were tested in an SEB-stimulated PBMC assay. Specifically, human PBMCs were stimulated with 20 ng/mL of SEB for 72 hours with 20 μg/mL of indicated test articles. Following treatment, cell supernatant were assayed for IL-2 by ELISA. Data are shown in FIG. 35A for fold increase of IL-2 over Numax bivalent (each point represents an individual PBMC donor tested in singlet). The data show that bispecific antibody with the non-blocking 8D5 anti-BTLA Fab arm induced IL-2 significantly less than nivolumab indicating that blocking the BTLA/HVEM interaction is necessary for enhancing T cell activation.

[0548] 6. Bispecific Immune Checkpoint Antibodies Enhance Engraftment and Disease Activity in Human PBMC-Engrafted NSG Mice

[0549] Bispecific checkpoint antibodies were evaluated in a Graft-versus-Host Disease (GVHD) model conducted in NSG (NOD-SCID-gamma) immunodeficient mice. When the NSG mice were injected with human PBMCs, the human PBMCs developed an autoimmune response against mouse cells. Treatment of NSG mice injected with human PBMCs followed by treatment with immune checkpoint inhibitors de-repress the engrafted T cells and enhances engraftment.

[0550] 10 million human PBMCs were engrafted into NSG mice via IV-OSP on Day 0 followed by dosing with the indicated test articles (5 mg/kg or as indicated) on Day 1. CD45+ events were measured on Day 14 (FIG. 34). While the GVHD can be measured directly, increased CD45+ cell levels correlate with decreased body weight (depict a mixed lymphocyte reaction looking enhancement of IL-2 release by nivolumab (anti-PD-1 monoclonal antibody, marketed as Opdivo®) alone, ipilimumab alone (anti-CTLA-4 monoclonal antibody, marketed as Yervoy®), a prototype anti-CTLA-4×anti-PD-1 bispecific based on the nivolumab and ipilimumab arms, and a “one-armed” combination control.

[0551] FIG. 26B) and are predictive of disease.

[0552] The data show that the bispecific checkpoint antibodies of the invention enhance proliferation of CD45+ cells in human PBMC-engrafted NSG mice as compared to control (PBS+PBMC). Further, enhancement is greater using antibodies of the invention than that seen with nivolumab (XENP 16432) alone. Furthermore, the anti-CTLA-4×anti-LAG-3 bispecific (XENP16430) in combination with nivolumab yielded the highest engraftment levels consistent with the data in Example 2D.

### C. Example 3: Hybridomas

[0553] 1. Hybridoma Generation

[0554] To develop PD-1, LAG-3 and BTLA targeting arms for bispecific immune checkpoint antibodies of the invention, monoclonal antibodies were first generated by hybridoma technology through ImmunoPrecise, either through their Standard Method or Rapid Prime Method.

[0555] For the Standard Method, antigen(s) was injected into 3 BALB/c mice. 7-10 days before being sacrificed for hybridoma generation, the immunized mice received an antigen boost. Antibody titre is evaluated by ELISA on the antigen and the best responding mice are chosen for fusion. A final antigen boost is given 4 days prior to fusion. Lymphocytes from the mice are pooled, purified then fused with SP2/0 myeloma cells. Fused cells are grown on HAT selective Single-Step cloning media for 10-12 days at which point the hybridomas were ready for screening.

[0556] For the Rapid Prime method, antigen(s) was injected into 3 BALB/c mice. After 19 days, lymphocytes from all the mice are pooled, purified then fused with SP2/0 myeloma cells. Fused cells are grown on HAT selective Single-Step cloning media for 10-12 days at which point the hybridomas were ready for screening.

[0557] For generation of anti-PD-1 hybridomas, the Standard and Rapid Prime methods were used and the antigen(s) used were mouse Fc fusion of human PD-1 (huPD-1-mFc), mouse Fc fusion of cyno PD-1 (cynoPD-1-mFc), His-tagged human PD-1 (huPD-1-His), His-tagged cyno PD-1 (cynoPD-1-His) or mixtures thereof.

[0558] For generation of anti-BTLA hybridomas, the Standard and Rapid Prime methods were used and antigen used were mouse Fc fusion of human BTLA (huBTLA-mFc), mouse Fc fusion of cyno BTLA (cynoBTLA-mFc), His-tagged human BTLA (huBTLA-His), or mixture of huBTLA-mFc and cynoBTLA-mFc.

[0559] For generation of anti-LAG-3 hybridomas, the Rapid Prime method was used and antigen used were mouse Fc fusion of human LAG-3 (huLAG-3-mFc), mouse Fc fusion of cyno LAG-3 (cynoLAG-3-mFc), His-tagged human LAG-3 (huLAG-3-His), mixture of huLAG-3-mFc and cynoLAG-3-mFc, or mixture huLAG-3-His and cynoLAG-3-His.

[0560] For generation of anti-TIM-3 hybridomas, the Standard and Rapid Prime methods were used and antigen(s) used were mouse Fc fusion of human TIM-3 (huTIM-3-mFc), mouse Fc fusion of cyno TIM-3 (cynoTIM-3-mFc), His-tagged human TIM-3 (huTIM-3-His), His-tagged cyno TIM-3 (cynoTIM-3-His) or mixtures thereof.

[0561] 2. Screening Anti-PD-1 Hybridoma Clones

[0562] Anti-PD-1 hybridoma clones generated as described above were subject to two rounds of screening using Octet. For the first round, anti-mouse Fc (AMC) biosensors were used to capture the clones with dips into 500 nM of bivalent human and cyno PD-1-Fc-His. For the second round, clones identified in the first round that were positive for both human and cyno PD-1 were captured onto AMC biosensors and dipped into 500 nM monovalent human and cyno PD-1-His. Sequences for exemplary anti-PD-1 antibodies are in the sequence listing.

[0563] 3. Screening Anti-BTLA Hybridoma Clones

[0564] Anti-BTLA hybridoma clones generated as described above were subject to two rounds of screening using Octet. For the first round, AMC biosensors were used to capture the clones with dips into multiple concentrations of human and cyno BTLA-His to determine KD. For the second round, a blocking assay was used to identify clones which blocked BTLA/HVEM interaction. Anti-Penta-HIS (HIS1K) biosensors were used to capture HVEM-Fc-His and dipped into 25 nM BTLA-Fc alone or 25 nM BTLA-Fc+1:1 dilution of hybridoma samples to measure residual BTLA/HVEM binding. Sequences for exemplary anti-BTLA antibodies are in the sequence listing.

[0565] 4. Screening Anti-LAG-3 Hybridoma Clones

[0566] Anti-LAG-3 hybridoma clones generated as described above were subject to several rounds of screening to identify clones with high affinity, which block LAG-3 binding to Ramos cells endogenously expressing MHC-II, and which bind a different epitope than 25F7 mAb.

[0567] Affinity was determined using Octet. AMC biosensors were used to capture clones with dips into single concentration of human LAG-3-Fc and cyno LAG-3-Fc. To identify clones which block LAG-3/MHC-II interaction, 1 μg of human LAG-3-hIg in 10 μL was mixed with 50 μL of hybridoma supernatant (diluted 2-fold, 8 times in RPMI media with 10% FBS) for 20 minutes at room temperature. 40 μL of Daudi or Ramos cells (which endogenously express MHC-II) were added and incubated at 4° C. for 30 minutes. The cells were then washed and incubated with anti-human-Fc-Alexa647 secondary antibody for 30 minutes. Cells were then washed and analyzed by FACS for Alexa647. The data is depicted in FIG. 62. To identify clones which bind a different epitope than 25F7 mAb, AMC biosensors were used to capture clones with dips into 100 nM human LAG-3-hFc or 100 nM LAG-3-hFc with 500 nM 25F7 to measure residual binding. Sequences for exemplary anti-LAG-3 antibodies are in the sequence listing.

[0568] 5. Screening Anti-TIM-3 Hybridoma Clones

[0569] Anti-TIM-3 hybridoma clones generated as described above were subject to two rounds of screening. The first round was divided into screens for IgG samples and IgM clones. For IgG clones, AMC biosensors were used to capture the clones and were dipped into multiple concentrations of human and cyno TIM-3-His. For IgM clones, anti-IgM mAbs were coupled using AR2G onto biosensors which were dipped into multiple concentrations of human and cyno TIM-3-His. None of the IgM samples produced binding signals higher than baseline. Following the first round of screening, IgG clones which bound both human and cyno TIM-3 were rescreened with bivalent versions of bivalent human and cyno TIM-3-Fc. Sequences for exemplary anti-TIM-3 antibodies are in the sequence listing.

[0570] Several of the clones were chimerized and assessed for T cell binding in an SEB-stimulated PBMC assay. Human PBMCs were stimulated with 100 ng/mL SEB for 3 days. Following stimulation, cells were treated with indicated test articles for 30 minutes at 4 degrees. Binding on CD3⁺ cells was detected with an anti-human-Fc secondary antibody and depicted in FIG. 21.

[0571] 6. Component Antibody Domains Derived from Hybridomas Block Checkpoint Receptor/Ligand Interactions

[0572] As described in Example 2E, blocking of checkpoint receptor/ligand interaction is necessary for T cell activation. The blocking ability of exemplary antibodies comprising domains derived from hybridomas were investigated using either cell binding assays or Octet as depicted in are graphs showing that component antibody domains of the subject antibodies provided herein are capable of blocking checkpoint receptor/ligand interactions. In particular, a bispecific antibody comprising a 1G6 anti-PD-1 scFv arm is capable of blocking PD-1/PD-L1 and PD-1/PD-L2 interactions; 7G8 anti-LAG-3 one arm is capable of blocking LAG-3/MHC II interaction; a bispecific antibody comprising an exemplary anti-PD-1 Fab arm is capable of blocking CTLA-4/CD80 and CTLA-4/CD86 interactions; and a bispecific antibody comprising a 9C6 anti-BTLA Fab arm is capable of blocking BTLA/HVEM interaction.

[0573] FIG. 68.

[0574] Incubation of HEK293T exogenously expressing PD-1 with XENP20717 prevented binding by PD-L1 and PD-L2 to PD-1 in a dose dependent manner. Incubation of LAG-3 with XENP22606 prevented its binding to Daudi cells endogenously expressing MHC-II. Incubation of CTLA-4 with XENP20066 prevented residual binding to CD80 and CD86. Incubation of BTLA with XENP20895 prevented residual binding to HVEM.

### D. Example 4: Affinity and Stability Optimization

[0575] 1. Anti-PD-1 mAbs 1G6 and 2E9

[0576] The anti-PD-1 hybridoma clones 1G6 and 2E9 generated in Example 3 were engineered to have optimal affinity and stability in the context of scFv or Fab for use in a bispecific immune checkpoint inhibitor. The clones were first humanized using string content optimization (see, e.g., U.S. Pat. No. 7,657,380, issued Feb. 2, 2010). DNA encoding the heavy and light chains were generated by gene synthesis (Blue Heron Biotechnology, Bothell, Wash.) and subcloned using standard molecular biology techniques into the expression vector pTT5. The C-terminus of the scFv included a polyhistidine tag. A library of Fv variants was constructed by standard mutagenesis (QuikChange, Stratagene, Cedar Creek, Tx.) in the full-length bivalent, Fab-His and/or scFv-His formats. Bivalent mAbs were purified by standard protein A chromatography and Fab-His and scFv-His were purified by Ni-NTA chromatography. Sequences for exemplary 1G6 and 2E9 bivalent antibodies, Fabs and scFvs of the invention are listed in the sequence listing (although the polyhistidine tags have been removed for Fabs and scFvs). After the initial screen, combinations were made of variants of interest, and these were expressed, purified, and re-examined for affinity and stability.

[0577] Affinity screens of bivalent antibodies were performed using Octet. Anti-human Fc (AHC) biosensors were used to capture the test articles and dipped in multiple concentrations of PD-1-His for KD determination. Stability of scFv-His were evaluated using Differential Scanning Fluorimetry (DSF). DSF experiments were performed using a Bio-Rad CFX Connect Real-Time PCR Detection System. Proteins were mixed with SYPRO Orange fluorescent dye and diluted to 0.2 mg/mL in PBS. The final concentration of SYPRO Orange was 10×. After an initial 10 minute incubation period of 25° C., proteins were heated from 25 to 95° C. using a heating rate of 1° C./min. A fluorescence measurement was taken every 30 sec. Melting temperatures (Tm) were calculated using the instrument software. The affinity and stability results are shown in FIG. 23.

[0578] 2. Anti-CTLA-4 mAb

[0579] The parental variable region of an anti-CTLA-4 antibody was engineered for use as a component of various bispecifics. Two approaches were taken to attempt to identify variants with improved properties: (1) single, double, and triple amino acids substitutions were made via QuikChange (Stratagene, Cedar Creek, Tx.) mutagenesis, and (2) re-grafted sequences with their framework exchanged with alternative human germlines (IGHV3-7, IGHV3-13, IGHV3-21, IGHV3-64, IGKV3D-20, IGKV3-15) were constructed by DNA synthesis and subcloning. Variant Fabs and scFvs were designed, expressed, and purified. Affinities for human and cyno CTLA-4 were measured for Fabs using Octet. AHC biosensors were used to capture Fc fusions of human or cyno CTLA-4 and dipped into multiple concentrations of Fab test articles for KD determination. Thermal stabilities were measured for both Fabs and scFvs using DSF. Additionally, the number of sequence 9-mers that were an exact match to at least one human VH or VL germline were counted as a measure of humanness (see, e.g., U.S. Pat. No. 7,657,380, issued Feb. 2, 2010) for the variable regions of both Fabs and scFvs. After the initial screen, combinations were made of variants of interest, and these were expressed, purified, and re-examined for affinity and stability. Results are summarized in FIG. 24. Several variants possessed increased thermal stability over that of the parental variable region while retaining a similar affinity for both human and cyno CTLA-4. Additionally, increases in sequence humanness as measured by the number of human germline matching sequence 9-mers were identified for several variants. Preferred variants include: H0.25_L0, H0.26_L0, H0.27_L0, H0.29_L0, H0.38_L0, H0.39_L0, H0.40_L0, H0.70_L0, H0_L0.22, H2_L0, H3_L0, H3_L0.22, H3_L0.67, H3_L0.74, H3_L0.44, H3.4_L0.118, H3.4_L0.119, H3.4_L0.120, H3.4_L0.121, H3.4_L0.122, H3.4_L0.123, H3.4_L0.124, H3.4_L0.125, H3.4_L0.126, H3.4_L0.127, H3.4_L0.128, H3.4_L0.129, H3.4_L0.130, H3.4_L0.131, H3.4_L0.132, H3.5_L2.1, H3.5_L2.2, H3.5_L2.3, H3.21_L0.124, H3.21_L0.129, H3.21_L0.132, H3.23_L0.124, H3.23_L0.129, H3.23_L0.132, H3.25_L0.124, H3.25_L0.129, and H3.25_L0.132.

[0580] 3. Anti-BTLA mAb 9C6

[0581] The anti-BTLA hybridoma clone 9C6 generated in Example 3 was humanized and engineered to have optimal affinity and stability in bivalent antibody format as generally described above in Example 4A. Sequences for exemplary anti-BTLA bivalent antibodies of the invention are listed in the sequence listing.

[0582] Affinity screens for the variant bivalent antibodies were performed using Octet. AHC biosensors were used to capture the test articles and dipped into wells with multiple concentrations of BTLA-His for KD determination (shown in A and B show that anti-BTLA×anti-PD-1 chimeric bispecific promotes IFNγ secretion from SEB stimulated PBMCs. PBMCs were stimulated with 10 ng/mL SEB for 3 days with indicated test articles. Cell supematants were collected and assayed with MSD for indicated analyte. A: 20 μg/mL test article; B 5 μg/mL test article.

[0583] FIG. 52).

[0584] 4. Anti-LAG-3 mAbs 7G8 and 2A11

[0585] The anti-LAG-3 hybridoma clones 7G8 and 2A11 generated in Example 3 were humanized and engineered to have optimal affinity and stability in the context of a Fab for use in a bispecific immune checkpoint inhibitor as generally described above in Example 4A. Sequences for exemplary anti-LAG-3 bivalent antibodies and Fabs of the invention are listed in the sequence listing.

[0586] Affinity and stability for variant anti-LAG-3 Fabs were determined as generally described above in Example 4A. AMC biosensors were used to capture mouse Fc fusions of human LAG-3 and dipped into wells containing multiple concentrations of the test articles to determine KD. The results are shown in FIG. 53 for 2A11 variants and FIG. 54 for 7G8 variants.

[0587] Exemplary variant 2A11 and 7G8 anti-LAG-3 bivalent antibodies were further screened for their ability to block LAG-3 binding to Daudi cells endogenously expressing MHC-II. 1 μg of LAG-3-mFc was mixed with indicated concentrations of mAb for 30 minutes at room temperature. Daudi cells were then added and incubated for 30 minutes at 4° C. LAG-3-mFc binding was detected with an anti-murine-Fc secondary antibody. The data is depicted in FIG. 63.

[0588] 5. Anti-TIM-3 mAbs

[0589] Anti-TIM-3 hybridoma clones generated in Example 3 were humanized and engineered to have optimal affinity and stability in bivalent antibody format as generally described above in Example 4A. Sequences for exemplary anti-TIM-3 bivalent antibodies of the invention are listed in the sequence listing.

[0590] Affinity screens for the variant bivalent antibodies were performed using Octet. AHC biosensors were used to capture the test articles and dipped into wells with multiple concentrations of TIM-3-His for KD determination (shown in FIG. 22).

[0591] Optimized variants were also tested for T cell binding in an SEB-stimulated PBMC assay. Human PBMCs were stimulated with 100 ng/mL SEB for 72 hours. Following stimulation, cells were treated with the indicated test articles.

[0592] Binding of 3H3_H1_L2.1 (XENP21189) on CD3⁺ cells was detected with an anti-human-Fc secondary antibody and depicted in FIG. 21. Binding of 7B11_HJ1_L1.1 (XENP21196) on CD3⁺ cells was detected with an anti-human-IgG-APC secondary antibody and depicted in FIG. 21.

[0593] 6. Affinity Screens of Variant Anti-LAG-3×Anti-CTLA-4 Fab-scFv Bispecific Antibodies

[0594] Bispecific antibodies comprising anti-LAG-3 Fabs derived from the optimized anti-LAG-3 bivalent antibodies described in Example 4D and an exemplary anti-CTLA-4 scFv described in Example 4B were screened for affinity using Octet as generally described above. Specifically, AMC or HIS1K biosensors were used to capture mouse Fc fusion of human LAG-3 or His-Avi tagged TEV-Fc fusion of human LAG-3 and dipped into well containing the test articles to determine KD.

[0595] Results are shown in FIG. 55.

[0596] 7. Affinity Screens of Variant Anti-LAG-3×Anti-PD-1 Fab-scFv Bispecific Antibodies.

[0597] Bispecific antibodies comprising anti-LAG-3 Fabs derived from the optimized anti-LAG-3 bivalent antibodies described in Example 4D and an exemplary anti-PD-1 scFv described in Example 4A were screened for affinity using Octet as generally described above. Specifically, AMC or HIS1K biosensors were used to capture mouse Fc fusion of human LAG-3 or His-Avi tagged TEV-Fc fusion of human LAG-3 and dipped into well containing the test articles to determine KD.

[0598] Results are shown in FIG. 61.

### E. Example 5: In Vitro Assessment of Bispecific Immune Checkpoint Antibodies with Affinity and Stability Optimized Arms

[0599] 1. Anti-PD-1×Anti-CTLA-4 Bispecific Antibodies

[0600] a. Bispecific Anti-PD-1×Anti-CTLA-4 Bispecific Antibody Blocks PD-1 Interaction with PD-L1 and PD-L2

[0601] HEK293T cells expressing PD-1 were incubated with incubated with XENP20717 (anti-PD-1×anti-CTLA-4) and one-arm anti-PD-1 and anti-CTLA-4 controls (respectively XENP20111 and XENP20059) for 30 minutes at 4° C. Following incubation, PD-L1-mFc or PD-L2-mFc was added and allowed to further incubate for 30 minutes at 4° C. PD-L1-mFc and PD-L2-mFc were detected with anti-murine-IgG secondary antibody.

[0602] FIG. 45 show that XENP20717 was able to block the binding of PD-1 to ligands PD-L1 and PD-L2 in a dose dependent manner. XENP20111 was also able to block the binding of PD-1 to ligands PD-L1 and PD-L2, while XENP20559 did not block PD-1 binding to its ligands.

[0603] b. T Cell Binding of Bispecific Anti-CTLA-4×Anti-PD-1 Bispecific Antibody on CD3⁺ Cells

[0604] Human PBMCs were stimulated with 500 ng/mL SEB for 3 days, washed twice in culture medium and then re-stimulated with 500 ng/mL SEB for an additional 24 hours. The PBMCs were then treated with XENP20717 (anti-CTLA-4×anti-PD-1) for 30 minutes at 4° C. Following treatment, PBMCs were washed and incubated with anti-human-Fc-(Fab fragment specific)-APC secondary antibody (Jackson Labs) on CD3⁺ cells with an anti-CD3-FITC (UCHT1) mAb. PBMCs were then washed twice and analyzed by flow cytometry. FIG. 45 depicts the average MFI of 7 unique PBMC donors and shows binding of XENP20717 on CD3+ T cells and that binding was in a dose-dependent manner.

[0605] c. Assessment of Variant Anti-CTLA-4×Anti-PD-1 Bispecifics on T Cell Activation

[0606] Anti-CTLA-4×anti-PD-1 bispecific antibodies with variant anti-CTLA-4 Fab arms were tested in an MLR assay. Mixed PBMCs were treated with 69.5 nM of bivalent antibodies (e.g. nivolumab) or 139 nM of bispecific antibodies (e.g. XENP16004) for equimolar PD-1 binding concentrations. The data depicted in depicts the results of some anti-CTLA-4 Fab screening. This depicts the XENP code for the Fab and scFv embodiments, the designation of the vh and vl engineered domains, the KD binding constant against human and cyno CTLA-4 as measured by Octet, and the Tm of the scFv and Fab. Additionally, the number of sequence 9-mers that were an exact match to at least one human VH or VL germline are depicted as a measure of humanness for the variable regions of both Fabs and scFvs.

[0607] FIG. 25B show that a number of the bispecific antibodies enable IL-2 induction superior to nivolumab alone.

[0608] In an SEB-stimulated PBMC assay, PBMCs were treated with 500 ng/mL SEB for 2 days. Cells were then washed and treated with 20 μg/mL of XENP16432 (nivolumab) or XENP20717 and 500 ng/mL SEB. Supernatant was assayed for IL-2 as an indicator of T cell activation. The data depicted in FIG. 69 show that the anti-CTLA-4×anti-PD-1 bispecific induces significantly more IL-2 release than nivolumab alone.

[0609] In another study, XENP16432, XENP20717 and one-arm combination control were tested in an SEB-stimulated PBMC assay. PBMCs were stimulated with 500 ng/mL SEB for 2 days. Cells were then washed once with PBS and then culture medium with 20 μg/mL of indicated test articles and 500 ng/mL SEB was added. Supernatants were collected after 24 hours and assayed for IL-2. In a control experiment without SEB stimulation, PBMCs were treated with indicated test articles for 3 days before supernatant was assayed for IL-2. The fold-change in IL-2 concentration is depicted in FIG. 45A-C. As shown in FIG. 45B, XENP20717 enhanced IL-2 secretion significantly more than nivolumab did. The data show that XENP20717 activates T cells more potently than both anti-PD-1 bivalent alone as well as a combination of one-arm anti-PD-1 and one-arm anti-CTLA-4 demonstrating the advantage of selectively activating T cells expressing multiple immune checkpoint receptors. Notably, and consistent with the findings described in Example 2B, the bispecific XENP20717 enhanced IL-2 secretion to a greater extent than did the combination of one-arm antibodies derived from XENP20717.

[0610] An additional bispecific antibody targeting CTLA-4 and PD-1 with an anti-CTLA-4 scFv arm and a variant 2E9 anti-PD-1 Fab arm and control test articles were tested in an SEB-stimulated PBMC assay. Human PBMCs were stimulated with 100 ng/mL SEB for 2 days. Cells were washed and restimulated with 100 ng/mL SEB in combination with 20 μg/mL of the indicated test articles. Supernatants were assayed for IL-2 and IFNγ 24 hours after treatment (depicted respectively in FIGS. 19A and B).

[0611] 2. In Vitro Assessment of Anti-LAG-3×Anti-PD-1 Bispecific Checkpoint Antibodies

[0612] a. Assessment of Variant Anti-LAG-3×Anti-PD-1 Bispecifics on T Cell Activation

[0613] In an SEB-stimulated PBMC assay, PBMCs were treated with 500 ng/mL SEB for 2 days. Cells were then washed and treated with 20 μg/mL of XENP16432 (nivolumab) or XENP22604 and 500 ng/mL SEB. Supernatant was assayed for IL-2 as an indicator of T cell activation (depicted in FIG. 69).

[0614] Additional anti-LAG-3×anti-PD-1 bispecific antibodies with optimized 2A11 anti-LAG-3 Fab arms (derived from variant mAbs generated as described in Example 4) were also assessed for T cell activation in an SEB-stimulated PBMC assay. Human PBMCs from multiple donors were stimulated with 500 ng/ml of SEB for 2 days. Cells were then washed twice in culture medium and stimulated with 500 ng/mL SEB in combination with 10 μg/mL of indicated test articles. 24 hours after treatment, cell supernatants were assayed for IL-2 and IFNγ. Data are shown in FIG. 64 for fold increase in IL-2 and IFNγ over Numax bivalent. Each point indicates a donor represented in technical singlet.

[0615] The data shows that a number of the anti-LAG-3×anti-PD-1 bispecific antibodies activate T cells more potently than either nivolumab alone or anti-LAG-3 bivalent alone.

[0616] 3. In Vitro Assessment of Anti-BTLA×Anti-PD-1 Bispecific Checkpoint Antibodies

[0617] a. T Cell Binding of Bispecific Anti-BTLA×Anti-PD-1 Bispecific Antibodies on CD3⁺ Cells

[0618] Anti-BTLA×anti-PD-1 bispecific antibodies with optimized anti-BTLA Fab arms (derived from variants mAbs generated as described in Example 4) were assessed for binding on T cells. Human PBMCs were stimulated with 100 ng/mL SEB for 3 days, after which the PBMCs were treated with the indicated test articles for 30 minutes at 4° C. PBMCs were then incubated with anti-human-Fc secondary antibody for 30 minutes at 4° C. FIG. 47 shows the binding of the indicated test articles on CD3⁺ cells.

[0619] The data show that the anti-PD-1×anti-BTLA bispecific checkpoint antibodies of the invention (e.g. XENP20895, XENP21220 and XENP21221) bind more avidly to T-cells compared to one-armed controls (e.g. XENP21446 and XENP16011). This demonstrates that binding to human T cells is generally better with bispecific antibodies, each arm monovalently binding a different antigen, than monovalent, monospecific antibodies such as the one-armed controls.

[0620] b. Assessment of Variant Anti-BTLA×Anti-PD-1 Bispecifics on T Cell Activation

[0621] Anti-BTLA×anti-PD-1 bispecific antibodies with prototype anti-BTLA (e.g. 4C7, 8D5 and E8D9) and 9C6 Fab arms were assessed for T cell activation in an SEB-stimulated PBMC assay. Human PBMCs from multiple donors were stimulated with 10 ng/ml of SEB for 72 h with 5 μg/mL or 20 μg/mL as indicated of test articles. Following treatment, cell supernatants were assayed for IL-2 and IFNγ by ELISA, depicted respectively in FIGS. 1J and 1K. The data show that bispecific antibodies comprising the 9C6 hybridoma derived arm enhanced T cell activation not only greater than anti-PD-1 bivalent alone did but also greater than did the bispecifics with the prototype anti-BTLA Fab arms.

[0622] An exemplary anti-BTLA×anti-PD-1 XENP21220 and XENP16432 (nivolumab) were assessed in an SEB-stimulated PBMC assay. PBMCs were treated with 500 ng/mL SEB for 2 days. Cells were then washed and treated with 20 μg/mL of XENP16432 or XENP21220 and 500 ng/mL SEB. Supernatant was assayed for IL-2 as an indicator of T cell activation (depicted in FIG. 69).

[0623] Additional anti-BTLA×anti-PD-1 bispecifics with variant 9C6 anti-BTLA Fab arms and one-arm variant 9C6 antibodies (alone and in combination with one-arm anti-PD-1 antibody) were assessed for T cell activation in an SEB-stimulated PBMC assay as described above. Data are shown in FIG. 1L for fold increase in IL-2 and IFNγ secretion over treatment with PBS.

[0624] 4. In Vitro Assessment of Anti-LAG-3×Anti-CTLA-4 Bispecific Checkpoint Antibodies

[0625] a. T Cell Binding of Bispecific Anti-BTLA×Anti-PD-1 Bispecific Antibodies on CD3⁺ Cells

[0626] Anti-LAG-3×anti-CTLA-4 bispecifics with variant anti-LAG-3 Fab arms and one-arm variant anti-LAG-3 antibodies were assessed for binding on T cells. Human PBMCs were stimulated with 100 ng/mL SEB for 3 days, after which the PBMCs were treated with the indicated test articles for 30 minutes at 4° C. Following treatment, PBMCs were incubated with anti-CD3-FITC and anti-human-Fc-APC antibodies for 30 minutes at 4° C. PBMCs were then washed twice and analyzed by flow cytometry. FIG. 56 shows the binding of the indicated test articles on CD3⁺ T cells.

[0627] The data show that a number of the anti-LAG-3×anti-CTLA-4 bispecific checkpoint antibodies of the invention (e.g. XENP22505 and XENP21896) bind more avidly to T-cells compared to one-armed controls (e.g. XENP22516). This demonstrates that binding to human T cells can be better with bispecific antibodies, each arm monovalently binding a different antigen, than monovalent, monospecific antibodies such as the one-armed controls.

[0628] b. T Cell Activation by Anti-LAG-3×Anti-CTLA-4 Bispecific Antibodies

[0629] Anti-LAG-3×anti-CTLA-4 bispecific antibodies were assessed for T cell activation in MLR and SEB-stimulated PBMC assays.

[0630] 40 MLR reactions were made in the presence of 20 μg/mL of the indicated test articles, and cell supernatant were assayed 6 days after treatment for IL-2 and IFNγ. FIG. 59 depicts fold induction in IL-2 and IFNγ over anti-RSV bivalent (XENP 15074).

[0631] In an SEB-stimulated PBMC assay, PBMCs were treated with 500 ng/mL SEB for 2 days. Cells were then washed and treated with 20 μg/mL of XENP 16432 (nivolumab), XENP22602 or a combination of XENP 16432 and XENP22602 and 500 ng/mL SEB. Supernatant was assayed for IL-2 as an indicator of T cell activation (depicted in FIG. 69).

[0632] In another SEB-stimulated PBMC assays, additional anti-LAG-3×anti-CTLA-4 bispecific were assessed. Human PBMCs from multiple donors were stimulated with 500 ng/ml of SEB for 2 days. Cells were then washed twice in culture medium and stimulated with 500 ng/mL SEB in combination with 20 μg/mL of indicated test articles. 24 hours after treatment, cell supematants were assayed for IL-2 and IFNγ. Data are shown in FIG. 57 and FIG. 58 and FIG. 60 for fold increase in IL-2 and IFNγ over Numax bivalent. Each point indicates a donor represented in technical singlet.

[0633] The data is consistent with Example 2D in showing that a combination of anti-PD-1 bivalent and anti-LAG-3×anti-CTLA-4 bispecific exerts synergistic effect in T cell activation. Further, the data show that 7G8 based anti-LAG-3×anti-CTLA-4 bispecific antibodies exhibit more selective function on PBMCs than 2A11 based anti-LAG-3×anti-CTLA-4 bispecific antibodies

### F. Example 6: In Vivo Assessment of Bispecific Immune Checkpoint Antibodies

[0634] 1. Anti-CTLA-4×Anti-PD-1 Bispecifics Enhance Engraftment and Disease Activity in Human PBMC-Engrafted NSG Mice

[0635] In several GVHD studies, exemplary anti-CTLA-4×anti-PD-1 bispecific antibodies of the invention were shown to enhance engraftment and disease activity in human PBMC-engrafted NSG mice.

[0636] In a first study, 10 million human PBMCs were engrafted into NSG mice via IV-OSP on Day 0. On day 1, the mice were dosed with XENP 16432 (2.89 mg/kg), XENP20053 (2 mg/kg) and a combination of XENP 16432 and XENP 16433 (2.89+2.92 mg/kg). CD45+ cell counts were measured on Day 14 (depicted in FIG. 70).

[0637] Additional anti-CTLA-4×anti-PD-1 bispecifics with variant anti-CTLA-4 Fab and anti-PD-1 scFv arms were assessed. 10 million human PBMCs were engrafted into NSG mice via IV-OSP on Day 0 followed by dosing with the indicated test articles (5 mg/kg or as indicated) on Day 1. CD45+ cell counts were measured on Day 14 (FIG. 1QA, FIG. 1RA and FIG. 1S). IFNγ levels were also measured as an additional indicator of GVHD and plotted against CD45+ cell levels (depicts mixed lymphocyte reaction looking at enhancement of IL-2 release by anti-CTLA-4×anti-PD-1 bispecific antibodies with variant anti-CTLA-4 Fab arms and variant anti-PD-1 scFv arms, as well as nivolumab alone, ipilimumab alone, and a prototype anti-CTLA-4×anti-PD-1 bispecific based on the nivolumab and ipilimumab arms as controls.

[0638] FIG. 27 and FIG. 30).

[0639] The data show that the anti-PD-1×anti-CTLA-4 bispecific checkpoint antibodies of the invention enhance proliferation of CD45+ cells in human PBMC-engrafted NSG mice as compared to control (PBS+PBMC). Further, enhancement is greater using antibodies of the invention than that seen with nivolumab (XENP 16432) alone. FIG. 31 shows the comparison of test article effect on CD45+ cell proliferation between studies 160314 (presented in FIG. 26) and 160331 (presented in FIG. 29). Both studies consistently demonstrate superiority of anti-PD-1×anti-CTLA-4 bispecific checkpoint antibodies over nivolumab alone.

[0640] In another study, an anti-CTLA-4×anti-PD-1 bispecific antibody with Xtend Fc was assessed. PBMC-engrafted mice were dosed with indicated test articles at indicated concentrations and CD45+, CD4+ and CD8+ events were measured on Day 14 (depicted in FIG. 20).

[0641] 2. Anti-BTLA×Anti-PD-1 Bispecifics Enhance Engraftment and Disease Activity in Human PBMC-Engrafted NSG Mice

[0642] In a first study, 10 million human PBMCs were engrafted into NSG mice via IV-OSP on Day 0. On day 1, the mice were dosed with XENP16432 (2.89 mg/kg) and XENP20895 (5 mg/kg). CD45+ cell counts were measured on Day 14 (depicted in FIG. 70).

[0643] Anti-BTLA×anti-PD-1 bispecific XENP20895 was assessed in a second GVHD study. 10 million human PBMCs were engrafted into NSG mice via IV-OSP on Day 0 followed by dosing with the indicated test articles (at concentrations as indicated) on Day 1. CD45+ cell counts and IFNγ were measured on Days 10, 14 and 22 (depicted respectively in FIG. 51).

[0644] 3. Anti-LAG-3×Anti-PD-1 Bispecifics Enhance Engraftment and Disease Activity in Human PBMC-Engrafted NSG Mice

[0645] In a GVHD, 10 million human PBMCs were engrafted into NSG mice via IV-OSP on Day 0. On day 1, the mice were dosed with XENP16432 (2.89 mg/kg) and XENP22672 (5 mg/kg). CD45+ cell counts were measured on Day 14 (depicted in FIG. 70).

[0646] In the second study described in Example 6A, another exemplary anti-LAG-3×anti-PD-1 (XENP22847) was also assessed (FIG. 20C).

[0647] 4. Anti-LAG-3×Anti-CTLA-4 Bispecifics Enhance Engraftment and Disease Activity in Human PBMC-Engrafted NSG Mice

[0648] In a GVHD, 10 million human PBMCs were engrafted into NSG mice via IV-OSP on Day 0. On day 1, the mice were dosed with XENP16432 (2.89 mg/kg), XENP22675 (5 mg/kg) and a combination of XENP16432 and XENP22675 (5+5 mg/kg). CD45+ cell counts were measured on Day 14 (depicted in FIG. 70).

[0649] The data shows that XENP22675 enhances engraftment and disease activity over dosing with nivolumab alone. Notably, XENP22675 in combination with nivolumab acts synergistically to further enhance engraftment.

### G. Example 7: Anti-PD-1×Anti-CTLA-4 Bispecific Antibodies Exhibit Anti-Tumor Activity in NSG Mice Engrafted with KG1A-Luc Cancer Cells and Human PBMCs

[0650] NOD SCID gamma (NSG) mice were engrafted with KG1A-luc cancer cells on Day 0. On Day 21, human PBMCs were engrafted into the intraperitoneally into the mice. After PBMC engraftment, indicated test articles were dosed weekly by intraperitoneal injection (control mice were dosed with PBS). Tumor growth was monitored by measuring total flux per mouse using an in vivo imaging system (IVIS® Lumina III) and data are shown (days post 1st dose) in FIG. 71.

### XIII. INCORPORATION BY REFERENCE

[0651] The claim sets from “Anti-CTLA-4”, claim set A1 to A30, “Anti-PD-1”, claim set B1 to B30, “Anti-LAG-3”, claim set C1 to C28, “Anti-TIM-3”, claim set D1 to D28, “Anti-TIGIT”, claim set E1 to E28, “Anti-BTLA” claim set F1 to F28, “Backbone plus Fvs”, claim set Y1 to Y5, and “Specific molecules”, claim set X1 to X16, from U.S. Ser. No. 62/420,500 are expressly incorporated by reference in their entirety.

1. A heterodimeric antibody comprising:
a) a first heavy chain comprising:
i) a first variant Fc domain; and
ii) a single chain Fv region (scFv) that binds a first antigen, wherein said scFv region comprises a first variable heavy domain, a first variable light domain and a charged scFv linker, wherein said charged scFv linker covalently attaches said first variable heavy domain and said variable light domain; and
b) a second heavy chain comprising a VH—CH1-hinge-CH2-CH3 monomer, wherein VH is a second variable heavy domain and CH2-CH3 is a second variant Fc domain; and
c) a light chain comprising a second variable light domain and a light constant domain;
wherein said second variant Fc domain comprises amino acid substitutions N208D/Q295E/N384D/Q418E/N241D, wherein said first and second variant Fc domains each comprise amino acid substitutions E233P/L234V/L235A/G236del/S267K; wherein said first variant Fc domain comprises amino acid substitutions S364K/E357Q and second variant Fc domain comprises amino acid substitutions L368D/K370S, wherein said first variable heavy domain and first variable light domain are selected from the sets comprising SEQ ID NO: 11376 and SEQ ID NO: 11377, SEQ ID NO:22970 and SEQ ID NO:22971, SEQ ID NO:11394 and SEQ ID NO:11395, SEQ ID NO:11367 and SEQ ID NO:11368 and SEQ ID NO: 11412 and SEQ ID NO: 11413, wherein numbering is according to the EU index as in Kabat.

2. A heterodimeric antibody according to claim 1 wherein the CH1-hinge-CH2-CH3 component of the second heavy chain has SEQ ID NO:37725, said first variant Fc domain has SEQ ID NO:37726 and said constant light domain has SEQ ID NO:37727.

3. A heterodimeric antibody according to claim 1, wherein said second variable heavy domain and said second variable light domain form an antigen binding domain that binds a human checkpoint receptor from the group human CTLA-4, human LAG-3, human TIM-3 and human TIGIT.

4. A heterodimeric antibody according to claim 1 wherein said first variable heavy domain has SEQ ID NO:11394 and first variable light domain has SEQ ID NO:11395.

5. A heterodimeric antibody according to claim 1 wherein said first heavy chain has SEQ ID NO:23581, said second heavy chain has SEQ ID NO: 23576 and said light chain has SEQ ID NO:23591.

6. A nucleic acid composition comprising:
a) a first nucleic acid encoding said first heavy chain of claim 1;
b) a second nucleic acid encoding said second heavy chain of claim 1; and
c) a third nucleic acid encoding said light chain of claim 1.

7. An expression vector composition comprising:
a) a first expression vector comprising said first nucleic acid of claim 6;
b) a second expression vector comprising said second nucleic acid of claim 6; and
c) a third expression vector comprising said third nucleic acid of claim 6.

8. A host cell comprising said expression vector composition of claim 7.

9. A method of making a heterodimeric antibody according to claim 1 comprising culturing said host cell of claim 8 under conditions wherein said antibody is expressed, and recovering said antibody.

10. A heterodimeric antibody comprising:
a) a first heavy chain comprising:
i) a first variant Fc domain; and
ii) a single chain Fv region (scFv) that binds a first antigen, wherein said scFv region comprises a first variable heavy domain, a first variable light domain and a charged scFv linker, wherein said charged scFv linker covalently attaches said first variable heavy domain and said variable light domain; and
b) a second heavy chain comprising a VH—CH1-hinge-CH2-CH3 monomer, wherein VH is a second variable heavy domain and CH2-CH3 is a second variant Fc domain; and
c) a light chain comprising a second variable light domain and a light constant domain;
wherein said second variant Fc domain comprises amino acid substitutions N208D/Q295E/N384D/Q418E/N241D, wherein said first and second variant Fc domains each comprise amino acid substitutions E233P/L234V/L235A/G236del/S267K; wherein said first variant Fc domain comprises amino acid substitutions S364K/E357Q and second variant Fc domain comprises amino acid substitutions L368D/K370S, wherein said first variable heavy domain and first variable light domain are selected from the sets comprising SEQ ID NO:6149 and SEQ ID NO:6154, SEQ ID NO:6119 and SEQ ID NO:6124, SEQ ID NO:6159 and SEQ ID NO:6164, SEQ ID NO:5709 and SEQ ID NO:5714 and SEQ ID NO:5549 and SEQ ID NO:5554, wherein numbering is according to the EU index as in Kabat.

12. A heterodimeric antibody according to claim 10 wherein the CH1-hinge-CH2-CH3 component of the second heavy chain has SEQ ID NO:37725, said first variant Fc domain has SEQ ID NO:37726 and said constant light domain has SEQ ID NO:37727.

13. A heterodimeric antibody according to claim 10, wherein said second variable heavy domain and said second variable light domain form an antigen binding domain that binds a human checkpoint receptor from the group human PD-1, human LAG-3, human TIM-3 and human TIGIT.

14. A heterodimeric antibody according to claim 12 wherein said first variable heavy domain has SEQ ID NO:6149 and first variable light domain has SEQ ID NO:6154.

15. A heterodimeric antibody according to claim 10 wherein said first heavy chain has SEQ ID NO:35612, said second heavy chain has SEQ ID NO:35607 and said light chain has SEQ ID NO:35622.

16. A nucleic acid composition comprising:
a) a first nucleic acid encoding said first heavy chain of claim 10;
b) a second nucleic acid encoding said second heavy chain of claim 10; and
c) a third nucleic acid encoding said light chain of claim 10.

17. An expression vector composition comprising:
a) a first expression vector comprising said first nucleic acid of claim 16;
b) a second expression vector comprising said second nucleic acid of claim 16; and
c) a third expression vector comprising said third nucleic acid of claim 16.

18. A host cell comprising said expression vector composition of claim 17.

19. A method of making a heterodimeric antibody according to claim 10 comprising culturing said host cell of claim 8 under conditions wherein said antibody is expressed, and recovering said antibody.

The application's sequence listing, which the Patent Office published only in electronic form, follows.

SEQUENCE LISTING (37758 sequences)

SEQ ID NO: 1 - protein, 288 aa, Homo sapiens
MQIPQAPWPVVWAVLQLGWRPGWFLDSPDRPWNPPTFSPALLVVTEGDNATFTCSFSNTSESFVLNWYRMSPSNQTDKLAAFPEDRSQPGQDCRFRVTQLPNGRDFHMSVVRARRNDSGTYLCGAISLAPKAQIKESLRAELRVTERRAEVPTAHPSPSPRPAGQFQTLVVGVVGGLLGSLVLLVWVLAVICSRAARGTIGARRTGQPLKEDPSAVPVFSVDYGELDFQWREKTPEPPVPCVPEQTEYATIVFPSGMGTSSPARRGSADGPRSAQPLRPEDGHCSWPL

SEQ ID NO: 2 - protein, 150 aa, Homo sapiens [sequence omitted]

SEQ ID NO: 3 - protein, 288 aa, Macaca fascicularis
MQIPQAPWPVVWAVLQLGWRPGWFLESPDRPWNAPTFSPALLLVTEGDNATFTCSFSNASESFVLNWYRMSPSNQTDKLAAFPEDRSQPGQDCRFRVTRLPNGRDFHMSVVRARRNDSGTYLCGAISLAPKAQIKESLRAELRVTERRAEVPTAHPSPSPRPAGQFQALVVGVVGGLLGSLVLLVWVLAVICSRAAQGTIEARRTGQPLKEDPSAVPVFSVDYGELDFQWREKTPEPPAPCVPEQTEYATIVFPSGLGTSSPARRGSADGPRSPRPLRPEDGHCSWPL

SEQ ID NO: 4 - protein, 150 aa, Macaca fascicularis
PGWFLESPDRPWNAPTFSPALLLVTEGDNATFTCSFSNASESFVLNWYRMSPSNQTDKLAAFPEDRSQPGQDCRFRVTRLPNGRDFHMSVVRARRNDSGTYLCGAISLAPKAQIKESLRAELRVTERRAEVPTAHPSPSPRPAGQFQALV

SEQ ID NO: 5 - protein, 223 aa, Homo sapiens
MACLGFQRHKAQLNLATRTWPCTLLFFLLFIPVFCKAMHVAQPAVVLASSRGIASFVCEYASPGKATEVRVTVLRQADSQVTEVCAATYMMGNELTFLDDSICTGTSSGNQVNLTIQGLRAMDTGLYICKVELMYPPPYYLGIGNGTQIYVIDPEPCPDSDFLLWILAAVSSGLFFYSFLLTAVSLSKMLKKRSPLTTGVYVKMPPTEPECEKQFQPYFIPIN

SEQ ID NO: 6 - protein, 126 aa, Homo sapiens [sequence omitted]

SEQ ID NO: 7 - protein, 223 aa, Macaca fascicularis
MACLGFQRHKARLNLATRTRPYTLLFSLLFIPVFSKAMHVAQPAVVLANSRGIASFVCEYASPGKATEVRVTVLRQADSQVTEVCAATYMMGNELTFLDDSICTGTSSGNQVNLTIQGLRAMDTGLYICKVELMYPPPYYMGIGNGTQIYVIDPEPCPDSDFLLWILAAVSSGLFFYSFLLTAVSLSKMLKKRSPLTTGVYVKMPPTEPECEKQFQPYFIPIN

SEQ ID NO: 8 - protein, 126 aa, Macaca fascicularis
KAMHVAQPAVVLANSRGIASFVCEYASPGKATEVRVTVLRQADSQVTEVCAATYMMGNELTFLDDSICTGTSSGNQVNLTIQGLRAMDTGLYICKVELMYPPPYYMGIGNGTQIYVIDPEPCPDSD

SEQ ID NO: 9 - protein, 525 aa, Homo sapiens
MWEAQFLGLLFLQPLWVAPVKPLQPGAEVPVVWAQEGAPAQLPCSPTIPLQDLSLLRRAGVTWQHQPDSGPPAAAPGHPLAPGPHPAAPSSWGPRPRRYTVLSVGPGGLRSGRLPLQPRVQLDERGRQRGDFSLWLRPARRADAGEYRAAVHLRDRALSCRLRLRLGQASMTASPPGSLRASDWVILNCSFSRPDRPASVHWFRNRGQGRVPVRESPHHHLAESFLFLPQVSPMDSGPWGCILTYRDGFNVSIMYNLTVLGLEPPTPLTVYAGAGSRVGLPCRLPAGVGTRSFLTAKWTPPGGGPDLLVTGDNGDFTLRLEDVSQAQAGTYTCHIHLQEQQLNATVTLAIITVTPKSFGSPGSLGKLLCEVTPVSGQERFVWSSLDTPSQRSFSGPWLEAQEAQLLSQPWQCQLYQGERLLGAAVYFTELSSPGAQRSGRAPGALPAGHLLLFLILGVLSLLLLVTGAFGFHLWRRQWRPRRFSALEQGIHPPQAQSKIEELEQEPEPEPEPEPEPEPEPEPEQL

SEQ ID NO: 10 - protein, 422 aa, Homo sapiens
VPVVWAQEGAPAQLPCSPTIPLQDLSLLRRAGVTWQHQPDSGPPAAAPGHPLAPGPHPAAPSSWGPRPRRYTVLSVGPGGLRSGRLPLQPRVQLDERGRQRGDFSLWLRPARRADAGEYRAAVHLRDRALSCRLRLRLGQASMTASPPGSLRASDWVILNCSFSRPDRPASVHWFRNRGQGRVPVRESPHHHLAESFLFLPQVSPMDSGPWGCILTYRDGFNVSIMYNLTVLGLEPPTPLTVYAGAGSRVGLPCRLPAGVGTRSFLTAKWTPPGGGPDLLVTGDNGDFTLRLEDVSQAQAGTYTCHIHLQEQQLNATVTLAIITVTPKSFGSPGSLGKLLCEVTPVSGQERFVWSSLDTPSQRSFSGPWLEAQEAQLLSQPWQCQLYQGERLLGAAVYFTELSSPGAQRSGRAPGALPAGHL

SEQ ID NO: 11 - protein, 533 aa, Macaca fascicularis
  MOD_RES (74)..(74): Any amino acid
MWEAQFLGLLFLQPLWVAPVKPPQPGAEISVVWAQEGAPAQLPCSPTIPLQDLSLLRRAGVTWQHQPDSGPPAXAPGHPPVPGHRPAAPYSWGPRPRRYTVLSVGPGGLRSGRLPLQPRVQLDERGRQRGDFSLWLRPARRADAGEYRATVHLRDRALSCRLRLRVGQASMTASPPGSLRTSDWVILNCSFSRPDRPASVHWFRSRGQGRVPVQGSPHHHLAESFLFLPHVGPMDSGLWGCILTYRDGFNVSIMYNLTVLGLEPATPLTVYAGAGSRVELPCRLPPAVGTQSFLTAKWAPPGGGPDLLVAGDNGDFTLRLEDVSQAQAGTYICHIRLQGQQLNATVTLAIITVTPKSFGSPGSLGKLLCEVTPASGQEHFVWSPLNTPSQRSFSGPWLEAQEAQLLSQPWQCQLHQGERLLGAAVYFTELSSPGAQRSGRAPGALRAGHLPLFLILGVLFLLLLVTGAFGFHLWRRQWRPRRFSALEQGIHPPQAQSKIEELEQEPELEPEPELERELGPEPEPGPEPEPEQL

SEQ ID NO: 12 - protein, 422 aa, Macaca fascicularis
  MOD_RES (46)..(46): Any amino acid
ISVVWAQEGAPAQLPCSPTIPLQDLSLLRRAGVTWQHQPDSGPPAXAPGHPPVPGHRPAAPYSWGPRPRRYTVLSVGPGGLRSGRLPLQPRVQLDERGRQRGDFSLWLRPARRADAGEYRATVHLRDRALSCRLRLRVGQASMTASPPGSLRTSDWVILNCSFSRPDRPASVHWFRSRGQGRVPVQGSPHHHLAESFLFLPHVGPMDSGLWGCILTYRDGFNVSIMYNLTVLGLEPATPLTVYAGAGSRVELPCRLPPAVGTQSFLTAKWAPPGGGPDLLVAGDNGDFTLRLEDVSQAQAGTYICHIRLQGQQLNATVTLAIITVTPKSFGSPGSLGKLLCEVTPASGQEHFVWSPLNTPSQRSFSGPWLEAQEAQLLSQPWQCQLHQGERLLGAAVYFTELSSPGAQRSGRAPGALRAGHL

SEQ ID NO: 13 - protein, 289 aa, Homo sapiens
MKTLPAMLGTGKLFWVFFLIPYLDIWNIHGKESCDVQLYIKRQSEHSILAGDPFELECPVKYCANRPHVTWCKLNGTTCVKLEDRQTSWKEEKNISFFILHFEPVLPNDNGSYRCSANFQSNLIESHSTTLYVTDVKSASERPSKDEMASRPWLLYRLLPLGGLPLLITTCFCLFCCLRRHQGKQNELSDTAGREINLVDAHLKSEQTEASTRQNSQVLLSETGIYDNDPDLCFRMQEGSEVYSNPCLEENKPGIVYASLNHSVIGPNSRLARNVKEAPTEYASICVRS

SEQ ID NO: 14 - protein, 127 aa, Homo sapiens
KESCDVQLYIKRQSEHSILAGDPFELECPVKYCANRPHVTWCKLNGTTCVKLEDRQTSWKEEKNISFFILHFEPVLPNDNGSYRCSANFQSNLIESHSTTLYVTDVKSASERPSKDEMASRPWLLYR

SEQ ID NO: 15 - protein, 289 aa, Macaca fascicularis
MKTLPAMLGSGRLFWVVFLIPYLDIWNIHGKESCDVQLYIKRQSYHSIFAGDRFKLECPVKYCAHRPQVTWCKLNGTTCVKLEGRHTSWKQEKNLSFFILHFEPVLPSDNGSYRCSANFLSAIIESHSTTLYVTDVKSASERPSKDEMASRPWLLYSLLPLGGLPLLITTCFCLFCFLRRHQGKQNELSDTTRREITLVDVPFKSEQTEASTRQNSQVLLSETGIYDNEPDFCFRMQEGSEVYSNPCLEENKPGIIYASLNHSIIGLNARQARNVKEAPTEYASICVRS

SEQ ID NO: 16 - protein, 127 aa, Macaca fascicularis
KESCDVQLYIKRQSYHSIFAGDRFKLECPVKYCAHRPQVTWCKLNGTTCVKLEGRHTSWKQEKNLSFFILHFEPVLPSDNGSYRCSANFLSAIIESHSTTLYVTDVKSASERPSKDEMASRPWLLYS

SEQ ID NO: 17 - protein, 300 aa, Homo sapiens
MFSHLPFDCVLLLLLLLLTRSSEVEYRAEVGQNAYLPCFYTPAAPGNLVPVCWGKGACPVFECGNVVLRTDERDVNYWTSRYWLNGDFRKGDVSLTIENVTLADSGIYCCRIQIPGIMNDEKFNLKLVIKPAKVTPAPTRQRDFTAAFPRMLTTRGHGPAETQTLGSLPDINLTQISTLANELRDSRLANDLRDSGATIRIGIYIGAGICAGLALALIFGALIFKWYSHSKEKIQNLSLISLANLPPSGLANAVAEGIRSEENIYTIEENVYEVEEPNEYYCYVSSRQQPSQPLGCRFAM

SEQ ID NO: 18 - protein, 181 aa, Homo sapiens
SEVEYRAEVGQNAYLPCFYTPAAPGNLVPVCWGKGACPVFECGNVVLRTDERDVNYWTSRYWLNGDFRKGDVSLTIENVTLADSGIYCCRIQIPGIMNDEKFNLKLVIKPAKVTPAPTRQRDFTAAFPRMLTTRGHGPAETQTLGSLPDINLTQISTLANELRDSRLANDLRDSGATIRIG

SEQ ID NO: 19 - protein, 302 aa, Macaca fascicularis
MFSHLPFDCVLLLLLLLLTRSSEVEYIAEVGQNAYLPCSYTPAPPGNLVPVCWGKGACPVFDCSNVVLRTDNRDVNDRTSGRYWLKGDFHKGDVSLTIENVTLADSGVYCCRIQIPGIMNDEKHNVKLVVIKPAKVTPAPTLQRDLTSAFPRMLTTGEHGPAETQTPGSLPDVNLTVSNFFCELQIFTLTNELRDSGATIRTAIYIAAGISAGLALALIFGALIFKWYSHSKEKTQNLSLISLANIPPSGLANAVAEGIRSEENIYTIEEDVYEVEEPNEYYCYVSSGQQPSQPLGCRVAMP

SEQ ID NO: 20 - protein, 182 aa, Macaca fascicularis
SEVEYIAEVGQNAYLPCSYTPAPPGNLVPVCWGKGACPVFDCSNVVLRTDNRDVNDRTSGRYWLKGDFHKGDVSLTIENVTLADSGVYCCRIQIPGIMNDEKHNVKLVVIKPAKVTPAPTLQRDLTSAFPRMLTTGEHGPAETQTPGSLPDVNLTVSNFFCELQIFTLTNELRDSGATIRTA

SEQ ID NO: 21 - protein, 246 aa, Artificial Sequence
  Description of Artificial Sequence: Synthetic polypeptide
  XENP019533 [CTLA-4]_H0_L0_scFv(GKPGS)4
QVQLVESGGGVVQPGRSLRLSCAASGFTFSSYTMHWVRQAPGKGLEWVTFISYDGNNKYYADSVKGRFTISRDNSKNTLYLQMNSLRAEDTAIYYCARTGWLGPFDYWGQGTLVTVSSGKPGSGKPGSGKPGSGKPGSEIVLTQSPGTLSLSPGERATLSCRASQSVGSSYLAWYQQKPGQAPRLLIYGAFSRATGIPDRFSGSGSGTDFTLTISRLEPEDFAVYYCQQYGSSPWTFGQGTKVEIK

SEQ ID NO: 22 - protein, 118 aa, Artificial Sequence
  Description of Artificial Sequence: Synthetic polypeptide
  VH of XENP019533
QVQLVESGGGVVQPGRSLRLSCAASGFTFSSYTMHWVRQAPGKGLEWVTFISYDGNNKYYADSVKGRFTISRDNSKNTLYLQMNSLRAEDTAIYYCARTGWLGPFDYWGQGTLVTVSS

SEQ ID NO: 23 - protein, 108 aa, Artificial Sequence
  Description of Artificial Sequence: Synthetic polypeptide
  VL of XENP019533
EIVLTQSPGTLSLSPGERATLSCRASQSVGSSYLAWYQQKPGQAPRLLIYGAFSRATGIPDRFSGSGSGTDFTLTISRLEPEDFAVYYCQQYGSSPWTFGQGTKVEIK

SEQ ID NO: 24 - protein, 5 aa, Artificial Sequence
  Description of Artificial Sequence: Synthetic peptide
  XENP019533 vhCDR1
SYTMH

SEQ ID NO: 25 - protein, 17 aa, Artificial Sequence
  Description of Artificial Sequence: Synthetic peptide
  XENP019533 vhCDR2
FISYDGNNKYYADSVKG

SEQ ID NO: 26 - protein, 9 aa, Artificial Sequence
  Description of Artificial Sequence: Synthetic peptide
  XENP019533 vhCDR3
TGWLGPFDY

SEQ ID NO: 27 - protein, 12 aa, Artificial Sequence
  Description of Artificial Sequence: Synthetic peptide
  XENP019533 vlCDR1
RASQSVGSSYLA

SEQ ID NO: 28 - protein, 7 aa, Artificial Sequence
  Description of Artificial Sequence: Synthetic peptide
  XENP019533 vlCDR2
GAFSRAT

SEQ ID NO: 29 - protein, 9 aa, Artificial Sequence
  Description of Artificial Sequence: Synthetic peptide
  XENP019533 vlCDR3
QQYGSSPWT

SEQ ID NO: 30 - protein, 246 aa, Artificial Sequence
  Description of Artificial Sequence: Synthetic polypeptide
  XENP019534 [CTLA-4]_H0.36_L0.50_scFv(GKPGS)4
QVQLVESGGGVVQPGRSLRLSCAASGFTFSSYTMHWVRKAPGKGLEWVTFISYDGNNKYYADSVKGRFTISRDNSKNTLYLQMNSLRAEDTAIYYCARTGWLGPFDYWGQGTLVTVSSGKPGSGKPGSGKPGSGKPGSEIVLTQSPGTLSLSPGERATLSCRASQSVGSSYLAWYQEKPGQAPRLLIYGAFSRATGIPDRFSGSGSGTDFTLTISRLEPEDFAVYYCQQYGSSPWTFGQGTKVEIK

SEQ ID NO: 31 - protein, 118 aa, Artificial Sequence
  Description of Artificial Sequence: Synthetic polypeptide
  VH of XENP019534
QVQLVESGGGVVQPGRSLRLSCAASGFTFSSYTMHWVRKAPGKGLEWVTFISYDGNNKYYADSVKGRFTISRDNSKNTLYLQMNSLRAEDTAIYYCARTGWLGPFDYWGQGTLVTVSS

SEQ ID NO: 32 - protein, 108 aa, Artificial Sequence
  Description of Artificial Sequence: Synthetic polypeptide
  VL of XENP019534
EIVLTQSPGTLSLSPGERATLSCRASQSVGSSYLAWYQEKPGQAPRLLIYGAFSRATGIPDRFSGSGSGTDFTLTISRLEPEDFAVYYCQQYGSSPWTFGQGTKVEIK

SEQ ID NO: 33 - protein, 5 aa, Artificial Sequence
  Description of Artificial Sequence: Synthetic peptide
  XENP019534 vhCDR1
SYTMH

SEQ ID NO: 34 - protein, 17 aa, Artificial Sequence
  Description of Artificial Sequence: Synthetic peptide
  XENP019534 vhCDR2
FISYDGNNKYYADSVKG

SEQ ID NO: 35 - protein, 9 aa, Artificial Sequence
  Description of Artificial Sequence: Synthetic peptide
  XENP019534 vhCDR3
TGWLGPFDY

SEQ ID NO: 36 - protein, 12 aa, Artificial Sequence
  Description of Artificial Sequence: Synthetic peptide
  XENP019534 vlCDR1
RASQSVGSSYLA

SEQ ID NO: 37 - protein, 7 aa, Artificial Sequence
  Description of Artificial Sequence: Synthetic peptide
  XENP019534 vlCDR2
GAFSRAT

SEQ ID NO: 38 - protein, 9 aa, Artificial Sequence
  Description of Artificial Sequence: Synthetic peptide
  XENP019534 vlCDR3
QQYGSSPWT

SEQ ID NO: 39 - protein, 246 aa, Artificial Sequence
  Description of Artificial Sequence: Synthetic polypeptide
  XENP019535 [CTLA-4]_H0.36_L0.51_scFv(GKPGS)4
QVQLVESGGGVVQPGRSLRLSCAASGFTFSSYTMHWVRKAPGKGLEWVTFISYDGNNKYYADSVKGRFTISRDNSKNTLYLQMNSLRAEDTAIYYCARTGWLGPFDYWGQGTLVTVSSGKPGSGKPGSGKPGSGKPGSEIVLTQSPGTLSLSPGERATLSCRASQSVGSSYLAWYQQKPDQAPRLLIYGAFSRATGIPDRFSGSGSGTDFTLTISRLEPEDFAVYYCQQYGSSPWTFGQGTKVEIK

SEQ ID NO: 40 - protein, 118 aa, Artificial Sequence; identical to SEQ ID NO: 31
  Description of Artificial Sequence: Synthetic polypeptide
  VH of XENP019535

SEQ ID NO: 41 - protein, 108 aa, Artificial Sequence
  Description of Artificial Sequence: Synthetic polypeptide
  VL of XENP019535
EIVLTQSPGTLSLSPGERATLSCRASQSVGSSYLAWYQQKPDQAPRLLIYGAFSRATGIPDRFSGSGSGTDFTLTISRLEPEDFAVYYCQQYGSSPWTFGQGTKVEIK

SEQ ID NO: 42 - protein, 5 aa, Artificial Sequence
  Description of Artificial Sequence: Synthetic peptide
  XENP019535 vhCDR1
SYTMH

SEQ ID NO: 43 - protein, 17 aa, Artificial Sequence
  Description of Artificial Sequence: Synthetic peptide
  XENP019535 vhCDR2
FISYDGNNKYYADSVKG

SEQ ID NO: 44 - protein, 9 aa, Artificial Sequence
  Description of Artificial Sequence: Synthetic peptide
  XENP019535 vhCDR3
TGWLGPFDY

SEQ ID NO: 45 - protein, 12 aa, Artificial Sequence
  Description of Artificial Sequence: Synthetic peptide
  XENP019535 vlCDR1
RASQSVGSSYLA

SEQ ID NO: 46 - protein, 7 aa, Artificial Sequence
  Description of Artificial Sequence: Synthetic peptide
  XENP019535 vlCDR2
GAFSRAT

SEQ ID NO: 47 - protein, 9 aa, Artificial Sequence
  Description of Artificial Sequence: Synthetic peptide
  XENP019535 vlCDR3
QQYGSSPWT

SEQ ID NO: 48 - protein, 246 aa, Artificial Sequence
  Description of Artificial Sequence: Synthetic polypeptide
  XENP019536 [CTLA-4]_H0.37_L0.50_scFv(GKPGS)4
QVQLVESGGGVVQPGRSLRLSCAASGFTFSSYTMHWVRQAPGKRLEWVTFISYDGNNKYYADSVKGRFTISRDNSKNTLYLQMNSLRAEDTAIYYCARTGWLGPFDYWGQGTLVTVSSGKPGSGKPGSGKPGSGKPGSEIVLTQSPGTLSLSPGERATLSCRASQSVGSSYLAWYQEKPGQAPRLLIYGAFSRATGIPDRFSGSGSGTDFTLTISRLEPEDFAVYYCQQYGSSPWTFGQGTKVEIK

SEQ ID NO: 49 - protein, 118 aa, Artificial Sequence
  Description of Artificial Sequence: Synthetic polypeptide
  VH of XENP019536
QVQLVESGGGVVQPGRSLRLSCAASGFTFSSYTMHWVRQAPGKRLEWVTFISYDGNNKYYADSVKGRFTISRDNSKNTLYLQMNSLRAEDTAIYYCARTGWLGPFDYWGQGTLVTVSS

SEQ ID NO: 50 - protein, 108 aa, Artificial Sequence; identical to SEQ ID NO: 32
  Description of Artificial Sequence: Synthetic polypeptide
  VL of XENP019536

SEQ ID NO: 51 - protein, 5 aa, Artificial Sequence
  Description of Artificial Sequence: Synthetic peptide
  XENP019536 vhCDR1
SYTMH

SEQ ID NO: 52 - protein, 17 aa, Artificial Sequence
  Description of Artificial Sequence: Synthetic peptide
  XENP019536 vhCDR2
FISYDGNNKYYADSVKG

SEQ ID NO: 53 - protein, 9 aa, Artificial Sequence
  Description of Artificial Sequence: Synthetic peptide
  XENP019536 vhCDR3
TGWLGPFDY

SEQ ID NO: 54 - protein, 12 aa, Artificial Sequence
  Description of Artificial Sequence: Synthetic peptide
  XENP019536 vlCDR1
RASQSVGSSYLA

SEQ ID NO: 55 - protein, 7 aa, Artificial Sequence
  Description of Artificial Sequence: Synthetic peptide
  XENP019536 vlCDR2
GAFSRAT

SEQ ID NO: 56 - protein, 9 aa, Artificial Sequence
  Description of Artificial Sequence: Synthetic peptide
  XENP019536 vlCDR3
QQYGSSPWT

SEQ ID NO: 57 - protein, 246 aa, Artificial Sequence
  Description of Artificial Sequence: Synthetic polypeptide
  XENP019537 [CTLA-4]_H0.37_L0.113_scFv(GKPGS)4
QVQLVESGGGVVQPGRSLRLSCAASGFTFSSYTMHWVRQAPGKRLEWVTFISYDGNNKYYADSVKGRFTISRDNSKNTLYLQMNSLRAEDTAIYYCARTGWLGPFDYWGQGTLVTVSSGKPGSGKPGSGKPGSGKPGSEIVLTQSPGTLSLSPGERATLSCRASQSVGSSYLAWYQQKPGQAPRLLIYGAFSRATGIPDRFSGSGSGTDFTLTISRLEPEDFAVYYCQQYGSSPWTFGEGTKVEIK

SEQ ID NO: 58 - protein, 118 aa, Artificial Sequence; identical to SEQ ID NO: 49
  Description of Artificial Sequence: Synthetic polypeptide
  VH of XENP019537

SEQ ID NO: 59 - protein, 108 aa, Artificial Sequence
  Description of Artificial Sequence: Synthetic polypeptide
  VL of XENP019537
EIVLTQSPGTLSLSPGERATLSCRASQSVGSSYLAWYQQKPGQAPRLLIYGAFSRATGIPDRFSGSGSGTDFTLTISRLEPEDFAVYYCQQYGSSPWTFGEGTKVEIK

SEQ ID NO: 60 - protein, 5 aa, Artificial Sequence
  Description of Artificial Sequence: Synthetic peptide
  XENP019537 vhCDR1
SYTMH

SEQ ID NO: 61 - protein, 17 aa, Artificial Sequence
  Description of Artificial Sequence: Synthetic peptide
  XENP019537 vhCDR2
FISYDGNNKYYADSVKG

SEQ ID NO: 62 - protein, 9 aa, Artificial Sequence
  Description of Artificial Sequence: Synthetic peptide
  XENP019537 vhCDR3
TGWLGPFDY

SEQ ID NO: 63 - protein, 12 aa, Artificial Sequence
  Description of Artificial Sequence: Synthetic peptide
  XENP019537 vlCDR1
RASQSVGSSYLA

SEQ ID NO: 64 - protein, 7 aa, Artificial Sequence
  Description of Artificial Sequence: Synthetic peptide
  XENP019537 vlCDR2
GAFSRAT

SEQ ID NO: 65 - protein, 9 aa, Artificial Sequence
  Description of Artificial Sequence: Synthetic peptide
  XENP019537 vlCDR3
QQYGSSPWT

SEQ ID NO: 66 - protein, 246 aa, Artificial Sequence
  Description of Artificial Sequence: Synthetic polypeptide
  XENP019538 [CTLA-4]_H0.134_L0.51_scFv(GKPGS)4
QVQLVESGGGVVQPGRSLRLSCAASGFTFSSYTMHWVRQAPGKGLEWVTFISYDGNNKYYADSVKGRFTISRDNSKNTLYLQMNSLRAEDTAIYYCARTGWLGPFDYWGRGTLVTVSSGKPGSGKPGSGKPGSGKPGSEIVLTQSPGTLSLSPGERATLSCRASQSVGSSYLAWYQQKPDQAPRLLIYGAFSRATGIPDRFSGSGSGTDFTLTISRLEPEDFAVYYCQQYGSSPWTFGQGTKVEIK

SEQ ID NO: 67 - protein, 118 aa, Artificial Sequence
  Description of Artificial Sequence: Synthetic polypeptide
  VH of XENP019538
QVQLVESGGGVVQPGRSLRLSCAASGFTFSSYTMHWVRQAPGKGLEWVTFISYDGNNKYYADSVKGRFTISRDNSKNTLYLQMNSLRAEDTAIYYCARTGWLGPFDYWGRGTLVTVSS

SEQ ID NO: 68 - protein, 108 aa, Artificial Sequence; identical to SEQ ID NO: 41
  Description of Artificial Sequence: Synthetic polypeptide
  VL of XENP019538

SEQ ID NO: 69 - protein, 5 aa, Artificial Sequence
  Description of Artificial Sequence: Synthetic peptide
  XENP019538 vhCDR1
SYTMH

SEQ ID NO: 70 - protein, 17 aa, Artificial Sequence
  Description of Artificial Sequence: Synthetic peptide
  XENP019538 vhCDR2
FISYDGNNKYYADSVKG

SEQ ID NO: 71 - protein, 9 aa, Artificial Sequence
  Description of Artificial Sequence: Synthetic peptide
  XENP019538 vhCDR3
TGWLGPFDY

SEQ ID NO: 72 - protein, 12 aa, Artificial Sequence
  Description of Artificial Sequence: Synthetic peptide
  XENP019538 vlCDR1
RASQSVGSSYLA

SEQ ID NO: 73 - protein, 7 aa, Artificial Sequence
  Description of Artificial Sequence: Synthetic peptide
  XENP019538 vlCDR2
GAFSRAT

SEQ ID NO: 74 - protein, 9 aa, Artificial Sequence
  Description of Artificial Sequence: Synthetic peptide
  XENP019538 vlCDR3
QQYGSSPWT

SEQ ID NO: 75 - protein, 246 aa, Artificial Sequence
  Description of Artificial Sequence: Synthetic polypeptide
  XENP019539 [CTLA-4]_H0.134_L0.53_scFv(GKPGS)4
QVQLVESGGGVVQPGRSLRLSCAASGFTFSSYTMHWVRQAPGKGLEWVTFISYDGNNKYYADSVKGRFTISRDNSKNTLYLQMNSLRAEDTAIYYCARTGWLGPFDYWGRGTLVTVSSGKPGSGKPGSGKPGSGKPGSEIVLTQSPGTLSLSPGERATLSCRASQSVGSSYLAWYQQKPGEAPRLLIYGAFSRATGIPDRFSGSGSGTDFTLTISRLEPEDFAVYYCQQYGSSPWTFGQGTKVEIK

SEQ ID NO: 76 - protein, 118 aa, Artificial Sequence; identical to SEQ ID NO: 67
  Description of Artificial Sequence: Synthetic polypeptide
  VH of XENP019539

SEQ ID NO: 77 - protein, 108 aa, Artificial Sequence
  Description of Artificial Sequence: Synthetic polypeptide
  VL of XENP019539
EIVLTQSPGTLSLSPGERATLSCRASQSVGSSYLAWYQQKPGEAPRLLIYGAFSRATGIPDRFSGSGSGTDFTLTISRLEPEDFAVYYCQQYGSSPWTFGQGTKVEIK

SEQ ID NO: 78 - protein, 5 aa, Artificial Sequence
  Description of Artificial Sequence: Synthetic peptide
  XENP019539 vhCDR1
SYTMH

SEQ ID NO: 79 - protein, 17 aa, Artificial Sequence
  Description of Artificial Sequence: Synthetic peptide
  XENP019539 vhCDR2
FISYDGNNKYYADSVKG

SEQ ID NO: 80 - protein, 9 aa, Artificial Sequence
  Description of Artificial Sequence: Synthetic peptide
  XENP019539 vhCDR3
TGWLGPFDY

SEQ ID NO: 81 - protein, 12 aa, Artificial Sequence
  Description of Artificial Sequence: Synthetic peptide
  XENP019539 vlCDR1
RASQSVGSSYLA

SEQ ID NO: 82 - protein, 7 aa, Artificial Sequence
  Description of Artificial Sequence: Synthetic peptide
  XENP019539 vlCDR2
GAFSRAT

SEQ ID NO: 83 - protein, 9 aa, Artificial Sequence
  Description of Artificial Sequence: Synthetic peptide
  XENP019539 vlCDR3
QQYGSSPWT

SEQ ID NO: 84 - protein, 246 aa, Artificial Sequence
  Description of Artificial Sequence: Synthetic polypeptide
  XENP019540 [CTLA-4]_H0.134_L0.57_scFv(GKPGS)4
QVQLVESGGGVVQPGRSLRLSCAASGFTFSSYTMHWVRQAPGKGLEWVTFISYDGNNKYYADSVKGRFTISRDNSKNTLYLQMNSLRAEDTAIYYCARTGWLGPFDYWGRGTLVTVSSGKPGSGKPGSGKPGSGKPGSEIVLTQSPGTLSLSPGERATLSCRASQSVGSSYLAWYQQKPGQAPELLIYGAFSRATGIPDRFSGSGSGTDFTLTISRLEPEDFAVYYCQQYGSSPWTFGQGTKVEIK

SEQ ID NO: 85 - protein, 118 aa, Artificial Sequence; identical to SEQ ID NO: 67
  Description of Artificial Sequence: Synthetic polypeptide
  VH of XENP019540

SEQ ID NO: 86 - protein, 108 aa, Artificial Sequence
  Description of Artificial Sequence: Synthetic polypeptide
  VL of XENP019540
EIVLTQSPGTLSLSPGERATLSCRASQSVGSSYLAWYQQKPGQAPELLIYGAFSRATGIPDRFSGSGSGTDFTLTISRLEPEDFAVYYCQQYGSSPWTFGQGTKVEIK

SEQ ID NO: 87 - protein, 5 aa, Artificial Sequence
  Description of Artificial Sequence: Synthetic peptide
  XENP019540 vhCDR1
SYTMH

SEQ ID NO: 88 - protein, 17 aa, Artificial Sequence
  Description of Artificial Sequence: Synthetic peptide
  XENP019540 vhCDR2
FISYDGNNKYYADSVKG

SEQ ID NO: 89 - protein, 9 aa, Artificial Sequence
  Description of Artificial Sequence: Synthetic peptide
  XENP019540 vhCDR3
TGWLGPFDY

SEQ ID NO: 90 - protein, 12 aa, Artificial Sequence
  Description of Artificial Sequence: Synthetic peptide
  XENP019540 vlCDR1
RASQSVGSSYLA

SEQ ID NO: 91 - protein, 7 aa, Artificial Sequence
  Description of Artificial Sequence: Synthetic peptide
  XENP019540 vlCDR2
GAFSRAT

SEQ ID NO: 92 - protein, 9 aa, Artificial Sequence
  Description of Artificial Sequence: Synthetic peptide
  XENP019540 vlCDR3
QQYGSSPWT

SEQ ID NO: 93 - protein, 246 aa, Artificial Sequence
  Description of Artificial Sequence: Synthetic polypeptide
  XENP019541 [CTLA-4]_H0.137_L0.114_scFv(GKPGS)4
QVQLVESGGGVVQPGRSLRLSCAASGFTFSSYTMHWVRQAPGKCLEWVTFISYDGNNKYYADSVKGRFTISRDNSKNTLYLQMNSLRAEDTAIYYCARTGWLGPFDYWGQGTLVTVSSGKPGSGKPGSGKPGSGKPGSEIVLTQSPGTLSLSPGERATLSCRASQSVGSSYLAWYQQKPGQAPRLLIYGAFSRATGIPDRFSGSGSGTDFTLTISRLEPEDFAVYYCQQYGSSPWTFGCGTKVEIK

SEQ ID NO: 94 - protein, 118 aa, Artificial Sequence
  Description of Artificial Sequence: Synthetic polypeptide
  VH of XENP019541
QVQLVESGGGVVQPGRSLRLSCAASGFTFSSYTMHWVRQAPGKCLEWVTFISYDGNNKYYADSVKGRFTISRDNSKNTLYLQMNSLRAEDTAIYYCARTGWLGPFDYWGQGTLVTVSS

SEQ ID NO: 95 - protein, 108 aa, Artificial Sequence
  Description of Artificial Sequence: Synthetic polypeptide
  VL of XENP019541
EIVLTQSPGTLSLSPGERATLSCRASQSVGSSYLAWYQQKPGQAPRLLIYGAFSRATGIPDRFSGSGSGTDFTLTISRLEPEDFAVYYCQQYGSSPWTFGCGTKVEIK

SEQ ID NO: 96 - protein, 5 aa, Artificial Sequence
  Description of Artificial Sequence: Synthetic peptide
  XENP019541 vhCDR1
SYTMH

SEQ ID NO: 97 - protein, 17 aa, Artificial Sequence
  Description of Artificial Sequence: Synthetic peptide
  XENP019541 vhCDR2
FISYDGNNKYYADSVKG

SEQ ID NO: 98 - protein, 9 aa, Artificial Sequence
  Description of Artificial Sequence: Synthetic peptide
  XENP019541 vhCDR3
TGWLGPFDY

SEQ ID NO: 99 - protein, 12 aa, Artificial Sequence
  Description of Artificial Sequence: Synthetic peptide
  XENP019541 vlCDR1
RASQSVGSSYLA

SEQ ID NO: 100 - protein, 7 aa, Artificial Sequence
  Description of Artificial Sequence: Synthetic peptide
  XENP019541 vlCDR2
GAFSRAT

SEQ ID NO: 101 - protein, 9 aa, Artificial Sequence
  Description of Artificial Sequence: Synthetic peptide
  XENP019541 vlCDR3
QQYGSSPWT

SEQ ID NO: 102 - protein, 246 aa, Artificial Sequence
  Description of Artificial Sequence: Synthetic polypeptide
  XENP019542 [CTLA-4]_H0.138_L0.115_scFv(GKPGS)4
QVQLVESGGGVVQPGRSLRLSCAASGFTFSSYTMHWVRQAPGKGLEWVTFISYDGNNKYYADSVKGRFTISRDNSKNTLYLQMNSLRAEDTAIYYCARTGWLGPFDYWGCGTLVTVSSGKPGSGKPGSGKPGSGKPGSEIVLTQSPGTLSLSPGERATLSCRASQSVGSSYLAWYQQKPCQAPRLLIYGAFSRATGIPDRFSGSGSGTDFTLTISRLEPEDFAVYYCQQYGSSPWTFGQGTKVEIK

SEQ ID NO: 103 - protein, 118 aa, Artificial Sequence
  Description of Artificial Sequence: Synthetic polypeptide
  VH of XENP019542
QVQLVESGGGVVQPGRSLRLSCAASGFTFSSYTMHWVRQAPGKGLEWVTFISYDGNNKYYADSVKGRFTISRDNSKNTLYLQMNSLRAEDTAIYYCARTGWLGPFDYWGCGTLVTVSS

SEQ ID NO: 104 - protein, 108 aa, Artificial Sequence
  Description of Artificial Sequence: Synthetic polypeptide
  VL of XENP019542
EIVLTQSPGTLSLSPGERATLSCRASQSVGSSYLAWYQQKPCQAPRLLIYGAFSRATGIPDRFSGSGSGTDFTLTISRLEPEDFAVYYCQQYGSSPWTFGQGTKVEIK

SEQ ID NO: 105 - protein, 5 aa, Artificial Sequence
  Description of Artificial Sequence: Synthetic peptide
  XENP019542 vhCDR1
SYTMH

SEQ ID NO: 106 - protein, 17 aa, Artificial Sequence
  Description of Artificial Sequence: Synthetic peptide
  XENP019542 vhCDR2
FISYDGNNKYYADSVKG

SEQ ID NO: 107 - protein, 9 aa, Artificial Sequence
  Description of Artificial Sequence: Synthetic peptide
  XENP019542 vhCDR3
TGWLGPFDY

SEQ ID NO: 108 - protein, 12 aa, Artificial Sequence
  Description of Artificial Sequence: Synthetic peptide
  XENP019542 vlCDR1
RASQSVGSSYLA

SEQ ID NO: 109 - protein, 7 aa, Artificial Sequence
  Description of Artificial Sequence: Synthetic peptide
  XENP019542 vlCDR2
GAFSRAT

SEQ ID NO: 110 - protein, 9 aa, Artificial Sequence
  Description of Artificial Sequence: Synthetic peptide
  XENP019542 vlCDR3
QQYGSSPWT

SEQ ID NO: 111 - protein, 246 aa, Artificial Sequence
  Description of Artificial Sequence: Synthetic polypeptide
  XENP019543 [CTLA-4]_H0.139_L0.116_scFv(GKPGS)4
QVQLVESGGGVVQPGRSLRLSCAASGFTFSSYTMHWVRQAPGKGLEWVTFISYDGNNKYYADSVKGRFTISRDNSKNTLYLQMNSLRAEDTAIYYCARTGWLGPFDYWGCGTLVTVSSGKPGSGKPGSGKPGSGKPGSEIVLTQSPGTLSLSPGERATLSCRASQSVGSSYLAWYQQKPGCAPRLLIYGAFSRATGIPDRFSGSGSGTDFTLTISRLEPEDFAVYYCQQYGSSPWTFGQGTKVEIK

SEQ ID NO: 112 - protein, 118 aa, Artificial Sequence; identical to SEQ ID NO: 103
  Description of Artificial Sequence: Synthetic polypeptide
  VH of XENP019543

SEQ ID NO: 113 - protein, 108 aa, Artificial Sequence
  Description of Artificial Sequence: Synthetic polypeptide
  VL of XENP019543
EIVLTQSPGTLSLSPGERATLSCRASQSVGSSYLAWYQQKPGCAPRLLIYGAFSRATGIPDRFSGSGSGTDFTLTISRLEPEDFAVYYCQQYGSSPWTFGQGTKVEIK

SEQ ID NO: 114 - protein, 5 aa, Artificial Sequence
  Description of Artificial Sequence: Synthetic peptide
  XENP019543 vhCDR1
SYTMH

SEQ ID NO: 115 - protein, 17 aa, Artificial Sequence
  Description of Artificial Sequence: Synthetic peptide
  XENP019543 vhCDR2
FISYDGNNKYYADSVKG

SEQ ID NO: 116 - protein, 9 aa, Artificial Sequence
  Description of Artificial Sequence: Synthetic peptide
  XENP019543 vhCDR3
TGWLGPFDY

SEQ ID NO: 117 - protein, 12 aa, Artificial Sequence
  Description of Artificial Sequence: Synthetic peptide
  XENP019543 vlCDR1
RASQSVGSSYLA

SEQ ID NO: 118 - protein, 7 aa, Artificial Sequence
  Description of Artificial Sequence: Synthetic peptide
  XENP019543 vlCDR2
GAFSRAT

SEQ ID NO: 119 - protein, 9 aa, Artificial Sequence
  Description of Artificial Sequence: Synthetic peptide
  XENP019543 vlCDR3
QQYGSSPWT

SEQ ID NO: 120 - protein, 246 aa, Artificial Sequence
  Description of Artificial Sequence: Synthetic polypeptide
  XENP019551 [CTLA-4]_H1_L0_scFv(GKPGS)4
EVQLVESGGGLVQPGGSLRLSCAASGFTFSSYTMHWVRQAPGKGLEWVTFISYDGNNKYYVDSVKGRFTISRDNAKNSLYLQMNSLRAEDTAVYYCARTGWLGPFDYWGQGTLVTVSSGKPGSGKPGSGKPGSGKPGSEIVLTQSPGTLSLSPGERATLSCRASQSVGSSYLAWYQQKPGQAPRLLIYGAFSRATGIPDRFSGSGSGTDFTLTISRLEPEDFAVYYCQQYGSSPWTFGQGTKVEIK

SEQ ID NO: 121 - protein, 118 aa, Artificial Sequence
  Description of Artificial Sequence: Synthetic polypeptide
  VH of XENP019551
EVQLVESGGGLVQPGGSLRLSCAASGFTFSSYTMHWVRQAPGKGLEWVTFISYDGNNKYYVDSVKGRFTISRDNAKNSLYLQMNSLRAEDTAVYYCARTGWLGPFDYWGQGTLVTVSS

SEQ ID NO: 122 - protein, 108 aa, Artificial Sequence; identical to SEQ ID NO: 23
  Description of Artificial Sequence: Synthetic polypeptide
  VL of XENP019551

SEQ ID NO: 123 - protein, 5 aa, Artificial Sequence
  Description of Artificial Sequence: Synthetic peptide
  XENP019551 vhCDR1
SYTMH

SEQ ID NO: 124 - protein, 17 aa, Artificial Sequence
  Description of Artificial Sequence: Synthetic peptide
  XENP019551 vhCDR2
FISYDGNNKYYVDSVKG

SEQ ID NO: 125 - protein, 9 aa, Artificial Sequence
  Description of Artificial Sequence: Synthetic peptide
  XENP019551 vhCDR3
TGWLGPFDY

SEQ ID NO: 126 - protein, 12 aa, Artificial Sequence
  Description of Artificial Sequence: Synthetic peptide
  XENP019551 vlCDR1
RASQSVGSSYLA

SEQ ID NO: 127 - protein, 7 aa, Artificial Sequence
  Description of Artificial Sequence: Synthetic peptide
  XENP019551 vlCDR2
GAFSRAT

SEQ ID NO: 128 - protein, 9 aa, Artificial Sequence
  Description of Artificial Sequence: Synthetic peptide
  XENP019551 vlCDR3
QQYGSSPWT

SEQ ID NO: 129 - protein, 246 aa, Artificial Sequence
  Description of Artificial Sequence: Synthetic polypeptide
  XENP019552 [CTLA-4]_H2_L0_scFv(GKPGS)4
EVQLVESGGGLVQPGGSLRLSCAASGFTFSSYTMHWVRQAPGKGLEWVTFISYDGNNKYYPGSVKGRFTISRENAKNSLYLQMNSLRAGDTAVYYCARTGWLGPFDYWGQGTLVTVSSGKPGSGKPGSGKPGSGKPGSEIVLTQSPGTLSLSPGERATLSCRASQSVGSSYLAWYQQKPGQAPRLLIYGAFSRATGIPDRFSGSGSGTDFTLTISRLEPEDFAVYYCQQYGSSPWTFGQGTKVEIK

SEQ ID NO: 130 - protein, 118 aa, Artificial Sequence
  Description of Artificial Sequence: Synthetic polypeptide
  VH of XENP019552
EVQLVESGGGLVQPGGSLRLSCAASGFTFSSYTMHWVRQAPGKGLEWVTFISYDGNNKYYPGSVKGRFTISRENAKNSLYLQMNSLRAGDTAVYYCARTGWLGPFDYWGQGTLVTVSS

SEQ ID NO: 131 - protein, 108 aa, Artificial Sequence; identical to SEQ ID NO: 23
  Description of Artificial Sequence: Synthetic polypeptide
  VL of XENP019552

SEQ ID NO: 132 - protein, 5 aa, Artificial Sequence
  Description of Artificial Sequence: Synthetic peptide
  XENP019552 vhCDR1
SYTMH

SEQ ID NO: 133 - protein, 17 aa, Artificial Sequence
  Description of Artificial Sequence: Synthetic peptide
  XENP019552 vhCDR2
FISYDGNNKYYPGSVKG

SEQ ID NO: 134 - protein, 9 aa, Artificial Sequence
  Description of Artificial Sequence: Synthetic peptide
  XENP019552 vhCDR3
TGWLGPFDY

SEQ ID NO: 135 - protein, 12 aa, Artificial Sequence
  Description of Artificial Sequence: Synthetic peptide
  XENP019552 vlCDR1
RASQSVGSSYLA

SEQ ID NO: 136 - protein, 7 aa, Artificial Sequence
  Description of Artificial Sequence: Synthetic peptide
  XENP019552 vlCDR2
GAFSRAT

SEQ ID NO: 137 - protein, 9 aa, Artificial Sequence
  Description of Artificial Sequence: Synthetic peptide
  XENP019552 vlCDR3
QQYGSSPWT

SEQ ID NO: 138 - protein, 246 aa, Artificial Sequence
  Description of Artificial Sequence: Synthetic polypeptide
  XENP019553 [CTLA-4]_H3_L0_scFv(GKPGS)4
EVQLVESGGGLVKPGGSLRLSCAASGFTFSSYTMHWVRQAPGKGLEWVSFISYDGNNKYYADSVKGRFTISRDNAKNSLYLQMNSLRAEDTAVYYCARTGWLGPFDYWGQGTLVTVSSGKPGSGKPGSGKPGSGKPGSEIVLTQSPGTLSLSPGERATLSCRASQSVGSSYLAWYQQKPGQAPRLLIYGAFSRATGIPDRFSGSGSGTDFTLTISRLEPEDFAVYYCQQYGSSPWTFGQGTKVEIK

SEQ ID NO: 139 - protein, 118 aa, Artificial Sequence
  Description of Artificial Sequence: Synthetic polypeptide
  VH of XENP019553
EVQLVESGGGLVKPGGSLRLSCAASGFTFSSYTMHWVRQAPGKGLEWVSFISYDGNNKYYADSVKGRFTISRDNAKNSLYLQMNSLRAEDTAVYYCARTGWLGPFDYWGQGTLVTVSS

SEQ ID NO: 140 - protein, 108 aa, Artificial Sequence; identical to SEQ ID NO: 23
  Description of Artificial Sequence: Synthetic polypeptide
  VL of XENP019553

SEQ ID NO: 141 - protein, 5 aa, Artificial Sequence
  Description of Artificial Sequence: Synthetic peptide
  XENP019553 vhCDR1
SYTMH

SEQ ID NO: 142 - protein, 17 aa, Artificial Sequence
  Description of Artificial Sequence: Synthetic peptide
  XENP019553 vhCDR2
FISYDGNNKYYADSVKG

SEQ ID NO: 143 - protein, 9 aa, Artificial Sequence
  Description of Artificial Sequence: Synthetic peptide
  XENP019553 vhCDR3
TGWLGPFDY

SEQ ID NO: 144 - protein, 12 aa, Artificial Sequence
  Description of Artificial Sequence: Synthetic peptide
  XENP019553 vlCDR1
RASQSVGSSYLA

SEQ ID NO: 145 - protein, 7 aa, Artificial Sequence
  Description of Artificial Sequence: Synthetic peptide
  XENP019553 vlCDR2
GAFSRAT

SEQ ID NO: 146 - protein, 9 aa, Artificial Sequence
  Description of Artificial Sequence: Synthetic peptide
  XENP019553 vlCDR3
QQYGSSPWT

SEQ ID NO: 147 - protein, 246 aa, Artificial Sequence
  Description of Artificial Sequence: Synthetic polypeptide
  XENP019554 [CTLA-4]_H4_L0_scFv(GKPGS)4
EVQLVESGGGLVQPGGSLRLSCAASGFTFSSYTMHWVRQAPGKGLEYVTFISYDGNNKYYADSVKGRFTISRDNSKNTLYLQMGSLRAEDMAVYYCARTGWLGPFDYWGQGTLVTVSSGKPGSGKPGSGKPGSGKPGSEIVLTQSPGTLSLSPGERATLSCRASQSVGSSYLAWYQQKPGQAPRLLIYGAFSRATGIPDRFSGSGSGTDFTLTISRLEPEDFAVYYCQQYGSSPWTFGQGTKVEIK

SEQ ID NO: 148 - protein, 118 aa, Artificial Sequence
  Description of Artificial Sequence: Synthetic polypeptide
  VH of XENP019554
EVQLVESGGGLVQPGGSLRLSCAASGFTFSSYTMHWVRQAPGKGLEYVTFISYDGNNKYYADSVKGRFTISRDNSKNTLYLQMGSLRAEDMAVYYCARTGWLGPFDYWGQGTLVTVSS

SEQ ID NO: 149 - protein, 108 aa, Artificial Sequence; identical to SEQ ID NO: 23
  Description of Artificial Sequence: Synthetic polypeptide
  VL of XENP019554

SEQ ID NO: 150 - protein, 5 aa, Artificial Sequence
  Description of Artificial Sequence: Synthetic peptide
  XENP019554 vhCDR1
SYTMH

SEQ ID NO: 151 - protein, 17 aa, Artificial Sequence
  Description of Artificial Sequence: Synthetic peptide
  XENP019554 vhCDR2
FISYDGNNKYYADSVKG

SEQ ID NO: 152 - protein, 9 aa, Artificial Sequence
  Description of Artificial Sequence: Synthetic peptide
  XENP019554 vhCDR3
TGWLGPFDY

SEQ ID NO: 153 - protein, 12 aa, Artificial Sequence
  Description of Artificial Sequence: Synthetic peptide
  XENP019554 vlCDR1
RASQSVGSSYLA

SEQ ID NO: 154 - protein, 7 aa, Artificial Sequence
  Description of Artificial Sequence: Synthetic peptide
  XENP019554 vlCDR2
GAFSRAT

SEQ ID NO: 155 - protein, 9 aa, Artificial Sequence
  Description of Artificial Sequence: Synthetic peptide
  XENP019554 vlCDR3
QQYGSSPWT

SEQ ID NO: 156 - protein, 246 aa, Artificial Sequence
  Description of Artificial Sequence: Synthetic polypeptide
  XENP019555 [CTLA-4]_H0_L1_scFv(GKPGS)4
QVQLVESGGGVVQPGRSLRLSCAASGFTFSSYTMHWVRQAPGKGLEWVTFISYDGNNKYYADSVKGRFTISRDNSKNTLYLQMNSLRAEDTAIYYCARTGWLGPFDYWGQGTLVTVSSGKPGSGKPGSGKPGSGKPGSEIVLTQSPATLSLSPGERATLSCGASQSVGSSYLAWYQQKPGLAPRLLIYGAFSRATGIPDRFSGSGSGTDFTLTISRLEPEDFAVYYCQQYGSSPWTFGQGTKVEIK

SEQ ID NO: 157 - protein, 118 aa, Artificial Sequence; identical to SEQ ID NO: 22
  Description of Artificial Sequence: Synthetic polypeptide
  VH of XENP019555

SEQ ID NO: 158 - protein, 108 aa, Artificial Sequence
  Description of Artificial Sequence: Synthetic polypeptide
  VL of XENP019555
EIVLTQSPATLSLSPGERATLSCGASQSVGSSYLAWYQQKPGLAPRLLIYGAFSRATGIPDRFSGSGSGTDFTLTISRLEPEDFAVYYCQQYGSSPWTFGQGTKVEIK

SEQ ID NO: 159 - protein, 5 aa, Artificial Sequence
  Description of Artificial Sequence: Synthetic peptide
  XENP019555 vhCDR1
SYTMH

SEQ ID NO: 160 - protein, 17 aa, Artificial Sequence
  Description of Artificial Sequence: Synthetic peptide
  XENP019555 vhCDR2
FISYDGNNKYYADSVKG

SEQ ID NO: 161 - protein, 9 aa, Artificial Sequence
  Description of Artificial Sequence: Synthetic peptide
  XENP019555 vhCDR3
TGWLGPFDY

SEQ ID NO: 162 - protein, 12 aa, Artificial Sequence
  Description of Artificial Sequence: Synthetic peptide
  XENP019555 vlCDR1
GASQSVGSSYLA

SEQ ID NO: 163 - protein, 7 aa, Artificial Sequence
  Description of Artificial Sequence: Synthetic peptide
  XENP019555 vlCDR2
GAFSRAT

SEQ ID NO: 164 - protein, 9 aa, Artificial Sequence
  Description of Artificial Sequence: Synthetic peptide
  XENP019555 vlCDR3
QQYGSSPWT

SEQ ID NO: 165 - protein, 246 aa, Artificial Sequence
  Description of Artificial Sequence: Synthetic polypeptide
  XENP019556 [CTLA-4]_H0_L2_scFv(GKPGS)4
QVQLVESGGGVVQPGRSLRLSCAASGFTFSSYTMHWVRQAPGKGLEWVTFISYDGNNKYYADSVKGRFTISRDNSKNTLYLQMNSLRAEDTAIYYCARTGWLGPFDYWGQGTLVTVSSGKPGSGKPGSGKPGSGKPGSEIVMTQSPATLSVSPGERATLSCRASQSVGSSYLAWYQQKPGQAPRLLIYGAFSRATGIPARFSGSGSGTEFTLTISSLQSEDFAVYYCQQYGSSPWTFGQGTKVEIK

SEQ ID NO: 166 - protein, 118 aa, Artificial Sequence; identical to SEQ ID NO: 22
  Description of Artificial Sequence: Synthetic polypeptide
  VH of XENP019556

SEQ ID NO: 167 - protein, 108 aa, Artificial Sequence
  Description of Artificial Sequence: Synthetic polypeptide
  VL of XENP019556
EIVMTQSPATLSVSPGERATLSCRASQSVGSSYLAWYQQKPGQAPRLLIYGAFSRATGIPARFSGSGSGTEFTLTISSLQSEDFAVYYCQQYGSSPWTFGQGTKVEIK

SEQ ID NO: 168 - protein, 5 aa, Artificial Sequence
  Description of Artificial Sequence: Synthetic peptide
  XENP019556 vhCDR1
SYTMH

SEQ ID NO: 169 - protein, 17 aa, Artificial Sequence
  Description of Artificial Sequence: Synthetic peptide
  XENP019556 vhCDR2
FISYDGNNKYYADSVKG

SEQ ID NO: 170 - protein, 9 aa, Artificial Sequence
  Description of Artificial Sequence: Synthetic peptide
  XENP019556 vhCDR3
TGWLGPFDY

SEQ ID NO: 171 - protein, 12 aa, Artificial Sequence
  Description of Artificial Sequence: Synthetic peptide
  XENP019556 vlCDR1
RASQSVGSSYLA

SEQ ID NO: 172 - protein, 7 aa, Artificial Sequence
  Description of Artificial Sequence: Synthetic peptide
  XENP019556 vlCDR2
GAFSRAT

SEQ ID NO: 173 - protein, 9 aa, Artificial Sequence
  Description of Artificial Sequence: Synthetic peptide
  XENP019556 vlCDR3
QQYGSSPWT

SEQ ID NO: 174 - protein, 246 aa, Artificial Sequence
  Description of Artificial Sequence: Synthetic polypeptide
  XENP019587 [CTLA-4]_H0.140_L0_scFv(GKPGS)4
QVQLVESGGGVVQPGRSLRLSCAASGFTFSSYTMHWVRQAPGKGLEWVCFISYDGNNKYYADSVKGRFTCSRDNSKNTLYLQMNSLRAEDTAIYYCARTGWLGPFDYWGQGTLVTVSSGKPGSGKPGSGKPGSGKPGSEIVLTQSPGTLSLSPGERATLSCRASQSVGSSYLAWYQQKPGQAPRLLIYGAFSRATGIPDRFSGSGSGTDFTLTISRLEPEDFAVYYCQQYGSSPWTFGQGTKVEIK

SEQ ID NO: 175 - protein, 118 aa, Artificial Sequence
  Description of Artificial Sequence: Synthetic polypeptide
  VH of XENP019587
QVQLVESGGGVVQPGRSLRLSCAASGFTFSSYTMHWVRQAPGKGLEWVCFISYDGNNKYYADSVKGRFTCSRDNSKNTLYLQMNSLRAEDTAIYYCARTGWLGPFDYWGQGTLVTVSS

SEQ ID NO: 176 - protein, 108 aa, Artificial Sequence; identical to SEQ ID NO: 23
  Description of Artificial Sequence: Synthetic polypeptide
  VL of XENP019587

SEQ ID NO: 177 - protein, 5 aa, Artificial Sequence
  Description of Artificial Sequence: Synthetic peptide
  XENP019587 vhCDR1
SYTMH

SEQ ID NO: 178 - protein, 17 aa, Artificial Sequence
  Description of Artificial Sequence: Synthetic peptide
  XENP019587 vhCDR2
FISYDGNNKYYADSVKG

SEQ ID NO: 179 - protein, 9 aa, Artificial Sequence
  Description of Artificial Sequence: Synthetic peptide
  XENP019587 vhCDR3
TGWLGPFDY

SEQ ID NO: 180 - protein, 12 aa, Artificial Sequence
  Description of Artificial Sequence: Synthetic peptide
  XENP019587 vlCDR1
RASQSVGSSYLA

SEQ ID NO: 181 - protein, 7 aa, Artificial Sequence
  Description of Artificial Sequence: Synthetic peptide
  XENP019587 vlCDR2
GAFSRAT

SEQ ID NO: 182 - protein, 9 aa, Artificial Sequence
  Description of Artificial Sequence: Synthetic peptide
  XENP019587 vlCDR3
QQYGSSPWT

SEQ ID NO: 183 - protein, 246 aa, Artificial Sequence
  Description of Artificial Sequence: Synthetic polypeptide
  XENP019588 [CTLA-4]_H0_L0.117_scFv(GKPGS)4
QVQLVESGGGVVQPGRSLRLSCAASGFTFSSYTMHWVRQAPGKGLEWVTFISYDGNNKYYADSVKGRFTISRDNSKNTLYLQMNSLRAEDTAIYYCARTGWLGPFDYWGQGTLVTVSSGKPGSGKPGSGKPGSGKPGSEIVLTQSPGTLSLSPGERATLSCRASQSVGSSYLAWYQQKPGQAPRLLCYGAFSRATGIPDRFSCSGSGTDFTLTISRLEPEDFAVYYCQQYGSSPWTFGQGTKVEIK

SEQ ID NO: 184 - protein, 118 aa, Artificial Sequence; identical to SEQ ID NO: 22
  Description of Artificial Sequence: Synthetic polypeptide
  VH of XENP019588

SEQ ID NO: 185 - protein, 108 aa, Artificial Sequence
  Description of Artificial Sequence: Synthetic polypeptide
  VL of XENP019588
EIVLTQSPGTLSLSPGERATLSCRASQSVGSSYLAWYQQKPGQAPRLLCYGAFSRATGIPDRFSCSGSGTDFTLTISRLEPEDFAVYYCQQYGSSPWTFGQGTKVEIK

SEQ ID NO: 186 - protein, 5 aa, Artificial Sequence
  Description of Artificial Sequence: Synthetic peptide
  XENP019588 vhCDR1
SYTMH

SEQ ID NO: 187 - protein, 17 aa, Artificial Sequence
  Description of Artificial Sequence: Synthetic peptide
  XENP019588 vhCDR2
FISYDGNNKYYADSVKG

SEQ ID NO: 188 - protein, 9 aa, Artificial Sequence
  Description of Artificial Sequence: Synthetic peptide
  XENP019588 vhCDR3
TGWLGPFDY

SEQ ID NO: 189 - protein, 12 aa, Artificial Sequence
  Description of Artificial Sequence: Synthetic peptide
  XENP019588 vlCDR1
RASQSVGSSYLA

SEQ ID NO: 190 - protein, 7 aa, Artificial Sequence
  Description of Artificial Sequence: Synthetic peptide
  XENP019588 vlCDR2
GAFSRAT

SEQ ID NO: 191 - protein, 9 aa, Artificial Sequence
  Description of Artificial Sequence: Synthetic peptide
  XENP019588 vlCDR3
QQYGSSPWT

SEQ ID NO: 192 - protein, 246 aa, Artificial Sequence
  Description of Artificial Sequence: Synthetic polypeptide
  XENP019745 [CTLA-4]_H0.1_L0_scFv(GKPGS)4
EVQLVESGGGVVQPGRSLRLSCAASGFTFSSYTMHWVRQAPGKGLEWVTFISYDGNNKYYADSVKGRFTISRDNSKNTLYLQMNSLRAEDTAIYYCARTGWLGPFDYWGQGTLVTVSSGKPGSGKPGSGKPGSGKPGSEIVLTQSPGTLSLSPGERATLSCRASQSVGSSYLAWYQQKPGQAPRLLIYGAFSRATGIPDRFSGSGSGTDFTLTISRLEPEDFAVYYCQQYGSSPWTFGQGTKVEIK

SEQ ID NO: 193 - protein, 118 aa, Artificial Sequence
  Description of Artificial Sequence: Synthetic polypeptide
  VH of XENP019745
EVQLVESGGGVVQPGRSLRLSCAASGFTFSSYTMHWVRQAPGKGLEWVTFISYDGNNKYYADSVKGRFTISRDNSKNTLYLQMNSLRAEDTAIYYCARTGWLGPFDYWGQGTLVTVSS

SEQ ID NO: 194 - protein, 108 aa, Artificial Sequence; identical to SEQ ID NO: 23
  Description of Artificial Sequence: Synthetic polypeptide
  VL of XENP019745

SEQ ID NO: 195 - protein, 5 aa, Artificial Sequence
  Description of Artificial Sequence: Synthetic peptide
  XENP019745 vhCDR1
SYTMH

SEQ ID NO: 196 - protein, 17 aa, Artificial Sequence
  Description of Artificial Sequence: Synthetic peptide
  XENP019745 vhCDR2
FISYDGNNKYYADSVKG

SEQ ID NO: 197 - protein, 9 aa, Artificial Sequence
  Description of Artificial Sequence: Synthetic peptide
  XENP019745 vhCDR3
TGWLGPFDY

SEQ ID NO: 198 - protein, 12 aa, Artificial Sequence
  Description of Artificial Sequence: Synthetic peptide
  XENP019745 vlCDR1
RASQSVGSSYLA

SEQ ID NO: 199 - protein, 7 aa, Artificial Sequence
  Description of Artificial Sequence: Synthetic peptide
  XENP019745 vlCDR2
GAFSRAT

SEQ ID NO: 200 - protein, 9 aa, Artificial Sequence
  Description of Artificial Sequence: Synthetic peptide
  XENP019745 vlCDR3
QQYGSSPWT

SEQ ID NO: 201 - protein, 246 aa, Artificial Sequence
  Description of Artificial Sequence: Synthetic polypeptide
  XENP019746 [CTLA-4]_H0.2_L0_scFv(GKPGS)4
QVQLLESGGGVVQPGRSLRLSCAASGFTFSSYTMHWVRQAPGKGLEWVTFISYDGNNKYYADSVKGRFTISRDNSKNTLYLQMNSLRAEDTAIYYCARTGWLGPFDYWGQGTLVTVSSGKPGSGKPGSGKPGSGKPGSEIVLTQSPGTLSLSPGERATLSCRASQSVGSSYLAWYQQKPGQAPRLLIYGAFSRATGIPDRFSGSGSGTDFTLTISRLEPEDFAVYYCQQYGSSPWTFGQGTKVEIK

SEQ ID NO: 202 - protein, 118 aa, Artificial Sequence
  Description of Artificial Sequence: Synthetic polypeptide
  VH of XENP019746
QVQLLESGGGVVQPGRSLRLSCAASGFTFSSYTMHWVRQAPGKGLEWVTFISYDGNNKYYADSVKGRFTISRDNSKNTLYLQMNSLRAEDTAIYYCARTGWLGPFDYWGQGTLVTVSS

SEQ ID NO: 203 - protein, 108 aa, Artificial Sequence; identical to SEQ ID NO: 23
  Description of Artificial Sequence: Synthetic polypeptide
  VL of XENP019746

SEQ ID NO: 204 - protein, 5 aa, Artificial Sequence
  Description of Artificial Sequence: Synthetic peptide
  XENP019746 vhCDR1
SYTMH

SEQ ID NO: 205 - protein, 17 aa, Artificial Sequence
  Description of Artificial Sequence: Synthetic peptide
  XENP019746 vhCDR2
FISYDGNNKYYADSVKG

SEQ ID NO: 206 - protein, 9 aa, Artificial Sequence
  Description of Artificial Sequence: Synthetic peptide
  XENP019746 vhCDR3
TGWLGPFDY

SEQ ID NO: 207 - protein, 12 aa, Artificial Sequence
  Description of Artificial Sequence: Synthetic peptide
  XENP019746 vlCDR1
RASQSVGSSYLA

SEQ ID NO: 208 - protein, 7 aa, Artificial Sequence
  Description of Artificial Sequence: Synthetic peptide
  XENP019746 vlCDR2
GAFSRAT

SEQ ID NO: 209 - protein, 9 aa, Artificial Sequence
  Description of Artificial Sequence: Synthetic peptide
  XENP019746 vlCDR3
QQYGSSPWT

SEQ ID NO: 210 - protein, 246 aa, Artificial Sequence
  Description of Artificial Sequence: Synthetic polypeptide
  XENP019747 [CTLA-4]_H0.3_L0_scFv(GKPGS)4
QVQLVESGGGLVQPGRSLRLSCAASGFTFSSYTMHWVRQAPGKGLEWVTFISYDGNNKYYADSVKGRFTISRDNSKNTLYLQMNSLRAEDTAIYYCARTGWLGPFDYWGQGTLVTVSSGKPGSGKPGSGKPGSGKPGSEIVLTQSPGTLSLSPGERATLSCRASQSVGSSYLAWYQQKPGQAPRLLIYGAFSRATGIPDRFSGSGSGTDFTLTISRLEPEDFAVYYCQQYGSSPWTFGQGTKVEIK

SEQ ID NO: 211 - protein, 118 aa, Artificial Sequence
  Description of Artificial Sequence: Synthetic polypeptide
  VH of XENP019747
QVQLVESGGGLVQPGRSLRLSCAASGFTFSSYTMHWVRQAPGKGLEWVTFISYDGNNKYYADSVKGRFTISRDNSKNTLYLQMNSLRAEDTAIYYCARTGWLGPFDYWGQGTLVTVSS

SEQ ID NO: 212 - protein, 108 aa, Artificial Sequence; identical to SEQ ID NO: 23
  Description of Artificial Sequence: Synthetic polypeptide
  VL of XENP019747

SEQ ID NO: 213 - protein, 5 aa, Artificial Sequence
  Description of Artificial Sequence: Synthetic peptide
  XENP019747 vhCDR1
SYTMH

SEQ ID NO: 214 - protein, 17 aa, Artificial Sequence
  Description of Artificial Sequence: Synthetic peptide
  XENP019747 vhCDR2
FISYDGNNKYYADSVKG

SEQ ID NO: 215 - protein, 9 aa, Artificial Sequence
  Description of Artificial Sequence: Synthetic peptide
  XENP019747 vhCDR3
TGWLGPFDY

SEQ ID NO: 216 - protein, 12 aa, Artificial Sequence
  Description of Artificial Sequence: Synthetic peptide
  XENP019747 vlCDR1
RASQSVGSSYLA

SEQ ID NO: 217 - protein, 7 aa, Artificial Sequence
  Description of Artificial Sequence: Synthetic peptide
  XENP019747 vlCDR2
GAFSRAT

SEQ ID NO: 218 - protein, 9 aa, Artificial Sequence
  Description of Artificial Sequence: Synthetic peptide
  XENP019747 vlCDR3
QQYGSSPWT

SEQ ID NO: 219 - protein, 246 aa, Artificial Sequence
  Description of Artificial Sequence: Synthetic polypeptide
  XENP019748 [CTLA-4]_H0.4_L0_scFv(GKPGS)4
QVQLVESGGGVKQPGRSLRLSCAASGFTFSSYTMHWVRQAPGKGLEWVTFISYDGNNKYYADSVKGRFTISRDNSKNTLYLQMNSLRAEDTAIYYCARTGWLGPFDYWGQGTLVTVSSGKPGSGKPGSGKPGSGKPGSEIVLTQSPGTLSLSPGERATLSCRASQSVGSSYLAWYQQKPGQAPRLLIYGAFSRATGIPDRFSGSGSGTDFTLTISRLEPEDFAVYYCQQYGSSPWTFGQGTKVEIK

SEQ ID NO: 220 - protein, 118 aa, Artificial Sequence
  Description of Artificial Sequence: Synthetic polypeptide
  VH of XENP019748
QVQLVESGGGVKQPGRSLRLSCAASGFTFSSYTMHWVRQAPGKGLEWVTFISYDGNNKYYADSVKGRFTISRDNSKNTLYLQMNSLRAEDTAIYYCARTGWLGPFDYWGQGTLVTVSS

SEQ ID NO: 221 - protein, 108 aa, Artificial Sequence; identical to SEQ ID NO: 23
  Description of Artificial Sequence: Synthetic polypeptide
  VL of XENP019748

SEQ ID NO: 222 - protein, 5 aa, Artificial Sequence
  Description of Artificial Sequence: Synthetic peptide
  XENP019748 vhCDR1
SYTMH

SEQ ID NO: 223 - protein, 17 aa, Artificial Sequence
  Description of Artificial Sequence: Synthetic peptide
  XENP019748 vhCDR2
FISYDGNNKYYADSVKG

SEQ ID NO: 224 - protein, 9 aa, Artificial Sequence
  Description of Artificial Sequence: Synthetic peptide
  XENP019748 vhCDR3
TGWLGPFDY

SEQ ID NO: 225 - protein, 12 aa, Artificial Sequence
  Description of Artificial Sequence: Synthetic peptide
  XENP019748 vlCDR1
RASQSVGSSYLA

SEQ ID NO: 226 - protein, 7 aa, Artificial Sequence
  Description of Artificial Sequence: Synthetic peptide
  XENP019748 vlCDR2
GAFSRAT

SEQ ID NO: 227 - protein, 9 aa, Artificial Sequence
  Description of Artificial Sequence: Synthetic peptide
  XENP019748 vlCDR3
QQYGSSPWT

SEQ ID NO: 228 - protein, 246 aa, Artificial Sequence
  Description of Artificial Sequence: Synthetic polypeptide
  XENP019749 [CTLA-4]_H0.5_L0_scFv(GKPGS)4
QVQLVESGGGVKQPGESLRLSCAASGFTFSSYTMHWVRQAPGKGLEWVTFISYDGNNKYYADSVKGRFTISRDNSKNTLYLQMNSLRAEDTAIYYCARTGWLGPFDYWGQGTLVTVSSGKPGSGKPGSGKPGSGKPGSEIVLTQSPGTLSLSPGERATLSCRASQSVGSSYLAWYQQKPGQAPRLLIYGAFSRATGIPDRFSGSGSGTDFTLTISRLEPEDFAVYYCQQYGSSPWTFGQGTKVEIK

SEQ ID NO: 229 - protein, 118 aa, Artificial Sequence
  Description of Artificial Sequence: Synthetic polypeptide
  VH of XENP019749
QVQLVESGGGVKQPGESLRLSCAASGFTFSSYTMHWVRQAPGKGLEWVTFISYDGNNKYYADSVKGRFTISRDNSKNTLYLQMNSLRAEDTAIYYCARTGWLGPFDYWGQGTLVTVSS

SEQ ID NO: 230 - protein, 108 aa, Artificial Sequence; identical to SEQ ID NO: 23
  Description of Artificial Sequence: Synthetic polypeptide
  VL of XENP019749

SEQ ID NO: 231 - protein, 5 aa, Artificial Sequence
  Description of Artificial Sequence: Synthetic peptide
  XENP019749 vhCDR1
SYTMH

SEQ ID NO: 232 - protein, 17 aa, Artificial Sequence
  Description of Artificial Sequence: Synthetic peptide
  XENP019749 vhCDR2
FISYDGNNKYYADSVKG

SEQ ID NO: 233 - protein, 9 aa, Artificial Sequence
  Description of Artificial Sequence: Synthetic peptide
  XENP019749 vhCDR3
TGWLGPFDY

SEQ ID NO: 234 - protein, 12 aa, Artificial Sequence
  Description of Artificial Sequence: Synthetic peptide
  XENP019749 vlCDR1
RASQSVGSSYLA

SEQ ID NO: 235 - protein, 7 aa, Artificial Sequence
  Description of Artificial Sequence: Synthetic peptide
  XENP019749 vlCDR2
GAFSRAT

SEQ ID NO: 236 - protein, 9 aa, Artificial Sequence
  Description of Artificial Sequence: Synthetic peptide
  XENP019749 vlCDR3
QQYGSSPWT

SEQ ID NO: 237 - protein, 246 aa, Artificial Sequence
  Description of Artificial Sequence: Synthetic polypeptide
  XENP019750 [CTLA-4]_H0.6_L0_scFv(GKPGS)4
QVQLVESGGGVVKPGRSLRLSCAASGFTFSSYTMHWVRQAPGKGLEWVTFISYDGNNKYYADSVKGRFTISRDNSKNTLYLQMNSLRAEDTAIYYCARTGWLGPFDYWGQGTLVTVSSGKPGSGKPGSGKPGSGKPGSEIVLTQSPGTLSLSPGERATLSCRASQSVGSSYLAWYQQKPGQAPRLLIYGAFSRATGIPDRFSGSGSGTDFTLTISRLEPEDFAVYYCQQYGSSPWTFGQGTKVEIK

SEQ ID NO: 238 - protein, 118 aa, Artificial Sequence
  Description of Artificial Sequence: Synthetic polypeptide
  VH of XENP019750
QVQLVESGGGVVKPGRSLRLSCAASGFTFSSYTMHWVRQAPGKGLEWVTFISYDGNNKYYADSVKGRFTISRDNSKNTLYLQMNSLRAEDTAIYYCARTGWLGPFDYWGQGTLVTVSS

SEQ ID NO: 239 - protein, 108 aa, Artificial Sequence; identical to SEQ ID NO: 23
  Description of Artificial Sequence: Synthetic polypeptide
  VL of XENP019750

SEQ ID NO: 240 - protein, 5 aa, Artificial Sequence
  Description of Artificial Sequence: Synthetic peptide
  XENP019750 vhCDR1
SYTMH

SEQ ID NO: 241 - protein, 17 aa, Artificial Sequence
  Description of Artificial Sequence: Synthetic peptide
  XENP019750 vhCDR2
FISYDGNNKYYADSVKG

SEQ ID NO: 242 - protein, 9 aa, Artificial Sequence
  Description of Artificial Sequence: Synthetic peptide
  XENP019750 vhCDR3
TGWLGPFDY

SEQ ID NO: 243 - protein, 12 aa, Artificial Sequence
  Description of Artificial Sequence: Synthetic peptide
  XENP019750 vlCDR1
RASQSVGSSYLA

SEQ ID NO: 244 - protein, 7 aa, Artificial Sequence
  Description of Artificial Sequence: Synthetic peptide
  XENP019750 vlCDR2
GAFSRAT

SEQ ID NO: 245 - protein, 9 aa, Artificial Sequence
  Description of Artificial Sequence: Synthetic peptide
  XENP019750 vlCDR3
QQYGSSPWT

SEQ ID NO: 246 - protein, 246 aa, Artificial Sequence
  Description of Artificial Sequence: Synthetic polypeptide
  XENP019751 [CTLA-4]_H0.7_L0_scFv(GKPGS)4
QVQLVESGGGVVEPGRSLRLSCAASGFTFSSYTMHWVRQAPGKGLEWVTFISYDGNNKYYADSVKGRFTISRDNSKNTLYLQMNSLRAEDTAIYYCARTGWLGPFDYWGQGTLVTVSSGKPGSGKPGSGKPGSGKPGSEIVLTQSPGTLSLSPGERATLSCRASQSVGSSYLAWYQQKPGQAPRLLIYGAFSRATGIPDRFSGSGSGTDFTLTISRLEPEDFAVYYCQQYGSSPWTFGQGTKVEIK

SEQ ID NO: 247 - protein, 118 aa, Artificial Sequence
  Description of Artificial Sequence: Synthetic polypeptide
  VH of XENP019751
QVQLVESGGGVVEPGRSLRLSCAASGFTFSSYTMHWVRQAPGKGLEWVTFISYDGNNKYYADSVKGRFTISRDNSKNTLYLQMNSLRAEDTAIYYCARTGWLGPFDYWGQGTLVTVSS

SEQ ID NO: 248 - protein, 108 aa, Artificial Sequence; identical to SEQ ID NO: 23
  Description of Artificial Sequence: Synthetic polypeptide
  VL of XENP019751

SEQ ID NO: 249 - protein, 5 aa, Artificial Sequence
  Description of Artificial Sequence: Synthetic peptide
  XENP019751 vhCDR1
SYTMH

SEQ ID NO: 250 - protein, 17 aa, Artificial Sequence
  Description of Artificial Sequence: Synthetic peptide
  XENP019751 vhCDR2
FISYDGNNKYYADSVKG

SEQ ID NO: 251 - protein, 9 aa, Artificial Sequence
  Description of Artificial Sequence: Synthetic peptide
  XENP019751 vhCDR3
TGWLGPFDY

SEQ ID NO: 252 - protein, 12 aa, Artificial Sequence
  Description of Artificial Sequence: Synthetic peptide
  XENP019751 vlCDR1
RASQSVGSSYLA

SEQ ID NO: 253 - protein, 7 aa, Artificial Sequence
  Description of Artificial Sequence: Synthetic peptide
  XENP019751 vlCDR2
GAFSRAT

SEQ ID NO: 254 - protein, 9 aa, Artificial Sequence
  Description of Artificial Sequence: Synthetic peptide
  XENP019751 vlCDR3
QQYGSSPWT

SEQ ID NO: 255 - protein, 246 aa, Artificial Sequence
  Description of Artificial Sequence: Synthetic polypeptide
  XENP019752 [CTLA-4]_H0.8_L0_scFv(GKPGS)4
QVQLVESGGGVVQPGGSLRLSCAASGFTFSSYTMHWVRQAPGKGLEWVTFISYDGNNKYYADSVKGRFTISRDNSKNTLYLQMNSLRAEDTAIYYCARTGWLGPFDYWGQGTLVTVSSGKPGSGKPGSGKPGSGKPGSEIVLTQSPGTLSLSPGERATLSCRASQSVGSSYLAWYQQKPGQAPRLLIYGAFSRATGIPDRFSGSGSGTDFTLTISRLEPEDFAVYYCQQYGSSPWTFGQGTKVEIK

SEQ ID NO: 256 - protein, 118 aa, Artificial Sequence
  Description of Artificial Sequence: Synthetic polypeptide
  VH of XENP019752
QVQLVESGGGVVQPGGSLRLSCAASGFTFSSYTMHWVRQAPGKGLEWVTFISYDGNNKYYADSVKGRFTISRDNSKNTLYLQMNSLRAEDTAIYYCARTGWLGPFDYWGQGTLVTVSS

SEQ ID NO: 257 - protein, 108 aa, Artificial Sequence; identical to SEQ ID NO: 23
  Description of Artificial Sequence: Synthetic polypeptide
  VL of XENP019752

SEQ ID NO: 258 - protein, 5 aa, Artificial Sequence
  Description of Artificial Sequence: Synthetic peptide
  XENP019752 vhCDR1
SYTMH

SEQ ID NO: 259 - protein, 17 aa, Artificial Sequence
  Description of Artificial Sequence: Synthetic peptide
  XENP019752 vhCDR2
FISYDGNNKYYADSVKG

SEQ ID NO: 260 - protein, 9 aa, Artificial Sequence
  Description of Artificial Sequence: Synthetic peptide
  XENP019752 vhCDR3
TGWLGPFDY

SEQ ID NO: 261 - protein, 12 aa, Artificial Sequence
  Description of Artificial Sequence: Synthetic peptide
  XENP019752 vlCDR1
RASQSVGSSYLA

SEQ ID NO: 262 - protein, 7 aa, Artificial Sequence
  Description of Artificial Sequence: Synthetic peptide
  XENP019752 vlCDR2
GAFSRAT

SEQ ID NO: 263 - protein, 9 aa, Artificial Sequence
  Description of Artificial Sequence: Synthetic peptide
  XENP019752 vlCDR3
QQYGSSPWT

SEQ ID NO: 264 - protein, 246 aa, Artificial Sequence
  Description of Artificial Sequence: Synthetic polypeptide
  XENP019753 [CTLA-4]_H0.9_L0_scFv(GKPGS)4
QVQLVESGGGVVQPGESLRLSCAASGFTFSSYTMHWVRQAPGKGLEWVTFISYDGNNKYYADSVKGRFTISRDNSKNTLYLQMNSLRAEDTAIYYCARTGWLGPFDYWGQGTLVTVSSGKPGSGKPGSGKPGSGKPGSEIVLTQSPGTLSLSPGERATLSCRASQSVGSSYLAWYQQKPGQAPRLLIYGAFSRATGIPDRFSGSGSGTDFTLTISRLEPEDFAVYYCQQYGSSPWTFGQGTKVEIK

SEQ ID NO: 265 - protein, 118 aa, Artificial Sequence
  Description of Artificial Sequence: Synthetic polypeptide
  VH of XENP019753
QVQLVESGGGVVQPGESLRLSCAASGFTFSSYTMHWVRQAPGKGLEWVTFISYDGNNKYYADSVKGRFTISRDNSKNTLYLQMNSLRAEDTAIYYCARTGWLGPFDYWGQGTLVTVSS

SEQ ID NO: 266 - protein, 108 aa, Artificial Sequence; identical to SEQ ID NO: 23
  Description of Artificial Sequence: Synthetic polypeptide
  VL of XENP019753

SEQ ID NO: 267 - protein, 5 aa, Artificial Sequence
  Description of Artificial Sequence: Synthetic peptide
  XENP019753 vhCDR1
SYTMH

SEQ ID NO: 268 - protein, 17 aa, Artificial Sequence
  Description of Artificial Sequence: Synthetic peptide
  XENP019753 vhCDR2
FISYDGNNKYYADSVKG

SEQ ID NO: 269 - protein, 9 aa, Artificial Sequence
  Description of Artificial Sequence: Synthetic peptide
  XENP019753 vhCDR3
TGWLGPFDY

SEQ ID NO: 270 - protein, 12 aa, Artificial Sequence
  Description of Artificial Sequence: Synthetic peptide
  XENP019753 vlCDR1
RASQSVGSSYLA

SEQ ID NO: 271 - protein, 7 aa, Artificial Sequence
  Description of Artificial Sequence: Synthetic peptide
  XENP019753 vlCDR2
GAFSRAT

SEQ ID NO: 272 - protein, 9 aa, Artificial Sequence
  Description of Artificial Sequence: Synthetic peptide
  XENP019753 vlCDR3
QQYGSSPWT

SEQ ID NO: 273 - protein, 246 aa, Artificial Sequence
  Description of Artificial Sequence: Synthetic polypeptide
  XENP019754 [CTLA-4]_H0.10_L0_scFv(GKPGS)4
QVQLVESGGGVVQPGRSLKLSCAASGFTFSSYTMHWVRQAPGKGLEWVTFISYDGNNKYYADSVKGRFTISRDNSKNTLYLQMNSLRAEDTAIYYCARTGWLGPFDYWGQGTLVTVSSGKPGSGKPGSGKPGSGKPGSEIVLTQSPGTLSLSPGERATLSCRASQSVGSSYLAWYQQKPGQAPRLLIYGAFSRATGIPDRFSGSGSGTDFTLTISRLEPEDFAVYYCQQYGSSPWTFGQGTKVEIK

SEQ ID NO: 274 - protein, 118 aa, Artificial Sequence
  Description of Artificial Sequence: Synthetic polypeptide
  VH of XENP019754
QVQLVESGGGVVQPGRSLKLSCAASGFTFSSYTMHWVRQAPGKGLEWVTFISYDGNNKYYADSVKGRFTISRDNSKNTLYLQMNSLRAEDTAIYYCARTGWLGPFDYWGQGTLVTVSS

SEQ ID NO: 275 - protein, 108 aa, Artificial Sequence; identical to SEQ ID NO: 23
  Description of Artificial Sequence: Synthetic polypeptide
  VL of XENP019754

SEQ ID NO: 276 - protein, 5 aa, Artificial Sequence
  Description of Artificial Sequence: Synthetic peptide
  XENP019754 vhCDR1
SYTMH

SEQ ID NO: 277 - protein, 17 aa, Artificial Sequence
  Description of Artificial Sequence: Synthetic peptide
  XENP019754 vhCDR2
FISYDGNNKYYADSVKG

SEQ ID NO: 278 - protein, 9 aa, Artificial Sequence
  Description of Artificial Sequence: Synthetic peptide
  XENP019754 vhCDR3
TGWLGPFDY

SEQ ID NO: 279 - protein, 12 aa, Artificial Sequence
  Description of Artificial Sequence: Synthetic peptide
  XENP019754 vlCDR1
RASQSVGSSYLA

SEQ ID NO: 280 - protein, 7 aa, Artificial Sequence
  Description of Artificial Sequence: Synthetic peptide
  XENP019754 vlCDR2
GAFSRAT

SEQ ID NO: 281 - protein, 9 aa, Artificial Sequence
  Description of Artificial Sequence: Synthetic peptide
  XENP019754 vlCDR3
QQYGSSPWT

SEQ ID NO: 282 - protein, 246 aa, Artificial Sequence
  Description of Artificial Sequence: Synthetic polypeptide
  XENP019755 [CTLA-4]_H0.11_L0_scFv(GKPGS)4
QVQLVESGGGVVQPGRSLRLSCAASGFTVSSYTMHWVRQAPGKGLEWVTFISYDGNNKYYADSVKGRFTISRDNSKNTLYLQMNSLRAEDTAIYYCARTGWLGPFDYWGQGTLVTVSSGKPGSGKPGSGKPGSGKPGSEIVLTQSPGTLSLSPGERATLSCRASQSVGSSYLAWYQQKPGQAPRLLIYGAFSRATGIPDRFSGSGSGTDFTLTISRLEPEDFAVYYCQQYGSSPWTFGQGTKVEIK

SEQ ID NO: 283 - protein, 118 aa, Artificial Sequence
  Description of Artificial Sequence: Synthetic polypeptide
  VH of XENP019755
QVQLVESGGGVVQPGRSLRLSCAASGFTVSSYTMHWVRQAPGKGLEWVTFISYDGNNKYYADSVKGRFTISRDNSKNTLYLQMNSLRAEDTAIYYCARTGWLGPFDYWGQGTLVTVSS

SEQ ID NO: 284 - protein, 108 aa, Artificial Sequence; identical to SEQ ID NO: 23
  Description of Artificial Sequence: Synthetic polypeptide
  VL of XENP019755

SEQ ID NO: 285 - protein, 5 aa, Artificial Sequence
  Description of Artificial Sequence: Synthetic peptide
  XENP019755 vhCDR1
SYTMH

SEQ ID NO: 286 - protein, 17 aa, Artificial Sequence
  Description of Artificial Sequence: Synthetic peptide
  XENP019755 vhCDR2
FISYDGNNKYYADSVKG

SEQ ID NO: 287 - protein, 9 aa, Artificial Sequence
  Description of Artificial Sequence: Synthetic peptide
  XENP019755 vhCDR3
TGWLGPFDY

SEQ ID NO: 288 - protein, 12 aa, Artificial Sequence
  Description of Artificial Sequence: Synthetic peptide
  XENP019755 vlCDR1
RASQSVGSSYLA

SEQ ID NO: 289 - protein, 7 aa, Artificial Sequence
  Description of Artificial Sequence: Synthetic peptide
  XENP019755 vlCDR2
GAFSRAT

SEQ ID NO: 290 - protein, 9 aa, Artificial Sequence
  Description of Artificial Sequence: Synthetic peptide
  XENP019755 vlCDR3
QQYGSSPWT

SEQ ID NO: 291 - protein, 246 aa, Artificial Sequence
  Description of Artificial Sequence: Synthetic polypeptide
  XENP019756 [CTLA-4]_H0.12_L0_scFv(GKPGS)4
QVQLVESGGGVVQPGRSLRLSCAASGFTFSAYTMHWVRQAPGKGLEWVTFISYDGNNKYYADSVKGRFTISRDNSKNTLYLQMNSLRAEDTAIYYCARTGWLGPFDYWGQGTLVTVSSGKPGSGKPGSGKPGSGKPGSEIVLTQSPGTLSLSPGERATLSCRASQSVGSSYLAWYQQKPGQAPRLLIYGAFSRATGIPDRFSGSGSGTDFTLTISRLEPEDFAVYYCQQYGSSPWTFGQGTKVEIK

SEQ ID NO: 292 - protein, 118 aa, Artificial Sequence
  Description of Artificial Sequence: Synthetic polypeptide
  VH of XENP019756
QVQLVESGGGVVQPGRSLRLSCAASGFTFSAYTMHWVRQAPGKGLEWVTFISYDGNNKYYADSVKGRFTISRDNSKNTLYLQMNSLRAEDTAIYYCARTGWLGPFDYWGQGTLVTVSS

SEQ ID NO: 293 - protein, 108 aa, Artificial Sequence; identical to SEQ ID NO: 23
  Description of Artificial Sequence: Synthetic polypeptide
  VL of XENP019756

SEQ ID NO: 294 - protein, 5 aa, Artificial Sequence
  Description of Artificial Sequence: Synthetic peptide
  XENP019756 vhCDR1
AYTMH

SEQ ID NO: 295 - protein, 17 aa, Artificial Sequence
  Description of Artificial Sequence: Synthetic peptide
  XENP019756 vhCDR2
FISYDGNNKYYADSVKG

SEQ ID NO: 296 - protein, 9 aa, Artificial Sequence
  Description of Artificial Sequence: Synthetic peptide
  XENP019756 vhCDR3
TGWLGPFDY

SEQ ID NO: 297 - protein, 12 aa, Artificial Sequence
  Description of Artificial Sequence: Synthetic peptide
  XENP019756 vlCDR1
RASQSVGSSYLA

SEQ ID NO: 298 - protein, 7 aa, Artificial Sequence
  Description of Artificial Sequence: Synthetic peptide
  XENP019756 vlCDR2
GAFSRAT

SEQ ID NO: 299 - protein, 9 aa, Artificial Sequence
  Description of Artificial Sequence: Synthetic peptide
  XENP019756 vlCDR3
QQYGSSPWT

SEQ ID NO: 300 - protein, 246 aa, Artificial Sequence
  Description of Artificial Sequence: Synthetic polypeptide
  XENP019757 [CTLA-4]_H0.13_L0_scFv(GKPGS)4
QVQLVESGGGVVQPGRSLRLSCAASGFTFSDYTMHWVRQAPGKGLEWVTFISYDGNNKYYADSVKGRFTISRDNSKNTLYLQMNSLRAEDTAIYYCARTGWLGPFDYWGQGTLVTVSSGKPGSGKPGSGKPGSGKPGSEIVLTQSPGTLSLSPGERATLSCRASQSVGSSYLAWYQQKPGQAPRLLIYGAFSRATGIPDRFSGSGSGTDFTLTISRLEPEDFAVYYCQQYGSSPWTFGQGTKVEIK

SEQ ID NO: 301 - protein, 118 aa, Artificial Sequence
  Description of Artificial Sequence: Synthetic polypeptide
  VH of XENP019757
QVQLVESGGGVVQPGRSLRLSCAASGFTFSDYTMHWVRQAPGKGLEWVTFISYDGNNKYYADSVKGRFTISRDNSKNTLYLQMNSLRAEDTAIYYCARTGWLGPFDYWGQGTLVTVSS

SEQ ID NO: 302 - protein, 108 aa, Artificial Sequence; identical to SEQ ID NO: 23
  Description of Artificial Sequence: Synthetic polypeptide
  VL of XENP019757

SEQ ID NO: 303 - protein, 5 aa, Artificial Sequence
  Description of Artificial Sequence: Synthetic peptide
  XENP019757 vhCDR1
DYTMH

SEQ ID NO: 304 - protein, 17 aa, Artificial Sequence
  Description of Artificial Sequence: Synthetic peptide
  XENP019757 vhCDR2
FISYDGNNKYYADSVKG

SEQ ID NO: 305 - protein, 9 aa, Artificial Sequence
  Description of Artificial Sequence: Synthetic peptide
  XENP019757 vhCDR3
TGWLGPFDY

SEQ ID NO: 306 - protein, 12 aa, Artificial Sequence
  Description of Artificial Sequence: Synthetic peptide
  XENP019757 vlCDR1
RASQSVGSSYLA

SEQ ID NO: 307 - protein, 7 aa, Artificial Sequence
  Description of Artificial Sequence: Synthetic peptide
  XENP019757 vlCDR2
GAFSRAT

SEQ ID NO: 308 - protein, 9 aa, Artificial Sequence
  Description of Artificial Sequence: Synthetic peptide
  XENP019757 vlCDR3
QQYGSSPWT

SEQ ID NO: 309 - protein, 246 aa, Artificial Sequence
  Description of Artificial Sequence: Synthetic polypeptide
  XENP019758 [CTLA-4]_H0.14_L0_scFv(GKPGS)4
QVQLVESGGGVVQPGRSLRLSCAASGFTFSGYTMHWVRQAPGKGLEWVTFISYDGNNKYYADSVKGRFTISRDNSKNTLYLQMNSLRAEDTAIYYCARTGWLGPFDYWGQGTLVTVSSGKPGSGKPGSGKPGSGKPGSEIVLTQSPGTLSLSPGERATLSCRASQSVGSSYLAWYQQKPGQAPRLLIYGAFSRATGIPDRFSGSGSGTDFTLTISRLEPEDFAVYYCQQYGSSPWTFGQGTKVEIK

SEQ ID NO: 310 - protein, 118 aa, Artificial Sequence
  Description of Artificial Sequence: Synthetic polypeptide
  VH of XENP019758
QVQLVESGGGVVQPGRSLRLSCAASGFTFSGYTMHWVRQAPGKGLEWVTFISYDGNNKYYADSVKGRFTISRDNSKNTLYLQMNSLRAEDTAIYYCARTGWLGPFDYWGQGTLVTVSS

SEQ ID NO: 311 - protein, 108 aa, Artificial Sequence; identical to SEQ ID NO: 23
  Description of Artificial Sequence: Synthetic polypeptide
  VL of XENP019758

SEQ ID NO: 312 - protein, 5 aa, Artificial Sequence
  Description of Artificial Sequence: Synthetic peptide
  XENP019758 vhCDR1
GYTMH

SEQ ID NO: 313 - protein, 17 aa, Artificial Sequence
  Description of Artificial Sequence: Synthetic peptide
  XENP019758 vhCDR2
FISYDGNNKYYADSVKG

SEQ ID NO: 314 - protein, 9 aa, Artificial Sequence
  Description of Artificial Sequence: Synthetic peptide
  XENP019758 vhCDR3
TGWLGPFDY

SEQ ID NO: 315 - protein, 12 aa, Artificial Sequence
  Description of Artificial Sequence: Synthetic peptide
  XENP019758 vlCDR1
RASQSVGSSYLA

SEQ ID NO: 316 - protein, 7 aa, Artificial Sequence
  Description of Artificial Sequence: Synthetic peptide
  XENP019758 vlCDR2
GAFSRAT

SEQ ID NO: 317 - protein, 9 aa, Artificial Sequence
  Description of Artificial Sequence: Synthetic peptide
  XENP019758 vlCDR3
QQYGSSPWT

SEQ ID NO: 318 - protein, 246 aa, Artificial Sequence
  Description of Artificial Sequence: Synthetic polypeptide
  XENP019759 [CTLA-4]_H0.15_L0_scFv(GKPGS)4
QVQLVESGGGVVQPGRSLRLSCAASGFTFSNYTMHWVRQAPGKGLEWVTFISYDGNNKYYADSVKGRFTISRDNSKNTLYLQMNSLRAEDTAIYYCARTGWLGPFDYWGQGTLVTVSSGKPGSGKPGSGKPGSGKPGSEIVLTQSPGTLSLSPGERATLSCRASQSVGSSYLAWYQQKPGQAPRLLIYGAFSRATGIPDRFSGSGSGTDFTLTISRLEPEDFAVYYCQQYGSSPWTFGQGTKVEIK

SEQ ID NO: 319 - protein, 118 aa, Artificial Sequence
  Description of Artificial Sequence: Synthetic polypeptide
  VH of XENP019759
QVQLVESGGGVVQPGRSLRLSCAASGFTFSNYTMHWVRQAPGKGLEWVTFISYDGNNKYYADSVKGRFTISRDNSKNTLYLQMNSLRAEDTAIYYCARTGWLGPFDYWGQGTLVTVSS

SEQ ID NO: 320 - protein, 108 aa, Artificial Sequence; identical to SEQ ID NO: 23
  Description of Artificial Sequence: Synthetic polypeptide
  VL of XENP019759

SEQ ID NO: 321 - protein, 5 aa, Artificial Sequence
  Description of Artificial Sequence: Synthetic peptide
  XENP019759 vhCDR1
NYTMH

SEQ ID NO: 322 - protein, 17 aa, Artificial Sequence
  Description of Artificial Sequence: Synthetic peptide
  XENP019759 vhCDR2
FISYDGNNKYYADSVKG

SEQ ID NO: 323 - protein, 9 aa, Artificial Sequence
  Description of Artificial Sequence: Synthetic peptide
  XENP019759 vhCDR3
TGWLGPFDY

SEQ ID NO: 324 - protein, 12 aa, Artificial Sequence
  Description of Artificial Sequence: Synthetic peptide
  XENP019759 vlCDR1
RASQSVGSSYLA

SEQ ID NO: 325 - protein, 7 aa, Artificial Sequence
  Description of Artificial Sequence: Synthetic peptide
  XENP019759 vlCDR2
GAFSRAT

SEQ ID NO: 326 - protein, 9 aa, Artificial Sequence
  Description of Artificial Sequence: Synthetic peptide
  XENP019759 vlCDR3
QQYGSSPWT

SEQ ID NO: 327 - protein, 246 aa, Artificial Sequence
  Description of Artificial Sequence: Synthetic polypeptide
  XENP019760 [CTLA-4]_H0.16_L0_scFv(GKPGS)4
QVQLVESGGGVVQPGRSLRLSCAASGFTFSQYTMHWVRQAPGKGLEWVTFISYDGNNKYYADSVKGRFTISRDNSKNTLYLQMNSLRAEDTAIYYCARTGWLGPFDYWGQGTLVTVSSGKPGSGKPGSGKPGSGKPGSEIVLTQSPGTLSLSPGERATLSCRASQSVGSSYLAWYQQKPGQAPRLLIYGAFSRATGIPDRFSGSGSGTDFTLTISRLEPEDFAVYYCQQYGSSPWTFGQGTKVEIK

SEQ ID NO: 328 - protein, 118 aa, Artificial Sequence
  Description of Artificial Sequence: Synthetic polypeptide
  VH of XENP019760
QVQLVESGGGVVQPGRSLRLSCAASGFTFSQYTMHWVRQAPGKGLEWVTFISYDGNNKYYADSVKGRFTISRDNSKNTLYLQMNSLRAEDTAIYYCARTGWLGPFDYWGQGTLVTVSS

SEQ ID NO: 329 - protein, 108 aa, Artificial Sequence; identical to SEQ ID NO: 23
  Description of Artificial Sequence: Synthetic polypeptide
  VL of XENP019760

SEQ ID NO: 330 - protein, 5 aa, Artificial Sequence
  Description of Artificial Sequence: Synthetic peptide
  XENP019760 vhCDR1
QYTMH

SEQ ID NO: 331 - protein, 17 aa, Artificial Sequence
  Description of Artificial Sequence: Synthetic peptide
  XENP019760 vhCDR2
FISYDGNNKYYADSVKG

SEQ ID NO: 332 - protein, 9 aa, Artificial Sequence
  Description of Artificial Sequence: Synthetic peptide
  XENP019760 vhCDR3
TGWLGPFDY

SEQ ID NO: 333 - protein, 12 aa, Artificial Sequence
  Description of Artificial Sequence: Synthetic peptide
  XENP019760 vlCDR1
RASQSVGSSYLA

SEQ ID NO: 334 - protein, 7 aa, Artificial Sequence
  Description of Artificial Sequence: Synthetic peptide
  XENP019760 vlCDR2
GAFSRAT

SEQ ID NO: 335 - protein, 9 aa, Artificial Sequence
  Description of Artificial Sequence: Synthetic peptide
  XENP019760 vlCDR3
QQYGSSPWT

SEQ ID NO: 336 - protein, 246 aa, Artificial Sequence
  Description of Artificial Sequence: Synthetic polypeptide
  XENP019761 [CTLA-4]_H0.17_L0_scFv(GKPGS)4
QVQLVESGGGVVQPGRSLRLSCAASGFTFSTYTMHWVRQAPGKGLEWVTFISYDGNNKYYADSVKGRFTISRDNSKNTLYLQMNSLRAEDTAIYYCARTGWLGPFDYWGQGTLVTVSSGKPGSGKPGSGKPGSGKPGSEIVLTQSPGTLSLSPGERATLSCRASQSVGSSYLAWYQQKPGQAPRLLIYGAFSRATGIPDRFSGSGSGTDFTLTISRLEPEDFAVYYCQQYGSSPWTFGQGTKVEIK

SEQ ID NO: 337 - protein, 118 aa, Artificial Sequence
  Description of Artificial Sequence: Synthetic polypeptide
  VH of XENP019761
QVQLVESGGGVVQPGRSLRLSCAASGFTFSTYTMHWVRQAPGKGLEWVTFISYDGNNKYYADSVKGRFTISRDNSKNTLYLQMNSLRAEDTAIYYCARTGWLGPFDYWGQGTLVTVSS

SEQ ID NO: 338 - protein, 108 aa, Artificial Sequence; identical to SEQ ID NO: 23
  Description of Artificial Sequence: Synthetic polypeptide
  VL of XENP019761

SEQ ID NO: 339 - protein, 5 aa, Artificial Sequence
  Description of Artificial Sequence: Synthetic peptide
  XENP019761 vhCDR1
TYTMH

SEQ ID NO: 340 - protein, 17 aa, Artificial Sequence
  Description of Artificial Sequence: Synthetic peptide
  XENP019761 vhCDR2
FISYDGNNKYYADSVKG

SEQ ID NO: 341 - protein, 9 aa, Artificial Sequence
  Description of Artificial Sequence: Synthetic peptide
  XENP019761 vhCDR3
TGWLGPFDY

SEQ ID NO: 342 - protein, 12 aa, Artificial Sequence
  Description of Artificial Sequence: Synthetic peptide
  XENP019761 vlCDR1
RASQSVGSSYLA

SEQ ID NO: 343 - protein, 7 aa, Artificial Sequence
  Description of Artificial Sequence: Synthetic peptide
  XENP019761 vlCDR2
GAFSRAT

SEQ ID NO: 344 - protein, 9 aa, Artificial Sequence
  Description of Artificial Sequence: Synthetic peptide
  XENP019761 vlCDR3
QQYGSSPWT

SEQ ID NO: 345 - protein, 246 aa, Artificial Sequence
  Description of Artificial Sequence: Synthetic polypeptide
  XENP019762 [CTLA-4]_H0.18_L0_scFv(GKPGS)4
QVQLVESGGGVVQPGRSLRLSCAASGFTFSSATMHWVRQAPGKGLEWVTFISYDGNNKYYADSVKGRFTISRDNSKNTLYLQMNSLRAEDTAIYYCARTGWLGPFDYWGQGTLVTVSSGKPGSGKPGSGKPGSGKPGSEIVLTQSPGTLSLSPGERATLSCRASQSVGSSYLAWYQQKPGQAPRLLIYGAFSRATGIPDRFSGSGSGTDFTLTISRLEPEDFAVYYCQQYGSSPWTFGQGTKVEIK

SEQ ID NO: 346 - protein, 118 aa, Artificial Sequence
  Description of Artificial Sequence: Synthetic polypeptide
  VH of XENP019762
QVQLVESGGGVVQPGRSLRLSCAASGFTFSSATMHWVRQAPGKGLEWVTFISYDGNNKYYADSVKGRFTISRDNSKNTLYLQMNSLRAEDTAIYYCARTGWLGPFDYWGQGTLVTVSS

SEQ ID NO: 347 - protein, 108 aa, Artificial Sequence; identical to SEQ ID NO: 23
  Description of Artificial Sequence: Synthetic polypeptide
  VL of XENP019762

SEQ ID NO: 348 - protein, 5 aa, Artificial Sequence
  Description of Artificial Sequence: Synthetic peptide
  XENP019762 vhCDR1
SATMH

SEQ ID NO: 349 - protein, 17 aa, Artificial Sequence
  Description of Artificial Sequence: Synthetic peptide
  XENP019762 vhCDR2
FISYDGNNKYYADSVKG

SEQ ID NO: 350 - protein, 9 aa, Artificial Sequence
  Description of Artificial Sequence: Synthetic peptide
  XENP019762 vhCDR3
TGWLGPFDY

SEQ ID NO: 351 - protein, 12 aa, Artificial Sequence
  Description of Artificial Sequence: Synthetic peptide
  XENP019762 vlCDR1
RASQSVGSSYLA

SEQ ID NO: 352 - protein, 7 aa, Artificial Sequence
  Description of Artificial Sequence: Synthetic peptide
  XENP019762 vlCDR2
GAFSRAT

SEQ ID NO: 353 - protein, 9 aa, Artificial Sequence
  Description of Artificial Sequence: Synthetic peptide
  XENP019762 vlCDR3
QQYGSSPWT

SEQ ID NO: 354 - protein, 246 aa, Artificial Sequence
  Description of Artificial Sequence: Synthetic polypeptide
  XENP019763 [CTLA-4]_H0.19_L0_scFv(GKPGS)4
QVQLVESGGGVVQPGRSLRLSCAASGFTFSSHTMHWVRQAPGKGLEWVTFISYDGNNKYYADSVKGRFTISRDNSKNTLYLQMNSLRAEDTAIYYCARTGWLGPFDYWGQGTLVTVSSGKPGSGKPGSGKPGSGKPGSEIVLTQSPGTLSLSPGERATLSCRASQSVGSSYLAWYQQKPGQAPRLLIYGAFSRATGIPDRFSGSGSGTDFTLTISRLEPEDFAVYYCQQYGSSPWTFGQGTKVEIK

SEQ ID NO: 355 - protein, 118 aa, Artificial Sequence
  Description of Artificial Sequence: Synthetic polypeptide
  VH of XENP019763
QVQLVESGGGVVQPGRSLRLSCAASGFTFSSHTMHWVRQAPGKGLEWVTFISYDGNNKYYADSVKGRFTISRDNSKNTLYLQMNSLRAEDTAIYYCARTGWLGPFDYWGQGTLVTVSS

SEQ ID NO: 356 - protein, 108 aa, Artificial Sequence; identical to SEQ ID NO: 23
  Description of Artificial Sequence: Synthetic polypeptide
  VL of XENP019763

SEQ ID NO: 357 - protein, 5 aa, Artificial Sequence
  Description of Artificial Sequence: Synthetic peptide
  XENP019763 vhCDR1
SHTMH

SEQ ID NO: 358 - protein, 17 aa, Artificial Sequence
  Description of Artificial Sequence: Synthetic peptide
  XENP019763 vhCDR2
FISYDGNNKYYADSVKG

SEQ ID NO: 359 - protein, 9 aa, Artificial Sequence
  Description of Artificial Sequence: Synthetic peptide
  XENP019763 vhCDR3
TGWLGPFDY

SEQ ID NO: 360 - protein, 12 aa, Artificial Sequence
  Description of Artificial Sequence: Synthetic peptide
  XENP019763 vlCDR1
RASQSVGSSYLA

SEQ ID NO: 361 - protein, 7 aa, Artificial Sequence
  Description of Artificial Sequence: Synthetic peptide
  XENP019763 vlCDR2
GAFSRAT

SEQ ID NO: 362 - protein, 9 aa, Artificial Sequence
  Description of Artificial Sequence: Synthetic peptide
  XENP019763 vlCDR3
QQYGSSPWT

SEQ ID NO: 363 - protein, 246 aa, Artificial Sequence
  Description of Artificial Sequence: Synthetic polypeptide
  XENP019764 [CTLA-4]_H0.20_L0_scFv(GKPGS)4
QVQLVESGGGVVQPGRSLRLSCAASGFTFSSFTMHWVRQAPGKGLEWVTFISYDGNNKYYADSVKGRFTISRDNSKNTLYLQMNSLRAEDTAIYYCARTGWLGPFDYWGQGTLVTVSSGKPGSGKPGSGKPGSGKPGSEIVLTQSPGTLSLSPGERATLSCRASQSVGSSYLAWYQQKPGQAPRLLIYGAFSRATGIPDRFSGSGSGTDFTLTISRLEPEDFAVYYCQQYGSSPWTFGQGTKVEIK

SEQ ID NO: 364 - protein, 118 aa, Artificial Sequence
  Description of Artificial Sequence: Synthetic polypeptide
  VH of XENP019764
QVQLVESGGGVVQPGRSLRLSCAASGFTFSSFTMHWVRQAPGKGLEWVTFISYDGNNKYYADSVKGRFTISRDNSKNTLYLQMNSLRAEDTAIYYCARTGWLGPFDYWGQGTLVTVSS

SEQ ID NO: 365 - protein, 108 aa, Artificial Sequence; identical to SEQ ID NO: 23
  Description of Artificial Sequence: Synthetic polypeptide
  VL of XENP019764

SEQ ID NO: 366 - protein, 5 aa, Artificial Sequence
  Description of Artificial Sequence: Synthetic peptide
  XENP019764 vhCDR1
SFTMH

SEQ ID NO: 367 - protein, 17 aa, Artificial Sequence
  Description of Artificial Sequence: Synthetic peptide
  XENP019764 vhCDR2
FISYDGNNKYYADSVKG

SEQ ID NO: 368 - protein, 9 aa, Artificial Sequence
  Description of Artificial Sequence: Synthetic peptide
  XENP019764 vhCDR3
TGWLGPFDY

SEQ ID NO: 369 - protein, 12 aa, Artificial Sequence
  Description of Artificial Sequence: Synthetic peptide
  XENP019764 vlCDR1
RASQSVGSSYLA

SEQ ID NO: 370 - protein, 7 aa, Artificial Sequence
  Description of Artificial Sequence: Synthetic peptide
  XENP019764 vlCDR2
GAFSRAT

SEQ ID NO: 371 - protein, 9 aa, Artificial Sequence
  Description of Artificial Sequence: Synthetic peptide
  XENP019764 vlCDR3
QQYGSSPWT

SEQ ID NO: 372 - protein, 246 aa, Artificial Sequence
  Description of Artificial Sequence: Synthetic polypeptide
  XENP019765 [CTLA-4]_H0.21_L0_scFv(GKPGS)4
QVQLVESGGGVVQPGRSLRLSCAASGFTFSSLTMHWVRQAPGKGLEWVTFISYDGNNKYYADSVKGRFTISRDNSKNTLYLQMNSLRAEDTAIYYCARTGWLGPFDYWGQGTLVTVSSGKPGSGKPGSGKPGSGKPGSEIVLTQSPGTLSLSPGERATLSCRASQSVGSSYLAWYQQKPGQAPRLLIYGAFSRATGIPDRFSGSGSGTDFTLTISRLEPEDFAVYYCQQYGSSPWTFGQGTKVEIK

SEQ ID NO: 373 - protein, 118 aa, Artificial Sequence
  Description of Artificial Sequence: Synthetic polypeptide
  VH of XENP019765
QVQLVESGGGVVQPGRSLRLSCAASGFTFSSLTMHWVRQAPGKGLEWVTFISYDGNNKYYADSVKGRFTISRDNSKNTLYLQMNSLRAEDTAIYYCARTGWLGPFDYWGQGTLVTVSS

SEQ ID NO: 374 - protein, 108 aa, Artificial Sequence; identical to SEQ ID NO: 23
  Description of Artificial Sequence: Synthetic polypeptide
  VL of XENP019765

SEQ ID NO: 375 - protein, 5 aa, Artificial Sequence
  Description of Artificial Sequence: Synthetic peptide
  XENP019765 vhCDR1
SLTMH

SEQ ID NO: 376 - protein, 17 aa, Artificial Sequence
  Description of Artificial Sequence: Synthetic peptide
  XENP019765 vhCDR2
FISYDGNNKYYADSVKG

SEQ ID NO: 377 - protein, 9 aa, Artificial Sequence
  Description of Artificial Sequence: Synthetic peptide
  XENP019765 vhCDR3
TGWLGPFDY

SEQ ID NO: 378 - protein, 12 aa, Artificial Sequence
  Description of Artificial Sequence: Synthetic peptide
  XENP019765 vlCDR1
RASQSVGSSYLA

SEQ ID NO: 379 - protein, 7 aa, Artificial Sequence
  Description of Artificial Sequence: Synthetic peptide
  XENP019765 vlCDR2
GAFSRAT

SEQ ID NO: 380 - protein, 9 aa, Artificial Sequence
  Description of Artificial Sequence: Synthetic peptide
  XENP019765 vlCDR3
QQYGSSPWT

SEQ ID NO: 381 - protein, 246 aa, Artificial Sequence
  Description of Artificial Sequence: Synthetic polypeptide
  XENP019766 [CTLA-4]_H0.22_L0_scFv(GKPGS)4
QVQLVESGGGVVQPGRSLRLSCAASGFTFSSNTMHWVRQAPGKGLEWVTFISYDGNNKYYADSVKGRFTISRDNSKNTLYLQMNSLRAEDTAIYYCARTGWLGPFDYWGQGTLVTVSSGKPGSGKPGSGKPGSGKPGSEIVLTQSPGTLSLSPGERATLSCRASQSVGSSYLAWYQQKPGQAPRLLIYGAFSRATGIPDRFSGSGSGTDFTLTISRLEPEDFAVYYCQQYGSSPWTFGQGTKVEIK

SEQ ID NO: 382 - protein, 118 aa, Artificial Sequence
  Description of Artificial Sequence: Synthetic polypeptide
  VH of XENP019766
QVQLVESGGGVVQPGRSLRLSCAASGFTFSSNTMHWVRQAPGKGLEWVTFISYDGNNKYYADSVKGRFTISRDNSKNTLYLQMNSLRAEDTAIYYCARTGWLGPFDYWGQGTLVTVSS

SEQ ID NO: 383 - protein, 108 aa, Artificial Sequence; identical to SEQ ID NO: 23
  Description of Artificial Sequence: Synthetic polypeptide
  VL of XENP019766

SEQ ID NO: 384 - protein, 5 aa, Artificial Sequence
  Description of Artificial Sequence: Synthetic peptide
  XENP019766 vhCDR1
SNTMH

SEQ ID NO: 385 - protein, 17 aa, Artificial Sequence
  Description of Artificial Sequence: Synthetic peptide
  XENP019766 vhCDR2
FISYDGNNKYYADSVKG

SEQ ID NO: 386 - protein, 9 aa, Artificial Sequence
  Description of Artificial Sequence: Synthetic peptide
  XENP019766 vhCDR3
TGWLGPFDY

SEQ ID NO: 387 - protein, 12 aa, Artificial Sequence
  Description of Artificial Sequence: Synthetic peptide
  XENP019766 vlCDR1
RASQSVGSSYLA

SEQ ID NO: 388 - protein, 7 aa, Artificial Sequence
  Description of Artificial Sequence: Synthetic peptide
  XENP019766 vlCDR2
GAFSRAT

SEQ ID NO: 389 - protein, 9 aa, Artificial Sequence
  Description of Artificial Sequence: Synthetic peptide
  XENP019766 vlCDR3
QQYGSSPWT

SEQ ID NO: 390 - protein, 246 aa, Artificial Sequence
  Description of Artificial Sequence: Synthetic polypeptide
  XENP019767 [CTLA-4]_H0.23_L0_scFv(GKPGS)4
QVQLVESGGGVVQPGRSLRLSCAASGFTFSSSTMHWVRQAPGKGLEWVTFISYDGNNKYYADSVKGRFTISRDNSKNTLYLQMNSLRAEDTAIYYCARTGWLGPFDYWGQGTLVTVSSGKPGSGKPGSGKPGSGKPGSEIVLTQSPGTLSLSPGERATLSCRASQSVGSSYLAWYQQKPGQAPRLLIYGAFSRATGIPDRFSGSGSGTDFTLTISRLEPEDFAVYYCQQYGSSPWTFGQGTKVEIK

SEQ ID NO: 391 - protein, 118 aa, Artificial Sequence
  Description of Artificial Sequence: Synthetic polypeptide
  VH of XENP019767
QVQLVESGGGVVQPGRSLRLSCAASGFTFSSSTMHWVRQAPGKGLEWVTFISYDGNNKYYADSVKGRFTISRDNSKNTLYLQMNSLRAEDTAIYYCARTGWLGPFDYWGQGTLVTVSS

SEQ ID NO: 392 - protein, 108 aa, Artificial Sequence; identical to SEQ ID NO: 23
  Description of Artificial Sequence: Synthetic polypeptide
  VL of XENP019767

SEQ ID NO: 393 - protein, 5 aa, Artificial Sequence
  Description of Artificial Sequence: Synthetic peptide
  XENP019767 vhCDR1
SSTMH

SEQ ID NO: 394 - protein, 17 aa, Artificial Sequence
  Description of Artificial Sequence: Synthetic peptide
  XENP019767 vhCDR2
FISYDGNNKYYADSVKG

SEQ ID NO: 395 - protein, 9 aa, Artificial Sequence
  Description of Artificial Sequence: Synthetic peptide
  XENP019767 vhCDR3
TGWLGPFDY

SEQ ID NO: 396 - protein, 12 aa, Artificial Sequence
  Description of Artificial Sequence: Synthetic peptide
  XENP019767 vlCDR1
RASQSVGSSYLA

SEQ ID NO: 397 - protein, 7 aa, Artificial Sequence
  Description of Artificial Sequence: Synthetic peptide
  XENP019767 vlCDR2
GAFSRAT

SEQ ID NO: 398 - protein, 9 aa, Artificial Sequence
  Description of Artificial Sequence: Synthetic peptide
  XENP019767 vlCDR3
QQYGSSPWT

SEQ ID NO: 399 - protein, 246 aa, Artificial Sequence
  Description of Artificial Sequence: Synthetic polypeptide
  XENP019768 [CTLA-4]_H0.24_L0_scFv(GKPGS)4
QVQLVESGGGVVQPGRSLRLSCAASGFTFSSVTMHWVRQAPGKGLEWVTFISYDGNNKYYADSVKGRFTISRDNSKNTLYLQMNSLRAEDTAIYYCARTGWLGPFDYWGQGTLVTVSSGKPGSGKPGSGKPGSGKPGSEIVLTQSPGTLSLSPGERATLSCRASQSVGSSYLAWYQQKPGQAPRLLIYGAFSRATGIPDRFSGSGSGTDFTLTISRLEPEDFAVYYCQQYGSSPWTFGQGTKVEIK

SEQ ID NO: 400 - protein, 118 aa, Artificial Sequence
  Description of Artificial Sequence: Synthetic polypeptide
  VH of XENP019768
QVQLVESGGGVVQPGRSLRLSCAASGFTFSSVTMHWVRQAPGKGLEWVTFISYDGNNKYYADSVKGRFTISRDNSKNTLYLQMNSLRAEDTAIYYCARTGWLGPFDYWGQGTLVTVSS

SEQ ID NO: 401 - protein, 108 aa, Artificial Sequence; identical to SEQ ID NO: 23
  Description of Artificial Sequence: Synthetic polypeptide
  VL of XENP019768

SEQ ID NO: 402 - protein, 5 aa, Artificial Sequence
  Description of Artificial Sequence: Synthetic peptide
  XENP019768 vhCDR1
SVTMH

SEQ ID NO: 403 - protein, 17 aa, Artificial Sequence
  Description of Artificial Sequence: Synthetic peptide
  XENP019768 vhCDR2
FISYDGNNKYYADSVKG

SEQ ID NO: 404 - protein, 9 aa, Artificial Sequence
  Description of Artificial Sequence: Synthetic peptide
  XENP019768 vhCDR3
TGWLGPFDY

SEQ ID NO: 405 - protein, 12 aa, Artificial Sequence
  Description of Artificial Sequence: Synthetic peptide
  XENP019768 vlCDR1
RASQSVGSSYLA

SEQ ID NO: 406 - protein, 7 aa, Artificial Sequence
  Description of Artificial Sequence: Synthetic peptide
  XENP019768 vlCDR2
GAFSRAT

SEQ ID NO: 407 - protein, 9 aa, Artificial Sequence
  Description of Artificial Sequence: Synthetic peptide
  XENP019768 vlCDR3
QQYGSSPWT

SEQ ID NO: 408 - protein, 246 aa, Artificial Sequence
  Description of Artificial Sequence: Synthetic polypeptide
  XENP019769 [CTLA-4]_H0.25_L0_scFv(GKPGS)4
QVQLVESGGGVVQPGRSLRLSCAASGFTFSSYAMHWVRQAPGKGLEWVTFISYDGNNKYYADSVKGRFTISRDNSKNTLYLQMNSLRAEDTAIYYCARTGWLGPFDYWGQGTLVTVSSGKPGSGKPGSGKPGSGKPGSEIVLTQSPGTLSLSPGERATLSCRASQSVGSSYLAWYQQKPGQAPRLLIYGAFSRATGIPDRFSGSGSGTDFTLTISRLEPEDFAVYYCQQYGSSPWTFGQGTKVEIK

SEQ ID NO: 409 - protein, 118 aa, Artificial Sequence
  Description of Artificial Sequence: Synthetic polypeptide
  VH of XENP019769
QVQLVESGGGVVQPGRSLRLSCAASGFTFSSYAMHWVRQAPGKGLEWVTFISYDGNNKYYADSVKGRFTISRDNSKNTLYLQMNSLRAEDTAIYYCARTGWLGPFDYWGQGTLVTVSS

SEQ ID NO: 410 - protein, 108 aa, Artificial Sequence; identical to SEQ ID NO: 23
  Description of Artificial Sequence: Synthetic polypeptide
  VL of XENP019769

SEQ ID NO: 411 - protein, 5 aa, Artificial Sequence
  Description of Artificial Sequence: Synthetic peptide
  XENP019769 vhCDR1
SYAMH

SEQ ID NO: 412 - protein, 17 aa, Artificial Sequence
  Description of Artificial Sequence: Synthetic peptide
  XENP019769 vhCDR2
FISYDGNNKYYADSVKG

SEQ ID NO: 413 - protein, 9 aa, Artificial Sequence
  Description of Artificial Sequence: Synthetic peptide
  XENP019769 vhCDR3
TGWLGPFDY

SEQ ID NO: 414 - protein, 12 aa, Artificial Sequence
  Description of Artificial Sequence: Synthetic peptide
  XENP019769 vlCDR1
RASQSVGSSYLA

SEQ ID NO: 415 - protein, 7 aa, Artificial Sequence
  Description of Artificial Sequence: Synthetic peptide
  XENP019769 vlCDR2
GAFSRAT

SEQ ID NO: 416 - protein, 9 aa, Artificial Sequence
  Description of Artificial Sequence: Synthetic peptide
  XENP019769 vlCDR3
QQYGSSPWT

SEQ ID NO: 417 - protein, 246 aa, Artificial Sequence
  Description of Artificial Sequence: Synthetic polypeptide
  XENP019770 [CTLA-4]_H0.26_L0_scFv(GKPGS)4
QVQLVESGGGVVQPGRSLRLSCAASGFTFSSYGMHWVRQAPGKGLEWVTFISYDGNNKYYADSVKGRFTISRDNSKNTLYLQMNSLRAEDTAIYYCARTGWLGPFDYWGQGTLVTVSSGKPGSGKPGSGKPGSGKPGSEIVLTQSPGTLSLSPGERATLSCRASQSVGSSYLAWYQQKPGQAPRLLIYGAFSRATGIPDRFSGSGSGTDFTLTISRLEPEDFAVYYCQQYGSSPWTFGQGTKVEIK

SEQ ID NO: 418 - protein, 118 aa, Artificial Sequence
  Description of Artificial Sequence: Synthetic polypeptide
  VH of XENP019770
QVQLVESGGGVVQPGRSLRLSCAASGFTFSSYGMHWVRQAPGKGLEWVTFISYDGNNKYYADSVKGRFTISRDNSKNTLYLQMNSLRAEDTAIYYCARTGWLGPFDYWGQGTLVTVSS

SEQ ID NO: 419 - protein, 108 aa, Artificial Sequence; identical to SEQ ID NO: 23
  Description of Artificial Sequence: Synthetic polypeptide
  VL of XENP019770

SEQ ID NO: 420 - protein, 5 aa, Artificial Sequence
  Description of Artificial Sequence: Synthetic peptide
  XENP019770 vhCDR1
SYGMH

SEQ ID NO: 421 - protein, 17 aa, Artificial Sequence
  Description of Artificial Sequence: Synthetic peptide
  XENP019770 vhCDR2
FISYDGNNKYYADSVKG

SEQ ID NO: 422 - protein, 9 aa, Artificial Sequence
  Description of Artificial Sequence: Synthetic peptide
  XENP019770 vhCDR3
TGWLGPFDY

SEQ ID NO: 423 - protein, 12 aa, Artificial Sequence
  Description of Artificial Sequence: Synthetic peptide
  XENP019770 vlCDR1
RASQSVGSSYLA

SEQ ID NO: 424 - protein, 7 aa, Artificial Sequence
  Description of Artificial Sequence: Synthetic peptide
  XENP019770 vlCDR2
GAFSRAT

SEQ ID NO: 425 - protein, 9 aa, Artificial Sequence
  Description of Artificial Sequence: Synthetic peptide
  XENP019770 vlCDR3
QQYGSSPWT

SEQ ID NO: 426 - protein, 246 aa, Artificial Sequence
  Description of Artificial Sequence: Synthetic polypeptide
  XENP019771 [CTLA-4]_H0.27_L0_scFv(GKPGS)4
QVQLVESGGGVVQPGRSLRLSCAASGFTFSSYSMHWVRQAPGKGLEWVTFISYDGNNKYYADSVKGRFTISRDNSKNTLYLQMNSLRAEDTAIYYCARTGWLGPFDYWGQGTLVTVSSGKPGSGKPGSGKPGSGKPGSEIVLTQSPGTLSLSPGERATLSCRASQSVGSSYLAWYQQKPGQAPRLLIYGAFSRATGIPDRFSGSGSGTDFTLTISRLEPEDFAVYYCQQYGSSPWTFGQGTKVEIK

SEQ ID NO: 427 - protein, 118 aa, Artificial Sequence
  Description of Artificial Sequence: Synthetic polypeptide
  VH of XENP019771
QVQLVESGGGVVQPGRSLRLSCAASGFTFSSYSMHWVRQAPGKGLEWVTFISYDGNNKYYADSVKGRFTISRDNSKNTLYLQMNSLRAEDTAIYYCARTGWLGPFDYWGQGTLVTVSS

SEQ ID NO: 428 - protein, 108 aa, Artificial Sequence; identical to SEQ ID NO: 23
  Description of Artificial Sequence: Synthetic polypeptide
  VL of XENP019771

SEQ ID NO: 429 - protein, 5 aa, Artificial Sequence
  Description of Artificial Sequence: Synthetic peptide
  XENP019771 vhCDR1
SYSMH

SEQ ID NO: 430 - protein, 17 aa, Artificial Sequence
  Description of Artificial Sequence: Synthetic peptide
  XENP019771 vhCDR2
FISYDGNNKYYADSVKG

SEQ ID NO: 431 - protein, 9 aa, Artificial Sequence
  Description of Artificial Sequence: Synthetic peptide
  XENP019771 vhCDR3
TGWLGPFDY

SEQ ID NO: 432 - protein, 12 aa, Artificial Sequence
  Description of Artificial Sequence: Synthetic peptide
  XENP019771 vlCDR1
RASQSVGSSYLA

SEQ ID NO: 433 - protein, 7 aa, Artificial Sequence
  Description of Artificial Sequence: Synthetic peptide
  XENP019771 vlCDR2
GAFSRAT

SEQ ID NO: 434 - protein, 9 aa, Artificial Sequence
  Description of Artificial Sequence: Synthetic peptide
  XENP019771 vlCDR3
QQYGSSPWT

SEQ ID NO: 435 - protein, 246 aa, Artificial Sequence
  Description of Artificial Sequence: Synthetic polypeptide
  XENP019772 [CTLA-4]_H0.28_L0_scFv(GKPGS)4
QVQLVESGGGVVQPGRSLRLSCAASGFTFSSYVMHWVRQAPGKGLEWVTFISYDGNNKYYADSVKGRFTISRDNSKNTLYLQMNSLRAEDTAIYYCARTGWLGPFDYWGQGTLVTVSSGKPGSGKPGSGKPGSGKPGSEIVLTQSPGTLSLSPGERATLSCRASQSVGSSYLAWYQQKPGQAPRLLIYGAFSRATGIPDRFSGSGSGTDFTLTISRLEPEDFAVYYCQQYGSSPWTFGQGTKVEIK

SEQ ID NO: 436 - protein, 118 aa, Artificial Sequence
  Description of Artificial Sequence: Synthetic polypeptide
  VH of XENP019772
QVQLVESGGGVVQPGRSLRLSCAASGFTFSSYVMHWVRQAPGKGLEWVTFISYDGNNKYYADSVKGRFTISRDNSKNTLYLQMNSLRAEDTAIYYCARTGWLGPFDYWGQGTLVTVSS

SEQ ID NO: 437 - protein, 108 aa, Artificial Sequence; identical to SEQ ID NO: 23
  Description of Artificial Sequence: Synthetic polypeptide
  VL of XENP019772

SEQ ID NO: 438 - protein, 5 aa, Artificial Sequence
  Description of Artificial Sequence: Synthetic peptide
  XENP019772 vhCDR1
SYVMH

SEQ ID NO: 439 - protein, 17 aa, Artificial Sequence
  Description of Artificial Sequence: Synthetic peptide
  XENP019772 vhCDR2
FISYDGNNKYYADSVKG

SEQ ID NO: 440 - protein, 9 aa, Artificial Sequence
  Description of Artificial Sequence: Synthetic peptide
  XENP019772 vhCDR3
TGWLGPFDY

SEQ ID NO: 441 - protein, 12 aa, Artificial Sequence
  Description of Artificial Sequence: Synthetic peptide
  XENP019772 vlCDR1
RASQSVGSSYLA

SEQ ID NO: 442 - protein, 7 aa, Artificial Sequence
  Description of Artificial Sequence: Synthetic peptide
  XENP019772 vlCDR2
GAFSRAT

SEQ ID NO: 443 - protein, 9 aa, Artificial Sequence
  Description of Artificial Sequence: Synthetic peptide
  XENP019772 vlCDR3
QQYGSSPWT

SEQ ID NO: 444 - protein, 246 aa, Artificial Sequence
  Description of Artificial Sequence: Synthetic polypeptide
  XENP019773 [CTLA-4]_H0.29_L0_scFv(GKPGS)4
QVQLVESGGGVVQPGRSLRLSCAASGFTFSSYYMHWVRQAPGKGLEWVTFISYDGNNKYYADSVKGRFTISRDNSKNTLYLQMNSLRAEDTAIYYCARTGWLGPFDYWGQGTLVTVSSGKPGSGKPGSGKPGSGKPGSEIVLTQSPGTLSLSPGERATLSCRASQSVGSSYLAWYQQKPGQAPRLLIYGAFSRATGIPDRFSGSGSGTDFTLTISRLEPEDFAVYYCQQYGSSPWTFGQGTKVEIK

SEQ ID NO: 445 - protein, 118 aa, Artificial Sequence
  Description of Artificial Sequence: Synthetic polypeptide
  VH of XENP019773
QVQLVESGGGVVQPGRSLRLSCAASGFTFSSYYMHWVRQAPGKGLEWVTFISYDGNNKYYADSVKGRFTISRDNSKNTLYLQMNSLRAEDTAIYYCARTGWLGPFDYWGQGTLVTVSS

SEQ ID NO: 446 - protein, 108 aa, Artificial Sequence; identical to SEQ ID NO: 23
  Description of Artificial Sequence: Synthetic polypeptide
  VL of XENP019773

SEQ ID NO: 447 - protein, 5 aa, Artificial Sequence
  Description of Artificial Sequence: Synthetic peptide
  XENP019773 vhCDR1
SYYMH

SEQ ID NO: 448 - protein, 17 aa, Artificial Sequence
  Description of Artificial Sequence: Synthetic peptide
  XENP019773 vhCDR2
FISYDGNNKYYADSVKG

SEQ ID NO: 449 - protein, 9 aa, Artificial Sequence
  Description of Artificial Sequence: Synthetic peptide
  XENP019773 vhCDR3
TGWLGPFDY

SEQ ID NO: 450 - protein, 12 aa, Artificial Sequence
  Description of Artificial Sequence: Synthetic peptide
  XENP019773 vlCDR1
RASQSVGSSYLA

SEQ ID NO: 451 - protein, 7 aa, Artificial Sequence
  Description of Artificial Sequence: Synthetic peptide
  XENP019773 vlCDR2
GAFSRAT

SEQ ID NO: 452 - protein, 9 aa, Artificial Sequence
  Description of Artificial Sequence: Synthetic peptide
  XENP019773 vlCDR3
QQYGSSPWT

SEQ ID NO: 453 - protein, 246 aa, Artificial Sequence
  Description of Artificial Sequence: Synthetic polypeptide
  XENP019774 [CTLA-4]_H0.30_L0_scFv(GKPGS)4
QVQLVESGGGVVQPGRSLRLSCAASGFTFSSYTMDWVRQAPGKGLEWVTFISYDGNNKYYADSVKGRFTISRDNSKNTLYLQMNSLRAEDTAIYYCARTGWLGPFDYWGQGTLVTVSSGKPGSGKPGSGKPGSGKPGSEIVLTQSPGTLSLSPGERATLSCRASQSVGSSYLAWYQQKPGQAPRLLIYGAFSRATGIPDRFSGSGSGTDFTLTISRLEPEDFAVYYCQQYGSSPWTFGQGTKVEIK

SEQ ID NO: 454 - protein, 118 aa, Artificial Sequence
  Description of Artificial Sequence: Synthetic polypeptide
  VH of XENP019774
QVQLVESGGGVVQPGRSLRLSCAASGFTFSSYTMDWVRQAPGKGLEWVTFISYDGNNKYYADSVKGRFTISRDNSKNTLYLQMNSLRAEDTAIYYCARTGWLGPFDYWGQGTLVTVSS

SEQ ID NO: 455 - protein, 108 aa, Artificial Sequence; identical to SEQ ID NO: 23
  Description of Artificial Sequence: Synthetic polypeptide
  VL of XENP019774

SEQ ID NO: 456 - protein, 5 aa, Artificial Sequence
  Description of Artificial Sequence: Synthetic peptide
  XENP019774 vhCDR1
SYTMD

SEQ ID NO: 457 - protein, 17 aa, Artificial Sequence
  Description of Artificial Sequence: Synthetic peptide
  XENP019774 vhCDR2
FISYDGNNKYYADSVKG

SEQ ID NO: 458 - protein, 9 aa, Artificial Sequence
  Description of Artificial Sequence: Synthetic peptide
  XENP019774 vhCDR3
TGWLGPFDY

SEQ ID NO: 459 - protein, 12 aa, Artificial Sequence
  Description of Artificial Sequence: Synthetic peptide
  XENP019774 vlCDR1
RASQSVGSSYLA

SEQ ID NO: 460 - protein, 7 aa, Artificial Sequence
  Description of Artificial Sequence: Synthetic peptide
  XENP019774 vlCDR2
GAFSRAT

SEQ ID NO: 461 - protein, 9 aa, Artificial Sequence
  Description of Artificial Sequence: Synthetic peptide
  XENP019774 vlCDR3
QQYGSSPWT

SEQ ID NO: 462 - protein, 246 aa, Artificial Sequence
  Description of Artificial Sequence: Synthetic polypeptide
  XENP019775 [CTLA-4]_H0.31_L0_scFv(GKPGS)4
QVQLVESGGGVVQPGRSLRLSCAASGFTFSSYTMFWVRQAPGKGLEWVTFISYDGNNKYYADSVKGRFTISRDNSKNTLYLQMNSLRAEDTAIYYCARTGWLGPFDYWGQGTLVTVSSGKPGSGKPGSGKPGSGKPGSEIVLTQSPGTLSLSPGERATLSCRASQSVGSSYLAWYQQKPGQAPRLLIYGAFSRATGIPDRFSGSGSGTDFTLTISRLEPEDFAVYYCQQYGSSPWTFGQGTKVEIK

SEQ ID NO: 463 - protein, 118 aa, Artificial Sequence
  Description of Artificial Sequence: Synthetic polypeptide
  VH of XENP019775
QVQLVESGGGVVQPGRSLRLSCAASGFTFSSYTMFWVRQAPGKGLEWVTFISYDGNNKYYADSVKGRFTISRDNSKNTLYLQMNSLRAEDTAIYYCARTGWLGPFDYWGQGTLVTVSS

SEQ ID NO: 464 - protein, 108 aa, Artificial Sequence; identical to SEQ ID NO: 23
  Description of Artificial Sequence: Synthetic polypeptide
  VL of XENP019775

SEQ ID NO: 465 - protein, 5 aa, Artificial Sequence
  Description of Artificial Sequence: Synthetic peptide
  XENP019775 vhCDR1
SYTMF

SEQ ID NO: 466 - protein, 17 aa, Artificial Sequence
  Description of Artificial Sequence: Synthetic peptide
  XENP019775 vhCDR2
FISYDGNNKYYADSVKG

SEQ ID NO: 467 - protein, 9 aa, Artificial Sequence
  Description of Artificial Sequence: Synthetic peptide
  XENP019775 vhCDR3
TGWLGPFDY

SEQ ID NO: 468 - protein, 12 aa, Artificial Sequence
  Description of Artificial Sequence: Synthetic peptide
  XENP019775 vlCDR1
RASQSVGSSYLA

SEQ ID NO: 469 - protein, 7 aa, Artificial Sequence
  Description of Artificial Sequence: Synthetic peptide
  XENP019775 vlCDR2
GAFSRAT

SEQ ID NO: 470 - protein, 9 aa, Artificial Sequence
  Description of Artificial Sequence: Synthetic peptide
  XENP019775 vlCDR3
QQYGSSPWT

SEQ ID NO: 471 - protein, 246 aa, Artificial Sequence
  Description of Artificial Sequence: Synthetic polypeptide
  XENP019776 [CTLA-4]_H0.32_L0_scFv(GKPGS)4
QVQLVESGGGVVQPGRSLRLSCAASGFTFSSYTMNWVRQAPGKGLEWVTFISYDGNNKYYADSVKGRFTISRDNSKNTLYLQMNSLRAEDTAIYYCARTGWLGPFDYWGQGTLVTVSSGKPGSGKPGSGKPGSGKPGSEIVLTQSPGTLSLSPGERATLSCRASQSVGSSYLAWYQQKPGQAPRLLIYGAFSRATGIPDRFSGSGSGTDFTLTISRLEPEDFAVYYCQQYGSSPWTFGQGTKVEIK

SEQ ID NO: 472 - protein, 118 aa, Artificial Sequence
  Description of Artificial Sequence: Synthetic polypeptide
  VH of XENP019776
QVQLVESGGGVVQPGRSLRLSCAASGFTFSSYTMNWVRQAPGKGLEWVTFISYDGNNKYYADSVKGRFTISRDNSKNTLYLQMNSLRAEDTAIYYCARTGWLGPFDYWGQGTLVTVSS

SEQ ID NO: 473 - protein, 108 aa, Artificial Sequence; identical to SEQ ID NO: 23
  Description of Artificial Sequence: Synthetic polypeptide
  VL of XENP019776

SEQ ID NO: 474 - protein, 5 aa, Artificial Sequence
  Description of Artificial Sequence: Synthetic peptide
  XENP019776 vhCDR1
SYTMN

SEQ ID NO: 475 - protein, 17 aa, Artificial Sequence
  Description of Artificial Sequence: Synthetic peptide
  XENP019776 vhCDR2
FISYDGNNKYYADSVKG

SEQ ID NO: 476 - protein, 9 aa, Artificial Sequence
  Description of Artificial Sequence: Synthetic peptide
  XENP019776 vhCDR3
TGWLGPFDY

SEQ ID NO: 477 - protein, 12 aa, Artificial Sequence
  Description of Artificial Sequence: Synthetic peptide
  XENP019776 vlCDR1
RASQSVGSSYLA

SEQ ID NO: 478 - protein, 7 aa, Artificial Sequence
  Description of Artificial Sequence: Synthetic peptide
  XENP019776 vlCDR2
GAFSRAT

SEQ ID NO: 479 - protein, 9 aa, Artificial Sequence
  Description of Artificial Sequence: Synthetic peptide
  XENP019776 vlCDR3
QQYGSSPWT

SEQ ID NO: 480 - protein, 246 aa, Artificial Sequence
  Description of Artificial Sequence: Synthetic polypeptide
  XENP019777 [CTLA-4]_H0.33_L0_scFv(GKPGS)4
QVQLVESGGGVVQPGRSLRLSCAASGFTFSSYTMSWVRQAPGKGLEWVTFISYDGNNKYYADSVKGRFTISRDNSKNTLYLQMNSLRAEDTAIYYCARTGWLGPFDYWGQGTLVTVSSGKPGSGKPGSGKPGSGKPGSEIVLTQSPGTLSLSPGERATLSCRASQSVGSSYLAWYQQKPGQAPRLLIYGAFSRATGIPDRFSGSGSGTDFTLTISRLEPEDFAVYYCQQYGSSPWTFGQGTKVEIK

SEQ ID NO: 481 - protein, 118 aa, Artificial Sequence
  Description of Artificial Sequence: Synthetic polypeptide
  VH of XENP019777
QVQLVESGGGVVQPGRSLRLSCAASGFTFSSYTMSWVRQAPGKGLEWVTFISYDGNNKYYADSVKGRFTISRDNSKNTLYLQMNSLRAEDTAIYYCARTGWLGPFDYWGQGTLVTVSS

SEQ ID NO: 482 - protein, 108 aa, Artificial Sequence; identical to SEQ ID NO: 23
  Description of Artificial Sequence: Synthetic polypeptide
  VL of XENP019777

SEQ ID NO: 483 - protein, 5 aa, Artificial Sequence
  Description of Artificial Sequence: Synthetic peptide
  XENP019777 vhCDR1
SYTMS

SEQ ID NO: 484 - protein, 17 aa, Artificial Sequence
  Description of Artificial Sequence: Synthetic peptide
  XENP019777 vhCDR2
FISYDGNNKYYADSVKG

SEQ ID NO: 485 - protein, 9 aa, Artificial Sequence
  Description of Artificial Sequence: Synthetic peptide
  XENP019777 vhCDR3
TGWLGPFDY

SEQ ID NO: 486 - protein, 12 aa, Artificial Sequence
  Description of Artificial Sequence: Synthetic peptide
  XENP019777 vlCDR1
RASQSVGSSYLA

SEQ ID NO: 487 - protein, 7 aa, Artificial Sequence
  Description of Artificial Sequence: Synthetic peptide
  XENP019777 vlCDR2
GAFSRAT

SEQ ID NO: 488 - protein, 9 aa, Artificial Sequence
  Description of Artificial Sequence: Synthetic peptide
  XENP019777 vlCDR3
QQYGSSPWT

SEQ ID NO: 489 - protein, 246 aa, Artificial Sequence
  Description of Artificial Sequence: Synthetic polypeptide
  XENP019778 [CTLA-4]_H0.34_L0_scFv(GKPGS)4
QVQLVESGGGVVQPGRSLRLSCAASGFTFSSYTMYWVRQAPGKGLEWVTFISYDGNNKYYADSVKGRFTISRDNSKNTLYLQMNSLRAEDTAIYYCARTGWLGPFDYWGQGTLVTVSSGKPGSGKPGSGKPGSGKPGSEIVLTQSPGTLSLSPGERATLSCRASQSVGSSYLAWYQQKPGQAPRLLIYGAFSRATGIPDRFSGSGSGTDFTLTISRLEPEDFAVYYCQQYGSSPWTFGQGTKVEIK

SEQ ID NO: 490 - protein, 118 aa, Artificial Sequence
  Description of Artificial Sequence: Synthetic polypeptide
  VH of XENP019778
QVQLVESGGGVVQPGRSLRLSCAASGFTFSSYTMYWVRQAPGKGLEWVTFISYDGNNKYYADSVKGRFTISRDNSKNTLYLQMNSLRAEDTAIYYCARTGWLGPFDYWGQGTLVTVSS

SEQ ID NO: 491 - protein, 108 aa, Artificial Sequence; identical to SEQ ID NO: 23
  Description of Artificial Sequence: Synthetic polypeptide
  VL of XENP019778

SEQ ID NO: 492 - protein, 5 aa, Artificial Sequence
  Description of Artificial Sequence: Synthetic peptide
  XENP019778 vhCDR1
SYTMY

SEQ ID NO: 493 - protein, 17 aa, Artificial Sequence
  Description of Artificial Sequence: Synthetic peptide
  XENP019778 vhCDR2
FISYDGNNKYYADSVKG

SEQ ID NO: 494 - protein, 9 aa, Artificial Sequence
  Description of Artificial Sequence: Synthetic peptide
  XENP019778 vhCDR3
TGWLGPFDY

SEQ ID NO: 495 - protein, 12 aa, Artificial Sequence
  Description of Artificial Sequence: Synthetic peptide
  XENP019778 vlCDR1
RASQSVGSSYLA

SEQ ID NO: 496 - protein, 7 aa, Artificial Sequence
  Description of Artificial Sequence: Synthetic peptide
  XENP019778 vlCDR2
GAFSRAT

SEQ ID NO: 497 - protein, 9 aa, Artificial Sequence
  Description of Artificial Sequence: Synthetic peptide
  XENP019778 vlCDR3
QQYGSSPWT

SEQ ID NO: 498 - protein, 246 aa, Artificial Sequence
  Description of Artificial Sequence: Synthetic polypeptide
  XENP019779 [CTLA-4]_H0.35_L0_scFv(GKPGS)4
QVQLVESGGGVVQPGRSLRLSCAASGFTFSSYTMHWIRQAPGKGLEWVTFISYDGNNKYYADSVKGRFTISRDNSKNTLYLQMNSLRAEDTAIYYCARTGWLGPFDYWGQGTLVTVSSGKPGSGKPGSGKPGSGKPGSEIVLTQSPGTLSLSPGERATLSCRASQSVGSSYLAWYQQKPGQAPRLLIYGAFSRATGIPDRFSGSGSGTDFTLTISRLEPEDFAVYYCQQYGSSPWTFGQGTKVEIK

SEQ ID NO: 499 - protein, 118 aa, Artificial Sequence
  Description of Artificial Sequence: Synthetic polypeptide
  VH of XENP019779
QVQLVESGGGVVQPGRSLRLSCAASGFTFSSYTMHWIRQAPGKGLEWVTFISYDGNNKYYADSVKGRFTISRDNSKNTLYLQMNSLRAEDTAIYYCARTGWLGPFDYWGQGTLVTVSS

SEQ ID NO: 500 - protein, 108 aa, Artificial Sequence; identical to SEQ ID NO: 23
  Description of Artificial Sequence: Synthetic polypeptide
  VL of XENP019779

SEQ ID NO: 501 - protein, 5 aa, Artificial Sequence
  Description of Artificial Sequence: Synthetic peptide
  XENP019779 vhCDR1
SYTMH

SEQ ID NO: 502 - protein, 17 aa, Artificial Sequence
  Description of Artificial Sequence: Synthetic peptide
  XENP019779 vhCDR2
FISYDGNNKYYADSVKG

SEQ ID NO: 503 - protein, 9 aa, Artificial Sequence
  Description of Artificial Sequence: Synthetic peptide
  XENP019779 vhCDR3
TGWLGPFDY

SEQ ID NO: 504 - protein, 12 aa, Artificial Sequence
  Description of Artificial Sequence: Synthetic peptide
  XENP019779 vlCDR1
RASQSVGSSYLA

SEQ ID NO: 505 - protein, 7 aa, Artificial Sequence
  Description of Artificial Sequence: Synthetic peptide
  XENP019779 vlCDR2
GAFSRAT

SEQ ID NO: 506 - protein, 9 aa, Artificial Sequence
  Description of Artificial Sequence: Synthetic peptide
  XENP019779 vlCDR3
QQYGSSPWT

SEQ ID NO: 507 - protein, 246 aa, Artificial Sequence
  Description of Artificial Sequence: Synthetic polypeptide
  XENP019780 [CTLA-4]_H0.36_L0_scFv(GKPGS)4
QVQLVESGGGVVQPGRSLRLSCAASGFTFSSYTMHWVRKAPGKGLEWVTFISYDGNNKYYADSVKGRFTISRDNSKNTLYLQMNSLRAEDTAIYYCARTGWLGPFDYWGQGTLVTVSSGKPGSGKPGSGKPGSGKPGSEIVLTQSPGTLSLSPGERATLSCRASQSVGSSYLAWYQQKPGQAPRLLIYGAFSRATGIPDRFSGSGSGTDFTLTISRLEPEDFAVYYCQQYGSSPWTFGQGTKVEIK

SEQ ID NO: 508 - protein, 118 aa, Artificial Sequence; identical to SEQ ID NO: 31
  Description of Artificial Sequence: Synthetic polypeptide
  VH of XENP019780

SEQ ID NO: 509 - protein, 108 aa, Artificial Sequence; identical to SEQ ID NO: 23
  Description of Artificial Sequence: Synthetic polypeptide
  VL of XENP019780

SEQ ID NO: 510 - protein, 5 aa, Artificial Sequence
  Description of Artificial Sequence: Synthetic peptide
  XENP019780 vhCDR1
SYTMH

SEQ ID NO: 511 - protein, 17 aa, Artificial Sequence
  Description of Artificial Sequence: Synthetic peptide
  XENP019780 vhCDR2
FISYDGNNKYYADSVKG

SEQ ID NO: 512 - protein, 9 aa, Artificial Sequence
  Description of Artificial Sequence: Synthetic peptide
  XENP019780 vhCDR3
TGWLGPFDY

SEQ ID NO: 513 - protein, 12 aa, Artificial Sequence
  Description of Artificial Sequence: Synthetic peptide
  XENP019780 vlCDR1
RASQSVGSSYLA

SEQ ID NO: 514 - protein, 7 aa, Artificial Sequence
  Description of Artificial Sequence: Synthetic peptide
  XENP019780 vlCDR2
GAFSRAT

SEQ ID NO: 515 - protein, 9 aa, Artificial Sequence
  Description of Artificial Sequence: Synthetic peptide
  XENP019780 vlCDR3
QQYGSSPWT

SEQ ID NO: 516 - protein, 246 aa, Artificial Sequence
  Description of Artificial Sequence: Synthetic polypeptide
  XENP019781 [CTLA-4]_H0.37_L0_scFv(GKPGS)4
QVQLVESGGGVVQPGRSLRLSCAASGFTFSSYTMHWVRQAPGKRLEWVTFISYDGNNKYYADSVKGRFTISRDNSKNTLYLQMNSLRAEDTAIYYCARTGWLGPFDYWGQGTLVTVSSGKPGSGKPGSGKPGSGKPGSEIVLTQSPGTLSLSPGERATLSCRASQSVGSSYLAWYQQKPGQAPRLLIYGAFSRATGIPDRFSGSGSGTDFTLTISRLEPEDFAVYYCQQYGSSPWTFGQGTKVEIK

SEQ ID NO: 517 - protein, 118 aa, Artificial Sequence; identical to SEQ ID NO: 49
  Description of Artificial Sequence: Synthetic polypeptide
  VH of XENP019781

SEQ ID NO: 518 - protein, 108 aa, Artificial Sequence; identical to SEQ ID NO: 23
  Description of Artificial Sequence: Synthetic polypeptide
  VL of XENP019781

SEQ ID NO: 519 - protein, 5 aa, Artificial Sequence
  Description of Artificial Sequence: Synthetic peptide
  XENP019781 vhCDR1
SYTMH

SEQ ID NO: 520 - protein, 17 aa, Artificial Sequence
  Description of Artificial Sequence: Synthetic peptide
  XENP019781 vhCDR2
FISYDGNNKYYADSVKG

SEQ ID NO: 521 - protein, 9 aa, Artificial Sequence
  Description of Artificial Sequence: Synthetic peptide
  XENP019781 vhCDR3
TGWLGPFDY

SEQ ID NO: 522 - protein, 12 aa, Artificial Sequence
  Description of Artificial Sequence: Synthetic peptide
  XENP019781 vlCDR1
RASQSVGSSYLA

SEQ ID NO: 523 - protein, 7 aa, Artificial Sequence
  Description of Artificial Sequence: Synthetic peptide
  XENP019781 vlCDR2
GAFSRAT

SEQ ID NO: 524 - protein, 9 aa, Artificial Sequence
  Description of Artificial Sequence: Synthetic peptide
  XENP019781 vlCDR3
QQYGSSPWT

SEQ ID NO: 525 - protein, 246 aa, Artificial Sequence
  Description of Artificial Sequence: Synthetic polypeptide
  XENP019782 [CTLA-4]_H0.38_L0_scFv(GKPGS)4
QVQLVESGGGVVQPGRSLRLSCAASGFTFSSYTMHWVRQAPGKGLEWVAFISYDGNNKYYADSVKGRFTISRDNSKNTLYLQMNSLRAEDTAIYYCARTGWLGPFDYWGQGTLVTVSSGKPGSGKPGSGKPGSGKPGSEIVLTQSPGTLSLSPGERATLSCRASQSVGSSYLAWYQQKPGQAPRLLIYGAFSRATGIPDRFSGSGSGTDFTLTISRLEPEDFAVYYCQQYGSSPWTFGQGTKVEIK

SEQ ID NO: 526 - protein, 118 aa, Artificial Sequence
  Description of Artificial Sequence: Synthetic polypeptide
  VH of XENP019782
QVQLVESGGGVVQPGRSLRLSCAASGFTFSSYTMHWVRQAPGKGLEWVAFISYDGNNKYYADSVKGRFTISRDNSKNTLYLQMNSLRAEDTAIYYCARTGWLGPFDYWGQGTLVTVSS

SEQ ID NO: 527 - protein, 108 aa, Artificial Sequence; identical to SEQ ID NO: 23
  Description of Artificial Sequence: Synthetic polypeptide
  VL of XENP019782

SEQ ID NO: 528 - protein, 5 aa, Artificial Sequence
  Description of Artificial Sequence: Synthetic peptide
  XENP019782 vhCDR1
SYTMH

SEQ ID NO: 529 - protein, 17 aa, Artificial Sequence
  Description of Artificial Sequence: Synthetic peptide
  XENP019782 vhCDR2
FISYDGNNKYYADSVKG

SEQ ID NO: 530 - protein, 9 aa, Artificial Sequence
  Description of Artificial Sequence: Synthetic peptide
  XENP019782 vhCDR3
TGWLGPFDY

SEQ ID NO: 531 - protein, 12 aa, Artificial Sequence
  Description of Artificial Sequence: Synthetic peptide
  XENP019782 vlCDR1
RASQSVGSSYLA

SEQ ID NO: 532 - protein, 7 aa, Artificial Sequence
  Description of Artificial Sequence: Synthetic peptide
  XENP019782 vlCDR2
GAFSRAT

SEQ ID NO: 533 - protein, 9 aa, Artificial Sequence
  Description of Artificial Sequence: Synthetic peptide
  XENP019782 vlCDR3
QQYGSSPWT

SEQ ID NO: 534 - protein, 246 aa, Artificial Sequence
  Description of Artificial Sequence: Synthetic polypeptide
  XENP019783 [CTLA-4]_H0.39_L0_scFv(GKPGS)4
QVQLVESGGGVVQPGRSLRLSCAASGFTFSSYTMHWVRQAPGKGLEWVGFISYDGNNKYYADSVKGRFTISRDNSKNTLYLQMNSLRAEDTAIYYCARTGWLGPFDYWGQGTLVTVSSGKPGSGKPGSGKPGSGKPGSEIVLTQSPGTLSLSPGERATLSCRASQSVGSSYLAWYQQKPGQAPRLLIYGAFSRATGIPDRFSGSGSGTDFTLTISRLEPEDFAVYYCQQYGSSPWTFGQGTKVEIK

SEQ ID NO: 535 - protein, 118 aa, Artificial Sequence
  Description of Artificial Sequence: Synthetic polypeptide
  VH of XENP019783
QVQLVESGGGVVQPGRSLRLSCAASGFTFSSYTMHWVRQAPGKGLEWVGFISYDGNNKYYADSVKGRFTISRDNSKNTLYLQMNSLRAEDTAIYYCARTGWLGPFDYWGQGTLVTVSS

SEQ ID NO: 536 - protein, 108 aa, Artificial Sequence; identical to SEQ ID NO: 23
  Description of Artificial Sequence: Synthetic polypeptide
  VL of XENP019783

SEQ ID NO: 537 - protein, 5 aa, Artificial Sequence
  Description of Artificial Sequence: Synthetic peptide
  XENP019783 vhCDR1
SYTMH

SEQ ID NO: 538 - protein, 17 aa, Artificial Sequence
  Description of Artificial Sequence: Synthetic peptide
  XENP019783 vhCDR2
FISYDGNNKYYADSVKG

SEQ ID NO: 539 - protein, 9 aa, Artificial Sequence
  Description of Artificial Sequence: Synthetic peptide
  XENP019783 vhCDR3
TGWLGPFDY

SEQ ID NO: 540 - protein, 12 aa, Artificial Sequence
  Description of Artificial Sequence: Synthetic peptide
  XENP019783 vlCDR1
RASQSVGSSYLA

SEQ ID NO: 541 - protein, 7 aa, Artificial Sequence
  Description of Artificial Sequence: Synthetic peptide
  XENP019783 vlCDR2
GAFSRAT

SEQ ID NO: 542 - protein, 9 aa, Artificial Sequence
  Description of Artificial Sequence: Synthetic peptide
  XENP019783 vlCDR3
QQYGSSPWT

SEQ ID NO: 543 - protein, 246 aa, Artificial Sequence
  Description of Artificial Sequence: Synthetic polypeptide
  XENP019784 [CTLA-4]_H0.40_L0_scFv(GKPGS)4
QVQLVESGGGVVQPGRSLRLSCAASGFTFSSYTMHWVRQAPGKGLEWVSFISYDGNNKYYADSVKGRFTISRDNSKNTLYLQMNSLRAEDTAIYYCARTGWLGPFDYWGQGTLVTVSSGKPGSGKPGSGKPGSGKPGSEIVLTQSPGTLSLSPGERATLSCRASQSVGSSYLAWYQQKPGQAPRLLIYGAFSRATGIPDRFSGSGSGTDFTLTISRLEPEDFAVYYCQQYGSSPWTFGQGTKVEIK

SEQ ID NO: 544 - protein, 118 aa, Artificial Sequence
  Description of Artificial Sequence: Synthetic polypeptide
  VH of XENP019784
QVQLVESGGGVVQPGRSLRLSCAASGFTFSSYTMHWVRQAPGKGLEWVSFISYDGNNKYYADSVKGRFTISRDNSKNTLYLQMNSLRAEDTAIYYCARTGWLGPFDYWGQGTLVTVSS

SEQ ID NO: 545 - protein, 108 aa, Artificial Sequence; identical to SEQ ID NO: 23
  Description of Artificial Sequence: Synthetic polypeptide
  VL of XENP019784

SEQ ID NO: 546 - protein, 5 aa, Artificial Sequence
  Description of Artificial Sequence: Synthetic peptide
  XENP019784 vhCDR1
SYTMH

SEQ ID NO: 547 - protein, 17 aa, Artificial Sequence
  Description of Artificial Sequence: Synthetic peptide
  XENP019784 vhCDR2
FISYDGNNKYYADSVKG

SEQ ID NO: 548 - protein, 9 aa, Artificial Sequence
  Description of Artificial Sequence: Synthetic peptide
  XENP019784 vhCDR3
TGWLGPFDY

SEQ ID NO: 549 - protein, 12 aa, Artificial Sequence
  Description of Artificial Sequence: Synthetic peptide
  XENP019784 vlCDR1
RASQSVGSSYLA

SEQ ID NO: 550 - protein, 7 aa, Artificial Sequence
  Description of Artificial Sequence: Synthetic peptide
  XENP019784 vlCDR2
GAFSRAT

SEQ ID NO: 551 - protein, 9 aa, Artificial Sequence
  Description of Artificial Sequence: Synthetic peptide
  XENP019784 vlCDR3
QQYGSSPWT

SEQ ID NO: 552 - protein, 246 aa, Artificial Sequence
  Description of Artificial Sequence: Synthetic polypeptide
  XENP019785 [CTLA-4]_H0.41_L0_scFv(GKPGS)4
QVQLVESGGGVVQPGRSLRLSCAASGFTFSSYTMHWVRQAPGKGLEWVVFISYDGNNKYYADSVKGRFTISRDNSKNTLYLQMNSLRAEDTAIYYCARTGWLGPFDYWGQGTLVTVSSGKPGSGKPGSGKPGSGKPGSEIVLTQSPGTLSLSPGERATLSCRASQSVGSSYLAWYQQKPGQAPRLLIYGAFSRATGIPDRFSGSGSGTDFTLTISRLEPEDFAVYYCQQYGSSPWTFGQGTKVEIK

SEQ ID NO: 553 - protein, 118 aa, Artificial Sequence
  Description of Artificial Sequence: Synthetic polypeptide
  VH of XENP019785
QVQLVESGGGVVQPGRSLRLSCAASGFTFSSYTMHWVRQAPGKGLEWVVFISYDGNNKYYADSVKGRFTISRDNSKNTLYLQMNSLRAEDTAIYYCARTGWLGPFDYWGQGTLVTVSS

SEQ ID NO: 554 - protein, 108 aa, Artificial Sequence; identical to SEQ ID NO: 23
  Description of Artificial Sequence: Synthetic polypeptide
  VL of XENP019785

SEQ ID NO: 555 - protein, 5 aa, Artificial Sequence
  Description of Artificial Sequence: Synthetic peptide
  XENP019785 vhCDR1
SYTMH

SEQ ID NO: 556 - protein, 17 aa, Artificial Sequence
  Description of Artificial Sequence: Synthetic peptide
  XENP019785 vhCDR2
FISYDGNNKYYADSVKG

SEQ ID NO: 557 - protein, 9 aa, Artificial Sequence
  Description of Artificial Sequence: Synthetic peptide
  XENP019785 vhCDR3
TGWLGPFDY

SEQ ID NO: 558 - protein, 12 aa, Artificial Sequence
  Description of Artificial Sequence: Synthetic peptide
  XENP019785 vlCDR1
RASQSVGSSYLA

SEQ ID NO: 559 - protein, 7 aa, Artificial Sequence
  Description of Artificial Sequence: Synthetic peptide
  XENP019785 vlCDR2
GAFSRAT

SEQ ID NO: 560 - protein, 9 aa, Artificial Sequence
  Description of Artificial Sequence: Synthetic peptide
  XENP019785 vlCDR3
QQYGSSPWT

SEQ ID NO: 561 - protein, 246 aa, Artificial Sequence
  Description of Artificial Sequence: Synthetic polypeptide
  XENP019786 [CTLA-4]_H0.42_L0_scFv(GKPGS)4
QVQLVESGGGVVQPGRSLRLSCAASGFTFSSYTMHWVRQAPGKGLEWVTAISYDGNNKYYADSVKGRFTISRDNSKNTLYLQMNSLRAEDTAIYYCARTGWLGPFDYWGQGTLVTVSSGKPGSGKPGSGKPGSGKPGSEIVLTQSPGTLSLSPGERATLSCRASQSVGSSYLAWYQQKPGQAPRLLIYGAFSRATGIPDRFSGSGSGTDFTLTISRLEPEDFAVYYCQQYGSSPWTFGQGTKVEIK

SEQ ID NO: 562 - protein, 118 aa, Artificial Sequence
  Description of Artificial Sequence: Synthetic polypeptide
  VH of XENP019786
QVQLVESGGGVVQPGRSLRLSCAASGFTFSSYTMHWVRQAPGKGLEWVTAISYDGNNKYYADSVKGRFTISRDNSKNTLYLQMNSLRAEDTAIYYCARTGWLGPFDYWGQGTLVTVSS

SEQ ID NO: 563 - protein, 108 aa, Artificial Sequence; identical to SEQ ID NO: 23
  Description of Artificial Sequence: Synthetic polypeptide
  VL of XENP019786

SEQ ID NO: 564 - protein, 5 aa, Artificial Sequence
  Description of Artificial Sequence: Synthetic peptide
  XENP019786 vhCDR1
SYTMH

SEQ ID NO: 565 - protein, 17 aa, Artificial Sequence
  Description of Artificial Sequence: Synthetic peptide
  XENP019786 vhCDR2
AISYDGNNKYYADSVKG

SEQ ID NO: 566 - protein, 9 aa, Artificial Sequence
  Description of Artificial Sequence: Synthetic peptide
  XENP019786 vhCDR3
TGWLGPFDY

SEQ ID NO: 567 - protein, 12 aa, Artificial Sequence
  Description of Artificial Sequence: Synthetic peptide
  XENP019786 vlCDR1
RASQSVGSSYLA

SEQ ID NO: 568 - protein, 7 aa, Artificial Sequence
  Description of Artificial Sequence: Synthetic peptide
  XENP019786 vlCDR2
GAFSRAT

SEQ ID NO: 569 - protein, 9 aa, Artificial Sequence
  Description of Artificial Sequence: Synthetic peptide
  XENP019786 vlCDR3
QQYGSSPWT

SEQ ID NO: 570 - protein, 246 aa, Artificial Sequence
  Description of Artificial Sequence: Synthetic polypeptide
  XENP019787 [CTLA-4]_H0.43_L0_scFv(GKPGS)4
QVQLVESGGGVVQPGRSLRLSCAASGFTFSSYTMHWVRQAPGKGLEWVTGISYDGNNKYYADSVKGRFTISRDNSKNTLYLQMNSLRAEDTAIYYCARTGWLGPFDYWGQGTLVTVSSGKPGSGKPGSGKPGSGKPGSEIVLTQSPGTLSLSPGERATLSCRASQSVGSSYLAWYQQKPGQAPRLLIYGAFSRATGIPDRFSGSGSGTDFTLTISRLEPEDFAVYYCQQYGSSPWTFGQGTKVEIK

SEQ ID NO: 571 - protein, 118 aa, Artificial Sequence
  Description of Artificial Sequence: Synthetic polypeptide
  VH of XENP019787
QVQLVESGGGVVQPGRSLRLSCAASGFTFSSYTMHWVRQAPGKGLEWVTGISYDGNNKYYADSVKGRFTISRDNSKNTLYLQMNSLRAEDTAIYYCARTGWLGPFDYWGQGTLVTVSS

SEQ ID NO: 572 - protein, 108 aa, Artificial Sequence; identical to SEQ ID NO: 23
  Description of Artificial Sequence: Synthetic polypeptide
  VL of XENP019787

SEQ ID NO: 573 - protein, 5 aa, Artificial Sequence
  Description of Artificial Sequence: Synthetic peptide
  XENP019787 vhCDR1
SYTMH

SEQ ID NO: 574 - protein, 17 aa, Artificial Sequence
  Description of Artificial Sequence: Synthetic peptide
  XENP019787 vhCDR2
GISYDGNNKYYADSVKG

SEQ ID NO: 575 - protein, 9 aa, Artificial Sequence
  Description of Artificial Sequence: Synthetic peptide
  XENP019787 vhCDR3
TGWLGPFDY

SEQ ID NO: 576 - protein, 12 aa, Artificial Sequence
  Description of Artificial Sequence: Synthetic peptide
  XENP019787 vlCDR1
RASQSVGSSYLA

SEQ ID NO: 577 - protein, 7 aa, Artificial Sequence
  Description of Artificial Sequence: Synthetic peptide
  XENP019787 vlCDR2
GAFSRAT

SEQ ID NO: 578 - protein, 9 aa, Artificial Sequence
  Description of Artificial Sequence: Synthetic peptide
  XENP019787 vlCDR3
QQYGSSPWT

SEQ ID NO: 579 - protein, 246 aa, Artificial Sequence
  Description of Artificial Sequence: Synthetic polypeptide
  XENP019788 [CTLA-4]_H0.44_L0_scFv(GKPGS)4
QVQLVESGGGVVQPGRSLRLSCAASGFTFSSYTMHWVRQAPGKGLEWVTLISYDGNNKYYADSVKGRFTISRDNSKNTLYLQMNSLRAEDTAIYYCARTGWLGPFDYWGQGTLVTVSSGKPGSGKPGSGKPGSGKPGSEIVLTQSPGTLSLSPGERATLSCRASQSVGSSYLAWYQQKPGQAPRLLIYGAFSRATGIPDRFSGSGSGTDFTLTISRLEPEDFAVYYCQQYGSSPWTFGQGTKVEIK

SEQ ID NO: 580 - protein, 118 aa, Artificial Sequence
  Description of Artificial Sequence: Synthetic polypeptide
  VH of XENP019788
QVQLVESGGGVVQPGRSLRLSCAASGFTFSSYTMHWVRQAPGKGLEWVTLISYDGNNKYYADSVKGRFTISRDNSKNTLYLQMNSLRAEDTAIYYCARTGWLGPFDYWGQGTLVTVSS

SEQ ID NO: 581 - protein, 108 aa, Artificial Sequence; identical to SEQ ID NO: 23
  Description of Artificial Sequence: Synthetic polypeptide
  VL of XENP019788

SEQ ID NO: 582 - protein, 5 aa, Artificial Sequence
  Description of Artificial Sequence: Synthetic peptide
  XENP019788 vhCDR1
SYTMH

SEQ ID NO: 583 - protein, 17 aa, Artificial Sequence
  Description of Artificial Sequence: Synthetic peptide
  XENP019788 vhCDR2
LISYDGNNKYYADSVKG

SEQ ID NO: 584 - protein, 9 aa, Artificial Sequence
  Description of Artificial Sequence: Synthetic peptide
  XENP019788 vhCDR3
TGWLGPFDY

SEQ ID NO: 585 - protein, 12 aa, Artificial Sequence
  Description of Artificial Sequence: Synthetic peptide
  XENP019788 vlCDR1
RASQSVGSSYLA

SEQ ID NO: 586 - protein, 7 aa, Artificial Sequence
  Description of Artificial Sequence: Synthetic peptide
  XENP019788 vlCDR2
GAFSRAT

SEQ ID NO: 587 - protein, 9 aa, Artificial Sequence
  Description of Artificial Sequence: Synthetic peptide
  XENP019788 vlCDR3
QQYGSSPWT

SEQ ID NO: 588 - protein, 246 aa, Artificial Sequence
  Description of Artificial Sequence: Synthetic polypeptide
  XENP019789 [CTLA-4]_H0.45_L0_scFv(GKPGS)4
QVQLVESGGGVVQPGRSLRLSCAASGFTFSSYTMHWVRQAPGKGLEWVTIISYDGNNKYYADSVKGRFTISRDNSKNTLYLQMNSLRAEDTAIYYCARTGWLGPFDYWGQGTLVTVSSGKPGSGKPGSGKPGSGKPGSEIVLTQSPGTLSLSPGERATLSCRASQSVGSSYLAWYQQKPGQAPRLLIYGAFSRATGIPDRFSGSGSGTDFTLTISRLEPEDFAVYYCQQYGSSPWTFGQGTKVEIK

SEQ ID NO: 589 - protein, 118 aa, Artificial Sequence
  Description of Artificial Sequence: Synthetic polypeptide
  VH of XENP019789
QVQLVESGGGVVQPGRSLRLSCAASGFTFSSYTMHWVRQAPGKGLEWVTIISYDGNNKYYADSVKGRFTISRDNSKNTLYLQMNSLRAEDTAIYYCARTGWLGPFDYWGQGTLVTVSS

SEQ ID NO: 590 - protein, 108 aa, Artificial Sequence; identical to SEQ ID NO: 23
  Description of Artificial Sequence: Synthetic polypeptide
  VL of XENP019789

SEQ ID NO: 591 - protein, 5 aa, Artificial Sequence
  Description of Artificial Sequence: Synthetic peptide
  XENP019789 vhCDR1
SYTMH

SEQ ID NO: 592 - protein, 17 aa, Artificial Sequence
  Description of Artificial Sequence: Synthetic peptide
  XENP019789 vhCDR2
IISYDGNNKYYADSVKG

SEQ ID NO: 593 - protein, 9 aa, Artificial Sequence
  Description of Artificial Sequence: Synthetic peptide
  XENP019789 vhCDR3
TGWLGPFDY

SEQ ID NO: 594 - protein, 12 aa, Artificial Sequence
  Description of Artificial Sequence: Synthetic peptide
  XENP019789 vlCDR1
RASQSVGSSYLA

SEQ ID NO: 595 - protein, 7 aa, Artificial Sequence
  Description of Artificial Sequence: Synthetic peptide
  XENP019789 vlCDR2
GAFSRAT

SEQ ID NO: 596 - protein, 9 aa, Artificial Sequence
  Description of Artificial Sequence: Synthetic peptide
  XENP019789 vlCDR3
QQYGSSPWT

SEQ ID NO: 597 - protein, 246 aa, Artificial Sequence
  Description of Artificial Sequence: Synthetic polypeptide
  XENP019790 [CTLA-4]_H0.46_L0_scFv(GKPGS)4
QVQLVESGGGVVQPGRSLRLSCAASGFTFSSYTMHWVRQAPGKGLEWVTRISYDGNNKYYADSVKGRFTISRDNSKNTLYLQMNSLRAEDTAIYYCARTGWLGPFDYWGQGTLVTVSSGKPGSGKPGSGKPGSGKPGSEIVLTQSPGTLSLSPGERATLSCRASQSVGSSYLAWYQQKPGQAPRLLIYGAFSRATGIPDRFSGSGSGTDFTLTISRLEPEDFAVYYCQQYGSSPWTFGQGTKVEIK

SEQ ID NO: 598 - protein, 118 aa, Artificial Sequence
  Description of Artificial Sequence: Synthetic polypeptide
  VH of XENP019790
QVQLVESGGGVVQPGRSLRLSCAASGFTFSSYTMHWVRQAPGKGLEWVTRISYDGNNKYYADSVKGRFTISRDNSKNTLYLQMNSLRAEDTAIYYCARTGWLGPFDYWGQGTLVTVSS

SEQ ID NO: 599 - protein, 108 aa, Artificial Sequence; identical to SEQ ID NO: 23
  Description of Artificial Sequence: Synthetic polypeptide
  VL of XENP019790

SEQ ID NO: 600 - protein, 5 aa, Artificial Sequence
  Description of Artificial Sequence: Synthetic peptide
  XENP019790 vhCDR1
SYTMH

SEQ ID NO: 601 - protein, 17 aa, Artificial Sequence
  Description of Artificial Sequence: Synthetic peptide
  XENP019790 vhCDR2
RISYDGNNKYYADSVKG

SEQ ID NO: 602 - protein, 9 aa, Artificial Sequence
  Description of Artificial Sequence: Synthetic peptide
  XENP019790 vhCDR3
TGWLGPFDY

SEQ ID NO: 603 - protein, 12 aa, Artificial Sequence
  Description of Artificial Sequence: Synthetic peptide
  XENP019790 vlCDR1
RASQSVGSSYLA

SEQ ID NO: 604 - protein, 7 aa, Artificial Sequence
  Description of Artificial Sequence: Synthetic peptide
  XENP019790 vlCDR2
GAFSRAT

SEQ ID NO: 605 - protein, 9 aa, Artificial Sequence
  Description of Artificial Sequence: Synthetic peptide
  XENP019790 vlCDR3
QQYGSSPWT

SEQ ID NO: 606 - protein, 246 aa, Artificial Sequence
  Description of Artificial Sequence: Synthetic polypeptide
  XENP019791 [CTLA-4]_H0.47_L0_scFv(GKPGS)4
QVQLVESGGGVVQPGRSLRLSCAASGFTFSSYTMHWVRQAPGKGLEWVTVISYDGNNKYYADSVKGRFTISRDNSKNTLYLQMNSLRAEDTAIYYCARTGWLGPFDYWGQGTLVTVSSGKPGSGKPGSGKPGSGKPGSEIVLTQSPGTLSLSPGERATLSCRASQSVGSSYLAWYQQKPGQAPRLLIYGAFSRATGIPDRFSGSGSGTDFTLTISRLEPEDFAVYYCQQYGSSPWTFGQGTKVEIK

SEQ ID NO: 607 - protein, 118 aa, Artificial Sequence
  Description of Artificial Sequence: Synthetic polypeptide
  VH of XENP019791
QVQLVESGGGVVQPGRSLRLSCAASGFTFSSYTMHWVRQAPGKGLEWVTVISYDGNNKYYADSVKGRFTISRDNSKNTLYLQMNSLRAEDTAIYYCARTGWLGPFDYWGQGTLVTVSS

SEQ ID NO: 608 - protein, 108 aa, Artificial Sequence; identical to SEQ ID NO: 23
  Description of Artificial Sequence: Synthetic polypeptide
  VL of XENP019791

SEQ ID NO: 609 - protein, 5 aa, Artificial Sequence
  Description of Artificial Sequence: Synthetic peptide
  XENP019791 vhCDR1
SYTMH

SEQ ID NO: 610 - protein, 17 aa, Artificial Sequence
  Description of Artificial Sequence: Synthetic peptide
  XENP019791 vhCDR2
VISYDGNNKYYADSVKG

SEQ ID NO: 611 - protein, 9 aa, Artificial Sequence
  Description of Artificial Sequence: Synthetic peptide
  XENP019791 vhCDR3
TGWLGPFDY

SEQ ID NO: 612 - protein, 12 aa, Artificial Sequence
  Description of Artificial Sequence: Synthetic peptide
  XENP019791 vlCDR1
RASQSVGSSYLA

SEQ ID NO: 613 - protein, 7 aa, Artificial Sequence
  Description of Artificial Sequence: Synthetic peptide
  XENP019791 vlCDR2
GAFSRAT

SEQ ID NO: 614 - protein, 9 aa, Artificial Sequence
  Description of Artificial Sequence: Synthetic peptide
  XENP019791 vlCDR3
QQYGSSPWT

SEQ ID NO: 615 - protein, 246 aa, Artificial Sequence
  Description of Artificial Sequence: Synthetic polypeptide
  XENP019792 [CTLA-4]_H0.48_L0_scFv(GKPGS)4
QVQLVESGGGVVQPGRSLRLSCAASGFTFSSYTMHWVRQAPGKGLEWVTYISYDGNNKYYADSVKGRFTISRDNSKNTLYLQMNSLRAEDTAIYYCARTGWLGPFDYWGQGTLVTVSSGKPGSGKPGSGKPGSGKPGSEIVLTQSPGTLSLSPGERATLSCRASQSVGSSYLAWYQQKPGQAPRLLIYGAFSRATGIPDRFSGSGSGTDFTLTISRLEPEDFAVYYCQQYGSSPWTFGQGTKVEIK

SEQ ID NO: 616 - protein, 118 aa, Artificial Sequence
  Description of Artificial Sequence: Synthetic polypeptide
  VH of XENP019792
QVQLVESGGGVVQPGRSLRLSCAASGFTFSSYTMHWVRQAPGKGLEWVTYISYDGNNKYYADSVKGRFTISRDNSKNTLYLQMNSLRAEDTAIYYCARTGWLGPFDYWGQGTLVTVSS

SEQ ID NO: 617 - protein, 108 aa, Artificial Sequence; identical to SEQ ID NO: 23
  Description of Artificial Sequence: Synthetic polypeptide
  VL of XENP019792

SEQ ID NO: 618 - protein, 5 aa, Artificial Sequence
  Description of Artificial Sequence: Synthetic peptide
  XENP019792 vhCDR1
SYTMH

SEQ ID NO: 619 - protein, 17 aa, Artificial Sequence
  Description of Artificial Sequence: Synthetic peptide
  XENP019792 vhCDR2
YISYDGNNKYYADSVKG

SEQ ID NO: 620 - protein, 9 aa, Artificial Sequence
  Description of Artificial Sequence: Synthetic peptide
  XENP019792 vhCDR3
TGWLGPFDY

SEQ ID NO: 621 - protein, 12 aa, Artificial Sequence
  Description of Artificial Sequence: Synthetic peptide
  XENP019792 vlCDR1
RASQSVGSSYLA

SEQ ID NO: 622 - protein, 7 aa, Artificial Sequence
  Description of Artificial Sequence: Synthetic peptide
  XENP019792 vlCDR2
GAFSRAT

SEQ ID NO: 623 - protein, 9 aa, Artificial Sequence
  Description of Artificial Sequence: Synthetic peptide
  XENP019792 vlCDR3
QQYGSSPWT

SEQ ID NO: 624 - protein, 246 aa, Artificial Sequence
  Description of Artificial Sequence: Synthetic polypeptide
  XENP019793 [CTLA-4]_H0.49_L0_scFv(GKPGS)4
QVQLVESGGGVVQPGRSLRLSCAASGFTFSSYTMHWVRQAPGKGLEWVTFESYDGNNKYYADSVKGRFTISRDNSKNTLYLQMNSLRAEDTAIYYCARTGWLGPFDYWGQGTLVTVSSGKPGSGKPGSGKPGSGKPGSEIVLTQSPGTLSLSPGERATLSCRASQSVGSSYLAWYQQKPGQAPRLLIYGAFSRATGIPDRFSGSGSGTDFTLTISRLEPEDFAVYYCQQYGSSPWTFGQGTKVEIK

SEQ ID NO: 625 - protein, 118 aa, Artificial Sequence
  Description of Artificial Sequence: Synthetic polypeptide
  VH of XENP019793
QVQLVESGGGVVQPGRSLRLSCAASGFTFSSYTMHWVRQAPGKGLEWVTFESYDGNNKYYADSVKGRFTISRDNSKNTLYLQMNSLRAEDTAIYYCARTGWLGPFDYWGQGTLVTVSS

SEQ ID NO: 626 - protein, 108 aa, Artificial Sequence; identical to SEQ ID NO: 23
  Description of Artificial Sequence: Synthetic polypeptide
  VL of XENP019793

SEQ ID NO: 627 - protein, 5 aa, Artificial Sequence
  Description of Artificial Sequence: Synthetic peptide
  XENP019793 vhCDR1
SYTMH

SEQ ID NO: 628 - protein, 17 aa, Artificial Sequence
  Description of Artificial Sequence: Synthetic peptide
  XENP019793 vhCDR2
FESYDGNNKYYADSVKG

SEQ ID NO: 629 - protein, 9 aa, Artificial Sequence
  Description of Artificial Sequence: Synthetic peptide
  XENP019793 vhCDR3
TGWLGPFDY

SEQ ID NO: 630 - protein, 12 aa, Artificial Sequence
  Description of Artificial Sequence: Synthetic peptide
  XENP019793 vlCDR1
RASQSVGSSYLA

SEQ ID NO: 631 - protein, 7 aa, Artificial Sequence
  Description of Artificial Sequence: Synthetic peptide
  XENP019793 vlCDR2
GAFSRAT

SEQ ID NO: 632 - protein, 9 aa, Artificial Sequence
  Description of Artificial Sequence: Synthetic peptide
  XENP019793 vlCDR3
QQYGSSPWT

SEQ ID NO: 633 - protein, 246 aa, Artificial Sequence
  Description of Artificial Sequence: Synthetic polypeptide
  XENP019794 [CTLA-4]_H0.50_L0_scFv(GKPGS)4
QVQLVESGGGVVQPGRSLRLSCAASGFTFSSYTMHWVRQAPGKGLEWVTFHSYDGNNKYYADSVKGRFTISRDNSKNTLYLQMNSLRAEDTAIYYCARTGWLGPFDYWGQGTLVTVSSGKPGSGKPGSGKPGSGKPGSEIVLTQSPGTLSLSPGERATLSCRASQSVGSSYLAWYQQKPGQAPRLLIYGAFSRATGIPDRFSGSGSGTDFTLTISRLEPEDFAVYYCQQYGSSPWTFGQGTKVEIK

SEQ ID NO: 634 - protein, 118 aa, Artificial Sequence
  Description of Artificial Sequence: Synthetic polypeptide
  VH of XENP019794
QVQLVESGGGVVQPGRSLRLSCAASGFTFSSYTMHWVRQAPGKGLEWVTFHSYDGNNKYYADSVKGRFTISRDNSKNTLYLQMNSLRAEDTAIYYCARTGWLGPFDYWGQGTLVTVSS

SEQ ID NO: 635 - protein, 108 aa, Artificial Sequence; identical to SEQ ID NO: 23
  Description of Artificial Sequence: Synthetic polypeptide
  VL of XENP019794

SEQ ID NO: 636 - protein, 5 aa, Artificial Sequence
  Description of Artificial Sequence: Synthetic peptide
  XENP019794 vhCDR1
SYTMH

SEQ ID NO: 637 - protein, 17 aa, Artificial Sequence
  Description of Artificial Sequence: Synthetic peptide
  XENP019794 vhCDR2
FHSYDGNNKYYADSVKG

SEQ ID NO: 638 - protein, 9 aa, Artificial Sequence
  Description of Artificial Sequence: Synthetic peptide
  XENP019794 vhCDR3
TGWLGPFDY

SEQ ID NO: 639 - protein, 12 aa, Artificial Sequence
  Description of Artificial Sequence: Synthetic peptide
  XENP019794 vlCDR1
RASQSVGSSYLA

SEQ ID NO: 640 - protein, 7 aa, Artificial Sequence
  Description of Artificial Sequence: Synthetic peptide
  XENP019794 vlCDR2
GAFSRAT

SEQ ID NO: 641 - protein, 9 aa, Artificial Sequence
  Description of Artificial Sequence: Synthetic peptide
  XENP019794 vlCDR3
QQYGSSPWT

SEQ ID NO: 642 - protein, 246 aa, Artificial Sequence
  Description of Artificial Sequence: Synthetic polypeptide
  XENP019795 [CTLA-4]_H0.51_L0_scFv(GKPGS)4
QVQLVESGGGVVQPGRSLRLSCAASGFTFSSYTMHWVRQAPGKGLEWVTFTSYDGNNKYYADSVKGRFTISRDNSKNTLYLQMNSLRAEDTAIYYCARTGWLGPFDYWGQGTLVTVSSGKPGSGKPGSGKPGSGKPGSEIVLTQSPGTLSLSPGERATLSCRASQSVGSSYLAWYQQKPGQAPRLLIYGAFSRATGIPDRFSGSGSGTDFTLTISRLEPEDFAVYYCQQYGSSPWTFGQGTKVEIK

SEQ ID NO: 643 - protein, 118 aa, Artificial Sequence
  Description of Artificial Sequence: Synthetic polypeptide
  VH of XENP019795
QVQLVESGGGVVQPGRSLRLSCAASGFTFSSYTMHWVRQAPGKGLEWVTFTSYDGNNKYYADSVKGRFTISRDNSKNTLYLQMNSLRAEDTAIYYCARTGWLGPFDYWGQGTLVTVSS

SEQ ID NO: 644 - protein, 108 aa, Artificial Sequence; identical to SEQ ID NO: 23
  Description of Artificial Sequence: Synthetic polypeptide
  VL of XENP019795

SEQ ID NO: 645 - protein, 5 aa, Artificial Sequence
  Description of Artificial Sequence: Synthetic peptide
  XENP019795 vhCDR1
SYTMH

SEQ ID NO: 646 - protein, 17 aa, Artificial Sequence
  Description of Artificial Sequence: Synthetic peptide
  XENP019795 vhCDR2
FTSYDGNNKYYADSVKG

SEQ ID NO: 647 - protein, 9 aa, Artificial Sequence
  Description of Artificial Sequence: Synthetic peptide
  XENP019795 vhCDR3
TGWLGPFDY

SEQ ID NO: 648 - protein, 12 aa, Artificial Sequence
  Description of Artificial Sequence: Synthetic peptide
  XENP019795 vlCDR1
RASQSVGSSYLA

SEQ ID NO: 649 - protein, 7 aa, Artificial Sequence
  Description of Artificial Sequence: Synthetic peptide
  XENP019795 vlCDR2
GAFSRAT

SEQ ID NO: 650 - protein, 9 aa, Artificial Sequence
  Description of Artificial Sequence: Synthetic peptide
  XENP019795 vlCDR3
QQYGSSPWT

SEQ ID NO: 651 - protein, 246 aa, Artificial Sequence
  Description of Artificial Sequence: Synthetic polypeptide
  XENP019796 [CTLA-4]_H0.52_L0_scFv(GKPGS)4
QVQLVESGGGVVQPGRSLRLSCAASGFTFSSYTMHWVRQAPGKGLEWVTFVSYDGNNKYYADSVKGRFTISRDNSKNTLYLQMNSLRAEDTAIYYCARTGWLGPFDYWGQGTLVTVSSGKPGSGKPGSGKPGSGKPGSEIVLTQSPGTLSLSPGERATLSCRASQSVGSSYLAWYQQKPGQAPRLLIYGAFSRATGIPDRFSGSGSGTDFTLTISRLEPEDFAVYYCQQYGSSPWTFGQGTKVEIK

SEQ ID NO: 652 - protein, 118 aa, Artificial Sequence
  Description of Artificial Sequence: Synthetic polypeptide
  VH of XENP019796
QVQLVESGGGVVQPGRSLRLSCAASGFTFSSYTMHWVRQAPGKGLEWVTFVSYDGNNKYYADSVKGRFTISRDNSKNTLYLQMNSLRAEDTAIYYCARTGWLGPFDYWGQGTLVTVSS

SEQ ID NO: 653 - protein, 108 aa, Artificial Sequence; identical to SEQ ID NO: 23
  Description of Artificial Sequence: Synthetic polypeptide
  VL of XENP019796

SEQ ID NO: 654 - protein, 5 aa, Artificial Sequence
  Description of Artificial Sequence: Synthetic peptide
  XENP019796 vhCDR1
SYTMH

SEQ ID NO: 655 - protein, 17 aa, Artificial Sequence
  Description of Artificial Sequence: Synthetic peptide
  XENP019796 vhCDR2
FVSYDGNNKYYADSVKG

SEQ ID NO: 656 - protein, 9 aa, Artificial Sequence
  Description of Artificial Sequence: Synthetic peptide
  XENP019796 vhCDR3
TGWLGPFDY

SEQ ID NO: 657 - protein, 12 aa, Artificial Sequence
  Description of Artificial Sequence: Synthetic peptide
  XENP019796 vlCDR1
RASQSVGSSYLA

SEQ ID NO: 658 - protein, 7 aa, Artificial Sequence
  Description of Artificial Sequence: Synthetic peptide
  XENP019796 vlCDR2
GAFSRAT

SEQ ID NO: 659 - protein, 9 aa, Artificial Sequence
  Description of Artificial Sequence: Synthetic peptide
  XENP019796 vlCDR3
QQYGSSPWT

SEQ ID NO: 660 - protein, 246 aa, Artificial Sequence
  Description of Artificial Sequence: Synthetic polypeptide
  XENP019801 [CTLA-4]_H0.53_L0_scFv(GKPGS)4
QVQLVESGGGVVQPGRSLRLSCAASGFTFSSYTMHWVRQAPGKGLEWVTFYSYDGNNKYYADSVKGRFTISRDNSKNTLYLQMNSLRAEDTAIYYCARTGWLGPFDYWGQGTLVTVSSGKPGSGKPGSGKPGSGKPGSEIVLTQSPGTLSLSPGERATLSCRASQSVGSSYLAWYQQKPGQAPRLLIYGAFSRATGIPDRFSGSGSGTDFTLTISRLEPEDFAVYYCQQYGSSPWTFGQGTKVEIK

SEQ ID NO: 661 - protein, 118 aa, Artificial Sequence
  Description of Artificial Sequence: Synthetic polypeptide
  VH of XENP019801
QVQLVESGGGVVQPGRSLRLSCAASGFTFSSYTMHWVRQAPGKGLEWVTFYSYDGNNKYYADSVKGRFTISRDNSKNTLYLQMNSLRAEDTAIYYCARTGWLGPFDYWGQGTLVTVSS

SEQ ID NO: 662 - protein, 108 aa, Artificial Sequence; identical to SEQ ID NO: 23
  Description of Artificial Sequence: Synthetic polypeptide
  VL of XENP019801

SEQ ID NO: 663 - protein, 5 aa, Artificial Sequence
  Description of Artificial Sequence: Synthetic peptide
  XENP019801 vhCDR1
SYTMH

SEQ ID NO: 664 - protein, 17 aa, Artificial Sequence
  Description of Artificial Sequence: Synthetic peptide
  XENP019801 vhCDR2
FYSYDGNNKYYADSVKG

SEQ ID NO: 665 - protein, 9 aa, Artificial Sequence
  Description of Artificial Sequence: Synthetic peptide
  XENP019801 vhCDR3
TGWLGPFDY

SEQ ID NO: 666 - protein, 12 aa, Artificial Sequence
  Description of Artificial Sequence: Synthetic peptide
  XENP019801 vlCDR1
RASQSVGSSYLA

SEQ ID NO: 667 - protein, 7 aa, Artificial Sequence
  Description of Artificial Sequence: Synthetic peptide
  XENP019801 vlCDR2
GAFSRAT

SEQ ID NO: 668 - protein, 9 aa, Artificial Sequence
  Description of Artificial Sequence: Synthetic peptide
  XENP019801 vlCDR3
QQYGSSPWT

SEQ ID NO: 669 - protein, 246 aa, Artificial Sequence
  Description of Artificial Sequence: Synthetic polypeptide
  XENP019802 [CTLA-4]_H0.54_L0_scFv(GKPGS)4
QVQLVESGGGVVQPGRSLRLSCAASGFTFSSYTMHWVRQAPGKGLEWVTFISGDGNNKYYADSVKGRFTISRDNSKNTLYLQMNSLRAEDTAIYYCARTGWLGPFDYWGQGTLVTVSSGKPGSGKPGSGKPGSGKPGSEIVLTQSPGTLSLSPGERATLSCRASQSVGSSYLAWYQQKPGQAPRLLIYGAFSRATGIPDRFSGSGSGTDFTLTISRLEPEDFAVYYCQQYGSSPWTFGQGTKVEIK

SEQ ID NO: 670 - protein, 118 aa, Artificial Sequence
  Description of Artificial Sequence: Synthetic polypeptide
  VH of XENP019802
QVQLVESGGGVVQPGRSLRLSCAASGFTFSSYTMHWVRQAPGKGLEWVTFISGDGNNKYYADSVKGRFTISRDNSKNTLYLQMNSLRAEDTAIYYCARTGWLGPFDYWGQGTLVTVSS

SEQ ID NO: 671 - protein, 108 aa, Artificial Sequence; identical to SEQ ID NO: 23
  Description of Artificial Sequence: Synthetic polypeptide
  VL of XENP019802

SEQ ID NO: 672 - protein, 5 aa, Artificial Sequence
  Description of Artificial Sequence: Synthetic peptide
  XENP019802 vhCDR1
SYTMH

SEQ ID NO: 673 - protein, 17 aa, Artificial Sequence
  Description of Artificial Sequence: Synthetic peptide
  XENP019802 vhCDR2
FISGDGNNKYYADSVKG

SEQ ID NO: 674 - protein, 9 aa, Artificial Sequence
  Description of Artificial Sequence: Synthetic peptide
  XENP019802 vhCDR3
TGWLGPFDY

SEQ ID NO: 675 - protein, 12 aa, Artificial Sequence
  Description of Artificial Sequence: Synthetic peptide
  XENP019802 vlCDR1
RASQSVGSSYLA

SEQ ID NO: 676 - protein, 7 aa, Artificial Sequence
  Description of Artificial Sequence: Synthetic peptide
  XENP019802 vlCDR2
GAFSRAT

SEQ ID NO: 677 - protein, 9 aa, Artificial Sequence
  Description of Artificial Sequence: Synthetic peptide
  XENP019802 vlCDR3
QQYGSSPWT

SEQ ID NO: 678 - protein, 246 aa, Artificial Sequence
  Description of Artificial Sequence: Synthetic polypeptide
  XENP019803 [CTLA-4]_H0.55_L0_scFv(GKPGS)4
QVQLVESGGGVVQPGRSLRLSCAASGFTFSSYTMHWVRQAPGKGLEWVTFISNDGNNKYYADSVKGRFTISRDNSKNTLYLQMNSLRAEDTAIYYCARTGWLGPFDYWGQGTLVTVSSGKPGSGKPGSGKPGSGKPGSEIVLTQSPGTLSLSPGERATLSCRASQSVGSSYLAWYQQKPGQAPRLLIYGAFSRATGIPDRFSGSGSGTDFTLTISRLEPEDFAVYYCQQYGSSPWTFGQGTKVEIK

SEQ ID NO: 679 - protein, 118 aa, Artificial Sequence
  Description of Artificial Sequence: Synthetic polypeptide
  VH of XENP019803
QVQLVESGGGVVQPGRSLRLSCAASGFTFSSYTMHWVRQAPGKGLEWVTFISNDGNNKYYADSVKGRFTISRDNSKNTLYLQMNSLRAEDTAIYYCARTGWLGPFDYWGQGTLVTVSS

SEQ ID NO: 680 - protein, 108 aa, Artificial Sequence; identical to SEQ ID NO: 23
  Description of Artificial Sequence: Synthetic polypeptide
  VL of XENP019803

SEQ ID NO: 681 - protein, 5 aa, Artificial Sequence
  Description of Artificial Sequence: Synthetic peptide
  XENP019803 vhCDR1
SYTMH

SEQ ID NO: 682 - protein, 17 aa, Artificial Sequence
  Description of Artificial Sequence: Synthetic peptide
  XENP019803 vhCDR2
FISNDGNNKYYADSVKG

SEQ ID NO: 683 - protein, 9 aa, Artificial Sequence
  Description of Artificial Sequence: Synthetic peptide
  XENP019803 vhCDR3
TGWLGPFDY

SEQ ID NO: 684 - protein, 12 aa, Artificial Sequence
  Description of Artificial Sequence: Synthetic peptide
  XENP019803 vlCDR1
RASQSVGSSYLA

SEQ ID NO: 685 - protein, 7 aa, Artificial Sequence
  Description of Artificial Sequence: Synthetic peptide
  XENP019803 vlCDR2
GAFSRAT

SEQ ID NO: 686 - protein, 9 aa, Artificial Sequence
  Description of Artificial Sequence: Synthetic peptide
  XENP019803 vlCDR3
QQYGSSPWT

SEQ ID NO: 687 - protein, 246 aa, Artificial Sequence
  Description of Artificial Sequence: Synthetic polypeptide
  XENP019804 [CTLA-4]_H0.56_L0_scFv(GKPGS)4
QVQLVESGGGVVQPGRSLRLSCAASGFTFSSYTMHWVRQAPGKGLEWVTFISSDGNNKYYADSVKGRFTISRDNSKNTLYLQMNSLRAEDTAIYYCARTGWLGPFDYWGQGTLVTVSSGKPGSGKPGSGKPGSGKPGSEIVLTQSPGTLSLSPGERATLSCRASQSVGSSYLAWYQQKPGQAPRLLIYGAFSRATGIPDRFSGSGSGTDFTLTISRLEPEDFAVYYCQQYGSSPWTFGQGTKVEIK

SEQ ID NO: 688 - protein, 118 aa, Artificial Sequence
  Description of Artificial Sequence: Synthetic polypeptide
  VH of XENP019804
QVQLVESGGGVVQPGRSLRLSCAASGFTFSSYTMHWVRQAPGKGLEWVTFISSDGNNKYYADSVKGRFTISRDNSKNTLYLQMNSLRAEDTAIYYCARTGWLGPFDYWGQGTLVTVSS

SEQ ID NO: 689 - protein, 108 aa, Artificial Sequence; identical to SEQ ID NO: 23
  Description of Artificial Sequence: Synthetic polypeptide
  VL of XENP019804

SEQ ID NO: 690 - protein, 5 aa, Artificial Sequence
  Description of Artificial Sequence: Synthetic peptide
  XENP019804 vhCDR1
SYTMH

SEQ ID NO: 691 - protein, 17 aa, Artificial Sequence
  Description of Artificial Sequence: Synthetic peptide
  XENP019804 vhCDR2
FISSDGNNKYYADSVKG

SEQ ID NO: 692 - protein, 9 aa, Artificial Sequence
  Description of Artificial Sequence: Synthetic peptide
  XENP019804 vhCDR3
TGWLGPFDY

SEQ ID NO: 693 - protein, 12 aa, Artificial Sequence
  Description of Artificial Sequence: Synthetic peptide
  XENP019804 vlCDR1
RASQSVGSSYLA

SEQ ID NO: 694 - protein, 7 aa, Artificial Sequence
  Description of Artificial Sequence: Synthetic peptide
  XENP019804 vlCDR2
GAFSRAT

SEQ ID NO: 695 - protein, 9 aa, Artificial Sequence
  Description of Artificial Sequence: Synthetic peptide
  XENP019804 vlCDR3
QQYGSSPWT

SEQ ID NO: 696 - protein, 246 aa, Artificial Sequence
  Description of Artificial Sequence: Synthetic polypeptide
  XENP019805 [CTLA-4]_H0.57_L0_scFv(GKPGS)4
QVQLVESGGGVVQPGRSLRLSCAASGFTFSSYTMHWVRQAPGKGLEWVTFISYNGNNKYYADSVKGRFTISRDNSKNTLYLQMNSLRAEDTAIYYCARTGWLGPFDYWGQGTLVTVSSGKPGSGKPGSGKPGSGKPGSEIVLTQSPGTLSLSPGERATLSCRASQSVGSSYLAWYQQKPGQAPRLLIYGAFSRATGIPDRFSGSGSGTDFTLTISRLEPEDFAVYYCQQYGSSPWTFGQGTKVEIK

SEQ ID NO: 697 - protein, 118 aa, Artificial Sequence
  Description of Artificial Sequence: Synthetic polypeptide
  VH of XENP019805
QVQLVESGGGVVQPGRSLRLSCAASGFTFSSYTMHWVRQAPGKGLEWVTFISYNGNNKYYADSVKGRFTISRDNSKNTLYLQMNSLRAEDTAIYYCARTGWLGPFDYWGQGTLVTVSS

SEQ ID NO: 698 - protein, 108 aa, Artificial Sequence; identical to SEQ ID NO: 23
  Description of Artificial Sequence: Synthetic polypeptide
  VL of XENP019805

SEQ ID NO: 699 - protein, 5 aa, Artificial Sequence
  Description of Artificial Sequence: Synthetic peptide
  XENP019805 vhCDR1
SYTMH

SEQ ID NO: 700 - protein, 17 aa, Artificial Sequence
  Description of Artificial Sequence: Synthetic peptide
  XENP019805 vhCDR2
FISYNGNNKYYADSVKG

SEQ ID NO: 701 - protein, 9 aa, Artificial Sequence
  Description of Artificial Sequence: Synthetic peptide
  XENP019805 vhCDR3
TGWLGPFDY

SEQ ID NO: 702 - protein, 12 aa, Artificial Sequence
  Description of Artificial Sequence: Synthetic peptide
  XENP019805 vlCDR1
RASQSVGSSYLA

SEQ ID NO: 703 - protein, 7 aa, Artificial Sequence
  Description of Artificial Sequence: Synthetic peptide
  XENP019805 vlCDR2
GAFSRAT

SEQ ID NO: 704 - protein, 9 aa, Artificial Sequence
  Description of Artificial Sequence: Synthetic peptide
  XENP019805 vlCDR3
QQYGSSPWT

SEQ ID NO: 705 - protein, 246 aa, Artificial Sequence
  Description of Artificial Sequence: Synthetic polypeptide
  XENP019806 [CTLA-4]_H0.58_L0_scFv(GKPGS)4
QVQLVESGGGVVQPGRSLRLSCAASGFTFSSYTMHWVRQAPGKGLEWVTFISYSGNNKYYADSVKGRFTISRDNSKNTLYLQMNSLRAEDTAIYYCARTGWLGPFDYWGQGTLVTVSSGKPGSGKPGSGKPGSGKPGSEIVLTQSPGTLSLSPGERATLSCRASQSVGSSYLAWYQQKPGQAPRLLIYGAFSRATGIPDRFSGSGSGTDFTLTISRLEPEDFAVYYCQQYGSSPWTFGQGTKVEIK

SEQ ID NO: 706 - protein, 118 aa, Artificial Sequence
  Description of Artificial Sequence: Synthetic polypeptide
  VH of XENP019806
QVQLVESGGGVVQPGRSLRLSCAASGFTFSSYTMHWVRQAPGKGLEWVTFISYSGNNKYYADSVKGRFTISRDNSKNTLYLQMNSLRAEDTAIYYCARTGWLGPFDYWGQGTLVTVSS

SEQ ID NO: 707 - protein, 108 aa, Artificial Sequence; identical to SEQ ID NO: 23
  Description of Artificial Sequence: Synthetic polypeptide
  VL of XENP019806

SEQ ID NO: 708 - protein, 5 aa, Artificial Sequence
  Description of Artificial Sequence: Synthetic peptide
  XENP019806 vhCDR1
SYTMH

SEQ ID NO: 709 - protein, 17 aa, Artificial Sequence
  Description of Artificial Sequence: Synthetic peptide
  XENP019806 vhCDR2
FISYSGNNKYYADSVKG

SEQ ID NO: 710 - protein, 9 aa, Artificial Sequence
  Description of Artificial Sequence: Synthetic peptide
  XENP019806 vhCDR3
TGWLGPFDY

SEQ ID NO: 711 - protein, 12 aa, Artificial Sequence
  Description of Artificial Sequence: Synthetic peptide
  XENP019806 vlCDR1
RASQSVGSSYLA

SEQ ID NO: 712 - protein, 7 aa, Artificial Sequence
  Description of Artificial Sequence: Synthetic peptide
  XENP019806 vlCDR2
GAFSRAT

SEQ ID NO: 713 - protein, 9 aa, Artificial Sequence
  Description of Artificial Sequence: Synthetic peptide
  XENP019806 vlCDR3
QQYGSSPWT

SEQ ID NO: 714 - protein, 246 aa, Artificial Sequence
  Description of Artificial Sequence: Synthetic polypeptide
  XENP019807 [CTLA-4]_H0.59_L0_scFv(GKPGS)4
QVQLVESGGGVVQPGRSLRLSCAASGFTFSSYTMHWVRQAPGKGLEWVTFISYEGNNKYYADSVKGRFTISRDNSKNTLYLQMNSLRAEDTAIYYCARTGWLGPFDYWGQGTLVTVSSGKPGSGKPGSGKPGSGKPGSEIVLTQSPGTLSLSPGERATLSCRASQSVGSSYLAWYQQKPGQAPRLLIYGAFSRATGIPDRFSGSGSGTDFTLTISRLEPEDFAVYYCQQYGSSPWTFGQGTKVEIK

SEQ ID NO: 715 - protein, 118 aa, Artificial Sequence
  Description of Artificial Sequence: Synthetic polypeptide
  VH of XENP019807
QVQLVESGGGVVQPGRSLRLSCAASGFTFSSYTMHWVRQAPGKGLEWVTFISYEGNNKYYADSVKGRFTISRDNSKNTLYLQMNSLRAEDTAIYYCARTGWLGPFDYWGQGTLVTVSS

SEQ ID NO: 716 - protein, 108 aa, Artificial Sequence; identical to SEQ ID NO: 23
  Description of Artificial Sequence: Synthetic polypeptide
  VL of XENP019807

SEQ ID NO: 717 - protein, 5 aa, Artificial Sequence
  Description of Artificial Sequence: Synthetic peptide
  XENP019807 vhCDR1
SYTMH

SEQ ID NO: 718 - protein, 17 aa, Artificial Sequence
  Description of Artificial Sequence: Synthetic peptide
  XENP019807 vhCDR2
FISYEGNNKYYADSVKG

SEQ ID NO: 719 - protein, 9 aa, Artificial Sequence
  Description of Artificial Sequence: Synthetic peptide
  XENP019807 vhCDR3
TGWLGPFDY

SEQ ID NO: 720 - protein, 12 aa, Artificial Sequence
  Description of Artificial Sequence: Synthetic peptide
  XENP019807 vlCDR1
RASQSVGSSYLA

SEQ ID NO: 721 - protein, 7 aa, Artificial Sequence
  Description of Artificial Sequence: Synthetic peptide
  XENP019807 vlCDR2
GAFSRAT

SEQ ID NO: 722 - protein, 9 aa, Artificial Sequence
  Description of Artificial Sequence: Synthetic peptide
  XENP019807 vlCDR3
QQYGSSPWT

SEQ ID NO: 723 - protein, 246 aa, Artificial Sequence
  Description of Artificial Sequence: Synthetic polypeptide
  XENP019808 [CTLA-4]_H0.60_L0_scFv(GKPGS)4
QVQLVESGGGVVQPGRSLRLSCAASGFTFSSYTMHWVRQAPGKGLEWVTFISYHGNNKYYADSVKGRFTISRDNSKNTLYLQMNSLRAEDTAIYYCARTGWLGPFDYWGQGTLVTVSSGKPGSGKPGSGKPGSGKPGSEIVLTQSPGTLSLSPGERATLSCRASQSVGSSYLAWYQQKPGQAPRLLIYGAFSRATGIPDRFSGSGSGTDFTLTISRLEPEDFAVYYCQQYGSSPWTFGQGTKVEIK

SEQ ID NO: 724 - protein, 118 aa, Artificial Sequence
  Description of Artificial Sequence: Synthetic polypeptide
  VH of XENP019808
QVQLVESGGGVVQPGRSLRLSCAASGFTFSSYTMHWVRQAPGKGLEWVTFISYHGNNKYYADSVKGRFTISRDNSKNTLYLQMNSLRAEDTAIYYCARTGWLGPFDYWGQGTLVTVSS

SEQ ID NO: 725 - protein, 108 aa, Artificial Sequence; identical to SEQ ID NO: 23
  Description of Artificial Sequence: Synthetic polypeptide
  VL of XENP019808

SEQ ID NO: 726 - protein, 5 aa, Artificial Sequence
  Description of Artificial Sequence: Synthetic peptide
  XENP019808 vhCDR1
SYTMH

SEQ ID NO: 727 - protein, 17 aa, Artificial Sequence
  Description of Artificial Sequence: Synthetic peptide
  XENP019808 vhCDR2
FISYHGNNKYYADSVKG

SEQ ID NO: 728 - protein, 9 aa, Artificial Sequence
  Description of Artificial Sequence: Synthetic peptide
  XENP019808 vhCDR3
TGWLGPFDY

SEQ ID NO: 729 - protein, 12 aa, Artificial Sequence
  Description of Artificial Sequence: Synthetic peptide
  XENP019808 vlCDR1
RASQSVGSSYLA

SEQ ID NO: 730 - protein, 7 aa, Artificial Sequence
  Description of Artificial Sequence: Synthetic peptide
  XENP019808 vlCDR2
GAFSRAT

SEQ ID NO: 731 - protein, 9 aa, Artificial Sequence
  Description of Artificial Sequence: Synthetic peptide
  XENP019808 vlCDR3
QQYGSSPWT

SEQ ID NO: 732 - protein, 246 aa, Artificial Sequence
  Description of Artificial Sequence: Synthetic polypeptide
  XENP019809 [CTLA-4]_H0.61_L0_scFv(GKPGS)4
QVQLVESGGGVVQPGRSLRLSCAASGFTFSSYTMHWVRQAPGKGLEWVTFISYKGNNKYYADSVKGRFTISRDNSKNTLYLQMNSLRAEDTAIYYCARTGWLGPFDYWGQGTLVTVSSGKPGSGKPGSGKPGSGKPGSEIVLTQSPGTLSLSPGERATLSCRASQSVGSSYLAWYQQKPGQAPRLLIYGAFSRATGIPDRFSGSGSGTDFTLTISRLEPEDFAVYYCQQYGSSPWTFGQGTKVEIK

SEQ ID NO: 733 - protein, 118 aa, Artificial Sequence
  Description of Artificial Sequence: Synthetic polypeptide
  VH of XENP019809
QVQLVESGGGVVQPGRSLRLSCAASGFTFSSYTMHWVRQAPGKGLEWVTFISYKGNNKYYADSVKGRFTISRDNSKNTLYLQMNSLRAEDTAIYYCARTGWLGPFDYWGQGTLVTVSS

SEQ ID NO: 734 - protein, 108 aa, Artificial Sequence; identical to SEQ ID NO: 23
  Description of Artificial Sequence: Synthetic polypeptide
  VL of XENP019809

SEQ ID NO: 735 - protein, 5 aa, Artificial Sequence
  Description of Artificial Sequence: Synthetic peptide
  XENP019809 vhCDR1
SYTMH

SEQ ID NO: 736 - protein, 17 aa, Artificial Sequence
  Description of Artificial Sequence: Synthetic peptide
  XENP019809 vhCDR2
FISYKGNNKYYADSVKG

SEQ ID NO: 737 - protein, 9 aa, Artificial Sequence
  Description of Artificial Sequence: Synthetic peptide
  XENP019809 vhCDR3
TGWLGPFDY

SEQ ID NO: 738 - protein, 12 aa, Artificial Sequence
  Description of Artificial Sequence: Synthetic peptide
  XENP019809 vlCDR1
RASQSVGSSYLA

SEQ ID NO: 739 - protein, 7 aa, Artificial Sequence
  Description of Artificial Sequence: Synthetic peptide
  XENP019809 vlCDR2
GAFSRAT

SEQ ID NO: 740 - protein, 9 aa, Artificial Sequence
  Description of Artificial Sequence: Synthetic peptide
  XENP019809 vlCDR3
QQYGSSPWT

SEQ ID NO: 741 - protein, 246 aa, Artificial Sequence
  Description of Artificial Sequence: Synthetic polypeptide
  XENP019810 [CTLA-4]_H0.62_L0_scFv(GKPGS)4
QVQLVESGGGVVQPGRSLRLSCAASGFTFSSYTMHWVRQAPGKGLEWVTFISYKGNNKYYADSVKGRFTISEDNSKNTLYLQMNSLRAEDTAIYYCARTGWLGPFDYWGQGTLVTVSSGKPGSGKPGSGKPGSGKPGSEIVLTQSPGTLSLSPGERATLSCRASQSVGSSYLAWYQQKPGQAPRLLIYGAFSRATGIPDRFSGSGSGTDFTLTISRLEPEDFAVYYCQQYGSSPWTFGQGTKVEIK

SEQ ID NO: 742 - protein, 118 aa, Artificial Sequence
  Description of Artificial Sequence: Synthetic polypeptide
  VH of XENP019810
QVQLVESGGGVVQPGRSLRLSCAASGFTFSSYTMHWVRQAPGKGLEWVTFISYKGNNKYYADSVKGRFTISEDNSKNTLYLQMNSLRAEDTAIYYCARTGWLGPFDYWGQGTLVTVSS

SEQ ID NO: 743 - protein, 108 aa, Artificial Sequence; identical to SEQ ID NO: 23
  Description of Artificial Sequence: Synthetic polypeptide
  VL of XENP019810

SEQ ID NO: 744 - protein, 5 aa, Artificial Sequence
  Description of Artificial Sequence: Synthetic peptide
  XENP019810 vhCDR1
SYTMH

SEQ ID NO: 745 - protein, 17 aa, Artificial Sequence
  Description of Artificial Sequence: Synthetic peptide
  XENP019810 vhCDR2
FISYKGNNKYYADSVKG

SEQ ID NO: 746 - protein, 9 aa, Artificial Sequence
  Description of Artificial Sequence: Synthetic peptide
  XENP019810 vhCDR3
TGWLGPFDY

SEQ ID NO: 747 - protein, 12 aa, Artificial Sequence
  Description of Artificial Sequence: Synthetic peptide
  XENP019810 vlCDR1
RASQSVGSSYLA

SEQ ID NO: 748 - protein, 7 aa, Artificial Sequence
  Description of Artificial Sequence: Synthetic peptide
  XENP019810 vlCDR2
GAFSRAT

SEQ ID NO: 749 - protein, 9 aa, Artificial Sequence
  Description of Artificial Sequence: Synthetic peptide
  XENP019810 vlCDR3
QQYGSSPWT

SEQ ID NO: 750 - protein, 246 aa, Artificial Sequence
  Description of Artificial Sequence: Synthetic polypeptide
  XENP019811 [CTLA-4]_H0.63_L0_scFv(GKPGS)4
QVQLVESGGGVVQPGRSLRLSCAASGFTFSSYTMHWVRQAPGKGLEWVTFISYQGNNKYYADSVKGRFTISRDNSKNTLYLQMNSLRAEDTAIYYCARTGWLGPFDYWGQGTLVTVSSGKPGSGKPGSGKPGSGKPGSEIVLTQSPGTLSLSPGERATLSCRASQSVGSSYLAWYQQKPGQAPRLLIYGAFSRATGIPDRFSGSGSGTDFTLTISRLEPEDFAVYYCQQYGSSPWTFGQGTKVEIK

SEQ ID NO: 751 - protein, 118 aa, Artificial Sequence
  Description of Artificial Sequence: Synthetic polypeptide
  VH of XENP019811
QVQLVESGGGVVQPGRSLRLSCAASGFTFSSYTMHWVRQAPGKGLEWVTFISYQGNNKYYADSVKGRFTISRDNSKNTLYLQMNSLRAEDTAIYYCARTGWLGPFDYWGQGTLVTVSS

SEQ ID NO: 752 - protein, 108 aa, Artificial Sequence; identical to SEQ ID NO: 23
  Description of Artificial Sequence: Synthetic polypeptide
  VL of XENP019811

SEQ ID NO: 753 - protein, 5 aa, Artificial Sequence
  Description of Artificial Sequence: Synthetic peptide
  XENP019811 vhCDR1
SYTMH

SEQ ID NO: 754 - protein, 17 aa, Artificial Sequence
  Description of Artificial Sequence: Synthetic peptide
  XENP019811 vhCDR2
FISYQGNNKYYADSVKG

SEQ ID NO: 755 - protein, 9 aa, Artificial Sequence
  Description of Artificial Sequence: Synthetic peptide
  XENP019811 vhCDR3
TGWLGPFDY

SEQ ID NO: 756 - protein, 12 aa, Artificial Sequence
  Description of Artificial Sequence: Synthetic peptide
  XENP019811 vlCDR1
RASQSVGSSYLA

SEQ ID NO: 757 - protein, 7 aa, Artificial Sequence
  Description of Artificial Sequence: Synthetic peptide
  XENP019811 vlCDR2
GAFSRAT

SEQ ID NO: 758 - protein, 9 aa, Artificial Sequence
  Description of Artificial Sequence: Synthetic peptide
  XENP019811 vlCDR3
QQYGSSPWT

SEQ ID NO: 759 - protein, 246 aa, Artificial Sequence
  Description of Artificial Sequence: Synthetic polypeptide
  XENP019812 [CTLA-4]_H0.64_L0_scFv(GKPGS)4
QVQLVESGGGVVQPGRSLRLSCAASGFTFSSYTMHWVRQAPGKGLEWVTFISYDKNNKYYADSVKGRFTISRDNSKNTLYLQMNSLRAEDTAIYYCARTGWLGPFDYWGQGTLVTVSSGKPGSGKPGSGKPGSGKPGSEIVLTQSPGTLSLSPGERATLSCRASQSVGSSYLAWYQQKPGQAPRLLIYGAFSRATGIPDRFSGSGSGTDFTLTISRLEPEDFAVYYCQQYGSSPWTFGQGTKVEIK

SEQ ID NO: 760 - protein, 118 aa, Artificial Sequence
  Description of Artificial Sequence: Synthetic polypeptide
  VH of XENP019812
QVQLVESGGGVVQPGRSLRLSCAASGFTFSSYTMHWVRQAPGKGLEWVTFISYDKNNKYYADSVKGRFTISRDNSKNTLYLQMNSLRAEDTAIYYCARTGWLGPFDYWGQGTLVTVSS

SEQ ID NO: 761 - protein, 108 aa, Artificial Sequence; identical to SEQ ID NO: 23
  Description of Artificial Sequence: Synthetic polypeptide
  VL of XENP019812

SEQ ID NO: 762 - protein, 5 aa, Artificial Sequence
  Description of Artificial Sequence: Synthetic peptide
  XENP019812 vhCDR1
SYTMH

SEQ ID NO: 763 - protein, 17 aa, Artificial Sequence
  Description of Artificial Sequence: Synthetic peptide
  XENP019812 vhCDR2
FISYDKNNKYYADSVKG

SEQ ID NO: 764 - protein, 9 aa, Artificial Sequence
  Description of Artificial Sequence: Synthetic peptide
  XENP019812 vhCDR3
TGWLGPFDY

SEQ ID NO: 765 - protein, 12 aa, Artificial Sequence
  Description of Artificial Sequence: Synthetic peptide
  XENP019812 vlCDR1
RASQSVGSSYLA

SEQ ID NO: 766 - protein, 7 aa, Artificial Sequence
  Description of Artificial Sequence: Synthetic peptide
  XENP019812 vlCDR2
GAFSRAT

SEQ ID NO: 767 - protein, 9 aa, Artificial Sequence
  Description of Artificial Sequence: Synthetic peptide
  XENP019812 vlCDR3
QQYGSSPWT

SEQ ID NO: 768 - protein, 246 aa, Artificial Sequence
  Description of Artificial Sequence: Synthetic polypeptide
  XENP019813 [CTLA-4]_H0.65_L0_scFv(GKPGS)4
QVQLVESGGGVVQPGRSLRLSCAASGFTFSSYTMHWVRQAPGKGLEWVTFISYDKNNKYYADSVKGRFTISEDNSKNTLYLQMNSLRAEDTAIYYCARTGWLGPFDYWGQGTLVTVSSGKPGSGKPGSGKPGSGKPGSEIVLTQSPGTLSLSPGERATLSCRASQSVGSSYLAWYQQKPGQAPRLLIYGAFSRATGIPDRFSGSGSGTDFTLTISRLEPEDFAVYYCQQYGSSPWTFGQGTKVEIK

SEQ ID NO: 769 - protein, 118 aa, Artificial Sequence
  Description of Artificial Sequence: Synthetic polypeptide
  VH of XENP019813
QVQLVESGGGVVQPGRSLRLSCAASGFTFSSYTMHWVRQAPGKGLEWVTFISYDKNNKYYADSVKGRFTISEDNSKNTLYLQMNSLRAEDTAIYYCARTGWLGPFDYWGQGTLVTVSS

SEQ ID NO: 770 - protein, 108 aa, Artificial Sequence; identical to SEQ ID NO: 23
  Description of Artificial Sequence: Synthetic polypeptide
  VL of XENP019813

SEQ ID NO: 771 - protein, 5 aa, Artificial Sequence
  Description of Artificial Sequence: Synthetic peptide
  XENP019813 vhCDR1
SYTMH

SEQ ID NO: 772 - protein, 17 aa, Artificial Sequence
  Description of Artificial Sequence: Synthetic peptide
  XENP019813 vhCDR2
FISYDKNNKYYADSVKG

SEQ ID NO: 773 - protein, 9 aa, Artificial Sequence
  Description of Artificial Sequence: Synthetic peptide
  XENP019813 vhCDR3
TGWLGPFDY

SEQ ID NO: 774 - protein, 12 aa, Artificial Sequence
  Description of Artificial Sequence: Synthetic peptide
  XENP019813 vlCDR1
RASQSVGSSYLA

SEQ ID NO: 775 - protein, 7 aa, Artificial Sequence
  Description of Artificial Sequence: Synthetic peptide
  XENP019813 vlCDR2
GAFSRAT

SEQ ID NO: 776 - protein, 9 aa, Artificial Sequence
  Description of Artificial Sequence: Synthetic peptide
  XENP019813 vlCDR3
QQYGSSPWT

SEQ ID NO: 777 - protein, 246 aa, Artificial Sequence
  Description of Artificial Sequence: Synthetic polypeptide
  XENP019814 [CTLA-4]_H0.66_L0_scFv(GKPGS)4
QVQLVESGGGVVQPGRSLRLSCAASGFTFSSYTMHWVRQAPGKGLEWVTFISYDGDNKYYADSVKGRFTISRDNSKNTLYLQMNSLRAEDTAIYYCARTGWLGPFDYWGQGTLVTVSSGKPGSGKPGSGKPGSGKPGSEIVLTQSPGTLSLSPGERATLSCRASQSVGSSYLAWYQQKPGQAPRLLIYGAFSRATGIPDRFSGSGSGTDFTLTISRLEPEDFAVYYCQQYGSSPWTFGQGTKVEIK

SEQ ID NO: 778 - protein, 118 aa, Artificial Sequence
  Description of Artificial Sequence: Synthetic polypeptide
  VH of XENP019814
QVQLVESGGGVVQPGRSLRLSCAASGFTFSSYTMHWVRQAPGKGLEWVTFISYDGDNKYYADSVKGRFTISRDNSKNTLYLQMNSLRAEDTAIYYCARTGWLGPFDYWGQGTLVTVSS

SEQ ID NO: 779 - protein, 108 aa, Artificial Sequence; identical to SEQ ID NO: 23
  Description of Artificial Sequence: Synthetic polypeptide
  VL of XENP019814

SEQ ID NO: 780 - protein, 5 aa, Artificial Sequence
  Description of Artificial Sequence: Synthetic peptide
  XENP019814 vhCDR1
SYTMH

SEQ ID NO: 781 - protein, 17 aa, Artificial Sequence
  Description of Artificial Sequence: Synthetic peptide
  XENP019814 vhCDR2
FISYDGDNKYYADSVKG

SEQ ID NO: 782 - protein, 9 aa, Artificial Sequence
  Description of Artificial Sequence: Synthetic peptide
  XENP019814 vhCDR3
TGWLGPFDY

SEQ ID NO: 783 - protein, 12 aa, Artificial Sequence
  Description of Artificial Sequence: Synthetic peptide
  XENP019814 vlCDR1
RASQSVGSSYLA

SEQ ID NO: 784 - protein, 7 aa, Artificial Sequence
  Description of Artificial Sequence: Synthetic peptide
  XENP019814 vlCDR2
GAFSRAT

SEQ ID NO: 785 - protein, 9 aa, Artificial Sequence
  Description of Artificial Sequence: Synthetic peptide
  XENP019814 vlCDR3
QQYGSSPWT

SEQ ID NO: 786 - protein, 246 aa, Artificial Sequence
  Description of Artificial Sequence: Synthetic polypeptide
  XENP019815 [CTLA-4]_H0.67_L0_scFv(GKPGS)4
QVQLVESGGGVVQPGRSLRLSCAASGFTFSSYTMHWVRQAPGKGLEWVTFISYDGGNKYYADSVKGRFTISRDNSKNTLYLQMNSLRAEDTAIYYCARTGWLGPFDYWGQGTLVTVSSGKPGSGKPGSGKPGSGKPGSEIVLTQSPGTLSLSPGERATLSCRASQSVGSSYLAWYQQKPGQAPRLLIYGAFSRATGIPDRFSGSGSGTDFTLTISRLEPEDFAVYYCQQYGSSPWTFGQGTKVEIK

SEQ ID NO: 787 - protein, 118 aa, Artificial Sequence
  Description of Artificial Sequence: Synthetic polypeptide
  VH of XENP019815
QVQLVESGGGVVQPGRSLRLSCAASGFTFSSYTMHWVRQAPGKGLEWVTFISYDGGNKYYADSVKGRFTISRDNSKNTLYLQMNSLRAEDTAIYYCARTGWLGPFDYWGQGTLVTVSS

SEQ ID NO: 788 - protein, 108 aa, Artificial Sequence; identical to SEQ ID NO: 23
  Description of Artificial Sequence: Synthetic polypeptide
  VL of XENP019815

SEQ ID NO: 789 - protein, 5 aa, Artificial Sequence
  Description of Artificial Sequence: Synthetic peptide
  XENP019815 vhCDR1
SYTMH

SEQ ID NO: 790 - protein, 17 aa, Artificial Sequence
  Description of Artificial Sequence: Synthetic peptide
  XENP019815 vhCDR2
FISYDGGNKYYADSVKG

SEQ ID NO: 791 - protein, 9 aa, Artificial Sequence
  Description of Artificial Sequence: Synthetic peptide
  XENP019815 vhCDR3
TGWLGPFDY

SEQ ID NO: 792 - protein, 12 aa, Artificial Sequence
  Description of Artificial Sequence: Synthetic peptide
  XENP019815 vlCDR1
RASQSVGSSYLA

SEQ ID NO: 793 - protein, 7 aa, Artificial Sequence
  Description of Artificial Sequence: Synthetic peptide
  XENP019815 vlCDR2
GAFSRAT

SEQ ID NO: 794 - protein, 9 aa, Artificial Sequence
  Description of Artificial Sequence: Synthetic peptide
  XENP019815 vlCDR3
QQYGSSPWT

SEQ ID NO: 795 - protein, 246 aa, Artificial Sequence
  Description of Artificial Sequence: Synthetic polypeptide
  XENP019816 [CTLA-4]_H0.68_L0_scFv(GKPGS)4
QVQLVESGGGVVQPGRSLRLSCAASGFTFSSYTMHWVRQAPGKGLEWVTFISYDGHNKYYADSVKGRFTISRDNSKNTLYLQMNSLRAEDTAIYYCARTGWLGPFDYWGQGTLVTVSSGKPGSGKPGSGKPGSGKPGSEIVLTQSPGTLSLSPGERATLSCRASQSVGSSYLAWYQQKPGQAPRLLIYGAFSRATGIPDRFSGSGSGTDFTLTISRLEPEDFAVYYCQQYGSSPWTFGQGTKVEIK

SEQ ID NO: 796 - protein, 118 aa, Artificial Sequence
  Description of Artificial Sequence: Synthetic polypeptide
  VH of XENP019816
QVQLVESGGGVVQPGRSLRLSCAASGFTFSSYTMHWVRQAPGKGLEWVTFISYDGHNKYYADSVKGRFTISRDNSKNTLYLQMNSLRAEDTAIYYCARTGWLGPFDYWGQGTLVTVSS

SEQ ID NO: 797 - protein, 108 aa, Artificial Sequence; identical to SEQ ID NO: 23
  Description of Artificial Sequence: Synthetic polypeptide
  VL of XENP019816

SEQ ID NO: 798 - protein, 5 aa, Artificial Sequence
  Description of Artificial Sequence: Synthetic peptide
  XENP019816 vhCDR1
SYTMH

SEQ ID NO: 799 - protein, 17 aa, Artificial Sequence
  Description of Artificial Sequence: Synthetic peptide
  XENP019816 vhCDR2
FISYDGHNKYYADSVKG

SEQ ID NO: 800 - protein, 9 aa, Artificial Sequence
  Description of Artificial Sequence: Synthetic peptide
  XENP019816 vhCDR3
TGWLGPFDY

SEQ ID NO: 801 - protein, 12 aa, Artificial Sequence
  Description of Artificial Sequence: Synthetic peptide
  XENP019816 vlCDR1
RASQSVGSSYLA

SEQ ID NO: 802 - protein, 7 aa, Artificial Sequence
  Description of Artificial Sequence: Synthetic peptide
  XENP019816 vlCDR2
GAFSRAT

SEQ ID NO: 803 - protein, 9 aa, Artificial Sequence
  Description of Artificial Sequence: Synthetic peptide
  XENP019816 vlCDR3
QQYGSSPWT

SEQ ID NO: 804 - protein, 246 aa, Artificial Sequence
  Description of Artificial Sequence: Synthetic polypeptide
  XENP019817 [CTLA-4]_H0.69_L0_scFv(GKPGS)4
QVQLVESGGGVVQPGRSLRLSCAASGFTFSSYTMHWVRQAPGKGLEWVTFISYDGQNKYYADSVKGRFTISRDNSKNTLYLQMNSLRAEDTAIYYCARTGWLGPFDYWGQGTLVTVSSGKPGSGKPGSGKPGSGKPGSEIVLTQSPGTLSLSPGERATLSCRASQSVGSSYLAWYQQKPGQAPRLLIYGAFSRATGIPDRFSGSGSGTDFTLTISRLEPEDFAVYYCQQYGSSPWTFGQGTKVEIK

SEQ ID NO: 805 - protein, 118 aa, Artificial Sequence
  Description of Artificial Sequence: Synthetic polypeptide
  VH of XENP019817
QVQLVESGGGVVQPGRSLRLSCAASGFTFSSYTMHWVRQAPGKGLEWVTFISYDGQNKYYADSVKGRFTISRDNSKNTLYLQMNSLRAEDTAIYYCARTGWLGPFDYWGQGTLVTVSS

SEQ ID NO: 806 - protein, 108 aa, Artificial Sequence; identical to SEQ ID NO: 23
  Description of Artificial Sequence: Synthetic polypeptide
  VL of XENP019817

SEQ ID NO: 807 - protein, 5 aa, Artificial Sequence
  Description of Artificial Sequence: Synthetic peptide
  XENP019817 vhCDR1
SYTMH

SEQ ID NO: 808 - protein, 17 aa, Artificial Sequence
  Description of Artificial Sequence: Synthetic peptide
  XENP019817 vhCDR2
FISYDGQNKYYADSVKG

SEQ ID NO: 809 - protein, 9 aa, Artificial Sequence
  Description of Artificial Sequence: Synthetic peptide
  XENP019817 vhCDR3
TGWLGPFDY

SEQ ID NO: 810 - protein, 12 aa, Artificial Sequence
  Description of Artificial Sequence: Synthetic peptide
  XENP019817 vlCDR1
RASQSVGSSYLA

SEQ ID NO: 811 - protein, 7 aa, Artificial Sequence
  Description of Artificial Sequence: Synthetic peptide
  XENP019817 vlCDR2
GAFSRAT

SEQ ID NO: 812 - protein, 9 aa, Artificial Sequence
  Description of Artificial Sequence: Synthetic peptide
  XENP019817 vlCDR3
QQYGSSPWT

SEQ ID NO: 813 - protein, 246 aa, Artificial Sequence
  Description of Artificial Sequence: Synthetic polypeptide
  XENP019818 [CTLA-4]_H0.70_L0_scFv(GKPGS)4
QVQLVESGGGVVQPGRSLRLSCAASGFTFSSYTMHWVRQAPGKGLEWVTFISYDGSNKYYADSVKGRFTISRDNSKNTLYLQMNSLRAEDTAIYYCARTGWLGPFDYWGQGTLVTVSSGKPGSGKPGSGKPGSGKPGSEIVLTQSPGTLSLSPGERATLSCRASQSVGSSYLAWYQQKPGQAPRLLIYGAFSRATGIPDRFSGSGSGTDFTLTISRLEPEDFAVYYCQQYGSSPWTFGQGTKVEIK

SEQ ID NO: 814 - protein, 118 aa, Artificial Sequence
  Description of Artificial Sequence: Synthetic polypeptide
  VH of XENP019818
QVQLVESGGGVVQPGRSLRLSCAASGFTFSSYTMHWVRQAPGKGLEWVTFISYDGSNKYYADSVKGRFTISRDNSKNTLYLQMNSLRAEDTAIYYCARTGWLGPFDYWGQGTLVTVSS

SEQ ID NO: 815 - protein, 108 aa, Artificial Sequence; identical to SEQ ID NO: 23
  Description of Artificial Sequence: Synthetic polypeptide
  VL of XENP019818

SEQ ID NO: 816 - protein, 5 aa, Artificial Sequence
  Description of Artificial Sequence: Synthetic peptide
  XENP019818 vhCDR1
SYTMH

SEQ ID NO: 817 - protein, 17 aa, Artificial Sequence
  Description of Artificial Sequence: Synthetic peptide
  XENP019818 vhCDR2
FISYDGSNKYYADSVKG

SEQ ID NO: 818 - protein, 9 aa, Artificial Sequence
  Description of Artificial Sequence: Synthetic peptide
  XENP019818 vhCDR3
TGWLGPFDY

SEQ ID NO: 819 - protein, 12 aa, Artificial Sequence
  Description of Artificial Sequence: Synthetic peptide
  XENP019818 vlCDR1
RASQSVGSSYLA

SEQ ID NO: 820 - protein, 7 aa, Artificial Sequence
  Description of Artificial Sequence: Synthetic peptide
  XENP019818 vlCDR2
GAFSRAT

SEQ ID NO: 821 - protein, 9 aa, Artificial Sequence
  Description of Artificial Sequence: Synthetic peptide
  XENP019818 vlCDR3
QQYGSSPWT

SEQ ID NO: 822 - protein, 246 aa, Artificial Sequence
  Description of Artificial Sequence: Synthetic polypeptide
  XENP019819 [CTLA-4]_H0.71_L0_scFv(GKPGS)4
QVQLVESGGGVVQPGRSLRLSCAASGFTFSSYTMHWVRQAPGKGLEWVTFISYDGNDKYYADSVKGRFTISRDNSKNTLYLQMNSLRAEDTAIYYCARTGWLGPFDYWGQGTLVTVSSGKPGSGKPGSGKPGSGKPGSEIVLTQSPGTLSLSPGERATLSCRASQSVGSSYLAWYQQKPGQAPRLLIYGAFSRATGIPDRFSGSGSGTDFTLTISRLEPEDFAVYYCQQYGSSPWTFGQGTKVEIK

SEQ ID NO: 823 - protein, 118 aa, Artificial Sequence
  Description of Artificial Sequence: Synthetic polypeptide
  VH of XENP019819
QVQLVESGGGVVQPGRSLRLSCAASGFTFSSYTMHWVRQAPGKGLEWVTFISYDGNDKYYADSVKGRFTISRDNSKNTLYLQMNSLRAEDTAIYYCARTGWLGPFDYWGQGTLVTVSS

SEQ ID NO: 824 - protein, 108 aa, Artificial Sequence; identical to SEQ ID NO: 23
  Description of Artificial Sequence: Synthetic polypeptide
  VL of XENP019819

SEQ ID NO: 825 - protein, 5 aa, Artificial Sequence
  Description of Artificial Sequence: Synthetic peptide
  XENP019819 vhCDR1
SYTMH

SEQ ID NO: 826 - protein, 17 aa, Artificial Sequence
  Description of Artificial Sequence: Synthetic peptide
  XENP019819 vhCDR2
FISYDGNDKYYADSVKG

SEQ ID NO: 827 - protein, 9 aa, Artificial Sequence
  Description of Artificial Sequence: Synthetic peptide
  XENP019819 vhCDR3
TGWLGPFDY

SEQ ID NO: 828 - protein, 12 aa, Artificial Sequence
  Description of Artificial Sequence: Synthetic peptide
  XENP019819 vlCDR1
RASQSVGSSYLA

SEQ ID NO: 829 - protein, 7 aa, Artificial Sequence
  Description of Artificial Sequence: Synthetic peptide
  XENP019819 vlCDR2
GAFSRAT

SEQ ID NO: 830 - protein, 9 aa, Artificial Sequence
  Description of Artificial Sequence: Synthetic peptide
  XENP019819 vlCDR3
QQYGSSPWT

SEQ ID NO: 831 - protein, 246 aa, Artificial Sequence
  Description of Artificial Sequence: Synthetic polypeptide
  XENP019820 [CTLA-4]_H0.72_L0_scFv(GKPGS)4
QVQLVESGGGVVQPGRSLRLSCAASGFTFSSYTMHWVRQAPGKGLEWVTFISYDGNEKYYADSVKGRFTISRDNSKNTLYLQMNSLRAEDTAIYYCARTGWLGPFDYWGQGTLVTVSSGKPGSGKPGSGKPGSGKPGSEIVLTQSPGTLSLSPGERATLSCRASQSVGSSYLAWYQQKPGQAPRLLIYGAFSRATGIPDRFSGSGSGTDFTLTISRLEPEDFAVYYCQQYGSSPWTFGQGTKVEIK

SEQ ID NO: 832 - protein, 118 aa, Artificial Sequence
  Description of Artificial Sequence: Synthetic polypeptide
  VH of XENP019820
QVQLVESGGGVVQPGRSLRLSCAASGFTFSSYTMHWVRQAPGKGLEWVTFISYDGNEKYYADSVKGRFTISRDNSKNTLYLQMNSLRAEDTAIYYCARTGWLGPFDYWGQGTLVTVSS

SEQ ID NO: 833 - protein, 108 aa, Artificial Sequence; identical to SEQ ID NO: 23
  Description of Artificial Sequence: Synthetic polypeptide
  VL of XENP019820

SEQ ID NO: 834 - protein, 5 aa, Artificial Sequence
  Description of Artificial Sequence: Synthetic peptide
  XENP019820 vhCDR1
SYTMH

SEQ ID NO: 835 - protein, 17 aa, Artificial Sequence
  Description of Artificial Sequence: Synthetic peptide
  XENP019820 vhCDR2
FISYDGNEKYYADSVKG

SEQ ID NO: 836 - protein, 9 aa, Artificial Sequence
  Description of Artificial Sequence: Synthetic peptide
  XENP019820 vhCDR3
TGWLGPFDY

SEQ ID NO: 837 - protein, 12 aa, Artificial Sequence
  Description of Artificial Sequence: Synthetic peptide
  XENP019820 vlCDR1
RASQSVGSSYLA

SEQ ID NO: 838 - protein, 7 aa, Artificial Sequence
  Description of Artificial Sequence: Synthetic peptide
  XENP019820 vlCDR2
GAFSRAT

SEQ ID NO: 839 - protein, 9 aa, Artificial Sequence
  Description of Artificial Sequence: Synthetic peptide
  XENP019820 vlCDR3
QQYGSSPWT

SEQ ID NO: 840 - protein, 246 aa, Artificial Sequence
  Description of Artificial Sequence: Synthetic polypeptide
  XENP019821 [CTLA-4]_H0.73_L0_scFv(GKPGS)4
QVQLVESGGGVVQPGRSLRLSCAASGFTFSSYTMHWVRQAPGKGLEWVTFISYDGNHKYYADSVKGRFTISRDNSKNTLYLQMNSLRAEDTAIYYCARTGWLGPFDYWGQGTLVTVSSGKPGSGKPGSGKPGSGKPGSEIVLTQSPGTLSLSPGERATLSCRASQSVGSSYLAWYQQKPGQAPRLLIYGAFSRATGIPDRFSGSGSGTDFTLTISRLEPEDFAVYYCQQYGSSPWTFGQGTKVEIK

SEQ ID NO: 841 - protein, 118 aa, Artificial Sequence
  Description of Artificial Sequence: Synthetic polypeptide
  VH of XENP019821
QVQLVESGGGVVQPGRSLRLSCAASGFTFSSYTMHWVRQAPGKGLEWVTFISYDGNHKYYADSVKGRFTISRDNSKNTLYLQMNSLRAEDTAIYYCARTGWLGPFDYWGQGTLVTVSS

SEQ ID NO: 842 - protein, 108 aa, Artificial Sequence; identical to SEQ ID NO: 23
  Description of Artificial Sequence: Synthetic polypeptide
  VL of XENP019821

SEQ ID NO: 843 - protein, 5 aa, Artificial Sequence
  Description of Artificial Sequence: Synthetic peptide
  XENP019821 vhCDR1
SYTMH

SEQ ID NO: 844 - protein, 17 aa, Artificial Sequence
  Description of Artificial Sequence: Synthetic peptide
  XENP019821 vhCDR2
FISYDGNHKYYADSVKG

SEQ ID NO: 845 - protein, 9 aa, Artificial Sequence
  Description of Artificial Sequence: Synthetic peptide
  XENP019821 vhCDR3
TGWLGPFDY

SEQ ID NO: 846 - protein, 12 aa, Artificial Sequence
  Description of Artificial Sequence: Synthetic peptide
  XENP019821 vlCDR1
RASQSVGSSYLA

SEQ ID NO: 847 - protein, 7 aa, Artificial Sequence
  Description of Artificial Sequence: Synthetic peptide
  XENP019821 vlCDR2
GAFSRAT

SEQ ID NO: 848 - protein, 9 aa, Artificial Sequence
  Description of Artificial Sequence: Synthetic peptide
  XENP019821 vlCDR3
QQYGSSPWT

SEQ ID NO: 849 - protein, 246 aa, Artificial Sequence
  Description of Artificial Sequence: Synthetic polypeptide
  XENP019822 [CTLA-4]_H0.74_L0_scFv(GKPGS)4
QVQLVESGGGVVQPGRSLRLSCAASGFTFSSYTMHWVRQAPGKGLEWVTFISYDGNSKYYADSVKGRFTISRDNSKNTLYLQMNSLRAEDTAIYYCARTGWLGPFDYWGQGTLVTVSSGKPGSGKPGSGKPGSGKPGSEIVLTQSPGTLSLSPGERATLSCRASQSVGSSYLAWYQQKPGQAPRLLIYGAFSRATGIPDRFSGSGSGTDFTLTISRLEPEDFAVYYCQQYGSSPWTFGQGTKVEIK

SEQ ID NO: 850 - protein, 118 aa, Artificial Sequence
  Description of Artificial Sequence: Synthetic polypeptide
  VH of XENP019822
QVQLVESGGGVVQPGRSLRLSCAASGFTFSSYTMHWVRQAPGKGLEWVTFISYDGNSKYYADSVKGRFTISRDNSKNTLYLQMNSLRAEDTAIYYCARTGWLGPFDYWGQGTLVTVSS

SEQ ID NO: 851 - protein, 108 aa, Artificial Sequence; identical to SEQ ID NO: 23
  Description of Artificial Sequence: Synthetic polypeptide
  VL of XENP019822

SEQ ID NO: 852 - protein, 5 aa, Artificial Sequence
  Description of Artificial Sequence: Synthetic peptide
  XENP019822 vhCDR1
SYTMH

SEQ ID NO: 853 - protein, 17 aa, Artificial Sequence
  Description of Artificial Sequence: Synthetic peptide
  XENP019822 vhCDR2
FISYDGNSKYYADSVKG

SEQ ID NO: 854 - protein, 9 aa, Artificial Sequence
  Description of Artificial Sequence: Synthetic peptide
  XENP019822 vhCDR3
TGWLGPFDY

SEQ ID NO: 855 - protein, 12 aa, Artificial Sequence
  Description of Artificial Sequence: Synthetic peptide
  XENP019822 vlCDR1
RASQSVGSSYLA

SEQ ID NO: 856 - protein, 7 aa, Artificial Sequence
  Description of Artificial Sequence: Synthetic peptide
  XENP019822 vlCDR2
GAFSRAT

SEQ ID NO: 857 - protein, 9 aa, Artificial Sequence
  Description of Artificial Sequence: Synthetic peptide
  XENP019822 vlCDR3
QQYGSSPWT

SEQ ID NO: 858 - protein, 246 aa, Artificial Sequence
  Description of Artificial Sequence: Synthetic polypeptide
  XENP019823 [CTLA-4]_H0.75_L0_scFv(GKPGS)4
QVQLVESGGGVVQPGRSLRLSCAASGFTFSSYTMHWVRQAPGKGLEWVTFISYDGNTKYYADSVKGRFTISRDNSKNTLYLQMNSLRAEDTAIYYCARTGWLGPFDYWGQGTLVTVSSGKPGSGKPGSGKPGSGKPGSEIVLTQSPGTLSLSPGERATLSCRASQSVGSSYLAWYQQKPGQAPRLLIYGAFSRATGIPDRFSGSGSGTDFTLTISRLEPEDFAVYYCQQYGSSPWTFGQGTKVEIK

SEQ ID NO: 859 - protein, 118 aa, Artificial Sequence
  Description of Artificial Sequence: Synthetic polypeptide
  VH of XENP019823
QVQLVESGGGVVQPGRSLRLSCAASGFTFSSYTMHWVRQAPGKGLEWVTFISYDGNTKYYADSVKGRFTISRDNSKNTLYLQMNSLRAEDTAIYYCARTGWLGPFDYWGQGTLVTVSS

SEQ ID NO: 860 - protein, 108 aa, Artificial Sequence; identical to SEQ ID NO: 23
  Description of Artificial Sequence: Synthetic polypeptide
  VL of XENP019823

SEQ ID NO: 861 - protein, 5 aa, Artificial Sequence
  Description of Artificial Sequence: Synthetic peptide
  XENP019823 vhCDR1
SYTMH

SEQ ID NO: 862 - protein, 17 aa, Artificial Sequence
  Description of Artificial Sequence: Synthetic peptide
  XENP019823 vhCDR2
FISYDGNTKYYADSVKG

SEQ ID NO: 863 - protein, 9 aa, Artificial Sequence
  Description of Artificial Sequence: Synthetic peptide
  XENP019823 vhCDR3
TGWLGPFDY

SEQ ID NO: 864 - protein, 12 aa, Artificial Sequence
  Description of Artificial Sequence: Synthetic peptide
  XENP019823 vlCDR1
RASQSVGSSYLA

SEQ ID NO: 865 - protein, 7 aa, Artificial Sequence
  Description of Artificial Sequence: Synthetic peptide
  XENP019823 vlCDR2
GAFSRAT

SEQ ID NO: 866 - protein, 9 aa, Artificial Sequence
  Description of Artificial Sequence: Synthetic peptide
  XENP019823 vlCDR3
QQYGSSPWT

SEQ ID NO: 867 - protein, 246 aa, Artificial Sequence
  Description of Artificial Sequence: Synthetic polypeptide
  XENP019824 [CTLA-4]_H0.76_L0_scFv(GKPGS)4
QVQLVESGGGVVQPGRSLRLSCAASGFTFSSYTMHWVRQAPGKGLEWVTFISYDGNQKYYADSVKGRFTISRDNSKNTLYLQMNSLRAEDTAIYYCARTGWLGPFDYWGQGTLVTVSSGKPGSGKPGSGKPGSGKPGSEIVLTQSPGTLSLSPGERATLSCRASQSVGSSYLAWYQQKPGQAPRLLIYGAFSRATGIPDRFSGSGSGTDFTLTISRLEPEDFAVYYCQQYGSSPWTFGQGTKVEIK

SEQ ID NO: 868 - protein, 118 aa, Artificial Sequence
  Description of Artificial Sequence: Synthetic polypeptide
  VH of XENP019824
QVQLVESGGGVVQPGRSLRLSCAASGFTFSSYTMHWVRQAPGKGLEWVTFISYDGNQKYYADSVKGRFTISRDNSKNTLYLQMNSLRAEDTAIYYCARTGWLGPFDYWGQGTLVTVSS

SEQ ID NO: 869 - protein, 108 aa, Artificial Sequence; identical to SEQ ID NO: 23
  Description of Artificial Sequence: Synthetic polypeptide
  VL of XENP019824

SEQ ID NO: 870 - protein, 5 aa, Artificial Sequence
  Description of Artificial Sequence: Synthetic peptide
  XENP019824 vhCDR1
SYTMH

SEQ ID NO: 871 - protein, 17 aa, Artificial Sequence
  Description of Artificial Sequence: Synthetic peptide
  XENP019824 vhCDR2
FISYDGNQKYYADSVKG

SEQ ID NO: 872 - protein, 9 aa, Artificial Sequence
  Description of Artificial Sequence: Synthetic peptide
  XENP019824 vhCDR3
TGWLGPFDY

SEQ ID NO: 873 - protein, 12 aa, Artificial Sequence
  Description of Artificial Sequence: Synthetic peptide
  XENP019824 vlCDR1
RASQSVGSSYLA

SEQ ID NO: 874 - protein, 7 aa, Artificial Sequence
  Description of Artificial Sequence: Synthetic peptide
  XENP019824 vlCDR2
GAFSRAT

SEQ ID NO: 875 - protein, 9 aa, Artificial Sequence
  Description of Artificial Sequence: Synthetic peptide
  XENP019824 vlCDR3
QQYGSSPWT

SEQ ID NO: 876 - protein, 246 aa, Artificial Sequence
  Description of Artificial Sequence: Synthetic polypeptide
  XENP019825 [CTLA-4]_H0.77_L0_scFv(GKPGS)4
QVQLVESGGGVVQPGRSLRLSCAASGFTFSSYTMHWVRQAPGKGLEWVTFISYDGNNIYYADSVKGRFTISRDNSKNTLYLQMNSLRAEDTAIYYCARTGWLGPFDYWGQGTLVTVSSGKPGSGKPGSGKPGSGKPGSEIVLTQSPGTLSLSPGERATLSCRASQSVGSSYLAWYQQKPGQAPRLLIYGAFSRATGIPDRFSGSGSGTDFTLTISRLEPEDFAVYYCQQYGSSPWTFGQGTKVEIK

SEQ ID NO: 877 - protein, 118 aa, Artificial Sequence
  Description of Artificial Sequence: Synthetic polypeptide
  VH of XENP019825
QVQLVESGGGVVQPGRSLRLSCAASGFTFSSYTMHWVRQAPGKGLEWVTFISYDGNNIYYADSVKGRFTISRDNSKNTLYLQMNSLRAEDTAIYYCARTGWLGPFDYWGQGTLVTVSS

SEQ ID NO: 878 - protein, 108 aa, Artificial Sequence; identical to SEQ ID NO: 23
  Description of Artificial Sequence: Synthetic polypeptide
  VL of XENP019825

SEQ ID NO: 879 - protein, 5 aa, Artificial Sequence
  Description of Artificial Sequence: Synthetic peptide
  XENP019825 vhCDR1
SYTMH

SEQ ID NO: 880 - protein, 17 aa, Artificial Sequence
  Description of Artificial Sequence: Synthetic peptide
  XENP019825 vhCDR2
FISYDGNNIYYADSVKG

SEQ ID NO: 881 - protein, 9 aa, Artificial Sequence
  Description of Artificial Sequence: Synthetic peptide
  XENP019825 vhCDR3
TGWLGPFDY

SEQ ID NO: 882 - protein, 12 aa, Artificial Sequence
  Description of Artificial Sequence: Synthetic peptide
  XENP019825 vlCDR1
RASQSVGSSYLA

SEQ ID NO: 883 - protein, 7 aa, Artificial Sequence
  Description of Artificial Sequence: Synthetic peptide
  XENP019825 vlCDR2
GAFSRAT

SEQ ID NO: 884 - protein, 9 aa, Artificial Sequence
  Description of Artificial Sequence: Synthetic peptide
  XENP019825 vlCDR3
QQYGSSPWT

SEQ ID NO: 885 - protein, 246 aa, Artificial Sequence
  Description of Artificial Sequence: Synthetic polypeptide
  XENP019826 [CTLA-4]_H0.78_L0_scFv(GKPGS)4
QVQLVESGGGVVQPGRSLRLSCAASGFTFSSYTMHWVRQAPGKGLEWVTFISYDGNNTYYADSVKGRFTISRDNSKNTLYLQMNSLRAEDTAIYYCARTGWLGPFDYWGQGTLVTVSSGKPGSGKPGSGKPGSGKPGSEIVLTQSPGTLSLSPGERATLSCRASQSVGSSYLAWYQQKPGQAPRLLIYGAFSRATGIPDRFSGSGSGTDFTLTISRLEPEDFAVYYCQQYGSSPWTFGQGTKVEIK

SEQ ID NO: 886 - protein, 118 aa, Artificial Sequence
  Description of Artificial Sequence: Synthetic polypeptide
  VH of XENP019826
QVQLVESGGGVVQPGRSLRLSCAASGFTFSSYTMHWVRQAPGKGLEWVTFISYDGNNTYYADSVKGRFTISRDNSKNTLYLQMNSLRAEDTAIYYCARTGWLGPFDYWGQGTLVTVSS

SEQ ID NO: 887 - protein, 108 aa, Artificial Sequence; identical to SEQ ID NO: 23
  Description of Artificial Sequence: Synthetic polypeptide
  VL of XENP019826

SEQ ID NO: 888 - protein, 5 aa, Artificial Sequence
  Description of Artificial Sequence: Synthetic peptide
  XENP019826 vhCDR1
SYTMH

SEQ ID NO: 889 - protein, 17 aa, Artificial Sequence
  Description of Artificial Sequence: Synthetic peptide
  XENP019826 vhCDR2
FISYDGNNTYYADSVKG

SEQ ID NO: 890 - protein, 9 aa, Artificial Sequence
  Description of Artificial Sequence: Synthetic peptide
  XENP019826 vhCDR3
TGWLGPFDY

SEQ ID NO: 891 - protein, 12 aa, Artificial Sequence
  Description of Artificial Sequence: Synthetic peptide
  XENP019826 vlCDR1
RASQSVGSSYLA

SEQ ID NO: 892 - protein, 7 aa, Artificial Sequence
  Description of Artificial Sequence: Synthetic peptide
  XENP019826 vlCDR2
GAFSRAT

SEQ ID NO: 893 - protein, 9 aa, Artificial Sequence
  Description of Artificial Sequence: Synthetic peptide
  XENP019826 vlCDR3
QQYGSSPWT

SEQ ID NO: 894 - protein, 246 aa, Artificial Sequence
  Description of Artificial Sequence: Synthetic polypeptide
  XENP019827 [CTLA-4]_H0.79_L0_scFv(GKPGS)4
QVQLVESGGGVVQPGRSLRLSCAASGFTFSSYTMHWVRQAPGKGLEWVTFISYDGNNKAYADSVKGRFTISRDNSKNTLYLQMNSLRAEDTAIYYCARTGWLGPFDYWGQGTLVTVSSGKPGSGKPGSGKPGSGKPGSEIVLTQSPGTLSLSPGERATLSCRASQSVGSSYLAWYQQKPGQAPRLLIYGAFSRATGIPDRFSGSGSGTDFTLTISRLEPEDFAVYYCQQYGSSPWTFGQGTKVEIK

SEQ ID NO: 895 - protein, 118 aa, Artificial Sequence
  Description of Artificial Sequence: Synthetic polypeptide
  VH of XENP019827
QVQLVESGGGVVQPGRSLRLSCAASGFTFSSYTMHWVRQAPGKGLEWVTFISYDGNNKAYADSVKGRFTISRDNSKNTLYLQMNSLRAEDTAIYYCARTGWLGPFDYWGQGTLVTVSS

SEQ ID NO: 896 - protein, 108 aa, Artificial Sequence; identical to SEQ ID NO: 23
  Description of Artificial Sequence: Synthetic polypeptide
  VL of XENP019827

SEQ ID NO: 897 - protein, 5 aa, Artificial Sequence
  Description of Artificial Sequence: Synthetic peptide
  XENP019827 vhCDR1
SYTMH

SEQ ID NO: 898 - protein, 17 aa, Artificial Sequence
  Description of Artificial Sequence: Synthetic peptide
  XENP019827 vhCDR2
FISYDGNNKAYADSVKG

SEQ ID NO: 899 - protein, 9 aa, Artificial Sequence
  Description of Artificial Sequence: Synthetic peptide
  XENP019827 vhCDR3
TGWLGPFDY

SEQ ID NO: 900 - protein, 12 aa, Artificial Sequence
  Description of Artificial Sequence: Synthetic peptide
  XENP019827 vlCDR1
RASQSVGSSYLA

SEQ ID NO: 901 - protein, 7 aa, Artificial Sequence
  Description of Artificial Sequence: Synthetic peptide
  XENP019827 vlCDR2
GAFSRAT

SEQ ID NO: 902 - protein, 9 aa, Artificial Sequence
  Description of Artificial Sequence: Synthetic peptide
  XENP019827 vlCDR3
QQYGSSPWT

SEQ ID NO: 903 - protein, 246 aa, Artificial Sequence
  Description of Artificial Sequence: Synthetic polypeptide
  XENP019828 [CTLA-4]_H0.80_L0_scFv(GKPGS)4
QVQLVESGGGVVQPGRSLRLSCAASGFTFSSYTMHWVRQAPGKGLEWVTFISYDGNNKYYAASVKGRFTISRDNSKNTLYLQMNSLRAEDTAIYYCARTGWLGPFDYWGQGTLVTVSSGKPGSGKPGSGKPGSGKPGSEIVLTQSPGTLSLSPGERATLSCRASQSVGSSYLAWYQQKPGQAPRLLIYGAFSRATGIPDRFSGSGSGTDFTLTISRLEPEDFAVYYCQQYGSSPWTFGQGTKVEIK

SEQ ID NO: 904 - protein, 118 aa, Artificial Sequence
  Description of Artificial Sequence: Synthetic polypeptide
  VH of XENP019828
QVQLVESGGGVVQPGRSLRLSCAASGFTFSSYTMHWVRQAPGKGLEWVTFISYDGNNKYYAASVKGRFTISRDNSKNTLYLQMNSLRAEDTAIYYCARTGWLGPFDYWGQGTLVTVSS

SEQ ID NO: 905 - protein, 108 aa, Artificial Sequence; identical to SEQ ID NO: 23
  Description of Artificial Sequence: Synthetic polypeptide
  VL of XENP019828

SEQ ID NO: 906 - protein, 5 aa, Artificial Sequence
  Description of Artificial Sequence: Synthetic peptide
  XENP019828 vhCDR1
SYTMH

SEQ ID NO: 907 - protein, 17 aa, Artificial Sequence
  Description of Artificial Sequence: Synthetic peptide
  XENP019828 vhCDR2
FISYDGNNKYYAASVKG

SEQ ID NO: 908 - protein, 9 aa, Artificial Sequence
  Description of Artificial Sequence: Synthetic peptide
  XENP019828 vhCDR3
TGWLGPFDY

SEQ ID NO: 909 - protein, 12 aa, Artificial Sequence
  Description of Artificial Sequence: Synthetic peptide
  XENP019828 vlCDR1
RASQSVGSSYLA

SEQ ID NO: 910 - protein, 7 aa, Artificial Sequence
  Description of Artificial Sequence: Synthetic peptide
  XENP019828 vlCDR2
GAFSRAT

SEQ ID NO: 911 - protein, 9 aa, Artificial Sequence
  Description of Artificial Sequence: Synthetic peptide
  XENP019828 vlCDR3
QQYGSSPWT

SEQ ID NO: 912 - protein, 246 aa, Artificial Sequence
  Description of Artificial Sequence: Synthetic polypeptide
  XENP019829 [CTLA-4]_H0.81_L0_scFv(GKPGS)4
QVQLVESGGGVVQPGRSLRLSCAASGFTFSSYTMHWVRQAPGKGLEWVTFISYDGNNKYYAKSVKGRFTISRDNSKNTLYLQMNSLRAEDTAIYYCARTGWLGPFDYWGQGTLVTVSSGKPGSGKPGSGKPGSGKPGSEIVLTQSPGTLSLSPGERATLSCRASQSVGSSYLAWYQQKPGQAPRLLIYGAFSRATGIPDRFSGSGSGTDFTLTISRLEPEDFAVYYCQQYGSSPWTFGQGTKVEIK

SEQ ID NO: 913 - protein, 118 aa, Artificial Sequence
  Description of Artificial Sequence: Synthetic polypeptide
  VH of XENP019829
QVQLVESGGGVVQPGRSLRLSCAASGFTFSSYTMHWVRQAPGKGLEWVTFISYDGNNKYYAKSVKGRFTISRDNSKNTLYLQMNSLRAEDTAIYYCARTGWLGPFDYWGQGTLVTVSS

SEQ ID NO: 914 - protein, 108 aa, Artificial Sequence; identical to SEQ ID NO: 23
  Description of Artificial Sequence: Synthetic polypeptide
  VL of XENP019829

SEQ ID NO: 915 - protein, 5 aa, Artificial Sequence
  Description of Artificial Sequence: Synthetic peptide
  XENP019829 vhCDR1
SYTMH

SEQ ID NO: 916 - protein, 17 aa, Artificial Sequence
  Description of Artificial Sequence: Synthetic peptide
  XENP019829 vhCDR2
FISYDGNNKYYAKSVKG

SEQ ID NO: 917 - protein, 9 aa, Artificial Sequence
  Description of Artificial Sequence: Synthetic peptide
  XENP019829 vhCDR3
TGWLGPFDY

SEQ ID NO: 918 - protein, 12 aa, Artificial Sequence
  Description of Artificial Sequence: Synthetic peptide
  XENP019829 vlCDR1
RASQSVGSSYLA

SEQ ID NO: 919 - protein, 7 aa, Artificial Sequence
  Description of Artificial Sequence: Synthetic peptide
  XENP019829 vlCDR2
GAFSRAT

SEQ ID NO: 920 - protein, 9 aa, Artificial Sequence
  Description of Artificial Sequence: Synthetic peptide
  XENP019829 vlCDR3
QQYGSSPWT

SEQ ID NO: 921 - protein, 246 aa, Artificial Sequence
  Description of Artificial Sequence: Synthetic polypeptide
  XENP019830 [CTLA-4]_H0.82_L0_scFv(GKPGS)4
QVQLVESGGGVVQPGRSLRLSCAASGFTFSSYTMHWVRQAPGKGLEWVTFISYDGNNKYYADSVKDRFTISRDNSKNTLYLQMNSLRAEDTAIYYCARTGWLGPFDYWGQGTLVTVSSGKPGSGKPGSGKPGSGKPGSEIVLTQSPGTLSLSPGERATLSCRASQSVGSSYLAWYQQKPGQAPRLLIYGAFSRATGIPDRFSGSGSGTDFTLTISRLEPEDFAVYYCQQYGSSPWTFGQGTKVEIK

SEQ ID NO: 922 - protein, 118 aa, Artificial Sequence
  Description of Artificial Sequence: Synthetic polypeptide
  VH of XENP019830
QVQLVESGGGVVQPGRSLRLSCAASGFTFSSYTMHWVRQAPGKGLEWVTFISYDGNNKYYADSVKDRFTISRDNSKNTLYLQMNSLRAEDTAIYYCARTGWLGPFDYWGQGTLVTVSS

SEQ ID NO: 923 - protein, 108 aa, Artificial Sequence; identical to SEQ ID NO: 23
  Description of Artificial Sequence: Synthetic polypeptide
  VL of XENP019830

SEQ ID NO: 924 - protein, 5 aa, Artificial Sequence
  Description of Artificial Sequence: Synthetic peptide
  XENP019830 vhCDR1
SYTMH

SEQ ID NO: 925 - protein, 17 aa, Artificial Sequence
  Description of Artificial Sequence: Synthetic peptide
  XENP019830 vhCDR2
FISYDGNNKYYADSVKD

SEQ ID NO: 926 - protein, 9 aa, Artificial Sequence
  Description of Artificial Sequence: Synthetic peptide
  XENP019830 vhCDR3
TGWLGPFDY

SEQ ID NO: 927 - protein, 12 aa, Artificial Sequence
  Description of Artificial Sequence: Synthetic peptide
  XENP019830 vlCDR1
RASQSVGSSYLA

SEQ ID NO: 928 - protein, 7 aa, Artificial Sequence
  Description of Artificial Sequence: Synthetic peptide
  XENP019830 vlCDR2
GAFSRAT

SEQ ID NO: 929 - protein, 9 aa, Artificial Sequence
  Description of Artificial Sequence: Synthetic peptide
  XENP019830 vlCDR3
QQYGSSPWT

SEQ ID NO: 930 - protein, 246 aa, Artificial Sequence
  Description of Artificial Sequence: Synthetic polypeptide
  XENP019831 [CTLA-4]_H0.83_L0_scFv(GKPGS)4
QVQLVESGGGVVQPGRSLRLSCAASGFTFSSYTMHWVRQAPGKGLEWVTFISYDGNNKYYADSVKERFTISRDNSKNTLYLQMNSLRAEDTAIYYCARTGWLGPFDYWGQGTLVTVSSGKPGSGKPGSGKPGSGKPGSEIVLTQSPGTLSLSPGERATLSCRASQSVGSSYLAWYQQKPGQAPRLLIYGAFSRATGIPDRFSGSGSGTDFTLTISRLEPEDFAVYYCQQYGSSPWTFGQGTKVEIK

SEQ ID NO: 931 - protein, 118 aa, Artificial Sequence
  Description of Artificial Sequence: Synthetic polypeptide
  VH of XENP019831
QVQLVESGGGVVQPGRSLRLSCAASGFTFSSYTMHWVRQAPGKGLEWVTFISYDGNNKYYADSVKERFTISRDNSKNTLYLQMNSLRAEDTAIYYCARTGWLGPFDYWGQGTLVTVSS

SEQ ID NO: 932 - protein, 108 aa, Artificial Sequence; identical to SEQ ID NO: 23
  Description of Artificial Sequence: Synthetic polypeptide
  VL of XENP019831

SEQ ID NO: 933 - protein, 5 aa, Artificial Sequence
  Description of Artificial Sequence: Synthetic peptide
  XENP019831 vhCDR1
SYTMH

SEQ ID NO: 934 - protein, 17 aa, Artificial Sequence
  Description of Artificial Sequence: Synthetic peptide
  XENP019831 vhCDR2
FISYDGNNKYYADSVKE

SEQ ID NO: 935 - protein, 9 aa, Artificial Sequence
  Description of Artificial Sequence: Synthetic peptide
  XENP019831 vhCDR3
TGWLGPFDY

SEQ ID NO: 936 - protein, 12 aa, Artificial Sequence
  Description of Artificial Sequence: Synthetic peptide
  XENP019831 vlCDR1
RASQSVGSSYLA

SEQ ID NO: 937 - protein, 7 aa, Artificial Sequence
  Description of Artificial Sequence: Synthetic peptide
  XENP019831 vlCDR2
GAFSRAT

SEQ ID NO: 938 - protein, 9 aa, Artificial Sequence
  Description of Artificial Sequence: Synthetic peptide
  XENP019831 vlCDR3
QQYGSSPWT

SEQ ID NO: 939 - protein, 246 aa, Artificial Sequence
  Description of Artificial Sequence: Synthetic polypeptide
  XENP019832 [CTLA-4]_H0.84_L0_scFv(GKPGS)4
QVQLVESGGGVVQPGRSLRLSCAASGFTFSSYTMHWVRQAPGKGLEWVTFISYDGNNKYYADSVKGQFTISRDNSKNTLYLQMNSLRAEDTAIYYCARTGWLGPFDYWGQGTLVTVSSGKPGSGKPGSGKPGSGKPGSEIVLTQSPGTLSLSPGERATLSCRASQSVGSSYLAWYQQKPGQAPRLLIYGAFSRATGIPDRFSGSGSGTDFTLTISRLEPEDFAVYYCQQYGSSPWTFGQGTKVEIK

SEQ ID NO: 940 - protein, 118 aa, Artificial Sequence
  Description of Artificial Sequence: Synthetic polypeptide
  VH of XENP019832
QVQLVESGGGVVQPGRSLRLSCAASGFTFSSYTMHWVRQAPGKGLEWVTFISYDGNNKYYADSVKGQFTISRDNSKNTLYLQMNSLRAEDTAIYYCARTGWLGPFDYWGQGTLVTVSS

SEQ ID NO: 941 - protein, 108 aa, Artificial Sequence; identical to SEQ ID NO: 23
  Description of Artificial Sequence: Synthetic polypeptide
  VL of XENP019832

SEQ ID NO: 942 - protein, 5 aa, Artificial Sequence
  Description of Artificial Sequence: Synthetic peptide
  XENP019832 vhCDR1
SYTMH

SEQ ID NO: 943 - protein, 17 aa, Artificial Sequence
  Description of Artificial Sequence: Synthetic peptide
  XENP019832 vhCDR2
FISYDGNNKYYADSVKG

SEQ ID NO: 944 - protein, 9 aa, Artificial Sequence
  Description of Artificial Sequence: Synthetic peptide
  XENP019832 vhCDR3
TGWLGPFDY

SEQ ID NO: 945 - protein, 12 aa, Artificial Sequence
  Description of Artificial Sequence: Synthetic peptide
  XENP019832 vlCDR1
RASQSVGSSYLA

SEQ ID NO: 946 - protein, 7 aa, Artificial Sequence
  Description of Artificial Sequence: Synthetic peptide
  XENP019832 vlCDR2
GAFSRAT

SEQ ID NO: 947 - protein, 9 aa, Artificial Sequence
  Description of Artificial Sequence: Synthetic peptide
  XENP019832 vlCDR3
QQYGSSPWT

SEQ ID NO: 948 - protein, 246 aa, Artificial Sequence
  Description of Artificial Sequence: Synthetic polypeptide
  XENP019833 [CTLA-4]_H0.85_L0_scFv(GKPGS)4
QVQLVESGGGVVQPGRSLRLSCAASGFTFSSYTMHWVRQAPGKGLEWVTFISYDGNNKYYADSVKGRFTMSRDNSKNTLYLQMNSLRAEDTAIYYCARTGWLGPFDYWGQGTLVTVSSGKPGSGKPGSGKPGSGKPGSEIVLTQSPGTLSLSPGERATLSCRASQSVGSSYLAWYQQKPGQAPRLLIYGAFSRATGIPDRFSGSGSGTDFTLTISRLEPEDFAVYYCQQYGSSPWTFGQGTKVEIK

SEQ ID NO: 949 - protein, 118 aa, Artificial Sequence
  Description of Artificial Sequence: Synthetic polypeptide
  VH of XENP019833
QVQLVESGGGVVQPGRSLRLSCAASGFTFSSYTMHWVRQAPGKGLEWVTFISYDGNNKYYADSVKGRFTMSRDNSKNTLYLQMNSLRAEDTAIYYCARTGWLGPFDYWGQGTLVTVSS

SEQ ID NO: 950 - protein, 108 aa, Artificial Sequence; identical to SEQ ID NO: 23
  Description of Artificial Sequence: Synthetic polypeptide
  VL of XENP019833

SEQ ID NO: 951 - protein, 5 aa, Artificial Sequence
  Description of Artificial Sequence: Synthetic peptide
  XENP019833 vhCDR1
SYTMH

SEQ ID NO: 952 - protein, 17 aa, Artificial Sequence
  Description of Artificial Sequence: Synthetic peptide
  XENP019833 vhCDR2
FISYDGNNKYYADSVKG

SEQ ID NO: 953 - protein, 9 aa, Artificial Sequence
  Description of Artificial Sequence: Synthetic peptide
  XENP019833 vhCDR3
TGWLGPFDY

SEQ ID NO: 954 - protein, 12 aa, Artificial Sequence
  Description of Artificial Sequence: Synthetic peptide
  XENP019833 vlCDR1
RASQSVGSSYLA

SEQ ID NO: 955 - protein, 7 aa, Artificial Sequence
  Description of Artificial Sequence: Synthetic peptide
  XENP019833 vlCDR2
GAFSRAT

SEQ ID NO: 956 - protein, 9 aa, Artificial Sequence
  Description of Artificial Sequence: Synthetic peptide
  XENP019833 vlCDR3
QQYGSSPWT

SEQ ID NO: 957 - protein, 246 aa, Artificial Sequence
  Description of Artificial Sequence: Synthetic polypeptide
  XENP019834 [CTLA-4]_H0.86_L0_scFv(GKPGS)4
QVQLVESGGGVVQPGRSLRLSCAASGFTFSSYTMHWVRQAPGKGLEWVTFISYDGNNKYYADSVKGRFTVSRDNSKNTLYLQMNSLRAEDTAIYYCARTGWLGPFDYWGQGTLVTVSSGKPGSGKPGSGKPGSGKPGSEIVLTQSPGTLSLSPGERATLSCRASQSVGSSYLAWYQQKPGQAPRLLIYGAFSRATGIPDRFSGSGSGTDFTLTISRLEPEDFAVYYCQQYGSSPWTFGQGTKVEIK

SEQ ID NO: 958 - protein, 118 aa, Artificial Sequence
  Description of Artificial Sequence: Synthetic polypeptide
  VH of XENP019834
QVQLVESGGGVVQPGRSLRLSCAASGFTFSSYTMHWVRQAPGKGLEWVTFISYDGNNKYYADSVKGRFTVSRDNSKNTLYLQMNSLRAEDTAIYYCARTGWLGPFDYWGQGTLVTVSS

SEQ ID NO: 959 - protein, 108 aa, Artificial Sequence; identical to SEQ ID NO: 23
  Description of Artificial Sequence: Synthetic polypeptide
  VL of XENP019834

SEQ ID NO: 960 - protein, 5 aa, Artificial Sequence
  Description of Artificial Sequence: Synthetic peptide
  XENP019834 vhCDR1
SYTMH

SEQ ID NO: 961 - protein, 17 aa, Artificial Sequence
  Description of Artificial Sequence: Synthetic peptide
  XENP019834 vhCDR2
FISYDGNNKYYADSVKG

SEQ ID NO: 962 - protein, 9 aa, Artificial Sequence
  Description of Artificial Sequence: Synthetic peptide
  XENP019834 vhCDR3
TGWLGPFDY

SEQ ID NO: 963 - protein, 12 aa, Artificial Sequence
  Description of Artificial Sequence: Synthetic peptide
  XENP019834 vlCDR1
RASQSVGSSYLA

SEQ ID NO: 964 - protein, 7 aa, Artificial Sequence
  Description of Artificial Sequence: Synthetic peptide
  XENP019834 vlCDR2
GAFSRAT

SEQ ID NO: 965 - protein, 9 aa, Artificial Sequence
  Description of Artificial Sequence: Synthetic peptide
  XENP019834 vlCDR3
QQYGSSPWT

SEQ ID NO: 966 - protein, 246 aa, Artificial Sequence
  Description of Artificial Sequence: Synthetic polypeptide
  XENP019835 [CTLA-4]_H0.87_L0_scFv(GKPGS)4
QVQLVESGGGVVQPGRSLRLSCAASGFTFSSYTMHWVRQAPGKGLEWVTFISYDGNNKYYADSVKGRFTISEDNSKNTLYLQMNSLRAEDTAIYYCARTGWLGPFDYWGQGTLVTVSSGKPGSGKPGSGKPGSGKPGSEIVLTQSPGTLSLSPGERATLSCRASQSVGSSYLAWYQQKPGQAPRLLIYGAFSRATGIPDRFSGSGSGTDFTLTISRLEPEDFAVYYCQQYGSSPWTFGQGTKVEIK

SEQ ID NO: 967 - protein, 118 aa, Artificial Sequence
  Description of Artificial Sequence: Synthetic polypeptide
  VH of XENP019835
QVQLVESGGGVVQPGRSLRLSCAASGFTFSSYTMHWVRQAPGKGLEWVTFISYDGNNKYYADSVKGRFTISEDNSKNTLYLQMNSLRAEDTAIYYCARTGWLGPFDYWGQGTLVTVSS

SEQ ID NO: 968 - protein, 108 aa, Artificial Sequence; identical to SEQ ID NO: 23
  Description of Artificial Sequence: Synthetic polypeptide
  VL of XENP019835

SEQ ID NO: 969 - protein, 5 aa, Artificial Sequence
  Description of Artificial Sequence: Synthetic peptide
  XENP019835 vhCDR1
SYTMH

SEQ ID NO: 970 - protein, 17 aa, Artificial Sequence
  Description of Artificial Sequence: Synthetic peptide
  XENP019835 vhCDR2
FISYDGNNKYYADSVKG

SEQ ID NO: 971 - protein, 9 aa, Artificial Sequence
  Description of Artificial Sequence: Synthetic peptide
  XENP019835 vhCDR3
TGWLGPFDY

SEQ ID NO: 972 - protein, 12 aa, Artificial Sequence
  Description of Artificial Sequence: Synthetic peptide
  XENP019835 vlCDR1
RASQSVGSSYLA

SEQ ID NO: 973 - protein, 7 aa, Artificial Sequence
  Description of Artificial Sequence: Synthetic peptide
  XENP019835 vlCDR2
GAFSRAT

SEQ ID NO: 974 - protein, 9 aa, Artificial Sequence
  Description of Artificial Sequence: Synthetic peptide
  XENP019835 vlCDR3
QQYGSSPWT

SEQ ID NO: 975 - protein, 246 aa, Artificial Sequence
  Description of Artificial Sequence: Synthetic polypeptide
  XENP019836 [CTLA-4]_H0.88_L0_scFv(GKPGS)4
QVQLVESGGGVVQPGRSLRLSCAASGFTFSSYTMHWVRQAPGKGLEWVTFISYDGNNKYYADSVKGRFTISRENSKNTLYLQMNSLRAEDTAIYYCARTGWLGPFDYWGQGTLVTVSSGKPGSGKPGSGKPGSGKPGSEIVLTQSPGTLSLSPGERATLSCRASQSVGSSYLAWYQQKPGQAPRLLIYGAFSRATGIPDRFSGSGSGTDFTLTISRLEPEDFAVYYCQQYGSSPWTFGQGTKVEIK

SEQ ID NO: 976 - protein, 118 aa, Artificial Sequence
  Description of Artificial Sequence: Synthetic polypeptide
  VH of XENP019836
QVQLVESGGGVVQPGRSLRLSCAASGFTFSSYTMHWVRQAPGKGLEWVTFISYDGNNKYYADSVKGRFTISRENSKNTLYLQMNSLRAEDTAIYYCARTGWLGPFDYWGQGTLVTVSS

SEQ ID NO: 977 - protein, 108 aa, Artificial Sequence; identical to SEQ ID NO: 23
  Description of Artificial Sequence: Synthetic polypeptide
  VL of XENP019836

SEQ ID NO: 978 - protein, 5 aa, Artificial Sequence
  Description of Artificial Sequence: Synthetic peptide
  XENP019836 vhCDR1
SYTMH

SEQ ID NO: 979 - protein, 17 aa, Artificial Sequence
  Description of Artificial Sequence: Synthetic peptide
  XENP019836 vhCDR2
FISYDGNNKYYADSVKG

SEQ ID NO: 980 - protein, 9 aa, Artificial Sequence
  Description of Artificial Sequence: Synthetic peptide
  XENP019836 vhCDR3
TGWLGPFDY

SEQ ID NO: 981 - protein, 12 aa, Artificial Sequence
  Description of Artificial Sequence: Synthetic peptide
  XENP019836 vlCDR1
RASQSVGSSYLA

SEQ ID NO: 982 - protein, 7 aa, Artificial Sequence
  Description of Artificial Sequence: Synthetic peptide
  XENP019836 vlCDR2
GAFSRAT

SEQ ID NO: 983 - protein, 9 aa, Artificial Sequence
  Description of Artificial Sequence: Synthetic peptide
  XENP019836 vlCDR3
QQYGSSPWT

SEQ ID NO: 984 - protein, 246 aa, Artificial Sequence
  Description of Artificial Sequence: Synthetic polypeptide
  XENP019837 [CTLA-4]_H0.89_L0_scFv(GKPGS)4
QVQLVESGGGVVQPGRSLRLSCAASGFTFSSYTMHWVRQAPGKGLEWVTFISYDGNNKYYADSVKGRFTISRDDSKNTLYLQMNSLRAEDTAIYYCARTGWLGPFDYWGQGTLVTVSSGKPGSGKPGSGKPGSGKPGSEIVLTQSPGTLSLSPGERATLSCRASQSVGSSYLAWYQQKPGQAPRLLIYGAFSRATGIPDRFSGSGSGTDFTLTISRLEPEDFAVYYCQQYGSSPWTFGQGTKVEIK

SEQ ID NO: 985 - protein, 118 aa, Artificial Sequence
  Description of Artificial Sequence: Synthetic polypeptide
  VH of XENP019837
QVQLVESGGGVVQPGRSLRLSCAASGFTFSSYTMHWVRQAPGKGLEWVTFISYDGNNKYYADSVKGRFTISRDDSKNTLYLQMNSLRAEDTAIYYCARTGWLGPFDYWGQGTLVTVSS

SEQ ID NO: 986 - protein, 108 aa, Artificial Sequence; identical to SEQ ID NO: 23
  Description of Artificial Sequence: Synthetic polypeptide
  VL of XENP019837

SEQ ID NO: 987 - protein, 5 aa, Artificial Sequence
  Description of Artificial Sequence: Synthetic peptide
  XENP019837 vhCDR1
SYTMH

SEQ ID NO: 988 - protein, 17 aa, Artificial Sequence
  Description of Artificial Sequence: Synthetic peptide
  XENP019837 vhCDR2
FISYDGNNKYYADSVKG

SEQ ID NO: 989 - protein, 9 aa, Artificial Sequence
  Description of Artificial Sequence: Synthetic peptide
  XENP019837 vhCDR3
TGWLGPFDY

SEQ ID NO: 990 - protein, 12 aa, Artificial Sequence
  Description of Artificial Sequence: Synthetic peptide
  XENP019837 vlCDR1
RASQSVGSSYLA

SEQ ID NO: 991 - protein, 7 aa, Artificial Sequence
  Description of Artificial Sequence: Synthetic peptide
  XENP019837 vlCDR2
GAFSRAT

SEQ ID NO: 992 - protein, 9 aa, Artificial Sequence
  Description of Artificial Sequence: Synthetic peptide
  XENP019837 vlCDR3
QQYGSSPWT

SEQ ID NO: 993 - protein, 246 aa, Artificial Sequence
  Description of Artificial Sequence: Synthetic polypeptide
  XENP019838 [CTLA-4]_H0.90_L0_scFv(GKPGS)4
QVQLVESGGGVVQPGRSLRLSCAASGFTFSSYTMHWVRQAPGKGLEWVTFISYDGNNKYYADSVKGRFTISRDNAKNTLYLQMNSLRAEDTAIYYCARTGWLGPFDYWGQGTLVTVSSGKPGSGKPGSGKPGSGKPGSEIVLTQSPGTLSLSPGERATLSCRASQSVGSSYLAWYQQKPGQAPRLLIYGAFSRATGIPDRFSGSGSGTDFTLTISRLEPEDFAVYYCQQYGSSPWTFGQGTKVEIK

SEQ ID NO: 994 - protein, 118 aa, Artificial Sequence
  Description of Artificial Sequence: Synthetic polypeptide
  VH of XENP019838
QVQLVESGGGVVQPGRSLRLSCAASGFTFSSYTMHWVRQAPGKGLEWVTFISYDGNNKYYADSVKGRFTISRDNAKNTLYLQMNSLRAEDTAIYYCARTGWLGPFDYWGQGTLVTVSS

SEQ ID NO: 995 - protein, 108 aa, Artificial Sequence; identical to SEQ ID NO: 23
  Description of Artificial Sequence: Synthetic polypeptide
  VL of XENP019838

SEQ ID NO: 996 - protein, 5 aa, Artificial Sequence
  Description of Artificial Sequence: Synthetic peptide
  XENP019838 vhCDR1
SYTMH

SEQ ID NO: 997 - protein, 17 aa, Artificial Sequence
  Description of Artificial Sequence: Synthetic peptide
  XENP019838 vhCDR2
FISYDGNNKYYADSVKG

SEQ ID NO: 998 - protein, 9 aa, Artificial Sequence
  Description of Artificial Sequence: Synthetic peptide
  XENP019838 vhCDR3
TGWLGPFDY

SEQ ID NO: 999 - protein, 12 aa, Artificial Sequence
  Description of Artificial Sequence: Synthetic peptide
  XENP019838 vlCDR1
RASQSVGSSYLA

SEQ ID NO: 1000 - protein, 7 aa, Artificial Sequence
  Description of Artificial Sequence: Synthetic peptide
  XENP019838 vlCDR2
GAFSRAT

SEQ ID NO: 1001 - protein, 9 aa, Artificial Sequence
  Description of Artificial Sequence: Synthetic peptide
  XENP019838 vlCDR3
QQYGSSPWT

SEQ ID NO: 1002 - protein, 246 aa, Artificial Sequence
  Description of Artificial Sequence: Synthetic polypeptide
  XENP019839 [CTLA-4]_H0.91_L0_scFv(GKPGS)4
QVQLVESGGGVVQPGRSLRLSCAASGFTFSSYTMHWVRQAPGKGLEWVTFISYDGNNKYYADSVKGRFTISRDNSRNTLYLQMNSLRAEDTAIYYCARTGWLGPFDYWGQGTLVTVSSGKPGSGKPGSGKPGSGKPGSEIVLTQSPGTLSLSPGERATLSCRASQSVGSSYLAWYQQKPGQAPRLLIYGAFSRATGIPDRFSGSGSGTDFTLTISRLEPEDFAVYYCQQYGSSPWTFGQGTKVEIK

SEQ ID NO: 1003 - protein, 118 aa, Artificial Sequence
  Description of Artificial Sequence: Synthetic polypeptide
  VH of XENP019839
QVQLVESGGGVVQPGRSLRLSCAASGFTFSSYTMHWVRQAPGKGLEWVTFISYDGNNKYYADSVKGRFTISRDNSRNTLYLQMNSLRAEDTAIYYCARTGWLGPFDYWGQGTLVTVSS

SEQ ID NO: 1004 - protein, 108 aa, Artificial Sequence; identical to SEQ ID NO: 23
  Description of Artificial Sequence: Synthetic polypeptide
  VL of XENP019839

SEQ ID NO: 1005 - protein, 5 aa, Artificial Sequence
  Description of Artificial Sequence: Synthetic peptide
  XENP019839 vhCDR1
SYTMH

SEQ ID NO: 1006 - protein, 17 aa, Artificial Sequence
  Description of Artificial Sequence: Synthetic peptide
  XENP019839 vhCDR2
FISYDGNNKYYADSVKG

SEQ ID NO: 1007 - protein, 9 aa, Artificial Sequence
  Description of Artificial Sequence: Synthetic peptide
  XENP019839 vhCDR3
TGWLGPFDY

SEQ ID NO: 1008 - protein, 12 aa, Artificial Sequence
  Description of Artificial Sequence: Synthetic peptide
  XENP019839 vlCDR1
RASQSVGSSYLA

SEQ ID NO: 1009 - protein, 7 aa, Artificial Sequence
  Description of Artificial Sequence: Synthetic peptide
  XENP019839 vlCDR2
GAFSRAT

SEQ ID NO: 1010 - protein, 9 aa, Artificial Sequence
  Description of Artificial Sequence: Synthetic peptide
  XENP019839 vlCDR3
QQYGSSPWT

SEQ ID NO: 1011 - protein, 246 aa, Artificial Sequence
  Description of Artificial Sequence: Synthetic polypeptide
  XENP019840 [CTLA-4]_H0.92_L0_scFv(GKPGS)4
QVQLVESGGGVVQPGRSLRLSCAASGFTFSSYTMHWVRQAPGKGLEWVTFISYDGNNKYYADSVKGRFTISRDNSKNSLYLQMNSLRAEDTAIYYCARTGWLGPFDYWGQGTLVTVSSGKPGSGKPGSGKPGSGKPGSEIVLTQSPGTLSLSPGERATLSCRASQSVGSSYLAWYQQKPGQAPRLLIYGAFSRATGIPDRFSGSGSGTDFTLTISRLEPEDFAVYYCQQYGSSPWTFGQGTKVEIK

SEQ ID NO: 1012 - protein, 118 aa, Artificial Sequence
  Description of Artificial Sequence: Synthetic polypeptide
  VH of XENP019840
QVQLVESGGGVVQPGRSLRLSCAASGFTFSSYTMHWVRQAPGKGLEWVTFISYDGNNKYYADSVKGRFTISRDNSKNSLYLQMNSLRAEDTAIYYCARTGWLGPFDYWGQGTLVTVSS

SEQ ID NO: 1013 - protein, 108 aa, Artificial Sequence; identical to SEQ ID NO: 23
  Description of Artificial Sequence: Synthetic polypeptide
  VL of XENP019840

SEQ ID NO: 1014 - protein, 5 aa, Artificial Sequence
  Description of Artificial Sequence: Synthetic peptide
  XENP019840 vhCDR1
SYTMH

SEQ ID NO: 1015 - protein, 17 aa, Artificial Sequence
  Description of Artificial Sequence: Synthetic peptide
  XENP019840 vhCDR2
FISYDGNNKYYADSVKG

SEQ ID NO: 1016 - protein, 9 aa, Artificial Sequence
  Description of Artificial Sequence: Synthetic peptide
  XENP019840 vhCDR3
TGWLGPFDY

SEQ ID NO: 1017 - protein, 12 aa, Artificial Sequence
  Description of Artificial Sequence: Synthetic peptide
  XENP019840 vlCDR1
RASQSVGSSYLA

SEQ ID NO: 1018 - protein, 7 aa, Artificial Sequence
  Description of Artificial Sequence: Synthetic peptide
  XENP019840 vlCDR2
GAFSRAT

SEQ ID NO: 1019 - protein, 9 aa, Artificial Sequence
  Description of Artificial Sequence: Synthetic peptide
  XENP019840 vlCDR3
QQYGSSPWT

SEQ ID NO: 1020 - protein, 246 aa, Artificial Sequence
  Description of Artificial Sequence: Synthetic polypeptide
  XENP019841 [CTLA-4]_H0.93_L0_scFv(GKPGS)4
QVQLVESGGGVVQPGRSLRLSCAASGFTFSSYTMHWVRQAPGKGLEWVTFISYDGNNKYYADSVKGRFTISRDNSKNQLYLQMNSLRAEDTAIYYCARTGWLGPFDYWGQGTLVTVSSGKPGSGKPGSGKPGSGKPGSEIVLTQSPGTLSLSPGERATLSCRASQSVGSSYLAWYQQKPGQAPRLLIYGAFSRATGIPDRFSGSGSGTDFTLTISRLEPEDFAVYYCQQYGSSPWTFGQGTKVEIK

SEQ ID NO: 1021 - protein, 118 aa, Artificial Sequence
  Description of Artificial Sequence: Synthetic polypeptide
  VH of XENP019841
QVQLVESGGGVVQPGRSLRLSCAASGFTFSSYTMHWVRQAPGKGLEWVTFISYDGNNKYYADSVKGRFTISRDNSKNQLYLQMNSLRAEDTAIYYCARTGWLGPFDYWGQGTLVTVSS

SEQ ID NO: 1022 - protein, 108 aa, Artificial Sequence; identical to SEQ ID NO: 23
  Description of Artificial Sequence: Synthetic polypeptide
  VL of XENP019841

SEQ ID NO: 1023 - protein, 5 aa, Artificial Sequence
  Description of Artificial Sequence: Synthetic peptide
  XENP019841 vhCDR1
SYTMH

SEQ ID NO: 1024 - protein, 17 aa, Artificial Sequence
  Description of Artificial Sequence: Synthetic peptide
  XENP019841 vhCDR2
FISYDGNNKYYADSVKG

SEQ ID NO: 1025 - protein, 9 aa, Artificial Sequence
  Description of Artificial Sequence: Synthetic peptide
  XENP019841 vhCDR3
TGWLGPFDY

SEQ ID NO: 1026 - protein, 12 aa, Artificial Sequence
  Description of Artificial Sequence: Synthetic peptide
  XENP019841 vlCDR1
RASQSVGSSYLA

SEQ ID NO: 1027 - protein, 7 aa, Artificial Sequence
  Description of Artificial Sequence: Synthetic peptide
  XENP019841 vlCDR2
GAFSRAT

SEQ ID NO: 1028 - protein, 9 aa, Artificial Sequence
  Description of Artificial Sequence: Synthetic peptide
  XENP019841 vlCDR3
QQYGSSPWT

SEQ ID NO: 1029 - protein, 246 aa, Artificial Sequence
  Description of Artificial Sequence: Synthetic polypeptide
  XENP019842 [CTLA-4]_H0.94_L0_scFv(GKPGS)4
QVQLVESGGGVVQPGRSLRLSCAASGFTFSSYTMHWVRQAPGKGLEWVTFISYDGNNKYYADSVKGRFTISRDNSKNTLYLEMNSLRAEDTAIYYCARTGWLGPFDYWGQGTLVTVSSGKPGSGKPGSGKPGSGKPGSEIVLTQSPGTLSLSPGERATLSCRASQSVGSSYLAWYQQKPGQAPRLLIYGAFSRATGIPDRFSGSGSGTDFTLTISRLEPEDFAVYYCQQYGSSPWTFGQGTKVEIK

SEQ ID NO: 1030 - protein, 118 aa, Artificial Sequence
  Description of Artificial Sequence: Synthetic polypeptide
  VH of XENP019842
QVQLVESGGGVVQPGRSLRLSCAASGFTFSSYTMHWVRQAPGKGLEWVTFISYDGNNKYYADSVKGRFTISRDNSKNTLYLEMNSLRAEDTAIYYCARTGWLGPFDYWGQGTLVTVSS

SEQ ID NO: 1031 - protein, 108 aa, Artificial Sequence; identical to SEQ ID NO: 23
  Description of Artificial Sequence: Synthetic polypeptide
  VL of XENP019842

SEQ ID NO: 1032 - protein, 5 aa, Artificial Sequence
  Description of Artificial Sequence: Synthetic peptide
  XENP019842 vhCDR1
SYTMH

SEQ ID NO: 1033 - protein, 17 aa, Artificial Sequence
  Description of Artificial Sequence: Synthetic peptide
  XENP019842 vhCDR2
FISYDGNNKYYADSVKG

SEQ ID NO: 1034 - protein, 9 aa, Artificial Sequence
  Description of Artificial Sequence: Synthetic peptide
  XENP019842 vhCDR3
TGWLGPFDY

SEQ ID NO: 1035 - protein, 12 aa, Artificial Sequence
  Description of Artificial Sequence: Synthetic peptide
  XENP019842 vlCDR1
RASQSVGSSYLA

SEQ ID NO: 1036 - protein, 7 aa, Artificial Sequence
  Description of Artificial Sequence: Synthetic peptide
  XENP019842 vlCDR2
GAFSRAT

SEQ ID NO: 1037 - protein, 9 aa, Artificial Sequence
  Description of Artificial Sequence: Synthetic peptide
  XENP019842 vlCDR3
QQYGSSPWT

SEQ ID NO: 1038 - protein, 246 aa, Artificial Sequence
  Description of Artificial Sequence: Synthetic polypeptide
  XENP019843 [CTLA-4]_H0.95_L0_scFv(GKPGS)4
QVQLVESGGGVVQPGRSLRLSCAASGFTFSSYTMHWVRQAPGKGLEWVTFISYDGNNKYYADSVKGRFTISRDNSKNTLYLQMDSLRAEDTAIYYCARTGWLGPFDYWGQGTLVTVSSGKPGSGKPGSGKPGSGKPGSEIVLTQSPGTLSLSPGERATLSCRASQSVGSSYLAWYQQKPGQAPRLLIYGAFSRATGIPDRFSGSGSGTDFTLTISRLEPEDFAVYYCQQYGSSPWTFGQGTKVEIK

SEQ ID NO: 1039 - protein, 118 aa, Artificial Sequence
  Description of Artificial Sequence: Synthetic polypeptide
  VH of XENP019843
QVQLVESGGGVVQPGRSLRLSCAASGFTFSSYTMHWVRQAPGKGLEWVTFISYDGNNKYYADSVKGRFTISRDNSKNTLYLQMDSLRAEDTAIYYCARTGWLGPFDYWGQGTLVTVSS

SEQ ID NO: 1040 - protein, 108 aa, Artificial Sequence; identical to SEQ ID NO: 23
  Description of Artificial Sequence: Synthetic polypeptide
  VL of XENP019843

SEQ ID NO: 1041 - protein, 5 aa, Artificial Sequence
  Description of Artificial Sequence: Synthetic peptide
  XENP019843 vhCDR1
SYTMH

SEQ ID NO: 1042 - protein, 17 aa, Artificial Sequence
  Description of Artificial Sequence: Synthetic peptide
  XENP019843 vhCDR2
FISYDGNNKYYADSVKG

SEQ ID NO: 1043 - protein, 9 aa, Artificial Sequence
  Description of Artificial Sequence: Synthetic peptide
  XENP019843 vhCDR3
TGWLGPFDY

SEQ ID NO: 1044 - protein, 12 aa, Artificial Sequence
  Description of Artificial Sequence: Synthetic peptide
  XENP019843 vlCDR1
RASQSVGSSYLA

SEQ ID NO: 1045 - protein, 7 aa, Artificial Sequence
  Description of Artificial Sequence: Synthetic peptide
  XENP019843 vlCDR2
GAFSRAT

SEQ ID NO: 1046 - protein, 9 aa, Artificial Sequence
  Description of Artificial Sequence: Synthetic peptide
  XENP019843 vlCDR3
QQYGSSPWT

SEQ ID NO: 1047 - protein, 246 aa, Artificial Sequence
  Description of Artificial Sequence: Synthetic polypeptide
  XENP019844 [CTLA-4]_H0.96_L0_scFv(GKPGS)4
QVQLVESGGGVVQPGRSLRLSCAASGFTFSSYTMHWVRQAPGKGLEWVTFISYDGNNKYYADSVKGRFTISRDNSKNTLYLQMNDLRAEDTAIYYCARTGWLGPFDYWGQGTLVTVSSGKPGSGKPGSGKPGSGKPGSEIVLTQSPGTLSLSPGERATLSCRASQSVGSSYLAWYQQKPGQAPRLLIYGAFSRATGIPDRFSGSGSGTDFTLTISRLEPEDFAVYYCQQYGSSPWTFGQGTKVEIK

SEQ ID NO: 1048 - protein, 118 aa, Artificial Sequence
  Description of Artificial Sequence: Synthetic polypeptide
  VH of XENP019844
QVQLVESGGGVVQPGRSLRLSCAASGFTFSSYTMHWVRQAPGKGLEWVTFISYDGNNKYYADSVKGRFTISRDNSKNTLYLQMNDLRAEDTAIYYCARTGWLGPFDYWGQGTLVTVSS

SEQ ID NO: 1049 - protein, 108 aa, Artificial Sequence; identical to SEQ ID NO: 23
  Description of Artificial Sequence: Synthetic polypeptide
  VL of XENP019844

SEQ ID NO: 1050 - protein, 5 aa, Artificial Sequence
  Description of Artificial Sequence: Synthetic peptide
  XENP019844 vhCDR1
SYTMH

SEQ ID NO: 1051 - protein, 17 aa, Artificial Sequence
  Description of Artificial Sequence: Synthetic peptide
  XENP019844 vhCDR2
FISYDGNNKYYADSVKG

SEQ ID NO: 1052 - protein, 9 aa, Artificial Sequence
  Description of Artificial Sequence: Synthetic peptide
  XENP019844 vhCDR3
TGWLGPFDY

SEQ ID NO: 1053 - protein, 12 aa, Artificial Sequence
  Description of Artificial Sequence: Synthetic peptide
  XENP019844 vlCDR1
RASQSVGSSYLA

SEQ ID NO: 1054 - protein, 7 aa, Artificial Sequence
  Description of Artificial Sequence: Synthetic peptide
  XENP019844 vlCDR2
GAFSRAT

SEQ ID NO: 1055 - protein, 9 aa, Artificial Sequence
  Description of Artificial Sequence: Synthetic peptide
  XENP019844 vlCDR3
QQYGSSPWT

SEQ ID NO: 1056 - protein, 246 aa, Artificial Sequence
  Description of Artificial Sequence: Synthetic polypeptide
  XENP019845 [CTLA-4]_H0.97_L0_scFv(GKPGS)4
QVQLVESGGGVVQPGRSLRLSCAASGFTFSSYTMHWVRQAPGKGLEWVTFISYDGNNKYYADSVKGRFTISRDNSKNTLYLQMNSLRTEDTAIYYCARTGWLGPFDYWGQGTLVTVSSGKPGSGKPGSGKPGSGKPGSEIVLTQSPGTLSLSPGERATLSCRASQSVGSSYLAWYQQKPGQAPRLLIYGAFSRATGIPDRFSGSGSGTDFTLTISRLEPEDFAVYYCQQYGSSPWTFGQGTKVEIK

SEQ ID NO: 1057 - protein, 118 aa, Artificial Sequence
  Description of Artificial Sequence: Synthetic polypeptide
  VH of XENP019845
QVQLVESGGGVVQPGRSLRLSCAASGFTFSSYTMHWVRQAPGKGLEWVTFISYDGNNKYYADSVKGRFTISRDNSKNTLYLQMNSLRTEDTAIYYCARTGWLGPFDYWGQGTLVTVSS

SEQ ID NO: 1058 - protein, 108 aa, Artificial Sequence; identical to SEQ ID NO: 23
  Description of Artificial Sequence: Synthetic polypeptide
  VL of XENP019845

SEQ ID NO: 1059 - protein, 5 aa, Artificial Sequence
  Description of Artificial Sequence: Synthetic peptide
  XENP019845 vhCDR1
SYTMH

SEQ ID NO: 1060 - protein, 17 aa, Artificial Sequence
  Description of Artificial Sequence: Synthetic peptide
  XENP019845 vhCDR2
FISYDGNNKYYADSVKG

SEQ ID NO: 1061 - protein, 9 aa, Artificial Sequence
  Description of Artificial Sequence: Synthetic peptide
  XENP019845 vhCDR3
TGWLGPFDY

SEQ ID NO: 1062 - protein, 12 aa, Artificial Sequence
  Description of Artificial Sequence: Synthetic peptide
  XENP019845 vlCDR1
RASQSVGSSYLA

SEQ ID NO: 1063 - protein, 7 aa, Artificial Sequence
  Description of Artificial Sequence: Synthetic peptide
  XENP019845 vlCDR2
GAFSRAT

SEQ ID NO: 1064 - protein, 9 aa, Artificial Sequence
  Description of Artificial Sequence: Synthetic peptide
  XENP019845 vlCDR3
QQYGSSPWT

SEQ ID NO: 1065 - protein, 246 aa, Artificial Sequence
  Description of Artificial Sequence: Synthetic polypeptide
  XENP019846 [CTLA-4]_H0.98_L0_scFv(GKPGS)4
QVQLVESGGGVVQPGRSLRLSCAASGFTFSSYTMHWVRQAPGKGLEWVTFISYDGNNKYYADSVKGRFTISRDNSKNTLYLQMNSLRAEDTALYYCARTGWLGPFDYWGQGTLVTVSSGKPGSGKPGSGKPGSGKPGSEIVLTQSPGTLSLSPGERATLSCRASQSVGSSYLAWYQQKPGQAPRLLIYGAFSRATGIPDRFSGSGSGTDFTLTISRLEPEDFAVYYCQQYGSSPWTFGQGTKVEIK

SEQ ID NO: 1066 - protein, 118 aa, Artificial Sequence
  Description of Artificial Sequence: Synthetic polypeptide
  VH of XENP019846
QVQLVESGGGVVQPGRSLRLSCAASGFTFSSYTMHWVRQAPGKGLEWVTFISYDGNNKYYADSVKGRFTISRDNSKNTLYLQMNSLRAEDTALYYCARTGWLGPFDYWGQGTLVTVSS

SEQ ID NO: 1067 - protein, 108 aa, Artificial Sequence; identical to SEQ ID NO: 23
  Description of Artificial Sequence: Synthetic polypeptide
  VL of XENP019846

SEQ ID NO: 1068 - protein, 5 aa, Artificial Sequence
  Description of Artificial Sequence: Synthetic peptide
  XENP019846 vhCDR1
SYTMH

SEQ ID NO: 1069 - protein, 17 aa, Artificial Sequence
  Description of Artificial Sequence: Synthetic peptide
  XENP019846 vhCDR2
FISYDGNNKYYADSVKG

SEQ ID NO: 1070 - protein, 9 aa, Artificial Sequence
  Description of Artificial Sequence: Synthetic peptide
  XENP019846 vhCDR3
TGWLGPFDY

SEQ ID NO: 1071 - protein, 12 aa, Artificial Sequence
  Description of Artificial Sequence: Synthetic peptide
  XENP019846 vlCDR1
RASQSVGSSYLA

SEQ ID NO: 1072 - protein, 7 aa, Artificial Sequence
  Description of Artificial Sequence: Synthetic peptide
  XENP019846 vlCDR2
GAFSRAT

SEQ ID NO: 1073 - protein, 9 aa, Artificial Sequence
  Description of Artificial Sequence: Synthetic peptide
  XENP019846 vlCDR3
QQYGSSPWT

SEQ ID NO: 1074 - protein, 246 aa, Artificial Sequence
  Description of Artificial Sequence: Synthetic polypeptide
  XENP019847 [CTLA-4]_H0.99_L0_scFv(GKPGS)4
QVQLVESGGGVVQPGRSLRLSCAASGFTFSSYTMHWVRQAPGKGLEWVTFISYDGNNKYYADSVKGRFTISRDNSKNTLYLQMNSLRAEDTAVYYCARTGWLGPFDYWGQGTLVTVSSGKPGSGKPGSGKPGSGKPGSEIVLTQSPGTLSLSPGERATLSCRASQSVGSSYLAWYQQKPGQAPRLLIYGAFSRATGIPDRFSGSGSGTDFTLTISRLEPEDFAVYYCQQYGSSPWTFGQGTKVEIK

SEQ ID NO: 1075 - protein, 118 aa, Artificial Sequence
  Description of Artificial Sequence: Synthetic polypeptide
  VH of XENP019847
QVQLVESGGGVVQPGRSLRLSCAASGFTFSSYTMHWVRQAPGKGLEWVTFISYDGNNKYYADSVKGRFTISRDNSKNTLYLQMNSLRAEDTAVYYCARTGWLGPFDYWGQGTLVTVSS

SEQ ID NO: 1076 - protein, 108 aa, Artificial Sequence; identical to SEQ ID NO: 23
  Description of Artificial Sequence: Synthetic polypeptide
  VL of XENP019847

SEQ ID NO: 1077 - protein, 5 aa, Artificial Sequence
  Description of Artificial Sequence: Synthetic peptide
  XENP019847 vhCDR1
SYTMH

SEQ ID NO: 1078 - protein, 17 aa, Artificial Sequence
  Description of Artificial Sequence: Synthetic peptide
  XENP019847 vhCDR2
FISYDGNNKYYADSVKG

SEQ ID NO: 1079 - protein, 9 aa, Artificial Sequence
  Description of Artificial Sequence: Synthetic peptide
  XENP019847 vhCDR3
TGWLGPFDY

SEQ ID NO: 1080 - protein, 12 aa, Artificial Sequence
  Description of Artificial Sequence: Synthetic peptide
  XENP019847 vlCDR1
RASQSVGSSYLA

SEQ ID NO: 1081 - protein, 7 aa, Artificial Sequence
  Description of Artificial Sequence: Synthetic peptide
  XENP019847 vlCDR2
GAFSRAT

SEQ ID NO: 1082 - protein, 9 aa, Artificial Sequence
  Description of Artificial Sequence: Synthetic peptide
  XENP019847 vlCDR3
QQYGSSPWT

SEQ ID NO: 1083 - protein, 246 aa, Artificial Sequence
  Description of Artificial Sequence: Synthetic polypeptide
  XENP019848 [CTLA-4]_H0.100_L0_scFv(GKPGS)4
QVQLVESGGGVVQPGRSLRLSCAASGFTFSSYTMHWVRQAPGKGLEWVTFISYDGNNKYYADSVKGRFTISRDNSKNTLYLQMNSLRAEDTAIYYCTRTGWLGPFDYWGQGTLVTVSSGKPGSGKPGSGKPGSGKPGSEIVLTQSPGTLSLSPGERATLSCRASQSVGSSYLAWYQQKPGQAPRLLIYGAFSRATGIPDRFSGSGSGTDFTLTISRLEPEDFAVYYCQQYGSSPWTFGQGTKVEIK

SEQ ID NO: 1084 - protein, 118 aa, Artificial Sequence
  Description of Artificial Sequence: Synthetic polypeptide
  VH of XENP019848
QVQLVESGGGVVQPGRSLRLSCAASGFTFSSYTMHWVRQAPGKGLEWVTFISYDGNNKYYADSVKGRFTISRDNSKNTLYLQMNSLRAEDTAIYYCTRTGWLGPFDYWGQGTLVTVSS

SEQ ID NO: 1085 - protein, 108 aa, Artificial Sequence; identical to SEQ ID NO: 23
  Description of Artificial Sequence: Synthetic polypeptide
  VL of XENP019848

SEQ ID NO: 1086 - protein, 5 aa, Artificial Sequence
  Description of Artificial Sequence: Synthetic peptide
  XENP019848 vhCDR1
SYTMH

SEQ ID NO: 1087 - protein, 17 aa, Artificial Sequence
  Description of Artificial Sequence: Synthetic peptide
  XENP019848 vhCDR2
FISYDGNNKYYADSVKG

SEQ ID NO: 1088 - protein, 9 aa, Artificial Sequence
  Description of Artificial Sequence: Synthetic peptide
  XENP019848 vhCDR3
TGWLGPFDY

SEQ ID NO: 1089 - protein, 12 aa, Artificial Sequence
  Description of Artificial Sequence: Synthetic peptide
  XENP019848 vlCDR1
RASQSVGSSYLA

SEQ ID NO: 1090 - protein, 7 aa, Artificial Sequence
  Description of Artificial Sequence: Synthetic peptide
  XENP019848 vlCDR2
GAFSRAT

SEQ ID NO: 1091 - protein, 9 aa, Artificial Sequence
  Description of Artificial Sequence: Synthetic peptide
  XENP019848 vlCDR3
QQYGSSPWT

SEQ ID NO: 1092 - protein, 246 aa, Artificial Sequence
  Description of Artificial Sequence: Synthetic polypeptide
  XENP019849 [CTLA-4]_H0.101_L0_scFv(GKPGS)4
QVQLVESGGGVVQPGRSLRLSCAASGFTFSSYTMHWVRQAPGKGLEWVTFISYDGNNKYYADSVKGRFTISRDNSKNTLYLQMNSLRAEDTAIYYCAKTGWLGPFDYWGQGTLVTVSSGKPGSGKPGSGKPGSGKPGSEIVLTQSPGTLSLSPGERATLSCRASQSVGSSYLAWYQQKPGQAPRLLIYGAFSRATGIPDRFSGSGSGTDFTLTISRLEPEDFAVYYCQQYGSSPWTFGQGTKVEIK

SEQ ID NO: 1093 - protein, 118 aa, Artificial Sequence
  Description of Artificial Sequence: Synthetic polypeptide
  VH of XENP019849
QVQLVESGGGVVQPGRSLRLSCAASGFTFSSYTMHWVRQAPGKGLEWVTFISYDGNNKYYADSVKGRFTISRDNSKNTLYLQMNSLRAEDTAIYYCAKTGWLGPFDYWGQGTLVTVSS

SEQ ID NO: 1094 - protein, 108 aa, Artificial Sequence; identical to SEQ ID NO: 23
  Description of Artificial Sequence: Synthetic polypeptide
  VL of XENP019849

SEQ ID NO: 1095 - protein, 5 aa, Artificial Sequence
  Description of Artificial Sequence: Synthetic peptide
  XENP019849 vhCDR1
SYTMH

SEQ ID NO: 1096 - protein, 17 aa, Artificial Sequence
  Description of Artificial Sequence: Synthetic peptide
  XENP019849 vhCDR2
FISYDGNNKYYADSVKG

SEQ ID NO: 1097 - protein, 9 aa, Artificial Sequence
  Description of Artificial Sequence: Synthetic peptide
  XENP019849 vhCDR3
TGWLGPFDY

SEQ ID NO: 1098 - protein, 12 aa, Artificial Sequence
  Description of Artificial Sequence: Synthetic peptide
  XENP019849 vlCDR1
RASQSVGSSYLA

SEQ ID NO: 1099 - protein, 7 aa, Artificial Sequence
  Description of Artificial Sequence: Synthetic peptide
  XENP019849 vlCDR2
GAFSRAT

SEQ ID NO: 1100 - protein, 9 aa, Artificial Sequence
  Description of Artificial Sequence: Synthetic peptide
  XENP019849 vlCDR3
QQYGSSPWT

SEQ ID NO: 1101 - protein, 246 aa, Artificial Sequence
  Description of Artificial Sequence: Synthetic polypeptide
  XENP019850 [CTLA-4]_H0.102_L0_scFv(GKPGS)4
QVQLVESGGGVVQPGRSLRLSCAASGFTFSSYTMHWVRQAPGKGLEWVTFISYDGNNKYYADSVKGRFTISRDNSKNTLYLQMNSLRAEDTAIYYCARAGWLGPFDYWGQGTLVTVSSGKPGSGKPGSGKPGSGKPGSEIVLTQSPGTLSLSPGERATLSCRASQSVGSSYLAWYQQKPGQAPRLLIYGAFSRATGIPDRFSGSGSGTDFTLTISRLEPEDFAVYYCQQYGSSPWTFGQGTKVEIK

SEQ ID NO: 1102 - protein, 118 aa, Artificial Sequence
  Description of Artificial Sequence: Synthetic polypeptide
  VH of XENP019850
QVQLVESGGGVVQPGRSLRLSCAASGFTFSSYTMHWVRQAPGKGLEWVTFISYDGNNKYYADSVKGRFTISRDNSKNTLYLQMNSLRAEDTAIYYCARAGWLGPFDYWGQGTLVTVSS

SEQ ID NO: 1103 - protein, 108 aa, Artificial Sequence; identical to SEQ ID NO: 23
  Description of Artificial Sequence: Synthetic polypeptide
  VL of XENP019850

SEQ ID NO: 1104 - protein, 5 aa, Artificial Sequence
  Description of Artificial Sequence: Synthetic peptide
  XENP019850 vhCDR1
SYTMH

SEQ ID NO: 1105 - protein, 17 aa, Artificial Sequence
  Description of Artificial Sequence: Synthetic peptide
  XENP019850 vhCDR2
FISYDGNNKYYADSVKG

SEQ ID NO: 1106 - protein, 9 aa, Artificial Sequence
  Description of Artificial Sequence: Synthetic peptide
  XENP019850 vhCDR3
AGWLGPFDY

SEQ ID NO: 1107 - protein, 12 aa, Artificial Sequence
  Description of Artificial Sequence: Synthetic peptide
  XENP019850 vlCDR1
RASQSVGSSYLA

SEQ ID NO: 1108 - protein, 7 aa, Artificial Sequence
  Description of Artificial Sequence: Synthetic peptide
  XENP019850 vlCDR2
GAFSRAT

SEQ ID NO: 1109 - protein, 9 aa, Artificial Sequence
  Description of Artificial Sequence: Synthetic peptide
  XENP019850 vlCDR3
QQYGSSPWT

SEQ ID NO: 1110 - protein, 246 aa, Artificial Sequence
  Description of Artificial Sequence: Synthetic polypeptide
  XENP019851 [CTLA-4]_H0.103_L0_scFv(GKPGS)4
QVQLVESGGGVVQPGRSLRLSCAASGFTFSSYTMHWVRQAPGKGLEWVTFISYDGNNKYYADSVKGRFTISRDNSKNTLYLQMNSLRAEDTAIYYCARGGWLGPFDYWGQGTLVTVSSGKPGSGKPGSGKPGSGKPGSEIVLTQSPGTLSLSPGERATLSCRASQSVGSSYLAWYQQKPGQAPRLLIYGAFSRATGIPDRFSGSGSGTDFTLTISRLEPEDFAVYYCQQYGSSPWTFGQGTKVEIK

SEQ ID NO: 1111 - protein, 118 aa, Artificial Sequence
  Description of Artificial Sequence: Synthetic polypeptide
  VH of XENP019851
QVQLVESGGGVVQPGRSLRLSCAASGFTFSSYTMHWVRQAPGKGLEWVTFISYDGNNKYYADSVKGRFTISRDNSKNTLYLQMNSLRAEDTAIYYCARGGWLGPFDYWGQGTLVTVSS

SEQ ID NO: 1112 - protein, 108 aa, Artificial Sequence; identical to SEQ ID NO: 23
  Description of Artificial Sequence: Synthetic polypeptide
  VL of XENP019851

SEQ ID NO: 1113 - protein, 5 aa, Artificial Sequence
  Description of Artificial Sequence: Synthetic peptide
  XENP019851 vhCDR1
SYTMH

SEQ ID NO: 1114 - protein, 17 aa, Artificial Sequence
  Description of Artificial Sequence: Synthetic peptide
  XENP019851 vhCDR2
FISYDGNNKYYADSVKG

SEQ ID NO: 1115 - protein, 9 aa, Artificial Sequence
  Description of Artificial Sequence: Synthetic peptide
  XENP019851 vhCDR3
GGWLGPFDY

SEQ ID NO: 1116 - protein, 12 aa, Artificial Sequence
  Description of Artificial Sequence: Synthetic peptide
  XENP019851 vlCDR1
RASQSVGSSYLA

SEQ ID NO: 1117 - protein, 7 aa, Artificial Sequence
  Description of Artificial Sequence: Synthetic peptide
  XENP019851 vlCDR2
GAFSRAT

SEQ ID NO: 1118 - protein, 9 aa, Artificial Sequence
  Description of Artificial Sequence: Synthetic peptide
  XENP019851 vlCDR3
QQYGSSPWT

SEQ ID NO: 1119 - protein, 246 aa, Artificial Sequence
  Description of Artificial Sequence: Synthetic polypeptide
  XENP019852 [CTLA-4]_H0.104_L0_scFv(GKPGS)4
QVQLVESGGGVVQPGRSLRLSCAASGFTFSSYTMHWVRQAPGKGLEWVTFISYDGNNKYYADSVKGRFTISRDNSKNTLYLQMNSLRAEDTAIYYCARDGWLGPFDYWGQGTLVTVSSGKPGSGKPGSGKPGSGKPGSEIVLTQSPGTLSLSPGERATLSCRASQSVGSSYLAWYQQKPGQAPRLLIYGAFSRATGIPDRFSGSGSGTDFTLTISRLEPEDFAVYYCQQYGSSPWTFGQGTKVEIK

SEQ ID NO: 1120 - protein, 118 aa, Artificial Sequence
  Description of Artificial Sequence: Synthetic polypeptide
  VH of XENP019852
QVQLVESGGGVVQPGRSLRLSCAASGFTFSSYTMHWVRQAPGKGLEWVTFISYDGNNKYYADSVKGRFTISRDNSKNTLYLQMNSLRAEDTAIYYCARDGWLGPFDYWGQGTLVTVSS

SEQ ID NO: 1121 - protein, 108 aa, Artificial Sequence; identical to SEQ ID NO: 23
  Description of Artificial Sequence: Synthetic polypeptide
  VL of XENP019852

SEQ ID NO: 1122 - protein, 5 aa, Artificial Sequence
  Description of Artificial Sequence: Synthetic peptide
  XENP019852 vhCDR1
SYTMH

SEQ ID NO: 1123 - protein, 17 aa, Artificial Sequence
  Description of Artificial Sequence: Synthetic peptide
  XENP019852 vhCDR2
FISYDGNNKYYADSVKG

SEQ ID NO: 1124 - protein, 9 aa, Artificial Sequence
  Description of Artificial Sequence: Synthetic peptide
  XENP019852 vhCDR3
DGWLGPFDY

SEQ ID NO: 1125 - protein, 12 aa, Artificial Sequence
  Description of Artificial Sequence: Synthetic peptide
  XENP019852 vlCDR1
RASQSVGSSYLA

SEQ ID NO: 1126 - protein, 7 aa, Artificial Sequence
  Description of Artificial Sequence: Synthetic peptide
  XENP019852 vlCDR2
GAFSRAT

SEQ ID NO: 1127 - protein, 9 aa, Artificial Sequence
  Description of Artificial Sequence: Synthetic peptide
  XENP019852 vlCDR3
QQYGSSPWT

SEQ ID NO: 1128 - protein, 246 aa, Artificial Sequence
  Description of Artificial Sequence: Synthetic polypeptide
  XENP019853 [CTLA-4]_H0.105_L0_scFv(GKPGS)4
QVQLVESGGGVVQPGRSLRLSCAASGFTFSSYTMHWVRQAPGKGLEWVTFISYDGNNKYYADSVKGRFTISRDNSKNTLYLQMNSLRAEDTAIYYCARSGWLGPFDYWGQGTLVTVSSGKPGSGKPGSGKPGSGKPGSEIVLTQSPGTLSLSPGERATLSCRASQSVGSSYLAWYQQKPGQAPRLLIYGAFSRATGIPDRFSGSGSGTDFTLTISRLEPEDFAVYYCQQYGSSPWTFGQGTKVEIK

SEQ ID NO: 1129 - protein, 118 aa, Artificial Sequence
  Description of Artificial Sequence: Synthetic polypeptide
  VH of XENP019853
QVQLVESGGGVVQPGRSLRLSCAASGFTFSSYTMHWVRQAPGKGLEWVTFISYDGNNKYYADSVKGRFTISRDNSKNTLYLQMNSLRAEDTAIYYCARSGWLGPFDYWGQGTLVTVSS

SEQ ID NO: 1130 - protein, 108 aa, Artificial Sequence; identical to SEQ ID NO: 23
  Description of Artificial Sequence: Synthetic polypeptide
  VL of XENP019853

SEQ ID NO: 1131 - protein, 5 aa, Artificial Sequence
  Description of Artificial Sequence: Synthetic peptide
  XENP019853 vhCDR1
SYTMH

SEQ ID NO: 1132 - protein, 17 aa, Artificial Sequence
  Description of Artificial Sequence: Synthetic peptide
  XENP019853 vhCDR2
FISYDGNNKYYADSVKG

SEQ ID NO: 1133 - protein, 9 aa, Artificial Sequence
  Description of Artificial Sequence: Synthetic peptide
  XENP019853 vhCDR3
SGWLGPFDY

SEQ ID NO: 1134 - protein, 12 aa, Artificial Sequence
  Description of Artificial Sequence: Synthetic peptide
  XENP019853 vlCDR1
RASQSVGSSYLA

SEQ ID NO: 1135 - protein, 7 aa, Artificial Sequence
  Description of Artificial Sequence: Synthetic peptide
  XENP019853 vlCDR2
GAFSRAT

SEQ ID NO: 1136 - protein, 9 aa, Artificial Sequence
  Description of Artificial Sequence: Synthetic peptide
  XENP019853 vlCDR3
QQYGSSPWT

SEQ ID NO: 1137 - protein, 246 aa, Artificial Sequence
  Description of Artificial Sequence: Synthetic polypeptide
  XENP019854 [CTLA-4]_H0.106_L0_scFv(GKPGS)4
QVQLVESGGGVVQPGRSLRLSCAASGFTFSSYTMHWVRQAPGKGLEWVTFISYDGNNKYYADSVKGRFTISRDNSKNTLYLQMNSLRAEDTAIYYCARVGWLGPFDYWGQGTLVTVSSGKPGSGKPGSGKPGSGKPGSEIVLTQSPGTLSLSPGERATLSCRASQSVGSSYLAWYQQKPGQAPRLLIYGAFSRATGIPDRFSGSGSGTDFTLTISRLEPEDFAVYYCQQYGSSPWTFGQGTKVEIK

SEQ ID NO: 1138 - protein, 118 aa, Artificial Sequence
  Description of Artificial Sequence: Synthetic polypeptide
  VH of XENP019854
QVQLVESGGGVVQPGRSLRLSCAASGFTFSSYTMHWVRQAPGKGLEWVTFISYDGNNKYYADSVKGRFTISRDNSKNTLYLQMNSLRAEDTAIYYCARVGWLGPFDYWGQGTLVTVSS

SEQ ID NO: 1139 - protein, 108 aa, Artificial Sequence; identical to SEQ ID NO: 23
  Description of Artificial Sequence: Synthetic polypeptide
  VL of XENP019854

SEQ ID NO: 1140 - protein, 5 aa, Artificial Sequence
  Description of Artificial Sequence: Synthetic peptide
  XENP019854 vhCDR1
SYTMH

SEQ ID NO: 1141 - protein, 17 aa, Artificial Sequence
  Description of Artificial Sequence: Synthetic peptide
  XENP019854 vhCDR2
FISYDGNNKYYADSVKG

SEQ ID NO: 1142 - protein, 9 aa, Artificial Sequence
  Description of Artificial Sequence: Synthetic peptide
  XENP019854 vhCDR3
VGWLGPFDY

SEQ ID NO: 1143 - protein, 12 aa, Artificial Sequence
  Description of Artificial Sequence: Synthetic peptide
  XENP019854 vlCDR1
RASQSVGSSYLA

SEQ ID NO: 1144 - protein, 7 aa, Artificial Sequence
  Description of Artificial Sequence: Synthetic peptide
  XENP019854 vlCDR2
GAFSRAT

SEQ ID NO: 1145 - protein, 9 aa, Artificial Sequence
  Description of Artificial Sequence: Synthetic peptide
  XENP019854 vlCDR3
QQYGSSPWT

SEQ ID NO: 1146 - protein, 246 aa, Artificial Sequence
  Description of Artificial Sequence: Synthetic polypeptide
  XENP019855 [CTLA-4]_H0.107_L0_scFv(GKPGS)4
QVQLVESGGGVVQPGRSLRLSCAASGFTFSSYTMHWVRQAPGKGLEWVTFISYDGNNKYYADSVKGRFTISRDNSKNTLYLQMNSLRAEDTAIYYCARYGWLGPFDYWGQGTLVTVSSGKPGSGKPGSGKPGSGKPGSEIVLTQSPGTLSLSPGERATLSCRASQSVGSSYLAWYQQKPGQAPRLLIYGAFSRATGIPDRFSGSGSGTDFTLTISRLEPEDFAVYYCQQYGSSPWTFGQGTKVEIK

SEQ ID NO: 1147 - protein, 118 aa, Artificial Sequence
  Description of Artificial Sequence: Synthetic polypeptide
  VH of XENP019855
QVQLVESGGGVVQPGRSLRLSCAASGFTFSSYTMHWVRQAPGKGLEWVTFISYDGNNKYYADSVKGRFTISRDNSKNTLYLQMNSLRAEDTAIYYCARYGWLGPFDYWGQGTLVTVSS

SEQ ID NO: 1148 - protein, 108 aa, Artificial Sequence; identical to SEQ ID NO: 23
  Description of Artificial Sequence: Synthetic polypeptide
  VL of XENP019855

SEQ ID NO: 1149 - protein, 5 aa, Artificial Sequence
  Description of Artificial Sequence: Synthetic peptide
  XENP019855 vhCDR1
SYTMH

SEQ ID NO: 1150 - protein, 17 aa, Artificial Sequence
  Description of Artificial Sequence: Synthetic peptide
  XENP019855 vhCDR2
FISYDGNNKYYADSVKG

SEQ ID NO: 1151 - protein, 9 aa, Artificial Sequence
  Description of Artificial Sequence: Synthetic peptide
  XENP019855 vhCDR3
YGWLGPFDY

SEQ ID NO: 1152 - protein, 12 aa, Artificial Sequence
  Description of Artificial Sequence: Synthetic peptide
  XENP019855 vlCDR1
RASQSVGSSYLA

SEQ ID NO: 1153 - protein, 7 aa, Artificial Sequence
  Description of Artificial Sequence: Synthetic peptide
  XENP019855 vlCDR2
GAFSRAT

SEQ ID NO: 1154 - protein, 9 aa, Artificial Sequence
  Description of Artificial Sequence: Synthetic peptide
  XENP019855 vlCDR3
QQYGSSPWT

SEQ ID NO: 1155 - protein, 246 aa, Artificial Sequence
  Description of Artificial Sequence: Synthetic polypeptide
  XENP019856 [CTLA-4]_H0.108_L0_scFv(GKPGS)4
QVQLVESGGGVVQPGRSLRLSCAASGFTFSSYTMHWVRQAPGKGLEWVTFISYDGNNKYYADSVKGRFTISRDNSKNTLYLQMNSLRAEDTAIYYCARTAWLGPFDYWGQGTLVTVSSGKPGSGKPGSGKPGSGKPGSEIVLTQSPGTLSLSPGERATLSCRASQSVGSSYLAWYQQKPGQAPRLLIYGAFSRATGIPDRFSGSGSGTDFTLTISRLEPEDFAVYYCQQYGSSPWTFGQGTKVEIK

SEQ ID NO: 1156 - protein, 118 aa, Artificial Sequence
  Description of Artificial Sequence: Synthetic polypeptide
  VH of XENP019856
QVQLVESGGGVVQPGRSLRLSCAASGFTFSSYTMHWVRQAPGKGLEWVTFISYDGNNKYYADSVKGRFTISRDNSKNTLYLQMNSLRAEDTAIYYCARTAWLGPFDYWGQGTLVTVSS

SEQ ID NO: 1157 - protein, 108 aa, Artificial Sequence; identical to SEQ ID NO: 23
  Description of Artificial Sequence: Synthetic polypeptide
  VL of XENP019856

SEQ ID NO: 1158 - protein, 5 aa, Artificial Sequence
  Description of Artificial Sequence: Synthetic peptide
  XENP019856 vhCDR1
SYTMH

SEQ ID NO: 1159 - protein, 17 aa, Artificial Sequence
  Description of Artificial Sequence: Synthetic peptide
  XENP019856 vhCDR2
FISYDGNNKYYADSVKG

SEQ ID NO: 1160 - protein, 9 aa, Artificial Sequence
  Description of Artificial Sequence: Synthetic peptide
  XENP019856 vhCDR3
TAWLGPFDY

SEQ ID NO: 1161 - protein, 12 aa, Artificial Sequence
  Description of Artificial Sequence: Synthetic peptide
  XENP019856 vlCDR1
RASQSVGSSYLA

SEQ ID NO: 1162 - protein, 7 aa, Artificial Sequence
  Description of Artificial Sequence: Synthetic peptide
  XENP019856 vlCDR2
GAFSRAT

SEQ ID NO: 1163 - protein, 9 aa, Artificial Sequence
  Description of Artificial Sequence: Synthetic peptide
  XENP019856 vlCDR3
QQYGSSPWT

SEQ ID NO: 1164 - protein, 246 aa, Artificial Sequence
  Description of Artificial Sequence: Synthetic polypeptide
  XENP019857 [CTLA-4]_H0.109_L0_scFv(GKPGS)4
QVQLVESGGGVVQPGRSLRLSCAASGFTFSSYTMHWVRQAPGKGLEWVTFISYDGNNKYYADSVKGRFTISRDNSKNTLYLQMNSLRAEDTAIYYCARTSWLGPFDYWGQGTLVTVSSGKPGSGKPGSGKPGSGKPGSEIVLTQSPGTLSLSPGERATLSCRASQSVGSSYLAWYQQKPGQAPRLLIYGAFSRATGIPDRFSGSGSGTDFTLTISRLEPEDFAVYYCQQYGSSPWTFGQGTKVEIK

SEQ ID NO: 1165 - protein, 118 aa, Artificial Sequence
  Description of Artificial Sequence: Synthetic polypeptide
  VH of XENP019857
QVQLVESGGGVVQPGRSLRLSCAASGFTFSSYTMHWVRQAPGKGLEWVTFISYDGNNKYYADSVKGRFTISRDNSKNTLYLQMNSLRAEDTAIYYCARTSWLGPFDYWGQGTLVTVSS

SEQ ID NO: 1166 - protein, 108 aa, Artificial Sequence; identical to SEQ ID NO: 23
  Description of Artificial Sequence: Synthetic polypeptide
  VL of XENP019857

SEQ ID NO: 1167 - protein, 5 aa, Artificial Sequence
  Description of Artificial Sequence: Synthetic peptide
  XENP019857 vhCDR1
SYTMH

SEQ ID NO: 1168 - protein, 17 aa, Artificial Sequence
  Description of Artificial Sequence: Synthetic peptide
  XENP019857 vhCDR2
FISYDGNNKYYADSVKG

SEQ ID NO: 1169 - protein, 9 aa, Artificial Sequence
  Description of Artificial Sequence: Synthetic peptide
  XENP019857 vhCDR3
TSWLGPFDY

SEQ ID NO: 1170 - protein, 12 aa, Artificial Sequence
  Description of Artificial Sequence: Synthetic peptide
  XENP019857 vlCDR1
RASQSVGSSYLA

SEQ ID NO: 1171 - protein, 7 aa, Artificial Sequence
  Description of Artificial Sequence: Synthetic peptide
  XENP019857 vlCDR2
GAFSRAT

SEQ ID NO: 1172 - protein, 9 aa, Artificial Sequence
  Description of Artificial Sequence: Synthetic peptide
  XENP019857 vlCDR3
QQYGSSPWT

SEQ ID NO: 1173 - protein, 246 aa, Artificial Sequence
  Description of Artificial Sequence: Synthetic polypeptide
  XENP019858 [CTLA-4]_H0.110_L0_scFv(GKPGS)4
QVQLVESGGGVVQPGRSLRLSCAASGFTFSSYTMHWVRQAPGKGLEWVTFISYDGNNKYYADSVKGRFTISRDNSKNTLYLQMNSLRAEDTAIYYCARTTWLGPFDYWGQGTLVTVSSGKPGSGKPGSGKPGSGKPGSEIVLTQSPGTLSLSPGERATLSCRASQSVGSSYLAWYQQKPGQAPRLLIYGAFSRATGIPDRFSGSGSGTDFTLTISRLEPEDFAVYYCQQYGSSPWTFGQGTKVEIK

SEQ ID NO: 1174 - protein, 118 aa, Artificial Sequence
  Description of Artificial Sequence: Synthetic polypeptide
  VH of XENP019858
QVQLVESGGGVVQPGRSLRLSCAASGFTFSSYTMHWVRQAPGKGLEWVTFISYDGNNKYYADSVKGRFTISRDNSKNTLYLQMNSLRAEDTAIYYCARTTWLGPFDYWGQGTLVTVSS

SEQ ID NO: 1175 - protein, 108 aa, Artificial Sequence; identical to SEQ ID NO: 23
  Description of Artificial Sequence: Synthetic polypeptide
  VL of XENP019858

SEQ ID NO: 1176 - protein, 5 aa, Artificial Sequence
  Description of Artificial Sequence: Synthetic peptide
  XENP019858 vhCDR1
SYTMH

SEQ ID NO: 1177 - protein, 17 aa, Artificial Sequence
  Description of Artificial Sequence: Synthetic peptide
  XENP019858 vhCDR2
FISYDGNNKYYADSVKG

SEQ ID NO: 1178 - protein, 9 aa, Artificial Sequence
  Description of Artificial Sequence: Synthetic peptide
  XENP019858 vhCDR3
TTWLGPFDY

SEQ ID NO: 1179 - protein, 12 aa, Artificial Sequence
  Description of Artificial Sequence: Synthetic peptide
  XENP019858 vlCDR1
RASQSVGSSYLA

SEQ ID NO: 1180 - protein, 7 aa, Artificial Sequence
  Description of Artificial Sequence: Synthetic peptide
  XENP019858 vlCDR2
GAFSRAT

SEQ ID NO: 1181 - protein, 9 aa, Artificial Sequence
  Description of Artificial Sequence: Synthetic peptide
  XENP019858 vlCDR3
QQYGSSPWT

SEQ ID NO: 1182 - protein, 246 aa, Artificial Sequence
  Description of Artificial Sequence: Synthetic polypeptide
  XENP019859 [CTLA-4]_H0.111_L0_scFv(GKPGS)4
QVQLVESGGGVVQPGRSLRLSCAASGFTFSSYTMHWVRQAPGKGLEWVTFISYDGNNKYYADSVKGRFTISRDNSKNTLYLQMNSLRAEDTAIYYCARTGFLGPFDYWGQGTLVTVSSGKPGSGKPGSGKPGSGKPGSEIVLTQSPGTLSLSPGERATLSCRASQSVGSSYLAWYQQKPGQAPRLLIYGAFSRATGIPDRFSGSGSGTDFTLTISRLEPEDFAVYYCQQYGSSPWTFGQGTKVEIK

SEQ ID NO: 1183 - protein, 118 aa, Artificial Sequence
  Description of Artificial Sequence: Synthetic polypeptide
  VH of XENP019859
QVQLVESGGGVVQPGRSLRLSCAASGFTFSSYTMHWVRQAPGKGLEWVTFISYDGNNKYYADSVKGRFTISRDNSKNTLYLQMNSLRAEDTAIYYCARTGFLGPFDYWGQGTLVTVSS

SEQ ID NO: 1184 - protein, 108 aa, Artificial Sequence; identical to SEQ ID NO: 23
  Description of Artificial Sequence: Synthetic polypeptide
  VL of XENP019859

SEQ ID NO: 1185 - protein, 5 aa, Artificial Sequence
  Description of Artificial Sequence: Synthetic peptide
  XENP019859 vhCDR1
SYTMH

SEQ ID NO: 1186 - protein, 17 aa, Artificial Sequence
  Description of Artificial Sequence: Synthetic peptide
  XENP019859 vhCDR2
FISYDGNNKYYADSVKG

SEQ ID NO: 1187 - protein, 9 aa, Artificial Sequence
  Description of Artificial Sequence: Synthetic peptide
  XENP019859 vhCDR3
TGFLGPFDY

SEQ ID NO: 1188 - protein, 12 aa, Artificial Sequence
  Description of Artificial Sequence: Synthetic peptide
  XENP019859 vlCDR1
RASQSVGSSYLA

SEQ ID NO: 1189 - protein, 7 aa, Artificial Sequence
  Description of Artificial Sequence: Synthetic peptide
  XENP019859 vlCDR2
GAFSRAT

SEQ ID NO: 1190 - protein, 9 aa, Artificial Sequence
  Description of Artificial Sequence: Synthetic peptide
  XENP019859 vlCDR3
QQYGSSPWT

SEQ ID NO: 1191 - protein, 246 aa, Artificial Sequence
  Description of Artificial Sequence: Synthetic polypeptide
  XENP019860 [CTLA-4]_H0.112_L0_scFv(GKPGS)4
QVQLVESGGGVVQPGRSLRLSCAASGFTFSSYTMHWVRQAPGKGLEWVTFISYDGNNKYYADSVKGRFTISRDNSKNTLYLQMNSLRAEDTAIYYCARTGGLGPFDYWGQGTLVTVSSGKPGSGKPGSGKPGSGKPGSEIVLTQSPGTLSLSPGERATLSCRASQSVGSSYLAWYQQKPGQAPRLLIYGAFSRATGIPDRFSGSGSGTDFTLTISRLEPEDFAVYYCQQYGSSPWTFGQGTKVEIK

SEQ ID NO: 1192 - protein, 118 aa, Artificial Sequence
  Description of Artificial Sequence: Synthetic polypeptide
  VH of XENP019860
QVQLVESGGGVVQPGRSLRLSCAASGFTFSSYTMHWVRQAPGKGLEWVTFISYDGNNKYYADSVKGRFTISRDNSKNTLYLQMNSLRAEDTAIYYCARTGGLGPFDYWGQGTLVTVSS

SEQ ID NO: 1193 - protein, 108 aa, Artificial Sequence; identical to SEQ ID NO: 23
  Description of Artificial Sequence: Synthetic polypeptide
  VL of XENP019860

SEQ ID NO: 1194 - protein, 5 aa, Artificial Sequence
  Description of Artificial Sequence: Synthetic peptide
  XENP019860 vhCDR1
SYTMH

SEQ ID NO: 1195 - protein, 17 aa, Artificial Sequence
  Description of Artificial Sequence: Synthetic peptide
  XENP019860 vhCDR2
FISYDGNNKYYADSVKG

SEQ ID NO: 1196 - protein, 9 aa, Artificial Sequence
  Description of Artificial Sequence: Synthetic peptide
  XENP019860 vhCDR3
TGGLGPFDY

SEQ ID NO: 1197 - protein, 12 aa, Artificial Sequence
  Description of Artificial Sequence: Synthetic peptide
  XENP019860 vlCDR1
RASQSVGSSYLA

SEQ ID NO: 1198 - protein, 7 aa, Artificial Sequence
  Description of Artificial Sequence: Synthetic peptide
  XENP019860 vlCDR2
GAFSRAT

SEQ ID NO: 1199 - protein, 9 aa, Artificial Sequence
  Description of Artificial Sequence: Synthetic peptide
  XENP019860 vlCDR3
QQYGSSPWT

SEQ ID NO: 1200 - protein, 246 aa, Artificial Sequence
  Description of Artificial Sequence: Synthetic polypeptide
  XENP019861 [CTLA-4]_H0.113_L0_scFv(GKPGS)4
QVQLVESGGGVVQPGRSLRLSCAASGFTFSSYTMHWVRQAPGKGLEWVTFISYDGNNKYYADSVKGRFTISRDNSKNTLYLQMNSLRAEDTAIYYCARTGHLGPFDYWGQGTLVTVSSGKPGSGKPGSGKPGSGKPGSEIVLTQSPGTLSLSPGERATLSCRASQSVGSSYLAWYQQKPGQAPRLLIYGAFSRATGIPDRFSGSGSGTDFTLTISRLEPEDFAVYYCQQYGSSPWTFGQGTKVEIK

SEQ ID NO: 1201 - protein, 118 aa, Artificial Sequence
  Description of Artificial Sequence: Synthetic polypeptide
  VH of XENP019861
QVQLVESGGGVVQPGRSLRLSCAASGFTFSSYTMHWVRQAPGKGLEWVTFISYDGNNKYYADSVKGRFTISRDNSKNTLYLQMNSLRAEDTAIYYCARTGHLGPFDYWGQGTLVTVSS

SEQ ID NO: 1202 - protein, 108 aa, Artificial Sequence; identical to SEQ ID NO: 23
  Description of Artificial Sequence: Synthetic polypeptide
  VL of XENP019861

SEQ ID NO: 1203 - protein, 5 aa, Artificial Sequence
  Description of Artificial Sequence: Synthetic peptide
  XENP019861 vhCDR1
SYTMH

SEQ ID NO: 1204 - protein, 17 aa, Artificial Sequence
  Description of Artificial Sequence: Synthetic peptide
  XENP019861 vhCDR2
FISYDGNNKYYADSVKG

SEQ ID NO: 1205 - protein, 9 aa, Artificial Sequence
  Description of Artificial Sequence: Synthetic peptide
  XENP019861 vhCDR3
TGHLGPFDY

SEQ ID NO: 1206 - protein, 12 aa, Artificial Sequence
  Description of Artificial Sequence: Synthetic peptide
  XENP019861 vlCDR1
RASQSVGSSYLA

SEQ ID NO: 1207 - protein, 7 aa, Artificial Sequence
  Description of Artificial Sequence: Synthetic peptide
  XENP019861 vlCDR2
GAFSRAT

SEQ ID NO: 1208 - protein, 9 aa, Artificial Sequence
  Description of Artificial Sequence: Synthetic peptide
  XENP019861 vlCDR3
QQYGSSPWT

SEQ ID NO: 1209 - protein, 246 aa, Artificial Sequence
  Description of Artificial Sequence: Synthetic polypeptide
  XENP019862 [CTLA-4]_H0.114_L0_scFv(GKPGS)4
QVQLVESGGGVVQPGRSLRLSCAASGFTFSSYTMHWVRQAPGKGLEWVTFISYDGNNKYYADSVKGRFTISRDNSKNTLYLQMNSLRAEDTAIYYCARTGLLGPFDYWGQGTLVTVSSGKPGSGKPGSGKPGSGKPGSEIVLTQSPGTLSLSPGERATLSCRASQSVGSSYLAWYQQKPGQAPRLLIYGAFSRATGIPDRFSGSGSGTDFTLTISRLEPEDFAVYYCQQYGSSPWTFGQGTKVEIK

SEQ ID NO: 1210 - protein, 118 aa, Artificial Sequence
  Description of Artificial Sequence: Synthetic polypeptide
  VH of XENP019862
QVQLVESGGGVVQPGRSLRLSCAASGFTFSSYTMHWVRQAPGKGLEWVTFISYDGNNKYYADSVKGRFTISRDNSKNTLYLQMNSLRAEDTAIYYCARTGLLGPFDYWGQGTLVTVSS

SEQ ID NO: 1211 - protein, 108 aa, Artificial Sequence; identical to SEQ ID NO: 23
  Description of Artificial Sequence: Synthetic polypeptide
  VL of XENP019862

SEQ ID NO: 1212 - protein, 5 aa, Artificial Sequence
  Description of Artificial Sequence: Synthetic peptide
  XENP019862 vhCDR1
SYTMH

SEQ ID NO: 1213 - protein, 17 aa, Artificial Sequence
  Description of Artificial Sequence: Synthetic peptide
  XENP019862 vhCDR2
FISYDGNNKYYADSVKG

SEQ ID NO: 1214 - protein, 9 aa, Artificial Sequence
  Description of Artificial Sequence: Synthetic peptide
  XENP019862 vhCDR3
TGLLGPFDY

SEQ ID NO: 1215 - protein, 12 aa, Artificial Sequence
  Description of Artificial Sequence: Synthetic peptide
  XENP019862 vlCDR1
RASQSVGSSYLA

SEQ ID NO: 1216 - protein, 7 aa, Artificial Sequence
  Description of Artificial Sequence: Synthetic peptide
  XENP019862 vlCDR2
GAFSRAT

SEQ ID NO: 1217 - protein, 9 aa, Artificial Sequence
  Description of Artificial Sequence: Synthetic peptide
  XENP019862 vlCDR3
QQYGSSPWT

SEQ ID NO: 1218 - protein, 246 aa, Artificial Sequence
  Description of Artificial Sequence: Synthetic polypeptide
  XENP019863 [CTLA-4]_H0.115_L0_scFv(GKPGS)4
QVQLVESGGGVVQPGRSLRLSCAASGFTFSSYTMHWVRQAPGKGLEWVTFISYDGNNKYYADSVKGRFTISRDNSKNTLYLQMNSLRAEDTAIYYCARTGYLGPFDYWGQGTLVTVSSGKPGSGKPGSGKPGSGKPGSEIVLTQSPGTLSLSPGERATLSCRASQSVGSSYLAWYQQKPGQAPRLLIYGAFSRATGIPDRFSGSGSGTDFTLTISRLEPEDFAVYYCQQYGSSPWTFGQGTKVEIK

SEQ ID NO: 1219 - protein, 118 aa, Artificial Sequence
  Description of Artificial Sequence: Synthetic polypeptide
  VH of XENP019863
QVQLVESGGGVVQPGRSLRLSCAASGFTFSSYTMHWVRQAPGKGLEWVTFISYDGNNKYYADSVKGRFTISRDNSKNTLYLQMNSLRAEDTAIYYCARTGYLGPFDYWGQGTLVTVSS

SEQ ID NO: 1220 - protein, 108 aa, Artificial Sequence; identical to SEQ ID NO: 23
  Description of Artificial Sequence: Synthetic polypeptide
  VL of XENP019863

SEQ ID NO: 1221 - protein, 5 aa, Artificial Sequence
  Description of Artificial Sequence: Synthetic peptide
  XENP019863 vhCDR1
SYTMH

SEQ ID NO: 1222 - protein, 17 aa, Artificial Sequence
  Description of Artificial Sequence: Synthetic peptide
  XENP019863 vhCDR2
FISYDGNNKYYADSVKG

SEQ ID NO: 1223 - protein, 9 aa, Artificial Sequence
  Description of Artificial Sequence: Synthetic peptide
  XENP019863 vhCDR3
TGYLGPFDY

SEQ ID NO: 1224 - protein, 12 aa, Artificial Sequence
  Description of Artificial Sequence: Synthetic peptide
  XENP019863 vlCDR1
RASQSVGSSYLA

SEQ ID NO: 1225 - protein, 7 aa, Artificial Sequence
  Description of Artificial Sequence: Synthetic peptide
  XENP019863 vlCDR2
GAFSRAT

SEQ ID NO: 1226 - protein, 9 aa, Artificial Sequence
  Description of Artificial Sequence: Synthetic peptide
  XENP019863 vlCDR3
QQYGSSPWT

SEQ ID NO: 1227 - protein, 246 aa, Artificial Sequence
  Description of Artificial Sequence: Synthetic polypeptide
  XENP019864 [CTLA-4]_H0.116_L0_scFv(GKPGS)4
QVQLVESGGGVVQPGRSLRLSCAASGFTFSSYTMHWVRQAPGKGLEWVTFISYDGNNKYYADSVKGRFTISRDNSKNTLYLQMNSLRAEDTAIYYCARTGWDGPFDYWGQGTLVTVSSGKPGSGKPGSGKPGSGKPGSEIVLTQSPGTLSLSPGERATLSCRASQSVGSSYLAWYQQKPGQAPRLLIYGAFSRATGIPDRFSGSGSGTDFTLTISRLEPEDFAVYYCQQYGSSPWTFGQGTKVEIK

SEQ ID NO: 1228 - protein, 118 aa, Artificial Sequence
  Description of Artificial Sequence: Synthetic polypeptide
  VH of XENP019864
QVQLVESGGGVVQPGRSLRLSCAASGFTFSSYTMHWVRQAPGKGLEWVTFISYDGNNKYYADSVKGRFTISRDNSKNTLYLQMNSLRAEDTAIYYCARTGWDGPFDYWGQGTLVTVSS

SEQ ID NO: 1229 - protein, 108 aa, Artificial Sequence; identical to SEQ ID NO: 23
  Description of Artificial Sequence: Synthetic polypeptide
  VL of XENP019864

SEQ ID NO: 1230 - protein, 5 aa, Artificial Sequence
  Description of Artificial Sequence: Synthetic peptide
  XENP019864 vhCDR1
SYTMH

SEQ ID NO: 1231 - protein, 17 aa, Artificial Sequence
  Description of Artificial Sequence: Synthetic peptide
  XENP019864 vhCDR2
FISYDGNNKYYADSVKG

SEQ ID NO: 1232 - protein, 9 aa, Artificial Sequence
  Description of Artificial Sequence: Synthetic peptide
  XENP019864 vhCDR3
TGWDGPFDY

SEQ ID NO: 1233 - protein, 12 aa, Artificial Sequence
  Description of Artificial Sequence: Synthetic peptide
  XENP019864 vlCDR1
RASQSVGSSYLA

SEQ ID NO: 1234 - protein, 7 aa, Artificial Sequence
  Description of Artificial Sequence: Synthetic peptide
  XENP019864 vlCDR2
GAFSRAT

SEQ ID NO: 1235 - protein, 9 aa, Artificial Sequence
  Description of Artificial Sequence: Synthetic peptide
  XENP019864 vlCDR3
QQYGSSPWT

SEQ ID NO: 1236 - protein, 246 aa, Artificial Sequence
  Description of Artificial Sequence: Synthetic polypeptide
  XENP019865 [CTLA-4]_H0.117_L0_scFv(GKPGS)4
QVQLVESGGGVVQPGRSLRLSCAASGFTFSSYTMHWVRQAPGKGLEWVTFISYDGNNKYYADSVKGRFTISRDNSKNTLYLQMNSLRAEDTAIYYCARTGWIGPFDYWGQGTLVTVSSGKPGSGKPGSGKPGSGKPGSEIVLTQSPGTLSLSPGERATLSCRASQSVGSSYLAWYQQKPGQAPRLLIYGAFSRATGIPDRFSGSGSGTDFTLTISRLEPEDFAVYYCQQYGSSPWTFGQGTKVEIK

SEQ ID NO: 1237 - protein, 118 aa, Artificial Sequence
  Description of Artificial Sequence: Synthetic polypeptide
  VH of XENP019865
QVQLVESGGGVVQPGRSLRLSCAASGFTFSSYTMHWVRQAPGKGLEWVTFISYDGNNKYYADSVKGRFTISRDNSKNTLYLQMNSLRAEDTAIYYCARTGWIGPFDYWGQGTLVTVSS

SEQ ID NO: 1238 - protein, 108 aa, Artificial Sequence; identical to SEQ ID NO: 23
  Description of Artificial Sequence: Synthetic polypeptide
  VL of XENP019865

SEQ ID NO: 1239 - protein, 5 aa, Artificial Sequence
  Description of Artificial Sequence: Synthetic peptide
  XENP019865 vhCDR1
SYTMH

SEQ ID NO: 1240 - protein, 17 aa, Artificial Sequence
  Description of Artificial Sequence: Synthetic peptide
  XENP019865 vhCDR2
FISYDGNNKYYADSVKG

SEQ ID NO: 1241 - protein, 9 aa, Artificial Sequence
  Description of Artificial Sequence: Synthetic peptide
  XENP019865 vhCDR3
TGWIGPFDY

SEQ ID NO: 1242 - protein, 12 aa, Artificial Sequence
  Description of Artificial Sequence: Synthetic peptide
  XENP019865 vlCDR1
RASQSVGSSYLA

SEQ ID NO: 1243 - protein, 7 aa, Artificial Sequence
  Description of Artificial Sequence: Synthetic peptide
  XENP019865 vlCDR2
GAFSRAT

SEQ ID NO: 1244 - protein, 9 aa, Artificial Sequence
  Description of Artificial Sequence: Synthetic peptide
  XENP019865 vlCDR3
QQYGSSPWT

SEQ ID NO: 1245 - protein, 246 aa, Artificial Sequence
  Description of Artificial Sequence: Synthetic polypeptide
  XENP019866 [CTLA-4]_H0.118_L0_scFv(GKPGS)4
QVQLVESGGGVVQPGRSLRLSCAASGFTFSSYTMHWVRQAPGKGLEWVTFISYDGNNKYYADSVKGRFTISRDNSKNTLYLQMNSLRAEDTAIYYCARTGWVGPFDYWGQGTLVTVSSGKPGSGKPGSGKPGSGKPGSEIVLTQSPGTLSLSPGERATLSCRASQSVGSSYLAWYQQKPGQAPRLLIYGAFSRATGIPDRFSGSGSGTDFTLTISRLEPEDFAVYYCQQYGSSPWTFGQGTKVEIK

SEQ ID NO: 1246 - protein, 118 aa, Artificial Sequence
  Description of Artificial Sequence: Synthetic polypeptide
  VH of XENP019866
QVQLVESGGGVVQPGRSLRLSCAASGFTFSSYTMHWVRQAPGKGLEWVTFISYDGNNKYYADSVKGRFTISRDNSKNTLYLQMNSLRAEDTAIYYCARTGWVGPFDYWGQGTLVTVSS

SEQ ID NO: 1247 - protein, 108 aa, Artificial Sequence; identical to SEQ ID NO: 23
  Description of Artificial Sequence: Synthetic polypeptide
  VL of XENP019866

SEQ ID NO: 1248 - protein, 5 aa, Artificial Sequence
  Description of Artificial Sequence: Synthetic peptide
  XENP019866 vhCDR1
SYTMH

SEQ ID NO: 1249 - protein, 17 aa, Artificial Sequence
  Description of Artificial Sequence: Synthetic peptide
  XENP019866 vhCDR2
FISYDGNNKYYADSVKG

SEQ ID NO: 1250 - protein, 9 aa, Artificial Sequence
  Description of Artificial Sequence: Synthetic peptide
  XENP019866 vhCDR3
TGWVGPFDY

SEQ ID NO: 1251 - protein, 12 aa, Artificial Sequence
  Description of Artificial Sequence: Synthetic peptide
  XENP019866 vlCDR1
RASQSVGSSYLA

SEQ ID NO: 1252 - protein, 7 aa, Artificial Sequence
  Description of Artificial Sequence: Synthetic peptide
  XENP019866 vlCDR2
GAFSRAT

SEQ ID NO: 1253 - protein, 9 aa, Artificial Sequence
  Description of Artificial Sequence: Synthetic peptide
  XENP019866 vlCDR3
QQYGSSPWT

SEQ ID NO: 1254 - protein, 246 aa, Artificial Sequence
  Description of Artificial Sequence: Synthetic polypeptide
  XENP019867 [CTLA-4]_H0.119_L0_scFv(GKPGS)4
QVQLVESGGGVVQPGRSLRLSCAASGFTFSSYTMHWVRQAPGKGLEWVTFISYDGNNKYYADSVKGRFTISRDNSKNTLYLQMNSLRAEDTAIYYCARTGWLAPFDYWGQGTLVTVSSGKPGSGKPGSGKPGSGKPGSEIVLTQSPGTLSLSPGERATLSCRASQSVGSSYLAWYQQKPGQAPRLLIYGAFSRATGIPDRFSGSGSGTDFTLTISRLEPEDFAVYYCQQYGSSPWTFGQGTKVEIK

SEQ ID NO: 1255 - protein, 118 aa, Artificial Sequence
  Description of Artificial Sequence: Synthetic polypeptide
  VH of XENP019867
QVQLVESGGGVVQPGRSLRLSCAASGFTFSSYTMHWVRQAPGKGLEWVTFISYDGNNKYYADSVKGRFTISRDNSKNTLYLQMNSLRAEDTAIYYCARTGWLAPFDYWGQGTLVTVSS

SEQ ID NO: 1256 - protein, 108 aa, Artificial Sequence; identical to SEQ ID NO: 23
  Description of Artificial Sequence: Synthetic polypeptide
  VL of XENP019867

SEQ ID NO: 1257 - protein, 5 aa, Artificial Sequence
  Description of Artificial Sequence: Synthetic peptide
  XENP019867 vhCDR1
SYTMH

SEQ ID NO: 1258 - protein, 17 aa, Artificial Sequence
  Description of Artificial Sequence: Synthetic peptide
  XENP019867 vhCDR2
FISYDGNNKYYADSVKG

SEQ ID NO: 1259 - protein, 9 aa, Artificial Sequence
  Description of Artificial Sequence: Synthetic peptide
  XENP019867 vhCDR3
TGWLAPFDY

SEQ ID NO: 1260 - protein, 12 aa, Artificial Sequence
  Description of Artificial Sequence: Synthetic peptide
  XENP019867 vlCDR1
RASQSVGSSYLA

SEQ ID NO: 1261 - protein, 7 aa, Artificial Sequence
  Description of Artificial Sequence: Synthetic peptide
  XENP019867 vlCDR2
GAFSRAT

SEQ ID NO: 1262 - protein, 9 aa, Artificial Sequence
  Description of Artificial Sequence: Synthetic peptide
  XENP019867 vlCDR3
QQYGSSPWT

SEQ ID NO: 1263 - protein, 246 aa, Artificial Sequence
  Description of Artificial Sequence: Synthetic polypeptide
  XENP019868 [CTLA-4]_H0.120_L0_scFv(GKPGS)4
QVQLVESGGGVVQPGRSLRLSCAASGFTFSSYTMHWVRQAPGKGLEWVTFISYDGNNKYYADSVKGRFTISRDNSKNTLYLQMNSLRAEDTAIYYCARTGWLSPFDYWGQGTLVTVSSGKPGSGKPGSGKPGSGKPGSEIVLTQSPGTLSLSPGERATLSCRASQSVGSSYLAWYQQKPGQAPRLLIYGAFSRATGIPDRFSGSGSGTDFTLTISRLEPEDFAVYYCQQYGSSPWTFGQGTKVEIK

SEQ ID NO: 1264 - protein, 118 aa, Artificial Sequence
  Description of Artificial Sequence: Synthetic polypeptide
  VH of XENP019868
QVQLVESGGGVVQPGRSLRLSCAASGFTFSSYTMHWVRQAPGKGLEWVTFISYDGNNKYYADSVKGRFTISRDNSKNTLYLQMNSLRAEDTAIYYCARTGWLSPFDYWGQGTLVTVSS

SEQ ID NO: 1265 - protein, 108 aa, Artificial Sequence; identical to SEQ ID NO: 23
  Description of Artificial Sequence: Synthetic polypeptide
  VL of XENP019868

SEQ ID NO: 1266 - protein, 5 aa, Artificial Sequence
  Description of Artificial Sequence: Synthetic peptide
  XENP019868 vhCDR1
SYTMH

SEQ ID NO: 1267 - protein, 17 aa, Artificial Sequence
  Description of Artificial Sequence: Synthetic peptide
  XENP019868 vhCDR2
FISYDGNNKYYADSVKG

SEQ ID NO: 1268 - protein, 9 aa, Artificial Sequence
  Description of Artificial Sequence: Synthetic peptide
  XENP019868 vhCDR3
TGWLSPFDY

SEQ ID NO: 1269 - protein, 12 aa, Artificial Sequence
  Description of Artificial Sequence: Synthetic peptide
  XENP019868 vlCDR1
RASQSVGSSYLA

SEQ ID NO: 1270 - protein, 7 aa, Artificial Sequence
  Description of Artificial Sequence: Synthetic peptide
  XENP019868 vlCDR2
GAFSRAT

SEQ ID NO: 1271 - protein, 9 aa, Artificial Sequence
  Description of Artificial Sequence: Synthetic peptide
  XENP019868 vlCDR3
QQYGSSPWT

SEQ ID NO: 1272 - protein, 246 aa, Artificial Sequence
  Description of Artificial Sequence: Synthetic polypeptide
  XENP019869 [CTLA-4]_H0.121_L0_scFv(GKPGS)4
QVQLVESGGGVVQPGRSLRLSCAASGFTFSSYTMHWVRQAPGKGLEWVTFISYDGNNKYYADSVKGRFTISRDNSKNTLYLQMNSLRAEDTAIYYCARTGWLTPFDYWGQGTLVTVSSGKPGSGKPGSGKPGSGKPGSEIVLTQSPGTLSLSPGERATLSCRASQSVGSSYLAWYQQKPGQAPRLLIYGAFSRATGIPDRFSGSGSGTDFTLTISRLEPEDFAVYYCQQYGSSPWTFGQGTKVEIK

SEQ ID NO: 1273 - protein, 118 aa, Artificial Sequence
  Description of Artificial Sequence: Synthetic polypeptide
  VH of XENP019869
QVQLVESGGGVVQPGRSLRLSCAASGFTFSSYTMHWVRQAPGKGLEWVTFISYDGNNKYYADSVKGRFTISRDNSKNTLYLQMNSLRAEDTAIYYCARTGWLTPFDYWGQGTLVTVSS

SEQ ID NO: 1274 - protein, 108 aa, Artificial Sequence; identical to SEQ ID NO: 23
  Description of Artificial Sequence: Synthetic polypeptide
  VL of XENP019869

SEQ ID NO: 1275 - protein, 5 aa, Artificial Sequence
  Description of Artificial Sequence: Synthetic peptide
  XENP019869 vhCDR1
SYTMH

SEQ ID NO: 1276 - protein, 17 aa, Artificial Sequence
  Description of Artificial Sequence: Synthetic peptide
  XENP019869 vhCDR2
FISYDGNNKYYADSVKG

SEQ ID NO: 1277 - protein, 9 aa, Artificial Sequence
  Description of Artificial Sequence: Synthetic peptide
  XENP019869 vhCDR3
TGWLTPFDY

SEQ ID NO: 1278 - protein, 12 aa, Artificial Sequence
  Description of Artificial Sequence: Synthetic peptide
  XENP019869 vlCDR1
RASQSVGSSYLA

SEQ ID NO: 1279 - protein, 7 aa, Artificial Sequence
  Description of Artificial Sequence: Synthetic peptide
  XENP019869 vlCDR2
GAFSRAT

SEQ ID NO: 1280 - protein, 9 aa, Artificial Sequence
  Description of Artificial Sequence: Synthetic peptide
  XENP019869 vlCDR3
QQYGSSPWT

SEQ ID NO: 1281 - protein, 246 aa, Artificial Sequence
  Description of Artificial Sequence: Synthetic polypeptide
  XENP019870 [CTLA-4]_H0.122_L0_scFv(GKPGS)4
QVQLVESGGGVVQPGRSLRLSCAASGFTFSSYTMHWVRQAPGKGLEWVTFISYDGNNKYYADSVKGRFTISRDNSKNTLYLQMNSLRAEDTAIYYCARTGWLGPLDYWGQGTLVTVSSGKPGSGKPGSGKPGSGKPGSEIVLTQSPGTLSLSPGERATLSCRASQSVGSSYLAWYQQKPGQAPRLLIYGAFSRATGIPDRFSGSGSGTDFTLTISRLEPEDFAVYYCQQYGSSPWTFGQGTKVEIK

SEQ ID NO: 1282 - protein, 118 aa, Artificial Sequence
  Description of Artificial Sequence: Synthetic polypeptide
  VH of XENP019870
QVQLVESGGGVVQPGRSLRLSCAASGFTFSSYTMHWVRQAPGKGLEWVTFISYDGNNKYYADSVKGRFTISRDNSKNTLYLQMNSLRAEDTAIYYCARTGWLGPLDYWGQGTLVTVSS

SEQ ID NO: 1283 - protein, 108 aa, Artificial Sequence; identical to SEQ ID NO: 23
  Description of Artificial Sequence: Synthetic polypeptide
  VL of XENP019870

SEQ ID NO: 1284 - protein, 5 aa, Artificial Sequence
  Description of Artificial Sequence: Synthetic peptide
  XENP019870 vhCDR1
SYTMH

SEQ ID NO: 1285 - protein, 17 aa, Artificial Sequence
  Description of Artificial Sequence: Synthetic peptide
  XENP019870 vhCDR2
FISYDGNNKYYADSVKG

SEQ ID NO: 1286 - protein, 9 aa, Artificial Sequence
  Description of Artificial Sequence: Synthetic peptide
  XENP019870 vhCDR3
TGWLGPLDY

SEQ ID NO: 1287 - protein, 12 aa, Artificial Sequence
  Description of Artificial Sequence: Synthetic peptide
  XENP019870 vlCDR1
RASQSVGSSYLA

SEQ ID NO: 1288 - protein, 7 aa, Artificial Sequence
  Description of Artificial Sequence: Synthetic peptide
  XENP019870 vlCDR2
GAFSRAT

SEQ ID NO: 1289 - protein, 9 aa, Artificial Sequence
  Description of Artificial Sequence: Synthetic peptide
  XENP019870 vlCDR3
QQYGSSPWT

SEQ ID NO: 1290 - protein, 246 aa, Artificial Sequence
  Description of Artificial Sequence: Synthetic polypeptide
  XENP019871 [CTLA-4]_H0.123_L0_scFv(GKPGS)4
QVQLVESGGGVVQPGRSLRLSCAASGFTFSSYTMHWVRQAPGKGLEWVTFISYDGNNKYYADSVKGRFTISRDNSKNTLYLQMNSLRAEDTAIYYCARTGWLGPMDYWGQGTLVTVSSGKPGSGKPGSGKPGSGKPGSEIVLTQSPGTLSLSPGERATLSCRASQSVGSSYLAWYQQKPGQAPRLLIYGAFSRATGIPDRFSGSGSGTDFTLTISRLEPEDFAVYYCQQYGSSPWTFGQGTKVEIK

SEQ ID NO: 1291 - protein, 118 aa, Artificial Sequence
  Description of Artificial Sequence: Synthetic polypeptide
  VH of XENP019871
QVQLVESGGGVVQPGRSLRLSCAASGFTFSSYTMHWVRQAPGKGLEWVTFISYDGNNKYYADSVKGRFTISRDNSKNTLYLQMNSLRAEDTAIYYCARTGWLGPMDYWGQGTLVTVSS

SEQ ID NO: 1292 - protein, 108 aa, Artificial Sequence; identical to SEQ ID NO: 23
  Description of Artificial Sequence: Synthetic polypeptide
  VL of XENP019871

SEQ ID NO: 1293 - protein, 5 aa, Artificial Sequence
  Description of Artificial Sequence: Synthetic peptide
  XENP019871 vhCDR1
SYTMH

SEQ ID NO: 1294 - protein, 17 aa, Artificial Sequence
  Description of Artificial Sequence: Synthetic peptide
  XENP019871 vhCDR2
FISYDGNNKYYADSVKG

SEQ ID NO: 1295 - protein, 9 aa, Artificial Sequence
  Description of Artificial Sequence: Synthetic peptide
  XENP019871 vhCDR3
TGWLGPMDY

SEQ ID NO: 1296 - protein, 12 aa, Artificial Sequence
  Description of Artificial Sequence: Synthetic peptide
  XENP019871 vlCDR1
RASQSVGSSYLA

SEQ ID NO: 1297 - protein, 7 aa, Artificial Sequence
  Description of Artificial Sequence: Synthetic peptide
  XENP019871 vlCDR2
GAFSRAT

SEQ ID NO: 1298 - protein, 9 aa, Artificial Sequence
  Description of Artificial Sequence: Synthetic peptide
  XENP019871 vlCDR3
QQYGSSPWT

SEQ ID NO: 1299 - protein, 246 aa, Artificial Sequence
  Description of Artificial Sequence: Synthetic polypeptide
  XENP019872 [CTLA-4]_H0.124_L0_scFv(GKPGS)4
QVQLVESGGGVVQPGRSLRLSCAASGFTFSSYTMHWVRQAPGKGLEWVTFISYDGNNKYYADSVKGRFTISRDNSKNTLYLQMNSLRAEDTAIYYCARTGWLGPFAYWGQGTLVTVSSGKPGSGKPGSGKPGSGKPGSEIVLTQSPGTLSLSPGERATLSCRASQSVGSSYLAWYQQKPGQAPRLLIYGAFSRATGIPDRFSGSGSGTDFTLTISRLEPEDFAVYYCQQYGSSPWTFGQGTKVEIK

SEQ ID NO: 1300 - protein, 118 aa, Artificial Sequence
  Description of Artificial Sequence: Synthetic polypeptide
  VH of XENP019872
QVQLVESGGGVVQPGRSLRLSCAASGFTFSSYTMHWVRQAPGKGLEWVTFISYDGNNKYYADSVKGRFTISRDNSKNTLYLQMNSLRAEDTAIYYCARTGWLGPFAYWGQGTLVTVSS

SEQ ID NO: 1301 - protein, 108 aa, Artificial Sequence; identical to SEQ ID NO: 23
  Description of Artificial Sequence: Synthetic polypeptide
  VL of XENP019872

SEQ ID NO: 1302 - protein, 5 aa, Artificial Sequence
  Description of Artificial Sequence: Synthetic peptide
  XENP019872 vhCDR1
SYTMH

SEQ ID NO: 1303 - protein, 17 aa, Artificial Sequence
  Description of Artificial Sequence: Synthetic peptide
  XENP019872 vhCDR2
FISYDGNNKYYADSVKG

SEQ ID NO: 1304 - protein, 9 aa, Artificial Sequence
  Description of Artificial Sequence: Synthetic peptide
  XENP019872 vhCDR3
TGWLGPFAY

SEQ ID NO: 1305 - protein, 12 aa, Artificial Sequence
  Description of Artificial Sequence: Synthetic peptide
  XENP019872 vlCDR1
RASQSVGSSYLA

SEQ ID NO: 1306 - protein, 7 aa, Artificial Sequence
  Description of Artificial Sequence: Synthetic peptide
  XENP019872 vlCDR2
GAFSRAT

SEQ ID NO: 1307 - protein, 9 aa, Artificial Sequence
  Description of Artificial Sequence: Synthetic peptide
  XENP019872 vlCDR3
QQYGSSPWT

SEQ ID NO: 1308 - protein, 246 aa, Artificial Sequence
  Description of Artificial Sequence: Synthetic polypeptide
  XENP019873 [CTLA-4]_H0.125_L0_scFv(GKPGS)4
QVQLVESGGGVVQPGRSLRLSCAASGFTFSSYTMHWVRQAPGKGLEWVTFISYDGNNKYYADSVKGRFTISRDNSKNTLYLQMNSLRAEDTAIYYCARTGWLGPFEYWGQGTLVTVSSGKPGSGKPGSGKPGSGKPGSEIVLTQSPGTLSLSPGERATLSCRASQSVGSSYLAWYQQKPGQAPRLLIYGAFSRATGIPDRFSGSGSGTDFTLTISRLEPEDFAVYYCQQYGSSPWTFGQGTKVEIK

SEQ ID NO: 1309 - protein, 118 aa, Artificial Sequence
  Description of Artificial Sequence: Synthetic polypeptide
  VH of XENP019873
QVQLVESGGGVVQPGRSLRLSCAASGFTFSSYTMHWVRQAPGKGLEWVTFISYDGNNKYYADSVKGRFTISRDNSKNTLYLQMNSLRAEDTAIYYCARTGWLGPFEYWGQGTLVTVSS

SEQ ID NO: 1310 - protein, 108 aa, Artificial Sequence; identical to SEQ ID NO: 23
  Description of Artificial Sequence: Synthetic polypeptide
  VL of XENP019873

SEQ ID NO: 1311 - protein, 5 aa, Artificial Sequence
  Description of Artificial Sequence: Synthetic peptide
  XENP019873 vhCDR1
SYTMH

SEQ ID NO: 1312 - protein, 17 aa, Artificial Sequence
  Description of Artificial Sequence: Synthetic peptide
  XENP019873 vhCDR2
FISYDGNNKYYADSVKG

SEQ ID NO: 1313 - protein, 9 aa, Artificial Sequence
  Description of Artificial Sequence: Synthetic peptide
  XENP019873 vhCDR3
TGWLGPFEY

SEQ ID NO: 1314 - protein, 12 aa, Artificial Sequence
  Description of Artificial Sequence: Synthetic peptide
  XENP019873 vlCDR1
RASQSVGSSYLA

SEQ ID NO: 1315 - protein, 7 aa, Artificial Sequence
  Description of Artificial Sequence: Synthetic peptide
  XENP019873 vlCDR2
GAFSRAT

SEQ ID NO: 1316 - protein, 9 aa, Artificial Sequence
  Description of Artificial Sequence: Synthetic peptide
  XENP019873 vlCDR3
QQYGSSPWT

SEQ ID NO: 1317 - protein, 246 aa, Artificial Sequence
  Description of Artificial Sequence: Synthetic polypeptide
  XENP019874 [CTLA-4]_H0.126_L0_scFv(GKPGS)4
QVQLVESGGGVVQPGRSLRLSCAASGFTFSSYTMHWVRQAPGKGLEWVTFISYDGNNKYYADSVKGRFTISRDNSKNTLYLQMNSLRAEDTAIYYCARTGWLGPFHYWGQGTLVTVSSGKPGSGKPGSGKPGSGKPGSEIVLTQSPGTLSLSPGERATLSCRASQSVGSSYLAWYQQKPGQAPRLLIYGAFSRATGIPDRFSGSGSGTDFTLTISRLEPEDFAVYYCQQYGSSPWTFGQGTKVEIK

SEQ ID NO: 1318 - protein, 118 aa, Artificial Sequence
  Description of Artificial Sequence: Synthetic polypeptide
  VH of XENP019874
QVQLVESGGGVVQPGRSLRLSCAASGFTFSSYTMHWVRQAPGKGLEWVTFISYDGNNKYYADSVKGRFTISRDNSKNTLYLQMNSLRAEDTAIYYCARTGWLGPFHYWGQGTLVTVSS

SEQ ID NO: 1319 - protein, 108 aa, Artificial Sequence; identical to SEQ ID NO: 23
  Description of Artificial Sequence: Synthetic polypeptide
  VL of XENP019874

SEQ ID NO: 1320 - protein, 5 aa, Artificial Sequence
  Description of Artificial Sequence: Synthetic peptide
  XENP019874 vhCDR1
SYTMH

SEQ ID NO: 1321 - protein, 17 aa, Artificial Sequence
  Description of Artificial Sequence: Synthetic peptide
  XENP019874 vhCDR2
FISYDGNNKYYADSVKG

SEQ ID NO: 1322 - protein, 9 aa, Artificial Sequence
  Description of Artificial Sequence: Synthetic peptide
  XENP019874 vhCDR3
TGWLGPFHY

SEQ ID NO: 1323 - protein, 12 aa, Artificial Sequence
  Description of Artificial Sequence: Synthetic peptide
  XENP019874 vlCDR1
RASQSVGSSYLA

SEQ ID NO: 1324 - protein, 7 aa, Artificial Sequence
  Description of Artificial Sequence: Synthetic peptide
  XENP019874 vlCDR2
GAFSRAT

SEQ ID NO: 1325 - protein, 9 aa, Artificial Sequence
  Description of Artificial Sequence: Synthetic peptide
  XENP019874 vlCDR3
QQYGSSPWT

SEQ ID NO: 1326 - protein, 246 aa, Artificial Sequence
  Description of Artificial Sequence: Synthetic polypeptide
  XENP019875 [CTLA-4]_H0.127_L0_scFv(GKPGS)4
QVQLVESGGGVVQPGRSLRLSCAASGFTFSSYTMHWVRQAPGKGLEWVTFISYDGNNKYYADSVKGRFTISRDNSKNTLYLQMNSLRAEDTAIYYCARTGWLGPFNYWGQGTLVTVSSGKPGSGKPGSGKPGSGKPGSEIVLTQSPGTLSLSPGERATLSCRASQSVGSSYLAWYQQKPGQAPRLLIYGAFSRATGIPDRFSGSGSGTDFTLTISRLEPEDFAVYYCQQYGSSPWTFGQGTKVEIK

SEQ ID NO: 1327 - protein, 118 aa, Artificial Sequence
  Description of Artificial Sequence: Synthetic polypeptide
  VH of XENP019875
QVQLVESGGGVVQPGRSLRLSCAASGFTFSSYTMHWVRQAPGKGLEWVTFISYDGNNKYYADSVKGRFTISRDNSKNTLYLQMNSLRAEDTAIYYCARTGWLGPFNYWGQGTLVTVSS

SEQ ID NO: 1328 - protein, 108 aa, Artificial Sequence; identical to SEQ ID NO: 23
  Description of Artificial Sequence: Synthetic polypeptide
  VL of XENP019875

SEQ ID NO: 1329 - protein, 5 aa, Artificial Sequence
  Description of Artificial Sequence: Synthetic peptide
  XENP019875 vhCDR1
SYTMH

SEQ ID NO: 1330 - protein, 17 aa, Artificial Sequence
  Description of Artificial Sequence: Synthetic peptide
  XENP019875 vhCDR2
FISYDGNNKYYADSVKG

SEQ ID NO: 1331 - protein, 9 aa, Artificial Sequence
  Description of Artificial Sequence: Synthetic peptide
  XENP019875 vhCDR3
TGWLGPFNY

SEQ ID NO: 1332 - protein, 12 aa, Artificial Sequence
  Description of Artificial Sequence: Synthetic peptide
  XENP019875 vlCDR1
RASQSVGSSYLA

SEQ ID NO: 1333 - protein, 7 aa, Artificial Sequence
  Description of Artificial Sequence: Synthetic peptide
  XENP019875 vlCDR2
GAFSRAT

SEQ ID NO: 1334 - protein, 9 aa, Artificial Sequence
  Description of Artificial Sequence: Synthetic peptide
  XENP019875 vlCDR3
QQYGSSPWT

SEQ ID NO: 1335 - protein, 246 aa, Artificial Sequence
  Description of Artificial Sequence: Synthetic polypeptide
  XENP019876 [CTLA-4]_H0.128_L0_scFv(GKPGS)4
QVQLVESGGGVVQPGRSLRLSCAASGFTFSSYTMHWVRQAPGKGLEWVTFISYDGNNKYYADSVKGRFTISRDNSKNTLYLQMNSLRAEDTAIYYCARTGWLGPFSYWGQGTLVTVSSGKPGSGKPGSGKPGSGKPGSEIVLTQSPGTLSLSPGERATLSCRASQSVGSSYLAWYQQKPGQAPRLLIYGAFSRATGIPDRFSGSGSGTDFTLTISRLEPEDFAVYYCQQYGSSPWTFGQGTKVEIK

SEQ ID NO: 1336 - protein, 118 aa, Artificial Sequence
  Description of Artificial Sequence: Synthetic polypeptide
  VH of XENP019876
QVQLVESGGGVVQPGRSLRLSCAASGFTFSSYTMHWVRQAPGKGLEWVTFISYDGNNKYYADSVKGRFTISRDNSKNTLYLQMNSLRAEDTAIYYCARTGWLGPFSYWGQGTLVTVSS

SEQ ID NO: 1337 - protein, 108 aa, Artificial Sequence; identical to SEQ ID NO: 23
  Description of Artificial Sequence: Synthetic polypeptide
  VL of XENP019876

SEQ ID NO: 1338 - protein, 5 aa, Artificial Sequence
  Description of Artificial Sequence: Synthetic peptide
  XENP019876 vhCDR1
SYTMH

SEQ ID NO: 1339 - protein, 17 aa, Artificial Sequence
  Description of Artificial Sequence: Synthetic peptide
  XENP019876 vhCDR2
FISYDGNNKYYADSVKG

SEQ ID NO: 1340 - protein, 9 aa, Artificial Sequence
  Description of Artificial Sequence: Synthetic peptide
  XENP019876 vhCDR3
TGWLGPFSY

SEQ ID NO: 1341 - protein, 12 aa, Artificial Sequence
  Description of Artificial Sequence: Synthetic peptide
  XENP019876 vlCDR1
RASQSVGSSYLA

SEQ ID NO: 1342 - protein, 7 aa, Artificial Sequence
  Description of Artificial Sequence: Synthetic peptide
  XENP019876 vlCDR2
GAFSRAT

SEQ ID NO: 1343 - protein, 9 aa, Artificial Sequence
  Description of Artificial Sequence: Synthetic peptide
  XENP019876 vlCDR3
QQYGSSPWT

SEQ ID NO: 1344 - protein, 246 aa, Artificial Sequence
  Description of Artificial Sequence: Synthetic polypeptide
  XENP019877 [CTLA-4]_H0.129_L0_scFv(GKPGS)4
QVQLVESGGGVVQPGRSLRLSCAASGFTFSSYTMHWVRQAPGKGLEWVTFISYDGNNKYYADSVKGRFTISRDNSKNTLYLQMNSLRAEDTAIYYCARTGWLGPFQYWGQGTLVTVSSGKPGSGKPGSGKPGSGKPGSEIVLTQSPGTLSLSPGERATLSCRASQSVGSSYLAWYQQKPGQAPRLLIYGAFSRATGIPDRFSGSGSGTDFTLTISRLEPEDFAVYYCQQYGSSPWTFGQGTKVEIK

SEQ ID NO: 1345 - protein, 118 aa, Artificial Sequence
  Description of Artificial Sequence: Synthetic polypeptide
  VH of XENP019877
QVQLVESGGGVVQPGRSLRLSCAASGFTFSSYTMHWVRQAPGKGLEWVTFISYDGNNKYYADSVKGRFTISRDNSKNTLYLQMNSLRAEDTAIYYCARTGWLGPFQYWGQGTLVTVSS

SEQ ID NO: 1346 - protein, 108 aa, Artificial Sequence; identical to SEQ ID NO: 23
  Description of Artificial Sequence: Synthetic polypeptide
  VL of XENP019877

SEQ ID NO: 1347 - protein, 5 aa, Artificial Sequence
  Description of Artificial Sequence: Synthetic peptide
  XENP019877 vhCDR1
SYTMH

SEQ ID NO: 1348 - protein, 17 aa, Artificial Sequence
  Description of Artificial Sequence: Synthetic peptide
  XENP019877 vhCDR2
FISYDGNNKYYADSVKG

SEQ ID NO: 1349 - protein, 9 aa, Artificial Sequence
  Description of Artificial Sequence: Synthetic peptide
  XENP019877 vhCDR3
TGWLGPFQY

SEQ ID NO: 1350 - protein, 12 aa, Artificial Sequence
  Description of Artificial Sequence: Synthetic peptide
  XENP019877 vlCDR1
RASQSVGSSYLA

SEQ ID NO: 1351 - protein, 7 aa, Artificial Sequence
  Description of Artificial Sequence: Synthetic peptide
  XENP019877 vlCDR2
GAFSRAT

SEQ ID NO: 1352 - protein, 9 aa, Artificial Sequence
  Description of Artificial Sequence: Synthetic peptide
  XENP019877 vlCDR3
QQYGSSPWT

SEQ ID NO: 1353 - protein, 246 aa, Artificial Sequence
  Description of Artificial Sequence: Synthetic polypeptide
  XENP019878 [CTLA-4]_H0.130_L0_scFv(GKPGS)4
QVQLVESGGGVVQPGRSLRLSCAASGFTFSSYTMHWVRQAPGKGLEWVTFISYDGNNKYYADSVKGRFTISRDNSKNTLYLQMNSLRAEDTAIYYCARTGWLGPFDHWGQGTLVTVSSGKPGSGKPGSGKPGSGKPGSEIVLTQSPGTLSLSPGERATLSCRASQSVGSSYLAWYQQKPGQAPRLLIYGAFSRATGIPDRFSGSGSGTDFTLTISRLEPEDFAVYYCQQYGSSPWTFGQGTKVEIK

SEQ ID NO: 1354 - protein, 118 aa, Artificial Sequence
  Description of Artificial Sequence: Synthetic polypeptide
  VH of XENP019878
QVQLVESGGGVVQPGRSLRLSCAASGFTFSSYTMHWVRQAPGKGLEWVTFISYDGNNKYYADSVKGRFTISRDNSKNTLYLQMNSLRAEDTAIYYCARTGWLGPFDHWGQGTLVTVSS

SEQ ID NO: 1355 - protein, 108 aa, Artificial Sequence; identical to SEQ ID NO: 23
  Description of Artificial Sequence: Synthetic polypeptide
  VL of XENP019878

SEQ ID NO: 1356 - protein, 5 aa, Artificial Sequence
  Description of Artificial Sequence: Synthetic peptide
  XENP019878 vhCDR1
SYTMH

SEQ ID NO: 1357 - protein, 17 aa, Artificial Sequence
  Description of Artificial Sequence: Synthetic peptide
  XENP019878 vhCDR2
FISYDGNNKYYADSVKG

SEQ ID NO: 1358 - protein, 9 aa, Artificial Sequence
  Description of Artificial Sequence: Synthetic peptide
  XENP019878 vhCDR3
TGWLGPFDH

SEQ ID NO: 1359 - protein, 12 aa, Artificial Sequence
  Description of Artificial Sequence: Synthetic peptide
  XENP019878 vlCDR1
RASQSVGSSYLA

SEQ ID NO: 1360 - protein, 7 aa, Artificial Sequence
  Description of Artificial Sequence: Synthetic peptide
  XENP019878 vlCDR2
GAFSRAT

SEQ ID NO: 1361 - protein, 9 aa, Artificial Sequence
  Description of Artificial Sequence: Synthetic peptide
  XENP019878 vlCDR3
QQYGSSPWT

SEQ ID NO: 1362 - protein, 246 aa, Artificial Sequence
  Description of Artificial Sequence: Synthetic polypeptide
  XENP019879 [CTLA-4]_H0.131_L0_scFv(GKPGS)4
QVQLVESGGGVVQPGRSLRLSCAASGFTFSSYTMHWVRQAPGKGLEWVTFISYDGNNKYYADSVKGRFTISRDNSKNTLYLQMNSLRAEDTAIYYCARTGWLGPFDLWGQGTLVTVSSGKPGSGKPGSGKPGSGKPGSEIVLTQSPGTLSLSPGERATLSCRASQSVGSSYLAWYQQKPGQAPRLLIYGAFSRATGIPDRFSGSGSGTDFTLTISRLEPEDFAVYYCQQYGSSPWTFGQGTKVEIK

SEQ ID NO: 1363 - protein, 118 aa, Artificial Sequence
  Description of Artificial Sequence: Synthetic polypeptide
  VH of XENP019879
QVQLVESGGGVVQPGRSLRLSCAASGFTFSSYTMHWVRQAPGKGLEWVTFISYDGNNKYYADSVKGRFTISRDNSKNTLYLQMNSLRAEDTAIYYCARTGWLGPFDLWGQGTLVTVSS

SEQ ID NO: 1364 - protein, 108 aa, Artificial Sequence; identical to SEQ ID NO: 23
  Description of Artificial Sequence: Synthetic polypeptide
  VL of XENP019879

SEQ ID NO: 1365 - protein, 5 aa, Artificial Sequence
  Description of Artificial Sequence: Synthetic peptide
  XENP019879 vhCDR1
SYTMH

SEQ ID NO: 1366 - protein, 17 aa, Artificial Sequence
  Description of Artificial Sequence: Synthetic peptide
  XENP019879 vhCDR2
FISYDGNNKYYADSVKG

SEQ ID NO: 1367 - protein, 9 aa, Artificial Sequence
  Description of Artificial Sequence: Synthetic peptide
  XENP019879 vhCDR3
TGWLGPFDL

SEQ ID NO: 1368 - protein, 12 aa, Artificial Sequence
  Description of Artificial Sequence: Synthetic peptide
  XENP019879 vlCDR1
RASQSVGSSYLA

SEQ ID NO: 1369 - protein, 7 aa, Artificial Sequence
  Description of Artificial Sequence: Synthetic peptide
  XENP019879 vlCDR2
GAFSRAT

SEQ ID NO: 1370 - protein, 9 aa, Artificial Sequence
  Description of Artificial Sequence: Synthetic peptide
  XENP019879 vlCDR3
QQYGSSPWT

SEQ ID NO: 1371 - protein, 246 aa, Artificial Sequence
  Description of Artificial Sequence: Synthetic polypeptide
  XENP019880 [CTLA-4]_H0.132_L0_scFv(GKPGS)4
QVQLVESGGGVVQPGRSLRLSCAASGFTFSSYTMHWVRQAPGKGLEWVTFISYDGNNKYYADSVKGRFTISRDNSKNTLYLQMNSLRAEDTAIYYCARTGWLGPFDSWGQGTLVTVSSGKPGSGKPGSGKPGSGKPGSEIVLTQSPGTLSLSPGERATLSCRASQSVGSSYLAWYQQKPGQAPRLLIYGAFSRATGIPDRFSGSGSGTDFTLTISRLEPEDFAVYYCQQYGSSPWTFGQGTKVEIK

SEQ ID NO: 1372 - protein, 118 aa, Artificial Sequence
  Description of Artificial Sequence: Synthetic polypeptide
  VH of XENP019880
QVQLVESGGGVVQPGRSLRLSCAASGFTFSSYTMHWVRQAPGKGLEWVTFISYDGNNKYYADSVKGRFTISRDNSKNTLYLQMNSLRAEDTAIYYCARTGWLGPFDSWGQGTLVTVSS

SEQ ID NO: 1373 - protein, 108 aa, Artificial Sequence; identical to SEQ ID NO: 23
  Description of Artificial Sequence: Synthetic polypeptide
  VL of XENP019880

SEQ ID NO: 1374 - protein, 5 aa, Artificial Sequence
  Description of Artificial Sequence: Synthetic peptide
  XENP019880 vhCDR1
SYTMH

SEQ ID NO: 1375 - protein, 17 aa, Artificial Sequence
  Description of Artificial Sequence: Synthetic peptide
  XENP019880 vhCDR2
FISYDGNNKYYADSVKG

SEQ ID NO: 1376 - protein, 9 aa, Artificial Sequence
  Description of Artificial Sequence: Synthetic peptide
  XENP019880 vhCDR3
TGWLGPFDS

SEQ ID NO: 1377 - protein, 12 aa, Artificial Sequence
  Description of Artificial Sequence: Synthetic peptide
  XENP019880 vlCDR1
RASQSVGSSYLA

SEQ ID NO: 1378 - protein, 7 aa, Artificial Sequence
  Description of Artificial Sequence: Synthetic peptide
  XENP019880 vlCDR2
GAFSRAT

SEQ ID NO: 1379 - protein, 9 aa, Artificial Sequence
  Description of Artificial Sequence: Synthetic peptide
  XENP019880 vlCDR3
QQYGSSPWT

SEQ ID NO: 1380 - protein, 246 aa, Artificial Sequence
  Description of Artificial Sequence: Synthetic polypeptide
  XENP019881 [CTLA-4]_H0.133_L0_scFv(GKPGS)4
QVQLVESGGGVVQPGRSLRLSCAASGFTFSSYTMHWVRQAPGKGLEWVTFISYDGNNKYYADSVKGRFTISRDNSKNTLYLQMNSLRAEDTAIYYCARTGWLGPFDVWGQGTLVTVSSGKPGSGKPGSGKPGSGKPGSEIVLTQSPGTLSLSPGERATLSCRASQSVGSSYLAWYQQKPGQAPRLLIYGAFSRATGIPDRFSGSGSGTDFTLTISRLEPEDFAVYYCQQYGSSPWTFGQGTKVEIK

SEQ ID NO: 1381 - protein, 118 aa, Artificial Sequence
  Description of Artificial Sequence: Synthetic polypeptide
  VH of XENP019881
QVQLVESGGGVVQPGRSLRLSCAASGFTFSSYTMHWVRQAPGKGLEWVTFISYDGNNKYYADSVKGRFTISRDNSKNTLYLQMNSLRAEDTAIYYCARTGWLGPFDVWGQGTLVTVSS

SEQ ID NO: 1382 - protein, 108 aa, Artificial Sequence; identical to SEQ ID NO: 23
  Description of Artificial Sequence: Synthetic polypeptide
  VL of XENP019881

SEQ ID NO: 1383 - protein, 5 aa, Artificial Sequence
  Description of Artificial Sequence: Synthetic peptide
  XENP019881 vhCDR1
SYTMH

SEQ ID NO: 1384 - protein, 17 aa, Artificial Sequence
  Description of Artificial Sequence: Synthetic peptide
  XENP019881 vhCDR2
FISYDGNNKYYADSVKG

SEQ ID NO: 1385 - protein, 9 aa, Artificial Sequence
  Description of Artificial Sequence: Synthetic peptide
  XENP019881 vhCDR3
TGWLGPFDV

SEQ ID NO: 1386 - protein, 12 aa, Artificial Sequence
  Description of Artificial Sequence: Synthetic peptide
  XENP019881 vlCDR1
RASQSVGSSYLA

SEQ ID NO: 1387 - protein, 7 aa, Artificial Sequence
  Description of Artificial Sequence: Synthetic peptide
  XENP019881 vlCDR2
GAFSRAT

SEQ ID NO: 1388 - protein, 9 aa, Artificial Sequence
  Description of Artificial Sequence: Synthetic peptide
  XENP019881 vlCDR3
QQYGSSPWT

SEQ ID NO: 1389 - protein, 246 aa, Artificial Sequence
  Description of Artificial Sequence: Synthetic polypeptide
  XENP019882 [CTLA-4]_H0.134_L0_scFv(GKPGS)4
QVQLVESGGGVVQPGRSLRLSCAASGFTFSSYTMHWVRQAPGKGLEWVTFISYDGNNKYYADSVKGRFTISRDNSKNTLYLQMNSLRAEDTAIYYCARTGWLGPFDYWGRGTLVTVSSGKPGSGKPGSGKPGSGKPGSEIVLTQSPGTLSLSPGERATLSCRASQSVGSSYLAWYQQKPGQAPRLLIYGAFSRATGIPDRFSGSGSGTDFTLTISRLEPEDFAVYYCQQYGSSPWTFGQGTKVEIK

SEQ ID NO: 1390 - protein, 118 aa, Artificial Sequence; identical to SEQ ID NO: 67
  Description of Artificial Sequence: Synthetic polypeptide
  VH of XENP019882

SEQ ID NO: 1391 - protein, 108 aa, Artificial Sequence; identical to SEQ ID NO: 23
  Description of Artificial Sequence: Synthetic polypeptide
  VL of XENP019882

SEQ ID NO: 1392 - protein, 5 aa, Artificial Sequence
  Description of Artificial Sequence: Synthetic peptide
  XENP019882 vhCDR1
SYTMH

SEQ ID NO: 1393 - protein, 17 aa, Artificial Sequence
  Description of Artificial Sequence: Synthetic peptide
  XENP019882 vhCDR2
FISYDGNNKYYADSVKG

SEQ ID NO: 1394 - protein, 9 aa, Artificial Sequence
  Description of Artificial Sequence: Synthetic peptide
  XENP019882 vhCDR3
TGWLGPFDY

SEQ ID NO: 1395 - protein, 12 aa, Artificial Sequence
  Description of Artificial Sequence: Synthetic peptide
  XENP019882 vlCDR1
RASQSVGSSYLA

SEQ ID NO: 1396 - protein, 7 aa, Artificial Sequence
  Description of Artificial Sequence: Synthetic peptide
  XENP019882 vlCDR2
GAFSRAT

SEQ ID NO: 1397 - protein, 9 aa, Artificial Sequence
  Description of Artificial Sequence: Synthetic peptide
  XENP019882 vlCDR3
QQYGSSPWT

SEQ ID NO: 1398 - protein, 246 aa, Artificial Sequence
  Description of Artificial Sequence: Synthetic polypeptide
  XENP019883 [CTLA-4]_H0.135_L0_scFv(GKPGS)4
QVQLVESGGGVVQPGRSLRLSCAASGFTFSSYTMHWVRQAPGKGLEWVTFISYDGNNKYYADSVKGRFTISRDNSKNTLYLQMNSLRAEDTAIYYCARTGWLGPFDYWGQGTMVTVSSGKPGSGKPGSGKPGSGKPGSEIVLTQSPGTLSLSPGERATLSCRASQSVGSSYLAWYQQKPGQAPRLLIYGAFSRATGIPDRFSGSGSGTDFTLTISRLEPEDFAVYYCQQYGSSPWTFGQGTKVEIK

SEQ ID NO: 1399 - protein, 118 aa, Artificial Sequence
  Description of Artificial Sequence: Synthetic polypeptide
  VH of XENP019883
QVQLVESGGGVVQPGRSLRLSCAASGFTFSSYTMHWVRQAPGKGLEWVTFISYDGNNKYYADSVKGRFTISRDNSKNTLYLQMNSLRAEDTAIYYCARTGWLGPFDYWGQGTMVTVSS

SEQ ID NO: 1400 - protein, 108 aa, Artificial Sequence; identical to SEQ ID NO: 23
  Description of Artificial Sequence: Synthetic polypeptide
  VL of XENP019883

SEQ ID NO: 1401 - protein, 5 aa, Artificial Sequence
  Description of Artificial Sequence: Synthetic peptide
  XENP019883 vhCDR1
SYTMH

SEQ ID NO: 1402 - protein, 17 aa, Artificial Sequence
  Description of Artificial Sequence: Synthetic peptide
  XENP019883 vhCDR2
FISYDGNNKYYADSVKG

SEQ ID NO: 1403 - protein, 9 aa, Artificial Sequence
  Description of Artificial Sequence: Synthetic peptide
  XENP019883 vhCDR3
TGWLGPFDY

SEQ ID NO: 1404 - protein, 12 aa, Artificial Sequence
  Description of Artificial Sequence: Synthetic peptide
  XENP019883 vlCDR1
RASQSVGSSYLA

SEQ ID NO: 1405 - protein, 7 aa, Artificial Sequence
  Description of Artificial Sequence: Synthetic peptide
  XENP019883 vlCDR2
GAFSRAT

SEQ ID NO: 1406 - protein, 9 aa, Artificial Sequence
  Description of Artificial Sequence: Synthetic peptide
  XENP019883 vlCDR3
QQYGSSPWT

SEQ ID NO: 1407 - protein, 246 aa, Artificial Sequence
  Description of Artificial Sequence: Synthetic polypeptide
  XENP019884 [CTLA-4]_H0.136_L0_scFv(GKPGS)4
QVQLVESGGGVVQPGRSLRLSCAASGFTFSSYTMHWVRQAPGKGLEWVTFISYDGNNKYYADSVKGRFTISRDNSKNTLYLQMNSLRAEDTAIYYCARTGWLGPFDYWGQGTTVTVSSGKPGSGKPGSGKPGSGKPGSEIVLTQSPGTLSLSPGERATLSCRASQSVGSSYLAWYQQKPGQAPRLLIYGAFSRATGIPDRFSGSGSGTDFTLTISRLEPEDFAVYYCQQYGSSPWTFGQGTKVEIK

SEQ ID NO: 1408 - protein, 118 aa, Artificial Sequence
  Description of Artificial Sequence: Synthetic polypeptide
  VH of XENP019884
QVQLVESGGGVVQPGRSLRLSCAASGFTFSSYTMHWVRQAPGKGLEWVTFISYDGNNKYYADSVKGRFTISRDNSKNTLYLQMNSLRAEDTAIYYCARTGWLGPFDYWGQGTTVTVSS

SEQ ID NO: 1409 - protein, 108 aa, Artificial Sequence; identical to SEQ ID NO: 23
  Description of Artificial Sequence: Synthetic polypeptide
  VL of XENP019884

SEQ ID NO: 1410 - protein, 5 aa, Artificial Sequence
  Description of Artificial Sequence: Synthetic peptide
  XENP019884 vhCDR1
SYTMH

SEQ ID NO: 1411 - protein, 17 aa, Artificial Sequence
  Description of Artificial Sequence: Synthetic peptide
  XENP019884 vhCDR2
FISYDGNNKYYADSVKG

SEQ ID NO: 1412 - protein, 9 aa, Artificial Sequence
  Description of Artificial Sequence: Synthetic peptide
  XENP019884 vhCDR3
TGWLGPFDY

SEQ ID NO: 1413 - protein, 12 aa, Artificial Sequence
  Description of Artificial Sequence: Synthetic peptide
  XENP019884 vlCDR1
RASQSVGSSYLA

SEQ ID NO: 1414 - protein, 7 aa, Artificial Sequence
  Description of Artificial Sequence: Synthetic peptide
  XENP019884 vlCDR2
GAFSRAT

SEQ ID NO: 1415 - protein, 9 aa, Artificial Sequence
  Description of Artificial Sequence: Synthetic peptide
  XENP019884 vlCDR3
QQYGSSPWT

SEQ ID NO: 1416 - protein, 246 aa, Artificial Sequence
  Description of Artificial Sequence: Synthetic polypeptide
  XENP019885 [CTLA-4]_H0_L0.1_scFv(GKPGS)4
QVQLVESGGGVVQPGRSLRLSCAASGFTFSSYTMHWVRQAPGKGLEWVTFISYDGNNKYYADSVKGRFTISRDNSKNTLYLQMNSLRAEDTAIYYCARTGWLGPFDYWGQGTLVTVSSGKPGSGKPGSGKPGSGKPGSAIVLTQSPGTLSLSPGERATLSCRASQSVGSSYLAWYQQKPGQAPRLLIYGAFSRATGIPDRFSGSGSGTDFTLTISRLEPEDFAVYYCQQYGSSPWTFGQGTKVEIK

SEQ ID NO: 1417 - protein, 118 aa, Artificial Sequence; identical to SEQ ID NO: 22
  Description of Artificial Sequence: Synthetic polypeptide
  VH of XENP019885

SEQ ID NO: 1418 - protein, 108 aa, Artificial Sequence
  Description of Artificial Sequence: Synthetic polypeptide
  VL of XENP019885
AIVLTQSPGTLSLSPGERATLSCRASQSVGSSYLAWYQQKPGQAPRLLIYGAFSRATGIPDRFSGSGSGTDFTLTISRLEPEDFAVYYCQQYGSSPWTFGQGTKVEIK

SEQ ID NO: 1419 - protein, 5 aa, Artificial Sequence
  Description of Artificial Sequence: Synthetic peptide
  XENP019885 vhCDR1
SYTMH

SEQ ID NO: 1420 - protein, 17 aa, Artificial Sequence
  Description of Artificial Sequence: Synthetic peptide
  XENP019885 vhCDR2
FISYDGNNKYYADSVKG

SEQ ID NO: 1421 - protein, 9 aa, Artificial Sequence
  Description of Artificial Sequence: Synthetic peptide
  XENP019885 vhCDR3
TGWLGPFDY

SEQ ID NO: 1422 - protein, 12 aa, Artificial Sequence
  Description of Artificial Sequence: Synthetic peptide
  XENP019885 vlCDR1
RASQSVGSSYLA

SEQ ID NO: 1423 - protein, 7 aa, Artificial Sequence
  Description of Artificial Sequence: Synthetic peptide
  XENP019885 vlCDR2
GAFSRAT

SEQ ID NO: 1424 - protein, 9 aa, Artificial Sequence
  Description of Artificial Sequence: Synthetic peptide
  XENP019885 vlCDR3
QQYGSSPWT

SEQ ID NO: 1425 - protein, 246 aa, Artificial Sequence
  Description of Artificial Sequence: Synthetic polypeptide
  XENP019886 [CTLA-4]_H0_L0.2_scFv(GKPGS)4
QVQLVESGGGVVQPGRSLRLSCAASGFTFSSYTMHWVRQAPGKGLEWVTFISYDGNNKYYADSVKGRFTISRDNSKNTLYLQMNSLRAEDTAIYYCARTGWLGPFDYWGQGTLVTVSSGKPGSGKPGSGKPGSGKPGSDIVLTQSPGTLSLSPGERATLSCRASQSVGSSYLAWYQQKPGQAPRLLIYGAFSRATGIPDRFSGSGSGTDFTLTISRLEPEDFAVYYCQQYGSSPWTFGQGTKVEIK

SEQ ID NO: 1426 - protein, 118 aa, Artificial Sequence; identical to SEQ ID NO: 22
  Description of Artificial Sequence: Synthetic polypeptide
  VH of XENP019886

SEQ ID NO: 1427 - protein, 108 aa, Artificial Sequence
  Description of Artificial Sequence: Synthetic polypeptide
  VL of XENP019886
DIVLTQSPGTLSLSPGERATLSCRASQSVGSSYLAWYQQKPGQAPRLLIYGAFSRATGIPDRFSGSGSGTDFTLTISRLEPEDFAVYYCQQYGSSPWTFGQGTKVEIK

SEQ ID NO: 1428 - protein, 5 aa, Artificial Sequence
  Description of Artificial Sequence: Synthetic peptide
  XENP019886 vhCDR1
SYTMH

SEQ ID NO: 1429 - protein, 17 aa, Artificial Sequence
  Description of Artificial Sequence: Synthetic peptide
  XENP019886 vhCDR2
FISYDGNNKYYADSVKG

SEQ ID NO: 1430 - protein, 9 aa, Artificial Sequence
  Description of Artificial Sequence: Synthetic peptide
  XENP019886 vhCDR3
TGWLGPFDY

SEQ ID NO: 1431 - protein, 12 aa, Artificial Sequence
  Description of Artificial Sequence: Synthetic peptide
  XENP019886 vlCDR1
RASQSVGSSYLA

SEQ ID NO: 1432 - protein, 7 aa, Artificial Sequence
  Description of Artificial Sequence: Synthetic peptide
  XENP019886 vlCDR2
GAFSRAT

SEQ ID NO: 1433 - protein, 9 aa, Artificial Sequence
  Description of Artificial Sequence: Synthetic peptide
  XENP019886 vlCDR3
QQYGSSPWT

SEQ ID NO: 1434 - protein, 246 aa, Artificial Sequence
  Description of Artificial Sequence: Synthetic polypeptide
  XENP019887 [CTLA-4]_H0_L0.3_scFv(GKPGS)4
QVQLVESGGGVVQPGRSLRLSCAASGFTFSSYTMHWVRQAPGKGLEWVTFISYDGNNKYYADSVKGRFTISRDNSKNTLYLQMNSLRAEDTAIYYCARTGWLGPFDYWGQGTLVTVSSGKPGSGKPGSGKPGSGKPGSQIVLTQSPGTLSLSPGERATLSCRASQSVGSSYLAWYQQKPGQAPRLLIYGAFSRATGIPDRFSGSGSGTDFTLTISRLEPEDFAVYYCQQYGSSPWTFGQGTKVEIK

SEQ ID NO: 1435 - protein, 118 aa, Artificial Sequence; identical to SEQ ID NO: 22
  Description of Artificial Sequence: Synthetic polypeptide
  VH of XENP019887

SEQ ID NO: 1436 - protein, 108 aa, Artificial Sequence
  Description of Artificial Sequence: Synthetic polypeptide
  VL of XENP019887
QIVLTQSPGTLSLSPGERATLSCRASQSVGSSYLAWYQQKPGQAPRLLIYGAFSRATGIPDRFSGSGSGTDFTLTISRLEPEDFAVYYCQQYGSSPWTFGQGTKVEIK

SEQ ID NO: 1437 - protein, 5 aa, Artificial Sequence
  Description of Artificial Sequence: Synthetic peptide
  XENP019887 vhCDR1
SYTMH

SEQ ID NO: 1438 - protein, 17 aa, Artificial Sequence
  Description of Artificial Sequence: Synthetic peptide
  XENP019887 vhCDR2
FISYDGNNKYYADSVKG

SEQ ID NO: 1439 - protein, 9 aa, Artificial Sequence
  Description of Artificial Sequence: Synthetic peptide
  XENP019887 vhCDR3
TGWLGPFDY

SEQ ID NO: 1440 - protein, 12 aa, Artificial Sequence
  Description of Artificial Sequence: Synthetic peptide
  XENP019887 vlCDR1
RASQSVGSSYLA

SEQ ID NO: 1441 - protein, 7 aa, Artificial Sequence
  Description of Artificial Sequence: Synthetic peptide
  XENP019887 vlCDR2
GAFSRAT

SEQ ID NO: 1442 - protein, 9 aa, Artificial Sequence
  Description of Artificial Sequence: Synthetic peptide
  XENP019887 vlCDR3
QQYGSSPWT

SEQ ID NO: 1443 - protein, 246 aa, Artificial Sequence
  Description of Artificial Sequence: Synthetic polypeptide
  XENP019888 [CTLA-4]_H0_L0.4_scFv(GKPGS)4
QVQLVESGGGVVQPGRSLRLSCAASGFTFSSYTMHWVRQAPGKGLEWVTFISYDGNNKYYADSVKGRFTISRDNSKNTLYLQMNSLRAEDTAIYYCARTGWLGPFDYWGQGTLVTVSSGKPGSGKPGSGKPGSGKPGSRIVLTQSPGTLSLSPGERATLSCRASQSVGSSYLAWYQQKPGQAPRLLIYGAFSRATGIPDRFSGSGSGTDFTLTISRLEPEDFAVYYCQQYGSSPWTFGQGTKVEIK

SEQ ID NO: 1444 - protein, 118 aa, Artificial Sequence; identical to SEQ ID NO: 22
  Description of Artificial Sequence: Synthetic polypeptide
  VH of XENP019888

SEQ ID NO: 1445 - protein, 108 aa, Artificial Sequence
  Description of Artificial Sequence: Synthetic polypeptide
  VL of XENP019888
RIVLTQSPGTLSLSPGERATLSCRASQSVGSSYLAWYQQKPGQAPRLLIYGAFSRATGIPDRFSGSGSGTDFTLTISRLEPEDFAVYYCQQYGSSPWTFGQGTKVEIK

SEQ ID NO: 1446 - protein, 5 aa, Artificial Sequence
  Description of Artificial Sequence: Synthetic peptide
  XENP019888 vhCDR1
SYTMH

SEQ ID NO: 1447 - protein, 17 aa, Artificial Sequence
  Description of Artificial Sequence: Synthetic peptide
  XENP019888 vhCDR2
FISYDGNNKYYADSVKG

SEQ ID NO: 1448 - protein, 9 aa, Artificial Sequence
  Description of Artificial Sequence: Synthetic peptide
  XENP019888 vhCDR3
TGWLGPFDY

SEQ ID NO: 1449 - protein, 12 aa, Artificial Sequence
  Description of Artificial Sequence: Synthetic peptide
  XENP019888 vlCDR1
RASQSVGSSYLA

SEQ ID NO: 1450 - protein, 7 aa, Artificial Sequence
  Description of Artificial Sequence: Synthetic peptide
  XENP019888 vlCDR2
GAFSRAT

SEQ ID NO: 1451 - protein, 9 aa, Artificial Sequence
  Description of Artificial Sequence: Synthetic peptide
  XENP019888 vlCDR3
QQYGSSPWT

SEQ ID NO: 1452 - protein, 246 aa, Artificial Sequence
  Description of Artificial Sequence: Synthetic polypeptide
  XENP019889 [CTLA-4]_H0_L0.5_scFv(GKPGS)4
QVQLVESGGGVVQPGRSLRLSCAASGFTFSSYTMHWVRQAPGKGLEWVTFISYDGNNKYYADSVKGRFTISRDNSKNTLYLQMNSLRAEDTAIYYCARTGWLGPFDYWGQGTLVTVSSGKPGSGKPGSGKPGSGKPGSEIRLTQSPGTLSLSPGERATLSCRASQSVGSSYLAWYQQKPGQAPRLLIYGAFSRATGIPDRFSGSGSGTDFTLTISRLEPEDFAVYYCQQYGSSPWTFGQGTKVEIK

SEQ ID NO: 1453 - protein, 118 aa, Artificial Sequence; identical to SEQ ID NO: 22
  Description of Artificial Sequence: Synthetic polypeptide
  VH of XENP019889

SEQ ID NO: 1454 - protein, 108 aa, Artificial Sequence
  Description of Artificial Sequence: Synthetic polypeptide
  VL of XENP019889
EIRLTQSPGTLSLSPGERATLSCRASQSVGSSYLAWYQQKPGQAPRLLIYGAFSRATGIPDRFSGSGSGTDFTLTISRLEPEDFAVYYCQQYGSSPWTFGQGTKVEIK

SEQ ID NO: 1455 - protein, 5 aa, Artificial Sequence
  Description of Artificial Sequence: Synthetic peptide
  XENP019889 vhCDR1
SYTMH

SEQ ID NO: 1456 - protein, 17 aa, Artificial Sequence
  Description of Artificial Sequence: Synthetic peptide
  XENP019889 vhCDR2
FISYDGNNKYYADSVKG

SEQ ID NO: 1457 - protein, 9 aa, Artificial Sequence
  Description of Artificial Sequence: Synthetic peptide
  XENP019889 vhCDR3
TGWLGPFDY

SEQ ID NO: 1458 - protein, 12 aa, Artificial Sequence
  Description of Artificial Sequence: Synthetic peptide
  XENP019889 vlCDR1
RASQSVGSSYLA

SEQ ID NO: 1459 - protein, 7 aa, Artificial Sequence
  Description of Artificial Sequence: Synthetic peptide
  XENP019889 vlCDR2
GAFSRAT

SEQ ID NO: 1460 - protein, 9 aa, Artificial Sequence
  Description of Artificial Sequence: Synthetic peptide
  XENP019889 vlCDR3
QQYGSSPWT

SEQ ID NO: 1461 - protein, 246 aa, Artificial Sequence
  Description of Artificial Sequence: Synthetic polypeptide
  XENP019890 [CTLA-4]_H0_L0.6_scFv(GKPGS)4
QVQLVESGGGVVQPGRSLRLSCAASGFTFSSYTMHWVRQAPGKGLEWVTFISYDGNNKYYADSVKGRFTISRDNSKNTLYLQMNSLRAEDTAIYYCARTGWLGPFDYWGQGTLVTVSSGKPGSGKPGSGKPGSGKPGSEIRLTQSPGTLSLSPGERATLSCRASQSVGSSYLAWYQQKPGQAPRLLIYGAFSRATGIPDRFSGSGSGTDFTLTISRLEPEDFAVYYCQQYGSSPWTFGEGTKVEIK

SEQ ID NO: 1462 - protein, 118 aa, Artificial Sequence; identical to SEQ ID NO: 22
  Description of Artificial Sequence: Synthetic polypeptide
  VH of XENP019890

SEQ ID NO: 1463 - protein, 108 aa, Artificial Sequence
  Description of Artificial Sequence: Synthetic polypeptide
  VL of XENP019890
EIRLTQSPGTLSLSPGERATLSCRASQSVGSSYLAWYQQKPGQAPRLLIYGAFSRATGIPDRFSGSGSGTDFTLTISRLEPEDFAVYYCQQYGSSPWTFGEGTKVEIK

SEQ ID NO: 1464 - protein, 5 aa, Artificial Sequence
  Description of Artificial Sequence: Synthetic peptide
  XENP019890 vhCDR1
SYTMH

SEQ ID NO: 1465 - protein, 17 aa, Artificial Sequence
  Description of Artificial Sequence: Synthetic peptide
  XENP019890 vhCDR2
FISYDGNNKYYADSVKG

SEQ ID NO: 1466 - protein, 9 aa, Artificial Sequence
  Description of Artificial Sequence: Synthetic peptide
  XENP019890 vhCDR3
TGWLGPFDY

SEQ ID NO: 1467 - protein, 12 aa, Artificial Sequence
  Description of Artificial Sequence: Synthetic peptide
  XENP019890 vlCDR1
RASQSVGSSYLA

SEQ ID NO: 1468 - protein, 7 aa, Artificial Sequence
  Description of Artificial Sequence: Synthetic peptide
  XENP019890 vlCDR2
GAFSRAT

SEQ ID NO: 1469 - protein, 9 aa, Artificial Sequence
  Description of Artificial Sequence: Synthetic peptide
  XENP019890 vlCDR3
QQYGSSPWT

SEQ ID NO: 1470 - protein, 246 aa, Artificial Sequence
  Description of Artificial Sequence: Synthetic polypeptide
  XENP019891 [CTLA-4]_H0_L0.7_scFv(GKPGS)4
QVQLVESGGGVVQPGRSLRLSCAASGFTFSSYTMHWVRQAPGKGLEWVTFISYDGNNKYYADSVKGRFTISRDNSKNTLYLQMNSLRAEDTAIYYCARTGWLGPFDYWGQGTLVTVSSGKPGSGKPGSGKPGSGKPGSEIVMTQSPGTLSLSPGERATLSCRASQSVGSSYLAWYQQKPGQAPRLLIYGAFSRATGIPDRFSGSGSGTDFTLTISRLEPEDFAVYYCQQYGSSPWTFGQGTKVEIK

SEQ ID NO: 1471 - protein, 118 aa, Artificial Sequence; identical to SEQ ID NO: 22
  Description of Artificial Sequence: Synthetic polypeptide
  VH of XENP019891

SEQ ID NO: 1472 - protein, 108 aa, Artificial Sequence
  Description of Artificial Sequence: Synthetic polypeptide
  VL of XENP019891
EIVMTQSPGTLSLSPGERATLSCRASQSVGSSYLAWYQQKPGQAPRLLIYGAFSRATGIPDRFSGSGSGTDFTLTISRLEPEDFAVYYCQQYGSSPWTFGQGTKVEIK

SEQ ID NO: 1473 - protein, 5 aa, Artificial Sequence
  Description of Artificial Sequence: Synthetic peptide
  XENP019891 vhCDR1
SYTMH

SEQ ID NO: 1474 - protein, 17 aa, Artificial Sequence
  Description of Artificial Sequence: Synthetic peptide
  XENP019891 vhCDR2
FISYDGNNKYYADSVKG

SEQ ID NO: 1475 - protein, 9 aa, Artificial Sequence
  Description of Artificial Sequence: Synthetic peptide
  XENP019891 vhCDR3
TGWLGPFDY

SEQ ID NO: 1476 - protein, 12 aa, Artificial Sequence
  Description of Artificial Sequence: Synthetic peptide
  XENP019891 vlCDR1
RASQSVGSSYLA

SEQ ID NO: 1477 - protein, 7 aa, Artificial Sequence
  Description of Artificial Sequence: Synthetic peptide
  XENP019891 vlCDR2
GAFSRAT

SEQ ID NO: 1478 - protein, 9 aa, Artificial Sequence
  Description of Artificial Sequence: Synthetic peptide
  XENP019891 vlCDR3
QQYGSSPWT

SEQ ID NO: 1479 - protein, 246 aa, Artificial Sequence
  Description of Artificial Sequence: Synthetic polypeptide
  XENP019892 [CTLA-4]_H0_L0.8_scFv(GKPGS)4
QVQLVESGGGVVQPGRSLRLSCAASGFTFSSYTMHWVRQAPGKGLEWVTFISYDGNNKYYADSVKGRFTISRDNSKNTLYLQMNSLRAEDTAIYYCARTGWLGPFDYWGQGTLVTVSSGKPGSGKPGSGKPGSGKPGSEIVLTQSPATLSLSPGERATLSCRASQSVGSSYLAWYQQKPGQAPRLLIYGAFSRATGIPDRFSGSGSGTDFTLTISRLEPEDFAVYYCQQYGSSPWTFGQGTKVEIK

SEQ ID NO: 1480 - protein, 118 aa, Artificial Sequence; identical to SEQ ID NO: 22
  Description of Artificial Sequence: Synthetic polypeptide
  VH of XENP019892

SEQ ID NO: 1481 - protein, 108 aa, Artificial Sequence
  Description of Artificial Sequence: Synthetic polypeptide
  VL of XENP019892
EIVLTQSPATLSLSPGERATLSCRASQSVGSSYLAWYQQKPGQAPRLLIYGAFSRATGIPDRFSGSGSGTDFTLTISRLEPEDFAVYYCQQYGSSPWTFGQGTKVEIK

SEQ ID NO: 1482 - protein, 5 aa, Artificial Sequence
  Description of Artificial Sequence: Synthetic peptide
  XENP019892 vhCDR1
SYTMH

SEQ ID NO: 1483 - protein, 17 aa, Artificial Sequence
  Description of Artificial Sequence: Synthetic peptide
  XENP019892 vhCDR2
FISYDGNNKYYADSVKG

SEQ ID NO: 1484 - protein, 9 aa, Artificial Sequence
  Description of Artificial Sequence: Synthetic peptide
  XENP019892 vhCDR3
TGWLGPFDY

SEQ ID NO: 1485 - protein, 12 aa, Artificial Sequence
  Description of Artificial Sequence: Synthetic peptide
  XENP019892 vlCDR1
RASQSVGSSYLA

SEQ ID NO: 1486 - protein, 7 aa, Artificial Sequence
  Description of Artificial Sequence: Synthetic peptide
  XENP019892 vlCDR2
GAFSRAT

SEQ ID NO: 1487 - protein, 9 aa, Artificial Sequence
  Description of Artificial Sequence: Synthetic peptide
  XENP019892 vlCDR3
QQYGSSPWT

SEQ ID NO: 1488 - protein, 246 aa, Artificial Sequence
  Description of Artificial Sequence: Synthetic polypeptide
  XENP019893 [CTLA-4]_H0_L0.9_scFv(GKPGS)4
QVQLVESGGGVVQPGRSLRLSCAASGFTFSSYTMHWVRQAPGKGLEWVTFISYDGNNKYYADSVKGRFTISRDNSKNTLYLQMNSLRAEDTAIYYCARTGWLGPFDYWGQGTLVTVSSGKPGSGKPGSGKPGSGKPGSEIVLTQSPPTLSLSPGERATLSCRASQSVGSSYLAWYQQKPGQAPRLLIYGAFSRATGIPDRFSGSGSGTDFTLTISRLEPEDFAVYYCQQYGSSPWTFGQGTKVEIK

SEQ ID NO: 1489 - protein, 118 aa, Artificial Sequence; identical to SEQ ID NO: 22
  Description of Artificial Sequence: Synthetic polypeptide
  VH of XENP019893

SEQ ID NO: 1490 - protein, 108 aa, Artificial Sequence
  Description of Artificial Sequence: Synthetic polypeptide
  VL of XENP019893
EIVLTQSPPTLSLSPGERATLSCRASQSVGSSYLAWYQQKPGQAPRLLIYGAFSRATGIPDRFSGSGSGTDFTLTISRLEPEDFAVYYCQQYGSSPWTFGQGTKVEIK

SEQ ID NO: 1491 - protein, 5 aa, Artificial Sequence
  Description of Artificial Sequence: Synthetic peptide
  XENP019893 vhCDR1
SYTMH

SEQ ID NO: 1492 - protein, 17 aa, Artificial Sequence
  Description of Artificial Sequence: Synthetic peptide
  XENP019893 vhCDR2
FISYDGNNKYYADSVKG

SEQ ID NO: 1493 - protein, 9 aa, Artificial Sequence
  Description of Artificial Sequence: Synthetic peptide
  XENP019893 vhCDR3
TGWLGPFDY

SEQ ID NO: 1494 - protein, 12 aa, Artificial Sequence
  Description of Artificial Sequence: Synthetic peptide
  XENP019893 vlCDR1
RASQSVGSSYLA

SEQ ID NO: 1495 - protein, 7 aa, Artificial Sequence
  Description of Artificial Sequence: Synthetic peptide
  XENP019893 vlCDR2
GAFSRAT

SEQ ID NO: 1496 - protein, 9 aa, Artificial Sequence
  Description of Artificial Sequence: Synthetic peptide
  XENP019893 vlCDR3
QQYGSSPWT

SEQ ID NO: 1497 - protein, 246 aa, Artificial Sequence
  Description of Artificial Sequence: Synthetic polypeptide
  XENP019894 [CTLA-4]_H0_L0.10_scFv(GKPGS)4
QVQLVESGGGVVQPGRSLRLSCAASGFTFSSYTMHWVRQAPGKGLEWVTFISYDGNNKYYADSVKGRFTISRDNSKNTLYLQMNSLRAEDTAIYYCARTGWLGPFDYWGQGTLVTVSSGKPGSGKPGSGKPGSGKPGSEIVLTQSPSTLSLSPGERATLSCRASQSVGSSYLAWYQQKPGQAPRLLIYGAFSRATGIPDRFSGSGSGTDFTLTISRLEPEDFAVYYCQQYGSSPWTFGQGTKVEIK

SEQ ID NO: 1498 - protein, 118 aa, Artificial Sequence; identical to SEQ ID NO: 22
  Description of Artificial Sequence: Synthetic polypeptide
  VH of XENP019894

SEQ ID NO: 1499 - protein, 108 aa, Artificial Sequence
  Description of Artificial Sequence: Synthetic polypeptide
  VL of XENP019894
EIVLTQSPSTLSLSPGERATLSCRASQSVGSSYLAWYQQKPGQAPRLLIYGAFSRATGIPDRFSGSGSGTDFTLTISRLEPEDFAVYYCQQYGSSPWTFGQGTKVEIK

SEQ ID NO: 1500 - protein, 5 aa, Artificial Sequence
  Description of Artificial Sequence: Synthetic peptide
  XENP019894 vhCDR1
SYTMH

SEQ ID NO: 1501 - protein, 17 aa, Artificial Sequence
  Description of Artificial Sequence: Synthetic peptide
  XENP019894 vhCDR2
FISYDGNNKYYADSVKG

SEQ ID NO: 1502 - protein, 9 aa, Artificial Sequence
  Description of Artificial Sequence: Synthetic peptide
  XENP019894 vhCDR3
TGWLGPFDY

SEQ ID NO: 1503 - protein, 12 aa, Artificial Sequence
  Description of Artificial Sequence: Synthetic peptide
  XENP019894 vlCDR1
RASQSVGSSYLA

SEQ ID NO: 1504 - protein, 7 aa, Artificial Sequence
  Description of Artificial Sequence: Synthetic peptide
  XENP019894 vlCDR2
GAFSRAT

SEQ ID NO: 1505 - protein, 9 aa, Artificial Sequence
  Description of Artificial Sequence: Synthetic peptide
  XENP019894 vlCDR3
QQYGSSPWT

SEQ ID NO: 1506 - protein, 246 aa, Artificial Sequence
  Description of Artificial Sequence: Synthetic polypeptide
  XENP019895 [CTLA-4]_H0_L0.11_scFv(GKPGS)4
QVQLVESGGGVVQPGRSLRLSCAASGFTFSSYTMHWVRQAPGKGLEWVTFISYDGNNKYYADSVKGRFTISRDNSKNTLYLQMNSLRAEDTAIYYCARTGWLGPFDYWGQGTLVTVSSGKPGSGKPGSGKPGSGKPGSEIVLTQSPGSLSLSPGERATLSCRASQSVGSSYLAWYQQKPGQAPRLLIYGAFSRATGIPDRFSGSGSGTDFTLTISRLEPEDFAVYYCQQYGSSPWTFGQGTKVEIK

SEQ ID NO: 1507 - protein, 118 aa, Artificial Sequence; identical to SEQ ID NO: 22
  Description of Artificial Sequence: Synthetic polypeptide
  VH of XENP019895

SEQ ID NO: 1508 - protein, 108 aa, Artificial Sequence
  Description of Artificial Sequence: Synthetic polypeptide
  VL of XENP019895
EIVLTQSPGSLSLSPGERATLSCRASQSVGSSYLAWYQQKPGQAPRLLIYGAFSRATGIPDRFSGSGSGTDFTLTISRLEPEDFAVYYCQQYGSSPWTFGQGTKVEIK

SEQ ID NO: 1509 - protein, 5 aa, Artificial Sequence
  Description of Artificial Sequence: Synthetic peptide
  XENP019895 vhCDR1
SYTMH

SEQ ID NO: 1510 - protein, 17 aa, Artificial Sequence
  Description of Artificial Sequence: Synthetic peptide
  XENP019895 vhCDR2
FISYDGNNKYYADSVKG

SEQ ID NO: 1511 - protein, 9 aa, Artificial Sequence
  Description of Artificial Sequence: Synthetic peptide
  XENP019895 vhCDR3
TGWLGPFDY

SEQ ID NO: 1512 - protein, 12 aa, Artificial Sequence
  Description of Artificial Sequence: Synthetic peptide
  XENP019895 vlCDR1
RASQSVGSSYLA

SEQ ID NO: 1513 - protein, 7 aa, Artificial Sequence
  Description of Artificial Sequence: Synthetic peptide
  XENP019895 vlCDR2
GAFSRAT

SEQ ID NO: 1514 - protein, 9 aa, Artificial Sequence
  Description of Artificial Sequence: Synthetic peptide
  XENP019895 vlCDR3
QQYGSSPWT

SEQ ID NO: 1515 - protein, 246 aa, Artificial Sequence
  Description of Artificial Sequence: Synthetic polypeptide
  XENP019896 [CTLA-4]_H0_L0.12_scFv(GKPGS)4
QVQLVESGGGVVQPGRSLRLSCAASGFTFSSYTMHWVRQAPGKGLEWVTFISYDGNNKYYADSVKGRFTISRDNSKNTLYLQMNSLRAEDTAIYYCARTGWLGPFDYWGQGTLVTVSSGKPGSGKPGSGKPGSGKPGSEIVLTQSPGTLSVSPGERATLSCRASQSVGSSYLAWYQQKPGQAPRLLIYGAFSRATGIPDRFSGSGSGTDFTLTISRLEPEDFAVYYCQQYGSSPWTFGQGTKVEIK

SEQ ID NO: 1516 - protein, 118 aa, Artificial Sequence; identical to SEQ ID NO: 22
  Description of Artificial Sequence: Synthetic polypeptide
  VH of XENP019896

SEQ ID NO: 1517 - protein, 108 aa, Artificial Sequence
  Description of Artificial Sequence: Synthetic polypeptide
  VL of XENP019896
EIVLTQSPGTLSVSPGERATLSCRASQSVGSSYLAWYQQKPGQAPRLLIYGAFSRATGIPDRFSGSGSGTDFTLTISRLEPEDFAVYYCQQYGSSPWTFGQGTKVEIK

SEQ ID NO: 1518 - protein, 5 aa, Artificial Sequence
  Description of Artificial Sequence: Synthetic peptide
  XENP019896 vhCDR1
SYTMH

SEQ ID NO: 1519 - protein, 17 aa, Artificial Sequence
  Description of Artificial Sequence: Synthetic peptide
  XENP019896 vhCDR2
FISYDGNNKYYADSVKG

SEQ ID NO: 1520 - protein, 9 aa, Artificial Sequence
  Description of Artificial Sequence: Synthetic peptide
  XENP019896 vhCDR3
TGWLGPFDY

SEQ ID NO: 1521 - protein, 12 aa, Artificial Sequence
  Description of Artificial Sequence: Synthetic peptide
  XENP019896 vlCDR1
RASQSVGSSYLA

SEQ ID NO: 1522 - protein, 7 aa, Artificial Sequence
  Description of Artificial Sequence: Synthetic peptide
  XENP019896 vlCDR2
GAFSRAT

SEQ ID NO: 1523 - protein, 9 aa, Artificial Sequence
  Description of Artificial Sequence: Synthetic peptide
  XENP019896 vlCDR3
QQYGSSPWT

SEQ ID NO: 1524 - protein, 246 aa, Artificial Sequence
  Description of Artificial Sequence: Synthetic polypeptide
  XENP019901 [CTLA-4]_H0_L0.13_scFv(GKPGS)4
QVQLVESGGGVVQPGRSLRLSCAASGFTFSSYTMHWVRQAPGKGLEWVTFISYDGNNKYYADSVKGRFTISRDNSKNTLYLQMNSLRAEDTAIYYCARTGWLGPFDYWGQGTLVTVSSGKPGSGKPGSGKPGSGKPGSEIVLTQSPGTLSLSPGEPATLSCRASQSVGSSYLAWYQQKPGQAPRLLIYGAFSRATGIPDRFSGSGSGTDFTLTISRLEPEDFAVYYCQQYGSSPWTFGQGTKVEIK

SEQ ID NO: 1525 - protein, 118 aa, Artificial Sequence; identical to SEQ ID NO: 22
  Description of Artificial Sequence: Synthetic polypeptide
  VH of XENP019901

SEQ ID NO: 1526 - protein, 108 aa, Artificial Sequence
  Description of Artificial Sequence: Synthetic polypeptide
  VL of XENP019901
EIVLTQSPGTLSLSPGEPATLSCRASQSVGSSYLAWYQQKPGQAPRLLIYGAFSRATGIPDRFSGSGSGTDFTLTISRLEPEDFAVYYCQQYGSSPWTFGQGTKVEIK

SEQ ID NO: 1527 - protein, 5 aa, Artificial Sequence
  Description of Artificial Sequence: Synthetic peptide
  XENP019901 vhCDR1
SYTMH

SEQ ID NO: 1528 - protein, 17 aa, Artificial Sequence
  Description of Artificial Sequence: Synthetic peptide
  XENP019901 vhCDR2
FISYDGNNKYYADSVKG

SEQ ID NO: 1529 - protein, 9 aa, Artificial Sequence
  Description of Artificial Sequence: Synthetic peptide
  XENP019901 vhCDR3
TGWLGPFDY

SEQ ID NO: 1530 - protein, 12 aa, Artificial Sequence
  Description of Artificial Sequence: Synthetic peptide
  XENP019901 vlCDR1
RASQSVGSSYLA

SEQ ID NO: 1531 - protein, 7 aa, Artificial Sequence
  Description of Artificial Sequence: Synthetic peptide
  XENP019901 vlCDR2
GAFSRAT

SEQ ID NO: 1532 - protein, 9 aa, Artificial Sequence
  Description of Artificial Sequence: Synthetic peptide
  XENP019901 vlCDR3
QQYGSSPWT

SEQ ID NO: 1533 - protein, 246 aa, Artificial Sequence
  Description of Artificial Sequence: Synthetic polypeptide
  XENP019902 [CTLA-4]_H0_L0.14_scFv(GKPGS)4
QVQLVESGGGVVQPGRSLRLSCAASGFTFSSYTMHWVRQAPGKGLEWVTFISYDGNNKYYADSVKGRFTISRDNSKNTLYLQMNSLRAEDTAIYYCARTGWLGPFDYWGQGTLVTVSSGKPGSGKPGSGKPGSGKPGSEIVLTQSPGTLSLSPGEQATLSCRASQSVGSSYLAWYQQKPGQAPRLLIYGAFSRATGIPDRFSGSGSGTDFTLTISRLEPEDFAVYYCQQYGSSPWTFGQGTKVEIK

SEQ ID NO: 1534 - protein, 118 aa, Artificial Sequence; identical to SEQ ID NO: 22
  Description of Artificial Sequence: Synthetic polypeptide
  VH of XENP019902

SEQ ID NO: 1535 - protein, 108 aa, Artificial Sequence
  Description of Artificial Sequence: Synthetic polypeptide
  VL of XENP019902
EIVLTQSPGTLSLSPGEQATLSCRASQSVGSSYLAWYQQKPGQAPRLLIYGAFSRATGIPDRFSGSGSGTDFTLTISRLEPEDFAVYYCQQYGSSPWTFGQGTKVEIK

SEQ ID NO: 1536 - protein, 5 aa, Artificial Sequence
  Description of Artificial Sequence: Synthetic peptide
  XENP019902 vhCDR1
SYTMH

SEQ ID NO: 1537 - protein, 17 aa, Artificial Sequence
  Description of Artificial Sequence: Synthetic peptide
  XENP019902 vhCDR2
FISYDGNNKYYADSVKG

SEQ ID NO: 1538 - protein, 9 aa, Artificial Sequence
  Description of Artificial Sequence: Synthetic peptide
  XENP019902 vhCDR3
TGWLGPFDY

SEQ ID NO: 1539 - protein, 12 aa, Artificial Sequence
  Description of Artificial Sequence: Synthetic peptide
  XENP019902 vlCDR1
RASQSVGSSYLA

SEQ ID NO: 1540 - protein, 7 aa, Artificial Sequence
  Description of Artificial Sequence: Synthetic peptide
  XENP019902 vlCDR2
GAFSRAT

SEQ ID NO: 1541 - protein, 9 aa, Artificial Sequence
  Description of Artificial Sequence: Synthetic peptide
  XENP019902 vlCDR3
QQYGSSPWT

SEQ ID NO: 1542 - protein, 246 aa, Artificial Sequence
  Description of Artificial Sequence: Synthetic polypeptide
  XENP019903 [CTLA-4]_H0_L0.15_scFv(GKPGS)4
QVQLVESGGGVVQPGRSLRLSCAASGFTFSSYTMHWVRQAPGKGLEWVTFISYDGNNKYYADSVKGRFTISRDNSKNTLYLQMNSLRAEDTAIYYCARTGWLGPFDYWGQGTLVTVSSGKPGSGKPGSGKPGSGKPGSEIVLTQSPGTLSLSPGERVTLSCRASQSVGSSYLAWYQQKPGQAPRLLIYGAFSRATGIPDRFSGSGSGTDFTLTISRLEPEDFAVYYCQQYGSSPWTFGQGTKVEIK

SEQ ID NO: 1543 - protein, 118 aa, Artificial Sequence; identical to SEQ ID NO: 22
  Description of Artificial Sequence: Synthetic polypeptide
  VH of XENP019903

SEQ ID NO: 1544 - protein, 108 aa, Artificial Sequence
  Description of Artificial Sequence: Synthetic polypeptide
  VL of XENP019903
EIVLTQSPGTLSLSPGERVTLSCRASQSVGSSYLAWYQQKPGQAPRLLIYGAFSRATGIPDRFSGSGSGTDFTLTISRLEPEDFAVYYCQQYGSSPWTFGQGTKVEIK

SEQ ID NO: 1545 - protein, 5 aa, Artificial Sequence
  Description of Artificial Sequence: Synthetic peptide
  XENP019903 vhCDR1
SYTMH

SEQ ID NO: 1546 - protein, 17 aa, Artificial Sequence
  Description of Artificial Sequence: Synthetic peptide
  XENP019903 vhCDR2
FISYDGNNKYYADSVKG

SEQ ID NO: 1547 - protein, 9 aa, Artificial Sequence
  Description of Artificial Sequence: Synthetic peptide
  XENP019903 vhCDR3
TGWLGPFDY

SEQ ID NO: 1548 - protein, 12 aa, Artificial Sequence
  Description of Artificial Sequence: Synthetic peptide
  XENP019903 vlCDR1
RASQSVGSSYLA

SEQ ID NO: 1549 - protein, 7 aa, Artificial Sequence
  Description of Artificial Sequence: Synthetic peptide
  XENP019903 vlCDR2
GAFSRAT

SEQ ID NO: 1550 - protein, 9 aa, Artificial Sequence
  Description of Artificial Sequence: Synthetic peptide
  XENP019903 vlCDR3
QQYGSSPWT

SEQ ID NO: 1551 - protein, 246 aa, Artificial Sequence
  Description of Artificial Sequence: Synthetic polypeptide
  XENP019904 [CTLA-4]_H0_L0.16_scFv(GKPGS)4
QVQLVESGGGVVQPGRSLRLSCAASGFTFSSYTMHWVRQAPGKGLEWVTFISYDGNNKYYADSVKGRFTISRDNSKNTLYLQMNSLRAEDTAIYYCARTGWLGPFDYWGQGTLVTVSSGKPGSGKPGSGKPGSGKPGSEIVLTQSPGTLSLSPGERASLSCRASQSVGSSYLAWYQQKPGQAPRLLIYGAFSRATGIPDRFSGSGSGTDFTLTISRLEPEDFAVYYCQQYGSSPWTFGQGTKVEIK

SEQ ID NO: 1552 - protein, 118 aa, Artificial Sequence; identical to SEQ ID NO: 22
  Description of Artificial Sequence: Synthetic polypeptide
  VH of XENP019904

SEQ ID NO: 1553 - protein, 108 aa, Artificial Sequence
  Description of Artificial Sequence: Synthetic polypeptide
  VL of XENP019904
EIVLTQSPGTLSLSPGERASLSCRASQSVGSSYLAWYQQKPGQAPRLLIYGAFSRATGIPDRFSGSGSGTDFTLTISRLEPEDFAVYYCQQYGSSPWTFGQGTKVEIK

SEQ ID NO: 1554 - protein, 5 aa, Artificial Sequence
  Description of Artificial Sequence: Synthetic peptide
  XENP019904 vhCDR1
SYTMH

SEQ ID NO: 1555 - protein, 17 aa, Artificial Sequence
  Description of Artificial Sequence: Synthetic peptide
  XENP019904 vhCDR2
FISYDGNNKYYADSVKG

SEQ ID NO: 1556 - protein, 9 aa, Artificial Sequence
  Description of Artificial Sequence: Synthetic peptide
  XENP019904 vhCDR3
TGWLGPFDY

SEQ ID NO: 1557 - protein, 12 aa, Artificial Sequence
  Description of Artificial Sequence: Synthetic peptide
  XENP019904 vlCDR1
RASQSVGSSYLA

SEQ ID NO: 1558 - protein, 7 aa, Artificial Sequence
  Description of Artificial Sequence: Synthetic peptide
  XENP019904 vlCDR2
GAFSRAT

SEQ ID NO: 1559 - protein, 9 aa, Artificial Sequence
  Description of Artificial Sequence: Synthetic peptide
  XENP019904 vlCDR3
QQYGSSPWT

SEQ ID NO: 1560 - protein, 246 aa, Artificial Sequence
  Description of Artificial Sequence: Synthetic polypeptide
  XENP019905 [CTLA-4]_H0_L0.17_scFv(GKPGS)4
QVQLVESGGGVVQPGRSLRLSCAASGFTFSSYTMHWVRQAPGKGLEWVTFISYDGNNKYYADSVKGRFTISRDNSKNTLYLQMNSLRAEDTAIYYCARTGWLGPFDYWGQGTLVTVSSGKPGSGKPGSGKPGSGKPGSEIVLTQSPGTLSLSPGERATISCRASQSVGSSYLAWYQQKPGQAPRLLIYGAFSRATGIPDRFSGSGSGTDFTLTISRLEPEDFAVYYCQQYGSSPWTFGQGTKVEIK

SEQ ID NO: 1561 - protein, 118 aa, Artificial Sequence; identical to SEQ ID NO: 22
  Description of Artificial Sequence: Synthetic polypeptide
  VH of XENP019905

SEQ ID NO: 1562 - protein, 108 aa, Artificial Sequence
  Description of Artificial Sequence: Synthetic polypeptide
  VL of XENP019905
EIVLTQSPGTLSLSPGERATISCRASQSVGSSYLAWYQQKPGQAPRLLIYGAFSRATGIPDRFSGSGSGTDFTLTISRLEPEDFAVYYCQQYGSSPWTFGQGTKVEIK

SEQ ID NO: 1563 - protein, 5 aa, Artificial Sequence
  Description of Artificial Sequence: Synthetic peptide
  XENP019905 vhCDR1
SYTMH

SEQ ID NO: 1564 - protein, 17 aa, Artificial Sequence
  Description of Artificial Sequence: Synthetic peptide
  XENP019905 vhCDR2
FISYDGNNKYYADSVKG

SEQ ID NO: 1565 - protein, 9 aa, Artificial Sequence
  Description of Artificial Sequence: Synthetic peptide
  XENP019905 vhCDR3
TGWLGPFDY

SEQ ID NO: 1566 - protein, 12 aa, Artificial Sequence
  Description of Artificial Sequence: Synthetic peptide
  XENP019905 vlCDR1
RASQSVGSSYLA

SEQ ID NO: 1567 - protein, 7 aa, Artificial Sequence
  Description of Artificial Sequence: Synthetic peptide
  XENP019905 vlCDR2
GAFSRAT

SEQ ID NO: 1568 - protein, 9 aa, Artificial Sequence
  Description of Artificial Sequence: Synthetic peptide
  XENP019905 vlCDR3
QQYGSSPWT

SEQ ID NO: 1569 - protein, 246 aa, Artificial Sequence
  Description of Artificial Sequence: Synthetic polypeptide
  XENP019906 [CTLA-4]_H0_L0.18_scFv(GKPGS)4
QVQLVESGGGVVQPGRSLRLSCAASGFTFSSYTMHWVRQAPGKGLEWVTFISYDGNNKYYADSVKGRFTISRDNSKNTLYLQMNSLRAEDTAIYYCARTGWLGPFDYWGQGTLVTVSSGKPGSGKPGSGKPGSGKPGSEIVLTQSPGTLSLSPGERATLSCRSSQSVGSSYLAWYQQKPGQAPRLLIYGAFSRATGIPDRFSGSGSGTDFTLTISRLEPEDFAVYYCQQYGSSPWTFGQGTKVEIK

SEQ ID NO: 1570 - protein, 118 aa, Artificial Sequence; identical to SEQ ID NO: 22
  Description of Artificial Sequence: Synthetic polypeptide
  VH of XENP019906

SEQ ID NO: 1571 - protein, 108 aa, Artificial Sequence
  Description of Artificial Sequence: Synthetic polypeptide
  VL of XENP019906
EIVLTQSPGTLSLSPGERATLSCRSSQSVGSSYLAWYQQKPGQAPRLLIYGAFSRATGIPDRFSGSGSGTDFTLTISRLEPEDFAVYYCQQYGSSPWTFGQGTKVEIK

SEQ ID NO: 1572 - protein, 5 aa, Artificial Sequence
  Description of Artificial Sequence: Synthetic peptide
  XENP019906 vhCDR1
SYTMH

SEQ ID NO: 1573 - protein, 17 aa, Artificial Sequence
  Description of Artificial Sequence: Synthetic peptide
  XENP019906 vhCDR2
FISYDGNNKYYADSVKG

SEQ ID NO: 1574 - protein, 9 aa, Artificial Sequence
  Description of Artificial Sequence: Synthetic peptide
  XENP019906 vhCDR3
TGWLGPFDY

SEQ ID NO: 1575 - protein, 12 aa, Artificial Sequence
  Description of Artificial Sequence: Synthetic peptide
  XENP019906 vlCDR1
RSSQSVGSSYLA

SEQ ID NO: 1576 - protein, 7 aa, Artificial Sequence
  Description of Artificial Sequence: Synthetic peptide
  XENP019906 vlCDR2
GAFSRAT

SEQ ID NO: 1577 - protein, 9 aa, Artificial Sequence
  Description of Artificial Sequence: Synthetic peptide
  XENP019906 vlCDR3
QQYGSSPWT

SEQ ID NO: 1578 - protein, 246 aa, Artificial Sequence
  Description of Artificial Sequence: Synthetic polypeptide
  XENP019907 [CTLA-4]_H0_L0.19_scFv(GKPGS)4
QVQLVESGGGVVQPGRSLRLSCAASGFTFSSYTMHWVRQAPGKGLEWVTFISYDGNNKYYADSVKGRFTISRDNSKNTLYLQMNSLRAEDTAIYYCARTGWLGPFDYWGQGTLVTVSSGKPGSGKPGSGKPGSGKPGSEIVLTQSPGTLSLSPGERATLSCRASQSDGSSYLAWYQQKPGQAPRLLIYGAFSRATGIPDRFSGSGSGTDFTLTISRLEPEDFAVYYCQQYGSSPWTFGQGTKVEIK

SEQ ID NO: 1579 - protein, 118 aa, Artificial Sequence; identical to SEQ ID NO: 22
  Description of Artificial Sequence: Synthetic polypeptide
  VH of XENP019907

SEQ ID NO: 1580 - protein, 108 aa, Artificial Sequence
  Description of Artificial Sequence: Synthetic polypeptide
  VL of XENP019907
EIVLTQSPGTLSLSPGERATLSCRASQSDGSSYLAWYQQKPGQAPRLLIYGAFSRATGIPDRFSGSGSGTDFTLTISRLEPEDFAVYYCQQYGSSPWTFGQGTKVEIK

SEQ ID NO: 1581 - protein, 5 aa, Artificial Sequence
  Description of Artificial Sequence: Synthetic peptide
  XENP019907 vhCDR1
SYTMH

SEQ ID NO: 1582 - protein, 17 aa, Artificial Sequence
  Description of Artificial Sequence: Synthetic peptide
  XENP019907 vhCDR2
FISYDGNNKYYADSVKG

SEQ ID NO: 1583 - protein, 9 aa, Artificial Sequence
  Description of Artificial Sequence: Synthetic peptide
  XENP019907 vhCDR3
TGWLGPFDY

SEQ ID NO: 1584 - protein, 12 aa, Artificial Sequence
  Description of Artificial Sequence: Synthetic peptide
  XENP019907 vlCDR1
RASQSDGSSYLA

SEQ ID NO: 1585 - protein, 7 aa, Artificial Sequence
  Description of Artificial Sequence: Synthetic peptide
  XENP019907 vlCDR2
GAFSRAT

SEQ ID NO: 1586 - protein, 9 aa, Artificial Sequence
  Description of Artificial Sequence: Synthetic peptide
  XENP019907 vlCDR3
QQYGSSPWT

SEQ ID NO: 1587 - protein, 246 aa, Artificial Sequence
  Description of Artificial Sequence: Synthetic polypeptide
  XENP019908 [CTLA-4]_H0_L0.20_scFv(GKPGS)4
QVQLVESGGGVVQPGRSLRLSCAASGFTFSSYTMHWVRQAPGKGLEWVTFISYDGNNKYYADSVKGRFTISRDNSKNTLYLQMNSLRAEDTAIYYCARTGWLGPFDYWGQGTLVTVSSGKPGSGKPGSGKPGSGKPGSEIVLTQSPGTLSLSPGERATLSCRASQSSGSSYLAWYQQKPGQAPRLLIYGAFSRATGIPDRFSGSGSGTDFTLTISRLEPEDFAVYYCQQYGSSPWTFGQGTKVEIK

SEQ ID NO: 1588 - protein, 118 aa, Artificial Sequence; identical to SEQ ID NO: 22
  Description of Artificial Sequence: Synthetic polypeptide
  VH of XENP019908

SEQ ID NO: 1589 - protein, 108 aa, Artificial Sequence
  Description of Artificial Sequence: Synthetic polypeptide
  VL of XENP019908
EIVLTQSPGTLSLSPGERATLSCRASQSSGSSYLAWYQQKPGQAPRLLIYGAFSRATGIPDRFSGSGSGTDFTLTISRLEPEDFAVYYCQQYGSSPWTFGQGTKVEIK

SEQ ID NO: 1590 - protein, 5 aa, Artificial Sequence
  Description of Artificial Sequence: Synthetic peptide
  XENP019908 vhCDR1
SYTMH

SEQ ID NO: 1591 - protein, 17 aa, Artificial Sequence
  Description of Artificial Sequence: Synthetic peptide
  XENP019908 vhCDR2
FISYDGNNKYYADSVKG

SEQ ID NO: 1592 - protein, 9 aa, Artificial Sequence
  Description of Artificial Sequence: Synthetic peptide
  XENP019908 vhCDR3
TGWLGPFDY

SEQ ID NO: 1593 - protein, 12 aa, Artificial Sequence
  Description of Artificial Sequence: Synthetic peptide
  XENP019908 vlCDR1
RASQSSGSSYLA

SEQ ID NO: 1594 - protein, 7 aa, Artificial Sequence
  Description of Artificial Sequence: Synthetic peptide
  XENP019908 vlCDR2
GAFSRAT

SEQ ID NO: 1595 - protein, 9 aa, Artificial Sequence
  Description of Artificial Sequence: Synthetic peptide
  XENP019908 vlCDR3
QQYGSSPWT

SEQ ID NO: 1596 - protein, 246 aa, Artificial Sequence
  Description of Artificial Sequence: Synthetic polypeptide
  XENP019909 [CTLA-4]_H0_L0.21_scFv(GKPGS)4
QVQLVESGGGVVQPGRSLRLSCAASGFTFSSYTMHWVRQAPGKGLEWVTFISYDGNNKYYADSVKGRFTISRDNSKNTLYLQMNSLRAEDTAIYYCARTGWLGPFDYWGQGTLVTVSSGKPGSGKPGSGKPGSGKPGSEIVLTQSPGTLSLSPGERATLSCRASQSVASSYLAWYQQKPGQAPRLLIYGAFSRATGIPDRFSGSGSGTDFTLTISRLEPEDFAVYYCQQYGSSPWTFGQGTKVEIK

SEQ ID NO: 1597 - protein, 118 aa, Artificial Sequence; identical to SEQ ID NO: 22
  Description of Artificial Sequence: Synthetic polypeptide
  VH of XENP019909

SEQ ID NO: 1598 - protein, 108 aa, Artificial Sequence
  Description of Artificial Sequence: Synthetic polypeptide
  VL of XENP019909
EIVLTQSPGTLSLSPGERATLSCRASQSVASSYLAWYQQKPGQAPRLLIYGAFSRATGIPDRFSGSGSGTDFTLTISRLEPEDFAVYYCQQYGSSPWTFGQGTKVEIK

SEQ ID NO: 1599 - protein, 5 aa, Artificial Sequence
  Description of Artificial Sequence: Synthetic peptide
  XENP019909 vhCDR1
SYTMH

SEQ ID NO: 1600 - protein, 17 aa, Artificial Sequence
  Description of Artificial Sequence: Synthetic peptide
  XENP019909 vhCDR2
FISYDGNNKYYADSVKG

SEQ ID NO: 1601 - protein, 9 aa, Artificial Sequence
  Description of Artificial Sequence: Synthetic peptide
  XENP019909 vhCDR3
TGWLGPFDY

SEQ ID NO: 1602 - protein, 12 aa, Artificial Sequence
  Description of Artificial Sequence: Synthetic peptide
  XENP019909 vlCDR1
RASQSVASSYLA

SEQ ID NO: 1603 - protein, 7 aa, Artificial Sequence
  Description of Artificial Sequence: Synthetic peptide
  XENP019909 vlCDR2
GAFSRAT

SEQ ID NO: 1604 - protein, 9 aa, Artificial Sequence
  Description of Artificial Sequence: Synthetic peptide
  XENP019909 vlCDR3
QQYGSSPWT

SEQ ID NO: 1605 - protein, 246 aa, Artificial Sequence
  Description of Artificial Sequence: Synthetic polypeptide
  XENP019910 [CTLA-4]_H0_L0.22_scFv(GKPGS)4
QVQLVESGGGVVQPGRSLRLSCAASGFTFSSYTMHWVRQAPGKGLEWVTFISYDGNNKYYADSVKGRFTISRDNSKNTLYLQMNSLRAEDTAIYYCARTGWLGPFDYWGQGTLVTVSSGKPGSGKPGSGKPGSGKPGSEIVLTQSPGTLSLSPGERATLSCRASQSVSSSYLAWYQQKPGQAPRLLIYGAFSRATGIPDRFSGSGSGTDFTLTISRLEPEDFAVYYCQQYGSSPWTFGQGTKVEIK

SEQ ID NO: 1606 - protein, 118 aa, Artificial Sequence; identical to SEQ ID NO: 22
  Description of Artificial Sequence: Synthetic polypeptide
  VH of XENP019910

SEQ ID NO: 1607 - protein, 108 aa, Artificial Sequence
  Description of Artificial Sequence: Synthetic polypeptide
  VL of XENP019910
EIVLTQSPGTLSLSPGERATLSCRASQSVSSSYLAWYQQKPGQAPRLLIYGAFSRATGIPDRFSGSGSGTDFTLTISRLEPEDFAVYYCQQYGSSPWTFGQGTKVEIK

SEQ ID NO: 1608 - protein, 5 aa, Artificial Sequence
  Description of Artificial Sequence: Synthetic peptide
  XENP019910 vhCDR1
SYTMH

SEQ ID NO: 1609 - protein, 17 aa, Artificial Sequence
  Description of Artificial Sequence: Synthetic peptide
  XENP019910 vhCDR2
FISYDGNNKYYADSVKG

SEQ ID NO: 1610 - protein, 9 aa, Artificial Sequence
  Description of Artificial Sequence: Synthetic peptide
  XENP019910 vhCDR3
TGWLGPFDY

SEQ ID NO: 1611 - protein, 12 aa, Artificial Sequence
  Description of Artificial Sequence: Synthetic peptide
  XENP019910 vlCDR1
RASQSVSSSYLA

SEQ ID NO: 1612 - protein, 7 aa, Artificial Sequence
  Description of Artificial Sequence: Synthetic peptide
  XENP019910 vlCDR2
GAFSRAT

SEQ ID NO: 1613 - protein, 9 aa, Artificial Sequence
  Description of Artificial Sequence: Synthetic peptide
  XENP019910 vlCDR3
QQYGSSPWT

SEQ ID NO: 1614 - protein, 246 aa, Artificial Sequence
  Description of Artificial Sequence: Synthetic polypeptide
  XENP019911 [CTLA-4]_H0_L0.23_scFv(GKPGS)4
QVQLVESGGGVVQPGRSLRLSCAASGFTFSSYTMHWVRQAPGKGLEWVTFISYDGNNKYYADSVKGRFTISRDNSKNTLYLQMNSLRAEDTAIYYCARTGWLGPFDYWGQGTLVTVSSGKPGSGKPGSGKPGSGKPGSEIVLTQSPGTLSLSPGERATLSCRASQSVTSSYLAWYQQKPGQAPRLLIYGAFSRATGIPDRFSGSGSGTDFTLTISRLEPEDFAVYYCQQYGSSPWTFGQGTKVEIK

SEQ ID NO: 1615 - protein, 118 aa, Artificial Sequence; identical to SEQ ID NO: 22
  Description of Artificial Sequence: Synthetic polypeptide
  VH of XENP019911

SEQ ID NO: 1616 - protein, 108 aa, Artificial Sequence
  Description of Artificial Sequence: Synthetic polypeptide
  VL of XENP019911
EIVLTQSPGTLSLSPGERATLSCRASQSVTSSYLAWYQQKPGQAPRLLIYGAFSRATGIPDRFSGSGSGTDFTLTISRLEPEDFAVYYCQQYGSSPWTFGQGTKVEIK

SEQ ID NO: 1617 - protein, 5 aa, Artificial Sequence
  Description of Artificial Sequence: Synthetic peptide
  XENP019911 vhCDR1
SYTMH

SEQ ID NO: 1618 - protein, 17 aa, Artificial Sequence
  Description of Artificial Sequence: Synthetic peptide
  XENP019911 vhCDR2
FISYDGNNKYYADSVKG

SEQ ID NO: 1619 - protein, 9 aa, Artificial Sequence
  Description of Artificial Sequence: Synthetic peptide
  XENP019911 vhCDR3
TGWLGPFDY

SEQ ID NO: 1620 - protein, 12 aa, Artificial Sequence
  Description of Artificial Sequence: Synthetic peptide
  XENP019911 vlCDR1
RASQSVTSSYLA

SEQ ID NO: 1621 - protein, 7 aa, Artificial Sequence
  Description of Artificial Sequence: Synthetic peptide
  XENP019911 vlCDR2
GAFSRAT

SEQ ID NO: 1622 - protein, 9 aa, Artificial Sequence
  Description of Artificial Sequence: Synthetic peptide
  XENP019911 vlCDR3
QQYGSSPWT

SEQ ID NO: 1623 - protein, 246 aa, Artificial Sequence
  Description of Artificial Sequence: Synthetic polypeptide
  XENP019912 [CTLA-4]_H0_L0.24_scFv(GKPGS)4
QVQLVESGGGVVQPGRSLRLSCAASGFTFSSYTMHWVRQAPGKGLEWVTFISYDGNNKYYADSVKGRFTISRDNSKNTLYLQMNSLRAEDTAIYYCARTGWLGPFDYWGQGTLVTVSSGKPGSGKPGSGKPGSGKPGSEIVLTQSPGTLSLSPGERATLSCRASQSVGASYLAWYQQKPGQAPRLLIYGAFSRATGIPDRFSGSGSGTDFTLTISRLEPEDFAVYYCQQYGSSPWTFGQGTKVEIK

SEQ ID NO: 1624 - protein, 118 aa, Artificial Sequence; identical to SEQ ID NO: 22
  Description of Artificial Sequence: Synthetic polypeptide
  VH of XENP019912

SEQ ID NO: 1625 - protein, 108 aa, Artificial Sequence
  Description of Artificial Sequence: Synthetic polypeptide
  VL of XENP019912
EIVLTQSPGTLSLSPGERATLSCRASQSVGASYLAWYQQKPGQAPRLLIYGAFSRATGIPDRFSGSGSGTDFTLTISRLEPEDFAVYYCQQYGSSPWTFGQGTKVEIK

SEQ ID NO: 1626 - protein, 5 aa, Artificial Sequence
  Description of Artificial Sequence: Synthetic peptide
  XENP019912 vhCDR1
SYTMH

SEQ ID NO: 1627 - protein, 17 aa, Artificial Sequence
  Description of Artificial Sequence: Synthetic peptide
  XENP019912 vhCDR2
FISYDGNNKYYADSVKG

SEQ ID NO: 1628 - protein, 9 aa, Artificial Sequence
  Description of Artificial Sequence: Synthetic peptide
  XENP019912 vhCDR3
TGWLGPFDY

SEQ ID NO: 1629 - protein, 12 aa, Artificial Sequence
  Description of Artificial Sequence: Synthetic peptide
  XENP019912 vlCDR1
RASQSVGASYLA

SEQ ID NO: 1630 - protein, 7 aa, Artificial Sequence
  Description of Artificial Sequence: Synthetic peptide
  XENP019912 vlCDR2
GAFSRAT

SEQ ID NO: 1631 - protein, 9 aa, Artificial Sequence
  Description of Artificial Sequence: Synthetic peptide
  XENP019912 vlCDR3
QQYGSSPWT

SEQ ID NO: 1632 - protein, 246 aa, Artificial Sequence
  Description of Artificial Sequence: Synthetic polypeptide
  XENP019913 [CTLA-4]_H0_L0.25_scFv(GKPGS)4
QVQLVESGGGVVQPGRSLRLSCAASGFTFSSYTMHWVRQAPGKGLEWVTFISYDGNNKYYADSVKGRFTISRDNSKNTLYLQMNSLRAEDTAIYYCARTGWLGPFDYWGQGTLVTVSSGKPGSGKPGSGKPGSGKPGSEIVLTQSPGTLSLSPGERATLSCRASQSVGGSYLAWYQQKPGQAPRLLIYGAFSRATGIPDRFSGSGSGTDFTLTISRLEPEDFAVYYCQQYGSSPWTFGQGTKVEIK

SEQ ID NO: 1633 - protein, 118 aa, Artificial Sequence; identical to SEQ ID NO: 22
  Description of Artificial Sequence: Synthetic polypeptide
  VH of XENP019913

SEQ ID NO: 1634 - protein, 108 aa, Artificial Sequence
  Description of Artificial Sequence: Synthetic polypeptide
  VL of XENP019913
EIVLTQSPGTLSLSPGERATLSCRASQSVGGSYLAWYQQKPGQAPRLLIYGAFSRATGIPDRFSGSGSGTDFTLTISRLEPEDFAVYYCQQYGSSPWTFGQGTKVEIK

SEQ ID NO: 1635 - protein, 5 aa, Artificial Sequence
  Description of Artificial Sequence: Synthetic peptide
  XENP019913 vhCDR1
SYTMH

SEQ ID NO: 1636 - protein, 17 aa, Artificial Sequence
  Description of Artificial Sequence: Synthetic peptide
  XENP019913 vhCDR2
FISYDGNNKYYADSVKG

SEQ ID NO: 1637 - protein, 9 aa, Artificial Sequence
  Description of Artificial Sequence: Synthetic peptide
  XENP019913 vhCDR3
TGWLGPFDY

SEQ ID NO: 1638 - protein, 12 aa, Artificial Sequence
  Description of Artificial Sequence: Synthetic peptide
  XENP019913 vlCDR1
RASQSVGGSYLA

SEQ ID NO: 1639 - protein, 7 aa, Artificial Sequence
  Description of Artificial Sequence: Synthetic peptide
  XENP019913 vlCDR2
GAFSRAT

SEQ ID NO: 1640 - protein, 9 aa, Artificial Sequence
  Description of Artificial Sequence: Synthetic peptide
  XENP019913 vlCDR3
QQYGSSPWT

SEQ ID NO: 1641 - protein, 246 aa, Artificial Sequence
  Description of Artificial Sequence: Synthetic polypeptide
  XENP019914 [CTLA-4]_H0_L0.26_scFv(GKPGS)4
QVQLVESGGGVVQPGRSLRLSCAASGFTFSSYTMHWVRQAPGKGLEWVTFISYDGNNKYYADSVKGRFTISRDNSKNTLYLQMNSLRAEDTAIYYCARTGWLGPFDYWGQGTLVTVSSGKPGSGKPGSGKPGSGKPGSEIVLTQSPGTLSLSPGERATLSCRASQSVGNSYLAWYQQKPGQAPRLLIYGAFSRATGIPDRFSGSGSGTDFTLTISRLEPEDFAVYYCQQYGSSPWTFGQGTKVEIK

SEQ ID NO: 1642 - protein, 118 aa, Artificial Sequence; identical to SEQ ID NO: 22
  Description of Artificial Sequence: Synthetic polypeptide
  VH of XENP019914

SEQ ID NO: 1643 - protein, 108 aa, Artificial Sequence
  Description of Artificial Sequence: Synthetic polypeptide
  VL of XENP019914
EIVLTQSPGTLSLSPGERATLSCRASQSVGNSYLAWYQQKPGQAPRLLIYGAFSRATGIPDRFSGSGSGTDFTLTISRLEPEDFAVYYCQQYGSSPWTFGQGTKVEIK

SEQ ID NO: 1644 - protein, 5 aa, Artificial Sequence
  Description of Artificial Sequence: Synthetic peptide
  XENP019914 vhCDR1
SYTMH

SEQ ID NO: 1645 - protein, 17 aa, Artificial Sequence
  Description of Artificial Sequence: Synthetic peptide
  XENP019914 vhCDR2
FISYDGNNKYYADSVKG

SEQ ID NO: 1646 - protein, 9 aa, Artificial Sequence
  Description of Artificial Sequence: Synthetic peptide
  XENP019914 vhCDR3
TGWLGPFDY

SEQ ID NO: 1647 - protein, 12 aa, Artificial Sequence
  Description of Artificial Sequence: Synthetic peptide
  XENP019914 vlCDR1
RASQSVGNSYLA

SEQ ID NO: 1648 - protein, 7 aa, Artificial Sequence
  Description of Artificial Sequence: Synthetic peptide
  XENP019914 vlCDR2
GAFSRAT

SEQ ID NO: 1649 - protein, 9 aa, Artificial Sequence
  Description of Artificial Sequence: Synthetic peptide
  XENP019914 vlCDR3
QQYGSSPWT

SEQ ID NO: 1650 - protein, 246 aa, Artificial Sequence
  Description of Artificial Sequence: Synthetic polypeptide
  XENP019915 [CTLA-4]_H0_L0.27_scFv(GKPGS)4
QVQLVESGGGVVQPGRSLRLSCAASGFTFSSYTMHWVRQAPGKGLEWVTFISYDGNNKYYADSVKGRFTISRDNSKNTLYLQMNSLRAEDTAIYYCARTGWLGPFDYWGQGTLVTVSSGKPGSGKPGSGKPGSGKPGSEIVLTQSPGTLSLSPGERATLSCRASQSVGQSYLAWYQQKPGQAPRLLIYGAFSRATGIPDRFSGSGSGTDFTLTISRLEPEDFAVYYCQQYGSSPWTFGQGTKVEIK

SEQ ID NO: 1651 - protein, 118 aa, Artificial Sequence; identical to SEQ ID NO: 22
  Description of Artificial Sequence: Synthetic polypeptide
  VH of XENP019915

SEQ ID NO: 1652 - protein, 108 aa, Artificial Sequence
  Description of Artificial Sequence: Synthetic polypeptide
  VL of XENP019915
EIVLTQSPGTLSLSPGERATLSCRASQSVGQSYLAWYQQKPGQAPRLLIYGAFSRATGIPDRFSGSGSGTDFTLTISRLEPEDFAVYYCQQYGSSPWTFGQGTKVEIK

SEQ ID NO: 1653 - protein, 5 aa, Artificial Sequence
  Description of Artificial Sequence: Synthetic peptide
  XENP019915 vhCDR1
SYTMH

SEQ ID NO: 1654 - protein, 17 aa, Artificial Sequence
  Description of Artificial Sequence: Synthetic peptide
  XENP019915 vhCDR2
FISYDGNNKYYADSVKG

SEQ ID NO: 1655 - protein, 9 aa, Artificial Sequence
  Description of Artificial Sequence: Synthetic peptide
  XENP019915 vhCDR3
TGWLGPFDY

SEQ ID NO: 1656 - protein, 12 aa, Artificial Sequence
  Description of Artificial Sequence: Synthetic peptide
  XENP019915 vlCDR1
RASQSVGQSYLA

SEQ ID NO: 1657 - protein, 7 aa, Artificial Sequence
  Description of Artificial Sequence: Synthetic peptide
  XENP019915 vlCDR2
GAFSRAT

SEQ ID NO: 1658 - protein, 9 aa, Artificial Sequence
  Description of Artificial Sequence: Synthetic peptide
  XENP019915 vlCDR3
QQYGSSPWT

SEQ ID NO: 1659 - protein, 246 aa, Artificial Sequence
  Description of Artificial Sequence: Synthetic polypeptide
  XENP019916 [CTLA-4]_H0_L0.28_scFv(GKPGS)4
QVQLVESGGGVVQPGRSLRLSCAASGFTFSSYTMHWVRQAPGKGLEWVTFISYDGNNKYYADSVKGRFTISRDNSKNTLYLQMNSLRAEDTAIYYCARTGWLGPFDYWGQGTLVTVSSGKPGSGKPGSGKPGSGKPGSEIVLTQSPGTLSLSPGERATLSCRASQSVGTSYLAWYQQKPGQAPRLLIYGAFSRATGIPDRFSGSGSGTDFTLTISRLEPEDFAVYYCQQYGSSPWTFGQGTKVEIK

SEQ ID NO: 1660 - protein, 118 aa, Artificial Sequence; identical to SEQ ID NO: 22
  Description of Artificial Sequence: Synthetic polypeptide
  VH of XENP019916

SEQ ID NO: 1661 - protein, 108 aa, Artificial Sequence
  Description of Artificial Sequence: Synthetic polypeptide
  VL of XENP019916
EIVLTQSPGTLSLSPGERATLSCRASQSVGTSYLAWYQQKPGQAPRLLIYGAFSRATGIPDRFSGSGSGTDFTLTISRLEPEDFAVYYCQQYGSSPWTFGQGTKVEIK

SEQ ID NO: 1662 - protein, 5 aa, Artificial Sequence
  Description of Artificial Sequence: Synthetic peptide
  XENP019916 vhCDR1
SYTMH

SEQ ID NO: 1663 - protein, 17 aa, Artificial Sequence
  Description of Artificial Sequence: Synthetic peptide
  XENP019916 vhCDR2
FISYDGNNKYYADSVKG

SEQ ID NO: 1664 - protein, 9 aa, Artificial Sequence
  Description of Artificial Sequence: Synthetic peptide
  XENP019916 vhCDR3
TGWLGPFDY

SEQ ID NO: 1665 - protein, 12 aa, Artificial Sequence
  Description of Artificial Sequence: Synthetic peptide
  XENP019916 vlCDR1
RASQSVGTSYLA

SEQ ID NO: 1666 - protein, 7 aa, Artificial Sequence
  Description of Artificial Sequence: Synthetic peptide
  XENP019916 vlCDR2
GAFSRAT

SEQ ID NO: 1667 - protein, 9 aa, Artificial Sequence
  Description of Artificial Sequence: Synthetic peptide
  XENP019916 vlCDR3
QQYGSSPWT

SEQ ID NO: 1668 - protein, 246 aa, Artificial Sequence
  Description of Artificial Sequence: Synthetic polypeptide
  XENP019917 [CTLA-4]_H0_L0.29_scFv(GKPGS)4
QVQLVESGGGVVQPGRSLRLSCAASGFTFSSYTMHWVRQAPGKGLEWVTFISYDGNNKYYADSVKGRFTISRDNSKNTLYLQMNSLRAEDTAIYYCARTGWLGPFDYWGQGTLVTVSSGKPGSGKPGSGKPGSGKPGSEIVLTQSPGTLSLSPGERATLSCRASQSVGSAYLAWYQQKPGQAPRLLIYGAFSRATGIPDRFSGSGSGTDFTLTISRLEPEDFAVYYCQQYGSSPWTFGQGTKVEIK

SEQ ID NO: 1669 - protein, 118 aa, Artificial Sequence; identical to SEQ ID NO: 22
  Description of Artificial Sequence: Synthetic polypeptide
  VH of XENP019917

SEQ ID NO: 1670 - protein, 108 aa, Artificial Sequence
  Description of Artificial Sequence: Synthetic polypeptide
  VL of XENP019917
EIVLTQSPGTLSLSPGERATLSCRASQSVGSAYLAWYQQKPGQAPRLLIYGAFSRATGIPDRFSGSGSGTDFTLTISRLEPEDFAVYYCQQYGSSPWTFGQGTKVEIK

SEQ ID NO: 1671 - protein, 5 aa, Artificial Sequence
  Description of Artificial Sequence: Synthetic peptide
  XENP019917 vhCDR1
SYTMH

SEQ ID NO: 1672 - protein, 17 aa, Artificial Sequence
  Description of Artificial Sequence: Synthetic peptide
  XENP019917 vhCDR2
FISYDGNNKYYADSVKG

SEQ ID NO: 1673 - protein, 9 aa, Artificial Sequence
  Description of Artificial Sequence: Synthetic peptide
  XENP019917 vhCDR3
TGWLGPFDY

SEQ ID NO: 1674 - protein, 12 aa, Artificial Sequence
  Description of Artificial Sequence: Synthetic peptide
  XENP019917 vlCDR1
RASQSVGSAYLA

SEQ ID NO: 1675 - protein, 7 aa, Artificial Sequence
  Description of Artificial Sequence: Synthetic peptide
  XENP019917 vlCDR2
GAFSRAT

SEQ ID NO: 1676 - protein, 9 aa, Artificial Sequence
  Description of Artificial Sequence: Synthetic peptide
  XENP019917 vlCDR3
QQYGSSPWT

SEQ ID NO: 1677 - protein, 246 aa, Artificial Sequence
  Description of Artificial Sequence: Synthetic polypeptide
  XENP019918 [CTLA-4]_H0_L0.30_scFv(GKPGS)4
QVQLVESGGGVVQPGRSLRLSCAASGFTFSSYTMHWVRQAPGKGLEWVTFISYDGNNKYYADSVKGRFTISRDNSKNTLYLQMNSLRAEDTAIYYCARTGWLGPFDYWGQGTLVTVSSGKPGSGKPGSGKPGSGKPGSEIVLTQSPGTLSLSPGERATLSCRASQSVGSGYLAWYQQKPGQAPRLLIYGAFSRATGIPDRFSGSGSGTDFTLTISRLEPEDFAVYYCQQYGSSPWTFGQGTKVEIK

SEQ ID NO: 1678 - protein, 118 aa, Artificial Sequence; identical to SEQ ID NO: 22
  Description of Artificial Sequence: Synthetic polypeptide
  VH of XENP019918

SEQ ID NO: 1679 - protein, 108 aa, Artificial Sequence
  Description of Artificial Sequence: Synthetic polypeptide
  VL of XENP019918
EIVLTQSPGTLSLSPGERATLSCRASQSVGSGYLAWYQQKPGQAPRLLIYGAFSRATGIPDRFSGSGSGTDFTLTISRLEPEDFAVYYCQQYGSSPWTFGQGTKVEIK

SEQ ID NO: 1680 - protein, 5 aa, Artificial Sequence
  Description of Artificial Sequence: Synthetic peptide
  XENP019918 vhCDR1
SYTMH

SEQ ID NO: 1681 - protein, 17 aa, Artificial Sequence
  Description of Artificial Sequence: Synthetic peptide
  XENP019918 vhCDR2
FISYDGNNKYYADSVKG

SEQ ID NO: 1682 - protein, 9 aa, Artificial Sequence
  Description of Artificial Sequence: Synthetic peptide
  XENP019918 vhCDR3
TGWLGPFDY

SEQ ID NO: 1683 - protein, 12 aa, Artificial Sequence
  Description of Artificial Sequence: Synthetic peptide
  XENP019918 vlCDR1
RASQSVGSGYLA

SEQ ID NO: 1684 - protein, 7 aa, Artificial Sequence
  Description of Artificial Sequence: Synthetic peptide
  XENP019918 vlCDR2
GAFSRAT

SEQ ID NO: 1685 - protein, 9 aa, Artificial Sequence
  Description of Artificial Sequence: Synthetic peptide
  XENP019918 vlCDR3
QQYGSSPWT

SEQ ID NO: 1686 - protein, 246 aa, Artificial Sequence
  Description of Artificial Sequence: Synthetic polypeptide
  XENP019919 [CTLA-4]_H0_L0.31_scFv(GKPGS)4
QVQLVESGGGVVQPGRSLRLSCAASGFTFSSYTMHWVRQAPGKGLEWVTFISYDGNNKYYADSVKGRFTISRDNSKNTLYLQMNSLRAEDTAIYYCARTGWLGPFDYWGQGTLVTVSSGKPGSGKPGSGKPGSGKPGSEIVLTQSPGTLSLSPGERATLSCRASQSVGSNYLAWYQQKPGQAPRLLIYGAFSRATGIPDRFSGSGSGTDFTLTISRLEPEDFAVYYCQQYGSSPWTFGQGTKVEIK

SEQ ID NO: 1687 - protein, 118 aa, Artificial Sequence; identical to SEQ ID NO: 22
  Description of Artificial Sequence: Synthetic polypeptide
  VH of XENP019919

SEQ ID NO: 1688 - protein, 108 aa, Artificial Sequence
  Description of Artificial Sequence: Synthetic polypeptide
  VL of XENP019919
EIVLTQSPGTLSLSPGERATLSCRASQSVGSNYLAWYQQKPGQAPRLLIYGAFSRATGIPDRFSGSGSGTDFTLTISRLEPEDFAVYYCQQYGSSPWTFGQGTKVEIK

SEQ ID NO: 1689 - protein, 5 aa, Artificial Sequence
  Description of Artificial Sequence: Synthetic peptide
  XENP019919 vhCDR1
SYTMH

SEQ ID NO: 1690 - protein, 17 aa, Artificial Sequence
  Description of Artificial Sequence: Synthetic peptide
  XENP019919 vhCDR2
FISYDGNNKYYADSVKG

SEQ ID NO: 1691 - protein, 9 aa, Artificial Sequence
  Description of Artificial Sequence: Synthetic peptide
  XENP019919 vhCDR3
TGWLGPFDY

SEQ ID NO: 1692 - protein, 12 aa, Artificial Sequence
  Description of Artificial Sequence: Synthetic peptide
  XENP019919 vlCDR1
RASQSVGSNYLA

SEQ ID NO: 1693 - protein, 7 aa, Artificial Sequence
  Description of Artificial Sequence: Synthetic peptide
  XENP019919 vlCDR2
GAFSRAT

SEQ ID NO: 1694 - protein, 9 aa, Artificial Sequence
  Description of Artificial Sequence: Synthetic peptide
  XENP019919 vlCDR3
QQYGSSPWT

SEQ ID NO: 1695 - protein, 246 aa, Artificial Sequence
  Description of Artificial Sequence: Synthetic polypeptide
  XENP019920 [CTLA-4]_H0_L0.32_scFv(GKPGS)4
QVQLVESGGGVVQPGRSLRLSCAASGFTFSSYTMHWVRQAPGKGLEWVTFISYDGNNKYYADSVKGRFTISRDNSKNTLYLQMNSLRAEDTAIYYCARTGWLGPFDYWGQGTLVTVSSGKPGSGKPGSGKPGSGKPGSEIVLTQSPGTLSLSPGERATLSCRASQSVGSQYLAWYQQKPGQAPRLLIYGAFSRATGIPDRFSGSGSGTDFTLTISRLEPEDFAVYYCQQYGSSPWTFGQGTKVEIK

SEQ ID NO: 1696 - protein, 118 aa, Artificial Sequence; identical to SEQ ID NO: 22
  Description of Artificial Sequence: Synthetic polypeptide
  VH of XENP019920

SEQ ID NO: 1697 - protein, 108 aa, Artificial Sequence
  Description of Artificial Sequence: Synthetic polypeptide
  VL of XENP019920
EIVLTQSPGTLSLSPGERATLSCRASQSVGSQYLAWYQQKPGQAPRLLIYGAFSRATGIPDRFSGSGSGTDFTLTISRLEPEDFAVYYCQQYGSSPWTFGQGTKVEIK

SEQ ID NO: 1698 - protein, 5 aa, Artificial Sequence
  Description of Artificial Sequence: Synthetic peptide
  XENP019920 vhCDR1
SYTMH

SEQ ID NO: 1699 - protein, 17 aa, Artificial Sequence
  Description of Artificial Sequence: Synthetic peptide
  XENP019920 vhCDR2
FISYDGNNKYYADSVKG

SEQ ID NO: 1700 - protein, 9 aa, Artificial Sequence
  Description of Artificial Sequence: Synthetic peptide
  XENP019920 vhCDR3
TGWLGPFDY

SEQ ID NO: 1701 - protein, 12 aa, Artificial Sequence
  Description of Artificial Sequence: Synthetic peptide
  XENP019920 vlCDR1
RASQSVGSQYLA

SEQ ID NO: 1702 - protein, 7 aa, Artificial Sequence
  Description of Artificial Sequence: Synthetic peptide
  XENP019920 vlCDR2
GAFSRAT

SEQ ID NO: 1703 - protein, 9 aa, Artificial Sequence
  Description of Artificial Sequence: Synthetic peptide
  XENP019920 vlCDR3
QQYGSSPWT

SEQ ID NO: 1704 - protein, 246 aa, Artificial Sequence
  Description of Artificial Sequence: Synthetic polypeptide
  XENP019921 [CTLA-4]_H0_L0.33_scFv(GKPGS)4
QVQLVESGGGVVQPGRSLRLSCAASGFTFSSYTMHWVRQAPGKGLEWVTFISYDGNNKYYADSVKGRFTISRDNSKNTLYLQMNSLRAEDTAIYYCARTGWLGPFDYWGQGTLVTVSSGKPGSGKPGSGKPGSGKPGSEIVLTQSPGTLSLSPGERATLSCRASQSVGSTYLAWYQQKPGQAPRLLIYGAFSRATGIPDRFSGSGSGTDFTLTISRLEPEDFAVYYCQQYGSSPWTFGQGTKVEIK

SEQ ID NO: 1705 - protein, 118 aa, Artificial Sequence; identical to SEQ ID NO: 22
  Description of Artificial Sequence: Synthetic polypeptide
  VH of XENP019921

SEQ ID NO: 1706 - protein, 108 aa, Artificial Sequence
  Description of Artificial Sequence: Synthetic polypeptide
  VL of XENP019921
EIVLTQSPGTLSLSPGERATLSCRASQSVGSTYLAWYQQKPGQAPRLLIYGAFSRATGIPDRFSGSGSGTDFTLTISRLEPEDFAVYYCQQYGSSPWTFGQGTKVEIK

SEQ ID NO: 1707 - protein, 5 aa, Artificial Sequence
  Description of Artificial Sequence: Synthetic peptide
  XENP019921 vhCDR1
SYTMH

SEQ ID NO: 1708 - protein, 17 aa, Artificial Sequence
  Description of Artificial Sequence: Synthetic peptide
  XENP019921 vhCDR2
FISYDGNNKYYADSVKG

SEQ ID NO: 1709 - protein, 9 aa, Artificial Sequence
  Description of Artificial Sequence: Synthetic peptide
  XENP019921 vhCDR3
TGWLGPFDY

SEQ ID NO: 1710 - protein, 12 aa, Artificial Sequence
  Description of Artificial Sequence: Synthetic peptide
  XENP019921 vlCDR1
RASQSVGSTYLA

SEQ ID NO: 1711 - protein, 7 aa, Artificial Sequence
  Description of Artificial Sequence: Synthetic peptide
  XENP019921 vlCDR2
GAFSRAT

SEQ ID NO: 1712 - protein, 9 aa, Artificial Sequence
  Description of Artificial Sequence: Synthetic peptide
  XENP019921 vlCDR3
QQYGSSPWT

SEQ ID NO: 1713 - protein, 246 aa, Artificial Sequence
  Description of Artificial Sequence: Synthetic polypeptide
  XENP019922 [CTLA-4]_H0_L0.34_scFv(GKPGS)4
QVQLVESGGGVVQPGRSLRLSCAASGFTFSSYTMHWVRQAPGKGLEWVTFISYDGNNKYYADSVKGRFTISRDNSKNTLYLQMNSLRAEDTAIYYCARTGWLGPFDYWGQGTLVTVSSGKPGSGKPGSGKPGSGKPGSEIVLTQSPGTLSLSPGERATLSCRASQSVGSSALAWYQQKPGQAPRLLIYGAFSRATGIPDRFSGSGSGTDFTLTISRLEPEDFAVYYCQQYGSSPWTFGQGTKVEIK

SEQ ID NO: 1714 - protein, 118 aa, Artificial Sequence; identical to SEQ ID NO: 22
  Description of Artificial Sequence: Synthetic polypeptide
  VH of XENP019922

SEQ ID NO: 1715 - protein, 108 aa, Artificial Sequence
  Description of Artificial Sequence: Synthetic polypeptide
  VL of XENP019922
EIVLTQSPGTLSLSPGERATLSCRASQSVGSSALAWYQQKPGQAPRLLIYGAFSRATGIPDRFSGSGSGTDFTLTISRLEPEDFAVYYCQQYGSSPWTFGQGTKVEIK

SEQ ID NO: 1716 - protein, 5 aa, Artificial Sequence
  Description of Artificial Sequence: Synthetic peptide
  XENP019922 vhCDR1
SYTMH

SEQ ID NO: 1717 - protein, 17 aa, Artificial Sequence
  Description of Artificial Sequence: Synthetic peptide
  XENP019922 vhCDR2
FISYDGNNKYYADSVKG

SEQ ID NO: 1718 - protein, 9 aa, Artificial Sequence
  Description of Artificial Sequence: Synthetic peptide
  XENP019922 vhCDR3
TGWLGPFDY

SEQ ID NO: 1719 - protein, 12 aa, Artificial Sequence
  Description of Artificial Sequence: Synthetic peptide
  XENP019922 vlCDR1
RASQSVGSSALA

SEQ ID NO: 1720 - protein, 7 aa, Artificial Sequence
  Description of Artificial Sequence: Synthetic peptide
  XENP019922 vlCDR2
GAFSRAT

SEQ ID NO: 1721 - protein, 9 aa, Artificial Sequence
  Description of Artificial Sequence: Synthetic peptide
  XENP019922 vlCDR3
QQYGSSPWT

SEQ ID NO: 1722 - protein, 246 aa, Artificial Sequence
  Description of Artificial Sequence: Synthetic polypeptide
  XENP019923 [CTLA-4]_H0_L0.35_scFv(GKPGS)4
QVQLVESGGGVVQPGRSLRLSCAASGFTFSSYTMHWVRQAPGKGLEWVTFISYDGNNKYYADSVKGRFTISRDNSKNTLYLQMNSLRAEDTAIYYCARTGWLGPFDYWGQGTLVTVSSGKPGSGKPGSGKPGSGKPGSEIVLTQSPGTLSLSPGERATLSCRASQSVGSSFLAWYQQKPGQAPRLLIYGAFSRATGIPDRFSGSGSGTDFTLTISRLEPEDFAVYYCQQYGSSPWTFGQGTKVEIK

SEQ ID NO: 1723 - protein, 118 aa, Artificial Sequence; identical to SEQ ID NO: 22
  Description of Artificial Sequence: Synthetic polypeptide
  VH of XENP019923

SEQ ID NO: 1724 - protein, 108 aa, Artificial Sequence
  Description of Artificial Sequence: Synthetic polypeptide
  VL of XENP019923
EIVLTQSPGTLSLSPGERATLSCRASQSVGSSFLAWYQQKPGQAPRLLIYGAFSRATGIPDRFSGSGSGTDFTLTISRLEPEDFAVYYCQQYGSSPWTFGQGTKVEIK

SEQ ID NO: 1725 - protein, 5 aa, Artificial Sequence
  Description of Artificial Sequence: Synthetic peptide
  XENP019923 vhCDR1
SYTMH

SEQ ID NO: 1726 - protein, 17 aa, Artificial Sequence
  Description of Artificial Sequence: Synthetic peptide
  XENP019923 vhCDR2
FISYDGNNKYYADSVKG

SEQ ID NO: 1727 - protein, 9 aa, Artificial Sequence
  Description of Artificial Sequence: Synthetic peptide
  XENP019923 vhCDR3
TGWLGPFDY

SEQ ID NO: 1728 - protein, 12 aa, Artificial Sequence
  Description of Artificial Sequence: Synthetic peptide
  XENP019923 vlCDR1
RASQSVGSSFLA

SEQ ID NO: 1729 - protein, 7 aa, Artificial Sequence
  Description of Artificial Sequence: Synthetic peptide
  XENP019923 vlCDR2
GAFSRAT

SEQ ID NO: 1730 - protein, 9 aa, Artificial Sequence
  Description of Artificial Sequence: Synthetic peptide
  XENP019923 vlCDR3
QQYGSSPWT

SEQ ID NO: 1731 - protein, 246 aa, Artificial Sequence
  Description of Artificial Sequence: Synthetic polypeptide
  XENP019924 [CTLA-4]_H0_L0.36_scFv(GKPGS)4
QVQLVESGGGVVQPGRSLRLSCAASGFTFSSYTMHWVRQAPGKGLEWVTFISYDGNNKYYADSVKGRFTISRDNSKNTLYLQMNSLRAEDTAIYYCARTGWLGPFDYWGQGTLVTVSSGKPGSGKPGSGKPGSGKPGSEIVLTQSPGTLSLSPGERATLSCRASQSVGSSHLAWYQQKPGQAPRLLIYGAFSRATGIPDRFSGSGSGTDFTLTISRLEPEDFAVYYCQQYGSSPWTFGQGTKVEIK

SEQ ID NO: 1732 - protein, 118 aa, Artificial Sequence; identical to SEQ ID NO: 22
  Description of Artificial Sequence: Synthetic polypeptide
  VH of XENP019924

SEQ ID NO: 1733 - protein, 108 aa, Artificial Sequence
  Description of Artificial Sequence: Synthetic polypeptide
  VL of XENP019924
EIVLTQSPGTLSLSPGERATLSCRASQSVGSSHLAWYQQKPGQAPRLLIYGAFSRATGIPDRFSGSGSGTDFTLTISRLEPEDFAVYYCQQYGSSPWTFGQGTKVEIK

SEQ ID NO: 1734 - protein, 5 aa, Artificial Sequence
  Description of Artificial Sequence: Synthetic peptide
  XENP019924 vhCDR1
SYTMH

SEQ ID NO: 1735 - protein, 17 aa, Artificial Sequence
  Description of Artificial Sequence: Synthetic peptide
  XENP019924 vhCDR2
FISYDGNNKYYADSVKG

SEQ ID NO: 1736 - protein, 9 aa, Artificial Sequence
  Description of Artificial Sequence: Synthetic peptide
  XENP019924 vhCDR3
TGWLGPFDY

SEQ ID NO: 1737 - protein, 12 aa, Artificial Sequence
  Description of Artificial Sequence: Synthetic peptide
  XENP019924 vlCDR1
RASQSVGSSHLA

SEQ ID NO: 1738 - protein, 7 aa, Artificial Sequence
  Description of Artificial Sequence: Synthetic peptide
  XENP019924 vlCDR2
GAFSRAT

SEQ ID NO: 1739 - protein, 9 aa, Artificial Sequence
  Description of Artificial Sequence: Synthetic peptide
  XENP019924 vlCDR3
QQYGSSPWT

SEQ ID NO: 1740 - protein, 246 aa, Artificial Sequence
  Description of Artificial Sequence: Synthetic polypeptide
  XENP019925 [CTLA-4]_H0_L0.37_scFv(GKPGS)4
QVQLVESGGGVVQPGRSLRLSCAASGFTFSSYTMHWVRQAPGKGLEWVTFISYDGNNKYYADSVKGRFTISRDNSKNTLYLQMNSLRAEDTAIYYCARTGWLGPFDYWGQGTLVTVSSGKPGSGKPGSGKPGSGKPGSEIVLTQSPGTLSLSPGERATLSCRASQSVGSSLLAWYQQKPGQAPRLLIYGAFSRATGIPDRFSGSGSGTDFTLTISRLEPEDFAVYYCQQYGSSPWTFGQGTKVEIK

SEQ ID NO: 1741 - protein, 118 aa, Artificial Sequence; identical to SEQ ID NO: 22
  Description of Artificial Sequence: Synthetic polypeptide
  VH of XENP019925

SEQ ID NO: 1742 - protein, 108 aa, Artificial Sequence
  Description of Artificial Sequence: Synthetic polypeptide
  VL of XENP019925
EIVLTQSPGTLSLSPGERATLSCRASQSVGSSLLAWYQQKPGQAPRLLIYGAFSRATGIPDRFSGSGSGTDFTLTISRLEPEDFAVYYCQQYGSSPWTFGQGTKVEIK

SEQ ID NO: 1743 - protein, 5 aa, Artificial Sequence
  Description of Artificial Sequence: Synthetic peptide
  XENP019925 vhCDR1
SYTMH

SEQ ID NO: 1744 - protein, 17 aa, Artificial Sequence
  Description of Artificial Sequence: Synthetic peptide
  XENP019925 vhCDR2
FISYDGNNKYYADSVKG

SEQ ID NO: 1745 - protein, 9 aa, Artificial Sequence
  Description of Artificial Sequence: Synthetic peptide
  XENP019925 vhCDR3
TGWLGPFDY

SEQ ID NO: 1746 - protein, 12 aa, Artificial Sequence
  Description of Artificial Sequence: Synthetic peptide
  XENP019925 vlCDR1
RASQSVGSSLLA

SEQ ID NO: 1747 - protein, 7 aa, Artificial Sequence
  Description of Artificial Sequence: Synthetic peptide
  XENP019925 vlCDR2
GAFSRAT

SEQ ID NO: 1748 - protein, 9 aa, Artificial Sequence
  Description of Artificial Sequence: Synthetic peptide
  XENP019925 vlCDR3
QQYGSSPWT

SEQ ID NO: 1749 - protein, 246 aa, Artificial Sequence
  Description of Artificial Sequence: Synthetic polypeptide
  XENP019926 [CTLA-4]_H0_L0.38_scFv(GKPGS)4
QVQLVESGGGVVQPGRSLRLSCAASGFTFSSYTMHWVRQAPGKGLEWVTFISYDGNNKYYADSVKGRFTISRDNSKNTLYLQMNSLRAEDTAIYYCARTGWLGPFDYWGQGTLVTVSSGKPGSGKPGSGKPGSGKPGSEIVLTQSPGTLSLSPGERATLSCRASQSVGSSNLAWYQQKPGQAPRLLIYGAFSRATGIPDRFSGSGSGTDFTLTISRLEPEDFAVYYCQQYGSSPWTFGQGTKVEIK

SEQ ID NO: 1750 - protein, 118 aa, Artificial Sequence; identical to SEQ ID NO: 22
  Description of Artificial Sequence: Synthetic polypeptide
  VH of XENP019926

SEQ ID NO: 1751 - protein, 108 aa, Artificial Sequence
  Description of Artificial Sequence: Synthetic polypeptide
  VL of XENP019926
EIVLTQSPGTLSLSPGERATLSCRASQSVGSSNLAWYQQKPGQAPRLLIYGAFSRATGIPDRFSGSGSGTDFTLTISRLEPEDFAVYYCQQYGSSPWTFGQGTKVEIK

SEQ ID NO: 1752 - protein, 5 aa, Artificial Sequence
  Description of Artificial Sequence: Synthetic peptide
  XENP019926 vhCDR1
SYTMH

SEQ ID NO: 1753 - protein, 17 aa, Artificial Sequence
  Description of Artificial Sequence: Synthetic peptide
  XENP019926 vhCDR2
FISYDGNNKYYADSVKG

SEQ ID NO: 1754 - protein, 9 aa, Artificial Sequence
  Description of Artificial Sequence: Synthetic peptide
  XENP019926 vhCDR3
TGWLGPFDY

SEQ ID NO: 1755 - protein, 12 aa, Artificial Sequence
  Description of Artificial Sequence: Synthetic peptide
  XENP019926 vlCDR1
RASQSVGSSNLA

SEQ ID NO: 1756 - protein, 7 aa, Artificial Sequence
  Description of Artificial Sequence: Synthetic peptide
  XENP019926 vlCDR2
GAFSRAT

SEQ ID NO: 1757 - protein, 9 aa, Artificial Sequence
  Description of Artificial Sequence: Synthetic peptide
  XENP019926 vlCDR3
QQYGSSPWT

SEQ ID NO: 1758 - protein, 246 aa, Artificial Sequence
  Description of Artificial Sequence: Synthetic polypeptide
  XENP019927 [CTLA-4]_H0_L0.39_scFv(GKPGS)4
QVQLVESGGGVVQPGRSLRLSCAASGFTFSSYTMHWVRQAPGKGLEWVTFISYDGNNKYYADSVKGRFTISRDNSKNTLYLQMNSLRAEDTAIYYCARTGWLGPFDYWGQGTLVTVSSGKPGSGKPGSGKPGSGKPGSEIVLTQSPGTLSLSPGERATLSCRASQSVGSSSLAWYQQKPGQAPRLLIYGAFSRATGIPDRFSGSGSGTDFTLTISRLEPEDFAVYYCQQYGSSPWTFGQGTKVEIK

SEQ ID NO: 1759 - protein, 118 aa, Artificial Sequence; identical to SEQ ID NO: 22
  Description of Artificial Sequence: Synthetic polypeptide
  VH of XENP019927

SEQ ID NO: 1760 - protein, 108 aa, Artificial Sequence
  Description of Artificial Sequence: Synthetic polypeptide
  VL of XENP019927
EIVLTQSPGTLSLSPGERATLSCRASQSVGSSSLAWYQQKPGQAPRLLIYGAFSRATGIPDRFSGSGSGTDFTLTISRLEPEDFAVYYCQQYGSSPWTFGQGTKVEIK

SEQ ID NO: 1761 - protein, 5 aa, Artificial Sequence
  Description of Artificial Sequence: Synthetic peptide
  XENP019927 vhCDR1
SYTMH

SEQ ID NO: 1762 - protein, 17 aa, Artificial Sequence
  Description of Artificial Sequence: Synthetic peptide
  XENP019927 vhCDR2
FISYDGNNKYYADSVKG

SEQ ID NO: 1763 - protein, 9 aa, Artificial Sequence
  Description of Artificial Sequence: Synthetic peptide
  XENP019927 vhCDR3
TGWLGPFDY

SEQ ID NO: 1764 - protein, 12 aa, Artificial Sequence
  Description of Artificial Sequence: Synthetic peptide
  XENP019927 vlCDR1
RASQSVGSSSLA

SEQ ID NO: 1765 - protein, 7 aa, Artificial Sequence
  Description of Artificial Sequence: Synthetic peptide
  XENP019927 vlCDR2
GAFSRAT

SEQ ID NO: 1766 - protein, 9 aa, Artificial Sequence
  Description of Artificial Sequence: Synthetic peptide
  XENP019927 vlCDR3
QQYGSSPWT

SEQ ID NO: 1767 - protein, 246 aa, Artificial Sequence
  Description of Artificial Sequence: Synthetic polypeptide
  XENP019928 [CTLA-4]_H0_L0.40_scFv(GKPGS)4
QVQLVESGGGVVQPGRSLRLSCAASGFTFSSYTMHWVRQAPGKGLEWVTFISYDGNNKYYADSVKGRFTISRDNSKNTLYLQMNSLRAEDTAIYYCARTGWLGPFDYWGQGTLVTVSSGKPGSGKPGSGKPGSGKPGSEIVLTQSPGTLSLSPGERATLSCRASQSVGSSVLAWYQQKPGQAPRLLIYGAFSRATGIPDRFSGSGSGTDFTLTISRLEPEDFAVYYCQQYGSSPWTFGQGTKVEIK

SEQ ID NO: 1768 - protein, 118 aa, Artificial Sequence; identical to SEQ ID NO: 22
  Description of Artificial Sequence: Synthetic polypeptide
  VH of XENP019928

SEQ ID NO: 1769 - protein, 108 aa, Artificial Sequence
  Description of Artificial Sequence: Synthetic polypeptide
  VL of XENP019928
EIVLTQSPGTLSLSPGERATLSCRASQSVGSSVLAWYQQKPGQAPRLLIYGAFSRATGIPDRFSGSGSGTDFTLTISRLEPEDFAVYYCQQYGSSPWTFGQGTKVEIK

SEQ ID NO: 1770 - protein, 5 aa, Artificial Sequence
  Description of Artificial Sequence: Synthetic peptide
  XENP019928 vhCDR1
SYTMH

SEQ ID NO: 1771 - protein, 17 aa, Artificial Sequence
  Description of Artificial Sequence: Synthetic peptide
  XENP019928 vhCDR2
FISYDGNNKYYADSVKG

SEQ ID NO: 1772 - protein, 9 aa, Artificial Sequence
  Description of Artificial Sequence: Synthetic peptide
  XENP019928 vhCDR3
TGWLGPFDY

SEQ ID NO: 1773 - protein, 12 aa, Artificial Sequence
  Description of Artificial Sequence: Synthetic peptide
  XENP019928 vlCDR1
RASQSVGSSVLA

SEQ ID NO: 1774 - protein, 7 aa, Artificial Sequence
  Description of Artificial Sequence: Synthetic peptide
  XENP019928 vlCDR2
GAFSRAT

SEQ ID NO: 1775 - protein, 9 aa, Artificial Sequence
  Description of Artificial Sequence: Synthetic peptide
  XENP019928 vlCDR3
QQYGSSPWT

SEQ ID NO: 1776 - protein, 246 aa, Artificial Sequence
  Description of Artificial Sequence: Synthetic polypeptide
  XENP019929 [CTLA-4]_H0_L0.41_scFv(GKPGS)4
QVQLVESGGGVVQPGRSLRLSCAASGFTFSSYTMHWVRQAPGKGLEWVTFISYDGNNKYYADSVKGRFTISRDNSKNTLYLQMNSLRAEDTAIYYCARTGWLGPFDYWGQGTLVTVSSGKPGSGKPGSGKPGSGKPGSEIVLTQSPGTLSLSPGERATLSCRASQSVGSSYMAWYQQKPGQAPRLLIYGAFSRATGIPDRFSGSGSGTDFTLTISRLEPEDFAVYYCQQYGSSPWTFGQGTKVEIK

SEQ ID NO: 1777 - protein, 118 aa, Artificial Sequence; identical to SEQ ID NO: 22
  Description of Artificial Sequence: Synthetic polypeptide
  VH of XENP019929

SEQ ID NO: 1778 - protein, 108 aa, Artificial Sequence
  Description of Artificial Sequence: Synthetic polypeptide
  VL of XENP019929
EIVLTQSPGTLSLSPGERATLSCRASQSVGSSYMAWYQQKPGQAPRLLIYGAFSRATGIPDRFSGSGSGTDFTLTISRLEPEDFAVYYCQQYGSSPWTFGQGTKVEIK

SEQ ID NO: 1779 - protein, 5 aa, Artificial Sequence
  Description of Artificial Sequence: Synthetic peptide
  XENP019929 vhCDR1
SYTMH

SEQ ID NO: 1780 - protein, 17 aa, Artificial Sequence
  Description of Artificial Sequence: Synthetic peptide
  XENP019929 vhCDR2
FISYDGNNKYYADSVKG

SEQ ID NO: 1781 - protein, 9 aa, Artificial Sequence
  Description of Artificial Sequence: Synthetic peptide
  XENP019929 vhCDR3
TGWLGPFDY

SEQ ID NO: 1782 - protein, 12 aa, Artificial Sequence
  Description of Artificial Sequence: Synthetic peptide
  XENP019929 vlCDR1
RASQSVGSSYMA

SEQ ID NO: 1783 - protein, 7 aa, Artificial Sequence
  Description of Artificial Sequence: Synthetic peptide
  XENP019929 vlCDR2
GAFSRAT

SEQ ID NO: 1784 - protein, 9 aa, Artificial Sequence
  Description of Artificial Sequence: Synthetic peptide
  XENP019929 vlCDR3
QQYGSSPWT

SEQ ID NO: 1785 - protein, 246 aa, Artificial Sequence
  Description of Artificial Sequence: Synthetic polypeptide
  XENP019930 [CTLA-4]_H0_L0.42_scFv(GKPGS)4
QVQLVESGGGVVQPGRSLRLSCAASGFTFSSYTMHWVRQAPGKGLEWVTFISYDGNNKYYADSVKGRFTISRDNSKNTLYLQMNSLRAEDTAIYYCARTGWLGPFDYWGQGTLVTVSSGKPGSGKPGSGKPGSGKPGSEIVLTQSPGTLSLSPGERATLSCRASQSVGSSYLDWYQQKPGQAPRLLIYGAFSRATGIPDRFSGSGSGTDFTLTISRLEPEDFAVYYCQQYGSSPWTFGQGTKVEIK

SEQ ID NO: 1786 - protein, 118 aa, Artificial Sequence; identical to SEQ ID NO: 22
  Description of Artificial Sequence: Synthetic polypeptide
  VH of XENP019930

SEQ ID NO: 1787 - protein, 108 aa, Artificial Sequence
  Description of Artificial Sequence: Synthetic polypeptide
  VL of XENP019930
EIVLTQSPGTLSLSPGERATLSCRASQSVGSSYLDWYQQKPGQAPRLLIYGAFSRATGIPDRFSGSGSGTDFTLTISRLEPEDFAVYYCQQYGSSPWTFGQGTKVEIK

SEQ ID NO: 1788 - protein, 5 aa, Artificial Sequence
  Description of Artificial Sequence: Synthetic peptide
  XENP019930 vhCDR1
SYTMH

SEQ ID NO: 1789 - protein, 17 aa, Artificial Sequence
  Description of Artificial Sequence: Synthetic peptide
  XENP019930 vhCDR2
FISYDGNNKYYADSVKG

SEQ ID NO: 1790 - protein, 9 aa, Artificial Sequence
  Description of Artificial Sequence: Synthetic peptide
  XENP019930 vhCDR3
TGWLGPFDY

SEQ ID NO: 1791 - protein, 12 aa, Artificial Sequence
  Description of Artificial Sequence: Synthetic peptide
  XENP019930 vlCDR1
RASQSVGSSYLD

SEQ ID NO: 1792 - protein, 7 aa, Artificial Sequence
  Description of Artificial Sequence: Synthetic peptide
  XENP019930 vlCDR2
GAFSRAT

SEQ ID NO: 1793 - protein, 9 aa, Artificial Sequence
  Description of Artificial Sequence: Synthetic peptide
  XENP019930 vlCDR3
QQYGSSPWT

SEQ ID NO: 1794 - protein, 246 aa, Artificial Sequence
  Description of Artificial Sequence: Synthetic polypeptide
  XENP019931 [CTLA-4]_H0_L0.43_scFv(GKPGS)4
QVQLVESGGGVVQPGRSLRLSCAASGFTFSSYTMHWVRQAPGKGLEWVTFISYDGNNKYYADSVKGRFTISRDNSKNTLYLQMNSLRAEDTAIYYCARTGWLGPFDYWGQGTLVTVSSGKPGSGKPGSGKPGSGKPGSEIVLTQSPGTLSLSPGERATLSCRASQSVGSSYLDWYQQKPGQAPRLLIYGAFSRATGIPDRFSGSGSGTDFTLTISRLEPEDFAVYYCKQYGSSPWTFGQGTKVEIK

SEQ ID NO: 1795 - protein, 118 aa, Artificial Sequence; identical to SEQ ID NO: 22
  Description of Artificial Sequence: Synthetic polypeptide
  VH of XENP019931

SEQ ID NO: 1796 - protein, 108 aa, Artificial Sequence
  Description of Artificial Sequence: Synthetic polypeptide
  VL of XENP019931
EIVLTQSPGTLSLSPGERATLSCRASQSVGSSYLDWYQQKPGQAPRLLIYGAFSRATGIPDRFSGSGSGTDFTLTISRLEPEDFAVYYCKQYGSSPWTFGQGTKVEIK

SEQ ID NO: 1797 - protein, 5 aa, Artificial Sequence
  Description of Artificial Sequence: Synthetic peptide
  XENP019931 vhCDR1
SYTMH

SEQ ID NO: 1798 - protein, 17 aa, Artificial Sequence
  Description of Artificial Sequence: Synthetic peptide
  XENP019931 vhCDR2
FISYDGNNKYYADSVKG

SEQ ID NO: 1799 - protein, 9 aa, Artificial Sequence
  Description of Artificial Sequence: Synthetic peptide
  XENP019931 vhCDR3
TGWLGPFDY

SEQ ID NO: 1800 - protein, 12 aa, Artificial Sequence
  Description of Artificial Sequence: Synthetic peptide
  XENP019931 vlCDR1
RASQSVGSSYLD

SEQ ID NO: 1801 - protein, 7 aa, Artificial Sequence
  Description of Artificial Sequence: Synthetic peptide
  XENP019931 vlCDR2
GAFSRAT

SEQ ID NO: 1802 - protein, 9 aa, Artificial Sequence
  Description of Artificial Sequence: Synthetic peptide
  XENP019931 vlCDR3
KQYGSSPWT

SEQ ID NO: 1803 - protein, 246 aa, Artificial Sequence
  Description of Artificial Sequence: Synthetic polypeptide
  XENP019932 [CTLA-4]_H0_L0.44_scFv(GKPGS)4
QVQLVESGGGVVQPGRSLRLSCAASGFTFSSYTMHWVRQAPGKGLEWVTFISYDGNNKYYADSVKGRFTISRDNSKNTLYLQMNSLRAEDTAIYYCARTGWLGPFDYWGQGTLVTVSSGKPGSGKPGSGKPGSGKPGSEIVLTQSPGTLSLSPGERATLSCRASQSVGSSYLSWYQQKPGQAPRLLIYGAFSRATGIPDRFSGSGSGTDFTLTISRLEPEDFAVYYCQQYGSSPWTFGQGTKVEIK

SEQ ID NO: 1804 - protein, 118 aa, Artificial Sequence; identical to SEQ ID NO: 22
  Description of Artificial Sequence: Synthetic polypeptide
  VH of XENP019932

SEQ ID NO: 1805 - protein, 108 aa, Artificial Sequence
  Description of Artificial Sequence: Synthetic polypeptide
  VL of XENP019932
EIVLTQSPGTLSLSPGERATLSCRASQSVGSSYLSWYQQKPGQAPRLLIYGAFSRATGIPDRFSGSGSGTDFTLTISRLEPEDFAVYYCQQYGSSPWTFGQGTKVEIK

SEQ ID NO: 1806 - protein, 5 aa, Artificial Sequence
  Description of Artificial Sequence: Synthetic peptide
  XENP019932 vhCDR1
SYTMH

SEQ ID NO: 1807 - protein, 17 aa, Artificial Sequence
  Description of Artificial Sequence: Synthetic peptide
  XENP019932 vhCDR2
FISYDGNNKYYADSVKG

SEQ ID NO: 1808 - protein, 9 aa, Artificial Sequence
  Description of Artificial Sequence: Synthetic peptide
  XENP019932 vhCDR3
TGWLGPFDY

SEQ ID NO: 1809 - protein, 12 aa, Artificial Sequence
  Description of Artificial Sequence: Synthetic peptide
  XENP019932 vlCDR1
RASQSVGSSYLS

SEQ ID NO: 1810 - protein, 7 aa, Artificial Sequence
  Description of Artificial Sequence: Synthetic peptide
  XENP019932 vlCDR2
GAFSRAT

SEQ ID NO: 1811 - protein, 9 aa, Artificial Sequence
  Description of Artificial Sequence: Synthetic peptide
  XENP019932 vlCDR3
QQYGSSPWT

SEQ ID NO: 1812 - protein, 246 aa, Artificial Sequence
  Description of Artificial Sequence: Synthetic polypeptide
  XENP019933 [CTLA-4]_H0_L0.45_scFv(GKPGS)4
QVQLVESGGGVVQPGRSLRLSCAASGFTFSSYTMHWVRQAPGKGLEWVTFISYDGNNKYYADSVKGRFTISRDNSKNTLYLQMNSLRAEDTAIYYCARTGWLGPFDYWGQGTLVTVSSGKPGSGKPGSGKPGSGKPGSEIVLTQSPGTLSLSPGERATLSCRASQSVGSSYLTWYQQKPGQAPRLLIYGAFSRATGIPDRFSGSGSGTDFTLTISRLEPEDFAVYYCQQYGSSPWTFGQGTKVEIK

SEQ ID NO: 1813 - protein, 118 aa, Artificial Sequence; identical to SEQ ID NO: 22
  Description of Artificial Sequence: Synthetic polypeptide
  VH of XENP019933

SEQ ID NO: 1814 - protein, 108 aa, Artificial Sequence
  Description of Artificial Sequence: Synthetic polypeptide
  VL of XENP019933
EIVLTQSPGTLSLSPGERATLSCRASQSVGSSYLTWYQQKPGQAPRLLIYGAFSRATGIPDRFSGSGSGTDFTLTISRLEPEDFAVYYCQQYGSSPWTFGQGTKVEIK

SEQ ID NO: 1815 - protein, 5 aa, Artificial Sequence
  Description of Artificial Sequence: Synthetic peptide
  XENP019933 vhCDR1
SYTMH

SEQ ID NO: 1816 - protein, 17 aa, Artificial Sequence
  Description of Artificial Sequence: Synthetic peptide
  XENP019933 vhCDR2
FISYDGNNKYYADSVKG

SEQ ID NO: 1817 - protein, 9 aa, Artificial Sequence
  Description of Artificial Sequence: Synthetic peptide
  XENP019933 vhCDR3
TGWLGPFDY

SEQ ID NO: 1818 - protein, 12 aa, Artificial Sequence
  Description of Artificial Sequence: Synthetic peptide
  XENP019933 vlCDR1
RASQSVGSSYLT

SEQ ID NO: 1819 - protein, 7 aa, Artificial Sequence
  Description of Artificial Sequence: Synthetic peptide
  XENP019933 vlCDR2
GAFSRAT

SEQ ID NO: 1820 - protein, 9 aa, Artificial Sequence
  Description of Artificial Sequence: Synthetic peptide
  XENP019933 vlCDR3
QQYGSSPWT

SEQ ID NO: 1821 - protein, 246 aa, Artificial Sequence
  Description of Artificial Sequence: Synthetic polypeptide
  XENP019934 [CTLA-4]_H0_L0.46_scFv(GKPGS)4
QVQLVESGGGVVQPGRSLRLSCAASGFTFSSYTMHWVRQAPGKGLEWVTFISYDGNNKYYADSVKGRFTISRDNSKNTLYLQMNSLRAEDTAIYYCARTGWLGPFDYWGQGTLVTVSSGKPGSGKPGSGKPGSGKPGSEIVLTQSPGTLSLSPGERATLSCRASQSVGSSYLAWYEQKPGQAPRLLIYGAFSRATGIPDRFSGSGSGTDFTLTISRLEPEDFAVYYCQQYGSSPWTFGQGTKVEIK

SEQ ID NO: 1822 - protein, 118 aa, Artificial Sequence; identical to SEQ ID NO: 22
  Description of Artificial Sequence: Synthetic polypeptide
  VH of XENP019934

SEQ ID NO: 1823 - protein, 108 aa, Artificial Sequence
  Description of Artificial Sequence: Synthetic polypeptide
  VL of XENP019934
EIVLTQSPGTLSLSPGERATLSCRASQSVGSSYLAWYEQKPGQAPRLLIYGAFSRATGIPDRFSGSGSGTDFTLTISRLEPEDFAVYYCQQYGSSPWTFGQGTKVEIK

SEQ ID NO: 1824 - protein, 5 aa, Artificial Sequence
  Description of Artificial Sequence: Synthetic peptide
  XENP019934 vhCDR1
SYTMH

SEQ ID NO: 1825 - protein, 17 aa, Artificial Sequence
  Description of Artificial Sequence: Synthetic peptide
  XENP019934 vhCDR2
FISYDGNNKYYADSVKG

SEQ ID NO: 1826 - protein, 9 aa, Artificial Sequence
  Description of Artificial Sequence: Synthetic peptide
  XENP019934 vhCDR3
TGWLGPFDY

SEQ ID NO: 1827 - protein, 12 aa, Artificial Sequence
  Description of Artificial Sequence: Synthetic peptide
  XENP019934 vlCDR1
RASQSVGSSYLA

SEQ ID NO: 1828 - protein, 7 aa, Artificial Sequence
  Description of Artificial Sequence: Synthetic peptide
  XENP019934 vlCDR2
GAFSRAT

SEQ ID NO: 1829 - protein, 9 aa, Artificial Sequence
  Description of Artificial Sequence: Synthetic peptide
  XENP019934 vlCDR3
QQYGSSPWT

SEQ ID NO: 1830 - protein, 246 aa, Artificial Sequence
  Description of Artificial Sequence: Synthetic polypeptide
  XENP019935 [CTLA-4]_H0_L0.47_scFv(GKPGS)4
QVQLVESGGGVVQPGRSLRLSCAASGFTFSSYTMHWVRQAPGKGLEWVTFISYDGNNKYYADSVKGRFTISRDNSKNTLYLQMNSLRAEDTAIYYCARTGWLGPFDYWGQGTLVTVSSGKPGSGKPGSGKPGSGKPGSEIVLTQSPGTLSLSPGERATLSCRASQSVGSSYLAWYLQKPGQAPRLLIYGAFSRATGIPDRFSGSGSGTDFTLTISRLEPEDFAVYYCQQYGSSPWTFGQGTKVEIK

SEQ ID NO: 1831 - protein, 118 aa, Artificial Sequence; identical to SEQ ID NO: 22
  Description of Artificial Sequence: Synthetic polypeptide
  VH of XENP019935

SEQ ID NO: 1832 - protein, 108 aa, Artificial Sequence
  Description of Artificial Sequence: Synthetic polypeptide
  VL of XENP019935
EIVLTQSPGTLSLSPGERATLSCRASQSVGSSYLAWYLQKPGQAPRLLIYGAFSRATGIPDRFSGSGSGTDFTLTISRLEPEDFAVYYCQQYGSSPWTFGQGTKVEIK

SEQ ID NO: 1833 - protein, 5 aa, Artificial Sequence
  Description of Artificial Sequence: Synthetic peptide
  XENP019935 vhCDR1
SYTMH

SEQ ID NO: 1834 - protein, 17 aa, Artificial Sequence
  Description of Artificial Sequence: Synthetic peptide
  XENP019935 vhCDR2
FISYDGNNKYYADSVKG

SEQ ID NO: 1835 - protein, 9 aa, Artificial Sequence
  Description of Artificial Sequence: Synthetic peptide
  XENP019935 vhCDR3
TGWLGPFDY

SEQ ID NO: 1836 - protein, 12 aa, Artificial Sequence
  Description of Artificial Sequence: Synthetic peptide
  XENP019935 vlCDR1
RASQSVGSSYLA

SEQ ID NO: 1837 - protein, 7 aa, Artificial Sequence
  Description of Artificial Sequence: Synthetic peptide
  XENP019935 vlCDR2
GAFSRAT

SEQ ID NO: 1838 - protein, 9 aa, Artificial Sequence
  Description of Artificial Sequence: Synthetic peptide
  XENP019935 vlCDR3
QQYGSSPWT

SEQ ID NO: 1839 - protein, 246 aa, Artificial Sequence
  Description of Artificial Sequence: Synthetic polypeptide
  XENP019936 [CTLA-4]_H0_L0.48_scFv(GKPGS)4
QVQLVESGGGVVQPGRSLRLSCAASGFTFSSYTMHWVRQAPGKGLEWVTFISYDGNNKYYADSVKGRFTISRDNSKNTLYLQMNSLRAEDTAIYYCARTGWLGPFDYWGQGTLVTVSSGKPGSGKPGSGKPGSGKPGSEIVLTQSPGTLSLSPGERATLSCRASQSVGSSYLAWYRQKPGQAPRLLIYGAFSRATGIPDRFSGSGSGTDFTLTISRLEPEDFAVYYCQQYGSSPWTFGQGTKVEIK

SEQ ID NO: 1840 - protein, 118 aa, Artificial Sequence; identical to SEQ ID NO: 22
  Description of Artificial Sequence: Synthetic polypeptide
  VH of XENP019936

SEQ ID NO: 1841 - protein, 108 aa, Artificial Sequence
  Description of Artificial Sequence: Synthetic polypeptide
  VL of XENP019936
EIVLTQSPGTLSLSPGERATLSCRASQSVGSSYLAWYRQKPGQAPRLLIYGAFSRATGIPDRFSGSGSGTDFTLTISRLEPEDFAVYYCQQYGSSPWTFGQGTKVEIK

SEQ ID NO: 1842 - protein, 5 aa, Artificial Sequence
  Description of Artificial Sequence: Synthetic peptide
  XENP019936 vhCDR1
SYTMH

SEQ ID NO: 1843 - protein, 17 aa, Artificial Sequence
  Description of Artificial Sequence: Synthetic peptide
  XENP019936 vhCDR2
FISYDGNNKYYADSVKG

SEQ ID NO: 1844 - protein, 9 aa, Artificial Sequence
  Description of Artificial Sequence: Synthetic peptide
  XENP019936 vhCDR3
TGWLGPFDY

SEQ ID NO: 1845 - protein, 12 aa, Artificial Sequence
  Description of Artificial Sequence: Synthetic peptide
  XENP019936 vlCDR1
RASQSVGSSYLA

SEQ ID NO: 1846 - protein, 7 aa, Artificial Sequence
  Description of Artificial Sequence: Synthetic peptide
  XENP019936 vlCDR2
GAFSRAT

SEQ ID NO: 1847 - protein, 9 aa, Artificial Sequence
  Description of Artificial Sequence: Synthetic peptide
  XENP019936 vlCDR3
QQYGSSPWT

SEQ ID NO: 1848 - protein, 246 aa, Artificial Sequence
  Description of Artificial Sequence: Synthetic polypeptide
  XENP019937 [CTLA-4]_H0_L0.49_scFv(GKPGS)4
QVQLVESGGGVVQPGRSLRLSCAASGFTFSSYTMHWVRQAPGKGLEWVTFISYDGNNKYYADSVKGRFTISRDNSKNTLYLQMNSLRAEDTAIYYCARTGWLGPFDYWGQGTLVTVSSGKPGSGKPGSGKPGSGKPGSEIVLTQSPGTLSLSPGERATLSCRASQSVGSSYLAWYRQKPGQAPELLIYGAFSRATGIPDRFSGSGSGTDFTLTISRLEPEDFAVYYCQQYGSSPWTFGQGTKVEIK

SEQ ID NO: 1849 - protein, 118 aa, Artificial Sequence; identical to SEQ ID NO: 22
  Description of Artificial Sequence: Synthetic polypeptide
  VH of XENP019937

SEQ ID NO: 1850 - protein, 108 aa, Artificial Sequence
  Description of Artificial Sequence: Synthetic polypeptide
  VL of XENP019937
EIVLTQSPGTLSLSPGERATLSCRASQSVGSSYLAWYRQKPGQAPELLIYGAFSRATGIPDRFSGSGSGTDFTLTISRLEPEDFAVYYCQQYGSSPWTFGQGTKVEIK

SEQ ID NO: 1851 - protein, 5 aa, Artificial Sequence
  Description of Artificial Sequence: Synthetic peptide
  XENP019937 vhCDR1
SYTMH

SEQ ID NO: 1852 - protein, 17 aa, Artificial Sequence
  Description of Artificial Sequence: Synthetic peptide
  XENP019937 vhCDR2
FISYDGNNKYYADSVKG

SEQ ID NO: 1853 - protein, 9 aa, Artificial Sequence
  Description of Artificial Sequence: Synthetic peptide
  XENP019937 vhCDR3
TGWLGPFDY

SEQ ID NO: 1854 - protein, 12 aa, Artificial Sequence
  Description of Artificial Sequence: Synthetic peptide
  XENP019937 vlCDR1
RASQSVGSSYLA

SEQ ID NO: 1855 - protein, 7 aa, Artificial Sequence
  Description of Artificial Sequence: Synthetic peptide
  XENP019937 vlCDR2
GAFSRAT

SEQ ID NO: 1856 - protein, 9 aa, Artificial Sequence
  Description of Artificial Sequence: Synthetic peptide
  XENP019937 vlCDR3
QQYGSSPWT

SEQ ID NO: 1857 - protein, 246 aa, Artificial Sequence
  Description of Artificial Sequence: Synthetic polypeptide
  XENP019938 [CTLA-4]_H0_L0.50_scFv(GKPGS)4
QVQLVESGGGVVQPGRSLRLSCAASGFTFSSYTMHWVRQAPGKGLEWVTFISYDGNNKYYADSVKGRFTISRDNSKNTLYLQMNSLRAEDTAIYYCARTGWLGPFDYWGQGTLVTVSSGKPGSGKPGSGKPGSGKPGSEIVLTQSPGTLSLSPGERATLSCRASQSVGSSYLAWYQEKPGQAPRLLIYGAFSRATGIPDRFSGSGSGTDFTLTISRLEPEDFAVYYCQQYGSSPWTFGQGTKVEIK

SEQ ID NO: 1858 - protein, 118 aa, Artificial Sequence; identical to SEQ ID NO: 22
  Description of Artificial Sequence: Synthetic polypeptide
  VH of XENP019938

SEQ ID NO: 1859 - protein, 108 aa, Artificial Sequence; identical to SEQ ID NO: 32
  Description of Artificial Sequence: Synthetic polypeptide
  VL of XENP019938

SEQ ID NO: 1860 - protein, 5 aa, Artificial Sequence
  Description of Artificial Sequence: Synthetic peptide
  XENP019938 vhCDR1
SYTMH

SEQ ID NO: 1861 - protein, 17 aa, Artificial Sequence
  Description of Artificial Sequence: Synthetic peptide
  XENP019938 vhCDR2
FISYDGNNKYYADSVKG

SEQ ID NO: 1862 - protein, 9 aa, Artificial Sequence
  Description of Artificial Sequence: Synthetic peptide
  XENP019938 vhCDR3
TGWLGPFDY

SEQ ID NO: 1863 - protein, 12 aa, Artificial Sequence
  Description of Artificial Sequence: Synthetic peptide
  XENP019938 vlCDR1
RASQSVGSSYLA

SEQ ID NO: 1864 - protein, 7 aa, Artificial Sequence
  Description of Artificial Sequence: Synthetic peptide
  XENP019938 vlCDR2
GAFSRAT

SEQ ID NO: 1865 - protein, 9 aa, Artificial Sequence
  Description of Artificial Sequence: Synthetic peptide
  XENP019938 vlCDR3
QQYGSSPWT

SEQ ID NO: 1866 - protein, 246 aa, Artificial Sequence
  Description of Artificial Sequence: Synthetic polypeptide
  XENP019939 [CTLA-4]_H0_L0.51_scFv(GKPGS)4
QVQLVESGGGVVQPGRSLRLSCAASGFTFSSYTMHWVRQAPGKGLEWVTFISYDGNNKYYADSVKGRFTISRDNSKNTLYLQMNSLRAEDTAIYYCARTGWLGPFDYWGQGTLVTVSSGKPGSGKPGSGKPGSGKPGSEIVLTQSPGTLSLSPGERATLSCRASQSVGSSYLAWYQQKPDQAPRLLIYGAFSRATGIPDRFSGSGSGTDFTLTISRLEPEDFAVYYCQQYGSSPWTFGQGTKVEIK

SEQ ID NO: 1867 - protein, 118 aa, Artificial Sequence; identical to SEQ ID NO: 22
  Description of Artificial Sequence: Synthetic polypeptide
  VH of XENP019939

SEQ ID NO: 1868 - protein, 108 aa, Artificial Sequence; identical to SEQ ID NO: 41
  Description of Artificial Sequence: Synthetic polypeptide
  VL of XENP019939

SEQ ID NO: 1869 - protein, 5 aa, Artificial Sequence
  Description of Artificial Sequence: Synthetic peptide
  XENP019939 vhCDR1
SYTMH

SEQ ID NO: 1870 - protein, 17 aa, Artificial Sequence
  Description of Artificial Sequence: Synthetic peptide
  XENP019939 vhCDR2
FISYDGNNKYYADSVKG

SEQ ID NO: 1871 - protein, 9 aa, Artificial Sequence
  Description of Artificial Sequence: Synthetic peptide
  XENP019939 vhCDR3
TGWLGPFDY

SEQ ID NO: 1872 - protein, 12 aa, Artificial Sequence
  Description of Artificial Sequence: Synthetic peptide
  XENP019939 vlCDR1
RASQSVGSSYLA

SEQ ID NO: 1873 - protein, 7 aa, Artificial Sequence
  Description of Artificial Sequence: Synthetic peptide
  XENP019939 vlCDR2
GAFSRAT

SEQ ID NO: 1874 - protein, 9 aa, Artificial Sequence
  Description of Artificial Sequence: Synthetic peptide
  XENP019939 vlCDR3
QQYGSSPWT

SEQ ID NO: 1875 - protein, 246 aa, Artificial Sequence
  Description of Artificial Sequence: Synthetic polypeptide
  XENP019940 [CTLA-4]_H0_L0.52_scFv(GKPGS)4
QVQLVESGGGVVQPGRSLRLSCAASGFTFSSYTMHWVRQAPGKGLEWVTFISYDGNNKYYADSVKGRFTISRDNSKNTLYLQMNSLRAEDTAIYYCARTGWLGPFDYWGQGTLVTVSSGKPGSGKPGSGKPGSGKPGSEIVLTQSPGTLSLSPGERATLSCRASQSVGSSYLAWYQQKPEQAPRLLIYGAFSRATGIPDRFSGSGSGTDFTLTISRLEPEDFAVYYCQQYGSSPWTFGQGTKVEIK

SEQ ID NO: 1876 - protein, 118 aa, Artificial Sequence; identical to SEQ ID NO: 22
  Description of Artificial Sequence: Synthetic polypeptide
  VH of XENP019940

SEQ ID NO: 1877 - protein, 108 aa, Artificial Sequence
  Description of Artificial Sequence: Synthetic polypeptide
  VL of XENP019940
EIVLTQSPGTLSLSPGERATLSCRASQSVGSSYLAWYQQKPEQAPRLLIYGAFSRATGIPDRFSGSGSGTDFTLTISRLEPEDFAVYYCQQYGSSPWTFGQGTKVEIK

SEQ ID NO: 1878 - protein, 5 aa, Artificial Sequence
  Description of Artificial Sequence: Synthetic peptide
  XENP019940 vhCDR1
SYTMH

SEQ ID NO: 1879 - protein, 17 aa, Artificial Sequence
  Description of Artificial Sequence: Synthetic peptide
  XENP019940 vhCDR2
FISYDGNNKYYADSVKG

SEQ ID NO: 1880 - protein, 9 aa, Artificial Sequence
  Description of Artificial Sequence: Synthetic peptide
  XENP019940 vhCDR3
TGWLGPFDY

SEQ ID NO: 1881 - protein, 12 aa, Artificial Sequence
  Description of Artificial Sequence: Synthetic peptide
  XENP019940 vlCDR1
RASQSVGSSYLA

SEQ ID NO: 1882 - protein, 7 aa, Artificial Sequence
  Description of Artificial Sequence: Synthetic peptide
  XENP019940 vlCDR2
GAFSRAT

SEQ ID NO: 1883 - protein, 9 aa, Artificial Sequence
  Description of Artificial Sequence: Synthetic peptide
  XENP019940 vlCDR3
QQYGSSPWT

SEQ ID NO: 1884 - protein, 246 aa, Artificial Sequence
  Description of Artificial Sequence: Synthetic polypeptide
  XENP019941 [CTLA-4]_H0_L0.53_scFv(GKPGS)4
QVQLVESGGGVVQPGRSLRLSCAASGFTFSSYTMHWVRQAPGKGLEWVTFISYDGNNKYYADSVKGRFTISRDNSKNTLYLQMNSLRAEDTAIYYCARTGWLGPFDYWGQGTLVTVSSGKPGSGKPGSGKPGSGKPGSEIVLTQSPGTLSLSPGERATLSCRASQSVGSSYLAWYQQKPGEAPRLLIYGAFSRATGIPDRFSGSGSGTDFTLTISRLEPEDFAVYYCQQYGSSPWTFGQGTKVEIK

SEQ ID NO: 1885 - protein, 118 aa, Artificial Sequence; identical to SEQ ID NO: 22
  Description of Artificial Sequence: Synthetic polypeptide
  VH of XENP019941

SEQ ID NO: 1886 - protein, 108 aa, Artificial Sequence; identical to SEQ ID NO: 77
  Description of Artificial Sequence: Synthetic polypeptide
  VL of XENP019941

SEQ ID NO: 1887 - protein, 5 aa, Artificial Sequence
  Description of Artificial Sequence: Synthetic peptide
  XENP019941 vhCDR1
SYTMH

SEQ ID NO: 1888 - protein, 17 aa, Artificial Sequence
  Description of Artificial Sequence: Synthetic peptide
  XENP019941 vhCDR2
FISYDGNNKYYADSVKG

SEQ ID NO: 1889 - protein, 9 aa, Artificial Sequence
  Description of Artificial Sequence: Synthetic peptide
  XENP019941 vhCDR3
TGWLGPFDY

SEQ ID NO: 1890 - protein, 12 aa, Artificial Sequence
  Description of Artificial Sequence: Synthetic peptide
  XENP019941 vlCDR1
RASQSVGSSYLA

SEQ ID NO: 1891 - protein, 7 aa, Artificial Sequence
  Description of Artificial Sequence: Synthetic peptide
  XENP019941 vlCDR2
GAFSRAT

SEQ ID NO: 1892 - protein, 9 aa, Artificial Sequence
  Description of Artificial Sequence: Synthetic peptide
  XENP019941 vlCDR3
QQYGSSPWT

SEQ ID NO: 1893 - protein, 246 aa, Artificial Sequence
  Description of Artificial Sequence: Synthetic polypeptide
  XENP019942 [CTLA-4]_H0_L0.54_scFv(GKPGS)4
QVQLVESGGGVVQPGRSLRLSCAASGFTFSSYTMHWVRQAPGKGLEWVTFISYDGNNKYYADSVKGRFTISRDNSKNTLYLQMNSLRAEDTAIYYCARTGWLGPFDYWGQGTLVTVSSGKPGSGKPGSGKPGSGKPGSEIVLTQSPGTLSLSPGERATLSCRASQSVGSSYLAWYQQKPGKAPRLLIYGAFSRATGIPDRFSGSGSGTDFTLTISRLEPEDFAVYYCQQYGSSPWTFGQGTKVEIK

SEQ ID NO: 1894 - protein, 118 aa, Artificial Sequence; identical to SEQ ID NO: 22
  Description of Artificial Sequence: Synthetic polypeptide
  VH of XENP019942

SEQ ID NO: 1895 - protein, 108 aa, Artificial Sequence
  Description of Artificial Sequence: Synthetic polypeptide
  VL of XENP019942
EIVLTQSPGTLSLSPGERATLSCRASQSVGSSYLAWYQQKPGKAPRLLIYGAFSRATGIPDRFSGSGSGTDFTLTISRLEPEDFAVYYCQQYGSSPWTFGQGTKVEIK

SEQ ID NO: 1896 - protein, 5 aa, Artificial Sequence
  Description of Artificial Sequence: Synthetic peptide
  XENP019942 vhCDR1
SYTMH

SEQ ID NO: 1897 - protein, 17 aa, Artificial Sequence
  Description of Artificial Sequence: Synthetic peptide
  XENP019942 vhCDR2
FISYDGNNKYYADSVKG

SEQ ID NO: 1898 - protein, 9 aa, Artificial Sequence
  Description of Artificial Sequence: Synthetic peptide
  XENP019942 vhCDR3
TGWLGPFDY

SEQ ID NO: 1899 - protein, 12 aa, Artificial Sequence
  Description of Artificial Sequence: Synthetic peptide
  XENP019942 vlCDR1
RASQSVGSSYLA

SEQ ID NO: 1900 - protein, 7 aa, Artificial Sequence
  Description of Artificial Sequence: Synthetic peptide
  XENP019942 vlCDR2
GAFSRAT

SEQ ID NO: 1901 - protein, 9 aa, Artificial Sequence
  Description of Artificial Sequence: Synthetic peptide
  XENP019942 vlCDR3
QQYGSSPWT

SEQ ID NO: 1902 - protein, 246 aa, Artificial Sequence
  Description of Artificial Sequence: Synthetic polypeptide
  XENP019943 [CTLA-4]_H0_L0.55_scFv(GKPGS)4
QVQLVESGGGVVQPGRSLRLSCAASGFTFSSYTMHWVRQAPGKGLEWVTFISYDGNNKYYADSVKGRFTISRDNSKNTLYLQMNSLRAEDTAIYYCARTGWLGPFDYWGQGTLVTVSSGKPGSGKPGSGKPGSGKPGSEIVLTQSPGTLSLSPGERATLSCRASQSVGSSYLAWYQQKPGKSPRLLIYGAFSRATGIPDRFSGSGSGTDFTLTISRLEPEDFAVYYCQQYGSSPWTFGQGTKVEIK

SEQ ID NO: 1903 - protein, 118 aa, Artificial Sequence; identical to SEQ ID NO: 22
  Description of Artificial Sequence: Synthetic polypeptide
  VH of XENP019943

SEQ ID NO: 1904 - protein, 108 aa, Artificial Sequence
  Description of Artificial Sequence: Synthetic polypeptide
  VL of XENP019943
EIVLTQSPGTLSLSPGERATLSCRASQSVGSSYLAWYQQKPGKSPRLLIYGAFSRATGIPDRFSGSGSGTDFTLTISRLEPEDFAVYYCQQYGSSPWTFGQGTKVEIK

SEQ ID NO: 1905 - protein, 5 aa, Artificial Sequence
  Description of Artificial Sequence: Synthetic peptide
  XENP019943 vhCDR1
SYTMH

SEQ ID NO: 1906 - protein, 17 aa, Artificial Sequence
  Description of Artificial Sequence: Synthetic peptide
  XENP019943 vhCDR2
FISYDGNNKYYADSVKG

SEQ ID NO: 1907 - protein, 9 aa, Artificial Sequence
  Description of Artificial Sequence: Synthetic peptide
  XENP019943 vhCDR3
TGWLGPFDY

SEQ ID NO: 1908 - protein, 12 aa, Artificial Sequence
  Description of Artificial Sequence: Synthetic peptide
  XENP019943 vlCDR1
RASQSVGSSYLA

SEQ ID NO: 1909 - protein, 7 aa, Artificial Sequence
  Description of Artificial Sequence: Synthetic peptide
  XENP019943 vlCDR2
GAFSRAT

SEQ ID NO: 1910 - protein, 9 aa, Artificial Sequence
  Description of Artificial Sequence: Synthetic peptide
  XENP019943 vlCDR3
QQYGSSPWT

SEQ ID NO: 1911 - protein, 246 aa, Artificial Sequence
  Description of Artificial Sequence: Synthetic polypeptide
  XENP019944 [CTLA-4]_H0_L0.56_scFv(GKPGS)4
QVQLVESGGGVVQPGRSLRLSCAASGFTFSSYTMHWVRQAPGKGLEWVTFISYDGNNKYYADSVKGRFTISRDNSKNTLYLQMNSLRAEDTAIYYCARTGWLGPFDYWGQGTLVTVSSGKPGSGKPGSGKPGSGKPGSEIVLTQSPGTLSLSPGERATLSCRASQSVGSSYLAWYQQKPGQSPRLLIYGAFSRATGIPDRFSGSGSGTDFTLTISRLEPEDFAVYYCQQYGSSPWTFGQGTKVEIK

SEQ ID NO: 1912 - protein, 118 aa, Artificial Sequence; identical to SEQ ID NO: 22
  Description of Artificial Sequence: Synthetic polypeptide
  VH of XENP019944

SEQ ID NO: 1913 - protein, 108 aa, Artificial Sequence
  Description of Artificial Sequence: Synthetic polypeptide
  VL of XENP019944
EIVLTQSPGTLSLSPGERATLSCRASQSVGSSYLAWYQQKPGQSPRLLIYGAFSRATGIPDRFSGSGSGTDFTLTISRLEPEDFAVYYCQQYGSSPWTFGQGTKVEIK

SEQ ID NO: 1914 - protein, 5 aa, Artificial Sequence
  Description of Artificial Sequence: Synthetic peptide
  XENP019944 vhCDR1
SYTMH

SEQ ID NO: 1915 - protein, 17 aa, Artificial Sequence
  Description of Artificial Sequence: Synthetic peptide
  XENP019944 vhCDR2
FISYDGNNKYYADSVKG

SEQ ID NO: 1916 - protein, 9 aa, Artificial Sequence
  Description of Artificial Sequence: Synthetic peptide
  XENP019944 vhCDR3
TGWLGPFDY

SEQ ID NO: 1917 - protein, 12 aa, Artificial Sequence
  Description of Artificial Sequence: Synthetic peptide
  XENP019944 vlCDR1
RASQSVGSSYLA

SEQ ID NO: 1918 - protein, 7 aa, Artificial Sequence
  Description of Artificial Sequence: Synthetic peptide
  XENP019944 vlCDR2
GAFSRAT

SEQ ID NO: 1919 - protein, 9 aa, Artificial Sequence
  Description of Artificial Sequence: Synthetic peptide
  XENP019944 vlCDR3
QQYGSSPWT

SEQ ID NO: 1920 - protein, 246 aa, Artificial Sequence
  Description of Artificial Sequence: Synthetic polypeptide
  XENP019945 [CTLA-4]_H0_L0.57_scFv(GKPGS)4
QVQLVESGGGVVQPGRSLRLSCAASGFTFSSYTMHWVRQAPGKGLEWVTFISYDGNNKYYADSVKGRFTISRDNSKNTLYLQMNSLRAEDTAIYYCARTGWLGPFDYWGQGTLVTVSSGKPGSGKPGSGKPGSGKPGSEIVLTQSPGTLSLSPGERATLSCRASQSVGSSYLAWYQQKPGQAPELLIYGAFSRATGIPDRFSGSGSGTDFTLTISRLEPEDFAVYYCQQYGSSPWTFGQGTKVEIK

SEQ ID NO: 1921 - protein, 118 aa, Artificial Sequence; identical to SEQ ID NO: 22
  Description of Artificial Sequence: Synthetic polypeptide
  VH of XENP019945

SEQ ID NO: 1922 - protein, 108 aa, Artificial Sequence; identical to SEQ ID NO: 86
  Description of Artificial Sequence: Synthetic polypeptide
  VL of XENP019945

SEQ ID NO: 1923 - protein, 5 aa, Artificial Sequence
  Description of Artificial Sequence: Synthetic peptide
  XENP019945 vhCDR1
SYTMH

SEQ ID NO: 1924 - protein, 17 aa, Artificial Sequence
  Description of Artificial Sequence: Synthetic peptide
  XENP019945 vhCDR2
FISYDGNNKYYADSVKG

SEQ ID NO: 1925 - protein, 9 aa, Artificial Sequence
  Description of Artificial Sequence: Synthetic peptide
  XENP019945 vhCDR3
TGWLGPFDY

SEQ ID NO: 1926 - protein, 12 aa, Artificial Sequence
  Description of Artificial Sequence: Synthetic peptide
  XENP019945 vlCDR1
RASQSVGSSYLA

SEQ ID NO: 1927 - protein, 7 aa, Artificial Sequence
  Description of Artificial Sequence: Synthetic peptide
  XENP019945 vlCDR2
GAFSRAT

SEQ ID NO: 1928 - protein, 9 aa, Artificial Sequence
  Description of Artificial Sequence: Synthetic peptide
  XENP019945 vlCDR3
QQYGSSPWT

SEQ ID NO: 1929 - protein, 246 aa, Artificial Sequence
  Description of Artificial Sequence: Synthetic polypeptide
  XENP019946 [CTLA-4]_H0_L0.58_scFv(GKPGS)4
QVQLVESGGGVVQPGRSLRLSCAASGFTFSSYTMHWVRQAPGKGLEWVTFISYDGNNKYYADSVKGRFTISRDNSKNTLYLQMNSLRAEDTAIYYCARTGWLGPFDYWGQGTLVTVSSGKPGSGKPGSGKPGSGKPGSEIVLTQSPGTLSLSPGERATLSCRASQSVGSSYLAWYQQKPGQAPELLIYGAFSRATGIPDRFSGSGSGTDFTLTISRLEPQDFAVYYCQQYGSSPWTFGQGTKVEIK

SEQ ID NO: 1930 - protein, 118 aa, Artificial Sequence; identical to SEQ ID NO: 22
  Description of Artificial Sequence: Synthetic polypeptide
  VH of XENP019946

SEQ ID NO: 1931 - protein, 108 aa, Artificial Sequence
  Description of Artificial Sequence: Synthetic polypeptide
  VL of XENP019946
EIVLTQSPGTLSLSPGERATLSCRASQSVGSSYLAWYQQKPGQAPELLIYGAFSRATGIPDRFSGSGSGTDFTLTISRLEPQDFAVYYCQQYGSSPWTFGQGTKVEIK

SEQ ID NO: 1932 - protein, 5 aa, Artificial Sequence
  Description of Artificial Sequence: Synthetic peptide
  XENP019946 vhCDR1
SYTMH

SEQ ID NO: 1933 - protein, 17 aa, Artificial Sequence
  Description of Artificial Sequence: Synthetic peptide
  XENP019946 vhCDR2
FISYDGNNKYYADSVKG

SEQ ID NO: 1934 - protein, 9 aa, Artificial Sequence
  Description of Artificial Sequence: Synthetic peptide
  XENP019946 vhCDR3
TGWLGPFDY

SEQ ID NO: 1935 - protein, 12 aa, Artificial Sequence
  Description of Artificial Sequence: Synthetic peptide
  XENP019946 vlCDR1
RASQSVGSSYLA

SEQ ID NO: 1936 - protein, 7 aa, Artificial Sequence
  Description of Artificial Sequence: Synthetic peptide
  XENP019946 vlCDR2
GAFSRAT

SEQ ID NO: 1937 - protein, 9 aa, Artificial Sequence
  Description of Artificial Sequence: Synthetic peptide
  XENP019946 vlCDR3
QQYGSSPWT

SEQ ID NO: 1938 - protein, 246 aa, Artificial Sequence
  Description of Artificial Sequence: Synthetic polypeptide
  XENP019947 [CTLA-4]_H0_L0.59_scFv(GKPGS)4
QVQLVESGGGVVQPGRSLRLSCAASGFTFSSYTMHWVRQAPGKGLEWVTFISYDGNNKYYADSVKGRFTISRDNSKNTLYLQMNSLRAEDTAIYYCARTGWLGPFDYWGQGTLVTVSSGKPGSGKPGSGKPGSGKPGSEIVLTQSPGTLSLSPGERATLSCRASQSVGSSYLAWYQQKPGQAPKLLIYGAFSRATGIPDRFSGSGSGTDFTLTISRLEPEDFAVYYCQQYGSSPWTFGQGTKVEIK

SEQ ID NO: 1939 - protein, 118 aa, Artificial Sequence; identical to SEQ ID NO: 22
  Description of Artificial Sequence: Synthetic polypeptide
  VH of XENP019947

SEQ ID NO: 1940 - protein, 108 aa, Artificial Sequence
  Description of Artificial Sequence: Synthetic polypeptide
  VL of XENP019947
EIVLTQSPGTLSLSPGERATLSCRASQSVGSSYLAWYQQKPGQAPKLLIYGAFSRATGIPDRFSGSGSGTDFTLTISRLEPEDFAVYYCQQYGSSPWTFGQGTKVEIK

SEQ ID NO: 1941 - protein, 5 aa, Artificial Sequence
  Description of Artificial Sequence: Synthetic peptide
  XENP019947 vhCDR1
SYTMH

SEQ ID NO: 1942 - protein, 17 aa, Artificial Sequence
  Description of Artificial Sequence: Synthetic peptide
  XENP019947 vhCDR2
FISYDGNNKYYADSVKG

SEQ ID NO: 1943 - protein, 9 aa, Artificial Sequence
  Description of Artificial Sequence: Synthetic peptide
  XENP019947 vhCDR3
TGWLGPFDY

SEQ ID NO: 1944 - protein, 12 aa, Artificial Sequence
  Description of Artificial Sequence: Synthetic peptide
  XENP019947 vlCDR1
RASQSVGSSYLA

SEQ ID NO: 1945 - protein, 7 aa, Artificial Sequence
  Description of Artificial Sequence: Synthetic peptide
  XENP019947 vlCDR2
GAFSRAT

SEQ ID NO: 1946 - protein, 9 aa, Artificial Sequence
  Description of Artificial Sequence: Synthetic peptide
  XENP019947 vlCDR3
QQYGSSPWT

SEQ ID NO: 1947 - protein, 246 aa, Artificial Sequence
  Description of Artificial Sequence: Synthetic polypeptide
  XENP019948 [CTLA-4]_H0_L0.60_scFv(GKPGS)4
QVQLVESGGGVVQPGRSLRLSCAASGFTFSSYTMHWVRQAPGKGLEWVTFISYDGNNKYYADSVKGRFTISRDNSKNTLYLQMNSLRAEDTAIYYCARTGWLGPFDYWGQGTLVTVSSGKPGSGKPGSGKPGSGKPGSEIVLTQSPGTLSLSPGERATLSCRASQSVGSSYLAWYQQKPGQAPRRLIYGAFSRATGIPDRFSGSGSGTDFTLTISRLEPEDFAVYYCQQYGSSPWTFGQGTKVEIK

SEQ ID NO: 1948 - protein, 118 aa, Artificial Sequence; identical to SEQ ID NO: 22
  Description of Artificial Sequence: Synthetic polypeptide
  VH of XENP019948

SEQ ID NO: 1949 - protein, 108 aa, Artificial Sequence
  Description of Artificial Sequence: Synthetic polypeptide
  VL of XENP019948
EIVLTQSPGTLSLSPGERATLSCRASQSVGSSYLAWYQQKPGQAPRRLIYGAFSRATGIPDRFSGSGSGTDFTLTISRLEPEDFAVYYCQQYGSSPWTFGQGTKVEIK

SEQ ID NO: 1950 - protein, 5 aa, Artificial Sequence
  Description of Artificial Sequence: Synthetic peptide
  XENP019948 vhCDR1
SYTMH

SEQ ID NO: 1951 - protein, 17 aa, Artificial Sequence
  Description of Artificial Sequence: Synthetic peptide
  XENP019948 vhCDR2
FISYDGNNKYYADSVKG

SEQ ID NO: 1952 - protein, 9 aa, Artificial Sequence
  Description of Artificial Sequence: Synthetic peptide
  XENP019948 vhCDR3
TGWLGPFDY

SEQ ID NO: 1953 - protein, 12 aa, Artificial Sequence
  Description of Artificial Sequence: Synthetic peptide
  XENP019948 vlCDR1
RASQSVGSSYLA

SEQ ID NO: 1954 - protein, 7 aa, Artificial Sequence
  Description of Artificial Sequence: Synthetic peptide
  XENP019948 vlCDR2
GAFSRAT

SEQ ID NO: 1955 - protein, 9 aa, Artificial Sequence
  Description of Artificial Sequence: Synthetic peptide
  XENP019948 vlCDR3
QQYGSSPWT

SEQ ID NO: 1956 - protein, 246 aa, Artificial Sequence
  Description of Artificial Sequence: Synthetic polypeptide
  XENP019949 [CTLA-4]_H0_L0.61_scFv(GKPGS)4
QVQLVESGGGVVQPGRSLRLSCAASGFTFSSYTMHWVRQAPGKGLEWVTFISYDGNNKYYADSVKGRFTISRDNSKNTLYLQMNSLRAEDTAIYYCARTGWLGPFDYWGQGTLVTVSSGKPGSGKPGSGKPGSGKPGSEIVLTQSPGTLSLSPGERATLSCRASQSVGSSYLAWYQQKPGQAPRRLIYGAFSRDTGIPDRFSGSGSGTDFTLTISRLEPEDFAVYYCQQYGSSPWTFGQGTKVEIK

SEQ ID NO: 1957 - protein, 118 aa, Artificial Sequence; identical to SEQ ID NO: 22
  Description of Artificial Sequence: Synthetic polypeptide
  VH of XENP019949

SEQ ID NO: 1958 - protein, 108 aa, Artificial Sequence
  Description of Artificial Sequence: Synthetic polypeptide
  VL of XENP019949
EIVLTQSPGTLSLSPGERATLSCRASQSVGSSYLAWYQQKPGQAPRRLIYGAFSRDTGIPDRFSGSGSGTDFTLTISRLEPEDFAVYYCQQYGSSPWTFGQGTKVEIK

SEQ ID NO: 1959 - protein, 5 aa, Artificial Sequence
  Description of Artificial Sequence: Synthetic peptide
  XENP019949 vhCDR1
SYTMH

SEQ ID NO: 1960 - protein, 17 aa, Artificial Sequence
  Description of Artificial Sequence: Synthetic peptide
  XENP019949 vhCDR2
FISYDGNNKYYADSVKG

SEQ ID NO: 1961 - protein, 9 aa, Artificial Sequence
  Description of Artificial Sequence: Synthetic peptide
  XENP019949 vhCDR3
TGWLGPFDY

SEQ ID NO: 1962 - protein, 12 aa, Artificial Sequence
  Description of Artificial Sequence: Synthetic peptide
  XENP019949 vlCDR1
RASQSVGSSYLA

SEQ ID NO: 1963 - protein, 7 aa, Artificial Sequence
  Description of Artificial Sequence: Synthetic peptide
  XENP019949 vlCDR2
GAFSRDT

SEQ ID NO: 1964 - protein, 9 aa, Artificial Sequence
  Description of Artificial Sequence: Synthetic peptide
  XENP019949 vlCDR3
QQYGSSPWT

SEQ ID NO: 1965 - protein, 246 aa, Artificial Sequence
  Description of Artificial Sequence: Synthetic polypeptide
  XENP019950 [CTLA-4]_H0_L0.62_scFv(GKPGS)4
QVQLVESGGGVVQPGRSLRLSCAASGFTFSSYTMHWVRQAPGKGLEWVTFISYDGNNKYYADSVKGRFTISRDNSKNTLYLQMNSLRAEDTAIYYCARTGWLGPFDYWGQGTLVTVSSGKPGSGKPGSGKPGSGKPGSEIVLTQSPGTLSLSPGERATLSCRASQSVGSSYLAWYQQKPGQAPRLLIAGAFSRATGIPDRFSGSGSGTDFTLTISRLEPEDFAVYYCQQYGSSPWTFGQGTKVEIK

SEQ ID NO: 1966 - protein, 118 aa, Artificial Sequence; identical to SEQ ID NO: 22
  Description of Artificial Sequence: Synthetic polypeptide
  VH of XENP019950

SEQ ID NO: 1967 - protein, 108 aa, Artificial Sequence
  Description of Artificial Sequence: Synthetic polypeptide
  VL of XENP019950
EIVLTQSPGTLSLSPGERATLSCRASQSVGSSYLAWYQQKPGQAPRLLIAGAFSRATGIPDRFSGSGSGTDFTLTISRLEPEDFAVYYCQQYGSSPWTFGQGTKVEIK

SEQ ID NO: 1968 - protein, 5 aa, Artificial Sequence
  Description of Artificial Sequence: Synthetic peptide
  XENP019950 vhCDR1
SYTMH

SEQ ID NO: 1969 - protein, 17 aa, Artificial Sequence
  Description of Artificial Sequence: Synthetic peptide
  XENP019950 vhCDR2
FISYDGNNKYYADSVKG

SEQ ID NO: 1970 - protein, 9 aa, Artificial Sequence
  Description of Artificial Sequence: Synthetic peptide
  XENP019950 vhCDR3
TGWLGPFDY

SEQ ID NO: 1971 - protein, 12 aa, Artificial Sequence
  Description of Artificial Sequence: Synthetic peptide
  XENP019950 vlCDR1
RASQSVGSSYLA

SEQ ID NO: 1972 - protein, 7 aa, Artificial Sequence
  Description of Artificial Sequence: Synthetic peptide
  XENP019950 vlCDR2
GAFSRAT

SEQ ID NO: 1973 - protein, 9 aa, Artificial Sequence
  Description of Artificial Sequence: Synthetic peptide
  XENP019950 vlCDR3
QQYGSSPWT

SEQ ID NO: 1974 - protein, 246 aa, Artificial Sequence
  Description of Artificial Sequence: Synthetic polypeptide
  XENP019951 [CTLA-4]_H0_L0.63_scFv(GKPGS)4
QVQLVESGGGVVQPGRSLRLSCAASGFTFSSYTMHWVRQAPGKGLEWVTFISYDGNNKYYADSVKGRFTISRDNSKNTLYLQMNSLRAEDTAIYYCARTGWLGPFDYWGQGTLVTVSSGKPGSGKPGSGKPGSGKPGSEIVLTQSPGTLSLSPGERATLSCRASQSVGSSYLAWYQQKPGQAPRLLIFGAFSRATGIPDRFSGSGSGTDFTLTISRLEPEDFAVYYCQQYGSSPWTFGQGTKVEIK

SEQ ID NO: 1975 - protein, 118 aa, Artificial Sequence; identical to SEQ ID NO: 22
  Description of Artificial Sequence: Synthetic polypeptide
  VH of XENP019951

SEQ ID NO: 1976 - protein, 108 aa, Artificial Sequence
  Description of Artificial Sequence: Synthetic polypeptide
  VL of XENP019951
EIVLTQSPGTLSLSPGERATLSCRASQSVGSSYLAWYQQKPGQAPRLLIFGAFSRATGIPDRFSGSGSGTDFTLTISRLEPEDFAVYYCQQYGSSPWTFGQGTKVEIK

SEQ ID NO: 1977 - protein, 5 aa, Artificial Sequence
  Description of Artificial Sequence: Synthetic peptide
  XENP019951 vhCDR1
SYTMH

SEQ ID NO: 1978 - protein, 17 aa, Artificial Sequence
  Description of Artificial Sequence: Synthetic peptide
  XENP019951 vhCDR2
FISYDGNNKYYADSVKG

SEQ ID NO: 1979 - protein, 9 aa, Artificial Sequence
  Description of Artificial Sequence: Synthetic peptide
  XENP019951 vhCDR3
TGWLGPFDY

SEQ ID NO: 1980 - protein, 12 aa, Artificial Sequence
  Description of Artificial Sequence: Synthetic peptide
  XENP019951 vlCDR1
RASQSVGSSYLA

SEQ ID NO: 1981 - protein, 7 aa, Artificial Sequence
  Description of Artificial Sequence: Synthetic peptide
  XENP019951 vlCDR2
GAFSRAT

SEQ ID NO: 1982 - protein, 9 aa, Artificial Sequence
  Description of Artificial Sequence: Synthetic peptide
  XENP019951 vlCDR3
QQYGSSPWT

SEQ ID NO: 1983 - protein, 246 aa, Artificial Sequence
  Description of Artificial Sequence: Synthetic polypeptide
  XENP019952 [CTLA-4]_H0_L0.64_scFv(GKPGS)4
QVQLVESGGGVVQPGRSLRLSCAASGFTFSSYTMHWVRQAPGKGLEWVTFISYDGNNKYYADSVKGRFTISRDNSKNTLYLQMNSLRAEDTAIYYCARTGWLGPFDYWGQGTLVTVSSGKPGSGKPGSGKPGSGKPGSEIVLTQSPGTLSLSPGERATLSCRASQSVGSSYLAWYQQKPGQAPRLLIHGAFSRATGIPDRFSGSGSGTDFTLTISRLEPEDFAVYYCQQYGSSPWTFGQGTKVEIK

SEQ ID NO: 1984 - protein, 118 aa, Artificial Sequence; identical to SEQ ID NO: 22
  Description of Artificial Sequence: Synthetic polypeptide
  VH of XENP019952

SEQ ID NO: 1985 - protein, 108 aa, Artificial Sequence
  Description of Artificial Sequence: Synthetic polypeptide
  VL of XENP019952
EIVLTQSPGTLSLSPGERATLSCRASQSVGSSYLAWYQQKPGQAPRLLIHGAFSRATGIPDRFSGSGSGTDFTLTISRLEPEDFAVYYCQQYGSSPWTFGQGTKVEIK

SEQ ID NO: 1986 - protein, 5 aa, Artificial Sequence
  Description of Artificial Sequence: Synthetic peptide
  XENP019952 vhCDR1
SYTMH

SEQ ID NO: 1987 - protein, 17 aa, Artificial Sequence
  Description of Artificial Sequence: Synthetic peptide
  XENP019952 vhCDR2
FISYDGNNKYYADSVKG

SEQ ID NO: 1988 - protein, 9 aa, Artificial Sequence
  Description of Artificial Sequence: Synthetic peptide
  XENP019952 vhCDR3
TGWLGPFDY

SEQ ID NO: 1989 - protein, 12 aa, Artificial Sequence
  Description of Artificial Sequence: Synthetic peptide
  XENP019952 vlCDR1
RASQSVGSSYLA

SEQ ID NO: 1990 - protein, 7 aa, Artificial Sequence
  Description of Artificial Sequence: Synthetic peptide
  XENP019952 vlCDR2
GAFSRAT

SEQ ID NO: 1991 - protein, 9 aa, Artificial Sequence
  Description of Artificial Sequence: Synthetic peptide
  XENP019952 vlCDR3
QQYGSSPWT

SEQ ID NO: 1992 - protein, 246 aa, Artificial Sequence
  Description of Artificial Sequence: Synthetic polypeptide
  XENP019953 [CTLA-4]_H0_L0.65_scFv(GKPGS)4
QVQLVESGGGVVQPGRSLRLSCAASGFTFSSYTMHWVRQAPGKGLEWVTFISYDGNNKYYADSVKGRFTISRDNSKNTLYLQMNSLRAEDTAIYYCARTGWLGPFDYWGQGTLVTVSSGKPGSGKPGSGKPGSGKPGSEIVLTQSPGTLSLSPGERATLSCRASQSVGSSYLAWYQQKPGQAPRLLILGAFSRATGIPDRFSGSGSGTDFTLTISRLEPEDFAVYYCQQYGSSPWTFGQGTKVEIK

SEQ ID NO: 1993 - protein, 118 aa, Artificial Sequence; identical to SEQ ID NO: 22
  Description of Artificial Sequence: Synthetic polypeptide
  VH of XENP019953

SEQ ID NO: 1994 - protein, 108 aa, Artificial Sequence
  Description of Artificial Sequence: Synthetic polypeptide
  VL of XENP019953
EIVLTQSPGTLSLSPGERATLSCRASQSVGSSYLAWYQQKPGQAPRLLILGAFSRATGIPDRFSGSGSGTDFTLTISRLEPEDFAVYYCQQYGSSPWTFGQGTKVEIK

SEQ ID NO: 1995 - protein, 5 aa, Artificial Sequence
  Description of Artificial Sequence: Synthetic peptide
  XENP019953 vhCDR1
SYTMH

SEQ ID NO: 1996 - protein, 17 aa, Artificial Sequence
  Description of Artificial Sequence: Synthetic peptide
  XENP019953 vhCDR2
FISYDGNNKYYADSVKG

SEQ ID NO: 1997 - protein, 9 aa, Artificial Sequence
  Description of Artificial Sequence: Synthetic peptide
  XENP019953 vhCDR3
TGWLGPFDY

SEQ ID NO: 1998 - protein, 12 aa, Artificial Sequence
  Description of Artificial Sequence: Synthetic peptide
  XENP019953 vlCDR1
RASQSVGSSYLA

SEQ ID NO: 1999 - protein, 7 aa, Artificial Sequence
  Description of Artificial Sequence: Synthetic peptide
  XENP019953 vlCDR2
GAFSRAT

SEQ ID NO: 2000 - protein, 9 aa, Artificial Sequence
  Description of Artificial Sequence: Synthetic peptide
  XENP019953 vlCDR3
QQYGSSPWT

SEQ ID NO: 2001 - protein, 246 aa, Artificial Sequence
  Description of Artificial Sequence: Synthetic polypeptide
  XENP019954 [CTLA-4]_H0_L0.66_scFv(GKPGS)4
QVQLVESGGGVVQPGRSLRLSCAASGFTFSSYTMHWVRQAPGKGLEWVTFISYDGNNKYYADSVKGRFTISRDNSKNTLYLQMNSLRAEDTAIYYCARTGWLGPFDYWGQGTLVTVSSGKPGSGKPGSGKPGSGKPGSEIVLTQSPGTLSLSPGERATLSCRASQSVGSSYLAWYQQKPGQAPRLLIVGAFSRATGIPDRFSGSGSGTDFTLTISRLEPEDFAVYYCQQYGSSPWTFGQGTKVEIK

SEQ ID NO: 2002 - protein, 118 aa, Artificial Sequence; identical to SEQ ID NO: 22
  Description of Artificial Sequence: Synthetic polypeptide
  VH of XENP019954

SEQ ID NO: 2003 - protein, 108 aa, Artificial Sequence
  Description of Artificial Sequence: Synthetic polypeptide
  VL of XENP019954
EIVLTQSPGTLSLSPGERATLSCRASQSVGSSYLAWYQQKPGQAPRLLIVGAFSRATGIPDRFSGSGSGTDFTLTISRLEPEDFAVYYCQQYGSSPWTFGQGTKVEIK

SEQ ID NO: 2004 - protein, 5 aa, Artificial Sequence
  Description of Artificial Sequence: Synthetic peptide
  XENP019954 vhCDR1
SYTMH

SEQ ID NO: 2005 - protein, 17 aa, Artificial Sequence
  Description of Artificial Sequence: Synthetic peptide
  XENP019954 vhCDR2
FISYDGNNKYYADSVKG

SEQ ID NO: 2006 - protein, 9 aa, Artificial Sequence
  Description of Artificial Sequence: Synthetic peptide
  XENP019954 vhCDR3
TGWLGPFDY

SEQ ID NO: 2007 - protein, 12 aa, Artificial Sequence
  Description of Artificial Sequence: Synthetic peptide
  XENP019954 vlCDR1
RASQSVGSSYLA

SEQ ID NO: 2008 - protein, 7 aa, Artificial Sequence
  Description of Artificial Sequence: Synthetic peptide
  XENP019954 vlCDR2
GAFSRAT

SEQ ID NO: 2009 - protein, 9 aa, Artificial Sequence
  Description of Artificial Sequence: Synthetic peptide
  XENP019954 vlCDR3
QQYGSSPWT

SEQ ID NO: 2010 - protein, 246 aa, Artificial Sequence
  Description of Artificial Sequence: Synthetic polypeptide
  XENP019955 [CTLA-4]_H0_L0.67_scFv(GKPGS)4
QVQLVESGGGVVQPGRSLRLSCAASGFTFSSYTMHWVRQAPGKGLEWVTFISYDGNNKYYADSVKGRFTISRDNSKNTLYLQMNSLRAEDTAIYYCARTGWLGPFDYWGQGTLVTVSSGKPGSGKPGSGKPGSGKPGSEIVLTQSPGTLSLSPGERATLSCRASQSVGSSYLAWYQQKPGQAPRLLIYDAFSRATGIPDRFSGSGSGTDFTLTISRLEPEDFAVYYCQQYGSSPWTFGQGTKVEIK

SEQ ID NO: 2011 - protein, 118 aa, Artificial Sequence; identical to SEQ ID NO: 22
  Description of Artificial Sequence: Synthetic polypeptide
  VH of XENP019955

SEQ ID NO: 2012 - protein, 108 aa, Artificial Sequence
  Description of Artificial Sequence: Synthetic polypeptide
  VL of XENP019955
EIVLTQSPGTLSLSPGERATLSCRASQSVGSSYLAWYQQKPGQAPRLLIYDAFSRATGIPDRFSGSGSGTDFTLTISRLEPEDFAVYYCQQYGSSPWTFGQGTKVEIK

SEQ ID NO: 2013 - protein, 5 aa, Artificial Sequence
  Description of Artificial Sequence: Synthetic peptide
  XENP019955 vhCDR1
SYTMH

SEQ ID NO: 2014 - protein, 17 aa, Artificial Sequence
  Description of Artificial Sequence: Synthetic peptide
  XENP019955 vhCDR2
FISYDGNNKYYADSVKG

SEQ ID NO: 2015 - protein, 9 aa, Artificial Sequence
  Description of Artificial Sequence: Synthetic peptide
  XENP019955 vhCDR3
TGWLGPFDY

SEQ ID NO: 2016 - protein, 12 aa, Artificial Sequence
  Description of Artificial Sequence: Synthetic peptide
  XENP019955 vlCDR1
RASQSVGSSYLA

SEQ ID NO: 2017 - protein, 7 aa, Artificial Sequence
  Description of Artificial Sequence: Synthetic peptide
  XENP019955 vlCDR2
DAFSRAT

SEQ ID NO: 2018 - protein, 9 aa, Artificial Sequence
  Description of Artificial Sequence: Synthetic peptide
  XENP019955 vlCDR3
QQYGSSPWT

SEQ ID NO: 2019 - protein, 246 aa, Artificial Sequence
  Description of Artificial Sequence: Synthetic polypeptide
  XENP019956 [CTLA-4]_H0_L0.68_scFv(GKPGS)4
QVQLVESGGGVVQPGRSLRLSCAASGFTFSSYTMHWVRQAPGKGLEWVTFISYDGNNKYYADSVKGRFTISRDNSKNTLYLQMNSLRAEDTAIYYCARTGWLGPFDYWGQGTLVTVSSGKPGSGKPGSGKPGSGKPGSEIVLTQSPGTLSLSPGERATLSCRASQSVGSSYLAWYQQKPGQAPRLLIYSAFSRATGIPDRFSGSGSGTDFTLTISRLEPEDFAVYYCQQYGSSPWTFGQGTKVEIK

SEQ ID NO: 2020 - protein, 118 aa, Artificial Sequence; identical to SEQ ID NO: 22
  Description of Artificial Sequence: Synthetic polypeptide
  VH of XENP019956

SEQ ID NO: 2021 - protein, 108 aa, Artificial Sequence
  Description of Artificial Sequence: Synthetic polypeptide
  VL of XENP019956
EIVLTQSPGTLSLSPGERATLSCRASQSVGSSYLAWYQQKPGQAPRLLIYSAFSRATGIPDRFSGSGSGTDFTLTISRLEPEDFAVYYCQQYGSSPWTFGQGTKVEIK

SEQ ID NO: 2022 - protein, 5 aa, Artificial Sequence
  Description of Artificial Sequence: Synthetic peptide
  XENP019956 vhCDR1
SYTMH

SEQ ID NO: 2023 - protein, 17 aa, Artificial Sequence
  Description of Artificial Sequence: Synthetic peptide
  XENP019956 vhCDR2
FISYDGNNKYYADSVKG

SEQ ID NO: 2024 - protein, 9 aa, Artificial Sequence
  Description of Artificial Sequence: Synthetic peptide
  XENP019956 vhCDR3
TGWLGPFDY

SEQ ID NO: 2025 - protein, 12 aa, Artificial Sequence
  Description of Artificial Sequence: Synthetic peptide
  XENP019956 vlCDR1
RASQSVGSSYLA

SEQ ID NO: 2026 - protein, 7 aa, Artificial Sequence
  Description of Artificial Sequence: Synthetic peptide
  XENP019956 vlCDR2
SAFSRAT

SEQ ID NO: 2027 - protein, 9 aa, Artificial Sequence
  Description of Artificial Sequence: Synthetic peptide
  XENP019956 vlCDR3
QQYGSSPWT

SEQ ID NO: 2028 - protein, 246 aa, Artificial Sequence
  Description of Artificial Sequence: Synthetic polypeptide
  XENP019957 [CTLA-4]_H0_L0.69_scFv(GKPGS)4
QVQLVESGGGVVQPGRSLRLSCAASGFTFSSYTMHWVRQAPGKGLEWVTFISYDGNNKYYADSVKGRFTISRDNSKNTLYLQMNSLRAEDTAIYYCARTGWLGPFDYWGQGTLVTVSSGKPGSGKPGSGKPGSGKPGSEIVLTQSPGTLSLSPGERATLSCRASQSVGSSYLAWYQQKPGQAPRLLIYGVFSRATGIPDRFSGSGSGTDFTLTISRLEPEDFAVYYCQQYGSSPWTFGQGTKVEIK

SEQ ID NO: 2029 - protein, 118 aa, Artificial Sequence; identical to SEQ ID NO: 22
  Description of Artificial Sequence: Synthetic polypeptide
  VH of XENP019957

SEQ ID NO: 2030 - protein, 108 aa, Artificial Sequence
  Description of Artificial Sequence: Synthetic polypeptide
  VL of XENP019957
EIVLTQSPGTLSLSPGERATLSCRASQSVGSSYLAWYQQKPGQAPRLLIYGVFSRATGIPDRFSGSGSGTDFTLTISRLEPEDFAVYYCQQYGSSPWTFGQGTKVEIK

SEQ ID NO: 2031 - protein, 5 aa, Artificial Sequence
  Description of Artificial Sequence: Synthetic peptide
  XENP019957 vhCDR1
SYTMH

SEQ ID NO: 2032 - protein, 17 aa, Artificial Sequence
  Description of Artificial Sequence: Synthetic peptide
  XENP019957 vhCDR2
FISYDGNNKYYADSVKG

SEQ ID NO: 2033 - protein, 9 aa, Artificial Sequence
  Description of Artificial Sequence: Synthetic peptide
  XENP019957 vhCDR3
TGWLGPFDY

SEQ ID NO: 2034 - protein, 12 aa, Artificial Sequence
  Description of Artificial Sequence: Synthetic peptide
  XENP019957 vlCDR1
RASQSVGSSYLA

SEQ ID NO: 2035 - protein, 7 aa, Artificial Sequence
  Description of Artificial Sequence: Synthetic peptide
  XENP019957 vlCDR2
GVFSRAT

SEQ ID NO: 2036 - protein, 9 aa, Artificial Sequence
  Description of Artificial Sequence: Synthetic peptide
  XENP019957 vlCDR3
QQYGSSPWT

SEQ ID NO: 2037 - protein, 246 aa, Artificial Sequence
  Description of Artificial Sequence: Synthetic polypeptide
  XENP019958 [CTLA-4]_H0_L0.70_scFv(GKPGS)4
QVQLVESGGGVVQPGRSLRLSCAASGFTFSSYTMHWVRQAPGKGLEWVTFISYDGNNKYYADSVKGRFTISRDNSKNTLYLQMNSLRAEDTAIYYCARTGWLGPFDYWGQGTLVTVSSGKPGSGKPGSGKPGSGKPGSEIVLTQSPGTLSLSPGERATLSCRASQSVGSSYLAWYQQKPGQAPRLLIYGAHSRATGIPDRFSGSGSGTDFTLTISRLEPEDFAVYYCQQYGSSPWTFGQGTKVEIK

SEQ ID NO: 2038 - protein, 118 aa, Artificial Sequence; identical to SEQ ID NO: 22
  Description of Artificial Sequence: Synthetic polypeptide
  VH of XENP019958

SEQ ID NO: 2039 - protein, 108 aa, Artificial Sequence
  Description of Artificial Sequence: Synthetic polypeptide
  VL of XENP019958
EIVLTQSPGTLSLSPGERATLSCRASQSVGSSYLAWYQQKPGQAPRLLIYGAHSRATGIPDRFSGSGSGTDFTLTISRLEPEDFAVYYCQQYGSSPWTFGQGTKVEIK

SEQ ID NO: 2040 - protein, 5 aa, Artificial Sequence
  Description of Artificial Sequence: Synthetic peptide
  XENP019958 vhCDR1
SYTMH

SEQ ID NO: 2041 - protein, 17 aa, Artificial Sequence
  Description of Artificial Sequence: Synthetic peptide
  XENP019958 vhCDR2
FISYDGNNKYYADSVKG

SEQ ID NO: 2042 - protein, 9 aa, Artificial Sequence
  Description of Artificial Sequence: Synthetic peptide
  XENP019958 vhCDR3
TGWLGPFDY

SEQ ID NO: 2043 - protein, 12 aa, Artificial Sequence
  Description of Artificial Sequence: Synthetic peptide
  XENP019958 vlCDR1
RASQSVGSSYLA

SEQ ID NO: 2044 - protein, 7 aa, Artificial Sequence
  Description of Artificial Sequence: Synthetic peptide
  XENP019958 vlCDR2
GAHSRAT

SEQ ID NO: 2045 - protein, 9 aa, Artificial Sequence
  Description of Artificial Sequence: Synthetic peptide
  XENP019958 vlCDR3
QQYGSSPWT

SEQ ID NO: 2046 - protein, 246 aa, Artificial Sequence
  Description of Artificial Sequence: Synthetic polypeptide
  XENP019959 [CTLA-4]_H0_L0.71_scFv(GKPGS)4
QVQLVESGGGVVQPGRSLRLSCAASGFTFSSYTMHWVRQAPGKGLEWVTFISYDGNNKYYADSVKGRFTISRDNSKNTLYLQMNSLRAEDTAIYYCARTGWLGPFDYWGQGTLVTVSSGKPGSGKPGSGKPGSGKPGSEIVLTQSPGTLSLSPGERATLSCRASQSVGSSYLAWYQQKPGQAPRLLIYGAISRATGIPDRFSGSGSGTDFTLTISRLEPEDFAVYYCQQYGSSPWTFGQGTKVEIK

SEQ ID NO: 2047 - protein, 118 aa, Artificial Sequence; identical to SEQ ID NO: 22
  Description of Artificial Sequence: Synthetic polypeptide
  VH of XENP019959

SEQ ID NO: 2048 - protein, 108 aa, Artificial Sequence
  Description of Artificial Sequence: Synthetic polypeptide
  VL of XENP019959
EIVLTQSPGTLSLSPGERATLSCRASQSVGSSYLAWYQQKPGQAPRLLIYGAISRATGIPDRFSGSGSGTDFTLTISRLEPEDFAVYYCQQYGSSPWTFGQGTKVEIK

SEQ ID NO: 2049 - protein, 5 aa, Artificial Sequence
  Description of Artificial Sequence: Synthetic peptide
  XENP019959 vhCDR1
SYTMH

SEQ ID NO: 2050 - protein, 17 aa, Artificial Sequence
  Description of Artificial Sequence: Synthetic peptide
  XENP019959 vhCDR2
FISYDGNNKYYADSVKG

SEQ ID NO: 2051 - protein, 9 aa, Artificial Sequence
  Description of Artificial Sequence: Synthetic peptide
  XENP019959 vhCDR3
TGWLGPFDY

SEQ ID NO: 2052 - protein, 12 aa, Artificial Sequence
  Description of Artificial Sequence: Synthetic peptide
  XENP019959 vlCDR1
RASQSVGSSYLA

SEQ ID NO: 2053 - protein, 7 aa, Artificial Sequence
  Description of Artificial Sequence: Synthetic peptide
  XENP019959 vlCDR2
GAISRAT

SEQ ID NO: 2054 - protein, 9 aa, Artificial Sequence
  Description of Artificial Sequence: Synthetic peptide
  XENP019959 vlCDR3
QQYGSSPWT

SEQ ID NO: 2055 - protein, 246 aa, Artificial Sequence
  Description of Artificial Sequence: Synthetic polypeptide
  XENP019960 [CTLA-4]_H0_L0.72_scFv(GKPGS)4
QVQLVESGGGVVQPGRSLRLSCAASGFTFSSYTMHWVRQAPGKGLEWVTFISYDGNNKYYADSVKGRFTISRDNSKNTLYLQMNSLRAEDTAIYYCARTGWLGPFDYWGQGTLVTVSSGKPGSGKPGSGKPGSGKPGSEIVLTQSPGTLSLSPGERATLSCRASQSVGSSYLAWYQQKPGQAPRLLIYGALSRATGIPDRFSGSGSGTDFTLTISRLEPEDFAVYYCQQYGSSPWTFGQGTKVEIK

SEQ ID NO: 2056 - protein, 118 aa, Artificial Sequence; identical to SEQ ID NO: 22
  Description of Artificial Sequence: Synthetic polypeptide
  VH of XENP019960

SEQ ID NO: 2057 - protein, 108 aa, Artificial Sequence
  Description of Artificial Sequence: Synthetic polypeptide
  VL of XENP019960
EIVLTQSPGTLSLSPGERATLSCRASQSVGSSYLAWYQQKPGQAPRLLIYGALSRATGIPDRFSGSGSGTDFTLTISRLEPEDFAVYYCQQYGSSPWTFGQGTKVEIK

SEQ ID NO: 2058 - protein, 5 aa, Artificial Sequence
  Description of Artificial Sequence: Synthetic peptide
  XENP019960 vhCDR1
SYTMH

SEQ ID NO: 2059 - protein, 17 aa, Artificial Sequence
  Description of Artificial Sequence: Synthetic peptide
  XENP019960 vhCDR2
FISYDGNNKYYADSVKG

SEQ ID NO: 2060 - protein, 9 aa, Artificial Sequence
  Description of Artificial Sequence: Synthetic peptide
  XENP019960 vhCDR3
TGWLGPFDY

SEQ ID NO: 2061 - protein, 12 aa, Artificial Sequence
  Description of Artificial Sequence: Synthetic peptide
  XENP019960 vlCDR1
RASQSVGSSYLA

SEQ ID NO: 2062 - protein, 7 aa, Artificial Sequence
  Description of Artificial Sequence: Synthetic peptide
  XENP019960 vlCDR2
GALSRAT

SEQ ID NO: 2063 - protein, 9 aa, Artificial Sequence
  Description of Artificial Sequence: Synthetic peptide
  XENP019960 vlCDR3
QQYGSSPWT

SEQ ID NO: 2064 - protein, 246 aa, Artificial Sequence
  Description of Artificial Sequence: Synthetic polypeptide
  XENP019961 [CTLA-4]_H0_L0.73_scFv(GKPGS)4
QVQLVESGGGVVQPGRSLRLSCAASGFTFSSYTMHWVRQAPGKGLEWVTFISYDGNNKYYADSVKGRFTISRDNSKNTLYLQMNSLRAEDTAIYYCARTGWLGPFDYWGQGTLVTVSSGKPGSGKPGSGKPGSGKPGSEIVLTQSPGTLSLSPGERATLSCRASQSVGSSYLAWYQQKPGQAPRLLIYGASSRATGIPDRFSGSGSGTDFTLTISRLEPEDFAVYYCQQYGSSPWTFGQGTKVEIK

SEQ ID NO: 2065 - protein, 118 aa, Artificial Sequence; identical to SEQ ID NO: 22
  Description of Artificial Sequence: Synthetic polypeptide
  VH of XENP019961

SEQ ID NO: 2066 - protein, 108 aa, Artificial Sequence
  Description of Artificial Sequence: Synthetic polypeptide
  VL of XENP019961
EIVLTQSPGTLSLSPGERATLSCRASQSVGSSYLAWYQQKPGQAPRLLIYGASSRATGIPDRFSGSGSGTDFTLTISRLEPEDFAVYYCQQYGSSPWTFGQGTKVEIK

SEQ ID NO: 2067 - protein, 5 aa, Artificial Sequence
  Description of Artificial Sequence: Synthetic peptide
  XENP019961 vhCDR1
SYTMH

SEQ ID NO: 2068 - protein, 17 aa, Artificial Sequence
  Description of Artificial Sequence: Synthetic peptide
  XENP019961 vhCDR2
FISYDGNNKYYADSVKG

SEQ ID NO: 2069 - protein, 9 aa, Artificial Sequence
  Description of Artificial Sequence: Synthetic peptide
  XENP019961 vhCDR3
TGWLGPFDY

SEQ ID NO: 2070 - protein, 12 aa, Artificial Sequence
  Description of Artificial Sequence: Synthetic peptide
  XENP019961 vlCDR1
RASQSVGSSYLA

SEQ ID NO: 2071 - protein, 7 aa, Artificial Sequence
  Description of Artificial Sequence: Synthetic peptide
  XENP019961 vlCDR2
GASSRAT

SEQ ID NO: 2072 - protein, 9 aa, Artificial Sequence
  Description of Artificial Sequence: Synthetic peptide
  XENP019961 vlCDR3
QQYGSSPWT

SEQ ID NO: 2073 - protein, 246 aa, Artificial Sequence
  Description of Artificial Sequence: Synthetic polypeptide
  XENP019962 [CTLA-4]_H0_L0.74_scFv(GKPGS)4
QVQLVESGGGVVQPGRSLRLSCAASGFTFSSYTMHWVRQAPGKGLEWVTFISYDGNNKYYADSVKGRFTISRDNSKNTLYLQMNSLRAEDTAIYYCARTGWLGPFDYWGQGTLVTVSSGKPGSGKPGSGKPGSGKPGSEIVLTQSPGTLSLSPGERATLSCRASQSVGSSYLAWYQQKPGQAPRLLIYGAYSRATGIPDRFSGSGSGTDFTLTISRLEPEDFAVYYCQQYGSSPWTFGQGTKVEIK

SEQ ID NO: 2074 - protein, 118 aa, Artificial Sequence; identical to SEQ ID NO: 22
  Description of Artificial Sequence: Synthetic polypeptide
  VH of XENP019962

SEQ ID NO: 2075 - protein, 108 aa, Artificial Sequence
  Description of Artificial Sequence: Synthetic polypeptide
  VL of XENP019962
EIVLTQSPGTLSLSPGERATLSCRASQSVGSSYLAWYQQKPGQAPRLLIYGAYSRATGIPDRFSGSGSGTDFTLTISRLEPEDFAVYYCQQYGSSPWTFGQGTKVEIK

SEQ ID NO: 2076 - protein, 5 aa, Artificial Sequence
  Description of Artificial Sequence: Synthetic peptide
  XENP019962 vhCDR1
SYTMH

SEQ ID NO: 2077 - protein, 17 aa, Artificial Sequence
  Description of Artificial Sequence: Synthetic peptide
  XENP019962 vhCDR2
FISYDGNNKYYADSVKG

SEQ ID NO: 2078 - protein, 9 aa, Artificial Sequence
  Description of Artificial Sequence: Synthetic peptide
  XENP019962 vhCDR3
TGWLGPFDY

SEQ ID NO: 2079 - protein, 12 aa, Artificial Sequence
  Description of Artificial Sequence: Synthetic peptide
  XENP019962 vlCDR1
RASQSVGSSYLA

SEQ ID NO: 2080 - protein, 7 aa, Artificial Sequence
  Description of Artificial Sequence: Synthetic peptide
  XENP019962 vlCDR2
GAYSRAT

SEQ ID NO: 2081 - protein, 9 aa, Artificial Sequence
  Description of Artificial Sequence: Synthetic peptide
  XENP019962 vlCDR3
QQYGSSPWT

SEQ ID NO: 2082 - protein, 246 aa, Artificial Sequence
  Description of Artificial Sequence: Synthetic polypeptide
  XENP019963 [CTLA-4]_H0_L0.75_scFv(GKPGS)4
QVQLVESGGGVVQPGRSLRLSCAASGFTFSSYTMHWVRQAPGKGLEWVTFISYDGNNKYYADSVKGRFTISRDNSKNTLYLQMNSLRAEDTAIYYCARTGWLGPFDYWGQGTLVTVSSGKPGSGKPGSGKPGSGKPGSEIVLTQSPGTLSLSPGERATLSCRASQSVGSSYLAWYQQKPGQAPRLLIYGAFARATGIPDRFSGSGSGTDFTLTISRLEPEDFAVYYCQQYGSSPWTFGQGTKVEIK

SEQ ID NO: 2083 - protein, 118 aa, Artificial Sequence; identical to SEQ ID NO: 22
  Description of Artificial Sequence: Synthetic polypeptide
  VH of XENP019963

SEQ ID NO: 2084 - protein, 108 aa, Artificial Sequence
  Description of Artificial Sequence: Synthetic polypeptide
  VL of XENP019963
EIVLTQSPGTLSLSPGERATLSCRASQSVGSSYLAWYQQKPGQAPRLLIYGAFARATGIPDRFSGSGSGTDFTLTISRLEPEDFAVYYCQQYGSSPWTFGQGTKVEIK

SEQ ID NO: 2085 - protein, 5 aa, Artificial Sequence
  Description of Artificial Sequence: Synthetic peptide
  XENP019963 vhCDR1
SYTMH

SEQ ID NO: 2086 - protein, 17 aa, Artificial Sequence
  Description of Artificial Sequence: Synthetic peptide
  XENP019963 vhCDR2
FISYDGNNKYYADSVKG

SEQ ID NO: 2087 - protein, 9 aa, Artificial Sequence
  Description of Artificial Sequence: Synthetic peptide
  XENP019963 vhCDR3
TGWLGPFDY

SEQ ID NO: 2088 - protein, 12 aa, Artificial Sequence
  Description of Artificial Sequence: Synthetic peptide
  XENP019963 vlCDR1
RASQSVGSSYLA

SEQ ID NO: 2089 - protein, 7 aa, Artificial Sequence
  Description of Artificial Sequence: Synthetic peptide
  XENP019963 vlCDR2
GAFARAT

SEQ ID NO: 2090 - protein, 9 aa, Artificial Sequence
  Description of Artificial Sequence: Synthetic peptide
  XENP019963 vlCDR3
QQYGSSPWT

SEQ ID NO: 2091 - protein, 246 aa, Artificial Sequence
  Description of Artificial Sequence: Synthetic polypeptide
  XENP019964 [CTLA-4]_H0_L0.76_scFv(GKPGS)4
QVQLVESGGGVVQPGRSLRLSCAASGFTFSSYTMHWVRQAPGKGLEWVTFISYDGNNKYYADSVKGRFTISRDNSKNTLYLQMNSLRAEDTAIYYCARTGWLGPFDYWGQGTLVTVSSGKPGSGKPGSGKPGSGKPGSEIVLTQSPGTLSLSPGERATLSCRASQSVGSSYLAWYQQKPGQAPRLLIYGAFGRATGIPDRFSGSGSGTDFTLTISRLEPEDFAVYYCQQYGSSPWTFGQGTKVEIK

SEQ ID NO: 2092 - protein, 118 aa, Artificial Sequence; identical to SEQ ID NO: 22
  Description of Artificial Sequence: Synthetic polypeptide
  VH of XENP019964

SEQ ID NO: 2093 - protein, 108 aa, Artificial Sequence
  Description of Artificial Sequence: Synthetic polypeptide
  VL of XENP019964
EIVLTQSPGTLSLSPGERATLSCRASQSVGSSYLAWYQQKPGQAPRLLIYGAFGRATGIPDRFSGSGSGTDFTLTISRLEPEDFAVYYCQQYGSSPWTFGQGTKVEIK

SEQ ID NO: 2094 - protein, 5 aa, Artificial Sequence
  Description of Artificial Sequence: Synthetic peptide
  XENP019964 vhCDR1
SYTMH

SEQ ID NO: 2095 - protein, 17 aa, Artificial Sequence
  Description of Artificial Sequence: Synthetic peptide
  XENP019964 vhCDR2
FISYDGNNKYYADSVKG

SEQ ID NO: 2096 - protein, 9 aa, Artificial Sequence
  Description of Artificial Sequence: Synthetic peptide
  XENP019964 vhCDR3
TGWLGPFDY

SEQ ID NO: 2097 - protein, 12 aa, Artificial Sequence
  Description of Artificial Sequence: Synthetic peptide
  XENP019964 vlCDR1
RASQSVGSSYLA

SEQ ID NO: 2098 - protein, 7 aa, Artificial Sequence
  Description of Artificial Sequence: Synthetic peptide
  XENP019964 vlCDR2
GAFGRAT

SEQ ID NO: 2099 - protein, 9 aa, Artificial Sequence
  Description of Artificial Sequence: Synthetic peptide
  XENP019964 vlCDR3
QQYGSSPWT

SEQ ID NO: 2100 - protein, 246 aa, Artificial Sequence
  Description of Artificial Sequence: Synthetic polypeptide
  XENP019965 [CTLA-4]_H0_L0.77_scFv(GKPGS)4
QVQLVESGGGVVQPGRSLRLSCAASGFTFSSYTMHWVRQAPGKGLEWVTFISYDGNNKYYADSVKGRFTISRDNSKNTLYLQMNSLRAEDTAIYYCARTGWLGPFDYWGQGTLVTVSSGKPGSGKPGSGKPGSGKPGSEIVLTQSPGTLSLSPGERATLSCRASQSVGSSYLAWYQQKPGQAPRLLIYGAFNRATGIPDRFSGSGSGTDFTLTISRLEPEDFAVYYCQQYGSSPWTFGQGTKVEIK

SEQ ID NO: 2101 - protein, 118 aa, Artificial Sequence; identical to SEQ ID NO: 22
  Description of Artificial Sequence: Synthetic polypeptide
  VH of XENP019965

SEQ ID NO: 2102 - protein, 108 aa, Artificial Sequence
  Description of Artificial Sequence: Synthetic polypeptide
  VL of XENP019965
EIVLTQSPGTLSLSPGERATLSCRASQSVGSSYLAWYQQKPGQAPRLLIYGAFNRATGIPDRFSGSGSGTDFTLTISRLEPEDFAVYYCQQYGSSPWTFGQGTKVEIK

SEQ ID NO: 2103 - protein, 5 aa, Artificial Sequence
  Description of Artificial Sequence: Synthetic peptide
  XENP019965 vhCDR1
SYTMH

SEQ ID NO: 2104 - protein, 17 aa, Artificial Sequence
  Description of Artificial Sequence: Synthetic peptide
  XENP019965 vhCDR2
FISYDGNNKYYADSVKG

SEQ ID NO: 2105 - protein, 9 aa, Artificial Sequence
  Description of Artificial Sequence: Synthetic peptide
  XENP019965 vhCDR3
TGWLGPFDY

SEQ ID NO: 2106 - protein, 12 aa, Artificial Sequence
  Description of Artificial Sequence: Synthetic peptide
  XENP019965 vlCDR1
RASQSVGSSYLA

SEQ ID NO: 2107 - protein, 7 aa, Artificial Sequence
  Description of Artificial Sequence: Synthetic peptide
  XENP019965 vlCDR2
GAFNRAT

SEQ ID NO: 2108 - protein, 9 aa, Artificial Sequence
  Description of Artificial Sequence: Synthetic peptide
  XENP019965 vlCDR3
QQYGSSPWT

SEQ ID NO: 2109 - protein, 246 aa, Artificial Sequence
  Description of Artificial Sequence: Synthetic polypeptide
  XENP019966 [CTLA-4]_H0_L0.78_scFv(GKPGS)4
QVQLVESGGGVVQPGRSLRLSCAASGFTFSSYTMHWVRQAPGKGLEWVTFISYDGNNKYYADSVKGRFTISRDNSKNTLYLQMNSLRAEDTAIYYCARTGWLGPFDYWGQGTLVTVSSGKPGSGKPGSGKPGSGKPGSEIVLTQSPGTLSLSPGERATLSCRASQSVGSSYLAWYQQKPGQAPRLLIYGAFQRATGIPDRFSGSGSGTDFTLTISRLEPEDFAVYYCQQYGSSPWTFGQGTKVEIK

SEQ ID NO: 2110 - protein, 118 aa, Artificial Sequence; identical to SEQ ID NO: 22
  Description of Artificial Sequence: Synthetic polypeptide
  VH of XENP019966

SEQ ID NO: 2111 - protein, 108 aa, Artificial Sequence
  Description of Artificial Sequence: Synthetic polypeptide
  VL of XENP019966
EIVLTQSPGTLSLSPGERATLSCRASQSVGSSYLAWYQQKPGQAPRLLIYGAFQRATGIPDRFSGSGSGTDFTLTISRLEPEDFAVYYCQQYGSSPWTFGQGTKVEIK

SEQ ID NO: 2112 - protein, 5 aa, Artificial Sequence
  Description of Artificial Sequence: Synthetic peptide
  XENP019966 vhCDR1
SYTMH

SEQ ID NO: 2113 - protein, 17 aa, Artificial Sequence
  Description of Artificial Sequence: Synthetic peptide
  XENP019966 vhCDR2
FISYDGNNKYYADSVKG

SEQ ID NO: 2114 - protein, 9 aa, Artificial Sequence
  Description of Artificial Sequence: Synthetic peptide
  XENP019966 vhCDR3
TGWLGPFDY

SEQ ID NO: 2115 - protein, 12 aa, Artificial Sequence
  Description of Artificial Sequence: Synthetic peptide
  XENP019966 vlCDR1
RASQSVGSSYLA

SEQ ID NO: 2116 - protein, 7 aa, Artificial Sequence
  Description of Artificial Sequence: Synthetic peptide
  XENP019966 vlCDR2
GAFQRAT

SEQ ID NO: 2117 - protein, 9 aa, Artificial Sequence
  Description of Artificial Sequence: Synthetic peptide
  XENP019966 vlCDR3
QQYGSSPWT

SEQ ID NO: 2118 - protein, 246 aa, Artificial Sequence
  Description of Artificial Sequence: Synthetic polypeptide
  XENP019967 [CTLA-4]_H0_L0.79_scFv(GKPGS)4
QVQLVESGGGVVQPGRSLRLSCAASGFTFSSYTMHWVRQAPGKGLEWVTFISYDGNNKYYADSVKGRFTISRDNSKNTLYLQMNSLRAEDTAIYYCARTGWLGPFDYWGQGTLVTVSSGKPGSGKPGSGKPGSGKPGSEIVLTQSPGTLSLSPGERATLSCRASQSVGSSYLAWYQQKPGQAPRLLIYGAFTRATGIPDRFSGSGSGTDFTLTISRLEPEDFAVYYCQQYGSSPWTFGQGTKVEIK

SEQ ID NO: 2119 - protein, 118 aa, Artificial Sequence; identical to SEQ ID NO: 22
  Description of Artificial Sequence: Synthetic polypeptide
  VH of XENP019967

SEQ ID NO: 2120 - protein, 108 aa, Artificial Sequence
  Description of Artificial Sequence: Synthetic polypeptide
  VL of XENP019967
EIVLTQSPGTLSLSPGERATLSCRASQSVGSSYLAWYQQKPGQAPRLLIYGAFTRATGIPDRFSGSGSGTDFTLTISRLEPEDFAVYYCQQYGSSPWTFGQGTKVEIK

SEQ ID NO: 2121 - protein, 5 aa, Artificial Sequence
  Description of Artificial Sequence: Synthetic peptide
  XENP019967 vhCDR1
SYTMH

SEQ ID NO: 2122 - protein, 17 aa, Artificial Sequence
  Description of Artificial Sequence: Synthetic peptide
  XENP019967 vhCDR2
FISYDGNNKYYADSVKG

SEQ ID NO: 2123 - protein, 9 aa, Artificial Sequence
  Description of Artificial Sequence: Synthetic peptide
  XENP019967 vhCDR3
TGWLGPFDY

SEQ ID NO: 2124 - protein, 12 aa, Artificial Sequence
  Description of Artificial Sequence: Synthetic peptide
  XENP019967 vlCDR1
RASQSVGSSYLA

SEQ ID NO: 2125 - protein, 7 aa, Artificial Sequence
  Description of Artificial Sequence: Synthetic peptide
  XENP019967 vlCDR2
GAFTRAT

SEQ ID NO: 2126 - protein, 9 aa, Artificial Sequence
  Description of Artificial Sequence: Synthetic peptide
  XENP019967 vlCDR3
QQYGSSPWT

SEQ ID NO: 2127 - protein, 246 aa, Artificial Sequence
  Description of Artificial Sequence: Synthetic polypeptide
  XENP019968 [CTLA-4]_H0_L0.80_scFv(GKPGS)4
QVQLVESGGGVVQPGRSLRLSCAASGFTFSSYTMHWVRQAPGKGLEWVTFISYDGNNKYYADSVKGRFTISRDNSKNTLYLQMNSLRAEDTAIYYCARTGWLGPFDYWGQGTLVTVSSGKPGSGKPGSGKPGSGKPGSEIVLTQSPGTLSLSPGERATLSCRASQSVGSSYLAWYQQKPGQAPRLLIYGAFSRDTGIPDRFSGSGSGTDFTLTISRLEPEDFAVYYCQQYGSSPWTFGQGTKVEIK

SEQ ID NO: 2128 - protein, 118 aa, Artificial Sequence; identical to SEQ ID NO: 22
  Description of Artificial Sequence: Synthetic polypeptide
  VH of XENP019968

SEQ ID NO: 2129 - protein, 108 aa, Artificial Sequence
  Description of Artificial Sequence: Synthetic polypeptide
  VL of XENP019968
EIVLTQSPGTLSLSPGERATLSCRASQSVGSSYLAWYQQKPGQAPRLLIYGAFSRDTGIPDRFSGSGSGTDFTLTISRLEPEDFAVYYCQQYGSSPWTFGQGTKVEIK

SEQ ID NO: 2130 - protein, 5 aa, Artificial Sequence
  Description of Artificial Sequence: Synthetic peptide
  XENP019968 vhCDR1
SYTMH

SEQ ID NO: 2131 - protein, 17 aa, Artificial Sequence
  Description of Artificial Sequence: Synthetic peptide
  XENP019968 vhCDR2
FISYDGNNKYYADSVKG

SEQ ID NO: 2132 - protein, 9 aa, Artificial Sequence
  Description of Artificial Sequence: Synthetic peptide
  XENP019968 vhCDR3
TGWLGPFDY

SEQ ID NO: 2133 - protein, 12 aa, Artificial Sequence
  Description of Artificial Sequence: Synthetic peptide
  XENP019968 vlCDR1
RASQSVGSSYLA

SEQ ID NO: 2134 - protein, 7 aa, Artificial Sequence
  Description of Artificial Sequence: Synthetic peptide
  XENP019968 vlCDR2
GAFSRDT

SEQ ID NO: 2135 - protein, 9 aa, Artificial Sequence
  Description of Artificial Sequence: Synthetic peptide
  XENP019968 vlCDR3
QQYGSSPWT

SEQ ID NO: 2136 - protein, 246 aa, Artificial Sequence
  Description of Artificial Sequence: Synthetic polypeptide
  XENP019969 [CTLA-4]_H0_L0.81_scFv(GKPGS)4
QVQLVESGGGVVQPGRSLRLSCAASGFTFSSYTMHWVRQAPGKGLEWVTFISYDGNNKYYADSVKGRFTISRDNSKNTLYLQMNSLRAEDTAIYYCARTGWLGPFDYWGQGTLVTVSSGKPGSGKPGSGKPGSGKPGSEIVLTQSPGTLSLSPGERATLSCRASQSVGSSYLAWYQQKPGQAPRLLIYGAFSRASGIPDRFSGSGSGTDFTLTISRLEPEDFAVYYCQQYGSSPWTFGQGTKVEIK

SEQ ID NO: 2137 - protein, 118 aa, Artificial Sequence; identical to SEQ ID NO: 22
  Description of Artificial Sequence: Synthetic polypeptide
  VH of XENP019969

SEQ ID NO: 2138 - protein, 108 aa, Artificial Sequence
  Description of Artificial Sequence: Synthetic polypeptide
  VL of XENP019969
EIVLTQSPGTLSLSPGERATLSCRASQSVGSSYLAWYQQKPGQAPRLLIYGAFSRASGIPDRFSGSGSGTDFTLTISRLEPEDFAVYYCQQYGSSPWTFGQGTKVEIK

SEQ ID NO: 2139 - protein, 5 aa, Artificial Sequence
  Description of Artificial Sequence: Synthetic peptide
  XENP019969 vhCDR1
SYTMH

SEQ ID NO: 2140 - protein, 17 aa, Artificial Sequence
  Description of Artificial Sequence: Synthetic peptide
  XENP019969 vhCDR2
FISYDGNNKYYADSVKG

SEQ ID NO: 2141 - protein, 9 aa, Artificial Sequence
  Description of Artificial Sequence: Synthetic peptide
  XENP019969 vhCDR3
TGWLGPFDY

SEQ ID NO: 2142 - protein, 12 aa, Artificial Sequence
  Description of Artificial Sequence: Synthetic peptide
  XENP019969 vlCDR1
RASQSVGSSYLA

SEQ ID NO: 2143 - protein, 7 aa, Artificial Sequence
  Description of Artificial Sequence: Synthetic peptide
  XENP019969 vlCDR2
GAFSRAS

SEQ ID NO: 2144 - protein, 9 aa, Artificial Sequence
  Description of Artificial Sequence: Synthetic peptide
  XENP019969 vlCDR3
QQYGSSPWT

SEQ ID NO: 2145 - protein, 246 aa, Artificial Sequence
  Description of Artificial Sequence: Synthetic polypeptide
  XENP019970 [CTLA-4]_H0_L0.82_scFv(GKPGS)4
QVQLVESGGGVVQPGRSLRLSCAASGFTFSSYTMHWVRQAPGKGLEWVTFISYDGNNKYYADSVKGRFTISRDNSKNTLYLQMNSLRAEDTAIYYCARTGWLGPFDYWGQGTLVTVSSGKPGSGKPGSGKPGSGKPGSEIVLTQSPGTLSLSPGERATLSCRASQSVGSSYLAWYQQKPGQAPRLLIYGAFSRATGVPDRFSGSGSGTDFTLTISRLEPEDFAVYYCQQYGSSPWTFGQGTKVEIK

SEQ ID NO: 2146 - protein, 118 aa, Artificial Sequence; identical to SEQ ID NO: 22
  Description of Artificial Sequence: Synthetic polypeptide
  VH of XENP019970

SEQ ID NO: 2147 - protein, 108 aa, Artificial Sequence
  Description of Artificial Sequence: Synthetic polypeptide
  VL of XENP019970
EIVLTQSPGTLSLSPGERATLSCRASQSVGSSYLAWYQQKPGQAPRLLIYGAFSRATGVPDRFSGSGSGTDFTLTISRLEPEDFAVYYCQQYGSSPWTFGQGTKVEIK

SEQ ID NO: 2148 - protein, 5 aa, Artificial Sequence
  Description of Artificial Sequence: Synthetic peptide
  XENP019970 vhCDR1
SYTMH

SEQ ID NO: 2149 - protein, 17 aa, Artificial Sequence
  Description of Artificial Sequence: Synthetic peptide
  XENP019970 vhCDR2
FISYDGNNKYYADSVKG

SEQ ID NO: 2150 - protein, 9 aa, Artificial Sequence
  Description of Artificial Sequence: Synthetic peptide
  XENP019970 vhCDR3
TGWLGPFDY

SEQ ID NO: 2151 - protein, 12 aa, Artificial Sequence
  Description of Artificial Sequence: Synthetic peptide
  XENP019970 vlCDR1
RASQSVGSSYLA

SEQ ID NO: 2152 - protein, 7 aa, Artificial Sequence
  Description of Artificial Sequence: Synthetic peptide
  XENP019970 vlCDR2
GAFSRAT

SEQ ID NO: 2153 - protein, 9 aa, Artificial Sequence
  Description of Artificial Sequence: Synthetic peptide
  XENP019970 vlCDR3
QQYGSSPWT

SEQ ID NO: 2154 - protein, 246 aa, Artificial Sequence
  Description of Artificial Sequence: Synthetic polypeptide
  XENP019971 [CTLA-4]_H0_L0.83_scFv(GKPGS)4
QVQLVESGGGVVQPGRSLRLSCAASGFTFSSYTMHWVRQAPGKGLEWVTFISYDGNNKYYADSVKGRFTISRDNSKNTLYLQMNSLRAEDTAIYYCARTGWLGPFDYWGQGTLVTVSSGKPGSGKPGSGKPGSGKPGSEIVLTQSPGTLSLSPGERATLSCRASQSVGSSYLAWYQQKPGQAPRLLIYGAFSRATGIPARFSGSGSGTDFTLTISRLEPEDFAVYYCQQYGSSPWTFGQGTKVEIK

SEQ ID NO: 2155 - protein, 118 aa, Artificial Sequence; identical to SEQ ID NO: 22
  Description of Artificial Sequence: Synthetic polypeptide
  VH of XENP019971

SEQ ID NO: 2156 - protein, 108 aa, Artificial Sequence
  Description of Artificial Sequence: Synthetic polypeptide
  VL of XENP019971
EIVLTQSPGTLSLSPGERATLSCRASQSVGSSYLAWYQQKPGQAPRLLIYGAFSRATGIPARFSGSGSGTDFTLTISRLEPEDFAVYYCQQYGSSPWTFGQGTKVEIK

SEQ ID NO: 2157 - protein, 5 aa, Artificial Sequence
  Description of Artificial Sequence: Synthetic peptide
  XENP019971 vhCDR1
SYTMH

SEQ ID NO: 2158 - protein, 17 aa, Artificial Sequence
  Description of Artificial Sequence: Synthetic peptide
  XENP019971 vhCDR2
FISYDGNNKYYADSVKG

SEQ ID NO: 2159 - protein, 9 aa, Artificial Sequence
  Description of Artificial Sequence: Synthetic peptide
  XENP019971 vhCDR3
TGWLGPFDY

SEQ ID NO: 2160 - protein, 12 aa, Artificial Sequence
  Description of Artificial Sequence: Synthetic peptide
  XENP019971 vlCDR1
RASQSVGSSYLA

SEQ ID NO: 2161 - protein, 7 aa, Artificial Sequence
  Description of Artificial Sequence: Synthetic peptide
  XENP019971 vlCDR2
GAFSRAT

SEQ ID NO: 2162 - protein, 9 aa, Artificial Sequence
  Description of Artificial Sequence: Synthetic peptide
  XENP019971 vlCDR3
QQYGSSPWT

SEQ ID NO: 2163 - protein, 246 aa, Artificial Sequence
  Description of Artificial Sequence: Synthetic polypeptide
  XENP019972 [CTLA-4]_H0_L0.84_scFv(GKPGS)4
QVQLVESGGGVVQPGRSLRLSCAASGFTFSSYTMHWVRQAPGKGLEWVTFISYDGNNKYYADSVKGRFTISRDNSKNTLYLQMNSLRAEDTAIYYCARTGWLGPFDYWGQGTLVTVSSGKPGSGKPGSGKPGSGKPGSEIVLTQSPGTLSLSPGERATLSCRASQSVGSSYLAWYQQKPGQAPRLLIYGAFSRATGIPDRFSGSGSRTDFTLTISRLEPEDFAVYYCQQYGSSPWTFGQGTKVEIK

SEQ ID NO: 2164 - protein, 118 aa, Artificial Sequence; identical to SEQ ID NO: 22
  Description of Artificial Sequence: Synthetic polypeptide
  VH of XENP019972

SEQ ID NO: 2165 - protein, 108 aa, Artificial Sequence
  Description of Artificial Sequence: Synthetic polypeptide
  VL of XENP019972
EIVLTQSPGTLSLSPGERATLSCRASQSVGSSYLAWYQQKPGQAPRLLIYGAFSRATGIPDRFSGSGSRTDFTLTISRLEPEDFAVYYCQQYGSSPWTFGQGTKVEIK

SEQ ID NO: 2166 - protein, 5 aa, Artificial Sequence
  Description of Artificial Sequence: Synthetic peptide
  XENP019972 vhCDR1
SYTMH

SEQ ID NO: 2167 - protein, 17 aa, Artificial Sequence
  Description of Artificial Sequence: Synthetic peptide
  XENP019972 vhCDR2
FISYDGNNKYYADSVKG

SEQ ID NO: 2168 - protein, 9 aa, Artificial Sequence
  Description of Artificial Sequence: Synthetic peptide
  XENP019972 vhCDR3
TGWLGPFDY

SEQ ID NO: 2169 - protein, 12 aa, Artificial Sequence
  Description of Artificial Sequence: Synthetic peptide
  XENP019972 vlCDR1
RASQSVGSSYLA

SEQ ID NO: 2170 - protein, 7 aa, Artificial Sequence
  Description of Artificial Sequence: Synthetic peptide
  XENP019972 vlCDR2
GAFSRAT

SEQ ID NO: 2171 - protein, 9 aa, Artificial Sequence
  Description of Artificial Sequence: Synthetic peptide
  XENP019972 vlCDR3
QQYGSSPWT

SEQ ID NO: 2172 - protein, 246 aa, Artificial Sequence
  Description of Artificial Sequence: Synthetic polypeptide
  XENP019973 [CTLA-4]_H0_L0.85_scFv(GKPGS)4
QVQLVESGGGVVQPGRSLRLSCAASGFTFSSYTMHWVRQAPGKGLEWVTFISYDGNNKYYADSVKGRFTISRDNSKNTLYLQMNSLRAEDTAIYYCARTGWLGPFDYWGQGTLVTVSSGKPGSGKPGSGKPGSGKPGSEIVLTQSPGTLSLSPGERATLSCRASQSVGSSYLAWYQQKPGQAPRLLIYGAFSRATGIPDRFSGSGSGTEFTLTISRLEPEDFAVYYCQQYGSSPWTFGQGTKVEIK

SEQ ID NO: 2173 - protein, 118 aa, Artificial Sequence; identical to SEQ ID NO: 22
  Description of Artificial Sequence: Synthetic polypeptide
  VH of XENP019973

SEQ ID NO: 2174 - protein, 108 aa, Artificial Sequence
  Description of Artificial Sequence: Synthetic polypeptide
  VL of XENP019973
EIVLTQSPGTLSLSPGERATLSCRASQSVGSSYLAWYQQKPGQAPRLLIYGAFSRATGIPDRFSGSGSGTEFTLTISRLEPEDFAVYYCQQYGSSPWTFGQGTKVEIK

SEQ ID NO: 2175 - protein, 5 aa, Artificial Sequence
  Description of Artificial Sequence: Synthetic peptide
  XENP019973 vhCDR1
SYTMH

SEQ ID NO: 2176 - protein, 17 aa, Artificial Sequence
  Description of Artificial Sequence: Synthetic peptide
  XENP019973 vhCDR2
FISYDGNNKYYADSVKG

SEQ ID NO: 2177 - protein, 9 aa, Artificial Sequence
  Description of Artificial Sequence: Synthetic peptide
  XENP019973 vhCDR3
TGWLGPFDY

SEQ ID NO: 2178 - protein, 12 aa, Artificial Sequence
  Description of Artificial Sequence: Synthetic peptide
  XENP019973 vlCDR1
RASQSVGSSYLA

SEQ ID NO: 2179 - protein, 7 aa, Artificial Sequence
  Description of Artificial Sequence: Synthetic peptide
  XENP019973 vlCDR2
GAFSRAT

SEQ ID NO: 2180 - protein, 9 aa, Artificial Sequence
  Description of Artificial Sequence: Synthetic peptide
  XENP019973 vlCDR3
QQYGSSPWT

SEQ ID NO: 2181 - protein, 246 aa, Artificial Sequence
  Description of Artificial Sequence: Synthetic polypeptide
  XENP019974 [CTLA-4]_H0_L0.86_scFv(GKPGS)4
QVQLVESGGGVVQPGRSLRLSCAASGFTFSSYTMHWVRQAPGKGLEWVTFISYDGNNKYYADSVKGRFTISRDNSKNTLYLQMNSLRAEDTAIYYCARTGWLGPFDYWGQGTLVTVSSGKPGSGKPGSGKPGSGKPGSEIVLTQSPGTLSLSPGERATLSCRASQSVGSSYLAWYQQKPGQAPRLLIYGAFSRATGIPDRFSGSGSGTDFTLKISRLEPEDFAVYYCQQYGSSPWTFGQGTKVEIK

SEQ ID NO: 2182 - protein, 118 aa, Artificial Sequence; identical to SEQ ID NO: 22
  Description of Artificial Sequence: Synthetic polypeptide
  VH of XENP019974

SEQ ID NO: 2183 - protein, 108 aa, Artificial Sequence
  Description of Artificial Sequence: Synthetic polypeptide
  VL of XENP019974
EIVLTQSPGTLSLSPGERATLSCRASQSVGSSYLAWYQQKPGQAPRLLIYGAFSRATGIPDRFSGSGSGTDFTLKISRLEPEDFAVYYCQQYGSSPWTFGQGTKVEIK

SEQ ID NO: 2184 - protein, 5 aa, Artificial Sequence
  Description of Artificial Sequence: Synthetic peptide
  XENP019974 vhCDR1
SYTMH

SEQ ID NO: 2185 - protein, 17 aa, Artificial Sequence
  Description of Artificial Sequence: Synthetic peptide
  XENP019974 vhCDR2
FISYDGNNKYYADSVKG

SEQ ID NO: 2186 - protein, 9 aa, Artificial Sequence
  Description of Artificial Sequence: Synthetic peptide
  XENP019974 vhCDR3
TGWLGPFDY

SEQ ID NO: 2187 - protein, 12 aa, Artificial Sequence
  Description of Artificial Sequence: Synthetic peptide
  XENP019974 vlCDR1
RASQSVGSSYLA

SEQ ID NO: 2188 - protein, 7 aa, Artificial Sequence
  Description of Artificial Sequence: Synthetic peptide
  XENP019974 vlCDR2
GAFSRAT

SEQ ID NO: 2189 - protein, 9 aa, Artificial Sequence
  Description of Artificial Sequence: Synthetic peptide
  XENP019974 vlCDR3
QQYGSSPWT

SEQ ID NO: 2190 - protein, 246 aa, Artificial Sequence
  Description of Artificial Sequence: Synthetic polypeptide
  XENP019975 [CTLA-4]_H0_L0.87_scFv(GKPGS)4
QVQLVESGGGVVQPGRSLRLSCAASGFTFSSYTMHWVRQAPGKGLEWVTFISYDGNNKYYADSVKGRFTISRDNSKNTLYLQMNSLRAEDTAIYYCARTGWLGPFDYWGQGTLVTVSSGKPGSGKPGSGKPGSGKPGSEIVLTQSPGTLSLSPGERATLSCRASQSVGSSYLAWYQQKPGQAPRLLIYGAFSRATGIPDRFSGSGSGTDFTLTISSLEPEDFAVYYCQQYGSSPWTFGQGTKVEIK

SEQ ID NO: 2191 - protein, 118 aa, Artificial Sequence; identical to SEQ ID NO: 22
  Description of Artificial Sequence: Synthetic polypeptide
  VH of XENP019975

SEQ ID NO: 2192 - protein, 108 aa, Artificial Sequence
  Description of Artificial Sequence: Synthetic polypeptide
  VL of XENP019975
EIVLTQSPGTLSLSPGERATLSCRASQSVGSSYLAWYQQKPGQAPRLLIYGAFSRATGIPDRFSGSGSGTDFTLTISSLEPEDFAVYYCQQYGSSPWTFGQGTKVEIK

SEQ ID NO: 2193 - protein, 5 aa, Artificial Sequence
  Description of Artificial Sequence: Synthetic peptide
  XENP019975 vhCDR1
SYTMH

SEQ ID NO: 2194 - protein, 17 aa, Artificial Sequence
  Description of Artificial Sequence: Synthetic peptide
  XENP019975 vhCDR2
FISYDGNNKYYADSVKG

SEQ ID NO: 2195 - protein, 9 aa, Artificial Sequence
  Description of Artificial Sequence: Synthetic peptide
  XENP019975 vhCDR3
TGWLGPFDY

SEQ ID NO: 2196 - protein, 12 aa, Artificial Sequence
  Description of Artificial Sequence: Synthetic peptide
  XENP019975 vlCDR1
RASQSVGSSYLA

SEQ ID NO: 2197 - protein, 7 aa, Artificial Sequence
  Description of Artificial Sequence: Synthetic peptide
  XENP019975 vlCDR2
GAFSRAT

SEQ ID NO: 2198 - protein, 9 aa, Artificial Sequence
  Description of Artificial Sequence: Synthetic peptide
  XENP019975 vlCDR3
QQYGSSPWT

SEQ ID NO: 2199 - protein, 246 aa, Artificial Sequence
  Description of Artificial Sequence: Synthetic polypeptide
  XENP019976 [CTLA-4]_H0_L0.88_scFv(GKPGS)4
QVQLVESGGGVVQPGRSLRLSCAASGFTFSSYTMHWVRQAPGKGLEWVTFISYDGNNKYYADSVKGRFTISRDNSKNTLYLQMNSLRAEDTAIYYCARTGWLGPFDYWGQGTLVTVSSGKPGSGKPGSGKPGSGKPGSEIVLTQSPGTLSLSPGERATLSCRASQSVGSSYLAWYQQKPGQAPRLLIYGAFSRATGIPDRFSGSGSGTDFTLTISSLQSEDFAVYYCQQYGSSPWTFGQGTKVEIK

SEQ ID NO: 2200 - protein, 118 aa, Artificial Sequence; identical to SEQ ID NO: 22
  Description of Artificial Sequence: Synthetic polypeptide
  VH of XENP019976

SEQ ID NO: 2201 - protein, 108 aa, Artificial Sequence
  Description of Artificial Sequence: Synthetic polypeptide
  VL of XENP019976
EIVLTQSPGTLSLSPGERATLSCRASQSVGSSYLAWYQQKPGQAPRLLIYGAFSRATGIPDRFSGSGSGTDFTLTISSLQSEDFAVYYCQQYGSSPWTFGQGTKVEIK

SEQ ID NO: 2202 - protein, 5 aa, Artificial Sequence
  Description of Artificial Sequence: Synthetic peptide
  XENP019976 vhCDR1
SYTMH

SEQ ID NO: 2203 - protein, 17 aa, Artificial Sequence
  Description of Artificial Sequence: Synthetic peptide
  XENP019976 vhCDR2
FISYDGNNKYYADSVKG

SEQ ID NO: 2204 - protein, 9 aa, Artificial Sequence
  Description of Artificial Sequence: Synthetic peptide
  XENP019976 vhCDR3
TGWLGPFDY

SEQ ID NO: 2205 - protein, 12 aa, Artificial Sequence
  Description of Artificial Sequence: Synthetic peptide
  XENP019976 vlCDR1
RASQSVGSSYLA

SEQ ID NO: 2206 - protein, 7 aa, Artificial Sequence
  Description of Artificial Sequence: Synthetic peptide
  XENP019976 vlCDR2
GAFSRAT

SEQ ID NO: 2207 - protein, 9 aa, Artificial Sequence
  Description of Artificial Sequence: Synthetic peptide
  XENP019976 vlCDR3
QQYGSSPWT

SEQ ID NO: 2208 - protein, 246 aa, Artificial Sequence
  Description of Artificial Sequence: Synthetic polypeptide
  XENP019977 [CTLA-4]_H0_L0.89_scFv(GKPGS)4
QVQLVESGGGVVQPGRSLRLSCAASGFTFSSYTMHWVRQAPGKGLEWVTFISYDGNNKYYADSVKGRFTISRDNSKNTLYLQMNSLRAEDTAIYYCARTGWLGPFDYWGQGTLVTVSSGKPGSGKPGSGKPGSGKPGSEIVLTQSPGTLSLSPGERATLSCRASQSVGSSYLAWYQQKPGQAPRLLIYGAFSRATGIPDRFSGSGSGTDFTLTISRVEPEDFAVYYCQQYGSSPWTFGQGTKVEIK

SEQ ID NO: 2209 - protein, 118 aa, Artificial Sequence; identical to SEQ ID NO: 22
  Description of Artificial Sequence: Synthetic polypeptide
  VH of XENP019977

SEQ ID NO: 2210 - protein, 108 aa, Artificial Sequence
  Description of Artificial Sequence: Synthetic polypeptide
  VL of XENP019977
EIVLTQSPGTLSLSPGERATLSCRASQSVGSSYLAWYQQKPGQAPRLLIYGAFSRATGIPDRFSGSGSGTDFTLTISRVEPEDFAVYYCQQYGSSPWTFGQGTKVEIK

SEQ ID NO: 2211 - protein, 5 aa, Artificial Sequence
  Description of Artificial Sequence: Synthetic peptide
  XENP019977 vhCDR1
SYTMH

SEQ ID NO: 2212 - protein, 17 aa, Artificial Sequence
  Description of Artificial Sequence: Synthetic peptide
  XENP019977 vhCDR2
FISYDGNNKYYADSVKG

SEQ ID NO: 2213 - protein, 9 aa, Artificial Sequence
  Description of Artificial Sequence: Synthetic peptide
  XENP019977 vhCDR3
TGWLGPFDY

SEQ ID NO: 2214 - protein, 12 aa, Artificial Sequence
  Description of Artificial Sequence: Synthetic peptide
  XENP019977 vlCDR1
RASQSVGSSYLA

SEQ ID NO: 2215 - protein, 7 aa, Artificial Sequence
  Description of Artificial Sequence: Synthetic peptide
  XENP019977 vlCDR2
GAFSRAT

SEQ ID NO: 2216 - protein, 9 aa, Artificial Sequence
  Description of Artificial Sequence: Synthetic peptide
  XENP019977 vlCDR3
QQYGSSPWT

SEQ ID NO: 2217 - protein, 246 aa, Artificial Sequence
  Description of Artificial Sequence: Synthetic polypeptide
  XENP019978 [CTLA-4]_H0_L0.90_scFv(GKPGS)4
QVQLVESGGGVVQPGRSLRLSCAASGFTFSSYTMHWVRQAPGKGLEWVTFISYDGNNKYYADSVKGRFTISRDNSKNTLYLQMNSLRAEDTAIYYCARTGWLGPFDYWGQGTLVTVSSGKPGSGKPGSGKPGSGKPGSEIVLTQSPGTLSLSPGERATLSCRASQSVGSSYLAWYQQKPGQAPRLLIYGAFSRATGIPDRFSGSGSGTDFTLTISRLQPEDFAVYYCQQYGSSPWTFGQGTKVEIK

SEQ ID NO: 2218 - protein, 118 aa, Artificial Sequence; identical to SEQ ID NO: 22
  Description of Artificial Sequence: Synthetic polypeptide
  VH of XENP019978

SEQ ID NO: 2219 - protein, 108 aa, Artificial Sequence
  Description of Artificial Sequence: Synthetic polypeptide
  VL of XENP019978
EIVLTQSPGTLSLSPGERATLSCRASQSVGSSYLAWYQQKPGQAPRLLIYGAFSRATGIPDRFSGSGSGTDFTLTISRLQPEDFAVYYCQQYGSSPWTFGQGTKVEIK

SEQ ID NO: 2220 - protein, 5 aa, Artificial Sequence
  Description of Artificial Sequence: Synthetic peptide
  XENP019978 vhCDR1
SYTMH

SEQ ID NO: 2221 - protein, 17 aa, Artificial Sequence
  Description of Artificial Sequence: Synthetic peptide
  XENP019978 vhCDR2
FISYDGNNKYYADSVKG

SEQ ID NO: 2222 - protein, 9 aa, Artificial Sequence
  Description of Artificial Sequence: Synthetic peptide
  XENP019978 vhCDR3
TGWLGPFDY

SEQ ID NO: 2223 - protein, 12 aa, Artificial Sequence
  Description of Artificial Sequence: Synthetic peptide
  XENP019978 vlCDR1
RASQSVGSSYLA

SEQ ID NO: 2224 - protein, 7 aa, Artificial Sequence
  Description of Artificial Sequence: Synthetic peptide
  XENP019978 vlCDR2
GAFSRAT

SEQ ID NO: 2225 - protein, 9 aa, Artificial Sequence
  Description of Artificial Sequence: Synthetic peptide
  XENP019978 vlCDR3
QQYGSSPWT

SEQ ID NO: 2226 - protein, 246 aa, Artificial Sequence
  Description of Artificial Sequence: Synthetic polypeptide
  XENP019979 [CTLA-4]_H0_L0.91_scFv(GKPGS)4
QVQLVESGGGVVQPGRSLRLSCAASGFTFSSYTMHWVRQAPGKGLEWVTFISYDGNNKYYADSVKGRFTISRDNSKNTLYLQMNSLRAEDTAIYYCARTGWLGPFDYWGQGTLVTVSSGKPGSGKPGSGKPGSGKPGSEIVLTQSPGTLSLSPGERATLSCRASQSVGSSYLAWYQQKPGQAPRLLIYGAFSRATGIPDRFSGSGSGTDFTLTISRLESEDFAVYYCQQYGSSPWTFGQGTKVEIK

SEQ ID NO: 2227 - protein, 118 aa, Artificial Sequence; identical to SEQ ID NO: 22
  Description of Artificial Sequence: Synthetic polypeptide
  VH of XENP019979

SEQ ID NO: 2228 - protein, 108 aa, Artificial Sequence
  Description of Artificial Sequence: Synthetic polypeptide
  VL of XENP019979
EIVLTQSPGTLSLSPGERATLSCRASQSVGSSYLAWYQQKPGQAPRLLIYGAFSRATGIPDRFSGSGSGTDFTLTISRLESEDFAVYYCQQYGSSPWTFGQGTKVEIK

SEQ ID NO: 2229 - protein, 5 aa, Artificial Sequence
  Description of Artificial Sequence: Synthetic peptide
  XENP019979 vhCDR1
SYTMH

SEQ ID NO: 2230 - protein, 17 aa, Artificial Sequence
  Description of Artificial Sequence: Synthetic peptide
  XENP019979 vhCDR2
FISYDGNNKYYADSVKG

SEQ ID NO: 2231 - protein, 9 aa, Artificial Sequence
  Description of Artificial Sequence: Synthetic peptide
  XENP019979 vhCDR3
TGWLGPFDY

SEQ ID NO: 2232 - protein, 12 aa, Artificial Sequence
  Description of Artificial Sequence: Synthetic peptide
  XENP019979 vlCDR1
RASQSVGSSYLA

SEQ ID NO: 2233 - protein, 7 aa, Artificial Sequence
  Description of Artificial Sequence: Synthetic peptide
  XENP019979 vlCDR2
GAFSRAT

SEQ ID NO: 2234 - protein, 9 aa, Artificial Sequence
  Description of Artificial Sequence: Synthetic peptide
  XENP019979 vlCDR3
QQYGSSPWT

SEQ ID NO: 2235 - protein, 246 aa, Artificial Sequence
  Description of Artificial Sequence: Synthetic polypeptide
  XENP019980 [CTLA-4]_H0_L0.92_scFv(GKPGS)4
QVQLVESGGGVVQPGRSLRLSCAASGFTFSSYTMHWVRQAPGKGLEWVTFISYDGNNKYYADSVKGRFTISRDNSKNTLYLQMNSLRAEDTAIYYCARTGWLGPFDYWGQGTLVTVSSGKPGSGKPGSGKPGSGKPGSEIVLTQSPGTLSLSPGERATLSCRASQSVGSSYLAWYQQKPGQAPRLLIYGAFSRATGIPDRFSGSGSGTDFTLTISRLEPQDFAVYYCQQYGSSPWTFGQGTKVEIK

SEQ ID NO: 2236 - protein, 118 aa, Artificial Sequence; identical to SEQ ID NO: 22
  Description of Artificial Sequence: Synthetic polypeptide
  VH of XENP019980

SEQ ID NO: 2237 - protein, 108 aa, Artificial Sequence
  Description of Artificial Sequence: Synthetic polypeptide
  VL of XENP019980
EIVLTQSPGTLSLSPGERATLSCRASQSVGSSYLAWYQQKPGQAPRLLIYGAFSRATGIPDRFSGSGSGTDFTLTISRLEPQDFAVYYCQQYGSSPWTFGQGTKVEIK

SEQ ID NO: 2238 - protein, 5 aa, Artificial Sequence
  Description of Artificial Sequence: Synthetic peptide
  XENP019980 vhCDR1
SYTMH

SEQ ID NO: 2239 - protein, 17 aa, Artificial Sequence
  Description of Artificial Sequence: Synthetic peptide
  XENP019980 vhCDR2
FISYDGNNKYYADSVKG

SEQ ID NO: 2240 - protein, 9 aa, Artificial Sequence
  Description of Artificial Sequence: Synthetic peptide
  XENP019980 vhCDR3
TGWLGPFDY

SEQ ID NO: 2241 - protein, 12 aa, Artificial Sequence
  Description of Artificial Sequence: Synthetic peptide
  XENP019980 vlCDR1
RASQSVGSSYLA

SEQ ID NO: 2242 - protein, 7 aa, Artificial Sequence
  Description of Artificial Sequence: Synthetic peptide
  XENP019980 vlCDR2
GAFSRAT

SEQ ID NO: 2243 - protein, 9 aa, Artificial Sequence
  Description of Artificial Sequence: Synthetic peptide
  XENP019980 vlCDR3
QQYGSSPWT

SEQ ID NO: 2244 - protein, 246 aa, Artificial Sequence
  Description of Artificial Sequence: Synthetic polypeptide
  XENP019981 [CTLA-4]_H0_L0.93_scFv(GKPGS)4
QVQLVESGGGVVQPGRSLRLSCAASGFTFSSYTMHWVRQAPGKGLEWVTFISYDGNNKYYADSVKGRFTISRDNSKNTLYLQMNSLRAEDTAIYYCARTGWLGPFDYWGQGTLVTVSSGKPGSGKPGSGKPGSGKPGSEIVLTQSPGTLSLSPGERATLSCRASQSVGSSYLAWYQQKPGQAPRLLIYGAFSRATGIPDRFSGSGSGTDFTLTISRLEPEDFAVYYCKQYGSSPWTFGQGTKVEIK

SEQ ID NO: 2245 - protein, 118 aa, Artificial Sequence; identical to SEQ ID NO: 22
  Description of Artificial Sequence: Synthetic polypeptide
  VH of XENP019981

SEQ ID NO: 2246 - protein, 108 aa, Artificial Sequence
  Description of Artificial Sequence: Synthetic polypeptide
  VL of XENP019981
EIVLTQSPGTLSLSPGERATLSCRASQSVGSSYLAWYQQKPGQAPRLLIYGAFSRATGIPDRFSGSGSGTDFTLTISRLEPEDFAVYYCKQYGSSPWTFGQGTKVEIK

SEQ ID NO: 2247 - protein, 5 aa, Artificial Sequence
  Description of Artificial Sequence: Synthetic peptide
  XENP019981 vhCDR1
SYTMH

SEQ ID NO: 2248 - protein, 17 aa, Artificial Sequence
  Description of Artificial Sequence: Synthetic peptide
  XENP019981 vhCDR2
FISYDGNNKYYADSVKG

SEQ ID NO: 2249 - protein, 9 aa, Artificial Sequence
  Description of Artificial Sequence: Synthetic peptide
  XENP019981 vhCDR3
TGWLGPFDY

SEQ ID NO: 2250 - protein, 12 aa, Artificial Sequence
  Description of Artificial Sequence: Synthetic peptide
  XENP019981 vlCDR1
RASQSVGSSYLA

SEQ ID NO: 2251 - protein, 7 aa, Artificial Sequence
  Description of Artificial Sequence: Synthetic peptide
  XENP019981 vlCDR2
GAFSRAT

SEQ ID NO: 2252 - protein, 9 aa, Artificial Sequence
  Description of Artificial Sequence: Synthetic peptide
  XENP019981 vlCDR3
KQYGSSPWT

SEQ ID NO: 2253 - protein, 246 aa, Artificial Sequence
  Description of Artificial Sequence: Synthetic polypeptide
  XENP019982 [CTLA-4]_H0_L0.94_scFv(GKPGS)4
QVQLVESGGGVVQPGRSLRLSCAASGFTFSSYTMHWVRQAPGKGLEWVTFISYDGNNKYYADSVKGRFTISRDNSKNTLYLQMNSLRAEDTAIYYCARTGWLGPFDYWGQGTLVTVSSGKPGSGKPGSGKPGSGKPGSEIVLTQSPGTLSLSPGERATLSCRASQSVGSSYLAWYQQKPGQAPRLLIYGAFSRATGIPDRFSGSGSGTDFTLTISRLEPEDFAVYYCLQYGSSPWTFGQGTKVEIK

SEQ ID NO: 2254 - protein, 118 aa, Artificial Sequence; identical to SEQ ID NO: 22
  Description of Artificial Sequence: Synthetic polypeptide
  VH of XENP019982

SEQ ID NO: 2255 - protein, 108 aa, Artificial Sequence
  Description of Artificial Sequence: Synthetic polypeptide
  VL of XENP019982
EIVLTQSPGTLSLSPGERATLSCRASQSVGSSYLAWYQQKPGQAPRLLIYGAFSRATGIPDRFSGSGSGTDFTLTISRLEPEDFAVYYCLQYGSSPWTFGQGTKVEIK

SEQ ID NO: 2256 - protein, 5 aa, Artificial Sequence
  Description of Artificial Sequence: Synthetic peptide
  XENP019982 vhCDR1
SYTMH

SEQ ID NO: 2257 - protein, 17 aa, Artificial Sequence
  Description of Artificial Sequence: Synthetic peptide
  XENP019982 vhCDR2
FISYDGNNKYYADSVKG

SEQ ID NO: 2258 - protein, 9 aa, Artificial Sequence
  Description of Artificial Sequence: Synthetic peptide
  XENP019982 vhCDR3
TGWLGPFDY

SEQ ID NO: 2259 - protein, 12 aa, Artificial Sequence
  Description of Artificial Sequence: Synthetic peptide
  XENP019982 vlCDR1
RASQSVGSSYLA

SEQ ID NO: 2260 - protein, 7 aa, Artificial Sequence
  Description of Artificial Sequence: Synthetic peptide
  XENP019982 vlCDR2
GAFSRAT

SEQ ID NO: 2261 - protein, 9 aa, Artificial Sequence
  Description of Artificial Sequence: Synthetic peptide
  XENP019982 vlCDR3
LQYGSSPWT

SEQ ID NO: 2262 - protein, 246 aa, Artificial Sequence
  Description of Artificial Sequence: Synthetic polypeptide
  XENP019983 [CTLA-4]_H0_L0.95_scFv(GKPGS)4
QVQLVESGGGVVQPGRSLRLSCAASGFTFSSYTMHWVRQAPGKGLEWVTFISYDGNNKYYADSVKGRFTISRDNSKNTLYLQMNSLRAEDTAIYYCARTGWLGPFDYWGQGTLVTVSSGKPGSGKPGSGKPGSGKPGSEIVLTQSPGTLSLSPGERATLSCRASQSVGSSYLAWYQQKPGQAPRLLIYGAFSRATGIPDRFSGSGSGTDFTLTISRLEPEDFAVYYCMQYGSSPWTFGQGTKVEIK

SEQ ID NO: 2263 - protein, 118 aa, Artificial Sequence; identical to SEQ ID NO: 22
  Description of Artificial Sequence: Synthetic polypeptide
  VH of XENP019983

SEQ ID NO: 2264 - protein, 108 aa, Artificial Sequence
  Description of Artificial Sequence: Synthetic polypeptide
  VL of XENP019983
EIVLTQSPGTLSLSPGERATLSCRASQSVGSSYLAWYQQKPGQAPRLLIYGAFSRATGIPDRFSGSGSGTDFTLTISRLEPEDFAVYYCMQYGSSPWTFGQGTKVEIK

SEQ ID NO: 2265 - protein, 5 aa, Artificial Sequence
  Description of Artificial Sequence: Synthetic peptide
  XENP019983 vhCDR1
SYTMH

SEQ ID NO: 2266 - protein, 17 aa, Artificial Sequence
  Description of Artificial Sequence: Synthetic peptide
  XENP019983 vhCDR2
FISYDGNNKYYADSVKG

SEQ ID NO: 2267 - protein, 9 aa, Artificial Sequence
  Description of Artificial Sequence: Synthetic peptide
  XENP019983 vhCDR3
TGWLGPFDY

SEQ ID NO: 2268 - protein, 12 aa, Artificial Sequence
  Description of Artificial Sequence: Synthetic peptide
  XENP019983 vlCDR1
RASQSVGSSYLA

SEQ ID NO: 2269 - protein, 7 aa, Artificial Sequence
  Description of Artificial Sequence: Synthetic peptide
  XENP019983 vlCDR2
GAFSRAT

SEQ ID NO: 2270 - protein, 9 aa, Artificial Sequence
  Description of Artificial Sequence: Synthetic peptide
  XENP019983 vlCDR3
MQYGSSPWT

SEQ ID NO: 2271 - protein, 246 aa, Artificial Sequence
  Description of Artificial Sequence: Synthetic polypeptide
  XENP019984 [CTLA-4]_H0_L0.96_scFv(GKPGS)4
QVQLVESGGGVVQPGRSLRLSCAASGFTFSSYTMHWVRQAPGKGLEWVTFISYDGNNKYYADSVKGRFTISRDNSKNTLYLQMNSLRAEDTAIYYCARTGWLGPFDYWGQGTLVTVSSGKPGSGKPGSGKPGSGKPGSEIVLTQSPGTLSLSPGERATLSCRASQSVGSSYLAWYQQKPGQAPRLLIYGAFSRATGIPDRFSGSGSGTDFTLTISRLEPEDFAVYYCQSYGSSPWTFGQGTKVEIK

SEQ ID NO: 2272 - protein, 118 aa, Artificial Sequence; identical to SEQ ID NO: 22
  Description of Artificial Sequence: Synthetic polypeptide
  VH of XENP019984

SEQ ID NO: 2273 - protein, 108 aa, Artificial Sequence
  Description of Artificial Sequence: Synthetic polypeptide
  VL of XENP019984
EIVLTQSPGTLSLSPGERATLSCRASQSVGSSYLAWYQQKPGQAPRLLIYGAFSRATGIPDRFSGSGSGTDFTLTISRLEPEDFAVYYCQSYGSSPWTFGQGTKVEIK

SEQ ID NO: 2274 - protein, 5 aa, Artificial Sequence
  Description of Artificial Sequence: Synthetic peptide
  XENP019984 vhCDR1
SYTMH

SEQ ID NO: 2275 - protein, 17 aa, Artificial Sequence
  Description of Artificial Sequence: Synthetic peptide
  XENP019984 vhCDR2
FISYDGNNKYYADSVKG

SEQ ID NO: 2276 - protein, 9 aa, Artificial Sequence
  Description of Artificial Sequence: Synthetic peptide
  XENP019984 vhCDR3
TGWLGPFDY

SEQ ID NO: 2277 - protein, 12 aa, Artificial Sequence
  Description of Artificial Sequence: Synthetic peptide
  XENP019984 vlCDR1
RASQSVGSSYLA

SEQ ID NO: 2278 - protein, 7 aa, Artificial Sequence
  Description of Artificial Sequence: Synthetic peptide
  XENP019984 vlCDR2
GAFSRAT

SEQ ID NO: 2279 - protein, 9 aa, Artificial Sequence
  Description of Artificial Sequence: Synthetic peptide
  XENP019984 vlCDR3
QSYGSSPWT

SEQ ID NO: 2280 - protein, 246 aa, Artificial Sequence
  Description of Artificial Sequence: Synthetic polypeptide
  XENP019985 [CTLA-4]_H0_L0.97_scFv(GKPGS)4
QVQLVESGGGVVQPGRSLRLSCAASGFTFSSYTMHWVRQAPGKGLEWVTFISYDGNNKYYADSVKGRFTISRDNSKNTLYLQMNSLRAEDTAIYYCARTGWLGPFDYWGQGTLVTVSSGKPGSGKPGSGKPGSGKPGSEIVLTQSPGTLSLSPGERATLSCRASQSVGSSYLAWYQQKPGQAPRLLIYGAFSRATGIPDRFSGSGSGTDFTLTISRLEPEDFAVYYCQQAGSSPWTFGQGTKVEIK

SEQ ID NO: 2281 - protein, 118 aa, Artificial Sequence; identical to SEQ ID NO: 22
  Description of Artificial Sequence: Synthetic polypeptide
  VH of XENP019985

SEQ ID NO: 2282 - protein, 108 aa, Artificial Sequence
  Description of Artificial Sequence: Synthetic polypeptide
  VL of XENP019985
EIVLTQSPGTLSLSPGERATLSCRASQSVGSSYLAWYQQKPGQAPRLLIYGAFSRATGIPDRFSGSGSGTDFTLTISRLEPEDFAVYYCQQAGSSPWTFGQGTKVEIK

SEQ ID NO: 2283 - protein, 5 aa, Artificial Sequence
  Description of Artificial Sequence: Synthetic peptide
  XENP019985 vhCDR1
SYTMH

SEQ ID NO: 2284 - protein, 17 aa, Artificial Sequence
  Description of Artificial Sequence: Synthetic peptide
  XENP019985 vhCDR2
FISYDGNNKYYADSVKG

SEQ ID NO: 2285 - protein, 9 aa, Artificial Sequence
  Description of Artificial Sequence: Synthetic peptide
  XENP019985 vhCDR3
TGWLGPFDY

SEQ ID NO: 2286 - protein, 12 aa, Artificial Sequence
  Description of Artificial Sequence: Synthetic peptide
  XENP019985 vlCDR1
RASQSVGSSYLA

SEQ ID NO: 2287 - protein, 7 aa, Artificial Sequence
  Description of Artificial Sequence: Synthetic peptide
  XENP019985 vlCDR2
GAFSRAT

SEQ ID NO: 2288 - protein, 9 aa, Artificial Sequence
  Description of Artificial Sequence: Synthetic peptide
  XENP019985 vlCDR3
QQAGSSPWT

SEQ ID NO: 2289 - protein, 246 aa, Artificial Sequence
  Description of Artificial Sequence: Synthetic polypeptide
  XENP019986 [CTLA-4]_H0_L0.98_scFv(GKPGS)4
QVQLVESGGGVVQPGRSLRLSCAASGFTFSSYTMHWVRQAPGKGLEWVTFISYDGNNKYYADSVKGRFTISRDNSKNTLYLQMNSLRAEDTAIYYCARTGWLGPFDYWGQGTLVTVSSGKPGSGKPGSGKPGSGKPGSEIVLTQSPGTLSLSPGERATLSCRASQSVGSSYLAWYQQKPGQAPRLLIYGAFSRATGIPDRFSGSGSGTDFTLTISRLEPEDFAVYYCQQFGSSPWTFGQGTKVEIK

SEQ ID NO: 2290 - protein, 118 aa, Artificial Sequence; identical to SEQ ID NO: 22
  Description of Artificial Sequence: Synthetic polypeptide
  VH of XENP019986

SEQ ID NO: 2291 - protein, 108 aa, Artificial Sequence
  Description of Artificial Sequence: Synthetic polypeptide
  VL of XENP019986
EIVLTQSPGTLSLSPGERATLSCRASQSVGSSYLAWYQQKPGQAPRLLIYGAFSRATGIPDRFSGSGSGTDFTLTISRLEPEDFAVYYCQQFGSSPWTFGQGTKVEIK

SEQ ID NO: 2292 - protein, 5 aa, Artificial Sequence
  Description of Artificial Sequence: Synthetic peptide
  XENP019986 vhCDR1
SYTMH

SEQ ID NO: 2293 - protein, 17 aa, Artificial Sequence
  Description of Artificial Sequence: Synthetic peptide
  XENP019986 vhCDR2
FISYDGNNKYYADSVKG

SEQ ID NO: 2294 - protein, 9 aa, Artificial Sequence
  Description of Artificial Sequence: Synthetic peptide
  XENP019986 vhCDR3
TGWLGPFDY

SEQ ID NO: 2295 - protein, 12 aa, Artificial Sequence
  Description of Artificial Sequence: Synthetic peptide
  XENP019986 vlCDR1
RASQSVGSSYLA

SEQ ID NO: 2296 - protein, 7 aa, Artificial Sequence
  Description of Artificial Sequence: Synthetic peptide
  XENP019986 vlCDR2
GAFSRAT

SEQ ID NO: 2297 - protein, 9 aa, Artificial Sequence
  Description of Artificial Sequence: Synthetic peptide
  XENP019986 vlCDR3
QQFGSSPWT

SEQ ID NO: 2298 - protein, 246 aa, Artificial Sequence
  Description of Artificial Sequence: Synthetic polypeptide
  XENP019987 [CTLA-4]_H0_L0.99_scFv(GKPGS)4
QVQLVESGGGVVQPGRSLRLSCAASGFTFSSYTMHWVRQAPGKGLEWVTFISYDGNNKYYADSVKGRFTISRDNSKNTLYLQMNSLRAEDTAIYYCARTGWLGPFDYWGQGTLVTVSSGKPGSGKPGSGKPGSGKPGSEIVLTQSPGTLSLSPGERATLSCRASQSVGSSYLAWYQQKPGQAPRLLIYGAFSRATGIPDRFSGSGSGTDFTLTISRLEPEDFAVYYCQQHGSSPWTFGQGTKVEIK

SEQ ID NO: 2299 - protein, 118 aa, Artificial Sequence; identical to SEQ ID NO: 22
  Description of Artificial Sequence: Synthetic polypeptide
  VH of XENP019987

SEQ ID NO: 2300 - protein, 108 aa, Artificial Sequence
  Description of Artificial Sequence: Synthetic polypeptide
  VL of XENP019987
EIVLTQSPGTLSLSPGERATLSCRASQSVGSSYLAWYQQKPGQAPRLLIYGAFSRATGIPDRFSGSGSGTDFTLTISRLEPEDFAVYYCQQHGSSPWTFGQGTKVEIK

SEQ ID NO: 2301 - protein, 5 aa, Artificial Sequence
  Description of Artificial Sequence: Synthetic peptide
  XENP019987 vhCDR1
SYTMH

SEQ ID NO: 2302 - protein, 17 aa, Artificial Sequence
  Description of Artificial Sequence: Synthetic peptide
  XENP019987 vhCDR2
FISYDGNNKYYADSVKG

SEQ ID NO: 2303 - protein, 9 aa, Artificial Sequence
  Description of Artificial Sequence: Synthetic peptide
  XENP019987 vhCDR3
TGWLGPFDY

SEQ ID NO: 2304 - protein, 12 aa, Artificial Sequence
  Description of Artificial Sequence: Synthetic peptide
  XENP019987 vlCDR1
RASQSVGSSYLA

SEQ ID NO: 2305 - protein, 7 aa, Artificial Sequence
  Description of Artificial Sequence: Synthetic peptide
  XENP019987 vlCDR2
GAFSRAT

SEQ ID NO: 2306 - protein, 9 aa, Artificial Sequence
  Description of Artificial Sequence: Synthetic peptide
  XENP019987 vlCDR3
QQHGSSPWT

SEQ ID NO: 2307 - protein, 246 aa, Artificial Sequence
  Description of Artificial Sequence: Synthetic polypeptide
  XENP019988 [CTLA-4]_H0_L0.100_scFv(GKPGS)4
QVQLVESGGGVVQPGRSLRLSCAASGFTFSSYTMHWVRQAPGKGLEWVTFISYDGNNKYYADSVKGRFTISRDNSKNTLYLQMNSLRAEDTAIYYCARTGWLGPFDYWGQGTLVTVSSGKPGSGKPGSGKPGSGKPGSEIVLTQSPGTLSLSPGERATLSCRASQSVGSSYLAWYQQKPGQAPRLLIYGAFSRATGIPDRFSGSGSGTDFTLTISRLEPEDFAVYYCQQLGSSPWTFGQGTKVEIK

SEQ ID NO: 2308 - protein, 118 aa, Artificial Sequence; identical to SEQ ID NO: 22
  Description of Artificial Sequence: Synthetic polypeptide
  VH of XENP019988

SEQ ID NO: 2309 - protein, 108 aa, Artificial Sequence
  Description of Artificial Sequence: Synthetic polypeptide
  VL of XENP019988
EIVLTQSPGTLSLSPGERATLSCRASQSVGSSYLAWYQQKPGQAPRLLIYGAFSRATGIPDRFSGSGSGTDFTLTISRLEPEDFAVYYCQQLGSSPWTFGQGTKVEIK

SEQ ID NO: 2310 - protein, 5 aa, Artificial Sequence
  Description of Artificial Sequence: Synthetic peptide
  XENP019988 vhCDR1
SYTMH

SEQ ID NO: 2311 - protein, 17 aa, Artificial Sequence
  Description of Artificial Sequence: Synthetic peptide
  XENP019988 vhCDR2
FISYDGNNKYYADSVKG

SEQ ID NO: 2312 - protein, 9 aa, Artificial Sequence
  Description of Artificial Sequence: Synthetic peptide
  XENP019988 vhCDR3
TGWLGPFDY

SEQ ID NO: 2313 - protein, 12 aa, Artificial Sequence
  Description of Artificial Sequence: Synthetic peptide
  XENP019988 vlCDR1
RASQSVGSSYLA

SEQ ID NO: 2314 - protein, 7 aa, Artificial Sequence
  Description of Artificial Sequence: Synthetic peptide
  XENP019988 vlCDR2
GAFSRAT

SEQ ID NO: 2315 - protein, 9 aa, Artificial Sequence
  Description of Artificial Sequence: Synthetic peptide
  XENP019988 vlCDR3
QQLGSSPWT

SEQ ID NO: 2316 - protein, 246 aa, Artificial Sequence
  Description of Artificial Sequence: Synthetic polypeptide
  XENP019989 [CTLA-4]_H0_L0.101_scFv(GKPGS)4
QVQLVESGGGVVQPGRSLRLSCAASGFTFSSYTMHWVRQAPGKGLEWVTFISYDGNNKYYADSVKGRFTISRDNSKNTLYLQMNSLRAEDTAIYYCARTGWLGPFDYWGQGTLVTVSSGKPGSGKPGSGKPGSGKPGSEIVLTQSPGTLSLSPGERATLSCRASQSVGSSYLAWYQQKPGQAPRLLIYGAFSRATGIPDRFSGSGSGTDFTLTISRLEPEDFAVYYCQQVGSSPWTFGQGTKVEIK

SEQ ID NO: 2317 - protein, 118 aa, Artificial Sequence; identical to SEQ ID NO: 22
  Description of Artificial Sequence: Synthetic polypeptide
  VH of XENP019989

SEQ ID NO: 2318 - protein, 108 aa, Artificial Sequence
  Description of Artificial Sequence: Synthetic polypeptide
  VL of XENP019989
EIVLTQSPGTLSLSPGERATLSCRASQSVGSSYLAWYQQKPGQAPRLLIYGAFSRATGIPDRFSGSGSGTDFTLTISRLEPEDFAVYYCQQVGSSPWTFGQGTKVEIK

SEQ ID NO: 2319 - protein, 5 aa, Artificial Sequence
  Description of Artificial Sequence: Synthetic peptide
  XENP019989 vhCDR1
SYTMH

SEQ ID NO: 2320 - protein, 17 aa, Artificial Sequence
  Description of Artificial Sequence: Synthetic peptide
  XENP019989 vhCDR2
FISYDGNNKYYADSVKG

SEQ ID NO: 2321 - protein, 9 aa, Artificial Sequence
  Description of Artificial Sequence: Synthetic peptide
  XENP019989 vhCDR3
TGWLGPFDY

SEQ ID NO: 2322 - protein, 12 aa, Artificial Sequence
  Description of Artificial Sequence: Synthetic peptide
  XENP019989 vlCDR1
RASQSVGSSYLA

SEQ ID NO: 2323 - protein, 7 aa, Artificial Sequence
  Description of Artificial Sequence: Synthetic peptide
  XENP019989 vlCDR2
GAFSRAT

SEQ ID NO: 2324 - protein, 9 aa, Artificial Sequence
  Description of Artificial Sequence: Synthetic peptide
  XENP019989 vlCDR3
QQVGSSPWT

SEQ ID NO: 2325 - protein, 246 aa, Artificial Sequence
  Description of Artificial Sequence: Synthetic polypeptide
  XENP019990 [CTLA-4]_H0_L0.102_scFv(GKPGS)4
QVQLVESGGGVVQPGRSLRLSCAASGFTFSSYTMHWVRQAPGKGLEWVTFISYDGNNKYYADSVKGRFTISRDNSKNTLYLQMNSLRAEDTAIYYCARTGWLGPFDYWGQGTLVTVSSGKPGSGKPGSGKPGSGKPGSEIVLTQSPGTLSLSPGERATLSCRASQSVGSSYLAWYQQKPGQAPRLLIYGAFSRATGIPDRFSGSGSGTDFTLTISRLEPEDFAVYYCQQYGESPWTFGQGTKVEIK

SEQ ID NO: 2326 - protein, 118 aa, Artificial Sequence; identical to SEQ ID NO: 22
  Description of Artificial Sequence: Synthetic polypeptide
  VH of XENP019990

SEQ ID NO: 2327 - protein, 108 aa, Artificial Sequence
  Description of Artificial Sequence: Synthetic polypeptide
  VL of XENP019990
EIVLTQSPGTLSLSPGERATLSCRASQSVGSSYLAWYQQKPGQAPRLLIYGAFSRATGIPDRFSGSGSGTDFTLTISRLEPEDFAVYYCQQYGESPWTFGQGTKVEIK

SEQ ID NO: 2328 - protein, 5 aa, Artificial Sequence
  Description of Artificial Sequence: Synthetic peptide
  XENP019990 vhCDR1
SYTMH

SEQ ID NO: 2329 - protein, 17 aa, Artificial Sequence
  Description of Artificial Sequence: Synthetic peptide
  XENP019990 vhCDR2
FISYDGNNKYYADSVKG

SEQ ID NO: 2330 - protein, 9 aa, Artificial Sequence
  Description of Artificial Sequence: Synthetic peptide
  XENP019990 vhCDR3
TGWLGPFDY

SEQ ID NO: 2331 - protein, 12 aa, Artificial Sequence
  Description of Artificial Sequence: Synthetic peptide
  XENP019990 vlCDR1
RASQSVGSSYLA

SEQ ID NO: 2332 - protein, 7 aa, Artificial Sequence
  Description of Artificial Sequence: Synthetic peptide
  XENP019990 vlCDR2
GAFSRAT

SEQ ID NO: 2333 - protein, 9 aa, Artificial Sequence
  Description of Artificial Sequence: Synthetic peptide
  XENP019990 vlCDR3
QQYGESPWT

SEQ ID NO: 2334 - protein, 246 aa, Artificial Sequence
  Description of Artificial Sequence: Synthetic polypeptide
  XENP019991 [CTLA-4]_H0_L0.103_scFv(GKPGS)4
QVQLVESGGGVVQPGRSLRLSCAASGFTFSSYTMHWVRQAPGKGLEWVTFISYDGNNKYYADSVKGRFTISRDNSKNTLYLQMNSLRAEDTAIYYCARTGWLGPFDYWGQGTLVTVSSGKPGSGKPGSGKPGSGKPGSEIVLTQSPGTLSLSPGERATLSCRASQSVGSSYLAWYQQKPGQAPRLLIYGAFSRATGIPDRFSGSGSGTDFTLTISRLEPEDFAVYYCQQYGKSPWTFGQGTKVEIK

SEQ ID NO: 2335 - protein, 118 aa, Artificial Sequence; identical to SEQ ID NO: 22
  Description of Artificial Sequence: Synthetic polypeptide
  VH of XENP019991

SEQ ID NO: 2336 - protein, 108 aa, Artificial Sequence
  Description of Artificial Sequence: Synthetic polypeptide
  VL of XENP019991
EIVLTQSPGTLSLSPGERATLSCRASQSVGSSYLAWYQQKPGQAPRLLIYGAFSRATGIPDRFSGSGSGTDFTLTISRLEPEDFAVYYCQQYGKSPWTFGQGTKVEIK

SEQ ID NO: 2337 - protein, 5 aa, Artificial Sequence
  Description of Artificial Sequence: Synthetic peptide
  XENP019991 vhCDR1
SYTMH

SEQ ID NO: 2338 - protein, 17 aa, Artificial Sequence
  Description of Artificial Sequence: Synthetic peptide
  XENP019991 vhCDR2
FISYDGNNKYYADSVKG

SEQ ID NO: 2339 - protein, 9 aa, Artificial Sequence
  Description of Artificial Sequence: Synthetic peptide
  XENP019991 vhCDR3
TGWLGPFDY

SEQ ID NO: 2340 - protein, 12 aa, Artificial Sequence
  Description of Artificial Sequence: Synthetic peptide
  XENP019991 vlCDR1
RASQSVGSSYLA

SEQ ID NO: 2341 - protein, 7 aa, Artificial Sequence
  Description of Artificial Sequence: Synthetic peptide
  XENP019991 vlCDR2
GAFSRAT

SEQ ID NO: 2342 - protein, 9 aa, Artificial Sequence
  Description of Artificial Sequence: Synthetic peptide
  XENP019991 vlCDR3
QQYGKSPWT

SEQ ID NO: 2343 - protein, 246 aa, Artificial Sequence
  Description of Artificial Sequence: Synthetic polypeptide
  XENP019992 [CTLA-4]_H0_L0.104_scFv(GKPGS)4
QVQLVESGGGVVQPGRSLRLSCAASGFTFSSYTMHWVRQAPGKGLEWVTFISYDGNNKYYADSVKGRFTISRDNSKNTLYLQMNSLRAEDTAIYYCARTGWLGPFDYWGQGTLVTVSSGKPGSGKPGSGKPGSGKPGSEIVLTQSPGTLSLSPGERATLSCRASQSVGSSYLAWYQQKPGQAPRLLIYGAFSRATGIPDRFSGSGSGTDFTLTISRLEPEDFAVYYCQQYGSYPWTFGQGTKVEIK

SEQ ID NO: 2344 - protein, 118 aa, Artificial Sequence; identical to SEQ ID NO: 22
  Description of Artificial Sequence: Synthetic polypeptide
  VH of XENP019992

SEQ ID NO: 2345 - protein, 108 aa, Artificial Sequence
  Description of Artificial Sequence: Synthetic polypeptide
  VL of XENP019992
EIVLTQSPGTLSLSPGERATLSCRASQSVGSSYLAWYQQKPGQAPRLLIYGAFSRATGIPDRFSGSGSGTDFTLTISRLEPEDFAVYYCQQYGSYPWTFGQGTKVEIK

SEQ ID NO: 2346 - protein, 5 aa, Artificial Sequence
  Description of Artificial Sequence: Synthetic peptide
  XENP019992 vhCDR1
SYTMH

SEQ ID NO: 2347 - protein, 17 aa, Artificial Sequence
  Description of Artificial Sequence: Synthetic peptide
  XENP019992 vhCDR2
FISYDGNNKYYADSVKG

SEQ ID NO: 2348 - protein, 9 aa, Artificial Sequence
  Description of Artificial Sequence: Synthetic peptide
  XENP019992 vhCDR3
TGWLGPFDY

SEQ ID NO: 2349 - protein, 12 aa, Artificial Sequence
  Description of Artificial Sequence: Synthetic peptide
  XENP019992 vlCDR1
RASQSVGSSYLA

SEQ ID NO: 2350 - protein, 7 aa, Artificial Sequence
  Description of Artificial Sequence: Synthetic peptide
  XENP019992 vlCDR2
GAFSRAT

SEQ ID NO: 2351 - protein, 9 aa, Artificial Sequence
  Description of Artificial Sequence: Synthetic peptide
  XENP019992 vlCDR3
QQYGSYPWT

SEQ ID NO: 2352 - protein, 246 aa, Artificial Sequence
  Description of Artificial Sequence: Synthetic polypeptide
  XENP019993 [CTLA-4]_H0_L0.105_scFv(GKPGS)4
QVQLVESGGGVVQPGRSLRLSCAASGFTFSSYTMHWVRQAPGKGLEWVTFISYDGNNKYYADSVKGRFTISRDNSKNTLYLQMNSLRAEDTAIYYCARTGWLGPFDYWGQGTLVTVSSGKPGSGKPGSGKPGSGKPGSEIVLTQSPGTLSLSPGERATLSCRASQSVGSSYLAWYQQKPGQAPRLLIYGAFSRATGIPDRFSGSGSGTDFTLTISRLEPEDFAVYYCQQYGSSHWTFGQGTKVEIK

SEQ ID NO: 2353 - protein, 118 aa, Artificial Sequence; identical to SEQ ID NO: 22
  Description of Artificial Sequence: Synthetic polypeptide
  VH of XENP019993

SEQ ID NO: 2354 - protein, 108 aa, Artificial Sequence
  Description of Artificial Sequence: Synthetic polypeptide
  VL of XENP019993
EIVLTQSPGTLSLSPGERATLSCRASQSVGSSYLAWYQQKPGQAPRLLIYGAFSRATGIPDRFSGSGSGTDFTLTISRLEPEDFAVYYCQQYGSSHWTFGQGTKVEIK

SEQ ID NO: 2355 - protein, 5 aa, Artificial Sequence
  Description of Artificial Sequence: Synthetic peptide
  XENP019993 vhCDR1
SYTMH

SEQ ID NO: 2356 - protein, 17 aa, Artificial Sequence
  Description of Artificial Sequence: Synthetic peptide
  XENP019993 vhCDR2
FISYDGNNKYYADSVKG

SEQ ID NO: 2357 - protein, 9 aa, Artificial Sequence
  Description of Artificial Sequence: Synthetic peptide
  XENP019993 vhCDR3
TGWLGPFDY

SEQ ID NO: 2358 - protein, 12 aa, Artificial Sequence
  Description of Artificial Sequence: Synthetic peptide
  XENP019993 vlCDR1
RASQSVGSSYLA

SEQ ID NO: 2359 - protein, 7 aa, Artificial Sequence
  Description of Artificial Sequence: Synthetic peptide
  XENP019993 vlCDR2
GAFSRAT

SEQ ID NO: 2360 - protein, 9 aa, Artificial Sequence
  Description of Artificial Sequence: Synthetic peptide
  XENP019993 vlCDR3
QQYGSSHWT

SEQ ID NO: 2361 - protein, 246 aa, Artificial Sequence
  Description of Artificial Sequence: Synthetic polypeptide
  XENP019994 [CTLA-4]_H0_L0.106_scFv(GKPGS)4
QVQLVESGGGVVQPGRSLRLSCAASGFTFSSYTMHWVRQAPGKGLEWVTFISYDGNNKYYADSVKGRFTISRDNSKNTLYLQMNSLRAEDTAIYYCARTGWLGPFDYWGQGTLVTVSSGKPGSGKPGSGKPGSGKPGSEIVLTQSPGTLSLSPGERATLSCRASQSVGSSYLAWYQQKPGQAPRLLIYGAFSRATGIPDRFSGSGSGTDFTLTISRLEPEDFAVYYCQQYGSSPFTFGQGTKVEIK

SEQ ID NO: 2362 - protein, 118 aa, Artificial Sequence; identical to SEQ ID NO: 22
  Description of Artificial Sequence: Synthetic polypeptide
  VH of XENP019994

SEQ ID NO: 2363 - protein, 108 aa, Artificial Sequence
  Description of Artificial Sequence: Synthetic polypeptide
  VL of XENP019994
EIVLTQSPGTLSLSPGERATLSCRASQSVGSSYLAWYQQKPGQAPRLLIYGAFSRATGIPDRFSGSGSGTDFTLTISRLEPEDFAVYYCQQYGSSPFTFGQGTKVEIK

SEQ ID NO: 2364 - protein, 5 aa, Artificial Sequence
  Description of Artificial Sequence: Synthetic peptide
  XENP019994 vhCDR1
SYTMH

SEQ ID NO: 2365 - protein, 17 aa, Artificial Sequence
  Description of Artificial Sequence: Synthetic peptide
  XENP019994 vhCDR2
FISYDGNNKYYADSVKG

SEQ ID NO: 2366 - protein, 9 aa, Artificial Sequence
  Description of Artificial Sequence: Synthetic peptide
  XENP019994 vhCDR3
TGWLGPFDY

SEQ ID NO: 2367 - protein, 12 aa, Artificial Sequence
  Description of Artificial Sequence: Synthetic peptide
  XENP019994 vlCDR1
RASQSVGSSYLA

SEQ ID NO: 2368 - protein, 7 aa, Artificial Sequence
  Description of Artificial Sequence: Synthetic peptide
  XENP019994 vlCDR2
GAFSRAT

SEQ ID NO: 2369 - protein, 9 aa, Artificial Sequence
  Description of Artificial Sequence: Synthetic peptide
  XENP019994 vlCDR3
QQYGSSPFT

SEQ ID NO: 2370 - protein, 246 aa, Artificial Sequence
  Description of Artificial Sequence: Synthetic polypeptide
  XENP019995 [CTLA-4]_H0_L0.107_scFv(GKPGS)4
QVQLVESGGGVVQPGRSLRLSCAASGFTFSSYTMHWVRQAPGKGLEWVTFISYDGNNKYYADSVKGRFTISRDNSKNTLYLQMNSLRAEDTAIYYCARTGWLGPFDYWGQGTLVTVSSGKPGSGKPGSGKPGSGKPGSEIVLTQSPGTLSLSPGERATLSCRASQSVGSSYLAWYQQKPGQAPRLLIYGAFSRATGIPDRFSGSGSGTDFTLTISRLEPEDFAVYYCQQYGSSPHTFGQGTKVEIK

SEQ ID NO: 2371 - protein, 118 aa, Artificial Sequence; identical to SEQ ID NO: 22
  Description of Artificial Sequence: Synthetic polypeptide
  VH of XENP019995

SEQ ID NO: 2372 - protein, 108 aa, Artificial Sequence
  Description of Artificial Sequence: Synthetic polypeptide
  VL of XENP019995
EIVLTQSPGTLSLSPGERATLSCRASQSVGSSYLAWYQQKPGQAPRLLIYGAFSRATGIPDRFSGSGSGTDFTLTISRLEPEDFAVYYCQQYGSSPHTFGQGTKVEIK

SEQ ID NO: 2373 - protein, 5 aa, Artificial Sequence
  Description of Artificial Sequence: Synthetic peptide
  XENP019995 vhCDR1
SYTMH

SEQ ID NO: 2374 - protein, 17 aa, Artificial Sequence
  Description of Artificial Sequence: Synthetic peptide
  XENP019995 vhCDR2
FISYDGNNKYYADSVKG

SEQ ID NO: 2375 - protein, 9 aa, Artificial Sequence
  Description of Artificial Sequence: Synthetic peptide
  XENP019995 vhCDR3
TGWLGPFDY

SEQ ID NO: 2376 - protein, 12 aa, Artificial Sequence
  Description of Artificial Sequence: Synthetic peptide
  XENP019995 vlCDR1
RASQSVGSSYLA

SEQ ID NO: 2377 - protein, 7 aa, Artificial Sequence
  Description of Artificial Sequence: Synthetic peptide
  XENP019995 vlCDR2
GAFSRAT

SEQ ID NO: 2378 - protein, 9 aa, Artificial Sequence
  Description of Artificial Sequence: Synthetic peptide
  XENP019995 vlCDR3
QQYGSSPHT

SEQ ID NO: 2379 - protein, 246 aa, Artificial Sequence
  Description of Artificial Sequence: Synthetic polypeptide
  XENP019996 [CTLA-4]_H0_L0.108_scFv(GKPGS)4
QVQLVESGGGVVQPGRSLRLSCAASGFTFSSYTMHWVRQAPGKGLEWVTFISYDGNNKYYADSVKGRFTISRDNSKNTLYLQMNSLRAEDTAIYYCARTGWLGPFDYWGQGTLVTVSSGKPGSGKPGSGKPGSGKPGSEIVLTQSPGTLSLSPGERATLSCRASQSVGSSYLAWYQQKPGQAPRLLIYGAFSRATGIPDRFSGSGSGTDFTLTISRLEPEDFAVYYCQQYGSSPITFGQGTKVEIK

SEQ ID NO: 2380 - protein, 118 aa, Artificial Sequence; identical to SEQ ID NO: 22
  Description of Artificial Sequence: Synthetic polypeptide
  VH of XENP019996

SEQ ID NO: 2381 - protein, 108 aa, Artificial Sequence
  Description of Artificial Sequence: Synthetic polypeptide
  VL of XENP019996
EIVLTQSPGTLSLSPGERATLSCRASQSVGSSYLAWYQQKPGQAPRLLIYGAFSRATGIPDRFSGSGSGTDFTLTISRLEPEDFAVYYCQQYGSSPITFGQGTKVEIK

SEQ ID NO: 2382 - protein, 5 aa, Artificial Sequence
  Description of Artificial Sequence: Synthetic peptide
  XENP019996 vhCDR1
SYTMH

SEQ ID NO: 2383 - protein, 17 aa, Artificial Sequence
  Description of Artificial Sequence: Synthetic peptide
  XENP019996 vhCDR2
FISYDGNNKYYADSVKG

SEQ ID NO: 2384 - protein, 9 aa, Artificial Sequence
  Description of Artificial Sequence: Synthetic peptide
  XENP019996 vhCDR3
TGWLGPFDY

SEQ ID NO: 2385 - protein, 12 aa, Artificial Sequence
  Description of Artificial Sequence: Synthetic peptide
  XENP019996 vlCDR1
RASQSVGSSYLA

SEQ ID NO: 2386 - protein, 7 aa, Artificial Sequence
  Description of Artificial Sequence: Synthetic peptide
  XENP019996 vlCDR2
GAFSRAT

SEQ ID NO: 2387 - protein, 9 aa, Artificial Sequence
  Description of Artificial Sequence: Synthetic peptide
  XENP019996 vlCDR3
QQYGSSPIT

SEQ ID NO: 2388 - protein, 246 aa, Artificial Sequence
  Description of Artificial Sequence: Synthetic polypeptide
  XENP020001 [CTLA-4]_H0_L0.109_scFv(GKPGS)4
QVQLVESGGGVVQPGRSLRLSCAASGFTFSSYTMHWVRQAPGKGLEWVTFISYDGNNKYYADSVKGRFTISRDNSKNTLYLQMNSLRAEDTAIYYCARTGWLGPFDYWGQGTLVTVSSGKPGSGKPGSGKPGSGKPGSEIVLTQSPGTLSLSPGERATLSCRASQSVGSSYLAWYQQKPGQAPRLLIYGAFSRATGIPDRFSGSGSGTDFTLTISRLEPEDFAVYYCQQYGSSPLTFGQGTKVEIK

SEQ ID NO: 2389 - protein, 118 aa, Artificial Sequence; identical to SEQ ID NO: 22
  Description of Artificial Sequence: Synthetic polypeptide
  VH of XENP020001

SEQ ID NO: 2390 - protein, 108 aa, Artificial Sequence
  Description of Artificial Sequence: Synthetic polypeptide
  VL of XENP020001
EIVLTQSPGTLSLSPGERATLSCRASQSVGSSYLAWYQQKPGQAPRLLIYGAFSRATGIPDRFSGSGSGTDFTLTISRLEPEDFAVYYCQQYGSSPLTFGQGTKVEIK

SEQ ID NO: 2391 - protein, 5 aa, Artificial Sequence
  Description of Artificial Sequence: Synthetic peptide
  XENP020001 vhCDR1
SYTMH

SEQ ID NO: 2392 - protein, 17 aa, Artificial Sequence
  Description of Artificial Sequence: Synthetic peptide
  XENP020001 vhCDR2
FISYDGNNKYYADSVKG

SEQ ID NO: 2393 - protein, 9 aa, Artificial Sequence
  Description of Artificial Sequence: Synthetic peptide
  XENP020001 vhCDR3
TGWLGPFDY

SEQ ID NO: 2394 - protein, 12 aa, Artificial Sequence
  Description of Artificial Sequence: Synthetic peptide
  XENP020001 vlCDR1
RASQSVGSSYLA

SEQ ID NO: 2395 - protein, 7 aa, Artificial Sequence
  Description of Artificial Sequence: Synthetic peptide
  XENP020001 vlCDR2
GAFSRAT

SEQ ID NO: 2396 - protein, 9 aa, Artificial Sequence
  Description of Artificial Sequence: Synthetic peptide
  XENP020001 vlCDR3
QQYGSSPLT

SEQ ID NO: 2397 - protein, 246 aa, Artificial Sequence
  Description of Artificial Sequence: Synthetic polypeptide
  XENP020002 [CTLA-4]_H0_L0.110_scFv(GKPGS)4
QVQLVESGGGVVQPGRSLRLSCAASGFTFSSYTMHWVRQAPGKGLEWVTFISYDGNNKYYADSVKGRFTISRDNSKNTLYLQMNSLRAEDTAIYYCARTGWLGPFDYWGQGTLVTVSSGKPGSGKPGSGKPGSGKPGSEIVLTQSPGTLSLSPGERATLSCRASQSVGSSYLAWYQQKPGQAPRLLIYGAFSRATGIPDRFSGSGSGTDFTLTISRLEPEDFAVYYCQQYGSSPYTFGQGTKVEIK

SEQ ID NO: 2398 - protein, 118 aa, Artificial Sequence; identical to SEQ ID NO: 22
  Description of Artificial Sequence: Synthetic polypeptide
  VH of XENP020002

SEQ ID NO: 2399 - protein, 108 aa, Artificial Sequence
  Description of Artificial Sequence: Synthetic polypeptide
  VL of XENP020002
EIVLTQSPGTLSLSPGERATLSCRASQSVGSSYLAWYQQKPGQAPRLLIYGAFSRATGIPDRFSGSGSGTDFTLTISRLEPEDFAVYYCQQYGSSPYTFGQGTKVEIK

SEQ ID NO: 2400 - protein, 5 aa, Artificial Sequence
  Description of Artificial Sequence: Synthetic peptide
  XENP020002 vhCDR1
SYTMH

SEQ ID NO: 2401 - protein, 17 aa, Artificial Sequence
  Description of Artificial Sequence: Synthetic peptide
  XENP020002 vhCDR2
FISYDGNNKYYADSVKG

SEQ ID NO: 2402 - protein, 9 aa, Artificial Sequence
  Description of Artificial Sequence: Synthetic peptide
  XENP020002 vhCDR3
TGWLGPFDY

SEQ ID NO: 2403 - protein, 12 aa, Artificial Sequence
  Description of Artificial Sequence: Synthetic peptide
  XENP020002 vlCDR1
RASQSVGSSYLA

SEQ ID NO: 2404 - protein, 7 aa, Artificial Sequence
  Description of Artificial Sequence: Synthetic peptide
  XENP020002 vlCDR2
GAFSRAT

SEQ ID NO: 2405 - protein, 9 aa, Artificial Sequence
  Description of Artificial Sequence: Synthetic peptide
  XENP020002 vlCDR3
QQYGSSPYT

SEQ ID NO: 2406 - protein, 246 aa, Artificial Sequence
  Description of Artificial Sequence: Synthetic polypeptide
  XENP020003 [CTLA-4]_H0_L0.111_scFv(GKPGS)4
QVQLVESGGGVVQPGRSLRLSCAASGFTFSSYTMHWVRQAPGKGLEWVTFISYDGNNKYYADSVKGRFTISRDNSKNTLYLQMNSLRAEDTAIYYCARTGWLGPFDYWGQGTLVTVSSGKPGSGKPGSGKPGSGKPGSEIVLTQSPGTLSLSPGERATLSCRASQSVGSSYLAWYQQKPGQAPRLLIYGAFSRATGIPDRFSGSGSGTDFTLTISRLEPEDFAVYYCQQYGSSPWVFGQGTKVEIK

SEQ ID NO: 2407 - protein, 118 aa, Artificial Sequence; identical to SEQ ID NO: 22
  Description of Artificial Sequence: Synthetic polypeptide
  VH of XENP020003

SEQ ID NO: 2408 - protein, 108 aa, Artificial Sequence
  Description of Artificial Sequence: Synthetic polypeptide
  VL of XENP020003
EIVLTQSPGTLSLSPGERATLSCRASQSVGSSYLAWYQQKPGQAPRLLIYGAFSRATGIPDRFSGSGSGTDFTLTISRLEPEDFAVYYCQQYGSSPWVFGQGTKVEIK

SEQ ID NO: 2409 - protein, 5 aa, Artificial Sequence
  Description of Artificial Sequence: Synthetic peptide
  XENP020003 vhCDR1
SYTMH

SEQ ID NO: 2410 - protein, 17 aa, Artificial Sequence
  Description of Artificial Sequence: Synthetic peptide
  XENP020003 vhCDR2
FISYDGNNKYYADSVKG

SEQ ID NO: 2411 - protein, 9 aa, Artificial Sequence
  Description of Artificial Sequence: Synthetic peptide
  XENP020003 vhCDR3
TGWLGPFDY

SEQ ID NO: 2412 - protein, 12 aa, Artificial Sequence
  Description of Artificial Sequence: Synthetic peptide
  XENP020003 vlCDR1
RASQSVGSSYLA

SEQ ID NO: 2413 - protein, 7 aa, Artificial Sequence
  Description of Artificial Sequence: Synthetic peptide
  XENP020003 vlCDR2
GAFSRAT

SEQ ID NO: 2414 - protein, 9 aa, Artificial Sequence
  Description of Artificial Sequence: Synthetic peptide
  XENP020003 vlCDR3
QQYGSSPWV

SEQ ID NO: 2415 - protein, 246 aa, Artificial Sequence
  Description of Artificial Sequence: Synthetic polypeptide
  XENP020004 [CTLA-4]_H0_L0.112_scFv(GKPGS)4
QVQLVESGGGVVQPGRSLRLSCAASGFTFSSYTMHWVRQAPGKGLEWVTFISYDGNNKYYADSVKGRFTISRDNSKNTLYLQMNSLRAEDTAIYYCARTGWLGPFDYWGQGTLVTVSSGKPGSGKPGSGKPGSGKPGSEIVLTQSPGTLSLSPGERATLSCRASQSVGSSYLAWYQQKPGQAPRLLIYGAFSRATGIPDRFSGSGSGTDFTLTISRLEPEDFAVYYCQQYGSSPWTFGGGTKVEIK

SEQ ID NO: 2416 - protein, 118 aa, Artificial Sequence; identical to SEQ ID NO: 22
  Description of Artificial Sequence: Synthetic polypeptide
  VH of XENP020004

SEQ ID NO: 2417 - protein, 108 aa, Artificial Sequence
  Description of Artificial Sequence: Synthetic polypeptide
  VL of XENP020004
EIVLTQSPGTLSLSPGERATLSCRASQSVGSSYLAWYQQKPGQAPRLLIYGAFSRATGIPDRFSGSGSGTDFTLTISRLEPEDFAVYYCQQYGSSPWTFGGGTKVEIK

SEQ ID NO: 2418 - protein, 5 aa, Artificial Sequence
  Description of Artificial Sequence: Synthetic peptide
  XENP020004 vhCDR1
SYTMH

SEQ ID NO: 2419 - protein, 17 aa, Artificial Sequence
  Description of Artificial Sequence: Synthetic peptide
  XENP020004 vhCDR2
FISYDGNNKYYADSVKG

SEQ ID NO: 2420 - protein, 9 aa, Artificial Sequence
  Description of Artificial Sequence: Synthetic peptide
  XENP020004 vhCDR3
TGWLGPFDY

SEQ ID NO: 2421 - protein, 12 aa, Artificial Sequence
  Description of Artificial Sequence: Synthetic peptide
  XENP020004 vlCDR1
RASQSVGSSYLA

SEQ ID NO: 2422 - protein, 7 aa, Artificial Sequence
  Description of Artificial Sequence: Synthetic peptide
  XENP020004 vlCDR2
GAFSRAT

SEQ ID NO: 2423 - protein, 9 aa, Artificial Sequence
  Description of Artificial Sequence: Synthetic peptide
  XENP020004 vlCDR3
QQYGSSPWT

SEQ ID NO: 2424 - protein, 246 aa, Artificial Sequence
  Description of Artificial Sequence: Synthetic polypeptide
  XENP020005 [CTLA-4]_H0_L0.113_scFv(GKPGS)4
QVQLVESGGGVVQPGRSLRLSCAASGFTFSSYTMHWVRQAPGKGLEWVTFISYDGNNKYYADSVKGRFTISRDNSKNTLYLQMNSLRAEDTAIYYCARTGWLGPFDYWGQGTLVTVSSGKPGSGKPGSGKPGSGKPGSEIVLTQSPGTLSLSPGERATLSCRASQSVGSSYLAWYQQKPGQAPRLLIYGAFSRATGIPDRFSGSGSGTDFTLTISRLEPEDFAVYYCQQYGSSPWTFGEGTKVEIK

SEQ ID NO: 2425 - protein, 118 aa, Artificial Sequence; identical to SEQ ID NO: 22
  Description of Artificial Sequence: Synthetic polypeptide
  VH of XENP020005

SEQ ID NO: 2426 - protein, 108 aa, Artificial Sequence; identical to SEQ ID NO: 59
  Description of Artificial Sequence: Synthetic polypeptide
  VL of XENP020005

SEQ ID NO: 2427 - protein, 5 aa, Artificial Sequence
  Description of Artificial Sequence: Synthetic peptide
  XENP020005 vhCDR1
SYTMH

SEQ ID NO: 2428 - protein, 17 aa, Artificial Sequence
  Description of Artificial Sequence: Synthetic peptide
  XENP020005 vhCDR2
FISYDGNNKYYADSVKG

SEQ ID NO: 2429 - protein, 9 aa, Artificial Sequence
  Description of Artificial Sequence: Synthetic peptide
  XENP020005 vhCDR3
TGWLGPFDY

SEQ ID NO: 2430 - protein, 12 aa, Artificial Sequence
  Description of Artificial Sequence: Synthetic peptide
  XENP020005 vlCDR1
RASQSVGSSYLA

SEQ ID NO: 2431 - protein, 7 aa, Artificial Sequence
  Description of Artificial Sequence: Synthetic peptide
  XENP020005 vlCDR2
GAFSRAT

SEQ ID NO: 2432 - protein, 9 aa, Artificial Sequence
  Description of Artificial Sequence: Synthetic peptide
  XENP020005 vlCDR3
QQYGSSPWT

SEQ ID NO: 2433 - protein, 246 aa, Artificial Sequence
  Description of Artificial Sequence: Synthetic polypeptide
  XENP020075 [CTLA-4]_H3.1_L0.12_scFv(GKPGS)4
EVQLVESGGGLVKPGGSLRLSCAASGFTFSSYTMHWVRQAPGKGLEWVSFISYDGNHKYYADSVKGRFTISRDNAKNSLYLQMNSLRAEDTAVYYCARTGLLGPFDLWGQGTMVTVSSGKPGSGKPGSGKPGSGKPGSEIVLTQSPGTLSVSPGERATLSCRASQSVGSSYLAWYQQKPGQAPRLLIYGAFSRATGIPDRFSGSGSGTDFTLTISRLEPEDFAVYYCQQYGSSPWTFGQGTKVEIK

SEQ ID NO: 2434 - protein, 118 aa, Artificial Sequence
  Description of Artificial Sequence: Synthetic polypeptide
  VH of XENP020075
EVQLVESGGGLVKPGGSLRLSCAASGFTFSSYTMHWVRQAPGKGLEWVSFISYDGNHKYYADSVKGRFTISRDNAKNSLYLQMNSLRAEDTAVYYCARTGLLGPFDLWGQGTMVTVSS

SEQ ID NO: 2435 - protein, 108 aa, Artificial Sequence; identical to SEQ ID NO: 1517
  Description of Artificial Sequence: Synthetic polypeptide
  VL of XENP020075

SEQ ID NO: 2436 - protein, 5 aa, Artificial Sequence
  Description of Artificial Sequence: Synthetic peptide
  XENP020075 vhCDR1
SYTMH

SEQ ID NO: 2437 - protein, 17 aa, Artificial Sequence
  Description of Artificial Sequence: Synthetic peptide
  XENP020075 vhCDR2
FISYDGNHKYYADSVKG

SEQ ID NO: 2438 - protein, 9 aa, Artificial Sequence
  Description of Artificial Sequence: Synthetic peptide
  XENP020075 vhCDR3
TGLLGPFDL

SEQ ID NO: 2439 - protein, 12 aa, Artificial Sequence
  Description of Artificial Sequence: Synthetic peptide
  XENP020075 vlCDR1
RASQSVGSSYLA

SEQ ID NO: 2440 - protein, 7 aa, Artificial Sequence
  Description of Artificial Sequence: Synthetic peptide
  XENP020075 vlCDR2
GAFSRAT

SEQ ID NO: 2441 - protein, 9 aa, Artificial Sequence
  Description of Artificial Sequence: Synthetic peptide
  XENP020075 vlCDR3
QQYGSSPWT

SEQ ID NO: 2442 - protein, 246 aa, Artificial Sequence
  Description of Artificial Sequence: Synthetic polypeptide
  XENP020076 [CTLA-4]_H3.2_L0.12_scFv(GKPGS)4
EVQLVESGGGLVKPGGSLRLSCAASGFTFSSYTMHWVRQAPGKGLEWVSFISYDGNTKYYADSVKGRFTISRDNAKNSLYLQMNSLRAEDTAVYYCARTGLLGPFDLWGQGTMVTVSSGKPGSGKPGSGKPGSGKPGSEIVLTQSPGTLSVSPGERATLSCRASQSVGSSYLAWYQQKPGQAPRLLIYGAFSRATGIPDRFSGSGSGTDFTLTISRLEPEDFAVYYCQQYGSSPWTFGQGTKVEIK

SEQ ID NO: 2443 - protein, 118 aa, Artificial Sequence
  Description of Artificial Sequence: Synthetic polypeptide
  VH of XENP020076
EVQLVESGGGLVKPGGSLRLSCAASGFTFSSYTMHWVRQAPGKGLEWVSFISYDGNTKYYADSVKGRFTISRDNAKNSLYLQMNSLRAEDTAVYYCARTGLLGPFDLWGQGTMVTVSS

SEQ ID NO: 2444 - protein, 108 aa, Artificial Sequence; identical to SEQ ID NO: 1517
  Description of Artificial Sequence: Synthetic polypeptide
  VL of XENP020076

SEQ ID NO: 2445 - protein, 5 aa, Artificial Sequence
  Description of Artificial Sequence: Synthetic peptide
  XENP020076 vhCDR1
SYTMH

SEQ ID NO: 2446 - protein, 17 aa, Artificial Sequence
  Description of Artificial Sequence: Synthetic peptide
  XENP020076 vhCDR2
FISYDGNTKYYADSVKG

SEQ ID NO: 2447 - protein, 9 aa, Artificial Sequence
  Description of Artificial Sequence: Synthetic peptide
  XENP020076 vhCDR3
TGLLGPFDL

SEQ ID NO: 2448 - protein, 12 aa, Artificial Sequence
  Description of Artificial Sequence: Synthetic peptide
  XENP020076 vlCDR1
RASQSVGSSYLA

SEQ ID NO: 2449 - protein, 7 aa, Artificial Sequence
  Description of Artificial Sequence: Synthetic peptide
  XENP020076 vlCDR2
GAFSRAT

SEQ ID NO: 2450 - protein, 9 aa, Artificial Sequence
  Description of Artificial Sequence: Synthetic peptide
  XENP020076 vlCDR3
QQYGSSPWT

SEQ ID NO: 2451 - protein, 246 aa, Artificial Sequence
  Description of Artificial Sequence: Synthetic polypeptide
  XENP020077 [CTLA-4]_H3.3_L0.12_scFv(GKPGS)4
EVQLVESGGGLVKPGGSLRLSCAASGFTFSSYTMHWVRQAPGKGLEWVSFISYDGNQKYYADSVKGRFTISRDNAKNSLYLQMNSLRAEDTAVYYCARTGLLGPFDLWGQGTMVTVSSGKPGSGKPGSGKPGSGKPGSEIVLTQSPGTLSVSPGERATLSCRASQSVGSSYLAWYQQKPGQAPRLLIYGAFSRATGIPDRFSGSGSGTDFTLTISRLEPEDFAVYYCQQYGSSPWTFGQGTKVEIK

SEQ ID NO: 2452 - protein, 118 aa, Artificial Sequence
  Description of Artificial Sequence: Synthetic polypeptide
  VH of XENP020077
EVQLVESGGGLVKPGGSLRLSCAASGFTFSSYTMHWVRQAPGKGLEWVSFISYDGNQKYYADSVKGRFTISRDNAKNSLYLQMNSLRAEDTAVYYCARTGLLGPFDLWGQGTMVTVSS

SEQ ID NO: 2453 - protein, 108 aa, Artificial Sequence; identical to SEQ ID NO: 1517
  Description of Artificial Sequence: Synthetic polypeptide
  VL of XENP020077

SEQ ID NO: 2454 - protein, 5 aa, Artificial Sequence
  Description of Artificial Sequence: Synthetic peptide
  XENP020077 vhCDR1
SYTMH

SEQ ID NO: 2455 - protein, 17 aa, Artificial Sequence
  Description of Artificial Sequence: Synthetic peptide
  XENP020077 vhCDR2
FISYDGNQKYYADSVKG

SEQ ID NO: 2456 - protein, 9 aa, Artificial Sequence
  Description of Artificial Sequence: Synthetic peptide
  XENP020077 vhCDR3
TGLLGPFDL

SEQ ID NO: 2457 - protein, 12 aa, Artificial Sequence
  Description of Artificial Sequence: Synthetic peptide
  XENP020077 vlCDR1
RASQSVGSSYLA

SEQ ID NO: 2458 - protein, 7 aa, Artificial Sequence
  Description of Artificial Sequence: Synthetic peptide
  XENP020077 vlCDR2
GAFSRAT

SEQ ID NO: 2459 - protein, 9 aa, Artificial Sequence
  Description of Artificial Sequence: Synthetic peptide
  XENP020077 vlCDR3
QQYGSSPWT

SEQ ID NO: 2460 - protein, 246 aa, Artificial Sequence
  Description of Artificial Sequence: Synthetic polypeptide
  XENP020078 [CTLA-4]_H3.4_L0.12_scFv(GKPGS)4
EVQLVESGGGLVKPGGSLRLSCAASGFTFSSYTMHWVRQAPGKGLEWVSFISYDGNHKYYADSVKGRFTISRDNAKNSLYLQMNSLRAEDTAVYYCARTGHLGPFDLWGQGTMVTVSSGKPGSGKPGSGKPGSGKPGSEIVLTQSPGTLSVSPGERATLSCRASQSVGSSYLAWYQQKPGQAPRLLIYGAFSRATGIPDRFSGSGSGTDFTLTISRLEPEDFAVYYCQQYGSSPWTFGQGTKVEIK

SEQ ID NO: 2461 - protein, 118 aa, Artificial Sequence
  Description of Artificial Sequence: Synthetic polypeptide
  VH of XENP020078
EVQLVESGGGLVKPGGSLRLSCAASGFTFSSYTMHWVRQAPGKGLEWVSFISYDGNHKYYADSVKGRFTISRDNAKNSLYLQMNSLRAEDTAVYYCARTGHLGPFDLWGQGTMVTVSS

SEQ ID NO: 2462 - protein, 108 aa, Artificial Sequence; identical to SEQ ID NO: 1517
  Description of Artificial Sequence: Synthetic polypeptide
  VL of XENP020078

SEQ ID NO: 2463 - protein, 5 aa, Artificial Sequence
  Description of Artificial Sequence: Synthetic peptide
  XENP020078 vhCDR1
SYTMH

SEQ ID NO: 2464 - protein, 17 aa, Artificial Sequence
  Description of Artificial Sequence: Synthetic peptide
  XENP020078 vhCDR2
FISYDGNHKYYADSVKG

SEQ ID NO: 2465 - protein, 9 aa, Artificial Sequence
  Description of Artificial Sequence: Synthetic peptide
  XENP020078 vhCDR3
TGHLGPFDL

SEQ ID NO: 2466 - protein, 12 aa, Artificial Sequence
  Description of Artificial Sequence: Synthetic peptide
  XENP020078 vlCDR1
RASQSVGSSYLA

SEQ ID NO: 2467 - protein, 7 aa, Artificial Sequence
  Description of Artificial Sequence: Synthetic peptide
  XENP020078 vlCDR2
GAFSRAT

SEQ ID NO: 2468 - protein, 9 aa, Artificial Sequence
  Description of Artificial Sequence: Synthetic peptide
  XENP020078 vlCDR3
QQYGSSPWT

SEQ ID NO: 2469 - protein, 246 aa, Artificial Sequence
  Description of Artificial Sequence: Synthetic polypeptide
  XENP020079 [CTLA-4]_H3.5_L0.12_scFv(GKPGS)4
EVQLVESGGGLVKPGGSLRLSCAASGFTFSSYTMHWVRQAPGKGLEWVSFISYDGNTKYYADSVKGRFTISRDNAKNSLYLQMNSLRAEDTAVYYCARTGHLGPFDLWGQGTMVTVSSGKPGSGKPGSGKPGSGKPGSEIVLTQSPGTLSVSPGERATLSCRASQSVGSSYLAWYQQKPGQAPRLLIYGAFSRATGIPDRFSGSGSGTDFTLTISRLEPEDFAVYYCQQYGSSPWTFGQGTKVEIK

SEQ ID NO: 2470 - protein, 118 aa, Artificial Sequence
  Description of Artificial Sequence: Synthetic polypeptide
  VH of XENP020079
EVQLVESGGGLVKPGGSLRLSCAASGFTFSSYTMHWVRQAPGKGLEWVSFISYDGNTKYYADSVKGRFTISRDNAKNSLYLQMNSLRAEDTAVYYCARTGHLGPFDLWGQGTMVTVSS

SEQ ID NO: 2471 - protein, 108 aa, Artificial Sequence; identical to SEQ ID NO: 1517
  Description of Artificial Sequence: Synthetic polypeptide
  VL of XENP020079

SEQ ID NO: 2472 - protein, 5 aa, Artificial Sequence
  Description of Artificial Sequence: Synthetic peptide
  XENP020079 vhCDR1
SYTMH

SEQ ID NO: 2473 - protein, 17 aa, Artificial Sequence
  Description of Artificial Sequence: Synthetic peptide
  XENP020079 vhCDR2
FISYDGNTKYYADSVKG

SEQ ID NO: 2474 - protein, 9 aa, Artificial Sequence
  Description of Artificial Sequence: Synthetic peptide
  XENP020079 vhCDR3
TGHLGPFDL

SEQ ID NO: 2475 - protein, 12 aa, Artificial Sequence
  Description of Artificial Sequence: Synthetic peptide
  XENP020079 vlCDR1
RASQSVGSSYLA

SEQ ID NO: 2476 - protein, 7 aa, Artificial Sequence
  Description of Artificial Sequence: Synthetic peptide
  XENP020079 vlCDR2
GAFSRAT

SEQ ID NO: 2477 - protein, 9 aa, Artificial Sequence
  Description of Artificial Sequence: Synthetic peptide
  XENP020079 vlCDR3
QQYGSSPWT

SEQ ID NO: 2478 - protein, 246 aa, Artificial Sequence
  Description of Artificial Sequence: Synthetic polypeptide
  XENP020080 [CTLA-4]_H3.6_L0.12_scFv(GKPGS)4
EVQLVESGGGLVKPGGSLRLSCAASGFTFSSYTMHWVRQAPGKGLEWVSFISYDGNQKYYADSVKGRFTISRDNAKNSLYLQMNSLRAEDTAVYYCARTGHLGPFDLWGQGTMVTVSSGKPGSGKPGSGKPGSGKPGSEIVLTQSPGTLSVSPGERATLSCRASQSVGSSYLAWYQQKPGQAPRLLIYGAFSRATGIPDRFSGSGSGTDFTLTISRLEPEDFAVYYCQQYGSSPWTFGQGTKVEIK

SEQ ID NO: 2479 - protein, 118 aa, Artificial Sequence
  Description of Artificial Sequence: Synthetic polypeptide
  VH of XENP020080
EVQLVESGGGLVKPGGSLRLSCAASGFTFSSYTMHWVRQAPGKGLEWVSFISYDGNQKYYADSVKGRFTISRDNAKNSLYLQMNSLRAEDTAVYYCARTGHLGPFDLWGQGTMVTVSS

SEQ ID NO: 2480 - protein, 108 aa, Artificial Sequence; identical to SEQ ID NO: 1517
  Description of Artificial Sequence: Synthetic polypeptide
  VL of XENP020080

SEQ ID NO: 2481 - protein, 5 aa, Artificial Sequence
  Description of Artificial Sequence: Synthetic peptide
  XENP020080 vhCDR1
SYTMH

SEQ ID NO: 2482 - protein, 17 aa, Artificial Sequence
  Description of Artificial Sequence: Synthetic peptide
  XENP020080 vhCDR2
FISYDGNQKYYADSVKG

SEQ ID NO: 2483 - protein, 9 aa, Artificial Sequence
  Description of Artificial Sequence: Synthetic peptide
  XENP020080 vhCDR3
TGHLGPFDL

SEQ ID NO: 2484 - protein, 12 aa, Artificial Sequence
  Description of Artificial Sequence: Synthetic peptide
  XENP020080 vlCDR1
RASQSVGSSYLA

SEQ ID NO: 2485 - protein, 7 aa, Artificial Sequence
  Description of Artificial Sequence: Synthetic peptide
  XENP020080 vlCDR2
GAFSRAT

SEQ ID NO: 2486 - protein, 9 aa, Artificial Sequence
  Description of Artificial Sequence: Synthetic peptide
  XENP020080 vlCDR3
QQYGSSPWT

SEQ ID NO: 2487 - protein, 246 aa, Artificial Sequence
  Description of Artificial Sequence: Synthetic polypeptide
  XENP020081 [CTLA-4]_H3.7_L0.12_scFv(GKPGS)4
EVQLVESGGGLVKPGGSLRLSCAASGFTFSSYTMHWVRQAPGKGLEWVCFISYDGNNKYYADSVKGRFTCSRDNAKNSLYLQMNSLRAEDTAVYYCARTGWLGPFDYWGQGTLVTVSSGKPGSGKPGSGKPGSGKPGSEIVLTQSPGTLSVSPGERATLSCRASQSVGSSYLAWYQQKPGQAPRLLIYGAFSRATGIPDRFSGSGSGTDFTLTISRLEPEDFAVYYCQQYGSSPWTFGQGTKVEIK

SEQ ID NO: 2488 - protein, 118 aa, Artificial Sequence
  Description of Artificial Sequence: Synthetic polypeptide
  VH of XENP020081
EVQLVESGGGLVKPGGSLRLSCAASGFTFSSYTMHWVRQAPGKGLEWVCFISYDGNNKYYADSVKGRFTCSRDNAKNSLYLQMNSLRAEDTAVYYCARTGWLGPFDYWGQGTLVTVSS

SEQ ID NO: 2489 - protein, 108 aa, Artificial Sequence; identical to SEQ ID NO: 1517
  Description of Artificial Sequence: Synthetic polypeptide
  VL of XENP020081

SEQ ID NO: 2490 - protein, 5 aa, Artificial Sequence
  Description of Artificial Sequence: Synthetic peptide
  XENP020081 vhCDR1
SYTMH

SEQ ID NO: 2491 - protein, 17 aa, Artificial Sequence
  Description of Artificial Sequence: Synthetic peptide
  XENP020081 vhCDR2
FISYDGNNKYYADSVKG

SEQ ID NO: 2492 - protein, 9 aa, Artificial Sequence
  Description of Artificial Sequence: Synthetic peptide
  XENP020081 vhCDR3
TGWLGPFDY

SEQ ID NO: 2493 - protein, 12 aa, Artificial Sequence
  Description of Artificial Sequence: Synthetic peptide
  XENP020081 vlCDR1
RASQSVGSSYLA

SEQ ID NO: 2494 - protein, 7 aa, Artificial Sequence
  Description of Artificial Sequence: Synthetic peptide
  XENP020081 vlCDR2
GAFSRAT

SEQ ID NO: 2495 - protein, 9 aa, Artificial Sequence
  Description of Artificial Sequence: Synthetic peptide
  XENP020081 vlCDR3
QQYGSSPWT

SEQ ID NO: 2496 - protein, 246 aa, Artificial Sequence
  Description of Artificial Sequence: Synthetic polypeptide
  XENP020082 [CTLA-4]_H3.8_L0.12_scFv(GKPGS)4
EVQLVESGGGLVKPGGSLRLSCAASGFTFSSYTMHWVRQAPGKCLEWVSFISYDGNNKYYADSVKGRFTISRDNAKNSLYLQMNSLRAEDTAVYYCARTGWLGPFDYWGQGTLVTVSSGKPGSGKPGSGKPGSGKPGSEIVLTQSPGTLSVSPGERATLSCRASQSVGSSYLAWYQQKPGQAPRLLIYGAFSRATGIPDRFSGSGSGTDFTLTISRLEPEDFAVYYCQQYGSSPWTFGQGTKVEIK

SEQ ID NO: 2497 - protein, 118 aa, Artificial Sequence
  Description of Artificial Sequence: Synthetic polypeptide
  VH of XENP020082
EVQLVESGGGLVKPGGSLRLSCAASGFTFSSYTMHWVRQAPGKCLEWVSFISYDGNNKYYADSVKGRFTISRDNAKNSLYLQMNSLRAEDTAVYYCARTGWLGPFDYWGQGTLVTVSS

SEQ ID NO: 2498 - protein, 108 aa, Artificial Sequence; identical to SEQ ID NO: 1517
  Description of Artificial Sequence: Synthetic polypeptide
  VL of XENP020082

SEQ ID NO: 2499 - protein, 5 aa, Artificial Sequence
  Description of Artificial Sequence: Synthetic peptide
  XENP020082 vhCDR1
SYTMH

SEQ ID NO: 2500 - protein, 17 aa, Artificial Sequence
  Description of Artificial Sequence: Synthetic peptide
  XENP020082 vhCDR2
FISYDGNNKYYADSVKG

SEQ ID NO: 2501 - protein, 9 aa, Artificial Sequence
  Description of Artificial Sequence: Synthetic peptide
  XENP020082 vhCDR3
TGWLGPFDY

SEQ ID NO: 2502 - protein, 12 aa, Artificial Sequence
  Description of Artificial Sequence: Synthetic peptide
  XENP020082 vlCDR1
RASQSVGSSYLA

SEQ ID NO: 2503 - protein, 7 aa, Artificial Sequence
  Description of Artificial Sequence: Synthetic peptide
  XENP020082 vlCDR2
GAFSRAT

SEQ ID NO: 2504 - protein, 9 aa, Artificial Sequence
  Description of Artificial Sequence: Synthetic peptide
  XENP020082 vlCDR3
QQYGSSPWT

SEQ ID NO: 2505 - protein, 246 aa, Artificial Sequence
  Description of Artificial Sequence: Synthetic polypeptide
  XENP020360 [CTLA-4]_H3.9_L0.12_scFv(GKPGS)4
EVQLVESGGGLVKPGGSLRLSCAASGFTFSSYTMHWVRQAPGKGLEWVSFISYDGNYKYYADSVKGRFTISRDNAKNSLYLQMNSLRAEDTAVYYCARTGHLGPFDLWGQGTMVTVSSGKPGSGKPGSGKPGSGKPGSEIVLTQSPGTLSVSPGERATLSCRASQSVGSSYLAWYQQKPGQAPRLLIYGAFSRATGIPDRFSGSGSGTDFTLTISRLEPEDFAVYYCQQYGSSPWTFGQGTKVEIK

SEQ ID NO: 2506 - protein, 118 aa, Artificial Sequence
  Description of Artificial Sequence: Synthetic polypeptide
  VH of XENP020360
EVQLVESGGGLVKPGGSLRLSCAASGFTFSSYTMHWVRQAPGKGLEWVSFISYDGNYKYYADSVKGRFTISRDNAKNSLYLQMNSLRAEDTAVYYCARTGHLGPFDLWGQGTMVTVSS

SEQ ID NO: 2507 - protein, 108 aa, Artificial Sequence; identical to SEQ ID NO: 1517
  Description of Artificial Sequence: Synthetic polypeptide
  VL of XENP020360

SEQ ID NO: 2508 - protein, 5 aa, Artificial Sequence
  Description of Artificial Sequence: Synthetic peptide
  XENP020360 vhCDR1
SYTMH

SEQ ID NO: 2509 - protein, 17 aa, Artificial Sequence
  Description of Artificial Sequence: Synthetic peptide
  XENP020360 vhCDR2
FISYDGNYKYYADSVKG

SEQ ID NO: 2510 - protein, 9 aa, Artificial Sequence
  Description of Artificial Sequence: Synthetic peptide
  XENP020360 vhCDR3
TGHLGPFDL

SEQ ID NO: 2511 - protein, 12 aa, Artificial Sequence
  Description of Artificial Sequence: Synthetic peptide
  XENP020360 vlCDR1
RASQSVGSSYLA

SEQ ID NO: 2512 - protein, 7 aa, Artificial Sequence
  Description of Artificial Sequence: Synthetic peptide
  XENP020360 vlCDR2
GAFSRAT

SEQ ID NO: 2513 - protein, 9 aa, Artificial Sequence
  Description of Artificial Sequence: Synthetic peptide
  XENP020360 vlCDR3
QQYGSSPWT

SEQ ID NO: 2514 - protein, 246 aa, Artificial Sequence
  Description of Artificial Sequence: Synthetic polypeptide
  XENP020361 [CTLA-4]_H3.10_L0.12_scFv(GKPGS)4
EVQLVESGGGLVKPGGSLRLSCAASGFTFSSYTMHWVRQAPGKGLEWVSFISYDGNYKYYADSVKGRFTISRDNAKNSLYLQMNSLRAEDTAVYYCARTGLLGPFDLWGQGTMVTVSSGKPGSGKPGSGKPGSGKPGSEIVLTQSPGTLSVSPGERATLSCRASQSVGSSYLAWYQQKPGQAPRLLIYGAFSRATGIPDRFSGSGSGTDFTLTISRLEPEDFAVYYCQQYGSSPWTFGQGTKVEIK

SEQ ID NO: 2515 - protein, 118 aa, Artificial Sequence
  Description of Artificial Sequence: Synthetic polypeptide
  VH of XENP020361
EVQLVESGGGLVKPGGSLRLSCAASGFTFSSYTMHWVRQAPGKGLEWVSFISYDGNYKYYADSVKGRFTISRDNAKNSLYLQMNSLRAEDTAVYYCARTGLLGPFDLWGQGTMVTVSS

SEQ ID NO: 2516 - protein, 108 aa, Artificial Sequence; identical to SEQ ID NO: 1517
  Description of Artificial Sequence: Synthetic polypeptide
  VL of XENP020361

SEQ ID NO: 2517 - protein, 5 aa, Artificial Sequence
  Description of Artificial Sequence: Synthetic peptide
  XENP020361 vhCDR1
SYTMH

SEQ ID NO: 2518 - protein, 17 aa, Artificial Sequence
  Description of Artificial Sequence: Synthetic peptide
  XENP020361 vhCDR2
FISYDGNYKYYADSVKG

SEQ ID NO: 2519 - protein, 9 aa, Artificial Sequence
  Description of Artificial Sequence: Synthetic peptide
  XENP020361 vhCDR3
TGLLGPFDL

SEQ ID NO: 2520 - protein, 12 aa, Artificial Sequence
  Description of Artificial Sequence: Synthetic peptide
  XENP020361 vlCDR1
RASQSVGSSYLA

SEQ ID NO: 2521 - protein, 7 aa, Artificial Sequence
  Description of Artificial Sequence: Synthetic peptide
  XENP020361 vlCDR2
GAFSRAT

SEQ ID NO: 2522 - protein, 9 aa, Artificial Sequence
  Description of Artificial Sequence: Synthetic peptide
  XENP020361 vlCDR3
QQYGSSPWT

SEQ ID NO: 2523 - protein, 246 aa, Artificial Sequence
  Description of Artificial Sequence: Synthetic polypeptide
  XENP020362 [CTLA-4]_H3.11_L0.12_scFv(GKPGS)4
EVQLVESGGGLVKPGGSLRLSCAASGFTFSSYTMHWVRQAPGKGLEWVSFISYDGNHKYYADSVKGRFTISRDNAKNSLYLQMNSLRAEDTAVYYCARGGHLGPFDLWGQGTMVTVSSGKPGSGKPGSGKPGSGKPGSEIVLTQSPGTLSVSPGERATLSCRASQSVGSSYLAWYQQKPGQAPRLLIYGAFSRATGIPDRFSGSGSGTDFTLTISRLEPEDFAVYYCQQYGSSPWTFGQGTKVEIK

SEQ ID NO: 2524 - protein, 118 aa, Artificial Sequence
  Description of Artificial Sequence: Synthetic polypeptide
  VH of XENP020362
EVQLVESGGGLVKPGGSLRLSCAASGFTFSSYTMHWVRQAPGKGLEWVSFISYDGNHKYYADSVKGRFTISRDNAKNSLYLQMNSLRAEDTAVYYCARGGHLGPFDLWGQGTMVTVSS

SEQ ID NO: 2525 - protein, 108 aa, Artificial Sequence; identical to SEQ ID NO: 1517
  Description of Artificial Sequence: Synthetic polypeptide
  VL of XENP020362

SEQ ID NO: 2526 - protein, 5 aa, Artificial Sequence
  Description of Artificial Sequence: Synthetic peptide
  XENP020362 vhCDR1
SYTMH

SEQ ID NO: 2527 - protein, 17 aa, Artificial Sequence
  Description of Artificial Sequence: Synthetic peptide
  XENP020362 vhCDR2
FISYDGNHKYYADSVKG

SEQ ID NO: 2528 - protein, 9 aa, Artificial Sequence
  Description of Artificial Sequence: Synthetic peptide
  XENP020362 vhCDR3
GGHLGPFDL

SEQ ID NO: 2529 - protein, 12 aa, Artificial Sequence
  Description of Artificial Sequence: Synthetic peptide
  XENP020362 vlCDR1
RASQSVGSSYLA

SEQ ID NO: 2530 - protein, 7 aa, Artificial Sequence
  Description of Artificial Sequence: Synthetic peptide
  XENP020362 vlCDR2
GAFSRAT

SEQ ID NO: 2531 - protein, 9 aa, Artificial Sequence
  Description of Artificial Sequence: Synthetic peptide
  XENP020362 vlCDR3
QQYGSSPWT

SEQ ID NO: 2532 - protein, 246 aa, Artificial Sequence
  Description of Artificial Sequence: Synthetic polypeptide
  XENP020363 [CTLA-4]_H3.12_L0.12_scFv(GKPGS)4
EVQLVESGGGLVKPGGSLRLSCAASGFTFSSYTMHWVRQAPGKGLEWVSFISYDGNHKYYADSVKGRFTISRDNAKNSLYLQMNSLRAEDTAVYYCARTSHLGPFDLWGQGTMVTVSSGKPGSGKPGSGKPGSGKPGSEIVLTQSPGTLSVSPGERATLSCRASQSVGSSYLAWYQQKPGQAPRLLIYGAFSRATGIPDRFSGSGSGTDFTLTISRLEPEDFAVYYCQQYGSSPWTFGQGTKVEIK

SEQ ID NO: 2533 - protein, 118 aa, Artificial Sequence
  Description of Artificial Sequence: Synthetic polypeptide
  VH of XENP020363
EVQLVESGGGLVKPGGSLRLSCAASGFTFSSYTMHWVRQAPGKGLEWVSFISYDGNHKYYADSVKGRFTISRDNAKNSLYLQMNSLRAEDTAVYYCARTSHLGPFDLWGQGTMVTVSS

SEQ ID NO: 2534 - protein, 108 aa, Artificial Sequence; identical to SEQ ID NO: 1517
  Description of Artificial Sequence: Synthetic polypeptide
  VL of XENP020363

SEQ ID NO: 2535 - protein, 5 aa, Artificial Sequence
  Description of Artificial Sequence: Synthetic peptide
  XENP020363 vhCDR1
SYTMH

SEQ ID NO: 2536 - protein, 17 aa, Artificial Sequence
  Description of Artificial Sequence: Synthetic peptide
  XENP020363 vhCDR2
FISYDGNHKYYADSVKG

SEQ ID NO: 2537 - protein, 9 aa, Artificial Sequence
  Description of Artificial Sequence: Synthetic peptide
  XENP020363 vhCDR3
TSHLGPFDL

SEQ ID NO: 2538 - protein, 12 aa, Artificial Sequence
  Description of Artificial Sequence: Synthetic peptide
  XENP020363 vlCDR1
RASQSVGSSYLA

SEQ ID NO: 2539 - protein, 7 aa, Artificial Sequence
  Description of Artificial Sequence: Synthetic peptide
  XENP020363 vlCDR2
GAFSRAT

SEQ ID NO: 2540 - protein, 9 aa, Artificial Sequence
  Description of Artificial Sequence: Synthetic peptide
  XENP020363 vlCDR3
QQYGSSPWT

SEQ ID NO: 2541 - protein, 246 aa, Artificial Sequence
  Description of Artificial Sequence: Synthetic polypeptide
  XENP020364 [CTLA-4]_H3.13_L0.12_scFv(GKPGS)4
EVQLVESGGGLVKPGGSLRLSCAASGFTFSSYTMHWVRQAPGKGLEWVSFISYDGNHKYYADSVKGRFTISRDNAKNSLYLQMNSLRAEDTAVYYCARGGLLGPFDLWGQGTMVTVSSGKPGSGKPGSGKPGSGKPGSEIVLTQSPGTLSVSPGERATLSCRASQSVGSSYLAWYQQKPGQAPRLLIYGAFSRATGIPDRFSGSGSGTDFTLTISRLEPEDFAVYYCQQYGSSPWTFGQGTKVEIK

SEQ ID NO: 2542 - protein, 118 aa, Artificial Sequence
  Description of Artificial Sequence: Synthetic polypeptide
  VH of XENP020364
EVQLVESGGGLVKPGGSLRLSCAASGFTFSSYTMHWVRQAPGKGLEWVSFISYDGNHKYYADSVKGRFTISRDNAKNSLYLQMNSLRAEDTAVYYCARGGLLGPFDLWGQGTMVTVSS

SEQ ID NO: 2543 - protein, 108 aa, Artificial Sequence; identical to SEQ ID NO: 1517
  Description of Artificial Sequence: Synthetic polypeptide
  VL of XENP020364

SEQ ID NO: 2544 - protein, 5 aa, Artificial Sequence
  Description of Artificial Sequence: Synthetic peptide
  XENP020364 vhCDR1
SYTMH

SEQ ID NO: 2545 - protein, 17 aa, Artificial Sequence
  Description of Artificial Sequence: Synthetic peptide
  XENP020364 vhCDR2
FISYDGNHKYYADSVKG

SEQ ID NO: 2546 - protein, 9 aa, Artificial Sequence
  Description of Artificial Sequence: Synthetic peptide
  XENP020364 vhCDR3
GGLLGPFDL

SEQ ID NO: 2547 - protein, 12 aa, Artificial Sequence
  Description of Artificial Sequence: Synthetic peptide
  XENP020364 vlCDR1
RASQSVGSSYLA

SEQ ID NO: 2548 - protein, 7 aa, Artificial Sequence
  Description of Artificial Sequence: Synthetic peptide
  XENP020364 vlCDR2
GAFSRAT

SEQ ID NO: 2549 - protein, 9 aa, Artificial Sequence
  Description of Artificial Sequence: Synthetic peptide
  XENP020364 vlCDR3
QQYGSSPWT

SEQ ID NO: 2550 - protein, 246 aa, Artificial Sequence
  Description of Artificial Sequence: Synthetic polypeptide
  XENP020365 [CTLA-4]_H3.14_L0.12_scFv(GKPGS)4
EVQLVESGGGLVKPGGSLRLSCAASGFTFSSYTMHWVRQAPGKGLEWVSFISYDGNHKYYADSVKGRFTISRDNAKNSLYLQMNSLRAEDTAVYYCARTSLLGPFDLWGQGTMVTVSSGKPGSGKPGSGKPGSGKPGSEIVLTQSPGTLSVSPGERATLSCRASQSVGSSYLAWYQQKPGQAPRLLIYGAFSRATGIPDRFSGSGSGTDFTLTISRLEPEDFAVYYCQQYGSSPWTFGQGTKVEIK

SEQ ID NO: 2551 - protein, 118 aa, Artificial Sequence
  Description of Artificial Sequence: Synthetic polypeptide
  VH of XENP020365
EVQLVESGGGLVKPGGSLRLSCAASGFTFSSYTMHWVRQAPGKGLEWVSFISYDGNHKYYADSVKGRFTISRDNAKNSLYLQMNSLRAEDTAVYYCARTSLLGPFDLWGQGTMVTVSS

SEQ ID NO: 2552 - protein, 108 aa, Artificial Sequence; identical to SEQ ID NO: 1517
  Description of Artificial Sequence: Synthetic polypeptide
  VL of XENP020365

SEQ ID NO: 2553 - protein, 5 aa, Artificial Sequence
  Description of Artificial Sequence: Synthetic peptide
  XENP020365 vhCDR1
SYTMH

SEQ ID NO: 2554 - protein, 17 aa, Artificial Sequence
  Description of Artificial Sequence: Synthetic peptide
  XENP020365 vhCDR2
FISYDGNHKYYADSVKG

SEQ ID NO: 2555 - protein, 9 aa, Artificial Sequence
  Description of Artificial Sequence: Synthetic peptide
  XENP020365 vhCDR3
TSLLGPFDL

SEQ ID NO: 2556 - protein, 12 aa, Artificial Sequence
  Description of Artificial Sequence: Synthetic peptide
  XENP020365 vlCDR1
RASQSVGSSYLA

SEQ ID NO: 2557 - protein, 7 aa, Artificial Sequence
  Description of Artificial Sequence: Synthetic peptide
  XENP020365 vlCDR2
GAFSRAT

SEQ ID NO: 2558 - protein, 9 aa, Artificial Sequence
  Description of Artificial Sequence: Synthetic peptide
  XENP020365 vlCDR3
QQYGSSPWT

SEQ ID NO: 2559 - protein, 246 aa, Artificial Sequence
  Description of Artificial Sequence: Synthetic polypeptide
  XENP020366 [CTLA-4]_H3.15_L0.12_scFv(GKPGS)4
EVQLVESGGGLVKPGGSLRLSCAASGFTFSSYTMHWVRQAPGKGLEWVSFISYDGNQKYYADSVKGRFTISRDNAKNSLYLQMNSLRAEDTAVYYCARGGHLGPFDLWGQGTMVTVSSGKPGSGKPGSGKPGSGKPGSEIVLTQSPGTLSVSPGERATLSCRASQSVGSSYLAWYQQKPGQAPRLLIYGAFSRATGIPDRFSGSGSGTDFTLTISRLEPEDFAVYYCQQYGSSPWTFGQGTKVEIK

SEQ ID NO: 2560 - protein, 118 aa, Artificial Sequence
  Description of Artificial Sequence: Synthetic polypeptide
  VH of XENP020366
EVQLVESGGGLVKPGGSLRLSCAASGFTFSSYTMHWVRQAPGKGLEWVSFISYDGNQKYYADSVKGRFTISRDNAKNSLYLQMNSLRAEDTAVYYCARGGHLGPFDLWGQGTMVTVSS

SEQ ID NO: 2561 - protein, 108 aa, Artificial Sequence; identical to SEQ ID NO: 1517
  Description of Artificial Sequence: Synthetic polypeptide
  VL of XENP020366

SEQ ID NO: 2562 - protein, 5 aa, Artificial Sequence
  Description of Artificial Sequence: Synthetic peptide
  XENP020366 vhCDR1
SYTMH

SEQ ID NO: 2563 - protein, 17 aa, Artificial Sequence
  Description of Artificial Sequence: Synthetic peptide
  XENP020366 vhCDR2
FISYDGNQKYYADSVKG

SEQ ID NO: 2564 - protein, 9 aa, Artificial Sequence
  Description of Artificial Sequence: Synthetic peptide
  XENP020366 vhCDR3
GGHLGPFDL

SEQ ID NO: 2565 - protein, 12 aa, Artificial Sequence
  Description of Artificial Sequence: Synthetic peptide
  XENP020366 vlCDR1
RASQSVGSSYLA

SEQ ID NO: 2566 - protein, 7 aa, Artificial Sequence
  Description of Artificial Sequence: Synthetic peptide
  XENP020366 vlCDR2
GAFSRAT

SEQ ID NO: 2567 - protein, 9 aa, Artificial Sequence
  Description of Artificial Sequence: Synthetic peptide
  XENP020366 vlCDR3
QQYGSSPWT

SEQ ID NO: 2568 - protein, 246 aa, Artificial Sequence
  Description of Artificial Sequence: Synthetic polypeptide
  XENP020367 [CTLA-4]_H3.16_L0.12_scFv(GKPGS)4
EVQLVESGGGLVKPGGSLRLSCAASGFTFSSYTMHWVRQAPGKGLEWVSFISYDGNQKYYADSVKGRFTISRDNAKNSLYLQMNSLRAEDTAVYYCARTSHLGPFDLWGQGTMVTVSSGKPGSGKPGSGKPGSGKPGSEIVLTQSPGTLSVSPGERATLSCRASQSVGSSYLAWYQQKPGQAPRLLIYGAFSRATGIPDRFSGSGSGTDFTLTISRLEPEDFAVYYCQQYGSSPWTFGQGTKVEIK

SEQ ID NO: 2569 - protein, 118 aa, Artificial Sequence
  Description of Artificial Sequence: Synthetic polypeptide
  VH of XENP020367
EVQLVESGGGLVKPGGSLRLSCAASGFTFSSYTMHWVRQAPGKGLEWVSFISYDGNQKYYADSVKGRFTISRDNAKNSLYLQMNSLRAEDTAVYYCARTSHLGPFDLWGQGTMVTVSS

SEQ ID NO: 2570 - protein, 108 aa, Artificial Sequence; identical to SEQ ID NO: 1517
  Description of Artificial Sequence: Synthetic polypeptide
  VL of XENP020367

SEQ ID NO: 2571 - protein, 5 aa, Artificial Sequence
  Description of Artificial Sequence: Synthetic peptide
  XENP020367 vhCDR1
SYTMH

SEQ ID NO: 2572 - protein, 17 aa, Artificial Sequence
  Description of Artificial Sequence: Synthetic peptide
  XENP020367 vhCDR2
FISYDGNQKYYADSVKG

SEQ ID NO: 2573 - protein, 9 aa, Artificial Sequence
  Description of Artificial Sequence: Synthetic peptide
  XENP020367 vhCDR3
TSHLGPFDL

SEQ ID NO: 2574 - protein, 12 aa, Artificial Sequence
  Description of Artificial Sequence: Synthetic peptide
  XENP020367 vlCDR1
RASQSVGSSYLA

SEQ ID NO: 2575 - protein, 7 aa, Artificial Sequence
  Description of Artificial Sequence: Synthetic peptide
  XENP020367 vlCDR2
GAFSRAT

SEQ ID NO: 2576 - protein, 9 aa, Artificial Sequence
  Description of Artificial Sequence: Synthetic peptide
  XENP020367 vlCDR3
QQYGSSPWT

SEQ ID NO: 2577 - protein, 246 aa, Artificial Sequence
  Description of Artificial Sequence: Synthetic polypeptide
  XENP020368 [CTLA-4]_H3.17_L0.12_scFv(GKPGS)4
EVQLVESGGGLVKPGGSLRLSCAASGFTFSSYTMHWVRQAPGKGLEWVSFISYDGNQKYYADSVKGRFTISRDNAKNSLYLQMNSLRAEDTAVYYCARGGLLGPFDLWGQGTMVTVSSGKPGSGKPGSGKPGSGKPGSEIVLTQSPGTLSVSPGERATLSCRASQSVGSSYLAWYQQKPGQAPRLLIYGAFSRATGIPDRFSGSGSGTDFTLTISRLEPEDFAVYYCQQYGSSPWTFGQGTKVEIK

SEQ ID NO: 2578 - protein, 118 aa, Artificial Sequence
  Description of Artificial Sequence: Synthetic polypeptide
  VH of XENP020368
EVQLVESGGGLVKPGGSLRLSCAASGFTFSSYTMHWVRQAPGKGLEWVSFISYDGNQKYYADSVKGRFTISRDNAKNSLYLQMNSLRAEDTAVYYCARGGLLGPFDLWGQGTMVTVSS

SEQ ID NO: 2579 - protein, 108 aa, Artificial Sequence; identical to SEQ ID NO: 1517
  Description of Artificial Sequence: Synthetic polypeptide
  VL of XENP020368

SEQ ID NO: 2580 - protein, 5 aa, Artificial Sequence
  Description of Artificial Sequence: Synthetic peptide
  XENP020368 vhCDR1
SYTMH

SEQ ID NO: 2581 - protein, 17 aa, Artificial Sequence
  Description of Artificial Sequence: Synthetic peptide
  XENP020368 vhCDR2
FISYDGNQKYYADSVKG

SEQ ID NO: 2582 - protein, 9 aa, Artificial Sequence
  Description of Artificial Sequence: Synthetic peptide
  XENP020368 vhCDR3
GGLLGPFDL

SEQ ID NO: 2583 - protein, 12 aa, Artificial Sequence
  Description of Artificial Sequence: Synthetic peptide
  XENP020368 vlCDR1
RASQSVGSSYLA

SEQ ID NO: 2584 - protein, 7 aa, Artificial Sequence
  Description of Artificial Sequence: Synthetic peptide
  XENP020368 vlCDR2
GAFSRAT

SEQ ID NO: 2585 - protein, 9 aa, Artificial Sequence
  Description of Artificial Sequence: Synthetic peptide
  XENP020368 vlCDR3
QQYGSSPWT

SEQ ID NO: 2586 - protein, 246 aa, Artificial Sequence
  Description of Artificial Sequence: Synthetic polypeptide
  XENP020369 [CTLA-4]_H3.18_L0.12_scFv(GKPGS)4
EVQLVESGGGLVKPGGSLRLSCAASGFTFSSYTMHWVRQAPGKGLEWVSFISYDGNQKYYADSVKGRFTISRDNAKNSLYLQMNSLRAEDTAVYYCARTSLLGPFDLWGQGTMVTVSSGKPGSGKPGSGKPGSGKPGSEIVLTQSPGTLSVSPGERATLSCRASQSVGSSYLAWYQQKPGQAPRLLIYGAFSRATGIPDRFSGSGSGTDFTLTISRLEPEDFAVYYCQQYGSSPWTFGQGTKVEIK

SEQ ID NO: 2587 - protein, 118 aa, Artificial Sequence
  Description of Artificial Sequence: Synthetic polypeptide
  VH of XENP020369
EVQLVESGGGLVKPGGSLRLSCAASGFTFSSYTMHWVRQAPGKGLEWVSFISYDGNQKYYADSVKGRFTISRDNAKNSLYLQMNSLRAEDTAVYYCARTSLLGPFDLWGQGTMVTVSS

SEQ ID NO: 2588 - protein, 108 aa, Artificial Sequence; identical to SEQ ID NO: 1517
  Description of Artificial Sequence: Synthetic polypeptide
  VL of XENP020369

SEQ ID NO: 2589 - protein, 5 aa, Artificial Sequence
  Description of Artificial Sequence: Synthetic peptide
  XENP020369 vhCDR1
SYTMH

SEQ ID NO: 2590 - protein, 17 aa, Artificial Sequence
  Description of Artificial Sequence: Synthetic peptide
  XENP020369 vhCDR2
FISYDGNQKYYADSVKG

SEQ ID NO: 2591 - protein, 9 aa, Artificial Sequence
  Description of Artificial Sequence: Synthetic peptide
  XENP020369 vhCDR3
TSLLGPFDL

SEQ ID NO: 2592 - protein, 12 aa, Artificial Sequence
  Description of Artificial Sequence: Synthetic peptide
  XENP020369 vlCDR1
RASQSVGSSYLA

SEQ ID NO: 2593 - protein, 7 aa, Artificial Sequence
  Description of Artificial Sequence: Synthetic peptide
  XENP020369 vlCDR2
GAFSRAT

SEQ ID NO: 2594 - protein, 9 aa, Artificial Sequence
  Description of Artificial Sequence: Synthetic peptide
  XENP020369 vlCDR3
QQYGSSPWT

SEQ ID NO: 2595 - protein, 246 aa, Artificial Sequence
  Description of Artificial Sequence: Synthetic polypeptide
  XENP020370 [CTLA-4]_H3.19_L0.12_scFv(GKPGS)4
EVQLVESGGGLVKPGGSLRLSCAASGFTFSSYTMHWVRQAPGKGLEWVSFISYDGNTKYYADSVKGRFTISRDNAKNSLYLQMNSLRAEDTAVYYCARGGHLGPFDLWGQGTMVTVSSGKPGSGKPGSGKPGSGKPGSEIVLTQSPGTLSVSPGERATLSCRASQSVGSSYLAWYQQKPGQAPRLLIYGAFSRATGIPDRFSGSGSGTDFTLTISRLEPEDFAVYYCQQYGSSPWTFGQGTKVEIK

SEQ ID NO: 2596 - protein, 118 aa, Artificial Sequence
  Description of Artificial Sequence: Synthetic polypeptide
  VH of XENP020370
EVQLVESGGGLVKPGGSLRLSCAASGFTFSSYTMHWVRQAPGKGLEWVSFISYDGNTKYYADSVKGRFTISRDNAKNSLYLQMNSLRAEDTAVYYCARGGHLGPFDLWGQGTMVTVSS

SEQ ID NO: 2597 - protein, 108 aa, Artificial Sequence; identical to SEQ ID NO: 1517
  Description of Artificial Sequence: Synthetic polypeptide
  VL of XENP020370

SEQ ID NO: 2598 - protein, 5 aa, Artificial Sequence
  Description of Artificial Sequence: Synthetic peptide
  XENP020370 vhCDR1
SYTMH

SEQ ID NO: 2599 - protein, 17 aa, Artificial Sequence
  Description of Artificial Sequence: Synthetic peptide
  XENP020370 vhCDR2
FISYDGNTKYYADSVKG

SEQ ID NO: 2600 - protein, 9 aa, Artificial Sequence
  Description of Artificial Sequence: Synthetic peptide
  XENP020370 vhCDR3
GGHLGPFDL

SEQ ID NO: 2601 - protein, 12 aa, Artificial Sequence
  Description of Artificial Sequence: Synthetic peptide
  XENP020370 vlCDR1
RASQSVGSSYLA

SEQ ID NO: 2602 - protein, 7 aa, Artificial Sequence
  Description of Artificial Sequence: Synthetic peptide
  XENP020370 vlCDR2
GAFSRAT

SEQ ID NO: 2603 - protein, 9 aa, Artificial Sequence
  Description of Artificial Sequence: Synthetic peptide
  XENP020370 vlCDR3
QQYGSSPWT

SEQ ID NO: 2604 - protein, 246 aa, Artificial Sequence
  Description of Artificial Sequence: Synthetic polypeptide
  XENP020371 [CTLA-4]_H3.20_L0.12_scFv(GKPGS)4
EVQLVESGGGLVKPGGSLRLSCAASGFTFSSYTMHWVRQAPGKGLEWVSFISYDGNTKYYADSVKGRFTISRDNAKNSLYLQMNSLRAEDTAVYYCARTSHLGPFDLWGQGTMVTVSSGKPGSGKPGSGKPGSGKPGSEIVLTQSPGTLSVSPGERATLSCRASQSVGSSYLAWYQQKPGQAPRLLIYGAFSRATGIPDRFSGSGSGTDFTLTISRLEPEDFAVYYCQQYGSSPWTFGQGTKVEIK

SEQ ID NO: 2605 - protein, 118 aa, Artificial Sequence
  Description of Artificial Sequence: Synthetic polypeptide
  VH of XENP020371
EVQLVESGGGLVKPGGSLRLSCAASGFTFSSYTMHWVRQAPGKGLEWVSFISYDGNTKYYADSVKGRFTISRDNAKNSLYLQMNSLRAEDTAVYYCARTSHLGPFDLWGQGTMVTVSS

SEQ ID NO: 2606 - protein, 108 aa, Artificial Sequence; identical to SEQ ID NO: 1517
  Description of Artificial Sequence: Synthetic polypeptide
  VL of XENP020371

SEQ ID NO: 2607 - protein, 5 aa, Artificial Sequence
  Description of Artificial Sequence: Synthetic peptide
  XENP020371 vhCDR1
SYTMH

SEQ ID NO: 2608 - protein, 17 aa, Artificial Sequence
  Description of Artificial Sequence: Synthetic peptide
  XENP020371 vhCDR2
FISYDGNTKYYADSVKG

SEQ ID NO: 2609 - protein, 9 aa, Artificial Sequence
  Description of Artificial Sequence: Synthetic peptide
  XENP020371 vhCDR3
TSHLGPFDL

SEQ ID NO: 2610 - protein, 12 aa, Artificial Sequence
  Description of Artificial Sequence: Synthetic peptide
  XENP020371 vlCDR1
RASQSVGSSYLA

SEQ ID NO: 2611 - protein, 7 aa, Artificial Sequence
  Description of Artificial Sequence: Synthetic peptide
  XENP020371 vlCDR2
GAFSRAT

SEQ ID NO: 2612 - protein, 9 aa, Artificial Sequence
  Description of Artificial Sequence: Synthetic peptide
  XENP020371 vlCDR3
QQYGSSPWT

SEQ ID NO: 2613 - protein, 246 aa, Artificial Sequence
  Description of Artificial Sequence: Synthetic polypeptide
  XENP020372 [CTLA-4]_H3.21_L0.12_scFv(GKPGS)4
EVQLVESGGGLVKPGGSLRLSCAASGFTFSSYTMHWVRQAPGKGLEWVSFISYDGNTKYYADSVKGRFTISRDNAKNSLYLQMNSLRAEDTAVYYCARGGLLGPFDLWGQGTMVTVSSGKPGSGKPGSGKPGSGKPGSEIVLTQSPGTLSVSPGERATLSCRASQSVGSSYLAWYQQKPGQAPRLLIYGAFSRATGIPDRFSGSGSGTDFTLTISRLEPEDFAVYYCQQYGSSPWTFGQGTKVEIK

SEQ ID NO: 2614 - protein, 118 aa, Artificial Sequence
  Description of Artificial Sequence: Synthetic polypeptide
  VH of XENP020372
EVQLVESGGGLVKPGGSLRLSCAASGFTFSSYTMHWVRQAPGKGLEWVSFISYDGNTKYYADSVKGRFTISRDNAKNSLYLQMNSLRAEDTAVYYCARGGLLGPFDLWGQGTMVTVSS

SEQ ID NO: 2615 - protein, 108 aa, Artificial Sequence; identical to SEQ ID NO: 1517
  Description of Artificial Sequence: Synthetic polypeptide
  VL of XENP020372

SEQ ID NO: 2616 - protein, 5 aa, Artificial Sequence
  Description of Artificial Sequence: Synthetic peptide
  XENP020372 vhCDR1
SYTMH

SEQ ID NO: 2617 - protein, 17 aa, Artificial Sequence
  Description of Artificial Sequence: Synthetic peptide
  XENP020372 vhCDR2
FISYDGNTKYYADSVKG

SEQ ID NO: 2618 - protein, 9 aa, Artificial Sequence
  Description of Artificial Sequence: Synthetic peptide
  XENP020372 vhCDR3
GGLLGPFDL

SEQ ID NO: 2619 - protein, 12 aa, Artificial Sequence
  Description of Artificial Sequence: Synthetic peptide
  XENP020372 vlCDR1
RASQSVGSSYLA

SEQ ID NO: 2620 - protein, 7 aa, Artificial Sequence
  Description of Artificial Sequence: Synthetic peptide
  XENP020372 vlCDR2
GAFSRAT

SEQ ID NO: 2621 - protein, 9 aa, Artificial Sequence
  Description of Artificial Sequence: Synthetic peptide
  XENP020372 vlCDR3
QQYGSSPWT

SEQ ID NO: 2622 - protein, 246 aa, Artificial Sequence
  Description of Artificial Sequence: Synthetic polypeptide
  XENP020373 [CTLA-4]_H3.22_L0.12_scFv(GKPGS)4
EVQLVESGGGLVKPGGSLRLSCAASGFTFSSYTMHWVRQAPGKGLEWVSFISYDGNTKYYADSVKGRFTISRDNAKNSLYLQMNSLRAEDTAVYYCARTSLLGPFDLWGQGTMVTVSSGKPGSGKPGSGKPGSGKPGSEIVLTQSPGTLSVSPGERATLSCRASQSVGSSYLAWYQQKPGQAPRLLIYGAFSRATGIPDRFSGSGSGTDFTLTISRLEPEDFAVYYCQQYGSSPWTFGQGTKVEIK

SEQ ID NO: 2623 - protein, 118 aa, Artificial Sequence
  Description of Artificial Sequence: Synthetic polypeptide
  VH of XENP020373
EVQLVESGGGLVKPGGSLRLSCAASGFTFSSYTMHWVRQAPGKGLEWVSFISYDGNTKYYADSVKGRFTISRDNAKNSLYLQMNSLRAEDTAVYYCARTSLLGPFDLWGQGTMVTVSS

SEQ ID NO: 2624 - protein, 108 aa, Artificial Sequence; identical to SEQ ID NO: 1517
  Description of Artificial Sequence: Synthetic polypeptide
  VL of XENP020373

SEQ ID NO: 2625 - protein, 5 aa, Artificial Sequence
  Description of Artificial Sequence: Synthetic peptide
  XENP020373 vhCDR1
SYTMH

SEQ ID NO: 2626 - protein, 17 aa, Artificial Sequence
  Description of Artificial Sequence: Synthetic peptide
  XENP020373 vhCDR2
FISYDGNTKYYADSVKG

SEQ ID NO: 2627 - protein, 9 aa, Artificial Sequence
  Description of Artificial Sequence: Synthetic peptide
  XENP020373 vhCDR3
TSLLGPFDL

SEQ ID NO: 2628 - protein, 12 aa, Artificial Sequence
  Description of Artificial Sequence: Synthetic peptide
  XENP020373 vlCDR1
RASQSVGSSYLA

SEQ ID NO: 2629 - protein, 7 aa, Artificial Sequence
  Description of Artificial Sequence: Synthetic peptide
  XENP020373 vlCDR2
GAFSRAT

SEQ ID NO: 2630 - protein, 9 aa, Artificial Sequence
  Description of Artificial Sequence: Synthetic peptide
  XENP020373 vlCDR3
QQYGSSPWT

SEQ ID NO: 2631 - protein, 246 aa, Artificial Sequence
  Description of Artificial Sequence: Synthetic polypeptide
  XENP020374 [CTLA-4]_H3.23_L0.12_scFv(GKPGS)4
EVQLVESGGGLVKPGGSLRLSCAASGFTFSSYTMHWVRQAPGKGLEWVSFISYDGNYKYYADSVKGRFTISRDNAKNSLYLQMNSLRAEDTAVYYCARGGHLGPFDLWGQGTMVTVSSGKPGSGKPGSGKPGSGKPGSEIVLTQSPGTLSVSPGERATLSCRASQSVGSSYLAWYQQKPGQAPRLLIYGAFSRATGIPDRFSGSGSGTDFTLTISRLEPEDFAVYYCQQYGSSPWTFGQGTKVEIK

SEQ ID NO: 2632 - protein, 118 aa, Artificial Sequence
  Description of Artificial Sequence: Synthetic polypeptide
  VH of XENP020374
EVQLVESGGGLVKPGGSLRLSCAASGFTFSSYTMHWVRQAPGKGLEWVSFISYDGNYKYYADSVKGRFTISRDNAKNSLYLQMNSLRAEDTAVYYCARGGHLGPFDLWGQGTMVTVSS

SEQ ID NO: 2633 - protein, 108 aa, Artificial Sequence; identical to SEQ ID NO: 1517
  Description of Artificial Sequence: Synthetic polypeptide
  VL of XENP020374

SEQ ID NO: 2634 - protein, 5 aa, Artificial Sequence
  Description of Artificial Sequence: Synthetic peptide
  XENP020374 vhCDR1
SYTMH

SEQ ID NO: 2635 - protein, 17 aa, Artificial Sequence
  Description of Artificial Sequence: Synthetic peptide
  XENP020374 vhCDR2
FISYDGNYKYYADSVKG

SEQ ID NO: 2636 - protein, 9 aa, Artificial Sequence
  Description of Artificial Sequence: Synthetic peptide
  XENP020374 vhCDR3
GGHLGPFDL

SEQ ID NO: 2637 - protein, 12 aa, Artificial Sequence
  Description of Artificial Sequence: Synthetic peptide
  XENP020374 vlCDR1
RASQSVGSSYLA

SEQ ID NO: 2638 - protein, 7 aa, Artificial Sequence
  Description of Artificial Sequence: Synthetic peptide
  XENP020374 vlCDR2
GAFSRAT

SEQ ID NO: 2639 - protein, 9 aa, Artificial Sequence
  Description of Artificial Sequence: Synthetic peptide
  XENP020374 vlCDR3
QQYGSSPWT

SEQ ID NO: 2640 - protein, 246 aa, Artificial Sequence
  Description of Artificial Sequence: Synthetic polypeptide
  XENP020375 [CTLA-4]_H3.24_L0.12_scFv(GKPGS)4
EVQLVESGGGLVKPGGSLRLSCAASGFTFSSYTMHWVRQAPGKGLEWVSFISYDGNYKYYADSVKGRFTISRDNAKNSLYLQMNSLRAEDTAVYYCARTSHLGPFDLWGQGTMVTVSSGKPGSGKPGSGKPGSGKPGSEIVLTQSPGTLSVSPGERATLSCRASQSVGSSYLAWYQQKPGQAPRLLIYGAFSRATGIPDRFSGSGSGTDFTLTISRLEPEDFAVYYCQQYGSSPWTFGQGTKVEIK

SEQ ID NO: 2641 - protein, 118 aa, Artificial Sequence
  Description of Artificial Sequence: Synthetic polypeptide
  VH of XENP020375
EVQLVESGGGLVKPGGSLRLSCAASGFTFSSYTMHWVRQAPGKGLEWVSFISYDGNYKYYADSVKGRFTISRDNAKNSLYLQMNSLRAEDTAVYYCARTSHLGPFDLWGQGTMVTVSS

SEQ ID NO: 2642 - protein, 108 aa, Artificial Sequence; identical to SEQ ID NO: 1517
  Description of Artificial Sequence: Synthetic polypeptide
  VL of XENP020375

SEQ ID NO: 2643 - protein, 5 aa, Artificial Sequence
  Description of Artificial Sequence: Synthetic peptide
  XENP020375 vhCDR1
SYTMH

SEQ ID NO: 2644 - protein, 17 aa, Artificial Sequence
  Description of Artificial Sequence: Synthetic peptide
  XENP020375 vhCDR2
FISYDGNYKYYADSVKG

SEQ ID NO: 2645 - protein, 9 aa, Artificial Sequence
  Description of Artificial Sequence: Synthetic peptide
  XENP020375 vhCDR3
TSHLGPFDL

SEQ ID NO: 2646 - protein, 12 aa, Artificial Sequence
  Description of Artificial Sequence: Synthetic peptide
  XENP020375 vlCDR1
RASQSVGSSYLA

SEQ ID NO: 2647 - protein, 7 aa, Artificial Sequence
  Description of Artificial Sequence: Synthetic peptide
  XENP020375 vlCDR2
GAFSRAT

SEQ ID NO: 2648 - protein, 9 aa, Artificial Sequence
  Description of Artificial Sequence: Synthetic peptide
  XENP020375 vlCDR3
QQYGSSPWT

SEQ ID NO: 2649 - protein, 246 aa, Artificial Sequence
  Description of Artificial Sequence: Synthetic polypeptide
  XENP020376 [CTLA-4]_H3.25_L0.12_scFv(GKPGS)4
EVQLVESGGGLVKPGGSLRLSCAASGFTFSSYTMHWVRQAPGKGLEWVSFISYDGNYKYYADSVKGRFTISRDNAKNSLYLQMNSLRAEDTAVYYCARGGLLGPFDLWGQGTMVTVSSGKPGSGKPGSGKPGSGKPGSEIVLTQSPGTLSVSPGERATLSCRASQSVGSSYLAWYQQKPGQAPRLLIYGAFSRATGIPDRFSGSGSGTDFTLTISRLEPEDFAVYYCQQYGSSPWTFGQGTKVEIK

SEQ ID NO: 2650 - protein, 118 aa, Artificial Sequence
  Description of Artificial Sequence: Synthetic polypeptide
  VH of XENP020376
EVQLVESGGGLVKPGGSLRLSCAASGFTFSSYTMHWVRQAPGKGLEWVSFISYDGNYKYYADSVKGRFTISRDNAKNSLYLQMNSLRAEDTAVYYCARGGLLGPFDLWGQGTMVTVSS

SEQ ID NO: 2651 - protein, 108 aa, Artificial Sequence; identical to SEQ ID NO: 1517
  Description of Artificial Sequence: Synthetic polypeptide
  VL of XENP020376

SEQ ID NO: 2652 - protein, 5 aa, Artificial Sequence
  Description of Artificial Sequence: Synthetic peptide
  XENP020376 vhCDR1
SYTMH

SEQ ID NO: 2653 - protein, 17 aa, Artificial Sequence
  Description of Artificial Sequence: Synthetic peptide
  XENP020376 vhCDR2
FISYDGNYKYYADSVKG

SEQ ID NO: 2654 - protein, 9 aa, Artificial Sequence
  Description of Artificial Sequence: Synthetic peptide
  XENP020376 vhCDR3
GGLLGPFDL

SEQ ID NO: 2655 - protein, 12 aa, Artificial Sequence
  Description of Artificial Sequence: Synthetic peptide
  XENP020376 vlCDR1
RASQSVGSSYLA

SEQ ID NO: 2656 - protein, 7 aa, Artificial Sequence
  Description of Artificial Sequence: Synthetic peptide
  XENP020376 vlCDR2
GAFSRAT

SEQ ID NO: 2657 - protein, 9 aa, Artificial Sequence
  Description of Artificial Sequence: Synthetic peptide
  XENP020376 vlCDR3
QQYGSSPWT

SEQ ID NO: 2658 - protein, 246 aa, Artificial Sequence
  Description of Artificial Sequence: Synthetic polypeptide
  XENP020377 [CTLA-4]_H3.26_L0.12_scFv(GKPGS)4
EVQLVESGGGLVKPGGSLRLSCAASGFTFSSYTMHWVRQAPGKGLEWVSFISYDGNYKYYADSVKGRFTISRDNAKNSLYLQMNSLRAEDTAVYYCARTSLLGPFDLWGQGTMVTVSSGKPGSGKPGSGKPGSGKPGSEIVLTQSPGTLSVSPGERATLSCRASQSVGSSYLAWYQQKPGQAPRLLIYGAFSRATGIPDRFSGSGSGTDFTLTISRLEPEDFAVYYCQQYGSSPWTFGQGTKVEIK

SEQ ID NO: 2659 - protein, 118 aa, Artificial Sequence
  Description of Artificial Sequence: Synthetic polypeptide
  VH of XENP020377
EVQLVESGGGLVKPGGSLRLSCAASGFTFSSYTMHWVRQAPGKGLEWVSFISYDGNYKYYADSVKGRFTISRDNAKNSLYLQMNSLRAEDTAVYYCARTSLLGPFDLWGQGTMVTVSS

SEQ ID NO: 2660 - protein, 108 aa, Artificial Sequence; identical to SEQ ID NO: 1517
  Description of Artificial Sequence: Synthetic polypeptide
  VL of XENP020377

SEQ ID NO: 2661 - protein, 5 aa, Artificial Sequence
  Description of Artificial Sequence: Synthetic peptide
  XENP020377 vhCDR1
SYTMH

SEQ ID NO: 2662 - protein, 17 aa, Artificial Sequence
  Description of Artificial Sequence: Synthetic peptide
  XENP020377 vhCDR2
FISYDGNYKYYADSVKG

SEQ ID NO: 2663 - protein, 9 aa, Artificial Sequence
  Description of Artificial Sequence: Synthetic peptide
  XENP020377 vhCDR3
TSLLGPFDL

SEQ ID NO: 2664 - protein, 12 aa, Artificial Sequence
  Description of Artificial Sequence: Synthetic peptide
  XENP020377 vlCDR1
RASQSVGSSYLA

SEQ ID NO: 2665 - protein, 7 aa, Artificial Sequence
  Description of Artificial Sequence: Synthetic peptide
  XENP020377 vlCDR2
GAFSRAT

SEQ ID NO: 2666 - protein, 9 aa, Artificial Sequence
  Description of Artificial Sequence: Synthetic peptide
  XENP020377 vlCDR3
QQYGSSPWT

SEQ ID NO: 2667 - protein, 246 aa, Artificial Sequence
  Description of Artificial Sequence: Synthetic polypeptide
  XENP020378 [CTLA-4]_H3.4_L0.118_scFv(GKPGS)4
EVQLVESGGGLVKPGGSLRLSCAASGFTFSSYTMHWVRQAPGKGLEWVSFISYDGNHKYYADSVKGRFTISRDNAKNSLYLQMNSLRAEDTAVYYCARTGHLGPFDLWGQGTMVTVSSGKPGSGKPGSGKPGSGKPGSEIVLTQSPATLSVSPGERATLSCRASQSVGSSYLAWYQQKPGQAPRLLIYGAFSRATGIPDRFSGSGSGTDFTLTISRLEPEDFAVYYCQQYGSSPWTFGQGTKVEIK

SEQ ID NO: 2668 - protein, 118 aa, Artificial Sequence; identical to SEQ ID NO: 2461
  Description of Artificial Sequence: Synthetic polypeptide
  VH of XENP020378

SEQ ID NO: 2669 - protein, 108 aa, Artificial Sequence
  Description of Artificial Sequence: Synthetic polypeptide
  VL of XENP020378
EIVLTQSPATLSVSPGERATLSCRASQSVGSSYLAWYQQKPGQAPRLLIYGAFSRATGIPDRFSGSGSGTDFTLTISRLEPEDFAVYYCQQYGSSPWTFGQGTKVEIK

SEQ ID NO: 2670 - protein, 5 aa, Artificial Sequence
  Description of Artificial Sequence: Synthetic peptide
  XENP020378 vhCDR1
SYTMH

SEQ ID NO: 2671 - protein, 17 aa, Artificial Sequence
  Description of Artificial Sequence: Synthetic peptide
  XENP020378 vhCDR2
FISYDGNHKYYADSVKG

SEQ ID NO: 2672 - protein, 9 aa, Artificial Sequence
  Description of Artificial Sequence: Synthetic peptide
  XENP020378 vhCDR3
TGHLGPFDL

SEQ ID NO: 2673 - protein, 12 aa, Artificial Sequence
  Description of Artificial Sequence: Synthetic peptide
  XENP020378 vlCDR1
RASQSVGSSYLA

SEQ ID NO: 2674 - protein, 7 aa, Artificial Sequence
  Description of Artificial Sequence: Synthetic peptide
  XENP020378 vlCDR2
GAFSRAT

SEQ ID NO: 2675 - protein, 9 aa, Artificial Sequence
  Description of Artificial Sequence: Synthetic peptide
  XENP020378 vlCDR3
QQYGSSPWT

SEQ ID NO: 2676 - protein, 246 aa, Artificial Sequence
  Description of Artificial Sequence: Synthetic polypeptide
  XENP020379 [CTLA-4]_H3.4_L0.119_scFv(GKPGS)4
EVQLVESGGGLVKPGGSLRLSCAASGFTFSSYTMHWVRQAPGKGLEWVSFISYDGNHKYYADSVKGRFTISRDNAKNSLYLQMNSLRAEDTAVYYCARTGHLGPFDLWGQGTMVTVSSGKPGSGKPGSGKPGSGKPGSEIVLTQSPGTLSLSPGERATLSCRASQSVGSSYLAWYQQKPGQAPRLLIYGAFSRATGIPDRFSGSGSGTDFTLTISRLEPEDFAVYYCQQYGSSPWTFGQGTKVEIK

SEQ ID NO: 2677 - protein, 118 aa, Artificial Sequence; identical to SEQ ID NO: 2461
  Description of Artificial Sequence: Synthetic polypeptide
  VH of XENP020379

SEQ ID NO: 2678 - protein, 108 aa, Artificial Sequence; identical to SEQ ID NO: 23
  Description of Artificial Sequence: Synthetic polypeptide
  VL of XENP020379

SEQ ID NO: 2679 - protein, 5 aa, Artificial Sequence
  Description of Artificial Sequence: Synthetic peptide
  XENP020379 vhCDR1
SYTMH

SEQ ID NO: 2680 - protein, 17 aa, Artificial Sequence
  Description of Artificial Sequence: Synthetic peptide
  XENP020379 vhCDR2
FISYDGNHKYYADSVKG

SEQ ID NO: 2681 - protein, 9 aa, Artificial Sequence
  Description of Artificial Sequence: Synthetic peptide
  XENP020379 vhCDR3
TGHLGPFDL

SEQ ID NO: 2682 - protein, 12 aa, Artificial Sequence
  Description of Artificial Sequence: Synthetic peptide
  XENP020379 vlCDR1
RASQSVGSSYLA

SEQ ID NO: 2683 - protein, 7 aa, Artificial Sequence
  Description of Artificial Sequence: Synthetic peptide
  XENP020379 vlCDR2
GAFSRAT

SEQ ID NO: 2684 - protein, 9 aa, Artificial Sequence
  Description of Artificial Sequence: Synthetic peptide
  XENP020379 vlCDR3
QQYGSSPWT

SEQ ID NO: 2685 - protein, 246 aa, Artificial Sequence
  Description of Artificial Sequence: Synthetic polypeptide
  XENP020380 [CTLA-4]_H3.4_L0.120_scFv(GKPGS)4
EVQLVESGGGLVKPGGSLRLSCAASGFTFSSYTMHWVRQAPGKGLEWVSFISYDGNHKYYADSVKGRFTISRDNAKNSLYLQMNSLRAEDTAVYYCARTGHLGPFDLWGQGTMVTVSSGKPGSGKPGSGKPGSGKPGSEIVLTQSPGTLSVSPGERATLSCRASQSVSSSYLAWYQQKPGQAPRLLIYGAFSRATGIPDRFSGSGSGTDFTLTISRLEPEDFAVYYCQQYGSSPWTFGQGTKVEIK

SEQ ID NO: 2686 - protein, 118 aa, Artificial Sequence; identical to SEQ ID NO: 2461
  Description of Artificial Sequence: Synthetic polypeptide
  VH of XENP020380

SEQ ID NO: 2687 - protein, 108 aa, Artificial Sequence
  Description of Artificial Sequence: Synthetic polypeptide
  VL of XENP020380
EIVLTQSPGTLSVSPGERATLSCRASQSVSSSYLAWYQQKPGQAPRLLIYGAFSRATGIPDRFSGSGSGTDFTLTISRLEPEDFAVYYCQQYGSSPWTFGQGTKVEIK

SEQ ID NO: 2688 - protein, 5 aa, Artificial Sequence
  Description of Artificial Sequence: Synthetic peptide
  XENP020380 vhCDR1
SYTMH

SEQ ID NO: 2689 - protein, 17 aa, Artificial Sequence
  Description of Artificial Sequence: Synthetic peptide
  XENP020380 vhCDR2
FISYDGNHKYYADSVKG

SEQ ID NO: 2690 - protein, 9 aa, Artificial Sequence
  Description of Artificial Sequence: Synthetic peptide
  XENP020380 vhCDR3
TGHLGPFDL

SEQ ID NO: 2691 - protein, 12 aa, Artificial Sequence
  Description of Artificial Sequence: Synthetic peptide
  XENP020380 vlCDR1
RASQSVSSSYLA

SEQ ID NO: 2692 - protein, 7 aa, Artificial Sequence
  Description of Artificial Sequence: Synthetic peptide
  XENP020380 vlCDR2
GAFSRAT

SEQ ID NO: 2693 - protein, 9 aa, Artificial Sequence
  Description of Artificial Sequence: Synthetic peptide
  XENP020380 vlCDR3
QQYGSSPWT

SEQ ID NO: 2694 - protein, 246 aa, Artificial Sequence
  Description of Artificial Sequence: Synthetic polypeptide
  XENP020381 [CTLA-4]_H3.4_L0.121_scFv(GKPGS)4
EVQLVESGGGLVKPGGSLRLSCAASGFTFSSYTMHWVRQAPGKGLEWVSFISYDGNHKYYADSVKGRFTISRDNAKNSLYLQMNSLRAEDTAVYYCARTGHLGPFDLWGQGTMVTVSSGKPGSGKPGSGKPGSGKPGSEIVLTQSPGTLSVSPGERATLSCRASQSVGSSYLAWYQQKPGQAPRLLIYGASSRATGIPDRFSGSGSGTDFTLTISRLEPEDFAVYYCQQYGSSPWTFGQGTKVEIK

SEQ ID NO: 2695 - protein, 118 aa, Artificial Sequence; identical to SEQ ID NO: 2461
  Description of Artificial Sequence: Synthetic polypeptide
  VH of XENP020381

SEQ ID NO: 2696 - protein, 108 aa, Artificial Sequence
  Description of Artificial Sequence: Synthetic polypeptide
  VL of XENP020381
EIVLTQSPGTLSVSPGERATLSCRASQSVGSSYLAWYQQKPGQAPRLLIYGASSRATGIPDRFSGSGSGTDFTLTISRLEPEDFAVYYCQQYGSSPWTFGQGTKVEIK

SEQ ID NO: 2697 - protein, 5 aa, Artificial Sequence
  Description of Artificial Sequence: Synthetic peptide
  XENP020381 vhCDR1
SYTMH

SEQ ID NO: 2698 - protein, 17 aa, Artificial Sequence
  Description of Artificial Sequence: Synthetic peptide
  XENP020381 vhCDR2
FISYDGNHKYYADSVKG

SEQ ID NO: 2699 - protein, 9 aa, Artificial Sequence
  Description of Artificial Sequence: Synthetic peptide
  XENP020381 vhCDR3
TGHLGPFDL

SEQ ID NO: 2700 - protein, 12 aa, Artificial Sequence
  Description of Artificial Sequence: Synthetic peptide
  XENP020381 vlCDR1
RASQSVGSSYLA

SEQ ID NO: 2701 - protein, 7 aa, Artificial Sequence
  Description of Artificial Sequence: Synthetic peptide
  XENP020381 vlCDR2
GASSRAT

SEQ ID NO: 2702 - protein, 9 aa, Artificial Sequence
  Description of Artificial Sequence: Synthetic peptide
  XENP020381 vlCDR3
QQYGSSPWT

SEQ ID NO: 2703 - protein, 246 aa, Artificial Sequence
  Description of Artificial Sequence: Synthetic polypeptide
  XENP020382 [CTLA-4]_H3.4_L0.122_scFv(GKPGS)4
EVQLVESGGGLVKPGGSLRLSCAASGFTFSSYTMHWVRQAPGKGLEWVSFISYDGNHKYYADSVKGRFTISRDNAKNSLYLQMNSLRAEDTAVYYCARTGHLGPFDLWGQGTMVTVSSGKPGSGKPGSGKPGSGKPGSEIVLTQSPATLSLSPGERATLSCRASQSVGSSYLAWYQQKPGQAPRLLIYGAFSRATGIPDRFSGSGSGTDFTLTISRLEPEDFAVYYCQQYGSSPWTFGQGTKVEIK

SEQ ID NO: 2704 - protein, 118 aa, Artificial Sequence; identical to SEQ ID NO: 2461
  Description of Artificial Sequence: Synthetic polypeptide
  VH of XENP020382

SEQ ID NO: 2705 - protein, 108 aa, Artificial Sequence; identical to SEQ ID NO: 1481
  Description of Artificial Sequence: Synthetic polypeptide
  VL of XENP020382

SEQ ID NO: 2706 - protein, 5 aa, Artificial Sequence
  Description of Artificial Sequence: Synthetic peptide
  XENP020382 vhCDR1
SYTMH

SEQ ID NO: 2707 - protein, 17 aa, Artificial Sequence
  Description of Artificial Sequence: Synthetic peptide
  XENP020382 vhCDR2
FISYDGNHKYYADSVKG

SEQ ID NO: 2708 - protein, 9 aa, Artificial Sequence
  Description of Artificial Sequence: Synthetic peptide
  XENP020382 vhCDR3
TGHLGPFDL

SEQ ID NO: 2709 - protein, 12 aa, Artificial Sequence
  Description of Artificial Sequence: Synthetic peptide
  XENP020382 vlCDR1
RASQSVGSSYLA

SEQ ID NO: 2710 - protein, 7 aa, Artificial Sequence
  Description of Artificial Sequence: Synthetic peptide
  XENP020382 vlCDR2
GAFSRAT

SEQ ID NO: 2711 - protein, 9 aa, Artificial Sequence
  Description of Artificial Sequence: Synthetic peptide
  XENP020382 vlCDR3
QQYGSSPWT

SEQ ID NO: 2712 - protein, 246 aa, Artificial Sequence
  Description of Artificial Sequence: Synthetic polypeptide
  XENP020383 [CTLA-4]_H3.4_L0.123_scFv(GKPGS)4
EVQLVESGGGLVKPGGSLRLSCAASGFTFSSYTMHWVRQAPGKGLEWVSFISYDGNHKYYADSVKGRFTISRDNAKNSLYLQMNSLRAEDTAVYYCARTGHLGPFDLWGQGTMVTVSSGKPGSGKPGSGKPGSGKPGSEIVLTQSPATLSVSPGERATLSCRASQSVSSSYLAWYQQKPGQAPRLLIYGAFSRATGIPDRFSGSGSGTDFTLTISRLEPEDFAVYYCQQYGSSPWTFGQGTKVEIK

SEQ ID NO: 2713 - protein, 118 aa, Artificial Sequence; identical to SEQ ID NO: 2461
  Description of Artificial Sequence: Synthetic polypeptide
  VH of XENP020383

SEQ ID NO: 2714 - protein, 108 aa, Artificial Sequence
  Description of Artificial Sequence: Synthetic polypeptide
  VL of XENP020383
EIVLTQSPATLSVSPGERATLSCRASQSVSSSYLAWYQQKPGQAPRLLIYGAFSRATGIPDRFSGSGSGTDFTLTISRLEPEDFAVYYCQQYGSSPWTFGQGTKVEIK

SEQ ID NO: 2715 - protein, 5 aa, Artificial Sequence
  Description of Artificial Sequence: Synthetic peptide
  XENP020383 vhCDR1
SYTMH

SEQ ID NO: 2716 - protein, 17 aa, Artificial Sequence
  Description of Artificial Sequence: Synthetic peptide
  XENP020383 vhCDR2
FISYDGNHKYYADSVKG

SEQ ID NO: 2717 - protein, 9 aa, Artificial Sequence
  Description of Artificial Sequence: Synthetic peptide
  XENP020383 vhCDR3
TGHLGPFDL

SEQ ID NO: 2718 - protein, 12 aa, Artificial Sequence
  Description of Artificial Sequence: Synthetic peptide
  XENP020383 vlCDR1
RASQSVSSSYLA

SEQ ID NO: 2719 - protein, 7 aa, Artificial Sequence
  Description of Artificial Sequence: Synthetic peptide
  XENP020383 vlCDR2
GAFSRAT

SEQ ID NO: 2720 - protein, 9 aa, Artificial Sequence
  Description of Artificial Sequence: Synthetic peptide
  XENP020383 vlCDR3
QQYGSSPWT

SEQ ID NO: 2721 - protein, 246 aa, Artificial Sequence
  Description of Artificial Sequence: Synthetic polypeptide
  XENP020384 [CTLA-4]_H3.4_L0.124_scFv(GKPGS)4
EVQLVESGGGLVKPGGSLRLSCAASGFTFSSYTMHWVRQAPGKGLEWVSFISYDGNHKYYADSVKGRFTISRDNAKNSLYLQMNSLRAEDTAVYYCARTGHLGPFDLWGQGTMVTVSSGKPGSGKPGSGKPGSGKPGSEIVLTQSPATLSVSPGERATLSCRASQSVGSSYLAWYQQKPGQAPRLLIYGASSRATGIPDRFSGSGSGTDFTLTISRLEPEDFAVYYCQQYGSSPWTFGQGTKVEIK

SEQ ID NO: 2722 - protein, 118 aa, Artificial Sequence; identical to SEQ ID NO: 2461
  Description of Artificial Sequence: Synthetic polypeptide
  VH of XENP020384

SEQ ID NO: 2723 - protein, 108 aa, Artificial Sequence
  Description of Artificial Sequence: Synthetic polypeptide
  VL of XENP020384
EIVLTQSPATLSVSPGERATLSCRASQSVGSSYLAWYQQKPGQAPRLLIYGASSRATGIPDRFSGSGSGTDFTLTISRLEPEDFAVYYCQQYGSSPWTFGQGTKVEIK

SEQ ID NO: 2724 - protein, 5 aa, Artificial Sequence
  Description of Artificial Sequence: Synthetic peptide
  XENP020384 vhCDR1
SYTMH

SEQ ID NO: 2725 - protein, 17 aa, Artificial Sequence
  Description of Artificial Sequence: Synthetic peptide
  XENP020384 vhCDR2
FISYDGNHKYYADSVKG

SEQ ID NO: 2726 - protein, 9 aa, Artificial Sequence
  Description of Artificial Sequence: Synthetic peptide
  XENP020384 vhCDR3
TGHLGPFDL

SEQ ID NO: 2727 - protein, 12 aa, Artificial Sequence
  Description of Artificial Sequence: Synthetic peptide
  XENP020384 vlCDR1
RASQSVGSSYLA

SEQ ID NO: 2728 - protein, 7 aa, Artificial Sequence
  Description of Artificial Sequence: Synthetic peptide
  XENP020384 vlCDR2
GASSRAT

SEQ ID NO: 2729 - protein, 9 aa, Artificial Sequence
  Description of Artificial Sequence: Synthetic peptide
  XENP020384 vlCDR3
QQYGSSPWT

SEQ ID NO: 2730 - protein, 246 aa, Artificial Sequence
  Description of Artificial Sequence: Synthetic polypeptide
  XENP020385 [CTLA-4]_H3.4_L0.125_scFv(GKPGS)4
EVQLVESGGGLVKPGGSLRLSCAASGFTFSSYTMHWVRQAPGKGLEWVSFISYDGNHKYYADSVKGRFTISRDNAKNSLYLQMNSLRAEDTAVYYCARTGHLGPFDLWGQGTMVTVSSGKPGSGKPGSGKPGSGKPGSEIVLTQSPGTLSLSPGERATLSCRASQSVSSSYLAWYQQKPGQAPRLLIYGAFSRATGIPDRFSGSGSGTDFTLTISRLEPEDFAVYYCQQYGSSPWTFGQGTKVEIK

SEQ ID NO: 2731 - protein, 118 aa, Artificial Sequence; identical to SEQ ID NO: 2461
  Description of Artificial Sequence: Synthetic polypeptide
  VH of XENP020385

SEQ ID NO: 2732 - protein, 108 aa, Artificial Sequence; identical to SEQ ID NO: 1607
  Description of Artificial Sequence: Synthetic polypeptide
  VL of XENP020385

SEQ ID NO: 2733 - protein, 5 aa, Artificial Sequence
  Description of Artificial Sequence: Synthetic peptide
  XENP020385 vhCDR1
SYTMH

SEQ ID NO: 2734 - protein, 17 aa, Artificial Sequence
  Description of Artificial Sequence: Synthetic peptide
  XENP020385 vhCDR2
FISYDGNHKYYADSVKG

SEQ ID NO: 2735 - protein, 9 aa, Artificial Sequence
  Description of Artificial Sequence: Synthetic peptide
  XENP020385 vhCDR3
TGHLGPFDL

SEQ ID NO: 2736 - protein, 12 aa, Artificial Sequence
  Description of Artificial Sequence: Synthetic peptide
  XENP020385 vlCDR1
RASQSVSSSYLA

SEQ ID NO: 2737 - protein, 7 aa, Artificial Sequence
  Description of Artificial Sequence: Synthetic peptide
  XENP020385 vlCDR2
GAFSRAT

SEQ ID NO: 2738 - protein, 9 aa, Artificial Sequence
  Description of Artificial Sequence: Synthetic peptide
  XENP020385 vlCDR3
QQYGSSPWT

SEQ ID NO: 2739 - protein, 246 aa, Artificial Sequence
  Description of Artificial Sequence: Synthetic polypeptide
  XENP020386 [CTLA-4]_H3.4_L0.126_scFv(GKPGS)4
EVQLVESGGGLVKPGGSLRLSCAASGFTFSSYTMHWVRQAPGKGLEWVSFISYDGNHKYYADSVKGRFTISRDNAKNSLYLQMNSLRAEDTAVYYCARTGHLGPFDLWGQGTMVTVSSGKPGSGKPGSGKPGSGKPGSEIVLTQSPGTLSLSPGERATLSCRASQSVGSSYLAWYQQKPGQAPRLLIYGASSRATGIPDRFSGSGSGTDFTLTISRLEPEDFAVYYCQQYGSSPWTFGQGTKVEIK

SEQ ID NO: 2740 - protein, 118 aa, Artificial Sequence; identical to SEQ ID NO: 2461
  Description of Artificial Sequence: Synthetic polypeptide
  VH of XENP020386

SEQ ID NO: 2741 - protein, 108 aa, Artificial Sequence; identical to SEQ ID NO: 2066
  Description of Artificial Sequence: Synthetic polypeptide
  VL of XENP020386

SEQ ID NO: 2742 - protein, 5 aa, Artificial Sequence
  Description of Artificial Sequence: Synthetic peptide
  XENP020386 vhCDR1
SYTMH

SEQ ID NO: 2743 - protein, 17 aa, Artificial Sequence
  Description of Artificial Sequence: Synthetic peptide
  XENP020386 vhCDR2
FISYDGNHKYYADSVKG

SEQ ID NO: 2744 - protein, 9 aa, Artificial Sequence
  Description of Artificial Sequence: Synthetic peptide
  XENP020386 vhCDR3
TGHLGPFDL

SEQ ID NO: 2745 - protein, 12 aa, Artificial Sequence
  Description of Artificial Sequence: Synthetic peptide
  XENP020386 vlCDR1
RASQSVGSSYLA

SEQ ID NO: 2746 - protein, 7 aa, Artificial Sequence
  Description of Artificial Sequence: Synthetic peptide
  XENP020386 vlCDR2
GASSRAT

SEQ ID NO: 2747 - protein, 9 aa, Artificial Sequence
  Description of Artificial Sequence: Synthetic peptide
  XENP020386 vlCDR3
QQYGSSPWT

SEQ ID NO: 2748 - protein, 246 aa, Artificial Sequence
  Description of Artificial Sequence: Synthetic polypeptide
  XENP020387 [CTLA-4]_H3.4_L0.127_scFv(GKPGS)4
EVQLVESGGGLVKPGGSLRLSCAASGFTFSSYTMHWVRQAPGKGLEWVSFISYDGNHKYYADSVKGRFTISRDNAKNSLYLQMNSLRAEDTAVYYCARTGHLGPFDLWGQGTMVTVSSGKPGSGKPGSGKPGSGKPGSEIVLTQSPGTLSVSPGERATLSCRASQSVSSSYLAWYQQKPGQAPRLLIYGASSRATGIPDRFSGSGSGTDFTLTISRLEPEDFAVYYCQQYGSSPWTFGQGTKVEIK

SEQ ID NO: 2749 - protein, 118 aa, Artificial Sequence; identical to SEQ ID NO: 2461
  Description of Artificial Sequence: Synthetic polypeptide
  VH of XENP020387

SEQ ID NO: 2750 - protein, 108 aa, Artificial Sequence
  Description of Artificial Sequence: Synthetic polypeptide
  VL of XENP020387
EIVLTQSPGTLSVSPGERATLSCRASQSVSSSYLAWYQQKPGQAPRLLIYGASSRATGIPDRFSGSGSGTDFTLTISRLEPEDFAVYYCQQYGSSPWTFGQGTKVEIK

SEQ ID NO: 2751 - protein, 5 aa, Artificial Sequence
  Description of Artificial Sequence: Synthetic peptide
  XENP020387 vhCDR1
SYTMH

SEQ ID NO: 2752 - protein, 17 aa, Artificial Sequence
  Description of Artificial Sequence: Synthetic peptide
  XENP020387 vhCDR2
FISYDGNHKYYADSVKG

SEQ ID NO: 2753 - protein, 9 aa, Artificial Sequence
  Description of Artificial Sequence: Synthetic peptide
  XENP020387 vhCDR3
TGHLGPFDL

SEQ ID NO: 2754 - protein, 12 aa, Artificial Sequence
  Description of Artificial Sequence: Synthetic peptide
  XENP020387 vlCDR1
RASQSVSSSYLA

SEQ ID NO: 2755 - protein, 7 aa, Artificial Sequence
  Description of Artificial Sequence: Synthetic peptide
  XENP020387 vlCDR2
GASSRAT

SEQ ID NO: 2756 - protein, 9 aa, Artificial Sequence
  Description of Artificial Sequence: Synthetic peptide
  XENP020387 vlCDR3
QQYGSSPWT

SEQ ID NO: 2757 - protein, 246 aa, Artificial Sequence
  Description of Artificial Sequence: Synthetic polypeptide
  XENP020388 [CTLA-4]_H3.4_L0.128_scFv(GKPGS)4
EVQLVESGGGLVKPGGSLRLSCAASGFTFSSYTMHWVRQAPGKGLEWVSFISYDGNHKYYADSVKGRFTISRDNAKNSLYLQMNSLRAEDTAVYYCARTGHLGPFDLWGQGTMVTVSSGKPGSGKPGSGKPGSGKPGSEIVLTQSPATLSLSPGERATLSCRASQSVSSSYLAWYQQKPGQAPRLLIYGAFSRATGIPDRFSGSGSGTDFTLTISRLEPEDFAVYYCQQYGSSPWTFGQGTKVEIK

SEQ ID NO: 2758 - protein, 118 aa, Artificial Sequence; identical to SEQ ID NO: 2461
  Description of Artificial Sequence: Synthetic polypeptide
  VH of XENP020388

SEQ ID NO: 2759 - protein, 108 aa, Artificial Sequence
  Description of Artificial Sequence: Synthetic polypeptide
  VL of XENP020388
EIVLTQSPATLSLSPGERATLSCRASQSVSSSYLAWYQQKPGQAPRLLIYGAFSRATGIPDRFSGSGSGTDFTLTISRLEPEDFAVYYCQQYGSSPWTFGQGTKVEIK

SEQ ID NO: 2760 - protein, 5 aa, Artificial Sequence
  Description of Artificial Sequence: Synthetic peptide
  XENP020388 vhCDR1
SYTMH

SEQ ID NO: 2761 - protein, 17 aa, Artificial Sequence
  Description of Artificial Sequence: Synthetic peptide
  XENP020388 vhCDR2
FISYDGNHKYYADSVKG

SEQ ID NO: 2762 - protein, 9 aa, Artificial Sequence
  Description of Artificial Sequence: Synthetic peptide
  XENP020388 vhCDR3
TGHLGPFDL

SEQ ID NO: 2763 - protein, 12 aa, Artificial Sequence
  Description of Artificial Sequence: Synthetic peptide
  XENP020388 vlCDR1
RASQSVSSSYLA

SEQ ID NO: 2764 - protein, 7 aa, Artificial Sequence
  Description of Artificial Sequence: Synthetic peptide
  XENP020388 vlCDR2
GAFSRAT

SEQ ID NO: 2765 - protein, 9 aa, Artificial Sequence
  Description of Artificial Sequence: Synthetic peptide
  XENP020388 vlCDR3
QQYGSSPWT

SEQ ID NO: 2766 - protein, 246 aa, Artificial Sequence
  Description of Artificial Sequence: Synthetic polypeptide
  XENP020389 [CTLA-4]_H3.4_L0.129_scFv(GKPGS)4
EVQLVESGGGLVKPGGSLRLSCAASGFTFSSYTMHWVRQAPGKGLEWVSFISYDGNHKYYADSVKGRFTISRDNAKNSLYLQMNSLRAEDTAVYYCARTGHLGPFDLWGQGTMVTVSSGKPGSGKPGSGKPGSGKPGSEIVLTQSPATLSLSPGERATLSCRASQSVGSSYLAWYQQKPGQAPRLLIYGASSRATGIPDRFSGSGSGTDFTLTISRLEPEDFAVYYCQQYGSSPWTFGQGTKVEIK

SEQ ID NO: 2767 - protein, 118 aa, Artificial Sequence; identical to SEQ ID NO: 2461
  Description of Artificial Sequence: Synthetic polypeptide
  VH of XENP020389

SEQ ID NO: 2768 - protein, 108 aa, Artificial Sequence
  Description of Artificial Sequence: Synthetic polypeptide
  VL of XENP020389
EIVLTQSPATLSLSPGERATLSCRASQSVGSSYLAWYQQKPGQAPRLLIYGASSRATGIPDRFSGSGSGTDFTLTISRLEPEDFAVYYCQQYGSSPWTFGQGTKVEIK

SEQ ID NO: 2769 - protein, 5 aa, Artificial Sequence
  Description of Artificial Sequence: Synthetic peptide
  XENP020389 vhCDR1
SYTMH

SEQ ID NO: 2770 - protein, 17 aa, Artificial Sequence
  Description of Artificial Sequence: Synthetic peptide
  XENP020389 vhCDR2
FISYDGNHKYYADSVKG

SEQ ID NO: 2771 - protein, 9 aa, Artificial Sequence
  Description of Artificial Sequence: Synthetic peptide
  XENP020389 vhCDR3
TGHLGPFDL

SEQ ID NO: 2772 - protein, 12 aa, Artificial Sequence
  Description of Artificial Sequence: Synthetic peptide
  XENP020389 vlCDR1
RASQSVGSSYLA

SEQ ID NO: 2773 - protein, 7 aa, Artificial Sequence
  Description of Artificial Sequence: Synthetic peptide
  XENP020389 vlCDR2
GASSRAT

SEQ ID NO: 2774 - protein, 9 aa, Artificial Sequence
  Description of Artificial Sequence: Synthetic peptide
  XENP020389 vlCDR3
QQYGSSPWT

SEQ ID NO: 2775 - protein, 246 aa, Artificial Sequence
  Description of Artificial Sequence: Synthetic polypeptide
  XENP020390 [CTLA-4]_H3.4_L0.130_scFv(GKPGS)4
EVQLVESGGGLVKPGGSLRLSCAASGFTFSSYTMHWVRQAPGKGLEWVSFISYDGNHKYYADSVKGRFTISRDNAKNSLYLQMNSLRAEDTAVYYCARTGHLGPFDLWGQGTMVTVSSGKPGSGKPGSGKPGSGKPGSEIVLTQSPATLSVSPGERATLSCRASQSVSSSYLAWYQQKPGQAPRLLIYGASSRATGIPDRFSGSGSGTDFTLTISRLEPEDFAVYYCQQYGSSPWTFGQGTKVEIK

SEQ ID NO: 2776 - protein, 118 aa, Artificial Sequence; identical to SEQ ID NO: 2461
  Description of Artificial Sequence: Synthetic polypeptide
  VH of XENP020390

SEQ ID NO: 2777 - protein, 108 aa, Artificial Sequence
  Description of Artificial Sequence: Synthetic polypeptide
  VL of XENP020390
EIVLTQSPATLSVSPGERATLSCRASQSVSSSYLAWYQQKPGQAPRLLIYGASSRATGIPDRFSGSGSGTDFTLTISRLEPEDFAVYYCQQYGSSPWTFGQGTKVEIK

SEQ ID NO: 2778 - protein, 5 aa, Artificial Sequence
  Description of Artificial Sequence: Synthetic peptide
  XENP020390 vhCDR1
SYTMH

SEQ ID NO: 2779 - protein, 17 aa, Artificial Sequence
  Description of Artificial Sequence: Synthetic peptide
  XENP020390 vhCDR2
FISYDGNHKYYADSVKG

SEQ ID NO: 2780 - protein, 9 aa, Artificial Sequence
  Description of Artificial Sequence: Synthetic peptide
  XENP020390 vhCDR3
TGHLGPFDL

SEQ ID NO: 2781 - protein, 12 aa, Artificial Sequence
  Description of Artificial Sequence: Synthetic peptide
  XENP020390 vlCDR1
RASQSVSSSYLA

SEQ ID NO: 2782 - protein, 7 aa, Artificial Sequence
  Description of Artificial Sequence: Synthetic peptide
  XENP020390 vlCDR2
GASSRAT

SEQ ID NO: 2783 - protein, 9 aa, Artificial Sequence
  Description of Artificial Sequence: Synthetic peptide
  XENP020390 vlCDR3
QQYGSSPWT

SEQ ID NO: 2784 - protein, 246 aa, Artificial Sequence
  Description of Artificial Sequence: Synthetic polypeptide
  XENP020391 [CTLA-4]_H3.4_L0.131_scFv(GKPGS)4
EVQLVESGGGLVKPGGSLRLSCAASGFTFSSYTMHWVRQAPGKGLEWVSFISYDGNHKYYADSVKGRFTISRDNAKNSLYLQMNSLRAEDTAVYYCARTGHLGPFDLWGQGTMVTVSSGKPGSGKPGSGKPGSGKPGSEIVLTQSPGTLSLSPGERATLSCRASQSVSSSYLAWYQQKPGQAPRLLIYGASSRATGIPDRFSGSGSGTDFTLTISRLEPEDFAVYYCQQYGSSPWTFGQGTKVEIK

SEQ ID NO: 2785 - protein, 118 aa, Artificial Sequence; identical to SEQ ID NO: 2461
  Description of Artificial Sequence: Synthetic polypeptide
  VH of XENP020391

SEQ ID NO: 2786 - protein, 108 aa, Artificial Sequence
  Description of Artificial Sequence: Synthetic polypeptide
  VL of XENP020391
EIVLTQSPGTLSLSPGERATLSCRASQSVSSSYLAWYQQKPGQAPRLLIYGASSRATGIPDRFSGSGSGTDFTLTISRLEPEDFAVYYCQQYGSSPWTFGQGTKVEIK

SEQ ID NO: 2787 - protein, 5 aa, Artificial Sequence
  Description of Artificial Sequence: Synthetic peptide
  XENP020391 vhCDR1
SYTMH

SEQ ID NO: 2788 - protein, 17 aa, Artificial Sequence
  Description of Artificial Sequence: Synthetic peptide
  XENP020391 vhCDR2
FISYDGNHKYYADSVKG

SEQ ID NO: 2789 - protein, 9 aa, Artificial Sequence
  Description of Artificial Sequence: Synthetic peptide
  XENP020391 vhCDR3
TGHLGPFDL

SEQ ID NO: 2790 - protein, 12 aa, Artificial Sequence
  Description of Artificial Sequence: Synthetic peptide
  XENP020391 vlCDR1
RASQSVSSSYLA

SEQ ID NO: 2791 - protein, 7 aa, Artificial Sequence
  Description of Artificial Sequence: Synthetic peptide
  XENP020391 vlCDR2
GASSRAT

SEQ ID NO: 2792 - protein, 9 aa, Artificial Sequence
  Description of Artificial Sequence: Synthetic peptide
  XENP020391 vlCDR3
QQYGSSPWT

SEQ ID NO: 2793 - protein, 246 aa, Artificial Sequence
  Description of Artificial Sequence: Synthetic polypeptide
  XENP020392 [CTLA-4]_H3.4_L0.132_scFv(GKPGS)4
EVQLVESGGGLVKPGGSLRLSCAASGFTFSSYTMHWVRQAPGKGLEWVSFISYDGNHKYYADSVKGRFTISRDNAKNSLYLQMNSLRAEDTAVYYCARTGHLGPFDLWGQGTMVTVSSGKPGSGKPGSGKPGSGKPGSEIVLTQSPATLSLSPGERATLSCRASQSVSSSYLAWYQQKPGQAPRLLIYGASSRATGIPDRFSGSGSGTDFTLTISRLEPEDFAVYYCQQYGSSPWTFGQGTKVEIK

SEQ ID NO: 2794 - protein, 118 aa, Artificial Sequence; identical to SEQ ID NO: 2461
  Description of Artificial Sequence: Synthetic polypeptide
  VH of XENP020392

SEQ ID NO: 2795 - protein, 108 aa, Artificial Sequence
  Description of Artificial Sequence: Synthetic polypeptide
  VL of XENP020392
EIVLTQSPATLSLSPGERATLSCRASQSVSSSYLAWYQQKPGQAPRLLIYGASSRATGIPDRFSGSGSGTDFTLTISRLEPEDFAVYYCQQYGSSPWTFGQGTKVEIK

SEQ ID NO: 2796 - protein, 5 aa, Artificial Sequence
  Description of Artificial Sequence: Synthetic peptide
  XENP020392 vhCDR1
SYTMH

SEQ ID NO: 2797 - protein, 17 aa, Artificial Sequence
  Description of Artificial Sequence: Synthetic peptide
  XENP020392 vhCDR2
FISYDGNHKYYADSVKG

SEQ ID NO: 2798 - protein, 9 aa, Artificial Sequence
  Description of Artificial Sequence: Synthetic peptide
  XENP020392 vhCDR3
TGHLGPFDL

SEQ ID NO: 2799 - protein, 12 aa, Artificial Sequence
  Description of Artificial Sequence: Synthetic peptide
  XENP020392 vlCDR1
RASQSVSSSYLA

SEQ ID NO: 2800 - protein, 7 aa, Artificial Sequence
  Description of Artificial Sequence: Synthetic peptide
  XENP020392 vlCDR2
GASSRAT

SEQ ID NO: 2801 - protein, 9 aa, Artificial Sequence
  Description of Artificial Sequence: Synthetic peptide
  XENP020392 vlCDR3
QQYGSSPWT

SEQ ID NO: 2802 - protein, 246 aa, Artificial Sequence
  Description of Artificial Sequence: Synthetic polypeptide
  XENP020393 [CTLA-4]_H3.5_L2_scFv(GKPGS)4
EVQLVESGGGLVKPGGSLRLSCAASGFTFSSYTMHWVRQAPGKGLEWVSFISYDGNTKYYADSVKGRFTISRDNAKNSLYLQMNSLRAEDTAVYYCARTGHLGPFDLWGQGTMVTVSSGKPGSGKPGSGKPGSGKPGSEIVMTQSPATLSVSPGERATLSCRASQSVGSSYLAWYQQKPGQAPRLLIYGAFSRATGIPARFSGSGSGTEFTLTISSLQSEDFAVYYCQQYGSSPWTFGQGTKVEIK

SEQ ID NO: 2803 - protein, 118 aa, Artificial Sequence; identical to SEQ ID NO: 2470
  Description of Artificial Sequence: Synthetic polypeptide
  VH of XENP020393

SEQ ID NO: 2804 - protein, 108 aa, Artificial Sequence; identical to SEQ ID NO: 167
  Description of Artificial Sequence: Synthetic polypeptide
  VL of XENP020393

SEQ ID NO: 2805 - protein, 5 aa, Artificial Sequence
  Description of Artificial Sequence: Synthetic peptide
  XENP020393 vhCDR1
SYTMH

SEQ ID NO: 2806 - protein, 17 aa, Artificial Sequence
  Description of Artificial Sequence: Synthetic peptide
  XENP020393 vhCDR2
FISYDGNTKYYADSVKG

SEQ ID NO: 2807 - protein, 9 aa, Artificial Sequence
  Description of Artificial Sequence: Synthetic peptide
  XENP020393 vhCDR3
TGHLGPFDL

SEQ ID NO: 2808 - protein, 12 aa, Artificial Sequence
  Description of Artificial Sequence: Synthetic peptide
  XENP020393 vlCDR1
RASQSVGSSYLA

SEQ ID NO: 2809 - protein, 7 aa, Artificial Sequence
  Description of Artificial Sequence: Synthetic peptide
  XENP020393 vlCDR2
GAFSRAT

SEQ ID NO: 2810 - protein, 9 aa, Artificial Sequence
  Description of Artificial Sequence: Synthetic peptide
  XENP020393 vlCDR3
QQYGSSPWT

SEQ ID NO: 2811 - protein, 246 aa, Artificial Sequence
  Description of Artificial Sequence: Synthetic polypeptide
  XENP020394 [CTLA-4]_H3.5_L2.1_scFv(GKPGS)4
EVQLVESGGGLVKPGGSLRLSCAASGFTFSSYTMHWVRQAPGKGLEWVSFISYDGNTKYYADSVKGRFTISRDNAKNSLYLQMNSLRAEDTAVYYCARTGHLGPFDLWGQGTMVTVSSGKPGSGKPGSGKPGSGKPGSEIVMTQSPATLSVSPGERATLSCRASQSVSSSYLAWYQQKPGQAPRLLIYGAFSRATGIPARFSGSGSGTEFTLTISSLQSEDFAVYYCQQYGSSPWTFGQGTKVEIK

SEQ ID NO: 2812 - protein, 118 aa, Artificial Sequence; identical to SEQ ID NO: 2470
  Description of Artificial Sequence: Synthetic polypeptide
  VH of XENP020394

SEQ ID NO: 2813 - protein, 108 aa, Artificial Sequence
  Description of Artificial Sequence: Synthetic polypeptide
  VL of XENP020394
EIVMTQSPATLSVSPGERATLSCRASQSVSSSYLAWYQQKPGQAPRLLIYGAFSRATGIPARFSGSGSGTEFTLTISSLQSEDFAVYYCQQYGSSPWTFGQGTKVEIK

SEQ ID NO: 2814 - protein, 5 aa, Artificial Sequence
  Description of Artificial Sequence: Synthetic peptide
  XENP020394 vhCDR1
SYTMH

SEQ ID NO: 2815 - protein, 17 aa, Artificial Sequence
  Description of Artificial Sequence: Synthetic peptide
  XENP020394 vhCDR2
FISYDGNTKYYADSVKG

SEQ ID NO: 2816 - protein, 9 aa, Artificial Sequence
  Description of Artificial Sequence: Synthetic peptide
  XENP020394 vhCDR3
TGHLGPFDL

SEQ ID NO: 2817 - protein, 12 aa, Artificial Sequence
  Description of Artificial Sequence: Synthetic peptide
  XENP020394 vlCDR1
RASQSVSSSYLA

SEQ ID NO: 2818 - protein, 7 aa, Artificial Sequence
  Description of Artificial Sequence: Synthetic peptide
  XENP020394 vlCDR2
GAFSRAT

SEQ ID NO: 2819 - protein, 9 aa, Artificial Sequence
  Description of Artificial Sequence: Synthetic peptide
  XENP020394 vlCDR3
QQYGSSPWT

SEQ ID NO: 2820 - protein, 246 aa, Artificial Sequence
  Description of Artificial Sequence: Synthetic polypeptide
  XENP020395 [CTLA-4]_H3.5_L2.2_scFv(GKPGS)4
EVQLVESGGGLVKPGGSLRLSCAASGFTFSSYTMHWVRQAPGKGLEWVSFISYDGNTKYYADSVKGRFTISRDNAKNSLYLQMNSLRAEDTAVYYCARTGHLGPFDLWGQGTMVTVSSGKPGSGKPGSGKPGSGKPGSEIVMTQSPATLSVSPGERATLSCRASQSVGSSYLAWYQQKPGQAPRLLIYGASSRATGIPARFSGSGSGTEFTLTISSLQSEDFAVYYCQQYGSSPWTFGQGTKVEIK

SEQ ID NO: 2821 - protein, 118 aa, Artificial Sequence; identical to SEQ ID NO: 2470
  Description of Artificial Sequence: Synthetic polypeptide
  VH of XENP020395

SEQ ID NO: 2822 - protein, 108 aa, Artificial Sequence
  Description of Artificial Sequence: Synthetic polypeptide
  VL of XENP020395
EIVMTQSPATLSVSPGERATLSCRASQSVGSSYLAWYQQKPGQAPRLLIYGASSRATGIPARFSGSGSGTEFTLTISSLQSEDFAVYYCQQYGSSPWTFGQGTKVEIK

SEQ ID NO: 2823 - protein, 5 aa, Artificial Sequence
  Description of Artificial Sequence: Synthetic peptide
  XENP020395 vhCDR1
SYTMH

SEQ ID NO: 2824 - protein, 17 aa, Artificial Sequence
  Description of Artificial Sequence: Synthetic peptide
  XENP020395 vhCDR2
FISYDGNTKYYADSVKG

SEQ ID NO: 2825 - protein, 9 aa, Artificial Sequence
  Description of Artificial Sequence: Synthetic peptide
  XENP020395 vhCDR3
TGHLGPFDL

SEQ ID NO: 2826 - protein, 12 aa, Artificial Sequence
  Description of Artificial Sequence: Synthetic peptide
  XENP020395 vlCDR1
RASQSVGSSYLA

SEQ ID NO: 2827 - protein, 7 aa, Artificial Sequence
  Description of Artificial Sequence: Synthetic peptide
  XENP020395 vlCDR2
GASSRAT

SEQ ID NO: 2828 - protein, 9 aa, Artificial Sequence
  Description of Artificial Sequence: Synthetic peptide
  XENP020395 vlCDR3
QQYGSSPWT

SEQ ID NO: 2829 - protein, 246 aa, Artificial Sequence
  Description of Artificial Sequence: Synthetic polypeptide
  XENP020396 [CTLA-4]_H3.5_L2.3_scFv(GKPGS)4
EVQLVESGGGLVKPGGSLRLSCAASGFTFSSYTMHWVRQAPGKGLEWVSFISYDGNTKYYADSVKGRFTISRDNAKNSLYLQMNSLRAEDTAVYYCARTGHLGPFDLWGQGTMVTVSSGKPGSGKPGSGKPGSGKPGSEIVMTQSPATLSVSPGERATLSCRASQSVSSSYLAWYQQKPGQAPRLLIYGASSRATGIPARFSGSGSGTEFTLTISSLQSEDFAVYYCQQYGSSPWTFGQGTKVEIK

SEQ ID NO: 2830 - protein, 118 aa, Artificial Sequence; identical to SEQ ID NO: 2470
  Description of Artificial Sequence: Synthetic polypeptide
  VH of XENP020396

SEQ ID NO: 2831 - protein, 108 aa, Artificial Sequence
  Description of Artificial Sequence: Synthetic polypeptide
  VL of XENP020396
EIVMTQSPATLSVSPGERATLSCRASQSVSSSYLAWYQQKPGQAPRLLIYGASSRATGIPARFSGSGSGTEFTLTISSLQSEDFAVYYCQQYGSSPWTFGQGTKVEIK

SEQ ID NO: 2832 - protein, 5 aa, Artificial Sequence
  Description of Artificial Sequence: Synthetic peptide
  XENP020396 vhCDR1
SYTMH

SEQ ID NO: 2833 - protein, 17 aa, Artificial Sequence
  Description of Artificial Sequence: Synthetic peptide
  XENP020396 vhCDR2
FISYDGNTKYYADSVKG

SEQ ID NO: 2834 - protein, 9 aa, Artificial Sequence
  Description of Artificial Sequence: Synthetic peptide
  XENP020396 vhCDR3
TGHLGPFDL

SEQ ID NO: 2835 - protein, 12 aa, Artificial Sequence
  Description of Artificial Sequence: Synthetic peptide
  XENP020396 vlCDR1
RASQSVSSSYLA

SEQ ID NO: 2836 - protein, 7 aa, Artificial Sequence
  Description of Artificial Sequence: Synthetic peptide
  XENP020396 vlCDR2
GASSRAT

SEQ ID NO: 2837 - protein, 9 aa, Artificial Sequence
  Description of Artificial Sequence: Synthetic peptide
  XENP020396 vlCDR3
QQYGSSPWT

SEQ ID NO: 2838 - protein, 246 aa, Artificial Sequence
  Description of Artificial Sequence: Synthetic polypeptide
  XENP020431 [CTLA-4]_H3.21_L0.124_scFv(GKPGS)4
EVQLVESGGGLVKPGGSLRLSCAASGFTFSSYTMHWVRQAPGKGLEWVSFISYDGNTKYYADSVKGRFTISRDNAKNSLYLQMNSLRAEDTAVYYCARGGLLGPFDLWGQGTMVTVSSGKPGSGKPGSGKPGSGKPGSEIVLTQSPATLSVSPGERATLSCRASQSVGSSYLAWYQQKPGQAPRLLIYGASSRATGIPDRFSGSGSGTDFTLTISRLEPEDFAVYYCQQYGSSPWTFGQGTKVEIK

SEQ ID NO: 2839 - protein, 118 aa, Artificial Sequence; identical to SEQ ID NO: 2614
  Description of Artificial Sequence: Synthetic polypeptide
  VH of XENP020431

SEQ ID NO: 2840 - protein, 108 aa, Artificial Sequence; identical to SEQ ID NO: 2723
  Description of Artificial Sequence: Synthetic polypeptide
  VL of XENP020431

SEQ ID NO: 2841 - protein, 5 aa, Artificial Sequence
  Description of Artificial Sequence: Synthetic peptide
  XENP020431 vhCDR1
SYTMH

SEQ ID NO: 2842 - protein, 17 aa, Artificial Sequence
  Description of Artificial Sequence: Synthetic peptide
  XENP020431 vhCDR2
FISYDGNTKYYADSVKG

SEQ ID NO: 2843 - protein, 9 aa, Artificial Sequence
  Description of Artificial Sequence: Synthetic peptide
  XENP020431 vhCDR3
GGLLGPFDL

SEQ ID NO: 2844 - protein, 12 aa, Artificial Sequence
  Description of Artificial Sequence: Synthetic peptide
  XENP020431 vlCDR1
RASQSVGSSYLA

SEQ ID NO: 2845 - protein, 7 aa, Artificial Sequence
  Description of Artificial Sequence: Synthetic peptide
  XENP020431 vlCDR2
GASSRAT

SEQ ID NO: 2846 - protein, 9 aa, Artificial Sequence
  Description of Artificial Sequence: Synthetic peptide
  XENP020431 vlCDR3
QQYGSSPWT

SEQ ID NO: 2847 - protein, 246 aa, Artificial Sequence
  Description of Artificial Sequence: Synthetic polypeptide
  XENP020432 [CTLA-4]_H3.21_L0.129_scFv(GKPGS)4
EVQLVESGGGLVKPGGSLRLSCAASGFTFSSYTMHWVRQAPGKGLEWVSFISYDGNTKYYADSVKGRFTISRDNAKNSLYLQMNSLRAEDTAVYYCARGGLLGPFDLWGQGTMVTVSSGKPGSGKPGSGKPGSGKPGSEIVLTQSPATLSLSPGERATLSCRASQSVGSSYLAWYQQKPGQAPRLLIYGASSRATGIPDRFSGSGSGTDFTLTISRLEPEDFAVYYCQQYGSSPWTFGQGTKVEIK

SEQ ID NO: 2848 - protein, 118 aa, Artificial Sequence; identical to SEQ ID NO: 2614
  Description of Artificial Sequence: Synthetic polypeptide
  VH of XENP020432

SEQ ID NO: 2849 - protein, 108 aa, Artificial Sequence; identical to SEQ ID NO: 2768
  Description of Artificial Sequence: Synthetic polypeptide
  VL of XENP020432

SEQ ID NO: 2850 - protein, 5 aa, Artificial Sequence
  Description of Artificial Sequence: Synthetic peptide
  XENP020432 vhCDR1
SYTMH

SEQ ID NO: 2851 - protein, 17 aa, Artificial Sequence
  Description of Artificial Sequence: Synthetic peptide
  XENP020432 vhCDR2
FISYDGNTKYYADSVKG

SEQ ID NO: 2852 - protein, 9 aa, Artificial Sequence
  Description of Artificial Sequence: Synthetic peptide
  XENP020432 vhCDR3
GGLLGPFDL

SEQ ID NO: 2853 - protein, 12 aa, Artificial Sequence
  Description of Artificial Sequence: Synthetic peptide
  XENP020432 vlCDR1
RASQSVGSSYLA

SEQ ID NO: 2854 - protein, 7 aa, Artificial Sequence
  Description of Artificial Sequence: Synthetic peptide
  XENP020432 vlCDR2
GASSRAT

SEQ ID NO: 2855 - protein, 9 aa, Artificial Sequence
  Description of Artificial Sequence: Synthetic peptide
  XENP020432 vlCDR3
QQYGSSPWT

SEQ ID NO: 2856 - protein, 246 aa, Artificial Sequence
  Description of Artificial Sequence: Synthetic polypeptide
  XENP020433 [CTLA-4]_H3.21_L0.132_scFv(GKPGS)4
EVQLVESGGGLVKPGGSLRLSCAASGFTFSSYTMHWVRQAPGKGLEWVSFISYDGNTKYYADSVKGRFTISRDNAKNSLYLQMNSLRAEDTAVYYCARGGLLGPFDLWGQGTMVTVSSGKPGSGKPGSGKPGSGKPGSEIVLTQSPATLSLSPGERATLSCRASQSVSSSYLAWYQQKPGQAPRLLIYGASSRATGIPDRFSGSGSGTDFTLTISRLEPEDFAVYYCQQYGSSPWTFGQGTKVEIK

SEQ ID NO: 2857 - protein, 118 aa, Artificial Sequence; identical to SEQ ID NO: 2614
  Description of Artificial Sequence: Synthetic polypeptide
  VH of XENP020433

SEQ ID NO: 2858 - protein, 108 aa, Artificial Sequence; identical to SEQ ID NO: 2795
  Description of Artificial Sequence: Synthetic polypeptide
  VL of XENP020433

SEQ ID NO: 2859 - protein, 5 aa, Artificial Sequence
  Description of Artificial Sequence: Synthetic peptide
  XENP020433 vhCDR1
SYTMH

SEQ ID NO: 2860 - protein, 17 aa, Artificial Sequence
  Description of Artificial Sequence: Synthetic peptide
  XENP020433 vhCDR2
FISYDGNTKYYADSVKG

SEQ ID NO: 2861 - protein, 9 aa, Artificial Sequence
  Description of Artificial Sequence: Synthetic peptide
  XENP020433 vhCDR3
GGLLGPFDL

SEQ ID NO: 2862 - protein, 12 aa, Artificial Sequence
  Description of Artificial Sequence: Synthetic peptide
  XENP020433 vlCDR1
RASQSVSSSYLA

SEQ ID NO: 2863 - protein, 7 aa, Artificial Sequence
  Description of Artificial Sequence: Synthetic peptide
  XENP020433 vlCDR2
GASSRAT

SEQ ID NO: 2864 - protein, 9 aa, Artificial Sequence
  Description of Artificial Sequence: Synthetic peptide
  XENP020433 vlCDR3
QQYGSSPWT

SEQ ID NO: 2865 - protein, 246 aa, Artificial Sequence
  Description of Artificial Sequence: Synthetic polypeptide
  XENP020434 [CTLA-4]_H3.23_L0.124_scFv(GKPGS)4
EVQLVESGGGLVKPGGSLRLSCAASGFTFSSYTMHWVRQAPGKGLEWVSFISYDGNYKYYADSVKGRFTISRDNAKNSLYLQMNSLRAEDTAVYYCARGGHLGPFDLWGQGTMVTVSSGKPGSGKPGSGKPGSGKPGSEIVLTQSPATLSVSPGERATLSCRASQSVGSSYLAWYQQKPGQAPRLLIYGASSRATGIPDRFSGSGSGTDFTLTISRLEPEDFAVYYCQQYGSSPWTFGQGTKVEIK

SEQ ID NO: 2866 - protein, 118 aa, Artificial Sequence; identical to SEQ ID NO: 2632
  Description of Artificial Sequence: Synthetic polypeptide
  VH of XENP020434

SEQ ID NO: 2867 - protein, 108 aa, Artificial Sequence; identical to SEQ ID NO: 2723
  Description of Artificial Sequence: Synthetic polypeptide
  VL of XENP020434

SEQ ID NO: 2868 - protein, 5 aa, Artificial Sequence
  Description of Artificial Sequence: Synthetic peptide
  XENP020434 vhCDR1
SYTMH

SEQ ID NO: 2869 - protein, 17 aa, Artificial Sequence
  Description of Artificial Sequence: Synthetic peptide
  XENP020434 vhCDR2
FISYDGNYKYYADSVKG

SEQ ID NO: 2870 - protein, 9 aa, Artificial Sequence
  Description of Artificial Sequence: Synthetic peptide
  XENP020434 vhCDR3
GGHLGPFDL

SEQ ID NO: 2871 - protein, 12 aa, Artificial Sequence
  Description of Artificial Sequence: Synthetic peptide
  XENP020434 vlCDR1
RASQSVGSSYLA

SEQ ID NO: 2872 - protein, 7 aa, Artificial Sequence
  Description of Artificial Sequence: Synthetic peptide
  XENP020434 vlCDR2
GASSRAT

SEQ ID NO: 2873 - protein, 9 aa, Artificial Sequence
  Description of Artificial Sequence: Synthetic peptide
  XENP020434 vlCDR3
QQYGSSPWT

SEQ ID NO: 2874 - protein, 246 aa, Artificial Sequence
  Description of Artificial Sequence: Synthetic polypeptide
  XENP020435 [CTLA-4]_H3.23_L0.129_scFv(GKPGS)4
EVQLVESGGGLVKPGGSLRLSCAASGFTFSSYTMHWVRQAPGKGLEWVSFISYDGNYKYYADSVKGRFTISRDNAKNSLYLQMNSLRAEDTAVYYCARGGHLGPFDLWGQGTMVTVSSGKPGSGKPGSGKPGSGKPGSEIVLTQSPATLSLSPGERATLSCRASQSVGSSYLAWYQQKPGQAPRLLIYGASSRATGIPDRFSGSGSGTDFTLTISRLEPEDFAVYYCQQYGSSPWTFGQGTKVEIK

SEQ ID NO: 2875 - protein, 118 aa, Artificial Sequence; identical to SEQ ID NO: 2632
  Description of Artificial Sequence: Synthetic polypeptide
  VH of XENP020435

SEQ ID NO: 2876 - protein, 108 aa, Artificial Sequence; identical to SEQ ID NO: 2768
  Description of Artificial Sequence: Synthetic polypeptide
  VL of XENP020435

SEQ ID NO: 2877 - protein, 5 aa, Artificial Sequence
  Description of Artificial Sequence: Synthetic peptide
  XENP020435 vhCDR1
SYTMH

SEQ ID NO: 2878 - protein, 17 aa, Artificial Sequence
  Description of Artificial Sequence: Synthetic peptide
  XENP020435 vhCDR2
FISYDGNYKYYADSVKG

SEQ ID NO: 2879 - protein, 9 aa, Artificial Sequence
  Description of Artificial Sequence: Synthetic peptide
  XENP020435 vhCDR3
GGHLGPFDL

SEQ ID NO: 2880 - protein, 12 aa, Artificial Sequence
  Description of Artificial Sequence: Synthetic peptide
  XENP020435 vlCDR1
RASQSVGSSYLA

SEQ ID NO: 2881 - protein, 7 aa, Artificial Sequence
  Description of Artificial Sequence: Synthetic peptide
  XENP020435 vlCDR2
GASSRAT

SEQ ID NO: 2882 - protein, 9 aa, Artificial Sequence
  Description of Artificial Sequence: Synthetic peptide
  XENP020435 vlCDR3
QQYGSSPWT

SEQ ID NO: 2883 - protein, 246 aa, Artificial Sequence
  Description of Artificial Sequence: Synthetic polypeptide
  XENP020436 [CTLA-4]_H3.23_L0.132_scFv(GKPGS)4
EVQLVESGGGLVKPGGSLRLSCAASGFTFSSYTMHWVRQAPGKGLEWVSFISYDGNYKYYADSVKGRFTISRDNAKNSLYLQMNSLRAEDTAVYYCARGGHLGPFDLWGQGTMVTVSSGKPGSGKPGSGKPGSGKPGSEIVLTQSPATLSLSPGERATLSCRASQSVSSSYLAWYQQKPGQAPRLLIYGASSRATGIPDRFSGSGSGTDFTLTISRLEPEDFAVYYCQQYGSSPWTFGQGTKVEIK

SEQ ID NO: 2884 - protein, 118 aa, Artificial Sequence; identical to SEQ ID NO: 2632
  Description of Artificial Sequence: Synthetic polypeptide
  VH of XENP020436

SEQ ID NO: 2885 - protein, 108 aa, Artificial Sequence; identical to SEQ ID NO: 2795
  Description of Artificial Sequence: Synthetic polypeptide
  VL of XENP020436

SEQ ID NO: 2886 - protein, 5 aa, Artificial Sequence
  Description of Artificial Sequence: Synthetic peptide
  XENP020436 vhCDR1
SYTMH

SEQ ID NO: 2887 - protein, 17 aa, Artificial Sequence
  Description of Artificial Sequence: Synthetic peptide
  XENP020436 vhCDR2
FISYDGNYKYYADSVKG

SEQ ID NO: 2888 - protein, 9 aa, Artificial Sequence
  Description of Artificial Sequence: Synthetic peptide
  XENP020436 vhCDR3
GGHLGPFDL

SEQ ID NO: 2889 - protein, 12 aa, Artificial Sequence
  Description of Artificial Sequence: Synthetic peptide
  XENP020436 vlCDR1
RASQSVSSSYLA

SEQ ID NO: 2890 - protein, 7 aa, Artificial Sequence
  Description of Artificial Sequence: Synthetic peptide
  XENP020436 vlCDR2
GASSRAT

SEQ ID NO: 2891 - protein, 9 aa, Artificial Sequence
  Description of Artificial Sequence: Synthetic peptide
  XENP020436 vlCDR3
QQYGSSPWT

SEQ ID NO: 2892 - protein, 246 aa, Artificial Sequence
  Description of Artificial Sequence: Synthetic polypeptide
  XENP020437 [CTLA-4]_H3.25_L0.124_scFv(GKPGS)4
EVQLVESGGGLVKPGGSLRLSCAASGFTFSSYTMHWVRQAPGKGLEWVSFISYDGNYKYYADSVKGRFTISRDNAKNSLYLQMNSLRAEDTAVYYCARGGLLGPFDLWGQGTMVTVSSGKPGSGKPGSGKPGSGKPGSEIVLTQSPATLSVSPGERATLSCRASQSVGSSYLAWYQQKPGQAPRLLIYGASSRATGIPDRFSGSGSGTDFTLTISRLEPEDFAVYYCQQYGSSPWTFGQGTKVEIK

SEQ ID NO: 2893 - protein, 118 aa, Artificial Sequence; identical to SEQ ID NO: 2650
  Description of Artificial Sequence: Synthetic polypeptide
  VH of XENP020437

SEQ ID NO: 2894 - protein, 108 aa, Artificial Sequence; identical to SEQ ID NO: 2723
  Description of Artificial Sequence: Synthetic polypeptide
  VL of XENP020437

SEQ ID NO: 2895 - protein, 5 aa, Artificial Sequence
  Description of Artificial Sequence: Synthetic peptide
  XENP020437 vhCDR1
SYTMH

SEQ ID NO: 2896 - protein, 17 aa, Artificial Sequence
  Description of Artificial Sequence: Synthetic peptide
  XENP020437 vhCDR2
FISYDGNYKYYADSVKG

SEQ ID NO: 2897 - protein, 9 aa, Artificial Sequence
  Description of Artificial Sequence: Synthetic peptide
  XENP020437 vhCDR3
GGLLGPFDL

SEQ ID NO: 2898 - protein, 12 aa, Artificial Sequence
  Description of Artificial Sequence: Synthetic peptide
  XENP020437 vlCDR1
RASQSVGSSYLA

SEQ ID NO: 2899 - protein, 7 aa, Artificial Sequence
  Description of Artificial Sequence: Synthetic peptide
  XENP020437 vlCDR2
GASSRAT

SEQ ID NO: 2900 - protein, 9 aa, Artificial Sequence
  Description of Artificial Sequence: Synthetic peptide
  XENP020437 vlCDR3
QQYGSSPWT

SEQ ID NO: 2901 - protein, 246 aa, Artificial Sequence
  Description of Artificial Sequence: Synthetic polypeptide
  XENP020438 [CTLA-4]_H3.25_L0.129_scFv(GKPGS)4
EVQLVESGGGLVKPGGSLRLSCAASGFTFSSYTMHWVRQAPGKGLEWVSFISYDGNYKYYADSVKGRFTISRDNAKNSLYLQMNSLRAEDTAVYYCARGGLLGPFDLWGQGTMVTVSSGKPGSGKPGSGKPGSGKPGSEIVLTQSPATLSLSPGERATLSCRASQSVGSSYLAWYQQKPGQAPRLLIYGASSRATGIPDRFSGSGSGTDFTLTISRLEPEDFAVYYCQQYGSSPWTFGQGTKVEIK

SEQ ID NO: 2902 - protein, 118 aa, Artificial Sequence; identical to SEQ ID NO: 2650
  Description of Artificial Sequence: Synthetic polypeptide
  VH of XENP020438

SEQ ID NO: 2903 - protein, 108 aa, Artificial Sequence; identical to SEQ ID NO: 2768
  Description of Artificial Sequence: Synthetic polypeptide
  VL of XENP020438

SEQ ID NO: 2904 - protein, 5 aa, Artificial Sequence
  Description of Artificial Sequence: Synthetic peptide
  XENP020438 vhCDR1
SYTMH

SEQ ID NO: 2905 - protein, 17 aa, Artificial Sequence
  Description of Artificial Sequence: Synthetic peptide
  XENP020438 vhCDR2
FISYDGNYKYYADSVKG

SEQ ID NO: 2906 - protein, 9 aa, Artificial Sequence
  Description of Artificial Sequence: Synthetic peptide
  XENP020438 vhCDR3
GGLLGPFDL

SEQ ID NO: 2907 - protein, 12 aa, Artificial Sequence
  Description of Artificial Sequence: Synthetic peptide
  XENP020438 vlCDR1
RASQSVGSSYLA

SEQ ID NO: 2908 - protein, 7 aa, Artificial Sequence
  Description of Artificial Sequence: Synthetic peptide
  XENP020438 vlCDR2
GASSRAT

SEQ ID NO: 2909 - protein, 9 aa, Artificial Sequence
  Description of Artificial Sequence: Synthetic peptide
  XENP020438 vlCDR3
QQYGSSPWT

SEQ ID NO: 2910 - protein, 246 aa, Artificial Sequence
  Description of Artificial Sequence: Synthetic polypeptide
  XENP020439 [CTLA-4]_H3.25_L0.132_scFv(GKPGS)4
EVQLVESGGGLVKPGGSLRLSCAASGFTFSSYTMHWVRQAPGKGLEWVSFISYDGNYKYYADSVKGRFTISRDNAKNSLYLQMNSLRAEDTAVYYCARGGLLGPFDLWGQGTMVTVSSGKPGSGKPGSGKPGSGKPGSEIVLTQSPATLSLSPGERATLSCRASQSVSSSYLAWYQQKPGQAPRLLIYGASSRATGIPDRFSGSGSGTDFTLTISRLEPEDFAVYYCQQYGSSPWTFGQGTKVEIK

SEQ ID NO: 2911 - protein, 118 aa, Artificial Sequence; identical to SEQ ID NO: 2650
  Description of Artificial Sequence: Synthetic polypeptide
  VH of XENP020439

SEQ ID NO: 2912 - protein, 108 aa, Artificial Sequence; identical to SEQ ID NO: 2795
  Description of Artificial Sequence: Synthetic polypeptide
  VL of XENP020439

SEQ ID NO: 2913 - protein, 5 aa, Artificial Sequence
  Description of Artificial Sequence: Synthetic peptide
  XENP020439 vhCDR1
SYTMH

SEQ ID NO: 2914 - protein, 17 aa, Artificial Sequence
  Description of Artificial Sequence: Synthetic peptide
  XENP020439 vhCDR2
FISYDGNYKYYADSVKG

SEQ ID NO: 2915 - protein, 9 aa, Artificial Sequence
  Description of Artificial Sequence: Synthetic peptide
  XENP020439 vhCDR3
GGLLGPFDL

SEQ ID NO: 2916 - protein, 12 aa, Artificial Sequence
  Description of Artificial Sequence: Synthetic peptide
  XENP020439 vlCDR1
RASQSVSSSYLA

SEQ ID NO: 2917 - protein, 7 aa, Artificial Sequence
  Description of Artificial Sequence: Synthetic peptide
  XENP020439 vlCDR2
GASSRAT

SEQ ID NO: 2918 - protein, 9 aa, Artificial Sequence
  Description of Artificial Sequence: Synthetic peptide
  XENP020439 vlCDR3
QQYGSSPWT

SEQ ID NO: 2919 - protein, 221 aa, Artificial Sequence
  Description of Artificial Sequence: Synthetic polypeptide
  XENP009950 [CTLA-4]_H0_L0_Fab_Heavy Chain
QVQLVESGGGVVQPGRSLRLSCAASGFTFSSYTMHWVRQAPGKGLEWVTFISYDGNNKYYADSVKGRFTISRDNSKNTLYLQMNSLRAEDTAIYYCARTGWLGPFDYWGQGTLVTVSSASTKGPSVFPLAPSSKSTSGGTAALGCLVKDYFPEPVTVSWNSGALTSGVHTFPAVLQSSGLYSLSSVVTVPSSSLGTQTYICNVNHKPSNTKVDKKVEPKSC

SEQ ID NO: 2920 - protein, 118 aa, Artificial Sequence; identical to SEQ ID NO: 22
  Description of Artificial Sequence: Synthetic polypeptide
  VH of XENP009950

SEQ ID NO: 2921 - protein, 5 aa, Artificial Sequence
  Description of Artificial Sequence: Synthetic peptide
  XENP009950 vhCDR1
SYTMH

SEQ ID NO: 2922 - protein, 17 aa, Artificial Sequence
  Description of Artificial Sequence: Synthetic peptide
  XENP009950 vhCDR2
FISYDGNNKYYADSVKG

SEQ ID NO: 2923 - protein, 9 aa, Artificial Sequence
  Description of Artificial Sequence: Synthetic peptide
  XENP009950 vhCDR3
TGWLGPFDY

SEQ ID NO: 2924 - protein, 215 aa, Artificial Sequence
  Description of Artificial Sequence: Synthetic polypeptide
  XENP009950 [CTLA-4]_H0_L0_Fab Light Chain
EIVLTQSPGTLSLSPGERATLSCRASQSVGSSYLAWYQQKPGQAPRLLIYGAFSRATGIPDRFSGSGSGTDFTLTISRLEPEDFAVYYCQQYGSSPWTFGQGTKVEIKRTVAAPSVFIFPPSDEQLKSGTASVVCLLNNFYPREAKVQWKVDNALQSGNSQESVTEQDSKDSTYSLSSTLTLSKADYEKHKVYACEVTHQGLSSPVTKSFNRGEC

SEQ ID NO: 2925 - protein, 108 aa, Artificial Sequence; identical to SEQ ID NO: 23
  Description of Artificial Sequence: Synthetic polypeptide
  VL of XENP009950

SEQ ID NO: 2926 - protein, 12 aa, Artificial Sequence
  Description of Artificial Sequence: Synthetic peptide
  XENP009950 vlCDR1
RASQSVGSSYLA

SEQ ID NO: 2927 - protein, 7 aa, Artificial Sequence
  Description of Artificial Sequence: Synthetic peptide
  XENP009950 vlCDR2
GAFSRAT

SEQ ID NO: 2928 - protein, 9 aa, Artificial Sequence
  Description of Artificial Sequence: Synthetic peptide
  XENP009950 vlCDR3
QQYGSSPWT

SEQ ID NO: 2929 - protein, 221 aa, Artificial Sequence
  Description of Artificial Sequence: Synthetic polypeptide
  XENP019211 [CTLA-4]_H0.1_L0_Fab Heavy Chain
EVQLVESGGGVVQPGRSLRLSCAASGFTFSSYTMHWVRQAPGKGLEWVTFISYDGNNKYYADSVKGRFTISRDNSKNTLYLQMNSLRAEDTAIYYCARTGWLGPFDYWGQGTLVTVSSASTKGPSVFPLAPSSKSTSGGTAALGCLVKDYFPEPVTVSWNSGALTSGVHTFPAVLQSSGLYSLSSVVTVPSSSLGTQTYICNVNHKPSNTKVDKKVEPKSC

SEQ ID NO: 2930 - protein, 118 aa, Artificial Sequence; identical to SEQ ID NO: 193
  Description of Artificial Sequence: Synthetic polypeptide
  VH of XENP019211

SEQ ID NO: 2931 - protein, 5 aa, Artificial Sequence
  Description of Artificial Sequence: Synthetic peptide
  XENP019211 vhCDR1
SYTMH

SEQ ID NO: 2932 - protein, 17 aa, Artificial Sequence
  Description of Artificial Sequence: Synthetic peptide
  XENP019211 vhCDR2
FISYDGNNKYYADSVKG

SEQ ID NO: 2933 - protein, 9 aa, Artificial Sequence
  Description of Artificial Sequence: Synthetic peptide
  XENP019211 vhCDR3
TGWLGPFDY

SEQ ID NO: 2934 - protein, 215 aa, Artificial Sequence; identical to SEQ ID NO: 2924
  Description of Artificial Sequence: Synthetic polypeptide
  XENP019211 [CTLA-4]_H0.1_L0_Fab Light Chain

SEQ ID NO: 2935 - protein, 108 aa, Artificial Sequence; identical to SEQ ID NO: 23
  Description of Artificial Sequence: Synthetic polypeptide
  VL of XENP019211

SEQ ID NO: 2936 - protein, 12 aa, Artificial Sequence
  Description of Artificial Sequence: Synthetic peptide
  XENP019211 vlCDR1
RASQSVGSSYLA

SEQ ID NO: 2937 - protein, 7 aa, Artificial Sequence
  Description of Artificial Sequence: Synthetic peptide
  XENP019211 vlCDR2
GAFSRAT

SEQ ID NO: 2938 - protein, 9 aa, Artificial Sequence
  Description of Artificial Sequence: Synthetic peptide
  XENP019211 vlCDR3
QQYGSSPWT

SEQ ID NO: 2939 - protein, 221 aa, Artificial Sequence
  Description of Artificial Sequence: Synthetic polypeptide
  XENP019212 [CTLA-4]_H0.2_L0_Fab Heavy Chain
QVQLLESGGGVVQPGRSLRLSCAASGFTFSSYTMHWVRQAPGKGLEWVTFISYDGNNKYYADSVKGRFTISRDNSKNTLYLQMNSLRAEDTAIYYCARTGWLGPFDYWGQGTLVTVSSASTKGPSVFPLAPSSKSTSGGTAALGCLVKDYFPEPVTVSWNSGALTSGVHTFPAVLQSSGLYSLSSVVTVPSSSLGTQTYICNVNHKPSNTKVDKKVEPKSC

SEQ ID NO: 2940 - protein, 118 aa, Artificial Sequence; identical to SEQ ID NO: 202
  Description of Artificial Sequence: Synthetic polypeptide
  VH of XENP019212

SEQ ID NO: 2941 - protein, 5 aa, Artificial Sequence
  Description of Artificial Sequence: Synthetic peptide
  XENP019212 vhCDR1
SYTMH

SEQ ID NO: 2942 - protein, 17 aa, Artificial Sequence
  Description of Artificial Sequence: Synthetic peptide
  XENP019212 vhCDR2
FISYDGNNKYYADSVKG

SEQ ID NO: 2943 - protein, 9 aa, Artificial Sequence
  Description of Artificial Sequence: Synthetic peptide
  XENP019212 vhCDR3
TGWLGPFDY

SEQ ID NO: 2944 - protein, 215 aa, Artificial Sequence; identical to SEQ ID NO: 2924
  Description of Artificial Sequence: Synthetic polypeptide
  XENP019212 [CTLA-4]_H0.2_L0_Fab Light Chain

SEQ ID NO: 2945 - protein, 108 aa, Artificial Sequence; identical to SEQ ID NO: 23
  Description of Artificial Sequence: Synthetic polypeptide
  VL of XENP019212

SEQ ID NO: 2946 - protein, 12 aa, Artificial Sequence
  Description of Artificial Sequence: Synthetic peptide
  XENP019212 vlCDR1
RASQSVGSSYLA

SEQ ID NO: 2947 - protein, 7 aa, Artificial Sequence
  Description of Artificial Sequence: Synthetic peptide
  XENP019212 vlCDR2
GAFSRAT

SEQ ID NO: 2948 - protein, 9 aa, Artificial Sequence
  Description of Artificial Sequence: Synthetic peptide
  XENP019212 vlCDR3
QQYGSSPWT

SEQ ID NO: 2949 - protein, 221 aa, Artificial Sequence
  Description of Artificial Sequence: Synthetic polypeptide
  XENP019213 [CTLA-4]_H0.3_L0_Fab Heavy Chain
QVQLVESGGGLVQPGRSLRLSCAASGFTFSSYTMHWVRQAPGKGLEWVTFISYDGNNKYYADSVKGRFTISRDNSKNTLYLQMNSLRAEDTAIYYCARTGWLGPFDYWGQGTLVTVSSASTKGPSVFPLAPSSKSTSGGTAALGCLVKDYFPEPVTVSWNSGALTSGVHTFPAVLQSSGLYSLSSVVTVPSSSLGTQTYICNVNHKPSNTKVDKKVEPKSC

SEQ ID NO: 2950 - protein, 118 aa, Artificial Sequence; identical to SEQ ID NO: 211
  Description of Artificial Sequence: Synthetic polypeptide
  VH of XENP019213

SEQ ID NO: 2951 - protein, 5 aa, Artificial Sequence
  Description of Artificial Sequence: Synthetic peptide
  XENP019213 vhCDR1
SYTMH

SEQ ID NO: 2952 - protein, 17 aa, Artificial Sequence
  Description of Artificial Sequence: Synthetic peptide
  XENP019213 vhCDR2
FISYDGNNKYYADSVKG

SEQ ID NO: 2953 - protein, 9 aa, Artificial Sequence
  Description of Artificial Sequence: Synthetic peptide
  XENP019213 vhCDR3
TGWLGPFDY

SEQ ID NO: 2954 - protein, 215 aa, Artificial Sequence; identical to SEQ ID NO: 2924
  Description of Artificial Sequence: Synthetic polypeptide
  XENP019213 [CTLA-4]_H0.3_L0_Fab Light Chain

SEQ ID NO: 2955 - protein, 108 aa, Artificial Sequence; identical to SEQ ID NO: 23
  Description of Artificial Sequence: Synthetic polypeptide
  VL of XENP019213

SEQ ID NO: 2956 - protein, 12 aa, Artificial Sequence
  Description of Artificial Sequence: Synthetic peptide
  XENP019213 vlCDR1
RASQSVGSSYLA

SEQ ID NO: 2957 - protein, 7 aa, Artificial Sequence
  Description of Artificial Sequence: Synthetic peptide
  XENP019213 vlCDR2
GAFSRAT

SEQ ID NO: 2958 - protein, 9 aa, Artificial Sequence
  Description of Artificial Sequence: Synthetic peptide
  XENP019213 vlCDR3
QQYGSSPWT

SEQ ID NO: 2959 - protein, 221 aa, Artificial Sequence
  Description of Artificial Sequence: Synthetic polypeptide
  XENP019214 [CTLA-4]_H0.4_L0_Fab Heavy Chain
QVQLVESGGGVKQPGRSLRLSCAASGFTFSSYTMHWVRQAPGKGLEWVTFISYDGNNKYYADSVKGRFTISRDNSKNTLYLQMNSLRAEDTAIYYCARTGWLGPFDYWGQGTLVTVSSASTKGPSVFPLAPSSKSTSGGTAALGCLVKDYFPEPVTVSWNSGALTSGVHTFPAVLQSSGLYSLSSVVTVPSSSLGTQTYICNVNHKPSNTKVDKKVEPKSC

SEQ ID NO: 2960 - protein, 118 aa, Artificial Sequence; identical to SEQ ID NO: 220
  Description of Artificial Sequence: Synthetic polypeptide
  VH of XENP019214

SEQ ID NO: 2961 - protein, 5 aa, Artificial Sequence
  Description of Artificial Sequence: Synthetic peptide
  XENP019214 vhCDR1
SYTMH

SEQ ID NO: 2962 - protein, 17 aa, Artificial Sequence
  Description of Artificial Sequence: Synthetic peptide
  XENP019214 vhCDR2
FISYDGNNKYYADSVKG

SEQ ID NO: 2963 - protein, 9 aa, Artificial Sequence
  Description of Artificial Sequence: Synthetic peptide
  XENP019214 vhCDR3
TGWLGPFDY

SEQ ID NO: 2964 - protein, 215 aa, Artificial Sequence; identical to SEQ ID NO: 2924
  Description of Artificial Sequence: Synthetic polypeptide
  XENP019214 [CTLA-4]_H0.4_L0_Fab Light Chain

SEQ ID NO: 2965 - protein, 108 aa, Artificial Sequence; identical to SEQ ID NO: 23
  Description of Artificial Sequence: Synthetic polypeptide
  VL of XENP019214

SEQ ID NO: 2966 - protein, 12 aa, Artificial Sequence
  Description of Artificial Sequence: Synthetic peptide
  XENP019214 vlCDR1
RASQSVGSSYLA

SEQ ID NO: 2967 - protein, 7 aa, Artificial Sequence
  Description of Artificial Sequence: Synthetic peptide
  XENP019214 vlCDR2
GAFSRAT

SEQ ID NO: 2968 - protein, 9 aa, Artificial Sequence
  Description of Artificial Sequence: Synthetic peptide
  XENP019214 vlCDR3
QQYGSSPWT

SEQ ID NO: 2969 - protein, 221 aa, Artificial Sequence
  Description of Artificial Sequence: Synthetic polypeptide
  XENP019215 [CTLA-4]_H0.5_L0_Fab Heavy Chain
QVQLVESGGGVKQPGESLRLSCAASGFTFSSYTMHWVRQAPGKGLEWVTFISYDGNNKYYADSVKGRFTISRDNSKNTLYLQMNSLRAEDTAIYYCARTGWLGPFDYWGQGTLVTVSSASTKGPSVFPLAPSSKSTSGGTAALGCLVKDYFPEPVTVSWNSGALTSGVHTFPAVLQSSGLYSLSSVVTVPSSSLGTQTYICNVNHKPSNTKVDKKVEPKSC

SEQ ID NO: 2970 - protein, 118 aa, Artificial Sequence; identical to SEQ ID NO: 229
  Description of Artificial Sequence: Synthetic polypeptide
  VH of XENP019215

SEQ ID NO: 2971 - protein, 5 aa, Artificial Sequence
  Description of Artificial Sequence: Synthetic peptide
  XENP019215 vhCDR1
SYTMH

SEQ ID NO: 2972 - protein, 17 aa, Artificial Sequence
  Description of Artificial Sequence: Synthetic peptide
  XENP019215 vhCDR2
FISYDGNNKYYADSVKG

SEQ ID NO: 2973 - protein, 9 aa, Artificial Sequence
  Description of Artificial Sequence: Synthetic peptide
  XENP019215 vhCDR3
TGWLGPFDY

SEQ ID NO: 2974 - protein, 215 aa, Artificial Sequence; identical to SEQ ID NO: 2924
  Description of Artificial Sequence: Synthetic polypeptide
  XENP019215 [CTLA-4]_H0.5_L0_Fab Light Chain

SEQ ID NO: 2975 - protein, 108 aa, Artificial Sequence; identical to SEQ ID NO: 23
  Description of Artificial Sequence: Synthetic polypeptide
  VL of XENP019215

SEQ ID NO: 2976 - protein, 12 aa, Artificial Sequence
  Description of Artificial Sequence: Synthetic peptide
  XENP019215 vlCDR1
RASQSVGSSYLA

SEQ ID NO: 2977 - protein, 7 aa, Artificial Sequence
  Description of Artificial Sequence: Synthetic peptide
  XENP019215 vlCDR2
GAFSRAT

SEQ ID NO: 2978 - protein, 9 aa, Artificial Sequence
  Description of Artificial Sequence: Synthetic peptide
  XENP019215 vlCDR3
QQYGSSPWT

SEQ ID NO: 2979 - protein, 221 aa, Artificial Sequence
  Description of Artificial Sequence: Synthetic polypeptide
  XENP019216 [CTLA-4]_H0.6_L0_Fab Heavy Chain
QVQLVESGGGVVKPGRSLRLSCAASGFTFSSYTMHWVRQAPGKGLEWVTFISYDGNNKYYADSVKGRFTISRDNSKNTLYLQMNSLRAEDTAIYYCARTGWLGPFDYWGQGTLVTVSSASTKGPSVFPLAPSSKSTSGGTAALGCLVKDYFPEPVTVSWNSGALTSGVHTFPAVLQSSGLYSLSSVVTVPSSSLGTQTYICNVNHKPSNTKVDKKVEPKSC

SEQ ID NO: 2980 - protein, 118 aa, Artificial Sequence; identical to SEQ ID NO: 238
  Description of Artificial Sequence: Synthetic polypeptide
  VH of XENP019216

SEQ ID NO: 2981 - protein, 5 aa, Artificial Sequence
  Description of Artificial Sequence: Synthetic peptide
  XENP019216 vhCDR1
SYTMH

SEQ ID NO: 2982 - protein, 17 aa, Artificial Sequence
  Description of Artificial Sequence: Synthetic peptide
  XENP019216 vhCDR2
FISYDGNNKYYADSVKG

SEQ ID NO: 2983 - protein, 9 aa, Artificial Sequence
  Description of Artificial Sequence: Synthetic peptide
  XENP019216 vhCDR3
TGWLGPFDY

SEQ ID NO: 2984 - protein, 215 aa, Artificial Sequence; identical to SEQ ID NO: 2924
  Description of Artificial Sequence: Synthetic polypeptide
  XENP019216 [CTLA-4]_H0.6_L0_Fab Light Chain

SEQ ID NO: 2985 - protein, 108 aa, Artificial Sequence; identical to SEQ ID NO: 23
  Description of Artificial Sequence: Synthetic polypeptide
  VL of XENP019216

SEQ ID NO: 2986 - protein, 12 aa, Artificial Sequence
  Description of Artificial Sequence: Synthetic peptide
  XENP019216 vlCDR1
RASQSVGSSYLA

SEQ ID NO: 2987 - protein, 7 aa, Artificial Sequence
  Description of Artificial Sequence: Synthetic peptide
  XENP019216 vlCDR2
GAFSRAT

SEQ ID NO: 2988 - protein, 9 aa, Artificial Sequence
  Description of Artificial Sequence: Synthetic peptide
  XENP019216 vlCDR3
QQYGSSPWT

SEQ ID NO: 2989 - protein, 221 aa, Artificial Sequence
  Description of Artificial Sequence: Synthetic polypeptide
  XENP019217 [CTLA-4]_H0.7_L0_Fab Heavy Chain
QVQLVESGGGVVEPGRSLRLSCAASGFTFSSYTMHWVRQAPGKGLEWVTFISYDGNNKYYADSVKGRFTISRDNSKNTLYLQMNSLRAEDTAIYYCARTGWLGPFDYWGQGTLVTVSSASTKGPSVFPLAPSSKSTSGGTAALGCLVKDYFPEPVTVSWNSGALTSGVHTFPAVLQSSGLYSLSSVVTVPSSSLGTQTYICNVNHKPSNTKVDKKVEPKSC

SEQ ID NO: 2990 - protein, 118 aa, Artificial Sequence; identical to SEQ ID NO: 247
  Description of Artificial Sequence: Synthetic polypeptide
  VH of XENP019217

SEQ ID NO: 2991 - protein, 5 aa, Artificial Sequence
  Description of Artificial Sequence: Synthetic peptide
  XENP019217 vhCDR1
SYTMH

SEQ ID NO: 2992 - protein, 17 aa, Artificial Sequence
  Description of Artificial Sequence: Synthetic peptide
  XENP019217 vhCDR2
FISYDGNNKYYADSVKG

SEQ ID NO: 2993 - protein, 9 aa, Artificial Sequence
  Description of Artificial Sequence: Synthetic peptide
  XENP019217 vhCDR3
TGWLGPFDY

SEQ ID NO: 2994 - protein, 215 aa, Artificial Sequence; identical to SEQ ID NO: 2924
  Description of Artificial Sequence: Synthetic polypeptide
  XENP019217 [CTLA-4]_H0.7_L0_Fab Light Chain

SEQ ID NO: 2995 - protein, 108 aa, Artificial Sequence; identical to SEQ ID NO: 23
  Description of Artificial Sequence: Synthetic polypeptide
  VL of XENP019217

SEQ ID NO: 2996 - protein, 12 aa, Artificial Sequence
  Description of Artificial Sequence: Synthetic peptide
  XENP019217 vlCDR1
RASQSVGSSYLA

SEQ ID NO: 2997 - protein, 7 aa, Artificial Sequence
  Description of Artificial Sequence: Synthetic peptide
  XENP019217 vlCDR2
GAFSRAT

SEQ ID NO: 2998 - protein, 9 aa, Artificial Sequence
  Description of Artificial Sequence: Synthetic peptide
  XENP019217 vlCDR3
QQYGSSPWT

SEQ ID NO: 2999 - protein, 221 aa, Artificial Sequence
  Description of Artificial Sequence: Synthetic polypeptide
  XENP019218 [CTLA-4]_H0.8_L0_Fab Heavy Chain
QVQLVESGGGVVQPGGSLRLSCAASGFTFSSYTMHWVRQAPGKGLEWVTFISYDGNNKYYADSVKGRFTISRDNSKNTLYLQMNSLRAEDTAIYYCARTGWLGPFDYWGQGTLVTVSSASTKGPSVFPLAPSSKSTSGGTAALGCLVKDYFPEPVTVSWNSGALTSGVHTFPAVLQSSGLYSLSSVVTVPSSSLGTQTYICNVNHKPSNTKVDKKVEPKSC

SEQ ID NO: 3000 - protein, 118 aa, Artificial Sequence; identical to SEQ ID NO: 256
  Description of Artificial Sequence: Synthetic polypeptide
  VH of XENP019218

SEQ ID NO: 3001 - protein, 5 aa, Artificial Sequence
  Description of Artificial Sequence: Synthetic peptide
  XENP019218 vhCDR1
SYTMH

SEQ ID NO: 3002 - protein, 17 aa, Artificial Sequence
  Description of Artificial Sequence: Synthetic peptide
  XENP019218 vhCDR2
FISYDGNNKYYADSVKG

SEQ ID NO: 3003 - protein, 9 aa, Artificial Sequence
  Description of Artificial Sequence: Synthetic peptide
  XENP019218 vhCDR3
TGWLGPFDY

SEQ ID NO: 3004 - protein, 215 aa, Artificial Sequence; identical to SEQ ID NO: 2924
  Description of Artificial Sequence: Synthetic polypeptide
  XENP019218 [CTLA-4]_H0.8_L0_Fab Light Chain

SEQ ID NO: 3005 - protein, 108 aa, Artificial Sequence; identical to SEQ ID NO: 23
  Description of Artificial Sequence: Synthetic polypeptide
  VL of XENP019218

SEQ ID NO: 3006 - protein, 12 aa, Artificial Sequence
  Description of Artificial Sequence: Synthetic peptide
  XENP019218 vlCDR1
RASQSVGSSYLA

SEQ ID NO: 3007 - protein, 7 aa, Artificial Sequence
  Description of Artificial Sequence: Synthetic peptide
  XENP019218 vlCDR2
GAFSRAT

SEQ ID NO: 3008 - protein, 9 aa, Artificial Sequence
  Description of Artificial Sequence: Synthetic peptide
  XENP019218 vlCDR3
QQYGSSPWT

SEQ ID NO: 3009 - protein, 221 aa, Artificial Sequence
  Description of Artificial Sequence: Synthetic polypeptide
  XENP019219 [CTLA-4]_H0.9_L0_Fab Heavy Chain
QVQLVESGGGVVQPGESLRLSCAASGFTFSSYTMHWVRQAPGKGLEWVTFISYDGNNKYYADSVKGRFTISRDNSKNTLYLQMNSLRAEDTAIYYCARTGWLGPFDYWGQGTLVTVSSASTKGPSVFPLAPSSKSTSGGTAALGCLVKDYFPEPVTVSWNSGALTSGVHTFPAVLQSSGLYSLSSVVTVPSSSLGTQTYICNVNHKPSNTKVDKKVEPKSC

SEQ ID NO: 3010 - protein, 118 aa, Artificial Sequence; identical to SEQ ID NO: 265
  Description of Artificial Sequence: Synthetic polypeptide
  VH of XENP019219

SEQ ID NO: 3011 - protein, 5 aa, Artificial Sequence
  Description of Artificial Sequence: Synthetic peptide
  XENP019219 vhCDR1
SYTMH

SEQ ID NO: 3012 - protein, 17 aa, Artificial Sequence
  Description of Artificial Sequence: Synthetic peptide
  XENP019219 vhCDR2
FISYDGNNKYYADSVKG

SEQ ID NO: 3013 - protein, 9 aa, Artificial Sequence
  Description of Artificial Sequence: Synthetic peptide
  XENP019219 vhCDR3
TGWLGPFDY

SEQ ID NO: 3014 - protein, 215 aa, Artificial Sequence; identical to SEQ ID NO: 2924
  Description of Artificial Sequence: Synthetic polypeptide
  XENP019219 [CTLA-4]_H0.9_L0_Fab Light Chain

SEQ ID NO: 3015 - protein, 108 aa, Artificial Sequence; identical to SEQ ID NO: 23
  Description of Artificial Sequence: Synthetic polypeptide
  VL of XENP019219

SEQ ID NO: 3016 - protein, 12 aa, Artificial Sequence
  Description of Artificial Sequence: Synthetic peptide
  XENP019219 vlCDR1
RASQSVGSSYLA

SEQ ID NO: 3017 - protein, 7 aa, Artificial Sequence
  Description of Artificial Sequence: Synthetic peptide
  XENP019219 vlCDR2
GAFSRAT

SEQ ID NO: 3018 - protein, 9 aa, Artificial Sequence
  Description of Artificial Sequence: Synthetic peptide
  XENP019219 vlCDR3
QQYGSSPWT

SEQ ID NO: 3019 - protein, 221 aa, Artificial Sequence
  Description of Artificial Sequence: Synthetic polypeptide
  XENP019220 [CTLA-4]_H0.10_L0_Fab Heavy Chain
QVQLVESGGGVVQPGRSLKLSCAASGFTFSSYTMHWVRQAPGKGLEWVTFISYDGNNKYYADSVKGRFTISRDNSKNTLYLQMNSLRAEDTAIYYCARTGWLGPFDYWGQGTLVTVSSASTKGPSVFPLAPSSKSTSGGTAALGCLVKDYFPEPVTVSWNSGALTSGVHTFPAVLQSSGLYSLSSVVTVPSSSLGTQTYICNVNHKPSNTKVDKKVEPKSC

SEQ ID NO: 3020 - protein, 118 aa, Artificial Sequence; identical to SEQ ID NO: 274
  Description of Artificial Sequence: Synthetic polypeptide
  VH of XENP019220

SEQ ID NO: 3021 - protein, 5 aa, Artificial Sequence
  Description of Artificial Sequence: Synthetic peptide
  XENP019220 vhCDR1
SYTMH

SEQ ID NO: 3022 - protein, 17 aa, Artificial Sequence
  Description of Artificial Sequence: Synthetic peptide
  XENP019220 vhCDR2
FISYDGNNKYYADSVKG

SEQ ID NO: 3023 - protein, 9 aa, Artificial Sequence
  Description of Artificial Sequence: Synthetic peptide
  XENP019220 vhCDR3
TGWLGPFDY

SEQ ID NO: 3024 - protein, 215 aa, Artificial Sequence; identical to SEQ ID NO: 2924
  Description of Artificial Sequence: Synthetic polypeptide
  XENP019220 [CTLA-4]_H0.10_L0_Fab Light Chain

SEQ ID NO: 3025 - protein, 108 aa, Artificial Sequence; identical to SEQ ID NO: 23
  Description of Artificial Sequence: Synthetic polypeptide
  VL of XENP019220

SEQ ID NO: 3026 - protein, 12 aa, Artificial Sequence
  Description of Artificial Sequence: Synthetic peptide
  XENP019220 vlCDR1
RASQSVGSSYLA

SEQ ID NO: 3027 - protein, 7 aa, Artificial Sequence
  Description of Artificial Sequence: Synthetic peptide
  XENP019220 vlCDR2
GAFSRAT

SEQ ID NO: 3028 - protein, 9 aa, Artificial Sequence
  Description of Artificial Sequence: Synthetic peptide
  XENP019220 vlCDR3
QQYGSSPWT

SEQ ID NO: 3029 - protein, 221 aa, Artificial Sequence
  Description of Artificial Sequence: Synthetic polypeptide
  XENP019221 [CTLA-4]_H0.11_L0_Fab Heavy Chain
QVQLVESGGGVVQPGRSLRLSCAASGFTVSSYTMHWVRQAPGKGLEWVTFISYDGNNKYYADSVKGRFTISRDNSKNTLYLQMNSLRAEDTAIYYCARTGWLGPFDYWGQGTLVTVSSASTKGPSVFPLAPSSKSTSGGTAALGCLVKDYFPEPVTVSWNSGALTSGVHTFPAVLQSSGLYSLSSVVTVPSSSLGTQTYICNVNHKPSNTKVDKKVEPKSC

SEQ ID NO: 3030 - protein, 118 aa, Artificial Sequence; identical to SEQ ID NO: 283
  Description of Artificial Sequence: Synthetic polypeptide
  VH of XENP019221

SEQ ID NO: 3031 - protein, 5 aa, Artificial Sequence
  Description of Artificial Sequence: Synthetic peptide
  XENP019221 vhCDR1
SYTMH

SEQ ID NO: 3032 - protein, 17 aa, Artificial Sequence
  Description of Artificial Sequence: Synthetic peptide
  XENP019221 vhCDR2
FISYDGNNKYYADSVKG

SEQ ID NO: 3033 - protein, 9 aa, Artificial Sequence
  Description of Artificial Sequence: Synthetic peptide
  XENP019221 vhCDR3
TGWLGPFDY

SEQ ID NO: 3034 - protein, 215 aa, Artificial Sequence; identical to SEQ ID NO: 2924
  Description of Artificial Sequence: Synthetic polypeptide
  XENP019221 [CTLA-4]_H0.11_L0_Fab Light Chain

SEQ ID NO: 3035 - protein, 108 aa, Artificial Sequence; identical to SEQ ID NO: 23
  Description of Artificial Sequence: Synthetic polypeptide
  VL of XENP019221

SEQ ID NO: 3036 - protein, 12 aa, Artificial Sequence
  Description of Artificial Sequence: Synthetic peptide
  XENP019221 vlCDR1
RASQSVGSSYLA

SEQ ID NO: 3037 - protein, 7 aa, Artificial Sequence
  Description of Artificial Sequence: Synthetic peptide
  XENP019221 vlCDR2
GAFSRAT

SEQ ID NO: 3038 - protein, 9 aa, Artificial Sequence
  Description of Artificial Sequence: Synthetic peptide
  XENP019221 vlCDR3
QQYGSSPWT

SEQ ID NO: 3039 - protein, 221 aa, Artificial Sequence
  Description of Artificial Sequence: Synthetic polypeptide
  XENP019222 [CTLA-4]_H0.12_L0_Fab Heavy Chain
QVQLVESGGGVVQPGRSLRLSCAASGFTFSAYTMHWVRQAPGKGLEWVTFISYDGNNKYYADSVKGRFTISRDNSKNTLYLQMNSLRAEDTAIYYCARTGWLGPFDYWGQGTLVTVSSASTKGPSVFPLAPSSKSTSGGTAALGCLVKDYFPEPVTVSWNSGALTSGVHTFPAVLQSSGLYSLSSVVTVPSSSLGTQTYICNVNHKPSNTKVDKKVEPKSC

SEQ ID NO: 3040 - protein, 118 aa, Artificial Sequence; identical to SEQ ID NO: 292
  Description of Artificial Sequence: Synthetic polypeptide
  VH of XENP019222

SEQ ID NO: 3041 - protein, 5 aa, Artificial Sequence
  Description of Artificial Sequence: Synthetic peptide
  XENP019222 vhCDR1
AYTMH

SEQ ID NO: 3042 - protein, 17 aa, Artificial Sequence
  Description of Artificial Sequence: Synthetic peptide
  XENP019222 vhCDR2
FISYDGNNKYYADSVKG

SEQ ID NO: 3043 - protein, 9 aa, Artificial Sequence
  Description of Artificial Sequence: Synthetic peptide
  XENP019222 vhCDR3
TGWLGPFDY

SEQ ID NO: 3044 - protein, 215 aa, Artificial Sequence; identical to SEQ ID NO: 2924
  Description of Artificial Sequence: Synthetic polypeptide
  XENP019222 [CTLA-4]_H0.12_L0_Fab Light Chain

SEQ ID NO: 3045 - protein, 108 aa, Artificial Sequence; identical to SEQ ID NO: 23
  Description of Artificial Sequence: Synthetic polypeptide
  VL of XENP019222

SEQ ID NO: 3046 - protein, 12 aa, Artificial Sequence
  Description of Artificial Sequence: Synthetic peptide
  XENP019222 vlCDR1
RASQSVGSSYLA

SEQ ID NO: 3047 - protein, 7 aa, Artificial Sequence
  Description of Artificial Sequence: Synthetic peptide
  XENP019222 vlCDR2
GAFSRAT

SEQ ID NO: 3048 - protein, 9 aa, Artificial Sequence
  Description of Artificial Sequence: Synthetic peptide
  XENP019222 vlCDR3
QQYGSSPWT

SEQ ID NO: 3049 - protein, 221 aa, Artificial Sequence
  Description of Artificial Sequence: Synthetic polypeptide
  XENP019223 [CTLA-4]_H0.13_L0_Fab Heavy Chain
QVQLVESGGGVVQPGRSLRLSCAASGFTFSDYTMHWVRQAPGKGLEWVTFISYDGNNKYYADSVKGRFTISRDNSKNTLYLQMNSLRAEDTAIYYCARTGWLGPFDYWGQGTLVTVSSASTKGPSVFPLAPSSKSTSGGTAALGCLVKDYFPEPVTVSWNSGALTSGVHTFPAVLQSSGLYSLSSVVTVPSSSLGTQTYICNVNHKPSNTKVDKKVEPKSC

SEQ ID NO: 3050 - protein, 118 aa, Artificial Sequence; identical to SEQ ID NO: 301
  Description of Artificial Sequence: Synthetic polypeptide
  VH of XENP019223

SEQ ID NO: 3051 - protein, 5 aa, Artificial Sequence
  Description of Artificial Sequence: Synthetic peptide
  XENP019223 vhCDR1
DYTMH

SEQ ID NO: 3052 - protein, 17 aa, Artificial Sequence
  Description of Artificial Sequence: Synthetic peptide
  XENP019223 vhCDR2
FISYDGNNKYYADSVKG

SEQ ID NO: 3053 - protein, 9 aa, Artificial Sequence
  Description of Artificial Sequence: Synthetic peptide
  XENP019223 vhCDR3
TGWLGPFDY

SEQ ID NO: 3054 - protein, 215 aa, Artificial Sequence; identical to SEQ ID NO: 2924
  Description of Artificial Sequence: Synthetic polypeptide
  XENP019223 [CTLA-4]_H0.13_L0_Fab Light Chain

SEQ ID NO: 3055 - protein, 108 aa, Artificial Sequence; identical to SEQ ID NO: 23
  Description of Artificial Sequence: Synthetic polypeptide
  VL of XENP019223

SEQ ID NO: 3056 - protein, 12 aa, Artificial Sequence
  Description of Artificial Sequence: Synthetic peptide
  XENP019223 vlCDR1
RASQSVGSSYLA

SEQ ID NO: 3057 - protein, 7 aa, Artificial Sequence
  Description of Artificial Sequence: Synthetic peptide
  XENP019223 vlCDR2
GAFSRAT

SEQ ID NO: 3058 - protein, 9 aa, Artificial Sequence
  Description of Artificial Sequence: Synthetic peptide
  XENP019223 vlCDR3
QQYGSSPWT

SEQ ID NO: 3059 - protein, 221 aa, Artificial Sequence
  Description of Artificial Sequence: Synthetic polypeptide
  XENP019224 [CTLA-4]_H0.14_L0_Fab Heavy Chain
QVQLVESGGGVVQPGRSLRLSCAASGFTFSGYTMHWVRQAPGKGLEWVTFISYDGNNKYYADSVKGRFTISRDNSKNTLYLQMNSLRAEDTAIYYCARTGWLGPFDYWGQGTLVTVSSASTKGPSVFPLAPSSKSTSGGTAALGCLVKDYFPEPVTVSWNSGALTSGVHTFPAVLQSSGLYSLSSVVTVPSSSLGTQTYICNVNHKPSNTKVDKKVEPKSC

SEQ ID NO: 3060 - protein, 118 aa, Artificial Sequence; identical to SEQ ID NO: 310
  Description of Artificial Sequence: Synthetic polypeptide
  VH of XENP019224

SEQ ID NO: 3061 - protein, 5 aa, Artificial Sequence
  Description of Artificial Sequence: Synthetic peptide
  XENP019224 vhCDR1
GYTMH

SEQ ID NO: 3062 - protein, 17 aa, Artificial Sequence
  Description of Artificial Sequence: Synthetic peptide
  XENP019224 vhCDR2
FISYDGNNKYYADSVKG

SEQ ID NO: 3063 - protein, 9 aa, Artificial Sequence
  Description of Artificial Sequence: Synthetic peptide
  XENP019224 vhCDR3
TGWLGPFDY

SEQ ID NO: 3064 - protein, 215 aa, Artificial Sequence; identical to SEQ ID NO: 2924
  Description of Artificial Sequence: Synthetic polypeptide
  XENP019224 [CTLA-4]_H0.14_L0_Fab Light Chain

SEQ ID NO: 3065 - protein, 108 aa, Artificial Sequence; identical to SEQ ID NO: 23
  Description of Artificial Sequence: Synthetic polypeptide
  VL of XENP019224

SEQ ID NO: 3066 - protein, 12 aa, Artificial Sequence
  Description of Artificial Sequence: Synthetic peptide
  XENP019224 vlCDR1
RASQSVGSSYLA

SEQ ID NO: 3067 - protein, 7 aa, Artificial Sequence
  Description of Artificial Sequence: Synthetic peptide
  XENP019224 vlCDR2
GAFSRAT

SEQ ID NO: 3068 - protein, 9 aa, Artificial Sequence
  Description of Artificial Sequence: Synthetic peptide
  XENP019224 vlCDR3
QQYGSSPWT

SEQ ID NO: 3069 - protein, 221 aa, Artificial Sequence
  Description of Artificial Sequence: Synthetic polypeptide
  XENP019225 [CTLA-4]_H0.15_L0_Fab Heavy Chain
QVQLVESGGGVVQPGRSLRLSCAASGFTFSNYTMHWVRQAPGKGLEWVTFISYDGNNKYYADSVKGRFTISRDNSKNTLYLQMNSLRAEDTAIYYCARTGWLGPFDYWGQGTLVTVSSASTKGPSVFPLAPSSKSTSGGTAALGCLVKDYFPEPVTVSWNSGALTSGVHTFPAVLQSSGLYSLSSVVTVPSSSLGTQTYICNVNHKPSNTKVDKKVEPKSC

SEQ ID NO: 3070 - protein, 118 aa, Artificial Sequence; identical to SEQ ID NO: 319
  Description of Artificial Sequence: Synthetic polypeptide
  VH of XENP019225

SEQ ID NO: 3071 - protein, 5 aa, Artificial Sequence
  Description of Artificial Sequence: Synthetic peptide
  XENP019225 vhCDR1
NYTMH

SEQ ID NO: 3072 - protein, 17 aa, Artificial Sequence
  Description of Artificial Sequence: Synthetic peptide
  XENP019225 vhCDR2
FISYDGNNKYYADSVKG

SEQ ID NO: 3073 - protein, 9 aa, Artificial Sequence
  Description of Artificial Sequence: Synthetic peptide
  XENP019225 vhCDR3
TGWLGPFDY

SEQ ID NO: 3074 - protein, 215 aa, Artificial Sequence; identical to SEQ ID NO: 2924
  Description of Artificial Sequence: Synthetic polypeptide
  XENP019225 [CTLA-4]_H0.15_L0_Fab Light Chain

SEQ ID NO: 3075 - protein, 108 aa, Artificial Sequence; identical to SEQ ID NO: 23
  Description of Artificial Sequence: Synthetic polypeptide
  VL of XENP019225

SEQ ID NO: 3076 - protein, 12 aa, Artificial Sequence
  Description of Artificial Sequence: Synthetic peptide
  XENP019225 vlCDR1
RASQSVGSSYLA

SEQ ID NO: 3077 - protein, 7 aa, Artificial Sequence
  Description of Artificial Sequence: Synthetic peptide
  XENP019225 vlCDR2
GAFSRAT

SEQ ID NO: 3078 - protein, 9 aa, Artificial Sequence
  Description of Artificial Sequence: Synthetic peptide
  XENP019225 vlCDR3
QQYGSSPWT

SEQ ID NO: 3079 - protein, 221 aa, Artificial Sequence
  Description of Artificial Sequence: Synthetic polypeptide
  XENP019226 [CTLA-4]_H0.16_L0_Fab Heavy Chain
QVQLVESGGGVVQPGRSLRLSCAASGFTFSQYTMHWVRQAPGKGLEWVTFISYDGNNKYYADSVKGRFTISRDNSKNTLYLQMNSLRAEDTAIYYCARTGWLGPFDYWGQGTLVTVSSASTKGPSVFPLAPSSKSTSGGTAALGCLVKDYFPEPVTVSWNSGALTSGVHTFPAVLQSSGLYSLSSVVTVPSSSLGTQTYICNVNHKPSNTKVDKKVEPKSC

SEQ ID NO: 3080 - protein, 118 aa, Artificial Sequence; identical to SEQ ID NO: 328
  Description of Artificial Sequence: Synthetic polypeptide
  VH of XENP019226

SEQ ID NO: 3081 - protein, 5 aa, Artificial Sequence
  Description of Artificial Sequence: Synthetic peptide
  XENP019226 vhCDR1
QYTMH

SEQ ID NO: 3082 - protein, 17 aa, Artificial Sequence
  Description of Artificial Sequence: Synthetic peptide
  XENP019226 vhCDR2
FISYDGNNKYYADSVKG

SEQ ID NO: 3083 - protein, 9 aa, Artificial Sequence
  Description of Artificial Sequence: Synthetic peptide
  XENP019226 vhCDR3
TGWLGPFDY

SEQ ID NO: 3084 - protein, 215 aa, Artificial Sequence; identical to SEQ ID NO: 2924
  Description of Artificial Sequence: Synthetic polypeptide
  XENP019226 [CTLA-4]_H0.16_L0_Fab Light Chain

SEQ ID NO: 3085 - protein, 108 aa, Artificial Sequence; identical to SEQ ID NO: 23
  Description of Artificial Sequence: Synthetic polypeptide
  VL of XENP019226

SEQ ID NO: 3086 - protein, 12 aa, Artificial Sequence
  Description of Artificial Sequence: Synthetic peptide
  XENP019226 vlCDR1
RASQSVGSSYLA

SEQ ID NO: 3087 - protein, 7 aa, Artificial Sequence
  Description of Artificial Sequence: Synthetic peptide
  XENP019226 vlCDR2
GAFSRAT

SEQ ID NO: 3088 - protein, 9 aa, Artificial Sequence
  Description of Artificial Sequence: Synthetic peptide
  XENP019226 vlCDR3
QQYGSSPWT

SEQ ID NO: 3089 - protein, 221 aa, Artificial Sequence
  Description of Artificial Sequence: Synthetic polypeptide
  XENP019227 [CTLA-4]_H0.17_L0_Fab Heavy Chain
QVQLVESGGGVVQPGRSLRLSCAASGFTFSTYTMHWVRQAPGKGLEWVTFISYDGNNKYYADSVKGRFTISRDNSKNTLYLQMNSLRAEDTAIYYCARTGWLGPFDYWGQGTLVTVSSASTKGPSVFPLAPSSKSTSGGTAALGCLVKDYFPEPVTVSWNSGALTSGVHTFPAVLQSSGLYSLSSVVTVPSSSLGTQTYICNVNHKPSNTKVDKKVEPKSC

SEQ ID NO: 3090 - protein, 118 aa, Artificial Sequence; identical to SEQ ID NO: 337
  Description of Artificial Sequence: Synthetic polypeptide
  VH of XENP019227

SEQ ID NO: 3091 - protein, 5 aa, Artificial Sequence
  Description of Artificial Sequence: Synthetic peptide
  XENP019227 vhCDR1
TYTMH

SEQ ID NO: 3092 - protein, 17 aa, Artificial Sequence
  Description of Artificial Sequence: Synthetic peptide
  XENP019227 vhCDR2
FISYDGNNKYYADSVKG

SEQ ID NO: 3093 - protein, 9 aa, Artificial Sequence
  Description of Artificial Sequence: Synthetic peptide
  XENP019227 vhCDR3
TGWLGPFDY

SEQ ID NO: 3094 - protein, 215 aa, Artificial Sequence; identical to SEQ ID NO: 2924
  Description of Artificial Sequence: Synthetic polypeptide
  XENP019227 [CTLA-4]_H0.17_L0_Fab Light Chain

SEQ ID NO: 3095 - protein, 108 aa, Artificial Sequence; identical to SEQ ID NO: 23
  Description of Artificial Sequence: Synthetic polypeptide
  VL of XENP019227

SEQ ID NO: 3096 - protein, 12 aa, Artificial Sequence
  Description of Artificial Sequence: Synthetic peptide
  XENP019227 vlCDR1
RASQSVGSSYLA

SEQ ID NO: 3097 - protein, 7 aa, Artificial Sequence
  Description of Artificial Sequence: Synthetic peptide
  XENP019227 vlCDR2
GAFSRAT

SEQ ID NO: 3098 - protein, 9 aa, Artificial Sequence
  Description of Artificial Sequence: Synthetic peptide
  XENP019227 vlCDR3
QQYGSSPWT

SEQ ID NO: 3099 - protein, 221 aa, Artificial Sequence
  Description of Artificial Sequence: Synthetic polypeptide
  XENP019228 [CTLA-4]_H0.18_L0_Fab Heavy Chain
QVQLVESGGGVVQPGRSLRLSCAASGFTFSSATMHWVRQAPGKGLEWVTFISYDGNNKYYADSVKGRFTISRDNSKNTLYLQMNSLRAEDTAIYYCARTGWLGPFDYWGQGTLVTVSSASTKGPSVFPLAPSSKSTSGGTAALGCLVKDYFPEPVTVSWNSGALTSGVHTFPAVLQSSGLYSLSSVVTVPSSSLGTQTYICNVNHKPSNTKVDKKVEPKSC

SEQ ID NO: 3100 - protein, 118 aa, Artificial Sequence; identical to SEQ ID NO: 346
  Description of Artificial Sequence: Synthetic polypeptide
  VH of XENP019228

SEQ ID NO: 3101 - protein, 5 aa, Artificial Sequence
  Description of Artificial Sequence: Synthetic peptide
  XENP019228 vhCDR1
SATMH

SEQ ID NO: 3102 - protein, 17 aa, Artificial Sequence
  Description of Artificial Sequence: Synthetic peptide
  XENP019228 vhCDR2
FISYDGNNKYYADSVKG

SEQ ID NO: 3103 - protein, 9 aa, Artificial Sequence
  Description of Artificial Sequence: Synthetic peptide
  XENP019228 vhCDR3
TGWLGPFDY

SEQ ID NO: 3104 - protein, 215 aa, Artificial Sequence; identical to SEQ ID NO: 2924
  Description of Artificial Sequence: Synthetic polypeptide
  XENP019228 [CTLA-4]_H0.18_L0_Fab Light Chain

SEQ ID NO: 3105 - protein, 108 aa, Artificial Sequence; identical to SEQ ID NO: 23
  Description of Artificial Sequence: Synthetic polypeptide
  VL of XENP019228

SEQ ID NO: 3106 - protein, 12 aa, Artificial Sequence
  Description of Artificial Sequence: Synthetic peptide
  XENP019228 vlCDR1
RASQSVGSSYLA

SEQ ID NO: 3107 - protein, 7 aa, Artificial Sequence
  Description of Artificial Sequence: Synthetic peptide
  XENP019228 vlCDR2
GAFSRAT

SEQ ID NO: 3108 - protein, 9 aa, Artificial Sequence
  Description of Artificial Sequence: Synthetic peptide
  XENP019228 vlCDR3
QQYGSSPWT

SEQ ID NO: 3109 - protein, 221 aa, Artificial Sequence
  Description of Artificial Sequence: Synthetic polypeptide
  XENP019229 [CTLA-4]_H0.19_L0_Fab Heavy Chain
QVQLVESGGGVVQPGRSLRLSCAASGFTFSSHTMHWVRQAPGKGLEWVTFISYDGNNKYYADSVKGRFTISRDNSKNTLYLQMNSLRAEDTAIYYCARTGWLGPFDYWGQGTLVTVSSASTKGPSVFPLAPSSKSTSGGTAALGCLVKDYFPEPVTVSWNSGALTSGVHTFPAVLQSSGLYSLSSVVTVPSSSLGTQTYICNVNHKPSNTKVDKKVEPKSC

SEQ ID NO: 3110 - protein, 118 aa, Artificial Sequence; identical to SEQ ID NO: 355
  Description of Artificial Sequence: Synthetic polypeptide
  VH of XENP019229

SEQ ID NO: 3111 - protein, 5 aa, Artificial Sequence
  Description of Artificial Sequence: Synthetic peptide
  XENP019229 vhCDR1
SHTMH

SEQ ID NO: 3112 - protein, 17 aa, Artificial Sequence
  Description of Artificial Sequence: Synthetic peptide
  XENP019229 vhCDR2
FISYDGNNKYYADSVKG

SEQ ID NO: 3113 - protein, 9 aa, Artificial Sequence
  Description of Artificial Sequence: Synthetic peptide
  XENP019229 vhCDR3
TGWLGPFDY

SEQ ID NO: 3114 - protein, 215 aa, Artificial Sequence; identical to SEQ ID NO: 2924
  Description of Artificial Sequence: Synthetic polypeptide
  XENP019229 [CTLA-4]_H0.19_L0_Fab Light Chain

SEQ ID NO: 3115 - protein, 108 aa, Artificial Sequence; identical to SEQ ID NO: 23
  Description of Artificial Sequence: Synthetic polypeptide
  VL of XENP019229

SEQ ID NO: 3116 - protein, 12 aa, Artificial Sequence
  Description of Artificial Sequence: Synthetic peptide
  XENP019229 vlCDR1
RASQSVGSSYLA

SEQ ID NO: 3117 - protein, 7 aa, Artificial Sequence
  Description of Artificial Sequence: Synthetic peptide
  XENP019229 vlCDR2
GAFSRAT

SEQ ID NO: 3118 - protein, 9 aa, Artificial Sequence
  Description of Artificial Sequence: Synthetic peptide
  XENP019229 vlCDR3
QQYGSSPWT

SEQ ID NO: 3119 - protein, 221 aa, Artificial Sequence
  Description of Artificial Sequence: Synthetic polypeptide
  XENP019230 [CTLA-4]_H0.20_L0_Fab Heavy Chain
QVQLVESGGGVVQPGRSLRLSCAASGFTFSSFTMHWVRQAPGKGLEWVTFISYDGNNKYYADSVKGRFTISRDNSKNTLYLQMNSLRAEDTAIYYCARTGWLGPFDYWGQGTLVTVSSASTKGPSVFPLAPSSKSTSGGTAALGCLVKDYFPEPVTVSWNSGALTSGVHTFPAVLQSSGLYSLSSVVTVPSSSLGTQTYICNVNHKPSNTKVDKKVEPKSC

SEQ ID NO: 3120 - protein, 118 aa, Artificial Sequence; identical to SEQ ID NO: 364
  Description of Artificial Sequence: Synthetic polypeptide
  VH of XENP019230

SEQ ID NO: 3121 - protein, 5 aa, Artificial Sequence
  Description of Artificial Sequence: Synthetic peptide
  XENP019230 vhCDR1
SFTMH

SEQ ID NO: 3122 - protein, 17 aa, Artificial Sequence
  Description of Artificial Sequence: Synthetic peptide
  XENP019230 vhCDR2
FISYDGNNKYYADSVKG

SEQ ID NO: 3123 - protein, 9 aa, Artificial Sequence
  Description of Artificial Sequence: Synthetic peptide
  XENP019230 vhCDR3
TGWLGPFDY

SEQ ID NO: 3124 - protein, 215 aa, Artificial Sequence; identical to SEQ ID NO: 2924
  Description of Artificial Sequence: Synthetic polypeptide
  XENP019230 [CTLA-4]_H0.20_L0_Fab Light Chain

SEQ ID NO: 3125 - protein, 108 aa, Artificial Sequence; identical to SEQ ID NO: 23
  Description of Artificial Sequence: Synthetic polypeptide
  VL of XENP019230

SEQ ID NO: 3126 - protein, 12 aa, Artificial Sequence
  Description of Artificial Sequence: Synthetic peptide
  XENP019230 vlCDR1
RASQSVGSSYLA

SEQ ID NO: 3127 - protein, 7 aa, Artificial Sequence
  Description of Artificial Sequence: Synthetic peptide
  XENP019230 vlCDR2
GAFSRAT

SEQ ID NO: 3128 - protein, 9 aa, Artificial Sequence
  Description of Artificial Sequence: Synthetic peptide
  XENP019230 vlCDR3
QQYGSSPWT

SEQ ID NO: 3129 - protein, 221 aa, Artificial Sequence
  Description of Artificial Sequence: Synthetic polypeptide
  XENP019231 [CTLA-4]_H0.21_L0_Fab Heavy Chain
QVQLVESGGGVVQPGRSLRLSCAASGFTFSSLTMHWVRQAPGKGLEWVTFISYDGNNKYYADSVKGRFTISRDNSKNTLYLQMNSLRAEDTAIYYCARTGWLGPFDYWGQGTLVTVSSASTKGPSVFPLAPSSKSTSGGTAALGCLVKDYFPEPVTVSWNSGALTSGVHTFPAVLQSSGLYSLSSVVTVPSSSLGTQTYICNVNHKPSNTKVDKKVEPKSC

SEQ ID NO: 3130 - protein, 118 aa, Artificial Sequence; identical to SEQ ID NO: 373
  Description of Artificial Sequence: Synthetic polypeptide
  VH of XENP019231

SEQ ID NO: 3131 - protein, 5 aa, Artificial Sequence
  Description of Artificial Sequence: Synthetic peptide
  XENP019231 vhCDR1
SLTMH

SEQ ID NO: 3132 - protein, 17 aa, Artificial Sequence
  Description of Artificial Sequence: Synthetic peptide
  XENP019231 vhCDR2
FISYDGNNKYYADSVKG

SEQ ID NO: 3133 - protein, 9 aa, Artificial Sequence
  Description of Artificial Sequence: Synthetic peptide
  XENP019231 vhCDR3
TGWLGPFDY

SEQ ID NO: 3134 - protein, 215 aa, Artificial Sequence; identical to SEQ ID NO: 2924
  Description of Artificial Sequence: Synthetic polypeptide
  XENP019231 [CTLA-4]_H0.21_L0_Fab Light Chain

SEQ ID NO: 3135 - protein, 108 aa, Artificial Sequence; identical to SEQ ID NO: 23
  Description of Artificial Sequence: Synthetic polypeptide
  VL of XENP019231

SEQ ID NO: 3136 - protein, 12 aa, Artificial Sequence
  Description of Artificial Sequence: Synthetic peptide
  XENP019231 vlCDR1
RASQSVGSSYLA

SEQ ID NO: 3137 - protein, 7 aa, Artificial Sequence
  Description of Artificial Sequence: Synthetic peptide
  XENP019231 vlCDR2
GAFSRAT

SEQ ID NO: 3138 - protein, 9 aa, Artificial Sequence
  Description of Artificial Sequence: Synthetic peptide
  XENP019231 vlCDR3
QQYGSSPWT

SEQ ID NO: 3139 - protein, 221 aa, Artificial Sequence
  Description of Artificial Sequence: Synthetic polypeptide
  XENP019232 [CTLA-4]_H0.22_L0_Fab Heavy Chain
QVQLVESGGGVVQPGRSLRLSCAASGFTFSSNTMHWVRQAPGKGLEWVTFISYDGNNKYYADSVKGRFTISRDNSKNTLYLQMNSLRAEDTAIYYCARTGWLGPFDYWGQGTLVTVSSASTKGPSVFPLAPSSKSTSGGTAALGCLVKDYFPEPVTVSWNSGALTSGVHTFPAVLQSSGLYSLSSVVTVPSSSLGTQTYICNVNHKPSNTKVDKKVEPKSC

SEQ ID NO: 3140 - protein, 118 aa, Artificial Sequence; identical to SEQ ID NO: 382
  Description of Artificial Sequence: Synthetic polypeptide
  VH of XENP019232

SEQ ID NO: 3141 - protein, 5 aa, Artificial Sequence
  Description of Artificial Sequence: Synthetic peptide
  XENP019232 vhCDR1
SNTMH

SEQ ID NO: 3142 - protein, 17 aa, Artificial Sequence
  Description of Artificial Sequence: Synthetic peptide
  XENP019232 vhCDR2
FISYDGNNKYYADSVKG

SEQ ID NO: 3143 - protein, 9 aa, Artificial Sequence
  Description of Artificial Sequence: Synthetic peptide
  XENP019232 vhCDR3
TGWLGPFDY

SEQ ID NO: 3144 - protein, 215 aa, Artificial Sequence; identical to SEQ ID NO: 2924
  Description of Artificial Sequence: Synthetic polypeptide
  XENP019232 [CTLA-4]_H0.22_L0_Fab Light Chain

SEQ ID NO: 3145 - protein, 108 aa, Artificial Sequence; identical to SEQ ID NO: 23
  Description of Artificial Sequence: Synthetic polypeptide
  VL of XENP019232

SEQ ID NO: 3146 - protein, 12 aa, Artificial Sequence
  Description of Artificial Sequence: Synthetic peptide
  XENP019232 vlCDR1
RASQSVGSSYLA

SEQ ID NO: 3147 - protein, 7 aa, Artificial Sequence
  Description of Artificial Sequence: Synthetic peptide
  XENP019232 vlCDR2
GAFSRAT

SEQ ID NO: 3148 - protein, 9 aa, Artificial Sequence
  Description of Artificial Sequence: Synthetic peptide
  XENP019232 vlCDR3
QQYGSSPWT

SEQ ID NO: 3149 - protein, 221 aa, Artificial Sequence
  Description of Artificial Sequence: Synthetic polypeptide
  XENP019233 [CTLA-4]_H0.23_L0_Fab Heavy Chain
QVQLVESGGGVVQPGRSLRLSCAASGFTFSSSTMHWVRQAPGKGLEWVTFISYDGNNKYYADSVKGRFTISRDNSKNTLYLQMNSLRAEDTAIYYCARTGWLGPFDYWGQGTLVTVSSASTKGPSVFPLAPSSKSTSGGTAALGCLVKDYFPEPVTVSWNSGALTSGVHTFPAVLQSSGLYSLSSVVTVPSSSLGTQTYICNVNHKPSNTKVDKKVEPKSC

SEQ ID NO: 3150 - protein, 118 aa, Artificial Sequence; identical to SEQ ID NO: 391
  Description of Artificial Sequence: Synthetic polypeptide
  VH of XENP019233

SEQ ID NO: 3151 - protein, 5 aa, Artificial Sequence
  Description of Artificial Sequence: Synthetic peptide
  XENP019233 vhCDR1
SSTMH

SEQ ID NO: 3152 - protein, 17 aa, Artificial Sequence
  Description of Artificial Sequence: Synthetic peptide
  XENP019233 vhCDR2
FISYDGNNKYYADSVKG

SEQ ID NO: 3153 - protein, 9 aa, Artificial Sequence
  Description of Artificial Sequence: Synthetic peptide
  XENP019233 vhCDR3
TGWLGPFDY

SEQ ID NO: 3154 - protein, 215 aa, Artificial Sequence; identical to SEQ ID NO: 2924
  Description of Artificial Sequence: Synthetic polypeptide
  XENP019233 [CTLA-4]_H0.23_L0_Fab Light Chain

SEQ ID NO: 3155 - protein, 108 aa, Artificial Sequence; identical to SEQ ID NO: 23
  Description of Artificial Sequence: Synthetic polypeptide
  VL of XENP019233

SEQ ID NO: 3156 - protein, 12 aa, Artificial Sequence
  Description of Artificial Sequence: Synthetic peptide
  XENP019233 vlCDR1
RASQSVGSSYLA

SEQ ID NO: 3157 - protein, 7 aa, Artificial Sequence
  Description of Artificial Sequence: Synthetic peptide
  XENP019233 vlCDR2
GAFSRAT

SEQ ID NO: 3158 - protein, 9 aa, Artificial Sequence
  Description of Artificial Sequence: Synthetic peptide
  XENP019233 vlCDR3
QQYGSSPWT

SEQ ID NO: 3159 - protein, 221 aa, Artificial Sequence
  Description of Artificial Sequence: Synthetic polypeptide
  XENP019234 [CTLA-4]_H0.24_L0_Fab Heavy Chain
QVQLVESGGGVVQPGRSLRLSCAASGFTFSSVTMHWVRQAPGKGLEWVTFISYDGNNKYYADSVKGRFTISRDNSKNTLYLQMNSLRAEDTAIYYCARTGWLGPFDYWGQGTLVTVSSASTKGPSVFPLAPSSKSTSGGTAALGCLVKDYFPEPVTVSWNSGALTSGVHTFPAVLQSSGLYSLSSVVTVPSSSLGTQTYICNVNHKPSNTKVDKKVEPKSC

SEQ ID NO: 3160 - protein, 118 aa, Artificial Sequence; identical to SEQ ID NO: 400
  Description of Artificial Sequence: Synthetic polypeptide
  VH of XENP019234

SEQ ID NO: 3161 - protein, 5 aa, Artificial Sequence
  Description of Artificial Sequence: Synthetic peptide
  XENP019234 vhCDR1
SVTMH

SEQ ID NO: 3162 - protein, 17 aa, Artificial Sequence
  Description of Artificial Sequence: Synthetic peptide
  XENP019234 vhCDR2
FISYDGNNKYYADSVKG

SEQ ID NO: 3163 - protein, 9 aa, Artificial Sequence
  Description of Artificial Sequence: Synthetic peptide
  XENP019234 vhCDR3
TGWLGPFDY

SEQ ID NO: 3164 - protein, 215 aa, Artificial Sequence; identical to SEQ ID NO: 2924
  Description of Artificial Sequence: Synthetic polypeptide
  XENP019234 [CTLA-4]_H0.24_L0_Fab Light Chain

SEQ ID NO: 3165 - protein, 108 aa, Artificial Sequence; identical to SEQ ID NO: 23
  Description of Artificial Sequence: Synthetic polypeptide
  VL of XENP019234

SEQ ID NO: 3166 - protein, 12 aa, Artificial Sequence
  Description of Artificial Sequence: Synthetic peptide
  XENP019234 vlCDR1
RASQSVGSSYLA

SEQ ID NO: 3167 - protein, 7 aa, Artificial Sequence
  Description of Artificial Sequence: Synthetic peptide
  XENP019234 vlCDR2
GAFSRAT

SEQ ID NO: 3168 - protein, 9 aa, Artificial Sequence
  Description of Artificial Sequence: Synthetic peptide
  XENP019234 vlCDR3
QQYGSSPWT

SEQ ID NO: 3169 - protein, 221 aa, Artificial Sequence
  Description of Artificial Sequence: Synthetic polypeptide
  XENP019235 [CTLA-4]_H0.25_L0_Fab Heavy Chain
QVQLVESGGGVVQPGRSLRLSCAASGFTFSSYAMHWVRQAPGKGLEWVTFISYDGNNKYYADSVKGRFTISRDNSKNTLYLQMNSLRAEDTAIYYCARTGWLGPFDYWGQGTLVTVSSASTKGPSVFPLAPSSKSTSGGTAALGCLVKDYFPEPVTVSWNSGALTSGVHTFPAVLQSSGLYSLSSVVTVPSSSLGTQTYICNVNHKPSNTKVDKKVEPKSC

SEQ ID NO: 3170 - protein, 118 aa, Artificial Sequence; identical to SEQ ID NO: 409
  Description of Artificial Sequence: Synthetic polypeptide
  VH of XENP019235

SEQ ID NO: 3171 - protein, 5 aa, Artificial Sequence
  Description of Artificial Sequence: Synthetic peptide
  XENP019235 vhCDR1
SYAMH

SEQ ID NO: 3172 - protein, 17 aa, Artificial Sequence
  Description of Artificial Sequence: Synthetic peptide
  XENP019235 vhCDR2
FISYDGNNKYYADSVKG

SEQ ID NO: 3173 - protein, 9 aa, Artificial Sequence
  Description of Artificial Sequence: Synthetic peptide
  XENP019235 vhCDR3
TGWLGPFDY

SEQ ID NO: 3174 - protein, 215 aa, Artificial Sequence; identical to SEQ ID NO: 2924
  Description of Artificial Sequence: Synthetic polypeptide
  XENP019235 [CTLA-4]_H0.25_L0_Fab Light Chain

SEQ ID NO: 3175 - protein, 108 aa, Artificial Sequence; identical to SEQ ID NO: 23
  Description of Artificial Sequence: Synthetic polypeptide
  VL of XENP019235

SEQ ID NO: 3176 - protein, 12 aa, Artificial Sequence
  Description of Artificial Sequence: Synthetic peptide
  XENP019235 vlCDR1
RASQSVGSSYLA

SEQ ID NO: 3177 - protein, 7 aa, Artificial Sequence
  Description of Artificial Sequence: Synthetic peptide
  XENP019235 vlCDR2
GAFSRAT

SEQ ID NO: 3178 - protein, 9 aa, Artificial Sequence
  Description of Artificial Sequence: Synthetic peptide
  XENP019235 vlCDR3
QQYGSSPWT

SEQ ID NO: 3179 - protein, 221 aa, Artificial Sequence
  Description of Artificial Sequence: Synthetic polypeptide
  XENP019236 [CTLA-4]_H0.26_L0_Fab Heavy Chain
QVQLVESGGGVVQPGRSLRLSCAASGFTFSSYGMHWVRQAPGKGLEWVTFISYDGNNKYYADSVKGRFTISRDNSKNTLYLQMNSLRAEDTAIYYCARTGWLGPFDYWGQGTLVTVSSASTKGPSVFPLAPSSKSTSGGTAALGCLVKDYFPEPVTVSWNSGALTSGVHTFPAVLQSSGLYSLSSVVTVPSSSLGTQTYICNVNHKPSNTKVDKKVEPKSC

SEQ ID NO: 3180 - protein, 118 aa, Artificial Sequence; identical to SEQ ID NO: 418
  Description of Artificial Sequence: Synthetic polypeptide
  VH of XENP019236

SEQ ID NO: 3181 - protein, 5 aa, Artificial Sequence
  Description of Artificial Sequence: Synthetic peptide
  XENP019236 vhCDR1
SYGMH

SEQ ID NO: 3182 - protein, 17 aa, Artificial Sequence
  Description of Artificial Sequence: Synthetic peptide
  XENP019236 vhCDR2
FISYDGNNKYYADSVKG

SEQ ID NO: 3183 - protein, 9 aa, Artificial Sequence
  Description of Artificial Sequence: Synthetic peptide
  XENP019236 vhCDR3
TGWLGPFDY

SEQ ID NO: 3184 - protein, 215 aa, Artificial Sequence; identical to SEQ ID NO: 2924
  Description of Artificial Sequence: Synthetic polypeptide
  XENP019236 [CTLA-4]_H0.26_L0_Fab Light Chain

SEQ ID NO: 3185 - protein, 108 aa, Artificial Sequence; identical to SEQ ID NO: 23
  Description of Artificial Sequence: Synthetic polypeptide
  VL of XENP019236

SEQ ID NO: 3186 - protein, 12 aa, Artificial Sequence
  Description of Artificial Sequence: Synthetic peptide
  XENP019236 vlCDR1
RASQSVGSSYLA

SEQ ID NO: 3187 - protein, 7 aa, Artificial Sequence
  Description of Artificial Sequence: Synthetic peptide
  XENP019236 vlCDR2
GAFSRAT

SEQ ID NO: 3188 - protein, 9 aa, Artificial Sequence
  Description of Artificial Sequence: Synthetic peptide
  XENP019236 vlCDR3
QQYGSSPWT

SEQ ID NO: 3189 - protein, 221 aa, Artificial Sequence
  Description of Artificial Sequence: Synthetic polypeptide
  XENP019237 [CTLA-4]_H0.27_L0_Fab Heavy Chain
QVQLVESGGGVVQPGRSLRLSCAASGFTFSSYSMHWVRQAPGKGLEWVTFISYDGNNKYYADSVKGRFTISRDNSKNTLYLQMNSLRAEDTAIYYCARTGWLGPFDYWGQGTLVTVSSASTKGPSVFPLAPSSKSTSGGTAALGCLVKDYFPEPVTVSWNSGALTSGVHTFPAVLQSSGLYSLSSVVTVPSSSLGTQTYICNVNHKPSNTKVDKKVEPKSC

SEQ ID NO: 3190 - protein, 118 aa, Artificial Sequence; identical to SEQ ID NO: 427
  Description of Artificial Sequence: Synthetic polypeptide
  VH of XENP019237

SEQ ID NO: 3191 - protein, 5 aa, Artificial Sequence
  Description of Artificial Sequence: Synthetic peptide
  XENP019237 vhCDR1
SYSMH

SEQ ID NO: 3192 - protein, 17 aa, Artificial Sequence
  Description of Artificial Sequence: Synthetic peptide
  XENP019237 vhCDR2
FISYDGNNKYYADSVKG

SEQ ID NO: 3193 - protein, 9 aa, Artificial Sequence
  Description of Artificial Sequence: Synthetic peptide
  XENP019237 vhCDR3
TGWLGPFDY

SEQ ID NO: 3194 - protein, 215 aa, Artificial Sequence; identical to SEQ ID NO: 2924
  Description of Artificial Sequence: Synthetic polypeptide
  XENP019237 [CTLA-4]_H0.27_L0_Fab Light Chain

SEQ ID NO: 3195 - protein, 108 aa, Artificial Sequence; identical to SEQ ID NO: 23
  Description of Artificial Sequence: Synthetic polypeptide
  VL of XENP019237

SEQ ID NO: 3196 - protein, 12 aa, Artificial Sequence
  Description of Artificial Sequence: Synthetic peptide
  XENP019237 vlCDR1
RASQSVGSSYLA

SEQ ID NO: 3197 - protein, 7 aa, Artificial Sequence
  Description of Artificial Sequence: Synthetic peptide
  XENP019237 vlCDR2
GAFSRAT

SEQ ID NO: 3198 - protein, 9 aa, Artificial Sequence
  Description of Artificial Sequence: Synthetic peptide
  XENP019237 vlCDR3
QQYGSSPWT

SEQ ID NO: 3199 - protein, 221 aa, Artificial Sequence
  Description of Artificial Sequence: Synthetic polypeptide
  XENP019238 [CTLA-4]_H0.28_L0_Fab Heavy Chain
QVQLVESGGGVVQPGRSLRLSCAASGFTFSSYVMHWVRQAPGKGLEWVTFISYDGNNKYYADSVKGRFTISRDNSKNTLYLQMNSLRAEDTAIYYCARTGWLGPFDYWGQGTLVTVSSASTKGPSVFPLAPSSKSTSGGTAALGCLVKDYFPEPVTVSWNSGALTSGVHTFPAVLQSSGLYSLSSVVTVPSSSLGTQTYICNVNHKPSNTKVDKKVEPKSC

SEQ ID NO: 3200 - protein, 118 aa, Artificial Sequence; identical to SEQ ID NO: 436
  Description of Artificial Sequence: Synthetic polypeptide
  VH of XENP019238

SEQ ID NO: 3201 - protein, 5 aa, Artificial Sequence
  Description of Artificial Sequence: Synthetic peptide
  XENP019238 vhCDR1
SYVMH

SEQ ID NO: 3202 - protein, 17 aa, Artificial Sequence
  Description of Artificial Sequence: Synthetic peptide
  XENP019238 vhCDR2
FISYDGNNKYYADSVKG

SEQ ID NO: 3203 - protein, 9 aa, Artificial Sequence
  Description of Artificial Sequence: Synthetic peptide
  XENP019238 vhCDR3
TGWLGPFDY

SEQ ID NO: 3204 - protein, 215 aa, Artificial Sequence; identical to SEQ ID NO: 2924
  Description of Artificial Sequence: Synthetic polypeptide
  XENP019238 [CTLA-4]_H0.28_L0_Fab Light Chain

SEQ ID NO: 3205 - protein, 108 aa, Artificial Sequence; identical to SEQ ID NO: 23
  Description of Artificial Sequence: Synthetic polypeptide
  VL of XENP019238

SEQ ID NO: 3206 - protein, 12 aa, Artificial Sequence
  Description of Artificial Sequence: Synthetic peptide
  XENP019238 vlCDR1
RASQSVGSSYLA

SEQ ID NO: 3207 - protein, 7 aa, Artificial Sequence
  Description of Artificial Sequence: Synthetic peptide
  XENP019238 vlCDR2
GAFSRAT

SEQ ID NO: 3208 - protein, 9 aa, Artificial Sequence
  Description of Artificial Sequence: Synthetic peptide
  XENP019238 vlCDR3
QQYGSSPWT

SEQ ID NO: 3209 - protein, 221 aa, Artificial Sequence
  Description of Artificial Sequence: Synthetic polypeptide
  XENP019239 [CTLA-4]_H0.29_L0_Fab Heavy Chain
QVQLVESGGGVVQPGRSLRLSCAASGFTFSSYYMHWVRQAPGKGLEWVTFISYDGNNKYYADSVKGRFTISRDNSKNTLYLQMNSLRAEDTAIYYCARTGWLGPFDYWGQGTLVTVSSASTKGPSVFPLAPSSKSTSGGTAALGCLVKDYFPEPVTVSWNSGALTSGVHTFPAVLQSSGLYSLSSVVTVPSSSLGTQTYICNVNHKPSNTKVDKKVEPKSC

SEQ ID NO: 3210 - protein, 118 aa, Artificial Sequence; identical to SEQ ID NO: 445
  Description of Artificial Sequence: Synthetic polypeptide
  VH of XENP019239

SEQ ID NO: 3211 - protein, 5 aa, Artificial Sequence
  Description of Artificial Sequence: Synthetic peptide
  XENP019239 vhCDR1
SYYMH

SEQ ID NO: 3212 - protein, 17 aa, Artificial Sequence
  Description of Artificial Sequence: Synthetic peptide
  XENP019239 vhCDR2
FISYDGNNKYYADSVKG

SEQ ID NO: 3213 - protein, 9 aa, Artificial Sequence
  Description of Artificial Sequence: Synthetic peptide
  XENP019239 vhCDR3
TGWLGPFDY

SEQ ID NO: 3214 - protein, 215 aa, Artificial Sequence; identical to SEQ ID NO: 2924
  Description of Artificial Sequence: Synthetic polypeptide
  XENP019239 [CTLA-4]_H0.29_L0_Fab Light Chain

SEQ ID NO: 3215 - protein, 108 aa, Artificial Sequence; identical to SEQ ID NO: 23
  Description of Artificial Sequence: Synthetic polypeptide
  VL of XENP019239

SEQ ID NO: 3216 - protein, 12 aa, Artificial Sequence
  Description of Artificial Sequence: Synthetic peptide
  XENP019239 vlCDR1
RASQSVGSSYLA

SEQ ID NO: 3217 - protein, 7 aa, Artificial Sequence
  Description of Artificial Sequence: Synthetic peptide
  XENP019239 vlCDR2
GAFSRAT

SEQ ID NO: 3218 - protein, 9 aa, Artificial Sequence
  Description of Artificial Sequence: Synthetic peptide
  XENP019239 vlCDR3
QQYGSSPWT

SEQ ID NO: 3219 - protein, 221 aa, Artificial Sequence
  Description of Artificial Sequence: Synthetic polypeptide
  XENP019240 [CTLA-4]_H0.30_L0_Fab Heavy Chain
QVQLVESGGGVVQPGRSLRLSCAASGFTFSSYTMDWVRQAPGKGLEWVTFISYDGNNKYYADSVKGRFTISRDNSKNTLYLQMNSLRAEDTAIYYCARTGWLGPFDYWGQGTLVTVSSASTKGPSVFPLAPSSKSTSGGTAALGCLVKDYFPEPVTVSWNSGALTSGVHTFPAVLQSSGLYSLSSVVTVPSSSLGTQTYICNVNHKPSNTKVDKKVEPKSC

SEQ ID NO: 3220 - protein, 118 aa, Artificial Sequence; identical to SEQ ID NO: 454
  Description of Artificial Sequence: Synthetic polypeptide
  VH of XENP019240

SEQ ID NO: 3221 - protein, 5 aa, Artificial Sequence
  Description of Artificial Sequence: Synthetic peptide
  XENP019240 vhCDR1
SYTMD

SEQ ID NO: 3222 - protein, 17 aa, Artificial Sequence
  Description of Artificial Sequence: Synthetic peptide
  XENP019240 vhCDR2
FISYDGNNKYYADSVKG

SEQ ID NO: 3223 - protein, 9 aa, Artificial Sequence
  Description of Artificial Sequence: Synthetic peptide
  XENP019240 vhCDR3
TGWLGPFDY

SEQ ID NO: 3224 - protein, 215 aa, Artificial Sequence; identical to SEQ ID NO: 2924
  Description of Artificial Sequence: Synthetic polypeptide
  XENP019240 [CTLA-4]_H0.30_L0_Fab Light Chain

SEQ ID NO: 3225 - protein, 108 aa, Artificial Sequence; identical to SEQ ID NO: 23
  Description of Artificial Sequence: Synthetic polypeptide
  VL of XENP019240

SEQ ID NO: 3226 - protein, 12 aa, Artificial Sequence
  Description of Artificial Sequence: Synthetic peptide
  XENP019240 vlCDR1
RASQSVGSSYLA

SEQ ID NO: 3227 - protein, 7 aa, Artificial Sequence
  Description of Artificial Sequence: Synthetic peptide
  XENP019240 vlCDR2
GAFSRAT

SEQ ID NO: 3228 - protein, 9 aa, Artificial Sequence
  Description of Artificial Sequence: Synthetic peptide
  XENP019240 vlCDR3
QQYGSSPWT

SEQ ID NO: 3229 - protein, 221 aa, Artificial Sequence
  Description of Artificial Sequence: Synthetic polypeptide
  XENP019241 [CTLA-4]_H0.31_L0_Fab Heavy Chain
QVQLVESGGGVVQPGRSLRLSCAASGFTFSSYTMFWVRQAPGKGLEWVTFISYDGNNKYYADSVKGRFTISRDNSKNTLYLQMNSLRAEDTAIYYCARTGWLGPFDYWGQGTLVTVSSASTKGPSVFPLAPSSKSTSGGTAALGCLVKDYFPEPVTVSWNSGALTSGVHTFPAVLQSSGLYSLSSVVTVPSSSLGTQTYICNVNHKPSNTKVDKKVEPKSC

SEQ ID NO: 3230 - protein, 118 aa, Artificial Sequence; identical to SEQ ID NO: 463
  Description of Artificial Sequence: Synthetic polypeptide
  VH of XENP019241

SEQ ID NO: 3231 - protein, 5 aa, Artificial Sequence
  Description of Artificial Sequence: Synthetic peptide
  XENP019241 vhCDR1
SYTMF

SEQ ID NO: 3232 - protein, 17 aa, Artificial Sequence
  Description of Artificial Sequence: Synthetic peptide
  XENP019241 vhCDR2
FISYDGNNKYYADSVKG

SEQ ID NO: 3233 - protein, 9 aa, Artificial Sequence
  Description of Artificial Sequence: Synthetic peptide
  XENP019241 vhCDR3
TGWLGPFDY

SEQ ID NO: 3234 - protein, 215 aa, Artificial Sequence; identical to SEQ ID NO: 2924
  Description of Artificial Sequence: Synthetic polypeptide
  XENP019241 [CTLA-4]_H0.31_L0_Fab Light Chain

SEQ ID NO: 3235 - protein, 108 aa, Artificial Sequence; identical to SEQ ID NO: 23
  Description of Artificial Sequence: Synthetic polypeptide
  VL of XENP019241

SEQ ID NO: 3236 - protein, 12 aa, Artificial Sequence
  Description of Artificial Sequence: Synthetic peptide
  XENP019241 vlCDR1
RASQSVGSSYLA

SEQ ID NO: 3237 - protein, 7 aa, Artificial Sequence
  Description of Artificial Sequence: Synthetic peptide
  XENP019241 vlCDR2
GAFSRAT

SEQ ID NO: 3238 - protein, 9 aa, Artificial Sequence
  Description of Artificial Sequence: Synthetic peptide
  XENP019241 vlCDR3
QQYGSSPWT

SEQ ID NO: 3239 - protein, 221 aa, Artificial Sequence
  Description of Artificial Sequence: Synthetic polypeptide
  XENP019242 [CTLA-4]_H0.32_L0_Fab Heavy Chain
QVQLVESGGGVVQPGRSLRLSCAASGFTFSSYTMNWVRQAPGKGLEWVTFISYDGNNKYYADSVKGRFTISRDNSKNTLYLQMNSLRAEDTAIYYCARTGWLGPFDYWGQGTLVTVSSASTKGPSVFPLAPSSKSTSGGTAALGCLVKDYFPEPVTVSWNSGALTSGVHTFPAVLQSSGLYSLSSVVTVPSSSLGTQTYICNVNHKPSNTKVDKKVEPKSC

SEQ ID NO: 3240 - protein, 118 aa, Artificial Sequence; identical to SEQ ID NO: 472
  Description of Artificial Sequence: Synthetic polypeptide
  VH of XENP019242

SEQ ID NO: 3241 - protein, 5 aa, Artificial Sequence
  Description of Artificial Sequence: Synthetic peptide
  XENP019242 vhCDR1
SYTMN

SEQ ID NO: 3242 - protein, 17 aa, Artificial Sequence
  Description of Artificial Sequence: Synthetic peptide
  XENP019242 vhCDR2
FISYDGNNKYYADSVKG

SEQ ID NO: 3243 - protein, 9 aa, Artificial Sequence
  Description of Artificial Sequence: Synthetic peptide
  XENP019242 vhCDR3
TGWLGPFDY

SEQ ID NO: 3244 - protein, 215 aa, Artificial Sequence; identical to SEQ ID NO: 2924
  Description of Artificial Sequence: Synthetic polypeptide
  XENP019242 [CTLA-4]_H0.32_L0_Fab Light Chain

SEQ ID NO: 3245 - protein, 108 aa, Artificial Sequence; identical to SEQ ID NO: 23
  Description of Artificial Sequence: Synthetic polypeptide
  VL of XENP019242

SEQ ID NO: 3246 - protein, 12 aa, Artificial Sequence
  Description of Artificial Sequence: Synthetic peptide
  XENP019242 vlCDR1
RASQSVGSSYLA

SEQ ID NO: 3247 - protein, 7 aa, Artificial Sequence
  Description of Artificial Sequence: Synthetic peptide
  XENP019242 vlCDR2
GAFSRAT

SEQ ID NO: 3248 - protein, 9 aa, Artificial Sequence
  Description of Artificial Sequence: Synthetic peptide
  XENP019242 vlCDR3
QQYGSSPWT

SEQ ID NO: 3249 - protein, 221 aa, Artificial Sequence
  Description of Artificial Sequence: Synthetic polypeptide
  XENP019243 [CTLA-4]_H0.33_L0_Fab Heavy Chain
QVQLVESGGGVVQPGRSLRLSCAASGFTFSSYTMSWVRQAPGKGLEWVTFISYDGNNKYYADSVKGRFTISRDNSKNTLYLQMNSLRAEDTAIYYCARTGWLGPFDYWGQGTLVTVSSASTKGPSVFPLAPSSKSTSGGTAALGCLVKDYFPEPVTVSWNSGALTSGVHTFPAVLQSSGLYSLSSVVTVPSSSLGTQTYICNVNHKPSNTKVDKKVEPKSC

SEQ ID NO: 3250 - protein, 118 aa, Artificial Sequence; identical to SEQ ID NO: 481
  Description of Artificial Sequence: Synthetic polypeptide
  VH of XENP019243

SEQ ID NO: 3251 - protein, 5 aa, Artificial Sequence
  Description of Artificial Sequence: Synthetic peptide
  XENP019243 vhCDR1
SYTMS

SEQ ID NO: 3252 - protein, 17 aa, Artificial Sequence
  Description of Artificial Sequence: Synthetic peptide
  XENP019243 vhCDR2
FISYDGNNKYYADSVKG

SEQ ID NO: 3253 - protein, 9 aa, Artificial Sequence
  Description of Artificial Sequence: Synthetic peptide
  XENP019243 vhCDR3
TGWLGPFDY

SEQ ID NO: 3254 - protein, 215 aa, Artificial Sequence; identical to SEQ ID NO: 2924
  Description of Artificial Sequence: Synthetic polypeptide
  XENP019243 [CTLA-4]_H0.33_L0_Fab Light Chain

SEQ ID NO: 3255 - protein, 108 aa, Artificial Sequence; identical to SEQ ID NO: 23
  Description of Artificial Sequence: Synthetic polypeptide
  VL of XENP019243

SEQ ID NO: 3256 - protein, 12 aa, Artificial Sequence
  Description of Artificial Sequence: Synthetic peptide
  XENP019243 vlCDR1
RASQSVGSSYLA

SEQ ID NO: 3257 - protein, 7 aa, Artificial Sequence
  Description of Artificial Sequence: Synthetic peptide
  XENP019243 vlCDR2
GAFSRAT

SEQ ID NO: 3258 - protein, 9 aa, Artificial Sequence
  Description of Artificial Sequence: Synthetic peptide
  XENP019243 vlCDR3
QQYGSSPWT

SEQ ID NO: 3259 - protein, 221 aa, Artificial Sequence
  Description of Artificial Sequence: Synthetic polypeptide
  XENP019244 [CTLA-4]_H0.34_L0_Fab Heavy Chain
QVQLVESGGGVVQPGRSLRLSCAASGFTFSSYTMYWVRQAPGKGLEWVTFISYDGNNKYYADSVKGRFTISRDNSKNTLYLQMNSLRAEDTAIYYCARTGWLGPFDYWGQGTLVTVSSASTKGPSVFPLAPSSKSTSGGTAALGCLVKDYFPEPVTVSWNSGALTSGVHTFPAVLQSSGLYSLSSVVTVPSSSLGTQTYICNVNHKPSNTKVDKKVEPKSC

SEQ ID NO: 3260 - protein, 118 aa, Artificial Sequence; identical to SEQ ID NO: 490
  Description of Artificial Sequence: Synthetic polypeptide
  VH of XENP019244

SEQ ID NO: 3261 - protein, 5 aa, Artificial Sequence
  Description of Artificial Sequence: Synthetic peptide
  XENP019244 vhCDR1
SYTMY

SEQ ID NO: 3262 - protein, 17 aa, Artificial Sequence
  Description of Artificial Sequence: Synthetic peptide
  XENP019244 vhCDR2
FISYDGNNKYYADSVKG

SEQ ID NO: 3263 - protein, 9 aa, Artificial Sequence
  Description of Artificial Sequence: Synthetic peptide
  XENP019244 vhCDR3
TGWLGPFDY

SEQ ID NO: 3264 - protein, 215 aa, Artificial Sequence; identical to SEQ ID NO: 2924
  Description of Artificial Sequence: Synthetic polypeptide
  XENP019244 [CTLA-4]_H0.34_L0_Fab Light Chain

SEQ ID NO: 3265 - protein, 108 aa, Artificial Sequence; identical to SEQ ID NO: 23
  Description of Artificial Sequence: Synthetic polypeptide
  VL of XENP019244

SEQ ID NO: 3266 - protein, 12 aa, Artificial Sequence
  Description of Artificial Sequence: Synthetic peptide
  XENP019244 vlCDR1
RASQSVGSSYLA

SEQ ID NO: 3267 - protein, 7 aa, Artificial Sequence
  Description of Artificial Sequence: Synthetic peptide
  XENP019244 vlCDR2
GAFSRAT

SEQ ID NO: 3268 - protein, 9 aa, Artificial Sequence
  Description of Artificial Sequence: Synthetic peptide
  XENP019244 vlCDR3
QQYGSSPWT

SEQ ID NO: 3269 - protein, 221 aa, Artificial Sequence
  Description of Artificial Sequence: Synthetic polypeptide
  XENP019245 [CTLA-4]_H0.35_L0_Fab Heavy Chain
QVQLVESGGGVVQPGRSLRLSCAASGFTFSSYTMHWIRQAPGKGLEWVTFISYDGNNKYYADSVKGRFTISRDNSKNTLYLQMNSLRAEDTAIYYCARTGWLGPFDYWGQGTLVTVSSASTKGPSVFPLAPSSKSTSGGTAALGCLVKDYFPEPVTVSWNSGALTSGVHTFPAVLQSSGLYSLSSVVTVPSSSLGTQTYICNVNHKPSNTKVDKKVEPKSC

SEQ ID NO: 3270 - protein, 118 aa, Artificial Sequence; identical to SEQ ID NO: 499
  Description of Artificial Sequence: Synthetic polypeptide
  VH of XENP019245

SEQ ID NO: 3271 - protein, 5 aa, Artificial Sequence
  Description of Artificial Sequence: Synthetic peptide
  XENP019245 vhCDR1
SYTMH

SEQ ID NO: 3272 - protein, 17 aa, Artificial Sequence
  Description of Artificial Sequence: Synthetic peptide
  XENP019245 vhCDR2
FISYDGNNKYYADSVKG

SEQ ID NO: 3273 - protein, 9 aa, Artificial Sequence
  Description of Artificial Sequence: Synthetic peptide
  XENP019245 vhCDR3
TGWLGPFDY

SEQ ID NO: 3274 - protein, 215 aa, Artificial Sequence; identical to SEQ ID NO: 2924
  Description of Artificial Sequence: Synthetic polypeptide
  XENP019245 [CTLA-4]_H0.35_L0_Fab Light Chain

SEQ ID NO: 3275 - protein, 108 aa, Artificial Sequence; identical to SEQ ID NO: 23
  Description of Artificial Sequence: Synthetic polypeptide
  VL of XENP019245

SEQ ID NO: 3276 - protein, 12 aa, Artificial Sequence
  Description of Artificial Sequence: Synthetic peptide
  XENP019245 vlCDR1
RASQSVGSSYLA

SEQ ID NO: 3277 - protein, 7 aa, Artificial Sequence
  Description of Artificial Sequence: Synthetic peptide
  XENP019245 vlCDR2
GAFSRAT

SEQ ID NO: 3278 - protein, 9 aa, Artificial Sequence
  Description of Artificial Sequence: Synthetic peptide
  XENP019245 vlCDR3
QQYGSSPWT

SEQ ID NO: 3279 - protein, 221 aa, Artificial Sequence
  Description of Artificial Sequence: Synthetic polypeptide
  XENP019246 [CTLA-4]_H0.36_L0_Fab Heavy Chain
QVQLVESGGGVVQPGRSLRLSCAASGFTFSSYTMHWVRKAPGKGLEWVTFISYDGNNKYYADSVKGRFTISRDNSKNTLYLQMNSLRAEDTAIYYCARTGWLGPFDYWGQGTLVTVSSASTKGPSVFPLAPSSKSTSGGTAALGCLVKDYFPEPVTVSWNSGALTSGVHTFPAVLQSSGLYSLSSVVTVPSSSLGTQTYICNVNHKPSNTKVDKKVEPKSC

SEQ ID NO: 3280 - protein, 118 aa, Artificial Sequence; identical to SEQ ID NO: 31
  Description of Artificial Sequence: Synthetic polypeptide
  VH of XENP019246

SEQ ID NO: 3281 - protein, 5 aa, Artificial Sequence
  Description of Artificial Sequence: Synthetic peptide
  XENP019246 vhCDR1
SYTMH

SEQ ID NO: 3282 - protein, 17 aa, Artificial Sequence
  Description of Artificial Sequence: Synthetic peptide
  XENP019246 vhCDR2
FISYDGNNKYYADSVKG

SEQ ID NO: 3283 - protein, 9 aa, Artificial Sequence
  Description of Artificial Sequence: Synthetic peptide
  XENP019246 vhCDR3
TGWLGPFDY

SEQ ID NO: 3284 - protein, 215 aa, Artificial Sequence; identical to SEQ ID NO: 2924
  Description of Artificial Sequence: Synthetic polypeptide
  XENP019246 [CTLA-4]_H0.36_L0_Fab Light Chain

SEQ ID NO: 3285 - protein, 108 aa, Artificial Sequence; identical to SEQ ID NO: 23
  Description of Artificial Sequence: Synthetic polypeptide
  VL of XENP019246

SEQ ID NO: 3286 - protein, 12 aa, Artificial Sequence
  Description of Artificial Sequence: Synthetic peptide
  XENP019246 vlCDR1
RASQSVGSSYLA

SEQ ID NO: 3287 - protein, 7 aa, Artificial Sequence
  Description of Artificial Sequence: Synthetic peptide
  XENP019246 vlCDR2
GAFSRAT

SEQ ID NO: 3288 - protein, 9 aa, Artificial Sequence
  Description of Artificial Sequence: Synthetic peptide
  XENP019246 vlCDR3
QQYGSSPWT

SEQ ID NO: 3289 - protein, 221 aa, Artificial Sequence
  Description of Artificial Sequence: Synthetic polypeptide
  XENP019247 [CTLA-4]_H0.37_L0_Fab Heavy Chain
QVQLVESGGGVVQPGRSLRLSCAASGFTFSSYTMHWVRQAPGKRLEWVTFISYDGNNKYYADSVKGRFTISRDNSKNTLYLQMNSLRAEDTAIYYCARTGWLGPFDYWGQGTLVTVSSASTKGPSVFPLAPSSKSTSGGTAALGCLVKDYFPEPVTVSWNSGALTSGVHTFPAVLQSSGLYSLSSVVTVPSSSLGTQTYICNVNHKPSNTKVDKKVEPKSC

SEQ ID NO: 3290 - protein, 118 aa, Artificial Sequence; identical to SEQ ID NO: 49
  Description of Artificial Sequence: Synthetic polypeptide
  VH of XENP019247

SEQ ID NO: 3291 - protein, 5 aa, Artificial Sequence
  Description of Artificial Sequence: Synthetic peptide
  XENP019247 vhCDR1
SYTMH

SEQ ID NO: 3292 - protein, 17 aa, Artificial Sequence
  Description of Artificial Sequence: Synthetic peptide
  XENP019247 vhCDR2
FISYDGNNKYYADSVKG

SEQ ID NO: 3293 - protein, 9 aa, Artificial Sequence
  Description of Artificial Sequence: Synthetic peptide
  XENP019247 vhCDR3
TGWLGPFDY

SEQ ID NO: 3294 - protein, 215 aa, Artificial Sequence; identical to SEQ ID NO: 2924
  Description of Artificial Sequence: Synthetic polypeptide
  XENP019247 [CTLA-4]_H0.37_L0_Fab Light Chain

SEQ ID NO: 3295 - protein, 108 aa, Artificial Sequence; identical to SEQ ID NO: 23
  Description of Artificial Sequence: Synthetic polypeptide
  VL of XENP019247

SEQ ID NO: 3296 - protein, 12 aa, Artificial Sequence
  Description of Artificial Sequence: Synthetic peptide
  XENP019247 vlCDR1
RASQSVGSSYLA

SEQ ID NO: 3297 - protein, 7 aa, Artificial Sequence
  Description of Artificial Sequence: Synthetic peptide
  XENP019247 vlCDR2
GAFSRAT

SEQ ID NO: 3298 - protein, 9 aa, Artificial Sequence
  Description of Artificial Sequence: Synthetic peptide
  XENP019247 vlCDR3
QQYGSSPWT

SEQ ID NO: 3299 - protein, 221 aa, Artificial Sequence
  Description of Artificial Sequence: Synthetic polypeptide
  XENP019248 [CTLA-4]_H0.38_L0_Fab Heavy Chain
QVQLVESGGGVVQPGRSLRLSCAASGFTFSSYTMHWVRQAPGKGLEWVAFISYDGNNKYYADSVKGRFTISRDNSKNTLYLQMNSLRAEDTAIYYCARTGWLGPFDYWGQGTLVTVSSASTKGPSVFPLAPSSKSTSGGTAALGCLVKDYFPEPVTVSWNSGALTSGVHTFPAVLQSSGLYSLSSVVTVPSSSLGTQTYICNVNHKPSNTKVDKKVEPKSC

SEQ ID NO: 3300 - protein, 118 aa, Artificial Sequence; identical to SEQ ID NO: 526
  Description of Artificial Sequence: Synthetic polypeptide
  VH of XENP019248

SEQ ID NO: 3301 - protein, 5 aa, Artificial Sequence
  Description of Artificial Sequence: Synthetic peptide
  XENP019248 vhCDR1
SYTMH

SEQ ID NO: 3302 - protein, 17 aa, Artificial Sequence
  Description of Artificial Sequence: Synthetic peptide
  XENP019248 vhCDR2
FISYDGNNKYYADSVKG

SEQ ID NO: 3303 - protein, 9 aa, Artificial Sequence
  Description of Artificial Sequence: Synthetic peptide
  XENP019248 vhCDR3
TGWLGPFDY

SEQ ID NO: 3304 - protein, 215 aa, Artificial Sequence; identical to SEQ ID NO: 2924
  Description of Artificial Sequence: Synthetic polypeptide
  XENP019248 [CTLA-4]_H0.38_L0_Fab Light Chain

SEQ ID NO: 3305 - protein, 108 aa, Artificial Sequence; identical to SEQ ID NO: 23
  Description of Artificial Sequence: Synthetic polypeptide
  VL of XENP019248

SEQ ID NO: 3306 - protein, 12 aa, Artificial Sequence
  Description of Artificial Sequence: Synthetic peptide
  XENP019248 vlCDR1
RASQSVGSSYLA

SEQ ID NO: 3307 - protein, 7 aa, Artificial Sequence
  Description of Artificial Sequence: Synthetic peptide
  XENP019248 vlCDR2
GAFSRAT

SEQ ID NO: 3308 - protein, 9 aa, Artificial Sequence
  Description of Artificial Sequence: Synthetic peptide
  XENP019248 vlCDR3
QQYGSSPWT

SEQ ID NO: 3309 - protein, 221 aa, Artificial Sequence
  Description of Artificial Sequence: Synthetic polypeptide
  XENP019249 [CTLA-4]_H0.39_L0_Fab Heavy Chain
QVQLVESGGGVVQPGRSLRLSCAASGFTFSSYTMHWVRQAPGKGLEWVGFISYDGNNKYYADSVKGRFTISRDNSKNTLYLQMNSLRAEDTAIYYCARTGWLGPFDYWGQGTLVTVSSASTKGPSVFPLAPSSKSTSGGTAALGCLVKDYFPEPVTVSWNSGALTSGVHTFPAVLQSSGLYSLSSVVTVPSSSLGTQTYICNVNHKPSNTKVDKKVEPKSC

SEQ ID NO: 3310 - protein, 118 aa, Artificial Sequence; identical to SEQ ID NO: 535
  Description of Artificial Sequence: Synthetic polypeptide
  VH of XENP019249

SEQ ID NO: 3311 - protein, 5 aa, Artificial Sequence
  Description of Artificial Sequence: Synthetic peptide
  XENP019249 vhCDR1
SYTMH

SEQ ID NO: 3312 - protein, 17 aa, Artificial Sequence
  Description of Artificial Sequence: Synthetic peptide
  XENP019249 vhCDR2
FISYDGNNKYYADSVKG

SEQ ID NO: 3313 - protein, 9 aa, Artificial Sequence
  Description of Artificial Sequence: Synthetic peptide
  XENP019249 vhCDR3
TGWLGPFDY

SEQ ID NO: 3314 - protein, 215 aa, Artificial Sequence; identical to SEQ ID NO: 2924
  Description of Artificial Sequence: Synthetic polypeptide
  XENP019249 [CTLA-4]_H0.39_L0_Fab Light Chain

SEQ ID NO: 3315 - protein, 108 aa, Artificial Sequence; identical to SEQ ID NO: 23
  Description of Artificial Sequence: Synthetic polypeptide
  VL of XENP019249

SEQ ID NO: 3316 - protein, 12 aa, Artificial Sequence
  Description of Artificial Sequence: Synthetic peptide
  XENP019249 vlCDR1
RASQSVGSSYLA

SEQ ID NO: 3317 - protein, 7 aa, Artificial Sequence
  Description of Artificial Sequence: Synthetic peptide
  XENP019249 vlCDR2
GAFSRAT

SEQ ID NO: 3318 - protein, 9 aa, Artificial Sequence
  Description of Artificial Sequence: Synthetic peptide
  XENP019249 vlCDR3
QQYGSSPWT

SEQ ID NO: 3319 - protein, 221 aa, Artificial Sequence
  Description of Artificial Sequence: Synthetic polypeptide
  XENP019250 [CTLA-4]_H0.40_L0_Fab Heavy Chain
QVQLVESGGGVVQPGRSLRLSCAASGFTFSSYTMHWVRQAPGKGLEWVSFISYDGNNKYYADSVKGRFTISRDNSKNTLYLQMNSLRAEDTAIYYCARTGWLGPFDYWGQGTLVTVSSASTKGPSVFPLAPSSKSTSGGTAALGCLVKDYFPEPVTVSWNSGALTSGVHTFPAVLQSSGLYSLSSVVTVPSSSLGTQTYICNVNHKPSNTKVDKKVEPKSC

SEQ ID NO: 3320 - protein, 118 aa, Artificial Sequence; identical to SEQ ID NO: 544
  Description of Artificial Sequence: Synthetic polypeptide
  VH of XENP019250

SEQ ID NO: 3321 - protein, 5 aa, Artificial Sequence
  Description of Artificial Sequence: Synthetic peptide
  XENP019250 vhCDR1
SYTMH

SEQ ID NO: 3322 - protein, 17 aa, Artificial Sequence
  Description of Artificial Sequence: Synthetic peptide
  XENP019250 vhCDR2
FISYDGNNKYYADSVKG

SEQ ID NO: 3323 - protein, 9 aa, Artificial Sequence
  Description of Artificial Sequence: Synthetic peptide
  XENP019250 vhCDR3
TGWLGPFDY

SEQ ID NO: 3324 - protein, 215 aa, Artificial Sequence; identical to SEQ ID NO: 2924
  Description of Artificial Sequence: Synthetic polypeptide
  XENP019250 [CTLA-4]_H0.40_L0_Fab Light Chain

SEQ ID NO: 3325 - protein, 108 aa, Artificial Sequence; identical to SEQ ID NO: 23
  Description of Artificial Sequence: Synthetic polypeptide
  VL of XENP019250

SEQ ID NO: 3326 - protein, 12 aa, Artificial Sequence
  Description of Artificial Sequence: Synthetic peptide
  XENP019250 vlCDR1
RASQSVGSSYLA

SEQ ID NO: 3327 - protein, 7 aa, Artificial Sequence
  Description of Artificial Sequence: Synthetic peptide
  XENP019250 vlCDR2
GAFSRAT

SEQ ID NO: 3328 - protein, 9 aa, Artificial Sequence
  Description of Artificial Sequence: Synthetic peptide
  XENP019250 vlCDR3
QQYGSSPWT

SEQ ID NO: 3329 - protein, 221 aa, Artificial Sequence
  Description of Artificial Sequence: Synthetic polypeptide
  XENP019251 [CTLA-4]_H0.41_L0_Fab Heavy Chain
QVQLVESGGGVVQPGRSLRLSCAASGFTFSSYTMHWVRQAPGKGLEWVVFISYDGNNKYYADSVKGRFTISRDNSKNTLYLQMNSLRAEDTAIYYCARTGWLGPFDYWGQGTLVTVSSASTKGPSVFPLAPSSKSTSGGTAALGCLVKDYFPEPVTVSWNSGALTSGVHTFPAVLQSSGLYSLSSVVTVPSSSLGTQTYICNVNHKPSNTKVDKKVEPKSC

SEQ ID NO: 3330 - protein, 118 aa, Artificial Sequence; identical to SEQ ID NO: 553
  Description of Artificial Sequence: Synthetic polypeptide
  VH of XENP019251

SEQ ID NO: 3331 - protein, 5 aa, Artificial Sequence
  Description of Artificial Sequence: Synthetic peptide
  XENP019251 vhCDR1
SYTMH

SEQ ID NO: 3332 - protein, 17 aa, Artificial Sequence
  Description of Artificial Sequence: Synthetic peptide
  XENP019251 vhCDR2
FISYDGNNKYYADSVKG

SEQ ID NO: 3333 - protein, 9 aa, Artificial Sequence
  Description of Artificial Sequence: Synthetic peptide
  XENP019251 vhCDR3
TGWLGPFDY

SEQ ID NO: 3334 - protein, 215 aa, Artificial Sequence; identical to SEQ ID NO: 2924
  Description of Artificial Sequence: Synthetic polypeptide
  XENP019251 [CTLA-4]_H0.41_L0_Fab Light Chain

SEQ ID NO: 3335 - protein, 108 aa, Artificial Sequence; identical to SEQ ID NO: 23
  Description of Artificial Sequence: Synthetic polypeptide
  VL of XENP019251

SEQ ID NO: 3336 - protein, 12 aa, Artificial Sequence
  Description of Artificial Sequence: Synthetic peptide
  XENP019251 vlCDR1
RASQSVGSSYLA

SEQ ID NO: 3337 - protein, 7 aa, Artificial Sequence
  Description of Artificial Sequence: Synthetic peptide
  XENP019251 vlCDR2
GAFSRAT

SEQ ID NO: 3338 - protein, 9 aa, Artificial Sequence
  Description of Artificial Sequence: Synthetic peptide
  XENP019251 vlCDR3
QQYGSSPWT

SEQ ID NO: 3339 - protein, 221 aa, Artificial Sequence
  Description of Artificial Sequence: Synthetic polypeptide
  XENP019252 [CTLA-4]_H0.42_L0_Fab Heavy Chain
QVQLVESGGGVVQPGRSLRLSCAASGFTFSSYTMHWVRQAPGKGLEWVTAISYDGNNKYYADSVKGRFTISRDNSKNTLYLQMNSLRAEDTAIYYCARTGWLGPFDYWGQGTLVTVSSASTKGPSVFPLAPSSKSTSGGTAALGCLVKDYFPEPVTVSWNSGALTSGVHTFPAVLQSSGLYSLSSVVTVPSSSLGTQTYICNVNHKPSNTKVDKKVEPKSC

SEQ ID NO: 3340 - protein, 118 aa, Artificial Sequence; identical to SEQ ID NO: 562
  Description of Artificial Sequence: Synthetic polypeptide
  VH of XENP019252

SEQ ID NO: 3341 - protein, 5 aa, Artificial Sequence
  Description of Artificial Sequence: Synthetic peptide
  XENP019252 vhCDR1
SYTMH

SEQ ID NO: 3342 - protein, 17 aa, Artificial Sequence
  Description of Artificial Sequence: Synthetic peptide
  XENP019252 vhCDR2
AISYDGNNKYYADSVKG

SEQ ID NO: 3343 - protein, 9 aa, Artificial Sequence
  Description of Artificial Sequence: Synthetic peptide
  XENP019252 vhCDR3
TGWLGPFDY

SEQ ID NO: 3344 - protein, 215 aa, Artificial Sequence; identical to SEQ ID NO: 2924
  Description of Artificial Sequence: Synthetic polypeptide
  XENP019252 [CTLA-4]_H0.42_L0_Fab Light Chain

SEQ ID NO: 3345 - protein, 108 aa, Artificial Sequence; identical to SEQ ID NO: 23
  Description of Artificial Sequence: Synthetic polypeptide
  VL of XENP019252

SEQ ID NO: 3346 - protein, 12 aa, Artificial Sequence
  Description of Artificial Sequence: Synthetic peptide
  XENP019252 vlCDR1
RASQSVGSSYLA

SEQ ID NO: 3347 - protein, 7 aa, Artificial Sequence
  Description of Artificial Sequence: Synthetic peptide
  XENP019252 vlCDR2
GAFSRAT

SEQ ID NO: 3348 - protein, 9 aa, Artificial Sequence
  Description of Artificial Sequence: Synthetic peptide
  XENP019252 vlCDR3
QQYGSSPWT

SEQ ID NO: 3349 - protein, 221 aa, Artificial Sequence
  Description of Artificial Sequence: Synthetic polypeptide
  XENP019253 [CTLA-4]_H0.43_L0_Fab Heavy Chain
QVQLVESGGGVVQPGRSLRLSCAASGFTFSSYTMHWVRQAPGKGLEWVTGISYDGNNKYYADSVKGRFTISRDNSKNTLYLQMNSLRAEDTAIYYCARTGWLGPFDYWGQGTLVTVSSASTKGPSVFPLAPSSKSTSGGTAALGCLVKDYFPEPVTVSWNSGALTSGVHTFPAVLQSSGLYSLSSVVTVPSSSLGTQTYICNVNHKPSNTKVDKKVEPKSC

SEQ ID NO: 3350 - protein, 118 aa, Artificial Sequence; identical to SEQ ID NO: 571
  Description of Artificial Sequence: Synthetic polypeptide
  VH of XENP019253

SEQ ID NO: 3351 - protein, 5 aa, Artificial Sequence
  Description of Artificial Sequence: Synthetic peptide
  XENP019253 vhCDR1
SYTMH

SEQ ID NO: 3352 - protein, 17 aa, Artificial Sequence
  Description of Artificial Sequence: Synthetic peptide
  XENP019253 vhCDR2
GISYDGNNKYYADSVKG

SEQ ID NO: 3353 - protein, 9 aa, Artificial Sequence
  Description of Artificial Sequence: Synthetic peptide
  XENP019253 vhCDR3
TGWLGPFDY

SEQ ID NO: 3354 - protein, 215 aa, Artificial Sequence; identical to SEQ ID NO: 2924
  Description of Artificial Sequence: Synthetic polypeptide
  XENP019253 [CTLA-4]_H0.43_L0_Fab Light Chain

SEQ ID NO: 3355 - protein, 108 aa, Artificial Sequence; identical to SEQ ID NO: 23
  Description of Artificial Sequence: Synthetic polypeptide
  VL of XENP019253

SEQ ID NO: 3356 - protein, 12 aa, Artificial Sequence
  Description of Artificial Sequence: Synthetic peptide
  XENP019253 vlCDR1
RASQSVGSSYLA

SEQ ID NO: 3357 - protein, 7 aa, Artificial Sequence
  Description of Artificial Sequence: Synthetic peptide
  XENP019253 vlCDR2
GAFSRAT

SEQ ID NO: 3358 - protein, 9 aa, Artificial Sequence
  Description of Artificial Sequence: Synthetic peptide
  XENP019253 vlCDR3
QQYGSSPWT

SEQ ID NO: 3359 - protein, 221 aa, Artificial Sequence
  Description of Artificial Sequence: Synthetic polypeptide
  XENP019254 [CTLA-4]_H0.44_L0_Fab Heavy Chain
QVQLVESGGGVVQPGRSLRLSCAASGFTFSSYTMHWVRQAPGKGLEWVTLISYDGNNKYYADSVKGRFTISRDNSKNTLYLQMNSLRAEDTAIYYCARTGWLGPFDYWGQGTLVTVSSASTKGPSVFPLAPSSKSTSGGTAALGCLVKDYFPEPVTVSWNSGALTSGVHTFPAVLQSSGLYSLSSVVTVPSSSLGTQTYICNVNHKPSNTKVDKKVEPKSC

SEQ ID NO: 3360 - protein, 118 aa, Artificial Sequence; identical to SEQ ID NO: 580
  Description of Artificial Sequence: Synthetic polypeptide
  VH of XENP019254

SEQ ID NO: 3361 - protein, 5 aa, Artificial Sequence
  Description of Artificial Sequence: Synthetic peptide
  XENP019254 vhCDR1
SYTMH

SEQ ID NO: 3362 - protein, 17 aa, Artificial Sequence
  Description of Artificial Sequence: Synthetic peptide
  XENP019254 vhCDR2
LISYDGNNKYYADSVKG

SEQ ID NO: 3363 - protein, 9 aa, Artificial Sequence
  Description of Artificial Sequence: Synthetic peptide
  XENP019254 vhCDR3
TGWLGPFDY

SEQ ID NO: 3364 - protein, 215 aa, Artificial Sequence; identical to SEQ ID NO: 2924
  Description of Artificial Sequence: Synthetic polypeptide
  XENP019254 [CTLA-4]_H0.44_L0_Fab Light Chain

SEQ ID NO: 3365 - protein, 108 aa, Artificial Sequence; identical to SEQ ID NO: 23
  Description of Artificial Sequence: Synthetic polypeptide
  VL of XENP019254

SEQ ID NO: 3366 - protein, 12 aa, Artificial Sequence
  Description of Artificial Sequence: Synthetic peptide
  XENP019254 vlCDR1
RASQSVGSSYLA

SEQ ID NO: 3367 - protein, 7 aa, Artificial Sequence
  Description of Artificial Sequence: Synthetic peptide
  XENP019254 vlCDR2
GAFSRAT

SEQ ID NO: 3368 - protein, 9 aa, Artificial Sequence
  Description of Artificial Sequence: Synthetic peptide
  XENP019254 vlCDR3
QQYGSSPWT

SEQ ID NO: 3369 - protein, 221 aa, Artificial Sequence
  Description of Artificial Sequence: Synthetic polypeptide
  XENP019255 [CTLA-4]_H0.45_L0_Fab Heavy Chain
QVQLVESGGGVVQPGRSLRLSCAASGFTFSSYTMHWVRQAPGKGLEWVTIISYDGNNKYYADSVKGRFTISRDNSKNTLYLQMNSLRAEDTAIYYCARTGWLGPFDYWGQGTLVTVSSASTKGPSVFPLAPSSKSTSGGTAALGCLVKDYFPEPVTVSWNSGALTSGVHTFPAVLQSSGLYSLSSVVTVPSSSLGTQTYICNVNHKPSNTKVDKKVEPKSC

SEQ ID NO: 3370 - protein, 118 aa, Artificial Sequence; identical to SEQ ID NO: 589
  Description of Artificial Sequence: Synthetic polypeptide
  VH of XENP019255

SEQ ID NO: 3371 - protein, 5 aa, Artificial Sequence
  Description of Artificial Sequence: Synthetic peptide
  XENP019255 vhCDR1
SYTMH

SEQ ID NO: 3372 - protein, 17 aa, Artificial Sequence
  Description of Artificial Sequence: Synthetic peptide
  XENP019255 vhCDR2
IISYDGNNKYYADSVKG

SEQ ID NO: 3373 - protein, 9 aa, Artificial Sequence
  Description of Artificial Sequence: Synthetic peptide
  XENP019255 vhCDR3
TGWLGPFDY

SEQ ID NO: 3374 - protein, 215 aa, Artificial Sequence; identical to SEQ ID NO: 2924
  Description of Artificial Sequence: Synthetic polypeptide
  XENP019255 [CTLA-4]_H0.45_L0_Fab Light Chain

SEQ ID NO: 3375 - protein, 108 aa, Artificial Sequence; identical to SEQ ID NO: 23
  Description of Artificial Sequence: Synthetic polypeptide
  VL of XENP019255

SEQ ID NO: 3376 - protein, 12 aa, Artificial Sequence
  Description of Artificial Sequence: Synthetic peptide
  XENP019255 vlCDR1
RASQSVGSSYLA

SEQ ID NO: 3377 - protein, 7 aa, Artificial Sequence
  Description of Artificial Sequence: Synthetic peptide
  XENP019255 vlCDR2
GAFSRAT

SEQ ID NO: 3378 - protein, 9 aa, Artificial Sequence
  Description of Artificial Sequence: Synthetic peptide
  XENP019255 vlCDR3
QQYGSSPWT

SEQ ID NO: 3379 - protein, 221 aa, Artificial Sequence
  Description of Artificial Sequence: Synthetic polypeptide
  XENP019256 [CTLA-4]_H0.46_L0_Fab Heavy Chain
QVQLVESGGGVVQPGRSLRLSCAASGFTFSSYTMHWVRQAPGKGLEWVTRISYDGNNKYYADSVKGRFTISRDNSKNTLYLQMNSLRAEDTAIYYCARTGWLGPFDYWGQGTLVTVSSASTKGPSVFPLAPSSKSTSGGTAALGCLVKDYFPEPVTVSWNSGALTSGVHTFPAVLQSSGLYSLSSVVTVPSSSLGTQTYICNVNHKPSNTKVDKKVEPKSC

SEQ ID NO: 3380 - protein, 118 aa, Artificial Sequence; identical to SEQ ID NO: 598
  Description of Artificial Sequence: Synthetic polypeptide
  VH of XENP019256

SEQ ID NO: 3381 - protein, 5 aa, Artificial Sequence
  Description of Artificial Sequence: Synthetic peptide
  XENP019256 vhCDR1
SYTMH

SEQ ID NO: 3382 - protein, 17 aa, Artificial Sequence
  Description of Artificial Sequence: Synthetic peptide
  XENP019256 vhCDR2
RISYDGNNKYYADSVKG

SEQ ID NO: 3383 - protein, 9 aa, Artificial Sequence
  Description of Artificial Sequence: Synthetic peptide
  XENP019256 vhCDR3
TGWLGPFDY

SEQ ID NO: 3384 - protein, 215 aa, Artificial Sequence; identical to SEQ ID NO: 2924
  Description of Artificial Sequence: Synthetic polypeptide
  XENP019256 [CTLA-4]_H0.46_L0_Fab Light Chain

SEQ ID NO: 3385 - protein, 108 aa, Artificial Sequence; identical to SEQ ID NO: 23
  Description of Artificial Sequence: Synthetic polypeptide
  VL of XENP019256

SEQ ID NO: 3386 - protein, 12 aa, Artificial Sequence
  Description of Artificial Sequence: Synthetic peptide
  XENP019256 vlCDR1
RASQSVGSSYLA

SEQ ID NO: 3387 - protein, 7 aa, Artificial Sequence
  Description of Artificial Sequence: Synthetic peptide
  XENP019256 vlCDR2
GAFSRAT

SEQ ID NO: 3388 - protein, 9 aa, Artificial Sequence
  Description of Artificial Sequence: Synthetic peptide
  XENP019256 vlCDR3
QQYGSSPWT

SEQ ID NO: 3389 - protein, 221 aa, Artificial Sequence
  Description of Artificial Sequence: Synthetic polypeptide
  XENP019257 [CTLA-4]_H0.47_L0_Fab Heavy Chain
QVQLVESGGGVVQPGRSLRLSCAASGFTFSSYTMHWVRQAPGKGLEWVTVISYDGNNKYYADSVKGRFTISRDNSKNTLYLQMNSLRAEDTAIYYCARTGWLGPFDYWGQGTLVTVSSASTKGPSVFPLAPSSKSTSGGTAALGCLVKDYFPEPVTVSWNSGALTSGVHTFPAVLQSSGLYSLSSVVTVPSSSLGTQTYICNVNHKPSNTKVDKKVEPKSC

SEQ ID NO: 3390 - protein, 118 aa, Artificial Sequence; identical to SEQ ID NO: 607
  Description of Artificial Sequence: Synthetic polypeptide
  VH of XENP019257

SEQ ID NO: 3391 - protein, 5 aa, Artificial Sequence
  Description of Artificial Sequence: Synthetic peptide
  XENP019257 vhCDR1
SYTMH

SEQ ID NO: 3392 - protein, 17 aa, Artificial Sequence
  Description of Artificial Sequence: Synthetic peptide
  XENP019257 vhCDR2
VISYDGNNKYYADSVKG

SEQ ID NO: 3393 - protein, 9 aa, Artificial Sequence
  Description of Artificial Sequence: Synthetic peptide
  XENP019257 vhCDR3
TGWLGPFDY

SEQ ID NO: 3394 - protein, 215 aa, Artificial Sequence; identical to SEQ ID NO: 2924
  Description of Artificial Sequence: Synthetic polypeptide
  XENP019257 [CTLA-4]_H0.47_L0_Fab Light Chain

SEQ ID NO: 3395 - protein, 108 aa, Artificial Sequence; identical to SEQ ID NO: 23
  Description of Artificial Sequence: Synthetic polypeptide
  VL of XENP019257

SEQ ID NO: 3396 - protein, 12 aa, Artificial Sequence
  Description of Artificial Sequence: Synthetic peptide
  XENP019257 vlCDR1
RASQSVGSSYLA

SEQ ID NO: 3397 - protein, 7 aa, Artificial Sequence
  Description of Artificial Sequence: Synthetic peptide
  XENP019257 vlCDR2
GAFSRAT

SEQ ID NO: 3398 - protein, 9 aa, Artificial Sequence
  Description of Artificial Sequence: Synthetic peptide
  XENP019257 vlCDR3
QQYGSSPWT

SEQ ID NO: 3399 - protein, 221 aa, Artificial Sequence
  Description of Artificial Sequence: Synthetic polypeptide
  XENP019258 [CTLA-4]_H0.48_L0_Fab Heavy Chain
QVQLVESGGGVVQPGRSLRLSCAASGFTFSSYTMHWVRQAPGKGLEWVTYISYDGNNKYYADSVKGRFTISRDNSKNTLYLQMNSLRAEDTAIYYCARTGWLGPFDYWGQGTLVTVSSASTKGPSVFPLAPSSKSTSGGTAALGCLVKDYFPEPVTVSWNSGALTSGVHTFPAVLQSSGLYSLSSVVTVPSSSLGTQTYICNVNHKPSNTKVDKKVEPKSC

SEQ ID NO: 3400 - protein, 118 aa, Artificial Sequence; identical to SEQ ID NO: 616
  Description of Artificial Sequence: Synthetic polypeptide
  VH of XENP019258

SEQ ID NO: 3401 - protein, 5 aa, Artificial Sequence
  Description of Artificial Sequence: Synthetic peptide
  XENP019258 vhCDR1
SYTMH

SEQ ID NO: 3402 - protein, 17 aa, Artificial Sequence
  Description of Artificial Sequence: Synthetic peptide
  XENP019258 vhCDR2
YISYDGNNKYYADSVKG

SEQ ID NO: 3403 - protein, 9 aa, Artificial Sequence
  Description of Artificial Sequence: Synthetic peptide
  XENP019258 vhCDR3
TGWLGPFDY

SEQ ID NO: 3404 - protein, 215 aa, Artificial Sequence; identical to SEQ ID NO: 2924
  Description of Artificial Sequence: Synthetic polypeptide
  XENP019258 [CTLA-4]_H0.48_L0_Fab Light Chain

SEQ ID NO: 3405 - protein, 108 aa, Artificial Sequence; identical to SEQ ID NO: 23
  Description of Artificial Sequence: Synthetic polypeptide
  VL of XENP019258

SEQ ID NO: 3406 - protein, 12 aa, Artificial Sequence
  Description of Artificial Sequence: Synthetic peptide
  XENP019258 vlCDR1
RASQSVGSSYLA

SEQ ID NO: 3407 - protein, 7 aa, Artificial Sequence
  Description of Artificial Sequence: Synthetic peptide
  XENP019258 vlCDR2
GAFSRAT

SEQ ID NO: 3408 - protein, 9 aa, Artificial Sequence
  Description of Artificial Sequence: Synthetic peptide
  XENP019258 vlCDR3
QQYGSSPWT

SEQ ID NO: 3409 - protein, 221 aa, Artificial Sequence
  Description of Artificial Sequence: Synthetic polypeptide
  XENP019259 [CTLA-4]_H0.49_L0_Fab Heavy Chain
QVQLVESGGGVVQPGRSLRLSCAASGFTFSSYTMHWVRQAPGKGLEWVTFESYDGNNKYYADSVKGRFTISRDNSKNTLYLQMNSLRAEDTAIYYCARTGWLGPFDYWGQGTLVTVSSASTKGPSVFPLAPSSKSTSGGTAALGCLVKDYFPEPVTVSWNSGALTSGVHTFPAVLQSSGLYSLSSVVTVPSSSLGTQTYICNVNHKPSNTKVDKKVEPKSC

SEQ ID NO: 3410 - protein, 118 aa, Artificial Sequence; identical to SEQ ID NO: 625
  Description of Artificial Sequence: Synthetic polypeptide
  VH of XENP019259

SEQ ID NO: 3411 - protein, 5 aa, Artificial Sequence
  Description of Artificial Sequence: Synthetic peptide
  XENP019259 vhCDR1
SYTMH

SEQ ID NO: 3412 - protein, 17 aa, Artificial Sequence
  Description of Artificial Sequence: Synthetic peptide
  XENP019259 vhCDR2
FESYDGNNKYYADSVKG

SEQ ID NO: 3413 - protein, 9 aa, Artificial Sequence
  Description of Artificial Sequence: Synthetic peptide
  XENP019259 vhCDR3
TGWLGPFDY

SEQ ID NO: 3414 - protein, 215 aa, Artificial Sequence; identical to SEQ ID NO: 2924
  Description of Artificial Sequence: Synthetic polypeptide
  XENP019259 [CTLA-4]_H0.49_L0_Fab Light Chain

SEQ ID NO: 3415 - protein, 108 aa, Artificial Sequence; identical to SEQ ID NO: 23
  Description of Artificial Sequence: Synthetic polypeptide
  VL of XENP019259

SEQ ID NO: 3416 - protein, 12 aa, Artificial Sequence
  Description of Artificial Sequence: Synthetic peptide
  XENP019259 vlCDR1
RASQSVGSSYLA

SEQ ID NO: 3417 - protein, 7 aa, Artificial Sequence
  Description of Artificial Sequence: Synthetic peptide
  XENP019259 vlCDR2
GAFSRAT

SEQ ID NO: 3418 - protein, 9 aa, Artificial Sequence
  Description of Artificial Sequence: Synthetic peptide
  XENP019259 vlCDR3
QQYGSSPWT

SEQ ID NO: 3419 - protein, 221 aa, Artificial Sequence
  Description of Artificial Sequence: Synthetic polypeptide
  XENP019260 [CTLA-4]_H0.50_L0_Fab Heavy Chain
QVQLVESGGGVVQPGRSLRLSCAASGFTFSSYTMHWVRQAPGKGLEWVTFHSYDGNNKYYADSVKGRFTISRDNSKNTLYLQMNSLRAEDTAIYYCARTGWLGPFDYWGQGTLVTVSSASTKGPSVFPLAPSSKSTSGGTAALGCLVKDYFPEPVTVSWNSGALTSGVHTFPAVLQSSGLYSLSSVVTVPSSSLGTQTYICNVNHKPSNTKVDKKVEPKSC

SEQ ID NO: 3420 - protein, 118 aa, Artificial Sequence; identical to SEQ ID NO: 634
  Description of Artificial Sequence: Synthetic polypeptide
  VH of XENP019260

SEQ ID NO: 3421 - protein, 5 aa, Artificial Sequence
  Description of Artificial Sequence: Synthetic peptide
  XENP019260 vhCDR1
SYTMH

SEQ ID NO: 3422 - protein, 17 aa, Artificial Sequence
  Description of Artificial Sequence: Synthetic peptide
  XENP019260 vhCDR2
FHSYDGNNKYYADSVKG

SEQ ID NO: 3423 - protein, 9 aa, Artificial Sequence
  Description of Artificial Sequence: Synthetic peptide
  XENP019260 vhCDR3
TGWLGPFDY

SEQ ID NO: 3424 - protein, 215 aa, Artificial Sequence; identical to SEQ ID NO: 2924
  Description of Artificial Sequence: Synthetic polypeptide
  XENP019260 [CTLA-4]_H0.50_L0_Fab Light Chain

SEQ ID NO: 3425 - protein, 108 aa, Artificial Sequence; identical to SEQ ID NO: 23
  Description of Artificial Sequence: Synthetic polypeptide
  VL of XENP019260

SEQ ID NO: 3426 - protein, 12 aa, Artificial Sequence
  Description of Artificial Sequence: Synthetic peptide
  XENP019260 vlCDR1
RASQSVGSSYLA

SEQ ID NO: 3427 - protein, 7 aa, Artificial Sequence
  Description of Artificial Sequence: Synthetic peptide
  XENP019260 vlCDR2
GAFSRAT

SEQ ID NO: 3428 - protein, 9 aa, Artificial Sequence
  Description of Artificial Sequence: Synthetic peptide
  XENP019260 vlCDR3
QQYGSSPWT

SEQ ID NO: 3429 - protein, 221 aa, Artificial Sequence
  Description of Artificial Sequence: Synthetic polypeptide
  XENP019261 [CTLA-4]_H0.51_L0_Fab Heavy Chain
QVQLVESGGGVVQPGRSLRLSCAASGFTFSSYTMHWVRQAPGKGLEWVTFTSYDGNNKYYADSVKGRFTISRDNSKNTLYLQMNSLRAEDTAIYYCARTGWLGPFDYWGQGTLVTVSSASTKGPSVFPLAPSSKSTSGGTAALGCLVKDYFPEPVTVSWNSGALTSGVHTFPAVLQSSGLYSLSSVVTVPSSSLGTQTYICNVNHKPSNTKVDKKVEPKSC

SEQ ID NO: 3430 - protein, 118 aa, Artificial Sequence; identical to SEQ ID NO: 643
  Description of Artificial Sequence: Synthetic polypeptide
  VH of XENP019261

SEQ ID NO: 3431 - protein, 5 aa, Artificial Sequence
  Description of Artificial Sequence: Synthetic peptide
  XENP019261 vhCDR1
SYTMH

SEQ ID NO: 3432 - protein, 17 aa, Artificial Sequence
  Description of Artificial Sequence: Synthetic peptide
  XENP019261 vhCDR2
FTSYDGNNKYYADSVKG

SEQ ID NO: 3433 - protein, 9 aa, Artificial Sequence
  Description of Artificial Sequence: Synthetic peptide
  XENP019261 vhCDR3
TGWLGPFDY

SEQ ID NO: 3434 - protein, 215 aa, Artificial Sequence; identical to SEQ ID NO: 2924
  Description of Artificial Sequence: Synthetic polypeptide
  XENP019261 [CTLA-4]_H0.51_L0_Fab Light Chain

SEQ ID NO: 3435 - protein, 108 aa, Artificial Sequence; identical to SEQ ID NO: 23
  Description of Artificial Sequence: Synthetic polypeptide
  VL of XENP019261

SEQ ID NO: 3436 - protein, 12 aa, Artificial Sequence
  Description of Artificial Sequence: Synthetic peptide
  XENP019261 vlCDR1
RASQSVGSSYLA

SEQ ID NO: 3437 - protein, 7 aa, Artificial Sequence
  Description of Artificial Sequence: Synthetic peptide
  XENP019261 vlCDR2
GAFSRAT

SEQ ID NO: 3438 - protein, 9 aa, Artificial Sequence
  Description of Artificial Sequence: Synthetic peptide
  XENP019261 vlCDR3
QQYGSSPWT

SEQ ID NO: 3439 - protein, 221 aa, Artificial Sequence
  Description of Artificial Sequence: Synthetic polypeptide
  XENP019262 [CTLA-4]_H0.52_L0_Fab Heavy Chain
QVQLVESGGGVVQPGRSLRLSCAASGFTFSSYTMHWVRQAPGKGLEWVTFVSYDGNNKYYADSVKGRFTISRDNSKNTLYLQMNSLRAEDTAIYYCARTGWLGPFDYWGQGTLVTVSSASTKGPSVFPLAPSSKSTSGGTAALGCLVKDYFPEPVTVSWNSGALTSGVHTFPAVLQSSGLYSLSSVVTVPSSSLGTQTYICNVNHKPSNTKVDKKVEPKSC

SEQ ID NO: 3440 - protein, 118 aa, Artificial Sequence; identical to SEQ ID NO: 652
  Description of Artificial Sequence: Synthetic polypeptide
  VH of XENP019262

SEQ ID NO: 3441 - protein, 5 aa, Artificial Sequence
  Description of Artificial Sequence: Synthetic peptide
  XENP019262 vhCDR1
SYTMH

SEQ ID NO: 3442 - protein, 17 aa, Artificial Sequence
  Description of Artificial Sequence: Synthetic peptide
  XENP019262 vhCDR2
FVSYDGNNKYYADSVKG

SEQ ID NO: 3443 - protein, 9 aa, Artificial Sequence
  Description of Artificial Sequence: Synthetic peptide
  XENP019262 vhCDR3
TGWLGPFDY

SEQ ID NO: 3444 - protein, 215 aa, Artificial Sequence; identical to SEQ ID NO: 2924
  Description of Artificial Sequence: Synthetic polypeptide
  XENP019262 [CTLA-4]_H0.52_L0_Fab Light Chain

SEQ ID NO: 3445 - protein, 108 aa, Artificial Sequence; identical to SEQ ID NO: 23
  Description of Artificial Sequence: Synthetic polypeptide
  VL of XENP019262

SEQ ID NO: 3446 - protein, 12 aa, Artificial Sequence
  Description of Artificial Sequence: Synthetic peptide
  XENP019262 vlCDR1
RASQSVGSSYLA

SEQ ID NO: 3447 - protein, 7 aa, Artificial Sequence
  Description of Artificial Sequence: Synthetic peptide
  XENP019262 vlCDR2
GAFSRAT

SEQ ID NO: 3448 - protein, 9 aa, Artificial Sequence
  Description of Artificial Sequence: Synthetic peptide
  XENP019262 vlCDR3
QQYGSSPWT

SEQ ID NO: 3449 - protein, 221 aa, Artificial Sequence
  Description of Artificial Sequence: Synthetic polypeptide
  XENP019263 [CTLA-4]_H0.53_L0_Fab Heavy Chain
QVQLVESGGGVVQPGRSLRLSCAASGFTFSSYTMHWVRQAPGKGLEWVTFYSYDGNNKYYADSVKGRFTISRDNSKNTLYLQMNSLRAEDTAIYYCARTGWLGPFDYWGQGTLVTVSSASTKGPSVFPLAPSSKSTSGGTAALGCLVKDYFPEPVTVSWNSGALTSGVHTFPAVLQSSGLYSLSSVVTVPSSSLGTQTYICNVNHKPSNTKVDKKVEPKSC

SEQ ID NO: 3450 - protein, 118 aa, Artificial Sequence; identical to SEQ ID NO: 661
  Description of Artificial Sequence: Synthetic polypeptide
  VH of XENP019263

SEQ ID NO: 3451 - protein, 5 aa, Artificial Sequence
  Description of Artificial Sequence: Synthetic peptide
  XENP019263 vhCDR1
SYTMH

SEQ ID NO: 3452 - protein, 17 aa, Artificial Sequence
  Description of Artificial Sequence: Synthetic peptide
  XENP019263 vhCDR2
FYSYDGNNKYYADSVKG

SEQ ID NO: 3453 - protein, 9 aa, Artificial Sequence
  Description of Artificial Sequence: Synthetic peptide
  XENP019263 vhCDR3
TGWLGPFDY

SEQ ID NO: 3454 - protein, 215 aa, Artificial Sequence; identical to SEQ ID NO: 2924
  Description of Artificial Sequence: Synthetic polypeptide
  XENP019263 [CTLA-4]_H0.53_L0_Fab Light Chain

SEQ ID NO: 3455 - protein, 108 aa, Artificial Sequence; identical to SEQ ID NO: 23
  Description of Artificial Sequence: Synthetic polypeptide
  VL of XENP019263

SEQ ID NO: 3456 - protein, 12 aa, Artificial Sequence
  Description of Artificial Sequence: Synthetic peptide
  XENP019263 vlCDR1
RASQSVGSSYLA

SEQ ID NO: 3457 - protein, 7 aa, Artificial Sequence
  Description of Artificial Sequence: Synthetic peptide
  XENP019263 vlCDR2
GAFSRAT

SEQ ID NO: 3458 - protein, 9 aa, Artificial Sequence
  Description of Artificial Sequence: Synthetic peptide
  XENP019263 vlCDR3
QQYGSSPWT

SEQ ID NO: 3459 - protein, 221 aa, Artificial Sequence
  Description of Artificial Sequence: Synthetic polypeptide
  XENP019264 [CTLA-4]_H0.54_L0_Fab Heavy Chain
QVQLVESGGGVVQPGRSLRLSCAASGFTFSSYTMHWVRQAPGKGLEWVTFISGDGNNKYYADSVKGRFTISRDNSKNTLYLQMNSLRAEDTAIYYCARTGWLGPFDYWGQGTLVTVSSASTKGPSVFPLAPSSKSTSGGTAALGCLVKDYFPEPVTVSWNSGALTSGVHTFPAVLQSSGLYSLSSVVTVPSSSLGTQTYICNVNHKPSNTKVDKKVEPKSC

SEQ ID NO: 3460 - protein, 118 aa, Artificial Sequence; identical to SEQ ID NO: 670
  Description of Artificial Sequence: Synthetic polypeptide
  VH of XENP019264

SEQ ID NO: 3461 - protein, 5 aa, Artificial Sequence
  Description of Artificial Sequence: Synthetic peptide
  XENP019264 vhCDR1
SYTMH

SEQ ID NO: 3462 - protein, 17 aa, Artificial Sequence
  Description of Artificial Sequence: Synthetic peptide
  XENP019264 vhCDR2
FISGDGNNKYYADSVKG

SEQ ID NO: 3463 - protein, 9 aa, Artificial Sequence
  Description of Artificial Sequence: Synthetic peptide
  XENP019264 vhCDR3
TGWLGPFDY

SEQ ID NO: 3464 - protein, 215 aa, Artificial Sequence; identical to SEQ ID NO: 2924
  Description of Artificial Sequence: Synthetic polypeptide
  XENP019264 [CTLA-4]_H0.54_L0_Fab Light Chain

SEQ ID NO: 3465 - protein, 108 aa, Artificial Sequence; identical to SEQ ID NO: 23
  Description of Artificial Sequence: Synthetic polypeptide
  VL of XENP019264

SEQ ID NO: 3466 - protein, 12 aa, Artificial Sequence
  Description of Artificial Sequence: Synthetic peptide
  XENP019264 vlCDR1
RASQSVGSSYLA

SEQ ID NO: 3467 - protein, 7 aa, Artificial Sequence
  Description of Artificial Sequence: Synthetic peptide
  XENP019264 vlCDR2
GAFSRAT

SEQ ID NO: 3468 - protein, 9 aa, Artificial Sequence
  Description of Artificial Sequence: Synthetic peptide
  XENP019264 vlCDR3
QQYGSSPWT

SEQ ID NO: 3469 - protein, 221 aa, Artificial Sequence
  Description of Artificial Sequence: Synthetic polypeptide
  XENP019265 [CTLA-4]_H0.55_L0_Fab Heavy Chain
QVQLVESGGGVVQPGRSLRLSCAASGFTFSSYTMHWVRQAPGKGLEWVTFISNDGNNKYYADSVKGRFTISRDNSKNTLYLQMNSLRAEDTAIYYCARTGWLGPFDYWGQGTLVTVSSASTKGPSVFPLAPSSKSTSGGTAALGCLVKDYFPEPVTVSWNSGALTSGVHTFPAVLQSSGLYSLSSVVTVPSSSLGTQTYICNVNHKPSNTKVDKKVEPKSC

SEQ ID NO: 3470 - protein, 118 aa, Artificial Sequence; identical to SEQ ID NO: 679
  Description of Artificial Sequence: Synthetic polypeptide
  VH of XENP019265

SEQ ID NO: 3471 - protein, 5 aa, Artificial Sequence
  Description of Artificial Sequence: Synthetic peptide
  XENP019265 vhCDR1
SYTMH

SEQ ID NO: 3472 - protein, 17 aa, Artificial Sequence
  Description of Artificial Sequence: Synthetic peptide
  XENP019265 vhCDR2
FISNDGNNKYYADSVKG

SEQ ID NO: 3473 - protein, 9 aa, Artificial Sequence
  Description of Artificial Sequence: Synthetic peptide
  XENP019265 vhCDR3
TGWLGPFDY

SEQ ID NO: 3474 - protein, 215 aa, Artificial Sequence; identical to SEQ ID NO: 2924
  Description of Artificial Sequence: Synthetic polypeptide
  XENP019265 [CTLA-4]_H0.55_L0_Fab Light Chain

SEQ ID NO: 3475 - protein, 108 aa, Artificial Sequence; identical to SEQ ID NO: 23
  Description of Artificial Sequence: Synthetic polypeptide
  VL of XENP019265

SEQ ID NO: 3476 - protein, 12 aa, Artificial Sequence
  Description of Artificial Sequence: Synthetic peptide
  XENP019265 vlCDR1
RASQSVGSSYLA

SEQ ID NO: 3477 - protein, 7 aa, Artificial Sequence
  Description of Artificial Sequence: Synthetic peptide
  XENP019265 vlCDR2
GAFSRAT

SEQ ID NO: 3478 - protein, 9 aa, Artificial Sequence
  Description of Artificial Sequence: Synthetic peptide
  XENP019265 vlCDR3
QQYGSSPWT

SEQ ID NO: 3479 - protein, 221 aa, Artificial Sequence
  Description of Artificial Sequence: Synthetic polypeptide
  XENP019266 [CTLA-4]_H0.56_L0_Fab Heavy Chain
QVQLVESGGGVVQPGRSLRLSCAASGFTFSSYTMHWVRQAPGKGLEWVTFISSDGNNKYYADSVKGRFTISRDNSKNTLYLQMNSLRAEDTAIYYCARTGWLGPFDYWGQGTLVTVSSASTKGPSVFPLAPSSKSTSGGTAALGCLVKDYFPEPVTVSWNSGALTSGVHTFPAVLQSSGLYSLSSVVTVPSSSLGTQTYICNVNHKPSNTKVDKKVEPKSC

SEQ ID NO: 3480 - protein, 118 aa, Artificial Sequence; identical to SEQ ID NO: 688
  Description of Artificial Sequence: Synthetic polypeptide
  VH of XENP019266

SEQ ID NO: 3481 - protein, 5 aa, Artificial Sequence
  Description of Artificial Sequence: Synthetic peptide
  XENP019266 vhCDR1
SYTMH

SEQ ID NO: 3482 - protein, 17 aa, Artificial Sequence
  Description of Artificial Sequence: Synthetic peptide
  XENP019266 vhCDR2
FISSDGNNKYYADSVKG

SEQ ID NO: 3483 - protein, 9 aa, Artificial Sequence
  Description of Artificial Sequence: Synthetic peptide
  XENP019266 vhCDR3
TGWLGPFDY

SEQ ID NO: 3484 - protein, 215 aa, Artificial Sequence; identical to SEQ ID NO: 2924
  Description of Artificial Sequence: Synthetic polypeptide
  XENP019266 [CTLA-4]_H0.56_L0_Fab Light Chain

SEQ ID NO: 3485 - protein, 108 aa, Artificial Sequence; identical to SEQ ID NO: 23
  Description of Artificial Sequence: Synthetic polypeptide
  VL of XENP019266

SEQ ID NO: 3486 - protein, 12 aa, Artificial Sequence
  Description of Artificial Sequence: Synthetic peptide
  XENP019266 vlCDR1
RASQSVGSSYLA

SEQ ID NO: 3487 - protein, 7 aa, Artificial Sequence
  Description of Artificial Sequence: Synthetic peptide
  XENP019266 vlCDR2
GAFSRAT

SEQ ID NO: 3488 - protein, 9 aa, Artificial Sequence
  Description of Artificial Sequence: Synthetic peptide
  XENP019266 vlCDR3
QQYGSSPWT

SEQ ID NO: 3489 - protein, 221 aa, Artificial Sequence
  Description of Artificial Sequence: Synthetic polypeptide
  XENP019267 [CTLA-4]_H0.57_L0_Fab Heavy Chain
QVQLVESGGGVVQPGRSLRLSCAASGFTFSSYTMHWVRQAPGKGLEWVTFISYNGNNKYYADSVKGRFTISRDNSKNTLYLQMNSLRAEDTAIYYCARTGWLGPFDYWGQGTLVTVSSASTKGPSVFPLAPSSKSTSGGTAALGCLVKDYFPEPVTVSWNSGALTSGVHTFPAVLQSSGLYSLSSVVTVPSSSLGTQTYICNVNHKPSNTKVDKKVEPKSC

SEQ ID NO: 3490 - protein, 118 aa, Artificial Sequence; identical to SEQ ID NO: 697
  Description of Artificial Sequence: Synthetic polypeptide
  VH of XENP019267

SEQ ID NO: 3491 - protein, 5 aa, Artificial Sequence
  Description of Artificial Sequence: Synthetic peptide
  XENP019267 vhCDR1
SYTMH

SEQ ID NO: 3492 - protein, 17 aa, Artificial Sequence
  Description of Artificial Sequence: Synthetic peptide
  XENP019267 vhCDR2
FISYNGNNKYYADSVKG

SEQ ID NO: 3493 - protein, 9 aa, Artificial Sequence
  Description of Artificial Sequence: Synthetic peptide
  XENP019267 vhCDR3
TGWLGPFDY

SEQ ID NO: 3494 - protein, 215 aa, Artificial Sequence; identical to SEQ ID NO: 2924
  Description of Artificial Sequence: Synthetic polypeptide
  XENP019267 [CTLA-4]_H0.57_L0_Fab Light Chain

SEQ ID NO: 3495 - protein, 108 aa, Artificial Sequence; identical to SEQ ID NO: 23
  Description of Artificial Sequence: Synthetic polypeptide
  VL of XENP019267

SEQ ID NO: 3496 - protein, 12 aa, Artificial Sequence
  Description of Artificial Sequence: Synthetic peptide
  XENP019267 vlCDR1
RASQSVGSSYLA

SEQ ID NO: 3497 - protein, 7 aa, Artificial Sequence
  Description of Artificial Sequence: Synthetic peptide
  XENP019267 vlCDR2
GAFSRAT

SEQ ID NO: 3498 - protein, 9 aa, Artificial Sequence
  Description of Artificial Sequence: Synthetic peptide
  XENP019267 vlCDR3
QQYGSSPWT

SEQ ID NO: 3499 - protein, 221 aa, Artificial Sequence
  Description of Artificial Sequence: Synthetic polypeptide
  XENP019268 [CTLA-4]_H0.58_L0_Fab Heavy Chain
QVQLVESGGGVVQPGRSLRLSCAASGFTFSSYTMHWVRQAPGKGLEWVTFISYSGNNKYYADSVKGRFTISRDNSKNTLYLQMNSLRAEDTAIYYCARTGWLGPFDYWGQGTLVTVSSASTKGPSVFPLAPSSKSTSGGTAALGCLVKDYFPEPVTVSWNSGALTSGVHTFPAVLQSSGLYSLSSVVTVPSSSLGTQTYICNVNHKPSNTKVDKKVEPKSC

SEQ ID NO: 3500 - protein, 118 aa, Artificial Sequence; identical to SEQ ID NO: 706
  Description of Artificial Sequence: Synthetic polypeptide
  VH of XENP019268

SEQ ID NO: 3501 - protein, 5 aa, Artificial Sequence
  Description of Artificial Sequence: Synthetic peptide
  XENP019268 vhCDR1
SYTMH

SEQ ID NO: 3502 - protein, 17 aa, Artificial Sequence
  Description of Artificial Sequence: Synthetic peptide
  XENP019268 vhCDR2
FISYSGNNKYYADSVKG

SEQ ID NO: 3503 - protein, 9 aa, Artificial Sequence
  Description of Artificial Sequence: Synthetic peptide
  XENP019268 vhCDR3
TGWLGPFDY

SEQ ID NO: 3504 - protein, 215 aa, Artificial Sequence; identical to SEQ ID NO: 2924
  Description of Artificial Sequence: Synthetic polypeptide
  XENP019268 [CTLA-4]_H0.58_L0_Fab Light Chain

SEQ ID NO: 3505 - protein, 108 aa, Artificial Sequence; identical to SEQ ID NO: 23
  Description of Artificial Sequence: Synthetic polypeptide
  VL of XENP019268

SEQ ID NO: 3506 - protein, 12 aa, Artificial Sequence
  Description of Artificial Sequence: Synthetic peptide
  XENP019268 vlCDR1
RASQSVGSSYLA

SEQ ID NO: 3507 - protein, 7 aa, Artificial Sequence
  Description of Artificial Sequence: Synthetic peptide
  XENP019268 vlCDR2
GAFSRAT

SEQ ID NO: 3508 - protein, 9 aa, Artificial Sequence
  Description of Artificial Sequence: Synthetic peptide
  XENP019268 vlCDR3
QQYGSSPWT

SEQ ID NO: 3509 - protein, 221 aa, Artificial Sequence
  Description of Artificial Sequence: Synthetic polypeptide
  XENP019269 [CTLA-4]_H0.59_L0_Fab Heavy Chain
QVQLVESGGGVVQPGRSLRLSCAASGFTFSSYTMHWVRQAPGKGLEWVTFISYEGNNKYYADSVKGRFTISRDNSKNTLYLQMNSLRAEDTAIYYCARTGWLGPFDYWGQGTLVTVSSASTKGPSVFPLAPSSKSTSGGTAALGCLVKDYFPEPVTVSWNSGALTSGVHTFPAVLQSSGLYSLSSVVTVPSSSLGTQTYICNVNHKPSNTKVDKKVEPKSC

SEQ ID NO: 3510 - protein, 118 aa, Artificial Sequence; identical to SEQ ID NO: 715
  Description of Artificial Sequence: Synthetic polypeptide
  VH of XENP019269

SEQ ID NO: 3511 - protein, 5 aa, Artificial Sequence
  Description of Artificial Sequence: Synthetic peptide
  XENP019269 vhCDR1
SYTMH

SEQ ID NO: 3512 - protein, 17 aa, Artificial Sequence
  Description of Artificial Sequence: Synthetic peptide
  XENP019269 vhCDR2
FISYEGNNKYYADSVKG

SEQ ID NO: 3513 - protein, 9 aa, Artificial Sequence
  Description of Artificial Sequence: Synthetic peptide
  XENP019269 vhCDR3
TGWLGPFDY

SEQ ID NO: 3514 - protein, 215 aa, Artificial Sequence; identical to SEQ ID NO: 2924
  Description of Artificial Sequence: Synthetic polypeptide
  XENP019269 [CTLA-4]_H0.59_L0_Fab Light Chain

SEQ ID NO: 3515 - protein, 108 aa, Artificial Sequence; identical to SEQ ID NO: 23
  Description of Artificial Sequence: Synthetic polypeptide
  VL of XENP019269

SEQ ID NO: 3516 - protein, 12 aa, Artificial Sequence
  Description of Artificial Sequence: Synthetic peptide
  XENP019269 vlCDR1
RASQSVGSSYLA

SEQ ID NO: 3517 - protein, 7 aa, Artificial Sequence
  Description of Artificial Sequence: Synthetic peptide
  XENP019269 vlCDR2
GAFSRAT

SEQ ID NO: 3518 - protein, 9 aa, Artificial Sequence
  Description of Artificial Sequence: Synthetic peptide
  XENP019269 vlCDR3
QQYGSSPWT

SEQ ID NO: 3519 - protein, 221 aa, Artificial Sequence
  Description of Artificial Sequence: Synthetic polypeptide
  XENP019270 [CTLA-4]_H0.60_L0_Fab Heavy Chain
QVQLVESGGGVVQPGRSLRLSCAASGFTFSSYTMHWVRQAPGKGLEWVTFISYHGNNKYYADSVKGRFTISRDNSKNTLYLQMNSLRAEDTAIYYCARTGWLGPFDYWGQGTLVTVSSASTKGPSVFPLAPSSKSTSGGTAALGCLVKDYFPEPVTVSWNSGALTSGVHTFPAVLQSSGLYSLSSVVTVPSSSLGTQTYICNVNHKPSNTKVDKKVEPKSC

SEQ ID NO: 3520 - protein, 118 aa, Artificial Sequence; identical to SEQ ID NO: 724
  Description of Artificial Sequence: Synthetic polypeptide
  VH of XENP019270

SEQ ID NO: 3521 - protein, 5 aa, Artificial Sequence
  Description of Artificial Sequence: Synthetic peptide
  XENP019270 vhCDR1
SYTMH

SEQ ID NO: 3522 - protein, 17 aa, Artificial Sequence
  Description of Artificial Sequence: Synthetic peptide
  XENP019270 vhCDR2
FISYHGNNKYYADSVKG

SEQ ID NO: 3523 - protein, 9 aa, Artificial Sequence
  Description of Artificial Sequence: Synthetic peptide
  XENP019270 vhCDR3
TGWLGPFDY

SEQ ID NO: 3524 - protein, 215 aa, Artificial Sequence; identical to SEQ ID NO: 2924
  Description of Artificial Sequence: Synthetic polypeptide
  XENP019270 [CTLA-4]_H0.60_L0_Fab Light Chain

SEQ ID NO: 3525 - protein, 108 aa, Artificial Sequence; identical to SEQ ID NO: 23
  Description of Artificial Sequence: Synthetic polypeptide
  VL of XENP019270

SEQ ID NO: 3526 - protein, 12 aa, Artificial Sequence
  Description of Artificial Sequence: Synthetic peptide
  XENP019270 vlCDR1
RASQSVGSSYLA

SEQ ID NO: 3527 - protein, 7 aa, Artificial Sequence
  Description of Artificial Sequence: Synthetic peptide
  XENP019270 vlCDR2
GAFSRAT

SEQ ID NO: 3528 - protein, 9 aa, Artificial Sequence
  Description of Artificial Sequence: Synthetic peptide
  XENP019270 vlCDR3
QQYGSSPWT

SEQ ID NO: 3529 - protein, 221 aa, Artificial Sequence
  Description of Artificial Sequence: Synthetic polypeptide
  XENP019271 [CTLA-4]_H0.61_L0_Fab Heavy Chain
QVQLVESGGGVVQPGRSLRLSCAASGFTFSSYTMHWVRQAPGKGLEWVTFISYKGNNKYYADSVKGRFTISRDNSKNTLYLQMNSLRAEDTAIYYCARTGWLGPFDYWGQGTLVTVSSASTKGPSVFPLAPSSKSTSGGTAALGCLVKDYFPEPVTVSWNSGALTSGVHTFPAVLQSSGLYSLSSVVTVPSSSLGTQTYICNVNHKPSNTKVDKKVEPKSC

SEQ ID NO: 3530 - protein, 118 aa, Artificial Sequence; identical to SEQ ID NO: 733
  Description of Artificial Sequence: Synthetic polypeptide
  VH of XENP019271

SEQ ID NO: 3531 - protein, 5 aa, Artificial Sequence
  Description of Artificial Sequence: Synthetic peptide
  XENP019271 vhCDR1
SYTMH

SEQ ID NO: 3532 - protein, 17 aa, Artificial Sequence
  Description of Artificial Sequence: Synthetic peptide
  XENP019271 vhCDR2
FISYKGNNKYYADSVKG

SEQ ID NO: 3533 - protein, 9 aa, Artificial Sequence
  Description of Artificial Sequence: Synthetic peptide
  XENP019271 vhCDR3
TGWLGPFDY

SEQ ID NO: 3534 - protein, 215 aa, Artificial Sequence; identical to SEQ ID NO: 2924
  Description of Artificial Sequence: Synthetic polypeptide
  XENP019271 [CTLA-4]_H0.61_L0_Fab Light Chain

SEQ ID NO: 3535 - protein, 108 aa, Artificial Sequence; identical to SEQ ID NO: 23
  Description of Artificial Sequence: Synthetic polypeptide
  VL of XENP019271

SEQ ID NO: 3536 - protein, 12 aa, Artificial Sequence
  Description of Artificial Sequence: Synthetic peptide
  XENP019271 vlCDR1
RASQSVGSSYLA

SEQ ID NO: 3537 - protein, 7 aa, Artificial Sequence
  Description of Artificial Sequence: Synthetic peptide
  XENP019271 vlCDR2
GAFSRAT

SEQ ID NO: 3538 - protein, 9 aa, Artificial Sequence
  Description of Artificial Sequence: Synthetic peptide
  XENP019271 vlCDR3
QQYGSSPWT

SEQ ID NO: 3539 - protein, 221 aa, Artificial Sequence
  Description of Artificial Sequence: Synthetic polypeptide
  XENP019272 [CTLA-4]_H0.62_L0_Fab Heavy Chain
QVQLVESGGGVVQPGRSLRLSCAASGFTFSSYTMHWVRQAPGKGLEWVTFISYKGNNKYYADSVKGRFTISEDNSKNTLYLQMNSLRAEDTAIYYCARTGWLGPFDYWGQGTLVTVSSASTKGPSVFPLAPSSKSTSGGTAALGCLVKDYFPEPVTVSWNSGALTSGVHTFPAVLQSSGLYSLSSVVTVPSSSLGTQTYICNVNHKPSNTKVDKKVEPKSC

SEQ ID NO: 3540 - protein, 118 aa, Artificial Sequence; identical to SEQ ID NO: 742
  Description of Artificial Sequence: Synthetic polypeptide
  VH of XENP019272

SEQ ID NO: 3541 - protein, 5 aa, Artificial Sequence
  Description of Artificial Sequence: Synthetic peptide
  XENP019272 vhCDR1
SYTMH

SEQ ID NO: 3542 - protein, 17 aa, Artificial Sequence
  Description of Artificial Sequence: Synthetic peptide
  XENP019272 vhCDR2
FISYKGNNKYYADSVKG

SEQ ID NO: 3543 - protein, 9 aa, Artificial Sequence
  Description of Artificial Sequence: Synthetic peptide
  XENP019272 vhCDR3
TGWLGPFDY

SEQ ID NO: 3544 - protein, 215 aa, Artificial Sequence; identical to SEQ ID NO: 2924
  Description of Artificial Sequence: Synthetic polypeptide
  XENP019272 [CTLA-4]_H0.62_L0_Fab Light Chain

SEQ ID NO: 3545 - protein, 108 aa, Artificial Sequence; identical to SEQ ID NO: 23
  Description of Artificial Sequence: Synthetic polypeptide
  VL of XENP019272

SEQ ID NO: 3546 - protein, 12 aa, Artificial Sequence
  Description of Artificial Sequence: Synthetic peptide
  XENP019272 vlCDR1
RASQSVGSSYLA

SEQ ID NO: 3547 - protein, 7 aa, Artificial Sequence
  Description of Artificial Sequence: Synthetic peptide
  XENP019272 vlCDR2
GAFSRAT

SEQ ID NO: 3548 - protein, 9 aa, Artificial Sequence
  Description of Artificial Sequence: Synthetic peptide
  XENP019272 vlCDR3
QQYGSSPWT

SEQ ID NO: 3549 - protein, 221 aa, Artificial Sequence
  Description of Artificial Sequence: Synthetic polypeptide
  XENP019273 [CTLA-4]_H0.63_L0_Fab Heavy Chain
QVQLVESGGGVVQPGRSLRLSCAASGFTFSSYTMHWVRQAPGKGLEWVTFISYQGNNKYYADSVKGRFTISRDNSKNTLYLQMNSLRAEDTAIYYCARTGWLGPFDYWGQGTLVTVSSASTKGPSVFPLAPSSKSTSGGTAALGCLVKDYFPEPVTVSWNSGALTSGVHTFPAVLQSSGLYSLSSVVTVPSSSLGTQTYICNVNHKPSNTKVDKKVEPKSC

SEQ ID NO: 3550 - protein, 118 aa, Artificial Sequence; identical to SEQ ID NO: 751
  Description of Artificial Sequence: Synthetic polypeptide
  VH of XENP019273

SEQ ID NO: 3551 - protein, 5 aa, Artificial Sequence
  Description of Artificial Sequence: Synthetic peptide
  XENP019273 vhCDR1
SYTMH

SEQ ID NO: 3552 - protein, 17 aa, Artificial Sequence
  Description of Artificial Sequence: Synthetic peptide
  XENP019273 vhCDR2
FISYQGNNKYYADSVKG

SEQ ID NO: 3553 - protein, 9 aa, Artificial Sequence
  Description of Artificial Sequence: Synthetic peptide
  XENP019273 vhCDR3
TGWLGPFDY

SEQ ID NO: 3554 - protein, 215 aa, Artificial Sequence; identical to SEQ ID NO: 2924
  Description of Artificial Sequence: Synthetic polypeptide
  XENP019273 [CTLA-4]_H0.63_L0_Fab Light Chain

SEQ ID NO: 3555 - protein, 108 aa, Artificial Sequence; identical to SEQ ID NO: 23
  Description of Artificial Sequence: Synthetic polypeptide
  VL of XENP019273

SEQ ID NO: 3556 - protein, 12 aa, Artificial Sequence
  Description of Artificial Sequence: Synthetic peptide
  XENP019273 vlCDR1
RASQSVGSSYLA

SEQ ID NO: 3557 - protein, 7 aa, Artificial Sequence
  Description of Artificial Sequence: Synthetic peptide
  XENP019273 vlCDR2
GAFSRAT

SEQ ID NO: 3558 - protein, 9 aa, Artificial Sequence
  Description of Artificial Sequence: Synthetic peptide
  XENP019273 vlCDR3
QQYGSSPWT

SEQ ID NO: 3559 - protein, 221 aa, Artificial Sequence
  Description of Artificial Sequence: Synthetic polypeptide
  XENP019274 [CTLA-4]_H0.64_L0_Fab Heavy Chain
QVQLVESGGGVVQPGRSLRLSCAASGFTFSSYTMHWVRQAPGKGLEWVTFISYDKNNKYYADSVKGRFTISRDNSKNTLYLQMNSLRAEDTAIYYCARTGWLGPFDYWGQGTLVTVSSASTKGPSVFPLAPSSKSTSGGTAALGCLVKDYFPEPVTVSWNSGALTSGVHTFPAVLQSSGLYSLSSVVTVPSSSLGTQTYICNVNHKPSNTKVDKKVEPKSC

SEQ ID NO: 3560 - protein, 118 aa, Artificial Sequence; identical to SEQ ID NO: 760
  Description of Artificial Sequence: Synthetic polypeptide
  VH of XENP019274

SEQ ID NO: 3561 - protein, 5 aa, Artificial Sequence
  Description of Artificial Sequence: Synthetic peptide
  XENP019274 vhCDR1
SYTMH

SEQ ID NO: 3562 - protein, 17 aa, Artificial Sequence
  Description of Artificial Sequence: Synthetic peptide
  XENP019274 vhCDR2
FISYDKNNKYYADSVKG

SEQ ID NO: 3563 - protein, 9 aa, Artificial Sequence
  Description of Artificial Sequence: Synthetic peptide
  XENP019274 vhCDR3
TGWLGPFDY

SEQ ID NO: 3564 - protein, 215 aa, Artificial Sequence; identical to SEQ ID NO: 2924
  Description of Artificial Sequence: Synthetic polypeptide
  XENP019274 [CTLA-4]_H0.64_L0_Fab Light Chain

SEQ ID NO: 3565 - protein, 108 aa, Artificial Sequence; identical to SEQ ID NO: 23
  Description of Artificial Sequence: Synthetic polypeptide
  VL of XENP019274

SEQ ID NO: 3566 - protein, 12 aa, Artificial Sequence
  Description of Artificial Sequence: Synthetic peptide
  XENP019274 vlCDR1
RASQSVGSSYLA

SEQ ID NO: 3567 - protein, 7 aa, Artificial Sequence
  Description of Artificial Sequence: Synthetic peptide
  XENP019274 vlCDR2
GAFSRAT

SEQ ID NO: 3568 - protein, 9 aa, Artificial Sequence
  Description of Artificial Sequence: Synthetic peptide
  XENP019274 vlCDR3
QQYGSSPWT

SEQ ID NO: 3569 - protein, 221 aa, Artificial Sequence
  Description of Artificial Sequence: Synthetic polypeptide
  XENP019275 [CTLA-4]_H0.65_L0_Fab Heavy Chain
QVQLVESGGGVVQPGRSLRLSCAASGFTFSSYTMHWVRQAPGKGLEWVTFISYDKNNKYYADSVKGRFTISEDNSKNTLYLQMNSLRAEDTAIYYCARTGWLGPFDYWGQGTLVTVSSASTKGPSVFPLAPSSKSTSGGTAALGCLVKDYFPEPVTVSWNSGALTSGVHTFPAVLQSSGLYSLSSVVTVPSSSLGTQTYICNVNHKPSNTKVDKKVEPKSC

SEQ ID NO: 3570 - protein, 118 aa, Artificial Sequence; identical to SEQ ID NO: 769
  Description of Artificial Sequence: Synthetic polypeptide
  VH of XENP019275

SEQ ID NO: 3571 - protein, 5 aa, Artificial Sequence
  Description of Artificial Sequence: Synthetic peptide
  XENP019275 vhCDR1
SYTMH

SEQ ID NO: 3572 - protein, 17 aa, Artificial Sequence
  Description of Artificial Sequence: Synthetic peptide
  XENP019275 vhCDR2
FISYDKNNKYYADSVKG

SEQ ID NO: 3573 - protein, 9 aa, Artificial Sequence
  Description of Artificial Sequence: Synthetic peptide
  XENP019275 vhCDR3
TGWLGPFDY

SEQ ID NO: 3574 - protein, 215 aa, Artificial Sequence; identical to SEQ ID NO: 2924
  Description of Artificial Sequence: Synthetic polypeptide
  XENP019275 [CTLA-4]_H0.65_L0_Fab Light Chain

SEQ ID NO: 3575 - protein, 108 aa, Artificial Sequence; identical to SEQ ID NO: 23
  Description of Artificial Sequence: Synthetic polypeptide
  VL of XENP019275

SEQ ID NO: 3576 - protein, 12 aa, Artificial Sequence
  Description of Artificial Sequence: Synthetic peptide
  XENP019275 vlCDR1
RASQSVGSSYLA

SEQ ID NO: 3577 - protein, 7 aa, Artificial Sequence
  Description of Artificial Sequence: Synthetic peptide
  XENP019275 vlCDR2
GAFSRAT

SEQ ID NO: 3578 - protein, 9 aa, Artificial Sequence
  Description of Artificial Sequence: Synthetic peptide
  XENP019275 vlCDR3
QQYGSSPWT

SEQ ID NO: 3579 - protein, 221 aa, Artificial Sequence
  Description of Artificial Sequence: Synthetic polypeptide
  XENP019276 [CTLA-4]_H0.66_L0_Fab Heavy Chain
QVQLVESGGGVVQPGRSLRLSCAASGFTFSSYTMHWVRQAPGKGLEWVTFISYDGDNKYYADSVKGRFTISRDNSKNTLYLQMNSLRAEDTAIYYCARTGWLGPFDYWGQGTLVTVSSASTKGPSVFPLAPSSKSTSGGTAALGCLVKDYFPEPVTVSWNSGALTSGVHTFPAVLQSSGLYSLSSVVTVPSSSLGTQTYICNVNHKPSNTKVDKKVEPKSC

SEQ ID NO: 3580 - protein, 118 aa, Artificial Sequence; identical to SEQ ID NO: 778
  Description of Artificial Sequence: Synthetic polypeptide
  VH of XENP019276

SEQ ID NO: 3581 - protein, 5 aa, Artificial Sequence
  Description of Artificial Sequence: Synthetic peptide
  XENP019276 vhCDR1
SYTMH

SEQ ID NO: 3582 - protein, 17 aa, Artificial Sequence
  Description of Artificial Sequence: Synthetic peptide
  XENP019276 vhCDR2
FISYDGDNKYYADSVKG

SEQ ID NO: 3583 - protein, 9 aa, Artificial Sequence
  Description of Artificial Sequence: Synthetic peptide
  XENP019276 vhCDR3
TGWLGPFDY

SEQ ID NO: 3584 - protein, 215 aa, Artificial Sequence; identical to SEQ ID NO: 2924
  Description of Artificial Sequence: Synthetic polypeptide
  XENP019276 [CTLA-4]_H0.66_L0_Fab Light Chain

SEQ ID NO: 3585 - protein, 108 aa, Artificial Sequence; identical to SEQ ID NO: 23
  Description of Artificial Sequence: Synthetic polypeptide
  VL of XENP019276

SEQ ID NO: 3586 - protein, 12 aa, Artificial Sequence
  Description of Artificial Sequence: Synthetic peptide
  XENP019276 vlCDR1
RASQSVGSSYLA

SEQ ID NO: 3587 - protein, 7 aa, Artificial Sequence
  Description of Artificial Sequence: Synthetic peptide
  XENP019276 vlCDR2
GAFSRAT

SEQ ID NO: 3588 - protein, 9 aa, Artificial Sequence
  Description of Artificial Sequence: Synthetic peptide
  XENP019276 vlCDR3
QQYGSSPWT

SEQ ID NO: 3589 - protein, 221 aa, Artificial Sequence
  Description of Artificial Sequence: Synthetic polypeptide
  XENP019277 [CTLA-4]_H0.67_L0_Fab Heavy Chain
QVQLVESGGGVVQPGRSLRLSCAASGFTFSSYTMHWVRQAPGKGLEWVTFISYDGGNKYYADSVKGRFTISRDNSKNTLYLQMNSLRAEDTAIYYCARTGWLGPFDYWGQGTLVTVSSASTKGPSVFPLAPSSKSTSGGTAALGCLVKDYFPEPVTVSWNSGALTSGVHTFPAVLQSSGLYSLSSVVTVPSSSLGTQTYICNVNHKPSNTKVDKKVEPKSC

SEQ ID NO: 3590 - protein, 118 aa, Artificial Sequence; identical to SEQ ID NO: 787
  Description of Artificial Sequence: Synthetic polypeptide
  VH of XENP019277

SEQ ID NO: 3591 - protein, 5 aa, Artificial Sequence
  Description of Artificial Sequence: Synthetic peptide
  XENP019277 vhCDR1
SYTMH

SEQ ID NO: 3592 - protein, 17 aa, Artificial Sequence
  Description of Artificial Sequence: Synthetic peptide
  XENP019277 vhCDR2
FISYDGGNKYYADSVKG

SEQ ID NO: 3593 - protein, 9 aa, Artificial Sequence
  Description of Artificial Sequence: Synthetic peptide
  XENP019277 vhCDR3
TGWLGPFDY

SEQ ID NO: 3594 - protein, 215 aa, Artificial Sequence; identical to SEQ ID NO: 2924
  Description of Artificial Sequence: Synthetic polypeptide
  XENP019277 [CTLA-4]_H0.67_L0_Fab Light Chain

SEQ ID NO: 3595 - protein, 108 aa, Artificial Sequence; identical to SEQ ID NO: 23
  Description of Artificial Sequence: Synthetic polypeptide
  VL of XENP019277

SEQ ID NO: 3596 - protein, 12 aa, Artificial Sequence
  Description of Artificial Sequence: Synthetic peptide
  XENP019277 vlCDR1
RASQSVGSSYLA

SEQ ID NO: 3597 - protein, 7 aa, Artificial Sequence
  Description of Artificial Sequence: Synthetic peptide
  XENP019277 vlCDR2
GAFSRAT

SEQ ID NO: 3598 - protein, 9 aa, Artificial Sequence
  Description of Artificial Sequence: Synthetic peptide
  XENP019277 vlCDR3
QQYGSSPWT

SEQ ID NO: 3599 - protein, 221 aa, Artificial Sequence
  Description of Artificial Sequence: Synthetic polypeptide
  XENP019278 [CTLA-4]_H0.68_L0_Fab Heavy Chain
QVQLVESGGGVVQPGRSLRLSCAASGFTFSSYTMHWVRQAPGKGLEWVTFISYDGHNKYYADSVKGRFTISRDNSKNTLYLQMNSLRAEDTAIYYCARTGWLGPFDYWGQGTLVTVSSASTKGPSVFPLAPSSKSTSGGTAALGCLVKDYFPEPVTVSWNSGALTSGVHTFPAVLQSSGLYSLSSVVTVPSSSLGTQTYICNVNHKPSNTKVDKKVEPKSC

SEQ ID NO: 3600 - protein, 118 aa, Artificial Sequence; identical to SEQ ID NO: 796
  Description of Artificial Sequence: Synthetic polypeptide
  VH of XENP019278

SEQ ID NO: 3601 - protein, 5 aa, Artificial Sequence
  Description of Artificial Sequence: Synthetic peptide
  XENP019278 vhCDR1
SYTMH

SEQ ID NO: 3602 - protein, 17 aa, Artificial Sequence
  Description of Artificial Sequence: Synthetic peptide
  XENP019278 vhCDR2
FISYDGHNKYYADSVKG

SEQ ID NO: 3603 - protein, 9 aa, Artificial Sequence
  Description of Artificial Sequence: Synthetic peptide
  XENP019278 vhCDR3
TGWLGPFDY

SEQ ID NO: 3604 - protein, 215 aa, Artificial Sequence; identical to SEQ ID NO: 2924
  Description of Artificial Sequence: Synthetic polypeptide
  XENP019278 [CTLA-4]_H0.68_L0_Fab Light Chain

SEQ ID NO: 3605 - protein, 108 aa, Artificial Sequence; identical to SEQ ID NO: 23
  Description of Artificial Sequence: Synthetic polypeptide
  VL of XENP019278

SEQ ID NO: 3606 - protein, 12 aa, Artificial Sequence
  Description of Artificial Sequence: Synthetic peptide
  XENP019278 vlCDR1
RASQSVGSSYLA

SEQ ID NO: 3607 - protein, 7 aa, Artificial Sequence
  Description of Artificial Sequence: Synthetic peptide
  XENP019278 vlCDR2
GAFSRAT

SEQ ID NO: 3608 - protein, 9 aa, Artificial Sequence
  Description of Artificial Sequence: Synthetic peptide
  XENP019278 vlCDR3
QQYGSSPWT

SEQ ID NO: 3609 - protein, 221 aa, Artificial Sequence
  Description of Artificial Sequence: Synthetic polypeptide
  XENP019279 [CTLA-4]_H0.69_L0_Fab Heavy Chain
QVQLVESGGGVVQPGRSLRLSCAASGFTFSSYTMHWVRQAPGKGLEWVTFISYDGQNKYYADSVKGRFTISRDNSKNTLYLQMNSLRAEDTAIYYCARTGWLGPFDYWGQGTLVTVSSASTKGPSVFPLAPSSKSTSGGTAALGCLVKDYFPEPVTVSWNSGALTSGVHTFPAVLQSSGLYSLSSVVTVPSSSLGTQTYICNVNHKPSNTKVDKKVEPKSC

SEQ ID NO: 3610 - protein, 118 aa, Artificial Sequence; identical to SEQ ID NO: 805
  Description of Artificial Sequence: Synthetic polypeptide
  VH of XENP019279

SEQ ID NO: 3611 - protein, 5 aa, Artificial Sequence
  Description of Artificial Sequence: Synthetic peptide
  XENP019279 vhCDR1
SYTMH

SEQ ID NO: 3612 - protein, 17 aa, Artificial Sequence
  Description of Artificial Sequence: Synthetic peptide
  XENP019279 vhCDR2
FISYDGQNKYYADSVKG

SEQ ID NO: 3613 - protein, 9 aa, Artificial Sequence
  Description of Artificial Sequence: Synthetic peptide
  XENP019279 vhCDR3
TGWLGPFDY

SEQ ID NO: 3614 - protein, 215 aa, Artificial Sequence; identical to SEQ ID NO: 2924
  Description of Artificial Sequence: Synthetic polypeptide
  XENP019279 [CTLA-4]_H0.69_L0_Fab Light Chain

SEQ ID NO: 3615 - protein, 108 aa, Artificial Sequence; identical to SEQ ID NO: 23
  Description of Artificial Sequence: Synthetic polypeptide
  VL of XENP019279

SEQ ID NO: 3616 - protein, 12 aa, Artificial Sequence
  Description of Artificial Sequence: Synthetic peptide
  XENP019279 vlCDR1
RASQSVGSSYLA

SEQ ID NO: 3617 - protein, 7 aa, Artificial Sequence
  Description of Artificial Sequence: Synthetic peptide
  XENP019279 vlCDR2
GAFSRAT

SEQ ID NO: 3618 - protein, 9 aa, Artificial Sequence
  Description of Artificial Sequence: Synthetic peptide
  XENP019279 vlCDR3
QQYGSSPWT

SEQ ID NO: 3619 - protein, 221 aa, Artificial Sequence
  Description of Artificial Sequence: Synthetic polypeptide
  XENP019280 [CTLA-4]_H0.70_L0_Fab Heavy Chain
QVQLVESGGGVVQPGRSLRLSCAASGFTFSSYTMHWVRQAPGKGLEWVTFISYDGSNKYYADSVKGRFTISRDNSKNTLYLQMNSLRAEDTAIYYCARTGWLGPFDYWGQGTLVTVSSASTKGPSVFPLAPSSKSTSGGTAALGCLVKDYFPEPVTVSWNSGALTSGVHTFPAVLQSSGLYSLSSVVTVPSSSLGTQTYICNVNHKPSNTKVDKKVEPKSC

SEQ ID NO: 3620 - protein, 118 aa, Artificial Sequence; identical to SEQ ID NO: 814
  Description of Artificial Sequence: Synthetic polypeptide
  VH of XENP019280

SEQ ID NO: 3621 - protein, 5 aa, Artificial Sequence
  Description of Artificial Sequence: Synthetic peptide
  XENP019280 vhCDR1
SYTMH

SEQ ID NO: 3622 - protein, 17 aa, Artificial Sequence
  Description of Artificial Sequence: Synthetic peptide
  XENP019280 vhCDR2
FISYDGSNKYYADSVKG

SEQ ID NO: 3623 - protein, 9 aa, Artificial Sequence
  Description of Artificial Sequence: Synthetic peptide
  XENP019280 vhCDR3
TGWLGPFDY

SEQ ID NO: 3624 - protein, 215 aa, Artificial Sequence; identical to SEQ ID NO: 2924
  Description of Artificial Sequence: Synthetic polypeptide
  XENP019280 [CTLA-4]_H0.70_L0_Fab Light Chain

SEQ ID NO: 3625 - protein, 108 aa, Artificial Sequence; identical to SEQ ID NO: 23
  Description of Artificial Sequence: Synthetic polypeptide
  VL of XENP019280

SEQ ID NO: 3626 - protein, 12 aa, Artificial Sequence
  Description of Artificial Sequence: Synthetic peptide
  XENP019280 vlCDR1
RASQSVGSSYLA

SEQ ID NO: 3627 - protein, 7 aa, Artificial Sequence
  Description of Artificial Sequence: Synthetic peptide
  XENP019280 vlCDR2
GAFSRAT

SEQ ID NO: 3628 - protein, 9 aa, Artificial Sequence
  Description of Artificial Sequence: Synthetic peptide
  XENP019280 vlCDR3
QQYGSSPWT

SEQ ID NO: 3629 - protein, 221 aa, Artificial Sequence
  Description of Artificial Sequence: Synthetic polypeptide
  XENP019281 [CTLA-4]_H0.71_L0_Fab Heavy Chain
QVQLVESGGGVVQPGRSLRLSCAASGFTFSSYTMHWVRQAPGKGLEWVTFISYDGNDKYYADSVKGRFTISRDNSKNTLYLQMNSLRAEDTAIYYCARTGWLGPFDYWGQGTLVTVSSASTKGPSVFPLAPSSKSTSGGTAALGCLVKDYFPEPVTVSWNSGALTSGVHTFPAVLQSSGLYSLSSVVTVPSSSLGTQTYICNVNHKPSNTKVDKKVEPKSC

SEQ ID NO: 3630 - protein, 118 aa, Artificial Sequence; identical to SEQ ID NO: 823
  Description of Artificial Sequence: Synthetic polypeptide
  VH of XENP019281

SEQ ID NO: 3631 - protein, 5 aa, Artificial Sequence
  Description of Artificial Sequence: Synthetic peptide
  XENP019281 vhCDR1
SYTMH

SEQ ID NO: 3632 - protein, 17 aa, Artificial Sequence
  Description of Artificial Sequence: Synthetic peptide
  XENP019281 vhCDR2
FISYDGNDKYYADSVKG

SEQ ID NO: 3633 - protein, 9 aa, Artificial Sequence
  Description of Artificial Sequence: Synthetic peptide
  XENP019281 vhCDR3
TGWLGPFDY

SEQ ID NO: 3634 - protein, 215 aa, Artificial Sequence; identical to SEQ ID NO: 2924
  Description of Artificial Sequence: Synthetic polypeptide
  XENP019281 [CTLA-4]_H0.71_L0_Fab Light Chain

SEQ ID NO: 3635 - protein, 108 aa, Artificial Sequence; identical to SEQ ID NO: 23
  Description of Artificial Sequence: Synthetic polypeptide
  VL of XENP019281

SEQ ID NO: 3636 - protein, 12 aa, Artificial Sequence
  Description of Artificial Sequence: Synthetic peptide
  XENP019281 vlCDR1
RASQSVGSSYLA

SEQ ID NO: 3637 - protein, 7 aa, Artificial Sequence
  Description of Artificial Sequence: Synthetic peptide
  XENP019281 vlCDR2
GAFSRAT

SEQ ID NO: 3638 - protein, 9 aa, Artificial Sequence
  Description of Artificial Sequence: Synthetic peptide
  XENP019281 vlCDR3
QQYGSSPWT

SEQ ID NO: 3639 - protein, 221 aa, Artificial Sequence
  Description of Artificial Sequence: Synthetic polypeptide
  XENP019282 [CTLA-4]_H0.72_L0_Fab Heavy Chain
QVQLVESGGGVVQPGRSLRLSCAASGFTFSSYTMHWVRQAPGKGLEWVTFISYDGNEKYYADSVKGRFTISRDNSKNTLYLQMNSLRAEDTAIYYCARTGWLGPFDYWGQGTLVTVSSASTKGPSVFPLAPSSKSTSGGTAALGCLVKDYFPEPVTVSWNSGALTSGVHTFPAVLQSSGLYSLSSVVTVPSSSLGTQTYICNVNHKPSNTKVDKKVEPKSC

SEQ ID NO: 3640 - protein, 118 aa, Artificial Sequence; identical to SEQ ID NO: 832
  Description of Artificial Sequence: Synthetic polypeptide
  VH of XENP019282

SEQ ID NO: 3641 - protein, 5 aa, Artificial Sequence
  Description of Artificial Sequence: Synthetic peptide
  XENP019282 vhCDR1
SYTMH

SEQ ID NO: 3642 - protein, 17 aa, Artificial Sequence
  Description of Artificial Sequence: Synthetic peptide
  XENP019282 vhCDR2
FISYDGNEKYYADSVKG

SEQ ID NO: 3643 - protein, 9 aa, Artificial Sequence
  Description of Artificial Sequence: Synthetic peptide
  XENP019282 vhCDR3
TGWLGPFDY

SEQ ID NO: 3644 - protein, 215 aa, Artificial Sequence; identical to SEQ ID NO: 2924
  Description of Artificial Sequence: Synthetic polypeptide
  XENP019282 [CTLA-4]_H0.72_L0_Fab Light Chain

SEQ ID NO: 3645 - protein, 108 aa, Artificial Sequence; identical to SEQ ID NO: 23
  Description of Artificial Sequence: Synthetic polypeptide
  VL of XENP019282

SEQ ID NO: 3646 - protein, 12 aa, Artificial Sequence
  Description of Artificial Sequence: Synthetic peptide
  XENP019282 vlCDR1
RASQSVGSSYLA

SEQ ID NO: 3647 - protein, 7 aa, Artificial Sequence
  Description of Artificial Sequence: Synthetic peptide
  XENP019282 vlCDR2
GAFSRAT

SEQ ID NO: 3648 - protein, 9 aa, Artificial Sequence
  Description of Artificial Sequence: Synthetic peptide
  XENP019282 vlCDR3
QQYGSSPWT

SEQ ID NO: 3649 - protein, 221 aa, Artificial Sequence
  Description of Artificial Sequence: Synthetic polypeptide
  XENP019283 [CTLA-4]_H0.73_L0_Fab Heavy Chain
QVQLVESGGGVVQPGRSLRLSCAASGFTFSSYTMHWVRQAPGKGLEWVTFISYDGNHKYYADSVKGRFTISRDNSKNTLYLQMNSLRAEDTAIYYCARTGWLGPFDYWGQGTLVTVSSASTKGPSVFPLAPSSKSTSGGTAALGCLVKDYFPEPVTVSWNSGALTSGVHTFPAVLQSSGLYSLSSVVTVPSSSLGTQTYICNVNHKPSNTKVDKKVEPKSC

SEQ ID NO: 3650 - protein, 118 aa, Artificial Sequence; identical to SEQ ID NO: 841
  Description of Artificial Sequence: Synthetic polypeptide
  VH of XENP019283

SEQ ID NO: 3651 - protein, 5 aa, Artificial Sequence
  Description of Artificial Sequence: Synthetic peptide
  XENP019283 vhCDR1
SYTMH

SEQ ID NO: 3652 - protein, 17 aa, Artificial Sequence
  Description of Artificial Sequence: Synthetic peptide
  XENP019283 vhCDR2
FISYDGNHKYYADSVKG

SEQ ID NO: 3653 - protein, 9 aa, Artificial Sequence
  Description of Artificial Sequence: Synthetic peptide
  XENP019283 vhCDR3
TGWLGPFDY

SEQ ID NO: 3654 - protein, 215 aa, Artificial Sequence; identical to SEQ ID NO: 2924
  Description of Artificial Sequence: Synthetic polypeptide
  XENP019283 [CTLA-4]_H0.73_L0_Fab Light Chain

SEQ ID NO: 3655 - protein, 108 aa, Artificial Sequence; identical to SEQ ID NO: 23
  Description of Artificial Sequence: Synthetic polypeptide
  VL of XENP019283

SEQ ID NO: 3656 - protein, 12 aa, Artificial Sequence
  Description of Artificial Sequence: Synthetic peptide
  XENP019283 vlCDR1
RASQSVGSSYLA

SEQ ID NO: 3657 - protein, 7 aa, Artificial Sequence
  Description of Artificial Sequence: Synthetic peptide
  XENP019283 vlCDR2
GAFSRAT

SEQ ID NO: 3658 - protein, 9 aa, Artificial Sequence
  Description of Artificial Sequence: Synthetic peptide
  XENP019283 vlCDR3
QQYGSSPWT

SEQ ID NO: 3659 - protein, 221 aa, Artificial Sequence
  Description of Artificial Sequence: Synthetic polypeptide
  XENP019284 [CTLA-4]_H0.74_L0_Fab Heavy Chain
QVQLVESGGGVVQPGRSLRLSCAASGFTFSSYTMHWVRQAPGKGLEWVTFISYDGNSKYYADSVKGRFTISRDNSKNTLYLQMNSLRAEDTAIYYCARTGWLGPFDYWGQGTLVTVSSASTKGPSVFPLAPSSKSTSGGTAALGCLVKDYFPEPVTVSWNSGALTSGVHTFPAVLQSSGLYSLSSVVTVPSSSLGTQTYICNVNHKPSNTKVDKKVEPKSC

SEQ ID NO: 3660 - protein, 118 aa, Artificial Sequence; identical to SEQ ID NO: 850
  Description of Artificial Sequence: Synthetic polypeptide
  VH of XENP019284

SEQ ID NO: 3661 - protein, 5 aa, Artificial Sequence
  Description of Artificial Sequence: Synthetic peptide
  XENP019284 vhCDR1
SYTMH

SEQ ID NO: 3662 - protein, 17 aa, Artificial Sequence
  Description of Artificial Sequence: Synthetic peptide
  XENP019284 vhCDR2
FISYDGNSKYYADSVKG

SEQ ID NO: 3663 - protein, 9 aa, Artificial Sequence
  Description of Artificial Sequence: Synthetic peptide
  XENP019284 vhCDR3
TGWLGPFDY

SEQ ID NO: 3664 - protein, 215 aa, Artificial Sequence; identical to SEQ ID NO: 2924
  Description of Artificial Sequence: Synthetic polypeptide
  XENP019284 [CTLA-4]_H0.74_L0_Fab Light Chain

SEQ ID NO: 3665 - protein, 108 aa, Artificial Sequence; identical to SEQ ID NO: 23
  Description of Artificial Sequence: Synthetic polypeptide
  VL of XENP019284

SEQ ID NO: 3666 - protein, 12 aa, Artificial Sequence
  Description of Artificial Sequence: Synthetic peptide
  XENP019284 vlCDR1
RASQSVGSSYLA

SEQ ID NO: 3667 - protein, 7 aa, Artificial Sequence
  Description of Artificial Sequence: Synthetic peptide
  XENP019284 vlCDR2
GAFSRAT

SEQ ID NO: 3668 - protein, 9 aa, Artificial Sequence
  Description of Artificial Sequence: Synthetic peptide
  XENP019284 vlCDR3
QQYGSSPWT

SEQ ID NO: 3669 - protein, 221 aa, Artificial Sequence
  Description of Artificial Sequence: Synthetic polypeptide
  XENP019285 [CTLA-4]_H0.75_L0_Fab Heavy Chain
QVQLVESGGGVVQPGRSLRLSCAASGFTFSSYTMHWVRQAPGKGLEWVTFISYDGNTKYYADSVKGRFTISRDNSKNTLYLQMNSLRAEDTAIYYCARTGWLGPFDYWGQGTLVTVSSASTKGPSVFPLAPSSKSTSGGTAALGCLVKDYFPEPVTVSWNSGALTSGVHTFPAVLQSSGLYSLSSVVTVPSSSLGTQTYICNVNHKPSNTKVDKKVEPKSC

SEQ ID NO: 3670 - protein, 118 aa, Artificial Sequence; identical to SEQ ID NO: 859
  Description of Artificial Sequence: Synthetic polypeptide
  VH of XENP019285

SEQ ID NO: 3671 - protein, 5 aa, Artificial Sequence
  Description of Artificial Sequence: Synthetic peptide
  XENP019285 vhCDR1
SYTMH

SEQ ID NO: 3672 - protein, 17 aa, Artificial Sequence
  Description of Artificial Sequence: Synthetic peptide
  XENP019285 vhCDR2
FISYDGNTKYYADSVKG

SEQ ID NO: 3673 - protein, 9 aa, Artificial Sequence
  Description of Artificial Sequence: Synthetic peptide
  XENP019285 vhCDR3
TGWLGPFDY

SEQ ID NO: 3674 - protein, 215 aa, Artificial Sequence; identical to SEQ ID NO: 2924
  Description of Artificial Sequence: Synthetic polypeptide
  XENP019285 [CTLA-4]_H0.75_L0_Fab Light Chain

SEQ ID NO: 3675 - protein, 108 aa, Artificial Sequence; identical to SEQ ID NO: 23
  Description of Artificial Sequence: Synthetic polypeptide
  VL of XENP019285

SEQ ID NO: 3676 - protein, 12 aa, Artificial Sequence
  Description of Artificial Sequence: Synthetic peptide
  XENP019285 vlCDR1
RASQSVGSSYLA

SEQ ID NO: 3677 - protein, 7 aa, Artificial Sequence
  Description of Artificial Sequence: Synthetic peptide
  XENP019285 vlCDR2
GAFSRAT

SEQ ID NO: 3678 - protein, 9 aa, Artificial Sequence
  Description of Artificial Sequence: Synthetic peptide
  XENP019285 vlCDR3
QQYGSSPWT

SEQ ID NO: 3679 - protein, 221 aa, Artificial Sequence
  Description of Artificial Sequence: Synthetic polypeptide
  XENP019286 [CTLA-4]_H0.76_L0_Fab Heavy Chain
QVQLVESGGGVVQPGRSLRLSCAASGFTFSSYTMHWVRQAPGKGLEWVTFISYDGNQKYYADSVKGRFTISRDNSKNTLYLQMNSLRAEDTAIYYCARTGWLGPFDYWGQGTLVTVSSASTKGPSVFPLAPSSKSTSGGTAALGCLVKDYFPEPVTVSWNSGALTSGVHTFPAVLQSSGLYSLSSVVTVPSSSLGTQTYICNVNHKPSNTKVDKKVEPKSC

SEQ ID NO: 3680 - protein, 118 aa, Artificial Sequence; identical to SEQ ID NO: 868
  Description of Artificial Sequence: Synthetic polypeptide
  VH of XENP019286

SEQ ID NO: 3681 - protein, 5 aa, Artificial Sequence
  Description of Artificial Sequence: Synthetic peptide
  XENP019286 vhCDR1
SYTMH

SEQ ID NO: 3682 - protein, 17 aa, Artificial Sequence
  Description of Artificial Sequence: Synthetic peptide
  XENP019286 vhCDR2
FISYDGNQKYYADSVKG

SEQ ID NO: 3683 - protein, 9 aa, Artificial Sequence
  Description of Artificial Sequence: Synthetic peptide
  XENP019286 vhCDR3
TGWLGPFDY

SEQ ID NO: 3684 - protein, 215 aa, Artificial Sequence; identical to SEQ ID NO: 2924
  Description of Artificial Sequence: Synthetic polypeptide
  XENP019286 [CTLA-4]_H0.76_L0_Fab Light Chain

SEQ ID NO: 3685 - protein, 108 aa, Artificial Sequence; identical to SEQ ID NO: 23
  Description of Artificial Sequence: Synthetic polypeptide
  VL of XENP019286

SEQ ID NO: 3686 - protein, 12 aa, Artificial Sequence
  Description of Artificial Sequence: Synthetic peptide
  XENP019286 vlCDR1
RASQSVGSSYLA

SEQ ID NO: 3687 - protein, 7 aa, Artificial Sequence
  Description of Artificial Sequence: Synthetic peptide
  XENP019286 vlCDR2
GAFSRAT

SEQ ID NO: 3688 - protein, 9 aa, Artificial Sequence
  Description of Artificial Sequence: Synthetic peptide
  XENP019286 vlCDR3
QQYGSSPWT

SEQ ID NO: 3689 - protein, 221 aa, Artificial Sequence
  Description of Artificial Sequence: Synthetic polypeptide
  XENP019287 [CTLA-4]_H0.77_L0_Fab Heavy Chain
QVQLVESGGGVVQPGRSLRLSCAASGFTFSSYTMHWVRQAPGKGLEWVTFISYDGNNIYYADSVKGRFTISRDNSKNTLYLQMNSLRAEDTAIYYCARTGWLGPFDYWGQGTLVTVSSASTKGPSVFPLAPSSKSTSGGTAALGCLVKDYFPEPVTVSWNSGALTSGVHTFPAVLQSSGLYSLSSVVTVPSSSLGTQTYICNVNHKPSNTKVDKKVEPKSC

SEQ ID NO: 3690 - protein, 118 aa, Artificial Sequence; identical to SEQ ID NO: 877
  Description of Artificial Sequence: Synthetic polypeptide
  VH of XENP019287

SEQ ID NO: 3691 - protein, 5 aa, Artificial Sequence
  Description of Artificial Sequence: Synthetic peptide
  XENP019287 vhCDR1
SYTMH

SEQ ID NO: 3692 - protein, 17 aa, Artificial Sequence
  Description of Artificial Sequence: Synthetic peptide
  XENP019287 vhCDR2
FISYDGNNIYYADSVKG

SEQ ID NO: 3693 - protein, 9 aa, Artificial Sequence
  Description of Artificial Sequence: Synthetic peptide
  XENP019287 vhCDR3
TGWLGPFDY

SEQ ID NO: 3694 - protein, 215 aa, Artificial Sequence; identical to SEQ ID NO: 2924
  Description of Artificial Sequence: Synthetic polypeptide
  XENP019287 [CTLA-4]_H0.77_L0_Fab Light Chain

SEQ ID NO: 3695 - protein, 108 aa, Artificial Sequence; identical to SEQ ID NO: 23
  Description of Artificial Sequence: Synthetic polypeptide
  VL of XENP019287

SEQ ID NO: 3696 - protein, 12 aa, Artificial Sequence
  Description of Artificial Sequence: Synthetic peptide
  XENP019287 vlCDR1
RASQSVGSSYLA

SEQ ID NO: 3697 - protein, 7 aa, Artificial Sequence
  Description of Artificial Sequence: Synthetic peptide
  XENP019287 vlCDR2
GAFSRAT

SEQ ID NO: 3698 - protein, 9 aa, Artificial Sequence
  Description of Artificial Sequence: Synthetic peptide
  XENP019287 vlCDR3
QQYGSSPWT

SEQ ID NO: 3699 - protein, 221 aa, Artificial Sequence
  Description of Artificial Sequence: Synthetic polypeptide
  XENP019288 [CTLA-4]_H0.78_L0_Fab Heavy Chain
QVQLVESGGGVVQPGRSLRLSCAASGFTFSSYTMHWVRQAPGKGLEWVTFISYDGNNTYYADSVKGRFTISRDNSKNTLYLQMNSLRAEDTAIYYCARTGWLGPFDYWGQGTLVTVSSASTKGPSVFPLAPSSKSTSGGTAALGCLVKDYFPEPVTVSWNSGALTSGVHTFPAVLQSSGLYSLSSVVTVPSSSLGTQTYICNVNHKPSNTKVDKKVEPKSC

SEQ ID NO: 3700 - protein, 118 aa, Artificial Sequence; identical to SEQ ID NO: 886
  Description of Artificial Sequence: Synthetic polypeptide
  VH of XENP019288

SEQ ID NO: 3701 - protein, 5 aa, Artificial Sequence
  Description of Artificial Sequence: Synthetic peptide
  XENP019288 vhCDR1
SYTMH

SEQ ID NO: 3702 - protein, 17 aa, Artificial Sequence
  Description of Artificial Sequence: Synthetic peptide
  XENP019288 vhCDR2
FISYDGNNTYYADSVKG

SEQ ID NO: 3703 - protein, 9 aa, Artificial Sequence
  Description of Artificial Sequence: Synthetic peptide
  XENP019288 vhCDR3
TGWLGPFDY

SEQ ID NO: 3704 - protein, 215 aa, Artificial Sequence; identical to SEQ ID NO: 2924
  Description of Artificial Sequence: Synthetic polypeptide
  XENP019288 [CTLA-4]_H0.78_L0_Fab Light Chain

SEQ ID NO: 3705 - protein, 108 aa, Artificial Sequence; identical to SEQ ID NO: 23
  Description of Artificial Sequence: Synthetic polypeptide
  VL of XENP019288

SEQ ID NO: 3706 - protein, 12 aa, Artificial Sequence
  Description of Artificial Sequence: Synthetic peptide
  XENP019288 vlCDR1
RASQSVGSSYLA

SEQ ID NO: 3707 - protein, 7 aa, Artificial Sequence
  Description of Artificial Sequence: Synthetic peptide
  XENP019288 vlCDR2
GAFSRAT

SEQ ID NO: 3708 - protein, 9 aa, Artificial Sequence
  Description of Artificial Sequence: Synthetic peptide
  XENP019288 vlCDR3
QQYGSSPWT

SEQ ID NO: 3709 - protein, 221 aa, Artificial Sequence
  Description of Artificial Sequence: Synthetic polypeptide
  XENP019289 [CTLA-4]_H0.79_L0_Fab Heavy Chain
QVQLVESGGGVVQPGRSLRLSCAASGFTFSSYTMHWVRQAPGKGLEWVTFISYDGNNKAYADSVKGRFTISRDNSKNTLYLQMNSLRAEDTAIYYCARTGWLGPFDYWGQGTLVTVSSASTKGPSVFPLAPSSKSTSGGTAALGCLVKDYFPEPVTVSWNSGALTSGVHTFPAVLQSSGLYSLSSVVTVPSSSLGTQTYICNVNHKPSNTKVDKKVEPKSC

SEQ ID NO: 3710 - protein, 118 aa, Artificial Sequence; identical to SEQ ID NO: 895
  Description of Artificial Sequence: Synthetic polypeptide
  VH of XENP019289

SEQ ID NO: 3711 - protein, 5 aa, Artificial Sequence
  Description of Artificial Sequence: Synthetic peptide
  XENP019289 vhCDR1
SYTMH

SEQ ID NO: 3712 - protein, 17 aa, Artificial Sequence
  Description of Artificial Sequence: Synthetic peptide
  XENP019289 vhCDR2
FISYDGNNKAYADSVKG

SEQ ID NO: 3713 - protein, 9 aa, Artificial Sequence
  Description of Artificial Sequence: Synthetic peptide
  XENP019289 vhCDR3
TGWLGPFDY

SEQ ID NO: 3714 - protein, 215 aa, Artificial Sequence; identical to SEQ ID NO: 2924
  Description of Artificial Sequence: Synthetic polypeptide
  XENP019289 [CTLA-4]_H0.79_L0_Fab Light Chain

SEQ ID NO: 3715 - protein, 108 aa, Artificial Sequence; identical to SEQ ID NO: 23
  Description of Artificial Sequence: Synthetic polypeptide
  VL of XENP019289

SEQ ID NO: 3716 - protein, 12 aa, Artificial Sequence
  Description of Artificial Sequence: Synthetic peptide
  XENP019289 vlCDR1
RASQSVGSSYLA

SEQ ID NO: 3717 - protein, 7 aa, Artificial Sequence
  Description of Artificial Sequence: Synthetic peptide
  XENP019289 vlCDR2
GAFSRAT

SEQ ID NO: 3718 - protein, 9 aa, Artificial Sequence
  Description of Artificial Sequence: Synthetic peptide
  XENP019289 vlCDR3
QQYGSSPWT

SEQ ID NO: 3719 - protein, 221 aa, Artificial Sequence
  Description of Artificial Sequence: Synthetic polypeptide
  XENP019290 [CTLA-4]_H0.80_L0_Fab Heavy Chain
QVQLVESGGGVVQPGRSLRLSCAASGFTFSSYTMHWVRQAPGKGLEWVTFISYDGNNKYYAASVKGRFTISRDNSKNTLYLQMNSLRAEDTAIYYCARTGWLGPFDYWGQGTLVTVSSASTKGPSVFPLAPSSKSTSGGTAALGCLVKDYFPEPVTVSWNSGALTSGVHTFPAVLQSSGLYSLSSVVTVPSSSLGTQTYICNVNHKPSNTKVDKKVEPKSC

SEQ ID NO: 3720 - protein, 118 aa, Artificial Sequence; identical to SEQ ID NO: 904
  Description of Artificial Sequence: Synthetic polypeptide
  VH of XENP019290

SEQ ID NO: 3721 - protein, 5 aa, Artificial Sequence
  Description of Artificial Sequence: Synthetic peptide
  XENP019290 vhCDR1
SYTMH

SEQ ID NO: 3722 - protein, 17 aa, Artificial Sequence
  Description of Artificial Sequence: Synthetic peptide
  XENP019290 vhCDR2
FISYDGNNKYYAASVKG

SEQ ID NO: 3723 - protein, 9 aa, Artificial Sequence
  Description of Artificial Sequence: Synthetic peptide
  XENP019290 vhCDR3
TGWLGPFDY

SEQ ID NO: 3724 - protein, 215 aa, Artificial Sequence; identical to SEQ ID NO: 2924
  Description of Artificial Sequence: Synthetic polypeptide
  XENP019290 [CTLA-4]_H0.80_L0_Fab Light Chain

SEQ ID NO: 3725 - protein, 108 aa, Artificial Sequence; identical to SEQ ID NO: 23
  Description of Artificial Sequence: Synthetic polypeptide
  VL of XENP019290

SEQ ID NO: 3726 - protein, 12 aa, Artificial Sequence
  Description of Artificial Sequence: Synthetic peptide
  XENP019290 vlCDR1
RASQSVGSSYLA

SEQ ID NO: 3727 - protein, 7 aa, Artificial Sequence
  Description of Artificial Sequence: Synthetic peptide
  XENP019290 vlCDR2
GAFSRAT

SEQ ID NO: 3728 - protein, 9 aa, Artificial Sequence
  Description of Artificial Sequence: Synthetic peptide
  XENP019290 vlCDR3
QQYGSSPWT

SEQ ID NO: 3729 - protein, 221 aa, Artificial Sequence
  Description of Artificial Sequence: Synthetic polypeptide
  XENP019291 [CTLA-4]_H0.81_L0_Fab Heavy Chain
QVQLVESGGGVVQPGRSLRLSCAASGFTFSSYTMHWVRQAPGKGLEWVTFISYDGNNKYYAKSVKGRFTISRDNSKNTLYLQMNSLRAEDTAIYYCARTGWLGPFDYWGQGTLVTVSSASTKGPSVFPLAPSSKSTSGGTAALGCLVKDYFPEPVTVSWNSGALTSGVHTFPAVLQSSGLYSLSSVVTVPSSSLGTQTYICNVNHKPSNTKVDKKVEPKSC

SEQ ID NO: 3730 - protein, 118 aa, Artificial Sequence; identical to SEQ ID NO: 913
  Description of Artificial Sequence: Synthetic polypeptide
  VH of XENP019291

SEQ ID NO: 3731 - protein, 5 aa, Artificial Sequence
  Description of Artificial Sequence: Synthetic peptide
  XENP019291 vhCDR1
SYTMH

SEQ ID NO: 3732 - protein, 17 aa, Artificial Sequence
  Description of Artificial Sequence: Synthetic peptide
  XENP019291 vhCDR2
FISYDGNNKYYAKSVKG

SEQ ID NO: 3733 - protein, 9 aa, Artificial Sequence
  Description of Artificial Sequence: Synthetic peptide
  XENP019291 vhCDR3
TGWLGPFDY

SEQ ID NO: 3734 - protein, 215 aa, Artificial Sequence; identical to SEQ ID NO: 2924
  Description of Artificial Sequence: Synthetic polypeptide
  XENP019291 [CTLA-4]_H0.81_L0_Fab Light Chain

SEQ ID NO: 3735 - protein, 108 aa, Artificial Sequence; identical to SEQ ID NO: 23
  Description of Artificial Sequence: Synthetic polypeptide
  VL of XENP019291

SEQ ID NO: 3736 - protein, 12 aa, Artificial Sequence
  Description of Artificial Sequence: Synthetic peptide
  XENP019291 vlCDR1
RASQSVGSSYLA

SEQ ID NO: 3737 - protein, 7 aa, Artificial Sequence
  Description of Artificial Sequence: Synthetic peptide
  XENP019291 vlCDR2
GAFSRAT

SEQ ID NO: 3738 - protein, 9 aa, Artificial Sequence
  Description of Artificial Sequence: Synthetic peptide
  XENP019291 vlCDR3
QQYGSSPWT

SEQ ID NO: 3739 - protein, 221 aa, Artificial Sequence
  Description of Artificial Sequence: Synthetic polypeptide
  XENP019292 [CTLA-4]_H0.82_L0_Fab Heavy Chain
QVQLVESGGGVVQPGRSLRLSCAASGFTFSSYTMHWVRQAPGKGLEWVTFISYDGNNKYYADSVKDRFTISRDNSKNTLYLQMNSLRAEDTAIYYCARTGWLGPFDYWGQGTLVTVSSASTKGPSVFPLAPSSKSTSGGTAALGCLVKDYFPEPVTVSWNSGALTSGVHTFPAVLQSSGLYSLSSVVTVPSSSLGTQTYICNVNHKPSNTKVDKKVEPKSC

SEQ ID NO: 3740 - protein, 118 aa, Artificial Sequence; identical to SEQ ID NO: 922
  Description of Artificial Sequence: Synthetic polypeptide
  VH of XENP019292

SEQ ID NO: 3741 - protein, 5 aa, Artificial Sequence
  Description of Artificial Sequence: Synthetic peptide
  XENP019292 vhCDR1
SYTMH

SEQ ID NO: 3742 - protein, 17 aa, Artificial Sequence
  Description of Artificial Sequence: Synthetic peptide
  XENP019292 vhCDR2
FISYDGNNKYYADSVKD

SEQ ID NO: 3743 - protein, 9 aa, Artificial Sequence
  Description of Artificial Sequence: Synthetic peptide
  XENP019292 vhCDR3
TGWLGPFDY

SEQ ID NO: 3744 - protein, 215 aa, Artificial Sequence; identical to SEQ ID NO: 2924
  Description of Artificial Sequence: Synthetic polypeptide
  XENP019292 [CTLA-4]_H0.82_L0_Fab Light Chain

SEQ ID NO: 3745 - protein, 108 aa, Artificial Sequence; identical to SEQ ID NO: 23
  Description of Artificial Sequence: Synthetic polypeptide
  VL of XENP019292

SEQ ID NO: 3746 - protein, 12 aa, Artificial Sequence
  Description of Artificial Sequence: Synthetic peptide
  XENP019292 vlCDR1
RASQSVGSSYLA

SEQ ID NO: 3747 - protein, 7 aa, Artificial Sequence
  Description of Artificial Sequence: Synthetic peptide
  XENP019292 vlCDR2
GAFSRAT

SEQ ID NO: 3748 - protein, 9 aa, Artificial Sequence
  Description of Artificial Sequence: Synthetic peptide
  XENP019292 vlCDR3
QQYGSSPWT

SEQ ID NO: 3749 - protein, 221 aa, Artificial Sequence
  Description of Artificial Sequence: Synthetic polypeptide
  XENP019293 [CTLA-4]_H0.83_L0_Fab Heavy Chain
QVQLVESGGGVVQPGRSLRLSCAASGFTFSSYTMHWVRQAPGKGLEWVTFISYDGNNKYYADSVKERFTISRDNSKNTLYLQMNSLRAEDTAIYYCARTGWLGPFDYWGQGTLVTVSSASTKGPSVFPLAPSSKSTSGGTAALGCLVKDYFPEPVTVSWNSGALTSGVHTFPAVLQSSGLYSLSSVVTVPSSSLGTQTYICNVNHKPSNTKVDKKVEPKSC

SEQ ID NO: 3750 - protein, 118 aa, Artificial Sequence; identical to SEQ ID NO: 931
  Description of Artificial Sequence: Synthetic polypeptide
  VH of XENP019293

SEQ ID NO: 3751 - protein, 5 aa, Artificial Sequence
  Description of Artificial Sequence: Synthetic peptide
  XENP019293 vhCDR1
SYTMH

SEQ ID NO: 3752 - protein, 17 aa, Artificial Sequence
  Description of Artificial Sequence: Synthetic peptide
  XENP019293 vhCDR2
FISYDGNNKYYADSVKE

SEQ ID NO: 3753 - protein, 9 aa, Artificial Sequence
  Description of Artificial Sequence: Synthetic peptide
  XENP019293 vhCDR3
TGWLGPFDY

SEQ ID NO: 3754 - protein, 215 aa, Artificial Sequence; identical to SEQ ID NO: 2924
  Description of Artificial Sequence: Synthetic polypeptide
  XENP019293 [CTLA-4]_H0.83_L0_Fab Light Chain

SEQ ID NO: 3755 - protein, 108 aa, Artificial Sequence; identical to SEQ ID NO: 23
  Description of Artificial Sequence: Synthetic polypeptide
  VL of XENP019293

SEQ ID NO: 3756 - protein, 12 aa, Artificial Sequence
  Description of Artificial Sequence: Synthetic peptide
  XENP019293 vlCDR1
RASQSVGSSYLA

SEQ ID NO: 3757 - protein, 7 aa, Artificial Sequence
  Description of Artificial Sequence: Synthetic peptide
  XENP019293 vlCDR2
GAFSRAT

SEQ ID NO: 3758 - protein, 9 aa, Artificial Sequence
  Description of Artificial Sequence: Synthetic peptide
  XENP019293 vlCDR3
QQYGSSPWT

SEQ ID NO: 3759 - protein, 221 aa, Artificial Sequence
  Description of Artificial Sequence: Synthetic polypeptide
  XENP019294 [CTLA-4]_H0.84_L0_Fab Heavy Chain
QVQLVESGGGVVQPGRSLRLSCAASGFTFSSYTMHWVRQAPGKGLEWVTFISYDGNNKYYADSVKGQFTISRDNSKNTLYLQMNSLRAEDTAIYYCARTGWLGPFDYWGQGTLVTVSSASTKGPSVFPLAPSSKSTSGGTAALGCLVKDYFPEPVTVSWNSGALTSGVHTFPAVLQSSGLYSLSSVVTVPSSSLGTQTYICNVNHKPSNTKVDKKVEPKSC

SEQ ID NO: 3760 - protein, 118 aa, Artificial Sequence; identical to SEQ ID NO: 940
  Description of Artificial Sequence: Synthetic polypeptide
  VH of XENP019294

SEQ ID NO: 3761 - protein, 5 aa, Artificial Sequence
  Description of Artificial Sequence: Synthetic peptide
  XENP019294 vhCDR1
SYTMH

SEQ ID NO: 3762 - protein, 17 aa, Artificial Sequence
  Description of Artificial Sequence: Synthetic peptide
  XENP019294 vhCDR2
FISYDGNNKYYADSVKG

SEQ ID NO: 3763 - protein, 9 aa, Artificial Sequence
  Description of Artificial Sequence: Synthetic peptide
  XENP019294 vhCDR3
TGWLGPFDY

SEQ ID NO: 3764 - protein, 215 aa, Artificial Sequence; identical to SEQ ID NO: 2924
  Description of Artificial Sequence: Synthetic polypeptide
  XENP019294 [CTLA-4]_H0.84_L0_Fab Light Chain

SEQ ID NO: 3765 - protein, 108 aa, Artificial Sequence; identical to SEQ ID NO: 23
  Description of Artificial Sequence: Synthetic polypeptide
  VL of XENP019294

SEQ ID NO: 3766 - protein, 12 aa, Artificial Sequence
  Description of Artificial Sequence: Synthetic peptide
  XENP019294 vlCDR1
RASQSVGSSYLA

SEQ ID NO: 3767 - protein, 7 aa, Artificial Sequence
  Description of Artificial Sequence: Synthetic peptide
  XENP019294 vlCDR2
GAFSRAT

SEQ ID NO: 3768 - protein, 9 aa, Artificial Sequence
  Description of Artificial Sequence: Synthetic peptide
  XENP019294 vlCDR3
QQYGSSPWT

SEQ ID NO: 3769 - protein, 221 aa, Artificial Sequence
  Description of Artificial Sequence: Synthetic polypeptide
  XENP019295 [CTLA-4]_H0.85_L0_Fab Heavy Chain
QVQLVESGGGVVQPGRSLRLSCAASGFTFSSYTMHWVRQAPGKGLEWVTFISYDGNNKYYADSVKGRFTMSRDNSKNTLYLQMNSLRAEDTAIYYCARTGWLGPFDYWGQGTLVTVSSASTKGPSVFPLAPSSKSTSGGTAALGCLVKDYFPEPVTVSWNSGALTSGVHTFPAVLQSSGLYSLSSVVTVPSSSLGTQTYICNVNHKPSNTKVDKKVEPKSC

SEQ ID NO: 3770 - protein, 118 aa, Artificial Sequence; identical to SEQ ID NO: 949
  Description of Artificial Sequence: Synthetic polypeptide
  VH of XENP019295

SEQ ID NO: 3771 - protein, 5 aa, Artificial Sequence
  Description of Artificial Sequence: Synthetic peptide
  XENP019295 vhCDR1
SYTMH

SEQ ID NO: 3772 - protein, 17 aa, Artificial Sequence
  Description of Artificial Sequence: Synthetic peptide
  XENP019295 vhCDR2
FISYDGNNKYYADSVKG

SEQ ID NO: 3773 - protein, 9 aa, Artificial Sequence
  Description of Artificial Sequence: Synthetic peptide
  XENP019295 vhCDR3
TGWLGPFDY

SEQ ID NO: 3774 - protein, 215 aa, Artificial Sequence; identical to SEQ ID NO: 2924
  Description of Artificial Sequence: Synthetic polypeptide
  XENP019295 [CTLA-4]_H0.85_L0_Fab Light Chain

SEQ ID NO: 3775 - protein, 108 aa, Artificial Sequence; identical to SEQ ID NO: 23
  Description of Artificial Sequence: Synthetic polypeptide
  VL of XENP019295

SEQ ID NO: 3776 - protein, 12 aa, Artificial Sequence
  Description of Artificial Sequence: Synthetic peptide
  XENP019295 vlCDR1
RASQSVGSSYLA

SEQ ID NO: 3777 - protein, 7 aa, Artificial Sequence
  Description of Artificial Sequence: Synthetic peptide
  XENP019295 vlCDR2
GAFSRAT

SEQ ID NO: 3778 - protein, 9 aa, Artificial Sequence
  Description of Artificial Sequence: Synthetic peptide
  XENP019295 vlCDR3
QQYGSSPWT

SEQ ID NO: 3779 - protein, 221 aa, Artificial Sequence
  Description of Artificial Sequence: Synthetic polypeptide
  XENP019296 [CTLA-4]_H0.86_L0_Fab Heavy Chain
QVQLVESGGGVVQPGRSLRLSCAASGFTFSSYTMHWVRQAPGKGLEWVTFISYDGNNKYYADSVKGRFTVSRDNSKNTLYLQMNSLRAEDTAIYYCARTGWLGPFDYWGQGTLVTVSSASTKGPSVFPLAPSSKSTSGGTAALGCLVKDYFPEPVTVSWNSGALTSGVHTFPAVLQSSGLYSLSSVVTVPSSSLGTQTYICNVNHKPSNTKVDKKVEPKSC

SEQ ID NO: 3780 - protein, 118 aa, Artificial Sequence; identical to SEQ ID NO: 958
  Description of Artificial Sequence: Synthetic polypeptide
  VH of XENP019296

SEQ ID NO: 3781 - protein, 5 aa, Artificial Sequence
  Description of Artificial Sequence: Synthetic peptide
  XENP019296 vhCDR1
SYTMH

SEQ ID NO: 3782 - protein, 17 aa, Artificial Sequence
  Description of Artificial Sequence: Synthetic peptide
  XENP019296 vhCDR2
FISYDGNNKYYADSVKG

SEQ ID NO: 3783 - protein, 9 aa, Artificial Sequence
  Description of Artificial Sequence: Synthetic peptide
  XENP019296 vhCDR3
TGWLGPFDY

SEQ ID NO: 3784 - protein, 215 aa, Artificial Sequence; identical to SEQ ID NO: 2924
  Description of Artificial Sequence: Synthetic polypeptide
  XENP019296 [CTLA-4]_H0.86_L0_Fab Light Chain

SEQ ID NO: 3785 - protein, 108 aa, Artificial Sequence; identical to SEQ ID NO: 23
  Description of Artificial Sequence: Synthetic polypeptide
  VL of XENP019296

SEQ ID NO: 3786 - protein, 12 aa, Artificial Sequence
  Description of Artificial Sequence: Synthetic peptide
  XENP019296 vlCDR1
RASQSVGSSYLA

SEQ ID NO: 3787 - protein, 7 aa, Artificial Sequence
  Description of Artificial Sequence: Synthetic peptide
  XENP019296 vlCDR2
GAFSRAT

SEQ ID NO: 3788 - protein, 9 aa, Artificial Sequence
  Description of Artificial Sequence: Synthetic peptide
  XENP019296 vlCDR3
QQYGSSPWT

SEQ ID NO: 3789 - protein, 221 aa, Artificial Sequence
  Description of Artificial Sequence: Synthetic polypeptide
  XENP019301 [CTLA-4]_H0.87_L0_Fab Heavy Chain
QVQLVESGGGVVQPGRSLRLSCAASGFTFSSYTMHWVRQAPGKGLEWVTFISYDGNNKYYADSVKGRFTISEDNSKNTLYLQMNSLRAEDTAIYYCARTGWLGPFDYWGQGTLVTVSSASTKGPSVFPLAPSSKSTSGGTAALGCLVKDYFPEPVTVSWNSGALTSGVHTFPAVLQSSGLYSLSSVVTVPSSSLGTQTYICNVNHKPSNTKVDKKVEPKSC

SEQ ID NO: 3790 - protein, 118 aa, Artificial Sequence; identical to SEQ ID NO: 967
  Description of Artificial Sequence: Synthetic polypeptide
  VH of XENP019301

SEQ ID NO: 3791 - protein, 5 aa, Artificial Sequence
  Description of Artificial Sequence: Synthetic peptide
  XENP019301 vhCDR1
SYTMH

SEQ ID NO: 3792 - protein, 17 aa, Artificial Sequence
  Description of Artificial Sequence: Synthetic peptide
  XENP019301 vhCDR2
FISYDGNNKYYADSVKG

SEQ ID NO: 3793 - protein, 9 aa, Artificial Sequence
  Description of Artificial Sequence: Synthetic peptide
  XENP019301 vhCDR3
TGWLGPFDY

SEQ ID NO: 3794 - protein, 215 aa, Artificial Sequence; identical to SEQ ID NO: 2924
  Description of Artificial Sequence: Synthetic polypeptide
  XENP019301 [CTLA-4]_H0.87_L0_Fab Light Chain

SEQ ID NO: 3795 - protein, 108 aa, Artificial Sequence; identical to SEQ ID NO: 23
  Description of Artificial Sequence: Synthetic polypeptide
  VL of XENP019301

SEQ ID NO: 3796 - protein, 12 aa, Artificial Sequence
  Description of Artificial Sequence: Synthetic peptide
  XENP019301 vlCDR1
RASQSVGSSYLA

SEQ ID NO: 3797 - protein, 7 aa, Artificial Sequence
  Description of Artificial Sequence: Synthetic peptide
  XENP019301 vlCDR2
GAFSRAT

SEQ ID NO: 3798 - protein, 9 aa, Artificial Sequence
  Description of Artificial Sequence: Synthetic peptide
  XENP019301 vlCDR3
QQYGSSPWT

SEQ ID NO: 3799 - protein, 221 aa, Artificial Sequence
  Description of Artificial Sequence: Synthetic polypeptide
  XENP019302 [CTLA-4]_H0.88_L0_Fab Heavy Chain
QVQLVESGGGVVQPGRSLRLSCAASGFTFSSYTMHWVRQAPGKGLEWVTFISYDGNNKYYADSVKGRFTISRENSKNTLYLQMNSLRAEDTAIYYCARTGWLGPFDYWGQGTLVTVSSASTKGPSVFPLAPSSKSTSGGTAALGCLVKDYFPEPVTVSWNSGALTSGVHTFPAVLQSSGLYSLSSVVTVPSSSLGTQTYICNVNHKPSNTKVDKKVEPKSC

SEQ ID NO: 3800 - protein, 118 aa, Artificial Sequence; identical to SEQ ID NO: 976
  Description of Artificial Sequence: Synthetic polypeptide
  VH of XENP019302

SEQ ID NO: 3801 - protein, 5 aa, Artificial Sequence
  Description of Artificial Sequence: Synthetic peptide
  XENP019302 vhCDR1
SYTMH

SEQ ID NO: 3802 - protein, 17 aa, Artificial Sequence
  Description of Artificial Sequence: Synthetic peptide
  XENP019302 vhCDR2
FISYDGNNKYYADSVKG

SEQ ID NO: 3803 - protein, 9 aa, Artificial Sequence
  Description of Artificial Sequence: Synthetic peptide
  XENP019302 vhCDR3
TGWLGPFDY

SEQ ID NO: 3804 - protein, 215 aa, Artificial Sequence; identical to SEQ ID NO: 2924
  Description of Artificial Sequence: Synthetic polypeptide
  XENP019302 [CTLA-4]_H0.88_L0_Fab Light Chain

SEQ ID NO: 3805 - protein, 108 aa, Artificial Sequence; identical to SEQ ID NO: 23
  Description of Artificial Sequence: Synthetic polypeptide
  VL of XENP019302

SEQ ID NO: 3806 - protein, 12 aa, Artificial Sequence
  Description of Artificial Sequence: Synthetic peptide
  XENP019302 vlCDR1
RASQSVGSSYLA

SEQ ID NO: 3807 - protein, 7 aa, Artificial Sequence
  Description of Artificial Sequence: Synthetic peptide
  XENP019302 vlCDR2
GAFSRAT

SEQ ID NO: 3808 - protein, 9 aa, Artificial Sequence
  Description of Artificial Sequence: Synthetic peptide
  XENP019302 vlCDR3
QQYGSSPWT

SEQ ID NO: 3809 - protein, 221 aa, Artificial Sequence
  Description of Artificial Sequence: Synthetic polypeptide
  XENP019303 [CTLA-4]_H0.89_L0_Fab Heavy Chain
QVQLVESGGGVVQPGRSLRLSCAASGFTFSSYTMHWVRQAPGKGLEWVTFISYDGNNKYYADSVKGRFTISRDDSKNTLYLQMNSLRAEDTAIYYCARTGWLGPFDYWGQGTLVTVSSASTKGPSVFPLAPSSKSTSGGTAALGCLVKDYFPEPVTVSWNSGALTSGVHTFPAVLQSSGLYSLSSVVTVPSSSLGTQTYICNVNHKPSNTKVDKKVEPKSC

SEQ ID NO: 3810 - protein, 118 aa, Artificial Sequence; identical to SEQ ID NO: 985
  Description of Artificial Sequence: Synthetic polypeptide
  VH of XENP019303

SEQ ID NO: 3811 - protein, 5 aa, Artificial Sequence
  Description of Artificial Sequence: Synthetic peptide
  XENP019303 vhCDR1
SYTMH

SEQ ID NO: 3812 - protein, 17 aa, Artificial Sequence
  Description of Artificial Sequence: Synthetic peptide
  XENP019303 vhCDR2
FISYDGNNKYYADSVKG

SEQ ID NO: 3813 - protein, 9 aa, Artificial Sequence
  Description of Artificial Sequence: Synthetic peptide
  XENP019303 vhCDR3
TGWLGPFDY

SEQ ID NO: 3814 - protein, 215 aa, Artificial Sequence; identical to SEQ ID NO: 2924
  Description of Artificial Sequence: Synthetic polypeptide
  XENP019303 [CTLA-4]_H0.89_L0_Fab Light Chain

SEQ ID NO: 3815 - protein, 108 aa, Artificial Sequence; identical to SEQ ID NO: 23
  Description of Artificial Sequence: Synthetic polypeptide
  VL of XENP019303

SEQ ID NO: 3816 - protein, 12 aa, Artificial Sequence
  Description of Artificial Sequence: Synthetic peptide
  XENP019303 vlCDR1
RASQSVGSSYLA

SEQ ID NO: 3817 - protein, 7 aa, Artificial Sequence
  Description of Artificial Sequence: Synthetic peptide
  XENP019303 vlCDR2
GAFSRAT

SEQ ID NO: 3818 - protein, 9 aa, Artificial Sequence
  Description of Artificial Sequence: Synthetic peptide
  XENP019303 vlCDR3
QQYGSSPWT

SEQ ID NO: 3819 - protein, 221 aa, Artificial Sequence
  Description of Artificial Sequence: Synthetic polypeptide
  XENP019304 [CTLA-4]_H0.90_L0_Fab Heavy Chain
QVQLVESGGGVVQPGRSLRLSCAASGFTFSSYTMHWVRQAPGKGLEWVTFISYDGNNKYYADSVKGRFTISRDNAKNTLYLQMNSLRAEDTAIYYCARTGWLGPFDYWGQGTLVTVSSASTKGPSVFPLAPSSKSTSGGTAALGCLVKDYFPEPVTVSWNSGALTSGVHTFPAVLQSSGLYSLSSVVTVPSSSLGTQTYICNVNHKPSNTKVDKKVEPKSC

SEQ ID NO: 3820 - protein, 118 aa, Artificial Sequence; identical to SEQ ID NO: 994
  Description of Artificial Sequence: Synthetic polypeptide
  VH of XENP019304

SEQ ID NO: 3821 - protein, 5 aa, Artificial Sequence
  Description of Artificial Sequence: Synthetic peptide
  XENP019304 vhCDR1
SYTMH

SEQ ID NO: 3822 - protein, 17 aa, Artificial Sequence
  Description of Artificial Sequence: Synthetic peptide
  XENP019304 vhCDR2
FISYDGNNKYYADSVKG

SEQ ID NO: 3823 - protein, 9 aa, Artificial Sequence
  Description of Artificial Sequence: Synthetic peptide
  XENP019304 vhCDR3
TGWLGPFDY

SEQ ID NO: 3824 - protein, 215 aa, Artificial Sequence; identical to SEQ ID NO: 2924
  Description of Artificial Sequence: Synthetic polypeptide
  XENP019304 [CTLA-4]_H0.90_L0_Fab Light Chain

SEQ ID NO: 3825 - protein, 108 aa, Artificial Sequence; identical to SEQ ID NO: 23
  Description of Artificial Sequence: Synthetic polypeptide
  VL of XENP019304

SEQ ID NO: 3826 - protein, 12 aa, Artificial Sequence
  Description of Artificial Sequence: Synthetic peptide
  XENP019304 vlCDR1
RASQSVGSSYLA

SEQ ID NO: 3827 - protein, 7 aa, Artificial Sequence
  Description of Artificial Sequence: Synthetic peptide
  XENP019304 vlCDR2
GAFSRAT

SEQ ID NO: 3828 - protein, 9 aa, Artificial Sequence
  Description of Artificial Sequence: Synthetic peptide
  XENP019304 vlCDR3
QQYGSSPWT

SEQ ID NO: 3829 - protein, 221 aa, Artificial Sequence
  Description of Artificial Sequence: Synthetic polypeptide
  XENP019305 [CTLA-4]_H0.91_L0_Fab Heavy Chain
QVQLVESGGGVVQPGRSLRLSCAASGFTFSSYTMHWVRQAPGKGLEWVTFISYDGNNKYYADSVKGRFTISRDNSRNTLYLQMNSLRAEDTAIYYCARTGWLGPFDYWGQGTLVTVSSASTKGPSVFPLAPSSKSTSGGTAALGCLVKDYFPEPVTVSWNSGALTSGVHTFPAVLQSSGLYSLSSVVTVPSSSLGTQTYICNVNHKPSNTKVDKKVEPKSC

SEQ ID NO: 3830 - protein, 118 aa, Artificial Sequence; identical to SEQ ID NO: 1003
  Description of Artificial Sequence: Synthetic polypeptide
  VH of XENP019305

SEQ ID NO: 3831 - protein, 5 aa, Artificial Sequence
  Description of Artificial Sequence: Synthetic peptide
  XENP019305 vhCDR1
SYTMH

SEQ ID NO: 3832 - protein, 17 aa, Artificial Sequence
  Description of Artificial Sequence: Synthetic peptide
  XENP019305 vhCDR2
FISYDGNNKYYADSVKG

SEQ ID NO: 3833 - protein, 9 aa, Artificial Sequence
  Description of Artificial Sequence: Synthetic peptide
  XENP019305 vhCDR3
TGWLGPFDY

SEQ ID NO: 3834 - protein, 215 aa, Artificial Sequence; identical to SEQ ID NO: 2924
  Description of Artificial Sequence: Synthetic polypeptide
  XENP019305 [CTLA-4]_H0.91_L0_Fab Light Chain

SEQ ID NO: 3835 - protein, 108 aa, Artificial Sequence; identical to SEQ ID NO: 23
  Description of Artificial Sequence: Synthetic polypeptide
  VL of XENP019305

SEQ ID NO: 3836 - protein, 12 aa, Artificial Sequence
  Description of Artificial Sequence: Synthetic peptide
  XENP019305 vlCDR1
RASQSVGSSYLA

SEQ ID NO: 3837 - protein, 7 aa, Artificial Sequence
  Description of Artificial Sequence: Synthetic peptide
  XENP019305 vlCDR2
GAFSRAT

SEQ ID NO: 3838 - protein, 9 aa, Artificial Sequence
  Description of Artificial Sequence: Synthetic peptide
  XENP019305 vlCDR3
QQYGSSPWT

SEQ ID NO: 3839 - protein, 221 aa, Artificial Sequence
  Description of Artificial Sequence: Synthetic polypeptide
  XENP019306 [CTLA-4]_H0.92_L0_Fab Heavy Chain
QVQLVESGGGVVQPGRSLRLSCAASGFTFSSYTMHWVRQAPGKGLEWVTFISYDGNNKYYADSVKGRFTISRDNSKNSLYLQMNSLRAEDTAIYYCARTGWLGPFDYWGQGTLVTVSSASTKGPSVFPLAPSSKSTSGGTAALGCLVKDYFPEPVTVSWNSGALTSGVHTFPAVLQSSGLYSLSSVVTVPSSSLGTQTYICNVNHKPSNTKVDKKVEPKSC

SEQ ID NO: 3840 - protein, 118 aa, Artificial Sequence; identical to SEQ ID NO: 1012
  Description of Artificial Sequence: Synthetic polypeptide
  VH of XENP019306

SEQ ID NO: 3841 - protein, 5 aa, Artificial Sequence
  Description of Artificial Sequence: Synthetic peptide
  XENP019306 vhCDR1
SYTMH

SEQ ID NO: 3842 - protein, 17 aa, Artificial Sequence
  Description of Artificial Sequence: Synthetic peptide
  XENP019306 vhCDR2
FISYDGNNKYYADSVKG

SEQ ID NO: 3843 - protein, 9 aa, Artificial Sequence
  Description of Artificial Sequence: Synthetic peptide
  XENP019306 vhCDR3
TGWLGPFDY

SEQ ID NO: 3844 - protein, 215 aa, Artificial Sequence; identical to SEQ ID NO: 2924
  Description of Artificial Sequence: Synthetic polypeptide
  XENP019306 [CTLA-4]_H0.92_L0_Fab Light Chain

SEQ ID NO: 3845 - protein, 108 aa, Artificial Sequence; identical to SEQ ID NO: 23
  Description of Artificial Sequence: Synthetic polypeptide
  VL of XENP019306

SEQ ID NO: 3846 - protein, 12 aa, Artificial Sequence
  Description of Artificial Sequence: Synthetic peptide
  XENP019306 vlCDR1
RASQSVGSSYLA

SEQ ID NO: 3847 - protein, 7 aa, Artificial Sequence
  Description of Artificial Sequence: Synthetic peptide
  XENP019306 vlCDR2
GAFSRAT

SEQ ID NO: 3848 - protein, 9 aa, Artificial Sequence
  Description of Artificial Sequence: Synthetic peptide
  XENP019306 vlCDR3
QQYGSSPWT

SEQ ID NO: 3849 - protein, 221 aa, Artificial Sequence
  Description of Artificial Sequence: Synthetic polypeptide
  XENP019307 [CTLA-4]_H0.93_L0_Fab Heavy Chain
QVQLVESGGGVVQPGRSLRLSCAASGFTFSSYTMHWVRQAPGKGLEWVTFISYDGNNKYYADSVKGRFTISRDNSKNQLYLQMNSLRAEDTAIYYCARTGWLGPFDYWGQGTLVTVSSASTKGPSVFPLAPSSKSTSGGTAALGCLVKDYFPEPVTVSWNSGALTSGVHTFPAVLQSSGLYSLSSVVTVPSSSLGTQTYICNVNHKPSNTKVDKKVEPKSC

SEQ ID NO: 3850 - protein, 118 aa, Artificial Sequence; identical to SEQ ID NO: 1021
  Description of Artificial Sequence: Synthetic polypeptide
  VH of XENP019307

SEQ ID NO: 3851 - protein, 5 aa, Artificial Sequence
  Description of Artificial Sequence: Synthetic peptide
  XENP019307 vhCDR1
SYTMH

SEQ ID NO: 3852 - protein, 17 aa, Artificial Sequence
  Description of Artificial Sequence: Synthetic peptide
  XENP019307 vhCDR2
FISYDGNNKYYADSVKG

SEQ ID NO: 3853 - protein, 9 aa, Artificial Sequence
  Description of Artificial Sequence: Synthetic peptide
  XENP019307 vhCDR3
TGWLGPFDY

SEQ ID NO: 3854 - protein, 215 aa, Artificial Sequence; identical to SEQ ID NO: 2924
  Description of Artificial Sequence: Synthetic polypeptide
  XENP019307 [CTLA-4]_H0.93_L0_Fab Light Chain

SEQ ID NO: 3855 - protein, 108 aa, Artificial Sequence; identical to SEQ ID NO: 23
  Description of Artificial Sequence: Synthetic polypeptide
  VL of XENP019307

SEQ ID NO: 3856 - protein, 12 aa, Artificial Sequence
  Description of Artificial Sequence: Synthetic peptide
  XENP019307 vlCDR1
RASQSVGSSYLA

SEQ ID NO: 3857 - protein, 7 aa, Artificial Sequence
  Description of Artificial Sequence: Synthetic peptide
  XENP019307 vlCDR2
GAFSRAT

SEQ ID NO: 3858 - protein, 9 aa, Artificial Sequence
  Description of Artificial Sequence: Synthetic peptide
  XENP019307 vlCDR3
QQYGSSPWT

SEQ ID NO: 3859 - protein, 221 aa, Artificial Sequence
  Description of Artificial Sequence: Synthetic polypeptide
  XENP019308 [CTLA-4]_H0.94_L0_Fab Heavy Chain
QVQLVESGGGVVQPGRSLRLSCAASGFTFSSYTMHWVRQAPGKGLEWVTFISYDGNNKYYADSVKGRFTISRDNSKNTLYLEMNSLRAEDTAIYYCARTGWLGPFDYWGQGTLVTVSSASTKGPSVFPLAPSSKSTSGGTAALGCLVKDYFPEPVTVSWNSGALTSGVHTFPAVLQSSGLYSLSSVVTVPSSSLGTQTYICNVNHKPSNTKVDKKVEPKSC

SEQ ID NO: 3860 - protein, 118 aa, Artificial Sequence; identical to SEQ ID NO: 1030
  Description of Artificial Sequence: Synthetic polypeptide
  VH of XENP019308

SEQ ID NO: 3861 - protein, 5 aa, Artificial Sequence
  Description of Artificial Sequence: Synthetic peptide
  XENP019308 vhCDR1
SYTMH

SEQ ID NO: 3862 - protein, 17 aa, Artificial Sequence
  Description of Artificial Sequence: Synthetic peptide
  XENP019308 vhCDR2
FISYDGNNKYYADSVKG

SEQ ID NO: 3863 - protein, 9 aa, Artificial Sequence
  Description of Artificial Sequence: Synthetic peptide
  XENP019308 vhCDR3
TGWLGPFDY

SEQ ID NO: 3864 - protein, 215 aa, Artificial Sequence; identical to SEQ ID NO: 2924
  Description of Artificial Sequence: Synthetic polypeptide
  XENP019308 [CTLA-4]_H0.94_L0_Fab Light Chain

SEQ ID NO: 3865 - protein, 108 aa, Artificial Sequence; identical to SEQ ID NO: 23
  Description of Artificial Sequence: Synthetic polypeptide
  VL of XENP019308

SEQ ID NO: 3866 - protein, 12 aa, Artificial Sequence
  Description of Artificial Sequence: Synthetic peptide
  XENP019308 vlCDR1
RASQSVGSSYLA

SEQ ID NO: 3867 - protein, 7 aa, Artificial Sequence
  Description of Artificial Sequence: Synthetic peptide
  XENP019308 vlCDR2
GAFSRAT

SEQ ID NO: 3868 - protein, 9 aa, Artificial Sequence
  Description of Artificial Sequence: Synthetic peptide
  XENP019308 vlCDR3
QQYGSSPWT

SEQ ID NO: 3869 - protein, 221 aa, Artificial Sequence
  Description of Artificial Sequence: Synthetic polypeptide
  XENP019309 [CTLA-4]_H0.95_L0_Fab Heavy Chain
QVQLVESGGGVVQPGRSLRLSCAASGFTFSSYTMHWVRQAPGKGLEWVTFISYDGNNKYYADSVKGRFTISRDNSKNTLYLQMDSLRAEDTAIYYCARTGWLGPFDYWGQGTLVTVSSASTKGPSVFPLAPSSKSTSGGTAALGCLVKDYFPEPVTVSWNSGALTSGVHTFPAVLQSSGLYSLSSVVTVPSSSLGTQTYICNVNHKPSNTKVDKKVEPKSC

SEQ ID NO: 3870 - protein, 118 aa, Artificial Sequence; identical to SEQ ID NO: 1039
  Description of Artificial Sequence: Synthetic polypeptide
  VH of XENP019309

SEQ ID NO: 3871 - protein, 5 aa, Artificial Sequence
  Description of Artificial Sequence: Synthetic peptide
  XENP019309 vhCDR1
SYTMH

SEQ ID NO: 3872 - protein, 17 aa, Artificial Sequence
  Description of Artificial Sequence: Synthetic peptide
  XENP019309 vhCDR2
FISYDGNNKYYADSVKG

SEQ ID NO: 3873 - protein, 9 aa, Artificial Sequence
  Description of Artificial Sequence: Synthetic peptide
  XENP019309 vhCDR3
TGWLGPFDY

SEQ ID NO: 3874 - protein, 215 aa, Artificial Sequence; identical to SEQ ID NO: 2924
  Description of Artificial Sequence: Synthetic polypeptide
  XENP019309 [CTLA-4]_H0.95_L0_Fab Light Chain

SEQ ID NO: 3875 - protein, 108 aa, Artificial Sequence; identical to SEQ ID NO: 23
  Description of Artificial Sequence: Synthetic polypeptide
  VL of XENP019309

SEQ ID NO: 3876 - protein, 12 aa, Artificial Sequence
  Description of Artificial Sequence: Synthetic peptide
  XENP019309 vlCDR1
RASQSVGSSYLA

SEQ ID NO: 3877 - protein, 7 aa, Artificial Sequence
  Description of Artificial Sequence: Synthetic peptide
  XENP019309 vlCDR2
GAFSRAT

SEQ ID NO: 3878 - protein, 9 aa, Artificial Sequence
  Description of Artificial Sequence: Synthetic peptide
  XENP019309 vlCDR3
QQYGSSPWT

SEQ ID NO: 3879 - protein, 221 aa, Artificial Sequence
  Description of Artificial Sequence: Synthetic polypeptide
  XENP019310 [CTLA-4]_H0.96_L0_Fab Heavy Chain
QVQLVESGGGVVQPGRSLRLSCAASGFTFSSYTMHWVRQAPGKGLEWVTFISYDGNNKYYADSVKGRFTISRDNSKNTLYLQMNDLRAEDTAIYYCARTGWLGPFDYWGQGTLVTVSSASTKGPSVFPLAPSSKSTSGGTAALGCLVKDYFPEPVTVSWNSGALTSGVHTFPAVLQSSGLYSLSSVVTVPSSSLGTQTYICNVNHKPSNTKVDKKVEPKSC

SEQ ID NO: 3880 - protein, 118 aa, Artificial Sequence; identical to SEQ ID NO: 1048
  Description of Artificial Sequence: Synthetic polypeptide
  VH of XENP019310

SEQ ID NO: 3881 - protein, 5 aa, Artificial Sequence
  Description of Artificial Sequence: Synthetic peptide
  XENP019310 vhCDR1
SYTMH

SEQ ID NO: 3882 - protein, 17 aa, Artificial Sequence
  Description of Artificial Sequence: Synthetic peptide
  XENP019310 vhCDR2
FISYDGNNKYYADSVKG

SEQ ID NO: 3883 - protein, 9 aa, Artificial Sequence
  Description of Artificial Sequence: Synthetic peptide
  XENP019310 vhCDR3
TGWLGPFDY

SEQ ID NO: 3884 - protein, 215 aa, Artificial Sequence; identical to SEQ ID NO: 2924
  Description of Artificial Sequence: Synthetic polypeptide
  XENP019310 [CTLA-4]_H0.96_L0_Fab Light Chain

SEQ ID NO: 3885 - protein, 108 aa, Artificial Sequence; identical to SEQ ID NO: 23
  Description of Artificial Sequence: Synthetic polypeptide
  VL of XENP019310

SEQ ID NO: 3886 - protein, 12 aa, Artificial Sequence
  Description of Artificial Sequence: Synthetic peptide
  XENP019310 vlCDR1
RASQSVGSSYLA

SEQ ID NO: 3887 - protein, 7 aa, Artificial Sequence
  Description of Artificial Sequence: Synthetic peptide
  XENP019310 vlCDR2
GAFSRAT

SEQ ID NO: 3888 - protein, 9 aa, Artificial Sequence
  Description of Artificial Sequence: Synthetic peptide
  XENP019310 vlCDR3
QQYGSSPWT

SEQ ID NO: 3889 - protein, 221 aa, Artificial Sequence
  Description of Artificial Sequence: Synthetic polypeptide
  XENP019311 [CTLA-4]_H0.97_L0_Fab Heavy Chain
QVQLVESGGGVVQPGRSLRLSCAASGFTFSSYTMHWVRQAPGKGLEWVTFISYDGNNKYYADSVKGRFTISRDNSKNTLYLQMNSLRTEDTAIYYCARTGWLGPFDYWGQGTLVTVSSASTKGPSVFPLAPSSKSTSGGTAALGCLVKDYFPEPVTVSWNSGALTSGVHTFPAVLQSSGLYSLSSVVTVPSSSLGTQTYICNVNHKPSNTKVDKKVEPKSC

SEQ ID NO: 3890 - protein, 118 aa, Artificial Sequence; identical to SEQ ID NO: 1057
  Description of Artificial Sequence: Synthetic polypeptide
  VH of XENP019311

SEQ ID NO: 3891 - protein, 5 aa, Artificial Sequence
  Description of Artificial Sequence: Synthetic peptide
  XENP019311 vhCDR1
SYTMH

SEQ ID NO: 3892 - protein, 17 aa, Artificial Sequence
  Description of Artificial Sequence: Synthetic peptide
  XENP019311 vhCDR2
FISYDGNNKYYADSVKG

SEQ ID NO: 3893 - protein, 9 aa, Artificial Sequence
  Description of Artificial Sequence: Synthetic peptide
  XENP019311 vhCDR3
TGWLGPFDY

SEQ ID NO: 3894 - protein, 215 aa, Artificial Sequence; identical to SEQ ID NO: 2924
  Description of Artificial Sequence: Synthetic polypeptide
  XENP019311 [CTLA-4]_H0.97_L0_Fab Light Chain

SEQ ID NO: 3895 - protein, 108 aa, Artificial Sequence; identical to SEQ ID NO: 23
  Description of Artificial Sequence: Synthetic polypeptide
  VL of XENP019311

SEQ ID NO: 3896 - protein, 12 aa, Artificial Sequence
  Description of Artificial Sequence: Synthetic peptide
  XENP019311 vlCDR1
RASQSVGSSYLA

SEQ ID NO: 3897 - protein, 7 aa, Artificial Sequence
  Description of Artificial Sequence: Synthetic peptide
  XENP019311 vlCDR2
GAFSRAT

SEQ ID NO: 3898 - protein, 9 aa, Artificial Sequence
  Description of Artificial Sequence: Synthetic peptide
  XENP019311 vlCDR3
QQYGSSPWT

SEQ ID NO: 3899 - protein, 221 aa, Artificial Sequence
  Description of Artificial Sequence: Synthetic polypeptide
  XENP019312 [CTLA-4]_H0.98_L0_Fab Heavy Chain
QVQLVESGGGVVQPGRSLRLSCAASGFTFSSYTMHWVRQAPGKGLEWVTFISYDGNNKYYADSVKGRFTISRDNSKNTLYLQMNSLRAEDTALYYCARTGWLGPFDYWGQGTLVTVSSASTKGPSVFPLAPSSKSTSGGTAALGCLVKDYFPEPVTVSWNSGALTSGVHTFPAVLQSSGLYSLSSVVTVPSSSLGTQTYICNVNHKPSNTKVDKKVEPKSC

SEQ ID NO: 3900 - protein, 118 aa, Artificial Sequence; identical to SEQ ID NO: 1066
  Description of Artificial Sequence: Synthetic polypeptide
  VH of XENP019312

SEQ ID NO: 3901 - protein, 5 aa, Artificial Sequence
  Description of Artificial Sequence: Synthetic peptide
  XENP019312 vhCDR1
SYTMH

SEQ ID NO: 3902 - protein, 17 aa, Artificial Sequence
  Description of Artificial Sequence: Synthetic peptide
  XENP019312 vhCDR2
FISYDGNNKYYADSVKG

SEQ ID NO: 3903 - protein, 9 aa, Artificial Sequence
  Description of Artificial Sequence: Synthetic peptide
  XENP019312 vhCDR3
TGWLGPFDY

SEQ ID NO: 3904 - protein, 215 aa, Artificial Sequence; identical to SEQ ID NO: 2924
  Description of Artificial Sequence: Synthetic polypeptide
  XENP019312 [CTLA-4]_H0.98_L0_Fab Light Chain

SEQ ID NO: 3905 - protein, 108 aa, Artificial Sequence; identical to SEQ ID NO: 23
  Description of Artificial Sequence: Synthetic polypeptide
  VL of XENP019312

SEQ ID NO: 3906 - protein, 12 aa, Artificial Sequence
  Description of Artificial Sequence: Synthetic peptide
  XENP019312 vlCDR1
RASQSVGSSYLA

SEQ ID NO: 3907 - protein, 7 aa, Artificial Sequence
  Description of Artificial Sequence: Synthetic peptide
  XENP019312 vlCDR2
GAFSRAT

SEQ ID NO: 3908 - protein, 9 aa, Artificial Sequence
  Description of Artificial Sequence: Synthetic peptide
  XENP019312 vlCDR3
QQYGSSPWT

SEQ ID NO: 3909 - protein, 221 aa, Artificial Sequence
  Description of Artificial Sequence: Synthetic polypeptide
  XENP019313 [CTLA-4]_H0.99_L0_Fab Heavy Chain
QVQLVESGGGVVQPGRSLRLSCAASGFTFSSYTMHWVRQAPGKGLEWVTFISYDGNNKYYADSVKGRFTISRDNSKNTLYLQMNSLRAEDTAVYYCARTGWLGPFDYWGQGTLVTVSSASTKGPSVFPLAPSSKSTSGGTAALGCLVKDYFPEPVTVSWNSGALTSGVHTFPAVLQSSGLYSLSSVVTVPSSSLGTQTYICNVNHKPSNTKVDKKVEPKSC

SEQ ID NO: 3910 - protein, 118 aa, Artificial Sequence; identical to SEQ ID NO: 1075
  Description of Artificial Sequence: Synthetic polypeptide
  VH of XENP019313

SEQ ID NO: 3911 - protein, 5 aa, Artificial Sequence
  Description of Artificial Sequence: Synthetic peptide
  XENP019313 vhCDR1
SYTMH

SEQ ID NO: 3912 - protein, 17 aa, Artificial Sequence
  Description of Artificial Sequence: Synthetic peptide
  XENP019313 vhCDR2
FISYDGNNKYYADSVKG

SEQ ID NO: 3913 - protein, 9 aa, Artificial Sequence
  Description of Artificial Sequence: Synthetic peptide
  XENP019313 vhCDR3
TGWLGPFDY

SEQ ID NO: 3914 - protein, 215 aa, Artificial Sequence; identical to SEQ ID NO: 2924
  Description of Artificial Sequence: Synthetic polypeptide
  XENP019313 [CTLA-4]_H0.99_L0_Fab Light Chain

SEQ ID NO: 3915 - protein, 108 aa, Artificial Sequence; identical to SEQ ID NO: 23
  Description of Artificial Sequence: Synthetic polypeptide
  VL of XENP019313

SEQ ID NO: 3916 - protein, 12 aa, Artificial Sequence
  Description of Artificial Sequence: Synthetic peptide
  XENP019313 vlCDR1
RASQSVGSSYLA

SEQ ID NO: 3917 - protein, 7 aa, Artificial Sequence
  Description of Artificial Sequence: Synthetic peptide
  XENP019313 vlCDR2
GAFSRAT

SEQ ID NO: 3918 - protein, 9 aa, Artificial Sequence
  Description of Artificial Sequence: Synthetic peptide
  XENP019313 vlCDR3
QQYGSSPWT

SEQ ID NO: 3919 - protein, 221 aa, Artificial Sequence
  Description of Artificial Sequence: Synthetic polypeptide
  XENP019314 [CTLA-4]_H0.100_L0_Fab Heavy Chain
QVQLVESGGGVVQPGRSLRLSCAASGFTFSSYTMHWVRQAPGKGLEWVTFISYDGNNKYYADSVKGRFTISRDNSKNTLYLQMNSLRAEDTAIYYCTRTGWLGPFDYWGQGTLVTVSSASTKGPSVFPLAPSSKSTSGGTAALGCLVKDYFPEPVTVSWNSGALTSGVHTFPAVLQSSGLYSLSSVVTVPSSSLGTQTYICNVNHKPSNTKVDKKVEPKSC

SEQ ID NO: 3920 - protein, 118 aa, Artificial Sequence; identical to SEQ ID NO: 1084
  Description of Artificial Sequence: Synthetic polypeptide
  VH of XENP019314

SEQ ID NO: 3921 - protein, 5 aa, Artificial Sequence
  Description of Artificial Sequence: Synthetic peptide
  XENP019314 vhCDR1
SYTMH

SEQ ID NO: 3922 - protein, 17 aa, Artificial Sequence
  Description of Artificial Sequence: Synthetic peptide
  XENP019314 vhCDR2
FISYDGNNKYYADSVKG

SEQ ID NO: 3923 - protein, 9 aa, Artificial Sequence
  Description of Artificial Sequence: Synthetic peptide
  XENP019314 vhCDR3
TGWLGPFDY

SEQ ID NO: 3924 - protein, 215 aa, Artificial Sequence; identical to SEQ ID NO: 2924
  Description of Artificial Sequence: Synthetic polypeptide
  XENP019314 [CTLA-4]_H0.100_L0_Fab Light Chain

SEQ ID NO: 3925 - protein, 108 aa, Artificial Sequence; identical to SEQ ID NO: 23
  Description of Artificial Sequence: Synthetic polypeptide
  VL of XENP019314

SEQ ID NO: 3926 - protein, 12 aa, Artificial Sequence
  Description of Artificial Sequence: Synthetic peptide
  XENP019314 vlCDR1
RASQSVGSSYLA

SEQ ID NO: 3927 - protein, 7 aa, Artificial Sequence
  Description of Artificial Sequence: Synthetic peptide
  XENP019314 vlCDR2
GAFSRAT

SEQ ID NO: 3928 - protein, 9 aa, Artificial Sequence
  Description of Artificial Sequence: Synthetic peptide
  XENP019314 vlCDR3
QQYGSSPWT

SEQ ID NO: 3929 - protein, 221 aa, Artificial Sequence
  Description of Artificial Sequence: Synthetic polypeptide
  XENP019315 [CTLA-4]_H0.101_L0_Fab Heavy Chain
QVQLVESGGGVVQPGRSLRLSCAASGFTFSSYTMHWVRQAPGKGLEWVTFISYDGNNKYYADSVKGRFTISRDNSKNTLYLQMNSLRAEDTAIYYCAKTGWLGPFDYWGQGTLVTVSSASTKGPSVFPLAPSSKSTSGGTAALGCLVKDYFPEPVTVSWNSGALTSGVHTFPAVLQSSGLYSLSSVVTVPSSSLGTQTYICNVNHKPSNTKVDKKVEPKSC

SEQ ID NO: 3930 - protein, 118 aa, Artificial Sequence; identical to SEQ ID NO: 1093
  Description of Artificial Sequence: Synthetic polypeptide
  VH of XENP019315

SEQ ID NO: 3931 - protein, 5 aa, Artificial Sequence
  Description of Artificial Sequence: Synthetic peptide
  XENP019315 vhCDR1
SYTMH

SEQ ID NO: 3932 - protein, 17 aa, Artificial Sequence
  Description of Artificial Sequence: Synthetic peptide
  XENP019315 vhCDR2
FISYDGNNKYYADSVKG

SEQ ID NO: 3933 - protein, 9 aa, Artificial Sequence
  Description of Artificial Sequence: Synthetic peptide
  XENP019315 vhCDR3
TGWLGPFDY

SEQ ID NO: 3934 - protein, 215 aa, Artificial Sequence; identical to SEQ ID NO: 2924
  Description of Artificial Sequence: Synthetic polypeptide
  XENP019315 [CTLA-4]_H0.101_L0_Fab Light Chain

SEQ ID NO: 3935 - protein, 108 aa, Artificial Sequence; identical to SEQ ID NO: 23
  Description of Artificial Sequence: Synthetic polypeptide
  VL of XENP019315

SEQ ID NO: 3936 - protein, 12 aa, Artificial Sequence
  Description of Artificial Sequence: Synthetic peptide
  XENP019315 vlCDR1
RASQSVGSSYLA

SEQ ID NO: 3937 - protein, 7 aa, Artificial Sequence
  Description of Artificial Sequence: Synthetic peptide
  XENP019315 vlCDR2
GAFSRAT

SEQ ID NO: 3938 - protein, 9 aa, Artificial Sequence
  Description of Artificial Sequence: Synthetic peptide
  XENP019315 vlCDR3
QQYGSSPWT

SEQ ID NO: 3939 - protein, 221 aa, Artificial Sequence
  Description of Artificial Sequence: Synthetic polypeptide
  XENP019316 [CTLA-4]_H0.102_L0_Fab Heavy Chain
QVQLVESGGGVVQPGRSLRLSCAASGFTFSSYTMHWVRQAPGKGLEWVTFISYDGNNKYYADSVKGRFTISRDNSKNTLYLQMNSLRAEDTAIYYCARAGWLGPFDYWGQGTLVTVSSASTKGPSVFPLAPSSKSTSGGTAALGCLVKDYFPEPVTVSWNSGALTSGVHTFPAVLQSSGLYSLSSVVTVPSSSLGTQTYICNVNHKPSNTKVDKKVEPKSC

SEQ ID NO: 3940 - protein, 118 aa, Artificial Sequence; identical to SEQ ID NO: 1102
  Description of Artificial Sequence: Synthetic polypeptide
  VH of XENP019316

SEQ ID NO: 3941 - protein, 5 aa, Artificial Sequence
  Description of Artificial Sequence: Synthetic peptide
  XENP019316 vhCDR1
SYTMH

SEQ ID NO: 3942 - protein, 17 aa, Artificial Sequence
  Description of Artificial Sequence: Synthetic peptide
  XENP019316 vhCDR2
FISYDGNNKYYADSVKG

SEQ ID NO: 3943 - protein, 9 aa, Artificial Sequence
  Description of Artificial Sequence: Synthetic peptide
  XENP019316 vhCDR3
AGWLGPFDY

SEQ ID NO: 3944 - protein, 215 aa, Artificial Sequence; identical to SEQ ID NO: 2924
  Description of Artificial Sequence: Synthetic polypeptide
  XENP019316 [CTLA-4]_H0.102_L0_Fab Light Chain

SEQ ID NO: 3945 - protein, 108 aa, Artificial Sequence; identical to SEQ ID NO: 23
  Description of Artificial Sequence: Synthetic polypeptide
  VL of XENP019316

SEQ ID NO: 3946 - protein, 12 aa, Artificial Sequence
  Description of Artificial Sequence: Synthetic peptide
  XENP019316 vlCDR1
RASQSVGSSYLA

SEQ ID NO: 3947 - protein, 7 aa, Artificial Sequence
  Description of Artificial Sequence: Synthetic peptide
  XENP019316 vlCDR2
GAFSRAT

SEQ ID NO: 3948 - protein, 9 aa, Artificial Sequence
  Description of Artificial Sequence: Synthetic peptide
  XENP019316 vlCDR3
QQYGSSPWT

SEQ ID NO: 3949 - protein, 221 aa, Artificial Sequence
  Description of Artificial Sequence: Synthetic polypeptide
  XENP019317 [CTLA-4]_H0.103_L0_Fab Heavy Chain
QVQLVESGGGVVQPGRSLRLSCAASGFTFSSYTMHWVRQAPGKGLEWVTFISYDGNNKYYADSVKGRFTISRDNSKNTLYLQMNSLRAEDTAIYYCARGGWLGPFDYWGQGTLVTVSSASTKGPSVFPLAPSSKSTSGGTAALGCLVKDYFPEPVTVSWNSGALTSGVHTFPAVLQSSGLYSLSSVVTVPSSSLGTQTYICNVNHKPSNTKVDKKVEPKSC

SEQ ID NO: 3950 - protein, 118 aa, Artificial Sequence; identical to SEQ ID NO: 1111
  Description of Artificial Sequence: Synthetic polypeptide
  VH of XENP019317

SEQ ID NO: 3951 - protein, 5 aa, Artificial Sequence
  Description of Artificial Sequence: Synthetic peptide
  XENP019317 vhCDR1
SYTMH

SEQ ID NO: 3952 - protein, 17 aa, Artificial Sequence
  Description of Artificial Sequence: Synthetic peptide
  XENP019317 vhCDR2
FISYDGNNKYYADSVKG

SEQ ID NO: 3953 - protein, 9 aa, Artificial Sequence
  Description of Artificial Sequence: Synthetic peptide
  XENP019317 vhCDR3
GGWLGPFDY

SEQ ID NO: 3954 - protein, 215 aa, Artificial Sequence; identical to SEQ ID NO: 2924
  Description of Artificial Sequence: Synthetic polypeptide
  XENP019317 [CTLA-4]_H0.103_L0_Fab Light Chain

SEQ ID NO: 3955 - protein, 108 aa, Artificial Sequence; identical to SEQ ID NO: 23
  Description of Artificial Sequence: Synthetic polypeptide
  VL of XENP019317

SEQ ID NO: 3956 - protein, 12 aa, Artificial Sequence
  Description of Artificial Sequence: Synthetic peptide
  XENP019317 vlCDR1
RASQSVGSSYLA

SEQ ID NO: 3957 - protein, 7 aa, Artificial Sequence
  Description of Artificial Sequence: Synthetic peptide
  XENP019317 vlCDR2
GAFSRAT

SEQ ID NO: 3958 - protein, 9 aa, Artificial Sequence
  Description of Artificial Sequence: Synthetic peptide
  XENP019317 vlCDR3
QQYGSSPWT

SEQ ID NO: 3959 - protein, 221 aa, Artificial Sequence
  Description of Artificial Sequence: Synthetic polypeptide
  XENP019318 [CTLA-4]_H0.104_L0_Fab Heavy Chain
QVQLVESGGGVVQPGRSLRLSCAASGFTFSSYTMHWVRQAPGKGLEWVTFISYDGNNKYYADSVKGRFTISRDNSKNTLYLQMNSLRAEDTAIYYCARDGWLGPFDYWGQGTLVTVSSASTKGPSVFPLAPSSKSTSGGTAALGCLVKDYFPEPVTVSWNSGALTSGVHTFPAVLQSSGLYSLSSVVTVPSSSLGTQTYICNVNHKPSNTKVDKKVEPKSC

SEQ ID NO: 3960 - protein, 118 aa, Artificial Sequence; identical to SEQ ID NO: 1120
  Description of Artificial Sequence: Synthetic polypeptide
  VH of XENP019318

SEQ ID NO: 3961 - protein, 5 aa, Artificial Sequence
  Description of Artificial Sequence: Synthetic peptide
  XENP019318 vhCDR1
SYTMH

SEQ ID NO: 3962 - protein, 17 aa, Artificial Sequence
  Description of Artificial Sequence: Synthetic peptide
  XENP019318 vhCDR2
FISYDGNNKYYADSVKG

SEQ ID NO: 3963 - protein, 9 aa, Artificial Sequence
  Description of Artificial Sequence: Synthetic peptide
  XENP019318 vhCDR3
DGWLGPFDY

SEQ ID NO: 3964 - protein, 215 aa, Artificial Sequence; identical to SEQ ID NO: 2924
  Description of Artificial Sequence: Synthetic polypeptide
  XENP019318 [CTLA-4]_H0.104_L0_Fab Light Chain

SEQ ID NO: 3965 - protein, 108 aa, Artificial Sequence; identical to SEQ ID NO: 23
  Description of Artificial Sequence: Synthetic polypeptide
  VL of XENP019318

SEQ ID NO: 3966 - protein, 12 aa, Artificial Sequence
  Description of Artificial Sequence: Synthetic peptide
  XENP019318 vlCDR1
RASQSVGSSYLA

SEQ ID NO: 3967 - protein, 7 aa, Artificial Sequence
  Description of Artificial Sequence: Synthetic peptide
  XENP019318 vlCDR2
GAFSRAT

SEQ ID NO: 3968 - protein, 9 aa, Artificial Sequence
  Description of Artificial Sequence: Synthetic peptide
  XENP019318 vlCDR3
QQYGSSPWT

SEQ ID NO: 3969 - protein, 221 aa, Artificial Sequence
  Description of Artificial Sequence: Synthetic polypeptide
  XENP019319 [CTLA-4]_H0.105_L0_Fab Heavy Chain
QVQLVESGGGVVQPGRSLRLSCAASGFTFSSYTMHWVRQAPGKGLEWVTFISYDGNNKYYADSVKGRFTISRDNSKNTLYLQMNSLRAEDTAIYYCARSGWLGPFDYWGQGTLVTVSSASTKGPSVFPLAPSSKSTSGGTAALGCLVKDYFPEPVTVSWNSGALTSGVHTFPAVLQSSGLYSLSSVVTVPSSSLGTQTYICNVNHKPSNTKVDKKVEPKSC

SEQ ID NO: 3970 - protein, 118 aa, Artificial Sequence; identical to SEQ ID NO: 1129
  Description of Artificial Sequence: Synthetic polypeptide
  VH of XENP019319

SEQ ID NO: 3971 - protein, 5 aa, Artificial Sequence
  Description of Artificial Sequence: Synthetic peptide
  XENP019319 vhCDR1
SYTMH

SEQ ID NO: 3972 - protein, 17 aa, Artificial Sequence
  Description of Artificial Sequence: Synthetic peptide
  XENP019319 vhCDR2
FISYDGNNKYYADSVKG

SEQ ID NO: 3973 - protein, 9 aa, Artificial Sequence
  Description of Artificial Sequence: Synthetic peptide
  XENP019319 vhCDR3
SGWLGPFDY

SEQ ID NO: 3974 - protein, 215 aa, Artificial Sequence; identical to SEQ ID NO: 2924
  Description of Artificial Sequence: Synthetic polypeptide
  XENP019319 [CTLA-4]_H0.105_L0_Fab Light Chain

SEQ ID NO: 3975 - protein, 108 aa, Artificial Sequence; identical to SEQ ID NO: 23
  Description of Artificial Sequence: Synthetic polypeptide
  VL of XENP019319

SEQ ID NO: 3976 - protein, 12 aa, Artificial Sequence
  Description of Artificial Sequence: Synthetic peptide
  XENP019319 vlCDR1
RASQSVGSSYLA

SEQ ID NO: 3977 - protein, 7 aa, Artificial Sequence
  Description of Artificial Sequence: Synthetic peptide
  XENP019319 vlCDR2
GAFSRAT

SEQ ID NO: 3978 - protein, 9 aa, Artificial Sequence
  Description of Artificial Sequence: Synthetic peptide
  XENP019319 vlCDR3
QQYGSSPWT

SEQ ID NO: 3979 - protein, 221 aa, Artificial Sequence
  Description of Artificial Sequence: Synthetic polypeptide
  XENP019320 [CTLA-4]_H0.106_L0_Fab Heavy Chain
QVQLVESGGGVVQPGRSLRLSCAASGFTFSSYTMHWVRQAPGKGLEWVTFISYDGNNKYYADSVKGRFTISRDNSKNTLYLQMNSLRAEDTAIYYCARVGWLGPFDYWGQGTLVTVSSASTKGPSVFPLAPSSKSTSGGTAALGCLVKDYFPEPVTVSWNSGALTSGVHTFPAVLQSSGLYSLSSVVTVPSSSLGTQTYICNVNHKPSNTKVDKKVEPKSC

SEQ ID NO: 3980 - protein, 118 aa, Artificial Sequence; identical to SEQ ID NO: 1138
  Description of Artificial Sequence: Synthetic polypeptide
  VH of XENP019320

SEQ ID NO: 3981 - protein, 5 aa, Artificial Sequence
  Description of Artificial Sequence: Synthetic peptide
  XENP019320 vhCDR1
SYTMH

SEQ ID NO: 3982 - protein, 17 aa, Artificial Sequence
  Description of Artificial Sequence: Synthetic peptide
  XENP019320 vhCDR2
FISYDGNNKYYADSVKG

SEQ ID NO: 3983 - protein, 9 aa, Artificial Sequence
  Description of Artificial Sequence: Synthetic peptide
  XENP019320 vhCDR3
VGWLGPFDY

SEQ ID NO: 3984 - protein, 215 aa, Artificial Sequence; identical to SEQ ID NO: 2924
  Description of Artificial Sequence: Synthetic polypeptide
  XENP019320 [CTLA-4]_H0.106_L0_Fab Light Chain

SEQ ID NO: 3985 - protein, 108 aa, Artificial Sequence; identical to SEQ ID NO: 23
  Description of Artificial Sequence: Synthetic polypeptide
  VL of XENP019320

SEQ ID NO: 3986 - protein, 12 aa, Artificial Sequence
  Description of Artificial Sequence: Synthetic peptide
  XENP019320 vlCDR1
RASQSVGSSYLA

SEQ ID NO: 3987 - protein, 7 aa, Artificial Sequence
  Description of Artificial Sequence: Synthetic peptide
  XENP019320 vlCDR2
GAFSRAT

SEQ ID NO: 3988 - protein, 9 aa, Artificial Sequence
  Description of Artificial Sequence: Synthetic peptide
  XENP019320 vlCDR3
QQYGSSPWT

SEQ ID NO: 3989 - protein, 221 aa, Artificial Sequence
  Description of Artificial Sequence: Synthetic polypeptide
  XENP019321 [CTLA-4]_H0.107_L0_Fab Heavy Chain
QVQLVESGGGVVQPGRSLRLSCAASGFTFSSYTMHWVRQAPGKGLEWVTFISYDGNNKYYADSVKGRFTISRDNSKNTLYLQMNSLRAEDTAIYYCARYGWLGPFDYWGQGTLVTVSSASTKGPSVFPLAPSSKSTSGGTAALGCLVKDYFPEPVTVSWNSGALTSGVHTFPAVLQSSGLYSLSSVVTVPSSSLGTQTYICNVNHKPSNTKVDKKVEPKSC

SEQ ID NO: 3990 - protein, 118 aa, Artificial Sequence; identical to SEQ ID NO: 1147
  Description of Artificial Sequence: Synthetic polypeptide
  VH of XENP019321

SEQ ID NO: 3991 - protein, 5 aa, Artificial Sequence
  Description of Artificial Sequence: Synthetic peptide
  XENP019321 vhCDR1
SYTMH

SEQ ID NO: 3992 - protein, 17 aa, Artificial Sequence
  Description of Artificial Sequence: Synthetic peptide
  XENP019321 vhCDR2
FISYDGNNKYYADSVKG

SEQ ID NO: 3993 - protein, 9 aa, Artificial Sequence
  Description of Artificial Sequence: Synthetic peptide
  XENP019321 vhCDR3
YGWLGPFDY

SEQ ID NO: 3994 - protein, 215 aa, Artificial Sequence; identical to SEQ ID NO: 2924
  Description of Artificial Sequence: Synthetic polypeptide
  XENP019321 [CTLA-4]_H0.107_L0_Fab Light Chain

SEQ ID NO: 3995 - protein, 108 aa, Artificial Sequence; identical to SEQ ID NO: 23
  Description of Artificial Sequence: Synthetic polypeptide
  VL of XENP019321

SEQ ID NO: 3996 - protein, 12 aa, Artificial Sequence
  Description of Artificial Sequence: Synthetic peptide
  XENP019321 vlCDR1
RASQSVGSSYLA

SEQ ID NO: 3997 - protein, 7 aa, Artificial Sequence
  Description of Artificial Sequence: Synthetic peptide
  XENP019321 vlCDR2
GAFSRAT

SEQ ID NO: 3998 - protein, 9 aa, Artificial Sequence
  Description of Artificial Sequence: Synthetic peptide
  XENP019321 vlCDR3
QQYGSSPWT

SEQ ID NO: 3999 - protein, 221 aa, Artificial Sequence
  Description of Artificial Sequence: Synthetic polypeptide
  XENP019322 [CTLA-4]_H0.108_L0_Fab Heavy Chain
QVQLVESGGGVVQPGRSLRLSCAASGFTFSSYTMHWVRQAPGKGLEWVTFISYDGNNKYYADSVKGRFTISRDNSKNTLYLQMNSLRAEDTAIYYCARTAWLGPFDYWGQGTLVTVSSASTKGPSVFPLAPSSKSTSGGTAALGCLVKDYFPEPVTVSWNSGALTSGVHTFPAVLQSSGLYSLSSVVTVPSSSLGTQTYICNVNHKPSNTKVDKKVEPKSC

SEQ ID NO: 4000 - protein, 118 aa, Artificial Sequence; identical to SEQ ID NO: 1156
  Description of Artificial Sequence: Synthetic polypeptide
  VH of XENP019322

SEQ ID NO: 4001 - protein, 5 aa, Artificial Sequence
  Description of Artificial Sequence: Synthetic peptide
  XENP019322 vhCDR1
SYTMH

SEQ ID NO: 4002 - protein, 17 aa, Artificial Sequence
  Description of Artificial Sequence: Synthetic peptide
  XENP019322 vhCDR2
FISYDGNNKYYADSVKG

SEQ ID NO: 4003 - protein, 9 aa, Artificial Sequence
  Description of Artificial Sequence: Synthetic peptide
  XENP019322 vhCDR3
TAWLGPFDY

SEQ ID NO: 4004 - protein, 215 aa, Artificial Sequence; identical to SEQ ID NO: 2924
  Description of Artificial Sequence: Synthetic polypeptide
  XENP019322 [CTLA-4]_H0.108_L0_Fab Light Chain

SEQ ID NO: 4005 - protein, 108 aa, Artificial Sequence; identical to SEQ ID NO: 23
  Description of Artificial Sequence: Synthetic polypeptide
  VL of XENP019322

SEQ ID NO: 4006 - protein, 12 aa, Artificial Sequence
  Description of Artificial Sequence: Synthetic peptide
  XENP019322 vlCDR1
RASQSVGSSYLA

SEQ ID NO: 4007 - protein, 7 aa, Artificial Sequence
  Description of Artificial Sequence: Synthetic peptide
  XENP019322 vlCDR2
GAFSRAT

SEQ ID NO: 4008 - protein, 9 aa, Artificial Sequence
  Description of Artificial Sequence: Synthetic peptide
  XENP019322 vlCDR3
QQYGSSPWT

SEQ ID NO: 4009 - protein, 221 aa, Artificial Sequence
  Description of Artificial Sequence: Synthetic polypeptide
  XENP019323 [CTLA-4]_H0.109_L0_Fab Heavy Chain
QVQLVESGGGVVQPGRSLRLSCAASGFTFSSYTMHWVRQAPGKGLEWVTFISYDGNNKYYADSVKGRFTISRDNSKNTLYLQMNSLRAEDTAIYYCARTSWLGPFDYWGQGTLVTVSSASTKGPSVFPLAPSSKSTSGGTAALGCLVKDYFPEPVTVSWNSGALTSGVHTFPAVLQSSGLYSLSSVVTVPSSSLGTQTYICNVNHKPSNTKVDKKVEPKSC

SEQ ID NO: 4010 - protein, 118 aa, Artificial Sequence; identical to SEQ ID NO: 1165
  Description of Artificial Sequence: Synthetic polypeptide
  VH of XENP019323

SEQ ID NO: 4011 - protein, 5 aa, Artificial Sequence
  Description of Artificial Sequence: Synthetic peptide
  XENP019323 vhCDR1
SYTMH

SEQ ID NO: 4012 - protein, 17 aa, Artificial Sequence
  Description of Artificial Sequence: Synthetic peptide
  XENP019323 vhCDR2
FISYDGNNKYYADSVKG

SEQ ID NO: 4013 - protein, 9 aa, Artificial Sequence
  Description of Artificial Sequence: Synthetic peptide
  XENP019323 vhCDR3
TSWLGPFDY

SEQ ID NO: 4014 - protein, 215 aa, Artificial Sequence; identical to SEQ ID NO: 2924
  Description of Artificial Sequence: Synthetic polypeptide
  XENP019323 [CTLA-4]_H0.109_L0_Fab Light Chain

SEQ ID NO: 4015 - protein, 108 aa, Artificial Sequence; identical to SEQ ID NO: 23
  Description of Artificial Sequence: Synthetic polypeptide
  VL of XENP019323

SEQ ID NO: 4016 - protein, 12 aa, Artificial Sequence
  Description of Artificial Sequence: Synthetic peptide
  XENP019323 vlCDR1
RASQSVGSSYLA

SEQ ID NO: 4017 - protein, 7 aa, Artificial Sequence
  Description of Artificial Sequence: Synthetic peptide
  XENP019323 vlCDR2
GAFSRAT

SEQ ID NO: 4018 - protein, 9 aa, Artificial Sequence
  Description of Artificial Sequence: Synthetic peptide
  XENP019323 vlCDR3
QQYGSSPWT

SEQ ID NO: 4019 - protein, 221 aa, Artificial Sequence
  Description of Artificial Sequence: Synthetic polypeptide
  XENP019324 [CTLA-4]_H0.110_L0_Fab Heavy Chain
QVQLVESGGGVVQPGRSLRLSCAASGFTFSSYTMHWVRQAPGKGLEWVTFISYDGNNKYYADSVKGRFTISRDNSKNTLYLQMNSLRAEDTAIYYCARTTWLGPFDYWGQGTLVTVSSASTKGPSVFPLAPSSKSTSGGTAALGCLVKDYFPEPVTVSWNSGALTSGVHTFPAVLQSSGLYSLSSVVTVPSSSLGTQTYICNVNHKPSNTKVDKKVEPKSC

SEQ ID NO: 4020 - protein, 118 aa, Artificial Sequence; identical to SEQ ID NO: 1174
  Description of Artificial Sequence: Synthetic polypeptide
  VH of XENP019324

SEQ ID NO: 4021 - protein, 5 aa, Artificial Sequence
  Description of Artificial Sequence: Synthetic peptide
  XENP019324 vhCDR1
SYTMH

SEQ ID NO: 4022 - protein, 17 aa, Artificial Sequence
  Description of Artificial Sequence: Synthetic peptide
  XENP019324 vhCDR2
FISYDGNNKYYADSVKG

SEQ ID NO: 4023 - protein, 9 aa, Artificial Sequence
  Description of Artificial Sequence: Synthetic peptide
  XENP019324 vhCDR3
TTWLGPFDY

SEQ ID NO: 4024 - protein, 215 aa, Artificial Sequence; identical to SEQ ID NO: 2924
  Description of Artificial Sequence: Synthetic polypeptide
  XENP019324 [CTLA-4]_H0.110_L0_Fab Light Chain

SEQ ID NO: 4025 - protein, 108 aa, Artificial Sequence; identical to SEQ ID NO: 23
  Description of Artificial Sequence: Synthetic polypeptide
  VL of XENP019324

SEQ ID NO: 4026 - protein, 12 aa, Artificial Sequence
  Description of Artificial Sequence: Synthetic peptide
  XENP019324 vlCDR1
RASQSVGSSYLA

SEQ ID NO: 4027 - protein, 7 aa, Artificial Sequence
  Description of Artificial Sequence: Synthetic peptide
  XENP019324 vlCDR2
GAFSRAT

SEQ ID NO: 4028 - protein, 9 aa, Artificial Sequence
  Description of Artificial Sequence: Synthetic peptide
  XENP019324 vlCDR3
QQYGSSPWT

SEQ ID NO: 4029 - protein, 221 aa, Artificial Sequence
  Description of Artificial Sequence: Synthetic polypeptide
  XENP019325 [CTLA-4]_H0.111_L0_Fab Heavy Chain
QVQLVESGGGVVQPGRSLRLSCAASGFTFSSYTMHWVRQAPGKGLEWVTFISYDGNNKYYADSVKGRFTISRDNSKNTLYLQMNSLRAEDTAIYYCARTGFLGPFDYWGQGTLVTVSSASTKGPSVFPLAPSSKSTSGGTAALGCLVKDYFPEPVTVSWNSGALTSGVHTFPAVLQSSGLYSLSSVVTVPSSSLGTQTYICNVNHKPSNTKVDKKVEPKSC

SEQ ID NO: 4030 - protein, 118 aa, Artificial Sequence; identical to SEQ ID NO: 1183
  Description of Artificial Sequence: Synthetic polypeptide
  VH of XENP019325

SEQ ID NO: 4031 - protein, 5 aa, Artificial Sequence
  Description of Artificial Sequence: Synthetic peptide
  XENP019325 vhCDR1
SYTMH

SEQ ID NO: 4032 - protein, 17 aa, Artificial Sequence
  Description of Artificial Sequence: Synthetic peptide
  XENP019325 vhCDR2
FISYDGNNKYYADSVKG

SEQ ID NO: 4033 - protein, 9 aa, Artificial Sequence
  Description of Artificial Sequence: Synthetic peptide
  XENP019325 vhCDR3
TGFLGPFDY

SEQ ID NO: 4034 - protein, 215 aa, Artificial Sequence; identical to SEQ ID NO: 2924
  Description of Artificial Sequence: Synthetic polypeptide
  XENP019325 [CTLA-4]_H0.111_L0_Fab Light Chain

SEQ ID NO: 4035 - protein, 108 aa, Artificial Sequence; identical to SEQ ID NO: 23
  Description of Artificial Sequence: Synthetic polypeptide
  VL of XENP019325

SEQ ID NO: 4036 - protein, 12 aa, Artificial Sequence
  Description of Artificial Sequence: Synthetic peptide
  XENP019325 vlCDR1
RASQSVGSSYLA

SEQ ID NO: 4037 - protein, 7 aa, Artificial Sequence
  Description of Artificial Sequence: Synthetic peptide
  XENP019325 vlCDR2
GAFSRAT

SEQ ID NO: 4038 - protein, 9 aa, Artificial Sequence
  Description of Artificial Sequence: Synthetic peptide
  XENP019325 vlCDR3
QQYGSSPWT

SEQ ID NO: 4039 - protein, 221 aa, Artificial Sequence
  Description of Artificial Sequence: Synthetic polypeptide
  XENP019326 [CTLA-4]_H0.112_L0_Fab Heavy Chain
QVQLVESGGGVVQPGRSLRLSCAASGFTFSSYTMHWVRQAPGKGLEWVTFISYDGNNKYYADSVKGRFTISRDNSKNTLYLQMNSLRAEDTAIYYCARTGGLGPFDYWGQGTLVTVSSASTKGPSVFPLAPSSKSTSGGTAALGCLVKDYFPEPVTVSWNSGALTSGVHTFPAVLQSSGLYSLSSVVTVPSSSLGTQTYICNVNHKPSNTKVDKKVEPKSC

SEQ ID NO: 4040 - protein, 118 aa, Artificial Sequence; identical to SEQ ID NO: 1192
  Description of Artificial Sequence: Synthetic polypeptide
  VH of XENP019326

SEQ ID NO: 4041 - protein, 5 aa, Artificial Sequence
  Description of Artificial Sequence: Synthetic peptide
  XENP019326 vhCDR1
SYTMH

SEQ ID NO: 4042 - protein, 17 aa, Artificial Sequence
  Description of Artificial Sequence: Synthetic peptide
  XENP019326 vhCDR2
FISYDGNNKYYADSVKG

SEQ ID NO: 4043 - protein, 9 aa, Artificial Sequence
  Description of Artificial Sequence: Synthetic peptide
  XENP019326 vhCDR3
TGGLGPFDY

SEQ ID NO: 4044 - protein, 215 aa, Artificial Sequence; identical to SEQ ID NO: 2924
  Description of Artificial Sequence: Synthetic polypeptide
  XENP019326 [CTLA-4]_H0.112_L0_Fab Light Chain

SEQ ID NO: 4045 - protein, 108 aa, Artificial Sequence; identical to SEQ ID NO: 23
  Description of Artificial Sequence: Synthetic polypeptide
  VL of XENP019326

SEQ ID NO: 4046 - protein, 12 aa, Artificial Sequence
  Description of Artificial Sequence: Synthetic peptide
  XENP019326 vlCDR1
RASQSVGSSYLA

SEQ ID NO: 4047 - protein, 7 aa, Artificial Sequence
  Description of Artificial Sequence: Synthetic peptide
  XENP019326 vlCDR2
GAFSRAT

SEQ ID NO: 4048 - protein, 9 aa, Artificial Sequence
  Description of Artificial Sequence: Synthetic peptide
  XENP019326 vlCDR3
QQYGSSPWT

SEQ ID NO: 4049 - protein, 221 aa, Artificial Sequence
  Description of Artificial Sequence: Synthetic polypeptide
  XENP019327 [CTLA-4]_H0.113_L0_Fab Heavy Chain
QVQLVESGGGVVQPGRSLRLSCAASGFTFSSYTMHWVRQAPGKGLEWVTFISYDGNNKYYADSVKGRFTISRDNSKNTLYLQMNSLRAEDTAIYYCARTGHLGPFDYWGQGTLVTVSSASTKGPSVFPLAPSSKSTSGGTAALGCLVKDYFPEPVTVSWNSGALTSGVHTFPAVLQSSGLYSLSSVVTVPSSSLGTQTYICNVNHKPSNTKVDKKVEPKSC

SEQ ID NO: 4050 - protein, 118 aa, Artificial Sequence; identical to SEQ ID NO: 1201
  Description of Artificial Sequence: Synthetic polypeptide
  VH of XENP019327

SEQ ID NO: 4051 - protein, 5 aa, Artificial Sequence
  Description of Artificial Sequence: Synthetic peptide
  XENP019327 vhCDR1
SYTMH

SEQ ID NO: 4052 - protein, 17 aa, Artificial Sequence
  Description of Artificial Sequence: Synthetic peptide
  XENP019327 vhCDR2
FISYDGNNKYYADSVKG

SEQ ID NO: 4053 - protein, 9 aa, Artificial Sequence
  Description of Artificial Sequence: Synthetic peptide
  XENP019327 vhCDR3
TGHLGPFDY

SEQ ID NO: 4054 - protein, 215 aa, Artificial Sequence; identical to SEQ ID NO: 2924
  Description of Artificial Sequence: Synthetic polypeptide
  XENP019327 [CTLA-4]_H0.113_L0_Fab Light Chain

SEQ ID NO: 4055 - protein, 108 aa, Artificial Sequence; identical to SEQ ID NO: 23
  Description of Artificial Sequence: Synthetic polypeptide
  VL of XENP019327

SEQ ID NO: 4056 - protein, 12 aa, Artificial Sequence
  Description of Artificial Sequence: Synthetic peptide
  XENP019327 vlCDR1
RASQSVGSSYLA

SEQ ID NO: 4057 - protein, 7 aa, Artificial Sequence
  Description of Artificial Sequence: Synthetic peptide
  XENP019327 vlCDR2
GAFSRAT

SEQ ID NO: 4058 - protein, 9 aa, Artificial Sequence
  Description of Artificial Sequence: Synthetic peptide
  XENP019327 vlCDR3
QQYGSSPWT

SEQ ID NO: 4059 - protein, 221 aa, Artificial Sequence
  Description of Artificial Sequence: Synthetic polypeptide
  XENP019328 [CTLA-4]_H0.114_L0_Fab Heavy Chain
QVQLVESGGGVVQPGRSLRLSCAASGFTFSSYTMHWVRQAPGKGLEWVTFISYDGNNKYYADSVKGRFTISRDNSKNTLYLQMNSLRAEDTAIYYCARTGLLGPFDYWGQGTLVTVSSASTKGPSVFPLAPSSKSTSGGTAALGCLVKDYFPEPVTVSWNSGALTSGVHTFPAVLQSSGLYSLSSVVTVPSSSLGTQTYICNVNHKPSNTKVDKKVEPKSC

SEQ ID NO: 4060 - protein, 118 aa, Artificial Sequence; identical to SEQ ID NO: 1210
  Description of Artificial Sequence: Synthetic polypeptide
  VH of XENP019328

SEQ ID NO: 4061 - protein, 5 aa, Artificial Sequence
  Description of Artificial Sequence: Synthetic peptide
  XENP019328 vhCDR1
SYTMH

SEQ ID NO: 4062 - protein, 17 aa, Artificial Sequence
  Description of Artificial Sequence: Synthetic peptide
  XENP019328 vhCDR2
FISYDGNNKYYADSVKG

SEQ ID NO: 4063 - protein, 9 aa, Artificial Sequence
  Description of Artificial Sequence: Synthetic peptide
  XENP019328 vhCDR3
TGLLGPFDY

SEQ ID NO: 4064 - protein, 215 aa, Artificial Sequence; identical to SEQ ID NO: 2924
  Description of Artificial Sequence: Synthetic polypeptide
  XENP019328 [CTLA-4]_H0.114_L0_Fab Light Chain

SEQ ID NO: 4065 - protein, 108 aa, Artificial Sequence; identical to SEQ ID NO: 23
  Description of Artificial Sequence: Synthetic polypeptide
  VL of XENP019328

SEQ ID NO: 4066 - protein, 12 aa, Artificial Sequence
  Description of Artificial Sequence: Synthetic peptide
  XENP019328 vlCDR1
RASQSVGSSYLA

SEQ ID NO: 4067 - protein, 7 aa, Artificial Sequence
  Description of Artificial Sequence: Synthetic peptide
  XENP019328 vlCDR2
GAFSRAT

SEQ ID NO: 4068 - protein, 9 aa, Artificial Sequence
  Description of Artificial Sequence: Synthetic peptide
  XENP019328 vlCDR3
QQYGSSPWT

SEQ ID NO: 4069 - protein, 221 aa, Artificial Sequence
  Description of Artificial Sequence: Synthetic polypeptide
  XENP019329 [CTLA-4]_H0.115_L0_Fab Heavy Chain
QVQLVESGGGVVQPGRSLRLSCAASGFTFSSYTMHWVRQAPGKGLEWVTFISYDGNNKYYADSVKGRFTISRDNSKNTLYLQMNSLRAEDTAIYYCARTGYLGPFDYWGQGTLVTVSSASTKGPSVFPLAPSSKSTSGGTAALGCLVKDYFPEPVTVSWNSGALTSGVHTFPAVLQSSGLYSLSSVVTVPSSSLGTQTYICNVNHKPSNTKVDKKVEPKSC

SEQ ID NO: 4070 - protein, 118 aa, Artificial Sequence; identical to SEQ ID NO: 1219
  Description of Artificial Sequence: Synthetic polypeptide
  VH of XENP019329

SEQ ID NO: 4071 - protein, 5 aa, Artificial Sequence
  Description of Artificial Sequence: Synthetic peptide
  XENP019329 vhCDR1
SYTMH

SEQ ID NO: 4072 - protein, 17 aa, Artificial Sequence
  Description of Artificial Sequence: Synthetic peptide
  XENP019329 vhCDR2
FISYDGNNKYYADSVKG

SEQ ID NO: 4073 - protein, 9 aa, Artificial Sequence
  Description of Artificial Sequence: Synthetic peptide
  XENP019329 vhCDR3
TGYLGPFDY

SEQ ID NO: 4074 - protein, 215 aa, Artificial Sequence; identical to SEQ ID NO: 2924
  Description of Artificial Sequence: Synthetic polypeptide
  XENP019329 [CTLA-4]_H0.115_L0_Fab Light Chain

SEQ ID NO: 4075 - protein, 108 aa, Artificial Sequence; identical to SEQ ID NO: 23
  Description of Artificial Sequence: Synthetic polypeptide
  VL of XENP019329

SEQ ID NO: 4076 - protein, 12 aa, Artificial Sequence
  Description of Artificial Sequence: Synthetic peptide
  XENP019329 vlCDR1
RASQSVGSSYLA

SEQ ID NO: 4077 - protein, 7 aa, Artificial Sequence
  Description of Artificial Sequence: Synthetic peptide
  XENP019329 vlCDR2
GAFSRAT

SEQ ID NO: 4078 - protein, 9 aa, Artificial Sequence
  Description of Artificial Sequence: Synthetic peptide
  XENP019329 vlCDR3
QQYGSSPWT

SEQ ID NO: 4079 - protein, 221 aa, Artificial Sequence
  Description of Artificial Sequence: Synthetic polypeptide
  XENP019330 [CTLA-4]_H0.116_L0_Fab Heavy Chain
QVQLVESGGGVVQPGRSLRLSCAASGFTFSSYTMHWVRQAPGKGLEWVTFISYDGNNKYYADSVKGRFTISRDNSKNTLYLQMNSLRAEDTAIYYCARTGWDGPFDYWGQGTLVTVSSASTKGPSVFPLAPSSKSTSGGTAALGCLVKDYFPEPVTVSWNSGALTSGVHTFPAVLQSSGLYSLSSVVTVPSSSLGTQTYICNVNHKPSNTKVDKKVEPKSC

SEQ ID NO: 4080 - protein, 118 aa, Artificial Sequence; identical to SEQ ID NO: 1228
  Description of Artificial Sequence: Synthetic polypeptide
  VH of XENP019330

SEQ ID NO: 4081 - protein, 5 aa, Artificial Sequence
  Description of Artificial Sequence: Synthetic peptide
  XENP019330 vhCDR1
SYTMH

SEQ ID NO: 4082 - protein, 17 aa, Artificial Sequence
  Description of Artificial Sequence: Synthetic peptide
  XENP019330 vhCDR2
FISYDGNNKYYADSVKG

SEQ ID NO: 4083 - protein, 9 aa, Artificial Sequence
  Description of Artificial Sequence: Synthetic peptide
  XENP019330 vhCDR3
TGWDGPFDY

SEQ ID NO: 4084 - protein, 215 aa, Artificial Sequence; identical to SEQ ID NO: 2924
  Description of Artificial Sequence: Synthetic polypeptide
  XENP019330 [CTLA-4]_H0.116_L0_Fab Light Chain

SEQ ID NO: 4085 - protein, 108 aa, Artificial Sequence; identical to SEQ ID NO: 23
  Description of Artificial Sequence: Synthetic polypeptide
  VL of XENP019330

SEQ ID NO: 4086 - protein, 12 aa, Artificial Sequence
  Description of Artificial Sequence: Synthetic peptide
  XENP019330 vlCDR1
RASQSVGSSYLA

SEQ ID NO: 4087 - protein, 7 aa, Artificial Sequence
  Description of Artificial Sequence: Synthetic peptide
  XENP019330 vlCDR2
GAFSRAT

SEQ ID NO: 4088 - protein, 9 aa, Artificial Sequence
  Description of Artificial Sequence: Synthetic peptide
  XENP019330 vlCDR3
QQYGSSPWT

SEQ ID NO: 4089 - protein, 221 aa, Artificial Sequence
  Description of Artificial Sequence: Synthetic polypeptide
  XENP019331 [CTLA-4]_H0.117_L0_Fab Heavy Chain
QVQLVESGGGVVQPGRSLRLSCAASGFTFSSYTMHWVRQAPGKGLEWVTFISYDGNNKYYADSVKGRFTISRDNSKNTLYLQMNSLRAEDTAIYYCARTGWIGPFDYWGQGTLVTVSSASTKGPSVFPLAPSSKSTSGGTAALGCLVKDYFPEPVTVSWNSGALTSGVHTFPAVLQSSGLYSLSSVVTVPSSSLGTQTYICNVNHKPSNTKVDKKVEPKSC

SEQ ID NO: 4090 - protein, 118 aa, Artificial Sequence; identical to SEQ ID NO: 1237
  Description of Artificial Sequence: Synthetic polypeptide
  VH of XENP019331

SEQ ID NO: 4091 - protein, 5 aa, Artificial Sequence
  Description of Artificial Sequence: Synthetic peptide
  XENP019331 vhCDR1
SYTMH

SEQ ID NO: 4092 - protein, 17 aa, Artificial Sequence
  Description of Artificial Sequence: Synthetic peptide
  XENP019331 vhCDR2
FISYDGNNKYYADSVKG

SEQ ID NO: 4093 - protein, 9 aa, Artificial Sequence
  Description of Artificial Sequence: Synthetic peptide
  XENP019331 vhCDR3
TGWIGPFDY

SEQ ID NO: 4094 - protein, 215 aa, Artificial Sequence; identical to SEQ ID NO: 2924
  Description of Artificial Sequence: Synthetic polypeptide
  XENP019331 [CTLA-4]_H0.117_L0_Fab Light Chain

SEQ ID NO: 4095 - protein, 108 aa, Artificial Sequence; identical to SEQ ID NO: 23
  Description of Artificial Sequence: Synthetic polypeptide
  VL of XENP019331

SEQ ID NO: 4096 - protein, 12 aa, Artificial Sequence
  Description of Artificial Sequence: Synthetic peptide
  XENP019331 vlCDR1
RASQSVGSSYLA

SEQ ID NO: 4097 - protein, 7 aa, Artificial Sequence
  Description of Artificial Sequence: Synthetic peptide
  XENP019331 vlCDR2
GAFSRAT

SEQ ID NO: 4098 - protein, 9 aa, Artificial Sequence
  Description of Artificial Sequence: Synthetic peptide
  XENP019331 vlCDR3
QQYGSSPWT

SEQ ID NO: 4099 - protein, 221 aa, Artificial Sequence
  Description of Artificial Sequence: Synthetic polypeptide
  XENP019332 [CTLA-4]_H0.118_L0_Fab Heavy Chain
QVQLVESGGGVVQPGRSLRLSCAASGFTFSSYTMHWVRQAPGKGLEWVTFISYDGNNKYYADSVKGRFTISRDNSKNTLYLQMNSLRAEDTAIYYCARTGWVGPFDYWGQGTLVTVSSASTKGPSVFPLAPSSKSTSGGTAALGCLVKDYFPEPVTVSWNSGALTSGVHTFPAVLQSSGLYSLSSVVTVPSSSLGTQTYICNVNHKPSNTKVDKKVEPKSC

SEQ ID NO: 4100 - protein, 118 aa, Artificial Sequence; identical to SEQ ID NO: 1246
  Description of Artificial Sequence: Synthetic polypeptide
  VH of XENP019332

SEQ ID NO: 4101 - protein, 5 aa, Artificial Sequence
  Description of Artificial Sequence: Synthetic peptide
  XENP019332 vhCDR1
SYTMH

SEQ ID NO: 4102 - protein, 17 aa, Artificial Sequence
  Description of Artificial Sequence: Synthetic peptide
  XENP019332 vhCDR2
FISYDGNNKYYADSVKG

SEQ ID NO: 4103 - protein, 9 aa, Artificial Sequence
  Description of Artificial Sequence: Synthetic peptide
  XENP019332 vhCDR3
TGWVGPFDY

SEQ ID NO: 4104 - protein, 215 aa, Artificial Sequence; identical to SEQ ID NO: 2924
  Description of Artificial Sequence: Synthetic polypeptide
  XENP019332 [CTLA-4]_H0.118_L0_Fab Light Chain

SEQ ID NO: 4105 - protein, 108 aa, Artificial Sequence; identical to SEQ ID NO: 23
  Description of Artificial Sequence: Synthetic polypeptide
  VL of XENP019332

SEQ ID NO: 4106 - protein, 12 aa, Artificial Sequence
  Description of Artificial Sequence: Synthetic peptide
  XENP019332 vlCDR1
RASQSVGSSYLA

SEQ ID NO: 4107 - protein, 7 aa, Artificial Sequence
  Description of Artificial Sequence: Synthetic peptide
  XENP019332 vlCDR2
GAFSRAT

SEQ ID NO: 4108 - protein, 9 aa, Artificial Sequence
  Description of Artificial Sequence: Synthetic peptide
  XENP019332 vlCDR3
QQYGSSPWT

SEQ ID NO: 4109 - protein, 221 aa, Artificial Sequence
  Description of Artificial Sequence: Synthetic polypeptide
  XENP019333 [CTLA-4]_H0.119_L0_Fab Heavy Chain
QVQLVESGGGVVQPGRSLRLSCAASGFTFSSYTMHWVRQAPGKGLEWVTFISYDGNNKYYADSVKGRFTISRDNSKNTLYLQMNSLRAEDTAIYYCARTGWLAPFDYWGQGTLVTVSSASTKGPSVFPLAPSSKSTSGGTAALGCLVKDYFPEPVTVSWNSGALTSGVHTFPAVLQSSGLYSLSSVVTVPSSSLGTQTYICNVNHKPSNTKVDKKVEPKSC

SEQ ID NO: 4110 - protein, 118 aa, Artificial Sequence; identical to SEQ ID NO: 1255
  Description of Artificial Sequence: Synthetic polypeptide
  VH of XENP019333

SEQ ID NO: 4111 - protein, 5 aa, Artificial Sequence
  Description of Artificial Sequence: Synthetic peptide
  XENP019333 vhCDR1
SYTMH

SEQ ID NO: 4112 - protein, 17 aa, Artificial Sequence
  Description of Artificial Sequence: Synthetic peptide
  XENP019333 vhCDR2
FISYDGNNKYYADSVKG

SEQ ID NO: 4113 - protein, 9 aa, Artificial Sequence
  Description of Artificial Sequence: Synthetic peptide
  XENP019333 vhCDR3
TGWLAPFDY

SEQ ID NO: 4114 - protein, 215 aa, Artificial Sequence; identical to SEQ ID NO: 2924
  Description of Artificial Sequence: Synthetic polypeptide
  XENP019333 [CTLA-4]_H0.119_L0_Fab Light Chain

SEQ ID NO: 4115 - protein, 108 aa, Artificial Sequence; identical to SEQ ID NO: 23
  Description of Artificial Sequence: Synthetic polypeptide
  VL of XENP019333

SEQ ID NO: 4116 - protein, 12 aa, Artificial Sequence
  Description of Artificial Sequence: Synthetic peptide
  XENP019333 vlCDR1
RASQSVGSSYLA

SEQ ID NO: 4117 - protein, 7 aa, Artificial Sequence
  Description of Artificial Sequence: Synthetic peptide
  XENP019333 vlCDR2
GAFSRAT

SEQ ID NO: 4118 - protein, 9 aa, Artificial Sequence
  Description of Artificial Sequence: Synthetic peptide
  XENP019333 vlCDR3
QQYGSSPWT

SEQ ID NO: 4119 - protein, 221 aa, Artificial Sequence
  Description of Artificial Sequence: Synthetic polypeptide
  XENP019334 [CTLA-4]_H0.120_L0_Fab Heavy Chain
QVQLVESGGGVVQPGRSLRLSCAASGFTFSSYTMHWVRQAPGKGLEWVTFISYDGNNKYYADSVKGRFTISRDNSKNTLYLQMNSLRAEDTAIYYCARTGWLSPFDYWGQGTLVTVSSASTKGPSVFPLAPSSKSTSGGTAALGCLVKDYFPEPVTVSWNSGALTSGVHTFPAVLQSSGLYSLSSVVTVPSSSLGTQTYICNVNHKPSNTKVDKKVEPKSC

SEQ ID NO: 4120 - protein, 118 aa, Artificial Sequence; identical to SEQ ID NO: 1264
  Description of Artificial Sequence: Synthetic polypeptide
  VH of XENP019334

SEQ ID NO: 4121 - protein, 5 aa, Artificial Sequence
  Description of Artificial Sequence: Synthetic peptide
  XENP019334 vhCDR1
SYTMH

SEQ ID NO: 4122 - protein, 17 aa, Artificial Sequence
  Description of Artificial Sequence: Synthetic peptide
  XENP019334 vhCDR2
FISYDGNNKYYADSVKG

SEQ ID NO: 4123 - protein, 9 aa, Artificial Sequence
  Description of Artificial Sequence: Synthetic peptide
  XENP019334 vhCDR3
TGWLSPFDY

SEQ ID NO: 4124 - protein, 215 aa, Artificial Sequence; identical to SEQ ID NO: 2924
  Description of Artificial Sequence: Synthetic polypeptide
  XENP019334 [CTLA-4]_H0.120_L0_Fab Light Chain

SEQ ID NO: 4125 - protein, 108 aa, Artificial Sequence; identical to SEQ ID NO: 23
  Description of Artificial Sequence: Synthetic polypeptide
  VL of XENP019334

SEQ ID NO: 4126 - protein, 12 aa, Artificial Sequence
  Description of Artificial Sequence: Synthetic peptide
  XENP019334 vlCDR1
RASQSVGSSYLA

SEQ ID NO: 4127 - protein, 7 aa, Artificial Sequence
  Description of Artificial Sequence: Synthetic peptide
  XENP019334 vlCDR2
GAFSRAT

SEQ ID NO: 4128 - protein, 9 aa, Artificial Sequence
  Description of Artificial Sequence: Synthetic peptide
  XENP019334 vlCDR3
QQYGSSPWT

SEQ ID NO: 4129 - protein, 221 aa, Artificial Sequence
  Description of Artificial Sequence: Synthetic polypeptide
  XENP019335 [CTLA-4]_H0.121_L0_Fab Heavy Chain
QVQLVESGGGVVQPGRSLRLSCAASGFTFSSYTMHWVRQAPGKGLEWVTFISYDGNNKYYADSVKGRFTISRDNSKNTLYLQMNSLRAEDTAIYYCARTGWLTPFDYWGQGTLVTVSSASTKGPSVFPLAPSSKSTSGGTAALGCLVKDYFPEPVTVSWNSGALTSGVHTFPAVLQSSGLYSLSSVVTVPSSSLGTQTYICNVNHKPSNTKVDKKVEPKSC

SEQ ID NO: 4130 - protein, 118 aa, Artificial Sequence; identical to SEQ ID NO: 1273
  Description of Artificial Sequence: Synthetic polypeptide
  VH of XENP019335

SEQ ID NO: 4131 - protein, 5 aa, Artificial Sequence
  Description of Artificial Sequence: Synthetic peptide
  XENP019335 vhCDR1
SYTMH

SEQ ID NO: 4132 - protein, 17 aa, Artificial Sequence
  Description of Artificial Sequence: Synthetic peptide
  XENP019335 vhCDR2
FISYDGNNKYYADSVKG

SEQ ID NO: 4133 - protein, 9 aa, Artificial Sequence
  Description of Artificial Sequence: Synthetic peptide
  XENP019335 vhCDR3
TGWLTPFDY

SEQ ID NO: 4134 - protein, 215 aa, Artificial Sequence; identical to SEQ ID NO: 2924
  Description of Artificial Sequence: Synthetic polypeptide
  XENP019335 [CTLA-4]_H0.121_L0_Fab Light Chain

SEQ ID NO: 4135 - protein, 108 aa, Artificial Sequence; identical to SEQ ID NO: 23
  Description of Artificial Sequence: Synthetic polypeptide
  VL of XENP019335

SEQ ID NO: 4136 - protein, 12 aa, Artificial Sequence
  Description of Artificial Sequence: Synthetic peptide
  XENP019335 vlCDR1
RASQSVGSSYLA

SEQ ID NO: 4137 - protein, 7 aa, Artificial Sequence
  Description of Artificial Sequence: Synthetic peptide
  XENP019335 vlCDR2
GAFSRAT

SEQ ID NO: 4138 - protein, 9 aa, Artificial Sequence
  Description of Artificial Sequence: Synthetic peptide
  XENP019335 vlCDR3
QQYGSSPWT

SEQ ID NO: 4139 - protein, 221 aa, Artificial Sequence
  Description of Artificial Sequence: Synthetic polypeptide
  XENP019336 [CTLA-4]_H0.122_L0_Fab Heavy Chain
QVQLVESGGGVVQPGRSLRLSCAASGFTFSSYTMHWVRQAPGKGLEWVTFISYDGNNKYYADSVKGRFTISRDNSKNTLYLQMNSLRAEDTAIYYCARTGWLGPLDYWGQGTLVTVSSASTKGPSVFPLAPSSKSTSGGTAALGCLVKDYFPEPVTVSWNSGALTSGVHTFPAVLQSSGLYSLSSVVTVPSSSLGTQTYICNVNHKPSNTKVDKKVEPKSC

SEQ ID NO: 4140 - protein, 118 aa, Artificial Sequence; identical to SEQ ID NO: 1282
  Description of Artificial Sequence: Synthetic polypeptide
  VH of XENP019336

SEQ ID NO: 4141 - protein, 5 aa, Artificial Sequence
  Description of Artificial Sequence: Synthetic peptide
  XENP019336 vhCDR1
SYTMH

SEQ ID NO: 4142 - protein, 17 aa, Artificial Sequence
  Description of Artificial Sequence: Synthetic peptide
  XENP019336 vhCDR2
FISYDGNNKYYADSVKG

SEQ ID NO: 4143 - protein, 9 aa, Artificial Sequence
  Description of Artificial Sequence: Synthetic peptide
  XENP019336 vhCDR3
TGWLGPLDY

SEQ ID NO: 4144 - protein, 215 aa, Artificial Sequence; identical to SEQ ID NO: 2924
  Description of Artificial Sequence: Synthetic polypeptide
  XENP019336 [CTLA-4]_H0.122_L0_Fab Light Chain

SEQ ID NO: 4145 - protein, 108 aa, Artificial Sequence; identical to SEQ ID NO: 23
  Description of Artificial Sequence: Synthetic polypeptide
  VL of XENP019336

SEQ ID NO: 4146 - protein, 12 aa, Artificial Sequence
  Description of Artificial Sequence: Synthetic peptide
  XENP019336 vlCDR1
RASQSVGSSYLA

SEQ ID NO: 4147 - protein, 7 aa, Artificial Sequence
  Description of Artificial Sequence: Synthetic peptide
  XENP019336 vlCDR2
GAFSRAT

SEQ ID NO: 4148 - protein, 9 aa, Artificial Sequence
  Description of Artificial Sequence: Synthetic peptide
  XENP019336 vlCDR3
QQYGSSPWT

SEQ ID NO: 4149 - protein, 221 aa, Artificial Sequence
  Description of Artificial Sequence: Synthetic polypeptide
  XENP019337 [CTLA-4]_H0.123_L0_Fab Heavy Chain
QVQLVESGGGVVQPGRSLRLSCAASGFTFSSYTMHWVRQAPGKGLEWVTFISYDGNNKYYADSVKGRFTISRDNSKNTLYLQMNSLRAEDTAIYYCARTGWLGPMDYWGQGTLVTVSSASTKGPSVFPLAPSSKSTSGGTAALGCLVKDYFPEPVTVSWNSGALTSGVHTFPAVLQSSGLYSLSSVVTVPSSSLGTQTYICNVNHKPSNTKVDKKVEPKSC

SEQ ID NO: 4150 - protein, 118 aa, Artificial Sequence; identical to SEQ ID NO: 1291
  Description of Artificial Sequence: Synthetic polypeptide
  VH of XENP019337

SEQ ID NO: 4151 - protein, 5 aa, Artificial Sequence
  Description of Artificial Sequence: Synthetic peptide
  XENP019337 vhCDR1
SYTMH

SEQ ID NO: 4152 - protein, 17 aa, Artificial Sequence
  Description of Artificial Sequence: Synthetic peptide
  XENP019337 vhCDR2
FISYDGNNKYYADSVKG

SEQ ID NO: 4153 - protein, 9 aa, Artificial Sequence
  Description of Artificial Sequence: Synthetic peptide
  XENP019337 vhCDR3
TGWLGPMDY

SEQ ID NO: 4154 - protein, 215 aa, Artificial Sequence; identical to SEQ ID NO: 2924
  Description of Artificial Sequence: Synthetic polypeptide
  XENP019337 [CTLA-4]_H0.123_L0_Fab Light Chain

SEQ ID NO: 4155 - protein, 108 aa, Artificial Sequence; identical to SEQ ID NO: 23
  Description of Artificial Sequence: Synthetic polypeptide
  VL of XENP019337

SEQ ID NO: 4156 - protein, 12 aa, Artificial Sequence
  Description of Artificial Sequence: Synthetic peptide
  XENP019337 vlCDR1
RASQSVGSSYLA

SEQ ID NO: 4157 - protein, 7 aa, Artificial Sequence
  Description of Artificial Sequence: Synthetic peptide
  XENP019337 vlCDR2
GAFSRAT

SEQ ID NO: 4158 - protein, 9 aa, Artificial Sequence
  Description of Artificial Sequence: Synthetic peptide
  XENP019337 vlCDR3
QQYGSSPWT

SEQ ID NO: 4159 - protein, 221 aa, Artificial Sequence
  Description of Artificial Sequence: Synthetic polypeptide
  XENP019338 [CTLA-4]_H0.124_L0_Fab Heavy Chain
QVQLVESGGGVVQPGRSLRLSCAASGFTFSSYTMHWVRQAPGKGLEWVTFISYDGNNKYYADSVKGRFTISRDNSKNTLYLQMNSLRAEDTAIYYCARTGWLGPFAYWGQGTLVTVSSASTKGPSVFPLAPSSKSTSGGTAALGCLVKDYFPEPVTVSWNSGALTSGVHTFPAVLQSSGLYSLSSVVTVPSSSLGTQTYICNVNHKPSNTKVDKKVEPKSC

SEQ ID NO: 4160 - protein, 118 aa, Artificial Sequence; identical to SEQ ID NO: 1300
  Description of Artificial Sequence: Synthetic polypeptide
  VH of XENP019338

SEQ ID NO: 4161 - protein, 5 aa, Artificial Sequence
  Description of Artificial Sequence: Synthetic peptide
  XENP019338 vhCDR1
SYTMH

SEQ ID NO: 4162 - protein, 17 aa, Artificial Sequence
  Description of Artificial Sequence: Synthetic peptide
  XENP019338 vhCDR2
FISYDGNNKYYADSVKG

SEQ ID NO: 4163 - protein, 9 aa, Artificial Sequence
  Description of Artificial Sequence: Synthetic peptide
  XENP019338 vhCDR3
TGWLGPFAY

SEQ ID NO: 4164 - protein, 215 aa, Artificial Sequence; identical to SEQ ID NO: 2924
  Description of Artificial Sequence: Synthetic polypeptide
  XENP019338 [CTLA-4]_H0.124_L0_Fab Light Chain

SEQ ID NO: 4165 - protein, 108 aa, Artificial Sequence; identical to SEQ ID NO: 23
  Description of Artificial Sequence: Synthetic polypeptide
  VL of XENP019338

SEQ ID NO: 4166 - protein, 12 aa, Artificial Sequence
  Description of Artificial Sequence: Synthetic peptide
  XENP019338 vlCDR1
RASQSVGSSYLA

SEQ ID NO: 4167 - protein, 7 aa, Artificial Sequence
  Description of Artificial Sequence: Synthetic peptide
  XENP019338 vlCDR2
GAFSRAT

SEQ ID NO: 4168 - protein, 9 aa, Artificial Sequence
  Description of Artificial Sequence: Synthetic peptide
  XENP019338 vlCDR3
QQYGSSPWT

SEQ ID NO: 4169 - protein, 221 aa, Artificial Sequence
  Description of Artificial Sequence: Synthetic polypeptide
  XENP019339 [CTLA-4]_H0.125_L0_Fab Heavy Chain
QVQLVESGGGVVQPGRSLRLSCAASGFTFSSYTMHWVRQAPGKGLEWVTFISYDGNNKYYADSVKGRFTISRDNSKNTLYLQMNSLRAEDTAIYYCARTGWLGPFEYWGQGTLVTVSSASTKGPSVFPLAPSSKSTSGGTAALGCLVKDYFPEPVTVSWNSGALTSGVHTFPAVLQSSGLYSLSSVVTVPSSSLGTQTYICNVNHKPSNTKVDKKVEPKSC

SEQ ID NO: 4170 - protein, 118 aa, Artificial Sequence; identical to SEQ ID NO: 1309
  Description of Artificial Sequence: Synthetic polypeptide
  VH of XENP019339

SEQ ID NO: 4171 - protein, 5 aa, Artificial Sequence
  Description of Artificial Sequence: Synthetic peptide
  XENP019339 vhCDR1
SYTMH

SEQ ID NO: 4172 - protein, 17 aa, Artificial Sequence
  Description of Artificial Sequence: Synthetic peptide
  XENP019339 vhCDR2
FISYDGNNKYYADSVKG

SEQ ID NO: 4173 - protein, 9 aa, Artificial Sequence
  Description of Artificial Sequence: Synthetic peptide
  XENP019339 vhCDR3
TGWLGPFEY

SEQ ID NO: 4174 - protein, 215 aa, Artificial Sequence; identical to SEQ ID NO: 2924
  Description of Artificial Sequence: Synthetic polypeptide
  XENP019339 [CTLA-4]_H0.125_L0_Fab Light Chain

SEQ ID NO: 4175 - protein, 108 aa, Artificial Sequence; identical to SEQ ID NO: 23
  Description of Artificial Sequence: Synthetic polypeptide
  VL of XENP019339

SEQ ID NO: 4176 - protein, 12 aa, Artificial Sequence
  Description of Artificial Sequence: Synthetic peptide
  XENP019339 vlCDR1
RASQSVGSSYLA

SEQ ID NO: 4177 - protein, 7 aa, Artificial Sequence
  Description of Artificial Sequence: Synthetic peptide
  XENP019339 vlCDR2
GAFSRAT

SEQ ID NO: 4178 - protein, 9 aa, Artificial Sequence
  Description of Artificial Sequence: Synthetic peptide
  XENP019339 vlCDR3
QQYGSSPWT

SEQ ID NO: 4179 - protein, 221 aa, Artificial Sequence
  Description of Artificial Sequence: Synthetic polypeptide
  XENP019340 [CTLA-4]_H0.126_L0_Fab Heavy Chain
QVQLVESGGGVVQPGRSLRLSCAASGFTFSSYTMHWVRQAPGKGLEWVTFISYDGNNKYYADSVKGRFTISRDNSKNTLYLQMNSLRAEDTAIYYCARTGWLGPFHYWGQGTLVTVSSASTKGPSVFPLAPSSKSTSGGTAALGCLVKDYFPEPVTVSWNSGALTSGVHTFPAVLQSSGLYSLSSVVTVPSSSLGTQTYICNVNHKPSNTKVDKKVEPKSC

SEQ ID NO: 4180 - protein, 118 aa, Artificial Sequence; identical to SEQ ID NO: 1318
  Description of Artificial Sequence: Synthetic polypeptide
  VH of XENP019340

SEQ ID NO: 4181 - protein, 5 aa, Artificial Sequence
  Description of Artificial Sequence: Synthetic peptide
  XENP019340 vhCDR1
SYTMH

SEQ ID NO: 4182 - protein, 17 aa, Artificial Sequence
  Description of Artificial Sequence: Synthetic peptide
  XENP019340 vhCDR2
FISYDGNNKYYADSVKG

SEQ ID NO: 4183 - protein, 9 aa, Artificial Sequence
  Description of Artificial Sequence: Synthetic peptide
  XENP019340 vhCDR3
TGWLGPFHY

SEQ ID NO: 4184 - protein, 215 aa, Artificial Sequence; identical to SEQ ID NO: 2924
  Description of Artificial Sequence: Synthetic polypeptide
  XENP019340 [CTLA-4]_H0.126_L0_Fab Light Chain

SEQ ID NO: 4185 - protein, 108 aa, Artificial Sequence; identical to SEQ ID NO: 23
  Description of Artificial Sequence: Synthetic polypeptide
  VL of XENP019340

SEQ ID NO: 4186 - protein, 12 aa, Artificial Sequence
  Description of Artificial Sequence: Synthetic peptide
  XENP019340 vlCDR1
RASQSVGSSYLA

SEQ ID NO: 4187 - protein, 7 aa, Artificial Sequence
  Description of Artificial Sequence: Synthetic peptide
  XENP019340 vlCDR2
GAFSRAT

SEQ ID NO: 4188 - protein, 9 aa, Artificial Sequence
  Description of Artificial Sequence: Synthetic peptide
  XENP019340 vlCDR3
QQYGSSPWT

SEQ ID NO: 4189 - protein, 221 aa, Artificial Sequence
  Description of Artificial Sequence: Synthetic polypeptide
  XENP019341 [CTLA-4]_H0.127_L0_Fab Heavy Chain
QVQLVESGGGVVQPGRSLRLSCAASGFTFSSYTMHWVRQAPGKGLEWVTFISYDGNNKYYADSVKGRFTISRDNSKNTLYLQMNSLRAEDTAIYYCARTGWLGPFNYWGQGTLVTVSSASTKGPSVFPLAPSSKSTSGGTAALGCLVKDYFPEPVTVSWNSGALTSGVHTFPAVLQSSGLYSLSSVVTVPSSSLGTQTYICNVNHKPSNTKVDKKVEPKSC

SEQ ID NO: 4190 - protein, 118 aa, Artificial Sequence; identical to SEQ ID NO: 1327
  Description of Artificial Sequence: Synthetic polypeptide
  VH of XENP019341

SEQ ID NO: 4191 - protein, 5 aa, Artificial Sequence
  Description of Artificial Sequence: Synthetic peptide
  XENP019341 vhCDR1
SYTMH

SEQ ID NO: 4192 - protein, 17 aa, Artificial Sequence
  Description of Artificial Sequence: Synthetic peptide
  XENP019341 vhCDR2
FISYDGNNKYYADSVKG

SEQ ID NO: 4193 - protein, 9 aa, Artificial Sequence
  Description of Artificial Sequence: Synthetic peptide
  XENP019341 vhCDR3
TGWLGPFNY

SEQ ID NO: 4194 - protein, 215 aa, Artificial Sequence; identical to SEQ ID NO: 2924
  Description of Artificial Sequence: Synthetic polypeptide
  XENP019341 [CTLA-4]_H0.127_L0_Fab Light Chain

SEQ ID NO: 4195 - protein, 108 aa, Artificial Sequence; identical to SEQ ID NO: 23
  Description of Artificial Sequence: Synthetic polypeptide
  VL of XENP019341

SEQ ID NO: 4196 - protein, 12 aa, Artificial Sequence
  Description of Artificial Sequence: Synthetic peptide
  XENP019341 vlCDR1
RASQSVGSSYLA

SEQ ID NO: 4197 - protein, 7 aa, Artificial Sequence
  Description of Artificial Sequence: Synthetic peptide
  XENP019341 vlCDR2
GAFSRAT

SEQ ID NO: 4198 - protein, 9 aa, Artificial Sequence
  Description of Artificial Sequence: Synthetic peptide
  XENP019341 vlCDR3
QQYGSSPWT

SEQ ID NO: 4199 - protein, 221 aa, Artificial Sequence
  Description of Artificial Sequence: Synthetic polypeptide
  XENP019342 [CTLA-4]_H0.128_L0_Fab Heavy Chain
QVQLVESGGGVVQPGRSLRLSCAASGFTFSSYTMHWVRQAPGKGLEWVTFISYDGNNKYYADSVKGRFTISRDNSKNTLYLQMNSLRAEDTAIYYCARTGWLGPFSYWGQGTLVTVSSASTKGPSVFPLAPSSKSTSGGTAALGCLVKDYFPEPVTVSWNSGALTSGVHTFPAVLQSSGLYSLSSVVTVPSSSLGTQTYICNVNHKPSNTKVDKKVEPKSC

SEQ ID NO: 4200 - protein, 118 aa, Artificial Sequence; identical to SEQ ID NO: 1336
  Description of Artificial Sequence: Synthetic polypeptide
  VH of XENP019342

SEQ ID NO: 4201 - protein, 5 aa, Artificial Sequence
  Description of Artificial Sequence: Synthetic peptide
  XENP019342 vhCDR1
SYTMH

SEQ ID NO: 4202 - protein, 17 aa, Artificial Sequence
  Description of Artificial Sequence: Synthetic peptide
  XENP019342 vhCDR2
FISYDGNNKYYADSVKG

SEQ ID NO: 4203 - protein, 9 aa, Artificial Sequence
  Description of Artificial Sequence: Synthetic peptide
  XENP019342 vhCDR3
TGWLGPFSY

SEQ ID NO: 4204 - protein, 215 aa, Artificial Sequence; identical to SEQ ID NO: 2924
  Description of Artificial Sequence: Synthetic polypeptide
  XENP019342 [CTLA-4]_H0.128_L0_Fab Light Chain

SEQ ID NO: 4205 - protein, 108 aa, Artificial Sequence; identical to SEQ ID NO: 23
  Description of Artificial Sequence: Synthetic polypeptide
  VL of XENP019342

SEQ ID NO: 4206 - protein, 12 aa, Artificial Sequence
  Description of Artificial Sequence: Synthetic peptide
  XENP019342 vlCDR1
RASQSVGSSYLA

SEQ ID NO: 4207 - protein, 7 aa, Artificial Sequence
  Description of Artificial Sequence: Synthetic peptide
  XENP019342 vlCDR2
GAFSRAT

SEQ ID NO: 4208 - protein, 9 aa, Artificial Sequence
  Description of Artificial Sequence: Synthetic peptide
  XENP019342 vlCDR3
QQYGSSPWT

SEQ ID NO: 4209 - protein, 221 aa, Artificial Sequence
  Description of Artificial Sequence: Synthetic polypeptide
  XENP019343 [CTLA-4]_H0.129_L0_Fab Heavy Chain
QVQLVESGGGVVQPGRSLRLSCAASGFTFSSYTMHWVRQAPGKGLEWVTFISYDGNNKYYADSVKGRFTISRDNSKNTLYLQMNSLRAEDTAIYYCARTGWLGPFQYWGQGTLVTVSSASTKGPSVFPLAPSSKSTSGGTAALGCLVKDYFPEPVTVSWNSGALTSGVHTFPAVLQSSGLYSLSSVVTVPSSSLGTQTYICNVNHKPSNTKVDKKVEPKSC

SEQ ID NO: 4210 - protein, 118 aa, Artificial Sequence; identical to SEQ ID NO: 1345
  Description of Artificial Sequence: Synthetic polypeptide
  VH of XENP019343

SEQ ID NO: 4211 - protein, 5 aa, Artificial Sequence
  Description of Artificial Sequence: Synthetic peptide
  XENP019343 vhCDR1
SYTMH

SEQ ID NO: 4212 - protein, 17 aa, Artificial Sequence
  Description of Artificial Sequence: Synthetic peptide
  XENP019343 vhCDR2
FISYDGNNKYYADSVKG

SEQ ID NO: 4213 - protein, 9 aa, Artificial Sequence
  Description of Artificial Sequence: Synthetic peptide
  XENP019343 vhCDR3
TGWLGPFQY

SEQ ID NO: 4214 - protein, 215 aa, Artificial Sequence; identical to SEQ ID NO: 2924
  Description of Artificial Sequence: Synthetic polypeptide
  XENP019343 [CTLA-4]_H0.129_L0_Fab Light Chain

SEQ ID NO: 4215 - protein, 108 aa, Artificial Sequence; identical to SEQ ID NO: 23
  Description of Artificial Sequence: Synthetic polypeptide
  VL of XENP019343

SEQ ID NO: 4216 - protein, 12 aa, Artificial Sequence
  Description of Artificial Sequence: Synthetic peptide
  XENP019343 vlCDR1
RASQSVGSSYLA

SEQ ID NO: 4217 - protein, 7 aa, Artificial Sequence
  Description of Artificial Sequence: Synthetic peptide
  XENP019343 vlCDR2
GAFSRAT

SEQ ID NO: 4218 - protein, 9 aa, Artificial Sequence
  Description of Artificial Sequence: Synthetic peptide
  XENP019343 vlCDR3
QQYGSSPWT

SEQ ID NO: 4219 - protein, 221 aa, Artificial Sequence
  Description of Artificial Sequence: Synthetic polypeptide
  XENP019344 [CTLA-4]_H0.130_L0_Fab Heavy Chain
QVQLVESGGGVVQPGRSLRLSCAASGFTFSSYTMHWVRQAPGKGLEWVTFISYDGNNKYYADSVKGRFTISRDNSKNTLYLQMNSLRAEDTAIYYCARTGWLGPFDHWGQGTLVTVSSASTKGPSVFPLAPSSKSTSGGTAALGCLVKDYFPEPVTVSWNSGALTSGVHTFPAVLQSSGLYSLSSVVTVPSSSLGTQTYICNVNHKPSNTKVDKKVEPKSC

SEQ ID NO: 4220 - protein, 118 aa, Artificial Sequence; identical to SEQ ID NO: 1354
  Description of Artificial Sequence: Synthetic polypeptide
  VH of XENP019344

SEQ ID NO: 4221 - protein, 5 aa, Artificial Sequence
  Description of Artificial Sequence: Synthetic peptide
  XENP019344 vhCDR1
SYTMH

SEQ ID NO: 4222 - protein, 17 aa, Artificial Sequence
  Description of Artificial Sequence: Synthetic peptide
  XENP019344 vhCDR2
FISYDGNNKYYADSVKG

SEQ ID NO: 4223 - protein, 9 aa, Artificial Sequence
  Description of Artificial Sequence: Synthetic peptide
  XENP019344 vhCDR3
TGWLGPFDH

SEQ ID NO: 4224 - protein, 215 aa, Artificial Sequence; identical to SEQ ID NO: 2924
  Description of Artificial Sequence: Synthetic polypeptide
  XENP019344 [CTLA-4]_H0.130_L0_Fab Light Chain

SEQ ID NO: 4225 - protein, 108 aa, Artificial Sequence; identical to SEQ ID NO: 23
  Description of Artificial Sequence: Synthetic polypeptide
  VL of XENP019344

SEQ ID NO: 4226 - protein, 12 aa, Artificial Sequence
  Description of Artificial Sequence: Synthetic peptide
  XENP019344 vlCDR1
RASQSVGSSYLA

SEQ ID NO: 4227 - protein, 7 aa, Artificial Sequence
  Description of Artificial Sequence: Synthetic peptide
  XENP019344 vlCDR2
GAFSRAT

SEQ ID NO: 4228 - protein, 9 aa, Artificial Sequence
  Description of Artificial Sequence: Synthetic peptide
  XENP019344 vlCDR3
QQYGSSPWT

SEQ ID NO: 4229 - protein, 221 aa, Artificial Sequence
  Description of Artificial Sequence: Synthetic polypeptide
  XENP019345 [CTLA-4]_H0.131_L0_Fab Heavy Chain
QVQLVESGGGVVQPGRSLRLSCAASGFTFSSYTMHWVRQAPGKGLEWVTFISYDGNNKYYADSVKGRFTISRDNSKNTLYLQMNSLRAEDTAIYYCARTGWLGPFDLWGQGTLVTVSSASTKGPSVFPLAPSSKSTSGGTAALGCLVKDYFPEPVTVSWNSGALTSGVHTFPAVLQSSGLYSLSSVVTVPSSSLGTQTYICNVNHKPSNTKVDKKVEPKSC

SEQ ID NO: 4230 - protein, 118 aa, Artificial Sequence; identical to SEQ ID NO: 1363
  Description of Artificial Sequence: Synthetic polypeptide
  VH of XENP019345

SEQ ID NO: 4231 - protein, 5 aa, Artificial Sequence
  Description of Artificial Sequence: Synthetic peptide
  XENP019345 vhCDR1
SYTMH

SEQ ID NO: 4232 - protein, 17 aa, Artificial Sequence
  Description of Artificial Sequence: Synthetic peptide
  XENP019345 vhCDR2
FISYDGNNKYYADSVKG

SEQ ID NO: 4233 - protein, 9 aa, Artificial Sequence
  Description of Artificial Sequence: Synthetic peptide
  XENP019345 vhCDR3
TGWLGPFDL

SEQ ID NO: 4234 - protein, 215 aa, Artificial Sequence; identical to SEQ ID NO: 2924
  Description of Artificial Sequence: Synthetic polypeptide
  XENP019345 [CTLA-4]_H0.131_L0_Fab Light Chain

SEQ ID NO: 4235 - protein, 108 aa, Artificial Sequence; identical to SEQ ID NO: 23
  Description of Artificial Sequence: Synthetic polypeptide
  VL of XENP019345

SEQ ID NO: 4236 - protein, 12 aa, Artificial Sequence
  Description of Artificial Sequence: Synthetic peptide
  XENP019345 vlCDR1
RASQSVGSSYLA

SEQ ID NO: 4237 - protein, 7 aa, Artificial Sequence
  Description of Artificial Sequence: Synthetic peptide
  XENP019345 vlCDR2
GAFSRAT

SEQ ID NO: 4238 - protein, 9 aa, Artificial Sequence
  Description of Artificial Sequence: Synthetic peptide
  XENP019345 vlCDR3
QQYGSSPWT

SEQ ID NO: 4239 - protein, 221 aa, Artificial Sequence
  Description of Artificial Sequence: Synthetic polypeptide
  XENP019346 [CTLA-4]_H0.132_L0_Fab Heavy Chain
QVQLVESGGGVVQPGRSLRLSCAASGFTFSSYTMHWVRQAPGKGLEWVTFISYDGNNKYYADSVKGRFTISRDNSKNTLYLQMNSLRAEDTAIYYCARTGWLGPFDSWGQGTLVTVSSASTKGPSVFPLAPSSKSTSGGTAALGCLVKDYFPEPVTVSWNSGALTSGVHTFPAVLQSSGLYSLSSVVTVPSSSLGTQTYICNVNHKPSNTKVDKKVEPKSC

SEQ ID NO: 4240 - protein, 118 aa, Artificial Sequence; identical to SEQ ID NO: 1372
  Description of Artificial Sequence: Synthetic polypeptide
  VH of XENP019346

SEQ ID NO: 4241 - protein, 5 aa, Artificial Sequence
  Description of Artificial Sequence: Synthetic peptide
  XENP019346 vhCDR1
SYTMH

SEQ ID NO: 4242 - protein, 17 aa, Artificial Sequence
  Description of Artificial Sequence: Synthetic peptide
  XENP019346 vhCDR2
FISYDGNNKYYADSVKG

SEQ ID NO: 4243 - protein, 9 aa, Artificial Sequence
  Description of Artificial Sequence: Synthetic peptide
  XENP019346 vhCDR3
TGWLGPFDS

SEQ ID NO: 4244 - protein, 215 aa, Artificial Sequence; identical to SEQ ID NO: 2924
  Description of Artificial Sequence: Synthetic polypeptide
  XENP019346 [CTLA-4]_H0.132_L0_Fab Light Chain

SEQ ID NO: 4245 - protein, 108 aa, Artificial Sequence; identical to SEQ ID NO: 23
  Description of Artificial Sequence: Synthetic polypeptide
  VL of XENP019346

SEQ ID NO: 4246 - protein, 12 aa, Artificial Sequence
  Description of Artificial Sequence: Synthetic peptide
  XENP019346 vlCDR1
RASQSVGSSYLA

SEQ ID NO: 4247 - protein, 7 aa, Artificial Sequence
  Description of Artificial Sequence: Synthetic peptide
  XENP019346 vlCDR2
GAFSRAT

SEQ ID NO: 4248 - protein, 9 aa, Artificial Sequence
  Description of Artificial Sequence: Synthetic peptide
  XENP019346 vlCDR3
QQYGSSPWT

SEQ ID NO: 4249 - protein, 221 aa, Artificial Sequence
  Description of Artificial Sequence: Synthetic polypeptide
  XENP019347 [CTLA-4]_H0.133_L0_Fab Heavy Chain
QVQLVESGGGVVQPGRSLRLSCAASGFTFSSYTMHWVRQAPGKGLEWVTFISYDGNNKYYADSVKGRFTISRDNSKNTLYLQMNSLRAEDTAIYYCARTGWLGPFDVWGQGTLVTVSSASTKGPSVFPLAPSSKSTSGGTAALGCLVKDYFPEPVTVSWNSGALTSGVHTFPAVLQSSGLYSLSSVVTVPSSSLGTQTYICNVNHKPSNTKVDKKVEPKSC

SEQ ID NO: 4250 - protein, 118 aa, Artificial Sequence; identical to SEQ ID NO: 1381
  Description of Artificial Sequence: Synthetic polypeptide
  VH of XENP019347

SEQ ID NO: 4251 - protein, 5 aa, Artificial Sequence
  Description of Artificial Sequence: Synthetic peptide
  XENP019347 vhCDR1
SYTMH

SEQ ID NO: 4252 - protein, 17 aa, Artificial Sequence
  Description of Artificial Sequence: Synthetic peptide
  XENP019347 vhCDR2
FISYDGNNKYYADSVKG

SEQ ID NO: 4253 - protein, 9 aa, Artificial Sequence
  Description of Artificial Sequence: Synthetic peptide
  XENP019347 vhCDR3
TGWLGPFDV

SEQ ID NO: 4254 - protein, 215 aa, Artificial Sequence; identical to SEQ ID NO: 2924
  Description of Artificial Sequence: Synthetic polypeptide
  XENP019347 [CTLA-4]_H0.133_L0_Fab Light Chain

SEQ ID NO: 4255 - protein, 108 aa, Artificial Sequence; identical to SEQ ID NO: 23
  Description of Artificial Sequence: Synthetic polypeptide
  VL of XENP019347

SEQ ID NO: 4256 - protein, 12 aa, Artificial Sequence
  Description of Artificial Sequence: Synthetic peptide
  XENP019347 vlCDR1
RASQSVGSSYLA

SEQ ID NO: 4257 - protein, 7 aa, Artificial Sequence
  Description of Artificial Sequence: Synthetic peptide
  XENP019347 vlCDR2
GAFSRAT

SEQ ID NO: 4258 - protein, 9 aa, Artificial Sequence
  Description of Artificial Sequence: Synthetic peptide
  XENP019347 vlCDR3
QQYGSSPWT

SEQ ID NO: 4259 - protein, 221 aa, Artificial Sequence
  Description of Artificial Sequence: Synthetic polypeptide
  XENP019348 [CTLA-4]_H0.134_L0_Fab Heavy Chain
QVQLVESGGGVVQPGRSLRLSCAASGFTFSSYTMHWVRQAPGKGLEWVTFISYDGNNKYYADSVKGRFTISRDNSKNTLYLQMNSLRAEDTAIYYCARTGWLGPFDYWGRGTLVTVSSASTKGPSVFPLAPSSKSTSGGTAALGCLVKDYFPEPVTVSWNSGALTSGVHTFPAVLQSSGLYSLSSVVTVPSSSLGTQTYICNVNHKPSNTKVDKKVEPKSC

SEQ ID NO: 4260 - protein, 118 aa, Artificial Sequence; identical to SEQ ID NO: 67
  Description of Artificial Sequence: Synthetic polypeptide
  VH of XENP019348

SEQ ID NO: 4261 - protein, 5 aa, Artificial Sequence
  Description of Artificial Sequence: Synthetic peptide
  XENP019348 vhCDR1
SYTMH

SEQ ID NO: 4262 - protein, 17 aa, Artificial Sequence
  Description of Artificial Sequence: Synthetic peptide
  XENP019348 vhCDR2
FISYDGNNKYYADSVKG

SEQ ID NO: 4263 - protein, 9 aa, Artificial Sequence
  Description of Artificial Sequence: Synthetic peptide
  XENP019348 vhCDR3
TGWLGPFDY

SEQ ID NO: 4264 - protein, 215 aa, Artificial Sequence; identical to SEQ ID NO: 2924
  Description of Artificial Sequence: Synthetic polypeptide
  XENP019348 [CTLA-4]_H0.134_L0_Fab Light Chain

SEQ ID NO: 4265 - protein, 108 aa, Artificial Sequence; identical to SEQ ID NO: 23
  Description of Artificial Sequence: Synthetic polypeptide
  VL of XENP019348

SEQ ID NO: 4266 - protein, 12 aa, Artificial Sequence
  Description of Artificial Sequence: Synthetic peptide
  XENP019348 vlCDR1
RASQSVGSSYLA

SEQ ID NO: 4267 - protein, 7 aa, Artificial Sequence
  Description of Artificial Sequence: Synthetic peptide
  XENP019348 vlCDR2
GAFSRAT

SEQ ID NO: 4268 - protein, 9 aa, Artificial Sequence
  Description of Artificial Sequence: Synthetic peptide
  XENP019348 vlCDR3
QQYGSSPWT

SEQ ID NO: 4269 - protein, 221 aa, Artificial Sequence
  Description of Artificial Sequence: Synthetic polypeptide
  XENP019349 [CTLA-4]_H0.135_L0_Fab Heavy Chain
QVQLVESGGGVVQPGRSLRLSCAASGFTFSSYTMHWVRQAPGKGLEWVTFISYDGNNKYYADSVKGRFTISRDNSKNTLYLQMNSLRAEDTAIYYCARTGWLGPFDYWGQGTMVTVSSASTKGPSVFPLAPSSKSTSGGTAALGCLVKDYFPEPVTVSWNSGALTSGVHTFPAVLQSSGLYSLSSVVTVPSSSLGTQTYICNVNHKPSNTKVDKKVEPKSC

SEQ ID NO: 4270 - protein, 118 aa, Artificial Sequence; identical to SEQ ID NO: 1399
  Description of Artificial Sequence: Synthetic polypeptide
  VH of XENP019349

SEQ ID NO: 4271 - protein, 5 aa, Artificial Sequence
  Description of Artificial Sequence: Synthetic peptide
  XENP019349 vhCDR1
SYTMH

SEQ ID NO: 4272 - protein, 17 aa, Artificial Sequence
  Description of Artificial Sequence: Synthetic peptide
  XENP019349 vhCDR2
FISYDGNNKYYADSVKG

SEQ ID NO: 4273 - protein, 9 aa, Artificial Sequence
  Description of Artificial Sequence: Synthetic peptide
  XENP019349 vhCDR3
TGWLGPFDY

SEQ ID NO: 4274 - protein, 215 aa, Artificial Sequence; identical to SEQ ID NO: 2924
  Description of Artificial Sequence: Synthetic polypeptide
  XENP019349 [CTLA-4]_H0.135_L0_Fab Light Chain

SEQ ID NO: 4275 - protein, 108 aa, Artificial Sequence; identical to SEQ ID NO: 23
  Description of Artificial Sequence: Synthetic polypeptide
  VL of XENP019349

SEQ ID NO: 4276 - protein, 12 aa, Artificial Sequence
  Description of Artificial Sequence: Synthetic peptide
  XENP019349 vlCDR1
RASQSVGSSYLA

SEQ ID NO: 4277 - protein, 7 aa, Artificial Sequence
  Description of Artificial Sequence: Synthetic peptide
  XENP019349 vlCDR2
GAFSRAT

SEQ ID NO: 4278 - protein, 9 aa, Artificial Sequence
  Description of Artificial Sequence: Synthetic peptide
  XENP019349 vlCDR3
QQYGSSPWT

SEQ ID NO: 4279 - protein, 221 aa, Artificial Sequence
  Description of Artificial Sequence: Synthetic polypeptide
  XENP019350 [CTLA-4]_H0.136_L0_Fab Heavy Chain
QVQLVESGGGVVQPGRSLRLSCAASGFTFSSYTMHWVRQAPGKGLEWVTFISYDGNNKYYADSVKGRFTISRDNSKNTLYLQMNSLRAEDTAIYYCARTGWLGPFDYWGQGTTVTVSSASTKGPSVFPLAPSSKSTSGGTAALGCLVKDYFPEPVTVSWNSGALTSGVHTFPAVLQSSGLYSLSSVVTVPSSSLGTQTYICNVNHKPSNTKVDKKVEPKSC

SEQ ID NO: 4280 - protein, 118 aa, Artificial Sequence; identical to SEQ ID NO: 1408
  Description of Artificial Sequence: Synthetic polypeptide
  VH of XENP019350

SEQ ID NO: 4281 - protein, 5 aa, Artificial Sequence
  Description of Artificial Sequence: Synthetic peptide
  XENP019350 vhCDR1
SYTMH

SEQ ID NO: 4282 - protein, 17 aa, Artificial Sequence
  Description of Artificial Sequence: Synthetic peptide
  XENP019350 vhCDR2
FISYDGNNKYYADSVKG

SEQ ID NO: 4283 - protein, 9 aa, Artificial Sequence
  Description of Artificial Sequence: Synthetic peptide
  XENP019350 vhCDR3
TGWLGPFDY

SEQ ID NO: 4284 - protein, 215 aa, Artificial Sequence; identical to SEQ ID NO: 2924
  Description of Artificial Sequence: Synthetic polypeptide
  XENP019350 [CTLA-4]_H0.136_L0_Fab Light Chain

SEQ ID NO: 4285 - protein, 108 aa, Artificial Sequence; identical to SEQ ID NO: 23
  Description of Artificial Sequence: Synthetic polypeptide
  VL of XENP019350

SEQ ID NO: 4286 - protein, 12 aa, Artificial Sequence
  Description of Artificial Sequence: Synthetic peptide
  XENP019350 vlCDR1
RASQSVGSSYLA

SEQ ID NO: 4287 - protein, 7 aa, Artificial Sequence
  Description of Artificial Sequence: Synthetic peptide
  XENP019350 vlCDR2
GAFSRAT

SEQ ID NO: 4288 - protein, 9 aa, Artificial Sequence
  Description of Artificial Sequence: Synthetic peptide
  XENP019350 vlCDR3
QQYGSSPWT

SEQ ID NO: 4289 - protein, 221 aa, Artificial Sequence; identical to SEQ ID NO: 2919
  Description of Artificial Sequence: Synthetic polypeptide
  XENP019416 [CTLA-4]_H0_L0.1_Fab Heavy Chain

SEQ ID NO: 4290 - protein, 118 aa, Artificial Sequence; identical to SEQ ID NO: 22
  Description of Artificial Sequence: Synthetic polypeptide
  VH of XENP019416

SEQ ID NO: 4291 - protein, 5 aa, Artificial Sequence
  Description of Artificial Sequence: Synthetic peptide
  XENP019416 vhCDR1
SYTMH

SEQ ID NO: 4292 - protein, 17 aa, Artificial Sequence
  Description of Artificial Sequence: Synthetic peptide
  XENP019416 vhCDR2
FISYDGNNKYYADSVKG

SEQ ID NO: 4293 - protein, 9 aa, Artificial Sequence
  Description of Artificial Sequence: Synthetic peptide
  XENP019416 vhCDR3
TGWLGPFDY

SEQ ID NO: 4294 - protein, 215 aa, Artificial Sequence
  Description of Artificial Sequence: Synthetic polypeptide
  XENP019416 [CTLA-4]_H0_L0.1_Fab Light Chain
AIVLTQSPGTLSLSPGERATLSCRASQSVGSSYLAWYQQKPGQAPRLLIYGAFSRATGIPDRFSGSGSGTDFTLTISRLEPEDFAVYYCQQYGSSPWTFGQGTKVEIKRTVAAPSVFIFPPSDEQLKSGTASVVCLLNNFYPREAKVQWKVDNALQSGNSQESVTEQDSKDSTYSLSSTLTLSKADYEKHKVYACEVTHQGLSSPVTKSFNRGEC

SEQ ID NO: 4295 - protein, 108 aa, Artificial Sequence; identical to SEQ ID NO: 1418
  Description of Artificial Sequence: Synthetic polypeptide
  VL of XENP019416

SEQ ID NO: 4296 - protein, 12 aa, Artificial Sequence
  Description of Artificial Sequence: Synthetic peptide
  XENP019416 vlCDR1
RASQSVGSSYLA

SEQ ID NO: 4297 - protein, 7 aa, Artificial Sequence
  Description of Artificial Sequence: Synthetic peptide
  XENP019416 vlCDR2
GAFSRAT

SEQ ID NO: 4298 - protein, 9 aa, Artificial Sequence
  Description of Artificial Sequence: Synthetic peptide
  XENP019416 vlCDR3
QQYGSSPWT

SEQ ID NO: 4299 - protein, 221 aa, Artificial Sequence; identical to SEQ ID NO: 2919
  Description of Artificial Sequence: Synthetic polypeptide
  XENP019417 [CTLA-4]_H0_L0.2_Fab Heavy Chain

SEQ ID NO: 4300 - protein, 118 aa, Artificial Sequence; identical to SEQ ID NO: 22
  Description of Artificial Sequence: Synthetic polypeptide
  VH of XENP019417

SEQ ID NO: 4301 - protein, 5 aa, Artificial Sequence
  Description of Artificial Sequence: Synthetic peptide
  XENP019417 vhCDR1
SYTMH

SEQ ID NO: 4302 - protein, 17 aa, Artificial Sequence
  Description of Artificial Sequence: Synthetic peptide
  XENP019417 vhCDR2
FISYDGNNKYYADSVKG

SEQ ID NO: 4303 - protein, 9 aa, Artificial Sequence
  Description of Artificial Sequence: Synthetic peptide
  XENP019417 vhCDR3
TGWLGPFDY

SEQ ID NO: 4304 - protein, 215 aa, Artificial Sequence
  Description of Artificial Sequence: Synthetic polypeptide
  XENP019417 [CTLA-4]_H0_L0.2_Fab Light Chain
DIVLTQSPGTLSLSPGERATLSCRASQSVGSSYLAWYQQKPGQAPRLLIYGAFSRATGIPDRFSGSGSGTDFTLTISRLEPEDFAVYYCQQYGSSPWTFGQGTKVEIKRTVAAPSVFIFPPSDEQLKSGTASVVCLLNNFYPREAKVQWKVDNALQSGNSQESVTEQDSKDSTYSLSSTLTLSKADYEKHKVYACEVTHQGLSSPVTKSFNRGEC

SEQ ID NO: 4305 - protein, 108 aa, Artificial Sequence; identical to SEQ ID NO: 1427
  Description of Artificial Sequence: Synthetic polypeptide
  VL of XENP019417

SEQ ID NO: 4306 - protein, 12 aa, Artificial Sequence
  Description of Artificial Sequence: Synthetic peptide
  XENP019417 vlCDR1
RASQSVGSSYLA

SEQ ID NO: 4307 - protein, 7 aa, Artificial Sequence
  Description of Artificial Sequence: Synthetic peptide
  XENP019417 vlCDR2
GAFSRAT

SEQ ID NO: 4308 - protein, 9 aa, Artificial Sequence
  Description of Artificial Sequence: Synthetic peptide
  XENP019417 vlCDR3
QQYGSSPWT

SEQ ID NO: 4309 - protein, 221 aa, Artificial Sequence; identical to SEQ ID NO: 2919
  Description of Artificial Sequence: Synthetic polypeptide
  XENP019418 [CTLA-4]_H0_L0.3_Fab Heavy Chain

SEQ ID NO: 4310 - protein, 118 aa, Artificial Sequence; identical to SEQ ID NO: 22
  Description of Artificial Sequence: Synthetic polypeptide
  VH of XENP019418

SEQ ID NO: 4311 - protein, 5 aa, Artificial Sequence
  Description of Artificial Sequence: Synthetic peptide
  XENP019418 vhCDR1
SYTMH

SEQ ID NO: 4312 - protein, 17 aa, Artificial Sequence
  Description of Artificial Sequence: Synthetic peptide
  XENP019418 vhCDR2
FISYDGNNKYYADSVKG

SEQ ID NO: 4313 - protein, 9 aa, Artificial Sequence
  Description of Artificial Sequence: Synthetic peptide
  XENP019418 vhCDR3
TGWLGPFDY

SEQ ID NO: 4314 - protein, 215 aa, Artificial Sequence
  Description of Artificial Sequence: Synthetic polypeptide
  XENP019418 [CTLA-4]_H0_L0.3_Fab Light Chain
QIVLTQSPGTLSLSPGERATLSCRASQSVGSSYLAWYQQKPGQAPRLLIYGAFSRATGIPDRFSGSGSGTDFTLTISRLEPEDFAVYYCQQYGSSPWTFGQGTKVEIKRTVAAPSVFIFPPSDEQLKSGTASVVCLLNNFYPREAKVQWKVDNALQSGNSQESVTEQDSKDSTYSLSSTLTLSKADYEKHKVYACEVTHQGLSSPVTKSFNRGEC

SEQ ID NO: 4315 - protein, 108 aa, Artificial Sequence; identical to SEQ ID NO: 1436
  Description of Artificial Sequence: Synthetic polypeptide
  VL of XENP019418

SEQ ID NO: 4316 - protein, 12 aa, Artificial Sequence
  Description of Artificial Sequence: Synthetic peptide
  XENP019418 vlCDR1
RASQSVGSSYLA

SEQ ID NO: 4317 - protein, 7 aa, Artificial Sequence
  Description of Artificial Sequence: Synthetic peptide
  XENP019418 vlCDR2
GAFSRAT

SEQ ID NO: 4318 - protein, 9 aa, Artificial Sequence
  Description of Artificial Sequence: Synthetic peptide
  XENP019418 vlCDR3
QQYGSSPWT

SEQ ID NO: 4319 - protein, 221 aa, Artificial Sequence; identical to SEQ ID NO: 2919
  Description of Artificial Sequence: Synthetic polypeptide
  XENP019419 [CTLA-4]_H0_L0.4_Fab Heavy Chain

SEQ ID NO: 4320 - protein, 118 aa, Artificial Sequence; identical to SEQ ID NO: 22
  Description of Artificial Sequence: Synthetic polypeptide
  VH of XENP019419

SEQ ID NO: 4321 - protein, 5 aa, Artificial Sequence
  Description of Artificial Sequence: Synthetic peptide
  XENP019419 vhCDR1
SYTMH

SEQ ID NO: 4322 - protein, 17 aa, Artificial Sequence
  Description of Artificial Sequence: Synthetic peptide
  XENP019419 vhCDR2
FISYDGNNKYYADSVKG

SEQ ID NO: 4323 - protein, 9 aa, Artificial Sequence
  Description of Artificial Sequence: Synthetic peptide
  XENP019419 vhCDR3
TGWLGPFDY

SEQ ID NO: 4324 - protein, 215 aa, Artificial Sequence
  Description of Artificial Sequence: Synthetic polypeptide
  XENP019419 [CTLA-4]_H0_L0.4_Fab Light Chain
RIVLTQSPGTLSLSPGERATLSCRASQSVGSSYLAWYQQKPGQAPRLLIYGAFSRATGIPDRFSGSGSGTDFTLTISRLEPEDFAVYYCQQYGSSPWTFGQGTKVEIKRTVAAPSVFIFPPSDEQLKSGTASVVCLLNNFYPREAKVQWKVDNALQSGNSQESVTEQDSKDSTYSLSSTLTLSKADYEKHKVYACEVTHQGLSSPVTKSFNRGEC

SEQ ID NO: 4325 - protein, 108 aa, Artificial Sequence; identical to SEQ ID NO: 1445
  Description of Artificial Sequence: Synthetic polypeptide
  VL of XENP019419

SEQ ID NO: 4326 - protein, 12 aa, Artificial Sequence
  Description of Artificial Sequence: Synthetic peptide
  XENP019419 vlCDR1
RASQSVGSSYLA

SEQ ID NO: 4327 - protein, 7 aa, Artificial Sequence
  Description of Artificial Sequence: Synthetic peptide
  XENP019419 vlCDR2
GAFSRAT

SEQ ID NO: 4328 - protein, 9 aa, Artificial Sequence
  Description of Artificial Sequence: Synthetic peptide
  XENP019419 vlCDR3
QQYGSSPWT

SEQ ID NO: 4329 - protein, 221 aa, Artificial Sequence; identical to SEQ ID NO: 2919
  Description of Artificial Sequence: Synthetic polypeptide
  XENP019420 [CTLA-4]_H0_L0.5_Fab Heavy Chain

SEQ ID NO: 4330 - protein, 118 aa, Artificial Sequence; identical to SEQ ID NO: 22
  Description of Artificial Sequence: Synthetic polypeptide
  VH of XENP019420

SEQ ID NO: 4331 - protein, 5 aa, Artificial Sequence
  Description of Artificial Sequence: Synthetic peptide
  XENP019420 vhCDR1
SYTMH

SEQ ID NO: 4332 - protein, 17 aa, Artificial Sequence
  Description of Artificial Sequence: Synthetic peptide
  XENP019420 vhCDR2
FISYDGNNKYYADSVKG

SEQ ID NO: 4333 - protein, 9 aa, Artificial Sequence
  Description of Artificial Sequence: Synthetic peptide
  XENP019420 vhCDR3
TGWLGPFDY

SEQ ID NO: 4334 - protein, 215 aa, Artificial Sequence
  Description of Artificial Sequence: Synthetic polypeptide
  XENP019420 [CTLA-4]_H0_L0.5_Fab Light Chain
EIRLTQSPGTLSLSPGERATLSCRASQSVGSSYLAWYQQKPGQAPRLLIYGAFSRATGIPDRFSGSGSGTDFTLTISRLEPEDFAVYYCQQYGSSPWTFGQGTKVEIKRTVAAPSVFIFPPSDEQLKSGTASVVCLLNNFYPREAKVQWKVDNALQSGNSQESVTEQDSKDSTYSLSSTLTLSKADYEKHKVYACEVTHQGLSSPVTKSFNRGEC

SEQ ID NO: 4335 - protein, 108 aa, Artificial Sequence; identical to SEQ ID NO: 1454
  Description of Artificial Sequence: Synthetic polypeptide
  VL of XENP019420

SEQ ID NO: 4336 - protein, 12 aa, Artificial Sequence
  Description of Artificial Sequence: Synthetic peptide
  XENP019420 vlCDR1
RASQSVGSSYLA

SEQ ID NO: 4337 - protein, 7 aa, Artificial Sequence
  Description of Artificial Sequence: Synthetic peptide
  XENP019420 vlCDR2
GAFSRAT

SEQ ID NO: 4338 - protein, 9 aa, Artificial Sequence
  Description of Artificial Sequence: Synthetic peptide
  XENP019420 vlCDR3
QQYGSSPWT

SEQ ID NO: 4339 - protein, 221 aa, Artificial Sequence; identical to SEQ ID NO: 2919
  Description of Artificial Sequence: Synthetic polypeptide
  XENP019421 [CTLA-4]_H0_L0.6_Fab Heavy Chain

SEQ ID NO: 4340 - protein, 118 aa, Artificial Sequence; identical to SEQ ID NO: 22
  Description of Artificial Sequence: Synthetic polypeptide
  VH of XENP019421

SEQ ID NO: 4341 - protein, 5 aa, Artificial Sequence
  Description of Artificial Sequence: Synthetic peptide
  XENP019421 vhCDR1
SYTMH

SEQ ID NO: 4342 - protein, 17 aa, Artificial Sequence
  Description of Artificial Sequence: Synthetic peptide
  XENP019421 vhCDR2
FISYDGNNKYYADSVKG

SEQ ID NO: 4343 - protein, 9 aa, Artificial Sequence
  Description of Artificial Sequence: Synthetic peptide
  XENP019421 vhCDR3
TGWLGPFDY

SEQ ID NO: 4344 - protein, 215 aa, Artificial Sequence
  Description of Artificial Sequence: Synthetic polypeptide
  XENP019421 [CTLA-4]_H0_L0.6_Fab Light Chain
EIRLTQSPGTLSLSPGERATLSCRASQSVGSSYLAWYQQKPGQAPRLLIYGAFSRATGIPDRFSGSGSGTDFTLTISRLEPEDFAVYYCQQYGSSPWTFGEGTKVEIKRTVAAPSVFIFPPSDEQLKSGTASVVCLLNNFYPREAKVQWKVDNALQSGNSQESVTEQDSKDSTYSLSSTLTLSKADYEKHKVYACEVTHQGLSSPVTKSFNRGEC

SEQ ID NO: 4345 - protein, 108 aa, Artificial Sequence; identical to SEQ ID NO: 1463
  Description of Artificial Sequence: Synthetic polypeptide
  VL of XENP019421

SEQ ID NO: 4346 - protein, 12 aa, Artificial Sequence
  Description of Artificial Sequence: Synthetic peptide
  XENP019421 vlCDR1
RASQSVGSSYLA

SEQ ID NO: 4347 - protein, 7 aa, Artificial Sequence
  Description of Artificial Sequence: Synthetic peptide
  XENP019421 vlCDR2
GAFSRAT

SEQ ID NO: 4348 - protein, 9 aa, Artificial Sequence
  Description of Artificial Sequence: Synthetic peptide
  XENP019421 vlCDR3
QQYGSSPWT

SEQ ID NO: 4349 - protein, 221 aa, Artificial Sequence; identical to SEQ ID NO: 2919
  Description of Artificial Sequence: Synthetic polypeptide
  XENP019422 [CTLA-4]_H0_L0.7_Fab Heavy Chain

SEQ ID NO: 4350 - protein, 118 aa, Artificial Sequence; identical to SEQ ID NO: 22
  Description of Artificial Sequence: Synthetic polypeptide
  VH of XENP019422

SEQ ID NO: 4351 - protein, 5 aa, Artificial Sequence
  Description of Artificial Sequence: Synthetic peptide
  XENP019422 vhCDR1
SYTMH

SEQ ID NO: 4352 - protein, 17 aa, Artificial Sequence
  Description of Artificial Sequence: Synthetic peptide
  XENP019422 vhCDR2
FISYDGNNKYYADSVKG

SEQ ID NO: 4353 - protein, 9 aa, Artificial Sequence
  Description of Artificial Sequence: Synthetic peptide
  XENP019422 vhCDR3
TGWLGPFDY

SEQ ID NO: 4354 - protein, 215 aa, Artificial Sequence
  Description of Artificial Sequence: Synthetic polypeptide
  XENP019422 [CTLA-4]_H0_L0.7_Fab Light Chain
EIVMTQSPGTLSLSPGERATLSCRASQSVGSSYLAWYQQKPGQAPRLLIYGAFSRATGIPDRFSGSGSGTDFTLTISRLEPEDFAVYYCQQYGSSPWTFGQGTKVEIKRTVAAPSVFIFPPSDEQLKSGTASVVCLLNNFYPREAKVQWKVDNALQSGNSQESVTEQDSKDSTYSLSSTLTLSKADYEKHKVYACEVTHQGLSSPVTKSFNRGEC

SEQ ID NO: 4355 - protein, 108 aa, Artificial Sequence; identical to SEQ ID NO: 1472
  Description of Artificial Sequence: Synthetic polypeptide
  VL of XENP019422

SEQ ID NO: 4356 - protein, 12 aa, Artificial Sequence
  Description of Artificial Sequence: Synthetic peptide
  XENP019422 vlCDR1
RASQSVGSSYLA

SEQ ID NO: 4357 - protein, 7 aa, Artificial Sequence
  Description of Artificial Sequence: Synthetic peptide
  XENP019422 vlCDR2
GAFSRAT

SEQ ID NO: 4358 - protein, 9 aa, Artificial Sequence
  Description of Artificial Sequence: Synthetic peptide
  XENP019422 vlCDR3
QQYGSSPWT

SEQ ID NO: 4359 - protein, 221 aa, Artificial Sequence; identical to SEQ ID NO: 2919
  Description of Artificial Sequence: Synthetic polypeptide
  XENP019423 [CTLA-4]_H0_L0.8_Fab Heavy Chain

SEQ ID NO: 4360 - protein, 118 aa, Artificial Sequence; identical to SEQ ID NO: 22
  Description of Artificial Sequence: Synthetic polypeptide
  VH of XENP019423

SEQ ID NO: 4361 - protein, 5 aa, Artificial Sequence
  Description of Artificial Sequence: Synthetic peptide
  XENP019423 vhCDR1
SYTMH

SEQ ID NO: 4362 - protein, 17 aa, Artificial Sequence
  Description of Artificial Sequence: Synthetic peptide
  XENP019423 vhCDR2
FISYDGNNKYYADSVKG

SEQ ID NO: 4363 - protein, 9 aa, Artificial Sequence
  Description of Artificial Sequence: Synthetic peptide
  XENP019423 vhCDR3
TGWLGPFDY

SEQ ID NO: 4364 - protein, 215 aa, Artificial Sequence
  Description of Artificial Sequence: Synthetic polypeptide
  XENP019423 [CTLA-4]_H0_L0.8_Fab Light Chain
EIVLTQSPATLSLSPGERATLSCRASQSVGSSYLAWYQQKPGQAPRLLIYGAFSRATGIPDRFSGSGSGTDFTLTISRLEPEDFAVYYCQQYGSSPWTFGQGTKVEIKRTVAAPSVFIFPPSDEQLKSGTASVVCLLNNFYPREAKVQWKVDNALQSGNSQESVTEQDSKDSTYSLSSTLTLSKADYEKHKVYACEVTHQGLSSPVTKSFNRGEC

SEQ ID NO: 4365 - protein, 108 aa, Artificial Sequence; identical to SEQ ID NO: 1481
  Description of Artificial Sequence: Synthetic polypeptide
  VL of XENP019423

SEQ ID NO: 4366 - protein, 12 aa, Artificial Sequence
  Description of Artificial Sequence: Synthetic peptide
  XENP019423 vlCDR1
RASQSVGSSYLA

SEQ ID NO: 4367 - protein, 7 aa, Artificial Sequence
  Description of Artificial Sequence: Synthetic peptide
  XENP019423 vlCDR2
GAFSRAT

SEQ ID NO: 4368 - protein, 9 aa, Artificial Sequence
  Description of Artificial Sequence: Synthetic peptide
  XENP019423 vlCDR3
QQYGSSPWT

SEQ ID NO: 4369 - protein, 221 aa, Artificial Sequence; identical to SEQ ID NO: 2919
  Description of Artificial Sequence: Synthetic polypeptide
  XENP019424 [CTLA-4]_H0_L0.9_Fab Heavy Chain

SEQ ID NO: 4370 - protein, 118 aa, Artificial Sequence; identical to SEQ ID NO: 22
  Description of Artificial Sequence: Synthetic polypeptide
  VH of XENP019424

SEQ ID NO: 4371 - protein, 5 aa, Artificial Sequence
  Description of Artificial Sequence: Synthetic peptide
  XENP019424 vhCDR1
SYTMH

SEQ ID NO: 4372 - protein, 17 aa, Artificial Sequence
  Description of Artificial Sequence: Synthetic peptide
  XENP019424 vhCDR2
FISYDGNNKYYADSVKG

SEQ ID NO: 4373 - protein, 9 aa, Artificial Sequence
  Description of Artificial Sequence: Synthetic peptide
  XENP019424 vhCDR3
TGWLGPFDY

SEQ ID NO: 4374 - protein, 215 aa, Artificial Sequence
  Description of Artificial Sequence: Synthetic polypeptide
  XENP019424 [CTLA-4]_H0_L0.9_Fab Light Chain
EIVLTQSPPTLSLSPGERATLSCRASQSVGSSYLAWYQQKPGQAPRLLIYGAFSRATGIPDRFSGSGSGTDFTLTISRLEPEDFAVYYCQQYGSSPWTFGQGTKVEIKRTVAAPSVFIFPPSDEQLKSGTASVVCLLNNFYPREAKVQWKVDNALQSGNSQESVTEQDSKDSTYSLSSTLTLSKADYEKHKVYACEVTHQGLSSPVTKSFNRGEC

SEQ ID NO: 4375 - protein, 108 aa, Artificial Sequence; identical to SEQ ID NO: 1490
  Description of Artificial Sequence: Synthetic polypeptide
  VL of XENP019424

SEQ ID NO: 4376 - protein, 12 aa, Artificial Sequence
  Description of Artificial Sequence: Synthetic peptide
  XENP019424 vlCDR1
RASQSVGSSYLA

SEQ ID NO: 4377 - protein, 7 aa, Artificial Sequence
  Description of Artificial Sequence: Synthetic peptide
  XENP019424 vlCDR2
GAFSRAT

SEQ ID NO: 4378 - protein, 9 aa, Artificial Sequence
  Description of Artificial Sequence: Synthetic peptide
  XENP019424 vlCDR3
QQYGSSPWT

SEQ ID NO: 4379 - protein, 221 aa, Artificial Sequence; identical to SEQ ID NO: 2919
  Description of Artificial Sequence: Synthetic polypeptide
  XENP019425 [CTLA-4]_H0_L0.10_Fab Heavy Chain

SEQ ID NO: 4380 - protein, 118 aa, Artificial Sequence; identical to SEQ ID NO: 22
  Description of Artificial Sequence: Synthetic polypeptide
  VH of XENP019425

SEQ ID NO: 4381 - protein, 5 aa, Artificial Sequence
  Description of Artificial Sequence: Synthetic peptide
  XENP019425 vhCDR1
SYTMH

SEQ ID NO: 4382 - protein, 17 aa, Artificial Sequence
  Description of Artificial Sequence: Synthetic peptide
  XENP019425 vhCDR2
FISYDGNNKYYADSVKG

SEQ ID NO: 4383 - protein, 9 aa, Artificial Sequence
  Description of Artificial Sequence: Synthetic peptide
  XENP019425 vhCDR3
TGWLGPFDY

SEQ ID NO: 4384 - protein, 215 aa, Artificial Sequence
  Description of Artificial Sequence: Synthetic polypeptide
  XENP019425 [CTLA-4]_H0_L0.10_Fab Light Chain
EIVLTQSPSTLSLSPGERATLSCRASQSVGSSYLAWYQQKPGQAPRLLIYGAFSRATGIPDRFSGSGSGTDFTLTISRLEPEDFAVYYCQQYGSSPWTFGQGTKVEIKRTVAAPSVFIFPPSDEQLKSGTASVVCLLNNFYPREAKVQWKVDNALQSGNSQESVTEQDSKDSTYSLSSTLTLSKADYEKHKVYACEVTHQGLSSPVTKSFNRGEC

SEQ ID NO: 4385 - protein, 108 aa, Artificial Sequence; identical to SEQ ID NO: 1499
  Description of Artificial Sequence: Synthetic polypeptide
  VL of XENP019425

SEQ ID NO: 4386 - protein, 12 aa, Artificial Sequence
  Description of Artificial Sequence: Synthetic peptide
  XENP019425 vlCDR1
RASQSVGSSYLA

SEQ ID NO: 4387 - protein, 7 aa, Artificial Sequence
  Description of Artificial Sequence: Synthetic peptide
  XENP019425 vlCDR2
GAFSRAT

SEQ ID NO: 4388 - protein, 9 aa, Artificial Sequence
  Description of Artificial Sequence: Synthetic peptide
  XENP019425 vlCDR3
QQYGSSPWT

SEQ ID NO: 4389 - protein, 221 aa, Artificial Sequence; identical to SEQ ID NO: 2919
  Description of Artificial Sequence: Synthetic polypeptide
  XENP019426 [CTLA-4]_H0_L0.11_Fab Heavy Chain

SEQ ID NO: 4390 - protein, 118 aa, Artificial Sequence; identical to SEQ ID NO: 22
  Description of Artificial Sequence: Synthetic polypeptide
  VH of XENP019426

SEQ ID NO: 4391 - protein, 5 aa, Artificial Sequence
  Description of Artificial Sequence: Synthetic peptide
  XENP019426 vhCDR1
SYTMH

SEQ ID NO: 4392 - protein, 17 aa, Artificial Sequence
  Description of Artificial Sequence: Synthetic peptide
  XENP019426 vhCDR2
FISYDGNNKYYADSVKG

SEQ ID NO: 4393 - protein, 9 aa, Artificial Sequence
  Description of Artificial Sequence: Synthetic peptide
  XENP019426 vhCDR3
TGWLGPFDY

SEQ ID NO: 4394 - protein, 215 aa, Artificial Sequence
  Description of Artificial Sequence: Synthetic polypeptide
  XENP019426 [CTLA-4]_H0_L0.11_Fab Light Chain
EIVLTQSPGSLSLSPGERATLSCRASQSVGSSYLAWYQQKPGQAPRLLIYGAFSRATGIPDRFSGSGSGTDFTLTISRLEPEDFAVYYCQQYGSSPWTFGQGTKVEIKRTVAAPSVFIFPPSDEQLKSGTASVVCLLNNFYPREAKVQWKVDNALQSGNSQESVTEQDSKDSTYSLSSTLTLSKADYEKHKVYACEVTHQGLSSPVTKSFNRGEC

SEQ ID NO: 4395 - protein, 108 aa, Artificial Sequence; identical to SEQ ID NO: 1508
  Description of Artificial Sequence: Synthetic polypeptide
  VL of XENP019426

SEQ ID NO: 4396 - protein, 12 aa, Artificial Sequence
  Description of Artificial Sequence: Synthetic peptide
  XENP019426 vlCDR1
RASQSVGSSYLA

SEQ ID NO: 4397 - protein, 7 aa, Artificial Sequence
  Description of Artificial Sequence: Synthetic peptide
  XENP019426 vlCDR2
GAFSRAT

SEQ ID NO: 4398 - protein, 9 aa, Artificial Sequence
  Description of Artificial Sequence: Synthetic peptide
  XENP019426 vlCDR3
QQYGSSPWT

SEQ ID NO: 4399 - protein, 221 aa, Artificial Sequence; identical to SEQ ID NO: 2919
  Description of Artificial Sequence: Synthetic polypeptide
  XENP019427 [CTLA-4]_H0_L0.12_Fab Heavy Chain

SEQ ID NO: 4400 - protein, 118 aa, Artificial Sequence; identical to SEQ ID NO: 22
  Description of Artificial Sequence: Synthetic polypeptide
  VH of XENP019427

SEQ ID NO: 4401 - protein, 5 aa, Artificial Sequence
  Description of Artificial Sequence: Synthetic peptide
  XENP019427 vhCDR1
SYTMH

SEQ ID NO: 4402 - protein, 17 aa, Artificial Sequence
  Description of Artificial Sequence: Synthetic peptide
  XENP019427 vhCDR2
FISYDGNNKYYADSVKG

SEQ ID NO: 4403 - protein, 9 aa, Artificial Sequence
  Description of Artificial Sequence: Synthetic peptide
  XENP019427 vhCDR3
TGWLGPFDY

SEQ ID NO: 4404 - protein, 215 aa, Artificial Sequence
  Description of Artificial Sequence: Synthetic polypeptide
  XENP019427 [CTLA-4]_H0_L0.12_Fab Light Chain
EIVLTQSPGTLSVSPGERATLSCRASQSVGSSYLAWYQQKPGQAPRLLIYGAFSRATGIPDRFSGSGSGTDFTLTISRLEPEDFAVYYCQQYGSSPWTFGQGTKVEIKRTVAAPSVFIFPPSDEQLKSGTASVVCLLNNFYPREAKVQWKVDNALQSGNSQESVTEQDSKDSTYSLSSTLTLSKADYEKHKVYACEVTHQGLSSPVTKSFNRGEC

SEQ ID NO: 4405 - protein, 108 aa, Artificial Sequence; identical to SEQ ID NO: 1517
  Description of Artificial Sequence: Synthetic polypeptide
  VL of XENP019427

SEQ ID NO: 4406 - protein, 12 aa, Artificial Sequence
  Description of Artificial Sequence: Synthetic peptide
  XENP019427 vlCDR1
RASQSVGSSYLA

SEQ ID NO: 4407 - protein, 7 aa, Artificial Sequence
  Description of Artificial Sequence: Synthetic peptide
  XENP019427 vlCDR2
GAFSRAT

SEQ ID NO: 4408 - protein, 9 aa, Artificial Sequence
  Description of Artificial Sequence: Synthetic peptide
  XENP019427 vlCDR3
QQYGSSPWT

SEQ ID NO: 4409 - protein, 221 aa, Artificial Sequence; identical to SEQ ID NO: 2919
  Description of Artificial Sequence: Synthetic polypeptide
  XENP019428 [CTLA-4]_H0_L0.13_Fab Heavy Chain

SEQ ID NO: 4410 - protein, 118 aa, Artificial Sequence; identical to SEQ ID NO: 22
  Description of Artificial Sequence: Synthetic polypeptide
  VH of XENP019428

SEQ ID NO: 4411 - protein, 5 aa, Artificial Sequence
  Description of Artificial Sequence: Synthetic peptide
  XENP019428 vhCDR1
SYTMH

SEQ ID NO: 4412 - protein, 17 aa, Artificial Sequence
  Description of Artificial Sequence: Synthetic peptide
  XENP019428 vhCDR2
FISYDGNNKYYADSVKG

SEQ ID NO: 4413 - protein, 9 aa, Artificial Sequence
  Description of Artificial Sequence: Synthetic peptide
  XENP019428 vhCDR3
TGWLGPFDY

SEQ ID NO: 4414 - protein, 215 aa, Artificial Sequence
  Description of Artificial Sequence: Synthetic polypeptide
  XENP019428 [CTLA-4]_H0_L0.13_Fab Light Chain
EIVLTQSPGTLSLSPGEPATLSCRASQSVGSSYLAWYQQKPGQAPRLLIYGAFSRATGIPDRFSGSGSGTDFTLTISRLEPEDFAVYYCQQYGSSPWTFGQGTKVEIKRTVAAPSVFIFPPSDEQLKSGTASVVCLLNNFYPREAKVQWKVDNALQSGNSQESVTEQDSKDSTYSLSSTLTLSKADYEKHKVYACEVTHQGLSSPVTKSFNRGEC

SEQ ID NO: 4415 - protein, 108 aa, Artificial Sequence; identical to SEQ ID NO: 1526
  Description of Artificial Sequence: Synthetic polypeptide
  VL of XENP019428

SEQ ID NO: 4416 - protein, 12 aa, Artificial Sequence
  Description of Artificial Sequence: Synthetic peptide
  XENP019428 vlCDR1
RASQSVGSSYLA

SEQ ID NO: 4417 - protein, 7 aa, Artificial Sequence
  Description of Artificial Sequence: Synthetic peptide
  XENP019428 vlCDR2
GAFSRAT

SEQ ID NO: 4418 - protein, 9 aa, Artificial Sequence
  Description of Artificial Sequence: Synthetic peptide
  XENP019428 vlCDR3
QQYGSSPWT

SEQ ID NO: 4419 - protein, 221 aa, Artificial Sequence; identical to SEQ ID NO: 2919
  Description of Artificial Sequence: Synthetic polypeptide
  XENP019429 [CTLA-4]_H0_L0.14_Fab Heavy Chain

SEQ ID NO: 4420 - protein, 118 aa, Artificial Sequence; identical to SEQ ID NO: 22
  Description of Artificial Sequence: Synthetic polypeptide
  VH of XENP019429

SEQ ID NO: 4421 - protein, 5 aa, Artificial Sequence
  Description of Artificial Sequence: Synthetic peptide
  XENP019429 vhCDR1
SYTMH

SEQ ID NO: 4422 - protein, 17 aa, Artificial Sequence
  Description of Artificial Sequence: Synthetic peptide
  XENP019429 vhCDR2
FISYDGNNKYYADSVKG

SEQ ID NO: 4423 - protein, 9 aa, Artificial Sequence
  Description of Artificial Sequence: Synthetic peptide
  XENP019429 vhCDR3
TGWLGPFDY

SEQ ID NO: 4424 - protein, 215 aa, Artificial Sequence
  Description of Artificial Sequence: Synthetic polypeptide
  XENP019429 [CTLA-4]_H0_L0.14_Fab Light Chain
EIVLTQSPGTLSLSPGEQATLSCRASQSVGSSYLAWYQQKPGQAPRLLIYGAFSRATGIPDRFSGSGSGTDFTLTISRLEPEDFAVYYCQQYGSSPWTFGQGTKVEIKRTVAAPSVFIFPPSDEQLKSGTASVVCLLNNFYPREAKVQWKVDNALQSGNSQESVTEQDSKDSTYSLSSTLTLSKADYEKHKVYACEVTHQGLSSPVTKSFNRGEC

SEQ ID NO: 4425 - protein, 108 aa, Artificial Sequence; identical to SEQ ID NO: 1535
  Description of Artificial Sequence: Synthetic polypeptide
  VL of XENP019429

SEQ ID NO: 4426 - protein, 12 aa, Artificial Sequence
  Description of Artificial Sequence: Synthetic peptide
  XENP019429 vlCDR1
RASQSVGSSYLA

SEQ ID NO: 4427 - protein, 7 aa, Artificial Sequence
  Description of Artificial Sequence: Synthetic peptide
  XENP019429 vlCDR2
GAFSRAT

SEQ ID NO: 4428 - protein, 9 aa, Artificial Sequence
  Description of Artificial Sequence: Synthetic peptide
  XENP019429 vlCDR3
QQYGSSPWT

SEQ ID NO: 4429 - protein, 221 aa, Artificial Sequence; identical to SEQ ID NO: 2919
  Description of Artificial Sequence: Synthetic polypeptide
  XENP019430 [CTLA-4]_H0_L0.15_Fab Heavy Chain

SEQ ID NO: 4430 - protein, 118 aa, Artificial Sequence; identical to SEQ ID NO: 22
  Description of Artificial Sequence: Synthetic polypeptide
  VH of XENP019430

SEQ ID NO: 4431 - protein, 5 aa, Artificial Sequence
  Description of Artificial Sequence: Synthetic peptide
  XENP019430 vhCDR1
SYTMH

SEQ ID NO: 4432 - protein, 17 aa, Artificial Sequence
  Description of Artificial Sequence: Synthetic peptide
  XENP019430 vhCDR2
FISYDGNNKYYADSVKG

SEQ ID NO: 4433 - protein, 9 aa, Artificial Sequence
  Description of Artificial Sequence: Synthetic peptide
  XENP019430 vhCDR3
TGWLGPFDY

SEQ ID NO: 4434 - protein, 215 aa, Artificial Sequence
  Description of Artificial Sequence: Synthetic polypeptide
  XENP019430 [CTLA-4]_H0_L0.15_Fab Light Chain
EIVLTQSPGTLSLSPGERVTLSCRASQSVGSSYLAWYQQKPGQAPRLLIYGAFSRATGIPDRFSGSGSGTDFTLTISRLEPEDFAVYYCQQYGSSPWTFGQGTKVEIKRTVAAPSVFIFPPSDEQLKSGTASVVCLLNNFYPREAKVQWKVDNALQSGNSQESVTEQDSKDSTYSLSSTLTLSKADYEKHKVYACEVTHQGLSSPVTKSFNRGEC

SEQ ID NO: 4435 - protein, 108 aa, Artificial Sequence; identical to SEQ ID NO: 1544
  Description of Artificial Sequence: Synthetic polypeptide
  VL of XENP019430

SEQ ID NO: 4436 - protein, 12 aa, Artificial Sequence
  Description of Artificial Sequence: Synthetic peptide
  XENP019430 vlCDR1
RASQSVGSSYLA

SEQ ID NO: 4437 - protein, 7 aa, Artificial Sequence
  Description of Artificial Sequence: Synthetic peptide
  XENP019430 vlCDR2
GAFSRAT

SEQ ID NO: 4438 - protein, 9 aa, Artificial Sequence
  Description of Artificial Sequence: Synthetic peptide
  XENP019430 vlCDR3
QQYGSSPWT

SEQ ID NO: 4439 - protein, 221 aa, Artificial Sequence; identical to SEQ ID NO: 2919
  Description of Artificial Sequence: Synthetic polypeptide
  XENP019431 [CTLA-4]_H0_L0.16_Fab Heavy Chain

SEQ ID NO: 4440 - protein, 118 aa, Artificial Sequence; identical to SEQ ID NO: 22
  Description of Artificial Sequence: Synthetic polypeptide
  VH of XENP019431

SEQ ID NO: 4441 - protein, 5 aa, Artificial Sequence
  Description of Artificial Sequence: Synthetic peptide
  XENP019431 vhCDR1
SYTMH

SEQ ID NO: 4442 - protein, 17 aa, Artificial Sequence
  Description of Artificial Sequence: Synthetic peptide
  XENP019431 vhCDR2
FISYDGNNKYYADSVKG

SEQ ID NO: 4443 - protein, 9 aa, Artificial Sequence
  Description of Artificial Sequence: Synthetic peptide
  XENP019431 vhCDR3
TGWLGPFDY

SEQ ID NO: 4444 - protein, 215 aa, Artificial Sequence
  Description of Artificial Sequence: Synthetic polypeptide
  XENP019431 [CTLA-4]_H0_L0.16_Fab Light Chain
EIVLTQSPGTLSLSPGERASLSCRASQSVGSSYLAWYQQKPGQAPRLLIYGAFSRATGIPDRFSGSGSGTDFTLTISRLEPEDFAVYYCQQYGSSPWTFGQGTKVEIKRTVAAPSVFIFPPSDEQLKSGTASVVCLLNNFYPREAKVQWKVDNALQSGNSQESVTEQDSKDSTYSLSSTLTLSKADYEKHKVYACEVTHQGLSSPVTKSFNRGEC

SEQ ID NO: 4445 - protein, 108 aa, Artificial Sequence; identical to SEQ ID NO: 1553
  Description of Artificial Sequence: Synthetic polypeptide
  VL of XENP019431

SEQ ID NO: 4446 - protein, 12 aa, Artificial Sequence
  Description of Artificial Sequence: Synthetic peptide
  XENP019431 vlCDR1
RASQSVGSSYLA

SEQ ID NO: 4447 - protein, 7 aa, Artificial Sequence
  Description of Artificial Sequence: Synthetic peptide
  XENP019431 vlCDR2
GAFSRAT

SEQ ID NO: 4448 - protein, 9 aa, Artificial Sequence
  Description of Artificial Sequence: Synthetic peptide
  XENP019431 vlCDR3
QQYGSSPWT

SEQ ID NO: 4449 - protein, 221 aa, Artificial Sequence; identical to SEQ ID NO: 2919
  Description of Artificial Sequence: Synthetic polypeptide
  XENP019432 [CTLA-4]_H0_L0.17_Fab Heavy Chain

SEQ ID NO: 4450 - protein, 118 aa, Artificial Sequence; identical to SEQ ID NO: 22
  Description of Artificial Sequence: Synthetic polypeptide
  VH of XENP019432

SEQ ID NO: 4451 - protein, 5 aa, Artificial Sequence
  Description of Artificial Sequence: Synthetic peptide
  XENP019432 vhCDR1
SYTMH

SEQ ID NO: 4452 - protein, 17 aa, Artificial Sequence
  Description of Artificial Sequence: Synthetic peptide
  XENP019432 vhCDR2
FISYDGNNKYYADSVKG

SEQ ID NO: 4453 - protein, 9 aa, Artificial Sequence
  Description of Artificial Sequence: Synthetic peptide
  XENP019432 vhCDR3
TGWLGPFDY

SEQ ID NO: 4454 - protein, 215 aa, Artificial Sequence
  Description of Artificial Sequence: Synthetic polypeptide
  XENP019432 [CTLA-4]_H0_L0.17_Fab Light Chain
EIVLTQSPGTLSLSPGERATISCRASQSVGSSYLAWYQQKPGQAPRLLIYGAFSRATGIPDRFSGSGSGTDFTLTISRLEPEDFAVYYCQQYGSSPWTFGQGTKVEIKRTVAAPSVFIFPPSDEQLKSGTASVVCLLNNFYPREAKVQWKVDNALQSGNSQESVTEQDSKDSTYSLSSTLTLSKADYEKHKVYACEVTHQGLSSPVTKSFNRGEC

SEQ ID NO: 4455 - protein, 108 aa, Artificial Sequence; identical to SEQ ID NO: 1562
  Description of Artificial Sequence: Synthetic polypeptide
  VL of XENP019432

SEQ ID NO: 4456 - protein, 12 aa, Artificial Sequence
  Description of Artificial Sequence: Synthetic peptide
  XENP019432 vlCDR1
RASQSVGSSYLA

SEQ ID NO: 4457 - protein, 7 aa, Artificial Sequence
  Description of Artificial Sequence: Synthetic peptide
  XENP019432 vlCDR2
GAFSRAT

SEQ ID NO: 4458 - protein, 9 aa, Artificial Sequence
  Description of Artificial Sequence: Synthetic peptide
  XENP019432 vlCDR3
QQYGSSPWT

SEQ ID NO: 4459 - protein, 221 aa, Artificial Sequence; identical to SEQ ID NO: 2919
  Description of Artificial Sequence: Synthetic polypeptide
  XENP019433 [CTLA-4]_H0_L0.18_Fab Heavy Chain

SEQ ID NO: 4460 - protein, 118 aa, Artificial Sequence; identical to SEQ ID NO: 22
  Description of Artificial Sequence: Synthetic polypeptide
  VH of XENP019433

SEQ ID NO: 4461 - protein, 5 aa, Artificial Sequence
  Description of Artificial Sequence: Synthetic peptide
  XENP019433 vhCDR1
SYTMH

SEQ ID NO: 4462 - protein, 17 aa, Artificial Sequence
  Description of Artificial Sequence: Synthetic peptide
  XENP019433 vhCDR2
FISYDGNNKYYADSVKG

SEQ ID NO: 4463 - protein, 9 aa, Artificial Sequence
  Description of Artificial Sequence: Synthetic peptide
  XENP019433 vhCDR3
TGWLGPFDY

SEQ ID NO: 4464 - protein, 215 aa, Artificial Sequence
  Description of Artificial Sequence: Synthetic polypeptide
  XENP019433 [CTLA-4]_H0_L0.18_Fab Light Chain
EIVLTQSPGTLSLSPGERATLSCRSSQSVGSSYLAWYQQKPGQAPRLLIYGAFSRATGIPDRFSGSGSGTDFTLTISRLEPEDFAVYYCQQYGSSPWTFGQGTKVEIKRTVAAPSVFIFPPSDEQLKSGTASVVCLLNNFYPREAKVQWKVDNALQSGNSQESVTEQDSKDSTYSLSSTLTLSKADYEKHKVYACEVTHQGLSSPVTKSFNRGEC

SEQ ID NO: 4465 - protein, 108 aa, Artificial Sequence; identical to SEQ ID NO: 1571
  Description of Artificial Sequence: Synthetic polypeptide
  VL of XENP019433

SEQ ID NO: 4466 - protein, 12 aa, Artificial Sequence
  Description of Artificial Sequence: Synthetic peptide
  XENP019433 vlCDR1
RSSQSVGSSYLA

SEQ ID NO: 4467 - protein, 7 aa, Artificial Sequence
  Description of Artificial Sequence: Synthetic peptide
  XENP019433 vlCDR2
GAFSRAT

SEQ ID NO: 4468 - protein, 9 aa, Artificial Sequence
  Description of Artificial Sequence: Synthetic peptide
  XENP019433 vlCDR3
QQYGSSPWT

SEQ ID NO: 4469 - protein, 221 aa, Artificial Sequence; identical to SEQ ID NO: 2919
  Description of Artificial Sequence: Synthetic polypeptide
  XENP019434 [CTLA-4]_H0_L0.19_Fab Heavy Chain

SEQ ID NO: 4470 - protein, 118 aa, Artificial Sequence; identical to SEQ ID NO: 22
  Description of Artificial Sequence: Synthetic polypeptide
  VH of XENP019434

SEQ ID NO: 4471 - protein, 5 aa, Artificial Sequence
  Description of Artificial Sequence: Synthetic peptide
  XENP019434 vhCDR1
SYTMH

SEQ ID NO: 4472 - protein, 17 aa, Artificial Sequence
  Description of Artificial Sequence: Synthetic peptide
  XENP019434 vhCDR2
FISYDGNNKYYADSVKG

SEQ ID NO: 4473 - protein, 9 aa, Artificial Sequence
  Description of Artificial Sequence: Synthetic peptide
  XENP019434 vhCDR3
TGWLGPFDY

SEQ ID NO: 4474 - protein, 215 aa, Artificial Sequence
  Description of Artificial Sequence: Synthetic polypeptide
  XENP019434 [CTLA-4]_H0_L0.19_Fab Light Chain
EIVLTQSPGTLSLSPGERATLSCRASQSDGSSYLAWYQQKPGQAPRLLIYGAFSRATGIPDRFSGSGSGTDFTLTISRLEPEDFAVYYCQQYGSSPWTFGQGTKVEIKRTVAAPSVFIFPPSDEQLKSGTASVVCLLNNFYPREAKVQWKVDNALQSGNSQESVTEQDSKDSTYSLSSTLTLSKADYEKHKVYACEVTHQGLSSPVTKSFNRGEC

SEQ ID NO: 4475 - protein, 108 aa, Artificial Sequence; identical to SEQ ID NO: 1580
  Description of Artificial Sequence: Synthetic polypeptide
  VL of XENP019434

SEQ ID NO: 4476 - protein, 12 aa, Artificial Sequence
  Description of Artificial Sequence: Synthetic peptide
  XENP019434 vlCDR1
RASQSDGSSYLA

SEQ ID NO: 4477 - protein, 7 aa, Artificial Sequence
  Description of Artificial Sequence: Synthetic peptide
  XENP019434 vlCDR2
GAFSRAT

SEQ ID NO: 4478 - protein, 9 aa, Artificial Sequence
  Description of Artificial Sequence: Synthetic peptide
  XENP019434 vlCDR3
QQYGSSPWT

SEQ ID NO: 4479 - protein, 221 aa, Artificial Sequence; identical to SEQ ID NO: 2919
  Description of Artificial Sequence: Synthetic polypeptide
  XENP019435 [CTLA-4]_H0_L0.20_Fab Heavy Chain

SEQ ID NO: 4480 - protein, 118 aa, Artificial Sequence; identical to SEQ ID NO: 22
  Description of Artificial Sequence: Synthetic polypeptide
  VH of XENP019435

SEQ ID NO: 4481 - protein, 5 aa, Artificial Sequence
  Description of Artificial Sequence: Synthetic peptide
  XENP019435 vhCDR1
SYTMH

SEQ ID NO: 4482 - protein, 17 aa, Artificial Sequence
  Description of Artificial Sequence: Synthetic peptide
  XENP019435 vhCDR2
FISYDGNNKYYADSVKG

SEQ ID NO: 4483 - protein, 9 aa, Artificial Sequence
  Description of Artificial Sequence: Synthetic peptide
  XENP019435 vhCDR3
TGWLGPFDY

SEQ ID NO: 4484 - protein, 215 aa, Artificial Sequence
  Description of Artificial Sequence: Synthetic polypeptide
  XENP019435 [CTLA-4]_H0_L0.20_Fab Light Chain
EIVLTQSPGTLSLSPGERATLSCRASQSSGSSYLAWYQQKPGQAPRLLIYGAFSRATGIPDRFSGSGSGTDFTLTISRLEPEDFAVYYCQQYGSSPWTFGQGTKVEIKRTVAAPSVFIFPPSDEQLKSGTASVVCLLNNFYPREAKVQWKVDNALQSGNSQESVTEQDSKDSTYSLSSTLTLSKADYEKHKVYACEVTHQGLSSPVTKSFNRGEC

SEQ ID NO: 4485 - protein, 108 aa, Artificial Sequence; identical to SEQ ID NO: 1589
  Description of Artificial Sequence: Synthetic polypeptide
  VL of XENP019435

SEQ ID NO: 4486 - protein, 12 aa, Artificial Sequence
  Description of Artificial Sequence: Synthetic peptide
  XENP019435 vlCDR1
RASQSSGSSYLA

SEQ ID NO: 4487 - protein, 7 aa, Artificial Sequence
  Description of Artificial Sequence: Synthetic peptide
  XENP019435 vlCDR2
GAFSRAT

SEQ ID NO: 4488 - protein, 9 aa, Artificial Sequence
  Description of Artificial Sequence: Synthetic peptide
  XENP019435 vlCDR3
QQYGSSPWT

SEQ ID NO: 4489 - protein, 221 aa, Artificial Sequence; identical to SEQ ID NO: 2919
  Description of Artificial Sequence: Synthetic polypeptide
  XENP019436 [CTLA-4]_H0_L0.21_Fab Heavy Chain

SEQ ID NO: 4490 - protein, 118 aa, Artificial Sequence; identical to SEQ ID NO: 22
  Description of Artificial Sequence: Synthetic polypeptide
  VH of XENP019436

SEQ ID NO: 4491 - protein, 5 aa, Artificial Sequence
  Description of Artificial Sequence: Synthetic peptide
  XENP019436 vhCDR1
SYTMH

SEQ ID NO: 4492 - protein, 17 aa, Artificial Sequence
  Description of Artificial Sequence: Synthetic peptide
  XENP019436 vhCDR2
FISYDGNNKYYADSVKG

SEQ ID NO: 4493 - protein, 9 aa, Artificial Sequence
  Description of Artificial Sequence: Synthetic peptide
  XENP019436 vhCDR3
TGWLGPFDY

SEQ ID NO: 4494 - protein, 215 aa, Artificial Sequence
  Description of Artificial Sequence: Synthetic polypeptide
  XENP019436 [CTLA-4]_H0_L0.21_Fab Light Chain
EIVLTQSPGTLSLSPGERATLSCRASQSVASSYLAWYQQKPGQAPRLLIYGAFSRATGIPDRFSGSGSGTDFTLTISRLEPEDFAVYYCQQYGSSPWTFGQGTKVEIKRTVAAPSVFIFPPSDEQLKSGTASVVCLLNNFYPREAKVQWKVDNALQSGNSQESVTEQDSKDSTYSLSSTLTLSKADYEKHKVYACEVTHQGLSSPVTKSFNRGEC

SEQ ID NO: 4495 - protein, 108 aa, Artificial Sequence; identical to SEQ ID NO: 1598
  Description of Artificial Sequence: Synthetic polypeptide
  VL of XENP019436

SEQ ID NO: 4496 - protein, 12 aa, Artificial Sequence
  Description of Artificial Sequence: Synthetic peptide
  XENP019436 vlCDR1
RASQSVASSYLA

SEQ ID NO: 4497 - protein, 7 aa, Artificial Sequence
  Description of Artificial Sequence: Synthetic peptide
  XENP019436 vlCDR2
GAFSRAT

SEQ ID NO: 4498 - protein, 9 aa, Artificial Sequence
  Description of Artificial Sequence: Synthetic peptide
  XENP019436 vlCDR3
QQYGSSPWT

SEQ ID NO: 4499 - protein, 221 aa, Artificial Sequence; identical to SEQ ID NO: 2919
  Description of Artificial Sequence: Synthetic polypeptide
  XENP019437 [CTLA-4]_H0_L0.22_Fab Heavy Chain

SEQ ID NO: 4500 - protein, 118 aa, Artificial Sequence; identical to SEQ ID NO: 22
  Description of Artificial Sequence: Synthetic polypeptide
  VH of XENP019437

SEQ ID NO: 4501 - protein, 5 aa, Artificial Sequence
  Description of Artificial Sequence: Synthetic peptide
  XENP019437 vhCDR1
SYTMH

SEQ ID NO: 4502 - protein, 17 aa, Artificial Sequence
  Description of Artificial Sequence: Synthetic peptide
  XENP019437 vhCDR2
FISYDGNNKYYADSVKG

SEQ ID NO: 4503 - protein, 9 aa, Artificial Sequence
  Description of Artificial Sequence: Synthetic peptide
  XENP019437 vhCDR3
TGWLGPFDY

SEQ ID NO: 4504 - protein, 215 aa, Artificial Sequence
  Description of Artificial Sequence: Synthetic polypeptide
  XENP019437 [CTLA-4]_H0_L0.22_Fab Light Chain
EIVLTQSPGTLSLSPGERATLSCRASQSVSSSYLAWYQQKPGQAPRLLIYGAFSRATGIPDRFSGSGSGTDFTLTISRLEPEDFAVYYCQQYGSSPWTFGQGTKVEIKRTVAAPSVFIFPPSDEQLKSGTASVVCLLNNFYPREAKVQWKVDNALQSGNSQESVTEQDSKDSTYSLSSTLTLSKADYEKHKVYACEVTHQGLSSPVTKSFNRGEC

SEQ ID NO: 4505 - protein, 108 aa, Artificial Sequence; identical to SEQ ID NO: 1607
  Description of Artificial Sequence: Synthetic polypeptide
  VL of XENP019437

SEQ ID NO: 4506 - protein, 12 aa, Artificial Sequence
  Description of Artificial Sequence: Synthetic peptide
  XENP019437 vlCDR1
RASQSVSSSYLA

SEQ ID NO: 4507 - protein, 7 aa, Artificial Sequence
  Description of Artificial Sequence: Synthetic peptide
  XENP019437 vlCDR2
GAFSRAT

SEQ ID NO: 4508 - protein, 9 aa, Artificial Sequence
  Description of Artificial Sequence: Synthetic peptide
  XENP019437 vlCDR3
QQYGSSPWT

SEQ ID NO: 4509 - protein, 221 aa, Artificial Sequence; identical to SEQ ID NO: 2919
  Description of Artificial Sequence: Synthetic polypeptide
  XENP019438 [CTLA-4]_H0_L0.23_Fab Heavy Chain

SEQ ID NO: 4510 - protein, 118 aa, Artificial Sequence; identical to SEQ ID NO: 22
  Description of Artificial Sequence: Synthetic polypeptide
  VH of XENP019438

SEQ ID NO: 4511 - protein, 5 aa, Artificial Sequence
  Description of Artificial Sequence: Synthetic peptide
  XENP019438 vhCDR1
SYTMH

SEQ ID NO: 4512 - protein, 17 aa, Artificial Sequence
  Description of Artificial Sequence: Synthetic peptide
  XENP019438 vhCDR2
FISYDGNNKYYADSVKG

SEQ ID NO: 4513 - protein, 9 aa, Artificial Sequence
  Description of Artificial Sequence: Synthetic peptide
  XENP019438 vhCDR3
TGWLGPFDY

SEQ ID NO: 4514 - protein, 215 aa, Artificial Sequence
  Description of Artificial Sequence: Synthetic polypeptide
  XENP019438 [CTLA-4]_H0_L0.23_Fab Light Chain
EIVLTQSPGTLSLSPGERATLSCRASQSVTSSYLAWYQQKPGQAPRLLIYGAFSRATGIPDRFSGSGSGTDFTLTISRLEPEDFAVYYCQQYGSSPWTFGQGTKVEIKRTVAAPSVFIFPPSDEQLKSGTASVVCLLNNFYPREAKVQWKVDNALQSGNSQESVTEQDSKDSTYSLSSTLTLSKADYEKHKVYACEVTHQGLSSPVTKSFNRGEC

SEQ ID NO: 4515 - protein, 108 aa, Artificial Sequence; identical to SEQ ID NO: 1616
  Description of Artificial Sequence: Synthetic polypeptide
  VL of XENP019438

SEQ ID NO: 4516 - protein, 12 aa, Artificial Sequence
  Description of Artificial Sequence: Synthetic peptide
  XENP019438 vlCDR1
RASQSVTSSYLA

SEQ ID NO: 4517 - protein, 7 aa, Artificial Sequence
  Description of Artificial Sequence: Synthetic peptide
  XENP019438 vlCDR2
GAFSRAT

SEQ ID NO: 4518 - protein, 9 aa, Artificial Sequence
  Description of Artificial Sequence: Synthetic peptide
  XENP019438 vlCDR3
QQYGSSPWT

SEQ ID NO: 4519 - protein, 221 aa, Artificial Sequence; identical to SEQ ID NO: 2919
  Description of Artificial Sequence: Synthetic polypeptide
  XENP019439 [CTLA-4]_H0_L0.24_Fab Heavy Chain

SEQ ID NO: 4520 - protein, 118 aa, Artificial Sequence; identical to SEQ ID NO: 22
  Description of Artificial Sequence: Synthetic polypeptide
  VH of XENP019439

SEQ ID NO: 4521 - protein, 5 aa, Artificial Sequence
  Description of Artificial Sequence: Synthetic peptide
  XENP019439 vhCDR1
SYTMH

SEQ ID NO: 4522 - protein, 17 aa, Artificial Sequence
  Description of Artificial Sequence: Synthetic peptide
  XENP019439 vhCDR2
FISYDGNNKYYADSVKG

SEQ ID NO: 4523 - protein, 9 aa, Artificial Sequence
  Description of Artificial Sequence: Synthetic peptide
  XENP019439 vhCDR3
TGWLGPFDY

SEQ ID NO: 4524 - protein, 215 aa, Artificial Sequence
  Description of Artificial Sequence: Synthetic polypeptide
  XENP019439 [CTLA-4]_H0_L0.24_Fab Light Chain
EIVLTQSPGTLSLSPGERATLSCRASQSVGASYLAWYQQKPGQAPRLLIYGAFSRATGIPDRFSGSGSGTDFTLTISRLEPEDFAVYYCQQYGSSPWTFGQGTKVEIKRTVAAPSVFIFPPSDEQLKSGTASVVCLLNNFYPREAKVQWKVDNALQSGNSQESVTEQDSKDSTYSLSSTLTLSKADYEKHKVYACEVTHQGLSSPVTKSFNRGEC

SEQ ID NO: 4525 - protein, 108 aa, Artificial Sequence; identical to SEQ ID NO: 1625
  Description of Artificial Sequence: Synthetic polypeptide
  VL of XENP019439

SEQ ID NO: 4526 - protein, 12 aa, Artificial Sequence
  Description of Artificial Sequence: Synthetic peptide
  XENP019439 vlCDR1
RASQSVGASYLA

SEQ ID NO: 4527 - protein, 7 aa, Artificial Sequence
  Description of Artificial Sequence: Synthetic peptide
  XENP019439 vlCDR2
GAFSRAT

SEQ ID NO: 4528 - protein, 9 aa, Artificial Sequence
  Description of Artificial Sequence: Synthetic peptide
  XENP019439 vlCDR3
QQYGSSPWT

SEQ ID NO: 4529 - protein, 221 aa, Artificial Sequence; identical to SEQ ID NO: 2919
  Description of Artificial Sequence: Synthetic polypeptide
  XENP019440 [CTLA-4]_H0_L0.25_Fab Heavy Chain

SEQ ID NO: 4530 - protein, 118 aa, Artificial Sequence; identical to SEQ ID NO: 22
  Description of Artificial Sequence: Synthetic polypeptide
  VH of XENP019440

SEQ ID NO: 4531 - protein, 5 aa, Artificial Sequence
  Description of Artificial Sequence: Synthetic peptide
  XENP019440 vhCDR1
SYTMH

SEQ ID NO: 4532 - protein, 17 aa, Artificial Sequence
  Description of Artificial Sequence: Synthetic peptide
  XENP019440 vhCDR2
FISYDGNNKYYADSVKG

SEQ ID NO: 4533 - protein, 9 aa, Artificial Sequence
  Description of Artificial Sequence: Synthetic peptide
  XENP019440 vhCDR3
TGWLGPFDY

SEQ ID NO: 4534 - protein, 215 aa, Artificial Sequence
  Description of Artificial Sequence: Synthetic polypeptide
  XENP019440 [CTLA-4]_H0_L0.25_Fab Light Chain
EIVLTQSPGTLSLSPGERATLSCRASQSVGGSYLAWYQQKPGQAPRLLIYGAFSRATGIPDRFSGSGSGTDFTLTISRLEPEDFAVYYCQQYGSSPWTFGQGTKVEIKRTVAAPSVFIFPPSDEQLKSGTASVVCLLNNFYPREAKVQWKVDNALQSGNSQESVTEQDSKDSTYSLSSTLTLSKADYEKHKVYACEVTHQGLSSPVTKSFNRGEC

SEQ ID NO: 4535 - protein, 108 aa, Artificial Sequence; identical to SEQ ID NO: 1634
  Description of Artificial Sequence: Synthetic polypeptide
  VL of XENP019440

SEQ ID NO: 4536 - protein, 12 aa, Artificial Sequence
  Description of Artificial Sequence: Synthetic peptide
  XENP019440 vlCDR1
RASQSVGGSYLA

SEQ ID NO: 4537 - protein, 7 aa, Artificial Sequence
  Description of Artificial Sequence: Synthetic peptide
  XENP019440 vlCDR2
GAFSRAT

SEQ ID NO: 4538 - protein, 9 aa, Artificial Sequence
  Description of Artificial Sequence: Synthetic peptide
  XENP019440 vlCDR3
QQYGSSPWT

SEQ ID NO: 4539 - protein, 221 aa, Artificial Sequence; identical to SEQ ID NO: 2919
  Description of Artificial Sequence: Synthetic polypeptide
  XENP019441 [CTLA-4]_H0_L0.26_Fab Heavy Chain

SEQ ID NO: 4540 - protein, 118 aa, Artificial Sequence; identical to SEQ ID NO: 22
  Description of Artificial Sequence: Synthetic polypeptide
  VH of XENP019441

SEQ ID NO: 4541 - protein, 5 aa, Artificial Sequence
  Description of Artificial Sequence: Synthetic peptide
  XENP019441 vhCDR1
SYTMH

SEQ ID NO: 4542 - protein, 17 aa, Artificial Sequence
  Description of Artificial Sequence: Synthetic peptide
  XENP019441 vhCDR2
FISYDGNNKYYADSVKG

SEQ ID NO: 4543 - protein, 9 aa, Artificial Sequence
  Description of Artificial Sequence: Synthetic peptide
  XENP019441 vhCDR3
TGWLGPFDY

SEQ ID NO: 4544 - protein, 215 aa, Artificial Sequence
  Description of Artificial Sequence: Synthetic polypeptide
  XENP019441 [CTLA-4]_H0_L0.26_Fab Light Chain
EIVLTQSPGTLSLSPGERATLSCRASQSVGNSYLAWYQQKPGQAPRLLIYGAFSRATGIPDRFSGSGSGTDFTLTISRLEPEDFAVYYCQQYGSSPWTFGQGTKVEIKRTVAAPSVFIFPPSDEQLKSGTASVVCLLNNFYPREAKVQWKVDNALQSGNSQESVTEQDSKDSTYSLSSTLTLSKADYEKHKVYACEVTHQGLSSPVTKSFNRGEC

SEQ ID NO: 4545 - protein, 108 aa, Artificial Sequence; identical to SEQ ID NO: 1643
  Description of Artificial Sequence: Synthetic polypeptide
  VL of XENP019441

SEQ ID NO: 4546 - protein, 12 aa, Artificial Sequence
  Description of Artificial Sequence: Synthetic peptide
  XENP019441 vlCDR1
RASQSVGNSYLA

SEQ ID NO: 4547 - protein, 7 aa, Artificial Sequence
  Description of Artificial Sequence: Synthetic peptide
  XENP019441 vlCDR2
GAFSRAT

SEQ ID NO: 4548 - protein, 9 aa, Artificial Sequence
  Description of Artificial Sequence: Synthetic peptide
  XENP019441 vlCDR3
QQYGSSPWT

SEQ ID NO: 4549 - protein, 221 aa, Artificial Sequence; identical to SEQ ID NO: 2919
  Description of Artificial Sequence: Synthetic polypeptide
  XENP019442 [CTLA-4]_H0_L0.27_Fab Heavy Chain

SEQ ID NO: 4550 - protein, 118 aa, Artificial Sequence; identical to SEQ ID NO: 22
  Description of Artificial Sequence: Synthetic polypeptide
  VH of XENP019442

SEQ ID NO: 4551 - protein, 5 aa, Artificial Sequence
  Description of Artificial Sequence: Synthetic peptide
  XENP019442 vhCDR1
SYTMH

SEQ ID NO: 4552 - protein, 17 aa, Artificial Sequence
  Description of Artificial Sequence: Synthetic peptide
  XENP019442 vhCDR2
FISYDGNNKYYADSVKG

SEQ ID NO: 4553 - protein, 9 aa, Artificial Sequence
  Description of Artificial Sequence: Synthetic peptide
  XENP019442 vhCDR3
TGWLGPFDY

SEQ ID NO: 4554 - protein, 215 aa, Artificial Sequence
  Description of Artificial Sequence: Synthetic polypeptide
  XENP019442 [CTLA-4]_H0_L0.27_Fab Light Chain
EIVLTQSPGTLSLSPGERATLSCRASQSVGQSYLAWYQQKPGQAPRLLIYGAFSRATGIPDRFSGSGSGTDFTLTISRLEPEDFAVYYCQQYGSSPWTFGQGTKVEIKRTVAAPSVFIFPPSDEQLKSGTASVVCLLNNFYPREAKVQWKVDNALQSGNSQESVTEQDSKDSTYSLSSTLTLSKADYEKHKVYACEVTHQGLSSPVTKSFNRGEC

SEQ ID NO: 4555 - protein, 108 aa, Artificial Sequence; identical to SEQ ID NO: 1652
  Description of Artificial Sequence: Synthetic polypeptide
  VL of XENP019442

SEQ ID NO: 4556 - protein, 12 aa, Artificial Sequence
  Description of Artificial Sequence: Synthetic peptide
  XENP019442 vlCDR1
RASQSVGQSYLA

SEQ ID NO: 4557 - protein, 7 aa, Artificial Sequence
  Description of Artificial Sequence: Synthetic peptide
  XENP019442 vlCDR2
GAFSRAT

SEQ ID NO: 4558 - protein, 9 aa, Artificial Sequence
  Description of Artificial Sequence: Synthetic peptide
  XENP019442 vlCDR3
QQYGSSPWT

SEQ ID NO: 4559 - protein, 221 aa, Artificial Sequence; identical to SEQ ID NO: 2919
  Description of Artificial Sequence: Synthetic polypeptide
  XENP019443 [CTLA-4]_H0_L0.28_Fab Heavy Chain

SEQ ID NO: 4560 - protein, 118 aa, Artificial Sequence; identical to SEQ ID NO: 22
  Description of Artificial Sequence: Synthetic polypeptide
  VH of XENP019443

SEQ ID NO: 4561 - protein, 5 aa, Artificial Sequence
  Description of Artificial Sequence: Synthetic peptide
  XENP019443 vhCDR1
SYTMH

SEQ ID NO: 4562 - protein, 17 aa, Artificial Sequence
  Description of Artificial Sequence: Synthetic peptide
  XENP019443 vhCDR2
FISYDGNNKYYADSVKG

SEQ ID NO: 4563 - protein, 9 aa, Artificial Sequence
  Description of Artificial Sequence: Synthetic peptide
  XENP019443 vhCDR3
TGWLGPFDY

SEQ ID NO: 4564 - protein, 215 aa, Artificial Sequence
  Description of Artificial Sequence: Synthetic polypeptide
  XENP019443 [CTLA-4]_H0_L0.28_Fab Light Chain
EIVLTQSPGTLSLSPGERATLSCRASQSVGTSYLAWYQQKPGQAPRLLIYGAFSRATGIPDRFSGSGSGTDFTLTISRLEPEDFAVYYCQQYGSSPWTFGQGTKVEIKRTVAAPSVFIFPPSDEQLKSGTASVVCLLNNFYPREAKVQWKVDNALQSGNSQESVTEQDSKDSTYSLSSTLTLSKADYEKHKVYACEVTHQGLSSPVTKSFNRGEC

SEQ ID NO: 4565 - protein, 108 aa, Artificial Sequence; identical to SEQ ID NO: 1661
  Description of Artificial Sequence: Synthetic polypeptide
  VL of XENP019443

SEQ ID NO: 4566 - protein, 12 aa, Artificial Sequence
  Description of Artificial Sequence: Synthetic peptide
  XENP019443 vlCDR1
RASQSVGTSYLA

SEQ ID NO: 4567 - protein, 7 aa, Artificial Sequence
  Description of Artificial Sequence: Synthetic peptide
  XENP019443 vlCDR2
GAFSRAT

SEQ ID NO: 4568 - protein, 9 aa, Artificial Sequence
  Description of Artificial Sequence: Synthetic peptide
  XENP019443 vlCDR3
QQYGSSPWT

SEQ ID NO: 4569 - protein, 221 aa, Artificial Sequence; identical to SEQ ID NO: 2919
  Description of Artificial Sequence: Synthetic polypeptide
  XENP019444 [CTLA-4]_H0_L0.29_Fab Heavy Chain

SEQ ID NO: 4570 - protein, 118 aa, Artificial Sequence; identical to SEQ ID NO: 22
  Description of Artificial Sequence: Synthetic polypeptide
  VH of XENP019444

SEQ ID NO: 4571 - protein, 5 aa, Artificial Sequence
  Description of Artificial Sequence: Synthetic peptide
  XENP019444 vhCDR1
SYTMH

SEQ ID NO: 4572 - protein, 17 aa, Artificial Sequence
  Description of Artificial Sequence: Synthetic peptide
  XENP019444 vhCDR2
FISYDGNNKYYADSVKG

SEQ ID NO: 4573 - protein, 9 aa, Artificial Sequence
  Description of Artificial Sequence: Synthetic peptide
  XENP019444 vhCDR3
TGWLGPFDY

SEQ ID NO: 4574 - protein, 215 aa, Artificial Sequence
  Description of Artificial Sequence: Synthetic polypeptide
  XENP019444 [CTLA-4]_H0_L0.29_Fab Light Chain
EIVLTQSPGTLSLSPGERATLSCRASQSVGSAYLAWYQQKPGQAPRLLIYGAFSRATGIPDRFSGSGSGTDFTLTISRLEPEDFAVYYCQQYGSSPWTFGQGTKVEIKRTVAAPSVFIFPPSDEQLKSGTASVVCLLNNFYPREAKVQWKVDNALQSGNSQESVTEQDSKDSTYSLSSTLTLSKADYEKHKVYACEVTHQGLSSPVTKSFNRGEC

SEQ ID NO: 4575 - protein, 108 aa, Artificial Sequence; identical to SEQ ID NO: 1670
  Description of Artificial Sequence: Synthetic polypeptide
  VL of XENP019444

SEQ ID NO: 4576 - protein, 12 aa, Artificial Sequence
  Description of Artificial Sequence: Synthetic peptide
  XENP019444 vlCDR1
RASQSVGSAYLA

SEQ ID NO: 4577 - protein, 7 aa, Artificial Sequence
  Description of Artificial Sequence: Synthetic peptide
  XENP019444 vlCDR2
GAFSRAT

SEQ ID NO: 4578 - protein, 9 aa, Artificial Sequence
  Description of Artificial Sequence: Synthetic peptide
  XENP019444 vlCDR3
QQYGSSPWT

SEQ ID NO: 4579 - protein, 221 aa, Artificial Sequence; identical to SEQ ID NO: 2919
  Description of Artificial Sequence: Synthetic polypeptide
  XENP019445 [CTLA-4]_H0_L0.30_Fab Heavy Chain

SEQ ID NO: 4580 - protein, 118 aa, Artificial Sequence; identical to SEQ ID NO: 22
  Description of Artificial Sequence: Synthetic polypeptide
  VH of XENP019445

SEQ ID NO: 4581 - protein, 5 aa, Artificial Sequence
  Description of Artificial Sequence: Synthetic peptide
  XENP019445 vhCDR1
SYTMH

SEQ ID NO: 4582 - protein, 17 aa, Artificial Sequence
  Description of Artificial Sequence: Synthetic peptide
  XENP019445 vhCDR2
FISYDGNNKYYADSVKG

SEQ ID NO: 4583 - protein, 9 aa, Artificial Sequence
  Description of Artificial Sequence: Synthetic peptide
  XENP019445 vhCDR3
TGWLGPFDY

SEQ ID NO: 4584 - protein, 215 aa, Artificial Sequence
  Description of Artificial Sequence: Synthetic polypeptide
  XENP019445 [CTLA-4]_H0_L0.30_Fab Light Chain
EIVLTQSPGTLSLSPGERATLSCRASQSVGSGYLAWYQQKPGQAPRLLIYGAFSRATGIPDRFSGSGSGTDFTLTISRLEPEDFAVYYCQQYGSSPWTFGQGTKVEIKRTVAAPSVFIFPPSDEQLKSGTASVVCLLNNFYPREAKVQWKVDNALQSGNSQESVTEQDSKDSTYSLSSTLTLSKADYEKHKVYACEVTHQGLSSPVTKSFNRGEC

SEQ ID NO: 4585 - protein, 108 aa, Artificial Sequence; identical to SEQ ID NO: 1679
  Description of Artificial Sequence: Synthetic polypeptide
  VL of XENP019445

SEQ ID NO: 4586 - protein, 12 aa, Artificial Sequence
  Description of Artificial Sequence: Synthetic peptide
  XENP019445 vlCDR1
RASQSVGSGYLA

SEQ ID NO: 4587 - protein, 7 aa, Artificial Sequence
  Description of Artificial Sequence: Synthetic peptide
  XENP019445 vlCDR2
GAFSRAT

SEQ ID NO: 4588 - protein, 9 aa, Artificial Sequence
  Description of Artificial Sequence: Synthetic peptide
  XENP019445 vlCDR3
QQYGSSPWT

SEQ ID NO: 4589 - protein, 221 aa, Artificial Sequence; identical to SEQ ID NO: 2919
  Description of Artificial Sequence: Synthetic polypeptide
  XENP019446 [CTLA-4]_H0_L0.31_Fab Heavy Chain

SEQ ID NO: 4590 - protein, 118 aa, Artificial Sequence; identical to SEQ ID NO: 22
  Description of Artificial Sequence: Synthetic polypeptide
  VH of XENP019446

SEQ ID NO: 4591 - protein, 5 aa, Artificial Sequence
  Description of Artificial Sequence: Synthetic peptide
  XENP019446 vhCDR1
SYTMH

SEQ ID NO: 4592 - protein, 17 aa, Artificial Sequence
  Description of Artificial Sequence: Synthetic peptide
  XENP019446 vhCDR2
FISYDGNNKYYADSVKG

SEQ ID NO: 4593 - protein, 9 aa, Artificial Sequence
  Description of Artificial Sequence: Synthetic peptide
  XENP019446 vhCDR3
TGWLGPFDY

SEQ ID NO: 4594 - protein, 215 aa, Artificial Sequence
  Description of Artificial Sequence: Synthetic polypeptide
  XENP019446 [CTLA-4]_H0_L0.31_Fab Light Chain
EIVLTQSPGTLSLSPGERATLSCRASQSVGSNYLAWYQQKPGQAPRLLIYGAFSRATGIPDRFSGSGSGTDFTLTISRLEPEDFAVYYCQQYGSSPWTFGQGTKVEIKRTVAAPSVFIFPPSDEQLKSGTASVVCLLNNFYPREAKVQWKVDNALQSGNSQESVTEQDSKDSTYSLSSTLTLSKADYEKHKVYACEVTHQGLSSPVTKSFNRGEC

SEQ ID NO: 4595 - protein, 108 aa, Artificial Sequence; identical to SEQ ID NO: 1688
  Description of Artificial Sequence: Synthetic polypeptide
  VL of XENP019446

SEQ ID NO: 4596 - protein, 12 aa, Artificial Sequence
  Description of Artificial Sequence: Synthetic peptide
  XENP019446 vlCDR1
RASQSVGSNYLA

SEQ ID NO: 4597 - protein, 7 aa, Artificial Sequence
  Description of Artificial Sequence: Synthetic peptide
  XENP019446 vlCDR2
GAFSRAT

SEQ ID NO: 4598 - protein, 9 aa, Artificial Sequence
  Description of Artificial Sequence: Synthetic peptide
  XENP019446 vlCDR3
QQYGSSPWT

SEQ ID NO: 4599 - protein, 221 aa, Artificial Sequence; identical to SEQ ID NO: 2919
  Description of Artificial Sequence: Synthetic polypeptide
  XENP019447 [CTLA-4]_H0_L0.32_Fab Heavy Chain

SEQ ID NO: 4600 - protein, 118 aa, Artificial Sequence; identical to SEQ ID NO: 22
  Description of Artificial Sequence: Synthetic polypeptide
  VH of XENP019447

SEQ ID NO: 4601 - protein, 5 aa, Artificial Sequence
  Description of Artificial Sequence: Synthetic peptide
  XENP019447 vhCDR1
SYTMH

SEQ ID NO: 4602 - protein, 17 aa, Artificial Sequence
  Description of Artificial Sequence: Synthetic peptide
  XENP019447 vhCDR2
FISYDGNNKYYADSVKG

SEQ ID NO: 4603 - protein, 9 aa, Artificial Sequence
  Description of Artificial Sequence: Synthetic peptide
  XENP019447 vhCDR3
TGWLGPFDY

SEQ ID NO: 4604 - protein, 215 aa, Artificial Sequence
  Description of Artificial Sequence: Synthetic polypeptide
  XENP019447 [CTLA-4]_H0_L0.32_Fab Light Chain
EIVLTQSPGTLSLSPGERATLSCRASQSVGSQYLAWYQQKPGQAPRLLIYGAFSRATGIPDRFSGSGSGTDFTLTISRLEPEDFAVYYCQQYGSSPWTFGQGTKVEIKRTVAAPSVFIFPPSDEQLKSGTASVVCLLNNFYPREAKVQWKVDNALQSGNSQESVTEQDSKDSTYSLSSTLTLSKADYEKHKVYACEVTHQGLSSPVTKSFNRGEC

SEQ ID NO: 4605 - protein, 108 aa, Artificial Sequence; identical to SEQ ID NO: 1697
  Description of Artificial Sequence: Synthetic polypeptide
  VL of XENP019447

SEQ ID NO: 4606 - protein, 12 aa, Artificial Sequence
  Description of Artificial Sequence: Synthetic peptide
  XENP019447 vlCDR1
RASQSVGSQYLA

SEQ ID NO: 4607 - protein, 7 aa, Artificial Sequence
  Description of Artificial Sequence: Synthetic peptide
  XENP019447 vlCDR2
GAFSRAT

SEQ ID NO: 4608 - protein, 9 aa, Artificial Sequence
  Description of Artificial Sequence: Synthetic peptide
  XENP019447 vlCDR3
QQYGSSPWT

SEQ ID NO: 4609 - protein, 221 aa, Artificial Sequence; identical to SEQ ID NO: 2919
  Description of Artificial Sequence: Synthetic polypeptide
  XENP019448 [CTLA-4]_H0_L0.33_Fab Heavy Chain

SEQ ID NO: 4610 - protein, 118 aa, Artificial Sequence; identical to SEQ ID NO: 22
  Description of Artificial Sequence: Synthetic polypeptide
  VH of XENP019448

SEQ ID NO: 4611 - protein, 5 aa, Artificial Sequence
  Description of Artificial Sequence: Synthetic peptide
  XENP019448 vhCDR1
SYTMH

SEQ ID NO: 4612 - protein, 17 aa, Artificial Sequence
  Description of Artificial Sequence: Synthetic peptide
  XENP019448 vhCDR2
FISYDGNNKYYADSVKG

SEQ ID NO: 4613 - protein, 9 aa, Artificial Sequence
  Description of Artificial Sequence: Synthetic peptide
  XENP019448 vhCDR3
TGWLGPFDY

SEQ ID NO: 4614 - protein, 215 aa, Artificial Sequence
  Description of Artificial Sequence: Synthetic polypeptide
  XENP019448 [CTLA-4]_H0_L0.33_Fab Light Chain
EIVLTQSPGTLSLSPGERATLSCRASQSVGSTYLAWYQQKPGQAPRLLIYGAFSRATGIPDRFSGSGSGTDFTLTISRLEPEDFAVYYCQQYGSSPWTFGQGTKVEIKRTVAAPSVFIFPPSDEQLKSGTASVVCLLNNFYPREAKVQWKVDNALQSGNSQESVTEQDSKDSTYSLSSTLTLSKADYEKHKVYACEVTHQGLSSPVTKSFNRGEC

SEQ ID NO: 4615 - protein, 108 aa, Artificial Sequence; identical to SEQ ID NO: 1706
  Description of Artificial Sequence: Synthetic polypeptide
  VL of XENP019448

SEQ ID NO: 4616 - protein, 12 aa, Artificial Sequence
  Description of Artificial Sequence: Synthetic peptide
  XENP019448 vlCDR1
RASQSVGSTYLA

SEQ ID NO: 4617 - protein, 7 aa, Artificial Sequence
  Description of Artificial Sequence: Synthetic peptide
  XENP019448 vlCDR2
GAFSRAT

SEQ ID NO: 4618 - protein, 9 aa, Artificial Sequence
  Description of Artificial Sequence: Synthetic peptide
  XENP019448 vlCDR3
QQYGSSPWT

SEQ ID NO: 4619 - protein, 221 aa, Artificial Sequence; identical to SEQ ID NO: 2919
  Description of Artificial Sequence: Synthetic polypeptide
  XENP019449 [CTLA-4]_H0_L0.34_Fab Heavy Chain

SEQ ID NO: 4620 - protein, 118 aa, Artificial Sequence; identical to SEQ ID NO: 22
  Description of Artificial Sequence: Synthetic polypeptide
  VH of XENP019449

SEQ ID NO: 4621 - protein, 5 aa, Artificial Sequence
  Description of Artificial Sequence: Synthetic peptide
  XENP019449 vhCDR1
SYTMH

SEQ ID NO: 4622 - protein, 17 aa, Artificial Sequence
  Description of Artificial Sequence: Synthetic peptide
  XENP019449 vhCDR2
FISYDGNNKYYADSVKG

SEQ ID NO: 4623 - protein, 9 aa, Artificial Sequence
  Description of Artificial Sequence: Synthetic peptide
  XENP019449 vhCDR3
TGWLGPFDY

SEQ ID NO: 4624 - protein, 215 aa, Artificial Sequence
  Description of Artificial Sequence: Synthetic polypeptide
  XENP019449 [CTLA-4]_H0_L0.34_Fab Light Chain
EIVLTQSPGTLSLSPGERATLSCRASQSVGSSALAWYQQKPGQAPRLLIYGAFSRATGIPDRFSGSGSGTDFTLTISRLEPEDFAVYYCQQYGSSPWTFGQGTKVEIKRTVAAPSVFIFPPSDEQLKSGTASVVCLLNNFYPREAKVQWKVDNALQSGNSQESVTEQDSKDSTYSLSSTLTLSKADYEKHKVYACEVTHQGLSSPVTKSFNRGEC

SEQ ID NO: 4625 - protein, 108 aa, Artificial Sequence; identical to SEQ ID NO: 1715
  Description of Artificial Sequence: Synthetic polypeptide
  VL of XENP019449

SEQ ID NO: 4626 - protein, 12 aa, Artificial Sequence
  Description of Artificial Sequence: Synthetic peptide
  XENP019449 vlCDR1
RASQSVGSSALA

SEQ ID NO: 4627 - protein, 7 aa, Artificial Sequence
  Description of Artificial Sequence: Synthetic peptide
  XENP019449 vlCDR2
GAFSRAT

SEQ ID NO: 4628 - protein, 9 aa, Artificial Sequence
  Description of Artificial Sequence: Synthetic peptide
  XENP019449 vlCDR3
QQYGSSPWT

SEQ ID NO: 4629 - protein, 221 aa, Artificial Sequence; identical to SEQ ID NO: 2919
  Description of Artificial Sequence: Synthetic polypeptide
  XENP019450 [CTLA-4]_H0_L0.35_Fab Heavy Chain

SEQ ID NO: 4630 - protein, 118 aa, Artificial Sequence; identical to SEQ ID NO: 22
  Description of Artificial Sequence: Synthetic polypeptide
  VH of XENP019450

SEQ ID NO: 4631 - protein, 5 aa, Artificial Sequence
  Description of Artificial Sequence: Synthetic peptide
  XENP019450 vhCDR1
SYTMH

SEQ ID NO: 4632 - protein, 17 aa, Artificial Sequence
  Description of Artificial Sequence: Synthetic peptide
  XENP019450 vhCDR2
FISYDGNNKYYADSVKG

SEQ ID NO: 4633 - protein, 9 aa, Artificial Sequence
  Description of Artificial Sequence: Synthetic peptide
  XENP019450 vhCDR3
TGWLGPFDY

SEQ ID NO: 4634 - protein, 215 aa, Artificial Sequence
  Description of Artificial Sequence: Synthetic polypeptide
  XENP019450 [CTLA-4]_H0_L0.35_Fab Light Chain
EIVLTQSPGTLSLSPGERATLSCRASQSVGSSFLAWYQQKPGQAPRLLIYGAFSRATGIPDRFSGSGSGTDFTLTISRLEPEDFAVYYCQQYGSSPWTFGQGTKVEIKRTVAAPSVFIFPPSDEQLKSGTASVVCLLNNFYPREAKVQWKVDNALQSGNSQESVTEQDSKDSTYSLSSTLTLSKADYEKHKVYACEVTHQGLSSPVTKSFNRGEC

SEQ ID NO: 4635 - protein, 108 aa, Artificial Sequence; identical to SEQ ID NO: 1724
  Description of Artificial Sequence: Synthetic polypeptide
  VL of XENP019450

SEQ ID NO: 4636 - protein, 12 aa, Artificial Sequence
  Description of Artificial Sequence: Synthetic peptide
  XENP019450 vlCDR1
RASQSVGSSFLA

SEQ ID NO: 4637 - protein, 7 aa, Artificial Sequence
  Description of Artificial Sequence: Synthetic peptide
  XENP019450 vlCDR2
GAFSRAT

SEQ ID NO: 4638 - protein, 9 aa, Artificial Sequence
  Description of Artificial Sequence: Synthetic peptide
  XENP019450 vlCDR3
QQYGSSPWT

SEQ ID NO: 4639 - protein, 221 aa, Artificial Sequence; identical to SEQ ID NO: 2919
  Description of Artificial Sequence: Synthetic polypeptide
  XENP019451 [CTLA-4]_H0_L0.36_Fab Heavy Chain

SEQ ID NO: 4640 - protein, 118 aa, Artificial Sequence; identical to SEQ ID NO: 22
  Description of Artificial Sequence: Synthetic polypeptide
  VH of XENP019451

SEQ ID NO: 4641 - protein, 5 aa, Artificial Sequence
  Description of Artificial Sequence: Synthetic peptide
  XENP019451 vhCDR1
SYTMH

SEQ ID NO: 4642 - protein, 17 aa, Artificial Sequence
  Description of Artificial Sequence: Synthetic peptide
  XENP019451 vhCDR2
FISYDGNNKYYADSVKG

SEQ ID NO: 4643 - protein, 9 aa, Artificial Sequence
  Description of Artificial Sequence: Synthetic peptide
  XENP019451 vhCDR3
TGWLGPFDY

SEQ ID NO: 4644 - protein, 215 aa, Artificial Sequence
  Description of Artificial Sequence: Synthetic polypeptide
  XENP019451 [CTLA-4]_H0_L0.36_Fab Light Chain
EIVLTQSPGTLSLSPGERATLSCRASQSVGSSHLAWYQQKPGQAPRLLIYGAFSRATGIPDRFSGSGSGTDFTLTISRLEPEDFAVYYCQQYGSSPWTFGQGTKVEIKRTVAAPSVFIFPPSDEQLKSGTASVVCLLNNFYPREAKVQWKVDNALQSGNSQESVTEQDSKDSTYSLSSTLTLSKADYEKHKVYACEVTHQGLSSPVTKSFNRGEC

SEQ ID NO: 4645 - protein, 108 aa, Artificial Sequence; identical to SEQ ID NO: 1733
  Description of Artificial Sequence: Synthetic polypeptide
  VL of XENP019451

SEQ ID NO: 4646 - protein, 12 aa, Artificial Sequence
  Description of Artificial Sequence: Synthetic peptide
  XENP019451 vlCDR1
RASQSVGSSHLA

SEQ ID NO: 4647 - protein, 7 aa, Artificial Sequence
  Description of Artificial Sequence: Synthetic peptide
  XENP019451 vlCDR2
GAFSRAT

SEQ ID NO: 4648 - protein, 9 aa, Artificial Sequence
  Description of Artificial Sequence: Synthetic peptide
  XENP019451 vlCDR3
QQYGSSPWT

SEQ ID NO: 4649 - protein, 221 aa, Artificial Sequence; identical to SEQ ID NO: 2919
  Description of Artificial Sequence: Synthetic polypeptide
  XENP019452 [CTLA-4]_H0_L0.37_Fab Heavy Chain

SEQ ID NO: 4650 - protein, 118 aa, Artificial Sequence; identical to SEQ ID NO: 22
  Description of Artificial Sequence: Synthetic polypeptide
  VH of XENP019452

SEQ ID NO: 4651 - protein, 5 aa, Artificial Sequence
  Description of Artificial Sequence: Synthetic peptide
  XENP019452 vhCDR1
SYTMH

SEQ ID NO: 4652 - protein, 17 aa, Artificial Sequence
  Description of Artificial Sequence: Synthetic peptide
  XENP019452 vhCDR2
FISYDGNNKYYADSVKG

SEQ ID NO: 4653 - protein, 9 aa, Artificial Sequence
  Description of Artificial Sequence: Synthetic peptide
  XENP019452 vhCDR3
TGWLGPFDY

SEQ ID NO: 4654 - protein, 215 aa, Artificial Sequence
  Description of Artificial Sequence: Synthetic polypeptide
  XENP019452 [CTLA-4]_H0_L0.37_Fab Light Chain
EIVLTQSPGTLSLSPGERATLSCRASQSVGSSLLAWYQQKPGQAPRLLIYGAFSRATGIPDRFSGSGSGTDFTLTISRLEPEDFAVYYCQQYGSSPWTFGQGTKVEIKRTVAAPSVFIFPPSDEQLKSGTASVVCLLNNFYPREAKVQWKVDNALQSGNSQESVTEQDSKDSTYSLSSTLTLSKADYEKHKVYACEVTHQGLSSPVTKSFNRGEC

SEQ ID NO: 4655 - protein, 108 aa, Artificial Sequence; identical to SEQ ID NO: 1742
  Description of Artificial Sequence: Synthetic polypeptide
  VL of XENP019452

SEQ ID NO: 4656 - protein, 12 aa, Artificial Sequence
  Description of Artificial Sequence: Synthetic peptide
  XENP019452 vlCDR1
RASQSVGSSLLA

SEQ ID NO: 4657 - protein, 7 aa, Artificial Sequence
  Description of Artificial Sequence: Synthetic peptide
  XENP019452 vlCDR2
GAFSRAT

SEQ ID NO: 4658 - protein, 9 aa, Artificial Sequence
  Description of Artificial Sequence: Synthetic peptide
  XENP019452 vlCDR3
QQYGSSPWT

SEQ ID NO: 4659 - protein, 221 aa, Artificial Sequence; identical to SEQ ID NO: 2919
  Description of Artificial Sequence: Synthetic polypeptide
  XENP019453 [CTLA-4]_H0_L0.38_Fab Heavy Chain

SEQ ID NO: 4660 - protein, 118 aa, Artificial Sequence; identical to SEQ ID NO: 22
  Description of Artificial Sequence: Synthetic polypeptide
  VH of XENP019453

SEQ ID NO: 4661 - protein, 5 aa, Artificial Sequence
  Description of Artificial Sequence: Synthetic peptide
  XENP019453 vhCDR1
SYTMH

SEQ ID NO: 4662 - protein, 17 aa, Artificial Sequence
  Description of Artificial Sequence: Synthetic peptide
  XENP019453 vhCDR2
FISYDGNNKYYADSVKG

SEQ ID NO: 4663 - protein, 9 aa, Artificial Sequence
  Description of Artificial Sequence: Synthetic peptide
  XENP019453 vhCDR3
TGWLGPFDY

SEQ ID NO: 4664 - protein, 215 aa, Artificial Sequence
  Description of Artificial Sequence: Synthetic polypeptide
  XENP019453 [CTLA-4]_H0_L0.38_Fab Light Chain
EIVLTQSPGTLSLSPGERATLSCRASQSVGSSNLAWYQQKPGQAPRLLIYGAFSRATGIPDRFSGSGSGTDFTLTISRLEPEDFAVYYCQQYGSSPWTFGQGTKVEIKRTVAAPSVFIFPPSDEQLKSGTASVVCLLNNFYPREAKVQWKVDNALQSGNSQESVTEQDSKDSTYSLSSTLTLSKADYEKHKVYACEVTHQGLSSPVTKSFNRGEC

SEQ ID NO: 4665 - protein, 108 aa, Artificial Sequence; identical to SEQ ID NO: 1751
  Description of Artificial Sequence: Synthetic polypeptide
  VL of XENP019453

SEQ ID NO: 4666 - protein, 12 aa, Artificial Sequence
  Description of Artificial Sequence: Synthetic peptide
  XENP019453 vlCDR1
RASQSVGSSNLA

SEQ ID NO: 4667 - protein, 7 aa, Artificial Sequence
  Description of Artificial Sequence: Synthetic peptide
  XENP019453 vlCDR2
GAFSRAT

SEQ ID NO: 4668 - protein, 9 aa, Artificial Sequence
  Description of Artificial Sequence: Synthetic peptide
  XENP019453 vlCDR3
QQYGSSPWT

SEQ ID NO: 4669 - protein, 221 aa, Artificial Sequence; identical to SEQ ID NO: 2919
  Description of Artificial Sequence: Synthetic polypeptide
  XENP019454 [CTLA-4]_H0_L0.39_Fab Heavy Chain

SEQ ID NO: 4670 - protein, 118 aa, Artificial Sequence; identical to SEQ ID NO: 22
  Description of Artificial Sequence: Synthetic polypeptide
  VH of XENP019454

SEQ ID NO: 4671 - protein, 5 aa, Artificial Sequence
  Description of Artificial Sequence: Synthetic peptide
  XENP019454 vhCDR1
SYTMH

SEQ ID NO: 4672 - protein, 17 aa, Artificial Sequence
  Description of Artificial Sequence: Synthetic peptide
  XENP019454 vhCDR2
FISYDGNNKYYADSVKG

SEQ ID NO: 4673 - protein, 9 aa, Artificial Sequence
  Description of Artificial Sequence: Synthetic peptide
  XENP019454 vhCDR3
TGWLGPFDY

SEQ ID NO: 4674 - protein, 215 aa, Artificial Sequence
  Description of Artificial Sequence: Synthetic polypeptide
  XENP019454 [CTLA-4]_H0_L0.39_Fab Light Chain
EIVLTQSPGTLSLSPGERATLSCRASQSVGSSSLAWYQQKPGQAPRLLIYGAFSRATGIPDRFSGSGSGTDFTLTISRLEPEDFAVYYCQQYGSSPWTFGQGTKVEIKRTVAAPSVFIFPPSDEQLKSGTASVVCLLNNFYPREAKVQWKVDNALQSGNSQESVTEQDSKDSTYSLSSTLTLSKADYEKHKVYACEVTHQGLSSPVTKSFNRGEC

SEQ ID NO: 4675 - protein, 108 aa, Artificial Sequence; identical to SEQ ID NO: 1760
  Description of Artificial Sequence: Synthetic polypeptide
  VL of XENP019454

SEQ ID NO: 4676 - protein, 12 aa, Artificial Sequence
  Description of Artificial Sequence: Synthetic peptide
  XENP019454 vlCDR1
RASQSVGSSSLA

SEQ ID NO: 4677 - protein, 7 aa, Artificial Sequence
  Description of Artificial Sequence: Synthetic peptide
  XENP019454 vlCDR2
GAFSRAT

SEQ ID NO: 4678 - protein, 9 aa, Artificial Sequence
  Description of Artificial Sequence: Synthetic peptide
  XENP019454 vlCDR3
QQYGSSPWT

SEQ ID NO: 4679 - protein, 221 aa, Artificial Sequence; identical to SEQ ID NO: 2919
  Description of Artificial Sequence: Synthetic polypeptide
  XENP019455 [CTLA-4]_H0_L0.40_Fab Heavy Chain

SEQ ID NO: 4680 - protein, 118 aa, Artificial Sequence; identical to SEQ ID NO: 22
  Description of Artificial Sequence: Synthetic polypeptide
  VH of XENP019455

SEQ ID NO: 4681 - protein, 5 aa, Artificial Sequence
  Description of Artificial Sequence: Synthetic peptide
  XENP019455 vhCDR1
SYTMH

SEQ ID NO: 4682 - protein, 17 aa, Artificial Sequence
  Description of Artificial Sequence: Synthetic peptide
  XENP019455 vhCDR2
FISYDGNNKYYADSVKG

SEQ ID NO: 4683 - protein, 9 aa, Artificial Sequence
  Description of Artificial Sequence: Synthetic peptide
  XENP019455 vhCDR3
TGWLGPFDY

SEQ ID NO: 4684 - protein, 215 aa, Artificial Sequence
  Description of Artificial Sequence: Synthetic polypeptide
  XENP019455 [CTLA-4]_H0_L0.40_Fab Light Chain
EIVLTQSPGTLSLSPGERATLSCRASQSVGSSVLAWYQQKPGQAPRLLIYGAFSRATGIPDRFSGSGSGTDFTLTISRLEPEDFAVYYCQQYGSSPWTFGQGTKVEIKRTVAAPSVFIFPPSDEQLKSGTASVVCLLNNFYPREAKVQWKVDNALQSGNSQESVTEQDSKDSTYSLSSTLTLSKADYEKHKVYACEVTHQGLSSPVTKSFNRGEC

SEQ ID NO: 4685 - protein, 108 aa, Artificial Sequence; identical to SEQ ID NO: 1769
  Description of Artificial Sequence: Synthetic polypeptide
  VL of XENP019455

SEQ ID NO: 4686 - protein, 12 aa, Artificial Sequence
  Description of Artificial Sequence: Synthetic peptide
  XENP019455 vlCDR1
RASQSVGSSVLA

SEQ ID NO: 4687 - protein, 7 aa, Artificial Sequence
  Description of Artificial Sequence: Synthetic peptide
  XENP019455 vlCDR2
GAFSRAT

SEQ ID NO: 4688 - protein, 9 aa, Artificial Sequence
  Description of Artificial Sequence: Synthetic peptide
  XENP019455 vlCDR3
QQYGSSPWT

SEQ ID NO: 4689 - protein, 221 aa, Artificial Sequence; identical to SEQ ID NO: 2919
  Description of Artificial Sequence: Synthetic polypeptide
  XENP019456 [CTLA-4]_H0_L0.41_Fab Heavy Chain

SEQ ID NO: 4690 - protein, 118 aa, Artificial Sequence; identical to SEQ ID NO: 22
  Description of Artificial Sequence: Synthetic polypeptide
  VH of XENP019456

SEQ ID NO: 4691 - protein, 5 aa, Artificial Sequence
  Description of Artificial Sequence: Synthetic peptide
  XENP019456 vhCDR1
SYTMH

SEQ ID NO: 4692 - protein, 17 aa, Artificial Sequence
  Description of Artificial Sequence: Synthetic peptide
  XENP019456 vhCDR2
FISYDGNNKYYADSVKG

SEQ ID NO: 4693 - protein, 9 aa, Artificial Sequence
  Description of Artificial Sequence: Synthetic peptide
  XENP019456 vhCDR3
TGWLGPFDY

SEQ ID NO: 4694 - protein, 215 aa, Artificial Sequence
  Description of Artificial Sequence: Synthetic polypeptide
  XENP019456 [CTLA-4]_H0_L0.41_Fab Light Chain
EIVLTQSPGTLSLSPGERATLSCRASQSVGSSYMAWYQQKPGQAPRLLIYGAFSRATGIPDRFSGSGSGTDFTLTISRLEPEDFAVYYCQQYGSSPWTFGQGTKVEIKRTVAAPSVFIFPPSDEQLKSGTASVVCLLNNFYPREAKVQWKVDNALQSGNSQESVTEQDSKDSTYSLSSTLTLSKADYEKHKVYACEVTHQGLSSPVTKSFNRGEC

SEQ ID NO: 4695 - protein, 108 aa, Artificial Sequence; identical to SEQ ID NO: 1778
  Description of Artificial Sequence: Synthetic polypeptide
  VL of XENP019456

SEQ ID NO: 4696 - protein, 12 aa, Artificial Sequence
  Description of Artificial Sequence: Synthetic peptide
  XENP019456 vlCDR1
RASQSVGSSYMA

SEQ ID NO: 4697 - protein, 7 aa, Artificial Sequence
  Description of Artificial Sequence: Synthetic peptide
  XENP019456 vlCDR2
GAFSRAT

SEQ ID NO: 4698 - protein, 9 aa, Artificial Sequence
  Description of Artificial Sequence: Synthetic peptide
  XENP019456 vlCDR3
QQYGSSPWT

SEQ ID NO: 4699 - protein, 221 aa, Artificial Sequence; identical to SEQ ID NO: 2919
  Description of Artificial Sequence: Synthetic polypeptide
  XENP019457 [CTLA-4]_H0_L0.42_Fab Heavy Chain

SEQ ID NO: 4700 - protein, 118 aa, Artificial Sequence; identical to SEQ ID NO: 22
  Description of Artificial Sequence: Synthetic polypeptide
  VH of XENP019457

SEQ ID NO: 4701 - protein, 5 aa, Artificial Sequence
  Description of Artificial Sequence: Synthetic peptide
  XENP019457 vhCDR1
SYTMH

SEQ ID NO: 4702 - protein, 17 aa, Artificial Sequence
  Description of Artificial Sequence: Synthetic peptide
  XENP019457 vhCDR2
FISYDGNNKYYADSVKG

SEQ ID NO: 4703 - protein, 9 aa, Artificial Sequence
  Description of Artificial Sequence: Synthetic peptide
  XENP019457 vhCDR3
TGWLGPFDY

SEQ ID NO: 4704 - protein, 215 aa, Artificial Sequence
  Description of Artificial Sequence: Synthetic polypeptide
  XENP019457 [CTLA-4]_H0_L0.42_Fab Light Chain
EIVLTQSPGTLSLSPGERATLSCRASQSVGSSYLDWYQQKPGQAPRLLIYGAFSRATGIPDRFSGSGSGTDFTLTISRLEPEDFAVYYCQQYGSSPWTFGQGTKVEIKRTVAAPSVFIFPPSDEQLKSGTASVVCLLNNFYPREAKVQWKVDNALQSGNSQESVTEQDSKDSTYSLSSTLTLSKADYEKHKVYACEVTHQGLSSPVTKSFNRGEC

SEQ ID NO: 4705 - protein, 108 aa, Artificial Sequence; identical to SEQ ID NO: 1787
  Description of Artificial Sequence: Synthetic polypeptide
  VL of XENP019457

SEQ ID NO: 4706 - protein, 12 aa, Artificial Sequence
  Description of Artificial Sequence: Synthetic peptide
  XENP019457 vlCDR1
RASQSVGSSYLD

SEQ ID NO: 4707 - protein, 7 aa, Artificial Sequence
  Description of Artificial Sequence: Synthetic peptide
  XENP019457 vlCDR2
GAFSRAT

SEQ ID NO: 4708 - protein, 9 aa, Artificial Sequence
  Description of Artificial Sequence: Synthetic peptide
  XENP019457 vlCDR3
QQYGSSPWT

SEQ ID NO: 4709 - protein, 221 aa, Artificial Sequence; identical to SEQ ID NO: 2919
  Description of Artificial Sequence: Synthetic polypeptide
  XENP019458 [CTLA-4]_H0_L0.43_Fab Heavy Chain

SEQ ID NO: 4710 - protein, 118 aa, Artificial Sequence; identical to SEQ ID NO: 22
  Description of Artificial Sequence: Synthetic polypeptide
  VH of XENP019458

SEQ ID NO: 4711 - protein, 5 aa, Artificial Sequence
  Description of Artificial Sequence: Synthetic peptide
  XENP019458 vhCDR1
SYTMH

SEQ ID NO: 4712 - protein, 17 aa, Artificial Sequence
  Description of Artificial Sequence: Synthetic peptide
  XENP019458 vhCDR2
FISYDGNNKYYADSVKG

SEQ ID NO: 4713 - protein, 9 aa, Artificial Sequence
  Description of Artificial Sequence: Synthetic peptide
  XENP019458 vhCDR3
TGWLGPFDY

SEQ ID NO: 4714 - protein, 215 aa, Artificial Sequence
  Description of Artificial Sequence: Synthetic polypeptide
  XENP019458 [CTLA-4]_H0_L0.43_Fab Light Chain
EIVLTQSPGTLSLSPGERATLSCRASQSVGSSYLDWYQQKPGQAPRLLIYGAFSRATGIPDRFSGSGSGTDFTLTISRLEPEDFAVYYCKQYGSSPWTFGQGTKVEIKRTVAAPSVFIFPPSDEQLKSGTASVVCLLNNFYPREAKVQWKVDNALQSGNSQESVTEQDSKDSTYSLSSTLTLSKADYEKHKVYACEVTHQGLSSPVTKSFNRGEC

SEQ ID NO: 4715 - protein, 108 aa, Artificial Sequence; identical to SEQ ID NO: 1796
  Description of Artificial Sequence: Synthetic polypeptide
  VL of XENP019458

SEQ ID NO: 4716 - protein, 12 aa, Artificial Sequence
  Description of Artificial Sequence: Synthetic peptide
  XENP019458 vlCDR1
RASQSVGSSYLD

SEQ ID NO: 4717 - protein, 7 aa, Artificial Sequence
  Description of Artificial Sequence: Synthetic peptide
  XENP019458 vlCDR2
GAFSRAT

SEQ ID NO: 4718 - protein, 9 aa, Artificial Sequence
  Description of Artificial Sequence: Synthetic peptide
  XENP019458 vlCDR3
KQYGSSPWT

SEQ ID NO: 4719 - protein, 221 aa, Artificial Sequence; identical to SEQ ID NO: 2919
  Description of Artificial Sequence: Synthetic polypeptide
  XENP019459 [CTLA-4]_H0_L0.44_Fab Heavy Chain

SEQ ID NO: 4720 - protein, 118 aa, Artificial Sequence; identical to SEQ ID NO: 22
  Description of Artificial Sequence: Synthetic polypeptide
  VH of XENP019459

SEQ ID NO: 4721 - protein, 5 aa, Artificial Sequence
  Description of Artificial Sequence: Synthetic peptide
  XENP019459 vhCDR1
SYTMH

SEQ ID NO: 4722 - protein, 17 aa, Artificial Sequence
  Description of Artificial Sequence: Synthetic peptide
  XENP019459 vhCDR2
FISYDGNNKYYADSVKG

SEQ ID NO: 4723 - protein, 9 aa, Artificial Sequence
  Description of Artificial Sequence: Synthetic peptide
  XENP019459 vhCDR3
TGWLGPFDY

SEQ ID NO: 4724 - protein, 215 aa, Artificial Sequence
  Description of Artificial Sequence: Synthetic polypeptide
  XENP019459 [CTLA-4]_H0_L0.44_Fab Light Chain
EIVLTQSPGTLSLSPGERATLSCRASQSVGSSYLSWYQQKPGQAPRLLIYGAFSRATGIPDRFSGSGSGTDFTLTISRLEPEDFAVYYCQQYGSSPWTFGQGTKVEIKRTVAAPSVFIFPPSDEQLKSGTASVVCLLNNFYPREAKVQWKVDNALQSGNSQESVTEQDSKDSTYSLSSTLTLSKADYEKHKVYACEVTHQGLSSPVTKSFNRGEC

SEQ ID NO: 4725 - protein, 108 aa, Artificial Sequence; identical to SEQ ID NO: 1805
  Description of Artificial Sequence: Synthetic polypeptide
  VL of XENP019459

SEQ ID NO: 4726 - protein, 12 aa, Artificial Sequence
  Description of Artificial Sequence: Synthetic peptide
  XENP019459 vlCDR1
RASQSVGSSYLS

SEQ ID NO: 4727 - protein, 7 aa, Artificial Sequence
  Description of Artificial Sequence: Synthetic peptide
  XENP019459 vlCDR2
GAFSRAT

SEQ ID NO: 4728 - protein, 9 aa, Artificial Sequence
  Description of Artificial Sequence: Synthetic peptide
  XENP019459 vlCDR3
QQYGSSPWT

SEQ ID NO: 4729 - protein, 221 aa, Artificial Sequence; identical to SEQ ID NO: 2919
  Description of Artificial Sequence: Synthetic polypeptide
  XENP019460 [CTLA-4]_H0_L0.45_Fab Heavy Chain

SEQ ID NO: 4730 - protein, 118 aa, Artificial Sequence; identical to SEQ ID NO: 22
  Description of Artificial Sequence: Synthetic polypeptide
  VH of XENP019460

SEQ ID NO: 4731 - protein, 5 aa, Artificial Sequence
  Description of Artificial Sequence: Synthetic peptide
  XENP019460 vhCDR1
SYTMH

SEQ ID NO: 4732 - protein, 17 aa, Artificial Sequence
  Description of Artificial Sequence: Synthetic peptide
  XENP019460 vhCDR2
FISYDGNNKYYADSVKG

SEQ ID NO: 4733 - protein, 9 aa, Artificial Sequence
  Description of Artificial Sequence: Synthetic peptide
  XENP019460 vhCDR3
TGWLGPFDY

SEQ ID NO: 4734 - protein, 215 aa, Artificial Sequence
  Description of Artificial Sequence: Synthetic polypeptide
  XENP019460 [CTLA-4]_H0_L0.45_Fab Light Chain
EIVLTQSPGTLSLSPGERATLSCRASQSVGSSYLTWYQQKPGQAPRLLIYGAFSRATGIPDRFSGSGSGTDFTLTISRLEPEDFAVYYCQQYGSSPWTFGQGTKVEIKRTVAAPSVFIFPPSDEQLKSGTASVVCLLNNFYPREAKVQWKVDNALQSGNSQESVTEQDSKDSTYSLSSTLTLSKADYEKHKVYACEVTHQGLSSPVTKSFNRGEC

SEQ ID NO: 4735 - protein, 108 aa, Artificial Sequence; identical to SEQ ID NO: 1814
  Description of Artificial Sequence: Synthetic polypeptide
  VL of XENP019460

SEQ ID NO: 4736 - protein, 12 aa, Artificial Sequence
  Description of Artificial Sequence: Synthetic peptide
  XENP019460 vlCDR1
RASQSVGSSYLT

SEQ ID NO: 4737 - protein, 7 aa, Artificial Sequence
  Description of Artificial Sequence: Synthetic peptide
  XENP019460 vlCDR2
GAFSRAT

SEQ ID NO: 4738 - protein, 9 aa, Artificial Sequence
  Description of Artificial Sequence: Synthetic peptide
  XENP019460 vlCDR3
QQYGSSPWT

SEQ ID NO: 4739 - protein, 221 aa, Artificial Sequence; identical to SEQ ID NO: 2919
  Description of Artificial Sequence: Synthetic polypeptide
  XENP019461 [CTLA-4]_H0_L0.46_Fab Heavy Chain

SEQ ID NO: 4740 - protein, 118 aa, Artificial Sequence; identical to SEQ ID NO: 22
  Description of Artificial Sequence: Synthetic polypeptide
  VH of XENP019461

SEQ ID NO: 4741 - protein, 5 aa, Artificial Sequence
  Description of Artificial Sequence: Synthetic peptide
  XENP019461 vhCDR1
SYTMH

SEQ ID NO: 4742 - protein, 17 aa, Artificial Sequence
  Description of Artificial Sequence: Synthetic peptide
  XENP019461 vhCDR2
FISYDGNNKYYADSVKG

SEQ ID NO: 4743 - protein, 9 aa, Artificial Sequence
  Description of Artificial Sequence: Synthetic peptide
  XENP019461 vhCDR3
TGWLGPFDY

SEQ ID NO: 4744 - protein, 215 aa, Artificial Sequence
  Description of Artificial Sequence: Synthetic polypeptide
  XENP019461 [CTLA-4]_H0_L0.46_Fab Light Chain
EIVLTQSPGTLSLSPGERATLSCRASQSVGSSYLAWYEQKPGQAPRLLIYGAFSRATGIPDRFSGSGSGTDFTLTISRLEPEDFAVYYCQQYGSSPWTFGQGTKVEIKRTVAAPSVFIFPPSDEQLKSGTASVVCLLNNFYPREAKVQWKVDNALQSGNSQESVTEQDSKDSTYSLSSTLTLSKADYEKHKVYACEVTHQGLSSPVTKSFNRGEC

SEQ ID NO: 4745 - protein, 108 aa, Artificial Sequence; identical to SEQ ID NO: 1823
  Description of Artificial Sequence: Synthetic polypeptide
  VL of XENP019461

SEQ ID NO: 4746 - protein, 12 aa, Artificial Sequence
  Description of Artificial Sequence: Synthetic peptide
  XENP019461 vlCDR1
RASQSVGSSYLA

SEQ ID NO: 4747 - protein, 7 aa, Artificial Sequence
  Description of Artificial Sequence: Synthetic peptide
  XENP019461 vlCDR2
GAFSRAT

SEQ ID NO: 4748 - protein, 9 aa, Artificial Sequence
  Description of Artificial Sequence: Synthetic peptide
  XENP019461 vlCDR3
QQYGSSPWT

SEQ ID NO: 4749 - protein, 221 aa, Artificial Sequence; identical to SEQ ID NO: 2919
  Description of Artificial Sequence: Synthetic polypeptide
  XENP019462 [CTLA-4]_H0_L0.47_Fab Heavy Chain

SEQ ID NO: 4750 - protein, 118 aa, Artificial Sequence; identical to SEQ ID NO: 22
  Description of Artificial Sequence: Synthetic polypeptide
  VH of XENP019462

SEQ ID NO: 4751 - protein, 5 aa, Artificial Sequence
  Description of Artificial Sequence: Synthetic peptide
  XENP019462 vhCDR1
SYTMH

SEQ ID NO: 4752 - protein, 17 aa, Artificial Sequence
  Description of Artificial Sequence: Synthetic peptide
  XENP019462 vhCDR2
FISYDGNNKYYADSVKG

SEQ ID NO: 4753 - protein, 9 aa, Artificial Sequence
  Description of Artificial Sequence: Synthetic peptide
  XENP019462 vhCDR3
TGWLGPFDY

SEQ ID NO: 4754 - protein, 215 aa, Artificial Sequence
  Description of Artificial Sequence: Synthetic polypeptide
  XENP019462 [CTLA-4]_H0_L0.47_Fab Light Chain
EIVLTQSPGTLSLSPGERATLSCRASQSVGSSYLAWYLQKPGQAPRLLIYGAFSRATGIPDRFSGSGSGTDFTLTISRLEPEDFAVYYCQQYGSSPWTFGQGTKVEIKRTVAAPSVFIFPPSDEQLKSGTASVVCLLNNFYPREAKVQWKVDNALQSGNSQESVTEQDSKDSTYSLSSTLTLSKADYEKHKVYACEVTHQGLSSPVTKSFNRGEC

SEQ ID NO: 4755 - protein, 108 aa, Artificial Sequence; identical to SEQ ID NO: 1832
  Description of Artificial Sequence: Synthetic polypeptide
  VL of XENP019462

SEQ ID NO: 4756 - protein, 12 aa, Artificial Sequence
  Description of Artificial Sequence: Synthetic peptide
  XENP019462 vlCDR1
RASQSVGSSYLA

SEQ ID NO: 4757 - protein, 7 aa, Artificial Sequence
  Description of Artificial Sequence: Synthetic peptide
  XENP019462 vlCDR2
GAFSRAT

SEQ ID NO: 4758 - protein, 9 aa, Artificial Sequence
  Description of Artificial Sequence: Synthetic peptide
  XENP019462 vlCDR3
QQYGSSPWT

SEQ ID NO: 4759 - protein, 221 aa, Artificial Sequence; identical to SEQ ID NO: 2919
  Description of Artificial Sequence: Synthetic polypeptide
  XENP019463 [CTLA-4]_H0_L0.48_Fab Heavy Chain

SEQ ID NO: 4760 - protein, 118 aa, Artificial Sequence; identical to SEQ ID NO: 22
  Description of Artificial Sequence: Synthetic polypeptide
  VH of XENP019463

SEQ ID NO: 4761 - protein, 5 aa, Artificial Sequence
  Description of Artificial Sequence: Synthetic peptide
  XENP019463 vhCDR1
SYTMH

SEQ ID NO: 4762 - protein, 17 aa, Artificial Sequence
  Description of Artificial Sequence: Synthetic peptide
  XENP019463 vhCDR2
FISYDGNNKYYADSVKG

SEQ ID NO: 4763 - protein, 9 aa, Artificial Sequence
  Description of Artificial Sequence: Synthetic peptide
  XENP019463 vhCDR3
TGWLGPFDY

SEQ ID NO: 4764 - protein, 215 aa, Artificial Sequence
  Description of Artificial Sequence: Synthetic polypeptide
  XENP019463 [CTLA-4]_H0_L0.48_Fab Light Chain
EIVLTQSPGTLSLSPGERATLSCRASQSVGSSYLAWYRQKPGQAPRLLIYGAFSRATGIPDRFSGSGSGTDFTLTISRLEPEDFAVYYCQQYGSSPWTFGQGTKVEIKRTVAAPSVFIFPPSDEQLKSGTASVVCLLNNFYPREAKVQWKVDNALQSGNSQESVTEQDSKDSTYSLSSTLTLSKADYEKHKVYACEVTHQGLSSPVTKSFNRGEC

SEQ ID NO: 4765 - protein, 108 aa, Artificial Sequence; identical to SEQ ID NO: 1841
  Description of Artificial Sequence: Synthetic polypeptide
  VL of XENP019463

SEQ ID NO: 4766 - protein, 12 aa, Artificial Sequence
  Description of Artificial Sequence: Synthetic peptide
  XENP019463 vlCDR1
RASQSVGSSYLA

SEQ ID NO: 4767 - protein, 7 aa, Artificial Sequence
  Description of Artificial Sequence: Synthetic peptide
  XENP019463 vlCDR2
GAFSRAT

SEQ ID NO: 4768 - protein, 9 aa, Artificial Sequence
  Description of Artificial Sequence: Synthetic peptide
  XENP019463 vlCDR3
QQYGSSPWT

SEQ ID NO: 4769 - protein, 221 aa, Artificial Sequence; identical to SEQ ID NO: 2919
  Description of Artificial Sequence: Synthetic polypeptide
  XENP019464 [CTLA-4]_H0_L0.49_Fab Heavy Chain

SEQ ID NO: 4770 - protein, 118 aa, Artificial Sequence; identical to SEQ ID NO: 22
  Description of Artificial Sequence: Synthetic polypeptide
  VH of XENP019464

SEQ ID NO: 4771 - protein, 5 aa, Artificial Sequence
  Description of Artificial Sequence: Synthetic peptide
  XENP019464 vhCDR1
SYTMH

SEQ ID NO: 4772 - protein, 17 aa, Artificial Sequence
  Description of Artificial Sequence: Synthetic peptide
  XENP019464 vhCDR2
FISYDGNNKYYADSVKG

SEQ ID NO: 4773 - protein, 9 aa, Artificial Sequence
  Description of Artificial Sequence: Synthetic peptide
  XENP019464 vhCDR3
TGWLGPFDY

SEQ ID NO: 4774 - protein, 215 aa, Artificial Sequence
  Description of Artificial Sequence: Synthetic polypeptide
  XENP019464 [CTLA-4]_H0_L0.49_Fab Light Chain
EIVLTQSPGTLSLSPGERATLSCRASQSVGSSYLAWYRQKPGQAPELLIYGAFSRATGIPDRFSGSGSGTDFTLTISRLEPEDFAVYYCQQYGSSPWTFGQGTKVEIKRTVAAPSVFIFPPSDEQLKSGTASVVCLLNNFYPREAKVQWKVDNALQSGNSQESVTEQDSKDSTYSLSSTLTLSKADYEKHKVYACEVTHQGLSSPVTKSFNRGEC

SEQ ID NO: 4775 - protein, 108 aa, Artificial Sequence; identical to SEQ ID NO: 1850
  Description of Artificial Sequence: Synthetic polypeptide
  VL of XENP019464

SEQ ID NO: 4776 - protein, 12 aa, Artificial Sequence
  Description of Artificial Sequence: Synthetic peptide
  XENP019464 vlCDR1
RASQSVGSSYLA

SEQ ID NO: 4777 - protein, 7 aa, Artificial Sequence
  Description of Artificial Sequence: Synthetic peptide
  XENP019464 vlCDR2
GAFSRAT

SEQ ID NO: 4778 - protein, 9 aa, Artificial Sequence
  Description of Artificial Sequence: Synthetic peptide
  XENP019464 vlCDR3
QQYGSSPWT

SEQ ID NO: 4779 - protein, 221 aa, Artificial Sequence; identical to SEQ ID NO: 2919
  Description of Artificial Sequence: Synthetic polypeptide
  XENP019465 [CTLA-4]_H0_L0.50_Fab Heavy Chain

SEQ ID NO: 4780 - protein, 118 aa, Artificial Sequence; identical to SEQ ID NO: 22
  Description of Artificial Sequence: Synthetic polypeptide
  VH of XENP019465

SEQ ID NO: 4781 - protein, 5 aa, Artificial Sequence
  Description of Artificial Sequence: Synthetic peptide
  XENP019465 vhCDR1
SYTMH

SEQ ID NO: 4782 - protein, 17 aa, Artificial Sequence
  Description of Artificial Sequence: Synthetic peptide
  XENP019465 vhCDR2
FISYDGNNKYYADSVKG

SEQ ID NO: 4783 - protein, 9 aa, Artificial Sequence
  Description of Artificial Sequence: Synthetic peptide
  XENP019465 vhCDR3
TGWLGPFDY

SEQ ID NO: 4784 - protein, 215 aa, Artificial Sequence
  Description of Artificial Sequence: Synthetic polypeptide
  XENP019465 [CTLA-4]_H0_L0.50_Fab Light Chain
EIVLTQSPGTLSLSPGERATLSCRASQSVGSSYLAWYQEKPGQAPRLLIYGAFSRATGIPDRFSGSGSGTDFTLTISRLEPEDFAVYYCQQYGSSPWTFGQGTKVEIKRTVAAPSVFIFPPSDEQLKSGTASVVCLLNNFYPREAKVQWKVDNALQSGNSQESVTEQDSKDSTYSLSSTLTLSKADYEKHKVYACEVTHQGLSSPVTKSFNRGEC

SEQ ID NO: 4785 - protein, 108 aa, Artificial Sequence; identical to SEQ ID NO: 32
  Description of Artificial Sequence: Synthetic polypeptide
  VL of XENP019465

SEQ ID NO: 4786 - protein, 12 aa, Artificial Sequence
  Description of Artificial Sequence: Synthetic peptide
  XENP019465 vlCDR1
RASQSVGSSYLA

SEQ ID NO: 4787 - protein, 7 aa, Artificial Sequence
  Description of Artificial Sequence: Synthetic peptide
  XENP019465 vlCDR2
GAFSRAT

SEQ ID NO: 4788 - protein, 9 aa, Artificial Sequence
  Description of Artificial Sequence: Synthetic peptide
  XENP019465 vlCDR3
QQYGSSPWT

SEQ ID NO: 4789 - protein, 221 aa, Artificial Sequence; identical to SEQ ID NO: 2919
  Description of Artificial Sequence: Synthetic polypeptide
  XENP019466 [CTLA-4]_H0_L0.51_Fab Heavy Chain

SEQ ID NO: 4790 - protein, 118 aa, Artificial Sequence; identical to SEQ ID NO: 22
  Description of Artificial Sequence: Synthetic polypeptide
  VH of XENP019466

SEQ ID NO: 4791 - protein, 5 aa, Artificial Sequence
  Description of Artificial Sequence: Synthetic peptide
  XENP019466 vhCDR1
SYTMH

SEQ ID NO: 4792 - protein, 17 aa, Artificial Sequence
  Description of Artificial Sequence: Synthetic peptide
  XENP019466 vhCDR2
FISYDGNNKYYADSVKG

SEQ ID NO: 4793 - protein, 9 aa, Artificial Sequence
  Description of Artificial Sequence: Synthetic peptide
  XENP019466 vhCDR3
TGWLGPFDY

SEQ ID NO: 4794 - protein, 215 aa, Artificial Sequence
  Description of Artificial Sequence: Synthetic polypeptide
  XENP019466 [CTLA-4]_H0_L0.51_Fab Light Chain
EIVLTQSPGTLSLSPGERATLSCRASQSVGSSYLAWYQQKPDQAPRLLIYGAFSRATGIPDRFSGSGSGTDFTLTISRLEPEDFAVYYCQQYGSSPWTFGQGTKVEIKRTVAAPSVFIFPPSDEQLKSGTASVVCLLNNFYPREAKVQWKVDNALQSGNSQESVTEQDSKDSTYSLSSTLTLSKADYEKHKVYACEVTHQGLSSPVTKSFNRGEC

SEQ ID NO: 4795 - protein, 108 aa, Artificial Sequence; identical to SEQ ID NO: 41
  Description of Artificial Sequence: Synthetic polypeptide
  VL of XENP019466

SEQ ID NO: 4796 - protein, 12 aa, Artificial Sequence
  Description of Artificial Sequence: Synthetic peptide
  XENP019466 vlCDR1
RASQSVGSSYLA

SEQ ID NO: 4797 - protein, 7 aa, Artificial Sequence
  Description of Artificial Sequence: Synthetic peptide
  XENP019466 vlCDR2
GAFSRAT

SEQ ID NO: 4798 - protein, 9 aa, Artificial Sequence
  Description of Artificial Sequence: Synthetic peptide
  XENP019466 vlCDR3
QQYGSSPWT

SEQ ID NO: 4799 - protein, 221 aa, Artificial Sequence; identical to SEQ ID NO: 2919
  Description of Artificial Sequence: Synthetic polypeptide
  XENP019467 [CTLA-4]_H0_L0.52_Fab Heavy Chain

SEQ ID NO: 4800 - protein, 118 aa, Artificial Sequence; identical to SEQ ID NO: 22
  Description of Artificial Sequence: Synthetic polypeptide
  VH of XENP019467

SEQ ID NO: 4801 - protein, 5 aa, Artificial Sequence
  Description of Artificial Sequence: Synthetic peptide
  XENP019467 vhCDR1
SYTMH

SEQ ID NO: 4802 - protein, 17 aa, Artificial Sequence
  Description of Artificial Sequence: Synthetic peptide
  XENP019467 vhCDR2
FISYDGNNKYYADSVKG

SEQ ID NO: 4803 - protein, 9 aa, Artificial Sequence
  Description of Artificial Sequence: Synthetic peptide
  XENP019467 vhCDR3
TGWLGPFDY

SEQ ID NO: 4804 - protein, 215 aa, Artificial Sequence
  Description of Artificial Sequence: Synthetic polypeptide
  XENP019467 [CTLA-4]_H0_L0.52_Fab Light Chain
EIVLTQSPGTLSLSPGERATLSCRASQSVGSSYLAWYQQKPEQAPRLLIYGAFSRATGIPDRFSGSGSGTDFTLTISRLEPEDFAVYYCQQYGSSPWTFGQGTKVEIKRTVAAPSVFIFPPSDEQLKSGTASVVCLLNNFYPREAKVQWKVDNALQSGNSQESVTEQDSKDSTYSLSSTLTLSKADYEKHKVYACEVTHQGLSSPVTKSFNRGEC

SEQ ID NO: 4805 - protein, 108 aa, Artificial Sequence; identical to SEQ ID NO: 1877
  Description of Artificial Sequence: Synthetic polypeptide
  VL of XENP019467

SEQ ID NO: 4806 - protein, 12 aa, Artificial Sequence
  Description of Artificial Sequence: Synthetic peptide
  XENP019467 vlCDR1
RASQSVGSSYLA

SEQ ID NO: 4807 - protein, 7 aa, Artificial Sequence
  Description of Artificial Sequence: Synthetic peptide
  XENP019467 vlCDR2
GAFSRAT

SEQ ID NO: 4808 - protein, 9 aa, Artificial Sequence
  Description of Artificial Sequence: Synthetic peptide
  XENP019467 vlCDR3
QQYGSSPWT

SEQ ID NO: 4809 - protein, 221 aa, Artificial Sequence; identical to SEQ ID NO: 2919
  Description of Artificial Sequence: Synthetic polypeptide
  XENP019468 [CTLA-4]_H0_L0.53_Fab Heavy Chain

SEQ ID NO: 4810 - protein, 118 aa, Artificial Sequence; identical to SEQ ID NO: 22
  Description of Artificial Sequence: Synthetic polypeptide
  VH of XENP019468

SEQ ID NO: 4811 - protein, 5 aa, Artificial Sequence
  Description of Artificial Sequence: Synthetic peptide
  XENP019468 vhCDR1
SYTMH

SEQ ID NO: 4812 - protein, 17 aa, Artificial Sequence
  Description of Artificial Sequence: Synthetic peptide
  XENP019468 vhCDR2
FISYDGNNKYYADSVKG

SEQ ID NO: 4813 - protein, 9 aa, Artificial Sequence
  Description of Artificial Sequence: Synthetic peptide
  XENP019468 vhCDR3
TGWLGPFDY

SEQ ID NO: 4814 - protein, 215 aa, Artificial Sequence
  Description of Artificial Sequence: Synthetic polypeptide
  XENP019468 [CTLA-4]_H0_L0.53_Fab Light Chain
EIVLTQSPGTLSLSPGERATLSCRASQSVGSSYLAWYQQKPGEAPRLLIYGAFSRATGIPDRFSGSGSGTDFTLTISRLEPEDFAVYYCQQYGSSPWTFGQGTKVEIKRTVAAPSVFIFPPSDEQLKSGTASVVCLLNNFYPREAKVQWKVDNALQSGNSQESVTEQDSKDSTYSLSSTLTLSKADYEKHKVYACEVTHQGLSSPVTKSFNRGEC

SEQ ID NO: 4815 - protein, 108 aa, Artificial Sequence; identical to SEQ ID NO: 77
  Description of Artificial Sequence: Synthetic polypeptide
  VL of XENP019468

SEQ ID NO: 4816 - protein, 12 aa, Artificial Sequence
  Description of Artificial Sequence: Synthetic peptide
  XENP019468 vlCDR1
RASQSVGSSYLA

SEQ ID NO: 4817 - protein, 7 aa, Artificial Sequence
  Description of Artificial Sequence: Synthetic peptide
  XENP019468 vlCDR2
GAFSRAT

SEQ ID NO: 4818 - protein, 9 aa, Artificial Sequence
  Description of Artificial Sequence: Synthetic peptide
  XENP019468 vlCDR3
QQYGSSPWT

SEQ ID NO: 4819 - protein, 221 aa, Artificial Sequence; identical to SEQ ID NO: 2919
  Description of Artificial Sequence: Synthetic polypeptide
  XENP019469 [CTLA-4]_H0_L0.54_Fab Heavy Chain

SEQ ID NO: 4820 - protein, 118 aa, Artificial Sequence; identical to SEQ ID NO: 22
  Description of Artificial Sequence: Synthetic polypeptide
  VH of XENP019469

SEQ ID NO: 4821 - protein, 5 aa, Artificial Sequence
  Description of Artificial Sequence: Synthetic peptide
  XENP019469 vhCDR1
SYTMH

SEQ ID NO: 4822 - protein, 17 aa, Artificial Sequence
  Description of Artificial Sequence: Synthetic peptide
  XENP019469 vhCDR2
FISYDGNNKYYADSVKG

SEQ ID NO: 4823 - protein, 9 aa, Artificial Sequence
  Description of Artificial Sequence: Synthetic peptide
  XENP019469 vhCDR3
TGWLGPFDY

SEQ ID NO: 4824 - protein, 215 aa, Artificial Sequence
  Description of Artificial Sequence: Synthetic polypeptide
  XENP019469 [CTLA-4]_H0_L0.54_Fab Light Chain
EIVLTQSPGTLSLSPGERATLSCRASQSVGSSYLAWYQQKPGKAPRLLIYGAFSRATGIPDRFSGSGSGTDFTLTISRLEPEDFAVYYCQQYGSSPWTFGQGTKVEIKRTVAAPSVFIFPPSDEQLKSGTASVVCLLNNFYPREAKVQWKVDNALQSGNSQESVTEQDSKDSTYSLSSTLTLSKADYEKHKVYACEVTHQGLSSPVTKSFNRGEC

SEQ ID NO: 4825 - protein, 108 aa, Artificial Sequence; identical to SEQ ID NO: 1895
  Description of Artificial Sequence: Synthetic polypeptide
  VL of XENP019469

SEQ ID NO: 4826 - protein, 12 aa, Artificial Sequence
  Description of Artificial Sequence: Synthetic peptide
  XENP019469 vlCDR1
RASQSVGSSYLA

SEQ ID NO: 4827 - protein, 7 aa, Artificial Sequence
  Description of Artificial Sequence: Synthetic peptide
  XENP019469 vlCDR2
GAFSRAT

SEQ ID NO: 4828 - protein, 9 aa, Artificial Sequence
  Description of Artificial Sequence: Synthetic peptide
  XENP019469 vlCDR3
QQYGSSPWT

SEQ ID NO: 4829 - protein, 221 aa, Artificial Sequence; identical to SEQ ID NO: 2919
  Description of Artificial Sequence: Synthetic polypeptide
  XENP019470 [CTLA-4]_H0_L0.55_Fab Heavy Chain

SEQ ID NO: 4830 - protein, 118 aa, Artificial Sequence; identical to SEQ ID NO: 22
  Description of Artificial Sequence: Synthetic polypeptide
  VH of XENP019470

SEQ ID NO: 4831 - protein, 5 aa, Artificial Sequence
  Description of Artificial Sequence: Synthetic peptide
  XENP019470 vhCDR1
SYTMH

SEQ ID NO: 4832 - protein, 17 aa, Artificial Sequence
  Description of Artificial Sequence: Synthetic peptide
  XENP019470 vhCDR2
FISYDGNNKYYADSVKG

SEQ ID NO: 4833 - protein, 9 aa, Artificial Sequence
  Description of Artificial Sequence: Synthetic peptide
  XENP019470 vhCDR3
TGWLGPFDY

SEQ ID NO: 4834 - protein, 215 aa, Artificial Sequence
  Description of Artificial Sequence: Synthetic polypeptide
  XENP019470 [CTLA-4]_H0_L0.55_Fab Light Chain
EIVLTQSPGTLSLSPGERATLSCRASQSVGSSYLAWYQQKPGKSPRLLIYGAFSRATGIPDRFSGSGSGTDFTLTISRLEPEDFAVYYCQQYGSSPWTFGQGTKVEIKRTVAAPSVFIFPPSDEQLKSGTASVVCLLNNFYPREAKVQWKVDNALQSGNSQESVTEQDSKDSTYSLSSTLTLSKADYEKHKVYACEVTHQGLSSPVTKSFNRGEC

SEQ ID NO: 4835 - protein, 108 aa, Artificial Sequence; identical to SEQ ID NO: 1904
  Description of Artificial Sequence: Synthetic polypeptide
  VL of XENP019470

SEQ ID NO: 4836 - protein, 12 aa, Artificial Sequence
  Description of Artificial Sequence: Synthetic peptide
  XENP019470 vlCDR1
RASQSVGSSYLA

SEQ ID NO: 4837 - protein, 7 aa, Artificial Sequence
  Description of Artificial Sequence: Synthetic peptide
  XENP019470 vlCDR2
GAFSRAT

SEQ ID NO: 4838 - protein, 9 aa, Artificial Sequence
  Description of Artificial Sequence: Synthetic peptide
  XENP019470 vlCDR3
QQYGSSPWT

SEQ ID NO: 4839 - protein, 221 aa, Artificial Sequence; identical to SEQ ID NO: 2919
  Description of Artificial Sequence: Synthetic polypeptide
  XENP019471 [CTLA-4]_H0_L0.56_Fab Heavy Chain

SEQ ID NO: 4840 - protein, 118 aa, Artificial Sequence; identical to SEQ ID NO: 22
  Description of Artificial Sequence: Synthetic polypeptide
  VH of XENP019471

SEQ ID NO: 4841 - protein, 5 aa, Artificial Sequence
  Description of Artificial Sequence: Synthetic peptide
  XENP019471 vhCDR1
SYTMH

SEQ ID NO: 4842 - protein, 17 aa, Artificial Sequence
  Description of Artificial Sequence: Synthetic peptide
  XENP019471 vhCDR2
FISYDGNNKYYADSVKG

SEQ ID NO: 4843 - protein, 9 aa, Artificial Sequence
  Description of Artificial Sequence: Synthetic peptide
  XENP019471 vhCDR3
TGWLGPFDY

SEQ ID NO: 4844 - protein, 215 aa, Artificial Sequence
  Description of Artificial Sequence: Synthetic polypeptide
  XENP019471 [CTLA-4]_H0_L0.56_Fab Light Chain
EIVLTQSPGTLSLSPGERATLSCRASQSVGSSYLAWYQQKPGQSPRLLIYGAFSRATGIPDRFSGSGSGTDFTLTISRLEPEDFAVYYCQQYGSSPWTFGQGTKVEIKRTVAAPSVFIFPPSDEQLKSGTASVVCLLNNFYPREAKVQWKVDNALQSGNSQESVTEQDSKDSTYSLSSTLTLSKADYEKHKVYACEVTHQGLSSPVTKSFNRGEC

SEQ ID NO: 4845 - protein, 108 aa, Artificial Sequence; identical to SEQ ID NO: 1913
  Description of Artificial Sequence: Synthetic polypeptide
  VL of XENP019471

SEQ ID NO: 4846 - protein, 12 aa, Artificial Sequence
  Description of Artificial Sequence: Synthetic peptide
  XENP019471 vlCDR1
RASQSVGSSYLA

SEQ ID NO: 4847 - protein, 7 aa, Artificial Sequence
  Description of Artificial Sequence: Synthetic peptide
  XENP019471 vlCDR2
GAFSRAT

SEQ ID NO: 4848 - protein, 9 aa, Artificial Sequence
  Description of Artificial Sequence: Synthetic peptide
  XENP019471 vlCDR3
QQYGSSPWT

SEQ ID NO: 4849 - protein, 221 aa, Artificial Sequence; identical to SEQ ID NO: 2919
  Description of Artificial Sequence: Synthetic polypeptide
  XENP019472 [CTLA-4]_H0_L0.57_Fab Heavy Chain

SEQ ID NO: 4850 - protein, 118 aa, Artificial Sequence; identical to SEQ ID NO: 22
  Description of Artificial Sequence: Synthetic polypeptide
  VH of XENP019472

SEQ ID NO: 4851 - protein, 5 aa, Artificial Sequence
  Description of Artificial Sequence: Synthetic peptide
  XENP019472 vhCDR1
SYTMH

SEQ ID NO: 4852 - protein, 17 aa, Artificial Sequence
  Description of Artificial Sequence: Synthetic peptide
  XENP019472 vhCDR2
FISYDGNNKYYADSVKG

SEQ ID NO: 4853 - protein, 9 aa, Artificial Sequence
  Description of Artificial Sequence: Synthetic peptide
  XENP019472 vhCDR3
TGWLGPFDY

SEQ ID NO: 4854 - protein, 215 aa, Artificial Sequence
  Description of Artificial Sequence: Synthetic polypeptide
  XENP019472 [CTLA-4]_H0_L0.57_Fab Light Chain
EIVLTQSPGTLSLSPGERATLSCRASQSVGSSYLAWYQQKPGQAPELLIYGAFSRATGIPDRFSGSGSGTDFTLTISRLEPEDFAVYYCQQYGSSPWTFGQGTKVEIKRTVAAPSVFIFPPSDEQLKSGTASVVCLLNNFYPREAKVQWKVDNALQSGNSQESVTEQDSKDSTYSLSSTLTLSKADYEKHKVYACEVTHQGLSSPVTKSFNRGEC

SEQ ID NO: 4855 - protein, 108 aa, Artificial Sequence; identical to SEQ ID NO: 86
  Description of Artificial Sequence: Synthetic polypeptide
  VL of XENP019472

SEQ ID NO: 4856 - protein, 12 aa, Artificial Sequence
  Description of Artificial Sequence: Synthetic peptide
  XENP019472 vlCDR1
RASQSVGSSYLA

SEQ ID NO: 4857 - protein, 7 aa, Artificial Sequence
  Description of Artificial Sequence: Synthetic peptide
  XENP019472 vlCDR2
GAFSRAT

SEQ ID NO: 4858 - protein, 9 aa, Artificial Sequence
  Description of Artificial Sequence: Synthetic peptide
  XENP019472 vlCDR3
QQYGSSPWT

SEQ ID NO: 4859 - protein, 221 aa, Artificial Sequence; identical to SEQ ID NO: 2919
  Description of Artificial Sequence: Synthetic polypeptide
  XENP019473 [CTLA-4]_H0_L0.58_Fab Heavy Chain

SEQ ID NO: 4860 - protein, 118 aa, Artificial Sequence; identical to SEQ ID NO: 22
  Description of Artificial Sequence: Synthetic polypeptide
  VH of XENP019473

SEQ ID NO: 4861 - protein, 5 aa, Artificial Sequence
  Description of Artificial Sequence: Synthetic peptide
  XENP019473 vhCDR1
SYTMH

SEQ ID NO: 4862 - protein, 17 aa, Artificial Sequence
  Description of Artificial Sequence: Synthetic peptide
  XENP019473 vhCDR2
FISYDGNNKYYADSVKG

SEQ ID NO: 4863 - protein, 9 aa, Artificial Sequence
  Description of Artificial Sequence: Synthetic peptide
  XENP019473 vhCDR3
TGWLGPFDY

SEQ ID NO: 4864 - protein, 215 aa, Artificial Sequence
  Description of Artificial Sequence: Synthetic polypeptide
  XENP019473 [CTLA-4]_H0_L0.58_Fab Light Chain
EIVLTQSPGTLSLSPGERATLSCRASQSVGSSYLAWYQQKPGQAPELLIYGAFSRATGIPDRFSGSGSGTDFTLTISRLEPQDFAVYYCQQYGSSPWTFGQGTKVEIKRTVAAPSVFIFPPSDEQLKSGTASVVCLLNNFYPREAKVQWKVDNALQSGNSQESVTEQDSKDSTYSLSSTLTLSKADYEKHKVYACEVTHQGLSSPVTKSFNRGEC

SEQ ID NO: 4865 - protein, 108 aa, Artificial Sequence; identical to SEQ ID NO: 1931
  Description of Artificial Sequence: Synthetic polypeptide
  VL of XENP019473

SEQ ID NO: 4866 - protein, 12 aa, Artificial Sequence
  Description of Artificial Sequence: Synthetic peptide
  XENP019473 vlCDR1
RASQSVGSSYLA

SEQ ID NO: 4867 - protein, 7 aa, Artificial Sequence
  Description of Artificial Sequence: Synthetic peptide
  XENP019473 vlCDR2
GAFSRAT

SEQ ID NO: 4868 - protein, 9 aa, Artificial Sequence
  Description of Artificial Sequence: Synthetic peptide
  XENP019473 vlCDR3
QQYGSSPWT

SEQ ID NO: 4869 - protein, 221 aa, Artificial Sequence; identical to SEQ ID NO: 2919
  Description of Artificial Sequence: Synthetic polypeptide
  XENP019474 [CTLA-4]_H0_L0.59_Fab Heavy Chain

SEQ ID NO: 4870 - protein, 118 aa, Artificial Sequence; identical to SEQ ID NO: 22
  Description of Artificial Sequence: Synthetic polypeptide
  VH of XENP019474

SEQ ID NO: 4871 - protein, 5 aa, Artificial Sequence
  Description of Artificial Sequence: Synthetic peptide
  XENP019474 vhCDR1
SYTMH

SEQ ID NO: 4872 - protein, 17 aa, Artificial Sequence
  Description of Artificial Sequence: Synthetic peptide
  XENP019474 vhCDR2
FISYDGNNKYYADSVKG

SEQ ID NO: 4873 - protein, 9 aa, Artificial Sequence
  Description of Artificial Sequence: Synthetic peptide
  XENP019474 vhCDR3
TGWLGPFDY

SEQ ID NO: 4874 - protein, 215 aa, Artificial Sequence
  Description of Artificial Sequence: Synthetic polypeptide
  XENP019474 [CTLA-4]_H0_L0.59_Fab Light Chain
EIVLTQSPGTLSLSPGERATLSCRASQSVGSSYLAWYQQKPGQAPKLLIYGAFSRATGIPDRFSGSGSGTDFTLTISRLEPEDFAVYYCQQYGSSPWTFGQGTKVEIKRTVAAPSVFIFPPSDEQLKSGTASVVCLLNNFYPREAKVQWKVDNALQSGNSQESVTEQDSKDSTYSLSSTLTLSKADYEKHKVYACEVTHQGLSSPVTKSFNRGEC

SEQ ID NO: 4875 - protein, 108 aa, Artificial Sequence; identical to SEQ ID NO: 1940
  Description of Artificial Sequence: Synthetic polypeptide
  VL of XENP019474

SEQ ID NO: 4876 - protein, 12 aa, Artificial Sequence
  Description of Artificial Sequence: Synthetic peptide
  XENP019474 vlCDR1
RASQSVGSSYLA

SEQ ID NO: 4877 - protein, 7 aa, Artificial Sequence
  Description of Artificial Sequence: Synthetic peptide
  XENP019474 vlCDR2
GAFSRAT

SEQ ID NO: 4878 - protein, 9 aa, Artificial Sequence
  Description of Artificial Sequence: Synthetic peptide
  XENP019474 vlCDR3
QQYGSSPWT

SEQ ID NO: 4879 - protein, 221 aa, Artificial Sequence; identical to SEQ ID NO: 2919
  Description of Artificial Sequence: Synthetic polypeptide
  XENP019475 [CTLA-4]_H0_L0.60_Fab Heavy Chain

SEQ ID NO: 4880 - protein, 118 aa, Artificial Sequence; identical to SEQ ID NO: 22
  Description of Artificial Sequence: Synthetic polypeptide
  VH of XENP019475

SEQ ID NO: 4881 - protein, 5 aa, Artificial Sequence
  Description of Artificial Sequence: Synthetic peptide
  XENP019475 vhCDR1
SYTMH

SEQ ID NO: 4882 - protein, 17 aa, Artificial Sequence
  Description of Artificial Sequence: Synthetic peptide
  XENP019475 vhCDR2
FISYDGNNKYYADSVKG

SEQ ID NO: 4883 - protein, 9 aa, Artificial Sequence
  Description of Artificial Sequence: Synthetic peptide
  XENP019475 vhCDR3
TGWLGPFDY

SEQ ID NO: 4884 - protein, 215 aa, Artificial Sequence
  Description of Artificial Sequence: Synthetic polypeptide
  XENP019475 [CTLA-4]_H0_L0.60_Fab Light Chain
EIVLTQSPGTLSLSPGERATLSCRASQSVGSSYLAWYQQKPGQAPRRLIYGAFSRATGIPDRFSGSGSGTDFTLTISRLEPEDFAVYYCQQYGSSPWTFGQGTKVEIKRTVAAPSVFIFPPSDEQLKSGTASVVCLLNNFYPREAKVQWKVDNALQSGNSQESVTEQDSKDSTYSLSSTLTLSKADYEKHKVYACEVTHQGLSSPVTKSFNRGEC

SEQ ID NO: 4885 - protein, 108 aa, Artificial Sequence; identical to SEQ ID NO: 1949
  Description of Artificial Sequence: Synthetic polypeptide
  VL of XENP019475

SEQ ID NO: 4886 - protein, 12 aa, Artificial Sequence
  Description of Artificial Sequence: Synthetic peptide
  XENP019475 vlCDR1
RASQSVGSSYLA

SEQ ID NO: 4887 - protein, 7 aa, Artificial Sequence
  Description of Artificial Sequence: Synthetic peptide
  XENP019475 vlCDR2
GAFSRAT

SEQ ID NO: 4888 - protein, 9 aa, Artificial Sequence
  Description of Artificial Sequence: Synthetic peptide
  XENP019475 vlCDR3
QQYGSSPWT

SEQ ID NO: 4889 - protein, 221 aa, Artificial Sequence; identical to SEQ ID NO: 2919
  Description of Artificial Sequence: Synthetic polypeptide
  XENP019476 [CTLA-4]_H0_L0.61_Fab Heavy Chain

SEQ ID NO: 4890 - protein, 118 aa, Artificial Sequence; identical to SEQ ID NO: 22
  Description of Artificial Sequence: Synthetic polypeptide
  VH of XENP019476

SEQ ID NO: 4891 - protein, 5 aa, Artificial Sequence
  Description of Artificial Sequence: Synthetic peptide
  XENP019476 vhCDR1
SYTMH

SEQ ID NO: 4892 - protein, 17 aa, Artificial Sequence
  Description of Artificial Sequence: Synthetic peptide
  XENP019476 vhCDR2
FISYDGNNKYYADSVKG

SEQ ID NO: 4893 - protein, 9 aa, Artificial Sequence
  Description of Artificial Sequence: Synthetic peptide
  XENP019476 vhCDR3
TGWLGPFDY

SEQ ID NO: 4894 - protein, 215 aa, Artificial Sequence
  Description of Artificial Sequence: Synthetic polypeptide
  XENP019476 [CTLA-4]_H0_L0.61_Fab Light Chain
EIVLTQSPGTLSLSPGERATLSCRASQSVGSSYLAWYQQKPGQAPRRLIYGAFSRDTGIPDRFSGSGSGTDFTLTISRLEPEDFAVYYCQQYGSSPWTFGQGTKVEIKRTVAAPSVFIFPPSDEQLKSGTASVVCLLNNFYPREAKVQWKVDNALQSGNSQESVTEQDSKDSTYSLSSTLTLSKADYEKHKVYACEVTHQGLSSPVTKSFNRGEC

SEQ ID NO: 4895 - protein, 108 aa, Artificial Sequence; identical to SEQ ID NO: 1958
  Description of Artificial Sequence: Synthetic polypeptide
  VL of XENP019476

SEQ ID NO: 4896 - protein, 12 aa, Artificial Sequence
  Description of Artificial Sequence: Synthetic peptide
  XENP019476 vlCDR1
RASQSVGSSYLA

SEQ ID NO: 4897 - protein, 7 aa, Artificial Sequence
  Description of Artificial Sequence: Synthetic peptide
  XENP019476 vlCDR2
GAFSRDT

SEQ ID NO: 4898 - protein, 9 aa, Artificial Sequence
  Description of Artificial Sequence: Synthetic peptide
  XENP019476 vlCDR3
QQYGSSPWT

SEQ ID NO: 4899 - protein, 221 aa, Artificial Sequence; identical to SEQ ID NO: 2919
  Description of Artificial Sequence: Synthetic polypeptide
  XENP019477 [CTLA-4]_H0_L0.62_Fab Heavy Chain

SEQ ID NO: 4900 - protein, 118 aa, Artificial Sequence; identical to SEQ ID NO: 22
  Description of Artificial Sequence: Synthetic polypeptide
  VH of XENP019477

SEQ ID NO: 4901 - protein, 5 aa, Artificial Sequence
  Description of Artificial Sequence: Synthetic peptide
  XENP019477 vhCDR1
SYTMH

SEQ ID NO: 4902 - protein, 17 aa, Artificial Sequence
  Description of Artificial Sequence: Synthetic peptide
  XENP019477 vhCDR2
FISYDGNNKYYADSVKG

SEQ ID NO: 4903 - protein, 9 aa, Artificial Sequence
  Description of Artificial Sequence: Synthetic peptide
  XENP019477 vhCDR3
TGWLGPFDY

SEQ ID NO: 4904 - protein, 215 aa, Artificial Sequence
  Description of Artificial Sequence: Synthetic polypeptide
  XENP019477 [CTLA-4]_H0_L0.62_Fab Light Chain
EIVLTQSPGTLSLSPGERATLSCRASQSVGSSYLAWYQQKPGQAPRLLIAGAFSRATGIPDRFSGSGSGTDFTLTISRLEPEDFAVYYCQQYGSSPWTFGQGTKVEIKRTVAAPSVFIFPPSDEQLKSGTASVVCLLNNFYPREAKVQWKVDNALQSGNSQESVTEQDSKDSTYSLSSTLTLSKADYEKHKVYACEVTHQGLSSPVTKSFNRGEC

SEQ ID NO: 4905 - protein, 108 aa, Artificial Sequence; identical to SEQ ID NO: 1967
  Description of Artificial Sequence: Synthetic polypeptide
  VL of XENP019477

SEQ ID NO: 4906 - protein, 12 aa, Artificial Sequence
  Description of Artificial Sequence: Synthetic peptide
  XENP019477 vlCDR1
RASQSVGSSYLA

SEQ ID NO: 4907 - protein, 7 aa, Artificial Sequence
  Description of Artificial Sequence: Synthetic peptide
  XENP019477 vlCDR2
GAFSRAT

SEQ ID NO: 4908 - protein, 9 aa, Artificial Sequence
  Description of Artificial Sequence: Synthetic peptide
  XENP019477 vlCDR3
QQYGSSPWT

SEQ ID NO: 4909 - protein, 221 aa, Artificial Sequence; identical to SEQ ID NO: 2919
  Description of Artificial Sequence: Synthetic polypeptide
  XENP019478 [CTLA-4]_H0_L0.63_Fab Heavy Chain

SEQ ID NO: 4910 - protein, 118 aa, Artificial Sequence; identical to SEQ ID NO: 22
  Description of Artificial Sequence: Synthetic polypeptide
  VH of XENP019478

SEQ ID NO: 4911 - protein, 5 aa, Artificial Sequence
  Description of Artificial Sequence: Synthetic peptide
  XENP019478 vhCDR1
SYTMH

SEQ ID NO: 4912 - protein, 17 aa, Artificial Sequence
  Description of Artificial Sequence: Synthetic peptide
  XENP019478 vhCDR2
FISYDGNNKYYADSVKG

SEQ ID NO: 4913 - protein, 9 aa, Artificial Sequence
  Description of Artificial Sequence: Synthetic peptide
  XENP019478 vhCDR3
TGWLGPFDY

SEQ ID NO: 4914 - protein, 215 aa, Artificial Sequence
  Description of Artificial Sequence: Synthetic polypeptide
  XENP019478 [CTLA-4]_H0_L0.63_Fab Light Chain
EIVLTQSPGTLSLSPGERATLSCRASQSVGSSYLAWYQQKPGQAPRLLIFGAFSRATGIPDRFSGSGSGTDFTLTISRLEPEDFAVYYCQQYGSSPWTFGQGTKVEIKRTVAAPSVFIFPPSDEQLKSGTASVVCLLNNFYPREAKVQWKVDNALQSGNSQESVTEQDSKDSTYSLSSTLTLSKADYEKHKVYACEVTHQGLSSPVTKSFNRGEC

SEQ ID NO: 4915 - protein, 108 aa, Artificial Sequence; identical to SEQ ID NO: 1976
  Description of Artificial Sequence: Synthetic polypeptide
  VL of XENP019478

SEQ ID NO: 4916 - protein, 12 aa, Artificial Sequence
  Description of Artificial Sequence: Synthetic peptide
  XENP019478 vlCDR1
RASQSVGSSYLA

SEQ ID NO: 4917 - protein, 7 aa, Artificial Sequence
  Description of Artificial Sequence: Synthetic peptide
  XENP019478 vlCDR2
GAFSRAT

SEQ ID NO: 4918 - protein, 9 aa, Artificial Sequence
  Description of Artificial Sequence: Synthetic peptide
  XENP019478 vlCDR3
QQYGSSPWT

SEQ ID NO: 4919 - protein, 221 aa, Artificial Sequence; identical to SEQ ID NO: 2919
  Description of Artificial Sequence: Synthetic polypeptide
  XENP019479 [CTLA-4]_H0_L0.64_Fab Heavy Chain

SEQ ID NO: 4920 - protein, 118 aa, Artificial Sequence; identical to SEQ ID NO: 22
  Description of Artificial Sequence: Synthetic polypeptide
  VH of XENP019479

SEQ ID NO: 4921 - protein, 5 aa, Artificial Sequence
  Description of Artificial Sequence: Synthetic peptide
  XENP019479 vhCDR1
SYTMH

SEQ ID NO: 4922 - protein, 17 aa, Artificial Sequence
  Description of Artificial Sequence: Synthetic peptide
  XENP019479 vhCDR2
FISYDGNNKYYADSVKG

SEQ ID NO: 4923 - protein, 9 aa, Artificial Sequence
  Description of Artificial Sequence: Synthetic peptide
  XENP019479 vhCDR3
TGWLGPFDY

SEQ ID NO: 4924 - protein, 215 aa, Artificial Sequence
  Description of Artificial Sequence: Synthetic polypeptide
  XENP019479 [CTLA-4]_H0_L0.64_Fab Light Chain
EIVLTQSPGTLSLSPGERATLSCRASQSVGSSYLAWYQQKPGQAPRLLIHGAFSRATGIPDRFSGSGSGTDFTLTISRLEPEDFAVYYCQQYGSSPWTFGQGTKVEIKRTVAAPSVFIFPPSDEQLKSGTASVVCLLNNFYPREAKVQWKVDNALQSGNSQESVTEQDSKDSTYSLSSTLTLSKADYEKHKVYACEVTHQGLSSPVTKSFNRGEC

SEQ ID NO: 4925 - protein, 108 aa, Artificial Sequence; identical to SEQ ID NO: 1985
  Description of Artificial Sequence: Synthetic polypeptide
  VL of XENP019479

SEQ ID NO: 4926 - protein, 12 aa, Artificial Sequence
  Description of Artificial Sequence: Synthetic peptide
  XENP019479 vlCDR1
RASQSVGSSYLA

SEQ ID NO: 4927 - protein, 7 aa, Artificial Sequence
  Description of Artificial Sequence: Synthetic peptide
  XENP019479 vlCDR2
GAFSRAT

SEQ ID NO: 4928 - protein, 9 aa, Artificial Sequence
  Description of Artificial Sequence: Synthetic peptide
  XENP019479 vlCDR3
QQYGSSPWT

SEQ ID NO: 4929 - protein, 221 aa, Artificial Sequence; identical to SEQ ID NO: 2919
  Description of Artificial Sequence: Synthetic polypeptide
  XENP019480 [CTLA-4]_H0_L0.65_Fab Heavy Chain

SEQ ID NO: 4930 - protein, 118 aa, Artificial Sequence; identical to SEQ ID NO: 22
  Description of Artificial Sequence: Synthetic polypeptide
  VH of XENP019480

SEQ ID NO: 4931 - protein, 5 aa, Artificial Sequence
  Description of Artificial Sequence: Synthetic peptide
  XENP019480 vhCDR1
SYTMH

SEQ ID NO: 4932 - protein, 17 aa, Artificial Sequence
  Description of Artificial Sequence: Synthetic peptide
  XENP019480 vhCDR2
FISYDGNNKYYADSVKG

SEQ ID NO: 4933 - protein, 9 aa, Artificial Sequence
  Description of Artificial Sequence: Synthetic peptide
  XENP019480 vhCDR3
TGWLGPFDY

SEQ ID NO: 4934 - protein, 215 aa, Artificial Sequence
  Description of Artificial Sequence: Synthetic polypeptide
  XENP019480 [CTLA-4]_H0_L0.65_Fab Light Chain
EIVLTQSPGTLSLSPGERATLSCRASQSVGSSYLAWYQQKPGQAPRLLILGAFSRATGIPDRFSGSGSGTDFTLTISRLEPEDFAVYYCQQYGSSPWTFGQGTKVEIKRTVAAPSVFIFPPSDEQLKSGTASVVCLLNNFYPREAKVQWKVDNALQSGNSQESVTEQDSKDSTYSLSSTLTLSKADYEKHKVYACEVTHQGLSSPVTKSFNRGEC

SEQ ID NO: 4935 - protein, 108 aa, Artificial Sequence; identical to SEQ ID NO: 1994
  Description of Artificial Sequence: Synthetic polypeptide
  VL of XENP019480

SEQ ID NO: 4936 - protein, 12 aa, Artificial Sequence
  Description of Artificial Sequence: Synthetic peptide
  XENP019480 vlCDR1
RASQSVGSSYLA

SEQ ID NO: 4937 - protein, 7 aa, Artificial Sequence
  Description of Artificial Sequence: Synthetic peptide
  XENP019480 vlCDR2
GAFSRAT

SEQ ID NO: 4938 - protein, 9 aa, Artificial Sequence
  Description of Artificial Sequence: Synthetic peptide
  XENP019480 vlCDR3
QQYGSSPWT

SEQ ID NO: 4939 - protein, 221 aa, Artificial Sequence; identical to SEQ ID NO: 2919
  Description of Artificial Sequence: Synthetic polypeptide
  XENP019481 [CTLA-4]_H0_L0.66_Fab Heavy Chain

SEQ ID NO: 4940 - protein, 118 aa, Artificial Sequence; identical to SEQ ID NO: 22
  Description of Artificial Sequence: Synthetic polypeptide
  VH of XENP019481

SEQ ID NO: 4941 - protein, 5 aa, Artificial Sequence
  Description of Artificial Sequence: Synthetic peptide
  XENP019481 vhCDR1
SYTMH

SEQ ID NO: 4942 - protein, 17 aa, Artificial Sequence
  Description of Artificial Sequence: Synthetic peptide
  XENP019481 vhCDR2
FISYDGNNKYYADSVKG

SEQ ID NO: 4943 - protein, 9 aa, Artificial Sequence
  Description of Artificial Sequence: Synthetic peptide
  XENP019481 vhCDR3
TGWLGPFDY

SEQ ID NO: 4944 - protein, 215 aa, Artificial Sequence
  Description of Artificial Sequence: Synthetic polypeptide
  XENP019481 [CTLA-4]_H0_L0.66_Fab Light Chain
EIVLTQSPGTLSLSPGERATLSCRASQSVGSSYLAWYQQKPGQAPRLLIVGAFSRATGIPDRFSGSGSGTDFTLTISRLEPEDFAVYYCQQYGSSPWTFGQGTKVEIKRTVAAPSVFIFPPSDEQLKSGTASVVCLLNNFYPREAKVQWKVDNALQSGNSQESVTEQDSKDSTYSLSSTLTLSKADYEKHKVYACEVTHQGLSSPVTKSFNRGEC

SEQ ID NO: 4945 - protein, 108 aa, Artificial Sequence; identical to SEQ ID NO: 2003
  Description of Artificial Sequence: Synthetic polypeptide
  VL of XENP019481

SEQ ID NO: 4946 - protein, 12 aa, Artificial Sequence
  Description of Artificial Sequence: Synthetic peptide
  XENP019481 vlCDR1
RASQSVGSSYLA

SEQ ID NO: 4947 - protein, 7 aa, Artificial Sequence
  Description of Artificial Sequence: Synthetic peptide
  XENP019481 vlCDR2
GAFSRAT

SEQ ID NO: 4948 - protein, 9 aa, Artificial Sequence
  Description of Artificial Sequence: Synthetic peptide
  XENP019481 vlCDR3
QQYGSSPWT

SEQ ID NO: 4949 - protein, 221 aa, Artificial Sequence; identical to SEQ ID NO: 2919
  Description of Artificial Sequence: Synthetic polypeptide
  XENP019482 [CTLA-4]_H0_L0.67_Fab Heavy Chain

SEQ ID NO: 4950 - protein, 118 aa, Artificial Sequence; identical to SEQ ID NO: 22
  Description of Artificial Sequence: Synthetic polypeptide
  VH of XENP019482

SEQ ID NO: 4951 - protein, 5 aa, Artificial Sequence
  Description of Artificial Sequence: Synthetic peptide
  XENP019482 vhCDR1
SYTMH

SEQ ID NO: 4952 - protein, 17 aa, Artificial Sequence
  Description of Artificial Sequence: Synthetic peptide
  XENP019482 vhCDR2
FISYDGNNKYYADSVKG

SEQ ID NO: 4953 - protein, 9 aa, Artificial Sequence
  Description of Artificial Sequence: Synthetic peptide
  XENP019482 vhCDR3
TGWLGPFDY

SEQ ID NO: 4954 - protein, 215 aa, Artificial Sequence
  Description of Artificial Sequence: Synthetic polypeptide
  XENP019482 [CTLA-4]_H0_L0.67_Fab Light Chain
EIVLTQSPGTLSLSPGERATLSCRASQSVGSSYLAWYQQKPGQAPRLLIYDAFSRATGIPDRFSGSGSGTDFTLTISRLEPEDFAVYYCQQYGSSPWTFGQGTKVEIKRTVAAPSVFIFPPSDEQLKSGTASVVCLLNNFYPREAKVQWKVDNALQSGNSQESVTEQDSKDSTYSLSSTLTLSKADYEKHKVYACEVTHQGLSSPVTKSFNRGEC

SEQ ID NO: 4955 - protein, 108 aa, Artificial Sequence; identical to SEQ ID NO: 2012
  Description of Artificial Sequence: Synthetic polypeptide
  VL of XENP019482

SEQ ID NO: 4956 - protein, 12 aa, Artificial Sequence
  Description of Artificial Sequence: Synthetic peptide
  XENP019482 vlCDR1
RASQSVGSSYLA

SEQ ID NO: 4957 - protein, 7 aa, Artificial Sequence
  Description of Artificial Sequence: Synthetic peptide
  XENP019482 vlCDR2
DAFSRAT

SEQ ID NO: 4958 - protein, 9 aa, Artificial Sequence
  Description of Artificial Sequence: Synthetic peptide
  XENP019482 vlCDR3
QQYGSSPWT

SEQ ID NO: 4959 - protein, 221 aa, Artificial Sequence; identical to SEQ ID NO: 2919
  Description of Artificial Sequence: Synthetic polypeptide
  XENP019483 [CTLA-4]_H0_L0.68_Fab Heavy Chain

SEQ ID NO: 4960 - protein, 118 aa, Artificial Sequence; identical to SEQ ID NO: 22
  Description of Artificial Sequence: Synthetic polypeptide
  VH of XENP019483

SEQ ID NO: 4961 - protein, 5 aa, Artificial Sequence
  Description of Artificial Sequence: Synthetic peptide
  XENP019483 vhCDR1
SYTMH

SEQ ID NO: 4962 - protein, 17 aa, Artificial Sequence
  Description of Artificial Sequence: Synthetic peptide
  XENP019483 vhCDR2
FISYDGNNKYYADSVKG

SEQ ID NO: 4963 - protein, 9 aa, Artificial Sequence
  Description of Artificial Sequence: Synthetic peptide
  XENP019483 vhCDR3
TGWLGPFDY

SEQ ID NO: 4964 - protein, 215 aa, Artificial Sequence
  Description of Artificial Sequence: Synthetic polypeptide
  XENP019483 [CTLA-4]_H0_L0.68_Fab Light Chain
EIVLTQSPGTLSLSPGERATLSCRASQSVGSSYLAWYQQKPGQAPRLLIYSAFSRATGIPDRFSGSGSGTDFTLTISRLEPEDFAVYYCQQYGSSPWTFGQGTKVEIKRTVAAPSVFIFPPSDEQLKSGTASVVCLLNNFYPREAKVQWKVDNALQSGNSQESVTEQDSKDSTYSLSSTLTLSKADYEKHKVYACEVTHQGLSSPVTKSFNRGEC

SEQ ID NO: 4965 - protein, 108 aa, Artificial Sequence; identical to SEQ ID NO: 2021
  Description of Artificial Sequence: Synthetic polypeptide
  VL of XENP019483

SEQ ID NO: 4966 - protein, 12 aa, Artificial Sequence
  Description of Artificial Sequence: Synthetic peptide
  XENP019483 vlCDR1
RASQSVGSSYLA

SEQ ID NO: 4967 - protein, 7 aa, Artificial Sequence
  Description of Artificial Sequence: Synthetic peptide
  XENP019483 vlCDR2
SAFSRAT

SEQ ID NO: 4968 - protein, 9 aa, Artificial Sequence
  Description of Artificial Sequence: Synthetic peptide
  XENP019483 vlCDR3
QQYGSSPWT

SEQ ID NO: 4969 - protein, 221 aa, Artificial Sequence; identical to SEQ ID NO: 2919
  Description of Artificial Sequence: Synthetic polypeptide
  XENP019484 [CTLA-4]_H0_L0.69_Fab Heavy Chain

SEQ ID NO: 4970 - protein, 118 aa, Artificial Sequence; identical to SEQ ID NO: 22
  Description of Artificial Sequence: Synthetic polypeptide
  VH of XENP019484

SEQ ID NO: 4971 - protein, 5 aa, Artificial Sequence
  Description of Artificial Sequence: Synthetic peptide
  XENP019484 vhCDR1
SYTMH

SEQ ID NO: 4972 - protein, 17 aa, Artificial Sequence
  Description of Artificial Sequence: Synthetic peptide
  XENP019484 vhCDR2
FISYDGNNKYYADSVKG

SEQ ID NO: 4973 - protein, 9 aa, Artificial Sequence
  Description of Artificial Sequence: Synthetic peptide
  XENP019484 vhCDR3
TGWLGPFDY

SEQ ID NO: 4974 - protein, 215 aa, Artificial Sequence
  Description of Artificial Sequence: Synthetic polypeptide
  XENP019484 [CTLA-4]_H0_L0.69_Fab Light Chain
EIVLTQSPGTLSLSPGERATLSCRASQSVGSSYLAWYQQKPGQAPRLLIYGVFSRATGIPDRFSGSGSGTDFTLTISRLEPEDFAVYYCQQYGSSPWTFGQGTKVEIKRTVAAPSVFIFPPSDEQLKSGTASVVCLLNNFYPREAKVQWKVDNALQSGNSQESVTEQDSKDSTYSLSSTLTLSKADYEKHKVYACEVTHQGLSSPVTKSFNRGEC

SEQ ID NO: 4975 - protein, 108 aa, Artificial Sequence; identical to SEQ ID NO: 2030
  Description of Artificial Sequence: Synthetic polypeptide
  VL of XENP019484

SEQ ID NO: 4976 - protein, 12 aa, Artificial Sequence
  Description of Artificial Sequence: Synthetic peptide
  XENP019484 vlCDR1
RASQSVGSSYLA

SEQ ID NO: 4977 - protein, 7 aa, Artificial Sequence
  Description of Artificial Sequence: Synthetic peptide
  XENP019484 vlCDR2
GVFSRAT

SEQ ID NO: 4978 - protein, 9 aa, Artificial Sequence
  Description of Artificial Sequence: Synthetic peptide
  XENP019484 vlCDR3
QQYGSSPWT

SEQ ID NO: 4979 - protein, 221 aa, Artificial Sequence; identical to SEQ ID NO: 2919
  Description of Artificial Sequence: Synthetic polypeptide
  XENP019485 [CTLA-4]_H0_L0.70_Fab Heavy Chain

SEQ ID NO: 4980 - protein, 118 aa, Artificial Sequence; identical to SEQ ID NO: 22
  Description of Artificial Sequence: Synthetic polypeptide
  VH of XENP019485

SEQ ID NO: 4981 - protein, 5 aa, Artificial Sequence
  Description of Artificial Sequence: Synthetic peptide
  XENP019485 vhCDR1
SYTMH

SEQ ID NO: 4982 - protein, 17 aa, Artificial Sequence
  Description of Artificial Sequence: Synthetic peptide
  XENP019485 vhCDR2
FISYDGNNKYYADSVKG

SEQ ID NO: 4983 - protein, 9 aa, Artificial Sequence
  Description of Artificial Sequence: Synthetic peptide
  XENP019485 vhCDR3
TGWLGPFDY

SEQ ID NO: 4984 - protein, 215 aa, Artificial Sequence
  Description of Artificial Sequence: Synthetic polypeptide
  XENP019485 [CTLA-4]_H0_L0.70_Fab Light Chain
EIVLTQSPGTLSLSPGERATLSCRASQSVGSSYLAWYQQKPGQAPRLLIYGAHSRATGIPDRFSGSGSGTDFTLTISRLEPEDFAVYYCQQYGSSPWTFGQGTKVEIKRTVAAPSVFIFPPSDEQLKSGTASVVCLLNNFYPREAKVQWKVDNALQSGNSQESVTEQDSKDSTYSLSSTLTLSKADYEKHKVYACEVTHQGLSSPVTKSFNRGEC

SEQ ID NO: 4985 - protein, 108 aa, Artificial Sequence; identical to SEQ ID NO: 2039
  Description of Artificial Sequence: Synthetic polypeptide
  VL of XENP019485

SEQ ID NO: 4986 - protein, 12 aa, Artificial Sequence
  Description of Artificial Sequence: Synthetic peptide
  XENP019485 vlCDR1
RASQSVGSSYLA

SEQ ID NO: 4987 - protein, 7 aa, Artificial Sequence
  Description of Artificial Sequence: Synthetic peptide
  XENP019485 vlCDR2
GAHSRAT

SEQ ID NO: 4988 - protein, 9 aa, Artificial Sequence
  Description of Artificial Sequence: Synthetic peptide
  XENP019485 vlCDR3
QQYGSSPWT

SEQ ID NO: 4989 - protein, 221 aa, Artificial Sequence; identical to SEQ ID NO: 2919
  Description of Artificial Sequence: Synthetic polypeptide
  XENP019486 [CTLA-4]_H0_L0.71_Fab Heavy Chain

SEQ ID NO: 4990 - protein, 118 aa, Artificial Sequence; identical to SEQ ID NO: 22
  Description of Artificial Sequence: Synthetic polypeptide
  VH of XENP019486

SEQ ID NO: 4991 - protein, 5 aa, Artificial Sequence
  Description of Artificial Sequence: Synthetic peptide
  XENP019486 vhCDR1
SYTMH

SEQ ID NO: 4992 - protein, 17 aa, Artificial Sequence
  Description of Artificial Sequence: Synthetic peptide
  XENP019486 vhCDR2
FISYDGNNKYYADSVKG

SEQ ID NO: 4993 - protein, 9 aa, Artificial Sequence
  Description of Artificial Sequence: Synthetic peptide
  XENP019486 vhCDR3
TGWLGPFDY

SEQ ID NO: 4994 - protein, 215 aa, Artificial Sequence
  Description of Artificial Sequence: Synthetic polypeptide
  XENP019486 [CTLA-4]_H0_L0.71_Fab Light Chain
EIVLTQSPGTLSLSPGERATLSCRASQSVGSSYLAWYQQKPGQAPRLLIYGAISRATGIPDRFSGSGSGTDFTLTISRLEPEDFAVYYCQQYGSSPWTFGQGTKVEIKRTVAAPSVFIFPPSDEQLKSGTASVVCLLNNFYPREAKVQWKVDNALQSGNSQESVTEQDSKDSTYSLSSTLTLSKADYEKHKVYACEVTHQGLSSPVTKSFNRGEC

SEQ ID NO: 4995 - protein, 108 aa, Artificial Sequence; identical to SEQ ID NO: 2048
  Description of Artificial Sequence: Synthetic polypeptide
  VL of XENP019486

SEQ ID NO: 4996 - protein, 12 aa, Artificial Sequence
  Description of Artificial Sequence: Synthetic peptide
  XENP019486 vlCDR1
RASQSVGSSYLA

SEQ ID NO: 4997 - protein, 7 aa, Artificial Sequence
  Description of Artificial Sequence: Synthetic peptide
  XENP019486 vlCDR2
GAISRAT

SEQ ID NO: 4998 - protein, 9 aa, Artificial Sequence
  Description of Artificial Sequence: Synthetic peptide
  XENP019486 vlCDR3
QQYGSSPWT

SEQ ID NO: 4999 - protein, 221 aa, Artificial Sequence; identical to SEQ ID NO: 2919
  Description of Artificial Sequence: Synthetic polypeptide
  XENP019487 [CTLA-4]_H0_L0.72_Fab Heavy Chain

SEQ ID NO: 5000 - protein, 118 aa, Artificial Sequence; identical to SEQ ID NO: 22
  Description of Artificial Sequence: Synthetic polypeptide
  VH of XENP019487

SEQ ID NO: 5001 - protein, 5 aa, Artificial Sequence
  Description of Artificial Sequence: Synthetic peptide
  XENP019487 vhCDR1
SYTMH

SEQ ID NO: 5002 - protein, 17 aa, Artificial Sequence
  Description of Artificial Sequence: Synthetic peptide
  XENP019487 vhCDR2
FISYDGNNKYYADSVKG

SEQ ID NO: 5003 - protein, 9 aa, Artificial Sequence
  Description of Artificial Sequence: Synthetic peptide
  XENP019487 vhCDR3
TGWLGPFDY

SEQ ID NO: 5004 - protein, 215 aa, Artificial Sequence
  Description of Artificial Sequence: Synthetic polypeptide
  XENP019487 [CTLA-4]_H0_L0.72_Fab Light Chain
EIVLTQSPGTLSLSPGERATLSCRASQSVGSSYLAWYQQKPGQAPRLLIYGALSRATGIPDRFSGSGSGTDFTLTISRLEPEDFAVYYCQQYGSSPWTFGQGTKVEIKRTVAAPSVFIFPPSDEQLKSGTASVVCLLNNFYPREAKVQWKVDNALQSGNSQESVTEQDSKDSTYSLSSTLTLSKADYEKHKVYACEVTHQGLSSPVTKSFNRGEC

SEQ ID NO: 5005 - protein, 108 aa, Artificial Sequence; identical to SEQ ID NO: 2057
  Description of Artificial Sequence: Synthetic polypeptide
  VL of XENP019487

SEQ ID NO: 5006 - protein, 12 aa, Artificial Sequence
  Description of Artificial Sequence: Synthetic peptide
  XENP019487 vlCDR1
RASQSVGSSYLA

SEQ ID NO: 5007 - protein, 7 aa, Artificial Sequence
  Description of Artificial Sequence: Synthetic peptide
  XENP019487 vlCDR2
GALSRAT

SEQ ID NO: 5008 - protein, 9 aa, Artificial Sequence
  Description of Artificial Sequence: Synthetic peptide
  XENP019487 vlCDR3
QQYGSSPWT

SEQ ID NO: 5009 - protein, 221 aa, Artificial Sequence; identical to SEQ ID NO: 2919
  Description of Artificial Sequence: Synthetic polypeptide
  XENP019488 [CTLA-4]_H0_L0.73_Fab Heavy Chain

SEQ ID NO: 5010 - protein, 118 aa, Artificial Sequence; identical to SEQ ID NO: 22
  Description of Artificial Sequence: Synthetic polypeptide
  VH of XENP019488

SEQ ID NO: 5011 - protein, 5 aa, Artificial Sequence
  Description of Artificial Sequence: Synthetic peptide
  XENP019488 vhCDR1
SYTMH

SEQ ID NO: 5012 - protein, 17 aa, Artificial Sequence
  Description of Artificial Sequence: Synthetic peptide
  XENP019488 vhCDR2
FISYDGNNKYYADSVKG

SEQ ID NO: 5013 - protein, 9 aa, Artificial Sequence
  Description of Artificial Sequence: Synthetic peptide
  XENP019488 vhCDR3
TGWLGPFDY

SEQ ID NO: 5014 - protein, 215 aa, Artificial Sequence
  Description of Artificial Sequence: Synthetic polypeptide
  XENP019488 [CTLA-4]_H0_L0.73_Fab Light Chain
EIVLTQSPGTLSLSPGERATLSCRASQSVGSSYLAWYQQKPGQAPRLLIYGASSRATGIPDRFSGSGSGTDFTLTISRLEPEDFAVYYCQQYGSSPWTFGQGTKVEIKRTVAAPSVFIFPPSDEQLKSGTASVVCLLNNFYPREAKVQWKVDNALQSGNSQESVTEQDSKDSTYSLSSTLTLSKADYEKHKVYACEVTHQGLSSPVTKSFNRGEC

SEQ ID NO: 5015 - protein, 108 aa, Artificial Sequence; identical to SEQ ID NO: 2066
  Description of Artificial Sequence: Synthetic polypeptide
  VL of XENP019488

SEQ ID NO: 5016 - protein, 12 aa, Artificial Sequence
  Description of Artificial Sequence: Synthetic peptide
  XENP019488 vlCDR1
RASQSVGSSYLA

SEQ ID NO: 5017 - protein, 7 aa, Artificial Sequence
  Description of Artificial Sequence: Synthetic peptide
  XENP019488 vlCDR2
GASSRAT

SEQ ID NO: 5018 - protein, 9 aa, Artificial Sequence
  Description of Artificial Sequence: Synthetic peptide
  XENP019488 vlCDR3
QQYGSSPWT

SEQ ID NO: 5019 - protein, 221 aa, Artificial Sequence; identical to SEQ ID NO: 2919
  Description of Artificial Sequence: Synthetic polypeptide
  XENP019489 [CTLA-4]_H0_L0.74_Fab Heavy Chain

SEQ ID NO: 5020 - protein, 118 aa, Artificial Sequence; identical to SEQ ID NO: 22
  Description of Artificial Sequence: Synthetic polypeptide
  VH of XENP019489

SEQ ID NO: 5021 - protein, 5 aa, Artificial Sequence
  Description of Artificial Sequence: Synthetic peptide
  XENP019489 vhCDR1
SYTMH

SEQ ID NO: 5022 - protein, 17 aa, Artificial Sequence
  Description of Artificial Sequence: Synthetic peptide
  XENP019489 vhCDR2
FISYDGNNKYYADSVKG

SEQ ID NO: 5023 - protein, 9 aa, Artificial Sequence
  Description of Artificial Sequence: Synthetic peptide
  XENP019489 vhCDR3
TGWLGPFDY

SEQ ID NO: 5024 - protein, 215 aa, Artificial Sequence
  Description of Artificial Sequence: Synthetic polypeptide
  XENP019489 [CTLA-4]_H0_L0.74_Fab Light Chain
EIVLTQSPGTLSLSPGERATLSCRASQSVGSSYLAWYQQKPGQAPRLLIYGAYSRATGIPDRFSGSGSGTDFTLTISRLEPEDFAVYYCQQYGSSPWTFGQGTKVEIKRTVAAPSVFIFPPSDEQLKSGTASVVCLLNNFYPREAKVQWKVDNALQSGNSQESVTEQDSKDSTYSLSSTLTLSKADYEKHKVYACEVTHQGLSSPVTKSFNRGEC

SEQ ID NO: 5025 - protein, 108 aa, Artificial Sequence; identical to SEQ ID NO: 2075
  Description of Artificial Sequence: Synthetic polypeptide
  VL of XENP019489

SEQ ID NO: 5026 - protein, 12 aa, Artificial Sequence
  Description of Artificial Sequence: Synthetic peptide
  XENP019489 vlCDR1
RASQSVGSSYLA

SEQ ID NO: 5027 - protein, 7 aa, Artificial Sequence
  Description of Artificial Sequence: Synthetic peptide
  XENP019489 vlCDR2
GAYSRAT

SEQ ID NO: 5028 - protein, 9 aa, Artificial Sequence
  Description of Artificial Sequence: Synthetic peptide
  XENP019489 vlCDR3
QQYGSSPWT

SEQ ID NO: 5029 - protein, 221 aa, Artificial Sequence; identical to SEQ ID NO: 2919
  Description of Artificial Sequence: Synthetic polypeptide
  XENP019490 [CTLA-4]_H0_L0.75_Fab Heavy Chain

SEQ ID NO: 5030 - protein, 118 aa, Artificial Sequence; identical to SEQ ID NO: 22
  Description of Artificial Sequence: Synthetic polypeptide
  VH of XENP019490

SEQ ID NO: 5031 - protein, 5 aa, Artificial Sequence
  Description of Artificial Sequence: Synthetic peptide
  XENP019490 vhCDR1
SYTMH

SEQ ID NO: 5032 - protein, 17 aa, Artificial Sequence
  Description of Artificial Sequence: Synthetic peptide
  XENP019490 vhCDR2
FISYDGNNKYYADSVKG

SEQ ID NO: 5033 - protein, 9 aa, Artificial Sequence
  Description of Artificial Sequence: Synthetic peptide
  XENP019490 vhCDR3
TGWLGPFDY

SEQ ID NO: 5034 - protein, 215 aa, Artificial Sequence
  Description of Artificial Sequence: Synthetic polypeptide
  XENP019490 [CTLA-4]_H0_L0.75_Fab Light Chain
EIVLTQSPGTLSLSPGERATLSCRASQSVGSSYLAWYQQKPGQAPRLLIYGAFARATGIPDRFSGSGSGTDFTLTISRLEPEDFAVYYCQQYGSSPWTFGQGTKVEIKRTVAAPSVFIFPPSDEQLKSGTASVVCLLNNFYPREAKVQWKVDNALQSGNSQESVTEQDSKDSTYSLSSTLTLSKADYEKHKVYACEVTHQGLSSPVTKSFNRGEC

SEQ ID NO: 5035 - protein, 108 aa, Artificial Sequence; identical to SEQ ID NO: 2084
  Description of Artificial Sequence: Synthetic polypeptide
  VL of XENP019490

SEQ ID NO: 5036 - protein, 12 aa, Artificial Sequence
  Description of Artificial Sequence: Synthetic peptide
  XENP019490 vlCDR1
RASQSVGSSYLA

SEQ ID NO: 5037 - protein, 7 aa, Artificial Sequence
  Description of Artificial Sequence: Synthetic peptide
  XENP019490 vlCDR2
GAFARAT

SEQ ID NO: 5038 - protein, 9 aa, Artificial Sequence
  Description of Artificial Sequence: Synthetic peptide
  XENP019490 vlCDR3
QQYGSSPWT

SEQ ID NO: 5039 - protein, 221 aa, Artificial Sequence; identical to SEQ ID NO: 2919
  Description of Artificial Sequence: Synthetic polypeptide
  XENP019491 [CTLA-4]_H0_L0.76_Fab Heavy Chain

SEQ ID NO: 5040 - protein, 118 aa, Artificial Sequence; identical to SEQ ID NO: 22
  Description of Artificial Sequence: Synthetic polypeptide
  VH of XENP019491

SEQ ID NO: 5041 - protein, 5 aa, Artificial Sequence
  Description of Artificial Sequence: Synthetic peptide
  XENP019491 vhCDR1
SYTMH

SEQ ID NO: 5042 - protein, 17 aa, Artificial Sequence
  Description of Artificial Sequence: Synthetic peptide
  XENP019491 vhCDR2
FISYDGNNKYYADSVKG

SEQ ID NO: 5043 - protein, 9 aa, Artificial Sequence
  Description of Artificial Sequence: Synthetic peptide
  XENP019491 vhCDR3
TGWLGPFDY

SEQ ID NO: 5044 - protein, 215 aa, Artificial Sequence
  Description of Artificial Sequence: Synthetic polypeptide
  XENP019491 [CTLA-4]_H0_L0.76_Fab Light Chain
EIVLTQSPGTLSLSPGERATLSCRASQSVGSSYLAWYQQKPGQAPRLLIYGAFGRATGIPDRFSGSGSGTDFTLTISRLEPEDFAVYYCQQYGSSPWTFGQGTKVEIKRTVAAPSVFIFPPSDEQLKSGTASVVCLLNNFYPREAKVQWKVDNALQSGNSQESVTEQDSKDSTYSLSSTLTLSKADYEKHKVYACEVTHQGLSSPVTKSFNRGEC

SEQ ID NO: 5045 - protein, 108 aa, Artificial Sequence; identical to SEQ ID NO: 2093
  Description of Artificial Sequence: Synthetic polypeptide
  VL of XENP019491

SEQ ID NO: 5046 - protein, 12 aa, Artificial Sequence
  Description of Artificial Sequence: Synthetic peptide
  XENP019491 vlCDR1
RASQSVGSSYLA

SEQ ID NO: 5047 - protein, 7 aa, Artificial Sequence
  Description of Artificial Sequence: Synthetic peptide
  XENP019491 vlCDR2
GAFGRAT

SEQ ID NO: 5048 - protein, 9 aa, Artificial Sequence
  Description of Artificial Sequence: Synthetic peptide
  XENP019491 vlCDR3
QQYGSSPWT

SEQ ID NO: 5049 - protein, 221 aa, Artificial Sequence; identical to SEQ ID NO: 2919
  Description of Artificial Sequence: Synthetic polypeptide
  XENP019492 [CTLA-4]_H0_L0.77_Fab Heavy Chain

SEQ ID NO: 5050 - protein, 118 aa, Artificial Sequence; identical to SEQ ID NO: 22
  Description of Artificial Sequence: Synthetic polypeptide
  VH of XENP019492

SEQ ID NO: 5051 - protein, 5 aa, Artificial Sequence
  Description of Artificial Sequence: Synthetic peptide
  XENP019492 vhCDR1
SYTMH

SEQ ID NO: 5052 - protein, 17 aa, Artificial Sequence
  Description of Artificial Sequence: Synthetic peptide
  XENP019492 vhCDR2
FISYDGNNKYYADSVKG

SEQ ID NO: 5053 - protein, 9 aa, Artificial Sequence
  Description of Artificial Sequence: Synthetic peptide
  XENP019492 vhCDR3
TGWLGPFDY

SEQ ID NO: 5054 - protein, 215 aa, Artificial Sequence
  Description of Artificial Sequence: Synthetic polypeptide
  XENP019492 [CTLA-4]_H0_L0.77_Fab Light Chain
EIVLTQSPGTLSLSPGERATLSCRASQSVGSSYLAWYQQKPGQAPRLLIYGAFNRATGIPDRFSGSGSGTDFTLTISRLEPEDFAVYYCQQYGSSPWTFGQGTKVEIKRTVAAPSVFIFPPSDEQLKSGTASVVCLLNNFYPREAKVQWKVDNALQSGNSQESVTEQDSKDSTYSLSSTLTLSKADYEKHKVYACEVTHQGLSSPVTKSFNRGEC

SEQ ID NO: 5055 - protein, 108 aa, Artificial Sequence; identical to SEQ ID NO: 2102
  Description of Artificial Sequence: Synthetic polypeptide
  VL of XENP019492

SEQ ID NO: 5056 - protein, 12 aa, Artificial Sequence
  Description of Artificial Sequence: Synthetic peptide
  XENP019492 vlCDR1
RASQSVGSSYLA

SEQ ID NO: 5057 - protein, 7 aa, Artificial Sequence
  Description of Artificial Sequence: Synthetic peptide
  XENP019492 vlCDR2
GAFNRAT

SEQ ID NO: 5058 - protein, 9 aa, Artificial Sequence
  Description of Artificial Sequence: Synthetic peptide
  XENP019492 vlCDR3
QQYGSSPWT

SEQ ID NO: 5059 - protein, 221 aa, Artificial Sequence; identical to SEQ ID NO: 2919
  Description of Artificial Sequence: Synthetic polypeptide
  XENP019493 [CTLA-4]_H0_L0.78_Fab Heavy Chain

SEQ ID NO: 5060 - protein, 118 aa, Artificial Sequence; identical to SEQ ID NO: 22
  Description of Artificial Sequence: Synthetic polypeptide
  VH of XENP019493

SEQ ID NO: 5061 - protein, 5 aa, Artificial Sequence
  Description of Artificial Sequence: Synthetic peptide
  XENP019493 vhCDR1
SYTMH

SEQ ID NO: 5062 - protein, 17 aa, Artificial Sequence
  Description of Artificial Sequence: Synthetic peptide
  XENP019493 vhCDR2
FISYDGNNKYYADSVKG

SEQ ID NO: 5063 - protein, 9 aa, Artificial Sequence
  Description of Artificial Sequence: Synthetic peptide
  XENP019493 vhCDR3
TGWLGPFDY

SEQ ID NO: 5064 - protein, 215 aa, Artificial Sequence
  Description of Artificial Sequence: Synthetic polypeptide
  XENP019493 [CTLA-4]_H0_L0.78_Fab Light Chain
EIVLTQSPGTLSLSPGERATLSCRASQSVGSSYLAWYQQKPGQAPRLLIYGAFQRATGIPDRFSGSGSGTDFTLTISRLEPEDFAVYYCQQYGSSPWTFGQGTKVEIKRTVAAPSVFIFPPSDEQLKSGTASVVCLLNNFYPREAKVQWKVDNALQSGNSQESVTEQDSKDSTYSLSSTLTLSKADYEKHKVYACEVTHQGLSSPVTKSFNRGEC

SEQ ID NO: 5065 - protein, 108 aa, Artificial Sequence; identical to SEQ ID NO: 2111
  Description of Artificial Sequence: Synthetic polypeptide
  VL of XENP019493

SEQ ID NO: 5066 - protein, 12 aa, Artificial Sequence
  Description of Artificial Sequence: Synthetic peptide
  XENP019493 vlCDR1
RASQSVGSSYLA

SEQ ID NO: 5067 - protein, 7 aa, Artificial Sequence
  Description of Artificial Sequence: Synthetic peptide
  XENP019493 vlCDR2
GAFQRAT

SEQ ID NO: 5068 - protein, 9 aa, Artificial Sequence
  Description of Artificial Sequence: Synthetic peptide
  XENP019493 vlCDR3
QQYGSSPWT

SEQ ID NO: 5069 - protein, 221 aa, Artificial Sequence; identical to SEQ ID NO: 2919
  Description of Artificial Sequence: Synthetic polypeptide
  XENP019494 [CTLA-4]_H0_L0.79_Fab Heavy Chain

SEQ ID NO: 5070 - protein, 118 aa, Artificial Sequence; identical to SEQ ID NO: 22
  Description of Artificial Sequence: Synthetic polypeptide
  VH of XENP019494

SEQ ID NO: 5071 - protein, 5 aa, Artificial Sequence
  Description of Artificial Sequence: Synthetic peptide
  XENP019494 vhCDR1
SYTMH

SEQ ID NO: 5072 - protein, 17 aa, Artificial Sequence
  Description of Artificial Sequence: Synthetic peptide
  XENP019494 vhCDR2
FISYDGNNKYYADSVKG

SEQ ID NO: 5073 - protein, 9 aa, Artificial Sequence
  Description of Artificial Sequence: Synthetic peptide
  XENP019494 vhCDR3
TGWLGPFDY

SEQ ID NO: 5074 - protein, 215 aa, Artificial Sequence
  Description of Artificial Sequence: Synthetic polypeptide
  XENP019494 [CTLA-4]_H0_L0.79_Fab Light Chain
EIVLTQSPGTLSLSPGERATLSCRASQSVGSSYLAWYQQKPGQAPRLLIYGAFTRATGIPDRFSGSGSGTDFTLTISRLEPEDFAVYYCQQYGSSPWTFGQGTKVEIKRTVAAPSVFIFPPSDEQLKSGTASVVCLLNNFYPREAKVQWKVDNALQSGNSQESVTEQDSKDSTYSLSSTLTLSKADYEKHKVYACEVTHQGLSSPVTKSFNRGEC

SEQ ID NO: 5075 - protein, 108 aa, Artificial Sequence; identical to SEQ ID NO: 2120
  Description of Artificial Sequence: Synthetic polypeptide
  VL of XENP019494

SEQ ID NO: 5076 - protein, 12 aa, Artificial Sequence
  Description of Artificial Sequence: Synthetic peptide
  XENP019494 vlCDR1
RASQSVGSSYLA

SEQ ID NO: 5077 - protein, 7 aa, Artificial Sequence
  Description of Artificial Sequence: Synthetic peptide
  XENP019494 vlCDR2
GAFTRAT

SEQ ID NO: 5078 - protein, 9 aa, Artificial Sequence
  Description of Artificial Sequence: Synthetic peptide
  XENP019494 vlCDR3
QQYGSSPWT

SEQ ID NO: 5079 - protein, 221 aa, Artificial Sequence; identical to SEQ ID NO: 2919
  Description of Artificial Sequence: Synthetic polypeptide
  XENP019495 [CTLA-4]_H0_L0.80_Fab Heavy Chain

SEQ ID NO: 5080 - protein, 118 aa, Artificial Sequence; identical to SEQ ID NO: 22
  Description of Artificial Sequence: Synthetic polypeptide
  VH of XENP019495

SEQ ID NO: 5081 - protein, 5 aa, Artificial Sequence
  Description of Artificial Sequence: Synthetic peptide
  XENP019495 vhCDR1
SYTMH

SEQ ID NO: 5082 - protein, 17 aa, Artificial Sequence
  Description of Artificial Sequence: Synthetic peptide
  XENP019495 vhCDR2
FISYDGNNKYYADSVKG

SEQ ID NO: 5083 - protein, 9 aa, Artificial Sequence
  Description of Artificial Sequence: Synthetic peptide
  XENP019495 vhCDR3
TGWLGPFDY

SEQ ID NO: 5084 - protein, 215 aa, Artificial Sequence
  Description of Artificial Sequence: Synthetic polypeptide
  XENP019495 [CTLA-4]_H0_L0.80_Fab Light Chain
EIVLTQSPGTLSLSPGERATLSCRASQSVGSSYLAWYQQKPGQAPRLLIYGAFSRDTGIPDRFSGSGSGTDFTLTISRLEPEDFAVYYCQQYGSSPWTFGQGTKVEIKRTVAAPSVFIFPPSDEQLKSGTASVVCLLNNFYPREAKVQWKVDNALQSGNSQESVTEQDSKDSTYSLSSTLTLSKADYEKHKVYACEVTHQGLSSPVTKSFNRGEC

SEQ ID NO: 5085 - protein, 108 aa, Artificial Sequence; identical to SEQ ID NO: 2129
  Description of Artificial Sequence: Synthetic polypeptide
  VL of XENP019495

SEQ ID NO: 5086 - protein, 12 aa, Artificial Sequence
  Description of Artificial Sequence: Synthetic peptide
  XENP019495 vlCDR1
RASQSVGSSYLA

SEQ ID NO: 5087 - protein, 7 aa, Artificial Sequence
  Description of Artificial Sequence: Synthetic peptide
  XENP019495 vlCDR2
GAFSRDT

SEQ ID NO: 5088 - protein, 9 aa, Artificial Sequence
  Description of Artificial Sequence: Synthetic peptide
  XENP019495 vlCDR3
QQYGSSPWT

SEQ ID NO: 5089 - protein, 221 aa, Artificial Sequence; identical to SEQ ID NO: 2919
  Description of Artificial Sequence: Synthetic polypeptide
  XENP019496 [CTLA-4]_H0_L0.81_Fab Heavy Chain

SEQ ID NO: 5090 - protein, 118 aa, Artificial Sequence; identical to SEQ ID NO: 22
  Description of Artificial Sequence: Synthetic polypeptide
  VH of XENP019496

SEQ ID NO: 5091 - protein, 5 aa, Artificial Sequence
  Description of Artificial Sequence: Synthetic peptide
  XENP019496 vhCDR1
SYTMH

SEQ ID NO: 5092 - protein, 17 aa, Artificial Sequence
  Description of Artificial Sequence: Synthetic peptide
  XENP019496 vhCDR2
FISYDGNNKYYADSVKG

SEQ ID NO: 5093 - protein, 9 aa, Artificial Sequence
  Description of Artificial Sequence: Synthetic peptide
  XENP019496 vhCDR3
TGWLGPFDY

SEQ ID NO: 5094 - protein, 215 aa, Artificial Sequence
  Description of Artificial Sequence: Synthetic polypeptide
  XENP019496 [CTLA-4]_H0_L0.81_Fab Light Chain
EIVLTQSPGTLSLSPGERATLSCRASQSVGSSYLAWYQQKPGQAPRLLIYGAFSRASGIPDRFSGSGSGTDFTLTISRLEPEDFAVYYCQQYGSSPWTFGQGTKVEIKRTVAAPSVFIFPPSDEQLKSGTASVVCLLNNFYPREAKVQWKVDNALQSGNSQESVTEQDSKDSTYSLSSTLTLSKADYEKHKVYACEVTHQGLSSPVTKSFNRGEC

SEQ ID NO: 5095 - protein, 108 aa, Artificial Sequence; identical to SEQ ID NO: 2138
  Description of Artificial Sequence: Synthetic polypeptide
  VL of XENP019496

SEQ ID NO: 5096 - protein, 12 aa, Artificial Sequence
  Description of Artificial Sequence: Synthetic peptide
  XENP019496 vlCDR1
RASQSVGSSYLA

SEQ ID NO: 5097 - protein, 7 aa, Artificial Sequence
  Description of Artificial Sequence: Synthetic peptide
  XENP019496 vlCDR2
GAFSRAS

SEQ ID NO: 5098 - protein, 9 aa, Artificial Sequence
  Description of Artificial Sequence: Synthetic peptide
  XENP019496 vlCDR3
QQYGSSPWT

SEQ ID NO: 5099 - protein, 221 aa, Artificial Sequence; identical to SEQ ID NO: 2919
  Description of Artificial Sequence: Synthetic polypeptide
  XENP019501 [CTLA-4]_H0_L0.82_Fab Heavy Chain

SEQ ID NO: 5100 - protein, 118 aa, Artificial Sequence; identical to SEQ ID NO: 22
  Description of Artificial Sequence: Synthetic polypeptide
  VH of XENP019501

SEQ ID NO: 5101 - protein, 5 aa, Artificial Sequence
  Description of Artificial Sequence: Synthetic peptide
  XENP019501 vhCDR1
SYTMH

SEQ ID NO: 5102 - protein, 17 aa, Artificial Sequence
  Description of Artificial Sequence: Synthetic peptide
  XENP019501 vhCDR2
FISYDGNNKYYADSVKG

SEQ ID NO: 5103 - protein, 9 aa, Artificial Sequence
  Description of Artificial Sequence: Synthetic peptide
  XENP019501 vhCDR3
TGWLGPFDY

SEQ ID NO: 5104 - protein, 215 aa, Artificial Sequence
  Description of Artificial Sequence: Synthetic polypeptide
  XENP019501 [CTLA-4]_H0_L0.82_Fab Light Chain
EIVLTQSPGTLSLSPGERATLSCRASQSVGSSYLAWYQQKPGQAPRLLIYGAFSRATGVPDRFSGSGSGTDFTLTISRLEPEDFAVYYCQQYGSSPWTFGQGTKVEIKRTVAAPSVFIFPPSDEQLKSGTASVVCLLNNFYPREAKVQWKVDNALQSGNSQESVTEQDSKDSTYSLSSTLTLSKADYEKHKVYACEVTHQGLSSPVTKSFNRGEC

SEQ ID NO: 5105 - protein, 108 aa, Artificial Sequence; identical to SEQ ID NO: 2147
  Description of Artificial Sequence: Synthetic polypeptide
  VL of XENP019501

SEQ ID NO: 5106 - protein, 12 aa, Artificial Sequence
  Description of Artificial Sequence: Synthetic peptide
  XENP019501 vlCDR1
RASQSVGSSYLA

SEQ ID NO: 5107 - protein, 7 aa, Artificial Sequence
  Description of Artificial Sequence: Synthetic peptide
  XENP019501 vlCDR2
GAFSRAT

SEQ ID NO: 5108 - protein, 9 aa, Artificial Sequence
  Description of Artificial Sequence: Synthetic peptide
  XENP019501 vlCDR3
QQYGSSPWT

SEQ ID NO: 5109 - protein, 221 aa, Artificial Sequence; identical to SEQ ID NO: 2919
  Description of Artificial Sequence: Synthetic polypeptide
  XENP019502 [CTLA-4]_H0_L0.83_Fab Heavy Chain

SEQ ID NO: 5110 - protein, 118 aa, Artificial Sequence; identical to SEQ ID NO: 22
  Description of Artificial Sequence: Synthetic polypeptide
  VH of XENP019502

SEQ ID NO: 5111 - protein, 5 aa, Artificial Sequence
  Description of Artificial Sequence: Synthetic peptide
  XENP019502 vhCDR1
SYTMH

SEQ ID NO: 5112 - protein, 17 aa, Artificial Sequence
  Description of Artificial Sequence: Synthetic peptide
  XENP019502 vhCDR2
FISYDGNNKYYADSVKG

SEQ ID NO: 5113 - protein, 9 aa, Artificial Sequence
  Description of Artificial Sequence: Synthetic peptide
  XENP019502 vhCDR3
TGWLGPFDY

SEQ ID NO: 5114 - protein, 215 aa, Artificial Sequence
  Description of Artificial Sequence: Synthetic polypeptide
  XENP019502 [CTLA-4]_H0_L0.83_Fab Light Chain
EIVLTQSPGTLSLSPGERATLSCRASQSVGSSYLAWYQQKPGQAPRLLIYGAFSRATGIPARFSGSGSGTDFTLTISRLEPEDFAVYYCQQYGSSPWTFGQGTKVEIKRTVAAPSVFIFPPSDEQLKSGTASVVCLLNNFYPREAKVQWKVDNALQSGNSQESVTEQDSKDSTYSLSSTLTLSKADYEKHKVYACEVTHQGLSSPVTKSFNRGEC

SEQ ID NO: 5115 - protein, 108 aa, Artificial Sequence; identical to SEQ ID NO: 2156
  Description of Artificial Sequence: Synthetic polypeptide
  VL of XENP019502

SEQ ID NO: 5116 - protein, 12 aa, Artificial Sequence
  Description of Artificial Sequence: Synthetic peptide
  XENP019502 vlCDR1
RASQSVGSSYLA

SEQ ID NO: 5117 - protein, 7 aa, Artificial Sequence
  Description of Artificial Sequence: Synthetic peptide
  XENP019502 vlCDR2
GAFSRAT

SEQ ID NO: 5118 - protein, 9 aa, Artificial Sequence
  Description of Artificial Sequence: Synthetic peptide
  XENP019502 vlCDR3
QQYGSSPWT

SEQ ID NO: 5119 - protein, 221 aa, Artificial Sequence; identical to SEQ ID NO: 2919
  Description of Artificial Sequence: Synthetic polypeptide
  XENP019503 [CTLA-4]_H0_L0.84_Fab Heavy Chain

SEQ ID NO: 5120 - protein, 118 aa, Artificial Sequence; identical to SEQ ID NO: 22
  Description of Artificial Sequence: Synthetic polypeptide
  VH of XENP019503

SEQ ID NO: 5121 - protein, 5 aa, Artificial Sequence
  Description of Artificial Sequence: Synthetic peptide
  XENP019503 vhCDR1
SYTMH

SEQ ID NO: 5122 - protein, 17 aa, Artificial Sequence
  Description of Artificial Sequence: Synthetic peptide
  XENP019503 vhCDR2
FISYDGNNKYYADSVKG

SEQ ID NO: 5123 - protein, 9 aa, Artificial Sequence
  Description of Artificial Sequence: Synthetic peptide
  XENP019503 vhCDR3
TGWLGPFDY

SEQ ID NO: 5124 - protein, 215 aa, Artificial Sequence
  Description of Artificial Sequence: Synthetic polypeptide
  XENP019503 [CTLA-4]_H0_L0.84_Fab Light Chain
EIVLTQSPGTLSLSPGERATLSCRASQSVGSSYLAWYQQKPGQAPRLLIYGAFSRATGIPDRFSGSGSRTDFTLTISRLEPEDFAVYYCQQYGSSPWTFGQGTKVEIKRTVAAPSVFIFPPSDEQLKSGTASVVCLLNNFYPREAKVQWKVDNALQSGNSQESVTEQDSKDSTYSLSSTLTLSKADYEKHKVYACEVTHQGLSSPVTKSFNRGEC

SEQ ID NO: 5125 - protein, 108 aa, Artificial Sequence; identical to SEQ ID NO: 2165
  Description of Artificial Sequence: Synthetic polypeptide
  VL of XENP019503

SEQ ID NO: 5126 - protein, 12 aa, Artificial Sequence
  Description of Artificial Sequence: Synthetic peptide
  XENP019503 vlCDR1
RASQSVGSSYLA

SEQ ID NO: 5127 - protein, 7 aa, Artificial Sequence
  Description of Artificial Sequence: Synthetic peptide
  XENP019503 vlCDR2
GAFSRAT

SEQ ID NO: 5128 - protein, 9 aa, Artificial Sequence
  Description of Artificial Sequence: Synthetic peptide
  XENP019503 vlCDR3
QQYGSSPWT

SEQ ID NO: 5129 - protein, 221 aa, Artificial Sequence; identical to SEQ ID NO: 2919
  Description of Artificial Sequence: Synthetic polypeptide
  XENP019504 [CTLA-4]_H0_L0.85_Fab Heavy Chain

SEQ ID NO: 5130 - protein, 118 aa, Artificial Sequence; identical to SEQ ID NO: 22
  Description of Artificial Sequence: Synthetic polypeptide
  VH of XENP019504

SEQ ID NO: 5131 - protein, 5 aa, Artificial Sequence
  Description of Artificial Sequence: Synthetic peptide
  XENP019504 vhCDR1
SYTMH

SEQ ID NO: 5132 - protein, 17 aa, Artificial Sequence
  Description of Artificial Sequence: Synthetic peptide
  XENP019504 vhCDR2
FISYDGNNKYYADSVKG

SEQ ID NO: 5133 - protein, 9 aa, Artificial Sequence
  Description of Artificial Sequence: Synthetic peptide
  XENP019504 vhCDR3
TGWLGPFDY

SEQ ID NO: 5134 - protein, 215 aa, Artificial Sequence
  Description of Artificial Sequence: Synthetic polypeptide
  XENP019504 [CTLA-4]_H0_L0.85_Fab Light Chain
EIVLTQSPGTLSLSPGERATLSCRASQSVGSSYLAWYQQKPGQAPRLLIYGAFSRATGIPDRFSGSGSGTEFTLTISRLEPEDFAVYYCQQYGSSPWTFGQGTKVEIKRTVAAPSVFIFPPSDEQLKSGTASVVCLLNNFYPREAKVQWKVDNALQSGNSQESVTEQDSKDSTYSLSSTLTLSKADYEKHKVYACEVTHQGLSSPVTKSFNRGEC

SEQ ID NO: 5135 - protein, 108 aa, Artificial Sequence; identical to SEQ ID NO: 2174
  Description of Artificial Sequence: Synthetic polypeptide
  VL of XENP019504

SEQ ID NO: 5136 - protein, 12 aa, Artificial Sequence
  Description of Artificial Sequence: Synthetic peptide
  XENP019504 vlCDR1
RASQSVGSSYLA

SEQ ID NO: 5137 - protein, 7 aa, Artificial Sequence
  Description of Artificial Sequence: Synthetic peptide
  XENP019504 vlCDR2
GAFSRAT

SEQ ID NO: 5138 - protein, 9 aa, Artificial Sequence
  Description of Artificial Sequence: Synthetic peptide
  XENP019504 vlCDR3
QQYGSSPWT

SEQ ID NO: 5139 - protein, 221 aa, Artificial Sequence; identical to SEQ ID NO: 2919
  Description of Artificial Sequence: Synthetic polypeptide
  XENP019505 [CTLA-4]_H0_L0.86_Fab Heavy Chain

SEQ ID NO: 5140 - protein, 118 aa, Artificial Sequence; identical to SEQ ID NO: 22
  Description of Artificial Sequence: Synthetic polypeptide
  VH of XENP019505

SEQ ID NO: 5141 - protein, 5 aa, Artificial Sequence
  Description of Artificial Sequence: Synthetic peptide
  XENP019505 vhCDR1
SYTMH

SEQ ID NO: 5142 - protein, 17 aa, Artificial Sequence
  Description of Artificial Sequence: Synthetic peptide
  XENP019505 vhCDR2
FISYDGNNKYYADSVKG

SEQ ID NO: 5143 - protein, 9 aa, Artificial Sequence
  Description of Artificial Sequence: Synthetic peptide
  XENP019505 vhCDR3
TGWLGPFDY

SEQ ID NO: 5144 - protein, 215 aa, Artificial Sequence
  Description of Artificial Sequence: Synthetic polypeptide
  XENP019505 [CTLA-4]_H0_L0.86_Fab Light Chain
EIVLTQSPGTLSLSPGERATLSCRASQSVGSSYLAWYQQKPGQAPRLLIYGAFSRATGIPDRFSGSGSGTDFTLKISRLEPEDFAVYYCQQYGSSPWTFGQGTKVEIKRTVAAPSVFIFPPSDEQLKSGTASVVCLLNNFYPREAKVQWKVDNALQSGNSQESVTEQDSKDSTYSLSSTLTLSKADYEKHKVYACEVTHQGLSSPVTKSFNRGEC

SEQ ID NO: 5145 - protein, 108 aa, Artificial Sequence; identical to SEQ ID NO: 2183
  Description of Artificial Sequence: Synthetic polypeptide
  VL of XENP019505

SEQ ID NO: 5146 - protein, 12 aa, Artificial Sequence
  Description of Artificial Sequence: Synthetic peptide
  XENP019505 vlCDR1
RASQSVGSSYLA

SEQ ID NO: 5147 - protein, 7 aa, Artificial Sequence
  Description of Artificial Sequence: Synthetic peptide
  XENP019505 vlCDR2
GAFSRAT

SEQ ID NO: 5148 - protein, 9 aa, Artificial Sequence
  Description of Artificial Sequence: Synthetic peptide
  XENP019505 vlCDR3
QQYGSSPWT

SEQ ID NO: 5149 - protein, 221 aa, Artificial Sequence; identical to SEQ ID NO: 2919
  Description of Artificial Sequence: Synthetic polypeptide
  XENP019506 [CTLA-4]_H0_L0.87_Fab Heavy Chain

SEQ ID NO: 5150 - protein, 118 aa, Artificial Sequence; identical to SEQ ID NO: 22
  Description of Artificial Sequence: Synthetic polypeptide
  VH of XENP019506

SEQ ID NO: 5151 - protein, 5 aa, Artificial Sequence
  Description of Artificial Sequence: Synthetic peptide
  XENP019506 vhCDR1
SYTMH

SEQ ID NO: 5152 - protein, 17 aa, Artificial Sequence
  Description of Artificial Sequence: Synthetic peptide
  XENP019506 vhCDR2
FISYDGNNKYYADSVKG

SEQ ID NO: 5153 - protein, 9 aa, Artificial Sequence
  Description of Artificial Sequence: Synthetic peptide
  XENP019506 vhCDR3
TGWLGPFDY

SEQ ID NO: 5154 - protein, 215 aa, Artificial Sequence
  Description of Artificial Sequence: Synthetic polypeptide
  XENP019506 [CTLA-4]_H0_L0.87_Fab Light Chain
EIVLTQSPGTLSLSPGERATLSCRASQSVGSSYLAWYQQKPGQAPRLLIYGAFSRATGIPDRFSGSGSGTDFTLTISSLEPEDFAVYYCQQYGSSPWTFGQGTKVEIKRTVAAPSVFIFPPSDEQLKSGTASVVCLLNNFYPREAKVQWKVDNALQSGNSQESVTEQDSKDSTYSLSSTLTLSKADYEKHKVYACEVTHQGLSSPVTKSFNRGEC

SEQ ID NO: 5155 - protein, 108 aa, Artificial Sequence; identical to SEQ ID NO: 2192
  Description of Artificial Sequence: Synthetic polypeptide
  VL of XENP019506

SEQ ID NO: 5156 - protein, 12 aa, Artificial Sequence
  Description of Artificial Sequence: Synthetic peptide
  XENP019506 vlCDR1
RASQSVGSSYLA

SEQ ID NO: 5157 - protein, 7 aa, Artificial Sequence
  Description of Artificial Sequence: Synthetic peptide
  XENP019506 vlCDR2
GAFSRAT

SEQ ID NO: 5158 - protein, 9 aa, Artificial Sequence
  Description of Artificial Sequence: Synthetic peptide
  XENP019506 vlCDR3
QQYGSSPWT

SEQ ID NO: 5159 - protein, 221 aa, Artificial Sequence; identical to SEQ ID NO: 2919
  Description of Artificial Sequence: Synthetic polypeptide
  XENP019507 [CTLA-4]_H0_L0.88_Fab Heavy Chain

SEQ ID NO: 5160 - protein, 118 aa, Artificial Sequence; identical to SEQ ID NO: 22
  Description of Artificial Sequence: Synthetic polypeptide
  VH of XENP019507

SEQ ID NO: 5161 - protein, 5 aa, Artificial Sequence
  Description of Artificial Sequence: Synthetic peptide
  XENP019507 vhCDR1
SYTMH

SEQ ID NO: 5162 - protein, 17 aa, Artificial Sequence
  Description of Artificial Sequence: Synthetic peptide
  XENP019507 vhCDR2
FISYDGNNKYYADSVKG

SEQ ID NO: 5163 - protein, 9 aa, Artificial Sequence
  Description of Artificial Sequence: Synthetic peptide
  XENP019507 vhCDR3
TGWLGPFDY

SEQ ID NO: 5164 - protein, 215 aa, Artificial Sequence
  Description of Artificial Sequence: Synthetic polypeptide
  XENP019507 [CTLA-4]_H0_L0.88_Fab Light Chain
EIVLTQSPGTLSLSPGERATLSCRASQSVGSSYLAWYQQKPGQAPRLLIYGAFSRATGIPDRFSGSGSGTDFTLTISSLQSEDFAVYYCQQYGSSPWTFGQGTKVEIKRTVAAPSVFIFPPSDEQLKSGTASVVCLLNNFYPREAKVQWKVDNALQSGNSQESVTEQDSKDSTYSLSSTLTLSKADYEKHKVYACEVTHQGLSSPVTKSFNRGEC

SEQ ID NO: 5165 - protein, 108 aa, Artificial Sequence; identical to SEQ ID NO: 2201
  Description of Artificial Sequence: Synthetic polypeptide
  VL of XENP019507

SEQ ID NO: 5166 - protein, 12 aa, Artificial Sequence
  Description of Artificial Sequence: Synthetic peptide
  XENP019507 vlCDR1
RASQSVGSSYLA

SEQ ID NO: 5167 - protein, 7 aa, Artificial Sequence
  Description of Artificial Sequence: Synthetic peptide
  XENP019507 vlCDR2
GAFSRAT

SEQ ID NO: 5168 - protein, 9 aa, Artificial Sequence
  Description of Artificial Sequence: Synthetic peptide
  XENP019507 vlCDR3
QQYGSSPWT

SEQ ID NO: 5169 - protein, 221 aa, Artificial Sequence; identical to SEQ ID NO: 2919
  Description of Artificial Sequence: Synthetic polypeptide
  XENP019508 [CTLA-4]_H0_L0.89_Fab Heavy Chain

SEQ ID NO: 5170 - protein, 118 aa, Artificial Sequence; identical to SEQ ID NO: 22
  Description of Artificial Sequence: Synthetic polypeptide
  VH of XENP019508

SEQ ID NO: 5171 - protein, 5 aa, Artificial Sequence
  Description of Artificial Sequence: Synthetic peptide
  XENP019508 vhCDR1
SYTMH

SEQ ID NO: 5172 - protein, 17 aa, Artificial Sequence
  Description of Artificial Sequence: Synthetic peptide
  XENP019508 vhCDR2
FISYDGNNKYYADSVKG

SEQ ID NO: 5173 - protein, 9 aa, Artificial Sequence
  Description of Artificial Sequence: Synthetic peptide
  XENP019508 vhCDR3
TGWLGPFDY

SEQ ID NO: 5174 - protein, 215 aa, Artificial Sequence
  Description of Artificial Sequence: Synthetic polypeptide
  XENP019508 [CTLA-4]_H0_L0.89_Fab Light Chain
EIVLTQSPGTLSLSPGERATLSCRASQSVGSSYLAWYQQKPGQAPRLLIYGAFSRATGIPDRFSGSGSGTDFTLTISRVEPEDFAVYYCQQYGSSPWTFGQGTKVEIKRTVAAPSVFIFPPSDEQLKSGTASVVCLLNNFYPREAKVQWKVDNALQSGNSQESVTEQDSKDSTYSLSSTLTLSKADYEKHKVYACEVTHQGLSSPVTKSFNRGEC

SEQ ID NO: 5175 - protein, 108 aa, Artificial Sequence; identical to SEQ ID NO: 2210
  Description of Artificial Sequence: Synthetic polypeptide
  VL of XENP019508

SEQ ID NO: 5176 - protein, 12 aa, Artificial Sequence
  Description of Artificial Sequence: Synthetic peptide
  XENP019508 vlCDR1
RASQSVGSSYLA

SEQ ID NO: 5177 - protein, 7 aa, Artificial Sequence
  Description of Artificial Sequence: Synthetic peptide
  XENP019508 vlCDR2
GAFSRAT

SEQ ID NO: 5178 - protein, 9 aa, Artificial Sequence
  Description of Artificial Sequence: Synthetic peptide
  XENP019508 vlCDR3
QQYGSSPWT

SEQ ID NO: 5179 - protein, 221 aa, Artificial Sequence; identical to SEQ ID NO: 2919
  Description of Artificial Sequence: Synthetic polypeptide
  XENP019509 [CTLA-4]_H0_L0.90_Fab Heavy Chain

SEQ ID NO: 5180 - protein, 118 aa, Artificial Sequence; identical to SEQ ID NO: 22
  Description of Artificial Sequence: Synthetic polypeptide
  VH of XENP019509

SEQ ID NO: 5181 - protein, 5 aa, Artificial Sequence
  Description of Artificial Sequence: Synthetic peptide
  XENP019509 vhCDR1
SYTMH

SEQ ID NO: 5182 - protein, 17 aa, Artificial Sequence
  Description of Artificial Sequence: Synthetic peptide
  XENP019509 vhCDR2
FISYDGNNKYYADSVKG

SEQ ID NO: 5183 - protein, 9 aa, Artificial Sequence
  Description of Artificial Sequence: Synthetic peptide
  XENP019509 vhCDR3
TGWLGPFDY

SEQ ID NO: 5184 - protein, 215 aa, Artificial Sequence
  Description of Artificial Sequence: Synthetic polypeptide
  XENP019509 [CTLA-4]_H0_L0.90_Fab Light Chain
EIVLTQSPGTLSLSPGERATLSCRASQSVGSSYLAWYQQKPGQAPRLLIYGAFSRATGIPDRFSGSGSGTDFTLTISRLQPEDFAVYYCQQYGSSPWTFGQGTKVEIKRTVAAPSVFIFPPSDEQLKSGTASVVCLLNNFYPREAKVQWKVDNALQSGNSQESVTEQDSKDSTYSLSSTLTLSKADYEKHKVYACEVTHQGLSSPVTKSFNRGEC

SEQ ID NO: 5185 - protein, 108 aa, Artificial Sequence; identical to SEQ ID NO: 2219
  Description of Artificial Sequence: Synthetic polypeptide
  VL of XENP019509

SEQ ID NO: 5186 - protein, 12 aa, Artificial Sequence
  Description of Artificial Sequence: Synthetic peptide
  XENP019509 vlCDR1
RASQSVGSSYLA

SEQ ID NO: 5187 - protein, 7 aa, Artificial Sequence
  Description of Artificial Sequence: Synthetic peptide
  XENP019509 vlCDR2
GAFSRAT

SEQ ID NO: 5188 - protein, 9 aa, Artificial Sequence
  Description of Artificial Sequence: Synthetic peptide
  XENP019509 vlCDR3
QQYGSSPWT

SEQ ID NO: 5189 - protein, 221 aa, Artificial Sequence; identical to SEQ ID NO: 2919
  Description of Artificial Sequence: Synthetic polypeptide
  XENP019510 [CTLA-4]_H0_L0.91_Fab Heavy Chain

SEQ ID NO: 5190 - protein, 118 aa, Artificial Sequence; identical to SEQ ID NO: 22
  Description of Artificial Sequence: Synthetic polypeptide
  VH of XENP019510

SEQ ID NO: 5191 - protein, 5 aa, Artificial Sequence
  Description of Artificial Sequence: Synthetic peptide
  XENP019510 vhCDR1
SYTMH

SEQ ID NO: 5192 - protein, 17 aa, Artificial Sequence
  Description of Artificial Sequence: Synthetic peptide
  XENP019510 vhCDR2
FISYDGNNKYYADSVKG

SEQ ID NO: 5193 - protein, 9 aa, Artificial Sequence
  Description of Artificial Sequence: Synthetic peptide
  XENP019510 vhCDR3
TGWLGPFDY

SEQ ID NO: 5194 - protein, 215 aa, Artificial Sequence
  Description of Artificial Sequence: Synthetic polypeptide
  XENP019510 [CTLA-4]_H0_L0.91_Fab Light Chain
EIVLTQSPGTLSLSPGERATLSCRASQSVGSSYLAWYQQKPGQAPRLLIYGAFSRATGIPDRFSGSGSGTDFTLTISRLESEDFAVYYCQQYGSSPWTFGQGTKVEIKRTVAAPSVFIFPPSDEQLKSGTASVVCLLNNFYPREAKVQWKVDNALQSGNSQESVTEQDSKDSTYSLSSTLTLSKADYEKHKVYACEVTHQGLSSPVTKSFNRGEC

SEQ ID NO: 5195 - protein, 108 aa, Artificial Sequence; identical to SEQ ID NO: 2228
  Description of Artificial Sequence: Synthetic polypeptide
  VL of XENP019510

SEQ ID NO: 5196 - protein, 12 aa, Artificial Sequence
  Description of Artificial Sequence: Synthetic peptide
  XENP019510 vlCDR1
RASQSVGSSYLA

SEQ ID NO: 5197 - protein, 7 aa, Artificial Sequence
  Description of Artificial Sequence: Synthetic peptide
  XENP019510 vlCDR2
GAFSRAT

SEQ ID NO: 5198 - protein, 9 aa, Artificial Sequence
  Description of Artificial Sequence: Synthetic peptide
  XENP019510 vlCDR3
QQYGSSPWT

SEQ ID NO: 5199 - protein, 221 aa, Artificial Sequence; identical to SEQ ID NO: 2919
  Description of Artificial Sequence: Synthetic polypeptide
  XENP019511 [CTLA-4]_H0_L0.92_Fab Heavy Chain

SEQ ID NO: 5200 - protein, 118 aa, Artificial Sequence; identical to SEQ ID NO: 22
  Description of Artificial Sequence: Synthetic polypeptide
  VH of XENP019511

SEQ ID NO: 5201 - protein, 5 aa, Artificial Sequence
  Description of Artificial Sequence: Synthetic peptide
  XENP019511 vhCDR1
SYTMH

SEQ ID NO: 5202 - protein, 17 aa, Artificial Sequence
  Description of Artificial Sequence: Synthetic peptide
  XENP019511 vhCDR2
FISYDGNNKYYADSVKG

SEQ ID NO: 5203 - protein, 9 aa, Artificial Sequence
  Description of Artificial Sequence: Synthetic peptide
  XENP019511 vhCDR3
TGWLGPFDY

SEQ ID NO: 5204 - protein, 215 aa, Artificial Sequence
  Description of Artificial Sequence: Synthetic polypeptide
  XENP019511 [CTLA-4]_H0_L0.92_Fab Light Chain
EIVLTQSPGTLSLSPGERATLSCRASQSVGSSYLAWYQQKPGQAPRLLIYGAFSRATGIPDRFSGSGSGTDFTLTISRLEPQDFAVYYCQQYGSSPWTFGQGTKVEIKRTVAAPSVFIFPPSDEQLKSGTASVVCLLNNFYPREAKVQWKVDNALQSGNSQESVTEQDSKDSTYSLSSTLTLSKADYEKHKVYACEVTHQGLSSPVTKSFNRGEC

SEQ ID NO: 5205 - protein, 108 aa, Artificial Sequence; identical to SEQ ID NO: 2237
  Description of Artificial Sequence: Synthetic polypeptide
  VL of XENP019511

SEQ ID NO: 5206 - protein, 12 aa, Artificial Sequence
  Description of Artificial Sequence: Synthetic peptide
  XENP019511 vlCDR1
RASQSVGSSYLA

SEQ ID NO: 5207 - protein, 7 aa, Artificial Sequence
  Description of Artificial Sequence: Synthetic peptide
  XENP019511 vlCDR2
GAFSRAT

SEQ ID NO: 5208 - protein, 9 aa, Artificial Sequence
  Description of Artificial Sequence: Synthetic peptide
  XENP019511 vlCDR3
QQYGSSPWT

SEQ ID NO: 5209 - protein, 221 aa, Artificial Sequence; identical to SEQ ID NO: 2919
  Description of Artificial Sequence: Synthetic polypeptide
  XENP019512 [CTLA-4]_H0_L0.93_Fab Heavy Chain

SEQ ID NO: 5210 - protein, 118 aa, Artificial Sequence; identical to SEQ ID NO: 22
  Description of Artificial Sequence: Synthetic polypeptide
  VH of XENP019512

SEQ ID NO: 5211 - protein, 5 aa, Artificial Sequence
  Description of Artificial Sequence: Synthetic peptide
  XENP019512 vhCDR1
SYTMH

SEQ ID NO: 5212 - protein, 17 aa, Artificial Sequence
  Description of Artificial Sequence: Synthetic peptide
  XENP019512 vhCDR2
FISYDGNNKYYADSVKG

SEQ ID NO: 5213 - protein, 9 aa, Artificial Sequence
  Description of Artificial Sequence: Synthetic peptide
  XENP019512 vhCDR3
TGWLGPFDY

SEQ ID NO: 5214 - protein, 215 aa, Artificial Sequence
  Description of Artificial Sequence: Synthetic polypeptide
  XENP019512 [CTLA-4]_H0_L0.93_Fab Light Chain
EIVLTQSPGTLSLSPGERATLSCRASQSVGSSYLAWYQQKPGQAPRLLIYGAFSRATGIPDRFSGSGSGTDFTLTISRLEPEDFAVYYCKQYGSSPWTFGQGTKVEIKRTVAAPSVFIFPPSDEQLKSGTASVVCLLNNFYPREAKVQWKVDNALQSGNSQESVTEQDSKDSTYSLSSTLTLSKADYEKHKVYACEVTHQGLSSPVTKSFNRGEC

SEQ ID NO: 5215 - protein, 108 aa, Artificial Sequence; identical to SEQ ID NO: 2246
  Description of Artificial Sequence: Synthetic polypeptide
  VL of XENP019512

SEQ ID NO: 5216 - protein, 12 aa, Artificial Sequence
  Description of Artificial Sequence: Synthetic peptide
  XENP019512 vlCDR1
RASQSVGSSYLA

SEQ ID NO: 5217 - protein, 7 aa, Artificial Sequence
  Description of Artificial Sequence: Synthetic peptide
  XENP019512 vlCDR2
GAFSRAT

SEQ ID NO: 5218 - protein, 9 aa, Artificial Sequence
  Description of Artificial Sequence: Synthetic peptide
  XENP019512 vlCDR3
KQYGSSPWT

SEQ ID NO: 5219 - protein, 221 aa, Artificial Sequence; identical to SEQ ID NO: 2919
  Description of Artificial Sequence: Synthetic polypeptide
  XENP019513 [CTLA-4]_H0_L0.94_Fab Heavy Chain

SEQ ID NO: 5220 - protein, 118 aa, Artificial Sequence; identical to SEQ ID NO: 22
  Description of Artificial Sequence: Synthetic polypeptide
  VH of XENP019513

SEQ ID NO: 5221 - protein, 5 aa, Artificial Sequence
  Description of Artificial Sequence: Synthetic peptide
  XENP019513 vhCDR1
SYTMH

SEQ ID NO: 5222 - protein, 17 aa, Artificial Sequence
  Description of Artificial Sequence: Synthetic peptide
  XENP019513 vhCDR2
FISYDGNNKYYADSVKG

SEQ ID NO: 5223 - protein, 9 aa, Artificial Sequence
  Description of Artificial Sequence: Synthetic peptide
  XENP019513 vhCDR3
TGWLGPFDY

SEQ ID NO: 5224 - protein, 215 aa, Artificial Sequence
  Description of Artificial Sequence: Synthetic polypeptide
  XENP019513 [CTLA-4]_H0_L0.94_Fab Light Chain
EIVLTQSPGTLSLSPGERATLSCRASQSVGSSYLAWYQQKPGQAPRLLIYGAFSRATGIPDRFSGSGSGTDFTLTISRLEPEDFAVYYCLQYGSSPWTFGQGTKVEIKRTVAAPSVFIFPPSDEQLKSGTASVVCLLNNFYPREAKVQWKVDNALQSGNSQESVTEQDSKDSTYSLSSTLTLSKADYEKHKVYACEVTHQGLSSPVTKSFNRGEC

SEQ ID NO: 5225 - protein, 108 aa, Artificial Sequence; identical to SEQ ID NO: 2255
  Description of Artificial Sequence: Synthetic polypeptide
  VL of XENP019513

SEQ ID NO: 5226 - protein, 12 aa, Artificial Sequence
  Description of Artificial Sequence: Synthetic peptide
  XENP019513 vlCDR1
RASQSVGSSYLA

SEQ ID NO: 5227 - protein, 7 aa, Artificial Sequence
  Description of Artificial Sequence: Synthetic peptide
  XENP019513 vlCDR2
GAFSRAT

SEQ ID NO: 5228 - protein, 9 aa, Artificial Sequence
  Description of Artificial Sequence: Synthetic peptide
  XENP019513 vlCDR3
LQYGSSPWT

SEQ ID NO: 5229 - protein, 221 aa, Artificial Sequence; identical to SEQ ID NO: 2919
  Description of Artificial Sequence: Synthetic polypeptide
  XENP019514 [CTLA-4]_H0_L0.95_Fab Heavy Chain

SEQ ID NO: 5230 - protein, 118 aa, Artificial Sequence; identical to SEQ ID NO: 22
  Description of Artificial Sequence: Synthetic polypeptide
  VH of XENP019514

SEQ ID NO: 5231 - protein, 5 aa, Artificial Sequence
  Description of Artificial Sequence: Synthetic peptide
  XENP019514 vhCDR1
SYTMH

SEQ ID NO: 5232 - protein, 17 aa, Artificial Sequence
  Description of Artificial Sequence: Synthetic peptide
  XENP019514 vhCDR2
FISYDGNNKYYADSVKG

SEQ ID NO: 5233 - protein, 9 aa, Artificial Sequence
  Description of Artificial Sequence: Synthetic peptide
  XENP019514 vhCDR3
TGWLGPFDY

SEQ ID NO: 5234 - protein, 215 aa, Artificial Sequence
  Description of Artificial Sequence: Synthetic polypeptide
  XENP019514 [CTLA-4]_H0_L0.95_Fab Light Chain
EIVLTQSPGTLSLSPGERATLSCRASQSVGSSYLAWYQQKPGQAPRLLIYGAFSRATGIPDRFSGSGSGTDFTLTISRLEPEDFAVYYCMQYGSSPWTFGQGTKVEIKRTVAAPSVFIFPPSDEQLKSGTASVVCLLNNFYPREAKVQWKVDNALQSGNSQESVTEQDSKDSTYSLSSTLTLSKADYEKHKVYACEVTHQGLSSPVTKSFNRGEC

SEQ ID NO: 5235 - protein, 108 aa, Artificial Sequence; identical to SEQ ID NO: 2264
  Description of Artificial Sequence: Synthetic polypeptide
  VL of XENP019514

SEQ ID NO: 5236 - protein, 12 aa, Artificial Sequence
  Description of Artificial Sequence: Synthetic peptide
  XENP019514 vlCDR1
RASQSVGSSYLA

SEQ ID NO: 5237 - protein, 7 aa, Artificial Sequence
  Description of Artificial Sequence: Synthetic peptide
  XENP019514 vlCDR2
GAFSRAT

SEQ ID NO: 5238 - protein, 9 aa, Artificial Sequence
  Description of Artificial Sequence: Synthetic peptide
  XENP019514 vlCDR3
MQYGSSPWT

SEQ ID NO: 5239 - protein, 221 aa, Artificial Sequence; identical to SEQ ID NO: 2919
  Description of Artificial Sequence: Synthetic polypeptide
  XENP019515 [CTLA-4]_H0_L0.96_Fab Heavy Chain

SEQ ID NO: 5240 - protein, 118 aa, Artificial Sequence; identical to SEQ ID NO: 22
  Description of Artificial Sequence: Synthetic polypeptide
  VH of XENP019515

SEQ ID NO: 5241 - protein, 5 aa, Artificial Sequence
  Description of Artificial Sequence: Synthetic peptide
  XENP019515 vhCDR1
SYTMH

SEQ ID NO: 5242 - protein, 17 aa, Artificial Sequence
  Description of Artificial Sequence: Synthetic peptide
  XENP019515 vhCDR2
FISYDGNNKYYADSVKG

SEQ ID NO: 5243 - protein, 9 aa, Artificial Sequence
  Description of Artificial Sequence: Synthetic peptide
  XENP019515 vhCDR3
TGWLGPFDY

SEQ ID NO: 5244 - protein, 215 aa, Artificial Sequence
  Description of Artificial Sequence: Synthetic polypeptide
  XENP019515 [CTLA-4]_H0_L0.96_Fab Light Chain
EIVLTQSPGTLSLSPGERATLSCRASQSVGSSYLAWYQQKPGQAPRLLIYGAFSRATGIPDRFSGSGSGTDFTLTISRLEPEDFAVYYCQSYGSSPWTFGQGTKVEIKRTVAAPSVFIFPPSDEQLKSGTASVVCLLNNFYPREAKVQWKVDNALQSGNSQESVTEQDSKDSTYSLSSTLTLSKADYEKHKVYACEVTHQGLSSPVTKSFNRGEC

SEQ ID NO: 5245 - protein, 108 aa, Artificial Sequence; identical to SEQ ID NO: 2273
  Description of Artificial Sequence: Synthetic polypeptide
  VL of XENP019515

SEQ ID NO: 5246 - protein, 12 aa, Artificial Sequence
  Description of Artificial Sequence: Synthetic peptide
  XENP019515 vlCDR1
RASQSVGSSYLA

SEQ ID NO: 5247 - protein, 7 aa, Artificial Sequence
  Description of Artificial Sequence: Synthetic peptide
  XENP019515 vlCDR2
GAFSRAT

SEQ ID NO: 5248 - protein, 9 aa, Artificial Sequence
  Description of Artificial Sequence: Synthetic peptide
  XENP019515 vlCDR3
QSYGSSPWT

SEQ ID NO: 5249 - protein, 221 aa, Artificial Sequence; identical to SEQ ID NO: 2919
  Description of Artificial Sequence: Synthetic polypeptide
  XENP019516 [CTLA-4]_H0_L0.97_Fab Heavy Chain

SEQ ID NO: 5250 - protein, 118 aa, Artificial Sequence; identical to SEQ ID NO: 22
  Description of Artificial Sequence: Synthetic polypeptide
  VH of XENP019516

SEQ ID NO: 5251 - protein, 5 aa, Artificial Sequence
  Description of Artificial Sequence: Synthetic peptide
  XENP019516 vhCDR1
SYTMH

SEQ ID NO: 5252 - protein, 17 aa, Artificial Sequence
  Description of Artificial Sequence: Synthetic peptide
  XENP019516 vhCDR2
FISYDGNNKYYADSVKG

SEQ ID NO: 5253 - protein, 9 aa, Artificial Sequence
  Description of Artificial Sequence: Synthetic peptide
  XENP019516 vhCDR3
TGWLGPFDY

SEQ ID NO: 5254 - protein, 215 aa, Artificial Sequence
  Description of Artificial Sequence: Synthetic polypeptide
  XENP019516 [CTLA-4]_H0_L0.97_Fab Light Chain
EIVLTQSPGTLSLSPGERATLSCRASQSVGSSYLAWYQQKPGQAPRLLIYGAFSRATGIPDRFSGSGSGTDFTLTISRLEPEDFAVYYCQQAGSSPWTFGQGTKVEIKRTVAAPSVFIFPPSDEQLKSGTASVVCLLNNFYPREAKVQWKVDNALQSGNSQESVTEQDSKDSTYSLSSTLTLSKADYEKHKVYACEVTHQGLSSPVTKSFNRGEC

SEQ ID NO: 5255 - protein, 108 aa, Artificial Sequence; identical to SEQ ID NO: 2282
  Description of Artificial Sequence: Synthetic polypeptide
  VL of XENP019516

SEQ ID NO: 5256 - protein, 12 aa, Artificial Sequence
  Description of Artificial Sequence: Synthetic peptide
  XENP019516 vlCDR1
RASQSVGSSYLA

SEQ ID NO: 5257 - protein, 7 aa, Artificial Sequence
  Description of Artificial Sequence: Synthetic peptide
  XENP019516 vlCDR2
GAFSRAT

SEQ ID NO: 5258 - protein, 9 aa, Artificial Sequence
  Description of Artificial Sequence: Synthetic peptide
  XENP019516 vlCDR3
QQAGSSPWT

SEQ ID NO: 5259 - protein, 221 aa, Artificial Sequence; identical to SEQ ID NO: 2919
  Description of Artificial Sequence: Synthetic polypeptide
  XENP019517 [CTLA-4]_H0_L0.98_Fab Heavy Chain

SEQ ID NO: 5260 - protein, 118 aa, Artificial Sequence; identical to SEQ ID NO: 22
  Description of Artificial Sequence: Synthetic polypeptide
  VH of XENP019517

SEQ ID NO: 5261 - protein, 5 aa, Artificial Sequence
  Description of Artificial Sequence: Synthetic peptide
  XENP019517 vhCDR1
SYTMH

SEQ ID NO: 5262 - protein, 17 aa, Artificial Sequence
  Description of Artificial Sequence: Synthetic peptide
  XENP019517 vhCDR2
FISYDGNNKYYADSVKG

SEQ ID NO: 5263 - protein, 9 aa, Artificial Sequence
  Description of Artificial Sequence: Synthetic peptide
  XENP019517 vhCDR3
TGWLGPFDY

SEQ ID NO: 5264 - protein, 215 aa, Artificial Sequence
  Description of Artificial Sequence: Synthetic polypeptide
  XENP019517 [CTLA-4]_H0_L0.98_Fab Light Chain
EIVLTQSPGTLSLSPGERATLSCRASQSVGSSYLAWYQQKPGQAPRLLIYGAFSRATGIPDRFSGSGSGTDFTLTISRLEPEDFAVYYCQQFGSSPWTFGQGTKVEIKRTVAAPSVFIFPPSDEQLKSGTASVVCLLNNFYPREAKVQWKVDNALQSGNSQESVTEQDSKDSTYSLSSTLTLSKADYEKHKVYACEVTHQGLSSPVTKSFNRGEC

SEQ ID NO: 5265 - protein, 108 aa, Artificial Sequence; identical to SEQ ID NO: 2291
  Description of Artificial Sequence: Synthetic polypeptide
  VL of XENP019517

SEQ ID NO: 5266 - protein, 12 aa, Artificial Sequence
  Description of Artificial Sequence: Synthetic peptide
  XENP019517 vlCDR1
RASQSVGSSYLA

SEQ ID NO: 5267 - protein, 7 aa, Artificial Sequence
  Description of Artificial Sequence: Synthetic peptide
  XENP019517 vlCDR2
GAFSRAT

SEQ ID NO: 5268 - protein, 9 aa, Artificial Sequence
  Description of Artificial Sequence: Synthetic peptide
  XENP019517 vlCDR3
QQFGSSPWT

SEQ ID NO: 5269 - protein, 221 aa, Artificial Sequence; identical to SEQ ID NO: 2919
  Description of Artificial Sequence: Synthetic polypeptide
  XENP019518 [CTLA-4]_H0_L0.99_Fab Heavy Chain

SEQ ID NO: 5270 - protein, 118 aa, Artificial Sequence; identical to SEQ ID NO: 22
  Description of Artificial Sequence: Synthetic polypeptide
  VH of XENP019518

SEQ ID NO: 5271 - protein, 5 aa, Artificial Sequence
  Description of Artificial Sequence: Synthetic peptide
  XENP019518 vhCDR1
SYTMH

SEQ ID NO: 5272 - protein, 17 aa, Artificial Sequence
  Description of Artificial Sequence: Synthetic peptide
  XENP019518 vhCDR2
FISYDGNNKYYADSVKG

SEQ ID NO: 5273 - protein, 9 aa, Artificial Sequence
  Description of Artificial Sequence: Synthetic peptide
  XENP019518 vhCDR3
TGWLGPFDY

SEQ ID NO: 5274 - protein, 215 aa, Artificial Sequence
  Description of Artificial Sequence: Synthetic polypeptide
  XENP019518 [CTLA-4]_H0_L0.99_Fab Light Chain
EIVLTQSPGTLSLSPGERATLSCRASQSVGSSYLAWYQQKPGQAPRLLIYGAFSRATGIPDRFSGSGSGTDFTLTISRLEPEDFAVYYCQQHGSSPWTFGQGTKVEIKRTVAAPSVFIFPPSDEQLKSGTASVVCLLNNFYPREAKVQWKVDNALQSGNSQESVTEQDSKDSTYSLSSTLTLSKADYEKHKVYACEVTHQGLSSPVTKSFNRGEC

SEQ ID NO: 5275 - protein, 108 aa, Artificial Sequence; identical to SEQ ID NO: 2300
  Description of Artificial Sequence: Synthetic polypeptide
  VL of XENP019518

SEQ ID NO: 5276 - protein, 12 aa, Artificial Sequence
  Description of Artificial Sequence: Synthetic peptide
  XENP019518 vlCDR1
RASQSVGSSYLA

SEQ ID NO: 5277 - protein, 7 aa, Artificial Sequence
  Description of Artificial Sequence: Synthetic peptide
  XENP019518 vlCDR2
GAFSRAT

SEQ ID NO: 5278 - protein, 9 aa, Artificial Sequence
  Description of Artificial Sequence: Synthetic peptide
  XENP019518 vlCDR3
QQHGSSPWT

SEQ ID NO: 5279 - protein, 221 aa, Artificial Sequence; identical to SEQ ID NO: 2919
  Description of Artificial Sequence: Synthetic polypeptide
  XENP019519 [CTLA-4]_H0_L0.100_Fab Heavy Chain

SEQ ID NO: 5280 - protein, 118 aa, Artificial Sequence; identical to SEQ ID NO: 22
  Description of Artificial Sequence: Synthetic polypeptide
  VH of XENP019519

SEQ ID NO: 5281 - protein, 5 aa, Artificial Sequence
  Description of Artificial Sequence: Synthetic peptide
  XENP019519 vhCDR1
SYTMH

SEQ ID NO: 5282 - protein, 17 aa, Artificial Sequence
  Description of Artificial Sequence: Synthetic peptide
  XENP019519 vhCDR2
FISYDGNNKYYADSVKG

SEQ ID NO: 5283 - protein, 9 aa, Artificial Sequence
  Description of Artificial Sequence: Synthetic peptide
  XENP019519 vhCDR3
TGWLGPFDY

SEQ ID NO: 5284 - protein, 215 aa, Artificial Sequence
  Description of Artificial Sequence: Synthetic polypeptide
  XENP019519 [CTLA-4]_H0_L0.100_Fab Light Chain
EIVLTQSPGTLSLSPGERATLSCRASQSVGSSYLAWYQQKPGQAPRLLIYGAFSRATGIPDRFSGSGSGTDFTLTISRLEPEDFAVYYCQQLGSSPWTFGQGTKVEIKRTVAAPSVFIFPPSDEQLKSGTASVVCLLNNFYPREAKVQWKVDNALQSGNSQESVTEQDSKDSTYSLSSTLTLSKADYEKHKVYACEVTHQGLSSPVTKSFNRGEC

SEQ ID NO: 5285 - protein, 108 aa, Artificial Sequence; identical to SEQ ID NO: 2309
  Description of Artificial Sequence: Synthetic polypeptide
  VL of XENP019519

SEQ ID NO: 5286 - protein, 12 aa, Artificial Sequence
  Description of Artificial Sequence: Synthetic peptide
  XENP019519 vlCDR1
RASQSVGSSYLA

SEQ ID NO: 5287 - protein, 7 aa, Artificial Sequence
  Description of Artificial Sequence: Synthetic peptide
  XENP019519 vlCDR2
GAFSRAT

SEQ ID NO: 5288 - protein, 9 aa, Artificial Sequence
  Description of Artificial Sequence: Synthetic peptide
  XENP019519 vlCDR3
QQLGSSPWT

SEQ ID NO: 5289 - protein, 221 aa, Artificial Sequence; identical to SEQ ID NO: 2919
  Description of Artificial Sequence: Synthetic polypeptide
  XENP019520 [CTLA-4]_H0_L0.101_Fab Heavy Chain

SEQ ID NO: 5290 - protein, 118 aa, Artificial Sequence; identical to SEQ ID NO: 22
  Description of Artificial Sequence: Synthetic polypeptide
  VH of XENP019520

SEQ ID NO: 5291 - protein, 5 aa, Artificial Sequence
  Description of Artificial Sequence: Synthetic peptide
  XENP019520 vhCDR1
SYTMH

SEQ ID NO: 5292 - protein, 17 aa, Artificial Sequence
  Description of Artificial Sequence: Synthetic peptide
  XENP019520 vhCDR2
FISYDGNNKYYADSVKG

SEQ ID NO: 5293 - protein, 9 aa, Artificial Sequence
  Description of Artificial Sequence: Synthetic peptide
  XENP019520 vhCDR3
TGWLGPFDY

SEQ ID NO: 5294 - protein, 215 aa, Artificial Sequence
  Description of Artificial Sequence: Synthetic polypeptide
  XENP019520 [CTLA-4]_H0_L0.101_Fab Light Chain
EIVLTQSPGTLSLSPGERATLSCRASQSVGSSYLAWYQQKPGQAPRLLIYGAFSRATGIPDRFSGSGSGTDFTLTISRLEPEDFAVYYCQQVGSSPWTFGQGTKVEIKRTVAAPSVFIFPPSDEQLKSGTASVVCLLNNFYPREAKVQWKVDNALQSGNSQESVTEQDSKDSTYSLSSTLTLSKADYEKHKVYACEVTHQGLSSPVTKSFNRGEC

SEQ ID NO: 5295 - protein, 108 aa, Artificial Sequence; identical to SEQ ID NO: 2318
  Description of Artificial Sequence: Synthetic polypeptide
  VL of XENP019520

SEQ ID NO: 5296 - protein, 12 aa, Artificial Sequence
  Description of Artificial Sequence: Synthetic peptide
  XENP019520 vlCDR1
RASQSVGSSYLA

SEQ ID NO: 5297 - protein, 7 aa, Artificial Sequence
  Description of Artificial Sequence: Synthetic peptide
  XENP019520 vlCDR2
GAFSRAT

SEQ ID NO: 5298 - protein, 9 aa, Artificial Sequence
  Description of Artificial Sequence: Synthetic peptide
  XENP019520 vlCDR3
QQVGSSPWT

SEQ ID NO: 5299 - protein, 221 aa, Artificial Sequence; identical to SEQ ID NO: 2919
  Description of Artificial Sequence: Synthetic polypeptide
  XENP019521 [CTLA-4]_H0_L0.102_Fab Heavy Chain

SEQ ID NO: 5300 - protein, 118 aa, Artificial Sequence; identical to SEQ ID NO: 22
  Description of Artificial Sequence: Synthetic polypeptide
  VH of XENP019521

SEQ ID NO: 5301 - protein, 5 aa, Artificial Sequence
  Description of Artificial Sequence: Synthetic peptide
  XENP019521 vhCDR1
SYTMH

SEQ ID NO: 5302 - protein, 17 aa, Artificial Sequence
  Description of Artificial Sequence: Synthetic peptide
  XENP019521 vhCDR2
FISYDGNNKYYADSVKG

SEQ ID NO: 5303 - protein, 9 aa, Artificial Sequence
  Description of Artificial Sequence: Synthetic peptide
  XENP019521 vhCDR3
TGWLGPFDY

SEQ ID NO: 5304 - protein, 215 aa, Artificial Sequence
  Description of Artificial Sequence: Synthetic polypeptide
  XENP019521 [CTLA-4]_H0_L0.102_Fab Light Chain
EIVLTQSPGTLSLSPGERATLSCRASQSVGSSYLAWYQQKPGQAPRLLIYGAFSRATGIPDRFSGSGSGTDFTLTISRLEPEDFAVYYCQQYGESPWTFGQGTKVEIKRTVAAPSVFIFPPSDEQLKSGTASVVCLLNNFYPREAKVQWKVDNALQSGNSQESVTEQDSKDSTYSLSSTLTLSKADYEKHKVYACEVTHQGLSSPVTKSFNRGEC

SEQ ID NO: 5305 - protein, 108 aa, Artificial Sequence; identical to SEQ ID NO: 2327
  Description of Artificial Sequence: Synthetic polypeptide
  VL of XENP019521

SEQ ID NO: 5306 - protein, 12 aa, Artificial Sequence
  Description of Artificial Sequence: Synthetic peptide
  XENP019521 vlCDR1
RASQSVGSSYLA

SEQ ID NO: 5307 - protein, 7 aa, Artificial Sequence
  Description of Artificial Sequence: Synthetic peptide
  XENP019521 vlCDR2
GAFSRAT

SEQ ID NO: 5308 - protein, 9 aa, Artificial Sequence
  Description of Artificial Sequence: Synthetic peptide
  XENP019521 vlCDR3
QQYGESPWT

SEQ ID NO: 5309 - protein, 221 aa, Artificial Sequence; identical to SEQ ID NO: 2919
  Description of Artificial Sequence: Synthetic polypeptide
  XENP019522 [CTLA-4]_H0_L0.103_Fab Heavy Chain

SEQ ID NO: 5310 - protein, 118 aa, Artificial Sequence; identical to SEQ ID NO: 22
  Description of Artificial Sequence: Synthetic polypeptide
  VH of XENP019522

SEQ ID NO: 5311 - protein, 5 aa, Artificial Sequence
  Description of Artificial Sequence: Synthetic peptide
  XENP019522 vhCDR1
SYTMH

SEQ ID NO: 5312 - protein, 17 aa, Artificial Sequence
  Description of Artificial Sequence: Synthetic peptide
  XENP019522 vhCDR2
FISYDGNNKYYADSVKG

SEQ ID NO: 5313 - protein, 9 aa, Artificial Sequence
  Description of Artificial Sequence: Synthetic peptide
  XENP019522 vhCDR3
TGWLGPFDY

SEQ ID NO: 5314 - protein, 215 aa, Artificial Sequence
  Description of Artificial Sequence: Synthetic polypeptide
  XENP019522 [CTLA-4]_H0_L0.103_Fab Light Chain
EIVLTQSPGTLSLSPGERATLSCRASQSVGSSYLAWYQQKPGQAPRLLIYGAFSRATGIPDRFSGSGSGTDFTLTISRLEPEDFAVYYCQQYGKSPWTFGQGTKVEIKRTVAAPSVFIFPPSDEQLKSGTASVVCLLNNFYPREAKVQWKVDNALQSGNSQESVTEQDSKDSTYSLSSTLTLSKADYEKHKVYACEVTHQGLSSPVTKSFNRGEC

SEQ ID NO: 5315 - protein, 108 aa, Artificial Sequence; identical to SEQ ID NO: 2336
  Description of Artificial Sequence: Synthetic polypeptide
  VL of XENP019522

SEQ ID NO: 5316 - protein, 12 aa, Artificial Sequence
  Description of Artificial Sequence: Synthetic peptide
  XENP019522 vlCDR1
RASQSVGSSYLA

SEQ ID NO: 5317 - protein, 7 aa, Artificial Sequence
  Description of Artificial Sequence: Synthetic peptide
  XENP019522 vlCDR2
GAFSRAT

SEQ ID NO: 5318 - protein, 9 aa, Artificial Sequence
  Description of Artificial Sequence: Synthetic peptide
  XENP019522 vlCDR3
QQYGKSPWT

SEQ ID NO: 5319 - protein, 221 aa, Artificial Sequence; identical to SEQ ID NO: 2919
  Description of Artificial Sequence: Synthetic polypeptide
  XENP019523 [CTLA-4]_H0_L0.104_Fab Heavy Chain

SEQ ID NO: 5320 - protein, 118 aa, Artificial Sequence; identical to SEQ ID NO: 22
  Description of Artificial Sequence: Synthetic polypeptide
  VH of XENP019523

SEQ ID NO: 5321 - protein, 5 aa, Artificial Sequence
  Description of Artificial Sequence: Synthetic peptide
  XENP019523 vhCDR1
SYTMH

SEQ ID NO: 5322 - protein, 17 aa, Artificial Sequence
  Description of Artificial Sequence: Synthetic peptide
  XENP019523 vhCDR2
FISYDGNNKYYADSVKG

SEQ ID NO: 5323 - protein, 9 aa, Artificial Sequence
  Description of Artificial Sequence: Synthetic peptide
  XENP019523 vhCDR3
TGWLGPFDY

SEQ ID NO: 5324 - protein, 215 aa, Artificial Sequence
  Description of Artificial Sequence: Synthetic polypeptide
  XENP019523 [CTLA-4]_H0_L0.104_Fab Light Chain
EIVLTQSPGTLSLSPGERATLSCRASQSVGSSYLAWYQQKPGQAPRLLIYGAFSRATGIPDRFSGSGSGTDFTLTISRLEPEDFAVYYCQQYGSYPWTFGQGTKVEIKRTVAAPSVFIFPPSDEQLKSGTASVVCLLNNFYPREAKVQWKVDNALQSGNSQESVTEQDSKDSTYSLSSTLTLSKADYEKHKVYACEVTHQGLSSPVTKSFNRGEC

SEQ ID NO: 5325 - protein, 108 aa, Artificial Sequence; identical to SEQ ID NO: 2345
  Description of Artificial Sequence: Synthetic polypeptide
  VL of XENP019523

SEQ ID NO: 5326 - protein, 12 aa, Artificial Sequence
  Description of Artificial Sequence: Synthetic peptide
  XENP019523 vlCDR1
RASQSVGSSYLA

SEQ ID NO: 5327 - protein, 7 aa, Artificial Sequence
  Description of Artificial Sequence: Synthetic peptide
  XENP019523 vlCDR2
GAFSRAT

SEQ ID NO: 5328 - protein, 9 aa, Artificial Sequence
  Description of Artificial Sequence: Synthetic peptide
  XENP019523 vlCDR3
QQYGSYPWT

SEQ ID NO: 5329 - protein, 221 aa, Artificial Sequence; identical to SEQ ID NO: 2919
  Description of Artificial Sequence: Synthetic polypeptide
  XENP019524 [CTLA-4]_H0_L0.105_Fab Heavy Chain

SEQ ID NO: 5330 - protein, 118 aa, Artificial Sequence; identical to SEQ ID NO: 22
  Description of Artificial Sequence: Synthetic polypeptide
  VH of XENP019524

SEQ ID NO: 5331 - protein, 5 aa, Artificial Sequence
  Description of Artificial Sequence: Synthetic peptide
  XENP019524 vhCDR1
SYTMH

SEQ ID NO: 5332 - protein, 17 aa, Artificial Sequence
  Description of Artificial Sequence: Synthetic peptide
  XENP019524 vhCDR2
FISYDGNNKYYADSVKG

SEQ ID NO: 5333 - protein, 9 aa, Artificial Sequence
  Description of Artificial Sequence: Synthetic peptide
  XENP019524 vhCDR3
TGWLGPFDY

SEQ ID NO: 5334 - protein, 215 aa, Artificial Sequence
  Description of Artificial Sequence: Synthetic polypeptide
  XENP019524 [CTLA-4]_H0_L0.105_Fab Light Chain
EIVLTQSPGTLSLSPGERATLSCRASQSVGSSYLAWYQQKPGQAPRLLIYGAFSRATGIPDRFSGSGSGTDFTLTISRLEPEDFAVYYCQQYGSSHWTFGQGTKVEIKRTVAAPSVFIFPPSDEQLKSGTASVVCLLNNFYPREAKVQWKVDNALQSGNSQESVTEQDSKDSTYSLSSTLTLSKADYEKHKVYACEVTHQGLSSPVTKSFNRGEC

SEQ ID NO: 5335 - protein, 108 aa, Artificial Sequence; identical to SEQ ID NO: 2354
  Description of Artificial Sequence: Synthetic polypeptide
  VL of XENP019524

SEQ ID NO: 5336 - protein, 12 aa, Artificial Sequence
  Description of Artificial Sequence: Synthetic peptide
  XENP019524 vlCDR1
RASQSVGSSYLA

SEQ ID NO: 5337 - protein, 7 aa, Artificial Sequence
  Description of Artificial Sequence: Synthetic peptide
  XENP019524 vlCDR2
GAFSRAT

SEQ ID NO: 5338 - protein, 9 aa, Artificial Sequence
  Description of Artificial Sequence: Synthetic peptide
  XENP019524 vlCDR3
QQYGSSHWT

SEQ ID NO: 5339 - protein, 221 aa, Artificial Sequence; identical to SEQ ID NO: 2919
  Description of Artificial Sequence: Synthetic polypeptide
  XENP019525 [CTLA-4]_H0_L0.106_Fab Heavy Chain

SEQ ID NO: 5340 - protein, 118 aa, Artificial Sequence; identical to SEQ ID NO: 22
  Description of Artificial Sequence: Synthetic polypeptide
  VH of XENP019525

SEQ ID NO: 5341 - protein, 5 aa, Artificial Sequence
  Description of Artificial Sequence: Synthetic peptide
  XENP019525 vhCDR1
SYTMH

SEQ ID NO: 5342 - protein, 17 aa, Artificial Sequence
  Description of Artificial Sequence: Synthetic peptide
  XENP019525 vhCDR2
FISYDGNNKYYADSVKG

SEQ ID NO: 5343 - protein, 9 aa, Artificial Sequence
  Description of Artificial Sequence: Synthetic peptide
  XENP019525 vhCDR3
TGWLGPFDY

SEQ ID NO: 5344 - protein, 215 aa, Artificial Sequence
  Description of Artificial Sequence: Synthetic polypeptide
  XENP019525 [CTLA-4]_H0_L0.106_Fab Light Chain
EIVLTQSPGTLSLSPGERATLSCRASQSVGSSYLAWYQQKPGQAPRLLIYGAFSRATGIPDRFSGSGSGTDFTLTISRLEPEDFAVYYCQQYGSSPFTFGQGTKVEIKRTVAAPSVFIFPPSDEQLKSGTASVVCLLNNFYPREAKVQWKVDNALQSGNSQESVTEQDSKDSTYSLSSTLTLSKADYEKHKVYACEVTHQGLSSPVTKSFNRGEC

SEQ ID NO: 5345 - protein, 108 aa, Artificial Sequence; identical to SEQ ID NO: 2363
  Description of Artificial Sequence: Synthetic polypeptide
  VL of XENP019525

SEQ ID NO: 5346 - protein, 12 aa, Artificial Sequence
  Description of Artificial Sequence: Synthetic peptide
  XENP019525 vlCDR1
RASQSVGSSYLA

SEQ ID NO: 5347 - protein, 7 aa, Artificial Sequence
  Description of Artificial Sequence: Synthetic peptide
  XENP019525 vlCDR2
GAFSRAT

SEQ ID NO: 5348 - protein, 9 aa, Artificial Sequence
  Description of Artificial Sequence: Synthetic peptide
  XENP019525 vlCDR3
QQYGSSPFT

SEQ ID NO: 5349 - protein, 221 aa, Artificial Sequence; identical to SEQ ID NO: 2919
  Description of Artificial Sequence: Synthetic polypeptide
  XENP019526 [CTLA-4]_H0_L0.107_Fab Heavy Chain

SEQ ID NO: 5350 - protein, 118 aa, Artificial Sequence; identical to SEQ ID NO: 22
  Description of Artificial Sequence: Synthetic polypeptide
  VH of XENP019526

SEQ ID NO: 5351 - protein, 5 aa, Artificial Sequence
  Description of Artificial Sequence: Synthetic peptide
  XENP019526 vhCDR1
SYTMH

SEQ ID NO: 5352 - protein, 17 aa, Artificial Sequence
  Description of Artificial Sequence: Synthetic peptide
  XENP019526 vhCDR2
FISYDGNNKYYADSVKG

SEQ ID NO: 5353 - protein, 9 aa, Artificial Sequence
  Description of Artificial Sequence: Synthetic peptide
  XENP019526 vhCDR3
TGWLGPFDY

SEQ ID NO: 5354 - protein, 215 aa, Artificial Sequence
  Description of Artificial Sequence: Synthetic polypeptide
  XENP019526 [CTLA-4]_H0_L0.107_Fab Light Chain
EIVLTQSPGTLSLSPGERATLSCRASQSVGSSYLAWYQQKPGQAPRLLIYGAFSRATGIPDRFSGSGSGTDFTLTISRLEPEDFAVYYCQQYGSSPHTFGQGTKVEIKRTVAAPSVFIFPPSDEQLKSGTASVVCLLNNFYPREAKVQWKVDNALQSGNSQESVTEQDSKDSTYSLSSTLTLSKADYEKHKVYACEVTHQGLSSPVTKSFNRGEC

SEQ ID NO: 5355 - protein, 108 aa, Artificial Sequence; identical to SEQ ID NO: 2372
  Description of Artificial Sequence: Synthetic polypeptide
  VL of XENP019526

SEQ ID NO: 5356 - protein, 12 aa, Artificial Sequence
  Description of Artificial Sequence: Synthetic peptide
  XENP019526 vlCDR1
RASQSVGSSYLA

SEQ ID NO: 5357 - protein, 7 aa, Artificial Sequence
  Description of Artificial Sequence: Synthetic peptide
  XENP019526 vlCDR2
GAFSRAT

SEQ ID NO: 5358 - protein, 9 aa, Artificial Sequence
  Description of Artificial Sequence: Synthetic peptide
  XENP019526 vlCDR3
QQYGSSPHT

SEQ ID NO: 5359 - protein, 221 aa, Artificial Sequence; identical to SEQ ID NO: 2919
  Description of Artificial Sequence: Synthetic polypeptide
  XENP019527 [CTLA-4]_H0_L0.108_Fab Heavy Chain

SEQ ID NO: 5360 - protein, 118 aa, Artificial Sequence; identical to SEQ ID NO: 22
  Description of Artificial Sequence: Synthetic polypeptide
  VH of XENP019527

SEQ ID NO: 5361 - protein, 5 aa, Artificial Sequence
  Description of Artificial Sequence: Synthetic peptide
  XENP019527 vhCDR1
SYTMH

SEQ ID NO: 5362 - protein, 17 aa, Artificial Sequence
  Description of Artificial Sequence: Synthetic peptide
  XENP019527 vhCDR2
FISYDGNNKYYADSVKG

SEQ ID NO: 5363 - protein, 9 aa, Artificial Sequence
  Description of Artificial Sequence: Synthetic peptide
  XENP019527 vhCDR3
TGWLGPFDY

SEQ ID NO: 5364 - protein, 215 aa, Artificial Sequence
  Description of Artificial Sequence: Synthetic polypeptide
  XENP019527 [CTLA-4]_H0_L0.108_Fab Light Chain
EIVLTQSPGTLSLSPGERATLSCRASQSVGSSYLAWYQQKPGQAPRLLIYGAFSRATGIPDRFSGSGSGTDFTLTISRLEPEDFAVYYCQQYGSSPITFGQGTKVEIKRTVAAPSVFIFPPSDEQLKSGTASVVCLLNNFYPREAKVQWKVDNALQSGNSQESVTEQDSKDSTYSLSSTLTLSKADYEKHKVYACEVTHQGLSSPVTKSFNRGEC

SEQ ID NO: 5365 - protein, 108 aa, Artificial Sequence; identical to SEQ ID NO: 2381
  Description of Artificial Sequence: Synthetic polypeptide
  VL of XENP019527

SEQ ID NO: 5366 - protein, 12 aa, Artificial Sequence
  Description of Artificial Sequence: Synthetic peptide
  XENP019527 vlCDR1
RASQSVGSSYLA

SEQ ID NO: 5367 - protein, 7 aa, Artificial Sequence
  Description of Artificial Sequence: Synthetic peptide
  XENP019527 vlCDR2
GAFSRAT

SEQ ID NO: 5368 - protein, 9 aa, Artificial Sequence
  Description of Artificial Sequence: Synthetic peptide
  XENP019527 vlCDR3
QQYGSSPIT

SEQ ID NO: 5369 - protein, 221 aa, Artificial Sequence; identical to SEQ ID NO: 2919
  Description of Artificial Sequence: Synthetic polypeptide
  XENP019528 [CTLA-4]_H0_L0.109_Fab Heavy Chain

SEQ ID NO: 5370 - protein, 118 aa, Artificial Sequence; identical to SEQ ID NO: 22
  Description of Artificial Sequence: Synthetic polypeptide
  VH of XENP019528

SEQ ID NO: 5371 - protein, 5 aa, Artificial Sequence
  Description of Artificial Sequence: Synthetic peptide
  XENP019528 vhCDR1
SYTMH

SEQ ID NO: 5372 - protein, 17 aa, Artificial Sequence
  Description of Artificial Sequence: Synthetic peptide
  XENP019528 vhCDR2
FISYDGNNKYYADSVKG

SEQ ID NO: 5373 - protein, 9 aa, Artificial Sequence
  Description of Artificial Sequence: Synthetic peptide
  XENP019528 vhCDR3
TGWLGPFDY

SEQ ID NO: 5374 - protein, 215 aa, Artificial Sequence
  Description of Artificial Sequence: Synthetic polypeptide
  XENP019528 [CTLA-4]_H0_L0.109_Fab Light Chain
EIVLTQSPGTLSLSPGERATLSCRASQSVGSSYLAWYQQKPGQAPRLLIYGAFSRATGIPDRFSGSGSGTDFTLTISRLEPEDFAVYYCQQYGSSPLTFGQGTKVEIKRTVAAPSVFIFPPSDEQLKSGTASVVCLLNNFYPREAKVQWKVDNALQSGNSQESVTEQDSKDSTYSLSSTLTLSKADYEKHKVYACEVTHQGLSSPVTKSFNRGEC

SEQ ID NO: 5375 - protein, 108 aa, Artificial Sequence; identical to SEQ ID NO: 2390
  Description of Artificial Sequence: Synthetic polypeptide
  VL of XENP019528

SEQ ID NO: 5376 - protein, 12 aa, Artificial Sequence
  Description of Artificial Sequence: Synthetic peptide
  XENP019528 vlCDR1
RASQSVGSSYLA

SEQ ID NO: 5377 - protein, 7 aa, Artificial Sequence
  Description of Artificial Sequence: Synthetic peptide
  XENP019528 vlCDR2
GAFSRAT

SEQ ID NO: 5378 - protein, 9 aa, Artificial Sequence
  Description of Artificial Sequence: Synthetic peptide
  XENP019528 vlCDR3
QQYGSSPLT

SEQ ID NO: 5379 - protein, 221 aa, Artificial Sequence; identical to SEQ ID NO: 2919
  Description of Artificial Sequence: Synthetic polypeptide
  XENP019529 [CTLA-4]_H0_L0.110_Fab Heavy Chain

SEQ ID NO: 5380 - protein, 118 aa, Artificial Sequence; identical to SEQ ID NO: 22
  Description of Artificial Sequence: Synthetic polypeptide
  VH of XENP019529

SEQ ID NO: 5381 - protein, 5 aa, Artificial Sequence
  Description of Artificial Sequence: Synthetic peptide
  XENP019529 vhCDR1
SYTMH

SEQ ID NO: 5382 - protein, 17 aa, Artificial Sequence
  Description of Artificial Sequence: Synthetic peptide
  XENP019529 vhCDR2
FISYDGNNKYYADSVKG

SEQ ID NO: 5383 - protein, 9 aa, Artificial Sequence
  Description of Artificial Sequence: Synthetic peptide
  XENP019529 vhCDR3
TGWLGPFDY

SEQ ID NO: 5384 - protein, 215 aa, Artificial Sequence
  Description of Artificial Sequence: Synthetic polypeptide
  XENP019529 [CTLA-4]_H0_L0.110_Fab Light Chain
EIVLTQSPGTLSLSPGERATLSCRASQSVGSSYLAWYQQKPGQAPRLLIYGAFSRATGIPDRFSGSGSGTDFTLTISRLEPEDFAVYYCQQYGSSPYTFGQGTKVEIKRTVAAPSVFIFPPSDEQLKSGTASVVCLLNNFYPREAKVQWKVDNALQSGNSQESVTEQDSKDSTYSLSSTLTLSKADYEKHKVYACEVTHQGLSSPVTKSFNRGEC

SEQ ID NO: 5385 - protein, 108 aa, Artificial Sequence; identical to SEQ ID NO: 2399
  Description of Artificial Sequence: Synthetic polypeptide
  VL of XENP019529

SEQ ID NO: 5386 - protein, 12 aa, Artificial Sequence
  Description of Artificial Sequence: Synthetic peptide
  XENP019529 vlCDR1
RASQSVGSSYLA

SEQ ID NO: 5387 - protein, 7 aa, Artificial Sequence
  Description of Artificial Sequence: Synthetic peptide
  XENP019529 vlCDR2
GAFSRAT

SEQ ID NO: 5388 - protein, 9 aa, Artificial Sequence
  Description of Artificial Sequence: Synthetic peptide
  XENP019529 vlCDR3
QQYGSSPYT

SEQ ID NO: 5389 - protein, 221 aa, Artificial Sequence; identical to SEQ ID NO: 2919
  Description of Artificial Sequence: Synthetic polypeptide
  XENP019530 [CTLA-4]_H0_L0.111_Fab Heavy Chain

SEQ ID NO: 5390 - protein, 118 aa, Artificial Sequence; identical to SEQ ID NO: 22
  Description of Artificial Sequence: Synthetic polypeptide
  VH of XENP019530

SEQ ID NO: 5391 - protein, 5 aa, Artificial Sequence
  Description of Artificial Sequence: Synthetic peptide
  XENP019530 vhCDR1
SYTMH

SEQ ID NO: 5392 - protein, 17 aa, Artificial Sequence
  Description of Artificial Sequence: Synthetic peptide
  XENP019530 vhCDR2
FISYDGNNKYYADSVKG

SEQ ID NO: 5393 - protein, 9 aa, Artificial Sequence
  Description of Artificial Sequence: Synthetic peptide
  XENP019530 vhCDR3
TGWLGPFDY

SEQ ID NO: 5394 - protein, 215 aa, Artificial Sequence
  Description of Artificial Sequence: Synthetic polypeptide
  XENP019530 [CTLA-4]_H0_L0.111_Fab Light Chain
EIVLTQSPGTLSLSPGERATLSCRASQSVGSSYLAWYQQKPGQAPRLLIYGAFSRATGIPDRFSGSGSGTDFTLTISRLEPEDFAVYYCQQYGSSPWVFGQGTKVEIKRTVAAPSVFIFPPSDEQLKSGTASVVCLLNNFYPREAKVQWKVDNALQSGNSQESVTEQDSKDSTYSLSSTLTLSKADYEKHKVYACEVTHQGLSSPVTKSFNRGEC

SEQ ID NO: 5395 - protein, 108 aa, Artificial Sequence; identical to SEQ ID NO: 2408
  Description of Artificial Sequence: Synthetic polypeptide
  VL of XENP019530

SEQ ID NO: 5396 - protein, 12 aa, Artificial Sequence
  Description of Artificial Sequence: Synthetic peptide
  XENP019530 vlCDR1
RASQSVGSSYLA

SEQ ID NO: 5397 - protein, 7 aa, Artificial Sequence
  Description of Artificial Sequence: Synthetic peptide
  XENP019530 vlCDR2
GAFSRAT

SEQ ID NO: 5398 - protein, 9 aa, Artificial Sequence
  Description of Artificial Sequence: Synthetic peptide
  XENP019530 vlCDR3
QQYGSSPWV

SEQ ID NO: 5399 - protein, 221 aa, Artificial Sequence; identical to SEQ ID NO: 2919
  Description of Artificial Sequence: Synthetic polypeptide
  XENP019531 [CTLA-4]_H0_L0.112_Fab Heavy Chain

SEQ ID NO: 5400 - protein, 118 aa, Artificial Sequence; identical to SEQ ID NO: 22
  Description of Artificial Sequence: Synthetic polypeptide
  VH of XENP019531

SEQ ID NO: 5401 - protein, 5 aa, Artificial Sequence
  Description of Artificial Sequence: Synthetic peptide
  XENP019531 vhCDR1
SYTMH

SEQ ID NO: 5402 - protein, 17 aa, Artificial Sequence
  Description of Artificial Sequence: Synthetic peptide
  XENP019531 vhCDR2
FISYDGNNKYYADSVKG

SEQ ID NO: 5403 - protein, 9 aa, Artificial Sequence
  Description of Artificial Sequence: Synthetic peptide
  XENP019531 vhCDR3
TGWLGPFDY

SEQ ID NO: 5404 - protein, 215 aa, Artificial Sequence
  Description of Artificial Sequence: Synthetic polypeptide
  XENP019531 [CTLA-4]_H0_L0.112_Fab Light Chain
EIVLTQSPGTLSLSPGERATLSCRASQSVGSSYLAWYQQKPGQAPRLLIYGAFSRATGIPDRFSGSGSGTDFTLTISRLEPEDFAVYYCQQYGSSPWTFGGGTKVEIKRTVAAPSVFIFPPSDEQLKSGTASVVCLLNNFYPREAKVQWKVDNALQSGNSQESVTEQDSKDSTYSLSSTLTLSKADYEKHKVYACEVTHQGLSSPVTKSFNRGEC

SEQ ID NO: 5405 - protein, 108 aa, Artificial Sequence; identical to SEQ ID NO: 2417
  Description of Artificial Sequence: Synthetic polypeptide
  VL of XENP019531

SEQ ID NO: 5406 - protein, 12 aa, Artificial Sequence
  Description of Artificial Sequence: Synthetic peptide
  XENP019531 vlCDR1
RASQSVGSSYLA

SEQ ID NO: 5407 - protein, 7 aa, Artificial Sequence
  Description of Artificial Sequence: Synthetic peptide
  XENP019531 vlCDR2
GAFSRAT

SEQ ID NO: 5408 - protein, 9 aa, Artificial Sequence
  Description of Artificial Sequence: Synthetic peptide
  XENP019531 vlCDR3
QQYGSSPWT

SEQ ID NO: 5409 - protein, 221 aa, Artificial Sequence; identical to SEQ ID NO: 2919
  Description of Artificial Sequence: Synthetic polypeptide
  XENP019532 [CTLA-4]_H0_L0.113_Fab Heavy Chain

SEQ ID NO: 5410 - protein, 118 aa, Artificial Sequence; identical to SEQ ID NO: 22
  Description of Artificial Sequence: Synthetic polypeptide
  VH of XENP019532

SEQ ID NO: 5411 - protein, 5 aa, Artificial Sequence
  Description of Artificial Sequence: Synthetic peptide
  XENP019532 vhCDR1
SYTMH

SEQ ID NO: 5412 - protein, 17 aa, Artificial Sequence
  Description of Artificial Sequence: Synthetic peptide
  XENP019532 vhCDR2
FISYDGNNKYYADSVKG

SEQ ID NO: 5413 - protein, 9 aa, Artificial Sequence
  Description of Artificial Sequence: Synthetic peptide
  XENP019532 vhCDR3
TGWLGPFDY

SEQ ID NO: 5414 - protein, 215 aa, Artificial Sequence
  Description of Artificial Sequence: Synthetic polypeptide
  XENP019532 [CTLA-4]_H0_L0.113_Fab Light Chain
EIVLTQSPGTLSLSPGERATLSCRASQSVGSSYLAWYQQKPGQAPRLLIYGAFSRATGIPDRFSGSGSGTDFTLTISRLEPEDFAVYYCQQYGSSPWTFGEGTKVEIKRTVAAPSVFIFPPSDEQLKSGTASVVCLLNNFYPREAKVQWKVDNALQSGNSQESVTEQDSKDSTYSLSSTLTLSKADYEKHKVYACEVTHQGLSSPVTKSFNRGEC

SEQ ID NO: 5415 - protein, 108 aa, Artificial Sequence; identical to SEQ ID NO: 59
  Description of Artificial Sequence: Synthetic polypeptide
  VL of XENP019532

SEQ ID NO: 5416 - protein, 12 aa, Artificial Sequence
  Description of Artificial Sequence: Synthetic peptide
  XENP019532 vlCDR1
RASQSVGSSYLA

SEQ ID NO: 5417 - protein, 7 aa, Artificial Sequence
  Description of Artificial Sequence: Synthetic peptide
  XENP019532 vlCDR2
GAFSRAT

SEQ ID NO: 5418 - protein, 9 aa, Artificial Sequence
  Description of Artificial Sequence: Synthetic peptide
  XENP019532 vlCDR3
QQYGSSPWT

SEQ ID NO: 5419 - protein, 221 aa, Artificial Sequence
  Description of Artificial Sequence: Synthetic polypeptide
  XENP019544 [CTLA-4]_H1_L0_Fab Heavy Chain
EVQLVESGGGLVQPGGSLRLSCAASGFTFSSYTMHWVRQAPGKGLEWVTFISYDGNNKYYVDSVKGRFTISRDNAKNSLYLQMNSLRAEDTAVYYCARTGWLGPFDYWGQGTLVTVSSASTKGPSVFPLAPSSKSTSGGTAALGCLVKDYFPEPVTVSWNSGALTSGVHTFPAVLQSSGLYSLSSVVTVPSSSLGTQTYICNVNHKPSNTKVDKKVEPKSC

SEQ ID NO: 5420 - protein, 118 aa, Artificial Sequence; identical to SEQ ID NO: 121
  Description of Artificial Sequence: Synthetic polypeptide
  VH of XENP019544

SEQ ID NO: 5421 - protein, 5 aa, Artificial Sequence
  Description of Artificial Sequence: Synthetic peptide
  XENP019544 vhCDR1
SYTMH

SEQ ID NO: 5422 - protein, 17 aa, Artificial Sequence
  Description of Artificial Sequence: Synthetic peptide
  XENP019544 vhCDR2
FISYDGNNKYYVDSVKG

SEQ ID NO: 5423 - protein, 9 aa, Artificial Sequence
  Description of Artificial Sequence: Synthetic peptide
  XENP019544 vhCDR3
TGWLGPFDY

SEQ ID NO: 5424 - protein, 215 aa, Artificial Sequence; identical to SEQ ID NO: 2924
  Description of Artificial Sequence: Synthetic polypeptide
  XENP019544 [CTLA-4]_H1_L0_Fab Light Chain

SEQ ID NO: 5425 - protein, 108 aa, Artificial Sequence; identical to SEQ ID NO: 23
  Description of Artificial Sequence: Synthetic polypeptide
  VL of XENP019544

SEQ ID NO: 5426 - protein, 12 aa, Artificial Sequence
  Description of Artificial Sequence: Synthetic peptide
  XENP019544 vlCDR1
RASQSVGSSYLA

SEQ ID NO: 5427 - protein, 7 aa, Artificial Sequence
  Description of Artificial Sequence: Synthetic peptide
  XENP019544 vlCDR2
GAFSRAT

SEQ ID NO: 5428 - protein, 9 aa, Artificial Sequence
  Description of Artificial Sequence: Synthetic peptide
  XENP019544 vlCDR3
QQYGSSPWT

SEQ ID NO: 5429 - protein, 221 aa, Artificial Sequence
  Description of Artificial Sequence: Synthetic polypeptide
  XENP019545 [CTLA-4]_H2_L0_Fab Heavy Chain
EVQLVESGGGLVQPGGSLRLSCAASGFTFSSYTMHWVRQAPGKGLEWVTFISYDGNNKYYPGSVKGRFTISRENAKNSLYLQMNSLRAGDTAVYYCARTGWLGPFDYWGQGTLVTVSSASTKGPSVFPLAPSSKSTSGGTAALGCLVKDYFPEPVTVSWNSGALTSGVHTFPAVLQSSGLYSLSSVVTVPSSSLGTQTYICNVNHKPSNTKVDKKVEPKSC

SEQ ID NO: 5430 - protein, 118 aa, Artificial Sequence; identical to SEQ ID NO: 130
  Description of Artificial Sequence: Synthetic polypeptide
  VH of XENP019545

SEQ ID NO: 5431 - protein, 5 aa, Artificial Sequence
  Description of Artificial Sequence: Synthetic peptide
  XENP019545 vhCDR1
SYTMH

SEQ ID NO: 5432 - protein, 17 aa, Artificial Sequence
  Description of Artificial Sequence: Synthetic peptide
  XENP019545 vhCDR2
FISYDGNNKYYPGSVKG

SEQ ID NO: 5433 - protein, 9 aa, Artificial Sequence
  Description of Artificial Sequence: Synthetic peptide
  XENP019545 vhCDR3
TGWLGPFDY

SEQ ID NO: 5434 - protein, 215 aa, Artificial Sequence; identical to SEQ ID NO: 2924
  Description of Artificial Sequence: Synthetic polypeptide
  XENP019545 [CTLA-4]_H2_L0_Fab Light Chain

SEQ ID NO: 5435 - protein, 108 aa, Artificial Sequence; identical to SEQ ID NO: 23
  Description of Artificial Sequence: Synthetic polypeptide
  VL of XENP019545

SEQ ID NO: 5436 - protein, 12 aa, Artificial Sequence
  Description of Artificial Sequence: Synthetic peptide
  XENP019545 vlCDR1
RASQSVGSSYLA

SEQ ID NO: 5437 - protein, 7 aa, Artificial Sequence
  Description of Artificial Sequence: Synthetic peptide
  XENP019545 vlCDR2
GAFSRAT

SEQ ID NO: 5438 - protein, 9 aa, Artificial Sequence
  Description of Artificial Sequence: Synthetic peptide
  XENP019545 vlCDR3
QQYGSSPWT

SEQ ID NO: 5439 - protein, 221 aa, Artificial Sequence
  Description of Artificial Sequence: Synthetic polypeptide
  XENP019546 [CTLA-4]_H3_L0_Fab Heavy Chain
EVQLVESGGGLVKPGGSLRLSCAASGFTFSSYTMHWVRQAPGKGLEWVSFISYDGNNKYYADSVKGRFTISRDNAKNSLYLQMNSLRAEDTAVYYCARTGWLGPFDYWGQGTLVTVSSASTKGPSVFPLAPSSKSTSGGTAALGCLVKDYFPEPVTVSWNSGALTSGVHTFPAVLQSSGLYSLSSVVTVPSSSLGTQTYICNVNHKPSNTKVDKKVEPKSC

SEQ ID NO: 5440 - protein, 118 aa, Artificial Sequence; identical to SEQ ID NO: 139
  Description of Artificial Sequence: Synthetic polypeptide
  VH of XENP019546

SEQ ID NO: 5441 - protein, 5 aa, Artificial Sequence
  Description of Artificial Sequence: Synthetic peptide
  XENP019546 vhCDR1
SYTMH

SEQ ID NO: 5442 - protein, 17 aa, Artificial Sequence
  Description of Artificial Sequence: Synthetic peptide
  XENP019546 vhCDR2
FISYDGNNKYYADSVKG

SEQ ID NO: 5443 - protein, 9 aa, Artificial Sequence
  Description of Artificial Sequence: Synthetic peptide
  XENP019546 vhCDR3
TGWLGPFDY

SEQ ID NO: 5444 - protein, 215 aa, Artificial Sequence; identical to SEQ ID NO: 2924
  Description of Artificial Sequence: Synthetic polypeptide
  XENP019546 [CTLA-4]_H3_L0_Fab Light Chain

SEQ ID NO: 5445 - protein, 108 aa, Artificial Sequence; identical to SEQ ID NO: 23
  Description of Artificial Sequence: Synthetic polypeptide
  VL of XENP019546

SEQ ID NO: 5446 - protein, 12 aa, Artificial Sequence
  Description of Artificial Sequence: Synthetic peptide
  XENP019546 vlCDR1
RASQSVGSSYLA

SEQ ID NO: 5447 - protein, 7 aa, Artificial Sequence
  Description of Artificial Sequence: Synthetic peptide
  XENP019546 vlCDR2
GAFSRAT

SEQ ID NO: 5448 - protein, 9 aa, Artificial Sequence
  Description of Artificial Sequence: Synthetic peptide
  XENP019546 vlCDR3
QQYGSSPWT

SEQ ID NO: 5449 - protein, 221 aa, Artificial Sequence
  Description of Artificial Sequence: Synthetic polypeptide
  XENP019547 [CTLA-4]_H4_L0_Fab Heavy Chain
EVQLVESGGGLVQPGGSLRLSCAASGFTFSSYTMHWVRQAPGKGLEYVTFISYDGNNKYYADSVKGRFTISRDNSKNTLYLQMGSLRAEDMAVYYCARTGWLGPFDYWGQGTLVTVSSASTKGPSVFPLAPSSKSTSGGTAALGCLVKDYFPEPVTVSWNSGALTSGVHTFPAVLQSSGLYSLSSVVTVPSSSLGTQTYICNVNHKPSNTKVDKKVEPKSC

SEQ ID NO: 5450 - protein, 118 aa, Artificial Sequence; identical to SEQ ID NO: 148
  Description of Artificial Sequence: Synthetic polypeptide
  VH of XENP019547

SEQ ID NO: 5451 - protein, 5 aa, Artificial Sequence
  Description of Artificial Sequence: Synthetic peptide
  XENP019547 vhCDR1
SYTMH

SEQ ID NO: 5452 - protein, 17 aa, Artificial Sequence
  Description of Artificial Sequence: Synthetic peptide
  XENP019547 vhCDR2
FISYDGNNKYYADSVKG

SEQ ID NO: 5453 - protein, 9 aa, Artificial Sequence
  Description of Artificial Sequence: Synthetic peptide
  XENP019547 vhCDR3
TGWLGPFDY

SEQ ID NO: 5454 - protein, 215 aa, Artificial Sequence; identical to SEQ ID NO: 2924
  Description of Artificial Sequence: Synthetic polypeptide
  XENP019547 [CTLA-4]_H4_L0_Fab Light Chain

SEQ ID NO: 5455 - protein, 108 aa, Artificial Sequence; identical to SEQ ID NO: 23
  Description of Artificial Sequence: Synthetic polypeptide
  VL of XENP019547

SEQ ID NO: 5456 - protein, 12 aa, Artificial Sequence
  Description of Artificial Sequence: Synthetic peptide
  XENP019547 vlCDR1
RASQSVGSSYLA

SEQ ID NO: 5457 - protein, 7 aa, Artificial Sequence
  Description of Artificial Sequence: Synthetic peptide
  XENP019547 vlCDR2
GAFSRAT

SEQ ID NO: 5458 - protein, 9 aa, Artificial Sequence
  Description of Artificial Sequence: Synthetic peptide
  XENP019547 vlCDR3
QQYGSSPWT

SEQ ID NO: 5459 - protein, 221 aa, Artificial Sequence; identical to SEQ ID NO: 2919
  Description of Artificial Sequence: Synthetic polypeptide
  XENP019548 [CTLA-4]_H0_L1_Fab Heavy Chain

SEQ ID NO: 5460 - protein, 118 aa, Artificial Sequence; identical to SEQ ID NO: 22
  Description of Artificial Sequence: Synthetic polypeptide
  VH of XENP019548

SEQ ID NO: 5461 - protein, 5 aa, Artificial Sequence
  Description of Artificial Sequence: Synthetic peptide
  XENP019548 vhCDR1
SYTMH

SEQ ID NO: 5462 - protein, 17 aa, Artificial Sequence
  Description of Artificial Sequence: Synthetic peptide
  XENP019548 vhCDR2
FISYDGNNKYYADSVKG

SEQ ID NO: 5463 - protein, 9 aa, Artificial Sequence
  Description of Artificial Sequence: Synthetic peptide
  XENP019548 vhCDR3
TGWLGPFDY

SEQ ID NO: 5464 - protein, 215 aa, Artificial Sequence
  Description of Artificial Sequence: Synthetic polypeptide
  XENP019548 [CTLA-4]_H0_L1_Fab Light Chain
EIVLTQSPATLSLSPGERATLSCGASQSVGSSYLAWYQQKPGLAPRLLIYGAFSRATGIPDRFSGSGSGTDFTLTISRLEPEDFAVYYCQQYGSSPWTFGQGTKVEIKRTVAAPSVFIFPPSDEQLKSGTASVVCLLNNFYPREAKVQWKVDNALQSGNSQESVTEQDSKDSTYSLSSTLTLSKADYEKHKVYACEVTHQGLSSPVTKSFNRGEC

SEQ ID NO: 5465 - protein, 108 aa, Artificial Sequence; identical to SEQ ID NO: 158
  Description of Artificial Sequence: Synthetic polypeptide
  VL of XENP019548

SEQ ID NO: 5466 - protein, 12 aa, Artificial Sequence
  Description of Artificial Sequence: Synthetic peptide
  XENP019548 vlCDR1
GASQSVGSSYLA

SEQ ID NO: 5467 - protein, 7 aa, Artificial Sequence
  Description of Artificial Sequence: Synthetic peptide
  XENP019548 vlCDR2
GAFSRAT

SEQ ID NO: 5468 - protein, 9 aa, Artificial Sequence
  Description of Artificial Sequence: Synthetic peptide
  XENP019548 vlCDR3
QQYGSSPWT

SEQ ID NO: 5469 - protein, 221 aa, Artificial Sequence; identical to SEQ ID NO: 2919
  Description of Artificial Sequence: Synthetic polypeptide
  XENP019549 [CTLA-4]_H0_L2_Fab Heavy Chain

SEQ ID NO: 5470 - protein, 118 aa, Artificial Sequence; identical to SEQ ID NO: 22
  Description of Artificial Sequence: Synthetic polypeptide
  VH of XENP019549

SEQ ID NO: 5471 - protein, 5 aa, Artificial Sequence
  Description of Artificial Sequence: Synthetic peptide
  XENP019549 vhCDR1
SYTMH

SEQ ID NO: 5472 - protein, 17 aa, Artificial Sequence
  Description of Artificial Sequence: Synthetic peptide
  XENP019549 vhCDR2
FISYDGNNKYYADSVKG

SEQ ID NO: 5473 - protein, 9 aa, Artificial Sequence
  Description of Artificial Sequence: Synthetic peptide
  XENP019549 vhCDR3
TGWLGPFDY

SEQ ID NO: 5474 - protein, 215 aa, Artificial Sequence
  Description of Artificial Sequence: Synthetic polypeptide
  XENP019549 [CTLA-4]_H0_L2_Fab Light Chain
EIVMTQSPATLSVSPGERATLSCRASQSVGSSYLAWYQQKPGQAPRLLIYGAFSRATGIPARFSGSGSGTEFTLTISSLQSEDFAVYYCQQYGSSPWTFGQGTKVEIKRTVAAPSVFIFPPSDEQLKSGTASVVCLLNNFYPREAKVQWKVDNALQSGNSQESVTEQDSKDSTYSLSSTLTLSKADYEKHKVYACEVTHQGLSSPVTKSFNRGEC

SEQ ID NO: 5475 - protein, 108 aa, Artificial Sequence; identical to SEQ ID NO: 167
  Description of Artificial Sequence: Synthetic polypeptide
  VL of XENP019549

SEQ ID NO: 5476 - protein, 12 aa, Artificial Sequence
  Description of Artificial Sequence: Synthetic peptide
  XENP019549 vlCDR1
RASQSVGSSYLA

SEQ ID NO: 5477 - protein, 7 aa, Artificial Sequence
  Description of Artificial Sequence: Synthetic peptide
  XENP019549 vlCDR2
GAFSRAT

SEQ ID NO: 5478 - protein, 9 aa, Artificial Sequence
  Description of Artificial Sequence: Synthetic peptide
  XENP019549 vlCDR3
QQYGSSPWT

SEQ ID NO: 5479 - protein, 221 aa, Artificial Sequence
  Description of Artificial Sequence: Synthetic polypeptide
  XENP019585 [CTLA-4]_H0.140_L0_Fab Heavy Chain
QVQLVESGGGVVQPGRSLRLSCAASGFTFSSYTMHWVRQAPGKGLEWVCFISYDGNNKYYADSVKGRFTCSRDNSKNTLYLQMNSLRAEDTAIYYCARTGWLGPFDYWGQGTLVTVSSASTKGPSVFPLAPSSKSTSGGTAALGCLVKDYFPEPVTVSWNSGALTSGVHTFPAVLQSSGLYSLSSVVTVPSSSLGTQTYICNVNHKPSNTKVDKKVEPKSC

SEQ ID NO: 5480 - protein, 118 aa, Artificial Sequence; identical to SEQ ID NO: 175
  Description of Artificial Sequence: Synthetic polypeptide
  VH of XENP019585

SEQ ID NO: 5481 - protein, 5 aa, Artificial Sequence
  Description of Artificial Sequence: Synthetic peptide
  XENP019585 vhCDR1
SYTMH

SEQ ID NO: 5482 - protein, 17 aa, Artificial Sequence
  Description of Artificial Sequence: Synthetic peptide
  XENP019585 vhCDR2
FISYDGNNKYYADSVKG

SEQ ID NO: 5483 - protein, 9 aa, Artificial Sequence
  Description of Artificial Sequence: Synthetic peptide
  XENP019585 vhCDR3
TGWLGPFDY

SEQ ID NO: 5484 - protein, 215 aa, Artificial Sequence; identical to SEQ ID NO: 2924
  Description of Artificial Sequence: Synthetic polypeptide
  XENP019585 [CTLA-4]_H0.140_L0_Fab Light Chain

SEQ ID NO: 5485 - protein, 108 aa, Artificial Sequence; identical to SEQ ID NO: 23
  Description of Artificial Sequence: Synthetic polypeptide
  VL of XENP019585

SEQ ID NO: 5486 - protein, 12 aa, Artificial Sequence
  Description of Artificial Sequence: Synthetic peptide
  XENP019585 vlCDR1
RASQSVGSSYLA

SEQ ID NO: 5487 - protein, 7 aa, Artificial Sequence
  Description of Artificial Sequence: Synthetic peptide
  XENP019585 vlCDR2
GAFSRAT

SEQ ID NO: 5488 - protein, 9 aa, Artificial Sequence
  Description of Artificial Sequence: Synthetic peptide
  XENP019585 vlCDR3
QQYGSSPWT

SEQ ID NO: 5489 - protein, 221 aa, Artificial Sequence; identical to SEQ ID NO: 2919
  Description of Artificial Sequence: Synthetic polypeptide
  XENP019586 [CTLA-4]_H0_L0.117_Fab Heavy Chain

SEQ ID NO: 5490 - protein, 118 aa, Artificial Sequence; identical to SEQ ID NO: 22
  Description of Artificial Sequence: Synthetic polypeptide
  VH of XENP019586

SEQ ID NO: 5491 - protein, 5 aa, Artificial Sequence
  Description of Artificial Sequence: Synthetic peptide
  XENP019586 vhCDR1
SYTMH

SEQ ID NO: 5492 - protein, 17 aa, Artificial Sequence
  Description of Artificial Sequence: Synthetic peptide
  XENP019586 vhCDR2
FISYDGNNKYYADSVKG

SEQ ID NO: 5493 - protein, 9 aa, Artificial Sequence
  Description of Artificial Sequence: Synthetic peptide
  XENP019586 vhCDR3
TGWLGPFDY

SEQ ID NO: 5494 - protein, 215 aa, Artificial Sequence
  Description of Artificial Sequence: Synthetic polypeptide
  XENP019586 [CTLA-4]_H0_L0.117_Fab Light Chain
EIVLTQSPGTLSLSPGERATLSCRASQSVGSSYLAWYQQKPGQAPRLLCYGAFSRATGIPDRFSCSGSGTDFTLTISRLEPEDFAVYYCQQYGSSPWTFGQGTKVEIKRTVAAPSVFIFPPSDEQLKSGTASVVCLLNNFYPREAKVQWKVDNALQSGNSQESVTEQDSKDSTYSLSSTLTLSKADYEKHKVYACEVTHQGLSSPVTKSFNRGEC

SEQ ID NO: 5495 - protein, 108 aa, Artificial Sequence; identical to SEQ ID NO: 185
  Description of Artificial Sequence: Synthetic polypeptide
  VL of XENP019586

SEQ ID NO: 5496 - protein, 12 aa, Artificial Sequence
  Description of Artificial Sequence: Synthetic peptide
  XENP019586 vlCDR1
RASQSVGSSYLA

SEQ ID NO: 5497 - protein, 7 aa, Artificial Sequence
  Description of Artificial Sequence: Synthetic peptide
  XENP019586 vlCDR2
GAFSRAT

SEQ ID NO: 5498 - protein, 9 aa, Artificial Sequence
  Description of Artificial Sequence: Synthetic peptide
  XENP019586 vlCDR3
QQYGSSPWT

SEQ ID NO: 5499 - protein, 221 aa, Artificial Sequence; identical to SEQ ID NO: 4259
  Description of Artificial Sequence: Synthetic polypeptide
  XENP020006 [CTLA-4]_H0.134_L0.53_Fab Heavy Chain

SEQ ID NO: 5500 - protein, 118 aa, Artificial Sequence; identical to SEQ ID NO: 67
  Description of Artificial Sequence: Synthetic polypeptide
  VH of XENP020006

SEQ ID NO: 5501 - protein, 5 aa, Artificial Sequence
  Description of Artificial Sequence: Synthetic peptide
  XENP020006 vhCDR1
SYTMH

SEQ ID NO: 5502 - protein, 17 aa, Artificial Sequence
  Description of Artificial Sequence: Synthetic peptide
  XENP020006 vhCDR2
FISYDGNNKYYADSVKG

SEQ ID NO: 5503 - protein, 9 aa, Artificial Sequence
  Description of Artificial Sequence: Synthetic peptide
  XENP020006 vhCDR3
TGWLGPFDY

SEQ ID NO: 5504 - protein, 215 aa, Artificial Sequence; identical to SEQ ID NO: 4814
  Description of Artificial Sequence: Synthetic polypeptide
  XENP020006 [CTLA-4]_H0.134_L0.53_Fab Light Chain

SEQ ID NO: 5505 - protein, 108 aa, Artificial Sequence; identical to SEQ ID NO: 77
  Description of Artificial Sequence: Synthetic polypeptide
  VL of XENP020006

SEQ ID NO: 5506 - protein, 12 aa, Artificial Sequence
  Description of Artificial Sequence: Synthetic peptide
  XENP020006 vlCDR1
RASQSVGSSYLA

SEQ ID NO: 5507 - protein, 7 aa, Artificial Sequence
  Description of Artificial Sequence: Synthetic peptide
  XENP020006 vlCDR2
GAFSRAT

SEQ ID NO: 5508 - protein, 9 aa, Artificial Sequence
  Description of Artificial Sequence: Synthetic peptide
  XENP020006 vlCDR3
QQYGSSPWT

SEQ ID NO: 5509 - protein, 221 aa, Artificial Sequence; identical to SEQ ID NO: 5439
  Description of Artificial Sequence: Synthetic polypeptide
  XENP020007 [CTLA-4]_H3_L1_Fab Heavy Chain

SEQ ID NO: 5510 - protein, 118 aa, Artificial Sequence; identical to SEQ ID NO: 139
  Description of Artificial Sequence: Synthetic polypeptide
  VH of XENP020007

SEQ ID NO: 5511 - protein, 5 aa, Artificial Sequence
  Description of Artificial Sequence: Synthetic peptide
  XENP020007 vhCDR1
SYTMH

SEQ ID NO: 5512 - protein, 17 aa, Artificial Sequence
  Description of Artificial Sequence: Synthetic peptide
  XENP020007 vhCDR2
FISYDGNNKYYADSVKG

SEQ ID NO: 5513 - protein, 9 aa, Artificial Sequence
  Description of Artificial Sequence: Synthetic peptide
  XENP020007 vhCDR3
TGWLGPFDY

SEQ ID NO: 5514 - protein, 215 aa, Artificial Sequence; identical to SEQ ID NO: 5464
  Description of Artificial Sequence: Synthetic polypeptide
  XENP020007 [CTLA-4]_H3_L1_Fab Light Chain

SEQ ID NO: 5515 - protein, 108 aa, Artificial Sequence; identical to SEQ ID NO: 158
  Description of Artificial Sequence: Synthetic polypeptide
  VL of XENP020007

SEQ ID NO: 5516 - protein, 12 aa, Artificial Sequence
  Description of Artificial Sequence: Synthetic peptide
  XENP020007 vlCDR1
GASQSVGSSYLA

SEQ ID NO: 5517 - protein, 7 aa, Artificial Sequence
  Description of Artificial Sequence: Synthetic peptide
  XENP020007 vlCDR2
GAFSRAT

SEQ ID NO: 5518 - protein, 9 aa, Artificial Sequence
  Description of Artificial Sequence: Synthetic peptide
  XENP020007 vlCDR3
QQYGSSPWT

SEQ ID NO: 5519 - protein, 221 aa, Artificial Sequence; identical to SEQ ID NO: 5439
  Description of Artificial Sequence: Synthetic polypeptide
  XENP020008 [CTLA-4]_H3_L2_Fab Heavy Chain

SEQ ID NO: 5520 - protein, 118 aa, Artificial Sequence; identical to SEQ ID NO: 139
  Description of Artificial Sequence: Synthetic polypeptide
  VH of XENP020008

SEQ ID NO: 5521 - protein, 5 aa, Artificial Sequence
  Description of Artificial Sequence: Synthetic peptide
  XENP020008 vhCDR1
SYTMH

SEQ ID NO: 5522 - protein, 17 aa, Artificial Sequence
  Description of Artificial Sequence: Synthetic peptide
  XENP020008 vhCDR2
FISYDGNNKYYADSVKG

SEQ ID NO: 5523 - protein, 9 aa, Artificial Sequence
  Description of Artificial Sequence: Synthetic peptide
  XENP020008 vhCDR3
TGWLGPFDY

SEQ ID NO: 5524 - protein, 215 aa, Artificial Sequence; identical to SEQ ID NO: 5474
  Description of Artificial Sequence: Synthetic polypeptide
  XENP020008 [CTLA-4]_H3_L2_Fab Light Chain

SEQ ID NO: 5525 - protein, 108 aa, Artificial Sequence; identical to SEQ ID NO: 167
  Description of Artificial Sequence: Synthetic polypeptide
  VL of XENP020008

SEQ ID NO: 5526 - protein, 12 aa, Artificial Sequence
  Description of Artificial Sequence: Synthetic peptide
  XENP020008 vlCDR1
RASQSVGSSYLA

SEQ ID NO: 5527 - protein, 7 aa, Artificial Sequence
  Description of Artificial Sequence: Synthetic peptide
  XENP020008 vlCDR2
GAFSRAT

SEQ ID NO: 5528 - protein, 9 aa, Artificial Sequence
  Description of Artificial Sequence: Synthetic peptide
  XENP020008 vlCDR3
QQYGSSPWT

SEQ ID NO: 5529 - protein, 221 aa, Artificial Sequence; identical to SEQ ID NO: 5439
  Description of Artificial Sequence: Synthetic polypeptide
  XENP020009 [CTLA-4]_H3_L0.12_Fab Heavy Chain

SEQ ID NO: 5530 - protein, 118 aa, Artificial Sequence; identical to SEQ ID NO: 139
  Description of Artificial Sequence: Synthetic polypeptide
  VH of XENP020009

SEQ ID NO: 5531 - protein, 5 aa, Artificial Sequence
  Description of Artificial Sequence: Synthetic peptide
  XENP020009 vhCDR1
SYTMH

SEQ ID NO: 5532 - protein, 17 aa, Artificial Sequence
  Description of Artificial Sequence: Synthetic peptide
  XENP020009 vhCDR2
FISYDGNNKYYADSVKG

SEQ ID NO: 5533 - protein, 9 aa, Artificial Sequence
  Description of Artificial Sequence: Synthetic peptide
  XENP020009 vhCDR3
TGWLGPFDY

SEQ ID NO: 5534 - protein, 215 aa, Artificial Sequence; identical to SEQ ID NO: 4404
  Description of Artificial Sequence: Synthetic polypeptide
  XENP020009 [CTLA-4]_H3_L0.12_Fab Light Chain

SEQ ID NO: 5535 - protein, 108 aa, Artificial Sequence; identical to SEQ ID NO: 1517
  Description of Artificial Sequence: Synthetic polypeptide
  VL of XENP020009

SEQ ID NO: 5536 - protein, 12 aa, Artificial Sequence
  Description of Artificial Sequence: Synthetic peptide
  XENP020009 vlCDR1
RASQSVGSSYLA

SEQ ID NO: 5537 - protein, 7 aa, Artificial Sequence
  Description of Artificial Sequence: Synthetic peptide
  XENP020009 vlCDR2
GAFSRAT

SEQ ID NO: 5538 - protein, 9 aa, Artificial Sequence
  Description of Artificial Sequence: Synthetic peptide
  XENP020009 vlCDR3
QQYGSSPWT

SEQ ID NO: 5539 - protein, 221 aa, Artificial Sequence; identical to SEQ ID NO: 5439
  Description of Artificial Sequence: Synthetic polypeptide
  XENP020010 [CTLA-4]_H3_L0.18_Fab Heavy Chain

SEQ ID NO: 5540 - protein, 118 aa, Artificial Sequence; identical to SEQ ID NO: 139
  Description of Artificial Sequence: Synthetic polypeptide
  VH of XENP020010

SEQ ID NO: 5541 - protein, 5 aa, Artificial Sequence
  Description of Artificial Sequence: Synthetic peptide
  XENP020010 vhCDR1
SYTMH

SEQ ID NO: 5542 - protein, 17 aa, Artificial Sequence
  Description of Artificial Sequence: Synthetic peptide
  XENP020010 vhCDR2
FISYDGNNKYYADSVKG

SEQ ID NO: 5543 - protein, 9 aa, Artificial Sequence
  Description of Artificial Sequence: Synthetic peptide
  XENP020010 vhCDR3
TGWLGPFDY

SEQ ID NO: 5544 - protein, 215 aa, Artificial Sequence; identical to SEQ ID NO: 4464
  Description of Artificial Sequence: Synthetic polypeptide
  XENP020010 [CTLA-4]_H3_L0.18_Fab Light Chain

SEQ ID NO: 5545 - protein, 108 aa, Artificial Sequence; identical to SEQ ID NO: 1571
  Description of Artificial Sequence: Synthetic polypeptide
  VL of XENP020010

SEQ ID NO: 5546 - protein, 12 aa, Artificial Sequence
  Description of Artificial Sequence: Synthetic peptide
  XENP020010 vlCDR1
RSSQSVGSSYLA

SEQ ID NO: 5547 - protein, 7 aa, Artificial Sequence
  Description of Artificial Sequence: Synthetic peptide
  XENP020010 vlCDR2
GAFSRAT

SEQ ID NO: 5548 - protein, 9 aa, Artificial Sequence
  Description of Artificial Sequence: Synthetic peptide
  XENP020010 vlCDR3
QQYGSSPWT

SEQ ID NO: 5549 - protein, 221 aa, Artificial Sequence; identical to SEQ ID NO: 5439
  Description of Artificial Sequence: Synthetic polypeptide
  XENP020011 [CTLA-4]_H3_L0.22_Fab Heavy Chain

SEQ ID NO: 5550 - protein, 118 aa, Artificial Sequence; identical to SEQ ID NO: 139
  Description of Artificial Sequence: Synthetic polypeptide
  VH of XENP020011

SEQ ID NO: 5551 - protein, 5 aa, Artificial Sequence
  Description of Artificial Sequence: Synthetic peptide
  XENP020011 vhCDR1
SYTMH

SEQ ID NO: 5552 - protein, 17 aa, Artificial Sequence
  Description of Artificial Sequence: Synthetic peptide
  XENP020011 vhCDR2
FISYDGNNKYYADSVKG

SEQ ID NO: 5553 - protein, 9 aa, Artificial Sequence
  Description of Artificial Sequence: Synthetic peptide
  XENP020011 vhCDR3
TGWLGPFDY

SEQ ID NO: 5554 - protein, 215 aa, Artificial Sequence; identical to SEQ ID NO: 4504
  Description of Artificial Sequence: Synthetic polypeptide
  XENP020011 [CTLA-4]_H3_L0.22_Fab Light Chain

SEQ ID NO: 5555 - protein, 108 aa, Artificial Sequence; identical to SEQ ID NO: 1607
  Description of Artificial Sequence: Synthetic polypeptide
  VL of XENP020011

SEQ ID NO: 5556 - protein, 12 aa, Artificial Sequence
  Description of Artificial Sequence: Synthetic peptide
  XENP020011 vlCDR1
RASQSVSSSYLA

SEQ ID NO: 5557 - protein, 7 aa, Artificial Sequence
  Description of Artificial Sequence: Synthetic peptide
  XENP020011 vlCDR2
GAFSRAT

SEQ ID NO: 5558 - protein, 9 aa, Artificial Sequence
  Description of Artificial Sequence: Synthetic peptide
  XENP020011 vlCDR3
QQYGSSPWT

SEQ ID NO: 5559 - protein, 221 aa, Artificial Sequence; identical to SEQ ID NO: 5439
  Description of Artificial Sequence: Synthetic polypeptide
  XENP020012 [CTLA-4]_H3_L0.27_Fab Heavy Chain

SEQ ID NO: 5560 - protein, 118 aa, Artificial Sequence; identical to SEQ ID NO: 139
  Description of Artificial Sequence: Synthetic polypeptide
  VH of XENP020012

SEQ ID NO: 5561 - protein, 5 aa, Artificial Sequence
  Description of Artificial Sequence: Synthetic peptide
  XENP020012 vhCDR1
SYTMH

SEQ ID NO: 5562 - protein, 17 aa, Artificial Sequence
  Description of Artificial Sequence: Synthetic peptide
  XENP020012 vhCDR2
FISYDGNNKYYADSVKG

SEQ ID NO: 5563 - protein, 9 aa, Artificial Sequence
  Description of Artificial Sequence: Synthetic peptide
  XENP020012 vhCDR3
TGWLGPFDY

SEQ ID NO: 5564 - protein, 215 aa, Artificial Sequence; identical to SEQ ID NO: 4554
  Description of Artificial Sequence: Synthetic polypeptide
  XENP020012 [CTLA-4]_H3_L0.27_Fab Light Chain

SEQ ID NO: 5565 - protein, 108 aa, Artificial Sequence; identical to SEQ ID NO: 1652
  Description of Artificial Sequence: Synthetic polypeptide
  VL of XENP020012

SEQ ID NO: 5566 - protein, 12 aa, Artificial Sequence
  Description of Artificial Sequence: Synthetic peptide
  XENP020012 vlCDR1
RASQSVGQSYLA

SEQ ID NO: 5567 - protein, 7 aa, Artificial Sequence
  Description of Artificial Sequence: Synthetic peptide
  XENP020012 vlCDR2
GAFSRAT

SEQ ID NO: 5568 - protein, 9 aa, Artificial Sequence
  Description of Artificial Sequence: Synthetic peptide
  XENP020012 vlCDR3
QQYGSSPWT

SEQ ID NO: 5569 - protein, 221 aa, Artificial Sequence; identical to SEQ ID NO: 5439
  Description of Artificial Sequence: Synthetic polypeptide
  XENP020013 [CTLA-4]_H3_L0.32_Fab Heavy Chain

SEQ ID NO: 5570 - protein, 118 aa, Artificial Sequence; identical to SEQ ID NO: 139
  Description of Artificial Sequence: Synthetic polypeptide
  VH of XENP020013

SEQ ID NO: 5571 - protein, 5 aa, Artificial Sequence
  Description of Artificial Sequence: Synthetic peptide
  XENP020013 vhCDR1
SYTMH

SEQ ID NO: 5572 - protein, 17 aa, Artificial Sequence
  Description of Artificial Sequence: Synthetic peptide
  XENP020013 vhCDR2
FISYDGNNKYYADSVKG

SEQ ID NO: 5573 - protein, 9 aa, Artificial Sequence
  Description of Artificial Sequence: Synthetic peptide
  XENP020013 vhCDR3
TGWLGPFDY

SEQ ID NO: 5574 - protein, 215 aa, Artificial Sequence; identical to SEQ ID NO: 4604
  Description of Artificial Sequence: Synthetic polypeptide
  XENP020013 [CTLA-4]_H3_L0.32_Fab Light Chain

SEQ ID NO: 5575 - protein, 108 aa, Artificial Sequence; identical to SEQ ID NO: 1697
  Description of Artificial Sequence: Synthetic polypeptide
  VL of XENP020013

SEQ ID NO: 5576 - protein, 12 aa, Artificial Sequence
  Description of Artificial Sequence: Synthetic peptide
  XENP020013 vlCDR1
RASQSVGSQYLA

SEQ ID NO: 5577 - protein, 7 aa, Artificial Sequence
  Description of Artificial Sequence: Synthetic peptide
  XENP020013 vlCDR2
GAFSRAT

SEQ ID NO: 5578 - protein, 9 aa, Artificial Sequence
  Description of Artificial Sequence: Synthetic peptide
  XENP020013 vlCDR3
QQYGSSPWT

SEQ ID NO: 5579 - protein, 221 aa, Artificial Sequence; identical to SEQ ID NO: 5439
  Description of Artificial Sequence: Synthetic polypeptide
  XENP020014 [CTLA-4]_H3_L0.36_Fab Heavy Chain

SEQ ID NO: 5580 - protein, 118 aa, Artificial Sequence; identical to SEQ ID NO: 139
  Description of Artificial Sequence: Synthetic polypeptide
  VH of XENP020014

SEQ ID NO: 5581 - protein, 5 aa, Artificial Sequence
  Description of Artificial Sequence: Synthetic peptide
  XENP020014 vhCDR1
SYTMH

SEQ ID NO: 5582 - protein, 17 aa, Artificial Sequence
  Description of Artificial Sequence: Synthetic peptide
  XENP020014 vhCDR2
FISYDGNNKYYADSVKG

SEQ ID NO: 5583 - protein, 9 aa, Artificial Sequence
  Description of Artificial Sequence: Synthetic peptide
  XENP020014 vhCDR3
TGWLGPFDY

SEQ ID NO: 5584 - protein, 215 aa, Artificial Sequence; identical to SEQ ID NO: 4644
  Description of Artificial Sequence: Synthetic polypeptide
  XENP020014 [CTLA-4]_H3_L0.36_Fab Light Chain

SEQ ID NO: 5585 - protein, 108 aa, Artificial Sequence; identical to SEQ ID NO: 1733
  Description of Artificial Sequence: Synthetic polypeptide
  VL of XENP020014

SEQ ID NO: 5586 - protein, 12 aa, Artificial Sequence
  Description of Artificial Sequence: Synthetic peptide
  XENP020014 vlCDR1
RASQSVGSSHLA

SEQ ID NO: 5587 - protein, 7 aa, Artificial Sequence
  Description of Artificial Sequence: Synthetic peptide
  XENP020014 vlCDR2
GAFSRAT

SEQ ID NO: 5588 - protein, 9 aa, Artificial Sequence
  Description of Artificial Sequence: Synthetic peptide
  XENP020014 vlCDR3
QQYGSSPWT

SEQ ID NO: 5589 - protein, 221 aa, Artificial Sequence; identical to SEQ ID NO: 5439
  Description of Artificial Sequence: Synthetic polypeptide
  XENP020015 [CTLA-4]_H3_L0.37_Fab Heavy Chain

SEQ ID NO: 5590 - protein, 118 aa, Artificial Sequence; identical to SEQ ID NO: 139
  Description of Artificial Sequence: Synthetic polypeptide
  VH of XENP020015

SEQ ID NO: 5591 - protein, 5 aa, Artificial Sequence
  Description of Artificial Sequence: Synthetic peptide
  XENP020015 vhCDR1
SYTMH

SEQ ID NO: 5592 - protein, 17 aa, Artificial Sequence
  Description of Artificial Sequence: Synthetic peptide
  XENP020015 vhCDR2
FISYDGNNKYYADSVKG

SEQ ID NO: 5593 - protein, 9 aa, Artificial Sequence
  Description of Artificial Sequence: Synthetic peptide
  XENP020015 vhCDR3
TGWLGPFDY

SEQ ID NO: 5594 - protein, 215 aa, Artificial Sequence; identical to SEQ ID NO: 4654
  Description of Artificial Sequence: Synthetic polypeptide
  XENP020015 [CTLA-4]_H3_L0.37_Fab Light Chain

SEQ ID NO: 5595 - protein, 108 aa, Artificial Sequence; identical to SEQ ID NO: 1742
  Description of Artificial Sequence: Synthetic polypeptide
  VL of XENP020015

SEQ ID NO: 5596 - protein, 12 aa, Artificial Sequence
  Description of Artificial Sequence: Synthetic peptide
  XENP020015 vlCDR1
RASQSVGSSLLA

SEQ ID NO: 5597 - protein, 7 aa, Artificial Sequence
  Description of Artificial Sequence: Synthetic peptide
  XENP020015 vlCDR2
GAFSRAT

SEQ ID NO: 5598 - protein, 9 aa, Artificial Sequence
  Description of Artificial Sequence: Synthetic peptide
  XENP020015 vlCDR3
QQYGSSPWT

SEQ ID NO: 5599 - protein, 221 aa, Artificial Sequence; identical to SEQ ID NO: 5439
  Description of Artificial Sequence: Synthetic polypeptide
  XENP020016 [CTLA-4]_H3_L0.39_Fab Heavy Chain

SEQ ID NO: 5600 - protein, 118 aa, Artificial Sequence; identical to SEQ ID NO: 139
  Description of Artificial Sequence: Synthetic polypeptide
  VH of XENP020016

SEQ ID NO: 5601 - protein, 5 aa, Artificial Sequence
  Description of Artificial Sequence: Synthetic peptide
  XENP020016 vhCDR1
SYTMH

SEQ ID NO: 5602 - protein, 17 aa, Artificial Sequence
  Description of Artificial Sequence: Synthetic peptide
  XENP020016 vhCDR2
FISYDGNNKYYADSVKG

SEQ ID NO: 5603 - protein, 9 aa, Artificial Sequence
  Description of Artificial Sequence: Synthetic peptide
  XENP020016 vhCDR3
TGWLGPFDY

SEQ ID NO: 5604 - protein, 215 aa, Artificial Sequence; identical to SEQ ID NO: 4674
  Description of Artificial Sequence: Synthetic polypeptide
  XENP020016 [CTLA-4]_H3_L0.39_Fab Light Chain

SEQ ID NO: 5605 - protein, 108 aa, Artificial Sequence; identical to SEQ ID NO: 1760
  Description of Artificial Sequence: Synthetic polypeptide
  VL of XENP020016

SEQ ID NO: 5606 - protein, 12 aa, Artificial Sequence
  Description of Artificial Sequence: Synthetic peptide
  XENP020016 vlCDR1
RASQSVGSSSLA

SEQ ID NO: 5607 - protein, 7 aa, Artificial Sequence
  Description of Artificial Sequence: Synthetic peptide
  XENP020016 vlCDR2
GAFSRAT

SEQ ID NO: 5608 - protein, 9 aa, Artificial Sequence
  Description of Artificial Sequence: Synthetic peptide
  XENP020016 vlCDR3
QQYGSSPWT

SEQ ID NO: 5609 - protein, 221 aa, Artificial Sequence; identical to SEQ ID NO: 5439
  Description of Artificial Sequence: Synthetic polypeptide
  XENP020017 [CTLA-4]_H3_L0.41_Fab Heavy Chain

SEQ ID NO: 5610 - protein, 118 aa, Artificial Sequence; identical to SEQ ID NO: 139
  Description of Artificial Sequence: Synthetic polypeptide
  VH of XENP020017

SEQ ID NO: 5611 - protein, 5 aa, Artificial Sequence
  Description of Artificial Sequence: Synthetic peptide
  XENP020017 vhCDR1
SYTMH

SEQ ID NO: 5612 - protein, 17 aa, Artificial Sequence
  Description of Artificial Sequence: Synthetic peptide
  XENP020017 vhCDR2
FISYDGNNKYYADSVKG

SEQ ID NO: 5613 - protein, 9 aa, Artificial Sequence
  Description of Artificial Sequence: Synthetic peptide
  XENP020017 vhCDR3
TGWLGPFDY

SEQ ID NO: 5614 - protein, 215 aa, Artificial Sequence; identical to SEQ ID NO: 4694
  Description of Artificial Sequence: Synthetic polypeptide
  XENP020017 [CTLA-4]_H3_L0.41_Fab Light Chain

SEQ ID NO: 5615 - protein, 108 aa, Artificial Sequence; identical to SEQ ID NO: 1778
  Description of Artificial Sequence: Synthetic polypeptide
  VL of XENP020017

SEQ ID NO: 5616 - protein, 12 aa, Artificial Sequence
  Description of Artificial Sequence: Synthetic peptide
  XENP020017 vlCDR1
RASQSVGSSYMA

SEQ ID NO: 5617 - protein, 7 aa, Artificial Sequence
  Description of Artificial Sequence: Synthetic peptide
  XENP020017 vlCDR2
GAFSRAT

SEQ ID NO: 5618 - protein, 9 aa, Artificial Sequence
  Description of Artificial Sequence: Synthetic peptide
  XENP020017 vlCDR3
QQYGSSPWT

SEQ ID NO: 5619 - protein, 221 aa, Artificial Sequence; identical to SEQ ID NO: 5439
  Description of Artificial Sequence: Synthetic polypeptide
  XENP020018 [CTLA-4]_H3_L0.67_Fab Heavy Chain

SEQ ID NO: 5620 - protein, 118 aa, Artificial Sequence; identical to SEQ ID NO: 139
  Description of Artificial Sequence: Synthetic polypeptide
  VH of XENP020018

SEQ ID NO: 5621 - protein, 5 aa, Artificial Sequence
  Description of Artificial Sequence: Synthetic peptide
  XENP020018 vhCDR1
SYTMH

SEQ ID NO: 5622 - protein, 17 aa, Artificial Sequence
  Description of Artificial Sequence: Synthetic peptide
  XENP020018 vhCDR2
FISYDGNNKYYADSVKG

SEQ ID NO: 5623 - protein, 9 aa, Artificial Sequence
  Description of Artificial Sequence: Synthetic peptide
  XENP020018 vhCDR3
TGWLGPFDY

SEQ ID NO: 5624 - protein, 215 aa, Artificial Sequence; identical to SEQ ID NO: 4954
  Description of Artificial Sequence: Synthetic polypeptide
  XENP020018 [CTLA-4]_H3_L0.67_Fab Light Chain

SEQ ID NO: 5625 - protein, 108 aa, Artificial Sequence; identical to SEQ ID NO: 2012
  Description of Artificial Sequence: Synthetic polypeptide
  VL of XENP020018

SEQ ID NO: 5626 - protein, 12 aa, Artificial Sequence
  Description of Artificial Sequence: Synthetic peptide
  XENP020018 vlCDR1
RASQSVGSSYLA

SEQ ID NO: 5627 - protein, 7 aa, Artificial Sequence
  Description of Artificial Sequence: Synthetic peptide
  XENP020018 vlCDR2
DAFSRAT

SEQ ID NO: 5628 - protein, 9 aa, Artificial Sequence
  Description of Artificial Sequence: Synthetic peptide
  XENP020018 vlCDR3
QQYGSSPWT

SEQ ID NO: 5629 - protein, 221 aa, Artificial Sequence; identical to SEQ ID NO: 5439
  Description of Artificial Sequence: Synthetic polypeptide
  XENP020019 [CTLA-4]_H3_L0.69_Fab Heavy Chain

SEQ ID NO: 5630 - protein, 118 aa, Artificial Sequence; identical to SEQ ID NO: 139
  Description of Artificial Sequence: Synthetic polypeptide
  VH of XENP020019

SEQ ID NO: 5631 - protein, 5 aa, Artificial Sequence
  Description of Artificial Sequence: Synthetic peptide
  XENP020019 vhCDR1
SYTMH

SEQ ID NO: 5632 - protein, 17 aa, Artificial Sequence
  Description of Artificial Sequence: Synthetic peptide
  XENP020019 vhCDR2
FISYDGNNKYYADSVKG

SEQ ID NO: 5633 - protein, 9 aa, Artificial Sequence
  Description of Artificial Sequence: Synthetic peptide
  XENP020019 vhCDR3
TGWLGPFDY

SEQ ID NO: 5634 - protein, 215 aa, Artificial Sequence; identical to SEQ ID NO: 4974
  Description of Artificial Sequence: Synthetic polypeptide
  XENP020019 [CTLA-4]_H3_L0.69_Fab Light Chain

SEQ ID NO: 5635 - protein, 108 aa, Artificial Sequence; identical to SEQ ID NO: 2030
  Description of Artificial Sequence: Synthetic polypeptide
  VL of XENP020019

SEQ ID NO: 5636 - protein, 12 aa, Artificial Sequence
  Description of Artificial Sequence: Synthetic peptide
  XENP020019 vlCDR1
RASQSVGSSYLA

SEQ ID NO: 5637 - protein, 7 aa, Artificial Sequence
  Description of Artificial Sequence: Synthetic peptide
  XENP020019 vlCDR2
GVFSRAT

SEQ ID NO: 5638 - protein, 9 aa, Artificial Sequence
  Description of Artificial Sequence: Synthetic peptide
  XENP020019 vlCDR3
QQYGSSPWT

SEQ ID NO: 5639 - protein, 221 aa, Artificial Sequence; identical to SEQ ID NO: 5439
  Description of Artificial Sequence: Synthetic polypeptide
  XENP020020 [CTLA-4]_H3_L0.74_Fab Heavy Chain

SEQ ID NO: 5640 - protein, 118 aa, Artificial Sequence; identical to SEQ ID NO: 139
  Description of Artificial Sequence: Synthetic polypeptide
  VH of XENP020020

SEQ ID NO: 5641 - protein, 5 aa, Artificial Sequence
  Description of Artificial Sequence: Synthetic peptide
  XENP020020 vhCDR1
SYTMH

SEQ ID NO: 5642 - protein, 17 aa, Artificial Sequence
  Description of Artificial Sequence: Synthetic peptide
  XENP020020 vhCDR2
FISYDGNNKYYADSVKG

SEQ ID NO: 5643 - protein, 9 aa, Artificial Sequence
  Description of Artificial Sequence: Synthetic peptide
  XENP020020 vhCDR3
TGWLGPFDY

SEQ ID NO: 5644 - protein, 215 aa, Artificial Sequence; identical to SEQ ID NO: 5024
  Description of Artificial Sequence: Synthetic polypeptide
  XENP020020 [CTLA-4]_H3_L0.74_Fab Light Chain

SEQ ID NO: 5645 - protein, 108 aa, Artificial Sequence; identical to SEQ ID NO: 2075
  Description of Artificial Sequence: Synthetic polypeptide
  VL of XENP020020

SEQ ID NO: 5646 - protein, 12 aa, Artificial Sequence
  Description of Artificial Sequence: Synthetic peptide
  XENP020020 vlCDR1
RASQSVGSSYLA

SEQ ID NO: 5647 - protein, 7 aa, Artificial Sequence
  Description of Artificial Sequence: Synthetic peptide
  XENP020020 vlCDR2
GAYSRAT

SEQ ID NO: 5648 - protein, 9 aa, Artificial Sequence
  Description of Artificial Sequence: Synthetic peptide
  XENP020020 vlCDR3
QQYGSSPWT

SEQ ID NO: 5649 - protein, 221 aa, Artificial Sequence; identical to SEQ ID NO: 5439
  Description of Artificial Sequence: Synthetic polypeptide
  XENP020021 [CTLA-4]_H3_L0.75_Fab Heavy Chain

SEQ ID NO: 5650 - protein, 118 aa, Artificial Sequence; identical to SEQ ID NO: 139
  Description of Artificial Sequence: Synthetic polypeptide
  VH of XENP020021

SEQ ID NO: 5651 - protein, 5 aa, Artificial Sequence
  Description of Artificial Sequence: Synthetic peptide
  XENP020021 vhCDR1
SYTMH

SEQ ID NO: 5652 - protein, 17 aa, Artificial Sequence
  Description of Artificial Sequence: Synthetic peptide
  XENP020021 vhCDR2
FISYDGNNKYYADSVKG

SEQ ID NO: 5653 - protein, 9 aa, Artificial Sequence
  Description of Artificial Sequence: Synthetic peptide
  XENP020021 vhCDR3
TGWLGPFDY

SEQ ID NO: 5654 - protein, 215 aa, Artificial Sequence; identical to SEQ ID NO: 5034
  Description of Artificial Sequence: Synthetic polypeptide
  XENP020021 [CTLA-4]_H3_L0.75_Fab Light Chain

SEQ ID NO: 5655 - protein, 108 aa, Artificial Sequence; identical to SEQ ID NO: 2084
  Description of Artificial Sequence: Synthetic polypeptide
  VL of XENP020021

SEQ ID NO: 5656 - protein, 12 aa, Artificial Sequence
  Description of Artificial Sequence: Synthetic peptide
  XENP020021 vlCDR1
RASQSVGSSYLA

SEQ ID NO: 5657 - protein, 7 aa, Artificial Sequence
  Description of Artificial Sequence: Synthetic peptide
  XENP020021 vlCDR2
GAFARAT

SEQ ID NO: 5658 - protein, 9 aa, Artificial Sequence
  Description of Artificial Sequence: Synthetic peptide
  XENP020021 vlCDR3
QQYGSSPWT

SEQ ID NO: 5659 - protein, 221 aa, Artificial Sequence; identical to SEQ ID NO: 5439
  Description of Artificial Sequence: Synthetic polypeptide
  XENP020022 [CTLA-4]_H3_L0.103_Fab Heavy Chain

SEQ ID NO: 5660 - protein, 118 aa, Artificial Sequence; identical to SEQ ID NO: 139
  Description of Artificial Sequence: Synthetic polypeptide
  VH of XENP020022

SEQ ID NO: 5661 - protein, 5 aa, Artificial Sequence
  Description of Artificial Sequence: Synthetic peptide
  XENP020022 vhCDR1
SYTMH

SEQ ID NO: 5662 - protein, 17 aa, Artificial Sequence
  Description of Artificial Sequence: Synthetic peptide
  XENP020022 vhCDR2
FISYDGNNKYYADSVKG

SEQ ID NO: 5663 - protein, 9 aa, Artificial Sequence
  Description of Artificial Sequence: Synthetic peptide
  XENP020022 vhCDR3
TGWLGPFDY

SEQ ID NO: 5664 - protein, 215 aa, Artificial Sequence; identical to SEQ ID NO: 5314
  Description of Artificial Sequence: Synthetic polypeptide
  XENP020022 [CTLA-4]_H3_L0.103_Fab Light Chain

SEQ ID NO: 5665 - protein, 108 aa, Artificial Sequence; identical to SEQ ID NO: 2336
  Description of Artificial Sequence: Synthetic polypeptide
  VL of XENP020022

SEQ ID NO: 5666 - protein, 12 aa, Artificial Sequence
  Description of Artificial Sequence: Synthetic peptide
  XENP020022 vlCDR1
RASQSVGSSYLA

SEQ ID NO: 5667 - protein, 7 aa, Artificial Sequence
  Description of Artificial Sequence: Synthetic peptide
  XENP020022 vlCDR2
GAFSRAT

SEQ ID NO: 5668 - protein, 9 aa, Artificial Sequence
  Description of Artificial Sequence: Synthetic peptide
  XENP020022 vlCDR3
QQYGKSPWT

SEQ ID NO: 5669 - protein, 221 aa, Artificial Sequence; identical to SEQ ID NO: 5439
  Description of Artificial Sequence: Synthetic polypeptide
  XENP020052 [CTLA-4]_H3_L0.44_Fab Heavy Chain

SEQ ID NO: 5670 - protein, 118 aa, Artificial Sequence; identical to SEQ ID NO: 139
  Description of Artificial Sequence: Synthetic polypeptide
  VH of XENP020052

SEQ ID NO: 5671 - protein, 5 aa, Artificial Sequence
  Description of Artificial Sequence: Synthetic peptide
  XENP020052 vhCDR1
SYTMH

SEQ ID NO: 5672 - protein, 17 aa, Artificial Sequence
  Description of Artificial Sequence: Synthetic peptide
  XENP020052 vhCDR2
FISYDGNNKYYADSVKG

SEQ ID NO: 5673 - protein, 9 aa, Artificial Sequence
  Description of Artificial Sequence: Synthetic peptide
  XENP020052 vhCDR3
TGWLGPFDY

SEQ ID NO: 5674 - protein, 215 aa, Artificial Sequence; identical to SEQ ID NO: 4724
  Description of Artificial Sequence: Synthetic polypeptide
  XENP020052 [CTLA-4]_H3_L0.44_Fab Light Chain

SEQ ID NO: 5675 - protein, 108 aa, Artificial Sequence; identical to SEQ ID NO: 1805
  Description of Artificial Sequence: Synthetic polypeptide
  VL of XENP020052

SEQ ID NO: 5676 - protein, 12 aa, Artificial Sequence
  Description of Artificial Sequence: Synthetic peptide
  XENP020052 vlCDR1
RASQSVGSSYLS

SEQ ID NO: 5677 - protein, 7 aa, Artificial Sequence
  Description of Artificial Sequence: Synthetic peptide
  XENP020052 vlCDR2
GAFSRAT

SEQ ID NO: 5678 - protein, 9 aa, Artificial Sequence
  Description of Artificial Sequence: Synthetic peptide
  XENP020052 vlCDR3
QQYGSSPWT

SEQ ID NO: 5679 - protein, 221 aa, Artificial Sequence
  Description of Artificial Sequence: Synthetic polypeptide
  XENP020068 [CTLA-4]_H3.1_L0.12_Fab Heavy Chain
EVQLVESGGGLVKPGGSLRLSCAASGFTFSSYTMHWVRQAPGKGLEWVSFISYDGNHKYYADSVKGRFTISRDNAKNSLYLQMNSLRAEDTAVYYCARTGLLGPFDLWGQGTMVTVSSASTKGPSVFPLAPSSKSTSGGTAALGCLVKDYFPEPVTVSWNSGALTSGVHTFPAVLQSSGLYSLSSVVTVPSSSLGTQTYICNVNHKPSNTKVDKKVEPKSC

SEQ ID NO: 5680 - protein, 118 aa, Artificial Sequence; identical to SEQ ID NO: 2434
  Description of Artificial Sequence: Synthetic polypeptide
  VH of XENP020068

SEQ ID NO: 5681 - protein, 5 aa, Artificial Sequence
  Description of Artificial Sequence: Synthetic peptide
  XENP020068 vhCDR1
SYTMH

SEQ ID NO: 5682 - protein, 17 aa, Artificial Sequence
  Description of Artificial Sequence: Synthetic peptide
  XENP020068 vhCDR2
FISYDGNHKYYADSVKG

SEQ ID NO: 5683 - protein, 9 aa, Artificial Sequence
  Description of Artificial Sequence: Synthetic peptide
  XENP020068 vhCDR3
TGLLGPFDL

SEQ ID NO: 5684 - protein, 215 aa, Artificial Sequence; identical to SEQ ID NO: 4404
  Description of Artificial Sequence: Synthetic polypeptide
  XENP020068 [CTLA-4]_H3.1_L0.12_Fab Light Chain

SEQ ID NO: 5685 - protein, 108 aa, Artificial Sequence; identical to SEQ ID NO: 1517
  Description of Artificial Sequence: Synthetic polypeptide
  VL of XENP020068

SEQ ID NO: 5686 - protein, 12 aa, Artificial Sequence
  Description of Artificial Sequence: Synthetic peptide
  XENP020068 vlCDR1
RASQSVGSSYLA

SEQ ID NO: 5687 - protein, 7 aa, Artificial Sequence
  Description of Artificial Sequence: Synthetic peptide
  XENP020068 vlCDR2
GAFSRAT

SEQ ID NO: 5688 - protein, 9 aa, Artificial Sequence
  Description of Artificial Sequence: Synthetic peptide
  XENP020068 vlCDR3
QQYGSSPWT

SEQ ID NO: 5689 - protein, 221 aa, Artificial Sequence
  Description of Artificial Sequence: Synthetic polypeptide
  XENP020069 [CTLA-4]_H3.2_L0.12_Fab Heavy Chain
EVQLVESGGGLVKPGGSLRLSCAASGFTFSSYTMHWVRQAPGKGLEWVSFISYDGNTKYYADSVKGRFTISRDNAKNSLYLQMNSLRAEDTAVYYCARTGLLGPFDLWGQGTMVTVSSASTKGPSVFPLAPSSKSTSGGTAALGCLVKDYFPEPVTVSWNSGALTSGVHTFPAVLQSSGLYSLSSVVTVPSSSLGTQTYICNVNHKPSNTKVDKKVEPKSC

SEQ ID NO: 5690 - protein, 118 aa, Artificial Sequence; identical to SEQ ID NO: 2443
  Description of Artificial Sequence: Synthetic polypeptide
  VH of XENP020069

SEQ ID NO: 5691 - protein, 5 aa, Artificial Sequence
  Description of Artificial Sequence: Synthetic peptide
  XENP020069 vhCDR1
SYTMH

SEQ ID NO: 5692 - protein, 17 aa, Artificial Sequence
  Description of Artificial Sequence: Synthetic peptide
  XENP020069 vhCDR2
FISYDGNTKYYADSVKG

SEQ ID NO: 5693 - protein, 9 aa, Artificial Sequence
  Description of Artificial Sequence: Synthetic peptide
  XENP020069 vhCDR3
TGLLGPFDL

SEQ ID NO: 5694 - protein, 215 aa, Artificial Sequence; identical to SEQ ID NO: 4404
  Description of Artificial Sequence: Synthetic polypeptide
  XENP020069 [CTLA-4]_H3.2_L0.12_Fab Light Chain

SEQ ID NO: 5695 - protein, 108 aa, Artificial Sequence; identical to SEQ ID NO: 1517
  Description of Artificial Sequence: Synthetic polypeptide
  VL of XENP020069

SEQ ID NO: 5696 - protein, 12 aa, Artificial Sequence
  Description of Artificial Sequence: Synthetic peptide
  XENP020069 vlCDR1
RASQSVGSSYLA

SEQ ID NO: 5697 - protein, 7 aa, Artificial Sequence
  Description of Artificial Sequence: Synthetic peptide
  XENP020069 vlCDR2
GAFSRAT

SEQ ID NO: 5698 - protein, 9 aa, Artificial Sequence
  Description of Artificial Sequence: Synthetic peptide
  XENP020069 vlCDR3
QQYGSSPWT

SEQ ID NO: 5699 - protein, 221 aa, Artificial Sequence
  Description of Artificial Sequence: Synthetic polypeptide
  XENP020070 [CTLA-4]_H3.3_L0.12_Fab Heavy Chain
EVQLVESGGGLVKPGGSLRLSCAASGFTFSSYTMHWVRQAPGKGLEWVSFISYDGNQKYYADSVKGRFTISRDNAKNSLYLQMNSLRAEDTAVYYCARTGLLGPFDLWGQGTMVTVSSASTKGPSVFPLAPSSKSTSGGTAALGCLVKDYFPEPVTVSWNSGALTSGVHTFPAVLQSSGLYSLSSVVTVPSSSLGTQTYICNVNHKPSNTKVDKKVEPKSC

SEQ ID NO: 5700 - protein, 118 aa, Artificial Sequence; identical to SEQ ID NO: 2452
  Description of Artificial Sequence: Synthetic polypeptide
  VH of XENP020070

SEQ ID NO: 5701 - protein, 5 aa, Artificial Sequence
  Description of Artificial Sequence: Synthetic peptide
  XENP020070 vhCDR1
SYTMH

SEQ ID NO: 5702 - protein, 17 aa, Artificial Sequence
  Description of Artificial Sequence: Synthetic peptide
  XENP020070 vhCDR2
FISYDGNQKYYADSVKG

SEQ ID NO: 5703 - protein, 9 aa, Artificial Sequence
  Description of Artificial Sequence: Synthetic peptide
  XENP020070 vhCDR3
TGLLGPFDL

SEQ ID NO: 5704 - protein, 215 aa, Artificial Sequence; identical to SEQ ID NO: 4404
  Description of Artificial Sequence: Synthetic polypeptide
  XENP020070 [CTLA-4]_H3.3_L0.12_Fab Light Chain

SEQ ID NO: 5705 - protein, 108 aa, Artificial Sequence; identical to SEQ ID NO: 1517
  Description of Artificial Sequence: Synthetic polypeptide
  VL of XENP020070

SEQ ID NO: 5706 - protein, 12 aa, Artificial Sequence
  Description of Artificial Sequence: Synthetic peptide
  XENP020070 vlCDR1
RASQSVGSSYLA

SEQ ID NO: 5707 - protein, 7 aa, Artificial Sequence
  Description of Artificial Sequence: Synthetic peptide
  XENP020070 vlCDR2
GAFSRAT

SEQ ID NO: 5708 - protein, 9 aa, Artificial Sequence
  Description of Artificial Sequence: Synthetic peptide
  XENP020070 vlCDR3
QQYGSSPWT

SEQ ID NO: 5709 - protein, 221 aa, Artificial Sequence
  Description of Artificial Sequence: Synthetic polypeptide
  XENP020071 [CTLA-4]_H3.4_L0.12_Fab Heavy Chain
EVQLVESGGGLVKPGGSLRLSCAASGFTFSSYTMHWVRQAPGKGLEWVSFISYDGNHKYYADSVKGRFTISRDNAKNSLYLQMNSLRAEDTAVYYCARTGHLGPFDLWGQGTMVTVSSASTKGPSVFPLAPSSKSTSGGTAALGCLVKDYFPEPVTVSWNSGALTSGVHTFPAVLQSSGLYSLSSVVTVPSSSLGTQTYICNVNHKPSNTKVDKKVEPKSC

SEQ ID NO: 5710 - protein, 118 aa, Artificial Sequence; identical to SEQ ID NO: 2461
  Description of Artificial Sequence: Synthetic polypeptide
  VH of XENP020071

SEQ ID NO: 5711 - protein, 5 aa, Artificial Sequence
  Description of Artificial Sequence: Synthetic peptide
  XENP020071 vhCDR1
SYTMH

SEQ ID NO: 5712 - protein, 17 aa, Artificial Sequence
  Description of Artificial Sequence: Synthetic peptide
  XENP020071 vhCDR2
FISYDGNHKYYADSVKG

SEQ ID NO: 5713 - protein, 9 aa, Artificial Sequence
  Description of Artificial Sequence: Synthetic peptide
  XENP020071 vhCDR3
TGHLGPFDL

SEQ ID NO: 5714 - protein, 215 aa, Artificial Sequence; identical to SEQ ID NO: 4404
  Description of Artificial Sequence: Synthetic polypeptide
  XENP020071 [CTLA-4]_H3.4_L0.12_Fab Light Chain

SEQ ID NO: 5715 - protein, 108 aa, Artificial Sequence; identical to SEQ ID NO: 1517
  Description of Artificial Sequence: Synthetic polypeptide
  VL of XENP020071

SEQ ID NO: 5716 - protein, 12 aa, Artificial Sequence
  Description of Artificial Sequence: Synthetic peptide
  XENP020071 vlCDR1
RASQSVGSSYLA

SEQ ID NO: 5717 - protein, 7 aa, Artificial Sequence
  Description of Artificial Sequence: Synthetic peptide
  XENP020071 vlCDR2
GAFSRAT

SEQ ID NO: 5718 - protein, 9 aa, Artificial Sequence
  Description of Artificial Sequence: Synthetic peptide
  XENP020071 vlCDR3
QQYGSSPWT

SEQ ID NO: 5719 - protein, 221 aa, Artificial Sequence
  Description of Artificial Sequence: Synthetic polypeptide
  XENP020072 [CTLA-4]_H3.5_L0.12_Fab Heavy Chain
EVQLVESGGGLVKPGGSLRLSCAASGFTFSSYTMHWVRQAPGKGLEWVSFISYDGNTKYYADSVKGRFTISRDNAKNSLYLQMNSLRAEDTAVYYCARTGHLGPFDLWGQGTMVTVSSASTKGPSVFPLAPSSKSTSGGTAALGCLVKDYFPEPVTVSWNSGALTSGVHTFPAVLQSSGLYSLSSVVTVPSSSLGTQTYICNVNHKPSNTKVDKKVEPKSC

SEQ ID NO: 5720 - protein, 118 aa, Artificial Sequence; identical to SEQ ID NO: 2470
  Description of Artificial Sequence: Synthetic polypeptide
  VH of XENP020072

SEQ ID NO: 5721 - protein, 5 aa, Artificial Sequence
  Description of Artificial Sequence: Synthetic peptide
  XENP020072 vhCDR1
SYTMH

SEQ ID NO: 5722 - protein, 17 aa, Artificial Sequence
  Description of Artificial Sequence: Synthetic peptide
  XENP020072 vhCDR2
FISYDGNTKYYADSVKG

SEQ ID NO: 5723 - protein, 9 aa, Artificial Sequence
  Description of Artificial Sequence: Synthetic peptide
  XENP020072 vhCDR3
TGHLGPFDL

SEQ ID NO: 5724 - protein, 215 aa, Artificial Sequence; identical to SEQ ID NO: 4404
  Description of Artificial Sequence: Synthetic polypeptide
  XENP020072 [CTLA-4]_H3.5_L0.12_Fab Light Chain

SEQ ID NO: 5725 - protein, 108 aa, Artificial Sequence; identical to SEQ ID NO: 1517
  Description of Artificial Sequence: Synthetic polypeptide
  VL of XENP020072

SEQ ID NO: 5726 - protein, 12 aa, Artificial Sequence
  Description of Artificial Sequence: Synthetic peptide
  XENP020072 vlCDR1
RASQSVGSSYLA

SEQ ID NO: 5727 - protein, 7 aa, Artificial Sequence
  Description of Artificial Sequence: Synthetic peptide
  XENP020072 vlCDR2
GAFSRAT

SEQ ID NO: 5728 - protein, 9 aa, Artificial Sequence
  Description of Artificial Sequence: Synthetic peptide
  XENP020072 vlCDR3
QQYGSSPWT

SEQ ID NO: 5729 - protein, 221 aa, Artificial Sequence
  Description of Artificial Sequence: Synthetic polypeptide
  XENP020073 [CTLA-4]_H3.6_L0.12_Fab Heavy Chain
EVQLVESGGGLVKPGGSLRLSCAASGFTFSSYTMHWVRQAPGKGLEWVSFISYDGNQKYYADSVKGRFTISRDNAKNSLYLQMNSLRAEDTAVYYCARTGHLGPFDLWGQGTMVTVSSASTKGPSVFPLAPSSKSTSGGTAALGCLVKDYFPEPVTVSWNSGALTSGVHTFPAVLQSSGLYSLSSVVTVPSSSLGTQTYICNVNHKPSNTKVDKKVEPKSC

SEQ ID NO: 5730 - protein, 118 aa, Artificial Sequence; identical to SEQ ID NO: 2479
  Description of Artificial Sequence: Synthetic polypeptide
  VH of XENP020073

SEQ ID NO: 5731 - protein, 5 aa, Artificial Sequence
  Description of Artificial Sequence: Synthetic peptide
  XENP020073 vhCDR1
SYTMH

SEQ ID NO: 5732 - protein, 17 aa, Artificial Sequence
  Description of Artificial Sequence: Synthetic peptide
  XENP020073 vhCDR2
FISYDGNQKYYADSVKG

SEQ ID NO: 5733 - protein, 9 aa, Artificial Sequence
  Description of Artificial Sequence: Synthetic peptide
  XENP020073 vhCDR3
TGHLGPFDL

SEQ ID NO: 5734 - protein, 215 aa, Artificial Sequence; identical to SEQ ID NO: 4404
  Description of Artificial Sequence: Synthetic polypeptide
  XENP020073 [CTLA-4]_H3.6_L0.12_Fab Light Chain

SEQ ID NO: 5735 - protein, 108 aa, Artificial Sequence; identical to SEQ ID NO: 1517
  Description of Artificial Sequence: Synthetic polypeptide
  VL of XENP020073

SEQ ID NO: 5736 - protein, 12 aa, Artificial Sequence
  Description of Artificial Sequence: Synthetic peptide
  XENP020073 vlCDR1
RASQSVGSSYLA

SEQ ID NO: 5737 - protein, 7 aa, Artificial Sequence
  Description of Artificial Sequence: Synthetic peptide
  XENP020073 vlCDR2
GAFSRAT

SEQ ID NO: 5738 - protein, 9 aa, Artificial Sequence
  Description of Artificial Sequence: Synthetic peptide
  XENP020073 vlCDR3
QQYGSSPWT

SEQ ID NO: 5739 - protein, 221 aa, Artificial Sequence
  Description of Artificial Sequence: Synthetic polypeptide
  XENP020074 [CTLA-4]_H3.7_L0.12_Fab Heavy Chain
EVQLVESGGGLVKPGGSLRLSCAASGFTFSSYTMHWVRQAPGKGLEWVCFISYDGNNKYYADSVKGRFTCSRDNAKNSLYLQMNSLRAEDTAVYYCARTGWLGPFDYWGQGTLVTVSSASTKGPSVFPLAPSSKSTSGGTAALGCLVKDYFPEPVTVSWNSGALTSGVHTFPAVLQSSGLYSLSSVVTVPSSSLGTQTYICNVNHKPSNTKVDKKVEPKSC

SEQ ID NO: 5740 - protein, 118 aa, Artificial Sequence; identical to SEQ ID NO: 2488
  Description of Artificial Sequence: Synthetic polypeptide
  VH of XENP020074

SEQ ID NO: 5741 - protein, 5 aa, Artificial Sequence
  Description of Artificial Sequence: Synthetic peptide
  XENP020074 vhCDR1
SYTMH

SEQ ID NO: 5742 - protein, 17 aa, Artificial Sequence
  Description of Artificial Sequence: Synthetic peptide
  XENP020074 vhCDR2
FISYDGNNKYYADSVKG

SEQ ID NO: 5743 - protein, 9 aa, Artificial Sequence
  Description of Artificial Sequence: Synthetic peptide
  XENP020074 vhCDR3
TGWLGPFDY

SEQ ID NO: 5744 - protein, 215 aa, Artificial Sequence; identical to SEQ ID NO: 4404
  Description of Artificial Sequence: Synthetic polypeptide
  XENP020074 [CTLA-4]_H3.7_L0.12_Fab Light Chain

SEQ ID NO: 5745 - protein, 108 aa, Artificial Sequence; identical to SEQ ID NO: 1517
  Description of Artificial Sequence: Synthetic polypeptide
  VL of XENP020074

SEQ ID NO: 5746 - protein, 12 aa, Artificial Sequence
  Description of Artificial Sequence: Synthetic peptide
  XENP020074 vlCDR1
RASQSVGSSYLA

SEQ ID NO: 5747 - protein, 7 aa, Artificial Sequence
  Description of Artificial Sequence: Synthetic peptide
  XENP020074 vlCDR2
GAFSRAT

SEQ ID NO: 5748 - protein, 9 aa, Artificial Sequence
  Description of Artificial Sequence: Synthetic peptide
  XENP020074 vlCDR3
QQYGSSPWT

SEQ ID NO: 5749 - protein, 221 aa, Artificial Sequence
  Description of Artificial Sequence: Synthetic polypeptide
  XENP020323 [CTLA-4]_H3.9_L0.12_Fab Heavy Chain
EVQLVESGGGLVKPGGSLRLSCAASGFTFSSYTMHWVRQAPGKGLEWVSFISYDGNYKYYADSVKGRFTISRDNAKNSLYLQMNSLRAEDTAVYYCARTGHLGPFDLWGQGTMVTVSSASTKGPSVFPLAPSSKSTSGGTAALGCLVKDYFPEPVTVSWNSGALTSGVHTFPAVLQSSGLYSLSSVVTVPSSSLGTQTYICNVNHKPSNTKVDKKVEPKSC

SEQ ID NO: 5750 - protein, 118 aa, Artificial Sequence; identical to SEQ ID NO: 2506
  Description of Artificial Sequence: Synthetic polypeptide
  VH of XENP020323

SEQ ID NO: 5751 - protein, 5 aa, Artificial Sequence
  Description of Artificial Sequence: Synthetic peptide
  XENP020323 vhCDR1
SYTMH

SEQ ID NO: 5752 - protein, 17 aa, Artificial Sequence
  Description of Artificial Sequence: Synthetic peptide
  XENP020323 vhCDR2
FISYDGNYKYYADSVKG

SEQ ID NO: 5753 - protein, 9 aa, Artificial Sequence
  Description of Artificial Sequence: Synthetic peptide
  XENP020323 vhCDR3
TGHLGPFDL

SEQ ID NO: 5754 - protein, 215 aa, Artificial Sequence; identical to SEQ ID NO: 4404
  Description of Artificial Sequence: Synthetic polypeptide
  XENP020323 [CTLA-4]_H3.9_L0.12_Fab Light Chain

SEQ ID NO: 5755 - protein, 108 aa, Artificial Sequence; identical to SEQ ID NO: 1517
  Description of Artificial Sequence: Synthetic polypeptide
  VL of XENP020323

SEQ ID NO: 5756 - protein, 12 aa, Artificial Sequence
  Description of Artificial Sequence: Synthetic peptide
  XENP020323 vlCDR1
RASQSVGSSYLA

SEQ ID NO: 5757 - protein, 7 aa, Artificial Sequence
  Description of Artificial Sequence: Synthetic peptide
  XENP020323 vlCDR2
GAFSRAT

SEQ ID NO: 5758 - protein, 9 aa, Artificial Sequence
  Description of Artificial Sequence: Synthetic peptide
  XENP020323 vlCDR3
QQYGSSPWT

SEQ ID NO: 5759 - protein, 221 aa, Artificial Sequence
  Description of Artificial Sequence: Synthetic polypeptide
  XENP020324 [CTLA-4]_H3.10_L0.12_Fab Heavy Chain
EVQLVESGGGLVKPGGSLRLSCAASGFTFSSYTMHWVRQAPGKGLEWVSFISYDGNYKYYADSVKGRFTISRDNAKNSLYLQMNSLRAEDTAVYYCARTGLLGPFDLWGQGTMVTVSSASTKGPSVFPLAPSSKSTSGGTAALGCLVKDYFPEPVTVSWNSGALTSGVHTFPAVLQSSGLYSLSSVVTVPSSSLGTQTYICNVNHKPSNTKVDKKVEPKSC

SEQ ID NO: 5760 - protein, 118 aa, Artificial Sequence; identical to SEQ ID NO: 2515
  Description of Artificial Sequence: Synthetic polypeptide
  VH of XENP020324

SEQ ID NO: 5761 - protein, 5 aa, Artificial Sequence
  Description of Artificial Sequence: Synthetic peptide
  XENP020324 vhCDR1
SYTMH

SEQ ID NO: 5762 - protein, 17 aa, Artificial Sequence
  Description of Artificial Sequence: Synthetic peptide
  XENP020324 vhCDR2
FISYDGNYKYYADSVKG

SEQ ID NO: 5763 - protein, 9 aa, Artificial Sequence
  Description of Artificial Sequence: Synthetic peptide
  XENP020324 vhCDR3
TGLLGPFDL

SEQ ID NO: 5764 - protein, 215 aa, Artificial Sequence; identical to SEQ ID NO: 4404
  Description of Artificial Sequence: Synthetic polypeptide
  XENP020324 [CTLA-4]_H3.10_L0.12_Fab Light Chain

SEQ ID NO: 5765 - protein, 108 aa, Artificial Sequence; identical to SEQ ID NO: 1517
  Description of Artificial Sequence: Synthetic polypeptide
  VL of XENP020324

SEQ ID NO: 5766 - protein, 12 aa, Artificial Sequence
  Description of Artificial Sequence: Synthetic peptide
  XENP020324 vlCDR1
RASQSVGSSYLA

SEQ ID NO: 5767 - protein, 7 aa, Artificial Sequence
  Description of Artificial Sequence: Synthetic peptide
  XENP020324 vlCDR2
GAFSRAT

SEQ ID NO: 5768 - protein, 9 aa, Artificial Sequence
  Description of Artificial Sequence: Synthetic peptide
  XENP020324 vlCDR3
QQYGSSPWT

SEQ ID NO: 5769 - protein, 221 aa, Artificial Sequence
  Description of Artificial Sequence: Synthetic polypeptide
  XENP020325 [CTLA-4]_H3.11_L0.12_Fab Heavy Chain
EVQLVESGGGLVKPGGSLRLSCAASGFTFSSYTMHWVRQAPGKGLEWVSFISYDGNHKYYADSVKGRFTISRDNAKNSLYLQMNSLRAEDTAVYYCARGGHLGPFDLWGQGTMVTVSSASTKGPSVFPLAPSSKSTSGGTAALGCLVKDYFPEPVTVSWNSGALTSGVHTFPAVLQSSGLYSLSSVVTVPSSSLGTQTYICNVNHKPSNTKVDKKVEPKSC

SEQ ID NO: 5770 - protein, 118 aa, Artificial Sequence; identical to SEQ ID NO: 2524
  Description of Artificial Sequence: Synthetic polypeptide
  VH of XENP020325

SEQ ID NO: 5771 - protein, 5 aa, Artificial Sequence
  Description of Artificial Sequence: Synthetic peptide
  XENP020325 vhCDR1
SYTMH

SEQ ID NO: 5772 - protein, 17 aa, Artificial Sequence
  Description of Artificial Sequence: Synthetic peptide
  XENP020325 vhCDR2
FISYDGNHKYYADSVKG

SEQ ID NO: 5773 - protein, 9 aa, Artificial Sequence
  Description of Artificial Sequence: Synthetic peptide
  XENP020325 vhCDR3
GGHLGPFDL

SEQ ID NO: 5774 - protein, 215 aa, Artificial Sequence; identical to SEQ ID NO: 4404
  Description of Artificial Sequence: Synthetic polypeptide
  XENP020325 [CTLA-4]_H3.11_L0.12_Fab Light Chain

SEQ ID NO: 5775 - protein, 108 aa, Artificial Sequence; identical to SEQ ID NO: 1517
  Description of Artificial Sequence: Synthetic polypeptide
  VL of XENP020325

SEQ ID NO: 5776 - protein, 12 aa, Artificial Sequence
  Description of Artificial Sequence: Synthetic peptide
  XENP020325 vlCDR1
RASQSVGSSYLA

SEQ ID NO: 5777 - protein, 7 aa, Artificial Sequence
  Description of Artificial Sequence: Synthetic peptide
  XENP020325 vlCDR2
GAFSRAT

SEQ ID NO: 5778 - protein, 9 aa, Artificial Sequence
  Description of Artificial Sequence: Synthetic peptide
  XENP020325 vlCDR3
QQYGSSPWT

SEQ ID NO: 5779 - protein, 221 aa, Artificial Sequence
  Description of Artificial Sequence: Synthetic polypeptide
  XENP020326 [CTLA-4]_H3.12_L0.12_Fab Heavy Chain
EVQLVESGGGLVKPGGSLRLSCAASGFTFSSYTMHWVRQAPGKGLEWVSFISYDGNHKYYADSVKGRFTISRDNAKNSLYLQMNSLRAEDTAVYYCARTSHLGPFDLWGQGTMVTVSSASTKGPSVFPLAPSSKSTSGGTAALGCLVKDYFPEPVTVSWNSGALTSGVHTFPAVLQSSGLYSLSSVVTVPSSSLGTQTYICNVNHKPSNTKVDKKVEPKSC

SEQ ID NO: 5780 - protein, 118 aa, Artificial Sequence; identical to SEQ ID NO: 2533
  Description of Artificial Sequence: Synthetic polypeptide
  VH of XENP020326

SEQ ID NO: 5781 - protein, 5 aa, Artificial Sequence
  Description of Artificial Sequence: Synthetic peptide
  XENP020326 vhCDR1
SYTMH

SEQ ID NO: 5782 - protein, 17 aa, Artificial Sequence
  Description of Artificial Sequence: Synthetic peptide
  XENP020326 vhCDR2
FISYDGNHKYYADSVKG

SEQ ID NO: 5783 - protein, 9 aa, Artificial Sequence
  Description of Artificial Sequence: Synthetic peptide
  XENP020326 vhCDR3
TSHLGPFDL

SEQ ID NO: 5784 - protein, 215 aa, Artificial Sequence; identical to SEQ ID NO: 4404
  Description of Artificial Sequence: Synthetic polypeptide
  XENP020326 [CTLA-4]_H3.12_L0.12_Fab Light Chain

SEQ ID NO: 5785 - protein, 108 aa, Artificial Sequence; identical to SEQ ID NO: 1517
  Description of Artificial Sequence: Synthetic polypeptide
  VL of XENP020326

SEQ ID NO: 5786 - protein, 12 aa, Artificial Sequence
  Description of Artificial Sequence: Synthetic peptide
  XENP020326 vlCDR1
RASQSVGSSYLA

SEQ ID NO: 5787 - protein, 7 aa, Artificial Sequence
  Description of Artificial Sequence: Synthetic peptide
  XENP020326 vlCDR2
GAFSRAT

SEQ ID NO: 5788 - protein, 9 aa, Artificial Sequence
  Description of Artificial Sequence: Synthetic peptide
  XENP020326 vlCDR3
QQYGSSPWT

SEQ ID NO: 5789 - protein, 221 aa, Artificial Sequence
  Description of Artificial Sequence: Synthetic polypeptide
  XENP020327 [CTLA-4]_H3.13_L0.12_Fab Heavy Chain
EVQLVESGGGLVKPGGSLRLSCAASGFTFSSYTMHWVRQAPGKGLEWVSFISYDGNHKYYADSVKGRFTISRDNAKNSLYLQMNSLRAEDTAVYYCARGGLLGPFDLWGQGTMVTVSSASTKGPSVFPLAPSSKSTSGGTAALGCLVKDYFPEPVTVSWNSGALTSGVHTFPAVLQSSGLYSLSSVVTVPSSSLGTQTYICNVNHKPSNTKVDKKVEPKSC

SEQ ID NO: 5790 - protein, 118 aa, Artificial Sequence; identical to SEQ ID NO: 2542
  Description of Artificial Sequence: Synthetic polypeptide
  VH of XENP020327

SEQ ID NO: 5791 - protein, 5 aa, Artificial Sequence
  Description of Artificial Sequence: Synthetic peptide
  XENP020327 vhCDR1
SYTMH

SEQ ID NO: 5792 - protein, 17 aa, Artificial Sequence
  Description of Artificial Sequence: Synthetic peptide
  XENP020327 vhCDR2
FISYDGNHKYYADSVKG

SEQ ID NO: 5793 - protein, 9 aa, Artificial Sequence
  Description of Artificial Sequence: Synthetic peptide
  XENP020327 vhCDR3
GGLLGPFDL

SEQ ID NO: 5794 - protein, 215 aa, Artificial Sequence; identical to SEQ ID NO: 4404
  Description of Artificial Sequence: Synthetic polypeptide
  XENP020327 [CTLA-4]_H3.13_L0.12_Fab Light Chain

SEQ ID NO: 5795 - protein, 108 aa, Artificial Sequence; identical to SEQ ID NO: 1517
  Description of Artificial Sequence: Synthetic polypeptide
  VL of XENP020327

SEQ ID NO: 5796 - protein, 12 aa, Artificial Sequence
  Description of Artificial Sequence: Synthetic peptide
  XENP020327 vlCDR1
RASQSVGSSYLA

SEQ ID NO: 5797 - protein, 7 aa, Artificial Sequence
  Description of Artificial Sequence: Synthetic peptide
  XENP020327 vlCDR2
GAFSRAT

SEQ ID NO: 5798 - protein, 9 aa, Artificial Sequence
  Description of Artificial Sequence: Synthetic peptide
  XENP020327 vlCDR3
QQYGSSPWT

SEQ ID NO: 5799 - protein, 221 aa, Artificial Sequence
  Description of Artificial Sequence: Synthetic polypeptide
  XENP020328 [CTLA-4]_H3.14_L0.12_Fab Heavy Chain
EVQLVESGGGLVKPGGSLRLSCAASGFTFSSYTMHWVRQAPGKGLEWVSFISYDGNHKYYADSVKGRFTISRDNAKNSLYLQMNSLRAEDTAVYYCARTSLLGPFDLWGQGTMVTVSSASTKGPSVFPLAPSSKSTSGGTAALGCLVKDYFPEPVTVSWNSGALTSGVHTFPAVLQSSGLYSLSSVVTVPSSSLGTQTYICNVNHKPSNTKVDKKVEPKSC

SEQ ID NO: 5800 - protein, 118 aa, Artificial Sequence; identical to SEQ ID NO: 2551
  Description of Artificial Sequence: Synthetic polypeptide
  VH of XENP020328

SEQ ID NO: 5801 - protein, 5 aa, Artificial Sequence
  Description of Artificial Sequence: Synthetic peptide
  XENP020328 vhCDR1
SYTMH

SEQ ID NO: 5802 - protein, 17 aa, Artificial Sequence
  Description of Artificial Sequence: Synthetic peptide
  XENP020328 vhCDR2
FISYDGNHKYYADSVKG

SEQ ID NO: 5803 - protein, 9 aa, Artificial Sequence
  Description of Artificial Sequence: Synthetic peptide
  XENP020328 vhCDR3
TSLLGPFDL

SEQ ID NO: 5804 - protein, 215 aa, Artificial Sequence; identical to SEQ ID NO: 4404
  Description of Artificial Sequence: Synthetic polypeptide
  XENP020328 [CTLA-4]_H3.14_L0.12_Fab Light Chain

SEQ ID NO: 5805 - protein, 108 aa, Artificial Sequence; identical to SEQ ID NO: 1517
  Description of Artificial Sequence: Synthetic polypeptide
  VL of XENP020328

SEQ ID NO: 5806 - protein, 12 aa, Artificial Sequence
  Description of Artificial Sequence: Synthetic peptide
  XENP020328 vlCDR1
RASQSVGSSYLA

SEQ ID NO: 5807 - protein, 7 aa, Artificial Sequence
  Description of Artificial Sequence: Synthetic peptide
  XENP020328 vlCDR2
GAFSRAT

SEQ ID NO: 5808 - protein, 9 aa, Artificial Sequence
  Description of Artificial Sequence: Synthetic peptide
  XENP020328 vlCDR3
QQYGSSPWT

SEQ ID NO: 5809 - protein, 221 aa, Artificial Sequence
  Description of Artificial Sequence: Synthetic polypeptide
  XENP020329 [CTLA-4]_H3.15_L0.12_Fab Heavy Chain
EVQLVESGGGLVKPGGSLRLSCAASGFTFSSYTMHWVRQAPGKGLEWVSFISYDGNQKYYADSVKGRFTISRDNAKNSLYLQMNSLRAEDTAVYYCARGGHLGPFDLWGQGTMVTVSSASTKGPSVFPLAPSSKSTSGGTAALGCLVKDYFPEPVTVSWNSGALTSGVHTFPAVLQSSGLYSLSSVVTVPSSSLGTQTYICNVNHKPSNTKVDKKVEPKSC

SEQ ID NO: 5810 - protein, 118 aa, Artificial Sequence; identical to SEQ ID NO: 2560
  Description of Artificial Sequence: Synthetic polypeptide
  VH of XENP020329

SEQ ID NO: 5811 - protein, 5 aa, Artificial Sequence
  Description of Artificial Sequence: Synthetic peptide
  XENP020329 vhCDR1
SYTMH

SEQ ID NO: 5812 - protein, 17 aa, Artificial Sequence
  Description of Artificial Sequence: Synthetic peptide
  XENP020329 vhCDR2
FISYDGNQKYYADSVKG

SEQ ID NO: 5813 - protein, 9 aa, Artificial Sequence
  Description of Artificial Sequence: Synthetic peptide
  XENP020329 vhCDR3
GGHLGPFDL

SEQ ID NO: 5814 - protein, 215 aa, Artificial Sequence; identical to SEQ ID NO: 4404
  Description of Artificial Sequence: Synthetic polypeptide
  XENP020329 [CTLA-4]_H3.15_L0.12_Fab Light Chain

SEQ ID NO: 5815 - protein, 108 aa, Artificial Sequence; identical to SEQ ID NO: 1517
  Description of Artificial Sequence: Synthetic polypeptide
  VL of XENP020329

SEQ ID NO: 5816 - protein, 12 aa, Artificial Sequence
  Description of Artificial Sequence: Synthetic peptide
  XENP020329 vlCDR1
RASQSVGSSYLA

SEQ ID NO: 5817 - protein, 7 aa, Artificial Sequence
  Description of Artificial Sequence: Synthetic peptide
  XENP020329 vlCDR2
GAFSRAT

SEQ ID NO: 5818 - protein, 9 aa, Artificial Sequence
  Description of Artificial Sequence: Synthetic peptide
  XENP020329 vlCDR3
QQYGSSPWT

SEQ ID NO: 5819 - protein, 221 aa, Artificial Sequence
  Description of Artificial Sequence: Synthetic polypeptide
  XENP020330 [CTLA-4]_H3.16_L0.12_Fab Heavy Chain
EVQLVESGGGLVKPGGSLRLSCAASGFTFSSYTMHWVRQAPGKGLEWVSFISYDGNQKYYADSVKGRFTISRDNAKNSLYLQMNSLRAEDTAVYYCARTSHLGPFDLWGQGTMVTVSSASTKGPSVFPLAPSSKSTSGGTAALGCLVKDYFPEPVTVSWNSGALTSGVHTFPAVLQSSGLYSLSSVVTVPSSSLGTQTYICNVNHKPSNTKVDKKVEPKSC

SEQ ID NO: 5820 - protein, 118 aa, Artificial Sequence; identical to SEQ ID NO: 2569
  Description of Artificial Sequence: Synthetic polypeptide
  VH of XENP020330

SEQ ID NO: 5821 - protein, 5 aa, Artificial Sequence
  Description of Artificial Sequence: Synthetic peptide
  XENP020330 vhCDR1
SYTMH

SEQ ID NO: 5822 - protein, 17 aa, Artificial Sequence
  Description of Artificial Sequence: Synthetic peptide
  XENP020330 vhCDR2
FISYDGNQKYYADSVKG

SEQ ID NO: 5823 - protein, 9 aa, Artificial Sequence
  Description of Artificial Sequence: Synthetic peptide
  XENP020330 vhCDR3
TSHLGPFDL

SEQ ID NO: 5824 - protein, 215 aa, Artificial Sequence; identical to SEQ ID NO: 4404
  Description of Artificial Sequence: Synthetic polypeptide
  XENP020330 [CTLA-4]_H3.16_L0.12_Fab Light Chain

SEQ ID NO: 5825 - protein, 108 aa, Artificial Sequence; identical to SEQ ID NO: 1517
  Description of Artificial Sequence: Synthetic polypeptide
  VL of XENP020330

SEQ ID NO: 5826 - protein, 12 aa, Artificial Sequence
  Description of Artificial Sequence: Synthetic peptide
  XENP020330 vlCDR1
RASQSVGSSYLA

SEQ ID NO: 5827 - protein, 7 aa, Artificial Sequence
  Description of Artificial Sequence: Synthetic peptide
  XENP020330 vlCDR2
GAFSRAT

SEQ ID NO: 5828 - protein, 9 aa, Artificial Sequence
  Description of Artificial Sequence: Synthetic peptide
  XENP020330 vlCDR3
QQYGSSPWT

SEQ ID NO: 5829 - protein, 221 aa, Artificial Sequence
  Description of Artificial Sequence: Synthetic polypeptide
  XENP020331 [CTLA-4]_H3.17_L0.12_Fab Heavy Chain
EVQLVESGGGLVKPGGSLRLSCAASGFTFSSYTMHWVRQAPGKGLEWVSFISYDGNQKYYADSVKGRFTISRDNAKNSLYLQMNSLRAEDTAVYYCARGGLLGPFDLWGQGTMVTVSSASTKGPSVFPLAPSSKSTSGGTAALGCLVKDYFPEPVTVSWNSGALTSGVHTFPAVLQSSGLYSLSSVVTVPSSSLGTQTYICNVNHKPSNTKVDKKVEPKSC

SEQ ID NO: 5830 - protein, 118 aa, Artificial Sequence; identical to SEQ ID NO: 2578
  Description of Artificial Sequence: Synthetic polypeptide
  VH of XENP020331

SEQ ID NO: 5831 - protein, 5 aa, Artificial Sequence
  Description of Artificial Sequence: Synthetic peptide
  XENP020331 vhCDR1
SYTMH

SEQ ID NO: 5832 - protein, 17 aa, Artificial Sequence
  Description of Artificial Sequence: Synthetic peptide
  XENP020331 vhCDR2
FISYDGNQKYYADSVKG

SEQ ID NO: 5833 - protein, 9 aa, Artificial Sequence
  Description of Artificial Sequence: Synthetic peptide
  XENP020331 vhCDR3
GGLLGPFDL

SEQ ID NO: 5834 - protein, 215 aa, Artificial Sequence; identical to SEQ ID NO: 4404
  Description of Artificial Sequence: Synthetic polypeptide
  XENP020331 [CTLA-4]_H3.17_L0.12_Fab Light Chain

SEQ ID NO: 5835 - protein, 108 aa, Artificial Sequence; identical to SEQ ID NO: 1517
  Description of Artificial Sequence: Synthetic polypeptide
  VL of XENP020331

SEQ ID NO: 5836 - protein, 12 aa, Artificial Sequence
  Description of Artificial Sequence: Synthetic peptide
  XENP020331 vlCDR1
RASQSVGSSYLA

SEQ ID NO: 5837 - protein, 7 aa, Artificial Sequence
  Description of Artificial Sequence: Synthetic peptide
  XENP020331 vlCDR2
GAFSRAT

SEQ ID NO: 5838 - protein, 9 aa, Artificial Sequence
  Description of Artificial Sequence: Synthetic peptide
  XENP020331 vlCDR3
QQYGSSPWT

SEQ ID NO: 5839 - protein, 221 aa, Artificial Sequence
  Description of Artificial Sequence: Synthetic polypeptide
  XENP020332 [CTLA-4]_H3.18_L0.12_Fab Heavy Chain
EVQLVESGGGLVKPGGSLRLSCAASGFTFSSYTMHWVRQAPGKGLEWVSFISYDGNQKYYADSVKGRFTISRDNAKNSLYLQMNSLRAEDTAVYYCARTSLLGPFDLWGQGTMVTVSSASTKGPSVFPLAPSSKSTSGGTAALGCLVKDYFPEPVTVSWNSGALTSGVHTFPAVLQSSGLYSLSSVVTVPSSSLGTQTYICNVNHKPSNTKVDKKVEPKSC

SEQ ID NO: 5840 - protein, 118 aa, Artificial Sequence; identical to SEQ ID NO: 2587
  Description of Artificial Sequence: Synthetic polypeptide
  VH of XENP020332

SEQ ID NO: 5841 - protein, 5 aa, Artificial Sequence
  Description of Artificial Sequence: Synthetic peptide
  XENP020332 vhCDR1
SYTMH

SEQ ID NO: 5842 - protein, 17 aa, Artificial Sequence
  Description of Artificial Sequence: Synthetic peptide
  XENP020332 vhCDR2
FISYDGNQKYYADSVKG

SEQ ID NO: 5843 - protein, 9 aa, Artificial Sequence
  Description of Artificial Sequence: Synthetic peptide
  XENP020332 vhCDR3
TSLLGPFDL

SEQ ID NO: 5844 - protein, 215 aa, Artificial Sequence; identical to SEQ ID NO: 4404
  Description of Artificial Sequence: Synthetic polypeptide
  XENP020332 [CTLA-4]_H3.18_L0.12_Fab Light Chain

SEQ ID NO: 5845 - protein, 108 aa, Artificial Sequence; identical to SEQ ID NO: 1517
  Description of Artificial Sequence: Synthetic polypeptide
  VL of XENP020332

SEQ ID NO: 5846 - protein, 12 aa, Artificial Sequence
  Description of Artificial Sequence: Synthetic peptide
  XENP020332 vlCDR1
RASQSVGSSYLA

SEQ ID NO: 5847 - protein, 7 aa, Artificial Sequence
  Description of Artificial Sequence: Synthetic peptide
  XENP020332 vlCDR2
GAFSRAT

SEQ ID NO: 5848 - protein, 9 aa, Artificial Sequence
  Description of Artificial Sequence: Synthetic peptide
  XENP020332 vlCDR3
QQYGSSPWT

SEQ ID NO: 5849 - protein, 221 aa, Artificial Sequence
  Description of Artificial Sequence: Synthetic polypeptide
  XENP020333 [CTLA-4]_H3.19_L0.12_Fab Heavy Chain
EVQLVESGGGLVKPGGSLRLSCAASGFTFSSYTMHWVRQAPGKGLEWVSFISYDGNTKYYADSVKGRFTISRDNAKNSLYLQMNSLRAEDTAVYYCARGGHLGPFDLWGQGTMVTVSSASTKGPSVFPLAPSSKSTSGGTAALGCLVKDYFPEPVTVSWNSGALTSGVHTFPAVLQSSGLYSLSSVVTVPSSSLGTQTYICNVNHKPSNTKVDKKVEPKSC

SEQ ID NO: 5850 - protein, 118 aa, Artificial Sequence; identical to SEQ ID NO: 2596
  Description of Artificial Sequence: Synthetic polypeptide
  VH of XENP020333

SEQ ID NO: 5851 - protein, 5 aa, Artificial Sequence
  Description of Artificial Sequence: Synthetic peptide
  XENP020333 vhCDR1
SYTMH

SEQ ID NO: 5852 - protein, 17 aa, Artificial Sequence
  Description of Artificial Sequence: Synthetic peptide
  XENP020333 vhCDR2
FISYDGNTKYYADSVKG

SEQ ID NO: 5853 - protein, 9 aa, Artificial Sequence
  Description of Artificial Sequence: Synthetic peptide
  XENP020333 vhCDR3
GGHLGPFDL

SEQ ID NO: 5854 - protein, 215 aa, Artificial Sequence; identical to SEQ ID NO: 4404
  Description of Artificial Sequence: Synthetic polypeptide
  XENP020333 [CTLA-4]_H3.19_L0.12_Fab Light Chain

SEQ ID NO: 5855 - protein, 108 aa, Artificial Sequence; identical to SEQ ID NO: 1517
  Description of Artificial Sequence: Synthetic polypeptide
  VL of XENP020333

SEQ ID NO: 5856 - protein, 12 aa, Artificial Sequence
  Description of Artificial Sequence: Synthetic peptide
  XENP020333 vlCDR1
RASQSVGSSYLA

SEQ ID NO: 5857 - protein, 7 aa, Artificial Sequence
  Description of Artificial Sequence: Synthetic peptide
  XENP020333 vlCDR2
GAFSRAT

SEQ ID NO: 5858 - protein, 9 aa, Artificial Sequence
  Description of Artificial Sequence: Synthetic peptide
  XENP020333 vlCDR3
QQYGSSPWT

SEQ ID NO: 5859 - protein, 221 aa, Artificial Sequence
  Description of Artificial Sequence: Synthetic polypeptide
  XENP020334 [CTLA-4]_H3.20_L0.12_Fab Heavy Chain
EVQLVESGGGLVKPGGSLRLSCAASGFTFSSYTMHWVRQAPGKGLEWVSFISYDGNTKYYADSVKGRFTISRDNAKNSLYLQMNSLRAEDTAVYYCARTSHLGPFDLWGQGTMVTVSSASTKGPSVFPLAPSSKSTSGGTAALGCLVKDYFPEPVTVSWNSGALTSGVHTFPAVLQSSGLYSLSSVVTVPSSSLGTQTYICNVNHKPSNTKVDKKVEPKSC

SEQ ID NO: 5860 - protein, 118 aa, Artificial Sequence; identical to SEQ ID NO: 2605
  Description of Artificial Sequence: Synthetic polypeptide
  VH of XENP020334

SEQ ID NO: 5861 - protein, 5 aa, Artificial Sequence
  Description of Artificial Sequence: Synthetic peptide
  XENP020334 vhCDR1
SYTMH

SEQ ID NO: 5862 - protein, 17 aa, Artificial Sequence
  Description of Artificial Sequence: Synthetic peptide
  XENP020334 vhCDR2
FISYDGNTKYYADSVKG

SEQ ID NO: 5863 - protein, 9 aa, Artificial Sequence
  Description of Artificial Sequence: Synthetic peptide
  XENP020334 vhCDR3
TSHLGPFDL

SEQ ID NO: 5864 - protein, 215 aa, Artificial Sequence; identical to SEQ ID NO: 4404
  Description of Artificial Sequence: Synthetic polypeptide
  XENP020334 [CTLA-4]_H3.20_L0.12_Fab Light Chain

SEQ ID NO: 5865 - protein, 108 aa, Artificial Sequence; identical to SEQ ID NO: 1517
  Description of Artificial Sequence: Synthetic polypeptide
  VL of XENP020334

SEQ ID NO: 5866 - protein, 12 aa, Artificial Sequence
  Description of Artificial Sequence: Synthetic peptide
  XENP020334 vlCDR1
RASQSVGSSYLA

SEQ ID NO: 5867 - protein, 7 aa, Artificial Sequence
  Description of Artificial Sequence: Synthetic peptide
  XENP020334 vlCDR2
GAFSRAT

SEQ ID NO: 5868 - protein, 9 aa, Artificial Sequence
  Description of Artificial Sequence: Synthetic peptide
  XENP020334 vlCDR3
QQYGSSPWT

SEQ ID NO: 5869 - protein, 221 aa, Artificial Sequence
  Description of Artificial Sequence: Synthetic polypeptide
  XENP020335 [CTLA-4]_H3.21_L0.12_Fab Heavy Chain
EVQLVESGGGLVKPGGSLRLSCAASGFTFSSYTMHWVRQAPGKGLEWVSFISYDGNTKYYADSVKGRFTISRDNAKNSLYLQMNSLRAEDTAVYYCARGGLLGPFDLWGQGTMVTVSSASTKGPSVFPLAPSSKSTSGGTAALGCLVKDYFPEPVTVSWNSGALTSGVHTFPAVLQSSGLYSLSSVVTVPSSSLGTQTYICNVNHKPSNTKVDKKVEPKSC

SEQ ID NO: 5870 - protein, 118 aa, Artificial Sequence; identical to SEQ ID NO: 2614
  Description of Artificial Sequence: Synthetic polypeptide
  VH of XENP020335

SEQ ID NO: 5871 - protein, 5 aa, Artificial Sequence
  Description of Artificial Sequence: Synthetic peptide
  XENP020335 vhCDR1
SYTMH

SEQ ID NO: 5872 - protein, 17 aa, Artificial Sequence
  Description of Artificial Sequence: Synthetic peptide
  XENP020335 vhCDR2
FISYDGNTKYYADSVKG

SEQ ID NO: 5873 - protein, 9 aa, Artificial Sequence
  Description of Artificial Sequence: Synthetic peptide
  XENP020335 vhCDR3
GGLLGPFDL

SEQ ID NO: 5874 - protein, 215 aa, Artificial Sequence; identical to SEQ ID NO: 4404
  Description of Artificial Sequence: Synthetic polypeptide
  XENP020335 [CTLA-4]_H3.21_L0.12_Fab Light Chain

SEQ ID NO: 5875 - protein, 108 aa, Artificial Sequence; identical to SEQ ID NO: 1517
  Description of Artificial Sequence: Synthetic polypeptide
  VL of XENP020335

SEQ ID NO: 5876 - protein, 12 aa, Artificial Sequence
  Description of Artificial Sequence: Synthetic peptide
  XENP020335 vlCDR1
RASQSVGSSYLA

SEQ ID NO: 5877 - protein, 7 aa, Artificial Sequence
  Description of Artificial Sequence: Synthetic peptide
  XENP020335 vlCDR2
GAFSRAT

SEQ ID NO: 5878 - protein, 9 aa, Artificial Sequence
  Description of Artificial Sequence: Synthetic peptide
  XENP020335 vlCDR3
QQYGSSPWT

SEQ ID NO: 5879 - protein, 221 aa, Artificial Sequence
  Description of Artificial Sequence: Synthetic polypeptide
  XENP020336 [CTLA-4]_H3.22_L0.12_Fab Heavy Chain
EVQLVESGGGLVKPGGSLRLSCAASGFTFSSYTMHWVRQAPGKGLEWVSFISYDGNTKYYADSVKGRFTISRDNAKNSLYLQMNSLRAEDTAVYYCARTSLLGPFDLWGQGTMVTVSSASTKGPSVFPLAPSSKSTSGGTAALGCLVKDYFPEPVTVSWNSGALTSGVHTFPAVLQSSGLYSLSSVVTVPSSSLGTQTYICNVNHKPSNTKVDKKVEPKSC

SEQ ID NO: 5880 - protein, 118 aa, Artificial Sequence; identical to SEQ ID NO: 2623
  Description of Artificial Sequence: Synthetic polypeptide
  VH of XENP020336

SEQ ID NO: 5881 - protein, 5 aa, Artificial Sequence
  Description of Artificial Sequence: Synthetic peptide
  XENP020336 vhCDR1
SYTMH

SEQ ID NO: 5882 - protein, 17 aa, Artificial Sequence
  Description of Artificial Sequence: Synthetic peptide
  XENP020336 vhCDR2
FISYDGNTKYYADSVKG

SEQ ID NO: 5883 - protein, 9 aa, Artificial Sequence
  Description of Artificial Sequence: Synthetic peptide
  XENP020336 vhCDR3
TSLLGPFDL

SEQ ID NO: 5884 - protein, 215 aa, Artificial Sequence; identical to SEQ ID NO: 4404
  Description of Artificial Sequence: Synthetic polypeptide
  XENP020336 [CTLA-4]_H3.22_L0.12_Fab Light Chain

SEQ ID NO: 5885 - protein, 108 aa, Artificial Sequence; identical to SEQ ID NO: 1517
  Description of Artificial Sequence: Synthetic polypeptide
  VL of XENP020336

SEQ ID NO: 5886 - protein, 12 aa, Artificial Sequence
  Description of Artificial Sequence: Synthetic peptide
  XENP020336 vlCDR1
RASQSVGSSYLA

SEQ ID NO: 5887 - protein, 7 aa, Artificial Sequence
  Description of Artificial Sequence: Synthetic peptide
  XENP020336 vlCDR2
GAFSRAT

SEQ ID NO: 5888 - protein, 9 aa, Artificial Sequence
  Description of Artificial Sequence: Synthetic peptide
  XENP020336 vlCDR3
QQYGSSPWT

SEQ ID NO: 5889 - protein, 221 aa, Artificial Sequence
  Description of Artificial Sequence: Synthetic polypeptide
  XENP020337 [CTLA-4]_H3.23_L0.12_Fab Heavy Chain
EVQLVESGGGLVKPGGSLRLSCAASGFTFSSYTMHWVRQAPGKGLEWVSFISYDGNYKYYADSVKGRFTISRDNAKNSLYLQMNSLRAEDTAVYYCARGGHLGPFDLWGQGTMVTVSSASTKGPSVFPLAPSSKSTSGGTAALGCLVKDYFPEPVTVSWNSGALTSGVHTFPAVLQSSGLYSLSSVVTVPSSSLGTQTYICNVNHKPSNTKVDKKVEPKSC

SEQ ID NO: 5890 - protein, 118 aa, Artificial Sequence; identical to SEQ ID NO: 2632
  Description of Artificial Sequence: Synthetic polypeptide
  VH of XENP020337

SEQ ID NO: 5891 - protein, 5 aa, Artificial Sequence
  Description of Artificial Sequence: Synthetic peptide
  XENP020337 vhCDR1
SYTMH

SEQ ID NO: 5892 - protein, 17 aa, Artificial Sequence
  Description of Artificial Sequence: Synthetic peptide
  XENP020337 vhCDR2
FISYDGNYKYYADSVKG

SEQ ID NO: 5893 - protein, 9 aa, Artificial Sequence
  Description of Artificial Sequence: Synthetic peptide
  XENP020337 vhCDR3
GGHLGPFDL

SEQ ID NO: 5894 - protein, 215 aa, Artificial Sequence; identical to SEQ ID NO: 4404
  Description of Artificial Sequence: Synthetic polypeptide
  XENP020337 [CTLA-4]_H3.23_L0.12_Fab Light Chain

SEQ ID NO: 5895 - protein, 108 aa, Artificial Sequence; identical to SEQ ID NO: 1517
  Description of Artificial Sequence: Synthetic polypeptide
  VL of XENP020337

SEQ ID NO: 5896 - protein, 12 aa, Artificial Sequence
  Description of Artificial Sequence: Synthetic peptide
  XENP020337 vlCDR1
RASQSVGSSYLA

SEQ ID NO: 5897 - protein, 7 aa, Artificial Sequence
  Description of Artificial Sequence: Synthetic peptide
  XENP020337 vlCDR2
GAFSRAT

SEQ ID NO: 5898 - protein, 9 aa, Artificial Sequence
  Description of Artificial Sequence: Synthetic peptide
  XENP020337 vlCDR3
QQYGSSPWT

SEQ ID NO: 5899 - protein, 221 aa, Artificial Sequence
  Description of Artificial Sequence: Synthetic polypeptide
  XENP020338 [CTLA-4]_H3.24_L0.12_Fab Heavy Chain
EVQLVESGGGLVKPGGSLRLSCAASGFTFSSYTMHWVRQAPGKGLEWVSFISYDGNYKYYADSVKGRFTISRDNAKNSLYLQMNSLRAEDTAVYYCARTSHLGPFDLWGQGTMVTVSSASTKGPSVFPLAPSSKSTSGGTAALGCLVKDYFPEPVTVSWNSGALTSGVHTFPAVLQSSGLYSLSSVVTVPSSSLGTQTYICNVNHKPSNTKVDKKVEPKSC

SEQ ID NO: 5900 - protein, 118 aa, Artificial Sequence; identical to SEQ ID NO: 2641
  Description of Artificial Sequence: Synthetic polypeptide
  VH of XENP020338

SEQ ID NO: 5901 - protein, 5 aa, Artificial Sequence
  Description of Artificial Sequence: Synthetic peptide
  XENP020338 vhCDR1
SYTMH

SEQ ID NO: 5902 - protein, 17 aa, Artificial Sequence
  Description of Artificial Sequence: Synthetic peptide
  XENP020338 vhCDR2
FISYDGNYKYYADSVKG

SEQ ID NO: 5903 - protein, 9 aa, Artificial Sequence
  Description of Artificial Sequence: Synthetic peptide
  XENP020338 vhCDR3
TSHLGPFDL

SEQ ID NO: 5904 - protein, 215 aa, Artificial Sequence; identical to SEQ ID NO: 4404
  Description of Artificial Sequence: Synthetic polypeptide
  XENP020338 [CTLA-4]_H3.24_L0.12_Fab Light Chain

SEQ ID NO: 5905 - protein, 108 aa, Artificial Sequence; identical to SEQ ID NO: 1517
  Description of Artificial Sequence: Synthetic polypeptide
  VL of XENP020338

SEQ ID NO: 5906 - protein, 12 aa, Artificial Sequence
  Description of Artificial Sequence: Synthetic peptide
  XENP020338 vlCDR1
RASQSVGSSYLA

SEQ ID NO: 5907 - protein, 7 aa, Artificial Sequence
  Description of Artificial Sequence: Synthetic peptide
  XENP020338 vlCDR2
GAFSRAT

SEQ ID NO: 5908 - protein, 9 aa, Artificial Sequence
  Description of Artificial Sequence: Synthetic peptide
  XENP020338 vlCDR3
QQYGSSPWT

SEQ ID NO: 5909 - protein, 221 aa, Artificial Sequence
  Description of Artificial Sequence: Synthetic polypeptide
  XENP020339 [CTLA-4]_H3.25_L0.12_Fab Heavy Chain
EVQLVESGGGLVKPGGSLRLSCAASGFTFSSYTMHWVRQAPGKGLEWVSFISYDGNYKYYADSVKGRFTISRDNAKNSLYLQMNSLRAEDTAVYYCARGGLLGPFDLWGQGTMVTVSSASTKGPSVFPLAPSSKSTSGGTAALGCLVKDYFPEPVTVSWNSGALTSGVHTFPAVLQSSGLYSLSSVVTVPSSSLGTQTYICNVNHKPSNTKVDKKVEPKSC

SEQ ID NO: 5910 - protein, 118 aa, Artificial Sequence; identical to SEQ ID NO: 2650
  Description of Artificial Sequence: Synthetic polypeptide
  VH of XENP020339

SEQ ID NO: 5911 - protein, 5 aa, Artificial Sequence
  Description of Artificial Sequence: Synthetic peptide
  XENP020339 vhCDR1
SYTMH

SEQ ID NO: 5912 - protein, 17 aa, Artificial Sequence
  Description of Artificial Sequence: Synthetic peptide
  XENP020339 vhCDR2
FISYDGNYKYYADSVKG

SEQ ID NO: 5913 - protein, 9 aa, Artificial Sequence
  Description of Artificial Sequence: Synthetic peptide
  XENP020339 vhCDR3
GGLLGPFDL

SEQ ID NO: 5914 - protein, 215 aa, Artificial Sequence; identical to SEQ ID NO: 4404
  Description of Artificial Sequence: Synthetic polypeptide
  XENP020339 [CTLA-4]_H3.25_L0.12_Fab Light Chain

SEQ ID NO: 5915 - protein, 108 aa, Artificial Sequence; identical to SEQ ID NO: 1517
  Description of Artificial Sequence: Synthetic polypeptide
  VL of XENP020339

SEQ ID NO: 5916 - protein, 12 aa, Artificial Sequence
  Description of Artificial Sequence: Synthetic peptide
  XENP020339 vlCDR1
RASQSVGSSYLA

SEQ ID NO: 5917 - protein, 7 aa, Artificial Sequence
  Description of Artificial Sequence: Synthetic peptide
  XENP020339 vlCDR2
GAFSRAT

SEQ ID NO: 5918 - protein, 9 aa, Artificial Sequence
  Description of Artificial Sequence: Synthetic peptide
  XENP020339 vlCDR3
QQYGSSPWT

SEQ ID NO: 5919 - protein, 221 aa, Artificial Sequence
  Description of Artificial Sequence: Synthetic polypeptide
  XENP020340 [CTLA-4]_H3.26_L0.12_Fab Heavy Chain
EVQLVESGGGLVKPGGSLRLSCAASGFTFSSYTMHWVRQAPGKGLEWVSFISYDGNYKYYADSVKGRFTISRDNAKNSLYLQMNSLRAEDTAVYYCARTSLLGPFDLWGQGTMVTVSSASTKGPSVFPLAPSSKSTSGGTAALGCLVKDYFPEPVTVSWNSGALTSGVHTFPAVLQSSGLYSLSSVVTVPSSSLGTQTYICNVNHKPSNTKVDKKVEPKSC

SEQ ID NO: 5920 - protein, 118 aa, Artificial Sequence; identical to SEQ ID NO: 2659
  Description of Artificial Sequence: Synthetic polypeptide
  VH of XENP020340

SEQ ID NO: 5921 - protein, 5 aa, Artificial Sequence
  Description of Artificial Sequence: Synthetic peptide
  XENP020340 vhCDR1
SYTMH

SEQ ID NO: 5922 - protein, 17 aa, Artificial Sequence
  Description of Artificial Sequence: Synthetic peptide
  XENP020340 vhCDR2
FISYDGNYKYYADSVKG

SEQ ID NO: 5923 - protein, 9 aa, Artificial Sequence
  Description of Artificial Sequence: Synthetic peptide
  XENP020340 vhCDR3
TSLLGPFDL

SEQ ID NO: 5924 - protein, 215 aa, Artificial Sequence; identical to SEQ ID NO: 4404
  Description of Artificial Sequence: Synthetic polypeptide
  XENP020340 [CTLA-4]_H3.26_L0.12_Fab Light Chain

SEQ ID NO: 5925 - protein, 108 aa, Artificial Sequence; identical to SEQ ID NO: 1517
  Description of Artificial Sequence: Synthetic polypeptide
  VL of XENP020340

SEQ ID NO: 5926 - protein, 12 aa, Artificial Sequence
  Description of Artificial Sequence: Synthetic peptide
  XENP020340 vlCDR1
RASQSVGSSYLA

SEQ ID NO: 5927 - protein, 7 aa, Artificial Sequence
  Description of Artificial Sequence: Synthetic peptide
  XENP020340 vlCDR2
GAFSRAT

SEQ ID NO: 5928 - protein, 9 aa, Artificial Sequence
  Description of Artificial Sequence: Synthetic peptide
  XENP020340 vlCDR3
QQYGSSPWT

SEQ ID NO: 5929 - protein, 221 aa, Artificial Sequence; identical to SEQ ID NO: 5709
  Description of Artificial Sequence: Synthetic polypeptide
  XENP020341 [CTLA-4]_H3.4_L0.118_Fab Heavy Chain

SEQ ID NO: 5930 - protein, 118 aa, Artificial Sequence; identical to SEQ ID NO: 2461
  Description of Artificial Sequence: Synthetic polypeptide
  VH of XENP020341

SEQ ID NO: 5931 - protein, 5 aa, Artificial Sequence
  Description of Artificial Sequence: Synthetic peptide
  XENP020341 vhCDR1
SYTMH

SEQ ID NO: 5932 - protein, 17 aa, Artificial Sequence
  Description of Artificial Sequence: Synthetic peptide
  XENP020341 vhCDR2
FISYDGNHKYYADSVKG

SEQ ID NO: 5933 - protein, 9 aa, Artificial Sequence
  Description of Artificial Sequence: Synthetic peptide
  XENP020341 vhCDR3
TGHLGPFDL

SEQ ID NO: 5934 - protein, 215 aa, Artificial Sequence
  Description of Artificial Sequence: Synthetic polypeptide
  XENP020341 [CTLA-4]_H3.4_L0.118_Fab Light Chain
EIVLTQSPATLSVSPGERATLSCRASQSVGSSYLAWYQQKPGQAPRLLIYGAFSRATGIPDRFSGSGSGTDFTLTISRLEPEDFAVYYCQQYGSSPWTFGQGTKVEIKRTVAAPSVFIFPPSDEQLKSGTASVVCLLNNFYPREAKVQWKVDNALQSGNSQESVTEQDSKDSTYSLSSTLTLSKADYEKHKVYACEVTHQGLSSPVTKSFNRGEC

SEQ ID NO: 5935 - protein, 108 aa, Artificial Sequence; identical to SEQ ID NO: 2669
  Description of Artificial Sequence: Synthetic polypeptide
  VL of XENP020341

SEQ ID NO: 5936 - protein, 12 aa, Artificial Sequence
  Description of Artificial Sequence: Synthetic peptide
  XENP020341 vlCDR1
RASQSVGSSYLA

SEQ ID NO: 5937 - protein, 7 aa, Artificial Sequence
  Description of Artificial Sequence: Synthetic peptide
  XENP020341 vlCDR2
GAFSRAT

SEQ ID NO: 5938 - protein, 9 aa, Artificial Sequence
  Description of Artificial Sequence: Synthetic peptide
  XENP020341 vlCDR3
QQYGSSPWT

SEQ ID NO: 5939 - protein, 221 aa, Artificial Sequence; identical to SEQ ID NO: 5709
  Description of Artificial Sequence: Synthetic polypeptide
  XENP020342 [CTLA-4]_H3.4_L0.119_Fab Heavy Chain

SEQ ID NO: 5940 - protein, 118 aa, Artificial Sequence; identical to SEQ ID NO: 2461
  Description of Artificial Sequence: Synthetic polypeptide
  VH of XENP020342

SEQ ID NO: 5941 - protein, 5 aa, Artificial Sequence
  Description of Artificial Sequence: Synthetic peptide
  XENP020342 vhCDR1
SYTMH

SEQ ID NO: 5942 - protein, 17 aa, Artificial Sequence
  Description of Artificial Sequence: Synthetic peptide
  XENP020342 vhCDR2
FISYDGNHKYYADSVKG

SEQ ID NO: 5943 - protein, 9 aa, Artificial Sequence
  Description of Artificial Sequence: Synthetic peptide
  XENP020342 vhCDR3
TGHLGPFDL

SEQ ID NO: 5944 - protein, 215 aa, Artificial Sequence; identical to SEQ ID NO: 2924
  Description of Artificial Sequence: Synthetic polypeptide
  XENP020342 [CTLA-4]_H3.4_L0.119_Fab Light Chain

SEQ ID NO: 5945 - protein, 108 aa, Artificial Sequence; identical to SEQ ID NO: 23
  Description of Artificial Sequence: Synthetic polypeptide
  VL of XENP020342

SEQ ID NO: 5946 - protein, 12 aa, Artificial Sequence
  Description of Artificial Sequence: Synthetic peptide
  XENP020342 vlCDR1
RASQSVGSSYLA

SEQ ID NO: 5947 - protein, 7 aa, Artificial Sequence
  Description of Artificial Sequence: Synthetic peptide
  XENP020342 vlCDR2
GAFSRAT

SEQ ID NO: 5948 - protein, 9 aa, Artificial Sequence
  Description of Artificial Sequence: Synthetic peptide
  XENP020342 vlCDR3
QQYGSSPWT

SEQ ID NO: 5949 - protein, 221 aa, Artificial Sequence; identical to SEQ ID NO: 5709
  Description of Artificial Sequence: Synthetic polypeptide
  XENP020343 [CTLA-4]_H3.4_L0.120_Fab Heavy Chain

SEQ ID NO: 5950 - protein, 118 aa, Artificial Sequence; identical to SEQ ID NO: 2461
  Description of Artificial Sequence: Synthetic polypeptide
  VH of XENP020343

SEQ ID NO: 5951 - protein, 5 aa, Artificial Sequence
  Description of Artificial Sequence: Synthetic peptide
  XENP020343 vhCDR1
SYTMH

SEQ ID NO: 5952 - protein, 17 aa, Artificial Sequence
  Description of Artificial Sequence: Synthetic peptide
  XENP020343 vhCDR2
FISYDGNHKYYADSVKG

SEQ ID NO: 5953 - protein, 9 aa, Artificial Sequence
  Description of Artificial Sequence: Synthetic peptide
  XENP020343 vhCDR3
TGHLGPFDL

SEQ ID NO: 5954 - protein, 215 aa, Artificial Sequence
  Description of Artificial Sequence: Synthetic polypeptide
  XENP020343 [CTLA-4]_H3.4_L0.120_Fab Light Chain
EIVLTQSPGTLSVSPGERATLSCRASQSVSSSYLAWYQQKPGQAPRLLIYGAFSRATGIPDRFSGSGSGTDFTLTISRLEPEDFAVYYCQQYGSSPWTFGQGTKVEIKRTVAAPSVFIFPPSDEQLKSGTASVVCLLNNFYPREAKVQWKVDNALQSGNSQESVTEQDSKDSTYSLSSTLTLSKADYEKHKVYACEVTHQGLSSPVTKSFNRGEC

SEQ ID NO: 5955 - protein, 108 aa, Artificial Sequence; identical to SEQ ID NO: 2687
  Description of Artificial Sequence: Synthetic polypeptide
  VL of XENP020343

SEQ ID NO: 5956 - protein, 12 aa, Artificial Sequence
  Description of Artificial Sequence: Synthetic peptide
  XENP020343 vlCDR1
RASQSVSSSYLA

SEQ ID NO: 5957 - protein, 7 aa, Artificial Sequence
  Description of Artificial Sequence: Synthetic peptide
  XENP020343 vlCDR2
GAFSRAT

SEQ ID NO: 5958 - protein, 9 aa, Artificial Sequence
  Description of Artificial Sequence: Synthetic peptide
  XENP020343 vlCDR3
QQYGSSPWT

SEQ ID NO: 5959 - protein, 221 aa, Artificial Sequence; identical to SEQ ID NO: 5709
  Description of Artificial Sequence: Synthetic polypeptide
  XENP020344 [CTLA-4]_H3.4_L0.121_Fab Heavy Chain

SEQ ID NO: 5960 - protein, 118 aa, Artificial Sequence; identical to SEQ ID NO: 2461
  Description of Artificial Sequence: Synthetic polypeptide
  VH of XENP020344

SEQ ID NO: 5961 - protein, 5 aa, Artificial Sequence
  Description of Artificial Sequence: Synthetic peptide
  XENP020344 vhCDR1
SYTMH

SEQ ID NO: 5962 - protein, 17 aa, Artificial Sequence
  Description of Artificial Sequence: Synthetic peptide
  XENP020344 vhCDR2
FISYDGNHKYYADSVKG

SEQ ID NO: 5963 - protein, 9 aa, Artificial Sequence
  Description of Artificial Sequence: Synthetic peptide
  XENP020344 vhCDR3
TGHLGPFDL

SEQ ID NO: 5964 - protein, 215 aa, Artificial Sequence
  Description of Artificial Sequence: Synthetic polypeptide
  XENP020344 [CTLA-4]_H3.4_L0.121_Fab Light Chain
EIVLTQSPGTLSVSPGERATLSCRASQSVGSSYLAWYQQKPGQAPRLLIYGASSRATGIPDRFSGSGSGTDFTLTISRLEPEDFAVYYCQQYGSSPWTFGQGTKVEIKRTVAAPSVFIFPPSDEQLKSGTASVVCLLNNFYPREAKVQWKVDNALQSGNSQESVTEQDSKDSTYSLSSTLTLSKADYEKHKVYACEVTHQGLSSPVTKSFNRGEC

SEQ ID NO: 5965 - protein, 108 aa, Artificial Sequence; identical to SEQ ID NO: 2696
  Description of Artificial Sequence: Synthetic polypeptide
  VL of XENP020344

SEQ ID NO: 5966 - protein, 12 aa, Artificial Sequence
  Description of Artificial Sequence: Synthetic peptide
  XENP020344 vlCDR1
RASQSVGSSYLA

SEQ ID NO: 5967 - protein, 7 aa, Artificial Sequence
  Description of Artificial Sequence: Synthetic peptide
  XENP020344 vlCDR2
GASSRAT

SEQ ID NO: 5968 - protein, 9 aa, Artificial Sequence
  Description of Artificial Sequence: Synthetic peptide
  XENP020344 vlCDR3
QQYGSSPWT

SEQ ID NO: 5969 - protein, 221 aa, Artificial Sequence; identical to SEQ ID NO: 5709
  Description of Artificial Sequence: Synthetic polypeptide
  XENP020345 [CTLA-4]_H3.4_L0.122_Fab Heavy Chain

SEQ ID NO: 5970 - protein, 118 aa, Artificial Sequence; identical to SEQ ID NO: 2461
  Description of Artificial Sequence: Synthetic polypeptide
  VH of XENP020345

SEQ ID NO: 5971 - protein, 5 aa, Artificial Sequence
  Description of Artificial Sequence: Synthetic peptide
  XENP020345 vhCDR1
SYTMH

SEQ ID NO: 5972 - protein, 17 aa, Artificial Sequence
  Description of Artificial Sequence: Synthetic peptide
  XENP020345 vhCDR2
FISYDGNHKYYADSVKG

SEQ ID NO: 5973 - protein, 9 aa, Artificial Sequence
  Description of Artificial Sequence: Synthetic peptide
  XENP020345 vhCDR3
TGHLGPFDL

SEQ ID NO: 5974 - protein, 215 aa, Artificial Sequence; identical to SEQ ID NO: 4364
  Description of Artificial Sequence: Synthetic polypeptide
  XENP020345 [CTLA-4]_H3.4_L0.122_Fab Light Chain

SEQ ID NO: 5975 - protein, 108 aa, Artificial Sequence; identical to SEQ ID NO: 1481
  Description of Artificial Sequence: Synthetic polypeptide
  VL of XENP020345

SEQ ID NO: 5976 - protein, 12 aa, Artificial Sequence
  Description of Artificial Sequence: Synthetic peptide
  XENP020345 vlCDR1
RASQSVGSSYLA

SEQ ID NO: 5977 - protein, 7 aa, Artificial Sequence
  Description of Artificial Sequence: Synthetic peptide
  XENP020345 vlCDR2
GAFSRAT

SEQ ID NO: 5978 - protein, 9 aa, Artificial Sequence
  Description of Artificial Sequence: Synthetic peptide
  XENP020345 vlCDR3
QQYGSSPWT

SEQ ID NO: 5979 - protein, 221 aa, Artificial Sequence; identical to SEQ ID NO: 5709
  Description of Artificial Sequence: Synthetic polypeptide
  XENP020346 [CTLA-4]_H3.4_L0.123_Fab Heavy Chain

SEQ ID NO: 5980 - protein, 118 aa, Artificial Sequence; identical to SEQ ID NO: 2461
  Description of Artificial Sequence: Synthetic polypeptide
  VH of XENP020346

SEQ ID NO: 5981 - protein, 5 aa, Artificial Sequence
  Description of Artificial Sequence: Synthetic peptide
  XENP020346 vhCDR1
SYTMH

SEQ ID NO: 5982 - protein, 17 aa, Artificial Sequence
  Description of Artificial Sequence: Synthetic peptide
  XENP020346 vhCDR2
FISYDGNHKYYADSVKG

SEQ ID NO: 5983 - protein, 9 aa, Artificial Sequence
  Description of Artificial Sequence: Synthetic peptide
  XENP020346 vhCDR3
TGHLGPFDL

SEQ ID NO: 5984 - protein, 215 aa, Artificial Sequence
  Description of Artificial Sequence: Synthetic polypeptide
  XENP020346 [CTLA-4]_H3.4_L0.123_Fab Light Chain
EIVLTQSPATLSVSPGERATLSCRASQSVSSSYLAWYQQKPGQAPRLLIYGAFSRATGIPDRFSGSGSGTDFTLTISRLEPEDFAVYYCQQYGSSPWTFGQGTKVEIKRTVAAPSVFIFPPSDEQLKSGTASVVCLLNNFYPREAKVQWKVDNALQSGNSQESVTEQDSKDSTYSLSSTLTLSKADYEKHKVYACEVTHQGLSSPVTKSFNRGEC

SEQ ID NO: 5985 - protein, 108 aa, Artificial Sequence; identical to SEQ ID NO: 2714
  Description of Artificial Sequence: Synthetic polypeptide
  VL of XENP020346

SEQ ID NO: 5986 - protein, 12 aa, Artificial Sequence
  Description of Artificial Sequence: Synthetic peptide
  XENP020346 vlCDR1
RASQSVSSSYLA

SEQ ID NO: 5987 - protein, 7 aa, Artificial Sequence
  Description of Artificial Sequence: Synthetic peptide
  XENP020346 vlCDR2
GAFSRAT

SEQ ID NO: 5988 - protein, 9 aa, Artificial Sequence
  Description of Artificial Sequence: Synthetic peptide
  XENP020346 vlCDR3
QQYGSSPWT

SEQ ID NO: 5989 - protein, 221 aa, Artificial Sequence; identical to SEQ ID NO: 5709
  Description of Artificial Sequence: Synthetic polypeptide
  XENP020347 [CTLA-4]_H3.4_L0.124_Fab Heavy Chain

SEQ ID NO: 5990 - protein, 118 aa, Artificial Sequence; identical to SEQ ID NO: 2461
  Description of Artificial Sequence: Synthetic polypeptide
  VH of XENP020347

SEQ ID NO: 5991 - protein, 5 aa, Artificial Sequence
  Description of Artificial Sequence: Synthetic peptide
  XENP020347 vhCDR1
SYTMH

SEQ ID NO: 5992 - protein, 17 aa, Artificial Sequence
  Description of Artificial Sequence: Synthetic peptide
  XENP020347 vhCDR2
FISYDGNHKYYADSVKG

SEQ ID NO: 5993 - protein, 9 aa, Artificial Sequence
  Description of Artificial Sequence: Synthetic peptide
  XENP020347 vhCDR3
TGHLGPFDL

SEQ ID NO: 5994 - protein, 215 aa, Artificial Sequence
  Description of Artificial Sequence: Synthetic polypeptide
  XENP020347 [CTLA-4]_H3.4_L0.124_Fab Light Chain
EIVLTQSPATLSVSPGERATLSCRASQSVGSSYLAWYQQKPGQAPRLLIYGASSRATGIPDRFSGSGSGTDFTLTISRLEPEDFAVYYCQQYGSSPWTFGQGTKVEIKRTVAAPSVFIFPPSDEQLKSGTASVVCLLNNFYPREAKVQWKVDNALQSGNSQESVTEQDSKDSTYSLSSTLTLSKADYEKHKVYACEVTHQGLSSPVTKSFNRGEC

SEQ ID NO: 5995 - protein, 108 aa, Artificial Sequence; identical to SEQ ID NO: 2723
  Description of Artificial Sequence: Synthetic polypeptide
  VL of XENP020347

SEQ ID NO: 5996 - protein, 12 aa, Artificial Sequence
  Description of Artificial Sequence: Synthetic peptide
  XENP020347 vlCDR1
RASQSVGSSYLA

SEQ ID NO: 5997 - protein, 7 aa, Artificial Sequence
  Description of Artificial Sequence: Synthetic peptide
  XENP020347 vlCDR2
GASSRAT

SEQ ID NO: 5998 - protein, 9 aa, Artificial Sequence
  Description of Artificial Sequence: Synthetic peptide
  XENP020347 vlCDR3
QQYGSSPWT

SEQ ID NO: 5999 - protein, 221 aa, Artificial Sequence; identical to SEQ ID NO: 5709
  Description of Artificial Sequence: Synthetic polypeptide
  XENP020348 [CTLA-4]_H3.4_L0.125_Fab Heavy Chain

SEQ ID NO: 6000 - protein, 118 aa, Artificial Sequence; identical to SEQ ID NO: 2461
  Description of Artificial Sequence: Synthetic polypeptide
  VH of XENP020348

SEQ ID NO: 6001 - protein, 5 aa, Artificial Sequence
  Description of Artificial Sequence: Synthetic peptide
  XENP020348 vhCDR1
SYTMH

SEQ ID NO: 6002 - protein, 17 aa, Artificial Sequence
  Description of Artificial Sequence: Synthetic peptide
  XENP020348 vhCDR2
FISYDGNHKYYADSVKG

SEQ ID NO: 6003 - protein, 9 aa, Artificial Sequence
  Description of Artificial Sequence: Synthetic peptide
  XENP020348 vhCDR3
TGHLGPFDL

SEQ ID NO: 6004 - protein, 215 aa, Artificial Sequence; identical to SEQ ID NO: 4504
  Description of Artificial Sequence: Synthetic polypeptide
  XENP020348 [CTLA-4]_H3.4_L0.125_Fab Light Chain

SEQ ID NO: 6005 - protein, 108 aa, Artificial Sequence; identical to SEQ ID NO: 1607
  Description of Artificial Sequence: Synthetic polypeptide
  VL of XENP020348

SEQ ID NO: 6006 - protein, 12 aa, Artificial Sequence
  Description of Artificial Sequence: Synthetic peptide
  XENP020348 vlCDR1
RASQSVSSSYLA

SEQ ID NO: 6007 - protein, 7 aa, Artificial Sequence
  Description of Artificial Sequence: Synthetic peptide
  XENP020348 vlCDR2
GAFSRAT

SEQ ID NO: 6008 - protein, 9 aa, Artificial Sequence
  Description of Artificial Sequence: Synthetic peptide
  XENP020348 vlCDR3
QQYGSSPWT

SEQ ID NO: 6009 - protein, 221 aa, Artificial Sequence; identical to SEQ ID NO: 5709
  Description of Artificial Sequence: Synthetic polypeptide
  XENP020349 [CTLA-4]_H3.4_L0.126_Fab Heavy Chain

SEQ ID NO: 6010 - protein, 118 aa, Artificial Sequence; identical to SEQ ID NO: 2461
  Description of Artificial Sequence: Synthetic polypeptide
  VH of XENP020349

SEQ ID NO: 6011 - protein, 5 aa, Artificial Sequence
  Description of Artificial Sequence: Synthetic peptide
  XENP020349 vhCDR1
SYTMH

SEQ ID NO: 6012 - protein, 17 aa, Artificial Sequence
  Description of Artificial Sequence: Synthetic peptide
  XENP020349 vhCDR2
FISYDGNHKYYADSVKG

SEQ ID NO: 6013 - protein, 9 aa, Artificial Sequence
  Description of Artificial Sequence: Synthetic peptide
  XENP020349 vhCDR3
TGHLGPFDL

SEQ ID NO: 6014 - protein, 215 aa, Artificial Sequence; identical to SEQ ID NO: 5014
  Description of Artificial Sequence: Synthetic polypeptide
  XENP020349 [CTLA-4]_H3.4_L0.126_Fab Light Chain

SEQ ID NO: 6015 - protein, 108 aa, Artificial Sequence; identical to SEQ ID NO: 2066
  Description of Artificial Sequence: Synthetic polypeptide
  VL of XENP020349

SEQ ID NO: 6016 - protein, 12 aa, Artificial Sequence
  Description of Artificial Sequence: Synthetic peptide
  XENP020349 vlCDR1
RASQSVGSSYLA

SEQ ID NO: 6017 - protein, 7 aa, Artificial Sequence
  Description of Artificial Sequence: Synthetic peptide
  XENP020349 vlCDR2
GASSRAT

SEQ ID NO: 6018 - protein, 9 aa, Artificial Sequence
  Description of Artificial Sequence: Synthetic peptide
  XENP020349 vlCDR3
QQYGSSPWT

SEQ ID NO: 6019 - protein, 221 aa, Artificial Sequence; identical to SEQ ID NO: 5709
  Description of Artificial Sequence: Synthetic polypeptide
  XENP020350 [CTLA-4]_H3.4_L0.127_Fab Heavy Chain

SEQ ID NO: 6020 - protein, 118 aa, Artificial Sequence; identical to SEQ ID NO: 2461
  Description of Artificial Sequence: Synthetic polypeptide
  VH of XENP020350

SEQ ID NO: 6021 - protein, 5 aa, Artificial Sequence
  Description of Artificial Sequence: Synthetic peptide
  XENP020350 vhCDR1
SYTMH

SEQ ID NO: 6022 - protein, 17 aa, Artificial Sequence
  Description of Artificial Sequence: Synthetic peptide
  XENP020350 vhCDR2
FISYDGNHKYYADSVKG

SEQ ID NO: 6023 - protein, 9 aa, Artificial Sequence
  Description of Artificial Sequence: Synthetic peptide
  XENP020350 vhCDR3
TGHLGPFDL

SEQ ID NO: 6024 - protein, 215 aa, Artificial Sequence
  Description of Artificial Sequence: Synthetic polypeptide
  XENP020350 [CTLA-4]_H3.4_L0.127_Fab Light Chain
EIVLTQSPGTLSVSPGERATLSCRASQSVSSSYLAWYQQKPGQAPRLLIYGASSRATGIPDRFSGSGSGTDFTLTISRLEPEDFAVYYCQQYGSSPWTFGQGTKVEIKRTVAAPSVFIFPPSDEQLKSGTASVVCLLNNFYPREAKVQWKVDNALQSGNSQESVTEQDSKDSTYSLSSTLTLSKADYEKHKVYACEVTHQGLSSPVTKSFNRGEC

SEQ ID NO: 6025 - protein, 108 aa, Artificial Sequence; identical to SEQ ID NO: 2750
  Description of Artificial Sequence: Synthetic polypeptide
  VL of XENP020350

SEQ ID NO: 6026 - protein, 12 aa, Artificial Sequence
  Description of Artificial Sequence: Synthetic peptide
  XENP020350 vlCDR1
RASQSVSSSYLA

SEQ ID NO: 6027 - protein, 7 aa, Artificial Sequence
  Description of Artificial Sequence: Synthetic peptide
  XENP020350 vlCDR2
GASSRAT

SEQ ID NO: 6028 - protein, 9 aa, Artificial Sequence
  Description of Artificial Sequence: Synthetic peptide
  XENP020350 vlCDR3
QQYGSSPWT

SEQ ID NO: 6029 - protein, 221 aa, Artificial Sequence; identical to SEQ ID NO: 5709
  Description of Artificial Sequence: Synthetic polypeptide
  XENP020351 [CTLA-4]_H3.4_L0.128_Fab Heavy Chain

SEQ ID NO: 6030 - protein, 118 aa, Artificial Sequence; identical to SEQ ID NO: 2461
  Description of Artificial Sequence: Synthetic polypeptide
  VH of XENP020351

SEQ ID NO: 6031 - protein, 5 aa, Artificial Sequence
  Description of Artificial Sequence: Synthetic peptide
  XENP020351 vhCDR1
SYTMH

SEQ ID NO: 6032 - protein, 17 aa, Artificial Sequence
  Description of Artificial Sequence: Synthetic peptide
  XENP020351 vhCDR2
FISYDGNHKYYADSVKG

SEQ ID NO: 6033 - protein, 9 aa, Artificial Sequence
  Description of Artificial Sequence: Synthetic peptide
  XENP020351 vhCDR3
TGHLGPFDL

SEQ ID NO: 6034 - protein, 215 aa, Artificial Sequence
  Description of Artificial Sequence: Synthetic polypeptide
  XENP020351 [CTLA-4]_H3.4_L0.128_Fab Light Chain
EIVLTQSPATLSLSPGERATLSCRASQSVSSSYLAWYQQKPGQAPRLLIYGAFSRATGIPDRFSGSGSGTDFTLTISRLEPEDFAVYYCQQYGSSPWTFGQGTKVEIKRTVAAPSVFIFPPSDEQLKSGTASVVCLLNNFYPREAKVQWKVDNALQSGNSQESVTEQDSKDSTYSLSSTLTLSKADYEKHKVYACEVTHQGLSSPVTKSFNRGEC

SEQ ID NO: 6035 - protein, 108 aa, Artificial Sequence; identical to SEQ ID NO: 2759
  Description of Artificial Sequence: Synthetic polypeptide
  VL of XENP020351

SEQ ID NO: 6036 - protein, 12 aa, Artificial Sequence
  Description of Artificial Sequence: Synthetic peptide
  XENP020351 vlCDR1
RASQSVSSSYLA

SEQ ID NO: 6037 - protein, 7 aa, Artificial Sequence
  Description of Artificial Sequence: Synthetic peptide
  XENP020351 vlCDR2
GAFSRAT

SEQ ID NO: 6038 - protein, 9 aa, Artificial Sequence
  Description of Artificial Sequence: Synthetic peptide
  XENP020351 vlCDR3
QQYGSSPWT

SEQ ID NO: 6039 - protein, 221 aa, Artificial Sequence; identical to SEQ ID NO: 5709
  Description of Artificial Sequence: Synthetic polypeptide
  XENP020352 [CTLA-4]_H3.4_L0.129_Fab Heavy Chain

SEQ ID NO: 6040 - protein, 118 aa, Artificial Sequence; identical to SEQ ID NO: 2461
  Description of Artificial Sequence: Synthetic polypeptide
  VH of XENP020352

SEQ ID NO: 6041 - protein, 5 aa, Artificial Sequence
  Description of Artificial Sequence: Synthetic peptide
  XENP020352 vhCDR1
SYTMH

SEQ ID NO: 6042 - protein, 17 aa, Artificial Sequence
  Description of Artificial Sequence: Synthetic peptide
  XENP020352 vhCDR2
FISYDGNHKYYADSVKG

SEQ ID NO: 6043 - protein, 9 aa, Artificial Sequence
  Description of Artificial Sequence: Synthetic peptide
  XENP020352 vhCDR3
TGHLGPFDL

SEQ ID NO: 6044 - protein, 215 aa, Artificial Sequence
  Description of Artificial Sequence: Synthetic polypeptide
  XENP020352 [CTLA-4]_H3.4_L0.129_Fab Light Chain
EIVLTQSPATLSLSPGERATLSCRASQSVGSSYLAWYQQKPGQAPRLLIYGASSRATGIPDRFSGSGSGTDFTLTISRLEPEDFAVYYCQQYGSSPWTFGQGTKVEIKRTVAAPSVFIFPPSDEQLKSGTASVVCLLNNFYPREAKVQWKVDNALQSGNSQESVTEQDSKDSTYSLSSTLTLSKADYEKHKVYACEVTHQGLSSPVTKSFNRGEC

SEQ ID NO: 6045 - protein, 108 aa, Artificial Sequence; identical to SEQ ID NO: 2768
  Description of Artificial Sequence: Synthetic polypeptide
  VL of XENP020352

SEQ ID NO: 6046 - protein, 12 aa, Artificial Sequence
  Description of Artificial Sequence: Synthetic peptide
  XENP020352 vlCDR1
RASQSVGSSYLA

SEQ ID NO: 6047 - protein, 7 aa, Artificial Sequence
  Description of Artificial Sequence: Synthetic peptide
  XENP020352 vlCDR2
GASSRAT

SEQ ID NO: 6048 - protein, 9 aa, Artificial Sequence
  Description of Artificial Sequence: Synthetic peptide
  XENP020352 vlCDR3
QQYGSSPWT

SEQ ID NO: 6049 - protein, 221 aa, Artificial Sequence; identical to SEQ ID NO: 5709
  Description of Artificial Sequence: Synthetic polypeptide
  XENP020353 [CTLA-4]_H3.4_L0.130_Fab Heavy Chain

SEQ ID NO: 6050 - protein, 118 aa, Artificial Sequence; identical to SEQ ID NO: 2461
  Description of Artificial Sequence: Synthetic polypeptide
  VH of XENP020353

SEQ ID NO: 6051 - protein, 5 aa, Artificial Sequence
  Description of Artificial Sequence: Synthetic peptide
  XENP020353 vhCDR1
SYTMH

SEQ ID NO: 6052 - protein, 17 aa, Artificial Sequence
  Description of Artificial Sequence: Synthetic peptide
  XENP020353 vhCDR2
FISYDGNHKYYADSVKG

SEQ ID NO: 6053 - protein, 9 aa, Artificial Sequence
  Description of Artificial Sequence: Synthetic peptide
  XENP020353 vhCDR3
TGHLGPFDL

SEQ ID NO: 6054 - protein, 215 aa, Artificial Sequence
  Description of Artificial Sequence: Synthetic polypeptide
  XENP020353 [CTLA-4]_H3.4_L0.130_Fab Light Chain
EIVLTQSPATLSVSPGERATLSCRASQSVSSSYLAWYQQKPGQAPRLLIYGASSRATGIPDRFSGSGSGTDFTLTISRLEPEDFAVYYCQQYGSSPWTFGQGTKVEIKRTVAAPSVFIFPPSDEQLKSGTASVVCLLNNFYPREAKVQWKVDNALQSGNSQESVTEQDSKDSTYSLSSTLTLSKADYEKHKVYACEVTHQGLSSPVTKSFNRGEC

SEQ ID NO: 6055 - protein, 108 aa, Artificial Sequence; identical to SEQ ID NO: 2777
  Description of Artificial Sequence: Synthetic polypeptide
  VL of XENP020353

SEQ ID NO: 6056 - protein, 12 aa, Artificial Sequence
  Description of Artificial Sequence: Synthetic peptide
  XENP020353 vlCDR1
RASQSVSSSYLA

SEQ ID NO: 6057 - protein, 7 aa, Artificial Sequence
  Description of Artificial Sequence: Synthetic peptide
  XENP020353 vlCDR2
GASSRAT

SEQ ID NO: 6058 - protein, 9 aa, Artificial Sequence
  Description of Artificial Sequence: Synthetic peptide
  XENP020353 vlCDR3
QQYGSSPWT

SEQ ID NO: 6059 - protein, 221 aa, Artificial Sequence; identical to SEQ ID NO: 5709
  Description of Artificial Sequence: Synthetic polypeptide
  XENP020354 [CTLA-4]_H3.4_L0.131_Fab Heavy Chain

SEQ ID NO: 6060 - protein, 118 aa, Artificial Sequence; identical to SEQ ID NO: 2461
  Description of Artificial Sequence: Synthetic polypeptide
  VH of XENP020354

SEQ ID NO: 6061 - protein, 5 aa, Artificial Sequence
  Description of Artificial Sequence: Synthetic peptide
  XENP020354 vhCDR1
SYTMH

SEQ ID NO: 6062 - protein, 17 aa, Artificial Sequence
  Description of Artificial Sequence: Synthetic peptide
  XENP020354 vhCDR2
FISYDGNHKYYADSVKG

SEQ ID NO: 6063 - protein, 9 aa, Artificial Sequence
  Description of Artificial Sequence: Synthetic peptide
  XENP020354 vhCDR3
TGHLGPFDL

SEQ ID NO: 6064 - protein, 215 aa, Artificial Sequence
  Description of Artificial Sequence: Synthetic polypeptide
  XENP020354 [CTLA-4]_H3.4_L0.131_Fab Light Chain
EIVLTQSPGTLSLSPGERATLSCRASQSVSSSYLAWYQQKPGQAPRLLIYGASSRATGIPDRFSGSGSGTDFTLTISRLEPEDFAVYYCQQYGSSPWTFGQGTKVEIKRTVAAPSVFIFPPSDEQLKSGTASVVCLLNNFYPREAKVQWKVDNALQSGNSQESVTEQDSKDSTYSLSSTLTLSKADYEKHKVYACEVTHQGLSSPVTKSFNRGEC

SEQ ID NO: 6065 - protein, 108 aa, Artificial Sequence; identical to SEQ ID NO: 2786
  Description of Artificial Sequence: Synthetic polypeptide
  VL of XENP020354

SEQ ID NO: 6066 - protein, 12 aa, Artificial Sequence
  Description of Artificial Sequence: Synthetic peptide
  XENP020354 vlCDR1
RASQSVSSSYLA

SEQ ID NO: 6067 - protein, 7 aa, Artificial Sequence
  Description of Artificial Sequence: Synthetic peptide
  XENP020354 vlCDR2
GASSRAT

SEQ ID NO: 6068 - protein, 9 aa, Artificial Sequence
  Description of Artificial Sequence: Synthetic peptide
  XENP020354 vlCDR3
QQYGSSPWT

SEQ ID NO: 6069 - protein, 221 aa, Artificial Sequence; identical to SEQ ID NO: 5709
  Description of Artificial Sequence: Synthetic polypeptide
  XENP020355 [CTLA-4]_H3.4_L0.132_Fab Heavy Chain

SEQ ID NO: 6070 - protein, 118 aa, Artificial Sequence; identical to SEQ ID NO: 2461
  Description of Artificial Sequence: Synthetic polypeptide
  VH of XENP020355

SEQ ID NO: 6071 - protein, 5 aa, Artificial Sequence
  Description of Artificial Sequence: Synthetic peptide
  XENP020355 vhCDR1
SYTMH

SEQ ID NO: 6072 - protein, 17 aa, Artificial Sequence
  Description of Artificial Sequence: Synthetic peptide
  XENP020355 vhCDR2
FISYDGNHKYYADSVKG

SEQ ID NO: 6073 - protein, 9 aa, Artificial Sequence
  Description of Artificial Sequence: Synthetic peptide
  XENP020355 vhCDR3
TGHLGPFDL

SEQ ID NO: 6074 - protein, 215 aa, Artificial Sequence
  Description of Artificial Sequence: Synthetic polypeptide
  XENP020355 [CTLA-4]_H3.4_L0.132_Fab Light Chain
EIVLTQSPATLSLSPGERATLSCRASQSVSSSYLAWYQQKPGQAPRLLIYGASSRATGIPDRFSGSGSGTDFTLTISRLEPEDFAVYYCQQYGSSPWTFGQGTKVEIKRTVAAPSVFIFPPSDEQLKSGTASVVCLLNNFYPREAKVQWKVDNALQSGNSQESVTEQDSKDSTYSLSSTLTLSKADYEKHKVYACEVTHQGLSSPVTKSFNRGEC

SEQ ID NO: 6075 - protein, 108 aa, Artificial Sequence; identical to SEQ ID NO: 2795
  Description of Artificial Sequence: Synthetic polypeptide
  VL of XENP020355

SEQ ID NO: 6076 - protein, 12 aa, Artificial Sequence
  Description of Artificial Sequence: Synthetic peptide
  XENP020355 vlCDR1
RASQSVSSSYLA

SEQ ID NO: 6077 - protein, 7 aa, Artificial Sequence
  Description of Artificial Sequence: Synthetic peptide
  XENP020355 vlCDR2
GASSRAT

SEQ ID NO: 6078 - protein, 9 aa, Artificial Sequence
  Description of Artificial Sequence: Synthetic peptide
  XENP020355 vlCDR3
QQYGSSPWT

SEQ ID NO: 6079 - protein, 221 aa, Artificial Sequence; identical to SEQ ID NO: 5719
  Description of Artificial Sequence: Synthetic polypeptide
  XENP020356 [CTLA-4]_H3.5_L2_Fab Heavy Chain

SEQ ID NO: 6080 - protein, 118 aa, Artificial Sequence; identical to SEQ ID NO: 2470
  Description of Artificial Sequence: Synthetic polypeptide
  VH of XENP020356

SEQ ID NO: 6081 - protein, 5 aa, Artificial Sequence
  Description of Artificial Sequence: Synthetic peptide
  XENP020356 vhCDR1
SYTMH

SEQ ID NO: 6082 - protein, 17 aa, Artificial Sequence
  Description of Artificial Sequence: Synthetic peptide
  XENP020356 vhCDR2
FISYDGNTKYYADSVKG

SEQ ID NO: 6083 - protein, 9 aa, Artificial Sequence
  Description of Artificial Sequence: Synthetic peptide
  XENP020356 vhCDR3
TGHLGPFDL

SEQ ID NO: 6084 - protein, 215 aa, Artificial Sequence; identical to SEQ ID NO: 5474
  Description of Artificial Sequence: Synthetic polypeptide
  XENP020356 [CTLA-4]_H3.5_L2_Fab Light Chain

SEQ ID NO: 6085 - protein, 108 aa, Artificial Sequence; identical to SEQ ID NO: 167
  Description of Artificial Sequence: Synthetic polypeptide
  VL of XENP020356

SEQ ID NO: 6086 - protein, 12 aa, Artificial Sequence
  Description of Artificial Sequence: Synthetic peptide
  XENP020356 vlCDR1
RASQSVGSSYLA

SEQ ID NO: 6087 - protein, 7 aa, Artificial Sequence
  Description of Artificial Sequence: Synthetic peptide
  XENP020356 vlCDR2
GAFSRAT

SEQ ID NO: 6088 - protein, 9 aa, Artificial Sequence
  Description of Artificial Sequence: Synthetic peptide
  XENP020356 vlCDR3
QQYGSSPWT

SEQ ID NO: 6089 - protein, 221 aa, Artificial Sequence; identical to SEQ ID NO: 5719
  Description of Artificial Sequence: Synthetic polypeptide
  XENP020357 [CTLA-4]_H3.5_L2.1_Fab Heavy Chain

SEQ ID NO: 6090 - protein, 118 aa, Artificial Sequence; identical to SEQ ID NO: 2470
  Description of Artificial Sequence: Synthetic polypeptide
  VH of XENP020357

SEQ ID NO: 6091 - protein, 5 aa, Artificial Sequence
  Description of Artificial Sequence: Synthetic peptide
  XENP020357 vhCDR1
SYTMH

SEQ ID NO: 6092 - protein, 17 aa, Artificial Sequence
  Description of Artificial Sequence: Synthetic peptide
  XENP020357 vhCDR2
FISYDGNTKYYADSVKG

SEQ ID NO: 6093 - protein, 9 aa, Artificial Sequence
  Description of Artificial Sequence: Synthetic peptide
  XENP020357 vhCDR3
TGHLGPFDL

SEQ ID NO: 6094 - protein, 215 aa, Artificial Sequence
  Description of Artificial Sequence: Synthetic polypeptide
  XENP020357 [CTLA-4]_H3.5_L2.1_Fab Light Chain
EIVMTQSPATLSVSPGERATLSCRASQSVSSSYLAWYQQKPGQAPRLLIYGAFSRATGIPARFSGSGSGTEFTLTISSLQSEDFAVYYCQQYGSSPWTFGQGTKVEIKRTVAAPSVFIFPPSDEQLKSGTASVVCLLNNFYPREAKVQWKVDNALQSGNSQESVTEQDSKDSTYSLSSTLTLSKADYEKHKVYACEVTHQGLSSPVTKSFNRGEC

SEQ ID NO: 6095 - protein, 108 aa, Artificial Sequence; identical to SEQ ID NO: 2813
  Description of Artificial Sequence: Synthetic polypeptide
  VL of XENP020357

SEQ ID NO: 6096 - protein, 12 aa, Artificial Sequence
  Description of Artificial Sequence: Synthetic peptide
  XENP020357 vlCDR1
RASQSVSSSYLA

SEQ ID NO: 6097 - protein, 7 aa, Artificial Sequence
  Description of Artificial Sequence: Synthetic peptide
  XENP020357 vlCDR2
GAFSRAT

SEQ ID NO: 6098 - protein, 9 aa, Artificial Sequence
  Description of Artificial Sequence: Synthetic peptide
  XENP020357 vlCDR3
QQYGSSPWT

SEQ ID NO: 6099 - protein, 221 aa, Artificial Sequence; identical to SEQ ID NO: 5719
  Description of Artificial Sequence: Synthetic polypeptide
  XENP020358 [CTLA-4]_H3.5_L2.2_Fab Heavy Chain

SEQ ID NO: 6100 - protein, 118 aa, Artificial Sequence; identical to SEQ ID NO: 2470
  Description of Artificial Sequence: Synthetic polypeptide
  VH of XENP020358

SEQ ID NO: 6101 - protein, 5 aa, Artificial Sequence
  Description of Artificial Sequence: Synthetic peptide
  XENP020358 vhCDR1
SYTMH

SEQ ID NO: 6102 - protein, 17 aa, Artificial Sequence
  Description of Artificial Sequence: Synthetic peptide
  XENP020358 vhCDR2
FISYDGNTKYYADSVKG

SEQ ID NO: 6103 - protein, 9 aa, Artificial Sequence
  Description of Artificial Sequence: Synthetic peptide
  XENP020358 vhCDR3
TGHLGPFDL

SEQ ID NO: 6104 - protein, 215 aa, Artificial Sequence
  Description of Artificial Sequence: Synthetic polypeptide
  XENP020358 [CTLA-4]_H3.5_L2.2_Fab Light Chain
EIVMTQSPATLSVSPGERATLSCRASQSVGSSYLAWYQQKPGQAPRLLIYGASSRATGIPARFSGSGSGTEFTLTISSLQSEDFAVYYCQQYGSSPWTFGQGTKVEIKRTVAAPSVFIFPPSDEQLKSGTASVVCLLNNFYPREAKVQWKVDNALQSGNSQESVTEQDSKDSTYSLSSTLTLSKADYEKHKVYACEVTHQGLSSPVTKSFNRGEC

SEQ ID NO: 6105 - protein, 108 aa, Artificial Sequence; identical to SEQ ID NO: 2822
  Description of Artificial Sequence: Synthetic polypeptide
  VL of XENP020358

SEQ ID NO: 6106 - protein, 12 aa, Artificial Sequence
  Description of Artificial Sequence: Synthetic peptide
  XENP020358 vlCDR1
RASQSVGSSYLA

SEQ ID NO: 6107 - protein, 7 aa, Artificial Sequence
  Description of Artificial Sequence: Synthetic peptide
  XENP020358 vlCDR2
GASSRAT

SEQ ID NO: 6108 - protein, 9 aa, Artificial Sequence
  Description of Artificial Sequence: Synthetic peptide
  XENP020358 vlCDR3
QQYGSSPWT

SEQ ID NO: 6109 - protein, 221 aa, Artificial Sequence; identical to SEQ ID NO: 5719
  Description of Artificial Sequence: Synthetic polypeptide
  XENP020359 [CTLA-4]_H3.5_L2.3_Fab Heavy Chain

SEQ ID NO: 6110 - protein, 118 aa, Artificial Sequence; identical to SEQ ID NO: 2470
  Description of Artificial Sequence: Synthetic polypeptide
  VH of XENP020359

SEQ ID NO: 6111 - protein, 5 aa, Artificial Sequence
  Description of Artificial Sequence: Synthetic peptide
  XENP020359 vhCDR1
SYTMH

SEQ ID NO: 6112 - protein, 17 aa, Artificial Sequence
  Description of Artificial Sequence: Synthetic peptide
  XENP020359 vhCDR2
FISYDGNTKYYADSVKG

SEQ ID NO: 6113 - protein, 9 aa, Artificial Sequence
  Description of Artificial Sequence: Synthetic peptide
  XENP020359 vhCDR3
TGHLGPFDL

SEQ ID NO: 6114 - protein, 215 aa, Artificial Sequence
  Description of Artificial Sequence: Synthetic polypeptide
  XENP020359 [CTLA-4]_H3.5_L2.3_Fab Light Chain
EIVMTQSPATLSVSPGERATLSCRASQSVSSSYLAWYQQKPGQAPRLLIYGASSRATGIPARFSGSGSGTEFTLTISSLQSEDFAVYYCQQYGSSPWTFGQGTKVEIKRTVAAPSVFIFPPSDEQLKSGTASVVCLLNNFYPREAKVQWKVDNALQSGNSQESVTEQDSKDSTYSLSSTLTLSKADYEKHKVYACEVTHQGLSSPVTKSFNRGEC

SEQ ID NO: 6115 - protein, 108 aa, Artificial Sequence; identical to SEQ ID NO: 2831
  Description of Artificial Sequence: Synthetic polypeptide
  VL of XENP020359

SEQ ID NO: 6116 - protein, 12 aa, Artificial Sequence
  Description of Artificial Sequence: Synthetic peptide
  XENP020359 vlCDR1
RASQSVSSSYLA

SEQ ID NO: 6117 - protein, 7 aa, Artificial Sequence
  Description of Artificial Sequence: Synthetic peptide
  XENP020359 vlCDR2
GASSRAT

SEQ ID NO: 6118 - protein, 9 aa, Artificial Sequence
  Description of Artificial Sequence: Synthetic peptide
  XENP020359 vlCDR3
QQYGSSPWT

SEQ ID NO: 6119 - protein, 221 aa, Artificial Sequence; identical to SEQ ID NO: 5869
  Description of Artificial Sequence: Synthetic polypeptide
  XENP020422 [CTLA-4]_H3.21_L0.124_Fab Heavy Chain

SEQ ID NO: 6120 - protein, 118 aa, Artificial Sequence; identical to SEQ ID NO: 2614
  Description of Artificial Sequence: Synthetic polypeptide
  VH of XENP020422

SEQ ID NO: 6121 - protein, 5 aa, Artificial Sequence
  Description of Artificial Sequence: Synthetic peptide
  XENP020422 vhCDR1
SYTMH

SEQ ID NO: 6122 - protein, 17 aa, Artificial Sequence
  Description of Artificial Sequence: Synthetic peptide
  XENP020422 vhCDR2
FISYDGNTKYYADSVKG

SEQ ID NO: 6123 - protein, 9 aa, Artificial Sequence
  Description of Artificial Sequence: Synthetic peptide
  XENP020422 vhCDR3
GGLLGPFDL

SEQ ID NO: 6124 - protein, 215 aa, Artificial Sequence; identical to SEQ ID NO: 5994
  Description of Artificial Sequence: Synthetic polypeptide
  XENP020422 [CTLA-4]_H3.21_L0.124_Fab Light Chain

SEQ ID NO: 6125 - protein, 108 aa, Artificial Sequence; identical to SEQ ID NO: 2723
  Description of Artificial Sequence: Synthetic polypeptide
  VL of XENP020422

SEQ ID NO: 6126 - protein, 12 aa, Artificial Sequence
  Description of Artificial Sequence: Synthetic peptide
  XENP020422 vlCDR1
RASQSVGSSYLA

SEQ ID NO: 6127 - protein, 7 aa, Artificial Sequence
  Description of Artificial Sequence: Synthetic peptide
  XENP020422 vlCDR2
GASSRAT

SEQ ID NO: 6128 - protein, 9 aa, Artificial Sequence
  Description of Artificial Sequence: Synthetic peptide
  XENP020422 vlCDR3
QQYGSSPWT

SEQ ID NO: 6129 - protein, 221 aa, Artificial Sequence; identical to SEQ ID NO: 5869
  Description of Artificial Sequence: Synthetic polypeptide
  XENP020423 [CTLA-4]_H3.21_L0.129_Fab Heavy Chain

SEQ ID NO: 6130 - protein, 118 aa, Artificial Sequence; identical to SEQ ID NO: 2614
  Description of Artificial Sequence: Synthetic polypeptide
  VH of XENP020423

SEQ ID NO: 6131 - protein, 5 aa, Artificial Sequence
  Description of Artificial Sequence: Synthetic peptide
  XENP020423 vhCDR1
SYTMH

SEQ ID NO: 6132 - protein, 17 aa, Artificial Sequence
  Description of Artificial Sequence: Synthetic peptide
  XENP020423 vhCDR2
FISYDGNTKYYADSVKG

SEQ ID NO: 6133 - protein, 9 aa, Artificial Sequence
  Description of Artificial Sequence: Synthetic peptide
  XENP020423 vhCDR3
GGLLGPFDL

SEQ ID NO: 6134 - protein, 215 aa, Artificial Sequence; identical to SEQ ID NO: 6044
  Description of Artificial Sequence: Synthetic polypeptide
  XENP020423 [CTLA-4]_H3.21_L0.129_Fab Light Chain

SEQ ID NO: 6135 - protein, 108 aa, Artificial Sequence; identical to SEQ ID NO: 2768
  Description of Artificial Sequence: Synthetic polypeptide
  VL of XENP020423

SEQ ID NO: 6136 - protein, 12 aa, Artificial Sequence
  Description of Artificial Sequence: Synthetic peptide
  XENP020423 vlCDR1
RASQSVGSSYLA

SEQ ID NO: 6137 - protein, 7 aa, Artificial Sequence
  Description of Artificial Sequence: Synthetic peptide
  XENP020423 vlCDR2
GASSRAT

SEQ ID NO: 6138 - protein, 9 aa, Artificial Sequence
  Description of Artificial Sequence: Synthetic peptide
  XENP020423 vlCDR3
QQYGSSPWT

SEQ ID NO: 6139 - protein, 221 aa, Artificial Sequence; identical to SEQ ID NO: 5869
  Description of Artificial Sequence: Synthetic polypeptide
  XENP020424 [CTLA-4]_H3.21_L0.132_Fab Heavy Chain

SEQ ID NO: 6140 - protein, 118 aa, Artificial Sequence; identical to SEQ ID NO: 2614
  Description of Artificial Sequence: Synthetic polypeptide
  VH of XENP020424

SEQ ID NO: 6141 - protein, 5 aa, Artificial Sequence
  Description of Artificial Sequence: Synthetic peptide
  XENP020424 vhCDR1
SYTMH

SEQ ID NO: 6142 - protein, 17 aa, Artificial Sequence
  Description of Artificial Sequence: Synthetic peptide
  XENP020424 vhCDR2
FISYDGNTKYYADSVKG

SEQ ID NO: 6143 - protein, 9 aa, Artificial Sequence
  Description of Artificial Sequence: Synthetic peptide
  XENP020424 vhCDR3
GGLLGPFDL

SEQ ID NO: 6144 - protein, 215 aa, Artificial Sequence; identical to SEQ ID NO: 6074
  Description of Artificial Sequence: Synthetic polypeptide
  XENP020424 [CTLA-4]_H3.21_L0.132_Fab Light Chain

SEQ ID NO: 6145 - protein, 108 aa, Artificial Sequence; identical to SEQ ID NO: 2795
  Description of Artificial Sequence: Synthetic polypeptide
  VL of XENP020424

SEQ ID NO: 6146 - protein, 12 aa, Artificial Sequence
  Description of Artificial Sequence: Synthetic peptide
  XENP020424 vlCDR1
RASQSVSSSYLA

SEQ ID NO: 6147 - protein, 7 aa, Artificial Sequence
  Description of Artificial Sequence: Synthetic peptide
  XENP020424 vlCDR2
GASSRAT

SEQ ID NO: 6148 - protein, 9 aa, Artificial Sequence
  Description of Artificial Sequence: Synthetic peptide
  XENP020424 vlCDR3
QQYGSSPWT

SEQ ID NO: 6149 - protein, 221 aa, Artificial Sequence; identical to SEQ ID NO: 5889
  Description of Artificial Sequence: Synthetic polypeptide
  XENP020425 [CTLA-4]_H3.23_L0.124_Fab Heavy Chain

SEQ ID NO: 6150 - protein, 118 aa, Artificial Sequence; identical to SEQ ID NO: 2632
  Description of Artificial Sequence: Synthetic polypeptide
  VH of XENP020425

SEQ ID NO: 6151 - protein, 5 aa, Artificial Sequence
  Description of Artificial Sequence: Synthetic peptide
  XENP020425 vhCDR1
SYTMH

SEQ ID NO: 6152 - protein, 17 aa, Artificial Sequence
  Description of Artificial Sequence: Synthetic peptide
  XENP020425 vhCDR2
FISYDGNYKYYADSVKG

SEQ ID NO: 6153 - protein, 9 aa, Artificial Sequence
  Description of Artificial Sequence: Synthetic peptide
  XENP020425 vhCDR3
GGHLGPFDL

SEQ ID NO: 6154 - protein, 215 aa, Artificial Sequence; identical to SEQ ID NO: 5994
  Description of Artificial Sequence: Synthetic polypeptide
  XENP020425 [CTLA-4]_H3.23_L0.124_Fab Light Chain

SEQ ID NO: 6155 - protein, 108 aa, Artificial Sequence; identical to SEQ ID NO: 2723
  Description of Artificial Sequence: Synthetic polypeptide
  VL of XENP020425

SEQ ID NO: 6156 - protein, 12 aa, Artificial Sequence
  Description of Artificial Sequence: Synthetic peptide
  XENP020425 vlCDR1
RASQSVGSSYLA

SEQ ID NO: 6157 - protein, 7 aa, Artificial Sequence
  Description of Artificial Sequence: Synthetic peptide
  XENP020425 vlCDR2
GASSRAT

SEQ ID NO: 6158 - protein, 9 aa, Artificial Sequence
  Description of Artificial Sequence: Synthetic peptide
  XENP020425 vlCDR3
QQYGSSPWT

SEQ ID NO: 6159 - protein, 221 aa, Artificial Sequence; identical to SEQ ID NO: 5889
  Description of Artificial Sequence: Synthetic polypeptide
  XENP020426 [CTLA-4]_H3.23_L0.129_Fab Heavy Chain

SEQ ID NO: 6160 - protein, 118 aa, Artificial Sequence; identical to SEQ ID NO: 2632
  Description of Artificial Sequence: Synthetic polypeptide
  VH of XENP020426

SEQ ID NO: 6161 - protein, 5 aa, Artificial Sequence
  Description of Artificial Sequence: Synthetic peptide
  XENP020426 vhCDR1
SYTMH

SEQ ID NO: 6162 - protein, 17 aa, Artificial Sequence
  Description of Artificial Sequence: Synthetic peptide
  XENP020426 vhCDR2
FISYDGNYKYYADSVKG

SEQ ID NO: 6163 - protein, 9 aa, Artificial Sequence
  Description of Artificial Sequence: Synthetic peptide
  XENP020426 vhCDR3
GGHLGPFDL

SEQ ID NO: 6164 - protein, 215 aa, Artificial Sequence; identical to SEQ ID NO: 6044
  Description of Artificial Sequence: Synthetic polypeptide
  XENP020426 [CTLA-4]_H3.23_L0.129_Fab Light Chain

SEQ ID NO: 6165 - protein, 108 aa, Artificial Sequence; identical to SEQ ID NO: 2768
  Description of Artificial Sequence: Synthetic polypeptide
  VL of XENP020426

SEQ ID NO: 6166 - protein, 12 aa, Artificial Sequence
  Description of Artificial Sequence: Synthetic peptide
  XENP020426 vlCDR1
RASQSVGSSYLA

SEQ ID NO: 6167 - protein, 7 aa, Artificial Sequence
  Description of Artificial Sequence: Synthetic peptide
  XENP020426 vlCDR2
GASSRAT

SEQ ID NO: 6168 - protein, 9 aa, Artificial Sequence
  Description of Artificial Sequence: Synthetic peptide
  XENP020426 vlCDR3
QQYGSSPWT

SEQ ID NO: 6169 - protein, 221 aa, Artificial Sequence; identical to SEQ ID NO: 5889
  Description of Artificial Sequence: Synthetic polypeptide
  XENP020427 [CTLA-4]_H3.23_L0.132_Fab Heavy Chain

SEQ ID NO: 6170 - protein, 118 aa, Artificial Sequence; identical to SEQ ID NO: 2632
  Description of Artificial Sequence: Synthetic polypeptide
  VH of XENP020427

SEQ ID NO: 6171 - protein, 5 aa, Artificial Sequence
  Description of Artificial Sequence: Synthetic peptide
  XENP020427 vhCDR1
SYTMH

SEQ ID NO: 6172 - protein, 17 aa, Artificial Sequence
  Description of Artificial Sequence: Synthetic peptide
  XENP020427 vhCDR2
FISYDGNYKYYADSVKG

SEQ ID NO: 6173 - protein, 9 aa, Artificial Sequence
  Description of Artificial Sequence: Synthetic peptide
  XENP020427 vhCDR3
GGHLGPFDL

SEQ ID NO: 6174 - protein, 215 aa, Artificial Sequence; identical to SEQ ID NO: 6074
  Description of Artificial Sequence: Synthetic polypeptide
  XENP020427 [CTLA-4]_H3.23_L0.132_Fab Light Chain

SEQ ID NO: 6175 - protein, 108 aa, Artificial Sequence; identical to SEQ ID NO: 2795
  Description of Artificial Sequence: Synthetic polypeptide
  VL of XENP020427

SEQ ID NO: 6176 - protein, 12 aa, Artificial Sequence
  Description of Artificial Sequence: Synthetic peptide
  XENP020427 vlCDR1
RASQSVSSSYLA

SEQ ID NO: 6177 - protein, 7 aa, Artificial Sequence
  Description of Artificial Sequence: Synthetic peptide
  XENP020427 vlCDR2
GASSRAT

SEQ ID NO: 6178 - protein, 9 aa, Artificial Sequence
  Description of Artificial Sequence: Synthetic peptide
  XENP020427 vlCDR3
QQYGSSPWT

SEQ ID NO: 6179 - protein, 221 aa, Artificial Sequence; identical to SEQ ID NO: 5909
  Description of Artificial Sequence: Synthetic polypeptide
  XENP020428 [CTLA-4]_H3.25_L0.124_Fab Heavy Chain

SEQ ID NO: 6180 - protein, 118 aa, Artificial Sequence; identical to SEQ ID NO: 2650
  Description of Artificial Sequence: Synthetic polypeptide
  VH of XENP020428

SEQ ID NO: 6181 - protein, 5 aa, Artificial Sequence
  Description of Artificial Sequence: Synthetic peptide
  XENP020428 vhCDR1
SYTMH

SEQ ID NO: 6182 - protein, 17 aa, Artificial Sequence
  Description of Artificial Sequence: Synthetic peptide
  XENP020428 vhCDR2
FISYDGNYKYYADSVKG

SEQ ID NO: 6183 - protein, 9 aa, Artificial Sequence
  Description of Artificial Sequence: Synthetic peptide
  XENP020428 vhCDR3
GGLLGPFDL

SEQ ID NO: 6184 - protein, 215 aa, Artificial Sequence; identical to SEQ ID NO: 5994
  Description of Artificial Sequence: Synthetic polypeptide
  XENP020428 [CTLA-4]_H3.25_L0.124_Fab Light Chain

SEQ ID NO: 6185 - protein, 108 aa, Artificial Sequence; identical to SEQ ID NO: 2723
  Description of Artificial Sequence: Synthetic polypeptide
  VL of XENP020428

SEQ ID NO: 6186 - protein, 12 aa, Artificial Sequence
  Description of Artificial Sequence: Synthetic peptide
  XENP020428 vlCDR1
RASQSVGSSYLA

SEQ ID NO: 6187 - protein, 7 aa, Artificial Sequence
  Description of Artificial Sequence: Synthetic peptide
  XENP020428 vlCDR2
GASSRAT

SEQ ID NO: 6188 - protein, 9 aa, Artificial Sequence
  Description of Artificial Sequence: Synthetic peptide
  XENP020428 vlCDR3
QQYGSSPWT

SEQ ID NO: 6189 - protein, 221 aa, Artificial Sequence; identical to SEQ ID NO: 5909
  Description of Artificial Sequence: Synthetic polypeptide
  XENP020429 [CTLA-4]_H3.25_L0.129_Fab Heavy Chain

SEQ ID NO: 6190 - protein, 118 aa, Artificial Sequence; identical to SEQ ID NO: 2650
  Description of Artificial Sequence: Synthetic polypeptide
  VH of XENP020429

SEQ ID NO: 6191 - protein, 5 aa, Artificial Sequence
  Description of Artificial Sequence: Synthetic peptide
  XENP020429 vhCDR1
SYTMH

SEQ ID NO: 6192 - protein, 17 aa, Artificial Sequence
  Description of Artificial Sequence: Synthetic peptide
  XENP020429 vhCDR2
FISYDGNYKYYADSVKG

SEQ ID NO: 6193 - protein, 9 aa, Artificial Sequence
  Description of Artificial Sequence: Synthetic peptide
  XENP020429 vhCDR3
GGLLGPFDL

SEQ ID NO: 6194 - protein, 215 aa, Artificial Sequence; identical to SEQ ID NO: 6044
  Description of Artificial Sequence: Synthetic polypeptide
  XENP020429 [CTLA-4]_H3.25_L0.129_Fab Light Chain

SEQ ID NO: 6195 - protein, 108 aa, Artificial Sequence; identical to SEQ ID NO: 2768
  Description of Artificial Sequence: Synthetic polypeptide
  VL of XENP020429

SEQ ID NO: 6196 - protein, 12 aa, Artificial Sequence
  Description of Artificial Sequence: Synthetic peptide
  XENP020429 vlCDR1
RASQSVGSSYLA

SEQ ID NO: 6197 - protein, 7 aa, Artificial Sequence
  Description of Artificial Sequence: Synthetic peptide
  XENP020429 vlCDR2
GASSRAT

SEQ ID NO: 6198 - protein, 9 aa, Artificial Sequence
  Description of Artificial Sequence: Synthetic peptide
  XENP020429 vlCDR3
QQYGSSPWT

SEQ ID NO: 6199 - protein, 221 aa, Artificial Sequence; identical to SEQ ID NO: 5909
  Description of Artificial Sequence: Synthetic polypeptide
  XENP020430 [CTLA-4]_H3.25_L0.132_Fab Heavy Chain

SEQ ID NO: 6200 - protein, 118 aa, Artificial Sequence; identical to SEQ ID NO: 2650
  Description of Artificial Sequence: Synthetic polypeptide
  VH of XENP020430

SEQ ID NO: 6201 - protein, 5 aa, Artificial Sequence
  Description of Artificial Sequence: Synthetic peptide
  XENP020430 vhCDR1
SYTMH

SEQ ID NO: 6202 - protein, 17 aa, Artificial Sequence
  Description of Artificial Sequence: Synthetic peptide
  XENP020430 vhCDR2
FISYDGNYKYYADSVKG

SEQ ID NO: 6203 - protein, 9 aa, Artificial Sequence
  Description of Artificial Sequence: Synthetic peptide
  XENP020430 vhCDR3
GGLLGPFDL

SEQ ID NO: 6204 - protein, 215 aa, Artificial Sequence; identical to SEQ ID NO: 6074
  Description of Artificial Sequence: Synthetic polypeptide
  XENP020430 [CTLA-4]_H3.25_L0.132_Fab Light Chain

SEQ ID NO: 6205 - protein, 108 aa, Artificial Sequence; identical to SEQ ID NO: 2795
  Description of Artificial Sequence: Synthetic polypeptide
  VL of XENP020430

SEQ ID NO: 6206 - protein, 12 aa, Artificial Sequence
  Description of Artificial Sequence: Synthetic peptide
  XENP020430 vlCDR1
RASQSVSSSYLA

SEQ ID NO: 6207 - protein, 7 aa, Artificial Sequence
  Description of Artificial Sequence: Synthetic peptide
  XENP020430 vlCDR2
GASSRAT

SEQ ID NO: 6208 - protein, 9 aa, Artificial Sequence
  Description of Artificial Sequence: Synthetic peptide
  XENP020430 vlCDR3
QQYGSSPWT

SEQ ID NO: 6209 - protein, 240 aa, Artificial Sequence
  Description of Artificial Sequence: Synthetic polypeptide
  XENP016402 nivolumab_H0.1_L0_scFv(GKPGS)4
QVQLVESGGGVVQPGRSLRLSCKASGITFSNSGMHWVRQAPGKGLEWVAVIWYDGSKRYYADSVKGRFTISRDNSKNTLFLQMNSLRAEDTAVYYCATNDDYWGQGTLVTVSSGKPGSGKPGSGKPGSGKPGSEIVLTQSPATLSLSPGERATLSCRASQSVSSYLAWYQQKPGQAPRLLIYDASNRATGIPARFSGSGSGTDFTLTISSLEPEDFAVYYCQQSSNWPRTFGQGTKVEIK

SEQ ID NO: 6210 - protein, 113 aa, Artificial Sequence
  Description of Artificial Sequence: Synthetic polypeptide
  VH of XENP016402
QVQLVESGGGVVQPGRSLRLSCKASGITFSNSGMHWVRQAPGKGLEWVAVIWYDGSKRYYADSVKGRFTISRDNSKNTLFLQMNSLRAEDTAVYYCATNDDYWGQGTLVTVSS

SEQ ID NO: 6211 - protein, 107 aa, Artificial Sequence [sequence omitted]

SEQ ID NO: 6212 - protein, 5 aa, Artificial Sequence
  Description of Artificial Sequence: Synthetic peptide
  XENP016402 vhCDR1
NSGMH

SEQ ID NO: 6213 - protein, 17 aa, Artificial Sequence
  Description of Artificial Sequence: Synthetic peptide
  XENP016402 vhCDR2
VIWYDGSKRYYADSVKG

SEQ ID NO: 6214 - protein, 4 aa, Artificial Sequence
  Description of Artificial Sequence: Synthetic peptide
  XENP016402 vhCDR3
NDDY

SEQ ID NO: 6215 - protein, 11 aa, Artificial Sequence
  Description of Artificial Sequence: Synthetic peptide
  XENP016402 vlCDR1
RASQSVSSYLA

SEQ ID NO: 6216 - protein, 7 aa, Artificial Sequence
  Description of Artificial Sequence: Synthetic peptide
  XENP016402 vlCDR2
DASNRAT

SEQ ID NO: 6217 - protein, 9 aa, Artificial Sequence
  Description of Artificial Sequence: Synthetic peptide
  XENP016402 vlCDR3
QQSSNWPRT

SEQ ID NO: 6218 - protein, 246 aa, Artificial Sequence
  Description of Artificial Sequence: Synthetic polypeptide
  XENP017919 1A2_H1L1_scFv(GKPGS)4
QIQLVQSGAEVKKPGASVKVSCKASGYTFTDYSMHWVRQAPGQGLEWMGWINTETGEPTYADKFQGRVTMTLDTSTSTAYMELSSLRSEDTAVYFCASSPLDYWGQGTLVTVSSGKPGSGKPGSGKPGSGKPGSDLLLTQSPLSLPVTPGEPASISCRSSQSIVHSNGNTYLEWFLQKPGQSPQLLIYKVFNRFSGVPDRFSGSGSGTDFTLKISRVEAEDVGVYYCFQGSHVPFTFGSGTKLEIK

SEQ ID NO: 6219 - protein, 114 aa, Artificial Sequence
  Description of Artificial Sequence: Synthetic polypeptide
  VH of XENP017919
QIQLVQSGAEVKKPGASVKVSCKASGYTFTDYSMHWVRQAPGQGLEWMGWINTETGEPTYADKFQGRVTMTLDTSTSTAYMELSSLRSEDTAVYFCASSPLDYWGQGTLVTVSS

SEQ ID NO: 6220 - protein, 112 aa, Artificial Sequence
  Description of Artificial Sequence: Synthetic polypeptide
  VL of XENP017919
DLLLTQSPLSLPVTPGEPASISCRSSQSIVHSNGNTYLEWFLQKPGQSPQLLIYKVFNRFSGVPDRFSGSGSGTDFTLKISRVEAEDVGVYYCFQGSHVPFTFGSGTKLEIK

SEQ ID NO: 6221 - protein, 5 aa, Artificial Sequence
  Description of Artificial Sequence: Synthetic peptide
  XENP017919 vhCDR1
DYSMH

SEQ ID NO: 6222 - protein, 17 aa, Artificial Sequence
  Description of Artificial Sequence: Synthetic peptide
  XENP017919 vhCDR2
WINTETGEPTYADKFQG

SEQ ID NO: 6223 - protein, 5 aa, Artificial Sequence
  Description of Artificial Sequence: Synthetic peptide
  XENP017919 vhCDR3
SPLDY

SEQ ID NO: 6224 - protein, 16 aa, Artificial Sequence
  Description of Artificial Sequence: Synthetic peptide
  XENP017919 vlCDR1
RSSQSIVHSNGNTYLE

SEQ ID NO: 6225 - protein, 7 aa, Artificial Sequence
  Description of Artificial Sequence: Synthetic peptide
  XENP017919 vlCDR2
KVFNRFS

SEQ ID NO: 6226 - protein, 9 aa, Artificial Sequence
  Description of Artificial Sequence: Synthetic peptide
  XENP017919 vlCDR3
FQGSHVPFT

SEQ ID NO: 6227 - protein, 251 aa, Artificial Sequence
  Description of Artificial Sequence: Synthetic polypeptide
  XENP017920 1C7_H1L1_scFv(GKPGS)4
EVQLLESGGGLVQPGGSLRLSCAASGFAFSSYDMSWVRQAPGKRLEWVSYISSGGGSTYYPDSVKGRFTISRDNSKNTLYLQMNSLRAEDTAVYYCARPLDDYYAPFAYWGQGTLVTVSSGKPGSGKPGSGKPGSGKPGSDIVLTQSPSSLSASVGDRVTITCRASESVDNDGISFMNWFQQKPGKPPKLLIYAASNQGSGVPARFSGSGSGTDFTLTISSLQPEDFATYFCQQSKEVPWTFGGGTKVEIK

SEQ ID NO: 6228 - protein, 120 aa, Artificial Sequence
  Description of Artificial Sequence: Synthetic polypeptide
  VH of XENP017920
EVQLLESGGGLVQPGGSLRLSCAASGFAFSSYDMSWVRQAPGKRLEWVSYISSGGGSTYYPDSVKGRFTISRDNSKNTLYLQMNSLRAEDTAVYYCARPLDDYYAPFAYWGQGTLVTVSS

SEQ ID NO: 6229 - protein, 111 aa, Artificial Sequence
  Description of Artificial Sequence: Synthetic polypeptide
  VL of XENP017920
DIVLTQSPSSLSASVGDRVTITCRASESVDNDGISFMNWFQQKPGKPPKLLIYAASNQGSGVPARFSGSGSGTDFTLTISSLQPEDFATYFCQQSKEVPWTFGGGTKVEIK

SEQ ID NO: 6230 - protein, 5 aa, Artificial Sequence
  Description of Artificial Sequence: Synthetic peptide
  XENP017920 vhCDR1
SYDMS

SEQ ID NO: 6231 - protein, 17 aa, Artificial Sequence
  Description of Artificial Sequence: Synthetic peptide
  XENP017920 vhCDR2
YISSGGGSTYYPDSVKG

SEQ ID NO: 6232 - protein, 11 aa, Artificial Sequence
  Description of Artificial Sequence: Synthetic peptide
  XENP017920 vhCDR3
PLDDYYAPFAY

SEQ ID NO: 6233 - protein, 15 aa, Artificial Sequence
  Description of Artificial Sequence: Synthetic peptide
  XENP017920 vlCDR1
RASESVDNDGISFMN

SEQ ID NO: 6234 - protein, 7 aa, Artificial Sequence
  Description of Artificial Sequence: Synthetic peptide
  XENP017920 vlCDR2
AASNQGS

SEQ ID NO: 6235 - protein, 9 aa, Artificial Sequence
  Description of Artificial Sequence: Synthetic peptide
  XENP017920 vlCDR3
QQSKEVPWT

SEQ ID NO: 6236 - protein, 246 aa, Artificial Sequence
  Description of Artificial Sequence: Synthetic polypeptide
  XENP017921 1G2_H1L1_scFv(GKPGS)4
QVQLVQSGAEVKKPGASVKVSCKVSGFSLTDYGVNWVRQAPGQGLEWMGMIWGDGSTDYNSKFQGRVTMTKDISTSTVYMELSSLRSEDTAVYYCAREYAMDYWGQGTLVTVSSGKPGSGKPGSGKPGSGKPGSDIVMTQSPDSLAVSLGERATINCKSSQSLLNSRTRKNYLAWYQQKPGQSPKLLIFWASTRESGVPDRFTGSGSGTDFTLTISSLQAEDVAVYYCKQSYNLRTFGGGTKVEIK

SEQ ID NO: 6237 - protein, 114 aa, Artificial Sequence
  Description of Artificial Sequence: Synthetic polypeptide
  VH of XENP017921
QVQLVQSGAEVKKPGASVKVSCKVSGFSLTDYGVNWVRQAPGQGLEWMGMIWGDGSTDYNSKFQGRVTMTKDISTSTVYMELSSLRSEDTAVYYCAREYAMDYWGQGTLVTVSS

SEQ ID NO: 6238 - protein, 112 aa, Artificial Sequence
  Description of Artificial Sequence: Synthetic polypeptide
  VL of XENP017921
DIVMTQSPDSLAVSLGERATINCKSSQSLLNSRTRKNYLAWYQQKPGQSPKLLIFWASTRESGVPDRFTGSGSGTDFTLTISSLQAEDVAVYYCKQSYNLRTFGGGTKVEIK

SEQ ID NO: 6239 - protein, 5 aa, Artificial Sequence
  Description of Artificial Sequence: Synthetic peptide
  XENP017921 vhCDR1
DYGVN

SEQ ID NO: 6240 - protein, 16 aa, Artificial Sequence
  Description of Artificial Sequence: Synthetic peptide
  XENP017921 vhCDR2
MIWGDGSTDYNSKFQG

SEQ ID NO: 6241 - protein, 6 aa, Artificial Sequence
  Description of Artificial Sequence: Synthetic peptide
  XENP017921 vhCDR3
EYAMDY

SEQ ID NO: 6242 - protein, 17 aa, Artificial Sequence
  Description of Artificial Sequence: Synthetic peptide
  XENP017921 vlCDR1
KSSQSLLNSRTRKNYLA

SEQ ID NO: 6243 - protein, 7 aa, Artificial Sequence
  Description of Artificial Sequence: Synthetic peptide
  XENP017921 vlCDR2
WASTRES

SEQ ID NO: 6244 - protein, 8 aa, Artificial Sequence
  Description of Artificial Sequence: Synthetic peptide
  XENP017921 vlCDR3
KQSYNLRT

SEQ ID NO: 6245 - protein, 249 aa, Artificial Sequence
  Description of Artificial Sequence: Synthetic polypeptide
  XENP017922 1G6_H1L1_scFv(GKPGS)4
EVQLVESGGGLVKPGGSLRLSCAASGFTFSNYWMNWVRQAPGKGLEWVGEIRLKSNNYATHYAEPVKGRFTISRDDSKSTVYLQMNSLKTEDTAVYYCTRYYGNYGGYFDVWGAGTLVTVSSGKPGSGKPGSGKPGSGKPGSSIVMTQSPATLSVSPGERATLSCRASQSVSNDVAWYQQKPGQSPRLLINYASHRYTGVPDRFTGSGYGTEFTLTISSLQSEDFAVYFCQQDYSSPRTFGGGTKVEIK

SEQ ID NO: 6246 - protein, 122 aa, Artificial Sequence
  Description of Artificial Sequence: Synthetic polypeptide
  VH of XENP017922
EVQLVESGGGLVKPGGSLRLSCAASGFTFSNYWMNWVRQAPGKGLEWVGEIRLKSNNYATHYAEPVKGRFTISRDDSKSTVYLQMNSLKTEDTAVYYCTRYYGNYGGYFDVWGAGTLVTVSS

SEQ ID NO: 6247 - protein, 107 aa, Artificial Sequence
  Description of Artificial Sequence: Synthetic polypeptide
  VL of XENP017922
SIVMTQSPATLSVSPGERATLSCRASQSVSNDVAWYQQKPGQSPRLLINYASHRYTGVPDRFTGSGYGTEFTLTISSLQSEDFAVYFCQQDYSSPRTFGGGTKVEIK

SEQ ID NO: 6248 - protein, 5 aa, Artificial Sequence
  Description of Artificial Sequence: Synthetic peptide
  XENP017922 vhCDR1
NYWMN

SEQ ID NO: 6249 - protein, 19 aa, Artificial Sequence
  Description of Artificial Sequence: Synthetic peptide
  XENP017922 vhCDR2
EIRLKSNNYATHYAEPVKG

SEQ ID NO: 6250 - protein, 11 aa, Artificial Sequence
  Description of Artificial Sequence: Synthetic peptide
  XENP017922 vhCDR3
YYGNYGGYFDV

SEQ ID NO: 6251 - protein, 11 aa, Artificial Sequence
  Description of Artificial Sequence: Synthetic peptide
  XENP017922 vlCDR1
RASQSVSNDVA

SEQ ID NO: 6252 - protein, 7 aa, Artificial Sequence
  Description of Artificial Sequence: Synthetic peptide
  XENP017922 vlCDR2
YASHRYT

SEQ ID NO: 6253 - protein, 9 aa, Artificial Sequence
  Description of Artificial Sequence: Synthetic peptide
  XENP017922 vlCDR3
QQDYSSPRT

SEQ ID NO: 6254 - protein, 249 aa, Artificial Sequence
  Description of Artificial Sequence: Synthetic polypeptide
  XENP017923 1G6_H1L2_scFv(GKPGS)4
EVQLVESGGGLVKPGGSLRLSCAASGFTFSNYWMNWVRQAPGKGLEWVGEIRLKSNNYATHYAEPVKGRFTISRDDSKSTVYLQMNSLKTEDTAVYYCTRYYGNYGGYFDVWGAGTLVTVSSGKPGSGKPGSGKPGSGKPGSSIVMTQSPSSLSASVGDRVTITCRASQSVSNDVAWYQQKPGKSPKLLINYASHRYTGVPDRFTGSGYGTDFTLTISSLQPEDFATYFCQQDYSSPRTFGGGTKVEIK

SEQ ID NO: 6255 - protein, 122 aa, Artificial Sequence; identical to SEQ ID NO: 6246
  Description of Artificial Sequence: Synthetic polypeptide
  VH of XENP017923

SEQ ID NO: 6256 - protein, 107 aa, Artificial Sequence
  Description of Artificial Sequence: Synthetic polypeptide
  VL of XENP017923
SIVMTQSPSSLSASVGDRVTITCRASQSVSNDVAWYQQKPGKSPKLLINYASHRYTGVPDRFTGSGYGTDFTLTISSLQPEDFATYFCQQDYSSPRTFGGGTKVEIK

SEQ ID NO: 6257 - protein, 5 aa, Artificial Sequence
  Description of Artificial Sequence: Synthetic peptide
  XENP017923 vhCDR1
NYWMN

SEQ ID NO: 6258 - protein, 19 aa, Artificial Sequence
  Description of Artificial Sequence: Synthetic peptide
  XENP017923 vhCDR2
EIRLKSNNYATHYAEPVKG

SEQ ID NO: 6259 - protein, 11 aa, Artificial Sequence
  Description of Artificial Sequence: Synthetic peptide
  XENP017923 vhCDR3
YYGNYGGYFDV

SEQ ID NO: 6260 - protein, 11 aa, Artificial Sequence
  Description of Artificial Sequence: Synthetic peptide
  XENP017923 vlCDR1
RASQSVSNDVA

SEQ ID NO: 6261 - protein, 7 aa, Artificial Sequence
  Description of Artificial Sequence: Synthetic peptide
  XENP017923 vlCDR2
YASHRYT

SEQ ID NO: 6262 - protein, 9 aa, Artificial Sequence
  Description of Artificial Sequence: Synthetic peptide
  XENP017923 vlCDR3
QQDYSSPRT

SEQ ID NO: 6263 - protein, 242 aa, Artificial Sequence
  Description of Artificial Sequence: Synthetic polypeptide
  XENP017924 2A2_H1L1_scFv(GKPGS)4
QVQLVQSGAEVKKPGASVKVSCKASGYTFTNYWMHWVRQAPGQGLEWMGYINPSTGYTEYNQKFQGRVTMTADKSTSTAYMELSSLRSEDTAVYYCATGNYFAYWGQGTLVTVSSGKPGSGKPGSGKPGSGKPGSDIQMTQSPSSLSASVGDRVTITCRPSESLYSYLAWYQQKPGKSPKLLVYNAKTLVEGVPSRFSGSGSGTDFTLTISSLQPEDFATYYCQHHYGTPFTFGSGTKLEIK

SEQ ID NO: 6264 - protein, 115 aa, Artificial Sequence
  Description of Artificial Sequence: Synthetic polypeptide
  VH of XENP017924
QVQLVQSGAEVKKPGASVKVSCKASGYTFTNYWMHWVRQAPGQGLEWMGYINPSTGYTEYNQKFQGRVTMTADKSTSTAYMELSSLRSEDTAVYYCATGNYFAYWGQGTLVTVSS

SEQ ID NO: 6265 - protein, 107 aa, Artificial Sequence
  Description of Artificial Sequence: Synthetic polypeptide
  VL of XENP017924
DIQMTQSPSSLSASVGDRVTITCRPSESLYSYLAWYQQKPGKSPKLLVYNAKTLVEGVPSRFSGSGSGTDFTLTISSLQPEDFATYYCQHHYGTPFTFGSGTKLEIK

SEQ ID NO: 6266 - protein, 5 aa, Artificial Sequence
  Description of Artificial Sequence: Synthetic peptide
  XENP017924 vhCDR1
NYWMH

SEQ ID NO: 6267 - protein, 17 aa, Artificial Sequence
  Description of Artificial Sequence: Synthetic peptide
  XENP017924 vhCDR2
YINPSTGYTEYNQKFQG

SEQ ID NO: 6268 - protein, 6 aa, Artificial Sequence
  Description of Artificial Sequence: Synthetic peptide
  XENP017924 vhCDR3
GNYFAY

SEQ ID NO: 6269 - protein, 11 aa, Artificial Sequence
  Description of Artificial Sequence: Synthetic peptide
  XENP017924 vlCDR1
RPSESLYSYLA

SEQ ID NO: 6270 - protein, 7 aa, Artificial Sequence
  Description of Artificial Sequence: Synthetic peptide
  XENP017924 vlCDR2
NAKTLVE

SEQ ID NO: 6271 - protein, 9 aa, Artificial Sequence
  Description of Artificial Sequence: Synthetic peptide
  XENP017924 vlCDR3
QHHYGTPFT

SEQ ID NO: 6272 - protein, 252 aa, Artificial Sequence
  Description of Artificial Sequence: Synthetic polypeptide
  XENP017925 2F11_H1L1_scFv(GKPGS)4
QVQLVQSGAEVKKPGASVKVSCKGSGYTFTDYVMHWVRQAPGQSLEWMGVISTYYGDASYNQKFQGRVTMTVDKSTSTAYMELSSLRSEDTAVYYCAREGYDGYLYFDVWGAGTLVTVSSGKPGSGKPGSGKPGSGKPGSDVLMTQTPLSSPVTLGQPASISCRSSQSIVHSNGNTYLEWYQQRPGQSPRLLIYKVSNRFSGVPDRFSGSGSGTDFTLKISRVEAEDVGVYYCFQGSHVPYTFGGGTKVEIK

SEQ ID NO: 6273 - protein, 120 aa, Artificial Sequence
  Description of Artificial Sequence: Synthetic polypeptide
  VH of XENP017925
QVQLVQSGAEVKKPGASVKVSCKGSGYTFTDYVMHWVRQAPGQSLEWMGVISTYYGDASYNQKFQGRVTMTVDKSTSTAYMELSSLRSEDTAVYYCAREGYDGYLYFDVWGAGTLVTVSS

SEQ ID NO: 6274 - protein, 112 aa, Artificial Sequence
  Description of Artificial Sequence: Synthetic polypeptide
  VL of XENP017925
DVLMTQTPLSSPVTLGQPASISCRSSQSIVHSNGNTYLEWYQQRPGQSPRLLIYKVSNRFSGVPDRFSGSGSGTDFTLKISRVEAEDVGVYYCFQGSHVPYTFGGGTKVEIK

SEQ ID NO: 6275 - protein, 5 aa, Artificial Sequence
  Description of Artificial Sequence: Synthetic peptide
  XENP017925 vhCDR1
DYVMH

SEQ ID NO: 6276 - protein, 17 aa, Artificial Sequence
  Description of Artificial Sequence: Synthetic peptide
  XENP017925 vhCDR2
VISTYYGDASYNQKFQG

SEQ ID NO: 6277 - protein, 11 aa, Artificial Sequence
  Description of Artificial Sequence: Synthetic peptide
  XENP017925 vhCDR3
EGYDGYLYFDV

SEQ ID NO: 6278 - protein, 16 aa, Artificial Sequence
  Description of Artificial Sequence: Synthetic peptide
  XENP017925 vlCDR1
RSSQSIVHSNGNTYLE

SEQ ID NO: 6279 - protein, 7 aa, Artificial Sequence
  Description of Artificial Sequence: Synthetic peptide
  XENP017925 vlCDR2
KVSNRFS

SEQ ID NO: 6280 - protein, 9 aa, Artificial Sequence
  Description of Artificial Sequence: Synthetic peptide
  XENP017925 vlCDR3
FQGSHVPYT

SEQ ID NO: 6281 - protein, 252 aa, Artificial Sequence
  Description of Artificial Sequence: Synthetic polypeptide
  XENP017926 5H1_H1L1_scFv(GKPGS)4
QVQLVQSGAEVKKPGASVKVSCKGSGYTFTDYVMHWVRQAPGQSLEWMGVISIHYGDGRYNQKFQGRVTMTVDKSTSTAYMELSSLRSEDTAVYYCAREVYDGYLYFDVWGAGTLVTVSSGKPGSGKPGSGKPGSGKPGSDVLMTQSPLSLPVTPGEPASISCRSSQSIVHSNGNTYLEWYLQKPGQSPQLLIYKVSNRFSGVPDRFGGRGSGTDFTLKISRVEAEDVGVYYCFQGSHVPYTFGGGTKVEIK

SEQ ID NO: 6282 - protein, 120 aa, Artificial Sequence
  Description of Artificial Sequence: Synthetic polypeptide
  VH of XENP017926
QVQLVQSGAEVKKPGASVKVSCKGSGYTFTDYVMHWVRQAPGQSLEWMGVISIHYGDGRYNQKFQGRVTMTVDKSTSTAYMELSSLRSEDTAVYYCAREVYDGYLYFDVWGAGTLVTVSS

SEQ ID NO: 6283 - protein, 112 aa, Artificial Sequence
  Description of Artificial Sequence: Synthetic polypeptide
  VL of XENP017926
DVLMTQSPLSLPVTPGEPASISCRSSQSIVHSNGNTYLEWYLQKPGQSPQLLIYKVSNRFSGVPDRFGGRGSGTDFTLKISRVEAEDVGVYYCFQGSHVPYTFGGGTKVEIK

SEQ ID NO: 6284 - protein, 5 aa, Artificial Sequence
  Description of Artificial Sequence: Synthetic peptide
  XENP017926 vhCDR1
DYVMH

SEQ ID NO: 6285 - protein, 17 aa, Artificial Sequence
  Description of Artificial Sequence: Synthetic peptide
  XENP017926 vhCDR2
VISIHYGDGRYNQKFQG

SEQ ID NO: 6286 - protein, 11 aa, Artificial Sequence
  Description of Artificial Sequence: Synthetic peptide
  XENP017926 vhCDR3
EVYDGYLYFDV

SEQ ID NO: 6287 - protein, 16 aa, Artificial Sequence
  Description of Artificial Sequence: Synthetic peptide
  XENP017926 vlCDR1
RSSQSIVHSNGNTYLE

SEQ ID NO: 6288 - protein, 7 aa, Artificial Sequence
  Description of Artificial Sequence: Synthetic peptide
  XENP017926 vlCDR2
KVSNRFS

SEQ ID NO: 6289 - protein, 9 aa, Artificial Sequence
  Description of Artificial Sequence: Synthetic peptide
  XENP017926 vlCDR3
FQGSHVPYT

SEQ ID NO: 6290 - protein, 252 aa, Artificial Sequence
  Description of Artificial Sequence: Synthetic polypeptide
  XENP017927 5H1_H1L2_scFv(GKPGS)4
QVQLVQSGAEVKKPGASVKVSCKGSGYTFTDYVMHWVRQAPGQSLEWMGVISIHYGDGRYNQKFQGRVTMTVDKSTSTAYMELSSLRSEDTAVYYCAREVYDGYLYFDVWGAGTLVTVSSGKPGSGKPGSGKPGSGKPGSDVLMTQSPLSLPVTLGQPASISCRSSQSIVHSNGNTYLEWYQQRPGQSPRLLIYKVSNRFSGVPDRFGGRGSGTDFTLKISRVEAEDVGVYYCFQGSHVPYTFGGGTKVEIK

SEQ ID NO: 6291 - protein, 120 aa, Artificial Sequence; identical to SEQ ID NO: 6282
  Description of Artificial Sequence: Synthetic polypeptide
  VH of XENP017927

SEQ ID NO: 6292 - protein, 112 aa, Artificial Sequence
  Description of Artificial Sequence: Synthetic polypeptide
  VL of XENP017927
DVLMTQSPLSLPVTLGQPASISCRSSQSIVHSNGNTYLEWYQQRPGQSPRLLIYKVSNRFSGVPDRFGGRGSGTDFTLKISRVEAEDVGVYYCFQGSHVPYTFGGGTKVEIK

SEQ ID NO: 6293 - protein, 5 aa, Artificial Sequence
  Description of Artificial Sequence: Synthetic peptide
  XENP017927 vhCDR1
DYVMH

SEQ ID NO: 6294 - protein, 17 aa, Artificial Sequence
  Description of Artificial Sequence: Synthetic peptide
  XENP017927 vhCDR2
VISIHYGDGRYNQKFQG

SEQ ID NO: 6295 - protein, 11 aa, Artificial Sequence
  Description of Artificial Sequence: Synthetic peptide
  XENP017927 vhCDR3
EVYDGYLYFDV

SEQ ID NO: 6296 - protein, 16 aa, Artificial Sequence
  Description of Artificial Sequence: Synthetic peptide
  XENP017927 vlCDR1
RSSQSIVHSNGNTYLE

SEQ ID NO: 6297 - protein, 7 aa, Artificial Sequence
  Description of Artificial Sequence: Synthetic peptide
  XENP017927 vlCDR2
KVSNRFS

SEQ ID NO: 6298 - protein, 9 aa, Artificial Sequence
  Description of Artificial Sequence: Synthetic peptide
  XENP017927 vlCDR3
FQGSHVPYT

SEQ ID NO: 6299 - protein, 247 aa, Artificial Sequence
  Description of Artificial Sequence: Synthetic polypeptide
  XENP017928 10E4_H1L1_scFv(GKPGS)4
QVQLVQSGAEVKKPGASVKVSCKASGYSFTSYWMHWVRQAPGQGLEWMGAIYPGNSDTSYNQKFQGRVTMTADTSTSTAYMELSSLRSEDTAVYYCTRDGNYVRYYFDYWGQGTLVTVSSGKPGSGKPGSGKPGSGKPGSDIQMTQSPSSLSASVGDRVTITCRASQDIGSNLNWLQQKPGKTIKRLIYATSNLDSGVPKRFSGRRSGSDYTLTISSLQPEDFATYYCLQYASSPLTFGTGTKLEIK

SEQ ID NO: 6300 - protein, 120 aa, Artificial Sequence
  Description of Artificial Sequence: Synthetic polypeptide
  VH of XENP017928
QVQLVQSGAEVKKPGASVKVSCKASGYSFTSYWMHWVRQAPGQGLEWMGAIYPGNSDTSYNQKFQGRVTMTADTSTSTAYMELSSLRSEDTAVYYCTRDGNYVRYYFDYWGQGTLVTVSS

SEQ ID NO: 6301 - protein, 107 aa, Artificial Sequence
  Description of Artificial Sequence: Synthetic polypeptide
  VL of XENP017928
DIQMTQSPSSLSASVGDRVTITCRASQDIGSNLNWLQQKPGKTIKRLIYATSNLDSGVPKRFSGRRSGSDYTLTISSLQPEDFATYYCLQYASSPLTFGTGTKLEIK

SEQ ID NO: 6302 - protein, 5 aa, Artificial Sequence
  Description of Artificial Sequence: Synthetic peptide
  XENP017928 vhCDR1
SYWMH

SEQ ID NO: 6303 - protein, 17 aa, Artificial Sequence
  Description of Artificial Sequence: Synthetic peptide
  XENP017928 vhCDR2
AIYPGNSDTSYNQKFQG

SEQ ID NO: 6304 - protein, 11 aa, Artificial Sequence
  Description of Artificial Sequence: Synthetic peptide
  XENP017928 vhCDR3
DGNYVRYYFDY

SEQ ID NO: 6305 - protein, 11 aa, Artificial Sequence
  Description of Artificial Sequence: Synthetic peptide
  XENP017928 vlCDR1
RASQDIGSNLN

SEQ ID NO: 6306 - protein, 7 aa, Artificial Sequence
  Description of Artificial Sequence: Synthetic peptide
  XENP017928 vlCDR2
ATSNLDS

SEQ ID NO: 6307 - protein, 9 aa, Artificial Sequence
  Description of Artificial Sequence: Synthetic peptide
  XENP017928 vlCDR3
LQYASSPLT

SEQ ID NO: 6308 - protein, 247 aa, Artificial Sequence
  Description of Artificial Sequence: Synthetic polypeptide
  XENP017929 4C11_H1L1_scFv(GKPGS)4
QIQLVQSGAEVKKPGASVKVSCKASGYTFTSYWMHWVRQAPGQGLEWMGAIYPGNSDTSYNQKFQGRVTMTADTSTSTAYMELSSLRSEDTAVYYCTNLYYGSSFAMDYWGQGTLVTVSSGKPGSGKPGSGKPGSGKPGSDIKMTQSPSSLSASVGDRVTITCRASQDINTYLSWFQQKPGKSPKTLIYRANRLVDGVPSRFSGSGSGQDYTLTISSLQPEDFATYYCLHYDDFPYTFGGGTKVEIK

SEQ ID NO: 6309 - protein, 120 aa, Artificial Sequence
  Description of Artificial Sequence: Synthetic polypeptide
  VH of XENP017929
QIQLVQSGAEVKKPGASVKVSCKASGYTFTSYWMHWVRQAPGQGLEWMGAIYPGNSDTSYNQKFQGRVTMTADTSTSTAYMELSSLRSEDTAVYYCTNLYYGSSFAMDYWGQGTLVTVSS

SEQ ID NO: 6310 - protein, 107 aa, Artificial Sequence
  Description of Artificial Sequence: Synthetic polypeptide
  VL of XENP017929
DIKMTQSPSSLSASVGDRVTITCRASQDINTYLSWFQQKPGKSPKTLIYRANRLVDGVPSRFSGSGSGQDYTLTISSLQPEDFATYYCLHYDDFPYTFGGGTKVEIK

SEQ ID NO: 6311 - protein, 5 aa, Artificial Sequence
  Description of Artificial Sequence: Synthetic peptide
  XENP017929 vhCDR1
SYWMH

SEQ ID NO: 6312 - protein, 17 aa, Artificial Sequence
  Description of Artificial Sequence: Synthetic peptide
  XENP017929 vhCDR2
AIYPGNSDTSYNQKFQG

SEQ ID NO: 6313 - protein, 11 aa, Artificial Sequence
  Description of Artificial Sequence: Synthetic peptide
  XENP017929 vhCDR3
LYYGSSFAMDY

SEQ ID NO: 6314 - protein, 11 aa, Artificial Sequence
  Description of Artificial Sequence: Synthetic peptide
  XENP017929 vlCDR1
RASQDINTYLS

SEQ ID NO: 6315 - protein, 7 aa, Artificial Sequence
  Description of Artificial Sequence: Synthetic peptide
  XENP017929 vlCDR2
RANRLVD

SEQ ID NO: 6316 - protein, 9 aa, Artificial Sequence
  Description of Artificial Sequence: Synthetic peptide
  XENP017929 vlCDR3
LHYDDFPYT

SEQ ID NO: 6317 - protein, 244 aa, Artificial Sequence
  Description of Artificial Sequence: Synthetic polypeptide
  XENP017930 6A3_H1L1_scFv(GKPGS)4
EVQLLESGGGLVQPGGSLRLSCAASGFTFSSYGMSWVRQAPGKRLEWVSTISGGGRYTYYPDSVKGRFTISRDNSKNTLYLQMNSLRAEDTAVYYCASYYDSSFDYWGQGTLVTVSSGKPGSGKPGSGKPGSGKPGSDIVMTQSPDSLAVSLGERATINCKASQDVGTAVAWYQQKPGQSPKLLIYWASTRHTGVPDRFTGSGSGTDFTLTISSLQAEDVAVYFCQHYSIYPWTFGGGTKVEIK

SEQ ID NO: 6318 - protein, 117 aa, Artificial Sequence
  Description of Artificial Sequence: Synthetic polypeptide
  VH of XENP017930
EVQLLESGGGLVQPGGSLRLSCAASGFTFSSYGMSWVRQAPGKRLEWVSTISGGGRYTYYPDSVKGRFTISRDNSKNTLYLQMNSLRAEDTAVYYCASYYDSSFDYWGQGTLVTVSS

SEQ ID NO: 6319 - protein, 107 aa, Artificial Sequence
  Description of Artificial Sequence: Synthetic polypeptide
  VL of XENP017930
DIVMTQSPDSLAVSLGERATINCKASQDVGTAVAWYQQKPGQSPKLLIYWASTRHTGVPDRFTGSGSGTDFTLTISSLQAEDVAVYFCQHYSIYPWTFGGGTKVEIK

SEQ ID NO: 6320 - protein, 5 aa, Artificial Sequence
  Description of Artificial Sequence: Synthetic peptide
  XENP017930 vhCDR1
SYGMS

SEQ ID NO: 6321 - protein, 17 aa, Artificial Sequence
  Description of Artificial Sequence: Synthetic peptide
  XENP017930 vhCDR2
TISGGGRYTYYPDSVKG

SEQ ID NO: 6322 - protein, 8 aa, Artificial Sequence
  Description of Artificial Sequence: Synthetic peptide
  XENP017930 vhCDR3
YYDSSFDY

SEQ ID NO: 6323 - protein, 11 aa, Artificial Sequence
  Description of Artificial Sequence: Synthetic peptide
  XENP017930 vlCDR1
KASQDVGTAVA

SEQ ID NO: 6324 - protein, 7 aa, Artificial Sequence
  Description of Artificial Sequence: Synthetic peptide
  XENP017930 vlCDR2
WASTRHT

SEQ ID NO: 6325 - protein, 9 aa, Artificial Sequence
  Description of Artificial Sequence: Synthetic peptide
  XENP017930 vlCDR3
QHYSIYPWT

SEQ ID NO: 6326 - protein, 244 aa, Artificial Sequence
  Description of Artificial Sequence: Synthetic polypeptide
  XENP017931 6A3_H1L2_scFv(GKPGS)4
EVQLLESGGGLVQPGGSLRLSCAASGFTFSSYGMSWVRQAPGKRLEWVSTISGGGRYTYYPDSVKGRFTISRDNSKNTLYLQMNSLRAEDTAVYYCASYYDSSFDYWGQGTLVTVSSGKPGSGKPGSGKPGSGKPGSDIVMTQSPATLSVSPGERATLSCRASQDVGTAVAWYQQKPGQSPRLLIYWASTRHTGVPDRFTGSGSGTEFTLTISSLQSEDFAVYFCQHYSIYPWTFGGGTKVEIK

SEQ ID NO: 6327 - protein, 117 aa, Artificial Sequence; identical to SEQ ID NO: 6318
  Description of Artificial Sequence: Synthetic polypeptide
  VH of XENP017931

SEQ ID NO: 6328 - protein, 107 aa, Artificial Sequence
  Description of Artificial Sequence: Synthetic polypeptide
  VL of XENP017931
DIVMTQSPATLSVSPGERATLSCRASQDVGTAVAWYQQKPGQSPRLLIYWASTRHTGVPDRFTGSGSGTEFTLTISSLQSEDFAVYFCQHYSIYPWTFGGGTKVEIK

SEQ ID NO: 6329 - protein, 5 aa, Artificial Sequence
  Description of Artificial Sequence: Synthetic peptide
  XENP017931 vhCDR1
SYGMS

SEQ ID NO: 6330 - protein, 17 aa, Artificial Sequence
  Description of Artificial Sequence: Synthetic peptide
  XENP017931 vhCDR2
TISGGGRYTYYPDSVKG

SEQ ID NO: 6331 - protein, 8 aa, Artificial Sequence
  Description of Artificial Sequence: Synthetic peptide
  XENP017931 vhCDR3
YYDSSFDY

SEQ ID NO: 6332 - protein, 11 aa, Artificial Sequence
  Description of Artificial Sequence: Synthetic peptide
  XENP017931 vlCDR1
RASQDVGTAVA

SEQ ID NO: 6333 - protein, 7 aa, Artificial Sequence
  Description of Artificial Sequence: Synthetic peptide
  XENP017931 vlCDR2
WASTRHT

SEQ ID NO: 6334 - protein, 9 aa, Artificial Sequence
  Description of Artificial Sequence: Synthetic peptide
  XENP017931 vlCDR3
QHYSIYPWT

SEQ ID NO: 6335 - protein, 244 aa, Artificial Sequence
  Description of Artificial Sequence: Synthetic polypeptide
  XENP017932 6A3_H1L3_scFv(GKPGS)4
EVQLLESGGGLVQPGGSLRLSCAASGFTFSSYGMSWVRQAPGKRLEWVSTISGGGRYTYYPDSVKGRFTISRDNSKNTLYLQMNSLRAEDTAVYYCASYYDSSFDYWGQGTLVTVSSGKPGSGKPGSGKPGSGKPGSDIVMTQSPSSLSASVGDRVTITCRASQDVGTAVAWYQQKPGKSPKLLIYWASTRHTGVPDRFTGSGSGTDFTLTISSLQPEDFATYFCQHYSIYPWTFGGGTKVEIK

SEQ ID NO: 6336 - protein, 117 aa, Artificial Sequence; identical to SEQ ID NO: 6318
  Description of Artificial Sequence: Synthetic polypeptide
  VH of XENP017932

SEQ ID NO: 6337 - protein, 107 aa, Artificial Sequence
  Description of Artificial Sequence: Synthetic polypeptide
  VL of XENP017932
DIVMTQSPSSLSASVGDRVTITCRASQDVGTAVAWYQQKPGKSPKLLIYWASTRHTGVPDRFTGSGSGTDFTLTISSLQPEDFATYFCQHYSIYPWTFGGGTKVEIK

SEQ ID NO: 6338 - protein, 5 aa, Artificial Sequence
  Description of Artificial Sequence: Synthetic peptide
  XENP017932 vhCDR1
SYGMS

SEQ ID NO: 6339 - protein, 17 aa, Artificial Sequence
  Description of Artificial Sequence: Synthetic peptide
  XENP017932 vhCDR2
TISGGGRYTYYPDSVKG

SEQ ID NO: 6340 - protein, 8 aa, Artificial Sequence
  Description of Artificial Sequence: Synthetic peptide
  XENP017932 vhCDR3
YYDSSFDY

SEQ ID NO: 6341 - protein, 11 aa, Artificial Sequence
  Description of Artificial Sequence: Synthetic peptide
  XENP017932 vlCDR1
RASQDVGTAVA

SEQ ID NO: 6342 - protein, 7 aa, Artificial Sequence
  Description of Artificial Sequence: Synthetic peptide
  XENP017932 vlCDR2
WASTRHT

SEQ ID NO: 6343 - protein, 9 aa, Artificial Sequence
  Description of Artificial Sequence: Synthetic peptide
  XENP017932 vlCDR3
QHYSIYPWT

SEQ ID NO: 6344 - protein, 244 aa, Artificial Sequence
  Description of Artificial Sequence: Synthetic polypeptide
  XENP017933 6A3_H2L3_scFv(GKPGS)4
QVQLVESGGGLVKPGGSLRLSCAASGFTFSSYGMSWVRQAPGKRLEWVSTISGGGRYTYYPDSVKGRFTISRDNAKNSLYLQMNSLRAEDTAVYYCASYYDSSFDYWGQGTLVTVSSGKPGSGKPGSGKPGSGKPGSDIVMTQSPSSLSASVGDRVTITCRASQDVGTAVAWYQQKPGKSPKLLIYWASTRHTGVPDRFTGSGSGTDFTLTISSLQPEDFATYFCQHYSIYPWTFGGGTKVEIK

SEQ ID NO: 6345 - protein, 117 aa, Artificial Sequence
  Description of Artificial Sequence: Synthetic polypeptide
  VH of XENP017933
QVQLVESGGGLVKPGGSLRLSCAASGFTFSSYGMSWVRQAPGKRLEWVSTISGGGRYTYYPDSVKGRFTISRDNAKNSLYLQMNSLRAEDTAVYYCASYYDSSFDYWGQGTLVTVSS

SEQ ID NO: 6346 - protein, 107 aa, Artificial Sequence; identical to SEQ ID NO: 6337
  Description of Artificial Sequence: Synthetic polypeptide
  VL of XENP017933

SEQ ID NO: 6347 - protein, 5 aa, Artificial Sequence
  Description of Artificial Sequence: Synthetic peptide
  XENP017933 vhCDR1
SYGMS

SEQ ID NO: 6348 - protein, 17 aa, Artificial Sequence
  Description of Artificial Sequence: Synthetic peptide
  XENP017933 vhCDR2
TISGGGRYTYYPDSVKG

SEQ ID NO: 6349 - protein, 8 aa, Artificial Sequence
  Description of Artificial Sequence: Synthetic peptide
  XENP017933 vhCDR3
YYDSSFDY

SEQ ID NO: 6350 - protein, 11 aa, Artificial Sequence
  Description of Artificial Sequence: Synthetic peptide
  XENP017933 vlCDR1
RASQDVGTAVA

SEQ ID NO: 6351 - protein, 7 aa, Artificial Sequence
  Description of Artificial Sequence: Synthetic peptide
  XENP017933 vlCDR2
WASTRHT

SEQ ID NO: 6352 - protein, 9 aa, Artificial Sequence
  Description of Artificial Sequence: Synthetic peptide
  XENP017933 vlCDR3
QHYSIYPWT

SEQ ID NO: 6353 - protein, 244 aa, Artificial Sequence
  Description of Artificial Sequence: Synthetic polypeptide
  XENP017934 6A3_H1.1_L3_scFv(GKPGS)4
EVQLLESGGGLVQPGGSLRLSCAASGFTFSSYGMSWVRQAPGKGLEWVSTISGGGRYTYYPDSVKGRFTISRDNSKNTLYLQMNSLRAEDTAVYYCASYYDSSFDYWGQGTLVTVSSGKPGSGKPGSGKPGSGKPGSDIVMTQSPSSLSASVGDRVTITCRASQDVGTAVAWYQQKPGKSPKLLIYWASTRHTGVPDRFTGSGSGTDFTLTISSLQPEDFATYFCQHYSIYPWTFGGGTKVEIK

SEQ ID NO: 6354 - protein, 117 aa, Artificial Sequence
  Description of Artificial Sequence: Synthetic polypeptide
  VH of XENP017934
EVQLLESGGGLVQPGGSLRLSCAASGFTFSSYGMSWVRQAPGKGLEWVSTISGGGRYTYYPDSVKGRFTISRDNSKNTLYLQMNSLRAEDTAVYYCASYYDSSFDYWGQGTLVTVSS

SEQ ID NO: 6355 - protein, 107 aa, Artificial Sequence; identical to SEQ ID NO: 6337
  Description of Artificial Sequence: Synthetic polypeptide
  VL of XENP017934

SEQ ID NO: 6356 - protein, 5 aa, Artificial Sequence
  Description of Artificial Sequence: Synthetic peptide
  XENP017934 vhCDR1
SYGMS

SEQ ID NO: 6357 - protein, 17 aa, Artificial Sequence
  Description of Artificial Sequence: Synthetic peptide
  XENP017934 vhCDR2
TISGGGRYTYYPDSVKG

SEQ ID NO: 6358 - protein, 8 aa, Artificial Sequence
  Description of Artificial Sequence: Synthetic peptide
  XENP017934 vhCDR3
YYDSSFDY

SEQ ID NO: 6359 - protein, 11 aa, Artificial Sequence
  Description of Artificial Sequence: Synthetic peptide
  XENP017934 vlCDR1
RASQDVGTAVA

SEQ ID NO: 6360 - protein, 7 aa, Artificial Sequence
  Description of Artificial Sequence: Synthetic peptide
  XENP017934 vlCDR2
WASTRHT

SEQ ID NO: 6361 - protein, 9 aa, Artificial Sequence
  Description of Artificial Sequence: Synthetic peptide
  XENP017934 vlCDR3
QHYSIYPWT

SEQ ID NO: 6362 - protein, 249 aa, Artificial Sequence
  Description of Artificial Sequence: Synthetic polypeptide
  XENP018493 1G6_H1.1_L1_scFv(GKPGS)4
QVQLVESGGGLVKPGGSLRLSCAASGFTFSNYWMNWVRQAPGKGLEWVGEIRLKSNNYATHYAEPVKGRFTISRDDSKSTVYLQMNSLKTEDTAVYYCTRYYGNYGGYFDVWGAGTLVTVSSGKPGSGKPGSGKPGSGKPGSSIVMTQSPATLSVSPGERATLSCRASQSVSNDVAWYQQKPGQSPRLLINYASHRYTGVPDRFTGSGYGTEFTLTISSLQSEDFAVYFCQQDYSSPRTFGGGTKVEIK

SEQ ID NO: 6363 - protein, 122 aa, Artificial Sequence
  Description of Artificial Sequence: Synthetic polypeptide
  VH of XENP018493
QVQLVESGGGLVKPGGSLRLSCAASGFTFSNYWMNWVRQAPGKGLEWVGEIRLKSNNYATHYAEPVKGRFTISRDDSKSTVYLQMNSLKTEDTAVYYCTRYYGNYGGYFDVWGAGTLVTVSS

SEQ ID NO: 6364 - protein, 107 aa, Artificial Sequence; identical to SEQ ID NO: 6247
  Description of Artificial Sequence: Synthetic polypeptide
  VL of XENP018493

SEQ ID NO: 6365 - protein, 5 aa, Artificial Sequence
  Description of Artificial Sequence: Synthetic peptide
  XENP018493 vhCDR1
NYWMN

SEQ ID NO: 6366 - protein, 19 aa, Artificial Sequence
  Description of Artificial Sequence: Synthetic peptide
  XENP018493 vhCDR2
EIRLKSNNYATHYAEPVKG

SEQ ID NO: 6367 - protein, 11 aa, Artificial Sequence
  Description of Artificial Sequence: Synthetic peptide
  XENP018493 vhCDR3
YYGNYGGYFDV

SEQ ID NO: 6368 - protein, 11 aa, Artificial Sequence
  Description of Artificial Sequence: Synthetic peptide
  XENP018493 vlCDR1
RASQSVSNDVA

SEQ ID NO: 6369 - protein, 7 aa, Artificial Sequence
  Description of Artificial Sequence: Synthetic peptide
  XENP018493 vlCDR2
YASHRYT

SEQ ID NO: 6370 - protein, 9 aa, Artificial Sequence
  Description of Artificial Sequence: Synthetic peptide
  XENP018493 vlCDR3
QQDYSSPRT

SEQ ID NO: 6371 - protein, 249 aa, Artificial Sequence
  Description of Artificial Sequence: Synthetic polypeptide
  XENP018494 1G6_H1.2_L1_scFv(GKPGS)4
EVKLVESGGGLVKPGGSLRLSCAASGFTFSNYWMNWVRQAPGKGLEWVGEIRLKSNNYATHYAEPVKGRFTISRDDSKSTVYLQMNSLKTEDTAVYYCTRYYGNYGGYFDVWGAGTLVTVSSGKPGSGKPGSGKPGSGKPGSSIVMTQSPATLSVSPGERATLSCRASQSVSNDVAWYQQKPGQSPRLLINYASHRYTGVPDRFTGSGYGTEFTLTISSLQSEDFAVYFCQQDYSSPRTFGGGTKVEIK

SEQ ID NO: 6372 - protein, 122 aa, Artificial Sequence
  Description of Artificial Sequence: Synthetic polypeptide
  VH of XENP018494
EVKLVESGGGLVKPGGSLRLSCAASGFTFSNYWMNWVRQAPGKGLEWVGEIRLKSNNYATHYAEPVKGRFTISRDDSKSTVYLQMNSLKTEDTAVYYCTRYYGNYGGYFDVWGAGTLVTVSS

SEQ ID NO: 6373 - protein, 107 aa, Artificial Sequence; identical to SEQ ID NO: 6247
  Description of Artificial Sequence: Synthetic polypeptide
  VL of XENP018494

SEQ ID NO: 6374 - protein, 5 aa, Artificial Sequence
  Description of Artificial Sequence: Synthetic peptide
  XENP018494 vhCDR1
NYWMN

SEQ ID NO: 6375 - protein, 19 aa, Artificial Sequence
  Description of Artificial Sequence: Synthetic peptide
  XENP018494 vhCDR2
EIRLKSNNYATHYAEPVKG

SEQ ID NO: 6376 - protein, 11 aa, Artificial Sequence
  Description of Artificial Sequence: Synthetic peptide
  XENP018494 vhCDR3
YYGNYGGYFDV

SEQ ID NO: 6377 - protein, 11 aa, Artificial Sequence
  Description of Artificial Sequence: Synthetic peptide
  XENP018494 vlCDR1
RASQSVSNDVA

SEQ ID NO: 6378 - protein, 7 aa, Artificial Sequence
  Description of Artificial Sequence: Synthetic peptide
  XENP018494 vlCDR2
YASHRYT

SEQ ID NO: 6379 - protein, 9 aa, Artificial Sequence
  Description of Artificial Sequence: Synthetic peptide
  XENP018494 vlCDR3
QQDYSSPRT

SEQ ID NO: 6380 - protein, 249 aa, Artificial Sequence
  Description of Artificial Sequence: Synthetic polypeptide
  XENP018495 1G6_H1.3_L1_scFv(GKPGS)4
EVQLEESGGGLVKPGGSLRLSCAASGFTFSNYWMNWVRQAPGKGLEWVGEIRLKSNNYATHYAEPVKGRFTISRDDSKSTVYLQMNSLKTEDTAVYYCTRYYGNYGGYFDVWGAGTLVTVSSGKPGSGKPGSGKPGSGKPGSSIVMTQSPATLSVSPGERATLSCRASQSVSNDVAWYQQKPGQSPRLLINYASHRYTGVPDRFTGSGYGTEFTLTISSLQSEDFAVYFCQQDYSSPRTFGGGTKVEIK

SEQ ID NO: 6381 - protein, 122 aa, Artificial Sequence
  Description of Artificial Sequence: Synthetic polypeptide
  VH of XENP018495
EVQLEESGGGLVKPGGSLRLSCAASGFTFSNYWMNWVRQAPGKGLEWVGEIRLKSNNYATHYAEPVKGRFTISRDDSKSTVYLQMNSLKTEDTAVYYCTRYYGNYGGYFDVWGAGTLVTVSS

SEQ ID NO: 6382 - protein, 107 aa, Artificial Sequence; identical to SEQ ID NO: 6247
  Description of Artificial Sequence: Synthetic polypeptide
  VL of XENP018495

SEQ ID NO: 6383 - protein, 5 aa, Artificial Sequence
  Description of Artificial Sequence: Synthetic peptide
  XENP018495 vhCDR1
NYWMN

SEQ ID NO: 6384 - protein, 19 aa, Artificial Sequence
  Description of Artificial Sequence: Synthetic peptide
  XENP018495 vhCDR2
EIRLKSNNYATHYAEPVKG

SEQ ID NO: 6385 - protein, 11 aa, Artificial Sequence
  Description of Artificial Sequence: Synthetic peptide
  XENP018495 vhCDR3
YYGNYGGYFDV

SEQ ID NO: 6386 - protein, 11 aa, Artificial Sequence
  Description of Artificial Sequence: Synthetic peptide
  XENP018495 vlCDR1
RASQSVSNDVA

SEQ ID NO: 6387 - protein, 7 aa, Artificial Sequence
  Description of Artificial Sequence: Synthetic peptide
  XENP018495 vlCDR2
YASHRYT

SEQ ID NO: 6388 - protein, 9 aa, Artificial Sequence
  Description of Artificial Sequence: Synthetic peptide
  XENP018495 vlCDR3
QQDYSSPRT

SEQ ID NO: 6389 - protein, 249 aa, Artificial Sequence
  Description of Artificial Sequence: Synthetic polypeptide
  XENP018496 1G6_H1.4_L1_scFv(GKPGS)4
EVQLVESGGGLVQPGGSLRLSCAASGFTFSNYWMNWVRQAPGKGLEWVGEIRLKSNNYATHYAEPVKGRFTISRDDSKSTVYLQMNSLKTEDTAVYYCTRYYGNYGGYFDVWGAGTLVTVSSGKPGSGKPGSGKPGSGKPGSSIVMTQSPATLSVSPGERATLSCRASQSVSNDVAWYQQKPGQSPRLLINYASHRYTGVPDRFTGSGYGTEFTLTISSLQSEDFAVYFCQQDYSSPRTFGGGTKVEIK

SEQ ID NO: 6390 - protein, 122 aa, Artificial Sequence
  Description of Artificial Sequence: Synthetic polypeptide
  VH of XENP018496
EVQLVESGGGLVQPGGSLRLSCAASGFTFSNYWMNWVRQAPGKGLEWVGEIRLKSNNYATHYAEPVKGRFTISRDDSKSTVYLQMNSLKTEDTAVYYCTRYYGNYGGYFDVWGAGTLVTVSS

SEQ ID NO: 6391 - protein, 107 aa, Artificial Sequence; identical to SEQ ID NO: 6247
  Description of Artificial Sequence: Synthetic polypeptide
  VL of XENP018496

SEQ ID NO: 6392 - protein, 5 aa, Artificial Sequence
  Description of Artificial Sequence: Synthetic peptide
  XENP018496 vhCDR1
NYWMN

SEQ ID NO: 6393 - protein, 19 aa, Artificial Sequence
  Description of Artificial Sequence: Synthetic peptide
  XENP018496 vhCDR2
EIRLKSNNYATHYAEPVKG

SEQ ID NO: 6394 - protein, 11 aa, Artificial Sequence
  Description of Artificial Sequence: Synthetic peptide
  XENP018496 vhCDR3
YYGNYGGYFDV

SEQ ID NO: 6395 - protein, 11 aa, Artificial Sequence
  Description of Artificial Sequence: Synthetic peptide
  XENP018496 vlCDR1
RASQSVSNDVA

SEQ ID NO: 6396 - protein, 7 aa, Artificial Sequence
  Description of Artificial Sequence: Synthetic peptide
  XENP018496 vlCDR2
YASHRYT

SEQ ID NO: 6397 - protein, 9 aa, Artificial Sequence
  Description of Artificial Sequence: Synthetic peptide
  XENP018496 vlCDR3
QQDYSSPRT

SEQ ID NO: 6398 - protein, 249 aa, Artificial Sequence
  Description of Artificial Sequence: Synthetic polypeptide
  XENP018501 1G6_H1.5_L1_scFv(GKPGS)4
EVQLVESGGGLVRPGGSLRLSCAASGFTFSNYWMNWVRQAPGKGLEWVGEIRLKSNNYATHYAEPVKGRFTISRDDSKSTVYLQMNSLKTEDTAVYYCTRYYGNYGGYFDVWGAGTLVTVSSGKPGSGKPGSGKPGSGKPGSSIVMTQSPATLSVSPGERATLSCRASQSVSNDVAWYQQKPGQSPRLLINYASHRYTGVPDRFTGSGYGTEFTLTISSLQSEDFAVYFCQQDYSSPRTFGGGTKVEIK

SEQ ID NO: 6399 - protein, 122 aa, Artificial Sequence
  Description of Artificial Sequence: Synthetic polypeptide
  VH of XENP018501
EVQLVESGGGLVRPGGSLRLSCAASGFTFSNYWMNWVRQAPGKGLEWVGEIRLKSNNYATHYAEPVKGRFTISRDDSKSTVYLQMNSLKTEDTAVYYCTRYYGNYGGYFDVWGAGTLVTVSS

SEQ ID NO: 6400 - protein, 107 aa, Artificial Sequence; identical to SEQ ID NO: 6247
  Description of Artificial Sequence: Synthetic polypeptide
  VL of XENP018501

SEQ ID NO: 6401 - protein, 5 aa, Artificial Sequence
  Description of Artificial Sequence: Synthetic peptide
  XENP018501 vhCDR1
NYWMN

SEQ ID NO: 6402 - protein, 19 aa, Artificial Sequence
  Description of Artificial Sequence: Synthetic peptide
  XENP018501 vhCDR2
EIRLKSNNYATHYAEPVKG

SEQ ID NO: 6403 - protein, 11 aa, Artificial Sequence
  Description of Artificial Sequence: Synthetic peptide
  XENP018501 vhCDR3
YYGNYGGYFDV

SEQ ID NO: 6404 - protein, 11 aa, Artificial Sequence
  Description of Artificial Sequence: Synthetic peptide
  XENP018501 vlCDR1
RASQSVSNDVA

SEQ ID NO: 6405 - protein, 7 aa, Artificial Sequence
  Description of Artificial Sequence: Synthetic peptide
  XENP018501 vlCDR2
YASHRYT

SEQ ID NO: 6406 - protein, 9 aa, Artificial Sequence
  Description of Artificial Sequence: Synthetic peptide
  XENP018501 vlCDR3
QQDYSSPRT

SEQ ID NO: 6407 - protein, 249 aa, Artificial Sequence
  Description of Artificial Sequence: Synthetic polypeptide
  XENP018502 1G6_H1.6_L1_scFv(GKPGS)4
EVQLVESGGGLVKPGGSMRLSCAASGFTFSNYWMNWVRQAPGKGLEWVGEIRLKSNNYATHYAEPVKGRFTISRDDSKSTVYLQMNSLKTEDTAVYYCTRYYGNYGGYFDVWGAGTLVTVSSGKPGSGKPGSGKPGSGKPGSSIVMTQSPATLSVSPGERATLSCRASQSVSNDVAWYQQKPGQSPRLLINYASHRYTGVPDRFTGSGYGTEFTLTISSLQSEDFAVYFCQQDYSSPRTFGGGTKVEIK

SEQ ID NO: 6408 - protein, 122 aa, Artificial Sequence
  Description of Artificial Sequence: Synthetic polypeptide
  VH of XENP018502
EVQLVESGGGLVKPGGSMRLSCAASGFTFSNYWMNWVRQAPGKGLEWVGEIRLKSNNYATHYAEPVKGRFTISRDDSKSTVYLQMNSLKTEDTAVYYCTRYYGNYGGYFDVWGAGTLVTVSS

SEQ ID NO: 6409 - protein, 107 aa, Artificial Sequence; identical to SEQ ID NO: 6247
  Description of Artificial Sequence: Synthetic polypeptide
  VL of XENP018502

SEQ ID NO: 6410 - protein, 5 aa, Artificial Sequence
  Description of Artificial Sequence: Synthetic peptide
  XENP018502 vhCDR1
NYWMN

SEQ ID NO: 6411 - protein, 19 aa, Artificial Sequence
  Description of Artificial Sequence: Synthetic peptide
  XENP018502 vhCDR2
EIRLKSNNYATHYAEPVKG

SEQ ID NO: 6412 - protein, 11 aa, Artificial Sequence
  Description of Artificial Sequence: Synthetic peptide
  XENP018502 vhCDR3
YYGNYGGYFDV

SEQ ID NO: 6413 - protein, 11 aa, Artificial Sequence
  Description of Artificial Sequence: Synthetic peptide
  XENP018502 vlCDR1
RASQSVSNDVA

SEQ ID NO: 6414 - protein, 7 aa, Artificial Sequence
  Description of Artificial Sequence: Synthetic peptide
  XENP018502 vlCDR2
YASHRYT

SEQ ID NO: 6415 - protein, 9 aa, Artificial Sequence
  Description of Artificial Sequence: Synthetic peptide
  XENP018502 vlCDR3
QQDYSSPRT

SEQ ID NO: 6416 - protein, 249 aa, Artificial Sequence
  Description of Artificial Sequence: Synthetic polypeptide
  XENP018503 1G6_H1.7_L1_scFv(GKPGS)4
EVQLVESGGGLVKPGGSLKLSCAASGFTFSNYWMNWVRQAPGKGLEWVGEIRLKSNNYATHYAEPVKGRFTISRDDSKSTVYLQMNSLKTEDTAVYYCTRYYGNYGGYFDVWGAGTLVTVSSGKPGSGKPGSGKPGSGKPGSSIVMTQSPATLSVSPGERATLSCRASQSVSNDVAWYQQKPGQSPRLLINYASHRYTGVPDRFTGSGYGTEFTLTISSLQSEDFAVYFCQQDYSSPRTFGGGTKVEIK

SEQ ID NO: 6417 - protein, 122 aa, Artificial Sequence
  Description of Artificial Sequence: Synthetic polypeptide
  VH of XENP018503
EVQLVESGGGLVKPGGSLKLSCAASGFTFSNYWMNWVRQAPGKGLEWVGEIRLKSNNYATHYAEPVKGRFTISRDDSKSTVYLQMNSLKTEDTAVYYCTRYYGNYGGYFDVWGAGTLVTVSS

SEQ ID NO: 6418 - protein, 107 aa, Artificial Sequence; identical to SEQ ID NO: 6247
  Description of Artificial Sequence: Synthetic polypeptide
  VL of XENP018503

SEQ ID NO: 6419 - protein, 5 aa, Artificial Sequence
  Description of Artificial Sequence: Synthetic peptide
  XENP018503 vhCDR1
NYWMN

SEQ ID NO: 6420 - protein, 19 aa, Artificial Sequence
  Description of Artificial Sequence: Synthetic peptide
  XENP018503 vhCDR2
EIRLKSNNYATHYAEPVKG

SEQ ID NO: 6421 - protein, 11 aa, Artificial Sequence
  Description of Artificial Sequence: Synthetic peptide
  XENP018503 vhCDR3
YYGNYGGYFDV

SEQ ID NO: 6422 - protein, 11 aa, Artificial Sequence
  Description of Artificial Sequence: Synthetic peptide
  XENP018503 vlCDR1
RASQSVSNDVA

SEQ ID NO: 6423 - protein, 7 aa, Artificial Sequence
  Description of Artificial Sequence: Synthetic peptide
  XENP018503 vlCDR2
YASHRYT

SEQ ID NO: 6424 - protein, 9 aa, Artificial Sequence
  Description of Artificial Sequence: Synthetic peptide
  XENP018503 vlCDR3
QQDYSSPRT

SEQ ID NO: 6425 - protein, 249 aa, Artificial Sequence
  Description of Artificial Sequence: Synthetic polypeptide
  XENP018504 1G6_H1.8_L1_scFv(GKPGS)4
EVQLVESGGGLVKPGGSLRLSCVASGFTFSNYWMNWVRQAPGKGLEWVGEIRLKSNNYATHYAEPVKGRFTISRDDSKSTVYLQMNSLKTEDTAVYYCTRYYGNYGGYFDVWGAGTLVTVSSGKPGSGKPGSGKPGSGKPGSSIVMTQSPATLSVSPGERATLSCRASQSVSNDVAWYQQKPGQSPRLLINYASHRYTGVPDRFTGSGYGTEFTLTISSLQSEDFAVYFCQQDYSSPRTFGGGTKVEIK

SEQ ID NO: 6426 - protein, 122 aa, Artificial Sequence
  Description of Artificial Sequence: Synthetic polypeptide
  VH of XENP018504
EVQLVESGGGLVKPGGSLRLSCVASGFTFSNYWMNWVRQAPGKGLEWVGEIRLKSNNYATHYAEPVKGRFTISRDDSKSTVYLQMNSLKTEDTAVYYCTRYYGNYGGYFDVWGAGTLVTVSS

SEQ ID NO: 6427 - protein, 107 aa, Artificial Sequence; identical to SEQ ID NO: 6247
  Description of Artificial Sequence: Synthetic polypeptide
  VL of XENP018504

SEQ ID NO: 6428 - protein, 5 aa, Artificial Sequence
  Description of Artificial Sequence: Synthetic peptide
  XENP018504 vhCDR1
NYWMN

SEQ ID NO: 6429 - protein, 19 aa, Artificial Sequence
  Description of Artificial Sequence: Synthetic peptide
  XENP018504 vhCDR2
EIRLKSNNYATHYAEPVKG

SEQ ID NO: 6430 - protein, 11 aa, Artificial Sequence
  Description of Artificial Sequence: Synthetic peptide
  XENP018504 vhCDR3
YYGNYGGYFDV

SEQ ID NO: 6431 - protein, 11 aa, Artificial Sequence
  Description of Artificial Sequence: Synthetic peptide
  XENP018504 vlCDR1
RASQSVSNDVA

SEQ ID NO: 6432 - protein, 7 aa, Artificial Sequence
  Description of Artificial Sequence: Synthetic peptide
  XENP018504 vlCDR2
YASHRYT

SEQ ID NO: 6433 - protein, 9 aa, Artificial Sequence
  Description of Artificial Sequence: Synthetic peptide
  XENP018504 vlCDR3
QQDYSSPRT

SEQ ID NO: 6434 - protein, 249 aa, Artificial Sequence
  Description of Artificial Sequence: Synthetic polypeptide
  XENP018505 1G6_H1.9_L1_scFv(GKPGS)4
EVQLVESGGGLVKPGGSLRLSCAASGFTVSNYWMNWVRQAPGKGLEWVGEIRLKSNNYATHYAEPVKGRFTISRDDSKSTVYLQMNSLKTEDTAVYYCTRYYGNYGGYFDVWGAGTLVTVSSGKPGSGKPGSGKPGSGKPGSSIVMTQSPATLSVSPGERATLSCRASQSVSNDVAWYQQKPGQSPRLLINYASHRYTGVPDRFTGSGYGTEFTLTISSLQSEDFAVYFCQQDYSSPRTFGGGTKVEIK

SEQ ID NO: 6435 - protein, 122 aa, Artificial Sequence
  Description of Artificial Sequence: Synthetic polypeptide
  VH of XENP018505
EVQLVESGGGLVKPGGSLRLSCAASGFTVSNYWMNWVRQAPGKGLEWVGEIRLKSNNYATHYAEPVKGRFTISRDDSKSTVYLQMNSLKTEDTAVYYCTRYYGNYGGYFDVWGAGTLVTVSS

SEQ ID NO: 6436 - protein, 107 aa, Artificial Sequence; identical to SEQ ID NO: 6247
  Description of Artificial Sequence: Synthetic polypeptide
  VL of XENP018505

SEQ ID NO: 6437 - protein, 5 aa, Artificial Sequence
  Description of Artificial Sequence: Synthetic peptide
  XENP018505 vhCDR1
NYWMN

SEQ ID NO: 6438 - protein, 19 aa, Artificial Sequence
  Description of Artificial Sequence: Synthetic peptide
  XENP018505 vhCDR2
EIRLKSNNYATHYAEPVKG

SEQ ID NO: 6439 - protein, 11 aa, Artificial Sequence
  Description of Artificial Sequence: Synthetic peptide
  XENP018505 vhCDR3
YYGNYGGYFDV

SEQ ID NO: 6440 - protein, 11 aa, Artificial Sequence
  Description of Artificial Sequence: Synthetic peptide
  XENP018505 vlCDR1
RASQSVSNDVA

SEQ ID NO: 6441 - protein, 7 aa, Artificial Sequence
  Description of Artificial Sequence: Synthetic peptide
  XENP018505 vlCDR2
YASHRYT

SEQ ID NO: 6442 - protein, 9 aa, Artificial Sequence
  Description of Artificial Sequence: Synthetic peptide
  XENP018505 vlCDR3
QQDYSSPRT

SEQ ID NO: 6443 - protein, 249 aa, Artificial Sequence
  Description of Artificial Sequence: Synthetic polypeptide
  XENP018506 1G6_H1.10_L1_scFv(GKPGS)4
EVQLVESGGGLVKPGGSLRLSCAASGFTFTNYWMNWVRQAPGKGLEWVGEIRLKSNNYATHYAEPVKGRFTISRDDSKSTVYLQMNSLKTEDTAVYYCTRYYGNYGGYFDVWGAGTLVTVSSGKPGSGKPGSGKPGSGKPGSSIVMTQSPATLSVSPGERATLSCRASQSVSNDVAWYQQKPGQSPRLLINYASHRYTGVPDRFTGSGYGTEFTLTISSLQSEDFAVYFCQQDYSSPRTFGGGTKVEIK

SEQ ID NO: 6444 - protein, 122 aa, Artificial Sequence
  Description of Artificial Sequence: Synthetic polypeptide
  VH of XENP018506
EVQLVESGGGLVKPGGSLRLSCAASGFTFTNYWMNWVRQAPGKGLEWVGEIRLKSNNYATHYAEPVKGRFTISRDDSKSTVYLQMNSLKTEDTAVYYCTRYYGNYGGYFDVWGAGTLVTVSS

SEQ ID NO: 6445 - protein, 107 aa, Artificial Sequence; identical to SEQ ID NO: 6247
  Description of Artificial Sequence: Synthetic polypeptide
  VL of XENP018506

SEQ ID NO: 6446 - protein, 5 aa, Artificial Sequence
  Description of Artificial Sequence: Synthetic peptide
  XENP018506 vhCDR1
NYWMN

SEQ ID NO: 6447 - protein, 19 aa, Artificial Sequence
  Description of Artificial Sequence: Synthetic peptide
  XENP018506 vhCDR2
EIRLKSNNYATHYAEPVKG

SEQ ID NO: 6448 - protein, 11 aa, Artificial Sequence
  Description of Artificial Sequence: Synthetic peptide
  XENP018506 vhCDR3
YYGNYGGYFDV

SEQ ID NO: 6449 - protein, 11 aa, Artificial Sequence
  Description of Artificial Sequence: Synthetic peptide
  XENP018506 vlCDR1
RASQSVSNDVA

SEQ ID NO: 6450 - protein, 7 aa, Artificial Sequence
  Description of Artificial Sequence: Synthetic peptide
  XENP018506 vlCDR2
YASHRYT

SEQ ID NO: 6451 - protein, 9 aa, Artificial Sequence
  Description of Artificial Sequence: Synthetic peptide
  XENP018506 vlCDR3
QQDYSSPRT

SEQ ID NO: 6452 - protein, 249 aa, Artificial Sequence
  Description of Artificial Sequence: Synthetic polypeptide
  XENP018507 1G6_H1.11_L1_scFv(GKPGS)4
EVQLVESGGGLVKPGGSLRLSCAASGFTFANYWMNWVRQAPGKGLEWVGEIRLKSNNYATHYAEPVKGRFTISRDDSKSTVYLQMNSLKTEDTAVYYCTRYYGNYGGYFDVWGAGTLVTVSSGKPGSGKPGSGKPGSGKPGSSIVMTQSPATLSVSPGERATLSCRASQSVSNDVAWYQQKPGQSPRLLINYASHRYTGVPDRFTGSGYGTEFTLTISSLQSEDFAVYFCQQDYSSPRTFGGGTKVEIK

SEQ ID NO: 6453 - protein, 122 aa, Artificial Sequence
  Description of Artificial Sequence: Synthetic polypeptide
  VH of XENP018507
EVQLVESGGGLVKPGGSLRLSCAASGFTFANYWMNWVRQAPGKGLEWVGEIRLKSNNYATHYAEPVKGRFTISRDDSKSTVYLQMNSLKTEDTAVYYCTRYYGNYGGYFDVWGAGTLVTVSS

SEQ ID NO: 6454 - protein, 107 aa, Artificial Sequence; identical to SEQ ID NO: 6247
  Description of Artificial Sequence: Synthetic polypeptide
  VL of XENP018507

SEQ ID NO: 6455 - protein, 5 aa, Artificial Sequence
  Description of Artificial Sequence: Synthetic peptide
  XENP018507 vhCDR1
NYWMN

SEQ ID NO: 6456 - protein, 19 aa, Artificial Sequence
  Description of Artificial Sequence: Synthetic peptide
  XENP018507 vhCDR2
EIRLKSNNYATHYAEPVKG

SEQ ID NO: 6457 - protein, 11 aa, Artificial Sequence
  Description of Artificial Sequence: Synthetic peptide
  XENP018507 vhCDR3
YYGNYGGYFDV

SEQ ID NO: 6458 - protein, 11 aa, Artificial Sequence
  Description of Artificial Sequence: Synthetic peptide
  XENP018507 vlCDR1
RASQSVSNDVA

SEQ ID NO: 6459 - protein, 7 aa, Artificial Sequence
  Description of Artificial Sequence: Synthetic peptide
  XENP018507 vlCDR2
YASHRYT

SEQ ID NO: 6460 - protein, 9 aa, Artificial Sequence
  Description of Artificial Sequence: Synthetic peptide
  XENP018507 vlCDR3
QQDYSSPRT

SEQ ID NO: 6461 - protein, 249 aa, Artificial Sequence
  Description of Artificial Sequence: Synthetic polypeptide
  XENP018508 1G6_H1.12_L1_scFv(GKPGS)4
EVQLVESGGGLVKPGGSLRLSCAASGFTFQNYWMNWVRQAPGKGLEWVGEIRLKSNNYATHYAEPVKGRFTISRDDSKSTVYLQMNSLKTEDTAVYYCTRYYGNYGGYFDVWGAGTLVTVSSGKPGSGKPGSGKPGSGKPGSSIVMTQSPATLSVSPGERATLSCRASQSVSNDVAWYQQKPGQSPRLLINYASHRYTGVPDRFTGSGYGTEFTLTISSLQSEDFAVYFCQQDYSSPRTFGGGTKVEIK

SEQ ID NO: 6462 - protein, 122 aa, Artificial Sequence
  Description of Artificial Sequence: Synthetic polypeptide
  VH of XENP018508
EVQLVESGGGLVKPGGSLRLSCAASGFTFQNYWMNWVRQAPGKGLEWVGEIRLKSNNYATHYAEPVKGRFTISRDDSKSTVYLQMNSLKTEDTAVYYCTRYYGNYGGYFDVWGAGTLVTVSS

SEQ ID NO: 6463 - protein, 107 aa, Artificial Sequence; identical to SEQ ID NO: 6247
  Description of Artificial Sequence: Synthetic polypeptide
  VL of XENP018508

SEQ ID NO: 6464 - protein, 5 aa, Artificial Sequence
  Description of Artificial Sequence: Synthetic peptide
  XENP018508 vhCDR1
NYWMN

SEQ ID NO: 6465 - protein, 19 aa, Artificial Sequence
  Description of Artificial Sequence: Synthetic peptide
  XENP018508 vhCDR2
EIRLKSNNYATHYAEPVKG

SEQ ID NO: 6466 - protein, 11 aa, Artificial Sequence
  Description of Artificial Sequence: Synthetic peptide
  XENP018508 vhCDR3
YYGNYGGYFDV

SEQ ID NO: 6467 - protein, 11 aa, Artificial Sequence
  Description of Artificial Sequence: Synthetic peptide
  XENP018508 vlCDR1
RASQSVSNDVA

SEQ ID NO: 6468 - protein, 7 aa, Artificial Sequence
  Description of Artificial Sequence: Synthetic peptide
  XENP018508 vlCDR2
YASHRYT

SEQ ID NO: 6469 - protein, 9 aa, Artificial Sequence
  Description of Artificial Sequence: Synthetic peptide
  XENP018508 vlCDR3
QQDYSSPRT

SEQ ID NO: 6470 - protein, 249 aa, Artificial Sequence
  Description of Artificial Sequence: Synthetic polypeptide
  XENP018509 1G6_H1.13_L1_scFv(GKPGS)4
EVQLVESGGGLVKPGGSLRLSCAASGFTFGNYWMNWVRQAPGKGLEWVGEIRLKSNNYATHYAEPVKGRFTISRDDSKSTVYLQMNSLKTEDTAVYYCTRYYGNYGGYFDVWGAGTLVTVSSGKPGSGKPGSGKPGSGKPGSSIVMTQSPATLSVSPGERATLSCRASQSVSNDVAWYQQKPGQSPRLLINYASHRYTGVPDRFTGSGYGTEFTLTISSLQSEDFAVYFCQQDYSSPRTFGGGTKVEIK

SEQ ID NO: 6471 - protein, 122 aa, Artificial Sequence
  Description of Artificial Sequence: Synthetic polypeptide
  VH of XENP018509
EVQLVESGGGLVKPGGSLRLSCAASGFTFGNYWMNWVRQAPGKGLEWVGEIRLKSNNYATHYAEPVKGRFTISRDDSKSTVYLQMNSLKTEDTAVYYCTRYYGNYGGYFDVWGAGTLVTVSS

SEQ ID NO: 6472 - protein, 107 aa, Artificial Sequence; identical to SEQ ID NO: 6247
  Description of Artificial Sequence: Synthetic polypeptide
  VL of XENP018509

SEQ ID NO: 6473 - protein, 5 aa, Artificial Sequence
  Description of Artificial Sequence: Synthetic peptide
  XENP018509 vhCDR1
NYWMN

SEQ ID NO: 6474 - protein, 19 aa, Artificial Sequence
  Description of Artificial Sequence: Synthetic peptide
  XENP018509 vhCDR2
EIRLKSNNYATHYAEPVKG

SEQ ID NO: 6475 - protein, 11 aa, Artificial Sequence
  Description of Artificial Sequence: Synthetic peptide
  XENP018509 vhCDR3
YYGNYGGYFDV

SEQ ID NO: 6476 - protein, 11 aa, Artificial Sequence
  Description of Artificial Sequence: Synthetic peptide
  XENP018509 vlCDR1
RASQSVSNDVA

SEQ ID NO: 6477 - protein, 7 aa, Artificial Sequence
  Description of Artificial Sequence: Synthetic peptide
  XENP018509 vlCDR2
YASHRYT

SEQ ID NO: 6478 - protein, 9 aa, Artificial Sequence
  Description of Artificial Sequence: Synthetic peptide
  XENP018509 vlCDR3
QQDYSSPRT

SEQ ID NO: 6479 - protein, 249 aa, Artificial Sequence
  Description of Artificial Sequence: Synthetic polypeptide
  XENP018510 1G6_H1.14_L1_scFv(GKPGS)4
EVQLVESGGGLVKPGGSLRLSCAASGFTFVNYWMNWVRQAPGKGLEWVGEIRLKSNNYATHYAEPVKGRFTISRDDSKSTVYLQMNSLKTEDTAVYYCTRYYGNYGGYFDVWGAGTLVTVSSGKPGSGKPGSGKPGSGKPGSSIVMTQSPATLSVSPGERATLSCRASQSVSNDVAWYQQKPGQSPRLLINYASHRYTGVPDRFTGSGYGTEFTLTISSLQSEDFAVYFCQQDYSSPRTFGGGTKVEIK

SEQ ID NO: 6480 - protein, 122 aa, Artificial Sequence
  Description of Artificial Sequence: Synthetic polypeptide
  VH of XENP018510
EVQLVESGGGLVKPGGSLRLSCAASGFTFVNYWMNWVRQAPGKGLEWVGEIRLKSNNYATHYAEPVKGRFTISRDDSKSTVYLQMNSLKTEDTAVYYCTRYYGNYGGYFDVWGAGTLVTVSS

SEQ ID NO: 6481 - protein, 107 aa, Artificial Sequence; identical to SEQ ID NO: 6247
  Description of Artificial Sequence: Synthetic polypeptide
  VL of XENP018510

SEQ ID NO: 6482 - protein, 5 aa, Artificial Sequence
  Description of Artificial Sequence: Synthetic peptide
  XENP018510 vhCDR1
NYWMN

SEQ ID NO: 6483 - protein, 19 aa, Artificial Sequence
  Description of Artificial Sequence: Synthetic peptide
  XENP018510 vhCDR2
EIRLKSNNYATHYAEPVKG

SEQ ID NO: 6484 - protein, 11 aa, Artificial Sequence
  Description of Artificial Sequence: Synthetic peptide
  XENP018510 vhCDR3
YYGNYGGYFDV

SEQ ID NO: 6485 - protein, 11 aa, Artificial Sequence
  Description of Artificial Sequence: Synthetic peptide
  XENP018510 vlCDR1
RASQSVSNDVA

SEQ ID NO: 6486 - protein, 7 aa, Artificial Sequence
  Description of Artificial Sequence: Synthetic peptide
  XENP018510 vlCDR2
YASHRYT

SEQ ID NO: 6487 - protein, 9 aa, Artificial Sequence
  Description of Artificial Sequence: Synthetic peptide
  XENP018510 vlCDR3
QQDYSSPRT

SEQ ID NO: 6488 - protein, 249 aa, Artificial Sequence
  Description of Artificial Sequence: Synthetic polypeptide
  XENP018511 1G6_H1.15_L1_scFv(GKPGS)4
EVQLVESGGGLVKPGGSLRLSCAASGFTFHNYWMNWVRQAPGKGLEWVGEIRLKSNNYATHYAEPVKGRFTISRDDSKSTVYLQMNSLKTEDTAVYYCTRYYGNYGGYFDVWGAGTLVTVSSGKPGSGKPGSGKPGSGKPGSSIVMTQSPATLSVSPGERATLSCRASQSVSNDVAWYQQKPGQSPRLLINYASHRYTGVPDRFTGSGYGTEFTLTISSLQSEDFAVYFCQQDYSSPRTFGGGTKVEIK

SEQ ID NO: 6489 - protein, 122 aa, Artificial Sequence
  Description of Artificial Sequence: Synthetic polypeptide
  VH of XENP018511
EVQLVESGGGLVKPGGSLRLSCAASGFTFHNYWMNWVRQAPGKGLEWVGEIRLKSNNYATHYAEPVKGRFTISRDDSKSTVYLQMNSLKTEDTAVYYCTRYYGNYGGYFDVWGAGTLVTVSS

SEQ ID NO: 6490 - protein, 107 aa, Artificial Sequence; identical to SEQ ID NO: 6247
  Description of Artificial Sequence: Synthetic polypeptide
  VL of XENP018511

SEQ ID NO: 6491 - protein, 5 aa, Artificial Sequence
  Description of Artificial Sequence: Synthetic peptide
  XENP018511 vhCDR1
NYWMN

SEQ ID NO: 6492 - protein, 19 aa, Artificial Sequence
  Description of Artificial Sequence: Synthetic peptide
  XENP018511 vhCDR2
EIRLKSNNYATHYAEPVKG

SEQ ID NO: 6493 - protein, 11 aa, Artificial Sequence
  Description of Artificial Sequence: Synthetic peptide
  XENP018511 vhCDR3
YYGNYGGYFDV

SEQ ID NO: 6494 - protein, 11 aa, Artificial Sequence
  Description of Artificial Sequence: Synthetic peptide
  XENP018511 vlCDR1
RASQSVSNDVA

SEQ ID NO: 6495 - protein, 7 aa, Artificial Sequence
  Description of Artificial Sequence: Synthetic peptide
  XENP018511 vlCDR2
YASHRYT

SEQ ID NO: 6496 - protein, 9 aa, Artificial Sequence
  Description of Artificial Sequence: Synthetic peptide
  XENP018511 vlCDR3
QQDYSSPRT

SEQ ID NO: 6497 - protein, 249 aa, Artificial Sequence
  Description of Artificial Sequence: Synthetic polypeptide
  XENP018512 1G6_H1.16_L1_scFv(GKPGS)4
EVQLVESGGGLVKPGGSLRLSCAASGFTFDNYWMNWVRQAPGKGLEWVGEIRLKSNNYATHYAEPVKGRFTISRDDSKSTVYLQMNSLKTEDTAVYYCTRYYGNYGGYFDVWGAGTLVTVSSGKPGSGKPGSGKPGSGKPGSSIVMTQSPATLSVSPGERATLSCRASQSVSNDVAWYQQKPGQSPRLLINYASHRYTGVPDRFTGSGYGTEFTLTISSLQSEDFAVYFCQQDYSSPRTFGGGTKVEIK

SEQ ID NO: 6498 - protein, 122 aa, Artificial Sequence
  Description of Artificial Sequence: Synthetic polypeptide
  VH of XENP018512
EVQLVESGGGLVKPGGSLRLSCAASGFTFDNYWMNWVRQAPGKGLEWVGEIRLKSNNYATHYAEPVKGRFTISRDDSKSTVYLQMNSLKTEDTAVYYCTRYYGNYGGYFDVWGAGTLVTVSS

SEQ ID NO: 6499 - protein, 107 aa, Artificial Sequence; identical to SEQ ID NO: 6247
  Description of Artificial Sequence: Synthetic polypeptide
  VL of XENP018512

SEQ ID NO: 6500 - protein, 5 aa, Artificial Sequence
  Description of Artificial Sequence: Synthetic peptide
  XENP018512 vhCDR1
NYWMN

SEQ ID NO: 6501 - protein, 19 aa, Artificial Sequence
  Description of Artificial Sequence: Synthetic peptide
  XENP018512 vhCDR2
EIRLKSNNYATHYAEPVKG

SEQ ID NO: 6502 - protein, 11 aa, Artificial Sequence
  Description of Artificial Sequence: Synthetic peptide
  XENP018512 vhCDR3
YYGNYGGYFDV

SEQ ID NO: 6503 - protein, 11 aa, Artificial Sequence
  Description of Artificial Sequence: Synthetic peptide
  XENP018512 vlCDR1
RASQSVSNDVA

SEQ ID NO: 6504 - protein, 7 aa, Artificial Sequence
  Description of Artificial Sequence: Synthetic peptide
  XENP018512 vlCDR2
YASHRYT

SEQ ID NO: 6505 - protein, 9 aa, Artificial Sequence
  Description of Artificial Sequence: Synthetic peptide
  XENP018512 vlCDR3
QQDYSSPRT

SEQ ID NO: 6506 - protein, 249 aa, Artificial Sequence
  Description of Artificial Sequence: Synthetic polypeptide
  XENP018513 1G6_H1.17_L1_scFv(GKPGS)4
EVQLVESGGGLVKPGGSLRLSCAASGFTFKNYWMNWVRQAPGKGLEWVGEIRLKSNNYATHYAEPVKGRFTISRDDSKSTVYLQMNSLKTEDTAVYYCTRYYGNYGGYFDVWGAGTLVTVSSGKPGSGKPGSGKPGSGKPGSSIVMTQSPATLSVSPGERATLSCRASQSVSNDVAWYQQKPGQSPRLLINYASHRYTGVPDRFTGSGYGTEFTLTISSLQSEDFAVYFCQQDYSSPRTFGGGTKVEIK

SEQ ID NO: 6507 - protein, 122 aa, Artificial Sequence
  Description of Artificial Sequence: Synthetic polypeptide
  VH of XENP018513
EVQLVESGGGLVKPGGSLRLSCAASGFTFKNYWMNWVRQAPGKGLEWVGEIRLKSNNYATHYAEPVKGRFTISRDDSKSTVYLQMNSLKTEDTAVYYCTRYYGNYGGYFDVWGAGTLVTVSS

SEQ ID NO: 6508 - protein, 107 aa, Artificial Sequence; identical to SEQ ID NO: 6247
  Description of Artificial Sequence: Synthetic polypeptide
  VL of XENP018513

SEQ ID NO: 6509 - protein, 5 aa, Artificial Sequence
  Description of Artificial Sequence: Synthetic peptide
  XENP018513 vhCDR1
NYWMN

SEQ ID NO: 6510 - protein, 19 aa, Artificial Sequence
  Description of Artificial Sequence: Synthetic peptide
  XENP018513 vhCDR2
EIRLKSNNYATHYAEPVKG

SEQ ID NO: 6511 - protein, 11 aa, Artificial Sequence
  Description of Artificial Sequence: Synthetic peptide
  XENP018513 vhCDR3
YYGNYGGYFDV

SEQ ID NO: 6512 - protein, 11 aa, Artificial Sequence
  Description of Artificial Sequence: Synthetic peptide
  XENP018513 vlCDR1
RASQSVSNDVA

SEQ ID NO: 6513 - protein, 7 aa, Artificial Sequence
  Description of Artificial Sequence: Synthetic peptide
  XENP018513 vlCDR2
YASHRYT

SEQ ID NO: 6514 - protein, 9 aa, Artificial Sequence
  Description of Artificial Sequence: Synthetic peptide
  XENP018513 vlCDR3
QQDYSSPRT

SEQ ID NO: 6515 - protein, 249 aa, Artificial Sequence
  Description of Artificial Sequence: Synthetic polypeptide
  XENP018514 1G6_H1.18_L1_scFv(GKPGS)4
EVQLVESGGGLVKPGGSLRLSCAASGFTFYNYWMNWVRQAPGKGLEWVGEIRLKSNNYATHYAEPVKGRFTISRDDSKSTVYLQMNSLKTEDTAVYYCTRYYGNYGGYFDVWGAGTLVTVSSGKPGSGKPGSGKPGSGKPGSSIVMTQSPATLSVSPGERATLSCRASQSVSNDVAWYQQKPGQSPRLLINYASHRYTGVPDRFTGSGYGTEFTLTISSLQSEDFAVYFCQQDYSSPRTFGGGTKVEIK

SEQ ID NO: 6516 - protein, 122 aa, Artificial Sequence
  Description of Artificial Sequence: Synthetic polypeptide
  VH of XENP018514
EVQLVESGGGLVKPGGSLRLSCAASGFTFYNYWMNWVRQAPGKGLEWVGEIRLKSNNYATHYAEPVKGRFTISRDDSKSTVYLQMNSLKTEDTAVYYCTRYYGNYGGYFDVWGAGTLVTVSS

SEQ ID NO: 6517 - protein, 107 aa, Artificial Sequence; identical to SEQ ID NO: 6247
  Description of Artificial Sequence: Synthetic polypeptide
  VL of XENP018514

SEQ ID NO: 6518 - protein, 5 aa, Artificial Sequence
  Description of Artificial Sequence: Synthetic peptide
  XENP018514 vhCDR1
NYWMN

SEQ ID NO: 6519 - protein, 19 aa, Artificial Sequence
  Description of Artificial Sequence: Synthetic peptide
  XENP018514 vhCDR2
EIRLKSNNYATHYAEPVKG

SEQ ID NO: 6520 - protein, 11 aa, Artificial Sequence
  Description of Artificial Sequence: Synthetic peptide
  XENP018514 vhCDR3
YYGNYGGYFDV

SEQ ID NO: 6521 - protein, 11 aa, Artificial Sequence
  Description of Artificial Sequence: Synthetic peptide
  XENP018514 vlCDR1
RASQSVSNDVA

SEQ ID NO: 6522 - protein, 7 aa, Artificial Sequence
  Description of Artificial Sequence: Synthetic peptide
  XENP018514 vlCDR2
YASHRYT

SEQ ID NO: 6523 - protein, 9 aa, Artificial Sequence
  Description of Artificial Sequence: Synthetic peptide
  XENP018514 vlCDR3
QQDYSSPRT

SEQ ID NO: 6524 - protein, 249 aa, Artificial Sequence
  Description of Artificial Sequence: Synthetic polypeptide
  XENP018515 1G6_H1.19_L1_scFv(GKPGS)4
EVQLVESGGGLVKPGGSLRLSCAASGFTFSDYWMNWVRQAPGKGLEWVGEIRLKSNNYATHYAEPVKGRFTISRDDSKSTVYLQMNSLKTEDTAVYYCTRYYGNYGGYFDVWGAGTLVTVSSGKPGSGKPGSGKPGSGKPGSSIVMTQSPATLSVSPGERATLSCRASQSVSNDVAWYQQKPGQSPRLLINYASHRYTGVPDRFTGSGYGTEFTLTISSLQSEDFAVYFCQQDYSSPRTFGGGTKVEIK

SEQ ID NO: 6525 - protein, 122 aa, Artificial Sequence
  Description of Artificial Sequence: Synthetic polypeptide
  VH of XENP018515
EVQLVESGGGLVKPGGSLRLSCAASGFTFSDYWMNWVRQAPGKGLEWVGEIRLKSNNYATHYAEPVKGRFTISRDDSKSTVYLQMNSLKTEDTAVYYCTRYYGNYGGYFDVWGAGTLVTVSS

SEQ ID NO: 6526 - protein, 107 aa, Artificial Sequence; identical to SEQ ID NO: 6247
  Description of Artificial Sequence: Synthetic polypeptide
  VL of XENP018515

SEQ ID NO: 6527 - protein, 5 aa, Artificial Sequence
  Description of Artificial Sequence: Synthetic peptide
  XENP018515 vhCDR1
DYWMN

SEQ ID NO: 6528 - protein, 19 aa, Artificial Sequence
  Description of Artificial Sequence: Synthetic peptide
  XENP018515 vhCDR2
EIRLKSNNYATHYAEPVKG

SEQ ID NO: 6529 - protein, 11 aa, Artificial Sequence
  Description of Artificial Sequence: Synthetic peptide
  XENP018515 vhCDR3
YYGNYGGYFDV

SEQ ID NO: 6530 - protein, 11 aa, Artificial Sequence
  Description of Artificial Sequence: Synthetic peptide
  XENP018515 vlCDR1
RASQSVSNDVA

SEQ ID NO: 6531 - protein, 7 aa, Artificial Sequence
  Description of Artificial Sequence: Synthetic peptide
  XENP018515 vlCDR2
YASHRYT

SEQ ID NO: 6532 - protein, 9 aa, Artificial Sequence
  Description of Artificial Sequence: Synthetic peptide
  XENP018515 vlCDR3
QQDYSSPRT

SEQ ID NO: 6533 - protein, 249 aa, Artificial Sequence
  Description of Artificial Sequence: Synthetic polypeptide
  XENP018516 1G6_H1.20_L1_scFv(GKPGS)4
EVQLVESGGGLVKPGGSLRLSCAASGFTFSHYWMNWVRQAPGKGLEWVGEIRLKSNNYATHYAEPVKGRFTISRDDSKSTVYLQMNSLKTEDTAVYYCTRYYGNYGGYFDVWGAGTLVTVSSGKPGSGKPGSGKPGSGKPGSSIVMTQSPATLSVSPGERATLSCRASQSVSNDVAWYQQKPGQSPRLLINYASHRYTGVPDRFTGSGYGTEFTLTISSLQSEDFAVYFCQQDYSSPRTFGGGTKVEIK

SEQ ID NO: 6534 - protein, 122 aa, Artificial Sequence
  Description of Artificial Sequence: Synthetic polypeptide
  VH of XENP018516
EVQLVESGGGLVKPGGSLRLSCAASGFTFSHYWMNWVRQAPGKGLEWVGEIRLKSNNYATHYAEPVKGRFTISRDDSKSTVYLQMNSLKTEDTAVYYCTRYYGNYGGYFDVWGAGTLVTVSS

SEQ ID NO: 6535 - protein, 107 aa, Artificial Sequence; identical to SEQ ID NO: 6247
  Description of Artificial Sequence: Synthetic polypeptide
  VL of XENP018516

SEQ ID NO: 6536 - protein, 5 aa, Artificial Sequence
  Description of Artificial Sequence: Synthetic peptide
  XENP018516 vhCDR1
HYWMN

SEQ ID NO: 6537 - protein, 19 aa, Artificial Sequence
  Description of Artificial Sequence: Synthetic peptide
  XENP018516 vhCDR2
EIRLKSNNYATHYAEPVKG

SEQ ID NO: 6538 - protein, 11 aa, Artificial Sequence
  Description of Artificial Sequence: Synthetic peptide
  XENP018516 vhCDR3
YYGNYGGYFDV

SEQ ID NO: 6539 - protein, 11 aa, Artificial Sequence
  Description of Artificial Sequence: Synthetic peptide
  XENP018516 vlCDR1
RASQSVSNDVA

SEQ ID NO: 6540 - protein, 7 aa, Artificial Sequence
  Description of Artificial Sequence: Synthetic peptide
  XENP018516 vlCDR2
YASHRYT

SEQ ID NO: 6541 - protein, 9 aa, Artificial Sequence
  Description of Artificial Sequence: Synthetic peptide
  XENP018516 vlCDR3
QQDYSSPRT

SEQ ID NO: 6542 - protein, 249 aa, Artificial Sequence
  Description of Artificial Sequence: Synthetic polypeptide
  XENP018517 1G6_H1.21_L1_scFv(GKPGS)4
EVQLVESGGGLVKPGGSLRLSCAASGFTFSEYWMNWVRQAPGKGLEWVGEIRLKSNNYATHYAEPVKGRFTISRDDSKSTVYLQMNSLKTEDTAVYYCTRYYGNYGGYFDVWGAGTLVTVSSGKPGSGKPGSGKPGSGKPGSSIVMTQSPATLSVSPGERATLSCRASQSVSNDVAWYQQKPGQSPRLLINYASHRYTGVPDRFTGSGYGTEFTLTISSLQSEDFAVYFCQQDYSSPRTFGGGTKVEIK

SEQ ID NO: 6543 - protein, 122 aa, Artificial Sequence
  Description of Artificial Sequence: Synthetic polypeptide
  VH of XENP018517
EVQLVESGGGLVKPGGSLRLSCAASGFTFSEYWMNWVRQAPGKGLEWVGEIRLKSNNYATHYAEPVKGRFTISRDDSKSTVYLQMNSLKTEDTAVYYCTRYYGNYGGYFDVWGAGTLVTVSS

SEQ ID NO: 6544 - protein, 107 aa, Artificial Sequence; identical to SEQ ID NO: 6247
  Description of Artificial Sequence: Synthetic polypeptide
  VL of XENP018517

SEQ ID NO: 6545 - protein, 5 aa, Artificial Sequence
  Description of Artificial Sequence: Synthetic peptide
  XENP018517 vhCDR1
EYWMN

SEQ ID NO: 6546 - protein, 19 aa, Artificial Sequence
  Description of Artificial Sequence: Synthetic peptide
  XENP018517 vhCDR2
EIRLKSNNYATHYAEPVKG

SEQ ID NO: 6547 - protein, 11 aa, Artificial Sequence
  Description of Artificial Sequence: Synthetic peptide
  XENP018517 vhCDR3
YYGNYGGYFDV

SEQ ID NO: 6548 - protein, 11 aa, Artificial Sequence
  Description of Artificial Sequence: Synthetic peptide
  XENP018517 vlCDR1
RASQSVSNDVA

SEQ ID NO: 6549 - protein, 7 aa, Artificial Sequence
  Description of Artificial Sequence: Synthetic peptide
  XENP018517 vlCDR2
YASHRYT

SEQ ID NO: 6550 - protein, 9 aa, Artificial Sequence
  Description of Artificial Sequence: Synthetic peptide
  XENP018517 vlCDR3
QQDYSSPRT

SEQ ID NO: 6551 - protein, 249 aa, Artificial Sequence
  Description of Artificial Sequence: Synthetic polypeptide
  XENP018518 1G6_H1.22_L1_scFv(GKPGS)4
EVQLVESGGGLVKPGGSLRLSCAASGFTFSSYWMNWVRQAPGKGLEWVGEIRLKSNNYATHYAEPVKGRFTISRDDSKSTVYLQMNSLKTEDTAVYYCTRYYGNYGGYFDVWGAGTLVTVSSGKPGSGKPGSGKPGSGKPGSSIVMTQSPATLSVSPGERATLSCRASQSVSNDVAWYQQKPGQSPRLLINYASHRYTGVPDRFTGSGYGTEFTLTISSLQSEDFAVYFCQQDYSSPRTFGGGTKVEIK

SEQ ID NO: 6552 - protein, 122 aa, Artificial Sequence
  Description of Artificial Sequence: Synthetic polypeptide
  VH of XENP018518
EVQLVESGGGLVKPGGSLRLSCAASGFTFSSYWMNWVRQAPGKGLEWVGEIRLKSNNYATHYAEPVKGRFTISRDDSKSTVYLQMNSLKTEDTAVYYCTRYYGNYGGYFDVWGAGTLVTVSS

SEQ ID NO: 6553 - protein, 107 aa, Artificial Sequence; identical to SEQ ID NO: 6247
  Description of Artificial Sequence: Synthetic polypeptide
  VL of XENP018518

SEQ ID NO: 6554 - protein, 5 aa, Artificial Sequence
  Description of Artificial Sequence: Synthetic peptide
  XENP018518 vhCDR1
SYWMN

SEQ ID NO: 6555 - protein, 19 aa, Artificial Sequence
  Description of Artificial Sequence: Synthetic peptide
  XENP018518 vhCDR2
EIRLKSNNYATHYAEPVKG

SEQ ID NO: 6556 - protein, 11 aa, Artificial Sequence
  Description of Artificial Sequence: Synthetic peptide
  XENP018518 vhCDR3
YYGNYGGYFDV

SEQ ID NO: 6557 - protein, 11 aa, Artificial Sequence
  Description of Artificial Sequence: Synthetic peptide
  XENP018518 vlCDR1
RASQSVSNDVA

SEQ ID NO: 6558 - protein, 7 aa, Artificial Sequence
  Description of Artificial Sequence: Synthetic peptide
  XENP018518 vlCDR2
YASHRYT

SEQ ID NO: 6559 - protein, 9 aa, Artificial Sequence
  Description of Artificial Sequence: Synthetic peptide
  XENP018518 vlCDR3
QQDYSSPRT

SEQ ID NO: 6560 - protein, 249 aa, Artificial Sequence
  Description of Artificial Sequence: Synthetic polypeptide
  XENP018519 1G6_H1.23_L1_scFv(GKPGS)4
EVQLVESGGGLVKPGGSLRLSCAASGFTFSRYWMNWVRQAPGKGLEWVGEIRLKSNNYATHYAEPVKGRFTISRDDSKSTVYLQMNSLKTEDTAVYYCTRYYGNYGGYFDVWGAGTLVTVSSGKPGSGKPGSGKPGSGKPGSSIVMTQSPATLSVSPGERATLSCRASQSVSNDVAWYQQKPGQSPRLLINYASHRYTGVPDRFTGSGYGTEFTLTISSLQSEDFAVYFCQQDYSSPRTFGGGTKVEIK

SEQ ID NO: 6561 - protein, 122 aa, Artificial Sequence
  Description of Artificial Sequence: Synthetic polypeptide
  VH of XENP018519
EVQLVESGGGLVKPGGSLRLSCAASGFTFSRYWMNWVRQAPGKGLEWVGEIRLKSNNYATHYAEPVKGRFTISRDDSKSTVYLQMNSLKTEDTAVYYCTRYYGNYGGYFDVWGAGTLVTVSS

SEQ ID NO: 6562 - protein, 107 aa, Artificial Sequence; identical to SEQ ID NO: 6247
  Description of Artificial Sequence: Synthetic polypeptide
  VL of XENP018519

SEQ ID NO: 6563 - protein, 5 aa, Artificial Sequence
  Description of Artificial Sequence: Synthetic peptide
  XENP018519 vhCDR1
RYWMN

SEQ ID NO: 6564 - protein, 19 aa, Artificial Sequence
  Description of Artificial Sequence: Synthetic peptide
  XENP018519 vhCDR2
EIRLKSNNYATHYAEPVKG

SEQ ID NO: 6565 - protein, 11 aa, Artificial Sequence
  Description of Artificial Sequence: Synthetic peptide
  XENP018519 vhCDR3
YYGNYGGYFDV

SEQ ID NO: 6566 - protein, 11 aa, Artificial Sequence
  Description of Artificial Sequence: Synthetic peptide
  XENP018519 vlCDR1
RASQSVSNDVA

SEQ ID NO: 6567 - protein, 7 aa, Artificial Sequence
  Description of Artificial Sequence: Synthetic peptide
  XENP018519 vlCDR2
YASHRYT

SEQ ID NO: 6568 - protein, 9 aa, Artificial Sequence
  Description of Artificial Sequence: Synthetic peptide
  XENP018519 vlCDR3
QQDYSSPRT

SEQ ID NO: 6569 - protein, 249 aa, Artificial Sequence
  Description of Artificial Sequence: Synthetic polypeptide
  XENP018520 1G6_H1.24_L1_scFv(GKPGS)4
EVQLVESGGGLVKPGGSLRLSCAASGFTFSLYWMNWVRQAPGKGLEWVGEIRLKSNNYATHYAEPVKGRFTISRDDSKSTVYLQMNSLKTEDTAVYYCTRYYGNYGGYFDVWGAGTLVTVSSGKPGSGKPGSGKPGSGKPGSSIVMTQSPATLSVSPGERATLSCRASQSVSNDVAWYQQKPGQSPRLLINYASHRYTGVPDRFTGSGYGTEFTLTISSLQSEDFAVYFCQQDYSSPRTFGGGTKVEIK

SEQ ID NO: 6570 - protein, 122 aa, Artificial Sequence
  Description of Artificial Sequence: Synthetic polypeptide
  VH of XENP018520
EVQLVESGGGLVKPGGSLRLSCAASGFTFSLYWMNWVRQAPGKGLEWVGEIRLKSNNYATHYAEPVKGRFTISRDDSKSTVYLQMNSLKTEDTAVYYCTRYYGNYGGYFDVWGAGTLVTVSS

SEQ ID NO: 6571 - protein, 107 aa, Artificial Sequence; identical to SEQ ID NO: 6247
  Description of Artificial Sequence: Synthetic polypeptide
  VL of XENP018520

SEQ ID NO: 6572 - protein, 5 aa, Artificial Sequence
  Description of Artificial Sequence: Synthetic peptide
  XENP018520 vhCDR1
LYWMN

SEQ ID NO: 6573 - protein, 19 aa, Artificial Sequence
  Description of Artificial Sequence: Synthetic peptide
  XENP018520 vhCDR2
EIRLKSNNYATHYAEPVKG

SEQ ID NO: 6574 - protein, 11 aa, Artificial Sequence
  Description of Artificial Sequence: Synthetic peptide
  XENP018520 vhCDR3
YYGNYGGYFDV

SEQ ID NO: 6575 - protein, 11 aa, Artificial Sequence
  Description of Artificial Sequence: Synthetic peptide
  XENP018520 vlCDR1
RASQSVSNDVA

SEQ ID NO: 6576 - protein, 7 aa, Artificial Sequence
  Description of Artificial Sequence: Synthetic peptide
  XENP018520 vlCDR2
YASHRYT

SEQ ID NO: 6577 - protein, 9 aa, Artificial Sequence
  Description of Artificial Sequence: Synthetic peptide
  XENP018520 vlCDR3
QQDYSSPRT

SEQ ID NO: 6578 - protein, 249 aa, Artificial Sequence
  Description of Artificial Sequence: Synthetic polypeptide
  XENP018521 1G6_H1.25_L1_scFv(GKPGS)4
EVQLVESGGGLVKPGGSLRLSCAASGFTFSTYWMNWVRQAPGKGLEWVGEIRLKSNNYATHYAEPVKGRFTISRDDSKSTVYLQMNSLKTEDTAVYYCTRYYGNYGGYFDVWGAGTLVTVSSGKPGSGKPGSGKPGSGKPGSSIVMTQSPATLSVSPGERATLSCRASQSVSNDVAWYQQKPGQSPRLLINYASHRYTGVPDRFTGSGYGTEFTLTISSLQSEDFAVYFCQQDYSSPRTFGGGTKVEIK

SEQ ID NO: 6579 - protein, 122 aa, Artificial Sequence
  Description of Artificial Sequence: Synthetic polypeptide
  VH of XENP018521
EVQLVESGGGLVKPGGSLRLSCAASGFTFSTYWMNWVRQAPGKGLEWVGEIRLKSNNYATHYAEPVKGRFTISRDDSKSTVYLQMNSLKTEDTAVYYCTRYYGNYGGYFDVWGAGTLVTVSS

SEQ ID NO: 6580 - protein, 107 aa, Artificial Sequence; identical to SEQ ID NO: 6247
  Description of Artificial Sequence: Synthetic polypeptide
  VL of XENP018521

SEQ ID NO: 6581 - protein, 5 aa, Artificial Sequence
  Description of Artificial Sequence: Synthetic peptide
  XENP018521 vhCDR1
TYWMN

SEQ ID NO: 6582 - protein, 19 aa, Artificial Sequence
  Description of Artificial Sequence: Synthetic peptide
  XENP018521 vhCDR2
EIRLKSNNYATHYAEPVKG

SEQ ID NO: 6583 - protein, 11 aa, Artificial Sequence
  Description of Artificial Sequence: Synthetic peptide
  XENP018521 vhCDR3
YYGNYGGYFDV

SEQ ID NO: 6584 - protein, 11 aa, Artificial Sequence
  Description of Artificial Sequence: Synthetic peptide
  XENP018521 vlCDR1
RASQSVSNDVA

SEQ ID NO: 6585 - protein, 7 aa, Artificial Sequence
  Description of Artificial Sequence: Synthetic peptide
  XENP018521 vlCDR2
YASHRYT

SEQ ID NO: 6586 - protein, 9 aa, Artificial Sequence
  Description of Artificial Sequence: Synthetic peptide
  XENP018521 vlCDR3
QQDYSSPRT

SEQ ID NO: 6587 - protein, 249 aa, Artificial Sequence
  Description of Artificial Sequence: Synthetic polypeptide
  XENP018522 1G6_H1.26_L1_scFv(GKPGS)4
EVQLVESGGGLVKPGGSLRLSCAASGFTFSGYWMNWVRQAPGKGLEWVGEIRLKSNNYATHYAEPVKGRFTISRDDSKSTVYLQMNSLKTEDTAVYYCTRYYGNYGGYFDVWGAGTLVTVSSGKPGSGKPGSGKPGSGKPGSSIVMTQSPATLSVSPGERATLSCRASQSVSNDVAWYQQKPGQSPRLLINYASHRYTGVPDRFTGSGYGTEFTLTISSLQSEDFAVYFCQQDYSSPRTFGGGTKVEIK

SEQ ID NO: 6588 - protein, 122 aa, Artificial Sequence
  Description of Artificial Sequence: Synthetic polypeptide
  VH of XENP018522
EVQLVESGGGLVKPGGSLRLSCAASGFTFSGYWMNWVRQAPGKGLEWVGEIRLKSNNYATHYAEPVKGRFTISRDDSKSTVYLQMNSLKTEDTAVYYCTRYYGNYGGYFDVWGAGTLVTVSS

SEQ ID NO: 6589 - protein, 107 aa, Artificial Sequence; identical to SEQ ID NO: 6247
  Description of Artificial Sequence: Synthetic polypeptide
  VL of XENP018522

SEQ ID NO: 6590 - protein, 5 aa, Artificial Sequence
  Description of Artificial Sequence: Synthetic peptide
  XENP018522 vhCDR1
GYWMN

SEQ ID NO: 6591 - protein, 19 aa, Artificial Sequence
  Description of Artificial Sequence: Synthetic peptide
  XENP018522 vhCDR2
EIRLKSNNYATHYAEPVKG

SEQ ID NO: 6592 - protein, 11 aa, Artificial Sequence
  Description of Artificial Sequence: Synthetic peptide
  XENP018522 vhCDR3
YYGNYGGYFDV

SEQ ID NO: 6593 - protein, 11 aa, Artificial Sequence
  Description of Artificial Sequence: Synthetic peptide
  XENP018522 vlCDR1
RASQSVSNDVA

SEQ ID NO: 6594 - protein, 7 aa, Artificial Sequence
  Description of Artificial Sequence: Synthetic peptide
  XENP018522 vlCDR2
YASHRYT

SEQ ID NO: 6595 - protein, 9 aa, Artificial Sequence
  Description of Artificial Sequence: Synthetic peptide
  XENP018522 vlCDR3
QQDYSSPRT

SEQ ID NO: 6596 - protein, 249 aa, Artificial Sequence
  Description of Artificial Sequence: Synthetic polypeptide
  XENP018523 1G6_H1.27_L1_scFv(GKPGS)4
EVQLVESGGGLVKPGGSLRLSCAASGFTFSYYWMNWVRQAPGKGLEWVGEIRLKSNNYATHYAEPVKGRFTISRDDSKSTVYLQMNSLKTEDTAVYYCTRYYGNYGGYFDVWGAGTLVTVSSGKPGSGKPGSGKPGSGKPGSSIVMTQSPATLSVSPGERATLSCRASQSVSNDVAWYQQKPGQSPRLLINYASHRYTGVPDRFTGSGYGTEFTLTISSLQSEDFAVYFCQQDYSSPRTFGGGTKVEIK

SEQ ID NO: 6597 - protein, 122 aa, Artificial Sequence
  Description of Artificial Sequence: Synthetic polypeptide
  VH of XENP018523
EVQLVESGGGLVKPGGSLRLSCAASGFTFSYYWMNWVRQAPGKGLEWVGEIRLKSNNYATHYAEPVKGRFTISRDDSKSTVYLQMNSLKTEDTAVYYCTRYYGNYGGYFDVWGAGTLVTVSS

SEQ ID NO: 6598 - protein, 107 aa, Artificial Sequence; identical to SEQ ID NO: 6247
  Description of Artificial Sequence: Synthetic polypeptide
  VL of XENP018523

SEQ ID NO: 6599 - protein, 5 aa, Artificial Sequence
  Description of Artificial Sequence: Synthetic peptide
  XENP018523 vhCDR1
YYWMN

SEQ ID NO: 6600 - protein, 19 aa, Artificial Sequence
  Description of Artificial Sequence: Synthetic peptide
  XENP018523 vhCDR2
EIRLKSNNYATHYAEPVKG

SEQ ID NO: 6601 - protein, 11 aa, Artificial Sequence
  Description of Artificial Sequence: Synthetic peptide
  XENP018523 vhCDR3
YYGNYGGYFDV

SEQ ID NO: 6602 - protein, 11 aa, Artificial Sequence
  Description of Artificial Sequence: Synthetic peptide
  XENP018523 vlCDR1
RASQSVSNDVA

SEQ ID NO: 6603 - protein, 7 aa, Artificial Sequence
  Description of Artificial Sequence: Synthetic peptide
  XENP018523 vlCDR2
YASHRYT

SEQ ID NO: 6604 - protein, 9 aa, Artificial Sequence
  Description of Artificial Sequence: Synthetic peptide
  XENP018523 vlCDR3
QQDYSSPRT

SEQ ID NO: 6605 - protein, 249 aa, Artificial Sequence
  Description of Artificial Sequence: Synthetic polypeptide
  XENP018524 1G6_H1.28_L1_scFv(GKPGS)4
EVQLVESGGGLVKPGGSLRLSCAASGFTFSNFWMNWVRQAPGKGLEWVGEIRLKSNNYATHYAEPVKGRFTISRDDSKSTVYLQMNSLKTEDTAVYYCTRYYGNYGGYFDVWGAGTLVTVSSGKPGSGKPGSGKPGSGKPGSSIVMTQSPATLSVSPGERATLSCRASQSVSNDVAWYQQKPGQSPRLLINYASHRYTGVPDRFTGSGYGTEFTLTISSLQSEDFAVYFCQQDYSSPRTFGGGTKVEIK

SEQ ID NO: 6606 - protein, 122 aa, Artificial Sequence
  Description of Artificial Sequence: Synthetic polypeptide
  VH of XENP018524
EVQLVESGGGLVKPGGSLRLSCAASGFTFSNFWMNWVRQAPGKGLEWVGEIRLKSNNYATHYAEPVKGRFTISRDDSKSTVYLQMNSLKTEDTAVYYCTRYYGNYGGYFDVWGAGTLVTVSS

SEQ ID NO: 6607 - protein, 107 aa, Artificial Sequence; identical to SEQ ID NO: 6247
  Description of Artificial Sequence: Synthetic polypeptide
  VL of XENP018524

SEQ ID NO: 6608 - protein, 5 aa, Artificial Sequence
  Description of Artificial Sequence: Synthetic peptide
  XENP018524 vhCDR1
NFWMN

SEQ ID NO: 6609 - protein, 19 aa, Artificial Sequence
  Description of Artificial Sequence: Synthetic peptide
  XENP018524 vhCDR2
EIRLKSNNYATHYAEPVKG

SEQ ID NO: 6610 - protein, 11 aa, Artificial Sequence
  Description of Artificial Sequence: Synthetic peptide
  XENP018524 vhCDR3
YYGNYGGYFDV

SEQ ID NO: 6611 - protein, 11 aa, Artificial Sequence
  Description of Artificial Sequence: Synthetic peptide
  XENP018524 vlCDR1
RASQSVSNDVA

SEQ ID NO: 6612 - protein, 7 aa, Artificial Sequence
  Description of Artificial Sequence: Synthetic peptide
  XENP018524 vlCDR2
YASHRYT

SEQ ID NO: 6613 - protein, 9 aa, Artificial Sequence
  Description of Artificial Sequence: Synthetic peptide
  XENP018524 vlCDR3
QQDYSSPRT

SEQ ID NO: 6614 - protein, 249 aa, Artificial Sequence
  Description of Artificial Sequence: Synthetic polypeptide
  XENP018525 1G6_H1.29_L1_scFv(GKPGS)4
EVQLVESGGGLVKPGGSLRLSCAASGFTFSNHWMNWVRQAPGKGLEWVGEIRLKSNNYATHYAEPVKGRFTISRDDSKSTVYLQMNSLKTEDTAVYYCTRYYGNYGGYFDVWGAGTLVTVSSGKPGSGKPGSGKPGSGKPGSSIVMTQSPATLSVSPGERATLSCRASQSVSNDVAWYQQKPGQSPRLLINYASHRYTGVPDRFTGSGYGTEFTLTISSLQSEDFAVYFCQQDYSSPRTFGGGTKVEIK

SEQ ID NO: 6615 - protein, 122 aa, Artificial Sequence
  Description of Artificial Sequence: Synthetic polypeptide
  VH of XENP018525
EVQLVESGGGLVKPGGSLRLSCAASGFTFSNHWMNWVRQAPGKGLEWVGEIRLKSNNYATHYAEPVKGRFTISRDDSKSTVYLQMNSLKTEDTAVYYCTRYYGNYGGYFDVWGAGTLVTVSS

SEQ ID NO: 6616 - protein, 107 aa, Artificial Sequence; identical to SEQ ID NO: 6247
  Description of Artificial Sequence: Synthetic polypeptide
  VL of XENP018525

SEQ ID NO: 6617 - protein, 5 aa, Artificial Sequence
  Description of Artificial Sequence: Synthetic peptide
  XENP018525 vhCDR1
NHWMN

SEQ ID NO: 6618 - protein, 19 aa, Artificial Sequence
  Description of Artificial Sequence: Synthetic peptide
  XENP018525 vhCDR2
EIRLKSNNYATHYAEPVKG

SEQ ID NO: 6619 - protein, 11 aa, Artificial Sequence
  Description of Artificial Sequence: Synthetic peptide
  XENP018525 vhCDR3
YYGNYGGYFDV

SEQ ID NO: 6620 - protein, 11 aa, Artificial Sequence
  Description of Artificial Sequence: Synthetic peptide
  XENP018525 vlCDR1
RASQSVSNDVA

SEQ ID NO: 6621 - protein, 7 aa, Artificial Sequence
  Description of Artificial Sequence: Synthetic peptide
  XENP018525 vlCDR2
YASHRYT

SEQ ID NO: 6622 - protein, 9 aa, Artificial Sequence
  Description of Artificial Sequence: Synthetic peptide
  XENP018525 vlCDR3
QQDYSSPRT

SEQ ID NO: 6623 - protein, 249 aa, Artificial Sequence
  Description of Artificial Sequence: Synthetic polypeptide
  XENP018526 1G6_H1.30_L1_scFv(GKPGS)4
EVQLVESGGGLVKPGGSLRLSCAASGFTFSNLWMNWVRQAPGKGLEWVGEIRLKSNNYATHYAEPVKGRFTISRDDSKSTVYLQMNSLKTEDTAVYYCTRYYGNYGGYFDVWGAGTLVTVSSGKPGSGKPGSGKPGSGKPGSSIVMTQSPATLSVSPGERATLSCRASQSVSNDVAWYQQKPGQSPRLLINYASHRYTGVPDRFTGSGYGTEFTLTISSLQSEDFAVYFCQQDYSSPRTFGGGTKVEIK

SEQ ID NO: 6624 - protein, 122 aa, Artificial Sequence
  Description of Artificial Sequence: Synthetic polypeptide
  VH of XENP018526
EVQLVESGGGLVKPGGSLRLSCAASGFTFSNLWMNWVRQAPGKGLEWVGEIRLKSNNYATHYAEPVKGRFTISRDDSKSTVYLQMNSLKTEDTAVYYCTRYYGNYGGYFDVWGAGTLVTVSS

SEQ ID NO: 6625 - protein, 107 aa, Artificial Sequence; identical to SEQ ID NO: 6247
  Description of Artificial Sequence: Synthetic polypeptide
  VL of XENP018526

SEQ ID NO: 6626 - protein, 5 aa, Artificial Sequence
  Description of Artificial Sequence: Synthetic peptide
  XENP018526 vhCDR1
NLWMN

SEQ ID NO: 6627 - protein, 19 aa, Artificial Sequence
  Description of Artificial Sequence: Synthetic peptide
  XENP018526 vhCDR2
EIRLKSNNYATHYAEPVKG

SEQ ID NO: 6628 - protein, 11 aa, Artificial Sequence
  Description of Artificial Sequence: Synthetic peptide
  XENP018526 vhCDR3
YYGNYGGYFDV

SEQ ID NO: 6629 - protein, 11 aa, Artificial Sequence
  Description of Artificial Sequence: Synthetic peptide
  XENP018526 vlCDR1
RASQSVSNDVA

SEQ ID NO: 6630 - protein, 7 aa, Artificial Sequence
  Description of Artificial Sequence: Synthetic peptide
  XENP018526 vlCDR2
YASHRYT

SEQ ID NO: 6631 - protein, 9 aa, Artificial Sequence
  Description of Artificial Sequence: Synthetic peptide
  XENP018526 vlCDR3
QQDYSSPRT

SEQ ID NO: 6632 - protein, 249 aa, Artificial Sequence
  Description of Artificial Sequence: Synthetic polypeptide
  XENP018527 1G6_H1.31_L1_scFv(GKPGS)4
EVQLVESGGGLVKPGGSLRLSCAASGFTFSNWWMNWVRQAPGKGLEWVGEIRLKSNNYATHYAEPVKGRFTISRDDSKSTVYLQMNSLKTEDTAVYYCTRYYGNYGGYFDVWGAGTLVTVSSGKPGSGKPGSGKPGSGKPGSSIVMTQSPATLSVSPGERATLSCRASQSVSNDVAWYQQKPGQSPRLLINYASHRYTGVPDRFTGSGYGTEFTLTISSLQSEDFAVYFCQQDYSSPRTFGGGTKVEIK

SEQ ID NO: 6633 - protein, 122 aa, Artificial Sequence
  Description of Artificial Sequence: Synthetic polypeptide
  VH of XENP018527
EVQLVESGGGLVKPGGSLRLSCAASGFTFSNWWMNWVRQAPGKGLEWVGEIRLKSNNYATHYAEPVKGRFTISRDDSKSTVYLQMNSLKTEDTAVYYCTRYYGNYGGYFDVWGAGTLVTVSS

SEQ ID NO: 6634 - protein, 107 aa, Artificial Sequence; identical to SEQ ID NO: 6247
  Description of Artificial Sequence: Synthetic polypeptide
  VL of XENP018527

SEQ ID NO: 6635 - protein, 5 aa, Artificial Sequence
  Description of Artificial Sequence: Synthetic peptide
  XENP018527 vhCDR1
NWWMN

SEQ ID NO: 6636 - protein, 19 aa, Artificial Sequence
  Description of Artificial Sequence: Synthetic peptide
  XENP018527 vhCDR2
EIRLKSNNYATHYAEPVKG

SEQ ID NO: 6637 - protein, 11 aa, Artificial Sequence
  Description of Artificial Sequence: Synthetic peptide
  XENP018527 vhCDR3
YYGNYGGYFDV

SEQ ID NO: 6638 - protein, 11 aa, Artificial Sequence
  Description of Artificial Sequence: Synthetic peptide
  XENP018527 vlCDR1
RASQSVSNDVA

SEQ ID NO: 6639 - protein, 7 aa, Artificial Sequence
  Description of Artificial Sequence: Synthetic peptide
  XENP018527 vlCDR2
YASHRYT

SEQ ID NO: 6640 - protein, 9 aa, Artificial Sequence
  Description of Artificial Sequence: Synthetic peptide
  XENP018527 vlCDR3
QQDYSSPRT

SEQ ID NO: 6641 - protein, 249 aa, Artificial Sequence
  Description of Artificial Sequence: Synthetic polypeptide
  XENP018528 1G6_H1.32_L1_scFv(GKPGS)4
EVQLVESGGGLVKPGGSLRLSCAASGFTFSNVWMNWVRQAPGKGLEWVGEIRLKSNNYATHYAEPVKGRFTISRDDSKSTVYLQMNSLKTEDTAVYYCTRYYGNYGGYFDVWGAGTLVTVSSGKPGSGKPGSGKPGSGKPGSSIVMTQSPATLSVSPGERATLSCRASQSVSNDVAWYQQKPGQSPRLLINYASHRYTGVPDRFTGSGYGTEFTLTISSLQSEDFAVYFCQQDYSSPRTFGGGTKVEIK

SEQ ID NO: 6642 - protein, 122 aa, Artificial Sequence
  Description of Artificial Sequence: Synthetic polypeptide
  VH of XENP018528
EVQLVESGGGLVKPGGSLRLSCAASGFTFSNVWMNWVRQAPGKGLEWVGEIRLKSNNYATHYAEPVKGRFTISRDDSKSTVYLQMNSLKTEDTAVYYCTRYYGNYGGYFDVWGAGTLVTVSS

SEQ ID NO: 6643 - protein, 107 aa, Artificial Sequence; identical to SEQ ID NO: 6247
  Description of Artificial Sequence: Synthetic polypeptide
  VL of XENP018528

SEQ ID NO: 6644 - protein, 5 aa, Artificial Sequence
  Description of Artificial Sequence: Synthetic peptide
  XENP018528 vhCDR1
NVWMN

SEQ ID NO: 6645 - protein, 19 aa, Artificial Sequence
  Description of Artificial Sequence: Synthetic peptide
  XENP018528 vhCDR2
EIRLKSNNYATHYAEPVKG

SEQ ID NO: 6646 - protein, 11 aa, Artificial Sequence
  Description of Artificial Sequence: Synthetic peptide
  XENP018528 vhCDR3
YYGNYGGYFDV

SEQ ID NO: 6647 - protein, 11 aa, Artificial Sequence
  Description of Artificial Sequence: Synthetic peptide
  XENP018528 vlCDR1
RASQSVSNDVA

SEQ ID NO: 6648 - protein, 7 aa, Artificial Sequence
  Description of Artificial Sequence: Synthetic peptide
  XENP018528 vlCDR2
YASHRYT

SEQ ID NO: 6649 - protein, 9 aa, Artificial Sequence
  Description of Artificial Sequence: Synthetic peptide
  XENP018528 vlCDR3
QQDYSSPRT

SEQ ID NO: 6650 - protein, 249 aa, Artificial Sequence
  Description of Artificial Sequence: Synthetic polypeptide
  XENP018529 1G6_H1.33_L1_scFv(GKPGS)4
EVQLVESGGGLVKPGGSLRLSCAASGFTFSNAWMNWVRQAPGKGLEWVGEIRLKSNNYATHYAEPVKGRFTISRDDSKSTVYLQMNSLKTEDTAVYYCTRYYGNYGGYFDVWGAGTLVTVSSGKPGSGKPGSGKPGSGKPGSSIVMTQSPATLSVSPGERATLSCRASQSVSNDVAWYQQKPGQSPRLLINYASHRYTGVPDRFTGSGYGTEFTLTISSLQSEDFAVYFCQQDYSSPRTFGGGTKVEIK

SEQ ID NO: 6651 - protein, 122 aa, Artificial Sequence
  Description of Artificial Sequence: Synthetic polypeptide
  VH of XENP018529
EVQLVESGGGLVKPGGSLRLSCAASGFTFSNAWMNWVRQAPGKGLEWVGEIRLKSNNYATHYAEPVKGRFTISRDDSKSTVYLQMNSLKTEDTAVYYCTRYYGNYGGYFDVWGAGTLVTVSS

SEQ ID NO: 6652 - protein, 107 aa, Artificial Sequence; identical to SEQ ID NO: 6247
  Description of Artificial Sequence: Synthetic polypeptide
  VL of XENP018529

SEQ ID NO: 6653 - protein, 5 aa, Artificial Sequence
  Description of Artificial Sequence: Synthetic peptide
  XENP018529 vhCDR1
NAWMN

SEQ ID NO: 6654 - protein, 19 aa, Artificial Sequence
  Description of Artificial Sequence: Synthetic peptide
  XENP018529 vhCDR2
EIRLKSNNYATHYAEPVKG

SEQ ID NO: 6655 - protein, 11 aa, Artificial Sequence
  Description of Artificial Sequence: Synthetic peptide
  XENP018529 vhCDR3
YYGNYGGYFDV

SEQ ID NO: 6656 - protein, 11 aa, Artificial Sequence
  Description of Artificial Sequence: Synthetic peptide
  XENP018529 vlCDR1
RASQSVSNDVA

SEQ ID NO: 6657 - protein, 7 aa, Artificial Sequence
  Description of Artificial Sequence: Synthetic peptide
  XENP018529 vlCDR2
YASHRYT

SEQ ID NO: 6658 - protein, 9 aa, Artificial Sequence
  Description of Artificial Sequence: Synthetic peptide
  XENP018529 vlCDR3
QQDYSSPRT

SEQ ID NO: 6659 - protein, 249 aa, Artificial Sequence
  Description of Artificial Sequence: Synthetic polypeptide
  XENP018530 1G6_H1.34_L1_scFv(GKPGS)4
EVQLVESGGGLVKPGGSLRLSCAASGFTFSNQWMNWVRQAPGKGLEWVGEIRLKSNNYATHYAEPVKGRFTISRDDSKSTVYLQMNSLKTEDTAVYYCTRYYGNYGGYFDVWGAGTLVTVSSGKPGSGKPGSGKPGSGKPGSSIVMTQSPATLSVSPGERATLSCRASQSVSNDVAWYQQKPGQSPRLLINYASHRYTGVPDRFTGSGYGTEFTLTISSLQSEDFAVYFCQQDYSSPRTFGGGTKVEIK

SEQ ID NO: 6660 - protein, 122 aa, Artificial Sequence
  Description of Artificial Sequence: Synthetic polypeptide
  VH of XENP018530
EVQLVESGGGLVKPGGSLRLSCAASGFTFSNQWMNWVRQAPGKGLEWVGEIRLKSNNYATHYAEPVKGRFTISRDDSKSTVYLQMNSLKTEDTAVYYCTRYYGNYGGYFDVWGAGTLVTVSS

SEQ ID NO: 6661 - protein, 107 aa, Artificial Sequence; identical to SEQ ID NO: 6247
  Description of Artificial Sequence: Synthetic polypeptide
  VL of XENP018530

SEQ ID NO: 6662 - protein, 5 aa, Artificial Sequence
  Description of Artificial Sequence: Synthetic peptide
  XENP018530 vhCDR1
NQWMN

SEQ ID NO: 6663 - protein, 19 aa, Artificial Sequence
  Description of Artificial Sequence: Synthetic peptide
  XENP018530 vhCDR2
EIRLKSNNYATHYAEPVKG

SEQ ID NO: 6664 - protein, 11 aa, Artificial Sequence
  Description of Artificial Sequence: Synthetic peptide
  XENP018530 vhCDR3
YYGNYGGYFDV

SEQ ID NO: 6665 - protein, 11 aa, Artificial Sequence
  Description of Artificial Sequence: Synthetic peptide
  XENP018530 vlCDR1
RASQSVSNDVA

SEQ ID NO: 6666 - protein, 7 aa, Artificial Sequence
  Description of Artificial Sequence: Synthetic peptide
  XENP018530 vlCDR2
YASHRYT

SEQ ID NO: 6667 - protein, 9 aa, Artificial Sequence
  Description of Artificial Sequence: Synthetic peptide
  XENP018530 vlCDR3
QQDYSSPRT

SEQ ID NO: 6668 - protein, 249 aa, Artificial Sequence
  Description of Artificial Sequence: Synthetic polypeptide
  XENP018531 1G6_H1.35_L1_scFv(GKPGS)4
EVQLVESGGGLVKPGGSLRLSCAASGFTFSNDWMNWVRQAPGKGLEWVGEIRLKSNNYATHYAEPVKGRFTISRDDSKSTVYLQMNSLKTEDTAVYYCTRYYGNYGGYFDVWGAGTLVTVSSGKPGSGKPGSGKPGSGKPGSSIVMTQSPATLSVSPGERATLSCRASQSVSNDVAWYQQKPGQSPRLLINYASHRYTGVPDRFTGSGYGTEFTLTISSLQSEDFAVYFCQQDYSSPRTFGGGTKVEIK

SEQ ID NO: 6669 - protein, 122 aa, Artificial Sequence
  Description of Artificial Sequence: Synthetic polypeptide
  VH of XENP018531
EVQLVESGGGLVKPGGSLRLSCAASGFTFSNDWMNWVRQAPGKGLEWVGEIRLKSNNYATHYAEPVKGRFTISRDDSKSTVYLQMNSLKTEDTAVYYCTRYYGNYGGYFDVWGAGTLVTVSS

SEQ ID NO: 6670 - protein, 107 aa, Artificial Sequence; identical to SEQ ID NO: 6247
  Description of Artificial Sequence: Synthetic polypeptide
  VL of XENP018531

SEQ ID NO: 6671 - protein, 5 aa, Artificial Sequence
  Description of Artificial Sequence: Synthetic peptide
  XENP018531 vhCDR1
NDWMN

SEQ ID NO: 6672 - protein, 19 aa, Artificial Sequence
  Description of Artificial Sequence: Synthetic peptide
  XENP018531 vhCDR2
EIRLKSNNYATHYAEPVKG

SEQ ID NO: 6673 - protein, 11 aa, Artificial Sequence
  Description of Artificial Sequence: Synthetic peptide
  XENP018531 vhCDR3
YYGNYGGYFDV

SEQ ID NO: 6674 - protein, 11 aa, Artificial Sequence
  Description of Artificial Sequence: Synthetic peptide
  XENP018531 vlCDR1
RASQSVSNDVA

SEQ ID NO: 6675 - protein, 7 aa, Artificial Sequence
  Description of Artificial Sequence: Synthetic peptide
  XENP018531 vlCDR2
YASHRYT

SEQ ID NO: 6676 - protein, 9 aa, Artificial Sequence
  Description of Artificial Sequence: Synthetic peptide
  XENP018531 vlCDR3
QQDYSSPRT

SEQ ID NO: 6677 - protein, 249 aa, Artificial Sequence
  Description of Artificial Sequence: Synthetic polypeptide
  XENP018532 1G6_H1.36_L1_scFv(GKPGS)4
EVQLVESGGGLVKPGGSLRLSCAASGFTFSNKWMNWVRQAPGKGLEWVGEIRLKSNNYATHYAEPVKGRFTISRDDSKSTVYLQMNSLKTEDTAVYYCTRYYGNYGGYFDVWGAGTLVTVSSGKPGSGKPGSGKPGSGKPGSSIVMTQSPATLSVSPGERATLSCRASQSVSNDVAWYQQKPGQSPRLLINYASHRYTGVPDRFTGSGYGTEFTLTISSLQSEDFAVYFCQQDYSSPRTFGGGTKVEIK

SEQ ID NO: 6678 - protein, 122 aa, Artificial Sequence
  Description of Artificial Sequence: Synthetic polypeptide
  VH of XENP018532
EVQLVESGGGLVKPGGSLRLSCAASGFTFSNKWMNWVRQAPGKGLEWVGEIRLKSNNYATHYAEPVKGRFTISRDDSKSTVYLQMNSLKTEDTAVYYCTRYYGNYGGYFDVWGAGTLVTVSS

SEQ ID NO: 6679 - protein, 107 aa, Artificial Sequence; identical to SEQ ID NO: 6247
  Description of Artificial Sequence: Synthetic polypeptide
  VL of XENP018532

SEQ ID NO: 6680 - protein, 5 aa, Artificial Sequence
  Description of Artificial Sequence: Synthetic peptide
  XENP018532 vhCDR1
NKWMN

SEQ ID NO: 6681 - protein, 19 aa, Artificial Sequence
  Description of Artificial Sequence: Synthetic peptide
  XENP018532 vhCDR2
EIRLKSNNYATHYAEPVKG

SEQ ID NO: 6682 - protein, 11 aa, Artificial Sequence
  Description of Artificial Sequence: Synthetic peptide
  XENP018532 vhCDR3
YYGNYGGYFDV

SEQ ID NO: 6683 - protein, 11 aa, Artificial Sequence
  Description of Artificial Sequence: Synthetic peptide
  XENP018532 vlCDR1
RASQSVSNDVA

SEQ ID NO: 6684 - protein, 7 aa, Artificial Sequence
  Description of Artificial Sequence: Synthetic peptide
  XENP018532 vlCDR2
YASHRYT

SEQ ID NO: 6685 - protein, 9 aa, Artificial Sequence
  Description of Artificial Sequence: Synthetic peptide
  XENP018532 vlCDR3
QQDYSSPRT

SEQ ID NO: 6686 - protein, 249 aa, Artificial Sequence
  Description of Artificial Sequence: Synthetic polypeptide
  XENP018533 1G6_H1.37_L1_scFv(GKPGS)4
EVQLVESGGGLVKPGGSLRLSCAASGFTFSNYGMNWVRQAPGKGLEWVGEIRLKSNNYATHYAEPVKGRFTISRDDSKSTVYLQMNSLKTEDTAVYYCTRYYGNYGGYFDVWGAGTLVTVSSGKPGSGKPGSGKPGSGKPGSSIVMTQSPATLSVSPGERATLSCRASQSVSNDVAWYQQKPGQSPRLLINYASHRYTGVPDRFTGSGYGTEFTLTISSLQSEDFAVYFCQQDYSSPRTFGGGTKVEIK

SEQ ID NO: 6687 - protein, 122 aa, Artificial Sequence
  Description of Artificial Sequence: Synthetic polypeptide
  VH of XENP018533
EVQLVESGGGLVKPGGSLRLSCAASGFTFSNYGMNWVRQAPGKGLEWVGEIRLKSNNYATHYAEPVKGRFTISRDDSKSTVYLQMNSLKTEDTAVYYCTRYYGNYGGYFDVWGAGTLVTVSS

SEQ ID NO: 6688 - protein, 107 aa, Artificial Sequence; identical to SEQ ID NO: 6247
  Description of Artificial Sequence: Synthetic polypeptide
  VL of XENP018533

SEQ ID NO: 6689 - protein, 5 aa, Artificial Sequence
  Description of Artificial Sequence: Synthetic peptide
  XENP018533 vhCDR1
NYGMN

SEQ ID NO: 6690 - protein, 19 aa, Artificial Sequence
  Description of Artificial Sequence: Synthetic peptide
  XENP018533 vhCDR2
EIRLKSNNYATHYAEPVKG

SEQ ID NO: 6691 - protein, 11 aa, Artificial Sequence
  Description of Artificial Sequence: Synthetic peptide
  XENP018533 vhCDR3
YYGNYGGYFDV

SEQ ID NO: 6692 - protein, 11 aa, Artificial Sequence
  Description of Artificial Sequence: Synthetic peptide
  XENP018533 vlCDR1
RASQSVSNDVA

SEQ ID NO: 6693 - protein, 7 aa, Artificial Sequence
  Description of Artificial Sequence: Synthetic peptide
  XENP018533 vlCDR2
YASHRYT

SEQ ID NO: 6694 - protein, 9 aa, Artificial Sequence
  Description of Artificial Sequence: Synthetic peptide
  XENP018533 vlCDR3
QQDYSSPRT

SEQ ID NO: 6695 - protein, 249 aa, Artificial Sequence
  Description of Artificial Sequence: Synthetic polypeptide
  XENP018534 1G6_H1.38_L1_scFv(GKPGS)4
EVQLVESGGGLVKPGGSLRLSCAASGFTFSNYAMNWVRQAPGKGLEWVGEIRLKSNNYATHYAEPVKGRFTISRDDSKSTVYLQMNSLKTEDTAVYYCTRYYGNYGGYFDVWGAGTLVTVSSGKPGSGKPGSGKPGSGKPGSSIVMTQSPATLSVSPGERATLSCRASQSVSNDVAWYQQKPGQSPRLLINYASHRYTGVPDRFTGSGYGTEFTLTISSLQSEDFAVYFCQQDYSSPRTFGGGTKVEIK

SEQ ID NO: 6696 - protein, 122 aa, Artificial Sequence
  Description of Artificial Sequence: Synthetic polypeptide
  VH of XENP018534
EVQLVESGGGLVKPGGSLRLSCAASGFTFSNYAMNWVRQAPGKGLEWVGEIRLKSNNYATHYAEPVKGRFTISRDDSKSTVYLQMNSLKTEDTAVYYCTRYYGNYGGYFDVWGAGTLVTVSS

SEQ ID NO: 6697 - protein, 107 aa, Artificial Sequence; identical to SEQ ID NO: 6247
  Description of Artificial Sequence: Synthetic polypeptide
  VL of XENP018534

SEQ ID NO: 6698 - protein, 5 aa, Artificial Sequence
  Description of Artificial Sequence: Synthetic peptide
  XENP018534 vhCDR1
NYAMN

SEQ ID NO: 6699 - protein, 19 aa, Artificial Sequence
  Description of Artificial Sequence: Synthetic peptide
  XENP018534 vhCDR2
EIRLKSNNYATHYAEPVKG

SEQ ID NO: 6700 - protein, 11 aa, Artificial Sequence
  Description of Artificial Sequence: Synthetic peptide
  XENP018534 vhCDR3
YYGNYGGYFDV

SEQ ID NO: 6701 - protein, 11 aa, Artificial Sequence
  Description of Artificial Sequence: Synthetic peptide
  XENP018534 vlCDR1
RASQSVSNDVA

SEQ ID NO: 6702 - protein, 7 aa, Artificial Sequence
  Description of Artificial Sequence: Synthetic peptide
  XENP018534 vlCDR2
YASHRYT

SEQ ID NO: 6703 - protein, 9 aa, Artificial Sequence
  Description of Artificial Sequence: Synthetic peptide
  XENP018534 vlCDR3
QQDYSSPRT

SEQ ID NO: 6704 - protein, 249 aa, Artificial Sequence
  Description of Artificial Sequence: Synthetic polypeptide
  XENP018535 1G6_H1.39_L1_scFv(GKPGS)4
EVQLVESGGGLVKPGGSLRLSCAASGFTFSNYYMNWVRQAPGKGLEWVGEIRLKSNNYATHYAEPVKGRFTISRDDSKSTVYLQMNSLKTEDTAVYYCTRYYGNYGGYFDVWGAGTLVTVSSGKPGSGKPGSGKPGSGKPGSSIVMTQSPATLSVSPGERATLSCRASQSVSNDVAWYQQKPGQSPRLLINYASHRYTGVPDRFTGSGYGTEFTLTISSLQSEDFAVYFCQQDYSSPRTFGGGTKVEIK

SEQ ID NO: 6705 - protein, 122 aa, Artificial Sequence
  Description of Artificial Sequence: Synthetic polypeptide
  VH of XENP018535
EVQLVESGGGLVKPGGSLRLSCAASGFTFSNYYMNWVRQAPGKGLEWVGEIRLKSNNYATHYAEPVKGRFTISRDDSKSTVYLQMNSLKTEDTAVYYCTRYYGNYGGYFDVWGAGTLVTVSS

SEQ ID NO: 6706 - protein, 107 aa, Artificial Sequence; identical to SEQ ID NO: 6247
  Description of Artificial Sequence: Synthetic polypeptide
  VL of XENP018535

SEQ ID NO: 6707 - protein, 5 aa, Artificial Sequence
  Description of Artificial Sequence: Synthetic peptide
  XENP018535 vhCDR1
NYYMN

SEQ ID NO: 6708 - protein, 19 aa, Artificial Sequence
  Description of Artificial Sequence: Synthetic peptide
  XENP018535 vhCDR2
EIRLKSNNYATHYAEPVKG

SEQ ID NO: 6709 - protein, 11 aa, Artificial Sequence
  Description of Artificial Sequence: Synthetic peptide
  XENP018535 vhCDR3
YYGNYGGYFDV

SEQ ID NO: 6710 - protein, 11 aa, Artificial Sequence
  Description of Artificial Sequence: Synthetic peptide
  XENP018535 vlCDR1
RASQSVSNDVA

SEQ ID NO: 6711 - protein, 7 aa, Artificial Sequence
  Description of Artificial Sequence: Synthetic peptide
  XENP018535 vlCDR2
YASHRYT

SEQ ID NO: 6712 - protein, 9 aa, Artificial Sequence
  Description of Artificial Sequence: Synthetic peptide
  XENP018535 vlCDR3
QQDYSSPRT

SEQ ID NO: 6713 - protein, 249 aa, Artificial Sequence
  Description of Artificial Sequence: Synthetic polypeptide
  XENP018536 1G6_H1.40_L1_scFv(GKPGS)4
EVQLVESGGGLVKPGGSLRLSCAASGFTFSNYDMNWVRQAPGKGLEWVGEIRLKSNNYATHYAEPVKGRFTISRDDSKSTVYLQMNSLKTEDTAVYYCTRYYGNYGGYFDVWGAGTLVTVSSGKPGSGKPGSGKPGSGKPGSSIVMTQSPATLSVSPGERATLSCRASQSVSNDVAWYQQKPGQSPRLLINYASHRYTGVPDRFTGSGYGTEFTLTISSLQSEDFAVYFCQQDYSSPRTFGGGTKVEIK

SEQ ID NO: 6714 - protein, 122 aa, Artificial Sequence
  Description of Artificial Sequence: Synthetic polypeptide
  VH of XENP018536
EVQLVESGGGLVKPGGSLRLSCAASGFTFSNYDMNWVRQAPGKGLEWVGEIRLKSNNYATHYAEPVKGRFTISRDDSKSTVYLQMNSLKTEDTAVYYCTRYYGNYGGYFDVWGAGTLVTVSS

SEQ ID NO: 6715 - protein, 107 aa, Artificial Sequence; identical to SEQ ID NO: 6247
  Description of Artificial Sequence: Synthetic polypeptide
  VL of XENP018536

SEQ ID NO: 6716 - protein, 5 aa, Artificial Sequence
  Description of Artificial Sequence: Synthetic peptide
  XENP018536 vhCDR1
NYDMN

SEQ ID NO: 6717 - protein, 19 aa, Artificial Sequence
  Description of Artificial Sequence: Synthetic peptide
  XENP018536 vhCDR2
EIRLKSNNYATHYAEPVKG

SEQ ID NO: 6718 - protein, 11 aa, Artificial Sequence
  Description of Artificial Sequence: Synthetic peptide
  XENP018536 vhCDR3
YYGNYGGYFDV

SEQ ID NO: 6719 - protein, 11 aa, Artificial Sequence
  Description of Artificial Sequence: Synthetic peptide
  XENP018536 vlCDR1
RASQSVSNDVA

SEQ ID NO: 6720 - protein, 7 aa, Artificial Sequence
  Description of Artificial Sequence: Synthetic peptide
  XENP018536 vlCDR2
YASHRYT

SEQ ID NO: 6721 - protein, 9 aa, Artificial Sequence
  Description of Artificial Sequence: Synthetic peptide
  XENP018536 vlCDR3
QQDYSSPRT

SEQ ID NO: 6722 - protein, 249 aa, Artificial Sequence
  Description of Artificial Sequence: Synthetic polypeptide
  XENP018537 1G6_H1.41_L1_scFv(GKPGS)4
EVQLVESGGGLVKPGGSLRLSCAASGFTFSNYWMSWVRQAPGKGLEWVGEIRLKSNNYATHYAEPVKGRFTISRDDSKSTVYLQMNSLKTEDTAVYYCTRYYGNYGGYFDVWGAGTLVTVSSGKPGSGKPGSGKPGSGKPGSSIVMTQSPATLSVSPGERATLSCRASQSVSNDVAWYQQKPGQSPRLLINYASHRYTGVPDRFTGSGYGTEFTLTISSLQSEDFAVYFCQQDYSSPRTFGGGTKVEIK

SEQ ID NO: 6723 - protein, 122 aa, Artificial Sequence
  Description of Artificial Sequence: Synthetic polypeptide
  VH of XENP018537
EVQLVESGGGLVKPGGSLRLSCAASGFTFSNYWMSWVRQAPGKGLEWVGEIRLKSNNYATHYAEPVKGRFTISRDDSKSTVYLQMNSLKTEDTAVYYCTRYYGNYGGYFDVWGAGTLVTVSS

SEQ ID NO: 6724 - protein, 107 aa, Artificial Sequence; identical to SEQ ID NO: 6247
  Description of Artificial Sequence: Synthetic polypeptide
  VL of XENP018537

SEQ ID NO: 6725 - protein, 5 aa, Artificial Sequence
  Description of Artificial Sequence: Synthetic peptide
  XENP018537 vhCDR1
NYWMS

SEQ ID NO: 6726 - protein, 19 aa, Artificial Sequence
  Description of Artificial Sequence: Synthetic peptide
  XENP018537 vhCDR2
EIRLKSNNYATHYAEPVKG

SEQ ID NO: 6727 - protein, 11 aa, Artificial Sequence
  Description of Artificial Sequence: Synthetic peptide
  XENP018537 vhCDR3
YYGNYGGYFDV

SEQ ID NO: 6728 - protein, 11 aa, Artificial Sequence
  Description of Artificial Sequence: Synthetic peptide
  XENP018537 vlCDR1
RASQSVSNDVA

SEQ ID NO: 6729 - protein, 7 aa, Artificial Sequence
  Description of Artificial Sequence: Synthetic peptide
  XENP018537 vlCDR2
YASHRYT

SEQ ID NO: 6730 - protein, 9 aa, Artificial Sequence
  Description of Artificial Sequence: Synthetic peptide
  XENP018537 vlCDR3
QQDYSSPRT

SEQ ID NO: 6731 - protein, 249 aa, Artificial Sequence
  Description of Artificial Sequence: Synthetic polypeptide
  XENP018538 1G6_H1.42_L1_scFv(GKPGS)4
EVQLVESGGGLVKPGGSLRLSCAASGFTFSNYWMHWVRQAPGKGLEWVGEIRLKSNNYATHYAEPVKGRFTISRDDSKSTVYLQMNSLKTEDTAVYYCTRYYGNYGGYFDVWGAGTLVTVSSGKPGSGKPGSGKPGSGKPGSSIVMTQSPATLSVSPGERATLSCRASQSVSNDVAWYQQKPGQSPRLLINYASHRYTGVPDRFTGSGYGTEFTLTISSLQSEDFAVYFCQQDYSSPRTFGGGTKVEIK

SEQ ID NO: 6732 - protein, 122 aa, Artificial Sequence
  Description of Artificial Sequence: Synthetic polypeptide
  VH of XENP018538
EVQLVESGGGLVKPGGSLRLSCAASGFTFSNYWMHWVRQAPGKGLEWVGEIRLKSNNYATHYAEPVKGRFTISRDDSKSTVYLQMNSLKTEDTAVYYCTRYYGNYGGYFDVWGAGTLVTVSS

SEQ ID NO: 6733 - protein, 107 aa, Artificial Sequence; identical to SEQ ID NO: 6247
  Description of Artificial Sequence: Synthetic polypeptide
  VL of XENP018538

SEQ ID NO: 6734 - protein, 5 aa, Artificial Sequence
  Description of Artificial Sequence: Synthetic peptide
  XENP018538 vhCDR1
NYWMH

SEQ ID NO: 6735 - protein, 19 aa, Artificial Sequence
  Description of Artificial Sequence: Synthetic peptide
  XENP018538 vhCDR2
EIRLKSNNYATHYAEPVKG

SEQ ID NO: 6736 - protein, 11 aa, Artificial Sequence
  Description of Artificial Sequence: Synthetic peptide
  XENP018538 vhCDR3
YYGNYGGYFDV

SEQ ID NO: 6737 - protein, 11 aa, Artificial Sequence
  Description of Artificial Sequence: Synthetic peptide
  XENP018538 vlCDR1
RASQSVSNDVA

SEQ ID NO: 6738 - protein, 7 aa, Artificial Sequence
  Description of Artificial Sequence: Synthetic peptide
  XENP018538 vlCDR2
YASHRYT

SEQ ID NO: 6739 - protein, 9 aa, Artificial Sequence
  Description of Artificial Sequence: Synthetic peptide
  XENP018538 vlCDR3
QQDYSSPRT

SEQ ID NO: 6740 - protein, 249 aa, Artificial Sequence
  Description of Artificial Sequence: Synthetic polypeptide
  XENP018539 1G6_H1.43_L1_scFv(GKPGS)4
EVQLVESGGGLVKPGGSLRLSCAASGFTFSNYWMDWVRQAPGKGLEWVGEIRLKSNNYATHYAEPVKGRFTISRDDSKSTVYLQMNSLKTEDTAVYYCTRYYGNYGGYFDVWGAGTLVTVSSGKPGSGKPGSGKPGSGKPGSSIVMTQSPATLSVSPGERATLSCRASQSVSNDVAWYQQKPGQSPRLLINYASHRYTGVPDRFTGSGYGTEFTLTISSLQSEDFAVYFCQQDYSSPRTFGGGTKVEIK

SEQ ID NO: 6741 - protein, 122 aa, Artificial Sequence
  Description of Artificial Sequence: Synthetic polypeptide
  VH of XENP018539
EVQLVESGGGLVKPGGSLRLSCAASGFTFSNYWMDWVRQAPGKGLEWVGEIRLKSNNYATHYAEPVKGRFTISRDDSKSTVYLQMNSLKTEDTAVYYCTRYYGNYGGYFDVWGAGTLVTVSS

SEQ ID NO: 6742 - protein, 107 aa, Artificial Sequence; identical to SEQ ID NO: 6247
  Description of Artificial Sequence: Synthetic polypeptide
  VL of XENP018539

SEQ ID NO: 6743 - protein, 5 aa, Artificial Sequence
  Description of Artificial Sequence: Synthetic peptide
  XENP018539 vhCDR1
NYWMD

SEQ ID NO: 6744 - protein, 19 aa, Artificial Sequence
  Description of Artificial Sequence: Synthetic peptide
  XENP018539 vhCDR2
EIRLKSNNYATHYAEPVKG

SEQ ID NO: 6745 - protein, 11 aa, Artificial Sequence
  Description of Artificial Sequence: Synthetic peptide
  XENP018539 vhCDR3
YYGNYGGYFDV

SEQ ID NO: 6746 - protein, 11 aa, Artificial Sequence
  Description of Artificial Sequence: Synthetic peptide
  XENP018539 vlCDR1
RASQSVSNDVA

SEQ ID NO: 6747 - protein, 7 aa, Artificial Sequence
  Description of Artificial Sequence: Synthetic peptide
  XENP018539 vlCDR2
YASHRYT

SEQ ID NO: 6748 - protein, 9 aa, Artificial Sequence
  Description of Artificial Sequence: Synthetic peptide
  XENP018539 vlCDR3
QQDYSSPRT

SEQ ID NO: 6749 - protein, 249 aa, Artificial Sequence
  Description of Artificial Sequence: Synthetic polypeptide
  XENP018540 1G6_H1.44_L1_scFv(GKPGS)4
EVQLVESGGGLVKPGGSLRLSCAASGFTFSNYWMGWVRQAPGKGLEWVGEIRLKSNNYATHYAEPVKGRFTISRDDSKSTVYLQMNSLKTEDTAVYYCTRYYGNYGGYFDVWGAGTLVTVSSGKPGSGKPGSGKPGSGKPGSSIVMTQSPATLSVSPGERATLSCRASQSVSNDVAWYQQKPGQSPRLLINYASHRYTGVPDRFTGSGYGTEFTLTISSLQSEDFAVYFCQQDYSSPRTFGGGTKVEIK

SEQ ID NO: 6750 - protein, 122 aa, Artificial Sequence
  Description of Artificial Sequence: Synthetic polypeptide
  VH of XENP018540
EVQLVESGGGLVKPGGSLRLSCAASGFTFSNYWMGWVRQAPGKGLEWVGEIRLKSNNYATHYAEPVKGRFTISRDDSKSTVYLQMNSLKTEDTAVYYCTRYYGNYGGYFDVWGAGTLVTVSS

SEQ ID NO: 6751 - protein, 107 aa, Artificial Sequence; identical to SEQ ID NO: 6247
  Description of Artificial Sequence: Synthetic polypeptide
  VL of XENP018540

SEQ ID NO: 6752 - protein, 5 aa, Artificial Sequence
  Description of Artificial Sequence: Synthetic peptide
  XENP018540 vhCDR1
NYWMG

SEQ ID NO: 6753 - protein, 19 aa, Artificial Sequence
  Description of Artificial Sequence: Synthetic peptide
  XENP018540 vhCDR2
EIRLKSNNYATHYAEPVKG

SEQ ID NO: 6754 - protein, 11 aa, Artificial Sequence
  Description of Artificial Sequence: Synthetic peptide
  XENP018540 vhCDR3
YYGNYGGYFDV

SEQ ID NO: 6755 - protein, 11 aa, Artificial Sequence
  Description of Artificial Sequence: Synthetic peptide
  XENP018540 vlCDR1
RASQSVSNDVA

SEQ ID NO: 6756 - protein, 7 aa, Artificial Sequence
  Description of Artificial Sequence: Synthetic peptide
  XENP018540 vlCDR2
YASHRYT

SEQ ID NO: 6757 - protein, 9 aa, Artificial Sequence
  Description of Artificial Sequence: Synthetic peptide
  XENP018540 vlCDR3
QQDYSSPRT

SEQ ID NO: 6758 - protein, 249 aa, Artificial Sequence
  Description of Artificial Sequence: Synthetic polypeptide
  XENP018541 1G6_H1.45_L1_scFv(GKPGS)4
EVQLVESGGGLVKPGGSLRLSCAASGFTFSNYWMNWARQAPGKGLEWVGEIRLKSNNYATHYAEPVKGRFTISRDDSKSTVYLQMNSLKTEDTAVYYCTRYYGNYGGYFDVWGAGTLVTVSSGKPGSGKPGSGKPGSGKPGSSIVMTQSPATLSVSPGERATLSCRASQSVSNDVAWYQQKPGQSPRLLINYASHRYTGVPDRFTGSGYGTEFTLTISSLQSEDFAVYFCQQDYSSPRTFGGGTKVEIK

SEQ ID NO: 6759 - protein, 122 aa, Artificial Sequence
  Description of Artificial Sequence: Synthetic polypeptide
  VH of XENP018541
EVQLVESGGGLVKPGGSLRLSCAASGFTFSNYWMNWARQAPGKGLEWVGEIRLKSNNYATHYAEPVKGRFTISRDDSKSTVYLQMNSLKTEDTAVYYCTRYYGNYGGYFDVWGAGTLVTVSS

SEQ ID NO: 6760 - protein, 107 aa, Artificial Sequence; identical to SEQ ID NO: 6247
  Description of Artificial Sequence: Synthetic polypeptide
  VL of XENP018541

SEQ ID NO: 6761 - protein, 5 aa, Artificial Sequence
  Description of Artificial Sequence: Synthetic peptide
  XENP018541 vhCDR1
NYWMN

SEQ ID NO: 6762 - protein, 19 aa, Artificial Sequence
  Description of Artificial Sequence: Synthetic peptide
  XENP018541 vhCDR2
EIRLKSNNYATHYAEPVKG

SEQ ID NO: 6763 - protein, 11 aa, Artificial Sequence
  Description of Artificial Sequence: Synthetic peptide
  XENP018541 vhCDR3
YYGNYGGYFDV

SEQ ID NO: 6764 - protein, 11 aa, Artificial Sequence
  Description of Artificial Sequence: Synthetic peptide
  XENP018541 vlCDR1
RASQSVSNDVA

SEQ ID NO: 6765 - protein, 7 aa, Artificial Sequence
  Description of Artificial Sequence: Synthetic peptide
  XENP018541 vlCDR2
YASHRYT

SEQ ID NO: 6766 - protein, 9 aa, Artificial Sequence
  Description of Artificial Sequence: Synthetic peptide
  XENP018541 vlCDR3
QQDYSSPRT

SEQ ID NO: 6767 - protein, 249 aa, Artificial Sequence
  Description of Artificial Sequence: Synthetic polypeptide
  XENP018542 1G6_H1.46_L1_scFv(GKPGS)4
EVQLVESGGGLVKPGGSLRLSCAASGFTFSNYWMNWIRQAPGKGLEWVGEIRLKSNNYATHYAEPVKGRFTISRDDSKSTVYLQMNSLKTEDTAVYYCTRYYGNYGGYFDVWGAGTLVTVSSGKPGSGKPGSGKPGSGKPGSSIVMTQSPATLSVSPGERATLSCRASQSVSNDVAWYQQKPGQSPRLLINYASHRYTGVPDRFTGSGYGTEFTLTISSLQSEDFAVYFCQQDYSSPRTFGGGTKVEIK

SEQ ID NO: 6768 - protein, 122 aa, Artificial Sequence
  Description of Artificial Sequence: Synthetic polypeptide
  VH of XENP018542
EVQLVESGGGLVKPGGSLRLSCAASGFTFSNYWMNWIRQAPGKGLEWVGEIRLKSNNYATHYAEPVKGRFTISRDDSKSTVYLQMNSLKTEDTAVYYCTRYYGNYGGYFDVWGAGTLVTVSS

SEQ ID NO: 6769 - protein, 107 aa, Artificial Sequence; identical to SEQ ID NO: 6247
  Description of Artificial Sequence: Synthetic polypeptide
  VL of XENP018542

SEQ ID NO: 6770 - protein, 5 aa, Artificial Sequence
  Description of Artificial Sequence: Synthetic peptide
  XENP018542 vhCDR1
NYWMN

SEQ ID NO: 6771 - protein, 19 aa, Artificial Sequence
  Description of Artificial Sequence: Synthetic peptide
  XENP018542 vhCDR2
EIRLKSNNYATHYAEPVKG

SEQ ID NO: 6772 - protein, 11 aa, Artificial Sequence
  Description of Artificial Sequence: Synthetic peptide
  XENP018542 vhCDR3
YYGNYGGYFDV

SEQ ID NO: 6773 - protein, 11 aa, Artificial Sequence
  Description of Artificial Sequence: Synthetic peptide
  XENP018542 vlCDR1
RASQSVSNDVA

SEQ ID NO: 6774 - protein, 7 aa, Artificial Sequence
  Description of Artificial Sequence: Synthetic peptide
  XENP018542 vlCDR2
YASHRYT

SEQ ID NO: 6775 - protein, 9 aa, Artificial Sequence
  Description of Artificial Sequence: Synthetic peptide
  XENP018542 vlCDR3
QQDYSSPRT

SEQ ID NO: 6776 - protein, 249 aa, Artificial Sequence
  Description of Artificial Sequence: Synthetic polypeptide
  XENP018543 1G6_H1.47_L1_scFv(GKPGS)4
EVQLVESGGGLVKPGGSLRLSCAASGFTFSNYWMNWFRQAPGKGLEWVGEIRLKSNNYATHYAEPVKGRFTISRDDSKSTVYLQMNSLKTEDTAVYYCTRYYGNYGGYFDVWGAGTLVTVSSGKPGSGKPGSGKPGSGKPGSSIVMTQSPATLSVSPGERATLSCRASQSVSNDVAWYQQKPGQSPRLLINYASHRYTGVPDRFTGSGYGTEFTLTISSLQSEDFAVYFCQQDYSSPRTFGGGTKVEIK

SEQ ID NO: 6777 - protein, 122 aa, Artificial Sequence
  Description of Artificial Sequence: Synthetic polypeptide
  VH of XENP018543
EVQLVESGGGLVKPGGSLRLSCAASGFTFSNYWMNWFRQAPGKGLEWVGEIRLKSNNYATHYAEPVKGRFTISRDDSKSTVYLQMNSLKTEDTAVYYCTRYYGNYGGYFDVWGAGTLVTVSS

SEQ ID NO: 6778 - protein, 107 aa, Artificial Sequence; identical to SEQ ID NO: 6247
  Description of Artificial Sequence: Synthetic polypeptide
  VL of XENP018543

SEQ ID NO: 6779 - protein, 5 aa, Artificial Sequence
  Description of Artificial Sequence: Synthetic peptide
  XENP018543 vhCDR1
NYWMN

SEQ ID NO: 6780 - protein, 19 aa, Artificial Sequence
  Description of Artificial Sequence: Synthetic peptide
  XENP018543 vhCDR2
EIRLKSNNYATHYAEPVKG

SEQ ID NO: 6781 - protein, 11 aa, Artificial Sequence
  Description of Artificial Sequence: Synthetic peptide
  XENP018543 vhCDR3
YYGNYGGYFDV

SEQ ID NO: 6782 - protein, 11 aa, Artificial Sequence
  Description of Artificial Sequence: Synthetic peptide
  XENP018543 vlCDR1
RASQSVSNDVA

SEQ ID NO: 6783 - protein, 7 aa, Artificial Sequence
  Description of Artificial Sequence: Synthetic peptide
  XENP018543 vlCDR2
YASHRYT

SEQ ID NO: 6784 - protein, 9 aa, Artificial Sequence
  Description of Artificial Sequence: Synthetic peptide
  XENP018543 vlCDR3
QQDYSSPRT

SEQ ID NO: 6785 - protein, 249 aa, Artificial Sequence
  Description of Artificial Sequence: Synthetic polypeptide
  XENP018544 1G6_H1.48_L1_scFv(GKPGS)4
EVQLVESGGGLVKPGGSLRLSCAASGFTFSNYWMNWVRKAPGKGLEWVGEIRLKSNNYATHYAEPVKGRFTISRDDSKSTVYLQMNSLKTEDTAVYYCTRYYGNYGGYFDVWGAGTLVTVSSGKPGSGKPGSGKPGSGKPGSSIVMTQSPATLSVSPGERATLSCRASQSVSNDVAWYQQKPGQSPRLLINYASHRYTGVPDRFTGSGYGTEFTLTISSLQSEDFAVYFCQQDYSSPRTFGGGTKVEIK

SEQ ID NO: 6786 - protein, 122 aa, Artificial Sequence
  Description of Artificial Sequence: Synthetic polypeptide
  VH of XENP018544
EVQLVESGGGLVKPGGSLRLSCAASGFTFSNYWMNWVRKAPGKGLEWVGEIRLKSNNYATHYAEPVKGRFTISRDDSKSTVYLQMNSLKTEDTAVYYCTRYYGNYGGYFDVWGAGTLVTVSS

SEQ ID NO: 6787 - protein, 107 aa, Artificial Sequence; identical to SEQ ID NO: 6247
  Description of Artificial Sequence: Synthetic polypeptide
  VL of XENP018544

SEQ ID NO: 6788 - protein, 11 aa, Artificial Sequence
  Description of Artificial Sequence: Synthetic peptide
  XENP018544 vlCDR1
RASQSVSNDVA

SEQ ID NO: 6789 - protein, 7 aa, Artificial Sequence
  Description of Artificial Sequence: Synthetic peptide
  XENP018544 vlCDR2
YASHRYT

SEQ ID NO: 6790 - protein, 9 aa, Artificial Sequence
  Description of Artificial Sequence: Synthetic peptide
  XENP018544 vlCDR3
QQDYSSPRT

SEQ ID NO: 6791 - protein, 249 aa, Artificial Sequence
  Description of Artificial Sequence: Synthetic polypeptide
  XENP018545 1G6_H1.49_L1_scFv(GKPGS)4
EVQLVESGGGLVKPGGSLRLSCAASGFTFSNYWMNWVRQSPGKGLEWVGEIRLKSNNYATHYAEPVKGRFTISRDDSKSTVYLQMNSLKTEDTAVYYCTRYYGNYGGYFDVWGAGTLVTVSSGKPGSGKPGSGKPGSGKPGSSIVMTQSPATLSVSPGERATLSCRASQSVSNDVAWYQQKPGQSPRLLINYASHRYTGVPDRFTGSGYGTEFTLTISSLQSEDFAVYFCQQDYSSPRTFGGGTKVEIK

SEQ ID NO: 6792 - protein, 122 aa, Artificial Sequence
  Description of Artificial Sequence: Synthetic polypeptide
  VH of XENP018545
EVQLVESGGGLVKPGGSLRLSCAASGFTFSNYWMNWVRQSPGKGLEWVGEIRLKSNNYATHYAEPVKGRFTISRDDSKSTVYLQMNSLKTEDTAVYYCTRYYGNYGGYFDVWGAGTLVTVSS

SEQ ID NO: 6793 - protein, 107 aa, Artificial Sequence; identical to SEQ ID NO: 6247
  Description of Artificial Sequence: Synthetic polypeptide
  VL of XENP018545

SEQ ID NO: 6794 - protein, 5 aa, Artificial Sequence
  Description of Artificial Sequence: Synthetic peptide
  XENP018545 vhCDR1
NYWMN

SEQ ID NO: 6795 - protein, 19 aa, Artificial Sequence
  Description of Artificial Sequence: Synthetic peptide
  XENP018545 vhCDR2
EIRLKSNNYATHYAEPVKG

SEQ ID NO: 6796 - protein, 11 aa, Artificial Sequence
  Description of Artificial Sequence: Synthetic peptide
  XENP018545 vhCDR3
YYGNYGGYFDV

SEQ ID NO: 6797 - protein, 11 aa, Artificial Sequence
  Description of Artificial Sequence: Synthetic peptide
  XENP018545 vlCDR1
RASQSVSNDVA

SEQ ID NO: 6798 - protein, 7 aa, Artificial Sequence
  Description of Artificial Sequence: Synthetic peptide
  XENP018545 vlCDR2
YASHRYT

SEQ ID NO: 6799 - protein, 9 aa, Artificial Sequence
  Description of Artificial Sequence: Synthetic peptide
  XENP018545 vlCDR3
QQDYSSPRT

SEQ ID NO: 6800 - protein, 249 aa, Artificial Sequence
  Description of Artificial Sequence: Synthetic polypeptide
  XENP018546 1G6_H1.50_L1_scFv(GKPGS)4
EVQLVESGGGLVKPGGSLRLSCAASGFTFSNYWMNWVRQAPEKGLEWVGEIRLKSNNYATHYAEPVKGRFTISRDDSKSTVYLQMNSLKTEDTAVYYCTRYYGNYGGYFDVWGAGTLVTVSSGKPGSGKPGSGKPGSGKPGSSIVMTQSPATLSVSPGERATLSCRASQSVSNDVAWYQQKPGQSPRLLINYASHRYTGVPDRFTGSGYGTEFTLTISSLQSEDFAVYFCQQDYSSPRTFGGGTKVEIK

SEQ ID NO: 6801 - protein, 122 aa, Artificial Sequence
  Description of Artificial Sequence: Synthetic polypeptide
  VH of XENP018546
EVQLVESGGGLVKPGGSLRLSCAASGFTFSNYWMNWVRQAPEKGLEWVGEIRLKSNNYATHYAEPVKGRFTISRDDSKSTVYLQMNSLKTEDTAVYYCTRYYGNYGGYFDVWGAGTLVTVSS

SEQ ID NO: 6802 - protein, 107 aa, Artificial Sequence; identical to SEQ ID NO: 6247
  Description of Artificial Sequence: Synthetic polypeptide
  VL of XENP018546

SEQ ID NO: 6803 - protein, 5 aa, Artificial Sequence
  Description of Artificial Sequence: Synthetic peptide
  XENP018546 vhCDR1
NYWMN

SEQ ID NO: 6804 - protein, 19 aa, Artificial Sequence
  Description of Artificial Sequence: Synthetic peptide
  XENP018546 vhCDR2
EIRLKSNNYATHYAEPVKG

SEQ ID NO: 6805 - protein, 11 aa, Artificial Sequence
  Description of Artificial Sequence: Synthetic peptide
  XENP018546 vhCDR3
YYGNYGGYFDV

SEQ ID NO: 6806 - protein, 11 aa, Artificial Sequence
  Description of Artificial Sequence: Synthetic peptide
  XENP018546 vlCDR1
RASQSVSNDVA

SEQ ID NO: 6807 - protein, 7 aa, Artificial Sequence
  Description of Artificial Sequence: Synthetic peptide
  XENP018546 vlCDR2
YASHRYT

SEQ ID NO: 6808 - protein, 9 aa, Artificial Sequence
  Description of Artificial Sequence: Synthetic peptide
  XENP018546 vlCDR3
QQDYSSPRT

SEQ ID NO: 6809 - protein, 249 aa, Artificial Sequence
  Description of Artificial Sequence: Synthetic polypeptide
  XENP018547 1G6_H1.51_L1_scFv(GKPGS)4
EVQLVESGGGLVKPGGSLRLSCAASGFTFSNYWMNWVRQAPGKGLEYVGEIRLKSNNYATHYAEPVKGRFTISRDDSKSTVYLQMNSLKTEDTAVYYCTRYYGNYGGYFDVWGAGTLVTVSSGKPGSGKPGSGKPGSGKPGSSIVMTQSPATLSVSPGERATLSCRASQSVSNDVAWYQQKPGQSPRLLINYASHRYTGVPDRFTGSGYGTEFTLTISSLQSEDFAVYFCQQDYSSPRTFGGGTKVEIK

SEQ ID NO: 6810 - protein, 122 aa, Artificial Sequence
  Description of Artificial Sequence: Synthetic polypeptide
  VH of XENP018547
EVQLVESGGGLVKPGGSLRLSCAASGFTFSNYWMNWVRQAPGKGLEYVGEIRLKSNNYATHYAEPVKGRFTISRDDSKSTVYLQMNSLKTEDTAVYYCTRYYGNYGGYFDVWGAGTLVTVSS

SEQ ID NO: 6811 - protein, 107 aa, Artificial Sequence; identical to SEQ ID NO: 6247
  Description of Artificial Sequence: Synthetic polypeptide
  VL of XENP018547

SEQ ID NO: 6812 - protein, 5 aa, Artificial Sequence
  Description of Artificial Sequence: Synthetic peptide
  XENP018547 vhCDR1
NYWMN

SEQ ID NO: 6813 - protein, 19 aa, Artificial Sequence
  Description of Artificial Sequence: Synthetic peptide
  XENP018547 vhCDR2
EIRLKSNNYATHYAEPVKG

SEQ ID NO: 6814 - protein, 11 aa, Artificial Sequence
  Description of Artificial Sequence: Synthetic peptide
  XENP018547 vhCDR3
YYGNYGGYFDV

SEQ ID NO: 6815 - protein, 11 aa, Artificial Sequence
  Description of Artificial Sequence: Synthetic peptide
  XENP018547 vlCDR1
RASQSVSNDVA

SEQ ID NO: 6816 - protein, 7 aa, Artificial Sequence
  Description of Artificial Sequence: Synthetic peptide
  XENP018547 vlCDR2
YASHRYT

SEQ ID NO: 6817 - protein, 9 aa, Artificial Sequence
  Description of Artificial Sequence: Synthetic peptide
  XENP018547 vlCDR3
QQDYSSPRT

SEQ ID NO: 6818 - protein, 249 aa, Artificial Sequence
  Description of Artificial Sequence: Synthetic polypeptide
  XENP018548 1G6_H1.52_L1_scFv(GKPGS)4
EVQLVESGGGLVKPGGSLRLSCAASGFTFSNYWMNWVRQAPGKGLEWVAEIRLKSNNYATHYAEPVKGRFTISRDDSKSTVYLQMNSLKTEDTAVYYCTRYYGNYGGYFDVWGAGTLVTVSSGKPGSGKPGSGKPGSGKPGSSIVMTQSPATLSVSPGERATLSCRASQSVSNDVAWYQQKPGQSPRLLINYASHRYTGVPDRFTGSGYGTEFTLTISSLQSEDFAVYFCQQDYSSPRTFGGGTKVEIK

SEQ ID NO: 6819 - protein, 122 aa, Artificial Sequence
  Description of Artificial Sequence: Synthetic polypeptide
  VH of XENP018548
EVQLVESGGGLVKPGGSLRLSCAASGFTFSNYWMNWVRQAPGKGLEWVAEIRLKSNNYATHYAEPVKGRFTISRDDSKSTVYLQMNSLKTEDTAVYYCTRYYGNYGGYFDVWGAGTLVTVSS

SEQ ID NO: 6820 - protein, 107 aa, Artificial Sequence; identical to SEQ ID NO: 6247
  Description of Artificial Sequence: Synthetic polypeptide
  VL of XENP018548

SEQ ID NO: 6821 - protein, 5 aa, Artificial Sequence
  Description of Artificial Sequence: Synthetic peptide
  XENP018548 vhCDR1
NYWMN

SEQ ID NO: 6822 - protein, 19 aa, Artificial Sequence
  Description of Artificial Sequence: Synthetic peptide
  XENP018548 vhCDR2
EIRLKSNNYATHYAEPVKG

SEQ ID NO: 6823 - protein, 11 aa, Artificial Sequence
  Description of Artificial Sequence: Synthetic peptide
  XENP018548 vhCDR3
YYGNYGGYFDV

SEQ ID NO: 6824 - protein, 11 aa, Artificial Sequence
  Description of Artificial Sequence: Synthetic peptide
  XENP018548 vlCDR1
RASQSVSNDVA

SEQ ID NO: 6825 - protein, 7 aa, Artificial Sequence
  Description of Artificial Sequence: Synthetic peptide
  XENP018548 vlCDR2
YASHRYT

SEQ ID NO: 6826 - protein, 9 aa, Artificial Sequence
  Description of Artificial Sequence: Synthetic peptide
  XENP018548 vlCDR3
QQDYSSPRT

SEQ ID NO: 6827 - protein, 249 aa, Artificial Sequence
  Description of Artificial Sequence: Synthetic polypeptide
  XENP018549 1G6_H1.53_L1_scFv(GKPGS)4
EVQLVESGGGLVKPGGSLRLSCAASGFTFSNYWMNWVRQAPGKGLEWVSEIRLKSNNYATHYAEPVKGRFTISRDDSKSTVYLQMNSLKTEDTAVYYCTRYYGNYGGYFDVWGAGTLVTVSSGKPGSGKPGSGKPGSGKPGSSIVMTQSPATLSVSPGERATLSCRASQSVSNDVAWYQQKPGQSPRLLINYASHRYTGVPDRFTGSGYGTEFTLTISSLQSEDFAVYFCQQDYSSPRTFGGGTKVEIK

SEQ ID NO: 6828 - protein, 122 aa, Artificial Sequence
  Description of Artificial Sequence: Synthetic polypeptide
  VH of XENP018549
EVQLVESGGGLVKPGGSLRLSCAASGFTFSNYWMNWVRQAPGKGLEWVSEIRLKSNNYATHYAEPVKGRFTISRDDSKSTVYLQMNSLKTEDTAVYYCTRYYGNYGGYFDVWGAGTLVTVSS

SEQ ID NO: 6829 - protein, 107 aa, Artificial Sequence; identical to SEQ ID NO: 6247
  Description of Artificial Sequence: Synthetic polypeptide
  VL of XENP018549

SEQ ID NO: 6830 - protein, 5 aa, Artificial Sequence
  Description of Artificial Sequence: Synthetic peptide
  XENP018549 vhCDR1
NYWMN

SEQ ID NO: 6831 - protein, 19 aa, Artificial Sequence
  Description of Artificial Sequence: Synthetic peptide
  XENP018549 vhCDR2
EIRLKSNNYATHYAEPVKG

SEQ ID NO: 6832 - protein, 11 aa, Artificial Sequence
  Description of Artificial Sequence: Synthetic peptide
  XENP018549 vhCDR3
YYGNYGGYFDV

SEQ ID NO: 6833 - protein, 11 aa, Artificial Sequence
  Description of Artificial Sequence: Synthetic peptide
  XENP018549 vlCDR1
RASQSVSNDVA

SEQ ID NO: 6834 - protein, 7 aa, Artificial Sequence
  Description of Artificial Sequence: Synthetic peptide
  XENP018549 vlCDR2
YASHRYT

SEQ ID NO: 6835 - protein, 9 aa, Artificial Sequence
  Description of Artificial Sequence: Synthetic peptide
  XENP018549 vlCDR3
QQDYSSPRT

SEQ ID NO: 6836 - protein, 249 aa, Artificial Sequence
  Description of Artificial Sequence: Synthetic polypeptide
  XENP018550 1G6_H1.54_L1_scFv(GKPGS)4
EVQLVESGGGLVKPGGSLRLSCAASGFTFSNYWMNWVRQAPGKGLEWVGQIRLKSNNYATHYAEPVKGRFTISRDDSKSTVYLQMNSLKTEDTAVYYCTRYYGNYGGYFDVWGAGTLVTVSSGKPGSGKPGSGKPGSGKPGSSIVMTQSPATLSVSPGERATLSCRASQSVSNDVAWYQQKPGQSPRLLINYASHRYTGVPDRFTGSGYGTEFTLTISSLQSEDFAVYFCQQDYSSPRTFGGGTKVEIK

SEQ ID NO: 6837 - protein, 122 aa, Artificial Sequence
  Description of Artificial Sequence: Synthetic polypeptide
  VH of XENP018550
EVQLVESGGGLVKPGGSLRLSCAASGFTFSNYWMNWVRQAPGKGLEWVGQIRLKSNNYATHYAEPVKGRFTISRDDSKSTVYLQMNSLKTEDTAVYYCTRYYGNYGGYFDVWGAGTLVTVSS

SEQ ID NO: 6838 - protein, 107 aa, Artificial Sequence; identical to SEQ ID NO: 6247
  Description of Artificial Sequence: Synthetic polypeptide
  VL of XENP018550

SEQ ID NO: 6839 - protein, 5 aa, Artificial Sequence
  Description of Artificial Sequence: Synthetic peptide
  XENP018550 vhCDR1
NYWMN

SEQ ID NO: 6840 - protein, 19 aa, Artificial Sequence
  Description of Artificial Sequence: Synthetic peptide
  XENP018550 vhCDR2
QIRLKSNNYATHYAEPVKG

SEQ ID NO: 6841 - protein, 11 aa, Artificial Sequence
  Description of Artificial Sequence: Synthetic peptide
  XENP018550 vhCDR3
YYGNYGGYFDV

SEQ ID NO: 6842 - protein, 11 aa, Artificial Sequence
  Description of Artificial Sequence: Synthetic peptide
  XENP018550 vlCDR1
RASQSVSNDVA

SEQ ID NO: 6843 - protein, 7 aa, Artificial Sequence
  Description of Artificial Sequence: Synthetic peptide
  XENP018550 vlCDR2
YASHRYT

SEQ ID NO: 6844 - protein, 9 aa, Artificial Sequence
  Description of Artificial Sequence: Synthetic peptide
  XENP018550 vlCDR3
QQDYSSPRT

SEQ ID NO: 6845 - protein, 249 aa, Artificial Sequence
  Description of Artificial Sequence: Synthetic polypeptide
  XENP018551 1G6_H1.55_L1_scFv(GKPGS)4
EVQLVESGGGLVKPGGSLRLSCAASGFTFSNYWMNWVRQAPGKGLEWVGDIRLKSNNYATHYAEPVKGRFTISRDDSKSTVYLQMNSLKTEDTAVYYCTRYYGNYGGYFDVWGAGTLVTVSSGKPGSGKPGSGKPGSGKPGSSIVMTQSPATLSVSPGERATLSCRASQSVSNDVAWYQQKPGQSPRLLINYASHRYTGVPDRFTGSGYGTEFTLTISSLQSEDFAVYFCQQDYSSPRTFGGGTKVEIK

SEQ ID NO: 6846 - protein, 122 aa, Artificial Sequence
  Description of Artificial Sequence: Synthetic polypeptide
  VH of XENP018551
EVQLVESGGGLVKPGGSLRLSCAASGFTFSNYWMNWVRQAPGKGLEWVGDIRLKSNNYATHYAEPVKGRFTISRDDSKSTVYLQMNSLKTEDTAVYYCTRYYGNYGGYFDVWGAGTLVTVSS

SEQ ID NO: 6847 - protein, 107 aa, Artificial Sequence; identical to SEQ ID NO: 6247
  Description of Artificial Sequence: Synthetic polypeptide
  VL of XENP018551

SEQ ID NO: 6848 - protein, 5 aa, Artificial Sequence
  Description of Artificial Sequence: Synthetic peptide
  XENP018551 vhCDR1
NYWMN

SEQ ID NO: 6849 - protein, 19 aa, Artificial Sequence
  Description of Artificial Sequence: Synthetic peptide
  XENP018551 vhCDR2
DIRLKSNNYATHYAEPVKG

SEQ ID NO: 6850 - protein, 11 aa, Artificial Sequence
  Description of Artificial Sequence: Synthetic peptide
  XENP018551 vhCDR3
YYGNYGGYFDV

SEQ ID NO: 6851 - protein, 11 aa, Artificial Sequence
  Description of Artificial Sequence: Synthetic peptide
  XENP018551 vlCDR1
RASQSVSNDVA

SEQ ID NO: 6852 - protein, 7 aa, Artificial Sequence
  Description of Artificial Sequence: Synthetic peptide
  XENP018551 vlCDR2
YASHRYT

SEQ ID NO: 6853 - protein, 9 aa, Artificial Sequence
  Description of Artificial Sequence: Synthetic peptide
  XENP018551 vlCDR3
QQDYSSPRT

SEQ ID NO: 6854 - protein, 249 aa, Artificial Sequence
  Description of Artificial Sequence: Synthetic polypeptide
  XENP018552 1G6_H1.56_L1_scFv(GKPGS)4
EVQLVESGGGLVKPGGSLRLSCAASGFTFSNYWMNWVRQAPGKGLEWVGKIRLKSNNYATHYAEPVKGRFTISRDDSKSTVYLQMNSLKTEDTAVYYCTRYYGNYGGYFDVWGAGTLVTVSSGKPGSGKPGSGKPGSGKPGSSIVMTQSPATLSVSPGERATLSCRASQSVSNDVAWYQQKPGQSPRLLINYASHRYTGVPDRFTGSGYGTEFTLTISSLQSEDFAVYFCQQDYSSPRTFGGGTKVEIK

SEQ ID NO: 6855 - protein, 122 aa, Artificial Sequence
  Description of Artificial Sequence: Synthetic polypeptide
  VH of XENP018552
EVQLVESGGGLVKPGGSLRLSCAASGFTFSNYWMNWVRQAPGKGLEWVGKIRLKSNNYATHYAEPVKGRFTISRDDSKSTVYLQMNSLKTEDTAVYYCTRYYGNYGGYFDVWGAGTLVTVSS

SEQ ID NO: 6856 - protein, 107 aa, Artificial Sequence; identical to SEQ ID NO: 6247
  Description of Artificial Sequence: Synthetic polypeptide
  VL of XENP018552

SEQ ID NO: 6857 - protein, 5 aa, Artificial Sequence
  Description of Artificial Sequence: Synthetic peptide
  XENP018552 vhCDR1
NYWMN

SEQ ID NO: 6858 - protein, 19 aa, Artificial Sequence
  Description of Artificial Sequence: Synthetic peptide
  XENP018552 vhCDR2
KIRLKSNNYATHYAEPVKG

SEQ ID NO: 6859 - protein, 11 aa, Artificial Sequence
  Description of Artificial Sequence: Synthetic peptide
  XENP018552 vhCDR3
YYGNYGGYFDV

SEQ ID NO: 6860 - protein, 11 aa, Artificial Sequence
  Description of Artificial Sequence: Synthetic peptide
  XENP018552 vlCDR1
RASQSVSNDVA

SEQ ID NO: 6861 - protein, 7 aa, Artificial Sequence
  Description of Artificial Sequence: Synthetic peptide
  XENP018552 vlCDR2
YASHRYT

SEQ ID NO: 6862 - protein, 9 aa, Artificial Sequence
  Description of Artificial Sequence: Synthetic peptide
  XENP018552 vlCDR3
QQDYSSPRT

SEQ ID NO: 6863 - protein, 249 aa, Artificial Sequence
  Description of Artificial Sequence: Synthetic polypeptide
  XENP018553 1G6_H1.57_L1_scFv(GKPGS)4
EVQLVESGGGLVKPGGSLRLSCAASGFTFSNYWMNWVRQAPGKGLEWVGSIRLKSNNYATHYAEPVKGRFTISRDDSKSTVYLQMNSLKTEDTAVYYCTRYYGNYGGYFDVWGAGTLVTVSSGKPGSGKPGSGKPGSGKPGSSIVMTQSPATLSVSPGERATLSCRASQSVSNDVAWYQQKPGQSPRLLINYASHRYTGVPDRFTGSGYGTEFTLTISSLQSEDFAVYFCQQDYSSPRTFGGGTKVEIK

SEQ ID NO: 6864 - protein, 122 aa, Artificial Sequence
  Description of Artificial Sequence: Synthetic polypeptide
  VH of XENP018553
EVQLVESGGGLVKPGGSLRLSCAASGFTFSNYWMNWVRQAPGKGLEWVGSIRLKSNNYATHYAEPVKGRFTISRDDSKSTVYLQMNSLKTEDTAVYYCTRYYGNYGGYFDVWGAGTLVTVSS

SEQ ID NO: 6865 - protein, 107 aa, Artificial Sequence; identical to SEQ ID NO: 6247
  Description of Artificial Sequence: Synthetic polypeptide
  VL of XENP018553

SEQ ID NO: 6866 - protein, 5 aa, Artificial Sequence
  Description of Artificial Sequence: Synthetic peptide
  XENP018553 vhCDR1
NYWMN

SEQ ID NO: 6867 - protein, 19 aa, Artificial Sequence
  Description of Artificial Sequence: Synthetic peptide
  XENP018553 vhCDR2
SIRLKSNNYATHYAEPVKG

SEQ ID NO: 6868 - protein, 11 aa, Artificial Sequence
  Description of Artificial Sequence: Synthetic peptide
  XENP018553 vhCDR3
YYGNYGGYFDV

SEQ ID NO: 6869 - protein, 11 aa, Artificial Sequence
  Description of Artificial Sequence: Synthetic peptide
  XENP018553 vlCDR1
RASQSVSNDVA

SEQ ID NO: 6870 - protein, 7 aa, Artificial Sequence
  Description of Artificial Sequence: Synthetic peptide
  XENP018553 vlCDR2
YASHRYT

SEQ ID NO: 6871 - protein, 9 aa, Artificial Sequence
  Description of Artificial Sequence: Synthetic peptide
  XENP018553 vlCDR3
QQDYSSPRT

SEQ ID NO: 6872 - protein, 249 aa, Artificial Sequence
  Description of Artificial Sequence: Synthetic polypeptide
  XENP018554 1G6_H1.58_L1_scFv(GKPGS)4
EVQLVESGGGLVKPGGSLRLSCAASGFTFSNYWMNWVRQAPGKGLEWVGHIRLKSNNYATHYAEPVKGRFTISRDDSKSTVYLQMNSLKTEDTAVYYCTRYYGNYGGYFDVWGAGTLVTVSSGKPGSGKPGSGKPGSGKPGSSIVMTQSPATLSVSPGERATLSCRASQSVSNDVAWYQQKPGQSPRLLINYASHRYTGVPDRFTGSGYGTEFTLTISSLQSEDFAVYFCQQDYSSPRTFGGGTKVEIK

SEQ ID NO: 6873 - protein, 122 aa, Artificial Sequence
  Description of Artificial Sequence: Synthetic polypeptide
  VH of XENP018554
EVQLVESGGGLVKPGGSLRLSCAASGFTFSNYWMNWVRQAPGKGLEWVGHIRLKSNNYATHYAEPVKGRFTISRDDSKSTVYLQMNSLKTEDTAVYYCTRYYGNYGGYFDVWGAGTLVTVSS

SEQ ID NO: 6874 - protein, 107 aa, Artificial Sequence; identical to SEQ ID NO: 6247
  Description of Artificial Sequence: Synthetic polypeptide
  VL of XENP018554

SEQ ID NO: 6875 - protein, 5 aa, Artificial Sequence
  Description of Artificial Sequence: Synthetic peptide
  XENP018554 vhCDR1
NYWMN

SEQ ID NO: 6876 - protein, 19 aa, Artificial Sequence
  Description of Artificial Sequence: Synthetic peptide
  XENP018554 vhCDR2
HIRLKSNNYATHYAEPVKG

SEQ ID NO: 6877 - protein, 11 aa, Artificial Sequence
  Description of Artificial Sequence: Synthetic peptide
  XENP018554 vhCDR3
YYGNYGGYFDV

SEQ ID NO: 6878 - protein, 11 aa, Artificial Sequence
  Description of Artificial Sequence: Synthetic peptide
  XENP018554 vlCDR1
RASQSVSNDVA

SEQ ID NO: 6879 - protein, 7 aa, Artificial Sequence
  Description of Artificial Sequence: Synthetic peptide
  XENP018554 vlCDR2
YASHRYT

SEQ ID NO: 6880 - protein, 9 aa, Artificial Sequence
  Description of Artificial Sequence: Synthetic peptide
  XENP018554 vlCDR3
QQDYSSPRT

SEQ ID NO: 6881 - protein, 249 aa, Artificial Sequence
  Description of Artificial Sequence: Synthetic polypeptide
  XENP018555 1G6_H1.59_L1_scFv(GKPGS)4
EVQLVESGGGLVKPGGSLRLSCAASGFTFSNYWMNWVRQAPGKGLEWVGAIRLKSNNYATHYAEPVKGRFTISRDDSKSTVYLQMNSLKTEDTAVYYCTRYYGNYGGYFDVWGAGTLVTVSSGKPGSGKPGSGKPGSGKPGSSIVMTQSPATLSVSPGERATLSCRASQSVSNDVAWYQQKPGQSPRLLINYASHRYTGVPDRFTGSGYGTEFTLTISSLQSEDFAVYFCQQDYSSPRTFGGGTKVEIK

SEQ ID NO: 6882 - protein, 122 aa, Artificial Sequence
  Description of Artificial Sequence: Synthetic polypeptide
  VH of XENP018555
EVQLVESGGGLVKPGGSLRLSCAASGFTFSNYWMNWVRQAPGKGLEWVGAIRLKSNNYATHYAEPVKGRFTISRDDSKSTVYLQMNSLKTEDTAVYYCTRYYGNYGGYFDVWGAGTLVTVSS

SEQ ID NO: 6883 - protein, 107 aa, Artificial Sequence; identical to SEQ ID NO: 6247
  Description of Artificial Sequence: Synthetic polypeptide
  VL of XENP018555

SEQ ID NO: 6884 - protein, 5 aa, Artificial Sequence
  Description of Artificial Sequence: Synthetic peptide
  XENP018555 vhCDR1
NYWMN

SEQ ID NO: 6885 - protein, 19 aa, Artificial Sequence
  Description of Artificial Sequence: Synthetic peptide
  XENP018555 vhCDR2
AIRLKSNNYATHYAEPVKG

SEQ ID NO: 6886 - protein, 11 aa, Artificial Sequence
  Description of Artificial Sequence: Synthetic peptide
  XENP018555 vhCDR3
YYGNYGGYFDV

SEQ ID NO: 6887 - protein, 11 aa, Artificial Sequence
  Description of Artificial Sequence: Synthetic peptide
  XENP018555 vlCDR1
RASQSVSNDVA

SEQ ID NO: 6888 - protein, 7 aa, Artificial Sequence
  Description of Artificial Sequence: Synthetic peptide
  XENP018555 vlCDR2
YASHRYT

SEQ ID NO: 6889 - protein, 9 aa, Artificial Sequence
  Description of Artificial Sequence: Synthetic peptide
  XENP018555 vlCDR3
QQDYSSPRT

SEQ ID NO: 6890 - protein, 249 aa, Artificial Sequence
  Description of Artificial Sequence: Synthetic polypeptide
  XENP018556 1G6_H1.60_L1_scFv(GKPGS)4
EVQLVESGGGLVKPGGSLRLSCAASGFTFSNYWMNWVRQAPGKGLEWVGGIRLKSNNYATHYAEPVKGRFTISRDDSKSTVYLQMNSLKTEDTAVYYCTRYYGNYGGYFDVWGAGTLVTVSSGKPGSGKPGSGKPGSGKPGSSIVMTQSPATLSVSPGERATLSCRASQSVSNDVAWYQQKPGQSPRLLINYASHRYTGVPDRFTGSGYGTEFTLTISSLQSEDFAVYFCQQDYSSPRTFGGGTKVEIK

SEQ ID NO: 6891 - protein, 122 aa, Artificial Sequence
  Description of Artificial Sequence: Synthetic polypeptide
  VH of XENP018556
EVQLVESGGGLVKPGGSLRLSCAASGFTFSNYWMNWVRQAPGKGLEWVGGIRLKSNNYATHYAEPVKGRFTISRDDSKSTVYLQMNSLKTEDTAVYYCTRYYGNYGGYFDVWGAGTLVTVSS

SEQ ID NO: 6892 - protein, 107 aa, Artificial Sequence; identical to SEQ ID NO: 6247
  Description of Artificial Sequence: Synthetic polypeptide
  VL of XENP018556

SEQ ID NO: 6893 - protein, 5 aa, Artificial Sequence
  Description of Artificial Sequence: Synthetic peptide
  XENP018556 vhCDR1
NYWMN

SEQ ID NO: 6894 - protein, 19 aa, Artificial Sequence
  Description of Artificial Sequence: Synthetic peptide
  XENP018556 vhCDR2
GIRLKSNNYATHYAEPVKG

SEQ ID NO: 6895 - protein, 11 aa, Artificial Sequence
  Description of Artificial Sequence: Synthetic peptide
  XENP018556 vhCDR3
YYGNYGGYFDV

SEQ ID NO: 6896 - protein, 11 aa, Artificial Sequence
  Description of Artificial Sequence: Synthetic peptide
  XENP018556 vlCDR1
RASQSVSNDVA

SEQ ID NO: 6897 - protein, 7 aa, Artificial Sequence
  Description of Artificial Sequence: Synthetic peptide
  XENP018556 vlCDR2
YASHRYT

SEQ ID NO: 6898 - protein, 9 aa, Artificial Sequence
  Description of Artificial Sequence: Synthetic peptide
  XENP018556 vlCDR3
QQDYSSPRT

SEQ ID NO: 6899 - protein, 249 aa, Artificial Sequence
  Description of Artificial Sequence: Synthetic polypeptide
  XENP018557 1G6_H1.61_L1_scFv(GKPGS)4
EVQLVESGGGLVKPGGSLRLSCAASGFTFSNYWMNWVRQAPGKGLEWVGYIRLKSNNYATHYAEPVKGRFTISRDDSKSTVYLQMNSLKTEDTAVYYCTRYYGNYGGYFDVWGAGTLVTVSSGKPGSGKPGSGKPGSGKPGSSIVMTQSPATLSVSPGERATLSCRASQSVSNDVAWYQQKPGQSPRLLINYASHRYTGVPDRFTGSGYGTEFTLTISSLQSEDFAVYFCQQDYSSPRTFGGGTKVEIK

SEQ ID NO: 6900 - protein, 122 aa, Artificial Sequence
  Description of Artificial Sequence: Synthetic polypeptide
  VH of XENP018557
EVQLVESGGGLVKPGGSLRLSCAASGFTFSNYWMNWVRQAPGKGLEWVGYIRLKSNNYATHYAEPVKGRFTISRDDSKSTVYLQMNSLKTEDTAVYYCTRYYGNYGGYFDVWGAGTLVTVSS

SEQ ID NO: 6901 - protein, 107 aa, Artificial Sequence; identical to SEQ ID NO: 6247
  Description of Artificial Sequence: Synthetic polypeptide
  VL of XENP018557

SEQ ID NO: 6902 - protein, 5 aa, Artificial Sequence
  Description of Artificial Sequence: Synthetic peptide
  XENP018557 vhCDR1
NYWMN

SEQ ID NO: 6903 - protein, 19 aa, Artificial Sequence
  Description of Artificial Sequence: Synthetic peptide
  XENP018557 vhCDR2
YIRLKSNNYATHYAEPVKG

SEQ ID NO: 6904 - protein, 11 aa, Artificial Sequence
  Description of Artificial Sequence: Synthetic peptide
  XENP018557 vhCDR3
YYGNYGGYFDV

SEQ ID NO: 6905 - protein, 11 aa, Artificial Sequence
  Description of Artificial Sequence: Synthetic peptide
  XENP018557 vlCDR1
RASQSVSNDVA

SEQ ID NO: 6906 - protein, 7 aa, Artificial Sequence
  Description of Artificial Sequence: Synthetic peptide
  XENP018557 vlCDR2
YASHRYT

SEQ ID NO: 6907 - protein, 9 aa, Artificial Sequence
  Description of Artificial Sequence: Synthetic peptide
  XENP018557 vlCDR3
QQDYSSPRT

SEQ ID NO: 6908 - protein, 249 aa, Artificial Sequence
  Description of Artificial Sequence: Synthetic polypeptide
  XENP018558 1G6_H1.62_L1_scFv(GKPGS)4
EVQLVESGGGLVKPGGSLRLSCAASGFTFSNYWMNWVRQAPGKGLEWVGIIRLKSNNYATHYAEPVKGRFTISRDDSKSTVYLQMNSLKTEDTAVYYCTRYYGNYGGYFDVWGAGTLVTVSSGKPGSGKPGSGKPGSGKPGSSIVMTQSPATLSVSPGERATLSCRASQSVSNDVAWYQQKPGQSPRLLINYASHRYTGVPDRFTGSGYGTEFTLTISSLQSEDFAVYFCQQDYSSPRTFGGGTKVEIK

SEQ ID NO: 6909 - protein, 122 aa, Artificial Sequence
  Description of Artificial Sequence: Synthetic polypeptide
  VH of XENP018558
EVQLVESGGGLVKPGGSLRLSCAASGFTFSNYWMNWVRQAPGKGLEWVGIIRLKSNNYATHYAEPVKGRFTISRDDSKSTVYLQMNSLKTEDTAVYYCTRYYGNYGGYFDVWGAGTLVTVSS

SEQ ID NO: 6910 - protein, 107 aa, Artificial Sequence; identical to SEQ ID NO: 6247
  Description of Artificial Sequence: Synthetic polypeptide
  VL of XENP018558

SEQ ID NO: 6911 - protein, 5 aa, Artificial Sequence
  Description of Artificial Sequence: Synthetic peptide
  XENP018558 vhCDR1
NYWMN

SEQ ID NO: 6912 - protein, 19 aa, Artificial Sequence
  Description of Artificial Sequence: Synthetic peptide
  XENP018558 vhCDR2
IIRLKSNNYATHYAEPVKG

SEQ ID NO: 6913 - protein, 11 aa, Artificial Sequence
  Description of Artificial Sequence: Synthetic peptide
  XENP018558 vhCDR3
YYGNYGGYFDV

SEQ ID NO: 6914 - protein, 11 aa, Artificial Sequence
  Description of Artificial Sequence: Synthetic peptide
  XENP018558 vlCDR1
RASQSVSNDVA

SEQ ID NO: 6915 - protein, 7 aa, Artificial Sequence
  Description of Artificial Sequence: Synthetic peptide
  XENP018558 vlCDR2
YASHRYT

SEQ ID NO: 6916 - protein, 9 aa, Artificial Sequence
  Description of Artificial Sequence: Synthetic peptide
  XENP018558 vlCDR3
QQDYSSPRT

SEQ ID NO: 6917 - protein, 249 aa, Artificial Sequence
  Description of Artificial Sequence: Synthetic polypeptide
  XENP018559 1G6_H1.63_L1_scFv(GKPGS)4
EVQLVESGGGLVKPGGSLRLSCAASGFTFSNYWMNWVRQAPGKGLEWVGEVRLKSNNYATHYAEPVKGRFTISRDDSKSTVYLQMNSLKTEDTAVYYCTRYYGNYGGYFDVWGAGTLVTVSSGKPGSGKPGSGKPGSGKPGSSIVMTQSPATLSVSPGERATLSCRASQSVSNDVAWYQQKPGQSPRLLINYASHRYTGVPDRFTGSGYGTEFTLTISSLQSEDFAVYFCQQDYSSPRTFGGGTKVEIK

SEQ ID NO: 6918 - protein, 122 aa, Artificial Sequence
  Description of Artificial Sequence: Synthetic polypeptide
  VH of XENP018559
EVQLVESGGGLVKPGGSLRLSCAASGFTFSNYWMNWVRQAPGKGLEWVGEVRLKSNNYATHYAEPVKGRFTISRDDSKSTVYLQMNSLKTEDTAVYYCTRYYGNYGGYFDVWGAGTLVTVSS

SEQ ID NO: 6919 - protein, 107 aa, Artificial Sequence; identical to SEQ ID NO: 6247
  Description of Artificial Sequence: Synthetic polypeptide
  VL of XENP018559

SEQ ID NO: 6920 - protein, 5 aa, Artificial Sequence
  Description of Artificial Sequence: Synthetic peptide
  XENP018559 vhCDR1
NYWMN

SEQ ID NO: 6921 - protein, 19 aa, Artificial Sequence
  Description of Artificial Sequence: Synthetic peptide
  XENP018559 vhCDR2
EVRLKSNNYATHYAEPVKG

SEQ ID NO: 6922 - protein, 11 aa, Artificial Sequence
  Description of Artificial Sequence: Synthetic peptide
  XENP018559 vhCDR3
YYGNYGGYFDV

SEQ ID NO: 6923 - protein, 11 aa, Artificial Sequence
  Description of Artificial Sequence: Synthetic peptide
  XENP018559 vlCDR1
RASQSVSNDVA

SEQ ID NO: 6924 - protein, 7 aa, Artificial Sequence
  Description of Artificial Sequence: Synthetic peptide
  XENP018559 vlCDR2
YASHRYT

SEQ ID NO: 6925 - protein, 9 aa, Artificial Sequence
  Description of Artificial Sequence: Synthetic peptide
  XENP018559 vlCDR3
QQDYSSPRT

SEQ ID NO: 6926 - protein, 249 aa, Artificial Sequence
  Description of Artificial Sequence: Synthetic polypeptide
  XENP018560 1G6_H1.64_L1_scFv(GKPGS)4
EVQLVESGGGLVKPGGSLRLSCAASGFTFSNYWMNWVRQAPGKGLEWVGEITLKSNNYATHYAEPVKGRFTISRDDSKSTVYLQMNSLKTEDTAVYYCTRYYGNYGGYFDVWGAGTLVTVSSGKPGSGKPGSGKPGSGKPGSSIVMTQSPATLSVSPGERATLSCRASQSVSNDVAWYQQKPGQSPRLLINYASHRYTGVPDRFTGSGYGTEFTLTISSLQSEDFAVYFCQQDYSSPRTFGGGTKVEIK

SEQ ID NO: 6927 - protein, 122 aa, Artificial Sequence
  Description of Artificial Sequence: Synthetic polypeptide
  VH of XENP018560
EVQLVESGGGLVKPGGSLRLSCAASGFTFSNYWMNWVRQAPGKGLEWVGEITLKSNNYATHYAEPVKGRFTISRDDSKSTVYLQMNSLKTEDTAVYYCTRYYGNYGGYFDVWGAGTLVTVSS

SEQ ID NO: 6928 - protein, 107 aa, Artificial Sequence; identical to SEQ ID NO: 6247
  Description of Artificial Sequence: Synthetic polypeptide
  VL of XENP018560

SEQ ID NO: 6929 - protein, 5 aa, Artificial Sequence
  Description of Artificial Sequence: Synthetic peptide
  XENP018560 vhCDR1
NYWMN

SEQ ID NO: 6930 - protein, 19 aa, Artificial Sequence
  Description of Artificial Sequence: Synthetic peptide
  XENP018560 vhCDR2
EITLKSNNYATHYAEPVKG

SEQ ID NO: 6931 - protein, 11 aa, Artificial Sequence
  Description of Artificial Sequence: Synthetic peptide
  XENP018560 vhCDR3
YYGNYGGYFDV

SEQ ID NO: 6932 - protein, 11 aa, Artificial Sequence
  Description of Artificial Sequence: Synthetic peptide
  XENP018560 vlCDR1
RASQSVSNDVA

SEQ ID NO: 6933 - protein, 7 aa, Artificial Sequence
  Description of Artificial Sequence: Synthetic peptide
  XENP018560 vlCDR2
YASHRYT

SEQ ID NO: 6934 - protein, 9 aa, Artificial Sequence
  Description of Artificial Sequence: Synthetic peptide
  XENP018560 vlCDR3
QQDYSSPRT

SEQ ID NO: 6935 - protein, 249 aa, Artificial Sequence
  Description of Artificial Sequence: Synthetic polypeptide
  XENP018561 1G6_H1.65_L1_scFv(GKPGS)4
EVQLVESGGGLVKPGGSLRLSCAASGFTFSNYWMNWVRQAPGKGLEWVGEIKLKSNNYATHYAEPVKGRFTISRDDSKSTVYLQMNSLKTEDTAVYYCTRYYGNYGGYFDVWGAGTLVTVSSGKPGSGKPGSGKPGSGKPGSSIVMTQSPATLSVSPGERATLSCRASQSVSNDVAWYQQKPGQSPRLLINYASHRYTGVPDRFTGSGYGTEFTLTISSLQSEDFAVYFCQQDYSSPRTFGGGTKVEIK

SEQ ID NO: 6936 - protein, 122 aa, Artificial Sequence
  Description of Artificial Sequence: Synthetic polypeptide
  VH of XENP018561
EVQLVESGGGLVKPGGSLRLSCAASGFTFSNYWMNWVRQAPGKGLEWVGEIKLKSNNYATHYAEPVKGRFTISRDDSKSTVYLQMNSLKTEDTAVYYCTRYYGNYGGYFDVWGAGTLVTVSS

SEQ ID NO: 6937 - protein, 107 aa, Artificial Sequence; identical to SEQ ID NO: 6247
  Description of Artificial Sequence: Synthetic polypeptide
  VL of XENP018561

SEQ ID NO: 6938 - protein, 5 aa, Artificial Sequence
  Description of Artificial Sequence: Synthetic peptide
  XENP018561 vhCDR1
NYWMN

SEQ ID NO: 6939 - protein, 19 aa, Artificial Sequence
  Description of Artificial Sequence: Synthetic peptide
  XENP018561 vhCDR2
EIKLKSNNYATHYAEPVKG

SEQ ID NO: 6940 - protein, 11 aa, Artificial Sequence
  Description of Artificial Sequence: Synthetic peptide
  XENP018561 vhCDR3
YYGNYGGYFDV

SEQ ID NO: 6941 - protein, 11 aa, Artificial Sequence
  Description of Artificial Sequence: Synthetic peptide
  XENP018561 vlCDR1
RASQSVSNDVA

SEQ ID NO: 6942 - protein, 7 aa, Artificial Sequence
  Description of Artificial Sequence: Synthetic peptide
  XENP018561 vlCDR2
YASHRYT

SEQ ID NO: 6943 - protein, 9 aa, Artificial Sequence
  Description of Artificial Sequence: Synthetic peptide
  XENP018561 vlCDR3
QQDYSSPRT

SEQ ID NO: 6944 - protein, 249 aa, Artificial Sequence
  Description of Artificial Sequence: Synthetic polypeptide
  XENP018562 1G6_H1.66_L1_scFv(GKPGS)4
EVQLVESGGGLVKPGGSLRLSCAASGFTFSNYWMNWVRQAPGKGLEWVGEIELKSNNYATHYAEPVKGRFTISRDDSKSTVYLQMNSLKTEDTAVYYCTRYYGNYGGYFDVWGAGTLVTVSSGKPGSGKPGSGKPGSGKPGSSIVMTQSPATLSVSPGERATLSCRASQSVSNDVAWYQQKPGQSPRLLINYASHRYTGVPDRFTGSGYGTEFTLTISSLQSEDFAVYFCQQDYSSPRTFGGGTKVEIK

SEQ ID NO: 6945 - protein, 122 aa, Artificial Sequence
  Description of Artificial Sequence: Synthetic polypeptide
  VH of XENP018562
EVQLVESGGGLVKPGGSLRLSCAASGFTFSNYWMNWVRQAPGKGLEWVGEIELKSNNYATHYAEPVKGRFTISRDDSKSTVYLQMNSLKTEDTAVYYCTRYYGNYGGYFDVWGAGTLVTVSS

SEQ ID NO: 6946 - protein, 107 aa, Artificial Sequence; identical to SEQ ID NO: 6247
  Description of Artificial Sequence: Synthetic polypeptide
  VL of XENP018562

SEQ ID NO: 6947 - protein, 5 aa, Artificial Sequence
  Description of Artificial Sequence: Synthetic peptide
  XENP018562 vhCDR1
NYWMN

SEQ ID NO: 6948 - protein, 19 aa, Artificial Sequence
  Description of Artificial Sequence: Synthetic peptide
  XENP018562 vhCDR2
EIELKSNNYATHYAEPVKG

SEQ ID NO: 6949 - protein, 11 aa, Artificial Sequence
  Description of Artificial Sequence: Synthetic peptide
  XENP018562 vhCDR3
YYGNYGGYFDV

SEQ ID NO: 6950 - protein, 11 aa, Artificial Sequence
  Description of Artificial Sequence: Synthetic peptide
  XENP018562 vlCDR1
RASQSVSNDVA

SEQ ID NO: 6951 - protein, 7 aa, Artificial Sequence
  Description of Artificial Sequence: Synthetic peptide
  XENP018562 vlCDR2
YASHRYT

SEQ ID NO: 6952 - protein, 9 aa, Artificial Sequence
  Description of Artificial Sequence: Synthetic peptide
  XENP018562 vlCDR3
QQDYSSPRT

SEQ ID NO: 6953 - protein, 249 aa, Artificial Sequence
  Description of Artificial Sequence: Synthetic polypeptide
  XENP018563 1G6_H1.67_L1_scFv(GKPGS)4
EVQLVESGGGLVKPGGSLRLSCAASGFTFSNYWMNWVRQAPGKGLEWVGEIDLKSNNYATHYAEPVKGRFTISRDDSKSTVYLQMNSLKTEDTAVYYCTRYYGNYGGYFDVWGAGTLVTVSSGKPGSGKPGSGKPGSGKPGSSIVMTQSPATLSVSPGERATLSCRASQSVSNDVAWYQQKPGQSPRLLINYASHRYTGVPDRFTGSGYGTEFTLTISSLQSEDFAVYFCQQDYSSPRTFGGGTKVEIK

SEQ ID NO: 6954 - protein, 122 aa, Artificial Sequence
  Description of Artificial Sequence: Synthetic polypeptide
  VH of XENP018563
EVQLVESGGGLVKPGGSLRLSCAASGFTFSNYWMNWVRQAPGKGLEWVGEIDLKSNNYATHYAEPVKGRFTISRDDSKSTVYLQMNSLKTEDTAVYYCTRYYGNYGGYFDVWGAGTLVTVSS

SEQ ID NO: 6955 - protein, 107 aa, Artificial Sequence; identical to SEQ ID NO: 6247
  Description of Artificial Sequence: Synthetic polypeptide
  VL of XENP018563

SEQ ID NO: 6956 - protein, 5 aa, Artificial Sequence
  Description of Artificial Sequence: Synthetic peptide
  XENP018563 vhCDR1
NYWMN

SEQ ID NO: 6957 - protein, 19 aa, Artificial Sequence
  Description of Artificial Sequence: Synthetic peptide
  XENP018563 vhCDR2
EIDLKSNNYATHYAEPVKG

SEQ ID NO: 6958 - protein, 11 aa, Artificial Sequence
  Description of Artificial Sequence: Synthetic peptide
  XENP018563 vhCDR3
YYGNYGGYFDV

SEQ ID NO: 6959 - protein, 11 aa, Artificial Sequence
  Description of Artificial Sequence: Synthetic peptide
  XENP018563 vlCDR1
RASQSVSNDVA

SEQ ID NO: 6960 - protein, 7 aa, Artificial Sequence
  Description of Artificial Sequence: Synthetic peptide
  XENP018563 vlCDR2
YASHRYT

SEQ ID NO: 6961 - protein, 9 aa, Artificial Sequence
  Description of Artificial Sequence: Synthetic peptide
  XENP018563 vlCDR3
QQDYSSPRT

SEQ ID NO: 6962 - protein, 249 aa, Artificial Sequence
  Description of Artificial Sequence: Synthetic polypeptide
  XENP018564 1G6_H1.68_L1_scFv(GKPGS)4
EVQLVESGGGLVKPGGSLRLSCAASGFTFSNYWMNWVRQAPGKGLEWVGEIHLKSNNYATHYAEPVKGRFTISRDDSKSTVYLQMNSLKTEDTAVYYCTRYYGNYGGYFDVWGAGTLVTVSSGKPGSGKPGSGKPGSGKPGSSIVMTQSPATLSVSPGERATLSCRASQSVSNDVAWYQQKPGQSPRLLINYASHRYTGVPDRFTGSGYGTEFTLTISSLQSEDFAVYFCQQDYSSPRTFGGGTKVEIK

SEQ ID NO: 6963 - protein, 122 aa, Artificial Sequence
  Description of Artificial Sequence: Synthetic polypeptide
  VH of XENP018564
EVQLVESGGGLVKPGGSLRLSCAASGFTFSNYWMNWVRQAPGKGLEWVGEIHLKSNNYATHYAEPVKGRFTISRDDSKSTVYLQMNSLKTEDTAVYYCTRYYGNYGGYFDVWGAGTLVTVSS

SEQ ID NO: 6964 - protein, 107 aa, Artificial Sequence; identical to SEQ ID NO: 6247
  Description of Artificial Sequence: Synthetic polypeptide
  VL of XENP018564

SEQ ID NO: 6965 - protein, 5 aa, Artificial Sequence
  Description of Artificial Sequence: Synthetic peptide
  XENP018564 vhCDR1
NYWMN

SEQ ID NO: 6966 - protein, 19 aa, Artificial Sequence
  Description of Artificial Sequence: Synthetic peptide
  XENP018564 vhCDR2
EIHLKSNNYATHYAEPVKG

SEQ ID NO: 6967 - protein, 11 aa, Artificial Sequence
  Description of Artificial Sequence: Synthetic peptide
  XENP018564 vhCDR3
YYGNYGGYFDV

SEQ ID NO: 6968 - protein, 11 aa, Artificial Sequence
  Description of Artificial Sequence: Synthetic peptide
  XENP018564 vlCDR1
RASQSVSNDVA

SEQ ID NO: 6969 - protein, 7 aa, Artificial Sequence
  Description of Artificial Sequence: Synthetic peptide
  XENP018564 vlCDR2
YASHRYT

SEQ ID NO: 6970 - protein, 9 aa, Artificial Sequence
  Description of Artificial Sequence: Synthetic peptide
  XENP018564 vlCDR3
QQDYSSPRT

SEQ ID NO: 6971 - protein, 249 aa, Artificial Sequence
  Description of Artificial Sequence: Synthetic polypeptide
  XENP018565 1G6_H1.69_L1_scFv(GKPGS)4
EVQLVESGGGLVKPGGSLRLSCAASGFTFSNYWMNWVRQAPGKGLEWVGEISLKSNNYATHYAEPVKGRFTISRDDSKSTVYLQMNSLKTEDTAVYYCTRYYGNYGGYFDVWGAGTLVTVSSGKPGSGKPGSGKPGSGKPGSSIVMTQSPATLSVSPGERATLSCRASQSVSNDVAWYQQKPGQSPRLLINYASHRYTGVPDRFTGSGYGTEFTLTISSLQSEDFAVYFCQQDYSSPRTFGGGTKVEIK

SEQ ID NO: 6972 - protein, 122 aa, Artificial Sequence
  Description of Artificial Sequence: Synthetic polypeptide
  VH of XENP018565
EVQLVESGGGLVKPGGSLRLSCAASGFTFSNYWMNWVRQAPGKGLEWVGEISLKSNNYATHYAEPVKGRFTISRDDSKSTVYLQMNSLKTEDTAVYYCTRYYGNYGGYFDVWGAGTLVTVSS

SEQ ID NO: 6973 - protein, 107 aa, Artificial Sequence; identical to SEQ ID NO: 6247
  Description of Artificial Sequence: Synthetic polypeptide
  VL of XENP018565

SEQ ID NO: 6974 - protein, 5 aa, Artificial Sequence
  Description of Artificial Sequence: Synthetic peptide
  XENP018565 vhCDR1
NYWMN

SEQ ID NO: 6975 - protein, 19 aa, Artificial Sequence
  Description of Artificial Sequence: Synthetic peptide
  XENP018565 vhCDR2
EISLKSNNYATHYAEPVKG

SEQ ID NO: 6976 - protein, 11 aa, Artificial Sequence
  Description of Artificial Sequence: Synthetic peptide
  XENP018565 vhCDR3
YYGNYGGYFDV

SEQ ID NO: 6977 - protein, 11 aa, Artificial Sequence
  Description of Artificial Sequence: Synthetic peptide
  XENP018565 vlCDR1
RASQSVSNDVA

SEQ ID NO: 6978 - protein, 7 aa, Artificial Sequence
  Description of Artificial Sequence: Synthetic peptide
  XENP018565 vlCDR2
YASHRYT

SEQ ID NO: 6979 - protein, 9 aa, Artificial Sequence
  Description of Artificial Sequence: Synthetic peptide
  XENP018565 vlCDR3
QQDYSSPRT

SEQ ID NO: 6980 - protein, 249 aa, Artificial Sequence
  Description of Artificial Sequence: Synthetic polypeptide
  XENP018566 1G6_H1.70_L1_scFv(GKPGS)4
EVQLVESGGGLVKPGGSLRLSCAASGFTFSNYWMNWVRQAPGKGLEWVGEIGLKSNNYATHYAEPVKGRFTISRDDSKSTVYLQMNSLKTEDTAVYYCTRYYGNYGGYFDVWGAGTLVTVSSGKPGSGKPGSGKPGSGKPGSSIVMTQSPATLSVSPGERATLSCRASQSVSNDVAWYQQKPGQSPRLLINYASHRYTGVPDRFTGSGYGTEFTLTISSLQSEDFAVYFCQQDYSSPRTFGGGTKVEIK

SEQ ID NO: 6981 - protein, 122 aa, Artificial Sequence
  Description of Artificial Sequence: Synthetic polypeptide
  VH of XENP018566
EVQLVESGGGLVKPGGSLRLSCAASGFTFSNYWMNWVRQAPGKGLEWVGEIGLKSNNYATHYAEPVKGRFTISRDDSKSTVYLQMNSLKTEDTAVYYCTRYYGNYGGYFDVWGAGTLVTVSS

SEQ ID NO: 6982 - protein, 107 aa, Artificial Sequence; identical to SEQ ID NO: 6247
  Description of Artificial Sequence: Synthetic polypeptide
  VL of XENP018566

SEQ ID NO: 6983 - protein, 5 aa, Artificial Sequence
  Description of Artificial Sequence: Synthetic peptide
  XENP018566 vhCDR1
NYWMN

SEQ ID NO: 6984 - protein, 19 aa, Artificial Sequence
  Description of Artificial Sequence: Synthetic peptide
  XENP018566 vhCDR2
EIGLKSNNYATHYAEPVKG

SEQ ID NO: 6985 - protein, 11 aa, Artificial Sequence
  Description of Artificial Sequence: Synthetic peptide
  XENP018566 vhCDR3
YYGNYGGYFDV

SEQ ID NO: 6986 - protein, 11 aa, Artificial Sequence
  Description of Artificial Sequence: Synthetic peptide
  XENP018566 vlCDR1
RASQSVSNDVA

SEQ ID NO: 6987 - protein, 7 aa, Artificial Sequence
  Description of Artificial Sequence: Synthetic peptide
  XENP018566 vlCDR2
YASHRYT

SEQ ID NO: 6988 - protein, 9 aa, Artificial Sequence
  Description of Artificial Sequence: Synthetic peptide
  XENP018566 vlCDR3
QQDYSSPRT

SEQ ID NO: 6989 - protein, 249 aa, Artificial Sequence
  Description of Artificial Sequence: Synthetic polypeptide
  XENP018567 1G6_H1.71_L1_scFv(GKPGS)4
EVQLVESGGGLVKPGGSLRLSCAASGFTFSNYWMNWVRQAPGKGLEWVGEIYLKSNNYATHYAEPVKGRFTISRDDSKSTVYLQMNSLKTEDTAVYYCTRYYGNYGGYFDVWGAGTLVTVSSGKPGSGKPGSGKPGSGKPGSSIVMTQSPATLSVSPGERATLSCRASQSVSNDVAWYQQKPGQSPRLLINYASHRYTGVPDRFTGSGYGTEFTLTISSLQSEDFAVYFCQQDYSSPRTFGGGTKVEIK

SEQ ID NO: 6990 - protein, 122 aa, Artificial Sequence
  Description of Artificial Sequence: Synthetic polypeptide
  VH of XENP018567
EVQLVESGGGLVKPGGSLRLSCAASGFTFSNYWMNWVRQAPGKGLEWVGEIYLKSNNYATHYAEPVKGRFTISRDDSKSTVYLQMNSLKTEDTAVYYCTRYYGNYGGYFDVWGAGTLVTVSS

SEQ ID NO: 6991 - protein, 107 aa, Artificial Sequence; identical to SEQ ID NO: 6247
  Description of Artificial Sequence: Synthetic polypeptide
  VL of XENP018567

SEQ ID NO: 6992 - protein, 5 aa, Artificial Sequence
  Description of Artificial Sequence: Synthetic peptide
  XENP018567 vhCDR1
NYWMN

SEQ ID NO: 6993 - protein, 19 aa, Artificial Sequence
  Description of Artificial Sequence: Synthetic peptide
  XENP018567 vhCDR2
EIYLKSNNYATHYAEPVKG

SEQ ID NO: 6994 - protein, 11 aa, Artificial Sequence
  Description of Artificial Sequence: Synthetic peptide
  XENP018567 vhCDR3
YYGNYGGYFDV

SEQ ID NO: 6995 - protein, 11 aa, Artificial Sequence
  Description of Artificial Sequence: Synthetic peptide
  XENP018567 vlCDR1
RASQSVSNDVA

SEQ ID NO: 6996 - protein, 7 aa, Artificial Sequence
  Description of Artificial Sequence: Synthetic peptide
  XENP018567 vlCDR2
YASHRYT

SEQ ID NO: 6997 - protein, 9 aa, Artificial Sequence
  Description of Artificial Sequence: Synthetic peptide
  XENP018567 vlCDR3
QQDYSSPRT

SEQ ID NO: 6998 - protein, 249 aa, Artificial Sequence
  Description of Artificial Sequence: Synthetic polypeptide
  XENP018568 1G6_H1.72_L1_scFv(GKPGS)4
EVQLVESGGGLVKPGGSLRLSCAASGFTFSNYWMNWVRQAPGKGLEWVGEIILKSNNYATHYAEPVKGRFTISRDDSKSTVYLQMNSLKTEDTAVYYCTRYYGNYGGYFDVWGAGTLVTVSSGKPGSGKPGSGKPGSGKPGSSIVMTQSPATLSVSPGERATLSCRASQSVSNDVAWYQQKPGQSPRLLINYASHRYTGVPDRFTGSGYGTEFTLTISSLQSEDFAVYFCQQDYSSPRTFGGGTKVEIK

SEQ ID NO: 6999 - protein, 122 aa, Artificial Sequence
  Description of Artificial Sequence: Synthetic polypeptide
  VH of XENP018568
EVQLVESGGGLVKPGGSLRLSCAASGFTFSNYWMNWVRQAPGKGLEWVGEIILKSNNYATHYAEPVKGRFTISRDDSKSTVYLQMNSLKTEDTAVYYCTRYYGNYGGYFDVWGAGTLVTVSS

SEQ ID NO: 7000 - protein, 107 aa, Artificial Sequence; identical to SEQ ID NO: 6247
  Description of Artificial Sequence: Synthetic polypeptide
  VL of XENP018568

SEQ ID NO: 7001 - protein, 5 aa, Artificial Sequence
  Description of Artificial Sequence: Synthetic peptide
  XENP018568 vhCDR1
NYWMN

SEQ ID NO: 7002 - protein, 19 aa, Artificial Sequence
  Description of Artificial Sequence: Synthetic peptide
  XENP018568 vhCDR2
EIILKSNNYATHYAEPVKG

SEQ ID NO: 7003 - protein, 11 aa, Artificial Sequence
  Description of Artificial Sequence: Synthetic peptide
  XENP018568 vhCDR3
YYGNYGGYFDV

SEQ ID NO: 7004 - protein, 11 aa, Artificial Sequence
  Description of Artificial Sequence: Synthetic peptide
  XENP018568 vlCDR1
RASQSVSNDVA

SEQ ID NO: 7005 - protein, 7 aa, Artificial Sequence
  Description of Artificial Sequence: Synthetic peptide
  XENP018568 vlCDR2
YASHRYT

SEQ ID NO: 7006 - protein, 9 aa, Artificial Sequence
  Description of Artificial Sequence: Synthetic peptide
  XENP018568 vlCDR3
QQDYSSPRT

SEQ ID NO: 7007 - protein, 249 aa, Artificial Sequence
  Description of Artificial Sequence: Synthetic polypeptide
  XENP018569 1G6_H1.73_L1_scFv(GKPGS)4
EVQLVESGGGLVKPGGSLRLSCAASGFTFSNYWMNWVRQAPGKGLEWVGEIWLKSNNYATHYAEPVKGRFTISRDDSKSTVYLQMNSLKTEDTAVYYCTRYYGNYGGYFDVWGAGTLVTVSSGKPGSGKPGSGKPGSGKPGSSIVMTQSPATLSVSPGERATLSCRASQSVSNDVAWYQQKPGQSPRLLINYASHRYTGVPDRFTGSGYGTEFTLTISSLQSEDFAVYFCQQDYSSPRTFGGGTKVEIK

SEQ ID NO: 7008 - protein, 122 aa, Artificial Sequence
  Description of Artificial Sequence: Synthetic polypeptide
  VH of XENP018569
EVQLVESGGGLVKPGGSLRLSCAASGFTFSNYWMNWVRQAPGKGLEWVGEIWLKSNNYATHYAEPVKGRFTISRDDSKSTVYLQMNSLKTEDTAVYYCTRYYGNYGGYFDVWGAGTLVTVSS

SEQ ID NO: 7009 - protein, 107 aa, Artificial Sequence; identical to SEQ ID NO: 6247
  Description of Artificial Sequence: Synthetic polypeptide
  VL of XENP018569

SEQ ID NO: 7010 - protein, 5 aa, Artificial Sequence
  Description of Artificial Sequence: Synthetic peptide
  XENP018569 vhCDR1
NYWMN

SEQ ID NO: 7011 - protein, 19 aa, Artificial Sequence
  Description of Artificial Sequence: Synthetic peptide
  XENP018569 vhCDR2
EIWLKSNNYATHYAEPVKG

SEQ ID NO: 7012 - protein, 11 aa, Artificial Sequence
  Description of Artificial Sequence: Synthetic peptide
  XENP018569 vhCDR3
YYGNYGGYFDV

SEQ ID NO: 7013 - protein, 11 aa, Artificial Sequence
  Description of Artificial Sequence: Synthetic peptide
  XENP018569 vlCDR1
RASQSVSNDVA

SEQ ID NO: 7014 - protein, 7 aa, Artificial Sequence
  Description of Artificial Sequence: Synthetic peptide
  XENP018569 vlCDR2
YASHRYT

SEQ ID NO: 7015 - protein, 9 aa, Artificial Sequence
  Description of Artificial Sequence: Synthetic peptide
  XENP018569 vlCDR3
QQDYSSPRT

SEQ ID NO: 7016 - protein, 249 aa, Artificial Sequence
  Description of Artificial Sequence: Synthetic polypeptide
  XENP018570 1G6_H1.74_L1_scFv(GKPGS)4
EVQLVESGGGLVKPGGSLRLSCAASGFTFSNYWMNWVRQAPGKGLEWVGEIRIKSNNYATHYAEPVKGRFTISRDDSKSTVYLQMNSLKTEDTAVYYCTRYYGNYGGYFDVWGAGTLVTVSSGKPGSGKPGSGKPGSGKPGSSIVMTQSPATLSVSPGERATLSCRASQSVSNDVAWYQQKPGQSPRLLINYASHRYTGVPDRFTGSGYGTEFTLTISSLQSEDFAVYFCQQDYSSPRTFGGGTKVEIK

SEQ ID NO: 7017 - protein, 122 aa, Artificial Sequence
  Description of Artificial Sequence: Synthetic polypeptide
  VH of XENP018570
EVQLVESGGGLVKPGGSLRLSCAASGFTFSNYWMNWVRQAPGKGLEWVGEIRIKSNNYATHYAEPVKGRFTISRDDSKSTVYLQMNSLKTEDTAVYYCTRYYGNYGGYFDVWGAGTLVTVSS

SEQ ID NO: 7018 - protein, 107 aa, Artificial Sequence; identical to SEQ ID NO: 6247
  Description of Artificial Sequence: Synthetic polypeptide
  VL of XENP018570

SEQ ID NO: 7019 - protein, 5 aa, Artificial Sequence
  Description of Artificial Sequence: Synthetic peptide
  XENP018570 vhCDR1
NYWMN

SEQ ID NO: 7020 - protein, 19 aa, Artificial Sequence
  Description of Artificial Sequence: Synthetic peptide
  XENP018570 vhCDR2
EIRIKSNNYATHYAEPVKG

SEQ ID NO: 7021 - protein, 11 aa, Artificial Sequence
  Description of Artificial Sequence: Synthetic peptide
  XENP018570 vhCDR3
YYGNYGGYFDV

SEQ ID NO: 7022 - protein, 11 aa, Artificial Sequence
  Description of Artificial Sequence: Synthetic peptide
  XENP018570 vlCDR1
RASQSVSNDVA

SEQ ID NO: 7023 - protein, 7 aa, Artificial Sequence
  Description of Artificial Sequence: Synthetic peptide
  XENP018570 vlCDR2
YASHRYT

SEQ ID NO: 7024 - protein, 9 aa, Artificial Sequence
  Description of Artificial Sequence: Synthetic peptide
  XENP018570 vlCDR3
QQDYSSPRT

SEQ ID NO: 7025 - protein, 249 aa, Artificial Sequence
  Description of Artificial Sequence: Synthetic polypeptide
  XENP018571 1G6_H1.75_L1_scFv(GKPGS)4
EVQLVESGGGLVKPGGSLRLSCAASGFTFSNYWMNWVRQAPGKGLEWVGEIRFKSNNYATHYAEPVKGRFTISRDDSKSTVYLQMNSLKTEDTAVYYCTRYYGNYGGYFDVWGAGTLVTVSSGKPGSGKPGSGKPGSGKPGSSIVMTQSPATLSVSPGERATLSCRASQSVSNDVAWYQQKPGQSPRLLINYASHRYTGVPDRFTGSGYGTEFTLTISSLQSEDFAVYFCQQDYSSPRTFGGGTKVEIK

SEQ ID NO: 7026 - protein, 122 aa, Artificial Sequence
  Description of Artificial Sequence: Synthetic polypeptide
  VH of XENP018571
EVQLVESGGGLVKPGGSLRLSCAASGFTFSNYWMNWVRQAPGKGLEWVGEIRFKSNNYATHYAEPVKGRFTISRDDSKSTVYLQMNSLKTEDTAVYYCTRYYGNYGGYFDVWGAGTLVTVSS

SEQ ID NO: 7027 - protein, 107 aa, Artificial Sequence; identical to SEQ ID NO: 6247
  Description of Artificial Sequence: Synthetic polypeptide
  VL of XENP018571

SEQ ID NO: 7028 - protein, 5 aa, Artificial Sequence
  Description of Artificial Sequence: Synthetic peptide
  XENP018571 vhCDR1
NYWMN

SEQ ID NO: 7029 - protein, 19 aa, Artificial Sequence
  Description of Artificial Sequence: Synthetic peptide
  XENP018571 vhCDR2
EIRFKSNNYATHYAEPVKG

SEQ ID NO: 7030 - protein, 11 aa, Artificial Sequence
  Description of Artificial Sequence: Synthetic peptide
  XENP018571 vhCDR3
YYGNYGGYFDV

SEQ ID NO: 7031 - protein, 11 aa, Artificial Sequence
  Description of Artificial Sequence: Synthetic peptide
  XENP018571 vlCDR1
RASQSVSNDVA

SEQ ID NO: 7032 - protein, 7 aa, Artificial Sequence
  Description of Artificial Sequence: Synthetic peptide
  XENP018571 vlCDR2
YASHRYT

SEQ ID NO: 7033 - protein, 9 aa, Artificial Sequence
  Description of Artificial Sequence: Synthetic peptide
  XENP018571 vlCDR3
QQDYSSPRT

SEQ ID NO: 7034 - protein, 249 aa, Artificial Sequence
  Description of Artificial Sequence: Synthetic polypeptide
  XENP018572 1G6_H1.76_L1_scFv(GKPGS)4
EVQLVESGGGLVKPGGSLRLSCAASGFTFSNYWMNWVRQAPGKGLEWVGEIRVKSNNYATHYAEPVKGRFTISRDDSKSTVYLQMNSLKTEDTAVYYCTRYYGNYGGYFDVWGAGTLVTVSSGKPGSGKPGSGKPGSGKPGSSIVMTQSPATLSVSPGERATLSCRASQSVSNDVAWYQQKPGQSPRLLINYASHRYTGVPDRFTGSGYGTEFTLTISSLQSEDFAVYFCQQDYSSPRTFGGGTKVEIK

SEQ ID NO: 7035 - protein, 122 aa, Artificial Sequence
  Description of Artificial Sequence: Synthetic polypeptide
  VH of XENP018572
EVQLVESGGGLVKPGGSLRLSCAASGFTFSNYWMNWVRQAPGKGLEWVGEIRVKSNNYATHYAEPVKGRFTISRDDSKSTVYLQMNSLKTEDTAVYYCTRYYGNYGGYFDVWGAGTLVTVSS

SEQ ID NO: 7036 - protein, 107 aa, Artificial Sequence; identical to SEQ ID NO: 6247
  Description of Artificial Sequence: Synthetic polypeptide
  VL of XENP018572

SEQ ID NO: 7037 - protein, 5 aa, Artificial Sequence
  Description of Artificial Sequence: Synthetic peptide
  XENP018572 vhCDR1
NYWMN

SEQ ID NO: 7038 - protein, 19 aa, Artificial Sequence
  Description of Artificial Sequence: Synthetic peptide
  XENP018572 vhCDR2
EIRVKSNNYATHYAEPVKG

SEQ ID NO: 7039 - protein, 11 aa, Artificial Sequence
  Description of Artificial Sequence: Synthetic peptide
  XENP018572 vhCDR3
YYGNYGGYFDV

SEQ ID NO: 7040 - protein, 11 aa, Artificial Sequence
  Description of Artificial Sequence: Synthetic peptide
  XENP018572 vlCDR1
RASQSVSNDVA

SEQ ID NO: 7041 - protein, 7 aa, Artificial Sequence
  Description of Artificial Sequence: Synthetic peptide
  XENP018572 vlCDR2
YASHRYT

SEQ ID NO: 7042 - protein, 9 aa, Artificial Sequence
  Description of Artificial Sequence: Synthetic peptide
  XENP018572 vlCDR3
QQDYSSPRT

SEQ ID NO: 7043 - protein, 249 aa, Artificial Sequence
  Description of Artificial Sequence: Synthetic polypeptide
  XENP018573 1G6_H1.77_L1_scFv(GKPGS)4
EVQLVESGGGLVKPGGSLRLSCAASGFTFSNYWMNWVRQAPGKGLEWVGEIRYKSNNYATHYAEPVKGRFTISRDDSKSTVYLQMNSLKTEDTAVYYCTRYYGNYGGYFDVWGAGTLVTVSSGKPGSGKPGSGKPGSGKPGSSIVMTQSPATLSVSPGERATLSCRASQSVSNDVAWYQQKPGQSPRLLINYASHRYTGVPDRFTGSGYGTEFTLTISSLQSEDFAVYFCQQDYSSPRTFGGGTKVEIK

SEQ ID NO: 7044 - protein, 122 aa, Artificial Sequence
  Description of Artificial Sequence: Synthetic polypeptide
  VH of XENP018573
EVQLVESGGGLVKPGGSLRLSCAASGFTFSNYWMNWVRQAPGKGLEWVGEIRYKSNNYATHYAEPVKGRFTISRDDSKSTVYLQMNSLKTEDTAVYYCTRYYGNYGGYFDVWGAGTLVTVSS

SEQ ID NO: 7045 - protein, 107 aa, Artificial Sequence; identical to SEQ ID NO: 6247
  Description of Artificial Sequence: Synthetic polypeptide
  VL of XENP018573

SEQ ID NO: 7046 - protein, 5 aa, Artificial Sequence
  Description of Artificial Sequence: Synthetic peptide
  XENP018573 vhCDR1
NYWMN

SEQ ID NO: 7047 - protein, 19 aa, Artificial Sequence
  Description of Artificial Sequence: Synthetic peptide
  XENP018573 vhCDR2
EIRYKSNNYATHYAEPVKG

SEQ ID NO: 7048 - protein, 11 aa, Artificial Sequence
  Description of Artificial Sequence: Synthetic peptide
  XENP018573 vhCDR3
YYGNYGGYFDV

SEQ ID NO: 7049 - protein, 11 aa, Artificial Sequence
  Description of Artificial Sequence: Synthetic peptide
  XENP018573 vlCDR1
RASQSVSNDVA

SEQ ID NO: 7050 - protein, 7 aa, Artificial Sequence
  Description of Artificial Sequence: Synthetic peptide
  XENP018573 vlCDR2
YASHRYT

SEQ ID NO: 7051 - protein, 9 aa, Artificial Sequence
  Description of Artificial Sequence: Synthetic peptide
  XENP018573 vlCDR3
QQDYSSPRT

SEQ ID NO: 7052 - protein, 249 aa, Artificial Sequence
  Description of Artificial Sequence: Synthetic polypeptide
  XENP018574 1G6_H1.78_L1_scFv(GKPGS)4
EVQLVESGGGLVKPGGSLRLSCAASGFTFSNYWMNWVRQAPGKGLEWVGEIRWKSNNYATHYAEPVKGRFTISRDDSKSTVYLQMNSLKTEDTAVYYCTRYYGNYGGYFDVWGAGTLVTVSSGKPGSGKPGSGKPGSGKPGSSIVMTQSPATLSVSPGERATLSCRASQSVSNDVAWYQQKPGQSPRLLINYASHRYTGVPDRFTGSGYGTEFTLTISSLQSEDFAVYFCQQDYSSPRTFGGGTKVEIK

SEQ ID NO: 7053 - protein, 122 aa, Artificial Sequence
  Description of Artificial Sequence: Synthetic polypeptide
  VH of XENP018574
EVQLVESGGGLVKPGGSLRLSCAASGFTFSNYWMNWVRQAPGKGLEWVGEIRWKSNNYATHYAEPVKGRFTISRDDSKSTVYLQMNSLKTEDTAVYYCTRYYGNYGGYFDVWGAGTLVTVSS

SEQ ID NO: 7054 - protein, 107 aa, Artificial Sequence; identical to SEQ ID NO: 6247
  Description of Artificial Sequence: Synthetic polypeptide
  VL of XENP018574

SEQ ID NO: 7055 - protein, 5 aa, Artificial Sequence
  Description of Artificial Sequence: Synthetic peptide
  XENP018574 vhCDR1
NYWMN

SEQ ID NO: 7056 - protein, 19 aa, Artificial Sequence
  Description of Artificial Sequence: Synthetic peptide
  XENP018574 vhCDR2
EIRWKSNNYATHYAEPVKG

SEQ ID NO: 7057 - protein, 11 aa, Artificial Sequence
  Description of Artificial Sequence: Synthetic peptide
  XENP018574 vhCDR3
YYGNYGGYFDV

SEQ ID NO: 7058 - protein, 11 aa, Artificial Sequence
  Description of Artificial Sequence: Synthetic peptide
  XENP018574 vlCDR1
RASQSVSNDVA

SEQ ID NO: 7059 - protein, 7 aa, Artificial Sequence
  Description of Artificial Sequence: Synthetic peptide
  XENP018574 vlCDR2
YASHRYT

SEQ ID NO: 7060 - protein, 9 aa, Artificial Sequence
  Description of Artificial Sequence: Synthetic peptide
  XENP018574 vlCDR3
QQDYSSPRT

SEQ ID NO: 7061 - protein, 249 aa, Artificial Sequence
  Description of Artificial Sequence: Synthetic polypeptide
  XENP018575 1G6_H1.79_L1_scFv(GKPGS)4
EVQLVESGGGLVKPGGSLRLSCAASGFTFSNYWMNWVRQAPGKGLEWVGEIRDKSNNYATHYAEPVKGRFTISRDDSKSTVYLQMNSLKTEDTAVYYCTRYYGNYGGYFDVWGAGTLVTVSSGKPGSGKPGSGKPGSGKPGSSIVMTQSPATLSVSPGERATLSCRASQSVSNDVAWYQQKPGQSPRLLINYASHRYTGVPDRFTGSGYGTEFTLTISSLQSEDFAVYFCQQDYSSPRTFGGGTKVEIK

SEQ ID NO: 7062 - protein, 122 aa, Artificial Sequence
  Description of Artificial Sequence: Synthetic polypeptide
  VH of XENP018575
EVQLVESGGGLVKPGGSLRLSCAASGFTFSNYWMNWVRQAPGKGLEWVGEIRDKSNNYATHYAEPVKGRFTISRDDSKSTVYLQMNSLKTEDTAVYYCTRYYGNYGGYFDVWGAGTLVTVSS

SEQ ID NO: 7063 - protein, 107 aa, Artificial Sequence; identical to SEQ ID NO: 6247
  Description of Artificial Sequence: Synthetic polypeptide
  VL of XENP018575

SEQ ID NO: 7064 - protein, 5 aa, Artificial Sequence
  Description of Artificial Sequence: Synthetic peptide
  XENP018575 vhCDR1
NYWMN

SEQ ID NO: 7065 - protein, 19 aa, Artificial Sequence
  Description of Artificial Sequence: Synthetic peptide
  XENP018575 vhCDR2
EIRDKSNNYATHYAEPVKG

SEQ ID NO: 7066 - protein, 11 aa, Artificial Sequence
  Description of Artificial Sequence: Synthetic peptide
  XENP018575 vhCDR3
YYGNYGGYFDV

SEQ ID NO: 7067 - protein, 11 aa, Artificial Sequence
  Description of Artificial Sequence: Synthetic peptide
  XENP018575 vlCDR1
RASQSVSNDVA

SEQ ID NO: 7068 - protein, 7 aa, Artificial Sequence
  Description of Artificial Sequence: Synthetic peptide
  XENP018575 vlCDR2
YASHRYT

SEQ ID NO: 7069 - protein, 9 aa, Artificial Sequence
  Description of Artificial Sequence: Synthetic peptide
  XENP018575 vlCDR3
QQDYSSPRT

SEQ ID NO: 7070 - protein, 249 aa, Artificial Sequence
  Description of Artificial Sequence: Synthetic polypeptide
  XENP018576 1G6_H1.80_L1_scFv(GKPGS)4
EVQLVESGGGLVKPGGSLRLSCAASGFTFSNYWMNWVRQAPGKGLEWVGEIRAKSNNYATHYAEPVKGRFTISRDDSKSTVYLQMNSLKTEDTAVYYCTRYYGNYGGYFDVWGAGTLVTVSSGKPGSGKPGSGKPGSGKPGSSIVMTQSPATLSVSPGERATLSCRASQSVSNDVAWYQQKPGQSPRLLINYASHRYTGVPDRFTGSGYGTEFTLTISSLQSEDFAVYFCQQDYSSPRTFGGGTKVEIK

SEQ ID NO: 7071 - protein, 122 aa, Artificial Sequence
  Description of Artificial Sequence: Synthetic polypeptide
  VH of XENP018576
EVQLVESGGGLVKPGGSLRLSCAASGFTFSNYWMNWVRQAPGKGLEWVGEIRAKSNNYATHYAEPVKGRFTISRDDSKSTVYLQMNSLKTEDTAVYYCTRYYGNYGGYFDVWGAGTLVTVSS

SEQ ID NO: 7072 - protein, 107 aa, Artificial Sequence; identical to SEQ ID NO: 6247
  Description of Artificial Sequence: Synthetic polypeptide
  VL of XENP018576

SEQ ID NO: 7073 - protein, 5 aa, Artificial Sequence
  Description of Artificial Sequence: Synthetic peptide
  XENP018576 vhCDR1
NYWMN

SEQ ID NO: 7074 - protein, 19 aa, Artificial Sequence
  Description of Artificial Sequence: Synthetic peptide
  XENP018576 vhCDR2
EIRAKSNNYATHYAEPVKG

SEQ ID NO: 7075 - protein, 11 aa, Artificial Sequence
  Description of Artificial Sequence: Synthetic peptide
  XENP018576 vhCDR3
YYGNYGGYFDV

SEQ ID NO: 7076 - protein, 11 aa, Artificial Sequence
  Description of Artificial Sequence: Synthetic peptide
  XENP018576 vlCDR1
RASQSVSNDVA

SEQ ID NO: 7077 - protein, 7 aa, Artificial Sequence
  Description of Artificial Sequence: Synthetic peptide
  XENP018576 vlCDR2
YASHRYT

SEQ ID NO: 7078 - protein, 9 aa, Artificial Sequence
  Description of Artificial Sequence: Synthetic peptide
  XENP018576 vlCDR3
QQDYSSPRT

SEQ ID NO: 7079 - protein, 249 aa, Artificial Sequence
  Description of Artificial Sequence: Synthetic polypeptide
  XENP018577 1G6_H1.81_L1_scFv(GKPGS)4
EVQLVESGGGLVKPGGSLRLSCAASGFTFSNYWMNWVRQAPGKGLEWVGEIRQKSNNYATHYAEPVKGRFTISRDDSKSTVYLQMNSLKTEDTAVYYCTRYYGNYGGYFDVWGAGTLVTVSSGKPGSGKPGSGKPGSGKPGSSIVMTQSPATLSVSPGERATLSCRASQSVSNDVAWYQQKPGQSPRLLINYASHRYTGVPDRFTGSGYGTEFTLTISSLQSEDFAVYFCQQDYSSPRTFGGGTKVEIK

SEQ ID NO: 7080 - protein, 122 aa, Artificial Sequence
  Description of Artificial Sequence: Synthetic polypeptide
  VH of XENP018577
EVQLVESGGGLVKPGGSLRLSCAASGFTFSNYWMNWVRQAPGKGLEWVGEIRQKSNNYATHYAEPVKGRFTISRDDSKSTVYLQMNSLKTEDTAVYYCTRYYGNYGGYFDVWGAGTLVTVSS

SEQ ID NO: 7081 - protein, 107 aa, Artificial Sequence; identical to SEQ ID NO: 6247
  Description of Artificial Sequence: Synthetic polypeptide
  VL of XENP018577

SEQ ID NO: 7082 - protein, 5 aa, Artificial Sequence
  Description of Artificial Sequence: Synthetic peptide
  XENP018577 vhCDR1
NYWMN

SEQ ID NO: 7083 - protein, 19 aa, Artificial Sequence
  Description of Artificial Sequence: Synthetic peptide
  XENP018577 vhCDR2
EIRQKSNNYATHYAEPVKG

SEQ ID NO: 7084 - protein, 11 aa, Artificial Sequence
  Description of Artificial Sequence: Synthetic peptide
  XENP018577 vhCDR3
YYGNYGGYFDV

SEQ ID NO: 7085 - protein, 11 aa, Artificial Sequence
  Description of Artificial Sequence: Synthetic peptide
  XENP018577 vlCDR1
RASQSVSNDVA

SEQ ID NO: 7086 - protein, 7 aa, Artificial Sequence
  Description of Artificial Sequence: Synthetic peptide
  XENP018577 vlCDR2
YASHRYT

SEQ ID NO: 7087 - protein, 9 aa, Artificial Sequence
  Description of Artificial Sequence: Synthetic peptide
  XENP018577 vlCDR3
QQDYSSPRT

SEQ ID NO: 7088 - protein, 249 aa, Artificial Sequence
  Description of Artificial Sequence: Synthetic polypeptide
  XENP018578 1G6_H1.82_L1_scFv(GKPGS)4
EVQLVESGGGLVKPGGSLRLSCAASGFTFSNYWMNWVRQAPGKGLEWVGEIRKKSNNYATHYAEPVKGRFTISRDDSKSTVYLQMNSLKTEDTAVYYCTRYYGNYGGYFDVWGAGTLVTVSSGKPGSGKPGSGKPGSGKPGSSIVMTQSPATLSVSPGERATLSCRASQSVSNDVAWYQQKPGQSPRLLINYASHRYTGVPDRFTGSGYGTEFTLTISSLQSEDFAVYFCQQDYSSPRTFGGGTKVEIK

SEQ ID NO: 7089 - protein, 122 aa, Artificial Sequence
  Description of Artificial Sequence: Synthetic polypeptide
  VH of XENP018578
EVQLVESGGGLVKPGGSLRLSCAASGFTFSNYWMNWVRQAPGKGLEWVGEIRKKSNNYATHYAEPVKGRFTISRDDSKSTVYLQMNSLKTEDTAVYYCTRYYGNYGGYFDVWGAGTLVTVSS

SEQ ID NO: 7090 - protein, 107 aa, Artificial Sequence; identical to SEQ ID NO: 6247
  Description of Artificial Sequence: Synthetic polypeptide
  VL of XENP018578

SEQ ID NO: 7091 - protein, 5 aa, Artificial Sequence
  Description of Artificial Sequence: Synthetic peptide
  XENP018578 vhCDR1
NYWMN

SEQ ID NO: 7092 - protein, 19 aa, Artificial Sequence
  Description of Artificial Sequence: Synthetic peptide
  XENP018578 vhCDR2
EIRKKSNNYATHYAEPVKG

SEQ ID NO: 7093 - protein, 11 aa, Artificial Sequence
  Description of Artificial Sequence: Synthetic peptide
  XENP018578 vhCDR3
YYGNYGGYFDV

SEQ ID NO: 7094 - protein, 11 aa, Artificial Sequence
  Description of Artificial Sequence: Synthetic peptide
  XENP018578 vlCDR1
RASQSVSNDVA

SEQ ID NO: 7095 - protein, 7 aa, Artificial Sequence
  Description of Artificial Sequence: Synthetic peptide
  XENP018578 vlCDR2
YASHRYT

SEQ ID NO: 7096 - protein, 9 aa, Artificial Sequence
  Description of Artificial Sequence: Synthetic peptide
  XENP018578 vlCDR3
QQDYSSPRT

SEQ ID NO: 7097 - protein, 249 aa, Artificial Sequence
  Description of Artificial Sequence: Synthetic polypeptide
  XENP018579 1G6_H1.83_L1_scFv(GKPGS)4
EVQLVESGGGLVKPGGSLRLSCAASGFTFSNYWMNWVRQAPGKGLEWVGEIRLRSNNYATHYAEPVKGRFTISRDDSKSTVYLQMNSLKTEDTAVYYCTRYYGNYGGYFDVWGAGTLVTVSSGKPGSGKPGSGKPGSGKPGSSIVMTQSPATLSVSPGERATLSCRASQSVSNDVAWYQQKPGQSPRLLINYASHRYTGVPDRFTGSGYGTEFTLTISSLQSEDFAVYFCQQDYSSPRTFGGGTKVEIK

SEQ ID NO: 7098 - protein, 122 aa, Artificial Sequence
  Description of Artificial Sequence: Synthetic polypeptide
  VH of XENP018579
EVQLVESGGGLVKPGGSLRLSCAASGFTFSNYWMNWVRQAPGKGLEWVGEIRLRSNNYATHYAEPVKGRFTISRDDSKSTVYLQMNSLKTEDTAVYYCTRYYGNYGGYFDVWGAGTLVTVSS

SEQ ID NO: 7099 - protein, 107 aa, Artificial Sequence; identical to SEQ ID NO: 6247
  Description of Artificial Sequence: Synthetic polypeptide
  VL of XENP018579

SEQ ID NO: 7100 - protein, 5 aa, Artificial Sequence
  Description of Artificial Sequence: Synthetic peptide
  XENP018579 vhCDR1
NYWMN

SEQ ID NO: 7101 - protein, 19 aa, Artificial Sequence
  Description of Artificial Sequence: Synthetic peptide
  XENP018579 vhCDR2
EIRLRSNNYATHYAEPVKG

SEQ ID NO: 7102 - protein, 11 aa, Artificial Sequence
  Description of Artificial Sequence: Synthetic peptide
  XENP018579 vhCDR3
YYGNYGGYFDV

SEQ ID NO: 7103 - protein, 11 aa, Artificial Sequence
  Description of Artificial Sequence: Synthetic peptide
  XENP018579 vlCDR1
RASQSVSNDVA

SEQ ID NO: 7104 - protein, 7 aa, Artificial Sequence
  Description of Artificial Sequence: Synthetic peptide
  XENP018579 vlCDR2
YASHRYT

SEQ ID NO: 7105 - protein, 9 aa, Artificial Sequence
  Description of Artificial Sequence: Synthetic peptide
  XENP018579 vlCDR3
QQDYSSPRT

SEQ ID NO: 7106 - protein, 249 aa, Artificial Sequence
  Description of Artificial Sequence: Synthetic polypeptide
  XENP018580 1G6_H1.84_L1_scFv(GKPGS)4
EVQLVESGGGLVKPGGSLRLSCAASGFTFSNYWMNWVRQAPGKGLEWVGEIRLESNNYATHYAEPVKGRFTISRDDSKSTVYLQMNSLKTEDTAVYYCTRYYGNYGGYFDVWGAGTLVTVSSGKPGSGKPGSGKPGSGKPGSSIVMTQSPATLSVSPGERATLSCRASQSVSNDVAWYQQKPGQSPRLLINYASHRYTGVPDRFTGSGYGTEFTLTISSLQSEDFAVYFCQQDYSSPRTFGGGTKVEIK

SEQ ID NO: 7107 - protein, 122 aa, Artificial Sequence
  Description of Artificial Sequence: Synthetic polypeptide
  VH of XENP018580
EVQLVESGGGLVKPGGSLRLSCAASGFTFSNYWMNWVRQAPGKGLEWVGEIRLESNNYATHYAEPVKGRFTISRDDSKSTVYLQMNSLKTEDTAVYYCTRYYGNYGGYFDVWGAGTLVTVSS

SEQ ID NO: 7108 - protein, 107 aa, Artificial Sequence; identical to SEQ ID NO: 6247
  Description of Artificial Sequence: Synthetic polypeptide
  VL of XENP018580

SEQ ID NO: 7109 - protein, 5 aa, Artificial Sequence
  Description of Artificial Sequence: Synthetic peptide
  XENP018580 vhCDR1
NYWMN

SEQ ID NO: 7110 - protein, 19 aa, Artificial Sequence
  Description of Artificial Sequence: Synthetic peptide
  XENP018580 vhCDR2
EIRLESNNYATHYAEPVKG

SEQ ID NO: 7111 - protein, 11 aa, Artificial Sequence
  Description of Artificial Sequence: Synthetic peptide
  XENP018580 vhCDR3
YYGNYGGYFDV

SEQ ID NO: 7112 - protein, 11 aa, Artificial Sequence
  Description of Artificial Sequence: Synthetic peptide
  XENP018580 vlCDR1
RASQSVSNDVA

SEQ ID NO: 7113 - protein, 7 aa, Artificial Sequence
  Description of Artificial Sequence: Synthetic peptide
  XENP018580 vlCDR2
YASHRYT

SEQ ID NO: 7114 - protein, 9 aa, Artificial Sequence
  Description of Artificial Sequence: Synthetic peptide
  XENP018580 vlCDR3
QQDYSSPRT

SEQ ID NO: 7115 - protein, 249 aa, Artificial Sequence
  Description of Artificial Sequence: Synthetic polypeptide
  XENP018581 1G6_H1.85_L1_scFv(GKPGS)4
EVQLVESGGGLVKPGGSLRLSCAASGFTFSNYWMNWVRQAPGKGLEWVGEIRLHSNNYATHYAEPVKGRFTISRDDSKSTVYLQMNSLKTEDTAVYYCTRYYGNYGGYFDVWGAGTLVTVSSGKPGSGKPGSGKPGSGKPGSSIVMTQSPATLSVSPGERATLSCRASQSVSNDVAWYQQKPGQSPRLLINYASHRYTGVPDRFTGSGYGTEFTLTISSLQSEDFAVYFCQQDYSSPRTFGGGTKVEIK

SEQ ID NO: 7116 - protein, 122 aa, Artificial Sequence
  Description of Artificial Sequence: Synthetic polypeptide
  VH of XENP018581
EVQLVESGGGLVKPGGSLRLSCAASGFTFSNYWMNWVRQAPGKGLEWVGEIRLHSNNYATHYAEPVKGRFTISRDDSKSTVYLQMNSLKTEDTAVYYCTRYYGNYGGYFDVWGAGTLVTVSS

SEQ ID NO: 7117 - protein, 107 aa, Artificial Sequence; identical to SEQ ID NO: 6247
  Description of Artificial Sequence: Synthetic polypeptide
  VL of XENP018581

SEQ ID NO: 7118 - protein, 5 aa, Artificial Sequence
  Description of Artificial Sequence: Synthetic peptide
  XENP018581 vhCDR1
NYWMN

SEQ ID NO: 7119 - protein, 19 aa, Artificial Sequence
  Description of Artificial Sequence: Synthetic peptide
  XENP018581 vhCDR2
EIRLHSNNYATHYAEPVKG

SEQ ID NO: 7120 - protein, 11 aa, Artificial Sequence
  Description of Artificial Sequence: Synthetic peptide
  XENP018581 vhCDR3
YYGNYGGYFDV

SEQ ID NO: 7121 - protein, 11 aa, Artificial Sequence
  Description of Artificial Sequence: Synthetic peptide
  XENP018581 vlCDR1
RASQSVSNDVA

SEQ ID NO: 7122 - protein, 7 aa, Artificial Sequence
  Description of Artificial Sequence: Synthetic peptide
  XENP018581 vlCDR2
YASHRYT

SEQ ID NO: 7123 - protein, 9 aa, Artificial Sequence
  Description of Artificial Sequence: Synthetic peptide
  XENP018581 vlCDR3
QQDYSSPRT

SEQ ID NO: 7124 - protein, 249 aa, Artificial Sequence
  Description of Artificial Sequence: Synthetic polypeptide
  XENP018582 1G6_H1.86_L1_scFv(GKPGS)4
EVQLVESGGGLVKPGGSLRLSCAASGFTFSNYWMNWVRQAPGKGLEWVGEIRLSSNNYATHYAEPVKGRFTISRDDSKSTVYLQMNSLKTEDTAVYYCTRYYGNYGGYFDVWGAGTLVTVSSGKPGSGKPGSGKPGSGKPGSSIVMTQSPATLSVSPGERATLSCRASQSVSNDVAWYQQKPGQSPRLLINYASHRYTGVPDRFTGSGYGTEFTLTISSLQSEDFAVYFCQQDYSSPRTFGGGTKVEIK

SEQ ID NO: 7125 - protein, 122 aa, Artificial Sequence
  Description of Artificial Sequence: Synthetic polypeptide
  VH of XENP018582
EVQLVESGGGLVKPGGSLRLSCAASGFTFSNYWMNWVRQAPGKGLEWVGEIRLSSNNYATHYAEPVKGRFTISRDDSKSTVYLQMNSLKTEDTAVYYCTRYYGNYGGYFDVWGAGTLVTVSS

SEQ ID NO: 7126 - protein, 107 aa, Artificial Sequence; identical to SEQ ID NO: 6247
  Description of Artificial Sequence: Synthetic polypeptide
  VL of XENP018582

SEQ ID NO: 7127 - protein, 5 aa, Artificial Sequence
  Description of Artificial Sequence: Synthetic peptide
  XENP018582 vhCDR1
NYWMN

SEQ ID NO: 7128 - protein, 19 aa, Artificial Sequence
  Description of Artificial Sequence: Synthetic peptide
  XENP018582 vhCDR2
EIRLSSNNYATHYAEPVKG

SEQ ID NO: 7129 - protein, 11 aa, Artificial Sequence
  Description of Artificial Sequence: Synthetic peptide
  XENP018582 vhCDR3
YYGNYGGYFDV

SEQ ID NO: 7130 - protein, 11 aa, Artificial Sequence
  Description of Artificial Sequence: Synthetic peptide
  XENP018582 vlCDR1
RASQSVSNDVA

SEQ ID NO: 7131 - protein, 7 aa, Artificial Sequence
  Description of Artificial Sequence: Synthetic peptide
  XENP018582 vlCDR2
YASHRYT

SEQ ID NO: 7132 - protein, 9 aa, Artificial Sequence
  Description of Artificial Sequence: Synthetic peptide
  XENP018582 vlCDR3
QQDYSSPRT

SEQ ID NO: 7133 - protein, 249 aa, Artificial Sequence
  Description of Artificial Sequence: Synthetic polypeptide
  XENP018583 1G6_H1.87_L1_scFv(GKPGS)4
EVQLVESGGGLVKPGGSLRLSCAASGFTFSNYWMNWVRQAPGKGLEWVGEIRLDSNNYATHYAEPVKGRFTISRDDSKSTVYLQMNSLKTEDTAVYYCTRYYGNYGGYFDVWGAGTLVTVSSGKPGSGKPGSGKPGSGKPGSSIVMTQSPATLSVSPGERATLSCRASQSVSNDVAWYQQKPGQSPRLLINYASHRYTGVPDRFTGSGYGTEFTLTISSLQSEDFAVYFCQQDYSSPRTFGGGTKVEIK

SEQ ID NO: 7134 - protein, 122 aa, Artificial Sequence
  Description of Artificial Sequence: Synthetic polypeptide
  VH of XENP018583
EVQLVESGGGLVKPGGSLRLSCAASGFTFSNYWMNWVRQAPGKGLEWVGEIRLDSNNYATHYAEPVKGRFTISRDDSKSTVYLQMNSLKTEDTAVYYCTRYYGNYGGYFDVWGAGTLVTVSS

SEQ ID NO: 7135 - protein, 107 aa, Artificial Sequence; identical to SEQ ID NO: 6247
  Description of Artificial Sequence: Synthetic polypeptide
  VL of XENP018583

SEQ ID NO: 7136 - protein, 5 aa, Artificial Sequence
  Description of Artificial Sequence: Synthetic peptide
  XENP018583 vhCDR1
NYWMN

SEQ ID NO: 7137 - protein, 19 aa, Artificial Sequence
  Description of Artificial Sequence: Synthetic peptide
  XENP018583 vhCDR2
EIRLDSNNYATHYAEPVKG

SEQ ID NO: 7138 - protein, 11 aa, Artificial Sequence
  Description of Artificial Sequence: Synthetic peptide
  XENP018583 vhCDR3
YYGNYGGYFDV

SEQ ID NO: 7139 - protein, 11 aa, Artificial Sequence
  Description of Artificial Sequence: Synthetic peptide
  XENP018583 vlCDR1
RASQSVSNDVA

SEQ ID NO: 7140 - protein, 7 aa, Artificial Sequence
  Description of Artificial Sequence: Synthetic peptide
  XENP018583 vlCDR2
YASHRYT

SEQ ID NO: 7141 - protein, 9 aa, Artificial Sequence
  Description of Artificial Sequence: Synthetic peptide
  XENP018583 vlCDR3
QQDYSSPRT

SEQ ID NO: 7142 - protein, 249 aa, Artificial Sequence
  Description of Artificial Sequence: Synthetic polypeptide
  XENP018584 1G6_H1.88_L1_scFv(GKPGS)4
EVQLVESGGGLVKPGGSLRLSCAASGFTFSNYWMNWVRQAPGKGLEWVGEIRLASNNYATHYAEPVKGRFTISRDDSKSTVYLQMNSLKTEDTAVYYCTRYYGNYGGYFDVWGAGTLVTVSSGKPGSGKPGSGKPGSGKPGSSIVMTQSPATLSVSPGERATLSCRASQSVSNDVAWYQQKPGQSPRLLINYASHRYTGVPDRFTGSGYGTEFTLTISSLQSEDFAVYFCQQDYSSPRTFGGGTKVEIK

SEQ ID NO: 7143 - protein, 122 aa, Artificial Sequence
  Description of Artificial Sequence: Synthetic polypeptide
  VH of XENP018584
EVQLVESGGGLVKPGGSLRLSCAASGFTFSNYWMNWVRQAPGKGLEWVGEIRLASNNYATHYAEPVKGRFTISRDDSKSTVYLQMNSLKTEDTAVYYCTRYYGNYGGYFDVWGAGTLVTVSS

SEQ ID NO: 7144 - protein, 107 aa, Artificial Sequence; identical to SEQ ID NO: 6247
  Description of Artificial Sequence: Synthetic polypeptide
  VL of XENP018584

SEQ ID NO: 7145 - protein, 5 aa, Artificial Sequence
  Description of Artificial Sequence: Synthetic peptide
  XENP018584 vhCDR1
NYWMN

SEQ ID NO: 7146 - protein, 19 aa, Artificial Sequence
  Description of Artificial Sequence: Synthetic peptide
  XENP018584 vhCDR2
EIRLASNNYATHYAEPVKG

SEQ ID NO: 7147 - protein, 11 aa, Artificial Sequence
  Description of Artificial Sequence: Synthetic peptide
  XENP018584 vhCDR3
YYGNYGGYFDV

SEQ ID NO: 7148 - protein, 11 aa, Artificial Sequence
  Description of Artificial Sequence: Synthetic peptide
  XENP018584 vlCDR1
RASQSVSNDVA

SEQ ID NO: 7149 - protein, 7 aa, Artificial Sequence
  Description of Artificial Sequence: Synthetic peptide
  XENP018584 vlCDR2
YASHRYT

SEQ ID NO: 7150 - protein, 9 aa, Artificial Sequence
  Description of Artificial Sequence: Synthetic peptide
  XENP018584 vlCDR3
QQDYSSPRT

SEQ ID NO: 7151 - protein, 249 aa, Artificial Sequence
  Description of Artificial Sequence: Synthetic polypeptide
  XENP018585 1G6_H1.89_L1_scFv(GKPGS)4
EVQLVESGGGLVKPGGSLRLSCAASGFTFSNYWMNWVRQAPGKGLEWVGEIRLGSNNYATHYAEPVKGRFTISRDDSKSTVYLQMNSLKTEDTAVYYCTRYYGNYGGYFDVWGAGTLVTVSSGKPGSGKPGSGKPGSGKPGSSIVMTQSPATLSVSPGERATLSCRASQSVSNDVAWYQQKPGQSPRLLINYASHRYTGVPDRFTGSGYGTEFTLTISSLQSEDFAVYFCQQDYSSPRTFGGGTKVEIK

SEQ ID NO: 7152 - protein, 122 aa, Artificial Sequence
  Description of Artificial Sequence: Synthetic polypeptide
  VH of XENP018585
EVQLVESGGGLVKPGGSLRLSCAASGFTFSNYWMNWVRQAPGKGLEWVGEIRLGSNNYATHYAEPVKGRFTISRDDSKSTVYLQMNSLKTEDTAVYYCTRYYGNYGGYFDVWGAGTLVTVSS

SEQ ID NO: 7153 - protein, 107 aa, Artificial Sequence; identical to SEQ ID NO: 6247
  Description of Artificial Sequence: Synthetic polypeptide
  VL of XENP018585

SEQ ID NO: 7154 - protein, 5 aa, Artificial Sequence
  Description of Artificial Sequence: Synthetic peptide
  XENP018585 vhCDR1
NYWMN

SEQ ID NO: 7155 - protein, 19 aa, Artificial Sequence
  Description of Artificial Sequence: Synthetic peptide
  XENP018585 vhCDR2
EIRLGSNNYATHYAEPVKG

SEQ ID NO: 7156 - protein, 11 aa, Artificial Sequence
  Description of Artificial Sequence: Synthetic peptide
  XENP018585 vhCDR3
YYGNYGGYFDV

SEQ ID NO: 7157 - protein, 11 aa, Artificial Sequence
  Description of Artificial Sequence: Synthetic peptide
  XENP018585 vlCDR1
RASQSVSNDVA

SEQ ID NO: 7158 - protein, 7 aa, Artificial Sequence
  Description of Artificial Sequence: Synthetic peptide
  XENP018585 vlCDR2
YASHRYT

SEQ ID NO: 7159 - protein, 9 aa, Artificial Sequence
  Description of Artificial Sequence: Synthetic peptide
  XENP018585 vlCDR3
QQDYSSPRT

SEQ ID NO: 7160 - protein, 249 aa, Artificial Sequence
  Description of Artificial Sequence: Synthetic polypeptide
  XENP018586 1G6_H1.90_L1_scFv(GKPGS)4
EVQLVESGGGLVKPGGSLRLSCAASGFTFSNYWMNWVRQAPGKGLEWVGEIRLYSNNYATHYAEPVKGRFTISRDDSKSTVYLQMNSLKTEDTAVYYCTRYYGNYGGYFDVWGAGTLVTVSSGKPGSGKPGSGKPGSGKPGSSIVMTQSPATLSVSPGERATLSCRASQSVSNDVAWYQQKPGQSPRLLINYASHRYTGVPDRFTGSGYGTEFTLTISSLQSEDFAVYFCQQDYSSPRTFGGGTKVEIK

SEQ ID NO: 7161 - protein, 122 aa, Artificial Sequence
  Description of Artificial Sequence: Synthetic polypeptide
  VH of XENP018586
EVQLVESGGGLVKPGGSLRLSCAASGFTFSNYWMNWVRQAPGKGLEWVGEIRLYSNNYATHYAEPVKGRFTISRDDSKSTVYLQMNSLKTEDTAVYYCTRYYGNYGGYFDVWGAGTLVTVSS

SEQ ID NO: 7162 - protein, 107 aa, Artificial Sequence; identical to SEQ ID NO: 6247
  Description of Artificial Sequence: Synthetic polypeptide
  VL of XENP018586

SEQ ID NO: 7163 - protein, 5 aa, Artificial Sequence
  Description of Artificial Sequence: Synthetic peptide
  XENP018586 vhCDR1
NYWMN

SEQ ID NO: 7164 - protein, 19 aa, Artificial Sequence
  Description of Artificial Sequence: Synthetic peptide
  XENP018586 vhCDR2
EIRLYSNNYATHYAEPVKG

SEQ ID NO: 7165 - protein, 11 aa, Artificial Sequence
  Description of Artificial Sequence: Synthetic peptide
  XENP018586 vhCDR3
YYGNYGGYFDV

SEQ ID NO: 7166 - protein, 11 aa, Artificial Sequence
  Description of Artificial Sequence: Synthetic peptide
  XENP018586 vlCDR1
RASQSVSNDVA

SEQ ID NO: 7167 - protein, 7 aa, Artificial Sequence
  Description of Artificial Sequence: Synthetic peptide
  XENP018586 vlCDR2
YASHRYT

SEQ ID NO: 7168 - protein, 9 aa, Artificial Sequence
  Description of Artificial Sequence: Synthetic peptide
  XENP018586 vlCDR3
QQDYSSPRT

SEQ ID NO: 7169 - protein, 249 aa, Artificial Sequence
  Description of Artificial Sequence: Synthetic polypeptide
  XENP018587 1G6_H1.91_L1_scFv(GKPGS)4
EVQLVESGGGLVKPGGSLRLSCAASGFTFSNYWMNWVRQAPGKGLEWVGEIRLISNNYATHYAEPVKGRFTISRDDSKSTVYLQMNSLKTEDTAVYYCTRYYGNYGGYFDVWGAGTLVTVSSGKPGSGKPGSGKPGSGKPGSSIVMTQSPATLSVSPGERATLSCRASQSVSNDVAWYQQKPGQSPRLLINYASHRYTGVPDRFTGSGYGTEFTLTISSLQSEDFAVYFCQQDYSSPRTFGGGTKVEIK

SEQ ID NO: 7170 - protein, 122 aa, Artificial Sequence
  Description of Artificial Sequence: Synthetic polypeptide
  VH of XENP018587
EVQLVESGGGLVKPGGSLRLSCAASGFTFSNYWMNWVRQAPGKGLEWVGEIRLISNNYATHYAEPVKGRFTISRDDSKSTVYLQMNSLKTEDTAVYYCTRYYGNYGGYFDVWGAGTLVTVSS

SEQ ID NO: 7171 - protein, 107 aa, Artificial Sequence; identical to SEQ ID NO: 6247
  Description of Artificial Sequence: Synthetic polypeptide
  VL of XENP018587

SEQ ID NO: 7172 - protein, 5 aa, Artificial Sequence
  Description of Artificial Sequence: Synthetic peptide
  XENP018587 vhCDR1
NYWMN

SEQ ID NO: 7173 - protein, 19 aa, Artificial Sequence
  Description of Artificial Sequence: Synthetic peptide
  XENP018587 vhCDR2
EIRLISNNYATHYAEPVKG

SEQ ID NO: 7174 - protein, 11 aa, Artificial Sequence
  Description of Artificial Sequence: Synthetic peptide
  XENP018587 vhCDR3
YYGNYGGYFDV

SEQ ID NO: 7175 - protein, 11 aa, Artificial Sequence
  Description of Artificial Sequence: Synthetic peptide
  XENP018587 vlCDR1
RASQSVSNDVA

SEQ ID NO: 7176 - protein, 7 aa, Artificial Sequence
  Description of Artificial Sequence: Synthetic peptide
  XENP018587 vlCDR2
YASHRYT

SEQ ID NO: 7177 - protein, 9 aa, Artificial Sequence
  Description of Artificial Sequence: Synthetic peptide
  XENP018587 vlCDR3
QQDYSSPRT

SEQ ID NO: 7178 - protein, 249 aa, Artificial Sequence
  Description of Artificial Sequence: Synthetic polypeptide
  XENP018588 1G6_H1.92_L1_scFv(GKPGS)4
EVQLVESGGGLVKPGGSLRLSCAASGFTFSNYWMNWVRQAPGKGLEWVGEIRLKTNNYATHYAEPVKGRFTISRDDSKSTVYLQMNSLKTEDTAVYYCTRYYGNYGGYFDVWGAGTLVTVSSGKPGSGKPGSGKPGSGKPGSSIVMTQSPATLSVSPGERATLSCRASQSVSNDVAWYQQKPGQSPRLLINYASHRYTGVPDRFTGSGYGTEFTLTISSLQSEDFAVYFCQQDYSSPRTFGGGTKVEIK

SEQ ID NO: 7179 - protein, 122 aa, Artificial Sequence
  Description of Artificial Sequence: Synthetic polypeptide
  VH of XENP018588
EVQLVESGGGLVKPGGSLRLSCAASGFTFSNYWMNWVRQAPGKGLEWVGEIRLKTNNYATHYAEPVKGRFTISRDDSKSTVYLQMNSLKTEDTAVYYCTRYYGNYGGYFDVWGAGTLVTVSS

SEQ ID NO: 7180 - protein, 107 aa, Artificial Sequence; identical to SEQ ID NO: 6247
  Description of Artificial Sequence: Synthetic polypeptide
  VL of XENP018588

SEQ ID NO: 7181 - protein, 5 aa, Artificial Sequence
  Description of Artificial Sequence: Synthetic peptide
  XENP018588 vhCDR1
NYWMN

SEQ ID NO: 7182 - protein, 19 aa, Artificial Sequence
  Description of Artificial Sequence: Synthetic peptide
  XENP018588 vhCDR2
EIRLKTNNYATHYAEPVKG

SEQ ID NO: 7183 - protein, 11 aa, Artificial Sequence
  Description of Artificial Sequence: Synthetic peptide
  XENP018588 vhCDR3
YYGNYGGYFDV

SEQ ID NO: 7184 - protein, 11 aa, Artificial Sequence
  Description of Artificial Sequence: Synthetic peptide
  XENP018588 vlCDR1
RASQSVSNDVA

SEQ ID NO: 7185 - protein, 7 aa, Artificial Sequence
  Description of Artificial Sequence: Synthetic peptide
  XENP018588 vlCDR2
YASHRYT

SEQ ID NO: 7186 - protein, 9 aa, Artificial Sequence
  Description of Artificial Sequence: Synthetic peptide
  XENP018588 vlCDR3
QQDYSSPRT

SEQ ID NO: 7187 - protein, 249 aa, Artificial Sequence
  Description of Artificial Sequence: Synthetic polypeptide
  XENP018589 1G6_H1.93_L1_scFv(GKPGS)4
EVQLVESGGGLVKPGGSLRLSCAASGFTFSNYWMNWVRQAPGKGLEWVGEIRLKANNYATHYAEPVKGRFTISRDDSKSTVYLQMNSLKTEDTAVYYCTRYYGNYGGYFDVWGAGTLVTVSSGKPGSGKPGSGKPGSGKPGSSIVMTQSPATLSVSPGERATLSCRASQSVSNDVAWYQQKPGQSPRLLINYASHRYTGVPDRFTGSGYGTEFTLTISSLQSEDFAVYFCQQDYSSPRTFGGGTKVEIK

SEQ ID NO: 7188 - protein, 122 aa, Artificial Sequence
  Description of Artificial Sequence: Synthetic polypeptide
  VH of XENP018589
EVQLVESGGGLVKPGGSLRLSCAASGFTFSNYWMNWVRQAPGKGLEWVGEIRLKANNYATHYAEPVKGRFTISRDDSKSTVYLQMNSLKTEDTAVYYCTRYYGNYGGYFDVWGAGTLVTVSS

SEQ ID NO: 7189 - protein, 107 aa, Artificial Sequence; identical to SEQ ID NO: 6247
  Description of Artificial Sequence: Synthetic polypeptide
  VL of XENP018589

SEQ ID NO: 7190 - protein, 5 aa, Artificial Sequence
  Description of Artificial Sequence: Synthetic peptide
  XENP018589 vhCDR1
NYWMN

SEQ ID NO: 7191 - protein, 19 aa, Artificial Sequence
  Description of Artificial Sequence: Synthetic peptide
  XENP018589 vhCDR2
EIRLKANNYATHYAEPVKG

SEQ ID NO: 7192 - protein, 11 aa, Artificial Sequence
  Description of Artificial Sequence: Synthetic peptide
  XENP018589 vhCDR3
YYGNYGGYFDV

SEQ ID NO: 7193 - protein, 11 aa, Artificial Sequence
  Description of Artificial Sequence: Synthetic peptide
  XENP018589 vlCDR1
RASQSVSNDVA

SEQ ID NO: 7194 - protein, 7 aa, Artificial Sequence
  Description of Artificial Sequence: Synthetic peptide
  XENP018589 vlCDR2
YASHRYT

SEQ ID NO: 7195 - protein, 9 aa, Artificial Sequence
  Description of Artificial Sequence: Synthetic peptide
  XENP018589 vlCDR3
QQDYSSPRT

SEQ ID NO: 7196 - protein, 249 aa, Artificial Sequence
  Description of Artificial Sequence: Synthetic polypeptide
  XENP018590 1G6_H1.94_L1_scFv(GKPGS)4
EVQLVESGGGLVKPGGSLRLSCAASGFTFSNYWMNWVRQAPGKGLEWVGEIRLKQNNYATHYAEPVKGRFTISRDDSKSTVYLQMNSLKTEDTAVYYCTRYYGNYGGYFDVWGAGTLVTVSSGKPGSGKPGSGKPGSGKPGSSIVMTQSPATLSVSPGERATLSCRASQSVSNDVAWYQQKPGQSPRLLINYASHRYTGVPDRFTGSGYGTEFTLTISSLQSEDFAVYFCQQDYSSPRTFGGGTKVEIK

SEQ ID NO: 7197 - protein, 122 aa, Artificial Sequence
  Description of Artificial Sequence: Synthetic polypeptide
  VH of XENP018590
EVQLVESGGGLVKPGGSLRLSCAASGFTFSNYWMNWVRQAPGKGLEWVGEIRLKQNNYATHYAEPVKGRFTISRDDSKSTVYLQMNSLKTEDTAVYYCTRYYGNYGGYFDVWGAGTLVTVSS

SEQ ID NO: 7198 - protein, 107 aa, Artificial Sequence; identical to SEQ ID NO: 6247
  Description of Artificial Sequence: Synthetic polypeptide
  VL of XENP018590

SEQ ID NO: 7199 - protein, 5 aa, Artificial Sequence
  Description of Artificial Sequence: Synthetic peptide
  XENP018590 vhCDR1
NYWMN

SEQ ID NO: 7200 - protein, 19 aa, Artificial Sequence
  Description of Artificial Sequence: Synthetic peptide
  XENP018590 vhCDR2
EIRLKQNNYATHYAEPVKG

SEQ ID NO: 7201 - protein, 11 aa, Artificial Sequence
  Description of Artificial Sequence: Synthetic peptide
  XENP018590 vhCDR3
YYGNYGGYFDV

SEQ ID NO: 7202 - protein, 11 aa, Artificial Sequence
  Description of Artificial Sequence: Synthetic peptide
  XENP018590 vlCDR1
RASQSVSNDVA

SEQ ID NO: 7203 - protein, 7 aa, Artificial Sequence
  Description of Artificial Sequence: Synthetic peptide
  XENP018590 vlCDR2
YASHRYT

SEQ ID NO: 7204 - protein, 9 aa, Artificial Sequence
  Description of Artificial Sequence: Synthetic peptide
  XENP018590 vlCDR3
QQDYSSPRT

SEQ ID NO: 7205 - protein, 249 aa, Artificial Sequence
  Description of Artificial Sequence: Synthetic polypeptide
  XENP018591 1G6_H1.95_L1_scFv(GKPGS)4
EVQLVESGGGLVKPGGSLRLSCAASGFTFSNYWMNWVRQAPGKGLEWVGEIRLKGNNYATHYAEPVKGRFTISRDDSKSTVYLQMNSLKTEDTAVYYCTRYYGNYGGYFDVWGAGTLVTVSSGKPGSGKPGSGKPGSGKPGSSIVMTQSPATLSVSPGERATLSCRASQSVSNDVAWYQQKPGQSPRLLINYASHRYTGVPDRFTGSGYGTEFTLTISSLQSEDFAVYFCQQDYSSPRTFGGGTKVEIK

SEQ ID NO: 7206 - protein, 122 aa, Artificial Sequence
  Description of Artificial Sequence: Synthetic polypeptide
  VH of XENP018591
EVQLVESGGGLVKPGGSLRLSCAASGFTFSNYWMNWVRQAPGKGLEWVGEIRLKGNNYATHYAEPVKGRFTISRDDSKSTVYLQMNSLKTEDTAVYYCTRYYGNYGGYFDVWGAGTLVTVSS

SEQ ID NO: 7207 - protein, 107 aa, Artificial Sequence; identical to SEQ ID NO: 6247
  Description of Artificial Sequence: Synthetic polypeptide
  VL of XENP018591

SEQ ID NO: 7208 - protein, 5 aa, Artificial Sequence
  Description of Artificial Sequence: Synthetic peptide
  XENP018591 vhCDR1
NYWMN

SEQ ID NO: 7209 - protein, 19 aa, Artificial Sequence
  Description of Artificial Sequence: Synthetic peptide
  XENP018591 vhCDR2
EIRLKGNNYATHYAEPVKG

SEQ ID NO: 7210 - protein, 11 aa, Artificial Sequence
  Description of Artificial Sequence: Synthetic peptide
  XENP018591 vhCDR3
YYGNYGGYFDV

SEQ ID NO: 7211 - protein, 11 aa, Artificial Sequence
  Description of Artificial Sequence: Synthetic peptide
  XENP018591 vlCDR1
RASQSVSNDVA

SEQ ID NO: 7212 - protein, 7 aa, Artificial Sequence
  Description of Artificial Sequence: Synthetic peptide
  XENP018591 vlCDR2
YASHRYT

SEQ ID NO: 7213 - protein, 9 aa, Artificial Sequence
  Description of Artificial Sequence: Synthetic peptide
  XENP018591 vlCDR3
QQDYSSPRT

SEQ ID NO: 7214 - protein, 249 aa, Artificial Sequence
  Description of Artificial Sequence: Synthetic polypeptide
  XENP018592 1G6_H1.96_L1_scFv(GKPGS)4
EVQLVESGGGLVKPGGSLRLSCAASGFTFSNYWMNWVRQAPGKGLEWVGEIRLKVNNYATHYAEPVKGRFTISRDDSKSTVYLQMNSLKTEDTAVYYCTRYYGNYGGYFDVWGAGTLVTVSSGKPGSGKPGSGKPGSGKPGSSIVMTQSPATLSVSPGERATLSCRASQSVSNDVAWYQQKPGQSPRLLINYASHRYTGVPDRFTGSGYGTEFTLTISSLQSEDFAVYFCQQDYSSPRTFGGGTKVEIK

SEQ ID NO: 7215 - protein, 122 aa, Artificial Sequence
  Description of Artificial Sequence: Synthetic polypeptide
  VH of XENP018592
EVQLVESGGGLVKPGGSLRLSCAASGFTFSNYWMNWVRQAPGKGLEWVGEIRLKVNNYATHYAEPVKGRFTISRDDSKSTVYLQMNSLKTEDTAVYYCTRYYGNYGGYFDVWGAGTLVTVSS

SEQ ID NO: 7216 - protein, 107 aa, Artificial Sequence; identical to SEQ ID NO: 6247
  Description of Artificial Sequence: Synthetic polypeptide
  VL of XENP018592

SEQ ID NO: 7217 - protein, 5 aa, Artificial Sequence
  Description of Artificial Sequence: Synthetic peptide
  XENP018592 vhCDR1
NYWMN

SEQ ID NO: 7218 - protein, 19 aa, Artificial Sequence
  Description of Artificial Sequence: Synthetic peptide
  XENP018592 vhCDR2
EIRLKVNNYATHYAEPVKG

SEQ ID NO: 7219 - protein, 11 aa, Artificial Sequence
  Description of Artificial Sequence: Synthetic peptide
  XENP018592 vhCDR3
YYGNYGGYFDV

SEQ ID NO: 7220 - protein, 11 aa, Artificial Sequence
  Description of Artificial Sequence: Synthetic peptide
  XENP018592 vlCDR1
RASQSVSNDVA

SEQ ID NO: 7221 - protein, 7 aa, Artificial Sequence
  Description of Artificial Sequence: Synthetic peptide
  XENP018592 vlCDR2
YASHRYT

SEQ ID NO: 7222 - protein, 9 aa, Artificial Sequence
  Description of Artificial Sequence: Synthetic peptide
  XENP018592 vlCDR3
QQDYSSPRT

SEQ ID NO: 7223 - protein, 249 aa, Artificial Sequence
  Description of Artificial Sequence: Synthetic polypeptide
  XENP018593 1G6_H1.97_L1_scFv(GKPGS)4
EVQLVESGGGLVKPGGSLRLSCAASGFTFSNYWMNWVRQAPGKGLEWVGEIRLKHNNYATHYAEPVKGRFTISRDDSKSTVYLQMNSLKTEDTAVYYCTRYYGNYGGYFDVWGAGTLVTVSSGKPGSGKPGSGKPGSGKPGSSIVMTQSPATLSVSPGERATLSCRASQSVSNDVAWYQQKPGQSPRLLINYASHRYTGVPDRFTGSGYGTEFTLTISSLQSEDFAVYFCQQDYSSPRTFGGGTKVEIK

SEQ ID NO: 7224 - protein, 122 aa, Artificial Sequence
  Description of Artificial Sequence: Synthetic polypeptide
  VH of XENP018593
EVQLVESGGGLVKPGGSLRLSCAASGFTFSNYWMNWVRQAPGKGLEWVGEIRLKHNNYATHYAEPVKGRFTISRDDSKSTVYLQMNSLKTEDTAVYYCTRYYGNYGGYFDVWGAGTLVTVSS

SEQ ID NO: 7225 - protein, 107 aa, Artificial Sequence; identical to SEQ ID NO: 6247
  Description of Artificial Sequence: Synthetic polypeptide
  VL of XENP018593

SEQ ID NO: 7226 - protein, 5 aa, Artificial Sequence
  Description of Artificial Sequence: Synthetic peptide
  XENP018593 vhCDR1
NYWMN

SEQ ID NO: 7227 - protein, 19 aa, Artificial Sequence
  Description of Artificial Sequence: Synthetic peptide
  XENP018593 vhCDR2
EIRLKHNNYATHYAEPVKG

SEQ ID NO: 7228 - protein, 11 aa, Artificial Sequence
  Description of Artificial Sequence: Synthetic peptide
  XENP018593 vhCDR3
YYGNYGGYFDV

SEQ ID NO: 7229 - protein, 11 aa, Artificial Sequence
  Description of Artificial Sequence: Synthetic peptide
  XENP018593 vlCDR1
RASQSVSNDVA

SEQ ID NO: 7230 - protein, 7 aa, Artificial Sequence
  Description of Artificial Sequence: Synthetic peptide
  XENP018593 vlCDR2
YASHRYT

SEQ ID NO: 7231 - protein, 9 aa, Artificial Sequence
  Description of Artificial Sequence: Synthetic peptide
  XENP018593 vlCDR3
QQDYSSPRT

SEQ ID NO: 7232 - protein, 249 aa, Artificial Sequence
  Description of Artificial Sequence: Synthetic polypeptide
  XENP018594 1G6_H1.98_L1_scFv(GKPGS)4
EVQLVESGGGLVKPGGSLRLSCAASGFTFSNYWMNWVRQAPGKGLEWVGEIRLKDNNYATHYAEPVKGRFTISRDDSKSTVYLQMNSLKTEDTAVYYCTRYYGNYGGYFDVWGAGTLVTVSSGKPGSGKPGSGKPGSGKPGSSIVMTQSPATLSVSPGERATLSCRASQSVSNDVAWYQQKPGQSPRLLINYASHRYTGVPDRFTGSGYGTEFTLTISSLQSEDFAVYFCQQDYSSPRTFGGGTKVEIK

SEQ ID NO: 7233 - protein, 122 aa, Artificial Sequence
  Description of Artificial Sequence: Synthetic polypeptide
  VH of XENP018594
EVQLVESGGGLVKPGGSLRLSCAASGFTFSNYWMNWVRQAPGKGLEWVGEIRLKDNNYATHYAEPVKGRFTISRDDSKSTVYLQMNSLKTEDTAVYYCTRYYGNYGGYFDVWGAGTLVTVSS

SEQ ID NO: 7234 - protein, 107 aa, Artificial Sequence; identical to SEQ ID NO: 6247
  Description of Artificial Sequence: Synthetic polypeptide
  VL of XENP018594

SEQ ID NO: 7235 - protein, 5 aa, Artificial Sequence
  Description of Artificial Sequence: Synthetic peptide
  XENP018594 vhCDR1
NYWMN

SEQ ID NO: 7236 - protein, 19 aa, Artificial Sequence
  Description of Artificial Sequence: Synthetic peptide
  XENP018594 vhCDR2
EIRLKDNNYATHYAEPVKG

SEQ ID NO: 7237 - protein, 11 aa, Artificial Sequence
  Description of Artificial Sequence: Synthetic peptide
  XENP018594 vhCDR3
YYGNYGGYFDV

SEQ ID NO: 7238 - protein, 11 aa, Artificial Sequence
  Description of Artificial Sequence: Synthetic peptide
  XENP018594 vlCDR1
RASQSVSNDVA

SEQ ID NO: 7239 - protein, 7 aa, Artificial Sequence
  Description of Artificial Sequence: Synthetic peptide
  XENP018594 vlCDR2
YASHRYT

SEQ ID NO: 7240 - protein, 9 aa, Artificial Sequence
  Description of Artificial Sequence: Synthetic peptide
  XENP018594 vlCDR3
QQDYSSPRT

SEQ ID NO: 7241 - protein, 249 aa, Artificial Sequence
  Description of Artificial Sequence: Synthetic polypeptide
  XENP018595 1G6_H1.99_L1_scFv(GKPGS)4
EVQLVESGGGLVKPGGSLRLSCAASGFTFSNYWMNWVRQAPGKGLEWVGEIRLKKNNYATHYAEPVKGRFTISRDDSKSTVYLQMNSLKTEDTAVYYCTRYYGNYGGYFDVWGAGTLVTVSSGKPGSGKPGSGKPGSGKPGSSIVMTQSPATLSVSPGERATLSCRASQSVSNDVAWYQQKPGQSPRLLINYASHRYTGVPDRFTGSGYGTEFTLTISSLQSEDFAVYFCQQDYSSPRTFGGGTKVEIK

SEQ ID NO: 7242 - protein, 122 aa, Artificial Sequence
  Description of Artificial Sequence: Synthetic polypeptide
  VH of XENP018595
EVQLVESGGGLVKPGGSLRLSCAASGFTFSNYWMNWVRQAPGKGLEWVGEIRLKKNNYATHYAEPVKGRFTISRDDSKSTVYLQMNSLKTEDTAVYYCTRYYGNYGGYFDVWGAGTLVTVSS

SEQ ID NO: 7243 - protein, 107 aa, Artificial Sequence; identical to SEQ ID NO: 6247
  Description of Artificial Sequence: Synthetic polypeptide
  VL of XENP018595

SEQ ID NO: 7244 - protein, 5 aa, Artificial Sequence
  Description of Artificial Sequence: Synthetic peptide
  XENP018595 vhCDR1
NYWMN

SEQ ID NO: 7245 - protein, 19 aa, Artificial Sequence
  Description of Artificial Sequence: Synthetic peptide
  XENP018595 vhCDR2
EIRLKKNNYATHYAEPVKG

SEQ ID NO: 7246 - protein, 11 aa, Artificial Sequence
  Description of Artificial Sequence: Synthetic peptide
  XENP018595 vhCDR3
YYGNYGGYFDV

SEQ ID NO: 7247 - protein, 11 aa, Artificial Sequence
  Description of Artificial Sequence: Synthetic peptide
  XENP018595 vlCDR1
RASQSVSNDVA

SEQ ID NO: 7248 - protein, 7 aa, Artificial Sequence
  Description of Artificial Sequence: Synthetic peptide
  XENP018595 vlCDR2
YASHRYT

SEQ ID NO: 7249 - protein, 9 aa, Artificial Sequence
  Description of Artificial Sequence: Synthetic peptide
  XENP018595 vlCDR3
QQDYSSPRT

SEQ ID NO: 7250 - protein, 249 aa, Artificial Sequence
  Description of Artificial Sequence: Synthetic polypeptide
  XENP018596 1G6_H1.100_L1_scFv(GKPGS)4
EVQLVESGGGLVKPGGSLRLSCAASGFTFSNYWMNWVRQAPGKGLEWVGEIRLKYNNYATHYAEPVKGRFTISRDDSKSTVYLQMNSLKTEDTAVYYCTRYYGNYGGYFDVWGAGTLVTVSSGKPGSGKPGSGKPGSGKPGSSIVMTQSPATLSVSPGERATLSCRASQSVSNDVAWYQQKPGQSPRLLINYASHRYTGVPDRFTGSGYGTEFTLTISSLQSEDFAVYFCQQDYSSPRTFGGGTKVEIK

SEQ ID NO: 7251 - protein, 122 aa, Artificial Sequence
  Description of Artificial Sequence: Synthetic polypeptide
  VH of XENP018596
EVQLVESGGGLVKPGGSLRLSCAASGFTFSNYWMNWVRQAPGKGLEWVGEIRLKYNNYATHYAEPVKGRFTISRDDSKSTVYLQMNSLKTEDTAVYYCTRYYGNYGGYFDVWGAGTLVTVSS

SEQ ID NO: 7252 - protein, 107 aa, Artificial Sequence; identical to SEQ ID NO: 6247
  Description of Artificial Sequence: Synthetic polypeptide
  VL of XENP018596

SEQ ID NO: 7253 - protein, 5 aa, Artificial Sequence
  Description of Artificial Sequence: Synthetic peptide
  XENP018596 vhCDR1
NYWMN

SEQ ID NO: 7254 - protein, 19 aa, Artificial Sequence
  Description of Artificial Sequence: Synthetic peptide
  XENP018596 vhCDR2
EIRLKYNNYATHYAEPVKG

SEQ ID NO: 7255 - protein, 11 aa, Artificial Sequence
  Description of Artificial Sequence: Synthetic peptide
  XENP018596 vhCDR3
YYGNYGGYFDV

SEQ ID NO: 7256 - protein, 11 aa, Artificial Sequence
  Description of Artificial Sequence: Synthetic peptide
  XENP018596 vlCDR1
RASQSVSNDVA

SEQ ID NO: 7257 - protein, 7 aa, Artificial Sequence
  Description of Artificial Sequence: Synthetic peptide
  XENP018596 vlCDR2
YASHRYT

SEQ ID NO: 7258 - protein, 9 aa, Artificial Sequence
  Description of Artificial Sequence: Synthetic peptide
  XENP018596 vlCDR3
QQDYSSPRT

SEQ ID NO: 7259 - protein, 249 aa, Artificial Sequence
  Description of Artificial Sequence: Synthetic polypeptide
  XENP018601 1G6_H1.101_L1_scFv(GKPGS)4
EVQLVESGGGLVKPGGSLRLSCAASGFTFSNYWMNWVRQAPGKGLEWVGEIRLKSDNYATHYAEPVKGRFTISRDDSKSTVYLQMNSLKTEDTAVYYCTRYYGNYGGYFDVWGAGTLVTVSSGKPGSGKPGSGKPGSGKPGSSIVMTQSPATLSVSPGERATLSCRASQSVSNDVAWYQQKPGQSPRLLINYASHRYTGVPDRFTGSGYGTEFTLTISSLQSEDFAVYFCQQDYSSPRTFGGGTKVEIK

SEQ ID NO: 7260 - protein, 122 aa, Artificial Sequence
  Description of Artificial Sequence: Synthetic polypeptide
  VH of XENP018601
EVQLVESGGGLVKPGGSLRLSCAASGFTFSNYWMNWVRQAPGKGLEWVGEIRLKSDNYATHYAEPVKGRFTISRDDSKSTVYLQMNSLKTEDTAVYYCTRYYGNYGGYFDVWGAGTLVTVSS

SEQ ID NO: 7261 - protein, 107 aa, Artificial Sequence; identical to SEQ ID NO: 6247
  Description of Artificial Sequence: Synthetic polypeptide
  VL of XENP018601

SEQ ID NO: 7262 - protein, 5 aa, Artificial Sequence
  Description of Artificial Sequence: Synthetic peptide
  XENP018601 vhCDR1
NYWMN

SEQ ID NO: 7263 - protein, 19 aa, Artificial Sequence
  Description of Artificial Sequence: Synthetic peptide
  XENP018601 vhCDR2
EIRLKSDNYATHYAEPVKG

SEQ ID NO: 7264 - protein, 11 aa, Artificial Sequence
  Description of Artificial Sequence: Synthetic peptide
  XENP018601 vhCDR3
YYGNYGGYFDV

SEQ ID NO: 7265 - protein, 11 aa, Artificial Sequence
  Description of Artificial Sequence: Synthetic peptide
  XENP018601 vlCDR1
RASQSVSNDVA

SEQ ID NO: 7266 - protein, 7 aa, Artificial Sequence
  Description of Artificial Sequence: Synthetic peptide
  XENP018601 vlCDR2
YASHRYT

SEQ ID NO: 7267 - protein, 9 aa, Artificial Sequence
  Description of Artificial Sequence: Synthetic peptide
  XENP018601 vlCDR3
QQDYSSPRT

SEQ ID NO: 7268 - protein, 249 aa, Artificial Sequence
  Description of Artificial Sequence: Synthetic polypeptide
  XENP018602 1G6_H1.102_L1_scFv(GKPGS)4
EVQLVESGGGLVKPGGSLRLSCAASGFTFSNYWMNWVRQAPGKGLEWVGEIRLKSHNYATHYAEPVKGRFTISRDDSKSTVYLQMNSLKTEDTAVYYCTRYYGNYGGYFDVWGAGTLVTVSSGKPGSGKPGSGKPGSGKPGSSIVMTQSPATLSVSPGERATLSCRASQSVSNDVAWYQQKPGQSPRLLINYASHRYTGVPDRFTGSGYGTEFTLTISSLQSEDFAVYFCQQDYSSPRTFGGGTKVEIK

SEQ ID NO: 7269 - protein, 122 aa, Artificial Sequence
  Description of Artificial Sequence: Synthetic polypeptide
  VH of XENP018602
EVQLVESGGGLVKPGGSLRLSCAASGFTFSNYWMNWVRQAPGKGLEWVGEIRLKSHNYATHYAEPVKGRFTISRDDSKSTVYLQMNSLKTEDTAVYYCTRYYGNYGGYFDVWGAGTLVTVSS

SEQ ID NO: 7270 - protein, 107 aa, Artificial Sequence; identical to SEQ ID NO: 6247
  Description of Artificial Sequence: Synthetic polypeptide
  VL of XENP018602

SEQ ID NO: 7271 - protein, 5 aa, Artificial Sequence
  Description of Artificial Sequence: Synthetic peptide
  XENP018602 vhCDR1
NYWMN

SEQ ID NO: 7272 - protein, 19 aa, Artificial Sequence
  Description of Artificial Sequence: Synthetic peptide
  XENP018602 vhCDR2
EIRLKSHNYATHYAEPVKG

SEQ ID NO: 7273 - protein, 11 aa, Artificial Sequence
  Description of Artificial Sequence: Synthetic peptide
  XENP018602 vhCDR3
YYGNYGGYFDV

SEQ ID NO: 7274 - protein, 11 aa, Artificial Sequence
  Description of Artificial Sequence: Synthetic peptide
  XENP018602 vlCDR1
RASQSVSNDVA

SEQ ID NO: 7275 - protein, 7 aa, Artificial Sequence
  Description of Artificial Sequence: Synthetic peptide
  XENP018602 vlCDR2
YASHRYT

SEQ ID NO: 7276 - protein, 9 aa, Artificial Sequence
  Description of Artificial Sequence: Synthetic peptide
  XENP018602 vlCDR3
QQDYSSPRT

SEQ ID NO: 7277 - protein, 249 aa, Artificial Sequence
  Description of Artificial Sequence: Synthetic polypeptide
  XENP018603 1G6_H1.103_L1_scFv(GKPGS)4
EVQLVESGGGLVKPGGSLRLSCAASGFTFSNYWMNWVRQAPGKGLEWVGEIRLKSENYATHYAEPVKGRFTISRDDSKSTVYLQMNSLKTEDTAVYYCTRYYGNYGGYFDVWGAGTLVTVSSGKPGSGKPGSGKPGSGKPGSSIVMTQSPATLSVSPGERATLSCRASQSVSNDVAWYQQKPGQSPRLLINYASHRYTGVPDRFTGSGYGTEFTLTISSLQSEDFAVYFCQQDYSSPRTFGGGTKVEIK

SEQ ID NO: 7278 - protein, 122 aa, Artificial Sequence
  Description of Artificial Sequence: Synthetic polypeptide
  VH of XENP018603
EVQLVESGGGLVKPGGSLRLSCAASGFTFSNYWMNWVRQAPGKGLEWVGEIRLKSENYATHYAEPVKGRFTISRDDSKSTVYLQMNSLKTEDTAVYYCTRYYGNYGGYFDVWGAGTLVTVSS

SEQ ID NO: 7279 - protein, 107 aa, Artificial Sequence; identical to SEQ ID NO: 6247
  Description of Artificial Sequence: Synthetic polypeptide
  VL of XENP018603

SEQ ID NO: 7280 - protein, 5 aa, Artificial Sequence
  Description of Artificial Sequence: Synthetic peptide
  XENP018603 vhCDR1
NYWMN

SEQ ID NO: 7281 - protein, 19 aa, Artificial Sequence
  Description of Artificial Sequence: Synthetic peptide
  XENP018603 vhCDR2
EIRLKSENYATHYAEPVKG

SEQ ID NO: 7282 - protein, 11 aa, Artificial Sequence
  Description of Artificial Sequence: Synthetic peptide
  XENP018603 vhCDR3
YYGNYGGYFDV

SEQ ID NO: 7283 - protein, 11 aa, Artificial Sequence
  Description of Artificial Sequence: Synthetic peptide
  XENP018603 vlCDR1
RASQSVSNDVA

SEQ ID NO: 7284 - protein, 7 aa, Artificial Sequence
  Description of Artificial Sequence: Synthetic peptide
  XENP018603 vlCDR2
YASHRYT

SEQ ID NO: 7285 - protein, 9 aa, Artificial Sequence
  Description of Artificial Sequence: Synthetic peptide
  XENP018603 vlCDR3
QQDYSSPRT

SEQ ID NO: 7286 - protein, 249 aa, Artificial Sequence
  Description of Artificial Sequence: Synthetic polypeptide
  XENP018604 1G6_H1.104_L1_scFv(GKPGS)4
EVQLVESGGGLVKPGGSLRLSCAASGFTFSNYWMNWVRQAPGKGLEWVGEIRLKSSNYATHYAEPVKGRFTISRDDSKSTVYLQMNSLKTEDTAVYYCTRYYGNYGGYFDVWGAGTLVTVSSGKPGSGKPGSGKPGSGKPGSSIVMTQSPATLSVSPGERATLSCRASQSVSNDVAWYQQKPGQSPRLLINYASHRYTGVPDRFTGSGYGTEFTLTISSLQSEDFAVYFCQQDYSSPRTFGGGTKVEIK

SEQ ID NO: 7287 - protein, 122 aa, Artificial Sequence
  Description of Artificial Sequence: Synthetic polypeptide
  VH of XENP018604
EVQLVESGGGLVKPGGSLRLSCAASGFTFSNYWMNWVRQAPGKGLEWVGEIRLKSSNYATHYAEPVKGRFTISRDDSKSTVYLQMNSLKTEDTAVYYCTRYYGNYGGYFDVWGAGTLVTVSS

SEQ ID NO: 7288 - protein, 107 aa, Artificial Sequence; identical to SEQ ID NO: 6247
  Description of Artificial Sequence: Synthetic polypeptide
  VL of XENP018604

SEQ ID NO: 7289 - protein, 5 aa, Artificial Sequence
  Description of Artificial Sequence: Synthetic peptide
  XENP018604 vhCDR1
NYWMN

SEQ ID NO: 7290 - protein, 19 aa, Artificial Sequence
  Description of Artificial Sequence: Synthetic peptide
  XENP018604 vhCDR2
EIRLKSSNYATHYAEPVKG

SEQ ID NO: 7291 - protein, 11 aa, Artificial Sequence
  Description of Artificial Sequence: Synthetic peptide
  XENP018604 vhCDR3
YYGNYGGYFDV

SEQ ID NO: 7292 - protein, 11 aa, Artificial Sequence
  Description of Artificial Sequence: Synthetic peptide
  XENP018604 vlCDR1
RASQSVSNDVA

SEQ ID NO: 7293 - protein, 7 aa, Artificial Sequence
  Description of Artificial Sequence: Synthetic peptide
  XENP018604 vlCDR2
YASHRYT

SEQ ID NO: 7294 - protein, 9 aa, Artificial Sequence
  Description of Artificial Sequence: Synthetic peptide
  XENP018604 vlCDR3
QQDYSSPRT

SEQ ID NO: 7295 - protein, 249 aa, Artificial Sequence
  Description of Artificial Sequence: Synthetic polypeptide
  XENP018605 1G6_H1.105_L1_scFv(GKPGS)4
EVQLVESGGGLVKPGGSLRLSCAASGFTFSNYWMNWVRQAPGKGLEWVGEIRLKSRNYATHYAEPVKGRFTISRDDSKSTVYLQMNSLKTEDTAVYYCTRYYGNYGGYFDVWGAGTLVTVSSGKPGSGKPGSGKPGSGKPGSSIVMTQSPATLSVSPGERATLSCRASQSVSNDVAWYQQKPGQSPRLLINYASHRYTGVPDRFTGSGYGTEFTLTISSLQSEDFAVYFCQQDYSSPRTFGGGTKVEIK

SEQ ID NO: 7296 - protein, 122 aa, Artificial Sequence
  Description of Artificial Sequence: Synthetic polypeptide
  VH of XENP018605
EVQLVESGGGLVKPGGSLRLSCAASGFTFSNYWMNWVRQAPGKGLEWVGEIRLKSRNYATHYAEPVKGRFTISRDDSKSTVYLQMNSLKTEDTAVYYCTRYYGNYGGYFDVWGAGTLVTVSS

SEQ ID NO: 7297 - protein, 107 aa, Artificial Sequence; identical to SEQ ID NO: 6247
  Description of Artificial Sequence: Synthetic polypeptide
  VL of XENP018605

SEQ ID NO: 7298 - protein, 5 aa, Artificial Sequence
  Description of Artificial Sequence: Synthetic peptide
  XENP018605 vhCDR1
NYWMN

SEQ ID NO: 7299 - protein, 19 aa, Artificial Sequence
  Description of Artificial Sequence: Synthetic peptide
  XENP018605 vhCDR2
EIRLKSRNYATHYAEPVKG

SEQ ID NO: 7300 - protein, 11 aa, Artificial Sequence
  Description of Artificial Sequence: Synthetic peptide
  XENP018605 vhCDR3
YYGNYGGYFDV

SEQ ID NO: 7301 - protein, 11 aa, Artificial Sequence
  Description of Artificial Sequence: Synthetic peptide
  XENP018605 vlCDR1
RASQSVSNDVA

SEQ ID NO: 7302 - protein, 7 aa, Artificial Sequence
  Description of Artificial Sequence: Synthetic peptide
  XENP018605 vlCDR2
YASHRYT

SEQ ID NO: 7303 - protein, 9 aa, Artificial Sequence
  Description of Artificial Sequence: Synthetic peptide
  XENP018605 vlCDR3
QQDYSSPRT

SEQ ID NO: 7304 - protein, 249 aa, Artificial Sequence
  Description of Artificial Sequence: Synthetic polypeptide
  XENP018606 1G6_H1.106_L1_scFv(GKPGS)4
EVQLVESGGGLVKPGGSLRLSCAASGFTFSNYWMNWVRQAPGKGLEWVGEIRLKSLNYATHYAEPVKGRFTISRDDSKSTVYLQMNSLKTEDTAVYYCTRYYGNYGGYFDVWGAGTLVTVSSGKPGSGKPGSGKPGSGKPGSSIVMTQSPATLSVSPGERATLSCRASQSVSNDVAWYQQKPGQSPRLLINYASHRYTGVPDRFTGSGYGTEFTLTISSLQSEDFAVYFCQQDYSSPRTFGGGTKVEIK

SEQ ID NO: 7305 - protein, 122 aa, Artificial Sequence
  Description of Artificial Sequence: Synthetic polypeptide
  VH of XENP018606
EVQLVESGGGLVKPGGSLRLSCAASGFTFSNYWMNWVRQAPGKGLEWVGEIRLKSLNYATHYAEPVKGRFTISRDDSKSTVYLQMNSLKTEDTAVYYCTRYYGNYGGYFDVWGAGTLVTVSS

SEQ ID NO: 7306 - protein, 107 aa, Artificial Sequence; identical to SEQ ID NO: 6247
  Description of Artificial Sequence: Synthetic polypeptide
  VL of XENP018606

SEQ ID NO: 7307 - protein, 5 aa, Artificial Sequence
  Description of Artificial Sequence: Synthetic peptide
  XENP018606 vhCDR1
NYWMN

SEQ ID NO: 7308 - protein, 19 aa, Artificial Sequence
  Description of Artificial Sequence: Synthetic peptide
  XENP018606 vhCDR2
EIRLKSLNYATHYAEPVKG

SEQ ID NO: 7309 - protein, 11 aa, Artificial Sequence
  Description of Artificial Sequence: Synthetic peptide
  XENP018606 vhCDR3
YYGNYGGYFDV

SEQ ID NO: 7310 - protein, 11 aa, Artificial Sequence
  Description of Artificial Sequence: Synthetic peptide
  XENP018606 vlCDR1
RASQSVSNDVA

SEQ ID NO: 7311 - protein, 7 aa, Artificial Sequence
  Description of Artificial Sequence: Synthetic peptide
  XENP018606 vlCDR2
YASHRYT

SEQ ID NO: 7312 - protein, 9 aa, Artificial Sequence
  Description of Artificial Sequence: Synthetic peptide
  XENP018606 vlCDR3
QQDYSSPRT

SEQ ID NO: 7313 - protein, 249 aa, Artificial Sequence
  Description of Artificial Sequence: Synthetic polypeptide
  XENP018607 1G6_H1.107_L1_scFv(GKPGS)4
EVQLVESGGGLVKPGGSLRLSCAASGFTFSNYWMNWVRQAPGKGLEWVGEIRLKSTNYATHYAEPVKGRFTISRDDSKSTVYLQMNSLKTEDTAVYYCTRYYGNYGGYFDVWGAGTLVTVSSGKPGSGKPGSGKPGSGKPGSSIVMTQSPATLSVSPGERATLSCRASQSVSNDVAWYQQKPGQSPRLLINYASHRYTGVPDRFTGSGYGTEFTLTISSLQSEDFAVYFCQQDYSSPRTFGGGTKVEIK

SEQ ID NO: 7314 - protein, 122 aa, Artificial Sequence
  Description of Artificial Sequence: Synthetic polypeptide
  VH of XENP018607
EVQLVESGGGLVKPGGSLRLSCAASGFTFSNYWMNWVRQAPGKGLEWVGEIRLKSTNYATHYAEPVKGRFTISRDDSKSTVYLQMNSLKTEDTAVYYCTRYYGNYGGYFDVWGAGTLVTVSS

SEQ ID NO: 7315 - protein, 107 aa, Artificial Sequence; identical to SEQ ID NO: 6247
  Description of Artificial Sequence: Synthetic polypeptide
  VL of XENP018607

SEQ ID NO: 7316 - protein, 5 aa, Artificial Sequence
  Description of Artificial Sequence: Synthetic peptide
  XENP018607 vhCDR1
NYWMN

SEQ ID NO: 7317 - protein, 19 aa, Artificial Sequence
  Description of Artificial Sequence: Synthetic peptide
  XENP018607 vhCDR2
EIRLKSTNYATHYAEPVKG

SEQ ID NO: 7318 - protein, 11 aa, Artificial Sequence
  Description of Artificial Sequence: Synthetic peptide
  XENP018607 vhCDR3
YYGNYGGYFDV

SEQ ID NO: 7319 - protein, 11 aa, Artificial Sequence
  Description of Artificial Sequence: Synthetic peptide
  XENP018607 vlCDR1
RASQSVSNDVA

SEQ ID NO: 7320 - protein, 7 aa, Artificial Sequence
  Description of Artificial Sequence: Synthetic peptide
  XENP018607 vlCDR2
YASHRYT

SEQ ID NO: 7321 - protein, 9 aa, Artificial Sequence
  Description of Artificial Sequence: Synthetic peptide
  XENP018607 vlCDR3
QQDYSSPRT

SEQ ID NO: 7322 - protein, 249 aa, Artificial Sequence
  Description of Artificial Sequence: Synthetic polypeptide
  XENP018608 1G6_H1.108_L1_scFv(GKPGS)4
EVQLVESGGGLVKPGGSLRLSCAASGFTFSNYWMNWVRQAPGKGLEWVGEIRLKSGNYATHYAEPVKGRFTISRDDSKSTVYLQMNSLKTEDTAVYYCTRYYGNYGGYFDVWGAGTLVTVSSGKPGSGKPGSGKPGSGKPGSSIVMTQSPATLSVSPGERATLSCRASQSVSNDVAWYQQKPGQSPRLLINYASHRYTGVPDRFTGSGYGTEFTLTISSLQSEDFAVYFCQQDYSSPRTFGGGTKVEIK

SEQ ID NO: 7323 - protein, 122 aa, Artificial Sequence
  Description of Artificial Sequence: Synthetic polypeptide
  VH of XENP018608
EVQLVESGGGLVKPGGSLRLSCAASGFTFSNYWMNWVRQAPGKGLEWVGEIRLKSGNYATHYAEPVKGRFTISRDDSKSTVYLQMNSLKTEDTAVYYCTRYYGNYGGYFDVWGAGTLVTVSS

SEQ ID NO: 7324 - protein, 107 aa, Artificial Sequence; identical to SEQ ID NO: 6247
  Description of Artificial Sequence: Synthetic polypeptide
  VL of XENP018608

SEQ ID NO: 7325 - protein, 5 aa, Artificial Sequence
  Description of Artificial Sequence: Synthetic peptide
  XENP018608 vhCDR1
NYWMN

SEQ ID NO: 7326 - protein, 19 aa, Artificial Sequence
  Description of Artificial Sequence: Synthetic peptide
  XENP018608 vhCDR2
EIRLKSGNYATHYAEPVKG

SEQ ID NO: 7327 - protein, 11 aa, Artificial Sequence
  Description of Artificial Sequence: Synthetic peptide
  XENP018608 vhCDR3
YYGNYGGYFDV

SEQ ID NO: 7328 - protein, 11 aa, Artificial Sequence
  Description of Artificial Sequence: Synthetic peptide
  XENP018608 vlCDR1
RASQSVSNDVA

SEQ ID NO: 7329 - protein, 7 aa, Artificial Sequence
  Description of Artificial Sequence: Synthetic peptide
  XENP018608 vlCDR2
YASHRYT

SEQ ID NO: 7330 - protein, 9 aa, Artificial Sequence
  Description of Artificial Sequence: Synthetic peptide
  XENP018608 vlCDR3
QQDYSSPRT

SEQ ID NO: 7331 - protein, 249 aa, Artificial Sequence
  Description of Artificial Sequence: Synthetic polypeptide
  XENP018609 1G6_H1.109_L1_scFv(GKPGS)4
EVQLVESGGGLVKPGGSLRLSCAASGFTFSNYWMNWVRQAPGKGLEWVGEIRLKSYNYATHYAEPVKGRFTISRDDSKSTVYLQMNSLKTEDTAVYYCTRYYGNYGGYFDVWGAGTLVTVSSGKPGSGKPGSGKPGSGKPGSSIVMTQSPATLSVSPGERATLSCRASQSVSNDVAWYQQKPGQSPRLLINYASHRYTGVPDRFTGSGYGTEFTLTISSLQSEDFAVYFCQQDYSSPRTFGGGTKVEIK

SEQ ID NO: 7332 - protein, 122 aa, Artificial Sequence
  Description of Artificial Sequence: Synthetic polypeptide
  VH of XENP018609
EVQLVESGGGLVKPGGSLRLSCAASGFTFSNYWMNWVRQAPGKGLEWVGEIRLKSYNYATHYAEPVKGRFTISRDDSKSTVYLQMNSLKTEDTAVYYCTRYYGNYGGYFDVWGAGTLVTVSS

SEQ ID NO: 7333 - protein, 107 aa, Artificial Sequence; identical to SEQ ID NO: 6247
  Description of Artificial Sequence: Synthetic polypeptide
  VL of XENP018609

SEQ ID NO: 7334 - protein, 5 aa, Artificial Sequence
  Description of Artificial Sequence: Synthetic peptide
  XENP018609 vhCDR1
NYWMN

SEQ ID NO: 7335 - protein, 19 aa, Artificial Sequence
  Description of Artificial Sequence: Synthetic peptide
  XENP018609 vhCDR2
EIRLKSYNYATHYAEPVKG

SEQ ID NO: 7336 - protein, 11 aa, Artificial Sequence
  Description of Artificial Sequence: Synthetic peptide
  XENP018609 vhCDR3
YYGNYGGYFDV

SEQ ID NO: 7337 - protein, 11 aa, Artificial Sequence
  Description of Artificial Sequence: Synthetic peptide
  XENP018609 vlCDR1
RASQSVSNDVA

SEQ ID NO: 7338 - protein, 7 aa, Artificial Sequence
  Description of Artificial Sequence: Synthetic peptide
  XENP018609 vlCDR2
YASHRYT

SEQ ID NO: 7339 - protein, 9 aa, Artificial Sequence
  Description of Artificial Sequence: Synthetic peptide
  XENP018609 vlCDR3
QQDYSSPRT

SEQ ID NO: 7340 - protein, 249 aa, Artificial Sequence
  Description of Artificial Sequence: Synthetic polypeptide
  XENP018610 1G6_H1.110_L1_scFv(GKPGS)4
EVQLVESGGGLVKPGGSLRLSCAASGFTFSNYWMNWVRQAPGKGLEWVGEIRLKSNDYATHYAEPVKGRFTISRDDSKSTVYLQMNSLKTEDTAVYYCTRYYGNYGGYFDVWGAGTLVTVSSGKPGSGKPGSGKPGSGKPGSSIVMTQSPATLSVSPGERATLSCRASQSVSNDVAWYQQKPGQSPRLLINYASHRYTGVPDRFTGSGYGTEFTLTISSLQSEDFAVYFCQQDYSSPRTFGGGTKVEIK

SEQ ID NO: 7341 - protein, 122 aa, Artificial Sequence
  Description of Artificial Sequence: Synthetic polypeptide
  VH of XENP018610
EVQLVESGGGLVKPGGSLRLSCAASGFTFSNYWMNWVRQAPGKGLEWVGEIRLKSNDYATHYAEPVKGRFTISRDDSKSTVYLQMNSLKTEDTAVYYCTRYYGNYGGYFDVWGAGTLVTVSS

SEQ ID NO: 7342 - protein, 107 aa, Artificial Sequence; identical to SEQ ID NO: 6247
  Description of Artificial Sequence: Synthetic polypeptide
  VL of XENP018610

SEQ ID NO: 7343 - protein, 5 aa, Artificial Sequence
  Description of Artificial Sequence: Synthetic peptide
  XENP018610 vhCDR1
NYWMN

SEQ ID NO: 7344 - protein, 19 aa, Artificial Sequence
  Description of Artificial Sequence: Synthetic peptide
  XENP018610 vhCDR2
EIRLKSNDYATHYAEPVKG

SEQ ID NO: 7345 - protein, 11 aa, Artificial Sequence
  Description of Artificial Sequence: Synthetic peptide
  XENP018610 vhCDR3
YYGNYGGYFDV

SEQ ID NO: 7346 - protein, 11 aa, Artificial Sequence
  Description of Artificial Sequence: Synthetic peptide
  XENP018610 vlCDR1
RASQSVSNDVA

SEQ ID NO: 7347 - protein, 7 aa, Artificial Sequence
  Description of Artificial Sequence: Synthetic peptide
  XENP018610 vlCDR2
YASHRYT

SEQ ID NO: 7348 - protein, 9 aa, Artificial Sequence
  Description of Artificial Sequence: Synthetic peptide
  XENP018610 vlCDR3
QQDYSSPRT

SEQ ID NO: 7349 - protein, 249 aa, Artificial Sequence
  Description of Artificial Sequence: Synthetic polypeptide
  XENP018611 1G6_H1.111_L1_scFv(GKPGS)4
EVQLVESGGGLVKPGGSLRLSCAASGFTFSNYWMNWVRQAPGKGLEWVGEIRLKSNHYATHYAEPVKGRFTISRDDSKSTVYLQMNSLKTEDTAVYYCTRYYGNYGGYFDVWGAGTLVTVSSGKPGSGKPGSGKPGSGKPGSSIVMTQSPATLSVSPGERATLSCRASQSVSNDVAWYQQKPGQSPRLLINYASHRYTGVPDRFTGSGYGTEFTLTISSLQSEDFAVYFCQQDYSSPRTFGGGTKVEIK

SEQ ID NO: 7350 - protein, 122 aa, Artificial Sequence
  Description of Artificial Sequence: Synthetic polypeptide
  VH of XENP018611
EVQLVESGGGLVKPGGSLRLSCAASGFTFSNYWMNWVRQAPGKGLEWVGEIRLKSNHYATHYAEPVKGRFTISRDDSKSTVYLQMNSLKTEDTAVYYCTRYYGNYGGYFDVWGAGTLVTVSS

SEQ ID NO: 7351 - protein, 107 aa, Artificial Sequence; identical to SEQ ID NO: 6247
  Description of Artificial Sequence: Synthetic polypeptide
  VL of XENP018611

SEQ ID NO: 7352 - protein, 5 aa, Artificial Sequence
  Description of Artificial Sequence: Synthetic peptide
  XENP018611 vhCDR1
NYWMN

SEQ ID NO: 7353 - protein, 19 aa, Artificial Sequence
  Description of Artificial Sequence: Synthetic peptide
  XENP018611 vhCDR2
EIRLKSNHYATHYAEPVKG

SEQ ID NO: 7354 - protein, 11 aa, Artificial Sequence
  Description of Artificial Sequence: Synthetic peptide
  XENP018611 vhCDR3
YYGNYGGYFDV

SEQ ID NO: 7355 - protein, 11 aa, Artificial Sequence
  Description of Artificial Sequence: Synthetic peptide
  XENP018611 vlCDR1
RASQSVSNDVA

SEQ ID NO: 7356 - protein, 7 aa, Artificial Sequence
  Description of Artificial Sequence: Synthetic peptide
  XENP018611 vlCDR2
YASHRYT

SEQ ID NO: 7357 - protein, 9 aa, Artificial Sequence
  Description of Artificial Sequence: Synthetic peptide
  XENP018611 vlCDR3
QQDYSSPRT

SEQ ID NO: 7358 - protein, 249 aa, Artificial Sequence
  Description of Artificial Sequence: Synthetic polypeptide
  XENP018612 1G6_H1.112_L1_scFv(GKPGS)4
EVQLVESGGGLVKPGGSLRLSCAASGFTFSNYWMNWVRQAPGKGLEWVGEIRLKSNEYATHYAEPVKGRFTISRDDSKSTVYLQMNSLKTEDTAVYYCTRYYGNYGGYFDVWGAGTLVTVSSGKPGSGKPGSGKPGSGKPGSSIVMTQSPATLSVSPGERATLSCRASQSVSNDVAWYQQKPGQSPRLLINYASHRYTGVPDRFTGSGYGTEFTLTISSLQSEDFAVYFCQQDYSSPRTFGGGTKVEIK

SEQ ID NO: 7359 - protein, 122 aa, Artificial Sequence
  Description of Artificial Sequence: Synthetic polypeptide
  VH of XENP018612
EVQLVESGGGLVKPGGSLRLSCAASGFTFSNYWMNWVRQAPGKGLEWVGEIRLKSNEYATHYAEPVKGRFTISRDDSKSTVYLQMNSLKTEDTAVYYCTRYYGNYGGYFDVWGAGTLVTVSS

SEQ ID NO: 7360 - protein, 107 aa, Artificial Sequence; identical to SEQ ID NO: 6247
  Description of Artificial Sequence: Synthetic polypeptide
  VL of XENP018612

SEQ ID NO: 7361 - protein, 5 aa, Artificial Sequence
  Description of Artificial Sequence: Synthetic peptide
  XENP018612 vhCDR1
NYWMN

SEQ ID NO: 7362 - protein, 19 aa, Artificial Sequence
  Description of Artificial Sequence: Synthetic peptide
  XENP018612 vhCDR2
EIRLKSNEYATHYAEPVKG

SEQ ID NO: 7363 - protein, 11 aa, Artificial Sequence
  Description of Artificial Sequence: Synthetic peptide
  XENP018612 vhCDR3
YYGNYGGYFDV

SEQ ID NO: 7364 - protein, 11 aa, Artificial Sequence
  Description of Artificial Sequence: Synthetic peptide
  XENP018612 vlCDR1
RASQSVSNDVA

SEQ ID NO: 7365 - protein, 7 aa, Artificial Sequence
  Description of Artificial Sequence: Synthetic peptide
  XENP018612 vlCDR2
YASHRYT

SEQ ID NO: 7366 - protein, 9 aa, Artificial Sequence
  Description of Artificial Sequence: Synthetic peptide
  XENP018612 vlCDR3
QQDYSSPRT

SEQ ID NO: 7367 - protein, 249 aa, Artificial Sequence
  Description of Artificial Sequence: Synthetic polypeptide
  XENP018613 1G6_H1.113_L1_scFv(GKPGS)4
EVQLVESGGGLVKPGGSLRLSCAASGFTFSNYWMNWVRQAPGKGLEWVGEIRLKSNSYATHYAEPVKGRFTISRDDSKSTVYLQMNSLKTEDTAVYYCTRYYGNYGGYFDVWGAGTLVTVSSGKPGSGKPGSGKPGSGKPGSSIVMTQSPATLSVSPGERATLSCRASQSVSNDVAWYQQKPGQSPRLLINYASHRYTGVPDRFTGSGYGTEFTLTISSLQSEDFAVYFCQQDYSSPRTFGGGTKVEIK

SEQ ID NO: 7368 - protein, 122 aa, Artificial Sequence
  Description of Artificial Sequence: Synthetic polypeptide
  VH of XENP018613
EVQLVESGGGLVKPGGSLRLSCAASGFTFSNYWMNWVRQAPGKGLEWVGEIRLKSNSYATHYAEPVKGRFTISRDDSKSTVYLQMNSLKTEDTAVYYCTRYYGNYGGYFDVWGAGTLVTVSS

SEQ ID NO: 7369 - protein, 107 aa, Artificial Sequence; identical to SEQ ID NO: 6247
  Description of Artificial Sequence: Synthetic polypeptide
  VL of XENP018613

SEQ ID NO: 7370 - protein, 5 aa, Artificial Sequence
  Description of Artificial Sequence: Synthetic peptide
  XENP018613 vhCDR1
NYWMN

SEQ ID NO: 7371 - protein, 19 aa, Artificial Sequence
  Description of Artificial Sequence: Synthetic peptide
  XENP018613 vhCDR2
EIRLKSNSYATHYAEPVKG

SEQ ID NO: 7372 - protein, 11 aa, Artificial Sequence
  Description of Artificial Sequence: Synthetic peptide
  XENP018613 vhCDR3
YYGNYGGYFDV

SEQ ID NO: 7373 - protein, 11 aa, Artificial Sequence
  Description of Artificial Sequence: Synthetic peptide
  XENP018613 vlCDR1
RASQSVSNDVA

SEQ ID NO: 7374 - protein, 7 aa, Artificial Sequence
  Description of Artificial Sequence: Synthetic peptide
  XENP018613 vlCDR2
YASHRYT

SEQ ID NO: 7375 - protein, 9 aa, Artificial Sequence
  Description of Artificial Sequence: Synthetic peptide
  XENP018613 vlCDR3
QQDYSSPRT

SEQ ID NO: 7376 - protein, 249 aa, Artificial Sequence
  Description of Artificial Sequence: Synthetic polypeptide
  XENP018614 1G6_H1.114_L1_scFv(GKPGS)4
EVQLVESGGGLVKPGGSLRLSCAASGFTFSNYWMNWVRQAPGKGLEWVGEIRLKSNRYATHYAEPVKGRFTISRDDSKSTVYLQMNSLKTEDTAVYYCTRYYGNYGGYFDVWGAGTLVTVSSGKPGSGKPGSGKPGSGKPGSSIVMTQSPATLSVSPGERATLSCRASQSVSNDVAWYQQKPGQSPRLLINYASHRYTGVPDRFTGSGYGTEFTLTISSLQSEDFAVYFCQQDYSSPRTFGGGTKVEIK

SEQ ID NO: 7377 - protein, 122 aa, Artificial Sequence
  Description of Artificial Sequence: Synthetic polypeptide
  VH of XENP018614
EVQLVESGGGLVKPGGSLRLSCAASGFTFSNYWMNWVRQAPGKGLEWVGEIRLKSNRYATHYAEPVKGRFTISRDDSKSTVYLQMNSLKTEDTAVYYCTRYYGNYGGYFDVWGAGTLVTVSS

SEQ ID NO: 7378 - protein, 107 aa, Artificial Sequence; identical to SEQ ID NO: 6247
  Description of Artificial Sequence: Synthetic polypeptide
  VL of XENP018614

SEQ ID NO: 7379 - protein, 5 aa, Artificial Sequence
  Description of Artificial Sequence: Synthetic peptide
  XENP018614 vhCDR1
NYWMN

SEQ ID NO: 7380 - protein, 19 aa, Artificial Sequence
  Description of Artificial Sequence: Synthetic peptide
  XENP018614 vhCDR2
EIRLKSNRYATHYAEPVKG

SEQ ID NO: 7381 - protein, 11 aa, Artificial Sequence
  Description of Artificial Sequence: Synthetic peptide
  XENP018614 vhCDR3
YYGNYGGYFDV

SEQ ID NO: 7382 - protein, 11 aa, Artificial Sequence
  Description of Artificial Sequence: Synthetic peptide
  XENP018614 vlCDR1
RASQSVSNDVA

SEQ ID NO: 7383 - protein, 7 aa, Artificial Sequence
  Description of Artificial Sequence: Synthetic peptide
  XENP018614 vlCDR2
YASHRYT

SEQ ID NO: 7384 - protein, 9 aa, Artificial Sequence
  Description of Artificial Sequence: Synthetic peptide
  XENP018614 vlCDR3
QQDYSSPRT

SEQ ID NO: 7385 - protein, 249 aa, Artificial Sequence
  Description of Artificial Sequence: Synthetic polypeptide
  XENP018615 1G6_H1.115_L1_scFv(GKPGS)4
EVQLVESGGGLVKPGGSLRLSCAASGFTFSNYWMNWVRQAPGKGLEWVGEIRLKSNLYATHYAEPVKGRFTISRDDSKSTVYLQMNSLKTEDTAVYYCTRYYGNYGGYFDVWGAGTLVTVSSGKPGSGKPGSGKPGSGKPGSSIVMTQSPATLSVSPGERATLSCRASQSVSNDVAWYQQKPGQSPRLLINYASHRYTGVPDRFTGSGYGTEFTLTISSLQSEDFAVYFCQQDYSSPRTFGGGTKVEIK

SEQ ID NO: 7386 - protein, 122 aa, Artificial Sequence
  Description of Artificial Sequence: Synthetic polypeptide
  VH of XENP018615
EVQLVESGGGLVKPGGSLRLSCAASGFTFSNYWMNWVRQAPGKGLEWVGEIRLKSNLYATHYAEPVKGRFTISRDDSKSTVYLQMNSLKTEDTAVYYCTRYYGNYGGYFDVWGAGTLVTVSS

SEQ ID NO: 7387 - protein, 107 aa, Artificial Sequence; identical to SEQ ID NO: 6247
  Description of Artificial Sequence: Synthetic polypeptide
  VL of XENP018615

SEQ ID NO: 7388 - protein, 5 aa, Artificial Sequence
  Description of Artificial Sequence: Synthetic peptide
  XENP018615 vhCDR1
NYWMN

SEQ ID NO: 7389 - protein, 19 aa, Artificial Sequence
  Description of Artificial Sequence: Synthetic peptide
  XENP018615 vhCDR2
EIRLKSNLYATHYAEPVKG

SEQ ID NO: 7390 - protein, 11 aa, Artificial Sequence
  Description of Artificial Sequence: Synthetic peptide
  XENP018615 vhCDR3
YYGNYGGYFDV

SEQ ID NO: 7391 - protein, 11 aa, Artificial Sequence
  Description of Artificial Sequence: Synthetic peptide
  XENP018615 vlCDR1
RASQSVSNDVA

SEQ ID NO: 7392 - protein, 7 aa, Artificial Sequence
  Description of Artificial Sequence: Synthetic peptide
  XENP018615 vlCDR2
YASHRYT

SEQ ID NO: 7393 - protein, 9 aa, Artificial Sequence
  Description of Artificial Sequence: Synthetic peptide
  XENP018615 vlCDR3
QQDYSSPRT

SEQ ID NO: 7394 - protein, 249 aa, Artificial Sequence
  Description of Artificial Sequence: Synthetic polypeptide
  XENP018616 1G6_H1.116_L1_scFv(GKPGS)4
EVQLVESGGGLVKPGGSLRLSCAASGFTFSNYWMNWVRQAPGKGLEWVGEIRLKSNTYATHYAEPVKGRFTISRDDSKSTVYLQMNSLKTEDTAVYYCTRYYGNYGGYFDVWGAGTLVTVSSGKPGSGKPGSGKPGSGKPGSSIVMTQSPATLSVSPGERATLSCRASQSVSNDVAWYQQKPGQSPRLLINYASHRYTGVPDRFTGSGYGTEFTLTISSLQSEDFAVYFCQQDYSSPRTFGGGTKVEIK

SEQ ID NO: 7395 - protein, 122 aa, Artificial Sequence
  Description of Artificial Sequence: Synthetic polypeptide
  VH of XENP018616
EVQLVESGGGLVKPGGSLRLSCAASGFTFSNYWMNWVRQAPGKGLEWVGEIRLKSNTYATHYAEPVKGRFTISRDDSKSTVYLQMNSLKTEDTAVYYCTRYYGNYGGYFDVWGAGTLVTVSS

SEQ ID NO: 7396 - protein, 107 aa, Artificial Sequence; identical to SEQ ID NO: 6247
  Description of Artificial Sequence: Synthetic polypeptide
  VL of XENP018616

SEQ ID NO: 7397 - protein, 5 aa, Artificial Sequence
  Description of Artificial Sequence: Synthetic peptide
  XENP018616 vhCDR1
NYWMN

SEQ ID NO: 7398 - protein, 19 aa, Artificial Sequence
  Description of Artificial Sequence: Synthetic peptide
  XENP018616 vhCDR2
EIRLKSNTYATHYAEPVKG

SEQ ID NO: 7399 - protein, 11 aa, Artificial Sequence
  Description of Artificial Sequence: Synthetic peptide
  XENP018616 vhCDR3
YYGNYGGYFDV

SEQ ID NO: 7400 - protein, 11 aa, Artificial Sequence
  Description of Artificial Sequence: Synthetic peptide
  XENP018616 vlCDR1
RASQSVSNDVA

SEQ ID NO: 7401 - protein, 7 aa, Artificial Sequence
  Description of Artificial Sequence: Synthetic peptide
  XENP018616 vlCDR2
YASHRYT

SEQ ID NO: 7402 - protein, 9 aa, Artificial Sequence
  Description of Artificial Sequence: Synthetic peptide
  XENP018616 vlCDR3
QQDYSSPRT

SEQ ID NO: 7403 - protein, 249 aa, Artificial Sequence
  Description of Artificial Sequence: Synthetic polypeptide
  XENP018617 1G6_H1.117_L1_scFv(GKPGS)4
EVQLVESGGGLVKPGGSLRLSCAASGFTFSNYWMNWVRQAPGKGLEWVGEIRLKSNGYATHYAEPVKGRFTISRDDSKSTVYLQMNSLKTEDTAVYYCTRYYGNYGGYFDVWGAGTLVTVSSGKPGSGKPGSGKPGSGKPGSSIVMTQSPATLSVSPGERATLSCRASQSVSNDVAWYQQKPGQSPRLLINYASHRYTGVPDRFTGSGYGTEFTLTISSLQSEDFAVYFCQQDYSSPRTFGGGTKVEIK

SEQ ID NO: 7404 - protein, 122 aa, Artificial Sequence
  Description of Artificial Sequence: Synthetic polypeptide
  VH of XENP018617
EVQLVESGGGLVKPGGSLRLSCAASGFTFSNYWMNWVRQAPGKGLEWVGEIRLKSNGYATHYAEPVKGRFTISRDDSKSTVYLQMNSLKTEDTAVYYCTRYYGNYGGYFDVWGAGTLVTVSS

SEQ ID NO: 7405 - protein, 107 aa, Artificial Sequence; identical to SEQ ID NO: 6247
  Description of Artificial Sequence: Synthetic polypeptide
  VL of XENP018617

SEQ ID NO: 7406 - protein, 5 aa, Artificial Sequence
  Description of Artificial Sequence: Synthetic peptide
  XENP018617 vhCDR1
NYWMN

SEQ ID NO: 7407 - protein, 19 aa, Artificial Sequence
  Description of Artificial Sequence: Synthetic peptide
  XENP018617 vhCDR2
EIRLKSNGYATHYAEPVKG

SEQ ID NO: 7408 - protein, 11 aa, Artificial Sequence
  Description of Artificial Sequence: Synthetic peptide
  XENP018617 vhCDR3
YYGNYGGYFDV

SEQ ID NO: 7409 - protein, 11 aa, Artificial Sequence
  Description of Artificial Sequence: Synthetic peptide
  XENP018617 vlCDR1
RASQSVSNDVA

SEQ ID NO: 7410 - protein, 7 aa, Artificial Sequence
  Description of Artificial Sequence: Synthetic peptide
  XENP018617 vlCDR2
YASHRYT

SEQ ID NO: 7411 - protein, 9 aa, Artificial Sequence
  Description of Artificial Sequence: Synthetic peptide
  XENP018617 vlCDR3
QQDYSSPRT

SEQ ID NO: 7412 - protein, 249 aa, Artificial Sequence
  Description of Artificial Sequence: Synthetic polypeptide
  XENP018618 1G6_H1.118_L1_scFv(GKPGS)4
EVQLVESGGGLVKPGGSLRLSCAASGFTFSNYWMNWVRQAPGKGLEWVGEIRLKSNYYATHYAEPVKGRFTISRDDSKSTVYLQMNSLKTEDTAVYYCTRYYGNYGGYFDVWGAGTLVTVSSGKPGSGKPGSGKPGSGKPGSSIVMTQSPATLSVSPGERATLSCRASQSVSNDVAWYQQKPGQSPRLLINYASHRYTGVPDRFTGSGYGTEFTLTISSLQSEDFAVYFCQQDYSSPRTFGGGTKVEIK

SEQ ID NO: 7413 - protein, 122 aa, Artificial Sequence
  Description of Artificial Sequence: Synthetic polypeptide
  VH of XENP018618
EVQLVESGGGLVKPGGSLRLSCAASGFTFSNYWMNWVRQAPGKGLEWVGEIRLKSNYYATHYAEPVKGRFTISRDDSKSTVYLQMNSLKTEDTAVYYCTRYYGNYGGYFDVWGAGTLVTVSS

SEQ ID NO: 7414 - protein, 107 aa, Artificial Sequence; identical to SEQ ID NO: 6247
  Description of Artificial Sequence: Synthetic polypeptide
  VL of XENP018618

SEQ ID NO: 7415 - protein, 5 aa, Artificial Sequence
  Description of Artificial Sequence: Synthetic peptide
  XENP018618 vhCDR1
NYWMN

SEQ ID NO: 7416 - protein, 19 aa, Artificial Sequence
  Description of Artificial Sequence: Synthetic peptide
  XENP018618 vhCDR2
EIRLKSNYYATHYAEPVKG

SEQ ID NO: 7417 - protein, 11 aa, Artificial Sequence
  Description of Artificial Sequence: Synthetic peptide
  XENP018618 vhCDR3
YYGNYGGYFDV

SEQ ID NO: 7418 - protein, 11 aa, Artificial Sequence
  Description of Artificial Sequence: Synthetic peptide
  XENP018618 vlCDR1
RASQSVSNDVA

SEQ ID NO: 7419 - protein, 7 aa, Artificial Sequence
  Description of Artificial Sequence: Synthetic peptide
  XENP018618 vlCDR2
YASHRYT

SEQ ID NO: 7420 - protein, 9 aa, Artificial Sequence
  Description of Artificial Sequence: Synthetic peptide
  XENP018618 vlCDR3
QQDYSSPRT

SEQ ID NO: 7421 - protein, 249 aa, Artificial Sequence
  Description of Artificial Sequence: Synthetic polypeptide
  XENP018619 1G6_H1.119_L1_scFv(GKPGS)4
EVQLVESGGGLVKPGGSLRLSCAASGFTFSNYWMNWVRQAPGKGLEWVGEIRLKSNNFATHYAEPVKGRFTISRDDSKSTVYLQMNSLKTEDTAVYYCTRYYGNYGGYFDVWGAGTLVTVSSGKPGSGKPGSGKPGSGKPGSSIVMTQSPATLSVSPGERATLSCRASQSVSNDVAWYQQKPGQSPRLLINYASHRYTGVPDRFTGSGYGTEFTLTISSLQSEDFAVYFCQQDYSSPRTFGGGTKVEIK

SEQ ID NO: 7422 - protein, 122 aa, Artificial Sequence
  Description of Artificial Sequence: Synthetic polypeptide
  VH of XENP018619
EVQLVESGGGLVKPGGSLRLSCAASGFTFSNYWMNWVRQAPGKGLEWVGEIRLKSNNFATHYAEPVKGRFTISRDDSKSTVYLQMNSLKTEDTAVYYCTRYYGNYGGYFDVWGAGTLVTVSS

SEQ ID NO: 7423 - protein, 107 aa, Artificial Sequence; identical to SEQ ID NO: 6247
  Description of Artificial Sequence: Synthetic polypeptide
  VL of XENP018619

SEQ ID NO: 7424 - protein, 5 aa, Artificial Sequence
  Description of Artificial Sequence: Synthetic peptide
  XENP018619 vhCDR1
NYWMN

SEQ ID NO: 7425 - protein, 19 aa, Artificial Sequence
  Description of Artificial Sequence: Synthetic peptide
  XENP018619 vhCDR2
EIRLKSNNFATHYAEPVKG

SEQ ID NO: 7426 - protein, 11 aa, Artificial Sequence
  Description of Artificial Sequence: Synthetic peptide
  XENP018619 vhCDR3
YYGNYGGYFDV

SEQ ID NO: 7427 - protein, 11 aa, Artificial Sequence
  Description of Artificial Sequence: Synthetic peptide
  XENP018619 vlCDR1
RASQSVSNDVA

SEQ ID NO: 7428 - protein, 7 aa, Artificial Sequence
  Description of Artificial Sequence: Synthetic peptide
  XENP018619 vlCDR2
YASHRYT

SEQ ID NO: 7429 - protein, 9 aa, Artificial Sequence
  Description of Artificial Sequence: Synthetic peptide
  XENP018619 vlCDR3
QQDYSSPRT

SEQ ID NO: 7430 - protein, 249 aa, Artificial Sequence
  Description of Artificial Sequence: Synthetic polypeptide
  XENP018620 1G6_H1.120_L1_scFv(GKPGS)4
EVQLVESGGGLVKPGGSLRLSCAASGFTFSNYWMNWVRQAPGKGLEWVGEIRLKSNNHATHYAEPVKGRFTISRDDSKSTVYLQMNSLKTEDTAVYYCTRYYGNYGGYFDVWGAGTLVTVSSGKPGSGKPGSGKPGSGKPGSSIVMTQSPATLSVSPGERATLSCRASQSVSNDVAWYQQKPGQSPRLLINYASHRYTGVPDRFTGSGYGTEFTLTISSLQSEDFAVYFCQQDYSSPRTFGGGTKVEIK

SEQ ID NO: 7431 - protein, 122 aa, Artificial Sequence
  Description of Artificial Sequence: Synthetic polypeptide
  VH of XENP018620
EVQLVESGGGLVKPGGSLRLSCAASGFTFSNYWMNWVRQAPGKGLEWVGEIRLKSNNHATHYAEPVKGRFTISRDDSKSTVYLQMNSLKTEDTAVYYCTRYYGNYGGYFDVWGAGTLVTVSS

SEQ ID NO: 7432 - protein, 107 aa, Artificial Sequence; identical to SEQ ID NO: 6247
  Description of Artificial Sequence: Synthetic polypeptide
  VL of XENP018620

SEQ ID NO: 7433 - protein, 5 aa, Artificial Sequence
  Description of Artificial Sequence: Synthetic peptide
  XENP018620 vhCDR1
NYWMN

SEQ ID NO: 7434 - protein, 19 aa, Artificial Sequence
  Description of Artificial Sequence: Synthetic peptide
  XENP018620 vhCDR2
EIRLKSNNHATHYAEPVKG

SEQ ID NO: 7435 - protein, 11 aa, Artificial Sequence
  Description of Artificial Sequence: Synthetic peptide
  XENP018620 vhCDR3
YYGNYGGYFDV

SEQ ID NO: 7436 - protein, 11 aa, Artificial Sequence
  Description of Artificial Sequence: Synthetic peptide
  XENP018620 vlCDR1
RASQSVSNDVA

SEQ ID NO: 7437 - protein, 7 aa, Artificial Sequence
  Description of Artificial Sequence: Synthetic peptide
  XENP018620 vlCDR2
YASHRYT

SEQ ID NO: 7438 - protein, 9 aa, Artificial Sequence
  Description of Artificial Sequence: Synthetic peptide
  XENP018620 vlCDR3
QQDYSSPRT

SEQ ID NO: 7439 - protein, 249 aa, Artificial Sequence
  Description of Artificial Sequence: Synthetic polypeptide
  XENP018621 1G6_H1.121_L1_scFv(GKPGS)4
EVQLVESGGGLVKPGGSLRLSCAASGFTFSNYWMNWVRQAPGKGLEWVGEIRLKSNNLATHYAEPVKGRFTISRDDSKSTVYLQMNSLKTEDTAVYYCTRYYGNYGGYFDVWGAGTLVTVSSGKPGSGKPGSGKPGSGKPGSSIVMTQSPATLSVSPGERATLSCRASQSVSNDVAWYQQKPGQSPRLLINYASHRYTGVPDRFTGSGYGTEFTLTISSLQSEDFAVYFCQQDYSSPRTFGGGTKVEIK

SEQ ID NO: 7440 - protein, 122 aa, Artificial Sequence
  Description of Artificial Sequence: Synthetic polypeptide
  VH of XENP018621
EVQLVESGGGLVKPGGSLRLSCAASGFTFSNYWMNWVRQAPGKGLEWVGEIRLKSNNLATHYAEPVKGRFTISRDDSKSTVYLQMNSLKTEDTAVYYCTRYYGNYGGYFDVWGAGTLVTVSS

SEQ ID NO: 7441 - protein, 107 aa, Artificial Sequence; identical to SEQ ID NO: 6247
  Description of Artificial Sequence: Synthetic polypeptide
  VL of XENP018621

SEQ ID NO: 7442 - protein, 5 aa, Artificial Sequence
  Description of Artificial Sequence: Synthetic peptide
  XENP018621 vhCDR1
NYWMN

SEQ ID NO: 7443 - protein, 19 aa, Artificial Sequence
  Description of Artificial Sequence: Synthetic peptide
  XENP018621 vhCDR2
EIRLKSNNLATHYAEPVKG

SEQ ID NO: 7444 - protein, 11 aa, Artificial Sequence
  Description of Artificial Sequence: Synthetic peptide
  XENP018621 vhCDR3
YYGNYGGYFDV

SEQ ID NO: 7445 - protein, 11 aa, Artificial Sequence
  Description of Artificial Sequence: Synthetic peptide
  XENP018621 vlCDR1
RASQSVSNDVA

SEQ ID NO: 7446 - protein, 7 aa, Artificial Sequence
  Description of Artificial Sequence: Synthetic peptide
  XENP018621 vlCDR2
YASHRYT

SEQ ID NO: 7447 - protein, 9 aa, Artificial Sequence
  Description of Artificial Sequence: Synthetic peptide
  XENP018621 vlCDR3
QQDYSSPRT

SEQ ID NO: 7448 - protein, 249 aa, Artificial Sequence
  Description of Artificial Sequence: Synthetic polypeptide
  XENP018622 1G6_H1.122_L1_scFv(GKPGS)4
EVQLVESGGGLVKPGGSLRLSCAASGFTFSNYWMNWVRQAPGKGLEWVGEIRLKSNNWATHYAEPVKGRFTISRDDSKSTVYLQMNSLKTEDTAVYYCTRYYGNYGGYFDVWGAGTLVTVSSGKPGSGKPGSGKPGSGKPGSSIVMTQSPATLSVSPGERATLSCRASQSVSNDVAWYQQKPGQSPRLLINYASHRYTGVPDRFTGSGYGTEFTLTISSLQSEDFAVYFCQQDYSSPRTFGGGTKVEIK

SEQ ID NO: 7449 - protein, 122 aa, Artificial Sequence
  Description of Artificial Sequence: Synthetic polypeptide
  VH of XENP018622
EVQLVESGGGLVKPGGSLRLSCAASGFTFSNYWMNWVRQAPGKGLEWVGEIRLKSNNWATHYAEPVKGRFTISRDDSKSTVYLQMNSLKTEDTAVYYCTRYYGNYGGYFDVWGAGTLVTVSS

SEQ ID NO: 7450 - protein, 107 aa, Artificial Sequence; identical to SEQ ID NO: 6247
  Description of Artificial Sequence: Synthetic polypeptide
  VL of XENP018622

SEQ ID NO: 7451 - protein, 5 aa, Artificial Sequence
  Description of Artificial Sequence: Synthetic peptide
  XENP018622 vhCDR1
NYWMN

SEQ ID NO: 7452 - protein, 19 aa, Artificial Sequence
  Description of Artificial Sequence: Synthetic peptide
  XENP018622 vhCDR2
EIRLKSNNWATHYAEPVKG

SEQ ID NO: 7453 - protein, 11 aa, Artificial Sequence
  Description of Artificial Sequence: Synthetic peptide
  XENP018622 vhCDR3
YYGNYGGYFDV

SEQ ID NO: 7454 - protein, 11 aa, Artificial Sequence
  Description of Artificial Sequence: Synthetic peptide
  XENP018622 vlCDR1
RASQSVSNDVA

SEQ ID NO: 7455 - protein, 7 aa, Artificial Sequence
  Description of Artificial Sequence: Synthetic peptide
  XENP018622 vlCDR2
YASHRYT

SEQ ID NO: 7456 - protein, 9 aa, Artificial Sequence
  Description of Artificial Sequence: Synthetic peptide
  XENP018622 vlCDR3
QQDYSSPRT

SEQ ID NO: 7457 - protein, 249 aa, Artificial Sequence
  Description of Artificial Sequence: Synthetic polypeptide
  XENP018623 1G6_H1.123_L1_scFv(GKPGS)4
EVQLVESGGGLVKPGGSLRLSCAASGFTFSNYWMNWVRQAPGKGLEWVGEIRLKSNNVATHYAEPVKGRFTISRDDSKSTVYLQMNSLKTEDTAVYYCTRYYGNYGGYFDVWGAGTLVTVSSGKPGSGKPGSGKPGSGKPGSSIVMTQSPATLSVSPGERATLSCRASQSVSNDVAWYQQKPGQSPRLLINYASHRYTGVPDRFTGSGYGTEFTLTISSLQSEDFAVYFCQQDYSSPRTFGGGTKVEIK

SEQ ID NO: 7458 - protein, 122 aa, Artificial Sequence
  Description of Artificial Sequence: Synthetic polypeptide
  VH of XENP018623
EVQLVESGGGLVKPGGSLRLSCAASGFTFSNYWMNWVRQAPGKGLEWVGEIRLKSNNVATHYAEPVKGRFTISRDDSKSTVYLQMNSLKTEDTAVYYCTRYYGNYGGYFDVWGAGTLVTVSS

SEQ ID NO: 7459 - protein, 107 aa, Artificial Sequence; identical to SEQ ID NO: 6247
  Description of Artificial Sequence: Synthetic polypeptide
  VL of XENP018623

SEQ ID NO: 7460 - protein, 5 aa, Artificial Sequence
  Description of Artificial Sequence: Synthetic peptide
  XENP018623 vhCDR1
NYWMN

SEQ ID NO: 7461 - protein, 19 aa, Artificial Sequence
  Description of Artificial Sequence: Synthetic peptide
  XENP018623 vhCDR2
EIRLKSNNVATHYAEPVKG

SEQ ID NO: 7462 - protein, 11 aa, Artificial Sequence
  Description of Artificial Sequence: Synthetic peptide
  XENP018623 vhCDR3
YYGNYGGYFDV

SEQ ID NO: 7463 - protein, 11 aa, Artificial Sequence
  Description of Artificial Sequence: Synthetic peptide
  XENP018623 vlCDR1
RASQSVSNDVA

SEQ ID NO: 7464 - protein, 7 aa, Artificial Sequence
  Description of Artificial Sequence: Synthetic peptide
  XENP018623 vlCDR2
YASHRYT

SEQ ID NO: 7465 - protein, 9 aa, Artificial Sequence
  Description of Artificial Sequence: Synthetic peptide
  XENP018623 vlCDR3
QQDYSSPRT

SEQ ID NO: 7466 - protein, 249 aa, Artificial Sequence
  Description of Artificial Sequence: Synthetic polypeptide
  XENP018624 1G6_H1.124_L1_scFv(GKPGS)4
EVQLVESGGGLVKPGGSLRLSCAASGFTFSNYWMNWVRQAPGKGLEWVGEIRLKSNNAATHYAEPVKGRFTISRDDSKSTVYLQMNSLKTEDTAVYYCTRYYGNYGGYFDVWGAGTLVTVSSGKPGSGKPGSGKPGSGKPGSSIVMTQSPATLSVSPGERATLSCRASQSVSNDVAWYQQKPGQSPRLLINYASHRYTGVPDRFTGSGYGTEFTLTISSLQSEDFAVYFCQQDYSSPRTFGGGTKVEIK

SEQ ID NO: 7467 - protein, 122 aa, Artificial Sequence
  Description of Artificial Sequence: Synthetic polypeptide
  VH of XENP018624
EVQLVESGGGLVKPGGSLRLSCAASGFTFSNYWMNWVRQAPGKGLEWVGEIRLKSNNAATHYAEPVKGRFTISRDDSKSTVYLQMNSLKTEDTAVYYCTRYYGNYGGYFDVWGAGTLVTVSS

SEQ ID NO: 7468 - protein, 107 aa, Artificial Sequence; identical to SEQ ID NO: 6247
  Description of Artificial Sequence: Synthetic polypeptide
  VL of XENP018624

SEQ ID NO: 7469 - protein, 5 aa, Artificial Sequence
  Description of Artificial Sequence: Synthetic peptide
  XENP018624 vhCDR1
NYWMN

SEQ ID NO: 7470 - protein, 19 aa, Artificial Sequence
  Description of Artificial Sequence: Synthetic peptide
  XENP018624 vhCDR2
EIRLKSNNAATHYAEPVKG

SEQ ID NO: 7471 - protein, 11 aa, Artificial Sequence
  Description of Artificial Sequence: Synthetic peptide
  XENP018624 vhCDR3
YYGNYGGYFDV

SEQ ID NO: 7472 - protein, 11 aa, Artificial Sequence
  Description of Artificial Sequence: Synthetic peptide
  XENP018624 vlCDR1
RASQSVSNDVA

SEQ ID NO: 7473 - protein, 7 aa, Artificial Sequence
  Description of Artificial Sequence: Synthetic peptide
  XENP018624 vlCDR2
YASHRYT

SEQ ID NO: 7474 - protein, 9 aa, Artificial Sequence
  Description of Artificial Sequence: Synthetic peptide
  XENP018624 vlCDR3
QQDYSSPRT

SEQ ID NO: 7475 - protein, 249 aa, Artificial Sequence
  Description of Artificial Sequence: Synthetic polypeptide
  XENP018625 1G6_H1.125_L1_scFv(GKPGS)4
EVQLVESGGGLVKPGGSLRLSCAASGFTFSNYWMNWVRQAPGKGLEWVGEIRLKSNNQATHYAEPVKGRFTISRDDSKSTVYLQMNSLKTEDTAVYYCTRYYGNYGGYFDVWGAGTLVTVSSGKPGSGKPGSGKPGSGKPGSSIVMTQSPATLSVSPGERATLSCRASQSVSNDVAWYQQKPGQSPRLLINYASHRYTGVPDRFTGSGYGTEFTLTISSLQSEDFAVYFCQQDYSSPRTFGGGTKVEIK

SEQ ID NO: 7476 - protein, 122 aa, Artificial Sequence
  Description of Artificial Sequence: Synthetic polypeptide
  VH of XENP018625
EVQLVESGGGLVKPGGSLRLSCAASGFTFSNYWMNWVRQAPGKGLEWVGEIRLKSNNQATHYAEPVKGRFTISRDDSKSTVYLQMNSLKTEDTAVYYCTRYYGNYGGYFDVWGAGTLVTVSS

SEQ ID NO: 7477 - protein, 107 aa, Artificial Sequence; identical to SEQ ID NO: 6247
  Description of Artificial Sequence: Synthetic polypeptide
  VL of XENP018625

SEQ ID NO: 7478 - protein, 5 aa, Artificial Sequence
  Description of Artificial Sequence: Synthetic peptide
  XENP018625 vhCDR1
NYWMN

SEQ ID NO: 7479 - protein, 19 aa, Artificial Sequence
  Description of Artificial Sequence: Synthetic peptide
  XENP018625 vhCDR2
EIRLKSNNQATHYAEPVKG

SEQ ID NO: 7480 - protein, 11 aa, Artificial Sequence
  Description of Artificial Sequence: Synthetic peptide
  XENP018625 vhCDR3
YYGNYGGYFDV

SEQ ID NO: 7481 - protein, 11 aa, Artificial Sequence
  Description of Artificial Sequence: Synthetic peptide
  XENP018625 vlCDR1
RASQSVSNDVA

SEQ ID NO: 7482 - protein, 7 aa, Artificial Sequence
  Description of Artificial Sequence: Synthetic peptide
  XENP018625 vlCDR2
YASHRYT

SEQ ID NO: 7483 - protein, 9 aa, Artificial Sequence
  Description of Artificial Sequence: Synthetic peptide
  XENP018625 vlCDR3
QQDYSSPRT

SEQ ID NO: 7484 - protein, 249 aa, Artificial Sequence
  Description of Artificial Sequence: Synthetic polypeptide
  XENP018626 1G6_H1.126_L1_scFv(GKPGS)4
EVQLVESGGGLVKPGGSLRLSCAASGFTFSNYWMNWVRQAPGKGLEWVGEIRLKSNNDATHYAEPVKGRFTISRDDSKSTVYLQMNSLKTEDTAVYYCTRYYGNYGGYFDVWGAGTLVTVSSGKPGSGKPGSGKPGSGKPGSSIVMTQSPATLSVSPGERATLSCRASQSVSNDVAWYQQKPGQSPRLLINYASHRYTGVPDRFTGSGYGTEFTLTISSLQSEDFAVYFCQQDYSSPRTFGGGTKVEIK

SEQ ID NO: 7485 - protein, 122 aa, Artificial Sequence
  Description of Artificial Sequence: Synthetic polypeptide
  VH of XENP018626
EVQLVESGGGLVKPGGSLRLSCAASGFTFSNYWMNWVRQAPGKGLEWVGEIRLKSNNDATHYAEPVKGRFTISRDDSKSTVYLQMNSLKTEDTAVYYCTRYYGNYGGYFDVWGAGTLVTVSS

SEQ ID NO: 7486 - protein, 107 aa, Artificial Sequence; identical to SEQ ID NO: 6247
  Description of Artificial Sequence: Synthetic polypeptide
  VL of XENP018626

SEQ ID NO: 7487 - protein, 5 aa, Artificial Sequence
  Description of Artificial Sequence: Synthetic peptide
  XENP018626 vhCDR1
NYWMN

SEQ ID NO: 7488 - protein, 19 aa, Artificial Sequence
  Description of Artificial Sequence: Synthetic peptide
  XENP018626 vhCDR2
EIRLKSNNDATHYAEPVKG

SEQ ID NO: 7489 - protein, 11 aa, Artificial Sequence
  Description of Artificial Sequence: Synthetic peptide
  XENP018626 vhCDR3
YYGNYGGYFDV

SEQ ID NO: 7490 - protein, 11 aa, Artificial Sequence
  Description of Artificial Sequence: Synthetic peptide
  XENP018626 vlCDR1
RASQSVSNDVA

SEQ ID NO: 7491 - protein, 7 aa, Artificial Sequence
  Description of Artificial Sequence: Synthetic peptide
  XENP018626 vlCDR2
YASHRYT

SEQ ID NO: 7492 - protein, 9 aa, Artificial Sequence
  Description of Artificial Sequence: Synthetic peptide
  XENP018626 vlCDR3
QQDYSSPRT

SEQ ID NO: 7493 - protein, 249 aa, Artificial Sequence
  Description of Artificial Sequence: Synthetic polypeptide
  XENP018627 1G6_H1.127_L1_scFv(GKPGS)4
EVQLVESGGGLVKPGGSLRLSCAASGFTFSNYWMNWVRQAPGKGLEWVGEIRLKSNNKATHYAEPVKGRFTISRDDSKSTVYLQMNSLKTEDTAVYYCTRYYGNYGGYFDVWGAGTLVTVSSGKPGSGKPGSGKPGSGKPGSSIVMTQSPATLSVSPGERATLSCRASQSVSNDVAWYQQKPGQSPRLLINYASHRYTGVPDRFTGSGYGTEFTLTISSLQSEDFAVYFCQQDYSSPRTFGGGTKVEIK

SEQ ID NO: 7494 - protein, 122 aa, Artificial Sequence
  Description of Artificial Sequence: Synthetic polypeptide
  VH of XENP018627
EVQLVESGGGLVKPGGSLRLSCAASGFTFSNYWMNWVRQAPGKGLEWVGEIRLKSNNKATHYAEPVKGRFTISRDDSKSTVYLQMNSLKTEDTAVYYCTRYYGNYGGYFDVWGAGTLVTVSS

SEQ ID NO: 7495 - protein, 107 aa, Artificial Sequence; identical to SEQ ID NO: 6247
  Description of Artificial Sequence: Synthetic polypeptide
  VL of XENP018627

SEQ ID NO: 7496 - protein, 5 aa, Artificial Sequence
  Description of Artificial Sequence: Synthetic peptide
  XENP018627 vhCDR1
NYWMN

SEQ ID NO: 7497 - protein, 19 aa, Artificial Sequence
  Description of Artificial Sequence: Synthetic peptide
  XENP018627 vhCDR2
EIRLKSNNKATHYAEPVKG

SEQ ID NO: 7498 - protein, 11 aa, Artificial Sequence
  Description of Artificial Sequence: Synthetic peptide
  XENP018627 vhCDR3
YYGNYGGYFDV

SEQ ID NO: 7499 - protein, 11 aa, Artificial Sequence
  Description of Artificial Sequence: Synthetic peptide
  XENP018627 vlCDR1
RASQSVSNDVA

SEQ ID NO: 7500 - protein, 7 aa, Artificial Sequence
  Description of Artificial Sequence: Synthetic peptide
  XENP018627 vlCDR2
YASHRYT

SEQ ID NO: 7501 - protein, 9 aa, Artificial Sequence
  Description of Artificial Sequence: Synthetic peptide
  XENP018627 vlCDR3
QQDYSSPRT

SEQ ID NO: 7502 - protein, 249 aa, Artificial Sequence
  Description of Artificial Sequence: Synthetic polypeptide
  XENP018628 1G6_H1.128_L1_scFv(GKPGS)4
EVQLVESGGGLVKPGGSLRLSCAASGFTFSNYWMNWVRQAPGKGLEWVGEIRLKSNNYGTHYAEPVKGRFTISRDDSKSTVYLQMNSLKTEDTAVYYCTRYYGNYGGYFDVWGAGTLVTVSSGKPGSGKPGSGKPGSGKPGSSIVMTQSPATLSVSPGERATLSCRASQSVSNDVAWYQQKPGQSPRLLINYASHRYTGVPDRFTGSGYGTEFTLTISSLQSEDFAVYFCQQDYSSPRTFGGGTKVEIK

SEQ ID NO: 7503 - protein, 122 aa, Artificial Sequence
  Description of Artificial Sequence: Synthetic polypeptide
  VH of XENP018628
EVQLVESGGGLVKPGGSLRLSCAASGFTFSNYWMNWVRQAPGKGLEWVGEIRLKSNNYGTHYAEPVKGRFTISRDDSKSTVYLQMNSLKTEDTAVYYCTRYYGNYGGYFDVWGAGTLVTVSS

SEQ ID NO: 7504 - protein, 107 aa, Artificial Sequence; identical to SEQ ID NO: 6247
  Description of Artificial Sequence: Synthetic polypeptide
  VL of XENP018628

SEQ ID NO: 7505 - protein, 5 aa, Artificial Sequence
  Description of Artificial Sequence: Synthetic peptide
  XENP018628 vhCDR1
NYWMN

SEQ ID NO: 7506 - protein, 19 aa, Artificial Sequence
  Description of Artificial Sequence: Synthetic peptide
  XENP018628 vhCDR2
EIRLKSNNYGTHYAEPVKG

SEQ ID NO: 7507 - protein, 11 aa, Artificial Sequence
  Description of Artificial Sequence: Synthetic peptide
  XENP018628 vhCDR3
YYGNYGGYFDV

SEQ ID NO: 7508 - protein, 11 aa, Artificial Sequence
  Description of Artificial Sequence: Synthetic peptide
  XENP018628 vlCDR1
RASQSVSNDVA

SEQ ID NO: 7509 - protein, 7 aa, Artificial Sequence
  Description of Artificial Sequence: Synthetic peptide
  XENP018628 vlCDR2
YASHRYT

SEQ ID NO: 7510 - protein, 9 aa, Artificial Sequence
  Description of Artificial Sequence: Synthetic peptide
  XENP018628 vlCDR3
QQDYSSPRT

SEQ ID NO: 7511 - protein, 249 aa, Artificial Sequence
  Description of Artificial Sequence: Synthetic polypeptide
  XENP018629 1G6_H1.129_L1_scFv(GKPGS)4
EVQLVESGGGLVKPGGSLRLSCAASGFTFSNYWMNWVRQAPGKGLEWVGEIRLKSNNYHTHYAEPVKGRFTISRDDSKSTVYLQMNSLKTEDTAVYYCTRYYGNYGGYFDVWGAGTLVTVSSGKPGSGKPGSGKPGSGKPGSSIVMTQSPATLSVSPGERATLSCRASQSVSNDVAWYQQKPGQSPRLLINYASHRYTGVPDRFTGSGYGTEFTLTISSLQSEDFAVYFCQQDYSSPRTFGGGTKVEIK

SEQ ID NO: 7512 - protein, 122 aa, Artificial Sequence
  Description of Artificial Sequence: Synthetic polypeptide
  VH of XENP018629
EVQLVESGGGLVKPGGSLRLSCAASGFTFSNYWMNWVRQAPGKGLEWVGEIRLKSNNYHTHYAEPVKGRFTISRDDSKSTVYLQMNSLKTEDTAVYYCTRYYGNYGGYFDVWGAGTLVTVSS

SEQ ID NO: 7513 - protein, 107 aa, Artificial Sequence; identical to SEQ ID NO: 6247
  Description of Artificial Sequence: Synthetic polypeptide
  VL of XENP018629

SEQ ID NO: 7514 - protein, 5 aa, Artificial Sequence
  Description of Artificial Sequence: Synthetic peptide
  XENP018629 vhCDR1
NYWMN

SEQ ID NO: 7515 - protein, 19 aa, Artificial Sequence
  Description of Artificial Sequence: Synthetic peptide
  XENP018629 vhCDR2
EIRLKSNNYHTHYAEPVKG

SEQ ID NO: 7516 - protein, 11 aa, Artificial Sequence
  Description of Artificial Sequence: Synthetic peptide
  XENP018629 vhCDR3
YYGNYGGYFDV

SEQ ID NO: 7517 - protein, 11 aa, Artificial Sequence
  Description of Artificial Sequence: Synthetic peptide
  XENP018629 vlCDR1
RASQSVSNDVA

SEQ ID NO: 7518 - protein, 7 aa, Artificial Sequence
  Description of Artificial Sequence: Synthetic peptide
  XENP018629 vlCDR2
YASHRYT

SEQ ID NO: 7519 - protein, 9 aa, Artificial Sequence
  Description of Artificial Sequence: Synthetic peptide
  XENP018629 vlCDR3
QQDYSSPRT

SEQ ID NO: 7520 - protein, 249 aa, Artificial Sequence
  Description of Artificial Sequence: Synthetic polypeptide
  XENP018630 1G6_H1.130_L1_scFv(GKPGS)4
EVQLVESGGGLVKPGGSLRLSCAASGFTFSNYWMNWVRQAPGKGLEWVGEIRLKSNNYQTHYAEPVKGRFTISRDDSKSTVYLQMNSLKTEDTAVYYCTRYYGNYGGYFDVWGAGTLVTVSSGKPGSGKPGSGKPGSGKPGSSIVMTQSPATLSVSPGERATLSCRASQSVSNDVAWYQQKPGQSPRLLINYASHRYTGVPDRFTGSGYGTEFTLTISSLQSEDFAVYFCQQDYSSPRTFGGGTKVEIK

SEQ ID NO: 7521 - protein, 122 aa, Artificial Sequence
  Description of Artificial Sequence: Synthetic polypeptide
  VH of XENP018630
EVQLVESGGGLVKPGGSLRLSCAASGFTFSNYWMNWVRQAPGKGLEWVGEIRLKSNNYQTHYAEPVKGRFTISRDDSKSTVYLQMNSLKTEDTAVYYCTRYYGNYGGYFDVWGAGTLVTVSS

SEQ ID NO: 7522 - protein, 107 aa, Artificial Sequence; identical to SEQ ID NO: 6247
  Description of Artificial Sequence: Synthetic polypeptide
  VL of XENP018630

SEQ ID NO: 7523 - protein, 5 aa, Artificial Sequence
  Description of Artificial Sequence: Synthetic peptide
  XENP018630 vhCDR1
NYWMN

SEQ ID NO: 7524 - protein, 19 aa, Artificial Sequence
  Description of Artificial Sequence: Synthetic peptide
  XENP018630 vhCDR2
EIRLKSNNYQTHYAEPVKG

SEQ ID NO: 7525 - protein, 11 aa, Artificial Sequence
  Description of Artificial Sequence: Synthetic peptide
  XENP018630 vhCDR3
YYGNYGGYFDV

SEQ ID NO: 7526 - protein, 11 aa, Artificial Sequence
  Description of Artificial Sequence: Synthetic peptide
  XENP018630 vlCDR1
RASQSVSNDVA

SEQ ID NO: 7527 - protein, 7 aa, Artificial Sequence
  Description of Artificial Sequence: Synthetic peptide
  XENP018630 vlCDR2
YASHRYT

SEQ ID NO: 7528 - protein, 9 aa, Artificial Sequence
  Description of Artificial Sequence: Synthetic peptide
  XENP018630 vlCDR3
QQDYSSPRT

SEQ ID NO: 7529 - protein, 249 aa, Artificial Sequence
  Description of Artificial Sequence: Synthetic polypeptide
  XENP018631 1G6_H1.131_L1_scFv(GKPGS)4
EVQLVESGGGLVKPGGSLRLSCAASGFTFSNYWMNWVRQAPGKGLEWVGEIRLKSNNYDTHYAEPVKGRFTISRDDSKSTVYLQMNSLKTEDTAVYYCTRYYGNYGGYFDVWGAGTLVTVSSGKPGSGKPGSGKPGSGKPGSSIVMTQSPATLSVSPGERATLSCRASQSVSNDVAWYQQKPGQSPRLLINYASHRYTGVPDRFTGSGYGTEFTLTISSLQSEDFAVYFCQQDYSSPRTFGGGTKVEIK

SEQ ID NO: 7530 - protein, 122 aa, Artificial Sequence
  Description of Artificial Sequence: Synthetic polypeptide
  VH of XENP018631
EVQLVESGGGLVKPGGSLRLSCAASGFTFSNYWMNWVRQAPGKGLEWVGEIRLKSNNYDTHYAEPVKGRFTISRDDSKSTVYLQMNSLKTEDTAVYYCTRYYGNYGGYFDVWGAGTLVTVSS

SEQ ID NO: 7531 - protein, 107 aa, Artificial Sequence; identical to SEQ ID NO: 6247
  Description of Artificial Sequence: Synthetic polypeptide
  VL of XENP018631

SEQ ID NO: 7532 - protein, 5 aa, Artificial Sequence
  Description of Artificial Sequence: Synthetic peptide
  XENP018631 vhCDR1
NYWMN

SEQ ID NO: 7533 - protein, 19 aa, Artificial Sequence
  Description of Artificial Sequence: Synthetic peptide
  XENP018631 vhCDR2
EIRLKSNNYDTHYAEPVKG

SEQ ID NO: 7534 - protein, 11 aa, Artificial Sequence
  Description of Artificial Sequence: Synthetic peptide
  XENP018631 vhCDR3
YYGNYGGYFDV

SEQ ID NO: 7535 - protein, 11 aa, Artificial Sequence
  Description of Artificial Sequence: Synthetic peptide
  XENP018631 vlCDR1
RASQSVSNDVA

SEQ ID NO: 7536 - protein, 7 aa, Artificial Sequence
  Description of Artificial Sequence: Synthetic peptide
  XENP018631 vlCDR2
YASHRYT

SEQ ID NO: 7537 - protein, 9 aa, Artificial Sequence
  Description of Artificial Sequence: Synthetic peptide
  XENP018631 vlCDR3
QQDYSSPRT

SEQ ID NO: 7538 - protein, 249 aa, Artificial Sequence
  Description of Artificial Sequence: Synthetic polypeptide
  XENP018632 1G6_H1.132_L1_scFv(GKPGS)4
EVQLVESGGGLVKPGGSLRLSCAASGFTFSNYWMNWVRQAPGKGLEWVGEIRLKSNNYLTHYAEPVKGRFTISRDDSKSTVYLQMNSLKTEDTAVYYCTRYYGNYGGYFDVWGAGTLVTVSSGKPGSGKPGSGKPGSGKPGSSIVMTQSPATLSVSPGERATLSCRASQSVSNDVAWYQQKPGQSPRLLINYASHRYTGVPDRFTGSGYGTEFTLTISSLQSEDFAVYFCQQDYSSPRTFGGGTKVEIK

SEQ ID NO: 7539 - protein, 122 aa, Artificial Sequence
  Description of Artificial Sequence: Synthetic polypeptide
  VH of XENP018632
EVQLVESGGGLVKPGGSLRLSCAASGFTFSNYWMNWVRQAPGKGLEWVGEIRLKSNNYLTHYAEPVKGRFTISRDDSKSTVYLQMNSLKTEDTAVYYCTRYYGNYGGYFDVWGAGTLVTVSS

SEQ ID NO: 7540 - protein, 107 aa, Artificial Sequence; identical to SEQ ID NO: 6247
  Description of Artificial Sequence: Synthetic polypeptide
  VL of XENP018632

SEQ ID NO: 7541 - protein, 5 aa, Artificial Sequence
  Description of Artificial Sequence: Synthetic peptide
  XENP018632 vhCDR1
NYWMN

SEQ ID NO: 7542 - protein, 19 aa, Artificial Sequence
  Description of Artificial Sequence: Synthetic peptide
  XENP018632 vhCDR2
EIRLKSNNYLTHYAEPVKG

SEQ ID NO: 7543 - protein, 11 aa, Artificial Sequence
  Description of Artificial Sequence: Synthetic peptide
  XENP018632 vhCDR3
YYGNYGGYFDV

SEQ ID NO: 7544 - protein, 11 aa, Artificial Sequence
  Description of Artificial Sequence: Synthetic peptide
  XENP018632 vlCDR1
RASQSVSNDVA

SEQ ID NO: 7545 - protein, 7 aa, Artificial Sequence
  Description of Artificial Sequence: Synthetic peptide
  XENP018632 vlCDR2
YASHRYT

SEQ ID NO: 7546 - protein, 9 aa, Artificial Sequence
  Description of Artificial Sequence: Synthetic peptide
  XENP018632 vlCDR3
QQDYSSPRT

SEQ ID NO: 7547 - protein, 249 aa, Artificial Sequence
  Description of Artificial Sequence: Synthetic polypeptide
  XENP018633 1G6_H1.133_L1_scFv(GKPGS)4
EVQLVESGGGLVKPGGSLRLSCAASGFTFSNYWMNWVRQAPGKGLEWVGEIRLKSNNYKTHYAEPVKGRFTISRDDSKSTVYLQMNSLKTEDTAVYYCTRYYGNYGGYFDVWGAGTLVTVSSGKPGSGKPGSGKPGSGKPGSSIVMTQSPATLSVSPGERATLSCRASQSVSNDVAWYQQKPGQSPRLLINYASHRYTGVPDRFTGSGYGTEFTLTISSLQSEDFAVYFCQQDYSSPRTFGGGTKVEIK

SEQ ID NO: 7548 - protein, 122 aa, Artificial Sequence
  Description of Artificial Sequence: Synthetic polypeptide
  VH of XENP018633
EVQLVESGGGLVKPGGSLRLSCAASGFTFSNYWMNWVRQAPGKGLEWVGEIRLKSNNYKTHYAEPVKGRFTISRDDSKSTVYLQMNSLKTEDTAVYYCTRYYGNYGGYFDVWGAGTLVTVSS

SEQ ID NO: 7549 - protein, 107 aa, Artificial Sequence; identical to SEQ ID NO: 6247
  Description of Artificial Sequence: Synthetic polypeptide
  VL of XENP018633

SEQ ID NO: 7550 - protein, 5 aa, Artificial Sequence
  Description of Artificial Sequence: Synthetic peptide
  XENP018633 vhCDR1
NYWMN

SEQ ID NO: 7551 - protein, 19 aa, Artificial Sequence
  Description of Artificial Sequence: Synthetic peptide
  XENP018633 vhCDR2
EIRLKSNNYKTHYAEPVKG

SEQ ID NO: 7552 - protein, 11 aa, Artificial Sequence
  Description of Artificial Sequence: Synthetic peptide
  XENP018633 vhCDR3
YYGNYGGYFDV

SEQ ID NO: 7553 - protein, 11 aa, Artificial Sequence
  Description of Artificial Sequence: Synthetic peptide
  XENP018633 vlCDR1
RASQSVSNDVA

SEQ ID NO: 7554 - protein, 7 aa, Artificial Sequence
  Description of Artificial Sequence: Synthetic peptide
  XENP018633 vlCDR2
YASHRYT

SEQ ID NO: 7555 - protein, 9 aa, Artificial Sequence
  Description of Artificial Sequence: Synthetic peptide
  XENP018633 vlCDR3
QQDYSSPRT

SEQ ID NO: 7556 - protein, 249 aa, Artificial Sequence
  Description of Artificial Sequence: Synthetic polypeptide
  XENP018634 1G6_H1.134_L1_scFv(GKPGS)4
EVQLVESGGGLVKPGGSLRLSCAASGFTFSNYWMNWVRQAPGKGLEWVGEIRLKSNNYYTHYAEPVKGRFTISRDDSKSTVYLQMNSLKTEDTAVYYCTRYYGNYGGYFDVWGAGTLVTVSSGKPGSGKPGSGKPGSGKPGSSIVMTQSPATLSVSPGERATLSCRASQSVSNDVAWYQQKPGQSPRLLINYASHRYTGVPDRFTGSGYGTEFTLTISSLQSEDFAVYFCQQDYSSPRTFGGGTKVEIK

SEQ ID NO: 7557 - protein, 122 aa, Artificial Sequence
  Description of Artificial Sequence: Synthetic polypeptide
  VH of XENP018634
EVQLVESGGGLVKPGGSLRLSCAASGFTFSNYWMNWVRQAPGKGLEWVGEIRLKSNNYYTHYAEPVKGRFTISRDDSKSTVYLQMNSLKTEDTAVYYCTRYYGNYGGYFDVWGAGTLVTVSS

SEQ ID NO: 7558 - protein, 107 aa, Artificial Sequence; identical to SEQ ID NO: 6247
  Description of Artificial Sequence: Synthetic polypeptide
  VL of XENP018634

SEQ ID NO: 7559 - protein, 5 aa, Artificial Sequence
  Description of Artificial Sequence: Synthetic peptide
  XENP018634 vhCDR1
NYWMN

SEQ ID NO: 7560 - protein, 19 aa, Artificial Sequence
  Description of Artificial Sequence: Synthetic peptide
  XENP018634 vhCDR2
EIRLKSNNYYTHYAEPVKG

SEQ ID NO: 7561 - protein, 11 aa, Artificial Sequence
  Description of Artificial Sequence: Synthetic peptide
  XENP018634 vhCDR3
YYGNYGGYFDV

SEQ ID NO: 7562 - protein, 11 aa, Artificial Sequence
  Description of Artificial Sequence: Synthetic peptide
  XENP018634 vlCDR1
RASQSVSNDVA

SEQ ID NO: 7563 - protein, 7 aa, Artificial Sequence
  Description of Artificial Sequence: Synthetic peptide
  XENP018634 vlCDR2
YASHRYT

SEQ ID NO: 7564 - protein, 9 aa, Artificial Sequence
  Description of Artificial Sequence: Synthetic peptide
  XENP018634 vlCDR3
QQDYSSPRT

SEQ ID NO: 7565 - protein, 249 aa, Artificial Sequence
  Description of Artificial Sequence: Synthetic polypeptide
  XENP018635 1G6_H1.135_L1_scFv(GKPGS)4
EVQLVESGGGLVKPGGSLRLSCAASGFTFSNYWMNWVRQAPGKGLEWVGEIRLKSNNYAKHYAEPVKGRFTISRDDSKSTVYLQMNSLKTEDTAVYYCTRYYGNYGGYFDVWGAGTLVTVSSGKPGSGKPGSGKPGSGKPGSSIVMTQSPATLSVSPGERATLSCRASQSVSNDVAWYQQKPGQSPRLLINYASHRYTGVPDRFTGSGYGTEFTLTISSLQSEDFAVYFCQQDYSSPRTFGGGTKVEIK

SEQ ID NO: 7566 - protein, 122 aa, Artificial Sequence
  Description of Artificial Sequence: Synthetic polypeptide
  VH of XENP018635
EVQLVESGGGLVKPGGSLRLSCAASGFTFSNYWMNWVRQAPGKGLEWVGEIRLKSNNYAKHYAEPVKGRFTISRDDSKSTVYLQMNSLKTEDTAVYYCTRYYGNYGGYFDVWGAGTLVTVSS

SEQ ID NO: 7567 - protein, 107 aa, Artificial Sequence; identical to SEQ ID NO: 6247
  Description of Artificial Sequence: Synthetic polypeptide
  VL of XENP018635

SEQ ID NO: 7568 - protein, 5 aa, Artificial Sequence
  Description of Artificial Sequence: Synthetic peptide
  XENP018635 vhCDR1
NYWMN

SEQ ID NO: 7569 - protein, 19 aa, Artificial Sequence
  Description of Artificial Sequence: Synthetic peptide
  XENP018635 vhCDR2
EIRLKSNNYAKHYAEPVKG

SEQ ID NO: 7570 - protein, 11 aa, Artificial Sequence
  Description of Artificial Sequence: Synthetic peptide
  XENP018635 vhCDR3
YYGNYGGYFDV

SEQ ID NO: 7571 - protein, 11 aa, Artificial Sequence
  Description of Artificial Sequence: Synthetic peptide
  XENP018635 vlCDR1
RASQSVSNDVA

SEQ ID NO: 7572 - protein, 7 aa, Artificial Sequence
  Description of Artificial Sequence: Synthetic peptide
  XENP018635 vlCDR2
YASHRYT

SEQ ID NO: 7573 - protein, 9 aa, Artificial Sequence
  Description of Artificial Sequence: Synthetic peptide
  XENP018635 vlCDR3
QQDYSSPRT

SEQ ID NO: 7574 - protein, 249 aa, Artificial Sequence
  Description of Artificial Sequence: Synthetic polypeptide
  XENP018636 1G6_H1.136_L1_scFv(GKPGS)4
EVQLVESGGGLVKPGGSLRLSCAASGFTFSNYWMNWVRQAPGKGLEWVGEIRLKSNNYAIHYAEPVKGRFTISRDDSKSTVYLQMNSLKTEDTAVYYCTRYYGNYGGYFDVWGAGTLVTVSSGKPGSGKPGSGKPGSGKPGSSIVMTQSPATLSVSPGERATLSCRASQSVSNDVAWYQQKPGQSPRLLINYASHRYTGVPDRFTGSGYGTEFTLTISSLQSEDFAVYFCQQDYSSPRTFGGGTKVEIK

SEQ ID NO: 7575 - protein, 122 aa, Artificial Sequence
  Description of Artificial Sequence: Synthetic polypeptide
  VH of XENP018636
EVQLVESGGGLVKPGGSLRLSCAASGFTFSNYWMNWVRQAPGKGLEWVGEIRLKSNNYAIHYAEPVKGRFTISRDDSKSTVYLQMNSLKTEDTAVYYCTRYYGNYGGYFDVWGAGTLVTVSS

SEQ ID NO: 7576 - protein, 107 aa, Artificial Sequence; identical to SEQ ID NO: 6247
  Description of Artificial Sequence: Synthetic polypeptide
  VL of XENP018636

SEQ ID NO: 7577 - protein, 5 aa, Artificial Sequence
  Description of Artificial Sequence: Synthetic peptide
  XENP018636 vhCDR1
NYWMN

SEQ ID NO: 7578 - protein, 19 aa, Artificial Sequence
  Description of Artificial Sequence: Synthetic peptide
  XENP018636 vhCDR2
EIRLKSNNYAIHYAEPVKG

SEQ ID NO: 7579 - protein, 11 aa, Artificial Sequence
  Description of Artificial Sequence: Synthetic peptide
  XENP018636 vhCDR3
YYGNYGGYFDV

SEQ ID NO: 7580 - protein, 11 aa, Artificial Sequence
  Description of Artificial Sequence: Synthetic peptide
  XENP018636 vlCDR1
RASQSVSNDVA

SEQ ID NO: 7581 - protein, 7 aa, Artificial Sequence
  Description of Artificial Sequence: Synthetic peptide
  XENP018636 vlCDR2
YASHRYT

SEQ ID NO: 7582 - protein, 9 aa, Artificial Sequence
  Description of Artificial Sequence: Synthetic peptide
  XENP018636 vlCDR3
QQDYSSPRT

SEQ ID NO: 7583 - protein, 249 aa, Artificial Sequence
  Description of Artificial Sequence: Synthetic polypeptide
  XENP018637 1G6_H1.137_L1_scFv(GKPGS)4
EVQLVESGGGLVKPGGSLRLSCAASGFTFSNYWMNWVRQAPGKGLEWVGEIRLKSNNYATYYAEPVKGRFTISRDDSKSTVYLQMNSLKTEDTAVYYCTRYYGNYGGYFDVWGAGTLVTVSSGKPGSGKPGSGKPGSGKPGSSIVMTQSPATLSVSPGERATLSCRASQSVSNDVAWYQQKPGQSPRLLINYASHRYTGVPDRFTGSGYGTEFTLTISSLQSEDFAVYFCQQDYSSPRTFGGGTKVEIK

SEQ ID NO: 7584 - protein, 122 aa, Artificial Sequence
  Description of Artificial Sequence: Synthetic polypeptide
  VH of XENP018637
EVQLVESGGGLVKPGGSLRLSCAASGFTFSNYWMNWVRQAPGKGLEWVGEIRLKSNNYATYYAEPVKGRFTISRDDSKSTVYLQMNSLKTEDTAVYYCTRYYGNYGGYFDVWGAGTLVTVSS

SEQ ID NO: 7585 - protein, 107 aa, Artificial Sequence; identical to SEQ ID NO: 6247
  Description of Artificial Sequence: Synthetic polypeptide
  VL of XENP018637

SEQ ID NO: 7586 - protein, 5 aa, Artificial Sequence
  Description of Artificial Sequence: Synthetic peptide
  XENP018637 vhCDR1
NYWMN

SEQ ID NO: 7587 - protein, 19 aa, Artificial Sequence
  Description of Artificial Sequence: Synthetic peptide
  XENP018637 vhCDR2
EIRLKSNNYATYYAEPVKG

SEQ ID NO: 7588 - protein, 11 aa, Artificial Sequence
  Description of Artificial Sequence: Synthetic peptide
  XENP018637 vhCDR3
YYGNYGGYFDV

SEQ ID NO: 7589 - protein, 11 aa, Artificial Sequence
  Description of Artificial Sequence: Synthetic peptide
  XENP018637 vlCDR1
RASQSVSNDVA

SEQ ID NO: 7590 - protein, 7 aa, Artificial Sequence
  Description of Artificial Sequence: Synthetic peptide
  XENP018637 vlCDR2
YASHRYT

SEQ ID NO: 7591 - protein, 9 aa, Artificial Sequence
  Description of Artificial Sequence: Synthetic peptide
  XENP018637 vlCDR3
QQDYSSPRT

SEQ ID NO: 7592 - protein, 249 aa, Artificial Sequence
  Description of Artificial Sequence: Synthetic polypeptide
  XENP018638 1G6_H1.138_L1_scFv(GKPGS)4
EVQLVESGGGLVKPGGSLRLSCAASGFTFSNYWMNWVRQAPGKGLEWVGEIRLKSNNYATQYAEPVKGRFTISRDDSKSTVYLQMNSLKTEDTAVYYCTRYYGNYGGYFDVWGAGTLVTVSSGKPGSGKPGSGKPGSGKPGSSIVMTQSPATLSVSPGERATLSCRASQSVSNDVAWYQQKPGQSPRLLINYASHRYTGVPDRFTGSGYGTEFTLTISSLQSEDFAVYFCQQDYSSPRTFGGGTKVEIK

SEQ ID NO: 7593 - protein, 122 aa, Artificial Sequence
  Description of Artificial Sequence: Synthetic polypeptide
  VH of XENP018638
EVQLVESGGGLVKPGGSLRLSCAASGFTFSNYWMNWVRQAPGKGLEWVGEIRLKSNNYATQYAEPVKGRFTISRDDSKSTVYLQMNSLKTEDTAVYYCTRYYGNYGGYFDVWGAGTLVTVSS

SEQ ID NO: 7594 - protein, 107 aa, Artificial Sequence; identical to SEQ ID NO: 6247
  Description of Artificial Sequence: Synthetic polypeptide
  VL of XENP018638

SEQ ID NO: 7595 - protein, 5 aa, Artificial Sequence
  Description of Artificial Sequence: Synthetic peptide
  XENP018638 vhCDR1
NYWMN

SEQ ID NO: 7596 - protein, 19 aa, Artificial Sequence
  Description of Artificial Sequence: Synthetic peptide
  XENP018638 vhCDR2
EIRLKSNNYATQYAEPVKG

SEQ ID NO: 7597 - protein, 11 aa, Artificial Sequence
  Description of Artificial Sequence: Synthetic peptide
  XENP018638 vhCDR3
YYGNYGGYFDV

SEQ ID NO: 7598 - protein, 11 aa, Artificial Sequence
  Description of Artificial Sequence: Synthetic peptide
  XENP018638 vlCDR1
RASQSVSNDVA

SEQ ID NO: 7599 - protein, 7 aa, Artificial Sequence
  Description of Artificial Sequence: Synthetic peptide
  XENP018638 vlCDR2
YASHRYT

SEQ ID NO: 7600 - protein, 9 aa, Artificial Sequence
  Description of Artificial Sequence: Synthetic peptide
  XENP018638 vlCDR3
QQDYSSPRT

SEQ ID NO: 7601 - protein, 249 aa, Artificial Sequence
  Description of Artificial Sequence: Synthetic polypeptide
  XENP018639 1G6_H1.139_L1_scFv(GKPGS)4
EVQLVESGGGLVKPGGSLRLSCAASGFTFSNYWMNWVRQAPGKGLEWVGEIRLKSNNYATDYAEPVKGRFTISRDDSKSTVYLQMNSLKTEDTAVYYCTRYYGNYGGYFDVWGAGTLVTVSSGKPGSGKPGSGKPGSGKPGSSIVMTQSPATLSVSPGERATLSCRASQSVSNDVAWYQQKPGQSPRLLINYASHRYTGVPDRFTGSGYGTEFTLTISSLQSEDFAVYFCQQDYSSPRTFGGGTKVEIK

SEQ ID NO: 7602 - protein, 122 aa, Artificial Sequence
  Description of Artificial Sequence: Synthetic polypeptide
  VH of XENP018639
EVQLVESGGGLVKPGGSLRLSCAASGFTFSNYWMNWVRQAPGKGLEWVGEIRLKSNNYATDYAEPVKGRFTISRDDSKSTVYLQMNSLKTEDTAVYYCTRYYGNYGGYFDVWGAGTLVTVSS

SEQ ID NO: 7603 - protein, 107 aa, Artificial Sequence; identical to SEQ ID NO: 6247
  Description of Artificial Sequence: Synthetic polypeptide
  VL of XENP018639

SEQ ID NO: 7604 - protein, 5 aa, Artificial Sequence
  Description of Artificial Sequence: Synthetic peptide
  XENP018639 vhCDR1
NYWMN

SEQ ID NO: 7605 - protein, 19 aa, Artificial Sequence
  Description of Artificial Sequence: Synthetic peptide
  XENP018639 vhCDR2
EIRLKSNNYATDYAEPVKG

SEQ ID NO: 7606 - protein, 11 aa, Artificial Sequence
  Description of Artificial Sequence: Synthetic peptide
  XENP018639 vhCDR3
YYGNYGGYFDV

SEQ ID NO: 7607 - protein, 11 aa, Artificial Sequence
  Description of Artificial Sequence: Synthetic peptide
  XENP018639 vlCDR1
RASQSVSNDVA

SEQ ID NO: 7608 - protein, 7 aa, Artificial Sequence
  Description of Artificial Sequence: Synthetic peptide
  XENP018639 vlCDR2
YASHRYT

SEQ ID NO: 7609 - protein, 9 aa, Artificial Sequence
  Description of Artificial Sequence: Synthetic peptide
  XENP018639 vlCDR3
QQDYSSPRT

SEQ ID NO: 7610 - protein, 249 aa, Artificial Sequence
  Description of Artificial Sequence: Synthetic polypeptide
  XENP018640 1G6_H1.140_L1_scFv(GKPGS)4
EVQLVESGGGLVKPGGSLRLSCAASGFTFSNYWMNWVRQAPGKGLEWVGEIRLKSNNYATFYAEPVKGRFTISRDDSKSTVYLQMNSLKTEDTAVYYCTRYYGNYGGYFDVWGAGTLVTVSSGKPGSGKPGSGKPGSGKPGSSIVMTQSPATLSVSPGERATLSCRASQSVSNDVAWYQQKPGQSPRLLINYASHRYTGVPDRFTGSGYGTEFTLTISSLQSEDFAVYFCQQDYSSPRTFGGGTKVEIK

SEQ ID NO: 7611 - protein, 122 aa, Artificial Sequence
  Description of Artificial Sequence: Synthetic polypeptide
  VH of XENP018640
EVQLVESGGGLVKPGGSLRLSCAASGFTFSNYWMNWVRQAPGKGLEWVGEIRLKSNNYATFYAEPVKGRFTISRDDSKSTVYLQMNSLKTEDTAVYYCTRYYGNYGGYFDVWGAGTLVTVSS

SEQ ID NO: 7612 - protein, 107 aa, Artificial Sequence; identical to SEQ ID NO: 6247
  Description of Artificial Sequence: Synthetic polypeptide
  VL of XENP018640

SEQ ID NO: 7613 - protein, 5 aa, Artificial Sequence
  Description of Artificial Sequence: Synthetic peptide
  XENP018640 vhCDR1
NYWMN

SEQ ID NO: 7614 - protein, 19 aa, Artificial Sequence
  Description of Artificial Sequence: Synthetic peptide
  XENP018640 vhCDR2
EIRLKSNNYATFYAEPVKG

SEQ ID NO: 7615 - protein, 11 aa, Artificial Sequence
  Description of Artificial Sequence: Synthetic peptide
  XENP018640 vhCDR3
YYGNYGGYFDV

SEQ ID NO: 7616 - protein, 11 aa, Artificial Sequence
  Description of Artificial Sequence: Synthetic peptide
  XENP018640 vlCDR1
RASQSVSNDVA

SEQ ID NO: 7617 - protein, 7 aa, Artificial Sequence
  Description of Artificial Sequence: Synthetic peptide
  XENP018640 vlCDR2
YASHRYT

SEQ ID NO: 7618 - protein, 9 aa, Artificial Sequence
  Description of Artificial Sequence: Synthetic peptide
  XENP018640 vlCDR3
QQDYSSPRT

SEQ ID NO: 7619 - protein, 249 aa, Artificial Sequence
  Description of Artificial Sequence: Synthetic polypeptide
  XENP018641 1G6_H1.141_L1_scFv(GKPGS)4
EVQLVESGGGLVKPGGSLRLSCAASGFTFSNYWMNWVRQAPGKGLEWVGEIRLKSNNYATAYAEPVKGRFTISRDDSKSTVYLQMNSLKTEDTAVYYCTRYYGNYGGYFDVWGAGTLVTVSSGKPGSGKPGSGKPGSGKPGSSIVMTQSPATLSVSPGERATLSCRASQSVSNDVAWYQQKPGQSPRLLINYASHRYTGVPDRFTGSGYGTEFTLTISSLQSEDFAVYFCQQDYSSPRTFGGGTKVEIK

SEQ ID NO: 7620 - protein, 122 aa, Artificial Sequence
  Description of Artificial Sequence: Synthetic polypeptide
  VH of XENP018641
EVQLVESGGGLVKPGGSLRLSCAASGFTFSNYWMNWVRQAPGKGLEWVGEIRLKSNNYATAYAEPVKGRFTISRDDSKSTVYLQMNSLKTEDTAVYYCTRYYGNYGGYFDVWGAGTLVTVSS

SEQ ID NO: 7621 - protein, 107 aa, Artificial Sequence; identical to SEQ ID NO: 6247
  Description of Artificial Sequence: Synthetic polypeptide
  VL of XENP018641

SEQ ID NO: 7622 - protein, 5 aa, Artificial Sequence
  Description of Artificial Sequence: Synthetic peptide
  XENP018641 vhCDR1
NYWMN

SEQ ID NO: 7623 - protein, 19 aa, Artificial Sequence
  Description of Artificial Sequence: Synthetic peptide
  XENP018641 vhCDR2
EIRLKSNNYATAYAEPVKG

SEQ ID NO: 7624 - protein, 11 aa, Artificial Sequence
  Description of Artificial Sequence: Synthetic peptide
  XENP018641 vhCDR3
YYGNYGGYFDV

SEQ ID NO: 7625 - protein, 11 aa, Artificial Sequence
  Description of Artificial Sequence: Synthetic peptide
  XENP018641 vlCDR1
RASQSVSNDVA

SEQ ID NO: 7626 - protein, 7 aa, Artificial Sequence
  Description of Artificial Sequence: Synthetic peptide
  XENP018641 vlCDR2
YASHRYT

SEQ ID NO: 7627 - protein, 9 aa, Artificial Sequence
  Description of Artificial Sequence: Synthetic peptide
  XENP018641 vlCDR3
QQDYSSPRT

SEQ ID NO: 7628 - protein, 249 aa, Artificial Sequence
  Description of Artificial Sequence: Synthetic polypeptide
  XENP018642 1G6_H1.142_L1_scFv(GKPGS)4
EVQLVESGGGLVKPGGSLRLSCAASGFTFSNYWMNWVRQAPGKGLEWVGEIRLKSNNYATTYAEPVKGRFTISRDDSKSTVYLQMNSLKTEDTAVYYCTRYYGNYGGYFDVWGAGTLVTVSSGKPGSGKPGSGKPGSGKPGSSIVMTQSPATLSVSPGERATLSCRASQSVSNDVAWYQQKPGQSPRLLINYASHRYTGVPDRFTGSGYGTEFTLTISSLQSEDFAVYFCQQDYSSPRTFGGGTKVEIK

SEQ ID NO: 7629 - protein, 122 aa, Artificial Sequence
  Description of Artificial Sequence: Synthetic polypeptide
  VH of XENP018642
EVQLVESGGGLVKPGGSLRLSCAASGFTFSNYWMNWVRQAPGKGLEWVGEIRLKSNNYATTYAEPVKGRFTISRDDSKSTVYLQMNSLKTEDTAVYYCTRYYGNYGGYFDVWGAGTLVTVSS

SEQ ID NO: 7630 - protein, 107 aa, Artificial Sequence; identical to SEQ ID NO: 6247
  Description of Artificial Sequence: Synthetic polypeptide
  VL of XENP018642

SEQ ID NO: 7631 - protein, 5 aa, Artificial Sequence
  Description of Artificial Sequence: Synthetic peptide
  XENP018642 vhCDR1
NYWMN

SEQ ID NO: 7632 - protein, 19 aa, Artificial Sequence
  Description of Artificial Sequence: Synthetic peptide
  XENP018642 vhCDR2
EIRLKSNNYATTYAEPVKG

SEQ ID NO: 7633 - protein, 11 aa, Artificial Sequence
  Description of Artificial Sequence: Synthetic peptide
  XENP018642 vhCDR3
YYGNYGGYFDV

SEQ ID NO: 7634 - protein, 11 aa, Artificial Sequence
  Description of Artificial Sequence: Synthetic peptide
  XENP018642 vlCDR1
RASQSVSNDVA

SEQ ID NO: 7635 - protein, 7 aa, Artificial Sequence
  Description of Artificial Sequence: Synthetic peptide
  XENP018642 vlCDR2
YASHRYT

SEQ ID NO: 7636 - protein, 9 aa, Artificial Sequence
  Description of Artificial Sequence: Synthetic peptide
  XENP018642 vlCDR3
QQDYSSPRT

SEQ ID NO: 7637 - protein, 249 aa, Artificial Sequence
  Description of Artificial Sequence: Synthetic polypeptide
  XENP018643 1G6_H1.143_L1_scFv(GKPGS)4
EVQLVESGGGLVKPGGSLRLSCAASGFTFSNYWMNWVRQAPGKGLEWVGEIRLKSNNYATKYAEPVKGRFTISRDDSKSTVYLQMNSLKTEDTAVYYCTRYYGNYGGYFDVWGAGTLVTVSSGKPGSGKPGSGKPGSGKPGSSIVMTQSPATLSVSPGERATLSCRASQSVSNDVAWYQQKPGQSPRLLINYASHRYTGVPDRFTGSGYGTEFTLTISSLQSEDFAVYFCQQDYSSPRTFGGGTKVEIK

SEQ ID NO: 7638 - protein, 122 aa, Artificial Sequence
  Description of Artificial Sequence: Synthetic polypeptide
  VH of XENP018643
EVQLVESGGGLVKPGGSLRLSCAASGFTFSNYWMNWVRQAPGKGLEWVGEIRLKSNNYATKYAEPVKGRFTISRDDSKSTVYLQMNSLKTEDTAVYYCTRYYGNYGGYFDVWGAGTLVTVSS

SEQ ID NO: 7639 - protein, 107 aa, Artificial Sequence; identical to SEQ ID NO: 6247
  Description of Artificial Sequence: Synthetic polypeptide
  VL of XENP018643

SEQ ID NO: 7640 - protein, 5 aa, Artificial Sequence
  Description of Artificial Sequence: Synthetic peptide
  XENP018643 vhCDR1
NYWMN

SEQ ID NO: 7641 - protein, 19 aa, Artificial Sequence
  Description of Artificial Sequence: Synthetic peptide
  XENP018643 vhCDR2
EIRLKSNNYATKYAEPVKG

SEQ ID NO: 7642 - protein, 11 aa, Artificial Sequence
  Description of Artificial Sequence: Synthetic peptide
  XENP018643 vhCDR3
YYGNYGGYFDV

SEQ ID NO: 7643 - protein, 11 aa, Artificial Sequence
  Description of Artificial Sequence: Synthetic peptide
  XENP018643 vlCDR1
RASQSVSNDVA

SEQ ID NO: 7644 - protein, 7 aa, Artificial Sequence
  Description of Artificial Sequence: Synthetic peptide
  XENP018643 vlCDR2
YASHRYT

SEQ ID NO: 7645 - protein, 9 aa, Artificial Sequence
  Description of Artificial Sequence: Synthetic peptide
  XENP018643 vlCDR3
QQDYSSPRT

SEQ ID NO: 7646 - protein, 249 aa, Artificial Sequence
  Description of Artificial Sequence: Synthetic polypeptide
  XENP018644 1G6_H1.144_L1_scFv(GKPGS)4
EVQLVESGGGLVKPGGSLRLSCAASGFTFSNYWMNWVRQAPGKGLEWVGEIRLKSNNYATGYAEPVKGRFTISRDDSKSTVYLQMNSLKTEDTAVYYCTRYYGNYGGYFDVWGAGTLVTVSSGKPGSGKPGSGKPGSGKPGSSIVMTQSPATLSVSPGERATLSCRASQSVSNDVAWYQQKPGQSPRLLINYASHRYTGVPDRFTGSGYGTEFTLTISSLQSEDFAVYFCQQDYSSPRTFGGGTKVEIK

SEQ ID NO: 7647 - protein, 122 aa, Artificial Sequence
  Description of Artificial Sequence: Synthetic polypeptide
  VH of XENP018644
EVQLVESGGGLVKPGGSLRLSCAASGFTFSNYWMNWVRQAPGKGLEWVGEIRLKSNNYATGYAEPVKGRFTISRDDSKSTVYLQMNSLKTEDTAVYYCTRYYGNYGGYFDVWGAGTLVTVSS

SEQ ID NO: 7648 - protein, 107 aa, Artificial Sequence; identical to SEQ ID NO: 6247
  Description of Artificial Sequence: Synthetic polypeptide
  VL of XENP018644

SEQ ID NO: 7649 - protein, 5 aa, Artificial Sequence
  Description of Artificial Sequence: Synthetic peptide
  XENP018644 vhCDR1
NYWMN

SEQ ID NO: 7650 - protein, 19 aa, Artificial Sequence
  Description of Artificial Sequence: Synthetic peptide
  XENP018644 vhCDR2
EIRLKSNNYATGYAEPVKG

SEQ ID NO: 7651 - protein, 11 aa, Artificial Sequence
  Description of Artificial Sequence: Synthetic peptide
  XENP018644 vhCDR3
YYGNYGGYFDV

SEQ ID NO: 7652 - protein, 11 aa, Artificial Sequence
  Description of Artificial Sequence: Synthetic peptide
  XENP018644 vlCDR1
RASQSVSNDVA

SEQ ID NO: 7653 - protein, 7 aa, Artificial Sequence
  Description of Artificial Sequence: Synthetic peptide
  XENP018644 vlCDR2
YASHRYT

SEQ ID NO: 7654 - protein, 9 aa, Artificial Sequence
  Description of Artificial Sequence: Synthetic peptide
  XENP018644 vlCDR3
QQDYSSPRT

SEQ ID NO: 7655 - protein, 249 aa, Artificial Sequence
  Description of Artificial Sequence: Synthetic polypeptide
  XENP018645 1G6_H1.145_L1_scFv(GKPGS)4
EVQLVESGGGLVKPGGSLRLSCAASGFTFSNYWMNWVRQAPGKGLEWVGEIRLKSNNYATLYAEPVKGRFTISRDDSKSTVYLQMNSLKTEDTAVYYCTRYYGNYGGYFDVWGAGTLVTVSSGKPGSGKPGSGKPGSGKPGSSIVMTQSPATLSVSPGERATLSCRASQSVSNDVAWYQQKPGQSPRLLINYASHRYTGVPDRFTGSGYGTEFTLTISSLQSEDFAVYFCQQDYSSPRTFGGGTKVEIK

SEQ ID NO: 7656 - protein, 122 aa, Artificial Sequence
  Description of Artificial Sequence: Synthetic polypeptide
  VH of XENP018645
EVQLVESGGGLVKPGGSLRLSCAASGFTFSNYWMNWVRQAPGKGLEWVGEIRLKSNNYATLYAEPVKGRFTISRDDSKSTVYLQMNSLKTEDTAVYYCTRYYGNYGGYFDVWGAGTLVTVSS

SEQ ID NO: 7657 - protein, 107 aa, Artificial Sequence; identical to SEQ ID NO: 6247
  Description of Artificial Sequence: Synthetic polypeptide
  VL of XENP018645

SEQ ID NO: 7658 - protein, 5 aa, Artificial Sequence
  Description of Artificial Sequence: Synthetic peptide
  XENP018645 vhCDR1
NYWMN

SEQ ID NO: 7659 - protein, 19 aa, Artificial Sequence
  Description of Artificial Sequence: Synthetic peptide
  XENP018645 vhCDR2
EIRLKSNNYATLYAEPVKG

SEQ ID NO: 7660 - protein, 11 aa, Artificial Sequence
  Description of Artificial Sequence: Synthetic peptide
  XENP018645 vhCDR3
YYGNYGGYFDV

SEQ ID NO: 7661 - protein, 11 aa, Artificial Sequence
  Description of Artificial Sequence: Synthetic peptide
  XENP018645 vlCDR1
RASQSVSNDVA

SEQ ID NO: 7662 - protein, 7 aa, Artificial Sequence
  Description of Artificial Sequence: Synthetic peptide
  XENP018645 vlCDR2
YASHRYT

SEQ ID NO: 7663 - protein, 9 aa, Artificial Sequence
  Description of Artificial Sequence: Synthetic peptide
  XENP018645 vlCDR3
QQDYSSPRT

SEQ ID NO: 7664 - protein, 249 aa, Artificial Sequence
  Description of Artificial Sequence: Synthetic polypeptide
  XENP018646 1G6_H1.146_L1_scFv(GKPGS)4
EVQLVESGGGLVKPGGSLRLSCAASGFTFSNYWMNWVRQAPGKGLEWVGEIRLKSNNYATHYPEPVKGRFTISRDDSKSTVYLQMNSLKTEDTAVYYCTRYYGNYGGYFDVWGAGTLVTVSSGKPGSGKPGSGKPGSGKPGSSIVMTQSPATLSVSPGERATLSCRASQSVSNDVAWYQQKPGQSPRLLINYASHRYTGVPDRFTGSGYGTEFTLTISSLQSEDFAVYFCQQDYSSPRTFGGGTKVEIK

SEQ ID NO: 7665 - protein, 122 aa, Artificial Sequence
  Description of Artificial Sequence: Synthetic polypeptide
  VH of XENP018646
EVQLVESGGGLVKPGGSLRLSCAASGFTFSNYWMNWVRQAPGKGLEWVGEIRLKSNNYATHYPEPVKGRFTISRDDSKSTVYLQMNSLKTEDTAVYYCTRYYGNYGGYFDVWGAGTLVTVSS

SEQ ID NO: 7666 - protein, 107 aa, Artificial Sequence; identical to SEQ ID NO: 6247
  Description of Artificial Sequence: Synthetic polypeptide
  VL of XENP018646

SEQ ID NO: 7667 - protein, 5 aa, Artificial Sequence
  Description of Artificial Sequence: Synthetic peptide
  XENP018646 vhCDR1
NYWMN

SEQ ID NO: 7668 - protein, 19 aa, Artificial Sequence
  Description of Artificial Sequence: Synthetic peptide
  XENP018646 vhCDR2
EIRLKSNNYATHYPEPVKG

SEQ ID NO: 7669 - protein, 11 aa, Artificial Sequence
  Description of Artificial Sequence: Synthetic peptide
  XENP018646 vhCDR3
YYGNYGGYFDV

SEQ ID NO: 7670 - protein, 11 aa, Artificial Sequence
  Description of Artificial Sequence: Synthetic peptide
  XENP018646 vlCDR1
RASQSVSNDVA

SEQ ID NO: 7671 - protein, 7 aa, Artificial Sequence
  Description of Artificial Sequence: Synthetic peptide
  XENP018646 vlCDR2
YASHRYT

SEQ ID NO: 7672 - protein, 9 aa, Artificial Sequence
  Description of Artificial Sequence: Synthetic peptide
  XENP018646 vlCDR3
QQDYSSPRT

SEQ ID NO: 7673 - protein, 249 aa, Artificial Sequence
  Description of Artificial Sequence: Synthetic polypeptide
  XENP018647 1G6_H1.147_L1_scFv(GKPGS)4
EVQLVESGGGLVKPGGSLRLSCAASGFTFSNYWMNWVRQAPGKGLEWVGEIRLKSNNYATHYVEPVKGRFTISRDDSKSTVYLQMNSLKTEDTAVYYCTRYYGNYGGYFDVWGAGTLVTVSSGKPGSGKPGSGKPGSGKPGSSIVMTQSPATLSVSPGERATLSCRASQSVSNDVAWYQQKPGQSPRLLINYASHRYTGVPDRFTGSGYGTEFTLTISSLQSEDFAVYFCQQDYSSPRTFGGGTKVEIK

SEQ ID NO: 7674 - protein, 122 aa, Artificial Sequence
  Description of Artificial Sequence: Synthetic polypeptide
  VH of XENP018647
EVQLVESGGGLVKPGGSLRLSCAASGFTFSNYWMNWVRQAPGKGLEWVGEIRLKSNNYATHYVEPVKGRFTISRDDSKSTVYLQMNSLKTEDTAVYYCTRYYGNYGGYFDVWGAGTLVTVSS

SEQ ID NO: 7675 - protein, 107 aa, Artificial Sequence; identical to SEQ ID NO: 6247
  Description of Artificial Sequence: Synthetic polypeptide
  VL of XENP018647

SEQ ID NO: 7676 - protein, 5 aa, Artificial Sequence
  Description of Artificial Sequence: Synthetic peptide
  XENP018647 vhCDR1
NYWMN

SEQ ID NO: 7677 - protein, 19 aa, Artificial Sequence
  Description of Artificial Sequence: Synthetic peptide
  XENP018647 vhCDR2
EIRLKSNNYATHYVEPVKG

SEQ ID NO: 7678 - protein, 11 aa, Artificial Sequence
  Description of Artificial Sequence: Synthetic peptide
  XENP018647 vhCDR3
YYGNYGGYFDV

SEQ ID NO: 7679 - protein, 11 aa, Artificial Sequence
  Description of Artificial Sequence: Synthetic peptide
  XENP018647 vlCDR1
RASQSVSNDVA

SEQ ID NO: 7680 - protein, 7 aa, Artificial Sequence
  Description of Artificial Sequence: Synthetic peptide
  XENP018647 vlCDR2
YASHRYT

SEQ ID NO: 7681 - protein, 9 aa, Artificial Sequence
  Description of Artificial Sequence: Synthetic peptide
  XENP018647 vlCDR3
QQDYSSPRT

SEQ ID NO: 7682 - protein, 249 aa, Artificial Sequence
  Description of Artificial Sequence: Synthetic polypeptide
  XENP018648 1G6_H1.148_L1_scFv(GKPGS)4
EVQLVESGGGLVKPGGSLRLSCAASGFTFSNYWMNWVRQAPGKGLEWVGEIRLKSNNYATHYADPVKGRFTISRDDSKSTVYLQMNSLKTEDTAVYYCTRYYGNYGGYFDVWGAGTLVTVSSGKPGSGKPGSGKPGSGKPGSSIVMTQSPATLSVSPGERATLSCRASQSVSNDVAWYQQKPGQSPRLLINYASHRYTGVPDRFTGSGYGTEFTLTISSLQSEDFAVYFCQQDYSSPRTFGGGTKVEIK

SEQ ID NO: 7683 - protein, 122 aa, Artificial Sequence
  Description of Artificial Sequence: Synthetic polypeptide
  VH of XENP018648
EVQLVESGGGLVKPGGSLRLSCAASGFTFSNYWMNWVRQAPGKGLEWVGEIRLKSNNYATHYADPVKGRFTISRDDSKSTVYLQMNSLKTEDTAVYYCTRYYGNYGGYFDVWGAGTLVTVSS

SEQ ID NO: 7684 - protein, 107 aa, Artificial Sequence; identical to SEQ ID NO: 6247
  Description of Artificial Sequence: Synthetic polypeptide
  VL of XENP018648

SEQ ID NO: 7685 - protein, 5 aa, Artificial Sequence
  Description of Artificial Sequence: Synthetic peptide
  XENP018648 vhCDR1
NYWMN

SEQ ID NO: 7686 - protein, 19 aa, Artificial Sequence
  Description of Artificial Sequence: Synthetic peptide
  XENP018648 vhCDR2
EIRLKSNNYATHYADPVKG

SEQ ID NO: 7687 - protein, 11 aa, Artificial Sequence
  Description of Artificial Sequence: Synthetic peptide
  XENP018648 vhCDR3
YYGNYGGYFDV

SEQ ID NO: 7688 - protein, 11 aa, Artificial Sequence
  Description of Artificial Sequence: Synthetic peptide
  XENP018648 vlCDR1
RASQSVSNDVA

SEQ ID NO: 7689 - protein, 7 aa, Artificial Sequence
  Description of Artificial Sequence: Synthetic peptide
  XENP018648 vlCDR2
YASHRYT

SEQ ID NO: 7690 - protein, 9 aa, Artificial Sequence
  Description of Artificial Sequence: Synthetic peptide
  XENP018648 vlCDR3
QQDYSSPRT

SEQ ID NO: 7691 - protein, 249 aa, Artificial Sequence
  Description of Artificial Sequence: Synthetic polypeptide
  XENP018649 1G6_H1.149_L1_scFv(GKPGS)4
EVQLVESGGGLVKPGGSLRLSCAASGFTFSNYWMNWVRQAPGKGLEWVGEIRLKSNNYATHYAGPVKGRFTISRDDSKSTVYLQMNSLKTEDTAVYYCTRYYGNYGGYFDVWGAGTLVTVSSGKPGSGKPGSGKPGSGKPGSSIVMTQSPATLSVSPGERATLSCRASQSVSNDVAWYQQKPGQSPRLLINYASHRYTGVPDRFTGSGYGTEFTLTISSLQSEDFAVYFCQQDYSSPRTFGGGTKVEIK

SEQ ID NO: 7692 - protein, 122 aa, Artificial Sequence
  Description of Artificial Sequence: Synthetic polypeptide
  VH of XENP018649
EVQLVESGGGLVKPGGSLRLSCAASGFTFSNYWMNWVRQAPGKGLEWVGEIRLKSNNYATHYAGPVKGRFTISRDDSKSTVYLQMNSLKTEDTAVYYCTRYYGNYGGYFDVWGAGTLVTVSS

SEQ ID NO: 7693 - protein, 107 aa, Artificial Sequence; identical to SEQ ID NO: 6247
  Description of Artificial Sequence: Synthetic polypeptide
  VL of XENP018649

SEQ ID NO: 7694 - protein, 5 aa, Artificial Sequence
  Description of Artificial Sequence: Synthetic peptide
  XENP018649 vhCDR1
NYWMN

SEQ ID NO: 7695 - protein, 19 aa, Artificial Sequence
  Description of Artificial Sequence: Synthetic peptide
  XENP018649 vhCDR2
EIRLKSNNYATHYAGPVKG

SEQ ID NO: 7696 - protein, 11 aa, Artificial Sequence
  Description of Artificial Sequence: Synthetic peptide
  XENP018649 vhCDR3
YYGNYGGYFDV

SEQ ID NO: 7697 - protein, 11 aa, Artificial Sequence
  Description of Artificial Sequence: Synthetic peptide
  XENP018649 vlCDR1
RASQSVSNDVA

SEQ ID NO: 7698 - protein, 7 aa, Artificial Sequence
  Description of Artificial Sequence: Synthetic peptide
  XENP018649 vlCDR2
YASHRYT

SEQ ID NO: 7699 - protein, 9 aa, Artificial Sequence
  Description of Artificial Sequence: Synthetic peptide
  XENP018649 vlCDR3
QQDYSSPRT

SEQ ID NO: 7700 - protein, 249 aa, Artificial Sequence
  Description of Artificial Sequence: Synthetic polypeptide
  XENP018650 1G6_H1.150_L1_scFv(GKPGS)4
EVQLVESGGGLVKPGGSLRLSCAASGFTFSNYWMNWVRQAPGKGLEWVGEIRLKSNNYATHYAAPVKGRFTISRDDSKSTVYLQMNSLKTEDTAVYYCTRYYGNYGGYFDVWGAGTLVTVSSGKPGSGKPGSGKPGSGKPGSSIVMTQSPATLSVSPGERATLSCRASQSVSNDVAWYQQKPGQSPRLLINYASHRYTGVPDRFTGSGYGTEFTLTISSLQSEDFAVYFCQQDYSSPRTFGGGTKVEIK

SEQ ID NO: 7701 - protein, 122 aa, Artificial Sequence
  Description of Artificial Sequence: Synthetic polypeptide
  VH of XENP018650
EVQLVESGGGLVKPGGSLRLSCAASGFTFSNYWMNWVRQAPGKGLEWVGEIRLKSNNYATHYAAPVKGRFTISRDDSKSTVYLQMNSLKTEDTAVYYCTRYYGNYGGYFDVWGAGTLVTVSS

SEQ ID NO: 7702 - protein, 107 aa, Artificial Sequence; identical to SEQ ID NO: 6247
  Description of Artificial Sequence: Synthetic polypeptide
  VL of XENP018650

SEQ ID NO: 7703 - protein, 5 aa, Artificial Sequence
  Description of Artificial Sequence: Synthetic peptide
  XENP018650 vhCDR1
NYWMN

SEQ ID NO: 7704 - protein, 19 aa, Artificial Sequence
  Description of Artificial Sequence: Synthetic peptide
  XENP018650 vhCDR2
EIRLKSNNYATHYAAPVKG

SEQ ID NO: 7705 - protein, 11 aa, Artificial Sequence
  Description of Artificial Sequence: Synthetic peptide
  XENP018650 vhCDR3
YYGNYGGYFDV

SEQ ID NO: 7706 - protein, 11 aa, Artificial Sequence
  Description of Artificial Sequence: Synthetic peptide
  XENP018650 vlCDR1
RASQSVSNDVA

SEQ ID NO: 7707 - protein, 7 aa, Artificial Sequence
  Description of Artificial Sequence: Synthetic peptide
  XENP018650 vlCDR2
YASHRYT

SEQ ID NO: 7708 - protein, 9 aa, Artificial Sequence
  Description of Artificial Sequence: Synthetic peptide
  XENP018650 vlCDR3
QQDYSSPRT

SEQ ID NO: 7709 - protein, 249 aa, Artificial Sequence
  Description of Artificial Sequence: Synthetic polypeptide
  XENP018651 1G6_H1.151_L1_scFv(GKPGS)4
EVQLVESGGGLVKPGGSLRLSCAASGFTFSNYWMNWVRQAPGKGLEWVGEIRLKSNNYATHYAESVKGRFTISRDDSKSTVYLQMNSLKTEDTAVYYCTRYYGNYGGYFDVWGAGTLVTVSSGKPGSGKPGSGKPGSGKPGSSIVMTQSPATLSVSPGERATLSCRASQSVSNDVAWYQQKPGQSPRLLINYASHRYTGVPDRFTGSGYGTEFTLTISSLQSEDFAVYFCQQDYSSPRTFGGGTKVEIK

SEQ ID NO: 7710 - protein, 122 aa, Artificial Sequence
  Description of Artificial Sequence: Synthetic polypeptide
  VH of XENP018651
EVQLVESGGGLVKPGGSLRLSCAASGFTFSNYWMNWVRQAPGKGLEWVGEIRLKSNNYATHYAESVKGRFTISRDDSKSTVYLQMNSLKTEDTAVYYCTRYYGNYGGYFDVWGAGTLVTVSS

SEQ ID NO: 7711 - protein, 107 aa, Artificial Sequence; identical to SEQ ID NO: 6247
  Description of Artificial Sequence: Synthetic polypeptide
  VL of XENP018651

SEQ ID NO: 7712 - protein, 5 aa, Artificial Sequence
  Description of Artificial Sequence: Synthetic peptide
  XENP018651 vhCDR1
NYWMN

SEQ ID NO: 7713 - protein, 19 aa, Artificial Sequence
  Description of Artificial Sequence: Synthetic peptide
  XENP018651 vhCDR2
EIRLKSNNYATHYAESVKG

SEQ ID NO: 7714 - protein, 11 aa, Artificial Sequence
  Description of Artificial Sequence: Synthetic peptide
  XENP018651 vhCDR3
YYGNYGGYFDV

SEQ ID NO: 7715 - protein, 11 aa, Artificial Sequence
  Description of Artificial Sequence: Synthetic peptide
  XENP018651 vlCDR1
RASQSVSNDVA

SEQ ID NO: 7716 - protein, 7 aa, Artificial Sequence
  Description of Artificial Sequence: Synthetic peptide
  XENP018651 vlCDR2
YASHRYT

SEQ ID NO: 7717 - protein, 9 aa, Artificial Sequence
  Description of Artificial Sequence: Synthetic peptide
  XENP018651 vlCDR3
QQDYSSPRT

SEQ ID NO: 7718 - protein, 249 aa, Artificial Sequence
  Description of Artificial Sequence: Synthetic polypeptide
  XENP018652 1G6_H1.152_L1_scFv(GKPGS)4
EVQLVESGGGLVKPGGSLRLSCAASGFTFSNYWMNWVRQAPGKGLEWVGEIRLKSNNYATHYAEPVKGRFTISRDNSKSTVYLQMNSLKTEDTAVYYCTRYYGNYGGYFDVWGAGTLVTVSSGKPGSGKPGSGKPGSGKPGSSIVMTQSPATLSVSPGERATLSCRASQSVSNDVAWYQQKPGQSPRLLINYASHRYTGVPDRFTGSGYGTEFTLTISSLQSEDFAVYFCQQDYSSPRTFGGGTKVEIK

SEQ ID NO: 7719 - protein, 122 aa, Artificial Sequence
  Description of Artificial Sequence: Synthetic polypeptide
  VH of XENP018652
EVQLVESGGGLVKPGGSLRLSCAASGFTFSNYWMNWVRQAPGKGLEWVGEIRLKSNNYATHYAEPVKGRFTISRDNSKSTVYLQMNSLKTEDTAVYYCTRYYGNYGGYFDVWGAGTLVTVSS

SEQ ID NO: 7720 - protein, 107 aa, Artificial Sequence; identical to SEQ ID NO: 6247
  Description of Artificial Sequence: Synthetic polypeptide
  VL of XENP018652

SEQ ID NO: 7721 - protein, 5 aa, Artificial Sequence
  Description of Artificial Sequence: Synthetic peptide
  XENP018652 vhCDR1
NYWMN

SEQ ID NO: 7722 - protein, 19 aa, Artificial Sequence
  Description of Artificial Sequence: Synthetic peptide
  XENP018652 vhCDR2
EIRLKSNNYATHYAEPVKG

SEQ ID NO: 7723 - protein, 11 aa, Artificial Sequence
  Description of Artificial Sequence: Synthetic peptide
  XENP018652 vhCDR3
YYGNYGGYFDV

SEQ ID NO: 7724 - protein, 11 aa, Artificial Sequence
  Description of Artificial Sequence: Synthetic peptide
  XENP018652 vlCDR1
RASQSVSNDVA

SEQ ID NO: 7725 - protein, 7 aa, Artificial Sequence
  Description of Artificial Sequence: Synthetic peptide
  XENP018652 vlCDR2
YASHRYT

SEQ ID NO: 7726 - protein, 9 aa, Artificial Sequence
  Description of Artificial Sequence: Synthetic peptide
  XENP018652 vlCDR3
QQDYSSPRT

SEQ ID NO: 7727 - protein, 249 aa, Artificial Sequence
  Description of Artificial Sequence: Synthetic polypeptide
  XENP018653 1G6_H1.153_L1_scFv(GKPGS)4
EVQLVESGGGLVKPGGSLRLSCAASGFTFSNYWMNWVRQAPGKGLEWVGEIRLKSNNYATHYAEPVKGRFTISRDDSKNTVYLQMNSLKTEDTAVYYCTRYYGNYGGYFDVWGAGTLVTVSSGKPGSGKPGSGKPGSGKPGSSIVMTQSPATLSVSPGERATLSCRASQSVSNDVAWYQQKPGQSPRLLINYASHRYTGVPDRFTGSGYGTEFTLTISSLQSEDFAVYFCQQDYSSPRTFGGGTKVEIK

SEQ ID NO: 7728 - protein, 122 aa, Artificial Sequence
  Description of Artificial Sequence: Synthetic polypeptide
  VH of XENP018653
EVQLVESGGGLVKPGGSLRLSCAASGFTFSNYWMNWVRQAPGKGLEWVGEIRLKSNNYATHYAEPVKGRFTISRDDSKNTVYLQMNSLKTEDTAVYYCTRYYGNYGGYFDVWGAGTLVTVSS

SEQ ID NO: 7729 - protein, 107 aa, Artificial Sequence; identical to SEQ ID NO: 6247
  Description of Artificial Sequence: Synthetic polypeptide
  VL of XENP018653

SEQ ID NO: 7730 - protein, 5 aa, Artificial Sequence
  Description of Artificial Sequence: Synthetic peptide
  XENP018653 vhCDR1
NYWMN

SEQ ID NO: 7731 - protein, 19 aa, Artificial Sequence
  Description of Artificial Sequence: Synthetic peptide
  XENP018653 vhCDR2
EIRLKSNNYATHYAEPVKG

SEQ ID NO: 7732 - protein, 11 aa, Artificial Sequence
  Description of Artificial Sequence: Synthetic peptide
  XENP018653 vhCDR3
YYGNYGGYFDV

SEQ ID NO: 7733 - protein, 11 aa, Artificial Sequence
  Description of Artificial Sequence: Synthetic peptide
  XENP018653 vlCDR1
RASQSVSNDVA

SEQ ID NO: 7734 - protein, 7 aa, Artificial Sequence
  Description of Artificial Sequence: Synthetic peptide
  XENP018653 vlCDR2
YASHRYT

SEQ ID NO: 7735 - protein, 9 aa, Artificial Sequence
  Description of Artificial Sequence: Synthetic peptide
  XENP018653 vlCDR3
QQDYSSPRT

SEQ ID NO: 7736 - protein, 249 aa, Artificial Sequence
  Description of Artificial Sequence: Synthetic polypeptide
  XENP018654 1G6_H1.154_L1_scFv(GKPGS)4
EVQLVESGGGLVKPGGSLRLSCAASGFTFSNYWMNWVRQAPGKGLEWVGEIRLKSNNYATHYAEPVKGRFTISRDDSKSSVYLQMNSLKTEDTAVYYCTRYYGNYGGYFDVWGAGTLVTVSSGKPGSGKPGSGKPGSGKPGSSIVMTQSPATLSVSPGERATLSCRASQSVSNDVAWYQQKPGQSPRLLINYASHRYTGVPDRFTGSGYGTEFTLTISSLQSEDFAVYFCQQDYSSPRTFGGGTKVEIK

SEQ ID NO: 7737 - protein, 122 aa, Artificial Sequence
  Description of Artificial Sequence: Synthetic polypeptide
  VH of XENP018654
EVQLVESGGGLVKPGGSLRLSCAASGFTFSNYWMNWVRQAPGKGLEWVGEIRLKSNNYATHYAEPVKGRFTISRDDSKSSVYLQMNSLKTEDTAVYYCTRYYGNYGGYFDVWGAGTLVTVSS

SEQ ID NO: 7738 - protein, 107 aa, Artificial Sequence; identical to SEQ ID NO: 6247
  Description of Artificial Sequence: Synthetic polypeptide
  VL of XENP018654

SEQ ID NO: 7739 - protein, 5 aa, Artificial Sequence
  Description of Artificial Sequence: Synthetic peptide
  XENP018654 vhCDR1
NYWMN

SEQ ID NO: 7740 - protein, 19 aa, Artificial Sequence
  Description of Artificial Sequence: Synthetic peptide
  XENP018654 vhCDR2
EIRLKSNNYATHYAEPVKG

SEQ ID NO: 7741 - protein, 11 aa, Artificial Sequence
  Description of Artificial Sequence: Synthetic peptide
  XENP018654 vhCDR3
YYGNYGGYFDV

SEQ ID NO: 7742 - protein, 11 aa, Artificial Sequence
  Description of Artificial Sequence: Synthetic peptide
  XENP018654 vlCDR1
RASQSVSNDVA

SEQ ID NO: 7743 - protein, 7 aa, Artificial Sequence
  Description of Artificial Sequence: Synthetic peptide
  XENP018654 vlCDR2
YASHRYT

SEQ ID NO: 7744 - protein, 9 aa, Artificial Sequence
  Description of Artificial Sequence: Synthetic peptide
  XENP018654 vlCDR3
QQDYSSPRT

SEQ ID NO: 7745 - protein, 249 aa, Artificial Sequence
  Description of Artificial Sequence: Synthetic polypeptide
  XENP018655 1G6_H1.155_L1_scFv(GKPGS)4
EVQLVESGGGLVKPGGSLRLSCAASGFTFSNYWMNWVRQAPGKGLEWVGEIRLKSNNYATHYAEPVKGRFTISRDDSKSTLYLQMNSLKTEDTAVYYCTRYYGNYGGYFDVWGAGTLVTVSSGKPGSGKPGSGKPGSGKPGSSIVMTQSPATLSVSPGERATLSCRASQSVSNDVAWYQQKPGQSPRLLINYASHRYTGVPDRFTGSGYGTEFTLTISSLQSEDFAVYFCQQDYSSPRTFGGGTKVEIK

SEQ ID NO: 7746 - protein, 122 aa, Artificial Sequence
  Description of Artificial Sequence: Synthetic polypeptide
  VH of XENP018655
EVQLVESGGGLVKPGGSLRLSCAASGFTFSNYWMNWVRQAPGKGLEWVGEIRLKSNNYATHYAEPVKGRFTISRDDSKSTLYLQMNSLKTEDTAVYYCTRYYGNYGGYFDVWGAGTLVTVSS

SEQ ID NO: 7747 - protein, 107 aa, Artificial Sequence; identical to SEQ ID NO: 6247
  Description of Artificial Sequence: Synthetic polypeptide
  VL of XENP018655

SEQ ID NO: 7748 - protein, 5 aa, Artificial Sequence
  Description of Artificial Sequence: Synthetic peptide
  XENP018655 vhCDR1
NYWMN

SEQ ID NO: 7749 - protein, 19 aa, Artificial Sequence
  Description of Artificial Sequence: Synthetic peptide
  XENP018655 vhCDR2
EIRLKSNNYATHYAEPVKG

SEQ ID NO: 7750 - protein, 11 aa, Artificial Sequence
  Description of Artificial Sequence: Synthetic peptide
  XENP018655 vhCDR3
YYGNYGGYFDV

SEQ ID NO: 7751 - protein, 11 aa, Artificial Sequence
  Description of Artificial Sequence: Synthetic peptide
  XENP018655 vlCDR1
RASQSVSNDVA

SEQ ID NO: 7752 - protein, 7 aa, Artificial Sequence
  Description of Artificial Sequence: Synthetic peptide
  XENP018655 vlCDR2
YASHRYT

SEQ ID NO: 7753 - protein, 9 aa, Artificial Sequence
  Description of Artificial Sequence: Synthetic peptide
  XENP018655 vlCDR3
QQDYSSPRT

SEQ ID NO: 7754 - protein, 249 aa, Artificial Sequence
  Description of Artificial Sequence: Synthetic polypeptide
  XENP018656 1G6_H1.156_L1_scFv(GKPGS)4
EVQLVESGGGLVKPGGSLRLSCAASGFTFSNYWMNWVRQAPGKGLEWVGEIRLKSNNYATHYAEPVKGRFTISRDDSKSTAYLQMNSLKTEDTAVYYCTRYYGNYGGYFDVWGAGTLVTVSSGKPGSGKPGSGKPGSGKPGSSIVMTQSPATLSVSPGERATLSCRASQSVSNDVAWYQQKPGQSPRLLINYASHRYTGVPDRFTGSGYGTEFTLTISSLQSEDFAVYFCQQDYSSPRTFGGGTKVEIK

SEQ ID NO: 7755 - protein, 122 aa, Artificial Sequence
  Description of Artificial Sequence: Synthetic polypeptide
  VH of XENP018656
EVQLVESGGGLVKPGGSLRLSCAASGFTFSNYWMNWVRQAPGKGLEWVGEIRLKSNNYATHYAEPVKGRFTISRDDSKSTAYLQMNSLKTEDTAVYYCTRYYGNYGGYFDVWGAGTLVTVSS

SEQ ID NO: 7756 - protein, 107 aa, Artificial Sequence; identical to SEQ ID NO: 6247
  Description of Artificial Sequence: Synthetic polypeptide
  VL of XENP018656

SEQ ID NO: 7757 - protein, 5 aa, Artificial Sequence
  Description of Artificial Sequence: Synthetic peptide
  XENP018656 vhCDR1
NYWMN

SEQ ID NO: 7758 - protein, 19 aa, Artificial Sequence
  Description of Artificial Sequence: Synthetic peptide
  XENP018656 vhCDR2
EIRLKSNNYATHYAEPVKG

SEQ ID NO: 7759 - protein, 11 aa, Artificial Sequence
  Description of Artificial Sequence: Synthetic peptide
  XENP018656 vhCDR3
YYGNYGGYFDV

SEQ ID NO: 7760 - protein, 11 aa, Artificial Sequence
  Description of Artificial Sequence: Synthetic peptide
  XENP018656 vlCDR1
RASQSVSNDVA

SEQ ID NO: 7761 - protein, 7 aa, Artificial Sequence
  Description of Artificial Sequence: Synthetic peptide
  XENP018656 vlCDR2
YASHRYT

SEQ ID NO: 7762 - protein, 9 aa, Artificial Sequence
  Description of Artificial Sequence: Synthetic peptide
  XENP018656 vlCDR3
QQDYSSPRT

SEQ ID NO: 7763 - protein, 249 aa, Artificial Sequence
  Description of Artificial Sequence: Synthetic polypeptide
  XENP018657 1G6_H1.157_L1_scFv(GKPGS)4
EVQLVESGGGLVKPGGSLRLSCAASGFTFSNYWMNWVRQAPGKGLEWVGEIRLKSNNYATHYAEPVKGRFTISRDDSKSTVYLQMNNLKTEDTAVYYCTRYYGNYGGYFDVWGAGTLVTVSSGKPGSGKPGSGKPGSGKPGSSIVMTQSPATLSVSPGERATLSCRASQSVSNDVAWYQQKPGQSPRLLINYASHRYTGVPDRFTGSGYGTEFTLTISSLQSEDFAVYFCQQDYSSPRTFGGGTKVEIK

SEQ ID NO: 7764 - protein, 122 aa, Artificial Sequence
  Description of Artificial Sequence: Synthetic polypeptide
  VH of XENP018657
EVQLVESGGGLVKPGGSLRLSCAASGFTFSNYWMNWVRQAPGKGLEWVGEIRLKSNNYATHYAEPVKGRFTISRDDSKSTVYLQMNNLKTEDTAVYYCTRYYGNYGGYFDVWGAGTLVTVSS

SEQ ID NO: 7765 - protein, 107 aa, Artificial Sequence; identical to SEQ ID NO: 6247
  Description of Artificial Sequence: Synthetic polypeptide
  VL of XENP018657

SEQ ID NO: 7766 - protein, 5 aa, Artificial Sequence
  Description of Artificial Sequence: Synthetic peptide
  XENP018657 vhCDR1
NYWMN

SEQ ID NO: 7767 - protein, 19 aa, Artificial Sequence
  Description of Artificial Sequence: Synthetic peptide
  XENP018657 vhCDR2
EIRLKSNNYATHYAEPVKG

SEQ ID NO: 7768 - protein, 11 aa, Artificial Sequence
  Description of Artificial Sequence: Synthetic peptide
  XENP018657 vhCDR3
YYGNYGGYFDV

SEQ ID NO: 7769 - protein, 11 aa, Artificial Sequence
  Description of Artificial Sequence: Synthetic peptide
  XENP018657 vlCDR1
RASQSVSNDVA

SEQ ID NO: 7770 - protein, 7 aa, Artificial Sequence
  Description of Artificial Sequence: Synthetic peptide
  XENP018657 vlCDR2
YASHRYT

SEQ ID NO: 7771 - protein, 9 aa, Artificial Sequence
  Description of Artificial Sequence: Synthetic peptide
  XENP018657 vlCDR3
QQDYSSPRT

SEQ ID NO: 7772 - protein, 249 aa, Artificial Sequence
  Description of Artificial Sequence: Synthetic polypeptide
  XENP018658 1G6_H1.158_L1_scFv(GKPGS)4
EVQLVESGGGLVKPGGSLRLSCAASGFTFSNYWMNWVRQAPGKGLEWVGEIRLKSNNYATHYAEPVKGRFTISRDDSKSTVYLQMNSLRTEDTAVYYCTRYYGNYGGYFDVWGAGTLVTVSSGKPGSGKPGSGKPGSGKPGSSIVMTQSPATLSVSPGERATLSCRASQSVSNDVAWYQQKPGQSPRLLINYASHRYTGVPDRFTGSGYGTEFTLTISSLQSEDFAVYFCQQDYSSPRTFGGGTKVEIK

SEQ ID NO: 7773 - protein, 122 aa, Artificial Sequence
  Description of Artificial Sequence: Synthetic polypeptide
  VH of XENP018658
EVQLVESGGGLVKPGGSLRLSCAASGFTFSNYWMNWVRQAPGKGLEWVGEIRLKSNNYATHYAEPVKGRFTISRDDSKSTVYLQMNSLRTEDTAVYYCTRYYGNYGGYFDVWGAGTLVTVSS

SEQ ID NO: 7774 - protein, 107 aa, Artificial Sequence; identical to SEQ ID NO: 6247
  Description of Artificial Sequence: Synthetic polypeptide
  VL of XENP018658

SEQ ID NO: 7775 - protein, 5 aa, Artificial Sequence
  Description of Artificial Sequence: Synthetic peptide
  XENP018658 vhCDR1
NYWMN

SEQ ID NO: 7776 - protein, 19 aa, Artificial Sequence
  Description of Artificial Sequence: Synthetic peptide
  XENP018658 vhCDR2
EIRLKSNNYATHYAEPVKG

SEQ ID NO: 7777 - protein, 11 aa, Artificial Sequence
  Description of Artificial Sequence: Synthetic peptide
  XENP018658 vhCDR3
YYGNYGGYFDV

SEQ ID NO: 7778 - protein, 11 aa, Artificial Sequence
  Description of Artificial Sequence: Synthetic peptide
  XENP018658 vlCDR1
RASQSVSNDVA

SEQ ID NO: 7779 - protein, 7 aa, Artificial Sequence
  Description of Artificial Sequence: Synthetic peptide
  XENP018658 vlCDR2
YASHRYT

SEQ ID NO: 7780 - protein, 9 aa, Artificial Sequence
  Description of Artificial Sequence: Synthetic peptide
  XENP018658 vlCDR3
QQDYSSPRT

SEQ ID NO: 7781 - protein, 249 aa, Artificial Sequence
  Description of Artificial Sequence: Synthetic polypeptide
  XENP018659 1G6_H1.159_L1_scFv(GKPGS)4
EVQLVESGGGLVKPGGSLRLSCAASGFTFSNYWMNWVRQAPGKGLEWVGEIRLKSNNYATHYAEPVKGRFTISRDDSKSTVYLQMNSLKAEDTAVYYCTRYYGNYGGYFDVWGAGTLVTVSSGKPGSGKPGSGKPGSGKPGSSIVMTQSPATLSVSPGERATLSCRASQSVSNDVAWYQQKPGQSPRLLINYASHRYTGVPDRFTGSGYGTEFTLTISSLQSEDFAVYFCQQDYSSPRTFGGGTKVEIK

SEQ ID NO: 7782 - protein, 122 aa, Artificial Sequence
  Description of Artificial Sequence: Synthetic polypeptide
  VH of XENP018659
EVQLVESGGGLVKPGGSLRLSCAASGFTFSNYWMNWVRQAPGKGLEWVGEIRLKSNNYATHYAEPVKGRFTISRDDSKSTVYLQMNSLKAEDTAVYYCTRYYGNYGGYFDVWGAGTLVTVSS

SEQ ID NO: 7783 - protein, 107 aa, Artificial Sequence; identical to SEQ ID NO: 6247
  Description of Artificial Sequence: Synthetic polypeptide
  VL of XENP018659

SEQ ID NO: 7784 - protein, 5 aa, Artificial Sequence
  Description of Artificial Sequence: Synthetic peptide
  XENP018659 vhCDR1
NYWMN

SEQ ID NO: 7785 - protein, 19 aa, Artificial Sequence
  Description of Artificial Sequence: Synthetic peptide
  XENP018659 vhCDR2
EIRLKSNNYATHYAEPVKG

SEQ ID NO: 7786 - protein, 11 aa, Artificial Sequence
  Description of Artificial Sequence: Synthetic peptide
  XENP018659 vhCDR3
YYGNYGGYFDV

SEQ ID NO: 7787 - protein, 11 aa, Artificial Sequence
  Description of Artificial Sequence: Synthetic peptide
  XENP018659 vlCDR1
RASQSVSNDVA

SEQ ID NO: 7788 - protein, 7 aa, Artificial Sequence
  Description of Artificial Sequence: Synthetic peptide
  XENP018659 vlCDR2
YASHRYT

SEQ ID NO: 7789 - protein, 9 aa, Artificial Sequence
  Description of Artificial Sequence: Synthetic peptide
  XENP018659 vlCDR3
QQDYSSPRT

SEQ ID NO: 7790 - protein, 249 aa, Artificial Sequence
  Description of Artificial Sequence: Synthetic polypeptide
  XENP018660 1G6_H1.160_L1_scFv(GKPGS)4
EVQLVESGGGLVKPGGSLRLSCAASGFTFSNYWMNWVRQAPGKGLEWVGEIRLKSNNYATHYAEPVKGRFTISRDDSKSTVYLQMNSLKTEDTGVYYCTRYYGNYGGYFDVWGAGTLVTVSSGKPGSGKPGSGKPGSGKPGSSIVMTQSPATLSVSPGERATLSCRASQSVSNDVAWYQQKPGQSPRLLINYASHRYTGVPDRFTGSGYGTEFTLTISSLQSEDFAVYFCQQDYSSPRTFGGGTKVEIK

SEQ ID NO: 7791 - protein, 122 aa, Artificial Sequence
  Description of Artificial Sequence: Synthetic polypeptide
  VH of XENP018660
EVQLVESGGGLVKPGGSLRLSCAASGFTFSNYWMNWVRQAPGKGLEWVGEIRLKSNNYATHYAEPVKGRFTISRDDSKSTVYLQMNSLKTEDTGVYYCTRYYGNYGGYFDVWGAGTLVTVSS

SEQ ID NO: 7792 - protein, 107 aa, Artificial Sequence; identical to SEQ ID NO: 6247
  Description of Artificial Sequence: Synthetic polypeptide
  VL of XENP018660

SEQ ID NO: 7793 - protein, 5 aa, Artificial Sequence
  Description of Artificial Sequence: Synthetic peptide
  XENP018660 vhCDR1
NYWMN

SEQ ID NO: 7794 - protein, 19 aa, Artificial Sequence
  Description of Artificial Sequence: Synthetic peptide
  XENP018660 vhCDR2
EIRLKSNNYATHYAEPVKG

SEQ ID NO: 7795 - protein, 11 aa, Artificial Sequence
  Description of Artificial Sequence: Synthetic peptide
  XENP018660 vhCDR3
YYGNYGGYFDV

SEQ ID NO: 7796 - protein, 11 aa, Artificial Sequence
  Description of Artificial Sequence: Synthetic peptide
  XENP018660 vlCDR1
RASQSVSNDVA

SEQ ID NO: 7797 - protein, 7 aa, Artificial Sequence
  Description of Artificial Sequence: Synthetic peptide
  XENP018660 vlCDR2
YASHRYT

SEQ ID NO: 7798 - protein, 9 aa, Artificial Sequence
  Description of Artificial Sequence: Synthetic peptide
  XENP018660 vlCDR3
QQDYSSPRT

SEQ ID NO: 7799 - protein, 249 aa, Artificial Sequence
  Description of Artificial Sequence: Synthetic polypeptide
  XENP018661 1G6_H1.161_L1_scFv(GKPGS)4
EVQLVESGGGLVKPGGSLRLSCAASGFTFSNYWMNWVRQAPGKGLEWVGEIRLKSNNYATHYAEPVKGRFTISRDDSKSTVYLQMNSLKTEDTAIYYCTRYYGNYGGYFDVWGAGTLVTVSSGKPGSGKPGSGKPGSGKPGSSIVMTQSPATLSVSPGERATLSCRASQSVSNDVAWYQQKPGQSPRLLINYASHRYTGVPDRFTGSGYGTEFTLTISSLQSEDFAVYFCQQDYSSPRTFGGGTKVEIK

SEQ ID NO: 7800 - protein, 122 aa, Artificial Sequence
  Description of Artificial Sequence: Synthetic polypeptide
  VH of XENP018661
EVQLVESGGGLVKPGGSLRLSCAASGFTFSNYWMNWVRQAPGKGLEWVGEIRLKSNNYATHYAEPVKGRFTISRDDSKSTVYLQMNSLKTEDTAIYYCTRYYGNYGGYFDVWGAGTLVTVSS

SEQ ID NO: 7801 - protein, 107 aa, Artificial Sequence; identical to SEQ ID NO: 6247
  Description of Artificial Sequence: Synthetic polypeptide
  VL of XENP018661

SEQ ID NO: 7802 - protein, 5 aa, Artificial Sequence
  Description of Artificial Sequence: Synthetic peptide
  XENP018661 vhCDR1
NYWMN

SEQ ID NO: 7803 - protein, 19 aa, Artificial Sequence
  Description of Artificial Sequence: Synthetic peptide
  XENP018661 vhCDR2
EIRLKSNNYATHYAEPVKG

SEQ ID NO: 7804 - protein, 11 aa, Artificial Sequence
  Description of Artificial Sequence: Synthetic peptide
  XENP018661 vhCDR3
YYGNYGGYFDV

SEQ ID NO: 7805 - protein, 11 aa, Artificial Sequence
  Description of Artificial Sequence: Synthetic peptide
  XENP018661 vlCDR1
RASQSVSNDVA

SEQ ID NO: 7806 - protein, 7 aa, Artificial Sequence
  Description of Artificial Sequence: Synthetic peptide
  XENP018661 vlCDR2
YASHRYT

SEQ ID NO: 7807 - protein, 9 aa, Artificial Sequence
  Description of Artificial Sequence: Synthetic peptide
  XENP018661 vlCDR3
QQDYSSPRT

SEQ ID NO: 7808 - protein, 249 aa, Artificial Sequence
  Description of Artificial Sequence: Synthetic polypeptide
  XENP018662 1G6_H1.162_L1_scFv(GKPGS)4
EVQLVESGGGLVKPGGSLRLSCAASGFTFSNYWMNWVRQAPGKGLEWVGEIRLKSNNYATHYAEPVKGRFTISRDDSKSTVYLQMNSLKTEDTAVYHCTRYYGNYGGYFDVWGAGTLVTVSSGKPGSGKPGSGKPGSGKPGSSIVMTQSPATLSVSPGERATLSCRASQSVSNDVAWYQQKPGQSPRLLINYASHRYTGVPDRFTGSGYGTEFTLTISSLQSEDFAVYFCQQDYSSPRTFGGGTKVEIK

SEQ ID NO: 7809 - protein, 122 aa, Artificial Sequence
  Description of Artificial Sequence: Synthetic polypeptide
  VH of XENP018662
EVQLVESGGGLVKPGGSLRLSCAASGFTFSNYWMNWVRQAPGKGLEWVGEIRLKSNNYATHYAEPVKGRFTISRDDSKSTVYLQMNSLKTEDTAVYHCTRYYGNYGGYFDVWGAGTLVTVSS

SEQ ID NO: 7810 - protein, 107 aa, Artificial Sequence; identical to SEQ ID NO: 6247
  Description of Artificial Sequence: Synthetic polypeptide
  VL of XENP018662

SEQ ID NO: 7811 - protein, 5 aa, Artificial Sequence
  Description of Artificial Sequence: Synthetic peptide
  XENP018662 vhCDR1
NYWMN

SEQ ID NO: 7812 - protein, 19 aa, Artificial Sequence
  Description of Artificial Sequence: Synthetic peptide
  XENP018662 vhCDR2
EIRLKSNNYATHYAEPVKG

SEQ ID NO: 7813 - protein, 11 aa, Artificial Sequence
  Description of Artificial Sequence: Synthetic peptide
  XENP018662 vhCDR3
YYGNYGGYFDV

SEQ ID NO: 7814 - protein, 11 aa, Artificial Sequence
  Description of Artificial Sequence: Synthetic peptide
  XENP018662 vlCDR1
RASQSVSNDVA

SEQ ID NO: 7815 - protein, 7 aa, Artificial Sequence
  Description of Artificial Sequence: Synthetic peptide
  XENP018662 vlCDR2
YASHRYT

SEQ ID NO: 7816 - protein, 9 aa, Artificial Sequence
  Description of Artificial Sequence: Synthetic peptide
  XENP018662 vlCDR3
QQDYSSPRT

SEQ ID NO: 7817 - protein, 249 aa, Artificial Sequence
  Description of Artificial Sequence: Synthetic polypeptide
  XENP018663 1G6_H1.163_L1_scFv(GKPGS)4
EVQLVESGGGLVKPGGSLRLSCAASGFTFSNYWMNWVRQAPGKGLEWVGEIRLKSNNYATHYAEPVKGRFTISRDDSKSTVYLQMNSLKTEDTAVYYCARYYGNYGGYFDVWGAGTLVTVSSGKPGSGKPGSGKPGSGKPGSSIVMTQSPATLSVSPGERATLSCRASQSVSNDVAWYQQKPGQSPRLLINYASHRYTGVPDRFTGSGYGTEFTLTISSLQSEDFAVYFCQQDYSSPRTFGGGTKVEIK

SEQ ID NO: 7818 - protein, 122 aa, Artificial Sequence
  Description of Artificial Sequence: Synthetic polypeptide
  VH of XENP018663
EVQLVESGGGLVKPGGSLRLSCAASGFTFSNYWMNWVRQAPGKGLEWVGEIRLKSNNYATHYAEPVKGRFTISRDDSKSTVYLQMNSLKTEDTAVYYCARYYGNYGGYFDVWGAGTLVTVSS

SEQ ID NO: 7819 - protein, 107 aa, Artificial Sequence; identical to SEQ ID NO: 6247
  Description of Artificial Sequence: Synthetic polypeptide
  VL of XENP018663

SEQ ID NO: 7820 - protein, 5 aa, Artificial Sequence
  Description of Artificial Sequence: Synthetic peptide
  XENP018663 vhCDR1
NYWMN

SEQ ID NO: 7821 - protein, 19 aa, Artificial Sequence
  Description of Artificial Sequence: Synthetic peptide
  XENP018663 vhCDR2
EIRLKSNNYATHYAEPVKG

SEQ ID NO: 7822 - protein, 11 aa, Artificial Sequence
  Description of Artificial Sequence: Synthetic peptide
  XENP018663 vhCDR3
YYGNYGGYFDV

SEQ ID NO: 7823 - protein, 11 aa, Artificial Sequence
  Description of Artificial Sequence: Synthetic peptide
  XENP018663 vlCDR1
RASQSVSNDVA

SEQ ID NO: 7824 - protein, 7 aa, Artificial Sequence
  Description of Artificial Sequence: Synthetic peptide
  XENP018663 vlCDR2
YASHRYT

SEQ ID NO: 7825 - protein, 9 aa, Artificial Sequence
  Description of Artificial Sequence: Synthetic peptide
  XENP018663 vlCDR3
QQDYSSPRT

SEQ ID NO: 7826 - protein, 249 aa, Artificial Sequence
  Description of Artificial Sequence: Synthetic polypeptide
  XENP018664 1G6_H1.164_L1_scFv(GKPGS)4
EVQLVESGGGLVKPGGSLRLSCAASGFTFSNYWMNWVRQAPGKGLEWVGEIRLKSNNYATHYAEPVKGRFTISRDDSKSTVYLQMNSLKTEDTAVYYCVRYYGNYGGYFDVWGAGTLVTVSSGKPGSGKPGSGKPGSGKPGSSIVMTQSPATLSVSPGERATLSCRASQSVSNDVAWYQQKPGQSPRLLINYASHRYTGVPDRFTGSGYGTEFTLTISSLQSEDFAVYFCQQDYSSPRTFGGGTKVEIK

SEQ ID NO: 7827 - protein, 122 aa, Artificial Sequence
  Description of Artificial Sequence: Synthetic polypeptide
  VH of XENP018664
EVQLVESGGGLVKPGGSLRLSCAASGFTFSNYWMNWVRQAPGKGLEWVGEIRLKSNNYATHYAEPVKGRFTISRDDSKSTVYLQMNSLKTEDTAVYYCVRYYGNYGGYFDVWGAGTLVTVSS

SEQ ID NO: 7828 - protein, 107 aa, Artificial Sequence; identical to SEQ ID NO: 6247
  Description of Artificial Sequence: Synthetic polypeptide
  VL of XENP018664

SEQ ID NO: 7829 - protein, 5 aa, Artificial Sequence
  Description of Artificial Sequence: Synthetic peptide
  XENP018664 vhCDR1
NYWMN

SEQ ID NO: 7830 - protein, 19 aa, Artificial Sequence
  Description of Artificial Sequence: Synthetic peptide
  XENP018664 vhCDR2
EIRLKSNNYATHYAEPVKG

SEQ ID NO: 7831 - protein, 11 aa, Artificial Sequence
  Description of Artificial Sequence: Synthetic peptide
  XENP018664 vhCDR3
YYGNYGGYFDV

SEQ ID NO: 7832 - protein, 11 aa, Artificial Sequence
  Description of Artificial Sequence: Synthetic peptide
  XENP018664 vlCDR1
RASQSVSNDVA

SEQ ID NO: 7833 - protein, 7 aa, Artificial Sequence
  Description of Artificial Sequence: Synthetic peptide
  XENP018664 vlCDR2
YASHRYT

SEQ ID NO: 7834 - protein, 9 aa, Artificial Sequence
  Description of Artificial Sequence: Synthetic peptide
  XENP018664 vlCDR3
QQDYSSPRT

SEQ ID NO: 7835 - protein, 249 aa, Artificial Sequence
  Description of Artificial Sequence: Synthetic polypeptide
  XENP018665 1G6_H1.165_L1_scFv(GKPGS)4
EVQLVESGGGLVKPGGSLRLSCAASGFTFSNYWMNWVRQAPGKGLEWVGEIRLKSNNYATHYAEPVKGRFTISRDDSKSTVYLQMNSLKTEDTAVYYCTTYYGNYGGYFDVWGAGTLVTVSSGKPGSGKPGSGKPGSGKPGSSIVMTQSPATLSVSPGERATLSCRASQSVSNDVAWYQQKPGQSPRLLINYASHRYTGVPDRFTGSGYGTEFTLTISSLQSEDFAVYFCQQDYSSPRTFGGGTKVEIK

SEQ ID NO: 7836 - protein, 122 aa, Artificial Sequence
  Description of Artificial Sequence: Synthetic polypeptide
  VH of XENP018665
EVQLVESGGGLVKPGGSLRLSCAASGFTFSNYWMNWVRQAPGKGLEWVGEIRLKSNNYATHYAEPVKGRFTISRDDSKSTVYLQMNSLKTEDTAVYYCTTYYGNYGGYFDVWGAGTLVTVSS

SEQ ID NO: 7837 - protein, 107 aa, Artificial Sequence; identical to SEQ ID NO: 6247
  Description of Artificial Sequence: Synthetic polypeptide
  VL of XENP018665

SEQ ID NO: 7838 - protein, 5 aa, Artificial Sequence
  Description of Artificial Sequence: Synthetic peptide
  XENP018665 vhCDR1
NYWMN

SEQ ID NO: 7839 - protein, 19 aa, Artificial Sequence
  Description of Artificial Sequence: Synthetic peptide
  XENP018665 vhCDR2
EIRLKSNNYATHYAEPVKG

SEQ ID NO: 7840 - protein, 11 aa, Artificial Sequence
  Description of Artificial Sequence: Synthetic peptide
  XENP018665 vhCDR3
YYGNYGGYFDV

SEQ ID NO: 7841 - protein, 11 aa, Artificial Sequence
  Description of Artificial Sequence: Synthetic peptide
  XENP018665 vlCDR1
RASQSVSNDVA

SEQ ID NO: 7842 - protein, 7 aa, Artificial Sequence
  Description of Artificial Sequence: Synthetic peptide
  XENP018665 vlCDR2
YASHRYT

SEQ ID NO: 7843 - protein, 9 aa, Artificial Sequence
  Description of Artificial Sequence: Synthetic peptide
  XENP018665 vlCDR3
QQDYSSPRT

SEQ ID NO: 7844 - protein, 249 aa, Artificial Sequence
  Description of Artificial Sequence: Synthetic polypeptide
  XENP018666 1G6_H1.166_L1_scFv(GKPGS)4
EVQLVESGGGLVKPGGSLRLSCAASGFTFSNYWMNWVRQAPGKGLEWVGEIRLKSNNYATHYAEPVKGRFTISRDDSKSTVYLQMNSLKTEDTAVYYCTKYYGNYGGYFDVWGAGTLVTVSSGKPGSGKPGSGKPGSGKPGSSIVMTQSPATLSVSPGERATLSCRASQSVSNDVAWYQQKPGQSPRLLINYASHRYTGVPDRFTGSGYGTEFTLTISSLQSEDFAVYFCQQDYSSPRTFGGGTKVEIK

SEQ ID NO: 7845 - protein, 122 aa, Artificial Sequence
  Description of Artificial Sequence: Synthetic polypeptide
  VH of XENP018666
EVQLVESGGGLVKPGGSLRLSCAASGFTFSNYWMNWVRQAPGKGLEWVGEIRLKSNNYATHYAEPVKGRFTISRDDSKSTVYLQMNSLKTEDTAVYYCTKYYGNYGGYFDVWGAGTLVTVSS

SEQ ID NO: 7846 - protein, 107 aa, Artificial Sequence; identical to SEQ ID NO: 6247
  Description of Artificial Sequence: Synthetic polypeptide
  VL of XENP018666

SEQ ID NO: 7847 - protein, 5 aa, Artificial Sequence
  Description of Artificial Sequence: Synthetic peptide
  XENP018666 vhCDR1
NYWMN

SEQ ID NO: 7848 - protein, 19 aa, Artificial Sequence
  Description of Artificial Sequence: Synthetic peptide
  XENP018666 vhCDR2
EIRLKSNNYATHYAEPVKG

SEQ ID NO: 7849 - protein, 11 aa, Artificial Sequence
  Description of Artificial Sequence: Synthetic peptide
  XENP018666 vhCDR3
YYGNYGGYFDV

SEQ ID NO: 7850 - protein, 11 aa, Artificial Sequence
  Description of Artificial Sequence: Synthetic peptide
  XENP018666 vlCDR1
RASQSVSNDVA

SEQ ID NO: 7851 - protein, 7 aa, Artificial Sequence
  Description of Artificial Sequence: Synthetic peptide
  XENP018666 vlCDR2
YASHRYT

SEQ ID NO: 7852 - protein, 9 aa, Artificial Sequence
  Description of Artificial Sequence: Synthetic peptide
  XENP018666 vlCDR3
QQDYSSPRT

SEQ ID NO: 7853 - protein, 249 aa, Artificial Sequence
  Description of Artificial Sequence: Synthetic polypeptide
  XENP018667 1G6_H1.167_L1_scFv(GKPGS)4
EVQLVESGGGLVKPGGSLRLSCAASGFTFSNYWMNWVRQAPGKGLEWVGEIRLKSNNYATHYAEPVKGRFTISRDDSKSTVYLQMNSLKTEDTAVYYCTRFYGNYGGYFDVWGAGTLVTVSSGKPGSGKPGSGKPGSGKPGSSIVMTQSPATLSVSPGERATLSCRASQSVSNDVAWYQQKPGQSPRLLINYASHRYTGVPDRFTGSGYGTEFTLTISSLQSEDFAVYFCQQDYSSPRTFGGGTKVEIK

SEQ ID NO: 7854 - protein, 122 aa, Artificial Sequence
  Description of Artificial Sequence: Synthetic polypeptide
  VH of XENP018667
EVQLVESGGGLVKPGGSLRLSCAASGFTFSNYWMNWVRQAPGKGLEWVGEIRLKSNNYATHYAEPVKGRFTISRDDSKSTVYLQMNSLKTEDTAVYYCTRFYGNYGGYFDVWGAGTLVTVSS

SEQ ID NO: 7855 - protein, 107 aa, Artificial Sequence; identical to SEQ ID NO: 6247
  Description of Artificial Sequence: Synthetic polypeptide
  VL of XENP018667

SEQ ID NO: 7856 - protein, 5 aa, Artificial Sequence
  Description of Artificial Sequence: Synthetic peptide
  XENP018667 vhCDR1
NYWMN

SEQ ID NO: 7857 - protein, 19 aa, Artificial Sequence
  Description of Artificial Sequence: Synthetic peptide
  XENP018667 vhCDR2
EIRLKSNNYATHYAEPVKG

SEQ ID NO: 7858 - protein, 11 aa, Artificial Sequence
  Description of Artificial Sequence: Synthetic peptide
  XENP018667 vhCDR3
FYGNYGGYFDV

SEQ ID NO: 7859 - protein, 11 aa, Artificial Sequence
  Description of Artificial Sequence: Synthetic peptide
  XENP018667 vlCDR1
RASQSVSNDVA

SEQ ID NO: 7860 - protein, 7 aa, Artificial Sequence
  Description of Artificial Sequence: Synthetic peptide
  XENP018667 vlCDR2
YASHRYT

SEQ ID NO: 7861 - protein, 9 aa, Artificial Sequence
  Description of Artificial Sequence: Synthetic peptide
  XENP018667 vlCDR3
QQDYSSPRT

SEQ ID NO: 7862 - protein, 249 aa, Artificial Sequence
  Description of Artificial Sequence: Synthetic polypeptide
  XENP018668 1G6_H1.168_L1_scFv(GKPGS)4
EVQLVESGGGLVKPGGSLRLSCAASGFTFSNYWMNWVRQAPGKGLEWVGEIRLKSNNYATHYAEPVKGRFTISRDDSKSTVYLQMNSLKTEDTAVYYCTRHYGNYGGYFDVWGAGTLVTVSSGKPGSGKPGSGKPGSGKPGSSIVMTQSPATLSVSPGERATLSCRASQSVSNDVAWYQQKPGQSPRLLINYASHRYTGVPDRFTGSGYGTEFTLTISSLQSEDFAVYFCQQDYSSPRTFGGGTKVEIK

SEQ ID NO: 7863 - protein, 122 aa, Artificial Sequence
  Description of Artificial Sequence: Synthetic polypeptide
  VH of XENP018668
EVQLVESGGGLVKPGGSLRLSCAASGFTFSNYWMNWVRQAPGKGLEWVGEIRLKSNNYATHYAEPVKGRFTISRDDSKSTVYLQMNSLKTEDTAVYYCTRHYGNYGGYFDVWGAGTLVTVSS

SEQ ID NO: 7864 - protein, 107 aa, Artificial Sequence; identical to SEQ ID NO: 6247
  Description of Artificial Sequence: Synthetic polypeptide
  VL of XENP018668

SEQ ID NO: 7865 - protein, 5 aa, Artificial Sequence
  Description of Artificial Sequence: Synthetic peptide
  XENP018668 vhCDR1
NYWMN

SEQ ID NO: 7866 - protein, 19 aa, Artificial Sequence
  Description of Artificial Sequence: Synthetic peptide
  XENP018668 vhCDR2
EIRLKSNNYATHYAEPVKG

SEQ ID NO: 7867 - protein, 11 aa, Artificial Sequence
  Description of Artificial Sequence: Synthetic peptide
  XENP018668 vhCDR3
HYGNYGGYFDV

SEQ ID NO: 7868 - protein, 11 aa, Artificial Sequence
  Description of Artificial Sequence: Synthetic peptide
  XENP018668 vlCDR1
RASQSVSNDVA

SEQ ID NO: 7869 - protein, 7 aa, Artificial Sequence
  Description of Artificial Sequence: Synthetic peptide
  XENP018668 vlCDR2
YASHRYT

SEQ ID NO: 7870 - protein, 9 aa, Artificial Sequence
  Description of Artificial Sequence: Synthetic peptide
  XENP018668 vlCDR3
QQDYSSPRT

SEQ ID NO: 7871 - protein, 249 aa, Artificial Sequence
  Description of Artificial Sequence: Synthetic polypeptide
  XENP018669 1G6_H1.169_L1_scFv(GKPGS)4
EVQLVESGGGLVKPGGSLRLSCAASGFTFSNYWMNWVRQAPGKGLEWVGEIRLKSNNYATHYAEPVKGRFTISRDDSKSTVYLQMNSLKTEDTAVYYCTRLYGNYGGYFDVWGAGTLVTVSSGKPGSGKPGSGKPGSGKPGSSIVMTQSPATLSVSPGERATLSCRASQSVSNDVAWYQQKPGQSPRLLINYASHRYTGVPDRFTGSGYGTEFTLTISSLQSEDFAVYFCQQDYSSPRTFGGGTKVEIK

SEQ ID NO: 7872 - protein, 122 aa, Artificial Sequence
  Description of Artificial Sequence: Synthetic polypeptide
  VH of XENP018669
EVQLVESGGGLVKPGGSLRLSCAASGFTFSNYWMNWVRQAPGKGLEWVGEIRLKSNNYATHYAEPVKGRFTISRDDSKSTVYLQMNSLKTEDTAVYYCTRLYGNYGGYFDVWGAGTLVTVSS

SEQ ID NO: 7873 - protein, 107 aa, Artificial Sequence; identical to SEQ ID NO: 6247
  Description of Artificial Sequence: Synthetic polypeptide
  VL of XENP018669

SEQ ID NO: 7874 - protein, 5 aa, Artificial Sequence
  Description of Artificial Sequence: Synthetic peptide
  XENP018669 vhCDR1
NYWMN

SEQ ID NO: 7875 - protein, 19 aa, Artificial Sequence
  Description of Artificial Sequence: Synthetic peptide
  XENP018669 vhCDR2
EIRLKSNNYATHYAEPVKG

SEQ ID NO: 7876 - protein, 11 aa, Artificial Sequence
  Description of Artificial Sequence: Synthetic peptide
  XENP018669 vhCDR3
LYGNYGGYFDV

SEQ ID NO: 7877 - protein, 11 aa, Artificial Sequence
  Description of Artificial Sequence: Synthetic peptide
  XENP018669 vlCDR1
RASQSVSNDVA

SEQ ID NO: 7878 - protein, 7 aa, Artificial Sequence
  Description of Artificial Sequence: Synthetic peptide
  XENP018669 vlCDR2
YASHRYT

SEQ ID NO: 7879 - protein, 9 aa, Artificial Sequence
  Description of Artificial Sequence: Synthetic peptide
  XENP018669 vlCDR3
QQDYSSPRT

SEQ ID NO: 7880 - protein, 249 aa, Artificial Sequence
  Description of Artificial Sequence: Synthetic polypeptide
  XENP018670 1G6_H1.170_L1_scFv(GKPGS)4
EVQLVESGGGLVKPGGSLRLSCAASGFTFSNYWMNWVRQAPGKGLEWVGEIRLKSNNYATHYAEPVKGRFTISRDDSKSTVYLQMNSLKTEDTAVYYCTRWYGNYGGYFDVWGAGTLVTVSSGKPGSGKPGSGKPGSGKPGSSIVMTQSPATLSVSPGERATLSCRASQSVSNDVAWYQQKPGQSPRLLINYASHRYTGVPDRFTGSGYGTEFTLTISSLQSEDFAVYFCQQDYSSPRTFGGGTKVEIK

SEQ ID NO: 7881 - protein, 122 aa, Artificial Sequence
  Description of Artificial Sequence: Synthetic polypeptide
  VH of XENP018670
EVQLVESGGGLVKPGGSLRLSCAASGFTFSNYWMNWVRQAPGKGLEWVGEIRLKSNNYATHYAEPVKGRFTISRDDSKSTVYLQMNSLKTEDTAVYYCTRWYGNYGGYFDVWGAGTLVTVSS

SEQ ID NO: 7882 - protein, 107 aa, Artificial Sequence; identical to SEQ ID NO: 6247
  Description of Artificial Sequence: Synthetic polypeptide
  VL of XENP018670

SEQ ID NO: 7883 - protein, 5 aa, Artificial Sequence
  Description of Artificial Sequence: Synthetic peptide
  XENP018670 vhCDR1
NYWMN

SEQ ID NO: 7884 - protein, 19 aa, Artificial Sequence
  Description of Artificial Sequence: Synthetic peptide
  XENP018670 vhCDR2
EIRLKSNNYATHYAEPVKG

SEQ ID NO: 7885 - protein, 11 aa, Artificial Sequence
  Description of Artificial Sequence: Synthetic peptide
  XENP018670 vhCDR3
WYGNYGGYFDV

SEQ ID NO: 7886 - protein, 11 aa, Artificial Sequence
  Description of Artificial Sequence: Synthetic peptide
  XENP018670 vlCDR1
RASQSVSNDVA

SEQ ID NO: 7887 - protein, 7 aa, Artificial Sequence
  Description of Artificial Sequence: Synthetic peptide
  XENP018670 vlCDR2
YASHRYT

SEQ ID NO: 7888 - protein, 9 aa, Artificial Sequence
  Description of Artificial Sequence: Synthetic peptide
  XENP018670 vlCDR3
QQDYSSPRT

SEQ ID NO: 7889 - protein, 249 aa, Artificial Sequence
  Description of Artificial Sequence: Synthetic polypeptide
  XENP018671 1G6_H1.171_L1_scFv(GKPGS)4
EVQLVESGGGLVKPGGSLRLSCAASGFTFSNYWMNWVRQAPGKGLEWVGEIRLKSNNYATHYAEPVKGRFTISRDDSKSTVYLQMNSLKTEDTAVYYCTRVYGNYGGYFDVWGAGTLVTVSSGKPGSGKPGSGKPGSGKPGSSIVMTQSPATLSVSPGERATLSCRASQSVSNDVAWYQQKPGQSPRLLINYASHRYTGVPDRFTGSGYGTEFTLTISSLQSEDFAVYFCQQDYSSPRTFGGGTKVEIK

SEQ ID NO: 7890 - protein, 122 aa, Artificial Sequence
  Description of Artificial Sequence: Synthetic polypeptide
  VH of XENP018671
EVQLVESGGGLVKPGGSLRLSCAASGFTFSNYWMNWVRQAPGKGLEWVGEIRLKSNNYATHYAEPVKGRFTISRDDSKSTVYLQMNSLKTEDTAVYYCTRVYGNYGGYFDVWGAGTLVTVSS

SEQ ID NO: 7891 - protein, 107 aa, Artificial Sequence; identical to SEQ ID NO: 6247
  Description of Artificial Sequence: Synthetic polypeptide
  VL of XENP018671

SEQ ID NO: 7892 - protein, 5 aa, Artificial Sequence
  Description of Artificial Sequence: Synthetic peptide
  XENP018671 vhCDR1
NYWMN

SEQ ID NO: 7893 - protein, 19 aa, Artificial Sequence
  Description of Artificial Sequence: Synthetic peptide
  XENP018671 vhCDR2
EIRLKSNNYATHYAEPVKG

SEQ ID NO: 7894 - protein, 11 aa, Artificial Sequence
  Description of Artificial Sequence: Synthetic peptide
  XENP018671 vhCDR3
VYGNYGGYFDV

SEQ ID NO: 7895 - protein, 11 aa, Artificial Sequence
  Description of Artificial Sequence: Synthetic peptide
  XENP018671 vlCDR1
RASQSVSNDVA

SEQ ID NO: 7896 - protein, 7 aa, Artificial Sequence
  Description of Artificial Sequence: Synthetic peptide
  XENP018671 vlCDR2
YASHRYT

SEQ ID NO: 7897 - protein, 9 aa, Artificial Sequence
  Description of Artificial Sequence: Synthetic peptide
  XENP018671 vlCDR3
QQDYSSPRT

SEQ ID NO: 7898 - protein, 249 aa, Artificial Sequence
  Description of Artificial Sequence: Synthetic polypeptide
  XENP018672 1G6_H1.172_L1_scFv(GKPGS)4
EVQLVESGGGLVKPGGSLRLSCAASGFTFSNYWMNWVRQAPGKGLEWVGEIRLKSNNYATHYAEPVKGRFTISRDDSKSTVYLQMNSLKTEDTAVYYCTRAYGNYGGYFDVWGAGTLVTVSSGKPGSGKPGSGKPGSGKPGSSIVMTQSPATLSVSPGERATLSCRASQSVSNDVAWYQQKPGQSPRLLINYASHRYTGVPDRFTGSGYGTEFTLTISSLQSEDFAVYFCQQDYSSPRTFGGGTKVEIK

SEQ ID NO: 7899 - protein, 122 aa, Artificial Sequence
  Description of Artificial Sequence: Synthetic polypeptide
  VH of XENP018672
EVQLVESGGGLVKPGGSLRLSCAASGFTFSNYWMNWVRQAPGKGLEWVGEIRLKSNNYATHYAEPVKGRFTISRDDSKSTVYLQMNSLKTEDTAVYYCTRAYGNYGGYFDVWGAGTLVTVSS

SEQ ID NO: 7900 - protein, 107 aa, Artificial Sequence; identical to SEQ ID NO: 6247
  Description of Artificial Sequence: Synthetic polypeptide
  VL of XENP018672

SEQ ID NO: 7901 - protein, 5 aa, Artificial Sequence
  Description of Artificial Sequence: Synthetic peptide
  XENP018672 vhCDR1
NYWMN

SEQ ID NO: 7902 - protein, 19 aa, Artificial Sequence
  Description of Artificial Sequence: Synthetic peptide
  XENP018672 vhCDR2
EIRLKSNNYATHYAEPVKG

SEQ ID NO: 7903 - protein, 11 aa, Artificial Sequence
  Description of Artificial Sequence: Synthetic peptide
  XENP018672 vhCDR3
AYGNYGGYFDV

SEQ ID NO: 7904 - protein, 11 aa, Artificial Sequence
  Description of Artificial Sequence: Synthetic peptide
  XENP018672 vlCDR1
RASQSVSNDVA

SEQ ID NO: 7905 - protein, 7 aa, Artificial Sequence
  Description of Artificial Sequence: Synthetic peptide
  XENP018672 vlCDR2
YASHRYT

SEQ ID NO: 7906 - protein, 9 aa, Artificial Sequence
  Description of Artificial Sequence: Synthetic peptide
  XENP018672 vlCDR3
QQDYSSPRT

SEQ ID NO: 7907 - protein, 249 aa, Artificial Sequence
  Description of Artificial Sequence: Synthetic polypeptide
  XENP018673 1G6_H1.173_L1_scFv(GKPGS)4
EVQLVESGGGLVKPGGSLRLSCAASGFTFSNYWMNWVRQAPGKGLEWVGEIRLKSNNYATHYAEPVKGRFTISRDDSKSTVYLQMNSLKTEDTAVYYCTRQYGNYGGYFDVWGAGTLVTVSSGKPGSGKPGSGKPGSGKPGSSIVMTQSPATLSVSPGERATLSCRASQSVSNDVAWYQQKPGQSPRLLINYASHRYTGVPDRFTGSGYGTEFTLTISSLQSEDFAVYFCQQDYSSPRTFGGGTKVEIK

SEQ ID NO: 7908 - protein, 122 aa, Artificial Sequence
  Description of Artificial Sequence: Synthetic polypeptide
  VH of XENP018673
EVQLVESGGGLVKPGGSLRLSCAASGFTFSNYWMNWVRQAPGKGLEWVGEIRLKSNNYATHYAEPVKGRFTISRDDSKSTVYLQMNSLKTEDTAVYYCTRQYGNYGGYFDVWGAGTLVTVSS

SEQ ID NO: 7909 - protein, 107 aa, Artificial Sequence; identical to SEQ ID NO: 6247
  Description of Artificial Sequence: Synthetic polypeptide
  VL of XENP018673

SEQ ID NO: 7910 - protein, 5 aa, Artificial Sequence
  Description of Artificial Sequence: Synthetic peptide
  XENP018673 vhCDR1
NYWMN

SEQ ID NO: 7911 - protein, 19 aa, Artificial Sequence
  Description of Artificial Sequence: Synthetic peptide
  XENP018673 vhCDR2
EIRLKSNNYATHYAEPVKG

SEQ ID NO: 7912 - protein, 11 aa, Artificial Sequence
  Description of Artificial Sequence: Synthetic peptide
  XENP018673 vhCDR3
QYGNYGGYFDV

SEQ ID NO: 7913 - protein, 11 aa, Artificial Sequence
  Description of Artificial Sequence: Synthetic peptide
  XENP018673 vlCDR1
RASQSVSNDVA

SEQ ID NO: 7914 - protein, 7 aa, Artificial Sequence
  Description of Artificial Sequence: Synthetic peptide
  XENP018673 vlCDR2
YASHRYT

SEQ ID NO: 7915 - protein, 9 aa, Artificial Sequence
  Description of Artificial Sequence: Synthetic peptide
  XENP018673 vlCDR3
QQDYSSPRT

SEQ ID NO: 7916 - protein, 249 aa, Artificial Sequence
  Description of Artificial Sequence: Synthetic polypeptide
  XENP018674 1G6_H1.174_L1_scFv(GKPGS)4
EVQLVESGGGLVKPGGSLRLSCAASGFTFSNYWMNWVRQAPGKGLEWVGEIRLKSNNYATHYAEPVKGRFTISRDDSKSTVYLQMNSLKTEDTAVYYCTRDYGNYGGYFDVWGAGTLVTVSSGKPGSGKPGSGKPGSGKPGSSIVMTQSPATLSVSPGERATLSCRASQSVSNDVAWYQQKPGQSPRLLINYASHRYTGVPDRFTGSGYGTEFTLTISSLQSEDFAVYFCQQDYSSPRTFGGGTKVEIK

SEQ ID NO: 7917 - protein, 122 aa, Artificial Sequence
  Description of Artificial Sequence: Synthetic polypeptide
  VH of XENP018674
EVQLVESGGGLVKPGGSLRLSCAASGFTFSNYWMNWVRQAPGKGLEWVGEIRLKSNNYATHYAEPVKGRFTISRDDSKSTVYLQMNSLKTEDTAVYYCTRDYGNYGGYFDVWGAGTLVTVSS

SEQ ID NO: 7918 - protein, 107 aa, Artificial Sequence; identical to SEQ ID NO: 6247
  Description of Artificial Sequence: Synthetic polypeptide
  VL of XENP018674

SEQ ID NO: 7919 - protein, 5 aa, Artificial Sequence
  Description of Artificial Sequence: Synthetic peptide
  XENP018674 vhCDR1
NYWMN

SEQ ID NO: 7920 - protein, 19 aa, Artificial Sequence
  Description of Artificial Sequence: Synthetic peptide
  XENP018674 vhCDR2
EIRLKSNNYATHYAEPVKG

SEQ ID NO: 7921 - protein, 11 aa, Artificial Sequence
  Description of Artificial Sequence: Synthetic peptide
  XENP018674 vhCDR3
DYGNYGGYFDV

SEQ ID NO: 7922 - protein, 11 aa, Artificial Sequence
  Description of Artificial Sequence: Synthetic peptide
  XENP018674 vlCDR1
RASQSVSNDVA

SEQ ID NO: 7923 - protein, 7 aa, Artificial Sequence
  Description of Artificial Sequence: Synthetic peptide
  XENP018674 vlCDR2
YASHRYT

SEQ ID NO: 7924 - protein, 9 aa, Artificial Sequence
  Description of Artificial Sequence: Synthetic peptide
  XENP018674 vlCDR3
QQDYSSPRT

SEQ ID NO: 7925 - protein, 249 aa, Artificial Sequence
  Description of Artificial Sequence: Synthetic polypeptide
  XENP018675 1G6_H1.175_L1_scFv(GKPGS)4
EVQLVESGGGLVKPGGSLRLSCAASGFTFSNYWMNWVRQAPGKGLEWVGEIRLKSNNYATHYAEPVKGRFTISRDDSKSTVYLQMNSLKTEDTAVYYCTRKYGNYGGYFDVWGAGTLVTVSSGKPGSGKPGSGKPGSGKPGSSIVMTQSPATLSVSPGERATLSCRASQSVSNDVAWYQQKPGQSPRLLINYASHRYTGVPDRFTGSGYGTEFTLTISSLQSEDFAVYFCQQDYSSPRTFGGGTKVEIK

SEQ ID NO: 7926 - protein, 122 aa, Artificial Sequence
  Description of Artificial Sequence: Synthetic polypeptide
  VH of XENP018675
EVQLVESGGGLVKPGGSLRLSCAASGFTFSNYWMNWVRQAPGKGLEWVGEIRLKSNNYATHYAEPVKGRFTISRDDSKSTVYLQMNSLKTEDTAVYYCTRKYGNYGGYFDVWGAGTLVTVSS

SEQ ID NO: 7927 - protein, 107 aa, Artificial Sequence; identical to SEQ ID NO: 6247
  Description of Artificial Sequence: Synthetic polypeptide
  VL of XENP018675

SEQ ID NO: 7928 - protein, 5 aa, Artificial Sequence
  Description of Artificial Sequence: Synthetic peptide
  XENP018675 vhCDR1
NYWMN

SEQ ID NO: 7929 - protein, 19 aa, Artificial Sequence
  Description of Artificial Sequence: Synthetic peptide
  XENP018675 vhCDR2
EIRLKSNNYATHYAEPVKG

SEQ ID NO: 7930 - protein, 11 aa, Artificial Sequence
  Description of Artificial Sequence: Synthetic peptide
  XENP018675 vhCDR3
KYGNYGGYFDV

SEQ ID NO: 7931 - protein, 11 aa, Artificial Sequence
  Description of Artificial Sequence: Synthetic peptide
  XENP018675 vlCDR1
RASQSVSNDVA

SEQ ID NO: 7932 - protein, 7 aa, Artificial Sequence
  Description of Artificial Sequence: Synthetic peptide
  XENP018675 vlCDR2
YASHRYT

SEQ ID NO: 7933 - protein, 9 aa, Artificial Sequence
  Description of Artificial Sequence: Synthetic peptide
  XENP018675 vlCDR3
QQDYSSPRT

SEQ ID NO: 7934 - protein, 249 aa, Artificial Sequence
  Description of Artificial Sequence: Synthetic polypeptide
  XENP018676 1G6_H1.176_L1_scFv(GKPGS)4
EVQLVESGGGLVKPGGSLRLSCAASGFTFSNYWMNWVRQAPGKGLEWVGEIRLKSNNYATHYAEPVKGRFTISRDDSKSTVYLQMNSLKTEDTAVYYCTRYFGNYGGYFDVWGAGTLVTVSSGKPGSGKPGSGKPGSGKPGSSIVMTQSPATLSVSPGERATLSCRASQSVSNDVAWYQQKPGQSPRLLINYASHRYTGVPDRFTGSGYGTEFTLTISSLQSEDFAVYFCQQDYSSPRTFGGGTKVEIK

SEQ ID NO: 7935 - protein, 122 aa, Artificial Sequence
  Description of Artificial Sequence: Synthetic polypeptide
  VH of XENP018676
EVQLVESGGGLVKPGGSLRLSCAASGFTFSNYWMNWVRQAPGKGLEWVGEIRLKSNNYATHYAEPVKGRFTISRDDSKSTVYLQMNSLKTEDTAVYYCTRYFGNYGGYFDVWGAGTLVTVSS

SEQ ID NO: 7936 - protein, 107 aa, Artificial Sequence; identical to SEQ ID NO: 6247
  Description of Artificial Sequence: Synthetic polypeptide
  VL of XENP018676

SEQ ID NO: 7937 - protein, 5 aa, Artificial Sequence
  Description of Artificial Sequence: Synthetic peptide
  XENP018676 vhCDR1
NYWMN

SEQ ID NO: 7938 - protein, 19 aa, Artificial Sequence
  Description of Artificial Sequence: Synthetic peptide
  XENP018676 vhCDR2
EIRLKSNNYATHYAEPVKG

SEQ ID NO: 7939 - protein, 11 aa, Artificial Sequence
  Description of Artificial Sequence: Synthetic peptide
  XENP018676 vhCDR3
YFGNYGGYFDV

SEQ ID NO: 7940 - protein, 11 aa, Artificial Sequence
  Description of Artificial Sequence: Synthetic peptide
  XENP018676 vlCDR1
RASQSVSNDVA

SEQ ID NO: 7941 - protein, 7 aa, Artificial Sequence
  Description of Artificial Sequence: Synthetic peptide
  XENP018676 vlCDR2
YASHRYT

SEQ ID NO: 7942 - protein, 9 aa, Artificial Sequence
  Description of Artificial Sequence: Synthetic peptide
  XENP018676 vlCDR3
QQDYSSPRT

SEQ ID NO: 7943 - protein, 249 aa, Artificial Sequence
  Description of Artificial Sequence: Synthetic polypeptide
  XENP018677 1G6_H1.177_L1_scFv(GKPGS)4
EVQLVESGGGLVKPGGSLRLSCAASGFTFSNYWMNWVRQAPGKGLEWVGEIRLKSNNYATHYAEPVKGRFTISRDDSKSTVYLQMNSLKTEDTAVYYCTRYHGNYGGYFDVWGAGTLVTVSSGKPGSGKPGSGKPGSGKPGSSIVMTQSPATLSVSPGERATLSCRASQSVSNDVAWYQQKPGQSPRLLINYASHRYTGVPDRFTGSGYGTEFTLTISSLQSEDFAVYFCQQDYSSPRTFGGGTKVEIK

SEQ ID NO: 7944 - protein, 122 aa, Artificial Sequence
  Description of Artificial Sequence: Synthetic polypeptide
  VH of XENP018677
EVQLVESGGGLVKPGGSLRLSCAASGFTFSNYWMNWVRQAPGKGLEWVGEIRLKSNNYATHYAEPVKGRFTISRDDSKSTVYLQMNSLKTEDTAVYYCTRYHGNYGGYFDVWGAGTLVTVSS

SEQ ID NO: 7945 - protein, 107 aa, Artificial Sequence; identical to SEQ ID NO: 6247
  Description of Artificial Sequence: Synthetic polypeptide
  VL of XENP018677

SEQ ID NO: 7946 - protein, 5 aa, Artificial Sequence
  Description of Artificial Sequence: Synthetic peptide
  XENP018677 vhCDR1
NYWMN

SEQ ID NO: 7947 - protein, 19 aa, Artificial Sequence
  Description of Artificial Sequence: Synthetic peptide
  XENP018677 vhCDR2
EIRLKSNNYATHYAEPVKG

SEQ ID NO: 7948 - protein, 11 aa, Artificial Sequence
  Description of Artificial Sequence: Synthetic peptide
  XENP018677 vhCDR3
YHGNYGGYFDV

SEQ ID NO: 7949 - protein, 11 aa, Artificial Sequence
  Description of Artificial Sequence: Synthetic peptide
  XENP018677 vlCDR1
RASQSVSNDVA

SEQ ID NO: 7950 - protein, 7 aa, Artificial Sequence
  Description of Artificial Sequence: Synthetic peptide
  XENP018677 vlCDR2
YASHRYT

SEQ ID NO: 7951 - protein, 9 aa, Artificial Sequence
  Description of Artificial Sequence: Synthetic peptide
  XENP018677 vlCDR3
QQDYSSPRT

SEQ ID NO: 7952 - protein, 249 aa, Artificial Sequence
  Description of Artificial Sequence: Synthetic polypeptide
  XENP018678 1G6_H1.178_L1_scFv(GKPGS)4
EVQLVESGGGLVKPGGSLRLSCAASGFTFSNYWMNWVRQAPGKGLEWVGEIRLKSNNYATHYAEPVKGRFTISRDDSKSTVYLQMNSLKTEDTAVYYCTRYLGNYGGYFDVWGAGTLVTVSSGKPGSGKPGSGKPGSGKPGSSIVMTQSPATLSVSPGERATLSCRASQSVSNDVAWYQQKPGQSPRLLINYASHRYTGVPDRFTGSGYGTEFTLTISSLQSEDFAVYFCQQDYSSPRTFGGGTKVEIK

SEQ ID NO: 7953 - protein, 122 aa, Artificial Sequence
  Description of Artificial Sequence: Synthetic polypeptide
  VH of XENP018678
EVQLVESGGGLVKPGGSLRLSCAASGFTFSNYWMNWVRQAPGKGLEWVGEIRLKSNNYATHYAEPVKGRFTISRDDSKSTVYLQMNSLKTEDTAVYYCTRYLGNYGGYFDVWGAGTLVTVSS

SEQ ID NO: 7954 - protein, 107 aa, Artificial Sequence; identical to SEQ ID NO: 6247
  Description of Artificial Sequence: Synthetic polypeptide
  VL of XENP018678

SEQ ID NO: 7955 - protein, 5 aa, Artificial Sequence
  Description of Artificial Sequence: Synthetic peptide
  XENP018678 vhCDR1
NYWMN

SEQ ID NO: 7956 - protein, 19 aa, Artificial Sequence
  Description of Artificial Sequence: Synthetic peptide
  XENP018678 vhCDR2
EIRLKSNNYATHYAEPVKG

SEQ ID NO: 7957 - protein, 11 aa, Artificial Sequence
  Description of Artificial Sequence: Synthetic peptide
  XENP018678 vhCDR3
YLGNYGGYFDV

SEQ ID NO: 7958 - protein, 11 aa, Artificial Sequence
  Description of Artificial Sequence: Synthetic peptide
  XENP018678 vlCDR1
RASQSVSNDVA

SEQ ID NO: 7959 - protein, 7 aa, Artificial Sequence
  Description of Artificial Sequence: Synthetic peptide
  XENP018678 vlCDR2
YASHRYT

SEQ ID NO: 7960 - protein, 9 aa, Artificial Sequence
  Description of Artificial Sequence: Synthetic peptide
  XENP018678 vlCDR3
QQDYSSPRT

SEQ ID NO: 7961 - protein, 249 aa, Artificial Sequence
  Description of Artificial Sequence: Synthetic polypeptide
  XENP018679 1G6_H1.179_L1_scFv(GKPGS)4
EVQLVESGGGLVKPGGSLRLSCAASGFTFSNYWMNWVRQAPGKGLEWVGEIRLKSNNYATHYAEPVKGRFTISRDDSKSTVYLQMNSLKTEDTAVYYCTRYWGNYGGYFDVWGAGTLVTVSSGKPGSGKPGSGKPGSGKPGSSIVMTQSPATLSVSPGERATLSCRASQSVSNDVAWYQQKPGQSPRLLINYASHRYTGVPDRFTGSGYGTEFTLTISSLQSEDFAVYFCQQDYSSPRTFGGGTKVEIK

SEQ ID NO: 7962 - protein, 122 aa, Artificial Sequence
  Description of Artificial Sequence: Synthetic polypeptide
  VH of XENP018679
EVQLVESGGGLVKPGGSLRLSCAASGFTFSNYWMNWVRQAPGKGLEWVGEIRLKSNNYATHYAEPVKGRFTISRDDSKSTVYLQMNSLKTEDTAVYYCTRYWGNYGGYFDVWGAGTLVTVSS

SEQ ID NO: 7963 - protein, 107 aa, Artificial Sequence; identical to SEQ ID NO: 6247
  Description of Artificial Sequence: Synthetic polypeptide
  VL of XENP018679

SEQ ID NO: 7964 - protein, 5 aa, Artificial Sequence
  Description of Artificial Sequence: Synthetic peptide
  XENP018679 vhCDR1
NYWMN

SEQ ID NO: 7965 - protein, 19 aa, Artificial Sequence
  Description of Artificial Sequence: Synthetic peptide
  XENP018679 vhCDR2
EIRLKSNNYATHYAEPVKG

SEQ ID NO: 7966 - protein, 11 aa, Artificial Sequence
  Description of Artificial Sequence: Synthetic peptide
  XENP018679 vhCDR3
YWGNYGGYFDV

SEQ ID NO: 7967 - protein, 11 aa, Artificial Sequence
  Description of Artificial Sequence: Synthetic peptide
  XENP018679 vlCDR1
RASQSVSNDVA

SEQ ID NO: 7968 - protein, 7 aa, Artificial Sequence
  Description of Artificial Sequence: Synthetic peptide
  XENP018679 vlCDR2
YASHRYT

SEQ ID NO: 7969 - protein, 9 aa, Artificial Sequence
  Description of Artificial Sequence: Synthetic peptide
  XENP018679 vlCDR3
QQDYSSPRT

SEQ ID NO: 7970 - protein, 249 aa, Artificial Sequence
  Description of Artificial Sequence: Synthetic polypeptide
  XENP018680 1G6_H1.180_L1_scFv(GKPGS)4
EVQLVESGGGLVKPGGSLRLSCAASGFTFSNYWMNWVRQAPGKGLEWVGEIRLKSNNYATHYAEPVKGRFTISRDDSKSTVYLQMNSLKTEDTAVYYCTRYVGNYGGYFDVWGAGTLVTVSSGKPGSGKPGSGKPGSGKPGSSIVMTQSPATLSVSPGERATLSCRASQSVSNDVAWYQQKPGQSPRLLINYASHRYTGVPDRFTGSGYGTEFTLTISSLQSEDFAVYFCQQDYSSPRTFGGGTKVEIK

SEQ ID NO: 7971 - protein, 122 aa, Artificial Sequence
  Description of Artificial Sequence: Synthetic polypeptide
  VH of XENP018680
EVQLVESGGGLVKPGGSLRLSCAASGFTFSNYWMNWVRQAPGKGLEWVGEIRLKSNNYATHYAEPVKGRFTISRDDSKSTVYLQMNSLKTEDTAVYYCTRYVGNYGGYFDVWGAGTLVTVSS

SEQ ID NO: 7972 - protein, 107 aa, Artificial Sequence; identical to SEQ ID NO: 6247
  Description of Artificial Sequence: Synthetic polypeptide
  VL of XENP018680

SEQ ID NO: 7973 - protein, 5 aa, Artificial Sequence
  Description of Artificial Sequence: Synthetic peptide
  XENP018680 vhCDR1
NYWMN

SEQ ID NO: 7974 - protein, 19 aa, Artificial Sequence
  Description of Artificial Sequence: Synthetic peptide
  XENP018680 vhCDR2
EIRLKSNNYATHYAEPVKG

SEQ ID NO: 7975 - protein, 11 aa, Artificial Sequence
  Description of Artificial Sequence: Synthetic peptide
  XENP018680 vhCDR3
YVGNYGGYFDV

SEQ ID NO: 7976 - protein, 11 aa, Artificial Sequence
  Description of Artificial Sequence: Synthetic peptide
  XENP018680 vlCDR1
RASQSVSNDVA

SEQ ID NO: 7977 - protein, 7 aa, Artificial Sequence
  Description of Artificial Sequence: Synthetic peptide
  XENP018680 vlCDR2
YASHRYT

SEQ ID NO: 7978 - protein, 9 aa, Artificial Sequence
  Description of Artificial Sequence: Synthetic peptide
  XENP018680 vlCDR3
QQDYSSPRT

SEQ ID NO: 7979 - protein, 249 aa, Artificial Sequence
  Description of Artificial Sequence: Synthetic polypeptide
  XENP018681 1G6_H1.181_L1_scFv(GKPGS)4
EVQLVESGGGLVKPGGSLRLSCAASGFTFSNYWMNWVRQAPGKGLEWVGEIRLKSNNYATHYAEPVKGRFTISRDDSKSTVYLQMNSLKTEDTAVYYCTRYAGNYGGYFDVWGAGTLVTVSSGKPGSGKPGSGKPGSGKPGSSIVMTQSPATLSVSPGERATLSCRASQSVSNDVAWYQQKPGQSPRLLINYASHRYTGVPDRFTGSGYGTEFTLTISSLQSEDFAVYFCQQDYSSPRTFGGGTKVEIK

SEQ ID NO: 7980 - protein, 122 aa, Artificial Sequence
  Description of Artificial Sequence: Synthetic polypeptide
  VH of XENP018681
EVQLVESGGGLVKPGGSLRLSCAASGFTFSNYWMNWVRQAPGKGLEWVGEIRLKSNNYATHYAEPVKGRFTISRDDSKSTVYLQMNSLKTEDTAVYYCTRYAGNYGGYFDVWGAGTLVTVSS

SEQ ID NO: 7981 - protein, 107 aa, Artificial Sequence; identical to SEQ ID NO: 6247
  Description of Artificial Sequence: Synthetic polypeptide
  VL of XENP018681

SEQ ID NO: 7982 - protein, 5 aa, Artificial Sequence
  Description of Artificial Sequence: Synthetic peptide
  XENP018681 vhCDR1
NYWMN

SEQ ID NO: 7983 - protein, 19 aa, Artificial Sequence
  Description of Artificial Sequence: Synthetic peptide
  XENP018681 vhCDR2
EIRLKSNNYATHYAEPVKG

SEQ ID NO: 7984 - protein, 11 aa, Artificial Sequence
  Description of Artificial Sequence: Synthetic peptide
  XENP018681 vhCDR3
YAGNYGGYFDV

SEQ ID NO: 7985 - protein, 11 aa, Artificial Sequence
  Description of Artificial Sequence: Synthetic peptide
  XENP018681 vlCDR1
RASQSVSNDVA

SEQ ID NO: 7986 - protein, 7 aa, Artificial Sequence
  Description of Artificial Sequence: Synthetic peptide
  XENP018681 vlCDR2
YASHRYT

SEQ ID NO: 7987 - protein, 9 aa, Artificial Sequence
  Description of Artificial Sequence: Synthetic peptide
  XENP018681 vlCDR3
QQDYSSPRT

SEQ ID NO: 7988 - protein, 249 aa, Artificial Sequence
  Description of Artificial Sequence: Synthetic polypeptide
  XENP018682 1G6_H1.182_L1_scFv(GKPGS)4
EVQLVESGGGLVKPGGSLRLSCAASGFTFSNYWMNWVRQAPGKGLEWVGEIRLKSNNYATHYAEPVKGRFTISRDDSKSTVYLQMNSLKTEDTAVYYCTRYQGNYGGYFDVWGAGTLVTVSSGKPGSGKPGSGKPGSGKPGSSIVMTQSPATLSVSPGERATLSCRASQSVSNDVAWYQQKPGQSPRLLINYASHRYTGVPDRFTGSGYGTEFTLTISSLQSEDFAVYFCQQDYSSPRTFGGGTKVEIK

SEQ ID NO: 7989 - protein, 122 aa, Artificial Sequence
  Description of Artificial Sequence: Synthetic polypeptide
  VH of XENP018682
EVQLVESGGGLVKPGGSLRLSCAASGFTFSNYWMNWVRQAPGKGLEWVGEIRLKSNNYATHYAEPVKGRFTISRDDSKSTVYLQMNSLKTEDTAVYYCTRYQGNYGGYFDVWGAGTLVTVSS

SEQ ID NO: 7990 - protein, 107 aa, Artificial Sequence; identical to SEQ ID NO: 6247
  Description of Artificial Sequence: Synthetic polypeptide
  VL of XENP018682

SEQ ID NO: 7991 - protein, 5 aa, Artificial Sequence
  Description of Artificial Sequence: Synthetic peptide
  XENP018682 vhCDR1
NYWMN

SEQ ID NO: 7992 - protein, 19 aa, Artificial Sequence
  Description of Artificial Sequence: Synthetic peptide
  XENP018682 vhCDR2
EIRLKSNNYATHYAEPVKG

SEQ ID NO: 7993 - protein, 11 aa, Artificial Sequence
  Description of Artificial Sequence: Synthetic peptide
  XENP018682 vhCDR3
YQGNYGGYFDV

SEQ ID NO: 7994 - protein, 11 aa, Artificial Sequence
  Description of Artificial Sequence: Synthetic peptide
  XENP018682 vlCDR1
RASQSVSNDVA

SEQ ID NO: 7995 - protein, 7 aa, Artificial Sequence
  Description of Artificial Sequence: Synthetic peptide
  XENP018682 vlCDR2
YASHRYT

SEQ ID NO: 7996 - protein, 9 aa, Artificial Sequence
  Description of Artificial Sequence: Synthetic peptide
  XENP018682 vlCDR3
QQDYSSPRT

SEQ ID NO: 7997 - protein, 249 aa, Artificial Sequence
  Description of Artificial Sequence: Synthetic polypeptide
  XENP018683 1G6_H1.183_L1_scFv(GKPGS)4
EVQLVESGGGLVKPGGSLRLSCAASGFTFSNYWMNWVRQAPGKGLEWVGEIRLKSNNYATHYAEPVKGRFTISRDDSKSTVYLQMNSLKTEDTAVYYCTRYDGNYGGYFDVWGAGTLVTVSSGKPGSGKPGSGKPGSGKPGSSIVMTQSPATLSVSPGERATLSCRASQSVSNDVAWYQQKPGQSPRLLINYASHRYTGVPDRFTGSGYGTEFTLTISSLQSEDFAVYFCQQDYSSPRTFGGGTKVEIK

SEQ ID NO: 7998 - protein, 122 aa, Artificial Sequence
  Description of Artificial Sequence: Synthetic polypeptide
  VH of XENP018683
EVQLVESGGGLVKPGGSLRLSCAASGFTFSNYWMNWVRQAPGKGLEWVGEIRLKSNNYATHYAEPVKGRFTISRDDSKSTVYLQMNSLKTEDTAVYYCTRYDGNYGGYFDVWGAGTLVTVSS

SEQ ID NO: 7999 - protein, 107 aa, Artificial Sequence; identical to SEQ ID NO: 6247
  Description of Artificial Sequence: Synthetic polypeptide
  VL of XENP018683

SEQ ID NO: 8000 - protein, 5 aa, Artificial Sequence
  Description of Artificial Sequence: Synthetic peptide
  XENP018683 vhCDR1
NYWMN

SEQ ID NO: 8001 - protein, 19 aa, Artificial Sequence
  Description of Artificial Sequence: Synthetic peptide
  XENP018683 vhCDR2
EIRLKSNNYATHYAEPVKG

SEQ ID NO: 8002 - protein, 11 aa, Artificial Sequence
  Description of Artificial Sequence: Synthetic peptide
  XENP018683 vhCDR3
YDGNYGGYFDV

SEQ ID NO: 8003 - protein, 11 aa, Artificial Sequence
  Description of Artificial Sequence: Synthetic peptide
  XENP018683 vlCDR1
RASQSVSNDVA

SEQ ID NO: 8004 - protein, 7 aa, Artificial Sequence
  Description of Artificial Sequence: Synthetic peptide
  XENP018683 vlCDR2
YASHRYT

SEQ ID NO: 8005 - protein, 9 aa, Artificial Sequence
  Description of Artificial Sequence: Synthetic peptide
  XENP018683 vlCDR3
QQDYSSPRT

SEQ ID NO: 8006 - protein, 249 aa, Artificial Sequence
  Description of Artificial Sequence: Synthetic polypeptide
  XENP018684 1G6_H1.184_L1_scFv(GKPGS)4
EVQLVESGGGLVKPGGSLRLSCAASGFTFSNYWMNWVRQAPGKGLEWVGEIRLKSNNYATHYAEPVKGRFTISRDDSKSTVYLQMNSLKTEDTAVYYCTRYKGNYGGYFDVWGAGTLVTVSSGKPGSGKPGSGKPGSGKPGSSIVMTQSPATLSVSPGERATLSCRASQSVSNDVAWYQQKPGQSPRLLINYASHRYTGVPDRFTGSGYGTEFTLTISSLQSEDFAVYFCQQDYSSPRTFGGGTKVEIK

SEQ ID NO: 8007 - protein, 122 aa, Artificial Sequence
  Description of Artificial Sequence: Synthetic polypeptide
  VH of XENP018684
EVQLVESGGGLVKPGGSLRLSCAASGFTFSNYWMNWVRQAPGKGLEWVGEIRLKSNNYATHYAEPVKGRFTISRDDSKSTVYLQMNSLKTEDTAVYYCTRYKGNYGGYFDVWGAGTLVTVSS

SEQ ID NO: 8008 - protein, 107 aa, Artificial Sequence; identical to SEQ ID NO: 6247
  Description of Artificial Sequence: Synthetic polypeptide
  VL of XENP018684

SEQ ID NO: 8009 - protein, 5 aa, Artificial Sequence
  Description of Artificial Sequence: Synthetic peptide
  XENP018684 vhCDR1
NYWMN

SEQ ID NO: 8010 - protein, 19 aa, Artificial Sequence
  Description of Artificial Sequence: Synthetic peptide
  XENP018684 vhCDR2
EIRLKSNNYATHYAEPVKG

SEQ ID NO: 8011 - protein, 11 aa, Artificial Sequence
  Description of Artificial Sequence: Synthetic peptide
  XENP018684 vhCDR3
YKGNYGGYFDV

SEQ ID NO: 8012 - protein, 11 aa, Artificial Sequence
  Description of Artificial Sequence: Synthetic peptide
  XENP018684 vlCDR1
RASQSVSNDVA

SEQ ID NO: 8013 - protein, 7 aa, Artificial Sequence
  Description of Artificial Sequence: Synthetic peptide
  XENP018684 vlCDR2
YASHRYT

SEQ ID NO: 8014 - protein, 9 aa, Artificial Sequence
  Description of Artificial Sequence: Synthetic peptide
  XENP018684 vlCDR3
QQDYSSPRT

SEQ ID NO: 8015 - protein, 249 aa, Artificial Sequence
  Description of Artificial Sequence: Synthetic polypeptide
  XENP018685 1G6_H1.185_L1_scFv(GKPGS)4
EVQLVESGGGLVKPGGSLRLSCAASGFTFSNYWMNWVRQAPGKGLEWVGEIRLKSNNYATHYAEPVKGRFTISRDDSKSTVYLQMNSLKTEDTAVYYCTRYYANYGGYFDVWGAGTLVTVSSGKPGSGKPGSGKPGSGKPGSSIVMTQSPATLSVSPGERATLSCRASQSVSNDVAWYQQKPGQSPRLLINYASHRYTGVPDRFTGSGYGTEFTLTISSLQSEDFAVYFCQQDYSSPRTFGGGTKVEIK

SEQ ID NO: 8016 - protein, 122 aa, Artificial Sequence
  Description of Artificial Sequence: Synthetic polypeptide
  VH of XENP018685
EVQLVESGGGLVKPGGSLRLSCAASGFTFSNYWMNWVRQAPGKGLEWVGEIRLKSNNYATHYAEPVKGRFTISRDDSKSTVYLQMNSLKTEDTAVYYCTRYYANYGGYFDVWGAGTLVTVSS

SEQ ID NO: 8017 - protein, 107 aa, Artificial Sequence; identical to SEQ ID NO: 6247
  Description of Artificial Sequence: Synthetic polypeptide
  VL of XENP018685

SEQ ID NO: 8018 - protein, 5 aa, Artificial Sequence
  Description of Artificial Sequence: Synthetic peptide
  XENP018685 vhCDR1
NYWMN

SEQ ID NO: 8019 - protein, 19 aa, Artificial Sequence
  Description of Artificial Sequence: Synthetic peptide
  XENP018685 vhCDR2
EIRLKSNNYATHYAEPVKG

SEQ ID NO: 8020 - protein, 11 aa, Artificial Sequence
  Description of Artificial Sequence: Synthetic peptide
  XENP018685 vhCDR3
YYANYGGYFDV

SEQ ID NO: 8021 - protein, 11 aa, Artificial Sequence
  Description of Artificial Sequence: Synthetic peptide
  XENP018685 vlCDR1
RASQSVSNDVA

SEQ ID NO: 8022 - protein, 7 aa, Artificial Sequence
  Description of Artificial Sequence: Synthetic peptide
  XENP018685 vlCDR2
YASHRYT

SEQ ID NO: 8023 - protein, 9 aa, Artificial Sequence
  Description of Artificial Sequence: Synthetic peptide
  XENP018685 vlCDR3
QQDYSSPRT

SEQ ID NO: 8024 - protein, 249 aa, Artificial Sequence
  Description of Artificial Sequence: Synthetic polypeptide
  XENP018686 1G6_H1.186_L1_scFv(GKPGS)4
EVQLVESGGGLVKPGGSLRLSCAASGFTFSNYWMNWVRQAPGKGLEWVGEIRLKSNNYATHYAEPVKGRFTISRDDSKSTVYLQMNSLKTEDTAVYYCTRYYSNYGGYFDVWGAGTLVTVSSGKPGSGKPGSGKPGSGKPGSSIVMTQSPATLSVSPGERATLSCRASQSVSNDVAWYQQKPGQSPRLLINYASHRYTGVPDRFTGSGYGTEFTLTISSLQSEDFAVYFCQQDYSSPRTFGGGTKVEIK

SEQ ID NO: 8025 - protein, 122 aa, Artificial Sequence
  Description of Artificial Sequence: Synthetic polypeptide
  VH of XENP018686
EVQLVESGGGLVKPGGSLRLSCAASGFTFSNYWMNWVRQAPGKGLEWVGEIRLKSNNYATHYAEPVKGRFTISRDDSKSTVYLQMNSLKTEDTAVYYCTRYYSNYGGYFDVWGAGTLVTVSS

SEQ ID NO: 8026 - protein, 107 aa, Artificial Sequence; identical to SEQ ID NO: 6247
  Description of Artificial Sequence: Synthetic polypeptide
  VL of XENP018686

SEQ ID NO: 8027 - protein, 5 aa, Artificial Sequence
  Description of Artificial Sequence: Synthetic peptide
  XENP018686 vhCDR1
NYWMN

SEQ ID NO: 8028 - protein, 19 aa, Artificial Sequence
  Description of Artificial Sequence: Synthetic peptide
  XENP018686 vhCDR2
EIRLKSNNYATHYAEPVKG

SEQ ID NO: 8029 - protein, 11 aa, Artificial Sequence
  Description of Artificial Sequence: Synthetic peptide
  XENP018686 vhCDR3
YYSNYGGYFDV

SEQ ID NO: 8030 - protein, 11 aa, Artificial Sequence
  Description of Artificial Sequence: Synthetic peptide
  XENP018686 vlCDR1
RASQSVSNDVA

SEQ ID NO: 8031 - protein, 7 aa, Artificial Sequence
  Description of Artificial Sequence: Synthetic peptide
  XENP018686 vlCDR2
YASHRYT

SEQ ID NO: 8032 - protein, 9 aa, Artificial Sequence
  Description of Artificial Sequence: Synthetic peptide
  XENP018686 vlCDR3
QQDYSSPRT

SEQ ID NO: 8033 - protein, 249 aa, Artificial Sequence
  Description of Artificial Sequence: Synthetic polypeptide
  XENP018687 1G6_H1.187_L1_scFv(GKPGS)4
EVQLVESGGGLVKPGGSLRLSCAASGFTFSNYWMNWVRQAPGKGLEWVGEIRLKSNNYATHYAEPVKGRFTISRDDSKSTVYLQMNSLKTEDTAVYYCTRYYTNYGGYFDVWGAGTLVTVSSGKPGSGKPGSGKPGSGKPGSSIVMTQSPATLSVSPGERATLSCRASQSVSNDVAWYQQKPGQSPRLLINYASHRYTGVPDRFTGSGYGTEFTLTISSLQSEDFAVYFCQQDYSSPRTFGGGTKVEIK

SEQ ID NO: 8034 - protein, 122 aa, Artificial Sequence
  Description of Artificial Sequence: Synthetic polypeptide
  VH of XENP018687
EVQLVESGGGLVKPGGSLRLSCAASGFTFSNYWMNWVRQAPGKGLEWVGEIRLKSNNYATHYAEPVKGRFTISRDDSKSTVYLQMNSLKTEDTAVYYCTRYYTNYGGYFDVWGAGTLVTVSS

SEQ ID NO: 8035 - protein, 107 aa, Artificial Sequence; identical to SEQ ID NO: 6247
  Description of Artificial Sequence: Synthetic polypeptide
  VL of XENP018687

SEQ ID NO: 8036 - protein, 5 aa, Artificial Sequence
  Description of Artificial Sequence: Synthetic peptide
  XENP018687 vhCDR1
NYWMN

SEQ ID NO: 8037 - protein, 19 aa, Artificial Sequence
  Description of Artificial Sequence: Synthetic peptide
  XENP018687 vhCDR2
EIRLKSNNYATHYAEPVKG

SEQ ID NO: 8038 - protein, 11 aa, Artificial Sequence
  Description of Artificial Sequence: Synthetic peptide
  XENP018687 vhCDR3
YYTNYGGYFDV

SEQ ID NO: 8039 - protein, 11 aa, Artificial Sequence
  Description of Artificial Sequence: Synthetic peptide
  XENP018687 vlCDR1
RASQSVSNDVA

SEQ ID NO: 8040 - protein, 7 aa, Artificial Sequence
  Description of Artificial Sequence: Synthetic peptide
  XENP018687 vlCDR2
YASHRYT

SEQ ID NO: 8041 - protein, 9 aa, Artificial Sequence
  Description of Artificial Sequence: Synthetic peptide
  XENP018687 vlCDR3
QQDYSSPRT

SEQ ID NO: 8042 - protein, 249 aa, Artificial Sequence
  Description of Artificial Sequence: Synthetic polypeptide
  XENP018688 1G6_H1.188_L1_scFv(GKPGS)4
EVQLVESGGGLVKPGGSLRLSCAASGFTFSNYWMNWVRQAPGKGLEWVGEIRLKSNNYATHYAEPVKGRFTISRDDSKSTVYLQMNSLKTEDTAVYYCTRYYQNYGGYFDVWGAGTLVTVSSGKPGSGKPGSGKPGSGKPGSSIVMTQSPATLSVSPGERATLSCRASQSVSNDVAWYQQKPGQSPRLLINYASHRYTGVPDRFTGSGYGTEFTLTISSLQSEDFAVYFCQQDYSSPRTFGGGTKVEIK

SEQ ID NO: 8043 - protein, 122 aa, Artificial Sequence
  Description of Artificial Sequence: Synthetic polypeptide
  VH of XENP018688
EVQLVESGGGLVKPGGSLRLSCAASGFTFSNYWMNWVRQAPGKGLEWVGEIRLKSNNYATHYAEPVKGRFTISRDDSKSTVYLQMNSLKTEDTAVYYCTRYYQNYGGYFDVWGAGTLVTVSS

SEQ ID NO: 8044 - protein, 107 aa, Artificial Sequence; identical to SEQ ID NO: 6247
  Description of Artificial Sequence: Synthetic polypeptide
  VL of XENP018688

SEQ ID NO: 8045 - protein, 5 aa, Artificial Sequence
  Description of Artificial Sequence: Synthetic peptide
  XENP018688 vhCDR1
NYWMN

SEQ ID NO: 8046 - protein, 19 aa, Artificial Sequence
  Description of Artificial Sequence: Synthetic peptide
  XENP018688 vhCDR2
EIRLKSNNYATHYAEPVKG

SEQ ID NO: 8047 - protein, 11 aa, Artificial Sequence
  Description of Artificial Sequence: Synthetic peptide
  XENP018688 vhCDR3
YYQNYGGYFDV

SEQ ID NO: 8048 - protein, 11 aa, Artificial Sequence
  Description of Artificial Sequence: Synthetic peptide
  XENP018688 vlCDR1
RASQSVSNDVA

SEQ ID NO: 8049 - protein, 7 aa, Artificial Sequence
  Description of Artificial Sequence: Synthetic peptide
  XENP018688 vlCDR2
YASHRYT

SEQ ID NO: 8050 - protein, 9 aa, Artificial Sequence
  Description of Artificial Sequence: Synthetic peptide
  XENP018688 vlCDR3
QQDYSSPRT

SEQ ID NO: 8051 - protein, 249 aa, Artificial Sequence
  Description of Artificial Sequence: Synthetic polypeptide
  XENP018689 1G6_H1.189_L1_scFv(GKPGS)4
EVQLVESGGGLVKPGGSLRLSCAASGFTFSNYWMNWVRQAPGKGLEWVGEIRLKSNNYATHYAEPVKGRFTISRDDSKSTVYLQMNSLKTEDTAVYYCTRYYHNYGGYFDVWGAGTLVTVSSGKPGSGKPGSGKPGSGKPGSSIVMTQSPATLSVSPGERATLSCRASQSVSNDVAWYQQKPGQSPRLLINYASHRYTGVPDRFTGSGYGTEFTLTISSLQSEDFAVYFCQQDYSSPRTFGGGTKVEIK

SEQ ID NO: 8052 - protein, 122 aa, Artificial Sequence
  Description of Artificial Sequence: Synthetic polypeptide
  VH of XENP018689
EVQLVESGGGLVKPGGSLRLSCAASGFTFSNYWMNWVRQAPGKGLEWVGEIRLKSNNYATHYAEPVKGRFTISRDDSKSTVYLQMNSLKTEDTAVYYCTRYYHNYGGYFDVWGAGTLVTVSS

SEQ ID NO: 8053 - protein, 107 aa, Artificial Sequence; identical to SEQ ID NO: 6247
  Description of Artificial Sequence: Synthetic polypeptide
  VL of XENP018689

SEQ ID NO: 8054 - protein, 5 aa, Artificial Sequence
  Description of Artificial Sequence: Synthetic peptide
  XENP018689 vhCDR1
NYWMN

SEQ ID NO: 8055 - protein, 19 aa, Artificial Sequence
  Description of Artificial Sequence: Synthetic peptide
  XENP018689 vhCDR2
EIRLKSNNYATHYAEPVKG

SEQ ID NO: 8056 - protein, 11 aa, Artificial Sequence
  Description of Artificial Sequence: Synthetic peptide
  XENP018689 vhCDR3
YYHNYGGYFDV

SEQ ID NO: 8057 - protein, 11 aa, Artificial Sequence
  Description of Artificial Sequence: Synthetic peptide
  XENP018689 vlCDR1
RASQSVSNDVA

SEQ ID NO: 8058 - protein, 7 aa, Artificial Sequence
  Description of Artificial Sequence: Synthetic peptide
  XENP018689 vlCDR2
YASHRYT

SEQ ID NO: 8059 - protein, 9 aa, Artificial Sequence
  Description of Artificial Sequence: Synthetic peptide
  XENP018689 vlCDR3
QQDYSSPRT

SEQ ID NO: 8060 - protein, 249 aa, Artificial Sequence
  Description of Artificial Sequence: Synthetic polypeptide
  XENP018690 1G6_H1.190_L1_scFv(GKPGS)4
EVQLVESGGGLVKPGGSLRLSCAASGFTFSNYWMNWVRQAPGKGLEWVGEIRLKSNNYATHYAEPVKGRFTISRDDSKSTVYLQMNSLKTEDTAVYYCTRYYDNYGGYFDVWGAGTLVTVSSGKPGSGKPGSGKPGSGKPGSSIVMTQSPATLSVSPGERATLSCRASQSVSNDVAWYQQKPGQSPRLLINYASHRYTGVPDRFTGSGYGTEFTLTISSLQSEDFAVYFCQQDYSSPRTFGGGTKVEIK

SEQ ID NO: 8061 - protein, 122 aa, Artificial Sequence
  Description of Artificial Sequence: Synthetic polypeptide
  VH of XENP018690
EVQLVESGGGLVKPGGSLRLSCAASGFTFSNYWMNWVRQAPGKGLEWVGEIRLKSNNYATHYAEPVKGRFTISRDDSKSTVYLQMNSLKTEDTAVYYCTRYYDNYGGYFDVWGAGTLVTVSS

SEQ ID NO: 8062 - protein, 107 aa, Artificial Sequence; identical to SEQ ID NO: 6247
  Description of Artificial Sequence: Synthetic polypeptide
  VL of XENP018690

SEQ ID NO: 8063 - protein, 5 aa, Artificial Sequence
  Description of Artificial Sequence: Synthetic peptide
  XENP018690 vhCDR1
NYWMN

SEQ ID NO: 8064 - protein, 19 aa, Artificial Sequence
  Description of Artificial Sequence: Synthetic peptide
  XENP018690 vhCDR2
EIRLKSNNYATHYAEPVKG

SEQ ID NO: 8065 - protein, 11 aa, Artificial Sequence
  Description of Artificial Sequence: Synthetic peptide
  XENP018690 vhCDR3
YYDNYGGYFDV

SEQ ID NO: 8066 - protein, 11 aa, Artificial Sequence
  Description of Artificial Sequence: Synthetic peptide
  XENP018690 vlCDR1
RASQSVSNDVA

SEQ ID NO: 8067 - protein, 7 aa, Artificial Sequence
  Description of Artificial Sequence: Synthetic peptide
  XENP018690 vlCDR2
YASHRYT

SEQ ID NO: 8068 - protein, 9 aa, Artificial Sequence
  Description of Artificial Sequence: Synthetic peptide
  XENP018690 vlCDR3
QQDYSSPRT

SEQ ID NO: 8069 - protein, 249 aa, Artificial Sequence
  Description of Artificial Sequence: Synthetic polypeptide
  XENP018691 1G6_H1.191_L1_scFv(GKPGS)4
EVQLVESGGGLVKPGGSLRLSCAASGFTFSNYWMNWVRQAPGKGLEWVGEIRLKSNNYATHYAEPVKGRFTISRDDSKSTVYLQMNSLKTEDTAVYYCTRYYKNYGGYFDVWGAGTLVTVSSGKPGSGKPGSGKPGSGKPGSSIVMTQSPATLSVSPGERATLSCRASQSVSNDVAWYQQKPGQSPRLLINYASHRYTGVPDRFTGSGYGTEFTLTISSLQSEDFAVYFCQQDYSSPRTFGGGTKVEIK

SEQ ID NO: 8070 - protein, 122 aa, Artificial Sequence
  Description of Artificial Sequence: Synthetic polypeptide
  VH of XENP018691
EVQLVESGGGLVKPGGSLRLSCAASGFTFSNYWMNWVRQAPGKGLEWVGEIRLKSNNYATHYAEPVKGRFTISRDDSKSTVYLQMNSLKTEDTAVYYCTRYYKNYGGYFDVWGAGTLVTVSS

SEQ ID NO: 8071 - protein, 107 aa, Artificial Sequence; identical to SEQ ID NO: 6247
  Description of Artificial Sequence: Synthetic polypeptide
  VL of XENP018691

SEQ ID NO: 8072 - protein, 5 aa, Artificial Sequence
  Description of Artificial Sequence: Synthetic peptide
  XENP018691 vhCDR1
NYWMN

SEQ ID NO: 8073 - protein, 19 aa, Artificial Sequence
  Description of Artificial Sequence: Synthetic peptide
  XENP018691 vhCDR2
EIRLKSNNYATHYAEPVKG

SEQ ID NO: 8074 - protein, 11 aa, Artificial Sequence
  Description of Artificial Sequence: Synthetic peptide
  XENP018691 vhCDR3
YYKNYGGYFDV

SEQ ID NO: 8075 - protein, 11 aa, Artificial Sequence
  Description of Artificial Sequence: Synthetic peptide
  XENP018691 vlCDR1
RASQSVSNDVA

SEQ ID NO: 8076 - protein, 7 aa, Artificial Sequence
  Description of Artificial Sequence: Synthetic peptide
  XENP018691 vlCDR2
YASHRYT

SEQ ID NO: 8077 - protein, 9 aa, Artificial Sequence
  Description of Artificial Sequence: Synthetic peptide
  XENP018691 vlCDR3
QQDYSSPRT

SEQ ID NO: 8078 - protein, 249 aa, Artificial Sequence
  Description of Artificial Sequence: Synthetic polypeptide
  XENP018692 1G6_H1.192_L1_scFv(GKPGS)4
EVQLVESGGGLVKPGGSLRLSCAASGFTFSNYWMNWVRQAPGKGLEWVGEIRLKSNNYATHYAEPVKGRFTISRDDSKSTVYLQMNSLKTEDTAVYYCTRYYLNYGGYFDVWGAGTLVTVSSGKPGSGKPGSGKPGSGKPGSSIVMTQSPATLSVSPGERATLSCRASQSVSNDVAWYQQKPGQSPRLLINYASHRYTGVPDRFTGSGYGTEFTLTISSLQSEDFAVYFCQQDYSSPRTFGGGTKVEIK

SEQ ID NO: 8079 - protein, 122 aa, Artificial Sequence
  Description of Artificial Sequence: Synthetic polypeptide
  VH of XENP018692
EVQLVESGGGLVKPGGSLRLSCAASGFTFSNYWMNWVRQAPGKGLEWVGEIRLKSNNYATHYAEPVKGRFTISRDDSKSTVYLQMNSLKTEDTAVYYCTRYYLNYGGYFDVWGAGTLVTVSS

SEQ ID NO: 8080 - protein, 107 aa, Artificial Sequence; identical to SEQ ID NO: 6247
  Description of Artificial Sequence: Synthetic polypeptide
  VL of XENP018692

SEQ ID NO: 8081 - protein, 5 aa, Artificial Sequence
  Description of Artificial Sequence: Synthetic peptide
  XENP018692 vhCDR1
NYWMN

SEQ ID NO: 8082 - protein, 19 aa, Artificial Sequence
  Description of Artificial Sequence: Synthetic peptide
  XENP018692 vhCDR2
EIRLKSNNYATHYAEPVKG

SEQ ID NO: 8083 - protein, 11 aa, Artificial Sequence
  Description of Artificial Sequence: Synthetic peptide
  XENP018692 vhCDR3
YYLNYGGYFDV

SEQ ID NO: 8084 - protein, 11 aa, Artificial Sequence
  Description of Artificial Sequence: Synthetic peptide
  XENP018692 vlCDR1
RASQSVSNDVA

SEQ ID NO: 8085 - protein, 7 aa, Artificial Sequence
  Description of Artificial Sequence: Synthetic peptide
  XENP018692 vlCDR2
YASHRYT

SEQ ID NO: 8086 - protein, 9 aa, Artificial Sequence
  Description of Artificial Sequence: Synthetic peptide
  XENP018692 vlCDR3
QQDYSSPRT

SEQ ID NO: 8087 - protein, 249 aa, Artificial Sequence
  Description of Artificial Sequence: Synthetic polypeptide
  XENP018693 1G6_H1.193_L1_scFv(GKPGS)4
EVQLVESGGGLVKPGGSLRLSCAASGFTFSNYWMNWVRQAPGKGLEWVGEIRLKSNNYATHYAEPVKGRFTISRDDSKSTVYLQMNSLKTEDTAVYYCTRYYFNYGGYFDVWGAGTLVTVSSGKPGSGKPGSGKPGSGKPGSSIVMTQSPATLSVSPGERATLSCRASQSVSNDVAWYQQKPGQSPRLLINYASHRYTGVPDRFTGSGYGTEFTLTISSLQSEDFAVYFCQQDYSSPRTFGGGTKVEIK

SEQ ID NO: 8088 - protein, 122 aa, Artificial Sequence
  Description of Artificial Sequence: Synthetic polypeptide
  VH of XENP018693
EVQLVESGGGLVKPGGSLRLSCAASGFTFSNYWMNWVRQAPGKGLEWVGEIRLKSNNYATHYAEPVKGRFTISRDDSKSTVYLQMNSLKTEDTAVYYCTRYYFNYGGYFDVWGAGTLVTVSS

SEQ ID NO: 8089 - protein, 107 aa, Artificial Sequence; identical to SEQ ID NO: 6247
  Description of Artificial Sequence: Synthetic polypeptide
  VL of XENP018693

SEQ ID NO: 8090 - protein, 5 aa, Artificial Sequence
  Description of Artificial Sequence: Synthetic peptide
  XENP018693 vhCDR1
NYWMN

SEQ ID NO: 8091 - protein, 19 aa, Artificial Sequence
  Description of Artificial Sequence: Synthetic peptide
  XENP018693 vhCDR2
EIRLKSNNYATHYAEPVKG

SEQ ID NO: 8092 - protein, 11 aa, Artificial Sequence
  Description of Artificial Sequence: Synthetic peptide
  XENP018693 vhCDR3
YYFNYGGYFDV

SEQ ID NO: 8093 - protein, 11 aa, Artificial Sequence
  Description of Artificial Sequence: Synthetic peptide
  XENP018693 vlCDR1
RASQSVSNDVA

SEQ ID NO: 8094 - protein, 7 aa, Artificial Sequence
  Description of Artificial Sequence: Synthetic peptide
  XENP018693 vlCDR2
YASHRYT

SEQ ID NO: 8095 - protein, 9 aa, Artificial Sequence
  Description of Artificial Sequence: Synthetic peptide
  XENP018693 vlCDR3
QQDYSSPRT

SEQ ID NO: 8096 - protein, 249 aa, Artificial Sequence
  Description of Artificial Sequence: Synthetic polypeptide
  XENP018694 1G6_H1.194_L1_scFv(GKPGS)4
EVQLVESGGGLVKPGGSLRLSCAASGFTFSNYWMNWVRQAPGKGLEWVGEIRLKSNNYATHYAEPVKGRFTISRDDSKSTVYLQMNSLKTEDTAVYYCTRYYGDYGGYFDVWGAGTLVTVSSGKPGSGKPGSGKPGSGKPGSSIVMTQSPATLSVSPGERATLSCRASQSVSNDVAWYQQKPGQSPRLLINYASHRYTGVPDRFTGSGYGTEFTLTISSLQSEDFAVYFCQQDYSSPRTFGGGTKVEIK

SEQ ID NO: 8097 - protein, 122 aa, Artificial Sequence
  Description of Artificial Sequence: Synthetic polypeptide
  VH of XENP018694
EVQLVESGGGLVKPGGSLRLSCAASGFTFSNYWMNWVRQAPGKGLEWVGEIRLKSNNYATHYAEPVKGRFTISRDDSKSTVYLQMNSLKTEDTAVYYCTRYYGDYGGYFDVWGAGTLVTVSS

SEQ ID NO: 8098 - protein, 107 aa, Artificial Sequence; identical to SEQ ID NO: 6247
  Description of Artificial Sequence: Synthetic polypeptide
  VL of XENP018694

SEQ ID NO: 8099 - protein, 5 aa, Artificial Sequence
  Description of Artificial Sequence: Synthetic peptide
  XENP018694 vhCDR1
NYWMN

SEQ ID NO: 8100 - protein, 19 aa, Artificial Sequence
  Description of Artificial Sequence: Synthetic peptide
  XENP018694 vhCDR2
EIRLKSNNYATHYAEPVKG

SEQ ID NO: 8101 - protein, 11 aa, Artificial Sequence
  Description of Artificial Sequence: Synthetic peptide
  XENP018694 vhCDR3
YYGDYGGYFDV

SEQ ID NO: 8102 - protein, 11 aa, Artificial Sequence
  Description of Artificial Sequence: Synthetic peptide
  XENP018694 vlCDR1
RASQSVSNDVA

SEQ ID NO: 8103 - protein, 7 aa, Artificial Sequence
  Description of Artificial Sequence: Synthetic peptide
  XENP018694 vlCDR2
YASHRYT

SEQ ID NO: 8104 - protein, 9 aa, Artificial Sequence
  Description of Artificial Sequence: Synthetic peptide
  XENP018694 vlCDR3
QQDYSSPRT

SEQ ID NO: 8105 - protein, 249 aa, Artificial Sequence
  Description of Artificial Sequence: Synthetic polypeptide
  XENP018695 1G6_H1.195_L1_scFv(GKPGS)4
EVQLVESGGGLVKPGGSLRLSCAASGFTFSNYWMNWVRQAPGKGLEWVGEIRLKSNNYATHYAEPVKGRFTISRDDSKSTVYLQMNSLKTEDTAVYYCTRYYGHYGGYFDVWGAGTLVTVSSGKPGSGKPGSGKPGSGKPGSSIVMTQSPATLSVSPGERATLSCRASQSVSNDVAWYQQKPGQSPRLLINYASHRYTGVPDRFTGSGYGTEFTLTISSLQSEDFAVYFCQQDYSSPRTFGGGTKVEIK

SEQ ID NO: 8106 - protein, 122 aa, Artificial Sequence
  Description of Artificial Sequence: Synthetic polypeptide
  VH of XENP018695
EVQLVESGGGLVKPGGSLRLSCAASGFTFSNYWMNWVRQAPGKGLEWVGEIRLKSNNYATHYAEPVKGRFTISRDDSKSTVYLQMNSLKTEDTAVYYCTRYYGHYGGYFDVWGAGTLVTVSS

SEQ ID NO: 8107 - protein, 107 aa, Artificial Sequence; identical to SEQ ID NO: 6247
  Description of Artificial Sequence: Synthetic polypeptide
  VL of XENP018695

SEQ ID NO: 8108 - protein, 5 aa, Artificial Sequence
  Description of Artificial Sequence: Synthetic peptide
  XENP018695 vhCDR1
NYWMN

SEQ ID NO: 8109 - protein, 19 aa, Artificial Sequence
  Description of Artificial Sequence: Synthetic peptide
  XENP018695 vhCDR2
EIRLKSNNYATHYAEPVKG

SEQ ID NO: 8110 - protein, 11 aa, Artificial Sequence
  Description of Artificial Sequence: Synthetic peptide
  XENP018695 vhCDR3
YYGHYGGYFDV

SEQ ID NO: 8111 - protein, 11 aa, Artificial Sequence
  Description of Artificial Sequence: Synthetic peptide
  XENP018695 vlCDR1
RASQSVSNDVA

SEQ ID NO: 8112 - protein, 7 aa, Artificial Sequence
  Description of Artificial Sequence: Synthetic peptide
  XENP018695 vlCDR2
YASHRYT

SEQ ID NO: 8113 - protein, 9 aa, Artificial Sequence
  Description of Artificial Sequence: Synthetic peptide
  XENP018695 vlCDR3
QQDYSSPRT

SEQ ID NO: 8114 - protein, 249 aa, Artificial Sequence
  Description of Artificial Sequence: Synthetic polypeptide
  XENP018696 1G6_H1.196_L1_scFv(GKPGS)4
EVQLVESGGGLVKPGGSLRLSCAASGFTFSNYWMNWVRQAPGKGLEWVGEIRLKSNNYATHYAEPVKGRFTISRDDSKSTVYLQMNSLKTEDTAVYYCTRYYGEYGGYFDVWGAGTLVTVSSGKPGSGKPGSGKPGSGKPGSSIVMTQSPATLSVSPGERATLSCRASQSVSNDVAWYQQKPGQSPRLLINYASHRYTGVPDRFTGSGYGTEFTLTISSLQSEDFAVYFCQQDYSSPRTFGGGTKVEIK

SEQ ID NO: 8115 - protein, 122 aa, Artificial Sequence
  Description of Artificial Sequence: Synthetic polypeptide
  VH of XENP018696
EVQLVESGGGLVKPGGSLRLSCAASGFTFSNYWMNWVRQAPGKGLEWVGEIRLKSNNYATHYAEPVKGRFTISRDDSKSTVYLQMNSLKTEDTAVYYCTRYYGEYGGYFDVWGAGTLVTVSS

SEQ ID NO: 8116 - protein, 107 aa, Artificial Sequence; identical to SEQ ID NO: 6247
  Description of Artificial Sequence: Synthetic polypeptide
  VL of XENP018696

SEQ ID NO: 8117 - protein, 5 aa, Artificial Sequence
  Description of Artificial Sequence: Synthetic peptide
  XENP018696 vhCDR1
NYWMN

SEQ ID NO: 8118 - protein, 19 aa, Artificial Sequence
  Description of Artificial Sequence: Synthetic peptide
  XENP018696 vhCDR2
EIRLKSNNYATHYAEPVKG

SEQ ID NO: 8119 - protein, 11 aa, Artificial Sequence
  Description of Artificial Sequence: Synthetic peptide
  XENP018696 vhCDR3
YYGEYGGYFDV

SEQ ID NO: 8120 - protein, 11 aa, Artificial Sequence
  Description of Artificial Sequence: Synthetic peptide
  XENP018696 vlCDR1
RASQSVSNDVA

SEQ ID NO: 8121 - protein, 7 aa, Artificial Sequence
  Description of Artificial Sequence: Synthetic peptide
  XENP018696 vlCDR2
YASHRYT

SEQ ID NO: 8122 - protein, 9 aa, Artificial Sequence
  Description of Artificial Sequence: Synthetic peptide
  XENP018696 vlCDR3
QQDYSSPRT

SEQ ID NO: 8123 - protein, 249 aa, Artificial Sequence
  Description of Artificial Sequence: Synthetic polypeptide
  XENP018701 1G6_H1.197_L1_scFv(GKPGS)4
EVQLVESGGGLVKPGGSLRLSCAASGFTFSNYWMNWVRQAPGKGLEWVGEIRLKSNNYATHYAEPVKGRFTISRDDSKSTVYLQMNSLKTEDTAVYYCTRYYGSYGGYFDVWGAGTLVTVSSGKPGSGKPGSGKPGSGKPGSSIVMTQSPATLSVSPGERATLSCRASQSVSNDVAWYQQKPGQSPRLLINYASHRYTGVPDRFTGSGYGTEFTLTISSLQSEDFAVYFCQQDYSSPRTFGGGTKVEIK

SEQ ID NO: 8124 - protein, 122 aa, Artificial Sequence
  Description of Artificial Sequence: Synthetic polypeptide
  VH of XENP018701
EVQLVESGGGLVKPGGSLRLSCAASGFTFSNYWMNWVRQAPGKGLEWVGEIRLKSNNYATHYAEPVKGRFTISRDDSKSTVYLQMNSLKTEDTAVYYCTRYYGSYGGYFDVWGAGTLVTVSS

SEQ ID NO: 8125 - protein, 107 aa, Artificial Sequence; identical to SEQ ID NO: 6247
  Description of Artificial Sequence: Synthetic polypeptide
  VL of XENP018701

SEQ ID NO: 8126 - protein, 5 aa, Artificial Sequence
  Description of Artificial Sequence: Synthetic peptide
  XENP018701 vhCDR1
NYWMN

SEQ ID NO: 8127 - protein, 19 aa, Artificial Sequence
  Description of Artificial Sequence: Synthetic peptide
  XENP018701 vhCDR2
EIRLKSNNYATHYAEPVKG

SEQ ID NO: 8128 - protein, 11 aa, Artificial Sequence
  Description of Artificial Sequence: Synthetic peptide
  XENP018701 vhCDR3
YYGSYGGYFDV

SEQ ID NO: 8129 - protein, 11 aa, Artificial Sequence
  Description of Artificial Sequence: Synthetic peptide
  XENP018701 vlCDR1
RASQSVSNDVA

SEQ ID NO: 8130 - protein, 7 aa, Artificial Sequence
  Description of Artificial Sequence: Synthetic peptide
  XENP018701 vlCDR2
YASHRYT

SEQ ID NO: 8131 - protein, 9 aa, Artificial Sequence
  Description of Artificial Sequence: Synthetic peptide
  XENP018701 vlCDR3
QQDYSSPRT

SEQ ID NO: 8132 - protein, 249 aa, Artificial Sequence
  Description of Artificial Sequence: Synthetic polypeptide
  XENP018702 1G6_H1.198_L1_scFv(GKPGS)4
EVQLVESGGGLVKPGGSLRLSCAASGFTFSNYWMNWVRQAPGKGLEWVGEIRLKSNNYATHYAEPVKGRFTISRDDSKSTVYLQMNSLKTEDTAVYYCTRYYGRYGGYFDVWGAGTLVTVSSGKPGSGKPGSGKPGSGKPGSSIVMTQSPATLSVSPGERATLSCRASQSVSNDVAWYQQKPGQSPRLLINYASHRYTGVPDRFTGSGYGTEFTLTISSLQSEDFAVYFCQQDYSSPRTFGGGTKVEIK

SEQ ID NO: 8133 - protein, 122 aa, Artificial Sequence
  Description of Artificial Sequence: Synthetic polypeptide
  VH of XENP018702
EVQLVESGGGLVKPGGSLRLSCAASGFTFSNYWMNWVRQAPGKGLEWVGEIRLKSNNYATHYAEPVKGRFTISRDDSKSTVYLQMNSLKTEDTAVYYCTRYYGRYGGYFDVWGAGTLVTVSS

SEQ ID NO: 8134 - protein, 107 aa, Artificial Sequence; identical to SEQ ID NO: 6247
  Description of Artificial Sequence: Synthetic polypeptide
  VL of XENP018702

SEQ ID NO: 8135 - protein, 5 aa, Artificial Sequence
  Description of Artificial Sequence: Synthetic peptide
  XENP018702 vhCDR1
NYWMN

SEQ ID NO: 8136 - protein, 19 aa, Artificial Sequence
  Description of Artificial Sequence: Synthetic peptide
  XENP018702 vhCDR2
EIRLKSNNYATHYAEPVKG

SEQ ID NO: 8137 - protein, 11 aa, Artificial Sequence
  Description of Artificial Sequence: Synthetic peptide
  XENP018702 vhCDR3
YYGRYGGYFDV

SEQ ID NO: 8138 - protein, 11 aa, Artificial Sequence
  Description of Artificial Sequence: Synthetic peptide
  XENP018702 vlCDR1
RASQSVSNDVA

SEQ ID NO: 8139 - protein, 7 aa, Artificial Sequence
  Description of Artificial Sequence: Synthetic peptide
  XENP018702 vlCDR2
YASHRYT

SEQ ID NO: 8140 - protein, 9 aa, Artificial Sequence
  Description of Artificial Sequence: Synthetic peptide
  XENP018702 vlCDR3
QQDYSSPRT

SEQ ID NO: 8141 - protein, 249 aa, Artificial Sequence
  Description of Artificial Sequence: Synthetic polypeptide
  XENP018703 1G6_H1.199_L1_scFv(GKPGS)4
EVQLVESGGGLVKPGGSLRLSCAASGFTFSNYWMNWVRQAPGKGLEWVGEIRLKSNNYATHYAEPVKGRFTISRDDSKSTVYLQMNSLKTEDTAVYYCTRYYGLYGGYFDVWGAGTLVTVSSGKPGSGKPGSGKPGSGKPGSSIVMTQSPATLSVSPGERATLSCRASQSVSNDVAWYQQKPGQSPRLLINYASHRYTGVPDRFTGSGYGTEFTLTISSLQSEDFAVYFCQQDYSSPRTFGGGTKVEIK

SEQ ID NO: 8142 - protein, 122 aa, Artificial Sequence
  Description of Artificial Sequence: Synthetic polypeptide
  VH of XENP018703
EVQLVESGGGLVKPGGSLRLSCAASGFTFSNYWMNWVRQAPGKGLEWVGEIRLKSNNYATHYAEPVKGRFTISRDDSKSTVYLQMNSLKTEDTAVYYCTRYYGLYGGYFDVWGAGTLVTVSS

SEQ ID NO: 8143 - protein, 107 aa, Artificial Sequence; identical to SEQ ID NO: 6247
  Description of Artificial Sequence: Synthetic polypeptide
  VL of XENP018703

SEQ ID NO: 8144 - protein, 5 aa, Artificial Sequence
  Description of Artificial Sequence: Synthetic peptide
  XENP018703 vhCDR1
NYWMN

SEQ ID NO: 8145 - protein, 19 aa, Artificial Sequence
  Description of Artificial Sequence: Synthetic peptide
  XENP018703 vhCDR2
EIRLKSNNYATHYAEPVKG

SEQ ID NO: 8146 - protein, 11 aa, Artificial Sequence
  Description of Artificial Sequence: Synthetic peptide
  XENP018703 vhCDR3
YYGLYGGYFDV

SEQ ID NO: 8147 - protein, 11 aa, Artificial Sequence
  Description of Artificial Sequence: Synthetic peptide
  XENP018703 vlCDR1
RASQSVSNDVA

SEQ ID NO: 8148 - protein, 7 aa, Artificial Sequence
  Description of Artificial Sequence: Synthetic peptide
  XENP018703 vlCDR2
YASHRYT

SEQ ID NO: 8149 - protein, 9 aa, Artificial Sequence
  Description of Artificial Sequence: Synthetic peptide
  XENP018703 vlCDR3
QQDYSSPRT

SEQ ID NO: 8150 - protein, 249 aa, Artificial Sequence
  Description of Artificial Sequence: Synthetic polypeptide
  XENP018704 1G6_H1.200_L1_scFv(GKPGS)4
EVQLVESGGGLVKPGGSLRLSCAASGFTFSNYWMNWVRQAPGKGLEWVGEIRLKSNNYATHYAEPVKGRFTISRDDSKSTVYLQMNSLKTEDTAVYYCTRYYGTYGGYFDVWGAGTLVTVSSGKPGSGKPGSGKPGSGKPGSSIVMTQSPATLSVSPGERATLSCRASQSVSNDVAWYQQKPGQSPRLLINYASHRYTGVPDRFTGSGYGTEFTLTISSLQSEDFAVYFCQQDYSSPRTFGGGTKVEIK

SEQ ID NO: 8151 - protein, 122 aa, Artificial Sequence
  Description of Artificial Sequence: Synthetic polypeptide
  VH of XENP018704
EVQLVESGGGLVKPGGSLRLSCAASGFTFSNYWMNWVRQAPGKGLEWVGEIRLKSNNYATHYAEPVKGRFTISRDDSKSTVYLQMNSLKTEDTAVYYCTRYYGTYGGYFDVWGAGTLVTVSS

SEQ ID NO: 8152 - protein, 107 aa, Artificial Sequence; identical to SEQ ID NO: 6247
  Description of Artificial Sequence: Synthetic polypeptide
  VL of XENP018704

SEQ ID NO: 8153 - protein, 5 aa, Artificial Sequence
  Description of Artificial Sequence: Synthetic peptide
  XENP018704 vhCDR1
NYWMN

SEQ ID NO: 8154 - protein, 19 aa, Artificial Sequence
  Description of Artificial Sequence: Synthetic peptide
  XENP018704 vhCDR2
EIRLKSNNYATHYAEPVKG

SEQ ID NO: 8155 - protein, 11 aa, Artificial Sequence
  Description of Artificial Sequence: Synthetic peptide
  XENP018704 vhCDR3
YYGTYGGYFDV

SEQ ID NO: 8156 - protein, 11 aa, Artificial Sequence
  Description of Artificial Sequence: Synthetic peptide
  XENP018704 vlCDR1
RASQSVSNDVA

SEQ ID NO: 8157 - protein, 7 aa, Artificial Sequence
  Description of Artificial Sequence: Synthetic peptide
  XENP018704 vlCDR2
YASHRYT

SEQ ID NO: 8158 - protein, 9 aa, Artificial Sequence
  Description of Artificial Sequence: Synthetic peptide
  XENP018704 vlCDR3
QQDYSSPRT

SEQ ID NO: 8159 - protein, 249 aa, Artificial Sequence
  Description of Artificial Sequence: Synthetic polypeptide
  XENP018705 1G6_H1.201_L1_scFv(GKPGS)4
EVQLVESGGGLVKPGGSLRLSCAASGFTFSNYWMNWVRQAPGKGLEWVGEIRLKSNNYATHYAEPVKGRFTISRDDSKSTVYLQMNSLKTEDTAVYYCTRYYGGYGGYFDVWGAGTLVTVSSGKPGSGKPGSGKPGSGKPGSSIVMTQSPATLSVSPGERATLSCRASQSVSNDVAWYQQKPGQSPRLLINYASHRYTGVPDRFTGSGYGTEFTLTISSLQSEDFAVYFCQQDYSSPRTFGGGTKVEIK

SEQ ID NO: 8160 - protein, 122 aa, Artificial Sequence
  Description of Artificial Sequence: Synthetic polypeptide
  VH of XENP018705
EVQLVESGGGLVKPGGSLRLSCAASGFTFSNYWMNWVRQAPGKGLEWVGEIRLKSNNYATHYAEPVKGRFTISRDDSKSTVYLQMNSLKTEDTAVYYCTRYYGGYGGYFDVWGAGTLVTVSS

SEQ ID NO: 8161 - protein, 107 aa, Artificial Sequence; identical to SEQ ID NO: 6247
  Description of Artificial Sequence: Synthetic polypeptide
  VL of XENP018705

SEQ ID NO: 8162 - protein, 5 aa, Artificial Sequence
  Description of Artificial Sequence: Synthetic peptide
  XENP018705 vhCDR1
NYWMN

SEQ ID NO: 8163 - protein, 19 aa, Artificial Sequence
  Description of Artificial Sequence: Synthetic peptide
  XENP018705 vhCDR2
EIRLKSNNYATHYAEPVKG

SEQ ID NO: 8164 - protein, 11 aa, Artificial Sequence
  Description of Artificial Sequence: Synthetic peptide
  XENP018705 vhCDR3
YYGGYGGYFDV

SEQ ID NO: 8165 - protein, 11 aa, Artificial Sequence
  Description of Artificial Sequence: Synthetic peptide
  XENP018705 vlCDR1
RASQSVSNDVA

SEQ ID NO: 8166 - protein, 7 aa, Artificial Sequence
  Description of Artificial Sequence: Synthetic peptide
  XENP018705 vlCDR2
YASHRYT

SEQ ID NO: 8167 - protein, 9 aa, Artificial Sequence
  Description of Artificial Sequence: Synthetic peptide
  XENP018705 vlCDR3
QQDYSSPRT

SEQ ID NO: 8168 - protein, 249 aa, Artificial Sequence
  Description of Artificial Sequence: Synthetic polypeptide
  XENP018706 1G6_H1.202_L1_scFv(GKPGS)4
EVQLVESGGGLVKPGGSLRLSCAASGFTFSNYWMNWVRQAPGKGLEWVGEIRLKSNNYATHYAEPVKGRFTISRDDSKSTVYLQMNSLKTEDTAVYYCTRYYGFYGGYFDVWGAGTLVTVSSGKPGSGKPGSGKPGSGKPGSSIVMTQSPATLSVSPGERATLSCRASQSVSNDVAWYQQKPGQSPRLLINYASHRYTGVPDRFTGSGYGTEFTLTISSLQSEDFAVYFCQQDYSSPRTFGGGTKVEIK

SEQ ID NO: 8169 - protein, 122 aa, Artificial Sequence
  Description of Artificial Sequence: Synthetic polypeptide
  VH of XENP018706
EVQLVESGGGLVKPGGSLRLSCAASGFTFSNYWMNWVRQAPGKGLEWVGEIRLKSNNYATHYAEPVKGRFTISRDDSKSTVYLQMNSLKTEDTAVYYCTRYYGFYGGYFDVWGAGTLVTVSS

SEQ ID NO: 8170 - protein, 107 aa, Artificial Sequence; identical to SEQ ID NO: 6247
  Description of Artificial Sequence: Synthetic polypeptide
  VL of XENP018706

SEQ ID NO: 8171 - protein, 5 aa, Artificial Sequence
  Description of Artificial Sequence: Synthetic peptide
  XENP018706 vhCDR1
NYWMN

SEQ ID NO: 8172 - protein, 19 aa, Artificial Sequence
  Description of Artificial Sequence: Synthetic peptide
  XENP018706 vhCDR2
EIRLKSNNYATHYAEPVKG

SEQ ID NO: 8173 - protein, 11 aa, Artificial Sequence
  Description of Artificial Sequence: Synthetic peptide
  XENP018706 vhCDR3
YYGFYGGYFDV

SEQ ID NO: 8174 - protein, 11 aa, Artificial Sequence
  Description of Artificial Sequence: Synthetic peptide
  XENP018706 vlCDR1
RASQSVSNDVA

SEQ ID NO: 8175 - protein, 7 aa, Artificial Sequence
  Description of Artificial Sequence: Synthetic peptide
  XENP018706 vlCDR2
YASHRYT

SEQ ID NO: 8176 - protein, 9 aa, Artificial Sequence
  Description of Artificial Sequence: Synthetic peptide
  XENP018706 vlCDR3
QQDYSSPRT

SEQ ID NO: 8177 - protein, 249 aa, Artificial Sequence
  Description of Artificial Sequence: Synthetic polypeptide
  XENP018707 1G6_H1.203_L1_scFv(GKPGS)4
EVQLVESGGGLVKPGGSLRLSCAASGFTFSNYWMNWVRQAPGKGLEWVGEIRLKSNNYATHYAEPVKGRFTISRDDSKSTVYLQMNSLKTEDTAVYYCTRYYGNFGGYFDVWGAGTLVTVSSGKPGSGKPGSGKPGSGKPGSSIVMTQSPATLSVSPGERATLSCRASQSVSNDVAWYQQKPGQSPRLLINYASHRYTGVPDRFTGSGYGTEFTLTISSLQSEDFAVYFCQQDYSSPRTFGGGTKVEIK

SEQ ID NO: 8178 - protein, 122 aa, Artificial Sequence
  Description of Artificial Sequence: Synthetic polypeptide
  VH of XENP018707
EVQLVESGGGLVKPGGSLRLSCAASGFTFSNYWMNWVRQAPGKGLEWVGEIRLKSNNYATHYAEPVKGRFTISRDDSKSTVYLQMNSLKTEDTAVYYCTRYYGNFGGYFDVWGAGTLVTVSS

SEQ ID NO: 8179 - protein, 107 aa, Artificial Sequence; identical to SEQ ID NO: 6247
  Description of Artificial Sequence: Synthetic polypeptide
  VL of XENP018707

SEQ ID NO: 8180 - protein, 5 aa, Artificial Sequence
  Description of Artificial Sequence: Synthetic peptide
  XENP018707 vhCDR1
NYWMN

SEQ ID NO: 8181 - protein, 19 aa, Artificial Sequence
  Description of Artificial Sequence: Synthetic peptide
  XENP018707 vhCDR2
EIRLKSNNYATHYAEPVKG

SEQ ID NO: 8182 - protein, 11 aa, Artificial Sequence
  Description of Artificial Sequence: Synthetic peptide
  XENP018707 vhCDR3
YYGNFGGYFDV

SEQ ID NO: 8183 - protein, 11 aa, Artificial Sequence
  Description of Artificial Sequence: Synthetic peptide
  XENP018707 vlCDR1
RASQSVSNDVA

SEQ ID NO: 8184 - protein, 7 aa, Artificial Sequence
  Description of Artificial Sequence: Synthetic peptide
  XENP018707 vlCDR2
YASHRYT

SEQ ID NO: 8185 - protein, 9 aa, Artificial Sequence
  Description of Artificial Sequence: Synthetic peptide
  XENP018707 vlCDR3
QQDYSSPRT

SEQ ID NO: 8186 - protein, 249 aa, Artificial Sequence
  Description of Artificial Sequence: Synthetic polypeptide
  XENP018708 1G6_H1.204_L1_scFv(GKPGS)4
EVQLVESGGGLVKPGGSLRLSCAASGFTFSNYWMNWVRQAPGKGLEWVGEIRLKSNNYATHYAEPVKGRFTISRDDSKSTVYLQMNSLKTEDTAVYYCTRYYGNHGGYFDVWGAGTLVTVSSGKPGSGKPGSGKPGSGKPGSSIVMTQSPATLSVSPGERATLSCRASQSVSNDVAWYQQKPGQSPRLLINYASHRYTGVPDRFTGSGYGTEFTLTISSLQSEDFAVYFCQQDYSSPRTFGGGTKVEIK

SEQ ID NO: 8187 - protein, 122 aa, Artificial Sequence
  Description of Artificial Sequence: Synthetic polypeptide
  VH of XENP018708
EVQLVESGGGLVKPGGSLRLSCAASGFTFSNYWMNWVRQAPGKGLEWVGEIRLKSNNYATHYAEPVKGRFTISRDDSKSTVYLQMNSLKTEDTAVYYCTRYYGNHGGYFDVWGAGTLVTVSS

SEQ ID NO: 8188 - protein, 107 aa, Artificial Sequence; identical to SEQ ID NO: 6247
  Description of Artificial Sequence: Synthetic polypeptide
  VL of XENP018708

SEQ ID NO: 8189 - protein, 5 aa, Artificial Sequence
  Description of Artificial Sequence: Synthetic peptide
  XENP018708 vhCDR1
NYWMN

SEQ ID NO: 8190 - protein, 19 aa, Artificial Sequence
  Description of Artificial Sequence: Synthetic peptide
  XENP018708 vhCDR2
EIRLKSNNYATHYAEPVKG

SEQ ID NO: 8191 - protein, 11 aa, Artificial Sequence
  Description of Artificial Sequence: Synthetic peptide
  XENP018708 vhCDR3
YYGNHGGYFDV

SEQ ID NO: 8192 - protein, 11 aa, Artificial Sequence
  Description of Artificial Sequence: Synthetic peptide
  XENP018708 vlCDR1
RASQSVSNDVA

SEQ ID NO: 8193 - protein, 7 aa, Artificial Sequence
  Description of Artificial Sequence: Synthetic peptide
  XENP018708 vlCDR2
YASHRYT

SEQ ID NO: 8194 - protein, 9 aa, Artificial Sequence
  Description of Artificial Sequence: Synthetic peptide
  XENP018708 vlCDR3
QQDYSSPRT

SEQ ID NO: 8195 - protein, 249 aa, Artificial Sequence
  Description of Artificial Sequence: Synthetic polypeptide
  XENP018709 1G6_H1.205_L1_scFv(GKPGS)4
EVQLVESGGGLVKPGGSLRLSCAASGFTFSNYWMNWVRQAPGKGLEWVGEIRLKSNNYATHYAEPVKGRFTISRDDSKSTVYLQMNSLKTEDTAVYYCTRYYGNLGGYFDVWGAGTLVTVSSGKPGSGKPGSGKPGSGKPGSSIVMTQSPATLSVSPGERATLSCRASQSVSNDVAWYQQKPGQSPRLLINYASHRYTGVPDRFTGSGYGTEFTLTISSLQSEDFAVYFCQQDYSSPRTFGGGTKVEIK

SEQ ID NO: 8196 - protein, 122 aa, Artificial Sequence
  Description of Artificial Sequence: Synthetic polypeptide
  VH of XENP018709
EVQLVESGGGLVKPGGSLRLSCAASGFTFSNYWMNWVRQAPGKGLEWVGEIRLKSNNYATHYAEPVKGRFTISRDDSKSTVYLQMNSLKTEDTAVYYCTRYYGNLGGYFDVWGAGTLVTVSS

SEQ ID NO: 8197 - protein, 107 aa, Artificial Sequence; identical to SEQ ID NO: 6247
  Description of Artificial Sequence: Synthetic polypeptide
  VL of XENP018709

SEQ ID NO: 8198 - protein, 5 aa, Artificial Sequence
  Description of Artificial Sequence: Synthetic peptide
  XENP018709 vhCDR1
NYWMN

SEQ ID NO: 8199 - protein, 19 aa, Artificial Sequence
  Description of Artificial Sequence: Synthetic peptide
  XENP018709 vhCDR2
EIRLKSNNYATHYAEPVKG

SEQ ID NO: 8200 - protein, 11 aa, Artificial Sequence
  Description of Artificial Sequence: Synthetic peptide
  XENP018709 vhCDR3
YYGNLGGYFDV

SEQ ID NO: 8201 - protein, 11 aa, Artificial Sequence
  Description of Artificial Sequence: Synthetic peptide
  XENP018709 vlCDR1
RASQSVSNDVA

SEQ ID NO: 8202 - protein, 7 aa, Artificial Sequence
  Description of Artificial Sequence: Synthetic peptide
  XENP018709 vlCDR2
YASHRYT

SEQ ID NO: 8203 - protein, 9 aa, Artificial Sequence
  Description of Artificial Sequence: Synthetic peptide
  XENP018709 vlCDR3
QQDYSSPRT

SEQ ID NO: 8204 - protein, 249 aa, Artificial Sequence
  Description of Artificial Sequence: Synthetic polypeptide
  XENP018710 1G6_H1.206_L1_scFv(GKPGS)4
EVQLVESGGGLVKPGGSLRLSCAASGFTFSNYWMNWVRQAPGKGLEWVGEIRLKSNNYATHYAEPVKGRFTISRDDSKSTVYLQMNSLKTEDTAVYYCTRYYGNWGGYFDVWGAGTLVTVSSGKPGSGKPGSGKPGSGKPGSSIVMTQSPATLSVSPGERATLSCRASQSVSNDVAWYQQKPGQSPRLLINYASHRYTGVPDRFTGSGYGTEFTLTISSLQSEDFAVYFCQQDYSSPRTFGGGTKVEIK

SEQ ID NO: 8205 - protein, 122 aa, Artificial Sequence
  Description of Artificial Sequence: Synthetic polypeptide
  VH of XENP018710
EVQLVESGGGLVKPGGSLRLSCAASGFTFSNYWMNWVRQAPGKGLEWVGEIRLKSNNYATHYAEPVKGRFTISRDDSKSTVYLQMNSLKTEDTAVYYCTRYYGNWGGYFDVWGAGTLVTVSS

SEQ ID NO: 8206 - protein, 107 aa, Artificial Sequence; identical to SEQ ID NO: 6247
  Description of Artificial Sequence: Synthetic polypeptide
  VL of XENP018710

SEQ ID NO: 8207 - protein, 5 aa, Artificial Sequence
  Description of Artificial Sequence: Synthetic peptide
  XENP018710 vhCDR1
NYWMN

SEQ ID NO: 8208 - protein, 19 aa, Artificial Sequence
  Description of Artificial Sequence: Synthetic peptide
  XENP018710 vhCDR2
EIRLKSNNYATHYAEPVKG

SEQ ID NO: 8209 - protein, 11 aa, Artificial Sequence
  Description of Artificial Sequence: Synthetic peptide
  XENP018710 vhCDR3
YYGNWGGYFDV

SEQ ID NO: 8210 - protein, 11 aa, Artificial Sequence
  Description of Artificial Sequence: Synthetic peptide
  XENP018710 vlCDR1
RASQSVSNDVA

SEQ ID NO: 8211 - protein, 7 aa, Artificial Sequence
  Description of Artificial Sequence: Synthetic peptide
  XENP018710 vlCDR2
YASHRYT

SEQ ID NO: 8212 - protein, 9 aa, Artificial Sequence
  Description of Artificial Sequence: Synthetic peptide
  XENP018710 vlCDR3
QQDYSSPRT

SEQ ID NO: 8213 - protein, 249 aa, Artificial Sequence
  Description of Artificial Sequence: Synthetic polypeptide
  XENP018711 1G6_H1.207_L1_scFv(GKPGS)4
EVQLVESGGGLVKPGGSLRLSCAASGFTFSNYWMNWVRQAPGKGLEWVGEIRLKSNNYATHYAEPVKGRFTISRDDSKSTVYLQMNSLKTEDTAVYYCTRYYGNVGGYFDVWGAGTLVTVSSGKPGSGKPGSGKPGSGKPGSSIVMTQSPATLSVSPGERATLSCRASQSVSNDVAWYQQKPGQSPRLLINYASHRYTGVPDRFTGSGYGTEFTLTISSLQSEDFAVYFCQQDYSSPRTFGGGTKVEIK

SEQ ID NO: 8214 - protein, 122 aa, Artificial Sequence
  Description of Artificial Sequence: Synthetic polypeptide
  VH of XENP018711
EVQLVESGGGLVKPGGSLRLSCAASGFTFSNYWMNWVRQAPGKGLEWVGEIRLKSNNYATHYAEPVKGRFTISRDDSKSTVYLQMNSLKTEDTAVYYCTRYYGNVGGYFDVWGAGTLVTVSS

SEQ ID NO: 8215 - protein, 107 aa, Artificial Sequence; identical to SEQ ID NO: 6247
  Description of Artificial Sequence: Synthetic polypeptide
  VL of XENP018711

SEQ ID NO: 8216 - protein, 5 aa, Artificial Sequence
  Description of Artificial Sequence: Synthetic peptide
  XENP018711 vhCDR1
NYWMN

SEQ ID NO: 8217 - protein, 19 aa, Artificial Sequence
  Description of Artificial Sequence: Synthetic peptide
  XENP018711 vhCDR2
EIRLKSNNYATHYAEPVKG

SEQ ID NO: 8218 - protein, 11 aa, Artificial Sequence
  Description of Artificial Sequence: Synthetic peptide
  XENP018711 vhCDR3
YYGNVGGYFDV

SEQ ID NO: 8219 - protein, 11 aa, Artificial Sequence
  Description of Artificial Sequence: Synthetic peptide
  XENP018711 vlCDR1
RASQSVSNDVA

SEQ ID NO: 8220 - protein, 7 aa, Artificial Sequence
  Description of Artificial Sequence: Synthetic peptide
  XENP018711 vlCDR2
YASHRYT

SEQ ID NO: 8221 - protein, 9 aa, Artificial Sequence
  Description of Artificial Sequence: Synthetic peptide
  XENP018711 vlCDR3
QQDYSSPRT

SEQ ID NO: 8222 - protein, 249 aa, Artificial Sequence
  Description of Artificial Sequence: Synthetic polypeptide
  XENP018712 1G6_H1.208_L1_scFv(GKPGS)4
EVQLVESGGGLVKPGGSLRLSCAASGFTFSNYWMNWVRQAPGKGLEWVGEIRLKSNNYATHYAEPVKGRFTISRDDSKSTVYLQMNSLKTEDTAVYYCTRYYGNAGGYFDVWGAGTLVTVSSGKPGSGKPGSGKPGSGKPGSSIVMTQSPATLSVSPGERATLSCRASQSVSNDVAWYQQKPGQSPRLLINYASHRYTGVPDRFTGSGYGTEFTLTISSLQSEDFAVYFCQQDYSSPRTFGGGTKVEIK

SEQ ID NO: 8223 - protein, 122 aa, Artificial Sequence
  Description of Artificial Sequence: Synthetic polypeptide
  VH of XENP018712
EVQLVESGGGLVKPGGSLRLSCAASGFTFSNYWMNWVRQAPGKGLEWVGEIRLKSNNYATHYAEPVKGRFTISRDDSKSTVYLQMNSLKTEDTAVYYCTRYYGNAGGYFDVWGAGTLVTVSS

SEQ ID NO: 8224 - protein, 107 aa, Artificial Sequence; identical to SEQ ID NO: 6247
  Description of Artificial Sequence: Synthetic polypeptide
  VL of XENP018712

SEQ ID NO: 8225 - protein, 5 aa, Artificial Sequence
  Description of Artificial Sequence: Synthetic peptide
  XENP018712 vhCDR1
NYWMN

SEQ ID NO: 8226 - protein, 19 aa, Artificial Sequence
  Description of Artificial Sequence: Synthetic peptide
  XENP018712 vhCDR2
EIRLKSNNYATHYAEPVKG

SEQ ID NO: 8227 - protein, 11 aa, Artificial Sequence
  Description of Artificial Sequence: Synthetic peptide
  XENP018712 vhCDR3
YYGNAGGYFDV

SEQ ID NO: 8228 - protein, 11 aa, Artificial Sequence
  Description of Artificial Sequence: Synthetic peptide
  XENP018712 vlCDR1
RASQSVSNDVA

SEQ ID NO: 8229 - protein, 7 aa, Artificial Sequence
  Description of Artificial Sequence: Synthetic peptide
  XENP018712 vlCDR2
YASHRYT

SEQ ID NO: 8230 - protein, 9 aa, Artificial Sequence
  Description of Artificial Sequence: Synthetic peptide
  XENP018712 vlCDR3
QQDYSSPRT

SEQ ID NO: 8231 - protein, 249 aa, Artificial Sequence
  Description of Artificial Sequence: Synthetic polypeptide
  XENP018713 1G6_H1.209_L1_scFv(GKPGS)4
EVQLVESGGGLVKPGGSLRLSCAASGFTFSNYWMNWVRQAPGKGLEWVGEIRLKSNNYATHYAEPVKGRFTISRDDSKSTVYLQMNSLKTEDTAVYYCTRYYGNQGGYFDVWGAGTLVTVSSGKPGSGKPGSGKPGSGKPGSSIVMTQSPATLSVSPGERATLSCRASQSVSNDVAWYQQKPGQSPRLLINYASHRYTGVPDRFTGSGYGTEFTLTISSLQSEDFAVYFCQQDYSSPRTFGGGTKVEIK

SEQ ID NO: 8232 - protein, 122 aa, Artificial Sequence
  Description of Artificial Sequence: Synthetic polypeptide
  VH of XENP018713
EVQLVESGGGLVKPGGSLRLSCAASGFTFSNYWMNWVRQAPGKGLEWVGEIRLKSNNYATHYAEPVKGRFTISRDDSKSTVYLQMNSLKTEDTAVYYCTRYYGNQGGYFDVWGAGTLVTVSS

SEQ ID NO: 8233 - protein, 107 aa, Artificial Sequence; identical to SEQ ID NO: 6247
  Description of Artificial Sequence: Synthetic polypeptide
  VL of XENP018713

SEQ ID NO: 8234 - protein, 5 aa, Artificial Sequence
  Description of Artificial Sequence: Synthetic peptide
  XENP018713 vhCDR1
NYWMN

SEQ ID NO: 8235 - protein, 19 aa, Artificial Sequence
  Description of Artificial Sequence: Synthetic peptide
  XENP018713 vhCDR2
EIRLKSNNYATHYAEPVKG

SEQ ID NO: 8236 - protein, 11 aa, Artificial Sequence
  Description of Artificial Sequence: Synthetic peptide
  XENP018713 vhCDR3
YYGNQGGYFDV

SEQ ID NO: 8237 - protein, 11 aa, Artificial Sequence
  Description of Artificial Sequence: Synthetic peptide
  XENP018713 vlCDR1
RASQSVSNDVA

SEQ ID NO: 8238 - protein, 7 aa, Artificial Sequence
  Description of Artificial Sequence: Synthetic peptide
  XENP018713 vlCDR2
YASHRYT

SEQ ID NO: 8239 - protein, 9 aa, Artificial Sequence
  Description of Artificial Sequence: Synthetic peptide
  XENP018713 vlCDR3
QQDYSSPRT

SEQ ID NO: 8240 - protein, 249 aa, Artificial Sequence
  Description of Artificial Sequence: Synthetic polypeptide
  XENP018714 1G6_H1.210_L1_scFv(GKPGS)4
EVQLVESGGGLVKPGGSLRLSCAASGFTFSNYWMNWVRQAPGKGLEWVGEIRLKSNNYATHYAEPVKGRFTISRDDSKSTVYLQMNSLKTEDTAVYYCTRYYGNEGGYFDVWGAGTLVTVSSGKPGSGKPGSGKPGSGKPGSSIVMTQSPATLSVSPGERATLSCRASQSVSNDVAWYQQKPGQSPRLLINYASHRYTGVPDRFTGSGYGTEFTLTISSLQSEDFAVYFCQQDYSSPRTFGGGTKVEIK

SEQ ID NO: 8241 - protein, 122 aa, Artificial Sequence
  Description of Artificial Sequence: Synthetic polypeptide
  VH of XENP018714
EVQLVESGGGLVKPGGSLRLSCAASGFTFSNYWMNWVRQAPGKGLEWVGEIRLKSNNYATHYAEPVKGRFTISRDDSKSTVYLQMNSLKTEDTAVYYCTRYYGNEGGYFDVWGAGTLVTVSS

SEQ ID NO: 8242 - protein, 107 aa, Artificial Sequence; identical to SEQ ID NO: 6247
  Description of Artificial Sequence: Synthetic polypeptide
  VL of XENP018714

SEQ ID NO: 8243 - protein, 5 aa, Artificial Sequence
  Description of Artificial Sequence: Synthetic peptide
  XENP018714 vhCDR1
NYWMN

SEQ ID NO: 8244 - protein, 19 aa, Artificial Sequence
  Description of Artificial Sequence: Synthetic peptide
  XENP018714 vhCDR2
EIRLKSNNYATHYAEPVKG

SEQ ID NO: 8245 - protein, 11 aa, Artificial Sequence
  Description of Artificial Sequence: Synthetic peptide
  XENP018714 vhCDR3
YYGNEGGYFDV

SEQ ID NO: 8246 - protein, 11 aa, Artificial Sequence
  Description of Artificial Sequence: Synthetic peptide
  XENP018714 vlCDR1
RASQSVSNDVA

SEQ ID NO: 8247 - protein, 7 aa, Artificial Sequence
  Description of Artificial Sequence: Synthetic peptide
  XENP018714 vlCDR2
YASHRYT

SEQ ID NO: 8248 - protein, 9 aa, Artificial Sequence
  Description of Artificial Sequence: Synthetic peptide
  XENP018714 vlCDR3
QQDYSSPRT

SEQ ID NO: 8249 - protein, 249 aa, Artificial Sequence
  Description of Artificial Sequence: Synthetic polypeptide
  XENP018715 1G6_H1.211_L1_scFv(GKPGS)4
EVQLVESGGGLVKPGGSLRLSCAASGFTFSNYWMNWVRQAPGKGLEWVGEIRLKSNNYATHYAEPVKGRFTISRDDSKSTVYLQMNSLKTEDTAVYYCTRYYGNKGGYFDVWGAGTLVTVSSGKPGSGKPGSGKPGSGKPGSSIVMTQSPATLSVSPGERATLSCRASQSVSNDVAWYQQKPGQSPRLLINYASHRYTGVPDRFTGSGYGTEFTLTISSLQSEDFAVYFCQQDYSSPRTFGGGTKVEIK

SEQ ID NO: 8250 - protein, 122 aa, Artificial Sequence
  Description of Artificial Sequence: Synthetic polypeptide
  VH of XENP018715
EVQLVESGGGLVKPGGSLRLSCAASGFTFSNYWMNWVRQAPGKGLEWVGEIRLKSNNYATHYAEPVKGRFTISRDDSKSTVYLQMNSLKTEDTAVYYCTRYYGNKGGYFDVWGAGTLVTVSS

SEQ ID NO: 8251 - protein, 107 aa, Artificial Sequence; identical to SEQ ID NO: 6247
  Description of Artificial Sequence: Synthetic polypeptide
  VL of XENP018715

SEQ ID NO: 8252 - protein, 5 aa, Artificial Sequence
  Description of Artificial Sequence: Synthetic peptide
  XENP018715 vhCDR1
NYWMN

SEQ ID NO: 8253 - protein, 19 aa, Artificial Sequence
  Description of Artificial Sequence: Synthetic peptide
  XENP018715 vhCDR2
EIRLKSNNYATHYAEPVKG

SEQ ID NO: 8254 - protein, 11 aa, Artificial Sequence
  Description of Artificial Sequence: Synthetic peptide
  XENP018715 vhCDR3
YYGNKGGYFDV

SEQ ID NO: 8255 - protein, 11 aa, Artificial Sequence
  Description of Artificial Sequence: Synthetic peptide
  XENP018715 vlCDR1
RASQSVSNDVA

SEQ ID NO: 8256 - protein, 7 aa, Artificial Sequence
  Description of Artificial Sequence: Synthetic peptide
  XENP018715 vlCDR2
YASHRYT

SEQ ID NO: 8257 - protein, 9 aa, Artificial Sequence
  Description of Artificial Sequence: Synthetic peptide
  XENP018715 vlCDR3
QQDYSSPRT

SEQ ID NO: 8258 - protein, 249 aa, Artificial Sequence
  Description of Artificial Sequence: Synthetic polypeptide
  XENP018716 1G6_H1.212_L1_scFv(GKPGS)4
EVQLVESGGGLVKPGGSLRLSCAASGFTFSNYWMNWVRQAPGKGLEWVGEIRLKSNNYATHYAEPVKGRFTISRDDSKSTVYLQMNSLKTEDTAVYYCTRYYGNYAGYFDVWGAGTLVTVSSGKPGSGKPGSGKPGSGKPGSSIVMTQSPATLSVSPGERATLSCRASQSVSNDVAWYQQKPGQSPRLLINYASHRYTGVPDRFTGSGYGTEFTLTISSLQSEDFAVYFCQQDYSSPRTFGGGTKVEIK

SEQ ID NO: 8259 - protein, 122 aa, Artificial Sequence
  Description of Artificial Sequence: Synthetic polypeptide
  VH of XENP018716
EVQLVESGGGLVKPGGSLRLSCAASGFTFSNYWMNWVRQAPGKGLEWVGEIRLKSNNYATHYAEPVKGRFTISRDDSKSTVYLQMNSLKTEDTAVYYCTRYYGNYAGYFDVWGAGTLVTVSS

SEQ ID NO: 8260 - protein, 107 aa, Artificial Sequence; identical to SEQ ID NO: 6247
  Description of Artificial Sequence: Synthetic polypeptide
  VL of XENP018716

SEQ ID NO: 8261 - protein, 5 aa, Artificial Sequence
  Description of Artificial Sequence: Synthetic peptide
  XENP018716 vhCDR1
NYWMN

SEQ ID NO: 8262 - protein, 19 aa, Artificial Sequence
  Description of Artificial Sequence: Synthetic peptide
  XENP018716 vhCDR2
EIRLKSNNYATHYAEPVKG

SEQ ID NO: 8263 - protein, 11 aa, Artificial Sequence
  Description of Artificial Sequence: Synthetic peptide
  XENP018716 vhCDR3
YYGNYAGYFDV

SEQ ID NO: 8264 - protein, 11 aa, Artificial Sequence
  Description of Artificial Sequence: Synthetic peptide
  XENP018716 vlCDR1
RASQSVSNDVA

SEQ ID NO: 8265 - protein, 7 aa, Artificial Sequence
  Description of Artificial Sequence: Synthetic peptide
  XENP018716 vlCDR2
YASHRYT

SEQ ID NO: 8266 - protein, 9 aa, Artificial Sequence
  Description of Artificial Sequence: Synthetic peptide
  XENP018716 vlCDR3
QQDYSSPRT

SEQ ID NO: 8267 - protein, 249 aa, Artificial Sequence
  Description of Artificial Sequence: Synthetic polypeptide
  XENP018717 1G6_H1.213_L1_scFv(GKPGS)4
EVQLVESGGGLVKPGGSLRLSCAASGFTFSNYWMNWVRQAPGKGLEWVGEIRLKSNNYATHYAEPVKGRFTISRDDSKSTVYLQMNSLKTEDTAVYYCTRYYGNYQGYFDVWGAGTLVTVSSGKPGSGKPGSGKPGSGKPGSSIVMTQSPATLSVSPGERATLSCRASQSVSNDVAWYQQKPGQSPRLLINYASHRYTGVPDRFTGSGYGTEFTLTISSLQSEDFAVYFCQQDYSSPRTFGGGTKVEIK

SEQ ID NO: 8268 - protein, 122 aa, Artificial Sequence
  Description of Artificial Sequence: Synthetic polypeptide
  VH of XENP018717
EVQLVESGGGLVKPGGSLRLSCAASGFTFSNYWMNWVRQAPGKGLEWVGEIRLKSNNYATHYAEPVKGRFTISRDDSKSTVYLQMNSLKTEDTAVYYCTRYYGNYQGYFDVWGAGTLVTVSS

SEQ ID NO: 8269 - protein, 107 aa, Artificial Sequence; identical to SEQ ID NO: 6247
  Description of Artificial Sequence: Synthetic polypeptide
  VL of XENP018717

SEQ ID NO: 8270 - protein, 5 aa, Artificial Sequence
  Description of Artificial Sequence: Synthetic peptide
  XENP018717 vhCDR1
NYWMN

SEQ ID NO: 8271 - protein, 19 aa, Artificial Sequence
  Description of Artificial Sequence: Synthetic peptide
  XENP018717 vhCDR2
EIRLKSNNYATHYAEPVKG

SEQ ID NO: 8272 - protein, 11 aa, Artificial Sequence
  Description of Artificial Sequence: Synthetic peptide
  XENP018717 vhCDR3
YYGNYQGYFDV

SEQ ID NO: 8273 - protein, 11 aa, Artificial Sequence
  Description of Artificial Sequence: Synthetic peptide
  XENP018717 vlCDR1
RASQSVSNDVA

SEQ ID NO: 8274 - protein, 7 aa, Artificial Sequence
  Description of Artificial Sequence: Synthetic peptide
  XENP018717 vlCDR2
YASHRYT

SEQ ID NO: 8275 - protein, 9 aa, Artificial Sequence
  Description of Artificial Sequence: Synthetic peptide
  XENP018717 vlCDR3
QQDYSSPRT

SEQ ID NO: 8276 - protein, 249 aa, Artificial Sequence
  Description of Artificial Sequence: Synthetic polypeptide
  XENP018718 1G6_H1.214_L1_scFv(GKPGS)4
EVQLVESGGGLVKPGGSLRLSCAASGFTFSNYWMNWVRQAPGKGLEWVGEIRLKSNNYATHYAEPVKGRFTISRDDSKSTVYLQMNSLKTEDTAVYYCTRYYGNYHGYFDVWGAGTLVTVSSGKPGSGKPGSGKPGSGKPGSSIVMTQSPATLSVSPGERATLSCRASQSVSNDVAWYQQKPGQSPRLLINYASHRYTGVPDRFTGSGYGTEFTLTISSLQSEDFAVYFCQQDYSSPRTFGGGTKVEIK

SEQ ID NO: 8277 - protein, 122 aa, Artificial Sequence
  Description of Artificial Sequence: Synthetic polypeptide
  VH of XENP018718
EVQLVESGGGLVKPGGSLRLSCAASGFTFSNYWMNWVRQAPGKGLEWVGEIRLKSNNYATHYAEPVKGRFTISRDDSKSTVYLQMNSLKTEDTAVYYCTRYYGNYHGYFDVWGAGTLVTVSS

SEQ ID NO: 8278 - protein, 107 aa, Artificial Sequence; identical to SEQ ID NO: 6247
  Description of Artificial Sequence: Synthetic polypeptide
  VL of XENP018718

SEQ ID NO: 8279 - protein, 5 aa, Artificial Sequence
  Description of Artificial Sequence: Synthetic peptide
  XENP018718 vhCDR1
NYWMN

SEQ ID NO: 8280 - protein, 19 aa, Artificial Sequence
  Description of Artificial Sequence: Synthetic peptide
  XENP018718 vhCDR2
EIRLKSNNYATHYAEPVKG

SEQ ID NO: 8281 - protein, 11 aa, Artificial Sequence
  Description of Artificial Sequence: Synthetic peptide
  XENP018718 vhCDR3
YYGNYHGYFDV

SEQ ID NO: 8282 - protein, 11 aa, Artificial Sequence
  Description of Artificial Sequence: Synthetic peptide
  XENP018718 vlCDR1
RASQSVSNDVA

SEQ ID NO: 8283 - protein, 7 aa, Artificial Sequence
  Description of Artificial Sequence: Synthetic peptide
  XENP018718 vlCDR2
YASHRYT

SEQ ID NO: 8284 - protein, 9 aa, Artificial Sequence
  Description of Artificial Sequence: Synthetic peptide
  XENP018718 vlCDR3
QQDYSSPRT

SEQ ID NO: 8285 - protein, 249 aa, Artificial Sequence
  Description of Artificial Sequence: Synthetic polypeptide
  XENP018719 1G6_H1.215_L1_scFv(GKPGS)4
EVQLVESGGGLVKPGGSLRLSCAASGFTFSNYWMNWVRQAPGKGLEWVGEIRLKSNNYATHYAEPVKGRFTISRDDSKSTVYLQMNSLKTEDTAVYYCTRYYGNYDGYFDVWGAGTLVTVSSGKPGSGKPGSGKPGSGKPGSSIVMTQSPATLSVSPGERATLSCRASQSVSNDVAWYQQKPGQSPRLLINYASHRYTGVPDRFTGSGYGTEFTLTISSLQSEDFAVYFCQQDYSSPRTFGGGTKVEIK

SEQ ID NO: 8286 - protein, 122 aa, Artificial Sequence
  Description of Artificial Sequence: Synthetic polypeptide
  VH of XENP018719
EVQLVESGGGLVKPGGSLRLSCAASGFTFSNYWMNWVRQAPGKGLEWVGEIRLKSNNYATHYAEPVKGRFTISRDDSKSTVYLQMNSLKTEDTAVYYCTRYYGNYDGYFDVWGAGTLVTVSS

SEQ ID NO: 8287 - protein, 107 aa, Artificial Sequence; identical to SEQ ID NO: 6247
  Description of Artificial Sequence: Synthetic polypeptide
  VL of XENP018719

SEQ ID NO: 8288 - protein, 5 aa, Artificial Sequence
  Description of Artificial Sequence: Synthetic peptide
  XENP018719 vhCDR1
NYWMN

SEQ ID NO: 8289 - protein, 19 aa, Artificial Sequence
  Description of Artificial Sequence: Synthetic peptide
  XENP018719 vhCDR2
EIRLKSNNYATHYAEPVKG

SEQ ID NO: 8290 - protein, 11 aa, Artificial Sequence
  Description of Artificial Sequence: Synthetic peptide
  XENP018719 vhCDR3
YYGNYDGYFDV

SEQ ID NO: 8291 - protein, 11 aa, Artificial Sequence
  Description of Artificial Sequence: Synthetic peptide
  XENP018719 vlCDR1
RASQSVSNDVA

SEQ ID NO: 8292 - protein, 7 aa, Artificial Sequence
  Description of Artificial Sequence: Synthetic peptide
  XENP018719 vlCDR2
YASHRYT

SEQ ID NO: 8293 - protein, 9 aa, Artificial Sequence
  Description of Artificial Sequence: Synthetic peptide
  XENP018719 vlCDR3
QQDYSSPRT

SEQ ID NO: 8294 - protein, 249 aa, Artificial Sequence
  Description of Artificial Sequence: Synthetic polypeptide
  XENP018720 1G6_H1.216_L1_scFv(GKPGS)4
EVQLVESGGGLVKPGGSLRLSCAASGFTFSNYWMNWVRQAPGKGLEWVGEIRLKSNNYATHYAEPVKGRFTISRDDSKSTVYLQMNSLKTEDTAVYYCTRYYGNYKGYFDVWGAGTLVTVSSGKPGSGKPGSGKPGSGKPGSSIVMTQSPATLSVSPGERATLSCRASQSVSNDVAWYQQKPGQSPRLLINYASHRYTGVPDRFTGSGYGTEFTLTISSLQSEDFAVYFCQQDYSSPRTFGGGTKVEIK

SEQ ID NO: 8295 - protein, 122 aa, Artificial Sequence
  Description of Artificial Sequence: Synthetic polypeptide
  VH of XENP018720
EVQLVESGGGLVKPGGSLRLSCAASGFTFSNYWMNWVRQAPGKGLEWVGEIRLKSNNYATHYAEPVKGRFTISRDDSKSTVYLQMNSLKTEDTAVYYCTRYYGNYKGYFDVWGAGTLVTVSS

SEQ ID NO: 8296 - protein, 107 aa, Artificial Sequence; identical to SEQ ID NO: 6247
  Description of Artificial Sequence: Synthetic polypeptide
  VL of XENP018720

SEQ ID NO: 8297 - protein, 5 aa, Artificial Sequence
  Description of Artificial Sequence: Synthetic peptide
  XENP018720 vhCDR1
NYWMN

SEQ ID NO: 8298 - protein, 19 aa, Artificial Sequence
  Description of Artificial Sequence: Synthetic peptide
  XENP018720 vhCDR2
EIRLKSNNYATHYAEPVKG

SEQ ID NO: 8299 - protein, 11 aa, Artificial Sequence
  Description of Artificial Sequence: Synthetic peptide
  XENP018720 vhCDR3
YYGNYKGYFDV

SEQ ID NO: 8300 - protein, 11 aa, Artificial Sequence
  Description of Artificial Sequence: Synthetic peptide
  XENP018720 vlCDR1
RASQSVSNDVA

SEQ ID NO: 8301 - protein, 7 aa, Artificial Sequence
  Description of Artificial Sequence: Synthetic peptide
  XENP018720 vlCDR2
YASHRYT

SEQ ID NO: 8302 - protein, 9 aa, Artificial Sequence
  Description of Artificial Sequence: Synthetic peptide
  XENP018720 vlCDR3
QQDYSSPRT

SEQ ID NO: 8303 - protein, 249 aa, Artificial Sequence
  Description of Artificial Sequence: Synthetic polypeptide
  XENP018721 1G6_H1.217_L1_scFv(GKPGS)4
EVQLVESGGGLVKPGGSLRLSCAASGFTFSNYWMNWVRQAPGKGLEWVGEIRLKSNNYATHYAEPVKGRFTISRDDSKSTVYLQMNSLKTEDTAVYYCTRYYGNYLGYFDVWGAGTLVTVSSGKPGSGKPGSGKPGSGKPGSSIVMTQSPATLSVSPGERATLSCRASQSVSNDVAWYQQKPGQSPRLLINYASHRYTGVPDRFTGSGYGTEFTLTISSLQSEDFAVYFCQQDYSSPRTFGGGTKVEIK

SEQ ID NO: 8304 - protein, 122 aa, Artificial Sequence
  Description of Artificial Sequence: Synthetic polypeptide
  VH of XENP018721
EVQLVESGGGLVKPGGSLRLSCAASGFTFSNYWMNWVRQAPGKGLEWVGEIRLKSNNYATHYAEPVKGRFTISRDDSKSTVYLQMNSLKTEDTAVYYCTRYYGNYLGYFDVWGAGTLVTVSS

SEQ ID NO: 8305 - protein, 107 aa, Artificial Sequence; identical to SEQ ID NO: 6247
  Description of Artificial Sequence: Synthetic polypeptide
  VL of XENP018721

SEQ ID NO: 8306 - protein, 5 aa, Artificial Sequence
  Description of Artificial Sequence: Synthetic peptide
  XENP018721 vhCDR1
NYWMN

SEQ ID NO: 8307 - protein, 19 aa, Artificial Sequence
  Description of Artificial Sequence: Synthetic peptide
  XENP018721 vhCDR2
EIRLKSNNYATHYAEPVKG

SEQ ID NO: 8308 - protein, 11 aa, Artificial Sequence
  Description of Artificial Sequence: Synthetic peptide
  XENP018721 vhCDR3
YYGNYLGYFDV

SEQ ID NO: 8309 - protein, 11 aa, Artificial Sequence
  Description of Artificial Sequence: Synthetic peptide
  XENP018721 vlCDR1
RASQSVSNDVA

SEQ ID NO: 8310 - protein, 7 aa, Artificial Sequence
  Description of Artificial Sequence: Synthetic peptide
  XENP018721 vlCDR2
YASHRYT

SEQ ID NO: 8311 - protein, 9 aa, Artificial Sequence
  Description of Artificial Sequence: Synthetic peptide
  XENP018721 vlCDR3
QQDYSSPRT

SEQ ID NO: 8312 - protein, 249 aa, Artificial Sequence
  Description of Artificial Sequence: Synthetic polypeptide
  XENP018722 1G6_H1.218_L1_scFv(GKPGS)4
EVQLVESGGGLVKPGGSLRLSCAASGFTFSNYWMNWVRQAPGKGLEWVGEIRLKSNNYATHYAEPVKGRFTISRDDSKSTVYLQMNSLKTEDTAVYYCTRYYGNYFGYFDVWGAGTLVTVSSGKPGSGKPGSGKPGSGKPGSSIVMTQSPATLSVSPGERATLSCRASQSVSNDVAWYQQKPGQSPRLLINYASHRYTGVPDRFTGSGYGTEFTLTISSLQSEDFAVYFCQQDYSSPRTFGGGTKVEIK

SEQ ID NO: 8313 - protein, 122 aa, Artificial Sequence
  Description of Artificial Sequence: Synthetic polypeptide
  VH of XENP018722
EVQLVESGGGLVKPGGSLRLSCAASGFTFSNYWMNWVRQAPGKGLEWVGEIRLKSNNYATHYAEPVKGRFTISRDDSKSTVYLQMNSLKTEDTAVYYCTRYYGNYFGYFDVWGAGTLVTVSS

SEQ ID NO: 8314 - protein, 107 aa, Artificial Sequence; identical to SEQ ID NO: 6247
  Description of Artificial Sequence: Synthetic polypeptide
  VL of XENP018722

SEQ ID NO: 8315 - protein, 5 aa, Artificial Sequence
  Description of Artificial Sequence: Synthetic peptide
  XENP018722 vhCDR1
NYWMN

SEQ ID NO: 8316 - protein, 19 aa, Artificial Sequence
  Description of Artificial Sequence: Synthetic peptide
  XENP018722 vhCDR2
EIRLKSNNYATHYAEPVKG

SEQ ID NO: 8317 - protein, 11 aa, Artificial Sequence
  Description of Artificial Sequence: Synthetic peptide
  XENP018722 vhCDR3
YYGNYFGYFDV

SEQ ID NO: 8318 - protein, 11 aa, Artificial Sequence
  Description of Artificial Sequence: Synthetic peptide
  XENP018722 vlCDR1
RASQSVSNDVA

SEQ ID NO: 8319 - protein, 7 aa, Artificial Sequence
  Description of Artificial Sequence: Synthetic peptide
  XENP018722 vlCDR2
YASHRYT

SEQ ID NO: 8320 - protein, 9 aa, Artificial Sequence
  Description of Artificial Sequence: Synthetic peptide
  XENP018722 vlCDR3
QQDYSSPRT

SEQ ID NO: 8321 - protein, 249 aa, Artificial Sequence
  Description of Artificial Sequence: Synthetic polypeptide
  XENP018723 1G6_H1.219_L1_scFv(GKPGS)4
EVQLVESGGGLVKPGGSLRLSCAASGFTFSNYWMNWVRQAPGKGLEWVGEIRLKSNNYATHYAEPVKGRFTISRDDSKSTVYLQMNSLKTEDTAVYYCTRYYGNYGAYFDVWGAGTLVTVSSGKPGSGKPGSGKPGSGKPGSSIVMTQSPATLSVSPGERATLSCRASQSVSNDVAWYQQKPGQSPRLLINYASHRYTGVPDRFTGSGYGTEFTLTISSLQSEDFAVYFCQQDYSSPRTFGGGTKVEIK

SEQ ID NO: 8322 - protein, 122 aa, Artificial Sequence
  Description of Artificial Sequence: Synthetic polypeptide
  VH of XENP018723
EVQLVESGGGLVKPGGSLRLSCAASGFTFSNYWMNWVRQAPGKGLEWVGEIRLKSNNYATHYAEPVKGRFTISRDDSKSTVYLQMNSLKTEDTAVYYCTRYYGNYGAYFDVWGAGTLVTVSS

SEQ ID NO: 8323 - protein, 107 aa, Artificial Sequence; identical to SEQ ID NO: 6247
  Description of Artificial Sequence: Synthetic polypeptide
  VL of XENP018723

SEQ ID NO: 8324 - protein, 5 aa, Artificial Sequence
  Description of Artificial Sequence: Synthetic peptide
  XENP018723 vhCDR1
NYWMN

SEQ ID NO: 8325 - protein, 19 aa, Artificial Sequence
  Description of Artificial Sequence: Synthetic peptide
  XENP018723 vhCDR2
EIRLKSNNYATHYAEPVKG

SEQ ID NO: 8326 - protein, 11 aa, Artificial Sequence
  Description of Artificial Sequence: Synthetic peptide
  XENP018723 vhCDR3
YYGNYGAYFDV

SEQ ID NO: 8327 - protein, 11 aa, Artificial Sequence
  Description of Artificial Sequence: Synthetic peptide
  XENP018723 vlCDR1
RASQSVSNDVA

SEQ ID NO: 8328 - protein, 7 aa, Artificial Sequence
  Description of Artificial Sequence: Synthetic peptide
  XENP018723 vlCDR2
YASHRYT

SEQ ID NO: 8329 - protein, 9 aa, Artificial Sequence
  Description of Artificial Sequence: Synthetic peptide
  XENP018723 vlCDR3
QQDYSSPRT

SEQ ID NO: 8330 - protein, 249 aa, Artificial Sequence
  Description of Artificial Sequence: Synthetic polypeptide
  XENP018724 1G6_H1.220_L1_scFv(GKPGS)4
EVQLVESGGGLVKPGGSLRLSCAASGFTFSNYWMNWVRQAPGKGLEWVGEIRLKSNNYATHYAEPVKGRFTISRDDSKSTVYLQMNSLKTEDTAVYYCTRYYGNYGSYFDVWGAGTLVTVSSGKPGSGKPGSGKPGSGKPGSSIVMTQSPATLSVSPGERATLSCRASQSVSNDVAWYQQKPGQSPRLLINYASHRYTGVPDRFTGSGYGTEFTLTISSLQSEDFAVYFCQQDYSSPRTFGGGTKVEIK

SEQ ID NO: 8331 - protein, 122 aa, Artificial Sequence
  Description of Artificial Sequence: Synthetic polypeptide
  VH of XENP018724
EVQLVESGGGLVKPGGSLRLSCAASGFTFSNYWMNWVRQAPGKGLEWVGEIRLKSNNYATHYAEPVKGRFTISRDDSKSTVYLQMNSLKTEDTAVYYCTRYYGNYGSYFDVWGAGTLVTVSS

SEQ ID NO: 8332 - protein, 107 aa, Artificial Sequence; identical to SEQ ID NO: 6247
  Description of Artificial Sequence: Synthetic polypeptide
  VL of XENP018724

SEQ ID NO: 8333 - protein, 5 aa, Artificial Sequence
  Description of Artificial Sequence: Synthetic peptide
  XENP018724 vhCDR1
NYWMN

SEQ ID NO: 8334 - protein, 19 aa, Artificial Sequence
  Description of Artificial Sequence: Synthetic peptide
  XENP018724 vhCDR2
EIRLKSNNYATHYAEPVKG

SEQ ID NO: 8335 - protein, 11 aa, Artificial Sequence
  Description of Artificial Sequence: Synthetic peptide
  XENP018724 vhCDR3
YYGNYGSYFDV

SEQ ID NO: 8336 - protein, 11 aa, Artificial Sequence
  Description of Artificial Sequence: Synthetic peptide
  XENP018724 vlCDR1
RASQSVSNDVA

SEQ ID NO: 8337 - protein, 7 aa, Artificial Sequence
  Description of Artificial Sequence: Synthetic peptide
  XENP018724 vlCDR2
YASHRYT

SEQ ID NO: 8338 - protein, 9 aa, Artificial Sequence
  Description of Artificial Sequence: Synthetic peptide
  XENP018724 vlCDR3
QQDYSSPRT

SEQ ID NO: 8339 - protein, 249 aa, Artificial Sequence
  Description of Artificial Sequence: Synthetic polypeptide
  XENP018725 1G6_H1.221_L1_scFv(GKPGS)4
EVQLVESGGGLVKPGGSLRLSCAASGFTFSNYWMNWVRQAPGKGLEWVGEIRLKSNNYATHYAEPVKGRFTISRDDSKSTVYLQMNSLKTEDTAVYYCTRYYGNYGTYFDVWGAGTLVTVSSGKPGSGKPGSGKPGSGKPGSSIVMTQSPATLSVSPGERATLSCRASQSVSNDVAWYQQKPGQSPRLLINYASHRYTGVPDRFTGSGYGTEFTLTISSLQSEDFAVYFCQQDYSSPRTFGGGTKVEIK

SEQ ID NO: 8340 - protein, 122 aa, Artificial Sequence
  Description of Artificial Sequence: Synthetic polypeptide
  VH of XENP018725
EVQLVESGGGLVKPGGSLRLSCAASGFTFSNYWMNWVRQAPGKGLEWVGEIRLKSNNYATHYAEPVKGRFTISRDDSKSTVYLQMNSLKTEDTAVYYCTRYYGNYGTYFDVWGAGTLVTVSS

SEQ ID NO: 8341 - protein, 107 aa, Artificial Sequence; identical to SEQ ID NO: 6247
  Description of Artificial Sequence: Synthetic polypeptide
  VL of XENP018725

SEQ ID NO: 8342 - protein, 5 aa, Artificial Sequence
  Description of Artificial Sequence: Synthetic peptide
  XENP018725 vhCDR1
NYWMN

SEQ ID NO: 8343 - protein, 19 aa, Artificial Sequence
  Description of Artificial Sequence: Synthetic peptide
  XENP018725 vhCDR2
EIRLKSNNYATHYAEPVKG

SEQ ID NO: 8344 - protein, 11 aa, Artificial Sequence
  Description of Artificial Sequence: Synthetic peptide
  XENP018725 vhCDR3
YYGNYGTYFDV

SEQ ID NO: 8345 - protein, 11 aa, Artificial Sequence
  Description of Artificial Sequence: Synthetic peptide
  XENP018725 vlCDR1
RASQSVSNDVA

SEQ ID NO: 8346 - protein, 7 aa, Artificial Sequence
  Description of Artificial Sequence: Synthetic peptide
  XENP018725 vlCDR2
YASHRYT

SEQ ID NO: 8347 - protein, 9 aa, Artificial Sequence
  Description of Artificial Sequence: Synthetic peptide
  XENP018725 vlCDR3
QQDYSSPRT

SEQ ID NO: 8348 - protein, 249 aa, Artificial Sequence
  Description of Artificial Sequence: Synthetic polypeptide
  XENP018726 1G6_H1.222_L1_scFv(GKPGS)4
EVQLVESGGGLVKPGGSLRLSCAASGFTFSNYWMNWVRQAPGKGLEWVGEIRLKSNNYATHYAEPVKGRFTISRDDSKSTVYLQMNSLKTEDTAVYYCTRYYGNYGNYFDVWGAGTLVTVSSGKPGSGKPGSGKPGSGKPGSSIVMTQSPATLSVSPGERATLSCRASQSVSNDVAWYQQKPGQSPRLLINYASHRYTGVPDRFTGSGYGTEFTLTISSLQSEDFAVYFCQQDYSSPRTFGGGTKVEIK

SEQ ID NO: 8349 - protein, 122 aa, Artificial Sequence
  Description of Artificial Sequence: Synthetic polypeptide
  VH of XENP018726
EVQLVESGGGLVKPGGSLRLSCAASGFTFSNYWMNWVRQAPGKGLEWVGEIRLKSNNYATHYAEPVKGRFTISRDDSKSTVYLQMNSLKTEDTAVYYCTRYYGNYGNYFDVWGAGTLVTVSS

SEQ ID NO: 8350 - protein, 107 aa, Artificial Sequence; identical to SEQ ID NO: 6247
  Description of Artificial Sequence: Synthetic polypeptide
  VL of XENP018726

SEQ ID NO: 8351 - protein, 5 aa, Artificial Sequence
  Description of Artificial Sequence: Synthetic peptide
  XENP018726 vhCDR1
NYWMN

SEQ ID NO: 8352 - protein, 19 aa, Artificial Sequence
  Description of Artificial Sequence: Synthetic peptide
  XENP018726 vhCDR2
EIRLKSNNYATHYAEPVKG

SEQ ID NO: 8353 - protein, 11 aa, Artificial Sequence
  Description of Artificial Sequence: Synthetic peptide
  XENP018726 vhCDR3
YYGNYGNYFDV

SEQ ID NO: 8354 - protein, 11 aa, Artificial Sequence
  Description of Artificial Sequence: Synthetic peptide
  XENP018726 vlCDR1
RASQSVSNDVA

SEQ ID NO: 8355 - protein, 7 aa, Artificial Sequence
  Description of Artificial Sequence: Synthetic peptide
  XENP018726 vlCDR2
YASHRYT

SEQ ID NO: 8356 - protein, 9 aa, Artificial Sequence
  Description of Artificial Sequence: Synthetic peptide
  XENP018726 vlCDR3
QQDYSSPRT

SEQ ID NO: 8357 - protein, 249 aa, Artificial Sequence
  Description of Artificial Sequence: Synthetic polypeptide
  XENP018727 1G6_H1.223_L1_scFv(GKPGS)4
EVQLVESGGGLVKPGGSLRLSCAASGFTFSNYWMNWVRQAPGKGLEWVGEIRLKSNNYATHYAEPVKGRFTISRDDSKSTVYLQMNSLKTEDTAVYYCTRYYGNYGHYFDVWGAGTLVTVSSGKPGSGKPGSGKPGSGKPGSSIVMTQSPATLSVSPGERATLSCRASQSVSNDVAWYQQKPGQSPRLLINYASHRYTGVPDRFTGSGYGTEFTLTISSLQSEDFAVYFCQQDYSSPRTFGGGTKVEIK

SEQ ID NO: 8358 - protein, 122 aa, Artificial Sequence
  Description of Artificial Sequence: Synthetic polypeptide
  VH of XENP018727
EVQLVESGGGLVKPGGSLRLSCAASGFTFSNYWMNWVRQAPGKGLEWVGEIRLKSNNYATHYAEPVKGRFTISRDDSKSTVYLQMNSLKTEDTAVYYCTRYYGNYGHYFDVWGAGTLVTVSS

SEQ ID NO: 8359 - protein, 107 aa, Artificial Sequence; identical to SEQ ID NO: 6247
  Description of Artificial Sequence: Synthetic polypeptide
  VL of XENP018727

SEQ ID NO: 8360 - protein, 5 aa, Artificial Sequence
  Description of Artificial Sequence: Synthetic peptide
  XENP018727 vhCDR1
NYWMN

SEQ ID NO: 8361 - protein, 19 aa, Artificial Sequence
  Description of Artificial Sequence: Synthetic peptide
  XENP018727 vhCDR2
EIRLKSNNYATHYAEPVKG

SEQ ID NO: 8362 - protein, 11 aa, Artificial Sequence
  Description of Artificial Sequence: Synthetic peptide
  XENP018727 vhCDR3
YYGNYGHYFDV

SEQ ID NO: 8363 - protein, 11 aa, Artificial Sequence
  Description of Artificial Sequence: Synthetic peptide
  XENP018727 vlCDR1
RASQSVSNDVA

SEQ ID NO: 8364 - protein, 7 aa, Artificial Sequence
  Description of Artificial Sequence: Synthetic peptide
  XENP018727 vlCDR2
YASHRYT

SEQ ID NO: 8365 - protein, 9 aa, Artificial Sequence
  Description of Artificial Sequence: Synthetic peptide
  XENP018727 vlCDR3
QQDYSSPRT

SEQ ID NO: 8366 - protein, 249 aa, Artificial Sequence
  Description of Artificial Sequence: Synthetic polypeptide
  XENP018728 1G6_H1.224_L1_scFv(GKPGS)4
EVQLVESGGGLVKPGGSLRLSCAASGFTFSNYWMNWVRQAPGKGLEWVGEIRLKSNNYATHYAEPVKGRFTISRDDSKSTVYLQMNSLKTEDTAVYYCTRYYGNYGDYFDVWGAGTLVTVSSGKPGSGKPGSGKPGSGKPGSSIVMTQSPATLSVSPGERATLSCRASQSVSNDVAWYQQKPGQSPRLLINYASHRYTGVPDRFTGSGYGTEFTLTISSLQSEDFAVYFCQQDYSSPRTFGGGTKVEIK

SEQ ID NO: 8367 - protein, 122 aa, Artificial Sequence
  Description of Artificial Sequence: Synthetic polypeptide
  VH of XENP018728
EVQLVESGGGLVKPGGSLRLSCAASGFTFSNYWMNWVRQAPGKGLEWVGEIRLKSNNYATHYAEPVKGRFTISRDDSKSTVYLQMNSLKTEDTAVYYCTRYYGNYGDYFDVWGAGTLVTVSS

SEQ ID NO: 8368 - protein, 107 aa, Artificial Sequence; identical to SEQ ID NO: 6247
  Description of Artificial Sequence: Synthetic polypeptide
  VL of XENP018728

SEQ ID NO: 8369 - protein, 5 aa, Artificial Sequence
  Description of Artificial Sequence: Synthetic peptide
  XENP018728 vhCDR1
NYWMN

SEQ ID NO: 8370 - protein, 19 aa, Artificial Sequence
  Description of Artificial Sequence: Synthetic peptide
  XENP018728 vhCDR2
EIRLKSNNYATHYAEPVKG

SEQ ID NO: 8371 - protein, 11 aa, Artificial Sequence
  Description of Artificial Sequence: Synthetic peptide
  XENP018728 vhCDR3
YYGNYGDYFDV

SEQ ID NO: 8372 - protein, 11 aa, Artificial Sequence
  Description of Artificial Sequence: Synthetic peptide
  XENP018728 vlCDR1
RASQSVSNDVA

SEQ ID NO: 8373 - protein, 7 aa, Artificial Sequence
  Description of Artificial Sequence: Synthetic peptide
  XENP018728 vlCDR2
YASHRYT

SEQ ID NO: 8374 - protein, 9 aa, Artificial Sequence
  Description of Artificial Sequence: Synthetic peptide
  XENP018728 vlCDR3
QQDYSSPRT

SEQ ID NO: 8375 - protein, 249 aa, Artificial Sequence
  Description of Artificial Sequence: Synthetic polypeptide
  XENP018729 1G6_H1.225_L1_scFv(GKPGS)4
EVQLVESGGGLVKPGGSLRLSCAASGFTFSNYWMNWVRQAPGKGLEWVGEIRLKSNNYATHYAEPVKGRFTISRDDSKSTVYLQMNSLKTEDTAVYYCTRYYGNYGKYFDVWGAGTLVTVSSGKPGSGKPGSGKPGSGKPGSSIVMTQSPATLSVSPGERATLSCRASQSVSNDVAWYQQKPGQSPRLLINYASHRYTGVPDRFTGSGYGTEFTLTISSLQSEDFAVYFCQQDYSSPRTFGGGTKVEIK

SEQ ID NO: 8376 - protein, 122 aa, Artificial Sequence
  Description of Artificial Sequence: Synthetic polypeptide
  VH of XENP018729
EVQLVESGGGLVKPGGSLRLSCAASGFTFSNYWMNWVRQAPGKGLEWVGEIRLKSNNYATHYAEPVKGRFTISRDDSKSTVYLQMNSLKTEDTAVYYCTRYYGNYGKYFDVWGAGTLVTVSS

SEQ ID NO: 8377 - protein, 107 aa, Artificial Sequence; identical to SEQ ID NO: 6247
  Description of Artificial Sequence: Synthetic polypeptide
  VL of XENP018729

SEQ ID NO: 8378 - protein, 5 aa, Artificial Sequence
  Description of Artificial Sequence: Synthetic peptide
  XENP018729 vhCDR1
NYWMN

SEQ ID NO: 8379 - protein, 19 aa, Artificial Sequence
  Description of Artificial Sequence: Synthetic peptide
  XENP018729 vhCDR2
EIRLKSNNYATHYAEPVKG

SEQ ID NO: 8380 - protein, 11 aa, Artificial Sequence
  Description of Artificial Sequence: Synthetic peptide
  XENP018729 vhCDR3
YYGNYGKYFDV

SEQ ID NO: 8381 - protein, 11 aa, Artificial Sequence
  Description of Artificial Sequence: Synthetic peptide
  XENP018729 vlCDR1
RASQSVSNDVA

SEQ ID NO: 8382 - protein, 7 aa, Artificial Sequence
  Description of Artificial Sequence: Synthetic peptide
  XENP018729 vlCDR2
YASHRYT

SEQ ID NO: 8383 - protein, 9 aa, Artificial Sequence
  Description of Artificial Sequence: Synthetic peptide
  XENP018729 vlCDR3
QQDYSSPRT

SEQ ID NO: 8384 - protein, 249 aa, Artificial Sequence
  Description of Artificial Sequence: Synthetic polypeptide
  XENP018730 1G6_H1.226_L1_scFv(GKPGS)4
EVQLVESGGGLVKPGGSLRLSCAASGFTFSNYWMNWVRQAPGKGLEWVGEIRLKSNNYATHYAEPVKGRFTISRDDSKSTVYLQMNSLKTEDTAVYYCTRYYGNYGLYFDVWGAGTLVTVSSGKPGSGKPGSGKPGSGKPGSSIVMTQSPATLSVSPGERATLSCRASQSVSNDVAWYQQKPGQSPRLLINYASHRYTGVPDRFTGSGYGTEFTLTISSLQSEDFAVYFCQQDYSSPRTFGGGTKVEIK

SEQ ID NO: 8385 - protein, 122 aa, Artificial Sequence
  Description of Artificial Sequence: Synthetic polypeptide
  VH of XENP018730
EVQLVESGGGLVKPGGSLRLSCAASGFTFSNYWMNWVRQAPGKGLEWVGEIRLKSNNYATHYAEPVKGRFTISRDDSKSTVYLQMNSLKTEDTAVYYCTRYYGNYGLYFDVWGAGTLVTVSS

SEQ ID NO: 8386 - protein, 107 aa, Artificial Sequence; identical to SEQ ID NO: 6247
  Description of Artificial Sequence: Synthetic polypeptide
  VL of XENP018730

SEQ ID NO: 8387 - protein, 5 aa, Artificial Sequence
  Description of Artificial Sequence: Synthetic peptide
  XENP018730 vhCDR1
NYWMN

SEQ ID NO: 8388 - protein, 19 aa, Artificial Sequence
  Description of Artificial Sequence: Synthetic peptide
  XENP018730 vhCDR2
EIRLKSNNYATHYAEPVKG

SEQ ID NO: 8389 - protein, 11 aa, Artificial Sequence
  Description of Artificial Sequence: Synthetic peptide
  XENP018730 vhCDR3
YYGNYGLYFDV

SEQ ID NO: 8390 - protein, 11 aa, Artificial Sequence
  Description of Artificial Sequence: Synthetic peptide
  XENP018730 vlCDR1
RASQSVSNDVA

SEQ ID NO: 8391 - protein, 7 aa, Artificial Sequence
  Description of Artificial Sequence: Synthetic peptide
  XENP018730 vlCDR2
YASHRYT

SEQ ID NO: 8392 - protein, 9 aa, Artificial Sequence
  Description of Artificial Sequence: Synthetic peptide
  XENP018730 vlCDR3
QQDYSSPRT

SEQ ID NO: 8393 - protein, 249 aa, Artificial Sequence
  Description of Artificial Sequence: Synthetic polypeptide
  XENP018731 1G6_H1.227_L1_scFv(GKPGS)4
EVQLVESGGGLVKPGGSLRLSCAASGFTFSNYWMNWVRQAPGKGLEWVGEIRLKSNNYATHYAEPVKGRFTISRDDSKSTVYLQMNSLKTEDTAVYYCTRYYGNYGFYFDVWGAGTLVTVSSGKPGSGKPGSGKPGSGKPGSSIVMTQSPATLSVSPGERATLSCRASQSVSNDVAWYQQKPGQSPRLLINYASHRYTGVPDRFTGSGYGTEFTLTISSLQSEDFAVYFCQQDYSSPRTFGGGTKVEIK

SEQ ID NO: 8394 - protein, 122 aa, Artificial Sequence
  Description of Artificial Sequence: Synthetic polypeptide
  VH of XENP018731
EVQLVESGGGLVKPGGSLRLSCAASGFTFSNYWMNWVRQAPGKGLEWVGEIRLKSNNYATHYAEPVKGRFTISRDDSKSTVYLQMNSLKTEDTAVYYCTRYYGNYGFYFDVWGAGTLVTVSS

SEQ ID NO: 8395 - protein, 107 aa, Artificial Sequence; identical to SEQ ID NO: 6247
  Description of Artificial Sequence: Synthetic polypeptide
  VL of XENP018731

SEQ ID NO: 8396 - protein, 5 aa, Artificial Sequence
  Description of Artificial Sequence: Synthetic peptide
  XENP018731 vhCDR1
NYWMN

SEQ ID NO: 8397 - protein, 19 aa, Artificial Sequence
  Description of Artificial Sequence: Synthetic peptide
  XENP018731 vhCDR2
EIRLKSNNYATHYAEPVKG

SEQ ID NO: 8398 - protein, 11 aa, Artificial Sequence
  Description of Artificial Sequence: Synthetic peptide
  XENP018731 vhCDR3
YYGNYGFYFDV

SEQ ID NO: 8399 - protein, 11 aa, Artificial Sequence
  Description of Artificial Sequence: Synthetic peptide
  XENP018731 vlCDR1
RASQSVSNDVA

SEQ ID NO: 8400 - protein, 7 aa, Artificial Sequence
  Description of Artificial Sequence: Synthetic peptide
  XENP018731 vlCDR2
YASHRYT

SEQ ID NO: 8401 - protein, 9 aa, Artificial Sequence
  Description of Artificial Sequence: Synthetic peptide
  XENP018731 vlCDR3
QQDYSSPRT

SEQ ID NO: 8402 - protein, 249 aa, Artificial Sequence
  Description of Artificial Sequence: Synthetic polypeptide
  XENP018732 1G6_H1.228_L1_scFv(GKPGS)4
EVQLVESGGGLVKPGGSLRLSCAASGFTFSNYWMNWVRQAPGKGLEWVGEIRLKSNNYATHYAEPVKGRFTISRDDSKSTVYLQMNSLKTEDTAVYYCTRYYGNYGGFFDVWGAGTLVTVSSGKPGSGKPGSGKPGSGKPGSSIVMTQSPATLSVSPGERATLSCRASQSVSNDVAWYQQKPGQSPRLLINYASHRYTGVPDRFTGSGYGTEFTLTISSLQSEDFAVYFCQQDYSSPRTFGGGTKVEIK

SEQ ID NO: 8403 - protein, 122 aa, Artificial Sequence
  Description of Artificial Sequence: Synthetic polypeptide
  VH of XENP018732
EVQLVESGGGLVKPGGSLRLSCAASGFTFSNYWMNWVRQAPGKGLEWVGEIRLKSNNYATHYAEPVKGRFTISRDDSKSTVYLQMNSLKTEDTAVYYCTRYYGNYGGFFDVWGAGTLVTVSS

SEQ ID NO: 8404 - protein, 107 aa, Artificial Sequence; identical to SEQ ID NO: 6247
  Description of Artificial Sequence: Synthetic polypeptide
  VL of XENP018732

SEQ ID NO: 8405 - protein, 5 aa, Artificial Sequence
  Description of Artificial Sequence: Synthetic peptide
  XENP018732 vhCDR1
NYWMN

SEQ ID NO: 8406 - protein, 19 aa, Artificial Sequence
  Description of Artificial Sequence: Synthetic peptide
  XENP018732 vhCDR2
EIRLKSNNYATHYAEPVKG

SEQ ID NO: 8407 - protein, 11 aa, Artificial Sequence
  Description of Artificial Sequence: Synthetic peptide
  XENP018732 vhCDR3
YYGNYGGFFDV

SEQ ID NO: 8408 - protein, 11 aa, Artificial Sequence
  Description of Artificial Sequence: Synthetic peptide
  XENP018732 vlCDR1
RASQSVSNDVA

SEQ ID NO: 8409 - protein, 7 aa, Artificial Sequence
  Description of Artificial Sequence: Synthetic peptide
  XENP018732 vlCDR2
YASHRYT

SEQ ID NO: 8410 - protein, 9 aa, Artificial Sequence
  Description of Artificial Sequence: Synthetic peptide
  XENP018732 vlCDR3
QQDYSSPRT

SEQ ID NO: 8411 - protein, 249 aa, Artificial Sequence
  Description of Artificial Sequence: Synthetic polypeptide
  XENP018733 1G6_H1.229_L1_scFv(GKPGS)4
EVQLVESGGGLVKPGGSLRLSCAASGFTFSNYWMNWVRQAPGKGLEWVGEIRLKSNNYATHYAEPVKGRFTISRDDSKSTVYLQMNSLKTEDTAVYYCTRYYGNYGGHFDVWGAGTLVTVSSGKPGSGKPGSGKPGSGKPGSSIVMTQSPATLSVSPGERATLSCRASQSVSNDVAWYQQKPGQSPRLLINYASHRYTGVPDRFTGSGYGTEFTLTISSLQSEDFAVYFCQQDYSSPRTFGGGTKVEIK

SEQ ID NO: 8412 - protein, 122 aa, Artificial Sequence
  Description of Artificial Sequence: Synthetic polypeptide
  VH of XENP018733
EVQLVESGGGLVKPGGSLRLSCAASGFTFSNYWMNWVRQAPGKGLEWVGEIRLKSNNYATHYAEPVKGRFTISRDDSKSTVYLQMNSLKTEDTAVYYCTRYYGNYGGHFDVWGAGTLVTVSS

SEQ ID NO: 8413 - protein, 107 aa, Artificial Sequence; identical to SEQ ID NO: 6247
  Description of Artificial Sequence: Synthetic polypeptide
  VL of XENP018733

SEQ ID NO: 8414 - protein, 5 aa, Artificial Sequence
  Description of Artificial Sequence: Synthetic peptide
  XENP018733 vhCDR1
NYWMN

SEQ ID NO: 8415 - protein, 19 aa, Artificial Sequence
  Description of Artificial Sequence: Synthetic peptide
  XENP018733 vhCDR2
EIRLKSNNYATHYAEPVKG

SEQ ID NO: 8416 - protein, 11 aa, Artificial Sequence
  Description of Artificial Sequence: Synthetic peptide
  XENP018733 vhCDR3
YYGNYGGHFDV

SEQ ID NO: 8417 - protein, 11 aa, Artificial Sequence
  Description of Artificial Sequence: Synthetic peptide
  XENP018733 vlCDR1
RASQSVSNDVA

SEQ ID NO: 8418 - protein, 7 aa, Artificial Sequence
  Description of Artificial Sequence: Synthetic peptide
  XENP018733 vlCDR2
YASHRYT

SEQ ID NO: 8419 - protein, 9 aa, Artificial Sequence
  Description of Artificial Sequence: Synthetic peptide
  XENP018733 vlCDR3
QQDYSSPRT

SEQ ID NO: 8420 - protein, 249 aa, Artificial Sequence
  Description of Artificial Sequence: Synthetic polypeptide
  XENP018734 1G6_H1.230_L1_scFv(GKPGS)4
EVQLVESGGGLVKPGGSLRLSCAASGFTFSNYWMNWVRQAPGKGLEWVGEIRLKSNNYATHYAEPVKGRFTISRDDSKSTVYLQMNSLKTEDTAVYYCTRYYGNYGGLFDVWGAGTLVTVSSGKPGSGKPGSGKPGSGKPGSSIVMTQSPATLSVSPGERATLSCRASQSVSNDVAWYQQKPGQSPRLLINYASHRYTGVPDRFTGSGYGTEFTLTISSLQSEDFAVYFCQQDYSSPRTFGGGTKVEIK

SEQ ID NO: 8421 - protein, 122 aa, Artificial Sequence
  Description of Artificial Sequence: Synthetic polypeptide
  VH of XENP018734
EVQLVESGGGLVKPGGSLRLSCAASGFTFSNYWMNWVRQAPGKGLEWVGEIRLKSNNYATHYAEPVKGRFTISRDDSKSTVYLQMNSLKTEDTAVYYCTRYYGNYGGLFDVWGAGTLVTVSS

SEQ ID NO: 8422 - protein, 107 aa, Artificial Sequence; identical to SEQ ID NO: 6247
  Description of Artificial Sequence: Synthetic polypeptide
  VL of XENP018734

SEQ ID NO: 8423 - protein, 5 aa, Artificial Sequence
  Description of Artificial Sequence: Synthetic peptide
  XENP018734 vhCDR1
NYWMN

SEQ ID NO: 8424 - protein, 19 aa, Artificial Sequence
  Description of Artificial Sequence: Synthetic peptide
  XENP018734 vhCDR2
EIRLKSNNYATHYAEPVKG

SEQ ID NO: 8425 - protein, 11 aa, Artificial Sequence
  Description of Artificial Sequence: Synthetic peptide
  XENP018734 vhCDR3
YYGNYGGLFDV

SEQ ID NO: 8426 - protein, 11 aa, Artificial Sequence
  Description of Artificial Sequence: Synthetic peptide
  XENP018734 vlCDR1
RASQSVSNDVA

SEQ ID NO: 8427 - protein, 7 aa, Artificial Sequence
  Description of Artificial Sequence: Synthetic peptide
  XENP018734 vlCDR2
YASHRYT

SEQ ID NO: 8428 - protein, 9 aa, Artificial Sequence
  Description of Artificial Sequence: Synthetic peptide
  XENP018734 vlCDR3
QQDYSSPRT

SEQ ID NO: 8429 - protein, 249 aa, Artificial Sequence
  Description of Artificial Sequence: Synthetic polypeptide
  XENP018735 1G6_H1.231_L1_scFv(GKPGS)4
EVQLVESGGGLVKPGGSLRLSCAASGFTFSNYWMNWVRQAPGKGLEWVGEIRLKSNNYATHYAEPVKGRFTISRDDSKSTVYLQMNSLKTEDTAVYYCTRYYGNYGGWFDVWGAGTLVTVSSGKPGSGKPGSGKPGSGKPGSSIVMTQSPATLSVSPGERATLSCRASQSVSNDVAWYQQKPGQSPRLLINYASHRYTGVPDRFTGSGYGTEFTLTISSLQSEDFAVYFCQQDYSSPRTFGGGTKVEIK

SEQ ID NO: 8430 - protein, 122 aa, Artificial Sequence
  Description of Artificial Sequence: Synthetic polypeptide
  VH of XENP018735
EVQLVESGGGLVKPGGSLRLSCAASGFTFSNYWMNWVRQAPGKGLEWVGEIRLKSNNYATHYAEPVKGRFTISRDDSKSTVYLQMNSLKTEDTAVYYCTRYYGNYGGWFDVWGAGTLVTVSS

SEQ ID NO: 8431 - protein, 107 aa, Artificial Sequence; identical to SEQ ID NO: 6247
  Description of Artificial Sequence: Synthetic polypeptide
  VL of XENP018735

SEQ ID NO: 8432 - protein, 5 aa, Artificial Sequence
  Description of Artificial Sequence: Synthetic peptide
  XENP018735 vhCDR1
NYWMN

SEQ ID NO: 8433 - protein, 19 aa, Artificial Sequence
  Description of Artificial Sequence: Synthetic peptide
  XENP018735 vhCDR2
EIRLKSNNYATHYAEPVKG

SEQ ID NO: 8434 - protein, 11 aa, Artificial Sequence
  Description of Artificial Sequence: Synthetic peptide
  XENP018735 vhCDR3
YYGNYGGWFDV

SEQ ID NO: 8435 - protein, 11 aa, Artificial Sequence
  Description of Artificial Sequence: Synthetic peptide
  XENP018735 vlCDR1
RASQSVSNDVA

SEQ ID NO: 8436 - protein, 7 aa, Artificial Sequence
  Description of Artificial Sequence: Synthetic peptide
  XENP018735 vlCDR2
YASHRYT

SEQ ID NO: 8437 - protein, 9 aa, Artificial Sequence
  Description of Artificial Sequence: Synthetic peptide
  XENP018735 vlCDR3
QQDYSSPRT

SEQ ID NO: 8438 - protein, 249 aa, Artificial Sequence
  Description of Artificial Sequence: Synthetic polypeptide
  XENP018736 1G6_H1.232_L1_scFv(GKPGS)4
EVQLVESGGGLVKPGGSLRLSCAASGFTFSNYWMNWVRQAPGKGLEWVGEIRLKSNNYATHYAEPVKGRFTISRDDSKSTVYLQMNSLKTEDTAVYYCTRYYGNYGGVFDVWGAGTLVTVSSGKPGSGKPGSGKPGSGKPGSSIVMTQSPATLSVSPGERATLSCRASQSVSNDVAWYQQKPGQSPRLLINYASHRYTGVPDRFTGSGYGTEFTLTISSLQSEDFAVYFCQQDYSSPRTFGGGTKVEIK

SEQ ID NO: 8439 - protein, 122 aa, Artificial Sequence
  Description of Artificial Sequence: Synthetic polypeptide
  VH of XENP018736
EVQLVESGGGLVKPGGSLRLSCAASGFTFSNYWMNWVRQAPGKGLEWVGEIRLKSNNYATHYAEPVKGRFTISRDDSKSTVYLQMNSLKTEDTAVYYCTRYYGNYGGVFDVWGAGTLVTVSS

SEQ ID NO: 8440 - protein, 107 aa, Artificial Sequence; identical to SEQ ID NO: 6247
  Description of Artificial Sequence: Synthetic polypeptide
  VL of XENP018736

SEQ ID NO: 8441 - protein, 5 aa, Artificial Sequence
  Description of Artificial Sequence: Synthetic peptide
  XENP018736 vhCDR1
NYWMN

SEQ ID NO: 8442 - protein, 19 aa, Artificial Sequence
  Description of Artificial Sequence: Synthetic peptide
  XENP018736 vhCDR2
EIRLKSNNYATHYAEPVKG

SEQ ID NO: 8443 - protein, 11 aa, Artificial Sequence
  Description of Artificial Sequence: Synthetic peptide
  XENP018736 vhCDR3
YYGNYGGVFDV

SEQ ID NO: 8444 - protein, 11 aa, Artificial Sequence
  Description of Artificial Sequence: Synthetic peptide
  XENP018736 vlCDR1
RASQSVSNDVA

SEQ ID NO: 8445 - protein, 7 aa, Artificial Sequence
  Description of Artificial Sequence: Synthetic peptide
  XENP018736 vlCDR2
YASHRYT

SEQ ID NO: 8446 - protein, 9 aa, Artificial Sequence
  Description of Artificial Sequence: Synthetic peptide
  XENP018736 vlCDR3
QQDYSSPRT

SEQ ID NO: 8447 - protein, 249 aa, Artificial Sequence
  Description of Artificial Sequence: Synthetic polypeptide
  XENP018737 1G6_H1.233_L1_scFv(GKPGS)4
EVQLVESGGGLVKPGGSLRLSCAASGFTFSNYWMNWVRQAPGKGLEWVGEIRLKSNNYATHYAEPVKGRFTISRDDSKSTVYLQMNSLKTEDTAVYYCTRYYGNYGGAFDVWGAGTLVTVSSGKPGSGKPGSGKPGSGKPGSSIVMTQSPATLSVSPGERATLSCRASQSVSNDVAWYQQKPGQSPRLLINYASHRYTGVPDRFTGSGYGTEFTLTISSLQSEDFAVYFCQQDYSSPRTFGGGTKVEIK

SEQ ID NO: 8448 - protein, 122 aa, Artificial Sequence
  Description of Artificial Sequence: Synthetic polypeptide
  VH of XENP018737
EVQLVESGGGLVKPGGSLRLSCAASGFTFSNYWMNWVRQAPGKGLEWVGEIRLKSNNYATHYAEPVKGRFTISRDDSKSTVYLQMNSLKTEDTAVYYCTRYYGNYGGAFDVWGAGTLVTVSS

SEQ ID NO: 8449 - protein, 107 aa, Artificial Sequence; identical to SEQ ID NO: 6247
  Description of Artificial Sequence: Synthetic polypeptide
  VL of XENP018737

SEQ ID NO: 8450 - protein, 5 aa, Artificial Sequence
  Description of Artificial Sequence: Synthetic peptide
  XENP018737 vhCDR1
NYWMN

SEQ ID NO: 8451 - protein, 19 aa, Artificial Sequence
  Description of Artificial Sequence: Synthetic peptide
  XENP018737 vhCDR2
EIRLKSNNYATHYAEPVKG

SEQ ID NO: 8452 - protein, 11 aa, Artificial Sequence
  Description of Artificial Sequence: Synthetic peptide
  XENP018737 vhCDR3
YYGNYGGAFDV

SEQ ID NO: 8453 - protein, 11 aa, Artificial Sequence
  Description of Artificial Sequence: Synthetic peptide
  XENP018737 vlCDR1
RASQSVSNDVA

SEQ ID NO: 8454 - protein, 7 aa, Artificial Sequence
  Description of Artificial Sequence: Synthetic peptide
  XENP018737 vlCDR2
YASHRYT

SEQ ID NO: 8455 - protein, 9 aa, Artificial Sequence
  Description of Artificial Sequence: Synthetic peptide
  XENP018737 vlCDR3
QQDYSSPRT

SEQ ID NO: 8456 - protein, 249 aa, Artificial Sequence
  Description of Artificial Sequence: Synthetic polypeptide
  XENP018738 1G6_H1.234_L1_scFv(GKPGS)4
EVQLVESGGGLVKPGGSLRLSCAASGFTFSNYWMNWVRQAPGKGLEWVGEIRLKSNNYATHYAEPVKGRFTISRDDSKSTVYLQMNSLKTEDTAVYYCTRYYGNYGGQFDVWGAGTLVTVSSGKPGSGKPGSGKPGSGKPGSSIVMTQSPATLSVSPGERATLSCRASQSVSNDVAWYQQKPGQSPRLLINYASHRYTGVPDRFTGSGYGTEFTLTISSLQSEDFAVYFCQQDYSSPRTFGGGTKVEIK

SEQ ID NO: 8457 - protein, 122 aa, Artificial Sequence
  Description of Artificial Sequence: Synthetic polypeptide
  VH of XENP018738
EVQLVESGGGLVKPGGSLRLSCAASGFTFSNYWMNWVRQAPGKGLEWVGEIRLKSNNYATHYAEPVKGRFTISRDDSKSTVYLQMNSLKTEDTAVYYCTRYYGNYGGQFDVWGAGTLVTVSS

SEQ ID NO: 8458 - protein, 107 aa, Artificial Sequence; identical to SEQ ID NO: 6247
  Description of Artificial Sequence: Synthetic polypeptide
  VL of XENP018738

SEQ ID NO: 8459 - protein, 5 aa, Artificial Sequence
  Description of Artificial Sequence: Synthetic peptide
  XENP018738 vhCDR1
NYWMN

SEQ ID NO: 8460 - protein, 19 aa, Artificial Sequence
  Description of Artificial Sequence: Synthetic peptide
  XENP018738 vhCDR2
EIRLKSNNYATHYAEPVKG

SEQ ID NO: 8461 - protein, 11 aa, Artificial Sequence
  Description of Artificial Sequence: Synthetic peptide
  XENP018738 vhCDR3
YYGNYGGQFDV

SEQ ID NO: 8462 - protein, 11 aa, Artificial Sequence
  Description of Artificial Sequence: Synthetic peptide
  XENP018738 vlCDR1
RASQSVSNDVA

SEQ ID NO: 8463 - protein, 7 aa, Artificial Sequence
  Description of Artificial Sequence: Synthetic peptide
  XENP018738 vlCDR2
YASHRYT

SEQ ID NO: 8464 - protein, 9 aa, Artificial Sequence
  Description of Artificial Sequence: Synthetic peptide
  XENP018738 vlCDR3
QQDYSSPRT

SEQ ID NO: 8465 - protein, 249 aa, Artificial Sequence
  Description of Artificial Sequence: Synthetic polypeptide
  XENP018739 1G6_H1.235_L1_scFv(GKPGS)4
EVQLVESGGGLVKPGGSLRLSCAASGFTFSNYWMNWVRQAPGKGLEWVGEIRLKSNNYATHYAEPVKGRFTISRDDSKSTVYLQMNSLKTEDTAVYYCTRYYGNYGGDFDVWGAGTLVTVSSGKPGSGKPGSGKPGSGKPGSSIVMTQSPATLSVSPGERATLSCRASQSVSNDVAWYQQKPGQSPRLLINYASHRYTGVPDRFTGSGYGTEFTLTISSLQSEDFAVYFCQQDYSSPRTFGGGTKVEIK

SEQ ID NO: 8466 - protein, 122 aa, Artificial Sequence
  Description of Artificial Sequence: Synthetic polypeptide
  VH of XENP018739
EVQLVESGGGLVKPGGSLRLSCAASGFTFSNYWMNWVRQAPGKGLEWVGEIRLKSNNYATHYAEPVKGRFTISRDDSKSTVYLQMNSLKTEDTAVYYCTRYYGNYGGDFDVWGAGTLVTVSS

SEQ ID NO: 8467 - protein, 107 aa, Artificial Sequence; identical to SEQ ID NO: 6247
  Description of Artificial Sequence: Synthetic polypeptide
  VL of XENP018739

SEQ ID NO: 8468 - protein, 5 aa, Artificial Sequence
  Description of Artificial Sequence: Synthetic peptide
  XENP018739 vhCDR1
NYWMN

SEQ ID NO: 8469 - protein, 19 aa, Artificial Sequence
  Description of Artificial Sequence: Synthetic peptide
  XENP018739 vhCDR2
EIRLKSNNYATHYAEPVKG

SEQ ID NO: 8470 - protein, 11 aa, Artificial Sequence
  Description of Artificial Sequence: Synthetic peptide
  XENP018739 vhCDR3
YYGNYGGDFDV

SEQ ID NO: 8471 - protein, 11 aa, Artificial Sequence
  Description of Artificial Sequence: Synthetic peptide
  XENP018739 vlCDR1
RASQSVSNDVA

SEQ ID NO: 8472 - protein, 7 aa, Artificial Sequence
  Description of Artificial Sequence: Synthetic peptide
  XENP018739 vlCDR2
YASHRYT

SEQ ID NO: 8473 - protein, 9 aa, Artificial Sequence
  Description of Artificial Sequence: Synthetic peptide
  XENP018739 vlCDR3
QQDYSSPRT

SEQ ID NO: 8474 - protein, 249 aa, Artificial Sequence
  Description of Artificial Sequence: Synthetic polypeptide
  XENP018740 1G6_H1.236_L1_scFv(GKPGS)4
EVQLVESGGGLVKPGGSLRLSCAASGFTFSNYWMNWVRQAPGKGLEWVGEIRLKSNNYATHYAEPVKGRFTISRDDSKSTVYLQMNSLKTEDTAVYYCTRYYGNYGGKFDVWGAGTLVTVSSGKPGSGKPGSGKPGSGKPGSSIVMTQSPATLSVSPGERATLSCRASQSVSNDVAWYQQKPGQSPRLLINYASHRYTGVPDRFTGSGYGTEFTLTISSLQSEDFAVYFCQQDYSSPRTFGGGTKVEIK

SEQ ID NO: 8475 - protein, 122 aa, Artificial Sequence
  Description of Artificial Sequence: Synthetic polypeptide
  VH of XENP018740
EVQLVESGGGLVKPGGSLRLSCAASGFTFSNYWMNWVRQAPGKGLEWVGEIRLKSNNYATHYAEPVKGRFTISRDDSKSTVYLQMNSLKTEDTAVYYCTRYYGNYGGKFDVWGAGTLVTVSS

SEQ ID NO: 8476 - protein, 107 aa, Artificial Sequence; identical to SEQ ID NO: 6247
  Description of Artificial Sequence: Synthetic polypeptide
  VL of XENP018740

SEQ ID NO: 8477 - protein, 5 aa, Artificial Sequence
  Description of Artificial Sequence: Synthetic peptide
  XENP018740 vhCDR1
NYWMN

SEQ ID NO: 8478 - protein, 19 aa, Artificial Sequence
  Description of Artificial Sequence: Synthetic peptide
  XENP018740 vhCDR2
EIRLKSNNYATHYAEPVKG

SEQ ID NO: 8479 - protein, 11 aa, Artificial Sequence
  Description of Artificial Sequence: Synthetic peptide
  XENP018740 vhCDR3
YYGNYGGKFDV

SEQ ID NO: 8480 - protein, 11 aa, Artificial Sequence
  Description of Artificial Sequence: Synthetic peptide
  XENP018740 vlCDR1
RASQSVSNDVA

SEQ ID NO: 8481 - protein, 7 aa, Artificial Sequence
  Description of Artificial Sequence: Synthetic peptide
  XENP018740 vlCDR2
YASHRYT

SEQ ID NO: 8482 - protein, 9 aa, Artificial Sequence
  Description of Artificial Sequence: Synthetic peptide
  XENP018740 vlCDR3
QQDYSSPRT

SEQ ID NO: 8483 - protein, 249 aa, Artificial Sequence
  Description of Artificial Sequence: Synthetic polypeptide
  XENP018741 1G6_H1.237_L1_scFv(GKPGS)4
EVQLVESGGGLVKPGGSLRLSCAASGFTFSNYWMNWVRQAPGKGLEWVGEIRLKSNNYATHYAEPVKGRFTISRDDSKSTVYLQMNSLKTEDTAVYYCTRYYGNYGGYFDYWGAGTLVTVSSGKPGSGKPGSGKPGSGKPGSSIVMTQSPATLSVSPGERATLSCRASQSVSNDVAWYQQKPGQSPRLLINYASHRYTGVPDRFTGSGYGTEFTLTISSLQSEDFAVYFCQQDYSSPRTFGGGTKVEIK

SEQ ID NO: 8484 - protein, 122 aa, Artificial Sequence
  Description of Artificial Sequence: Synthetic polypeptide
  VH of XENP018741
EVQLVESGGGLVKPGGSLRLSCAASGFTFSNYWMNWVRQAPGKGLEWVGEIRLKSNNYATHYAEPVKGRFTISRDDSKSTVYLQMNSLKTEDTAVYYCTRYYGNYGGYFDYWGAGTLVTVSS

SEQ ID NO: 8485 - protein, 107 aa, Artificial Sequence; identical to SEQ ID NO: 6247
  Description of Artificial Sequence: Synthetic polypeptide
  VL of XENP018741

SEQ ID NO: 8486 - protein, 5 aa, Artificial Sequence
  Description of Artificial Sequence: Synthetic peptide
  XENP018741 vhCDR1
NYWMN

SEQ ID NO: 8487 - protein, 19 aa, Artificial Sequence
  Description of Artificial Sequence: Synthetic peptide
  XENP018741 vhCDR2
EIRLKSNNYATHYAEPVKG

SEQ ID NO: 8488 - protein, 11 aa, Artificial Sequence
  Description of Artificial Sequence: Synthetic peptide
  XENP018741 vhCDR3
YYGNYGGYFDY

SEQ ID NO: 8489 - protein, 11 aa, Artificial Sequence
  Description of Artificial Sequence: Synthetic peptide
  XENP018741 vlCDR1
RASQSVSNDVA

SEQ ID NO: 8490 - protein, 7 aa, Artificial Sequence
  Description of Artificial Sequence: Synthetic peptide
  XENP018741 vlCDR2
YASHRYT

SEQ ID NO: 8491 - protein, 9 aa, Artificial Sequence
  Description of Artificial Sequence: Synthetic peptide
  XENP018741 vlCDR3
QQDYSSPRT

SEQ ID NO: 8492 - protein, 249 aa, Artificial Sequence
  Description of Artificial Sequence: Synthetic polypeptide
  XENP018742 1G6_H1.238_L1_scFv(GKPGS)4
EVQLVESGGGLVKPGGSLRLSCAASGFTFSNYWMNWVRQAPGKGLEWVGEIRLKSNNYATHYAEPVKGRFTISRDDSKSTVYLQMNSLKTEDTAVYYCTRYYGNYGGYFDVWGQGTLVTVSSGKPGSGKPGSGKPGSGKPGSSIVMTQSPATLSVSPGERATLSCRASQSVSNDVAWYQQKPGQSPRLLINYASHRYTGVPDRFTGSGYGTEFTLTISSLQSEDFAVYFCQQDYSSPRTFGGGTKVEIK

SEQ ID NO: 8493 - protein, 122 aa, Artificial Sequence
  Description of Artificial Sequence: Synthetic polypeptide
  VH of XENP018742
EVQLVESGGGLVKPGGSLRLSCAASGFTFSNYWMNWVRQAPGKGLEWVGEIRLKSNNYATHYAEPVKGRFTISRDDSKSTVYLQMNSLKTEDTAVYYCTRYYGNYGGYFDVWGQGTLVTVSS

SEQ ID NO: 8494 - protein, 107 aa, Artificial Sequence; identical to SEQ ID NO: 6247
  Description of Artificial Sequence: Synthetic polypeptide
  VL of XENP018742

SEQ ID NO: 8495 - protein, 5 aa, Artificial Sequence
  Description of Artificial Sequence: Synthetic peptide
  XENP018742 vhCDR1
NYWMN

SEQ ID NO: 8496 - protein, 19 aa, Artificial Sequence
  Description of Artificial Sequence: Synthetic peptide
  XENP018742 vhCDR2
EIRLKSNNYATHYAEPVKG

SEQ ID NO: 8497 - protein, 11 aa, Artificial Sequence
  Description of Artificial Sequence: Synthetic peptide
  XENP018742 vhCDR3
YYGNYGGYFDV

SEQ ID NO: 8498 - protein, 11 aa, Artificial Sequence
  Description of Artificial Sequence: Synthetic peptide
  XENP018742 vlCDR1
RASQSVSNDVA

SEQ ID NO: 8499 - protein, 7 aa, Artificial Sequence
  Description of Artificial Sequence: Synthetic peptide
  XENP018742 vlCDR2
YASHRYT

SEQ ID NO: 8500 - protein, 9 aa, Artificial Sequence
  Description of Artificial Sequence: Synthetic peptide
  XENP018742 vlCDR3
QQDYSSPRT

SEQ ID NO: 8501 - protein, 249 aa, Artificial Sequence
  Description of Artificial Sequence: Synthetic polypeptide
  XENP018743 1G6_H1_L1.1_scFv(GKPGS)4
EVQLVESGGGLVKPGGSLRLSCAASGFTFSNYWMNWVRQAPGKGLEWVGEIRLKSNNYATHYAEPVKGRFTISRDDSKSTVYLQMNSLKTEDTAVYYCTRYYGNYGGYFDVWGAGTLVTVSSGKPGSGKPGSGKPGSGKPGSEIVMTQSPATLSVSPGERATLSCRASQSVSNDVAWYQQKPGQSPRLLINYASHRYTGVPDRFTGSGYGTEFTLTISSLQSEDFAVYFCQQDYSSPRTFGGGTKVEIK

SEQ ID NO: 8502 - protein, 122 aa, Artificial Sequence; identical to SEQ ID NO: 6246
  Description of Artificial Sequence: Synthetic polypeptide
  VH of XENP018743

SEQ ID NO: 8503 - protein, 107 aa, Artificial Sequence
  Description of Artificial Sequence: Synthetic polypeptide
  VL of XENP018743
EIVMTQSPATLSVSPGERATLSCRASQSVSNDVAWYQQKPGQSPRLLINYASHRYTGVPDRFTGSGYGTEFTLTISSLQSEDFAVYFCQQDYSSPRTFGGGTKVEIK

SEQ ID NO: 8504 - protein, 5 aa, Artificial Sequence
  Description of Artificial Sequence: Synthetic peptide
  XENP018743 vhCDR1
NYWMN

SEQ ID NO: 8505 - protein, 19 aa, Artificial Sequence
  Description of Artificial Sequence: Synthetic peptide
  XENP018743 vhCDR2
EIRLKSNNYATHYAEPVKG

SEQ ID NO: 8506 - protein, 11 aa, Artificial Sequence
  Description of Artificial Sequence: Synthetic peptide
  XENP018743 vhCDR3
YYGNYGGYFDV

SEQ ID NO: 8507 - protein, 11 aa, Artificial Sequence
  Description of Artificial Sequence: Synthetic peptide
  XENP018743 vlCDR1
RASQSVSNDVA

SEQ ID NO: 8508 - protein, 7 aa, Artificial Sequence
  Description of Artificial Sequence: Synthetic peptide
  XENP018743 vlCDR2
YASHRYT

SEQ ID NO: 8509 - protein, 9 aa, Artificial Sequence
  Description of Artificial Sequence: Synthetic peptide
  XENP018743 vlCDR3
QQDYSSPRT

SEQ ID NO: 8510 - protein, 249 aa, Artificial Sequence
  Description of Artificial Sequence: Synthetic polypeptide
  XENP018744 1G6_H1_L1.2_scFv(GKPGS)4
EVQLVESGGGLVKPGGSLRLSCAASGFTFSNYWMNWVRQAPGKGLEWVGEIRLKSNNYATHYAEPVKGRFTISRDDSKSTVYLQMNSLKTEDTAVYYCTRYYGNYGGYFDVWGAGTLVTVSSGKPGSGKPGSGKPGSGKPGSDIVMTQSPATLSVSPGERATLSCRASQSVSNDVAWYQQKPGQSPRLLINYASHRYTGVPDRFTGSGYGTEFTLTISSLQSEDFAVYFCQQDYSSPRTFGGGTKVEIK

SEQ ID NO: 8511 - protein, 122 aa, Artificial Sequence; identical to SEQ ID NO: 6246
  Description of Artificial Sequence: Synthetic polypeptide
  VH of XENP018744

SEQ ID NO: 8512 - protein, 107 aa, Artificial Sequence
  Description of Artificial Sequence: Synthetic polypeptide
  VL of XENP018744
DIVMTQSPATLSVSPGERATLSCRASQSVSNDVAWYQQKPGQSPRLLINYASHRYTGVPDRFTGSGYGTEFTLTISSLQSEDFAVYFCQQDYSSPRTFGGGTKVEIK

SEQ ID NO: 8513 - protein, 5 aa, Artificial Sequence
  Description of Artificial Sequence: Synthetic peptide
  XENP018744 vhCDR1
NYWMN

SEQ ID NO: 8514 - protein, 19 aa, Artificial Sequence
  Description of Artificial Sequence: Synthetic peptide
  XENP018744 vhCDR2
EIRLKSNNYATHYAEPVKG

SEQ ID NO: 8515 - protein, 11 aa, Artificial Sequence
  Description of Artificial Sequence: Synthetic peptide
  XENP018744 vhCDR3
YYGNYGGYFDV

SEQ ID NO: 8516 - protein, 11 aa, Artificial Sequence
  Description of Artificial Sequence: Synthetic peptide
  XENP018744 vlCDR1
RASQSVSNDVA

SEQ ID NO: 8517 - protein, 7 aa, Artificial Sequence
  Description of Artificial Sequence: Synthetic peptide
  XENP018744 vlCDR2
YASHRYT

SEQ ID NO: 8518 - protein, 9 aa, Artificial Sequence
  Description of Artificial Sequence: Synthetic peptide
  XENP018744 vlCDR3
QQDYSSPRT

SEQ ID NO: 8519 - protein, 249 aa, Artificial Sequence
  Description of Artificial Sequence: Synthetic polypeptide
  XENP018745 1G6_H1_L1.3_scFv(GKPGS)4
EVQLVESGGGLVKPGGSLRLSCAASGFTFSNYWMNWVRQAPGKGLEWVGEIRLKSNNYATHYAEPVKGRFTISRDDSKSTVYLQMNSLKTEDTAVYYCTRYYGNYGGYFDVWGAGTLVTVSSGKPGSGKPGSGKPGSGKPGSSVVMTQSPATLSVSPGERATLSCRASQSVSNDVAWYQQKPGQSPRLLINYASHRYTGVPDRFTGSGYGTEFTLTISSLQSEDFAVYFCQQDYSSPRTFGGGTKVEIK

SEQ ID NO: 8520 - protein, 122 aa, Artificial Sequence; identical to SEQ ID NO: 6246
  Description of Artificial Sequence: Synthetic polypeptide
  VH of XENP018745

SEQ ID NO: 8521 - protein, 107 aa, Artificial Sequence
  Description of Artificial Sequence: Synthetic polypeptide
  VL of XENP018745
SVVMTQSPATLSVSPGERATLSCRASQSVSNDVAWYQQKPGQSPRLLINYASHRYTGVPDRFTGSGYGTEFTLTISSLQSEDFAVYFCQQDYSSPRTFGGGTKVEIK

SEQ ID NO: 8522 - protein, 5 aa, Artificial Sequence
  Description of Artificial Sequence: Synthetic peptide
  XENP018745 vhCDR1
NYWMN

SEQ ID NO: 8523 - protein, 19 aa, Artificial Sequence
  Description of Artificial Sequence: Synthetic peptide
  XENP018745 vhCDR2
EIRLKSNNYATHYAEPVKG

SEQ ID NO: 8524 - protein, 11 aa, Artificial Sequence
  Description of Artificial Sequence: Synthetic peptide
  XENP018745 vhCDR3
YYGNYGGYFDV

SEQ ID NO: 8525 - protein, 11 aa, Artificial Sequence
  Description of Artificial Sequence: Synthetic peptide
  XENP018745 vlCDR1
RASQSVSNDVA

SEQ ID NO: 8526 - protein, 7 aa, Artificial Sequence
  Description of Artificial Sequence: Synthetic peptide
  XENP018745 vlCDR2
YASHRYT

SEQ ID NO: 8527 - protein, 9 aa, Artificial Sequence
  Description of Artificial Sequence: Synthetic peptide
  XENP018745 vlCDR3
QQDYSSPRT

SEQ ID NO: 8528 - protein, 249 aa, Artificial Sequence
  Description of Artificial Sequence: Synthetic polypeptide
  XENP018746 1G6_H1_L1.4_scFv(GKPGS)4
EVQLVESGGGLVKPGGSLRLSCAASGFTFSNYWMNWVRQAPGKGLEWVGEIRLKSNNYATHYAEPVKGRFTISRDDSKSTVYLQMNSLKTEDTAVYYCTRYYGNYGGYFDVWGAGTLVTVSSGKPGSGKPGSGKPGSGKPGSSIVLTQSPATLSVSPGERATLSCRASQSVSNDVAWYQQKPGQSPRLLINYASHRYTGVPDRFTGSGYGTEFTLTISSLQSEDFAVYFCQQDYSSPRTFGGGTKVEIK

SEQ ID NO: 8529 - protein, 122 aa, Artificial Sequence; identical to SEQ ID NO: 6246
  Description of Artificial Sequence: Synthetic polypeptide
  VH of XENP018746

SEQ ID NO: 8530 - protein, 107 aa, Artificial Sequence
  Description of Artificial Sequence: Synthetic polypeptide
  VL of XENP018746
SIVLTQSPATLSVSPGERATLSCRASQSVSNDVAWYQQKPGQSPRLLINYASHRYTGVPDRFTGSGYGTEFTLTISSLQSEDFAVYFCQQDYSSPRTFGGGTKVEIK

SEQ ID NO: 8531 - protein, 5 aa, Artificial Sequence
  Description of Artificial Sequence: Synthetic peptide
  XENP018746 vhCDR1
NYWMN

SEQ ID NO: 8532 - protein, 19 aa, Artificial Sequence
  Description of Artificial Sequence: Synthetic peptide
  XENP018746 vhCDR2
EIRLKSNNYATHYAEPVKG

SEQ ID NO: 8533 - protein, 11 aa, Artificial Sequence
  Description of Artificial Sequence: Synthetic peptide
  XENP018746 vhCDR3
YYGNYGGYFDV

SEQ ID NO: 8534 - protein, 11 aa, Artificial Sequence
  Description of Artificial Sequence: Synthetic peptide
  XENP018746 vlCDR1
RASQSVSNDVA

SEQ ID NO: 8535 - protein, 7 aa, Artificial Sequence
  Description of Artificial Sequence: Synthetic peptide
  XENP018746 vlCDR2
YASHRYT

SEQ ID NO: 8536 - protein, 9 aa, Artificial Sequence
  Description of Artificial Sequence: Synthetic peptide
  XENP018746 vlCDR3
QQDYSSPRT

SEQ ID NO: 8537 - protein, 249 aa, Artificial Sequence
  Description of Artificial Sequence: Synthetic polypeptide
  XENP018747 1G6_H1_L1.5_scFv(GKPGS)4
EVQLVESGGGLVKPGGSLRLSCAASGFTFSNYWMNWVRQAPGKGLEWVGEIRLKSNNYATHYAEPVKGRFTISRDDSKSTVYLQMNSLKTEDTAVYYCTRYYGNYGGYFDVWGAGTLVTVSSGKPGSGKPGSGKPGSGKPGSSIVMTQTPATLSVSPGERATLSCRASQSVSNDVAWYQQKPGQSPRLLINYASHRYTGVPDRFTGSGYGTEFTLTISSLQSEDFAVYFCQQDYSSPRTFGGGTKVEIK

SEQ ID NO: 8538 - protein, 122 aa, Artificial Sequence; identical to SEQ ID NO: 6246
  Description of Artificial Sequence: Synthetic polypeptide
  VH of XENP018747

SEQ ID NO: 8539 - protein, 107 aa, Artificial Sequence
  Description of Artificial Sequence: Synthetic polypeptide
  VL of XENP018747
SIVMTQTPATLSVSPGERATLSCRASQSVSNDVAWYQQKPGQSPRLLINYASHRYTGVPDRFTGSGYGTEFTLTISSLQSEDFAVYFCQQDYSSPRTFGGGTKVEIK

SEQ ID NO: 8540 - protein, 5 aa, Artificial Sequence
  Description of Artificial Sequence: Synthetic peptide
  XENP018747 vhCDR1
NYWMN

SEQ ID NO: 8541 - protein, 19 aa, Artificial Sequence
  Description of Artificial Sequence: Synthetic peptide
  XENP018747 vhCDR2
EIRLKSNNYATHYAEPVKG

SEQ ID NO: 8542 - protein, 11 aa, Artificial Sequence
  Description of Artificial Sequence: Synthetic peptide
  XENP018747 vhCDR3
YYGNYGGYFDV

SEQ ID NO: 8543 - protein, 11 aa, Artificial Sequence
  Description of Artificial Sequence: Synthetic peptide
  XENP018747 vlCDR1
RASQSVSNDVA

SEQ ID NO: 8544 - protein, 7 aa, Artificial Sequence
  Description of Artificial Sequence: Synthetic peptide
  XENP018747 vlCDR2
YASHRYT

SEQ ID NO: 8545 - protein, 9 aa, Artificial Sequence
  Description of Artificial Sequence: Synthetic peptide
  XENP018747 vlCDR3
QQDYSSPRT

SEQ ID NO: 8546 - protein, 249 aa, Artificial Sequence
  Description of Artificial Sequence: Synthetic polypeptide
  XENP018748 1G6_H1_L1.6_scFv(GKPGS)4
EVQLVESGGGLVKPGGSLRLSCAASGFTFSNYWMNWVRQAPGKGLEWVGEIRLKSNNYATHYAEPVKGRFTISRDDSKSTVYLQMNSLKTEDTAVYYCTRYYGNYGGYFDVWGAGTLVTVSSGKPGSGKPGSGKPGSGKPGSSIVMTQSPKTLSVSPGERATLSCRASQSVSNDVAWYQQKPGQSPRLLINYASHRYTGVPDRFTGSGYGTEFTLTISSLQSEDFAVYFCQQDYSSPRTFGGGTKVEIK

SEQ ID NO: 8547 - protein, 122 aa, Artificial Sequence; identical to SEQ ID NO: 6246
  Description of Artificial Sequence: Synthetic polypeptide
  VH of XENP018748

SEQ ID NO: 8548 - protein, 107 aa, Artificial Sequence
  Description of Artificial Sequence: Synthetic polypeptide
  VL of XENP018748
SIVMTQSPKTLSVSPGERATLSCRASQSVSNDVAWYQQKPGQSPRLLINYASHRYTGVPDRFTGSGYGTEFTLTISSLQSEDFAVYFCQQDYSSPRTFGGGTKVEIK

SEQ ID NO: 8549 - protein, 5 aa, Artificial Sequence
  Description of Artificial Sequence: Synthetic peptide
  XENP018748 vhCDR1
NYWMN

SEQ ID NO: 8550 - protein, 19 aa, Artificial Sequence
  Description of Artificial Sequence: Synthetic peptide
  XENP018748 vhCDR2
EIRLKSNNYATHYAEPVKG

SEQ ID NO: 8551 - protein, 11 aa, Artificial Sequence
  Description of Artificial Sequence: Synthetic peptide
  XENP018748 vhCDR3
YYGNYGGYFDV

SEQ ID NO: 8552 - protein, 11 aa, Artificial Sequence
  Description of Artificial Sequence: Synthetic peptide
  XENP018748 vlCDR1
RASQSVSNDVA

SEQ ID NO: 8553 - protein, 7 aa, Artificial Sequence
  Description of Artificial Sequence: Synthetic peptide
  XENP018748 vlCDR2
YASHRYT

SEQ ID NO: 8554 - protein, 9 aa, Artificial Sequence
  Description of Artificial Sequence: Synthetic peptide
  XENP018748 vlCDR3
QQDYSSPRT

SEQ ID NO: 8555 - protein, 249 aa, Artificial Sequence
  Description of Artificial Sequence: Synthetic polypeptide
  XENP018749 1G6_H1_L1.7_scFv(GKPGS)4
EVQLVESGGGLVKPGGSLRLSCAASGFTFSNYWMNWVRQAPGKGLEWVGEIRLKSNNYATHYAEPVKGRFTISRDDSKSTVYLQMNSLKTEDTAVYYCTRYYGNYGGYFDVWGAGTLVTVSSGKPGSGKPGSGKPGSGKPGSSIVMTQSPASLSVSPGERATLSCRASQSVSNDVAWYQQKPGQSPRLLINYASHRYTGVPDRFTGSGYGTEFTLTISSLQSEDFAVYFCQQDYSSPRTFGGGTKVEIK

SEQ ID NO: 8556 - protein, 122 aa, Artificial Sequence; identical to SEQ ID NO: 6246
  Description of Artificial Sequence: Synthetic polypeptide
  VH of XENP018749

SEQ ID NO: 8557 - protein, 107 aa, Artificial Sequence
  Description of Artificial Sequence: Synthetic polypeptide
  VL of XENP018749
SIVMTQSPASLSVSPGERATLSCRASQSVSNDVAWYQQKPGQSPRLLINYASHRYTGVPDRFTGSGYGTEFTLTISSLQSEDFAVYFCQQDYSSPRTFGGGTKVEIK

SEQ ID NO: 8558 - protein, 5 aa, Artificial Sequence
  Description of Artificial Sequence: Synthetic peptide
  XENP018749 vhCDR1
NYWMN

SEQ ID NO: 8559 - protein, 19 aa, Artificial Sequence
  Description of Artificial Sequence: Synthetic peptide
  XENP018749 vhCDR2
EIRLKSNNYATHYAEPVKG

SEQ ID NO: 8560 - protein, 11 aa, Artificial Sequence
  Description of Artificial Sequence: Synthetic peptide
  XENP018749 vhCDR3
YYGNYGGYFDV

SEQ ID NO: 8561 - protein, 11 aa, Artificial Sequence
  Description of Artificial Sequence: Synthetic peptide
  XENP018749 vlCDR1
RASQSVSNDVA

SEQ ID NO: 8562 - protein, 7 aa, Artificial Sequence
  Description of Artificial Sequence: Synthetic peptide
  XENP018749 vlCDR2
YASHRYT

SEQ ID NO: 8563 - protein, 9 aa, Artificial Sequence
  Description of Artificial Sequence: Synthetic peptide
  XENP018749 vlCDR3
QQDYSSPRT

SEQ ID NO: 8564 - protein, 249 aa, Artificial Sequence
  Description of Artificial Sequence: Synthetic polypeptide
  XENP018750 1G6_H1_L1.8_scFv(GKPGS)4
EVQLVESGGGLVKPGGSLRLSCAASGFTFSNYWMNWVRQAPGKGLEWVGEIRLKSNNYATHYAEPVKGRFTISRDDSKSTVYLQMNSLKTEDTAVYYCTRYYGNYGGYFDVWGAGTLVTVSSGKPGSGKPGSGKPGSGKPGSSIVMTQSPAFLSVSPGERATLSCRASQSVSNDVAWYQQKPGQSPRLLINYASHRYTGVPDRFTGSGYGTEFTLTISSLQSEDFAVYFCQQDYSSPRTFGGGTKVEIK

SEQ ID NO: 8565 - protein, 122 aa, Artificial Sequence; identical to SEQ ID NO: 6246
  Description of Artificial Sequence: Synthetic polypeptide
  VH of XENP018750

SEQ ID NO: 8566 - protein, 107 aa, Artificial Sequence
  Description of Artificial Sequence: Synthetic polypeptide
  VL of XENP018750
SIVMTQSPAFLSVSPGERATLSCRASQSVSNDVAWYQQKPGQSPRLLINYASHRYTGVPDRFTGSGYGTEFTLTISSLQSEDFAVYFCQQDYSSPRTFGGGTKVEIK

SEQ ID NO: 8567 - protein, 5 aa, Artificial Sequence
  Description of Artificial Sequence: Synthetic peptide
  XENP018750 vhCDR1
NYWMN

SEQ ID NO: 8568 - protein, 19 aa, Artificial Sequence
  Description of Artificial Sequence: Synthetic peptide
  XENP018750 vhCDR2
EIRLKSNNYATHYAEPVKG

SEQ ID NO: 8569 - protein, 11 aa, Artificial Sequence
  Description of Artificial Sequence: Synthetic peptide
  XENP018750 vhCDR3
YYGNYGGYFDV

SEQ ID NO: 8570 - protein, 11 aa, Artificial Sequence
  Description of Artificial Sequence: Synthetic peptide
  XENP018750 vlCDR1
RASQSVSNDVA

SEQ ID NO: 8571 - protein, 7 aa, Artificial Sequence
  Description of Artificial Sequence: Synthetic peptide
  XENP018750 vlCDR2
YASHRYT

SEQ ID NO: 8572 - protein, 9 aa, Artificial Sequence
  Description of Artificial Sequence: Synthetic peptide
  XENP018750 vlCDR3
QQDYSSPRT

SEQ ID NO: 8573 - protein, 249 aa, Artificial Sequence
  Description of Artificial Sequence: Synthetic polypeptide
  XENP018751 1G6_H1_L1.9_scFv(GKPGS)4
EVQLVESGGGLVKPGGSLRLSCAASGFTFSNYWMNWVRQAPGKGLEWVGEIRLKSNNYATHYAEPVKGRFTISRDDSKSTVYLQMNSLKTEDTAVYYCTRYYGNYGGYFDVWGAGTLVTVSSGKPGSGKPGSGKPGSGKPGSSIVMTQSPATLLVSPGERATLSCRASQSVSNDVAWYQQKPGQSPRLLINYASHRYTGVPDRFTGSGYGTEFTLTISSLQSEDFAVYFCQQDYSSPRTFGGGTKVEIK

SEQ ID NO: 8574 - protein, 122 aa, Artificial Sequence; identical to SEQ ID NO: 6246
  Description of Artificial Sequence: Synthetic polypeptide
  VH of XENP018751

SEQ ID NO: 8575 - protein, 107 aa, Artificial Sequence
  Description of Artificial Sequence: Synthetic polypeptide
  VL of XENP018751
SIVMTQSPATLLVSPGERATLSCRASQSVSNDVAWYQQKPGQSPRLLINYASHRYTGVPDRFTGSGYGTEFTLTISSLQSEDFAVYFCQQDYSSPRTFGGGTKVEIK

SEQ ID NO: 8576 - protein, 5 aa, Artificial Sequence
  Description of Artificial Sequence: Synthetic peptide
  XENP018751 vhCDR1
NYWMN

SEQ ID NO: 8577 - protein, 19 aa, Artificial Sequence
  Description of Artificial Sequence: Synthetic peptide
  XENP018751 vhCDR2
EIRLKSNNYATHYAEPVKG

SEQ ID NO: 8578 - protein, 11 aa, Artificial Sequence
  Description of Artificial Sequence: Synthetic peptide
  XENP018751 vhCDR3
YYGNYGGYFDV

SEQ ID NO: 8579 - protein, 11 aa, Artificial Sequence
  Description of Artificial Sequence: Synthetic peptide
  XENP018751 vlCDR1
RASQSVSNDVA

SEQ ID NO: 8580 - protein, 7 aa, Artificial Sequence
  Description of Artificial Sequence: Synthetic peptide
  XENP018751 vlCDR2
YASHRYT

SEQ ID NO: 8581 - protein, 9 aa, Artificial Sequence
  Description of Artificial Sequence: Synthetic peptide
  XENP018751 vlCDR3
QQDYSSPRT

SEQ ID NO: 8582 - protein, 249 aa, Artificial Sequence
  Description of Artificial Sequence: Synthetic polypeptide
  XENP018752 1G6_H1_L1.10_scFv(GKPGS)4
EVQLVESGGGLVKPGGSLRLSCAASGFTFSNYWMNWVRQAPGKGLEWVGEIRLKSNNYATHYAEPVKGRFTISRDDSKSTVYLQMNSLKTEDTAVYYCTRYYGNYGGYFDVWGAGTLVTVSSGKPGSGKPGSGKPGSGKPGSSIVMTQSPATLSVSAGERATLSCRASQSVSNDVAWYQQKPGQSPRLLINYASHRYTGVPDRFTGSGYGTEFTLTISSLQSEDFAVYFCQQDYSSPRTFGGGTKVEIK

SEQ ID NO: 8583 - protein, 122 aa, Artificial Sequence; identical to SEQ ID NO: 6246
  Description of Artificial Sequence: Synthetic polypeptide
  VH of XENP018752

SEQ ID NO: 8584 - protein, 107 aa, Artificial Sequence
  Description of Artificial Sequence: Synthetic polypeptide
  VL of XENP018752
SIVMTQSPATLSVSAGERATLSCRASQSVSNDVAWYQQKPGQSPRLLINYASHRYTGVPDRFTGSGYGTEFTLTISSLQSEDFAVYFCQQDYSSPRTFGGGTKVEIK

SEQ ID NO: 8585 - protein, 5 aa, Artificial Sequence
  Description of Artificial Sequence: Synthetic peptide
  XENP018752 vhCDR1
NYWMN

SEQ ID NO: 8586 - protein, 19 aa, Artificial Sequence
  Description of Artificial Sequence: Synthetic peptide
  XENP018752 vhCDR2
EIRLKSNNYATHYAEPVKG

SEQ ID NO: 8587 - protein, 11 aa, Artificial Sequence
  Description of Artificial Sequence: Synthetic peptide
  XENP018752 vhCDR3
YYGNYGGYFDV

SEQ ID NO: 8588 - protein, 11 aa, Artificial Sequence
  Description of Artificial Sequence: Synthetic peptide
  XENP018752 vlCDR1
RASQSVSNDVA

SEQ ID NO: 8589 - protein, 7 aa, Artificial Sequence
  Description of Artificial Sequence: Synthetic peptide
  XENP018752 vlCDR2
YASHRYT

SEQ ID NO: 8590 - protein, 9 aa, Artificial Sequence
  Description of Artificial Sequence: Synthetic peptide
  XENP018752 vlCDR3
QQDYSSPRT

SEQ ID NO: 8591 - protein, 249 aa, Artificial Sequence
  Description of Artificial Sequence: Synthetic polypeptide
  XENP018753 1G6_H1_L1.11_scFv(GKPGS)4
EVQLVESGGGLVKPGGSLRLSCAASGFTFSNYWMNWVRQAPGKGLEWVGEIRLKSNNYATHYAEPVKGRFTISRDDSKSTVYLQMNSLKTEDTAVYYCTRYYGNYGGYFDVWGAGTLVTVSSGKPGSGKPGSGKPGSGKPGSSIVMTQSPATLSVSPGDRATLSCRASQSVSNDVAWYQQKPGQSPRLLINYASHRYTGVPDRFTGSGYGTEFTLTISSLQSEDFAVYFCQQDYSSPRTFGGGTKVEIK

SEQ ID NO: 8592 - protein, 122 aa, Artificial Sequence; identical to SEQ ID NO: 6246
  Description of Artificial Sequence: Synthetic polypeptide
  VH of XENP018753

SEQ ID NO: 8593 - protein, 107 aa, Artificial Sequence
  Description of Artificial Sequence: Synthetic polypeptide
  VL of XENP018753
SIVMTQSPATLSVSPGDRATLSCRASQSVSNDVAWYQQKPGQSPRLLINYASHRYTGVPDRFTGSGYGTEFTLTISSLQSEDFAVYFCQQDYSSPRTFGGGTKVEIK

SEQ ID NO: 8594 - protein, 5 aa, Artificial Sequence
  Description of Artificial Sequence: Synthetic peptide
  XENP018753 vhCDR1
NYWMN

SEQ ID NO: 8595 - protein, 19 aa, Artificial Sequence
  Description of Artificial Sequence: Synthetic peptide
  XENP018753 vhCDR2
EIRLKSNNYATHYAEPVKG

SEQ ID NO: 8596 - protein, 11 aa, Artificial Sequence
  Description of Artificial Sequence: Synthetic peptide
  XENP018753 vhCDR3
YYGNYGGYFDV

SEQ ID NO: 8597 - protein, 11 aa, Artificial Sequence
  Description of Artificial Sequence: Synthetic peptide
  XENP018753 vlCDR1
RASQSVSNDVA

SEQ ID NO: 8598 - protein, 7 aa, Artificial Sequence
  Description of Artificial Sequence: Synthetic peptide
  XENP018753 vlCDR2
YASHRYT

SEQ ID NO: 8599 - protein, 9 aa, Artificial Sequence
  Description of Artificial Sequence: Synthetic peptide
  XENP018753 vlCDR3
QQDYSSPRT

SEQ ID NO: 8600 - protein, 249 aa, Artificial Sequence
  Description of Artificial Sequence: Synthetic polypeptide
  XENP018754 1G6_H1_L1.12_scFv(GKPGS)4
EVQLVESGGGLVKPGGSLRLSCAASGFTFSNYWMNWVRQAPGKGLEWVGEIRLKSNNYATHYAEPVKGRFTISRDDSKSTVYLQMNSLKTEDTAVYYCTRYYGNYGGYFDVWGAGTLVTVSSGKPGSGKPGSGKPGSGKPGSSIVMTQSPATLSVSPGERVTLSCRASQSVSNDVAWYQQKPGQSPRLLINYASHRYTGVPDRFTGSGYGTEFTLTISSLQSEDFAVYFCQQDYSSPRTFGGGTKVEIK

SEQ ID NO: 8601 - protein, 122 aa, Artificial Sequence; identical to SEQ ID NO: 6246
  Description of Artificial Sequence: Synthetic polypeptide
  VH of XENP018754

SEQ ID NO: 8602 - protein, 107 aa, Artificial Sequence
  Description of Artificial Sequence: Synthetic polypeptide
  VL of XENP018754
SIVMTQSPATLSVSPGERVTLSCRASQSVSNDVAWYQQKPGQSPRLLINYASHRYTGVPDRFTGSGYGTEFTLTISSLQSEDFAVYFCQQDYSSPRTFGGGTKVEIK

SEQ ID NO: 8603 - protein, 5 aa, Artificial Sequence
  Description of Artificial Sequence: Synthetic peptide
  XENP018754 vhCDR1
NYWMN

SEQ ID NO: 8604 - protein, 19 aa, Artificial Sequence
  Description of Artificial Sequence: Synthetic peptide
  XENP018754 vhCDR2
EIRLKSNNYATHYAEPVKG

SEQ ID NO: 8605 - protein, 11 aa, Artificial Sequence
  Description of Artificial Sequence: Synthetic peptide
  XENP018754 vhCDR3
YYGNYGGYFDV

SEQ ID NO: 8606 - protein, 11 aa, Artificial Sequence
  Description of Artificial Sequence: Synthetic peptide
  XENP018754 vlCDR1
RASQSVSNDVA

SEQ ID NO: 8607 - protein, 7 aa, Artificial Sequence
  Description of Artificial Sequence: Synthetic peptide
  XENP018754 vlCDR2
YASHRYT

SEQ ID NO: 8608 - protein, 9 aa, Artificial Sequence
  Description of Artificial Sequence: Synthetic peptide
  XENP018754 vlCDR3
QQDYSSPRT

SEQ ID NO: 8609 - protein, 249 aa, Artificial Sequence
  Description of Artificial Sequence: Synthetic polypeptide
  XENP018755 1G6_H1_L1.13_scFv(GKPGS)4
EVQLVESGGGLVKPGGSLRLSCAASGFTFSNYWMNWVRQAPGKGLEWVGEIRLKSNNYATHYAEPVKGRFTISRDDSKSTVYLQMNSLKTEDTAVYYCTRYYGNYGGYFDVWGAGTLVTVSSGKPGSGKPGSGKPGSGKPGSSIVMTQSPATLSVSPGERATISCRASQSVSNDVAWYQQKPGQSPRLLINYASHRYTGVPDRFTGSGYGTEFTLTISSLQSEDFAVYFCQQDYSSPRTFGGGTKVEIK

SEQ ID NO: 8610 - protein, 122 aa, Artificial Sequence; identical to SEQ ID NO: 6246
  Description of Artificial Sequence: Synthetic polypeptide
  VH of XENP018755

SEQ ID NO: 8611 - protein, 107 aa, Artificial Sequence
  Description of Artificial Sequence: Synthetic polypeptide
  VL of XENP018755
SIVMTQSPATLSVSPGERATISCRASQSVSNDVAWYQQKPGQSPRLLINYASHRYTGVPDRFTGSGYGTEFTLTISSLQSEDFAVYFCQQDYSSPRTFGGGTKVEIK

SEQ ID NO: 8612 - protein, 5 aa, Artificial Sequence
  Description of Artificial Sequence: Synthetic peptide
  XENP018755 vhCDR1
NYWMN

SEQ ID NO: 8613 - protein, 19 aa, Artificial Sequence
  Description of Artificial Sequence: Synthetic peptide
  XENP018755 vhCDR2
EIRLKSNNYATHYAEPVKG

SEQ ID NO: 8614 - protein, 11 aa, Artificial Sequence
  Description of Artificial Sequence: Synthetic peptide
  XENP018755 vhCDR3
YYGNYGGYFDV

SEQ ID NO: 8615 - protein, 11 aa, Artificial Sequence
  Description of Artificial Sequence: Synthetic peptide
  XENP018755 vlCDR1
RASQSVSNDVA

SEQ ID NO: 8616 - protein, 7 aa, Artificial Sequence
  Description of Artificial Sequence: Synthetic peptide
  XENP018755 vlCDR2
YASHRYT

SEQ ID NO: 8617 - protein, 9 aa, Artificial Sequence
  Description of Artificial Sequence: Synthetic peptide
  XENP018755 vlCDR3
QQDYSSPRT

SEQ ID NO: 8618 - protein, 249 aa, Artificial Sequence
  Description of Artificial Sequence: Synthetic polypeptide
  XENP018756 1G6_H1_L1.14_scFv(GKPGS)4
EVQLVESGGGLVKPGGSLRLSCAASGFTFSNYWMNWVRQAPGKGLEWVGEIRLKSNNYATHYAEPVKGRFTISRDDSKSTVYLQMNSLKTEDTAVYYCTRYYGNYGGYFDVWGAGTLVTVSSGKPGSGKPGSGKPGSGKPGSSIVMTQSPATLSVSPGERATLTCRASQSVSNDVAWYQQKPGQSPRLLINYASHRYTGVPDRFTGSGYGTEFTLTISSLQSEDFAVYFCQQDYSSPRTFGGGTKVEIK

SEQ ID NO: 8619 - protein, 122 aa, Artificial Sequence; identical to SEQ ID NO: 6246
  Description of Artificial Sequence: Synthetic polypeptide
  VH of XENP018756

SEQ ID NO: 8620 - protein, 107 aa, Artificial Sequence
  Description of Artificial Sequence: Synthetic polypeptide
  VL of XENP018756
SIVMTQSPATLSVSPGERATLTCRASQSVSNDVAWYQQKPGQSPRLLINYASHRYTGVPDRFTGSGYGTEFTLTISSLQSEDFAVYFCQQDYSSPRTFGGGTKVEIK

SEQ ID NO: 8621 - protein, 5 aa, Artificial Sequence
  Description of Artificial Sequence: Synthetic peptide
  XENP018756 vhCDR1
NYWMN

SEQ ID NO: 8622 - protein, 19 aa, Artificial Sequence
  Description of Artificial Sequence: Synthetic peptide
  XENP018756 vhCDR2
EIRLKSNNYATHYAEPVKG

SEQ ID NO: 8623 - protein, 11 aa, Artificial Sequence
  Description of Artificial Sequence: Synthetic peptide
  XENP018756 vhCDR3
YYGNYGGYFDV

SEQ ID NO: 8624 - protein, 11 aa, Artificial Sequence
  Description of Artificial Sequence: Synthetic peptide
  XENP018756 vlCDR1
RASQSVSNDVA

SEQ ID NO: 8625 - protein, 7 aa, Artificial Sequence
  Description of Artificial Sequence: Synthetic peptide
  XENP018756 vlCDR2
YASHRYT

SEQ ID NO: 8626 - protein, 9 aa, Artificial Sequence
  Description of Artificial Sequence: Synthetic peptide
  XENP018756 vlCDR3
QQDYSSPRT

SEQ ID NO: 8627 - protein, 249 aa, Artificial Sequence
  Description of Artificial Sequence: Synthetic polypeptide
  XENP018757 1G6_H1_L1.15_scFv(GKPGS)4
EVQLVESGGGLVKPGGSLRLSCAASGFTFSNYWMNWVRQAPGKGLEWVGEIRLKSNNYATHYAEPVKGRFTISRDDSKSTVYLQMNSLKTEDTAVYYCTRYYGNYGGYFDVWGAGTLVTVSSGKPGSGKPGSGKPGSGKPGSSIVMTQSPATLSVSPGERATLSCKASQSVSNDVAWYQQKPGQSPRLLINYASHRYTGVPDRFTGSGYGTEFTLTISSLQSEDFAVYFCQQDYSSPRTFGGGTKVEIK

SEQ ID NO: 8628 - protein, 122 aa, Artificial Sequence; identical to SEQ ID NO: 6246
  Description of Artificial Sequence: Synthetic polypeptide
  VH of XENP018757

SEQ ID NO: 8629 - protein, 107 aa, Artificial Sequence
  Description of Artificial Sequence: Synthetic polypeptide
  VL of XENP018757
SIVMTQSPATLSVSPGERATLSCKASQSVSNDVAWYQQKPGQSPRLLINYASHRYTGVPDRFTGSGYGTEFTLTISSLQSEDFAVYFCQQDYSSPRTFGGGTKVEIK

SEQ ID NO: 8630 - protein, 5 aa, Artificial Sequence
  Description of Artificial Sequence: Synthetic peptide
  XENP018757 vhCDR1
NYWMN

SEQ ID NO: 8631 - protein, 19 aa, Artificial Sequence
  Description of Artificial Sequence: Synthetic peptide
  XENP018757 vhCDR2
EIRLKSNNYATHYAEPVKG

SEQ ID NO: 8632 - protein, 11 aa, Artificial Sequence
  Description of Artificial Sequence: Synthetic peptide
  XENP018757 vhCDR3
YYGNYGGYFDV

SEQ ID NO: 8633 - protein, 11 aa, Artificial Sequence
  Description of Artificial Sequence: Synthetic peptide
  XENP018757 vlCDR1
KASQSVSNDVA

SEQ ID NO: 8634 - protein, 7 aa, Artificial Sequence
  Description of Artificial Sequence: Synthetic peptide
  XENP018757 vlCDR2
YASHRYT

SEQ ID NO: 8635 - protein, 9 aa, Artificial Sequence
  Description of Artificial Sequence: Synthetic peptide
  XENP018757 vlCDR3
QQDYSSPRT

SEQ ID NO: 8636 - protein, 249 aa, Artificial Sequence
  Description of Artificial Sequence: Synthetic polypeptide
  XENP018758 1G6_H1_L1.16_scFv(GKPGS)4
EVQLVESGGGLVKPGGSLRLSCAASGFTFSNYWMNWVRQAPGKGLEWVGEIRLKSNNYATHYAEPVKGRFTISRDDSKSTVYLQMNSLKTEDTAVYYCTRYYGNYGGYFDVWGAGTLVTVSSGKPGSGKPGSGKPGSGKPGSSIVMTQSPATLSVSPGERATLSCRASQDVSNDVAWYQQKPGQSPRLLINYASHRYTGVPDRFTGSGYGTEFTLTISSLQSEDFAVYFCQQDYSSPRTFGGGTKVEIK

SEQ ID NO: 8637 - protein, 122 aa, Artificial Sequence; identical to SEQ ID NO: 6246
  Description of Artificial Sequence: Synthetic polypeptide
  VH of XENP018758

SEQ ID NO: 8638 - protein, 107 aa, Artificial Sequence
  Description of Artificial Sequence: Synthetic polypeptide
  VL of XENP018758
SIVMTQSPATLSVSPGERATLSCRASQDVSNDVAWYQQKPGQSPRLLINYASHRYTGVPDRFTGSGYGTEFTLTISSLQSEDFAVYFCQQDYSSPRTFGGGTKVEIK

SEQ ID NO: 8639 - protein, 5 aa, Artificial Sequence
  Description of Artificial Sequence: Synthetic peptide
  XENP018758 vhCDR1
NYWMN

SEQ ID NO: 8640 - protein, 19 aa, Artificial Sequence
  Description of Artificial Sequence: Synthetic peptide
  XENP018758 vhCDR2
EIRLKSNNYATHYAEPVKG

SEQ ID NO: 8641 - protein, 11 aa, Artificial Sequence
  Description of Artificial Sequence: Synthetic peptide
  XENP018758 vhCDR3
YYGNYGGYFDV

SEQ ID NO: 8642 - protein, 11 aa, Artificial Sequence
  Description of Artificial Sequence: Synthetic peptide
  XENP018758 vlCDR1
RASQDVSNDVA

SEQ ID NO: 8643 - protein, 7 aa, Artificial Sequence
  Description of Artificial Sequence: Synthetic peptide
  XENP018758 vlCDR2
YASHRYT

SEQ ID NO: 8644 - protein, 9 aa, Artificial Sequence
  Description of Artificial Sequence: Synthetic peptide
  XENP018758 vlCDR3
QQDYSSPRT

SEQ ID NO: 8645 - protein, 249 aa, Artificial Sequence
  Description of Artificial Sequence: Synthetic polypeptide
  XENP018759 1G6_H1_L1.17_scFv(GKPGS)4
EVQLVESGGGLVKPGGSLRLSCAASGFTFSNYWMNWVRQAPGKGLEWVGEIRLKSNNYATHYAEPVKGRFTISRDDSKSTVYLQMNSLKTEDTAVYYCTRYYGNYGGYFDVWGAGTLVTVSSGKPGSGKPGSGKPGSGKPGSSIVMTQSPATLSVSPGERATLSCRASQGVSNDVAWYQQKPGQSPRLLINYASHRYTGVPDRFTGSGYGTEFTLTISSLQSEDFAVYFCQQDYSSPRTFGGGTKVEIK

SEQ ID NO: 8646 - protein, 122 aa, Artificial Sequence; identical to SEQ ID NO: 6246
  Description of Artificial Sequence: Synthetic polypeptide
  VH of XENP018759

SEQ ID NO: 8647 - protein, 107 aa, Artificial Sequence
  Description of Artificial Sequence: Synthetic polypeptide
  VL of XENP018759
SIVMTQSPATLSVSPGERATLSCRASQGVSNDVAWYQQKPGQSPRLLINYASHRYTGVPDRFTGSGYGTEFTLTISSLQSEDFAVYFCQQDYSSPRTFGGGTKVEIK

SEQ ID NO: 8648 - protein, 5 aa, Artificial Sequence
  Description of Artificial Sequence: Synthetic peptide
  XENP018759 vhCDR1
NYWMN

SEQ ID NO: 8649 - protein, 19 aa, Artificial Sequence
  Description of Artificial Sequence: Synthetic peptide
  XENP018759 vhCDR2
EIRLKSNNYATHYAEPVKG

SEQ ID NO: 8650 - protein, 11 aa, Artificial Sequence
  Description of Artificial Sequence: Synthetic peptide
  XENP018759 vhCDR3
YYGNYGGYFDV

SEQ ID NO: 8651 - protein, 11 aa, Artificial Sequence
  Description of Artificial Sequence: Synthetic peptide
  XENP018759 vlCDR1
RASQGVSNDVA

SEQ ID NO: 8652 - protein, 7 aa, Artificial Sequence
  Description of Artificial Sequence: Synthetic peptide
  XENP018759 vlCDR2
YASHRYT

SEQ ID NO: 8653 - protein, 9 aa, Artificial Sequence
  Description of Artificial Sequence: Synthetic peptide
  XENP018759 vlCDR3
QQDYSSPRT

SEQ ID NO: 8654 - protein, 249 aa, Artificial Sequence
  Description of Artificial Sequence: Synthetic polypeptide
  XENP018760 1G6_H1_L1.18_scFv(GKPGS)4
EVQLVESGGGLVKPGGSLRLSCAASGFTFSNYWMNWVRQAPGKGLEWVGEIRLKSNNYATHYAEPVKGRFTISRDDSKSTVYLQMNSLKTEDTAVYYCTRYYGNYGGYFDVWGAGTLVTVSSGKPGSGKPGSGKPGSGKPGSSIVMTQSPATLSVSPGERATLSCRASQSISNDVAWYQQKPGQSPRLLINYASHRYTGVPDRFTGSGYGTEFTLTISSLQSEDFAVYFCQQDYSSPRTFGGGTKVEIK

SEQ ID NO: 8655 - protein, 122 aa, Artificial Sequence; identical to SEQ ID NO: 6246
  Description of Artificial Sequence: Synthetic polypeptide
  VH of XENP018760

SEQ ID NO: 8656 - protein, 107 aa, Artificial Sequence
  Description of Artificial Sequence: Synthetic polypeptide
  VL of XENP018760
SIVMTQSPATLSVSPGERATLSCRASQSISNDVAWYQQKPGQSPRLLINYASHRYTGVPDRFTGSGYGTEFTLTISSLQSEDFAVYFCQQDYSSPRTFGGGTKVEIK

SEQ ID NO: 8657 - protein, 5 aa, Artificial Sequence
  Description of Artificial Sequence: Synthetic peptide
  XENP018760 vhCDR1
NYWMN

SEQ ID NO: 8658 - protein, 19 aa, Artificial Sequence
  Description of Artificial Sequence: Synthetic peptide
  XENP018760 vhCDR2
EIRLKSNNYATHYAEPVKG

SEQ ID NO: 8659 - protein, 11 aa, Artificial Sequence
  Description of Artificial Sequence: Synthetic peptide
  XENP018760 vhCDR3
YYGNYGGYFDV

SEQ ID NO: 8660 - protein, 11 aa, Artificial Sequence
  Description of Artificial Sequence: Synthetic peptide
  XENP018760 vlCDR1
RASQSISNDVA

SEQ ID NO: 8661 - protein, 7 aa, Artificial Sequence
  Description of Artificial Sequence: Synthetic peptide
  XENP018760 vlCDR2
YASHRYT

SEQ ID NO: 8662 - protein, 9 aa, Artificial Sequence
  Description of Artificial Sequence: Synthetic peptide
  XENP018760 vlCDR3
QQDYSSPRT

SEQ ID NO: 8663 - protein, 249 aa, Artificial Sequence
  Description of Artificial Sequence: Synthetic polypeptide
  XENP018761 1G6_H1_L1.19_scFv(GKPGS)4
EVQLVESGGGLVKPGGSLRLSCAASGFTFSNYWMNWVRQAPGKGLEWVGEIRLKSNNYATHYAEPVKGRFTISRDDSKSTVYLQMNSLKTEDTAVYYCTRYYGNYGGYFDVWGAGTLVTVSSGKPGSGKPGSGKPGSGKPGSSIVMTQSPATLSVSPGERATLSCRASQSLSNDVAWYQQKPGQSPRLLINYASHRYTGVPDRFTGSGYGTEFTLTISSLQSEDFAVYFCQQDYSSPRTFGGGTKVEIK

SEQ ID NO: 8664 - protein, 122 aa, Artificial Sequence; identical to SEQ ID NO: 6246
  Description of Artificial Sequence: Synthetic polypeptide
  VH of XENP018761

SEQ ID NO: 8665 - protein, 107 aa, Artificial Sequence
  Description of Artificial Sequence: Synthetic polypeptide
  VL of XENP018761
SIVMTQSPATLSVSPGERATLSCRASQSLSNDVAWYQQKPGQSPRLLINYASHRYTGVPDRFTGSGYGTEFTLTISSLQSEDFAVYFCQQDYSSPRTFGGGTKVEIK

SEQ ID NO: 8666 - protein, 5 aa, Artificial Sequence
  Description of Artificial Sequence: Synthetic peptide
  XENP018761 vhCDR1
NYWMN

SEQ ID NO: 8667 - protein, 19 aa, Artificial Sequence
  Description of Artificial Sequence: Synthetic peptide
  XENP018761 vhCDR2
EIRLKSNNYATHYAEPVKG

SEQ ID NO: 8668 - protein, 11 aa, Artificial Sequence
  Description of Artificial Sequence: Synthetic peptide
  XENP018761 vhCDR3
YYGNYGGYFDV

SEQ ID NO: 8669 - protein, 11 aa, Artificial Sequence
  Description of Artificial Sequence: Synthetic peptide
  XENP018761 vlCDR1
RASQSLSNDVA

SEQ ID NO: 8670 - protein, 7 aa, Artificial Sequence
  Description of Artificial Sequence: Synthetic peptide
  XENP018761 vlCDR2
YASHRYT

SEQ ID NO: 8671 - protein, 9 aa, Artificial Sequence
  Description of Artificial Sequence: Synthetic peptide
  XENP018761 vlCDR3
QQDYSSPRT

SEQ ID NO: 8672 - protein, 249 aa, Artificial Sequence
  Description of Artificial Sequence: Synthetic polypeptide
  XENP018762 1G6_H1_L1.20_scFv(GKPGS)4
EVQLVESGGGLVKPGGSLRLSCAASGFTFSNYWMNWVRQAPGKGLEWVGEIRLKSNNYATHYAEPVKGRFTISRDDSKSTVYLQMNSLKTEDTAVYYCTRYYGNYGGYFDVWGAGTLVTVSSGKPGSGKPGSGKPGSGKPGSSIVMTQSPATLSVSPGERATLSCRASQSVTNDVAWYQQKPGQSPRLLINYASHRYTGVPDRFTGSGYGTEFTLTISSLQSEDFAVYFCQQDYSSPRTFGGGTKVEIK

SEQ ID NO: 8673 - protein, 122 aa, Artificial Sequence; identical to SEQ ID NO: 6246
  Description of Artificial Sequence: Synthetic polypeptide
  VH of XENP018762

SEQ ID NO: 8674 - protein, 107 aa, Artificial Sequence
  Description of Artificial Sequence: Synthetic polypeptide
  VL of XENP018762
SIVMTQSPATLSVSPGERATLSCRASQSVTNDVAWYQQKPGQSPRLLINYASHRYTGVPDRFTGSGYGTEFTLTISSLQSEDFAVYFCQQDYSSPRTFGGGTKVEIK

SEQ ID NO: 8675 - protein, 5 aa, Artificial Sequence
  Description of Artificial Sequence: Synthetic peptide
  XENP018762 vhCDR1
NYWMN

SEQ ID NO: 8676 - protein, 19 aa, Artificial Sequence
  Description of Artificial Sequence: Synthetic peptide
  XENP018762 vhCDR2
EIRLKSNNYATHYAEPVKG

SEQ ID NO: 8677 - protein, 11 aa, Artificial Sequence
  Description of Artificial Sequence: Synthetic peptide
  XENP018762 vhCDR3
YYGNYGGYFDV

SEQ ID NO: 8678 - protein, 11 aa, Artificial Sequence
  Description of Artificial Sequence: Synthetic peptide
  XENP018762 vlCDR1
RASQSVTNDVA

SEQ ID NO: 8679 - protein, 7 aa, Artificial Sequence
  Description of Artificial Sequence: Synthetic peptide
  XENP018762 vlCDR2
YASHRYT

SEQ ID NO: 8680 - protein, 9 aa, Artificial Sequence
  Description of Artificial Sequence: Synthetic peptide
  XENP018762 vlCDR3
QQDYSSPRT

SEQ ID NO: 8681 - protein, 249 aa, Artificial Sequence
  Description of Artificial Sequence: Synthetic polypeptide
  XENP018763 1G6_H1_L1.21_scFv(GKPGS)4
EVQLVESGGGLVKPGGSLRLSCAASGFTFSNYWMNWVRQAPGKGLEWVGEIRLKSNNYATHYAEPVKGRFTISRDDSKSTVYLQMNSLKTEDTAVYYCTRYYGNYGGYFDVWGAGTLVTVSSGKPGSGKPGSGKPGSGKPGSSIVMTQSPATLSVSPGERATLSCRASQSVANDVAWYQQKPGQSPRLLINYASHRYTGVPDRFTGSGYGTEFTLTISSLQSEDFAVYFCQQDYSSPRTFGGGTKVEIK

SEQ ID NO: 8682 - protein, 122 aa, Artificial Sequence; identical to SEQ ID NO: 6246
  Description of Artificial Sequence: Synthetic polypeptide
  VH of XENP018763

SEQ ID NO: 8683 - protein, 107 aa, Artificial Sequence
  Description of Artificial Sequence: Synthetic polypeptide
  VL of XENP018763
SIVMTQSPATLSVSPGERATLSCRASQSVANDVAWYQQKPGQSPRLLINYASHRYTGVPDRFTGSGYGTEFTLTISSLQSEDFAVYFCQQDYSSPRTFGGGTKVEIK

SEQ ID NO: 8684 - protein, 5 aa, Artificial Sequence
  Description of Artificial Sequence: Synthetic peptide
  XENP018763 vhCDR1
NYWMN

SEQ ID NO: 8685 - protein, 19 aa, Artificial Sequence
  Description of Artificial Sequence: Synthetic peptide
  XENP018763 vhCDR2
EIRLKSNNYATHYAEPVKG

SEQ ID NO: 8686 - protein, 11 aa, Artificial Sequence
  Description of Artificial Sequence: Synthetic peptide
  XENP018763 vhCDR3
YYGNYGGYFDV

SEQ ID NO: 8687 - protein, 11 aa, Artificial Sequence
  Description of Artificial Sequence: Synthetic peptide
  XENP018763 vlCDR1
RASQSVANDVA

SEQ ID NO: 8688 - protein, 7 aa, Artificial Sequence
  Description of Artificial Sequence: Synthetic peptide
  XENP018763 vlCDR2
YASHRYT

SEQ ID NO: 8689 - protein, 9 aa, Artificial Sequence
  Description of Artificial Sequence: Synthetic peptide
  XENP018763 vlCDR3
QQDYSSPRT

SEQ ID NO: 8690 - protein, 249 aa, Artificial Sequence
  Description of Artificial Sequence: Synthetic polypeptide
  XENP018764 1G6_H1_L1.22_scFv(GKPGS)4
EVQLVESGGGLVKPGGSLRLSCAASGFTFSNYWMNWVRQAPGKGLEWVGEIRLKSNNYATHYAEPVKGRFTISRDDSKSTVYLQMNSLKTEDTAVYYCTRYYGNYGGYFDVWGAGTLVTVSSGKPGSGKPGSGKPGSGKPGSSIVMTQSPATLSVSPGERATLSCRASQSVQNDVAWYQQKPGQSPRLLINYASHRYTGVPDRFTGSGYGTEFTLTISSLQSEDFAVYFCQQDYSSPRTFGGGTKVEIK

SEQ ID NO: 8691 - protein, 122 aa, Artificial Sequence; identical to SEQ ID NO: 6246
  Description of Artificial Sequence: Synthetic polypeptide
  VH of XENP018764

SEQ ID NO: 8692 - protein, 107 aa, Artificial Sequence
  Description of Artificial Sequence: Synthetic polypeptide
  VL of XENP018764
SIVMTQSPATLSVSPGERATLSCRASQSVQNDVAWYQQKPGQSPRLLINYASHRYTGVPDRFTGSGYGTEFTLTISSLQSEDFAVYFCQQDYSSPRTFGGGTKVEIK

SEQ ID NO: 8693 - protein, 5 aa, Artificial Sequence
  Description of Artificial Sequence: Synthetic peptide
  XENP018764 vhCDR1
NYWMN

SEQ ID NO: 8694 - protein, 19 aa, Artificial Sequence
  Description of Artificial Sequence: Synthetic peptide
  XENP018764 vhCDR2
EIRLKSNNYATHYAEPVKG

SEQ ID NO: 8695 - protein, 11 aa, Artificial Sequence
  Description of Artificial Sequence: Synthetic peptide
  XENP018764 vhCDR3
YYGNYGGYFDV

SEQ ID NO: 8696 - protein, 11 aa, Artificial Sequence
  Description of Artificial Sequence: Synthetic peptide
  XENP018764 vlCDR1
RASQSVQNDVA

SEQ ID NO: 8697 - protein, 7 aa, Artificial Sequence
  Description of Artificial Sequence: Synthetic peptide
  XENP018764 vlCDR2
YASHRYT

SEQ ID NO: 8698 - protein, 9 aa, Artificial Sequence
  Description of Artificial Sequence: Synthetic peptide
  XENP018764 vlCDR3
QQDYSSPRT

SEQ ID NO: 8699 - protein, 249 aa, Artificial Sequence
  Description of Artificial Sequence: Synthetic polypeptide
  XENP018765 1G6_H1_L1.23_scFv(GKPGS)4
EVQLVESGGGLVKPGGSLRLSCAASGFTFSNYWMNWVRQAPGKGLEWVGEIRLKSNNYATHYAEPVKGRFTISRDDSKSTVYLQMNSLKTEDTAVYYCTRYYGNYGGYFDVWGAGTLVTVSSGKPGSGKPGSGKPGSGKPGSSIVMTQSPATLSVSPGERATLSCRASQSVGNDVAWYQQKPGQSPRLLINYASHRYTGVPDRFTGSGYGTEFTLTISSLQSEDFAVYFCQQDYSSPRTFGGGTKVEIK

SEQ ID NO: 8700 - protein, 122 aa, Artificial Sequence; identical to SEQ ID NO: 6246
  Description of Artificial Sequence: Synthetic polypeptide
  VH of XENP018765

SEQ ID NO: 8701 - protein, 107 aa, Artificial Sequence
  Description of Artificial Sequence: Synthetic polypeptide
  VL of XENP018765
SIVMTQSPATLSVSPGERATLSCRASQSVGNDVAWYQQKPGQSPRLLINYASHRYTGVPDRFTGSGYGTEFTLTISSLQSEDFAVYFCQQDYSSPRTFGGGTKVEIK

SEQ ID NO: 8702 - protein, 5 aa, Artificial Sequence
  Description of Artificial Sequence: Synthetic peptide
  XENP018765 vhCDR1
NYWMN

SEQ ID NO: 8703 - protein, 19 aa, Artificial Sequence
  Description of Artificial Sequence: Synthetic peptide
  XENP018765 vhCDR2
EIRLKSNNYATHYAEPVKG

SEQ ID NO: 8704 - protein, 11 aa, Artificial Sequence
  Description of Artificial Sequence: Synthetic peptide
  XENP018765 vhCDR3
YYGNYGGYFDV

SEQ ID NO: 8705 - protein, 11 aa, Artificial Sequence
  Description of Artificial Sequence: Synthetic peptide
  XENP018765 vlCDR1
RASQSVGNDVA

SEQ ID NO: 8706 - protein, 7 aa, Artificial Sequence
  Description of Artificial Sequence: Synthetic peptide
  XENP018765 vlCDR2
YASHRYT

SEQ ID NO: 8707 - protein, 9 aa, Artificial Sequence
  Description of Artificial Sequence: Synthetic peptide
  XENP018765 vlCDR3
QQDYSSPRT

SEQ ID NO: 8708 - protein, 249 aa, Artificial Sequence
  Description of Artificial Sequence: Synthetic polypeptide
  XENP018766 1G6_H1_L1.24_scFv(GKPGS)4
EVQLVESGGGLVKPGGSLRLSCAASGFTFSNYWMNWVRQAPGKGLEWVGEIRLKSNNYATHYAEPVKGRFTISRDDSKSTVYLQMNSLKTEDTAVYYCTRYYGNYGGYFDVWGAGTLVTVSSGKPGSGKPGSGKPGSGKPGSSIVMTQSPATLSVSPGERATLSCRASQSVVNDVAWYQQKPGQSPRLLINYASHRYTGVPDRFTGSGYGTEFTLTISSLQSEDFAVYFCQQDYSSPRTFGGGTKVEIK

SEQ ID NO: 8709 - protein, 122 aa, Artificial Sequence; identical to SEQ ID NO: 6246
  Description of Artificial Sequence: Synthetic polypeptide
  VH of XENP018766

SEQ ID NO: 8710 - protein, 107 aa, Artificial Sequence
  Description of Artificial Sequence: Synthetic polypeptide
  VL of XENP018766
SIVMTQSPATLSVSPGERATLSCRASQSVVNDVAWYQQKPGQSPRLLINYASHRYTGVPDRFTGSGYGTEFTLTISSLQSEDFAVYFCQQDYSSPRTFGGGTKVEIK

SEQ ID NO: 8711 - protein, 5 aa, Artificial Sequence
  Description of Artificial Sequence: Synthetic peptide
  XENP018766 vhCDR1
NYWMN

SEQ ID NO: 8712 - protein, 19 aa, Artificial Sequence
  Description of Artificial Sequence: Synthetic peptide
  XENP018766 vhCDR2
EIRLKSNNYATHYAEPVKG

SEQ ID NO: 8713 - protein, 11 aa, Artificial Sequence
  Description of Artificial Sequence: Synthetic peptide
  XENP018766 vhCDR3
YYGNYGGYFDV

SEQ ID NO: 8714 - protein, 11 aa, Artificial Sequence
  Description of Artificial Sequence: Synthetic peptide
  XENP018766 vlCDR1
RASQSVVNDVA

SEQ ID NO: 8715 - protein, 7 aa, Artificial Sequence
  Description of Artificial Sequence: Synthetic peptide
  XENP018766 vlCDR2
YASHRYT

SEQ ID NO: 8716 - protein, 9 aa, Artificial Sequence
  Description of Artificial Sequence: Synthetic peptide
  XENP018766 vlCDR3
QQDYSSPRT

SEQ ID NO: 8717 - protein, 249 aa, Artificial Sequence
  Description of Artificial Sequence: Synthetic polypeptide
  XENP018767 1G6_H1_L1.25_scFv(GKPGS)4
EVQLVESGGGLVKPGGSLRLSCAASGFTFSNYWMNWVRQAPGKGLEWVGEIRLKSNNYATHYAEPVKGRFTISRDDSKSTVYLQMNSLKTEDTAVYYCTRYYGNYGGYFDVWGAGTLVTVSSGKPGSGKPGSGKPGSGKPGSSIVMTQSPATLSVSPGERATLSCRASQSVHNDVAWYQQKPGQSPRLLINYASHRYTGVPDRFTGSGYGTEFTLTISSLQSEDFAVYFCQQDYSSPRTFGGGTKVEIK

SEQ ID NO: 8718 - protein, 122 aa, Artificial Sequence; identical to SEQ ID NO: 6246
  Description of Artificial Sequence: Synthetic polypeptide
  VH of XENP018767

SEQ ID NO: 8719 - protein, 107 aa, Artificial Sequence
  Description of Artificial Sequence: Synthetic polypeptide
  VL of XENP018767
SIVMTQSPATLSVSPGERATLSCRASQSVHNDVAWYQQKPGQSPRLLINYASHRYTGVPDRFTGSGYGTEFTLTISSLQSEDFAVYFCQQDYSSPRTFGGGTKVEIK

SEQ ID NO: 8720 - protein, 5 aa, Artificial Sequence
  Description of Artificial Sequence: Synthetic peptide
  XENP018767 vhCDR1
NYWMN

SEQ ID NO: 8721 - protein, 19 aa, Artificial Sequence
  Description of Artificial Sequence: Synthetic peptide
  XENP018767 vhCDR2
EIRLKSNNYATHYAEPVKG

SEQ ID NO: 8722 - protein, 11 aa, Artificial Sequence
  Description of Artificial Sequence: Synthetic peptide
  XENP018767 vhCDR3
YYGNYGGYFDV

SEQ ID NO: 8723 - protein, 11 aa, Artificial Sequence
  Description of Artificial Sequence: Synthetic peptide
  XENP018767 vlCDR1
RASQSVHNDVA

SEQ ID NO: 8724 - protein, 7 aa, Artificial Sequence
  Description of Artificial Sequence: Synthetic peptide
  XENP018767 vlCDR2
YASHRYT

SEQ ID NO: 8725 - protein, 9 aa, Artificial Sequence
  Description of Artificial Sequence: Synthetic peptide
  XENP018767 vlCDR3
QQDYSSPRT

SEQ ID NO: 8726 - protein, 249 aa, Artificial Sequence
  Description of Artificial Sequence: Synthetic polypeptide
  XENP018768 1G6_H1_L1.26_scFv(GKPGS)4
EVQLVESGGGLVKPGGSLRLSCAASGFTFSNYWMNWVRQAPGKGLEWVGEIRLKSNNYATHYAEPVKGRFTISRDDSKSTVYLQMNSLKTEDTAVYYCTRYYGNYGGYFDVWGAGTLVTVSSGKPGSGKPGSGKPGSGKPGSSIVMTQSPATLSVSPGERATLSCRASQSVDNDVAWYQQKPGQSPRLLINYASHRYTGVPDRFTGSGYGTEFTLTISSLQSEDFAVYFCQQDYSSPRTFGGGTKVEIK

SEQ ID NO: 8727 - protein, 122 aa, Artificial Sequence; identical to SEQ ID NO: 6246
  Description of Artificial Sequence: Synthetic polypeptide
  VH of XENP018768

SEQ ID NO: 8728 - protein, 107 aa, Artificial Sequence
  Description of Artificial Sequence: Synthetic polypeptide
  VL of XENP018768
SIVMTQSPATLSVSPGERATLSCRASQSVDNDVAWYQQKPGQSPRLLINYASHRYTGVPDRFTGSGYGTEFTLTISSLQSEDFAVYFCQQDYSSPRTFGGGTKVEIK

SEQ ID NO: 8729 - protein, 5 aa, Artificial Sequence
  Description of Artificial Sequence: Synthetic peptide
  XENP018768 vhCDR1
NYWMN

SEQ ID NO: 8730 - protein, 19 aa, Artificial Sequence
  Description of Artificial Sequence: Synthetic peptide
  XENP018768 vhCDR2
EIRLKSNNYATHYAEPVKG

SEQ ID NO: 8731 - protein, 11 aa, Artificial Sequence
  Description of Artificial Sequence: Synthetic peptide
  XENP018768 vhCDR3
YYGNYGGYFDV

SEQ ID NO: 8732 - protein, 11 aa, Artificial Sequence
  Description of Artificial Sequence: Synthetic peptide
  XENP018768 vlCDR1
RASQSVDNDVA

SEQ ID NO: 8733 - protein, 7 aa, Artificial Sequence
  Description of Artificial Sequence: Synthetic peptide
  XENP018768 vlCDR2
YASHRYT

SEQ ID NO: 8734 - protein, 9 aa, Artificial Sequence
  Description of Artificial Sequence: Synthetic peptide
  XENP018768 vlCDR3
QQDYSSPRT

SEQ ID NO: 8735 - protein, 249 aa, Artificial Sequence
  Description of Artificial Sequence: Synthetic polypeptide
  XENP018769 1G6_H1_L1.27_scFv(GKPGS)4
EVQLVESGGGLVKPGGSLRLSCAASGFTFSNYWMNWVRQAPGKGLEWVGEIRLKSNNYATHYAEPVKGRFTISRDDSKSTVYLQMNSLKTEDTAVYYCTRYYGNYGGYFDVWGAGTLVTVSSGKPGSGKPGSGKPGSGKPGSSIVMTQSPATLSVSPGERATLSCRASQSVKNDVAWYQQKPGQSPRLLINYASHRYTGVPDRFTGSGYGTEFTLTISSLQSEDFAVYFCQQDYSSPRTFGGGTKVEIK

SEQ ID NO: 8736 - protein, 122 aa, Artificial Sequence; identical to SEQ ID NO: 6246
  Description of Artificial Sequence: Synthetic polypeptide
  VH of XENP018769

SEQ ID NO: 8737 - protein, 107 aa, Artificial Sequence
  Description of Artificial Sequence: Synthetic polypeptide
  VL of XENP018769
SIVMTQSPATLSVSPGERATLSCRASQSVKNDVAWYQQKPGQSPRLLINYASHRYTGVPDRFTGSGYGTEFTLTISSLQSEDFAVYFCQQDYSSPRTFGGGTKVEIK

SEQ ID NO: 8738 - protein, 5 aa, Artificial Sequence
  Description of Artificial Sequence: Synthetic peptide
  XENP018769 vhCDR1
NYWMN

SEQ ID NO: 8739 - protein, 19 aa, Artificial Sequence
  Description of Artificial Sequence: Synthetic peptide
  XENP018769 vhCDR2
EIRLKSNNYATHYAEPVKG

SEQ ID NO: 8740 - protein, 11 aa, Artificial Sequence
  Description of Artificial Sequence: Synthetic peptide
  XENP018769 vhCDR3
YYGNYGGYFDV

SEQ ID NO: 8741 - protein, 11 aa, Artificial Sequence
  Description of Artificial Sequence: Synthetic peptide
  XENP018769 vlCDR1
RASQSVKNDVA

SEQ ID NO: 8742 - protein, 7 aa, Artificial Sequence
  Description of Artificial Sequence: Synthetic peptide
  XENP018769 vlCDR2
YASHRYT

SEQ ID NO: 8743 - protein, 9 aa, Artificial Sequence
  Description of Artificial Sequence: Synthetic peptide
  XENP018769 vlCDR3
QQDYSSPRT

SEQ ID NO: 8744 - protein, 249 aa, Artificial Sequence
  Description of Artificial Sequence: Synthetic polypeptide
  XENP018770 1G6_H1_L1.28_scFv(GKPGS)4
EVQLVESGGGLVKPGGSLRLSCAASGFTFSNYWMNWVRQAPGKGLEWVGEIRLKSNNYATHYAEPVKGRFTISRDDSKSTVYLQMNSLKTEDTAVYYCTRYYGNYGGYFDVWGAGTLVTVSSGKPGSGKPGSGKPGSGKPGSSIVMTQSPATLSVSPGERATLSCRASQSVYNDVAWYQQKPGQSPRLLINYASHRYTGVPDRFTGSGYGTEFTLTISSLQSEDFAVYFCQQDYSSPRTFGGGTKVEIK

SEQ ID NO: 8745 - protein, 122 aa, Artificial Sequence; identical to SEQ ID NO: 6246
  Description of Artificial Sequence: Synthetic polypeptide
  VH of XENP018770

SEQ ID NO: 8746 - protein, 107 aa, Artificial Sequence
  Description of Artificial Sequence: Synthetic polypeptide
  VL of XENP018770
SIVMTQSPATLSVSPGERATLSCRASQSVYNDVAWYQQKPGQSPRLLINYASHRYTGVPDRFTGSGYGTEFTLTISSLQSEDFAVYFCQQDYSSPRTFGGGTKVEIK

SEQ ID NO: 8747 - protein, 5 aa, Artificial Sequence
  Description of Artificial Sequence: Synthetic peptide
  XENP018770 vhCDR1
NYWMN

SEQ ID NO: 8748 - protein, 19 aa, Artificial Sequence
  Description of Artificial Sequence: Synthetic peptide
  XENP018770 vhCDR2
EIRLKSNNYATHYAEPVKG

SEQ ID NO: 8749 - protein, 11 aa, Artificial Sequence
  Description of Artificial Sequence: Synthetic peptide
  XENP018770 vhCDR3
YYGNYGGYFDV

SEQ ID NO: 8750 - protein, 11 aa, Artificial Sequence
  Description of Artificial Sequence: Synthetic peptide
  XENP018770 vlCDR1
RASQSVYNDVA

SEQ ID NO: 8751 - protein, 7 aa, Artificial Sequence
  Description of Artificial Sequence: Synthetic peptide
  XENP018770 vlCDR2
YASHRYT

SEQ ID NO: 8752 - protein, 9 aa, Artificial Sequence
  Description of Artificial Sequence: Synthetic peptide
  XENP018770 vlCDR3
QQDYSSPRT

SEQ ID NO: 8753 - protein, 249 aa, Artificial Sequence
  Description of Artificial Sequence: Synthetic polypeptide
  XENP018771 1G6_H1_L1.29_scFv(GKPGS)4
EVQLVESGGGLVKPGGSLRLSCAASGFTFSNYWMNWVRQAPGKGLEWVGEIRLKSNNYATHYAEPVKGRFTISRDDSKSTVYLQMNSLKTEDTAVYYCTRYYGNYGGYFDVWGAGTLVTVSSGKPGSGKPGSGKPGSGKPGSSIVMTQSPATLSVSPGERATLSCRASQSVSDDVAWYQQKPGQSPRLLINYASHRYTGVPDRFTGSGYGTEFTLTISSLQSEDFAVYFCQQDYSSPRTFGGGTKVEIK

SEQ ID NO: 8754 - protein, 122 aa, Artificial Sequence; identical to SEQ ID NO: 6246
  Description of Artificial Sequence: Synthetic polypeptide
  VH of XENP018771

SEQ ID NO: 8755 - protein, 107 aa, Artificial Sequence
  Description of Artificial Sequence: Synthetic polypeptide
  VL of XENP018771
SIVMTQSPATLSVSPGERATLSCRASQSVSDDVAWYQQKPGQSPRLLINYASHRYTGVPDRFTGSGYGTEFTLTISSLQSEDFAVYFCQQDYSSPRTFGGGTKVEIK

SEQ ID NO: 8756 - protein, 5 aa, Artificial Sequence
  Description of Artificial Sequence: Synthetic peptide
  XENP018771 vhCDR1
NYWMN

SEQ ID NO: 8757 - protein, 19 aa, Artificial Sequence
  Description of Artificial Sequence: Synthetic peptide
  XENP018771 vhCDR2
EIRLKSNNYATHYAEPVKG

SEQ ID NO: 8758 - protein, 11 aa, Artificial Sequence
  Description of Artificial Sequence: Synthetic peptide
  XENP018771 vhCDR3
YYGNYGGYFDV

SEQ ID NO: 8759 - protein, 11 aa, Artificial Sequence
  Description of Artificial Sequence: Synthetic peptide
  XENP018771 vlCDR1
RASQSVSDDVA

SEQ ID NO: 8760 - protein, 7 aa, Artificial Sequence
  Description of Artificial Sequence: Synthetic peptide
  XENP018771 vlCDR2
YASHRYT

SEQ ID NO: 8761 - protein, 9 aa, Artificial Sequence
  Description of Artificial Sequence: Synthetic peptide
  XENP018771 vlCDR3
QQDYSSPRT

SEQ ID NO: 8762 - protein, 249 aa, Artificial Sequence
  Description of Artificial Sequence: Synthetic polypeptide
  XENP018772 1G6_H1_L1.30_scFv(GKPGS)4
EVQLVESGGGLVKPGGSLRLSCAASGFTFSNYWMNWVRQAPGKGLEWVGEIRLKSNNYATHYAEPVKGRFTISRDDSKSTVYLQMNSLKTEDTAVYYCTRYYGNYGGYFDVWGAGTLVTVSSGKPGSGKPGSGKPGSGKPGSSIVMTQSPATLSVSPGERATLSCRASQSVSHDVAWYQQKPGQSPRLLINYASHRYTGVPDRFTGSGYGTEFTLTISSLQSEDFAVYFCQQDYSSPRTFGGGTKVEIK

SEQ ID NO: 8763 - protein, 122 aa, Artificial Sequence; identical to SEQ ID NO: 6246
  Description of Artificial Sequence: Synthetic polypeptide
  VH of XENP018772

SEQ ID NO: 8764 - protein, 107 aa, Artificial Sequence
  Description of Artificial Sequence: Synthetic polypeptide
  VL of XENP018772
SIVMTQSPATLSVSPGERATLSCRASQSVSHDVAWYQQKPGQSPRLLINYASHRYTGVPDRFTGSGYGTEFTLTISSLQSEDFAVYFCQQDYSSPRTFGGGTKVEIK

SEQ ID NO: 8765 - protein, 5 aa, Artificial Sequence
  Description of Artificial Sequence: Synthetic peptide
  XENP018772 vhCDR1
NYWMN

SEQ ID NO: 8766 - protein, 19 aa, Artificial Sequence
  Description of Artificial Sequence: Synthetic peptide
  XENP018772 vhCDR2
EIRLKSNNYATHYAEPVKG

SEQ ID NO: 8767 - protein, 11 aa, Artificial Sequence
  Description of Artificial Sequence: Synthetic peptide
  XENP018772 vhCDR3
YYGNYGGYFDV

SEQ ID NO: 8768 - protein, 11 aa, Artificial Sequence
  Description of Artificial Sequence: Synthetic peptide
  XENP018772 vlCDR1
RASQSVSHDVA

SEQ ID NO: 8769 - protein, 7 aa, Artificial Sequence
  Description of Artificial Sequence: Synthetic peptide
  XENP018772 vlCDR2
YASHRYT

SEQ ID NO: 8770 - protein, 9 aa, Artificial Sequence
  Description of Artificial Sequence: Synthetic peptide
  XENP018772 vlCDR3
QQDYSSPRT

SEQ ID NO: 8771 - protein, 249 aa, Artificial Sequence
  Description of Artificial Sequence: Synthetic polypeptide
  XENP018773 1G6_H1_L1.31_scFv(GKPGS)4
EVQLVESGGGLVKPGGSLRLSCAASGFTFSNYWMNWVRQAPGKGLEWVGEIRLKSNNYATHYAEPVKGRFTISRDDSKSTVYLQMNSLKTEDTAVYYCTRYYGNYGGYFDVWGAGTLVTVSSGKPGSGKPGSGKPGSGKPGSSIVMTQSPATLSVSPGERATLSCRASQSVSEDVAWYQQKPGQSPRLLINYASHRYTGVPDRFTGSGYGTEFTLTISSLQSEDFAVYFCQQDYSSPRTFGGGTKVEIK

SEQ ID NO: 8772 - protein, 122 aa, Artificial Sequence; identical to SEQ ID NO: 6246
  Description of Artificial Sequence: Synthetic polypeptide
  VH of XENP018773

SEQ ID NO: 8773 - protein, 107 aa, Artificial Sequence
  Description of Artificial Sequence: Synthetic polypeptide
  VL of XENP018773
SIVMTQSPATLSVSPGERATLSCRASQSVSEDVAWYQQKPGQSPRLLINYASHRYTGVPDRFTGSGYGTEFTLTISSLQSEDFAVYFCQQDYSSPRTFGGGTKVEIK

SEQ ID NO: 8774 - protein, 5 aa, Artificial Sequence
  Description of Artificial Sequence: Synthetic peptide
  XENP018773 vhCDR1
NYWMN

SEQ ID NO: 8775 - protein, 19 aa, Artificial Sequence
  Description of Artificial Sequence: Synthetic peptide
  XENP018773 vhCDR2
EIRLKSNNYATHYAEPVKG

SEQ ID NO: 8776 - protein, 11 aa, Artificial Sequence
  Description of Artificial Sequence: Synthetic peptide
  XENP018773 vhCDR3
YYGNYGGYFDV

SEQ ID NO: 8777 - protein, 11 aa, Artificial Sequence
  Description of Artificial Sequence: Synthetic peptide
  XENP018773 vlCDR1
RASQSVSEDVA

SEQ ID NO: 8778 - protein, 7 aa, Artificial Sequence
  Description of Artificial Sequence: Synthetic peptide
  XENP018773 vlCDR2
YASHRYT

SEQ ID NO: 8779 - protein, 9 aa, Artificial Sequence
  Description of Artificial Sequence: Synthetic peptide
  XENP018773 vlCDR3
QQDYSSPRT

SEQ ID NO: 8780 - protein, 249 aa, Artificial Sequence
  Description of Artificial Sequence: Synthetic polypeptide
  XENP018774 1G6_H1_L1.32_scFv(GKPGS)4
EVQLVESGGGLVKPGGSLRLSCAASGFTFSNYWMNWVRQAPGKGLEWVGEIRLKSNNYATHYAEPVKGRFTISRDDSKSTVYLQMNSLKTEDTAVYYCTRYYGNYGGYFDVWGAGTLVTVSSGKPGSGKPGSGKPGSGKPGSSIVMTQSPATLSVSPGERATLSCRASQSVSSDVAWYQQKPGQSPRLLINYASHRYTGVPDRFTGSGYGTEFTLTISSLQSEDFAVYFCQQDYSSPRTFGGGTKVEIK

SEQ ID NO: 8781 - protein, 122 aa, Artificial Sequence; identical to SEQ ID NO: 6246
  Description of Artificial Sequence: Synthetic polypeptide
  VH of XENP018774

SEQ ID NO: 8782 - protein, 107 aa, Artificial Sequence
  Description of Artificial Sequence: Synthetic polypeptide
  VL of XENP018774
SIVMTQSPATLSVSPGERATLSCRASQSVSSDVAWYQQKPGQSPRLLINYASHRYTGVPDRFTGSGYGTEFTLTISSLQSEDFAVYFCQQDYSSPRTFGGGTKVEIK

SEQ ID NO: 8783 - protein, 5 aa, Artificial Sequence
  Description of Artificial Sequence: Synthetic peptide
  XENP018774 vhCDR1
NYWMN

SEQ ID NO: 8784 - protein, 19 aa, Artificial Sequence
  Description of Artificial Sequence: Synthetic peptide
  XENP018774 vhCDR2
EIRLKSNNYATHYAEPVKG

SEQ ID NO: 8785 - protein, 11 aa, Artificial Sequence
  Description of Artificial Sequence: Synthetic peptide
  XENP018774 vhCDR3
YYGNYGGYFDV

SEQ ID NO: 8786 - protein, 11 aa, Artificial Sequence
  Description of Artificial Sequence: Synthetic peptide
  XENP018774 vlCDR1
RASQSVSSDVA

SEQ ID NO: 8787 - protein, 7 aa, Artificial Sequence
  Description of Artificial Sequence: Synthetic peptide
  XENP018774 vlCDR2
YASHRYT

SEQ ID NO: 8788 - protein, 9 aa, Artificial Sequence
  Description of Artificial Sequence: Synthetic peptide
  XENP018774 vlCDR3
QQDYSSPRT

SEQ ID NO: 8789 - protein, 249 aa, Artificial Sequence
  Description of Artificial Sequence: Synthetic polypeptide
  XENP018775 1G6_H1_L1.33_scFv(GKPGS)4
EVQLVESGGGLVKPGGSLRLSCAASGFTFSNYWMNWVRQAPGKGLEWVGEIRLKSNNYATHYAEPVKGRFTISRDDSKSTVYLQMNSLKTEDTAVYYCTRYYGNYGGYFDVWGAGTLVTVSSGKPGSGKPGSGKPGSGKPGSSIVMTQSPATLSVSPGERATLSCRASQSVSRDVAWYQQKPGQSPRLLINYASHRYTGVPDRFTGSGYGTEFTLTISSLQSEDFAVYFCQQDYSSPRTFGGGTKVEIK

SEQ ID NO: 8790 - protein, 122 aa, Artificial Sequence; identical to SEQ ID NO: 6246
  Description of Artificial Sequence: Synthetic polypeptide
  VH of XENP018775

SEQ ID NO: 8791 - protein, 107 aa, Artificial Sequence
  Description of Artificial Sequence: Synthetic polypeptide
  VL of XENP018775
SIVMTQSPATLSVSPGERATLSCRASQSVSRDVAWYQQKPGQSPRLLINYASHRYTGVPDRFTGSGYGTEFTLTISSLQSEDFAVYFCQQDYSSPRTFGGGTKVEIK

SEQ ID NO: 8792 - protein, 5 aa, Artificial Sequence
  Description of Artificial Sequence: Synthetic peptide
  XENP018775 vhCDR1
NYWMN

SEQ ID NO: 8793 - protein, 19 aa, Artificial Sequence
  Description of Artificial Sequence: Synthetic peptide
  XENP018775 vhCDR2
EIRLKSNNYATHYAEPVKG

SEQ ID NO: 8794 - protein, 11 aa, Artificial Sequence
  Description of Artificial Sequence: Synthetic peptide
  XENP018775 vhCDR3
YYGNYGGYFDV

SEQ ID NO: 8795 - protein, 11 aa, Artificial Sequence
  Description of Artificial Sequence: Synthetic peptide
  XENP018775 vlCDR1
RASQSVSRDVA

SEQ ID NO: 8796 - protein, 7 aa, Artificial Sequence
  Description of Artificial Sequence: Synthetic peptide
  XENP018775 vlCDR2
YASHRYT

SEQ ID NO: 8797 - protein, 9 aa, Artificial Sequence
  Description of Artificial Sequence: Synthetic peptide
  XENP018775 vlCDR3
QQDYSSPRT

SEQ ID NO: 8798 - protein, 249 aa, Artificial Sequence
  Description of Artificial Sequence: Synthetic polypeptide
  XENP018776 1G6_H1_L1.34_scFv(GKPGS)4
EVQLVESGGGLVKPGGSLRLSCAASGFTFSNYWMNWVRQAPGKGLEWVGEIRLKSNNYATHYAEPVKGRFTISRDDSKSTVYLQMNSLKTEDTAVYYCTRYYGNYGGYFDVWGAGTLVTVSSGKPGSGKPGSGKPGSGKPGSSIVMTQSPATLSVSPGERATLSCRASQSVSLDVAWYQQKPGQSPRLLINYASHRYTGVPDRFTGSGYGTEFTLTISSLQSEDFAVYFCQQDYSSPRTFGGGTKVEIK

SEQ ID NO: 8799 - protein, 122 aa, Artificial Sequence; identical to SEQ ID NO: 6246
  Description of Artificial Sequence: Synthetic polypeptide
  VH of XENP018776

SEQ ID NO: 8800 - protein, 107 aa, Artificial Sequence
  Description of Artificial Sequence: Synthetic polypeptide
  VL of XENP018776
SIVMTQSPATLSVSPGERATLSCRASQSVSLDVAWYQQKPGQSPRLLINYASHRYTGVPDRFTGSGYGTEFTLTISSLQSEDFAVYFCQQDYSSPRTFGGGTKVEIK

SEQ ID NO: 8801 - protein, 5 aa, Artificial Sequence
  Description of Artificial Sequence: Synthetic peptide
  XENP018776 vhCDR1
NYWMN

SEQ ID NO: 8802 - protein, 19 aa, Artificial Sequence
  Description of Artificial Sequence: Synthetic peptide
  XENP018776 vhCDR2
EIRLKSNNYATHYAEPVKG

SEQ ID NO: 8803 - protein, 11 aa, Artificial Sequence
  Description of Artificial Sequence: Synthetic peptide
  XENP018776 vhCDR3
YYGNYGGYFDV

SEQ ID NO: 8804 - protein, 11 aa, Artificial Sequence
  Description of Artificial Sequence: Synthetic peptide
  XENP018776 vlCDR1
RASQSVSLDVA

SEQ ID NO: 8805 - protein, 7 aa, Artificial Sequence
  Description of Artificial Sequence: Synthetic peptide
  XENP018776 vlCDR2
YASHRYT

SEQ ID NO: 8806 - protein, 9 aa, Artificial Sequence
  Description of Artificial Sequence: Synthetic peptide
  XENP018776 vlCDR3
QQDYSSPRT

SEQ ID NO: 8807 - protein, 249 aa, Artificial Sequence
  Description of Artificial Sequence: Synthetic polypeptide
  XENP018777 1G6_H1_L1.35_scFv(GKPGS)4
EVQLVESGGGLVKPGGSLRLSCAASGFTFSNYWMNWVRQAPGKGLEWVGEIRLKSNNYATHYAEPVKGRFTISRDDSKSTVYLQMNSLKTEDTAVYYCTRYYGNYGGYFDVWGAGTLVTVSSGKPGSGKPGSGKPGSGKPGSSIVMTQSPATLSVSPGERATLSCRASQSVSTDVAWYQQKPGQSPRLLINYASHRYTGVPDRFTGSGYGTEFTLTISSLQSEDFAVYFCQQDYSSPRTFGGGTKVEIK

SEQ ID NO: 8808 - protein, 122 aa, Artificial Sequence; identical to SEQ ID NO: 6246
  Description of Artificial Sequence: Synthetic polypeptide
  VH of XENP018777

SEQ ID NO: 8809 - protein, 107 aa, Artificial Sequence
  Description of Artificial Sequence: Synthetic polypeptide
  VL of XENP018777
SIVMTQSPATLSVSPGERATLSCRASQSVSTDVAWYQQKPGQSPRLLINYASHRYTGVPDRFTGSGYGTEFTLTISSLQSEDFAVYFCQQDYSSPRTFGGGTKVEIK

SEQ ID NO: 8810 - protein, 5 aa, Artificial Sequence
  Description of Artificial Sequence: Synthetic peptide
  XENP018777 vhCDR1
NYWMN

SEQ ID NO: 8811 - protein, 19 aa, Artificial Sequence
  Description of Artificial Sequence: Synthetic peptide
  XENP018777 vhCDR2
EIRLKSNNYATHYAEPVKG

SEQ ID NO: 8812 - protein, 11 aa, Artificial Sequence
  Description of Artificial Sequence: Synthetic peptide
  XENP018777 vhCDR3
YYGNYGGYFDV

SEQ ID NO: 8813 - protein, 11 aa, Artificial Sequence
  Description of Artificial Sequence: Synthetic peptide
  XENP018777 vlCDR1
RASQSVSTDVA

SEQ ID NO: 8814 - protein, 7 aa, Artificial Sequence
  Description of Artificial Sequence: Synthetic peptide
  XENP018777 vlCDR2
YASHRYT

SEQ ID NO: 8815 - protein, 9 aa, Artificial Sequence
  Description of Artificial Sequence: Synthetic peptide
  XENP018777 vlCDR3
QQDYSSPRT

SEQ ID NO: 8816 - protein, 249 aa, Artificial Sequence
  Description of Artificial Sequence: Synthetic polypeptide
  XENP018778 1G6_H1_L1.36_scFv(GKPGS)4
EVQLVESGGGLVKPGGSLRLSCAASGFTFSNYWMNWVRQAPGKGLEWVGEIRLKSNNYATHYAEPVKGRFTISRDDSKSTVYLQMNSLKTEDTAVYYCTRYYGNYGGYFDVWGAGTLVTVSSGKPGSGKPGSGKPGSGKPGSSIVMTQSPATLSVSPGERATLSCRASQSVSGDVAWYQQKPGQSPRLLINYASHRYTGVPDRFTGSGYGTEFTLTISSLQSEDFAVYFCQQDYSSPRTFGGGTKVEIK

SEQ ID NO: 8817 - protein, 122 aa, Artificial Sequence; identical to SEQ ID NO: 6246
  Description of Artificial Sequence: Synthetic polypeptide
  VH of XENP018778

SEQ ID NO: 8818 - protein, 107 aa, Artificial Sequence
  Description of Artificial Sequence: Synthetic polypeptide
  VL of XENP018778
SIVMTQSPATLSVSPGERATLSCRASQSVSGDVAWYQQKPGQSPRLLINYASHRYTGVPDRFTGSGYGTEFTLTISSLQSEDFAVYFCQQDYSSPRTFGGGTKVEIK

SEQ ID NO: 8819 - protein, 5 aa, Artificial Sequence
  Description of Artificial Sequence: Synthetic peptide
  XENP018778 vhCDR1
NYWMN

SEQ ID NO: 8820 - protein, 19 aa, Artificial Sequence
  Description of Artificial Sequence: Synthetic peptide
  XENP018778 vhCDR2
EIRLKSNNYATHYAEPVKG

SEQ ID NO: 8821 - protein, 11 aa, Artificial Sequence
  Description of Artificial Sequence: Synthetic peptide
  XENP018778 vhCDR3
YYGNYGGYFDV

SEQ ID NO: 8822 - protein, 11 aa, Artificial Sequence
  Description of Artificial Sequence: Synthetic peptide
  XENP018778 vlCDR1
RASQSVSGDVA

SEQ ID NO: 8823 - protein, 7 aa, Artificial Sequence
  Description of Artificial Sequence: Synthetic peptide
  XENP018778 vlCDR2
YASHRYT

SEQ ID NO: 8824 - protein, 9 aa, Artificial Sequence
  Description of Artificial Sequence: Synthetic peptide
  XENP018778 vlCDR3
QQDYSSPRT

SEQ ID NO: 8825 - protein, 249 aa, Artificial Sequence
  Description of Artificial Sequence: Synthetic polypeptide
  XENP018779 1G6_H1_L1.37_scFv(GKPGS)4
EVQLVESGGGLVKPGGSLRLSCAASGFTFSNYWMNWVRQAPGKGLEWVGEIRLKSNNYATHYAEPVKGRFTISRDDSKSTVYLQMNSLKTEDTAVYYCTRYYGNYGGYFDVWGAGTLVTVSSGKPGSGKPGSGKPGSGKPGSSIVMTQSPATLSVSPGERATLSCRASQSVSYDVAWYQQKPGQSPRLLINYASHRYTGVPDRFTGSGYGTEFTLTISSLQSEDFAVYFCQQDYSSPRTFGGGTKVEIK

SEQ ID NO: 8826 - protein, 122 aa, Artificial Sequence; identical to SEQ ID NO: 6246
  Description of Artificial Sequence: Synthetic polypeptide
  VH of XENP018779

SEQ ID NO: 8827 - protein, 107 aa, Artificial Sequence
  Description of Artificial Sequence: Synthetic polypeptide
  VL of XENP018779
SIVMTQSPATLSVSPGERATLSCRASQSVSYDVAWYQQKPGQSPRLLINYASHRYTGVPDRFTGSGYGTEFTLTISSLQSEDFAVYFCQQDYSSPRTFGGGTKVEIK

SEQ ID NO: 8828 - protein, 5 aa, Artificial Sequence
  Description of Artificial Sequence: Synthetic peptide
  XENP018779 vhCDR1
NYWMN

SEQ ID NO: 8829 - protein, 19 aa, Artificial Sequence
  Description of Artificial Sequence: Synthetic peptide
  XENP018779 vhCDR2
EIRLKSNNYATHYAEPVKG

SEQ ID NO: 8830 - protein, 11 aa, Artificial Sequence
  Description of Artificial Sequence: Synthetic peptide
  XENP018779 vhCDR3
YYGNYGGYFDV

SEQ ID NO: 8831 - protein, 11 aa, Artificial Sequence
  Description of Artificial Sequence: Synthetic peptide
  XENP018779 vlCDR1
RASQSVSYDVA

SEQ ID NO: 8832 - protein, 7 aa, Artificial Sequence
  Description of Artificial Sequence: Synthetic peptide
  XENP018779 vlCDR2
YASHRYT

SEQ ID NO: 8833 - protein, 9 aa, Artificial Sequence
  Description of Artificial Sequence: Synthetic peptide
  XENP018779 vlCDR3
QQDYSSPRT

SEQ ID NO: 8834 - protein, 249 aa, Artificial Sequence
  Description of Artificial Sequence: Synthetic polypeptide
  XENP018780 1G6_H1_L1.38_scFv(GKPGS)4
EVQLVESGGGLVKPGGSLRLSCAASGFTFSNYWMNWVRQAPGKGLEWVGEIRLKSNNYATHYAEPVKGRFTISRDDSKSTVYLQMNSLKTEDTAVYYCTRYYGNYGGYFDVWGAGTLVTVSSGKPGSGKPGSGKPGSGKPGSSIVMTQSPATLSVSPGERATLSCRASQSVSNNVAWYQQKPGQSPRLLINYASHRYTGVPDRFTGSGYGTEFTLTISSLQSEDFAVYFCQQDYSSPRTFGGGTKVEIK

SEQ ID NO: 8835 - protein, 122 aa, Artificial Sequence; identical to SEQ ID NO: 6246
  Description of Artificial Sequence: Synthetic polypeptide
  VH of XENP018780

SEQ ID NO: 8836 - protein, 107 aa, Artificial Sequence
  Description of Artificial Sequence: Synthetic polypeptide
  VL of XENP018780
SIVMTQSPATLSVSPGERATLSCRASQSVSNNVAWYQQKPGQSPRLLINYASHRYTGVPDRFTGSGYGTEFTLTISSLQSEDFAVYFCQQDYSSPRTFGGGTKVEIK

SEQ ID NO: 8837 - protein, 5 aa, Artificial Sequence
  Description of Artificial Sequence: Synthetic peptide
  XENP018780 vhCDR1
NYWMN

SEQ ID NO: 8838 - protein, 19 aa, Artificial Sequence
  Description of Artificial Sequence: Synthetic peptide
  XENP018780 vhCDR2
EIRLKSNNYATHYAEPVKG

SEQ ID NO: 8839 - protein, 11 aa, Artificial Sequence
  Description of Artificial Sequence: Synthetic peptide
  XENP018780 vhCDR3
YYGNYGGYFDV

SEQ ID NO: 8840 - protein, 11 aa, Artificial Sequence
  Description of Artificial Sequence: Synthetic peptide
  XENP018780 vlCDR1
RASQSVSNNVA

SEQ ID NO: 8841 - protein, 7 aa, Artificial Sequence
  Description of Artificial Sequence: Synthetic peptide
  XENP018780 vlCDR2
YASHRYT

SEQ ID NO: 8842 - protein, 9 aa, Artificial Sequence
  Description of Artificial Sequence: Synthetic peptide
  XENP018780 vlCDR3
QQDYSSPRT

SEQ ID NO: 8843 - protein, 249 aa, Artificial Sequence
  Description of Artificial Sequence: Synthetic polypeptide
  XENP018781 1G6_H1_L1.39_scFv(GKPGS)4
EVQLVESGGGLVKPGGSLRLSCAASGFTFSNYWMNWVRQAPGKGLEWVGEIRLKSNNYATHYAEPVKGRFTISRDDSKSTVYLQMNSLKTEDTAVYYCTRYYGNYGGYFDVWGAGTLVTVSSGKPGSGKPGSGKPGSGKPGSSIVMTQSPATLSVSPGERATLSCRASQSVSNEVAWYQQKPGQSPRLLINYASHRYTGVPDRFTGSGYGTEFTLTISSLQSEDFAVYFCQQDYSSPRTFGGGTKVEIK

SEQ ID NO: 8844 - protein, 122 aa, Artificial Sequence; identical to SEQ ID NO: 6246
  Description of Artificial Sequence: Synthetic polypeptide
  VH of XENP018781

SEQ ID NO: 8845 - protein, 107 aa, Artificial Sequence
  Description of Artificial Sequence: Synthetic polypeptide
  VL of XENP018781
SIVMTQSPATLSVSPGERATLSCRASQSVSNEVAWYQQKPGQSPRLLINYASHRYTGVPDRFTGSGYGTEFTLTISSLQSEDFAVYFCQQDYSSPRTFGGGTKVEIK

SEQ ID NO: 8846 - protein, 5 aa, Artificial Sequence
  Description of Artificial Sequence: Synthetic peptide
  XENP018781 vhCDR1
NYWMN

SEQ ID NO: 8847 - protein, 19 aa, Artificial Sequence
  Description of Artificial Sequence: Synthetic peptide
  XENP018781 vhCDR2
EIRLKSNNYATHYAEPVKG

SEQ ID NO: 8848 - protein, 11 aa, Artificial Sequence
  Description of Artificial Sequence: Synthetic peptide
  XENP018781 vhCDR3
YYGNYGGYFDV

SEQ ID NO: 8849 - protein, 11 aa, Artificial Sequence
  Description of Artificial Sequence: Synthetic peptide
  XENP018781 vlCDR1
RASQSVSNEVA

SEQ ID NO: 8850 - protein, 7 aa, Artificial Sequence
  Description of Artificial Sequence: Synthetic peptide
  XENP018781 vlCDR2
YASHRYT

SEQ ID NO: 8851 - protein, 9 aa, Artificial Sequence
  Description of Artificial Sequence: Synthetic peptide
  XENP018781 vlCDR3
QQDYSSPRT

SEQ ID NO: 8852 - protein, 249 aa, Artificial Sequence
  Description of Artificial Sequence: Synthetic polypeptide
  XENP018782 1G6_H1_L1.40_scFv(GKPGS)4
EVQLVESGGGLVKPGGSLRLSCAASGFTFSNYWMNWVRQAPGKGLEWVGEIRLKSNNYATHYAEPVKGRFTISRDDSKSTVYLQMNSLKTEDTAVYYCTRYYGNYGGYFDVWGAGTLVTVSSGKPGSGKPGSGKPGSGKPGSSIVMTQSPATLSVSPGERATLSCRASQSVSNHVAWYQQKPGQSPRLLINYASHRYTGVPDRFTGSGYGTEFTLTISSLQSEDFAVYFCQQDYSSPRTFGGGTKVEIK

SEQ ID NO: 8853 - protein, 122 aa, Artificial Sequence; identical to SEQ ID NO: 6246
  Description of Artificial Sequence: Synthetic polypeptide
  VH of XENP018782

SEQ ID NO: 8854 - protein, 107 aa, Artificial Sequence
  Description of Artificial Sequence: Synthetic polypeptide
  VL of XENP018782
SIVMTQSPATLSVSPGERATLSCRASQSVSNHVAWYQQKPGQSPRLLINYASHRYTGVPDRFTGSGYGTEFTLTISSLQSEDFAVYFCQQDYSSPRTFGGGTKVEIK

SEQ ID NO: 8855 - protein, 5 aa, Artificial Sequence
  Description of Artificial Sequence: Synthetic peptide
  XENP018782 vhCDR1
NYWMN

SEQ ID NO: 8856 - protein, 19 aa, Artificial Sequence
  Description of Artificial Sequence: Synthetic peptide
  XENP018782 vhCDR2
EIRLKSNNYATHYAEPVKG

SEQ ID NO: 8857 - protein, 11 aa, Artificial Sequence
  Description of Artificial Sequence: Synthetic peptide
  XENP018782 vhCDR3
YYGNYGGYFDV

SEQ ID NO: 8858 - protein, 11 aa, Artificial Sequence
  Description of Artificial Sequence: Synthetic peptide
  XENP018782 vlCDR1
RASQSVSNHVA

SEQ ID NO: 8859 - protein, 7 aa, Artificial Sequence
  Description of Artificial Sequence: Synthetic peptide
  XENP018782 vlCDR2
YASHRYT

SEQ ID NO: 8860 - protein, 9 aa, Artificial Sequence
  Description of Artificial Sequence: Synthetic peptide
  XENP018782 vlCDR3
QQDYSSPRT

SEQ ID NO: 8861 - protein, 249 aa, Artificial Sequence
  Description of Artificial Sequence: Synthetic polypeptide
  XENP018783 1G6_H1_L1.41_scFv(GKPGS)4
EVQLVESGGGLVKPGGSLRLSCAASGFTFSNYWMNWVRQAPGKGLEWVGEIRLKSNNYATHYAEPVKGRFTISRDDSKSTVYLQMNSLKTEDTAVYYCTRYYGNYGGYFDVWGAGTLVTVSSGKPGSGKPGSGKPGSGKPGSSIVMTQSPATLSVSPGERATLSCRASQSVSNSVAWYQQKPGQSPRLLINYASHRYTGVPDRFTGSGYGTEFTLTISSLQSEDFAVYFCQQDYSSPRTFGGGTKVEIK

SEQ ID NO: 8862 - protein, 122 aa, Artificial Sequence; identical to SEQ ID NO: 6246
  Description of Artificial Sequence: Synthetic polypeptide
  VH of XENP018783

SEQ ID NO: 8863 - protein, 107 aa, Artificial Sequence
  Description of Artificial Sequence: Synthetic polypeptide
  VL of XENP018783
SIVMTQSPATLSVSPGERATLSCRASQSVSNSVAWYQQKPGQSPRLLINYASHRYTGVPDRFTGSGYGTEFTLTISSLQSEDFAVYFCQQDYSSPRTFGGGTKVEIK

SEQ ID NO: 8864 - protein, 5 aa, Artificial Sequence
  Description of Artificial Sequence: Synthetic peptide
  XENP018783 vhCDR1
NYWMN

SEQ ID NO: 8865 - protein, 19 aa, Artificial Sequence
  Description of Artificial Sequence: Synthetic peptide
  XENP018783 vhCDR2
EIRLKSNNYATHYAEPVKG

SEQ ID NO: 8866 - protein, 11 aa, Artificial Sequence
  Description of Artificial Sequence: Synthetic peptide
  XENP018783 vhCDR3
YYGNYGGYFDV

SEQ ID NO: 8867 - protein, 11 aa, Artificial Sequence
  Description of Artificial Sequence: Synthetic peptide
  XENP018783 vlCDR1
RASQSVSNSVA

SEQ ID NO: 8868 - protein, 7 aa, Artificial Sequence
  Description of Artificial Sequence: Synthetic peptide
  XENP018783 vlCDR2
YASHRYT

SEQ ID NO: 8869 - protein, 9 aa, Artificial Sequence
  Description of Artificial Sequence: Synthetic peptide
  XENP018783 vlCDR3
QQDYSSPRT

SEQ ID NO: 8870 - protein, 249 aa, Artificial Sequence
  Description of Artificial Sequence: Synthetic polypeptide
  XENP018784 1G6_H1_L1.42_scFv(GKPGS)4
EVQLVESGGGLVKPGGSLRLSCAASGFTFSNYWMNWVRQAPGKGLEWVGEIRLKSNNYATHYAEPVKGRFTISRDDSKSTVYLQMNSLKTEDTAVYYCTRYYGNYGGYFDVWGAGTLVTVSSGKPGSGKPGSGKPGSGKPGSSIVMTQSPATLSVSPGERATLSCRASQSVSNRVAWYQQKPGQSPRLLINYASHRYTGVPDRFTGSGYGTEFTLTISSLQSEDFAVYFCQQDYSSPRTFGGGTKVEIK

SEQ ID NO: 8871 - protein, 122 aa, Artificial Sequence; identical to SEQ ID NO: 6246
  Description of Artificial Sequence: Synthetic polypeptide
  VH of XENP018784

SEQ ID NO: 8872 - protein, 107 aa, Artificial Sequence
  Description of Artificial Sequence: Synthetic polypeptide
  VL of XENP018784
SIVMTQSPATLSVSPGERATLSCRASQSVSNRVAWYQQKPGQSPRLLINYASHRYTGVPDRFTGSGYGTEFTLTISSLQSEDFAVYFCQQDYSSPRTFGGGTKVEIK

SEQ ID NO: 8873 - protein, 5 aa, Artificial Sequence
  Description of Artificial Sequence: Synthetic peptide
  XENP018784 vhCDR1
NYWMN

SEQ ID NO: 8874 - protein, 19 aa, Artificial Sequence
  Description of Artificial Sequence: Synthetic peptide
  XENP018784 vhCDR2
EIRLKSNNYATHYAEPVKG

SEQ ID NO: 8875 - protein, 11 aa, Artificial Sequence
  Description of Artificial Sequence: Synthetic peptide
  XENP018784 vhCDR3
YYGNYGGYFDV

SEQ ID NO: 8876 - protein, 11 aa, Artificial Sequence
  Description of Artificial Sequence: Synthetic peptide
  XENP018784 vlCDR1
RASQSVSNRVA

SEQ ID NO: 8877 - protein, 7 aa, Artificial Sequence
  Description of Artificial Sequence: Synthetic peptide
  XENP018784 vlCDR2
YASHRYT

SEQ ID NO: 8878 - protein, 9 aa, Artificial Sequence
  Description of Artificial Sequence: Synthetic peptide
  XENP018784 vlCDR3
QQDYSSPRT

SEQ ID NO: 8879 - protein, 249 aa, Artificial Sequence
  Description of Artificial Sequence: Synthetic polypeptide
  XENP018785 1G6_H1_L1.43_scFv(GKPGS)4
EVQLVESGGGLVKPGGSLRLSCAASGFTFSNYWMNWVRQAPGKGLEWVGEIRLKSNNYATHYAEPVKGRFTISRDDSKSTVYLQMNSLKTEDTAVYYCTRYYGNYGGYFDVWGAGTLVTVSSGKPGSGKPGSGKPGSGKPGSSIVMTQSPATLSVSPGERATLSCRASQSVSNLVAWYQQKPGQSPRLLINYASHRYTGVPDRFTGSGYGTEFTLTISSLQSEDFAVYFCQQDYSSPRTFGGGTKVEIK

SEQ ID NO: 8880 - protein, 122 aa, Artificial Sequence; identical to SEQ ID NO: 6246
  Description of Artificial Sequence: Synthetic polypeptide
  VH of XENP018785

SEQ ID NO: 8881 - protein, 107 aa, Artificial Sequence
  Description of Artificial Sequence: Synthetic polypeptide
  VL of XENP018785
SIVMTQSPATLSVSPGERATLSCRASQSVSNLVAWYQQKPGQSPRLLINYASHRYTGVPDRFTGSGYGTEFTLTISSLQSEDFAVYFCQQDYSSPRTFGGGTKVEIK

SEQ ID NO: 8882 - protein, 5 aa, Artificial Sequence
  Description of Artificial Sequence: Synthetic peptide
  XENP018785 vhCDR1
NYWMN

SEQ ID NO: 8883 - protein, 19 aa, Artificial Sequence
  Description of Artificial Sequence: Synthetic peptide
  XENP018785 vhCDR2
EIRLKSNNYATHYAEPVKG

SEQ ID NO: 8884 - protein, 11 aa, Artificial Sequence
  Description of Artificial Sequence: Synthetic peptide
  XENP018785 vhCDR3
YYGNYGGYFDV

SEQ ID NO: 8885 - protein, 11 aa, Artificial Sequence
  Description of Artificial Sequence: Synthetic peptide
  XENP018785 vlCDR1
RASQSVSNLVA

SEQ ID NO: 8886 - protein, 7 aa, Artificial Sequence
  Description of Artificial Sequence: Synthetic peptide
  XENP018785 vlCDR2
YASHRYT

SEQ ID NO: 8887 - protein, 9 aa, Artificial Sequence
  Description of Artificial Sequence: Synthetic peptide
  XENP018785 vlCDR3
QQDYSSPRT

SEQ ID NO: 8888 - protein, 249 aa, Artificial Sequence
  Description of Artificial Sequence: Synthetic polypeptide
  XENP018786 1G6_H1_L1.44_scFv(GKPGS)4
EVQLVESGGGLVKPGGSLRLSCAASGFTFSNYWMNWVRQAPGKGLEWVGEIRLKSNNYATHYAEPVKGRFTISRDDSKSTVYLQMNSLKTEDTAVYYCTRYYGNYGGYFDVWGAGTLVTVSSGKPGSGKPGSGKPGSGKPGSSIVMTQSPATLSVSPGERATLSCRASQSVSNTVAWYQQKPGQSPRLLINYASHRYTGVPDRFTGSGYGTEFTLTISSLQSEDFAVYFCQQDYSSPRTFGGGTKVEIK

SEQ ID NO: 8889 - protein, 122 aa, Artificial Sequence; identical to SEQ ID NO: 6246
  Description of Artificial Sequence: Synthetic polypeptide
  VH of XENP018786

SEQ ID NO: 8890 - protein, 107 aa, Artificial Sequence
  Description of Artificial Sequence: Synthetic polypeptide
  VL of XENP018786
SIVMTQSPATLSVSPGERATLSCRASQSVSNTVAWYQQKPGQSPRLLINYASHRYTGVPDRFTGSGYGTEFTLTISSLQSEDFAVYFCQQDYSSPRTFGGGTKVEIK

SEQ ID NO: 8891 - protein, 5 aa, Artificial Sequence
  Description of Artificial Sequence: Synthetic peptide
  XENP018786 vhCDR1
NYWMN

SEQ ID NO: 8892 - protein, 19 aa, Artificial Sequence
  Description of Artificial Sequence: Synthetic peptide
  XENP018786 vhCDR2
EIRLKSNNYATHYAEPVKG

SEQ ID NO: 8893 - protein, 11 aa, Artificial Sequence
  Description of Artificial Sequence: Synthetic peptide
  XENP018786 vhCDR3
YYGNYGGYFDV

SEQ ID NO: 8894 - protein, 11 aa, Artificial Sequence
  Description of Artificial Sequence: Synthetic peptide
  XENP018786 vlCDR1
RASQSVSNTVA

SEQ ID NO: 8895 - protein, 7 aa, Artificial Sequence
  Description of Artificial Sequence: Synthetic peptide
  XENP018786 vlCDR2
YASHRYT

SEQ ID NO: 8896 - protein, 9 aa, Artificial Sequence
  Description of Artificial Sequence: Synthetic peptide
  XENP018786 vlCDR3
QQDYSSPRT

SEQ ID NO: 8897 - protein, 249 aa, Artificial Sequence
  Description of Artificial Sequence: Synthetic polypeptide
  XENP018787 1G6_H1_L1.45_scFv(GKPGS)4
EVQLVESGGGLVKPGGSLRLSCAASGFTFSNYWMNWVRQAPGKGLEWVGEIRLKSNNYATHYAEPVKGRFTISRDDSKSTVYLQMNSLKTEDTAVYYCTRYYGNYGGYFDVWGAGTLVTVSSGKPGSGKPGSGKPGSGKPGSSIVMTQSPATLSVSPGERATLSCRASQSVSNGVAWYQQKPGQSPRLLINYASHRYTGVPDRFTGSGYGTEFTLTISSLQSEDFAVYFCQQDYSSPRTFGGGTKVEIK

SEQ ID NO: 8898 - protein, 122 aa, Artificial Sequence; identical to SEQ ID NO: 6246
  Description of Artificial Sequence: Synthetic polypeptide
  VH of XENP018787

SEQ ID NO: 8899 - protein, 107 aa, Artificial Sequence
  Description of Artificial Sequence: Synthetic polypeptide
  VL of XENP018787
SIVMTQSPATLSVSPGERATLSCRASQSVSNGVAWYQQKPGQSPRLLINYASHRYTGVPDRFTGSGYGTEFTLTISSLQSEDFAVYFCQQDYSSPRTFGGGTKVEIK

SEQ ID NO: 8900 - protein, 5 aa, Artificial Sequence
  Description of Artificial Sequence: Synthetic peptide
  XENP018787 vhCDR1
NYWMN

SEQ ID NO: 8901 - protein, 19 aa, Artificial Sequence
  Description of Artificial Sequence: Synthetic peptide
  XENP018787 vhCDR2
EIRLKSNNYATHYAEPVKG

SEQ ID NO: 8902 - protein, 11 aa, Artificial Sequence
  Description of Artificial Sequence: Synthetic peptide
  XENP018787 vhCDR3
YYGNYGGYFDV

SEQ ID NO: 8903 - protein, 11 aa, Artificial Sequence
  Description of Artificial Sequence: Synthetic peptide
  XENP018787 vlCDR1
RASQSVSNGVA

SEQ ID NO: 8904 - protein, 7 aa, Artificial Sequence
  Description of Artificial Sequence: Synthetic peptide
  XENP018787 vlCDR2
YASHRYT

SEQ ID NO: 8905 - protein, 9 aa, Artificial Sequence
  Description of Artificial Sequence: Synthetic peptide
  XENP018787 vlCDR3
QQDYSSPRT

SEQ ID NO: 8906 - protein, 249 aa, Artificial Sequence
  Description of Artificial Sequence: Synthetic polypeptide
  XENP018788 1G6_H1_L1.46_scFv(GKPGS)4
EVQLVESGGGLVKPGGSLRLSCAASGFTFSNYWMNWVRQAPGKGLEWVGEIRLKSNNYATHYAEPVKGRFTISRDDSKSTVYLQMNSLKTEDTAVYYCTRYYGNYGGYFDVWGAGTLVTVSSGKPGSGKPGSGKPGSGKPGSSIVMTQSPATLSVSPGERATLSCRASQSVSNYVAWYQQKPGQSPRLLINYASHRYTGVPDRFTGSGYGTEFTLTISSLQSEDFAVYFCQQDYSSPRTFGGGTKVEIK

SEQ ID NO: 8907 - protein, 122 aa, Artificial Sequence; identical to SEQ ID NO: 6246
  Description of Artificial Sequence: Synthetic polypeptide
  VH of XENP018788

SEQ ID NO: 8908 - protein, 107 aa, Artificial Sequence
  Description of Artificial Sequence: Synthetic polypeptide
  VL of XENP018788
SIVMTQSPATLSVSPGERATLSCRASQSVSNYVAWYQQKPGQSPRLLINYASHRYTGVPDRFTGSGYGTEFTLTISSLQSEDFAVYFCQQDYSSPRTFGGGTKVEIK

SEQ ID NO: 8909 - protein, 5 aa, Artificial Sequence
  Description of Artificial Sequence: Synthetic peptide
  XENP018788 vhCDR1
NYWMN

SEQ ID NO: 8910 - protein, 19 aa, Artificial Sequence
  Description of Artificial Sequence: Synthetic peptide
  XENP018788 vhCDR2
EIRLKSNNYATHYAEPVKG

SEQ ID NO: 8911 - protein, 11 aa, Artificial Sequence
  Description of Artificial Sequence: Synthetic peptide
  XENP018788 vhCDR3
YYGNYGGYFDV

SEQ ID NO: 8912 - protein, 11 aa, Artificial Sequence
  Description of Artificial Sequence: Synthetic peptide
  XENP018788 vlCDR1
RASQSVSNYVA

SEQ ID NO: 8913 - protein, 7 aa, Artificial Sequence
  Description of Artificial Sequence: Synthetic peptide
  XENP018788 vlCDR2
YASHRYT

SEQ ID NO: 8914 - protein, 9 aa, Artificial Sequence
  Description of Artificial Sequence: Synthetic peptide
  XENP018788 vlCDR3
QQDYSSPRT

SEQ ID NO: 8915 - protein, 249 aa, Artificial Sequence
  Description of Artificial Sequence: Synthetic polypeptide
  XENP018789 1G6_H1_L1.47_scFv(GKPGS)4
EVQLVESGGGLVKPGGSLRLSCAASGFTFSNYWMNWVRQAPGKGLEWVGEIRLKSNNYATHYAEPVKGRFTISRDDSKSTVYLQMNSLKTEDTAVYYCTRYYGNYGGYFDVWGAGTLVTVSSGKPGSGKPGSGKPGSGKPGSSIVMTQSPATLSVSPGERATLSCRASQSVSNDLAWYQQKPGQSPRLLINYASHRYTGVPDRFTGSGYGTEFTLTISSLQSEDFAVYFCQQDYSSPRTFGGGTKVEIK

SEQ ID NO: 8916 - protein, 122 aa, Artificial Sequence; identical to SEQ ID NO: 6246
  Description of Artificial Sequence: Synthetic polypeptide
  VH of XENP018789

SEQ ID NO: 8917 - protein, 107 aa, Artificial Sequence
  Description of Artificial Sequence: Synthetic polypeptide
  VL of XENP018789
SIVMTQSPATLSVSPGERATLSCRASQSVSNDLAWYQQKPGQSPRLLINYASHRYTGVPDRFTGSGYGTEFTLTISSLQSEDFAVYFCQQDYSSPRTFGGGTKVEIK

SEQ ID NO: 8918 - protein, 5 aa, Artificial Sequence
  Description of Artificial Sequence: Synthetic peptide
  XENP018789 vhCDR1
NYWMN

SEQ ID NO: 8919 - protein, 19 aa, Artificial Sequence
  Description of Artificial Sequence: Synthetic peptide
  XENP018789 vhCDR2
EIRLKSNNYATHYAEPVKG

SEQ ID NO: 8920 - protein, 11 aa, Artificial Sequence
  Description of Artificial Sequence: Synthetic peptide
  XENP018789 vhCDR3
YYGNYGGYFDV

SEQ ID NO: 8921 - protein, 11 aa, Artificial Sequence
  Description of Artificial Sequence: Synthetic peptide
  XENP018789 vlCDR1
RASQSVSNDLA

SEQ ID NO: 8922 - protein, 7 aa, Artificial Sequence
  Description of Artificial Sequence: Synthetic peptide
  XENP018789 vlCDR2
YASHRYT

SEQ ID NO: 8923 - protein, 9 aa, Artificial Sequence
  Description of Artificial Sequence: Synthetic peptide
  XENP018789 vlCDR3
QQDYSSPRT

SEQ ID NO: 8924 - protein, 249 aa, Artificial Sequence
  Description of Artificial Sequence: Synthetic polypeptide
  XENP018790 1G6_H1_L1.48_scFv(GKPGS)4
EVQLVESGGGLVKPGGSLRLSCAASGFTFSNYWMNWVRQAPGKGLEWVGEIRLKSNNYATHYAEPVKGRFTISRDDSKSTVYLQMNSLKTEDTAVYYCTRYYGNYGGYFDVWGAGTLVTVSSGKPGSGKPGSGKPGSGKPGSSIVMTQSPATLSVSPGERATLSCRASQSVSNDVSWYQQKPGQSPRLLINYASHRYTGVPDRFTGSGYGTEFTLTISSLQSEDFAVYFCQQDYSSPRTFGGGTKVEIK

SEQ ID NO: 8925 - protein, 122 aa, Artificial Sequence; identical to SEQ ID NO: 6246
  Description of Artificial Sequence: Synthetic polypeptide
  VH of XENP018790

SEQ ID NO: 8926 - protein, 107 aa, Artificial Sequence
  Description of Artificial Sequence: Synthetic polypeptide
  VL of XENP018790
SIVMTQSPATLSVSPGERATLSCRASQSVSNDVSWYQQKPGQSPRLLINYASHRYTGVPDRFTGSGYGTEFTLTISSLQSEDFAVYFCQQDYSSPRTFGGGTKVEIK

SEQ ID NO: 8927 - protein, 5 aa, Artificial Sequence
  Description of Artificial Sequence: Synthetic peptide
  XENP018790 vhCDR1
NYWMN

SEQ ID NO: 8928 - protein, 19 aa, Artificial Sequence
  Description of Artificial Sequence: Synthetic peptide
  XENP018790 vhCDR2
EIRLKSNNYATHYAEPVKG

SEQ ID NO: 8929 - protein, 11 aa, Artificial Sequence
  Description of Artificial Sequence: Synthetic peptide
  XENP018790 vhCDR3
YYGNYGGYFDV

SEQ ID NO: 8930 - protein, 11 aa, Artificial Sequence
  Description of Artificial Sequence: Synthetic peptide
  XENP018790 vlCDR1
RASQSVSNDVS

SEQ ID NO: 8931 - protein, 7 aa, Artificial Sequence
  Description of Artificial Sequence: Synthetic peptide
  XENP018790 vlCDR2
YASHRYT

SEQ ID NO: 8932 - protein, 9 aa, Artificial Sequence
  Description of Artificial Sequence: Synthetic peptide
  XENP018790 vlCDR3
QQDYSSPRT

SEQ ID NO: 8933 - protein, 249 aa, Artificial Sequence
  Description of Artificial Sequence: Synthetic polypeptide
  XENP018791 1G6_H1_L1.49_scFv(GKPGS)4
EVQLVESGGGLVKPGGSLRLSCAASGFTFSNYWMNWVRQAPGKGLEWVGEIRLKSNNYATHYAEPVKGRFTISRDDSKSTVYLQMNSLKTEDTAVYYCTRYYGNYGGYFDVWGAGTLVTVSSGKPGSGKPGSGKPGSGKPGSSIVMTQSPATLSVSPGERATLSCRASQSVSNDVTWYQQKPGQSPRLLINYASHRYTGVPDRFTGSGYGTEFTLTISSLQSEDFAVYFCQQDYSSPRTFGGGTKVEIK

SEQ ID NO: 8934 - protein, 122 aa, Artificial Sequence; identical to SEQ ID NO: 6246
  Description of Artificial Sequence: Synthetic polypeptide
  VH of XENP018791

SEQ ID NO: 8935 - protein, 107 aa, Artificial Sequence
  Description of Artificial Sequence: Synthetic polypeptide
  VL of XENP018791
SIVMTQSPATLSVSPGERATLSCRASQSVSNDVTWYQQKPGQSPRLLINYASHRYTGVPDRFTGSGYGTEFTLTISSLQSEDFAVYFCQQDYSSPRTFGGGTKVEIK

SEQ ID NO: 8936 - protein, 5 aa, Artificial Sequence
  Description of Artificial Sequence: Synthetic peptide
  XENP018791 vhCDR1
NYWMN

SEQ ID NO: 8937 - protein, 19 aa, Artificial Sequence
  Description of Artificial Sequence: Synthetic peptide
  XENP018791 vhCDR2
EIRLKSNNYATHYAEPVKG

SEQ ID NO: 8938 - protein, 11 aa, Artificial Sequence
  Description of Artificial Sequence: Synthetic peptide
  XENP018791 vhCDR3
YYGNYGGYFDV

SEQ ID NO: 8939 - protein, 11 aa, Artificial Sequence
  Description of Artificial Sequence: Synthetic peptide
  XENP018791 vlCDR1
RASQSVSNDVT

SEQ ID NO: 8940 - protein, 7 aa, Artificial Sequence
  Description of Artificial Sequence: Synthetic peptide
  XENP018791 vlCDR2
YASHRYT

SEQ ID NO: 8941 - protein, 9 aa, Artificial Sequence
  Description of Artificial Sequence: Synthetic peptide
  XENP018791 vlCDR3
QQDYSSPRT

SEQ ID NO: 8942 - protein, 249 aa, Artificial Sequence
  Description of Artificial Sequence: Synthetic polypeptide
  XENP018792 1G6_H1_L1.50_scFv(GKPGS)4
EVQLVESGGGLVKPGGSLRLSCAASGFTFSNYWMNWVRQAPGKGLEWVGEIRLKSNNYATHYAEPVKGRFTISRDDSKSTVYLQMNSLKTEDTAVYYCTRYYGNYGGYFDVWGAGTLVTVSSGKPGSGKPGSGKPGSGKPGSSIVMTQSPATLSVSPGERATLSCRASQSVSNDVAWYQQKPGQAPRLLINYASHRYTGVPDRFTGSGYGTEFTLTISSLQSEDFAVYFCQQDYSSPRTFGGGTKVEIK

SEQ ID NO: 8943 - protein, 122 aa, Artificial Sequence; identical to SEQ ID NO: 6246
  Description of Artificial Sequence: Synthetic polypeptide
  VH of XENP018792

SEQ ID NO: 8944 - protein, 107 aa, Artificial Sequence
  Description of Artificial Sequence: Synthetic polypeptide
  VL of XENP018792
SIVMTQSPATLSVSPGERATLSCRASQSVSNDVAWYQQKPGQAPRLLINYASHRYTGVPDRFTGSGYGTEFTLTISSLQSEDFAVYFCQQDYSSPRTFGGGTKVEIK

SEQ ID NO: 8945 - protein, 5 aa, Artificial Sequence
  Description of Artificial Sequence: Synthetic peptide
  XENP018792 vhCDR1
NYWMN

SEQ ID NO: 8946 - protein, 19 aa, Artificial Sequence
  Description of Artificial Sequence: Synthetic peptide
  XENP018792 vhCDR2
EIRLKSNNYATHYAEPVKG

SEQ ID NO: 8947 - protein, 11 aa, Artificial Sequence
  Description of Artificial Sequence: Synthetic peptide
  XENP018792 vhCDR3
YYGNYGGYFDV

SEQ ID NO: 8948 - protein, 11 aa, Artificial Sequence
  Description of Artificial Sequence: Synthetic peptide
  XENP018792 vlCDR1
RASQSVSNDVA

SEQ ID NO: 8949 - protein, 7 aa, Artificial Sequence
  Description of Artificial Sequence: Synthetic peptide
  XENP018792 vlCDR2
YASHRYT

SEQ ID NO: 8950 - protein, 9 aa, Artificial Sequence
  Description of Artificial Sequence: Synthetic peptide
  XENP018792 vlCDR3
QQDYSSPRT

SEQ ID NO: 8951 - protein, 249 aa, Artificial Sequence
  Description of Artificial Sequence: Synthetic polypeptide
  XENP018793 1G6_H1_L1.51_scFv(GKPGS)4
EVQLVESGGGLVKPGGSLRLSCAASGFTFSNYWMNWVRQAPGKGLEWVGEIRLKSNNYATHYAEPVKGRFTISRDDSKSTVYLQMNSLKTEDTAVYYCTRYYGNYGGYFDVWGAGTLVTVSSGKPGSGKPGSGKPGSGKPGSSIVMTQSPATLSVSPGERATLSCRASQSVSNDVAWYQQKPGQSPKLLINYASHRYTGVPDRFTGSGYGTEFTLTISSLQSEDFAVYFCQQDYSSPRTFGGGTKVEIK

SEQ ID NO: 8952 - protein, 122 aa, Artificial Sequence; identical to SEQ ID NO: 6246
  Description of Artificial Sequence: Synthetic polypeptide
  VH of XENP018793

SEQ ID NO: 8953 - protein, 107 aa, Artificial Sequence
  Description of Artificial Sequence: Synthetic polypeptide
  VL of XENP018793
SIVMTQSPATLSVSPGERATLSCRASQSVSNDVAWYQQKPGQSPKLLINYASHRYTGVPDRFTGSGYGTEFTLTISSLQSEDFAVYFCQQDYSSPRTFGGGTKVEIK

SEQ ID NO: 8954 - protein, 5 aa, Artificial Sequence
  Description of Artificial Sequence: Synthetic peptide
  XENP018793 vhCDR1
NYWMN

SEQ ID NO: 8955 - protein, 19 aa, Artificial Sequence
  Description of Artificial Sequence: Synthetic peptide
  XENP018793 vhCDR2
EIRLKSNNYATHYAEPVKG

SEQ ID NO: 8956 - protein, 11 aa, Artificial Sequence
  Description of Artificial Sequence: Synthetic peptide
  XENP018793 vhCDR3
YYGNYGGYFDV

SEQ ID NO: 8957 - protein, 11 aa, Artificial Sequence
  Description of Artificial Sequence: Synthetic peptide
  XENP018793 vlCDR1
RASQSVSNDVA

SEQ ID NO: 8958 - protein, 7 aa, Artificial Sequence
  Description of Artificial Sequence: Synthetic peptide
  XENP018793 vlCDR2
YASHRYT

SEQ ID NO: 8959 - protein, 9 aa, Artificial Sequence
  Description of Artificial Sequence: Synthetic peptide
  XENP018793 vlCDR3
QQDYSSPRT

SEQ ID NO: 8960 - protein, 249 aa, Artificial Sequence
  Description of Artificial Sequence: Synthetic polypeptide
  XENP018794 1G6_H1_L1.52_scFv(GKPGS)4
EVQLVESGGGLVKPGGSLRLSCAASGFTFSNYWMNWVRQAPGKGLEWVGEIRLKSNNYATHYAEPVKGRFTISRDDSKSTVYLQMNSLKTEDTAVYYCTRYYGNYGGYFDVWGAGTLVTVSSGKPGSGKPGSGKPGSGKPGSSIVMTQSPATLSVSPGERATLSCRASQSVSNDVAWYQQKPGQSPQLLINYASHRYTGVPDRFTGSGYGTEFTLTISSLQSEDFAVYFCQQDYSSPRTFGGGTKVEIK

SEQ ID NO: 8961 - protein, 122 aa, Artificial Sequence; identical to SEQ ID NO: 6246
  Description of Artificial Sequence: Synthetic polypeptide
  VH of XENP018794

SEQ ID NO: 8962 - protein, 107 aa, Artificial Sequence
  Description of Artificial Sequence: Synthetic polypeptide
  VL of XENP018794
SIVMTQSPATLSVSPGERATLSCRASQSVSNDVAWYQQKPGQSPQLLINYASHRYTGVPDRFTGSGYGTEFTLTISSLQSEDFAVYFCQQDYSSPRTFGGGTKVEIK

SEQ ID NO: 8963 - protein, 5 aa, Artificial Sequence
  Description of Artificial Sequence: Synthetic peptide
  XENP018794 vhCDR1
NYWMN

SEQ ID NO: 8964 - protein, 19 aa, Artificial Sequence
  Description of Artificial Sequence: Synthetic peptide
  XENP018794 vhCDR2
EIRLKSNNYATHYAEPVKG

SEQ ID NO: 8965 - protein, 11 aa, Artificial Sequence
  Description of Artificial Sequence: Synthetic peptide
  XENP018794 vhCDR3
YYGNYGGYFDV

SEQ ID NO: 8966 - protein, 11 aa, Artificial Sequence
  Description of Artificial Sequence: Synthetic peptide
  XENP018794 vlCDR1
RASQSVSNDVA

SEQ ID NO: 8967 - protein, 7 aa, Artificial Sequence
  Description of Artificial Sequence: Synthetic peptide
  XENP018794 vlCDR2
YASHRYT

SEQ ID NO: 8968 - protein, 9 aa, Artificial Sequence
  Description of Artificial Sequence: Synthetic peptide
  XENP018794 vlCDR3
QQDYSSPRT

SEQ ID NO: 8969 - protein, 249 aa, Artificial Sequence
  Description of Artificial Sequence: Synthetic polypeptide
  XENP018795 1G6_H1_L1.53_scFv(GKPGS)4
EVQLVESGGGLVKPGGSLRLSCAASGFTFSNYWMNWVRQAPGKGLEWVGEIRLKSNNYATHYAEPVKGRFTISRDDSKSTVYLQMNSLKTEDTAVYYCTRYYGNYGGYFDVWGAGTLVTVSSGKPGSGKPGSGKPGSGKPGSSIVMTQSPATLSVSPGERATLSCRASQSVSNDVAWYQQKPGQSPILLINYASHRYTGVPDRFTGSGYGTEFTLTISSLQSEDFAVYFCQQDYSSPRTFGGGTKVEIK

SEQ ID NO: 8970 - protein, 122 aa, Artificial Sequence; identical to SEQ ID NO: 6246
  Description of Artificial Sequence: Synthetic polypeptide
  VH of XENP018795

SEQ ID NO: 8971 - protein, 107 aa, Artificial Sequence
  Description of Artificial Sequence: Synthetic polypeptide
  VL of XENP018795
SIVMTQSPATLSVSPGERATLSCRASQSVSNDVAWYQQKPGQSPILLINYASHRYTGVPDRFTGSGYGTEFTLTISSLQSEDFAVYFCQQDYSSPRTFGGGTKVEIK

SEQ ID NO: 8972 - protein, 5 aa, Artificial Sequence
  Description of Artificial Sequence: Synthetic peptide
  XENP018795 vhCDR1
NYWMN

SEQ ID NO: 8973 - protein, 19 aa, Artificial Sequence
  Description of Artificial Sequence: Synthetic peptide
  XENP018795 vhCDR2
EIRLKSNNYATHYAEPVKG

SEQ ID NO: 8974 - protein, 11 aa, Artificial Sequence
  Description of Artificial Sequence: Synthetic peptide
  XENP018795 vhCDR3
YYGNYGGYFDV

SEQ ID NO: 8975 - protein, 11 aa, Artificial Sequence
  Description of Artificial Sequence: Synthetic peptide
  XENP018795 vlCDR1
RASQSVSNDVA

SEQ ID NO: 8976 - protein, 7 aa, Artificial Sequence
  Description of Artificial Sequence: Synthetic peptide
  XENP018795 vlCDR2
YASHRYT

SEQ ID NO: 8977 - protein, 9 aa, Artificial Sequence
  Description of Artificial Sequence: Synthetic peptide
  XENP018795 vlCDR3
QQDYSSPRT

SEQ ID NO: 8978 - protein, 249 aa, Artificial Sequence
  Description of Artificial Sequence: Synthetic polypeptide
  XENP018796 1G6_H1_L1.54_scFv(GKPGS)4
EVQLVESGGGLVKPGGSLRLSCAASGFTFSNYWMNWVRQAPGKGLEWVGEIRLKSNNYATHYAEPVKGRFTISRDDSKSTVYLQMNSLKTEDTAVYYCTRYYGNYGGYFDVWGAGTLVTVSSGKPGSGKPGSGKPGSGKPGSSIVMTQSPATLSVSPGERATLSCRASQSVSNDVAWYQQKPGQSPRLLIYYASHRYTGVPDRFTGSGYGTEFTLTISSLQSEDFAVYFCQQDYSSPRTFGGGTKVEIK

SEQ ID NO: 8979 - protein, 122 aa, Artificial Sequence; identical to SEQ ID NO: 6246
  Description of Artificial Sequence: Synthetic polypeptide
  VH of XENP018796

SEQ ID NO: 8980 - protein, 107 aa, Artificial Sequence
  Description of Artificial Sequence: Synthetic polypeptide
  VL of XENP018796
SIVMTQSPATLSVSPGERATLSCRASQSVSNDVAWYQQKPGQSPRLLIYYASHRYTGVPDRFTGSGYGTEFTLTISSLQSEDFAVYFCQQDYSSPRTFGGGTKVEIK

SEQ ID NO: 8981 - protein, 5 aa, Artificial Sequence
  Description of Artificial Sequence: Synthetic peptide
  XENP018796 vhCDR1
NYWMN

SEQ ID NO: 8982 - protein, 19 aa, Artificial Sequence
  Description of Artificial Sequence: Synthetic peptide
  XENP018796 vhCDR2
EIRLKSNNYATHYAEPVKG

SEQ ID NO: 8983 - protein, 11 aa, Artificial Sequence
  Description of Artificial Sequence: Synthetic peptide
  XENP018796 vhCDR3
YYGNYGGYFDV

SEQ ID NO: 8984 - protein, 11 aa, Artificial Sequence
  Description of Artificial Sequence: Synthetic peptide
  XENP018796 vlCDR1
RASQSVSNDVA

SEQ ID NO: 8985 - protein, 7 aa, Artificial Sequence
  Description of Artificial Sequence: Synthetic peptide
  XENP018796 vlCDR2
YASHRYT

SEQ ID NO: 8986 - protein, 9 aa, Artificial Sequence
  Description of Artificial Sequence: Synthetic peptide
  XENP018796 vlCDR3
QQDYSSPRT

SEQ ID NO: 8987 - protein, 249 aa, Artificial Sequence
  Description of Artificial Sequence: Synthetic polypeptide
  XENP018801 1G6_H1_L1.55_scFv(GKPGS)4
EVQLVESGGGLVKPGGSLRLSCAASGFTFSNYWMNWVRQAPGKGLEWVGEIRLKSNNYATHYAEPVKGRFTISRDDSKSTVYLQMNSLKTEDTAVYYCTRYYGNYGGYFDVWGAGTLVTVSSGKPGSGKPGSGKPGSGKPGSSIVMTQSPATLSVSPGERATLSCRASQSVSNDVAWYQQKPGQSPRLLINFASHRYTGVPDRFTGSGYGTEFTLTISSLQSEDFAVYFCQQDYSSPRTFGGGTKVEIK

SEQ ID NO: 8988 - protein, 122 aa, Artificial Sequence; identical to SEQ ID NO: 6246
  Description of Artificial Sequence: Synthetic polypeptide
  VH of XENP018801

SEQ ID NO: 8989 - protein, 107 aa, Artificial Sequence
  Description of Artificial Sequence: Synthetic polypeptide
  VL of XENP018801
SIVMTQSPATLSVSPGERATLSCRASQSVSNDVAWYQQKPGQSPRLLINFASHRYTGVPDRFTGSGYGTEFTLTISSLQSEDFAVYFCQQDYSSPRTFGGGTKVEIK

SEQ ID NO: 8990 - protein, 5 aa, Artificial Sequence
  Description of Artificial Sequence: Synthetic peptide
  XENP018801 vhCDR1
NYWMN

SEQ ID NO: 8991 - protein, 19 aa, Artificial Sequence
  Description of Artificial Sequence: Synthetic peptide
  XENP018801 vhCDR2
EIRLKSNNYATHYAEPVKG

SEQ ID NO: 8992 - protein, 11 aa, Artificial Sequence
  Description of Artificial Sequence: Synthetic peptide
  XENP018801 vhCDR3
YYGNYGGYFDV

SEQ ID NO: 8993 - protein, 11 aa, Artificial Sequence
  Description of Artificial Sequence: Synthetic peptide
  XENP018801 vlCDR1
RASQSVSNDVA

SEQ ID NO: 8994 - protein, 7 aa, Artificial Sequence
  Description of Artificial Sequence: Synthetic peptide
  XENP018801 vlCDR2
FASHRYT

SEQ ID NO: 8995 - protein, 9 aa, Artificial Sequence
  Description of Artificial Sequence: Synthetic peptide
  XENP018801 vlCDR3
QQDYSSPRT

SEQ ID NO: 8996 - protein, 249 aa, Artificial Sequence
  Description of Artificial Sequence: Synthetic polypeptide
  XENP018802 1G6_H1_L1.56_scFv(GKPGS)4
EVQLVESGGGLVKPGGSLRLSCAASGFTFSNYWMNWVRQAPGKGLEWVGEIRLKSNNYATHYAEPVKGRFTISRDDSKSTVYLQMNSLKTEDTAVYYCTRYYGNYGGYFDVWGAGTLVTVSSGKPGSGKPGSGKPGSGKPGSSIVMTQSPATLSVSPGERATLSCRASQSVSNDVAWYQQKPGQSPRLLINHASHRYTGVPDRFTGSGYGTEFTLTISSLQSEDFAVYFCQQDYSSPRTFGGGTKVEIK

SEQ ID NO: 8997 - protein, 122 aa, Artificial Sequence; identical to SEQ ID NO: 6246
  Description of Artificial Sequence: Synthetic polypeptide
  VH of XENP018802

SEQ ID NO: 8998 - protein, 107 aa, Artificial Sequence
  Description of Artificial Sequence: Synthetic polypeptide
  VL of XENP018802
SIVMTQSPATLSVSPGERATLSCRASQSVSNDVAWYQQKPGQSPRLLINHASHRYTGVPDRFTGSGYGTEFTLTISSLQSEDFAVYFCQQDYSSPRTFGGGTKVEIK

SEQ ID NO: 8999 - protein, 5 aa, Artificial Sequence
  Description of Artificial Sequence: Synthetic peptide
  XENP018802 vhCDR1
NYWMN

SEQ ID NO: 9000 - protein, 19 aa, Artificial Sequence
  Description of Artificial Sequence: Synthetic peptide
  XENP018802 vhCDR2
EIRLKSNNYATHYAEPVKG

SEQ ID NO: 9001 - protein, 11 aa, Artificial Sequence
  Description of Artificial Sequence: Synthetic peptide
  XENP018802 vhCDR3
YYGNYGGYFDV

SEQ ID NO: 9002 - protein, 11 aa, Artificial Sequence
  Description of Artificial Sequence: Synthetic peptide
  XENP018802 vlCDR1
RASQSVSNDVA

SEQ ID NO: 9003 - protein, 7 aa, Artificial Sequence
  Description of Artificial Sequence: Synthetic peptide
  XENP018802 vlCDR2
HASHRYT

SEQ ID NO: 9004 - protein, 9 aa, Artificial Sequence
  Description of Artificial Sequence: Synthetic peptide
  XENP018802 vlCDR3
QQDYSSPRT

SEQ ID NO: 9005 - protein, 249 aa, Artificial Sequence
  Description of Artificial Sequence: Synthetic polypeptide
  XENP018803 1G6_H1_L1.57_scFv(GKPGS)4
EVQLVESGGGLVKPGGSLRLSCAASGFTFSNYWMNWVRQAPGKGLEWVGEIRLKSNNYATHYAEPVKGRFTISRDDSKSTVYLQMNSLKTEDTAVYYCTRYYGNYGGYFDVWGAGTLVTVSSGKPGSGKPGSGKPGSGKPGSSIVMTQSPATLSVSPGERATLSCRASQSVSNDVAWYQQKPGQSPRLLINLASHRYTGVPDRFTGSGYGTEFTLTISSLQSEDFAVYFCQQDYSSPRTFGGGTKVEIK

SEQ ID NO: 9006 - protein, 122 aa, Artificial Sequence; identical to SEQ ID NO: 6246
  Description of Artificial Sequence: Synthetic polypeptide
  VH of XENP018803

SEQ ID NO: 9007 - protein, 107 aa, Artificial Sequence
  Description of Artificial Sequence: Synthetic polypeptide
  VL of XENP018803
SIVMTQSPATLSVSPGERATLSCRASQSVSNDVAWYQQKPGQSPRLLINLASHRYTGVPDRFTGSGYGTEFTLTISSLQSEDFAVYFCQQDYSSPRTFGGGTKVEIK

SEQ ID NO: 9008 - protein, 5 aa, Artificial Sequence
  Description of Artificial Sequence: Synthetic peptide
  XENP018803 vhCDR1
NYWMN

SEQ ID NO: 9009 - protein, 19 aa, Artificial Sequence
  Description of Artificial Sequence: Synthetic peptide
  XENP018803 vhCDR2
EIRLKSNNYATHYAEPVKG

SEQ ID NO: 9010 - protein, 11 aa, Artificial Sequence
  Description of Artificial Sequence: Synthetic peptide
  XENP018803 vhCDR3
YYGNYGGYFDV

SEQ ID NO: 9011 - protein, 11 aa, Artificial Sequence
  Description of Artificial Sequence: Synthetic peptide
  XENP018803 vlCDR1
RASQSVSNDVA

SEQ ID NO: 9012 - protein, 7 aa, Artificial Sequence
  Description of Artificial Sequence: Synthetic peptide
  XENP018803 vlCDR2
LASHRYT

SEQ ID NO: 9013 - protein, 9 aa, Artificial Sequence
  Description of Artificial Sequence: Synthetic peptide
  XENP018803 vlCDR3
QQDYSSPRT

SEQ ID NO: 9014 - protein, 249 aa, Artificial Sequence
  Description of Artificial Sequence: Synthetic polypeptide
  XENP018804 1G6_H1_L1.58_scFv(GKPGS)4
EVQLVESGGGLVKPGGSLRLSCAASGFTFSNYWMNWVRQAPGKGLEWVGEIRLKSNNYATHYAEPVKGRFTISRDDSKSTVYLQMNSLKTEDTAVYYCTRYYGNYGGYFDVWGAGTLVTVSSGKPGSGKPGSGKPGSGKPGSSIVMTQSPATLSVSPGERATLSCRASQSVSNDVAWYQQKPGQSPRLLINWASHRYTGVPDRFTGSGYGTEFTLTISSLQSEDFAVYFCQQDYSSPRTFGGGTKVEIK

SEQ ID NO: 9015 - protein, 122 aa, Artificial Sequence; identical to SEQ ID NO: 6246
  Description of Artificial Sequence: Synthetic polypeptide
  VH of XENP018804

SEQ ID NO: 9016 - protein, 107 aa, Artificial Sequence
  Description of Artificial Sequence: Synthetic polypeptide
  VL of XENP018804
SIVMTQSPATLSVSPGERATLSCRASQSVSNDVAWYQQKPGQSPRLLINWASHRYTGVPDRFTGSGYGTEFTLTISSLQSEDFAVYFCQQDYSSPRTFGGGTKVEIK

SEQ ID NO: 9017 - protein, 5 aa, Artificial Sequence
  Description of Artificial Sequence: Synthetic peptide
  XENP018804 vhCDR1
NYWMN

SEQ ID NO: 9018 - protein, 19 aa, Artificial Sequence
  Description of Artificial Sequence: Synthetic peptide
  XENP018804 vhCDR2
EIRLKSNNYATHYAEPVKG

SEQ ID NO: 9019 - protein, 11 aa, Artificial Sequence
  Description of Artificial Sequence: Synthetic peptide
  XENP018804 vhCDR3
YYGNYGGYFDV

SEQ ID NO: 9020 - protein, 11 aa, Artificial Sequence
  Description of Artificial Sequence: Synthetic peptide
  XENP018804 vlCDR1
RASQSVSNDVA

SEQ ID NO: 9021 - protein, 7 aa, Artificial Sequence
  Description of Artificial Sequence: Synthetic peptide
  XENP018804 vlCDR2
WASHRYT

SEQ ID NO: 9022 - protein, 9 aa, Artificial Sequence
  Description of Artificial Sequence: Synthetic peptide
  XENP018804 vlCDR3
QQDYSSPRT

SEQ ID NO: 9023 - protein, 249 aa, Artificial Sequence
  Description of Artificial Sequence: Synthetic polypeptide
  XENP018805 1G6_H1_L1.59_scFv(GKPGS)4
EVQLVESGGGLVKPGGSLRLSCAASGFTFSNYWMNWVRQAPGKGLEWVGEIRLKSNNYATHYAEPVKGRFTISRDDSKSTVYLQMNSLKTEDTAVYYCTRYYGNYGGYFDVWGAGTLVTVSSGKPGSGKPGSGKPGSGKPGSSIVMTQSPATLSVSPGERATLSCRASQSVSNDVAWYQQKPGQSPRLLINVASHRYTGVPDRFTGSGYGTEFTLTISSLQSEDFAVYFCQQDYSSPRTFGGGTKVEIK

SEQ ID NO: 9024 - protein, 122 aa, Artificial Sequence; identical to SEQ ID NO: 6246
  Description of Artificial Sequence: Synthetic polypeptide
  VH of XENP018805

SEQ ID NO: 9025 - protein, 107 aa, Artificial Sequence
  Description of Artificial Sequence: Synthetic polypeptide
  VL of XENP018805
SIVMTQSPATLSVSPGERATLSCRASQSVSNDVAWYQQKPGQSPRLLINVASHRYTGVPDRFTGSGYGTEFTLTISSLQSEDFAVYFCQQDYSSPRTFGGGTKVEIK

SEQ ID NO: 9026 - protein, 5 aa, Artificial Sequence
  Description of Artificial Sequence: Synthetic peptide
  XENP018805 vhCDR1
NYWMN

SEQ ID NO: 9027 - protein, 19 aa, Artificial Sequence
  Description of Artificial Sequence: Synthetic peptide
  XENP018805 vhCDR2
EIRLKSNNYATHYAEPVKG

SEQ ID NO: 9028 - protein, 11 aa, Artificial Sequence
  Description of Artificial Sequence: Synthetic peptide
  XENP018805 vhCDR3
YYGNYGGYFDV

SEQ ID NO: 9029 - protein, 11 aa, Artificial Sequence
  Description of Artificial Sequence: Synthetic peptide
  XENP018805 vlCDR1
RASQSVSNDVA

SEQ ID NO: 9030 - protein, 7 aa, Artificial Sequence
  Description of Artificial Sequence: Synthetic peptide
  XENP018805 vlCDR2
VASHRYT

SEQ ID NO: 9031 - protein, 9 aa, Artificial Sequence
  Description of Artificial Sequence: Synthetic peptide
  XENP018805 vlCDR3
QQDYSSPRT

SEQ ID NO: 9032 - protein, 249 aa, Artificial Sequence
  Description of Artificial Sequence: Synthetic polypeptide
  XENP018806 1G6_H1_L1.60_scFv(GKPGS)4
EVQLVESGGGLVKPGGSLRLSCAASGFTFSNYWMNWVRQAPGKGLEWVGEIRLKSNNYATHYAEPVKGRFTISRDDSKSTVYLQMNSLKTEDTAVYYCTRYYGNYGGYFDVWGAGTLVTVSSGKPGSGKPGSGKPGSGKPGSSIVMTQSPATLSVSPGERATLSCRASQSVSNDVAWYQQKPGQSPRLLINAASHRYTGVPDRFTGSGYGTEFTLTISSLQSEDFAVYFCQQDYSSPRTFGGGTKVEIK

SEQ ID NO: 9033 - protein, 122 aa, Artificial Sequence; identical to SEQ ID NO: 6246
  Description of Artificial Sequence: Synthetic polypeptide
  VH of XENP018806

SEQ ID NO: 9034 - protein, 107 aa, Artificial Sequence
  Description of Artificial Sequence: Synthetic polypeptide
  VL of XENP018806
SIVMTQSPATLSVSPGERATLSCRASQSVSNDVAWYQQKPGQSPRLLINAASHRYTGVPDRFTGSGYGTEFTLTISSLQSEDFAVYFCQQDYSSPRTFGGGTKVEIK

SEQ ID NO: 9035 - protein, 5 aa, Artificial Sequence
  Description of Artificial Sequence: Synthetic peptide
  XENP018806 vhCDR1
NYWMN

SEQ ID NO: 9036 - protein, 19 aa, Artificial Sequence
  Description of Artificial Sequence: Synthetic peptide
  XENP018806 vhCDR2
EIRLKSNNYATHYAEPVKG

SEQ ID NO: 9037 - protein, 11 aa, Artificial Sequence
  Description of Artificial Sequence: Synthetic peptide
  XENP018806 vhCDR3
YYGNYGGYFDV

SEQ ID NO: 9038 - protein, 11 aa, Artificial Sequence
  Description of Artificial Sequence: Synthetic peptide
  XENP018806 vlCDR1
RASQSVSNDVA

SEQ ID NO: 9039 - protein, 7 aa, Artificial Sequence
  Description of Artificial Sequence: Synthetic peptide
  XENP018806 vlCDR2
AASHRYT

SEQ ID NO: 9040 - protein, 9 aa, Artificial Sequence
  Description of Artificial Sequence: Synthetic peptide
  XENP018806 vlCDR3
QQDYSSPRT

SEQ ID NO: 9041 - protein, 249 aa, Artificial Sequence
  Description of Artificial Sequence: Synthetic polypeptide
  XENP018807 1G6_H1_L1.61_scFv(GKPGS)4
EVQLVESGGGLVKPGGSLRLSCAASGFTFSNYWMNWVRQAPGKGLEWVGEIRLKSNNYATHYAEPVKGRFTISRDDSKSTVYLQMNSLKTEDTAVYYCTRYYGNYGGYFDVWGAGTLVTVSSGKPGSGKPGSGKPGSGKPGSSIVMTQSPATLSVSPGERATLSCRASQSVSNDVAWYQQKPGQSPRLLINQASHRYTGVPDRFTGSGYGTEFTLTISSLQSEDFAVYFCQQDYSSPRTFGGGTKVEIK

SEQ ID NO: 9042 - protein, 122 aa, Artificial Sequence; identical to SEQ ID NO: 6246
  Description of Artificial Sequence: Synthetic polypeptide
  VH of XENP018807

SEQ ID NO: 9043 - protein, 107 aa, Artificial Sequence
  Description of Artificial Sequence: Synthetic polypeptide
  VL of XENP018807
SIVMTQSPATLSVSPGERATLSCRASQSVSNDVAWYQQKPGQSPRLLINQASHRYTGVPDRFTGSGYGTEFTLTISSLQSEDFAVYFCQQDYSSPRTFGGGTKVEIK

SEQ ID NO: 9044 - protein, 5 aa, Artificial Sequence
  Description of Artificial Sequence: Synthetic peptide
  XENP018807 vhCDR1
NYWMN

SEQ ID NO: 9045 - protein, 19 aa, Artificial Sequence
  Description of Artificial Sequence: Synthetic peptide
  XENP018807 vhCDR2
EIRLKSNNYATHYAEPVKG

SEQ ID NO: 9046 - protein, 11 aa, Artificial Sequence
  Description of Artificial Sequence: Synthetic peptide
  XENP018807 vhCDR3
YYGNYGGYFDV

SEQ ID NO: 9047 - protein, 11 aa, Artificial Sequence
  Description of Artificial Sequence: Synthetic peptide
  XENP018807 vlCDR1
RASQSVSNDVA

SEQ ID NO: 9048 - protein, 7 aa, Artificial Sequence
  Description of Artificial Sequence: Synthetic peptide
  XENP018807 vlCDR2
QASHRYT

SEQ ID NO: 9049 - protein, 9 aa, Artificial Sequence
  Description of Artificial Sequence: Synthetic peptide
  XENP018807 vlCDR3
QQDYSSPRT

SEQ ID NO: 9050 - protein, 249 aa, Artificial Sequence
  Description of Artificial Sequence: Synthetic polypeptide
  XENP018808 1G6_H1_L1.62_scFv(GKPGS)4
EVQLVESGGGLVKPGGSLRLSCAASGFTFSNYWMNWVRQAPGKGLEWVGEIRLKSNNYATHYAEPVKGRFTISRDDSKSTVYLQMNSLKTEDTAVYYCTRYYGNYGGYFDVWGAGTLVTVSSGKPGSGKPGSGKPGSGKPGSSIVMTQSPATLSVSPGERATLSCRASQSVSNDVAWYQQKPGQSPRLLINDASHRYTGVPDRFTGSGYGTEFTLTISSLQSEDFAVYFCQQDYSSPRTFGGGTKVEIK

SEQ ID NO: 9051 - protein, 122 aa, Artificial Sequence; identical to SEQ ID NO: 6246
  Description of Artificial Sequence: Synthetic polypeptide
  VH of XENP018808

SEQ ID NO: 9052 - protein, 107 aa, Artificial Sequence
  Description of Artificial Sequence: Synthetic polypeptide
  VL of XENP018808
SIVMTQSPATLSVSPGERATLSCRASQSVSNDVAWYQQKPGQSPRLLINDASHRYTGVPDRFTGSGYGTEFTLTISSLQSEDFAVYFCQQDYSSPRTFGGGTKVEIK

SEQ ID NO: 9053 - protein, 5 aa, Artificial Sequence
  Description of Artificial Sequence: Synthetic peptide
  XENP018808 vhCDR1
NYWMN

SEQ ID NO: 9054 - protein, 19 aa, Artificial Sequence
  Description of Artificial Sequence: Synthetic peptide
  XENP018808 vhCDR2
EIRLKSNNYATHYAEPVKG

SEQ ID NO: 9055 - protein, 11 aa, Artificial Sequence
  Description of Artificial Sequence: Synthetic peptide
  XENP018808 vhCDR3
YYGNYGGYFDV

SEQ ID NO: 9056 - protein, 11 aa, Artificial Sequence
  Description of Artificial Sequence: Synthetic peptide
  XENP018808 vlCDR1
RASQSVSNDVA

SEQ ID NO: 9057 - protein, 7 aa, Artificial Sequence
  Description of Artificial Sequence: Synthetic peptide
  XENP018808 vlCDR2
DASHRYT

SEQ ID NO: 9058 - protein, 9 aa, Artificial Sequence
  Description of Artificial Sequence: Synthetic peptide
  XENP018808 vlCDR3
QQDYSSPRT

SEQ ID NO: 9059 - protein, 249 aa, Artificial Sequence
  Description of Artificial Sequence: Synthetic polypeptide
  XENP018809 1G6_H1_L1.63_scFv(GKPGS)4
EVQLVESGGGLVKPGGSLRLSCAASGFTFSNYWMNWVRQAPGKGLEWVGEIRLKSNNYATHYAEPVKGRFTISRDDSKSTVYLQMNSLKTEDTAVYYCTRYYGNYGGYFDVWGAGTLVTVSSGKPGSGKPGSGKPGSGKPGSSIVMTQSPATLSVSPGERATLSCRASQSVSNDVAWYQQKPGQSPRLLINKASHRYTGVPDRFTGSGYGTEFTLTISSLQSEDFAVYFCQQDYSSPRTFGGGTKVEIK

SEQ ID NO: 9060 - protein, 122 aa, Artificial Sequence; identical to SEQ ID NO: 6246
  Description of Artificial Sequence: Synthetic polypeptide
  VH of XENP018809

SEQ ID NO: 9061 - protein, 107 aa, Artificial Sequence
  Description of Artificial Sequence: Synthetic polypeptide
  VL of XENP018809
SIVMTQSPATLSVSPGERATLSCRASQSVSNDVAWYQQKPGQSPRLLINKASHRYTGVPDRFTGSGYGTEFTLTISSLQSEDFAVYFCQQDYSSPRTFGGGTKVEIK

SEQ ID NO: 9062 - protein, 5 aa, Artificial Sequence
  Description of Artificial Sequence: Synthetic peptide
  XENP018809 vhCDR1
NYWMN

SEQ ID NO: 9063 - protein, 19 aa, Artificial Sequence
  Description of Artificial Sequence: Synthetic peptide
  XENP018809 vhCDR2
EIRLKSNNYATHYAEPVKG

SEQ ID NO: 9064 - protein, 11 aa, Artificial Sequence
  Description of Artificial Sequence: Synthetic peptide
  XENP018809 vhCDR3
YYGNYGGYFDV

SEQ ID NO: 9065 - protein, 11 aa, Artificial Sequence
  Description of Artificial Sequence: Synthetic peptide
  XENP018809 vlCDR1
RASQSVSNDVA

SEQ ID NO: 9066 - protein, 7 aa, Artificial Sequence
  Description of Artificial Sequence: Synthetic peptide
  XENP018809 vlCDR2
KASHRYT

SEQ ID NO: 9067 - protein, 9 aa, Artificial Sequence
  Description of Artificial Sequence: Synthetic peptide
  XENP018809 vlCDR3
QQDYSSPRT

SEQ ID NO: 9068 - protein, 249 aa, Artificial Sequence
  Description of Artificial Sequence: Synthetic polypeptide
  XENP018810 1G6_H1_L1.64_scFv(GKPGS)4
EVQLVESGGGLVKPGGSLRLSCAASGFTFSNYWMNWVRQAPGKGLEWVGEIRLKSNNYATHYAEPVKGRFTISRDDSKSTVYLQMNSLKTEDTAVYYCTRYYGNYGGYFDVWGAGTLVTVSSGKPGSGKPGSGKPGSGKPGSSIVMTQSPATLSVSPGERATLSCRASQSVSNDVAWYQQKPGQSPRLLINYASYRYTGVPDRFTGSGYGTEFTLTISSLQSEDFAVYFCQQDYSSPRTFGGGTKVEIK

SEQ ID NO: 9069 - protein, 122 aa, Artificial Sequence; identical to SEQ ID NO: 6246
  Description of Artificial Sequence: Synthetic polypeptide
  VH of XENP018810

SEQ ID NO: 9070 - protein, 107 aa, Artificial Sequence
  Description of Artificial Sequence: Synthetic polypeptide
  VL of XENP018810
SIVMTQSPATLSVSPGERATLSCRASQSVSNDVAWYQQKPGQSPRLLINYASYRYTGVPDRFTGSGYGTEFTLTISSLQSEDFAVYFCQQDYSSPRTFGGGTKVEIK

SEQ ID NO: 9071 - protein, 5 aa, Artificial Sequence
  Description of Artificial Sequence: Synthetic peptide
  XENP018810 vhCDR1
NYWMN

SEQ ID NO: 9072 - protein, 19 aa, Artificial Sequence
  Description of Artificial Sequence: Synthetic peptide
  XENP018810 vhCDR2
EIRLKSNNYATHYAEPVKG

SEQ ID NO: 9073 - protein, 11 aa, Artificial Sequence
  Description of Artificial Sequence: Synthetic peptide
  XENP018810 vhCDR3
YYGNYGGYFDV

SEQ ID NO: 9074 - protein, 11 aa, Artificial Sequence
  Description of Artificial Sequence: Synthetic peptide
  XENP018810 vlCDR1
RASQSVSNDVA

SEQ ID NO: 9075 - protein, 7 aa, Artificial Sequence
  Description of Artificial Sequence: Synthetic peptide
  XENP018810 vlCDR2
YASYRYT

SEQ ID NO: 9076 - protein, 9 aa, Artificial Sequence
  Description of Artificial Sequence: Synthetic peptide
  XENP018810 vlCDR3
QQDYSSPRT

SEQ ID NO: 9077 - protein, 249 aa, Artificial Sequence
  Description of Artificial Sequence: Synthetic polypeptide
  XENP018811 1G6_H1_L1.65_scFv(GKPGS)4
EVQLVESGGGLVKPGGSLRLSCAASGFTFSNYWMNWVRQAPGKGLEWVGEIRLKSNNYATHYAEPVKGRFTISRDDSKSTVYLQMNSLKTEDTAVYYCTRYYGNYGGYFDVWGAGTLVTVSSGKPGSGKPGSGKPGSGKPGSSIVMTQSPATLSVSPGERATLSCRASQSVSNDVAWYQQKPGQSPRLLINYASQRYTGVPDRFTGSGYGTEFTLTISSLQSEDFAVYFCQQDYSSPRTFGGGTKVEIK

SEQ ID NO: 9078 - protein, 122 aa, Artificial Sequence; identical to SEQ ID NO: 6246
  Description of Artificial Sequence: Synthetic polypeptide
  VH of XENP018811

SEQ ID NO: 9079 - protein, 107 aa, Artificial Sequence
  Description of Artificial Sequence: Synthetic polypeptide
  VL of XENP018811
SIVMTQSPATLSVSPGERATLSCRASQSVSNDVAWYQQKPGQSPRLLINYASQRYTGVPDRFTGSGYGTEFTLTISSLQSEDFAVYFCQQDYSSPRTFGGGTKVEIK

SEQ ID NO: 9080 - protein, 5 aa, Artificial Sequence
  Description of Artificial Sequence: Synthetic peptide
  XENP018811 vhCDR1
NYWMN

SEQ ID NO: 9081 - protein, 19 aa, Artificial Sequence
  Description of Artificial Sequence: Synthetic peptide
  XENP018811 vhCDR2
EIRLKSNNYATHYAEPVKG

SEQ ID NO: 9082 - protein, 11 aa, Artificial Sequence
  Description of Artificial Sequence: Synthetic peptide
  XENP018811 vhCDR3
YYGNYGGYFDV

SEQ ID NO: 9083 - protein, 11 aa, Artificial Sequence
  Description of Artificial Sequence: Synthetic peptide
  XENP018811 vlCDR1
RASQSVSNDVA

SEQ ID NO: 9084 - protein, 7 aa, Artificial Sequence
  Description of Artificial Sequence: Synthetic peptide
  XENP018811 vlCDR2
YASQRYT

SEQ ID NO: 9085 - protein, 9 aa, Artificial Sequence
  Description of Artificial Sequence: Synthetic peptide
  XENP018811 vlCDR3
QQDYSSPRT

SEQ ID NO: 9086 - protein, 249 aa, Artificial Sequence
  Description of Artificial Sequence: Synthetic polypeptide
  XENP018812 1G6_H1_L1.66_scFv(GKPGS)4
EVQLVESGGGLVKPGGSLRLSCAASGFTFSNYWMNWVRQAPGKGLEWVGEIRLKSNNYATHYAEPVKGRFTISRDDSKSTVYLQMNSLKTEDTAVYYCTRYYGNYGGYFDVWGAGTLVTVSSGKPGSGKPGSGKPGSGKPGSSIVMTQSPATLSVSPGERATLSCRASQSVSNDVAWYQQKPGQSPRLLINYASDRYTGVPDRFTGSGYGTEFTLTISSLQSEDFAVYFCQQDYSSPRTFGGGTKVEIK

SEQ ID NO: 9087 - protein, 122 aa, Artificial Sequence; identical to SEQ ID NO: 6246
  Description of Artificial Sequence: Synthetic polypeptide
  VH of XENP018812

SEQ ID NO: 9088 - protein, 107 aa, Artificial Sequence
  Description of Artificial Sequence: Synthetic polypeptide
  VL of XENP018812
SIVMTQSPATLSVSPGERATLSCRASQSVSNDVAWYQQKPGQSPRLLINYASDRYTGVPDRFTGSGYGTEFTLTISSLQSEDFAVYFCQQDYSSPRTFGGGTKVEIK

SEQ ID NO: 9089 - protein, 5 aa, Artificial Sequence
  Description of Artificial Sequence: Synthetic peptide
  XENP018812 vhCDR1
NYWMN

SEQ ID NO: 9090 - protein, 19 aa, Artificial Sequence
  Description of Artificial Sequence: Synthetic peptide
  XENP018812 vhCDR2
EIRLKSNNYATHYAEPVKG

SEQ ID NO: 9091 - protein, 11 aa, Artificial Sequence
  Description of Artificial Sequence: Synthetic peptide
  XENP018812 vhCDR3
YYGNYGGYFDV

SEQ ID NO: 9092 - protein, 11 aa, Artificial Sequence
  Description of Artificial Sequence: Synthetic peptide
  XENP018812 vlCDR1
RASQSVSNDVA

SEQ ID NO: 9093 - protein, 7 aa, Artificial Sequence
  Description of Artificial Sequence: Synthetic peptide
  XENP018812 vlCDR2
YASDRYT

SEQ ID NO: 9094 - protein, 9 aa, Artificial Sequence
  Description of Artificial Sequence: Synthetic peptide
  XENP018812 vlCDR3
QQDYSSPRT

SEQ ID NO: 9095 - protein, 249 aa, Artificial Sequence
  Description of Artificial Sequence: Synthetic polypeptide
  XENP018813 1G6_H1_L1.67_scFv(GKPGS)4
EVQLVESGGGLVKPGGSLRLSCAASGFTFSNYWMNWVRQAPGKGLEWVGEIRLKSNNYATHYAEPVKGRFTISRDDSKSTVYLQMNSLKTEDTAVYYCTRYYGNYGGYFDVWGAGTLVTVSSGKPGSGKPGSGKPGSGKPGSSIVMTQSPATLSVSPGERATLSCRASQSVSNDVAWYQQKPGQSPRLLINYASWRYTGVPDRFTGSGYGTEFTLTISSLQSEDFAVYFCQQDYSSPRTFGGGTKVEIK

SEQ ID NO: 9096 - protein, 122 aa, Artificial Sequence; identical to SEQ ID NO: 6246
  Description of Artificial Sequence: Synthetic polypeptide
  VH of XENP018813

SEQ ID NO: 9097 - protein, 107 aa, Artificial Sequence
  Description of Artificial Sequence: Synthetic polypeptide
  VL of XENP018813
SIVMTQSPATLSVSPGERATLSCRASQSVSNDVAWYQQKPGQSPRLLINYASWRYTGVPDRFTGSGYGTEFTLTISSLQSEDFAVYFCQQDYSSPRTFGGGTKVEIK

SEQ ID NO: 9098 - protein, 5 aa, Artificial Sequence
  Description of Artificial Sequence: Synthetic peptide
  XENP018813 vhCDR1
NYWMN

SEQ ID NO: 9099 - protein, 19 aa, Artificial Sequence
  Description of Artificial Sequence: Synthetic peptide
  XENP018813 vhCDR2
EIRLKSNNYATHYAEPVKG

SEQ ID NO: 9100 - protein, 11 aa, Artificial Sequence
  Description of Artificial Sequence: Synthetic peptide
  XENP018813 vhCDR3
YYGNYGGYFDV

SEQ ID NO: 9101 - protein, 11 aa, Artificial Sequence
  Description of Artificial Sequence: Synthetic peptide
  XENP018813 vlCDR1
RASQSVSNDVA

SEQ ID NO: 9102 - protein, 7 aa, Artificial Sequence
  Description of Artificial Sequence: Synthetic peptide
  XENP018813 vlCDR2
YASWRYT

SEQ ID NO: 9103 - protein, 9 aa, Artificial Sequence
  Description of Artificial Sequence: Synthetic peptide
  XENP018813 vlCDR3
QQDYSSPRT

SEQ ID NO: 9104 - protein, 249 aa, Artificial Sequence
  Description of Artificial Sequence: Synthetic polypeptide
  XENP018814 1G6_H1_L1.68_scFv(GKPGS)4
EVQLVESGGGLVKPGGSLRLSCAASGFTFSNYWMNWVRQAPGKGLEWVGEIRLKSNNYATHYAEPVKGRFTISRDDSKSTVYLQMNSLKTEDTAVYYCTRYYGNYGGYFDVWGAGTLVTVSSGKPGSGKPGSGKPGSGKPGSSIVMTQSPATLSVSPGERATLSCRASQSVSNDVAWYQQKPGQSPRLLINYASARYTGVPDRFTGSGYGTEFTLTISSLQSEDFAVYFCQQDYSSPRTFGGGTKVEIK

SEQ ID NO: 9105 - protein, 122 aa, Artificial Sequence; identical to SEQ ID NO: 6246
  Description of Artificial Sequence: Synthetic polypeptide
  VH of XENP018814

SEQ ID NO: 9106 - protein, 107 aa, Artificial Sequence
  Description of Artificial Sequence: Synthetic polypeptide
  VL of XENP018814
SIVMTQSPATLSVSPGERATLSCRASQSVSNDVAWYQQKPGQSPRLLINYASARYTGVPDRFTGSGYGTEFTLTISSLQSEDFAVYFCQQDYSSPRTFGGGTKVEIK

SEQ ID NO: 9107 - protein, 5 aa, Artificial Sequence
  Description of Artificial Sequence: Synthetic peptide
  XENP018814 vhCDR1
NYWMN

SEQ ID NO: 9108 - protein, 19 aa, Artificial Sequence
  Description of Artificial Sequence: Synthetic peptide
  XENP018814 vhCDR2
EIRLKSNNYATHYAEPVKG

SEQ ID NO: 9109 - protein, 11 aa, Artificial Sequence
  Description of Artificial Sequence: Synthetic peptide
  XENP018814 vhCDR3
YYGNYGGYFDV

SEQ ID NO: 9110 - protein, 11 aa, Artificial Sequence
  Description of Artificial Sequence: Synthetic peptide
  XENP018814 vlCDR1
RASQSVSNDVA

SEQ ID NO: 9111 - protein, 7 aa, Artificial Sequence
  Description of Artificial Sequence: Synthetic peptide
  XENP018814 vlCDR2
YASARYT

SEQ ID NO: 9112 - protein, 9 aa, Artificial Sequence
  Description of Artificial Sequence: Synthetic peptide
  XENP018814 vlCDR3
QQDYSSPRT

SEQ ID NO: 9113 - protein, 249 aa, Artificial Sequence
  Description of Artificial Sequence: Synthetic polypeptide
  XENP018815 1G6_H1_L1.69_scFv(GKPGS)4
EVQLVESGGGLVKPGGSLRLSCAASGFTFSNYWMNWVRQAPGKGLEWVGEIRLKSNNYATHYAEPVKGRFTISRDDSKSTVYLQMNSLKTEDTAVYYCTRYYGNYGGYFDVWGAGTLVTVSSGKPGSGKPGSGKPGSGKPGSSIVMTQSPATLSVSPGERATLSCRASQSVSNDVAWYQQKPGQSPRLLINYASTRYTGVPDRFTGSGYGTEFTLTISSLQSEDFAVYFCQQDYSSPRTFGGGTKVEIK

SEQ ID NO: 9114 - protein, 122 aa, Artificial Sequence; identical to SEQ ID NO: 6246
  Description of Artificial Sequence: Synthetic polypeptide
  VH of XENP018815

SEQ ID NO: 9115 - protein, 107 aa, Artificial Sequence
  Description of Artificial Sequence: Synthetic polypeptide
  VL of XENP018815
SIVMTQSPATLSVSPGERATLSCRASQSVSNDVAWYQQKPGQSPRLLINYASTRYTGVPDRFTGSGYGTEFTLTISSLQSEDFAVYFCQQDYSSPRTFGGGTKVEIK

SEQ ID NO: 9116 - protein, 5 aa, Artificial Sequence
  Description of Artificial Sequence: Synthetic peptide
  XENP018815 vhCDR1
NYWMN

SEQ ID NO: 9117 - protein, 19 aa, Artificial Sequence
  Description of Artificial Sequence: Synthetic peptide
  XENP018815 vhCDR2
EIRLKSNNYATHYAEPVKG

SEQ ID NO: 9118 - protein, 11 aa, Artificial Sequence
  Description of Artificial Sequence: Synthetic peptide
  XENP018815 vhCDR3
YYGNYGGYFDV

SEQ ID NO: 9119 - protein, 11 aa, Artificial Sequence
  Description of Artificial Sequence: Synthetic peptide
  XENP018815 vlCDR1
RASQSVSNDVA

SEQ ID NO: 9120 - protein, 7 aa, Artificial Sequence
  Description of Artificial Sequence: Synthetic peptide
  XENP018815 vlCDR2
YASTRYT

SEQ ID NO: 9121 - protein, 9 aa, Artificial Sequence
  Description of Artificial Sequence: Synthetic peptide
  XENP018815 vlCDR3
QQDYSSPRT

SEQ ID NO: 9122 - protein, 249 aa, Artificial Sequence
  Description of Artificial Sequence: Synthetic polypeptide
  XENP018816 1G6_H1_L1.70_scFv(GKPGS)4
EVQLVESGGGLVKPGGSLRLSCAASGFTFSNYWMNWVRQAPGKGLEWVGEIRLKSNNYATHYAEPVKGRFTISRDDSKSTVYLQMNSLKTEDTAVYYCTRYYGNYGGYFDVWGAGTLVTVSSGKPGSGKPGSGKPGSGKPGSSIVMTQSPATLSVSPGERATLSCRASQSVSNDVAWYQQKPGQSPRLLINYASKRYTGVPDRFTGSGYGTEFTLTISSLQSEDFAVYFCQQDYSSPRTFGGGTKVEIK

SEQ ID NO: 9123 - protein, 122 aa, Artificial Sequence; identical to SEQ ID NO: 6246
  Description of Artificial Sequence: Synthetic polypeptide
  VH of XENP018816

SEQ ID NO: 9124 - protein, 107 aa, Artificial Sequence
  Description of Artificial Sequence: Synthetic polypeptide
  VL of XENP018816
SIVMTQSPATLSVSPGERATLSCRASQSVSNDVAWYQQKPGQSPRLLINYASKRYTGVPDRFTGSGYGTEFTLTISSLQSEDFAVYFCQQDYSSPRTFGGGTKVEIK

SEQ ID NO: 9125 - protein, 5 aa, Artificial Sequence
  Description of Artificial Sequence: Synthetic peptide
  XENP018816 vhCDR1
NYWMN

SEQ ID NO: 9126 - protein, 19 aa, Artificial Sequence
  Description of Artificial Sequence: Synthetic peptide
  XENP018816 vhCDR2
EIRLKSNNYATHYAEPVKG

SEQ ID NO: 9127 - protein, 11 aa, Artificial Sequence
  Description of Artificial Sequence: Synthetic peptide
  XENP018816 vhCDR3
YYGNYGGYFDV

SEQ ID NO: 9128 - protein, 11 aa, Artificial Sequence
  Description of Artificial Sequence: Synthetic peptide
  XENP018816 vlCDR1
RASQSVSNDVA

SEQ ID NO: 9129 - protein, 7 aa, Artificial Sequence
  Description of Artificial Sequence: Synthetic peptide
  XENP018816 vlCDR2
YASKRYT

SEQ ID NO: 9130 - protein, 9 aa, Artificial Sequence
  Description of Artificial Sequence: Synthetic peptide
  XENP018816 vlCDR3
QQDYSSPRT

SEQ ID NO: 9131 - protein, 249 aa, Artificial Sequence
  Description of Artificial Sequence: Synthetic polypeptide
  XENP018817 1G6_H1_L1.71_scFv(GKPGS)4
EVQLVESGGGLVKPGGSLRLSCAASGFTFSNYWMNWVRQAPGKGLEWVGEIRLKSNNYATHYAEPVKGRFTISRDDSKSTVYLQMNSLKTEDTAVYYCTRYYGNYGGYFDVWGAGTLVTVSSGKPGSGKPGSGKPGSGKPGSSIVMTQSPATLSVSPGERATLSCRASQSVSNDVAWYQQKPGQSPRLLINYASGRYTGVPDRFTGSGYGTEFTLTISSLQSEDFAVYFCQQDYSSPRTFGGGTKVEIK

SEQ ID NO: 9132 - protein, 122 aa, Artificial Sequence; identical to SEQ ID NO: 6246
  Description of Artificial Sequence: Synthetic polypeptide
  VH of XENP018817

SEQ ID NO: 9133 - protein, 107 aa, Artificial Sequence
  Description of Artificial Sequence: Synthetic polypeptide
  VL of XENP018817
SIVMTQSPATLSVSPGERATLSCRASQSVSNDVAWYQQKPGQSPRLLINYASGRYTGVPDRFTGSGYGTEFTLTISSLQSEDFAVYFCQQDYSSPRTFGGGTKVEIK

SEQ ID NO: 9134 - protein, 5 aa, Artificial Sequence
  Description of Artificial Sequence: Synthetic peptide
  XENP018817 vhCDR1
NYWMN

SEQ ID NO: 9135 - protein, 19 aa, Artificial Sequence
  Description of Artificial Sequence: Synthetic peptide
  XENP018817 vhCDR2
EIRLKSNNYATHYAEPVKG

SEQ ID NO: 9136 - protein, 11 aa, Artificial Sequence
  Description of Artificial Sequence: Synthetic peptide
  XENP018817 vhCDR3
YYGNYGGYFDV

SEQ ID NO: 9137 - protein, 11 aa, Artificial Sequence
  Description of Artificial Sequence: Synthetic peptide
  XENP018817 vlCDR1
RASQSVSNDVA

SEQ ID NO: 9138 - protein, 7 aa, Artificial Sequence
  Description of Artificial Sequence: Synthetic peptide
  XENP018817 vlCDR2
YASGRYT

SEQ ID NO: 9139 - protein, 9 aa, Artificial Sequence
  Description of Artificial Sequence: Synthetic peptide
  XENP018817 vlCDR3
QQDYSSPRT

SEQ ID NO: 9140 - protein, 249 aa, Artificial Sequence
  Description of Artificial Sequence: Synthetic polypeptide
  XENP018818 1G6_H1_L1.72_scFv(GKPGS)4
EVQLVESGGGLVKPGGSLRLSCAASGFTFSNYWMNWVRQAPGKGLEWVGEIRLKSNNYATHYAEPVKGRFTISRDDSKSTVYLQMNSLKTEDTAVYYCTRYYGNYGGYFDVWGAGTLVTVSSGKPGSGKPGSGKPGSGKPGSSIVMTQSPATLSVSPGERATLSCRASQSVSNDVAWYQQKPGQSPRLLINYASLRYTGVPDRFTGSGYGTEFTLTISSLQSEDFAVYFCQQDYSSPRTFGGGTKVEIK

SEQ ID NO: 9141 - protein, 122 aa, Artificial Sequence; identical to SEQ ID NO: 6246
  Description of Artificial Sequence: Synthetic polypeptide
  VH of XENP018818

SEQ ID NO: 9142 - protein, 107 aa, Artificial Sequence
  Description of Artificial Sequence: Synthetic polypeptide
  VL of XENP018818
SIVMTQSPATLSVSPGERATLSCRASQSVSNDVAWYQQKPGQSPRLLINYASLRYTGVPDRFTGSGYGTEFTLTISSLQSEDFAVYFCQQDYSSPRTFGGGTKVEIK

SEQ ID NO: 9143 - protein, 5 aa, Artificial Sequence
  Description of Artificial Sequence: Synthetic peptide
  XENP018818 vhCDR1
NYWMN

SEQ ID NO: 9144 - protein, 19 aa, Artificial Sequence
  Description of Artificial Sequence: Synthetic peptide
  XENP018818 vhCDR2
EIRLKSNNYATHYAEPVKG

SEQ ID NO: 9145 - protein, 11 aa, Artificial Sequence
  Description of Artificial Sequence: Synthetic peptide
  XENP018818 vhCDR3
YYGNYGGYFDV

SEQ ID NO: 9146 - protein, 11 aa, Artificial Sequence
  Description of Artificial Sequence: Synthetic peptide
  XENP018818 vlCDR1
RASQSVSNDVA

SEQ ID NO: 9147 - protein, 7 aa, Artificial Sequence
  Description of Artificial Sequence: Synthetic peptide
  XENP018818 vlCDR2
YASLRYT

SEQ ID NO: 9148 - protein, 9 aa, Artificial Sequence
  Description of Artificial Sequence: Synthetic peptide
  XENP018818 vlCDR3
QQDYSSPRT

SEQ ID NO: 9149 - protein, 249 aa, Artificial Sequence
  Description of Artificial Sequence: Synthetic polypeptide
  XENP018819 1G6_H1_L1.73_scFv(GKPGS)4
EVQLVESGGGLVKPGGSLRLSCAASGFTFSNYWMNWVRQAPGKGLEWVGEIRLKSNNYATHYAEPVKGRFTISRDDSKSTVYLQMNSLKTEDTAVYYCTRYYGNYGGYFDVWGAGTLVTVSSGKPGSGKPGSGKPGSGKPGSSIVMTQSPATLSVSPGERATLSCRASQSVSNDVAWYQQKPGQSPRLLINYASHLYTGVPDRFTGSGYGTEFTLTISSLQSEDFAVYFCQQDYSSPRTFGGGTKVEIK

SEQ ID NO: 9150 - protein, 122 aa, Artificial Sequence; identical to SEQ ID NO: 6246
  Description of Artificial Sequence: Synthetic polypeptide
  VH of XENP018819

SEQ ID NO: 9151 - protein, 107 aa, Artificial Sequence
  Description of Artificial Sequence: Synthetic polypeptide
  VL of XENP018819
SIVMTQSPATLSVSPGERATLSCRASQSVSNDVAWYQQKPGQSPRLLINYASHLYTGVPDRFTGSGYGTEFTLTISSLQSEDFAVYFCQQDYSSPRTFGGGTKVEIK

SEQ ID NO: 9152 - protein, 5 aa, Artificial Sequence
  Description of Artificial Sequence: Synthetic peptide
  XENP018819 vhCDR1
NYWMN

SEQ ID NO: 9153 - protein, 19 aa, Artificial Sequence
  Description of Artificial Sequence: Synthetic peptide
  XENP018819 vhCDR2
EIRLKSNNYATHYAEPVKG

SEQ ID NO: 9154 - protein, 11 aa, Artificial Sequence
  Description of Artificial Sequence: Synthetic peptide
  XENP018819 vhCDR3
YYGNYGGYFDV

SEQ ID NO: 9155 - protein, 11 aa, Artificial Sequence
  Description of Artificial Sequence: Synthetic peptide
  XENP018819 vlCDR1
RASQSVSNDVA

SEQ ID NO: 9156 - protein, 7 aa, Artificial Sequence
  Description of Artificial Sequence: Synthetic peptide
  XENP018819 vlCDR2
YASHLYT

SEQ ID NO: 9157 - protein, 9 aa, Artificial Sequence
  Description of Artificial Sequence: Synthetic peptide
  XENP018819 vlCDR3
QQDYSSPRT

SEQ ID NO: 9158 - protein, 249 aa, Artificial Sequence
  Description of Artificial Sequence: Synthetic polypeptide
  XENP018820 1G6_H1_L1.74_scFv(GKPGS)4
EVQLVESGGGLVKPGGSLRLSCAASGFTFSNYWMNWVRQAPGKGLEWVGEIRLKSNNYATHYAEPVKGRFTISRDDSKSTVYLQMNSLKTEDTAVYYCTRYYGNYGGYFDVWGAGTLVTVSSGKPGSGKPGSGKPGSGKPGSSIVMTQSPATLSVSPGERATLSCRASQSVSNDVAWYQQKPGQSPRLLINYASHWYTGVPDRFTGSGYGTEFTLTISSLQSEDFAVYFCQQDYSSPRTFGGGTKVEIK

SEQ ID NO: 9159 - protein, 122 aa, Artificial Sequence; identical to SEQ ID NO: 6246
  Description of Artificial Sequence: Synthetic polypeptide
  VH of XENP018820

SEQ ID NO: 9160 - protein, 107 aa, Artificial Sequence
  Description of Artificial Sequence: Synthetic polypeptide
  VL of XENP018820
SIVMTQSPATLSVSPGERATLSCRASQSVSNDVAWYQQKPGQSPRLLINYASHWYTGVPDRFTGSGYGTEFTLTISSLQSEDFAVYFCQQDYSSPRTFGGGTKVEIK

SEQ ID NO: 9161 - protein, 5 aa, Artificial Sequence
  Description of Artificial Sequence: Synthetic peptide
  XENP018820 vhCDR1
NYWMN

SEQ ID NO: 9162 - protein, 19 aa, Artificial Sequence
  Description of Artificial Sequence: Synthetic peptide
  XENP018820 vhCDR2
EIRLKSNNYATHYAEPVKG

SEQ ID NO: 9163 - protein, 11 aa, Artificial Sequence
  Description of Artificial Sequence: Synthetic peptide
  XENP018820 vhCDR3
YYGNYGGYFDV

SEQ ID NO: 9164 - protein, 11 aa, Artificial Sequence
  Description of Artificial Sequence: Synthetic peptide
  XENP018820 vlCDR1
RASQSVSNDVA

SEQ ID NO: 9165 - protein, 7 aa, Artificial Sequence
  Description of Artificial Sequence: Synthetic peptide
  XENP018820 vlCDR2
YASHWYT

SEQ ID NO: 9166 - protein, 9 aa, Artificial Sequence
  Description of Artificial Sequence: Synthetic peptide
  XENP018820 vlCDR3
QQDYSSPRT

SEQ ID NO: 9167 - protein, 249 aa, Artificial Sequence
  Description of Artificial Sequence: Synthetic polypeptide
  XENP018821 1G6_H1_L1.75_scFv(GKPGS)4
EVQLVESGGGLVKPGGSLRLSCAASGFTFSNYWMNWVRQAPGKGLEWVGEIRLKSNNYATHYAEPVKGRFTISRDDSKSTVYLQMNSLKTEDTAVYYCTRYYGNYGGYFDVWGAGTLVTVSSGKPGSGKPGSGKPGSGKPGSSIVMTQSPATLSVSPGERATLSCRASQSVSNDVAWYQQKPGQSPRLLINYASHSYTGVPDRFTGSGYGTEFTLTISSLQSEDFAVYFCQQDYSSPRTFGGGTKVEIK

SEQ ID NO: 9168 - protein, 122 aa, Artificial Sequence; identical to SEQ ID NO: 6246
  Description of Artificial Sequence: Synthetic polypeptide
  VH of XENP018821

SEQ ID NO: 9169 - protein, 107 aa, Artificial Sequence
  Description of Artificial Sequence: Synthetic polypeptide
  VL of XENP018821
SIVMTQSPATLSVSPGERATLSCRASQSVSNDVAWYQQKPGQSPRLLINYASHSYTGVPDRFTGSGYGTEFTLTISSLQSEDFAVYFCQQDYSSPRTFGGGTKVEIK

SEQ ID NO: 9170 - protein, 5 aa, Artificial Sequence
  Description of Artificial Sequence: Synthetic peptide
  XENP018821 vhCDR1
NYWMN

SEQ ID NO: 9171 - protein, 19 aa, Artificial Sequence
  Description of Artificial Sequence: Synthetic peptide
  XENP018821 vhCDR2
EIRLKSNNYATHYAEPVKG

SEQ ID NO: 9172 - protein, 11 aa, Artificial Sequence
  Description of Artificial Sequence: Synthetic peptide
  XENP018821 vhCDR3
YYGNYGGYFDV

SEQ ID NO: 9173 - protein, 11 aa, Artificial Sequence
  Description of Artificial Sequence: Synthetic peptide
  XENP018821 vlCDR1
RASQSVSNDVA

SEQ ID NO: 9174 - protein, 7 aa, Artificial Sequence
  Description of Artificial Sequence: Synthetic peptide
  XENP018821 vlCDR2
YASHSYT

SEQ ID NO: 9175 - protein, 9 aa, Artificial Sequence
  Description of Artificial Sequence: Synthetic peptide
  XENP018821 vlCDR3
QQDYSSPRT

SEQ ID NO: 9176 - protein, 249 aa, Artificial Sequence
  Description of Artificial Sequence: Synthetic polypeptide
  XENP018822 1G6_H1_L1.76_scFv(GKPGS)4
EVQLVESGGGLVKPGGSLRLSCAASGFTFSNYWMNWVRQAPGKGLEWVGEIRLKSNNYATHYAEPVKGRFTISRDDSKSTVYLQMNSLKTEDTAVYYCTRYYGNYGGYFDVWGAGTLVTVSSGKPGSGKPGSGKPGSGKPGSSIVMTQSPATLSVSPGERATLSCRASQSVSNDVAWYQQKPGQSPRLLINYASHRFTGVPDRFTGSGYGTEFTLTISSLQSEDFAVYFCQQDYSSPRTFGGGTKVEIK

SEQ ID NO: 9177 - protein, 122 aa, Artificial Sequence; identical to SEQ ID NO: 6246
  Description of Artificial Sequence: Synthetic polypeptide
  VH of XENP018822

SEQ ID NO: 9178 - protein, 107 aa, Artificial Sequence
  Description of Artificial Sequence: Synthetic polypeptide
  VL of XENP018822
SIVMTQSPATLSVSPGERATLSCRASQSVSNDVAWYQQKPGQSPRLLINYASHRFTGVPDRFTGSGYGTEFTLTISSLQSEDFAVYFCQQDYSSPRTFGGGTKVEIK

SEQ ID NO: 9179 - protein, 5 aa, Artificial Sequence
  Description of Artificial Sequence: Synthetic peptide
  XENP018822 vhCDR1
NYWMN

SEQ ID NO: 9180 - protein, 19 aa, Artificial Sequence
  Description of Artificial Sequence: Synthetic peptide
  XENP018822 vhCDR2
EIRLKSNNYATHYAEPVKG

SEQ ID NO: 9181 - protein, 11 aa, Artificial Sequence
  Description of Artificial Sequence: Synthetic peptide
  XENP018822 vhCDR3
YYGNYGGYFDV

SEQ ID NO: 9182 - protein, 11 aa, Artificial Sequence
  Description of Artificial Sequence: Synthetic peptide
  XENP018822 vlCDR1
RASQSVSNDVA

SEQ ID NO: 9183 - protein, 7 aa, Artificial Sequence
  Description of Artificial Sequence: Synthetic peptide
  XENP018822 vlCDR2
YASHRFT

SEQ ID NO: 9184 - protein, 9 aa, Artificial Sequence
  Description of Artificial Sequence: Synthetic peptide
  XENP018822 vlCDR3
QQDYSSPRT

SEQ ID NO: 9185 - protein, 249 aa, Artificial Sequence
  Description of Artificial Sequence: Synthetic polypeptide
  XENP018823 1G6_H1_L1.77_scFv(GKPGS)4
EVQLVESGGGLVKPGGSLRLSCAASGFTFSNYWMNWVRQAPGKGLEWVGEIRLKSNNYATHYAEPVKGRFTISRDDSKSTVYLQMNSLKTEDTAVYYCTRYYGNYGGYFDVWGAGTLVTVSSGKPGSGKPGSGKPGSGKPGSSIVMTQSPATLSVSPGERATLSCRASQSVSNDVAWYQQKPGQSPRLLINYASHRHTGVPDRFTGSGYGTEFTLTISSLQSEDFAVYFCQQDYSSPRTFGGGTKVEIK

SEQ ID NO: 9186 - protein, 122 aa, Artificial Sequence; identical to SEQ ID NO: 6246
  Description of Artificial Sequence: Synthetic polypeptide
  VH of XENP018823

SEQ ID NO: 9187 - protein, 107 aa, Artificial Sequence
  Description of Artificial Sequence: Synthetic polypeptide
  VL of XENP018823
SIVMTQSPATLSVSPGERATLSCRASQSVSNDVAWYQQKPGQSPRLLINYASHRHTGVPDRFTGSGYGTEFTLTISSLQSEDFAVYFCQQDYSSPRTFGGGTKVEIK

SEQ ID NO: 9188 - protein, 5 aa, Artificial Sequence
  Description of Artificial Sequence: Synthetic peptide
  XENP018823 vhCDR1
NYWMN

SEQ ID NO: 9189 - protein, 19 aa, Artificial Sequence
  Description of Artificial Sequence: Synthetic peptide
  XENP018823 vhCDR2
EIRLKSNNYATHYAEPVKG

SEQ ID NO: 9190 - protein, 11 aa, Artificial Sequence
  Description of Artificial Sequence: Synthetic peptide
  XENP018823 vhCDR3
YYGNYGGYFDV

SEQ ID NO: 9191 - protein, 11 aa, Artificial Sequence
  Description of Artificial Sequence: Synthetic peptide
  XENP018823 vlCDR1
RASQSVSNDVA

SEQ ID NO: 9192 - protein, 7 aa, Artificial Sequence
  Description of Artificial Sequence: Synthetic peptide
  XENP018823 vlCDR2
YASHRHT

SEQ ID NO: 9193 - protein, 9 aa, Artificial Sequence
  Description of Artificial Sequence: Synthetic peptide
  XENP018823 vlCDR3
QQDYSSPRT

SEQ ID NO: 9194 - protein, 249 aa, Artificial Sequence
  Description of Artificial Sequence: Synthetic polypeptide
  XENP018824 1G6_H1_L1.78_scFv(GKPGS)4
EVQLVESGGGLVKPGGSLRLSCAASGFTFSNYWMNWVRQAPGKGLEWVGEIRLKSNNYATHYAEPVKGRFTISRDDSKSTVYLQMNSLKTEDTAVYYCTRYYGNYGGYFDVWGAGTLVTVSSGKPGSGKPGSGKPGSGKPGSSIVMTQSPATLSVSPGERATLSCRASQSVSNDVAWYQQKPGQSPRLLINYASHRLTGVPDRFTGSGYGTEFTLTISSLQSEDFAVYFCQQDYSSPRTFGGGTKVEIK

SEQ ID NO: 9195 - protein, 122 aa, Artificial Sequence; identical to SEQ ID NO: 6246
  Description of Artificial Sequence: Synthetic polypeptide
  VH of XENP018824

SEQ ID NO: 9196 - protein, 107 aa, Artificial Sequence
  Description of Artificial Sequence: Synthetic polypeptide
  VL of XENP018824
SIVMTQSPATLSVSPGERATLSCRASQSVSNDVAWYQQKPGQSPRLLINYASHRLTGVPDRFTGSGYGTEFTLTISSLQSEDFAVYFCQQDYSSPRTFGGGTKVEIK

SEQ ID NO: 9197 - protein, 5 aa, Artificial Sequence
  Description of Artificial Sequence: Synthetic peptide
  XENP018824 vhCDR1
NYWMN

SEQ ID NO: 9198 - protein, 19 aa, Artificial Sequence
  Description of Artificial Sequence: Synthetic peptide
  XENP018824 vhCDR2
EIRLKSNNYATHYAEPVKG

SEQ ID NO: 9199 - protein, 11 aa, Artificial Sequence
  Description of Artificial Sequence: Synthetic peptide
  XENP018824 vhCDR3
YYGNYGGYFDV

SEQ ID NO: 9200 - protein, 11 aa, Artificial Sequence
  Description of Artificial Sequence: Synthetic peptide
  XENP018824 vlCDR1
RASQSVSNDVA

SEQ ID NO: 9201 - protein, 7 aa, Artificial Sequence
  Description of Artificial Sequence: Synthetic peptide
  XENP018824 vlCDR2
YASHRLT

SEQ ID NO: 9202 - protein, 9 aa, Artificial Sequence
  Description of Artificial Sequence: Synthetic peptide
  XENP018824 vlCDR3
QQDYSSPRT

SEQ ID NO: 9203 - protein, 249 aa, Artificial Sequence
  Description of Artificial Sequence: Synthetic polypeptide
  XENP018825 1G6_H1_L1.79_scFv(GKPGS)4
EVQLVESGGGLVKPGGSLRLSCAASGFTFSNYWMNWVRQAPGKGLEWVGEIRLKSNNYATHYAEPVKGRFTISRDDSKSTVYLQMNSLKTEDTAVYYCTRYYGNYGGYFDVWGAGTLVTVSSGKPGSGKPGSGKPGSGKPGSSIVMTQSPATLSVSPGERATLSCRASQSVSNDVAWYQQKPGQSPRLLINYASHRWTGVPDRFTGSGYGTEFTLTISSLQSEDFAVYFCQQDYSSPRTFGGGTKVEIK

SEQ ID NO: 9204 - protein, 122 aa, Artificial Sequence; identical to SEQ ID NO: 6246
  Description of Artificial Sequence: Synthetic polypeptide
  VH of XENP018825

SEQ ID NO: 9205 - protein, 107 aa, Artificial Sequence
  Description of Artificial Sequence: Synthetic polypeptide
  VL of XENP018825
SIVMTQSPATLSVSPGERATLSCRASQSVSNDVAWYQQKPGQSPRLLINYASHRWTGVPDRFTGSGYGTEFTLTISSLQSEDFAVYFCQQDYSSPRTFGGGTKVEIK

SEQ ID NO: 9206 - protein, 5 aa, Artificial Sequence
  Description of Artificial Sequence: Synthetic peptide
  XENP018825 vhCDR1
NYWMN

SEQ ID NO: 9207 - protein, 19 aa, Artificial Sequence
  Description of Artificial Sequence: Synthetic peptide
  XENP018825 vhCDR2
EIRLKSNNYATHYAEPVKG

SEQ ID NO: 9208 - protein, 11 aa, Artificial Sequence
  Description of Artificial Sequence: Synthetic peptide
  XENP018825 vhCDR3
YYGNYGGYFDV

SEQ ID NO: 9209 - protein, 11 aa, Artificial Sequence
  Description of Artificial Sequence: Synthetic peptide
  XENP018825 vlCDR1
RASQSVSNDVA

SEQ ID NO: 9210 - protein, 7 aa, Artificial Sequence
  Description of Artificial Sequence: Synthetic peptide
  XENP018825 vlCDR2
YASHRWT

SEQ ID NO: 9211 - protein, 9 aa, Artificial Sequence
  Description of Artificial Sequence: Synthetic peptide
  XENP018825 vlCDR3
QQDYSSPRT

SEQ ID NO: 9212 - protein, 249 aa, Artificial Sequence
  Description of Artificial Sequence: Synthetic polypeptide
  XENP018826 1G6_H1_L1.80_scFv(GKPGS)4
EVQLVESGGGLVKPGGSLRLSCAASGFTFSNYWMNWVRQAPGKGLEWVGEIRLKSNNYATHYAEPVKGRFTISRDDSKSTVYLQMNSLKTEDTAVYYCTRYYGNYGGYFDVWGAGTLVTVSSGKPGSGKPGSGKPGSGKPGSSIVMTQSPATLSVSPGERATLSCRASQSVSNDVAWYQQKPGQSPRLLINYASHRVTGVPDRFTGSGYGTEFTLTISSLQSEDFAVYFCQQDYSSPRTFGGGTKVEIK

SEQ ID NO: 9213 - protein, 122 aa, Artificial Sequence; identical to SEQ ID NO: 6246
  Description of Artificial Sequence: Synthetic polypeptide
  VH of XENP018826

SEQ ID NO: 9214 - protein, 107 aa, Artificial Sequence
  Description of Artificial Sequence: Synthetic polypeptide
  VL of XENP018826
SIVMTQSPATLSVSPGERATLSCRASQSVSNDVAWYQQKPGQSPRLLINYASHRVTGVPDRFTGSGYGTEFTLTISSLQSEDFAVYFCQQDYSSPRTFGGGTKVEIK

SEQ ID NO: 9215 - protein, 5 aa, Artificial Sequence
  Description of Artificial Sequence: Synthetic peptide
  XENP018826 vhCDR1
NYWMN

SEQ ID NO: 9216 - protein, 19 aa, Artificial Sequence
  Description of Artificial Sequence: Synthetic peptide
  XENP018826 vhCDR2
EIRLKSNNYATHYAEPVKG

SEQ ID NO: 9217 - protein, 11 aa, Artificial Sequence
  Description of Artificial Sequence: Synthetic peptide
  XENP018826 vhCDR3
YYGNYGGYFDV

SEQ ID NO: 9218 - protein, 11 aa, Artificial Sequence
  Description of Artificial Sequence: Synthetic peptide
  XENP018826 vlCDR1
RASQSVSNDVA

SEQ ID NO: 9219 - protein, 7 aa, Artificial Sequence
  Description of Artificial Sequence: Synthetic peptide
  XENP018826 vlCDR2
YASHRVT

SEQ ID NO: 9220 - protein, 9 aa, Artificial Sequence
  Description of Artificial Sequence: Synthetic peptide
  XENP018826 vlCDR3
QQDYSSPRT

SEQ ID NO: 9221 - protein, 249 aa, Artificial Sequence
  Description of Artificial Sequence: Synthetic polypeptide
  XENP018827 1G6_H1_L1.81_scFv(GKPGS)4
EVQLVESGGGLVKPGGSLRLSCAASGFTFSNYWMNWVRQAPGKGLEWVGEIRLKSNNYATHYAEPVKGRFTISRDDSKSTVYLQMNSLKTEDTAVYYCTRYYGNYGGYFDVWGAGTLVTVSSGKPGSGKPGSGKPGSGKPGSSIVMTQSPATLSVSPGERATLSCRASQSVSNDVAWYQQKPGQSPRLLINYASHRATGVPDRFTGSGYGTEFTLTISSLQSEDFAVYFCQQDYSSPRTFGGGTKVEIK

SEQ ID NO: 9222 - protein, 122 aa, Artificial Sequence; identical to SEQ ID NO: 6246
  Description of Artificial Sequence: Synthetic polypeptide
  VH of XENP018827

SEQ ID NO: 9223 - protein, 107 aa, Artificial Sequence
  Description of Artificial Sequence: Synthetic polypeptide
  VL of XENP018827
SIVMTQSPATLSVSPGERATLSCRASQSVSNDVAWYQQKPGQSPRLLINYASHRATGVPDRFTGSGYGTEFTLTISSLQSEDFAVYFCQQDYSSPRTFGGGTKVEIK

SEQ ID NO: 9224 - protein, 5 aa, Artificial Sequence
  Description of Artificial Sequence: Synthetic peptide
  XENP018827 vhCDR1
NYWMN

SEQ ID NO: 9225 - protein, 19 aa, Artificial Sequence
  Description of Artificial Sequence: Synthetic peptide
  XENP018827 vhCDR2
EIRLKSNNYATHYAEPVKG

SEQ ID NO: 9226 - protein, 11 aa, Artificial Sequence
  Description of Artificial Sequence: Synthetic peptide
  XENP018827 vhCDR3
YYGNYGGYFDV

SEQ ID NO: 9227 - protein, 11 aa, Artificial Sequence
  Description of Artificial Sequence: Synthetic peptide
  XENP018827 vlCDR1
RASQSVSNDVA

SEQ ID NO: 9228 - protein, 7 aa, Artificial Sequence
  Description of Artificial Sequence: Synthetic peptide
  XENP018827 vlCDR2
YASHRAT

SEQ ID NO: 9229 - protein, 9 aa, Artificial Sequence
  Description of Artificial Sequence: Synthetic peptide
  XENP018827 vlCDR3
QQDYSSPRT

SEQ ID NO: 9230 - protein, 249 aa, Artificial Sequence
  Description of Artificial Sequence: Synthetic polypeptide
  XENP018828 1G6_H1_L1.82_scFv(GKPGS)4
EVQLVESGGGLVKPGGSLRLSCAASGFTFSNYWMNWVRQAPGKGLEWVGEIRLKSNNYATHYAEPVKGRFTISRDDSKSTVYLQMNSLKTEDTAVYYCTRYYGNYGGYFDVWGAGTLVTVSSGKPGSGKPGSGKPGSGKPGSSIVMTQSPATLSVSPGERATLSCRASQSVSNDVAWYQQKPGQSPRLLINYASHRQTGVPDRFTGSGYGTEFTLTISSLQSEDFAVYFCQQDYSSPRTFGGGTKVEIK

SEQ ID NO: 9231 - protein, 122 aa, Artificial Sequence; identical to SEQ ID NO: 6246
  Description of Artificial Sequence: Synthetic polypeptide
  VH of XENP018828

SEQ ID NO: 9232 - protein, 107 aa, Artificial Sequence
  Description of Artificial Sequence: Synthetic polypeptide
  VL of XENP018828
SIVMTQSPATLSVSPGERATLSCRASQSVSNDVAWYQQKPGQSPRLLINYASHRQTGVPDRFTGSGYGTEFTLTISSLQSEDFAVYFCQQDYSSPRTFGGGTKVEIK

SEQ ID NO: 9233 - protein, 5 aa, Artificial Sequence
  Description of Artificial Sequence: Synthetic peptide
  XENP018828 vhCDR1
NYWMN

SEQ ID NO: 9234 - protein, 19 aa, Artificial Sequence
  Description of Artificial Sequence: Synthetic peptide
  XENP018828 vhCDR2
EIRLKSNNYATHYAEPVKG

SEQ ID NO: 9235 - protein, 11 aa, Artificial Sequence
  Description of Artificial Sequence: Synthetic peptide
  XENP018828 vhCDR3
YYGNYGGYFDV

SEQ ID NO: 9236 - protein, 11 aa, Artificial Sequence
  Description of Artificial Sequence: Synthetic peptide
  XENP018828 vlCDR1
RASQSVSNDVA

SEQ ID NO: 9237 - protein, 7 aa, Artificial Sequence
  Description of Artificial Sequence: Synthetic peptide
  XENP018828 vlCDR2
YASHRQT

SEQ ID NO: 9238 - protein, 9 aa, Artificial Sequence
  Description of Artificial Sequence: Synthetic peptide
  XENP018828 vlCDR3
QQDYSSPRT

SEQ ID NO: 9239 - protein, 249 aa, Artificial Sequence
  Description of Artificial Sequence: Synthetic polypeptide
  XENP018829 1G6_H1_L1.83_scFv(GKPGS)4
EVQLVESGGGLVKPGGSLRLSCAASGFTFSNYWMNWVRQAPGKGLEWVGEIRLKSNNYATHYAEPVKGRFTISRDDSKSTVYLQMNSLKTEDTAVYYCTRYYGNYGGYFDVWGAGTLVTVSSGKPGSGKPGSGKPGSGKPGSSIVMTQSPATLSVSPGERATLSCRASQSVSNDVAWYQQKPGQSPRLLINYASHRDTGVPDRFTGSGYGTEFTLTISSLQSEDFAVYFCQQDYSSPRTFGGGTKVEIK

SEQ ID NO: 9240 - protein, 122 aa, Artificial Sequence; identical to SEQ ID NO: 6246
  Description of Artificial Sequence: Synthetic polypeptide
  VH of XENP018829

SEQ ID NO: 9241 - protein, 107 aa, Artificial Sequence
  Description of Artificial Sequence: Synthetic polypeptide
  VL of XENP018829
SIVMTQSPATLSVSPGERATLSCRASQSVSNDVAWYQQKPGQSPRLLINYASHRDTGVPDRFTGSGYGTEFTLTISSLQSEDFAVYFCQQDYSSPRTFGGGTKVEIK

SEQ ID NO: 9242 - protein, 5 aa, Artificial Sequence
  Description of Artificial Sequence: Synthetic peptide
  XENP018829 vhCDR1
NYWMN

SEQ ID NO: 9243 - protein, 19 aa, Artificial Sequence
  Description of Artificial Sequence: Synthetic peptide
  XENP018829 vhCDR2
EIRLKSNNYATHYAEPVKG

SEQ ID NO: 9244 - protein, 11 aa, Artificial Sequence
  Description of Artificial Sequence: Synthetic peptide
  XENP018829 vhCDR3
YYGNYGGYFDV

SEQ ID NO: 9245 - protein, 11 aa, Artificial Sequence
  Description of Artificial Sequence: Synthetic peptide
  XENP018829 vlCDR1
RASQSVSNDVA

SEQ ID NO: 9246 - protein, 7 aa, Artificial Sequence
  Description of Artificial Sequence: Synthetic peptide
  XENP018829 vlCDR2
YASHRDT

SEQ ID NO: 9247 - protein, 9 aa, Artificial Sequence
  Description of Artificial Sequence: Synthetic peptide
  XENP018829 vlCDR3
QQDYSSPRT

SEQ ID NO: 9248 - protein, 249 aa, Artificial Sequence
  Description of Artificial Sequence: Synthetic polypeptide
  XENP018830 1G6_H1_L1.84_scFv(GKPGS)4
EVQLVESGGGLVKPGGSLRLSCAASGFTFSNYWMNWVRQAPGKGLEWVGEIRLKSNNYATHYAEPVKGRFTISRDDSKSTVYLQMNSLKTEDTAVYYCTRYYGNYGGYFDVWGAGTLVTVSSGKPGSGKPGSGKPGSGKPGSSIVMTQSPATLSVSPGERATLSCRASQSVSNDVAWYQQKPGQSPRLLINYASHRKTGVPDRFTGSGYGTEFTLTISSLQSEDFAVYFCQQDYSSPRTFGGGTKVEIK

SEQ ID NO: 9249 - protein, 122 aa, Artificial Sequence; identical to SEQ ID NO: 6246
  Description of Artificial Sequence: Synthetic polypeptide
  VH of XENP018830

SEQ ID NO: 9250 - protein, 107 aa, Artificial Sequence
  Description of Artificial Sequence: Synthetic polypeptide
  VL of XENP018830
SIVMTQSPATLSVSPGERATLSCRASQSVSNDVAWYQQKPGQSPRLLINYASHRKTGVPDRFTGSGYGTEFTLTISSLQSEDFAVYFCQQDYSSPRTFGGGTKVEIK

SEQ ID NO: 9251 - protein, 5 aa, Artificial Sequence
  Description of Artificial Sequence: Synthetic peptide
  XENP018830 vhCDR1
NYWMN

SEQ ID NO: 9252 - protein, 19 aa, Artificial Sequence
  Description of Artificial Sequence: Synthetic peptide
  XENP018830 vhCDR2
EIRLKSNNYATHYAEPVKG

SEQ ID NO: 9253 - protein, 11 aa, Artificial Sequence
  Description of Artificial Sequence: Synthetic peptide
  XENP018830 vhCDR3
YYGNYGGYFDV

SEQ ID NO: 9254 - protein, 11 aa, Artificial Sequence
  Description of Artificial Sequence: Synthetic peptide
  XENP018830 vlCDR1
RASQSVSNDVA

SEQ ID NO: 9255 - protein, 7 aa, Artificial Sequence
  Description of Artificial Sequence: Synthetic peptide
  XENP018830 vlCDR2
YASHRKT

SEQ ID NO: 9256 - protein, 9 aa, Artificial Sequence
  Description of Artificial Sequence: Synthetic peptide
  XENP018830 vlCDR3
QQDYSSPRT

SEQ ID NO: 9257 - protein, 249 aa, Artificial Sequence
  Description of Artificial Sequence: Synthetic polypeptide
  XENP018831 1G6_H1_L1.85_scFv(GKPGS)4
EVQLVESGGGLVKPGGSLRLSCAASGFTFSNYWMNWVRQAPGKGLEWVGEIRLKSNNYATHYAEPVKGRFTISRDDSKSTVYLQMNSLKTEDTAVYYCTRYYGNYGGYFDVWGAGTLVTVSSGKPGSGKPGSGKPGSGKPGSSIVMTQSPATLSVSPGERATLSCRASQSVSNDVAWYQQKPGQSPRLLINYASHRYVGVPDRFTGSGYGTEFTLTISSLQSEDFAVYFCQQDYSSPRTFGGGTKVEIK

SEQ ID NO: 9258 - protein, 122 aa, Artificial Sequence; identical to SEQ ID NO: 6246
  Description of Artificial Sequence: Synthetic polypeptide
  VH of XENP018831

SEQ ID NO: 9259 - protein, 107 aa, Artificial Sequence
  Description of Artificial Sequence: Synthetic polypeptide
  VL of XENP018831
SIVMTQSPATLSVSPGERATLSCRASQSVSNDVAWYQQKPGQSPRLLINYASHRYVGVPDRFTGSGYGTEFTLTISSLQSEDFAVYFCQQDYSSPRTFGGGTKVEIK

SEQ ID NO: 9260 - protein, 5 aa, Artificial Sequence
  Description of Artificial Sequence: Synthetic peptide
  XENP018831 vhCDR1
NYWMN

SEQ ID NO: 9261 - protein, 19 aa, Artificial Sequence
  Description of Artificial Sequence: Synthetic peptide
  XENP018831 vhCDR2
EIRLKSNNYATHYAEPVKG

SEQ ID NO: 9262 - protein, 11 aa, Artificial Sequence
  Description of Artificial Sequence: Synthetic peptide
  XENP018831 vhCDR3
YYGNYGGYFDV

SEQ ID NO: 9263 - protein, 11 aa, Artificial Sequence
  Description of Artificial Sequence: Synthetic peptide
  XENP018831 vlCDR1
RASQSVSNDVA

SEQ ID NO: 9264 - protein, 7 aa, Artificial Sequence
  Description of Artificial Sequence: Synthetic peptide
  XENP018831 vlCDR2
YASHRYV

SEQ ID NO: 9265 - protein, 9 aa, Artificial Sequence
  Description of Artificial Sequence: Synthetic peptide
  XENP018831 vlCDR3
QQDYSSPRT

SEQ ID NO: 9266 - protein, 249 aa, Artificial Sequence
  Description of Artificial Sequence: Synthetic polypeptide
  XENP018832 1G6_H1_L1.86_scFv(GKPGS)4
EVQLVESGGGLVKPGGSLRLSCAASGFTFSNYWMNWVRQAPGKGLEWVGEIRLKSNNYATHYAEPVKGRFTISRDDSKSTVYLQMNSLKTEDTAVYYCTRYYGNYGGYFDVWGAGTLVTVSSGKPGSGKPGSGKPGSGKPGSSIVMTQSPATLSVSPGERATLSCRASQSVSNDVAWYQQKPGQSPRLLINYASHRYSGVPDRFTGSGYGTEFTLTISSLQSEDFAVYFCQQDYSSPRTFGGGTKVEIK

SEQ ID NO: 9267 - protein, 122 aa, Artificial Sequence; identical to SEQ ID NO: 6246
  Description of Artificial Sequence: Synthetic polypeptide
  VH of XENP018832

SEQ ID NO: 9268 - protein, 107 aa, Artificial Sequence
  Description of Artificial Sequence: Synthetic polypeptide
  VL of XENP018832
SIVMTQSPATLSVSPGERATLSCRASQSVSNDVAWYQQKPGQSPRLLINYASHRYSGVPDRFTGSGYGTEFTLTISSLQSEDFAVYFCQQDYSSPRTFGGGTKVEIK

SEQ ID NO: 9269 - protein, 5 aa, Artificial Sequence
  Description of Artificial Sequence: Synthetic peptide
  XENP018832 vhCDR1
NYWMN

SEQ ID NO: 9270 - protein, 19 aa, Artificial Sequence
  Description of Artificial Sequence: Synthetic peptide
  XENP018832 vhCDR2
EIRLKSNNYATHYAEPVKG

SEQ ID NO: 9271 - protein, 11 aa, Artificial Sequence
  Description of Artificial Sequence: Synthetic peptide
  XENP018832 vhCDR3
YYGNYGGYFDV

SEQ ID NO: 9272 - protein, 11 aa, Artificial Sequence
  Description of Artificial Sequence: Synthetic peptide
  XENP018832 vlCDR1
RASQSVSNDVA

SEQ ID NO: 9273 - protein, 7 aa, Artificial Sequence
  Description of Artificial Sequence: Synthetic peptide
  XENP018832 vlCDR2
YASHRYS

SEQ ID NO: 9274 - protein, 9 aa, Artificial Sequence
  Description of Artificial Sequence: Synthetic peptide
  XENP018832 vlCDR3
QQDYSSPRT

SEQ ID NO: 9275 - protein, 249 aa, Artificial Sequence
  Description of Artificial Sequence: Synthetic polypeptide
  XENP018833 1G6_H1_L1.87_scFv(GKPGS)4
EVQLVESGGGLVKPGGSLRLSCAASGFTFSNYWMNWVRQAPGKGLEWVGEIRLKSNNYATHYAEPVKGRFTISRDDSKSTVYLQMNSLKTEDTAVYYCTRYYGNYGGYFDVWGAGTLVTVSSGKPGSGKPGSGKPGSGKPGSSIVMTQSPATLSVSPGERATLSCRASQSVSNDVAWYQQKPGQSPRLLINYASHRYAGVPDRFTGSGYGTEFTLTISSLQSEDFAVYFCQQDYSSPRTFGGGTKVEIK

SEQ ID NO: 9276 - protein, 122 aa, Artificial Sequence; identical to SEQ ID NO: 6246
  Description of Artificial Sequence: Synthetic polypeptide
  VH of XENP018833

SEQ ID NO: 9277 - protein, 107 aa, Artificial Sequence
  Description of Artificial Sequence: Synthetic polypeptide
  VL of XENP018833
SIVMTQSPATLSVSPGERATLSCRASQSVSNDVAWYQQKPGQSPRLLINYASHRYAGVPDRFTGSGYGTEFTLTISSLQSEDFAVYFCQQDYSSPRTFGGGTKVEIK

SEQ ID NO: 9278 - protein, 5 aa, Artificial Sequence
  Description of Artificial Sequence: Synthetic peptide
  XENP018833 vhCDR1
NYWMN

SEQ ID NO: 9279 - protein, 19 aa, Artificial Sequence
  Description of Artificial Sequence: Synthetic peptide
  XENP018833 vhCDR2
EIRLKSNNYATHYAEPVKG

SEQ ID NO: 9280 - protein, 11 aa, Artificial Sequence
  Description of Artificial Sequence: Synthetic peptide
  XENP018833 vhCDR3
YYGNYGGYFDV

SEQ ID NO: 9281 - protein, 11 aa, Artificial Sequence
  Description of Artificial Sequence: Synthetic peptide
  XENP018833 vlCDR1
RASQSVSNDVA

SEQ ID NO: 9282 - protein, 7 aa, Artificial Sequence
  Description of Artificial Sequence: Synthetic peptide
  XENP018833 vlCDR2
YASHRYA

SEQ ID NO: 9283 - protein, 9 aa, Artificial Sequence
  Description of Artificial Sequence: Synthetic peptide
  XENP018833 vlCDR3
QQDYSSPRT

SEQ ID NO: 9284 - protein, 249 aa, Artificial Sequence
  Description of Artificial Sequence: Synthetic polypeptide
  XENP018834 1G6_H1_L1.88_scFv(GKPGS)4
EVQLVESGGGLVKPGGSLRLSCAASGFTFSNYWMNWVRQAPGKGLEWVGEIRLKSNNYATHYAEPVKGRFTISRDDSKSTVYLQMNSLKTEDTAVYYCTRYYGNYGGYFDVWGAGTLVTVSSGKPGSGKPGSGKPGSGKPGSSIVMTQSPATLSVSPGERATLSCRASQSVSNDVAWYQQKPGQSPRLLINYASHRYIGVPDRFTGSGYGTEFTLTISSLQSEDFAVYFCQQDYSSPRTFGGGTKVEIK

SEQ ID NO: 9285 - protein, 122 aa, Artificial Sequence; identical to SEQ ID NO: 6246
  Description of Artificial Sequence: Synthetic polypeptide
  VH of XENP018834

SEQ ID NO: 9286 - protein, 107 aa, Artificial Sequence
  Description of Artificial Sequence: Synthetic polypeptide
  VL of XENP018834
SIVMTQSPATLSVSPGERATLSCRASQSVSNDVAWYQQKPGQSPRLLINYASHRYIGVPDRFTGSGYGTEFTLTISSLQSEDFAVYFCQQDYSSPRTFGGGTKVEIK

SEQ ID NO: 9287 - protein, 5 aa, Artificial Sequence
  Description of Artificial Sequence: Synthetic peptide
  XENP018834 vhCDR1
NYWMN

SEQ ID NO: 9288 - protein, 19 aa, Artificial Sequence
  Description of Artificial Sequence: Synthetic peptide
  XENP018834 vhCDR2
EIRLKSNNYATHYAEPVKG

SEQ ID NO: 9289 - protein, 11 aa, Artificial Sequence
  Description of Artificial Sequence: Synthetic peptide
  XENP018834 vhCDR3
YYGNYGGYFDV

SEQ ID NO: 9290 - protein, 11 aa, Artificial Sequence
  Description of Artificial Sequence: Synthetic peptide
  XENP018834 vlCDR1
RASQSVSNDVA

SEQ ID NO: 9291 - protein, 7 aa, Artificial Sequence
  Description of Artificial Sequence: Synthetic peptide
  XENP018834 vlCDR2
YASHRYI

SEQ ID NO: 9292 - protein, 9 aa, Artificial Sequence
  Description of Artificial Sequence: Synthetic peptide
  XENP018834 vlCDR3
QQDYSSPRT

SEQ ID NO: 9293 - protein, 249 aa, Artificial Sequence
  Description of Artificial Sequence: Synthetic polypeptide
  XENP018835 1G6_H1_L1.89_scFv(GKPGS)4
EVQLVESGGGLVKPGGSLRLSCAASGFTFSNYWMNWVRQAPGKGLEWVGEIRLKSNNYATHYAEPVKGRFTISRDDSKSTVYLQMNSLKTEDTAVYYCTRYYGNYGGYFDVWGAGTLVTVSSGKPGSGKPGSGKPGSGKPGSSIVMTQSPATLSVSPGERATLSCRASQSVSNDVAWYQQKPGQSPRLLINYASHRYQGVPDRFTGSGYGTEFTLTISSLQSEDFAVYFCQQDYSSPRTFGGGTKVEIK

SEQ ID NO: 9294 - protein, 122 aa, Artificial Sequence; identical to SEQ ID NO: 6246
  Description of Artificial Sequence: Synthetic polypeptide
  VH of XENP018835

SEQ ID NO: 9295 - protein, 107 aa, Artificial Sequence
  Description of Artificial Sequence: Synthetic polypeptide
  VL of XENP018835
SIVMTQSPATLSVSPGERATLSCRASQSVSNDVAWYQQKPGQSPRLLINYASHRYQGVPDRFTGSGYGTEFTLTISSLQSEDFAVYFCQQDYSSPRTFGGGTKVEIK

SEQ ID NO: 9296 - protein, 5 aa, Artificial Sequence
  Description of Artificial Sequence: Synthetic peptide
  XENP018835 vhCDR1
NYWMN

SEQ ID NO: 9297 - protein, 19 aa, Artificial Sequence
  Description of Artificial Sequence: Synthetic peptide
  XENP018835 vhCDR2
EIRLKSNNYATHYAEPVKG

SEQ ID NO: 9298 - protein, 11 aa, Artificial Sequence
  Description of Artificial Sequence: Synthetic peptide
  XENP018835 vhCDR3
YYGNYGGYFDV

SEQ ID NO: 9299 - protein, 11 aa, Artificial Sequence
  Description of Artificial Sequence: Synthetic peptide
  XENP018835 vlCDR1
RASQSVSNDVA

SEQ ID NO: 9300 - protein, 7 aa, Artificial Sequence
  Description of Artificial Sequence: Synthetic peptide
  XENP018835 vlCDR2
YASHRYQ

SEQ ID NO: 9301 - protein, 9 aa, Artificial Sequence
  Description of Artificial Sequence: Synthetic peptide
  XENP018835 vlCDR3
QQDYSSPRT

SEQ ID NO: 9302 - protein, 249 aa, Artificial Sequence
  Description of Artificial Sequence: Synthetic polypeptide
  XENP018836 1G6_H1_L1.90_scFv(GKPGS)4
EVQLVESGGGLVKPGGSLRLSCAASGFTFSNYWMNWVRQAPGKGLEWVGEIRLKSNNYATHYAEPVKGRFTISRDDSKSTVYLQMNSLKTEDTAVYYCTRYYGNYGGYFDVWGAGTLVTVSSGKPGSGKPGSGKPGSGKPGSSIVMTQSPATLSVSPGERATLSCRASQSVSNDVAWYQQKPGQSPRLLINYASHRYHGVPDRFTGSGYGTEFTLTISSLQSEDFAVYFCQQDYSSPRTFGGGTKVEIK

SEQ ID NO: 9303 - protein, 122 aa, Artificial Sequence; identical to SEQ ID NO: 6246
  Description of Artificial Sequence: Synthetic polypeptide
  VH of XENP018836

SEQ ID NO: 9304 - protein, 107 aa, Artificial Sequence
  Description of Artificial Sequence: Synthetic polypeptide
  VL of XENP018836
SIVMTQSPATLSVSPGERATLSCRASQSVSNDVAWYQQKPGQSPRLLINYASHRYHGVPDRFTGSGYGTEFTLTISSLQSEDFAVYFCQQDYSSPRTFGGGTKVEIK

SEQ ID NO: 9305 - protein, 5 aa, Artificial Sequence
  Description of Artificial Sequence: Synthetic peptide
  XENP018836 vhCDR1
NYWMN

SEQ ID NO: 9306 - protein, 19 aa, Artificial Sequence
  Description of Artificial Sequence: Synthetic peptide
  XENP018836 vhCDR2
EIRLKSNNYATHYAEPVKG

SEQ ID NO: 9307 - protein, 11 aa, Artificial Sequence
  Description of Artificial Sequence: Synthetic peptide
  XENP018836 vhCDR3
YYGNYGGYFDV

SEQ ID NO: 9308 - protein, 11 aa, Artificial Sequence
  Description of Artificial Sequence: Synthetic peptide
  XENP018836 vlCDR1
RASQSVSNDVA

SEQ ID NO: 9309 - protein, 7 aa, Artificial Sequence
  Description of Artificial Sequence: Synthetic peptide
  XENP018836 vlCDR2
YASHRYH

SEQ ID NO: 9310 - protein, 9 aa, Artificial Sequence
  Description of Artificial Sequence: Synthetic peptide
  XENP018836 vlCDR3
QQDYSSPRT

SEQ ID NO: 9311 - protein, 249 aa, Artificial Sequence
  Description of Artificial Sequence: Synthetic polypeptide
  XENP018837 1G6_H1_L1.91_scFv(GKPGS)4
EVQLVESGGGLVKPGGSLRLSCAASGFTFSNYWMNWVRQAPGKGLEWVGEIRLKSNNYATHYAEPVKGRFTISRDDSKSTVYLQMNSLKTEDTAVYYCTRYYGNYGGYFDVWGAGTLVTVSSGKPGSGKPGSGKPGSGKPGSSIVMTQSPATLSVSPGERATLSCRASQSVSNDVAWYQQKPGQSPRLLINYASHRYDGVPDRFTGSGYGTEFTLTISSLQSEDFAVYFCQQDYSSPRTFGGGTKVEIK

SEQ ID NO: 9312 - protein, 122 aa, Artificial Sequence; identical to SEQ ID NO: 6246
  Description of Artificial Sequence: Synthetic polypeptide
  VH of XENP018837

SEQ ID NO: 9313 - protein, 107 aa, Artificial Sequence
  Description of Artificial Sequence: Synthetic polypeptide
  VL of XENP018837
SIVMTQSPATLSVSPGERATLSCRASQSVSNDVAWYQQKPGQSPRLLINYASHRYDGVPDRFTGSGYGTEFTLTISSLQSEDFAVYFCQQDYSSPRTFGGGTKVEIK

SEQ ID NO: 9314 - protein, 5 aa, Artificial Sequence
  Description of Artificial Sequence: Synthetic peptide
  XENP018837 vhCDR1
NYWMN

SEQ ID NO: 9315 - protein, 19 aa, Artificial Sequence
  Description of Artificial Sequence: Synthetic peptide
  XENP018837 vhCDR2
EIRLKSNNYATHYAEPVKG

SEQ ID NO: 9316 - protein, 11 aa, Artificial Sequence
  Description of Artificial Sequence: Synthetic peptide
  XENP018837 vhCDR3
YYGNYGGYFDV

SEQ ID NO: 9317 - protein, 11 aa, Artificial Sequence
  Description of Artificial Sequence: Synthetic peptide
  XENP018837 vlCDR1
RASQSVSNDVA

SEQ ID NO: 9318 - protein, 7 aa, Artificial Sequence
  Description of Artificial Sequence: Synthetic peptide
  XENP018837 vlCDR2
YASHRYD

SEQ ID NO: 9319 - protein, 9 aa, Artificial Sequence
  Description of Artificial Sequence: Synthetic peptide
  XENP018837 vlCDR3
QQDYSSPRT

SEQ ID NO: 9320 - protein, 249 aa, Artificial Sequence
  Description of Artificial Sequence: Synthetic polypeptide
  XENP018838 1G6_H1_L1.92_scFv(GKPGS)4
EVQLVESGGGLVKPGGSLRLSCAASGFTFSNYWMNWVRQAPGKGLEWVGEIRLKSNNYATHYAEPVKGRFTISRDDSKSTVYLQMNSLKTEDTAVYYCTRYYGNYGGYFDVWGAGTLVTVSSGKPGSGKPGSGKPGSGKPGSSIVMTQSPATLSVSPGERATLSCRASQSVSNDVAWYQQKPGQSPRLLINYASHRYKGVPDRFTGSGYGTEFTLTISSLQSEDFAVYFCQQDYSSPRTFGGGTKVEIK

SEQ ID NO: 9321 - protein, 122 aa, Artificial Sequence; identical to SEQ ID NO: 6246
  Description of Artificial Sequence: Synthetic polypeptide
  VH of XENP018838

SEQ ID NO: 9322 - protein, 107 aa, Artificial Sequence
  Description of Artificial Sequence: Synthetic polypeptide
  VL of XENP018838
SIVMTQSPATLSVSPGERATLSCRASQSVSNDVAWYQQKPGQSPRLLINYASHRYKGVPDRFTGSGYGTEFTLTISSLQSEDFAVYFCQQDYSSPRTFGGGTKVEIK

SEQ ID NO: 9323 - protein, 5 aa, Artificial Sequence
  Description of Artificial Sequence: Synthetic peptide
  XENP018838 vhCDR1
NYWMN

SEQ ID NO: 9324 - protein, 19 aa, Artificial Sequence
  Description of Artificial Sequence: Synthetic peptide
  XENP018838 vhCDR2
EIRLKSNNYATHYAEPVKG

SEQ ID NO: 9325 - protein, 11 aa, Artificial Sequence
  Description of Artificial Sequence: Synthetic peptide
  XENP018838 vhCDR3
YYGNYGGYFDV

SEQ ID NO: 9326 - protein, 11 aa, Artificial Sequence
  Description of Artificial Sequence: Synthetic peptide
  XENP018838 vlCDR1
RASQSVSNDVA

SEQ ID NO: 9327 - protein, 7 aa, Artificial Sequence
  Description of Artificial Sequence: Synthetic peptide
  XENP018838 vlCDR2
YASHRYK

SEQ ID NO: 9328 - protein, 9 aa, Artificial Sequence
  Description of Artificial Sequence: Synthetic peptide
  XENP018838 vlCDR3
QQDYSSPRT

SEQ ID NO: 9329 - protein, 249 aa, Artificial Sequence
  Description of Artificial Sequence: Synthetic polypeptide
  XENP018839 1G6_H1_L1.93_scFv(GKPGS)4
EVQLVESGGGLVKPGGSLRLSCAASGFTFSNYWMNWVRQAPGKGLEWVGEIRLKSNNYATHYAEPVKGRFTISRDDSKSTVYLQMNSLKTEDTAVYYCTRYYGNYGGYFDVWGAGTLVTVSSGKPGSGKPGSGKPGSGKPGSSIVMTQSPATLSVSPGERATLSCRASQSVSNDVAWYQQKPGQSPRLLINYASHRYYGVPDRFTGSGYGTEFTLTISSLQSEDFAVYFCQQDYSSPRTFGGGTKVEIK

SEQ ID NO: 9330 - protein, 122 aa, Artificial Sequence; identical to SEQ ID NO: 6246
  Description of Artificial Sequence: Synthetic polypeptide
  VH of XENP018839

SEQ ID NO: 9331 - protein, 107 aa, Artificial Sequence
  Description of Artificial Sequence: Synthetic polypeptide
  VL of XENP018839
SIVMTQSPATLSVSPGERATLSCRASQSVSNDVAWYQQKPGQSPRLLINYASHRYYGVPDRFTGSGYGTEFTLTISSLQSEDFAVYFCQQDYSSPRTFGGGTKVEIK

SEQ ID NO: 9332 - protein, 5 aa, Artificial Sequence
  Description of Artificial Sequence: Synthetic peptide
  XENP018839 vhCDR1
NYWMN

SEQ ID NO: 9333 - protein, 19 aa, Artificial Sequence
  Description of Artificial Sequence: Synthetic peptide
  XENP018839 vhCDR2
EIRLKSNNYATHYAEPVKG

SEQ ID NO: 9334 - protein, 11 aa, Artificial Sequence
  Description of Artificial Sequence: Synthetic peptide
  XENP018839 vhCDR3
YYGNYGGYFDV

SEQ ID NO: 9335 - protein, 11 aa, Artificial Sequence
  Description of Artificial Sequence: Synthetic peptide
  XENP018839 vlCDR1
RASQSVSNDVA

SEQ ID NO: 9336 - protein, 7 aa, Artificial Sequence
  Description of Artificial Sequence: Synthetic peptide
  XENP018839 vlCDR2
YASHRYY

SEQ ID NO: 9337 - protein, 9 aa, Artificial Sequence
  Description of Artificial Sequence: Synthetic peptide
  XENP018839 vlCDR3
QQDYSSPRT

SEQ ID NO: 9338 - protein, 249 aa, Artificial Sequence
  Description of Artificial Sequence: Synthetic polypeptide
  XENP018840 1G6_H1_L1.94_scFv(GKPGS)4
EVQLVESGGGLVKPGGSLRLSCAASGFTFSNYWMNWVRQAPGKGLEWVGEIRLKSNNYATHYAEPVKGRFTISRDDSKSTVYLQMNSLKTEDTAVYYCTRYYGNYGGYFDVWGAGTLVTVSSGKPGSGKPGSGKPGSGKPGSSIVMTQSPATLSVSPGERATLSCRASQSVSNDVAWYQQKPGQSPRLLINYASHRYTSVPDRFTGSGYGTEFTLTISSLQSEDFAVYFCQQDYSSPRTFGGGTKVEIK

SEQ ID NO: 9339 - protein, 122 aa, Artificial Sequence; identical to SEQ ID NO: 6246
  Description of Artificial Sequence: Synthetic polypeptide
  VH of XENP018840

SEQ ID NO: 9340 - protein, 107 aa, Artificial Sequence
  Description of Artificial Sequence: Synthetic polypeptide
  VL of XENP018840
SIVMTQSPATLSVSPGERATLSCRASQSVSNDVAWYQQKPGQSPRLLINYASHRYTSVPDRFTGSGYGTEFTLTISSLQSEDFAVYFCQQDYSSPRTFGGGTKVEIK

SEQ ID NO: 9341 - protein, 5 aa, Artificial Sequence
  Description of Artificial Sequence: Synthetic peptide
  XENP018840 vhCDR1
NYWMN

SEQ ID NO: 9342 - protein, 19 aa, Artificial Sequence
  Description of Artificial Sequence: Synthetic peptide
  XENP018840 vhCDR2
EIRLKSNNYATHYAEPVKG

SEQ ID NO: 9343 - protein, 11 aa, Artificial Sequence
  Description of Artificial Sequence: Synthetic peptide
  XENP018840 vhCDR3
YYGNYGGYFDV

SEQ ID NO: 9344 - protein, 11 aa, Artificial Sequence
  Description of Artificial Sequence: Synthetic peptide
  XENP018840 vlCDR1
RASQSVSNDVA

SEQ ID NO: 9345 - protein, 7 aa, Artificial Sequence
  Description of Artificial Sequence: Synthetic peptide
  XENP018840 vlCDR2
YASHRYT

SEQ ID NO: 9346 - protein, 9 aa, Artificial Sequence
  Description of Artificial Sequence: Synthetic peptide
  XENP018840 vlCDR3
QQDYSSPRT

SEQ ID NO: 9347 - protein, 249 aa, Artificial Sequence
  Description of Artificial Sequence: Synthetic polypeptide
  XENP018841 1G6_H1_L1.95_scFv(GKPGS)4
EVQLVESGGGLVKPGGSLRLSCAASGFTFSNYWMNWVRQAPGKGLEWVGEIRLKSNNYATHYAEPVKGRFTISRDDSKSTVYLQMNSLKTEDTAVYYCTRYYGNYGGYFDVWGAGTLVTVSSGKPGSGKPGSGKPGSGKPGSSIVMTQSPATLSVSPGERATLSCRASQSVSNDVAWYQQKPGQSPRLLINYASHRYTGIPDRFTGSGYGTEFTLTISSLQSEDFAVYFCQQDYSSPRTFGGGTKVEIK

SEQ ID NO: 9348 - protein, 122 aa, Artificial Sequence; identical to SEQ ID NO: 6246
  Description of Artificial Sequence: Synthetic polypeptide
  VH of XENP018841

SEQ ID NO: 9349 - protein, 107 aa, Artificial Sequence
  Description of Artificial Sequence: Synthetic polypeptide
  VL of XENP018841
SIVMTQSPATLSVSPGERATLSCRASQSVSNDVAWYQQKPGQSPRLLINYASHRYTGIPDRFTGSGYGTEFTLTISSLQSEDFAVYFCQQDYSSPRTFGGGTKVEIK

SEQ ID NO: 9350 - protein, 5 aa, Artificial Sequence
  Description of Artificial Sequence: Synthetic peptide
  XENP018841 vhCDR1
NYWMN

SEQ ID NO: 9351 - protein, 19 aa, Artificial Sequence
  Description of Artificial Sequence: Synthetic peptide
  XENP018841 vhCDR2
EIRLKSNNYATHYAEPVKG

SEQ ID NO: 9352 - protein, 11 aa, Artificial Sequence
  Description of Artificial Sequence: Synthetic peptide
  XENP018841 vhCDR3
YYGNYGGYFDV

SEQ ID NO: 9353 - protein, 11 aa, Artificial Sequence
  Description of Artificial Sequence: Synthetic peptide
  XENP018841 vlCDR1
RASQSVSNDVA

SEQ ID NO: 9354 - protein, 7 aa, Artificial Sequence
  Description of Artificial Sequence: Synthetic peptide
  XENP018841 vlCDR2
YASHRYT

SEQ ID NO: 9355 - protein, 9 aa, Artificial Sequence
  Description of Artificial Sequence: Synthetic peptide
  XENP018841 vlCDR3
QQDYSSPRT

SEQ ID NO: 9356 - protein, 249 aa, Artificial Sequence
  Description of Artificial Sequence: Synthetic polypeptide
  XENP018842 1G6_H1_L1.96_scFv(GKPGS)4
EVQLVESGGGLVKPGGSLRLSCAASGFTFSNYWMNWVRQAPGKGLEWVGEIRLKSNNYATHYAEPVKGRFTISRDDSKSTVYLQMNSLKTEDTAVYYCTRYYGNYGGYFDVWGAGTLVTVSSGKPGSGKPGSGKPGSGKPGSSIVMTQSPATLSVSPGERATLSCRASQSVSNDVAWYQQKPGQSPRLLINYASHRYTGVPARFTGSGYGTEFTLTISSLQSEDFAVYFCQQDYSSPRTFGGGTKVEIK

SEQ ID NO: 9357 - protein, 122 aa, Artificial Sequence; identical to SEQ ID NO: 6246
  Description of Artificial Sequence: Synthetic polypeptide
  VH of XENP018842

SEQ ID NO: 9358 - protein, 107 aa, Artificial Sequence
  Description of Artificial Sequence: Synthetic polypeptide
  VL of XENP018842
SIVMTQSPATLSVSPGERATLSCRASQSVSNDVAWYQQKPGQSPRLLINYASHRYTGVPARFTGSGYGTEFTLTISSLQSEDFAVYFCQQDYSSPRTFGGGTKVEIK

SEQ ID NO: 9359 - protein, 5 aa, Artificial Sequence
  Description of Artificial Sequence: Synthetic peptide
  XENP018842 vhCDR1
NYWMN

SEQ ID NO: 9360 - protein, 19 aa, Artificial Sequence
  Description of Artificial Sequence: Synthetic peptide
  XENP018842 vhCDR2
EIRLKSNNYATHYAEPVKG

SEQ ID NO: 9361 - protein, 11 aa, Artificial Sequence
  Description of Artificial Sequence: Synthetic peptide
  XENP018842 vhCDR3
YYGNYGGYFDV

SEQ ID NO: 9362 - protein, 11 aa, Artificial Sequence
  Description of Artificial Sequence: Synthetic peptide
  XENP018842 vlCDR1
RASQSVSNDVA

SEQ ID NO: 9363 - protein, 7 aa, Artificial Sequence
  Description of Artificial Sequence: Synthetic peptide
  XENP018842 vlCDR2
YASHRYT

SEQ ID NO: 9364 - protein, 9 aa, Artificial Sequence
  Description of Artificial Sequence: Synthetic peptide
  XENP018842 vlCDR3
QQDYSSPRT

SEQ ID NO: 9365 - protein, 249 aa, Artificial Sequence
  Description of Artificial Sequence: Synthetic polypeptide
  XENP018843 1G6_H1_L1.97_scFv(GKPGS)4
EVQLVESGGGLVKPGGSLRLSCAASGFTFSNYWMNWVRQAPGKGLEWVGEIRLKSNNYATHYAEPVKGRFTISRDDSKSTVYLQMNSLKTEDTAVYYCTRYYGNYGGYFDVWGAGTLVTVSSGKPGSGKPGSGKPGSGKPGSSIVMTQSPATLSVSPGERATLSCRASQSVSNDVAWYQQKPGQSPRLLINYASHRYTGVPDRFSGSGYGTEFTLTISSLQSEDFAVYFCQQDYSSPRTFGGGTKVEIK

SEQ ID NO: 9366 - protein, 122 aa, Artificial Sequence; identical to SEQ ID NO: 6246
  Description of Artificial Sequence: Synthetic polypeptide
  VH of XENP018843

SEQ ID NO: 9367 - protein, 107 aa, Artificial Sequence
  Description of Artificial Sequence: Synthetic polypeptide
  VL of XENP018843
SIVMTQSPATLSVSPGERATLSCRASQSVSNDVAWYQQKPGQSPRLLINYASHRYTGVPDRFSGSGYGTEFTLTISSLQSEDFAVYFCQQDYSSPRTFGGGTKVEIK

SEQ ID NO: 9368 - protein, 5 aa, Artificial Sequence
  Description of Artificial Sequence: Synthetic peptide
  XENP018843 vhCDR1
NYWMN

SEQ ID NO: 9369 - protein, 19 aa, Artificial Sequence
  Description of Artificial Sequence: Synthetic peptide
  XENP018843 vhCDR2
EIRLKSNNYATHYAEPVKG

SEQ ID NO: 9370 - protein, 11 aa, Artificial Sequence
  Description of Artificial Sequence: Synthetic peptide
  XENP018843 vhCDR3
YYGNYGGYFDV

SEQ ID NO: 9371 - protein, 11 aa, Artificial Sequence
  Description of Artificial Sequence: Synthetic peptide
  XENP018843 vlCDR1
RASQSVSNDVA

SEQ ID NO: 9372 - protein, 7 aa, Artificial Sequence
  Description of Artificial Sequence: Synthetic peptide
  XENP018843 vlCDR2
YASHRYT

SEQ ID NO: 9373 - protein, 9 aa, Artificial Sequence
  Description of Artificial Sequence: Synthetic peptide
  XENP018843 vlCDR3
QQDYSSPRT

SEQ ID NO: 9374 - protein, 249 aa, Artificial Sequence
  Description of Artificial Sequence: Synthetic polypeptide
  XENP018844 1G6_H1_L1.98_scFv(GKPGS)4
EVQLVESGGGLVKPGGSLRLSCAASGFTFSNYWMNWVRQAPGKGLEWVGEIRLKSNNYATHYAEPVKGRFTISRDDSKSTVYLQMNSLKTEDTAVYYCTRYYGNYGGYFDVWGAGTLVTVSSGKPGSGKPGSGKPGSGKPGSSIVMTQSPATLSVSPGERATLSCRASQSVSNDVAWYQQKPGQSPRLLINYASHRYTGVPDRFTGSGSGTEFTLTISSLQSEDFAVYFCQQDYSSPRTFGGGTKVEIK

SEQ ID NO: 9375 - protein, 122 aa, Artificial Sequence; identical to SEQ ID NO: 6246
  Description of Artificial Sequence: Synthetic polypeptide
  VH of XENP018844

SEQ ID NO: 9376 - protein, 107 aa, Artificial Sequence
  Description of Artificial Sequence: Synthetic polypeptide
  VL of XENP018844
SIVMTQSPATLSVSPGERATLSCRASQSVSNDVAWYQQKPGQSPRLLINYASHRYTGVPDRFTGSGSGTEFTLTISSLQSEDFAVYFCQQDYSSPRTFGGGTKVEIK

SEQ ID NO: 9377 - protein, 5 aa, Artificial Sequence
  Description of Artificial Sequence: Synthetic peptide
  XENP018844 vhCDR1
NYWMN

SEQ ID NO: 9378 - protein, 19 aa, Artificial Sequence
  Description of Artificial Sequence: Synthetic peptide
  XENP018844 vhCDR2
EIRLKSNNYATHYAEPVKG

SEQ ID NO: 9379 - protein, 11 aa, Artificial Sequence
  Description of Artificial Sequence: Synthetic peptide
  XENP018844 vhCDR3
YYGNYGGYFDV

SEQ ID NO: 9380 - protein, 11 aa, Artificial Sequence
  Description of Artificial Sequence: Synthetic peptide
  XENP018844 vlCDR1
RASQSVSNDVA

SEQ ID NO: 9381 - protein, 7 aa, Artificial Sequence
  Description of Artificial Sequence: Synthetic peptide
  XENP018844 vlCDR2
YASHRYT

SEQ ID NO: 9382 - protein, 9 aa, Artificial Sequence
  Description of Artificial Sequence: Synthetic peptide
  XENP018844 vlCDR3
QQDYSSPRT

SEQ ID NO: 9383 - protein, 249 aa, Artificial Sequence
  Description of Artificial Sequence: Synthetic polypeptide
  XENP018845 1G6_H1_L1.99_scFv(GKPGS)4
EVQLVESGGGLVKPGGSLRLSCAASGFTFSNYWMNWVRQAPGKGLEWVGEIRLKSNNYATHYAEPVKGRFTISRDDSKSTVYLQMNSLKTEDTAVYYCTRYYGNYGGYFDVWGAGTLVTVSSGKPGSGKPGSGKPGSGKPGSSIVMTQSPATLSVSPGERATLSCRASQSVSNDVAWYQQKPGQSPRLLINYASHRYTGVPDRFTGSGPGTEFTLTISSLQSEDFAVYFCQQDYSSPRTFGGGTKVEIK

SEQ ID NO: 9384 - protein, 122 aa, Artificial Sequence; identical to SEQ ID NO: 6246
  Description of Artificial Sequence: Synthetic polypeptide
  VH of XENP018845

SEQ ID NO: 9385 - protein, 107 aa, Artificial Sequence
  Description of Artificial Sequence: Synthetic polypeptide
  VL of XENP018845
SIVMTQSPATLSVSPGERATLSCRASQSVSNDVAWYQQKPGQSPRLLINYASHRYTGVPDRFTGSGPGTEFTLTISSLQSEDFAVYFCQQDYSSPRTFGGGTKVEIK

SEQ ID NO: 9386 - protein, 5 aa, Artificial Sequence
  Description of Artificial Sequence: Synthetic peptide
  XENP018845 vhCDR1
NYWMN

SEQ ID NO: 9387 - protein, 19 aa, Artificial Sequence
  Description of Artificial Sequence: Synthetic peptide
  XENP018845 vhCDR2
EIRLKSNNYATHYAEPVKG

SEQ ID NO: 9388 - protein, 11 aa, Artificial Sequence
  Description of Artificial Sequence: Synthetic peptide
  XENP018845 vhCDR3
YYGNYGGYFDV

SEQ ID NO: 9389 - protein, 11 aa, Artificial Sequence
  Description of Artificial Sequence: Synthetic peptide
  XENP018845 vlCDR1
RASQSVSNDVA

SEQ ID NO: 9390 - protein, 7 aa, Artificial Sequence
  Description of Artificial Sequence: Synthetic peptide
  XENP018845 vlCDR2
YASHRYT

SEQ ID NO: 9391 - protein, 9 aa, Artificial Sequence
  Description of Artificial Sequence: Synthetic peptide
  XENP018845 vlCDR3
QQDYSSPRT

SEQ ID NO: 9392 - protein, 249 aa, Artificial Sequence
  Description of Artificial Sequence: Synthetic polypeptide
  XENP018846 1G6_H1_L1.100_scFv(GKPGS)4
EVQLVESGGGLVKPGGSLRLSCAASGFTFSNYWMNWVRQAPGKGLEWVGEIRLKSNNYATHYAEPVKGRFTISRDDSKSTVYLQMNSLKTEDTAVYYCTRYYGNYGGYFDVWGAGTLVTVSSGKPGSGKPGSGKPGSGKPGSSIVMTQSPATLSVSPGERATLSCRASQSVSNDVAWYQQKPGQSPRLLINYASHRYTGVPDRFTGSGYGTDFTLTISSLQSEDFAVYFCQQDYSSPRTFGGGTKVEIK

SEQ ID NO: 9393 - protein, 122 aa, Artificial Sequence; identical to SEQ ID NO: 6246
  Description of Artificial Sequence: Synthetic polypeptide
  VH of XENP018846

SEQ ID NO: 9394 - protein, 107 aa, Artificial Sequence
  Description of Artificial Sequence: Synthetic polypeptide
  VL of XENP018846
SIVMTQSPATLSVSPGERATLSCRASQSVSNDVAWYQQKPGQSPRLLINYASHRYTGVPDRFTGSGYGTDFTLTISSLQSEDFAVYFCQQDYSSPRTFGGGTKVEIK

SEQ ID NO: 9395 - protein, 5 aa, Artificial Sequence
  Description of Artificial Sequence: Synthetic peptide
  XENP018846 vhCDR1
NYWMN

SEQ ID NO: 9396 - protein, 19 aa, Artificial Sequence
  Description of Artificial Sequence: Synthetic peptide
  XENP018846 vhCDR2
EIRLKSNNYATHYAEPVKG

SEQ ID NO: 9397 - protein, 11 aa, Artificial Sequence
  Description of Artificial Sequence: Synthetic peptide
  XENP018846 vhCDR3
YYGNYGGYFDV

SEQ ID NO: 9398 - protein, 11 aa, Artificial Sequence
  Description of Artificial Sequence: Synthetic peptide
  XENP018846 vlCDR1
RASQSVSNDVA

SEQ ID NO: 9399 - protein, 7 aa, Artificial Sequence
  Description of Artificial Sequence: Synthetic peptide
  XENP018846 vlCDR2
YASHRYT

SEQ ID NO: 9400 - protein, 9 aa, Artificial Sequence
  Description of Artificial Sequence: Synthetic peptide
  XENP018846 vlCDR3
QQDYSSPRT

SEQ ID NO: 9401 - protein, 249 aa, Artificial Sequence
  Description of Artificial Sequence: Synthetic polypeptide
  XENP018847 1G6_H1_L1.101_scFv(GKPGS)4
EVQLVESGGGLVKPGGSLRLSCAASGFTFSNYWMNWVRQAPGKGLEWVGEIRLKSNNYATHYAEPVKGRFTISRDDSKSTVYLQMNSLKTEDTAVYYCTRYYGNYGGYFDVWGAGTLVTVSSGKPGSGKPGSGKPGSGKPGSSIVMTQSPATLSVSPGERATLSCRASQSVSNDVAWYQQKPGQSPRLLINYASHRYTGVPDRFTGSGYGTEFTFTISSLQSEDFAVYFCQQDYSSPRTFGGGTKVEIK

SEQ ID NO: 9402 - protein, 122 aa, Artificial Sequence; identical to SEQ ID NO: 6246
  Description of Artificial Sequence: Synthetic polypeptide
  VH of XENP018847

SEQ ID NO: 9403 - protein, 107 aa, Artificial Sequence
  Description of Artificial Sequence: Synthetic polypeptide
  VL of XENP018847
SIVMTQSPATLSVSPGERATLSCRASQSVSNDVAWYQQKPGQSPRLLINYASHRYTGVPDRFTGSGYGTEFTFTISSLQSEDFAVYFCQQDYSSPRTFGGGTKVEIK

SEQ ID NO: 9404 - protein, 5 aa, Artificial Sequence
  Description of Artificial Sequence: Synthetic peptide
  XENP018847 vhCDR1
NYWMN

SEQ ID NO: 9405 - protein, 19 aa, Artificial Sequence
  Description of Artificial Sequence: Synthetic peptide
  XENP018847 vhCDR2
EIRLKSNNYATHYAEPVKG

SEQ ID NO: 9406 - protein, 11 aa, Artificial Sequence
  Description of Artificial Sequence: Synthetic peptide
  XENP018847 vhCDR3
YYGNYGGYFDV

SEQ ID NO: 9407 - protein, 11 aa, Artificial Sequence
  Description of Artificial Sequence: Synthetic peptide
  XENP018847 vlCDR1
RASQSVSNDVA

SEQ ID NO: 9408 - protein, 7 aa, Artificial Sequence
  Description of Artificial Sequence: Synthetic peptide
  XENP018847 vlCDR2
YASHRYT

SEQ ID NO: 9409 - protein, 9 aa, Artificial Sequence
  Description of Artificial Sequence: Synthetic peptide
  XENP018847 vlCDR3
QQDYSSPRT

SEQ ID NO: 9410 - protein, 249 aa, Artificial Sequence
  Description of Artificial Sequence: Synthetic polypeptide
  XENP018848 1G6_H1_L1.102_scFv(GKPGS)4
EVQLVESGGGLVKPGGSLRLSCAASGFTFSNYWMNWVRQAPGKGLEWVGEIRLKSNNYATHYAEPVKGRFTISRDDSKSTVYLQMNSLKTEDTAVYYCTRYYGNYGGYFDVWGAGTLVTVSSGKPGSGKPGSGKPGSGKPGSSIVMTQSPATLSVSPGERATLSCRASQSVSNDVAWYQQKPGQSPRLLINYASHRYTGVPDRFTGSGYGTEFTLTISTLQSEDFAVYFCQQDYSSPRTFGGGTKVEIK

SEQ ID NO: 9411 - protein, 122 aa, Artificial Sequence; identical to SEQ ID NO: 6246
  Description of Artificial Sequence: Synthetic polypeptide
  VH of XENP018848

SEQ ID NO: 9412 - protein, 107 aa, Artificial Sequence
  Description of Artificial Sequence: Synthetic polypeptide
  VL of XENP018848
SIVMTQSPATLSVSPGERATLSCRASQSVSNDVAWYQQKPGQSPRLLINYASHRYTGVPDRFTGSGYGTEFTLTISTLQSEDFAVYFCQQDYSSPRTFGGGTKVEIK

SEQ ID NO: 9413 - protein, 5 aa, Artificial Sequence
  Description of Artificial Sequence: Synthetic peptide
  XENP018848 vhCDR1
NYWMN

SEQ ID NO: 9414 - protein, 19 aa, Artificial Sequence
  Description of Artificial Sequence: Synthetic peptide
  XENP018848 vhCDR2
EIRLKSNNYATHYAEPVKG

SEQ ID NO: 9415 - protein, 11 aa, Artificial Sequence
  Description of Artificial Sequence: Synthetic peptide
  XENP018848 vhCDR3
YYGNYGGYFDV

SEQ ID NO: 9416 - protein, 11 aa, Artificial Sequence
  Description of Artificial Sequence: Synthetic peptide
  XENP018848 vlCDR1
RASQSVSNDVA

SEQ ID NO: 9417 - protein, 7 aa, Artificial Sequence
  Description of Artificial Sequence: Synthetic peptide
  XENP018848 vlCDR2
YASHRYT

SEQ ID NO: 9418 - protein, 9 aa, Artificial Sequence
  Description of Artificial Sequence: Synthetic peptide
  XENP018848 vlCDR3
QQDYSSPRT

SEQ ID NO: 9419 - protein, 249 aa, Artificial Sequence
  Description of Artificial Sequence: Synthetic polypeptide
  XENP018849 1G6_H1_L1.103_scFv(GKPGS)4
EVQLVESGGGLVKPGGSLRLSCAASGFTFSNYWMNWVRQAPGKGLEWVGEIRLKSNNYATHYAEPVKGRFTISRDDSKSTVYLQMNSLKTEDTAVYYCTRYYGNYGGYFDVWGAGTLVTVSSGKPGSGKPGSGKPGSGKPGSSIVMTQSPATLSVSPGERATLSCRASQSVSNDVAWYQQKPGQSPRLLINYASHRYTGVPDRFTGSGYGTEFTLTISSVQSEDFAVYFCQQDYSSPRTFGGGTKVEIK

SEQ ID NO: 9420 - protein, 122 aa, Artificial Sequence; identical to SEQ ID NO: 6246
  Description of Artificial Sequence: Synthetic polypeptide
  VH of XENP018849

SEQ ID NO: 9421 - protein, 107 aa, Artificial Sequence
  Description of Artificial Sequence: Synthetic polypeptide
  VL of XENP018849
SIVMTQSPATLSVSPGERATLSCRASQSVSNDVAWYQQKPGQSPRLLINYASHRYTGVPDRFTGSGYGTEFTLTISSVQSEDFAVYFCQQDYSSPRTFGGGTKVEIK

SEQ ID NO: 9422 - protein, 5 aa, Artificial Sequence
  Description of Artificial Sequence: Synthetic peptide
  XENP018849 vhCDR1
NYWMN

SEQ ID NO: 9423 - protein, 19 aa, Artificial Sequence
  Description of Artificial Sequence: Synthetic peptide
  XENP018849 vhCDR2
EIRLKSNNYATHYAEPVKG

SEQ ID NO: 9424 - protein, 11 aa, Artificial Sequence
  Description of Artificial Sequence: Synthetic peptide
  XENP018849 vhCDR3
YYGNYGGYFDV

SEQ ID NO: 9425 - protein, 11 aa, Artificial Sequence
  Description of Artificial Sequence: Synthetic peptide
  XENP018849 vlCDR1
RASQSVSNDVA

SEQ ID NO: 9426 - protein, 7 aa, Artificial Sequence
  Description of Artificial Sequence: Synthetic peptide
  XENP018849 vlCDR2
YASHRYT

SEQ ID NO: 9427 - protein, 9 aa, Artificial Sequence
  Description of Artificial Sequence: Synthetic peptide
  XENP018849 vlCDR3
QQDYSSPRT

SEQ ID NO: 9428 - protein, 249 aa, Artificial Sequence
  Description of Artificial Sequence: Synthetic polypeptide
  XENP018850 1G6_H1_L1.104_scFv(GKPGS)4
EVQLVESGGGLVKPGGSLRLSCAASGFTFSNYWMNWVRQAPGKGLEWVGEIRLKSNNYATHYAEPVKGRFTISRDDSKSTVYLQMNSLKTEDTAVYYCTRYYGNYGGYFDVWGAGTLVTVSSGKPGSGKPGSGKPGSGKPGSSIVMTQSPATLSVSPGERATLSCRASQSVSNDVAWYQQKPGQSPRLLINYASHRYTGVPDRFTGSGYGTEFTLTISSLQAEDFAVYFCQQDYSSPRTFGGGTKVEIK

SEQ ID NO: 9429 - protein, 122 aa, Artificial Sequence; identical to SEQ ID NO: 6246
  Description of Artificial Sequence: Synthetic polypeptide
  VH of XENP018850

SEQ ID NO: 9430 - protein, 107 aa, Artificial Sequence
  Description of Artificial Sequence: Synthetic polypeptide
  VL of XENP018850
SIVMTQSPATLSVSPGERATLSCRASQSVSNDVAWYQQKPGQSPRLLINYASHRYTGVPDRFTGSGYGTEFTLTISSLQAEDFAVYFCQQDYSSPRTFGGGTKVEIK

SEQ ID NO: 9431 - protein, 5 aa, Artificial Sequence
  Description of Artificial Sequence: Synthetic peptide
  XENP018850 vhCDR1
NYWMN

SEQ ID NO: 9432 - protein, 19 aa, Artificial Sequence
  Description of Artificial Sequence: Synthetic peptide
  XENP018850 vhCDR2
EIRLKSNNYATHYAEPVKG

SEQ ID NO: 9433 - protein, 11 aa, Artificial Sequence
  Description of Artificial Sequence: Synthetic peptide
  XENP018850 vhCDR3
YYGNYGGYFDV

SEQ ID NO: 9434 - protein, 11 aa, Artificial Sequence
  Description of Artificial Sequence: Synthetic peptide
  XENP018850 vlCDR1
RASQSVSNDVA

SEQ ID NO: 9435 - protein, 7 aa, Artificial Sequence
  Description of Artificial Sequence: Synthetic peptide
  XENP018850 vlCDR2
YASHRYT

SEQ ID NO: 9436 - protein, 9 aa, Artificial Sequence
  Description of Artificial Sequence: Synthetic peptide
  XENP018850 vlCDR3
QQDYSSPRT

SEQ ID NO: 9437 - protein, 249 aa, Artificial Sequence
  Description of Artificial Sequence: Synthetic polypeptide
  XENP018851 1G6_H1_L1.105_scFv(GKPGS)4
EVQLVESGGGLVKPGGSLRLSCAASGFTFSNYWMNWVRQAPGKGLEWVGEIRLKSNNYATHYAEPVKGRFTISRDDSKSTVYLQMNSLKTEDTAVYYCTRYYGNYGGYFDVWGAGTLVTVSSGKPGSGKPGSGKPGSGKPGSSIVMTQSPATLSVSPGERATLSCRASQSVSNDVAWYQQKPGQSPRLLINYASHRYTGVPDRFTGSGYGTEFTLTISSLQSEDLAVYFCQQDYSSPRTFGGGTKVEIK

SEQ ID NO: 9438 - protein, 122 aa, Artificial Sequence; identical to SEQ ID NO: 6246
  Description of Artificial Sequence: Synthetic polypeptide
  VH of XENP018851

SEQ ID NO: 9439 - protein, 107 aa, Artificial Sequence
  Description of Artificial Sequence: Synthetic polypeptide
  VL of XENP018851
SIVMTQSPATLSVSPGERATLSCRASQSVSNDVAWYQQKPGQSPRLLINYASHRYTGVPDRFTGSGYGTEFTLTISSLQSEDLAVYFCQQDYSSPRTFGGGTKVEIK

SEQ ID NO: 9440 - protein, 5 aa, Artificial Sequence
  Description of Artificial Sequence: Synthetic peptide
  XENP018851 vhCDR1
NYWMN

SEQ ID NO: 9441 - protein, 19 aa, Artificial Sequence
  Description of Artificial Sequence: Synthetic peptide
  XENP018851 vhCDR2
EIRLKSNNYATHYAEPVKG

SEQ ID NO: 9442 - protein, 11 aa, Artificial Sequence
  Description of Artificial Sequence: Synthetic peptide
  XENP018851 vhCDR3
YYGNYGGYFDV

SEQ ID NO: 9443 - protein, 11 aa, Artificial Sequence
  Description of Artificial Sequence: Synthetic peptide
  XENP018851 vlCDR1
RASQSVSNDVA

SEQ ID NO: 9444 - protein, 7 aa, Artificial Sequence
  Description of Artificial Sequence: Synthetic peptide
  XENP018851 vlCDR2
YASHRYT

SEQ ID NO: 9445 - protein, 9 aa, Artificial Sequence
  Description of Artificial Sequence: Synthetic peptide
  XENP018851 vlCDR3
QQDYSSPRT

SEQ ID NO: 9446 - protein, 249 aa, Artificial Sequence
  Description of Artificial Sequence: Synthetic polypeptide
  XENP018852 1G6_H1_L1.106_scFv(GKPGS)4
EVQLVESGGGLVKPGGSLRLSCAASGFTFSNYWMNWVRQAPGKGLEWVGEIRLKSNNYATHYAEPVKGRFTISRDDSKSTVYLQMNSLKTEDTAVYYCTRYYGNYGGYFDVWGAGTLVTVSSGKPGSGKPGSGKPGSGKPGSSIVMTQSPATLSVSPGERATLSCRASQSVSNDVAWYQQKPGQSPRLLINYASHRYTGVPDRFTGSGYGTEFTLTISSLQSEDFAVYYCQQDYSSPRTFGGGTKVEIK

SEQ ID NO: 9447 - protein, 122 aa, Artificial Sequence; identical to SEQ ID NO: 6246
  Description of Artificial Sequence: Synthetic polypeptide
  VH of XENP018852

SEQ ID NO: 9448 - protein, 107 aa, Artificial Sequence
  Description of Artificial Sequence: Synthetic polypeptide
  VL of XENP018852
SIVMTQSPATLSVSPGERATLSCRASQSVSNDVAWYQQKPGQSPRLLINYASHRYTGVPDRFTGSGYGTEFTLTISSLQSEDFAVYYCQQDYSSPRTFGGGTKVEIK

SEQ ID NO: 9449 - protein, 5 aa, Artificial Sequence
  Description of Artificial Sequence: Synthetic peptide
  XENP018852 vhCDR1
NYWMN

SEQ ID NO: 9450 - protein, 19 aa, Artificial Sequence
  Description of Artificial Sequence: Synthetic peptide
  XENP018852 vhCDR2
EIRLKSNNYATHYAEPVKG

SEQ ID NO: 9451 - protein, 11 aa, Artificial Sequence
  Description of Artificial Sequence: Synthetic peptide
  XENP018852 vhCDR3
YYGNYGGYFDV

SEQ ID NO: 9452 - protein, 11 aa, Artificial Sequence
  Description of Artificial Sequence: Synthetic peptide
  XENP018852 vlCDR1
RASQSVSNDVA

SEQ ID NO: 9453 - protein, 7 aa, Artificial Sequence
  Description of Artificial Sequence: Synthetic peptide
  XENP018852 vlCDR2
YASHRYT

SEQ ID NO: 9454 - protein, 9 aa, Artificial Sequence
  Description of Artificial Sequence: Synthetic peptide
  XENP018852 vlCDR3
QQDYSSPRT

SEQ ID NO: 9455 - protein, 249 aa, Artificial Sequence
  Description of Artificial Sequence: Synthetic polypeptide
  XENP018853 1G6_H1_L1.107_scFv(GKPGS)4
EVQLVESGGGLVKPGGSLRLSCAASGFTFSNYWMNWVRQAPGKGLEWVGEIRLKSNNYATHYAEPVKGRFTISRDDSKSTVYLQMNSLKTEDTAVYYCTRYYGNYGGYFDVWGAGTLVTVSSGKPGSGKPGSGKPGSGKPGSSIVMTQSPATLSVSPGERATLSCRASQSVSNDVAWYQQKPGQSPRLLINYASHRYTGVPDRFTGSGYGTEFTLTISSLQSEDFAVYFCQQQYSSPRTFGGGTKVEIK

SEQ ID NO: 9456 - protein, 122 aa, Artificial Sequence; identical to SEQ ID NO: 6246
  Description of Artificial Sequence: Synthetic polypeptide
  VH of XENP018853

SEQ ID NO: 9457 - protein, 107 aa, Artificial Sequence
  Description of Artificial Sequence: Synthetic polypeptide
  VL of XENP018853
SIVMTQSPATLSVSPGERATLSCRASQSVSNDVAWYQQKPGQSPRLLINYASHRYTGVPDRFTGSGYGTEFTLTISSLQSEDFAVYFCQQQYSSPRTFGGGTKVEIK

SEQ ID NO: 9458 - protein, 5 aa, Artificial Sequence
  Description of Artificial Sequence: Synthetic peptide
  XENP018853 vhCDR1
NYWMN

SEQ ID NO: 9459 - protein, 19 aa, Artificial Sequence
  Description of Artificial Sequence: Synthetic peptide
  XENP018853 vhCDR2
EIRLKSNNYATHYAEPVKG

SEQ ID NO: 9460 - protein, 11 aa, Artificial Sequence
  Description of Artificial Sequence: Synthetic peptide
  XENP018853 vhCDR3
YYGNYGGYFDV

SEQ ID NO: 9461 - protein, 11 aa, Artificial Sequence
  Description of Artificial Sequence: Synthetic peptide
  XENP018853 vlCDR1
RASQSVSNDVA

SEQ ID NO: 9462 - protein, 7 aa, Artificial Sequence
  Description of Artificial Sequence: Synthetic peptide
  XENP018853 vlCDR2
YASHRYT

SEQ ID NO: 9463 - protein, 9 aa, Artificial Sequence
  Description of Artificial Sequence: Synthetic peptide
  XENP018853 vlCDR3
QQQYSSPRT

SEQ ID NO: 9464 - protein, 249 aa, Artificial Sequence
  Description of Artificial Sequence: Synthetic polypeptide
  XENP018854 1G6_H1_L1.108_scFv(GKPGS)4
EVQLVESGGGLVKPGGSLRLSCAASGFTFSNYWMNWVRQAPGKGLEWVGEIRLKSNNYATHYAEPVKGRFTISRDDSKSTVYLQMNSLKTEDTAVYYCTRYYGNYGGYFDVWGAGTLVTVSSGKPGSGKPGSGKPGSGKPGSSIVMTQSPATLSVSPGERATLSCRASQSVSNDVAWYQQKPGQSPRLLINYASHRYTGVPDRFTGSGYGTEFTLTISSLQSEDFAVYFCQQEYSSPRTFGGGTKVEIK

SEQ ID NO: 9465 - protein, 122 aa, Artificial Sequence; identical to SEQ ID NO: 6246
  Description of Artificial Sequence: Synthetic polypeptide
  VH of XENP018854

SEQ ID NO: 9466 - protein, 107 aa, Artificial Sequence
  Description of Artificial Sequence: Synthetic polypeptide
  VL of XENP018854
SIVMTQSPATLSVSPGERATLSCRASQSVSNDVAWYQQKPGQSPRLLINYASHRYTGVPDRFTGSGYGTEFTLTISSLQSEDFAVYFCQQEYSSPRTFGGGTKVEIK

SEQ ID NO: 9467 - protein, 5 aa, Artificial Sequence
  Description of Artificial Sequence: Synthetic peptide
  XENP018854 vhCDR1
NYWMN

SEQ ID NO: 9468 - protein, 19 aa, Artificial Sequence
  Description of Artificial Sequence: Synthetic peptide
  XENP018854 vhCDR2
EIRLKSNNYATHYAEPVKG

SEQ ID NO: 9469 - protein, 11 aa, Artificial Sequence
  Description of Artificial Sequence: Synthetic peptide
  XENP018854 vhCDR3
YYGNYGGYFDV

SEQ ID NO: 9470 - protein, 11 aa, Artificial Sequence
  Description of Artificial Sequence: Synthetic peptide
  XENP018854 vlCDR1
RASQSVSNDVA

SEQ ID NO: 9471 - protein, 7 aa, Artificial Sequence
  Description of Artificial Sequence: Synthetic peptide
  XENP018854 vlCDR2
YASHRYT

SEQ ID NO: 9472 - protein, 9 aa, Artificial Sequence
  Description of Artificial Sequence: Synthetic peptide
  XENP018854 vlCDR3
QQEYSSPRT

SEQ ID NO: 9473 - protein, 249 aa, Artificial Sequence
  Description of Artificial Sequence: Synthetic polypeptide
  XENP018855 1G6_H1_L1.109_scFv(GKPGS)4
EVQLVESGGGLVKPGGSLRLSCAASGFTFSNYWMNWVRQAPGKGLEWVGEIRLKSNNYATHYAEPVKGRFTISRDDSKSTVYLQMNSLKTEDTAVYYCTRYYGNYGGYFDVWGAGTLVTVSSGKPGSGKPGSGKPGSGKPGSSIVMTQSPATLSVSPGERATLSCRASQSVSNDVAWYQQKPGQSPRLLINYASHRYTGVPDRFTGSGYGTEFTLTISSLQSEDFAVYFCQQHYSSPRTFGGGTKVEIK

SEQ ID NO: 9474 - protein, 122 aa, Artificial Sequence; identical to SEQ ID NO: 6246
  Description of Artificial Sequence: Synthetic polypeptide
  VH of XENP018855

SEQ ID NO: 9475 - protein, 107 aa, Artificial Sequence
  Description of Artificial Sequence: Synthetic polypeptide
  VL of XENP018855
SIVMTQSPATLSVSPGERATLSCRASQSVSNDVAWYQQKPGQSPRLLINYASHRYTGVPDRFTGSGYGTEFTLTISSLQSEDFAVYFCQQHYSSPRTFGGGTKVEIK

SEQ ID NO: 9476 - protein, 5 aa, Artificial Sequence
  Description of Artificial Sequence: Synthetic peptide
  XENP018855 vhCDR1
NYWMN

SEQ ID NO: 9477 - protein, 19 aa, Artificial Sequence
  Description of Artificial Sequence: Synthetic peptide
  XENP018855 vhCDR2
EIRLKSNNYATHYAEPVKG

SEQ ID NO: 9478 - protein, 11 aa, Artificial Sequence
  Description of Artificial Sequence: Synthetic peptide
  XENP018855 vhCDR3
YYGNYGGYFDV

SEQ ID NO: 9479 - protein, 11 aa, Artificial Sequence
  Description of Artificial Sequence: Synthetic peptide
  XENP018855 vlCDR1
RASQSVSNDVA

SEQ ID NO: 9480 - protein, 7 aa, Artificial Sequence
  Description of Artificial Sequence: Synthetic peptide
  XENP018855 vlCDR2
YASHRYT

SEQ ID NO: 9481 - protein, 9 aa, Artificial Sequence
  Description of Artificial Sequence: Synthetic peptide
  XENP018855 vlCDR3
QQHYSSPRT

SEQ ID NO: 9482 - protein, 249 aa, Artificial Sequence
  Description of Artificial Sequence: Synthetic polypeptide
  XENP018856 1G6_H1_L1.110_scFv(GKPGS)4
EVQLVESGGGLVKPGGSLRLSCAASGFTFSNYWMNWVRQAPGKGLEWVGEIRLKSNNYATHYAEPVKGRFTISRDDSKSTVYLQMNSLKTEDTAVYYCTRYYGNYGGYFDVWGAGTLVTVSSGKPGSGKPGSGKPGSGKPGSSIVMTQSPATLSVSPGERATLSCRASQSVSNDVAWYQQKPGQSPRLLINYASHRYTGVPDRFTGSGYGTEFTLTISSLQSEDFAVYFCQQSYSSPRTFGGGTKVEIK

SEQ ID NO: 9483 - protein, 122 aa, Artificial Sequence; identical to SEQ ID NO: 6246
  Description of Artificial Sequence: Synthetic polypeptide
  VH of XENP018856

SEQ ID NO: 9484 - protein, 107 aa, Artificial Sequence
  Description of Artificial Sequence: Synthetic polypeptide
  VL of XENP018856
SIVMTQSPATLSVSPGERATLSCRASQSVSNDVAWYQQKPGQSPRLLINYASHRYTGVPDRFTGSGYGTEFTLTISSLQSEDFAVYFCQQSYSSPRTFGGGTKVEIK

SEQ ID NO: 9485 - protein, 5 aa, Artificial Sequence
  Description of Artificial Sequence: Synthetic peptide
  XENP018856 vhCDR1
NYWMN

SEQ ID NO: 9486 - protein, 19 aa, Artificial Sequence
  Description of Artificial Sequence: Synthetic peptide
  XENP018856 vhCDR2
EIRLKSNNYATHYAEPVKG

SEQ ID NO: 9487 - protein, 11 aa, Artificial Sequence
  Description of Artificial Sequence: Synthetic peptide
  XENP018856 vhCDR3
YYGNYGGYFDV

SEQ ID NO: 9488 - protein, 11 aa, Artificial Sequence
  Description of Artificial Sequence: Synthetic peptide
  XENP018856 vlCDR1
RASQSVSNDVA

SEQ ID NO: 9489 - protein, 7 aa, Artificial Sequence
  Description of Artificial Sequence: Synthetic peptide
  XENP018856 vlCDR2
YASHRYT

SEQ ID NO: 9490 - protein, 9 aa, Artificial Sequence
  Description of Artificial Sequence: Synthetic peptide
  XENP018856 vlCDR3
QQSYSSPRT

SEQ ID NO: 9491 - protein, 249 aa, Artificial Sequence
  Description of Artificial Sequence: Synthetic polypeptide
  XENP018857 1G6_H1_L1.111_scFv(GKPGS)4
EVQLVESGGGLVKPGGSLRLSCAASGFTFSNYWMNWVRQAPGKGLEWVGEIRLKSNNYATHYAEPVKGRFTISRDDSKSTVYLQMNSLKTEDTAVYYCTRYYGNYGGYFDVWGAGTLVTVSSGKPGSGKPGSGKPGSGKPGSSIVMTQSPATLSVSPGERATLSCRASQSVSNDVAWYQQKPGQSPRLLINYASHRYTGVPDRFTGSGYGTEFTLTISSLQSEDFAVYFCQQRYSSPRTFGGGTKVEIK

SEQ ID NO: 9492 - protein, 122 aa, Artificial Sequence; identical to SEQ ID NO: 6246
  Description of Artificial Sequence: Synthetic polypeptide
  VH of XENP018857

SEQ ID NO: 9493 - protein, 107 aa, Artificial Sequence
  Description of Artificial Sequence: Synthetic polypeptide
  VL of XENP018857
SIVMTQSPATLSVSPGERATLSCRASQSVSNDVAWYQQKPGQSPRLLINYASHRYTGVPDRFTGSGYGTEFTLTISSLQSEDFAVYFCQQRYSSPRTFGGGTKVEIK

SEQ ID NO: 9494 - protein, 5 aa, Artificial Sequence
  Description of Artificial Sequence: Synthetic peptide
  XENP018857 vhCDR1
NYWMN

SEQ ID NO: 9495 - protein, 19 aa, Artificial Sequence
  Description of Artificial Sequence: Synthetic peptide
  XENP018857 vhCDR2
EIRLKSNNYATHYAEPVKG

SEQ ID NO: 9496 - protein, 11 aa, Artificial Sequence
  Description of Artificial Sequence: Synthetic peptide
  XENP018857 vhCDR3
YYGNYGGYFDV

SEQ ID NO: 9497 - protein, 11 aa, Artificial Sequence
  Description of Artificial Sequence: Synthetic peptide
  XENP018857 vlCDR1
RASQSVSNDVA

SEQ ID NO: 9498 - protein, 7 aa, Artificial Sequence
  Description of Artificial Sequence: Synthetic peptide
  XENP018857 vlCDR2
YASHRYT

SEQ ID NO: 9499 - protein, 9 aa, Artificial Sequence
  Description of Artificial Sequence: Synthetic peptide
  XENP018857 vlCDR3
QQRYSSPRT

SEQ ID NO: 9500 - protein, 249 aa, Artificial Sequence
  Description of Artificial Sequence: Synthetic polypeptide
  XENP018858 1G6_H1_L1.112_scFv(GKPGS)4
EVQLVESGGGLVKPGGSLRLSCAASGFTFSNYWMNWVRQAPGKGLEWVGEIRLKSNNYATHYAEPVKGRFTISRDDSKSTVYLQMNSLKTEDTAVYYCTRYYGNYGGYFDVWGAGTLVTVSSGKPGSGKPGSGKPGSGKPGSSIVMTQSPATLSVSPGERATLSCRASQSVSNDVAWYQQKPGQSPRLLINYASHRYTGVPDRFTGSGYGTEFTLTISSLQSEDFAVYFCQQLYSSPRTFGGGTKVEIK

SEQ ID NO: 9501 - protein, 122 aa, Artificial Sequence; identical to SEQ ID NO: 6246
  Description of Artificial Sequence: Synthetic polypeptide
  VH of XENP018858

SEQ ID NO: 9502 - protein, 107 aa, Artificial Sequence
  Description of Artificial Sequence: Synthetic polypeptide
  VL of XENP018858
SIVMTQSPATLSVSPGERATLSCRASQSVSNDVAWYQQKPGQSPRLLINYASHRYTGVPDRFTGSGYGTEFTLTISSLQSEDFAVYFCQQLYSSPRTFGGGTKVEIK

SEQ ID NO: 9503 - protein, 5 aa, Artificial Sequence
  Description of Artificial Sequence: Synthetic peptide
  XENP018858 vhCDR1
NYWMN

SEQ ID NO: 9504 - protein, 19 aa, Artificial Sequence
  Description of Artificial Sequence: Synthetic peptide
  XENP018858 vhCDR2
EIRLKSNNYATHYAEPVKG

SEQ ID NO: 9505 - protein, 11 aa, Artificial Sequence
  Description of Artificial Sequence: Synthetic peptide
  XENP018858 vhCDR3
YYGNYGGYFDV

SEQ ID NO: 9506 - protein, 11 aa, Artificial Sequence
  Description of Artificial Sequence: Synthetic peptide
  XENP018858 vlCDR1
RASQSVSNDVA

SEQ ID NO: 9507 - protein, 7 aa, Artificial Sequence
  Description of Artificial Sequence: Synthetic peptide
  XENP018858 vlCDR2
YASHRYT

SEQ ID NO: 9508 - protein, 9 aa, Artificial Sequence
  Description of Artificial Sequence: Synthetic peptide
  XENP018858 vlCDR3
QQLYSSPRT

SEQ ID NO: 9509 - protein, 249 aa, Artificial Sequence
  Description of Artificial Sequence: Synthetic polypeptide
  XENP018859 1G6_H1_L1.113_scFv(GKPGS)4
EVQLVESGGGLVKPGGSLRLSCAASGFTFSNYWMNWVRQAPGKGLEWVGEIRLKSNNYATHYAEPVKGRFTISRDDSKSTVYLQMNSLKTEDTAVYYCTRYYGNYGGYFDVWGAGTLVTVSSGKPGSGKPGSGKPGSGKPGSSIVMTQSPATLSVSPGERATLSCRASQSVSNDVAWYQQKPGQSPRLLINYASHRYTGVPDRFTGSGYGTEFTLTISSLQSEDFAVYFCQQTYSSPRTFGGGTKVEIK

SEQ ID NO: 9510 - protein, 122 aa, Artificial Sequence; identical to SEQ ID NO: 6246
  Description of Artificial Sequence: Synthetic polypeptide
  VH of XENP018859

SEQ ID NO: 9511 - protein, 107 aa, Artificial Sequence
  Description of Artificial Sequence: Synthetic polypeptide
  VL of XENP018859
SIVMTQSPATLSVSPGERATLSCRASQSVSNDVAWYQQKPGQSPRLLINYASHRYTGVPDRFTGSGYGTEFTLTISSLQSEDFAVYFCQQTYSSPRTFGGGTKVEIK

SEQ ID NO: 9512 - protein, 5 aa, Artificial Sequence
  Description of Artificial Sequence: Synthetic peptide
  XENP018859 vhCDR1
NYWMN

SEQ ID NO: 9513 - protein, 19 aa, Artificial Sequence
  Description of Artificial Sequence: Synthetic peptide
  XENP018859 vhCDR2
EIRLKSNNYATHYAEPVKG

SEQ ID NO: 9514 - protein, 11 aa, Artificial Sequence
  Description of Artificial Sequence: Synthetic peptide
  XENP018859 vhCDR3
YYGNYGGYFDV

SEQ ID NO: 9515 - protein, 11 aa, Artificial Sequence
  Description of Artificial Sequence: Synthetic peptide
  XENP018859 vlCDR1
RASQSVSNDVA

SEQ ID NO: 9516 - protein, 7 aa, Artificial Sequence
  Description of Artificial Sequence: Synthetic peptide
  XENP018859 vlCDR2
YASHRYT

SEQ ID NO: 9517 - protein, 9 aa, Artificial Sequence
  Description of Artificial Sequence: Synthetic peptide
  XENP018859 vlCDR3
QQTYSSPRT

SEQ ID NO: 9518 - protein, 249 aa, Artificial Sequence
  Description of Artificial Sequence: Synthetic polypeptide
  XENP018860 1G6_H1_L1.114_scFv(GKPGS)4
EVQLVESGGGLVKPGGSLRLSCAASGFTFSNYWMNWVRQAPGKGLEWVGEIRLKSNNYATHYAEPVKGRFTISRDDSKSTVYLQMNSLKTEDTAVYYCTRYYGNYGGYFDVWGAGTLVTVSSGKPGSGKPGSGKPGSGKPGSSIVMTQSPATLSVSPGERATLSCRASQSVSNDVAWYQQKPGQSPRLLINYASHRYTGVPDRFTGSGYGTEFTLTISSLQSEDFAVYFCQQGYSSPRTFGGGTKVEIK

SEQ ID NO: 9519 - protein, 122 aa, Artificial Sequence; identical to SEQ ID NO: 6246
  Description of Artificial Sequence: Synthetic polypeptide
  VH of XENP018860

SEQ ID NO: 9520 - protein, 107 aa, Artificial Sequence
  Description of Artificial Sequence: Synthetic polypeptide
  VL of XENP018860
SIVMTQSPATLSVSPGERATLSCRASQSVSNDVAWYQQKPGQSPRLLINYASHRYTGVPDRFTGSGYGTEFTLTISSLQSEDFAVYFCQQGYSSPRTFGGGTKVEIK

SEQ ID NO: 9521 - protein, 5 aa, Artificial Sequence
  Description of Artificial Sequence: Synthetic peptide
  XENP018860 vhCDR1
NYWMN

SEQ ID NO: 9522 - protein, 19 aa, Artificial Sequence
  Description of Artificial Sequence: Synthetic peptide
  XENP018860 vhCDR2
EIRLKSNNYATHYAEPVKG

SEQ ID NO: 9523 - protein, 11 aa, Artificial Sequence
  Description of Artificial Sequence: Synthetic peptide
  XENP018860 vhCDR3
YYGNYGGYFDV

SEQ ID NO: 9524 - protein, 11 aa, Artificial Sequence
  Description of Artificial Sequence: Synthetic peptide
  XENP018860 vlCDR1
RASQSVSNDVA

SEQ ID NO: 9525 - protein, 7 aa, Artificial Sequence
  Description of Artificial Sequence: Synthetic peptide
  XENP018860 vlCDR2
YASHRYT

SEQ ID NO: 9526 - protein, 9 aa, Artificial Sequence
  Description of Artificial Sequence: Synthetic peptide
  XENP018860 vlCDR3
QQGYSSPRT

SEQ ID NO: 9527 - protein, 249 aa, Artificial Sequence
  Description of Artificial Sequence: Synthetic polypeptide
  XENP018861 1G6_H1_L1.115_scFv(GKPGS)4
EVQLVESGGGLVKPGGSLRLSCAASGFTFSNYWMNWVRQAPGKGLEWVGEIRLKSNNYATHYAEPVKGRFTISRDDSKSTVYLQMNSLKTEDTAVYYCTRYYGNYGGYFDVWGAGTLVTVSSGKPGSGKPGSGKPGSGKPGSSIVMTQSPATLSVSPGERATLSCRASQSVSNDVAWYQQKPGQSPRLLINYASHRYTGVPDRFTGSGYGTEFTLTISSLQSEDFAVYFCQQYYSSPRTFGGGTKVEIK

SEQ ID NO: 9528 - protein, 122 aa, Artificial Sequence; identical to SEQ ID NO: 6246
  Description of Artificial Sequence: Synthetic polypeptide
  VH of XENP018861

SEQ ID NO: 9529 - protein, 107 aa, Artificial Sequence
  Description of Artificial Sequence: Synthetic polypeptide
  VL of XENP018861
SIVMTQSPATLSVSPGERATLSCRASQSVSNDVAWYQQKPGQSPRLLINYASHRYTGVPDRFTGSGYGTEFTLTISSLQSEDFAVYFCQQYYSSPRTFGGGTKVEIK

SEQ ID NO: 9530 - protein, 5 aa, Artificial Sequence
  Description of Artificial Sequence: Synthetic peptide
  XENP018861 vhCDR1
NYWMN

SEQ ID NO: 9531 - protein, 19 aa, Artificial Sequence
  Description of Artificial Sequence: Synthetic peptide
  XENP018861 vhCDR2
EIRLKSNNYATHYAEPVKG

SEQ ID NO: 9532 - protein, 11 aa, Artificial Sequence
  Description of Artificial Sequence: Synthetic peptide
  XENP018861 vhCDR3
YYGNYGGYFDV

SEQ ID NO: 9533 - protein, 11 aa, Artificial Sequence
  Description of Artificial Sequence: Synthetic peptide
  XENP018861 vlCDR1
RASQSVSNDVA

SEQ ID NO: 9534 - protein, 7 aa, Artificial Sequence
  Description of Artificial Sequence: Synthetic peptide
  XENP018861 vlCDR2
YASHRYT

SEQ ID NO: 9535 - protein, 9 aa, Artificial Sequence
  Description of Artificial Sequence: Synthetic peptide
  XENP018861 vlCDR3
QQYYSSPRT

SEQ ID NO: 9536 - protein, 249 aa, Artificial Sequence
  Description of Artificial Sequence: Synthetic polypeptide
  XENP018862 1G6_H1_L1.116_scFv(GKPGS)4
EVQLVESGGGLVKPGGSLRLSCAASGFTFSNYWMNWVRQAPGKGLEWVGEIRLKSNNYATHYAEPVKGRFTISRDDSKSTVYLQMNSLKTEDTAVYYCTRYYGNYGGYFDVWGAGTLVTVSSGKPGSGKPGSGKPGSGKPGSSIVMTQSPATLSVSPGERATLSCRASQSVSNDVAWYQQKPGQSPRLLINYASHRYTGVPDRFTGSGYGTEFTLTISSLQSEDFAVYFCQQDFSSPRTFGGGTKVEIK

SEQ ID NO: 9537 - protein, 122 aa, Artificial Sequence; identical to SEQ ID NO: 6246
  Description of Artificial Sequence: Synthetic polypeptide
  VH of XENP018862

SEQ ID NO: 9538 - protein, 107 aa, Artificial Sequence
  Description of Artificial Sequence: Synthetic polypeptide
  VL of XENP018862
SIVMTQSPATLSVSPGERATLSCRASQSVSNDVAWYQQKPGQSPRLLINYASHRYTGVPDRFTGSGYGTEFTLTISSLQSEDFAVYFCQQDFSSPRTFGGGTKVEIK

SEQ ID NO: 9539 - protein, 5 aa, Artificial Sequence
  Description of Artificial Sequence: Synthetic peptide
  XENP018862 vhCDR1
NYWMN

SEQ ID NO: 9540 - protein, 19 aa, Artificial Sequence
  Description of Artificial Sequence: Synthetic peptide
  XENP018862 vhCDR2
EIRLKSNNYATHYAEPVKG

SEQ ID NO: 9541 - protein, 11 aa, Artificial Sequence
  Description of Artificial Sequence: Synthetic peptide
  XENP018862 vhCDR3
YYGNYGGYFDV

SEQ ID NO: 9542 - protein, 11 aa, Artificial Sequence
  Description of Artificial Sequence: Synthetic peptide
  XENP018862 vlCDR1
RASQSVSNDVA

SEQ ID NO: 9543 - protein, 7 aa, Artificial Sequence
  Description of Artificial Sequence: Synthetic peptide
  XENP018862 vlCDR2
YASHRYT

SEQ ID NO: 9544 - protein, 9 aa, Artificial Sequence
  Description of Artificial Sequence: Synthetic peptide
  XENP018862 vlCDR3
QQDFSSPRT

SEQ ID NO: 9545 - protein, 249 aa, Artificial Sequence
  Description of Artificial Sequence: Synthetic polypeptide
  XENP018863 1G6_H1_L1.117_scFv(GKPGS)4
EVQLVESGGGLVKPGGSLRLSCAASGFTFSNYWMNWVRQAPGKGLEWVGEIRLKSNNYATHYAEPVKGRFTISRDDSKSTVYLQMNSLKTEDTAVYYCTRYYGNYGGYFDVWGAGTLVTVSSGKPGSGKPGSGKPGSGKPGSSIVMTQSPATLSVSPGERATLSCRASQSVSNDVAWYQQKPGQSPRLLINYASHRYTGVPDRFTGSGYGTEFTLTISSLQSEDFAVYFCQQDHSSPRTFGGGTKVEIK

SEQ ID NO: 9546 - protein, 122 aa, Artificial Sequence; identical to SEQ ID NO: 6246
  Description of Artificial Sequence: Synthetic polypeptide
  VH of XENP018863

SEQ ID NO: 9547 - protein, 107 aa, Artificial Sequence
  Description of Artificial Sequence: Synthetic polypeptide
  VL of XENP018863
SIVMTQSPATLSVSPGERATLSCRASQSVSNDVAWYQQKPGQSPRLLINYASHRYTGVPDRFTGSGYGTEFTLTISSLQSEDFAVYFCQQDHSSPRTFGGGTKVEIK

SEQ ID NO: 9548 - protein, 5 aa, Artificial Sequence
  Description of Artificial Sequence: Synthetic peptide
  XENP018863 vhCDR1
NYWMN

SEQ ID NO: 9549 - protein, 19 aa, Artificial Sequence
  Description of Artificial Sequence: Synthetic peptide
  XENP018863 vhCDR2
EIRLKSNNYATHYAEPVKG

SEQ ID NO: 9550 - protein, 11 aa, Artificial Sequence
  Description of Artificial Sequence: Synthetic peptide
  XENP018863 vhCDR3
YYGNYGGYFDV

SEQ ID NO: 9551 - protein, 11 aa, Artificial Sequence
  Description of Artificial Sequence: Synthetic peptide
  XENP018863 vlCDR1
RASQSVSNDVA

SEQ ID NO: 9552 - protein, 7 aa, Artificial Sequence
  Description of Artificial Sequence: Synthetic peptide
  XENP018863 vlCDR2
YASHRYT

SEQ ID NO: 9553 - protein, 9 aa, Artificial Sequence
  Description of Artificial Sequence: Synthetic peptide
  XENP018863 vlCDR3
QQDHSSPRT

SEQ ID NO: 9554 - protein, 249 aa, Artificial Sequence
  Description of Artificial Sequence: Synthetic polypeptide
  XENP018864 1G6_H1_L1.118_scFv(GKPGS)4
EVQLVESGGGLVKPGGSLRLSCAASGFTFSNYWMNWVRQAPGKGLEWVGEIRLKSNNYATHYAEPVKGRFTISRDDSKSTVYLQMNSLKTEDTAVYYCTRYYGNYGGYFDVWGAGTLVTVSSGKPGSGKPGSGKPGSGKPGSSIVMTQSPATLSVSPGERATLSCRASQSVSNDVAWYQQKPGQSPRLLINYASHRYTGVPDRFTGSGYGTEFTLTISSLQSEDFAVYFCQQDLSSPRTFGGGTKVEIK

SEQ ID NO: 9555 - protein, 122 aa, Artificial Sequence; identical to SEQ ID NO: 6246
  Description of Artificial Sequence: Synthetic polypeptide
  VH of XENP018864

SEQ ID NO: 9556 - protein, 107 aa, Artificial Sequence
  Description of Artificial Sequence: Synthetic polypeptide
  VL of XENP018864
SIVMTQSPATLSVSPGERATLSCRASQSVSNDVAWYQQKPGQSPRLLINYASHRYTGVPDRFTGSGYGTEFTLTISSLQSEDFAVYFCQQDLSSPRTFGGGTKVEIK

SEQ ID NO: 9557 - protein, 5 aa, Artificial Sequence
  Description of Artificial Sequence: Synthetic peptide
  XENP018864 vhCDR1
NYWMN

SEQ ID NO: 9558 - protein, 19 aa, Artificial Sequence
  Description of Artificial Sequence: Synthetic peptide
  XENP018864 vhCDR2
EIRLKSNNYATHYAEPVKG

SEQ ID NO: 9559 - protein, 11 aa, Artificial Sequence
  Description of Artificial Sequence: Synthetic peptide
  XENP018864 vhCDR3
YYGNYGGYFDV

SEQ ID NO: 9560 - protein, 11 aa, Artificial Sequence
  Description of Artificial Sequence: Synthetic peptide
  XENP018864 vlCDR1
RASQSVSNDVA

SEQ ID NO: 9561 - protein, 7 aa, Artificial Sequence
  Description of Artificial Sequence: Synthetic peptide
  XENP018864 vlCDR2
YASHRYT

SEQ ID NO: 9562 - protein, 9 aa, Artificial Sequence
  Description of Artificial Sequence: Synthetic peptide
  XENP018864 vlCDR3
QQDLSSPRT

SEQ ID NO: 9563 - protein, 249 aa, Artificial Sequence
  Description of Artificial Sequence: Synthetic polypeptide
  XENP018865 1G6_H1_L1.119_scFv(GKPGS)4
EVQLVESGGGLVKPGGSLRLSCAASGFTFSNYWMNWVRQAPGKGLEWVGEIRLKSNNYATHYAEPVKGRFTISRDDSKSTVYLQMNSLKTEDTAVYYCTRYYGNYGGYFDVWGAGTLVTVSSGKPGSGKPGSGKPGSGKPGSSIVMTQSPATLSVSPGERATLSCRASQSVSNDVAWYQQKPGQSPRLLINYASHRYTGVPDRFTGSGYGTEFTLTISSLQSEDFAVYFCQQDWSSPRTFGGGTKVEIK

SEQ ID NO: 9564 - protein, 122 aa, Artificial Sequence; identical to SEQ ID NO: 6246
  Description of Artificial Sequence: Synthetic polypeptide
  VH of XENP018865

SEQ ID NO: 9565 - protein, 107 aa, Artificial Sequence
  Description of Artificial Sequence: Synthetic polypeptide
  VL of XENP018865
SIVMTQSPATLSVSPGERATLSCRASQSVSNDVAWYQQKPGQSPRLLINYASHRYTGVPDRFTGSGYGTEFTLTISSLQSEDFAVYFCQQDWSSPRTFGGGTKVEIK

SEQ ID NO: 9566 - protein, 5 aa, Artificial Sequence
  Description of Artificial Sequence: Synthetic peptide
  XENP018865 vhCDR1
NYWMN

SEQ ID NO: 9567 - protein, 19 aa, Artificial Sequence
  Description of Artificial Sequence: Synthetic peptide
  XENP018865 vhCDR2
EIRLKSNNYATHYAEPVKG

SEQ ID NO: 9568 - protein, 11 aa, Artificial Sequence
  Description of Artificial Sequence: Synthetic peptide
  XENP018865 vhCDR3
YYGNYGGYFDV

SEQ ID NO: 9569 - protein, 11 aa, Artificial Sequence
  Description of Artificial Sequence: Synthetic peptide
  XENP018865 vlCDR1
RASQSVSNDVA

SEQ ID NO: 9570 - protein, 7 aa, Artificial Sequence
  Description of Artificial Sequence: Synthetic peptide
  XENP018865 vlCDR2
YASHRYT

SEQ ID NO: 9571 - protein, 9 aa, Artificial Sequence
  Description of Artificial Sequence: Synthetic peptide
  XENP018865 vlCDR3
QQDWSSPRT

SEQ ID NO: 9572 - protein, 249 aa, Artificial Sequence
  Description of Artificial Sequence: Synthetic polypeptide
  XENP018866 1G6_H1_L1.120_scFv(GKPGS)4
EVQLVESGGGLVKPGGSLRLSCAASGFTFSNYWMNWVRQAPGKGLEWVGEIRLKSNNYATHYAEPVKGRFTISRDDSKSTVYLQMNSLKTEDTAVYYCTRYYGNYGGYFDVWGAGTLVTVSSGKPGSGKPGSGKPGSGKPGSSIVMTQSPATLSVSPGERATLSCRASQSVSNDVAWYQQKPGQSPRLLINYASHRYTGVPDRFTGSGYGTEFTLTISSLQSEDFAVYFCQQDVSSPRTFGGGTKVEIK

SEQ ID NO: 9573 - protein, 122 aa, Artificial Sequence; identical to SEQ ID NO: 6246
  Description of Artificial Sequence: Synthetic polypeptide
  VH of XENP018866

SEQ ID NO: 9574 - protein, 107 aa, Artificial Sequence
  Description of Artificial Sequence: Synthetic polypeptide
  VL of XENP018866
SIVMTQSPATLSVSPGERATLSCRASQSVSNDVAWYQQKPGQSPRLLINYASHRYTGVPDRFTGSGYGTEFTLTISSLQSEDFAVYFCQQDVSSPRTFGGGTKVEIK

SEQ ID NO: 9575 - protein, 5 aa, Artificial Sequence
  Description of Artificial Sequence: Synthetic peptide
  XENP018866 vhCDR1
NYWMN

SEQ ID NO: 9576 - protein, 19 aa, Artificial Sequence
  Description of Artificial Sequence: Synthetic peptide
  XENP018866 vhCDR2
EIRLKSNNYATHYAEPVKG

SEQ ID NO: 9577 - protein, 11 aa, Artificial Sequence
  Description of Artificial Sequence: Synthetic peptide
  XENP018866 vhCDR3
YYGNYGGYFDV

SEQ ID NO: 9578 - protein, 11 aa, Artificial Sequence
  Description of Artificial Sequence: Synthetic peptide
  XENP018866 vlCDR1
RASQSVSNDVA

SEQ ID NO: 9579 - protein, 7 aa, Artificial Sequence
  Description of Artificial Sequence: Synthetic peptide
  XENP018866 vlCDR2
YASHRYT

SEQ ID NO: 9580 - protein, 9 aa, Artificial Sequence
  Description of Artificial Sequence: Synthetic peptide
  XENP018866 vlCDR3
QQDVSSPRT

SEQ ID NO: 9581 - protein, 249 aa, Artificial Sequence
  Description of Artificial Sequence: Synthetic polypeptide
  XENP018867 1G6_H1_L1.121_scFv(GKPGS)4
EVQLVESGGGLVKPGGSLRLSCAASGFTFSNYWMNWVRQAPGKGLEWVGEIRLKSNNYATHYAEPVKGRFTISRDDSKSTVYLQMNSLKTEDTAVYYCTRYYGNYGGYFDVWGAGTLVTVSSGKPGSGKPGSGKPGSGKPGSSIVMTQSPATLSVSPGERATLSCRASQSVSNDVAWYQQKPGQSPRLLINYASHRYTGVPDRFTGSGYGTEFTLTISSLQSEDFAVYFCQQDASSPRTFGGGTKVEIK

SEQ ID NO: 9582 - protein, 122 aa, Artificial Sequence; identical to SEQ ID NO: 6246
  Description of Artificial Sequence: Synthetic polypeptide
  VH of XENP018867

SEQ ID NO: 9583 - protein, 107 aa, Artificial Sequence
  Description of Artificial Sequence: Synthetic polypeptide
  VL of XENP018867
SIVMTQSPATLSVSPGERATLSCRASQSVSNDVAWYQQKPGQSPRLLINYASHRYTGVPDRFTGSGYGTEFTLTISSLQSEDFAVYFCQQDASSPRTFGGGTKVEIK

SEQ ID NO: 9584 - protein, 5 aa, Artificial Sequence
  Description of Artificial Sequence: Synthetic peptide
  XENP018867 vhCDR1
NYWMN

SEQ ID NO: 9585 - protein, 19 aa, Artificial Sequence
  Description of Artificial Sequence: Synthetic peptide
  XENP018867 vhCDR2
EIRLKSNNYATHYAEPVKG

SEQ ID NO: 9586 - protein, 11 aa, Artificial Sequence
  Description of Artificial Sequence: Synthetic peptide
  XENP018867 vhCDR3
YYGNYGGYFDV

SEQ ID NO: 9587 - protein, 11 aa, Artificial Sequence
  Description of Artificial Sequence: Synthetic peptide
  XENP018867 vlCDR1
RASQSVSNDVA

SEQ ID NO: 9588 - protein, 7 aa, Artificial Sequence
  Description of Artificial Sequence: Synthetic peptide
  XENP018867 vlCDR2
YASHRYT

SEQ ID NO: 9589 - protein, 9 aa, Artificial Sequence
  Description of Artificial Sequence: Synthetic peptide
  XENP018867 vlCDR3
QQDASSPRT

SEQ ID NO: 9590 - protein, 249 aa, Artificial Sequence
  Description of Artificial Sequence: Synthetic polypeptide
  XENP018868 1G6_H1_L1.122_scFv(GKPGS)4
EVQLVESGGGLVKPGGSLRLSCAASGFTFSNYWMNWVRQAPGKGLEWVGEIRLKSNNYATHYAEPVKGRFTISRDDSKSTVYLQMNSLKTEDTAVYYCTRYYGNYGGYFDVWGAGTLVTVSSGKPGSGKPGSGKPGSGKPGSSIVMTQSPATLSVSPGERATLSCRASQSVSNDVAWYQQKPGQSPRLLINYASHRYTGVPDRFTGSGYGTEFTLTISSLQSEDFAVYFCQQDQSSPRTFGGGTKVEIK

SEQ ID NO: 9591 - protein, 122 aa, Artificial Sequence; identical to SEQ ID NO: 6246
  Description of Artificial Sequence: Synthetic polypeptide
  VH of XENP018868

SEQ ID NO: 9592 - protein, 107 aa, Artificial Sequence
  Description of Artificial Sequence: Synthetic polypeptide
  VL of XENP018868
SIVMTQSPATLSVSPGERATLSCRASQSVSNDVAWYQQKPGQSPRLLINYASHRYTGVPDRFTGSGYGTEFTLTISSLQSEDFAVYFCQQDQSSPRTFGGGTKVEIK

SEQ ID NO: 9593 - protein, 5 aa, Artificial Sequence
  Description of Artificial Sequence: Synthetic peptide
  XENP018868 vhCDR1
NYWMN

SEQ ID NO: 9594 - protein, 19 aa, Artificial Sequence
  Description of Artificial Sequence: Synthetic peptide
  XENP018868 vhCDR2
EIRLKSNNYATHYAEPVKG

SEQ ID NO: 9595 - protein, 11 aa, Artificial Sequence
  Description of Artificial Sequence: Synthetic peptide
  XENP018868 vhCDR3
YYGNYGGYFDV

SEQ ID NO: 9596 - protein, 11 aa, Artificial Sequence
  Description of Artificial Sequence: Synthetic peptide
  XENP018868 vlCDR1
RASQSVSNDVA

SEQ ID NO: 9597 - protein, 7 aa, Artificial Sequence
  Description of Artificial Sequence: Synthetic peptide
  XENP018868 vlCDR2
YASHRYT

SEQ ID NO: 9598 - protein, 9 aa, Artificial Sequence
  Description of Artificial Sequence: Synthetic peptide
  XENP018868 vlCDR3
QQDQSSPRT

SEQ ID NO: 9599 - protein, 249 aa, Artificial Sequence
  Description of Artificial Sequence: Synthetic polypeptide
  XENP018869 1G6_H1_L1.123_scFv(GKPGS)4
EVQLVESGGGLVKPGGSLRLSCAASGFTFSNYWMNWVRQAPGKGLEWVGEIRLKSNNYATHYAEPVKGRFTISRDDSKSTVYLQMNSLKTEDTAVYYCTRYYGNYGGYFDVWGAGTLVTVSSGKPGSGKPGSGKPGSGKPGSSIVMTQSPATLSVSPGERATLSCRASQSVSNDVAWYQQKPGQSPRLLINYASHRYTGVPDRFTGSGYGTEFTLTISSLQSEDFAVYFCQQDDSSPRTFGGGTKVEIK

SEQ ID NO: 9600 - protein, 122 aa, Artificial Sequence; identical to SEQ ID NO: 6246
  Description of Artificial Sequence: Synthetic polypeptide
  VH of XENP018869

SEQ ID NO: 9601 - protein, 107 aa, Artificial Sequence
  Description of Artificial Sequence: Synthetic polypeptide
  VL of XENP018869
SIVMTQSPATLSVSPGERATLSCRASQSVSNDVAWYQQKPGQSPRLLINYASHRYTGVPDRFTGSGYGTEFTLTISSLQSEDFAVYFCQQDDSSPRTFGGGTKVEIK

SEQ ID NO: 9602 - protein, 5 aa, Artificial Sequence
  Description of Artificial Sequence: Synthetic peptide
  XENP018869 vhCDR1
NYWMN

SEQ ID NO: 9603 - protein, 19 aa, Artificial Sequence
  Description of Artificial Sequence: Synthetic peptide
  XENP018869 vhCDR2
EIRLKSNNYATHYAEPVKG

SEQ ID NO: 9604 - protein, 11 aa, Artificial Sequence
  Description of Artificial Sequence: Synthetic peptide
  XENP018869 vhCDR3
YYGNYGGYFDV

SEQ ID NO: 9605 - protein, 11 aa, Artificial Sequence
  Description of Artificial Sequence: Synthetic peptide
  XENP018869 vlCDR1
RASQSVSNDVA

SEQ ID NO: 9606 - protein, 7 aa, Artificial Sequence
  Description of Artificial Sequence: Synthetic peptide
  XENP018869 vlCDR2
YASHRYT

SEQ ID NO: 9607 - protein, 9 aa, Artificial Sequence
  Description of Artificial Sequence: Synthetic peptide
  XENP018869 vlCDR3
QQDDSSPRT

SEQ ID NO: 9608 - protein, 249 aa, Artificial Sequence
  Description of Artificial Sequence: Synthetic polypeptide
  XENP018870 1G6_H1_L1.124_scFv(GKPGS)4
EVQLVESGGGLVKPGGSLRLSCAASGFTFSNYWMNWVRQAPGKGLEWVGEIRLKSNNYATHYAEPVKGRFTISRDDSKSTVYLQMNSLKTEDTAVYYCTRYYGNYGGYFDVWGAGTLVTVSSGKPGSGKPGSGKPGSGKPGSSIVMTQSPATLSVSPGERATLSCRASQSVSNDVAWYQQKPGQSPRLLINYASHRYTGVPDRFTGSGYGTEFTLTISSLQSEDFAVYFCQQDKSSPRTFGGGTKVEIK

SEQ ID NO: 9609 - protein, 122 aa, Artificial Sequence; identical to SEQ ID NO: 6246
  Description of Artificial Sequence: Synthetic polypeptide
  VH of XENP018870

SEQ ID NO: 9610 - protein, 107 aa, Artificial Sequence
  Description of Artificial Sequence: Synthetic polypeptide
  VL of XENP018870
SIVMTQSPATLSVSPGERATLSCRASQSVSNDVAWYQQKPGQSPRLLINYASHRYTGVPDRFTGSGYGTEFTLTISSLQSEDFAVYFCQQDKSSPRTFGGGTKVEIK

SEQ ID NO: 9611 - protein, 5 aa, Artificial Sequence
  Description of Artificial Sequence: Synthetic peptide
  XENP018870 vhCDR1
NYWMN

SEQ ID NO: 9612 - protein, 19 aa, Artificial Sequence
  Description of Artificial Sequence: Synthetic peptide
  XENP018870 vhCDR2
EIRLKSNNYATHYAEPVKG

SEQ ID NO: 9613 - protein, 11 aa, Artificial Sequence
  Description of Artificial Sequence: Synthetic peptide
  XENP018870 vhCDR3
YYGNYGGYFDV

SEQ ID NO: 9614 - protein, 11 aa, Artificial Sequence
  Description of Artificial Sequence: Synthetic peptide
  XENP018870 vlCDR1
RASQSVSNDVA

SEQ ID NO: 9615 - protein, 7 aa, Artificial Sequence
  Description of Artificial Sequence: Synthetic peptide
  XENP018870 vlCDR2
YASHRYT

SEQ ID NO: 9616 - protein, 9 aa, Artificial Sequence
  Description of Artificial Sequence: Synthetic peptide
  XENP018870 vlCDR3
QQDKSSPRT

SEQ ID NO: 9617 - protein, 249 aa, Artificial Sequence
  Description of Artificial Sequence: Synthetic polypeptide
  XENP018871 1G6_H1_L1.125_scFv(GKPGS)4
EVQLVESGGGLVKPGGSLRLSCAASGFTFSNYWMNWVRQAPGKGLEWVGEIRLKSNNYATHYAEPVKGRFTISRDDSKSTVYLQMNSLKTEDTAVYYCTRYYGNYGGYFDVWGAGTLVTVSSGKPGSGKPGSGKPGSGKPGSSIVMTQSPATLSVSPGERATLSCRASQSVSNDVAWYQQKPGQSPRLLINYASHRYTGVPDRFTGSGYGTEFTLTISSLQSEDFAVYFCQQDSSSPRTFGGGTKVEIK

SEQ ID NO: 9618 - protein, 122 aa, Artificial Sequence; identical to SEQ ID NO: 6246
  Description of Artificial Sequence: Synthetic polypeptide
  VH of XENP018871

SEQ ID NO: 9619 - protein, 107 aa, Artificial Sequence
  Description of Artificial Sequence: Synthetic polypeptide
  VL of XENP018871
SIVMTQSPATLSVSPGERATLSCRASQSVSNDVAWYQQKPGQSPRLLINYASHRYTGVPDRFTGSGYGTEFTLTISSLQSEDFAVYFCQQDSSSPRTFGGGTKVEIK

SEQ ID NO: 9620 - protein, 5 aa, Artificial Sequence
  Description of Artificial Sequence: Synthetic peptide
  XENP018871 vhCDR1
NYWMN

SEQ ID NO: 9621 - protein, 19 aa, Artificial Sequence
  Description of Artificial Sequence: Synthetic peptide
  XENP018871 vhCDR2
EIRLKSNNYATHYAEPVKG

SEQ ID NO: 9622 - protein, 11 aa, Artificial Sequence
  Description of Artificial Sequence: Synthetic peptide
  XENP018871 vhCDR3
YYGNYGGYFDV

SEQ ID NO: 9623 - protein, 11 aa, Artificial Sequence
  Description of Artificial Sequence: Synthetic peptide
  XENP018871 vlCDR1
RASQSVSNDVA

SEQ ID NO: 9624 - protein, 7 aa, Artificial Sequence
  Description of Artificial Sequence: Synthetic peptide
  XENP018871 vlCDR2
YASHRYT

SEQ ID NO: 9625 - protein, 9 aa, Artificial Sequence
  Description of Artificial Sequence: Synthetic peptide
  XENP018871 vlCDR3
QQDSSSPRT

SEQ ID NO: 9626 - protein, 249 aa, Artificial Sequence
  Description of Artificial Sequence: Synthetic polypeptide
  XENP018872 1G6_H1_L1.126_scFv(GKPGS)4
EVQLVESGGGLVKPGGSLRLSCAASGFTFSNYWMNWVRQAPGKGLEWVGEIRLKSNNYATHYAEPVKGRFTISRDDSKSTVYLQMNSLKTEDTAVYYCTRYYGNYGGYFDVWGAGTLVTVSSGKPGSGKPGSGKPGSGKPGSSIVMTQSPATLSVSPGERATLSCRASQSVSNDVAWYQQKPGQSPRLLINYASHRYTGVPDRFTGSGYGTEFTLTISSLQSEDFAVYFCQQDGSSPRTFGGGTKVEIK

SEQ ID NO: 9627 - protein, 122 aa, Artificial Sequence; identical to SEQ ID NO: 6246
  Description of Artificial Sequence: Synthetic polypeptide
  VH of XENP018872

SEQ ID NO: 9628 - protein, 107 aa, Artificial Sequence
  Description of Artificial Sequence: Synthetic polypeptide
  VL of XENP018872
SIVMTQSPATLSVSPGERATLSCRASQSVSNDVAWYQQKPGQSPRLLINYASHRYTGVPDRFTGSGYGTEFTLTISSLQSEDFAVYFCQQDGSSPRTFGGGTKVEIK

SEQ ID NO: 9629 - protein, 5 aa, Artificial Sequence
  Description of Artificial Sequence: Synthetic peptide
  XENP018872 vhCDR1
NYWMN

SEQ ID NO: 9630 - protein, 19 aa, Artificial Sequence
  Description of Artificial Sequence: Synthetic peptide
  XENP018872 vhCDR2
EIRLKSNNYATHYAEPVKG

SEQ ID NO: 9631 - protein, 11 aa, Artificial Sequence
  Description of Artificial Sequence: Synthetic peptide
  XENP018872 vhCDR3
YYGNYGGYFDV

SEQ ID NO: 9632 - protein, 11 aa, Artificial Sequence
  Description of Artificial Sequence: Synthetic peptide
  XENP018872 vlCDR1
RASQSVSNDVA

SEQ ID NO: 9633 - protein, 7 aa, Artificial Sequence
  Description of Artificial Sequence: Synthetic peptide
  XENP018872 vlCDR2
YASHRYT

SEQ ID NO: 9634 - protein, 9 aa, Artificial Sequence
  Description of Artificial Sequence: Synthetic peptide
  XENP018872 vlCDR3
QQDGSSPRT

SEQ ID NO: 9635 - protein, 249 aa, Artificial Sequence
  Description of Artificial Sequence: Synthetic polypeptide
  XENP018873 1G6_H1_L1.127_scFv(GKPGS)4
EVQLVESGGGLVKPGGSLRLSCAASGFTFSNYWMNWVRQAPGKGLEWVGEIRLKSNNYATHYAEPVKGRFTISRDDSKSTVYLQMNSLKTEDTAVYYCTRYYGNYGGYFDVWGAGTLVTVSSGKPGSGKPGSGKPGSGKPGSSIVMTQSPATLSVSPGERATLSCRASQSVSNDVAWYQQKPGQSPRLLINYASHRYTGVPDRFTGSGYGTEFTLTISSLQSEDFAVYFCQQDYTSPRTFGGGTKVEIK

SEQ ID NO: 9636 - protein, 122 aa, Artificial Sequence; identical to SEQ ID NO: 6246
  Description of Artificial Sequence: Synthetic polypeptide
  VH of XENP018873

SEQ ID NO: 9637 - protein, 107 aa, Artificial Sequence
  Description of Artificial Sequence: Synthetic polypeptide
  VL of XENP018873
SIVMTQSPATLSVSPGERATLSCRASQSVSNDVAWYQQKPGQSPRLLINYASHRYTGVPDRFTGSGYGTEFTLTISSLQSEDFAVYFCQQDYTSPRTFGGGTKVEIK

SEQ ID NO: 9638 - protein, 5 aa, Artificial Sequence
  Description of Artificial Sequence: Synthetic peptide
  XENP018873 vhCDR1
NYWMN

SEQ ID NO: 9639 - protein, 19 aa, Artificial Sequence
  Description of Artificial Sequence: Synthetic peptide
  XENP018873 vhCDR2
EIRLKSNNYATHYAEPVKG

SEQ ID NO: 9640 - protein, 11 aa, Artificial Sequence
  Description of Artificial Sequence: Synthetic peptide
  XENP018873 vhCDR3
YYGNYGGYFDV

SEQ ID NO: 9641 - protein, 11 aa, Artificial Sequence
  Description of Artificial Sequence: Synthetic peptide
  XENP018873 vlCDR1
RASQSVSNDVA

SEQ ID NO: 9642 - protein, 7 aa, Artificial Sequence
  Description of Artificial Sequence: Synthetic peptide
  XENP018873 vlCDR2
YASHRYT

SEQ ID NO: 9643 - protein, 9 aa, Artificial Sequence
  Description of Artificial Sequence: Synthetic peptide
  XENP018873 vlCDR3
QQDYTSPRT

SEQ ID NO: 9644 - protein, 249 aa, Artificial Sequence
  Description of Artificial Sequence: Synthetic polypeptide
  XENP018874 1G6_H1_L1.128_scFv(GKPGS)4
EVQLVESGGGLVKPGGSLRLSCAASGFTFSNYWMNWVRQAPGKGLEWVGEIRLKSNNYATHYAEPVKGRFTISRDDSKSTVYLQMNSLKTEDTAVYYCTRYYGNYGGYFDVWGAGTLVTVSSGKPGSGKPGSGKPGSGKPGSSIVMTQSPATLSVSPGERATLSCRASQSVSNDVAWYQQKPGQSPRLLINYASHRYTGVPDRFTGSGYGTEFTLTISSLQSEDFAVYFCQQDYASPRTFGGGTKVEIK

SEQ ID NO: 9645 - protein, 122 aa, Artificial Sequence; identical to SEQ ID NO: 6246
  Description of Artificial Sequence: Synthetic polypeptide
  VH of XENP018874

SEQ ID NO: 9646 - protein, 107 aa, Artificial Sequence
  Description of Artificial Sequence: Synthetic polypeptide
  VL of XENP018874
SIVMTQSPATLSVSPGERATLSCRASQSVSNDVAWYQQKPGQSPRLLINYASHRYTGVPDRFTGSGYGTEFTLTISSLQSEDFAVYFCQQDYASPRTFGGGTKVEIK

SEQ ID NO: 9647 - protein, 5 aa, Artificial Sequence
  Description of Artificial Sequence: Synthetic peptide
  XENP018874 vhCDR1
NYWMN

SEQ ID NO: 9648 - protein, 19 aa, Artificial Sequence
  Description of Artificial Sequence: Synthetic peptide
  XENP018874 vhCDR2
EIRLKSNNYATHYAEPVKG

SEQ ID NO: 9649 - protein, 11 aa, Artificial Sequence
  Description of Artificial Sequence: Synthetic peptide
  XENP018874 vhCDR3
YYGNYGGYFDV

SEQ ID NO: 9650 - protein, 11 aa, Artificial Sequence
  Description of Artificial Sequence: Synthetic peptide
  XENP018874 vlCDR1
RASQSVSNDVA

SEQ ID NO: 9651 - protein, 7 aa, Artificial Sequence
  Description of Artificial Sequence: Synthetic peptide
  XENP018874 vlCDR2
YASHRYT

SEQ ID NO: 9652 - protein, 9 aa, Artificial Sequence
  Description of Artificial Sequence: Synthetic peptide
  XENP018874 vlCDR3
QQDYASPRT

SEQ ID NO: 9653 - protein, 249 aa, Artificial Sequence
  Description of Artificial Sequence: Synthetic polypeptide
  XENP018875 1G6_H1_L1.129_scFv(GKPGS)4
EVQLVESGGGLVKPGGSLRLSCAASGFTFSNYWMNWVRQAPGKGLEWVGEIRLKSNNYATHYAEPVKGRFTISRDDSKSTVYLQMNSLKTEDTAVYYCTRYYGNYGGYFDVWGAGTLVTVSSGKPGSGKPGSGKPGSGKPGSSIVMTQSPATLSVSPGERATLSCRASQSVSNDVAWYQQKPGQSPRLLINYASHRYTGVPDRFTGSGYGTEFTLTISSLQSEDFAVYFCQQDYQSPRTFGGGTKVEIK

SEQ ID NO: 9654 - protein, 122 aa, Artificial Sequence; identical to SEQ ID NO: 6246
  Description of Artificial Sequence: Synthetic polypeptide
  VH of XENP018875

SEQ ID NO: 9655 - protein, 107 aa, Artificial Sequence
  Description of Artificial Sequence: Synthetic polypeptide
  VL of XENP018875
SIVMTQSPATLSVSPGERATLSCRASQSVSNDVAWYQQKPGQSPRLLINYASHRYTGVPDRFTGSGYGTEFTLTISSLQSEDFAVYFCQQDYQSPRTFGGGTKVEIK

SEQ ID NO: 9656 - protein, 5 aa, Artificial Sequence
  Description of Artificial Sequence: Synthetic peptide
  XENP018875 vhCDR1
NYWMN

SEQ ID NO: 9657 - protein, 19 aa, Artificial Sequence
  Description of Artificial Sequence: Synthetic peptide
  XENP018875 vhCDR2
EIRLKSNNYATHYAEPVKG

SEQ ID NO: 9658 - protein, 11 aa, Artificial Sequence
  Description of Artificial Sequence: Synthetic peptide
  XENP018875 vhCDR3
YYGNYGGYFDV

SEQ ID NO: 9659 - protein, 11 aa, Artificial Sequence
  Description of Artificial Sequence: Synthetic peptide
  XENP018875 vlCDR1
RASQSVSNDVA

SEQ ID NO: 9660 - protein, 7 aa, Artificial Sequence
  Description of Artificial Sequence: Synthetic peptide
  XENP018875 vlCDR2
YASHRYT

SEQ ID NO: 9661 - protein, 9 aa, Artificial Sequence
  Description of Artificial Sequence: Synthetic peptide
  XENP018875 vlCDR3
QQDYQSPRT

SEQ ID NO: 9662 - protein, 249 aa, Artificial Sequence
  Description of Artificial Sequence: Synthetic polypeptide
  XENP018876 1G6_H1_L1.130_scFv(GKPGS)4
EVQLVESGGGLVKPGGSLRLSCAASGFTFSNYWMNWVRQAPGKGLEWVGEIRLKSNNYATHYAEPVKGRFTISRDDSKSTVYLQMNSLKTEDTAVYYCTRYYGNYGGYFDVWGAGTLVTVSSGKPGSGKPGSGKPGSGKPGSSIVMTQSPATLSVSPGERATLSCRASQSVSNDVAWYQQKPGQSPRLLINYASHRYTGVPDRFTGSGYGTEFTLTISSLQSEDFAVYFCQQDYGSPRTFGGGTKVEIK

SEQ ID NO: 9663 - protein, 122 aa, Artificial Sequence; identical to SEQ ID NO: 6246
  Description of Artificial Sequence: Synthetic polypeptide
  VH of XENP018876

SEQ ID NO: 9664 - protein, 107 aa, Artificial Sequence
  Description of Artificial Sequence: Synthetic polypeptide
  VL of XENP018876
SIVMTQSPATLSVSPGERATLSCRASQSVSNDVAWYQQKPGQSPRLLINYASHRYTGVPDRFTGSGYGTEFTLTISSLQSEDFAVYFCQQDYGSPRTFGGGTKVEIK

SEQ ID NO: 9665 - protein, 5 aa, Artificial Sequence
  Description of Artificial Sequence: Synthetic peptide
  XENP018876 vhCDR1
NYWMN

SEQ ID NO: 9666 - protein, 19 aa, Artificial Sequence
  Description of Artificial Sequence: Synthetic peptide
  XENP018876 vhCDR2
EIRLKSNNYATHYAEPVKG

SEQ ID NO: 9667 - protein, 11 aa, Artificial Sequence
  Description of Artificial Sequence: Synthetic peptide
  XENP018876 vhCDR3
YYGNYGGYFDV

SEQ ID NO: 9668 - protein, 11 aa, Artificial Sequence
  Description of Artificial Sequence: Synthetic peptide
  XENP018876 vlCDR1
RASQSVSNDVA

SEQ ID NO: 9669 - protein, 7 aa, Artificial Sequence
  Description of Artificial Sequence: Synthetic peptide
  XENP018876 vlCDR2
YASHRYT

SEQ ID NO: 9670 - protein, 9 aa, Artificial Sequence
  Description of Artificial Sequence: Synthetic peptide
  XENP018876 vlCDR3
QQDYGSPRT

SEQ ID NO: 9671 - protein, 249 aa, Artificial Sequence
  Description of Artificial Sequence: Synthetic polypeptide
  XENP018877 1G6_H1_L1.131_scFv(GKPGS)4
EVQLVESGGGLVKPGGSLRLSCAASGFTFSNYWMNWVRQAPGKGLEWVGEIRLKSNNYATHYAEPVKGRFTISRDDSKSTVYLQMNSLKTEDTAVYYCTRYYGNYGGYFDVWGAGTLVTVSSGKPGSGKPGSGKPGSGKPGSSIVMTQSPATLSVSPGERATLSCRASQSVSNDVAWYQQKPGQSPRLLINYASHRYTGVPDRFTGSGYGTEFTLTISSLQSEDFAVYFCQQDYVSPRTFGGGTKVEIK

SEQ ID NO: 9672 - protein, 122 aa, Artificial Sequence; identical to SEQ ID NO: 6246
  Description of Artificial Sequence: Synthetic polypeptide
  VH of XENP018877

SEQ ID NO: 9673 - protein, 107 aa, Artificial Sequence
  Description of Artificial Sequence: Synthetic polypeptide
  VL of XENP018877
SIVMTQSPATLSVSPGERATLSCRASQSVSNDVAWYQQKPGQSPRLLINYASHRYTGVPDRFTGSGYGTEFTLTISSLQSEDFAVYFCQQDYVSPRTFGGGTKVEIK

SEQ ID NO: 9674 - protein, 5 aa, Artificial Sequence
  Description of Artificial Sequence: Synthetic peptide
  XENP018877 vhCDR1
NYWMN

SEQ ID NO: 9675 - protein, 19 aa, Artificial Sequence
  Description of Artificial Sequence: Synthetic peptide
  XENP018877 vhCDR2
EIRLKSNNYATHYAEPVKG

SEQ ID NO: 9676 - protein, 11 aa, Artificial Sequence
  Description of Artificial Sequence: Synthetic peptide
  XENP018877 vhCDR3
YYGNYGGYFDV

SEQ ID NO: 9677 - protein, 11 aa, Artificial Sequence
  Description of Artificial Sequence: Synthetic peptide
  XENP018877 vlCDR1
RASQSVSNDVA

SEQ ID NO: 9678 - protein, 7 aa, Artificial Sequence
  Description of Artificial Sequence: Synthetic peptide
  XENP018877 vlCDR2
YASHRYT

SEQ ID NO: 9679 - protein, 9 aa, Artificial Sequence
  Description of Artificial Sequence: Synthetic peptide
  XENP018877 vlCDR3
QQDYVSPRT

SEQ ID NO: 9680 - protein, 249 aa, Artificial Sequence
  Description of Artificial Sequence: Synthetic polypeptide
  XENP018878 1G6_H1_L1.132_scFv(GKPGS)4
EVQLVESGGGLVKPGGSLRLSCAASGFTFSNYWMNWVRQAPGKGLEWVGEIRLKSNNYATHYAEPVKGRFTISRDDSKSTVYLQMNSLKTEDTAVYYCTRYYGNYGGYFDVWGAGTLVTVSSGKPGSGKPGSGKPGSGKPGSSIVMTQSPATLSVSPGERATLSCRASQSVSNDVAWYQQKPGQSPRLLINYASHRYTGVPDRFTGSGYGTEFTLTISSLQSEDFAVYFCQQDYHSPRTFGGGTKVEIK

SEQ ID NO: 9681 - protein, 122 aa, Artificial Sequence; identical to SEQ ID NO: 6246
  Description of Artificial Sequence: Synthetic polypeptide
  VH of XENP018878

SEQ ID NO: 9682 - protein, 107 aa, Artificial Sequence
  Description of Artificial Sequence: Synthetic polypeptide
  VL of XENP018878
SIVMTQSPATLSVSPGERATLSCRASQSVSNDVAWYQQKPGQSPRLLINYASHRYTGVPDRFTGSGYGTEFTLTISSLQSEDFAVYFCQQDYHSPRTFGGGTKVEIK

SEQ ID NO: 9683 - protein, 5 aa, Artificial Sequence
  Description of Artificial Sequence: Synthetic peptide
  XENP018878 vhCDR1
NYWMN

SEQ ID NO: 9684 - protein, 19 aa, Artificial Sequence
  Description of Artificial Sequence: Synthetic peptide
  XENP018878 vhCDR2
EIRLKSNNYATHYAEPVKG

SEQ ID NO: 9685 - protein, 11 aa, Artificial Sequence
  Description of Artificial Sequence: Synthetic peptide
  XENP018878 vhCDR3
YYGNYGGYFDV

SEQ ID NO: 9686 - protein, 11 aa, Artificial Sequence
  Description of Artificial Sequence: Synthetic peptide
  XENP018878 vlCDR1
RASQSVSNDVA

SEQ ID NO: 9687 - protein, 7 aa, Artificial Sequence
  Description of Artificial Sequence: Synthetic peptide
  XENP018878 vlCDR2
YASHRYT

SEQ ID NO: 9688 - protein, 9 aa, Artificial Sequence
  Description of Artificial Sequence: Synthetic peptide
  XENP018878 vlCDR3
QQDYHSPRT

SEQ ID NO: 9689 - protein, 249 aa, Artificial Sequence
  Description of Artificial Sequence: Synthetic polypeptide
  XENP018879 1G6_H1_L1.133_scFv(GKPGS)4
EVQLVESGGGLVKPGGSLRLSCAASGFTFSNYWMNWVRQAPGKGLEWVGEIRLKSNNYATHYAEPVKGRFTISRDDSKSTVYLQMNSLKTEDTAVYYCTRYYGNYGGYFDVWGAGTLVTVSSGKPGSGKPGSGKPGSGKPGSSIVMTQSPATLSVSPGERATLSCRASQSVSNDVAWYQQKPGQSPRLLINYASHRYTGVPDRFTGSGYGTEFTLTISSLQSEDFAVYFCQQDYDSPRTFGGGTKVEIK

SEQ ID NO: 9690 - protein, 122 aa, Artificial Sequence; identical to SEQ ID NO: 6246
  Description of Artificial Sequence: Synthetic polypeptide
  VH of XENP018879

SEQ ID NO: 9691 - protein, 107 aa, Artificial Sequence
  Description of Artificial Sequence: Synthetic polypeptide
  VL of XENP018879
SIVMTQSPATLSVSPGERATLSCRASQSVSNDVAWYQQKPGQSPRLLINYASHRYTGVPDRFTGSGYGTEFTLTISSLQSEDFAVYFCQQDYDSPRTFGGGTKVEIK

SEQ ID NO: 9692 - protein, 5 aa, Artificial Sequence
  Description of Artificial Sequence: Synthetic peptide
  XENP018879 vhCDR1
NYWMN

SEQ ID NO: 9693 - protein, 19 aa, Artificial Sequence
  Description of Artificial Sequence: Synthetic peptide
  XENP018879 vhCDR2
EIRLKSNNYATHYAEPVKG

SEQ ID NO: 9694 - protein, 11 aa, Artificial Sequence
  Description of Artificial Sequence: Synthetic peptide
  XENP018879 vhCDR3
YYGNYGGYFDV

SEQ ID NO: 9695 - protein, 11 aa, Artificial Sequence
  Description of Artificial Sequence: Synthetic peptide
  XENP018879 vlCDR1
RASQSVSNDVA

SEQ ID NO: 9696 - protein, 7 aa, Artificial Sequence
  Description of Artificial Sequence: Synthetic peptide
  XENP018879 vlCDR2
YASHRYT

SEQ ID NO: 9697 - protein, 9 aa, Artificial Sequence
  Description of Artificial Sequence: Synthetic peptide
  XENP018879 vlCDR3
QQDYDSPRT

SEQ ID NO: 9698 - protein, 249 aa, Artificial Sequence
  Description of Artificial Sequence: Synthetic polypeptide
  XENP018880 1G6_H1_L1.134_scFv(GKPGS)4
EVQLVESGGGLVKPGGSLRLSCAASGFTFSNYWMNWVRQAPGKGLEWVGEIRLKSNNYATHYAEPVKGRFTISRDDSKSTVYLQMNSLKTEDTAVYYCTRYYGNYGGYFDVWGAGTLVTVSSGKPGSGKPGSGKPGSGKPGSSIVMTQSPATLSVSPGERATLSCRASQSVSNDVAWYQQKPGQSPRLLINYASHRYTGVPDRFTGSGYGTEFTLTISSLQSEDFAVYFCQQDYKSPRTFGGGTKVEIK

SEQ ID NO: 9699 - protein, 122 aa, Artificial Sequence; identical to SEQ ID NO: 6246
  Description of Artificial Sequence: Synthetic polypeptide
  VH of XENP018880

SEQ ID NO: 9700 - protein, 107 aa, Artificial Sequence
  Description of Artificial Sequence: Synthetic polypeptide
  VL of XENP018880
SIVMTQSPATLSVSPGERATLSCRASQSVSNDVAWYQQKPGQSPRLLINYASHRYTGVPDRFTGSGYGTEFTLTISSLQSEDFAVYFCQQDYKSPRTFGGGTKVEIK

SEQ ID NO: 9701 - protein, 5 aa, Artificial Sequence
  Description of Artificial Sequence: Synthetic peptide
  XENP018880 vhCDR1
NYWMN

SEQ ID NO: 9702 - protein, 19 aa, Artificial Sequence
  Description of Artificial Sequence: Synthetic peptide
  XENP018880 vhCDR2
EIRLKSNNYATHYAEPVKG

SEQ ID NO: 9703 - protein, 11 aa, Artificial Sequence
  Description of Artificial Sequence: Synthetic peptide
  XENP018880 vhCDR3
YYGNYGGYFDV

SEQ ID NO: 9704 - protein, 11 aa, Artificial Sequence
  Description of Artificial Sequence: Synthetic peptide
  XENP018880 vlCDR1
RASQSVSNDVA

SEQ ID NO: 9705 - protein, 7 aa, Artificial Sequence
  Description of Artificial Sequence: Synthetic peptide
  XENP018880 vlCDR2
YASHRYT

SEQ ID NO: 9706 - protein, 9 aa, Artificial Sequence
  Description of Artificial Sequence: Synthetic peptide
  XENP018880 vlCDR3
QQDYKSPRT

SEQ ID NO: 9707 - protein, 249 aa, Artificial Sequence
  Description of Artificial Sequence: Synthetic polypeptide
  XENP018881 1G6_H1_L1.135_scFv(GKPGS)4
EVQLVESGGGLVKPGGSLRLSCAASGFTFSNYWMNWVRQAPGKGLEWVGEIRLKSNNYATHYAEPVKGRFTISRDDSKSTVYLQMNSLKTEDTAVYYCTRYYGNYGGYFDVWGAGTLVTVSSGKPGSGKPGSGKPGSGKPGSSIVMTQSPATLSVSPGERATLSCRASQSVSNDVAWYQQKPGQSPRLLINYASHRYTGVPDRFTGSGYGTEFTLTISSLQSEDFAVYFCQQDYFSPRTFGGGTKVEIK

SEQ ID NO: 9708 - protein, 122 aa, Artificial Sequence; identical to SEQ ID NO: 6246
  Description of Artificial Sequence: Synthetic polypeptide
  VH of XENP018881

SEQ ID NO: 9709 - protein, 107 aa, Artificial Sequence
  Description of Artificial Sequence: Synthetic polypeptide
  VL of XENP018881
SIVMTQSPATLSVSPGERATLSCRASQSVSNDVAWYQQKPGQSPRLLINYASHRYTGVPDRFTGSGYGTEFTLTISSLQSEDFAVYFCQQDYFSPRTFGGGTKVEIK

SEQ ID NO: 9710 - protein, 5 aa, Artificial Sequence
  Description of Artificial Sequence: Synthetic peptide
  XENP018881 vhCDR1
NYWMN

SEQ ID NO: 9711 - protein, 19 aa, Artificial Sequence
  Description of Artificial Sequence: Synthetic peptide
  XENP018881 vhCDR2
EIRLKSNNYATHYAEPVKG

SEQ ID NO: 9712 - protein, 11 aa, Artificial Sequence
  Description of Artificial Sequence: Synthetic peptide
  XENP018881 vhCDR3
YYGNYGGYFDV

SEQ ID NO: 9713 - protein, 11 aa, Artificial Sequence
  Description of Artificial Sequence: Synthetic peptide
  XENP018881 vlCDR1
RASQSVSNDVA

SEQ ID NO: 9714 - protein, 7 aa, Artificial Sequence
  Description of Artificial Sequence: Synthetic peptide
  XENP018881 vlCDR2
YASHRYT

SEQ ID NO: 9715 - protein, 9 aa, Artificial Sequence
  Description of Artificial Sequence: Synthetic peptide
  XENP018881 vlCDR3
QQDYFSPRT

SEQ ID NO: 9716 - protein, 249 aa, Artificial Sequence
  Description of Artificial Sequence: Synthetic polypeptide
  XENP018882 1G6_H1_L1.136_scFv(GKPGS)4
EVQLVESGGGLVKPGGSLRLSCAASGFTFSNYWMNWVRQAPGKGLEWVGEIRLKSNNYATHYAEPVKGRFTISRDDSKSTVYLQMNSLKTEDTAVYYCTRYYGNYGGYFDVWGAGTLVTVSSGKPGSGKPGSGKPGSGKPGSSIVMTQSPATLSVSPGERATLSCRASQSVSNDVAWYQQKPGQSPRLLINYASHRYTGVPDRFTGSGYGTEFTLTISSLQSEDFAVYFCQQDYSTPRTFGGGTKVEIK

SEQ ID NO: 9717 - protein, 122 aa, Artificial Sequence; identical to SEQ ID NO: 6246
  Description of Artificial Sequence: Synthetic polypeptide
  VH of XENP018882

SEQ ID NO: 9718 - protein, 107 aa, Artificial Sequence
  Description of Artificial Sequence: Synthetic polypeptide
  VL of XENP018882
SIVMTQSPATLSVSPGERATLSCRASQSVSNDVAWYQQKPGQSPRLLINYASHRYTGVPDRFTGSGYGTEFTLTISSLQSEDFAVYFCQQDYSTPRTFGGGTKVEIK

SEQ ID NO: 9719 - protein, 5 aa, Artificial Sequence
  Description of Artificial Sequence: Synthetic peptide
  XENP018882 vhCDR1
NYWMN

SEQ ID NO: 9720 - protein, 19 aa, Artificial Sequence
  Description of Artificial Sequence: Synthetic peptide
  XENP018882 vhCDR2
EIRLKSNNYATHYAEPVKG

SEQ ID NO: 9721 - protein, 11 aa, Artificial Sequence
  Description of Artificial Sequence: Synthetic peptide
  XENP018882 vhCDR3
YYGNYGGYFDV

SEQ ID NO: 9722 - protein, 11 aa, Artificial Sequence
  Description of Artificial Sequence: Synthetic peptide
  XENP018882 vlCDR1
RASQSVSNDVA

SEQ ID NO: 9723 - protein, 7 aa, Artificial Sequence
  Description of Artificial Sequence: Synthetic peptide
  XENP018882 vlCDR2
YASHRYT

SEQ ID NO: 9724 - protein, 9 aa, Artificial Sequence
  Description of Artificial Sequence: Synthetic peptide
  XENP018882 vlCDR3
QQDYSTPRT

SEQ ID NO: 9725 - protein, 249 aa, Artificial Sequence
  Description of Artificial Sequence: Synthetic polypeptide
  XENP018883 1G6_H1_L1.137_scFv(GKPGS)4
EVQLVESGGGLVKPGGSLRLSCAASGFTFSNYWMNWVRQAPGKGLEWVGEIRLKSNNYATHYAEPVKGRFTISRDDSKSTVYLQMNSLKTEDTAVYYCTRYYGNYGGYFDVWGAGTLVTVSSGKPGSGKPGSGKPGSGKPGSSIVMTQSPATLSVSPGERATLSCRASQSVSNDVAWYQQKPGQSPRLLINYASHRYTGVPDRFTGSGYGTEFTLTISSLQSEDFAVYFCQQDYSAPRTFGGGTKVEIK

SEQ ID NO: 9726 - protein, 122 aa, Artificial Sequence; identical to SEQ ID NO: 6246
  Description of Artificial Sequence: Synthetic polypeptide
  VH of XENP018883

SEQ ID NO: 9727 - protein, 107 aa, Artificial Sequence
  Description of Artificial Sequence: Synthetic polypeptide
  VL of XENP018883
SIVMTQSPATLSVSPGERATLSCRASQSVSNDVAWYQQKPGQSPRLLINYASHRYTGVPDRFTGSGYGTEFTLTISSLQSEDFAVYFCQQDYSAPRTFGGGTKVEIK

SEQ ID NO: 9728 - protein, 5 aa, Artificial Sequence
  Description of Artificial Sequence: Synthetic peptide
  XENP018883 vhCDR1
NYWMN

SEQ ID NO: 9729 - protein, 19 aa, Artificial Sequence
  Description of Artificial Sequence: Synthetic peptide
  XENP018883 vhCDR2
EIRLKSNNYATHYAEPVKG

SEQ ID NO: 9730 - protein, 11 aa, Artificial Sequence
  Description of Artificial Sequence: Synthetic peptide
  XENP018883 vhCDR3
YYGNYGGYFDV

SEQ ID NO: 9731 - protein, 11 aa, Artificial Sequence
  Description of Artificial Sequence: Synthetic peptide
  XENP018883 vlCDR1
RASQSVSNDVA

SEQ ID NO: 9732 - protein, 7 aa, Artificial Sequence
  Description of Artificial Sequence: Synthetic peptide
  XENP018883 vlCDR2
YASHRYT

SEQ ID NO: 9733 - protein, 9 aa, Artificial Sequence
  Description of Artificial Sequence: Synthetic peptide
  XENP018883 vlCDR3
QQDYSAPRT

SEQ ID NO: 9734 - protein, 249 aa, Artificial Sequence
  Description of Artificial Sequence: Synthetic polypeptide
  XENP018884 1G6_H1_L1.138_scFv(GKPGS)4
EVQLVESGGGLVKPGGSLRLSCAASGFTFSNYWMNWVRQAPGKGLEWVGEIRLKSNNYATHYAEPVKGRFTISRDDSKSTVYLQMNSLKTEDTAVYYCTRYYGNYGGYFDVWGAGTLVTVSSGKPGSGKPGSGKPGSGKPGSSIVMTQSPATLSVSPGERATLSCRASQSVSNDVAWYQQKPGQSPRLLINYASHRYTGVPDRFTGSGYGTEFTLTISSLQSEDFAVYFCQQDYSNPRTFGGGTKVEIK

SEQ ID NO: 9735 - protein, 122 aa, Artificial Sequence; identical to SEQ ID NO: 6246
  Description of Artificial Sequence: Synthetic polypeptide
  VH of XENP018884

SEQ ID NO: 9736 - protein, 107 aa, Artificial Sequence
  Description of Artificial Sequence: Synthetic polypeptide
  VL of XENP018884
SIVMTQSPATLSVSPGERATLSCRASQSVSNDVAWYQQKPGQSPRLLINYASHRYTGVPDRFTGSGYGTEFTLTISSLQSEDFAVYFCQQDYSNPRTFGGGTKVEIK

SEQ ID NO: 9737 - protein, 5 aa, Artificial Sequence
  Description of Artificial Sequence: Synthetic peptide
  XENP018884 vhCDR1
NYWMN

SEQ ID NO: 9738 - protein, 19 aa, Artificial Sequence
  Description of Artificial Sequence: Synthetic peptide
  XENP018884 vhCDR2
EIRLKSNNYATHYAEPVKG

SEQ ID NO: 9739 - protein, 11 aa, Artificial Sequence
  Description of Artificial Sequence: Synthetic peptide
  XENP018884 vhCDR3
YYGNYGGYFDV

SEQ ID NO: 9740 - protein, 11 aa, Artificial Sequence
  Description of Artificial Sequence: Synthetic peptide
  XENP018884 vlCDR1
RASQSVSNDVA

SEQ ID NO: 9741 - protein, 7 aa, Artificial Sequence
  Description of Artificial Sequence: Synthetic peptide
  XENP018884 vlCDR2
YASHRYT

SEQ ID NO: 9742 - protein, 9 aa, Artificial Sequence
  Description of Artificial Sequence: Synthetic peptide
  XENP018884 vlCDR3
QQDYSNPRT

SEQ ID NO: 9743 - protein, 249 aa, Artificial Sequence
  Description of Artificial Sequence: Synthetic polypeptide
  XENP018885 1G6_H1_L1.139_scFv(GKPGS)4
EVQLVESGGGLVKPGGSLRLSCAASGFTFSNYWMNWVRQAPGKGLEWVGEIRLKSNNYATHYAEPVKGRFTISRDDSKSTVYLQMNSLKTEDTAVYYCTRYYGNYGGYFDVWGAGTLVTVSSGKPGSGKPGSGKPGSGKPGSSIVMTQSPATLSVSPGERATLSCRASQSVSNDVAWYQQKPGQSPRLLINYASHRYTGVPDRFTGSGYGTEFTLTISSLQSEDFAVYFCQQDYSGPRTFGGGTKVEIK

SEQ ID NO: 9744 - protein, 122 aa, Artificial Sequence; identical to SEQ ID NO: 6246
  Description of Artificial Sequence: Synthetic polypeptide
  VH of XENP018885

SEQ ID NO: 9745 - protein, 107 aa, Artificial Sequence
  Description of Artificial Sequence: Synthetic polypeptide
  VL of XENP018885
SIVMTQSPATLSVSPGERATLSCRASQSVSNDVAWYQQKPGQSPRLLINYASHRYTGVPDRFTGSGYGTEFTLTISSLQSEDFAVYFCQQDYSGPRTFGGGTKVEIK

SEQ ID NO: 9746 - protein, 5 aa, Artificial Sequence
  Description of Artificial Sequence: Synthetic peptide
  XENP018885 vhCDR1
NYWMN

SEQ ID NO: 9747 - protein, 19 aa, Artificial Sequence
  Description of Artificial Sequence: Synthetic peptide
  XENP018885 vhCDR2
EIRLKSNNYATHYAEPVKG

SEQ ID NO: 9748 - protein, 11 aa, Artificial Sequence
  Description of Artificial Sequence: Synthetic peptide
  XENP018885 vhCDR3
YYGNYGGYFDV

SEQ ID NO: 9749 - protein, 11 aa, Artificial Sequence
  Description of Artificial Sequence: Synthetic peptide
  XENP018885 vlCDR1
RASQSVSNDVA

SEQ ID NO: 9750 - protein, 7 aa, Artificial Sequence
  Description of Artificial Sequence: Synthetic peptide
  XENP018885 vlCDR2
YASHRYT

SEQ ID NO: 9751 - protein, 9 aa, Artificial Sequence
  Description of Artificial Sequence: Synthetic peptide
  XENP018885 vlCDR3
QQDYSGPRT

SEQ ID NO: 9752 - protein, 249 aa, Artificial Sequence
  Description of Artificial Sequence: Synthetic polypeptide
  XENP018886 1G6_H1_L1.140_scFv(GKPGS)4
EVQLVESGGGLVKPGGSLRLSCAASGFTFSNYWMNWVRQAPGKGLEWVGEIRLKSNNYATHYAEPVKGRFTISRDDSKSTVYLQMNSLKTEDTAVYYCTRYYGNYGGYFDVWGAGTLVTVSSGKPGSGKPGSGKPGSGKPGSSIVMTQSPATLSVSPGERATLSCRASQSVSNDVAWYQQKPGQSPRLLINYASHRYTGVPDRFTGSGYGTEFTLTISSLQSEDFAVYFCQQDYSVPRTFGGGTKVEIK

SEQ ID NO: 9753 - protein, 122 aa, Artificial Sequence; identical to SEQ ID NO: 6246
  Description of Artificial Sequence: Synthetic polypeptide
  VH of XENP018886

SEQ ID NO: 9754 - protein, 107 aa, Artificial Sequence
  Description of Artificial Sequence: Synthetic polypeptide
  VL of XENP018886
SIVMTQSPATLSVSPGERATLSCRASQSVSNDVAWYQQKPGQSPRLLINYASHRYTGVPDRFTGSGYGTEFTLTISSLQSEDFAVYFCQQDYSVPRTFGGGTKVEIK

SEQ ID NO: 9755 - protein, 5 aa, Artificial Sequence
  Description of Artificial Sequence: Synthetic peptide
  XENP018886 vhCDR1
NYWMN

SEQ ID NO: 9756 - protein, 19 aa, Artificial Sequence
  Description of Artificial Sequence: Synthetic peptide
  XENP018886 vhCDR2
EIRLKSNNYATHYAEPVKG

SEQ ID NO: 9757 - protein, 11 aa, Artificial Sequence
  Description of Artificial Sequence: Synthetic peptide
  XENP018886 vhCDR3
YYGNYGGYFDV

SEQ ID NO: 9758 - protein, 11 aa, Artificial Sequence
  Description of Artificial Sequence: Synthetic peptide
  XENP018886 vlCDR1
RASQSVSNDVA

SEQ ID NO: 9759 - protein, 7 aa, Artificial Sequence
  Description of Artificial Sequence: Synthetic peptide
  XENP018886 vlCDR2
YASHRYT

SEQ ID NO: 9760 - protein, 9 aa, Artificial Sequence
  Description of Artificial Sequence: Synthetic peptide
  XENP018886 vlCDR3
QQDYSVPRT

SEQ ID NO: 9761 - protein, 249 aa, Artificial Sequence
  Description of Artificial Sequence: Synthetic polypeptide
  XENP018887 1G6_H1_L1.141_scFv(GKPGS)4
EVQLVESGGGLVKPGGSLRLSCAASGFTFSNYWMNWVRQAPGKGLEWVGEIRLKSNNYATHYAEPVKGRFTISRDDSKSTVYLQMNSLKTEDTAVYYCTRYYGNYGGYFDVWGAGTLVTVSSGKPGSGKPGSGKPGSGKPGSSIVMTQSPATLSVSPGERATLSCRASQSVSNDVAWYQQKPGQSPRLLINYASHRYTGVPDRFTGSGYGTEFTLTISSLQSEDFAVYFCQQDYSHPRTFGGGTKVEIK

SEQ ID NO: 9762 - protein, 122 aa, Artificial Sequence; identical to SEQ ID NO: 6246
  Description of Artificial Sequence: Synthetic polypeptide
  VH of XENP018887

SEQ ID NO: 9763 - protein, 107 aa, Artificial Sequence
  Description of Artificial Sequence: Synthetic polypeptide
  VL of XENP018887
SIVMTQSPATLSVSPGERATLSCRASQSVSNDVAWYQQKPGQSPRLLINYASHRYTGVPDRFTGSGYGTEFTLTISSLQSEDFAVYFCQQDYSHPRTFGGGTKVEIK

SEQ ID NO: 9764 - protein, 5 aa, Artificial Sequence
  Description of Artificial Sequence: Synthetic peptide
  XENP018887 vhCDR1
NYWMN

SEQ ID NO: 9765 - protein, 19 aa, Artificial Sequence
  Description of Artificial Sequence: Synthetic peptide
  XENP018887 vhCDR2
EIRLKSNNYATHYAEPVKG

SEQ ID NO: 9766 - protein, 11 aa, Artificial Sequence
  Description of Artificial Sequence: Synthetic peptide
  XENP018887 vhCDR3
YYGNYGGYFDV

SEQ ID NO: 9767 - protein, 11 aa, Artificial Sequence
  Description of Artificial Sequence: Synthetic peptide
  XENP018887 vlCDR1
RASQSVSNDVA

SEQ ID NO: 9768 - protein, 7 aa, Artificial Sequence
  Description of Artificial Sequence: Synthetic peptide
  XENP018887 vlCDR2
YASHRYT

SEQ ID NO: 9769 - protein, 9 aa, Artificial Sequence
  Description of Artificial Sequence: Synthetic peptide
  XENP018887 vlCDR3
QQDYSHPRT

SEQ ID NO: 9770 - protein, 249 aa, Artificial Sequence
  Description of Artificial Sequence: Synthetic polypeptide
  XENP018888 1G6_H1_L1.142_scFv(GKPGS)4
EVQLVESGGGLVKPGGSLRLSCAASGFTFSNYWMNWVRQAPGKGLEWVGEIRLKSNNYATHYAEPVKGRFTISRDDSKSTVYLQMNSLKTEDTAVYYCTRYYGNYGGYFDVWGAGTLVTVSSGKPGSGKPGSGKPGSGKPGSSIVMTQSPATLSVSPGERATLSCRASQSVSNDVAWYQQKPGQSPRLLINYASHRYTGVPDRFTGSGYGTEFTLTISSLQSEDFAVYFCQQDYSDPRTFGGGTKVEIK

SEQ ID NO: 9771 - protein, 122 aa, Artificial Sequence; identical to SEQ ID NO: 6246
  Description of Artificial Sequence: Synthetic polypeptide
  VH of XENP018888

SEQ ID NO: 9772 - protein, 107 aa, Artificial Sequence
  Description of Artificial Sequence: Synthetic polypeptide
  VL of XENP018888
SIVMTQSPATLSVSPGERATLSCRASQSVSNDVAWYQQKPGQSPRLLINYASHRYTGVPDRFTGSGYGTEFTLTISSLQSEDFAVYFCQQDYSDPRTFGGGTKVEIK

SEQ ID NO: 9773 - protein, 5 aa, Artificial Sequence
  Description of Artificial Sequence: Synthetic peptide
  XENP018888 vhCDR1
NYWMN

SEQ ID NO: 9774 - protein, 19 aa, Artificial Sequence
  Description of Artificial Sequence: Synthetic peptide
  XENP018888 vhCDR2
EIRLKSNNYATHYAEPVKG

SEQ ID NO: 9775 - protein, 11 aa, Artificial Sequence
  Description of Artificial Sequence: Synthetic peptide
  XENP018888 vhCDR3
YYGNYGGYFDV

SEQ ID NO: 9776 - protein, 11 aa, Artificial Sequence
  Description of Artificial Sequence: Synthetic peptide
  XENP018888 vlCDR1
RASQSVSNDVA

SEQ ID NO: 9777 - protein, 7 aa, Artificial Sequence
  Description of Artificial Sequence: Synthetic peptide
  XENP018888 vlCDR2
YASHRYT

SEQ ID NO: 9778 - protein, 9 aa, Artificial Sequence
  Description of Artificial Sequence: Synthetic peptide
  XENP018888 vlCDR3
QQDYSDPRT

SEQ ID NO: 9779 - protein, 249 aa, Artificial Sequence
  Description of Artificial Sequence: Synthetic polypeptide
  XENP018889 1G6_H1_L1.143_scFv(GKPGS)4
EVQLVESGGGLVKPGGSLRLSCAASGFTFSNYWMNWVRQAPGKGLEWVGEIRLKSNNYATHYAEPVKGRFTISRDDSKSTVYLQMNSLKTEDTAVYYCTRYYGNYGGYFDVWGAGTLVTVSSGKPGSGKPGSGKPGSGKPGSSIVMTQSPATLSVSPGERATLSCRASQSVSNDVAWYQQKPGQSPRLLINYASHRYTGVPDRFTGSGYGTEFTLTISSLQSEDFAVYFCQQDYSKPRTFGGGTKVEIK

SEQ ID NO: 9780 - protein, 122 aa, Artificial Sequence; identical to SEQ ID NO: 6246
  Description of Artificial Sequence: Synthetic polypeptide
  VH of XENP018889

SEQ ID NO: 9781 - protein, 107 aa, Artificial Sequence
  Description of Artificial Sequence: Synthetic polypeptide
  VL of XENP018889
SIVMTQSPATLSVSPGERATLSCRASQSVSNDVAWYQQKPGQSPRLLINYASHRYTGVPDRFTGSGYGTEFTLTISSLQSEDFAVYFCQQDYSKPRTFGGGTKVEIK

SEQ ID NO: 9782 - protein, 5 aa, Artificial Sequence
  Description of Artificial Sequence: Synthetic peptide
  XENP018889 vhCDR1
NYWMN

SEQ ID NO: 9783 - protein, 19 aa, Artificial Sequence
  Description of Artificial Sequence: Synthetic peptide
  XENP018889 vhCDR2
EIRLKSNNYATHYAEPVKG

SEQ ID NO: 9784 - protein, 11 aa, Artificial Sequence
  Description of Artificial Sequence: Synthetic peptide
  XENP018889 vhCDR3
YYGNYGGYFDV

SEQ ID NO: 9785 - protein, 11 aa, Artificial Sequence
  Description of Artificial Sequence: Synthetic peptide
  XENP018889 vlCDR1
RASQSVSNDVA

SEQ ID NO: 9786 - protein, 7 aa, Artificial Sequence
  Description of Artificial Sequence: Synthetic peptide
  XENP018889 vlCDR2
YASHRYT

SEQ ID NO: 9787 - protein, 9 aa, Artificial Sequence
  Description of Artificial Sequence: Synthetic peptide
  XENP018889 vlCDR3
QQDYSKPRT

SEQ ID NO: 9788 - protein, 249 aa, Artificial Sequence
  Description of Artificial Sequence: Synthetic polypeptide
  XENP018890 1G6_H1_L1.144_scFv(GKPGS)4
EVQLVESGGGLVKPGGSLRLSCAASGFTFSNYWMNWVRQAPGKGLEWVGEIRLKSNNYATHYAEPVKGRFTISRDDSKSTVYLQMNSLKTEDTAVYYCTRYYGNYGGYFDVWGAGTLVTVSSGKPGSGKPGSGKPGSGKPGSSIVMTQSPATLSVSPGERATLSCRASQSVSNDVAWYQQKPGQSPRLLINYASHRYTGVPDRFTGSGYGTEFTLTISSLQSEDFAVYFCQQDYSFPRTFGGGTKVEIK

SEQ ID NO: 9789 - protein, 122 aa, Artificial Sequence; identical to SEQ ID NO: 6246
  Description of Artificial Sequence: Synthetic polypeptide
  VH of XENP018890

SEQ ID NO: 9790 - protein, 107 aa, Artificial Sequence
  Description of Artificial Sequence: Synthetic polypeptide
  VL of XENP018890
SIVMTQSPATLSVSPGERATLSCRASQSVSNDVAWYQQKPGQSPRLLINYASHRYTGVPDRFTGSGYGTEFTLTISSLQSEDFAVYFCQQDYSFPRTFGGGTKVEIK

SEQ ID NO: 9791 - protein, 5 aa, Artificial Sequence
  Description of Artificial Sequence: Synthetic peptide
  XENP018890 vhCDR1
NYWMN

SEQ ID NO: 9792 - protein, 19 aa, Artificial Sequence
  Description of Artificial Sequence: Synthetic peptide
  XENP018890 vhCDR2
EIRLKSNNYATHYAEPVKG

SEQ ID NO: 9793 - protein, 11 aa, Artificial Sequence
  Description of Artificial Sequence: Synthetic peptide
  XENP018890 vhCDR3
YYGNYGGYFDV

SEQ ID NO: 9794 - protein, 11 aa, Artificial Sequence
  Description of Artificial Sequence: Synthetic peptide
  XENP018890 vlCDR1
RASQSVSNDVA

SEQ ID NO: 9795 - protein, 7 aa, Artificial Sequence
  Description of Artificial Sequence: Synthetic peptide
  XENP018890 vlCDR2
YASHRYT

SEQ ID NO: 9796 - protein, 9 aa, Artificial Sequence
  Description of Artificial Sequence: Synthetic peptide
  XENP018890 vlCDR3
QQDYSFPRT

SEQ ID NO: 9797 - protein, 249 aa, Artificial Sequence
  Description of Artificial Sequence: Synthetic polypeptide
  XENP018891 1G6_H1_L1.145_scFv(GKPGS)4
EVQLVESGGGLVKPGGSLRLSCAASGFTFSNYWMNWVRQAPGKGLEWVGEIRLKSNNYATHYAEPVKGRFTISRDDSKSTVYLQMNSLKTEDTAVYYCTRYYGNYGGYFDVWGAGTLVTVSSGKPGSGKPGSGKPGSGKPGSSIVMTQSPATLSVSPGERATLSCRASQSVSNDVAWYQQKPGQSPRLLINYASHRYTGVPDRFTGSGYGTEFTLTISSLQSEDFAVYFCQQDYSSPRTFGGGTKLEIK

SEQ ID NO: 9798 - protein, 122 aa, Artificial Sequence; identical to SEQ ID NO: 6246
  Description of Artificial Sequence: Synthetic polypeptide
  VH of XENP018891

SEQ ID NO: 9799 - protein, 107 aa, Artificial Sequence
  Description of Artificial Sequence: Synthetic polypeptide
  VL of XENP018891
SIVMTQSPATLSVSPGERATLSCRASQSVSNDVAWYQQKPGQSPRLLINYASHRYTGVPDRFTGSGYGTEFTLTISSLQSEDFAVYFCQQDYSSPRTFGGGTKLEIK

SEQ ID NO: 9800 - protein, 5 aa, Artificial Sequence
  Description of Artificial Sequence: Synthetic peptide
  XENP018891 vhCDR1
NYWMN

SEQ ID NO: 9801 - protein, 19 aa, Artificial Sequence
  Description of Artificial Sequence: Synthetic peptide
  XENP018891 vhCDR2
EIRLKSNNYATHYAEPVKG

SEQ ID NO: 9802 - protein, 11 aa, Artificial Sequence
  Description of Artificial Sequence: Synthetic peptide
  XENP018891 vhCDR3
YYGNYGGYFDV

SEQ ID NO: 9803 - protein, 11 aa, Artificial Sequence
  Description of Artificial Sequence: Synthetic peptide
  XENP018891 vlCDR1
RASQSVSNDVA

SEQ ID NO: 9804 - protein, 7 aa, Artificial Sequence
  Description of Artificial Sequence: Synthetic peptide
  XENP018891 vlCDR2
YASHRYT

SEQ ID NO: 9805 - protein, 9 aa, Artificial Sequence
  Description of Artificial Sequence: Synthetic peptide
  XENP018891 vlCDR3
QQDYSSPRT

SEQ ID NO: 9806 - protein, 249 aa, Artificial Sequence
  Description of Artificial Sequence: Synthetic polypeptide
  XENP018895 1G6_H0L0_scFv(GKPGS)4
EVKLEESGGGLVQPGGSMKLSCVASGFTFSNYWMNWVRQSPEKGLEWVAEIRLKSNNYATHYAESVKGRFTISRDDSKSSVYLQMNNLRAEDTGIYYCTRYYGNYGGYFDVWGAGTTVTVSSGKPGSGKPGSGKPGSGKPGSSIVMTQTPKFLLVSAGDRVTITCKASQSVSNDVAWYQQKPGQSPKLLINYASHRYTGVPDRFTGSGYGTDFTFTISTVQAEDLAVYFCQQDYSSPRTFGGGTKLEIK

SEQ ID NO: 9807 - protein, 122 aa, Artificial Sequence
  Description of Artificial Sequence: Synthetic polypeptide
  VH of XENP018895
EVKLEESGGGLVQPGGSMKLSCVASGFTFSNYWMNWVRQSPEKGLEWVAEIRLKSNNYATHYAESVKGRFTISRDDSKSSVYLQMNNLRAEDTGIYYCTRYYGNYGGYFDVWGAGTTVTVSS

SEQ ID NO: 9808 - protein, 107 aa, Artificial Sequence
  Description of Artificial Sequence: Synthetic polypeptide
  VL of XENP018895
SIVMTQTPKFLLVSAGDRVTITCKASQSVSNDVAWYQQKPGQSPKLLINYASHRYTGVPDRFTGSGYGTDFTFTISTVQAEDLAVYFCQQDYSSPRTFGGGTKLEIK

SEQ ID NO: 9809 - protein, 5 aa, Artificial Sequence
  Description of Artificial Sequence: Synthetic peptide
  XENP018895 vhCDR1
NYWMN

SEQ ID NO: 9810 - protein, 19 aa, Artificial Sequence
  Description of Artificial Sequence: Synthetic peptide
  XENP018895 vhCDR2
EIRLKSNNYATHYAESVKG

SEQ ID NO: 9811 - protein, 11 aa, Artificial Sequence
  Description of Artificial Sequence: Synthetic peptide
  XENP018895 vhCDR3
YYGNYGGYFDV

SEQ ID NO: 9812 - protein, 11 aa, Artificial Sequence
  Description of Artificial Sequence: Synthetic peptide
  XENP018895 vlCDR1
KASQSVSNDVA

SEQ ID NO: 9813 - protein, 7 aa, Artificial Sequence
  Description of Artificial Sequence: Synthetic peptide
  XENP018895 vlCDR2
YASHRYT

SEQ ID NO: 9814 - protein, 9 aa, Artificial Sequence
  Description of Artificial Sequence: Synthetic peptide
  XENP018895 vlCDR3
QQDYSSPRT

SEQ ID NO: 9815 - protein, 249 aa, Artificial Sequence
  Description of Artificial Sequence: Synthetic polypeptide
  XENP018896 1G6_L1H1_scFv(GKPGS)4
SIVMTQSPATLSVSPGERATLSCRASQSVSNDVAWYQQKPGQSPRLLINYASHRYTGVPDRFTGSGYGTEFTLTISSLQSEDFAVYFCQQDYSSPRTFGGGTKVEIKGKPGSGKPGSGKPGSGKPGSEVQLVESGGGLVKPGGSLRLSCAASGFTFSNYWMNWVRQAPGKGLEWVGEIRLKSNNYATHYAEPVKGRFTISRDDSKSTVYLQMNSLKTEDTAVYYCTRYYGNYGGYFDVWGAGTLVTVSS

SEQ ID NO: 9816 - protein, 107 aa, Artificial Sequence; identical to SEQ ID NO: 6247
  Description of Artificial Sequence: Synthetic polypeptide
  VH of XENP018896

SEQ ID NO: 9817 - protein, 122 aa, Artificial Sequence; identical to SEQ ID NO: 6246
  Description of Artificial Sequence: Synthetic polypeptide
  VL of XENP018896

SEQ ID NO: 9818 - protein, 11 aa, Artificial Sequence
  Description of Artificial Sequence: Synthetic peptide
  XENP018896 vhCDR1
RASQSVSNDVA

SEQ ID NO: 9819 - protein, 7 aa, Artificial Sequence
  Description of Artificial Sequence: Synthetic peptide
  XENP018896 vhCDR2
YASHRYT

SEQ ID NO: 9820 - protein, 9 aa, Artificial Sequence
  Description of Artificial Sequence: Synthetic peptide
  XENP018896 vhCDR3
QQDYSSPRT

SEQ ID NO: 9821 - protein, 5 aa, Artificial Sequence
  Description of Artificial Sequence: Synthetic peptide
  XENP018896 vlCDR1
NYWMN

SEQ ID NO: 9822 - protein, 19 aa, Artificial Sequence
  Description of Artificial Sequence: Synthetic peptide
  XENP018896 vlCDR2
EIRLKSNNYATHYAEPVKG

SEQ ID NO: 9823 - protein, 11 aa, Artificial Sequence
  Description of Artificial Sequence: Synthetic peptide
  XENP018896 vlCDR3
YYGNYGGYFDV

SEQ ID NO: 9824 - protein, 244 aa, Artificial Sequence
  Description of Artificial Sequence: Synthetic polypeptide
  XENP018901 6A3_H0L0_scFv(GKPGS)4
EVKLVESGGGLVKPGGSLKLSCAASGFTFSSYGMSWVRQTPEKRLEWVATISGGGRYTYYPDSVKGRFTISRDNAKNNLYLQMSSLRSEDTALYYCASYYDSSFDYWGQGTTLTVSSGKPGSGKPGSGKPGSGKPGSDIVMTQSHKFMSTSVGDRVSITCKASQDVGTAVAWYQQKPGQSPKLLIYWASTRHTGVPDRFTGSGSGTDFTLTISNVQSEDLADYFCQHYSIYPWTFGGGTKLEIK

SEQ ID NO: 9825 - protein, 117 aa, Artificial Sequence
  Description of Artificial Sequence: Synthetic polypeptide
  VH of XENP018901
EVKLVESGGGLVKPGGSLKLSCAASGFTFSSYGMSWVRQTPEKRLEWVATISGGGRYTYYPDSVKGRFTISRDNAKNNLYLQMSSLRSEDTALYYCASYYDSSFDYWGQGTTLTVSS

SEQ ID NO: 9826 - protein, 107 aa, Artificial Sequence
  Description of Artificial Sequence: Synthetic polypeptide
  VL of XENP018901
DIVMTQSHKFMSTSVGDRVSITCKASQDVGTAVAWYQQKPGQSPKLLIYWASTRHTGVPDRFTGSGSGTDFTLTISNVQSEDLADYFCQHYSIYPWTFGGGTKLEIK

SEQ ID NO: 9827 - protein, 5 aa, Artificial Sequence
  Description of Artificial Sequence: Synthetic peptide
  XENP018901 vhCDR1
SYGMS

SEQ ID NO: 9828 - protein, 17 aa, Artificial Sequence
  Description of Artificial Sequence: Synthetic peptide
  XENP018901 vhCDR2
TISGGGRYTYYPDSVKG

SEQ ID NO: 9829 - protein, 8 aa, Artificial Sequence
  Description of Artificial Sequence: Synthetic peptide
  XENP018901 vhCDR3
YYDSSFDY

SEQ ID NO: 9830 - protein, 11 aa, Artificial Sequence
  Description of Artificial Sequence: Synthetic peptide
  XENP018901 vlCDR1
KASQDVGTAVA

SEQ ID NO: 9831 - protein, 7 aa, Artificial Sequence
  Description of Artificial Sequence: Synthetic peptide
  XENP018901 vlCDR2
WASTRHT

SEQ ID NO: 9832 - protein, 9 aa, Artificial Sequence
  Description of Artificial Sequence: Synthetic peptide
  XENP018901 vlCDR3
QHYSIYPWT

SEQ ID NO: 9833 - protein, 244 aa, Artificial Sequence
  Description of Artificial Sequence: Synthetic polypeptide
  XENP018902 6A3_L3_H1.1_scFv(GKPGS)4
DIVMTQSPSSLSASVGDRVTITCRASQDVGTAVAWYQQKPGKSPKLLIYWASTRHTGVPDRFTGSGSGTDFTLTISSLQPEDFATYFCQHYSIYPWTFGGGTKVEIKGKPGSGKPGSGKPGSGKPGSEVQLLESGGGLVQPGGSLRLSCAASGFTFSSYGMSWVRQAPGKGLEWVSTISGGGRYTYYPDSVKGRFTISRDNSKNTLYLQMNSLRAEDTAVYYCASYYDSSFDYWGQGTLVTVSS

SEQ ID NO: 9834 - protein, 107 aa, Artificial Sequence; identical to SEQ ID NO: 6337
  Description of Artificial Sequence: Synthetic polypeptide
  VH of XENP018902

SEQ ID NO: 9835 - protein, 117 aa, Artificial Sequence; identical to SEQ ID NO: 6354
  Description of Artificial Sequence: Synthetic polypeptide
  VL of XENP018902

SEQ ID NO: 9836 - protein, 11 aa, Artificial Sequence
  Description of Artificial Sequence: Synthetic peptide
  XENP018902 vhCDR1
RASQDVGTAVA

SEQ ID NO: 9837 - protein, 7 aa, Artificial Sequence
  Description of Artificial Sequence: Synthetic peptide
  XENP018902 vhCDR2
WASTRHT

SEQ ID NO: 9838 - protein, 9 aa, Artificial Sequence
  Description of Artificial Sequence: Synthetic peptide
  XENP018902 vhCDR3
QHYSIYPWT

SEQ ID NO: 9839 - protein, 5 aa, Artificial Sequence
  Description of Artificial Sequence: Synthetic peptide
  XENP018902 vlCDR1
SYGMS

SEQ ID NO: 9840 - protein, 17 aa, Artificial Sequence
  Description of Artificial Sequence: Synthetic peptide
  XENP018902 vlCDR2
TISGGGRYTYYPDSVKG

SEQ ID NO: 9841 - protein, 9 aa, Artificial Sequence
  Description of Artificial Sequence: Synthetic peptide
  XENP018902 vlCDR3
SYYDSSFDY

SEQ ID NO: 9842 - protein, 249 aa, Artificial Sequence
  Description of Artificial Sequence: Synthetic polypeptide
  XENP018921 1G6_H1L3_scFv(GKPGS)4
EVQLVESGGGLVKPGGSLRLSCAASGFTFSNYWMNWVRQAPGKGLEWVGEIRLKSNNYATHYAEPVKGRFTISRDDSKSTVYLQMNSLKTEDTAVYYCTRYYGNYGGYFDVWGAGTLVTVSSGKPGSGKPGSGKPGSGKPGSSIVMTQSPLSLPVTPGEPASISCRASQSVSNDVAWYLQKPGQSPQLLINYASHRYTGVPDRFTGSGYGTDFTLKISRVEAEDVGVYFCQQDYSSPRTFGGGTKVEIK

SEQ ID NO: 9843 - protein, 122 aa, Artificial Sequence; identical to SEQ ID NO: 6246
  Description of Artificial Sequence: Synthetic polypeptide
  VH of XENP018921

SEQ ID NO: 9844 - protein, 107 aa, Artificial Sequence
  Description of Artificial Sequence: Synthetic polypeptide
  VL of XENP018921
SIVMTQSPLSLPVTPGEPASISCRASQSVSNDVAWYLQKPGQSPQLLINYASHRYTGVPDRFTGSGYGTDFTLKISRVEAEDVGVYFCQQDYSSPRTFGGGTKVEIK

SEQ ID NO: 9845 - protein, 5 aa, Artificial Sequence
  Description of Artificial Sequence: Synthetic peptide
  XENP018921 vhCDR1
NYWMN

SEQ ID NO: 9846 - protein, 19 aa, Artificial Sequence
  Description of Artificial Sequence: Synthetic peptide
  XENP018921 vhCDR2
EIRLKSNNYATHYAEPVKG

SEQ ID NO: 9847 - protein, 11 aa, Artificial Sequence
  Description of Artificial Sequence: Synthetic peptide
  XENP018921 vhCDR3
YYGNYGGYFDV

SEQ ID NO: 9848 - protein, 11 aa, Artificial Sequence
  Description of Artificial Sequence: Synthetic peptide
  XENP018921 vlCDR1
RASQSVSNDVA

SEQ ID NO: 9849 - protein, 7 aa, Artificial Sequence
  Description of Artificial Sequence: Synthetic peptide
  XENP018921 vlCDR2
YASHRYT

SEQ ID NO: 9850 - protein, 9 aa, Artificial Sequence
  Description of Artificial Sequence: Synthetic peptide
  XENP018921 vlCDR3
QQDYSSPRT

SEQ ID NO: 9851 - protein, 249 aa, Artificial Sequence
  Description of Artificial Sequence: Synthetic polypeptide
  XENP018922 1G6_H1L4_scFv(GKPGS)4
EVQLVESGGGLVKPGGSLRLSCAASGFTFSNYWMNWVRQAPGKGLEWVGEIRLKSNNYATHYAEPVKGRFTISRDDSKSTVYLQMNSLKTEDTAVYYCTRYYGNYGGYFDVWGAGTLVTVSSGKPGSGKPGSGKPGSGKPGSSIVMTQSPGTLSLSPGERATLSCRASQSVSNDVAWYQQKPGQSPRLLINYASHRYTGVPDRFTGSGYGTDFTLTISRLEPEDFAVYFCQQDYSSPRTFGGGTKVEIK

SEQ ID NO: 9852 - protein, 122 aa, Artificial Sequence; identical to SEQ ID NO: 6246
  Description of Artificial Sequence: Synthetic polypeptide
  VH of XENP018922

SEQ ID NO: 9853 - protein, 107 aa, Artificial Sequence
  Description of Artificial Sequence: Synthetic polypeptide
  VL of XENP018922
SIVMTQSPGTLSLSPGERATLSCRASQSVSNDVAWYQQKPGQSPRLLINYASHRYTGVPDRFTGSGYGTDFTLTISRLEPEDFAVYFCQQDYSSPRTFGGGTKVEIK

SEQ ID NO: 9854 - protein, 5 aa, Artificial Sequence
  Description of Artificial Sequence: Synthetic peptide
  XENP018922 vhCDR1
NYWMN

SEQ ID NO: 9855 - protein, 19 aa, Artificial Sequence
  Description of Artificial Sequence: Synthetic peptide
  XENP018922 vhCDR2
EIRLKSNNYATHYAEPVKG

SEQ ID NO: 9856 - protein, 11 aa, Artificial Sequence
  Description of Artificial Sequence: Synthetic peptide
  XENP018922 vhCDR3
YYGNYGGYFDV

SEQ ID NO: 9857 - protein, 11 aa, Artificial Sequence
  Description of Artificial Sequence: Synthetic peptide
  XENP018922 vlCDR1
RASQSVSNDVA

SEQ ID NO: 9858 - protein, 7 aa, Artificial Sequence
  Description of Artificial Sequence: Synthetic peptide
  XENP018922 vlCDR2
YASHRYT

SEQ ID NO: 9859 - protein, 9 aa, Artificial Sequence
  Description of Artificial Sequence: Synthetic peptide
  XENP018922 vlCDR3
QQDYSSPRT

SEQ ID NO: 9860 - protein, 249 aa, Artificial Sequence
  Description of Artificial Sequence: Synthetic polypeptide
  XENP018923 1G6_H1L5_scFv(GKPGS)4
EVQLVESGGGLVKPGGSLRLSCAASGFTFSNYWMNWVRQAPGKGLEWVGEIRLKSNNYATHYAEPVKGRFTISRDDSKSTVYLQMNSLKTEDTAVYYCTRYYGNYGGYFDVWGAGTLVTVSSGKPGSGKPGSGKPGSGKPGSSIVMTQSPDSLAVSLGERATINCKASQSVSNDVAWYQQKPGQSPKLLINYASHRYTGVPDRFTGSGYGTDFTLTISSLQAEDVAVYFCQQDYSSPRTFGGGTKVEIK

SEQ ID NO: 9861 - protein, 122 aa, Artificial Sequence; identical to SEQ ID NO: 6246
  Description of Artificial Sequence: Synthetic polypeptide
  VH of XENP018923

SEQ ID NO: 9862 - protein, 107 aa, Artificial Sequence
  Description of Artificial Sequence: Synthetic polypeptide
  VL of XENP018923
SIVMTQSPDSLAVSLGERATINCKASQSVSNDVAWYQQKPGQSPKLLINYASHRYTGVPDRFTGSGYGTDFTLTISSLQAEDVAVYFCQQDYSSPRTFGGGTKVEIK

SEQ ID NO: 9863 - protein, 5 aa, Artificial Sequence
  Description of Artificial Sequence: Synthetic peptide
  XENP018923 vhCDR1
NYWMN

SEQ ID NO: 9864 - protein, 19 aa, Artificial Sequence
  Description of Artificial Sequence: Synthetic peptide
  XENP018923 vhCDR2
EIRLKSNNYATHYAEPVKG

SEQ ID NO: 9865 - protein, 11 aa, Artificial Sequence
  Description of Artificial Sequence: Synthetic peptide
  XENP018923 vhCDR3
YYGNYGGYFDV

SEQ ID NO: 9866 - protein, 11 aa, Artificial Sequence
  Description of Artificial Sequence: Synthetic peptide
  XENP018923 vlCDR1
KASQSVSNDVA

SEQ ID NO: 9867 - protein, 7 aa, Artificial Sequence
  Description of Artificial Sequence: Synthetic peptide
  XENP018923 vlCDR2
YASHRYT

SEQ ID NO: 9868 - protein, 9 aa, Artificial Sequence
  Description of Artificial Sequence: Synthetic peptide
  XENP018923 vlCDR3
QQDYSSPRT

SEQ ID NO: 9869 - protein, 249 aa, Artificial Sequence
  Description of Artificial Sequence: Synthetic polypeptide
  XENP018924 1G6_H2L1_scFv(GKPGS)4
QVQLVQSGAEVKKPGASVKVSCKASGFTFSNYWMNWVRQAPGQGLEWMGEIRLKSNNYATHYAEKFQGRVTMTRDDSTSTVYMELSSLRSEDTAVYYCTRYYGNYGGYFDVWGAGTLVTVSSGKPGSGKPGSGKPGSGKPGSSIVMTQSPATLSVSPGERATLSCRASQSVSNDVAWYQQKPGQSPRLLINYASHRYTGVPDRFTGSGYGTEFTLTISSLQSEDFAVYFCQQDYSSPRTFGGGTKVEIK

SEQ ID NO: 9870 - protein, 122 aa, Artificial Sequence
  Description of Artificial Sequence: Synthetic polypeptide
  VH of XENP018924
QVQLVQSGAEVKKPGASVKVSCKASGFTFSNYWMNWVRQAPGQGLEWMGEIRLKSNNYATHYAEKFQGRVTMTRDDSTSTVYMELSSLRSEDTAVYYCTRYYGNYGGYFDVWGAGTLVTVSS

SEQ ID NO: 9871 - protein, 107 aa, Artificial Sequence; identical to SEQ ID NO: 6247
  Description of Artificial Sequence: Synthetic polypeptide
  VL of XENP018924

SEQ ID NO: 9872 - protein, 5 aa, Artificial Sequence
  Description of Artificial Sequence: Synthetic peptide
  XENP018924 vhCDR1
NYWMN

SEQ ID NO: 9873 - protein, 19 aa, Artificial Sequence
  Description of Artificial Sequence: Synthetic peptide
  XENP018924 vhCDR2
EIRLKSNNYATHYAEKFQG

SEQ ID NO: 9874 - protein, 11 aa, Artificial Sequence
  Description of Artificial Sequence: Synthetic peptide
  XENP018924 vhCDR3
YYGNYGGYFDV

SEQ ID NO: 9875 - protein, 11 aa, Artificial Sequence
  Description of Artificial Sequence: Synthetic peptide
  XENP018924 vlCDR1
RASQSVSNDVA

SEQ ID NO: 9876 - protein, 7 aa, Artificial Sequence
  Description of Artificial Sequence: Synthetic peptide
  XENP018924 vlCDR2
YASHRYT

SEQ ID NO: 9877 - protein, 9 aa, Artificial Sequence
  Description of Artificial Sequence: Synthetic peptide
  XENP018924 vlCDR3
QQDYSSPRT

SEQ ID NO: 9878 - protein, 249 aa, Artificial Sequence
  Description of Artificial Sequence: Synthetic polypeptide
  XENP018925 1G6_H2L2_scFv(GKPGS)4
QVQLVQSGAEVKKPGASVKVSCKASGFTFSNYWMNWVRQAPGQGLEWMGEIRLKSNNYATHYAEKFQGRVTMTRDDSTSTVYMELSSLRSEDTAVYYCTRYYGNYGGYFDVWGAGTLVTVSSGKPGSGKPGSGKPGSGKPGSSIVMTQSPSSLSASVGDRVTITCRASQSVSNDVAWYQQKPGKSPKLLINYASHRYTGVPDRFTGSGYGTDFTLTISSLQPEDFATYFCQQDYSSPRTFGGGTKVEIK

SEQ ID NO: 9879 - protein, 122 aa, Artificial Sequence; identical to SEQ ID NO: 9870
  Description of Artificial Sequence: Synthetic polypeptide
  VH of XENP018925

SEQ ID NO: 9880 - protein, 107 aa, Artificial Sequence; identical to SEQ ID NO: 6256
  Description of Artificial Sequence: Synthetic polypeptide
  VL of XENP018925

SEQ ID NO: 9881 - protein, 5 aa, Artificial Sequence
  Description of Artificial Sequence: Synthetic peptide
  XENP018925 vhCDR1
NYWMN

SEQ ID NO: 9882 - protein, 19 aa, Artificial Sequence
  Description of Artificial Sequence: Synthetic peptide
  XENP018925 vhCDR2
EIRLKSNNYATHYAEKFQG

SEQ ID NO: 9883 - protein, 11 aa, Artificial Sequence
  Description of Artificial Sequence: Synthetic peptide
  XENP018925 vhCDR3
YYGNYGGYFDV

SEQ ID NO: 9884 - protein, 11 aa, Artificial Sequence
  Description of Artificial Sequence: Synthetic peptide
  XENP018925 vlCDR1
RASQSVSNDVA

SEQ ID NO: 9885 - protein, 7 aa, Artificial Sequence
  Description of Artificial Sequence: Synthetic peptide
  XENP018925 vlCDR2
YASHRYT

SEQ ID NO: 9886 - protein, 9 aa, Artificial Sequence
  Description of Artificial Sequence: Synthetic peptide
  XENP018925 vlCDR3
QQDYSSPRT

SEQ ID NO: 9887 - protein, 249 aa, Artificial Sequence
  Description of Artificial Sequence: Synthetic polypeptide
  XENP018926 1G6_H2L3_scFv(GKPGS)4
QVQLVQSGAEVKKPGASVKVSCKASGFTFSNYWMNWVRQAPGQGLEWMGEIRLKSNNYATHYAEKFQGRVTMTRDDSTSTVYMELSSLRSEDTAVYYCTRYYGNYGGYFDVWGAGTLVTVSSGKPGSGKPGSGKPGSGKPGSSIVMTQSPLSLPVTPGEPASISCRASQSVSNDVAWYLQKPGQSPQLLINYASHRYTGVPDRFTGSGYGTDFTLKISRVEAEDVGVYFCQQDYSSPRTFGGGTKVEIK

SEQ ID NO: 9888 - protein, 122 aa, Artificial Sequence; identical to SEQ ID NO: 9870
  Description of Artificial Sequence: Synthetic polypeptide
  VH of XENP018926

SEQ ID NO: 9889 - protein, 107 aa, Artificial Sequence; identical to SEQ ID NO: 9844
  Description of Artificial Sequence: Synthetic polypeptide
  VL of XENP018926

SEQ ID NO: 9890 - protein, 5 aa, Artificial Sequence
  Description of Artificial Sequence: Synthetic peptide
  XENP018926 vhCDR1
NYWMN

SEQ ID NO: 9891 - protein, 19 aa, Artificial Sequence
  Description of Artificial Sequence: Synthetic peptide
  XENP018926 vhCDR2
EIRLKSNNYATHYAEKFQG

SEQ ID NO: 9892 - protein, 11 aa, Artificial Sequence
  Description of Artificial Sequence: Synthetic peptide
  XENP018926 vhCDR3
YYGNYGGYFDV

SEQ ID NO: 9893 - protein, 11 aa, Artificial Sequence
  Description of Artificial Sequence: Synthetic peptide
  XENP018926 vlCDR1
RASQSVSNDVA

SEQ ID NO: 9894 - protein, 7 aa, Artificial Sequence
  Description of Artificial Sequence: Synthetic peptide
  XENP018926 vlCDR2
YASHRYT

SEQ ID NO: 9895 - protein, 9 aa, Artificial Sequence
  Description of Artificial Sequence: Synthetic peptide
  XENP018926 vlCDR3
QQDYSSPRT

SEQ ID NO: 9896 - protein, 249 aa, Artificial Sequence
  Description of Artificial Sequence: Synthetic polypeptide
  XENP018927 1G6_H2L4_scFv(GKPGS)4
QVQLVQSGAEVKKPGASVKVSCKASGFTFSNYWMNWVRQAPGQGLEWMGEIRLKSNNYATHYAEKFQGRVTMTRDDSTSTVYMELSSLRSEDTAVYYCTRYYGNYGGYFDVWGAGTLVTVSSGKPGSGKPGSGKPGSGKPGSSIVMTQSPGTLSLSPGERATLSCRASQSVSNDVAWYQQKPGQSPRLLINYASHRYTGVPDRFTGSGYGTDFTLTISRLEPEDFAVYFCQQDYSSPRTFGGGTKVEIK

SEQ ID NO: 9897 - protein, 122 aa, Artificial Sequence; identical to SEQ ID NO: 9870
  Description of Artificial Sequence: Synthetic polypeptide
  VH of XENP018927

SEQ ID NO: 9898 - protein, 107 aa, Artificial Sequence; identical to SEQ ID NO: 9853
  Description of Artificial Sequence: Synthetic polypeptide
  VL of XENP018927

SEQ ID NO: 9899 - protein, 5 aa, Artificial Sequence
  Description of Artificial Sequence: Synthetic peptide
  XENP018927 vhCDR1
NYWMN

SEQ ID NO: 9900 - protein, 19 aa, Artificial Sequence
  Description of Artificial Sequence: Synthetic peptide
  XENP018927 vhCDR2
EIRLKSNNYATHYAEKFQG

SEQ ID NO: 9901 - protein, 11 aa, Artificial Sequence
  Description of Artificial Sequence: Synthetic peptide
  XENP018927 vhCDR3
YYGNYGGYFDV

SEQ ID NO: 9902 - protein, 11 aa, Artificial Sequence
  Description of Artificial Sequence: Synthetic peptide
  XENP018927 vlCDR1
RASQSVSNDVA

SEQ ID NO: 9903 - protein, 7 aa, Artificial Sequence
  Description of Artificial Sequence: Synthetic peptide
  XENP018927 vlCDR2
YASHRYT

SEQ ID NO: 9904 - protein, 9 aa, Artificial Sequence
  Description of Artificial Sequence: Synthetic peptide
  XENP018927 vlCDR3
QQDYSSPRT

SEQ ID NO: 9905 - protein, 249 aa, Artificial Sequence
  Description of Artificial Sequence: Synthetic polypeptide
  XENP018928 1G6_H2L5_scFv(GKPGS)4
QVQLVQSGAEVKKPGASVKVSCKASGFTFSNYWMNWVRQAPGQGLEWMGEIRLKSNNYATHYAEKFQGRVTMTRDDSTSTVYMELSSLRSEDTAVYYCTRYYGNYGGYFDVWGAGTLVTVSSGKPGSGKPGSGKPGSGKPGSSIVMTQSPDSLAVSLGERATINCKASQSVSNDVAWYQQKPGQSPKLLINYASHRYTGVPDRFTGSGYGTDFTLTISSLQAEDVAVYFCQQDYSSPRTFGGGTKVEIK

SEQ ID NO: 9906 - protein, 122 aa, Artificial Sequence; identical to SEQ ID NO: 9870
  Description of Artificial Sequence: Synthetic polypeptide
  VH of XENP018928

SEQ ID NO: 9907 - protein, 107 aa, Artificial Sequence; identical to SEQ ID NO: 9862
  Description of Artificial Sequence: Synthetic polypeptide
  VL of XENP018928

SEQ ID NO: 9908 - protein, 5 aa, Artificial Sequence
  Description of Artificial Sequence: Synthetic peptide
  XENP018928 vhCDR1
NYWMN

SEQ ID NO: 9909 - protein, 19 aa, Artificial Sequence
  Description of Artificial Sequence: Synthetic peptide
  XENP018928 vhCDR2
EIRLKSNNYATHYAEKFQG

SEQ ID NO: 9910 - protein, 11 aa, Artificial Sequence
  Description of Artificial Sequence: Synthetic peptide
  XENP018928 vhCDR3
YYGNYGGYFDV

SEQ ID NO: 9911 - protein, 11 aa, Artificial Sequence
  Description of Artificial Sequence: Synthetic peptide
  XENP018928 vlCDR1
KASQSVSNDVA

SEQ ID NO: 9912 - protein, 7 aa, Artificial Sequence
  Description of Artificial Sequence: Synthetic peptide
  XENP018928 vlCDR2
YASHRYT

SEQ ID NO: 9913 - protein, 9 aa, Artificial Sequence
  Description of Artificial Sequence: Synthetic peptide
  XENP018928 vlCDR3
QQDYSSPRT

SEQ ID NO: 9914 - protein, 249 aa, Artificial Sequence
  Description of Artificial Sequence: Synthetic polypeptide
  XENP018929 1G6_H3L1_scFv(GKPGS)4
EVQLLESGGGLVQPGGSLRLSCAASGFTFSNYWMNWVRQAPGKGLEWVSEIRLKSNNYATHYAESVKGRFTISRDDSKSTVYLQMNSLRAEDTAVYYCTRYYGNYGGYFDVWGAGTLVTVSSGKPGSGKPGSGKPGSGKPGSSIVMTQSPATLSVSPGERATLSCRASQSVSNDVAWYQQKPGQSPRLLINYASHRYTGVPDRFTGSGYGTEFTLTISSLQSEDFAVYFCQQDYSSPRTFGGGTKVEIK

SEQ ID NO: 9915 - protein, 122 aa, Artificial Sequence
  Description of Artificial Sequence: Synthetic polypeptide
  VH of XENP018929
EVQLLESGGGLVQPGGSLRLSCAASGFTFSNYWMNWVRQAPGKGLEWVSEIRLKSNNYATHYAESVKGRFTISRDDSKSTVYLQMNSLRAEDTAVYYCTRYYGNYGGYFDVWGAGTLVTVSS

SEQ ID NO: 9916 - protein, 107 aa, Artificial Sequence; identical to SEQ ID NO: 6247
  Description of Artificial Sequence: Synthetic polypeptide
  VL of XENP018929

SEQ ID NO: 9917 - protein, 5 aa, Artificial Sequence
  Description of Artificial Sequence: Synthetic peptide
  XENP018929 vhCDR1
NYWMN

SEQ ID NO: 9918 - protein, 19 aa, Artificial Sequence
  Description of Artificial Sequence: Synthetic peptide
  XENP018929 vhCDR2
EIRLKSNNYATHYAESVKG

SEQ ID NO: 9919 - protein, 11 aa, Artificial Sequence
  Description of Artificial Sequence: Synthetic peptide
  XENP018929 vhCDR3
YYGNYGGYFDV

SEQ ID NO: 9920 - protein, 11 aa, Artificial Sequence
  Description of Artificial Sequence: Synthetic peptide
  XENP018929 vlCDR1
RASQSVSNDVA

SEQ ID NO: 9921 - protein, 7 aa, Artificial Sequence
  Description of Artificial Sequence: Synthetic peptide
  XENP018929 vlCDR2
YASHRYT

SEQ ID NO: 9922 - protein, 9 aa, Artificial Sequence
  Description of Artificial Sequence: Synthetic peptide
  XENP018929 vlCDR3
QQDYSSPRT

SEQ ID NO: 9923 - protein, 249 aa, Artificial Sequence
  Description of Artificial Sequence: Synthetic polypeptide
  XENP018930 1G6_H3L2_scFv(GKPGS)4
EVQLLESGGGLVQPGGSLRLSCAASGFTFSNYWMNWVRQAPGKGLEWVSEIRLKSNNYATHYAESVKGRFTISRDDSKSTVYLQMNSLRAEDTAVYYCTRYYGNYGGYFDVWGAGTLVTVSSGKPGSGKPGSGKPGSGKPGSSIVMTQSPSSLSASVGDRVTITCRASQSVSNDVAWYQQKPGKSPKLLINYASHRYTGVPDRFTGSGYGTDFTLTISSLQPEDFATYFCQQDYSSPRTFGGGTKVEIK

SEQ ID NO: 9924 - protein, 122 aa, Artificial Sequence; identical to SEQ ID NO: 9915
  Description of Artificial Sequence: Synthetic polypeptide
  VH of XENP018930

SEQ ID NO: 9925 - protein, 107 aa, Artificial Sequence; identical to SEQ ID NO: 6256
  Description of Artificial Sequence: Synthetic polypeptide
  VL of XENP018930

SEQ ID NO: 9926 - protein, 5 aa, Artificial Sequence
  Description of Artificial Sequence: Synthetic peptide
  XENP018930 vhCDR1
NYWMN

SEQ ID NO: 9927 - protein, 19 aa, Artificial Sequence
  Description of Artificial Sequence: Synthetic peptide
  XENP018930 vhCDR2
EIRLKSNNYATHYAESVKG

SEQ ID NO: 9928 - protein, 11 aa, Artificial Sequence
  Description of Artificial Sequence: Synthetic peptide
  XENP018930 vhCDR3
YYGNYGGYFDV

SEQ ID NO: 9929 - protein, 11 aa, Artificial Sequence
  Description of Artificial Sequence: Synthetic peptide
  XENP018930 vlCDR1
RASQSVSNDVA

SEQ ID NO: 9930 - protein, 7 aa, Artificial Sequence
  Description of Artificial Sequence: Synthetic peptide
  XENP018930 vlCDR2
YASHRYT

SEQ ID NO: 9931 - protein, 9 aa, Artificial Sequence
  Description of Artificial Sequence: Synthetic peptide
  XENP018930 vlCDR3
QQDYSSPRT

SEQ ID NO: 9932 - protein, 249 aa, Artificial Sequence
  Description of Artificial Sequence: Synthetic polypeptide
  XENP018931 1G6_H3L3_scFv(GKPGS)4
EVQLLESGGGLVQPGGSLRLSCAASGFTFSNYWMNWVRQAPGKGLEWVSEIRLKSNNYATHYAESVKGRFTISRDDSKSTVYLQMNSLRAEDTAVYYCTRYYGNYGGYFDVWGAGTLVTVSSGKPGSGKPGSGKPGSGKPGSSIVMTQSPLSLPVTPGEPASISCRASQSVSNDVAWYLQKPGQSPQLLINYASHRYTGVPDRFTGSGYGTDFTLKISRVEAEDVGVYFCQQDYSSPRTFGGGTKVEIK

SEQ ID NO: 9933 - protein, 122 aa, Artificial Sequence; identical to SEQ ID NO: 9915
  Description of Artificial Sequence: Synthetic polypeptide
  VH of XENP018931

SEQ ID NO: 9934 - protein, 107 aa, Artificial Sequence; identical to SEQ ID NO: 9844
  Description of Artificial Sequence: Synthetic polypeptide
  VL of XENP018931

SEQ ID NO: 9935 - protein, 5 aa, Artificial Sequence
  Description of Artificial Sequence: Synthetic peptide
  XENP018931 vhCDR1
NYWMN

SEQ ID NO: 9936 - protein, 19 aa, Artificial Sequence
  Description of Artificial Sequence: Synthetic peptide
  XENP018931 vhCDR2
EIRLKSNNYATHYAESVKG

SEQ ID NO: 9937 - protein, 11 aa, Artificial Sequence
  Description of Artificial Sequence: Synthetic peptide
  XENP018931 vhCDR3
YYGNYGGYFDV

SEQ ID NO: 9938 - protein, 11 aa, Artificial Sequence
  Description of Artificial Sequence: Synthetic peptide
  XENP018931 vlCDR1
RASQSVSNDVA

SEQ ID NO: 9939 - protein, 7 aa, Artificial Sequence
  Description of Artificial Sequence: Synthetic peptide
  XENP018931 vlCDR2
YASHRYT

SEQ ID NO: 9940 - protein, 9 aa, Artificial Sequence
  Description of Artificial Sequence: Synthetic peptide
  XENP018931 vlCDR3
QQDYSSPRT

SEQ ID NO: 9941 - protein, 249 aa, Artificial Sequence
  Description of Artificial Sequence: Synthetic polypeptide
  XENP018932 1G6_H3L4_scFv(GKPGS)4
EVQLLESGGGLVQPGGSLRLSCAASGFTFSNYWMNWVRQAPGKGLEWVSEIRLKSNNYATHYAESVKGRFTISRDDSKSTVYLQMNSLRAEDTAVYYCTRYYGNYGGYFDVWGAGTLVTVSSGKPGSGKPGSGKPGSGKPGSSIVMTQSPGTLSLSPGERATLSCRASQSVSNDVAWYQQKPGQSPRLLINYASHRYTGVPDRFTGSGYGTDFTLTISRLEPEDFAVYFCQQDYSSPRTFGGGTKVEIK

SEQ ID NO: 9942 - protein, 122 aa, Artificial Sequence; identical to SEQ ID NO: 9915
  Description of Artificial Sequence: Synthetic polypeptide
  VH of XENP018932

SEQ ID NO: 9943 - protein, 107 aa, Artificial Sequence; identical to SEQ ID NO: 9853
  Description of Artificial Sequence: Synthetic polypeptide
  VL of XENP018932

SEQ ID NO: 9944 - protein, 5 aa, Artificial Sequence
  Description of Artificial Sequence: Synthetic peptide
  XENP018932 vhCDR1
NYWMN

SEQ ID NO: 9945 - protein, 19 aa, Artificial Sequence
  Description of Artificial Sequence: Synthetic peptide
  XENP018932 vhCDR2
EIRLKSNNYATHYAESVKG

SEQ ID NO: 9946 - protein, 11 aa, Artificial Sequence
  Description of Artificial Sequence: Synthetic peptide
  XENP018932 vhCDR3
YYGNYGGYFDV

SEQ ID NO: 9947 - protein, 11 aa, Artificial Sequence
  Description of Artificial Sequence: Synthetic peptide
  XENP018932 vlCDR1
RASQSVSNDVA

SEQ ID NO: 9948 - protein, 7 aa, Artificial Sequence
  Description of Artificial Sequence: Synthetic peptide
  XENP018932 vlCDR2
YASHRYT

SEQ ID NO: 9949 - protein, 9 aa, Artificial Sequence
  Description of Artificial Sequence: Synthetic peptide
  XENP018932 vlCDR3
QQDYSSPRT

SEQ ID NO: 9950 - protein, 249 aa, Artificial Sequence
  Description of Artificial Sequence: Synthetic polypeptide
  XENP018933 1G6_H3L5_scFv(GKPGS)4
EVQLLESGGGLVQPGGSLRLSCAASGFTFSNYWMNWVRQAPGKGLEWVSEIRLKSNNYATHYAESVKGRFTISRDDSKSTVYLQMNSLRAEDTAVYYCTRYYGNYGGYFDVWGAGTLVTVSSGKPGSGKPGSGKPGSGKPGSSIVMTQSPDSLAVSLGERATINCKASQSVSNDVAWYQQKPGQSPKLLINYASHRYTGVPDRFTGSGYGTDFTLTISSLQAEDVAVYFCQQDYSSPRTFGGGTKVEIK

SEQ ID NO: 9951 - protein, 122 aa, Artificial Sequence; identical to SEQ ID NO: 9915
  Description of Artificial Sequence: Synthetic polypeptide
  VH of XENP018933

SEQ ID NO: 9952 - protein, 107 aa, Artificial Sequence; identical to SEQ ID NO: 9862
  Description of Artificial Sequence: Synthetic polypeptide
  VL of XENP018933

SEQ ID NO: 9953 - protein, 5 aa, Artificial Sequence
  Description of Artificial Sequence: Synthetic peptide
  XENP018933 vhCDR1
NYWMN

SEQ ID NO: 9954 - protein, 19 aa, Artificial Sequence
  Description of Artificial Sequence: Synthetic peptide
  XENP018933 vhCDR2
EIRLKSNNYATHYAESVKG

SEQ ID NO: 9955 - protein, 11 aa, Artificial Sequence
  Description of Artificial Sequence: Synthetic peptide
  XENP018933 vhCDR3
YYGNYGGYFDV

SEQ ID NO: 9956 - protein, 11 aa, Artificial Sequence
  Description of Artificial Sequence: Synthetic peptide
  XENP018933 vlCDR1
KASQSVSNDVA

SEQ ID NO: 9957 - protein, 7 aa, Artificial Sequence
  Description of Artificial Sequence: Synthetic peptide
  XENP018933 vlCDR2
YASHRYT

SEQ ID NO: 9958 - protein, 9 aa, Artificial Sequence
  Description of Artificial Sequence: Synthetic peptide
  XENP018933 vlCDR3
QQDYSSPRT

SEQ ID NO: 9959 - protein, 249 aa, Artificial Sequence
  Description of Artificial Sequence: Synthetic polypeptide
  XENP018934 1G6_H4L1_scFv(GKPGS)4
EVQLVESGGGLVQPGGSLKLSCAASGFTFSNYWMNWVRQASGKGLEWVGEIRLKSNNYATHYAESVKGRFTISRDDSKSTVYLQMNSLKTEDTAVYYCTRYYGNYGGYFDVWGAGTLVTVSSGKPGSGKPGSGKPGSGKPGSSIVMTQSPATLSVSPGERATLSCRASQSVSNDVAWYQQKPGQSPRLLINYASHRYTGVPDRFTGSGYGTEFTLTISSLQSEDFAVYFCQQDYSSPRTFGGGTKVEIK

SEQ ID NO: 9960 - protein, 122 aa, Artificial Sequence
  Description of Artificial Sequence: Synthetic polypeptide
  VH of XENP018934
EVQLVESGGGLVQPGGSLKLSCAASGFTFSNYWMNWVRQASGKGLEWVGEIRLKSNNYATHYAESVKGRFTISRDDSKSTVYLQMNSLKTEDTAVYYCTRYYGNYGGYFDVWGAGTLVTVSS

SEQ ID NO: 9961 - protein, 107 aa, Artificial Sequence; identical to SEQ ID NO: 6247
  Description of Artificial Sequence: Synthetic polypeptide
  VL of XENP018934

SEQ ID NO: 9962 - protein, 5 aa, Artificial Sequence
  Description of Artificial Sequence: Synthetic peptide
  XENP018934 vhCDR1
NYWMN

SEQ ID NO: 9963 - protein, 19 aa, Artificial Sequence
  Description of Artificial Sequence: Synthetic peptide
  XENP018934 vhCDR2
EIRLKSNNYATHYAESVKG

SEQ ID NO: 9964 - protein, 11 aa, Artificial Sequence
  Description of Artificial Sequence: Synthetic peptide
  XENP018934 vhCDR3
YYGNYGGYFDV

SEQ ID NO: 9965 - protein, 11 aa, Artificial Sequence
  Description of Artificial Sequence: Synthetic peptide
  XENP018934 vlCDR1
RASQSVSNDVA

SEQ ID NO: 9966 - protein, 7 aa, Artificial Sequence
  Description of Artificial Sequence: Synthetic peptide
  XENP018934 vlCDR2
YASHRYT

SEQ ID NO: 9967 - protein, 9 aa, Artificial Sequence
  Description of Artificial Sequence: Synthetic peptide
  XENP018934 vlCDR3
QQDYSSPRT

SEQ ID NO: 9968 - protein, 249 aa, Artificial Sequence
  Description of Artificial Sequence: Synthetic polypeptide
  XENP018935 1G6_H4L2_scFv(GKPGS)4
EVQLVESGGGLVQPGGSLKLSCAASGFTFSNYWMNWVRQASGKGLEWVGEIRLKSNNYATHYAESVKGRFTISRDDSKSTVYLQMNSLKTEDTAVYYCTRYYGNYGGYFDVWGAGTLVTVSSGKPGSGKPGSGKPGSGKPGSSIVMTQSPSSLSASVGDRVTITCRASQSVSNDVAWYQQKPGKSPKLLINYASHRYTGVPDRFTGSGYGTDFTLTISSLQPEDFATYFCQQDYSSPRTFGGGTKVEIK

SEQ ID NO: 9969 - protein, 122 aa, Artificial Sequence; identical to SEQ ID NO: 9960
  Description of Artificial Sequence: Synthetic polypeptide
  VH of XENP018935

SEQ ID NO: 9970 - protein, 107 aa, Artificial Sequence; identical to SEQ ID NO: 6256
  Description of Artificial Sequence: Synthetic polypeptide
  VL of XENP018935

SEQ ID NO: 9971 - protein, 5 aa, Artificial Sequence
  Description of Artificial Sequence: Synthetic peptide
  XENP018935 vhCDR1
NYWMN

SEQ ID NO: 9972 - protein, 19 aa, Artificial Sequence
  Description of Artificial Sequence: Synthetic peptide
  XENP018935 vhCDR2
EIRLKSNNYATHYAESVKG

SEQ ID NO: 9973 - protein, 11 aa, Artificial Sequence
  Description of Artificial Sequence: Synthetic peptide
  XENP018935 vhCDR3
YYGNYGGYFDV

SEQ ID NO: 9974 - protein, 11 aa, Artificial Sequence
  Description of Artificial Sequence: Synthetic peptide
  XENP018935 vlCDR1
RASQSVSNDVA

SEQ ID NO: 9975 - protein, 7 aa, Artificial Sequence
  Description of Artificial Sequence: Synthetic peptide
  XENP018935 vlCDR2
YASHRYT

SEQ ID NO: 9976 - protein, 9 aa, Artificial Sequence
  Description of Artificial Sequence: Synthetic peptide
  XENP018935 vlCDR3
QQDYSSPRT

SEQ ID NO: 9977 - protein, 249 aa, Artificial Sequence
  Description of Artificial Sequence: Synthetic polypeptide
  XENP018936 1G6_H4L3_scFv(GKPGS)4
EVQLVESGGGLVQPGGSLKLSCAASGFTFSNYWMNWVRQASGKGLEWVGEIRLKSNNYATHYAESVKGRFTISRDDSKSTVYLQMNSLKTEDTAVYYCTRYYGNYGGYFDVWGAGTLVTVSSGKPGSGKPGSGKPGSGKPGSSIVMTQSPLSLPVTPGEPASISCRASQSVSNDVAWYLQKPGQSPQLLINYASHRYTGVPDRFTGSGYGTDFTLKISRVEAEDVGVYFCQQDYSSPRTFGGGTKVEIK

SEQ ID NO: 9978 - protein, 122 aa, Artificial Sequence; identical to SEQ ID NO: 9960
  Description of Artificial Sequence: Synthetic polypeptide
  VH of XENP018936

SEQ ID NO: 9979 - protein, 107 aa, Artificial Sequence; identical to SEQ ID NO: 9844
  Description of Artificial Sequence: Synthetic polypeptide
  VL of XENP018936

SEQ ID NO: 9980 - protein, 5 aa, Artificial Sequence
  Description of Artificial Sequence: Synthetic peptide
  XENP018936 vhCDR1
NYWMN

SEQ ID NO: 9981 - protein, 19 aa, Artificial Sequence
  Description of Artificial Sequence: Synthetic peptide
  XENP018936 vhCDR2
EIRLKSNNYATHYAESVKG

SEQ ID NO: 9982 - protein, 11 aa, Artificial Sequence
  Description of Artificial Sequence: Synthetic peptide
  XENP018936 vhCDR3
YYGNYGGYFDV

SEQ ID NO: 9983 - protein, 11 aa, Artificial Sequence
  Description of Artificial Sequence: Synthetic peptide
  XENP018936 vlCDR1
RASQSVSNDVA

SEQ ID NO: 9984 - protein, 7 aa, Artificial Sequence
  Description of Artificial Sequence: Synthetic peptide
  XENP018936 vlCDR2
YASHRYT

SEQ ID NO: 9985 - protein, 9 aa, Artificial Sequence
  Description of Artificial Sequence: Synthetic peptide
  XENP018936 vlCDR3
QQDYSSPRT

SEQ ID NO: 9986 - protein, 249 aa, Artificial Sequence
  Description of Artificial Sequence: Synthetic polypeptide
  XENP018937 1G6_H4L4_scFv(GKPGS)4
EVQLVESGGGLVQPGGSLKLSCAASGFTFSNYWMNWVRQASGKGLEWVGEIRLKSNNYATHYAESVKGRFTISRDDSKSTVYLQMNSLKTEDTAVYYCTRYYGNYGGYFDVWGAGTLVTVSSGKPGSGKPGSGKPGSGKPGSSIVMTQSPGTLSLSPGERATLSCRASQSVSNDVAWYQQKPGQSPRLLINYASHRYTGVPDRFTGSGYGTDFTLTISRLEPEDFAVYFCQQDYSSPRTFGGGTKVEIK

SEQ ID NO: 9987 - protein, 122 aa, Artificial Sequence; identical to SEQ ID NO: 9960
  Description of Artificial Sequence: Synthetic polypeptide
  VH of XENP018937

SEQ ID NO: 9988 - protein, 107 aa, Artificial Sequence; identical to SEQ ID NO: 9853
  Description of Artificial Sequence: Synthetic polypeptide
  VL of XENP018937

SEQ ID NO: 9989 - protein, 5 aa, Artificial Sequence
  Description of Artificial Sequence: Synthetic peptide
  XENP018937 vhCDR1
NYWMN

SEQ ID NO: 9990 - protein, 19 aa, Artificial Sequence
  Description of Artificial Sequence: Synthetic peptide
  XENP018937 vhCDR2
EIRLKSNNYATHYAESVKG

SEQ ID NO: 9991 - protein, 11 aa, Artificial Sequence
  Description of Artificial Sequence: Synthetic peptide
  XENP018937 vhCDR3
YYGNYGGYFDV

SEQ ID NO: 9992 - protein, 11 aa, Artificial Sequence
  Description of Artificial Sequence: Synthetic peptide
  XENP018937 vlCDR1
RASQSVSNDVA

SEQ ID NO: 9993 - protein, 7 aa, Artificial Sequence
  Description of Artificial Sequence: Synthetic peptide
  XENP018937 vlCDR2
YASHRYT

SEQ ID NO: 9994 - protein, 9 aa, Artificial Sequence
  Description of Artificial Sequence: Synthetic peptide
  XENP018937 vlCDR3
QQDYSSPRT

SEQ ID NO: 9995 - protein, 249 aa, Artificial Sequence
  Description of Artificial Sequence: Synthetic polypeptide
  XENP018938 1G6_H4L5_scFv(GKPGS)4
EVQLVESGGGLVQPGGSLKLSCAASGFTFSNYWMNWVRQASGKGLEWVGEIRLKSNNYATHYAESVKGRFTISRDDSKSTVYLQMNSLKTEDTAVYYCTRYYGNYGGYFDVWGAGTLVTVSSGKPGSGKPGSGKPGSGKPGSSIVMTQSPDSLAVSLGERATINCKASQSVSNDVAWYQQKPGQSPKLLINYASHRYTGVPDRFTGSGYGTDFTLTISSLQAEDVAVYFCQQDYSSPRTFGGGTKVEIK

SEQ ID NO: 9996 - protein, 122 aa, Artificial Sequence; identical to SEQ ID NO: 9960
  Description of Artificial Sequence: Synthetic polypeptide
  VH of XENP018938

SEQ ID NO: 9997 - protein, 107 aa, Artificial Sequence; identical to SEQ ID NO: 9862
  Description of Artificial Sequence: Synthetic polypeptide
  VL of XENP018938

SEQ ID NO: 9998 - protein, 5 aa, Artificial Sequence
  Description of Artificial Sequence: Synthetic peptide
  XENP018938 vhCDR1
NYWMN

SEQ ID NO: 9999 - protein, 19 aa, Artificial Sequence
  Description of Artificial Sequence: Synthetic peptide
  XENP018938 vhCDR2
EIRLKSNNYATHYAESVKG

SEQ ID NO: 10000 - protein, 11 aa, Artificial Sequence
  Description of Artificial Sequence: Synthetic peptide
  XENP018938 vhCDR3
YYGNYGGYFDV

SEQ ID NO: 10001 - protein, 11 aa, Artificial Sequence
  Description of Artificial Sequence: Synthetic peptide
  XENP018938 vlCDR1
KASQSVSNDVA

SEQ ID NO: 10002 - protein, 7 aa, Artificial Sequence
  Description of Artificial Sequence: Synthetic peptide
  XENP018938 vlCDR2
YASHRYT

SEQ ID NO: 10003 - protein, 9 aa, Artificial Sequence
  Description of Artificial Sequence: Synthetic peptide
  XENP018938 vlCDR3
QQDYSSPRT

SEQ ID NO: 10004 - protein, 249 aa, Artificial Sequence
  Description of Artificial Sequence: Synthetic polypeptide
  XENP019064 1G6_H1.239_L1_scFv(GKPGS)4
EVQLKESGGGLVKPGGSLRLSCAASGFTFSNYWMNWVRQAPGKGLEWVGEIRLKSNNYATHYAEPVKGRFTISRDDSKSTVYLQMNSLKTEDTAVYYCTRYYGNYGGYFDVWGAGTLVTVSSGKPGSGKPGSGKPGSGKPGSSIVMTQSPATLSVSPGERATLSCRASQSVSNDVAWYQQKPGQSPRLLINYASHRYTGVPDRFTGSGYGTEFTLTISSLQSEDFAVYFCQQDYSSPRTFGGGTKVEIK

SEQ ID NO: 10005 - protein, 122 aa, Artificial Sequence
  Description of Artificial Sequence: Synthetic polypeptide
  VH of XENP019064
EVQLKESGGGLVKPGGSLRLSCAASGFTFSNYWMNWVRQAPGKGLEWVGEIRLKSNNYATHYAEPVKGRFTISRDDSKSTVYLQMNSLKTEDTAVYYCTRYYGNYGGYFDVWGAGTLVTVSS

SEQ ID NO: 10006 - protein, 107 aa, Artificial Sequence; identical to SEQ ID NO: 6247
  Description of Artificial Sequence: Synthetic polypeptide
  VL of XENP019064

SEQ ID NO: 10007 - protein, 5 aa, Artificial Sequence
  Description of Artificial Sequence: Synthetic peptide
  XENP019064 vhCDR1
NYWMN

SEQ ID NO: 10008 - protein, 19 aa, Artificial Sequence
  Description of Artificial Sequence: Synthetic peptide
  XENP019064 vhCDR2
EIRLKSNNYATHYAEPVKG

SEQ ID NO: 10009 - protein, 11 aa, Artificial Sequence
  Description of Artificial Sequence: Synthetic peptide
  XENP019064 vhCDR3
YYGNYGGYFDV

SEQ ID NO: 10010 - protein, 11 aa, Artificial Sequence
  Description of Artificial Sequence: Synthetic peptide
  XENP019064 vlCDR1
RASQSVSNDVA

SEQ ID NO: 10011 - protein, 7 aa, Artificial Sequence
  Description of Artificial Sequence: Synthetic peptide
  XENP019064 vlCDR2
YASHRYT

SEQ ID NO: 10012 - protein, 9 aa, Artificial Sequence
  Description of Artificial Sequence: Synthetic peptide
  XENP019064 vlCDR3
QQDYSSPRT

SEQ ID NO: 10013 - protein, 249 aa, Artificial Sequence
  Description of Artificial Sequence: Synthetic polypeptide
  XENP019065 1G6_H1.240_L1_scFv(GKPGS)4
EVQLVESGGGLVKPGESLRLSCAASGFTFSNYWMNWVRQAPGKGLEWVGEIRLKSNNYATHYAEPVKGRFTISRDDSKSTVYLQMNSLKTEDTAVYYCTRYYGNYGGYFDVWGAGTLVTVSSGKPGSGKPGSGKPGSGKPGSSIVMTQSPATLSVSPGERATLSCRASQSVSNDVAWYQQKPGQSPRLLINYASHRYTGVPDRFTGSGYGTEFTLTISSLQSEDFAVYFCQQDYSSPRTFGGGTKVEIK

SEQ ID NO: 10014 - protein, 122 aa, Artificial Sequence
  Description of Artificial Sequence: Synthetic polypeptide
  VH of XENP019065
EVQLVESGGGLVKPGESLRLSCAASGFTFSNYWMNWVRQAPGKGLEWVGEIRLKSNNYATHYAEPVKGRFTISRDDSKSTVYLQMNSLKTEDTAVYYCTRYYGNYGGYFDVWGAGTLVTVSS

SEQ ID NO: 10015 - protein, 107 aa, Artificial Sequence; identical to SEQ ID NO: 6247
  Description of Artificial Sequence: Synthetic polypeptide
  VL of XENP019065

SEQ ID NO: 10016 - protein, 5 aa, Artificial Sequence
  Description of Artificial Sequence: Synthetic peptide
  XENP019065 vhCDR1
NYWMN

SEQ ID NO: 10017 - protein, 19 aa, Artificial Sequence
  Description of Artificial Sequence: Synthetic peptide
  XENP019065 vhCDR2
EIRLKSNNYATHYAEPVKG

SEQ ID NO: 10018 - protein, 11 aa, Artificial Sequence
  Description of Artificial Sequence: Synthetic peptide
  XENP019065 vhCDR3
YYGNYGGYFDV

SEQ ID NO: 10019 - protein, 11 aa, Artificial Sequence
  Description of Artificial Sequence: Synthetic peptide
  XENP019065 vlCDR1
RASQSVSNDVA

SEQ ID NO: 10020 - protein, 7 aa, Artificial Sequence
  Description of Artificial Sequence: Synthetic peptide
  XENP019065 vlCDR2
YASHRYT

SEQ ID NO: 10021 - protein, 9 aa, Artificial Sequence
  Description of Artificial Sequence: Synthetic peptide
  XENP019065 vlCDR3
QQDYSSPRT

SEQ ID NO: 10022 - protein, 249 aa, Artificial Sequence
  Description of Artificial Sequence: Synthetic polypeptide
  XENP019066 1G6_H1.241_L1_scFv(GKPGS)4
EVQLVESGGGLVKPGGSLRLTCAASGFTFSNYWMNWVRQAPGKGLEWVGEIRLKSNNYATHYAEPVKGRFTISRDDSKSTVYLQMNSLKTEDTAVYYCTRYYGNYGGYFDVWGAGTLVTVSSGKPGSGKPGSGKPGSGKPGSSIVMTQSPATLSVSPGERATLSCRASQSVSNDVAWYQQKPGQSPRLLINYASHRYTGVPDRFTGSGYGTEFTLTISSLQSEDFAVYFCQQDYSSPRTFGGGTKVEIK

SEQ ID NO: 10023 - protein, 122 aa, Artificial Sequence
  Description of Artificial Sequence: Synthetic polypeptide
  VH of XENP019066
EVQLVESGGGLVKPGGSLRLTCAASGFTFSNYWMNWVRQAPGKGLEWVGEIRLKSNNYATHYAEPVKGRFTISRDDSKSTVYLQMNSLKTEDTAVYYCTRYYGNYGGYFDVWGAGTLVTVSS

SEQ ID NO: 10024 - protein, 107 aa, Artificial Sequence; identical to SEQ ID NO: 6247
  Description of Artificial Sequence: Synthetic polypeptide
  VL of XENP019066

SEQ ID NO: 10025 - protein, 5 aa, Artificial Sequence
  Description of Artificial Sequence: Synthetic peptide
  XENP019066 vhCDR1
NYWMN

SEQ ID NO: 10026 - protein, 19 aa, Artificial Sequence
  Description of Artificial Sequence: Synthetic peptide
  XENP019066 vhCDR2
EIRLKSNNYATHYAEPVKG

SEQ ID NO: 10027 - protein, 11 aa, Artificial Sequence
  Description of Artificial Sequence: Synthetic peptide
  XENP019066 vhCDR3
YYGNYGGYFDV

SEQ ID NO: 10028 - protein, 11 aa, Artificial Sequence
  Description of Artificial Sequence: Synthetic peptide
  XENP019066 vlCDR1
RASQSVSNDVA

SEQ ID NO: 10029 - protein, 7 aa, Artificial Sequence
  Description of Artificial Sequence: Synthetic peptide
  XENP019066 vlCDR2
YASHRYT

SEQ ID NO: 10030 - protein, 9 aa, Artificial Sequence
  Description of Artificial Sequence: Synthetic peptide
  XENP019066 vlCDR3
QQDYSSPRT

SEQ ID NO: 10031 - protein, 249 aa, Artificial Sequence
  Description of Artificial Sequence: Synthetic polypeptide
  XENP019067 1G6_H1.242_L1_scFv(GKPGS)4
EVQLVESGGGLVKPGGSLRLVCAASGFTFSNYWMNWVRQAPGKGLEWVGEIRLKSNNYATHYAEPVKGRFTISRDDSKSTVYLQMNSLKTEDTAVYYCTRYYGNYGGYFDVWGAGTLVTVSSGKPGSGKPGSGKPGSGKPGSSIVMTQSPATLSVSPGERATLSCRASQSVSNDVAWYQQKPGQSPRLLINYASHRYTGVPDRFTGSGYGTEFTLTISSLQSEDFAVYFCQQDYSSPRTFGGGTKVEIK

SEQ ID NO: 10032 - protein, 122 aa, Artificial Sequence
  Description of Artificial Sequence: Synthetic polypeptide
  VH of XENP019067
EVQLVESGGGLVKPGGSLRLVCAASGFTFSNYWMNWVRQAPGKGLEWVGEIRLKSNNYATHYAEPVKGRFTISRDDSKSTVYLQMNSLKTEDTAVYYCTRYYGNYGGYFDVWGAGTLVTVSS

SEQ ID NO: 10033 - protein, 107 aa, Artificial Sequence; identical to SEQ ID NO: 6247
  Description of Artificial Sequence: Synthetic polypeptide
  VL of XENP019067

SEQ ID NO: 10034 - protein, 5 aa, Artificial Sequence
  Description of Artificial Sequence: Synthetic peptide
  XENP019067 vhCDR1
NYWMN

SEQ ID NO: 10035 - protein, 19 aa, Artificial Sequence
  Description of Artificial Sequence: Synthetic peptide
  XENP019067 vhCDR2
EIRLKSNNYATHYAEPVKG

SEQ ID NO: 10036 - protein, 11 aa, Artificial Sequence
  Description of Artificial Sequence: Synthetic peptide
  XENP019067 vhCDR3
YYGNYGGYFDV

SEQ ID NO: 10037 - protein, 11 aa, Artificial Sequence
  Description of Artificial Sequence: Synthetic peptide
  XENP019067 vlCDR1
RASQSVSNDVA

SEQ ID NO: 10038 - protein, 7 aa, Artificial Sequence
  Description of Artificial Sequence: Synthetic peptide
  XENP019067 vlCDR2
YASHRYT

SEQ ID NO: 10039 - protein, 9 aa, Artificial Sequence
  Description of Artificial Sequence: Synthetic peptide
  XENP019067 vlCDR3
QQDYSSPRT

SEQ ID NO: 10040 - protein, 249 aa, Artificial Sequence
  Description of Artificial Sequence: Synthetic polypeptide
  XENP019068 1G6_H1.243_L1_scFv(GKPGS)4
EVQLVESGGGLVKPGGSLRLSCAASGFTLSNYWMNWVRQAPGKGLEWVGEIRLKSNNYATHYAEPVKGRFTISRDDSKSTVYLQMNSLKTEDTAVYYCTRYYGNYGGYFDVWGAGTLVTVSSGKPGSGKPGSGKPGSGKPGSSIVMTQSPATLSVSPGERATLSCRASQSVSNDVAWYQQKPGQSPRLLINYASHRYTGVPDRFTGSGYGTEFTLTISSLQSEDFAVYFCQQDYSSPRTFGGGTKVEIK

SEQ ID NO: 10041 - protein, 122 aa, Artificial Sequence
  Description of Artificial Sequence: Synthetic polypeptide
  VH of XENP019068
EVQLVESGGGLVKPGGSLRLSCAASGFTLSNYWMNWVRQAPGKGLEWVGEIRLKSNNYATHYAEPVKGRFTISRDDSKSTVYLQMNSLKTEDTAVYYCTRYYGNYGGYFDVWGAGTLVTVSS

SEQ ID NO: 10042 - protein, 107 aa, Artificial Sequence; identical to SEQ ID NO: 6247
  Description of Artificial Sequence: Synthetic polypeptide
  VL of XENP019068

SEQ ID NO: 10043 - protein, 5 aa, Artificial Sequence
  Description of Artificial Sequence: Synthetic peptide
  XENP019068 vhCDR1
NYWMN

SEQ ID NO: 10044 - protein, 19 aa, Artificial Sequence
  Description of Artificial Sequence: Synthetic peptide
  XENP019068 vhCDR2
EIRLKSNNYATHYAEPVKG

SEQ ID NO: 10045 - protein, 11 aa, Artificial Sequence
  Description of Artificial Sequence: Synthetic peptide
  XENP019068 vhCDR3
YYGNYGGYFDV

SEQ ID NO: 10046 - protein, 11 aa, Artificial Sequence
  Description of Artificial Sequence: Synthetic peptide
  XENP019068 vlCDR1
RASQSVSNDVA

SEQ ID NO: 10047 - protein, 7 aa, Artificial Sequence
  Description of Artificial Sequence: Synthetic peptide
  XENP019068 vlCDR2
YASHRYT

SEQ ID NO: 10048 - protein, 9 aa, Artificial Sequence
  Description of Artificial Sequence: Synthetic peptide
  XENP019068 vlCDR3
QQDYSSPRT

SEQ ID NO: 10049 - protein, 249 aa, Artificial Sequence
  Description of Artificial Sequence: Synthetic polypeptide
  XENP019069 1G6_H1.244_L1_scFv(GKPGS)4
EVQLVESGGGLVKPGGSLRLSCAASGFTFSNYWMNWVRQAPGKGLQWVGEIRLKSNNYATHYAEPVKGRFTISRDDSKSTVYLQMNSLKTEDTAVYYCTRYYGNYGGYFDVWGAGTLVTVSSGKPGSGKPGSGKPGSGKPGSSIVMTQSPATLSVSPGERATLSCRASQSVSNDVAWYQQKPGQSPRLLINYASHRYTGVPDRFTGSGYGTEFTLTISSLQSEDFAVYFCQQDYSSPRTFGGGTKVEIK

SEQ ID NO: 10050 - protein, 122 aa, Artificial Sequence
  Description of Artificial Sequence: Synthetic polypeptide
  VH of XENP019069
EVQLVESGGGLVKPGGSLRLSCAASGFTFSNYWMNWVRQAPGKGLQWVGEIRLKSNNYATHYAEPVKGRFTISRDDSKSTVYLQMNSLKTEDTAVYYCTRYYGNYGGYFDVWGAGTLVTVSS

SEQ ID NO: 10051 - protein, 107 aa, Artificial Sequence; identical to SEQ ID NO: 6247
  Description of Artificial Sequence: Synthetic polypeptide
  VL of XENP019069

SEQ ID NO: 10052 - protein, 5 aa, Artificial Sequence
  Description of Artificial Sequence: Synthetic peptide
  XENP019069 vhCDR1
NYWMN

SEQ ID NO: 10053 - protein, 19 aa, Artificial Sequence
  Description of Artificial Sequence: Synthetic peptide
  XENP019069 vhCDR2
EIRLKSNNYATHYAEPVKG

SEQ ID NO: 10054 - protein, 11 aa, Artificial Sequence
  Description of Artificial Sequence: Synthetic peptide
  XENP019069 vhCDR3
YYGNYGGYFDV

SEQ ID NO: 10055 - protein, 11 aa, Artificial Sequence
  Description of Artificial Sequence: Synthetic peptide
  XENP019069 vlCDR1
RASQSVSNDVA

SEQ ID NO: 10056 - protein, 7 aa, Artificial Sequence
  Description of Artificial Sequence: Synthetic peptide
  XENP019069 vlCDR2
YASHRYT

SEQ ID NO: 10057 - protein, 9 aa, Artificial Sequence
  Description of Artificial Sequence: Synthetic peptide
  XENP019069 vlCDR3
QQDYSSPRT

SEQ ID NO: 10058 - protein, 249 aa, Artificial Sequence
  Description of Artificial Sequence: Synthetic polypeptide
  XENP019070 1G6_H1.245_L1_scFv(GKPGS)4
EVQLVESGGGLVKPGGSLRLSCAASGFTFSNYWMNWVRQAPGKGLEWIGEIRLKSNNYATHYAEPVKGRFTISRDDSKSTVYLQMNSLKTEDTAVYYCTRYYGNYGGYFDVWGAGTLVTVSSGKPGSGKPGSGKPGSGKPGSSIVMTQSPATLSVSPGERATLSCRASQSVSNDVAWYQQKPGQSPRLLINYASHRYTGVPDRFTGSGYGTEFTLTISSLQSEDFAVYFCQQDYSSPRTFGGGTKVEIK

SEQ ID NO: 10059 - protein, 122 aa, Artificial Sequence
  Description of Artificial Sequence: Synthetic polypeptide
  VH of XENP019070
EVQLVESGGGLVKPGGSLRLSCAASGFTFSNYWMNWVRQAPGKGLEWIGEIRLKSNNYATHYAEPVKGRFTISRDDSKSTVYLQMNSLKTEDTAVYYCTRYYGNYGGYFDVWGAGTLVTVSS

SEQ ID NO: 10060 - protein, 107 aa, Artificial Sequence; identical to SEQ ID NO: 6247
  Description of Artificial Sequence: Synthetic polypeptide
  VL of XENP019070

SEQ ID NO: 10061 - protein, 5 aa, Artificial Sequence
  Description of Artificial Sequence: Synthetic peptide
  XENP019070 vhCDR1
NYWMN

SEQ ID NO: 10062 - protein, 19 aa, Artificial Sequence
  Description of Artificial Sequence: Synthetic peptide
  XENP019070 vhCDR2
EIRLKSNNYATHYAEPVKG

SEQ ID NO: 10063 - protein, 11 aa, Artificial Sequence
  Description of Artificial Sequence: Synthetic peptide
  XENP019070 vhCDR3
YYGNYGGYFDV

SEQ ID NO: 10064 - protein, 11 aa, Artificial Sequence
  Description of Artificial Sequence: Synthetic peptide
  XENP019070 vlCDR1
RASQSVSNDVA

SEQ ID NO: 10065 - protein, 7 aa, Artificial Sequence
  Description of Artificial Sequence: Synthetic peptide
  XENP019070 vlCDR2
YASHRYT

SEQ ID NO: 10066 - protein, 9 aa, Artificial Sequence
  Description of Artificial Sequence: Synthetic peptide
  XENP019070 vlCDR3
QQDYSSPRT

SEQ ID NO: 10067 - protein, 249 aa, Artificial Sequence
  Description of Artificial Sequence: Synthetic polypeptide
  XENP019071 1G6_H1.246_L1_scFv(GKPGS)4
EVQLVESGGGLVKPGGSLRLSCAASGFTFSNYWMNWVRQAPGKGLEWMGEIRLKSNNYATHYAEPVKGRFTISRDDSKSTVYLQMNSLKTEDTAVYYCTRYYGNYGGYFDVWGAGTLVTVSSGKPGSGKPGSGKPGSGKPGSSIVMTQSPATLSVSPGERATLSCRASQSVSNDVAWYQQKPGQSPRLLINYASHRYTGVPDRFTGSGYGTEFTLTISSLQSEDFAVYFCQQDYSSPRTFGGGTKVEIK

SEQ ID NO: 10068 - protein, 122 aa, Artificial Sequence
  Description of Artificial Sequence: Synthetic polypeptide
  VH of XENP019071
EVQLVESGGGLVKPGGSLRLSCAASGFTFSNYWMNWVRQAPGKGLEWMGEIRLKSNNYATHYAEPVKGRFTISRDDSKSTVYLQMNSLKTEDTAVYYCTRYYGNYGGYFDVWGAGTLVTVSS

SEQ ID NO: 10069 - protein, 107 aa, Artificial Sequence; identical to SEQ ID NO: 6247
  Description of Artificial Sequence: Synthetic polypeptide
  VL of XENP019071

SEQ ID NO: 10070 - protein, 5 aa, Artificial Sequence
  Description of Artificial Sequence: Synthetic peptide
  XENP019071 vhCDR1
NYWMN

SEQ ID NO: 10071 - protein, 19 aa, Artificial Sequence
  Description of Artificial Sequence: Synthetic peptide
  XENP019071 vhCDR2
EIRLKSNNYATHYAEPVKG

SEQ ID NO: 10072 - protein, 11 aa, Artificial Sequence
  Description of Artificial Sequence: Synthetic peptide
  XENP019071 vhCDR3
YYGNYGGYFDV

SEQ ID NO: 10073 - protein, 11 aa, Artificial Sequence
  Description of Artificial Sequence: Synthetic peptide
  XENP019071 vlCDR1
RASQSVSNDVA

SEQ ID NO: 10074 - protein, 7 aa, Artificial Sequence
  Description of Artificial Sequence: Synthetic peptide
  XENP019071 vlCDR2
YASHRYT

SEQ ID NO: 10075 - protein, 9 aa, Artificial Sequence
  Description of Artificial Sequence: Synthetic peptide
  XENP019071 vlCDR3
QQDYSSPRT

SEQ ID NO: 10076 - protein, 249 aa, Artificial Sequence
  Description of Artificial Sequence: Synthetic polypeptide
  XENP019072 1G6_H1.247_L1_scFv(GKPGS)4
EVQLVESGGGLVKPGGSLRLSCAASGFTFSNYWMNWVRQAPGKGLEWVGEIRLKSNNYATHYAEPFKGRFTISRDDSKSTVYLQMNSLKTEDTAVYYCTRYYGNYGGYFDVWGAGTLVTVSSGKPGSGKPGSGKPGSGKPGSSIVMTQSPATLSVSPGERATLSCRASQSVSNDVAWYQQKPGQSPRLLINYASHRYTGVPDRFTGSGYGTEFTLTISSLQSEDFAVYFCQQDYSSPRTFGGGTKVEIK

SEQ ID NO: 10077 - protein, 122 aa, Artificial Sequence
  Description of Artificial Sequence: Synthetic polypeptide
  VH of XENP019072
EVQLVESGGGLVKPGGSLRLSCAASGFTFSNYWMNWVRQAPGKGLEWVGEIRLKSNNYATHYAEPFKGRFTISRDDSKSTVYLQMNSLKTEDTAVYYCTRYYGNYGGYFDVWGAGTLVTVSS

SEQ ID NO: 10078 - protein, 107 aa, Artificial Sequence; identical to SEQ ID NO: 6247
  Description of Artificial Sequence: Synthetic polypeptide
  VL of XENP019072

SEQ ID NO: 10079 - protein, 5 aa, Artificial Sequence
  Description of Artificial Sequence: Synthetic peptide
  XENP019072 vhCDR1
NYWMN

SEQ ID NO: 10080 - protein, 19 aa, Artificial Sequence
  Description of Artificial Sequence: Synthetic peptide
  XENP019072 vhCDR2
EIRLKSNNYATHYAEPFKG

SEQ ID NO: 10081 - protein, 11 aa, Artificial Sequence
  Description of Artificial Sequence: Synthetic peptide
  XENP019072 vhCDR3
YYGNYGGYFDV

SEQ ID NO: 10082 - protein, 11 aa, Artificial Sequence
  Description of Artificial Sequence: Synthetic peptide
  XENP019072 vlCDR1
RASQSVSNDVA

SEQ ID NO: 10083 - protein, 7 aa, Artificial Sequence
  Description of Artificial Sequence: Synthetic peptide
  XENP019072 vlCDR2
YASHRYT

SEQ ID NO: 10084 - protein, 9 aa, Artificial Sequence
  Description of Artificial Sequence: Synthetic peptide
  XENP019072 vlCDR3
QQDYSSPRT

SEQ ID NO: 10085 - protein, 249 aa, Artificial Sequence
  Description of Artificial Sequence: Synthetic polypeptide
  XENP019073 1G6_H1.248_L1_scFv(GKPGS)4
EVQLVESGGGLVKPGGSLRLSCAASGFTFSNYWMNWVRQAPGKGLEWVGEIRLKSNNYATHYAEPVKGRATISRDDSKSTVYLQMNSLKTEDTAVYYCTRYYGNYGGYFDVWGAGTLVTVSSGKPGSGKPGSGKPGSGKPGSSIVMTQSPATLSVSPGERATLSCRASQSVSNDVAWYQQKPGQSPRLLINYASHRYTGVPDRFTGSGYGTEFTLTISSLQSEDFAVYFCQQDYSSPRTFGGGTKVEIK

SEQ ID NO: 10086 - protein, 122 aa, Artificial Sequence
  Description of Artificial Sequence: Synthetic polypeptide
  VH of XENP019073
EVQLVESGGGLVKPGGSLRLSCAASGFTFSNYWMNWVRQAPGKGLEWVGEIRLKSNNYATHYAEPVKGRATISRDDSKSTVYLQMNSLKTEDTAVYYCTRYYGNYGGYFDVWGAGTLVTVSS

SEQ ID NO: 10087 - protein, 107 aa, Artificial Sequence; identical to SEQ ID NO: 6247
  Description of Artificial Sequence: Synthetic polypeptide
  VL of XENP019073

SEQ ID NO: 10088 - protein, 5 aa, Artificial Sequence
  Description of Artificial Sequence: Synthetic peptide
  XENP019073 vhCDR1
NYWMN

SEQ ID NO: 10089 - protein, 19 aa, Artificial Sequence
  Description of Artificial Sequence: Synthetic peptide
  XENP019073 vhCDR2
EIRLKSNNYATHYAEPVKG

SEQ ID NO: 10090 - protein, 11 aa, Artificial Sequence
  Description of Artificial Sequence: Synthetic peptide
  XENP019073 vhCDR3
YYGNYGGYFDV

SEQ ID NO: 10091 - protein, 11 aa, Artificial Sequence
  Description of Artificial Sequence: Synthetic peptide
  XENP019073 vlCDR1
RASQSVSNDVA

SEQ ID NO: 10092 - protein, 7 aa, Artificial Sequence
  Description of Artificial Sequence: Synthetic peptide
  XENP019073 vlCDR2
YASHRYT

SEQ ID NO: 10093 - protein, 9 aa, Artificial Sequence
  Description of Artificial Sequence: Synthetic peptide
  XENP019073 vlCDR3
QQDYSSPRT

SEQ ID NO: 10094 - protein, 249 aa, Artificial Sequence
  Description of Artificial Sequence: Synthetic polypeptide
  XENP019074 1G6_H1.249_L1_scFv(GKPGS)4
EVQLVESGGGLVKPGGSLRLSCAASGFTFSNYWMNWVRQAPGKGLEWVGEIRLKSNNYATHYAEPVKGRVTISRDDSKSTVYLQMNSLKTEDTAVYYCTRYYGNYGGYFDVWGAGTLVTVSSGKPGSGKPGSGKPGSGKPGSSIVMTQSPATLSVSPGERATLSCRASQSVSNDVAWYQQKPGQSPRLLINYASHRYTGVPDRFTGSGYGTEFTLTISSLQSEDFAVYFCQQDYSSPRTFGGGTKVEIK

SEQ ID NO: 10095 - protein, 122 aa, Artificial Sequence
  Description of Artificial Sequence: Synthetic polypeptide
  VH of XENP019074
EVQLVESGGGLVKPGGSLRLSCAASGFTFSNYWMNWVRQAPGKGLEWVGEIRLKSNNYATHYAEPVKGRVTISRDDSKSTVYLQMNSLKTEDTAVYYCTRYYGNYGGYFDVWGAGTLVTVSS

SEQ ID NO: 10096 - protein, 107 aa, Artificial Sequence; identical to SEQ ID NO: 6247
  Description of Artificial Sequence: Synthetic polypeptide
  VL of XENP019074

SEQ ID NO: 10097 - protein, 5 aa, Artificial Sequence
  Description of Artificial Sequence: Synthetic peptide
  XENP019074 vhCDR1
NYWMN

SEQ ID NO: 10098 - protein, 19 aa, Artificial Sequence
  Description of Artificial Sequence: Synthetic peptide
  XENP019074 vhCDR2
EIRLKSNNYATHYAEPVKG

SEQ ID NO: 10099 - protein, 11 aa, Artificial Sequence
  Description of Artificial Sequence: Synthetic peptide
  XENP019074 vhCDR3
YYGNYGGYFDV

SEQ ID NO: 10100 - protein, 11 aa, Artificial Sequence
  Description of Artificial Sequence: Synthetic peptide
  XENP019074 vlCDR1
RASQSVSNDVA

SEQ ID NO: 10101 - protein, 7 aa, Artificial Sequence
  Description of Artificial Sequence: Synthetic peptide
  XENP019074 vlCDR2
YASHRYT

SEQ ID NO: 10102 - protein, 9 aa, Artificial Sequence
  Description of Artificial Sequence: Synthetic peptide
  XENP019074 vlCDR3
QQDYSSPRT

SEQ ID NO: 10103 - protein, 249 aa, Artificial Sequence
  Description of Artificial Sequence: Synthetic polypeptide
  XENP019075 1G6_H1.250_L1_scFv(GKPGS)4
EVQLVESGGGLVKPGGSLRLSCAASGFTFSNYWMNWVRQAPGKGLEWVGEIRLKSNNYATHYAEPVKGRFTISRDDSSSTVYLQMNSLKTEDTAVYYCTRYYGNYGGYFDVWGAGTLVTVSSGKPGSGKPGSGKPGSGKPGSSIVMTQSPATLSVSPGERATLSCRASQSVSNDVAWYQQKPGQSPRLLINYASHRYTGVPDRFTGSGYGTEFTLTISSLQSEDFAVYFCQQDYSSPRTFGGGTKVEIK

SEQ ID NO: 10104 - protein, 122 aa, Artificial Sequence
  Description of Artificial Sequence: Synthetic polypeptide
  VH of XENP019075
EVQLVESGGGLVKPGGSLRLSCAASGFTFSNYWMNWVRQAPGKGLEWVGEIRLKSNNYATHYAEPVKGRFTISRDDSSSTVYLQMNSLKTEDTAVYYCTRYYGNYGGYFDVWGAGTLVTVSS

SEQ ID NO: 10105 - protein, 107 aa, Artificial Sequence; identical to SEQ ID NO: 6247
  Description of Artificial Sequence: Synthetic polypeptide
  VL of XENP019075

SEQ ID NO: 10106 - protein, 5 aa, Artificial Sequence
  Description of Artificial Sequence: Synthetic peptide
  XENP019075 vhCDR1
NYWMN

SEQ ID NO: 10107 - protein, 19 aa, Artificial Sequence
  Description of Artificial Sequence: Synthetic peptide
  XENP019075 vhCDR2
EIRLKSNNYATHYAEPVKG

SEQ ID NO: 10108 - protein, 11 aa, Artificial Sequence
  Description of Artificial Sequence: Synthetic peptide
  XENP019075 vhCDR3
YYGNYGGYFDV

SEQ ID NO: 10109 - protein, 11 aa, Artificial Sequence
  Description of Artificial Sequence: Synthetic peptide
  XENP019075 vlCDR1
RASQSVSNDVA

SEQ ID NO: 10110 - protein, 7 aa, Artificial Sequence
  Description of Artificial Sequence: Synthetic peptide
  XENP019075 vlCDR2
YASHRYT

SEQ ID NO: 10111 - protein, 9 aa, Artificial Sequence
  Description of Artificial Sequence: Synthetic peptide
  XENP019075 vlCDR3
QQDYSSPRT

SEQ ID NO: 10112 - protein, 249 aa, Artificial Sequence
  Description of Artificial Sequence: Synthetic polypeptide
  XENP019076 1G6_H1.251_L1_scFv(GKPGS)4
EVQLVESGGGLVKPGGSLRLSCAASGFTFSNYWMNWVRQAPGKGLEWVGEIRLKSNNYATHYAEPVKGRFTISRDDSKSMVYLQMNSLKTEDTAVYYCTRYYGNYGGYFDVWGAGTLVTVSSGKPGSGKPGSGKPGSGKPGSSIVMTQSPATLSVSPGERATLSCRASQSVSNDVAWYQQKPGQSPRLLINYASHRYTGVPDRFTGSGYGTEFTLTISSLQSEDFAVYFCQQDYSSPRTFGGGTKVEIK

SEQ ID NO: 10113 - protein, 122 aa, Artificial Sequence
  Description of Artificial Sequence: Synthetic polypeptide
  VH of XENP019076
EVQLVESGGGLVKPGGSLRLSCAASGFTFSNYWMNWVRQAPGKGLEWVGEIRLKSNNYATHYAEPVKGRFTISRDDSKSMVYLQMNSLKTEDTAVYYCTRYYGNYGGYFDVWGAGTLVTVSS

SEQ ID NO: 10114 - protein, 107 aa, Artificial Sequence; identical to SEQ ID NO: 6247
  Description of Artificial Sequence: Synthetic polypeptide
  VL of XENP019076

SEQ ID NO: 10115 - protein, 5 aa, Artificial Sequence
  Description of Artificial Sequence: Synthetic peptide
  XENP019076 vhCDR1
NYWMN

SEQ ID NO: 10116 - protein, 19 aa, Artificial Sequence
  Description of Artificial Sequence: Synthetic peptide
  XENP019076 vhCDR2
EIRLKSNNYATHYAEPVKG

SEQ ID NO: 10117 - protein, 11 aa, Artificial Sequence
  Description of Artificial Sequence: Synthetic peptide
  XENP019076 vhCDR3
YYGNYGGYFDV

SEQ ID NO: 10118 - protein, 11 aa, Artificial Sequence
  Description of Artificial Sequence: Synthetic peptide
  XENP019076 vlCDR1
RASQSVSNDVA

SEQ ID NO: 10119 - protein, 7 aa, Artificial Sequence
  Description of Artificial Sequence: Synthetic peptide
  XENP019076 vlCDR2
YASHRYT

SEQ ID NO: 10120 - protein, 9 aa, Artificial Sequence
  Description of Artificial Sequence: Synthetic peptide
  XENP019076 vlCDR3
QQDYSSPRT

SEQ ID NO: 10121 - protein, 249 aa, Artificial Sequence
  Description of Artificial Sequence: Synthetic polypeptide
  XENP019077 1G6_H1.252_L1_scFv(GKPGS)4
EVQLVESGGGLVKPGGSLRLSCAASGFTFSNYWMNWVRQAPGKGLEWVGEIRLKSNNYATHYAEPVKGRFTISRDDSKSQVYLQMNSLKTEDTAVYYCTRYYGNYGGYFDVWGAGTLVTVSSGKPGSGKPGSGKPGSGKPGSSIVMTQSPATLSVSPGERATLSCRASQSVSNDVAWYQQKPGQSPRLLINYASHRYTGVPDRFTGSGYGTEFTLTISSLQSEDFAVYFCQQDYSSPRTFGGGTKVEIK

SEQ ID NO: 10122 - protein, 122 aa, Artificial Sequence
  Description of Artificial Sequence: Synthetic polypeptide
  VH of XENP019077
EVQLVESGGGLVKPGGSLRLSCAASGFTFSNYWMNWVRQAPGKGLEWVGEIRLKSNNYATHYAEPVKGRFTISRDDSKSQVYLQMNSLKTEDTAVYYCTRYYGNYGGYFDVWGAGTLVTVSS

SEQ ID NO: 10123 - protein, 107 aa, Artificial Sequence; identical to SEQ ID NO: 6247
  Description of Artificial Sequence: Synthetic polypeptide
  VL of XENP019077

SEQ ID NO: 10124 - protein, 5 aa, Artificial Sequence
  Description of Artificial Sequence: Synthetic peptide
  XENP019077 vhCDR1
NYWMN

SEQ ID NO: 10125 - protein, 19 aa, Artificial Sequence
  Description of Artificial Sequence: Synthetic peptide
  XENP019077 vhCDR2
EIRLKSNNYATHYAEPVKG

SEQ ID NO: 10126 - protein, 11 aa, Artificial Sequence
  Description of Artificial Sequence: Synthetic peptide
  XENP019077 vhCDR3
YYGNYGGYFDV

SEQ ID NO: 10127 - protein, 11 aa, Artificial Sequence
  Description of Artificial Sequence: Synthetic peptide
  XENP019077 vlCDR1
RASQSVSNDVA

SEQ ID NO: 10128 - protein, 7 aa, Artificial Sequence
  Description of Artificial Sequence: Synthetic peptide
  XENP019077 vlCDR2
YASHRYT

SEQ ID NO: 10129 - protein, 9 aa, Artificial Sequence
  Description of Artificial Sequence: Synthetic peptide
  XENP019077 vlCDR3
QQDYSSPRT

SEQ ID NO: 10130 - protein, 249 aa, Artificial Sequence
  Description of Artificial Sequence: Synthetic polypeptide
  XENP019078 1G6_H1.253_L1_scFv(GKPGS)4
EVQLVESGGGLVKPGGSLRLSCAASGFTFSNYWMNWVRQAPGKGLEWVGEIRLKSNNYATHYAEPVKGRFTISRDDSKSTVVLQMNSLKTEDTAVYYCTRYYGNYGGYFDVWGAGTLVTVSSGKPGSGKPGSGKPGSGKPGSSIVMTQSPATLSVSPGERATLSCRASQSVSNDVAWYQQKPGQSPRLLINYASHRYTGVPDRFTGSGYGTEFTLTISSLQSEDFAVYFCQQDYSSPRTFGGGTKVEIK

SEQ ID NO: 10131 - protein, 122 aa, Artificial Sequence
  Description of Artificial Sequence: Synthetic polypeptide
  VH of XENP019078
EVQLVESGGGLVKPGGSLRLSCAASGFTFSNYWMNWVRQAPGKGLEWVGEIRLKSNNYATHYAEPVKGRFTISRDDSKSTVVLQMNSLKTEDTAVYYCTRYYGNYGGYFDVWGAGTLVTVSS

SEQ ID NO: 10132 - protein, 107 aa, Artificial Sequence; identical to SEQ ID NO: 6247
  Description of Artificial Sequence: Synthetic polypeptide
  VL of XENP019078

SEQ ID NO: 10133 - protein, 5 aa, Artificial Sequence
  Description of Artificial Sequence: Synthetic peptide
  XENP019078 vhCDR1
NYWMN

SEQ ID NO: 10134 - protein, 19 aa, Artificial Sequence
  Description of Artificial Sequence: Synthetic peptide
  XENP019078 vhCDR2
EIRLKSNNYATHYAEPVKG

SEQ ID NO: 10135 - protein, 11 aa, Artificial Sequence
  Description of Artificial Sequence: Synthetic peptide
  XENP019078 vhCDR3
YYGNYGGYFDV

SEQ ID NO: 10136 - protein, 11 aa, Artificial Sequence
  Description of Artificial Sequence: Synthetic peptide
  XENP019078 vlCDR1
RASQSVSNDVA

SEQ ID NO: 10137 - protein, 7 aa, Artificial Sequence
  Description of Artificial Sequence: Synthetic peptide
  XENP019078 vlCDR2
YASHRYT

SEQ ID NO: 10138 - protein, 9 aa, Artificial Sequence
  Description of Artificial Sequence: Synthetic peptide
  XENP019078 vlCDR3
QQDYSSPRT

SEQ ID NO: 10139 - protein, 249 aa, Artificial Sequence
  Description of Artificial Sequence: Synthetic polypeptide
  XENP019079 1G6_H1.254_L1_scFv(GKPGS)4
EVQLVESGGGLVKPGGSLRLSCAASGFTFSNYWMNWVRQAPGKGLEWVGEIRLKSNNYATHYAEPVKGRFTISRDDSKSTVYLEMNSLKTEDTAVYYCTRYYGNYGGYFDVWGAGTLVTVSSGKPGSGKPGSGKPGSGKPGSSIVMTQSPATLSVSPGERATLSCRASQSVSNDVAWYQQKPGQSPRLLINYASHRYTGVPDRFTGSGYGTEFTLTISSLQSEDFAVYFCQQDYSSPRTFGGGTKVEIK

SEQ ID NO: 10140 - protein, 122 aa, Artificial Sequence
  Description of Artificial Sequence: Synthetic polypeptide
  VH of XENP019079
EVQLVESGGGLVKPGGSLRLSCAASGFTFSNYWMNWVRQAPGKGLEWVGEIRLKSNNYATHYAEPVKGRFTISRDDSKSTVYLEMNSLKTEDTAVYYCTRYYGNYGGYFDVWGAGTLVTVSS

SEQ ID NO: 10141 - protein, 107 aa, Artificial Sequence; identical to SEQ ID NO: 6247
  Description of Artificial Sequence: Synthetic polypeptide
  VL of XENP019079

SEQ ID NO: 10142 - protein, 5 aa, Artificial Sequence
  Description of Artificial Sequence: Synthetic peptide
  XENP019079 vhCDR1
NYWMN

SEQ ID NO: 10143 - protein, 19 aa, Artificial Sequence
  Description of Artificial Sequence: Synthetic peptide
  XENP019079 vhCDR2
EIRLKSNNYATHYAEPVKG

SEQ ID NO: 10144 - protein, 11 aa, Artificial Sequence
  Description of Artificial Sequence: Synthetic peptide
  XENP019079 vhCDR3
YYGNYGGYFDV

SEQ ID NO: 10145 - protein, 11 aa, Artificial Sequence
  Description of Artificial Sequence: Synthetic peptide
  XENP019079 vlCDR1
RASQSVSNDVA

SEQ ID NO: 10146 - protein, 7 aa, Artificial Sequence
  Description of Artificial Sequence: Synthetic peptide
  XENP019079 vlCDR2
YASHRYT

SEQ ID NO: 10147 - protein, 9 aa, Artificial Sequence
  Description of Artificial Sequence: Synthetic peptide
  XENP019079 vlCDR3
QQDYSSPRT

SEQ ID NO: 10148 - protein, 249 aa, Artificial Sequence
  Description of Artificial Sequence: Synthetic polypeptide
  XENP019080 1G6_H1.255_L1_scFv(GKPGS)4
EVQLVESGGGLVKPGGSLRLSCAASGFTFSNYWMNWVRQAPGKGLEWVGEIRLKSNNYATHYAEPVKGRFTISRDDSKSTVYLQMNSEKTEDTAVYYCTRYYGNYGGYFDVWGAGTLVTVSSGKPGSGKPGSGKPGSGKPGSSIVMTQSPATLSVSPGERATLSCRASQSVSNDVAWYQQKPGQSPRLLINYASHRYTGVPDRFTGSGYGTEFTLTISSLQSEDFAVYFCQQDYSSPRTFGGGTKVEIK

SEQ ID NO: 10149 - protein, 122 aa, Artificial Sequence
  Description of Artificial Sequence: Synthetic polypeptide
  VH of XENP019080
EVQLVESGGGLVKPGGSLRLSCAASGFTFSNYWMNWVRQAPGKGLEWVGEIRLKSNNYATHYAEPVKGRFTISRDDSKSTVYLQMNSEKTEDTAVYYCTRYYGNYGGYFDVWGAGTLVTVSS

SEQ ID NO: 10150 - protein, 107 aa, Artificial Sequence; identical to SEQ ID NO: 6247
  Description of Artificial Sequence: Synthetic polypeptide
  VL of XENP019080

SEQ ID NO: 10151 - protein, 5 aa, Artificial Sequence
  Description of Artificial Sequence: Synthetic peptide
  XENP019080 vhCDR1
NYWMN

SEQ ID NO: 10152 - protein, 19 aa, Artificial Sequence
  Description of Artificial Sequence: Synthetic peptide
  XENP019080 vhCDR2
EIRLKSNNYATHYAEPVKG

SEQ ID NO: 10153 - protein, 11 aa, Artificial Sequence
  Description of Artificial Sequence: Synthetic peptide
  XENP019080 vhCDR3
YYGNYGGYFDV

SEQ ID NO: 10154 - protein, 11 aa, Artificial Sequence
  Description of Artificial Sequence: Synthetic peptide
  XENP019080 vlCDR1
RASQSVSNDVA

SEQ ID NO: 10155 - protein, 7 aa, Artificial Sequence
  Description of Artificial Sequence: Synthetic peptide
  XENP019080 vlCDR2
YASHRYT

SEQ ID NO: 10156 - protein, 9 aa, Artificial Sequence
  Description of Artificial Sequence: Synthetic peptide
  XENP019080 vlCDR3
QQDYSSPRT

SEQ ID NO: 10157 - protein, 249 aa, Artificial Sequence
  Description of Artificial Sequence: Synthetic polypeptide
  XENP019081 1G6_H1.256_L1_scFv(GKPGS)4
EVQLVESGGGLVKPGGSLRLSCAASGFTFSNYWMNWVRQAPGKGLEWVGEIRLKSNNYATHYAEPVKGRFTISRDDSKSTVYLQMNSVKTEDTAVYYCTRYYGNYGGYFDVWGAGTLVTVSSGKPGSGKPGSGKPGSGKPGSSIVMTQSPATLSVSPGERATLSCRASQSVSNDVAWYQQKPGQSPRLLINYASHRYTGVPDRFTGSGYGTEFTLTISSLQSEDFAVYFCQQDYSSPRTFGGGTKVEIK

SEQ ID NO: 10158 - protein, 122 aa, Artificial Sequence
  Description of Artificial Sequence: Synthetic polypeptide
  VH of XENP019081
EVQLVESGGGLVKPGGSLRLSCAASGFTFSNYWMNWVRQAPGKGLEWVGEIRLKSNNYATHYAEPVKGRFTISRDDSKSTVYLQMNSVKTEDTAVYYCTRYYGNYGGYFDVWGAGTLVTVSS

SEQ ID NO: 10159 - protein, 107 aa, Artificial Sequence; identical to SEQ ID NO: 6247
  Description of Artificial Sequence: Synthetic polypeptide
  VL of XENP019081

SEQ ID NO: 10160 - protein, 5 aa, Artificial Sequence
  Description of Artificial Sequence: Synthetic peptide
  XENP019081 vhCDR1
NYWMN

SEQ ID NO: 10161 - protein, 19 aa, Artificial Sequence
  Description of Artificial Sequence: Synthetic peptide
  XENP019081 vhCDR2
EIRLKSNNYATHYAEPVKG

SEQ ID NO: 10162 - protein, 11 aa, Artificial Sequence
  Description of Artificial Sequence: Synthetic peptide
  XENP019081 vhCDR3
YYGNYGGYFDV

SEQ ID NO: 10163 - protein, 11 aa, Artificial Sequence
  Description of Artificial Sequence: Synthetic peptide
  XENP019081 vlCDR1
RASQSVSNDVA

SEQ ID NO: 10164 - protein, 7 aa, Artificial Sequence
  Description of Artificial Sequence: Synthetic peptide
  XENP019081 vlCDR2
YASHRYT

SEQ ID NO: 10165 - protein, 9 aa, Artificial Sequence
  Description of Artificial Sequence: Synthetic peptide
  XENP019081 vlCDR3
QQDYSSPRT

SEQ ID NO: 10166 - protein, 249 aa, Artificial Sequence
  Description of Artificial Sequence: Synthetic polypeptide
  XENP019082 1G6_H1.257_L1_scFv(GKPGS)4
EVQLVESGGGLVKPGGSLRLSCAASGFTFSNYWMNWVRQAPGKGLEWVGEIRLKSNNYATHYAEPVKGRFTISRDDSKSTVYLQMNSLKTEDTAVYYCTRYYGNYGGYFDVWGRGTLVTVSSGKPGSGKPGSGKPGSGKPGSSIVMTQSPATLSVSPGERATLSCRASQSVSNDVAWYQQKPGQSPRLLINYASHRYTGVPDRFTGSGYGTEFTLTISSLQSEDFAVYFCQQDYSSPRTFGGGTKVEIK

SEQ ID NO: 10167 - protein, 122 aa, Artificial Sequence
  Description of Artificial Sequence: Synthetic polypeptide
  VH of XENP019082
EVQLVESGGGLVKPGGSLRLSCAASGFTFSNYWMNWVRQAPGKGLEWVGEIRLKSNNYATHYAEPVKGRFTISRDDSKSTVYLQMNSLKTEDTAVYYCTRYYGNYGGYFDVWGRGTLVTVSS

SEQ ID NO: 10168 - protein, 107 aa, Artificial Sequence; identical to SEQ ID NO: 6247
  Description of Artificial Sequence: Synthetic polypeptide
  VL of XENP019082

SEQ ID NO: 10169 - protein, 5 aa, Artificial Sequence
  Description of Artificial Sequence: Synthetic peptide
  XENP019082 vhCDR1
NYWMN

SEQ ID NO: 10170 - protein, 19 aa, Artificial Sequence
  Description of Artificial Sequence: Synthetic peptide
  XENP019082 vhCDR2
EIRLKSNNYATHYAEPVKG

SEQ ID NO: 10171 - protein, 11 aa, Artificial Sequence
  Description of Artificial Sequence: Synthetic peptide
  XENP019082 vhCDR3
YYGNYGGYFDV

SEQ ID NO: 10172 - protein, 11 aa, Artificial Sequence
  Description of Artificial Sequence: Synthetic peptide
  XENP019082 vlCDR1
RASQSVSNDVA

SEQ ID NO: 10173 - protein, 7 aa, Artificial Sequence
  Description of Artificial Sequence: Synthetic peptide
  XENP019082 vlCDR2
YASHRYT

SEQ ID NO: 10174 - protein, 9 aa, Artificial Sequence
  Description of Artificial Sequence: Synthetic peptide
  XENP019082 vlCDR3
QQDYSSPRT

SEQ ID NO: 10175 - protein, 249 aa, Artificial Sequence
  Description of Artificial Sequence: Synthetic polypeptide
  XENP019083 1G6_H1.258_L1_scFv(GKPGS)4
EVQLVESGGGLKKPGESLRLSCAASGFTFSNYWMNWVRQAPGKGLEWVGEIRLKSNNYATHYAEPVKGRFTISRDDSKSTVYLQMNSLKTEDTAVYYCTRYYGNYGGYFDVWGAGTLVTVSSGKPGSGKPGSGKPGSGKPGSSIVMTQSPATLSVSPGERATLSCRASQSVSNDVAWYQQKPGQSPRLLINYASHRYTGVPDRFTGSGYGTEFTLTISSLQSEDFAVYFCQQDYSSPRTFGGGTKVEIK

SEQ ID NO: 10176 - protein, 122 aa, Artificial Sequence
  Description of Artificial Sequence: Synthetic polypeptide
  VH of XENP019083
EVQLVESGGGLKKPGESLRLSCAASGFTFSNYWMNWVRQAPGKGLEWVGEIRLKSNNYATHYAEPVKGRFTISRDDSKSTVYLQMNSLKTEDTAVYYCTRYYGNYGGYFDVWGAGTLVTVSS

SEQ ID NO: 10177 - protein, 107 aa, Artificial Sequence; identical to SEQ ID NO: 6247
  Description of Artificial Sequence: Synthetic polypeptide
  VL of XENP019083

SEQ ID NO: 10178 - protein, 5 aa, Artificial Sequence
  Description of Artificial Sequence: Synthetic peptide
  XENP019083 vhCDR1
NYWMN

SEQ ID NO: 10179 - protein, 19 aa, Artificial Sequence
  Description of Artificial Sequence: Synthetic peptide
  XENP019083 vhCDR2
EIRLKSNNYATHYAEPVKG

SEQ ID NO: 10180 - protein, 11 aa, Artificial Sequence
  Description of Artificial Sequence: Synthetic peptide
  XENP019083 vhCDR3
YYGNYGGYFDV

SEQ ID NO: 10181 - protein, 11 aa, Artificial Sequence
  Description of Artificial Sequence: Synthetic peptide
  XENP019083 vlCDR1
RASQSVSNDVA

SEQ ID NO: 10182 - protein, 7 aa, Artificial Sequence
  Description of Artificial Sequence: Synthetic peptide
  XENP019083 vlCDR2
YASHRYT

SEQ ID NO: 10183 - protein, 9 aa, Artificial Sequence
  Description of Artificial Sequence: Synthetic peptide
  XENP019083 vlCDR3
QQDYSSPRT

SEQ ID NO: 10184 - protein, 249 aa, Artificial Sequence
  Description of Artificial Sequence: Synthetic polypeptide
  XENP019084 1G6_H1.259_L1_scFv(GKPGS)4
EVQLVESGGGLVKPGGSLRLSCAASGFTFSNYWMDWVRQAPGKGLEWVGEIRLKSNNYATHYAEPVKGRFTISRDDSKSTVYLQMNSLKTEDTAVYYCKRYYGNYGGYFDVWGAGTLVTVSSGKPGSGKPGSGKPGSGKPGSSIVMTQSPATLSVSPGERATLSCRASQSVSNDVAWYQQKPGQSPRLLINYASHRYTGVPDRFTGSGYGTEFTLTISSLQSEDFAVYFCQQDYSSPRTFGGGTKVEIK

SEQ ID NO: 10185 - protein, 122 aa, Artificial Sequence
  Description of Artificial Sequence: Synthetic polypeptide
  VH of XENP019084
EVQLVESGGGLVKPGGSLRLSCAASGFTFSNYWMDWVRQAPGKGLEWVGEIRLKSNNYATHYAEPVKGRFTISRDDSKSTVYLQMNSLKTEDTAVYYCKRYYGNYGGYFDVWGAGTLVTVSS

SEQ ID NO: 10186 - protein, 107 aa, Artificial Sequence; identical to SEQ ID NO: 6247
  Description of Artificial Sequence: Synthetic polypeptide
  VL of XENP019084

SEQ ID NO: 10187 - protein, 5 aa, Artificial Sequence
  Description of Artificial Sequence: Synthetic peptide
  XENP019084 vhCDR1
NYWMD

SEQ ID NO: 10188 - protein, 19 aa, Artificial Sequence
  Description of Artificial Sequence: Synthetic peptide
  XENP019084 vhCDR2
EIRLKSNNYATHYAEPVKG

SEQ ID NO: 10189 - protein, 11 aa, Artificial Sequence
  Description of Artificial Sequence: Synthetic peptide
  XENP019084 vhCDR3
YYGNYGGYFDV

SEQ ID NO: 10190 - protein, 11 aa, Artificial Sequence
  Description of Artificial Sequence: Synthetic peptide
  XENP019084 vlCDR1
RASQSVSNDVA

SEQ ID NO: 10191 - protein, 7 aa, Artificial Sequence
  Description of Artificial Sequence: Synthetic peptide
  XENP019084 vlCDR2
YASHRYT

SEQ ID NO: 10192 - protein, 9 aa, Artificial Sequence
  Description of Artificial Sequence: Synthetic peptide
  XENP019084 vlCDR3
QQDYSSPRT

SEQ ID NO: 10193 - protein, 249 aa, Artificial Sequence
  Description of Artificial Sequence: Synthetic polypeptide
  XENP019085 1G6_H1.260_L1_scFv(GKPGS)4
EVQLVESGGGLVKPGESLRLSCAASGFTFSNYWMNWVRQAPGKGLEWVGEIRLKSNNYATHYAEPVKGRFTISRDDSKSTVYLQMNSRKTEDTAVYYCTRYYGNYGGYFDVWGAGTLVTVSSGKPGSGKPGSGKPGSGKPGSSIVMTQSPATLSVSPGERATLSCRASQSVSNDVAWYQQKPGQSPRLLINYASHRYTGVPDRFTGSGYGTEFTLTISSLQSEDFAVYFCQQDYSSPRTFGGGTKVEIK

SEQ ID NO: 10194 - protein, 122 aa, Artificial Sequence
  Description of Artificial Sequence: Synthetic polypeptide
  VH of XENP019085
EVQLVESGGGLVKPGESLRLSCAASGFTFSNYWMNWVRQAPGKGLEWVGEIRLKSNNYATHYAEPVKGRFTISRDDSKSTVYLQMNSRKTEDTAVYYCTRYYGNYGGYFDVWGAGTLVTVSS

SEQ ID NO: 10195 - protein, 107 aa, Artificial Sequence; identical to SEQ ID NO: 6247
  Description of Artificial Sequence: Synthetic polypeptide
  VL of XENP019085

SEQ ID NO: 10196 - protein, 5 aa, Artificial Sequence
  Description of Artificial Sequence: Synthetic peptide
  XENP019085 vhCDR1
NYWMN

SEQ ID NO: 10197 - protein, 19 aa, Artificial Sequence
  Description of Artificial Sequence: Synthetic peptide
  XENP019085 vhCDR2
EIRLKSNNYATHYAEPVKG

SEQ ID NO: 10198 - protein, 11 aa, Artificial Sequence
  Description of Artificial Sequence: Synthetic peptide
  XENP019085 vhCDR3
YYGNYGGYFDV

SEQ ID NO: 10199 - protein, 11 aa, Artificial Sequence
  Description of Artificial Sequence: Synthetic peptide
  XENP019085 vlCDR1
RASQSVSNDVA

SEQ ID NO: 10200 - protein, 7 aa, Artificial Sequence
  Description of Artificial Sequence: Synthetic peptide
  XENP019085 vlCDR2
YASHRYT

SEQ ID NO: 10201 - protein, 9 aa, Artificial Sequence
  Description of Artificial Sequence: Synthetic peptide
  XENP019085 vlCDR3
QQDYSSPRT

SEQ ID NO: 10202 - protein, 249 aa, Artificial Sequence
  Description of Artificial Sequence: Synthetic polypeptide
  XENP019086 1G6_H1.261_L1_scFv(GKPGS)4
EVQLVESGGGLVKPGGSLRLSCKASGFTFSNYWMNWVRQAPGKGLEWVGEIRLKSNNYATHYAEPVKGRFTISRDDSKDTVYLQMNSLKTEDTAVYYCTRYYGNYGGYFDVWGAGTLVTVSSGKPGSGKPGSGKPGSGKPGSSIVMTQSPATLSVSPGERATLSCRASQSVSNDVAWYQQKPGQSPRLLINYASHRYTGVPDRFTGSGYGTEFTLTISSLQSEDFAVYFCQQDYSSPRTFGGGTKVEIK

SEQ ID NO: 10203 - protein, 122 aa, Artificial Sequence
  Description of Artificial Sequence: Synthetic polypeptide
  VH of XENP019086
EVQLVESGGGLVKPGGSLRLSCKASGFTFSNYWMNWVRQAPGKGLEWVGEIRLKSNNYATHYAEPVKGRFTISRDDSKDTVYLQMNSLKTEDTAVYYCTRYYGNYGGYFDVWGAGTLVTVSS

SEQ ID NO: 10204 - protein, 107 aa, Artificial Sequence; identical to SEQ ID NO: 6247
  Description of Artificial Sequence: Synthetic polypeptide
  VL of XENP019086

SEQ ID NO: 10205 - protein, 5 aa, Artificial Sequence
  Description of Artificial Sequence: Synthetic peptide
  XENP019086 vhCDR1
NYWMN

SEQ ID NO: 10206 - protein, 19 aa, Artificial Sequence
  Description of Artificial Sequence: Synthetic peptide
  XENP019086 vhCDR2
EIRLKSNNYATHYAEPVKG

SEQ ID NO: 10207 - protein, 11 aa, Artificial Sequence
  Description of Artificial Sequence: Synthetic peptide
  XENP019086 vhCDR3
YYGNYGGYFDV

SEQ ID NO: 10208 - protein, 11 aa, Artificial Sequence
  Description of Artificial Sequence: Synthetic peptide
  XENP019086 vlCDR1
RASQSVSNDVA

SEQ ID NO: 10209 - protein, 7 aa, Artificial Sequence
  Description of Artificial Sequence: Synthetic peptide
  XENP019086 vlCDR2
YASHRYT

SEQ ID NO: 10210 - protein, 9 aa, Artificial Sequence
  Description of Artificial Sequence: Synthetic peptide
  XENP019086 vlCDR3
QQDYSSPRT

SEQ ID NO: 10211 - protein, 249 aa, Artificial Sequence
  Description of Artificial Sequence: Synthetic polypeptide
  XENP019087 1G6_H1.262_L1_scFv(GKPGS)4
EVQLVESGGGLVKPGESLRLSCAASGFTFSNYWMNWVRQAPGKGLEWVGEIRLKSNNYATHYAEPVKGRFTISRDDSKSTVYLQMNRLKTEDTAVYYCTRYYGNYGGYFDVWGAGTLVTVSSGKPGSGKPGSGKPGSGKPGSSIVMTQSPATLSVSPGERATLSCRASQSVSNDVAWYQQKPGQSPRLLINYASHRYTGVPDRFTGSGYGTEFTLTISSLQSEDFAVYFCQQDYSSPRTFGGGTKVEIK

SEQ ID NO: 10212 - protein, 122 aa, Artificial Sequence
  Description of Artificial Sequence: Synthetic polypeptide
  VH of XENP019087
EVQLVESGGGLVKPGESLRLSCAASGFTFSNYWMNWVRQAPGKGLEWVGEIRLKSNNYATHYAEPVKGRFTISRDDSKSTVYLQMNRLKTEDTAVYYCTRYYGNYGGYFDVWGAGTLVTVSS

SEQ ID NO: 10213 - protein, 107 aa, Artificial Sequence; identical to SEQ ID NO: 6247
  Description of Artificial Sequence: Synthetic polypeptide
  VL of XENP019087

SEQ ID NO: 10214 - protein, 5 aa, Artificial Sequence
  Description of Artificial Sequence: Synthetic peptide
  XENP019087 vhCDR1
NYWMN

SEQ ID NO: 10215 - protein, 19 aa, Artificial Sequence
  Description of Artificial Sequence: Synthetic peptide
  XENP019087 vhCDR2
EIRLKSNNYATHYAEPVKG

SEQ ID NO: 10216 - protein, 11 aa, Artificial Sequence
  Description of Artificial Sequence: Synthetic peptide
  XENP019087 vhCDR3
YYGNYGGYFDV

SEQ ID NO: 10217 - protein, 11 aa, Artificial Sequence
  Description of Artificial Sequence: Synthetic peptide
  XENP019087 vlCDR1
RASQSVSNDVA

SEQ ID NO: 10218 - protein, 7 aa, Artificial Sequence
  Description of Artificial Sequence: Synthetic peptide
  XENP019087 vlCDR2
YASHRYT

SEQ ID NO: 10219 - protein, 9 aa, Artificial Sequence
  Description of Artificial Sequence: Synthetic peptide
  XENP019087 vlCDR3
QQDYSSPRT

SEQ ID NO: 10220 - protein, 249 aa, Artificial Sequence
  Description of Artificial Sequence: Synthetic polypeptide
  XENP019088 1G6_H1.263_L1_scFv(GKPGS)4
EVQLVESGGGLVKPGGSLRLSCAASGFTFSNYWMNWVRQAPGKGLEWVGEIRLKSNNYATHYAEKVKGLFTISRDDSKSTVYLQMNSLKTEDTAVYYCTRYYGNYGGYFDVWGAGTLVTVSSGKPGSGKPGSGKPGSGKPGSSIVMTQSPATLSVSPGERATLSCRASQSVSNDVAWYQQKPGQSPRLLINYASHRYTGVPDRFTGSGYGTEFTLTISSLQSEDFAVYFCQQDYSSPRTFGGGTKVEIK

SEQ ID NO: 10221 - protein, 122 aa, Artificial Sequence
  Description of Artificial Sequence: Synthetic polypeptide
  VH of XENP019088
EVQLVESGGGLVKPGGSLRLSCAASGFTFSNYWMNWVRQAPGKGLEWVGEIRLKSNNYATHYAEKVKGLFTISRDDSKSTVYLQMNSLKTEDTAVYYCTRYYGNYGGYFDVWGAGTLVTVSS

SEQ ID NO: 10222 - protein, 107 aa, Artificial Sequence; identical to SEQ ID NO: 6247
  Description of Artificial Sequence: Synthetic polypeptide
  VL of XENP019088

SEQ ID NO: 10223 - protein, 5 aa, Artificial Sequence
  Description of Artificial Sequence: Synthetic peptide
  XENP019088 vhCDR1
NYWMN

SEQ ID NO: 10224 - protein, 19 aa, Artificial Sequence
  Description of Artificial Sequence: Synthetic peptide
  XENP019088 vhCDR2
EIRLKSNNYATHYAEKVKG

SEQ ID NO: 10225 - protein, 11 aa, Artificial Sequence
  Description of Artificial Sequence: Synthetic peptide
  XENP019088 vhCDR3
YYGNYGGYFDV

SEQ ID NO: 10226 - protein, 11 aa, Artificial Sequence
  Description of Artificial Sequence: Synthetic peptide
  XENP019088 vlCDR1
RASQSVSNDVA

SEQ ID NO: 10227 - protein, 7 aa, Artificial Sequence
  Description of Artificial Sequence: Synthetic peptide
  XENP019088 vlCDR2
YASHRYT

SEQ ID NO: 10228 - protein, 9 aa, Artificial Sequence
  Description of Artificial Sequence: Synthetic peptide
  XENP019088 vlCDR3
QQDYSSPRT

SEQ ID NO: 10229 - protein, 249 aa, Artificial Sequence
  Description of Artificial Sequence: Synthetic polypeptide
  XENP019089 1G6_H1.264_L1_scFv(GKPGS)4
EVQLVESGGGLVKPGGSLRLSCKASGDTFSNYWMNWVRQAPGKGLEWVGEIRLKSNNYATHYAEPVKGRFTISRDDSKSTVYLQMNSLKTEDTAVYYCTRYYGNYGGYFDVWGAGTLVTVSSGKPGSGKPGSGKPGSGKPGSSIVMTQSPATLSVSPGERATLSCRASQSVSNDVAWYQQKPGQSPRLLINYASHRYTGVPDRFTGSGYGTEFTLTISSLQSEDFAVYFCQQDYSSPRTFGGGTKVEIK

SEQ ID NO: 10230 - protein, 122 aa, Artificial Sequence
  Description of Artificial Sequence: Synthetic polypeptide
  VH of XENP019089
EVQLVESGGGLVKPGGSLRLSCKASGDTFSNYWMNWVRQAPGKGLEWVGEIRLKSNNYATHYAEPVKGRFTISRDDSKSTVYLQMNSLKTEDTAVYYCTRYYGNYGGYFDVWGAGTLVTVSS

SEQ ID NO: 10231 - protein, 107 aa, Artificial Sequence; identical to SEQ ID NO: 6247
  Description of Artificial Sequence: Synthetic polypeptide
  VL of XENP019089

SEQ ID NO: 10232 - protein, 5 aa, Artificial Sequence
  Description of Artificial Sequence: Synthetic peptide
  XENP019089 vhCDR1
NYWMN

SEQ ID NO: 10233 - protein, 19 aa, Artificial Sequence
  Description of Artificial Sequence: Synthetic peptide
  XENP019089 vhCDR2
EIRLKSNNYATHYAEPVKG

SEQ ID NO: 10234 - protein, 11 aa, Artificial Sequence
  Description of Artificial Sequence: Synthetic peptide
  XENP019089 vhCDR3
YYGNYGGYFDV

SEQ ID NO: 10235 - protein, 11 aa, Artificial Sequence
  Description of Artificial Sequence: Synthetic peptide
  XENP019089 vlCDR1
RASQSVSNDVA

SEQ ID NO: 10236 - protein, 7 aa, Artificial Sequence
  Description of Artificial Sequence: Synthetic peptide
  XENP019089 vlCDR2
YASHRYT

SEQ ID NO: 10237 - protein, 9 aa, Artificial Sequence
  Description of Artificial Sequence: Synthetic peptide
  XENP019089 vlCDR3
QQDYSSPRT

SEQ ID NO: 10238 - protein, 249 aa, Artificial Sequence
  Description of Artificial Sequence: Synthetic polypeptide
  XENP019090 1G6_H1.265_L1_scFv(GKPGS)4
EVQLVESGGGLVKPGESLRLSCAASGFTFSNYWMNWVRQAPGKGLEWVGEIRLKSNNYATHYAEPVKGRFTISRDDSKSTVYLKMNSLKTEDTAVYYCTRYYGNYGGYFDVWGAGTLVTVSSGKPGSGKPGSGKPGSGKPGSSIVMTQSPATLSVSPGERATLSCRASQSVSNDVAWYQQKPGQSPRLLINYASHRYTGVPDRFTGSGYGTEFTLTISSLQSEDFAVYFCQQDYSSPRTFGGGTKVEIK

SEQ ID NO: 10239 - protein, 122 aa, Artificial Sequence
  Description of Artificial Sequence: Synthetic polypeptide
  VH of XENP019090
EVQLVESGGGLVKPGESLRLSCAASGFTFSNYWMNWVRQAPGKGLEWVGEIRLKSNNYATHYAEPVKGRFTISRDDSKSTVYLKMNSLKTEDTAVYYCTRYYGNYGGYFDVWGAGTLVTVSS

SEQ ID NO: 10240 - protein, 107 aa, Artificial Sequence; identical to SEQ ID NO: 6247
  Description of Artificial Sequence: Synthetic polypeptide
  VL of XENP019090

SEQ ID NO: 10241 - protein, 5 aa, Artificial Sequence
  Description of Artificial Sequence: Synthetic peptide
  XENP019090 vhCDR1
NYWMN

SEQ ID NO: 10242 - protein, 19 aa, Artificial Sequence
  Description of Artificial Sequence: Synthetic peptide
  XENP019090 vhCDR2
EIRLKSNNYATHYAEPVKG

SEQ ID NO: 10243 - protein, 11 aa, Artificial Sequence
  Description of Artificial Sequence: Synthetic peptide
  XENP019090 vhCDR3
YYGNYGGYFDV

SEQ ID NO: 10244 - protein, 11 aa, Artificial Sequence
  Description of Artificial Sequence: Synthetic peptide
  XENP019090 vlCDR1
RASQSVSNDVA

SEQ ID NO: 10245 - protein, 7 aa, Artificial Sequence
  Description of Artificial Sequence: Synthetic peptide
  XENP019090 vlCDR2
YASHRYT

SEQ ID NO: 10246 - protein, 9 aa, Artificial Sequence
  Description of Artificial Sequence: Synthetic peptide
  XENP019090 vlCDR3
QQDYSSPRT

SEQ ID NO: 10247 - protein, 249 aa, Artificial Sequence
  Description of Artificial Sequence: Synthetic polypeptide
  XENP019091 1G6_H1.266_L1_scFv(GKPGS)4
EVQLVESGGGLVKPGGSLRLSCAASGFTFSNYWMNWVRQAPGKGLEWVGEIRLKSNNYATHYAQPVKDRFTISRDDSKSTVYLQMNSLKTEDTAVYYCTRYYGNYGGYFDVWGAGTLVTVSSGKPGSGKPGSGKPGSGKPGSSIVMTQSPATLSVSPGERATLSCRASQSVSNDVAWYQQKPGQSPRLLINYASHRYTGVPDRFTGSGYGTEFTLTISSLQSEDFAVYFCQQDYSSPRTFGGGTKVEIK

SEQ ID NO: 10248 - protein, 122 aa, Artificial Sequence
  Description of Artificial Sequence: Synthetic polypeptide
  VH of XENP019091
EVQLVESGGGLVKPGGSLRLSCAASGFTFSNYWMNWVRQAPGKGLEWVGEIRLKSNNYATHYAQPVKDRFTISRDDSKSTVYLQMNSLKTEDTAVYYCTRYYGNYGGYFDVWGAGTLVTVSS

SEQ ID NO: 10249 - protein, 107 aa, Artificial Sequence; identical to SEQ ID NO: 6247
  Description of Artificial Sequence: Synthetic polypeptide
  VL of XENP019091

SEQ ID NO: 10250 - protein, 5 aa, Artificial Sequence
  Description of Artificial Sequence: Synthetic peptide
  XENP019091 vhCDR1
NYWMN

SEQ ID NO: 10251 - protein, 19 aa, Artificial Sequence
  Description of Artificial Sequence: Synthetic peptide
  XENP019091 vhCDR2
EIRLKSNNYATHYAQPVKD

SEQ ID NO: 10252 - protein, 11 aa, Artificial Sequence
  Description of Artificial Sequence: Synthetic peptide
  XENP019091 vhCDR3
YYGNYGGYFDV

SEQ ID NO: 10253 - protein, 11 aa, Artificial Sequence
  Description of Artificial Sequence: Synthetic peptide
  XENP019091 vlCDR1
RASQSVSNDVA

SEQ ID NO: 10254 - protein, 7 aa, Artificial Sequence
  Description of Artificial Sequence: Synthetic peptide
  XENP019091 vlCDR2
YASHRYT

SEQ ID NO: 10255 - protein, 9 aa, Artificial Sequence
  Description of Artificial Sequence: Synthetic peptide
  XENP019091 vlCDR3
QQDYSSPRT

SEQ ID NO: 10256 - protein, 249 aa, Artificial Sequence
  Description of Artificial Sequence: Synthetic polypeptide
  XENP019092 1G6_H1.267_L1_scFv(GKPGS)4
EVQLVESGGGLVKPGGSLRLSCAASGFTFSNYWMNWVRQAPGKGLEWVGEIRLKSNNYATHYAEPVKGRFTISRDDSKSTVYLEMNSRKTEDTAVYYCTRYYGNYGGYFDVWGAGTLVTVSSGKPGSGKPGSGKPGSGKPGSSIVMTQSPATLSVSPGERATLSCRASQSVSNDVAWYQQKPGQSPRLLINYASHRYTGVPDRFTGSGYGTEFTLTISSLQSEDFAVYFCQQDYSSPRTFGGGTKVEIK

SEQ ID NO: 10257 - protein, 122 aa, Artificial Sequence
  Description of Artificial Sequence: Synthetic polypeptide
  VH of XENP019092
EVQLVESGGGLVKPGGSLRLSCAASGFTFSNYWMNWVRQAPGKGLEWVGEIRLKSNNYATHYAEPVKGRFTISRDDSKSTVYLEMNSRKTEDTAVYYCTRYYGNYGGYFDVWGAGTLVTVSS

SEQ ID NO: 10258 - protein, 107 aa, Artificial Sequence; identical to SEQ ID NO: 6247
  Description of Artificial Sequence: Synthetic polypeptide
  VL of XENP019092

SEQ ID NO: 10259 - protein, 5 aa, Artificial Sequence
  Description of Artificial Sequence: Synthetic peptide
  XENP019092 vhCDR1
NYWMN

SEQ ID NO: 10260 - protein, 19 aa, Artificial Sequence
  Description of Artificial Sequence: Synthetic peptide
  XENP019092 vhCDR2
EIRLKSNNYATHYAEPVKG

SEQ ID NO: 10261 - protein, 11 aa, Artificial Sequence
  Description of Artificial Sequence: Synthetic peptide
  XENP019092 vhCDR3
YYGNYGGYFDV

SEQ ID NO: 10262 - protein, 11 aa, Artificial Sequence
  Description of Artificial Sequence: Synthetic peptide
  XENP019092 vlCDR1
RASQSVSNDVA

SEQ ID NO: 10263 - protein, 7 aa, Artificial Sequence
  Description of Artificial Sequence: Synthetic peptide
  XENP019092 vlCDR2
YASHRYT

SEQ ID NO: 10264 - protein, 9 aa, Artificial Sequence
  Description of Artificial Sequence: Synthetic peptide
  XENP019092 vlCDR3
QQDYSSPRT

SEQ ID NO: 10265 - protein, 249 aa, Artificial Sequence
  Description of Artificial Sequence: Synthetic polypeptide
  XENP019093 1G6_H1.268_L1_scFv(GKPGS)4
EVQLVESGGGLVKPGESLRLSCAASGFTFSNYWMNWVRQAPGKGLEWVGEIRLKSNNYATHYAEPVKGRFTISRDDSKSTVYLQMRSLKTEDTAVYYCTRYYGNYGGYFDVWGAGTLVTVSSGKPGSGKPGSGKPGSGKPGSSIVMTQSPATLSVSPGERATLSCRASQSVSNDVAWYQQKPGQSPRLLINYASHRYTGVPDRFTGSGYGTEFTLTISSLQSEDFAVYFCQQDYSSPRTFGGGTKVEIK

SEQ ID NO: 10266 - protein, 122 aa, Artificial Sequence
  Description of Artificial Sequence: Synthetic polypeptide
  VH of XENP019093
EVQLVESGGGLVKPGESLRLSCAASGFTFSNYWMNWVRQAPGKGLEWVGEIRLKSNNYATHYAEPVKGRFTISRDDSKSTVYLQMRSLKTEDTAVYYCTRYYGNYGGYFDVWGAGTLVTVSS

SEQ ID NO: 10267 - protein, 107 aa, Artificial Sequence; identical to SEQ ID NO: 6247
  Description of Artificial Sequence: Synthetic polypeptide
  VL of XENP019093

SEQ ID NO: 10268 - protein, 5 aa, Artificial Sequence
  Description of Artificial Sequence: Synthetic peptide
  XENP019093 vhCDR1
NYWMN

SEQ ID NO: 10269 - protein, 19 aa, Artificial Sequence
  Description of Artificial Sequence: Synthetic peptide
  XENP019093 vhCDR2
EIRLKSNNYATHYAEPVKG

SEQ ID NO: 10270 - protein, 11 aa, Artificial Sequence
  Description of Artificial Sequence: Synthetic peptide
  XENP019093 vhCDR3
YYGNYGGYFDV

SEQ ID NO: 10271 - protein, 11 aa, Artificial Sequence
  Description of Artificial Sequence: Synthetic peptide
  XENP019093 vlCDR1
RASQSVSNDVA

SEQ ID NO: 10272 - protein, 7 aa, Artificial Sequence
  Description of Artificial Sequence: Synthetic peptide
  XENP019093 vlCDR2
YASHRYT

SEQ ID NO: 10273 - protein, 9 aa, Artificial Sequence
  Description of Artificial Sequence: Synthetic peptide
  XENP019093 vlCDR3
QQDYSSPRT

SEQ ID NO: 10274 - protein, 249 aa, Artificial Sequence
  Description of Artificial Sequence: Synthetic polypeptide
  XENP019094 1G6_H1.269_L1_scFv(GKPGS)4
EVQLVESGGGLVKPGGSLRLSCAASGFTFSNFWMNWVRQAPGKGLEWVGEIRLYSNNYATHYAEPVKGRFTISRDDSKSTVYLQMNSLKTEDTAVYYCTRYYGNYGGYFDVWGAGTLVTVSSGKPGSGKPGSGKPGSGKPGSSIVMTQSPATLSVSPGERATLSCRASQSVSNDVAWYQQKPGQSPRLLINYASHRYTGVPDRFTGSGYGTEFTLTISSLQSEDFAVYFCQQDYSSPRTFGGGTKVEIK

SEQ ID NO: 10275 - protein, 122 aa, Artificial Sequence
  Description of Artificial Sequence: Synthetic polypeptide
  VH of XENP019094
EVQLVESGGGLVKPGGSLRLSCAASGFTFSNFWMNWVRQAPGKGLEWVGEIRLYSNNYATHYAEPVKGRFTISRDDSKSTVYLQMNSLKTEDTAVYYCTRYYGNYGGYFDVWGAGTLVTVSS

SEQ ID NO: 10276 - protein, 107 aa, Artificial Sequence; identical to SEQ ID NO: 6247
  Description of Artificial Sequence: Synthetic polypeptide
  VL of XENP019094

SEQ ID NO: 10277 - protein, 5 aa, Artificial Sequence
  Description of Artificial Sequence: Synthetic peptide
  XENP019094 vhCDR1
NFWMN

SEQ ID NO: 10278 - protein, 19 aa, Artificial Sequence
  Description of Artificial Sequence: Synthetic peptide
  XENP019094 vhCDR2
EIRLYSNNYATHYAEPVKG

SEQ ID NO: 10279 - protein, 11 aa, Artificial Sequence
  Description of Artificial Sequence: Synthetic peptide
  XENP019094 vhCDR3
YYGNYGGYFDV

SEQ ID NO: 10280 - protein, 11 aa, Artificial Sequence
  Description of Artificial Sequence: Synthetic peptide
  XENP019094 vlCDR1
RASQSVSNDVA

SEQ ID NO: 10281 - protein, 7 aa, Artificial Sequence
  Description of Artificial Sequence: Synthetic peptide
  XENP019094 vlCDR2
YASHRYT

SEQ ID NO: 10282 - protein, 9 aa, Artificial Sequence
  Description of Artificial Sequence: Synthetic peptide
  XENP019094 vlCDR3
QQDYSSPRT

SEQ ID NO: 10283 - protein, 249 aa, Artificial Sequence
  Description of Artificial Sequence: Synthetic polypeptide
  XENP019095 1G6_H1.270_L1_scFv(GKPGS)4
EVQLVESGGGLVKPGGSLRLSCAASGFTFSNYWMNWVRQAPGKGLEWVGEIRWYSNNYATHYAEPVKGRFTISRDDSKSTVYLQMNSLKTEDTAVYYCTRYYGNYGGYFDVWGAGTLVTVSSGKPGSGKPGSGKPGSGKPGSSIVMTQSPATLSVSPGERATLSCRASQSVSNDVAWYQQKPGQSPRLLINYASHRYTGVPDRFTGSGYGTEFTLTISSLQSEDFAVYFCQQDYSSPRTFGGGTKVEIK

SEQ ID NO: 10284 - protein, 122 aa, Artificial Sequence
  Description of Artificial Sequence: Synthetic polypeptide
  VH of XENP019095
EVQLVESGGGLVKPGGSLRLSCAASGFTFSNYWMNWVRQAPGKGLEWVGEIRWYSNNYATHYAEPVKGRFTISRDDSKSTVYLQMNSLKTEDTAVYYCTRYYGNYGGYFDVWGAGTLVTVSS

SEQ ID NO: 10285 - protein, 107 aa, Artificial Sequence; identical to SEQ ID NO: 6247
  Description of Artificial Sequence: Synthetic polypeptide
  VL of XENP019095

SEQ ID NO: 10286 - protein, 5 aa, Artificial Sequence
  Description of Artificial Sequence: Synthetic peptide
  XENP019095 vhCDR1
NYWMN

SEQ ID NO: 10287 - protein, 19 aa, Artificial Sequence
  Description of Artificial Sequence: Synthetic peptide
  XENP019095 vhCDR2
EIRWYSNNYATHYAEPVKG

SEQ ID NO: 10288 - protein, 11 aa, Artificial Sequence
  Description of Artificial Sequence: Synthetic peptide
  XENP019095 vhCDR3
YYGNYGGYFDV

SEQ ID NO: 10289 - protein, 11 aa, Artificial Sequence
  Description of Artificial Sequence: Synthetic peptide
  XENP019095 vlCDR1
RASQSVSNDVA

SEQ ID NO: 10290 - protein, 7 aa, Artificial Sequence
  Description of Artificial Sequence: Synthetic peptide
  XENP019095 vlCDR2
YASHRYT

SEQ ID NO: 10291 - protein, 9 aa, Artificial Sequence
  Description of Artificial Sequence: Synthetic peptide
  XENP019095 vlCDR3
QQDYSSPRT

SEQ ID NO: 10292 - protein, 249 aa, Artificial Sequence
  Description of Artificial Sequence: Synthetic polypeptide
  XENP019096 1G6_H1.271_L1_scFv(GKPGS)4
EVQLVESGGGLVKPGGSLRLSCAASGFTFSNYWMNWVRQAPGKGLEWVGEIRLYSNNYATHYAEPVKGRFTISRDDSKSTLYLQMNSLKTEDTAVYYCTRYYGNYGGYFDVWGAGTLVTVSSGKPGSGKPGSGKPGSGKPGSSIVMTQSPATLSVSPGERATLSCRASQSVSNDVAWYQQKPGQSPRLLINYASHRYTGVPDRFTGSGYGTEFTLTISSLQSEDFAVYFCQQDYSSPRTFGGGTKVEIK

SEQ ID NO: 10293 - protein, 122 aa, Artificial Sequence
  Description of Artificial Sequence: Synthetic polypeptide
  VH of XENP019096
EVQLVESGGGLVKPGGSLRLSCAASGFTFSNYWMNWVRQAPGKGLEWVGEIRLYSNNYATHYAEPVKGRFTISRDDSKSTLYLQMNSLKTEDTAVYYCTRYYGNYGGYFDVWGAGTLVTVSS

SEQ ID NO: 10294 - protein, 107 aa, Artificial Sequence; identical to SEQ ID NO: 6247
  Description of Artificial Sequence: Synthetic polypeptide
  VL of XENP019096

SEQ ID NO: 10295 - protein, 5 aa, Artificial Sequence
  Description of Artificial Sequence: Synthetic peptide
  XENP019096 vhCDR1
NYWMN

SEQ ID NO: 10296 - protein, 19 aa, Artificial Sequence
  Description of Artificial Sequence: Synthetic peptide
  XENP019096 vhCDR2
EIRLYSNNYATHYAEPVKG

SEQ ID NO: 10297 - protein, 11 aa, Artificial Sequence
  Description of Artificial Sequence: Synthetic peptide
  XENP019096 vhCDR3
YYGNYGGYFDV

SEQ ID NO: 10298 - protein, 11 aa, Artificial Sequence
  Description of Artificial Sequence: Synthetic peptide
  XENP019096 vlCDR1
RASQSVSNDVA

SEQ ID NO: 10299 - protein, 7 aa, Artificial Sequence
  Description of Artificial Sequence: Synthetic peptide
  XENP019096 vlCDR2
YASHRYT

SEQ ID NO: 10300 - protein, 9 aa, Artificial Sequence
  Description of Artificial Sequence: Synthetic peptide
  XENP019096 vlCDR3
QQDYSSPRT

SEQ ID NO: 10301 - protein, 249 aa, Artificial Sequence
  Description of Artificial Sequence: Synthetic polypeptide
  XENP019101 1G6_H1.272_L1_scFv(GKPGS)4
EVQLVESGGGLVKPGGSLRLSCAASGFTFSNFWMNWVRQAPGKGLEWVGEIRLYSNNYATHYAEPVKGRFTISRDDSKSTLYLQMNSLKTEDTAVYYCTRYYGNYGGYFDVWGAGTLVTVSSGKPGSGKPGSGKPGSGKPGSSIVMTQSPATLSVSPGERATLSCRASQSVSNDVAWYQQKPGQSPRLLINYASHRYTGVPDRFTGSGYGTEFTLTISSLQSEDFAVYFCQQDYSSPRTFGGGTKVEIK

SEQ ID NO: 10302 - protein, 122 aa, Artificial Sequence
  Description of Artificial Sequence: Synthetic polypeptide
  VH of XENP019101
EVQLVESGGGLVKPGGSLRLSCAASGFTFSNFWMNWVRQAPGKGLEWVGEIRLYSNNYATHYAEPVKGRFTISRDDSKSTLYLQMNSLKTEDTAVYYCTRYYGNYGGYFDVWGAGTLVTVSS

SEQ ID NO: 10303 - protein, 107 aa, Artificial Sequence; identical to SEQ ID NO: 6247
  Description of Artificial Sequence: Synthetic polypeptide
  VL of XENP019101

SEQ ID NO: 10304 - protein, 5 aa, Artificial Sequence
  Description of Artificial Sequence: Synthetic peptide
  XENP019101 vhCDR1
NFWMN

SEQ ID NO: 10305 - protein, 19 aa, Artificial Sequence
  Description of Artificial Sequence: Synthetic peptide
  XENP019101 vhCDR2
EIRLYSNNYATHYAEPVKG

SEQ ID NO: 10306 - protein, 11 aa, Artificial Sequence
  Description of Artificial Sequence: Synthetic peptide
  XENP019101 vhCDR3
YYGNYGGYFDV

SEQ ID NO: 10307 - protein, 11 aa, Artificial Sequence
  Description of Artificial Sequence: Synthetic peptide
  XENP019101 vlCDR1
RASQSVSNDVA

SEQ ID NO: 10308 - protein, 7 aa, Artificial Sequence
  Description of Artificial Sequence: Synthetic peptide
  XENP019101 vlCDR2
YASHRYT

SEQ ID NO: 10309 - protein, 9 aa, Artificial Sequence
  Description of Artificial Sequence: Synthetic peptide
  XENP019101 vlCDR3
QQDYSSPRT

SEQ ID NO: 10310 - protein, 249 aa, Artificial Sequence
  Description of Artificial Sequence: Synthetic polypeptide
  XENP019102 1G6_H1.273_L1_scFv(GKPGS)4
EVQLVESGGGLVKPGGSLRLSCAASGFTFSNFWMNWVRQAPGKGLEWVGEIRWKSNNYATHYAEPVKGRFTISRDDSKSTLYLQMNSLKTEDTAVYYCTRYYGNYGGYFDVWGAGTLVTVSSGKPGSGKPGSGKPGSGKPGSSIVMTQSPATLSVSPGERATLSCRASQSVSNDVAWYQQKPGQSPRLLINYASHRYTGVPDRFTGSGYGTEFTLTISSLQSEDFAVYFCQQDYSSPRTFGGGTKVEIK

SEQ ID NO: 10311 - protein, 122 aa, Artificial Sequence
  Description of Artificial Sequence: Synthetic polypeptide
  VH of XENP019102
EVQLVESGGGLVKPGGSLRLSCAASGFTFSNFWMNWVRQAPGKGLEWVGEIRWKSNNYATHYAEPVKGRFTISRDDSKSTLYLQMNSLKTEDTAVYYCTRYYGNYGGYFDVWGAGTLVTVSS

SEQ ID NO: 10312 - protein, 107 aa, Artificial Sequence; identical to SEQ ID NO: 6247
  Description of Artificial Sequence: Synthetic polypeptide
  VL of XENP019102

SEQ ID NO: 10313 - protein, 5 aa, Artificial Sequence
  Description of Artificial Sequence: Synthetic peptide
  XENP019102 vhCDR1
NFWMN

SEQ ID NO: 10314 - protein, 19 aa, Artificial Sequence
  Description of Artificial Sequence: Synthetic peptide
  XENP019102 vhCDR2
EIRWKSNNYATHYAEPVKG

SEQ ID NO: 10315 - protein, 11 aa, Artificial Sequence
  Description of Artificial Sequence: Synthetic peptide
  XENP019102 vhCDR3
YYGNYGGYFDV

SEQ ID NO: 10316 - protein, 11 aa, Artificial Sequence
  Description of Artificial Sequence: Synthetic peptide
  XENP019102 vlCDR1
RASQSVSNDVA

SEQ ID NO: 10317 - protein, 7 aa, Artificial Sequence
  Description of Artificial Sequence: Synthetic peptide
  XENP019102 vlCDR2
YASHRYT

SEQ ID NO: 10318 - protein, 9 aa, Artificial Sequence
  Description of Artificial Sequence: Synthetic peptide
  XENP019102 vlCDR3
QQDYSSPRT

SEQ ID NO: 10319 - protein, 249 aa, Artificial Sequence
  Description of Artificial Sequence: Synthetic polypeptide
  XENP019103 1G6_H1.274_L1_scFv(GKPGS)4
EVQLVESGGGLVKPGGSLRLSCAASGFTFSNFWMNWVRQAPGKGLEWVGEIRLKKNNYATHYAEPVKGRFTISRDDSKSTLYLQMNSLKTEDTAVYYCTRYYGNYGGYFDVWGAGTLVTVSSGKPGSGKPGSGKPGSGKPGSSIVMTQSPATLSVSPGERATLSCRASQSVSNDVAWYQQKPGQSPRLLINYASHRYTGVPDRFTGSGYGTEFTLTISSLQSEDFAVYFCQQDYSSPRTFGGGTKVEIK

SEQ ID NO: 10320 - protein, 122 aa, Artificial Sequence
  Description of Artificial Sequence: Synthetic polypeptide
  VH of XENP019103
EVQLVESGGGLVKPGGSLRLSCAASGFTFSNFWMNWVRQAPGKGLEWVGEIRLKKNNYATHYAEPVKGRFTISRDDSKSTLYLQMNSLKTEDTAVYYCTRYYGNYGGYFDVWGAGTLVTVSS

SEQ ID NO: 10321 - protein, 107 aa, Artificial Sequence; identical to SEQ ID NO: 6247
  Description of Artificial Sequence: Synthetic polypeptide
  VL of XENP019103

SEQ ID NO: 10322 - protein, 5 aa, Artificial Sequence
  Description of Artificial Sequence: Synthetic peptide
  XENP019103 vhCDR1
NFWMN

SEQ ID NO: 10323 - protein, 19 aa, Artificial Sequence
  Description of Artificial Sequence: Synthetic peptide
  XENP019103 vhCDR2
EIRLKKNNYATHYAEPVKG

SEQ ID NO: 10324 - protein, 11 aa, Artificial Sequence
  Description of Artificial Sequence: Synthetic peptide
  XENP019103 vhCDR3
YYGNYGGYFDV

SEQ ID NO: 10325 - protein, 11 aa, Artificial Sequence
  Description of Artificial Sequence: Synthetic peptide
  XENP019103 vlCDR1
RASQSVSNDVA

SEQ ID NO: 10326 - protein, 7 aa, Artificial Sequence
  Description of Artificial Sequence: Synthetic peptide
  XENP019103 vlCDR2
YASHRYT

SEQ ID NO: 10327 - protein, 9 aa, Artificial Sequence
  Description of Artificial Sequence: Synthetic peptide
  XENP019103 vlCDR3
QQDYSSPRT

SEQ ID NO: 10328 - protein, 249 aa, Artificial Sequence
  Description of Artificial Sequence: Synthetic polypeptide
  XENP019104 1G6_H1.275_L1_scFv(GKPGS)4
EVQLVESGGGLVKPGGSLRLSCAASGFTFSNFWMNWVRQAPGKGLEWVGEIRWYSNNYATHYAEPVKGRFTISRDDSKSTLYLQMNSLKTEDTAVYYCTRYYGNYGGYFDVWGAGTLVTVSSGKPGSGKPGSGKPGSGKPGSSIVMTQSPATLSVSPGERATLSCRASQSVSNDVAWYQQKPGQSPRLLINYASHRYTGVPDRFTGSGYGTEFTLTISSLQSEDFAVYFCQQDYSSPRTFGGGTKVEIK

SEQ ID NO: 10329 - protein, 122 aa, Artificial Sequence
  Description of Artificial Sequence: Synthetic polypeptide
  VH of XENP019104
EVQLVESGGGLVKPGGSLRLSCAASGFTFSNFWMNWVRQAPGKGLEWVGEIRWYSNNYATHYAEPVKGRFTISRDDSKSTLYLQMNSLKTEDTAVYYCTRYYGNYGGYFDVWGAGTLVTVSS

SEQ ID NO: 10330 - protein, 107 aa, Artificial Sequence; identical to SEQ ID NO: 6247
  Description of Artificial Sequence: Synthetic polypeptide
  VL of XENP019104

SEQ ID NO: 10331 - protein, 5 aa, Artificial Sequence
  Description of Artificial Sequence: Synthetic peptide
  XENP019104 vhCDR1
NFWMN

SEQ ID NO: 10332 - protein, 19 aa, Artificial Sequence
  Description of Artificial Sequence: Synthetic peptide
  XENP019104 vhCDR2
EIRWYSNNYATHYAEPVKG

SEQ ID NO: 10333 - protein, 11 aa, Artificial Sequence
  Description of Artificial Sequence: Synthetic peptide
  XENP019104 vhCDR3
YYGNYGGYFDV

SEQ ID NO: 10334 - protein, 11 aa, Artificial Sequence
  Description of Artificial Sequence: Synthetic peptide
  XENP019104 vlCDR1
RASQSVSNDVA

SEQ ID NO: 10335 - protein, 7 aa, Artificial Sequence
  Description of Artificial Sequence: Synthetic peptide
  XENP019104 vlCDR2
YASHRYT

SEQ ID NO: 10336 - protein, 9 aa, Artificial Sequence
  Description of Artificial Sequence: Synthetic peptide
  XENP019104 vlCDR3
QQDYSSPRT

SEQ ID NO: 10337 - protein, 249 aa, Artificial Sequence
  Description of Artificial Sequence: Synthetic polypeptide
  XENP019105 1G6_H1.276_L1_scFv(GKPGS)4
EVQLVESGGGLVQPGGSLKLSCAASGFTFSNYWMNWVRQAPGKGLEWVGEIRLKSNNYATHYAASVKGRFTISRDDSKSTLYLQMNSLKTEDTAVYYCTRYYGNYGGYFDVWGQGTLVTVSSGKPGSGKPGSGKPGSGKPGSSIVMTQSPATLSVSPGERATLSCRASQSVSNDVAWYQQKPGQSPRLLINYASHRYTGVPDRFTGSGYGTEFTLTISSLQSEDFAVYFCQQDYSSPRTFGGGTKVEIK

SEQ ID NO: 10338 - protein, 122 aa, Artificial Sequence
  Description of Artificial Sequence: Synthetic polypeptide
  VH of XENP019105
EVQLVESGGGLVQPGGSLKLSCAASGFTFSNYWMNWVRQAPGKGLEWVGEIRLKSNNYATHYAASVKGRFTISRDDSKSTLYLQMNSLKTEDTAVYYCTRYYGNYGGYFDVWGQGTLVTVSS

SEQ ID NO: 10339 - protein, 107 aa, Artificial Sequence; identical to SEQ ID NO: 6247
  Description of Artificial Sequence: Synthetic polypeptide
  VL of XENP019105

SEQ ID NO: 10340 - protein, 5 aa, Artificial Sequence
  Description of Artificial Sequence: Synthetic peptide
  XENP019105 vhCDR1
NYWMN

SEQ ID NO: 10341 - protein, 19 aa, Artificial Sequence
  Description of Artificial Sequence: Synthetic peptide
  XENP019105 vhCDR2
EIRLKSNNYATHYAASVKG

SEQ ID NO: 10342 - protein, 11 aa, Artificial Sequence
  Description of Artificial Sequence: Synthetic peptide
  XENP019105 vhCDR3
YYGNYGGYFDV

SEQ ID NO: 10343 - protein, 11 aa, Artificial Sequence
  Description of Artificial Sequence: Synthetic peptide
  XENP019105 vlCDR1
RASQSVSNDVA

SEQ ID NO: 10344 - protein, 7 aa, Artificial Sequence
  Description of Artificial Sequence: Synthetic peptide
  XENP019105 vlCDR2
YASHRYT

SEQ ID NO: 10345 - protein, 9 aa, Artificial Sequence
  Description of Artificial Sequence: Synthetic peptide
  XENP019105 vlCDR3
QQDYSSPRT

SEQ ID NO: 10346 - protein, 249 aa, Artificial Sequence
  Description of Artificial Sequence: Synthetic polypeptide
  XENP019106 1G6_H1.277_L1_scFv(GKPGS)4
EVQLVESGGGLVKPGGSLKLSCAASGFTFSNYWMNWVRQAPGKGLEWVGEIRLKSNNYATHYADSVKGRFTISRDDSKSTLYLQMNSLKTEDTAVYYCTRYYGNYGGYFDVWGQGTLVTVSSGKPGSGKPGSGKPGSGKPGSSIVMTQSPATLSVSPGERATLSCRASQSVSNDVAWYQQKPGQSPRLLINYASHRYTGVPDRFTGSGYGTEFTLTISSLQSEDFAVYFCQQDYSSPRTFGGGTKVEIK

SEQ ID NO: 10347 - protein, 122 aa, Artificial Sequence
  Description of Artificial Sequence: Synthetic polypeptide
  VH of XENP019106
EVQLVESGGGLVKPGGSLKLSCAASGFTFSNYWMNWVRQAPGKGLEWVGEIRLKSNNYATHYADSVKGRFTISRDDSKSTLYLQMNSLKTEDTAVYYCTRYYGNYGGYFDVWGQGTLVTVSS

SEQ ID NO: 10348 - protein, 107 aa, Artificial Sequence; identical to SEQ ID NO: 6247
  Description of Artificial Sequence: Synthetic polypeptide
  VL of XENP019106

SEQ ID NO: 10349 - protein, 5 aa, Artificial Sequence
  Description of Artificial Sequence: Synthetic peptide
  XENP019106 vhCDR1
NYWMN

SEQ ID NO: 10350 - protein, 19 aa, Artificial Sequence
  Description of Artificial Sequence: Synthetic peptide
  XENP019106 vhCDR2
EIRLKSNNYATHYADSVKG

SEQ ID NO: 10351 - protein, 11 aa, Artificial Sequence
  Description of Artificial Sequence: Synthetic peptide
  XENP019106 vhCDR3
YYGNYGGYFDV

SEQ ID NO: 10352 - protein, 11 aa, Artificial Sequence
  Description of Artificial Sequence: Synthetic peptide
  XENP019106 vlCDR1
RASQSVSNDVA

SEQ ID NO: 10353 - protein, 7 aa, Artificial Sequence
  Description of Artificial Sequence: Synthetic peptide
  XENP019106 vlCDR2
YASHRYT

SEQ ID NO: 10354 - protein, 9 aa, Artificial Sequence
  Description of Artificial Sequence: Synthetic peptide
  XENP019106 vlCDR3
QQDYSSPRT

SEQ ID NO: 10355 - protein, 249 aa, Artificial Sequence
  Description of Artificial Sequence: Synthetic polypeptide
  XENP019107 1G6_H1_L1.146_scFv(GKPGS)4
EVQLVESGGGLVKPGGSLRLSCAASGFTFSNYWMNWVRQAPGKGLEWVGEIRLKSNNYATHYAEPVKGRFTISRDDSKSTVYLQMNSLKTEDTAVYYCTRYYGNYGGYFDVWGAGTLVTVSSGKPGSGKPGSGKPGSGKPGSSIVMTQSPATLAVSPGERATLSCRASQSVSNDVAWYQQKPGQSPRLLINYASHRYTGVPDRFTGSGYGTEFTLTISSLQSEDFAVYFCQQDYSSPRTFGGGTKVEIK

SEQ ID NO: 10356 - protein, 122 aa, Artificial Sequence; identical to SEQ ID NO: 6246
  Description of Artificial Sequence: Synthetic polypeptide
  VH of XENP019107

SEQ ID NO: 10357 - protein, 107 aa, Artificial Sequence
  Description of Artificial Sequence: Synthetic polypeptide
  VL of XENP019107
SIVMTQSPATLAVSPGERATLSCRASQSVSNDVAWYQQKPGQSPRLLINYASHRYTGVPDRFTGSGYGTEFTLTISSLQSEDFAVYFCQQDYSSPRTFGGGTKVEIK

SEQ ID NO: 10358 - protein, 5 aa, Artificial Sequence
  Description of Artificial Sequence: Synthetic peptide
  XENP019107 vhCDR1
NYWMN

SEQ ID NO: 10359 - protein, 19 aa, Artificial Sequence
  Description of Artificial Sequence: Synthetic peptide
  XENP019107 vhCDR2
EIRLKSNNYATHYAEPVKG

SEQ ID NO: 10360 - protein, 11 aa, Artificial Sequence
  Description of Artificial Sequence: Synthetic peptide
  XENP019107 vhCDR3
YYGNYGGYFDV

SEQ ID NO: 10361 - protein, 11 aa, Artificial Sequence
  Description of Artificial Sequence: Synthetic peptide
  XENP019107 vlCDR1
RASQSVSNDVA

SEQ ID NO: 10362 - protein, 7 aa, Artificial Sequence
  Description of Artificial Sequence: Synthetic peptide
  XENP019107 vlCDR2
YASHRYT

SEQ ID NO: 10363 - protein, 9 aa, Artificial Sequence
  Description of Artificial Sequence: Synthetic peptide
  XENP019107 vlCDR3
QQDYSSPRT

SEQ ID NO: 10364 - protein, 249 aa, Artificial Sequence
  Description of Artificial Sequence: Synthetic polypeptide
  XENP019108 1G6_H1_L1.147_scFv(GKPGS)4
EVQLVESGGGLVKPGGSLRLSCAASGFTFSNYWMNWVRQAPGKGLEWVGEIRLKSNNYATHYAEPVKGRFTISRDDSKSTVYLQMNSLKTEDTAVYYCTRYYGNYGGYFDVWGAGTLVTVSSGKPGSGKPGSGKPGSGKPGSSIVMTQSPATLPVSPGERATLSCRASQSVSNDVAWYQQKPGQSPRLLINYASHRYTGVPDRFTGSGYGTEFTLTISSLQSEDFAVYFCQQDYSSPRTFGGGTKVEIK

SEQ ID NO: 10365 - protein, 122 aa, Artificial Sequence; identical to SEQ ID NO: 6246
  Description of Artificial Sequence: Synthetic polypeptide
  VH of XENP019108

SEQ ID NO: 10366 - protein, 107 aa, Artificial Sequence
  Description of Artificial Sequence: Synthetic polypeptide
  VL of XENP019108
SIVMTQSPATLPVSPGERATLSCRASQSVSNDVAWYQQKPGQSPRLLINYASHRYTGVPDRFTGSGYGTEFTLTISSLQSEDFAVYFCQQDYSSPRTFGGGTKVEIK

SEQ ID NO: 10367 - protein, 5 aa, Artificial Sequence
  Description of Artificial Sequence: Synthetic peptide
  XENP019108 vhCDR1
NYWMN

SEQ ID NO: 10368 - protein, 19 aa, Artificial Sequence
  Description of Artificial Sequence: Synthetic peptide
  XENP019108 vhCDR2
EIRLKSNNYATHYAEPVKG

SEQ ID NO: 10369 - protein, 11 aa, Artificial Sequence
  Description of Artificial Sequence: Synthetic peptide
  XENP019108 vhCDR3
YYGNYGGYFDV

SEQ ID NO: 10370 - protein, 11 aa, Artificial Sequence
  Description of Artificial Sequence: Synthetic peptide
  XENP019108 vlCDR1
RASQSVSNDVA

SEQ ID NO: 10371 - protein, 7 aa, Artificial Sequence
  Description of Artificial Sequence: Synthetic peptide
  XENP019108 vlCDR2
YASHRYT

SEQ ID NO: 10372 - protein, 9 aa, Artificial Sequence
  Description of Artificial Sequence: Synthetic peptide
  XENP019108 vlCDR3
QQDYSSPRT

SEQ ID NO: 10373 - protein, 249 aa, Artificial Sequence
  Description of Artificial Sequence: Synthetic polypeptide
  XENP019109 1G6_H1_L1.148_scFv(GKPGS)4
EVQLVESGGGLVKPGGSLRLSCAASGFTFSNYWMNWVRQAPGKGLEWVGEIRLKSNNYATHYAEPVKGRFTISRDDSKSTVYLQMNSLKTEDTAVYYCTRYYGNYGGYFDVWGAGTLVTVSSGKPGSGKPGSGKPGSGKPGSSIVMTQSPATLSASPGERATLSCRASQSVSNDVAWYQQKPGQSPRLLINYASHRYTGVPDRFTGSGYGTEFTLTISSLQSEDFAVYFCQQDYSSPRTFGGGTKVEIK

SEQ ID NO: 10374 - protein, 122 aa, Artificial Sequence; identical to SEQ ID NO: 6246
  Description of Artificial Sequence: Synthetic polypeptide
  VH of XENP019109

SEQ ID NO: 10375 - protein, 107 aa, Artificial Sequence
  Description of Artificial Sequence: Synthetic polypeptide
  VL of XENP019109
SIVMTQSPATLSASPGERATLSCRASQSVSNDVAWYQQKPGQSPRLLINYASHRYTGVPDRFTGSGYGTEFTLTISSLQSEDFAVYFCQQDYSSPRTFGGGTKVEIK

SEQ ID NO: 10376 - protein, 5 aa, Artificial Sequence
  Description of Artificial Sequence: Synthetic peptide
  XENP019109 vhCDR1
NYWMN

SEQ ID NO: 10377 - protein, 19 aa, Artificial Sequence
  Description of Artificial Sequence: Synthetic peptide
  XENP019109 vhCDR2
EIRLKSNNYATHYAEPVKG

SEQ ID NO: 10378 - protein, 11 aa, Artificial Sequence
  Description of Artificial Sequence: Synthetic peptide
  XENP019109 vhCDR3
YYGNYGGYFDV

SEQ ID NO: 10379 - protein, 11 aa, Artificial Sequence
  Description of Artificial Sequence: Synthetic peptide
  XENP019109 vlCDR1
RASQSVSNDVA

SEQ ID NO: 10380 - protein, 7 aa, Artificial Sequence
  Description of Artificial Sequence: Synthetic peptide
  XENP019109 vlCDR2
YASHRYT

SEQ ID NO: 10381 - protein, 9 aa, Artificial Sequence
  Description of Artificial Sequence: Synthetic peptide
  XENP019109 vlCDR3
QQDYSSPRT

SEQ ID NO: 10382 - protein, 249 aa, Artificial Sequence
  Description of Artificial Sequence: Synthetic polypeptide
  XENP019110 1G6_H1_L1.149_scFv(GKPGS)4
EVQLVESGGGLVKPGGSLRLSCAASGFTFSNYWMNWVRQAPGKGLEWVGEIRLKSNNYATHYAEPVKGRFTISRDDSKSTVYLQMNSLKTEDTAVYYCTRYYGNYGGYFDVWGAGTLVTVSSGKPGSGKPGSGKPGSGKPGSSIVMTQSPATLSVSPGERASLSCRASQSVSNDVAWYQQKPGQSPRLLINYASHRYTGVPDRFTGSGYGTEFTLTISSLQSEDFAVYFCQQDYSSPRTFGGGTKVEIK

SEQ ID NO: 10383 - protein, 122 aa, Artificial Sequence; identical to SEQ ID NO: 6246
  Description of Artificial Sequence: Synthetic polypeptide
  VH of XENP019110

SEQ ID NO: 10384 - protein, 107 aa, Artificial Sequence
  Description of Artificial Sequence: Synthetic polypeptide
  VL of XENP019110
SIVMTQSPATLSVSPGERASLSCRASQSVSNDVAWYQQKPGQSPRLLINYASHRYTGVPDRFTGSGYGTEFTLTISSLQSEDFAVYFCQQDYSSPRTFGGGTKVEIK

SEQ ID NO: 10385 - protein, 5 aa, Artificial Sequence
  Description of Artificial Sequence: Synthetic peptide
  XENP019110 vhCDR1
NYWMN

SEQ ID NO: 10386 - protein, 19 aa, Artificial Sequence
  Description of Artificial Sequence: Synthetic peptide
  XENP019110 vhCDR2
EIRLKSNNYATHYAEPVKG

SEQ ID NO: 10387 - protein, 11 aa, Artificial Sequence
  Description of Artificial Sequence: Synthetic peptide
  XENP019110 vhCDR3
YYGNYGGYFDV

SEQ ID NO: 10388 - protein, 11 aa, Artificial Sequence
  Description of Artificial Sequence: Synthetic peptide
  XENP019110 vlCDR1
RASQSVSNDVA

SEQ ID NO: 10389 - protein, 7 aa, Artificial Sequence
  Description of Artificial Sequence: Synthetic peptide
  XENP019110 vlCDR2
YASHRYT

SEQ ID NO: 10390 - protein, 9 aa, Artificial Sequence
  Description of Artificial Sequence: Synthetic peptide
  XENP019110 vlCDR3
QQDYSSPRT

SEQ ID NO: 10391 - protein, 249 aa, Artificial Sequence
  Description of Artificial Sequence: Synthetic polypeptide
  XENP019111 1G6_H1_L1.150_scFv(GKPGS)4
EVQLVESGGGLVKPGGSLRLSCAASGFTFSNYWMNWVRQAPGKGLEWVGEIRLKSNNYATHYAEPVKGRFTISRDDSKSTVYLQMNSLKTEDTAVYYCTRYYGNYGGYFDVWGAGTLVTVSSGKPGSGKPGSGKPGSGKPGSSIVMTQSPATLSVSPGERATLKCRASQSVSNDVAWYQQKPGQSPRLLINYASHRYTGVPDRFTGSGYGTEFTLTISSLQSEDFAVYFCQQDYSSPRTFGGGTKVEIK

SEQ ID NO: 10392 - protein, 122 aa, Artificial Sequence; identical to SEQ ID NO: 6246
  Description of Artificial Sequence: Synthetic polypeptide
  VH of XENP019111

SEQ ID NO: 10393 - protein, 107 aa, Artificial Sequence
  Description of Artificial Sequence: Synthetic polypeptide
  VL of XENP019111
SIVMTQSPATLSVSPGERATLKCRASQSVSNDVAWYQQKPGQSPRLLINYASHRYTGVPDRFTGSGYGTEFTLTISSLQSEDFAVYFCQQDYSSPRTFGGGTKVEIK

SEQ ID NO: 10394 - protein, 5 aa, Artificial Sequence
  Description of Artificial Sequence: Synthetic peptide
  XENP019111 vhCDR1
NYWMN

SEQ ID NO: 10395 - protein, 19 aa, Artificial Sequence
  Description of Artificial Sequence: Synthetic peptide
  XENP019111 vhCDR2
EIRLKSNNYATHYAEPVKG

SEQ ID NO: 10396 - protein, 11 aa, Artificial Sequence
  Description of Artificial Sequence: Synthetic peptide
  XENP019111 vhCDR3
YYGNYGGYFDV

SEQ ID NO: 10397 - protein, 11 aa, Artificial Sequence
  Description of Artificial Sequence: Synthetic peptide
  XENP019111 vlCDR1
RASQSVSNDVA

SEQ ID NO: 10398 - protein, 7 aa, Artificial Sequence
  Description of Artificial Sequence: Synthetic peptide
  XENP019111 vlCDR2
YASHRYT

SEQ ID NO: 10399 - protein, 9 aa, Artificial Sequence
  Description of Artificial Sequence: Synthetic peptide
  XENP019111 vlCDR3
QQDYSSPRT

SEQ ID NO: 10400 - protein, 249 aa, Artificial Sequence
  Description of Artificial Sequence: Synthetic polypeptide
  XENP019112 1G6_H1_L1.151_scFv(GKPGS)4
EVQLVESGGGLVKPGGSLRLSCAASGFTFSNYWMNWVRQAPGKGLEWVGEIRLKSNNYATHYAEPVKGRFTISRDDSKSTVYLQMNSLKTEDTAVYYCTRYYGNYGGYFDVWGAGTLVTVSSGKPGSGKPGSGKPGSGKPGSSIVMTQSPATLSVSPGERATLSCRASQSVSNDVAWYQQKPEQSPRLLINYASHRYTGVPDRFTGSGYGTEFTLTISSLQSEDFAVYFCQQDYSSPRTFGGGTKVEIK

SEQ ID NO: 10401 - protein, 122 aa, Artificial Sequence; identical to SEQ ID NO: 6246
  Description of Artificial Sequence: Synthetic polypeptide
  VH of XENP019112

SEQ ID NO: 10402 - protein, 107 aa, Artificial Sequence
  Description of Artificial Sequence: Synthetic polypeptide
  VL of XENP019112
SIVMTQSPATLSVSPGERATLSCRASQSVSNDVAWYQQKPEQSPRLLINYASHRYTGVPDRFTGSGYGTEFTLTISSLQSEDFAVYFCQQDYSSPRTFGGGTKVEIK

SEQ ID NO: 10403 - protein, 5 aa, Artificial Sequence
  Description of Artificial Sequence: Synthetic peptide
  XENP019112 vhCDR1
NYWMN

SEQ ID NO: 10404 - protein, 19 aa, Artificial Sequence
  Description of Artificial Sequence: Synthetic peptide
  XENP019112 vhCDR2
EIRLKSNNYATHYAEPVKG

SEQ ID NO: 10405 - protein, 11 aa, Artificial Sequence
  Description of Artificial Sequence: Synthetic peptide
  XENP019112 vhCDR3
YYGNYGGYFDV

SEQ ID NO: 10406 - protein, 11 aa, Artificial Sequence
  Description of Artificial Sequence: Synthetic peptide
  XENP019112 vlCDR1
RASQSVSNDVA

SEQ ID NO: 10407 - protein, 7 aa, Artificial Sequence
  Description of Artificial Sequence: Synthetic peptide
  XENP019112 vlCDR2
YASHRYT

SEQ ID NO: 10408 - protein, 9 aa, Artificial Sequence
  Description of Artificial Sequence: Synthetic peptide
  XENP019112 vlCDR3
QQDYSSPRT

SEQ ID NO: 10409 - protein, 249 aa, Artificial Sequence
  Description of Artificial Sequence: Synthetic polypeptide
  XENP019113 1G6_H1_L1.152_scFv(GKPGS)4
EVQLVESGGGLVKPGGSLRLSCAASGFTFSNYWMNWVRQAPGKGLEWVGEIRLKSNNYATHYAEPVKGRFTISRDDSKSTVYLQMNSLKTEDTAVYYCTRYYGNYGGYFDVWGAGTLVTVSSGKPGSGKPGSGKPGSGKPGSSIVMTQSPATLSVSPGERATLSCRASQSVSNDVAWYQQKPGESPRLLINYASHRYTGVPDRFTGSGYGTEFTLTISSLQSEDFAVYFCQQDYSSPRTFGGGTKVEIK

SEQ ID NO: 10410 - protein, 122 aa, Artificial Sequence; identical to SEQ ID NO: 6246
  Description of Artificial Sequence: Synthetic polypeptide
  VH of XENP019113

SEQ ID NO: 10411 - protein, 107 aa, Artificial Sequence
  Description of Artificial Sequence: Synthetic polypeptide
  VL of XENP019113
SIVMTQSPATLSVSPGERATLSCRASQSVSNDVAWYQQKPGESPRLLINYASHRYTGVPDRFTGSGYGTEFTLTISSLQSEDFAVYFCQQDYSSPRTFGGGTKVEIK

SEQ ID NO: 10412 - protein, 5 aa, Artificial Sequence
  Description of Artificial Sequence: Synthetic peptide
  XENP019113 vhCDR1
NYWMN

SEQ ID NO: 10413 - protein, 19 aa, Artificial Sequence
  Description of Artificial Sequence: Synthetic peptide
  XENP019113 vhCDR2
EIRLKSNNYATHYAEPVKG

SEQ ID NO: 10414 - protein, 11 aa, Artificial Sequence
  Description of Artificial Sequence: Synthetic peptide
  XENP019113 vhCDR3
YYGNYGGYFDV

SEQ ID NO: 10415 - protein, 11 aa, Artificial Sequence
  Description of Artificial Sequence: Synthetic peptide
  XENP019113 vlCDR1
RASQSVSNDVA

SEQ ID NO: 10416 - protein, 7 aa, Artificial Sequence
  Description of Artificial Sequence: Synthetic peptide
  XENP019113 vlCDR2
YASHRYT

SEQ ID NO: 10417 - protein, 9 aa, Artificial Sequence
  Description of Artificial Sequence: Synthetic peptide
  XENP019113 vlCDR3
QQDYSSPRT

SEQ ID NO: 10418 - protein, 249 aa, Artificial Sequence
  Description of Artificial Sequence: Synthetic polypeptide
  XENP019114 1G6_H1_L1.153_scFv(GKPGS)4
EVQLVESGGGLVKPGGSLRLSCAASGFTFSNYWMNWVRQAPGKGLEWVGEIRLKSNNYATHYAEPVKGRFTISRDDSKSTVYLQMNSLKTEDTAVYYCTRYYGNYGGYFDVWGAGTLVTVSSGKPGSGKPGSGKPGSGKPGSSIVMTQSPATLSVSPGERATLSCRASQSVSNDVAWYQQKPGQSPRVLINYASHRYTGVPDRFTGSGYGTEFTLTISSLQSEDFAVYFCQQDYSSPRTFGGGTKVEIK

SEQ ID NO: 10419 - protein, 122 aa, Artificial Sequence; identical to SEQ ID NO: 6246
  Description of Artificial Sequence: Synthetic polypeptide
  VH of XENP019114

SEQ ID NO: 10420 - protein, 107 aa, Artificial Sequence
  Description of Artificial Sequence: Synthetic polypeptide
  VL of XENP019114
SIVMTQSPATLSVSPGERATLSCRASQSVSNDVAWYQQKPGQSPRVLINYASHRYTGVPDRFTGSGYGTEFTLTISSLQSEDFAVYFCQQDYSSPRTFGGGTKVEIK

SEQ ID NO: 10421 - protein, 5 aa, Artificial Sequence
  Description of Artificial Sequence: Synthetic peptide
  XENP019114 vhCDR1
NYWMN

SEQ ID NO: 10422 - protein, 19 aa, Artificial Sequence
  Description of Artificial Sequence: Synthetic peptide
  XENP019114 vhCDR2
EIRLKSNNYATHYAEPVKG

SEQ ID NO: 10423 - protein, 11 aa, Artificial Sequence
  Description of Artificial Sequence: Synthetic peptide
  XENP019114 vhCDR3
YYGNYGGYFDV

SEQ ID NO: 10424 - protein, 11 aa, Artificial Sequence
  Description of Artificial Sequence: Synthetic peptide
  XENP019114 vlCDR1
RASQSVSNDVA

SEQ ID NO: 10425 - protein, 7 aa, Artificial Sequence
  Description of Artificial Sequence: Synthetic peptide
  XENP019114 vlCDR2
YASHRYT

SEQ ID NO: 10426 - protein, 9 aa, Artificial Sequence
  Description of Artificial Sequence: Synthetic peptide
  XENP019114 vlCDR3
QQDYSSPRT

SEQ ID NO: 10427 - protein, 249 aa, Artificial Sequence
  Description of Artificial Sequence: Synthetic polypeptide
  XENP019115 1G6_H1_L1.154_scFv(GKPGS)4
EVQLVESGGGLVKPGGSLRLSCAASGFTFSNYWMNWVRQAPGKGLEWVGEIRLKSNNYATHYAEPVKGRFTISRDDSKSTVYLQMNSLKTEDTAVYYCTRYYGNYGGYFDVWGAGTLVTVSSGKPGSGKPGSGKPGSGKPGSSIVMTQSPATLSVSPGERATLSCRASQSVSNDVAWYQQKPGQSPRLLVNYASHRYTGVPDRFTGSGYGTEFTLTISSLQSEDFAVYFCQQDYSSPRTFGGGTKVEIK

SEQ ID NO: 10428 - protein, 122 aa, Artificial Sequence; identical to SEQ ID NO: 6246
  Description of Artificial Sequence: Synthetic polypeptide
  VH of XENP019115

SEQ ID NO: 10429 - protein, 107 aa, Artificial Sequence
  Description of Artificial Sequence: Synthetic polypeptide
  VL of XENP019115
SIVMTQSPATLSVSPGERATLSCRASQSVSNDVAWYQQKPGQSPRLLVNYASHRYTGVPDRFTGSGYGTEFTLTISSLQSEDFAVYFCQQDYSSPRTFGGGTKVEIK

SEQ ID NO: 10430 - protein, 5 aa, Artificial Sequence
  Description of Artificial Sequence: Synthetic peptide
  XENP019115 vhCDR1
NYWMN

SEQ ID NO: 10431 - protein, 19 aa, Artificial Sequence
  Description of Artificial Sequence: Synthetic peptide
  XENP019115 vhCDR2
EIRLKSNNYATHYAEPVKG

SEQ ID NO: 10432 - protein, 11 aa, Artificial Sequence
  Description of Artificial Sequence: Synthetic peptide
  XENP019115 vhCDR3
YYGNYGGYFDV

SEQ ID NO: 10433 - protein, 11 aa, Artificial Sequence
  Description of Artificial Sequence: Synthetic peptide
  XENP019115 vlCDR1
RASQSVSNDVA

SEQ ID NO: 10434 - protein, 9 aa, Artificial Sequence
  Description of Artificial Sequence: Synthetic peptide
  XENP019115 vlCDR2
VNYASHRYT

SEQ ID NO: 10435 - protein, 9 aa, Artificial Sequence
  Description of Artificial Sequence: Synthetic peptide
  XENP019115 vlCDR3
QQDYSSPRT

SEQ ID NO: 10436 - protein, 249 aa, Artificial Sequence
  Description of Artificial Sequence: Synthetic polypeptide
  XENP019116 1G6_H1_L1.155_scFv(GKPGS)4
EVQLVESGGGLVKPGGSLRLSCAASGFTFSNYWMNWVRQAPGKGLEWVGEIRLKSNNYATHYAEPVKGRFTISRDDSKSTVYLQMNSLKTEDTAVYYCTRYYGNYGGYFDVWGAGTLVTVSSGKPGSGKPGSGKPGSGKPGSSIVMTQSPATLSVSPGERATLSCRASQSVSNDVAWYQQKPGQSPRLLINYANHRYTGVPDRFTGSGYGTEFTLTISSLQSEDFAVYFCQQDYSSPRTFGGGTKVEIK

SEQ ID NO: 10437 - protein, 122 aa, Artificial Sequence; identical to SEQ ID NO: 6246
  Description of Artificial Sequence: Synthetic polypeptide
  VH of XENP019116

SEQ ID NO: 10438 - protein, 107 aa, Artificial Sequence
  Description of Artificial Sequence: Synthetic polypeptide
  VL of XENP019116
SIVMTQSPATLSVSPGERATLSCRASQSVSNDVAWYQQKPGQSPRLLINYANHRYTGVPDRFTGSGYGTEFTLTISSLQSEDFAVYFCQQDYSSPRTFGGGTKVEIK

SEQ ID NO: 10439 - protein, 5 aa, Artificial Sequence
  Description of Artificial Sequence: Synthetic peptide
  XENP019116 vhCDR1
NYWMN

SEQ ID NO: 10440 - protein, 19 aa, Artificial Sequence
  Description of Artificial Sequence: Synthetic peptide
  XENP019116 vhCDR2
EIRLKSNNYATHYAEPVKG

SEQ ID NO: 10441 - protein, 11 aa, Artificial Sequence
  Description of Artificial Sequence: Synthetic peptide
  XENP019116 vhCDR3
YYGNYGGYFDV

SEQ ID NO: 10442 - protein, 11 aa, Artificial Sequence
  Description of Artificial Sequence: Synthetic peptide
  XENP019116 vlCDR1
RASQSVSNDVA

SEQ ID NO: 10443 - protein, 7 aa, Artificial Sequence
  Description of Artificial Sequence: Synthetic peptide
  XENP019116 vlCDR2
YANHRYT

SEQ ID NO: 10444 - protein, 9 aa, Artificial Sequence
  Description of Artificial Sequence: Synthetic peptide
  XENP019116 vlCDR3
QQDYSSPRT

SEQ ID NO: 10445 - protein, 249 aa, Artificial Sequence
  Description of Artificial Sequence: Synthetic polypeptide
  XENP019117 1G6_H1_L1.156_scFv(GKPGS)4
EVQLVESGGGLVKPGGSLRLSCAASGFTFSNYWMNWVRQAPGKGLEWVGEIRLKSNNYATHYAEPVKGRFTISRDDSKSTVYLQMNSLKTEDTAVYYCTRYYGNYGGYFDVWGAGTLVTVSSGKPGSGKPGSGKPGSGKPGSSIVMTQSPATLSVSPGERATLSCRASQSVSNDVAWYQQKPGQSPRLLINYASHRYTGVPDRFTGSGYGTEFTLTISSLESEDFAVYFCQQDYSSPRTFGGGTKVEIK

SEQ ID NO: 10446 - protein, 122 aa, Artificial Sequence; identical to SEQ ID NO: 6246
  Description of Artificial Sequence: Synthetic polypeptide
  VH of XENP019117

SEQ ID NO: 10447 - protein, 107 aa, Artificial Sequence
  Description of Artificial Sequence: Synthetic polypeptide
  VL of XENP019117
SIVMTQSPATLSVSPGERATLSCRASQSVSNDVAWYQQKPGQSPRLLINYASHRYTGVPDRFTGSGYGTEFTLTISSLESEDFAVYFCQQDYSSPRTFGGGTKVEIK

SEQ ID NO: 10448 - protein, 5 aa, Artificial Sequence
  Description of Artificial Sequence: Synthetic peptide
  XENP019117 vhCDR1
NYWMN

SEQ ID NO: 10449 - protein, 19 aa, Artificial Sequence
  Description of Artificial Sequence: Synthetic peptide
  XENP019117 vhCDR2
EIRLKSNNYATHYAEPVKG

SEQ ID NO: 10450 - protein, 11 aa, Artificial Sequence
  Description of Artificial Sequence: Synthetic peptide
  XENP019117 vhCDR3
YYGNYGGYFDV

SEQ ID NO: 10451 - protein, 11 aa, Artificial Sequence
  Description of Artificial Sequence: Synthetic peptide
  XENP019117 vlCDR1
RASQSVSNDVA

SEQ ID NO: 10452 - protein, 7 aa, Artificial Sequence
  Description of Artificial Sequence: Synthetic peptide
  XENP019117 vlCDR2
YASHRYT

SEQ ID NO: 10453 - protein, 9 aa, Artificial Sequence
  Description of Artificial Sequence: Synthetic peptide
  XENP019117 vlCDR3
QQDYSSPRT

SEQ ID NO: 10454 - protein, 249 aa, Artificial Sequence
  Description of Artificial Sequence: Synthetic polypeptide
  XENP019118 1G6_H1_L1.157_scFv(GKPGS)4
EVQLVESGGGLVKPGGSLRLSCAASGFTFSNYWMNWVRQAPGKGLEWVGEIRLKSNNYATHYAEPVKGRFTISRDDSKSTVYLQMNSLKTEDTAVYYCTRYYGNYGGYFDVWGAGTLVTVSSGKPGSGKPGSGKPGSGKPGSSIVMTQSPATLSVSPGERATLSCRASQSVSNDVAWYQQKPGQSPRLLINYASHRYTGVPDRFTGSGYGTEFTLTISSLKSEDFAVYFCQQDYSSPRTFGGGTKVEIK

SEQ ID NO: 10455 - protein, 122 aa, Artificial Sequence; identical to SEQ ID NO: 6246
  Description of Artificial Sequence: Synthetic polypeptide
  VH of XENP019118

SEQ ID NO: 10456 - protein, 107 aa, Artificial Sequence
  Description of Artificial Sequence: Synthetic polypeptide
  VL of XENP019118
SIVMTQSPATLSVSPGERATLSCRASQSVSNDVAWYQQKPGQSPRLLINYASHRYTGVPDRFTGSGYGTEFTLTISSLKSEDFAVYFCQQDYSSPRTFGGGTKVEIK

SEQ ID NO: 10457 - protein, 5 aa, Artificial Sequence
  Description of Artificial Sequence: Synthetic peptide
  XENP019118 vhCDR1
NYWMN

SEQ ID NO: 10458 - protein, 19 aa, Artificial Sequence
  Description of Artificial Sequence: Synthetic peptide
  XENP019118 vhCDR2
EIRLKSNNYATHYAEPVKG

SEQ ID NO: 10459 - protein, 11 aa, Artificial Sequence
  Description of Artificial Sequence: Synthetic peptide
  XENP019118 vhCDR3
YYGNYGGYFDV

SEQ ID NO: 10460 - protein, 11 aa, Artificial Sequence
  Description of Artificial Sequence: Synthetic peptide
  XENP019118 vlCDR1
RASQSVSNDVA

SEQ ID NO: 10461 - protein, 7 aa, Artificial Sequence
  Description of Artificial Sequence: Synthetic peptide
  XENP019118 vlCDR2
YASHRYT

SEQ ID NO: 10462 - protein, 9 aa, Artificial Sequence
  Description of Artificial Sequence: Synthetic peptide
  XENP019118 vlCDR3
QQDYSSPRT

SEQ ID NO: 10463 - protein, 249 aa, Artificial Sequence
  Description of Artificial Sequence: Synthetic polypeptide
  XENP019119 1G6_H1_L1.158_scFv(GKPGS)4
EVQLVESGGGLVKPGGSLRLSCAASGFTFSNYWMNWVRQAPGKGLEWVGEIRLKSNNYATHYAEPVKGRFTISRDDSKSTVYLQMNSLKTEDTAVYYCTRYYGNYGGYFDVWGAGTLVTVSSGKPGSGKPGSGKPGSGKPGSSIVMTQSPATLSVSPGERATLSCRASQSVSNDVAWYQQKPGQSPRLLINYASHRYTGVPDRFTGSGYGTEFTLTISSLQSEDFGVYFCQQDYSSPRTFGGGTKVEIK

SEQ ID NO: 10464 - protein, 122 aa, Artificial Sequence; identical to SEQ ID NO: 6246
  Description of Artificial Sequence: Synthetic polypeptide
  VH of XENP019119

SEQ ID NO: 10465 - protein, 107 aa, Artificial Sequence
  Description of Artificial Sequence: Synthetic polypeptide
  VL of XENP019119
SIVMTQSPATLSVSPGERATLSCRASQSVSNDVAWYQQKPGQSPRLLINYASHRYTGVPDRFTGSGYGTEFTLTISSLQSEDFGVYFCQQDYSSPRTFGGGTKVEIK

SEQ ID NO: 10466 - protein, 5 aa, Artificial Sequence
  Description of Artificial Sequence: Synthetic peptide
  XENP019119 vhCDR1
NYWMN

SEQ ID NO: 10467 - protein, 19 aa, Artificial Sequence
  Description of Artificial Sequence: Synthetic peptide
  XENP019119 vhCDR2
EIRLKSNNYATHYAEPVKG

SEQ ID NO: 10468 - protein, 11 aa, Artificial Sequence
  Description of Artificial Sequence: Synthetic peptide
  XENP019119 vhCDR3
YYGNYGGYFDV

SEQ ID NO: 10469 - protein, 11 aa, Artificial Sequence
  Description of Artificial Sequence: Synthetic peptide
  XENP019119 vlCDR1
RASQSVSNDVA

SEQ ID NO: 10470 - protein, 7 aa, Artificial Sequence
  Description of Artificial Sequence: Synthetic peptide
  XENP019119 vlCDR2
YASHRYT

SEQ ID NO: 10471 - protein, 9 aa, Artificial Sequence
  Description of Artificial Sequence: Synthetic peptide
  XENP019119 vlCDR3
QQDYSSPRT

SEQ ID NO: 10472 - protein, 249 aa, Artificial Sequence
  Description of Artificial Sequence: Synthetic polypeptide
  XENP019120 1G6_H1_L1.159_scFv(GKPGS)4
EVQLVESGGGLVKPGGSLRLSCAASGFTFSNYWMNWVRQAPGKGLEWVGEIRLKSNNYATHYAEPVKGRFTISRDDSKSTVYLQMNSLKTEDTAVYYCTRYYGNYGGYFDVWGAGTLVTVSSGKPGSGKPGSGKPGSGKPGSSIVMTQSPATLSVSPGERATLSCRASQSVSNDVAWYQQKPGQSPRLLINYASHRYTGVPDRFTGSGYGTEFTLTISSLQSEDFAVYFCKQDYSSPRTFGGGTKVEIK

SEQ ID NO: 10473 - protein, 122 aa, Artificial Sequence; identical to SEQ ID NO: 6246
  Description of Artificial Sequence: Synthetic polypeptide
  VH of XENP019120

SEQ ID NO: 10474 - protein, 107 aa, Artificial Sequence
  Description of Artificial Sequence: Synthetic polypeptide
  VL of XENP019120
SIVMTQSPATLSVSPGERATLSCRASQSVSNDVAWYQQKPGQSPRLLINYASHRYTGVPDRFTGSGYGTEFTLTISSLQSEDFAVYFCKQDYSSPRTFGGGTKVEIK

SEQ ID NO: 10475 - protein, 5 aa, Artificial Sequence
  Description of Artificial Sequence: Synthetic peptide
  XENP019120 vhCDR1
NYWMN

SEQ ID NO: 10476 - protein, 19 aa, Artificial Sequence
  Description of Artificial Sequence: Synthetic peptide
  XENP019120 vhCDR2
EIRLKSNNYATHYAEPVKG

SEQ ID NO: 10477 - protein, 11 aa, Artificial Sequence
  Description of Artificial Sequence: Synthetic peptide
  XENP019120 vhCDR3
YYGNYGGYFDV

SEQ ID NO: 10478 - protein, 11 aa, Artificial Sequence
  Description of Artificial Sequence: Synthetic peptide
  XENP019120 vlCDR1
RASQSVSNDVA

SEQ ID NO: 10479 - protein, 7 aa, Artificial Sequence
  Description of Artificial Sequence: Synthetic peptide
  XENP019120 vlCDR2
YASHRYT

SEQ ID NO: 10480 - protein, 9 aa, Artificial Sequence
  Description of Artificial Sequence: Synthetic peptide
  XENP019120 vlCDR3
KQDYSSPRT

SEQ ID NO: 10481 - protein, 249 aa, Artificial Sequence
  Description of Artificial Sequence: Synthetic polypeptide
  XENP019121 1G6_H1_L1.160_scFv(GKPGS)4
EVQLVESGGGLVKPGGSLRLSCAASGFTFSNYWMNWVRQAPGKGLEWVGEIRLKSNNYATHYAEPVKGRFTISRDDSKSTVYLQMNSLKTEDTAVYYCTRYYGNYGGYFDVWGAGTLVTVSSGKPGSGKPGSGKPGSGKPGSSIVMTQSPATLSVSPGERATLSCRASQSVSNDVAWYQQKPGQSPRLLINYASHRYTGVPDRFTGSGYGTEFTLTISSLQSEDFAVYFCQKDYSSPRTFGGGTKVEIK

SEQ ID NO: 10482 - protein, 122 aa, Artificial Sequence; identical to SEQ ID NO: 6246
  Description of Artificial Sequence: Synthetic polypeptide
  VH of XENP019121

SEQ ID NO: 10483 - protein, 107 aa, Artificial Sequence
  Description of Artificial Sequence: Synthetic polypeptide
  VL of XENP019121
SIVMTQSPATLSVSPGERATLSCRASQSVSNDVAWYQQKPGQSPRLLINYASHRYTGVPDRFTGSGYGTEFTLTISSLQSEDFAVYFCQKDYSSPRTFGGGTKVEIK

SEQ ID NO: 10484 - protein, 5 aa, Artificial Sequence
  Description of Artificial Sequence: Synthetic peptide
  XENP019121 vhCDR1
NYWMN

SEQ ID NO: 10485 - protein, 19 aa, Artificial Sequence
  Description of Artificial Sequence: Synthetic peptide
  XENP019121 vhCDR2
EIRLKSNNYATHYAEPVKG

SEQ ID NO: 10486 - protein, 11 aa, Artificial Sequence
  Description of Artificial Sequence: Synthetic peptide
  XENP019121 vhCDR3
YYGNYGGYFDV

SEQ ID NO: 10487 - protein, 11 aa, Artificial Sequence
  Description of Artificial Sequence: Synthetic peptide
  XENP019121 vlCDR1
RASQSVSNDVA

SEQ ID NO: 10488 - protein, 7 aa, Artificial Sequence
  Description of Artificial Sequence: Synthetic peptide
  XENP019121 vlCDR2
YASHRYT

SEQ ID NO: 10489 - protein, 9 aa, Artificial Sequence
  Description of Artificial Sequence: Synthetic peptide
  XENP019121 vlCDR3
QKDYSSPRT

SEQ ID NO: 10490 - protein, 249 aa, Artificial Sequence
  Description of Artificial Sequence: Synthetic polypeptide
  XENP019122 1G6_H1_L1.161_scFv(GKPGS)4
EVQLVESGGGLVKPGGSLRLSCAASGFTFSNYWMNWVRQAPGKGLEWVGEIRLKSNNYATHYAEPVKGRFTISRDDSKSTVYLQMNSLKTEDTAVYYCTRYYGNYGGYFDVWGAGTLVTVSSGKPGSGKPGSGKPGSGKPGSSIVMTQSPATLSVSPGERATLSCRASQSVSNDVAWYQQKPGQSPRLLINYASHRYTGVPDRFTGSGYGTEFTLTISSLQSEDFAVYFCQNDYSSPRTFGGGTKVEIK

SEQ ID NO: 10491 - protein, 122 aa, Artificial Sequence; identical to SEQ ID NO: 6246
  Description of Artificial Sequence: Synthetic polypeptide
  VH of XENP019122

SEQ ID NO: 10492 - protein, 107 aa, Artificial Sequence
  Description of Artificial Sequence: Synthetic polypeptide
  VL of XENP019122
SIVMTQSPATLSVSPGERATLSCRASQSVSNDVAWYQQKPGQSPRLLINYASHRYTGVPDRFTGSGYGTEFTLTISSLQSEDFAVYFCQNDYSSPRTFGGGTKVEIK

SEQ ID NO: 10493 - protein, 5 aa, Artificial Sequence
  Description of Artificial Sequence: Synthetic peptide
  XENP019122 vhCDR1
NYWMN

SEQ ID NO: 10494 - protein, 19 aa, Artificial Sequence
  Description of Artificial Sequence: Synthetic peptide
  XENP019122 vhCDR2
EIRLKSNNYATHYAEPVKG

SEQ ID NO: 10495 - protein, 11 aa, Artificial Sequence
  Description of Artificial Sequence: Synthetic peptide
  XENP019122 vhCDR3
YYGNYGGYFDV

SEQ ID NO: 10496 - protein, 11 aa, Artificial Sequence
  Description of Artificial Sequence: Synthetic peptide
  XENP019122 vlCDR1
RASQSVSNDVA

SEQ ID NO: 10497 - protein, 7 aa, Artificial Sequence
  Description of Artificial Sequence: Synthetic peptide
  XENP019122 vlCDR2
YASHRYT

SEQ ID NO: 10498 - protein, 9 aa, Artificial Sequence
  Description of Artificial Sequence: Synthetic peptide
  XENP019122 vlCDR3
QNDYSSPRT

SEQ ID NO: 10499 - protein, 249 aa, Artificial Sequence
  Description of Artificial Sequence: Synthetic polypeptide
  XENP019123 1G6_H1_L1.162_scFv(GKPGS)4
EVQLVESGGGLVKPGGSLRLSCAASGFTFSNYWMNWVRQAPGKGLEWVGEIRLKSNNYATHYAEPVKGRFTISRDDSKSTVYLQMNSLKTEDTAVYYCTRYYGNYGGYFDVWGAGTLVTVSSGKPGSGKPGSGKPGSGKPGSSIVMTQSPATLSVSPGERATLSCRASQSVSNDVAWYQQKPGQSPRLLINYASHRYTGVPDRFTGSGYGTEFTLTISSLQSEDFAVYFCQRDYSSPRTFGGGTKVEIK

SEQ ID NO: 10500 - protein, 122 aa, Artificial Sequence; identical to SEQ ID NO: 6246
  Description of Artificial Sequence: Synthetic polypeptide
  VH of XENP019123

SEQ ID NO: 10501 - protein, 107 aa, Artificial Sequence
  Description of Artificial Sequence: Synthetic polypeptide
  VL of XENP019123
SIVMTQSPATLSVSPGERATLSCRASQSVSNDVAWYQQKPGQSPRLLINYASHRYTGVPDRFTGSGYGTEFTLTISSLQSEDFAVYFCQRDYSSPRTFGGGTKVEIK

SEQ ID NO: 10502 - protein, 5 aa, Artificial Sequence
  Description of Artificial Sequence: Synthetic peptide
  XENP019123 vhCDR1
NYWMN

SEQ ID NO: 10503 - protein, 19 aa, Artificial Sequence
  Description of Artificial Sequence: Synthetic peptide
  XENP019123 vhCDR2
EIRLKSNNYATHYAEPVKG

SEQ ID NO: 10504 - protein, 11 aa, Artificial Sequence
  Description of Artificial Sequence: Synthetic peptide
  XENP019123 vhCDR3
YYGNYGGYFDV

SEQ ID NO: 10505 - protein, 11 aa, Artificial Sequence
  Description of Artificial Sequence: Synthetic peptide
  XENP019123 vlCDR1
RASQSVSNDVA

SEQ ID NO: 10506 - protein, 7 aa, Artificial Sequence
  Description of Artificial Sequence: Synthetic peptide
  XENP019123 vlCDR2
YASHRYT

SEQ ID NO: 10507 - protein, 9 aa, Artificial Sequence
  Description of Artificial Sequence: Synthetic peptide
  XENP019123 vlCDR3
QRDYSSPRT

SEQ ID NO: 10508 - protein, 249 aa, Artificial Sequence
  Description of Artificial Sequence: Synthetic polypeptide
  XENP019124 1G6_H1_L1.163_scFv(GKPGS)4
EVQLVESGGGLVKPGGSLRLSCAASGFTFSNYWMNWVRQAPGKGLEWVGEIRLKSNNYATHYAEPVKGRFTISRDDSKSTVYLQMNSLKTEDTAVYYCTRYYGNYGGYFDVWGAGTLVTVSSGKPGSGKPGSGKPGSGKPGSSIVMTQSPATLSVSPGEPATLSCRASQSVSNDVAWYQQKPGQSPRLLINYASHRYTGVPDRFTGSGYGTEFTLTISRLQSEDFAVYFCQQDYSSPRTFGGGTKVEIK

SEQ ID NO: 10509 - protein, 122 aa, Artificial Sequence; identical to SEQ ID NO: 6246
  Description of Artificial Sequence: Synthetic polypeptide
  VH of XENP019124

SEQ ID NO: 10510 - protein, 107 aa, Artificial Sequence
  Description of Artificial Sequence: Synthetic polypeptide
  VL of XENP019124
SIVMTQSPATLSVSPGEPATLSCRASQSVSNDVAWYQQKPGQSPRLLINYASHRYTGVPDRFTGSGYGTEFTLTISRLQSEDFAVYFCQQDYSSPRTFGGGTKVEIK

SEQ ID NO: 10511 - protein, 5 aa, Artificial Sequence
  Description of Artificial Sequence: Synthetic peptide
  XENP019124 vhCDR1
NYWMN

SEQ ID NO: 10512 - protein, 19 aa, Artificial Sequence
  Description of Artificial Sequence: Synthetic peptide
  XENP019124 vhCDR2
EIRLKSNNYATHYAEPVKG

SEQ ID NO: 10513 - protein, 11 aa, Artificial Sequence
  Description of Artificial Sequence: Synthetic peptide
  XENP019124 vhCDR3
YYGNYGGYFDV

SEQ ID NO: 10514 - protein, 11 aa, Artificial Sequence
  Description of Artificial Sequence: Synthetic peptide
  XENP019124 vlCDR1
RASQSVSNDVA

SEQ ID NO: 10515 - protein, 7 aa, Artificial Sequence
  Description of Artificial Sequence: Synthetic peptide
  XENP019124 vlCDR2
YASHRYT

SEQ ID NO: 10516 - protein, 9 aa, Artificial Sequence
  Description of Artificial Sequence: Synthetic peptide
  XENP019124 vlCDR3
QQDYSSPRT

SEQ ID NO: 10517 - protein, 249 aa, Artificial Sequence
  Description of Artificial Sequence: Synthetic polypeptide
  XENP019125 1G6_H1_L1.164_scFv(GKPGS)4
EVQLVESGGGLVKPGGSLRLSCAASGFTFSNYWMNWVRQAPGKGLEWVGEIRLKSNNYATHYAEPVKGRFTISRDDSKSTVYLQMNSLKTEDTAVYYCTRYYGNYGGYFDVWGAGTLVTVSSGKPGSGKPGSGKPGSGKPGSSIVMTQSPATLSVSPGERATLSCRASESVSNDVAWYQQKPGQSPRLLINYASHRYTGVPDRFTGSGYGTEFTLTISSLQSEDFAVYFCQKDYSSPRTFGGGTKVEIK

SEQ ID NO: 10518 - protein, 122 aa, Artificial Sequence; identical to SEQ ID NO: 6246
  Description of Artificial Sequence: Synthetic polypeptide
  VH of XENP019125

SEQ ID NO: 10519 - protein, 107 aa, Artificial Sequence
  Description of Artificial Sequence: Synthetic polypeptide
  VL of XENP019125
SIVMTQSPATLSVSPGERATLSCRASESVSNDVAWYQQKPGQSPRLLINYASHRYTGVPDRFTGSGYGTEFTLTISSLQSEDFAVYFCQKDYSSPRTFGGGTKVEIK

SEQ ID NO: 10520 - protein, 5 aa, Artificial Sequence
  Description of Artificial Sequence: Synthetic peptide
  XENP019125 vhCDR1
NYWMN

SEQ ID NO: 10521 - protein, 19 aa, Artificial Sequence
  Description of Artificial Sequence: Synthetic peptide
  XENP019125 vhCDR2
EIRLKSNNYATHYAEPVKG

SEQ ID NO: 10522 - protein, 11 aa, Artificial Sequence
  Description of Artificial Sequence: Synthetic peptide
  XENP019125 vhCDR3
YYGNYGGYFDV

SEQ ID NO: 10523 - protein, 11 aa, Artificial Sequence
  Description of Artificial Sequence: Synthetic peptide
  XENP019125 vlCDR1
RASESVSNDVA

SEQ ID NO: 10524 - protein, 7 aa, Artificial Sequence
  Description of Artificial Sequence: Synthetic peptide
  XENP019125 vlCDR2
YASHRYT

SEQ ID NO: 10525 - protein, 9 aa, Artificial Sequence
  Description of Artificial Sequence: Synthetic peptide
  XENP019125 vlCDR3
QKDYSSPRT

SEQ ID NO: 10526 - protein, 249 aa, Artificial Sequence
  Description of Artificial Sequence: Synthetic polypeptide
  XENP019126 1G6_H1_L1.165_scFv(GKPGS)4
EVQLVESGGGLVKPGGSLRLSCAASGFTFSNYWMNWVRQAPGKGLEWVGEIRLKSNNYATHYAEPVKGRFTISRDDSKSTVYLQMNSLKTEDTAVYYCTRYYGNYGGYFDVWGAGTLVTVSSGKPGSGKPGSGKPGSGKPGSSIVMTQSPATLSVSPGERATLSCRASESVSNDVAWYQQKPGQSPRLLINYASHRYTGVPDRFTGSGYGTEFTLTISSLQSEDFAVYFCQQDYKSPRTFGGGTKVEIK

SEQ ID NO: 10527 - protein, 122 aa, Artificial Sequence; identical to SEQ ID NO: 6246
  Description of Artificial Sequence: Synthetic polypeptide
  VH of XENP019126

SEQ ID NO: 10528 - protein, 107 aa, Artificial Sequence
  Description of Artificial Sequence: Synthetic polypeptide
  VL of XENP019126
SIVMTQSPATLSVSPGERATLSCRASESVSNDVAWYQQKPGQSPRLLINYASHRYTGVPDRFTGSGYGTEFTLTISSLQSEDFAVYFCQQDYKSPRTFGGGTKVEIK

SEQ ID NO: 10529 - protein, 5 aa, Artificial Sequence
  Description of Artificial Sequence: Synthetic peptide
  XENP019126 vhCDR1
NYWMN

SEQ ID NO: 10530 - protein, 19 aa, Artificial Sequence
  Description of Artificial Sequence: Synthetic peptide
  XENP019126 vhCDR2
EIRLKSNNYATHYAEPVKG

SEQ ID NO: 10531 - protein, 11 aa, Artificial Sequence
  Description of Artificial Sequence: Synthetic peptide
  XENP019126 vhCDR3
YYGNYGGYFDV

SEQ ID NO: 10532 - protein, 11 aa, Artificial Sequence
  Description of Artificial Sequence: Synthetic peptide
  XENP019126 vlCDR1
RASESVSNDVA

SEQ ID NO: 10533 - protein, 7 aa, Artificial Sequence
  Description of Artificial Sequence: Synthetic peptide
  XENP019126 vlCDR2
YASHRYT

SEQ ID NO: 10534 - protein, 9 aa, Artificial Sequence
  Description of Artificial Sequence: Synthetic peptide
  XENP019126 vlCDR3
QQDYKSPRT

SEQ ID NO: 10535 - protein, 249 aa, Artificial Sequence
  Description of Artificial Sequence: Synthetic polypeptide
  XENP019127 1G6_H1_L1.166_scFv(GKPGS)4
EVQLVESGGGLVKPGGSLRLSCAASGFTFSNYWMNWVRQAPGKGLEWVGEIRLKSNNYATHYAEPVKGRFTISRDDSKSTVYLQMNSLKTEDTAVYYCTRYYGNYGGYFDVWGAGTLVTVSSGKPGSGKPGSGKPGSGKPGSSIVMTQSPATLSVSPGERATLSCRASQSVSNDVAWYRQKPEQSPRLLINYASHRYTGVPDRFTGSGYGTEFTLTISSLQSEDFAVYFCQQDYSSPRTFGGGTKVEIK

SEQ ID NO: 10536 - protein, 122 aa, Artificial Sequence; identical to SEQ ID NO: 6246
  Description of Artificial Sequence: Synthetic polypeptide
  VH of XENP019127

SEQ ID NO: 10537 - protein, 107 aa, Artificial Sequence
  Description of Artificial Sequence: Synthetic polypeptide
  VL of XENP019127
SIVMTQSPATLSVSPGERATLSCRASQSVSNDVAWYRQKPEQSPRLLINYASHRYTGVPDRFTGSGYGTEFTLTISSLQSEDFAVYFCQQDYSSPRTFGGGTKVEIK

SEQ ID NO: 10538 - protein, 5 aa, Artificial Sequence
  Description of Artificial Sequence: Synthetic peptide
  XENP019127 vhCDR1
NYWMN

SEQ ID NO: 10539 - protein, 19 aa, Artificial Sequence
  Description of Artificial Sequence: Synthetic peptide
  XENP019127 vhCDR2
EIRLKSNNYATHYAEPVKG

SEQ ID NO: 10540 - protein, 11 aa, Artificial Sequence
  Description of Artificial Sequence: Synthetic peptide
  XENP019127 vhCDR3
YYGNYGGYFDV

SEQ ID NO: 10541 - protein, 11 aa, Artificial Sequence
  Description of Artificial Sequence: Synthetic peptide
  XENP019127 vlCDR1
RASQSVSNDVA

SEQ ID NO: 10542 - protein, 7 aa, Artificial Sequence
  Description of Artificial Sequence: Synthetic peptide
  XENP019127 vlCDR2
YASHRYT

SEQ ID NO: 10543 - protein, 9 aa, Artificial Sequence
  Description of Artificial Sequence: Synthetic peptide
  XENP019127 vlCDR3
QQDYSSPRT

SEQ ID NO: 10544 - protein, 249 aa, Artificial Sequence
  Description of Artificial Sequence: Synthetic polypeptide
  XENP019128 1G6_H1_L1.167_scFv(GKPGS)4
EVQLVESGGGLVKPGGSLRLSCAASGFTFSNYWMNWVRQAPGKGLEWVGEIRLKSNNYATHYAEPVKGRFTISRDDSKSTVYLQMNSLKTEDTAVYYCTRYYGNYGGYFDVWGAGTLVTVSSGKPGSGKPGSGKPGSGKPGSSIVMTQSPATLSVSPGERATLSCRASQSVSNDVAWYRQKPGESPRLLINYASHRYTGVPDRFTGSGYGTEFTLTISSLQSEDFAVYFCQQDYSSPRTFGGGTKVEIK

SEQ ID NO: 10545 - protein, 122 aa, Artificial Sequence; identical to SEQ ID NO: 6246
  Description of Artificial Sequence: Synthetic polypeptide
  VH of XENP019128

SEQ ID NO: 10546 - protein, 107 aa, Artificial Sequence
  Description of Artificial Sequence: Synthetic polypeptide
  VL of XENP019128
SIVMTQSPATLSVSPGERATLSCRASQSVSNDVAWYRQKPGESPRLLINYASHRYTGVPDRFTGSGYGTEFTLTISSLQSEDFAVYFCQQDYSSPRTFGGGTKVEIK

SEQ ID NO: 10547 - protein, 5 aa, Artificial Sequence
  Description of Artificial Sequence: Synthetic peptide
  XENP019128 vhCDR1
NYWMN

SEQ ID NO: 10548 - protein, 19 aa, Artificial Sequence
  Description of Artificial Sequence: Synthetic peptide
  XENP019128 vhCDR2
EIRLKSNNYATHYAEPVKG

SEQ ID NO: 10549 - protein, 11 aa, Artificial Sequence
  Description of Artificial Sequence: Synthetic peptide
  XENP019128 vhCDR3
YYGNYGGYFDV

SEQ ID NO: 10550 - protein, 11 aa, Artificial Sequence
  Description of Artificial Sequence: Synthetic peptide
  XENP019128 vlCDR1
RASQSVSNDVA

SEQ ID NO: 10551 - protein, 7 aa, Artificial Sequence
  Description of Artificial Sequence: Synthetic peptide
  XENP019128 vlCDR2
YASHRYT

SEQ ID NO: 10552 - protein, 9 aa, Artificial Sequence
  Description of Artificial Sequence: Synthetic peptide
  XENP019128 vlCDR3
QQDYSSPRT

SEQ ID NO: 10553 - protein, 249 aa, Artificial Sequence
  Description of Artificial Sequence: Synthetic polypeptide
  XENP019129 1G6_H1_L1.168_scFv(GKPGS)4
EVQLVESGGGLVKPGGSLRLSCAASGFTFSNYWMNWVRQAPGKGLEWVGEIRLKSNNYATHYAEPVKGRFTISRDDSKSTVYLQMNSLKTEDTAVYYCTRYYGNYGGYFDVWGAGTLVTVSSGKPGSGKPGSGKPGSGKPGSSIVMTQSPATLSVSPGERATLSCRASQSVSNDVAWYQQKPGQSPRLLINYASWRYTGVPDRFTGSGYGTEFTLTISSLQSEDFAVYFCQQDFSSPRTFGGGTKVEIK

SEQ ID NO: 10554 - protein, 122 aa, Artificial Sequence; identical to SEQ ID NO: 6246
  Description of Artificial Sequence: Synthetic polypeptide
  VH of XENP019129

SEQ ID NO: 10555 - protein, 107 aa, Artificial Sequence
  Description of Artificial Sequence: Synthetic polypeptide
  VL of XENP019129
SIVMTQSPATLSVSPGERATLSCRASQSVSNDVAWYQQKPGQSPRLLINYASWRYTGVPDRFTGSGYGTEFTLTISSLQSEDFAVYFCQQDFSSPRTFGGGTKVEIK

SEQ ID NO: 10556 - protein, 5 aa, Artificial Sequence
  Description of Artificial Sequence: Synthetic peptide
  XENP019129 vhCDR1
NYWMN

SEQ ID NO: 10557 - protein, 19 aa, Artificial Sequence
  Description of Artificial Sequence: Synthetic peptide
  XENP019129 vhCDR2
EIRLKSNNYATHYAEPVKG

SEQ ID NO: 10558 - protein, 11 aa, Artificial Sequence
  Description of Artificial Sequence: Synthetic peptide
  XENP019129 vhCDR3
YYGNYGGYFDV

SEQ ID NO: 10559 - protein, 11 aa, Artificial Sequence
  Description of Artificial Sequence: Synthetic peptide
  XENP019129 vlCDR1
RASQSVSNDVA

SEQ ID NO: 10560 - protein, 7 aa, Artificial Sequence
  Description of Artificial Sequence: Synthetic peptide
  XENP019129 vlCDR2
YASWRYT

SEQ ID NO: 10561 - protein, 9 aa, Artificial Sequence
  Description of Artificial Sequence: Synthetic peptide
  XENP019129 vlCDR3
QQDFSSPRT

SEQ ID NO: 10562 - protein, 249 aa, Artificial Sequence
  Description of Artificial Sequence: Synthetic polypeptide
  XENP019130 1G6_H1_L1.169_scFv(GKPGS)4
EVQLVESGGGLVKPGGSLRLSCAASGFTFSNYWMNWVRQAPGKGLEWVGEIRLKSNNYATHYAEPVKGRFTISRDDSKSTVYLQMNSLKTEDTAVYYCTRYYGNYGGYFDVWGAGTLVTVSSGKPGSGKPGSGKPGSGKPGSSIVMTQSPATLSVSPGERATLSCRASQSVSNDVAWYQQKPGQSPRLLINYASWRYTGVPDRFTGSGYGTEFTLTISSLQSEDFAVYFCQQDWSSPRTFGGGTKVEIK

SEQ ID NO: 10563 - protein, 122 aa, Artificial Sequence; identical to SEQ ID NO: 6246
  Description of Artificial Sequence: Synthetic polypeptide
  VH of XENP019130

SEQ ID NO: 10564 - protein, 107 aa, Artificial Sequence
  Description of Artificial Sequence: Synthetic polypeptide
  VL of XENP019130
SIVMTQSPATLSVSPGERATLSCRASQSVSNDVAWYQQKPGQSPRLLINYASWRYTGVPDRFTGSGYGTEFTLTISSLQSEDFAVYFCQQDWSSPRTFGGGTKVEIK

SEQ ID NO: 10565 - protein, 5 aa, Artificial Sequence
  Description of Artificial Sequence: Synthetic peptide
  XENP019130 vhCDR1
NYWMN

SEQ ID NO: 10566 - protein, 19 aa, Artificial Sequence
  Description of Artificial Sequence: Synthetic peptide
  XENP019130 vhCDR2
EIRLKSNNYATHYAEPVKG

SEQ ID NO: 10567 - protein, 11 aa, Artificial Sequence
  Description of Artificial Sequence: Synthetic peptide
  XENP019130 vhCDR3
YYGNYGGYFDV

SEQ ID NO: 10568 - protein, 11 aa, Artificial Sequence
  Description of Artificial Sequence: Synthetic peptide
  XENP019130 vlCDR1
RASQSVSNDVA

SEQ ID NO: 10569 - protein, 7 aa, Artificial Sequence
  Description of Artificial Sequence: Synthetic peptide
  XENP019130 vlCDR2
YASWRYT

SEQ ID NO: 10570 - protein, 9 aa, Artificial Sequence
  Description of Artificial Sequence: Synthetic peptide
  XENP019130 vlCDR3
QQDWSSPRT

SEQ ID NO: 10571 - protein, 249 aa, Artificial Sequence
  Description of Artificial Sequence: Synthetic polypeptide
  XENP019131 1G6_H1_L1.170_scFv(GKPGS)4
EVQLVESGGGLVKPGGSLRLSCAASGFTFSNYWMNWVRQAPGKGLEWVGEIRLKSNNYATHYAEPVKGRFTISRDDSKSTVYLQMNSLKTEDTAVYYCTRYYGNYGGYFDVWGAGTLVTVSSGKPGSGKPGSGKPGSGKPGSSIVMTQSPATLSVSPGERATLSCRASQSVSNDVAWYQQKPGQSPRLLINYASWRYTGVPDRFTGSGYGTEFTLTISSLQSEDFAVYFCQQDGSSPRTFGGGTKVEIK

SEQ ID NO: 10572 - protein, 122 aa, Artificial Sequence; identical to SEQ ID NO: 6246
  Description of Artificial Sequence: Synthetic polypeptide
  VH of XENP019131

SEQ ID NO: 10573 - protein, 107 aa, Artificial Sequence
  Description of Artificial Sequence: Synthetic polypeptide
  VL of XENP019131
SIVMTQSPATLSVSPGERATLSCRASQSVSNDVAWYQQKPGQSPRLLINYASWRYTGVPDRFTGSGYGTEFTLTISSLQSEDFAVYFCQQDGSSPRTFGGGTKVEIK

SEQ ID NO: 10574 - protein, 5 aa, Artificial Sequence
  Description of Artificial Sequence: Synthetic peptide
  XENP019131 vhCDR1
NYWMN

SEQ ID NO: 10575 - protein, 19 aa, Artificial Sequence
  Description of Artificial Sequence: Synthetic peptide
  XENP019131 vhCDR2
EIRLKSNNYATHYAEPVKG

SEQ ID NO: 10576 - protein, 11 aa, Artificial Sequence
  Description of Artificial Sequence: Synthetic peptide
  XENP019131 vhCDR3
YYGNYGGYFDV

SEQ ID NO: 10577 - protein, 11 aa, Artificial Sequence
  Description of Artificial Sequence: Synthetic peptide
  XENP019131 vlCDR1
RASQSVSNDVA

SEQ ID NO: 10578 - protein, 7 aa, Artificial Sequence
  Description of Artificial Sequence: Synthetic peptide
  XENP019131 vlCDR2
YASWRYT

SEQ ID NO: 10579 - protein, 9 aa, Artificial Sequence
  Description of Artificial Sequence: Synthetic peptide
  XENP019131 vlCDR3
QQDGSSPRT

SEQ ID NO: 10580 - protein, 249 aa, Artificial Sequence
  Description of Artificial Sequence: Synthetic polypeptide
  XENP019132 1G6_H1_L1.171_scFv(GKPGS)4
EVQLVESGGGLVKPGGSLRLSCAASGFTFSNYWMNWVRQAPGKGLEWVGEIRLKSNNYATHYAEPVKGRFTISRDDSKSTVYLQMNSLKTEDTAVYYCTRYYGNYGGYFDVWGAGTLVTVSSGKPGSGKPGSGKPGSGKPGSSIVMTQSPATLSVSPGERATLSCRASQSVSNDVAWYQQKPGQSPRLLINYASHRYTSVPDRFTGSGYGTEFTLTISSLQSEDFAVYFCQQDWSSPRTFGGGTKVEIK

SEQ ID NO: 10581 - protein, 122 aa, Artificial Sequence; identical to SEQ ID NO: 6246
  Description of Artificial Sequence: Synthetic polypeptide
  VH of XENP019132

SEQ ID NO: 10582 - protein, 107 aa, Artificial Sequence
  Description of Artificial Sequence: Synthetic polypeptide
  VL of XENP019132
SIVMTQSPATLSVSPGERATLSCRASQSVSNDVAWYQQKPGQSPRLLINYASHRYTSVPDRFTGSGYGTEFTLTISSLQSEDFAVYFCQQDWSSPRTFGGGTKVEIK

SEQ ID NO: 10583 - protein, 5 aa, Artificial Sequence
  Description of Artificial Sequence: Synthetic peptide
  XENP019132 vhCDR1
NYWMN

SEQ ID NO: 10584 - protein, 19 aa, Artificial Sequence
  Description of Artificial Sequence: Synthetic peptide
  XENP019132 vhCDR2
EIRLKSNNYATHYAEPVKG

SEQ ID NO: 10585 - protein, 11 aa, Artificial Sequence
  Description of Artificial Sequence: Synthetic peptide
  XENP019132 vhCDR3
YYGNYGGYFDV

SEQ ID NO: 10586 - protein, 11 aa, Artificial Sequence
  Description of Artificial Sequence: Synthetic peptide
  XENP019132 vlCDR1
RASQSVSNDVA

SEQ ID NO: 10587 - protein, 7 aa, Artificial Sequence
  Description of Artificial Sequence: Synthetic peptide
  XENP019132 vlCDR2
YASHRYT

SEQ ID NO: 10588 - protein, 9 aa, Artificial Sequence
  Description of Artificial Sequence: Synthetic peptide
  XENP019132 vlCDR3
QQDWSSPRT

SEQ ID NO: 10589 - protein, 249 aa, Artificial Sequence
  Description of Artificial Sequence: Synthetic polypeptide
  XENP019133 1G6_H1_L1.172_scFv(GKPGS)4
EVQLVESGGGLVKPGGSLRLSCAASGFTFSNYWMNWVRQAPGKGLEWVGEIRLKSNNYATHYAEPVKGRFTISRDDSKSTVYLQMNSLKTEDTAVYYCTRYYGNYGGYFDVWGAGTLVTVSSGKPGSGKPGSGKPGSGKPGSSIVMTQSPATLSVSPGERATLSCRASQSVSNDVAWYQQKPGQSPRLLINYASHRYTSVPDRFTGSGYGTEFTLTISSLQSEDFAVYFCQQDFSSPRTFGGGTKVEIK

SEQ ID NO: 10590 - protein, 122 aa, Artificial Sequence; identical to SEQ ID NO: 6246
  Description of Artificial Sequence: Synthetic polypeptide
  VH of XENP019133

SEQ ID NO: 10591 - protein, 107 aa, Artificial Sequence
  Description of Artificial Sequence: Synthetic polypeptide
  VL of XENP019133
SIVMTQSPATLSVSPGERATLSCRASQSVSNDVAWYQQKPGQSPRLLINYASHRYTSVPDRFTGSGYGTEFTLTISSLQSEDFAVYFCQQDFSSPRTFGGGTKVEIK

SEQ ID NO: 10592 - protein, 5 aa, Artificial Sequence
  Description of Artificial Sequence: Synthetic peptide
  XENP019133 vhCDR1
NYWMN

SEQ ID NO: 10593 - protein, 19 aa, Artificial Sequence
  Description of Artificial Sequence: Synthetic peptide
  XENP019133 vhCDR2
EIRLKSNNYATHYAEPVKG

SEQ ID NO: 10594 - protein, 11 aa, Artificial Sequence
  Description of Artificial Sequence: Synthetic peptide
  XENP019133 vhCDR3
YYGNYGGYFDV

SEQ ID NO: 10595 - protein, 11 aa, Artificial Sequence
  Description of Artificial Sequence: Synthetic peptide
  XENP019133 vlCDR1
RASQSVSNDVA

SEQ ID NO: 10596 - protein, 7 aa, Artificial Sequence
  Description of Artificial Sequence: Synthetic peptide
  XENP019133 vlCDR2
YASHRYT

SEQ ID NO: 10597 - protein, 9 aa, Artificial Sequence
  Description of Artificial Sequence: Synthetic peptide
  XENP019133 vlCDR3
QQDFSSPRT

SEQ ID NO: 10598 - protein, 249 aa, Artificial Sequence
  Description of Artificial Sequence: Synthetic polypeptide
  XENP019134 1G6_H1_L1.173_scFv(GKPGS)4
EVQLVESGGGLVKPGGSLRLSCAASGFTFSNYWMNWVRQAPGKGLEWVGEIRLKSNNYATHYAEPVKGRFTISRDDSKSTVYLQMNSLKTEDTAVYYCTRYYGNYGGYFDVWGAGTLVTVSSGKPGSGKPGSGKPGSGKPGSSIVMTQSPATLSVSPGERATLSCRASQSVSNDVAWYQQKPGQSPRLLINYASHRYTGVPDRFTGSGYGTEFTLTISSLQSEDFAVYFCQQDFGSPRTFGGGTKVEIK

SEQ ID NO: 10599 - protein, 122 aa, Artificial Sequence; identical to SEQ ID NO: 6246
  Description of Artificial Sequence: Synthetic polypeptide
  VH of XENP019134

SEQ ID NO: 10600 - protein, 107 aa, Artificial Sequence
  Description of Artificial Sequence: Synthetic polypeptide
  VL of XENP019134
SIVMTQSPATLSVSPGERATLSCRASQSVSNDVAWYQQKPGQSPRLLINYASHRYTGVPDRFTGSGYGTEFTLTISSLQSEDFAVYFCQQDFGSPRTFGGGTKVEIK

SEQ ID NO: 10601 - protein, 5 aa, Artificial Sequence
  Description of Artificial Sequence: Synthetic peptide
  XENP019134 vhCDR1
NYWMN

SEQ ID NO: 10602 - protein, 19 aa, Artificial Sequence
  Description of Artificial Sequence: Synthetic peptide
  XENP019134 vhCDR2
EIRLKSNNYATHYAEPVKG

SEQ ID NO: 10603 - protein, 11 aa, Artificial Sequence
  Description of Artificial Sequence: Synthetic peptide
  XENP019134 vhCDR3
YYGNYGGYFDV

SEQ ID NO: 10604 - protein, 11 aa, Artificial Sequence
  Description of Artificial Sequence: Synthetic peptide
  XENP019134 vlCDR1
RASQSVSNDVA

SEQ ID NO: 10605 - protein, 7 aa, Artificial Sequence
  Description of Artificial Sequence: Synthetic peptide
  XENP019134 vlCDR2
YASHRYT

SEQ ID NO: 10606 - protein, 9 aa, Artificial Sequence
  Description of Artificial Sequence: Synthetic peptide
  XENP019134 vlCDR3
QQDFGSPRT

SEQ ID NO: 10607 - protein, 249 aa, Artificial Sequence
  Description of Artificial Sequence: Synthetic polypeptide
  XENP019135 1G6_H1_L1.174_scFv(GKPGS)4
EVQLVESGGGLVKPGGSLRLSCAASGFTFSNYWMNWVRQAPGKGLEWVGEIRLKSNNYATHYAEPVKGRFTISRDDSKSTVYLQMNSLKTEDTAVYYCTRYYGNYGGYFDVWGAGTLVTVSSGKPGSGKPGSGKPGSGKPGSSIVMTQSPATLSVSPGERATLSCRASQSVSNDVAWYQQKPGQSPRLLINYASHRYTGVPDRFTGSGYGTEFTLTISSLQSEDFAVYFCQQDWGSPRTFGGGTKVEIK

SEQ ID NO: 10608 - protein, 122 aa, Artificial Sequence; identical to SEQ ID NO: 6246
  Description of Artificial Sequence: Synthetic polypeptide
  VH of XENP019135

SEQ ID NO: 10609 - protein, 107 aa, Artificial Sequence
  Description of Artificial Sequence: Synthetic polypeptide
  VL of XENP019135
SIVMTQSPATLSVSPGERATLSCRASQSVSNDVAWYQQKPGQSPRLLINYASHRYTGVPDRFTGSGYGTEFTLTISSLQSEDFAVYFCQQDWGSPRTFGGGTKVEIK

SEQ ID NO: 10610 - protein, 5 aa, Artificial Sequence
  Description of Artificial Sequence: Synthetic peptide
  XENP019135 vhCDR1
NYWMN

SEQ ID NO: 10611 - protein, 19 aa, Artificial Sequence
  Description of Artificial Sequence: Synthetic peptide
  XENP019135 vhCDR2
EIRLKSNNYATHYAEPVKG

SEQ ID NO: 10612 - protein, 11 aa, Artificial Sequence
  Description of Artificial Sequence: Synthetic peptide
  XENP019135 vhCDR3
YYGNYGGYFDV

SEQ ID NO: 10613 - protein, 11 aa, Artificial Sequence
  Description of Artificial Sequence: Synthetic peptide
  XENP019135 vlCDR1
RASQSVSNDVA

SEQ ID NO: 10614 - protein, 7 aa, Artificial Sequence
  Description of Artificial Sequence: Synthetic peptide
  XENP019135 vlCDR2
YASHRYT

SEQ ID NO: 10615 - protein, 9 aa, Artificial Sequence
  Description of Artificial Sequence: Synthetic peptide
  XENP019135 vlCDR3
QQDWGSPRT

SEQ ID NO: 10616 - protein, 249 aa, Artificial Sequence
  Description of Artificial Sequence: Synthetic polypeptide
  XENP019136 1G6_H1_L1.175_scFv(GKPGS)4
EVQLVESGGGLVKPGGSLRLSCAASGFTFSNYWMNWVRQAPGKGLEWVGEIRLKSNNYATHYAEPVKGRFTISRDDSKSTVYLQMNSLKTEDTAVYYCTRYYGNYGGYFDVWGAGTLVTVSSGKPGSGKPGSGKPGSGKPGSSIVMTQSPATLSVSPGERATLSCRASQSVGNDVAWYQQKPGQSPRLLINYASHRYTSVPDRFTGSGYGTEFTLTISSLQSEDFAVYFCQQDWSSPRTFGGGTKVEIK

SEQ ID NO: 10617 - protein, 122 aa, Artificial Sequence; identical to SEQ ID NO: 6246
  Description of Artificial Sequence: Synthetic polypeptide
  VH of XENP019136

SEQ ID NO: 10618 - protein, 107 aa, Artificial Sequence
  Description of Artificial Sequence: Synthetic polypeptide
  VL of XENP019136
SIVMTQSPATLSVSPGERATLSCRASQSVGNDVAWYQQKPGQSPRLLINYASHRYTSVPDRFTGSGYGTEFTLTISSLQSEDFAVYFCQQDWSSPRTFGGGTKVEIK

SEQ ID NO: 10619 - protein, 5 aa, Artificial Sequence
  Description of Artificial Sequence: Synthetic peptide
  XENP019136 vhCDR1
NYWMN

SEQ ID NO: 10620 - protein, 19 aa, Artificial Sequence
  Description of Artificial Sequence: Synthetic peptide
  XENP019136 vhCDR2
EIRLKSNNYATHYAEPVKG

SEQ ID NO: 10621 - protein, 11 aa, Artificial Sequence
  Description of Artificial Sequence: Synthetic peptide
  XENP019136 vhCDR3
YYGNYGGYFDV

SEQ ID NO: 10622 - protein, 11 aa, Artificial Sequence
  Description of Artificial Sequence: Synthetic peptide
  XENP019136 vlCDR1
RASQSVGNDVA

SEQ ID NO: 10623 - protein, 7 aa, Artificial Sequence
  Description of Artificial Sequence: Synthetic peptide
  XENP019136 vlCDR2
YASHRYT

SEQ ID NO: 10624 - protein, 9 aa, Artificial Sequence
  Description of Artificial Sequence: Synthetic peptide
  XENP019136 vlCDR3
QQDWSSPRT

SEQ ID NO: 10625 - protein, 249 aa, Artificial Sequence
  Description of Artificial Sequence: Synthetic polypeptide
  XENP019137 1G6_H1_L1.176_scFv(GKPGS)4
EVQLVESGGGLVKPGGSLRLSCAASGFTFSNYWMNWVRQAPGKGLEWVGEIRLKSNNYATHYAEPVKGRFTISRDDSKSTVYLQMNSLKTEDTAVYYCTRYYGNYGGYFDVWGAGTLVTVSSGKPGSGKPGSGKPGSGKPGSSIVMTQSPATLSVSPGERATLSCRASQSVGNDVAWYQQKPGQSPRLLINYASWRYTSVPDRFTGSGYGTEFTLTISSLQSEDFAVYFCQQDYSSPRTFGGGTKVEIK

SEQ ID NO: 10626 - protein, 122 aa, Artificial Sequence; identical to SEQ ID NO: 6246
  Description of Artificial Sequence: Synthetic polypeptide
  VH of XENP019137

SEQ ID NO: 10627 - protein, 107 aa, Artificial Sequence
  Description of Artificial Sequence: Synthetic polypeptide
  VL of XENP019137
SIVMTQSPATLSVSPGERATLSCRASQSVGNDVAWYQQKPGQSPRLLINYASWRYTSVPDRFTGSGYGTEFTLTISSLQSEDFAVYFCQQDYSSPRTFGGGTKVEIK

SEQ ID NO: 10628 - protein, 5 aa, Artificial Sequence
  Description of Artificial Sequence: Synthetic peptide
  XENP019137 vhCDR1
NYWMN

SEQ ID NO: 10629 - protein, 19 aa, Artificial Sequence
  Description of Artificial Sequence: Synthetic peptide
  XENP019137 vhCDR2
EIRLKSNNYATHYAEPVKG

SEQ ID NO: 10630 - protein, 11 aa, Artificial Sequence
  Description of Artificial Sequence: Synthetic peptide
  XENP019137 vhCDR3
YYGNYGGYFDV

SEQ ID NO: 10631 - protein, 11 aa, Artificial Sequence
  Description of Artificial Sequence: Synthetic peptide
  XENP019137 vlCDR1
RASQSVGNDVA

SEQ ID NO: 10632 - protein, 7 aa, Artificial Sequence
  Description of Artificial Sequence: Synthetic peptide
  XENP019137 vlCDR2
YASWRYT

SEQ ID NO: 10633 - protein, 9 aa, Artificial Sequence
  Description of Artificial Sequence: Synthetic peptide
  XENP019137 vlCDR3
QQDYSSPRT

SEQ ID NO: 10634 - protein, 249 aa, Artificial Sequence
  Description of Artificial Sequence: Synthetic polypeptide
  XENP019138 1G6_H1_L1.177_scFv(GKPGS)4
EVQLVESGGGLVKPGGSLRLSCAASGFTFSNYWMNWVRQAPGKGLEWVGEIRLKSNNYATHYAEPVKGRFTISRDDSKSTVYLQMNSLKTEDTAVYYCTRYYGNYGGYFDVWGAGTLVTVSSGKPGSGKPGSGKPGSGKPGSSIVMTQSPATLSVSPGERATLSCRASQSVGNDVAWYQQKPGQSPRLLINYASHRYTSVPDRFTGSGYGTEFTLTISSLQSEDFAVYFCQQDFSSPRTFGGGTKVEIK

SEQ ID NO: 10635 - protein, 122 aa, Artificial Sequence; identical to SEQ ID NO: 6246
  Description of Artificial Sequence: Synthetic polypeptide
  VH of XENP019138

SEQ ID NO: 10636 - protein, 107 aa, Artificial Sequence
  Description of Artificial Sequence: Synthetic polypeptide
  VL of XENP019138
SIVMTQSPATLSVSPGERATLSCRASQSVGNDVAWYQQKPGQSPRLLINYASHRYTSVPDRFTGSGYGTEFTLTISSLQSEDFAVYFCQQDFSSPRTFGGGTKVEIK

SEQ ID NO: 10637 - protein, 5 aa, Artificial Sequence
  Description of Artificial Sequence: Synthetic peptide
  XENP019138 vhCDR1
NYWMN

SEQ ID NO: 10638 - protein, 19 aa, Artificial Sequence
  Description of Artificial Sequence: Synthetic peptide
  XENP019138 vhCDR2
EIRLKSNNYATHYAEPVKG

SEQ ID NO: 10639 - protein, 11 aa, Artificial Sequence
  Description of Artificial Sequence: Synthetic peptide
  XENP019138 vhCDR3
YYGNYGGYFDV

SEQ ID NO: 10640 - protein, 11 aa, Artificial Sequence
  Description of Artificial Sequence: Synthetic peptide
  XENP019138 vlCDR1
RASQSVGNDVA

SEQ ID NO: 10641 - protein, 7 aa, Artificial Sequence
  Description of Artificial Sequence: Synthetic peptide
  XENP019138 vlCDR2
YASHRYT

SEQ ID NO: 10642 - protein, 9 aa, Artificial Sequence
  Description of Artificial Sequence: Synthetic peptide
  XENP019138 vlCDR3
QQDFSSPRT

SEQ ID NO: 10643 - protein, 249 aa, Artificial Sequence
  Description of Artificial Sequence: Synthetic polypeptide
  XENP019139 1G6_H1_L1.178_scFv(GKPGS)4
EVQLVESGGGLVKPGGSLRLSCAASGFTFSNYWMNWVRQAPGKGLEWVGEIRLKSNNYATHYAEPVKGRFTISRDDSKSTVYLQMNSLKTEDTAVYYCTRYYGNYGGYFDVWGAGTLVTVSSGKPGSGKPGSGKPGSGKPGSSIVMTQSPATLSVSPGERATLSCRASQSVGNDVAWYQQKPGQSPRLLINYASHRYTSVPDRFTGSGYGTEFTLTISSLQSEDFAVYFCQQDGSSPRTFGGGTKVEIK

SEQ ID NO: 10644 - protein, 122 aa, Artificial Sequence; identical to SEQ ID NO: 6246
  Description of Artificial Sequence: Synthetic polypeptide
  VH of XENP019139

SEQ ID NO: 10645 - protein, 107 aa, Artificial Sequence
  Description of Artificial Sequence: Synthetic polypeptide
  VL of XENP019139
SIVMTQSPATLSVSPGERATLSCRASQSVGNDVAWYQQKPGQSPRLLINYASHRYTSVPDRFTGSGYGTEFTLTISSLQSEDFAVYFCQQDGSSPRTFGGGTKVEIK

SEQ ID NO: 10646 - protein, 5 aa, Artificial Sequence
  Description of Artificial Sequence: Synthetic peptide
  XENP019139 vhCDR1
NYWMN

SEQ ID NO: 10647 - protein, 19 aa, Artificial Sequence
  Description of Artificial Sequence: Synthetic peptide
  XENP019139 vhCDR2
EIRLKSNNYATHYAEPVKG

SEQ ID NO: 10648 - protein, 11 aa, Artificial Sequence
  Description of Artificial Sequence: Synthetic peptide
  XENP019139 vhCDR3
YYGNYGGYFDV

SEQ ID NO: 10649 - protein, 11 aa, Artificial Sequence
  Description of Artificial Sequence: Synthetic peptide
  XENP019139 vlCDR1
RASQSVGNDVA

SEQ ID NO: 10650 - protein, 7 aa, Artificial Sequence
  Description of Artificial Sequence: Synthetic peptide
  XENP019139 vlCDR2
YASHRYT

SEQ ID NO: 10651 - protein, 9 aa, Artificial Sequence
  Description of Artificial Sequence: Synthetic peptide
  XENP019139 vlCDR3
QQDGSSPRT

SEQ ID NO: 10652 - protein, 249 aa, Artificial Sequence
  Description of Artificial Sequence: Synthetic polypeptide
  XENP019140 1G6_H1_L1.179_scFv(GKPGS)4
EVQLVESGGGLVKPGGSLRLSCAASGFTFSNYWMNWVRQAPGKGLEWVGEIRLKSNNYATHYAEPVKGRFTISRDDSKSTVYLQMNSLKTEDTAVYYCTRYYGNYGGYFDVWGAGTLVTVSSGKPGSGKPGSGKPGSGKPGSSIVMTQSPATLSVSPGERATLSCRASQSVSNDVAWYQQKPGQSPRLLINYASWRYTSVPDRFTGSGYGTEFTLTISSLQSEDFAVYFCQQDFSSPRTFGGGTKVEIK

SEQ ID NO: 10653 - protein, 122 aa, Artificial Sequence; identical to SEQ ID NO: 6246
  Description of Artificial Sequence: Synthetic polypeptide
  VH of XENP019140

SEQ ID NO: 10654 - protein, 107 aa, Artificial Sequence
  Description of Artificial Sequence: Synthetic polypeptide
  VL of XENP019140
SIVMTQSPATLSVSPGERATLSCRASQSVSNDVAWYQQKPGQSPRLLINYASWRYTSVPDRFTGSGYGTEFTLTISSLQSEDFAVYFCQQDFSSPRTFGGGTKVEIK

SEQ ID NO: 10655 - protein, 5 aa, Artificial Sequence
  Description of Artificial Sequence: Synthetic peptide
  XENP019140 vhCDR1
NYWMN

SEQ ID NO: 10656 - protein, 19 aa, Artificial Sequence
  Description of Artificial Sequence: Synthetic peptide
  XENP019140 vhCDR2
EIRLKSNNYATHYAEPVKG

SEQ ID NO: 10657 - protein, 11 aa, Artificial Sequence
  Description of Artificial Sequence: Synthetic peptide
  XENP019140 vhCDR3
YYGNYGGYFDV

SEQ ID NO: 10658 - protein, 11 aa, Artificial Sequence
  Description of Artificial Sequence: Synthetic peptide
  XENP019140 vlCDR1
RASQSVSNDVA

SEQ ID NO: 10659 - protein, 7 aa, Artificial Sequence
  Description of Artificial Sequence: Synthetic peptide
  XENP019140 vlCDR2
YASWRYT

SEQ ID NO: 10660 - protein, 9 aa, Artificial Sequence
  Description of Artificial Sequence: Synthetic peptide
  XENP019140 vlCDR3
QQDFSSPRT

SEQ ID NO: 10661 - protein, 249 aa, Artificial Sequence
  Description of Artificial Sequence: Synthetic polypeptide
  XENP019141 1G6_H1_L1.180_scFv(GKPGS)4
EVQLVESGGGLVKPGGSLRLSCAASGFTFSNYWMNWVRQAPGKGLEWVGEIRLKSNNYATHYAEPVKGRFTISRDDSKSTVYLQMNSLKTEDTAVYYCTRYYGNYGGYFDVWGAGTLVTVSSGKPGSGKPGSGKPGSGKPGSSIVMTQSPATLSVSPGERATLSCRASQSVSNDVAWYQQKPGQSPRLLINYASWRYTSVPDRFTGSGYGTEFTLTISSLQSEDFAVYFCQQDWSSPRTFGGGTKVEIK

SEQ ID NO: 10662 - protein, 122 aa, Artificial Sequence; identical to SEQ ID NO: 6246
  Description of Artificial Sequence: Synthetic polypeptide
  VH of XENP019141

SEQ ID NO: 10663 - protein, 107 aa, Artificial Sequence
  Description of Artificial Sequence: Synthetic polypeptide
  VL of XENP019141
SIVMTQSPATLSVSPGERATLSCRASQSVSNDVAWYQQKPGQSPRLLINYASWRYTSVPDRFTGSGYGTEFTLTISSLQSEDFAVYFCQQDWSSPRTFGGGTKVEIK

SEQ ID NO: 10664 - protein, 5 aa, Artificial Sequence
  Description of Artificial Sequence: Synthetic peptide
  XENP019141 vhCDR1
NYWMN

SEQ ID NO: 10665 - protein, 19 aa, Artificial Sequence
  Description of Artificial Sequence: Synthetic peptide
  XENP019141 vhCDR2
EIRLKSNNYATHYAEPVKG

SEQ ID NO: 10666 - protein, 11 aa, Artificial Sequence
  Description of Artificial Sequence: Synthetic peptide
  XENP019141 vhCDR3
YYGNYGGYFDV

SEQ ID NO: 10667 - protein, 11 aa, Artificial Sequence
  Description of Artificial Sequence: Synthetic peptide
  XENP019141 vlCDR1
RASQSVSNDVA

SEQ ID NO: 10668 - protein, 7 aa, Artificial Sequence
  Description of Artificial Sequence: Synthetic peptide
  XENP019141 vlCDR2
YASWRYT

SEQ ID NO: 10669 - protein, 9 aa, Artificial Sequence
  Description of Artificial Sequence: Synthetic peptide
  XENP019141 vlCDR3
QQDWSSPRT

SEQ ID NO: 10670 - protein, 249 aa, Artificial Sequence
  Description of Artificial Sequence: Synthetic polypeptide
  XENP019142 1G6_H1_L1.181_scFv(GKPGS)4
EVQLVESGGGLVKPGGSLRLSCAASGFTFSNYWMNWVRQAPGKGLEWVGEIRLKSNNYATHYAEPVKGRFTISRDDSKSTVYLQMNSLKTEDTAVYYCTRYYGNYGGYFDVWGAGTLVTVSSGKPGSGKPGSGKPGSGKPGSSIVMTQSPATLSVSPGERATLSCRASQSVSNDVAWYQQKPGQSPRLLINYASWRYTSVPDRFTGSGYGTEFTLTISSLQSEDFAVYFCQQDGSSPRTFGGGTKVEIK

SEQ ID NO: 10671 - protein, 122 aa, Artificial Sequence; identical to SEQ ID NO: 6246
  Description of Artificial Sequence: Synthetic polypeptide
  VH of XENP019142

SEQ ID NO: 10672 - protein, 107 aa, Artificial Sequence
  Description of Artificial Sequence: Synthetic polypeptide
  VL of XENP019142
SIVMTQSPATLSVSPGERATLSCRASQSVSNDVAWYQQKPGQSPRLLINYASWRYTSVPDRFTGSGYGTEFTLTISSLQSEDFAVYFCQQDGSSPRTFGGGTKVEIK

SEQ ID NO: 10673 - protein, 5 aa, Artificial Sequence
  Description of Artificial Sequence: Synthetic peptide
  XENP019142 vhCDR1
NYWMN

SEQ ID NO: 10674 - protein, 19 aa, Artificial Sequence
  Description of Artificial Sequence: Synthetic peptide
  XENP019142 vhCDR2
EIRLKSNNYATHYAEPVKG

SEQ ID NO: 10675 - protein, 11 aa, Artificial Sequence
  Description of Artificial Sequence: Synthetic peptide
  XENP019142 vhCDR3
YYGNYGGYFDV

SEQ ID NO: 10676 - protein, 11 aa, Artificial Sequence
  Description of Artificial Sequence: Synthetic peptide
  XENP019142 vlCDR1
RASQSVSNDVA

SEQ ID NO: 10677 - protein, 7 aa, Artificial Sequence
  Description of Artificial Sequence: Synthetic peptide
  XENP019142 vlCDR2
YASWRYT

SEQ ID NO: 10678 - protein, 9 aa, Artificial Sequence
  Description of Artificial Sequence: Synthetic peptide
  XENP019142 vlCDR3
QQDGSSPRT

SEQ ID NO: 10679 - protein, 249 aa, Artificial Sequence
  Description of Artificial Sequence: Synthetic polypeptide
  XENP019143 1G6_H1_L1.182_scFv(GKPGS)4
EVQLVESGGGLVKPGGSLRLSCAASGFTFSNYWMNWVRQAPGKGLEWVGEIRLKSNNYATHYAEPVKGRFTISRDDSKSTVYLQMNSLKTEDTAVYYCTRYYGNYGGYFDVWGAGTLVTVSSGKPGSGKPGSGKPGSGKPGSSIVMTQSPATLSVSPGERATLSCRASQSVGNDVAWYQQKPGQSPRLLINYASWRYTSVPDRFTGSGYGTEFTLTISSLQSEDFAVYFCQQDWSSPRTFGGGTKVEIK

SEQ ID NO: 10680 - protein, 122 aa, Artificial Sequence; identical to SEQ ID NO: 6246
  Description of Artificial Sequence: Synthetic polypeptide
  VH of XENP019143

SEQ ID NO: 10681 - protein, 107 aa, Artificial Sequence
  Description of Artificial Sequence: Synthetic polypeptide
  VL of XENP019143
SIVMTQSPATLSVSPGERATLSCRASQSVGNDVAWYQQKPGQSPRLLINYASWRYTSVPDRFTGSGYGTEFTLTISSLQSEDFAVYFCQQDWSSPRTFGGGTKVEIK

SEQ ID NO: 10682 - protein, 5 aa, Artificial Sequence
  Description of Artificial Sequence: Synthetic peptide
  XENP019143 vhCDR1
NYWMN

SEQ ID NO: 10683 - protein, 19 aa, Artificial Sequence
  Description of Artificial Sequence: Synthetic peptide
  XENP019143 vhCDR2
EIRLKSNNYATHYAEPVKG

SEQ ID NO: 10684 - protein, 11 aa, Artificial Sequence
  Description of Artificial Sequence: Synthetic peptide
  XENP019143 vhCDR3
YYGNYGGYFDV

SEQ ID NO: 10685 - protein, 11 aa, Artificial Sequence
  Description of Artificial Sequence: Synthetic peptide
  XENP019143 vlCDR1
RASQSVGNDVA

SEQ ID NO: 10686 - protein, 7 aa, Artificial Sequence
  Description of Artificial Sequence: Synthetic peptide
  XENP019143 vlCDR2
YASWRYT

SEQ ID NO: 10687 - protein, 9 aa, Artificial Sequence
  Description of Artificial Sequence: Synthetic peptide
  XENP019143 vlCDR3
QQDWSSPRT

SEQ ID NO: 10688 - protein, 249 aa, Artificial Sequence
  Description of Artificial Sequence: Synthetic polypeptide
  XENP019144 1G6_H1_L1.183_scFv(GKPGS)4
EVQLVESGGGLVKPGGSLRLSCAASGFTFSNYWMNWVRQAPGKGLEWVGEIRLKSNNYATHYAEPVKGRFTISRDDSKSTVYLQMNSLKTEDTAVYYCTRYYGNYGGYFDVWGAGTLVTVSSGKPGSGKPGSGKPGSGKPGSSIVMTQSPATLSVSPGERATLSCRASQSVGNDVAWYQQKPGQSPRLLINYASWRYTSVPDRFTGSGYGTEFTLTISSLQSEDFAVYFCQQDFSSPRTFGGGTKVEIK

SEQ ID NO: 10689 - protein, 122 aa, Artificial Sequence; identical to SEQ ID NO: 6246
  Description of Artificial Sequence: Synthetic polypeptide
  VH of XENP019144

SEQ ID NO: 10690 - protein, 107 aa, Artificial Sequence
  Description of Artificial Sequence: Synthetic polypeptide
  VL of XENP019144
SIVMTQSPATLSVSPGERATLSCRASQSVGNDVAWYQQKPGQSPRLLINYASWRYTSVPDRFTGSGYGTEFTLTISSLQSEDFAVYFCQQDFSSPRTFGGGTKVEIK

SEQ ID NO: 10691 - protein, 5 aa, Artificial Sequence
  Description of Artificial Sequence: Synthetic peptide
  XENP019144 vhCDR1
NYWMN

SEQ ID NO: 10692 - protein, 19 aa, Artificial Sequence
  Description of Artificial Sequence: Synthetic peptide
  XENP019144 vhCDR2
EIRLKSNNYATHYAEPVKG

SEQ ID NO: 10693 - protein, 11 aa, Artificial Sequence
  Description of Artificial Sequence: Synthetic peptide
  XENP019144 vhCDR3
YYGNYGGYFDV

SEQ ID NO: 10694 - protein, 11 aa, Artificial Sequence
  Description of Artificial Sequence: Synthetic peptide
  XENP019144 vlCDR1
RASQSVGNDVA

SEQ ID NO: 10695 - protein, 7 aa, Artificial Sequence
  Description of Artificial Sequence: Synthetic peptide
  XENP019144 vlCDR2
YASWRYT

SEQ ID NO: 10696 - protein, 9 aa, Artificial Sequence
  Description of Artificial Sequence: Synthetic peptide
  XENP019144 vlCDR3
QQDFSSPRT

SEQ ID NO: 10697 - protein, 249 aa, Artificial Sequence
  Description of Artificial Sequence: Synthetic polypeptide
  XENP019145 1G6_H1_L1.184_scFv(GKPGS)4
EVQLVESGGGLVKPGGSLRLSCAASGFTFSNYWMNWVRQAPGKGLEWVGEIRLKSNNYATHYAEPVKGRFTISRDDSKSTVYLQMNSLKTEDTAVYYCTRYYGNYGGYFDVWGAGTLVTVSSGKPGSGKPGSGKPGSGKPGSSIVMTQSPATLSVSPGERATLSCRASQSVGNDVAWYQQKPGQSPRLLINYASWRYTSVPDRFTGSGYGTEFTLTISSLQSEDFAVYFCQQDGSSPRTFGGGTKVEIK

SEQ ID NO: 10698 - protein, 122 aa, Artificial Sequence; identical to SEQ ID NO: 6246
  Description of Artificial Sequence: Synthetic polypeptide
  VH of XENP019145

SEQ ID NO: 10699 - protein, 107 aa, Artificial Sequence
  Description of Artificial Sequence: Synthetic polypeptide
  VL of XENP019145
SIVMTQSPATLSVSPGERATLSCRASQSVGNDVAWYQQKPGQSPRLLINYASWRYTSVPDRFTGSGYGTEFTLTISSLQSEDFAVYFCQQDGSSPRTFGGGTKVEIK

SEQ ID NO: 10700 - protein, 5 aa, Artificial Sequence
  Description of Artificial Sequence: Synthetic peptide
  XENP019145 vhCDR1
NYWMN

SEQ ID NO: 10701 - protein, 19 aa, Artificial Sequence
  Description of Artificial Sequence: Synthetic peptide
  XENP019145 vhCDR2
EIRLKSNNYATHYAEPVKG

SEQ ID NO: 10702 - protein, 11 aa, Artificial Sequence
  Description of Artificial Sequence: Synthetic peptide
  XENP019145 vhCDR3
YYGNYGGYFDV

SEQ ID NO: 10703 - protein, 11 aa, Artificial Sequence
  Description of Artificial Sequence: Synthetic peptide
  XENP019145 vlCDR1
RASQSVGNDVA

SEQ ID NO: 10704 - protein, 7 aa, Artificial Sequence
  Description of Artificial Sequence: Synthetic peptide
  XENP019145 vlCDR2
YASWRYT

SEQ ID NO: 10705 - protein, 9 aa, Artificial Sequence
  Description of Artificial Sequence: Synthetic peptide
  XENP019145 vlCDR3
QQDGSSPRT

SEQ ID NO: 10706 - protein, 249 aa, Artificial Sequence
  Description of Artificial Sequence: Synthetic polypeptide
  XENP019146 1G6_H1_L1.185_scFv(GKPGS)4
EVQLVESGGGLVKPGGSLRLSCAASGFTFSNYWMNWVRQAPGKGLEWVGEIRLKSNNYATHYAEPVKGRFTISRDDSKSTVYLQMNSLKTEDTAVYYCTRYYGNYGGYFDVWGAGTLVTVSSGKPGSGKPGSGKPGSGKPGSEIVMTQSPATLSVSPGERATLSCRASQSVSNDLAWYQQKPGQSPRLLINYASHRYTGVPARFSGSGYGTEFTLTISSLQSEDFAVYYCQQDYSSPRTFGGGTKVEIK

SEQ ID NO: 10707 - protein, 122 aa, Artificial Sequence; identical to SEQ ID NO: 6246
  Description of Artificial Sequence: Synthetic polypeptide
  VH of XENP019146

SEQ ID NO: 10708 - protein, 107 aa, Artificial Sequence
  Description of Artificial Sequence: Synthetic polypeptide
  VL of XENP019146
EIVMTQSPATLSVSPGERATLSCRASQSVSNDLAWYQQKPGQSPRLLINYASHRYTGVPARFSGSGYGTEFTLTISSLQSEDFAVYYCQQDYSSPRTFGGGTKVEIK

SEQ ID NO: 10709 - protein, 5 aa, Artificial Sequence
  Description of Artificial Sequence: Synthetic peptide
  XENP019146 vhCDR1
NYWMN

SEQ ID NO: 10710 - protein, 19 aa, Artificial Sequence
  Description of Artificial Sequence: Synthetic peptide
  XENP019146 vhCDR2
EIRLKSNNYATHYAEPVKG

SEQ ID NO: 10711 - protein, 11 aa, Artificial Sequence
  Description of Artificial Sequence: Synthetic peptide
  XENP019146 vhCDR3
YYGNYGGYFDV

SEQ ID NO: 10712 - protein, 11 aa, Artificial Sequence
  Description of Artificial Sequence: Synthetic peptide
  XENP019146 vlCDR1
RASQSVSNDLA

SEQ ID NO: 10713 - protein, 7 aa, Artificial Sequence
  Description of Artificial Sequence: Synthetic peptide
  XENP019146 vlCDR2
YASHRYT

SEQ ID NO: 10714 - protein, 9 aa, Artificial Sequence
  Description of Artificial Sequence: Synthetic peptide
  XENP019146 vlCDR3
QQDYSSPRT

SEQ ID NO: 10715 - protein, 249 aa, Artificial Sequence
  Description of Artificial Sequence: Synthetic polypeptide
  XENP019147 1G6_H1_L1.186_scFv(GKPGS)4
EVQLVESGGGLVKPGGSLRLSCAASGFTFSNYWMNWVRQAPGKGLEWVGEIRLKSNNYATHYAEPVKGRFTISRDDSKSTVYLQMNSLKTEDTAVYYCTRYYGNYGGYFDVWGAGTLVTVSSGKPGSGKPGSGKPGSGKPGSDIVMTQSPATLSVSPGERATLSCRASQSVSNDLAWYQQKPGQSPRLLINYASHRYTGVPDRFSGSGYGTEFTLTISSLQSEDFAVYYCQQDYSSPRTFGGGTKVEIK

SEQ ID NO: 10716 - protein, 122 aa, Artificial Sequence; identical to SEQ ID NO: 6246
  Description of Artificial Sequence: Synthetic polypeptide
  VH of XENP019147

SEQ ID NO: 10717 - protein, 107 aa, Artificial Sequence
  Description of Artificial Sequence: Synthetic polypeptide
  VL of XENP019147
DIVMTQSPATLSVSPGERATLSCRASQSVSNDLAWYQQKPGQSPRLLINYASHRYTGVPDRFSGSGYGTEFTLTISSLQSEDFAVYYCQQDYSSPRTFGGGTKVEIK

SEQ ID NO: 10718 - protein, 5 aa, Artificial Sequence
  Description of Artificial Sequence: Synthetic peptide
  XENP019147 vhCDR1
NYWMN

SEQ ID NO: 10719 - protein, 19 aa, Artificial Sequence
  Description of Artificial Sequence: Synthetic peptide
  XENP019147 vhCDR2
EIRLKSNNYATHYAEPVKG

SEQ ID NO: 10720 - protein, 11 aa, Artificial Sequence
  Description of Artificial Sequence: Synthetic peptide
  XENP019147 vhCDR3
YYGNYGGYFDV

SEQ ID NO: 10721 - protein, 11 aa, Artificial Sequence
  Description of Artificial Sequence: Synthetic peptide
  XENP019147 vlCDR1
RASQSVSNDLA

SEQ ID NO: 10722 - protein, 7 aa, Artificial Sequence
  Description of Artificial Sequence: Synthetic peptide
  XENP019147 vlCDR2
YASHRYT

SEQ ID NO: 10723 - protein, 9 aa, Artificial Sequence
  Description of Artificial Sequence: Synthetic peptide
  XENP019147 vlCDR3
QQDYSSPRT

SEQ ID NO: 10724 - protein, 249 aa, Artificial Sequence
  Description of Artificial Sequence: Synthetic polypeptide
  XENP019148 1G6_H1.257_L1.152_scFv(GKPGS)4
EVQLVESGGGLVKPGGSLRLSCAASGFTFSNYWMNWVRQAPGKGLEWVGEIRLKSNNYATHYAEPVKGRFTISRDDSKSTVYLQMNSLKTEDTAVYYCTRYYGNYGGYFDVWGRGTLVTVSSGKPGSGKPGSGKPGSGKPGSSIVMTQSPATLSVSPGERATLSCRASQSVSNDVAWYQQKPGESPRLLINYASHRYTGVPDRFTGSGYGTEFTLTISSLQSEDFAVYFCQQDYSSPRTFGGGTKVEIK

SEQ ID NO: 10725 - protein, 122 aa, Artificial Sequence; identical to SEQ ID NO: 10167
  Description of Artificial Sequence: Synthetic polypeptide
  VH of XENP019148

SEQ ID NO: 10726 - protein, 107 aa, Artificial Sequence; identical to SEQ ID NO: 10411
  Description of Artificial Sequence: Synthetic polypeptide
  VL of XENP019148

SEQ ID NO: 10727 - protein, 5 aa, Artificial Sequence
  Description of Artificial Sequence: Synthetic peptide
  XENP019148 vhCDR1
NYWMN

SEQ ID NO: 10728 - protein, 19 aa, Artificial Sequence
  Description of Artificial Sequence: Synthetic peptide
  XENP019148 vhCDR2
EIRLKSNNYATHYAEPVKG

SEQ ID NO: 10729 - protein, 11 aa, Artificial Sequence
  Description of Artificial Sequence: Synthetic peptide
  XENP019148 vhCDR3
YYGNYGGYFDV

SEQ ID NO: 10730 - protein, 11 aa, Artificial Sequence
  Description of Artificial Sequence: Synthetic peptide
  XENP019148 vlCDR1
RASQSVSNDVA

SEQ ID NO: 10731 - protein, 7 aa, Artificial Sequence
  Description of Artificial Sequence: Synthetic peptide
  XENP019148 vlCDR2
YASHRYT

SEQ ID NO: 10732 - protein, 9 aa, Artificial Sequence
  Description of Artificial Sequence: Synthetic peptide
  XENP019148 vlCDR3
QQDYSSPRT

SEQ ID NO: 10733 - protein, 249 aa, Artificial Sequence
  Description of Artificial Sequence: Synthetic polypeptide
  XENP019149 1G6_H1.257_L1.151_scFv(GKPGS)4
EVQLVESGGGLVKPGGSLRLSCAASGFTFSNYWMNWVRQAPGKGLEWVGEIRLKSNNYATHYAEPVKGRFTISRDDSKSTVYLQMNSLKTEDTAVYYCTRYYGNYGGYFDVWGRGTLVTVSSGKPGSGKPGSGKPGSGKPGSSIVMTQSPATLSVSPGERATLSCRASQSVSNDVAWYQQKPEQSPRLLINYASHRYTGVPDRFTGSGYGTEFTLTISSLQSEDFAVYFCQQDYSSPRTFGGGTKVEIK

SEQ ID NO: 10734 - protein, 122 aa, Artificial Sequence; identical to SEQ ID NO: 10167
  Description of Artificial Sequence: Synthetic polypeptide
  VH of XENP019149

SEQ ID NO: 10735 - protein, 107 aa, Artificial Sequence; identical to SEQ ID NO: 10402
  Description of Artificial Sequence: Synthetic polypeptide
  VL of XENP019149

SEQ ID NO: 10736 - protein, 5 aa, Artificial Sequence
  Description of Artificial Sequence: Synthetic peptide
  XENP019149 vhCDR1
NYWMN

SEQ ID NO: 10737 - protein, 19 aa, Artificial Sequence
  Description of Artificial Sequence: Synthetic peptide
  XENP019149 vhCDR2
EIRLKSNNYATHYAEPVKG

SEQ ID NO: 10738 - protein, 11 aa, Artificial Sequence
  Description of Artificial Sequence: Synthetic peptide
  XENP019149 vhCDR3
YYGNYGGYFDV

SEQ ID NO: 10739 - protein, 11 aa, Artificial Sequence
  Description of Artificial Sequence: Synthetic peptide
  XENP019149 vlCDR1
RASQSVSNDVA

SEQ ID NO: 10740 - protein, 7 aa, Artificial Sequence
  Description of Artificial Sequence: Synthetic peptide
  XENP019149 vlCDR2
YASHRYT

SEQ ID NO: 10741 - protein, 9 aa, Artificial Sequence
  Description of Artificial Sequence: Synthetic peptide
  XENP019149 vlCDR3
QQDYSSPRT

SEQ ID NO: 10742 - protein, 249 aa, Artificial Sequence
  Description of Artificial Sequence: Synthetic polypeptide
  XENP019150 1G6_H1.139_L1.134_scFv(GKPGS)4
EVQLVESGGGLVKPGGSLRLSCAASGFTFSNYWMNWVRQAPGKGLEWVGEIRLKSNNYATDYAEPVKGRFTISRDDSKSTVYLQMNSLKTEDTAVYYCTRYYGNYGGYFDVWGAGTLVTVSSGKPGSGKPGSGKPGSGKPGSSIVMTQSPATLSVSPGERATLSCRASQSVSNDVAWYQQKPGQSPRLLINYASHRYTGVPDRFTGSGYGTEFTLTISSLQSEDFAVYFCQQDYKSPRTFGGGTKVEIK

SEQ ID NO: 10743 - protein, 122 aa, Artificial Sequence; identical to SEQ ID NO: 7602
  Description of Artificial Sequence: Synthetic polypeptide
  VH of XENP019150

SEQ ID NO: 10744 - protein, 107 aa, Artificial Sequence; identical to SEQ ID NO: 9700
  Description of Artificial Sequence: Synthetic polypeptide
  VL of XENP019150

SEQ ID NO: 10745 - protein, 5 aa, Artificial Sequence
  Description of Artificial Sequence: Synthetic peptide
  XENP019150 vhCDR1
NYWMN

SEQ ID NO: 10746 - protein, 19 aa, Artificial Sequence
  Description of Artificial Sequence: Synthetic peptide
  XENP019150 vhCDR2
EIRLKSNNYATDYAEPVKG

SEQ ID NO: 10747 - protein, 11 aa, Artificial Sequence
  Description of Artificial Sequence: Synthetic peptide
  XENP019150 vhCDR3
YYGNYGGYFDV

SEQ ID NO: 10748 - protein, 11 aa, Artificial Sequence
  Description of Artificial Sequence: Synthetic peptide
  XENP019150 vlCDR1
RASQSVSNDVA

SEQ ID NO: 10749 - protein, 7 aa, Artificial Sequence
  Description of Artificial Sequence: Synthetic peptide
  XENP019150 vlCDR2
YASHRYT

SEQ ID NO: 10750 - protein, 9 aa, Artificial Sequence
  Description of Artificial Sequence: Synthetic peptide
  XENP019150 vlCDR3
QQDYKSPRT

SEQ ID NO: 10751 - protein, 249 aa, Artificial Sequence
  Description of Artificial Sequence: Synthetic polypeptide
  XENP019151 1G6_H1.48_L1.187_scFv(GKPGS)4
EVQLVESGGGLVKPGGSLRLSCAASGFTFSNYWMNWVRKAPGKGLEWVGEIRLKSNNYATHYAEPVKGRFTISRDDSKSTVYLQMNSLKTEDTAVYYCTRYYGNYGGYFDVWGAGTLVTVSSGKPGSGKPGSGKPGSGKPGSSIVMTQSPATLSVSPGERATLSCRASQSVSNDVAWYQQKPGESPRLLINYASHRYTGVPDRFTGSGYGTEFTLTISSLQSEDFAVYFCQQDYSSPRTFGGGTKVEIK

SEQ ID NO: 10752 - protein, 122 aa, Artificial Sequence; identical to SEQ ID NO: 6786
  Description of Artificial Sequence: Synthetic polypeptide
  VH of XENP019151

SEQ ID NO: 10753 - protein, 107 aa, Artificial Sequence; identical to SEQ ID NO: 10411
  Description of Artificial Sequence: Synthetic polypeptide
  VL of XENP019151

SEQ ID NO: 10754 - protein, 11 aa, Artificial Sequence
  Description of Artificial Sequence: Synthetic peptide
  XENP019151 vlCDR1
RASQSVSNDVA

SEQ ID NO: 10755 - protein, 7 aa, Artificial Sequence
  Description of Artificial Sequence: Synthetic peptide
  XENP019151 vlCDR2
YASHRYT

SEQ ID NO: 10756 - protein, 9 aa, Artificial Sequence
  Description of Artificial Sequence: Synthetic peptide
  XENP019151 vlCDR3
QQDYSSPRT

SEQ ID NO: 10757 - protein, 249 aa, Artificial Sequence
  Description of Artificial Sequence: Synthetic polypeptide
  XENP019152 1G6_H1.48_L1.151_scFv(GKPGS)4
EVQLVESGGGLVKPGGSLRLSCAASGFTFSNYWMNWVRKAPGKGLEWVGEIRLKSNNYATHYAEPVKGRFTISRDDSKSTVYLQMNSLKTEDTAVYYCTRYYGNYGGYFDVWGAGTLVTVSSGKPGSGKPGSGKPGSGKPGSSIVMTQSPATLSVSPGERATLSCRASQSVSNDVAWYQQKPEQSPRLLINYASHRYTGVPDRFTGSGYGTEFTLTISSLQSEDFAVYFCQQDYSSPRTFGGGTKVEIK

SEQ ID NO: 10758 - protein, 122 aa, Artificial Sequence; identical to SEQ ID NO: 6786
  Description of Artificial Sequence: Synthetic polypeptide
  VH of XENP019152

SEQ ID NO: 10759 - protein, 107 aa, Artificial Sequence; identical to SEQ ID NO: 10402
  Description of Artificial Sequence: Synthetic polypeptide
  VL of XENP019152

SEQ ID NO: 10760 - protein, 11 aa, Artificial Sequence
  Description of Artificial Sequence: Synthetic peptide
  XENP019152 vlCDR1
RASQSVSNDVA

SEQ ID NO: 10761 - protein, 7 aa, Artificial Sequence
  Description of Artificial Sequence: Synthetic peptide
  XENP019152 vlCDR2
YASHRYT

SEQ ID NO: 10762 - protein, 9 aa, Artificial Sequence
  Description of Artificial Sequence: Synthetic peptide
  XENP019152 vlCDR3
QQDYSSPRT

SEQ ID NO: 10763 - protein, 249 aa, Artificial Sequence
  Description of Artificial Sequence: Synthetic polypeptide
  XENP019153 1G6_H1.43_L1.159_scFv(GKPGS)4
EVQLVESGGGLVKPGGSLRLSCAASGFTFSNYWMDWVRQAPGKGLEWVGEIRLKSNNYATHYAEPVKGRFTISRDDSKSTVYLQMNSLKTEDTAVYYCTRYYGNYGGYFDVWGAGTLVTVSSGKPGSGKPGSGKPGSGKPGSSIVMTQSPATLSVSPGERATLSCRASQSVSNDVAWYQQKPGQSPRLLINYASHRYTGVPDRFTGSGYGTEFTLTISSLQSEDFAVYFCKQDYSSPRTFGGGTKVEIK

SEQ ID NO: 10764 - protein, 122 aa, Artificial Sequence; identical to SEQ ID NO: 6741
  Description of Artificial Sequence: Synthetic polypeptide
  VH of XENP019153

SEQ ID NO: 10765 - protein, 107 aa, Artificial Sequence; identical to SEQ ID NO: 10474
  Description of Artificial Sequence: Synthetic polypeptide
  VL of XENP019153

SEQ ID NO: 10766 - protein, 5 aa, Artificial Sequence
  Description of Artificial Sequence: Synthetic peptide
  XENP019153 vhCDR1
NYWMD

SEQ ID NO: 10767 - protein, 19 aa, Artificial Sequence
  Description of Artificial Sequence: Synthetic peptide
  XENP019153 vhCDR2
EIRLKSNNYATHYAEPVKG

SEQ ID NO: 10768 - protein, 11 aa, Artificial Sequence
  Description of Artificial Sequence: Synthetic peptide
  XENP019153 vhCDR3
YYGNYGGYFDV

SEQ ID NO: 10769 - protein, 11 aa, Artificial Sequence
  Description of Artificial Sequence: Synthetic peptide
  XENP019153 vlCDR1
RASQSVSNDVA

SEQ ID NO: 10770 - protein, 7 aa, Artificial Sequence
  Description of Artificial Sequence: Synthetic peptide
  XENP019153 vlCDR2
YASHRYT

SEQ ID NO: 10771 - protein, 9 aa, Artificial Sequence
  Description of Artificial Sequence: Synthetic peptide
  XENP019153 vlCDR3
KQDYSSPRT

SEQ ID NO: 10772 - protein, 249 aa, Artificial Sequence
  Description of Artificial Sequence: Synthetic polypeptide
  XENP019154 1G6_H1.90_L1.119_scFv(GKPGS)4
EVQLVESGGGLVKPGGSLRLSCAASGFTFSNYWMNWVRQAPGKGLEWVGEIRLYSNNYATHYAEPVKGRFTISRDDSKSTVYLQMNSLKTEDTAVYYCTRYYGNYGGYFDVWGAGTLVTVSSGKPGSGKPGSGKPGSGKPGSSIVMTQSPATLSVSPGERATLSCRASQSVSNDVAWYQQKPGQSPRLLINYASHRYTGVPDRFTGSGYGTEFTLTISSLQSEDFAVYFCQQDWSSPRTFGGGTKVEIK

SEQ ID NO: 10773 - protein, 122 aa, Artificial Sequence; identical to SEQ ID NO: 7161
  Description of Artificial Sequence: Synthetic polypeptide
  VH of XENP019154

SEQ ID NO: 10774 - protein, 107 aa, Artificial Sequence; identical to SEQ ID NO: 9565
  Description of Artificial Sequence: Synthetic polypeptide
  VL of XENP019154

SEQ ID NO: 10775 - protein, 5 aa, Artificial Sequence
  Description of Artificial Sequence: Synthetic peptide
  XENP019154 vhCDR1
NYWMN

SEQ ID NO: 10776 - protein, 19 aa, Artificial Sequence
  Description of Artificial Sequence: Synthetic peptide
  XENP019154 vhCDR2
EIRLYSNNYATHYAEPVKG

SEQ ID NO: 10777 - protein, 11 aa, Artificial Sequence
  Description of Artificial Sequence: Synthetic peptide
  XENP019154 vhCDR3
YYGNYGGYFDV

SEQ ID NO: 10778 - protein, 11 aa, Artificial Sequence
  Description of Artificial Sequence: Synthetic peptide
  XENP019154 vlCDR1
RASQSVSNDVA

SEQ ID NO: 10779 - protein, 7 aa, Artificial Sequence
  Description of Artificial Sequence: Synthetic peptide
  XENP019154 vlCDR2
YASHRYT

SEQ ID NO: 10780 - protein, 9 aa, Artificial Sequence
  Description of Artificial Sequence: Synthetic peptide
  XENP019154 vlCDR3
QQDWSSPRT

SEQ ID NO: 10781 - protein, 249 aa, Artificial Sequence
  Description of Artificial Sequence: Synthetic polypeptide
  XENP019155 1G6_H1.90_L1.23_scFv(GKPGS)4
EVQLVESGGGLVKPGGSLRLSCAASGFTFSNYWMNWVRQAPGKGLEWVGEIRLYSNNYATHYAEPVKGRFTISRDDSKSTVYLQMNSLKTEDTAVYYCTRYYGNYGGYFDVWGAGTLVTVSSGKPGSGKPGSGKPGSGKPGSSIVMTQSPATLSVSPGERATLSCRASQSVGNDVAWYQQKPGQSPRLLINYASHRYTGVPDRFTGSGYGTEFTLTISSLQSEDFAVYFCQQDYSSPRTFGGGTKVEIK

SEQ ID NO: 10782 - protein, 122 aa, Artificial Sequence; identical to SEQ ID NO: 7161
  Description of Artificial Sequence: Synthetic polypeptide
  VH of XENP019155

SEQ ID NO: 10783 - protein, 107 aa, Artificial Sequence; identical to SEQ ID NO: 8701
  Description of Artificial Sequence: Synthetic polypeptide
  VL of XENP019155

SEQ ID NO: 10784 - protein, 5 aa, Artificial Sequence
  Description of Artificial Sequence: Synthetic peptide
  XENP019155 vhCDR1
NYWMN

SEQ ID NO: 10785 - protein, 19 aa, Artificial Sequence
  Description of Artificial Sequence: Synthetic peptide
  XENP019155 vhCDR2
EIRLYSNNYATHYAEPVKG

SEQ ID NO: 10786 - protein, 11 aa, Artificial Sequence
  Description of Artificial Sequence: Synthetic peptide
  XENP019155 vhCDR3
YYGNYGGYFDV

SEQ ID NO: 10787 - protein, 11 aa, Artificial Sequence
  Description of Artificial Sequence: Synthetic peptide
  XENP019155 vlCDR1
RASQSVGNDVA

SEQ ID NO: 10788 - protein, 7 aa, Artificial Sequence
  Description of Artificial Sequence: Synthetic peptide
  XENP019155 vlCDR2
YASHRYT

SEQ ID NO: 10789 - protein, 9 aa, Artificial Sequence
  Description of Artificial Sequence: Synthetic peptide
  XENP019155 vlCDR3
QQDYSSPRT

SEQ ID NO: 10790 - protein, 249 aa, Artificial Sequence
  Description of Artificial Sequence: Synthetic polypeptide
  XENP019156 1G6_H1.90_L1.67_scFv(GKPGS)4
EVQLVESGGGLVKPGGSLRLSCAASGFTFSNYWMNWVRQAPGKGLEWVGEIRLYSNNYATHYAEPVKGRFTISRDDSKSTVYLQMNSLKTEDTAVYYCTRYYGNYGGYFDVWGAGTLVTVSSGKPGSGKPGSGKPGSGKPGSSIVMTQSPATLSVSPGERATLSCRASQSVSNDVAWYQQKPGQSPRLLINYASWRYTGVPDRFTGSGYGTEFTLTISSLQSEDFAVYFCQQDYSSPRTFGGGTKVEIK

SEQ ID NO: 10791 - protein, 122 aa, Artificial Sequence; identical to SEQ ID NO: 7161
  Description of Artificial Sequence: Synthetic polypeptide
  VH of XENP019156

SEQ ID NO: 10792 - protein, 107 aa, Artificial Sequence; identical to SEQ ID NO: 9097
  Description of Artificial Sequence: Synthetic polypeptide
  VL of XENP019156

SEQ ID NO: 10793 - protein, 5 aa, Artificial Sequence
  Description of Artificial Sequence: Synthetic peptide
  XENP019156 vhCDR1
NYWMN

SEQ ID NO: 10794 - protein, 19 aa, Artificial Sequence
  Description of Artificial Sequence: Synthetic peptide
  XENP019156 vhCDR2
EIRLYSNNYATHYAEPVKG

SEQ ID NO: 10795 - protein, 11 aa, Artificial Sequence
  Description of Artificial Sequence: Synthetic peptide
  XENP019156 vhCDR3
YYGNYGGYFDV

SEQ ID NO: 10796 - protein, 11 aa, Artificial Sequence
  Description of Artificial Sequence: Synthetic peptide
  XENP019156 vlCDR1
RASQSVSNDVA

SEQ ID NO: 10797 - protein, 7 aa, Artificial Sequence
  Description of Artificial Sequence: Synthetic peptide
  XENP019156 vlCDR2
YASWRYT

SEQ ID NO: 10798 - protein, 9 aa, Artificial Sequence
  Description of Artificial Sequence: Synthetic peptide
  XENP019156 vlCDR3
QQDYSSPRT

SEQ ID NO: 10799 - protein, 249 aa, Artificial Sequence
  Description of Artificial Sequence: Synthetic polypeptide
  XENP019157 1G6_H1.90_L1.94_scFv(GKPGS)4
EVQLVESGGGLVKPGGSLRLSCAASGFTFSNYWMNWVRQAPGKGLEWVGEIRLYSNNYATHYAEPVKGRFTISRDDSKSTVYLQMNSLKTEDTAVYYCTRYYGNYGGYFDVWGAGTLVTVSSGKPGSGKPGSGKPGSGKPGSSIVMTQSPATLSVSPGERATLSCRASQSVSNDVAWYQQKPGQSPRLLINYASHRYTSVPDRFTGSGYGTEFTLTISSLQSEDFAVYFCQQDYSSPRTFGGGTKVEIK

SEQ ID NO: 10800 - protein, 122 aa, Artificial Sequence; identical to SEQ ID NO: 7161
  Description of Artificial Sequence: Synthetic polypeptide
  VH of XENP019157

SEQ ID NO: 10801 - protein, 107 aa, Artificial Sequence; identical to SEQ ID NO: 9340
  Description of Artificial Sequence: Synthetic polypeptide
  VL of XENP019157

SEQ ID NO: 10802 - protein, 5 aa, Artificial Sequence
  Description of Artificial Sequence: Synthetic peptide
  XENP019157 vhCDR1
NYWMN

SEQ ID NO: 10803 - protein, 19 aa, Artificial Sequence
  Description of Artificial Sequence: Synthetic peptide
  XENP019157 vhCDR2
EIRLYSNNYATHYAEPVKG

SEQ ID NO: 10804 - protein, 11 aa, Artificial Sequence
  Description of Artificial Sequence: Synthetic peptide
  XENP019157 vhCDR3
YYGNYGGYFDV

SEQ ID NO: 10805 - protein, 11 aa, Artificial Sequence
  Description of Artificial Sequence: Synthetic peptide
  XENP019157 vlCDR1
RASQSVSNDVA

SEQ ID NO: 10806 - protein, 7 aa, Artificial Sequence
  Description of Artificial Sequence: Synthetic peptide
  XENP019157 vlCDR2
YASHRYT

SEQ ID NO: 10807 - protein, 9 aa, Artificial Sequence
  Description of Artificial Sequence: Synthetic peptide
  XENP019157 vlCDR3
QQDYSSPRT

SEQ ID NO: 10808 - protein, 249 aa, Artificial Sequence
  Description of Artificial Sequence: Synthetic polypeptide
  XENP019158 1G6_H1.90_L1.116_scFv(GKPGS)4
EVQLVESGGGLVKPGGSLRLSCAASGFTFSNYWMNWVRQAPGKGLEWVGEIRLYSNNYATHYAEPVKGRFTISRDDSKSTVYLQMNSLKTEDTAVYYCTRYYGNYGGYFDVWGAGTLVTVSSGKPGSGKPGSGKPGSGKPGSSIVMTQSPATLSVSPGERATLSCRASQSVSNDVAWYQQKPGQSPRLLINYASHRYTGVPDRFTGSGYGTEFTLTISSLQSEDFAVYFCQQDFSSPRTFGGGTKVEIK

SEQ ID NO: 10809 - protein, 122 aa, Artificial Sequence; identical to SEQ ID NO: 7161
  Description of Artificial Sequence: Synthetic polypeptide
  VH of XENP019158

SEQ ID NO: 10810 - protein, 107 aa, Artificial Sequence; identical to SEQ ID NO: 9538
  Description of Artificial Sequence: Synthetic polypeptide
  VL of XENP019158

SEQ ID NO: 10811 - protein, 5 aa, Artificial Sequence
  Description of Artificial Sequence: Synthetic peptide
  XENP019158 vhCDR1
NYWMN

SEQ ID NO: 10812 - protein, 19 aa, Artificial Sequence
  Description of Artificial Sequence: Synthetic peptide
  XENP019158 vhCDR2
EIRLYSNNYATHYAEPVKG

SEQ ID NO: 10813 - protein, 11 aa, Artificial Sequence
  Description of Artificial Sequence: Synthetic peptide
  XENP019158 vhCDR3
YYGNYGGYFDV

SEQ ID NO: 10814 - protein, 11 aa, Artificial Sequence
  Description of Artificial Sequence: Synthetic peptide
  XENP019158 vlCDR1
RASQSVSNDVA

SEQ ID NO: 10815 - protein, 7 aa, Artificial Sequence
  Description of Artificial Sequence: Synthetic peptide
  XENP019158 vlCDR2
YASHRYT

SEQ ID NO: 10816 - protein, 9 aa, Artificial Sequence
  Description of Artificial Sequence: Synthetic peptide
  XENP019158 vlCDR3
QQDFSSPRT

SEQ ID NO: 10817 - protein, 249 aa, Artificial Sequence; identical to SEQ ID NO: 10772
  Description of Artificial Sequence: Synthetic polypeptide
  XENP019159 1G6_H1.155_L1.119_scFv(GKPGS)4

SEQ ID NO: 10818 - protein, 122 aa, Artificial Sequence; identical to SEQ ID NO: 7161
  Description of Artificial Sequence: Synthetic polypeptide
  VH of XENP019159

SEQ ID NO: 10819 - protein, 107 aa, Artificial Sequence; identical to SEQ ID NO: 9565
  Description of Artificial Sequence: Synthetic polypeptide
  VL of XENP019159

SEQ ID NO: 10820 - protein, 5 aa, Artificial Sequence
  Description of Artificial Sequence: Synthetic peptide
  XENP019159 vhCDR1
NYWMN

SEQ ID NO: 10821 - protein, 19 aa, Artificial Sequence
  Description of Artificial Sequence: Synthetic peptide
  XENP019159 vhCDR2
EIRLYSNNYATHYAEPVKG

SEQ ID NO: 10822 - protein, 11 aa, Artificial Sequence
  Description of Artificial Sequence: Synthetic peptide
  XENP019159 vhCDR3
YYGNYGGYFDV

SEQ ID NO: 10823 - protein, 11 aa, Artificial Sequence
  Description of Artificial Sequence: Synthetic peptide
  XENP019159 vlCDR1
RASQSVSNDVA

SEQ ID NO: 10824 - protein, 7 aa, Artificial Sequence
  Description of Artificial Sequence: Synthetic peptide
  XENP019159 vlCDR2
YASHRYT

SEQ ID NO: 10825 - protein, 9 aa, Artificial Sequence
  Description of Artificial Sequence: Synthetic peptide
  XENP019159 vlCDR3
QQDWSSPRT

SEQ ID NO: 10826 - protein, 249 aa, Artificial Sequence
  Description of Artificial Sequence: Synthetic polypeptide
  XENP019182 1G6_H1_L1.190_scFv(GKPGS)4
EVQLVESGGGLVKPGGSLRLSCAASGFTFSNYWMNWVRQAPGKGLEWVGEIRLKSNNYATHYAEPVKGRFTISRDDSKSTVYLQMNSLKTEDTAVYYCTRYYGNYGGYFDVWGAGTLVTVSSGKPGSGKPGSGKPGSGKPGSSIVMTQSPATLSVSPGERATLSCRASQSVGNDVAWYQQKPGQSPRLLINYASHRYTGVPDRFTGSGYGTEFTLTISSLQSEDFAVYFCQQDFSSPRTFGGGTKVEIK

SEQ ID NO: 10827 - protein, 122 aa, Artificial Sequence; identical to SEQ ID NO: 6246
  Description of Artificial Sequence: Synthetic polypeptide
  VH of XENP019182

SEQ ID NO: 10828 - protein, 107 aa, Artificial Sequence
  Description of Artificial Sequence: Synthetic polypeptide
  VL of XENP019182
SIVMTQSPATLSVSPGERATLSCRASQSVGNDVAWYQQKPGQSPRLLINYASHRYTGVPDRFTGSGYGTEFTLTISSLQSEDFAVYFCQQDFSSPRTFGGGTKVEIK

SEQ ID NO: 10829 - protein, 5 aa, Artificial Sequence
  Description of Artificial Sequence: Synthetic peptide
  XENP019182 vhCDR1
NYWMN

SEQ ID NO: 10830 - protein, 19 aa, Artificial Sequence
  Description of Artificial Sequence: Synthetic peptide
  XENP019182 vhCDR2
EIRLKSNNYATHYAEPVKG

SEQ ID NO: 10831 - protein, 11 aa, Artificial Sequence
  Description of Artificial Sequence: Synthetic peptide
  XENP019182 vhCDR3
YYGNYGGYFDV

SEQ ID NO: 10832 - protein, 11 aa, Artificial Sequence
  Description of Artificial Sequence: Synthetic peptide
  XENP019182 vlCDR1
RASQSVGNDVA

SEQ ID NO: 10833 - protein, 7 aa, Artificial Sequence
  Description of Artificial Sequence: Synthetic peptide
  XENP019182 vlCDR2
YASHRYT

SEQ ID NO: 10834 - protein, 9 aa, Artificial Sequence
  Description of Artificial Sequence: Synthetic peptide
  XENP019182 vlCDR3
QQDFSSPRT

SEQ ID NO: 10835 - protein, 249 aa, Artificial Sequence
  Description of Artificial Sequence: Synthetic polypeptide
  XENP019183 1G6_H1_L1.191_scFv(GKPGS)4
EVQLVESGGGLVKPGGSLRLSCAASGFTFSNYWMNWVRQAPGKGLEWVGEIRLKSNNYATHYAEPVKGRFTISRDDSKSTVYLQMNSLKTEDTAVYYCTRYYGNYGGYFDVWGAGTLVTVSSGKPGSGKPGSGKPGSGKPGSSIVMTQSPATLSVSPGERATLSCRASQSVGNDVAWYQQKPGQSPRLLINYASHRYTGVPDRFTGSGYGTEFTLTISSLQSEDFAVYFCQQDWSSPRTFGGGTKVEIK

SEQ ID NO: 10836 - protein, 122 aa, Artificial Sequence; identical to SEQ ID NO: 6246
  Description of Artificial Sequence: Synthetic polypeptide
  VH of XENP019183

SEQ ID NO: 10837 - protein, 107 aa, Artificial Sequence
  Description of Artificial Sequence: Synthetic polypeptide
  VL of XENP019183
SIVMTQSPATLSVSPGERATLSCRASQSVGNDVAWYQQKPGQSPRLLINYASHRYTGVPDRFTGSGYGTEFTLTISSLQSEDFAVYFCQQDWSSPRTFGGGTKVEIK

SEQ ID NO: 10838 - protein, 5 aa, Artificial Sequence
  Description of Artificial Sequence: Synthetic peptide
  XENP019183 vhCDR1
NYWMN

SEQ ID NO: 10839 - protein, 19 aa, Artificial Sequence
  Description of Artificial Sequence: Synthetic peptide
  XENP019183 vhCDR2
EIRLKSNNYATHYAEPVKG

SEQ ID NO: 10840 - protein, 11 aa, Artificial Sequence
  Description of Artificial Sequence: Synthetic peptide
  XENP019183 vhCDR3
YYGNYGGYFDV

SEQ ID NO: 10841 - protein, 11 aa, Artificial Sequence
  Description of Artificial Sequence: Synthetic peptide
  XENP019183 vlCDR1
RASQSVGNDVA

SEQ ID NO: 10842 - protein, 7 aa, Artificial Sequence
  Description of Artificial Sequence: Synthetic peptide
  XENP019183 vlCDR2
YASHRYT

SEQ ID NO: 10843 - protein, 9 aa, Artificial Sequence
  Description of Artificial Sequence: Synthetic peptide
  XENP019183 vlCDR3
QQDWSSPRT

SEQ ID NO: 10844 - protein, 480 aa, Artificial Sequence
  Description of Artificial Sequence: Synthetic polypeptide
  XENP019202 1G6_H1.278_L1_scFv(GKPGS)4
EVQLVESGGGLVKPGGSLRLSCVASGFTFSNYWMNWVRQAPGKGLEWVAEIRLYSNNYATHYAESVKGRFTISRDDSKSTLYLQMNNLKTEDTGVYYCTRYYGNYGGYFDVWGQGTLVTVSSGKPGSGKPGSGKPGSGKPGSSIVMTQSPATLSVSPGERATLSCRASQSVSNDVAWYQQKPGQSPRLLINYASHRYTGVPDRFTGSGYGTEFTLTISSLQSEDFAVYFCQQDYSSPRTFGGGTKVEIKEPKSSDKTHTCPPCPAPPVAGPSVFLFPPKPKDTLMISRTPEVTCVVVDVKHEDPEVKFNWYVDGVEVHNAKTKPREEQYNSTYRVVSVLTVLHQDWLNGKEYKCKVSNKALPAPIEKTISKAKGQPREPQVYTLPPSREQMTKNQVKLTCLVKGFYPSDIAVEWESNGQPENNYKTTPPVLDSDGSFFLYSKLTVDKSRWQQGNVFSCSVMHEALHNHYTQKSLSLSPGK

SEQ ID NO: 10845 - protein, 122 aa, Artificial Sequence
  Description of Artificial Sequence: Synthetic polypeptide
  VH of XENP019202
EVQLVESGGGLVKPGGSLRLSCVASGFTFSNYWMNWVRQAPGKGLEWVAEIRLYSNNYATHYAESVKGRFTISRDDSKSTLYLQMNNLKTEDTGVYYCTRYYGNYGGYFDVWGQGTLVTVSS

SEQ ID NO: 10846 - protein, 338 aa, Artificial Sequence
  Description of Artificial Sequence: Synthetic polypeptide
  VL of XENP019202
SIVMTQSPATLSVSPGERATLSCRASQSVSNDVAWYQQKPGQSPRLLINYASHRYTGVPDRFTGSGYGTEFTLTISSLQSEDFAVYFCQQDYSSPRTFGGGTKVEIKEPKSSDKTHTCPPCPAPPVAGPSVFLFPPKPKDTLMISRTPEVTCVVVDVKHEDPEVKFNWYVDGVEVHNAKTKPREEQYNSTYRVVSVLTVLHQDWLNGKEYKCKVSNKALPAPIEKTISKAKGQPREPQVYTLPPSREQMTKNQVKLTCLVKGFYPSDIAVEWESNGQPENNYKTTPPVLDSDGSFFLYSKLTVDKSRWQQGNVFSCSVMHEALHNHYTQKSLSLSPGK

SEQ ID NO: 10847 - protein, 5 aa, Artificial Sequence
  Description of Artificial Sequence: Synthetic peptide
  XENP019202 vhCDR1
NYWMN

SEQ ID NO: 10848 - protein, 19 aa, Artificial Sequence
  Description of Artificial Sequence: Synthetic peptide
  XENP019202 vhCDR2
EIRLYSNNYATHYAESVKG

SEQ ID NO: 10849 - protein, 11 aa, Artificial Sequence
  Description of Artificial Sequence: Synthetic peptide
  XENP019202 vhCDR3
YYGNYGGYFDV

SEQ ID NO: 10850 - protein, 11 aa, Artificial Sequence
  Description of Artificial Sequence: Synthetic peptide
  XENP019202 vlCDR1
RASQSVSNDVA

SEQ ID NO: 10851 - protein, 7 aa, Artificial Sequence
  Description of Artificial Sequence: Synthetic peptide
  XENP019202 vlCDR2
YASHRYT

SEQ ID NO: 10852 - protein, 9 aa, Artificial Sequence
  Description of Artificial Sequence: Synthetic peptide
  XENP019202 vlCDR3
QQDYSSPRT

SEQ ID NO: 10853 - protein, 249 aa, Artificial Sequence
  Description of Artificial Sequence: Synthetic polypeptide
  XENP019203 1G6_H1_L1.188_scFv(GKPGS)4
EVQLVESGGGLVKPGGSLRLSCAASGFTFSNYWMNWVRQAPGKGLEWVGEIRLKSNNYATHYAEPVKGRFTISRDDSKSTVYLQMNSLKTEDTAVYYCTRYYGNYGGYFDVWGAGTLVTVSSGKPGSGKPGSGKPGSGKPGSEIVMTQSPATLSVSPGERVTLTCRASQSVGNDVAWYQQKPGQSPRLLINYASHRYTGVPDRFTGSGYGTEFTLTISSVQSEDFAVYFCQQDFSSPRTFGGGTKVEIK

SEQ ID NO: 10854 - protein, 122 aa, Artificial Sequence; identical to SEQ ID NO: 6246
  Description of Artificial Sequence: Synthetic polypeptide
  VH of XENP019203

SEQ ID NO: 10855 - protein, 107 aa, Artificial Sequence
  Description of Artificial Sequence: Synthetic polypeptide
  VL of XENP019203
EIVMTQSPATLSVSPGERVTLTCRASQSVGNDVAWYQQKPGQSPRLLINYASHRYTGVPDRFTGSGYGTEFTLTISSVQSEDFAVYFCQQDFSSPRTFGGGTKVEIK

SEQ ID NO: 10856 - protein, 5 aa, Artificial Sequence
  Description of Artificial Sequence: Synthetic peptide
  XENP019203 vhCDR1
NYWMN

SEQ ID NO: 10857 - protein, 19 aa, Artificial Sequence
  Description of Artificial Sequence: Synthetic peptide
  XENP019203 vhCDR2
EIRLKSNNYATHYAEPVKG

SEQ ID NO: 10858 - protein, 11 aa, Artificial Sequence
  Description of Artificial Sequence: Synthetic peptide
  XENP019203 vhCDR3
YYGNYGGYFDV

SEQ ID NO: 10859 - protein, 11 aa, Artificial Sequence
  Description of Artificial Sequence: Synthetic peptide
  XENP019203 vlCDR1
RASQSVGNDVA

SEQ ID NO: 10860 - protein, 7 aa, Artificial Sequence
  Description of Artificial Sequence: Synthetic peptide
  XENP019203 vlCDR2
YASHRYT

SEQ ID NO: 10861 - protein, 9 aa, Artificial Sequence
  Description of Artificial Sequence: Synthetic peptide
  XENP019203 vlCDR3
QQDFSSPRT

SEQ ID NO: 10862 - protein, 249 aa, Artificial Sequence
  Description of Artificial Sequence: Synthetic polypeptide
  XENP019204 1G6_H1_L1.189_scFv(GKPGS)4
EVQLVESGGGLVKPGGSLRLSCAASGFTFSNYWMNWVRQAPGKGLEWVGEIRLKSNNYATHYAEPVKGRFTISRDDSKSTVYLQMNSLKTEDTAVYYCTRYYGNYGGYFDVWGAGTLVTVSSGKPGSGKPGSGKPGSGKPGSEIVLTQSPATLSVSPGERVTLTCRASQSVGNDVAWYQQKPGQAPRLLINYASHRYTGVPDRFTGSGYGTEFTLTISSVQSEDFAVYYCQQDFSSPRTFGGGTKVEIK

SEQ ID NO: 10863 - protein, 122 aa, Artificial Sequence; identical to SEQ ID NO: 6246
  Description of Artificial Sequence: Synthetic polypeptide
  VH of XENP019204

SEQ ID NO: 10864 - protein, 107 aa, Artificial Sequence
  Description of Artificial Sequence: Synthetic polypeptide
  VL of XENP019204
EIVLTQSPATLSVSPGERVTLTCRASQSVGNDVAWYQQKPGQAPRLLINYASHRYTGVPDRFTGSGYGTEFTLTISSVQSEDFAVYYCQQDFSSPRTFGGGTKVEIK

SEQ ID NO: 10865 - protein, 5 aa, Artificial Sequence
  Description of Artificial Sequence: Synthetic peptide
  XENP019204 vhCDR1
NYWMN

SEQ ID NO: 10866 - protein, 19 aa, Artificial Sequence
  Description of Artificial Sequence: Synthetic peptide
  XENP019204 vhCDR2
EIRLKSNNYATHYAEPVKG

SEQ ID NO: 10867 - protein, 11 aa, Artificial Sequence
  Description of Artificial Sequence: Synthetic peptide
  XENP019204 vhCDR3
YYGNYGGYFDV

SEQ ID NO: 10868 - protein, 11 aa, Artificial Sequence
  Description of Artificial Sequence: Synthetic peptide
  XENP019204 vlCDR1
RASQSVGNDVA

SEQ ID NO: 10869 - protein, 7 aa, Artificial Sequence
  Description of Artificial Sequence: Synthetic peptide
  XENP019204 vlCDR2
YASHRYT

SEQ ID NO: 10870 - protein, 9 aa, Artificial Sequence
  Description of Artificial Sequence: Synthetic peptide
  XENP019204 vlCDR3
QQDFSSPRT

SEQ ID NO: 10871 - protein, 249 aa, Artificial Sequence
  Description of Artificial Sequence: Synthetic polypeptide
  XENP019205 1G6_H1.278_L1.188_scFv(GKPGS)4
EVQLVESGGGLVKPGGSLRLSCVASGFTFSNYWMNWVRQAPGKGLEWVAEIRLYSNNYATHYAESVKGRFTISRDDSKSTLYLQMNNLKTEDTGVYYCTRYYGNYGGYFDVWGQGTLVTVSSGKPGSGKPGSGKPGSGKPGSEIVMTQSPATLSVSPGERVTLTCRASQSVGNDVAWYQQKPGQSPRLLINYASHRYTGVPDRFTGSGYGTEFTLTISSVQSEDFAVYFCQQDFSSPRTFGGGTKVEIK

SEQ ID NO: 10872 - protein, 122 aa, Artificial Sequence; identical to SEQ ID NO: 10845
  Description of Artificial Sequence: Synthetic polypeptide
  VH of XENP019205

SEQ ID NO: 10873 - protein, 107 aa, Artificial Sequence; identical to SEQ ID NO: 10855
  Description of Artificial Sequence: Synthetic polypeptide
  VL of XENP019205

SEQ ID NO: 10874 - protein, 5 aa, Artificial Sequence
  Description of Artificial Sequence: Synthetic peptide
  XENP019205 vhCDR1
NYWMN

SEQ ID NO: 10875 - protein, 19 aa, Artificial Sequence
  Description of Artificial Sequence: Synthetic peptide
  XENP019205 vhCDR2
EIRLYSNNYATHYAESVKG

SEQ ID NO: 10876 - protein, 11 aa, Artificial Sequence
  Description of Artificial Sequence: Synthetic peptide
  XENP019205 vhCDR3
YYGNYGGYFDV

SEQ ID NO: 10877 - protein, 11 aa, Artificial Sequence
  Description of Artificial Sequence: Synthetic peptide
  XENP019205 vlCDR1
RASQSVGNDVA

SEQ ID NO: 10878 - protein, 7 aa, Artificial Sequence
  Description of Artificial Sequence: Synthetic peptide
  XENP019205 vlCDR2
YASHRYT

SEQ ID NO: 10879 - protein, 9 aa, Artificial Sequence
  Description of Artificial Sequence: Synthetic peptide
  XENP019205 vlCDR3
QQDFSSPRT

SEQ ID NO: 10880 - protein, 249 aa, Artificial Sequence
  Description of Artificial Sequence: Synthetic polypeptide
  XENP019206 1G6_H1.278_L1.189_scFv(GKPGS)4
EVQLVESGGGLVKPGGSLRLSCVASGFTFSNYWMNWVRQAPGKGLEWVAEIRLYSNNYATHYAESVKGRFTISRDDSKSTLYLQMNNLKTEDTGVYYCTRYYGNYGGYFDVWGQGTLVTVSSGKPGSGKPGSGKPGSGKPGSEIVLTQSPATLSVSPGERVTLTCRASQSVGNDVAWYQQKPGQAPRLLINYASHRYTGVPDRFTGSGYGTEFTLTISSVQSEDFAVYYCQQDFSSPRTFGGGTKVEIK

SEQ ID NO: 10881 - protein, 122 aa, Artificial Sequence; identical to SEQ ID NO: 10845
  Description of Artificial Sequence: Synthetic polypeptide
  VH of XENP019206

SEQ ID NO: 10882 - protein, 107 aa, Artificial Sequence; identical to SEQ ID NO: 10864
  Description of Artificial Sequence: Synthetic polypeptide
  VL of XENP019206

SEQ ID NO: 10883 - protein, 5 aa, Artificial Sequence
  Description of Artificial Sequence: Synthetic peptide
  XENP019206 vhCDR1
NYWMN

SEQ ID NO: 10884 - protein, 19 aa, Artificial Sequence
  Description of Artificial Sequence: Synthetic peptide
  XENP019206 vhCDR2
EIRLYSNNYATHYAESVKG

SEQ ID NO: 10885 - protein, 11 aa, Artificial Sequence
  Description of Artificial Sequence: Synthetic peptide
  XENP019206 vhCDR3
YYGNYGGYFDV

SEQ ID NO: 10886 - protein, 11 aa, Artificial Sequence
  Description of Artificial Sequence: Synthetic peptide
  XENP019206 vlCDR1
RASQSVGNDVA

SEQ ID NO: 10887 - protein, 7 aa, Artificial Sequence
  Description of Artificial Sequence: Synthetic peptide
  XENP019206 vlCDR2
YASHRYT

SEQ ID NO: 10888 - protein, 9 aa, Artificial Sequence
  Description of Artificial Sequence: Synthetic peptide
  XENP019206 vlCDR3
QQDFSSPRT

SEQ ID NO: 10889 - protein, 249 aa, Artificial Sequence
  Description of Artificial Sequence: Synthetic polypeptide
  XENP019207 1G6_L1.188_H1.278_scFv(GKPGS)4
EIVMTQSPATLSVSPGERVTLTCRASQSVGNDVAWYQQKPGQSPRLLINYASHRYTGVPDRFTGSGYGTEFTLTISSVQSEDFAVYFCQQDFSSPRTFGGGTKVEIKGKPGSGKPGSGKPGSGKPGSEVQLVESGGGLVKPGGSLRLSCVASGFTFSNYWMNWVRQAPGKGLEWVAEIRLYSNNYATHYAESVKGRFTISRDDSKSTLYLQMNNLKTEDTGVYYCTRYYGNYGGYFDVWGQGTLVTVSS

SEQ ID NO: 10890 - protein, 107 aa, Artificial Sequence; identical to SEQ ID NO: 10855
  Description of Artificial Sequence: Synthetic polypeptide
  VH of XENP019207

SEQ ID NO: 10891 - protein, 122 aa, Artificial Sequence; identical to SEQ ID NO: 10845
  Description of Artificial Sequence: Synthetic polypeptide
  VL of XENP019207

SEQ ID NO: 10892 - protein, 11 aa, Artificial Sequence
  Description of Artificial Sequence: Synthetic peptide
  XENP019207 vhCDR1
RASQSVGNDVA

SEQ ID NO: 10893 - protein, 7 aa, Artificial Sequence
  Description of Artificial Sequence: Synthetic peptide
  XENP019207 vhCDR2
YASHRYT

SEQ ID NO: 10894 - protein, 9 aa, Artificial Sequence
  Description of Artificial Sequence: Synthetic peptide
  XENP019207 vhCDR3
QQDFSSPRT

SEQ ID NO: 10895 - protein, 5 aa, Artificial Sequence
  Description of Artificial Sequence: Synthetic peptide
  XENP019207 vlCDR1
NYWMN

SEQ ID NO: 10896 - protein, 19 aa, Artificial Sequence
  Description of Artificial Sequence: Synthetic peptide
  XENP019207 vlCDR2
EIRLYSNNYATHYAESVKG

SEQ ID NO: 10897 - protein, 11 aa, Artificial Sequence
  Description of Artificial Sequence: Synthetic peptide
  XENP019207 vlCDR3
YYGNYGGYFDV

SEQ ID NO: 10898 - protein, 249 aa, Artificial Sequence
  Description of Artificial Sequence: Synthetic polypeptide
  XENP019208 1G6_L1.189_H1.278_scFv(GKPGS)4
EIVLTQSPATLSVSPGERVTLTCRASQSVGNDVAWYQQKPGQAPRLLINYASHRYTGVPDRFTGSGYGTEFTLTISSVQSEDFAVYYCQQDFSSPRTFGGGTKVEIKGKPGSGKPGSGKPGSGKPGSEVQLVESGGGLVKPGGSLRLSCVASGFTFSNYWMNWVRQAPGKGLEWVAEIRLYSNNYATHYAESVKGRFTISRDDSKSTLYLQMNNLKTEDTGVYYCTRYYGNYGGYFDVWGQGTLVTVSS

SEQ ID NO: 10899 - protein, 107 aa, Artificial Sequence; identical to SEQ ID NO: 10864
  Description of Artificial Sequence: Synthetic polypeptide
  VH of XENP019208

SEQ ID NO: 10900 - protein, 122 aa, Artificial Sequence; identical to SEQ ID NO: 10845
  Description of Artificial Sequence: Synthetic polypeptide
  VL of XENP019208

SEQ ID NO: 10901 - protein, 11 aa, Artificial Sequence
  Description of Artificial Sequence: Synthetic peptide
  XENP019208 vhCDR1
RASQSVGNDVA

SEQ ID NO: 10902 - protein, 7 aa, Artificial Sequence
  Description of Artificial Sequence: Synthetic peptide
  XENP019208 vhCDR2
YASHRYT

SEQ ID NO: 10903 - protein, 9 aa, Artificial Sequence
  Description of Artificial Sequence: Synthetic peptide
  XENP019208 vhCDR3
QQDFSSPRT

SEQ ID NO: 10904 - protein, 5 aa, Artificial Sequence
  Description of Artificial Sequence: Synthetic peptide
  XENP019208 vlCDR1
NYWMN

SEQ ID NO: 10905 - protein, 19 aa, Artificial Sequence
  Description of Artificial Sequence: Synthetic peptide
  XENP019208 vlCDR2
EIRLYSNNYATHYAESVKG

SEQ ID NO: 10906 - protein, 11 aa, Artificial Sequence
  Description of Artificial Sequence: Synthetic peptide
  XENP019208 vlCDR3
YYGNYGGYFDV

SEQ ID NO: 10907 - protein, 249 aa, Artificial Sequence
  Description of Artificial Sequence: Synthetic polypeptide
  XENP019618 1G6_H1.279_L1.189_scFv(GKPGS)4
EVQLVESGGGLVKPGGSLRLSCVASGFTFSNYWMNWVRQAPGKGLEWVAEIRLYSNNYATHYAESVKGRFTISRDDSKSTLYLQMNNLKTEDTGVYYCTRYYGNYGGYFDVWGRGTLVTVSSGKPGSGKPGSGKPGSGKPGSEIVLTQSPATLSVSPGERVTLTCRASQSVGNDVAWYQQKPGQAPRLLINYASHRYTGVPDRFTGSGYGTEFTLTISSVQSEDFAVYYCQQDFSSPRTFGGGTKVEIK

SEQ ID NO: 10908 - protein, 122 aa, Artificial Sequence
  Description of Artificial Sequence: Synthetic polypeptide
  VH of XENP019618
EVQLVESGGGLVKPGGSLRLSCVASGFTFSNYWMNWVRQAPGKGLEWVAEIRLYSNNYATHYAESVKGRFTISRDDSKSTLYLQMNNLKTEDTGVYYCTRYYGNYGGYFDVWGRGTLVTVSS

SEQ ID NO: 10909 - protein, 107 aa, Artificial Sequence; identical to SEQ ID NO: 10864
  Description of Artificial Sequence: Synthetic polypeptide
  VL of XENP019618

SEQ ID NO: 10910 - protein, 5 aa, Artificial Sequence
  Description of Artificial Sequence: Synthetic peptide
  XENP019618 vhCDR1
NYWMN

SEQ ID NO: 10911 - protein, 19 aa, Artificial Sequence
  Description of Artificial Sequence: Synthetic peptide
  XENP019618 vhCDR2
EIRLYSNNYATHYAESVKG

SEQ ID NO: 10912 - protein, 11 aa, Artificial Sequence
  Description of Artificial Sequence: Synthetic peptide
  XENP019618 vhCDR3
YYGNYGGYFDV

SEQ ID NO: 10913 - protein, 11 aa, Artificial Sequence
  Description of Artificial Sequence: Synthetic peptide
  XENP019618 vlCDR1
RASQSVGNDVA

SEQ ID NO: 10914 - protein, 7 aa, Artificial Sequence
  Description of Artificial Sequence: Synthetic peptide
  XENP019618 vlCDR2
YASHRYT

SEQ ID NO: 10915 - protein, 9 aa, Artificial Sequence
  Description of Artificial Sequence: Synthetic peptide
  XENP019618 vlCDR3
QQDFSSPRT

SEQ ID NO: 10916 - protein, 249 aa, Artificial Sequence
  Description of Artificial Sequence: Synthetic polypeptide
  XENP019619 1G6_H1.280_L1.189_scFv(GKPGS)4
EVQLVESGGGLVKPGGSLRLTCVASGFTFSNYWMNWVRQAPGKGLEWVAEIRLYSNNYATHYAESVKGRFTISRDDSKSTLYLQMNNLKTEDTGVYYCTRYYGNYGGYFDVWGRGTLVTVSSGKPGSGKPGSGKPGSGKPGSEIVLTQSPATLSVSPGERVTLTCRASQSVGNDVAWYQQKPGQAPRLLINYASHRYTGVPDRFTGSGYGTEFTLTISSVQSEDFAVYYCQQDFSSPRTFGGGTKVEIK

SEQ ID NO: 10917 - protein, 122 aa, Artificial Sequence
  Description of Artificial Sequence: Synthetic polypeptide
  VH of XENP019619
EVQLVESGGGLVKPGGSLRLTCVASGFTFSNYWMNWVRQAPGKGLEWVAEIRLYSNNYATHYAESVKGRFTISRDDSKSTLYLQMNNLKTEDTGVYYCTRYYGNYGGYFDVWGRGTLVTVSS

SEQ ID NO: 10918 - protein, 107 aa, Artificial Sequence; identical to SEQ ID NO: 10864
  Description of Artificial Sequence: Synthetic polypeptide
  VL of XENP019619

SEQ ID NO: 10919 - protein, 5 aa, Artificial Sequence
  Description of Artificial Sequence: Synthetic peptide
  XENP019619 vhCDR1
NYWMN

SEQ ID NO: 10920 - protein, 19 aa, Artificial Sequence
  Description of Artificial Sequence: Synthetic peptide
  XENP019619 vhCDR2
EIRLYSNNYATHYAESVKG

SEQ ID NO: 10921 - protein, 11 aa, Artificial Sequence
  Description of Artificial Sequence: Synthetic peptide
  XENP019619 vhCDR3
YYGNYGGYFDV

SEQ ID NO: 10922 - protein, 11 aa, Artificial Sequence
  Description of Artificial Sequence: Synthetic peptide
  XENP019619 vlCDR1
RASQSVGNDVA

SEQ ID NO: 10923 - protein, 7 aa, Artificial Sequence
  Description of Artificial Sequence: Synthetic peptide
  XENP019619 vlCDR2
YASHRYT

SEQ ID NO: 10924 - protein, 9 aa, Artificial Sequence
  Description of Artificial Sequence: Synthetic peptide
  XENP019619 vlCDR3
QQDFSSPRT

SEQ ID NO: 10925 - protein, 249 aa, Artificial Sequence
  Description of Artificial Sequence: Synthetic polypeptide
  XENP019620 1G6_H1.281_L1.189_scFv(GKPGS)4
EVQLVESGGGLVKPGGSLRLSCVASGFTFSNYWMNWVRQAPGKGLEWVAEIRLYSNNYATHYAESVKGRFTISRDDSKSMLYLQMNNLKTEDTGVYYCTRYYGNYGGYFDVWGRGTLVTVSSGKPGSGKPGSGKPGSGKPGSEIVLTQSPATLSVSPGERVTLTCRASQSVGNDVAWYQQKPGQAPRLLINYASHRYTGVPDRFTGSGYGTEFTLTISSVQSEDFAVYYCQQDFSSPRTFGGGTKVEIK

SEQ ID NO: 10926 - protein, 122 aa, Artificial Sequence
  Description of Artificial Sequence: Synthetic polypeptide
  VH of XENP019620
EVQLVESGGGLVKPGGSLRLSCVASGFTFSNYWMNWVRQAPGKGLEWVAEIRLYSNNYATHYAESVKGRFTISRDDSKSMLYLQMNNLKTEDTGVYYCTRYYGNYGGYFDVWGRGTLVTVSS

SEQ ID NO: 10927 - protein, 107 aa, Artificial Sequence; identical to SEQ ID NO: 10864
  Description of Artificial Sequence: Synthetic polypeptide
  VL of XENP019620

SEQ ID NO: 10928 - protein, 5 aa, Artificial Sequence
  Description of Artificial Sequence: Synthetic peptide
  XENP019620 vhCDR1
NYWMN

SEQ ID NO: 10929 - protein, 19 aa, Artificial Sequence
  Description of Artificial Sequence: Synthetic peptide
  XENP019620 vhCDR2
EIRLYSNNYATHYAESVKG

SEQ ID NO: 10930 - protein, 11 aa, Artificial Sequence
  Description of Artificial Sequence: Synthetic peptide
  XENP019620 vhCDR3
YYGNYGGYFDV

SEQ ID NO: 10931 - protein, 11 aa, Artificial Sequence
  Description of Artificial Sequence: Synthetic peptide
  XENP019620 vlCDR1
RASQSVGNDVA

SEQ ID NO: 10932 - protein, 7 aa, Artificial Sequence
  Description of Artificial Sequence: Synthetic peptide
  XENP019620 vlCDR2
YASHRYT

SEQ ID NO: 10933 - protein, 9 aa, Artificial Sequence
  Description of Artificial Sequence: Synthetic peptide
  XENP019620 vlCDR3
QQDFSSPRT

SEQ ID NO: 10934 - protein, 249 aa, Artificial Sequence
  Description of Artificial Sequence: Synthetic polypeptide
  XENP019621 1G6_H1.282_L1.189_scFv(GKPGS)4
EVQLVESGGGLVKPGGSLRLTCVASGFTFSNYWMNWVRQAPGKGLEWVAEIRLYSNNYATHYAESVKGRFTISRDDSKSMLYLQMNNLKTEDTGVYYCTRYYGNYGGYFDVWGRGTLVTVSSGKPGSGKPGSGKPGSGKPGSEIVLTQSPATLSVSPGERVTLTCRASQSVGNDVAWYQQKPGQAPRLLINYASHRYTGVPDRFTGSGYGTEFTLTISSVQSEDFAVYYCQQDFSSPRTFGGGTKVEIK

SEQ ID NO: 10935 - protein, 122 aa, Artificial Sequence
  Description of Artificial Sequence: Synthetic polypeptide
  VH of XENP019621
EVQLVESGGGLVKPGGSLRLTCVASGFTFSNYWMNWVRQAPGKGLEWVAEIRLYSNNYATHYAESVKGRFTISRDDSKSMLYLQMNNLKTEDTGVYYCTRYYGNYGGYFDVWGRGTLVTVSS

SEQ ID NO: 10936 - protein, 107 aa, Artificial Sequence; identical to SEQ ID NO: 10864
  Description of Artificial Sequence: Synthetic polypeptide
  VL of XENP019621

SEQ ID NO: 10937 - protein, 5 aa, Artificial Sequence
  Description of Artificial Sequence: Synthetic peptide
  XENP019621 vhCDR1
NYWMN

SEQ ID NO: 10938 - protein, 19 aa, Artificial Sequence
  Description of Artificial Sequence: Synthetic peptide
  XENP019621 vhCDR2
EIRLYSNNYATHYAESVKG

SEQ ID NO: 10939 - protein, 11 aa, Artificial Sequence
  Description of Artificial Sequence: Synthetic peptide
  XENP019621 vhCDR3
YYGNYGGYFDV

SEQ ID NO: 10940 - protein, 11 aa, Artificial Sequence
  Description of Artificial Sequence: Synthetic peptide
  XENP019621 vlCDR1
RASQSVGNDVA

SEQ ID NO: 10941 - protein, 7 aa, Artificial Sequence
  Description of Artificial Sequence: Synthetic peptide
  XENP019621 vlCDR2
YASHRYT

SEQ ID NO: 10942 - protein, 9 aa, Artificial Sequence
  Description of Artificial Sequence: Synthetic peptide
  XENP019621 vlCDR3
QQDFSSPRT

SEQ ID NO: 10943 - protein, 249 aa, Artificial Sequence
  Description of Artificial Sequence: Synthetic polypeptide
  XENP019622 1G6_H1.283_L1.189_scFv(GKPGS)4
EVQLVESGGGLVKPGGSLRLSCVASGFTFSNYWMNWVRQAPGKGLEWVCEIRLYSNNYATHYAESVKGRFTCSRDDSKSTLYLQMNNLKTEDTGVYYCTRYYGNYGGYFDVWGQGTLVTVSSGKPGSGKPGSGKPGSGKPGSEIVLTQSPATLSVSPGERVTLTCRASQSVGNDVAWYQQKPGQAPRLLINYASHRYTGVPDRFTGSGYGTEFTLTISSVQSEDFAVYYCQQDFSSPRTFGGGTKVEIK

SEQ ID NO: 10944 - protein, 122 aa, Artificial Sequence
  Description of Artificial Sequence: Synthetic polypeptide
  VH of XENP019622
EVQLVESGGGLVKPGGSLRLSCVASGFTFSNYWMNWVRQAPGKGLEWVCEIRLYSNNYATHYAESVKGRFTCSRDDSKSTLYLQMNNLKTEDTGVYYCTRYYGNYGGYFDVWGQGTLVTVSS

SEQ ID NO: 10945 - protein, 107 aa, Artificial Sequence; identical to SEQ ID NO: 10864
  Description of Artificial Sequence: Synthetic polypeptide
  VL of XENP019622

SEQ ID NO: 10946 - protein, 5 aa, Artificial Sequence
  Description of Artificial Sequence: Synthetic peptide
  XENP019622 vhCDR1
NYWMN

SEQ ID NO: 10947 - protein, 19 aa, Artificial Sequence
  Description of Artificial Sequence: Synthetic peptide
  XENP019622 vhCDR2
EIRLYSNNYATHYAESVKG

SEQ ID NO: 10948 - protein, 11 aa, Artificial Sequence
  Description of Artificial Sequence: Synthetic peptide
  XENP019622 vhCDR3
YYGNYGGYFDV

SEQ ID NO: 10949 - protein, 11 aa, Artificial Sequence
  Description of Artificial Sequence: Synthetic peptide
  XENP019622 vlCDR1
RASQSVGNDVA

SEQ ID NO: 10950 - protein, 7 aa, Artificial Sequence
  Description of Artificial Sequence: Synthetic peptide
  XENP019622 vlCDR2
YASHRYT

SEQ ID NO: 10951 - protein, 9 aa, Artificial Sequence
  Description of Artificial Sequence: Synthetic peptide
  XENP019622 vlCDR3
QQDFSSPRT

SEQ ID NO: 10952 - protein, 249 aa, Artificial Sequence
  Description of Artificial Sequence: Synthetic polypeptide
  XENP019623 1G6_H1.284_L1.189_scFv(GKPGS)4
EVQLVESGGGLVKPGGSLRLSCVASGFTFSNYWMNWVRQAPGKGLEWVCEIRLYSNNYATHYAESVKGRFTCSRDDSKSTLYLQMNNLKTEDTGVYYCTRYYGNYGGYFDVWGRGTLVTVSSGKPGSGKPGSGKPGSGKPGSEIVLTQSPATLSVSPGERVTLTCRASQSVGNDVAWYQQKPGQAPRLLINYASHRYTGVPDRFTGSGYGTEFTLTISSVQSEDFAVYYCQQDFSSPRTFGGGTKVEIK

SEQ ID NO: 10953 - protein, 122 aa, Artificial Sequence
  Description of Artificial Sequence: Synthetic polypeptide
  VH of XENP019623
EVQLVESGGGLVKPGGSLRLSCVASGFTFSNYWMNWVRQAPGKGLEWVCEIRLYSNNYATHYAESVKGRFTCSRDDSKSTLYLQMNNLKTEDTGVYYCTRYYGNYGGYFDVWGRGTLVTVSS

SEQ ID NO: 10954 - protein, 107 aa, Artificial Sequence; identical to SEQ ID NO: 10864
  Description of Artificial Sequence: Synthetic polypeptide
  VL of XENP019623

SEQ ID NO: 10955 - protein, 5 aa, Artificial Sequence
  Description of Artificial Sequence: Synthetic peptide
  XENP019623 vhCDR1
NYWMN

SEQ ID NO: 10956 - protein, 19 aa, Artificial Sequence
  Description of Artificial Sequence: Synthetic peptide
  XENP019623 vhCDR2
EIRLYSNNYATHYAESVKG

SEQ ID NO: 10957 - protein, 11 aa, Artificial Sequence
  Description of Artificial Sequence: Synthetic peptide
  XENP019623 vhCDR3
YYGNYGGYFDV

SEQ ID NO: 10958 - protein, 11 aa, Artificial Sequence
  Description of Artificial Sequence: Synthetic peptide
  XENP019623 vlCDR1
RASQSVGNDVA

SEQ ID NO: 10959 - protein, 7 aa, Artificial Sequence
  Description of Artificial Sequence: Synthetic peptide
  XENP019623 vlCDR2
YASHRYT

SEQ ID NO: 10960 - protein, 9 aa, Artificial Sequence
  Description of Artificial Sequence: Synthetic peptide
  XENP019623 vlCDR3
QQDFSSPRT

SEQ ID NO: 10961 - protein, 249 aa, Artificial Sequence
  Description of Artificial Sequence: Synthetic polypeptide
  XENP019624 1G6_H1.285_L1.189_scFv(GKPGS)4
EVQLVESGGGLVKPGGSLRLTCVASGFTFSNYWMNWVRQAPGKGLEWVCEIRLYSNNYATHYAESVKGRFTCSRDDSKSMLYLQMNNLKTEDTGVYYCTRYYGNYGGYFDVWGRGTLVTVSSGKPGSGKPGSGKPGSGKPGSEIVLTQSPATLSVSPGERVTLTCRASQSVGNDVAWYQQKPGQAPRLLINYASHRYTGVPDRFTGSGYGTEFTLTISSVQSEDFAVYYCQQDFSSPRTFGGGTKVEIK

SEQ ID NO: 10962 - protein, 122 aa, Artificial Sequence
  Description of Artificial Sequence: Synthetic polypeptide
  VH of XENP019624
EVQLVESGGGLVKPGGSLRLTCVASGFTFSNYWMNWVRQAPGKGLEWVCEIRLYSNNYATHYAESVKGRFTCSRDDSKSMLYLQMNNLKTEDTGVYYCTRYYGNYGGYFDVWGRGTLVTVSS

SEQ ID NO: 10963 - protein, 107 aa, Artificial Sequence; identical to SEQ ID NO: 10864
  Description of Artificial Sequence: Synthetic polypeptide
  VL of XENP019624

SEQ ID NO: 10964 - protein, 5 aa, Artificial Sequence
  Description of Artificial Sequence: Synthetic peptide
  XENP019624 vhCDR1
NYWMN

SEQ ID NO: 10965 - protein, 19 aa, Artificial Sequence
  Description of Artificial Sequence: Synthetic peptide
  XENP019624 vhCDR2
EIRLYSNNYATHYAESVKG

SEQ ID NO: 10966 - protein, 11 aa, Artificial Sequence
  Description of Artificial Sequence: Synthetic peptide
  XENP019624 vhCDR3
YYGNYGGYFDV

SEQ ID NO: 10967 - protein, 11 aa, Artificial Sequence
  Description of Artificial Sequence: Synthetic peptide
  XENP019624 vlCDR1
RASQSVGNDVA

SEQ ID NO: 10968 - protein, 7 aa, Artificial Sequence
  Description of Artificial Sequence: Synthetic peptide
  XENP019624 vlCDR2
YASHRYT

SEQ ID NO: 10969 - protein, 9 aa, Artificial Sequence
  Description of Artificial Sequence: Synthetic peptide
  XENP019624 vlCDR3
QQDFSSPRT

SEQ ID NO: 10970 - protein, 249 aa, Artificial Sequence
  Description of Artificial Sequence: Synthetic polypeptide
  XENP019625 1G6_H1.286_L1.189_scFv(GKPGS)4
EVQLVESGGGLVKPGGSLRLSCVASGFTFSNYWMNWVRQAPGKGLEWVAEIRLYSDNYATHYAESVKGRFTISRDDSKSTLYLQMNNLKTEDTGVYYCTRYYGNYGGYFDVWGQGTLVTVSSGKPGSGKPGSGKPGSGKPGSEIVLTQSPATLSVSPGERVTLTCRASQSVGNDVAWYQQKPGQAPRLLINYASHRYTGVPDRFTGSGYGTEFTLTISSVQSEDFAVYYCQQDFSSPRTFGGGTKVEIK

SEQ ID NO: 10971 - protein, 122 aa, Artificial Sequence
  Description of Artificial Sequence: Synthetic polypeptide
  VH of XENP019625
EVQLVESGGGLVKPGGSLRLSCVASGFTFSNYWMNWVRQAPGKGLEWVAEIRLYSDNYATHYAESVKGRFTISRDDSKSTLYLQMNNLKTEDTGVYYCTRYYGNYGGYFDVWGQGTLVTVSS

SEQ ID NO: 10972 - protein, 107 aa, Artificial Sequence; identical to SEQ ID NO: 10864
  Description of Artificial Sequence: Synthetic polypeptide
  VL of XENP019625

SEQ ID NO: 10973 - protein, 5 aa, Artificial Sequence
  Description of Artificial Sequence: Synthetic peptide
  XENP019625 vhCDR1
NYWMN

SEQ ID NO: 10974 - protein, 19 aa, Artificial Sequence
  Description of Artificial Sequence: Synthetic peptide
  XENP019625 vhCDR2
EIRLYSDNYATHYAESVKG

SEQ ID NO: 10975 - protein, 11 aa, Artificial Sequence
  Description of Artificial Sequence: Synthetic peptide
  XENP019625 vhCDR3
YYGNYGGYFDV

SEQ ID NO: 10976 - protein, 11 aa, Artificial Sequence
  Description of Artificial Sequence: Synthetic peptide
  XENP019625 vlCDR1
RASQSVGNDVA

SEQ ID NO: 10977 - protein, 7 aa, Artificial Sequence
  Description of Artificial Sequence: Synthetic peptide
  XENP019625 vlCDR2
YASHRYT

SEQ ID NO: 10978 - protein, 9 aa, Artificial Sequence
  Description of Artificial Sequence: Synthetic peptide
  XENP019625 vlCDR3
QQDFSSPRT

SEQ ID NO: 10979 - protein, 249 aa, Artificial Sequence
  Description of Artificial Sequence: Synthetic polypeptide
  XENP019626 1G6_H1.278_L1.192_scFv(GKPGS)4
EVQLVESGGGLVKPGGSLRLSCVASGFTFSNYWMNWVRQAPGKGLEWVAEIRLYSNNYATHYAESVKGRFTISRDDSKSTLYLQMNNLKTEDTGVYYCTRYYGNYGGYFDVWGQGTLVTVSSGKPGSGKPGSGKPGSGKPGSEIVLTQSPATLSASPGERVTLTCRASQSVGNDVAWYQQKPGQAPRLLINYASHRYTGVPDRFTGSGYGTEFTLTISSVQSEDFAVYYCQQDFSSPRTFGGGTKVEIK

SEQ ID NO: 10980 - protein, 122 aa, Artificial Sequence; identical to SEQ ID NO: 10845
  Description of Artificial Sequence: Synthetic polypeptide
  VH of XENP019626

SEQ ID NO: 10981 - protein, 107 aa, Artificial Sequence
  Description of Artificial Sequence: Synthetic polypeptide
  VL of XENP019626
EIVLTQSPATLSASPGERVTLTCRASQSVGNDVAWYQQKPGQAPRLLINYASHRYTGVPDRFTGSGYGTEFTLTISSVQSEDFAVYYCQQDFSSPRTFGGGTKVEIK

SEQ ID NO: 10982 - protein, 5 aa, Artificial Sequence
  Description of Artificial Sequence: Synthetic peptide
  XENP019626 vhCDR1
NYWMN

SEQ ID NO: 10983 - protein, 19 aa, Artificial Sequence
  Description of Artificial Sequence: Synthetic peptide
  XENP019626 vhCDR2
EIRLYSNNYATHYAESVKG

SEQ ID NO: 10984 - protein, 11 aa, Artificial Sequence
  Description of Artificial Sequence: Synthetic peptide
  XENP019626 vhCDR3
YYGNYGGYFDV

SEQ ID NO: 10985 - protein, 11 aa, Artificial Sequence
  Description of Artificial Sequence: Synthetic peptide
  XENP019626 vlCDR1
RASQSVGNDVA

SEQ ID NO: 10986 - protein, 7 aa, Artificial Sequence
  Description of Artificial Sequence: Synthetic peptide
  XENP019626 vlCDR2
YASHRYT

SEQ ID NO: 10987 - protein, 9 aa, Artificial Sequence
  Description of Artificial Sequence: Synthetic peptide
  XENP019626 vlCDR3
QQDFSSPRT

SEQ ID NO: 10988 - protein, 249 aa, Artificial Sequence
  Description of Artificial Sequence: Synthetic polypeptide
  XENP019627 1G6_H1.278_L1.193_scFv(GKPGS)4
EVQLVESGGGLVKPGGSLRLSCVASGFTFSNYWMNWVRQAPGKGLEWVAEIRLYSNNYATHYAESVKGRFTISRDDSKSTLYLQMNNLKTEDTGVYYCTRYYGNYGGYFDVWGQGTLVTVSSGKPGSGKPGSGKPGSGKPGSEIVLTQSPATLSVSPGERVTLTCRASQSVGNDVAWYQQKPGQAPRLLINYASHRYTGVPDRFTGSGYGTEFTLTISSVQSEDFGVYYCQQDFSSPRTFGGGTKVEIK

SEQ ID NO: 10989 - protein, 122 aa, Artificial Sequence; identical to SEQ ID NO: 10845
  Description of Artificial Sequence: Synthetic polypeptide
  VH of XENP019627

SEQ ID NO: 10990 - protein, 107 aa, Artificial Sequence
  Description of Artificial Sequence: Synthetic polypeptide
  VL of XENP019627
EIVLTQSPATLSVSPGERVTLTCRASQSVGNDVAWYQQKPGQAPRLLINYASHRYTGVPDRFTGSGYGTEFTLTISSVQSEDFGVYYCQQDFSSPRTFGGGTKVEIK

SEQ ID NO: 10991 - protein, 5 aa, Artificial Sequence
  Description of Artificial Sequence: Synthetic peptide
  XENP019627 vhCDR1
NYWMN

SEQ ID NO: 10992 - protein, 19 aa, Artificial Sequence
  Description of Artificial Sequence: Synthetic peptide
  XENP019627 vhCDR2
EIRLYSNNYATHYAESVKG

SEQ ID NO: 10993 - protein, 11 aa, Artificial Sequence
  Description of Artificial Sequence: Synthetic peptide
  XENP019627 vhCDR3
YYGNYGGYFDV

SEQ ID NO: 10994 - protein, 11 aa, Artificial Sequence
  Description of Artificial Sequence: Synthetic peptide
  XENP019627 vlCDR1
RASQSVGNDVA

SEQ ID NO: 10995 - protein, 7 aa, Artificial Sequence
  Description of Artificial Sequence: Synthetic peptide
  XENP019627 vlCDR2
YASHRYT

SEQ ID NO: 10996 - protein, 9 aa, Artificial Sequence
  Description of Artificial Sequence: Synthetic peptide
  XENP019627 vlCDR3
QQDFSSPRT

SEQ ID NO: 10997 - protein, 249 aa, Artificial Sequence
  Description of Artificial Sequence: Synthetic polypeptide
  XENP019628 1G6_H1.278_L1.194_scFv(GKPGS)4
EVQLVESGGGLVKPGGSLRLSCVASGFTFSNYWMNWVRQAPGKGLEWVAEIRLYSNNYATHYAESVKGRFTISRDDSKSTLYLQMNNLKTEDTGVYYCTRYYGNYGGYFDVWGQGTLVTVSSGKPGSGKPGSGKPGSGKPGSEIVLTQSPATLSASPGERVTLTCRASQSVGNDVAWYQQKPGQAPRLLINYASHRYTGVPDRFTGSGYGTEFTLTISSVQSEDFGVYYCQQDFSSPRTFGGGTKVEIK

SEQ ID NO: 10998 - protein, 122 aa, Artificial Sequence; identical to SEQ ID NO: 10845
  Description of Artificial Sequence: Synthetic polypeptide
  VH of XENP019628

SEQ ID NO: 10999 - protein, 107 aa, Artificial Sequence
  Description of Artificial Sequence: Synthetic polypeptide
  VL of XENP019628
EIVLTQSPATLSASPGERVTLTCRASQSVGNDVAWYQQKPGQAPRLLINYASHRYTGVPDRFTGSGYGTEFTLTISSVQSEDFGVYYCQQDFSSPRTFGGGTKVEIK

SEQ ID NO: 11000 - protein, 5 aa, Artificial Sequence
  Description of Artificial Sequence: Synthetic peptide
  XENP019628 vhCDR1
NYWMN

SEQ ID NO: 11001 - protein, 19 aa, Artificial Sequence
  Description of Artificial Sequence: Synthetic peptide
  XENP019628 vhCDR2
EIRLYSNNYATHYAESVKG

SEQ ID NO: 11002 - protein, 11 aa, Artificial Sequence
  Description of Artificial Sequence: Synthetic peptide
  XENP019628 vhCDR3
YYGNYGGYFDV

SEQ ID NO: 11003 - protein, 11 aa, Artificial Sequence
  Description of Artificial Sequence: Synthetic peptide
  XENP019628 vlCDR1
RASQSVGNDVA

SEQ ID NO: 11004 - protein, 7 aa, Artificial Sequence
  Description of Artificial Sequence: Synthetic peptide
  XENP019628 vlCDR2
YASHRYT

SEQ ID NO: 11005 - protein, 9 aa, Artificial Sequence
  Description of Artificial Sequence: Synthetic peptide
  XENP019628 vlCDR3
QQDFSSPRT

SEQ ID NO: 11006 - protein, 249 aa, Artificial Sequence
  Description of Artificial Sequence: Synthetic polypeptide
  XENP019629 1G6_H1.278_L1.195_scFv(GKPGS)4
EVQLVESGGGLVKPGGSLRLSCVASGFTFSNYWMNWVRQAPGKGLEWVAEIRLYSNNYATHYAESVKGRFTISRDDSKSTLYLQMNNLKTEDTGVYYCTRYYGNYGGYFDVWGQGTLVTVSSGKPGSGKPGSGKPGSGKPGSEIVLTQSPATLSVSPGERVTLTCRASQSVGNDVAWYQQKPGQAPRLLCNYASHRYTGVPDRFTCSGYGTEFTLTISSVQSEDFAVYYCQQDFSSPRTFGGGTKVEIK

SEQ ID NO: 11007 - protein, 122 aa, Artificial Sequence; identical to SEQ ID NO: 10845
  Description of Artificial Sequence: Synthetic polypeptide
  VH of XENP019629

SEQ ID NO: 11008 - protein, 107 aa, Artificial Sequence
  Description of Artificial Sequence: Synthetic polypeptide
  VL of XENP019629
EIVLTQSPATLSVSPGERVTLTCRASQSVGNDVAWYQQKPGQAPRLLCNYASHRYTGVPDRFTCSGYGTEFTLTISSVQSEDFAVYYCQQDFSSPRTFGGGTKVEIK

SEQ ID NO: 11009 - protein, 5 aa, Artificial Sequence
  Description of Artificial Sequence: Synthetic peptide
  XENP019629 vhCDR1
NYWMN

SEQ ID NO: 11010 - protein, 19 aa, Artificial Sequence
  Description of Artificial Sequence: Synthetic peptide
  XENP019629 vhCDR2
EIRLYSNNYATHYAESVKG

SEQ ID NO: 11011 - protein, 11 aa, Artificial Sequence
  Description of Artificial Sequence: Synthetic peptide
  XENP019629 vhCDR3
YYGNYGGYFDV

SEQ ID NO: 11012 - protein, 11 aa, Artificial Sequence
  Description of Artificial Sequence: Synthetic peptide
  XENP019629 vlCDR1
RASQSVGNDVA

SEQ ID NO: 11013 - protein, 9 aa, Artificial Sequence
  Description of Artificial Sequence: Synthetic peptide
  XENP019629 vlCDR2
CNYASHRYT

SEQ ID NO: 11014 - protein, 9 aa, Artificial Sequence
  Description of Artificial Sequence: Synthetic peptide
  XENP019629 vlCDR3
QQDFSSPRT

SEQ ID NO: 11015 - protein, 249 aa, Artificial Sequence
  Description of Artificial Sequence: Synthetic polypeptide
  XENP019630 1G6_H1.278_L1.196_scFv(GKPGS)4
EVQLVESGGGLVKPGGSLRLSCVASGFTFSNYWMNWVRQAPGKGLEWVAEIRLYSNNYATHYAESVKGRFTISRDDSKSTLYLQMNNLKTEDTGVYYCTRYYGNYGGYFDVWGQGTLVTVSSGKPGSGKPGSGKPGSGKPGSEIVLTQSPATLSASPGERVTLTCRASQSVGNDVAWYQQKPGQAPRLLCNYASHRYTGVPDRFTCSGYGTEFTLTISSVQSEDFGVYYCQQDFSSPRTFGGGTKVEIK

SEQ ID NO: 11016 - protein, 122 aa, Artificial Sequence; identical to SEQ ID NO: 10845
  Description of Artificial Sequence: Synthetic polypeptide
  VH of XENP019630

SEQ ID NO: 11017 - protein, 107 aa, Artificial Sequence
  Description of Artificial Sequence: Synthetic polypeptide
  VL of XENP019630
EIVLTQSPATLSASPGERVTLTCRASQSVGNDVAWYQQKPGQAPRLLCNYASHRYTGVPDRFTCSGYGTEFTLTISSVQSEDFGVYYCQQDFSSPRTFGGGTKVEIK

SEQ ID NO: 11018 - protein, 5 aa, Artificial Sequence
  Description of Artificial Sequence: Synthetic peptide
  XENP019630 vhCDR1
NYWMN

SEQ ID NO: 11019 - protein, 19 aa, Artificial Sequence
  Description of Artificial Sequence: Synthetic peptide
  XENP019630 vhCDR2
EIRLYSNNYATHYAESVKG

SEQ ID NO: 11020 - protein, 11 aa, Artificial Sequence
  Description of Artificial Sequence: Synthetic peptide
  XENP019630 vhCDR3
YYGNYGGYFDV

SEQ ID NO: 11021 - protein, 11 aa, Artificial Sequence
  Description of Artificial Sequence: Synthetic peptide
  XENP019630 vlCDR1
RASQSVGNDVA

SEQ ID NO: 11022 - protein, 9 aa, Artificial Sequence
  Description of Artificial Sequence: Synthetic peptide
  XENP019630 vlCDR2
CNYASHRYT

SEQ ID NO: 11023 - protein, 9 aa, Artificial Sequence
  Description of Artificial Sequence: Synthetic peptide
  XENP019630 vlCDR3
QQDFSSPRT

SEQ ID NO: 11024 - protein, 249 aa, Artificial Sequence
  Description of Artificial Sequence: Synthetic polypeptide
  XENP019631 1G6_H1.278_L1.197_scFv(GKPGS)4
EVQLVESGGGLVKPGGSLRLSCVASGFTFSNYWMNWVRQAPGKGLEWVAEIRLYSNNYATHYAESVKGRFTISRDDSKSTLYLQMNNLKTEDTGVYYCTRYYGNYGGYFDVWGQGTLVTVSSGKPGSGKPGSGKPGSGKPGSEIVLTQSPATLSASPGERVTLTCRASQSVGNDVAWYQQKPGQAPRLLCNYASHRYTSVPDRFTCSGYGTEFTLTISSVQSEDFGVYYCQQDFSSPRTFGGGTKVEIK

SEQ ID NO: 11025 - protein, 122 aa, Artificial Sequence; identical to SEQ ID NO: 10845
  Description of Artificial Sequence: Synthetic polypeptide
  VH of XENP019631

SEQ ID NO: 11026 - protein, 107 aa, Artificial Sequence
  Description of Artificial Sequence: Synthetic polypeptide
  VL of XENP019631
EIVLTQSPATLSASPGERVTLTCRASQSVGNDVAWYQQKPGQAPRLLCNYASHRYTSVPDRFTCSGYGTEFTLTISSVQSEDFGVYYCQQDFSSPRTFGGGTKVEIK

SEQ ID NO: 11027 - protein, 5 aa, Artificial Sequence
  Description of Artificial Sequence: Synthetic peptide
  XENP019631 vhCDR1
NYWMN

SEQ ID NO: 11028 - protein, 19 aa, Artificial Sequence
  Description of Artificial Sequence: Synthetic peptide
  XENP019631 vhCDR2
EIRLYSNNYATHYAESVKG

SEQ ID NO: 11029 - protein, 11 aa, Artificial Sequence
  Description of Artificial Sequence: Synthetic peptide
  XENP019631 vhCDR3
YYGNYGGYFDV

SEQ ID NO: 11030 - protein, 11 aa, Artificial Sequence
  Description of Artificial Sequence: Synthetic peptide
  XENP019631 vlCDR1
RASQSVGNDVA

SEQ ID NO: 11031 - protein, 9 aa, Artificial Sequence
  Description of Artificial Sequence: Synthetic peptide
  XENP019631 vlCDR2
CNYASHRYT

SEQ ID NO: 11032 - protein, 9 aa, Artificial Sequence
  Description of Artificial Sequence: Synthetic peptide
  XENP019631 vlCDR3
QQDFSSPRT

SEQ ID NO: 11033 - protein, 249 aa, Artificial Sequence
  Description of Artificial Sequence: Synthetic polypeptide
  XENP019632 1G6_H1.278_L1.198_scFv(GKPGS)4
EVQLVESGGGLVKPGGSLRLSCVASGFTFSNYWMNWVRQAPGKGLEWVAEIRLYSNNYATHYAESVKGRFTISRDDSKSTLYLQMNNLKTEDTGVYYCTRYYGNYGGYFDVWGQGTLVTVSSGKPGSGKPGSGKPGSGKPGSEIVLTQSPSTLSVSPGERVTLTCRASQSVGNDVAWYQQKPGQAPRLLINYASHRYTGVPDRFTGSGYGTEFTLTISSVQSEDFAVYYCQQDFSSPRTFGGGTKVEIK

SEQ ID NO: 11034 - protein, 122 aa, Artificial Sequence; identical to SEQ ID NO: 10845
  Description of Artificial Sequence: Synthetic polypeptide
  VH of XENP019632

SEQ ID NO: 11035 - protein, 107 aa, Artificial Sequence
  Description of Artificial Sequence: Synthetic polypeptide
  VL of XENP019632
EIVLTQSPSTLSVSPGERVTLTCRASQSVGNDVAWYQQKPGQAPRLLINYASHRYTGVPDRFTGSGYGTEFTLTISSVQSEDFAVYYCQQDFSSPRTFGGGTKVEIK

SEQ ID NO: 11036 - protein, 5 aa, Artificial Sequence
  Description of Artificial Sequence: Synthetic peptide
  XENP019632 vhCDR1
NYWMN

SEQ ID NO: 11037 - protein, 19 aa, Artificial Sequence
  Description of Artificial Sequence: Synthetic peptide
  XENP019632 vhCDR2
EIRLYSNNYATHYAESVKG

SEQ ID NO: 11038 - protein, 11 aa, Artificial Sequence
  Description of Artificial Sequence: Synthetic peptide
  XENP019632 vhCDR3
YYGNYGGYFDV

SEQ ID NO: 11039 - protein, 11 aa, Artificial Sequence
  Description of Artificial Sequence: Synthetic peptide
  XENP019632 vlCDR1
RASQSVGNDVA

SEQ ID NO: 11040 - protein, 7 aa, Artificial Sequence
  Description of Artificial Sequence: Synthetic peptide
  XENP019632 vlCDR2
YASHRYT

SEQ ID NO: 11041 - protein, 9 aa, Artificial Sequence
  Description of Artificial Sequence: Synthetic peptide
  XENP019632 vlCDR3
QQDFSSPRT

SEQ ID NO: 11042 - protein, 249 aa, Artificial Sequence
  Description of Artificial Sequence: Synthetic polypeptide
  XENP019633 1G6_H1.278_L1.199_scFv(GKPGS)4
EVQLVESGGGLVKPGGSLRLSCVASGFTFSNYWMNWVRQAPGKGLEWVAEIRLYSNNYATHYAESVKGRFTISRDDSKSTLYLQMNNLKTEDTGVYYCTRYYGNYGGYFDVWGQGTLVTVSSGKPGSGKPGSGKPGSGKPGSEIVLTQSPDTLSVSPGERVTLTCRASQSVGNDVAWYQQKPGQAPRLLINYASHRYTGVPDRFTGSGYGTEFTLTISSVQSEDFAVYYCQQDFSSPRTFGGGTKVEIK

SEQ ID NO: 11043 - protein, 122 aa, Artificial Sequence; identical to SEQ ID NO: 10845
  Description of Artificial Sequence: Synthetic polypeptide
  VH of XENP019633

SEQ ID NO: 11044 - protein, 107 aa, Artificial Sequence
  Description of Artificial Sequence: Synthetic polypeptide
  VL of XENP019633
EIVLTQSPDTLSVSPGERVTLTCRASQSVGNDVAWYQQKPGQAPRLLINYASHRYTGVPDRFTGSGYGTEFTLTISSVQSEDFAVYYCQQDFSSPRTFGGGTKVEIK

SEQ ID NO: 11045 - protein, 5 aa, Artificial Sequence
  Description of Artificial Sequence: Synthetic peptide
  XENP019633 vhCDR1
NYWMN

SEQ ID NO: 11046 - protein, 19 aa, Artificial Sequence
  Description of Artificial Sequence: Synthetic peptide
  XENP019633 vhCDR2
EIRLYSNNYATHYAESVKG

SEQ ID NO: 11047 - protein, 11 aa, Artificial Sequence
  Description of Artificial Sequence: Synthetic peptide
  XENP019633 vhCDR3
YYGNYGGYFDV

SEQ ID NO: 11048 - protein, 11 aa, Artificial Sequence
  Description of Artificial Sequence: Synthetic peptide
  XENP019633 vlCDR1
RASQSVGNDVA

SEQ ID NO: 11049 - protein, 7 aa, Artificial Sequence
  Description of Artificial Sequence: Synthetic peptide
  XENP019633 vlCDR2
YASHRYT

SEQ ID NO: 11050 - protein, 9 aa, Artificial Sequence
  Description of Artificial Sequence: Synthetic peptide
  XENP019633 vlCDR3
QQDFSSPRT

SEQ ID NO: 11051 - protein, 249 aa, Artificial Sequence
  Description of Artificial Sequence: Synthetic polypeptide
  XENP019634 1G6_H1.278_L1.200_scFv(GKPGS)4
EVQLVESGGGLVKPGGSLRLSCVASGFTFSNYWMNWVRQAPGKGLEWVAEIRLYSNNYATHYAESVKGRFTISRDDSKSTLYLQMNNLKTEDTGVYYCTRYYGNYGGYFDVWGQGTLVTVSSGKPGSGKPGSGKPGSGKPGSEIVLTQSPATLAVSPGERVTLTCRASQSVGNDVAWYQQKPGQAPRLLINYASHRYTGVPDRFTGSGYGTEFTLTISSVQSEDFAVYYCQQDFSSPRTFGGGTKVEIK

SEQ ID NO: 11052 - protein, 122 aa, Artificial Sequence; identical to SEQ ID NO: 10845
  Description of Artificial Sequence: Synthetic polypeptide
  VH of XENP019634

SEQ ID NO: 11053 - protein, 107 aa, Artificial Sequence
  Description of Artificial Sequence: Synthetic polypeptide
  VL of XENP019634
EIVLTQSPATLAVSPGERVTLTCRASQSVGNDVAWYQQKPGQAPRLLINYASHRYTGVPDRFTGSGYGTEFTLTISSVQSEDFAVYYCQQDFSSPRTFGGGTKVEIK

SEQ ID NO: 11054 - protein, 5 aa, Artificial Sequence
  Description of Artificial Sequence: Synthetic peptide
  XENP019634 vhCDR1
NYWMN

SEQ ID NO: 11055 - protein, 19 aa, Artificial Sequence
  Description of Artificial Sequence: Synthetic peptide
  XENP019634 vhCDR2
EIRLYSNNYATHYAESVKG

SEQ ID NO: 11056 - protein, 11 aa, Artificial Sequence
  Description of Artificial Sequence: Synthetic peptide
  XENP019634 vhCDR3
YYGNYGGYFDV

SEQ ID NO: 11057 - protein, 11 aa, Artificial Sequence
  Description of Artificial Sequence: Synthetic peptide
  XENP019634 vlCDR1
RASQSVGNDVA

SEQ ID NO: 11058 - protein, 7 aa, Artificial Sequence
  Description of Artificial Sequence: Synthetic peptide
  XENP019634 vlCDR2
YASHRYT

SEQ ID NO: 11059 - protein, 9 aa, Artificial Sequence
  Description of Artificial Sequence: Synthetic peptide
  XENP019634 vlCDR3
QQDFSSPRT

SEQ ID NO: 11060 - protein, 249 aa, Artificial Sequence; identical to SEQ ID NO: 10979
  Description of Artificial Sequence: Synthetic polypeptide
  XENP019635 1G6_H1.278_L1.201_scFv(GKPGS)4

SEQ ID NO: 11061 - protein, 122 aa, Artificial Sequence; identical to SEQ ID NO: 10845
  Description of Artificial Sequence: Synthetic polypeptide
  VH of XENP019635

SEQ ID NO: 11062 - protein, 107 aa, Artificial Sequence; identical to SEQ ID NO: 10981
  Description of Artificial Sequence: Synthetic polypeptide
  VL of XENP019635

SEQ ID NO: 11063 - protein, 5 aa, Artificial Sequence
  Description of Artificial Sequence: Synthetic peptide
  XENP019635 vhCDR1
NYWMN

SEQ ID NO: 11064 - protein, 19 aa, Artificial Sequence
  Description of Artificial Sequence: Synthetic peptide
  XENP019635 vhCDR2
EIRLYSNNYATHYAESVKG

SEQ ID NO: 11065 - protein, 11 aa, Artificial Sequence
  Description of Artificial Sequence: Synthetic peptide
  XENP019635 vhCDR3
YYGNYGGYFDV

SEQ ID NO: 11066 - protein, 11 aa, Artificial Sequence
  Description of Artificial Sequence: Synthetic peptide
  XENP019635 vlCDR1
RASQSVGNDVA

SEQ ID NO: 11067 - protein, 7 aa, Artificial Sequence
  Description of Artificial Sequence: Synthetic peptide
  XENP019635 vlCDR2
YASHRYT

SEQ ID NO: 11068 - protein, 9 aa, Artificial Sequence
  Description of Artificial Sequence: Synthetic peptide
  XENP019635 vlCDR3
QQDFSSPRT

SEQ ID NO: 11069 - protein, 249 aa, Artificial Sequence
  Description of Artificial Sequence: Synthetic polypeptide
  XENP019636 1G6_H1.278_L1.202_scFv(GKPGS)4
EVQLVESGGGLVKPGGSLRLSCVASGFTFSNYWMNWVRQAPGKGLEWVAEIRLYSNNYATHYAESVKGRFTISRDDSKSTLYLQMNNLKTEDTGVYYCTRYYGNYGGYFDVWGQGTLVTVSSGKPGSGKPGSGKPGSGKPGSEIVLTQSPATLSVSVGERVTLTCRASQSVGNDVAWYQQKPGQAPRLLINYASHRYTGVPDRFTGSGYGTEFTLTISSVQSEDFAVYYCQQDFSSPRTFGGGTKVEIK

SEQ ID NO: 11070 - protein, 122 aa, Artificial Sequence; identical to SEQ ID NO: 10845
  Description of Artificial Sequence: Synthetic polypeptide
  VH of XENP019636

SEQ ID NO: 11071 - protein, 107 aa, Artificial Sequence
  Description of Artificial Sequence: Synthetic polypeptide
  VL of XENP019636
EIVLTQSPATLSVSVGERVTLTCRASQSVGNDVAWYQQKPGQAPRLLINYASHRYTGVPDRFTGSGYGTEFTLTISSVQSEDFAVYYCQQDFSSPRTFGGGTKVEIK

SEQ ID NO: 11072 - protein, 5 aa, Artificial Sequence
  Description of Artificial Sequence: Synthetic peptide
  XENP019636 vhCDR1
NYWMN

SEQ ID NO: 11073 - protein, 19 aa, Artificial Sequence
  Description of Artificial Sequence: Synthetic peptide
  XENP019636 vhCDR2
EIRLYSNNYATHYAESVKG

SEQ ID NO: 11074 - protein, 11 aa, Artificial Sequence
  Description of Artificial Sequence: Synthetic peptide
  XENP019636 vhCDR3
YYGNYGGYFDV

SEQ ID NO: 11075 - protein, 11 aa, Artificial Sequence
  Description of Artificial Sequence: Synthetic peptide
  XENP019636 vlCDR1
RASQSVGNDVA

SEQ ID NO: 11076 - protein, 7 aa, Artificial Sequence
  Description of Artificial Sequence: Synthetic peptide
  XENP019636 vlCDR2
YASHRYT

SEQ ID NO: 11077 - protein, 9 aa, Artificial Sequence
  Description of Artificial Sequence: Synthetic peptide
  XENP019636 vlCDR3
QQDFSSPRT

SEQ ID NO: 11078 - protein, 249 aa, Artificial Sequence
  Description of Artificial Sequence: Synthetic polypeptide
  XENP019637 1G6_H1.278_L1.203_scFv(GKPGS)4
EVQLVESGGGLVKPGGSLRLSCVASGFTFSNYWMNWVRQAPGKGLEWVAEIRLYSNNYATHYAESVKGRFTISRDDSKSTLYLQMNNLKTEDTGVYYCTRYYGNYGGYFDVWGQGTLVTVSSGKPGSGKPGSGKPGSGKPGSEIVLTQSPATLSVSLGERVTLTCRASQSVGNDVAWYQQKPGQAPRLLINYASHRYTGVPDRFTGSGYGTEFTLTISSVQSEDFAVYYCQQDFSSPRTFGGGTKVEIK

SEQ ID NO: 11079 - protein, 122 aa, Artificial Sequence; identical to SEQ ID NO: 10845
  Description of Artificial Sequence: Synthetic polypeptide
  VH of XENP019637

SEQ ID NO: 11080 - protein, 107 aa, Artificial Sequence
  Description of Artificial Sequence: Synthetic polypeptide
  VL of XENP019637
EIVLTQSPATLSVSLGERVTLTCRASQSVGNDVAWYQQKPGQAPRLLINYASHRYTGVPDRFTGSGYGTEFTLTISSVQSEDFAVYYCQQDFSSPRTFGGGTKVEIK

SEQ ID NO: 11081 - protein, 5 aa, Artificial Sequence
  Description of Artificial Sequence: Synthetic peptide
  XENP019637 vhCDR1
NYWMN

SEQ ID NO: 11082 - protein, 19 aa, Artificial Sequence
  Description of Artificial Sequence: Synthetic peptide
  XENP019637 vhCDR2
EIRLYSNNYATHYAESVKG

SEQ ID NO: 11083 - protein, 11 aa, Artificial Sequence
  Description of Artificial Sequence: Synthetic peptide
  XENP019637 vhCDR3
YYGNYGGYFDV

SEQ ID NO: 11084 - protein, 11 aa, Artificial Sequence
  Description of Artificial Sequence: Synthetic peptide
  XENP019637 vlCDR1
RASQSVGNDVA

SEQ ID NO: 11085 - protein, 7 aa, Artificial Sequence
  Description of Artificial Sequence: Synthetic peptide
  XENP019637 vlCDR2
YASHRYT

SEQ ID NO: 11086 - protein, 9 aa, Artificial Sequence
  Description of Artificial Sequence: Synthetic peptide
  XENP019637 vlCDR3
QQDFSSPRT

SEQ ID NO: 11087 - protein, 249 aa, Artificial Sequence
  Description of Artificial Sequence: Synthetic polypeptide
  XENP019638 1G6_H1.278_L1.204_scFv(GKPGS)4
EVQLVESGGGLVKPGGSLRLSCVASGFTFSNYWMNWVRQAPGKGLEWVAEIRLYSNNYATHYAESVKGRFTISRDDSKSTLYLQMNNLKTEDTGVYYCTRYYGNYGGYFDVWGQGTLVTVSSGKPGSGKPGSGKPGSGKPGSEIVLTQSPATLSVSPGERVTLNCRASQSVGNDVAWYQQKPGQAPRLLINYASHRYTGVPDRFTGSGYGTEFTLTISSVQSEDFAVYYCQQDFSSPRTFGGGTKVEIK

SEQ ID NO: 11088 - protein, 122 aa, Artificial Sequence; identical to SEQ ID NO: 10845
  Description of Artificial Sequence: Synthetic polypeptide
  VH of XENP019638

SEQ ID NO: 11089 - protein, 107 aa, Artificial Sequence
  Description of Artificial Sequence: Synthetic polypeptide
  VL of XENP019638
EIVLTQSPATLSVSPGERVTLNCRASQSVGNDVAWYQQKPGQAPRLLINYASHRYTGVPDRFTGSGYGTEFTLTISSVQSEDFAVYYCQQDFSSPRTFGGGTKVEIK

SEQ ID NO: 11090 - protein, 5 aa, Artificial Sequence
  Description of Artificial Sequence: Synthetic peptide
  XENP019638 vhCDR1
NYWMN

SEQ ID NO: 11091 - protein, 19 aa, Artificial Sequence
  Description of Artificial Sequence: Synthetic peptide
  XENP019638 vhCDR2
EIRLYSNNYATHYAESVKG

SEQ ID NO: 11092 - protein, 11 aa, Artificial Sequence
  Description of Artificial Sequence: Synthetic peptide
  XENP019638 vhCDR3
YYGNYGGYFDV

SEQ ID NO: 11093 - protein, 11 aa, Artificial Sequence
  Description of Artificial Sequence: Synthetic peptide
  XENP019638 vlCDR1
RASQSVGNDVA

SEQ ID NO: 11094 - protein, 7 aa, Artificial Sequence
  Description of Artificial Sequence: Synthetic peptide
  XENP019638 vlCDR2
YASHRYT

SEQ ID NO: 11095 - protein, 9 aa, Artificial Sequence
  Description of Artificial Sequence: Synthetic peptide
  XENP019638 vlCDR3
QQDFSSPRT

SEQ ID NO: 11096 - protein, 249 aa, Artificial Sequence
  Description of Artificial Sequence: Synthetic polypeptide
  XENP019639 1G6_H1.278_L1.205_scFv(GKPGS)4
EVQLVESGGGLVKPGGSLRLSCVASGFTFSNYWMNWVRQAPGKGLEWVAEIRLYSNNYATHYAESVKGRFTISRDDSKSTLYLQMNNLKTEDTGVYYCTRYYGNYGGYFDVWGQGTLVTVSSGKPGSGKPGSGKPGSGKPGSEIVLTQSPATLSVSPGERVTLTCRASQSVGNDVAWYQQKPGKAPRLLINYASHRYTGVPDRFTGSGYGTEFTLTISSVQSEDFAVYYCQQDFSSPRTFGGGTKVEIK

SEQ ID NO: 11097 - protein, 122 aa, Artificial Sequence; identical to SEQ ID NO: 10845
  Description of Artificial Sequence: Synthetic polypeptide
  VH of XENP019639

SEQ ID NO: 11098 - protein, 107 aa, Artificial Sequence
  Description of Artificial Sequence: Synthetic polypeptide
  VL of XENP019639
EIVLTQSPATLSVSPGERVTLTCRASQSVGNDVAWYQQKPGKAPRLLINYASHRYTGVPDRFTGSGYGTEFTLTISSVQSEDFAVYYCQQDFSSPRTFGGGTKVEIK

SEQ ID NO: 11099 - protein, 5 aa, Artificial Sequence
  Description of Artificial Sequence: Synthetic peptide
  XENP019639 vhCDR1
NYWMN

SEQ ID NO: 11100 - protein, 19 aa, Artificial Sequence
  Description of Artificial Sequence: Synthetic peptide
  XENP019639 vhCDR2
EIRLYSNNYATHYAESVKG

SEQ ID NO: 11101 - protein, 11 aa, Artificial Sequence
  Description of Artificial Sequence: Synthetic peptide
  XENP019639 vhCDR3
YYGNYGGYFDV

SEQ ID NO: 11102 - protein, 11 aa, Artificial Sequence
  Description of Artificial Sequence: Synthetic peptide
  XENP019639 vlCDR1
RASQSVGNDVA

SEQ ID NO: 11103 - protein, 7 aa, Artificial Sequence
  Description of Artificial Sequence: Synthetic peptide
  XENP019639 vlCDR2
YASHRYT

SEQ ID NO: 11104 - protein, 9 aa, Artificial Sequence
  Description of Artificial Sequence: Synthetic peptide
  XENP019639 vlCDR3
QQDFSSPRT

SEQ ID NO: 11105 - protein, 249 aa, Artificial Sequence
  Description of Artificial Sequence: Synthetic polypeptide
  XENP019640 1G6_H1.278_L1.206_scFv(GKPGS)4
EVQLVESGGGLVKPGGSLRLSCVASGFTFSNYWMNWVRQAPGKGLEWVAEIRLYSNNYATHYAESVKGRFTISRDDSKSTLYLQMNNLKTEDTGVYYCTRYYGNYGGYFDVWGQGTLVTVSSGKPGSGKPGSGKPGSGKPGSEIVLTQSPATLSVSPGERVTLTCRASQSVGNDVAWYQQKPGQAPRLLINYASHRYTGVPDRFTGSGYGTEFTLTISSVQPEDFAVYYCQQDFSSPRTFGGGTKVEIK

SEQ ID NO: 11106 - protein, 122 aa, Artificial Sequence; identical to SEQ ID NO: 10845
  Description of Artificial Sequence: Synthetic polypeptide
  VH of XENP019640

SEQ ID NO: 11107 - protein, 107 aa, Artificial Sequence
  Description of Artificial Sequence: Synthetic polypeptide
  VL of XENP019640
EIVLTQSPATLSVSPGERVTLTCRASQSVGNDVAWYQQKPGQAPRLLINYASHRYTGVPDRFTGSGYGTEFTLTISSVQPEDFAVYYCQQDFSSPRTFGGGTKVEIK

SEQ ID NO: 11108 - protein, 5 aa, Artificial Sequence
  Description of Artificial Sequence: Synthetic peptide
  XENP019640 vhCDR1
NYWMN

SEQ ID NO: 11109 - protein, 19 aa, Artificial Sequence
  Description of Artificial Sequence: Synthetic peptide
  XENP019640 vhCDR2
EIRLYSNNYATHYAESVKG

SEQ ID NO: 11110 - protein, 11 aa, Artificial Sequence
  Description of Artificial Sequence: Synthetic peptide
  XENP019640 vhCDR3
YYGNYGGYFDV

SEQ ID NO: 11111 - protein, 11 aa, Artificial Sequence
  Description of Artificial Sequence: Synthetic peptide
  XENP019640 vlCDR1
RASQSVGNDVA

SEQ ID NO: 11112 - protein, 7 aa, Artificial Sequence
  Description of Artificial Sequence: Synthetic peptide
  XENP019640 vlCDR2
YASHRYT

SEQ ID NO: 11113 - protein, 9 aa, Artificial Sequence
  Description of Artificial Sequence: Synthetic peptide
  XENP019640 vlCDR3
QQDFSSPRT

SEQ ID NO: 11114 - protein, 249 aa, Artificial Sequence
  Description of Artificial Sequence: Synthetic polypeptide
  XENP019641 1G6_H1.278_L1.207_scFv(GKPGS)4
EVQLVESGGGLVKPGGSLRLSCVASGFTFSNYWMNWVRQAPGKGLEWVAEIRLYSNNYATHYAESVKGRFTISRDDSKSTLYLQMNNLKTEDTGVYYCTRYYGNYGGYFDVWGQGTLVTVSSGKPGSGKPGSGKPGSGKPGSEIVLTQSPATLSVSPGERVTLTCRASQSVGNDVAWYQQKPGQAPRLLINYASHRYTGVPDRFTGSGYGTEFTLTISSVQSEDVAVYYCQQDFSSPRTFGGGTKVEIK

SEQ ID NO: 11115 - protein, 122 aa, Artificial Sequence; identical to SEQ ID NO: 10845
  Description of Artificial Sequence: Synthetic polypeptide
  VH of XENP019641

SEQ ID NO: 11116 - protein, 107 aa, Artificial Sequence
  Description of Artificial Sequence: Synthetic polypeptide
  VL of XENP019641
EIVLTQSPATLSVSPGERVTLTCRASQSVGNDVAWYQQKPGQAPRLLINYASHRYTGVPDRFTGSGYGTEFTLTISSVQSEDVAVYYCQQDFSSPRTFGGGTKVEIK

SEQ ID NO: 11117 - protein, 5 aa, Artificial Sequence
  Description of Artificial Sequence: Synthetic peptide
  XENP019641 vhCDR1
NYWMN

SEQ ID NO: 11118 - protein, 19 aa, Artificial Sequence
  Description of Artificial Sequence: Synthetic peptide
  XENP019641 vhCDR2
EIRLYSNNYATHYAESVKG

SEQ ID NO: 11119 - protein, 11 aa, Artificial Sequence
  Description of Artificial Sequence: Synthetic peptide
  XENP019641 vhCDR3
YYGNYGGYFDV

SEQ ID NO: 11120 - protein, 11 aa, Artificial Sequence
  Description of Artificial Sequence: Synthetic peptide
  XENP019641 vlCDR1
RASQSVGNDVA

SEQ ID NO: 11121 - protein, 7 aa, Artificial Sequence
  Description of Artificial Sequence: Synthetic peptide
  XENP019641 vlCDR2
YASHRYT

SEQ ID NO: 11122 - protein, 9 aa, Artificial Sequence
  Description of Artificial Sequence: Synthetic peptide
  XENP019641 vlCDR3
QQDFSSPRT

SEQ ID NO: 11123 - protein, 249 aa, Artificial Sequence
  Description of Artificial Sequence: Synthetic polypeptide
  XENP019642 1G6_H1.278_L1.208_scFv(GKPGS)4
EVQLVESGGGLVKPGGSLRLSCVASGFTFSNYWMNWVRQAPGKGLEWVAEIRLYSNNYATHYAESVKGRFTISRDDSKSTLYLQMNNLKTEDTGVYYCTRYYGNYGGYFDVWGQGTLVTVSSGKPGSGKPGSGKPGSGKPGSEIVLTQSPATLSVSPGERVTLTCRASQSVGNDVAWYQQKPGQAPRLLINYASHRYTGVPDRFTGSGYGTEFTLTISSVQSEDFATYYCQQDFSSPRTFGGGTKVEIK

SEQ ID NO: 11124 - protein, 122 aa, Artificial Sequence; identical to SEQ ID NO: 10845
  Description of Artificial Sequence: Synthetic polypeptide
  VH of XENP019642

SEQ ID NO: 11125 - protein, 107 aa, Artificial Sequence
  Description of Artificial Sequence: Synthetic polypeptide
  VL of XENP019642
EIVLTQSPATLSVSPGERVTLTCRASQSVGNDVAWYQQKPGQAPRLLINYASHRYTGVPDRFTGSGYGTEFTLTISSVQSEDFATYYCQQDFSSPRTFGGGTKVEIK

SEQ ID NO: 11126 - protein, 5 aa, Artificial Sequence
  Description of Artificial Sequence: Synthetic peptide
  XENP019642 vhCDR1
NYWMN

SEQ ID NO: 11127 - protein, 19 aa, Artificial Sequence
  Description of Artificial Sequence: Synthetic peptide
  XENP019642 vhCDR2
EIRLYSNNYATHYAESVKG

SEQ ID NO: 11128 - protein, 11 aa, Artificial Sequence
  Description of Artificial Sequence: Synthetic peptide
  XENP019642 vhCDR3
YYGNYGGYFDV

SEQ ID NO: 11129 - protein, 11 aa, Artificial Sequence
  Description of Artificial Sequence: Synthetic peptide
  XENP019642 vlCDR1
RASQSVGNDVA

SEQ ID NO: 11130 - protein, 7 aa, Artificial Sequence
  Description of Artificial Sequence: Synthetic peptide
  XENP019642 vlCDR2
YASHRYT

SEQ ID NO: 11131 - protein, 9 aa, Artificial Sequence
  Description of Artificial Sequence: Synthetic peptide
  XENP019642 vlCDR3
QQDFSSPRT

SEQ ID NO: 11132 - protein, 249 aa, Artificial Sequence
  Description of Artificial Sequence: Synthetic polypeptide
  XENP019643 1G6_L1.189_H1.279_scFv(GKPGS)4
EIVLTQSPATLSVSPGERVTLTCRASQSVGNDVAWYQQKPGQAPRLLINYASHRYTGVPDRFTGSGYGTEFTLTISSVQSEDFAVYYCQQDFSSPRTFGGGTKVEIKGKPGSGKPGSGKPGSGKPGSEVQLVESGGGLVKPGGSLRLSCVASGFTFSNYWMNWVRQAPGKGLEWVAEIRLYSNNYATHYAESVKGRFTISRDDSKSTLYLQMNNLKTEDTGVYYCTRYYGNYGGYFDVWGRGTLVTVSS

SEQ ID NO: 11133 - protein, 107 aa, Artificial Sequence; identical to SEQ ID NO: 10864
  Description of Artificial Sequence: Synthetic polypeptide
  VH of XENP019643

SEQ ID NO: 11134 - protein, 122 aa, Artificial Sequence; identical to SEQ ID NO: 10908
  Description of Artificial Sequence: Synthetic polypeptide
  VL of XENP019643

SEQ ID NO: 11135 - protein, 11 aa, Artificial Sequence
  Description of Artificial Sequence: Synthetic peptide
  XENP019643 vhCDR1
RASQSVGNDVA

SEQ ID NO: 11136 - protein, 7 aa, Artificial Sequence
  Description of Artificial Sequence: Synthetic peptide
  XENP019643 vhCDR2
YASHRYT

SEQ ID NO: 11137 - protein, 9 aa, Artificial Sequence
  Description of Artificial Sequence: Synthetic peptide
  XENP019643 vhCDR3
QQDFSSPRT

SEQ ID NO: 11138 - protein, 5 aa, Artificial Sequence
  Description of Artificial Sequence: Synthetic peptide
  XENP019643 vlCDR1
NYWMN

SEQ ID NO: 11139 - protein, 19 aa, Artificial Sequence
  Description of Artificial Sequence: Synthetic peptide
  XENP019643 vlCDR2
EIRLYSNNYATHYAESVKG

SEQ ID NO: 11140 - protein, 11 aa, Artificial Sequence
  Description of Artificial Sequence: Synthetic peptide
  XENP019643 vlCDR3
YYGNYGGYFDV

SEQ ID NO: 11141 - protein, 249 aa, Artificial Sequence
  Description of Artificial Sequence: Synthetic polypeptide
  XENP019644 1G6_L1.189_H1.280_scFv(GKPGS)4
EIVLTQSPATLSVSPGERVTLTCRASQSVGNDVAWYQQKPGQAPRLLINYASHRYTGVPDRFTGSGYGTEFTLTISSVQSEDFAVYYCQQDFSSPRTFGGGTKVEIKGKPGSGKPGSGKPGSGKPGSEVQLVESGGGLVKPGGSLRLTCVASGFTFSNYWMNWVRQAPGKGLEWVAEIRLYSNNYATHYAESVKGRFTISRDDSKSTLYLQMNNLKTEDTGVYYCTRYYGNYGGYFDVWGRGTLVTVSS

SEQ ID NO: 11142 - protein, 107 aa, Artificial Sequence; identical to SEQ ID NO: 10864
  Description of Artificial Sequence: Synthetic polypeptide
  VH of XENP019644

SEQ ID NO: 11143 - protein, 122 aa, Artificial Sequence; identical to SEQ ID NO: 10917
  Description of Artificial Sequence: Synthetic polypeptide
  VL of XENP019644

SEQ ID NO: 11144 - protein, 11 aa, Artificial Sequence
  Description of Artificial Sequence: Synthetic peptide
  XENP019644 vhCDR1
RASQSVGNDVA

SEQ ID NO: 11145 - protein, 7 aa, Artificial Sequence
  Description of Artificial Sequence: Synthetic peptide
  XENP019644 vhCDR2
YASHRYT

SEQ ID NO: 11146 - protein, 9 aa, Artificial Sequence
  Description of Artificial Sequence: Synthetic peptide
  XENP019644 vhCDR3
QQDFSSPRT

SEQ ID NO: 11147 - protein, 5 aa, Artificial Sequence
  Description of Artificial Sequence: Synthetic peptide
  XENP019644 vlCDR1
NYWMN

SEQ ID NO: 11148 - protein, 19 aa, Artificial Sequence
  Description of Artificial Sequence: Synthetic peptide
  XENP019644 vlCDR2
EIRLYSNNYATHYAESVKG

SEQ ID NO: 11149 - protein, 11 aa, Artificial Sequence
  Description of Artificial Sequence: Synthetic peptide
  XENP019644 vlCDR3
YYGNYGGYFDV

SEQ ID NO: 11150 - protein, 249 aa, Artificial Sequence
  Description of Artificial Sequence: Synthetic polypeptide
  XENP019645 1G6_L1.189_H1.281_scFv(GKPGS)4
EIVLTQSPATLSVSPGERVTLTCRASQSVGNDVAWYQQKPGQAPRLLINYASHRYTGVPDRFTGSGYGTEFTLTISSVQSEDFAVYYCQQDFSSPRTFGGGTKVEIKGKPGSGKPGSGKPGSGKPGSEVQLVESGGGLVKPGGSLRLSCVASGFTFSNYWMNWVRQAPGKGLEWVAEIRLYSNNYATHYAESVKGRFTISRDDSKSMLYLQMNNLKTEDTGVYYCTRYYGNYGGYFDVWGRGTLVTVSS

SEQ ID NO: 11151 - protein, 107 aa, Artificial Sequence; identical to SEQ ID NO: 10864
  Description of Artificial Sequence: Synthetic polypeptide
  VH of XENP019645

SEQ ID NO: 11152 - protein, 122 aa, Artificial Sequence; identical to SEQ ID NO: 10926
  Description of Artificial Sequence: Synthetic polypeptide
  VL of XENP019645

SEQ ID NO: 11153 - protein, 11 aa, Artificial Sequence
  Description of Artificial Sequence: Synthetic peptide
  XENP019645 vhCDR1
RASQSVGNDVA

SEQ ID NO: 11154 - protein, 7 aa, Artificial Sequence
  Description of Artificial Sequence: Synthetic peptide
  XENP019645 vhCDR2
YASHRYT

SEQ ID NO: 11155 - protein, 9 aa, Artificial Sequence
  Description of Artificial Sequence: Synthetic peptide
  XENP019645 vhCDR3
QQDFSSPRT

SEQ ID NO: 11156 - protein, 5 aa, Artificial Sequence
  Description of Artificial Sequence: Synthetic peptide
  XENP019645 vlCDR1
NYWMN

SEQ ID NO: 11157 - protein, 19 aa, Artificial Sequence
  Description of Artificial Sequence: Synthetic peptide
  XENP019645 vlCDR2
EIRLYSNNYATHYAESVKG

SEQ ID NO: 11158 - protein, 11 aa, Artificial Sequence
  Description of Artificial Sequence: Synthetic peptide
  XENP019645 vlCDR3
YYGNYGGYFDV

SEQ ID NO: 11159 - protein, 249 aa, Artificial Sequence
  Description of Artificial Sequence: Synthetic polypeptide
  XENP019646 1G6_L1.189_H1.282_scFv(GKPGS)4
EIVLTQSPATLSVSPGERVTLTCRASQSVGNDVAWYQQKPGQAPRLLINYASHRYTGVPDRFTGSGYGTEFTLTISSVQSEDFAVYYCQQDFSSPRTFGGGTKVEIKGKPGSGKPGSGKPGSGKPGSEVQLVESGGGLVKPGGSLRLTCVASGFTFSNYWMNWVRQAPGKGLEWVAEIRLYSNNYATHYAESVKGRFTISRDDSKSMLYLQMNNLKTEDTGVYYCTRYYGNYGGYFDVWGRGTLVTVSS

SEQ ID NO: 11160 - protein, 107 aa, Artificial Sequence; identical to SEQ ID NO: 10864
  Description of Artificial Sequence: Synthetic polypeptide
  VH of XENP019646

SEQ ID NO: 11161 - protein, 122 aa, Artificial Sequence; identical to SEQ ID NO: 10935
  Description of Artificial Sequence: Synthetic polypeptide
  VL of XENP019646

SEQ ID NO: 11162 - protein, 11 aa, Artificial Sequence
  Description of Artificial Sequence: Synthetic peptide
  XENP019646 vhCDR1
RASQSVGNDVA

SEQ ID NO: 11163 - protein, 7 aa, Artificial Sequence
  Description of Artificial Sequence: Synthetic peptide
  XENP019646 vhCDR2
YASHRYT

SEQ ID NO: 11164 - protein, 9 aa, Artificial Sequence
  Description of Artificial Sequence: Synthetic peptide
  XENP019646 vhCDR3
QQDFSSPRT

SEQ ID NO: 11165 - protein, 5 aa, Artificial Sequence
  Description of Artificial Sequence: Synthetic peptide
  XENP019646 vlCDR1
NYWMN

SEQ ID NO: 11166 - protein, 19 aa, Artificial Sequence
  Description of Artificial Sequence: Synthetic peptide
  XENP019646 vlCDR2
EIRLYSNNYATHYAESVKG

SEQ ID NO: 11167 - protein, 11 aa, Artificial Sequence
  Description of Artificial Sequence: Synthetic peptide
  XENP019646 vlCDR3
YYGNYGGYFDV

SEQ ID NO: 11168 - protein, 249 aa, Artificial Sequence
  Description of Artificial Sequence: Synthetic polypeptide
  XENP019647 1G6_L1.189_H1.283_scFv(GKPGS)4
EIVLTQSPATLSVSPGERVTLTCRASQSVGNDVAWYQQKPGQAPRLLINYASHRYTGVPDRFTGSGYGTEFTLTISSVQSEDFAVYYCQQDFSSPRTFGGGTKVEIKGKPGSGKPGSGKPGSGKPGSEVQLVESGGGLVKPGGSLRLSCVASGFTFSNYWMNWVRQAPGKGLEWVCEIRLYSNNYATHYAESVKGRFTCSRDDSKSTLYLQMNNLKTEDTGVYYCTRYYGNYGGYFDVWGQGTLVTVSS

SEQ ID NO: 11169 - protein, 107 aa, Artificial Sequence; identical to SEQ ID NO: 10864
  Description of Artificial Sequence: Synthetic polypeptide
  VH of XENP019647

SEQ ID NO: 11170 - protein, 122 aa, Artificial Sequence; identical to SEQ ID NO: 10944
  Description of Artificial Sequence: Synthetic polypeptide
  VL of XENP019647

SEQ ID NO: 11171 - protein, 11 aa, Artificial Sequence
  Description of Artificial Sequence: Synthetic peptide
  XENP019647 vhCDR1
RASQSVGNDVA

SEQ ID NO: 11172 - protein, 7 aa, Artificial Sequence
  Description of Artificial Sequence: Synthetic peptide
  XENP019647 vhCDR2
YASHRYT

SEQ ID NO: 11173 - protein, 9 aa, Artificial Sequence
  Description of Artificial Sequence: Synthetic peptide
  XENP019647 vhCDR3
QQDFSSPRT

SEQ ID NO: 11174 - protein, 5 aa, Artificial Sequence
  Description of Artificial Sequence: Synthetic peptide
  XENP019647 vlCDR1
NYWMN

SEQ ID NO: 11175 - protein, 19 aa, Artificial Sequence
  Description of Artificial Sequence: Synthetic peptide
  XENP019647 vlCDR2
EIRLYSNNYATHYAESVKG

SEQ ID NO: 11176 - protein, 11 aa, Artificial Sequence
  Description of Artificial Sequence: Synthetic peptide
  XENP019647 vlCDR3
YYGNYGGYFDV

SEQ ID NO: 11177 - protein, 249 aa, Artificial Sequence
  Description of Artificial Sequence: Synthetic polypeptide
  XENP019648 1G6_L1.189_H1.284_scFv(GKPGS)4
EIVLTQSPATLSVSPGERVTLTCRASQSVGNDVAWYQQKPGQAPRLLINYASHRYTGVPDRFTGSGYGTEFTLTISSVQSEDFAVYYCQQDFSSPRTFGGGTKVEIKGKPGSGKPGSGKPGSGKPGSEVQLVESGGGLVKPGGSLRLSCVASGFTFSNYWMNWVRQAPGKGLEWVCEIRLYSNNYATHYAESVKGRFTCSRDDSKSTLYLQMNNLKTEDTGVYYCTRYYGNYGGYFDVWGRGTLVTVSS

SEQ ID NO: 11178 - protein, 107 aa, Artificial Sequence; identical to SEQ ID NO: 10864
  Description of Artificial Sequence: Synthetic polypeptide
  VH of XENP019648

SEQ ID NO: 11179 - protein, 122 aa, Artificial Sequence; identical to SEQ ID NO: 10953
  Description of Artificial Sequence: Synthetic polypeptide
  VL of XENP019648

SEQ ID NO: 11180 - protein, 11 aa, Artificial Sequence
  Description of Artificial Sequence: Synthetic peptide
  XENP019648 vhCDR1
RASQSVGNDVA

SEQ ID NO: 11181 - protein, 7 aa, Artificial Sequence
  Description of Artificial Sequence: Synthetic peptide
  XENP019648 vhCDR2
YASHRYT

SEQ ID NO: 11182 - protein, 9 aa, Artificial Sequence
  Description of Artificial Sequence: Synthetic peptide
  XENP019648 vhCDR3
QQDFSSPRT

SEQ ID NO: 11183 - protein, 5 aa, Artificial Sequence
  Description of Artificial Sequence: Synthetic peptide
  XENP019648 vlCDR1
NYWMN

SEQ ID NO: 11184 - protein, 19 aa, Artificial Sequence
  Description of Artificial Sequence: Synthetic peptide
  XENP019648 vlCDR2
EIRLYSNNYATHYAESVKG

SEQ ID NO: 11185 - protein, 11 aa, Artificial Sequence
  Description of Artificial Sequence: Synthetic peptide
  XENP019648 vlCDR3
YYGNYGGYFDV

SEQ ID NO: 11186 - protein, 249 aa, Artificial Sequence
  Description of Artificial Sequence: Synthetic polypeptide
  XENP019649 1G6_L1.189_H1.285_scFv(GKPGS)4
EIVLTQSPATLSVSPGERVTLTCRASQSVGNDVAWYQQKPGQAPRLLINYASHRYTGVPDRFTGSGYGTEFTLTISSVQSEDFAVYYCQQDFSSPRTFGGGTKVEIKGKPGSGKPGSGKPGSGKPGSEVQLVESGGGLVKPGGSLRLTCVASGFTFSNYWMNWVRQAPGKGLEWVCEIRLYSNNYATHYAESVKGRFTCSRDDSKSMLYLQMNNLKTEDTGVYYCTRYYGNYGGYFDVWGRGTLVTVSS

SEQ ID NO: 11187 - protein, 107 aa, Artificial Sequence; identical to SEQ ID NO: 10864
  Description of Artificial Sequence: Synthetic polypeptide
  VH of XENP019649

SEQ ID NO: 11188 - protein, 122 aa, Artificial Sequence; identical to SEQ ID NO: 10962
  Description of Artificial Sequence: Synthetic polypeptide
  VL of XENP019649

SEQ ID NO: 11189 - protein, 11 aa, Artificial Sequence
  Description of Artificial Sequence: Synthetic peptide
  XENP019649 vhCDR1
RASQSVGNDVA

SEQ ID NO: 11190 - protein, 7 aa, Artificial Sequence
  Description of Artificial Sequence: Synthetic peptide
  XENP019649 vhCDR2
YASHRYT

SEQ ID NO: 11191 - protein, 9 aa, Artificial Sequence
  Description of Artificial Sequence: Synthetic peptide
  XENP019649 vhCDR3
QQDFSSPRT

SEQ ID NO: 11192 - protein, 5 aa, Artificial Sequence
  Description of Artificial Sequence: Synthetic peptide
  XENP019649 vlCDR1
NYWMN

SEQ ID NO: 11193 - protein, 19 aa, Artificial Sequence
  Description of Artificial Sequence: Synthetic peptide
  XENP019649 vlCDR2
EIRLYSNNYATHYAESVKG

SEQ ID NO: 11194 - protein, 11 aa, Artificial Sequence
  Description of Artificial Sequence: Synthetic peptide
  XENP019649 vlCDR3
YYGNYGGYFDV

SEQ ID NO: 11195 - protein, 249 aa, Artificial Sequence
  Description of Artificial Sequence: Synthetic polypeptide
  XENP019650 1G6_L1.192_H1.278_scFv(GKPGS)4
EIVLTQSPATLSASPGERVTLTCRASQSVGNDVAWYQQKPGQAPRLLINYASHRYTGVPDRFTGSGYGTEFTLTISSVQSEDFAVYYCQQDFSSPRTFGGGTKVEIKGKPGSGKPGSGKPGSGKPGSEVQLVESGGGLVKPGGSLRLSCVASGFTFSNYWMNWVRQAPGKGLEWVAEIRLYSNNYATHYAESVKGRFTISRDDSKSTLYLQMNNLKTEDTGVYYCTRYYGNYGGYFDVWGQGTLVTVSS

SEQ ID NO: 11196 - protein, 107 aa, Artificial Sequence; identical to SEQ ID NO: 10981
  Description of Artificial Sequence: Synthetic polypeptide
  VH of XENP019650

SEQ ID NO: 11197 - protein, 122 aa, Artificial Sequence; identical to SEQ ID NO: 10845
  Description of Artificial Sequence: Synthetic polypeptide
  VL of XENP019650

SEQ ID NO: 11198 - protein, 11 aa, Artificial Sequence
  Description of Artificial Sequence: Synthetic peptide
  XENP019650 vhCDR1
RASQSVGNDVA

SEQ ID NO: 11199 - protein, 7 aa, Artificial Sequence
  Description of Artificial Sequence: Synthetic peptide
  XENP019650 vhCDR2
YASHRYT

SEQ ID NO: 11200 - protein, 9 aa, Artificial Sequence
  Description of Artificial Sequence: Synthetic peptide
  XENP019650 vhCDR3
QQDFSSPRT

SEQ ID NO: 11201 - protein, 5 aa, Artificial Sequence
  Description of Artificial Sequence: Synthetic peptide
  XENP019650 vlCDR1
NYWMN

SEQ ID NO: 11202 - protein, 19 aa, Artificial Sequence
  Description of Artificial Sequence: Synthetic peptide
  XENP019650 vlCDR2
EIRLYSNNYATHYAESVKG

SEQ ID NO: 11203 - protein, 11 aa, Artificial Sequence
  Description of Artificial Sequence: Synthetic peptide
  XENP019650 vlCDR3
YYGNYGGYFDV

SEQ ID NO: 11204 - protein, 249 aa, Artificial Sequence
  Description of Artificial Sequence: Synthetic polypeptide
  XENP019651 1G6_L1.193_H1.278_scFv(GKPGS)4
EIVLTQSPATLSVSPGERVTLTCRASQSVGNDVAWYQQKPGQAPRLLINYASHRYTGVPDRFTGSGYGTEFTLTISSVQSEDFGVYYCQQDFSSPRTFGGGTKVEIKGKPGSGKPGSGKPGSGKPGSEVQLVESGGGLVKPGGSLRLSCVASGFTFSNYWMNWVRQAPGKGLEWVAEIRLYSNNYATHYAESVKGRFTISRDDSKSTLYLQMNNLKTEDTGVYYCTRYYGNYGGYFDVWGQGTLVTVSS

SEQ ID NO: 11205 - protein, 107 aa, Artificial Sequence; identical to SEQ ID NO: 10990
  Description of Artificial Sequence: Synthetic polypeptide
  VH of XENP019651

SEQ ID NO: 11206 - protein, 122 aa, Artificial Sequence; identical to SEQ ID NO: 10845
  Description of Artificial Sequence: Synthetic polypeptide
  VL of XENP019651

SEQ ID NO: 11207 - protein, 11 aa, Artificial Sequence
  Description of Artificial Sequence: Synthetic peptide
  XENP019651 vhCDR1
RASQSVGNDVA

SEQ ID NO: 11208 - protein, 7 aa, Artificial Sequence
  Description of Artificial Sequence: Synthetic peptide
  XENP019651 vhCDR2
YASHRYT

SEQ ID NO: 11209 - protein, 9 aa, Artificial Sequence
  Description of Artificial Sequence: Synthetic peptide
  XENP019651 vhCDR3
QQDFSSPRT

SEQ ID NO: 11210 - protein, 5 aa, Artificial Sequence
  Description of Artificial Sequence: Synthetic peptide
  XENP019651 vlCDR1
NYWMN

SEQ ID NO: 11211 - protein, 19 aa, Artificial Sequence
  Description of Artificial Sequence: Synthetic peptide
  XENP019651 vlCDR2
EIRLYSNNYATHYAESVKG

SEQ ID NO: 11212 - protein, 11 aa, Artificial Sequence
  Description of Artificial Sequence: Synthetic peptide
  XENP019651 vlCDR3
YYGNYGGYFDV

SEQ ID NO: 11213 - protein, 249 aa, Artificial Sequence
  Description of Artificial Sequence: Synthetic polypeptide
  XENP019652 1G6_L1.194_H1.278_scFv(GKPGS)4
EIVLTQSPATLSASPGERVTLTCRASQSVGNDVAWYQQKPGQAPRLLINYASHRYTGVPDRFTGSGYGTEFTLTISSVQSEDFGVYYCQQDFSSPRTFGGGTKVEIKGKPGSGKPGSGKPGSGKPGSEVQLVESGGGLVKPGGSLRLSCVASGFTFSNYWMNWVRQAPGKGLEWVAEIRLYSNNYATHYAESVKGRFTISRDDSKSTLYLQMNNLKTEDTGVYYCTRYYGNYGGYFDVWGQGTLVTVSS

SEQ ID NO: 11214 - protein, 107 aa, Artificial Sequence; identical to SEQ ID NO: 10999
  Description of Artificial Sequence: Synthetic polypeptide
  VH of XENP019652

SEQ ID NO: 11215 - protein, 122 aa, Artificial Sequence; identical to SEQ ID NO: 10845
  Description of Artificial Sequence: Synthetic polypeptide
  VL of XENP019652

SEQ ID NO: 11216 - protein, 11 aa, Artificial Sequence
  Description of Artificial Sequence: Synthetic peptide
  XENP019652 vhCDR1
RASQSVGNDVA

SEQ ID NO: 11217 - protein, 7 aa, Artificial Sequence
  Description of Artificial Sequence: Synthetic peptide
  XENP019652 vhCDR2
YASHRYT

SEQ ID NO: 11218 - protein, 9 aa, Artificial Sequence
  Description of Artificial Sequence: Synthetic peptide
  XENP019652 vhCDR3
QQDFSSPRT

SEQ ID NO: 11219 - protein, 5 aa, Artificial Sequence
  Description of Artificial Sequence: Synthetic peptide
  XENP019652 vlCDR1
NYWMN

SEQ ID NO: 11220 - protein, 19 aa, Artificial Sequence
  Description of Artificial Sequence: Synthetic peptide
  XENP019652 vlCDR2
EIRLYSNNYATHYAESVKG

SEQ ID NO: 11221 - protein, 11 aa, Artificial Sequence
  Description of Artificial Sequence: Synthetic peptide
  XENP019652 vlCDR3
YYGNYGGYFDV

SEQ ID NO: 11222 - protein, 249 aa, Artificial Sequence
  Description of Artificial Sequence: Synthetic polypeptide
  XENP019653 1G6_L1.195_H1.278_scFv(GKPGS)4
EIVLTQSPATLSVSPGERVTLTCRASQSVGNDVAWYQQKPGQAPRLLCNYASHRYTGVPDRFTCSGYGTEFTLTISSVQSEDFAVYYCQQDFSSPRTFGGGTKVEIKGKPGSGKPGSGKPGSGKPGSEVQLVESGGGLVKPGGSLRLSCVASGFTFSNYWMNWVRQAPGKGLEWVAEIRLYSNNYATHYAESVKGRFTISRDDSKSTLYLQMNNLKTEDTGVYYCTRYYGNYGGYFDVWGQGTLVTVSS

SEQ ID NO: 11223 - protein, 107 aa, Artificial Sequence; identical to SEQ ID NO: 11008
  Description of Artificial Sequence: Synthetic polypeptide
  VH of XENP019653

SEQ ID NO: 11224 - protein, 122 aa, Artificial Sequence; identical to SEQ ID NO: 10845
  Description of Artificial Sequence: Synthetic polypeptide
  VL of XENP019653

SEQ ID NO: 11225 - protein, 11 aa, Artificial Sequence
  Description of Artificial Sequence: Synthetic peptide
  XENP019653 vhCDR1
RASQSVGNDVA

SEQ ID NO: 11226 - protein, 9 aa, Artificial Sequence
  Description of Artificial Sequence: Synthetic peptide
  XENP019653 vhCDR2
CNYASHRYT

SEQ ID NO: 11227 - protein, 9 aa, Artificial Sequence
  Description of Artificial Sequence: Synthetic peptide
  XENP019653 vhCDR3
QQDFSSPRT

SEQ ID NO: 11228 - protein, 5 aa, Artificial Sequence
  Description of Artificial Sequence: Synthetic peptide
  XENP019653 vlCDR1
NYWMN

SEQ ID NO: 11229 - protein, 19 aa, Artificial Sequence
  Description of Artificial Sequence: Synthetic peptide
  XENP019653 vlCDR2
EIRLYSNNYATHYAESVKG

SEQ ID NO: 11230 - protein, 11 aa, Artificial Sequence
  Description of Artificial Sequence: Synthetic peptide
  XENP019653 vlCDR3
YYGNYGGYFDV

SEQ ID NO: 11231 - protein, 249 aa, Artificial Sequence
  Description of Artificial Sequence: Synthetic polypeptide
  XENP019654 1G6_L1.196_H1.278_scFv(GKPGS)4
EIVLTQSPATLSASPGERVTLTCRASQSVGNDVAWYQQKPGQAPRLLCNYASHRYTGVPDRFTCSGYGTEFTLTISSVQSEDFGVYYCQQDFSSPRTFGGGTKVEIKGKPGSGKPGSGKPGSGKPGSEVQLVESGGGLVKPGGSLRLSCVASGFTFSNYWMNWVRQAPGKGLEWVAEIRLYSNNYATHYAESVKGRFTISRDDSKSTLYLQMNNLKTEDTGVYYCTRYYGNYGGYFDVWGQGTLVTVSS

SEQ ID NO: 11232 - protein, 107 aa, Artificial Sequence; identical to SEQ ID NO: 11017
  Description of Artificial Sequence: Synthetic polypeptide
  VH of XENP019654

SEQ ID NO: 11233 - protein, 122 aa, Artificial Sequence; identical to SEQ ID NO: 10845
  Description of Artificial Sequence: Synthetic polypeptide
  VL of XENP019654

SEQ ID NO: 11234 - protein, 11 aa, Artificial Sequence
  Description of Artificial Sequence: Synthetic peptide
  XENP019654 vhCDR1
RASQSVGNDVA

SEQ ID NO: 11235 - protein, 9 aa, Artificial Sequence
  Description of Artificial Sequence: Synthetic peptide
  XENP019654 vhCDR2
CNYASHRYT

SEQ ID NO: 11236 - protein, 9 aa, Artificial Sequence
  Description of Artificial Sequence: Synthetic peptide
  XENP019654 vhCDR3
QQDFSSPRT

SEQ ID NO: 11237 - protein, 5 aa, Artificial Sequence
  Description of Artificial Sequence: Synthetic peptide
  XENP019654 vlCDR1
NYWMN

SEQ ID NO: 11238 - protein, 19 aa, Artificial Sequence
  Description of Artificial Sequence: Synthetic peptide
  XENP019654 vlCDR2
EIRLYSNNYATHYAESVKG

SEQ ID NO: 11239 - protein, 11 aa, Artificial Sequence
  Description of Artificial Sequence: Synthetic peptide
  XENP019654 vlCDR3
YYGNYGGYFDV

SEQ ID NO: 11240 - protein, 249 aa, Artificial Sequence
  Description of Artificial Sequence: Synthetic polypeptide
  XENP019655 1G6_L1.197_H1.278_scFv(GKPGS)4
EIVLTQSPATLSASPGERVTLTCRASQSVGNDVAWYQQKPGQAPRLLCNYASHRYTSVPDRFTCSGYGTEFTLTISSVQSEDFGVYYCQQDFSSPRTFGGGTKVEIKGKPGSGKPGSGKPGSGKPGSEVQLVESGGGLVKPGGSLRLSCVASGFTFSNYWMNWVRQAPGKGLEWVAEIRLYSNNYATHYAESVKGRFTISRDDSKSTLYLQMNNLKTEDTGVYYCTRYYGNYGGYFDVWGQGTLVTVSS

SEQ ID NO: 11241 - protein, 107 aa, Artificial Sequence; identical to SEQ ID NO: 11026
  Description of Artificial Sequence: Synthetic polypeptide
  VH of XENP019655

SEQ ID NO: 11242 - protein, 122 aa, Artificial Sequence; identical to SEQ ID NO: 10845
  Description of Artificial Sequence: Synthetic polypeptide
  VL of XENP019655

SEQ ID NO: 11243 - protein, 11 aa, Artificial Sequence
  Description of Artificial Sequence: Synthetic peptide
  XENP019655 vhCDR1
RASQSVGNDVA

SEQ ID NO: 11244 - protein, 9 aa, Artificial Sequence
  Description of Artificial Sequence: Synthetic peptide
  XENP019655 vhCDR2
CNYASHRYT

SEQ ID NO: 11245 - protein, 9 aa, Artificial Sequence
  Description of Artificial Sequence: Synthetic peptide
  XENP019655 vhCDR3
QQDFSSPRT

SEQ ID NO: 11246 - protein, 5 aa, Artificial Sequence
  Description of Artificial Sequence: Synthetic peptide
  XENP019655 vlCDR1
NYWMN

SEQ ID NO: 11247 - protein, 19 aa, Artificial Sequence
  Description of Artificial Sequence: Synthetic peptide
  XENP019655 vlCDR2
EIRLYSNNYATHYAESVKG

SEQ ID NO: 11248 - protein, 11 aa, Artificial Sequence
  Description of Artificial Sequence: Synthetic peptide
  XENP019655 vlCDR3
YYGNYGGYFDV

SEQ ID NO: 11249 - protein, 249 aa, Artificial Sequence
  Description of Artificial Sequence: Synthetic polypeptide
  XENP019656 1G6_H1.278_L1.189_scFv_linkerV1
EVQLVESGGGLVKPGGSLRLSCVASGFTFSNYWMNWVRQAPGKGLEWVAEIRLYSNNYATHYAESVKGRFTISRDDSKSTLYLQMNNLKTEDTGVYYCTRYYGNYGGYFDVWGQGTLVTVSSGKPGSGKPGSGKPGSGGGGSEIVLTQSPATLSVSPGERVTLTCRASQSVGNDVAWYQQKPGQAPRLLINYASHRYTGVPDRFTGSGYGTEFTLTISSVQSEDFAVYYCQQDFSSPRTFGGGTKVEIK

SEQ ID NO: 11250 - protein, 122 aa, Artificial Sequence; identical to SEQ ID NO: 10845
  Description of Artificial Sequence: Synthetic polypeptide
  VH of XENP019656

SEQ ID NO: 11251 - protein, 107 aa, Artificial Sequence; identical to SEQ ID NO: 10864
  Description of Artificial Sequence: Synthetic polypeptide
  VL of XENP019656

SEQ ID NO: 11252 - protein, 5 aa, Artificial Sequence
  Description of Artificial Sequence: Synthetic peptide
  XENP019656 vhCDR1
NYWMN

SEQ ID NO: 11253 - protein, 19 aa, Artificial Sequence
  Description of Artificial Sequence: Synthetic peptide
  XENP019656 vhCDR2
EIRLYSNNYATHYAESVKG

SEQ ID NO: 11254 - protein, 11 aa, Artificial Sequence
  Description of Artificial Sequence: Synthetic peptide
  XENP019656 vhCDR3
YYGNYGGYFDV

SEQ ID NO: 11255 - protein, 11 aa, Artificial Sequence
  Description of Artificial Sequence: Synthetic peptide
  XENP019656 vlCDR1
RASQSVGNDVA

SEQ ID NO: 11256 - protein, 7 aa, Artificial Sequence
  Description of Artificial Sequence: Synthetic peptide
  XENP019656 vlCDR2
YASHRYT

SEQ ID NO: 11257 - protein, 9 aa, Artificial Sequence
  Description of Artificial Sequence: Synthetic peptide
  XENP019656 vlCDR3
QQDFSSPRT

SEQ ID NO: 11258 - protein, 247 aa, Artificial Sequence
  Description of Artificial Sequence: Synthetic polypeptide
  XENP019657 1G6_H1.278_L1.189_scFv_linkerV2
EVQLVESGGGLVKPGGSLRLSCVASGFTFSNYWMNWVRQAPGKGLEWVAEIRLYSNNYATHYAESVKGRFTISRDDSKSTLYLQMNNLKTEDTGVYYCTRYYGNYGGYFDVWGQGTLVTVSSGKPGSGKPGSGKPGSGKPEIVLTQSPATLSVSPGERVTLTCRASQSVGNDVAWYQQKPGQAPRLLINYASHRYTGVPDRFTGSGYGTEFTLTISSVQSEDFAVYYCQQDFSSPRTFGGGTKVEIK

SEQ ID NO: 11259 - protein, 122 aa, Artificial Sequence; identical to SEQ ID NO: 10845
  Description of Artificial Sequence: Synthetic polypeptide
  VH of XENP019657

SEQ ID NO: 11260 - protein, 107 aa, Artificial Sequence; identical to SEQ ID NO: 10864
  Description of Artificial Sequence: Synthetic polypeptide
  VL of XENP019657

SEQ ID NO: 11261 - protein, 5 aa, Artificial Sequence
  Description of Artificial Sequence: Synthetic peptide
  XENP019657 vhCDR1
NYWMN

SEQ ID NO: 11262 - protein, 19 aa, Artificial Sequence
  Description of Artificial Sequence: Synthetic peptide
  XENP019657 vhCDR2
EIRLYSNNYATHYAESVKG

SEQ ID NO: 11263 - protein, 11 aa, Artificial Sequence
  Description of Artificial Sequence: Synthetic peptide
  XENP019657 vhCDR3
YYGNYGGYFDV

SEQ ID NO: 11264 - protein, 11 aa, Artificial Sequence
  Description of Artificial Sequence: Synthetic peptide
  XENP019657 vlCDR1
RASQSVGNDVA

SEQ ID NO: 11265 - protein, 7 aa, Artificial Sequence
  Description of Artificial Sequence: Synthetic peptide
  XENP019657 vlCDR2
YASHRYT

SEQ ID NO: 11266 - protein, 9 aa, Artificial Sequence
  Description of Artificial Sequence: Synthetic peptide
  XENP019657 vlCDR3
QQDFSSPRT

SEQ ID NO: 11267 - protein, 244 aa, Artificial Sequence
  Description of Artificial Sequence: Synthetic polypeptide
  XENP019658 1G6_H1.278_L1.189_scFv_linkerV3
EVQLVESGGGLVKPGGSLRLSCVASGFTFSNYWMNWVRQAPGKGLEWVAEIRLYSNNYATHYAESVKGRFTISRDDSKSTLYLQMNNLKTEDTGVYYCTRYYGNYGGYFDVWGQGTLVTVSSGKPGSGKPGSGKPGSEIVLTQSPATLSVSPGERVTLTCRASQSVGNDVAWYQQKPGQAPRLLINYASHRYTGVPDRFTGSGYGTEFTLTISSVQSEDFAVYYCQQDFSSPRTFGGGTKVEIK

SEQ ID NO: 11268 - protein, 122 aa, Artificial Sequence; identical to SEQ ID NO: 10845
  Description of Artificial Sequence: Synthetic polypeptide
  VH of XENP019658

SEQ ID NO: 11269 - protein, 107 aa, Artificial Sequence; identical to SEQ ID NO: 10864
  Description of Artificial Sequence: Synthetic polypeptide
  VL of XENP019658

SEQ ID NO: 11270 - protein, 5 aa, Artificial Sequence
  Description of Artificial Sequence: Synthetic peptide
  XENP019658 vhCDR1
NYWMN

SEQ ID NO: 11271 - protein, 19 aa, Artificial Sequence
  Description of Artificial Sequence: Synthetic peptide
  XENP019658 vhCDR2
EIRLYSNNYATHYAESVKG

SEQ ID NO: 11272 - protein, 11 aa, Artificial Sequence
  Description of Artificial Sequence: Synthetic peptide
  XENP019658 vhCDR3
YYGNYGGYFDV

SEQ ID NO: 11273 - protein, 11 aa, Artificial Sequence
  Description of Artificial Sequence: Synthetic peptide
  XENP019658 vlCDR1
RASQSVGNDVA

SEQ ID NO: 11274 - protein, 7 aa, Artificial Sequence
  Description of Artificial Sequence: Synthetic peptide
  XENP019658 vlCDR2
YASHRYT

SEQ ID NO: 11275 - protein, 9 aa, Artificial Sequence
  Description of Artificial Sequence: Synthetic peptide
  XENP019658 vlCDR3
QQDFSSPRT

SEQ ID NO: 11276 - protein, 251 aa, Artificial Sequence
  Description of Artificial Sequence: Synthetic polypeptide
  XENP019659 1G6_H1.278_L1.189_scFv_linkerV4
EVQLVESGGGLVKPGGSLRLSCVASGFTFSNYWMNWVRQAPGKGLEWVAEIRLYSNNYATHYAESVKGRFTISRDDSKSTLYLQMNNLKTEDTGVYYCTRYYGNYGGYFDVWGQGTLVTVSSGKPGSGKPGSGKPGSGKPGSGSEIVLTQSPATLSVSPGERVTLTCRASQSVGNDVAWYQQKPGQAPRLLINYASHRYTGVPDRFTGSGYGTEFTLTISSVQSEDFAVYYCQQDFSSPRTFGGGTKVEIK

SEQ ID NO: 11277 - protein, 122 aa, Artificial Sequence; identical to SEQ ID NO: 10845
  Description of Artificial Sequence: Synthetic polypeptide
  VH of XENP019659

SEQ ID NO: 11278 - protein, 107 aa, Artificial Sequence; identical to SEQ ID NO: 10864
  Description of Artificial Sequence: Synthetic polypeptide
  VL of XENP019659

SEQ ID NO: 11279 - protein, 5 aa, Artificial Sequence
  Description of Artificial Sequence: Synthetic peptide
  XENP019659 vhCDR1
NYWMN

SEQ ID NO: 11280 - protein, 19 aa, Artificial Sequence
  Description of Artificial Sequence: Synthetic peptide
  XENP019659 vhCDR2
EIRLYSNNYATHYAESVKG

SEQ ID NO: 11281 - protein, 11 aa, Artificial Sequence
  Description of Artificial Sequence: Synthetic peptide
  XENP019659 vhCDR3
YYGNYGGYFDV

SEQ ID NO: 11282 - protein, 11 aa, Artificial Sequence
  Description of Artificial Sequence: Synthetic peptide
  XENP019659 vlCDR1
RASQSVGNDVA

SEQ ID NO: 11283 - protein, 7 aa, Artificial Sequence
  Description of Artificial Sequence: Synthetic peptide
  XENP019659 vlCDR2
YASHRYT

SEQ ID NO: 11284 - protein, 9 aa, Artificial Sequence
  Description of Artificial Sequence: Synthetic peptide
  XENP019659 vlCDR3
QQDFSSPRT

SEQ ID NO: 11285 - protein, 252 aa, Artificial Sequence
  Description of Artificial Sequence: Synthetic polypeptide
  XENP019660 1G6_H1.278_L1.189_scFv_linkerV5
EVQLVESGGGLVKPGGSLRLSCVASGFTFSNYWMNWVRQAPGKGLEWVAEIRLYSNNYATHYAESVKGRFTISRDDSKSTLYLQMNNLKTEDTGVYYCTRYYGNYGGYFDVWGQGTLVTVSSGKPGSGKPGSGKPGSGKPGSGGSEIVLTQSPATLSVSPGERVTLTCRASQSVGNDVAWYQQKPGQAPRLLINYASHRYTGVPDRFTGSGYGTEFTLTISSVQSEDFAVYYCQQDFSSPRTFGGGTKVEIK

SEQ ID NO: 11286 - protein, 122 aa, Artificial Sequence; identical to SEQ ID NO: 10845
  Description of Artificial Sequence: Synthetic polypeptide
  VH of XENP019660

SEQ ID NO: 11287 - protein, 108 aa, Artificial Sequence
  Description of Artificial Sequence: Synthetic polypeptide
  VL of XENP019660
SEIVLTQSPATLSVSPGERVTLTCRASQSVGNDVAWYQQKPGQAPRLLINYASHRYTGVPDRFTGSGYGTEFTLTISSVQSEDFAVYYCQQDFSSPRTFGGGTKVEIK

SEQ ID NO: 11288 - protein, 5 aa, Artificial Sequence
  Description of Artificial Sequence: Synthetic peptide
  XENP019660 vhCDR1
NYWMN

SEQ ID NO: 11289 - protein, 19 aa, Artificial Sequence
  Description of Artificial Sequence: Synthetic peptide
  XENP019660 vhCDR2
EIRLYSNNYATHYAESVKG

SEQ ID NO: 11290 - protein, 11 aa, Artificial Sequence
  Description of Artificial Sequence: Synthetic peptide
  XENP019660 vhCDR3
YYGNYGGYFDV

SEQ ID NO: 11291 - protein, 11 aa, Artificial Sequence
  Description of Artificial Sequence: Synthetic peptide
  XENP019660 vlCDR1
RASQSVGNDVA

SEQ ID NO: 11292 - protein, 7 aa, Artificial Sequence
  Description of Artificial Sequence: Synthetic peptide
  XENP019660 vlCDR2
YASHRYT

SEQ ID NO: 11293 - protein, 9 aa, Artificial Sequence
  Description of Artificial Sequence: Synthetic peptide
  XENP019660 vlCDR3
QQDFSSPRT

SEQ ID NO: 11294 - protein, 253 aa, Artificial Sequence
  Description of Artificial Sequence: Synthetic polypeptide
  XENP019661 1G6_H1.278_L1.189_scFv_linkerV6
EVQLVESGGGLVKPGGSLRLSCVASGFTFSNYWMNWVRQAPGKGLEWVAEIRLYSNNYATHYAESVKGRFTISRDDSKSTLYLQMNNLKTEDTGVYYCTRYYGNYGGYFDVWGQGTLVTVSSGKPGSGKPGSGKPGSGKPGSGGGSEIVLTQSPATLSVSPGERVTLTCRASQSVGNDVAWYQQKPGQAPRLLINYASHRYTGVPDRFTGSGYGTEFTLTISSVQSEDFAVYYCQQDFSSPRTFGGGTKVEIK

SEQ ID NO: 11295 - protein, 122 aa, Artificial Sequence; identical to SEQ ID NO: 10845
  Description of Artificial Sequence: Synthetic polypeptide
  VH of XENP019661

SEQ ID NO: 11296 - protein, 107 aa, Artificial Sequence; identical to SEQ ID NO: 10864
  Description of Artificial Sequence: Synthetic polypeptide
  VL of XENP019661

SEQ ID NO: 11297 - protein, 5 aa, Artificial Sequence
  Description of Artificial Sequence: Synthetic peptide
  XENP019661 vhCDR1
NYWMN

SEQ ID NO: 11298 - protein, 19 aa, Artificial Sequence
  Description of Artificial Sequence: Synthetic peptide
  XENP019661 vhCDR2
EIRLYSNNYATHYAESVKG

SEQ ID NO: 11299 - protein, 11 aa, Artificial Sequence
  Description of Artificial Sequence: Synthetic peptide
  XENP019661 vhCDR3
YYGNYGGYFDV

SEQ ID NO: 11300 - protein, 11 aa, Artificial Sequence
  Description of Artificial Sequence: Synthetic peptide
  XENP019661 vlCDR1
RASQSVGNDVA

SEQ ID NO: 11301 - protein, 7 aa, Artificial Sequence
  Description of Artificial Sequence: Synthetic peptide
  XENP019661 vlCDR2
YASHRYT

SEQ ID NO: 11302 - protein, 9 aa, Artificial Sequence
  Description of Artificial Sequence: Synthetic peptide
  XENP019661 vlCDR3
QQDFSSPRT

SEQ ID NO: 11303 - protein, 254 aa, Artificial Sequence
  Description of Artificial Sequence: Synthetic polypeptide
  XENP019662 1G6_H1.278_L1.189_scFv_linkerV7
EVQLVESGGGLVKPGGSLRLSCVASGFTFSNYWMNWVRQAPGKGLEWVAEIRLYSNNYATHYAESVKGRFTISRDDSKSTLYLQMNNLKTEDTGVYYCTRYYGNYGGYFDVWGQGTLVTVSSGKPGSGKPGSGKPGSGKPGSGGGGSEIVLTQSPATLSVSPGERVTLTCRASQSVGNDVAWYQQKPGQAPRLLINYASHRYTGVPDRFTGSGYGTEFTLTISSVQSEDFAVYYCQQDFSSPRTFGGGTKVEIK

SEQ ID NO: 11304 - protein, 122 aa, Artificial Sequence; identical to SEQ ID NO: 10845
  Description of Artificial Sequence: Synthetic polypeptide
  VH of XENP019662

SEQ ID NO: 11305 - protein, 107 aa, Artificial Sequence; identical to SEQ ID NO: 10864
  Description of Artificial Sequence: Synthetic polypeptide
  VL of XENP019662

SEQ ID NO: 11306 - protein, 5 aa, Artificial Sequence
  Description of Artificial Sequence: Synthetic peptide
  XENP019662 vhCDR1
NYWMN

SEQ ID NO: 11307 - protein, 19 aa, Artificial Sequence
  Description of Artificial Sequence: Synthetic peptide
  XENP019662 vhCDR2
EIRLYSNNYATHYAESVKG

SEQ ID NO: 11308 - protein, 11 aa, Artificial Sequence
  Description of Artificial Sequence: Synthetic peptide
  XENP019662 vhCDR3
YYGNYGGYFDV

SEQ ID NO: 11309 - protein, 11 aa, Artificial Sequence
  Description of Artificial Sequence: Synthetic peptide
  XENP019662 vlCDR1
RASQSVGNDVA

SEQ ID NO: 11310 - protein, 7 aa, Artificial Sequence
  Description of Artificial Sequence: Synthetic peptide
  XENP019662 vlCDR2
YASHRYT

SEQ ID NO: 11311 - protein, 9 aa, Artificial Sequence
  Description of Artificial Sequence: Synthetic peptide
  XENP019662 vlCDR3
QQDFSSPRT

SEQ ID NO: 11312 - protein, 242 aa, Artificial Sequence
  Description of Artificial Sequence: Synthetic polypeptide
  XENP019663 1G6_H1.278_L1.189_scFv_linkerV8
EVQLVESGGGLVKPGGSLRLSCVASGFTFSNYWMNWVRQAPGKGLEWVAEIRLYSNNYATHYAESVKGRFTISRDDSKSTLYLQMNNLKTEDTGVYYCTRYYGNYGGYFDVWGQGTLVTVSSGKPGSGKPGSGKPEIVLTQSPATLSVSPGERVTLTCRASQSVGNDVAWYQQKPGQAPRLLINYASHRYTGVPDRFTGSGYGTEFTLTISSVQSEDFAVYYCQQDFSSPRTFGGGTKVEIK

SEQ ID NO: 11313 - protein, 122 aa, Artificial Sequence; identical to SEQ ID NO: 10845
  Description of Artificial Sequence: Synthetic polypeptide
  VH of XENP019663

SEQ ID NO: 11314 - protein, 107 aa, Artificial Sequence; identical to SEQ ID NO: 10864
  Description of Artificial Sequence: Synthetic polypeptide
  VL of XENP019663

SEQ ID NO: 11315 - protein, 5 aa, Artificial Sequence
  Description of Artificial Sequence: Synthetic peptide
  XENP019663 vhCDR1
NYWMN

SEQ ID NO: 11316 - protein, 19 aa, Artificial Sequence
  Description of Artificial Sequence: Synthetic peptide
  XENP019663 vhCDR2
EIRLYSNNYATHYAESVKG

SEQ ID NO: 11317 - protein, 11 aa, Artificial Sequence
  Description of Artificial Sequence: Synthetic peptide
  XENP019663 vhCDR3
YYGNYGGYFDV

SEQ ID NO: 11318 - protein, 11 aa, Artificial Sequence
  Description of Artificial Sequence: Synthetic peptide
  XENP019663 vlCDR1
RASQSVGNDVA

SEQ ID NO: 11319 - protein, 7 aa, Artificial Sequence
  Description of Artificial Sequence: Synthetic peptide
  XENP019663 vlCDR2
YASHRYT

SEQ ID NO: 11320 - protein, 9 aa, Artificial Sequence
  Description of Artificial Sequence: Synthetic peptide
  XENP019663 vlCDR3
QQDFSSPRT

SEQ ID NO: 11321 - protein, 249 aa, Artificial Sequence
  Description of Artificial Sequence: Synthetic polypeptide
  XENP019664 1G6_H1.287_L1.209_scFv(GKPGS)4
EVQLVESGGGLVKPGGSLRLSCVASGFTFSNYWMNWVRQAPGKCLEWVAEIRLYSNNYATHYAESVKGRFTISRDDSKSTLYLQMNNLKTEDTGVYYCTRYYGNYGGYFDVWGQGTLVTVSSGKPGSGKPGSGKPGSGKPGSEIVLTQSPATLSVSPGERVTLTCRASQSVGNDVAWYQQKPGQAPRLLINYASHRYTGVPDRFTGSGYGTEFTLTISSVQSEDFAVYYCQQDFSSPRTFGCGTKVEIK

SEQ ID NO: 11322 - protein, 122 aa, Artificial Sequence
  Description of Artificial Sequence: Synthetic polypeptide
  VH of XENP019664
EVQLVESGGGLVKPGGSLRLSCVASGFTFSNYWMNWVRQAPGKCLEWVAEIRLYSNNYATHYAESVKGRFTISRDDSKSTLYLQMNNLKTEDTGVYYCTRYYGNYGGYFDVWGQGTLVTVSS

SEQ ID NO: 11323 - protein, 107 aa, Artificial Sequence
  Description of Artificial Sequence: Synthetic polypeptide
  VL of XENP019664
EIVLTQSPATLSVSPGERVTLTCRASQSVGNDVAWYQQKPGQAPRLLINYASHRYTGVPDRFTGSGYGTEFTLTISSVQSEDFAVYYCQQDFSSPRTFGCGTKVEIK

SEQ ID NO: 11324 - protein, 5 aa, Artificial Sequence
  Description of Artificial Sequence: Synthetic peptide
  XENP019664 vhCDR1
NYWMN

SEQ ID NO: 11325 - protein, 19 aa, Artificial Sequence
  Description of Artificial Sequence: Synthetic peptide
  XENP019664 vhCDR2
EIRLYSNNYATHYAESVKG

SEQ ID NO: 11326 - protein, 11 aa, Artificial Sequence
  Description of Artificial Sequence: Synthetic peptide
  XENP019664 vhCDR3
YYGNYGGYFDV

SEQ ID NO: 11327 - protein, 11 aa, Artificial Sequence
  Description of Artificial Sequence: Synthetic peptide
  XENP019664 vlCDR1
RASQSVGNDVA

SEQ ID NO: 11328 - protein, 7 aa, Artificial Sequence
  Description of Artificial Sequence: Synthetic peptide
  XENP019664 vlCDR2
YASHRYT

SEQ ID NO: 11329 - protein, 9 aa, Artificial Sequence
  Description of Artificial Sequence: Synthetic peptide
  XENP019664 vlCDR3
QQDFSSPRT

SEQ ID NO: 11330 - protein, 249 aa, Artificial Sequence
  Description of Artificial Sequence: Synthetic polypeptide
  XENP019665 1G6_L1.209_H1.287_scFv(GKPGS)4
EIVLTQSPATLSVSPGERVTLTCRASQSVGNDVAWYQQKPGQAPRLLINYASHRYTGVPDRFTGSGYGTEFTLTISSVQSEDFAVYYCQQDFSSPRTFGCGTKVEIKGKPGSGKPGSGKPGSGKPGSEVQLVESGGGLVKPGGSLRLSCVASGFTFSNYWMNWVRQAPGKCLEWVAEIRLYSNNYATHYAESVKGRFTISRDDSKSTLYLQMNNLKTEDTGVYYCTRYYGNYGGYFDVWGQGTLVTVSS

SEQ ID NO: 11331 - protein, 107 aa, Artificial Sequence; identical to SEQ ID NO: 11323
  Description of Artificial Sequence: Synthetic polypeptide
  VH of XENP019665

SEQ ID NO: 11332 - protein, 122 aa, Artificial Sequence; identical to SEQ ID NO: 11322
  Description of Artificial Sequence: Synthetic polypeptide
  VL of XENP019665

SEQ ID NO: 11333 - protein, 11 aa, Artificial Sequence
  Description of Artificial Sequence: Synthetic peptide
  XENP019665 vhCDR1
RASQSVGNDVA

SEQ ID NO: 11334 - protein, 7 aa, Artificial Sequence
  Description of Artificial Sequence: Synthetic peptide
  XENP019665 vhCDR2
YASHRYT

SEQ ID NO: 11335 - protein, 9 aa, Artificial Sequence
  Description of Artificial Sequence: Synthetic peptide
  XENP019665 vhCDR3
QQDFSSPRT

SEQ ID NO: 11336 - protein, 5 aa, Artificial Sequence
  Description of Artificial Sequence: Synthetic peptide
  XENP019665 vlCDR1
NYWMN

SEQ ID NO: 11337 - protein, 19 aa, Artificial Sequence
  Description of Artificial Sequence: Synthetic peptide
  XENP019665 vlCDR2
EIRLYSNNYATHYAESVKG

SEQ ID NO: 11338 - protein, 11 aa, Artificial Sequence
  Description of Artificial Sequence: Synthetic peptide
  XENP019665 vlCDR3
YYGNYGGYFDV

SEQ ID NO: 11339 - protein, 249 aa, Artificial Sequence
  Description of Artificial Sequence: Synthetic polypeptide
  XENP019666 1G6_H1.284_L1.194_scFv(GKPGS)4
EVQLVESGGGLVKPGGSLRLSCVASGFTFSNYWMNWVRQAPGKGLEWVCEIRLYSNNYATHYAESVKGRFTCSRDDSKSTLYLQMNNLKTEDTGVYYCTRYYGNYGGYFDVWGRGTLVTVSSGKPGSGKPGSGKPGSGKPGSEIVLTQSPATLSASPGERVTLTCRASQSVGNDVAWYQQKPGQAPRLLINYASHRYTGVPDRFTGSGYGTEFTLTISSVQSEDFGVYYCQQDFSSPRTFGGGTKVEIK

SEQ ID NO: 11340 - protein, 122 aa, Artificial Sequence; identical to SEQ ID NO: 10953
  Description of Artificial Sequence: Synthetic polypeptide
  VH of XENP019666

SEQ ID NO: 11341 - protein, 107 aa, Artificial Sequence; identical to SEQ ID NO: 10999
  Description of Artificial Sequence: Synthetic polypeptide
  VL of XENP019666

SEQ ID NO: 11342 - protein, 5 aa, Artificial Sequence
  Description of Artificial Sequence: Synthetic peptide
  XENP019666 vhCDR1
NYWMN

SEQ ID NO: 11343 - protein, 19 aa, Artificial Sequence
  Description of Artificial Sequence: Synthetic peptide
  XENP019666 vhCDR2
EIRLYSNNYATHYAESVKG

SEQ ID NO: 11344 - protein, 11 aa, Artificial Sequence
  Description of Artificial Sequence: Synthetic peptide
  XENP019666 vhCDR3
YYGNYGGYFDV

SEQ ID NO: 11345 - protein, 11 aa, Artificial Sequence
  Description of Artificial Sequence: Synthetic peptide
  XENP019666 vlCDR1
RASQSVGNDVA

SEQ ID NO: 11346 - protein, 7 aa, Artificial Sequence
  Description of Artificial Sequence: Synthetic peptide
  XENP019666 vlCDR2
YASHRYT

SEQ ID NO: 11347 - protein, 9 aa, Artificial Sequence
  Description of Artificial Sequence: Synthetic peptide
  XENP019666 vlCDR3
QQDFSSPRT

SEQ ID NO: 11348 - protein, 249 aa, Artificial Sequence
  Description of Artificial Sequence: Synthetic polypeptide
  XENP019667 1G6_L1.194_H1.284_scFv(GKPGS)4
EIVLTQSPATLSASPGERVTLTCRASQSVGNDVAWYQQKPGQAPRLLINYASHRYTGVPDRFTGSGYGTEFTLTISSVQSEDFGVYYCQQDFSSPRTFGGGTKVEIKGKPGSGKPGSGKPGSGKPGSEVQLVESGGGLVKPGGSLRLSCVASGFTFSNYWMNWVRQAPGKGLEWVCEIRLYSNNYATHYAESVKGRFTCSRDDSKSTLYLQMNNLKTEDTGVYYCTRYYGNYGGYFDVWGRGTLVTVSS

SEQ ID NO: 11349 - protein, 107 aa, Artificial Sequence; identical to SEQ ID NO: 10999
  Description of Artificial Sequence: Synthetic polypeptide
  VH of XENP019667

SEQ ID NO: 11350 - protein, 122 aa, Artificial Sequence; identical to SEQ ID NO: 10953
  Description of Artificial Sequence: Synthetic polypeptide
  VL of XENP019667

SEQ ID NO: 11351 - protein, 11 aa, Artificial Sequence
  Description of Artificial Sequence: Synthetic peptide
  XENP019667 vhCDR1
RASQSVGNDVA

SEQ ID NO: 11352 - protein, 7 aa, Artificial Sequence
  Description of Artificial Sequence: Synthetic peptide
  XENP019667 vhCDR2
YASHRYT

SEQ ID NO: 11353 - protein, 9 aa, Artificial Sequence
  Description of Artificial Sequence: Synthetic peptide
  XENP019667 vhCDR3
QQDFSSPRT

SEQ ID NO: 11354 - protein, 5 aa, Artificial Sequence
  Description of Artificial Sequence: Synthetic peptide
  XENP019667 vlCDR1
NYWMN

SEQ ID NO: 11355 - protein, 19 aa, Artificial Sequence
  Description of Artificial Sequence: Synthetic peptide
  XENP019667 vlCDR2
EIRLYSNNYATHYAESVKG

SEQ ID NO: 11356 - protein, 11 aa, Artificial Sequence
  Description of Artificial Sequence: Synthetic peptide
  XENP019667 vlCDR3
YYGNYGGYFDV

SEQ ID NO: 11357 - protein, 249 aa, Artificial Sequence
  Description of Artificial Sequence: Synthetic polypeptide
  XENP019668 1G6_H1.288_L1.210_scFv(GKPGS)4
EVQLVESGGGLVKPGGSLRLSCVASGFTFSNYWMNWVRQAPGKCLEWVAEIRLYSNNYATHYAESVKGRFTISRDDSKSTLYLQMNNLKTEDTGVYYCTRYYGNYGGYFDVWGRGTLVTVSSGKPGSGKPGSGKPGSGKPGSEIVLTQSPATLSASPGERVTLTCRASQSVGNDVAWYQQKPGQAPRLLINYASHRYTGVPDRFTGSGYGTEFTLTISSVQSEDFGVYYCQQDFSSPRTFGCGTKVEIK

SEQ ID NO: 11358 - protein, 122 aa, Artificial Sequence
  Description of Artificial Sequence: Synthetic polypeptide
  VH of XENP019668
EVQLVESGGGLVKPGGSLRLSCVASGFTFSNYWMNWVRQAPGKCLEWVAEIRLYSNNYATHYAESVKGRFTISRDDSKSTLYLQMNNLKTEDTGVYYCTRYYGNYGGYFDVWGRGTLVTVSS

SEQ ID NO: 11359 - protein, 107 aa, Artificial Sequence
  Description of Artificial Sequence: Synthetic polypeptide
  VL of XENP019668
EIVLTQSPATLSASPGERVTLTCRASQSVGNDVAWYQQKPGQAPRLLINYASHRYTGVPDRFTGSGYGTEFTLTISSVQSEDFGVYYCQQDFSSPRTFGCGTKVEIK

SEQ ID NO: 11360 - protein, 5 aa, Artificial Sequence
  Description of Artificial Sequence: Synthetic peptide
  XENP019668 vhCDR1
NYWMN

SEQ ID NO: 11361 - protein, 19 aa, Artificial Sequence
  Description of Artificial Sequence: Synthetic peptide
  XENP019668 vhCDR2
EIRLYSNNYATHYAESVKG

SEQ ID NO: 11362 - protein, 11 aa, Artificial Sequence
  Description of Artificial Sequence: Synthetic peptide
  XENP019668 vhCDR3
YYGNYGGYFDV

SEQ ID NO: 11363 - protein, 11 aa, Artificial Sequence
  Description of Artificial Sequence: Synthetic peptide
  XENP019668 vlCDR1
RASQSVGNDVA

SEQ ID NO: 11364 - protein, 7 aa, Artificial Sequence
  Description of Artificial Sequence: Synthetic peptide
  XENP019668 vlCDR2
YASHRYT

SEQ ID NO: 11365 - protein, 9 aa, Artificial Sequence
  Description of Artificial Sequence: Synthetic peptide
  XENP019668 vlCDR3
QQDFSSPRT

SEQ ID NO: 11366 - protein, 249 aa, Artificial Sequence
  Description of Artificial Sequence: Synthetic polypeptide
  XENP019669 1G6_L1.210_H1.288_scFv(GKPGS)4
EIVLTQSPATLSASPGERVTLTCRASQSVGNDVAWYQQKPGQAPRLLINYASHRYTGVPDRFTGSGYGTEFTLTISSVQSEDFGVYYCQQDFSSPRTFGCGTKVEIKGKPGSGKPGSGKPGSGKPGSEVQLVESGGGLVKPGGSLRLSCVASGFTFSNYWMNWVRQAPGKCLEWVAEIRLYSNNYATHYAESVKGRFTISRDDSKSTLYLQMNNLKTEDTGVYYCTRYYGNYGGYFDVWGRGTLVTVSS

SEQ ID NO: 11367 - protein, 107 aa, Artificial Sequence; identical to SEQ ID NO: 11359
  Description of Artificial Sequence: Synthetic polypeptide
  VH of XENP019669

SEQ ID NO: 11368 - protein, 122 aa, Artificial Sequence; identical to SEQ ID NO: 11358
  Description of Artificial Sequence: Synthetic polypeptide
  VL of XENP019669

SEQ ID NO: 11369 - protein, 11 aa, Artificial Sequence
  Description of Artificial Sequence: Synthetic peptide
  XENP019669 vhCDR1
RASQSVGNDVA

SEQ ID NO: 11370 - protein, 7 aa, Artificial Sequence
  Description of Artificial Sequence: Synthetic peptide
  XENP019669 vhCDR2
YASHRYT

SEQ ID NO: 11371 - protein, 9 aa, Artificial Sequence
  Description of Artificial Sequence: Synthetic peptide
  XENP019669 vhCDR3
QQDFSSPRT

SEQ ID NO: 11372 - protein, 5 aa, Artificial Sequence
  Description of Artificial Sequence: Synthetic peptide
  XENP019669 vlCDR1
NYWMN

SEQ ID NO: 11373 - protein, 19 aa, Artificial Sequence
  Description of Artificial Sequence: Synthetic peptide
  XENP019669 vlCDR2
EIRLYSNNYATHYAESVKG

SEQ ID NO: 11374 - protein, 11 aa, Artificial Sequence
  Description of Artificial Sequence: Synthetic peptide
  XENP019669 vlCDR3
YYGNYGGYFDV

SEQ ID NO: 11375 - protein, 249 aa, Artificial Sequence
  Description of Artificial Sequence: Synthetic polypeptide
  XENP019690 1G6_H1.279_L1.194_scFv(GKPGS)4
EVQLVESGGGLVKPGGSLRLSCVASGFTFSNYWMNWVRQAPGKGLEWVAEIRLYSNNYATHYAESVKGRFTISRDDSKSTLYLQMNNLKTEDTGVYYCTRYYGNYGGYFDVWGRGTLVTVSSGKPGSGKPGSGKPGSGKPGSEIVLTQSPATLSASPGERVTLTCRASQSVGNDVAWYQQKPGQAPRLLINYASHRYTGVPDRFTGSGYGTEFTLTISSVQSEDFGVYYCQQDFSSPRTFGGGTKVEIK

SEQ ID NO: 11376 - protein, 122 aa, Artificial Sequence; identical to SEQ ID NO: 10908
  Description of Artificial Sequence: Synthetic polypeptide
  VH of XENP019690

SEQ ID NO: 11377 - protein, 107 aa, Artificial Sequence; identical to SEQ ID NO: 10999
  Description of Artificial Sequence: Synthetic polypeptide
  VL of XENP019690

SEQ ID NO: 11378 - protein, 5 aa, Artificial Sequence
  Description of Artificial Sequence: Synthetic peptide
  XENP019690 vhCDR1
NYWMN

SEQ ID NO: 11379 - protein, 19 aa, Artificial Sequence
  Description of Artificial Sequence: Synthetic peptide
  XENP019690 vhCDR2
EIRLYSNNYATHYAESVKG

SEQ ID NO: 11380 - protein, 11 aa, Artificial Sequence
  Description of Artificial Sequence: Synthetic peptide
  XENP019690 vhCDR3
YYGNYGGYFDV

SEQ ID NO: 11381 - protein, 11 aa, Artificial Sequence
  Description of Artificial Sequence: Synthetic peptide
  XENP019690 vlCDR1
RASQSVGNDVA

SEQ ID NO: 11382 - protein, 7 aa, Artificial Sequence
  Description of Artificial Sequence: Synthetic peptide
  XENP019690 vlCDR2
YASHRYT

SEQ ID NO: 11383 - protein, 9 aa, Artificial Sequence
  Description of Artificial Sequence: Synthetic peptide
  XENP019690 vlCDR3
QQDFSSPRT

SEQ ID NO: 11384 - protein, 249 aa, Artificial Sequence
  Description of Artificial Sequence: Synthetic polypeptide
  XENP019691 1G6_H1.282_L1.194_scFv(GKPGS)4
EVQLVESGGGLVKPGGSLRLTCVASGFTFSNYWMNWVRQAPGKGLEWVAEIRLYSNNYATHYAESVKGRFTISRDDSKSMLYLQMNNLKTEDTGVYYCTRYYGNYGGYFDVWGRGTLVTVSSGKPGSGKPGSGKPGSGKPGSEIVLTQSPATLSASPGERVTLTCRASQSVGNDVAWYQQKPGQAPRLLINYASHRYTGVPDRFTGSGYGTEFTLTISSVQSEDFGVYYCQQDFSSPRTFGGGTKVEIK

SEQ ID NO: 11385 - protein, 122 aa, Artificial Sequence; identical to SEQ ID NO: 10935
  Description of Artificial Sequence: Synthetic polypeptide
  VH of XENP019691

SEQ ID NO: 11386 - protein, 107 aa, Artificial Sequence; identical to SEQ ID NO: 10999
  Description of Artificial Sequence: Synthetic polypeptide
  VL of XENP019691

SEQ ID NO: 11387 - protein, 5 aa, Artificial Sequence
  Description of Artificial Sequence: Synthetic peptide
  XENP019691 vhCDR1
NYWMN

SEQ ID NO: 11388 - protein, 19 aa, Artificial Sequence
  Description of Artificial Sequence: Synthetic peptide
  XENP019691 vhCDR2
EIRLYSNNYATHYAESVKG

SEQ ID NO: 11389 - protein, 11 aa, Artificial Sequence
  Description of Artificial Sequence: Synthetic peptide
  XENP019691 vhCDR3
YYGNYGGYFDV

SEQ ID NO: 11390 - protein, 11 aa, Artificial Sequence
  Description of Artificial Sequence: Synthetic peptide
  XENP019691 vlCDR1
RASQSVGNDVA

SEQ ID NO: 11391 - protein, 7 aa, Artificial Sequence
  Description of Artificial Sequence: Synthetic peptide
  XENP019691 vlCDR2
YASHRYT

SEQ ID NO: 11392 - protein, 9 aa, Artificial Sequence
  Description of Artificial Sequence: Synthetic peptide
  XENP019691 vlCDR3
QQDFSSPRT

SEQ ID NO: 11393 - protein, 249 aa, Artificial Sequence
  Description of Artificial Sequence: Synthetic polypeptide
  XENP019692 1G6_L1.194_H1.279_scFv(GKPGS)4
EIVLTQSPATLSASPGERVTLTCRASQSVGNDVAWYQQKPGQAPRLLINYASHRYTGVPDRFTGSGYGTEFTLTISSVQSEDFGVYYCQQDFSSPRTFGGGTKVEIKGKPGSGKPGSGKPGSGKPGSEVQLVESGGGLVKPGGSLRLSCVASGFTFSNYWMNWVRQAPGKGLEWVAEIRLYSNNYATHYAESVKGRFTISRDDSKSTLYLQMNNLKTEDTGVYYCTRYYGNYGGYFDVWGRGTLVTVSS

SEQ ID NO: 11394 - protein, 107 aa, Artificial Sequence; identical to SEQ ID NO: 10999
  Description of Artificial Sequence: Synthetic polypeptide
  VH of XENP019692

SEQ ID NO: 11395 - protein, 122 aa, Artificial Sequence; identical to SEQ ID NO: 10908
  Description of Artificial Sequence: Synthetic polypeptide
  VL of XENP019692

SEQ ID NO: 11396 - protein, 11 aa, Artificial Sequence
  Description of Artificial Sequence: Synthetic peptide
  XENP019692 vhCDR1
RASQSVGNDVA

SEQ ID NO: 11397 - protein, 7 aa, Artificial Sequence
  Description of Artificial Sequence: Synthetic peptide
  XENP019692 vhCDR2
YASHRYT

SEQ ID NO: 11398 - protein, 9 aa, Artificial Sequence
  Description of Artificial Sequence: Synthetic peptide
  XENP019692 vhCDR3
QQDFSSPRT

SEQ ID NO: 11399 - protein, 5 aa, Artificial Sequence
  Description of Artificial Sequence: Synthetic peptide
  XENP019692 vlCDR1
NYWMN

SEQ ID NO: 11400 - protein, 19 aa, Artificial Sequence
  Description of Artificial Sequence: Synthetic peptide
  XENP019692 vlCDR2
EIRLYSNNYATHYAESVKG

SEQ ID NO: 11401 - protein, 11 aa, Artificial Sequence
  Description of Artificial Sequence: Synthetic peptide
  XENP019692 vlCDR3
YYGNYGGYFDV

SEQ ID NO: 11402 - protein, 249 aa, Artificial Sequence
  Description of Artificial Sequence: Synthetic polypeptide
  XENP019693 1G6_L1.194_H1.282_scFv(GKPGS)4
EIVLTQSPATLSASPGERVTLTCRASQSVGNDVAWYQQKPGQAPRLLINYASHRYTGVPDRFTGSGYGTEFTLTISSVQSEDFGVYYCQQDFSSPRTFGGGTKVEIKGKPGSGKPGSGKPGSGKPGSEVQLVESGGGLVKPGGSLRLTCVASGFTFSNYWMNWVRQAPGKGLEWVAEIRLYSNNYATHYAESVKGRFTISRDDSKSMLYLQMNNLKTEDTGVYYCTRYYGNYGGYFDVWGRGTLVTVSS

SEQ ID NO: 11403 - protein, 107 aa, Artificial Sequence; identical to SEQ ID NO: 10999
  Description of Artificial Sequence: Synthetic polypeptide
  VH of XENP019693

SEQ ID NO: 11404 - protein, 122 aa, Artificial Sequence; identical to SEQ ID NO: 10935
  Description of Artificial Sequence: Synthetic polypeptide
  VL of XENP019693

SEQ ID NO: 11405 - protein, 11 aa, Artificial Sequence
  Description of Artificial Sequence: Synthetic peptide
  XENP019693 vhCDR1
RASQSVGNDVA

SEQ ID NO: 11406 - protein, 7 aa, Artificial Sequence
  Description of Artificial Sequence: Synthetic peptide
  XENP019693 vhCDR2
YASHRYT

SEQ ID NO: 11407 - protein, 9 aa, Artificial Sequence
  Description of Artificial Sequence: Synthetic peptide
  XENP019693 vhCDR3
QQDFSSPRT

SEQ ID NO: 11408 - protein, 5 aa, Artificial Sequence
  Description of Artificial Sequence: Synthetic peptide
  XENP019693 vlCDR1
NYWMN

SEQ ID NO: 11409 - protein, 19 aa, Artificial Sequence
  Description of Artificial Sequence: Synthetic peptide
  XENP019693 vlCDR2
EIRLYSNNYATHYAESVKG

SEQ ID NO: 11410 - protein, 11 aa, Artificial Sequence
  Description of Artificial Sequence: Synthetic peptide
  XENP019693 vlCDR3
YYGNYGGYFDV

SEQ ID NO: 11411 - protein, 247 aa, Artificial Sequence
  Description of Artificial Sequence: Synthetic polypeptide
  XENP020162 2E9_H1L1_scFv(GKPGS)4
QVQLVQSGAEVKKPGASVKVSCKASGYAFTNYWLGWVRQAPGQGLEWMGNFYPGSSNTYYNEKFQGRVTMTADKSISTAYMELSRLRSDDTAVYFCARHYGTNYRYFDVWGAGTLVTVSSGKPGSGKPGSGKPGSGKPGSDIVLTQSPGTLSLSPGERATLSCRASQSVSNDVAWYQQKPGQSPRLLIYYASNRYTGVPDRFTGSGYGTDFTLTISRLEPEDFAVYFCQQDYSSPYTFGGGTKVEIK

SEQ ID NO: 11412 - protein, 120 aa, Artificial Sequence
  Description of Artificial Sequence: Synthetic polypeptide
  VH of XENP020162
QVQLVQSGAEVKKPGASVKVSCKASGYAFTNYWLGWVRQAPGQGLEWMGNFYPGSSNTYYNEKFQGRVTMTADKSISTAYMELSRLRSDDTAVYFCARHYGTNYRYFDVWGAGTLVTVSS

SEQ ID NO: 11413 - protein, 107 aa, Artificial Sequence
  Description of Artificial Sequence: Synthetic polypeptide
  VL of XENP020162
DIVLTQSPGTLSLSPGERATLSCRASQSVSNDVAWYQQKPGQSPRLLIYYASNRYTGVPDRFTGSGYGTDFTLTISRLEPEDFAVYFCQQDYSSPYTFGGGTKVEIK

SEQ ID NO: 11414 - protein, 5 aa, Artificial Sequence
  Description of Artificial Sequence: Synthetic peptide
  XENP020162 vhCDR1
NYWLG

SEQ ID NO: 11415 - protein, 17 aa, Artificial Sequence
  Description of Artificial Sequence: Synthetic peptide
  XENP020162 vhCDR2
NFYPGSSNTYYNEKFQG

SEQ ID NO: 11416 - protein, 11 aa, Artificial Sequence
  Description of Artificial Sequence: Synthetic peptide
  XENP020162 vhCDR3
HYGTNYRYFDV

SEQ ID NO: 11417 - protein, 11 aa, Artificial Sequence
  Description of Artificial Sequence: Synthetic peptide
  XENP020162 vlCDR1
RASQSVSNDVA

SEQ ID NO: 11418 - protein, 7 aa, Artificial Sequence
  Description of Artificial Sequence: Synthetic peptide
  XENP020162 vlCDR2
YASNRYT

SEQ ID NO: 11419 - protein, 9 aa, Artificial Sequence
  Description of Artificial Sequence: Synthetic peptide
  XENP020162 vlCDR3
QQDYSSPYT

SEQ ID NO: 11420 - protein, 247 aa, Artificial Sequence
  Description of Artificial Sequence: Synthetic polypeptide
  XENP020163 2E9_H2L1_scFv(GKPGS)4
EVQLVQSGAEVKKPGESLKISCKASGYAFTNYWLGWVRQMPGKGLEWMGNFYPGSSNTYYNPSFQGQVTISADKSISTAYLQWSSLKASDTAMYFCARHYGTNYRYFDVWGAGTLVTVSSGKPGSGKPGSGKPGSGKPGSDIVLTQSPGTLSLSPGERATLSCRASQSVSNDVAWYQQKPGQSPRLLIYYASNRYTGVPDRFTGSGYGTDFTLTISRLEPEDFAVYFCQQDYSSPYTFGGGTKVEIK

SEQ ID NO: 11421 - protein, 120 aa, Artificial Sequence
  Description of Artificial Sequence: Synthetic polypeptide
  VH of XENP020163
EVQLVQSGAEVKKPGESLKISCKASGYAFTNYWLGWVRQMPGKGLEWMGNFYPGSSNTYYNPSFQGQVTISADKSISTAYLQWSSLKASDTAMYFCARHYGTNYRYFDVWGAGTLVTVSS

SEQ ID NO: 11422 - protein, 107 aa, Artificial Sequence; identical to SEQ ID NO: 11413
  Description of Artificial Sequence: Synthetic polypeptide
  VL of XENP020163

SEQ ID NO: 11423 - protein, 5 aa, Artificial Sequence
  Description of Artificial Sequence: Synthetic peptide
  XENP020163 vhCDR1
NYWLG

SEQ ID NO: 11424 - protein, 17 aa, Artificial Sequence
  Description of Artificial Sequence: Synthetic peptide
  XENP020163 vhCDR2
NFYPGSSNTYYNPSFQG

SEQ ID NO: 11425 - protein, 11 aa, Artificial Sequence
  Description of Artificial Sequence: Synthetic peptide
  XENP020163 vhCDR3
HYGTNYRYFDV

SEQ ID NO: 11426 - protein, 11 aa, Artificial Sequence
  Description of Artificial Sequence: Synthetic peptide
  XENP020163 vlCDR1
RASQSVSNDVA

SEQ ID NO: 11427 - protein, 7 aa, Artificial Sequence
  Description of Artificial Sequence: Synthetic peptide
  XENP020163 vlCDR2
YASNRYT

SEQ ID NO: 11428 - protein, 9 aa, Artificial Sequence
  Description of Artificial Sequence: Synthetic peptide
  XENP020163 vlCDR3
QQDYSSPYT

SEQ ID NO: 11429 - protein, 242 aa, Artificial Sequence
  Description of Artificial Sequence: Synthetic polypeptide
  XENP020164 3C11(PD-1)_H1L1_scFv(GKPGS)4
QVQLVQSGAEVKKPGASVKVSCKASGYTFTSYWMHWVRQAPGQGLEWMGAIYPGNIATSYNQKFQGRVTMTADTSTSTAYMELSSLRSEDTAVYYCTTSYVMDYWGQGTLVTVSSGKPGSGKPGSGKPGSGKPGSDIVMTQSPSSLSASVGDRVTITCQASQDINSYLSWFQQKPGKSPKTLIYRANRLVDGVPSRFSGSGSGQDYTFTISSLQPEDIATYYCLQYDEFPYTFGGGTKVEIK

SEQ ID NO: 11430 - protein, 115 aa, Artificial Sequence
  Description of Artificial Sequence: Synthetic polypeptide
  VH of XENP020164
QVQLVQSGAEVKKPGASVKVSCKASGYTFTSYWMHWVRQAPGQGLEWMGAIYPGNIATSYNQKFQGRVTMTADTSTSTAYMELSSLRSEDTAVYYCTTSYVMDYWGQGTLVTVSS

SEQ ID NO: 11431 - protein, 107 aa, Artificial Sequence
  Description of Artificial Sequence: Synthetic polypeptide
  VL of XENP020164
DIVMTQSPSSLSASVGDRVTITCQASQDINSYLSWFQQKPGKSPKTLIYRANRLVDGVPSRFSGSGSGQDYTFTISSLQPEDIATYYCLQYDEFPYTFGGGTKVEIK

SEQ ID NO: 11432 - protein, 5 aa, Artificial Sequence
  Description of Artificial Sequence: Synthetic peptide
  XENP020164 vhCDR1
SYWMH

SEQ ID NO: 11433 - protein, 17 aa, Artificial Sequence
  Description of Artificial Sequence: Synthetic peptide
  XENP020164 vhCDR2
AIYPGNIATSYNQKFQG

SEQ ID NO: 11434 - protein, 6 aa, Artificial Sequence
  Description of Artificial Sequence: Synthetic peptide
  XENP020164 vhCDR3
SYVMDY

SEQ ID NO: 11435 - protein, 11 aa, Artificial Sequence
  Description of Artificial Sequence: Synthetic peptide
  XENP020164 vlCDR1
QASQDINSYLS

SEQ ID NO: 11436 - protein, 7 aa, Artificial Sequence
  Description of Artificial Sequence: Synthetic peptide
  XENP020164 vlCDR2
RANRLVD

SEQ ID NO: 11437 - protein, 9 aa, Artificial Sequence
  Description of Artificial Sequence: Synthetic peptide
  XENP020164 vlCDR3
LQYDEFPYT

SEQ ID NO: 11438 - protein, 239 aa, Artificial Sequence
  Description of Artificial Sequence: Synthetic polypeptide
  XENP020165 3G12_H1L1_scFv(GKPGS)4
QVQLVQSGAEVKKPGASVKVSCKASGYTFTSYWMHWVRQAPGQGLEWMGVIDPSDSYTSYNQKFQGRVTMTVDTSTSTAYMELSSLRSEDTAVYYCTGAYYWGQGTLVTVSSGKPGSGKPGSGKPGSGKPGSDIVLTQSPSSLSASVGDRVTITCRASQGISSNIGWLQQKPGKSFKGLIYHGTNLEDGVPSRFTGSGSGADYTLTISSLQPEDFATYYCVQYAQSPWTFGGGTKVEIK

SEQ ID NO: 11439 - protein, 112 aa, Artificial Sequence
  Description of Artificial Sequence: Synthetic polypeptide
  VH of XENP020165
QVQLVQSGAEVKKPGASVKVSCKASGYTFTSYWMHWVRQAPGQGLEWMGVIDPSDSYTSYNQKFQGRVTMTVDTSTSTAYMELSSLRSEDTAVYYCTGAYYWGQGTLVTVSS

SEQ ID NO: 11440 - protein, 107 aa, Artificial Sequence
  Description of Artificial Sequence: Synthetic polypeptide
  VL of XENP020165
DIVLTQSPSSLSASVGDRVTITCRASQGISSNIGWLQQKPGKSFKGLIYHGTNLEDGVPSRFTGSGSGADYTLTISSLQPEDFATYYCVQYAQSPWTFGGGTKVEIK

SEQ ID NO: 11441 - protein, 5 aa, Artificial Sequence
  Description of Artificial Sequence: Synthetic peptide
  XENP020165 vhCDR1
SYWMH

SEQ ID NO: 11442 - protein, 17 aa, Artificial Sequence
  Description of Artificial Sequence: Synthetic peptide
  XENP020165 vhCDR2
VIDPSDSYTSYNQKFQG

SEQ ID NO: 11443 - protein, 3 aa, Artificial Sequence
  Description of Artificial Sequence: Synthetic peptide
  XENP020165 vhCDR3
AYY

SEQ ID NO: 11444 - protein, 11 aa, Artificial Sequence
  Description of Artificial Sequence: Synthetic peptide
  XENP020165 vlCDR1
RASQGISSNIG

SEQ ID NO: 11445 - protein, 7 aa, Artificial Sequence
  Description of Artificial Sequence: Synthetic peptide
  XENP020165 vlCDR2
HGTNLED

SEQ ID NO: 11446 - protein, 9 aa, Artificial Sequence
  Description of Artificial Sequence: Synthetic peptide
  XENP020165 vlCDR3
VQYAQSPWT

SEQ ID NO: 11447 - protein, 239 aa, Artificial Sequence
  Description of Artificial Sequence: Synthetic polypeptide
  XENP020166 5C4_H1L1_scFv(GKPGS)4
QVQLVQSGAEVKKPGASVKVSCKASGYTFTDYWMHWLRQAPGQGLEWMGAIDTSDSYPTYNQKFQGRVTMTVDDSTSTAYMELSSLRSEDTAVYYCTRFDYWGQGTLVTVSSGKPGSGKPGSGKPGSGKPGSDIVMTQSPDSLAVSLGERATINCKASQSVSNDVAWYQQKPGQSPKLLIYYASNRYTGVPDRFTGSGYGTDFTLTISSLQAEDVAVYFCQQDYSSPYTFGGGTKVEIK

SEQ ID NO: 11448 - protein, 112 aa, Artificial Sequence
  Description of Artificial Sequence: Synthetic polypeptide
  VH of XENP020166
QVQLVQSGAEVKKPGASVKVSCKASGYTFTDYWMHWLRQAPGQGLEWMGAIDTSDSYPTYNQKFQGRVTMTVDDSTSTAYMELSSLRSEDTAVYYCTRFDYWGQGTLVTVSS

SEQ ID NO: 11449 - protein, 107 aa, Artificial Sequence
  Description of Artificial Sequence: Synthetic polypeptide
  VL of XENP020166
DIVMTQSPDSLAVSLGERATINCKASQSVSNDVAWYQQKPGQSPKLLIYYASNRYTGVPDRFTGSGYGTDFTLTISSLQAEDVAVYFCQQDYSSPYTFGGGTKVEIK

SEQ ID NO: 11450 - protein, 5 aa, Artificial Sequence
  Description of Artificial Sequence: Synthetic peptide
  XENP020166 vhCDR1
DYWMH

SEQ ID NO: 11451 - protein, 17 aa, Artificial Sequence
  Description of Artificial Sequence: Synthetic peptide
  XENP020166 vhCDR2
AIDTSDSYPTYNQKFQG

SEQ ID NO: 11452 - protein, 3 aa, Artificial Sequence
  Description of Artificial Sequence: Synthetic peptide
  XENP020166 vhCDR3
FDY

SEQ ID NO: 11453 - protein, 11 aa, Artificial Sequence
  Description of Artificial Sequence: Synthetic peptide
  XENP020166 vlCDR1
KASQSVSNDVA

SEQ ID NO: 11454 - protein, 7 aa, Artificial Sequence
  Description of Artificial Sequence: Synthetic peptide
  XENP020166 vlCDR2
YASNRYT

SEQ ID NO: 11455 - protein, 9 aa, Artificial Sequence
  Description of Artificial Sequence: Synthetic peptide
  XENP020166 vlCDR3
QQDYSSPYT

SEQ ID NO: 11456 - protein, 239 aa, Artificial Sequence
  Description of Artificial Sequence: Synthetic polypeptide
  XENP020167 5C4_H2L1_scFv(GKPGS)4
QVQLVQSGSELKKPGASVKVSCKASGYTFTDYWMHWLRQAPGQGLEWMGAIDTSDSYPTYNQGFTGRFVFSVDDSVSTAYLQISSLKAEDTAVYYCTRFDYWGQGTLVTVSSGKPGSGKPGSGKPGSGKPGSDIVMTQSPDSLAVSLGERATINCKASQSVSNDVAWYQQKPGQSPKLLIYYASNRYTGVPDRFTGSGYGTDFTLTISSLQAEDVAVYFCQQDYSSPYTFGGGTKVEIK

SEQ ID NO: 11457 - protein, 112 aa, Artificial Sequence
  Description of Artificial Sequence: Synthetic polypeptide
  VH of XENP020167
QVQLVQSGSELKKPGASVKVSCKASGYTFTDYWMHWLRQAPGQGLEWMGAIDTSDSYPTYNQGFTGRFVFSVDDSVSTAYLQISSLKAEDTAVYYCTRFDYWGQGTLVTVSS

SEQ ID NO: 11458 - protein, 107 aa, Artificial Sequence; identical to SEQ ID NO: 11449
  Description of Artificial Sequence: Synthetic polypeptide
  VL of XENP020167

SEQ ID NO: 11459 - protein, 5 aa, Artificial Sequence
  Description of Artificial Sequence: Synthetic peptide
  XENP020167 vhCDR1
DYWMH

SEQ ID NO: 11460 - protein, 17 aa, Artificial Sequence
  Description of Artificial Sequence: Synthetic peptide
  XENP020167 vhCDR2
AIDTSDSYPTYNQGFTG

SEQ ID NO: 11461 - protein, 3 aa, Artificial Sequence
  Description of Artificial Sequence: Synthetic peptide
  XENP020167 vhCDR3
FDY

SEQ ID NO: 11462 - protein, 11 aa, Artificial Sequence
  Description of Artificial Sequence: Synthetic peptide
  XENP020167 vlCDR1
KASQSVSNDVA

SEQ ID NO: 11463 - protein, 7 aa, Artificial Sequence
  Description of Artificial Sequence: Synthetic peptide
  XENP020167 vlCDR2
YASNRYT

SEQ ID NO: 11464 - protein, 9 aa, Artificial Sequence
  Description of Artificial Sequence: Synthetic peptide
  XENP020167 vlCDR3
QQDYSSPYT

SEQ ID NO: 11465 - protein, 443 aa, Artificial Sequence
  Description of Artificial Sequence: Synthetic polypeptide
  XENP013810 Nivolumab_H0L0_IgG1 Heavy Chain
QVQLVESGGGVVQPGRSLRLDCKASGITFSNSGMHWVRQAPGKGLEWVAVIWYDGSKRYYADSVKGRFTISRDNSKNTLFLQMNSLRAEDTAVYYCATNDDYWGQGTLVTVSSASTKGPSVFPLAPSSKSTSGGTAALGCLVKDYFPEPVTVSWNSGALTSGVHTFPAVLQSSGLYSLSSVVTVPSSSLGTQTYICNVNHKPSNTKVDKKVEPKSCDKTHTCPPCPAPELLGGPSVFLFPPKPKDTLMISRTPEVTCVVVDVSHEDPEVKFNWYVDGVEVHNAKTKPREEQYNSTYRVVSVLTVLHQDWLNGKEYKCKVSNKALPAPIEKTISKAKGQPREPQVYTLPPSREEMTKNQVSLTCLVKGFYPSDIAVEWESNGQPENNYKTTPPVLDSDGSFFLYSKLTVDKSRWQQGNVFSCSVMHEALHNHYTQKSLSLSPGK

SEQ ID NO: 11466 - protein, 113 aa, Artificial Sequence [sequence omitted]

SEQ ID NO: 11467 - protein, 5 aa, Artificial Sequence
  Description of Artificial Sequence: Synthetic peptide
  XENP013810 vhCDR1
NSGMH

SEQ ID NO: 11468 - protein, 17 aa, Artificial Sequence
  Description of Artificial Sequence: Synthetic peptide
  XENP013810 vhCDR2
VIWYDGSKRYYADSVKG

SEQ ID NO: 11469 - protein, 4 aa, Artificial Sequence
  Description of Artificial Sequence: Synthetic peptide
  XENP013810 vhCDR3
NDDY

SEQ ID NO: 11470 - protein, 214 aa, Artificial Sequence
  Description of Artificial Sequence: Synthetic polypeptide
  XENP013810 Nivolumab_H0L0_IgG1 Light Chain
EIVLTQSPATLSLSPGERATLSCRASQSVSSYLAWYQQKPGQAPRLLIYDASNRATGIPARFSGSGSGTDFTLTISSLEPEDFAVYYCQQSSNWPRTFGQGTKVEIKRTVAAPSVFIFPPSDEQLKSGTASVVCLLNNFYPREAKVQWKVDNALQSGNSQESVTEQDSKDSTYSLSSTLTLSKADYEKHKVYACEVTHQGLSSPVTKSFNRGEC

SEQ ID NO: 11471 - protein, 107 aa, Artificial Sequence [sequence omitted]

SEQ ID NO: 11472 - protein, 11 aa, Artificial Sequence
  Description of Artificial Sequence: Synthetic peptide
  XENP013810 vlCDR1
RASQSVSSYLA

SEQ ID NO: 11473 - protein, 7 aa, Artificial Sequence
  Description of Artificial Sequence: Synthetic peptide
  XENP013810 vlCDR2
DASNRAT

SEQ ID NO: 11474 - protein, 9 aa, Artificial Sequence
  Description of Artificial Sequence: Synthetic peptide
  XENP013810 vlCDR3
QQSSNWPRT

SEQ ID NO: 11475 - protein, 443 aa, Artificial Sequence
  Description of Artificial Sequence: Synthetic polypeptide
  XENP013960 Nivolumab_H0L0_IgG1_G236R/L328R Heavy Chain
QVQLVESGGGVVQPGRSLRLDCKASGITFSNSGMHWVRQAPGKGLEWVAVIWYDGSKRYYADSVKGRFTISRDNSKNTLFLQMNSLRAEDTAVYYCATNDDYWGQGTLVTVSSASTKGPSVFPLAPSSKSTSGGTAALGCLVKDYFPEPVTVSWNSGALTSGVHTFPAVLQSSGLYSLSSVVTVPSSSLGTQTYICNVNHKPSNTKVDKKVEPKSCDKTHTCPPCPAPELLRGPSVFLFPPKPKDTLMISRTPEVTCVVVDVSHEDPEVKFNWYVDGVEVHNAKTKPREEQYNSTYRVVSVLTVLHQDWLNGKEYKCKVSNKARPAPIEKTISKAKGQPREPQVYTLPPSREEMTKNQVSLTCLVKGFYPSDIAVEWESNGQPENNYKTTPPVLDSDGSFFLYSKLTVDKSRWQQGNVFSCSVMHEALHNHYTQKSLSLSPGK

SEQ ID NO: 11476 - protein, 113 aa, Artificial Sequence [sequence omitted]

SEQ ID NO: 11477 - protein, 5 aa, Artificial Sequence
  Description of Artificial Sequence: Synthetic peptide
  XENP013960 vhCDR1
NSGMH

SEQ ID NO: 11478 - protein, 17 aa, Artificial Sequence
  Description of Artificial Sequence: Synthetic peptide
  XENP013960 vhCDR2
VIWYDGSKRYYADSVKG

SEQ ID NO: 11479 - protein, 4 aa, Artificial Sequence
  Description of Artificial Sequence: Synthetic peptide
  XENP013960 vhCDR3
NDDY

SEQ ID NO: 11480 - protein, 214 aa, Artificial Sequence; identical to SEQ ID NO: 11470
  Description of Artificial Sequence: Synthetic polypeptide
  XENP013960 Nivolumab_H0L0_IgG1_G236R/L328R Light Chain

SEQ ID NO: 11481 - protein, 107 aa, Artificial Sequence [sequence omitted]

SEQ ID NO: 11482 - protein, 11 aa, Artificial Sequence
  Description of Artificial Sequence: Synthetic peptide
  XENP013960 vlCDR1
RASQSVSSYLA

SEQ ID NO: 11483 - protein, 7 aa, Artificial Sequence
  Description of Artificial Sequence: Synthetic peptide
  XENP013960 vlCDR2
DASNRAT

SEQ ID NO: 11484 - protein, 9 aa, Artificial Sequence
  Description of Artificial Sequence: Synthetic peptide
  XENP013960 vlCDR3
QQSSNWPRT

SEQ ID NO: 11485 - protein, 442 aa, Artificial Sequence
  Description of Artificial Sequence: Synthetic polypeptide
  XENP016432 Nivolumab_H0L0_IgG1_PVA_/S267K Heavy Chain
QVQLVESGGGVVQPGRSLRLDCKASGITFSNSGMHWVRQAPGKGLEWVAVIWYDGSKRYYADSVKGRFTISRDNSKNTLFLQMNSLRAEDTAVYYCATNDDYWGQGTLVTVSSASTKGPSVFPLAPSSKSTSGGTAALGCLVKDYFPEPVTVSWNSGALTSGVHTFPAVLQSSGLYSLSSVVTVPSSSLGTQTYICNVNHKPSNTKVDKKVEPKSCDKTHTCPPCPAPPVAGPSVFLFPPKPKDTLMISRTPEVTCVVVDVKHEDPEVKFNWYVDGVEVHNAKTKPREEQYNSTYRVVSVLTVLHQDWLNGKEYKCKVSNKALPAPIEKTISKAKGQPREPQVYTLPPSREEMTKNQVSLTCLVKGFYPSDIAVEWESNGQPENNYKTTPPVLDSDGSFFLYSKLTVDKSRWQQGNVFSCSVMHEALHNHYTQKSLSLSPGK

SEQ ID NO: 11486 - protein, 113 aa, Artificial Sequence [sequence omitted]

SEQ ID NO: 11487 - protein, 5 aa, Artificial Sequence
  Description of Artificial Sequence: Synthetic peptide
  XENP016432 vhCDR1
NSGMH

SEQ ID NO: 11488 - protein, 17 aa, Artificial Sequence
  Description of Artificial Sequence: Synthetic peptide
  XENP016432 vhCDR2
VIWYDGSKRYYADSVKG

SEQ ID NO: 11489 - protein, 4 aa, Artificial Sequence
  Description of Artificial Sequence: Synthetic peptide
  XENP016432 vhCDR3
NDDY

SEQ ID NO: 11490 - protein, 214 aa, Artificial Sequence; identical to SEQ ID NO: 11470
  Description of Artificial Sequence: Synthetic polypeptide
  XENP016432 Nivolumab_H0L0_IgG1_PVA_/S267K Light Chain

SEQ ID NO: 11491 - protein, 107 aa, Artificial Sequence [sequence omitted]

SEQ ID NO: 11492 - protein, 11 aa, Artificial Sequence
  Description of Artificial Sequence: Synthetic peptide
  XENP016432 vlCDR1
RASQSVSSYLA

SEQ ID NO: 11493 - protein, 7 aa, Artificial Sequence
  Description of Artificial Sequence: Synthetic peptide
  XENP016432 vlCDR2
DASNRAT

SEQ ID NO: 11494 - protein, 9 aa, Artificial Sequence
  Description of Artificial Sequence: Synthetic peptide
  XENP016432 vlCDR3
QQSSNWPRT

SEQ ID NO: 11495 - protein, 440 aa, Artificial Sequence
  Description of Artificial Sequence: Synthetic polypeptide
  XENP016602 Nivolumab_H0_IgG4_S228P Heavy Chain
QVQLVESGGGVVQPGRSLRLDCKASGITFSNSGMHWVRQAPGKGLEWVAVIWYDGSKRYYADSVKGRFTISRDNSKNTLFLQMNSLRAEDTAVYYCATNDDYWGQGTLVTVSSASTKGPSVFPLAPSSKSTSGGTAALGCLVKDYFPEPVTVSWNSGALTSGVHTFPAVLQSSGLYSLSSVVTVPSSSLGTKTYTCNVDHKPSNTKVDKRVESKYGPPCPPCPAPEFLGGPSVFLFPPKPKDTLMISRTPEVTCVVVDVSQEDPEVQFNWYVDGVEVHNAKTKPREEQFNSTYRVVSVLTVLHQDWLNGKEYKCKVSNKGLPSSIEKTISKAKGQPREPQVYTLPPSQEEMTKNQVSLTCLVKGFYPSDIAVEWESNGQPENNYKTTPPVLDSDGSFFLYSRLTVDKSRWQEGNVFSCSVMHEALHNHYTQKSLSLSLGK

SEQ ID NO: 11496 - protein, 113 aa, Artificial Sequence [sequence omitted]

SEQ ID NO: 11497 - protein, 5 aa, Artificial Sequence
  Description of Artificial Sequence: Synthetic peptide
  XENP016602 vhCDR1
NSGMH

SEQ ID NO: 11498 - protein, 17 aa, Artificial Sequence
  Description of Artificial Sequence: Synthetic peptide
  XENP016602 vhCDR2
VIWYDGSKRYYADSVKG

SEQ ID NO: 11499 - protein, 4 aa, Artificial Sequence
  Description of Artificial Sequence: Synthetic peptide
  XENP016602 vhCDR3
NDDY

SEQ ID NO: 11500 - protein, 214 aa, Artificial Sequence; identical to SEQ ID NO: 11470
  Description of Artificial Sequence: Synthetic polypeptide
  XENP016602 Nivolumab_H0_IgG4_S228P Light Chain

SEQ ID NO: 11501 - protein, 107 aa, Artificial Sequence [sequence omitted]

SEQ ID NO: 11502 - protein, 11 aa, Artificial Sequence
  Description of Artificial Sequence: Synthetic peptide
  XENP016602 vlCDR1
RASQSVSSYLA

SEQ ID NO: 11503 - protein, 7 aa, Artificial Sequence
  Description of Artificial Sequence: Synthetic peptide
  XENP016602 vlCDR2
DASNRAT

SEQ ID NO: 11504 - protein, 9 aa, Artificial Sequence
  Description of Artificial Sequence: Synthetic peptide
  XENP016602 vlCDR3
QQSSNWPRT

SEQ ID NO: 11505 - protein, 447 aa, Artificial Sequence
  Description of Artificial Sequence: Synthetic polypeptide
  XENP016603 Pembrolizumab_H0_IgG4_S228P Heavy Chain
QVQLVQSGVEVKKPGASVKVSCKASGYTFTNYYMYWVRQAPGQGLEWMGGINPSNGGTNFNEKFKNRVTLTTDSSTTTAYMELKSLQFDDTAVYYCARRDYRFDMGFDYWGQGTTVTVSSASTKGPSVFPLAPSSKSTSGGTAALGCLVKDYFPEPVTVSWNSGALTSGVHTFPAVLQSSGLYSLSSVVTVPSSSLGTKTYTCNVDHKPSNTKVDKRVESKYGPPCPPCPAPEFLGGPSVFLFPPKPKDTLMISRTPEVTCVVVDVSQEDPEVQFNWYVDGVEVHNAKTKPREEQFNSTYRVVSVLTVLHQDWLNGKEYKCKVSNKGLPSSIEKTISKAKGQPREPQVYTLPPSQEEMTKNQVSLTCLVKGFYPSDIAVEWESNGQPENNYKTTPPVLDSDGSFFLYSRLTVDKSRWQEGNVFSCSVMHEALHNHYTQKSLSLSLGK

SEQ ID NO: 11506 - protein, 120 aa, Artificial Sequence [sequence omitted]

SEQ ID NO: 11507 - protein, 5 aa, Artificial Sequence
  Description of Artificial Sequence: Synthetic peptide
  XENP016603 vhCDR1
NYYMY

SEQ ID NO: 11508 - protein, 17 aa, Artificial Sequence
  Description of Artificial Sequence: Synthetic peptide
  XENP016603 vhCDR2
GINPSNGGTNFNEKFKN

SEQ ID NO: 11509 - protein, 11 aa, Artificial Sequence
  Description of Artificial Sequence: Synthetic peptide
  XENP016603 vhCDR3
RDYRFDMGFDY

SEQ ID NO: 11510 - protein, 218 aa, Artificial Sequence
  Description of Artificial Sequence: Synthetic polypeptide
  XENP016603 Pembrolizumab_H0_IgG4_S228P Light Chain
EIVLTQSPATLSLSPGERATLSCRASKGVSTSGYSYLHWYQQKPGQAPRLLIYLASYLESGVPARFSGSGSGTDFTLTISSLEPEDFAVYYCQHSRDLPLTFGGGTKVEIKRTVAAPSVFIFPPSDEQLKSGTASVVCLLNNFYPREAKVQWKVDNALQSGNSQESVTEQDSKDSTYSLSSTLTLSKADYEKHKVYACEVTHQGLSSPVTKSFNRGEC

SEQ ID NO: 11511 - protein, 111 aa, Artificial Sequence [sequence omitted]

SEQ ID NO: 11512 - protein, 15 aa, Artificial Sequence
  Description of Artificial Sequence: Synthetic peptide
  XENP016603 vlCDR1
RASKGVSTSGYSYLH

SEQ ID NO: 11513 - protein, 7 aa, Artificial Sequence
  Description of Artificial Sequence: Synthetic peptide
  XENP016603 vlCDR2
LASYLES

SEQ ID NO: 11514 - protein, 9 aa, Artificial Sequence
  Description of Artificial Sequence: Synthetic peptide
  XENP016603 vlCDR3
QHSRDLPLT

SEQ ID NO: 11515 - protein, 443 aa, Artificial Sequence
  Description of Artificial Sequence: Synthetic polypeptide
  XENP017903 1A2_H1L1_IgG1_PVA_/S267K Heavy Chain
QIQLVQSGAEVKKPGASVKVSCKASGYTFTDYSMHWVRQAPGQGLEWMGWINTETGEPTYADKFQGRVTMTLDTSTSTAYMELSSLRSEDTAVYFCASSPLDYWGQGTLVTVSSASTKGPSVFPLAPSSKSTSGGTAALGCLVKDYFPEPVTVSWNSGALTSGVHTFPAVLQSSGLYSLSSVVTVPSSSLGTQTYICNVNHKPSNTKVDKKVEPKSCDKTHTCPPCPAPPVAGPSVFLFPPKPKDTLMISRTPEVTCVVVDVKHEDPEVKFNWYVDGVEVHNAKTKPREEQYNSTYRVVSVLTVLHQDWLNGKEYKCKVSNKALPAPIEKTISKAKGQPREPQVYTLPPSREEMTKNQVSLTCLVKGFYPSDIAVEWESNGQPENNYKTTPPVLDSDGSFFLYSKLTVDKSRWQQGNVFSCSVMHEALHNHYTQKSLSLSPGK

SEQ ID NO: 11516 - protein, 114 aa, Artificial Sequence; identical to SEQ ID NO: 6219
  Description of Artificial Sequence: Synthetic polypeptide
  VH of XENP017903

SEQ ID NO: 11517 - protein, 5 aa, Artificial Sequence
  Description of Artificial Sequence: Synthetic peptide
  XENP017903 vhCDR1
DYSMH

SEQ ID NO: 11518 - protein, 17 aa, Artificial Sequence
  Description of Artificial Sequence: Synthetic peptide
  XENP017903 vhCDR2
WINTETGEPTYADKFQG

SEQ ID NO: 11519 - protein, 5 aa, Artificial Sequence
  Description of Artificial Sequence: Synthetic peptide
  XENP017903 vhCDR3
SPLDY

SEQ ID NO: 11520 - protein, 219 aa, Artificial Sequence
  Description of Artificial Sequence: Synthetic polypeptide
  XENP017903 1A2_H1L1_IgG1_PVA_/S267K Light Chain
DLLLTQSPLSLPVTPGEPASISCRSSQSIVHSNGNTYLEWFLQKPGQSPQLLIYKVFNRFSGVPDRFSGSGSGTDFTLKISRVEAEDVGVYYCFQGSHVPFTFGSGTKLEIKRTVAAPSVFIFPPSDEQLKSGTASVVCLLNNFYPREAKVQWKVDNALQSGNSQESVTEQDSKDSTYSLSSTLTLSKADYEKHKVYACEVTHQGLSSPVTKSFNRGEC

SEQ ID NO: 11521 - protein, 112 aa, Artificial Sequence; identical to SEQ ID NO: 6220
  Description of Artificial Sequence: Synthetic polypeptide
  VL of XENP017903

SEQ ID NO: 11522 - protein, 16 aa, Artificial Sequence
  Description of Artificial Sequence: Synthetic peptide
  XENP017903 vlCDR1
RSSQSIVHSNGNTYLE

SEQ ID NO: 11523 - protein, 7 aa, Artificial Sequence
  Description of Artificial Sequence: Synthetic peptide
  XENP017903 vlCDR2
KVFNRFS

SEQ ID NO: 11524 - protein, 9 aa, Artificial Sequence
  Description of Artificial Sequence: Synthetic peptide
  XENP017903 vlCDR3
FQGSHVPFT

SEQ ID NO: 11525 - protein, 449 aa, Artificial Sequence
  Description of Artificial Sequence: Synthetic polypeptide
  XENP017904 1C7_H1L1_IgG1_PVA_/S267K Heavy Chain
EVQLLESGGGLVQPGGSLRLSCAASGFAFSSYDMSWVRQAPGKRLEWVSYISSGGGSTYYPDSVKGRFTISRDNSKNTLYLQMNSLRAEDTAVYYCARPLDDYYAPFAYWGQGTLVTVSSASTKGPSVFPLAPSSKSTSGGTAALGCLVKDYFPEPVTVSWNSGALTSGVHTFPAVLQSSGLYSLSSVVTVPSSSLGTQTYICNVNHKPSNTKVDKKVEPKSCDKTHTCPPCPAPPVAGPSVFLFPPKPKDTLMISRTPEVTCVVVDVKHEDPEVKFNWYVDGVEVHNAKTKPREEQYNSTYRVVSVLTVLHQDWLNGKEYKCKVSNKALPAPIEKTISKAKGQPREPQVYTLPPSREEMTKNQVSLTCLVKGFYPSDIAVEWESNGQPENNYKTTPPVLDSDGSFFLYSKLTVDKSRWQQGNVFSCSVMHEALHNHYTQKSLSLSPGK

SEQ ID NO: 11526 - protein, 120 aa, Artificial Sequence; identical to SEQ ID NO: 6228
  Description of Artificial Sequence: Synthetic polypeptide
  VH of XENP017904

SEQ ID NO: 11527 - protein, 5 aa, Artificial Sequence
  Description of Artificial Sequence: Synthetic peptide
  XENP017904 vhCDR1
SYDMS

SEQ ID NO: 11528 - protein, 17 aa, Artificial Sequence
  Description of Artificial Sequence: Synthetic peptide
  XENP017904 vhCDR2
YISSGGGSTYYPDSVKG

SEQ ID NO: 11529 - protein, 11 aa, Artificial Sequence
  Description of Artificial Sequence: Synthetic peptide
  XENP017904 vhCDR3
PLDDYYAPFAY

SEQ ID NO: 11530 - protein, 218 aa, Artificial Sequence
  Description of Artificial Sequence: Synthetic polypeptide
  XENP017904 1C7_H1L1_IgG1_PVA_/S267K Light Chain
DIVLTQSPSSLSASVGDRVTITCRASESVDNDGISFMNWFQQKPGKPPKLLIYAASNQGSGVPARFSGSGSGTDFTLTISSLQPEDFATYFCQQSKEVPWTFGGGTKVEIKRTVAAPSVFIFPPSDEQLKSGTASVVCLLNNFYPREAKVQWKVDNALQSGNSQESVTEQDSKDSTYSLSSTLTLSKADYEKHKVYACEVTHQGLSSPVTKSFNRGEC

SEQ ID NO: 11531 - protein, 111 aa, Artificial Sequence; identical to SEQ ID NO: 6229
  Description of Artificial Sequence: Synthetic polypeptide
  VL of XENP017904

SEQ ID NO: 11532 - protein, 15 aa, Artificial Sequence
  Description of Artificial Sequence: Synthetic peptide
  XENP017904 vlCDR1
RASESVDNDGISFMN

SEQ ID NO: 11533 - protein, 7 aa, Artificial Sequence
  Description of Artificial Sequence: Synthetic peptide
  XENP017904 vlCDR2
AASNQGS

SEQ ID NO: 11534 - protein, 9 aa, Artificial Sequence
  Description of Artificial Sequence: Synthetic peptide
  XENP017904 vlCDR3
QQSKEVPWT

SEQ ID NO: 11535 - protein, 443 aa, Artificial Sequence
  Description of Artificial Sequence: Synthetic polypeptide
  XENP017905 1G2_H1L1_IgG1_PVA_/S267K Heavy Chain
QVQLVQSGAEVKKPGASVKVSCKVSGFSLTDYGVNWVRQAPGQGLEWMGMIWGDGSTDYNSKFQGRVTMTKDISTSTVYMELSSLRSEDTAVYYCAREYAMDYWGQGTLVTVSSASTKGPSVFPLAPSSKSTSGGTAALGCLVKDYFPEPVTVSWNSGALTSGVHTFPAVLQSSGLYSLSSVVTVPSSSLGTQTYICNVNHKPSNTKVDKKVEPKSCDKTHTCPPCPAPPVAGPSVFLFPPKPKDTLMISRTPEVTCVVVDVKHEDPEVKFNWYVDGVEVHNAKTKPREEQYNSTYRVVSVLTVLHQDWLNGKEYKCKVSNKALPAPIEKTISKAKGQPREPQVYTLPPSREEMTKNQVSLTCLVKGFYPSDIAVEWESNGQPENNYKTTPPVLDSDGSFFLYSKLTVDKSRWQQGNVFSCSVMHEALHNHYTQKSLSLSPGK

SEQ ID NO: 11536 - protein, 114 aa, Artificial Sequence; identical to SEQ ID NO: 6237
  Description of Artificial Sequence: Synthetic polypeptide
  VH of XENP017905

SEQ ID NO: 11537 - protein, 5 aa, Artificial Sequence
  Description of Artificial Sequence: Synthetic peptide
  XENP017905 vhCDR1
DYGVN

SEQ ID NO: 11538 - protein, 16 aa, Artificial Sequence
  Description of Artificial Sequence: Synthetic peptide
  XENP017905 vhCDR2
MIWGDGSTDYNSKFQG

SEQ ID NO: 11539 - protein, 6 aa, Artificial Sequence
  Description of Artificial Sequence: Synthetic peptide
  XENP017905 vhCDR3
EYAMDY

SEQ ID NO: 11540 - protein, 219 aa, Artificial Sequence
  Description of Artificial Sequence: Synthetic polypeptide
  XENP017905 1G2_H1L1_IgG1_PVA_/S267K Light Chain
DIVMTQSPDSLAVSLGERATINCKSSQSLLNSRTRKNYLAWYQQKPGQSPKLLIFWASTRESGVPDRFTGSGSGTDFTLTISSLQAEDVAVYYCKQSYNLRTFGGGTKVEIKRTVAAPSVFIFPPSDEQLKSGTASVVCLLNNFYPREAKVQWKVDNALQSGNSQESVTEQDSKDSTYSLSSTLTLSKADYEKHKVYACEVTHQGLSSPVTKSFNRGEC

SEQ ID NO: 11541 - protein, 112 aa, Artificial Sequence; identical to SEQ ID NO: 6238
  Description of Artificial Sequence: Synthetic polypeptide
  VL of XENP017905

SEQ ID NO: 11542 - protein, 17 aa, Artificial Sequence
  Description of Artificial Sequence: Synthetic peptide
  XENP017905 vlCDR1
KSSQSLLNSRTRKNYLA

SEQ ID NO: 11543 - protein, 7 aa, Artificial Sequence
  Description of Artificial Sequence: Synthetic peptide
  XENP017905 vlCDR2
WASTRES

SEQ ID NO: 11544 - protein, 8 aa, Artificial Sequence
  Description of Artificial Sequence: Synthetic peptide
  XENP017905 vlCDR3
KQSYNLRT

SEQ ID NO: 11545 - protein, 451 aa, Artificial Sequence
  Description of Artificial Sequence: Synthetic polypeptide
  XENP017906 1G6_H1L1_IgG1_PVA_/S267K Heavy Chain
EVQLVESGGGLVKPGGSLRLSCAASGFTFSNYWMNWVRQAPGKGLEWVGEIRLKSNNYATHYAEPVKGRFTISRDDSKSTVYLQMNSLKTEDTAVYYCTRYYGNYGGYFDVWGAGTLVTVSSASTKGPSVFPLAPSSKSTSGGTAALGCLVKDYFPEPVTVSWNSGALTSGVHTFPAVLQSSGLYSLSSVVTVPSSSLGTQTYICNVNHKPSNTKVDKKVEPKSCDKTHTCPPCPAPPVAGPSVFLFPPKPKDTLMISRTPEVTCVVVDVKHEDPEVKFNWYVDGVEVHNAKTKPREEQYNSTYRVVSVLTVLHQDWLNGKEYKCKVSNKALPAPIEKTISKAKGQPREPQVYTLPPSREEMTKNQVSLTCLVKGFYPSDIAVEWESNGQPENNYKTTPPVLDSDGSFFLYSKLTVDKSRWQQGNVFSCSVMHEALHNHYTQKSLSLSPGK

SEQ ID NO: 11546 - protein, 122 aa, Artificial Sequence; identical to SEQ ID NO: 6246
  Description of Artificial Sequence: Synthetic polypeptide
  VH of XENP017906

SEQ ID NO: 11547 - protein, 5 aa, Artificial Sequence
  Description of Artificial Sequence: Synthetic peptide
  XENP017906 vhCDR1
NYWMN

SEQ ID NO: 11548 - protein, 19 aa, Artificial Sequence
  Description of Artificial Sequence: Synthetic peptide
  XENP017906 vhCDR2
EIRLKSNNYATHYAEPVKG

SEQ ID NO: 11549 - protein, 11 aa, Artificial Sequence
  Description of Artificial Sequence: Synthetic peptide
  XENP017906 vhCDR3
YYGNYGGYFDV

SEQ ID NO: 11550 - protein, 214 aa, Artificial Sequence
  Description of Artificial Sequence: Synthetic polypeptide
  XENP017906 1G6_H1L1_IgG1_PVA_/S267K Light Chain
SIVMTQSPATLSVSPGERATLSCRASQSVSNDVAWYQQKPGQSPRLLINYASHRYTGVPDRFTGSGYGTEFTLTISSLQSEDFAVYFCQQDYSSPRTFGGGTKVEIKRTVAAPSVFIFPPSDEQLKSGTASVVCLLNNFYPREAKVQWKVDNALQSGNSQESVTEQDSKDSTYSLSSTLTLSKADYEKHKVYACEVTHQGLSSPVTKSFNRGEC

SEQ ID NO: 11551 - protein, 107 aa, Artificial Sequence; identical to SEQ ID NO: 6247
  Description of Artificial Sequence: Synthetic polypeptide
  VL of XENP017906

SEQ ID NO: 11552 - protein, 11 aa, Artificial Sequence
  Description of Artificial Sequence: Synthetic peptide
  XENP017906 vlCDR1
RASQSVSNDVA

SEQ ID NO: 11553 - protein, 7 aa, Artificial Sequence
  Description of Artificial Sequence: Synthetic peptide
  XENP017906 vlCDR2
YASHRYT

SEQ ID NO: 11554 - protein, 9 aa, Artificial Sequence
  Description of Artificial Sequence: Synthetic peptide
  XENP017906 vlCDR3
QQDYSSPRT

SEQ ID NO: 11555 - protein, 451 aa, Artificial Sequence; identical to SEQ ID NO: 11545
  Description of Artificial Sequence: Synthetic polypeptide
  XENP017907 1G6_H1L2_IgG1_PVA_/S267K Heavy Chain

SEQ ID NO: 11556 - protein, 122 aa, Artificial Sequence; identical to SEQ ID NO: 6246
  Description of Artificial Sequence: Synthetic polypeptide
  VH of XENP017907

SEQ ID NO: 11557 - protein, 5 aa, Artificial Sequence
  Description of Artificial Sequence: Synthetic peptide
  XENP017907 vhCDR1
NYWMN

SEQ ID NO: 11558 - protein, 19 aa, Artificial Sequence
  Description of Artificial Sequence: Synthetic peptide
  XENP017907 vhCDR2
EIRLKSNNYATHYAEPVKG

SEQ ID NO: 11559 - protein, 11 aa, Artificial Sequence
  Description of Artificial Sequence: Synthetic peptide
  XENP017907 vhCDR3
YYGNYGGYFDV

SEQ ID NO: 11560 - protein, 214 aa, Artificial Sequence
  Description of Artificial Sequence: Synthetic polypeptide
  XENP017907 1G6_H1L2_IgG1_PVA_/S267K Light Chain
SIVMTQSPSSLSASVGDRVTITCRASQSVSNDVAWYQQKPGKSPKLLINYASHRYTGVPDRFTGSGYGTDFTLTISSLQPEDFATYFCQQDYSSPRTFGGGTKVEIKRTVAAPSVFIFPPSDEQLKSGTASVVCLLNNFYPREAKVQWKVDNALQSGNSQESVTEQDSKDSTYSLSSTLTLSKADYEKHKVYACEVTHQGLSSPVTKSFNRGEC

SEQ ID NO: 11561 - protein, 107 aa, Artificial Sequence; identical to SEQ ID NO: 6256
  Description of Artificial Sequence: Synthetic polypeptide
  VL of XENP017907

SEQ ID NO: 11562 - protein, 11 aa, Artificial Sequence
  Description of Artificial Sequence: Synthetic peptide
  XENP017907 vlCDR1
RASQSVSNDVA

SEQ ID NO: 11563 - protein, 7 aa, Artificial Sequence
  Description of Artificial Sequence: Synthetic peptide
  XENP017907 vlCDR2
YASHRYT

SEQ ID NO: 11564 - protein, 9 aa, Artificial Sequence
  Description of Artificial Sequence: Synthetic peptide
  XENP017907 vlCDR3
QQDYSSPRT

SEQ ID NO: 11565 - protein, 444 aa, Artificial Sequence
  Description of Artificial Sequence: Synthetic polypeptide
  XENP017908 2A2_H1L1_IgG1_PVA_/S267K Heavy Chain
QVQLVQSGAEVKKPGASVKVSCKASGYTFTNYWMHWVRQAPGQGLEWMGYINPSTGYTEYNQKFQGRVTMTADKSTSTAYMELSSLRSEDTAVYYCATGNYFAYWGQGTLVTVSSASTKGPSVFPLAPSSKSTSGGTAALGCLVKDYFPEPVTVSWNSGALTSGVHTFPAVLQSSGLYSLSSVVTVPSSSLGTQTYICNVNHKPSNTKVDKKVEPKSCDKTHTCPPCPAPPVAGPSVFLFPPKPKDTLMISRTPEVTCVVVDVKHEDPEVKFNWYVDGVEVHNAKTKPREEQYNSTYRVVSVLTVLHQDWLNGKEYKCKVSNKALPAPIEKTISKAKGQPREPQVYTLPPSREEMTKNQVSLTCLVKGFYPSDIAVEWESNGQPENNYKTTPPVLDSDGSFFLYSKLTVDKSRWQQGNVFSCSVMHEALHNHYTQKSLSLSPGK

SEQ ID NO: 11566 - protein, 115 aa, Artificial Sequence; identical to SEQ ID NO: 6264
  Description of Artificial Sequence: Synthetic polypeptide
  VH of XENP017908

SEQ ID NO: 11567 - protein, 5 aa, Artificial Sequence
  Description of Artificial Sequence: Synthetic peptide
  XENP017908 vhCDR1
NYWMH

SEQ ID NO: 11568 - protein, 17 aa, Artificial Sequence
  Description of Artificial Sequence: Synthetic peptide
  XENP017908 vhCDR2
YINPSTGYTEYNQKFQG

SEQ ID NO: 11569 - protein, 6 aa, Artificial Sequence
  Description of Artificial Sequence: Synthetic peptide
  XENP017908 vhCDR3
GNYFAY

SEQ ID NO: 11570 - protein, 214 aa, Artificial Sequence
  Description of Artificial Sequence: Synthetic polypeptide
  XENP017908 2A2_H1L1_IgG1_PVA_/S267K Light Chain
DIQMTQSPSSLSASVGDRVTITCRPSESLYSYLAWYQQKPGKSPKLLVYNAKTLVEGVPSRFSGSGSGTDFTLTISSLQPEDFATYYCQHHYGTPFTFGSGTKLEIKRTVAAPSVFIFPPSDEQLKSGTASVVCLLNNFYPREAKVQWKVDNALQSGNSQESVTEQDSKDSTYSLSSTLTLSKADYEKHKVYACEVTHQGLSSPVTKSFNRGEC

SEQ ID NO: 11571 - protein, 107 aa, Artificial Sequence; identical to SEQ ID NO: 6265
  Description of Artificial Sequence: Synthetic polypeptide
  VL of XENP017908

SEQ ID NO: 11572 - protein, 11 aa, Artificial Sequence
  Description of Artificial Sequence: Synthetic peptide
  XENP017908 vlCDR1
RPSESLYSYLA

SEQ ID NO: 11573 - protein, 7 aa, Artificial Sequence
  Description of Artificial Sequence: Synthetic peptide
  XENP017908 vlCDR2
NAKTLVE

SEQ ID NO: 11574 - protein, 9 aa, Artificial Sequence
  Description of Artificial Sequence: Synthetic peptide
  XENP017908 vlCDR3
QHHYGTPFT

SEQ ID NO: 11575 - protein, 449 aa, Artificial Sequence
  Description of Artificial Sequence: Synthetic polypeptide
  XENP017909 2F11_H1L1_IgG1_PVA_/S267K Heavy Chain
QVQLVQSGAEVKKPGASVKVSCKGSGYTFTDYVMHWVRQAPGQSLEWMGVISTYYGDASYNQKFQGRVTMTVDKSTSTAYMELSSLRSEDTAVYYCAREGYDGYLYFDVWGAGTLVTVSSASTKGPSVFPLAPSSKSTSGGTAALGCLVKDYFPEPVTVSWNSGALTSGVHTFPAVLQSSGLYSLSSVVTVPSSSLGTQTYICNVNHKPSNTKVDKKVEPKSCDKTHTCPPCPAPPVAGPSVFLFPPKPKDTLMISRTPEVTCVVVDVKHEDPEVKFNWYVDGVEVHNAKTKPREEQYNSTYRVVSVLTVLHQDWLNGKEYKCKVSNKALPAPIEKTISKAKGQPREPQVYTLPPSREEMTKNQVSLTCLVKGFYPSDIAVEWESNGQPENNYKTTPPVLDSDGSFFLYSKLTVDKSRWQQGNVFSCSVMHEALHNHYTQKSLSLSPGK

SEQ ID NO: 11576 - protein, 120 aa, Artificial Sequence; identical to SEQ ID NO: 6273
  Description of Artificial Sequence: Synthetic polypeptide
  VH of XENP017909

SEQ ID NO: 11577 - protein, 5 aa, Artificial Sequence
  Description of Artificial Sequence: Synthetic peptide
  XENP017909 vhCDR1
DYVMH

SEQ ID NO: 11578 - protein, 17 aa, Artificial Sequence
  Description of Artificial Sequence: Synthetic peptide
  XENP017909 vhCDR2
VISTYYGDASYNQKFQG

SEQ ID NO: 11579 - protein, 11 aa, Artificial Sequence
  Description of Artificial Sequence: Synthetic peptide
  XENP017909 vhCDR3
EGYDGYLYFDV

SEQ ID NO: 11580 - protein, 219 aa, Artificial Sequence
  Description of Artificial Sequence: Synthetic polypeptide
  XENP017909 2F11_H1L1_IgG1_PVA_/S267K Light Chain
DVLMTQTPLSSPVTLGQPASISCRSSQSIVHSNGNTYLEWYQQRPGQSPRLLIYKVSNRFSGVPDRFSGSGSGTDFTLKISRVEAEDVGVYYCFQGSHVPYTFGGGTKVEIKRTVAAPSVFIFPPSDEQLKSGTASVVCLLNNFYPREAKVQWKVDNALQSGNSQESVTEQDSKDSTYSLSSTLTLSKADYEKHKVYACEVTHQGLSSPVTKSFNRGEC

SEQ ID NO: 11581 - protein, 112 aa, Artificial Sequence; identical to SEQ ID NO: 6274
  Description of Artificial Sequence: Synthetic polypeptide
  VL of XENP017909

SEQ ID NO: 11582 - protein, 16 aa, Artificial Sequence
  Description of Artificial Sequence: Synthetic peptide
  XENP017909 vlCDR1
RSSQSIVHSNGNTYLE

SEQ ID NO: 11583 - protein, 7 aa, Artificial Sequence
  Description of Artificial Sequence: Synthetic peptide
  XENP017909 vlCDR2
KVSNRFS

SEQ ID NO: 11584 - protein, 9 aa, Artificial Sequence
  Description of Artificial Sequence: Synthetic peptide
  XENP017909 vlCDR3
FQGSHVPYT

SEQ ID NO: 11585 - protein, 449 aa, Artificial Sequence
  Description of Artificial Sequence: Synthetic polypeptide
  XENP017910 5H1_H1L1_IgG1_PVA_/S267K Heavy Chain
QVQLVQSGAEVKKPGASVKVSCKGSGYTFTDYVMHWVRQAPGQSLEWMGVISIHYGDGRYNQKFQGRVTMTVDKSTSTAYMELSSLRSEDTAVYYCAREVYDGYLYFDVWGAGTLVTVSSASTKGPSVFPLAPSSKSTSGGTAALGCLVKDYFPEPVTVSWNSGALTSGVHTFPAVLQSSGLYSLSSVVTVPSSSLGTQTYICNVNHKPSNTKVDKKVEPKSCDKTHTCPPCPAPPVAGPSVFLFPPKPKDTLMISRTPEVTCVVVDVKHEDPEVKFNWYVDGVEVHNAKTKPREEQYNSTYRVVSVLTVLHQDWLNGKEYKCKVSNKALPAPIEKTISKAKGQPREPQVYTLPPSREEMTKNQVSLTCLVKGFYPSDIAVEWESNGQPENNYKTTPPVLDSDGSFFLYSKLTVDKSRWQQGNVFSCSVMHEALHNHYTQKSLSLSPGK

SEQ ID NO: 11586 - protein, 120 aa, Artificial Sequence; identical to SEQ ID NO: 6282
  Description of Artificial Sequence: Synthetic polypeptide
  VH of XENP017910

SEQ ID NO: 11587 - protein, 5 aa, Artificial Sequence
  Description of Artificial Sequence: Synthetic peptide
  XENP017910 vhCDR1
DYVMH

SEQ ID NO: 11588 - protein, 17 aa, Artificial Sequence
  Description of Artificial Sequence: Synthetic peptide
  XENP017910 vhCDR2
VISIHYGDGRYNQKFQG

SEQ ID NO: 11589 - protein, 11 aa, Artificial Sequence
  Description of Artificial Sequence: Synthetic peptide
  XENP017910 vhCDR3
EVYDGYLYFDV

SEQ ID NO: 11590 - protein, 219 aa, Artificial Sequence
  Description of Artificial Sequence: Synthetic polypeptide
  XENP017910 5H1_H1L1_IgG1_PVA_/S267K Light Chain
DVLMTQSPLSLPVTPGEPASISCRSSQSIVHSNGNTYLEWYLQKPGQSPQLLIYKVSNRFSGVPDRFGGRGSGTDFTLKISRVEAEDVGVYYCFQGSHVPYTFGGGTKVEIKRTVAAPSVFIFPPSDEQLKSGTASVVCLLNNFYPREAKVQWKVDNALQSGNSQESVTEQDSKDSTYSLSSTLTLSKADYEKHKVYACEVTHQGLSSPVTKSFNRGEC

SEQ ID NO: 11591 - protein, 112 aa, Artificial Sequence; identical to SEQ ID NO: 6283
  Description of Artificial Sequence: Synthetic polypeptide
  VL of XENP017910

SEQ ID NO: 11592 - protein, 16 aa, Artificial Sequence
  Description of Artificial Sequence: Synthetic peptide
  XENP017910 vlCDR1
RSSQSIVHSNGNTYLE

SEQ ID NO: 11593 - protein, 7 aa, Artificial Sequence
  Description of Artificial Sequence: Synthetic peptide
  XENP017910 vlCDR2
KVSNRFS

SEQ ID NO: 11594 - protein, 9 aa, Artificial Sequence
  Description of Artificial Sequence: Synthetic peptide
  XENP017910 vlCDR3
FQGSHVPYT

SEQ ID NO: 11595 - protein, 449 aa, Artificial Sequence; identical to SEQ ID NO: 11585
  Description of Artificial Sequence: Synthetic polypeptide
  XENP017911 5H1_H1L2_IgG1_PVA_/S267K Heavy Chain

SEQ ID NO: 11596 - protein, 120 aa, Artificial Sequence; identical to SEQ ID NO: 6282
  Description of Artificial Sequence: Synthetic polypeptide
  VH of XENP017911

SEQ ID NO: 11597 - protein, 5 aa, Artificial Sequence
  Description of Artificial Sequence: Synthetic peptide
  XENP017911 vhCDR1
DYVMH

SEQ ID NO: 11598 - protein, 17 aa, Artificial Sequence
  Description of Artificial Sequence: Synthetic peptide
  XENP017911 vhCDR2
VISIHYGDGRYNQKFQG

SEQ ID NO: 11599 - protein, 11 aa, Artificial Sequence
  Description of Artificial Sequence: Synthetic peptide
  XENP017911 vhCDR3
EVYDGYLYFDV

SEQ ID NO: 11600 - protein, 219 aa, Artificial Sequence
  Description of Artificial Sequence: Synthetic polypeptide
  XENP017911 5H1_H1L2_IgG1_PVA_/S267K Light Chain
DVLMTQSPLSLPVTLGQPASISCRSSQSIVHSNGNTYLEWYQQRPGQSPRLLIYKVSNRFSGVPDRFGGRGSGTDFTLKISRVEAEDVGVYYCFQGSHVPYTFGGGTKVEIKRTVAAPSVFIFPPSDEQLKSGTASVVCLLNNFYPREAKVQWKVDNALQSGNSQESVTEQDSKDSTYSLSSTLTLSKADYEKHKVYACEVTHQGLSSPVTKSFNRGEC

SEQ ID NO: 11601 - protein, 112 aa, Artificial Sequence; identical to SEQ ID NO: 6292
  Description of Artificial Sequence: Synthetic polypeptide
  VL of XENP017911

SEQ ID NO: 11602 - protein, 16 aa, Artificial Sequence
  Description of Artificial Sequence: Synthetic peptide
  XENP017911 vlCDR1
RSSQSIVHSNGNTYLE

SEQ ID NO: 11603 - protein, 7 aa, Artificial Sequence
  Description of Artificial Sequence: Synthetic peptide
  XENP017911 vlCDR2
KVSNRFS

SEQ ID NO: 11604 - protein, 9 aa, Artificial Sequence
  Description of Artificial Sequence: Synthetic peptide
  XENP017911 vlCDR3
FQGSHVPYT

SEQ ID NO: 11605 - protein, 449 aa, Artificial Sequence
  Description of Artificial Sequence: Synthetic polypeptide
  XENP017912 10E4_H1L1_IgG1_PVA_/S267K Heavy Chain
QVQLVQSGAEVKKPGASVKVSCKASGYSFTSYWMHWVRQAPGQGLEWMGAIYPGNSDTSYNQKFQGRVTMTADTSTSTAYMELSSLRSEDTAVYYCTRDGNYVRYYFDYWGQGTLVTVSSASTKGPSVFPLAPSSKSTSGGTAALGCLVKDYFPEPVTVSWNSGALTSGVHTFPAVLQSSGLYSLSSVVTVPSSSLGTQTYICNVNHKPSNTKVDKKVEPKSCDKTHTCPPCPAPPVAGPSVFLFPPKPKDTLMISRTPEVTCVVVDVKHEDPEVKFNWYVDGVEVHNAKTKPREEQYNSTYRVVSVLTVLHQDWLNGKEYKCKVSNKALPAPIEKTISKAKGQPREPQVYTLPPSREEMTKNQVSLTCLVKGFYPSDIAVEWESNGQPENNYKTTPPVLDSDGSFFLYSKLTVDKSRWQQGNVFSCSVMHEALHNHYTQKSLSLSPGK

SEQ ID NO: 11606 - protein, 120 aa, Artificial Sequence; identical to SEQ ID NO: 6300
  Description of Artificial Sequence: Synthetic polypeptide
  VH of XENP017912

SEQ ID NO: 11607 - protein, 5 aa, Artificial Sequence
  Description of Artificial Sequence: Synthetic peptide
  XENP017912 vhCDR1
SYWMH

SEQ ID NO: 11608 - protein, 17 aa, Artificial Sequence
  Description of Artificial Sequence: Synthetic peptide
  XENP017912 vhCDR2
AIYPGNSDTSYNQKFQG

SEQ ID NO: 11609 - protein, 11 aa, Artificial Sequence
  Description of Artificial Sequence: Synthetic peptide
  XENP017912 vhCDR3
DGNYVRYYFDY

SEQ ID NO: 11610 - protein, 214 aa, Artificial Sequence
  Description of Artificial Sequence: Synthetic polypeptide
  XENP017912 10E4_H1L1_IgG1_PVA_/S267K Light Chain
DIQMTQSPSSLSASVGDRVTITCRASQDIGSNLNWLQQKPGKTIKRLIYATSNLDSGVPKRFSGRRSGSDYTLTISSLQPEDFATYYCLQYASSPLTFGTGTKLEIKRTVAAPSVFIFPPSDEQLKSGTASVVCLLNNFYPREAKVQWKVDNALQSGNSQESVTEQDSKDSTYSLSSTLTLSKADYEKHKVYACEVTHQGLSSPVTKSFNRGEC

SEQ ID NO: 11611 - protein, 107 aa, Artificial Sequence; identical to SEQ ID NO: 6301
  Description of Artificial Sequence: Synthetic polypeptide
  VL of XENP017912

SEQ ID NO: 11612 - protein, 11 aa, Artificial Sequence
  Description of Artificial Sequence: Synthetic peptide
  XENP017912 vlCDR1
RASQDIGSNLN

SEQ ID NO: 11613 - protein, 7 aa, Artificial Sequence
  Description of Artificial Sequence: Synthetic peptide
  XENP017912 vlCDR2
ATSNLDS

SEQ ID NO: 11614 - protein, 9 aa, Artificial Sequence
  Description of Artificial Sequence: Synthetic peptide
  XENP017912 vlCDR3
LQYASSPLT

SEQ ID NO: 11615 - protein, 449 aa, Artificial Sequence
  Description of Artificial Sequence: Synthetic polypeptide
  XENP017913 4C11_H1L1_IgG1_PVA_/S267K Heavy Chain
QIQLVQSGAEVKKPGASVKVSCKASGYTFTSYWMHWVRQAPGQGLEWMGAIYPGNSDTSYNQKFQGRVTMTADTSTSTAYMELSSLRSEDTAVYYCTNLYYGSSFAMDYWGQGTLVTVSSASTKGPSVFPLAPSSKSTSGGTAALGCLVKDYFPEPVTVSWNSGALTSGVHTFPAVLQSSGLYSLSSVVTVPSSSLGTQTYICNVNHKPSNTKVDKKVEPKSCDKTHTCPPCPAPPVAGPSVFLFPPKPKDTLMISRTPEVTCVVVDVKHEDPEVKFNWYVDGVEVHNAKTKPREEQYNSTYRVVSVLTVLHQDWLNGKEYKCKVSNKALPAPIEKTISKAKGQPREPQVYTLPPSREEMTKNQVSLTCLVKGFYPSDIAVEWESNGQPENNYKTTPPVLDSDGSFFLYSKLTVDKSRWQQGNVFSCSVMHEALHNHYTQKSLSLSPGK

SEQ ID NO: 11616 - protein, 120 aa, Artificial Sequence; identical to SEQ ID NO: 6309
  Description of Artificial Sequence: Synthetic polypeptide
  VH of XENP017913

SEQ ID NO: 11617 - protein, 5 aa, Artificial Sequence
  Description of Artificial Sequence: Synthetic peptide
  XENP017913 vhCDR1
SYWMH

SEQ ID NO: 11618 - protein, 17 aa, Artificial Sequence
  Description of Artificial Sequence: Synthetic peptide
  XENP017913 vhCDR2
AIYPGNSDTSYNQKFQG

SEQ ID NO: 11619 - protein, 11 aa, Artificial Sequence
  Description of Artificial Sequence: Synthetic peptide
  XENP017913 vhCDR3
LYYGSSFAMDY

SEQ ID NO: 11620 - protein, 214 aa, Artificial Sequence
  Description of Artificial Sequence: Synthetic polypeptide
  XENP017913 4C11_H1L1_IgG1_PVA_/S267K Light Chain
DIKMTQSPSSLSASVGDRVTITCRASQDINTYLSWFQQKPGKSPKTLIYRANRLVDGVPSRFSGSGSGQDYTLTISSLQPEDFATYYCLHYDDFPYTFGGGTKVEIKRTVAAPSVFIFPPSDEQLKSGTASVVCLLNNFYPREAKVQWKVDNALQSGNSQESVTEQDSKDSTYSLSSTLTLSKADYEKHKVYACEVTHQGLSSPVTKSFNRGEC

SEQ ID NO: 11621 - protein, 107 aa, Artificial Sequence; identical to SEQ ID NO: 6310
  Description of Artificial Sequence: Synthetic polypeptide
  VL of XENP017913

SEQ ID NO: 11622 - protein, 11 aa, Artificial Sequence
  Description of Artificial Sequence: Synthetic peptide
  XENP017913 vlCDR1
RASQDINTYLS

SEQ ID NO: 11623 - protein, 7 aa, Artificial Sequence
  Description of Artificial Sequence: Synthetic peptide
  XENP017913 vlCDR2
RANRLVD

SEQ ID NO: 11624 - protein, 9 aa, Artificial Sequence
  Description of Artificial Sequence: Synthetic peptide
  XENP017913 vlCDR3
LHYDDFPYT

SEQ ID NO: 11625 - protein, 446 aa, Artificial Sequence
  Description of Artificial Sequence: Synthetic polypeptide
  XENP017914 6A3_H1L1_IgG1_PVA_/S267K Heavy Chain
EVQLLESGGGLVQPGGSLRLSCAASGFTFSSYGMSWVRQAPGKRLEWVSTISGGGRYTYYPDSVKGRFTISRDNSKNTLYLQMNSLRAEDTAVYYCASYYDSSFDYWGQGTLVTVSSASTKGPSVFPLAPSSKSTSGGTAALGCLVKDYFPEPVTVSWNSGALTSGVHTFPAVLQSSGLYSLSSVVTVPSSSLGTQTYICNVNHKPSNTKVDKKVEPKSCDKTHTCPPCPAPPVAGPSVFLFPPKPKDTLMISRTPEVTCVVVDVKHEDPEVKFNWYVDGVEVHNAKTKPREEQYNSTYRVVSVLTVLHQDWLNGKEYKCKVSNKALPAPIEKTISKAKGQPREPQVYTLPPSREEMTKNQVSLTCLVKGFYPSDIAVEWESNGQPENNYKTTPPVLDSDGSFFLYSKLTVDKSRWQQGNVFSCSVMHEALHNHYTQKSLSLSPGK

SEQ ID NO: 11626 - protein, 117 aa, Artificial Sequence; identical to SEQ ID NO: 6318
  Description of Artificial Sequence: Synthetic polypeptide
  VH of XENP017914

SEQ ID NO: 11627 - protein, 5 aa, Artificial Sequence
  Description of Artificial Sequence: Synthetic peptide
  XENP017914 vhCDR1
SYGMS

SEQ ID NO: 11628 - protein, 17 aa, Artificial Sequence
  Description of Artificial Sequence: Synthetic peptide
  XENP017914 vhCDR2
TISGGGRYTYYPDSVKG

SEQ ID NO: 11629 - protein, 8 aa, Artificial Sequence
  Description of Artificial Sequence: Synthetic peptide
  XENP017914 vhCDR3
YYDSSFDY

SEQ ID NO: 11630 - protein, 214 aa, Artificial Sequence
  Description of Artificial Sequence: Synthetic polypeptide
  XENP017914 6A3_H1L1_IgG1_PVA_/S267K Light Chain
DIVMTQSPDSLAVSLGERATINCKASQDVGTAVAWYQQKPGQSPKLLIYWASTRHTGVPDRFTGSGSGTDFTLTISSLQAEDVAVYFCQHYSIYPWTFGGGTKVEIKRTVAAPSVFIFPPSDEQLKSGTASVVCLLNNFYPREAKVQWKVDNALQSGNSQESVTEQDSKDSTYSLSSTLTLSKADYEKHKVYACEVTHQGLSSPVTKSFNRGEC

SEQ ID NO: 11631 - protein, 107 aa, Artificial Sequence; identical to SEQ ID NO: 6319
  Description of Artificial Sequence: Synthetic polypeptide
  VL of XENP017914

SEQ ID NO: 11632 - protein, 11 aa, Artificial Sequence
  Description of Artificial Sequence: Synthetic peptide
  XENP017914 vlCDR1
KASQDVGTAVA

SEQ ID NO: 11633 - protein, 7 aa, Artificial Sequence
  Description of Artificial Sequence: Synthetic peptide
  XENP017914 vlCDR2
WASTRHT

SEQ ID NO: 11634 - protein, 9 aa, Artificial Sequence
  Description of Artificial Sequence: Synthetic peptide
  XENP017914 vlCDR3
QHYSIYPWT

SEQ ID NO: 11635 - protein, 446 aa, Artificial Sequence; identical to SEQ ID NO: 11625
  Description of Artificial Sequence: Synthetic polypeptide
  XENP017915 6A3_H1L2_IgG1_PVA_/S267K Heavy Chain

SEQ ID NO: 11636 - protein, 117 aa, Artificial Sequence; identical to SEQ ID NO: 6318
  Description of Artificial Sequence: Synthetic polypeptide
  VH of XENP017915

SEQ ID NO: 11637 - protein, 5 aa, Artificial Sequence
  Description of Artificial Sequence: Synthetic peptide
  XENP017915 vhCDR1
SYGMS

SEQ ID NO: 11638 - protein, 17 aa, Artificial Sequence
  Description of Artificial Sequence: Synthetic peptide
  XENP017915 vhCDR2
TISGGGRYTYYPDSVKG

SEQ ID NO: 11639 - protein, 8 aa, Artificial Sequence
  Description of Artificial Sequence: Synthetic peptide
  XENP017915 vhCDR3
YYDSSFDY

SEQ ID NO: 11640 - protein, 214 aa, Artificial Sequence
  Description of Artificial Sequence: Synthetic polypeptide
  XENP017915 6A3_H1L2_IgG1_PVA_/S267K Light Chain
DIVMTQSPATLSVSPGERATLSCRASQDVGTAVAWYQQKPGQSPRLLIYWASTRHTGVPDRFTGSGSGTEFTLTISSLQSEDFAVYFCQHYSIYPWTFGGGTKVEIKRTVAAPSVFIFPPSDEQLKSGTASVVCLLNNFYPREAKVQWKVDNALQSGNSQESVTEQDSKDSTYSLSSTLTLSKADYEKHKVYACEVTHQGLSSPVTKSFNRGEC

SEQ ID NO: 11641 - protein, 107 aa, Artificial Sequence; identical to SEQ ID NO: 6328
  Description of Artificial Sequence: Synthetic polypeptide
  VL of XENP017915

SEQ ID NO: 11642 - protein, 11 aa, Artificial Sequence
  Description of Artificial Sequence: Synthetic peptide
  XENP017915 vlCDR1
RASQDVGTAVA

SEQ ID NO: 11643 - protein, 7 aa, Artificial Sequence
  Description of Artificial Sequence: Synthetic peptide
  XENP017915 vlCDR2
WASTRHT

SEQ ID NO: 11644 - protein, 9 aa, Artificial Sequence
  Description of Artificial Sequence: Synthetic peptide
  XENP017915 vlCDR3
QHYSIYPWT

SEQ ID NO: 11645 - protein, 446 aa, Artificial Sequence; identical to SEQ ID NO: 11625
  Description of Artificial Sequence: Synthetic polypeptide
  XENP017916 6A3_H1L3_IgG1_PVA_/S267K Heavy Chain

SEQ ID NO: 11646 - protein, 117 aa, Artificial Sequence; identical to SEQ ID NO: 6318
  Description of Artificial Sequence: Synthetic polypeptide
  VH of XENP017916

SEQ ID NO: 11647 - protein, 5 aa, Artificial Sequence
  Description of Artificial Sequence: Synthetic peptide
  XENP017916 vhCDR1
SYGMS

SEQ ID NO: 11648 - protein, 17 aa, Artificial Sequence
  Description of Artificial Sequence: Synthetic peptide
  XENP017916 vhCDR2
TISGGGRYTYYPDSVKG

SEQ ID NO: 11649 - protein, 8 aa, Artificial Sequence
  Description of Artificial Sequence: Synthetic peptide
  XENP017916 vhCDR3
YYDSSFDY

SEQ ID NO: 11650 - protein, 214 aa, Artificial Sequence
  Description of Artificial Sequence: Synthetic polypeptide
  XENP017916 6A3_H1L3_IgG1_PVA_/S267K Light Chain
DIVMTQSPSSLSASVGDRVTITCRASQDVGTAVAWYQQKPGKSPKLLIYWASTRHTGVPDRFTGSGSGTDFTLTISSLQPEDFATYFCQHYSIYPWTFGGGTKVEIKRTVAAPSVFIFPPSDEQLKSGTASVVCLLNNFYPREAKVQWKVDNALQSGNSQESVTEQDSKDSTYSLSSTLTLSKADYEKHKVYACEVTHQGLSSPVTKSFNRGEC

SEQ ID NO: 11651 - protein, 107 aa, Artificial Sequence; identical to SEQ ID NO: 6337
  Description of Artificial Sequence: Synthetic polypeptide
  VL of XENP017916

SEQ ID NO: 11652 - protein, 11 aa, Artificial Sequence
  Description of Artificial Sequence: Synthetic peptide
  XENP017916 vlCDR1
RASQDVGTAVA

SEQ ID NO: 11653 - protein, 7 aa, Artificial Sequence
  Description of Artificial Sequence: Synthetic peptide
  XENP017916 vlCDR2
WASTRHT

SEQ ID NO: 11654 - protein, 9 aa, Artificial Sequence
  Description of Artificial Sequence: Synthetic peptide
  XENP017916 vlCDR3
QHYSIYPWT

SEQ ID NO: 11655 - protein, 446 aa, Artificial Sequence
  Description of Artificial Sequence: Synthetic polypeptide
  XENP017917 6A3_H2L3_IgG1_PVA_/S267K Heavy Chain
EVQLLESGGGLVQPGGSLRLSCAASGFTFSSYGMSWVRQAPGKGLEWVSTISGGGRYTYYPDSVKGRFTISRDNSKNTLYLQMNSLRAEDTAVYYCASYYDSSFDYWGQGTLVTVSSASTKGPSVFPLAPSSKSTSGGTAALGCLVKDYFPEPVTVSWNSGALTSGVHTFPAVLQSSGLYSLSSVVTVPSSSLGTQTYICNVNHKPSNTKVDKKVEPKSCDKTHTCPPCPAPPVAGPSVFLFPPKPKDTLMISRTPEVTCVVVDVKHEDPEVKFNWYVDGVEVHNAKTKPREEQYNSTYRVVSVLTVLHQDWLNGKEYKCKVSNKALPAPIEKTISKAKGQPREPQVYTLPPSREEMTKNQVSLTCLVKGFYPSDIAVEWESNGQPENNYKTTPPVLDSDGSFFLYSKLTVDKSRWQQGNVFSCSVMHEALHNHYTQKSLSLSPGK

SEQ ID NO: 11656 - protein, 117 aa, Artificial Sequence; identical to SEQ ID NO: 6354
  Description of Artificial Sequence: Synthetic polypeptide
  VH of XENP017917

SEQ ID NO: 11657 - protein, 5 aa, Artificial Sequence
  Description of Artificial Sequence: Synthetic peptide
  XENP017917 vhCDR1
SYGMS

SEQ ID NO: 11658 - protein, 17 aa, Artificial Sequence
  Description of Artificial Sequence: Synthetic peptide
  XENP017917 vhCDR2
TISGGGRYTYYPDSVKG

SEQ ID NO: 11659 - protein, 8 aa, Artificial Sequence
  Description of Artificial Sequence: Synthetic peptide
  XENP017917 vhCDR3
YYDSSFDY

SEQ ID NO: 11660 - protein, 214 aa, Artificial Sequence; identical to SEQ ID NO: 11650
  Description of Artificial Sequence: Synthetic polypeptide
  XENP017917 6A3_H2L3_IgG1_PVA_/S267K Light Chain

SEQ ID NO: 11661 - protein, 107 aa, Artificial Sequence; identical to SEQ ID NO: 6337
  Description of Artificial Sequence: Synthetic polypeptide
  VL of XENP017917

SEQ ID NO: 11662 - protein, 11 aa, Artificial Sequence
  Description of Artificial Sequence: Synthetic peptide
  XENP017917 vlCDR1
RASQDVGTAVA

SEQ ID NO: 11663 - protein, 7 aa, Artificial Sequence
  Description of Artificial Sequence: Synthetic peptide
  XENP017917 vlCDR2
WASTRHT

SEQ ID NO: 11664 - protein, 9 aa, Artificial Sequence
  Description of Artificial Sequence: Synthetic peptide
  XENP017917 vlCDR3
QHYSIYPWT

SEQ ID NO: 11665 - protein, 446 aa, Artificial Sequence
  Description of Artificial Sequence: Synthetic polypeptide
  XENP017918 6A3_H1.1_L3_IgG1_PVA_/S267K Heavy Chain
QVQLVESGGGLVKPGGSLRLSCAASGFTFSSYGMSWVRQAPGKRLEWVSTISGGGRYTYYPDSVKGRFTISRDNAKNSLYLQMNSLRAEDTAVYYCASYYDSSFDYWGQGTLVTVSSASTKGPSVFPLAPSSKSTSGGTAALGCLVKDYFPEPVTVSWNSGALTSGVHTFPAVLQSSGLYSLSSVVTVPSSSLGTQTYICNVNHKPSNTKVDKKVEPKSCDKTHTCPPCPAPPVAGPSVFLFPPKPKDTLMISRTPEVTCVVVDVKHEDPEVKFNWYVDGVEVHNAKTKPREEQYNSTYRVVSVLTVLHQDWLNGKEYKCKVSNKALPAPIEKTISKAKGQPREPQVYTLPPSREEMTKNQVSLTCLVKGFYPSDIAVEWESNGQPENNYKTTPPVLDSDGSFFLYSKLTVDKSRWQQGNVFSCSVMHEALHNHYTQKSLSLSPGK

SEQ ID NO: 11666 - protein, 117 aa, Artificial Sequence; identical to SEQ ID NO: 6345
  Description of Artificial Sequence: Synthetic polypeptide
  VH of XENP017918

SEQ ID NO: 11667 - protein, 5 aa, Artificial Sequence
  Description of Artificial Sequence: Synthetic peptide
  XENP017918 vhCDR1
SYGMS

SEQ ID NO: 11668 - protein, 17 aa, Artificial Sequence
  Description of Artificial Sequence: Synthetic peptide
  XENP017918 vhCDR2
TISGGGRYTYYPDSVKG

SEQ ID NO: 11669 - protein, 8 aa, Artificial Sequence
  Description of Artificial Sequence: Synthetic peptide
  XENP017918 vhCDR3
YYDSSFDY

SEQ ID NO: 11670 - protein, 214 aa, Artificial Sequence; identical to SEQ ID NO: 11650
  Description of Artificial Sequence: Synthetic polypeptide
  XENP017918 6A3_H1.1_L3_IgG1_PVA_/S267K Light Chain

SEQ ID NO: 11671 - protein, 107 aa, Artificial Sequence; identical to SEQ ID NO: 6337
  Description of Artificial Sequence: Synthetic polypeptide
  VL of XENP017918

SEQ ID NO: 11672 - protein, 11 aa, Artificial Sequence
  Description of Artificial Sequence: Synthetic peptide
  XENP017918 vlCDR1
RASQDVGTAVA

SEQ ID NO: 11673 - protein, 7 aa, Artificial Sequence
  Description of Artificial Sequence: Synthetic peptide
  XENP017918 vlCDR2
WASTRHT

SEQ ID NO: 11674 - protein, 9 aa, Artificial Sequence
  Description of Artificial Sequence: Synthetic peptide
  XENP017918 vlCDR3
QHYSIYPWT

SEQ ID NO: 11675 - protein, 451 aa, Artificial Sequence
  Description of Artificial Sequence: Synthetic polypeptide
  XENP018089 H1M7789N_H0L0_IgG1 Heavy Chain
EVQLLESGGGLVQPGGSLRLSCSASGFTFSSYTMNWVRQAPGKGLEWVSGISDTGGNTYYTDSVKGRFTVSRDNSKNTLSLQMNSLRAEDTAVYYCAKDQGGSYPYYFHYWGQGSLVTVSSASTKGPSVFPLAPSSKSTSGGTAALGCLVKDYFPEPVTVSWNSGALTSGVHTFPAVLQSSGLYSLSSVVTVPSSSLGTQTYICNVNHKPSNTKVDKKVEPKSCDKTHTCPPCPAPELLGGPSVFLFPPKPKDTLMISRTPEVTCVVVDVSHEDPEVKFNWYVDGVEVHNAKTKPREEQYNSTYRVVSVLTVLHQDWLNGKEYKCKVSNKALPAPIEKTISKAKGQPREPQVYTLPPSREEMTKNQVSLTCLVKGFYPSDIAVEWESNGQPENNYKTTPPVLDSDGSFFLYSKLTVDKSRWQQGNVFSCSVMHEALHNHYTQKSLSLSPGK

SEQ ID NO: 11676 - protein, 121 aa, Artificial Sequence
  Description of Artificial Sequence: Synthetic polypeptide
  VH of XENP018089
EVQLLESGGGLVQPGGSLRLSCSASGFTFSSYTMNWVRQAPGKGLEWVSGISDTGGNTYYTDSVKGRFTVSRDNSKNTLSLQMNSLRAEDTAVYYCAKDQGGSYPYYFHYWGQGSLVTVSS

SEQ ID NO: 11677 - protein, 5 aa, Artificial Sequence
  Description of Artificial Sequence: Synthetic peptide
  XENP018089 vhCDR1
SYTMN

SEQ ID NO: 11678 - protein, 17 aa, Artificial Sequence
  Description of Artificial Sequence: Synthetic peptide
  XENP018089 vhCDR2
GISDTGGNTYYTDSVKG

SEQ ID NO: 11679 - protein, 12 aa, Artificial Sequence
  Description of Artificial Sequence: Synthetic peptide
  XENP018089 vhCDR3
DQGGSYPYYFHY

SEQ ID NO: 11680 - protein, 215 aa, Artificial Sequence
  Description of Artificial Sequence: Synthetic polypeptide
  XENP018089 H1M7789N_H0L0_IgG1 Light Chain
DIQMTQSPSSLSASVGDRVTITCRASQSISSYLIWYQQKPGTAPKFLIYAASSLQSGVPSRFSGSGSGTDFTLTISSLQPEDFATYYCQQSYSTPPITFGQGTRLEIKRTVAAPSVFIFPPSDEQLKSGTASVVCLLNNFYPREAKVQWKVDNALQSGNSQESVTEQDSKDSTYSLSSTLTLSKADYEKHKVYACEVTHQGLSSPVTKSFNRGEC

SEQ ID NO: 11681 - protein, 108 aa, Artificial Sequence
  Description of Artificial Sequence: Synthetic polypeptide
  VL of XENP018089
DIQMTQSPSSLSASVGDRVTITCRASQSISSYLIWYQQKPGTAPKFLIYAASSLQSGVPSRFSGSGSGTDFTLTISSLQPEDFATYYCQQSYSTPPITFGQGTRLEIK

SEQ ID NO: 11682 - protein, 11 aa, Artificial Sequence
  Description of Artificial Sequence: Synthetic peptide
  XENP018089 vlCDR1
RASQSISSYLI

SEQ ID NO: 11683 - protein, 7 aa, Artificial Sequence
  Description of Artificial Sequence: Synthetic peptide
  XENP018089 vlCDR2
AASSLQS

SEQ ID NO: 11684 - protein, 10 aa, Artificial Sequence
  Description of Artificial Sequence: Synthetic peptide
  XENP018089 vlCDR3
QQSYSTPPIT

SEQ ID NO: 11685 - protein, 446 aa, Artificial Sequence
  Description of Artificial Sequence: Synthetic polypeptide
  XENP018090 H2aM7791N_H0L0_IgG1 Heavy Chain
QMQLQQWGAGLLKPSETLSLTCVVYGGSLNGYYWSWIRQSPGKGLEWIGEIDHSGSTNYNPSLKNRVTMSVDTSKIQFSLKLTSVTVADTAVYYCAREGLLPFDYWGQGTLVTVSSASTKGPSVFPLAPSSKSTSGGTAALGCLVKDYFPEPVTVSWNSGALTSGVHTFPAVLQSSGLYSLSSVVTVPSSSLGTQTYICNVNHKPSNTKVDKKVEPKSCDKTHTCPPCPAPELLGGPSVFLFPPKPKDTLMISRTPEVTCVVVDVSHEDPEVKFNWYVDGVEVHNAKTKPREEQYNSTYRVVSVLTVLHQDWLNGKEYKCKVSNKALPAPIEKTISKAKGQPREPQVYTLPPSREEMTKNQVSLTCLVKGFYPSDIAVEWESNGQPENNYKTTPPVLDSDGSFFLYSKLTVDKSRWQQGNVFSCSVMHEALHNHYTQKSLSLSPGK

SEQ ID NO: 11686 - protein, 116 aa, Artificial Sequence
  Description of Artificial Sequence: Synthetic polypeptide
  VH of XENP018090
QMQLQQWGAGLLKPSETLSLTCVVYGGSLNGYYWSWIRQSPGKGLEWIGEIDHSGSTNYNPSLKNRVTMSVDTSKIQFSLKLTSVTVADTAVYYCAREGLLPFDYWGQGTLVTVSS

SEQ ID NO: 11687 - protein, 5 aa, Artificial Sequence
  Description of Artificial Sequence: Synthetic peptide
  XENP018090 vhCDR1
GYYWS

SEQ ID NO: 11688 - protein, 16 aa, Artificial Sequence
  Description of Artificial Sequence: Synthetic peptide
  XENP018090 vhCDR2
EIDHSGSTNYNPSLKN

SEQ ID NO: 11689 - protein, 8 aa, Artificial Sequence
  Description of Artificial Sequence: Synthetic peptide
  XENP018090 vhCDR3
EGLLPFDY

SEQ ID NO: 11690 - protein, 215 aa, Artificial Sequence
  Description of Artificial Sequence: Synthetic polypeptide
  XENP018090 H2aM7791N_H0L0_IgG1 Light Chain
EIVLTQSPGTLSLSPGERVTLSCRASQSVYSNYLAWYQQNPGQAPRLLIYAASNRATGIPDRFSGSGSGTDFTLTISRLEPEDFAVYYCHQYATSPWTFGQGTKVEIKRTVAAPSVFIFPPSDEQLKSGTASVVCLLNNFYPREAKVQWKVDNALQSGNSQESVTEQDSKDSTYSLSSTLTLSKADYEKHKVYACEVTHQGLSSPVTKSFNRGEC

SEQ ID NO: 11691 - protein, 108 aa, Artificial Sequence
  Description of Artificial Sequence: Synthetic polypeptide
  VL of XENP018090
EIVLTQSPGTLSLSPGERVTLSCRASQSVYSNYLAWYQQNPGQAPRLLIYAASNRATGIPDRFSGSGSGTDFTLTISRLEPEDFAVYYCHQYATSPWTFGQGTKVEIK

SEQ ID NO: 11692 - protein, 12 aa, Artificial Sequence
  Description of Artificial Sequence: Synthetic peptide
  XENP018090 vlCDR1
RASQSVYSNYLA

SEQ ID NO: 11693 - protein, 7 aa, Artificial Sequence
  Description of Artificial Sequence: Synthetic peptide
  XENP018090 vlCDR2
AASNRAT

SEQ ID NO: 11694 - protein, 9 aa, Artificial Sequence
  Description of Artificial Sequence: Synthetic peptide
  XENP018090 vlCDR3
HQYATSPWT

SEQ ID NO: 11695 - protein, 446 aa, Artificial Sequence
  Description of Artificial Sequence: Synthetic polypeptide
  XENP018091 H2aM7796N_H0L0_IgG1 Heavy Chain
QVQLVESGGGVVQPGRSLRLSCAASGFTFSSYGMHWVRQAPGKGLEWVAIIWSDGDSEYNLDSVKGRFTISRDNSKNTLYLQMNSLRVEDSAVYYCARDRDLEDIWGQGTMVTVSSASTKGPSVFPLAPSSKSTSGGTAALGCLVKDYFPEPVTVSWNSGALTSGVHTFPAVLQSSGLYSLSSVVTVPSSSLGTQTYICNVNHKPSNTKVDKKVEPKSCDKTHTCPPCPAPELLGGPSVFLFPPKPKDTLMISRTPEVTCVVVDVSHEDPEVKFNWYVDGVEVHNAKTKPREEQYNSTYRVVSVLTVLHQDWLNGKEYKCKVSNKALPAPIEKTISKAKGQPREPQVYTLPPSREEMTKNQVSLTCLVKGFYPSDIAVEWESNGQPENNYKTTPPVLDSDGSFFLYSKLTVDKSRWQQGNVFSCSVMHEALHNHYTQKSLSLSPGK

SEQ ID NO: 11696 - protein, 116 aa, Artificial Sequence
  Description of Artificial Sequence: Synthetic polypeptide
  VH of XENP018091
QVQLVESGGGVVQPGRSLRLSCAASGFTFSSYGMHWVRQAPGKGLEWVAIIWSDGDSEYNLDSVKGRFTISRDNSKNTLYLQMNSLRVEDSAVYYCARDRDLEDIWGQGTMVTVSS

SEQ ID NO: 11697 - protein, 5 aa, Artificial Sequence
  Description of Artificial Sequence: Synthetic peptide
  XENP018091 vhCDR1
SYGMH

SEQ ID NO: 11698 - protein, 17 aa, Artificial Sequence
  Description of Artificial Sequence: Synthetic peptide
  XENP018091 vhCDR2
IIWSDGDSEYNLDSVKG

SEQ ID NO: 11699 - protein, 7 aa, Artificial Sequence
  Description of Artificial Sequence: Synthetic peptide
  XENP018091 vhCDR3
DRDLEDI

SEQ ID NO: 11700 - protein, 214 aa, Artificial Sequence
  Description of Artificial Sequence: Synthetic polypeptide
  XENP018091 H2aM7796N_H0L0_IgG1 Light Chain
DIQMTQSPSSLSASVGDRVTITCRASQGIRNDLGWYQQKPGKAPKRLIYAASNLQSGVPSRFSGSGSGTEFTLTISSLQPEDFATYYCLQHNSYPLTFGGGTKVEIKRTVAAPSVFIFPPSDEQLKSGTASVVCLLNNFYPREAKVQWKVDNALQSGNSQESVTEQDSKDSTYSLSSTLTLSKADYEKHKVYACEVTHQGLSSPVTKSFNRGEC

SEQ ID NO: 11701 - protein, 107 aa, Artificial Sequence
  Description of Artificial Sequence: Synthetic polypeptide
  VL of XENP018091
DIQMTQSPSSLSASVGDRVTITCRASQGIRNDLGWYQQKPGKAPKRLIYAASNLQSGVPSRFSGSGSGTEFTLTISSLQPEDFATYYCLQHNSYPLTFGGGTKVEIK

SEQ ID NO: 11702 - protein, 11 aa, Artificial Sequence
  Description of Artificial Sequence: Synthetic peptide
  XENP018091 vlCDR1
RASQGIRNDLG

SEQ ID NO: 11703 - protein, 7 aa, Artificial Sequence
  Description of Artificial Sequence: Synthetic peptide
  XENP018091 vlCDR2
AASNLQS

SEQ ID NO: 11704 - protein, 9 aa, Artificial Sequence
  Description of Artificial Sequence: Synthetic peptide
  XENP018091 vlCDR3
LQHNSYPLT

SEQ ID NO: 11705 - protein, 451 aa, Artificial Sequence
  Description of Artificial Sequence: Synthetic polypeptide
  XENP018092 H4H9057P2_H0L0_IgG1 Heavy Chain
EVQLVESGGGLVQSGRSLRLSCAASGFTFDDYAMHWVRQPPGKGLEWVSGINWNRGRTGYADSVKGRFTISRDNAKNSLYLQMNDLRVEDTALYYCAKAEQWLDEGYFDYWGQGTLVTVSSASTKGPSVFPLAPSSKSTSGGTAALGCLVKDYFPEPVTVSWNSGALTSGVHTFPAVLQSSGLYSLSSVVTVPSSSLGTQTYICNVNHKPSNTKVDKKVEPKSCDKTHTCPPCPAPELLGGPSVFLFPPKPKDTLMISRTPEVTCVVVDVSHEDPEVKFNWYVDGVEVHNAKTKPREEQYNSTYRVVSVLTVLHQDWLNGKEYKCKVSNKALPAPIEKTISKAKGQPREPQVYTLPPSREEMTKNQVSLTCLVKGFYPSDIAVEWESNGQPENNYKTTPPVLDSDGSFFLYSKLTVDKSRWQQGNVFSCSVMHEALHNHYTQKSLSLSPGK

SEQ ID NO: 11706 - protein, 121 aa, Artificial Sequence
  Description of Artificial Sequence: Synthetic polypeptide
  VH of XENP018092
EVQLVESGGGLVQSGRSLRLSCAASGFTFDDYAMHWVRQPPGKGLEWVSGINWNRGRTGYADSVKGRFTISRDNAKNSLYLQMNDLRVEDTALYYCAKAEQWLDEGYFDYWGQGTLVTVSS

SEQ ID NO: 11707 - protein, 5 aa, Artificial Sequence
  Description of Artificial Sequence: Synthetic peptide
  XENP018092 vhCDR1
DYAMH

SEQ ID NO: 11708 - protein, 17 aa, Artificial Sequence
  Description of Artificial Sequence: Synthetic peptide
  XENP018092 vhCDR2
GINWNRGRTGYADSVKG

SEQ ID NO: 11709 - protein, 12 aa, Artificial Sequence
  Description of Artificial Sequence: Synthetic peptide
  XENP018092 vhCDR3
AEQWLDEGYFDY

SEQ ID NO: 11710 - protein, 215 aa, Artificial Sequence
  Description of Artificial Sequence: Synthetic polypeptide
  XENP018092 H4H9057P2_H0L0_IgG1 Light Chain
DIQMTQSPSSLSASVGDRVTITCRASQSISSYLNWYQQKPGKAPKLLIYAASSLQSGVPSRFSGSGSGTDFTLTISSLQPEDFATYYCQQSYSTPPITFGQGTRLEIKRTVAAPSVFIFPPSDEQLKSGTASVVCLLNNFYPREAKVQWKVDNALQSGNSQESVTEQDSKDSTYSLSSTLTLSKADYEKHKVYACEVTHQGLSSPVTKSFNRGEC

SEQ ID NO: 11711 - protein, 108 aa, Artificial Sequence
  Description of Artificial Sequence: Synthetic polypeptide
  VL of XENP018092
DIQMTQSPSSLSASVGDRVTITCRASQSISSYLNWYQQKPGKAPKLLIYAASSLQSGVPSRFSGSGSGTDFTLTISSLQPEDFATYYCQQSYSTPPITFGQGTRLEIK

SEQ ID NO: 11712 - protein, 11 aa, Artificial Sequence
  Description of Artificial Sequence: Synthetic peptide
  XENP018092 vlCDR1
RASQSISSYLN

SEQ ID NO: 11713 - protein, 7 aa, Artificial Sequence
  Description of Artificial Sequence: Synthetic peptide
  XENP018092 vlCDR2
AASSLQS

SEQ ID NO: 11714 - protein, 10 aa, Artificial Sequence
  Description of Artificial Sequence: Synthetic peptide
  XENP018092 vlCDR3
QQSYSTPPIT

SEQ ID NO: 11715 - protein, 451 aa, Artificial Sequence
  Description of Artificial Sequence: Synthetic polypeptide
  XENP018093 H4H9068P2_H0L0_IgG1 Heavy Chain
EVQLVESGGGLVQPGGSLRLSCAASGFSFSSYAMNWVRQAPGKGLEWVSTISDSGGSTYYADSVKGRFTISRDNSKNTLSLQMNSLRAEDTAVYYCAKDQGGSYPYYFHYWGQGTLVTVSSASTKGPSVFPLAPSSKSTSGGTAALGCLVKDYFPEPVTVSWNSGALTSGVHTFPAVLQSSGLYSLSSVVTVPSSSLGTQTYICNVNHKPSNTKVDKKVEPKSCDKTHTCPPCPAPELLGGPSVFLFPPKPKDTLMISRTPEVTCVVVDVSHEDPEVKFNWYVDGVEVHNAKTKPREEQYNSTYRVVSVLTVLHQDWLNGKEYKCKVSNKALPAPIEKTISKAKGQPREPQVYTLPPSREEMTKNQVSLTCLVKGFYPSDIAVEWESNGQPENNYKTTPPVLDSDGSFFLYSKLTVDKSRWQQGNVFSCSVMHEALHNHYTQKSLSLSPGK

SEQ ID NO: 11716 - protein, 121 aa, Artificial Sequence
  Description of Artificial Sequence: Synthetic polypeptide
  VH of XENP018093
EVQLVESGGGLVQPGGSLRLSCAASGFSFSSYAMNWVRQAPGKGLEWVSTISDSGGSTYYADSVKGRFTISRDNSKNTLSLQMNSLRAEDTAVYYCAKDQGGSYPYYFHYWGQGTLVTVSS

SEQ ID NO: 11717 - protein, 5 aa, Artificial Sequence
  Description of Artificial Sequence: Synthetic peptide
  XENP018093 vhCDR1
SYAMN

SEQ ID NO: 11718 - protein, 17 aa, Artificial Sequence
  Description of Artificial Sequence: Synthetic peptide
  XENP018093 vhCDR2
TISDSGGSTYYADSVKG

SEQ ID NO: 11719 - protein, 12 aa, Artificial Sequence
  Description of Artificial Sequence: Synthetic peptide
  XENP018093 vhCDR3
DQGGSYPYYFHY

SEQ ID NO: 11720 - protein, 215 aa, Artificial Sequence; identical to SEQ ID NO: 11710
  Description of Artificial Sequence: Synthetic polypeptide
  XENP018093 H4H9068P2_H0L0_IgG1 Light Chain

SEQ ID NO: 11721 - protein, 108 aa, Artificial Sequence; identical to SEQ ID NO: 11711
  Description of Artificial Sequence: Synthetic polypeptide
  VL of XENP018093

SEQ ID NO: 11722 - protein, 11 aa, Artificial Sequence
  Description of Artificial Sequence: Synthetic peptide
  XENP018093 vlCDR1
RASQSISSYLN

SEQ ID NO: 11723 - protein, 7 aa, Artificial Sequence
  Description of Artificial Sequence: Synthetic peptide
  XENP018093 vlCDR2
AASSLQS

SEQ ID NO: 11724 - protein, 10 aa, Artificial Sequence
  Description of Artificial Sequence: Synthetic peptide
  XENP018093 vlCDR3
QQSYSTPPIT

SEQ ID NO: 11725 - protein, 451 aa, Artificial Sequence
  Description of Artificial Sequence: Synthetic polypeptide
  XENP018094 1G6_H1.1_L1_IgG1_PVA_/S267K Heavy Chain
QVQLVESGGGLVKPGGSLRLSCAASGFTFSNYWMNWVRQAPGKGLEWVGEIRLKSNNYATHYAEPVKGRFTISRDDSKSTVYLQMNSLKTEDTAVYYCTRYYGNYGGYFDVWGAGTLVTVSSASTKGPSVFPLAPSSKSTSGGTAALGCLVKDYFPEPVTVSWNSGALTSGVHTFPAVLQSSGLYSLSSVVTVPSSSLGTQTYICNVNHKPSNTKVDKKVEPKSCDKTHTCPPCPAPPVAGPSVFLFPPKPKDTLMISRTPEVTCVVVDVKHEDPEVKFNWYVDGVEVHNAKTKPREEQYNSTYRVVSVLTVLHQDWLNGKEYKCKVSNKALPAPIEKTISKAKGQPREPQVYTLPPSREEMTKNQVSLTCLVKGFYPSDIAVEWESNGQPENNYKTTPPVLDSDGSFFLYSKLTVDKSRWQQGNVFSCSVMHEALHNHYTQKSLSLSPGK

SEQ ID NO: 11726 - protein, 122 aa, Artificial Sequence; identical to SEQ ID NO: 6363
  Description of Artificial Sequence: Synthetic polypeptide
  VH of XENP018094

SEQ ID NO: 11727 - protein, 5 aa, Artificial Sequence
  Description of Artificial Sequence: Synthetic peptide
  XENP018094 vhCDR1
NYWMN

SEQ ID NO: 11728 - protein, 19 aa, Artificial Sequence
  Description of Artificial Sequence: Synthetic peptide
  XENP018094 vhCDR2
EIRLKSNNYATHYAEPVKG

SEQ ID NO: 11729 - protein, 11 aa, Artificial Sequence
  Description of Artificial Sequence: Synthetic peptide
  XENP018094 vhCDR3
YYGNYGGYFDV

SEQ ID NO: 11730 - protein, 214 aa, Artificial Sequence; identical to SEQ ID NO: 11550
  Description of Artificial Sequence: Synthetic polypeptide
  XENP018094 1G6_H1.1_L1_IgG1_PVA_/S267K Light Chain

SEQ ID NO: 11731 - protein, 107 aa, Artificial Sequence; identical to SEQ ID NO: 6247
  Description of Artificial Sequence: Synthetic polypeptide
  VL of XENP018094

SEQ ID NO: 11732 - protein, 11 aa, Artificial Sequence
  Description of Artificial Sequence: Synthetic peptide
  XENP018094 vlCDR1
RASQSVSNDVA

SEQ ID NO: 11733 - protein, 7 aa, Artificial Sequence
  Description of Artificial Sequence: Synthetic peptide
  XENP018094 vlCDR2
YASHRYT

SEQ ID NO: 11734 - protein, 9 aa, Artificial Sequence
  Description of Artificial Sequence: Synthetic peptide
  XENP018094 vlCDR3
QQDYSSPRT

SEQ ID NO: 11735 - protein, 451 aa, Artificial Sequence
  Description of Artificial Sequence: Synthetic polypeptide
  XENP018095 1G6_H1.2_L1_IgG1_PVA_/S267K Heavy Chain
EVKLVESGGGLVKPGGSLRLSCAASGFTFSNYWMNWVRQAPGKGLEWVGEIRLKSNNYATHYAEPVKGRFTISRDDSKSTVYLQMNSLKTEDTAVYYCTRYYGNYGGYFDVWGAGTLVTVSSASTKGPSVFPLAPSSKSTSGGTAALGCLVKDYFPEPVTVSWNSGALTSGVHTFPAVLQSSGLYSLSSVVTVPSSSLGTQTYICNVNHKPSNTKVDKKVEPKSCDKTHTCPPCPAPPVAGPSVFLFPPKPKDTLMISRTPEVTCVVVDVKHEDPEVKFNWYVDGVEVHNAKTKPREEQYNSTYRVVSVLTVLHQDWLNGKEYKCKVSNKALPAPIEKTISKAKGQPREPQVYTLPPSREEMTKNQVSLTCLVKGFYPSDIAVEWESNGQPENNYKTTPPVLDSDGSFFLYSKLTVDKSRWQQGNVFSCSVMHEALHNHYTQKSLSLSPGK

SEQ ID NO: 11736 - protein, 122 aa, Artificial Sequence; identical to SEQ ID NO: 6372
  Description of Artificial Sequence: Synthetic polypeptide
  VH of XENP018095

SEQ ID NO: 11737 - protein, 5 aa, Artificial Sequence
  Description of Artificial Sequence: Synthetic peptide
  XENP018095 vhCDR1
NYWMN

SEQ ID NO: 11738 - protein, 19 aa, Artificial Sequence
  Description of Artificial Sequence: Synthetic peptide
  XENP018095 vhCDR2
EIRLKSNNYATHYAEPVKG

SEQ ID NO: 11739 - protein, 11 aa, Artificial Sequence
  Description of Artificial Sequence: Synthetic peptide
  XENP018095 vhCDR3
YYGNYGGYFDV

SEQ ID NO: 11740 - protein, 214 aa, Artificial Sequence; identical to SEQ ID NO: 11550
  Description of Artificial Sequence: Synthetic polypeptide
  XENP018095 1G6_H1.2_L1_IgG1_PVA_/S267K Light Chain

SEQ ID NO: 11741 - protein, 107 aa, Artificial Sequence; identical to SEQ ID NO: 6247
  Description of Artificial Sequence: Synthetic polypeptide
  VL of XENP018095

SEQ ID NO: 11742 - protein, 11 aa, Artificial Sequence
  Description of Artificial Sequence: Synthetic peptide
  XENP018095 vlCDR1
RASQSVSNDVA

SEQ ID NO: 11743 - protein, 7 aa, Artificial Sequence
  Description of Artificial Sequence: Synthetic peptide
  XENP018095 vlCDR2
YASHRYT

SEQ ID NO: 11744 - protein, 9 aa, Artificial Sequence
  Description of Artificial Sequence: Synthetic peptide
  XENP018095 vlCDR3
QQDYSSPRT

SEQ ID NO: 11745 - protein, 451 aa, Artificial Sequence
  Description of Artificial Sequence: Synthetic polypeptide
  XENP018096 1G6_H1.3_L1_IgG1_PVA_/S267K Heavy Chain
EVQLEESGGGLVKPGGSLRLSCAASGFTFSNYWMNWVRQAPGKGLEWVGEIRLKSNNYATHYAEPVKGRFTISRDDSKSTVYLQMNSLKTEDTAVYYCTRYYGNYGGYFDVWGAGTLVTVSSASTKGPSVFPLAPSSKSTSGGTAALGCLVKDYFPEPVTVSWNSGALTSGVHTFPAVLQSSGLYSLSSVVTVPSSSLGTQTYICNVNHKPSNTKVDKKVEPKSCDKTHTCPPCPAPPVAGPSVFLFPPKPKDTLMISRTPEVTCVVVDVKHEDPEVKFNWYVDGVEVHNAKTKPREEQYNSTYRVVSVLTVLHQDWLNGKEYKCKVSNKALPAPIEKTISKAKGQPREPQVYTLPPSREEMTKNQVSLTCLVKGFYPSDIAVEWESNGQPENNYKTTPPVLDSDGSFFLYSKLTVDKSRWQQGNVFSCSVMHEALHNHYTQKSLSLSPGK

SEQ ID NO: 11746 - protein, 122 aa, Artificial Sequence; identical to SEQ ID NO: 6381
  Description of Artificial Sequence: Synthetic polypeptide
  VH of XENP018096

SEQ ID NO: 11747 - protein, 5 aa, Artificial Sequence
  Description of Artificial Sequence: Synthetic peptide
  XENP018096 vhCDR1
NYWMN

SEQ ID NO: 11748 - protein, 19 aa, Artificial Sequence
  Description of Artificial Sequence: Synthetic peptide
  XENP018096 vhCDR2
EIRLKSNNYATHYAEPVKG

SEQ ID NO: 11749 - protein, 11 aa, Artificial Sequence
  Description of Artificial Sequence: Synthetic peptide
  XENP018096 vhCDR3
YYGNYGGYFDV

SEQ ID NO: 11750 - protein, 214 aa, Artificial Sequence; identical to SEQ ID NO: 11550
  Description of Artificial Sequence: Synthetic polypeptide
  XENP018096 1G6_H1.3_L1_IgG1_PVA_/S267K Light Chain

SEQ ID NO: 11751 - protein, 107 aa, Artificial Sequence; identical to SEQ ID NO: 6247
  Description of Artificial Sequence: Synthetic polypeptide
  VL of XENP018096

SEQ ID NO: 11752 - protein, 11 aa, Artificial Sequence
  Description of Artificial Sequence: Synthetic peptide
  XENP018096 vlCDR1
RASQSVSNDVA

SEQ ID NO: 11753 - protein, 7 aa, Artificial Sequence
  Description of Artificial Sequence: Synthetic peptide
  XENP018096 vlCDR2
YASHRYT

SEQ ID NO: 11754 - protein, 9 aa, Artificial Sequence
  Description of Artificial Sequence: Synthetic peptide
  XENP018096 vlCDR3
QQDYSSPRT

SEQ ID NO: 11755 - protein, 451 aa, Artificial Sequence
  Description of Artificial Sequence: Synthetic polypeptide
  XENP018101 1G6_H1.4_L1_IgG1_PVA_/S267K Heavy Chain
EVQLVESGGGLVQPGGSLRLSCAASGFTFSNYWMNWVRQAPGKGLEWVGEIRLKSNNYATHYAEPVKGRFTISRDDSKSTVYLQMNSLKTEDTAVYYCTRYYGNYGGYFDVWGAGTLVTVSSASTKGPSVFPLAPSSKSTSGGTAALGCLVKDYFPEPVTVSWNSGALTSGVHTFPAVLQSSGLYSLSSVVTVPSSSLGTQTYICNVNHKPSNTKVDKKVEPKSCDKTHTCPPCPAPPVAGPSVFLFPPKPKDTLMISRTPEVTCVVVDVKHEDPEVKFNWYVDGVEVHNAKTKPREEQYNSTYRVVSVLTVLHQDWLNGKEYKCKVSNKALPAPIEKTISKAKGQPREPQVYTLPPSREEMTKNQVSLTCLVKGFYPSDIAVEWESNGQPENNYKTTPPVLDSDGSFFLYSKLTVDKSRWQQGNVFSCSVMHEALHNHYTQKSLSLSPGK

SEQ ID NO: 11756 - protein, 122 aa, Artificial Sequence; identical to SEQ ID NO: 6390
  Description of Artificial Sequence: Synthetic polypeptide
  VH of XENP018101

SEQ ID NO: 11757 - protein, 5 aa, Artificial Sequence
  Description of Artificial Sequence: Synthetic peptide
  XENP018101 vhCDR1
NYWMN

SEQ ID NO: 11758 - protein, 19 aa, Artificial Sequence
  Description of Artificial Sequence: Synthetic peptide
  XENP018101 vhCDR2
EIRLKSNNYATHYAEPVKG

SEQ ID NO: 11759 - protein, 11 aa, Artificial Sequence
  Description of Artificial Sequence: Synthetic peptide
  XENP018101 vhCDR3
YYGNYGGYFDV

SEQ ID NO: 11760 - protein, 214 aa, Artificial Sequence; identical to SEQ ID NO: 11550
  Description of Artificial Sequence: Synthetic polypeptide
  XENP018101 1G6_H1.4_L1_IgG1_PVA_/S267K Light Chain

SEQ ID NO: 11761 - protein, 107 aa, Artificial Sequence; identical to SEQ ID NO: 6247
  Description of Artificial Sequence: Synthetic polypeptide
  VL of XENP018101

SEQ ID NO: 11762 - protein, 11 aa, Artificial Sequence
  Description of Artificial Sequence: Synthetic peptide
  XENP018101 vlCDR1
RASQSVSNDVA

SEQ ID NO: 11763 - protein, 7 aa, Artificial Sequence
  Description of Artificial Sequence: Synthetic peptide
  XENP018101 vlCDR2
YASHRYT

SEQ ID NO: 11764 - protein, 9 aa, Artificial Sequence
  Description of Artificial Sequence: Synthetic peptide
  XENP018101 vlCDR3
QQDYSSPRT

SEQ ID NO: 11765 - protein, 451 aa, Artificial Sequence
  Description of Artificial Sequence: Synthetic polypeptide
  XENP018102 1G6_H1.5_L1_IgG1_PVA_/S267K Heavy Chain
EVQLVESGGGLVRPGGSLRLSCAASGFTFSNYWMNWVRQAPGKGLEWVGEIRLKSNNYATHYAEPVKGRFTISRDDSKSTVYLQMNSLKTEDTAVYYCTRYYGNYGGYFDVWGAGTLVTVSSASTKGPSVFPLAPSSKSTSGGTAALGCLVKDYFPEPVTVSWNSGALTSGVHTFPAVLQSSGLYSLSSVVTVPSSSLGTQTYICNVNHKPSNTKVDKKVEPKSCDKTHTCPPCPAPPVAGPSVFLFPPKPKDTLMISRTPEVTCVVVDVKHEDPEVKFNWYVDGVEVHNAKTKPREEQYNSTYRVVSVLTVLHQDWLNGKEYKCKVSNKALPAPIEKTISKAKGQPREPQVYTLPPSREEMTKNQVSLTCLVKGFYPSDIAVEWESNGQPENNYKTTPPVLDSDGSFFLYSKLTVDKSRWQQGNVFSCSVMHEALHNHYTQKSLSLSPGK

SEQ ID NO: 11766 - protein, 122 aa, Artificial Sequence; identical to SEQ ID NO: 6399
  Description of Artificial Sequence: Synthetic polypeptide
  VH of XENP018102

SEQ ID NO: 11767 - protein, 5 aa, Artificial Sequence
  Description of Artificial Sequence: Synthetic peptide
  XENP018102 vhCDR1
NYWMN

SEQ ID NO: 11768 - protein, 19 aa, Artificial Sequence
  Description of Artificial Sequence: Synthetic peptide
  XENP018102 vhCDR2
EIRLKSNNYATHYAEPVKG

SEQ ID NO: 11769 - protein, 11 aa, Artificial Sequence
  Description of Artificial Sequence: Synthetic peptide
  XENP018102 vhCDR3
YYGNYGGYFDV

SEQ ID NO: 11770 - protein, 214 aa, Artificial Sequence; identical to SEQ ID NO: 11550
  Description of Artificial Sequence: Synthetic polypeptide
  XENP018102 1G6_H1.5_L1_IgG1_PVA_/S267K Light Chain

SEQ ID NO: 11771 - protein, 107 aa, Artificial Sequence; identical to SEQ ID NO: 6247
  Description of Artificial Sequence: Synthetic polypeptide
  VL of XENP018102

SEQ ID NO: 11772 - protein, 11 aa, Artificial Sequence
  Description of Artificial Sequence: Synthetic peptide
  XENP018102 vlCDR1
RASQSVSNDVA

SEQ ID NO: 11773 - protein, 7 aa, Artificial Sequence
  Description of Artificial Sequence: Synthetic peptide
  XENP018102 vlCDR2
YASHRYT

SEQ ID NO: 11774 - protein, 9 aa, Artificial Sequence
  Description of Artificial Sequence: Synthetic peptide
  XENP018102 vlCDR3
QQDYSSPRT

SEQ ID NO: 11775 - protein, 451 aa, Artificial Sequence
  Description of Artificial Sequence: Synthetic polypeptide
  XENP018103 1G6_H1.6_L1_IgG1_PVA_/S267K Heavy Chain
EVQLVESGGGLVKPGGSMRLSCAASGFTFSNYWMNWVRQAPGKGLEWVGEIRLKSNNYATHYAEPVKGRFTISRDDSKSTVYLQMNSLKTEDTAVYYCTRYYGNYGGYFDVWGAGTLVTVSSASTKGPSVFPLAPSSKSTSGGTAALGCLVKDYFPEPVTVSWNSGALTSGVHTFPAVLQSSGLYSLSSVVTVPSSSLGTQTYICNVNHKPSNTKVDKKVEPKSCDKTHTCPPCPAPPVAGPSVFLFPPKPKDTLMISRTPEVTCVVVDVKHEDPEVKFNWYVDGVEVHNAKTKPREEQYNSTYRVVSVLTVLHQDWLNGKEYKCKVSNKALPAPIEKTISKAKGQPREPQVYTLPPSREEMTKNQVSLTCLVKGFYPSDIAVEWESNGQPENNYKTTPPVLDSDGSFFLYSKLTVDKSRWQQGNVFSCSVMHEALHNHYTQKSLSLSPGK

SEQ ID NO: 11776 - protein, 122 aa, Artificial Sequence; identical to SEQ ID NO: 6408
  Description of Artificial Sequence: Synthetic polypeptide
  VH of XENP018103

SEQ ID NO: 11777 - protein, 5 aa, Artificial Sequence
  Description of Artificial Sequence: Synthetic peptide
  XENP018103 vhCDR1
NYWMN

SEQ ID NO: 11778 - protein, 19 aa, Artificial Sequence
  Description of Artificial Sequence: Synthetic peptide
  XENP018103 vhCDR2
EIRLKSNNYATHYAEPVKG

SEQ ID NO: 11779 - protein, 11 aa, Artificial Sequence
  Description of Artificial Sequence: Synthetic peptide
  XENP018103 vhCDR3
YYGNYGGYFDV

SEQ ID NO: 11780 - protein, 214 aa, Artificial Sequence; identical to SEQ ID NO: 11550
  Description of Artificial Sequence: Synthetic polypeptide
  XENP018103 1G6_H1.6_L1_IgG1_PVA_/S267K Light Chain

SEQ ID NO: 11781 - protein, 107 aa, Artificial Sequence; identical to SEQ ID NO: 6247
  Description of Artificial Sequence: Synthetic polypeptide
  VL of XENP018103

SEQ ID NO: 11782 - protein, 11 aa, Artificial Sequence
  Description of Artificial Sequence: Synthetic peptide
  XENP018103 vlCDR1
RASQSVSNDVA

SEQ ID NO: 11783 - protein, 7 aa, Artificial Sequence
  Description of Artificial Sequence: Synthetic peptide
  XENP018103 vlCDR2
YASHRYT

SEQ ID NO: 11784 - protein, 9 aa, Artificial Sequence
  Description of Artificial Sequence: Synthetic peptide
  XENP018103 vlCDR3
QQDYSSPRT

SEQ ID NO: 11785 - protein, 451 aa, Artificial Sequence
  Description of Artificial Sequence: Synthetic polypeptide
  XENP018104 1G6_H1.7_L1_IgG1_PVA_/S267K Heavy Chain
EVQLVESGGGLVKPGGSLKLSCAASGFTFSNYWMNWVRQAPGKGLEWVGEIRLKSNNYATHYAEPVKGRFTISRDDSKSTVYLQMNSLKTEDTAVYYCTRYYGNYGGYFDVWGAGTLVTVSSASTKGPSVFPLAPSSKSTSGGTAALGCLVKDYFPEPVTVSWNSGALTSGVHTFPAVLQSSGLYSLSSVVTVPSSSLGTQTYICNVNHKPSNTKVDKKVEPKSCDKTHTCPPCPAPPVAGPSVFLFPPKPKDTLMISRTPEVTCVVVDVKHEDPEVKFNWYVDGVEVHNAKTKPREEQYNSTYRVVSVLTVLHQDWLNGKEYKCKVSNKALPAPIEKTISKAKGQPREPQVYTLPPSREEMTKNQVSLTCLVKGFYPSDIAVEWESNGQPENNYKTTPPVLDSDGSFFLYSKLTVDKSRWQQGNVFSCSVMHEALHNHYTQKSLSLSPGK

SEQ ID NO: 11786 - protein, 122 aa, Artificial Sequence; identical to SEQ ID NO: 6417
  Description of Artificial Sequence: Synthetic polypeptide
  VH of XENP018104

SEQ ID NO: 11787 - protein, 5 aa, Artificial Sequence
  Description of Artificial Sequence: Synthetic peptide
  XENP018104 vhCDR1
NYWMN

SEQ ID NO: 11788 - protein, 19 aa, Artificial Sequence
  Description of Artificial Sequence: Synthetic peptide
  XENP018104 vhCDR2
EIRLKSNNYATHYAEPVKG

SEQ ID NO: 11789 - protein, 11 aa, Artificial Sequence
  Description of Artificial Sequence: Synthetic peptide
  XENP018104 vhCDR3
YYGNYGGYFDV

SEQ ID NO: 11790 - protein, 214 aa, Artificial Sequence; identical to SEQ ID NO: 11550
  Description of Artificial Sequence: Synthetic polypeptide
  XENP018104 1G6_H1.7_L1_IgG1_PVA_/S267K Light Chain

SEQ ID NO: 11791 - protein, 107 aa, Artificial Sequence; identical to SEQ ID NO: 6247
  Description of Artificial Sequence: Synthetic polypeptide
  VL of XENP018104

SEQ ID NO: 11792 - protein, 11 aa, Artificial Sequence
  Description of Artificial Sequence: Synthetic peptide
  XENP018104 vlCDR1
RASQSVSNDVA

SEQ ID NO: 11793 - protein, 7 aa, Artificial Sequence
  Description of Artificial Sequence: Synthetic peptide
  XENP018104 vlCDR2
YASHRYT

SEQ ID NO: 11794 - protein, 9 aa, Artificial Sequence
  Description of Artificial Sequence: Synthetic peptide
  XENP018104 vlCDR3
QQDYSSPRT

SEQ ID NO: 11795 - protein, 451 aa, Artificial Sequence
  Description of Artificial Sequence: Synthetic polypeptide
  XENP018105 1G6_H1.8_L1_IgG1_PVA_/S267K Heavy Chain
EVQLVESGGGLVKPGGSLRLSCVASGFTFSNYWMNWVRQAPGKGLEWVGEIRLKSNNYATHYAEPVKGRFTISRDDSKSTVYLQMNSLKTEDTAVYYCTRYYGNYGGYFDVWGAGTLVTVSSASTKGPSVFPLAPSSKSTSGGTAALGCLVKDYFPEPVTVSWNSGALTSGVHTFPAVLQSSGLYSLSSVVTVPSSSLGTQTYICNVNHKPSNTKVDKKVEPKSCDKTHTCPPCPAPPVAGPSVFLFPPKPKDTLMISRTPEVTCVVVDVKHEDPEVKFNWYVDGVEVHNAKTKPREEQYNSTYRVVSVLTVLHQDWLNGKEYKCKVSNKALPAPIEKTISKAKGQPREPQVYTLPPSREEMTKNQVSLTCLVKGFYPSDIAVEWESNGQPENNYKTTPPVLDSDGSFFLYSKLTVDKSRWQQGNVFSCSVMHEALHNHYTQKSLSLSPGK

SEQ ID NO: 11796 - protein, 122 aa, Artificial Sequence; identical to SEQ ID NO: 6426
  Description of Artificial Sequence: Synthetic polypeptide
  VH of XENP018105

SEQ ID NO: 11797 - protein, 5 aa, Artificial Sequence
  Description of Artificial Sequence: Synthetic peptide
  XENP018105 vhCDR1
NYWMN

SEQ ID NO: 11798 - protein, 19 aa, Artificial Sequence
  Description of Artificial Sequence: Synthetic peptide
  XENP018105 vhCDR2
EIRLKSNNYATHYAEPVKG

SEQ ID NO: 11799 - protein, 11 aa, Artificial Sequence
  Description of Artificial Sequence: Synthetic peptide
  XENP018105 vhCDR3
YYGNYGGYFDV

SEQ ID NO: 11800 - protein, 214 aa, Artificial Sequence; identical to SEQ ID NO: 11550
  Description of Artificial Sequence: Synthetic polypeptide
  XENP018105 1G6_H1.8_L1_IgG1_PVA_/S267K Light Chain

SEQ ID NO: 11801 - protein, 107 aa, Artificial Sequence; identical to SEQ ID NO: 6247
  Description of Artificial Sequence: Synthetic polypeptide
  VL of XENP018105

SEQ ID NO: 11802 - protein, 11 aa, Artificial Sequence
  Description of Artificial Sequence: Synthetic peptide
  XENP018105 vlCDR1
RASQSVSNDVA

SEQ ID NO: 11803 - protein, 7 aa, Artificial Sequence
  Description of Artificial Sequence: Synthetic peptide
  XENP018105 vlCDR2
YASHRYT

SEQ ID NO: 11804 - protein, 9 aa, Artificial Sequence
  Description of Artificial Sequence: Synthetic peptide
  XENP018105 vlCDR3
QQDYSSPRT

SEQ ID NO: 11805 - protein, 451 aa, Artificial Sequence
  Description of Artificial Sequence: Synthetic polypeptide
  XENP018106 1G6_H1.9_L1_IgG1_PVA_/S267K Heavy Chain
EVQLVESGGGLVKPGGSLRLSCAASGFTVSNYWMNWVRQAPGKGLEWVGEIRLKSNNYATHYAEPVKGRFTISRDDSKSTVYLQMNSLKTEDTAVYYCTRYYGNYGGYFDVWGAGTLVTVSSASTKGPSVFPLAPSSKSTSGGTAALGCLVKDYFPEPVTVSWNSGALTSGVHTFPAVLQSSGLYSLSSVVTVPSSSLGTQTYICNVNHKPSNTKVDKKVEPKSCDKTHTCPPCPAPPVAGPSVFLFPPKPKDTLMISRTPEVTCVVVDVKHEDPEVKFNWYVDGVEVHNAKTKPREEQYNSTYRVVSVLTVLHQDWLNGKEYKCKVSNKALPAPIEKTISKAKGQPREPQVYTLPPSREEMTKNQVSLTCLVKGFYPSDIAVEWESNGQPENNYKTTPPVLDSDGSFFLYSKLTVDKSRWQQGNVFSCSVMHEALHNHYTQKSLSLSPGK

SEQ ID NO: 11806 - protein, 122 aa, Artificial Sequence; identical to SEQ ID NO: 6435
  Description of Artificial Sequence: Synthetic polypeptide
  VH of XENP018106

SEQ ID NO: 11807 - protein, 5 aa, Artificial Sequence
  Description of Artificial Sequence: Synthetic peptide
  XENP018106 vhCDR1
NYWMN

SEQ ID NO: 11808 - protein, 19 aa, Artificial Sequence
  Description of Artificial Sequence: Synthetic peptide
  XENP018106 vhCDR2
EIRLKSNNYATHYAEPVKG

SEQ ID NO: 11809 - protein, 11 aa, Artificial Sequence
  Description of Artificial Sequence: Synthetic peptide
  XENP018106 vhCDR3
YYGNYGGYFDV

SEQ ID NO: 11810 - protein, 214 aa, Artificial Sequence; identical to SEQ ID NO: 11550
  Description of Artificial Sequence: Synthetic polypeptide
  XENP018106 1G6_H1.9_L1_IgG1_PVA_/S267K Light Chain

SEQ ID NO: 11811 - protein, 107 aa, Artificial Sequence; identical to SEQ ID NO: 6247
  Description of Artificial Sequence: Synthetic polypeptide
  VL of XENP018106

SEQ ID NO: 11812 - protein, 11 aa, Artificial Sequence
  Description of Artificial Sequence: Synthetic peptide
  XENP018106 vlCDR1
RASQSVSNDVA

SEQ ID NO: 11813 - protein, 7 aa, Artificial Sequence
  Description of Artificial Sequence: Synthetic peptide
  XENP018106 vlCDR2
YASHRYT

SEQ ID NO: 11814 - protein, 9 aa, Artificial Sequence
  Description of Artificial Sequence: Synthetic peptide
  XENP018106 vlCDR3
QQDYSSPRT

SEQ ID NO: 11815 - protein, 451 aa, Artificial Sequence
  Description of Artificial Sequence: Synthetic polypeptide
  XENP018107 1G6_H1.10_L1_IgG1_PVA_/S267K Heavy Chain
EVQLVESGGGLVKPGGSLRLSCAASGFTFTNYWMNWVRQAPGKGLEWVGEIRLKSNNYATHYAEPVKGRFTISRDDSKSTVYLQMNSLKTEDTAVYYCTRYYGNYGGYFDVWGAGTLVTVSSASTKGPSVFPLAPSSKSTSGGTAALGCLVKDYFPEPVTVSWNSGALTSGVHTFPAVLQSSGLYSLSSVVTVPSSSLGTQTYICNVNHKPSNTKVDKKVEPKSCDKTHTCPPCPAPPVAGPSVFLFPPKPKDTLMISRTPEVTCVVVDVKHEDPEVKFNWYVDGVEVHNAKTKPREEQYNSTYRVVSVLTVLHQDWLNGKEYKCKVSNKALPAPIEKTISKAKGQPREPQVYTLPPSREEMTKNQVSLTCLVKGFYPSDIAVEWESNGQPENNYKTTPPVLDSDGSFFLYSKLTVDKSRWQQGNVFSCSVMHEALHNHYTQKSLSLSPGK

SEQ ID NO: 11816 - protein, 122 aa, Artificial Sequence; identical to SEQ ID NO: 6444
  Description of Artificial Sequence: Synthetic polypeptide
  VH of XENP018107

SEQ ID NO: 11817 - protein, 5 aa, Artificial Sequence
  Description of Artificial Sequence: Synthetic peptide
  XENP018107 vhCDR1
NYWMN

SEQ ID NO: 11818 - protein, 19 aa, Artificial Sequence
  Description of Artificial Sequence: Synthetic peptide
  XENP018107 vhCDR2
EIRLKSNNYATHYAEPVKG

SEQ ID NO: 11819 - protein, 11 aa, Artificial Sequence
  Description of Artificial Sequence: Synthetic peptide
  XENP018107 vhCDR3
YYGNYGGYFDV

SEQ ID NO: 11820 - protein, 214 aa, Artificial Sequence; identical to SEQ ID NO: 11550
  Description of Artificial Sequence: Synthetic polypeptide
  XENP018107 1G6_H1.10_L1_IgG1_PVA_/S267K Light Chain

SEQ ID NO: 11821 - protein, 107 aa, Artificial Sequence; identical to SEQ ID NO: 6247
  Description of Artificial Sequence: Synthetic polypeptide
  VL of XENP018107

SEQ ID NO: 11822 - protein, 11 aa, Artificial Sequence
  Description of Artificial Sequence: Synthetic peptide
  XENP018107 vlCDR1
RASQSVSNDVA

SEQ ID NO: 11823 - protein, 7 aa, Artificial Sequence
  Description of Artificial Sequence: Synthetic peptide
  XENP018107 vlCDR2
YASHRYT

SEQ ID NO: 11824 - protein, 9 aa, Artificial Sequence
  Description of Artificial Sequence: Synthetic peptide
  XENP018107 vlCDR3
QQDYSSPRT

SEQ ID NO: 11825 - protein, 451 aa, Artificial Sequence
  Description of Artificial Sequence: Synthetic polypeptide
  XENP018108 1G6_H1.11_L1_IgG1_PVA_/S267K Heavy Chain
EVQLVESGGGLVKPGGSLRLSCAASGFTFANYWMNWVRQAPGKGLEWVGEIRLKSNNYATHYAEPVKGRFTISRDDSKSTVYLQMNSLKTEDTAVYYCTRYYGNYGGYFDVWGAGTLVTVSSASTKGPSVFPLAPSSKSTSGGTAALGCLVKDYFPEPVTVSWNSGALTSGVHTFPAVLQSSGLYSLSSVVTVPSSSLGTQTYICNVNHKPSNTKVDKKVEPKSCDKTHTCPPCPAPPVAGPSVFLFPPKPKDTLMISRTPEVTCVVVDVKHEDPEVKFNWYVDGVEVHNAKTKPREEQYNSTYRVVSVLTVLHQDWLNGKEYKCKVSNKALPAPIEKTISKAKGQPREPQVYTLPPSREEMTKNQVSLTCLVKGFYPSDIAVEWESNGQPENNYKTTPPVLDSDGSFFLYSKLTVDKSRWQQGNVFSCSVMHEALHNHYTQKSLSLSPGK

SEQ ID NO: 11826 - protein, 122 aa, Artificial Sequence; identical to SEQ ID NO: 6453
  Description of Artificial Sequence: Synthetic polypeptide
  VH of XENP018108

SEQ ID NO: 11827 - protein, 5 aa, Artificial Sequence
  Description of Artificial Sequence: Synthetic peptide
  XENP018108 vhCDR1
NYWMN

SEQ ID NO: 11828 - protein, 19 aa, Artificial Sequence
  Description of Artificial Sequence: Synthetic peptide
  XENP018108 vhCDR2
EIRLKSNNYATHYAEPVKG

SEQ ID NO: 11829 - protein, 11 aa, Artificial Sequence
  Description of Artificial Sequence: Synthetic peptide
  XENP018108 vhCDR3
YYGNYGGYFDV

SEQ ID NO: 11830 - protein, 214 aa, Artificial Sequence; identical to SEQ ID NO: 11550
  Description of Artificial Sequence: Synthetic polypeptide
  XENP018108 1G6_H1.11_L1_IgG1_PVA_/S267K Light Chain

SEQ ID NO: 11831 - protein, 107 aa, Artificial Sequence; identical to SEQ ID NO: 6247
  Description of Artificial Sequence: Synthetic polypeptide
  VL of XENP018108

SEQ ID NO: 11832 - protein, 11 aa, Artificial Sequence
  Description of Artificial Sequence: Synthetic peptide
  XENP018108 vlCDR1
RASQSVSNDVA

SEQ ID NO: 11833 - protein, 7 aa, Artificial Sequence
  Description of Artificial Sequence: Synthetic peptide
  XENP018108 vlCDR2
YASHRYT

SEQ ID NO: 11834 - protein, 9 aa, Artificial Sequence
  Description of Artificial Sequence: Synthetic peptide
  XENP018108 vlCDR3
QQDYSSPRT

SEQ ID NO: 11835 - protein, 451 aa, Artificial Sequence
  Description of Artificial Sequence: Synthetic polypeptide
  XENP018109 1G6_H1.12_L1_IgG1_PVA_/S267K Heavy Chain
EVQLVESGGGLVKPGGSLRLSCAASGFTFQNYWMNWVRQAPGKGLEWVGEIRLKSNNYATHYAEPVKGRFTISRDDSKSTVYLQMNSLKTEDTAVYYCTRYYGNYGGYFDVWGAGTLVTVSSASTKGPSVFPLAPSSKSTSGGTAALGCLVKDYFPEPVTVSWNSGALTSGVHTFPAVLQSSGLYSLSSVVTVPSSSLGTQTYICNVNHKPSNTKVDKKVEPKSCDKTHTCPPCPAPPVAGPSVFLFPPKPKDTLMISRTPEVTCVVVDVKHEDPEVKFNWYVDGVEVHNAKTKPREEQYNSTYRVVSVLTVLHQDWLNGKEYKCKVSNKALPAPIEKTISKAKGQPREPQVYTLPPSREEMTKNQVSLTCLVKGFYPSDIAVEWESNGQPENNYKTTPPVLDSDGSFFLYSKLTVDKSRWQQGNVFSCSVMHEALHNHYTQKSLSLSPGK

SEQ ID NO: 11836 - protein, 122 aa, Artificial Sequence; identical to SEQ ID NO: 6462
  Description of Artificial Sequence: Synthetic polypeptide
  VH of XENP018109

SEQ ID NO: 11837 - protein, 5 aa, Artificial Sequence
  Description of Artificial Sequence: Synthetic peptide
  XENP018109 vhCDR1
NYWMN

SEQ ID NO: 11838 - protein, 19 aa, Artificial Sequence
  Description of Artificial Sequence: Synthetic peptide
  XENP018109 vhCDR2
EIRLKSNNYATHYAEPVKG

SEQ ID NO: 11839 - protein, 11 aa, Artificial Sequence
  Description of Artificial Sequence: Synthetic peptide
  XENP018109 vhCDR3
YYGNYGGYFDV

SEQ ID NO: 11840 - protein, 214 aa, Artificial Sequence; identical to SEQ ID NO: 11550
  Description of Artificial Sequence: Synthetic polypeptide
  XENP018109 1G6_H1.12_L1_IgG1_PVA_/S267K Light Chain

SEQ ID NO: 11841 - protein, 107 aa, Artificial Sequence; identical to SEQ ID NO: 6247
  Description of Artificial Sequence: Synthetic polypeptide
  VL of XENP018109

SEQ ID NO: 11842 - protein, 11 aa, Artificial Sequence
  Description of Artificial Sequence: Synthetic peptide
  XENP018109 vlCDR1
RASQSVSNDVA

SEQ ID NO: 11843 - protein, 7 aa, Artificial Sequence
  Description of Artificial Sequence: Synthetic peptide
  XENP018109 vlCDR2
YASHRYT

SEQ ID NO: 11844 - protein, 9 aa, Artificial Sequence
  Description of Artificial Sequence: Synthetic peptide
  XENP018109 vlCDR3
QQDYSSPRT

SEQ ID NO: 11845 - protein, 451 aa, Artificial Sequence
  Description of Artificial Sequence: Synthetic polypeptide
  XENP018110 1G6_H1.13_L1_IgG1_PVA_/S267K Heavy Chain
EVQLVESGGGLVKPGGSLRLSCAASGFTFGNYWMNWVRQAPGKGLEWVGEIRLKSNNYATHYAEPVKGRFTISRDDSKSTVYLQMNSLKTEDTAVYYCTRYYGNYGGYFDVWGAGTLVTVSSASTKGPSVFPLAPSSKSTSGGTAALGCLVKDYFPEPVTVSWNSGALTSGVHTFPAVLQSSGLYSLSSVVTVPSSSLGTQTYICNVNHKPSNTKVDKKVEPKSCDKTHTCPPCPAPPVAGPSVFLFPPKPKDTLMISRTPEVTCVVVDVKHEDPEVKFNWYVDGVEVHNAKTKPREEQYNSTYRVVSVLTVLHQDWLNGKEYKCKVSNKALPAPIEKTISKAKGQPREPQVYTLPPSREEMTKNQVSLTCLVKGFYPSDIAVEWESNGQPENNYKTTPPVLDSDGSFFLYSKLTVDKSRWQQGNVFSCSVMHEALHNHYTQKSLSLSPGK

SEQ ID NO: 11846 - protein, 122 aa, Artificial Sequence; identical to SEQ ID NO: 6471
  Description of Artificial Sequence: Synthetic polypeptide
  VH of XENP018110

SEQ ID NO: 11847 - protein, 5 aa, Artificial Sequence
  Description of Artificial Sequence: Synthetic peptide
  XENP018110 vhCDR1
NYWMN

SEQ ID NO: 11848 - protein, 19 aa, Artificial Sequence
  Description of Artificial Sequence: Synthetic peptide
  XENP018110 vhCDR2
EIRLKSNNYATHYAEPVKG

SEQ ID NO: 11849 - protein, 11 aa, Artificial Sequence
  Description of Artificial Sequence: Synthetic peptide
  XENP018110 vhCDR3
YYGNYGGYFDV

SEQ ID NO: 11850 - protein, 214 aa, Artificial Sequence; identical to SEQ ID NO: 11550
  Description of Artificial Sequence: Synthetic polypeptide
  XENP018110 1G6_H1.13_L1_IgG1_PVA_/S267K Light Chain

SEQ ID NO: 11851 - protein, 107 aa, Artificial Sequence; identical to SEQ ID NO: 6247
  Description of Artificial Sequence: Synthetic polypeptide
  VL of XENP018110

SEQ ID NO: 11852 - protein, 11 aa, Artificial Sequence
  Description of Artificial Sequence: Synthetic peptide
  XENP018110 vlCDR1
RASQSVSNDVA

SEQ ID NO: 11853 - protein, 7 aa, Artificial Sequence
  Description of Artificial Sequence: Synthetic peptide
  XENP018110 vlCDR2
YASHRYT

SEQ ID NO: 11854 - protein, 9 aa, Artificial Sequence
  Description of Artificial Sequence: Synthetic peptide
  XENP018110 vlCDR3
QQDYSSPRT

SEQ ID NO: 11855 - protein, 451 aa, Artificial Sequence
  Description of Artificial Sequence: Synthetic polypeptide
  XENP018111 1G6_H1.14_L1_IgG1_PVA_/S267K Heavy Chain
EVQLVESGGGLVKPGGSLRLSCAASGFTFVNYWMNWVRQAPGKGLEWVGEIRLKSNNYATHYAEPVKGRFTISRDDSKSTVYLQMNSLKTEDTAVYYCTRYYGNYGGYFDVWGAGTLVTVSSASTKGPSVFPLAPSSKSTSGGTAALGCLVKDYFPEPVTVSWNSGALTSGVHTFPAVLQSSGLYSLSSVVTVPSSSLGTQTYICNVNHKPSNTKVDKKVEPKSCDKTHTCPPCPAPPVAGPSVFLFPPKPKDTLMISRTPEVTCVVVDVKHEDPEVKFNWYVDGVEVHNAKTKPREEQYNSTYRVVSVLTVLHQDWLNGKEYKCKVSNKALPAPIEKTISKAKGQPREPQVYTLPPSREEMTKNQVSLTCLVKGFYPSDIAVEWESNGQPENNYKTTPPVLDSDGSFFLYSKLTVDKSRWQQGNVFSCSVMHEALHNHYTQKSLSLSPGK

SEQ ID NO: 11856 - protein, 122 aa, Artificial Sequence; identical to SEQ ID NO: 6480
  Description of Artificial Sequence: Synthetic polypeptide
  VH of XENP018111

SEQ ID NO: 11857 - protein, 5 aa, Artificial Sequence
  Description of Artificial Sequence: Synthetic peptide
  XENP018111 vhCDR1
NYWMN

SEQ ID NO: 11858 - protein, 19 aa, Artificial Sequence
  Description of Artificial Sequence: Synthetic peptide
  XENP018111 vhCDR2
EIRLKSNNYATHYAEPVKG

SEQ ID NO: 11859 - protein, 11 aa, Artificial Sequence
  Description of Artificial Sequence: Synthetic peptide
  XENP018111 vhCDR3
YYGNYGGYFDV

SEQ ID NO: 11860 - protein, 214 aa, Artificial Sequence; identical to SEQ ID NO: 11550
  Description of Artificial Sequence: Synthetic polypeptide
  XENP018111 1G6_H1.14_L1_IgG1_PVA_/S267K Light Chain

SEQ ID NO: 11861 - protein, 107 aa, Artificial Sequence; identical to SEQ ID NO: 6247
  Description of Artificial Sequence: Synthetic polypeptide
  VL of XENP018111

SEQ ID NO: 11862 - protein, 11 aa, Artificial Sequence
  Description of Artificial Sequence: Synthetic peptide
  XENP018111 vlCDR1
RASQSVSNDVA

SEQ ID NO: 11863 - protein, 7 aa, Artificial Sequence
  Description of Artificial Sequence: Synthetic peptide
  XENP018111 vlCDR2
YASHRYT

SEQ ID NO: 11864 - protein, 9 aa, Artificial Sequence
  Description of Artificial Sequence: Synthetic peptide
  XENP018111 vlCDR3
QQDYSSPRT

SEQ ID NO: 11865 - protein, 451 aa, Artificial Sequence
  Description of Artificial Sequence: Synthetic polypeptide
  XENP018112 1G6_H1.15_L1_IgG1_PVA_/S267K Heavy Chain
EVQLVESGGGLVKPGGSLRLSCAASGFTFHNYWMNWVRQAPGKGLEWVGEIRLKSNNYATHYAEPVKGRFTISRDDSKSTVYLQMNSLKTEDTAVYYCTRYYGNYGGYFDVWGAGTLVTVSSASTKGPSVFPLAPSSKSTSGGTAALGCLVKDYFPEPVTVSWNSGALTSGVHTFPAVLQSSGLYSLSSVVTVPSSSLGTQTYICNVNHKPSNTKVDKKVEPKSCDKTHTCPPCPAPPVAGPSVFLFPPKPKDTLMISRTPEVTCVVVDVKHEDPEVKFNWYVDGVEVHNAKTKPREEQYNSTYRVVSVLTVLHQDWLNGKEYKCKVSNKALPAPIEKTISKAKGQPREPQVYTLPPSREEMTKNQVSLTCLVKGFYPSDIAVEWESNGQPENNYKTTPPVLDSDGSFFLYSKLTVDKSRWQQGNVFSCSVMHEALHNHYTQKSLSLSPGK

SEQ ID NO: 11866 - protein, 122 aa, Artificial Sequence; identical to SEQ ID NO: 6489
  Description of Artificial Sequence: Synthetic polypeptide
  VH of XENP018112

SEQ ID NO: 11867 - protein, 5 aa, Artificial Sequence
  Description of Artificial Sequence: Synthetic peptide
  XENP018112 vhCDR1
NYWMN

SEQ ID NO: 11868 - protein, 19 aa, Artificial Sequence
  Description of Artificial Sequence: Synthetic peptide
  XENP018112 vhCDR2
EIRLKSNNYATHYAEPVKG

SEQ ID NO: 11869 - protein, 11 aa, Artificial Sequence
  Description of Artificial Sequence: Synthetic peptide
  XENP018112 vhCDR3
YYGNYGGYFDV

SEQ ID NO: 11870 - protein, 214 aa, Artificial Sequence; identical to SEQ ID NO: 11550
  Description of Artificial Sequence: Synthetic polypeptide
  XENP018112 1G6_H1.15_L1_IgG1_PVA_/S267K Light Chain

SEQ ID NO: 11871 - protein, 107 aa, Artificial Sequence; identical to SEQ ID NO: 6247
  Description of Artificial Sequence: Synthetic polypeptide
  VL of XENP018112

SEQ ID NO: 11872 - protein, 11 aa, Artificial Sequence
  Description of Artificial Sequence: Synthetic peptide
  XENP018112 vlCDR1
RASQSVSNDVA

SEQ ID NO: 11873 - protein, 7 aa, Artificial Sequence
  Description of Artificial Sequence: Synthetic peptide
  XENP018112 vlCDR2
YASHRYT

SEQ ID NO: 11874 - protein, 9 aa, Artificial Sequence
  Description of Artificial Sequence: Synthetic peptide
  XENP018112 vlCDR3
QQDYSSPRT

SEQ ID NO: 11875 - protein, 451 aa, Artificial Sequence
  Description of Artificial Sequence: Synthetic polypeptide
  XENP018113 1G6_H1.16_L1_IgG1_PVA_/S267K Heavy Chain
EVQLVESGGGLVKPGGSLRLSCAASGFTFDNYWMNWVRQAPGKGLEWVGEIRLKSNNYATHYAEPVKGRFTISRDDSKSTVYLQMNSLKTEDTAVYYCTRYYGNYGGYFDVWGAGTLVTVSSASTKGPSVFPLAPSSKSTSGGTAALGCLVKDYFPEPVTVSWNSGALTSGVHTFPAVLQSSGLYSLSSVVTVPSSSLGTQTYICNVNHKPSNTKVDKKVEPKSCDKTHTCPPCPAPPVAGPSVFLFPPKPKDTLMISRTPEVTCVVVDVKHEDPEVKFNWYVDGVEVHNAKTKPREEQYNSTYRVVSVLTVLHQDWLNGKEYKCKVSNKALPAPIEKTISKAKGQPREPQVYTLPPSREEMTKNQVSLTCLVKGFYPSDIAVEWESNGQPENNYKTTPPVLDSDGSFFLYSKLTVDKSRWQQGNVFSCSVMHEALHNHYTQKSLSLSPGK

SEQ ID NO: 11876 - protein, 122 aa, Artificial Sequence; identical to SEQ ID NO: 6498
  Description of Artificial Sequence: Synthetic polypeptide
  VH of XENP018113

SEQ ID NO: 11877 - protein, 5 aa, Artificial Sequence
  Description of Artificial Sequence: Synthetic peptide
  XENP018113 vhCDR1
NYWMN

SEQ ID NO: 11878 - protein, 19 aa, Artificial Sequence
  Description of Artificial Sequence: Synthetic peptide
  XENP018113 vhCDR2
EIRLKSNNYATHYAEPVKG

SEQ ID NO: 11879 - protein, 11 aa, Artificial Sequence
  Description of Artificial Sequence: Synthetic peptide
  XENP018113 vhCDR3
YYGNYGGYFDV

SEQ ID NO: 11880 - protein, 214 aa, Artificial Sequence; identical to SEQ ID NO: 11550
  Description of Artificial Sequence: Synthetic polypeptide
  XENP018113 1G6_H1.16_L1_IgG1_PVA_/S267K Light Chain

SEQ ID NO: 11881 - protein, 107 aa, Artificial Sequence; identical to SEQ ID NO: 6247
  Description of Artificial Sequence: Synthetic polypeptide
  VL of XENP018113

SEQ ID NO: 11882 - protein, 11 aa, Artificial Sequence
  Description of Artificial Sequence: Synthetic peptide
  XENP018113 vlCDR1
RASQSVSNDVA

SEQ ID NO: 11883 - protein, 7 aa, Artificial Sequence
  Description of Artificial Sequence: Synthetic peptide
  XENP018113 vlCDR2
YASHRYT

SEQ ID NO: 11884 - protein, 9 aa, Artificial Sequence
  Description of Artificial Sequence: Synthetic peptide
  XENP018113 vlCDR3
QQDYSSPRT

SEQ ID NO: 11885 - protein, 451 aa, Artificial Sequence
  Description of Artificial Sequence: Synthetic polypeptide
  XENP018114 1G6_H1.17_L1_IgG1_PVA_/S267K Heavy Chain
EVQLVESGGGLVKPGGSLRLSCAASGFTFKNYWMNWVRQAPGKGLEWVGEIRLKSNNYATHYAEPVKGRFTISRDDSKSTVYLQMNSLKTEDTAVYYCTRYYGNYGGYFDVWGAGTLVTVSSASTKGPSVFPLAPSSKSTSGGTAALGCLVKDYFPEPVTVSWNSGALTSGVHTFPAVLQSSGLYSLSSVVTVPSSSLGTQTYICNVNHKPSNTKVDKKVEPKSCDKTHTCPPCPAPPVAGPSVFLFPPKPKDTLMISRTPEVTCVVVDVKHEDPEVKFNWYVDGVEVHNAKTKPREEQYNSTYRVVSVLTVLHQDWLNGKEYKCKVSNKALPAPIEKTISKAKGQPREPQVYTLPPSREEMTKNQVSLTCLVKGFYPSDIAVEWESNGQPENNYKTTPPVLDSDGSFFLYSKLTVDKSRWQQGNVFSCSVMHEALHNHYTQKSLSLSPGK

SEQ ID NO: 11886 - protein, 122 aa, Artificial Sequence; identical to SEQ ID NO: 6507
  Description of Artificial Sequence: Synthetic polypeptide
  VH of XENP018114

SEQ ID NO: 11887 - protein, 5 aa, Artificial Sequence
  Description of Artificial Sequence: Synthetic peptide
  XENP018114 vhCDR1
NYWMN

SEQ ID NO: 11888 - protein, 19 aa, Artificial Sequence
  Description of Artificial Sequence: Synthetic peptide
  XENP018114 vhCDR2
EIRLKSNNYATHYAEPVKG

SEQ ID NO: 11889 - protein, 11 aa, Artificial Sequence
  Description of Artificial Sequence: Synthetic peptide
  XENP018114 vhCDR3
YYGNYGGYFDV

SEQ ID NO: 11890 - protein, 214 aa, Artificial Sequence; identical to SEQ ID NO: 11550
  Description of Artificial Sequence: Synthetic polypeptide
  XENP018114 1G6_H1.17_L1_IgG1_PVA_/S267K Light Chain

SEQ ID NO: 11891 - protein, 107 aa, Artificial Sequence; identical to SEQ ID NO: 6247
  Description of Artificial Sequence: Synthetic polypeptide
  VL of XENP018114

SEQ ID NO: 11892 - protein, 11 aa, Artificial Sequence
  Description of Artificial Sequence: Synthetic peptide
  XENP018114 vlCDR1
RASQSVSNDVA

SEQ ID NO: 11893 - protein, 7 aa, Artificial Sequence
  Description of Artificial Sequence: Synthetic peptide
  XENP018114 vlCDR2
YASHRYT

SEQ ID NO: 11894 - protein, 9 aa, Artificial Sequence
  Description of Artificial Sequence: Synthetic peptide
  XENP018114 vlCDR3
QQDYSSPRT

SEQ ID NO: 11895 - protein, 451 aa, Artificial Sequence
  Description of Artificial Sequence: Synthetic polypeptide
  XENP018115 1G6_H1.18_L1_IgG1_PVA_/S267K Heavy Chain
EVQLVESGGGLVKPGGSLRLSCAASGFTFYNYWMNWVRQAPGKGLEWVGEIRLKSNNYATHYAEPVKGRFTISRDDSKSTVYLQMNSLKTEDTAVYYCTRYYGNYGGYFDVWGAGTLVTVSSASTKGPSVFPLAPSSKSTSGGTAALGCLVKDYFPEPVTVSWNSGALTSGVHTFPAVLQSSGLYSLSSVVTVPSSSLGTQTYICNVNHKPSNTKVDKKVEPKSCDKTHTCPPCPAPPVAGPSVFLFPPKPKDTLMISRTPEVTCVVVDVKHEDPEVKFNWYVDGVEVHNAKTKPREEQYNSTYRVVSVLTVLHQDWLNGKEYKCKVSNKALPAPIEKTISKAKGQPREPQVYTLPPSREEMTKNQVSLTCLVKGFYPSDIAVEWESNGQPENNYKTTPPVLDSDGSFFLYSKLTVDKSRWQQGNVFSCSVMHEALHNHYTQKSLSLSPGK

SEQ ID NO: 11896 - protein, 122 aa, Artificial Sequence; identical to SEQ ID NO: 6516
  Description of Artificial Sequence: Synthetic polypeptide
  VH of XENP018115

SEQ ID NO: 11897 - protein, 5 aa, Artificial Sequence
  Description of Artificial Sequence: Synthetic peptide
  XENP018115 vhCDR1
NYWMN

SEQ ID NO: 11898 - protein, 19 aa, Artificial Sequence
  Description of Artificial Sequence: Synthetic peptide
  XENP018115 vhCDR2
EIRLKSNNYATHYAEPVKG

SEQ ID NO: 11899 - protein, 11 aa, Artificial Sequence
  Description of Artificial Sequence: Synthetic peptide
  XENP018115 vhCDR3
YYGNYGGYFDV

SEQ ID NO: 11900 - protein, 214 aa, Artificial Sequence; identical to SEQ ID NO: 11550
  Description of Artificial Sequence: Synthetic polypeptide
  XENP018115 1G6_H1.18_L1_IgG1_PVA_/S267K Light Chain

SEQ ID NO: 11901 - protein, 107 aa, Artificial Sequence; identical to SEQ ID NO: 6247
  Description of Artificial Sequence: Synthetic polypeptide
  VL of XENP018115

SEQ ID NO: 11902 - protein, 11 aa, Artificial Sequence
  Description of Artificial Sequence: Synthetic peptide
  XENP018115 vlCDR1
RASQSVSNDVA

SEQ ID NO: 11903 - protein, 7 aa, Artificial Sequence
  Description of Artificial Sequence: Synthetic peptide
  XENP018115 vlCDR2
YASHRYT

SEQ ID NO: 11904 - protein, 9 aa, Artificial Sequence
  Description of Artificial Sequence: Synthetic peptide
  XENP018115 vlCDR3
QQDYSSPRT

SEQ ID NO: 11905 - protein, 451 aa, Artificial Sequence
  Description of Artificial Sequence: Synthetic polypeptide
  XENP018116 1G6_H1.19_L1_IgG1_PVA_/S267K Heavy Chain
EVQLVESGGGLVKPGGSLRLSCAASGFTFSDYWMNWVRQAPGKGLEWVGEIRLKSNNYATHYAEPVKGRFTISRDDSKSTVYLQMNSLKTEDTAVYYCTRYYGNYGGYFDVWGAGTLVTVSSASTKGPSVFPLAPSSKSTSGGTAALGCLVKDYFPEPVTVSWNSGALTSGVHTFPAVLQSSGLYSLSSVVTVPSSSLGTQTYICNVNHKPSNTKVDKKVEPKSCDKTHTCPPCPAPPVAGPSVFLFPPKPKDTLMISRTPEVTCVVVDVKHEDPEVKFNWYVDGVEVHNAKTKPREEQYNSTYRVVSVLTVLHQDWLNGKEYKCKVSNKALPAPIEKTISKAKGQPREPQVYTLPPSREEMTKNQVSLTCLVKGFYPSDIAVEWESNGQPENNYKTTPPVLDSDGSFFLYSKLTVDKSRWQQGNVFSCSVMHEALHNHYTQKSLSLSPGK

SEQ ID NO: 11906 - protein, 122 aa, Artificial Sequence; identical to SEQ ID NO: 6525
  Description of Artificial Sequence: Synthetic polypeptide
  VH of XENP018116

SEQ ID NO: 11907 - protein, 5 aa, Artificial Sequence
  Description of Artificial Sequence: Synthetic peptide
  XENP018116 vhCDR1
DYWMN

SEQ ID NO: 11908 - protein, 19 aa, Artificial Sequence
  Description of Artificial Sequence: Synthetic peptide
  XENP018116 vhCDR2
EIRLKSNNYATHYAEPVKG

SEQ ID NO: 11909 - protein, 11 aa, Artificial Sequence
  Description of Artificial Sequence: Synthetic peptide
  XENP018116 vhCDR3
YYGNYGGYFDV

SEQ ID NO: 11910 - protein, 214 aa, Artificial Sequence; identical to SEQ ID NO: 11550
  Description of Artificial Sequence: Synthetic polypeptide
  XENP018116 1G6_H1.19_L1_IgG1_PVA_/S267K Light Chain

SEQ ID NO: 11911 - protein, 107 aa, Artificial Sequence; identical to SEQ ID NO: 6247
  Description of Artificial Sequence: Synthetic polypeptide
  VL of XENP018116

SEQ ID NO: 11912 - protein, 11 aa, Artificial Sequence
  Description of Artificial Sequence: Synthetic peptide
  XENP018116 vlCDR1
RASQSVSNDVA

SEQ ID NO: 11913 - protein, 7 aa, Artificial Sequence
  Description of Artificial Sequence: Synthetic peptide
  XENP018116 vlCDR2
YASHRYT

SEQ ID NO: 11914 - protein, 9 aa, Artificial Sequence
  Description of Artificial Sequence: Synthetic peptide
  XENP018116 vlCDR3
QQDYSSPRT

SEQ ID NO: 11915 - protein, 451 aa, Artificial Sequence
  Description of Artificial Sequence: Synthetic polypeptide
  XENP018117 1G6_H1.20_L1_IgG1_PVA_/S267K Heavy Chain
EVQLVESGGGLVKPGGSLRLSCAASGFTFSHYWMNWVRQAPGKGLEWVGEIRLKSNNYATHYAEPVKGRFTISRDDSKSTVYLQMNSLKTEDTAVYYCTRYYGNYGGYFDVWGAGTLVTVSSASTKGPSVFPLAPSSKSTSGGTAALGCLVKDYFPEPVTVSWNSGALTSGVHTFPAVLQSSGLYSLSSVVTVPSSSLGTQTYICNVNHKPSNTKVDKKVEPKSCDKTHTCPPCPAPPVAGPSVFLFPPKPKDTLMISRTPEVTCVVVDVKHEDPEVKFNWYVDGVEVHNAKTKPREEQYNSTYRVVSVLTVLHQDWLNGKEYKCKVSNKALPAPIEKTISKAKGQPREPQVYTLPPSREEMTKNQVSLTCLVKGFYPSDIAVEWESNGQPENNYKTTPPVLDSDGSFFLYSKLTVDKSRWQQGNVFSCSVMHEALHNHYTQKSLSLSPGK

SEQ ID NO: 11916 - protein, 122 aa, Artificial Sequence; identical to SEQ ID NO: 6534
  Description of Artificial Sequence: Synthetic polypeptide
  VH of XENP018117

SEQ ID NO: 11917 - protein, 5 aa, Artificial Sequence
  Description of Artificial Sequence: Synthetic peptide
  XENP018117 vhCDR1
HYWMN

SEQ ID NO: 11918 - protein, 19 aa, Artificial Sequence
  Description of Artificial Sequence: Synthetic peptide
  XENP018117 vhCDR2
EIRLKSNNYATHYAEPVKG

SEQ ID NO: 11919 - protein, 11 aa, Artificial Sequence
  Description of Artificial Sequence: Synthetic peptide
  XENP018117 vhCDR3
YYGNYGGYFDV

SEQ ID NO: 11920 - protein, 214 aa, Artificial Sequence; identical to SEQ ID NO: 11550
  Description of Artificial Sequence: Synthetic polypeptide
  XENP018117 1G6_H1.20_L1_IgG1_PVA_/S267K Light Chain

SEQ ID NO: 11921 - protein, 107 aa, Artificial Sequence; identical to SEQ ID NO: 6247
  Description of Artificial Sequence: Synthetic polypeptide
  VL of XENP018117

SEQ ID NO: 11922 - protein, 11 aa, Artificial Sequence
  Description of Artificial Sequence: Synthetic peptide
  XENP018117 vlCDR1
RASQSVSNDVA

SEQ ID NO: 11923 - protein, 7 aa, Artificial Sequence
  Description of Artificial Sequence: Synthetic peptide
  XENP018117 vlCDR2
YASHRYT

SEQ ID NO: 11924 - protein, 9 aa, Artificial Sequence
  Description of Artificial Sequence: Synthetic peptide
  XENP018117 vlCDR3
QQDYSSPRT

SEQ ID NO: 11925 - protein, 451 aa, Artificial Sequence
  Description of Artificial Sequence: Synthetic polypeptide
  XENP018118 1G6_H1.21_L1_IgG1_PVA_/S267K Heavy Chain
EVQLVESGGGLVKPGGSLRLSCAASGFTFSEYWMNWVRQAPGKGLEWVGEIRLKSNNYATHYAEPVKGRFTISRDDSKSTVYLQMNSLKTEDTAVYYCTRYYGNYGGYFDVWGAGTLVTVSSASTKGPSVFPLAPSSKSTSGGTAALGCLVKDYFPEPVTVSWNSGALTSGVHTFPAVLQSSGLYSLSSVVTVPSSSLGTQTYICNVNHKPSNTKVDKKVEPKSCDKTHTCPPCPAPPVAGPSVFLFPPKPKDTLMISRTPEVTCVVVDVKHEDPEVKFNWYVDGVEVHNAKTKPREEQYNSTYRVVSVLTVLHQDWLNGKEYKCKVSNKALPAPIEKTISKAKGQPREPQVYTLPPSREEMTKNQVSLTCLVKGFYPSDIAVEWESNGQPENNYKTTPPVLDSDGSFFLYSKLTVDKSRWQQGNVFSCSVMHEALHNHYTQKSLSLSPGK

SEQ ID NO: 11926 - protein, 122 aa, Artificial Sequence; identical to SEQ ID NO: 6543
  Description of Artificial Sequence: Synthetic polypeptide
  VH of XENP018118

SEQ ID NO: 11927 - protein, 5 aa, Artificial Sequence
  Description of Artificial Sequence: Synthetic peptide
  XENP018118 vhCDR1
EYWMN

SEQ ID NO: 11928 - protein, 19 aa, Artificial Sequence
  Description of Artificial Sequence: Synthetic peptide
  XENP018118 vhCDR2
EIRLKSNNYATHYAEPVKG

SEQ ID NO: 11929 - protein, 11 aa, Artificial Sequence
  Description of Artificial Sequence: Synthetic peptide
  XENP018118 vhCDR3
YYGNYGGYFDV

SEQ ID NO: 11930 - protein, 214 aa, Artificial Sequence; identical to SEQ ID NO: 11550
  Description of Artificial Sequence: Synthetic polypeptide
  XENP018118 1G6_H1.21_L1_IgG1_PVA_/S267K Light Chain

SEQ ID NO: 11931 - protein, 107 aa, Artificial Sequence; identical to SEQ ID NO: 6247
  Description of Artificial Sequence: Synthetic polypeptide
  VL of XENP018118

SEQ ID NO: 11932 - protein, 11 aa, Artificial Sequence
  Description of Artificial Sequence: Synthetic peptide
  XENP018118 vlCDR1
RASQSVSNDVA

SEQ ID NO: 11933 - protein, 7 aa, Artificial Sequence
  Description of Artificial Sequence: Synthetic peptide
  XENP018118 vlCDR2
YASHRYT

SEQ ID NO: 11934 - protein, 9 aa, Artificial Sequence
  Description of Artificial Sequence: Synthetic peptide
  XENP018118 vlCDR3
QQDYSSPRT

SEQ ID NO: 11935 - protein, 451 aa, Artificial Sequence
  Description of Artificial Sequence: Synthetic polypeptide
  XENP018119 1G6_H1.22_L1_IgG1_PVA_/S267K Heavy Chain
EVQLVESGGGLVKPGGSLRLSCAASGFTFSSYWMNWVRQAPGKGLEWVGEIRLKSNNYATHYAEPVKGRFTISRDDSKSTVYLQMNSLKTEDTAVYYCTRYYGNYGGYFDVWGAGTLVTVSSASTKGPSVFPLAPSSKSTSGGTAALGCLVKDYFPEPVTVSWNSGALTSGVHTFPAVLQSSGLYSLSSVVTVPSSSLGTQTYICNVNHKPSNTKVDKKVEPKSCDKTHTCPPCPAPPVAGPSVFLFPPKPKDTLMISRTPEVTCVVVDVKHEDPEVKFNWYVDGVEVHNAKTKPREEQYNSTYRVVSVLTVLHQDWLNGKEYKCKVSNKALPAPIEKTISKAKGQPREPQVYTLPPSREEMTKNQVSLTCLVKGFYPSDIAVEWESNGQPENNYKTTPPVLDSDGSFFLYSKLTVDKSRWQQGNVFSCSVMHEALHNHYTQKSLSLSPGK

SEQ ID NO: 11936 - protein, 122 aa, Artificial Sequence; identical to SEQ ID NO: 6552
  Description of Artificial Sequence: Synthetic polypeptide
  VH of XENP018119

SEQ ID NO: 11937 - protein, 5 aa, Artificial Sequence
  Description of Artificial Sequence: Synthetic peptide
  XENP018119 vhCDR1
SYWMN

SEQ ID NO: 11938 - protein, 19 aa, Artificial Sequence
  Description of Artificial Sequence: Synthetic peptide
  XENP018119 vhCDR2
EIRLKSNNYATHYAEPVKG

SEQ ID NO: 11939 - protein, 11 aa, Artificial Sequence
  Description of Artificial Sequence: Synthetic peptide
  XENP018119 vhCDR3
YYGNYGGYFDV

SEQ ID NO: 11940 - protein, 214 aa, Artificial Sequence; identical to SEQ ID NO: 11550
  Description of Artificial Sequence: Synthetic polypeptide
  XENP018119 1G6_H1.22_L1_IgG1_PVA_/S267K Light Chain

SEQ ID NO: 11941 - protein, 107 aa, Artificial Sequence; identical to SEQ ID NO: 6247
  Description of Artificial Sequence: Synthetic polypeptide
  VL of XENP018119

SEQ ID NO: 11942 - protein, 11 aa, Artificial Sequence
  Description of Artificial Sequence: Synthetic peptide
  XENP018119 vlCDR1
RASQSVSNDVA

SEQ ID NO: 11943 - protein, 7 aa, Artificial Sequence
  Description of Artificial Sequence: Synthetic peptide
  XENP018119 vlCDR2
YASHRYT

SEQ ID NO: 11944 - protein, 9 aa, Artificial Sequence
  Description of Artificial Sequence: Synthetic peptide
  XENP018119 vlCDR3
QQDYSSPRT

SEQ ID NO: 11945 - protein, 451 aa, Artificial Sequence
  Description of Artificial Sequence: Synthetic polypeptide
  XENP018120 1G6_H1.23_L1_IgG1_PVA_/S267K Heavy Chain
EVQLVESGGGLVKPGGSLRLSCAASGFTFSRYWMNWVRQAPGKGLEWVGEIRLKSNNYATHYAEPVKGRFTISRDDSKSTVYLQMNSLKTEDTAVYYCTRYYGNYGGYFDVWGAGTLVTVSSASTKGPSVFPLAPSSKSTSGGTAALGCLVKDYFPEPVTVSWNSGALTSGVHTFPAVLQSSGLYSLSSVVTVPSSSLGTQTYICNVNHKPSNTKVDKKVEPKSCDKTHTCPPCPAPPVAGPSVFLFPPKPKDTLMISRTPEVTCVVVDVKHEDPEVKFNWYVDGVEVHNAKTKPREEQYNSTYRVVSVLTVLHQDWLNGKEYKCKVSNKALPAPIEKTISKAKGQPREPQVYTLPPSREEMTKNQVSLTCLVKGFYPSDIAVEWESNGQPENNYKTTPPVLDSDGSFFLYSKLTVDKSRWQQGNVFSCSVMHEALHNHYTQKSLSLSPGK

SEQ ID NO: 11946 - protein, 122 aa, Artificial Sequence; identical to SEQ ID NO: 6561
  Description of Artificial Sequence: Synthetic polypeptide
  VH of XENP018120

SEQ ID NO: 11947 - protein, 5 aa, Artificial Sequence
  Description of Artificial Sequence: Synthetic peptide
  XENP018120 vhCDR1
RYWMN

SEQ ID NO: 11948 - protein, 19 aa, Artificial Sequence
  Description of Artificial Sequence: Synthetic peptide
  XENP018120 vhCDR2
EIRLKSNNYATHYAEPVKG

SEQ ID NO: 11949 - protein, 11 aa, Artificial Sequence
  Description of Artificial Sequence: Synthetic peptide
  XENP018120 vhCDR3
YYGNYGGYFDV

SEQ ID NO: 11950 - protein, 214 aa, Artificial Sequence; identical to SEQ ID NO: 11550
  Description of Artificial Sequence: Synthetic polypeptide
  XENP018120 1G6_H1.23_L1_IgG1_PVA_/S267K Light Chain

SEQ ID NO: 11951 - protein, 107 aa, Artificial Sequence; identical to SEQ ID NO: 6247
  Description of Artificial Sequence: Synthetic polypeptide
  VL of XENP018120

SEQ ID NO: 11952 - protein, 11 aa, Artificial Sequence
  Description of Artificial Sequence: Synthetic peptide
  XENP018120 vlCDR1
RASQSVSNDVA

SEQ ID NO: 11953 - protein, 7 aa, Artificial Sequence
  Description of Artificial Sequence: Synthetic peptide
  XENP018120 vlCDR2
YASHRYT

SEQ ID NO: 11954 - protein, 9 aa, Artificial Sequence
  Description of Artificial Sequence: Synthetic peptide
  XENP018120 vlCDR3
QQDYSSPRT

SEQ ID NO: 11955 - protein, 451 aa, Artificial Sequence
  Description of Artificial Sequence: Synthetic polypeptide
  XENP018121 1G6_H1.24_L1_IgG1_PVA_/S267K Heavy Chain
EVQLVESGGGLVKPGGSLRLSCAASGFTFSLYWMNWVRQAPGKGLEWVGEIRLKSNNYATHYAEPVKGRFTISRDDSKSTVYLQMNSLKTEDTAVYYCTRYYGNYGGYFDVWGAGTLVTVSSASTKGPSVFPLAPSSKSTSGGTAALGCLVKDYFPEPVTVSWNSGALTSGVHTFPAVLQSSGLYSLSSVVTVPSSSLGTQTYICNVNHKPSNTKVDKKVEPKSCDKTHTCPPCPAPPVAGPSVFLFPPKPKDTLMISRTPEVTCVVVDVKHEDPEVKFNWYVDGVEVHNAKTKPREEQYNSTYRVVSVLTVLHQDWLNGKEYKCKVSNKALPAPIEKTISKAKGQPREPQVYTLPPSREEMTKNQVSLTCLVKGFYPSDIAVEWESNGQPENNYKTTPPVLDSDGSFFLYSKLTVDKSRWQQGNVFSCSVMHEALHNHYTQKSLSLSPGK

SEQ ID NO: 11956 - protein, 122 aa, Artificial Sequence; identical to SEQ ID NO: 6570
  Description of Artificial Sequence: Synthetic polypeptide
  VH of XENP018121

SEQ ID NO: 11957 - protein, 5 aa, Artificial Sequence
  Description of Artificial Sequence: Synthetic peptide
  XENP018121 vhCDR1
LYWMN

SEQ ID NO: 11958 - protein, 19 aa, Artificial Sequence
  Description of Artificial Sequence: Synthetic peptide
  XENP018121 vhCDR2
EIRLKSNNYATHYAEPVKG

SEQ ID NO: 11959 - protein, 11 aa, Artificial Sequence
  Description of Artificial Sequence: Synthetic peptide
  XENP018121 vhCDR3
YYGNYGGYFDV

SEQ ID NO: 11960 - protein, 214 aa, Artificial Sequence; identical to SEQ ID NO: 11550
  Description of Artificial Sequence: Synthetic polypeptide
  XENP018121 1G6_H1.24_L1_IgG1_PVA_/S267K Light Chain

SEQ ID NO: 11961 - protein, 107 aa, Artificial Sequence; identical to SEQ ID NO: 6247
  Description of Artificial Sequence: Synthetic polypeptide
  VL of XENP018121

SEQ ID NO: 11962 - protein, 11 aa, Artificial Sequence
  Description of Artificial Sequence: Synthetic peptide
  XENP018121 vlCDR1
RASQSVSNDVA

SEQ ID NO: 11963 - protein, 7 aa, Artificial Sequence
  Description of Artificial Sequence: Synthetic peptide
  XENP018121 vlCDR2
YASHRYT

SEQ ID NO: 11964 - protein, 9 aa, Artificial Sequence
  Description of Artificial Sequence: Synthetic peptide
  XENP018121 vlCDR3
QQDYSSPRT

SEQ ID NO: 11965 - protein, 451 aa, Artificial Sequence
  Description of Artificial Sequence: Synthetic polypeptide
  XENP018122 1G6_H1.25_L1_IgG1_PVA_/S267K Heavy Chain
EVQLVESGGGLVKPGGSLRLSCAASGFTFSTYWMNWVRQAPGKGLEWVGEIRLKSNNYATHYAEPVKGRFTISRDDSKSTVYLQMNSLKTEDTAVYYCTRYYGNYGGYFDVWGAGTLVTVSSASTKGPSVFPLAPSSKSTSGGTAALGCLVKDYFPEPVTVSWNSGALTSGVHTFPAVLQSSGLYSLSSVVTVPSSSLGTQTYICNVNHKPSNTKVDKKVEPKSCDKTHTCPPCPAPPVAGPSVFLFPPKPKDTLMISRTPEVTCVVVDVKHEDPEVKFNWYVDGVEVHNAKTKPREEQYNSTYRVVSVLTVLHQDWLNGKEYKCKVSNKALPAPIEKTISKAKGQPREPQVYTLPPSREEMTKNQVSLTCLVKGFYPSDIAVEWESNGQPENNYKTTPPVLDSDGSFFLYSKLTVDKSRWQQGNVFSCSVMHEALHNHYTQKSLSLSPGK

SEQ ID NO: 11966 - protein, 122 aa, Artificial Sequence; identical to SEQ ID NO: 6579
  Description of Artificial Sequence: Synthetic polypeptide
  VH of XENP018122

SEQ ID NO: 11967 - protein, 5 aa, Artificial Sequence
  Description of Artificial Sequence: Synthetic peptide
  XENP018122 vhCDR1
TYWMN

SEQ ID NO: 11968 - protein, 19 aa, Artificial Sequence
  Description of Artificial Sequence: Synthetic peptide
  XENP018122 vhCDR2
EIRLKSNNYATHYAEPVKG

SEQ ID NO: 11969 - protein, 11 aa, Artificial Sequence
  Description of Artificial Sequence: Synthetic peptide
  XENP018122 vhCDR3
YYGNYGGYFDV

SEQ ID NO: 11970 - protein, 214 aa, Artificial Sequence; identical to SEQ ID NO: 11550
  Description of Artificial Sequence: Synthetic polypeptide
  XENP018122 1G6_H1.25_L1_IgG1_PVA_/S267K Light Chain

SEQ ID NO: 11971 - protein, 107 aa, Artificial Sequence; identical to SEQ ID NO: 6247
  Description of Artificial Sequence: Synthetic polypeptide
  VL of XENP018122

SEQ ID NO: 11972 - protein, 11 aa, Artificial Sequence
  Description of Artificial Sequence: Synthetic peptide
  XENP018122 vlCDR1
RASQSVSNDVA

SEQ ID NO: 11973 - protein, 7 aa, Artificial Sequence
  Description of Artificial Sequence: Synthetic peptide
  XENP018122 vlCDR2
YASHRYT

SEQ ID NO: 11974 - protein, 9 aa, Artificial Sequence
  Description of Artificial Sequence: Synthetic peptide
  XENP018122 vlCDR3
QQDYSSPRT

SEQ ID NO: 11975 - protein, 451 aa, Artificial Sequence
  Description of Artificial Sequence: Synthetic polypeptide
  XENP018123 1G6_H1.26_L1_IgG1_PVA_/S267K Heavy Chain
EVQLVESGGGLVKPGGSLRLSCAASGFTFSGYWMNWVRQAPGKGLEWVGEIRLKSNNYATHYAEPVKGRFTISRDDSKSTVYLQMNSLKTEDTAVYYCTRYYGNYGGYFDVWGAGTLVTVSSASTKGPSVFPLAPSSKSTSGGTAALGCLVKDYFPEPVTVSWNSGALTSGVHTFPAVLQSSGLYSLSSVVTVPSSSLGTQTYICNVNHKPSNTKVDKKVEPKSCDKTHTCPPCPAPPVAGPSVFLFPPKPKDTLMISRTPEVTCVVVDVKHEDPEVKFNWYVDGVEVHNAKTKPREEQYNSTYRVVSVLTVLHQDWLNGKEYKCKVSNKALPAPIEKTISKAKGQPREPQVYTLPPSREEMTKNQVSLTCLVKGFYPSDIAVEWESNGQPENNYKTTPPVLDSDGSFFLYSKLTVDKSRWQQGNVFSCSVMHEALHNHYTQKSLSLSPGK

SEQ ID NO: 11976 - protein, 122 aa, Artificial Sequence; identical to SEQ ID NO: 6588
  Description of Artificial Sequence: Synthetic polypeptide
  VH of XENP018123

SEQ ID NO: 11977 - protein, 5 aa, Artificial Sequence
  Description of Artificial Sequence: Synthetic peptide
  XENP018123 vhCDR1
GYWMN

SEQ ID NO: 11978 - protein, 19 aa, Artificial Sequence
  Description of Artificial Sequence: Synthetic peptide
  XENP018123 vhCDR2
EIRLKSNNYATHYAEPVKG

SEQ ID NO: 11979 - protein, 11 aa, Artificial Sequence
  Description of Artificial Sequence: Synthetic peptide
  XENP018123 vhCDR3
YYGNYGGYFDV

SEQ ID NO: 11980 - protein, 214 aa, Artificial Sequence; identical to SEQ ID NO: 11550
  Description of Artificial Sequence: Synthetic polypeptide
  XENP018123 1G6_H1.26_L1_IgG1_PVA_/S267K Light Chain

SEQ ID NO: 11981 - protein, 107 aa, Artificial Sequence; identical to SEQ ID NO: 6247
  Description of Artificial Sequence: Synthetic polypeptide
  VL of XENP018123

SEQ ID NO: 11982 - protein, 11 aa, Artificial Sequence
  Description of Artificial Sequence: Synthetic peptide
  XENP018123 vlCDR1
RASQSVSNDVA

SEQ ID NO: 11983 - protein, 7 aa, Artificial Sequence
  Description of Artificial Sequence: Synthetic peptide
  XENP018123 vlCDR2
YASHRYT

SEQ ID NO: 11984 - protein, 9 aa, Artificial Sequence
  Description of Artificial Sequence: Synthetic peptide
  XENP018123 vlCDR3
QQDYSSPRT

SEQ ID NO: 11985 - protein, 451 aa, Artificial Sequence
  Description of Artificial Sequence: Synthetic polypeptide
  XENP018124 1G6_H1.27_L1_IgG1_PVA_/S267K Heavy Chain
EVQLVESGGGLVKPGGSLRLSCAASGFTFSYYWMNWVRQAPGKGLEWVGEIRLKSNNYATHYAEPVKGRFTISRDDSKSTVYLQMNSLKTEDTAVYYCTRYYGNYGGYFDVWGAGTLVTVSSASTKGPSVFPLAPSSKSTSGGTAALGCLVKDYFPEPVTVSWNSGALTSGVHTFPAVLQSSGLYSLSSVVTVPSSSLGTQTYICNVNHKPSNTKVDKKVEPKSCDKTHTCPPCPAPPVAGPSVFLFPPKPKDTLMISRTPEVTCVVVDVKHEDPEVKFNWYVDGVEVHNAKTKPREEQYNSTYRVVSVLTVLHQDWLNGKEYKCKVSNKALPAPIEKTISKAKGQPREPQVYTLPPSREEMTKNQVSLTCLVKGFYPSDIAVEWESNGQPENNYKTTPPVLDSDGSFFLYSKLTVDKSRWQQGNVFSCSVMHEALHNHYTQKSLSLSPGK

SEQ ID NO: 11986 - protein, 122 aa, Artificial Sequence; identical to SEQ ID NO: 6597
  Description of Artificial Sequence: Synthetic polypeptide
  VH of XENP018124

SEQ ID NO: 11987 - protein, 5 aa, Artificial Sequence
  Description of Artificial Sequence: Synthetic peptide
  XENP018124 vhCDR1
YYWMN

SEQ ID NO: 11988 - protein, 19 aa, Artificial Sequence
  Description of Artificial Sequence: Synthetic peptide
  XENP018124 vhCDR2
EIRLKSNNYATHYAEPVKG

SEQ ID NO: 11989 - protein, 11 aa, Artificial Sequence
  Description of Artificial Sequence: Synthetic peptide
  XENP018124 vhCDR3
YYGNYGGYFDV

SEQ ID NO: 11990 - protein, 214 aa, Artificial Sequence; identical to SEQ ID NO: 11550
  Description of Artificial Sequence: Synthetic polypeptide
  XENP018124 1G6_H1.27_L1_IgG1_PVA_/S267K Light Chain

SEQ ID NO: 11991 - protein, 107 aa, Artificial Sequence; identical to SEQ ID NO: 6247
  Description of Artificial Sequence: Synthetic polypeptide
  VL of XENP018124

SEQ ID NO: 11992 - protein, 11 aa, Artificial Sequence
  Description of Artificial Sequence: Synthetic peptide
  XENP018124 vlCDR1
RASQSVSNDVA

SEQ ID NO: 11993 - protein, 7 aa, Artificial Sequence
  Description of Artificial Sequence: Synthetic peptide
  XENP018124 vlCDR2
YASHRYT

SEQ ID NO: 11994 - protein, 9 aa, Artificial Sequence
  Description of Artificial Sequence: Synthetic peptide
  XENP018124 vlCDR3
QQDYSSPRT

SEQ ID NO: 11995 - protein, 451 aa, Artificial Sequence
  Description of Artificial Sequence: Synthetic polypeptide
  XENP018125 1G6_H1.28_L1_IgG1_PVA_/S267K Heavy Chain
EVQLVESGGGLVKPGGSLRLSCAASGFTFSNFWMNWVRQAPGKGLEWVGEIRLKSNNYATHYAEPVKGRFTISRDDSKSTVYLQMNSLKTEDTAVYYCTRYYGNYGGYFDVWGAGTLVTVSSASTKGPSVFPLAPSSKSTSGGTAALGCLVKDYFPEPVTVSWNSGALTSGVHTFPAVLQSSGLYSLSSVVTVPSSSLGTQTYICNVNHKPSNTKVDKKVEPKSCDKTHTCPPCPAPPVAGPSVFLFPPKPKDTLMISRTPEVTCVVVDVKHEDPEVKFNWYVDGVEVHNAKTKPREEQYNSTYRVVSVLTVLHQDWLNGKEYKCKVSNKALPAPIEKTISKAKGQPREPQVYTLPPSREEMTKNQVSLTCLVKGFYPSDIAVEWESNGQPENNYKTTPPVLDSDGSFFLYSKLTVDKSRWQQGNVFSCSVMHEALHNHYTQKSLSLSPGK

SEQ ID NO: 11996 - protein, 122 aa, Artificial Sequence; identical to SEQ ID NO: 6606
  Description of Artificial Sequence: Synthetic polypeptide
  VH of XENP018125

SEQ ID NO: 11997 - protein, 5 aa, Artificial Sequence
  Description of Artificial Sequence: Synthetic peptide
  XENP018125 vhCDR1
NFWMN

SEQ ID NO: 11998 - protein, 19 aa, Artificial Sequence
  Description of Artificial Sequence: Synthetic peptide
  XENP018125 vhCDR2
EIRLKSNNYATHYAEPVKG

SEQ ID NO: 11999 - protein, 11 aa, Artificial Sequence
  Description of Artificial Sequence: Synthetic peptide
  XENP018125 vhCDR3
YYGNYGGYFDV

SEQ ID NO: 12000 - protein, 214 aa, Artificial Sequence; identical to SEQ ID NO: 11550
  Description of Artificial Sequence: Synthetic polypeptide
  XENP018125 1G6_H1.28_L1_IgG1_PVA_/S267K Light Chain

SEQ ID NO: 12001 - protein, 107 aa, Artificial Sequence; identical to SEQ ID NO: 6247
  Description of Artificial Sequence: Synthetic polypeptide
  VL of XENP018125

SEQ ID NO: 12002 - protein, 11 aa, Artificial Sequence
  Description of Artificial Sequence: Synthetic peptide
  XENP018125 vlCDR1
RASQSVSNDVA

SEQ ID NO: 12003 - protein, 7 aa, Artificial Sequence
  Description of Artificial Sequence: Synthetic peptide
  XENP018125 vlCDR2
YASHRYT

SEQ ID NO: 12004 - protein, 9 aa, Artificial Sequence
  Description of Artificial Sequence: Synthetic peptide
  XENP018125 vlCDR3
QQDYSSPRT

SEQ ID NO: 12005 - protein, 451 aa, Artificial Sequence
  Description of Artificial Sequence: Synthetic polypeptide
  XENP018126 1G6_H1.29_L1_IgG1_PVA_/S267K Heavy Chain
EVQLVESGGGLVKPGGSLRLSCAASGFTFSNHWMNWVRQAPGKGLEWVGEIRLKSNNYATHYAEPVKGRFTISRDDSKSTVYLQMNSLKTEDTAVYYCTRYYGNYGGYFDVWGAGTLVTVSSASTKGPSVFPLAPSSKSTSGGTAALGCLVKDYFPEPVTVSWNSGALTSGVHTFPAVLQSSGLYSLSSVVTVPSSSLGTQTYICNVNHKPSNTKVDKKVEPKSCDKTHTCPPCPAPPVAGPSVFLFPPKPKDTLMISRTPEVTCVVVDVKHEDPEVKFNWYVDGVEVHNAKTKPREEQYNSTYRVVSVLTVLHQDWLNGKEYKCKVSNKALPAPIEKTISKAKGQPREPQVYTLPPSREEMTKNQVSLTCLVKGFYPSDIAVEWESNGQPENNYKTTPPVLDSDGSFFLYSKLTVDKSRWQQGNVFSCSVMHEALHNHYTQKSLSLSPGK

SEQ ID NO: 12006 - protein, 122 aa, Artificial Sequence; identical to SEQ ID NO: 6615
  Description of Artificial Sequence: Synthetic polypeptide
  VH of XENP018126

SEQ ID NO: 12007 - protein, 5 aa, Artificial Sequence
  Description of Artificial Sequence: Synthetic peptide
  XENP018126 vhCDR1
NHWMN

SEQ ID NO: 12008 - protein, 19 aa, Artificial Sequence
  Description of Artificial Sequence: Synthetic peptide
  XENP018126 vhCDR2
EIRLKSNNYATHYAEPVKG

SEQ ID NO: 12009 - protein, 11 aa, Artificial Sequence
  Description of Artificial Sequence: Synthetic peptide
  XENP018126 vhCDR3
YYGNYGGYFDV

SEQ ID NO: 12010 - protein, 214 aa, Artificial Sequence; identical to SEQ ID NO: 11550
  Description of Artificial Sequence: Synthetic polypeptide
  XENP018126 1G6_H1.29_L1_IgG1_PVA_/S267K Light Chain

SEQ ID NO: 12011 - protein, 107 aa, Artificial Sequence; identical to SEQ ID NO: 6247
  Description of Artificial Sequence: Synthetic polypeptide
  VL of XENP018126

SEQ ID NO: 12012 - protein, 11 aa, Artificial Sequence
  Description of Artificial Sequence: Synthetic peptide
  XENP018126 vlCDR1
RASQSVSNDVA

SEQ ID NO: 12013 - protein, 7 aa, Artificial Sequence
  Description of Artificial Sequence: Synthetic peptide
  XENP018126 vlCDR2
YASHRYT

SEQ ID NO: 12014 - protein, 9 aa, Artificial Sequence
  Description of Artificial Sequence: Synthetic peptide
  XENP018126 vlCDR3
QQDYSSPRT

SEQ ID NO: 12015 - protein, 451 aa, Artificial Sequence
  Description of Artificial Sequence: Synthetic polypeptide
  XENP018127 1G6_H1.30_L1_IgG1_PVA_/S267K Heavy Chain
EVQLVESGGGLVKPGGSLRLSCAASGFTFSNLWMNWVRQAPGKGLEWVGEIRLKSNNYATHYAEPVKGRFTISRDDSKSTVYLQMNSLKTEDTAVYYCTRYYGNYGGYFDVWGAGTLVTVSSASTKGPSVFPLAPSSKSTSGGTAALGCLVKDYFPEPVTVSWNSGALTSGVHTFPAVLQSSGLYSLSSVVTVPSSSLGTQTYICNVNHKPSNTKVDKKVEPKSCDKTHTCPPCPAPPVAGPSVFLFPPKPKDTLMISRTPEVTCVVVDVKHEDPEVKFNWYVDGVEVHNAKTKPREEQYNSTYRVVSVLTVLHQDWLNGKEYKCKVSNKALPAPIEKTISKAKGQPREPQVYTLPPSREEMTKNQVSLTCLVKGFYPSDIAVEWESNGQPENNYKTTPPVLDSDGSFFLYSKLTVDKSRWQQGNVFSCSVMHEALHNHYTQKSLSLSPGK

SEQ ID NO: 12016 - protein, 122 aa, Artificial Sequence; identical to SEQ ID NO: 6624
  Description of Artificial Sequence: Synthetic polypeptide
  VH of XENP018127

SEQ ID NO: 12017 - protein, 5 aa, Artificial Sequence
  Description of Artificial Sequence: Synthetic peptide
  XENP018127 vhCDR1
NLWMN

SEQ ID NO: 12018 - protein, 19 aa, Artificial Sequence
  Description of Artificial Sequence: Synthetic peptide
  XENP018127 vhCDR2
EIRLKSNNYATHYAEPVKG

SEQ ID NO: 12019 - protein, 11 aa, Artificial Sequence
  Description of Artificial Sequence: Synthetic peptide
  XENP018127 vhCDR3
YYGNYGGYFDV

SEQ ID NO: 12020 - protein, 214 aa, Artificial Sequence; identical to SEQ ID NO: 11550
  Description of Artificial Sequence: Synthetic polypeptide
  XENP018127 1G6_H1.30_L1_IgG1_PVA_/S267K Light Chain

SEQ ID NO: 12021 - protein, 107 aa, Artificial Sequence; identical to SEQ ID NO: 6247
  Description of Artificial Sequence: Synthetic polypeptide
  VL of XENP018127

SEQ ID NO: 12022 - protein, 11 aa, Artificial Sequence
  Description of Artificial Sequence: Synthetic peptide
  XENP018127 vlCDR1
RASQSVSNDVA

SEQ ID NO: 12023 - protein, 7 aa, Artificial Sequence
  Description of Artificial Sequence: Synthetic peptide
  XENP018127 vlCDR2
YASHRYT

SEQ ID NO: 12024 - protein, 9 aa, Artificial Sequence
  Description of Artificial Sequence: Synthetic peptide
  XENP018127 vlCDR3
QQDYSSPRT

SEQ ID NO: 12025 - protein, 451 aa, Artificial Sequence
  Description of Artificial Sequence: Synthetic polypeptide
  XENP018128 1G6_H1.31_L1_IgG1_PVA_/S267K Heavy Chain
EVQLVESGGGLVKPGGSLRLSCAASGFTFSNWWMNWVRQAPGKGLEWVGEIRLKSNNYATHYAEPVKGRFTISRDDSKSTVYLQMNSLKTEDTAVYYCTRYYGNYGGYFDVWGAGTLVTVSSASTKGPSVFPLAPSSKSTSGGTAALGCLVKDYFPEPVTVSWNSGALTSGVHTFPAVLQSSGLYSLSSVVTVPSSSLGTQTYICNVNHKPSNTKVDKKVEPKSCDKTHTCPPCPAPPVAGPSVFLFPPKPKDTLMISRTPEVTCVVVDVKHEDPEVKFNWYVDGVEVHNAKTKPREEQYNSTYRVVSVLTVLHQDWLNGKEYKCKVSNKALPAPIEKTISKAKGQPREPQVYTLPPSREEMTKNQVSLTCLVKGFYPSDIAVEWESNGQPENNYKTTPPVLDSDGSFFLYSKLTVDKSRWQQGNVFSCSVMHEALHNHYTQKSLSLSPGK

SEQ ID NO: 12026 - protein, 122 aa, Artificial Sequence; identical to SEQ ID NO: 6633
  Description of Artificial Sequence: Synthetic polypeptide
  VH of XENP018128

SEQ ID NO: 12027 - protein, 5 aa, Artificial Sequence
  Description of Artificial Sequence: Synthetic peptide
  XENP018128 vhCDR1
NWWMN

SEQ ID NO: 12028 - protein, 19 aa, Artificial Sequence
  Description of Artificial Sequence: Synthetic peptide
  XENP018128 vhCDR2
EIRLKSNNYATHYAEPVKG

SEQ ID NO: 12029 - protein, 11 aa, Artificial Sequence
  Description of Artificial Sequence: Synthetic peptide
  XENP018128 vhCDR3
YYGNYGGYFDV

SEQ ID NO: 12030 - protein, 214 aa, Artificial Sequence; identical to SEQ ID NO: 11550
  Description of Artificial Sequence: Synthetic polypeptide
  XENP018128 1G6_H1.31_L1_IgG1_PVA_/S267K Light Chain

SEQ ID NO: 12031 - protein, 107 aa, Artificial Sequence; identical to SEQ ID NO: 6247
  Description of Artificial Sequence: Synthetic polypeptide
  VL of XENP018128

SEQ ID NO: 12032 - protein, 11 aa, Artificial Sequence
  Description of Artificial Sequence: Synthetic peptide
  XENP018128 vlCDR1
RASQSVSNDVA

SEQ ID NO: 12033 - protein, 7 aa, Artificial Sequence
  Description of Artificial Sequence: Synthetic peptide
  XENP018128 vlCDR2
YASHRYT

SEQ ID NO: 12034 - protein, 9 aa, Artificial Sequence
  Description of Artificial Sequence: Synthetic peptide
  XENP018128 vlCDR3
QQDYSSPRT

SEQ ID NO: 12035 - protein, 451 aa, Artificial Sequence
  Description of Artificial Sequence: Synthetic polypeptide
  XENP018129 1G6_H1.32_L1_IgG1_PVA_/S267K Heavy Chain
EVQLVESGGGLVKPGGSLRLSCAASGFTFSNVWMNWVRQAPGKGLEWVGEIRLKSNNYATHYAEPVKGRFTISRDDSKSTVYLQMNSLKTEDTAVYYCTRYYGNYGGYFDVWGAGTLVTVSSASTKGPSVFPLAPSSKSTSGGTAALGCLVKDYFPEPVTVSWNSGALTSGVHTFPAVLQSSGLYSLSSVVTVPSSSLGTQTYICNVNHKPSNTKVDKKVEPKSCDKTHTCPPCPAPPVAGPSVFLFPPKPKDTLMISRTPEVTCVVVDVKHEDPEVKFNWYVDGVEVHNAKTKPREEQYNSTYRVVSVLTVLHQDWLNGKEYKCKVSNKALPAPIEKTISKAKGQPREPQVYTLPPSREEMTKNQVSLTCLVKGFYPSDIAVEWESNGQPENNYKTTPPVLDSDGSFFLYSKLTVDKSRWQQGNVFSCSVMHEALHNHYTQKSLSLSPGK

SEQ ID NO: 12036 - protein, 122 aa, Artificial Sequence; identical to SEQ ID NO: 6642
  Description of Artificial Sequence: Synthetic polypeptide
  VH of XENP018129

SEQ ID NO: 12037 - protein, 5 aa, Artificial Sequence
  Description of Artificial Sequence: Synthetic peptide
  XENP018129 vhCDR1
NVWMN

SEQ ID NO: 12038 - protein, 19 aa, Artificial Sequence
  Description of Artificial Sequence: Synthetic peptide
  XENP018129 vhCDR2
EIRLKSNNYATHYAEPVKG

SEQ ID NO: 12039 - protein, 11 aa, Artificial Sequence
  Description of Artificial Sequence: Synthetic peptide
  XENP018129 vhCDR3
YYGNYGGYFDV

SEQ ID NO: 12040 - protein, 214 aa, Artificial Sequence; identical to SEQ ID NO: 11550
  Description of Artificial Sequence: Synthetic polypeptide
  XENP018129 1G6_H1.32_L1_IgG1_PVA_/S267K Light Chain

SEQ ID NO: 12041 - protein, 107 aa, Artificial Sequence; identical to SEQ ID NO: 6247
  Description of Artificial Sequence: Synthetic polypeptide
  VL of XENP018129

SEQ ID NO: 12042 - protein, 11 aa, Artificial Sequence
  Description of Artificial Sequence: Synthetic peptide
  XENP018129 vlCDR1
RASQSVSNDVA

SEQ ID NO: 12043 - protein, 7 aa, Artificial Sequence
  Description of Artificial Sequence: Synthetic peptide
  XENP018129 vlCDR2
YASHRYT

SEQ ID NO: 12044 - protein, 9 aa, Artificial Sequence
  Description of Artificial Sequence: Synthetic peptide
  XENP018129 vlCDR3
QQDYSSPRT

SEQ ID NO: 12045 - protein, 451 aa, Artificial Sequence
  Description of Artificial Sequence: Synthetic polypeptide
  XENP018130 1G6_H1.33_L1_IgG1_PVA_/S267K Heavy Chain
EVQLVESGGGLVKPGGSLRLSCAASGFTFSNAWMNWVRQAPGKGLEWVGEIRLKSNNYATHYAEPVKGRFTISRDDSKSTVYLQMNSLKTEDTAVYYCTRYYGNYGGYFDVWGAGTLVTVSSASTKGPSVFPLAPSSKSTSGGTAALGCLVKDYFPEPVTVSWNSGALTSGVHTFPAVLQSSGLYSLSSVVTVPSSSLGTQTYICNVNHKPSNTKVDKKVEPKSCDKTHTCPPCPAPPVAGPSVFLFPPKPKDTLMISRTPEVTCVVVDVKHEDPEVKFNWYVDGVEVHNAKTKPREEQYNSTYRVVSVLTVLHQDWLNGKEYKCKVSNKALPAPIEKTISKAKGQPREPQVYTLPPSREEMTKNQVSLTCLVKGFYPSDIAVEWESNGQPENNYKTTPPVLDSDGSFFLYSKLTVDKSRWQQGNVFSCSVMHEALHNHYTQKSLSLSPGK

SEQ ID NO: 12046 - protein, 122 aa, Artificial Sequence; identical to SEQ ID NO: 6651
  Description of Artificial Sequence: Synthetic polypeptide
  VH of XENP018130

SEQ ID NO: 12047 - protein, 5 aa, Artificial Sequence
  Description of Artificial Sequence: Synthetic peptide
  XENP018130 vhCDR1
NAWMN

SEQ ID NO: 12048 - protein, 19 aa, Artificial Sequence
  Description of Artificial Sequence: Synthetic peptide
  XENP018130 vhCDR2
EIRLKSNNYATHYAEPVKG

SEQ ID NO: 12049 - protein, 11 aa, Artificial Sequence
  Description of Artificial Sequence: Synthetic peptide
  XENP018130 vhCDR3
YYGNYGGYFDV

SEQ ID NO: 12050 - protein, 214 aa, Artificial Sequence; identical to SEQ ID NO: 11550
  Description of Artificial Sequence: Synthetic polypeptide
  XENP018130 1G6_H1.33_L1_IgG1_PVA_/S267K Light Chain

SEQ ID NO: 12051 - protein, 107 aa, Artificial Sequence; identical to SEQ ID NO: 6247
  Description of Artificial Sequence: Synthetic polypeptide
  VL of XENP018130

SEQ ID NO: 12052 - protein, 11 aa, Artificial Sequence
  Description of Artificial Sequence: Synthetic peptide
  XENP018130 vlCDR1
RASQSVSNDVA

SEQ ID NO: 12053 - protein, 7 aa, Artificial Sequence
  Description of Artificial Sequence: Synthetic peptide
  XENP018130 vlCDR2
YASHRYT

SEQ ID NO: 12054 - protein, 9 aa, Artificial Sequence
  Description of Artificial Sequence: Synthetic peptide
  XENP018130 vlCDR3
QQDYSSPRT

SEQ ID NO: 12055 - protein, 451 aa, Artificial Sequence
  Description of Artificial Sequence: Synthetic polypeptide
  XENP018131 1G6_H1.34_L1_IgG1_PVA_/S267K Heavy Chain
EVQLVESGGGLVKPGGSLRLSCAASGFTFSNQWMNWVRQAPGKGLEWVGEIRLKSNNYATHYAEPVKGRFTISRDDSKSTVYLQMNSLKTEDTAVYYCTRYYGNYGGYFDVWGAGTLVTVSSASTKGPSVFPLAPSSKSTSGGTAALGCLVKDYFPEPVTVSWNSGALTSGVHTFPAVLQSSGLYSLSSVVTVPSSSLGTQTYICNVNHKPSNTKVDKKVEPKSCDKTHTCPPCPAPPVAGPSVFLFPPKPKDTLMISRTPEVTCVVVDVKHEDPEVKFNWYVDGVEVHNAKTKPREEQYNSTYRVVSVLTVLHQDWLNGKEYKCKVSNKALPAPIEKTISKAKGQPREPQVYTLPPSREEMTKNQVSLTCLVKGFYPSDIAVEWESNGQPENNYKTTPPVLDSDGSFFLYSKLTVDKSRWQQGNVFSCSVMHEALHNHYTQKSLSLSPGK

SEQ ID NO: 12056 - protein, 122 aa, Artificial Sequence; identical to SEQ ID NO: 6660
  Description of Artificial Sequence: Synthetic polypeptide
  VH of XENP018131

SEQ ID NO: 12057 - protein, 5 aa, Artificial Sequence
  Description of Artificial Sequence: Synthetic peptide
  XENP018131 vhCDR1
NQWMN

SEQ ID NO: 12058 - protein, 19 aa, Artificial Sequence
  Description of Artificial Sequence: Synthetic peptide
  XENP018131 vhCDR2
EIRLKSNNYATHYAEPVKG

SEQ ID NO: 12059 - protein, 11 aa, Artificial Sequence
  Description of Artificial Sequence: Synthetic peptide
  XENP018131 vhCDR3
YYGNYGGYFDV

SEQ ID NO: 12060 - protein, 214 aa, Artificial Sequence; identical to SEQ ID NO: 11550
  Description of Artificial Sequence: Synthetic polypeptide
  XENP018131 1G6_H1.34_L1_IgG1_PVA_/S267K Light Chain

SEQ ID NO: 12061 - protein, 107 aa, Artificial Sequence; identical to SEQ ID NO: 6247
  Description of Artificial Sequence: Synthetic polypeptide
  VL of XENP018131

SEQ ID NO: 12062 - protein, 11 aa, Artificial Sequence
  Description of Artificial Sequence: Synthetic peptide
  XENP018131 vlCDR1
RASQSVSNDVA

SEQ ID NO: 12063 - protein, 7 aa, Artificial Sequence
  Description of Artificial Sequence: Synthetic peptide
  XENP018131 vlCDR2
YASHRYT

SEQ ID NO: 12064 - protein, 9 aa, Artificial Sequence
  Description of Artificial Sequence: Synthetic peptide
  XENP018131 vlCDR3
QQDYSSPRT

SEQ ID NO: 12065 - protein, 451 aa, Artificial Sequence
  Description of Artificial Sequence: Synthetic polypeptide
  XENP018132 1G6_H1.35_L1_IgG1_PVA_/S267K Heavy Chain
EVQLVESGGGLVKPGGSLRLSCAASGFTFSNDWMNWVRQAPGKGLEWVGEIRLKSNNYATHYAEPVKGRFTISRDDSKSTVYLQMNSLKTEDTAVYYCTRYYGNYGGYFDVWGAGTLVTVSSASTKGPSVFPLAPSSKSTSGGTAALGCLVKDYFPEPVTVSWNSGALTSGVHTFPAVLQSSGLYSLSSVVTVPSSSLGTQTYICNVNHKPSNTKVDKKVEPKSCDKTHTCPPCPAPPVAGPSVFLFPPKPKDTLMISRTPEVTCVVVDVKHEDPEVKFNWYVDGVEVHNAKTKPREEQYNSTYRVVSVLTVLHQDWLNGKEYKCKVSNKALPAPIEKTISKAKGQPREPQVYTLPPSREEMTKNQVSLTCLVKGFYPSDIAVEWESNGQPENNYKTTPPVLDSDGSFFLYSKLTVDKSRWQQGNVFSCSVMHEALHNHYTQKSLSLSPGK

SEQ ID NO: 12066 - protein, 122 aa, Artificial Sequence; identical to SEQ ID NO: 6669
  Description of Artificial Sequence: Synthetic polypeptide
  VH of XENP018132

SEQ ID NO: 12067 - protein, 5 aa, Artificial Sequence
  Description of Artificial Sequence: Synthetic peptide
  XENP018132 vhCDR1
NDWMN

SEQ ID NO: 12068 - protein, 19 aa, Artificial Sequence
  Description of Artificial Sequence: Synthetic peptide
  XENP018132 vhCDR2
EIRLKSNNYATHYAEPVKG

SEQ ID NO: 12069 - protein, 11 aa, Artificial Sequence
  Description of Artificial Sequence: Synthetic peptide
  XENP018132 vhCDR3
YYGNYGGYFDV

SEQ ID NO: 12070 - protein, 214 aa, Artificial Sequence; identical to SEQ ID NO: 11550
  Description of Artificial Sequence: Synthetic polypeptide
  XENP018132 1G6_H1.35_L1_IgG1_PVA_/S267K Light Chain

SEQ ID NO: 12071 - protein, 107 aa, Artificial Sequence; identical to SEQ ID NO: 6247
  Description of Artificial Sequence: Synthetic polypeptide
  VL of XENP018132

SEQ ID NO: 12072 - protein, 11 aa, Artificial Sequence
  Description of Artificial Sequence: Synthetic peptide
  XENP018132 vlCDR1
RASQSVSNDVA

SEQ ID NO: 12073 - protein, 7 aa, Artificial Sequence
  Description of Artificial Sequence: Synthetic peptide
  XENP018132 vlCDR2
YASHRYT

SEQ ID NO: 12074 - protein, 9 aa, Artificial Sequence
  Description of Artificial Sequence: Synthetic peptide
  XENP018132 vlCDR3
QQDYSSPRT

SEQ ID NO: 12075 - protein, 451 aa, Artificial Sequence
  Description of Artificial Sequence: Synthetic polypeptide
  XENP018133 1G6_H1.36_L1_IgG1_PVA_/S267K Heavy Chain
EVQLVESGGGLVKPGGSLRLSCAASGFTFSNKWMNWVRQAPGKGLEWVGEIRLKSNNYATHYAEPVKGRFTISRDDSKSTVYLQMNSLKTEDTAVYYCTRYYGNYGGYFDVWGAGTLVTVSSASTKGPSVFPLAPSSKSTSGGTAALGCLVKDYFPEPVTVSWNSGALTSGVHTFPAVLQSSGLYSLSSVVTVPSSSLGTQTYICNVNHKPSNTKVDKKVEPKSCDKTHTCPPCPAPPVAGPSVFLFPPKPKDTLMISRTPEVTCVVVDVKHEDPEVKFNWYVDGVEVHNAKTKPREEQYNSTYRVVSVLTVLHQDWLNGKEYKCKVSNKALPAPIEKTISKAKGQPREPQVYTLPPSREEMTKNQVSLTCLVKGFYPSDIAVEWESNGQPENNYKTTPPVLDSDGSFFLYSKLTVDKSRWQQGNVFSCSVMHEALHNHYTQKSLSLSPGK

SEQ ID NO: 12076 - protein, 122 aa, Artificial Sequence; identical to SEQ ID NO: 6678
  Description of Artificial Sequence: Synthetic polypeptide
  VH of XENP018133

SEQ ID NO: 12077 - protein, 5 aa, Artificial Sequence
  Description of Artificial Sequence: Synthetic peptide
  XENP018133 vhCDR1
NKWMN

SEQ ID NO: 12078 - protein, 19 aa, Artificial Sequence
  Description of Artificial Sequence: Synthetic peptide
  XENP018133 vhCDR2
EIRLKSNNYATHYAEPVKG

SEQ ID NO: 12079 - protein, 11 aa, Artificial Sequence
  Description of Artificial Sequence: Synthetic peptide
  XENP018133 vhCDR3
YYGNYGGYFDV

SEQ ID NO: 12080 - protein, 214 aa, Artificial Sequence; identical to SEQ ID NO: 11550
  Description of Artificial Sequence: Synthetic polypeptide
  XENP018133 1G6_H1.36_L1_IgG1_PVA_/S267K Light Chain

SEQ ID NO: 12081 - protein, 107 aa, Artificial Sequence; identical to SEQ ID NO: 6247
  Description of Artificial Sequence: Synthetic polypeptide
  VL of XENP018133

SEQ ID NO: 12082 - protein, 11 aa, Artificial Sequence
  Description of Artificial Sequence: Synthetic peptide
  XENP018133 vlCDR1
RASQSVSNDVA

SEQ ID NO: 12083 - protein, 7 aa, Artificial Sequence
  Description of Artificial Sequence: Synthetic peptide
  XENP018133 vlCDR2
YASHRYT

SEQ ID NO: 12084 - protein, 9 aa, Artificial Sequence
  Description of Artificial Sequence: Synthetic peptide
  XENP018133 vlCDR3
QQDYSSPRT

SEQ ID NO: 12085 - protein, 451 aa, Artificial Sequence
  Description of Artificial Sequence: Synthetic polypeptide
  XENP018134 1G6_H1.37_L1_IgG1_PVA_/S267K Heavy Chain
EVQLVESGGGLVKPGGSLRLSCAASGFTFSNYGMNWVRQAPGKGLEWVGEIRLKSNNYATHYAEPVKGRFTISRDDSKSTVYLQMNSLKTEDTAVYYCTRYYGNYGGYFDVWGAGTLVTVSSASTKGPSVFPLAPSSKSTSGGTAALGCLVKDYFPEPVTVSWNSGALTSGVHTFPAVLQSSGLYSLSSVVTVPSSSLGTQTYICNVNHKPSNTKVDKKVEPKSCDKTHTCPPCPAPPVAGPSVFLFPPKPKDTLMISRTPEVTCVVVDVKHEDPEVKFNWYVDGVEVHNAKTKPREEQYNSTYRVVSVLTVLHQDWLNGKEYKCKVSNKALPAPIEKTISKAKGQPREPQVYTLPPSREEMTKNQVSLTCLVKGFYPSDIAVEWESNGQPENNYKTTPPVLDSDGSFFLYSKLTVDKSRWQQGNVFSCSVMHEALHNHYTQKSLSLSPGK

SEQ ID NO: 12086 - protein, 122 aa, Artificial Sequence; identical to SEQ ID NO: 6687
  Description of Artificial Sequence: Synthetic polypeptide
  VH of XENP018134

SEQ ID NO: 12087 - protein, 5 aa, Artificial Sequence
  Description of Artificial Sequence: Synthetic peptide
  XENP018134 vhCDR1
NYGMN

SEQ ID NO: 12088 - protein, 19 aa, Artificial Sequence
  Description of Artificial Sequence: Synthetic peptide
  XENP018134 vhCDR2
EIRLKSNNYATHYAEPVKG

SEQ ID NO: 12089 - protein, 11 aa, Artificial Sequence
  Description of Artificial Sequence: Synthetic peptide
  XENP018134 vhCDR3
YYGNYGGYFDV

SEQ ID NO: 12090 - protein, 214 aa, Artificial Sequence; identical to SEQ ID NO: 11550
  Description of Artificial Sequence: Synthetic polypeptide
  XENP018134 1G6_H1.37_L1_IgG1_PVA_/S267K Light Chain

SEQ ID NO: 12091 - protein, 107 aa, Artificial Sequence; identical to SEQ ID NO: 6247
  Description of Artificial Sequence: Synthetic polypeptide
  VL of XENP018134

SEQ ID NO: 12092 - protein, 11 aa, Artificial Sequence
  Description of Artificial Sequence: Synthetic peptide
  XENP018134 vlCDR1
RASQSVSNDVA

SEQ ID NO: 12093 - protein, 7 aa, Artificial Sequence
  Description of Artificial Sequence: Synthetic peptide
  XENP018134 vlCDR2
YASHRYT

SEQ ID NO: 12094 - protein, 9 aa, Artificial Sequence
  Description of Artificial Sequence: Synthetic peptide
  XENP018134 vlCDR3
QQDYSSPRT

SEQ ID NO: 12095 - protein, 451 aa, Artificial Sequence
  Description of Artificial Sequence: Synthetic polypeptide
  XENP018135 1G6_H1.38_L1_IgG1_PVA_/S267K Heavy Chain
EVQLVESGGGLVKPGGSLRLSCAASGFTFSNYAMNWVRQAPGKGLEWVGEIRLKSNNYATHYAEPVKGRFTISRDDSKSTVYLQMNSLKTEDTAVYYCTRYYGNYGGYFDVWGAGTLVTVSSASTKGPSVFPLAPSSKSTSGGTAALGCLVKDYFPEPVTVSWNSGALTSGVHTFPAVLQSSGLYSLSSVVTVPSSSLGTQTYICNVNHKPSNTKVDKKVEPKSCDKTHTCPPCPAPPVAGPSVFLFPPKPKDTLMISRTPEVTCVVVDVKHEDPEVKFNWYVDGVEVHNAKTKPREEQYNSTYRVVSVLTVLHQDWLNGKEYKCKVSNKALPAPIEKTISKAKGQPREPQVYTLPPSREEMTKNQVSLTCLVKGFYPSDIAVEWESNGQPENNYKTTPPVLDSDGSFFLYSKLTVDKSRWQQGNVFSCSVMHEALHNHYTQKSLSLSPGK

SEQ ID NO: 12096 - protein, 122 aa, Artificial Sequence; identical to SEQ ID NO: 6696
  Description of Artificial Sequence: Synthetic polypeptide
  VH of XENP018135

SEQ ID NO: 12097 - protein, 5 aa, Artificial Sequence
  Description of Artificial Sequence: Synthetic peptide
  XENP018135 vhCDR1
NYAMN

SEQ ID NO: 12098 - protein, 19 aa, Artificial Sequence
  Description of Artificial Sequence: Synthetic peptide
  XENP018135 vhCDR2
EIRLKSNNYATHYAEPVKG

SEQ ID NO: 12099 - protein, 11 aa, Artificial Sequence
  Description of Artificial Sequence: Synthetic peptide
  XENP018135 vhCDR3
YYGNYGGYFDV

SEQ ID NO: 12100 - protein, 214 aa, Artificial Sequence; identical to SEQ ID NO: 11550
  Description of Artificial Sequence: Synthetic polypeptide
  XENP018135 1G6_H1.38_L1_IgG1_PVA_/S267K Light Chain

SEQ ID NO: 12101 - protein, 107 aa, Artificial Sequence; identical to SEQ ID NO: 6247
  Description of Artificial Sequence: Synthetic polypeptide
  VL of XENP018135

SEQ ID NO: 12102 - protein, 11 aa, Artificial Sequence
  Description of Artificial Sequence: Synthetic peptide
  XENP018135 vlCDR1
RASQSVSNDVA

SEQ ID NO: 12103 - protein, 7 aa, Artificial Sequence
  Description of Artificial Sequence: Synthetic peptide
  XENP018135 vlCDR2
YASHRYT

SEQ ID NO: 12104 - protein, 9 aa, Artificial Sequence
  Description of Artificial Sequence: Synthetic peptide
  XENP018135 vlCDR3
QQDYSSPRT

SEQ ID NO: 12105 - protein, 451 aa, Artificial Sequence
  Description of Artificial Sequence: Synthetic polypeptide
  XENP018136 1G6_H1.39_L1_IgG1_PVA_/S267K Heavy Chain
EVQLVESGGGLVKPGGSLRLSCAASGFTFSNYYMNWVRQAPGKGLEWVGEIRLKSNNYATHYAEPVKGRFTISRDDSKSTVYLQMNSLKTEDTAVYYCTRYYGNYGGYFDVWGAGTLVTVSSASTKGPSVFPLAPSSKSTSGGTAALGCLVKDYFPEPVTVSWNSGALTSGVHTFPAVLQSSGLYSLSSVVTVPSSSLGTQTYICNVNHKPSNTKVDKKVEPKSCDKTHTCPPCPAPPVAGPSVFLFPPKPKDTLMISRTPEVTCVVVDVKHEDPEVKFNWYVDGVEVHNAKTKPREEQYNSTYRVVSVLTVLHQDWLNGKEYKCKVSNKALPAPIEKTISKAKGQPREPQVYTLPPSREEMTKNQVSLTCLVKGFYPSDIAVEWESNGQPENNYKTTPPVLDSDGSFFLYSKLTVDKSRWQQGNVFSCSVMHEALHNHYTQKSLSLSPGK

SEQ ID NO: 12106 - protein, 122 aa, Artificial Sequence; identical to SEQ ID NO: 6705
  Description of Artificial Sequence: Synthetic polypeptide
  VH of XENP018136

SEQ ID NO: 12107 - protein, 5 aa, Artificial Sequence
  Description of Artificial Sequence: Synthetic peptide
  XENP018136 vhCDR1
NYYMN

SEQ ID NO: 12108 - protein, 19 aa, Artificial Sequence
  Description of Artificial Sequence: Synthetic peptide
  XENP018136 vhCDR2
EIRLKSNNYATHYAEPVKG

SEQ ID NO: 12109 - protein, 11 aa, Artificial Sequence
  Description of Artificial Sequence: Synthetic peptide
  XENP018136 vhCDR3
YYGNYGGYFDV

SEQ ID NO: 12110 - protein, 214 aa, Artificial Sequence; identical to SEQ ID NO: 11550
  Description of Artificial Sequence: Synthetic polypeptide
  XENP018136 1G6_H1.39_L1_IgG1_PVA_/S267K Light Chain

SEQ ID NO: 12111 - protein, 107 aa, Artificial Sequence; identical to SEQ ID NO: 6247
  Description of Artificial Sequence: Synthetic polypeptide
  VL of XENP018136

SEQ ID NO: 12112 - protein, 11 aa, Artificial Sequence
  Description of Artificial Sequence: Synthetic peptide
  XENP018136 vlCDR1
RASQSVSNDVA

SEQ ID NO: 12113 - protein, 7 aa, Artificial Sequence
  Description of Artificial Sequence: Synthetic peptide
  XENP018136 vlCDR2
YASHRYT

SEQ ID NO: 12114 - protein, 9 aa, Artificial Sequence
  Description of Artificial Sequence: Synthetic peptide
  XENP018136 vlCDR3
QQDYSSPRT

SEQ ID NO: 12115 - protein, 451 aa, Artificial Sequence
  Description of Artificial Sequence: Synthetic polypeptide
  XENP018137 1G6_H1.40_L1_IgG1_PVA_/S267K Heavy Chain
EVQLVESGGGLVKPGGSLRLSCAASGFTFSNYDMNWVRQAPGKGLEWVGEIRLKSNNYATHYAEPVKGRFTISRDDSKSTVYLQMNSLKTEDTAVYYCTRYYGNYGGYFDVWGAGTLVTVSSASTKGPSVFPLAPSSKSTSGGTAALGCLVKDYFPEPVTVSWNSGALTSGVHTFPAVLQSSGLYSLSSVVTVPSSSLGTQTYICNVNHKPSNTKVDKKVEPKSCDKTHTCPPCPAPPVAGPSVFLFPPKPKDTLMISRTPEVTCVVVDVKHEDPEVKFNWYVDGVEVHNAKTKPREEQYNSTYRVVSVLTVLHQDWLNGKEYKCKVSNKALPAPIEKTISKAKGQPREPQVYTLPPSREEMTKNQVSLTCLVKGFYPSDIAVEWESNGQPENNYKTTPPVLDSDGSFFLYSKLTVDKSRWQQGNVFSCSVMHEALHNHYTQKSLSLSPGK

SEQ ID NO: 12116 - protein, 122 aa, Artificial Sequence; identical to SEQ ID NO: 6714
  Description of Artificial Sequence: Synthetic polypeptide
  VH of XENP018137

SEQ ID NO: 12117 - protein, 5 aa, Artificial Sequence
  Description of Artificial Sequence: Synthetic peptide
  XENP018137 vhCDR1
NYDMN

SEQ ID NO: 12118 - protein, 19 aa, Artificial Sequence
  Description of Artificial Sequence: Synthetic peptide
  XENP018137 vhCDR2
EIRLKSNNYATHYAEPVKG

SEQ ID NO: 12119 - protein, 11 aa, Artificial Sequence
  Description of Artificial Sequence: Synthetic peptide
  XENP018137 vhCDR3
YYGNYGGYFDV

SEQ ID NO: 12120 - protein, 214 aa, Artificial Sequence; identical to SEQ ID NO: 11550
  Description of Artificial Sequence: Synthetic polypeptide
  XENP018137 1G6_H1.40_L1_IgG1_PVA_/S267K Light Chain

SEQ ID NO: 12121 - protein, 107 aa, Artificial Sequence; identical to SEQ ID NO: 6247
  Description of Artificial Sequence: Synthetic polypeptide
  VL of XENP018137

SEQ ID NO: 12122 - protein, 11 aa, Artificial Sequence
  Description of Artificial Sequence: Synthetic peptide
  XENP018137 vlCDR1
RASQSVSNDVA

SEQ ID NO: 12123 - protein, 7 aa, Artificial Sequence
  Description of Artificial Sequence: Synthetic peptide
  XENP018137 vlCDR2
YASHRYT

SEQ ID NO: 12124 - protein, 9 aa, Artificial Sequence
  Description of Artificial Sequence: Synthetic peptide
  XENP018137 vlCDR3
QQDYSSPRT

SEQ ID NO: 12125 - protein, 451 aa, Artificial Sequence
  Description of Artificial Sequence: Synthetic polypeptide
  XENP018138 1G6_H1.41_L1_IgG1_PVA_/S267K Heavy Chain
EVQLVESGGGLVKPGGSLRLSCAASGFTFSNYWMSWVRQAPGKGLEWVGEIRLKSNNYATHYAEPVKGRFTISRDDSKSTVYLQMNSLKTEDTAVYYCTRYYGNYGGYFDVWGAGTLVTVSSASTKGPSVFPLAPSSKSTSGGTAALGCLVKDYFPEPVTVSWNSGALTSGVHTFPAVLQSSGLYSLSSVVTVPSSSLGTQTYICNVNHKPSNTKVDKKVEPKSCDKTHTCPPCPAPPVAGPSVFLFPPKPKDTLMISRTPEVTCVVVDVKHEDPEVKFNWYVDGVEVHNAKTKPREEQYNSTYRVVSVLTVLHQDWLNGKEYKCKVSNKALPAPIEKTISKAKGQPREPQVYTLPPSREEMTKNQVSLTCLVKGFYPSDIAVEWESNGQPENNYKTTPPVLDSDGSFFLYSKLTVDKSRWQQGNVFSCSVMHEALHNHYTQKSLSLSPGK

SEQ ID NO: 12126 - protein, 122 aa, Artificial Sequence; identical to SEQ ID NO: 6723
  Description of Artificial Sequence: Synthetic polypeptide
  VH of XENP018138

SEQ ID NO: 12127 - protein, 5 aa, Artificial Sequence
  Description of Artificial Sequence: Synthetic peptide
  XENP018138 vhCDR1
NYWMS

SEQ ID NO: 12128 - protein, 19 aa, Artificial Sequence
  Description of Artificial Sequence: Synthetic peptide
  XENP018138 vhCDR2
EIRLKSNNYATHYAEPVKG

SEQ ID NO: 12129 - protein, 11 aa, Artificial Sequence
  Description of Artificial Sequence: Synthetic peptide
  XENP018138 vhCDR3
YYGNYGGYFDV

SEQ ID NO: 12130 - protein, 214 aa, Artificial Sequence; identical to SEQ ID NO: 11550
  Description of Artificial Sequence: Synthetic polypeptide
  XENP018138 1G6_H1.41_L1_IgG1_PVA_/S267K Light Chain

SEQ ID NO: 12131 - protein, 107 aa, Artificial Sequence; identical to SEQ ID NO: 6247
  Description of Artificial Sequence: Synthetic polypeptide
  VL of XENP018138

SEQ ID NO: 12132 - protein, 11 aa, Artificial Sequence
  Description of Artificial Sequence: Synthetic peptide
  XENP018138 vlCDR1
RASQSVSNDVA

SEQ ID NO: 12133 - protein, 7 aa, Artificial Sequence
  Description of Artificial Sequence: Synthetic peptide
  XENP018138 vlCDR2
YASHRYT

SEQ ID NO: 12134 - protein, 9 aa, Artificial Sequence
  Description of Artificial Sequence: Synthetic peptide
  XENP018138 vlCDR3
QQDYSSPRT

SEQ ID NO: 12135 - protein, 451 aa, Artificial Sequence
  Description of Artificial Sequence: Synthetic polypeptide
  XENP018139 1G6_H1.42_L1_IgG1_PVA_/S267K Heavy Chain
EVQLVESGGGLVKPGGSLRLSCAASGFTFSNYWMHWVRQAPGKGLEWVGEIRLKSNNYATHYAEPVKGRFTISRDDSKSTVYLQMNSLKTEDTAVYYCTRYYGNYGGYFDVWGAGTLVTVSSASTKGPSVFPLAPSSKSTSGGTAALGCLVKDYFPEPVTVSWNSGALTSGVHTFPAVLQSSGLYSLSSVVTVPSSSLGTQTYICNVNHKPSNTKVDKKVEPKSCDKTHTCPPCPAPPVAGPSVFLFPPKPKDTLMISRTPEVTCVVVDVKHEDPEVKFNWYVDGVEVHNAKTKPREEQYNSTYRVVSVLTVLHQDWLNGKEYKCKVSNKALPAPIEKTISKAKGQPREPQVYTLPPSREEMTKNQVSLTCLVKGFYPSDIAVEWESNGQPENNYKTTPPVLDSDGSFFLYSKLTVDKSRWQQGNVFSCSVMHEALHNHYTQKSLSLSPGK

SEQ ID NO: 12136 - protein, 122 aa, Artificial Sequence; identical to SEQ ID NO: 6732
  Description of Artificial Sequence: Synthetic polypeptide
  VH of XENP018139

SEQ ID NO: 12137 - protein, 5 aa, Artificial Sequence
  Description of Artificial Sequence: Synthetic peptide
  XENP018139 vhCDR1
NYWMH

SEQ ID NO: 12138 - protein, 19 aa, Artificial Sequence
  Description of Artificial Sequence: Synthetic peptide
  XENP018139 vhCDR2
EIRLKSNNYATHYAEPVKG

SEQ ID NO: 12139 - protein, 11 aa, Artificial Sequence
  Description of Artificial Sequence: Synthetic peptide
  XENP018139 vhCDR3
YYGNYGGYFDV

SEQ ID NO: 12140 - protein, 214 aa, Artificial Sequence; identical to SEQ ID NO: 11550
  Description of Artificial Sequence: Synthetic polypeptide
  XENP018139 1G6_H1.42_L1_IgG1_PVA_/S267K Light Chain

SEQ ID NO: 12141 - protein, 107 aa, Artificial Sequence; identical to SEQ ID NO: 6247
  Description of Artificial Sequence: Synthetic polypeptide
  VL of XENP018139

SEQ ID NO: 12142 - protein, 11 aa, Artificial Sequence
  Description of Artificial Sequence: Synthetic peptide
  XENP018139 vlCDR1
RASQSVSNDVA

SEQ ID NO: 12143 - protein, 7 aa, Artificial Sequence
  Description of Artificial Sequence: Synthetic peptide
  XENP018139 vlCDR2
YASHRYT

SEQ ID NO: 12144 - protein, 9 aa, Artificial Sequence
  Description of Artificial Sequence: Synthetic peptide
  XENP018139 vlCDR3
QQDYSSPRT

SEQ ID NO: 12145 - protein, 451 aa, Artificial Sequence
  Description of Artificial Sequence: Synthetic polypeptide
  XENP018140 1G6_H1.43_L1_IgG1_PVA_/S267K Heavy Chain
EVQLVESGGGLVKPGGSLRLSCAASGFTFSNYWMDWVRQAPGKGLEWVGEIRLKSNNYATHYAEPVKGRFTISRDDSKSTVYLQMNSLKTEDTAVYYCTRYYGNYGGYFDVWGAGTLVTVSSASTKGPSVFPLAPSSKSTSGGTAALGCLVKDYFPEPVTVSWNSGALTSGVHTFPAVLQSSGLYSLSSVVTVPSSSLGTQTYICNVNHKPSNTKVDKKVEPKSCDKTHTCPPCPAPPVAGPSVFLFPPKPKDTLMISRTPEVTCVVVDVKHEDPEVKFNWYVDGVEVHNAKTKPREEQYNSTYRVVSVLTVLHQDWLNGKEYKCKVSNKALPAPIEKTISKAKGQPREPQVYTLPPSREEMTKNQVSLTCLVKGFYPSDIAVEWESNGQPENNYKTTPPVLDSDGSFFLYSKLTVDKSRWQQGNVFSCSVMHEALHNHYTQKSLSLSPGK

SEQ ID NO: 12146 - protein, 122 aa, Artificial Sequence; identical to SEQ ID NO: 6741
  Description of Artificial Sequence: Synthetic polypeptide
  VH of XENP018140

SEQ ID NO: 12147 - protein, 5 aa, Artificial Sequence
  Description of Artificial Sequence: Synthetic peptide
  XENP018140 vhCDR1
NYWMD

SEQ ID NO: 12148 - protein, 19 aa, Artificial Sequence
  Description of Artificial Sequence: Synthetic peptide
  XENP018140 vhCDR2
EIRLKSNNYATHYAEPVKG

SEQ ID NO: 12149 - protein, 11 aa, Artificial Sequence
  Description of Artificial Sequence: Synthetic peptide
  XENP018140 vhCDR3
YYGNYGGYFDV

SEQ ID NO: 12150 - protein, 214 aa, Artificial Sequence; identical to SEQ ID NO: 11550
  Description of Artificial Sequence: Synthetic polypeptide
  XENP018140 1G6_H1.43_L1_IgG1_PVA_/S267K Light Chain

SEQ ID NO: 12151 - protein, 107 aa, Artificial Sequence; identical to SEQ ID NO: 6247
  Description of Artificial Sequence: Synthetic polypeptide
  VL of XENP018140

SEQ ID NO: 12152 - protein, 11 aa, Artificial Sequence
  Description of Artificial Sequence: Synthetic peptide
  XENP018140 vlCDR1
RASQSVSNDVA

SEQ ID NO: 12153 - protein, 7 aa, Artificial Sequence
  Description of Artificial Sequence: Synthetic peptide
  XENP018140 vlCDR2
YASHRYT

SEQ ID NO: 12154 - protein, 9 aa, Artificial Sequence
  Description of Artificial Sequence: Synthetic peptide
  XENP018140 vlCDR3
QQDYSSPRT

SEQ ID NO: 12155 - protein, 451 aa, Artificial Sequence
  Description of Artificial Sequence: Synthetic polypeptide
  XENP018141 1G6_H1.44_L1_IgG1_PVA_/S267K Heavy Chain
EVQLVESGGGLVKPGGSLRLSCAASGFTFSNYWMGWVRQAPGKGLEWVGEIRLKSNNYATHYAEPVKGRFTISRDDSKSTVYLQMNSLKTEDTAVYYCTRYYGNYGGYFDVWGAGTLVTVSSASTKGPSVFPLAPSSKSTSGGTAALGCLVKDYFPEPVTVSWNSGALTSGVHTFPAVLQSSGLYSLSSVVTVPSSSLGTQTYICNVNHKPSNTKVDKKVEPKSCDKTHTCPPCPAPPVAGPSVFLFPPKPKDTLMISRTPEVTCVVVDVKHEDPEVKFNWYVDGVEVHNAKTKPREEQYNSTYRVVSVLTVLHQDWLNGKEYKCKVSNKALPAPIEKTISKAKGQPREPQVYTLPPSREEMTKNQVSLTCLVKGFYPSDIAVEWESNGQPENNYKTTPPVLDSDGSFFLYSKLTVDKSRWQQGNVFSCSVMHEALHNHYTQKSLSLSPGK

SEQ ID NO: 12156 - protein, 122 aa, Artificial Sequence; identical to SEQ ID NO: 6750
  Description of Artificial Sequence: Synthetic polypeptide
  VH of XENP018141

SEQ ID NO: 12157 - protein, 5 aa, Artificial Sequence
  Description of Artificial Sequence: Synthetic peptide
  XENP018141 vhCDR1
NYWMG

SEQ ID NO: 12158 - protein, 18 aa, Artificial Sequence
  Description of Artificial Sequence: Synthetic peptide
  XENP018141 vhCDR2
EIRLKSNNYATHYAEPVK

SEQ ID NO: 12159 - protein, 11 aa, Artificial Sequence
  Description of Artificial Sequence: Synthetic peptide
  XENP018141 vhCDR3
YYGNYGGYFDV

SEQ ID NO: 12160 - protein, 214 aa, Artificial Sequence; identical to SEQ ID NO: 11550
  Description of Artificial Sequence: Synthetic polypeptide
  XENP018141 1G6_H1.44_L1_IgG1_PVA_/S267K Light Chain

SEQ ID NO: 12161 - protein, 107 aa, Artificial Sequence; identical to SEQ ID NO: 6247
  Description of Artificial Sequence: Synthetic polypeptide
  VL of XENP018141

SEQ ID NO: 12162 - protein, 11 aa, Artificial Sequence
  Description of Artificial Sequence: Synthetic peptide
  XENP018141 vlCDR1
RASQSVSNDVA

SEQ ID NO: 12163 - protein, 7 aa, Artificial Sequence
  Description of Artificial Sequence: Synthetic peptide
  XENP018141 vlCDR2
YASHRYT

SEQ ID NO: 12164 - protein, 9 aa, Artificial Sequence
  Description of Artificial Sequence: Synthetic peptide
  XENP018141 vlCDR3
QQDYSSPRT

SEQ ID NO: 12165 - protein, 451 aa, Artificial Sequence
  Description of Artificial Sequence: Synthetic polypeptide
  XENP018142 1G6_H1.45_L1_IgG1_PVA_/S267K Heavy Chain
EVQLVESGGGLVKPGGSLRLSCAASGFTFSNYWMNWARQAPGKGLEWVGEIRLKSNNYATHYAEPVKGRFTISRDDSKSTVYLQMNSLKTEDTAVYYCTRYYGNYGGYFDVWGAGTLVTVSSASTKGPSVFPLAPSSKSTSGGTAALGCLVKDYFPEPVTVSWNSGALTSGVHTFPAVLQSSGLYSLSSVVTVPSSSLGTQTYICNVNHKPSNTKVDKKVEPKSCDKTHTCPPCPAPPVAGPSVFLFPPKPKDTLMISRTPEVTCVVVDVKHEDPEVKFNWYVDGVEVHNAKTKPREEQYNSTYRVVSVLTVLHQDWLNGKEYKCKVSNKALPAPIEKTISKAKGQPREPQVYTLPPSREEMTKNQVSLTCLVKGFYPSDIAVEWESNGQPENNYKTTPPVLDSDGSFFLYSKLTVDKSRWQQGNVFSCSVMHEALHNHYTQKSLSLSPGK

SEQ ID NO: 12166 - protein, 122 aa, Artificial Sequence; identical to SEQ ID NO: 6759
  Description of Artificial Sequence: Synthetic polypeptide
  VH of XENP018142

SEQ ID NO: 12167 - protein, 5 aa, Artificial Sequence
  Description of Artificial Sequence: Synthetic peptide
  XENP018142 vhCDR1
NYWMN

SEQ ID NO: 12168 - protein, 19 aa, Artificial Sequence
  Description of Artificial Sequence: Synthetic peptide
  XENP018142 vhCDR2
EIRLKSNNYATHYAEPVKG

SEQ ID NO: 12169 - protein, 11 aa, Artificial Sequence
  Description of Artificial Sequence: Synthetic peptide
  XENP018142 vhCDR3
YYGNYGGYFDV

SEQ ID NO: 12170 - protein, 214 aa, Artificial Sequence; identical to SEQ ID NO: 11550
  Description of Artificial Sequence: Synthetic polypeptide
  XENP018142 1G6_H1.45_L1_IgG1_PVA_/S267K Light Chain

SEQ ID NO: 12171 - protein, 107 aa, Artificial Sequence; identical to SEQ ID NO: 6247
  Description of Artificial Sequence: Synthetic polypeptide
  VL of XENP018142

SEQ ID NO: 12172 - protein, 11 aa, Artificial Sequence
  Description of Artificial Sequence: Synthetic peptide
  XENP018142 vlCDR1
RASQSVSNDVA

SEQ ID NO: 12173 - protein, 7 aa, Artificial Sequence
  Description of Artificial Sequence: Synthetic peptide
  XENP018142 vlCDR2
YASHRYT

SEQ ID NO: 12174 - protein, 9 aa, Artificial Sequence
  Description of Artificial Sequence: Synthetic peptide
  XENP018142 vlCDR3
QQDYSSPRT

SEQ ID NO: 12175 - protein, 451 aa, Artificial Sequence
  Description of Artificial Sequence: Synthetic polypeptide
  XENP018143 1G6_H1.46_L1_IgG1_PVA_/S267K Heavy Chain
EVQLVESGGGLVKPGGSLRLSCAASGFTFSNYWMNWIRQAPGKGLEWVGEIRLKSNNYATHYAEPVKGRFTISRDDSKSTVYLQMNSLKTEDTAVYYCTRYYGNYGGYFDVWGAGTLVTVSSASTKGPSVFPLAPSSKSTSGGTAALGCLVKDYFPEPVTVSWNSGALTSGVHTFPAVLQSSGLYSLSSVVTVPSSSLGTQTYICNVNHKPSNTKVDKKVEPKSCDKTHTCPPCPAPPVAGPSVFLFPPKPKDTLMISRTPEVTCVVVDVKHEDPEVKFNWYVDGVEVHNAKTKPREEQYNSTYRVVSVLTVLHQDWLNGKEYKCKVSNKALPAPIEKTISKAKGQPREPQVYTLPPSREEMTKNQVSLTCLVKGFYPSDIAVEWESNGQPENNYKTTPPVLDSDGSFFLYSKLTVDKSRWQQGNVFSCSVMHEALHNHYTQKSLSLSPGK

SEQ ID NO: 12176 - protein, 122 aa, Artificial Sequence; identical to SEQ ID NO: 6768
  Description of Artificial Sequence: Synthetic polypeptide
  VH of XENP018143

SEQ ID NO: 12177 - protein, 5 aa, Artificial Sequence
  Description of Artificial Sequence: Synthetic peptide
  XENP018143 vhCDR1
NYWMN

SEQ ID NO: 12178 - protein, 19 aa, Artificial Sequence
  Description of Artificial Sequence: Synthetic peptide
  XENP018143 vhCDR2
EIRLKSNNYATHYAEPVKG

SEQ ID NO: 12179 - protein, 11 aa, Artificial Sequence
  Description of Artificial Sequence: Synthetic peptide
  XENP018143 vhCDR3
YYGNYGGYFDV

SEQ ID NO: 12180 - protein, 214 aa, Artificial Sequence; identical to SEQ ID NO: 11550
  Description of Artificial Sequence: Synthetic polypeptide
  XENP018143 1G6_H1.46_L1_IgG1_PVA_/S267K Light Chain

SEQ ID NO: 12181 - protein, 107 aa, Artificial Sequence; identical to SEQ ID NO: 6247
  Description of Artificial Sequence: Synthetic polypeptide
  VL of XENP018143

SEQ ID NO: 12182 - protein, 11 aa, Artificial Sequence
  Description of Artificial Sequence: Synthetic peptide
  XENP018143 vlCDR1
RASQSVSNDVA

SEQ ID NO: 12183 - protein, 7 aa, Artificial Sequence
  Description of Artificial Sequence: Synthetic peptide
  XENP018143 vlCDR2
YASHRYT

SEQ ID NO: 12184 - protein, 9 aa, Artificial Sequence
  Description of Artificial Sequence: Synthetic peptide
  XENP018143 vlCDR3
QQDYSSPRT

SEQ ID NO: 12185 - protein, 451 aa, Artificial Sequence
  Description of Artificial Sequence: Synthetic polypeptide
  XENP018144 1G6_H1.47_L1_IgG1_PVA_/S267K Heavy Chain
EVQLVESGGGLVKPGGSLRLSCAASGFTFSNYWMNWFRQAPGKGLEWVGEIRLKSNNYATHYAEPVKGRFTISRDDSKSTVYLQMNSLKTEDTAVYYCTRYYGNYGGYFDVWGAGTLVTVSSASTKGPSVFPLAPSSKSTSGGTAALGCLVKDYFPEPVTVSWNSGALTSGVHTFPAVLQSSGLYSLSSVVTVPSSSLGTQTYICNVNHKPSNTKVDKKVEPKSCDKTHTCPPCPAPPVAGPSVFLFPPKPKDTLMISRTPEVTCVVVDVKHEDPEVKFNWYVDGVEVHNAKTKPREEQYNSTYRVVSVLTVLHQDWLNGKEYKCKVSNKALPAPIEKTISKAKGQPREPQVYTLPPSREEMTKNQVSLTCLVKGFYPSDIAVEWESNGQPENNYKTTPPVLDSDGSFFLYSKLTVDKSRWQQGNVFSCSVMHEALHNHYTQKSLSLSPGK

SEQ ID NO: 12186 - protein, 122 aa, Artificial Sequence; identical to SEQ ID NO: 6777
  Description of Artificial Sequence: Synthetic polypeptide
  VH of XENP018144

SEQ ID NO: 12187 - protein, 5 aa, Artificial Sequence
  Description of Artificial Sequence: Synthetic peptide
  XENP018144 vhCDR1
NYWMN

SEQ ID NO: 12188 - protein, 19 aa, Artificial Sequence
  Description of Artificial Sequence: Synthetic peptide
  XENP018144 vhCDR2
EIRLKSNNYATHYAEPVKG

SEQ ID NO: 12189 - protein, 11 aa, Artificial Sequence
  Description of Artificial Sequence: Synthetic peptide
  XENP018144 vhCDR3
YYGNYGGYFDV

SEQ ID NO: 12190 - protein, 214 aa, Artificial Sequence; identical to SEQ ID NO: 11550
  Description of Artificial Sequence: Synthetic polypeptide
  XENP018144 1G6_H1.47_L1_IgG1_PVA_/S267K Light Chain

SEQ ID NO: 12191 - protein, 107 aa, Artificial Sequence; identical to SEQ ID NO: 6247
  Description of Artificial Sequence: Synthetic polypeptide
  VL of XENP018144

SEQ ID NO: 12192 - protein, 11 aa, Artificial Sequence
  Description of Artificial Sequence: Synthetic peptide
  XENP018144 vlCDR1
RASQSVSNDVA

SEQ ID NO: 12193 - protein, 7 aa, Artificial Sequence
  Description of Artificial Sequence: Synthetic peptide
  XENP018144 vlCDR2
YASHRYT

SEQ ID NO: 12194 - protein, 9 aa, Artificial Sequence
  Description of Artificial Sequence: Synthetic peptide
  XENP018144 vlCDR3
QQDYSSPRT

SEQ ID NO: 12195 - protein, 451 aa, Artificial Sequence
  Description of Artificial Sequence: Synthetic polypeptide
  XENP018145 1G6_H1.48_L1_IgG1_PVA_/S267K Heavy Chain
EVQLVESGGGLVKPGGSLRLSCAASGFTFSNYWMNWVRKAPGKGLEWVGEIRLKSNNYATHYAEPVKGRFTISRDDSKSTVYLQMNSLKTEDTAVYYCTRYYGNYGGYFDVWGAGTLVTVSSASTKGPSVFPLAPSSKSTSGGTAALGCLVKDYFPEPVTVSWNSGALTSGVHTFPAVLQSSGLYSLSSVVTVPSSSLGTQTYICNVNHKPSNTKVDKKVEPKSCDKTHTCPPCPAPPVAGPSVFLFPPKPKDTLMISRTPEVTCVVVDVKHEDPEVKFNWYVDGVEVHNAKTKPREEQYNSTYRVVSVLTVLHQDWLNGKEYKCKVSNKALPAPIEKTISKAKGQPREPQVYTLPPSREEMTKNQVSLTCLVKGFYPSDIAVEWESNGQPENNYKTTPPVLDSDGSFFLYSKLTVDKSRWQQGNVFSCSVMHEALHNHYTQKSLSLSPGK

SEQ ID NO: 12196 - protein, 122 aa, Artificial Sequence; identical to SEQ ID NO: 6786
  Description of Artificial Sequence: Synthetic polypeptide
  VH of XENP018145

SEQ ID NO: 12197 - protein, 5 aa, Artificial Sequence
  Description of Artificial Sequence: Synthetic peptide
  XENP018145 vhCDR1
NYWMN

SEQ ID NO: 12198 - protein, 19 aa, Artificial Sequence
  Description of Artificial Sequence: Synthetic peptide
  XENP018145 vhCDR2
EIRLKSNNYATHYAEPVKG

SEQ ID NO: 12199 - protein, 11 aa, Artificial Sequence
  Description of Artificial Sequence: Synthetic peptide
  XENP018145 vhCDR3
YYGNYGGYFDV

SEQ ID NO: 12200 - protein, 214 aa, Artificial Sequence; identical to SEQ ID NO: 11550
  Description of Artificial Sequence: Synthetic polypeptide
  XENP018145 1G6_H1.48_L1_IgG1_PVA_/S267K Light Chain

SEQ ID NO: 12201 - protein, 107 aa, Artificial Sequence; identical to SEQ ID NO: 6247
  Description of Artificial Sequence: Synthetic polypeptide
  VL of XENP018145

SEQ ID NO: 12202 - protein, 11 aa, Artificial Sequence
  Description of Artificial Sequence: Synthetic peptide
  XENP018145 vlCDR1
RASQSVSNDVA

SEQ ID NO: 12203 - protein, 7 aa, Artificial Sequence
  Description of Artificial Sequence: Synthetic peptide
  XENP018145 vlCDR2
YASHRYT

SEQ ID NO: 12204 - protein, 9 aa, Artificial Sequence
  Description of Artificial Sequence: Synthetic peptide
  XENP018145 vlCDR3
QQDYSSPRT

SEQ ID NO: 12205 - protein, 451 aa, Artificial Sequence
  Description of Artificial Sequence: Synthetic polypeptide
  XENP018146 1G6_H1.49_L1_IgG1_PVA_/S267K Heavy Chain
EVQLVESGGGLVKPGGSLRLSCAASGFTFSNYWMNWVRQSPGKGLEWVGEIRLKSNNYATHYAEPVKGRFTISRDDSKSTVYLQMNSLKTEDTAVYYCTRYYGNYGGYFDVWGAGTLVTVSSASTKGPSVFPLAPSSKSTSGGTAALGCLVKDYFPEPVTVSWNSGALTSGVHTFPAVLQSSGLYSLSSVVTVPSSSLGTQTYICNVNHKPSNTKVDKKVEPKSCDKTHTCPPCPAPPVAGPSVFLFPPKPKDTLMISRTPEVTCVVVDVKHEDPEVKFNWYVDGVEVHNAKTKPREEQYNSTYRVVSVLTVLHQDWLNGKEYKCKVSNKALPAPIEKTISKAKGQPREPQVYTLPPSREEMTKNQVSLTCLVKGFYPSDIAVEWESNGQPENNYKTTPPVLDSDGSFFLYSKLTVDKSRWQQGNVFSCSVMHEALHNHYTQKSLSLSPGK

SEQ ID NO: 12206 - protein, 122 aa, Artificial Sequence; identical to SEQ ID NO: 6792
  Description of Artificial Sequence: Synthetic polypeptide
  VH of XENP018146

SEQ ID NO: 12207 - protein, 5 aa, Artificial Sequence
  Description of Artificial Sequence: Synthetic peptide
  XENP018146 vhCDR1
NYWMN

SEQ ID NO: 12208 - protein, 19 aa, Artificial Sequence
  Description of Artificial Sequence: Synthetic peptide
  XENP018146 vhCDR2
EIRLKSNNYATHYAEPVKG

SEQ ID NO: 12209 - protein, 11 aa, Artificial Sequence
  Description of Artificial Sequence: Synthetic peptide
  XENP018146 vhCDR3
YYGNYGGYFDV

SEQ ID NO: 12210 - protein, 214 aa, Artificial Sequence; identical to SEQ ID NO: 11550
  Description of Artificial Sequence: Synthetic polypeptide
  XENP018146 1G6_H1.49_L1_IgG1_PVA_/S267K Light Chain

SEQ ID NO: 12211 - protein, 107 aa, Artificial Sequence; identical to SEQ ID NO: 6247
  Description of Artificial Sequence: Synthetic polypeptide
  VL of XENP018146

SEQ ID NO: 12212 - protein, 11 aa, Artificial Sequence
  Description of Artificial Sequence: Synthetic peptide
  XENP018146 vlCDR1
RASQSVSNDVA

SEQ ID NO: 12213 - protein, 7 aa, Artificial Sequence
  Description of Artificial Sequence: Synthetic peptide
  XENP018146 vlCDR2
YASHRYT

SEQ ID NO: 12214 - protein, 9 aa, Artificial Sequence
  Description of Artificial Sequence: Synthetic peptide
  XENP018146 vlCDR3
QQDYSSPRT

SEQ ID NO: 12215 - protein, 451 aa, Artificial Sequence
  Description of Artificial Sequence: Synthetic polypeptide
  XENP018147 1G6_H1.50_L1_IgG1_PVA_/S267K Heavy Chain
EVQLVESGGGLVKPGGSLRLSCAASGFTFSNYWMNWVRQAPEKGLEWVGEIRLKSNNYATHYAEPVKGRFTISRDDSKSTVYLQMNSLKTEDTAVYYCTRYYGNYGGYFDVWGAGTLVTVSSASTKGPSVFPLAPSSKSTSGGTAALGCLVKDYFPEPVTVSWNSGALTSGVHTFPAVLQSSGLYSLSSVVTVPSSSLGTQTYICNVNHKPSNTKVDKKVEPKSCDKTHTCPPCPAPPVAGPSVFLFPPKPKDTLMISRTPEVTCVVVDVKHEDPEVKFNWYVDGVEVHNAKTKPREEQYNSTYRVVSVLTVLHQDWLNGKEYKCKVSNKALPAPIEKTISKAKGQPREPQVYTLPPSREEMTKNQVSLTCLVKGFYPSDIAVEWESNGQPENNYKTTPPVLDSDGSFFLYSKLTVDKSRWQQGNVFSCSVMHEALHNHYTQKSLSLSPGK

SEQ ID NO: 12216 - protein, 122 aa, Artificial Sequence; identical to SEQ ID NO: 6801
  Description of Artificial Sequence: Synthetic polypeptide
  VH of XENP018147

SEQ ID NO: 12217 - protein, 5 aa, Artificial Sequence
  Description of Artificial Sequence: Synthetic peptide
  XENP018147 vhCDR1
NYWMN

SEQ ID NO: 12218 - protein, 19 aa, Artificial Sequence
  Description of Artificial Sequence: Synthetic peptide
  XENP018147 vhCDR2
EIRLKSNNYATHYAEPVKG

SEQ ID NO: 12219 - protein, 11 aa, Artificial Sequence
  Description of Artificial Sequence: Synthetic peptide
  XENP018147 vhCDR3
YYGNYGGYFDV

SEQ ID NO: 12220 - protein, 214 aa, Artificial Sequence; identical to SEQ ID NO: 11550
  Description of Artificial Sequence: Synthetic polypeptide
  XENP018147 1G6_H1.50_L1_IgG1_PVA_/S267K Light Chain

SEQ ID NO: 12221 - protein, 107 aa, Artificial Sequence; identical to SEQ ID NO: 6247
  Description of Artificial Sequence: Synthetic polypeptide
  VL of XENP018147

SEQ ID NO: 12222 - protein, 11 aa, Artificial Sequence
  Description of Artificial Sequence: Synthetic peptide
  XENP018147 vlCDR1
RASQSVSNDVA

SEQ ID NO: 12223 - protein, 7 aa, Artificial Sequence
  Description of Artificial Sequence: Synthetic peptide
  XENP018147 vlCDR2
YASHRYT

SEQ ID NO: 12224 - protein, 9 aa, Artificial Sequence
  Description of Artificial Sequence: Synthetic peptide
  XENP018147 vlCDR3
QQDYSSPRT

SEQ ID NO: 12225 - protein, 451 aa, Artificial Sequence
  Description of Artificial Sequence: Synthetic polypeptide
  XENP018148 1G6_H1.51_L1_IgG1_PVA_/S267K Heavy Chain
EVQLVESGGGLVKPGGSLRLSCAASGFTFSNYWMNWVRQAPGKGLEYVGEIRLKSNNYATHYAEPVKGRFTISRDDSKSTVYLQMNSLKTEDTAVYYCTRYYGNYGGYFDVWGAGTLVTVSSASTKGPSVFPLAPSSKSTSGGTAALGCLVKDYFPEPVTVSWNSGALTSGVHTFPAVLQSSGLYSLSSVVTVPSSSLGTQTYICNVNHKPSNTKVDKKVEPKSCDKTHTCPPCPAPPVAGPSVFLFPPKPKDTLMISRTPEVTCVVVDVKHEDPEVKFNWYVDGVEVHNAKTKPREEQYNSTYRVVSVLTVLHQDWLNGKEYKCKVSNKALPAPIEKTISKAKGQPREPQVYTLPPSREEMTKNQVSLTCLVKGFYPSDIAVEWESNGQPENNYKTTPPVLDSDGSFFLYSKLTVDKSRWQQGNVFSCSVMHEALHNHYTQKSLSLSPGK

SEQ ID NO: 12226 - protein, 122 aa, Artificial Sequence; identical to SEQ ID NO: 6810
  Description of Artificial Sequence: Synthetic polypeptide
  VH of XENP018148

SEQ ID NO: 12227 - protein, 5 aa, Artificial Sequence
  Description of Artificial Sequence: Synthetic peptide
  XENP018148 vhCDR1
NYWMN

SEQ ID NO: 12228 - protein, 19 aa, Artificial Sequence
  Description of Artificial Sequence: Synthetic peptide
  XENP018148 vhCDR2
EIRLKSNNYATHYAEPVKG

SEQ ID NO: 12229 - protein, 11 aa, Artificial Sequence
  Description of Artificial Sequence: Synthetic peptide
  XENP018148 vhCDR3
YYGNYGGYFDV

SEQ ID NO: 12230 - protein, 214 aa, Artificial Sequence; identical to SEQ ID NO: 11550
  Description of Artificial Sequence: Synthetic polypeptide
  XENP018148 1G6_H1.51_L1_IgG1_PVA_/S267K Light Chain

SEQ ID NO: 12231 - protein, 107 aa, Artificial Sequence; identical to SEQ ID NO: 6247
  Description of Artificial Sequence: Synthetic polypeptide
  VL of XENP018148

SEQ ID NO: 12232 - protein, 11 aa, Artificial Sequence
  Description of Artificial Sequence: Synthetic peptide
  XENP018148 vlCDR1
RASQSVSNDVA

SEQ ID NO: 12233 - protein, 7 aa, Artificial Sequence
  Description of Artificial Sequence: Synthetic peptide
  XENP018148 vlCDR2
YASHRYT

SEQ ID NO: 12234 - protein, 9 aa, Artificial Sequence
  Description of Artificial Sequence: Synthetic peptide
  XENP018148 vlCDR3
QQDYSSPRT

SEQ ID NO: 12235 - protein, 451 aa, Artificial Sequence
  Description of Artificial Sequence: Synthetic polypeptide
  XENP018149 1G6_H1.52_L1_IgG1_PVA_/S267K Heavy Chain
EVQLVESGGGLVKPGGSLRLSCAASGFTFSNYWMNWVRQAPGKGLEWVAEIRLKSNNYATHYAEPVKGRFTISRDDSKSTVYLQMNSLKTEDTAVYYCTRYYGNYGGYFDVWGAGTLVTVSSASTKGPSVFPLAPSSKSTSGGTAALGCLVKDYFPEPVTVSWNSGALTSGVHTFPAVLQSSGLYSLSSVVTVPSSSLGTQTYICNVNHKPSNTKVDKKVEPKSCDKTHTCPPCPAPPVAGPSVFLFPPKPKDTLMISRTPEVTCVVVDVKHEDPEVKFNWYVDGVEVHNAKTKPREEQYNSTYRVVSVLTVLHQDWLNGKEYKCKVSNKALPAPIEKTISKAKGQPREPQVYTLPPSREEMTKNQVSLTCLVKGFYPSDIAVEWESNGQPENNYKTTPPVLDSDGSFFLYSKLTVDKSRWQQGNVFSCSVMHEALHNHYTQKSLSLSPGK

SEQ ID NO: 12236 - protein, 122 aa, Artificial Sequence; identical to SEQ ID NO: 6819
  Description of Artificial Sequence: Synthetic polypeptide
  VH of XENP018149

SEQ ID NO: 12237 - protein, 5 aa, Artificial Sequence
  Description of Artificial Sequence: Synthetic peptide
  XENP018149 vhCDR1
NYWMN

SEQ ID NO: 12238 - protein, 19 aa, Artificial Sequence
  Description of Artificial Sequence: Synthetic peptide
  XENP018149 vhCDR2
EIRLKSNNYATHYAEPVKG

SEQ ID NO: 12239 - protein, 11 aa, Artificial Sequence
  Description of Artificial Sequence: Synthetic peptide
  XENP018149 vhCDR3
YYGNYGGYFDV

SEQ ID NO: 12240 - protein, 214 aa, Artificial Sequence; identical to SEQ ID NO: 11550
  Description of Artificial Sequence: Synthetic polypeptide
  XENP018149 1G6_H1.52_L1_IgG1_PVA_/S267K Light Chain

SEQ ID NO: 12241 - protein, 107 aa, Artificial Sequence; identical to SEQ ID NO: 6247
  Description of Artificial Sequence: Synthetic polypeptide
  VL of XENP018149

SEQ ID NO: 12242 - protein, 11 aa, Artificial Sequence
  Description of Artificial Sequence: Synthetic peptide
  XENP018149 vlCDR1
RASQSVSNDVA

SEQ ID NO: 12243 - protein, 7 aa, Artificial Sequence
  Description of Artificial Sequence: Synthetic peptide
  XENP018149 vlCDR2
YASHRYT

SEQ ID NO: 12244 - protein, 9 aa, Artificial Sequence
  Description of Artificial Sequence: Synthetic peptide
  XENP018149 vlCDR3
QQDYSSPRT

SEQ ID NO: 12245 - protein, 451 aa, Artificial Sequence
  Description of Artificial Sequence: Synthetic polypeptide
  XENP018150 1G6_H1.53_L1_IgG1_PVA_/S267K Heavy Chain
EVQLVESGGGLVKPGGSLRLSCAASGFTFSNYWMNWVRQAPGKGLEWVSEIRLKSNNYATHYAEPVKGRFTISRDDSKSTVYLQMNSLKTEDTAVYYCTRYYGNYGGYFDVWGAGTLVTVSSASTKGPSVFPLAPSSKSTSGGTAALGCLVKDYFPEPVTVSWNSGALTSGVHTFPAVLQSSGLYSLSSVVTVPSSSLGTQTYICNVNHKPSNTKVDKKVEPKSCDKTHTCPPCPAPPVAGPSVFLFPPKPKDTLMISRTPEVTCVVVDVKHEDPEVKFNWYVDGVEVHNAKTKPREEQYNSTYRVVSVLTVLHQDWLNGKEYKCKVSNKALPAPIEKTISKAKGQPREPQVYTLPPSREEMTKNQVSLTCLVKGFYPSDIAVEWESNGQPENNYKTTPPVLDSDGSFFLYSKLTVDKSRWQQGNVFSCSVMHEALHNHYTQKSLSLSPGK

SEQ ID NO: 12246 - protein, 122 aa, Artificial Sequence; identical to SEQ ID NO: 6828
  Description of Artificial Sequence: Synthetic polypeptide
  VH of XENP018150

SEQ ID NO: 12247 - protein, 5 aa, Artificial Sequence
  Description of Artificial Sequence: Synthetic peptide
  XENP018150 vhCDR1
NYWMN

SEQ ID NO: 12248 - protein, 19 aa, Artificial Sequence
  Description of Artificial Sequence: Synthetic peptide
  XENP018150 vhCDR2
EIRLKSNNYATHYAEPVKG

SEQ ID NO: 12249 - protein, 11 aa, Artificial Sequence
  Description of Artificial Sequence: Synthetic peptide
  XENP018150 vhCDR3
YYGNYGGYFDV

SEQ ID NO: 12250 - protein, 214 aa, Artificial Sequence; identical to SEQ ID NO: 11550
  Description of Artificial Sequence: Synthetic polypeptide
  XENP018150 1G6_H1.53_L1_IgG1_PVA_/S267K Light Chain

SEQ ID NO: 12251 - protein, 107 aa, Artificial Sequence; identical to SEQ ID NO: 6247
  Description of Artificial Sequence: Synthetic polypeptide
  VL of XENP018150

SEQ ID NO: 12252 - protein, 11 aa, Artificial Sequence
  Description of Artificial Sequence: Synthetic peptide
  XENP018150 vlCDR1
RASQSVSNDVA

SEQ ID NO: 12253 - protein, 7 aa, Artificial Sequence
  Description of Artificial Sequence: Synthetic peptide
  XENP018150 vlCDR2
YASHRYT

SEQ ID NO: 12254 - protein, 9 aa, Artificial Sequence
  Description of Artificial Sequence: Synthetic peptide
  XENP018150 vlCDR3
QQDYSSPRT

SEQ ID NO: 12255 - protein, 451 aa, Artificial Sequence
  Description of Artificial Sequence: Synthetic polypeptide
  XENP018151 1G6_H1.54_L1_IgG1_PVA_/S267K Heavy Chain
EVQLVESGGGLVKPGGSLRLSCAASGFTFSNYWMNWVRQAPGKGLEWVGQIRLKSNNYATHYAEPVKGRFTISRDDSKSTVYLQMNSLKTEDTAVYYCTRYYGNYGGYFDVWGAGTLVTVSSASTKGPSVFPLAPSSKSTSGGTAALGCLVKDYFPEPVTVSWNSGALTSGVHTFPAVLQSSGLYSLSSVVTVPSSSLGTQTYICNVNHKPSNTKVDKKVEPKSCDKTHTCPPCPAPPVAGPSVFLFPPKPKDTLMISRTPEVTCVVVDVKHEDPEVKFNWYVDGVEVHNAKTKPREEQYNSTYRVVSVLTVLHQDWLNGKEYKCKVSNKALPAPIEKTISKAKGQPREPQVYTLPPSREEMTKNQVSLTCLVKGFYPSDIAVEWESNGQPENNYKTTPPVLDSDGSFFLYSKLTVDKSRWQQGNVFSCSVMHEALHNHYTQKSLSLSPGK

SEQ ID NO: 12256 - protein, 122 aa, Artificial Sequence; identical to SEQ ID NO: 6837
  Description of Artificial Sequence: Synthetic polypeptide
  VH of XENP018151

SEQ ID NO: 12257 - protein, 5 aa, Artificial Sequence
  Description of Artificial Sequence: Synthetic peptide
  XENP018151 vhCDR1
NYWMN

SEQ ID NO: 12258 - protein, 19 aa, Artificial Sequence
  Description of Artificial Sequence: Synthetic peptide
  XENP018151 vhCDR2
QIRLKSNNYATHYAEPVKG

SEQ ID NO: 12259 - protein, 11 aa, Artificial Sequence
  Description of Artificial Sequence: Synthetic peptide
  XENP018151 vhCDR3
YYGNYGGYFDV

SEQ ID NO: 12260 - protein, 214 aa, Artificial Sequence; identical to SEQ ID NO: 11550
  Description of Artificial Sequence: Synthetic polypeptide
  XENP018151 1G6_H1.54_L1_IgG1_PVA_/S267K Light Chain

SEQ ID NO: 12261 - protein, 107 aa, Artificial Sequence; identical to SEQ ID NO: 6247
  Description of Artificial Sequence: Synthetic polypeptide
  VL of XENP018151

SEQ ID NO: 12262 - protein, 11 aa, Artificial Sequence
  Description of Artificial Sequence: Synthetic peptide
  XENP018151 vlCDR1
RASQSVSNDVA

SEQ ID NO: 12263 - protein, 7 aa, Artificial Sequence
  Description of Artificial Sequence: Synthetic peptide
  XENP018151 vlCDR2
YASHRYT

SEQ ID NO: 12264 - protein, 9 aa, Artificial Sequence
  Description of Artificial Sequence: Synthetic peptide
  XENP018151 vlCDR3
QQDYSSPRT

SEQ ID NO: 12265 - protein, 451 aa, Artificial Sequence
  Description of Artificial Sequence: Synthetic polypeptide
  XENP018152 1G6_H1.55_L1_IgG1_PVA_/S267K Heavy Chain
EVQLVESGGGLVKPGGSLRLSCAASGFTFSNYWMNWVRQAPGKGLEWVGDIRLKSNNYATHYAEPVKGRFTISRDDSKSTVYLQMNSLKTEDTAVYYCTRYYGNYGGYFDVWGAGTLVTVSSASTKGPSVFPLAPSSKSTSGGTAALGCLVKDYFPEPVTVSWNSGALTSGVHTFPAVLQSSGLYSLSSVVTVPSSSLGTQTYICNVNHKPSNTKVDKKVEPKSCDKTHTCPPCPAPPVAGPSVFLFPPKPKDTLMISRTPEVTCVVVDVKHEDPEVKFNWYVDGVEVHNAKTKPREEQYNSTYRVVSVLTVLHQDWLNGKEYKCKVSNKALPAPIEKTISKAKGQPREPQVYTLPPSREEMTKNQVSLTCLVKGFYPSDIAVEWESNGQPENNYKTTPPVLDSDGSFFLYSKLTVDKSRWQQGNVFSCSVMHEALHNHYTQKSLSLSPGK

SEQ ID NO: 12266 - protein, 122 aa, Artificial Sequence; identical to SEQ ID NO: 6846
  Description of Artificial Sequence: Synthetic polypeptide
  VH of XENP018152

SEQ ID NO: 12267 - protein, 5 aa, Artificial Sequence
  Description of Artificial Sequence: Synthetic peptide
  XENP018152 vhCDR1
NYWMN

SEQ ID NO: 12268 - protein, 19 aa, Artificial Sequence
  Description of Artificial Sequence: Synthetic peptide
  XENP018152 vhCDR2
DIRLKSNNYATHYAEPVKG

SEQ ID NO: 12269 - protein, 11 aa, Artificial Sequence
  Description of Artificial Sequence: Synthetic peptide
  XENP018152 vhCDR3
YYGNYGGYFDV

SEQ ID NO: 12270 - protein, 214 aa, Artificial Sequence; identical to SEQ ID NO: 11550
  Description of Artificial Sequence: Synthetic polypeptide
  XENP018152 1G6_H1.55_L1_IgG1_PVA_/S267K Light Chain

SEQ ID NO: 12271 - protein, 107 aa, Artificial Sequence; identical to SEQ ID NO: 6247
  Description of Artificial Sequence: Synthetic polypeptide
  VL of XENP018152

SEQ ID NO: 12272 - protein, 11 aa, Artificial Sequence
  Description of Artificial Sequence: Synthetic peptide
  XENP018152 vlCDR1
RASQSVSNDVA

SEQ ID NO: 12273 - protein, 7 aa, Artificial Sequence
  Description of Artificial Sequence: Synthetic peptide
  XENP018152 vlCDR2
YASHRYT

SEQ ID NO: 12274 - protein, 9 aa, Artificial Sequence
  Description of Artificial Sequence: Synthetic peptide
  XENP018152 vlCDR3
QQDYSSPRT

SEQ ID NO: 12275 - protein, 451 aa, Artificial Sequence
  Description of Artificial Sequence: Synthetic polypeptide
  XENP018153 1G6_H1.56_L1_IgG1_PVA_/S267K Heavy Chain
EVQLVESGGGLVKPGGSLRLSCAASGFTFSNYWMNWVRQAPGKGLEWVGKIRLKSNNYATHYAEPVKGRFTISRDDSKSTVYLQMNSLKTEDTAVYYCTRYYGNYGGYFDVWGAGTLVTVSSASTKGPSVFPLAPSSKSTSGGTAALGCLVKDYFPEPVTVSWNSGALTSGVHTFPAVLQSSGLYSLSSVVTVPSSSLGTQTYICNVNHKPSNTKVDKKVEPKSCDKTHTCPPCPAPPVAGPSVFLFPPKPKDTLMISRTPEVTCVVVDVKHEDPEVKFNWYVDGVEVHNAKTKPREEQYNSTYRVVSVLTVLHQDWLNGKEYKCKVSNKALPAPIEKTISKAKGQPREPQVYTLPPSREEMTKNQVSLTCLVKGFYPSDIAVEWESNGQPENNYKTTPPVLDSDGSFFLYSKLTVDKSRWQQGNVFSCSVMHEALHNHYTQKSLSLSPGK

SEQ ID NO: 12276 - protein, 122 aa, Artificial Sequence; identical to SEQ ID NO: 6855
  Description of Artificial Sequence: Synthetic polypeptide
  VH of XENP018153

SEQ ID NO: 12277 - protein, 5 aa, Artificial Sequence
  Description of Artificial Sequence: Synthetic peptide
  XENP018153 vhCDR1
NYWMN

SEQ ID NO: 12278 - protein, 19 aa, Artificial Sequence
  Description of Artificial Sequence: Synthetic peptide
  XENP018153 vhCDR2
KIRLKSNNYATHYAEPVKG

SEQ ID NO: 12279 - protein, 11 aa, Artificial Sequence
  Description of Artificial Sequence: Synthetic peptide
  XENP018153 vhCDR3
YYGNYGGYFDV

SEQ ID NO: 12280 - protein, 214 aa, Artificial Sequence; identical to SEQ ID NO: 11550
  Description of Artificial Sequence: Synthetic polypeptide
  XENP018153 1G6_H1.56_L1_IgG1_PVA_/S267K Light Chain

SEQ ID NO: 12281 - protein, 107 aa, Artificial Sequence; identical to SEQ ID NO: 6247
  Description of Artificial Sequence: Synthetic polypeptide
  VL of XENP018153

SEQ ID NO: 12282 - protein, 11 aa, Artificial Sequence
  Description of Artificial Sequence: Synthetic peptide
  XENP018153 vlCDR1
RASQSVSNDVA

SEQ ID NO: 12283 - protein, 7 aa, Artificial Sequence
  Description of Artificial Sequence: Synthetic peptide
  XENP018153 vlCDR2
YASHRYT

SEQ ID NO: 12284 - protein, 9 aa, Artificial Sequence
  Description of Artificial Sequence: Synthetic peptide
  XENP018153 vlCDR3
QQDYSSPRT

SEQ ID NO: 12285 - protein, 451 aa, Artificial Sequence
  Description of Artificial Sequence: Synthetic polypeptide
  XENP018154 1G6_H1.57_L1_IgG1_PVA_/S267K Heavy Chain
EVQLVESGGGLVKPGGSLRLSCAASGFTFSNYWMNWVRQAPGKGLEWVGSIRLKSNNYATHYAEPVKGRFTISRDDSKSTVYLQMNSLKTEDTAVYYCTRYYGNYGGYFDVWGAGTLVTVSSASTKGPSVFPLAPSSKSTSGGTAALGCLVKDYFPEPVTVSWNSGALTSGVHTFPAVLQSSGLYSLSSVVTVPSSSLGTQTYICNVNHKPSNTKVDKKVEPKSCDKTHTCPPCPAPPVAGPSVFLFPPKPKDTLMISRTPEVTCVVVDVKHEDPEVKFNWYVDGVEVHNAKTKPREEQYNSTYRVVSVLTVLHQDWLNGKEYKCKVSNKALPAPIEKTISKAKGQPREPQVYTLPPSREEMTKNQVSLTCLVKGFYPSDIAVEWESNGQPENNYKTTPPVLDSDGSFFLYSKLTVDKSRWQQGNVFSCSVMHEALHNHYTQKSLSLSPGK

SEQ ID NO: 12286 - protein, 122 aa, Artificial Sequence; identical to SEQ ID NO: 6864
  Description of Artificial Sequence: Synthetic polypeptide
  VH of XENP018154

SEQ ID NO: 12287 - protein, 5 aa, Artificial Sequence
  Description of Artificial Sequence: Synthetic peptide
  XENP018154 vhCDR1
NYWMN

SEQ ID NO: 12288 - protein, 19 aa, Artificial Sequence
  Description of Artificial Sequence: Synthetic peptide
  XENP018154 vhCDR2
SIRLKSNNYATHYAEPVKG

SEQ ID NO: 12289 - protein, 11 aa, Artificial Sequence
  Description of Artificial Sequence: Synthetic peptide
  XENP018154 vhCDR3
YYGNYGGYFDV

SEQ ID NO: 12290 - protein, 214 aa, Artificial Sequence; identical to SEQ ID NO: 11550
  Description of Artificial Sequence: Synthetic polypeptide
  XENP018154 1G6_H1.57_L1_IgG1_PVA_/S267K Light Chain

SEQ ID NO: 12291 - protein, 107 aa, Artificial Sequence; identical to SEQ ID NO: 6247
  Description of Artificial Sequence: Synthetic polypeptide
  VL of XENP018154

SEQ ID NO: 12292 - protein, 11 aa, Artificial Sequence
  Description of Artificial Sequence: Synthetic peptide
  XENP018154 vlCDR1
RASQSVSNDVA

SEQ ID NO: 12293 - protein, 7 aa, Artificial Sequence
  Description of Artificial Sequence: Synthetic peptide
  XENP018154 vlCDR2
YASHRYT

SEQ ID NO: 12294 - protein, 9 aa, Artificial Sequence
  Description of Artificial Sequence: Synthetic peptide
  XENP018154 vlCDR3
QQDYSSPRT

SEQ ID NO: 12295 - protein, 451 aa, Artificial Sequence
  Description of Artificial Sequence: Synthetic polypeptide
  XENP018155 1G6_H1.58_L1_IgG1_PVA_/S267K Heavy Chain
EVQLVESGGGLVKPGGSLRLSCAASGFTFSNYWMNWVRQAPGKGLEWVGHIRLKSNNYATHYAEPVKGRFTISRDDSKSTVYLQMNSLKTEDTAVYYCTRYYGNYGGYFDVWGAGTLVTVSSASTKGPSVFPLAPSSKSTSGGTAALGCLVKDYFPEPVTVSWNSGALTSGVHTFPAVLQSSGLYSLSSVVTVPSSSLGTQTYICNVNHKPSNTKVDKKVEPKSCDKTHTCPPCPAPPVAGPSVFLFPPKPKDTLMISRTPEVTCVVVDVKHEDPEVKFNWYVDGVEVHNAKTKPREEQYNSTYRVVSVLTVLHQDWLNGKEYKCKVSNKALPAPIEKTISKAKGQPREPQVYTLPPSREEMTKNQVSLTCLVKGFYPSDIAVEWESNGQPENNYKTTPPVLDSDGSFFLYSKLTVDKSRWQQGNVFSCSVMHEALHNHYTQKSLSLSPGK

SEQ ID NO: 12296 - protein, 122 aa, Artificial Sequence; identical to SEQ ID NO: 6873
  Description of Artificial Sequence: Synthetic polypeptide
  VH of XENP018155

SEQ ID NO: 12297 - protein, 5 aa, Artificial Sequence
  Description of Artificial Sequence: Synthetic peptide
  XENP018155 vhCDR1
NYWMN

SEQ ID NO: 12298 - protein, 19 aa, Artificial Sequence
  Description of Artificial Sequence: Synthetic peptide
  XENP018155 vhCDR2
HIRLKSNNYATHYAEPVKG

SEQ ID NO: 12299 - protein, 11 aa, Artificial Sequence
  Description of Artificial Sequence: Synthetic peptide
  XENP018155 vhCDR3
YYGNYGGYFDV

SEQ ID NO: 12300 - protein, 214 aa, Artificial Sequence; identical to SEQ ID NO: 11550
  Description of Artificial Sequence: Synthetic polypeptide
  XENP018155 1G6_H1.58_L1_IgG1_PVA_/S267K Light Chain

SEQ ID NO: 12301 - protein, 107 aa, Artificial Sequence; identical to SEQ ID NO: 6247
  Description of Artificial Sequence: Synthetic polypeptide
  VL of XENP018155

SEQ ID NO: 12302 - protein, 11 aa, Artificial Sequence
  Description of Artificial Sequence: Synthetic peptide
  XENP018155 vlCDR1
RASQSVSNDVA

SEQ ID NO: 12303 - protein, 7 aa, Artificial Sequence
  Description of Artificial Sequence: Synthetic peptide
  XENP018155 vlCDR2
YASHRYT

SEQ ID NO: 12304 - protein, 9 aa, Artificial Sequence
  Description of Artificial Sequence: Synthetic peptide
  XENP018155 vlCDR3
QQDYSSPRT

SEQ ID NO: 12305 - protein, 451 aa, Artificial Sequence
  Description of Artificial Sequence: Synthetic polypeptide
  XENP018156 1G6_H1.59_L1_IgG1_PVA_/S267K Heavy Chain
EVQLVESGGGLVKPGGSLRLSCAASGFTFSNYWMNWVRQAPGKGLEWVGAIRLKSNNYATHYAEPVKGRFTISRDDSKSTVYLQMNSLKTEDTAVYYCTRYYGNYGGYFDVWGAGTLVTVSSASTKGPSVFPLAPSSKSTSGGTAALGCLVKDYFPEPVTVSWNSGALTSGVHTFPAVLQSSGLYSLSSVVTVPSSSLGTQTYICNVNHKPSNTKVDKKVEPKSCDKTHTCPPCPAPPVAGPSVFLFPPKPKDTLMISRTPEVTCVVVDVKHEDPEVKFNWYVDGVEVHNAKTKPREEQYNSTYRVVSVLTVLHQDWLNGKEYKCKVSNKALPAPIEKTISKAKGQPREPQVYTLPPSREEMTKNQVSLTCLVKGFYPSDIAVEWESNGQPENNYKTTPPVLDSDGSFFLYSKLTVDKSRWQQGNVFSCSVMHEALHNHYTQKSLSLSPGK

SEQ ID NO: 12306 - protein, 122 aa, Artificial Sequence; identical to SEQ ID NO: 6882
  Description of Artificial Sequence: Synthetic polypeptide
  VH of XENP018156

SEQ ID NO: 12307 - protein, 5 aa, Artificial Sequence
  Description of Artificial Sequence: Synthetic peptide
  XENP018156 vhCDR1
NYWMN

SEQ ID NO: 12308 - protein, 19 aa, Artificial Sequence
  Description of Artificial Sequence: Synthetic peptide
  XENP018156 vhCDR2
AIRLKSNNYATHYAEPVKG

SEQ ID NO: 12309 - protein, 11 aa, Artificial Sequence
  Description of Artificial Sequence: Synthetic peptide
  XENP018156 vhCDR3
YYGNYGGYFDV

SEQ ID NO: 12310 - protein, 214 aa, Artificial Sequence; identical to SEQ ID NO: 11550
  Description of Artificial Sequence: Synthetic polypeptide
  XENP018156 1G6_H1.59_L1_IgG1_PVA_/S267K Light Chain

SEQ ID NO: 12311 - protein, 107 aa, Artificial Sequence; identical to SEQ ID NO: 6247
  Description of Artificial Sequence: Synthetic polypeptide
  VL of XENP018156

SEQ ID NO: 12312 - protein, 11 aa, Artificial Sequence
  Description of Artificial Sequence: Synthetic peptide
  XENP018156 vlCDR1
RASQSVSNDVA

SEQ ID NO: 12313 - protein, 7 aa, Artificial Sequence
  Description of Artificial Sequence: Synthetic peptide
  XENP018156 vlCDR2
YASHRYT

SEQ ID NO: 12314 - protein, 9 aa, Artificial Sequence
  Description of Artificial Sequence: Synthetic peptide
  XENP018156 vlCDR3
QQDYSSPRT

SEQ ID NO: 12315 - protein, 451 aa, Artificial Sequence
  Description of Artificial Sequence: Synthetic polypeptide
  XENP018157 1G6_H1.60_L1_IgG1_PVA_/S267K Heavy Chain
EVQLVESGGGLVKPGGSLRLSCAASGFTFSNYWMNWVRQAPGKGLEWVGGIRLKSNNYATHYAEPVKGRFTISRDDSKSTVYLQMNSLKTEDTAVYYCTRYYGNYGGYFDVWGAGTLVTVSSASTKGPSVFPLAPSSKSTSGGTAALGCLVKDYFPEPVTVSWNSGALTSGVHTFPAVLQSSGLYSLSSVVTVPSSSLGTQTYICNVNHKPSNTKVDKKVEPKSCDKTHTCPPCPAPPVAGPSVFLFPPKPKDTLMISRTPEVTCVVVDVKHEDPEVKFNWYVDGVEVHNAKTKPREEQYNSTYRVVSVLTVLHQDWLNGKEYKCKVSNKALPAPIEKTISKAKGQPREPQVYTLPPSREEMTKNQVSLTCLVKGFYPSDIAVEWESNGQPENNYKTTPPVLDSDGSFFLYSKLTVDKSRWQQGNVFSCSVMHEALHNHYTQKSLSLSPGK

SEQ ID NO: 12316 - protein, 122 aa, Artificial Sequence; identical to SEQ ID NO: 6891
  Description of Artificial Sequence: Synthetic polypeptide
  VH of XENP018157

SEQ ID NO: 12317 - protein, 5 aa, Artificial Sequence
  Description of Artificial Sequence: Synthetic peptide
  XENP018157 vhCDR1
NYWMN

SEQ ID NO: 12318 - protein, 19 aa, Artificial Sequence
  Description of Artificial Sequence: Synthetic peptide
  XENP018157 vhCDR2
GIRLKSNNYATHYAEPVKG

SEQ ID NO: 12319 - protein, 11 aa, Artificial Sequence
  Description of Artificial Sequence: Synthetic peptide
  XENP018157 vhCDR3
YYGNYGGYFDV

SEQ ID NO: 12320 - protein, 214 aa, Artificial Sequence; identical to SEQ ID NO: 11550
  Description of Artificial Sequence: Synthetic polypeptide
  XENP018157 1G6_H1.60_L1_IgG1_PVA_/S267K Light Chain

SEQ ID NO: 12321 - protein, 107 aa, Artificial Sequence; identical to SEQ ID NO: 6247
  Description of Artificial Sequence: Synthetic polypeptide
  VL of XENP018157

SEQ ID NO: 12322 - protein, 11 aa, Artificial Sequence
  Description of Artificial Sequence: Synthetic peptide
  XENP018157 vlCDR1
RASQSVSNDVA

SEQ ID NO: 12323 - protein, 7 aa, Artificial Sequence
  Description of Artificial Sequence: Synthetic peptide
  XENP018157 vlCDR2
YASHRYT

SEQ ID NO: 12324 - protein, 9 aa, Artificial Sequence
  Description of Artificial Sequence: Synthetic peptide
  XENP018157 vlCDR3
QQDYSSPRT

SEQ ID NO: 12325 - protein, 451 aa, Artificial Sequence
  Description of Artificial Sequence: Synthetic polypeptide
  XENP018158 1G6_H1.61_L1_IgG1_PVA_/S267K Heavy Chain
EVQLVESGGGLVKPGGSLRLSCAASGFTFSNYWMNWVRQAPGKGLEWVGYIRLKSNNYATHYAEPVKGRFTISRDDSKSTVYLQMNSLKTEDTAVYYCTRYYGNYGGYFDVWGAGTLVTVSSASTKGPSVFPLAPSSKSTSGGTAALGCLVKDYFPEPVTVSWNSGALTSGVHTFPAVLQSSGLYSLSSVVTVPSSSLGTQTYICNVNHKPSNTKVDKKVEPKSCDKTHTCPPCPAPPVAGPSVFLFPPKPKDTLMISRTPEVTCVVVDVKHEDPEVKFNWYVDGVEVHNAKTKPREEQYNSTYRVVSVLTVLHQDWLNGKEYKCKVSNKALPAPIEKTISKAKGQPREPQVYTLPPSREEMTKNQVSLTCLVKGFYPSDIAVEWESNGQPENNYKTTPPVLDSDGSFFLYSKLTVDKSRWQQGNVFSCSVMHEALHNHYTQKSLSLSPGK

SEQ ID NO: 12326 - protein, 122 aa, Artificial Sequence; identical to SEQ ID NO: 6900
  Description of Artificial Sequence: Synthetic polypeptide
  VH of XENP018158

SEQ ID NO: 12327 - protein, 5 aa, Artificial Sequence
  Description of Artificial Sequence: Synthetic peptide
  XENP018158 vhCDR1
NYWMN

SEQ ID NO: 12328 - protein, 19 aa, Artificial Sequence
  Description of Artificial Sequence: Synthetic peptide
  XENP018158 vhCDR2
YIRLKSNNYATHYAEPVKG

SEQ ID NO: 12329 - protein, 11 aa, Artificial Sequence
  Description of Artificial Sequence: Synthetic peptide
  XENP018158 vhCDR3
YYGNYGGYFDV

SEQ ID NO: 12330 - protein, 214 aa, Artificial Sequence; identical to SEQ ID NO: 11550
  Description of Artificial Sequence: Synthetic polypeptide
  XENP018158 1G6_H1.61_L1_IgG1_PVA_/S267K Light Chain

SEQ ID NO: 12331 - protein, 107 aa, Artificial Sequence; identical to SEQ ID NO: 6247
  Description of Artificial Sequence: Synthetic polypeptide
  VL of XENP018158

SEQ ID NO: 12332 - protein, 11 aa, Artificial Sequence
  Description of Artificial Sequence: Synthetic peptide
  XENP018158 vlCDR1
RASQSVSNDVA

SEQ ID NO: 12333 - protein, 7 aa, Artificial Sequence
  Description of Artificial Sequence: Synthetic peptide
  XENP018158 vlCDR2
YASHRYT

SEQ ID NO: 12334 - protein, 9 aa, Artificial Sequence
  Description of Artificial Sequence: Synthetic peptide
  XENP018158 vlCDR3
QQDYSSPRT

SEQ ID NO: 12335 - protein, 451 aa, Artificial Sequence
  Description of Artificial Sequence: Synthetic polypeptide
  XENP018159 1G6_H1.62_L1_IgG1_PVA_/S267K Heavy Chain
EVQLVESGGGLVKPGGSLRLSCAASGFTFSNYWMNWVRQAPGKGLEWVGIIRLKSNNYATHYAEPVKGRFTISRDDSKSTVYLQMNSLKTEDTAVYYCTRYYGNYGGYFDVWGAGTLVTVSSASTKGPSVFPLAPSSKSTSGGTAALGCLVKDYFPEPVTVSWNSGALTSGVHTFPAVLQSSGLYSLSSVVTVPSSSLGTQTYICNVNHKPSNTKVDKKVEPKSCDKTHTCPPCPAPPVAGPSVFLFPPKPKDTLMISRTPEVTCVVVDVKHEDPEVKFNWYVDGVEVHNAKTKPREEQYNSTYRVVSVLTVLHQDWLNGKEYKCKVSNKALPAPIEKTISKAKGQPREPQVYTLPPSREEMTKNQVSLTCLVKGFYPSDIAVEWESNGQPENNYKTTPPVLDSDGSFFLYSKLTVDKSRWQQGNVFSCSVMHEALHNHYTQKSLSLSPGK

SEQ ID NO: 12336 - protein, 122 aa, Artificial Sequence; identical to SEQ ID NO: 6909
  Description of Artificial Sequence: Synthetic polypeptide
  VH of XENP018159

SEQ ID NO: 12337 - protein, 5 aa, Artificial Sequence
  Description of Artificial Sequence: Synthetic peptide
  XENP018159 vhCDR1
NYWMN

SEQ ID NO: 12338 - protein, 19 aa, Artificial Sequence
  Description of Artificial Sequence: Synthetic peptide
  XENP018159 vhCDR2
IIRLKSNNYATHYAEPVKG

SEQ ID NO: 12339 - protein, 11 aa, Artificial Sequence
  Description of Artificial Sequence: Synthetic peptide
  XENP018159 vhCDR3
YYGNYGGYFDV

SEQ ID NO: 12340 - protein, 214 aa, Artificial Sequence; identical to SEQ ID NO: 11550
  Description of Artificial Sequence: Synthetic polypeptide
  XENP018159 1G6_H1.62_L1_IgG1_PVA_/S267K Light Chain

SEQ ID NO: 12341 - protein, 107 aa, Artificial Sequence; identical to SEQ ID NO: 6247
  Description of Artificial Sequence: Synthetic polypeptide
  VL of XENP018159

SEQ ID NO: 12342 - protein, 11 aa, Artificial Sequence
  Description of Artificial Sequence: Synthetic peptide
  XENP018159 vlCDR1
RASQSVSNDVA

SEQ ID NO: 12343 - protein, 7 aa, Artificial Sequence
  Description of Artificial Sequence: Synthetic peptide
  XENP018159 vlCDR2
YASHRYT

SEQ ID NO: 12344 - protein, 9 aa, Artificial Sequence
  Description of Artificial Sequence: Synthetic peptide
  XENP018159 vlCDR3
QQDYSSPRT

SEQ ID NO: 12345 - protein, 451 aa, Artificial Sequence
  Description of Artificial Sequence: Synthetic polypeptide
  XENP018160 1G6_H1.63_L1_IgG1_PVA_/S267K Heavy Chain
EVQLVESGGGLVKPGGSLRLSCAASGFTFSNYWMNWVRQAPGKGLEWVGEVRLKSNNYATHYAEPVKGRFTISRDDSKSTVYLQMNSLKTEDTAVYYCTRYYGNYGGYFDVWGAGTLVTVSSASTKGPSVFPLAPSSKSTSGGTAALGCLVKDYFPEPVTVSWNSGALTSGVHTFPAVLQSSGLYSLSSVVTVPSSSLGTQTYICNVNHKPSNTKVDKKVEPKSCDKTHTCPPCPAPPVAGPSVFLFPPKPKDTLMISRTPEVTCVVVDVKHEDPEVKFNWYVDGVEVHNAKTKPREEQYNSTYRVVSVLTVLHQDWLNGKEYKCKVSNKALPAPIEKTISKAKGQPREPQVYTLPPSREEMTKNQVSLTCLVKGFYPSDIAVEWESNGQPENNYKTTPPVLDSDGSFFLYSKLTVDKSRWQQGNVFSCSVMHEALHNHYTQKSLSLSPGK

SEQ ID NO: 12346 - protein, 122 aa, Artificial Sequence; identical to SEQ ID NO: 6918
  Description of Artificial Sequence: Synthetic polypeptide
  VH of XENP018160

SEQ ID NO: 12347 - protein, 5 aa, Artificial Sequence
  Description of Artificial Sequence: Synthetic peptide
  XENP018160 vhCDR1
NYWMN

SEQ ID NO: 12348 - protein, 19 aa, Artificial Sequence
  Description of Artificial Sequence: Synthetic peptide
  XENP018160 vhCDR2
EVRLKSNNYATHYAEPVKG

SEQ ID NO: 12349 - protein, 11 aa, Artificial Sequence
  Description of Artificial Sequence: Synthetic peptide
  XENP018160 vhCDR3
YYGNYGGYFDV

SEQ ID NO: 12350 - protein, 214 aa, Artificial Sequence; identical to SEQ ID NO: 11550
  Description of Artificial Sequence: Synthetic polypeptide
  XENP018160 1G6_H1.63_L1_IgG1_PVA_/S267K Light Chain

SEQ ID NO: 12351 - protein, 107 aa, Artificial Sequence; identical to SEQ ID NO: 6247
  Description of Artificial Sequence: Synthetic polypeptide
  VL of XENP018160

SEQ ID NO: 12352 - protein, 11 aa, Artificial Sequence
  Description of Artificial Sequence: Synthetic peptide
  XENP018160 vlCDR1
RASQSVSNDVA

SEQ ID NO: 12353 - protein, 7 aa, Artificial Sequence
  Description of Artificial Sequence: Synthetic peptide
  XENP018160 vlCDR2
YASHRYT

SEQ ID NO: 12354 - protein, 9 aa, Artificial Sequence
  Description of Artificial Sequence: Synthetic peptide
  XENP018160 vlCDR3
QQDYSSPRT

SEQ ID NO: 12355 - protein, 451 aa, Artificial Sequence
  Description of Artificial Sequence: Synthetic polypeptide
  XENP018161 1G6_H1.64_L1_IgG1_PVA_/S267K Heavy Chain
EVQLVESGGGLVKPGGSLRLSCAASGFTFSNYWMNWVRQAPGKGLEWVGEITLKSNNYATHYAEPVKGRFTISRDDSKSTVYLQMNSLKTEDTAVYYCTRYYGNYGGYFDVWGAGTLVTVSSASTKGPSVFPLAPSSKSTSGGTAALGCLVKDYFPEPVTVSWNSGALTSGVHTFPAVLQSSGLYSLSSVVTVPSSSLGTQTYICNVNHKPSNTKVDKKVEPKSCDKTHTCPPCPAPPVAGPSVFLFPPKPKDTLMISRTPEVTCVVVDVKHEDPEVKFNWYVDGVEVHNAKTKPREEQYNSTYRVVSVLTVLHQDWLNGKEYKCKVSNKALPAPIEKTISKAKGQPREPQVYTLPPSREEMTKNQVSLTCLVKGFYPSDIAVEWESNGQPENNYKTTPPVLDSDGSFFLYSKLTVDKSRWQQGNVFSCSVMHEALHNHYTQKSLSLSPGK

SEQ ID NO: 12356 - protein, 122 aa, Artificial Sequence; identical to SEQ ID NO: 6927
  Description of Artificial Sequence: Synthetic polypeptide
  VH of XENP018161

SEQ ID NO: 12357 - protein, 5 aa, Artificial Sequence
  Description of Artificial Sequence: Synthetic peptide
  XENP018161 vhCDR1
NYWMN

SEQ ID NO: 12358 - protein, 19 aa, Artificial Sequence
  Description of Artificial Sequence: Synthetic peptide
  XENP018161 vhCDR2
EITLKSNNYATHYAEPVKG

SEQ ID NO: 12359 - protein, 11 aa, Artificial Sequence
  Description of Artificial Sequence: Synthetic peptide
  XENP018161 vhCDR3
YYGNYGGYFDV

SEQ ID NO: 12360 - protein, 214 aa, Artificial Sequence; identical to SEQ ID NO: 11550
  Description of Artificial Sequence: Synthetic polypeptide
  XENP018161 1G6_H1.64_L1_IgG1_PVA_/S267K Light Chain

SEQ ID NO: 12361 - protein, 107 aa, Artificial Sequence; identical to SEQ ID NO: 6247
  Description of Artificial Sequence: Synthetic polypeptide
  VL of XENP018161

SEQ ID NO: 12362 - protein, 11 aa, Artificial Sequence
  Description of Artificial Sequence: Synthetic peptide
  XENP018161 vlCDR1
RASQSVSNDVA

SEQ ID NO: 12363 - protein, 7 aa, Artificial Sequence
  Description of Artificial Sequence: Synthetic peptide
  XENP018161 vlCDR2
YASHRYT

SEQ ID NO: 12364 - protein, 9 aa, Artificial Sequence
  Description of Artificial Sequence: Synthetic peptide
  XENP018161 vlCDR3
QQDYSSPRT

SEQ ID NO: 12365 - protein, 451 aa, Artificial Sequence
  Description of Artificial Sequence: Synthetic polypeptide
  XENP018162 1G6_H1.65_L1_IgG1_PVA_/S267K Heavy Chain
EVQLVESGGGLVKPGGSLRLSCAASGFTFSNYWMNWVRQAPGKGLEWVGEIKLKSNNYATHYAEPVKGRFTISRDDSKSTVYLQMNSLKTEDTAVYYCTRYYGNYGGYFDVWGAGTLVTVSSASTKGPSVFPLAPSSKSTSGGTAALGCLVKDYFPEPVTVSWNSGALTSGVHTFPAVLQSSGLYSLSSVVTVPSSSLGTQTYICNVNHKPSNTKVDKKVEPKSCDKTHTCPPCPAPPVAGPSVFLFPPKPKDTLMISRTPEVTCVVVDVKHEDPEVKFNWYVDGVEVHNAKTKPREEQYNSTYRVVSVLTVLHQDWLNGKEYKCKVSNKALPAPIEKTISKAKGQPREPQVYTLPPSREEMTKNQVSLTCLVKGFYPSDIAVEWESNGQPENNYKTTPPVLDSDGSFFLYSKLTVDKSRWQQGNVFSCSVMHEALHNHYTQKSLSLSPGK

SEQ ID NO: 12366 - protein, 122 aa, Artificial Sequence; identical to SEQ ID NO: 6936
  Description of Artificial Sequence: Synthetic polypeptide
  VH of XENP018162

SEQ ID NO: 12367 - protein, 5 aa, Artificial Sequence
  Description of Artificial Sequence: Synthetic peptide
  XENP018162 vhCDR1
NYWMN

SEQ ID NO: 12368 - protein, 19 aa, Artificial Sequence
  Description of Artificial Sequence: Synthetic peptide
  XENP018162 vhCDR2
EIKLKSNNYATHYAEPVKG

SEQ ID NO: 12369 - protein, 11 aa, Artificial Sequence
  Description of Artificial Sequence: Synthetic peptide
  XENP018162 vhCDR3
YYGNYGGYFDV

SEQ ID NO: 12370 - protein, 214 aa, Artificial Sequence; identical to SEQ ID NO: 11550
  Description of Artificial Sequence: Synthetic polypeptide
  XENP018162 1G6_H1.65_L1_IgG1_PVA_/S267K Light Chain

SEQ ID NO: 12371 - protein, 107 aa, Artificial Sequence; identical to SEQ ID NO: 6247
  Description of Artificial Sequence: Synthetic polypeptide
  VL of XENP018162

SEQ ID NO: 12372 - protein, 11 aa, Artificial Sequence
  Description of Artificial Sequence: Synthetic peptide
  XENP018162 vlCDR1
RASQSVSNDVA

SEQ ID NO: 12373 - protein, 7 aa, Artificial Sequence
  Description of Artificial Sequence: Synthetic peptide
  XENP018162 vlCDR2
YASHRYT

SEQ ID NO: 12374 - protein, 9 aa, Artificial Sequence
  Description of Artificial Sequence: Synthetic peptide
  XENP018162 vlCDR3
QQDYSSPRT

SEQ ID NO: 12375 - protein, 451 aa, Artificial Sequence
  Description of Artificial Sequence: Synthetic polypeptide
  XENP018163 1G6_H1.66_L1_IgG1_PVA_/S267K Heavy Chain
EVQLVESGGGLVKPGGSLRLSCAASGFTFSNYWMNWVRQAPGKGLEWVGEIELKSNNYATHYAEPVKGRFTISRDDSKSTVYLQMNSLKTEDTAVYYCTRYYGNYGGYFDVWGAGTLVTVSSASTKGPSVFPLAPSSKSTSGGTAALGCLVKDYFPEPVTVSWNSGALTSGVHTFPAVLQSSGLYSLSSVVTVPSSSLGTQTYICNVNHKPSNTKVDKKVEPKSCDKTHTCPPCPAPPVAGPSVFLFPPKPKDTLMISRTPEVTCVVVDVKHEDPEVKFNWYVDGVEVHNAKTKPREEQYNSTYRVVSVLTVLHQDWLNGKEYKCKVSNKALPAPIEKTISKAKGQPREPQVYTLPPSREEMTKNQVSLTCLVKGFYPSDIAVEWESNGQPENNYKTTPPVLDSDGSFFLYSKLTVDKSRWQQGNVFSCSVMHEALHNHYTQKSLSLSPGK

SEQ ID NO: 12376 - protein, 122 aa, Artificial Sequence; identical to SEQ ID NO: 6945
  Description of Artificial Sequence: Synthetic polypeptide
  VH of XENP018163

SEQ ID NO: 12377 - protein, 5 aa, Artificial Sequence
  Description of Artificial Sequence: Synthetic peptide
  XENP018163 vhCDR1
NYWMN

SEQ ID NO: 12378 - protein, 19 aa, Artificial Sequence
  Description of Artificial Sequence: Synthetic peptide
  XENP018163 vhCDR2
EIELKSNNYATHYAEPVKG

SEQ ID NO: 12379 - protein, 11 aa, Artificial Sequence
  Description of Artificial Sequence: Synthetic peptide
  XENP018163 vhCDR3
YYGNYGGYFDV

SEQ ID NO: 12380 - protein, 214 aa, Artificial Sequence; identical to SEQ ID NO: 11550
  Description of Artificial Sequence: Synthetic polypeptide
  XENP018163 1G6_H1.66_L1_IgG1_PVA_/S267K Light Chain

SEQ ID NO: 12381 - protein, 107 aa, Artificial Sequence; identical to SEQ ID NO: 6247
  Description of Artificial Sequence: Synthetic polypeptide
  VL of XENP018163

SEQ ID NO: 12382 - protein, 11 aa, Artificial Sequence
  Description of Artificial Sequence: Synthetic peptide
  XENP018163 vlCDR1
RASQSVSNDVA

SEQ ID NO: 12383 - protein, 7 aa, Artificial Sequence
  Description of Artificial Sequence: Synthetic peptide
  XENP018163 vlCDR2
YASHRYT

SEQ ID NO: 12384 - protein, 9 aa, Artificial Sequence
  Description of Artificial Sequence: Synthetic peptide
  XENP018163 vlCDR3
QQDYSSPRT

SEQ ID NO: 12385 - protein, 451 aa, Artificial Sequence
  Description of Artificial Sequence: Synthetic polypeptide
  XENP018164 1G6_H1.67_L1_IgG1_PVA_/S267K Heavy Chain
EVQLVESGGGLVKPGGSLRLSCAASGFTFSNYWMNWVRQAPGKGLEWVGEIDLKSNNYATHYAEPVKGRFTISRDDSKSTVYLQMNSLKTEDTAVYYCTRYYGNYGGYFDVWGAGTLVTVSSASTKGPSVFPLAPSSKSTSGGTAALGCLVKDYFPEPVTVSWNSGALTSGVHTFPAVLQSSGLYSLSSVVTVPSSSLGTQTYICNVNHKPSNTKVDKKVEPKSCDKTHTCPPCPAPPVAGPSVFLFPPKPKDTLMISRTPEVTCVVVDVKHEDPEVKFNWYVDGVEVHNAKTKPREEQYNSTYRVVSVLTVLHQDWLNGKEYKCKVSNKALPAPIEKTISKAKGQPREPQVYTLPPSREEMTKNQVSLTCLVKGFYPSDIAVEWESNGQPENNYKTTPPVLDSDGSFFLYSKLTVDKSRWQQGNVFSCSVMHEALHNHYTQKSLSLSPGK

SEQ ID NO: 12386 - protein, 122 aa, Artificial Sequence; identical to SEQ ID NO: 6954
  Description of Artificial Sequence: Synthetic polypeptide
  VH of XENP018164

SEQ ID NO: 12387 - protein, 5 aa, Artificial Sequence
  Description of Artificial Sequence: Synthetic peptide
  XENP018164 vhCDR1
NYWMN

SEQ ID NO: 12388 - protein, 19 aa, Artificial Sequence
  Description of Artificial Sequence: Synthetic peptide
  XENP018164 vhCDR2
EIDLKSNNYATHYAEPVKG

SEQ ID NO: 12389 - protein, 11 aa, Artificial Sequence
  Description of Artificial Sequence: Synthetic peptide
  XENP018164 vhCDR3
YYGNYGGYFDV

SEQ ID NO: 12390 - protein, 214 aa, Artificial Sequence; identical to SEQ ID NO: 11550
  Description of Artificial Sequence: Synthetic polypeptide
  XENP018164 1G6_H1.67_L1_IgG1_PVA_/S267K Light Chain

SEQ ID NO: 12391 - protein, 107 aa, Artificial Sequence; identical to SEQ ID NO: 6247
  Description of Artificial Sequence: Synthetic polypeptide
  VL of XENP018164

SEQ ID NO: 12392 - protein, 11 aa, Artificial Sequence
  Description of Artificial Sequence: Synthetic peptide
  XENP018164 vlCDR1
RASQSVSNDVA

SEQ ID NO: 12393 - protein, 7 aa, Artificial Sequence
  Description of Artificial Sequence: Synthetic peptide
  XENP018164 vlCDR2
YASHRYT

SEQ ID NO: 12394 - protein, 9 aa, Artificial Sequence
  Description of Artificial Sequence: Synthetic peptide
  XENP018164 vlCDR3
QQDYSSPRT

SEQ ID NO: 12395 - protein, 451 aa, Artificial Sequence
  Description of Artificial Sequence: Synthetic polypeptide
  XENP018165 1G6_H1.68_L1_IgG1_PVA_/S267K Heavy Chain
EVQLVESGGGLVKPGGSLRLSCAASGFTFSNYWMNWVRQAPGKGLEWVGEIHLKSNNYATHYAEPVKGRFTISRDDSKSTVYLQMNSLKTEDTAVYYCTRYYGNYGGYFDVWGAGTLVTVSSASTKGPSVFPLAPSSKSTSGGTAALGCLVKDYFPEPVTVSWNSGALTSGVHTFPAVLQSSGLYSLSSVVTVPSSSLGTQTYICNVNHKPSNTKVDKKVEPKSCDKTHTCPPCPAPPVAGPSVFLFPPKPKDTLMISRTPEVTCVVVDVKHEDPEVKFNWYVDGVEVHNAKTKPREEQYNSTYRVVSVLTVLHQDWLNGKEYKCKVSNKALPAPIEKTISKAKGQPREPQVYTLPPSREEMTKNQVSLTCLVKGFYPSDIAVEWESNGQPENNYKTTPPVLDSDGSFFLYSKLTVDKSRWQQGNVFSCSVMHEALHNHYTQKSLSLSPGK

SEQ ID NO: 12396 - protein, 122 aa, Artificial Sequence; identical to SEQ ID NO: 6963
  Description of Artificial Sequence: Synthetic polypeptide
  VH of XENP018165

SEQ ID NO: 12397 - protein, 5 aa, Artificial Sequence
  Description of Artificial Sequence: Synthetic peptide
  XENP018165 vhCDR1
NYWMN

SEQ ID NO: 12398 - protein, 19 aa, Artificial Sequence
  Description of Artificial Sequence: Synthetic peptide
  XENP018165 vhCDR2
EIHLKSNNYATHYAEPVKG

SEQ ID NO: 12399 - protein, 11 aa, Artificial Sequence
  Description of Artificial Sequence: Synthetic peptide
  XENP018165 vhCDR3
YYGNYGGYFDV

SEQ ID NO: 12400 - protein, 214 aa, Artificial Sequence; identical to SEQ ID NO: 11550
  Description of Artificial Sequence: Synthetic polypeptide
  XENP018165 1G6_H1.68_L1_IgG1_PVA_/S267K Light Chain

SEQ ID NO: 12401 - protein, 107 aa, Artificial Sequence; identical to SEQ ID NO: 6247
  Description of Artificial Sequence: Synthetic polypeptide
  VL of XENP018165

SEQ ID NO: 12402 - protein, 11 aa, Artificial Sequence
  Description of Artificial Sequence: Synthetic peptide
  XENP018165 vlCDR1
RASQSVSNDVA

SEQ ID NO: 12403 - protein, 7 aa, Artificial Sequence
  Description of Artificial Sequence: Synthetic peptide
  XENP018165 vlCDR2
YASHRYT

SEQ ID NO: 12404 - protein, 9 aa, Artificial Sequence
  Description of Artificial Sequence: Synthetic peptide
  XENP018165 vlCDR3
QQDYSSPRT

SEQ ID NO: 12405 - protein, 451 aa, Artificial Sequence
  Description of Artificial Sequence: Synthetic polypeptide
  XENP018166 1G6_H1.69_L1_IgG1_PVA_/S267K Heavy Chain
EVQLVESGGGLVKPGGSLRLSCAASGFTFSNYWMNWVRQAPGKGLEWVGEISLKSNNYATHYAEPVKGRFTISRDDSKSTVYLQMNSLKTEDTAVYYCTRYYGNYGGYFDVWGAGTLVTVSSASTKGPSVFPLAPSSKSTSGGTAALGCLVKDYFPEPVTVSWNSGALTSGVHTFPAVLQSSGLYSLSSVVTVPSSSLGTQTYICNVNHKPSNTKVDKKVEPKSCDKTHTCPPCPAPPVAGPSVFLFPPKPKDTLMISRTPEVTCVVVDVKHEDPEVKFNWYVDGVEVHNAKTKPREEQYNSTYRVVSVLTVLHQDWLNGKEYKCKVSNKALPAPIEKTISKAKGQPREPQVYTLPPSREEMTKNQVSLTCLVKGFYPSDIAVEWESNGQPENNYKTTPPVLDSDGSFFLYSKLTVDKSRWQQGNVFSCSVMHEALHNHYTQKSLSLSPGK

SEQ ID NO: 12406 - protein, 122 aa, Artificial Sequence; identical to SEQ ID NO: 6972
  Description of Artificial Sequence: Synthetic polypeptide
  VH of XENP018166

SEQ ID NO: 12407 - protein, 5 aa, Artificial Sequence
  Description of Artificial Sequence: Synthetic peptide
  XENP018166 vhCDR1
NYWMN

SEQ ID NO: 12408 - protein, 19 aa, Artificial Sequence
  Description of Artificial Sequence: Synthetic peptide
  XENP018166 vhCDR2
EISLKSNNYATHYAEPVKG

SEQ ID NO: 12409 - protein, 11 aa, Artificial Sequence
  Description of Artificial Sequence: Synthetic peptide
  XENP018166 vhCDR3
YYGNYGGYFDV

SEQ ID NO: 12410 - protein, 214 aa, Artificial Sequence; identical to SEQ ID NO: 11550
  Description of Artificial Sequence: Synthetic polypeptide
  XENP018166 1G6_H1.69_L1_IgG1_PVA_/S267K Light Chain

SEQ ID NO: 12411 - protein, 107 aa, Artificial Sequence; identical to SEQ ID NO: 6247
  Description of Artificial Sequence: Synthetic polypeptide
  VL of XENP018166

SEQ ID NO: 12412 - protein, 11 aa, Artificial Sequence
  Description of Artificial Sequence: Synthetic peptide
  XENP018166 vlCDR1
RASQSVSNDVA

SEQ ID NO: 12413 - protein, 7 aa, Artificial Sequence
  Description of Artificial Sequence: Synthetic peptide
  XENP018166 vlCDR2
YASHRYT

SEQ ID NO: 12414 - protein, 9 aa, Artificial Sequence
  Description of Artificial Sequence: Synthetic peptide
  XENP018166 vlCDR3
QQDYSSPRT

SEQ ID NO: 12415 - protein, 451 aa, Artificial Sequence
  Description of Artificial Sequence: Synthetic polypeptide
  XENP018167 1G6_H1.70_L1_IgG1_PVA_/S267K Heavy Chain
EVQLVESGGGLVKPGGSLRLSCAASGFTFSNYWMNWVRQAPGKGLEWVGEIGLKSNNYATHYAEPVKGRFTISRDDSKSTVYLQMNSLKTEDTAVYYCTRYYGNYGGYFDVWGAGTLVTVSSASTKGPSVFPLAPSSKSTSGGTAALGCLVKDYFPEPVTVSWNSGALTSGVHTFPAVLQSSGLYSLSSVVTVPSSSLGTQTYICNVNHKPSNTKVDKKVEPKSCDKTHTCPPCPAPPVAGPSVFLFPPKPKDTLMISRTPEVTCVVVDVKHEDPEVKFNWYVDGVEVHNAKTKPREEQYNSTYRVVSVLTVLHQDWLNGKEYKCKVSNKALPAPIEKTISKAKGQPREPQVYTLPPSREEMTKNQVSLTCLVKGFYPSDIAVEWESNGQPENNYKTTPPVLDSDGSFFLYSKLTVDKSRWQQGNVFSCSVMHEALHNHYTQKSLSLSPGK

SEQ ID NO: 12416 - protein, 122 aa, Artificial Sequence; identical to SEQ ID NO: 6981
  Description of Artificial Sequence: Synthetic polypeptide
  VH of XENP018167

SEQ ID NO: 12417 - protein, 5 aa, Artificial Sequence
  Description of Artificial Sequence: Synthetic peptide
  XENP018167 vhCDR1
NYWMN

SEQ ID NO: 12418 - protein, 19 aa, Artificial Sequence
  Description of Artificial Sequence: Synthetic peptide
  XENP018167 vhCDR2
EIGLKSNNYATHYAEPVKG

SEQ ID NO: 12419 - protein, 11 aa, Artificial Sequence
  Description of Artificial Sequence: Synthetic peptide
  XENP018167 vhCDR3
YYGNYGGYFDV

SEQ ID NO: 12420 - protein, 214 aa, Artificial Sequence; identical to SEQ ID NO: 11550
  Description of Artificial Sequence: Synthetic polypeptide
  XENP018167 1G6_H1.70_L1_IgG1_PVA_/S267K Light Chain

SEQ ID NO: 12421 - protein, 107 aa, Artificial Sequence; identical to SEQ ID NO: 6247
  Description of Artificial Sequence: Synthetic polypeptide
  VL of XENP018167

SEQ ID NO: 12422 - protein, 11 aa, Artificial Sequence
  Description of Artificial Sequence: Synthetic peptide
  XENP018167 vlCDR1
RASQSVSNDVA

SEQ ID NO: 12423 - protein, 7 aa, Artificial Sequence
  Description of Artificial Sequence: Synthetic peptide
  XENP018167 vlCDR2
YASHRYT

SEQ ID NO: 12424 - protein, 9 aa, Artificial Sequence
  Description of Artificial Sequence: Synthetic peptide
  XENP018167 vlCDR3
QQDYSSPRT

SEQ ID NO: 12425 - protein, 451 aa, Artificial Sequence
  Description of Artificial Sequence: Synthetic polypeptide
  XENP018168 1G6_H1.71_L1_IgG1_PVA_/S267K Heavy Chain
EVQLVESGGGLVKPGGSLRLSCAASGFTFSNYWMNWVRQAPGKGLEWVGEIYLKSNNYATHYAEPVKGRFTISRDDSKSTVYLQMNSLKTEDTAVYYCTRYYGNYGGYFDVWGAGTLVTVSSASTKGPSVFPLAPSSKSTSGGTAALGCLVKDYFPEPVTVSWNSGALTSGVHTFPAVLQSSGLYSLSSVVTVPSSSLGTQTYICNVNHKPSNTKVDKKVEPKSCDKTHTCPPCPAPPVAGPSVFLFPPKPKDTLMISRTPEVTCVVVDVKHEDPEVKFNWYVDGVEVHNAKTKPREEQYNSTYRVVSVLTVLHQDWLNGKEYKCKVSNKALPAPIEKTISKAKGQPREPQVYTLPPSREEMTKNQVSLTCLVKGFYPSDIAVEWESNGQPENNYKTTPPVLDSDGSFFLYSKLTVDKSRWQQGNVFSCSVMHEALHNHYTQKSLSLSPGK

SEQ ID NO: 12426 - protein, 122 aa, Artificial Sequence; identical to SEQ ID NO: 6990
  Description of Artificial Sequence: Synthetic polypeptide
  VH of XENP018168

SEQ ID NO: 12427 - protein, 5 aa, Artificial Sequence
  Description of Artificial Sequence: Synthetic peptide
  XENP018168 vhCDR1
NYWMN

SEQ ID NO: 12428 - protein, 19 aa, Artificial Sequence
  Description of Artificial Sequence: Synthetic peptide
  XENP018168 vhCDR2
EIYLKSNNYATHYAEPVKG

SEQ ID NO: 12429 - protein, 11 aa, Artificial Sequence
  Description of Artificial Sequence: Synthetic peptide
  XENP018168 vhCDR3
YYGNYGGYFDV

SEQ ID NO: 12430 - protein, 214 aa, Artificial Sequence; identical to SEQ ID NO: 11550
  Description of Artificial Sequence: Synthetic polypeptide
  XENP018168 1G6_H1.71_L1_IgG1_PVA_/S267K Light Chain

SEQ ID NO: 12431 - protein, 107 aa, Artificial Sequence; identical to SEQ ID NO: 6247
  Description of Artificial Sequence: Synthetic polypeptide
  VL of XENP018168

SEQ ID NO: 12432 - protein, 11 aa, Artificial Sequence
  Description of Artificial Sequence: Synthetic peptide
  XENP018168 vlCDR1
RASQSVSNDVA

SEQ ID NO: 12433 - protein, 7 aa, Artificial Sequence
  Description of Artificial Sequence: Synthetic peptide
  XENP018168 vlCDR2
YASHRYT

SEQ ID NO: 12434 - protein, 9 aa, Artificial Sequence
  Description of Artificial Sequence: Synthetic peptide
  XENP018168 vlCDR3
QQDYSSPRT

SEQ ID NO: 12435 - protein, 451 aa, Artificial Sequence
  Description of Artificial Sequence: Synthetic polypeptide
  XENP018169 1G6_H1.72_L1_IgG1_PVA_/S267K Heavy Chain
EVQLVESGGGLVKPGGSLRLSCAASGFTFSNYWMNWVRQAPGKGLEWVGEIILKSNNYATHYAEPVKGRFTISRDDSKSTVYLQMNSLKTEDTAVYYCTRYYGNYGGYFDVWGAGTLVTVSSASTKGPSVFPLAPSSKSTSGGTAALGCLVKDYFPEPVTVSWNSGALTSGVHTFPAVLQSSGLYSLSSVVTVPSSSLGTQTYICNVNHKPSNTKVDKKVEPKSCDKTHTCPPCPAPPVAGPSVFLFPPKPKDTLMISRTPEVTCVVVDVKHEDPEVKFNWYVDGVEVHNAKTKPREEQYNSTYRVVSVLTVLHQDWLNGKEYKCKVSNKALPAPIEKTISKAKGQPREPQVYTLPPSREEMTKNQVSLTCLVKGFYPSDIAVEWESNGQPENNYKTTPPVLDSDGSFFLYSKLTVDKSRWQQGNVFSCSVMHEALHNHYTQKSLSLSPGK

SEQ ID NO: 12436 - protein, 122 aa, Artificial Sequence; identical to SEQ ID NO: 6999
  Description of Artificial Sequence: Synthetic polypeptide
  VH of XENP018169

SEQ ID NO: 12437 - protein, 5 aa, Artificial Sequence
  Description of Artificial Sequence: Synthetic peptide
  XENP018169 vhCDR1
NYWMN

SEQ ID NO: 12438 - protein, 19 aa, Artificial Sequence
  Description of Artificial Sequence: Synthetic peptide
  XENP018169 vhCDR2
EIILKSNNYATHYAEPVKG

SEQ ID NO: 12439 - protein, 11 aa, Artificial Sequence
  Description of Artificial Sequence: Synthetic peptide
  XENP018169 vhCDR3
YYGNYGGYFDV

SEQ ID NO: 12440 - protein, 214 aa, Artificial Sequence; identical to SEQ ID NO: 11550
  Description of Artificial Sequence: Synthetic polypeptide
  XENP018169 1G6_H1.72_L1_IgG1_PVA_/S267K Light Chain

SEQ ID NO: 12441 - protein, 107 aa, Artificial Sequence; identical to SEQ ID NO: 6247
  Description of Artificial Sequence: Synthetic polypeptide
  VL of XENP018169

SEQ ID NO: 12442 - protein, 11 aa, Artificial Sequence
  Description of Artificial Sequence: Synthetic peptide
  XENP018169 vlCDR1
RASQSVSNDVA

SEQ ID NO: 12443 - protein, 7 aa, Artificial Sequence
  Description of Artificial Sequence: Synthetic peptide
  XENP018169 vlCDR2
YASHRYT

SEQ ID NO: 12444 - protein, 9 aa, Artificial Sequence
  Description of Artificial Sequence: Synthetic peptide
  XENP018169 vlCDR3
QQDYSSPRT

SEQ ID NO: 12445 - protein, 451 aa, Artificial Sequence
  Description of Artificial Sequence: Synthetic polypeptide
  XENP018170 1G6_H1.73_L1_IgG1_PVA_/S267K Heavy Chain
EVQLVESGGGLVKPGGSLRLSCAASGFTFSNYWMNWVRQAPGKGLEWVGEIWLKSNNYATHYAEPVKGRFTISRDDSKSTVYLQMNSLKTEDTAVYYCTRYYGNYGGYFDVWGAGTLVTVSSASTKGPSVFPLAPSSKSTSGGTAALGCLVKDYFPEPVTVSWNSGALTSGVHTFPAVLQSSGLYSLSSVVTVPSSSLGTQTYICNVNHKPSNTKVDKKVEPKSCDKTHTCPPCPAPPVAGPSVFLFPPKPKDTLMISRTPEVTCVVVDVKHEDPEVKFNWYVDGVEVHNAKTKPREEQYNSTYRVVSVLTVLHQDWLNGKEYKCKVSNKALPAPIEKTISKAKGQPREPQVYTLPPSREEMTKNQVSLTCLVKGFYPSDIAVEWESNGQPENNYKTTPPVLDSDGSFFLYSKLTVDKSRWQQGNVFSCSVMHEALHNHYTQKSLSLSPGK

SEQ ID NO: 12446 - protein, 122 aa, Artificial Sequence; identical to SEQ ID NO: 7008
  Description of Artificial Sequence: Synthetic polypeptide
  VH of XENP018170

SEQ ID NO: 12447 - protein, 5 aa, Artificial Sequence
  Description of Artificial Sequence: Synthetic peptide
  XENP018170 vhCDR1
NYWMN

SEQ ID NO: 12448 - protein, 19 aa, Artificial Sequence
  Description of Artificial Sequence: Synthetic peptide
  XENP018170 vhCDR2
EIWLKSNNYATHYAEPVKG

SEQ ID NO: 12449 - protein, 11 aa, Artificial Sequence
  Description of Artificial Sequence: Synthetic peptide
  XENP018170 vhCDR3
YYGNYGGYFDV

SEQ ID NO: 12450 - protein, 214 aa, Artificial Sequence; identical to SEQ ID NO: 11550
  Description of Artificial Sequence: Synthetic polypeptide
  XENP018170 1G6_H1.73_L1_IgG1_PVA_/S267K Light Chain

SEQ ID NO: 12451 - protein, 107 aa, Artificial Sequence; identical to SEQ ID NO: 6247
  Description of Artificial Sequence: Synthetic polypeptide
  VL of XENP018170

SEQ ID NO: 12452 - protein, 11 aa, Artificial Sequence
  Description of Artificial Sequence: Synthetic peptide
  XENP018170 vlCDR1
RASQSVSNDVA

SEQ ID NO: 12453 - protein, 7 aa, Artificial Sequence
  Description of Artificial Sequence: Synthetic peptide
  XENP018170 vlCDR2
YASHRYT

SEQ ID NO: 12454 - protein, 9 aa, Artificial Sequence
  Description of Artificial Sequence: Synthetic peptide
  XENP018170 vlCDR3
QQDYSSPRT

SEQ ID NO: 12455 - protein, 451 aa, Artificial Sequence
  Description of Artificial Sequence: Synthetic polypeptide
  XENP018171 1G6_H1.74_L1_IgG1_PVA_/S267K Heavy Chain
EVQLVESGGGLVKPGGSLRLSCAASGFTFSNYWMNWVRQAPGKGLEWVGEIRIKSNNYATHYAEPVKGRFTISRDDSKSTVYLQMNSLKTEDTAVYYCTRYYGNYGGYFDVWGAGTLVTVSSASTKGPSVFPLAPSSKSTSGGTAALGCLVKDYFPEPVTVSWNSGALTSGVHTFPAVLQSSGLYSLSSVVTVPSSSLGTQTYICNVNHKPSNTKVDKKVEPKSCDKTHTCPPCPAPPVAGPSVFLFPPKPKDTLMISRTPEVTCVVVDVKHEDPEVKFNWYVDGVEVHNAKTKPREEQYNSTYRVVSVLTVLHQDWLNGKEYKCKVSNKALPAPIEKTISKAKGQPREPQVYTLPPSREEMTKNQVSLTCLVKGFYPSDIAVEWESNGQPENNYKTTPPVLDSDGSFFLYSKLTVDKSRWQQGNVFSCSVMHEALHNHYTQKSLSLSPGK

SEQ ID NO: 12456 - protein, 122 aa, Artificial Sequence; identical to SEQ ID NO: 7017
  Description of Artificial Sequence: Synthetic polypeptide
  VH of XENP018171

SEQ ID NO: 12457 - protein, 5 aa, Artificial Sequence
  Description of Artificial Sequence: Synthetic peptide
  XENP018171 vhCDR1
NYWMN

SEQ ID NO: 12458 - protein, 19 aa, Artificial Sequence
  Description of Artificial Sequence: Synthetic peptide
  XENP018171 vhCDR2
EIRIKSNNYATHYAEPVKG

SEQ ID NO: 12459 - protein, 11 aa, Artificial Sequence
  Description of Artificial Sequence: Synthetic peptide
  XENP018171 vhCDR3
YYGNYGGYFDV

SEQ ID NO: 12460 - protein, 214 aa, Artificial Sequence; identical to SEQ ID NO: 11550
  Description of Artificial Sequence: Synthetic polypeptide
  XENP018171 1G6_H1.74_L1_IgG1_PVA_/S267K Light Chain

SEQ ID NO: 12461 - protein, 107 aa, Artificial Sequence; identical to SEQ ID NO: 6247
  Description of Artificial Sequence: Synthetic polypeptide
  VL of XENP018171

SEQ ID NO: 12462 - protein, 11 aa, Artificial Sequence
  Description of Artificial Sequence: Synthetic peptide
  XENP018171 vlCDR1
RASQSVSNDVA

SEQ ID NO: 12463 - protein, 7 aa, Artificial Sequence
  Description of Artificial Sequence: Synthetic peptide
  XENP018171 vlCDR2
YASHRYT

SEQ ID NO: 12464 - protein, 9 aa, Artificial Sequence
  Description of Artificial Sequence: Synthetic peptide
  XENP018171 vlCDR3
QQDYSSPRT

SEQ ID NO: 12465 - protein, 451 aa, Artificial Sequence
  Description of Artificial Sequence: Synthetic polypeptide
  XENP018172 1G6_H1.75_L1_IgG1_PVA_/S267K Heavy Chain
EVQLVESGGGLVKPGGSLRLSCAASGFTFSNYWMNWVRQAPGKGLEWVGEIRFKSNNYATHYAEPVKGRFTISRDDSKSTVYLQMNSLKTEDTAVYYCTRYYGNYGGYFDVWGAGTLVTVSSASTKGPSVFPLAPSSKSTSGGTAALGCLVKDYFPEPVTVSWNSGALTSGVHTFPAVLQSSGLYSLSSVVTVPSSSLGTQTYICNVNHKPSNTKVDKKVEPKSCDKTHTCPPCPAPPVAGPSVFLFPPKPKDTLMISRTPEVTCVVVDVKHEDPEVKFNWYVDGVEVHNAKTKPREEQYNSTYRVVSVLTVLHQDWLNGKEYKCKVSNKALPAPIEKTISKAKGQPREPQVYTLPPSREEMTKNQVSLTCLVKGFYPSDIAVEWESNGQPENNYKTTPPVLDSDGSFFLYSKLTVDKSRWQQGNVFSCSVMHEALHNHYTQKSLSLSPGK

SEQ ID NO: 12466 - protein, 122 aa, Artificial Sequence; identical to SEQ ID NO: 7026
  Description of Artificial Sequence: Synthetic polypeptide
  VH of XENP018172

SEQ ID NO: 12467 - protein, 5 aa, Artificial Sequence
  Description of Artificial Sequence: Synthetic peptide
  XENP018172 vhCDR1
NYWMN

SEQ ID NO: 12468 - protein, 19 aa, Artificial Sequence
  Description of Artificial Sequence: Synthetic peptide
  XENP018172 vhCDR2
EIRFKSNNYATHYAEPVKG

SEQ ID NO: 12469 - protein, 11 aa, Artificial Sequence
  Description of Artificial Sequence: Synthetic peptide
  XENP018172 vhCDR3
YYGNYGGYFDV

SEQ ID NO: 12470 - protein, 214 aa, Artificial Sequence; identical to SEQ ID NO: 11550
  Description of Artificial Sequence: Synthetic polypeptide
  XENP018172 1G6_H1.75_L1_IgG1_PVA_/S267K Light Chain

SEQ ID NO: 12471 - protein, 107 aa, Artificial Sequence; identical to SEQ ID NO: 6247
  Description of Artificial Sequence: Synthetic polypeptide
  VL of XENP018172

SEQ ID NO: 12472 - protein, 11 aa, Artificial Sequence
  Description of Artificial Sequence: Synthetic peptide
  XENP018172 vlCDR1
RASQSVSNDVA

SEQ ID NO: 12473 - protein, 7 aa, Artificial Sequence
  Description of Artificial Sequence: Synthetic peptide
  XENP018172 vlCDR2
YASHRYT

SEQ ID NO: 12474 - protein, 9 aa, Artificial Sequence
  Description of Artificial Sequence: Synthetic peptide
  XENP018172 vlCDR3
QQDYSSPRT

SEQ ID NO: 12475 - protein, 451 aa, Artificial Sequence
  Description of Artificial Sequence: Synthetic polypeptide
  XENP018173 1G6_H1.76_L1_IgG1_PVA_/S267K Heavy Chain
EVQLVESGGGLVKPGGSLRLSCAASGFTFSNYWMNWVRQAPGKGLEWVGEIRVKSNNYATHYAEPVKGRFTISRDDSKSTVYLQMNSLKTEDTAVYYCTRYYGNYGGYFDVWGAGTLVTVSSASTKGPSVFPLAPSSKSTSGGTAALGCLVKDYFPEPVTVSWNSGALTSGVHTFPAVLQSSGLYSLSSVVTVPSSSLGTQTYICNVNHKPSNTKVDKKVEPKSCDKTHTCPPCPAPPVAGPSVFLFPPKPKDTLMISRTPEVTCVVVDVKHEDPEVKFNWYVDGVEVHNAKTKPREEQYNSTYRVVSVLTVLHQDWLNGKEYKCKVSNKALPAPIEKTISKAKGQPREPQVYTLPPSREEMTKNQVSLTCLVKGFYPSDIAVEWESNGQPENNYKTTPPVLDSDGSFFLYSKLTVDKSRWQQGNVFSCSVMHEALHNHYTQKSLSLSPGK

SEQ ID NO: 12476 - protein, 122 aa, Artificial Sequence; identical to SEQ ID NO: 7035
  Description of Artificial Sequence: Synthetic polypeptide
  VH of XENP018173

SEQ ID NO: 12477 - protein, 5 aa, Artificial Sequence
  Description of Artificial Sequence: Synthetic peptide
  XENP018173 vhCDR1
NYWMN

SEQ ID NO: 12478 - protein, 19 aa, Artificial Sequence
  Description of Artificial Sequence: Synthetic peptide
  XENP018173 vhCDR2
EIRVKSNNYATHYAEPVKG

SEQ ID NO: 12479 - protein, 11 aa, Artificial Sequence
  Description of Artificial Sequence: Synthetic peptide
  XENP018173 vhCDR3
YYGNYGGYFDV

SEQ ID NO: 12480 - protein, 214 aa, Artificial Sequence; identical to SEQ ID NO: 11550
  Description of Artificial Sequence: Synthetic polypeptide
  XENP018173 1G6_H1.76_L1_IgG1_PVA_/S267K Light Chain

SEQ ID NO: 12481 - protein, 107 aa, Artificial Sequence; identical to SEQ ID NO: 6247
  Description of Artificial Sequence: Synthetic polypeptide
  VL of XENP018173

SEQ ID NO: 12482 - protein, 11 aa, Artificial Sequence
  Description of Artificial Sequence: Synthetic peptide
  XENP018173 vlCDR1
RASQSVSNDVA

SEQ ID NO: 12483 - protein, 7 aa, Artificial Sequence
  Description of Artificial Sequence: Synthetic peptide
  XENP018173 vlCDR2
YASHRYT

SEQ ID NO: 12484 - protein, 9 aa, Artificial Sequence
  Description of Artificial Sequence: Synthetic peptide
  XENP018173 vlCDR3
QQDYSSPRT

SEQ ID NO: 12485 - protein, 451 aa, Artificial Sequence
  Description of Artificial Sequence: Synthetic polypeptide
  XENP018174 1G6_H1.77_L1_IgG1_PVA_/S267K Heavy Chain
EVQLVESGGGLVKPGGSLRLSCAASGFTFSNYWMNWVRQAPGKGLEWVGEIRYKSNNYATHYAEPVKGRFTISRDDSKSTVYLQMNSLKTEDTAVYYCTRYYGNYGGYFDVWGAGTLVTVSSASTKGPSVFPLAPSSKSTSGGTAALGCLVKDYFPEPVTVSWNSGALTSGVHTFPAVLQSSGLYSLSSVVTVPSSSLGTQTYICNVNHKPSNTKVDKKVEPKSCDKTHTCPPCPAPPVAGPSVFLFPPKPKDTLMISRTPEVTCVVVDVKHEDPEVKFNWYVDGVEVHNAKTKPREEQYNSTYRVVSVLTVLHQDWLNGKEYKCKVSNKALPAPIEKTISKAKGQPREPQVYTLPPSREEMTKNQVSLTCLVKGFYPSDIAVEWESNGQPENNYKTTPPVLDSDGSFFLYSKLTVDKSRWQQGNVFSCSVMHEALHNHYTQKSLSLSPGK

SEQ ID NO: 12486 - protein, 122 aa, Artificial Sequence; identical to SEQ ID NO: 7044
  Description of Artificial Sequence: Synthetic polypeptide
  VH of XENP018174

SEQ ID NO: 12487 - protein, 5 aa, Artificial Sequence
  Description of Artificial Sequence: Synthetic peptide
  XENP018174 vhCDR1
NYWMN

SEQ ID NO: 12488 - protein, 19 aa, Artificial Sequence
  Description of Artificial Sequence: Synthetic peptide
  XENP018174 vhCDR2
EIRYKSNNYATHYAEPVKG

SEQ ID NO: 12489 - protein, 11 aa, Artificial Sequence
  Description of Artificial Sequence: Synthetic peptide
  XENP018174 vhCDR3
YYGNYGGYFDV

SEQ ID NO: 12490 - protein, 214 aa, Artificial Sequence; identical to SEQ ID NO: 11550
  Description of Artificial Sequence: Synthetic polypeptide
  XENP018174 1G6_H1.77_L1_IgG1_PVA_/S267K Light Chain

SEQ ID NO: 12491 - protein, 107 aa, Artificial Sequence; identical to SEQ ID NO: 6247
  Description of Artificial Sequence: Synthetic polypeptide
  VL of XENP018174

SEQ ID NO: 12492 - protein, 11 aa, Artificial Sequence
  Description of Artificial Sequence: Synthetic peptide
  XENP018174 vlCDR1
RASQSVSNDVA

SEQ ID NO: 12493 - protein, 7 aa, Artificial Sequence
  Description of Artificial Sequence: Synthetic peptide
  XENP018174 vlCDR2
YASHRYT

SEQ ID NO: 12494 - protein, 9 aa, Artificial Sequence
  Description of Artificial Sequence: Synthetic peptide
  XENP018174 vlCDR3
QQDYSSPRT

SEQ ID NO: 12495 - protein, 451 aa, Artificial Sequence
  Description of Artificial Sequence: Synthetic polypeptide
  XENP018175 1G6_H1.78_L1_IgG1_PVA_/S267K Heavy Chain
EVQLVESGGGLVKPGGSLRLSCAASGFTFSNYWMNWVRQAPGKGLEWVGEIRWKSNNYATHYAEPVKGRFTISRDDSKSTVYLQMNSLKTEDTAVYYCTRYYGNYGGYFDVWGAGTLVTVSSASTKGPSVFPLAPSSKSTSGGTAALGCLVKDYFPEPVTVSWNSGALTSGVHTFPAVLQSSGLYSLSSVVTVPSSSLGTQTYICNVNHKPSNTKVDKKVEPKSCDKTHTCPPCPAPPVAGPSVFLFPPKPKDTLMISRTPEVTCVVVDVKHEDPEVKFNWYVDGVEVHNAKTKPREEQYNSTYRVVSVLTVLHQDWLNGKEYKCKVSNKALPAPIEKTISKAKGQPREPQVYTLPPSREEMTKNQVSLTCLVKGFYPSDIAVEWESNGQPENNYKTTPPVLDSDGSFFLYSKLTVDKSRWQQGNVFSCSVMHEALHNHYTQKSLSLSPGK

SEQ ID NO: 12496 - protein, 122 aa, Artificial Sequence; identical to SEQ ID NO: 7053
  Description of Artificial Sequence: Synthetic polypeptide
  VH of XENP018175

SEQ ID NO: 12497 - protein, 5 aa, Artificial Sequence
  Description of Artificial Sequence: Synthetic peptide
  XENP018175 vhCDR1
NYWMN

SEQ ID NO: 12498 - protein, 19 aa, Artificial Sequence
  Description of Artificial Sequence: Synthetic peptide
  XENP018175 vhCDR2
EIRWKSNNYATHYAEPVKG

SEQ ID NO: 12499 - protein, 11 aa, Artificial Sequence
  Description of Artificial Sequence: Synthetic peptide
  XENP018175 vhCDR3
YYGNYGGYFDV

SEQ ID NO: 12500 - protein, 214 aa, Artificial Sequence; identical to SEQ ID NO: 11550
  Description of Artificial Sequence: Synthetic polypeptide
  XENP018175 1G6_H1.78_L1_IgG1_PVA_/S267K Light Chain

SEQ ID NO: 12501 - protein, 107 aa, Artificial Sequence; identical to SEQ ID NO: 6247
  Description of Artificial Sequence: Synthetic polypeptide
  VL of XENP018175

SEQ ID NO: 12502 - protein, 11 aa, Artificial Sequence
  Description of Artificial Sequence: Synthetic peptide
  XENP018175 vlCDR1
RASQSVSNDVA

SEQ ID NO: 12503 - protein, 7 aa, Artificial Sequence
  Description of Artificial Sequence: Synthetic peptide
  XENP018175 vlCDR2
YASHRYT

SEQ ID NO: 12504 - protein, 9 aa, Artificial Sequence
  Description of Artificial Sequence: Synthetic peptide
  XENP018175 vlCDR3
QQDYSSPRT

SEQ ID NO: 12505 - protein, 451 aa, Artificial Sequence
  Description of Artificial Sequence: Synthetic polypeptide
  XENP018176 1G6_H1.79_L1_IgG1_PVA_/S267K Heavy Chain
EVQLVESGGGLVKPGGSLRLSCAASGFTFSNYWMNWVRQAPGKGLEWVGEIRDKSNNYATHYAEPVKGRFTISRDDSKSTVYLQMNSLKTEDTAVYYCTRYYGNYGGYFDVWGAGTLVTVSSASTKGPSVFPLAPSSKSTSGGTAALGCLVKDYFPEPVTVSWNSGALTSGVHTFPAVLQSSGLYSLSSVVTVPSSSLGTQTYICNVNHKPSNTKVDKKVEPKSCDKTHTCPPCPAPPVAGPSVFLFPPKPKDTLMISRTPEVTCVVVDVKHEDPEVKFNWYVDGVEVHNAKTKPREEQYNSTYRVVSVLTVLHQDWLNGKEYKCKVSNKALPAPIEKTISKAKGQPREPQVYTLPPSREEMTKNQVSLTCLVKGFYPSDIAVEWESNGQPENNYKTTPPVLDSDGSFFLYSKLTVDKSRWQQGNVFSCSVMHEALHNHYTQKSLSLSPGK

SEQ ID NO: 12506 - protein, 122 aa, Artificial Sequence; identical to SEQ ID NO: 7062
  Description of Artificial Sequence: Synthetic polypeptide
  VH of XENP018176

SEQ ID NO: 12507 - protein, 5 aa, Artificial Sequence
  Description of Artificial Sequence: Synthetic peptide
  XENP018176 vhCDR1
NYWMN

SEQ ID NO: 12508 - protein, 19 aa, Artificial Sequence
  Description of Artificial Sequence: Synthetic peptide
  XENP018176 vhCDR2
EIRDKSNNYATHYAEPVKG

SEQ ID NO: 12509 - protein, 11 aa, Artificial Sequence
  Description of Artificial Sequence: Synthetic peptide
  XENP018176 vhCDR3
YYGNYGGYFDV

SEQ ID NO: 12510 - protein, 214 aa, Artificial Sequence; identical to SEQ ID NO: 11550
  Description of Artificial Sequence: Synthetic polypeptide
  XENP018176 1G6_H1.79_L1_IgG1_PVA_/S267K Light Chain

SEQ ID NO: 12511 - protein, 107 aa, Artificial Sequence; identical to SEQ ID NO: 6247
  Description of Artificial Sequence: Synthetic polypeptide
  VL of XENP018176

SEQ ID NO: 12512 - protein, 11 aa, Artificial Sequence
  Description of Artificial Sequence: Synthetic peptide
  XENP018176 vlCDR1
RASQSVSNDVA

SEQ ID NO: 12513 - protein, 7 aa, Artificial Sequence
  Description of Artificial Sequence: Synthetic peptide
  XENP018176 vlCDR2
YASHRYT

SEQ ID NO: 12514 - protein, 9 aa, Artificial Sequence
  Description of Artificial Sequence: Synthetic peptide
  XENP018176 vlCDR3
QQDYSSPRT

SEQ ID NO: 12515 - protein, 451 aa, Artificial Sequence
  Description of Artificial Sequence: Synthetic polypeptide
  XENP018177 1G6_H1.80_L1_IgG1_PVA_/S267K Heavy Chain
EVQLVESGGGLVKPGGSLRLSCAASGFTFSNYWMNWVRQAPGKGLEWVGEIRAKSNNYATHYAEPVKGRFTISRDDSKSTVYLQMNSLKTEDTAVYYCTRYYGNYGGYFDVWGAGTLVTVSSASTKGPSVFPLAPSSKSTSGGTAALGCLVKDYFPEPVTVSWNSGALTSGVHTFPAVLQSSGLYSLSSVVTVPSSSLGTQTYICNVNHKPSNTKVDKKVEPKSCDKTHTCPPCPAPPVAGPSVFLFPPKPKDTLMISRTPEVTCVVVDVKHEDPEVKFNWYVDGVEVHNAKTKPREEQYNSTYRVVSVLTVLHQDWLNGKEYKCKVSNKALPAPIEKTISKAKGQPREPQVYTLPPSREEMTKNQVSLTCLVKGFYPSDIAVEWESNGQPENNYKTTPPVLDSDGSFFLYSKLTVDKSRWQQGNVFSCSVMHEALHNHYTQKSLSLSPGK

SEQ ID NO: 12516 - protein, 122 aa, Artificial Sequence; identical to SEQ ID NO: 7071
  Description of Artificial Sequence: Synthetic polypeptide
  VH of XENP018177

SEQ ID NO: 12517 - protein, 5 aa, Artificial Sequence
  Description of Artificial Sequence: Synthetic peptide
  XENP018177 vhCDR1
NYWMN

SEQ ID NO: 12518 - protein, 19 aa, Artificial Sequence
  Description of Artificial Sequence: Synthetic peptide
  XENP018177 vhCDR2
EIRAKSNNYATHYAEPVKG

SEQ ID NO: 12519 - protein, 11 aa, Artificial Sequence
  Description of Artificial Sequence: Synthetic peptide
  XENP018177 vhCDR3
YYGNYGGYFDV

SEQ ID NO: 12520 - protein, 214 aa, Artificial Sequence; identical to SEQ ID NO: 11550
  Description of Artificial Sequence: Synthetic polypeptide
  XENP018177 1G6_H1.80_L1_IgG1_PVA_/S267K Light Chain

SEQ ID NO: 12521 - protein, 107 aa, Artificial Sequence; identical to SEQ ID NO: 6247
  Description of Artificial Sequence: Synthetic polypeptide
  VL of XENP018177

SEQ ID NO: 12522 - protein, 11 aa, Artificial Sequence
  Description of Artificial Sequence: Synthetic peptide
  XENP018177 vlCDR1
RASQSVSNDVA

SEQ ID NO: 12523 - protein, 7 aa, Artificial Sequence
  Description of Artificial Sequence: Synthetic peptide
  XENP018177 vlCDR2
YASHRYT

SEQ ID NO: 12524 - protein, 9 aa, Artificial Sequence
  Description of Artificial Sequence: Synthetic peptide
  XENP018177 vlCDR3
QQDYSSPRT

SEQ ID NO: 12525 - protein, 451 aa, Artificial Sequence
  Description of Artificial Sequence: Synthetic polypeptide
  XENP018178 1G6_H1.81_L1_IgG1_PVA_/S267K Heavy Chain
EVQLVESGGGLVKPGGSLRLSCAASGFTFSNYWMNWVRQAPGKGLEWVGEIRQKSNNYATHYAEPVKGRFTISRDDSKSTVYLQMNSLKTEDTAVYYCTRYYGNYGGYFDVWGAGTLVTVSSASTKGPSVFPLAPSSKSTSGGTAALGCLVKDYFPEPVTVSWNSGALTSGVHTFPAVLQSSGLYSLSSVVTVPSSSLGTQTYICNVNHKPSNTKVDKKVEPKSCDKTHTCPPCPAPPVAGPSVFLFPPKPKDTLMISRTPEVTCVVVDVKHEDPEVKFNWYVDGVEVHNAKTKPREEQYNSTYRVVSVLTVLHQDWLNGKEYKCKVSNKALPAPIEKTISKAKGQPREPQVYTLPPSREEMTKNQVSLTCLVKGFYPSDIAVEWESNGQPENNYKTTPPVLDSDGSFFLYSKLTVDKSRWQQGNVFSCSVMHEALHNHYTQKSLSLSPGK

SEQ ID NO: 12526 - protein, 122 aa, Artificial Sequence; identical to SEQ ID NO: 7080
  Description of Artificial Sequence: Synthetic polypeptide
  VH of XENP018178

SEQ ID NO: 12527 - protein, 5 aa, Artificial Sequence
  Description of Artificial Sequence: Synthetic peptide
  XENP018178 vhCDR1
NYWMN

SEQ ID NO: 12528 - protein, 19 aa, Artificial Sequence
  Description of Artificial Sequence: Synthetic peptide
  XENP018178 vhCDR2
EIRQKSNNYATHYAEPVKG

SEQ ID NO: 12529 - protein, 11 aa, Artificial Sequence
  Description of Artificial Sequence: Synthetic peptide
  XENP018178 vhCDR3
YYGNYGGYFDV

SEQ ID NO: 12530 - protein, 214 aa, Artificial Sequence; identical to SEQ ID NO: 11550
  Description of Artificial Sequence: Synthetic polypeptide
  XENP018178 1G6_H1.81_L1_IgG1_PVA_/S267K Light Chain

SEQ ID NO: 12531 - protein, 107 aa, Artificial Sequence; identical to SEQ ID NO: 6247
  Description of Artificial Sequence: Synthetic polypeptide
  VL of XENP018178

SEQ ID NO: 12532 - protein, 11 aa, Artificial Sequence
  Description of Artificial Sequence: Synthetic peptide
  XENP018178 vlCDR1
RASQSVSNDVA

SEQ ID NO: 12533 - protein, 7 aa, Artificial Sequence
  Description of Artificial Sequence: Synthetic peptide
  XENP018178 vlCDR2
YASHRYT

SEQ ID NO: 12534 - protein, 9 aa, Artificial Sequence
  Description of Artificial Sequence: Synthetic peptide
  XENP018178 vlCDR3
QQDYSSPRT

SEQ ID NO: 12535 - protein, 451 aa, Artificial Sequence
  Description of Artificial Sequence: Synthetic polypeptide
  XENP018179 1G6_H1.82_L1_IgG1_PVA_/S267K Heavy Chain
EVQLVESGGGLVKPGGSLRLSCAASGFTFSNYWMNWVRQAPGKGLEWVGEIRKKSNNYATHYAEPVKGRFTISRDDSKSTVYLQMNSLKTEDTAVYYCTRYYGNYGGYFDVWGAGTLVTVSSASTKGPSVFPLAPSSKSTSGGTAALGCLVKDYFPEPVTVSWNSGALTSGVHTFPAVLQSSGLYSLSSVVTVPSSSLGTQTYICNVNHKPSNTKVDKKVEPKSCDKTHTCPPCPAPPVAGPSVFLFPPKPKDTLMISRTPEVTCVVVDVKHEDPEVKFNWYVDGVEVHNAKTKPREEQYNSTYRVVSVLTVLHQDWLNGKEYKCKVSNKALPAPIEKTISKAKGQPREPQVYTLPPSREEMTKNQVSLTCLVKGFYPSDIAVEWESNGQPENNYKTTPPVLDSDGSFFLYSKLTVDKSRWQQGNVFSCSVMHEALHNHYTQKSLSLSPGK

SEQ ID NO: 12536 - protein, 122 aa, Artificial Sequence; identical to SEQ ID NO: 7089
  Description of Artificial Sequence: Synthetic polypeptide
  VH of XENP018179

SEQ ID NO: 12537 - protein, 5 aa, Artificial Sequence
  Description of Artificial Sequence: Synthetic peptide
  XENP018179 vhCDR1
NYWMN

SEQ ID NO: 12538 - protein, 19 aa, Artificial Sequence
  Description of Artificial Sequence: Synthetic peptide
  XENP018179 vhCDR2
EIRKKSNNYATHYAEPVKG

SEQ ID NO: 12539 - protein, 11 aa, Artificial Sequence
  Description of Artificial Sequence: Synthetic peptide
  XENP018179 vhCDR3
YYGNYGGYFDV

SEQ ID NO: 12540 - protein, 214 aa, Artificial Sequence; identical to SEQ ID NO: 11550
  Description of Artificial Sequence: Synthetic polypeptide
  XENP018179 1G6_H1.82_L1_IgG1_PVA_/S267K Light Chain

SEQ ID NO: 12541 - protein, 107 aa, Artificial Sequence; identical to SEQ ID NO: 6247
  Description of Artificial Sequence: Synthetic polypeptide
  VL of XENP018179

SEQ ID NO: 12542 - protein, 11 aa, Artificial Sequence
  Description of Artificial Sequence: Synthetic peptide
  XENP018179 vlCDR1
RASQSVSNDVA

SEQ ID NO: 12543 - protein, 7 aa, Artificial Sequence
  Description of Artificial Sequence: Synthetic peptide
  XENP018179 vlCDR2
YASHRYT

SEQ ID NO: 12544 - protein, 9 aa, Artificial Sequence
  Description of Artificial Sequence: Synthetic peptide
  XENP018179 vlCDR3
QQDYSSPRT

SEQ ID NO: 12545 - protein, 451 aa, Artificial Sequence
  Description of Artificial Sequence: Synthetic polypeptide
  XENP018180 1G6_H1.83_L1_IgG1_PVA_/S267K Heavy Chain
EVQLVESGGGLVKPGGSLRLSCAASGFTFSNYWMNWVRQAPGKGLEWVGEIRLRSNNYATHYAEPVKGRFTISRDDSKSTVYLQMNSLKTEDTAVYYCTRYYGNYGGYFDVWGAGTLVTVSSASTKGPSVFPLAPSSKSTSGGTAALGCLVKDYFPEPVTVSWNSGALTSGVHTFPAVLQSSGLYSLSSVVTVPSSSLGTQTYICNVNHKPSNTKVDKKVEPKSCDKTHTCPPCPAPPVAGPSVFLFPPKPKDTLMISRTPEVTCVVVDVKHEDPEVKFNWYVDGVEVHNAKTKPREEQYNSTYRVVSVLTVLHQDWLNGKEYKCKVSNKALPAPIEKTISKAKGQPREPQVYTLPPSREEMTKNQVSLTCLVKGFYPSDIAVEWESNGQPENNYKTTPPVLDSDGSFFLYSKLTVDKSRWQQGNVFSCSVMHEALHNHYTQKSLSLSPGK

SEQ ID NO: 12546 - protein, 122 aa, Artificial Sequence; identical to SEQ ID NO: 7098
  Description of Artificial Sequence: Synthetic polypeptide
  VH of XENP018180

SEQ ID NO: 12547 - protein, 5 aa, Artificial Sequence
  Description of Artificial Sequence: Synthetic peptide
  XENP018180 vhCDR1
NYWMN

SEQ ID NO: 12548 - protein, 19 aa, Artificial Sequence
  Description of Artificial Sequence: Synthetic peptide
  XENP018180 vhCDR2
EIRLRSNNYATHYAEPVKG

SEQ ID NO: 12549 - protein, 11 aa, Artificial Sequence
  Description of Artificial Sequence: Synthetic peptide
  XENP018180 vhCDR3
YYGNYGGYFDV

SEQ ID NO: 12550 - protein, 214 aa, Artificial Sequence; identical to SEQ ID NO: 11550
  Description of Artificial Sequence: Synthetic polypeptide
  XENP018180 1G6_H1.83_L1_IgG1_PVA_/S267K Light Chain

SEQ ID NO: 12551 - protein, 107 aa, Artificial Sequence; identical to SEQ ID NO: 6247
  Description of Artificial Sequence: Synthetic polypeptide
  VL of XENP018180

SEQ ID NO: 12552 - protein, 11 aa, Artificial Sequence
  Description of Artificial Sequence: Synthetic peptide
  XENP018180 vlCDR1
RASQSVSNDVA

SEQ ID NO: 12553 - protein, 7 aa, Artificial Sequence
  Description of Artificial Sequence: Synthetic peptide
  XENP018180 vlCDR2
YASHRYT

SEQ ID NO: 12554 - protein, 9 aa, Artificial Sequence
  Description of Artificial Sequence: Synthetic peptide
  XENP018180 vlCDR3
QQDYSSPRT

SEQ ID NO: 12555 - protein, 451 aa, Artificial Sequence
  Description of Artificial Sequence: Synthetic polypeptide
  XENP018181 1G6_H1.84_L1_IgG1_PVA_/S267K Heavy Chain
EVQLVESGGGLVKPGGSLRLSCAASGFTFSNYWMNWVRQAPGKGLEWVGEIRLESNNYATHYAEPVKGRFTISRDDSKSTVYLQMNSLKTEDTAVYYCTRYYGNYGGYFDVWGAGTLVTVSSASTKGPSVFPLAPSSKSTSGGTAALGCLVKDYFPEPVTVSWNSGALTSGVHTFPAVLQSSGLYSLSSVVTVPSSSLGTQTYICNVNHKPSNTKVDKKVEPKSCDKTHTCPPCPAPPVAGPSVFLFPPKPKDTLMISRTPEVTCVVVDVKHEDPEVKFNWYVDGVEVHNAKTKPREEQYNSTYRVVSVLTVLHQDWLNGKEYKCKVSNKALPAPIEKTISKAKGQPREPQVYTLPPSREEMTKNQVSLTCLVKGFYPSDIAVEWESNGQPENNYKTTPPVLDSDGSFFLYSKLTVDKSRWQQGNVFSCSVMHEALHNHYTQKSLSLSPGK

SEQ ID NO: 12556 - protein, 122 aa, Artificial Sequence; identical to SEQ ID NO: 7107
  Description of Artificial Sequence: Synthetic polypeptide
  VH of XENP018181

SEQ ID NO: 12557 - protein, 5 aa, Artificial Sequence
  Description of Artificial Sequence: Synthetic peptide
  XENP018181 vhCDR1
NYWMN

SEQ ID NO: 12558 - protein, 19 aa, Artificial Sequence
  Description of Artificial Sequence: Synthetic peptide
  XENP018181 vhCDR2
EIRLESNNYATHYAEPVKG

SEQ ID NO: 12559 - protein, 11 aa, Artificial Sequence
  Description of Artificial Sequence: Synthetic peptide
  XENP018181 vhCDR3
YYGNYGGYFDV

SEQ ID NO: 12560 - protein, 214 aa, Artificial Sequence; identical to SEQ ID NO: 11550
  Description of Artificial Sequence: Synthetic polypeptide
  XENP018181 1G6_H1.84_L1_IgG1_PVA_/S267K Light Chain

SEQ ID NO: 12561 - protein, 107 aa, Artificial Sequence; identical to SEQ ID NO: 6247
  Description of Artificial Sequence: Synthetic polypeptide
  VL of XENP018181

SEQ ID NO: 12562 - protein, 11 aa, Artificial Sequence
  Description of Artificial Sequence: Synthetic peptide
  XENP018181 vlCDR1
RASQSVSNDVA

SEQ ID NO: 12563 - protein, 7 aa, Artificial Sequence
  Description of Artificial Sequence: Synthetic peptide
  XENP018181 vlCDR2
YASHRYT

SEQ ID NO: 12564 - protein, 9 aa, Artificial Sequence
  Description of Artificial Sequence: Synthetic peptide
  XENP018181 vlCDR3
QQDYSSPRT

SEQ ID NO: 12565 - protein, 451 aa, Artificial Sequence
  Description of Artificial Sequence: Synthetic polypeptide
  XENP018182 1G6_H1.85_L1_IgG1_PVA_/S267K Heavy Chain
EVQLVESGGGLVKPGGSLRLSCAASGFTFSNYWMNWVRQAPGKGLEWVGEIRLHSNNYATHYAEPVKGRFTISRDDSKSTVYLQMNSLKTEDTAVYYCTRYYGNYGGYFDVWGAGTLVTVSSASTKGPSVFPLAPSSKSTSGGTAALGCLVKDYFPEPVTVSWNSGALTSGVHTFPAVLQSSGLYSLSSVVTVPSSSLGTQTYICNVNHKPSNTKVDKKVEPKSCDKTHTCPPCPAPPVAGPSVFLFPPKPKDTLMISRTPEVTCVVVDVKHEDPEVKFNWYVDGVEVHNAKTKPREEQYNSTYRVVSVLTVLHQDWLNGKEYKCKVSNKALPAPIEKTISKAKGQPREPQVYTLPPSREEMTKNQVSLTCLVKGFYPSDIAVEWESNGQPENNYKTTPPVLDSDGSFFLYSKLTVDKSRWQQGNVFSCSVMHEALHNHYTQKSLSLSPGK

SEQ ID NO: 12566 - protein, 122 aa, Artificial Sequence; identical to SEQ ID NO: 7116
  Description of Artificial Sequence: Synthetic polypeptide
  VH of XENP018182

SEQ ID NO: 12567 - protein, 5 aa, Artificial Sequence
  Description of Artificial Sequence: Synthetic peptide
  XENP018182 vhCDR1
NYWMN

SEQ ID NO: 12568 - protein, 19 aa, Artificial Sequence
  Description of Artificial Sequence: Synthetic peptide
  XENP018182 vhCDR2
EIRLHSNNYATHYAEPVKG

SEQ ID NO: 12569 - protein, 11 aa, Artificial Sequence
  Description of Artificial Sequence: Synthetic peptide
  XENP018182 vhCDR3
YYGNYGGYFDV

SEQ ID NO: 12570 - protein, 214 aa, Artificial Sequence; identical to SEQ ID NO: 11550
  Description of Artificial Sequence: Synthetic polypeptide
  XENP018182 1G6_H1.85_L1_IgG1_PVA_/S267K Light Chain

SEQ ID NO: 12571 - protein, 107 aa, Artificial Sequence; identical to SEQ ID NO: 6247
  Description of Artificial Sequence: Synthetic polypeptide
  VL of XENP018182

SEQ ID NO: 12572 - protein, 11 aa, Artificial Sequence
  Description of Artificial Sequence: Synthetic peptide
  XENP018182 vlCDR1
RASQSVSNDVA

SEQ ID NO: 12573 - protein, 7 aa, Artificial Sequence
  Description of Artificial Sequence: Synthetic peptide
  XENP018182 vlCDR2
YASHRYT

SEQ ID NO: 12574 - protein, 9 aa, Artificial Sequence
  Description of Artificial Sequence: Synthetic peptide
  XENP018182 vlCDR3
QQDYSSPRT

SEQ ID NO: 12575 - protein, 451 aa, Artificial Sequence
  Description of Artificial Sequence: Synthetic polypeptide
  XENP018183 1G6_H1.86_L1_IgG1_PVA_/S267K Heavy Chain
EVQLVESGGGLVKPGGSLRLSCAASGFTFSNYWMNWVRQAPGKGLEWVGEIRLSSNNYATHYAEPVKGRFTISRDDSKSTVYLQMNSLKTEDTAVYYCTRYYGNYGGYFDVWGAGTLVTVSSASTKGPSVFPLAPSSKSTSGGTAALGCLVKDYFPEPVTVSWNSGALTSGVHTFPAVLQSSGLYSLSSVVTVPSSSLGTQTYICNVNHKPSNTKVDKKVEPKSCDKTHTCPPCPAPPVAGPSVFLFPPKPKDTLMISRTPEVTCVVVDVKHEDPEVKFNWYVDGVEVHNAKTKPREEQYNSTYRVVSVLTVLHQDWLNGKEYKCKVSNKALPAPIEKTISKAKGQPREPQVYTLPPSREEMTKNQVSLTCLVKGFYPSDIAVEWESNGQPENNYKTTPPVLDSDGSFFLYSKLTVDKSRWQQGNVFSCSVMHEALHNHYTQKSLSLSPGK

SEQ ID NO: 12576 - protein, 122 aa, Artificial Sequence; identical to SEQ ID NO: 7125
  Description of Artificial Sequence: Synthetic polypeptide
  VH of XENP018183

SEQ ID NO: 12577 - protein, 5 aa, Artificial Sequence
  Description of Artificial Sequence: Synthetic peptide
  XENP018183 vhCDR1
NYWMN

SEQ ID NO: 12578 - protein, 19 aa, Artificial Sequence
  Description of Artificial Sequence: Synthetic peptide
  XENP018183 vhCDR2
EIRLSSNNYATHYAEPVKG

SEQ ID NO: 12579 - protein, 11 aa, Artificial Sequence
  Description of Artificial Sequence: Synthetic peptide
  XENP018183 vhCDR3
YYGNYGGYFDV

SEQ ID NO: 12580 - protein, 214 aa, Artificial Sequence; identical to SEQ ID NO: 11550
  Description of Artificial Sequence: Synthetic polypeptide
  XENP018183 1G6_H1.86_L1_IgG1_PVA_/S267K Light Chain

SEQ ID NO: 12581 - protein, 107 aa, Artificial Sequence; identical to SEQ ID NO: 6247
  Description of Artificial Sequence: Synthetic polypeptide
  VL of XENP018183

SEQ ID NO: 12582 - protein, 11 aa, Artificial Sequence
  Description of Artificial Sequence: Synthetic peptide
  XENP018183 vlCDR1
RASQSVSNDVA

SEQ ID NO: 12583 - protein, 7 aa, Artificial Sequence
  Description of Artificial Sequence: Synthetic peptide
  XENP018183 vlCDR2
YASHRYT

SEQ ID NO: 12584 - protein, 9 aa, Artificial Sequence
  Description of Artificial Sequence: Synthetic peptide
  XENP018183 vlCDR3
QQDYSSPRT

SEQ ID NO: 12585 - protein, 451 aa, Artificial Sequence
  Description of Artificial Sequence: Synthetic polypeptide
  XENP018184 1G6_H1.87_L1_IgG1_PVA_/S267K Heavy Chain
EVQLVESGGGLVKPGGSLRLSCAASGFTFSNYWMNWVRQAPGKGLEWVGEIRLDSNNYATHYAEPVKGRFTISRDDSKSTVYLQMNSLKTEDTAVYYCTRYYGNYGGYFDVWGAGTLVTVSSASTKGPSVFPLAPSSKSTSGGTAALGCLVKDYFPEPVTVSWNSGALTSGVHTFPAVLQSSGLYSLSSVVTVPSSSLGTQTYICNVNHKPSNTKVDKKVEPKSCDKTHTCPPCPAPPVAGPSVFLFPPKPKDTLMISRTPEVTCVVVDVKHEDPEVKFNWYVDGVEVHNAKTKPREEQYNSTYRVVSVLTVLHQDWLNGKEYKCKVSNKALPAPIEKTISKAKGQPREPQVYTLPPSREEMTKNQVSLTCLVKGFYPSDIAVEWESNGQPENNYKTTPPVLDSDGSFFLYSKLTVDKSRWQQGNVFSCSVMHEALHNHYTQKSLSLSPGK

SEQ ID NO: 12586 - protein, 122 aa, Artificial Sequence; identical to SEQ ID NO: 7134
  Description of Artificial Sequence: Synthetic polypeptide
  VH of XENP018184

SEQ ID NO: 12587 - protein, 5 aa, Artificial Sequence
  Description of Artificial Sequence: Synthetic peptide
  XENP018184 vhCDR1
NYWMN

SEQ ID NO: 12588 - protein, 19 aa, Artificial Sequence
  Description of Artificial Sequence: Synthetic peptide
  XENP018184 vhCDR2
EIRLDSNNYATHYAEPVKG

SEQ ID NO: 12589 - protein, 11 aa, Artificial Sequence
  Description of Artificial Sequence: Synthetic peptide
  XENP018184 vhCDR3
YYGNYGGYFDV

SEQ ID NO: 12590 - protein, 214 aa, Artificial Sequence; identical to SEQ ID NO: 11550
  Description of Artificial Sequence: Synthetic polypeptide
  XENP018184 1G6_H1.87_L1_IgG1_PVA_/S267K Light Chain

SEQ ID NO: 12591 - protein, 107 aa, Artificial Sequence; identical to SEQ ID NO: 6247
  Description of Artificial Sequence: Synthetic polypeptide
  VL of XENP018184

SEQ ID NO: 12592 - protein, 11 aa, Artificial Sequence
  Description of Artificial Sequence: Synthetic peptide
  XENP018184 vlCDR1
RASQSVSNDVA

SEQ ID NO: 12593 - protein, 7 aa, Artificial Sequence
  Description of Artificial Sequence: Synthetic peptide
  XENP018184 vlCDR2
YASHRYT

SEQ ID NO: 12594 - protein, 9 aa, Artificial Sequence
  Description of Artificial Sequence: Synthetic peptide
  XENP018184 vlCDR3
QQDYSSPRT

SEQ ID NO: 12595 - protein, 451 aa, Artificial Sequence
  Description of Artificial Sequence: Synthetic polypeptide
  XENP018185 1G6_H1.88_L1_IgG1_PVA_/S267K Heavy Chain
EVQLVESGGGLVKPGGSLRLSCAASGFTFSNYWMNWVRQAPGKGLEWVGEIRLASNNYATHYAEPVKGRFTISRDDSKSTVYLQMNSLKTEDTAVYYCTRYYGNYGGYFDVWGAGTLVTVSSASTKGPSVFPLAPSSKSTSGGTAALGCLVKDYFPEPVTVSWNSGALTSGVHTFPAVLQSSGLYSLSSVVTVPSSSLGTQTYICNVNHKPSNTKVDKKVEPKSCDKTHTCPPCPAPPVAGPSVFLFPPKPKDTLMISRTPEVTCVVVDVKHEDPEVKFNWYVDGVEVHNAKTKPREEQYNSTYRVVSVLTVLHQDWLNGKEYKCKVSNKALPAPIEKTISKAKGQPREPQVYTLPPSREEMTKNQVSLTCLVKGFYPSDIAVEWESNGQPENNYKTTPPVLDSDGSFFLYSKLTVDKSRWQQGNVFSCSVMHEALHNHYTQKSLSLSPGK

SEQ ID NO: 12596 - protein, 122 aa, Artificial Sequence; identical to SEQ ID NO: 7143
  Description of Artificial Sequence: Synthetic polypeptide
  VH of XENP018185

SEQ ID NO: 12597 - protein, 5 aa, Artificial Sequence
  Description of Artificial Sequence: Synthetic peptide
  XENP018185 vhCDR1
NYWMN

SEQ ID NO: 12598 - protein, 19 aa, Artificial Sequence
  Description of Artificial Sequence: Synthetic peptide
  XENP018185 vhCDR2
EIRLASNNYATHYAEPVKG

SEQ ID NO: 12599 - protein, 11 aa, Artificial Sequence
  Description of Artificial Sequence: Synthetic peptide
  XENP018185 vhCDR3
YYGNYGGYFDV

SEQ ID NO: 12600 - protein, 214 aa, Artificial Sequence; identical to SEQ ID NO: 11550
  Description of Artificial Sequence: Synthetic polypeptide
  XENP018185 1G6_H1.88_L1_IgG1_PVA_/S267K Light Chain

SEQ ID NO: 12601 - protein, 107 aa, Artificial Sequence; identical to SEQ ID NO: 6247
  Description of Artificial Sequence: Synthetic polypeptide
  VL of XENP018185

SEQ ID NO: 12602 - protein, 11 aa, Artificial Sequence
  Description of Artificial Sequence: Synthetic peptide
  XENP018185 vlCDR1
RASQSVSNDVA

SEQ ID NO: 12603 - protein, 7 aa, Artificial Sequence
  Description of Artificial Sequence: Synthetic peptide
  XENP018185 vlCDR2
YASHRYT

SEQ ID NO: 12604 - protein, 9 aa, Artificial Sequence
  Description of Artificial Sequence: Synthetic peptide
  XENP018185 vlCDR3
QQDYSSPRT

SEQ ID NO: 12605 - protein, 451 aa, Artificial Sequence
  Description of Artificial Sequence: Synthetic polypeptide
  XENP018186 1G6_H1.89_L1_IgG1_PVA_/S267K Heavy Chain
EVQLVESGGGLVKPGGSLRLSCAASGFTFSNYWMNWVRQAPGKGLEWVGEIRLGSNNYATHYAEPVKGRFTISRDDSKSTVYLQMNSLKTEDTAVYYCTRYYGNYGGYFDVWGAGTLVTVSSASTKGPSVFPLAPSSKSTSGGTAALGCLVKDYFPEPVTVSWNSGALTSGVHTFPAVLQSSGLYSLSSVVTVPSSSLGTQTYICNVNHKPSNTKVDKKVEPKSCDKTHTCPPCPAPPVAGPSVFLFPPKPKDTLMISRTPEVTCVVVDVKHEDPEVKFNWYVDGVEVHNAKTKPREEQYNSTYRVVSVLTVLHQDWLNGKEYKCKVSNKALPAPIEKTISKAKGQPREPQVYTLPPSREEMTKNQVSLTCLVKGFYPSDIAVEWESNGQPENNYKTTPPVLDSDGSFFLYSKLTVDKSRWQQGNVFSCSVMHEALHNHYTQKSLSLSPGK

SEQ ID NO: 12606 - protein, 122 aa, Artificial Sequence; identical to SEQ ID NO: 7152
  Description of Artificial Sequence: Synthetic polypeptide
  VH of XENP018186

SEQ ID NO: 12607 - protein, 5 aa, Artificial Sequence
  Description of Artificial Sequence: Synthetic peptide
  XENP018186 vhCDR1
NYWMN

SEQ ID NO: 12608 - protein, 19 aa, Artificial Sequence
  Description of Artificial Sequence: Synthetic peptide
  XENP018186 vhCDR2
EIRLGSNNYATHYAEPVKG

SEQ ID NO: 12609 - protein, 11 aa, Artificial Sequence
  Description of Artificial Sequence: Synthetic peptide
  XENP018186 vhCDR3
YYGNYGGYFDV

SEQ ID NO: 12610 - protein, 214 aa, Artificial Sequence; identical to SEQ ID NO: 11550
  Description of Artificial Sequence: Synthetic polypeptide
  XENP018186 1G6_H1.89_L1_IgG1_PVA_/S267K Light Chain

SEQ ID NO: 12611 - protein, 107 aa, Artificial Sequence; identical to SEQ ID NO: 6247
  Description of Artificial Sequence: Synthetic polypeptide
  VL of XENP018186

SEQ ID NO: 12612 - protein, 11 aa, Artificial Sequence
  Description of Artificial Sequence: Synthetic peptide
  XENP018186 vlCDR1
RASQSVSNDVA

SEQ ID NO: 12613 - protein, 7 aa, Artificial Sequence
  Description of Artificial Sequence: Synthetic peptide
  XENP018186 vlCDR2
YASHRYT

SEQ ID NO: 12614 - protein, 9 aa, Artificial Sequence
  Description of Artificial Sequence: Synthetic peptide
  XENP018186 vlCDR3
QQDYSSPRT

SEQ ID NO: 12615 - protein, 451 aa, Artificial Sequence
  Description of Artificial Sequence: Synthetic polypeptide
  XENP018187 1G6_H1.90_L1_IgG1_PVA_/S267K Heavy Chain
EVQLVESGGGLVKPGGSLRLSCAASGFTFSNYWMNWVRQAPGKGLEWVGEIRLYSNNYATHYAEPVKGRFTISRDDSKSTVYLQMNSLKTEDTAVYYCTRYYGNYGGYFDVWGAGTLVTVSSASTKGPSVFPLAPSSKSTSGGTAALGCLVKDYFPEPVTVSWNSGALTSGVHTFPAVLQSSGLYSLSSVVTVPSSSLGTQTYICNVNHKPSNTKVDKKVEPKSCDKTHTCPPCPAPPVAGPSVFLFPPKPKDTLMISRTPEVTCVVVDVKHEDPEVKFNWYVDGVEVHNAKTKPREEQYNSTYRVVSVLTVLHQDWLNGKEYKCKVSNKALPAPIEKTISKAKGQPREPQVYTLPPSREEMTKNQVSLTCLVKGFYPSDIAVEWESNGQPENNYKTTPPVLDSDGSFFLYSKLTVDKSRWQQGNVFSCSVMHEALHNHYTQKSLSLSPGK

SEQ ID NO: 12616 - protein, 122 aa, Artificial Sequence; identical to SEQ ID NO: 7161
  Description of Artificial Sequence: Synthetic polypeptide
  VH of XENP018187

SEQ ID NO: 12617 - protein, 5 aa, Artificial Sequence
  Description of Artificial Sequence: Synthetic peptide
  XENP018187 vhCDR1
NYWMN

SEQ ID NO: 12618 - protein, 19 aa, Artificial Sequence
  Description of Artificial Sequence: Synthetic peptide
  XENP018187 vhCDR2
EIRLYSNNYATHYAEPVKG

SEQ ID NO: 12619 - protein, 11 aa, Artificial Sequence
  Description of Artificial Sequence: Synthetic peptide
  XENP018187 vhCDR3
YYGNYGGYFDV

SEQ ID NO: 12620 - protein, 214 aa, Artificial Sequence; identical to SEQ ID NO: 11550
  Description of Artificial Sequence: Synthetic polypeptide
  XENP018187 1G6_H1.90_L1_IgG1_PVA_/S267K Light Chain

SEQ ID NO: 12621 - protein, 107 aa, Artificial Sequence; identical to SEQ ID NO: 6247
  Description of Artificial Sequence: Synthetic polypeptide
  VL of XENP018187

SEQ ID NO: 12622 - protein, 11 aa, Artificial Sequence
  Description of Artificial Sequence: Synthetic peptide
  XENP018187 vlCDR1
RASQSVSNDVA

SEQ ID NO: 12623 - protein, 7 aa, Artificial Sequence
  Description of Artificial Sequence: Synthetic peptide
  XENP018187 vlCDR2
YASHRYT

SEQ ID NO: 12624 - protein, 9 aa, Artificial Sequence
  Description of Artificial Sequence: Synthetic peptide
  XENP018187 vlCDR3
QQDYSSPRT

SEQ ID NO: 12625 - protein, 451 aa, Artificial Sequence
  Description of Artificial Sequence: Synthetic polypeptide
  XENP018188 1G6_H1.91_L1_IgG1_PVA_/S267K Heavy Chain
EVQLVESGGGLVKPGGSLRLSCAASGFTFSNYWMNWVRQAPGKGLEWVGEIRLISNNYATHYAEPVKGRFTISRDDSKSTVYLQMNSLKTEDTAVYYCTRYYGNYGGYFDVWGAGTLVTVSSASTKGPSVFPLAPSSKSTSGGTAALGCLVKDYFPEPVTVSWNSGALTSGVHTFPAVLQSSGLYSLSSVVTVPSSSLGTQTYICNVNHKPSNTKVDKKVEPKSCDKTHTCPPCPAPPVAGPSVFLFPPKPKDTLMISRTPEVTCVVVDVKHEDPEVKFNWYVDGVEVHNAKTKPREEQYNSTYRVVSVLTVLHQDWLNGKEYKCKVSNKALPAPIEKTISKAKGQPREPQVYTLPPSREEMTKNQVSLTCLVKGFYPSDIAVEWESNGQPENNYKTTPPVLDSDGSFFLYSKLTVDKSRWQQGNVFSCSVMHEALHNHYTQKSLSLSPGK

SEQ ID NO: 12626 - protein, 122 aa, Artificial Sequence; identical to SEQ ID NO: 7170
  Description of Artificial Sequence: Synthetic polypeptide
  VH of XENP018188

SEQ ID NO: 12627 - protein, 5 aa, Artificial Sequence
  Description of Artificial Sequence: Synthetic peptide
  XENP018188 vhCDR1
NYWMN

SEQ ID NO: 12628 - protein, 19 aa, Artificial Sequence
  Description of Artificial Sequence: Synthetic peptide
  XENP018188 vhCDR2
EIRLISNNYATHYAEPVKG

SEQ ID NO: 12629 - protein, 11 aa, Artificial Sequence
  Description of Artificial Sequence: Synthetic peptide
  XENP018188 vhCDR3
YYGNYGGYFDV

SEQ ID NO: 12630 - protein, 214 aa, Artificial Sequence; identical to SEQ ID NO: 11550
  Description of Artificial Sequence: Synthetic polypeptide
  XENP018188 1G6_H1.91_L1_IgG1_PVA_/S267K Light Chain

SEQ ID NO: 12631 - protein, 107 aa, Artificial Sequence; identical to SEQ ID NO: 6247
  Description of Artificial Sequence: Synthetic polypeptide
  VL of XENP018188

SEQ ID NO: 12632 - protein, 11 aa, Artificial Sequence
  Description of Artificial Sequence: Synthetic peptide
  XENP018188 vlCDR1
RASQSVSNDVA

SEQ ID NO: 12633 - protein, 7 aa, Artificial Sequence
  Description of Artificial Sequence: Synthetic peptide
  XENP018188 vlCDR2
YASHRYT

SEQ ID NO: 12634 - protein, 9 aa, Artificial Sequence
  Description of Artificial Sequence: Synthetic peptide
  XENP018188 vlCDR3
QQDYSSPRT

SEQ ID NO: 12635 - protein, 451 aa, Artificial Sequence
  Description of Artificial Sequence: Synthetic polypeptide
  XENP018189 1G6_H1.92_L1_IgG1_PVA_/S267K Heavy Chain
EVQLVESGGGLVKPGGSLRLSCAASGFTFSNYWMNWVRQAPGKGLEWVGEIRLKTNNYATHYAEPVKGRFTISRDDSKSTVYLQMNSLKTEDTAVYYCTRYYGNYGGYFDVWGAGTLVTVSSASTKGPSVFPLAPSSKSTSGGTAALGCLVKDYFPEPVTVSWNSGALTSGVHTFPAVLQSSGLYSLSSVVTVPSSSLGTQTYICNVNHKPSNTKVDKKVEPKSCDKTHTCPPCPAPPVAGPSVFLFPPKPKDTLMISRTPEVTCVVVDVKHEDPEVKFNWYVDGVEVHNAKTKPREEQYNSTYRVVSVLTVLHQDWLNGKEYKCKVSNKALPAPIEKTISKAKGQPREPQVYTLPPSREEMTKNQVSLTCLVKGFYPSDIAVEWESNGQPENNYKTTPPVLDSDGSFFLYSKLTVDKSRWQQGNVFSCSVMHEALHNHYTQKSLSLSPGK

SEQ ID NO: 12636 - protein, 122 aa, Artificial Sequence; identical to SEQ ID NO: 7179
  Description of Artificial Sequence: Synthetic polypeptide
  VH of XENP018189

SEQ ID NO: 12637 - protein, 5 aa, Artificial Sequence
  Description of Artificial Sequence: Synthetic peptide
  XENP018189 vhCDR1
NYWMN

SEQ ID NO: 12638 - protein, 19 aa, Artificial Sequence
  Description of Artificial Sequence: Synthetic peptide
  XENP018189 vhCDR2
EIRLKTNNYATHYAEPVKG

SEQ ID NO: 12639 - protein, 11 aa, Artificial Sequence
  Description of Artificial Sequence: Synthetic peptide
  XENP018189 vhCDR3
YYGNYGGYFDV

SEQ ID NO: 12640 - protein, 214 aa, Artificial Sequence; identical to SEQ ID NO: 11550
  Description of Artificial Sequence: Synthetic polypeptide
  XENP018189 1G6_H1.92_L1_IgG1_PVA_/S267K Light Chain

SEQ ID NO: 12641 - protein, 107 aa, Artificial Sequence; identical to SEQ ID NO: 6247
  Description of Artificial Sequence: Synthetic polypeptide
  VL of XENP018189

SEQ ID NO: 12642 - protein, 11 aa, Artificial Sequence
  Description of Artificial Sequence: Synthetic peptide
  XENP018189 vlCDR1
RASQSVSNDVA

SEQ ID NO: 12643 - protein, 7 aa, Artificial Sequence
  Description of Artificial Sequence: Synthetic peptide
  XENP018189 vlCDR2
YASHRYT

SEQ ID NO: 12644 - protein, 9 aa, Artificial Sequence
  Description of Artificial Sequence: Synthetic peptide
  XENP018189 vlCDR3
QQDYSSPRT

SEQ ID NO: 12645 - protein, 451 aa, Artificial Sequence
  Description of Artificial Sequence: Synthetic polypeptide
  XENP018190 1G6_H1.93_L1_IgG1_PVA_/S267K Heavy Chain
EVQLVESGGGLVKPGGSLRLSCAASGFTFSNYWMNWVRQAPGKGLEWVGEIRLKANNYATHYAEPVKGRFTISRDDSKSTVYLQMNSLKTEDTAVYYCTRYYGNYGGYFDVWGAGTLVTVSSASTKGPSVFPLAPSSKSTSGGTAALGCLVKDYFPEPVTVSWNSGALTSGVHTFPAVLQSSGLYSLSSVVTVPSSSLGTQTYICNVNHKPSNTKVDKKVEPKSCDKTHTCPPCPAPPVAGPSVFLFPPKPKDTLMISRTPEVTCVVVDVKHEDPEVKFNWYVDGVEVHNAKTKPREEQYNSTYRVVSVLTVLHQDWLNGKEYKCKVSNKALPAPIEKTISKAKGQPREPQVYTLPPSREEMTKNQVSLTCLVKGFYPSDIAVEWESNGQPENNYKTTPPVLDSDGSFFLYSKLTVDKSRWQQGNVFSCSVMHEALHNHYTQKSLSLSPGK

SEQ ID NO: 12646 - protein, 122 aa, Artificial Sequence; identical to SEQ ID NO: 7188
  Description of Artificial Sequence: Synthetic polypeptide
  VH of XENP018190

SEQ ID NO: 12647 - protein, 5 aa, Artificial Sequence
  Description of Artificial Sequence: Synthetic peptide
  XENP018190 vhCDR1
NYWMN

SEQ ID NO: 12648 - protein, 19 aa, Artificial Sequence
  Description of Artificial Sequence: Synthetic peptide
  XENP018190 vhCDR2
EIRLKANNYATHYAEPVKG

SEQ ID NO: 12649 - protein, 11 aa, Artificial Sequence
  Description of Artificial Sequence: Synthetic peptide
  XENP018190 vhCDR3
YYGNYGGYFDV

SEQ ID NO: 12650 - protein, 214 aa, Artificial Sequence; identical to SEQ ID NO: 11550
  Description of Artificial Sequence: Synthetic polypeptide
  XENP018190 1G6_H1.93_L1_IgG1_PVA_/S267K Light Chain

SEQ ID NO: 12651 - protein, 107 aa, Artificial Sequence; identical to SEQ ID NO: 6247
  Description of Artificial Sequence: Synthetic polypeptide
  VL of XENP018190

SEQ ID NO: 12652 - protein, 11 aa, Artificial Sequence
  Description of Artificial Sequence: Synthetic peptide
  XENP018190 vlCDR1
RASQSVSNDVA

SEQ ID NO: 12653 - protein, 7 aa, Artificial Sequence
  Description of Artificial Sequence: Synthetic peptide
  XENP018190 vlCDR2
YASHRYT

SEQ ID NO: 12654 - protein, 9 aa, Artificial Sequence
  Description of Artificial Sequence: Synthetic peptide
  XENP018190 vlCDR3
QQDYSSPRT

SEQ ID NO: 12655 - protein, 451 aa, Artificial Sequence
  Description of Artificial Sequence: Synthetic polypeptide
  XENP018191 1G6_H1.94_L1_IgG1_PVA_/S267K Heavy Chain
EVQLVESGGGLVKPGGSLRLSCAASGFTFSNYWMNWVRQAPGKGLEWVGEIRLKQNNYATHYAEPVKGRFTISRDDSKSTVYLQMNSLKTEDTAVYYCTRYYGNYGGYFDVWGAGTLVTVSSASTKGPSVFPLAPSSKSTSGGTAALGCLVKDYFPEPVTVSWNSGALTSGVHTFPAVLQSSGLYSLSSVVTVPSSSLGTQTYICNVNHKPSNTKVDKKVEPKSCDKTHTCPPCPAPPVAGPSVFLFPPKPKDTLMISRTPEVTCVVVDVKHEDPEVKFNWYVDGVEVHNAKTKPREEQYNSTYRVVSVLTVLHQDWLNGKEYKCKVSNKALPAPIEKTISKAKGQPREPQVYTLPPSREEMTKNQVSLTCLVKGFYPSDIAVEWESNGQPENNYKTTPPVLDSDGSFFLYSKLTVDKSRWQQGNVFSCSVMHEALHNHYTQKSLSLSPGK

SEQ ID NO: 12656 - protein, 122 aa, Artificial Sequence; identical to SEQ ID NO: 7197
  Description of Artificial Sequence: Synthetic polypeptide
  VH of XENP018191

SEQ ID NO: 12657 - protein, 5 aa, Artificial Sequence
  Description of Artificial Sequence: Synthetic peptide
  XENP018191 vhCDR1
NYWMN

SEQ ID NO: 12658 - protein, 19 aa, Artificial Sequence
  Description of Artificial Sequence: Synthetic peptide
  XENP018191 vhCDR2
EIRLKQNNYATHYAEPVKG

SEQ ID NO: 12659 - protein, 11 aa, Artificial Sequence
  Description of Artificial Sequence: Synthetic peptide
  XENP018191 vhCDR3
YYGNYGGYFDV

SEQ ID NO: 12660 - protein, 214 aa, Artificial Sequence; identical to SEQ ID NO: 11550
  Description of Artificial Sequence: Synthetic polypeptide
  XENP018191 1G6_H1.94_L1_IgG1_PVA_/S267K Light Chain

SEQ ID NO: 12661 - protein, 107 aa, Artificial Sequence; identical to SEQ ID NO: 6247
  Description of Artificial Sequence: Synthetic polypeptide
  VL of XENP018191

SEQ ID NO: 12662 - protein, 11 aa, Artificial Sequence
  Description of Artificial Sequence: Synthetic peptide
  XENP018191 vlCDR1
RASQSVSNDVA

SEQ ID NO: 12663 - protein, 7 aa, Artificial Sequence
  Description of Artificial Sequence: Synthetic peptide
  XENP018191 vlCDR2
YASHRYT

SEQ ID NO: 12664 - protein, 9 aa, Artificial Sequence
  Description of Artificial Sequence: Synthetic peptide
  XENP018191 vlCDR3
QQDYSSPRT

SEQ ID NO: 12665 - protein, 451 aa, Artificial Sequence
  Description of Artificial Sequence: Synthetic polypeptide
  XENP018192 1G6_H1.95_L1_IgG1_PVA_/S267K Heavy Chain
EVQLVESGGGLVKPGGSLRLSCAASGFTFSNYWMNWVRQAPGKGLEWVGEIRLKGNNYATHYAEPVKGRFTISRDDSKSTVYLQMNSLKTEDTAVYYCTRYYGNYGGYFDVWGAGTLVTVSSASTKGPSVFPLAPSSKSTSGGTAALGCLVKDYFPEPVTVSWNSGALTSGVHTFPAVLQSSGLYSLSSVVTVPSSSLGTQTYICNVNHKPSNTKVDKKVEPKSCDKTHTCPPCPAPPVAGPSVFLFPPKPKDTLMISRTPEVTCVVVDVKHEDPEVKFNWYVDGVEVHNAKTKPREEQYNSTYRVVSVLTVLHQDWLNGKEYKCKVSNKALPAPIEKTISKAKGQPREPQVYTLPPSREEMTKNQVSLTCLVKGFYPSDIAVEWESNGQPENNYKTTPPVLDSDGSFFLYSKLTVDKSRWQQGNVFSCSVMHEALHNHYTQKSLSLSPGK

SEQ ID NO: 12666 - protein, 122 aa, Artificial Sequence; identical to SEQ ID NO: 7206
  Description of Artificial Sequence: Synthetic polypeptide
  VH of XENP018192

SEQ ID NO: 12667 - protein, 5 aa, Artificial Sequence
  Description of Artificial Sequence: Synthetic peptide
  XENP018192 vhCDR1
NYWMN

SEQ ID NO: 12668 - protein, 19 aa, Artificial Sequence
  Description of Artificial Sequence: Synthetic peptide
  XENP018192 vhCDR2
EIRLKGNNYATHYAEPVKG

SEQ ID NO: 12669 - protein, 11 aa, Artificial Sequence
  Description of Artificial Sequence: Synthetic peptide
  XENP018192 vhCDR3
YYGNYGGYFDV

SEQ ID NO: 12670 - protein, 214 aa, Artificial Sequence; identical to SEQ ID NO: 11550
  Description of Artificial Sequence: Synthetic polypeptide
  XENP018192 1G6_H1.95_L1_IgG1_PVA_/S267K Light Chain

SEQ ID NO: 12671 - protein, 107 aa, Artificial Sequence; identical to SEQ ID NO: 6247
  Description of Artificial Sequence: Synthetic polypeptide
  VL of XENP018192

SEQ ID NO: 12672 - protein, 11 aa, Artificial Sequence
  Description of Artificial Sequence: Synthetic peptide
  XENP018192 vlCDR1
RASQSVSNDVA

SEQ ID NO: 12673 - protein, 7 aa, Artificial Sequence
  Description of Artificial Sequence: Synthetic peptide
  XENP018192 vlCDR2
YASHRYT

SEQ ID NO: 12674 - protein, 9 aa, Artificial Sequence
  Description of Artificial Sequence: Synthetic peptide
  XENP018192 vlCDR3
QQDYSSPRT

SEQ ID NO: 12675 - protein, 451 aa, Artificial Sequence
  Description of Artificial Sequence: Synthetic polypeptide
  XENP018193 1G6_H1.96_L1_IgG1_PVA_/S267K Heavy Chain
EVQLVESGGGLVKPGGSLRLSCAASGFTFSNYWMNWVRQAPGKGLEWVGEIRLKVNNYATHYAEPVKGRFTISRDDSKSTVYLQMNSLKTEDTAVYYCTRYYGNYGGYFDVWGAGTLVTVSSASTKGPSVFPLAPSSKSTSGGTAALGCLVKDYFPEPVTVSWNSGALTSGVHTFPAVLQSSGLYSLSSVVTVPSSSLGTQTYICNVNHKPSNTKVDKKVEPKSCDKTHTCPPCPAPPVAGPSVFLFPPKPKDTLMISRTPEVTCVVVDVKHEDPEVKFNWYVDGVEVHNAKTKPREEQYNSTYRVVSVLTVLHQDWLNGKEYKCKVSNKALPAPIEKTISKAKGQPREPQVYTLPPSREEMTKNQVSLTCLVKGFYPSDIAVEWESNGQPENNYKTTPPVLDSDGSFFLYSKLTVDKSRWQQGNVFSCSVMHEALHNHYTQKSLSLSPGK

SEQ ID NO: 12676 - protein, 122 aa, Artificial Sequence; identical to SEQ ID NO: 7215
  Description of Artificial Sequence: Synthetic polypeptide
  VH of XENP018193

SEQ ID NO: 12677 - protein, 5 aa, Artificial Sequence
  Description of Artificial Sequence: Synthetic peptide
  XENP018193 vhCDR1
NYWMN

SEQ ID NO: 12678 - protein, 19 aa, Artificial Sequence
  Description of Artificial Sequence: Synthetic peptide
  XENP018193 vhCDR2
EIRLKVNNYATHYAEPVKG

SEQ ID NO: 12679 - protein, 11 aa, Artificial Sequence
  Description of Artificial Sequence: Synthetic peptide
  XENP018193 vhCDR3
YYGNYGGYFDV

SEQ ID NO: 12680 - protein, 214 aa, Artificial Sequence; identical to SEQ ID NO: 11550
  Description of Artificial Sequence: Synthetic polypeptide
  XENP018193 1G6_H1.96_L1_IgG1_PVA_/S267K Light Chain

SEQ ID NO: 12681 - protein, 107 aa, Artificial Sequence; identical to SEQ ID NO: 6247
  Description of Artificial Sequence: Synthetic polypeptide
  VL of XENP018193

SEQ ID NO: 12682 - protein, 11 aa, Artificial Sequence
  Description of Artificial Sequence: Synthetic peptide
  XENP018193 vlCDR1
RASQSVSNDVA

SEQ ID NO: 12683 - protein, 7 aa, Artificial Sequence
  Description of Artificial Sequence: Synthetic peptide
  XENP018193 vlCDR2
YASHRYT

SEQ ID NO: 12684 - protein, 9 aa, Artificial Sequence
  Description of Artificial Sequence: Synthetic peptide
  XENP018193 vlCDR3
QQDYSSPRT

SEQ ID NO: 12685 - protein, 451 aa, Artificial Sequence
  Description of Artificial Sequence: Synthetic polypeptide
  XENP018194 1G6_H1.97_L1_IgG1_PVA_/S267K Heavy Chain
EVQLVESGGGLVKPGGSLRLSCAASGFTFSNYWMNWVRQAPGKGLEWVGEIRLKHNNYATHYAEPVKGRFTISRDDSKSTVYLQMNSLKTEDTAVYYCTRYYGNYGGYFDVWGAGTLVTVSSASTKGPSVFPLAPSSKSTSGGTAALGCLVKDYFPEPVTVSWNSGALTSGVHTFPAVLQSSGLYSLSSVVTVPSSSLGTQTYICNVNHKPSNTKVDKKVEPKSCDKTHTCPPCPAPPVAGPSVFLFPPKPKDTLMISRTPEVTCVVVDVKHEDPEVKFNWYVDGVEVHNAKTKPREEQYNSTYRVVSVLTVLHQDWLNGKEYKCKVSNKALPAPIEKTISKAKGQPREPQVYTLPPSREEMTKNQVSLTCLVKGFYPSDIAVEWESNGQPENNYKTTPPVLDSDGSFFLYSKLTVDKSRWQQGNVFSCSVMHEALHNHYTQKSLSLSPGK

SEQ ID NO: 12686 - protein, 122 aa, Artificial Sequence; identical to SEQ ID NO: 7224
  Description of Artificial Sequence: Synthetic polypeptide
  VH of XENP018194

SEQ ID NO: 12687 - protein, 5 aa, Artificial Sequence
  Description of Artificial Sequence: Synthetic peptide
  XENP018194 vhCDR1
NYWMN

SEQ ID NO: 12688 - protein, 19 aa, Artificial Sequence
  Description of Artificial Sequence: Synthetic peptide
  XENP018194 vhCDR2
EIRLKHNNYATHYAEPVKG

SEQ ID NO: 12689 - protein, 11 aa, Artificial Sequence
  Description of Artificial Sequence: Synthetic peptide
  XENP018194 vhCDR3
YYGNYGGYFDV

SEQ ID NO: 12690 - protein, 214 aa, Artificial Sequence; identical to SEQ ID NO: 11550
  Description of Artificial Sequence: Synthetic polypeptide
  XENP018194 1G6_H1.97_L1_IgG1_PVA_/S267K Light Chain

SEQ ID NO: 12691 - protein, 107 aa, Artificial Sequence; identical to SEQ ID NO: 6247
  Description of Artificial Sequence: Synthetic polypeptide
  VL of XENP018194

SEQ ID NO: 12692 - protein, 11 aa, Artificial Sequence
  Description of Artificial Sequence: Synthetic peptide
  XENP018194 vlCDR1
RASQSVSNDVA

SEQ ID NO: 12693 - protein, 7 aa, Artificial Sequence
  Description of Artificial Sequence: Synthetic peptide
  XENP018194 vlCDR2
YASHRYT

SEQ ID NO: 12694 - protein, 9 aa, Artificial Sequence
  Description of Artificial Sequence: Synthetic peptide
  XENP018194 vlCDR3
QQDYSSPRT

SEQ ID NO: 12695 - protein, 451 aa, Artificial Sequence
  Description of Artificial Sequence: Synthetic polypeptide
  XENP018195 1G6_H1.98_L1_IgG1_PVA_/S267K Heavy Chain
EVQLVESGGGLVKPGGSLRLSCAASGFTFSNYWMNWVRQAPGKGLEWVGEIRLKDNNYATHYAEPVKGRFTISRDDSKSTVYLQMNSLKTEDTAVYYCTRYYGNYGGYFDVWGAGTLVTVSSASTKGPSVFPLAPSSKSTSGGTAALGCLVKDYFPEPVTVSWNSGALTSGVHTFPAVLQSSGLYSLSSVVTVPSSSLGTQTYICNVNHKPSNTKVDKKVEPKSCDKTHTCPPCPAPPVAGPSVFLFPPKPKDTLMISRTPEVTCVVVDVKHEDPEVKFNWYVDGVEVHNAKTKPREEQYNSTYRVVSVLTVLHQDWLNGKEYKCKVSNKALPAPIEKTISKAKGQPREPQVYTLPPSREEMTKNQVSLTCLVKGFYPSDIAVEWESNGQPENNYKTTPPVLDSDGSFFLYSKLTVDKSRWQQGNVFSCSVMHEALHNHYTQKSLSLSPGK

SEQ ID NO: 12696 - protein, 122 aa, Artificial Sequence; identical to SEQ ID NO: 7233
  Description of Artificial Sequence: Synthetic polypeptide
  VH of XENP018195

SEQ ID NO: 12697 - protein, 5 aa, Artificial Sequence
  Description of Artificial Sequence: Synthetic peptide
  XENP018195 vhCDR1
NYWMN

SEQ ID NO: 12698 - protein, 19 aa, Artificial Sequence
  Description of Artificial Sequence: Synthetic peptide
  XENP018195 vhCDR2
EIRLKDNNYATHYAEPVKG

SEQ ID NO: 12699 - protein, 11 aa, Artificial Sequence
  Description of Artificial Sequence: Synthetic peptide
  XENP018195 vhCDR3
YYGNYGGYFDV

SEQ ID NO: 12700 - protein, 214 aa, Artificial Sequence; identical to SEQ ID NO: 11550
  Description of Artificial Sequence: Synthetic polypeptide
  XENP018195 1G6_H1.98_L1_IgG1_PVA_/S267K Light Chain

SEQ ID NO: 12701 - protein, 107 aa, Artificial Sequence; identical to SEQ ID NO: 6247
  Description of Artificial Sequence: Synthetic polypeptide
  VL of XENP018195

SEQ ID NO: 12702 - protein, 11 aa, Artificial Sequence
  Description of Artificial Sequence: Synthetic peptide
  XENP018195 vlCDR1
RASQSVSNDVA

SEQ ID NO: 12703 - protein, 7 aa, Artificial Sequence
  Description of Artificial Sequence: Synthetic peptide
  XENP018195 vlCDR2
YASHRYT

SEQ ID NO: 12704 - protein, 9 aa, Artificial Sequence
  Description of Artificial Sequence: Synthetic peptide
  XENP018195 vlCDR3
QQDYSSPRT

SEQ ID NO: 12705 - protein, 451 aa, Artificial Sequence
  Description of Artificial Sequence: Synthetic polypeptide
  XENP018196 1G6_H1.99_L1_IgG1_PVA_/S267K Heavy Chain
EVQLVESGGGLVKPGGSLRLSCAASGFTFSNYWMNWVRQAPGKGLEWVGEIRLKKNNYATHYAEPVKGRFTISRDDSKSTVYLQMNSLKTEDTAVYYCTRYYGNYGGYFDVWGAGTLVTVSSASTKGPSVFPLAPSSKSTSGGTAALGCLVKDYFPEPVTVSWNSGALTSGVHTFPAVLQSSGLYSLSSVVTVPSSSLGTQTYICNVNHKPSNTKVDKKVEPKSCDKTHTCPPCPAPPVAGPSVFLFPPKPKDTLMISRTPEVTCVVVDVKHEDPEVKFNWYVDGVEVHNAKTKPREEQYNSTYRVVSVLTVLHQDWLNGKEYKCKVSNKALPAPIEKTISKAKGQPREPQVYTLPPSREEMTKNQVSLTCLVKGFYPSDIAVEWESNGQPENNYKTTPPVLDSDGSFFLYSKLTVDKSRWQQGNVFSCSVMHEALHNHYTQKSLSLSPGK

SEQ ID NO: 12706 - protein, 122 aa, Artificial Sequence; identical to SEQ ID NO: 7242
  Description of Artificial Sequence: Synthetic polypeptide
  VH of XENP018196

SEQ ID NO: 12707 - protein, 5 aa, Artificial Sequence
  Description of Artificial Sequence: Synthetic peptide
  XENP018196 vhCDR1
NYWMN

SEQ ID NO: 12708 - protein, 19 aa, Artificial Sequence
  Description of Artificial Sequence: Synthetic peptide
  XENP018196 vhCDR2
EIRLKKNNYATHYAEPVKG

SEQ ID NO: 12709 - protein, 11 aa, Artificial Sequence
  Description of Artificial Sequence: Synthetic peptide
  XENP018196 vhCDR3
YYGNYGGYFDV

SEQ ID NO: 12710 - protein, 214 aa, Artificial Sequence; identical to SEQ ID NO: 11550
  Description of Artificial Sequence: Synthetic polypeptide
  XENP018196 1G6_H1.99_L1_IgG1_PVA_/S267K Light Chain

SEQ ID NO: 12711 - protein, 107 aa, Artificial Sequence; identical to SEQ ID NO: 6247
  Description of Artificial Sequence: Synthetic polypeptide
  VL of XENP018196

SEQ ID NO: 12712 - protein, 11 aa, Artificial Sequence
  Description of Artificial Sequence: Synthetic peptide
  XENP018196 vlCDR1
RASQSVSNDVA

SEQ ID NO: 12713 - protein, 7 aa, Artificial Sequence
  Description of Artificial Sequence: Synthetic peptide
  XENP018196 vlCDR2
YASHRYT

SEQ ID NO: 12714 - protein, 9 aa, Artificial Sequence
  Description of Artificial Sequence: Synthetic peptide
  XENP018196 vlCDR3
QQDYSSPRT

SEQ ID NO: 12715 - protein, 451 aa, Artificial Sequence
  Description of Artificial Sequence: Synthetic polypeptide
  XENP018201 1G6_H1.100_L1_IgG1_PVA_/S267K Heavy Chain
EVQLVESGGGLVKPGGSLRLSCAASGFTFSNYWMNWVRQAPGKGLEWVGEIRLKYNNYATHYAEPVKGRFTISRDDSKSTVYLQMNSLKTEDTAVYYCTRYYGNYGGYFDVWGAGTLVTVSSASTKGPSVFPLAPSSKSTSGGTAALGCLVKDYFPEPVTVSWNSGALTSGVHTFPAVLQSSGLYSLSSVVTVPSSSLGTQTYICNVNHKPSNTKVDKKVEPKSCDKTHTCPPCPAPPVAGPSVFLFPPKPKDTLMISRTPEVTCVVVDVKHEDPEVKFNWYVDGVEVHNAKTKPREEQYNSTYRVVSVLTVLHQDWLNGKEYKCKVSNKALPAPIEKTISKAKGQPREPQVYTLPPSREEMTKNQVSLTCLVKGFYPSDIAVEWESNGQPENNYKTTPPVLDSDGSFFLYSKLTVDKSRWQQGNVFSCSVMHEALHNHYTQKSLSLSPGK

SEQ ID NO: 12716 - protein, 122 aa, Artificial Sequence; identical to SEQ ID NO: 7251
  Description of Artificial Sequence: Synthetic polypeptide
  VH of XENP018201

SEQ ID NO: 12717 - protein, 5 aa, Artificial Sequence
  Description of Artificial Sequence: Synthetic peptide
  XENP018201 vhCDR1
NYWMN

SEQ ID NO: 12718 - protein, 19 aa, Artificial Sequence
  Description of Artificial Sequence: Synthetic peptide
  XENP018201 vhCDR2
EIRLKYNNYATHYAEPVKG

SEQ ID NO: 12719 - protein, 11 aa, Artificial Sequence
  Description of Artificial Sequence: Synthetic peptide
  XENP018201 vhCDR3
YYGNYGGYFDV

SEQ ID NO: 12720 - protein, 214 aa, Artificial Sequence; identical to SEQ ID NO: 11550
  Description of Artificial Sequence: Synthetic polypeptide
  XENP018201 1G6_H1.100_L1_IgG1_PVA_/S267K Light Chain

SEQ ID NO: 12721 - protein, 107 aa, Artificial Sequence; identical to SEQ ID NO: 6247
  Description of Artificial Sequence: Synthetic polypeptide
  VL of XENP018201

SEQ ID NO: 12722 - protein, 11 aa, Artificial Sequence
  Description of Artificial Sequence: Synthetic peptide
  XENP018201 vlCDR1
RASQSVSNDVA

SEQ ID NO: 12723 - protein, 7 aa, Artificial Sequence
  Description of Artificial Sequence: Synthetic peptide
  XENP018201 vlCDR2
YASHRYT

SEQ ID NO: 12724 - protein, 9 aa, Artificial Sequence
  Description of Artificial Sequence: Synthetic peptide
  XENP018201 vlCDR3
QQDYSSPRT

SEQ ID NO: 12725 - protein, 451 aa, Artificial Sequence
  Description of Artificial Sequence: Synthetic polypeptide
  XENP018202 1G6_H1.101_L1_IgG1_PVA_/S267K Heavy Chain
EVQLVESGGGLVKPGGSLRLSCAASGFTFSNYWMNWVRQAPGKGLEWVGEIRLKSDNYATHYAEPVKGRFTISRDDSKSTVYLQMNSLKTEDTAVYYCTRYYGNYGGYFDVWGAGTLVTVSSASTKGPSVFPLAPSSKSTSGGTAALGCLVKDYFPEPVTVSWNSGALTSGVHTFPAVLQSSGLYSLSSVVTVPSSSLGTQTYICNVNHKPSNTKVDKKVEPKSCDKTHTCPPCPAPPVAGPSVFLFPPKPKDTLMISRTPEVTCVVVDVKHEDPEVKFNWYVDGVEVHNAKTKPREEQYNSTYRVVSVLTVLHQDWLNGKEYKCKVSNKALPAPIEKTISKAKGQPREPQVYTLPPSREEMTKNQVSLTCLVKGFYPSDIAVEWESNGQPENNYKTTPPVLDSDGSFFLYSKLTVDKSRWQQGNVFSCSVMHEALHNHYTQKSLSLSPGK

SEQ ID NO: 12726 - protein, 122 aa, Artificial Sequence; identical to SEQ ID NO: 7260
  Description of Artificial Sequence: Synthetic polypeptide
  VH of XENP018202

SEQ ID NO: 12727 - protein, 5 aa, Artificial Sequence
  Description of Artificial Sequence: Synthetic peptide
  XENP018202 vhCDR1
NYWMN

SEQ ID NO: 12728 - protein, 19 aa, Artificial Sequence
  Description of Artificial Sequence: Synthetic peptide
  XENP018202 vhCDR2
EIRLKSDNYATHYAEPVKG

SEQ ID NO: 12729 - protein, 11 aa, Artificial Sequence
  Description of Artificial Sequence: Synthetic peptide
  XENP018202 vhCDR3
YYGNYGGYFDV

SEQ ID NO: 12730 - protein, 214 aa, Artificial Sequence; identical to SEQ ID NO: 11550
  Description of Artificial Sequence: Synthetic polypeptide
  XENP018202 1G6_H1.101_L1_IgG1_PVA_/S267K Light Chain

SEQ ID NO: 12731 - protein, 107 aa, Artificial Sequence; identical to SEQ ID NO: 6247
  Description of Artificial Sequence: Synthetic polypeptide
  VL of XENP018202

SEQ ID NO: 12732 - protein, 11 aa, Artificial Sequence
  Description of Artificial Sequence: Synthetic peptide
  XENP018202 vlCDR1
RASQSVSNDVA

SEQ ID NO: 12733 - protein, 7 aa, Artificial Sequence
  Description of Artificial Sequence: Synthetic peptide
  XENP018202 vlCDR2
YASHRYT

SEQ ID NO: 12734 - protein, 9 aa, Artificial Sequence
  Description of Artificial Sequence: Synthetic peptide
  XENP018202 vlCDR3
QQDYSSPRT

SEQ ID NO: 12735 - protein, 451 aa, Artificial Sequence
  Description of Artificial Sequence: Synthetic polypeptide
  XENP018203 1G6_H1.102_L1_IgG1_PVA_/S267K Heavy Chain
EVQLVESGGGLVKPGGSLRLSCAASGFTFSNYWMNWVRQAPGKGLEWVGEIRLKSHNYATHYAEPVKGRFTISRDDSKSTVYLQMNSLKTEDTAVYYCTRYYGNYGGYFDVWGAGTLVTVSSASTKGPSVFPLAPSSKSTSGGTAALGCLVKDYFPEPVTVSWNSGALTSGVHTFPAVLQSSGLYSLSSVVTVPSSSLGTQTYICNVNHKPSNTKVDKKVEPKSCDKTHTCPPCPAPPVAGPSVFLFPPKPKDTLMISRTPEVTCVVVDVKHEDPEVKFNWYVDGVEVHNAKTKPREEQYNSTYRVVSVLTVLHQDWLNGKEYKCKVSNKALPAPIEKTISKAKGQPREPQVYTLPPSREEMTKNQVSLTCLVKGFYPSDIAVEWESNGQPENNYKTTPPVLDSDGSFFLYSKLTVDKSRWQQGNVFSCSVMHEALHNHYTQKSLSLSPGK

SEQ ID NO: 12736 - protein, 122 aa, Artificial Sequence; identical to SEQ ID NO: 7269
  Description of Artificial Sequence: Synthetic polypeptide
  VH of XENP018203

SEQ ID NO: 12737 - protein, 5 aa, Artificial Sequence
  Description of Artificial Sequence: Synthetic peptide
  XENP018203 vhCDR1
NYWMN

SEQ ID NO: 12738 - protein, 19 aa, Artificial Sequence
  Description of Artificial Sequence: Synthetic peptide
  XENP018203 vhCDR2
EIRLKSHNYATHYAEPVKG

SEQ ID NO: 12739 - protein, 11 aa, Artificial Sequence
  Description of Artificial Sequence: Synthetic peptide
  XENP018203 vhCDR3
YYGNYGGYFDV

SEQ ID NO: 12740 - protein, 214 aa, Artificial Sequence; identical to SEQ ID NO: 11550
  Description of Artificial Sequence: Synthetic polypeptide
  XENP018203 1G6_H1.102_L1_IgG1_PVA_/S267K Light Chain

SEQ ID NO: 12741 - protein, 107 aa, Artificial Sequence; identical to SEQ ID NO: 6247
  Description of Artificial Sequence: Synthetic polypeptide
  VL of XENP018203

SEQ ID NO: 12742 - protein, 11 aa, Artificial Sequence
  Description of Artificial Sequence: Synthetic peptide
  XENP018203 vlCDR1
RASQSVSNDVA

SEQ ID NO: 12743 - protein, 7 aa, Artificial Sequence
  Description of Artificial Sequence: Synthetic peptide
  XENP018203 vlCDR2
YASHRYT

SEQ ID NO: 12744 - protein, 9 aa, Artificial Sequence
  Description of Artificial Sequence: Synthetic peptide
  XENP018203 vlCDR3
QQDYSSPRT

SEQ ID NO: 12745 - protein, 451 aa, Artificial Sequence
  Description of Artificial Sequence: Synthetic polypeptide
  XENP018204 1G6_H1.103_L1_IgG1_PVA_/S267K Heavy Chain
EVQLVESGGGLVKPGGSLRLSCAASGFTFSNYWMNWVRQAPGKGLEWVGEIRLKSENYATHYAEPVKGRFTISRDDSKSTVYLQMNSLKTEDTAVYYCTRYYGNYGGYFDVWGAGTLVTVSSASTKGPSVFPLAPSSKSTSGGTAALGCLVKDYFPEPVTVSWNSGALTSGVHTFPAVLQSSGLYSLSSVVTVPSSSLGTQTYICNVNHKPSNTKVDKKVEPKSCDKTHTCPPCPAPPVAGPSVFLFPPKPKDTLMISRTPEVTCVVVDVKHEDPEVKFNWYVDGVEVHNAKTKPREEQYNSTYRVVSVLTVLHQDWLNGKEYKCKVSNKALPAPIEKTISKAKGQPREPQVYTLPPSREEMTKNQVSLTCLVKGFYPSDIAVEWESNGQPENNYKTTPPVLDSDGSFFLYSKLTVDKSRWQQGNVFSCSVMHEALHNHYTQKSLSLSPGK

SEQ ID NO: 12746 - protein, 122 aa, Artificial Sequence; identical to SEQ ID NO: 7278
  Description of Artificial Sequence: Synthetic polypeptide
  VH of XENP018204

SEQ ID NO: 12747 - protein, 5 aa, Artificial Sequence
  Description of Artificial Sequence: Synthetic peptide
  XENP018204 vhCDR1
NYWMN

SEQ ID NO: 12748 - protein, 19 aa, Artificial Sequence
  Description of Artificial Sequence: Synthetic peptide
  XENP018204 vhCDR2
EIRLKSENYATHYAEPVKG

SEQ ID NO: 12749 - protein, 11 aa, Artificial Sequence
  Description of Artificial Sequence: Synthetic peptide
  XENP018204 vhCDR3
YYGNYGGYFDV

SEQ ID NO: 12750 - protein, 214 aa, Artificial Sequence; identical to SEQ ID NO: 11550
  Description of Artificial Sequence: Synthetic polypeptide
  XENP018204 1G6_H1.103_L1_IgG1_PVA_/S267K Light Chain

SEQ ID NO: 12751 - protein, 107 aa, Artificial Sequence; identical to SEQ ID NO: 6247
  Description of Artificial Sequence: Synthetic polypeptide
  VL of XENP018204

SEQ ID NO: 12752 - protein, 11 aa, Artificial Sequence
  Description of Artificial Sequence: Synthetic peptide
  XENP018204 vlCDR1
RASQSVSNDVA

SEQ ID NO: 12753 - protein, 7 aa, Artificial Sequence
  Description of Artificial Sequence: Synthetic peptide
  XENP018204 vlCDR2
YASHRYT

SEQ ID NO: 12754 - protein, 9 aa, Artificial Sequence
  Description of Artificial Sequence: Synthetic peptide
  XENP018204 vlCDR3
QQDYSSPRT

SEQ ID NO: 12755 - protein, 451 aa, Artificial Sequence
  Description of Artificial Sequence: Synthetic polypeptide
  XENP018205 1G6_H1.104_L1_IgG1_PVA_/S267K Heavy Chain
EVQLVESGGGLVKPGGSLRLSCAASGFTFSNYWMNWVRQAPGKGLEWVGEIRLKSSNYATHYAEPVKGRFTISRDDSKSTVYLQMNSLKTEDTAVYYCTRYYGNYGGYFDVWGAGTLVTVSSASTKGPSVFPLAPSSKSTSGGTAALGCLVKDYFPEPVTVSWNSGALTSGVHTFPAVLQSSGLYSLSSVVTVPSSSLGTQTYICNVNHKPSNTKVDKKVEPKSCDKTHTCPPCPAPPVAGPSVFLFPPKPKDTLMISRTPEVTCVVVDVKHEDPEVKFNWYVDGVEVHNAKTKPREEQYNSTYRVVSVLTVLHQDWLNGKEYKCKVSNKALPAPIEKTISKAKGQPREPQVYTLPPSREEMTKNQVSLTCLVKGFYPSDIAVEWESNGQPENNYKTTPPVLDSDGSFFLYSKLTVDKSRWQQGNVFSCSVMHEALHNHYTQKSLSLSPGK

SEQ ID NO: 12756 - protein, 122 aa, Artificial Sequence; identical to SEQ ID NO: 7287
  Description of Artificial Sequence: Synthetic polypeptide
  VH of XENP018205

SEQ ID NO: 12757 - protein, 5 aa, Artificial Sequence
  Description of Artificial Sequence: Synthetic peptide
  XENP018205 vhCDR1
NYWMN

SEQ ID NO: 12758 - protein, 19 aa, Artificial Sequence
  Description of Artificial Sequence: Synthetic peptide
  XENP018205 vhCDR2
EIRLKSSNYATHYAEPVKG

SEQ ID NO: 12759 - protein, 11 aa, Artificial Sequence
  Description of Artificial Sequence: Synthetic peptide
  XENP018205 vhCDR3
YYGNYGGYFDV

SEQ ID NO: 12760 - protein, 214 aa, Artificial Sequence; identical to SEQ ID NO: 11550
  Description of Artificial Sequence: Synthetic polypeptide
  XENP018205 1G6_H1.104_L1_IgG1_PVA_/S267K Light Chain

SEQ ID NO: 12761 - protein, 107 aa, Artificial Sequence; identical to SEQ ID NO: 6247
  Description of Artificial Sequence: Synthetic polypeptide
  VL of XENP018205

SEQ ID NO: 12762 - protein, 11 aa, Artificial Sequence
  Description of Artificial Sequence: Synthetic peptide
  XENP018205 vlCDR1
RASQSVSNDVA

SEQ ID NO: 12763 - protein, 7 aa, Artificial Sequence
  Description of Artificial Sequence: Synthetic peptide
  XENP018205 vlCDR2
YASHRYT

SEQ ID NO: 12764 - protein, 9 aa, Artificial Sequence
  Description of Artificial Sequence: Synthetic peptide
  XENP018205 vlCDR3
QQDYSSPRT

SEQ ID NO: 12765 - protein, 451 aa, Artificial Sequence
  Description of Artificial Sequence: Synthetic polypeptide
  XENP018206 1G6_H1.105_L1_IgG1_PVA_/S267K Heavy Chain
EVQLVESGGGLVKPGGSLRLSCAASGFTFSNYWMNWVRQAPGKGLEWVGEIRLKSRNYATHYAEPVKGRFTISRDDSKSTVYLQMNSLKTEDTAVYYCTRYYGNYGGYFDVWGAGTLVTVSSASTKGPSVFPLAPSSKSTSGGTAALGCLVKDYFPEPVTVSWNSGALTSGVHTFPAVLQSSGLYSLSSVVTVPSSSLGTQTYICNVNHKPSNTKVDKKVEPKSCDKTHTCPPCPAPPVAGPSVFLFPPKPKDTLMISRTPEVTCVVVDVKHEDPEVKFNWYVDGVEVHNAKTKPREEQYNSTYRVVSVLTVLHQDWLNGKEYKCKVSNKALPAPIEKTISKAKGQPREPQVYTLPPSREEMTKNQVSLTCLVKGFYPSDIAVEWESNGQPENNYKTTPPVLDSDGSFFLYSKLTVDKSRWQQGNVFSCSVMHEALHNHYTQKSLSLSPGK

SEQ ID NO: 12766 - protein, 122 aa, Artificial Sequence; identical to SEQ ID NO: 7296
  Description of Artificial Sequence: Synthetic polypeptide
  VH of XENP018206

SEQ ID NO: 12767 - protein, 5 aa, Artificial Sequence
  Description of Artificial Sequence: Synthetic peptide
  XENP018206 vhCDR1
NYWMN

SEQ ID NO: 12768 - protein, 19 aa, Artificial Sequence
  Description of Artificial Sequence: Synthetic peptide
  XENP018206 vhCDR2
EIRLKSRNYATHYAEPVKG

SEQ ID NO: 12769 - protein, 11 aa, Artificial Sequence
  Description of Artificial Sequence: Synthetic peptide
  XENP018206 vhCDR3
YYGNYGGYFDV

SEQ ID NO: 12770 - protein, 214 aa, Artificial Sequence; identical to SEQ ID NO: 11550
  Description of Artificial Sequence: Synthetic polypeptide
  XENP018206 1G6_H1.105_L1_IgG1_PVA_/S267K Light Chain

SEQ ID NO: 12771 - protein, 107 aa, Artificial Sequence; identical to SEQ ID NO: 6247
  Description of Artificial Sequence: Synthetic polypeptide
  VL of XENP018206

SEQ ID NO: 12772 - protein, 11 aa, Artificial Sequence
  Description of Artificial Sequence: Synthetic peptide
  XENP018206 vlCDR1
RASQSVSNDVA

SEQ ID NO: 12773 - protein, 7 aa, Artificial Sequence
  Description of Artificial Sequence: Synthetic peptide
  XENP018206 vlCDR2
YASHRYT

SEQ ID NO: 12774 - protein, 9 aa, Artificial Sequence
  Description of Artificial Sequence: Synthetic peptide
  XENP018206 vlCDR3
QQDYSSPRT

SEQ ID NO: 12775 - protein, 451 aa, Artificial Sequence
  Description of Artificial Sequence: Synthetic polypeptide
  XENP018207 1G6_H1.106_L1_IgG1_PVA_/S267K Heavy Chain
EVQLVESGGGLVKPGGSLRLSCAASGFTFSNYWMNWVRQAPGKGLEWVGEIRLKSLNYATHYAEPVKGRFTISRDDSKSTVYLQMNSLKTEDTAVYYCTRYYGNYGGYFDVWGAGTLVTVSSASTKGPSVFPLAPSSKSTSGGTAALGCLVKDYFPEPVTVSWNSGALTSGVHTFPAVLQSSGLYSLSSVVTVPSSSLGTQTYICNVNHKPSNTKVDKKVEPKSCDKTHTCPPCPAPPVAGPSVFLFPPKPKDTLMISRTPEVTCVVVDVKHEDPEVKFNWYVDGVEVHNAKTKPREEQYNSTYRVVSVLTVLHQDWLNGKEYKCKVSNKALPAPIEKTISKAKGQPREPQVYTLPPSREEMTKNQVSLTCLVKGFYPSDIAVEWESNGQPENNYKTTPPVLDSDGSFFLYSKLTVDKSRWQQGNVFSCSVMHEALHNHYTQKSLSLSPGK

SEQ ID NO: 12776 - protein, 122 aa, Artificial Sequence; identical to SEQ ID NO: 7305
  Description of Artificial Sequence: Synthetic polypeptide
  VH of XENP018207

SEQ ID NO: 12777 - protein, 5 aa, Artificial Sequence
  Description of Artificial Sequence: Synthetic peptide
  XENP018207 vhCDR1
NYWMN

SEQ ID NO: 12778 - protein, 19 aa, Artificial Sequence
  Description of Artificial Sequence: Synthetic peptide
  XENP018207 vhCDR2
EIRLKSLNYATHYAEPVKG

SEQ ID NO: 12779 - protein, 11 aa, Artificial Sequence
  Description of Artificial Sequence: Synthetic peptide
  XENP018207 vhCDR3
YYGNYGGYFDV

SEQ ID NO: 12780 - protein, 214 aa, Artificial Sequence; identical to SEQ ID NO: 11550
  Description of Artificial Sequence: Synthetic polypeptide
  XENP018207 1G6_H1.106_L1_IgG1_PVA_/S267K Light Chain

SEQ ID NO: 12781 - protein, 107 aa, Artificial Sequence; identical to SEQ ID NO: 6247
  Description of Artificial Sequence: Synthetic polypeptide
  VL of XENP018207

SEQ ID NO: 12782 - protein, 11 aa, Artificial Sequence
  Description of Artificial Sequence: Synthetic peptide
  XENP018207 vlCDR1
RASQSVSNDVA

SEQ ID NO: 12783 - protein, 7 aa, Artificial Sequence
  Description of Artificial Sequence: Synthetic peptide
  XENP018207 vlCDR2
YASHRYT

SEQ ID NO: 12784 - protein, 9 aa, Artificial Sequence
  Description of Artificial Sequence: Synthetic peptide
  XENP018207 vlCDR3
QQDYSSPRT

SEQ ID NO: 12785 - protein, 451 aa, Artificial Sequence
  Description of Artificial Sequence: Synthetic polypeptide
  XENP018208 1G6_H1.107_L1_IgG1_PVA_/S267K Heavy Chain
EVQLVESGGGLVKPGGSLRLSCAASGFTFSNYWMNWVRQAPGKGLEWVGEIRLKSTNYATHYAEPVKGRFTISRDDSKSTVYLQMNSLKTEDTAVYYCTRYYGNYGGYFDVWGAGTLVTVSSASTKGPSVFPLAPSSKSTSGGTAALGCLVKDYFPEPVTVSWNSGALTSGVHTFPAVLQSSGLYSLSSVVTVPSSSLGTQTYICNVNHKPSNTKVDKKVEPKSCDKTHTCPPCPAPPVAGPSVFLFPPKPKDTLMISRTPEVTCVVVDVKHEDPEVKFNWYVDGVEVHNAKTKPREEQYNSTYRVVSVLTVLHQDWLNGKEYKCKVSNKALPAPIEKTISKAKGQPREPQVYTLPPSREEMTKNQVSLTCLVKGFYPSDIAVEWESNGQPENNYKTTPPVLDSDGSFFLYSKLTVDKSRWQQGNVFSCSVMHEALHNHYTQKSLSLSPGK

SEQ ID NO: 12786 - protein, 122 aa, Artificial Sequence; identical to SEQ ID NO: 7314
  Description of Artificial Sequence: Synthetic polypeptide
  VH of XENP018208

SEQ ID NO: 12787 - protein, 5 aa, Artificial Sequence
  Description of Artificial Sequence: Synthetic peptide
  XENP018208 vhCDR1
NYWMN

SEQ ID NO: 12788 - protein, 19 aa, Artificial Sequence
  Description of Artificial Sequence: Synthetic peptide
  XENP018208 vhCDR2
EIRLKSTNYATHYAEPVKG

SEQ ID NO: 12789 - protein, 11 aa, Artificial Sequence
  Description of Artificial Sequence: Synthetic peptide
  XENP018208 vhCDR3
YYGNYGGYFDV

SEQ ID NO: 12790 - protein, 214 aa, Artificial Sequence; identical to SEQ ID NO: 11550
  Description of Artificial Sequence: Synthetic polypeptide
  XENP018208 1G6_H1.107_L1_IgG1_PVA_/S267K Light Chain

SEQ ID NO: 12791 - protein, 107 aa, Artificial Sequence; identical to SEQ ID NO: 6247
  Description of Artificial Sequence: Synthetic polypeptide
  VL of XENP018208

SEQ ID NO: 12792 - protein, 11 aa, Artificial Sequence
  Description of Artificial Sequence: Synthetic peptide
  XENP018208 vlCDR1
RASQSVSNDVA

SEQ ID NO: 12793 - protein, 7 aa, Artificial Sequence
  Description of Artificial Sequence: Synthetic peptide
  XENP018208 vlCDR2
YASHRYT

SEQ ID NO: 12794 - protein, 9 aa, Artificial Sequence
  Description of Artificial Sequence: Synthetic peptide
  XENP018208 vlCDR3
QQDYSSPRT

SEQ ID NO: 12795 - protein, 451 aa, Artificial Sequence
  Description of Artificial Sequence: Synthetic polypeptide
  XENP018209 1G6_H1.108_L1_IgG1_PVA_/S267K Heavy Chain
EVQLVESGGGLVKPGGSLRLSCAASGFTFSNYWMNWVRQAPGKGLEWVGEIRLKSGNYATHYAEPVKGRFTISRDDSKSTVYLQMNSLKTEDTAVYYCTRYYGNYGGYFDVWGAGTLVTVSSASTKGPSVFPLAPSSKSTSGGTAALGCLVKDYFPEPVTVSWNSGALTSGVHTFPAVLQSSGLYSLSSVVTVPSSSLGTQTYICNVNHKPSNTKVDKKVEPKSCDKTHTCPPCPAPPVAGPSVFLFPPKPKDTLMISRTPEVTCVVVDVKHEDPEVKFNWYVDGVEVHNAKTKPREEQYNSTYRVVSVLTVLHQDWLNGKEYKCKVSNKALPAPIEKTISKAKGQPREPQVYTLPPSREEMTKNQVSLTCLVKGFYPSDIAVEWESNGQPENNYKTTPPVLDSDGSFFLYSKLTVDKSRWQQGNVFSCSVMHEALHNHYTQKSLSLSPGK

SEQ ID NO: 12796 - protein, 122 aa, Artificial Sequence; identical to SEQ ID NO: 7323
  Description of Artificial Sequence: Synthetic polypeptide
  VH of XENP018209

SEQ ID NO: 12797 - protein, 5 aa, Artificial Sequence
  Description of Artificial Sequence: Synthetic peptide
  XENP018209 vhCDR1
NYWMN

SEQ ID NO: 12798 - protein, 19 aa, Artificial Sequence
  Description of Artificial Sequence: Synthetic peptide
  XENP018209 vhCDR2
EIRLKSGNYATHYAEPVKG

SEQ ID NO: 12799 - protein, 11 aa, Artificial Sequence
  Description of Artificial Sequence: Synthetic peptide
  XENP018209 vhCDR3
YYGNYGGYFDV

SEQ ID NO: 12800 - protein, 214 aa, Artificial Sequence; identical to SEQ ID NO: 11550
  Description of Artificial Sequence: Synthetic polypeptide
  XENP018209 1G6_H1.108_L1_IgG1_PVA_/S267K Light Chain

SEQ ID NO: 12801 - protein, 107 aa, Artificial Sequence; identical to SEQ ID NO: 6247
  Description of Artificial Sequence: Synthetic polypeptide
  VL of XENP018209

SEQ ID NO: 12802 - protein, 11 aa, Artificial Sequence
  Description of Artificial Sequence: Synthetic peptide
  XENP018209 vlCDR1
RASQSVSNDVA

SEQ ID NO: 12803 - protein, 7 aa, Artificial Sequence
  Description of Artificial Sequence: Synthetic peptide
  XENP018209 vlCDR2
YASHRYT

SEQ ID NO: 12804 - protein, 9 aa, Artificial Sequence
  Description of Artificial Sequence: Synthetic peptide
  XENP018209 vlCDR3
QQDYSSPRT

SEQ ID NO: 12805 - protein, 451 aa, Artificial Sequence
  Description of Artificial Sequence: Synthetic polypeptide
  XENP018210 1G6_H1.109_L1_IgG1_PVA_/S267K Heavy Chain
EVQLVESGGGLVKPGGSLRLSCAASGFTFSNYWMNWVRQAPGKGLEWVGEIRLKSYNYATHYAEPVKGRFTISRDDSKSTVYLQMNSLKTEDTAVYYCTRYYGNYGGYFDVWGAGTLVTVSSASTKGPSVFPLAPSSKSTSGGTAALGCLVKDYFPEPVTVSWNSGALTSGVHTFPAVLQSSGLYSLSSVVTVPSSSLGTQTYICNVNHKPSNTKVDKKVEPKSCDKTHTCPPCPAPPVAGPSVFLFPPKPKDTLMISRTPEVTCVVVDVKHEDPEVKFNWYVDGVEVHNAKTKPREEQYNSTYRVVSVLTVLHQDWLNGKEYKCKVSNKALPAPIEKTISKAKGQPREPQVYTLPPSREEMTKNQVSLTCLVKGFYPSDIAVEWESNGQPENNYKTTPPVLDSDGSFFLYSKLTVDKSRWQQGNVFSCSVMHEALHNHYTQKSLSLSPGK

SEQ ID NO: 12806 - protein, 122 aa, Artificial Sequence; identical to SEQ ID NO: 7332
  Description of Artificial Sequence: Synthetic polypeptide
  VH of XENP018210

SEQ ID NO: 12807 - protein, 5 aa, Artificial Sequence
  Description of Artificial Sequence: Synthetic peptide
  XENP018210 vhCDR1
NYWMN

SEQ ID NO: 12808 - protein, 19 aa, Artificial Sequence
  Description of Artificial Sequence: Synthetic peptide
  XENP018210 vhCDR2
EIRLKSYNYATHYAEPVKG

SEQ ID NO: 12809 - protein, 11 aa, Artificial Sequence
  Description of Artificial Sequence: Synthetic peptide
  XENP018210 vhCDR3
YYGNYGGYFDV

SEQ ID NO: 12810 - protein, 214 aa, Artificial Sequence; identical to SEQ ID NO: 11550
  Description of Artificial Sequence: Synthetic polypeptide
  XENP018210 1G6_H1.109_L1_IgG1_PVA_/S267K Light Chain

SEQ ID NO: 12811 - protein, 107 aa, Artificial Sequence; identical to SEQ ID NO: 6247
  Description of Artificial Sequence: Synthetic polypeptide
  VL of XENP018210

SEQ ID NO: 12812 - protein, 11 aa, Artificial Sequence
  Description of Artificial Sequence: Synthetic peptide
  XENP018210 vlCDR1
RASQSVSNDVA

SEQ ID NO: 12813 - protein, 7 aa, Artificial Sequence
  Description of Artificial Sequence: Synthetic peptide
  XENP018210 vlCDR2
YASHRYT

SEQ ID NO: 12814 - protein, 9 aa, Artificial Sequence
  Description of Artificial Sequence: Synthetic peptide
  XENP018210 vlCDR3
QQDYSSPRT

SEQ ID NO: 12815 - protein, 451 aa, Artificial Sequence
  Description of Artificial Sequence: Synthetic polypeptide
  XENP018211 1G6_H1.110_L1_IgG1_PVA_/S267K Heavy Chain
EVQLVESGGGLVKPGGSLRLSCAASGFTFSNYWMNWVRQAPGKGLEWVGEIRLKSNDYATHYAEPVKGRFTISRDDSKSTVYLQMNSLKTEDTAVYYCTRYYGNYGGYFDVWGAGTLVTVSSASTKGPSVFPLAPSSKSTSGGTAALGCLVKDYFPEPVTVSWNSGALTSGVHTFPAVLQSSGLYSLSSVVTVPSSSLGTQTYICNVNHKPSNTKVDKKVEPKSCDKTHTCPPCPAPPVAGPSVFLFPPKPKDTLMISRTPEVTCVVVDVKHEDPEVKFNWYVDGVEVHNAKTKPREEQYNSTYRVVSVLTVLHQDWLNGKEYKCKVSNKALPAPIEKTISKAKGQPREPQVYTLPPSREEMTKNQVSLTCLVKGFYPSDIAVEWESNGQPENNYKTTPPVLDSDGSFFLYSKLTVDKSRWQQGNVFSCSVMHEALHNHYTQKSLSLSPGK

SEQ ID NO: 12816 - protein, 122 aa, Artificial Sequence; identical to SEQ ID NO: 7341
  Description of Artificial Sequence: Synthetic polypeptide
  VH of XENP018211

SEQ ID NO: 12817 - protein, 5 aa, Artificial Sequence
  Description of Artificial Sequence: Synthetic peptide
  XENP018211 vhCDR1
NYWMN

SEQ ID NO: 12818 - protein, 19 aa, Artificial Sequence
  Description of Artificial Sequence: Synthetic peptide
  XENP018211 vhCDR2
EIRLKSNDYATHYAEPVKG

SEQ ID NO: 12819 - protein, 11 aa, Artificial Sequence
  Description of Artificial Sequence: Synthetic peptide
  XENP018211 vhCDR3
YYGNYGGYFDV

SEQ ID NO: 12820 - protein, 214 aa, Artificial Sequence; identical to SEQ ID NO: 11550
  Description of Artificial Sequence: Synthetic polypeptide
  XENP018211 1G6_H1.110_L1_IgG1_PVA_/S267K Light Chain

SEQ ID NO: 12821 - protein, 107 aa, Artificial Sequence; identical to SEQ ID NO: 6247
  Description of Artificial Sequence: Synthetic polypeptide
  VL of XENP018211

SEQ ID NO: 12822 - protein, 11 aa, Artificial Sequence
  Description of Artificial Sequence: Synthetic peptide
  XENP018211 vlCDR1
RASQSVSNDVA

SEQ ID NO: 12823 - protein, 7 aa, Artificial Sequence
  Description of Artificial Sequence: Synthetic peptide
  XENP018211 vlCDR2
YASHRYT

SEQ ID NO: 12824 - protein, 9 aa, Artificial Sequence
  Description of Artificial Sequence: Synthetic peptide
  XENP018211 vlCDR3
QQDYSSPRT

SEQ ID NO: 12825 - protein, 451 aa, Artificial Sequence
  Description of Artificial Sequence: Synthetic polypeptide
  XENP018212 1G6_H1.111_L1_IgG1_PVA_/S267K Heavy Chain
EVQLVESGGGLVKPGGSLRLSCAASGFTFSNYWMNWVRQAPGKGLEWVGEIRLKSNHYATHYAEPVKGRFTISRDDSKSTVYLQMNSLKTEDTAVYYCTRYYGNYGGYFDVWGAGTLVTVSSASTKGPSVFPLAPSSKSTSGGTAALGCLVKDYFPEPVTVSWNSGALTSGVHTFPAVLQSSGLYSLSSVVTVPSSSLGTQTYICNVNHKPSNTKVDKKVEPKSCDKTHTCPPCPAPPVAGPSVFLFPPKPKDTLMISRTPEVTCVVVDVKHEDPEVKFNWYVDGVEVHNAKTKPREEQYNSTYRVVSVLTVLHQDWLNGKEYKCKVSNKALPAPIEKTISKAKGQPREPQVYTLPPSREEMTKNQVSLTCLVKGFYPSDIAVEWESNGQPENNYKTTPPVLDSDGSFFLYSKLTVDKSRWQQGNVFSCSVMHEALHNHYTQKSLSLSPGK

SEQ ID NO: 12826 - protein, 122 aa, Artificial Sequence; identical to SEQ ID NO: 7350
  Description of Artificial Sequence: Synthetic polypeptide
  VH of XENP018212

SEQ ID NO: 12827 - protein, 5 aa, Artificial Sequence
  Description of Artificial Sequence: Synthetic peptide
  XENP018212 vhCDR1
NYWMN

SEQ ID NO: 12828 - protein, 19 aa, Artificial Sequence
  Description of Artificial Sequence: Synthetic peptide
  XENP018212 vhCDR2
EIRLKSNHYATHYAEPVKG

SEQ ID NO: 12829 - protein, 11 aa, Artificial Sequence
  Description of Artificial Sequence: Synthetic peptide
  XENP018212 vhCDR3
YYGNYGGYFDV

SEQ ID NO: 12830 - protein, 214 aa, Artificial Sequence; identical to SEQ ID NO: 11550
  Description of Artificial Sequence: Synthetic polypeptide
  XENP018212 1G6_H1.111_L1_IgG1_PVA_/S267K Light Chain

SEQ ID NO: 12831 - protein, 107 aa, Artificial Sequence; identical to SEQ ID NO: 6247
  Description of Artificial Sequence: Synthetic polypeptide
  VL of XENP018212

SEQ ID NO: 12832 - protein, 11 aa, Artificial Sequence
  Description of Artificial Sequence: Synthetic peptide
  XENP018212 vlCDR1
RASQSVSNDVA

SEQ ID NO: 12833 - protein, 7 aa, Artificial Sequence
  Description of Artificial Sequence: Synthetic peptide
  XENP018212 vlCDR2
YASHRYT

SEQ ID NO: 12834 - protein, 9 aa, Artificial Sequence
  Description of Artificial Sequence: Synthetic peptide
  XENP018212 vlCDR3
QQDYSSPRT

SEQ ID NO: 12835 - protein, 451 aa, Artificial Sequence
  Description of Artificial Sequence: Synthetic polypeptide
  XENP018213 1G6_H1.112_L1_IgG1_PVA_/S267K Heavy Chain
EVQLVESGGGLVKPGGSLRLSCAASGFTFSNYWMNWVRQAPGKGLEWVGEIRLKSNEYATHYAEPVKGRFTISRDDSKSTVYLQMNSLKTEDTAVYYCTRYYGNYGGYFDVWGAGTLVTVSSASTKGPSVFPLAPSSKSTSGGTAALGCLVKDYFPEPVTVSWNSGALTSGVHTFPAVLQSSGLYSLSSVVTVPSSSLGTQTYICNVNHKPSNTKVDKKVEPKSCDKTHTCPPCPAPPVAGPSVFLFPPKPKDTLMISRTPEVTCVVVDVKHEDPEVKFNWYVDGVEVHNAKTKPREEQYNSTYRVVSVLTVLHQDWLNGKEYKCKVSNKALPAPIEKTISKAKGQPREPQVYTLPPSREEMTKNQVSLTCLVKGFYPSDIAVEWESNGQPENNYKTTPPVLDSDGSFFLYSKLTVDKSRWQQGNVFSCSVMHEALHNHYTQKSLSLSPGK

SEQ ID NO: 12836 - protein, 122 aa, Artificial Sequence; identical to SEQ ID NO: 7359
  Description of Artificial Sequence: Synthetic polypeptide
  VH of XENP018213

SEQ ID NO: 12837 - protein, 5 aa, Artificial Sequence
  Description of Artificial Sequence: Synthetic peptide
  XENP018213 vhCDR1
NYWMN

SEQ ID NO: 12838 - protein, 19 aa, Artificial Sequence
  Description of Artificial Sequence: Synthetic peptide
  XENP018213 vhCDR2
EIRLKSNEYATHYAEPVKG

SEQ ID NO: 12839 - protein, 11 aa, Artificial Sequence
  Description of Artificial Sequence: Synthetic peptide
  XENP018213 vhCDR3
YYGNYGGYFDV

SEQ ID NO: 12840 - protein, 214 aa, Artificial Sequence; identical to SEQ ID NO: 11550
  Description of Artificial Sequence: Synthetic polypeptide
  XENP018213 1G6_H1.112_L1_IgG1_PVA_/S267K Light Chain

SEQ ID NO: 12841 - protein, 107 aa, Artificial Sequence; identical to SEQ ID NO: 6247
  Description of Artificial Sequence: Synthetic polypeptide
  VL of XENP018213

SEQ ID NO: 12842 - protein, 11 aa, Artificial Sequence
  Description of Artificial Sequence: Synthetic peptide
  XENP018213 vlCDR1
RASQSVSNDVA

SEQ ID NO: 12843 - protein, 7 aa, Artificial Sequence
  Description of Artificial Sequence: Synthetic peptide
  XENP018213 vlCDR2
YASHRYT

SEQ ID NO: 12844 - protein, 9 aa, Artificial Sequence
  Description of Artificial Sequence: Synthetic peptide
  XENP018213 vlCDR3
QQDYSSPRT

SEQ ID NO: 12845 - protein, 451 aa, Artificial Sequence
  Description of Artificial Sequence: Synthetic polypeptide
  XENP018214 1G6_H1.113_L1_IgG1_PVA_/S267K Heavy Chain
EVQLVESGGGLVKPGGSLRLSCAASGFTFSNYWMNWVRQAPGKGLEWVGEIRLKSNSYATHYAEPVKGRFTISRDDSKSTVYLQMNSLKTEDTAVYYCTRYYGNYGGYFDVWGAGTLVTVSSASTKGPSVFPLAPSSKSTSGGTAALGCLVKDYFPEPVTVSWNSGALTSGVHTFPAVLQSSGLYSLSSVVTVPSSSLGTQTYICNVNHKPSNTKVDKKVEPKSCDKTHTCPPCPAPPVAGPSVFLFPPKPKDTLMISRTPEVTCVVVDVKHEDPEVKFNWYVDGVEVHNAKTKPREEQYNSTYRVVSVLTVLHQDWLNGKEYKCKVSNKALPAPIEKTISKAKGQPREPQVYTLPPSREEMTKNQVSLTCLVKGFYPSDIAVEWESNGQPENNYKTTPPVLDSDGSFFLYSKLTVDKSRWQQGNVFSCSVMHEALHNHYTQKSLSLSPGK

SEQ ID NO: 12846 - protein, 122 aa, Artificial Sequence; identical to SEQ ID NO: 7368
  Description of Artificial Sequence: Synthetic polypeptide
  VH of XENP018214

SEQ ID NO: 12847 - protein, 5 aa, Artificial Sequence
  Description of Artificial Sequence: Synthetic peptide
  XENP018214 vhCDR1
NYWMN

SEQ ID NO: 12848 - protein, 19 aa, Artificial Sequence
  Description of Artificial Sequence: Synthetic peptide
  XENP018214 vhCDR2
EIRLKSNSYATHYAEPVKG

SEQ ID NO: 12849 - protein, 11 aa, Artificial Sequence
  Description of Artificial Sequence: Synthetic peptide
  XENP018214 vhCDR3
YYGNYGGYFDV

SEQ ID NO: 12850 - protein, 214 aa, Artificial Sequence; identical to SEQ ID NO: 11550
  Description of Artificial Sequence: Synthetic polypeptide
  XENP018214 1G6_H1.113_L1_IgG1_PVA_/S267K Light Chain

SEQ ID NO: 12851 - protein, 107 aa, Artificial Sequence; identical to SEQ ID NO: 6247
  Description of Artificial Sequence: Synthetic polypeptide
  VL of XENP018214

SEQ ID NO: 12852 - protein, 11 aa, Artificial Sequence
  Description of Artificial Sequence: Synthetic peptide
  XENP018214 vlCDR1
RASQSVSNDVA

SEQ ID NO: 12853 - protein, 7 aa, Artificial Sequence
  Description of Artificial Sequence: Synthetic peptide
  XENP018214 vlCDR2
YASHRYT

SEQ ID NO: 12854 - protein, 9 aa, Artificial Sequence
  Description of Artificial Sequence: Synthetic peptide
  XENP018214 vlCDR3
QQDYSSPRT

SEQ ID NO: 12855 - protein, 451 aa, Artificial Sequence
  Description of Artificial Sequence: Synthetic polypeptide
  XENP018215 1G6_H1.114_L1_IgG1_PVA_/S267K Heavy Chain
EVQLVESGGGLVKPGGSLRLSCAASGFTFSNYWMNWVRQAPGKGLEWVGEIRLKSNRYATHYAEPVKGRFTISRDDSKSTVYLQMNSLKTEDTAVYYCTRYYGNYGGYFDVWGAGTLVTVSSASTKGPSVFPLAPSSKSTSGGTAALGCLVKDYFPEPVTVSWNSGALTSGVHTFPAVLQSSGLYSLSSVVTVPSSSLGTQTYICNVNHKPSNTKVDKKVEPKSCDKTHTCPPCPAPPVAGPSVFLFPPKPKDTLMISRTPEVTCVVVDVKHEDPEVKFNWYVDGVEVHNAKTKPREEQYNSTYRVVSVLTVLHQDWLNGKEYKCKVSNKALPAPIEKTISKAKGQPREPQVYTLPPSREEMTKNQVSLTCLVKGFYPSDIAVEWESNGQPENNYKTTPPVLDSDGSFFLYSKLTVDKSRWQQGNVFSCSVMHEALHNHYTQKSLSLSPGK

SEQ ID NO: 12856 - protein, 122 aa, Artificial Sequence; identical to SEQ ID NO: 7377
  Description of Artificial Sequence: Synthetic polypeptide
  VH of XENP018215

SEQ ID NO: 12857 - protein, 5 aa, Artificial Sequence
  Description of Artificial Sequence: Synthetic peptide
  XENP018215 vhCDR1
NYWMN

SEQ ID NO: 12858 - protein, 19 aa, Artificial Sequence
  Description of Artificial Sequence: Synthetic peptide
  XENP018215 vhCDR2
EIRLKSNRYATHYAEPVKG

SEQ ID NO: 12859 - protein, 11 aa, Artificial Sequence
  Description of Artificial Sequence: Synthetic peptide
  XENP018215 vhCDR3
YYGNYGGYFDV

SEQ ID NO: 12860 - protein, 214 aa, Artificial Sequence; identical to SEQ ID NO: 11550
  Description of Artificial Sequence: Synthetic polypeptide
  XENP018215 1G6_H1.114_L1_IgG1_PVA_/S267K Light Chain

SEQ ID NO: 12861 - protein, 107 aa, Artificial Sequence; identical to SEQ ID NO: 6247
  Description of Artificial Sequence: Synthetic polypeptide
  VL of XENP018215

SEQ ID NO: 12862 - protein, 11 aa, Artificial Sequence
  Description of Artificial Sequence: Synthetic peptide
  XENP018215 vlCDR1
RASQSVSNDVA

SEQ ID NO: 12863 - protein, 7 aa, Artificial Sequence
  Description of Artificial Sequence: Synthetic peptide
  XENP018215 vlCDR2
YASHRYT

SEQ ID NO: 12864 - protein, 9 aa, Artificial Sequence
  Description of Artificial Sequence: Synthetic peptide
  XENP018215 vlCDR3
QQDYSSPRT

SEQ ID NO: 12865 - protein, 451 aa, Artificial Sequence
  Description of Artificial Sequence: Synthetic polypeptide
  XENP018216 1G6_H1.115_L1_IgG1_PVA_/S267K Heavy Chain
EVQLVESGGGLVKPGGSLRLSCAASGFTFSNYWMNWVRQAPGKGLEWVGEIRLKSNLYATHYAEPVKGRFTISRDDSKSTVYLQMNSLKTEDTAVYYCTRYYGNYGGYFDVWGAGTLVTVSSASTKGPSVFPLAPSSKSTSGGTAALGCLVKDYFPEPVTVSWNSGALTSGVHTFPAVLQSSGLYSLSSVVTVPSSSLGTQTYICNVNHKPSNTKVDKKVEPKSCDKTHTCPPCPAPPVAGPSVFLFPPKPKDTLMISRTPEVTCVVVDVKHEDPEVKFNWYVDGVEVHNAKTKPREEQYNSTYRVVSVLTVLHQDWLNGKEYKCKVSNKALPAPIEKTISKAKGQPREPQVYTLPPSREEMTKNQVSLTCLVKGFYPSDIAVEWESNGQPENNYKTTPPVLDSDGSFFLYSKLTVDKSRWQQGNVFSCSVMHEALHNHYTQKSLSLSPGK

SEQ ID NO: 12866 - protein, 122 aa, Artificial Sequence; identical to SEQ ID NO: 7386
  Description of Artificial Sequence: Synthetic polypeptide
  VH of XENP018216

SEQ ID NO: 12867 - protein, 5 aa, Artificial Sequence
  Description of Artificial Sequence: Synthetic peptide
  XENP018216 vhCDR1
NYWMN

SEQ ID NO: 12868 - protein, 19 aa, Artificial Sequence
  Description of Artificial Sequence: Synthetic peptide
  XENP018216 vhCDR2
EIRLKSNLYATHYAEPVKG

SEQ ID NO: 12869 - protein, 11 aa, Artificial Sequence
  Description of Artificial Sequence: Synthetic peptide
  XENP018216 vhCDR3
YYGNYGGYFDV

SEQ ID NO: 12870 - protein, 214 aa, Artificial Sequence; identical to SEQ ID NO: 11550
  Description of Artificial Sequence: Synthetic polypeptide
  XENP018216 1G6_H1.115_L1_IgG1_PVA_/S267K Light Chain

SEQ ID NO: 12871 - protein, 107 aa, Artificial Sequence; identical to SEQ ID NO: 6247
  Description of Artificial Sequence: Synthetic polypeptide
  VL of XENP018216

SEQ ID NO: 12872 - protein, 11 aa, Artificial Sequence
  Description of Artificial Sequence: Synthetic peptide
  XENP018216 vlCDR1
RASQSVSNDVA

SEQ ID NO: 12873 - protein, 7 aa, Artificial Sequence
  Description of Artificial Sequence: Synthetic peptide
  XENP018216 vlCDR2
YASHRYT

SEQ ID NO: 12874 - protein, 9 aa, Artificial Sequence
  Description of Artificial Sequence: Synthetic peptide
  XENP018216 vlCDR3
QQDYSSPRT

SEQ ID NO: 12875 - protein, 451 aa, Artificial Sequence
  Description of Artificial Sequence: Synthetic polypeptide
  XENP018217 1G6_H1.116_L1_IgG1_PVA_/S267K Heavy Chain
EVQLVESGGGLVKPGGSLRLSCAASGFTFSNYWMNWVRQAPGKGLEWVGEIRLKSNTYATHYAEPVKGRFTISRDDSKSTVYLQMNSLKTEDTAVYYCTRYYGNYGGYFDVWGAGTLVTVSSASTKGPSVFPLAPSSKSTSGGTAALGCLVKDYFPEPVTVSWNSGALTSGVHTFPAVLQSSGLYSLSSVVTVPSSSLGTQTYICNVNHKPSNTKVDKKVEPKSCDKTHTCPPCPAPPVAGPSVFLFPPKPKDTLMISRTPEVTCVVVDVKHEDPEVKFNWYVDGVEVHNAKTKPREEQYNSTYRVVSVLTVLHQDWLNGKEYKCKVSNKALPAPIEKTISKAKGQPREPQVYTLPPSREEMTKNQVSLTCLVKGFYPSDIAVEWESNGQPENNYKTTPPVLDSDGSFFLYSKLTVDKSRWQQGNVFSCSVMHEALHNHYTQKSLSLSPGK

SEQ ID NO: 12876 - protein, 122 aa, Artificial Sequence; identical to SEQ ID NO: 7395
  Description of Artificial Sequence: Synthetic polypeptide
  VH of XENP018217

SEQ ID NO: 12877 - protein, 5 aa, Artificial Sequence
  Description of Artificial Sequence: Synthetic peptide
  XENP018217 vhCDR1
NYWMN

SEQ ID NO: 12878 - protein, 19 aa, Artificial Sequence
  Description of Artificial Sequence: Synthetic peptide
  XENP018217 vhCDR2
EIRLKSNTYATHYAEPVKG

SEQ ID NO: 12879 - protein, 11 aa, Artificial Sequence
  Description of Artificial Sequence: Synthetic peptide
  XENP018217 vhCDR3
YYGNYGGYFDV

SEQ ID NO: 12880 - protein, 214 aa, Artificial Sequence; identical to SEQ ID NO: 11550
  Description of Artificial Sequence: Synthetic polypeptide
  XENP018217 1G6_H1.116_L1_IgG1_PVA_/S267K Light Chain

SEQ ID NO: 12881 - protein, 107 aa, Artificial Sequence; identical to SEQ ID NO: 6247
  Description of Artificial Sequence: Synthetic polypeptide
  VL of XENP018217

SEQ ID NO: 12882 - protein, 11 aa, Artificial Sequence
  Description of Artificial Sequence: Synthetic peptide
  XENP018217 vlCDR1
RASQSVSNDVA

SEQ ID NO: 12883 - protein, 7 aa, Artificial Sequence
  Description of Artificial Sequence: Synthetic peptide
  XENP018217 vlCDR2
YASHRYT

SEQ ID NO: 12884 - protein, 9 aa, Artificial Sequence
  Description of Artificial Sequence: Synthetic peptide
  XENP018217 vlCDR3
QQDYSSPRT

SEQ ID NO: 12885 - protein, 451 aa, Artificial Sequence
  Description of Artificial Sequence: Synthetic polypeptide
  XENP018218 1G6_H1.117_L1_IgG1_PVA_/S267K Heavy Chain
EVQLVESGGGLVKPGGSLRLSCAASGFTFSNYWMNWVRQAPGKGLEWVGEIRLKSNGYATHYAEPVKGRFTISRDDSKSTVYLQMNSLKTEDTAVYYCTRYYGNYGGYFDVWGAGTLVTVSSASTKGPSVFPLAPSSKSTSGGTAALGCLVKDYFPEPVTVSWNSGALTSGVHTFPAVLQSSGLYSLSSVVTVPSSSLGTQTYICNVNHKPSNTKVDKKVEPKSCDKTHTCPPCPAPPVAGPSVFLFPPKPKDTLMISRTPEVTCVVVDVKHEDPEVKFNWYVDGVEVHNAKTKPREEQYNSTYRVVSVLTVLHQDWLNGKEYKCKVSNKALPAPIEKTISKAKGQPREPQVYTLPPSREEMTKNQVSLTCLVKGFYPSDIAVEWESNGQPENNYKTTPPVLDSDGSFFLYSKLTVDKSRWQQGNVFSCSVMHEALHNHYTQKSLSLSPGK

SEQ ID NO: 12886 - protein, 122 aa, Artificial Sequence; identical to SEQ ID NO: 7404
  Description of Artificial Sequence: Synthetic polypeptide
  VH of XENP018218

SEQ ID NO: 12887 - protein, 5 aa, Artificial Sequence
  Description of Artificial Sequence: Synthetic peptide
  XENP018218 vhCDR1
NYWMN

SEQ ID NO: 12888 - protein, 19 aa, Artificial Sequence
  Description of Artificial Sequence: Synthetic peptide
  XENP018218 vhCDR2
EIRLKSNGYATHYAEPVKG

SEQ ID NO: 12889 - protein, 11 aa, Artificial Sequence
  Description of Artificial Sequence: Synthetic peptide
  XENP018218 vhCDR3
YYGNYGGYFDV

SEQ ID NO: 12890 - protein, 214 aa, Artificial Sequence; identical to SEQ ID NO: 11550
  Description of Artificial Sequence: Synthetic polypeptide
  XENP018218 1G6_H1.117_L1_IgG1_PVA_/S267K Light Chain

SEQ ID NO: 12891 - protein, 107 aa, Artificial Sequence; identical to SEQ ID NO: 6247
  Description of Artificial Sequence: Synthetic polypeptide
  VL of XENP018218

SEQ ID NO: 12892 - protein, 11 aa, Artificial Sequence
  Description of Artificial Sequence: Synthetic peptide
  XENP018218 vlCDR1
RASQSVSNDVA

SEQ ID NO: 12893 - protein, 7 aa, Artificial Sequence
  Description of Artificial Sequence: Synthetic peptide
  XENP018218 vlCDR2
YASHRYT

SEQ ID NO: 12894 - protein, 9 aa, Artificial Sequence
  Description of Artificial Sequence: Synthetic peptide
  XENP018218 vlCDR3
QQDYSSPRT

SEQ ID NO: 12895 - protein, 451 aa, Artificial Sequence
  Description of Artificial Sequence: Synthetic polypeptide
  XENP018219 1G6_H1.118_L1_IgG1_PVA_/S267K Heavy Chain
EVQLVESGGGLVKPGGSLRLSCAASGFTFSNYWMNWVRQAPGKGLEWVGEIRLKSNYYATHYAEPVKGRFTISRDDSKSTVYLQMNSLKTEDTAVYYCTRYYGNYGGYFDVWGAGTLVTVSSASTKGPSVFPLAPSSKSTSGGTAALGCLVKDYFPEPVTVSWNSGALTSGVHTFPAVLQSSGLYSLSSVVTVPSSSLGTQTYICNVNHKPSNTKVDKKVEPKSCDKTHTCPPCPAPPVAGPSVFLFPPKPKDTLMISRTPEVTCVVVDVKHEDPEVKFNWYVDGVEVHNAKTKPREEQYNSTYRVVSVLTVLHQDWLNGKEYKCKVSNKALPAPIEKTISKAKGQPREPQVYTLPPSREEMTKNQVSLTCLVKGFYPSDIAVEWESNGQPENNYKTTPPVLDSDGSFFLYSKLTVDKSRWQQGNVFSCSVMHEALHNHYTQKSLSLSPGK

SEQ ID NO: 12896 - protein, 122 aa, Artificial Sequence; identical to SEQ ID NO: 7413
  Description of Artificial Sequence: Synthetic polypeptide
  VH of XENP018219

SEQ ID NO: 12897 - protein, 5 aa, Artificial Sequence
  Description of Artificial Sequence: Synthetic peptide
  XENP018219 vhCDR1
NYWMN

SEQ ID NO: 12898 - protein, 19 aa, Artificial Sequence
  Description of Artificial Sequence: Synthetic peptide
  XENP018219 vhCDR2
EIRLKSNYYATHYAEPVKG

SEQ ID NO: 12899 - protein, 11 aa, Artificial Sequence
  Description of Artificial Sequence: Synthetic peptide
  XENP018219 vhCDR3
YYGNYGGYFDV

SEQ ID NO: 12900 - protein, 214 aa, Artificial Sequence; identical to SEQ ID NO: 11550
  Description of Artificial Sequence: Synthetic polypeptide
  XENP018219 1G6_H1.118_L1_IgG1_PVA_/S267K Light Chain

SEQ ID NO: 12901 - protein, 107 aa, Artificial Sequence; identical to SEQ ID NO: 6247
  Description of Artificial Sequence: Synthetic polypeptide
  VL of XENP018219

SEQ ID NO: 12902 - protein, 11 aa, Artificial Sequence
  Description of Artificial Sequence: Synthetic peptide
  XENP018219 vlCDR1
RASQSVSNDVA

SEQ ID NO: 12903 - protein, 7 aa, Artificial Sequence
  Description of Artificial Sequence: Synthetic peptide
  XENP018219 vlCDR2
YASHRYT

SEQ ID NO: 12904 - protein, 9 aa, Artificial Sequence
  Description of Artificial Sequence: Synthetic peptide
  XENP018219 vlCDR3
QQDYSSPRT

SEQ ID NO: 12905 - protein, 451 aa, Artificial Sequence
  Description of Artificial Sequence: Synthetic polypeptide
  XENP018220 1G6_H1.119_L1_IgG1_PVA_/S267K Heavy Chain
EVQLVESGGGLVKPGGSLRLSCAASGFTFSNYWMNWVRQAPGKGLEWVGEIRLKSNNFATHYAEPVKGRFTISRDDSKSTVYLQMNSLKTEDTAVYYCTRYYGNYGGYFDVWGAGTLVTVSSASTKGPSVFPLAPSSKSTSGGTAALGCLVKDYFPEPVTVSWNSGALTSGVHTFPAVLQSSGLYSLSSVVTVPSSSLGTQTYICNVNHKPSNTKVDKKVEPKSCDKTHTCPPCPAPPVAGPSVFLFPPKPKDTLMISRTPEVTCVVVDVKHEDPEVKFNWYVDGVEVHNAKTKPREEQYNSTYRVVSVLTVLHQDWLNGKEYKCKVSNKALPAPIEKTISKAKGQPREPQVYTLPPSREEMTKNQVSLTCLVKGFYPSDIAVEWESNGQPENNYKTTPPVLDSDGSFFLYSKLTVDKSRWQQGNVFSCSVMHEALHNHYTQKSLSLSPGK

SEQ ID NO: 12906 - protein, 122 aa, Artificial Sequence; identical to SEQ ID NO: 7422
  Description of Artificial Sequence: Synthetic polypeptide
  VH of XENP018220

SEQ ID NO: 12907 - protein, 5 aa, Artificial Sequence
  Description of Artificial Sequence: Synthetic peptide
  XENP018220 vhCDR1
NYWMN

SEQ ID NO: 12908 - protein, 19 aa, Artificial Sequence
  Description of Artificial Sequence: Synthetic peptide
  XENP018220 vhCDR2
EIRLKSNNFATHYAEPVKG

SEQ ID NO: 12909 - protein, 11 aa, Artificial Sequence
  Description of Artificial Sequence: Synthetic peptide
  XENP018220 vhCDR3
YYGNYGGYFDV

SEQ ID NO: 12910 - protein, 214 aa, Artificial Sequence; identical to SEQ ID NO: 11550
  Description of Artificial Sequence: Synthetic polypeptide
  XENP018220 1G6_H1.119_L1_IgG1_PVA_/S267K Light Chain

SEQ ID NO: 12911 - protein, 107 aa, Artificial Sequence; identical to SEQ ID NO: 6247
  Description of Artificial Sequence: Synthetic polypeptide
  VL of XENP018220

SEQ ID NO: 12912 - protein, 11 aa, Artificial Sequence
  Description of Artificial Sequence: Synthetic peptide
  XENP018220 vlCDR1
RASQSVSNDVA

SEQ ID NO: 12913 - protein, 7 aa, Artificial Sequence
  Description of Artificial Sequence: Synthetic peptide
  XENP018220 vlCDR2
YASHRYT

SEQ ID NO: 12914 - protein, 9 aa, Artificial Sequence
  Description of Artificial Sequence: Synthetic peptide
  XENP018220 vlCDR3
QQDYSSPRT

SEQ ID NO: 12915 - protein, 451 aa, Artificial Sequence
  Description of Artificial Sequence: Synthetic polypeptide
  XENP018221 1G6_H1.120_L1_IgG1_PVA_/S267K Heavy Chain
EVQLVESGGGLVKPGGSLRLSCAASGFTFSNYWMNWVRQAPGKGLEWVGEIRLKSNNHATHYAEPVKGRFTISRDDSKSTVYLQMNSLKTEDTAVYYCTRYYGNYGGYFDVWGAGTLVTVSSASTKGPSVFPLAPSSKSTSGGTAALGCLVKDYFPEPVTVSWNSGALTSGVHTFPAVLQSSGLYSLSSVVTVPSSSLGTQTYICNVNHKPSNTKVDKKVEPKSCDKTHTCPPCPAPPVAGPSVFLFPPKPKDTLMISRTPEVTCVVVDVKHEDPEVKFNWYVDGVEVHNAKTKPREEQYNSTYRVVSVLTVLHQDWLNGKEYKCKVSNKALPAPIEKTISKAKGQPREPQVYTLPPSREEMTKNQVSLTCLVKGFYPSDIAVEWESNGQPENNYKTTPPVLDSDGSFFLYSKLTVDKSRWQQGNVFSCSVMHEALHNHYTQKSLSLSPGK

SEQ ID NO: 12916 - protein, 122 aa, Artificial Sequence; identical to SEQ ID NO: 7431
  Description of Artificial Sequence: Synthetic polypeptide
  VH of XENP018221

SEQ ID NO: 12917 - protein, 5 aa, Artificial Sequence
  Description of Artificial Sequence: Synthetic peptide
  XENP018221 vhCDR1
NYWMN

SEQ ID NO: 12918 - protein, 19 aa, Artificial Sequence
  Description of Artificial Sequence: Synthetic peptide
  XENP018221 vhCDR2
EIRLKSNNHATHYAEPVKG

SEQ ID NO: 12919 - protein, 11 aa, Artificial Sequence
  Description of Artificial Sequence: Synthetic peptide
  XENP018221 vhCDR3
YYGNYGGYFDV

SEQ ID NO: 12920 - protein, 214 aa, Artificial Sequence; identical to SEQ ID NO: 11550
  Description of Artificial Sequence: Synthetic polypeptide
  XENP018221 1G6_H1.120_L1_IgG1_PVA_/S267K Light Chain

SEQ ID NO: 12921 - protein, 107 aa, Artificial Sequence; identical to SEQ ID NO: 6247
  Description of Artificial Sequence: Synthetic polypeptide
  VL of XENP018221

SEQ ID NO: 12922 - protein, 11 aa, Artificial Sequence
  Description of Artificial Sequence: Synthetic peptide
  XENP018221 vlCDR1
RASQSVSNDVA

SEQ ID NO: 12923 - protein, 7 aa, Artificial Sequence
  Description of Artificial Sequence: Synthetic peptide
  XENP018221 vlCDR2
YASHRYT

SEQ ID NO: 12924 - protein, 9 aa, Artificial Sequence
  Description of Artificial Sequence: Synthetic peptide
  XENP018221 vlCDR3
QQDYSSPRT

SEQ ID NO: 12925 - protein, 451 aa, Artificial Sequence
  Description of Artificial Sequence: Synthetic polypeptide
  XENP018222 1G6_H1.121_L1_IgG1_PVA_/S267K Heavy Chain
EVQLVESGGGLVKPGGSLRLSCAASGFTFSNYWMNWVRQAPGKGLEWVGEIRLKSNNLATHYAEPVKGRFTISRDDSKSTVYLQMNSLKTEDTAVYYCTRYYGNYGGYFDVWGAGTLVTVSSASTKGPSVFPLAPSSKSTSGGTAALGCLVKDYFPEPVTVSWNSGALTSGVHTFPAVLQSSGLYSLSSVVTVPSSSLGTQTYICNVNHKPSNTKVDKKVEPKSCDKTHTCPPCPAPPVAGPSVFLFPPKPKDTLMISRTPEVTCVVVDVKHEDPEVKFNWYVDGVEVHNAKTKPREEQYNSTYRVVSVLTVLHQDWLNGKEYKCKVSNKALPAPIEKTISKAKGQPREPQVYTLPPSREEMTKNQVSLTCLVKGFYPSDIAVEWESNGQPENNYKTTPPVLDSDGSFFLYSKLTVDKSRWQQGNVFSCSVMHEALHNHYTQKSLSLSPGK

SEQ ID NO: 12926 - protein, 122 aa, Artificial Sequence; identical to SEQ ID NO: 7440
  Description of Artificial Sequence: Synthetic polypeptide
  VH of XENP018222

SEQ ID NO: 12927 - protein, 5 aa, Artificial Sequence
  Description of Artificial Sequence: Synthetic peptide
  XENP018222 vhCDR1
NYWMN

SEQ ID NO: 12928 - protein, 19 aa, Artificial Sequence
  Description of Artificial Sequence: Synthetic peptide
  XENP018222 vhCDR2
EIRLKSNNLATHYAEPVKG

SEQ ID NO: 12929 - protein, 11 aa, Artificial Sequence
  Description of Artificial Sequence: Synthetic peptide
  XENP018222 vhCDR3
YYGNYGGYFDV

SEQ ID NO: 12930 - protein, 214 aa, Artificial Sequence; identical to SEQ ID NO: 11550
  Description of Artificial Sequence: Synthetic polypeptide
  XENP018222 1G6_H1.121_L1_IgG1_PVA_/S267K Light Chain

SEQ ID NO: 12931 - protein, 107 aa, Artificial Sequence; identical to SEQ ID NO: 6247
  Description of Artificial Sequence: Synthetic polypeptide
  VL of XENP018222

SEQ ID NO: 12932 - protein, 11 aa, Artificial Sequence
  Description of Artificial Sequence: Synthetic peptide
  XENP018222 vlCDR1
RASQSVSNDVA

SEQ ID NO: 12933 - protein, 7 aa, Artificial Sequence
  Description of Artificial Sequence: Synthetic peptide
  XENP018222 vlCDR2
YASHRYT

SEQ ID NO: 12934 - protein, 9 aa, Artificial Sequence
  Description of Artificial Sequence: Synthetic peptide
  XENP018222 vlCDR3
QQDYSSPRT

SEQ ID NO: 12935 - protein, 451 aa, Artificial Sequence
  Description of Artificial Sequence: Synthetic polypeptide
  XENP018223 1G6_H1.122_L1_IgG1_PVA_/S267K Heavy Chain
EVQLVESGGGLVKPGGSLRLSCAASGFTFSNYWMNWVRQAPGKGLEWVGEIRLKSNNWATHYAEPVKGRFTISRDDSKSTVYLQMNSLKTEDTAVYYCTRYYGNYGGYFDVWGAGTLVTVSSASTKGPSVFPLAPSSKSTSGGTAALGCLVKDYFPEPVTVSWNSGALTSGVHTFPAVLQSSGLYSLSSVVTVPSSSLGTQTYICNVNHKPSNTKVDKKVEPKSCDKTHTCPPCPAPPVAGPSVFLFPPKPKDTLMISRTPEVTCVVVDVKHEDPEVKFNWYVDGVEVHNAKTKPREEQYNSTYRVVSVLTVLHQDWLNGKEYKCKVSNKALPAPIEKTISKAKGQPREPQVYTLPPSREEMTKNQVSLTCLVKGFYPSDIAVEWESNGQPENNYKTTPPVLDSDGSFFLYSKLTVDKSRWQQGNVFSCSVMHEALHNHYTQKSLSLSPGK

SEQ ID NO: 12936 - protein, 122 aa, Artificial Sequence; identical to SEQ ID NO: 7449
  Description of Artificial Sequence: Synthetic polypeptide
  VH of XENP018223

SEQ ID NO: 12937 - protein, 5 aa, Artificial Sequence
  Description of Artificial Sequence: Synthetic peptide
  XENP018223 vhCDR1
NYWMN

SEQ ID NO: 12938 - protein, 19 aa, Artificial Sequence
  Description of Artificial Sequence: Synthetic peptide
  XENP018223 vhCDR2
EIRLKSNNWATHYAEPVKG

SEQ ID NO: 12939 - protein, 11 aa, Artificial Sequence
  Description of Artificial Sequence: Synthetic peptide
  XENP018223 vhCDR3
YYGNYGGYFDV

SEQ ID NO: 12940 - protein, 214 aa, Artificial Sequence; identical to SEQ ID NO: 11550
  Description of Artificial Sequence: Synthetic polypeptide
  XENP018223 1G6_H1.122_L1_IgG1_PVA_/S267K Light Chain

SEQ ID NO: 12941 - protein, 107 aa, Artificial Sequence; identical to SEQ ID NO: 6247
  Description of Artificial Sequence: Synthetic polypeptide
  VL of XENP018223

SEQ ID NO: 12942 - protein, 11 aa, Artificial Sequence
  Description of Artificial Sequence: Synthetic peptide
  XENP018223 vlCDR1
RASQSVSNDVA

SEQ ID NO: 12943 - protein, 7 aa, Artificial Sequence
  Description of Artificial Sequence: Synthetic peptide
  XENP018223 vlCDR2
YASHRYT

SEQ ID NO: 12944 - protein, 9 aa, Artificial Sequence
  Description of Artificial Sequence: Synthetic peptide
  XENP018223 vlCDR3
QQDYSSPRT

SEQ ID NO: 12945 - protein, 451 aa, Artificial Sequence
  Description of Artificial Sequence: Synthetic polypeptide
  XENP018224 1G6_H1.123_L1_IgG1_PVA_/S267K Heavy Chain
EVQLVESGGGLVKPGGSLRLSCAASGFTFSNYWMNWVRQAPGKGLEWVGEIRLKSNNVATHYAEPVKGRFTISRDDSKSTVYLQMNSLKTEDTAVYYCTRYYGNYGGYFDVWGAGTLVTVSSASTKGPSVFPLAPSSKSTSGGTAALGCLVKDYFPEPVTVSWNSGALTSGVHTFPAVLQSSGLYSLSSVVTVPSSSLGTQTYICNVNHKPSNTKVDKKVEPKSCDKTHTCPPCPAPPVAGPSVFLFPPKPKDTLMISRTPEVTCVVVDVKHEDPEVKFNWYVDGVEVHNAKTKPREEQYNSTYRVVSVLTVLHQDWLNGKEYKCKVSNKALPAPIEKTISKAKGQPREPQVYTLPPSREEMTKNQVSLTCLVKGFYPSDIAVEWESNGQPENNYKTTPPVLDSDGSFFLYSKLTVDKSRWQQGNVFSCSVMHEALHNHYTQKSLSLSPGK

SEQ ID NO: 12946 - protein, 122 aa, Artificial Sequence; identical to SEQ ID NO: 7458
  Description of Artificial Sequence: Synthetic polypeptide
  VH of XENP018224

SEQ ID NO: 12947 - protein, 5 aa, Artificial Sequence
  Description of Artificial Sequence: Synthetic peptide
  XENP018224 vhCDR1
NYWMN

SEQ ID NO: 12948 - protein, 19 aa, Artificial Sequence
  Description of Artificial Sequence: Synthetic peptide
  XENP018224 vhCDR2
EIRLKSNNVATHYAEPVKG

SEQ ID NO: 12949 - protein, 11 aa, Artificial Sequence
  Description of Artificial Sequence: Synthetic peptide
  XENP018224 vhCDR3
YYGNYGGYFDV

SEQ ID NO: 12950 - protein, 214 aa, Artificial Sequence; identical to SEQ ID NO: 11550
  Description of Artificial Sequence: Synthetic polypeptide
  XENP018224 1G6_H1.123_L1_IgG1_PVA_/S267K Light Chain

SEQ ID NO: 12951 - protein, 107 aa, Artificial Sequence; identical to SEQ ID NO: 6247
  Description of Artificial Sequence: Synthetic polypeptide
  VL of XENP018224

SEQ ID NO: 12952 - protein, 11 aa, Artificial Sequence
  Description of Artificial Sequence: Synthetic peptide
  XENP018224 vlCDR1
RASQSVSNDVA

SEQ ID NO: 12953 - protein, 7 aa, Artificial Sequence
  Description of Artificial Sequence: Synthetic peptide
  XENP018224 vlCDR2
YASHRYT

SEQ ID NO: 12954 - protein, 9 aa, Artificial Sequence
  Description of Artificial Sequence: Synthetic peptide
  XENP018224 vlCDR3
QQDYSSPRT

SEQ ID NO: 12955 - protein, 451 aa, Artificial Sequence
  Description of Artificial Sequence: Synthetic polypeptide
  XENP018225 1G6_H1.124_L1_IgG1_PVA_/S267K Heavy Chain
EVQLVESGGGLVKPGGSLRLSCAASGFTFSNYWMNWVRQAPGKGLEWVGEIRLKSNNAATHYAEPVKGRFTISRDDSKSTVYLQMNSLKTEDTAVYYCTRYYGNYGGYFDVWGAGTLVTVSSASTKGPSVFPLAPSSKSTSGGTAALGCLVKDYFPEPVTVSWNSGALTSGVHTFPAVLQSSGLYSLSSVVTVPSSSLGTQTYICNVNHKPSNTKVDKKVEPKSCDKTHTCPPCPAPPVAGPSVFLFPPKPKDTLMISRTPEVTCVVVDVKHEDPEVKFNWYVDGVEVHNAKTKPREEQYNSTYRVVSVLTVLHQDWLNGKEYKCKVSNKALPAPIEKTISKAKGQPREPQVYTLPPSREEMTKNQVSLTCLVKGFYPSDIAVEWESNGQPENNYKTTPPVLDSDGSFFLYSKLTVDKSRWQQGNVFSCSVMHEALHNHYTQKSLSLSPGK

SEQ ID NO: 12956 - protein, 122 aa, Artificial Sequence; identical to SEQ ID NO: 7467
  Description of Artificial Sequence: Synthetic polypeptide
  VH of XENP018225

SEQ ID NO: 12957 - protein, 5 aa, Artificial Sequence
  Description of Artificial Sequence: Synthetic peptide
  XENP018225 vhCDR1
NYWMN

SEQ ID NO: 12958 - protein, 19 aa, Artificial Sequence
  Description of Artificial Sequence: Synthetic peptide
  XENP018225 vhCDR2
EIRLKSNNAATHYAEPVKG

SEQ ID NO: 12959 - protein, 11 aa, Artificial Sequence
  Description of Artificial Sequence: Synthetic peptide
  XENP018225 vhCDR3
YYGNYGGYFDV

SEQ ID NO: 12960 - protein, 214 aa, Artificial Sequence; identical to SEQ ID NO: 11550
  Description of Artificial Sequence: Synthetic polypeptide
  XENP018225 1G6_H1.124_L1_IgG1_PVA_/S267K Light Chain

SEQ ID NO: 12961 - protein, 107 aa, Artificial Sequence; identical to SEQ ID NO: 6247
  Description of Artificial Sequence: Synthetic polypeptide
  VL of XENP018225

SEQ ID NO: 12962 - protein, 11 aa, Artificial Sequence
  Description of Artificial Sequence: Synthetic peptide
  XENP018225 vlCDR1
RASQSVSNDVA

SEQ ID NO: 12963 - protein, 7 aa, Artificial Sequence
  Description of Artificial Sequence: Synthetic peptide
  XENP018225 vlCDR2
YASHRYT

SEQ ID NO: 12964 - protein, 9 aa, Artificial Sequence
  Description of Artificial Sequence: Synthetic peptide
  XENP018225 vlCDR3
QQDYSSPRT

SEQ ID NO: 12965 - protein, 451 aa, Artificial Sequence
  Description of Artificial Sequence: Synthetic polypeptide
  XENP018226 1G6_H1.125_L1_IgG1_PVA_/S267K Heavy Chain
EVQLVESGGGLVKPGGSLRLSCAASGFTFSNYWMNWVRQAPGKGLEWVGEIRLKSNNQATHYAEPVKGRFTISRDDSKSTVYLQMNSLKTEDTAVYYCTRYYGNYGGYFDVWGAGTLVTVSSASTKGPSVFPLAPSSKSTSGGTAALGCLVKDYFPEPVTVSWNSGALTSGVHTFPAVLQSSGLYSLSSVVTVPSSSLGTQTYICNVNHKPSNTKVDKKVEPKSCDKTHTCPPCPAPPVAGPSVFLFPPKPKDTLMISRTPEVTCVVVDVKHEDPEVKFNWYVDGVEVHNAKTKPREEQYNSTYRVVSVLTVLHQDWLNGKEYKCKVSNKALPAPIEKTISKAKGQPREPQVYTLPPSREEMTKNQVSLTCLVKGFYPSDIAVEWESNGQPENNYKTTPPVLDSDGSFFLYSKLTVDKSRWQQGNVFSCSVMHEALHNHYTQKSLSLSPGK

SEQ ID NO: 12966 - protein, 122 aa, Artificial Sequence; identical to SEQ ID NO: 7476
  Description of Artificial Sequence: Synthetic polypeptide
  VH of XENP018226

SEQ ID NO: 12967 - protein, 5 aa, Artificial Sequence
  Description of Artificial Sequence: Synthetic peptide
  XENP018226 vhCDR1
NYWMN

SEQ ID NO: 12968 - protein, 19 aa, Artificial Sequence
  Description of Artificial Sequence: Synthetic peptide
  XENP018226 vhCDR2
EIRLKSNNQATHYAEPVKG

SEQ ID NO: 12969 - protein, 11 aa, Artificial Sequence
  Description of Artificial Sequence: Synthetic peptide
  XENP018226 vhCDR3
YYGNYGGYFDV

SEQ ID NO: 12970 - protein, 214 aa, Artificial Sequence; identical to SEQ ID NO: 11550
  Description of Artificial Sequence: Synthetic polypeptide
  XENP018226 1G6_H1.125_L1_IgG1_PVA_/S267K Light Chain

SEQ ID NO: 12971 - protein, 107 aa, Artificial Sequence; identical to SEQ ID NO: 6247
  Description of Artificial Sequence: Synthetic polypeptide
  VL of XENP018226

SEQ ID NO: 12972 - protein, 11 aa, Artificial Sequence
  Description of Artificial Sequence: Synthetic peptide
  XENP018226 vlCDR1
RASQSVSNDVA

SEQ ID NO: 12973 - protein, 7 aa, Artificial Sequence
  Description of Artificial Sequence: Synthetic peptide
  XENP018226 vlCDR2
YASHRYT

SEQ ID NO: 12974 - protein, 9 aa, Artificial Sequence
  Description of Artificial Sequence: Synthetic peptide
  XENP018226 vlCDR3
QQDYSSPRT

SEQ ID NO: 12975 - protein, 451 aa, Artificial Sequence
  Description of Artificial Sequence: Synthetic polypeptide
  XENP018227 1G6_H1.126_L1_IgG1_PVA_/S267K Heavy Chain
EVQLVESGGGLVKPGGSLRLSCAASGFTFSNYWMNWVRQAPGKGLEWVGEIRLKSNNDATHYAEPVKGRFTISRDDSKSTVYLQMNSLKTEDTAVYYCTRYYGNYGGYFDVWGAGTLVTVSSASTKGPSVFPLAPSSKSTSGGTAALGCLVKDYFPEPVTVSWNSGALTSGVHTFPAVLQSSGLYSLSSVVTVPSSSLGTQTYICNVNHKPSNTKVDKKVEPKSCDKTHTCPPCPAPPVAGPSVFLFPPKPKDTLMISRTPEVTCVVVDVKHEDPEVKFNWYVDGVEVHNAKTKPREEQYNSTYRVVSVLTVLHQDWLNGKEYKCKVSNKALPAPIEKTISKAKGQPREPQVYTLPPSREEMTKNQVSLTCLVKGFYPSDIAVEWESNGQPENNYKTTPPVLDSDGSFFLYSKLTVDKSRWQQGNVFSCSVMHEALHNHYTQKSLSLSPGK

SEQ ID NO: 12976 - protein, 122 aa, Artificial Sequence; identical to SEQ ID NO: 7485
  Description of Artificial Sequence: Synthetic polypeptide
  VH of XENP018227

SEQ ID NO: 12977 - protein, 5 aa, Artificial Sequence
  Description of Artificial Sequence: Synthetic peptide
  XENP018227 vhCDR1
NYWMN

SEQ ID NO: 12978 - protein, 19 aa, Artificial Sequence
  Description of Artificial Sequence: Synthetic peptide
  XENP018227 vhCDR2
EIRLKSNNDATHYAEPVKG

SEQ ID NO: 12979 - protein, 11 aa, Artificial Sequence
  Description of Artificial Sequence: Synthetic peptide
  XENP018227 vhCDR3
YYGNYGGYFDV

SEQ ID NO: 12980 - protein, 214 aa, Artificial Sequence; identical to SEQ ID NO: 11550
  Description of Artificial Sequence: Synthetic polypeptide
  XENP018227 1G6_H1.126_L1_IgG1_PVA_/S267K Light Chain

SEQ ID NO: 12981 - protein, 107 aa, Artificial Sequence; identical to SEQ ID NO: 6247
  Description of Artificial Sequence: Synthetic polypeptide
  VL of XENP018227

SEQ ID NO: 12982 - protein, 11 aa, Artificial Sequence
  Description of Artificial Sequence: Synthetic peptide
  XENP018227 vlCDR1
RASQSVSNDVA

SEQ ID NO: 12983 - protein, 7 aa, Artificial Sequence
  Description of Artificial Sequence: Synthetic peptide
  XENP018227 vlCDR2
YASHRYT

SEQ ID NO: 12984 - protein, 9 aa, Artificial Sequence
  Description of Artificial Sequence: Synthetic peptide
  XENP018227 vlCDR3
QQDYSSPRT

SEQ ID NO: 12985 - protein, 451 aa, Artificial Sequence
  Description of Artificial Sequence: Synthetic polypeptide
  XENP018228 1G6_H1.127_L1_IgG1_PVA_/S267K Heavy Chain
EVQLVESGGGLVKPGGSLRLSCAASGFTFSNYWMNWVRQAPGKGLEWVGEIRLKSNNKATHYAEPVKGRFTISRDDSKSTVYLQMNSLKTEDTAVYYCTRYYGNYGGYFDVWGAGTLVTVSSASTKGPSVFPLAPSSKSTSGGTAALGCLVKDYFPEPVTVSWNSGALTSGVHTFPAVLQSSGLYSLSSVVTVPSSSLGTQTYICNVNHKPSNTKVDKKVEPKSCDKTHTCPPCPAPPVAGPSVFLFPPKPKDTLMISRTPEVTCVVVDVKHEDPEVKFNWYVDGVEVHNAKTKPREEQYNSTYRVVSVLTVLHQDWLNGKEYKCKVSNKALPAPIEKTISKAKGQPREPQVYTLPPSREEMTKNQVSLTCLVKGFYPSDIAVEWESNGQPENNYKTTPPVLDSDGSFFLYSKLTVDKSRWQQGNVFSCSVMHEALHNHYTQKSLSLSPGK

SEQ ID NO: 12986 - protein, 122 aa, Artificial Sequence; identical to SEQ ID NO: 7494
  Description of Artificial Sequence: Synthetic polypeptide
  VH of XENP018228

SEQ ID NO: 12987 - protein, 5 aa, Artificial Sequence
  Description of Artificial Sequence: Synthetic peptide
  XENP018228 vhCDR1
NYWMN

SEQ ID NO: 12988 - protein, 19 aa, Artificial Sequence
  Description of Artificial Sequence: Synthetic peptide
  XENP018228 vhCDR2
EIRLKSNNKATHYAEPVKG

SEQ ID NO: 12989 - protein, 11 aa, Artificial Sequence
  Description of Artificial Sequence: Synthetic peptide
  XENP018228 vhCDR3
YYGNYGGYFDV

SEQ ID NO: 12990 - protein, 214 aa, Artificial Sequence; identical to SEQ ID NO: 11550
  Description of Artificial Sequence: Synthetic polypeptide
  XENP018228 1G6_H1.127_L1_IgG1_PVA_/S267K Light Chain

SEQ ID NO: 12991 - protein, 107 aa, Artificial Sequence; identical to SEQ ID NO: 6247
  Description of Artificial Sequence: Synthetic polypeptide
  VL of XENP018228

SEQ ID NO: 12992 - protein, 11 aa, Artificial Sequence
  Description of Artificial Sequence: Synthetic peptide
  XENP018228 vlCDR1
RASQSVSNDVA

SEQ ID NO: 12993 - protein, 7 aa, Artificial Sequence
  Description of Artificial Sequence: Synthetic peptide
  XENP018228 vlCDR2
YASHRYT

SEQ ID NO: 12994 - protein, 9 aa, Artificial Sequence
  Description of Artificial Sequence: Synthetic peptide
  XENP018228 vlCDR3
QQDYSSPRT

SEQ ID NO: 12995 - protein, 451 aa, Artificial Sequence
  Description of Artificial Sequence: Synthetic polypeptide
  XENP018229 1G6_H1.128_L1_IgG1_PVA_/S267K Heavy Chain
EVQLVESGGGLVKPGGSLRLSCAASGFTFSNYWMNWVRQAPGKGLEWVGEIRLKSNNYGTHYAEPVKGRFTISRDDSKSTVYLQMNSLKTEDTAVYYCTRYYGNYGGYFDVWGAGTLVTVSSASTKGPSVFPLAPSSKSTSGGTAALGCLVKDYFPEPVTVSWNSGALTSGVHTFPAVLQSSGLYSLSSVVTVPSSSLGTQTYICNVNHKPSNTKVDKKVEPKSCDKTHTCPPCPAPPVAGPSVFLFPPKPKDTLMISRTPEVTCVVVDVKHEDPEVKFNWYVDGVEVHNAKTKPREEQYNSTYRVVSVLTVLHQDWLNGKEYKCKVSNKALPAPIEKTISKAKGQPREPQVYTLPPSREEMTKNQVSLTCLVKGFYPSDIAVEWESNGQPENNYKTTPPVLDSDGSFFLYSKLTVDKSRWQQGNVFSCSVMHEALHNHYTQKSLSLSPGK

SEQ ID NO: 12996 - protein, 122 aa, Artificial Sequence; identical to SEQ ID NO: 7503
  Description of Artificial Sequence: Synthetic polypeptide
  VH of XENP018229

SEQ ID NO: 12997 - protein, 5 aa, Artificial Sequence
  Description of Artificial Sequence: Synthetic peptide
  XENP018229 vhCDR1
NYWMN

SEQ ID NO: 12998 - protein, 19 aa, Artificial Sequence
  Description of Artificial Sequence: Synthetic peptide
  XENP018229 vhCDR2
EIRLKSNNYGTHYAEPVKG

SEQ ID NO: 12999 - protein, 11 aa, Artificial Sequence
  Description of Artificial Sequence: Synthetic peptide
  XENP018229 vhCDR3
YYGNYGGYFDV

SEQ ID NO: 13000 - protein, 214 aa, Artificial Sequence; identical to SEQ ID NO: 11550
  Description of Artificial Sequence: Synthetic polypeptide
  XENP018229 1G6_H1.128_L1_IgG1_PVA_/S267K Light Chain

SEQ ID NO: 13001 - protein, 107 aa, Artificial Sequence; identical to SEQ ID NO: 6247
  Description of Artificial Sequence: Synthetic polypeptide
  VL of XENP018229

SEQ ID NO: 13002 - protein, 11 aa, Artificial Sequence
  Description of Artificial Sequence: Synthetic peptide
  XENP018229 vlCDR1
RASQSVSNDVA

SEQ ID NO: 13003 - protein, 7 aa, Artificial Sequence
  Description of Artificial Sequence: Synthetic peptide
  XENP018229 vlCDR2
YASHRYT

SEQ ID NO: 13004 - protein, 9 aa, Artificial Sequence
  Description of Artificial Sequence: Synthetic peptide
  XENP018229 vlCDR3
QQDYSSPRT

SEQ ID NO: 13005 - protein, 451 aa, Artificial Sequence
  Description of Artificial Sequence: Synthetic polypeptide
  XENP018230 1G6_H1.129_L1_IgG1_PVA_/S267K Heavy Chain
EVQLVESGGGLVKPGGSLRLSCAASGFTFSNYWMNWVRQAPGKGLEWVGEIRLKSNNYHTHYAEPVKGRFTISRDDSKSTVYLQMNSLKTEDTAVYYCTRYYGNYGGYFDVWGAGTLVTVSSASTKGPSVFPLAPSSKSTSGGTAALGCLVKDYFPEPVTVSWNSGALTSGVHTFPAVLQSSGLYSLSSVVTVPSSSLGTQTYICNVNHKPSNTKVDKKVEPKSCDKTHTCPPCPAPPVAGPSVFLFPPKPKDTLMISRTPEVTCVVVDVKHEDPEVKFNWYVDGVEVHNAKTKPREEQYNSTYRVVSVLTVLHQDWLNGKEYKCKVSNKALPAPIEKTISKAKGQPREPQVYTLPPSREEMTKNQVSLTCLVKGFYPSDIAVEWESNGQPENNYKTTPPVLDSDGSFFLYSKLTVDKSRWQQGNVFSCSVMHEALHNHYTQKSLSLSPGK

SEQ ID NO: 13006 - protein, 122 aa, Artificial Sequence; identical to SEQ ID NO: 7512
  Description of Artificial Sequence: Synthetic polypeptide
  VH of XENP018230

SEQ ID NO: 13007 - protein, 5 aa, Artificial Sequence
  Description of Artificial Sequence: Synthetic peptide
  XENP018230 vhCDR1
NYWMN

SEQ ID NO: 13008 - protein, 19 aa, Artificial Sequence
  Description of Artificial Sequence: Synthetic peptide
  XENP018230 vhCDR2
EIRLKSNNYHTHYAEPVKG

SEQ ID NO: 13009 - protein, 11 aa, Artificial Sequence
  Description of Artificial Sequence: Synthetic peptide
  XENP018230 vhCDR3
YYGNYGGYFDV

SEQ ID NO: 13010 - protein, 214 aa, Artificial Sequence; identical to SEQ ID NO: 11550
  Description of Artificial Sequence: Synthetic polypeptide
  XENP018230 1G6_H1.129_L1_IgG1_PVA_/S267K Light Chain

SEQ ID NO: 13011 - protein, 107 aa, Artificial Sequence; identical to SEQ ID NO: 6247
  Description of Artificial Sequence: Synthetic polypeptide
  VL of XENP018230

SEQ ID NO: 13012 - protein, 11 aa, Artificial Sequence
  Description of Artificial Sequence: Synthetic peptide
  XENP018230 vlCDR1
RASQSVSNDVA

SEQ ID NO: 13013 - protein, 7 aa, Artificial Sequence
  Description of Artificial Sequence: Synthetic peptide
  XENP018230 vlCDR2
YASHRYT

SEQ ID NO: 13014 - protein, 9 aa, Artificial Sequence
  Description of Artificial Sequence: Synthetic peptide
  XENP018230 vlCDR3
QQDYSSPRT

SEQ ID NO: 13015 - protein, 451 aa, Artificial Sequence
  Description of Artificial Sequence: Synthetic polypeptide
  XENP018231 1G6_H1.130_L1_IgG1_PVA_/S267K Heavy Chain
EVQLVESGGGLVKPGGSLRLSCAASGFTFSNYWMNWVRQAPGKGLEWVGEIRLKSNNYQTHYAEPVKGRFTISRDDSKSTVYLQMNSLKTEDTAVYYCTRYYGNYGGYFDVWGAGTLVTVSSASTKGPSVFPLAPSSKSTSGGTAALGCLVKDYFPEPVTVSWNSGALTSGVHTFPAVLQSSGLYSLSSVVTVPSSSLGTQTYICNVNHKPSNTKVDKKVEPKSCDKTHTCPPCPAPPVAGPSVFLFPPKPKDTLMISRTPEVTCVVVDVKHEDPEVKFNWYVDGVEVHNAKTKPREEQYNSTYRVVSVLTVLHQDWLNGKEYKCKVSNKALPAPIEKTISKAKGQPREPQVYTLPPSREEMTKNQVSLTCLVKGFYPSDIAVEWESNGQPENNYKTTPPVLDSDGSFFLYSKLTVDKSRWQQGNVFSCSVMHEALHNHYTQKSLSLSPGK

SEQ ID NO: 13016 - protein, 122 aa, Artificial Sequence; identical to SEQ ID NO: 7521
  Description of Artificial Sequence: Synthetic polypeptide
  VH of XENP018231

SEQ ID NO: 13017 - protein, 5 aa, Artificial Sequence
  Description of Artificial Sequence: Synthetic peptide
  XENP018231 vhCDR1
NYWMN

SEQ ID NO: 13018 - protein, 19 aa, Artificial Sequence
  Description of Artificial Sequence: Synthetic peptide
  XENP018231 vhCDR2
EIRLKSNNYQTHYAEPVKG

SEQ ID NO: 13019 - protein, 11 aa, Artificial Sequence
  Description of Artificial Sequence: Synthetic peptide
  XENP018231 vhCDR3
YYGNYGGYFDV

SEQ ID NO: 13020 - protein, 214 aa, Artificial Sequence; identical to SEQ ID NO: 11550
  Description of Artificial Sequence: Synthetic polypeptide
  XENP018231 1G6_H1.130_L1_IgG1_PVA_/S267K Light Chain

SEQ ID NO: 13021 - protein, 107 aa, Artificial Sequence; identical to SEQ ID NO: 6247
  Description of Artificial Sequence: Synthetic polypeptide
  VL of XENP018231

SEQ ID NO: 13022 - protein, 11 aa, Artificial Sequence
  Description of Artificial Sequence: Synthetic peptide
  XENP018231 vlCDR1
RASQSVSNDVA

SEQ ID NO: 13023 - protein, 7 aa, Artificial Sequence
  Description of Artificial Sequence: Synthetic peptide
  XENP018231 vlCDR2
YASHRYT

SEQ ID NO: 13024 - protein, 9 aa, Artificial Sequence
  Description of Artificial Sequence: Synthetic peptide
  XENP018231 vlCDR3
QQDYSSPRT

SEQ ID NO: 13025 - protein, 451 aa, Artificial Sequence
  Description of Artificial Sequence: Synthetic polypeptide
  XENP018232 1G6_H1.131_L1_IgG1_PVA_/S267K Heavy Chain
EVQLVESGGGLVKPGGSLRLSCAASGFTFSNYWMNWVRQAPGKGLEWVGEIRLKSNNYDTHYAEPVKGRFTISRDDSKSTVYLQMNSLKTEDTAVYYCTRYYGNYGGYFDVWGAGTLVTVSSASTKGPSVFPLAPSSKSTSGGTAALGCLVKDYFPEPVTVSWNSGALTSGVHTFPAVLQSSGLYSLSSVVTVPSSSLGTQTYICNVNHKPSNTKVDKKVEPKSCDKTHTCPPCPAPPVAGPSVFLFPPKPKDTLMISRTPEVTCVVVDVKHEDPEVKFNWYVDGVEVHNAKTKPREEQYNSTYRVVSVLTVLHQDWLNGKEYKCKVSNKALPAPIEKTISKAKGQPREPQVYTLPPSREEMTKNQVSLTCLVKGFYPSDIAVEWESNGQPENNYKTTPPVLDSDGSFFLYSKLTVDKSRWQQGNVFSCSVMHEALHNHYTQKSLSLSPGK

SEQ ID NO: 13026 - protein, 122 aa, Artificial Sequence; identical to SEQ ID NO: 7530
  Description of Artificial Sequence: Synthetic polypeptide
  VH of XENP018232

SEQ ID NO: 13027 - protein, 5 aa, Artificial Sequence
  Description of Artificial Sequence: Synthetic peptide
  XENP018232 vhCDR1
NYWMN

SEQ ID NO: 13028 - protein, 19 aa, Artificial Sequence
  Description of Artificial Sequence: Synthetic peptide
  XENP018232 vhCDR2
EIRLKSNNYDTHYAEPVKG

SEQ ID NO: 13029 - protein, 11 aa, Artificial Sequence
  Description of Artificial Sequence: Synthetic peptide
  XENP018232 vhCDR3
YYGNYGGYFDV

SEQ ID NO: 13030 - protein, 214 aa, Artificial Sequence; identical to SEQ ID NO: 11550
  Description of Artificial Sequence: Synthetic polypeptide
  XENP018232 1G6_H1.131_L1_IgG1_PVA_/S267K Light Chain

SEQ ID NO: 13031 - protein, 107 aa, Artificial Sequence; identical to SEQ ID NO: 6247
  Description of Artificial Sequence: Synthetic polypeptide
  VL of XENP018232

SEQ ID NO: 13032 - protein, 11 aa, Artificial Sequence
  Description of Artificial Sequence: Synthetic peptide
  XENP018232 vlCDR1
RASQSVSNDVA

SEQ ID NO: 13033 - protein, 7 aa, Artificial Sequence
  Description of Artificial Sequence: Synthetic peptide
  XENP018232 vlCDR2
YASHRYT

SEQ ID NO: 13034 - protein, 9 aa, Artificial Sequence
  Description of Artificial Sequence: Synthetic peptide
  XENP018232 vlCDR3
QQDYSSPRT

SEQ ID NO: 13035 - protein, 451 aa, Artificial Sequence
  Description of Artificial Sequence: Synthetic polypeptide
  XENP018233 1G6_H1.132_L1_IgG1_PVA_/S267K Heavy Chain
EVQLVESGGGLVKPGGSLRLSCAASGFTFSNYWMNWVRQAPGKGLEWVGEIRLKSNNYLTHYAEPVKGRFTISRDDSKSTVYLQMNSLKTEDTAVYYCTRYYGNYGGYFDVWGAGTLVTVSSASTKGPSVFPLAPSSKSTSGGTAALGCLVKDYFPEPVTVSWNSGALTSGVHTFPAVLQSSGLYSLSSVVTVPSSSLGTQTYICNVNHKPSNTKVDKKVEPKSCDKTHTCPPCPAPPVAGPSVFLFPPKPKDTLMISRTPEVTCVVVDVKHEDPEVKFNWYVDGVEVHNAKTKPREEQYNSTYRVVSVLTVLHQDWLNGKEYKCKVSNKALPAPIEKTISKAKGQPREPQVYTLPPSREEMTKNQVSLTCLVKGFYPSDIAVEWESNGQPENNYKTTPPVLDSDGSFFLYSKLTVDKSRWQQGNVFSCSVMHEALHNHYTQKSLSLSPGK

SEQ ID NO: 13036 - protein, 122 aa, Artificial Sequence; identical to SEQ ID NO: 7539
  Description of Artificial Sequence: Synthetic polypeptide
  VH of XENP018233

SEQ ID NO: 13037 - protein, 5 aa, Artificial Sequence
  Description of Artificial Sequence: Synthetic peptide
  XENP018233 vhCDR1
NYWMN

SEQ ID NO: 13038 - protein, 19 aa, Artificial Sequence
  Description of Artificial Sequence: Synthetic peptide
  XENP018233 vhCDR2
EIRLKSNNYLTHYAEPVKG

SEQ ID NO: 13039 - protein, 11 aa, Artificial Sequence
  Description of Artificial Sequence: Synthetic peptide
  XENP018233 vhCDR3
YYGNYGGYFDV

SEQ ID NO: 13040 - protein, 214 aa, Artificial Sequence; identical to SEQ ID NO: 11550
  Description of Artificial Sequence: Synthetic polypeptide
  XENP018233 1G6_H1.132_L1_IgG1_PVA_/S267K Light Chain

SEQ ID NO: 13041 - protein, 107 aa, Artificial Sequence; identical to SEQ ID NO: 6247
  Description of Artificial Sequence: Synthetic polypeptide
  VL of XENP018233

SEQ ID NO: 13042 - protein, 11 aa, Artificial Sequence
  Description of Artificial Sequence: Synthetic peptide
  XENP018233 vlCDR1
RASQSVSNDVA

SEQ ID NO: 13043 - protein, 7 aa, Artificial Sequence
  Description of Artificial Sequence: Synthetic peptide
  XENP018233 vlCDR2
YASHRYT

SEQ ID NO: 13044 - protein, 9 aa, Artificial Sequence
  Description of Artificial Sequence: Synthetic peptide
  XENP018233 vlCDR3
QQDYSSPRT

SEQ ID NO: 13045 - protein, 451 aa, Artificial Sequence
  Description of Artificial Sequence: Synthetic polypeptide
  XENP018234 1G6_H1.133_L1_IgG1_PVA_/S267K Heavy Chain
EVQLVESGGGLVKPGGSLRLSCAASGFTFSNYWMNWVRQAPGKGLEWVGEIRLKSNNYKTHYAEPVKGRFTISRDDSKSTVYLQMNSLKTEDTAVYYCTRYYGNYGGYFDVWGAGTLVTVSSASTKGPSVFPLAPSSKSTSGGTAALGCLVKDYFPEPVTVSWNSGALTSGVHTFPAVLQSSGLYSLSSVVTVPSSSLGTQTYICNVNHKPSNTKVDKKVEPKSCDKTHTCPPCPAPPVAGPSVFLFPPKPKDTLMISRTPEVTCVVVDVKHEDPEVKFNWYVDGVEVHNAKTKPREEQYNSTYRVVSVLTVLHQDWLNGKEYKCKVSNKALPAPIEKTISKAKGQPREPQVYTLPPSREEMTKNQVSLTCLVKGFYPSDIAVEWESNGQPENNYKTTPPVLDSDGSFFLYSKLTVDKSRWQQGNVFSCSVMHEALHNHYTQKSLSLSPGK

SEQ ID NO: 13046 - protein, 122 aa, Artificial Sequence; identical to SEQ ID NO: 7548
  Description of Artificial Sequence: Synthetic polypeptide
  VH of XENP018234

SEQ ID NO: 13047 - protein, 5 aa, Artificial Sequence
  Description of Artificial Sequence: Synthetic peptide
  XENP018234 vhCDR1
NYWMN

SEQ ID NO: 13048 - protein, 19 aa, Artificial Sequence
  Description of Artificial Sequence: Synthetic peptide
  XENP018234 vhCDR2
EIRLKSNNYKTHYAEPVKG

SEQ ID NO: 13049 - protein, 11 aa, Artificial Sequence
  Description of Artificial Sequence: Synthetic peptide
  XENP018234 vhCDR3
YYGNYGGYFDV

SEQ ID NO: 13050 - protein, 214 aa, Artificial Sequence; identical to SEQ ID NO: 11550
  Description of Artificial Sequence: Synthetic polypeptide
  XENP018234 1G6_H1.133_L1_IgG1_PVA_/S267K Light Chain

SEQ ID NO: 13051 - protein, 107 aa, Artificial Sequence; identical to SEQ ID NO: 6247
  Description of Artificial Sequence: Synthetic polypeptide
  VL of XENP018234

SEQ ID NO: 13052 - protein, 11 aa, Artificial Sequence
  Description of Artificial Sequence: Synthetic peptide
  XENP018234 vlCDR1
RASQSVSNDVA

SEQ ID NO: 13053 - protein, 7 aa, Artificial Sequence
  Description of Artificial Sequence: Synthetic peptide
  XENP018234 vlCDR2
YASHRYT

SEQ ID NO: 13054 - protein, 9 aa, Artificial Sequence
  Description of Artificial Sequence: Synthetic peptide
  XENP018234 vlCDR3
QQDYSSPRT

SEQ ID NO: 13055 - protein, 451 aa, Artificial Sequence
  Description of Artificial Sequence: Synthetic polypeptide
  XENP018235 1G6_H1.134_L1_IgG1_PVA_/S267K Heavy Chain
EVQLVESGGGLVKPGGSLRLSCAASGFTFSNYWMNWVRQAPGKGLEWVGEIRLKSNNYYTHYAEPVKGRFTISRDDSKSTVYLQMNSLKTEDTAVYYCTRYYGNYGGYFDVWGAGTLVTVSSASTKGPSVFPLAPSSKSTSGGTAALGCLVKDYFPEPVTVSWNSGALTSGVHTFPAVLQSSGLYSLSSVVTVPSSSLGTQTYICNVNHKPSNTKVDKKVEPKSCDKTHTCPPCPAPPVAGPSVFLFPPKPKDTLMISRTPEVTCVVVDVKHEDPEVKFNWYVDGVEVHNAKTKPREEQYNSTYRVVSVLTVLHQDWLNGKEYKCKVSNKALPAPIEKTISKAKGQPREPQVYTLPPSREEMTKNQVSLTCLVKGFYPSDIAVEWESNGQPENNYKTTPPVLDSDGSFFLYSKLTVDKSRWQQGNVFSCSVMHEALHNHYTQKSLSLSPGK

SEQ ID NO: 13056 - protein, 122 aa, Artificial Sequence; identical to SEQ ID NO: 7557
  Description of Artificial Sequence: Synthetic polypeptide
  VH of XENP018235

SEQ ID NO: 13057 - protein, 5 aa, Artificial Sequence
  Description of Artificial Sequence: Synthetic peptide
  XENP018235 vhCDR1
NYWMN

SEQ ID NO: 13058 - protein, 19 aa, Artificial Sequence
  Description of Artificial Sequence: Synthetic peptide
  XENP018235 vhCDR2
EIRLKSNNYYTHYAEPVKG

SEQ ID NO: 13059 - protein, 11 aa, Artificial Sequence
  Description of Artificial Sequence: Synthetic peptide
  XENP018235 vhCDR3
YYGNYGGYFDV

SEQ ID NO: 13060 - protein, 214 aa, Artificial Sequence; identical to SEQ ID NO: 11550
  Description of Artificial Sequence: Synthetic polypeptide
  XENP018235 1G6_H1.134_L1_IgG1_PVA_/S267K Light Chain

SEQ ID NO: 13061 - protein, 107 aa, Artificial Sequence; identical to SEQ ID NO: 6247
  Description of Artificial Sequence: Synthetic polypeptide
  VL of XENP018235

SEQ ID NO: 13062 - protein, 11 aa, Artificial Sequence
  Description of Artificial Sequence: Synthetic peptide
  XENP018235 vlCDR1
RASQSVSNDVA

SEQ ID NO: 13063 - protein, 7 aa, Artificial Sequence
  Description of Artificial Sequence: Synthetic peptide
  XENP018235 vlCDR2
YASHRYT

SEQ ID NO: 13064 - protein, 9 aa, Artificial Sequence
  Description of Artificial Sequence: Synthetic peptide
  XENP018235 vlCDR3
QQDYSSPRT

SEQ ID NO: 13065 - protein, 451 aa, Artificial Sequence
  Description of Artificial Sequence: Synthetic polypeptide
  XENP018236 1G6_H1.135_L1_IgG1_PVA_/S267K Heavy Chain
EVQLVESGGGLVKPGGSLRLSCAASGFTFSNYWMNWVRQAPGKGLEWVGEIRLKSNNYAKHYAEPVKGRFTISRDDSKSTVYLQMNSLKTEDTAVYYCTRYYGNYGGYFDVWGAGTLVTVSSASTKGPSVFPLAPSSKSTSGGTAALGCLVKDYFPEPVTVSWNSGALTSGVHTFPAVLQSSGLYSLSSVVTVPSSSLGTQTYICNVNHKPSNTKVDKKVEPKSCDKTHTCPPCPAPPVAGPSVFLFPPKPKDTLMISRTPEVTCVVVDVKHEDPEVKFNWYVDGVEVHNAKTKPREEQYNSTYRVVSVLTVLHQDWLNGKEYKCKVSNKALPAPIEKTISKAKGQPREPQVYTLPPSREEMTKNQVSLTCLVKGFYPSDIAVEWESNGQPENNYKTTPPVLDSDGSFFLYSKLTVDKSRWQQGNVFSCSVMHEALHNHYTQKSLSLSPGK

SEQ ID NO: 13066 - protein, 122 aa, Artificial Sequence; identical to SEQ ID NO: 7566
  Description of Artificial Sequence: Synthetic polypeptide
  VH of XENP018236

SEQ ID NO: 13067 - protein, 5 aa, Artificial Sequence
  Description of Artificial Sequence: Synthetic peptide
  XENP018236 vhCDR1
NYWMN

SEQ ID NO: 13068 - protein, 19 aa, Artificial Sequence
  Description of Artificial Sequence: Synthetic peptide
  XENP018236 vhCDR2
EIRLKSNNYAKHYAEPVKG

SEQ ID NO: 13069 - protein, 11 aa, Artificial Sequence
  Description of Artificial Sequence: Synthetic peptide
  XENP018236 vhCDR3
YYGNYGGYFDV

SEQ ID NO: 13070 - protein, 214 aa, Artificial Sequence; identical to SEQ ID NO: 11550
  Description of Artificial Sequence: Synthetic polypeptide
  XENP018236 1G6_H1.135_L1_IgG1_PVA_/S267K Light Chain

SEQ ID NO: 13071 - protein, 107 aa, Artificial Sequence; identical to SEQ ID NO: 6247
  Description of Artificial Sequence: Synthetic polypeptide
  VL of XENP018236

SEQ ID NO: 13072 - protein, 11 aa, Artificial Sequence
  Description of Artificial Sequence: Synthetic peptide
  XENP018236 vlCDR1
RASQSVSNDVA

SEQ ID NO: 13073 - protein, 7 aa, Artificial Sequence
  Description of Artificial Sequence: Synthetic peptide
  XENP018236 vlCDR2
YASHRYT

SEQ ID NO: 13074 - protein, 9 aa, Artificial Sequence
  Description of Artificial Sequence: Synthetic peptide
  XENP018236 vlCDR3
QQDYSSPRT

SEQ ID NO: 13075 - protein, 451 aa, Artificial Sequence
  Description of Artificial Sequence: Synthetic polypeptide
  XENP018237 1G6_H1.136_L1_IgG1_PVA_/S267K Heavy Chain
EVQLVESGGGLVKPGGSLRLSCAASGFTFSNYWMNWVRQAPGKGLEWVGEIRLKSNNYAIHYAEPVKGRFTISRDDSKSTVYLQMNSLKTEDTAVYYCTRYYGNYGGYFDVWGAGTLVTVSSASTKGPSVFPLAPSSKSTSGGTAALGCLVKDYFPEPVTVSWNSGALTSGVHTFPAVLQSSGLYSLSSVVTVPSSSLGTQTYICNVNHKPSNTKVDKKVEPKSCDKTHTCPPCPAPPVAGPSVFLFPPKPKDTLMISRTPEVTCVVVDVKHEDPEVKFNWYVDGVEVHNAKTKPREEQYNSTYRVVSVLTVLHQDWLNGKEYKCKVSNKALPAPIEKTISKAKGQPREPQVYTLPPSREEMTKNQVSLTCLVKGFYPSDIAVEWESNGQPENNYKTTPPVLDSDGSFFLYSKLTVDKSRWQQGNVFSCSVMHEALHNHYTQKSLSLSPGK

SEQ ID NO: 13076 - protein, 122 aa, Artificial Sequence; identical to SEQ ID NO: 7575
  Description of Artificial Sequence: Synthetic polypeptide
  VH of XENP018237

SEQ ID NO: 13077 - protein, 5 aa, Artificial Sequence
  Description of Artificial Sequence: Synthetic peptide
  XENP018237 vhCDR1
NYWMN

SEQ ID NO: 13078 - protein, 19 aa, Artificial Sequence
  Description of Artificial Sequence: Synthetic peptide
  XENP018237 vhCDR2
EIRLKSNNYAIHYAEPVKG

SEQ ID NO: 13079 - protein, 11 aa, Artificial Sequence
  Description of Artificial Sequence: Synthetic peptide
  XENP018237 vhCDR3
YYGNYGGYFDV

SEQ ID NO: 13080 - protein, 214 aa, Artificial Sequence; identical to SEQ ID NO: 11550
  Description of Artificial Sequence: Synthetic polypeptide
  XENP018237 1G6_H1.136_L1_IgG1_PVA_/S267K Light Chain

SEQ ID NO: 13081 - protein, 107 aa, Artificial Sequence; identical to SEQ ID NO: 6247
  Description of Artificial Sequence: Synthetic polypeptide
  VL of XENP018237

SEQ ID NO: 13082 - protein, 11 aa, Artificial Sequence
  Description of Artificial Sequence: Synthetic peptide
  XENP018237 vlCDR1
RASQSVSNDVA

SEQ ID NO: 13083 - protein, 7 aa, Artificial Sequence
  Description of Artificial Sequence: Synthetic peptide
  XENP018237 vlCDR2
YASHRYT

SEQ ID NO: 13084 - protein, 9 aa, Artificial Sequence
  Description of Artificial Sequence: Synthetic peptide
  XENP018237 vlCDR3
QQDYSSPRT

SEQ ID NO: 13085 - protein, 451 aa, Artificial Sequence
  Description of Artificial Sequence: Synthetic polypeptide
  XENP018238 1G6_H1.137_L1_IgG1_PVA_/S267K Heavy Chain
EVQLVESGGGLVKPGGSLRLSCAASGFTFSNYWMNWVRQAPGKGLEWVGEIRLKSNNYATYYAEPVKGRFTISRDDSKSTVYLQMNSLKTEDTAVYYCTRYYGNYGGYFDVWGAGTLVTVSSASTKGPSVFPLAPSSKSTSGGTAALGCLVKDYFPEPVTVSWNSGALTSGVHTFPAVLQSSGLYSLSSVVTVPSSSLGTQTYICNVNHKPSNTKVDKKVEPKSCDKTHTCPPCPAPPVAGPSVFLFPPKPKDTLMISRTPEVTCVVVDVKHEDPEVKFNWYVDGVEVHNAKTKPREEQYNSTYRVVSVLTVLHQDWLNGKEYKCKVSNKALPAPIEKTISKAKGQPREPQVYTLPPSREEMTKNQVSLTCLVKGFYPSDIAVEWESNGQPENNYKTTPPVLDSDGSFFLYSKLTVDKSRWQQGNVFSCSVMHEALHNHYTQKSLSLSPGK

SEQ ID NO: 13086 - protein, 122 aa, Artificial Sequence; identical to SEQ ID NO: 7584
  Description of Artificial Sequence: Synthetic polypeptide
  VH of XENP018238

SEQ ID NO: 13087 - protein, 5 aa, Artificial Sequence
  Description of Artificial Sequence: Synthetic peptide
  XENP018238 vhCDR1
NYWMN

SEQ ID NO: 13088 - protein, 19 aa, Artificial Sequence
  Description of Artificial Sequence: Synthetic peptide
  XENP018238 vhCDR2
EIRLKSNNYATYYAEPVKG

SEQ ID NO: 13089 - protein, 11 aa, Artificial Sequence
  Description of Artificial Sequence: Synthetic peptide
  XENP018238 vhCDR3
YYGNYGGYFDV

SEQ ID NO: 13090 - protein, 214 aa, Artificial Sequence; identical to SEQ ID NO: 11550
  Description of Artificial Sequence: Synthetic polypeptide
  XENP018238 1G6_H1.137_L1_IgG1_PVA_/S267K Light Chain

SEQ ID NO: 13091 - protein, 107 aa, Artificial Sequence; identical to SEQ ID NO: 6247
  Description of Artificial Sequence: Synthetic polypeptide
  VL of XENP018238

SEQ ID NO: 13092 - protein, 11 aa, Artificial Sequence
  Description of Artificial Sequence: Synthetic peptide
  XENP018238 vlCDR1
RASQSVSNDVA

SEQ ID NO: 13093 - protein, 7 aa, Artificial Sequence
  Description of Artificial Sequence: Synthetic peptide
  XENP018238 vlCDR2
YASHRYT

SEQ ID NO: 13094 - protein, 9 aa, Artificial Sequence
  Description of Artificial Sequence: Synthetic peptide
  XENP018238 vlCDR3
QQDYSSPRT

SEQ ID NO: 13095 - protein, 451 aa, Artificial Sequence
  Description of Artificial Sequence: Synthetic polypeptide
  XENP018239 1G6_H1.138_L1_IgG1_PVA_/S267K Heavy Chain
EVQLVESGGGLVKPGGSLRLSCAASGFTFSNYWMNWVRQAPGKGLEWVGEIRLKSNNYATQYAEPVKGRFTISRDDSKSTVYLQMNSLKTEDTAVYYCTRYYGNYGGYFDVWGAGTLVTVSSASTKGPSVFPLAPSSKSTSGGTAALGCLVKDYFPEPVTVSWNSGALTSGVHTFPAVLQSSGLYSLSSVVTVPSSSLGTQTYICNVNHKPSNTKVDKKVEPKSCDKTHTCPPCPAPPVAGPSVFLFPPKPKDTLMISRTPEVTCVVVDVKHEDPEVKFNWYVDGVEVHNAKTKPREEQYNSTYRVVSVLTVLHQDWLNGKEYKCKVSNKALPAPIEKTISKAKGQPREPQVYTLPPSREEMTKNQVSLTCLVKGFYPSDIAVEWESNGQPENNYKTTPPVLDSDGSFFLYSKLTVDKSRWQQGNVFSCSVMHEALHNHYTQKSLSLSPGK

SEQ ID NO: 13096 - protein, 122 aa, Artificial Sequence; identical to SEQ ID NO: 7593
  Description of Artificial Sequence: Synthetic polypeptide
  VH of XENP018239

SEQ ID NO: 13097 - protein, 5 aa, Artificial Sequence
  Description of Artificial Sequence: Synthetic peptide
  XENP018239 vhCDR1
NYWMN

SEQ ID NO: 13098 - protein, 19 aa, Artificial Sequence
  Description of Artificial Sequence: Synthetic peptide
  XENP018239 vhCDR2
EIRLKSNNYATQYAEPVKG

SEQ ID NO: 13099 - protein, 11 aa, Artificial Sequence
  Description of Artificial Sequence: Synthetic peptide
  XENP018239 vhCDR3
YYGNYGGYFDV

SEQ ID NO: 13100 - protein, 214 aa, Artificial Sequence; identical to SEQ ID NO: 11550
  Description of Artificial Sequence: Synthetic polypeptide
  XENP018239 1G6_H1.138_L1_IgG1_PVA_/S267K Light Chain

SEQ ID NO: 13101 - protein, 107 aa, Artificial Sequence; identical to SEQ ID NO: 6247
  Description of Artificial Sequence: Synthetic polypeptide
  VL of XENP018239

SEQ ID NO: 13102 - protein, 11 aa, Artificial Sequence
  Description of Artificial Sequence: Synthetic peptide
  XENP018239 vlCDR1
RASQSVSNDVA

SEQ ID NO: 13103 - protein, 7 aa, Artificial Sequence
  Description of Artificial Sequence: Synthetic peptide
  XENP018239 vlCDR2
YASHRYT

SEQ ID NO: 13104 - protein, 9 aa, Artificial Sequence
  Description of Artificial Sequence: Synthetic peptide
  XENP018239 vlCDR3
QQDYSSPRT

SEQ ID NO: 13105 - protein, 451 aa, Artificial Sequence
  Description of Artificial Sequence: Synthetic polypeptide
  XENP018240 1G6_H1.139_L1_IgG1_PVA_/S267K Heavy Chain
EVQLVESGGGLVKPGGSLRLSCAASGFTFSNYWMNWVRQAPGKGLEWVGEIRLKSNNYATDYAEPVKGRFTISRDDSKSTVYLQMNSLKTEDTAVYYCTRYYGNYGGYFDVWGAGTLVTVSSASTKGPSVFPLAPSSKSTSGGTAALGCLVKDYFPEPVTVSWNSGALTSGVHTFPAVLQSSGLYSLSSVVTVPSSSLGTQTYICNVNHKPSNTKVDKKVEPKSCDKTHTCPPCPAPPVAGPSVFLFPPKPKDTLMISRTPEVTCVVVDVKHEDPEVKFNWYVDGVEVHNAKTKPREEQYNSTYRVVSVLTVLHQDWLNGKEYKCKVSNKALPAPIEKTISKAKGQPREPQVYTLPPSREEMTKNQVSLTCLVKGFYPSDIAVEWESNGQPENNYKTTPPVLDSDGSFFLYSKLTVDKSRWQQGNVFSCSVMHEALHNHYTQKSLSLSPGK

SEQ ID NO: 13106 - protein, 122 aa, Artificial Sequence; identical to SEQ ID NO: 7602
  Description of Artificial Sequence: Synthetic polypeptide
  VH of XENP018240

SEQ ID NO: 13107 - protein, 5 aa, Artificial Sequence
  Description of Artificial Sequence: Synthetic peptide
  XENP018240 vhCDR1
NYWMN

SEQ ID NO: 13108 - protein, 19 aa, Artificial Sequence
  Description of Artificial Sequence: Synthetic peptide
  XENP018240 vhCDR2
EIRLKSNNYATDYAEPVKG

SEQ ID NO: 13109 - protein, 11 aa, Artificial Sequence
  Description of Artificial Sequence: Synthetic peptide
  XENP018240 vhCDR3
YYGNYGGYFDV

SEQ ID NO: 13110 - protein, 214 aa, Artificial Sequence; identical to SEQ ID NO: 11550
  Description of Artificial Sequence: Synthetic polypeptide
  XENP018240 1G6_H1.139_L1_IgG1_PVA_/S267K Light Chain

SEQ ID NO: 13111 - protein, 107 aa, Artificial Sequence; identical to SEQ ID NO: 6247
  Description of Artificial Sequence: Synthetic polypeptide
  VL of XENP018240

SEQ ID NO: 13112 - protein, 11 aa, Artificial Sequence
  Description of Artificial Sequence: Synthetic peptide
  XENP018240 vlCDR1
RASQSVSNDVA

SEQ ID NO: 13113 - protein, 7 aa, Artificial Sequence
  Description of Artificial Sequence: Synthetic peptide
  XENP018240 vlCDR2
YASHRYT

SEQ ID NO: 13114 - protein, 9 aa, Artificial Sequence
  Description of Artificial Sequence: Synthetic peptide
  XENP018240 vlCDR3
QQDYSSPRT

SEQ ID NO: 13115 - protein, 451 aa, Artificial Sequence
  Description of Artificial Sequence: Synthetic polypeptide
  XENP018241 1G6_H1.140_L1_IgG1_PVA_/S267K Heavy Chain
EVQLVESGGGLVKPGGSLRLSCAASGFTFSNYWMNWVRQAPGKGLEWVGEIRLKSNNYATFYAEPVKGRFTISRDDSKSTVYLQMNSLKTEDTAVYYCTRYYGNYGGYFDVWGAGTLVTVSSASTKGPSVFPLAPSSKSTSGGTAALGCLVKDYFPEPVTVSWNSGALTSGVHTFPAVLQSSGLYSLSSVVTVPSSSLGTQTYICNVNHKPSNTKVDKKVEPKSCDKTHTCPPCPAPPVAGPSVFLFPPKPKDTLMISRTPEVTCVVVDVKHEDPEVKFNWYVDGVEVHNAKTKPREEQYNSTYRVVSVLTVLHQDWLNGKEYKCKVSNKALPAPIEKTISKAKGQPREPQVYTLPPSREEMTKNQVSLTCLVKGFYPSDIAVEWESNGQPENNYKTTPPVLDSDGSFFLYSKLTVDKSRWQQGNVFSCSVMHEALHNHYTQKSLSLSPGK

SEQ ID NO: 13116 - protein, 122 aa, Artificial Sequence; identical to SEQ ID NO: 7611
  Description of Artificial Sequence: Synthetic polypeptide
  VH of XENP018241

SEQ ID NO: 13117 - protein, 5 aa, Artificial Sequence
  Description of Artificial Sequence: Synthetic peptide
  XENP018241 vhCDR1
NYWMN

SEQ ID NO: 13118 - protein, 19 aa, Artificial Sequence
  Description of Artificial Sequence: Synthetic peptide
  XENP018241 vhCDR2
EIRLKSNNYATFYAEPVKG

SEQ ID NO: 13119 - protein, 11 aa, Artificial Sequence
  Description of Artificial Sequence: Synthetic peptide
  XENP018241 vhCDR3
YYGNYGGYFDV

SEQ ID NO: 13120 - protein, 214 aa, Artificial Sequence; identical to SEQ ID NO: 11550
  Description of Artificial Sequence: Synthetic polypeptide
  XENP018241 1G6_H1.140_L1_IgG1_PVA_/S267K Light Chain

SEQ ID NO: 13121 - protein, 107 aa, Artificial Sequence; identical to SEQ ID NO: 6247
  Description of Artificial Sequence: Synthetic polypeptide
  VL of XENP018241

SEQ ID NO: 13122 - protein, 11 aa, Artificial Sequence
  Description of Artificial Sequence: Synthetic peptide
  XENP018241 vlCDR1
RASQSVSNDVA

SEQ ID NO: 13123 - protein, 7 aa, Artificial Sequence
  Description of Artificial Sequence: Synthetic peptide
  XENP018241 vlCDR2
YASHRYT

SEQ ID NO: 13124 - protein, 9 aa, Artificial Sequence
  Description of Artificial Sequence: Synthetic peptide
  XENP018241 vlCDR3
QQDYSSPRT

SEQ ID NO: 13125 - protein, 451 aa, Artificial Sequence
  Description of Artificial Sequence: Synthetic polypeptide
  XENP018242 1G6_H1.141_L1_IgG1_PVA_/S267K Heavy Chain
EVQLVESGGGLVKPGGSLRLSCAASGFTFSNYWMNWVRQAPGKGLEWVGEIRLKSNNYATAYAEPVKGRFTISRDDSKSTVYLQMNSLKTEDTAVYYCTRYYGNYGGYFDVWGAGTLVTVSSASTKGPSVFPLAPSSKSTSGGTAALGCLVKDYFPEPVTVSWNSGALTSGVHTFPAVLQSSGLYSLSSVVTVPSSSLGTQTYICNVNHKPSNTKVDKKVEPKSCDKTHTCPPCPAPPVAGPSVFLFPPKPKDTLMISRTPEVTCVVVDVKHEDPEVKFNWYVDGVEVHNAKTKPREEQYNSTYRVVSVLTVLHQDWLNGKEYKCKVSNKALPAPIEKTISKAKGQPREPQVYTLPPSREEMTKNQVSLTCLVKGFYPSDIAVEWESNGQPENNYKTTPPVLDSDGSFFLYSKLTVDKSRWQQGNVFSCSVMHEALHNHYTQKSLSLSPGK

SEQ ID NO: 13126 - protein, 122 aa, Artificial Sequence; identical to SEQ ID NO: 7620
  Description of Artificial Sequence: Synthetic polypeptide
  VH of XENP018242

SEQ ID NO: 13127 - protein, 5 aa, Artificial Sequence
  Description of Artificial Sequence: Synthetic peptide
  XENP018242 vhCDR1
NYWMN

SEQ ID NO: 13128 - protein, 19 aa, Artificial Sequence
  Description of Artificial Sequence: Synthetic peptide
  XENP018242 vhCDR2
EIRLKSNNYATAYAEPVKG

SEQ ID NO: 13129 - protein, 11 aa, Artificial Sequence
  Description of Artificial Sequence: Synthetic peptide
  XENP018242 vhCDR3
YYGNYGGYFDV

SEQ ID NO: 13130 - protein, 214 aa, Artificial Sequence; identical to SEQ ID NO: 11550
  Description of Artificial Sequence: Synthetic polypeptide
  XENP018242 1G6_H1.141_L1_IgG1_PVA_/S267K Light Chain

SEQ ID NO: 13131 - protein, 107 aa, Artificial Sequence; identical to SEQ ID NO: 6247
  Description of Artificial Sequence: Synthetic polypeptide
  VL of XENP018242

SEQ ID NO: 13132 - protein, 11 aa, Artificial Sequence
  Description of Artificial Sequence: Synthetic peptide
  XENP018242 vlCDR1
RASQSVSNDVA

SEQ ID NO: 13133 - protein, 7 aa, Artificial Sequence
  Description of Artificial Sequence: Synthetic peptide
  XENP018242 vlCDR2
YASHRYT

SEQ ID NO: 13134 - protein, 9 aa, Artificial Sequence
  Description of Artificial Sequence: Synthetic peptide
  XENP018242 vlCDR3
QQDYSSPRT

SEQ ID NO: 13135 - protein, 451 aa, Artificial Sequence
  Description of Artificial Sequence: Synthetic polypeptide
  XENP018243 1G6_H1.142_L1_IgG1_PVA_/S267K Heavy Chain
EVQLVESGGGLVKPGGSLRLSCAASGFTFSNYWMNWVRQAPGKGLEWVGEIRLKSNNYATTYAEPVKGRFTISRDDSKSTVYLQMNSLKTEDTAVYYCTRYYGNYGGYFDVWGAGTLVTVSSASTKGPSVFPLAPSSKSTSGGTAALGCLVKDYFPEPVTVSWNSGALTSGVHTFPAVLQSSGLYSLSSVVTVPSSSLGTQTYICNVNHKPSNTKVDKKVEPKSCDKTHTCPPCPAPPVAGPSVFLFPPKPKDTLMISRTPEVTCVVVDVKHEDPEVKFNWYVDGVEVHNAKTKPREEQYNSTYRVVSVLTVLHQDWLNGKEYKCKVSNKALPAPIEKTISKAKGQPREPQVYTLPPSREEMTKNQVSLTCLVKGFYPSDIAVEWESNGQPENNYKTTPPVLDSDGSFFLYSKLTVDKSRWQQGNVFSCSVMHEALHNHYTQKSLSLSPGK

SEQ ID NO: 13136 - protein, 122 aa, Artificial Sequence; identical to SEQ ID NO: 7629
  Description of Artificial Sequence: Synthetic polypeptide
  VH of XENP018243

SEQ ID NO: 13137 - protein, 5 aa, Artificial Sequence
  Description of Artificial Sequence: Synthetic peptide
  XENP018243 vhCDR1
NYWMN

SEQ ID NO: 13138 - protein, 19 aa, Artificial Sequence
  Description of Artificial Sequence: Synthetic peptide
  XENP018243 vhCDR2
EIRLKSNNYATTYAEPVKG

SEQ ID NO: 13139 - protein, 11 aa, Artificial Sequence
  Description of Artificial Sequence: Synthetic peptide
  XENP018243 vhCDR3
YYGNYGGYFDV

SEQ ID NO: 13140 - protein, 214 aa, Artificial Sequence; identical to SEQ ID NO: 11550
  Description of Artificial Sequence: Synthetic polypeptide
  XENP018243 1G6_H1.142_L1_IgG1_PVA_/S267K Light Chain

SEQ ID NO: 13141 - protein, 107 aa, Artificial Sequence; identical to SEQ ID NO: 6247
  Description of Artificial Sequence: Synthetic polypeptide
  VL of XENP018243

SEQ ID NO: 13142 - protein, 11 aa, Artificial Sequence
  Description of Artificial Sequence: Synthetic peptide
  XENP018243 vlCDR1
RASQSVSNDVA

SEQ ID NO: 13143 - protein, 7 aa, Artificial Sequence
  Description of Artificial Sequence: Synthetic peptide
  XENP018243 vlCDR2
YASHRYT

SEQ ID NO: 13144 - protein, 9 aa, Artificial Sequence
  Description of Artificial Sequence: Synthetic peptide
  XENP018243 vlCDR3
QQDYSSPRT

SEQ ID NO: 13145 - protein, 451 aa, Artificial Sequence
  Description of Artificial Sequence: Synthetic polypeptide
  XENP018244 1G6_H1.143_L1_IgG1_PVA_/S267K Heavy Chain
EVQLVESGGGLVKPGGSLRLSCAASGFTFSNYWMNWVRQAPGKGLEWVGEIRLKSNNYATKYAEPVKGRFTISRDDSKSTVYLQMNSLKTEDTAVYYCTRYYGNYGGYFDVWGAGTLVTVSSASTKGPSVFPLAPSSKSTSGGTAALGCLVKDYFPEPVTVSWNSGALTSGVHTFPAVLQSSGLYSLSSVVTVPSSSLGTQTYICNVNHKPSNTKVDKKVEPKSCDKTHTCPPCPAPPVAGPSVFLFPPKPKDTLMISRTPEVTCVVVDVKHEDPEVKFNWYVDGVEVHNAKTKPREEQYNSTYRVVSVLTVLHQDWLNGKEYKCKVSNKALPAPIEKTISKAKGQPREPQVYTLPPSREEMTKNQVSLTCLVKGFYPSDIAVEWESNGQPENNYKTTPPVLDSDGSFFLYSKLTVDKSRWQQGNVFSCSVMHEALHNHYTQKSLSLSPGK

SEQ ID NO: 13146 - protein, 122 aa, Artificial Sequence; identical to SEQ ID NO: 7638
  Description of Artificial Sequence: Synthetic polypeptide
  VH of XENP018244

SEQ ID NO: 13147 - protein, 5 aa, Artificial Sequence
  Description of Artificial Sequence: Synthetic peptide
  XENP018244 vhCDR1
NYWMN

SEQ ID NO: 13148 - protein, 19 aa, Artificial Sequence
  Description of Artificial Sequence: Synthetic peptide
  XENP018244 vhCDR2
EIRLKSNNYATKYAEPVKG

SEQ ID NO: 13149 - protein, 11 aa, Artificial Sequence
  Description of Artificial Sequence: Synthetic peptide
  XENP018244 vhCDR3
YYGNYGGYFDV

SEQ ID NO: 13150 - protein, 214 aa, Artificial Sequence; identical to SEQ ID NO: 11550
  Description of Artificial Sequence: Synthetic polypeptide
  XENP018244 1G6_H1.143_L1_IgG1_PVA_/S267K Light Chain

SEQ ID NO: 13151 - protein, 107 aa, Artificial Sequence; identical to SEQ ID NO: 6247
  Description of Artificial Sequence: Synthetic polypeptide
  VL of XENP018244

SEQ ID NO: 13152 - protein, 11 aa, Artificial Sequence
  Description of Artificial Sequence: Synthetic peptide
  XENP018244 vlCDR1
RASQSVSNDVA

SEQ ID NO: 13153 - protein, 7 aa, Artificial Sequence
  Description of Artificial Sequence: Synthetic peptide
  XENP018244 vlCDR2
YASHRYT

SEQ ID NO: 13154 - protein, 9 aa, Artificial Sequence
  Description of Artificial Sequence: Synthetic peptide
  XENP018244 vlCDR3
QQDYSSPRT

SEQ ID NO: 13155 - protein, 451 aa, Artificial Sequence
  Description of Artificial Sequence: Synthetic polypeptide
  XENP018245 1G6_H1.144_L1_IgG1_PVA_/S267K Heavy Chain
EVQLVESGGGLVKPGGSLRLSCAASGFTFSNYWMNWVRQAPGKGLEWVGEIRLKSNNYATGYAEPVKGRFTISRDDSKSTVYLQMNSLKTEDTAVYYCTRYYGNYGGYFDVWGAGTLVTVSSASTKGPSVFPLAPSSKSTSGGTAALGCLVKDYFPEPVTVSWNSGALTSGVHTFPAVLQSSGLYSLSSVVTVPSSSLGTQTYICNVNHKPSNTKVDKKVEPKSCDKTHTCPPCPAPPVAGPSVFLFPPKPKDTLMISRTPEVTCVVVDVKHEDPEVKFNWYVDGVEVHNAKTKPREEQYNSTYRVVSVLTVLHQDWLNGKEYKCKVSNKALPAPIEKTISKAKGQPREPQVYTLPPSREEMTKNQVSLTCLVKGFYPSDIAVEWESNGQPENNYKTTPPVLDSDGSFFLYSKLTVDKSRWQQGNVFSCSVMHEALHNHYTQKSLSLSPGK

SEQ ID NO: 13156 - protein, 122 aa, Artificial Sequence; identical to SEQ ID NO: 7647
  Description of Artificial Sequence: Synthetic polypeptide
  VH of XENP018245

SEQ ID NO: 13157 - protein, 5 aa, Artificial Sequence
  Description of Artificial Sequence: Synthetic peptide
  XENP018245 vhCDR1
NYWMN

SEQ ID NO: 13158 - protein, 19 aa, Artificial Sequence
  Description of Artificial Sequence: Synthetic peptide
  XENP018245 vhCDR2
EIRLKSNNYATGYAEPVKG

SEQ ID NO: 13159 - protein, 11 aa, Artificial Sequence
  Description of Artificial Sequence: Synthetic peptide
  XENP018245 vhCDR3
YYGNYGGYFDV

SEQ ID NO: 13160 - protein, 214 aa, Artificial Sequence; identical to SEQ ID NO: 11550
  Description of Artificial Sequence: Synthetic polypeptide
  XENP018245 1G6_H1.144_L1_IgG1_PVA_/S267K Light Chain

SEQ ID NO: 13161 - protein, 107 aa, Artificial Sequence; identical to SEQ ID NO: 6247
  Description of Artificial Sequence: Synthetic polypeptide
  VL of XENP018245

SEQ ID NO: 13162 - protein, 11 aa, Artificial Sequence
  Description of Artificial Sequence: Synthetic peptide
  XENP018245 vlCDR1
RASQSVSNDVA

SEQ ID NO: 13163 - protein, 7 aa, Artificial Sequence
  Description of Artificial Sequence: Synthetic peptide
  XENP018245 vlCDR2
YASHRYT

SEQ ID NO: 13164 - protein, 9 aa, Artificial Sequence
  Description of Artificial Sequence: Synthetic peptide
  XENP018245 vlCDR3
QQDYSSPRT

SEQ ID NO: 13165 - protein, 451 aa, Artificial Sequence
  Description of Artificial Sequence: Synthetic polypeptide
  XENP018246 1G6_H1.145_L1_IgG1_PVA_/S267K Heavy Chain
EVQLVESGGGLVKPGGSLRLSCAASGFTFSNYWMNWVRQAPGKGLEWVGEIRLKSNNYATLYAEPVKGRFTISRDDSKSTVYLQMNSLKTEDTAVYYCTRYYGNYGGYFDVWGAGTLVTVSSASTKGPSVFPLAPSSKSTSGGTAALGCLVKDYFPEPVTVSWNSGALTSGVHTFPAVLQSSGLYSLSSVVTVPSSSLGTQTYICNVNHKPSNTKVDKKVEPKSCDKTHTCPPCPAPPVAGPSVFLFPPKPKDTLMISRTPEVTCVVVDVKHEDPEVKFNWYVDGVEVHNAKTKPREEQYNSTYRVVSVLTVLHQDWLNGKEYKCKVSNKALPAPIEKTISKAKGQPREPQVYTLPPSREEMTKNQVSLTCLVKGFYPSDIAVEWESNGQPENNYKTTPPVLDSDGSFFLYSKLTVDKSRWQQGNVFSCSVMHEALHNHYTQKSLSLSPGK

SEQ ID NO: 13166 - protein, 122 aa, Artificial Sequence; identical to SEQ ID NO: 7656
  Description of Artificial Sequence: Synthetic polypeptide
  VH of XENP018246

SEQ ID NO: 13167 - protein, 5 aa, Artificial Sequence
  Description of Artificial Sequence: Synthetic peptide
  XENP018246 vhCDR1
NYWMN

SEQ ID NO: 13168 - protein, 19 aa, Artificial Sequence
  Description of Artificial Sequence: Synthetic peptide
  XENP018246 vhCDR2
EIRLKSNNYATLYAEPVKG

SEQ ID NO: 13169 - protein, 11 aa, Artificial Sequence
  Description of Artificial Sequence: Synthetic peptide
  XENP018246 vhCDR3
YYGNYGGYFDV

SEQ ID NO: 13170 - protein, 214 aa, Artificial Sequence; identical to SEQ ID NO: 11550
  Description of Artificial Sequence: Synthetic polypeptide
  XENP018246 1G6_H1.145_L1_IgG1_PVA_/S267K Light Chain

SEQ ID NO: 13171 - protein, 107 aa, Artificial Sequence; identical to SEQ ID NO: 6247
  Description of Artificial Sequence: Synthetic polypeptide
  VL of XENP018246

SEQ ID NO: 13172 - protein, 11 aa, Artificial Sequence
  Description of Artificial Sequence: Synthetic peptide
  XENP018246 vlCDR1
RASQSVSNDVA

SEQ ID NO: 13173 - protein, 7 aa, Artificial Sequence
  Description of Artificial Sequence: Synthetic peptide
  XENP018246 vlCDR2
YASHRYT

SEQ ID NO: 13174 - protein, 9 aa, Artificial Sequence
  Description of Artificial Sequence: Synthetic peptide
  XENP018246 vlCDR3
QQDYSSPRT

SEQ ID NO: 13175 - protein, 451 aa, Artificial Sequence
  Description of Artificial Sequence: Synthetic polypeptide
  XENP018247 1G6_H1.146_L1_IgG1_PVA_/S267K Heavy Chain
EVQLVESGGGLVKPGGSLRLSCAASGFTFSNYWMNWVRQAPGKGLEWVGEIRLKSNNYATHYPEPVKGRFTISRDDSKSTVYLQMNSLKTEDTAVYYCTRYYGNYGGYFDVWGAGTLVTVSSASTKGPSVFPLAPSSKSTSGGTAALGCLVKDYFPEPVTVSWNSGALTSGVHTFPAVLQSSGLYSLSSVVTVPSSSLGTQTYICNVNHKPSNTKVDKKVEPKSCDKTHTCPPCPAPPVAGPSVFLFPPKPKDTLMISRTPEVTCVVVDVKHEDPEVKFNWYVDGVEVHNAKTKPREEQYNSTYRVVSVLTVLHQDWLNGKEYKCKVSNKALPAPIEKTISKAKGQPREPQVYTLPPSREEMTKNQVSLTCLVKGFYPSDIAVEWESNGQPENNYKTTPPVLDSDGSFFLYSKLTVDKSRWQQGNVFSCSVMHEALHNHYTQKSLSLSPGK

SEQ ID NO: 13176 - protein, 122 aa, Artificial Sequence; identical to SEQ ID NO: 7665
  Description of Artificial Sequence: Synthetic polypeptide
  VH of XENP018247

SEQ ID NO: 13177 - protein, 5 aa, Artificial Sequence
  Description of Artificial Sequence: Synthetic peptide
  XENP018247 vhCDR1
NYWMN

SEQ ID NO: 13178 - protein, 19 aa, Artificial Sequence
  Description of Artificial Sequence: Synthetic peptide
  XENP018247 vhCDR2
EIRLKSNNYATHYPEPVKG

SEQ ID NO: 13179 - protein, 11 aa, Artificial Sequence
  Description of Artificial Sequence: Synthetic peptide
  XENP018247 vhCDR3
YYGNYGGYFDV

SEQ ID NO: 13180 - protein, 214 aa, Artificial Sequence; identical to SEQ ID NO: 11550
  Description of Artificial Sequence: Synthetic polypeptide
  XENP018247 1G6_H1.146_L1_IgG1_PVA_/S267K Light Chain

SEQ ID NO: 13181 - protein, 107 aa, Artificial Sequence; identical to SEQ ID NO: 6247
  Description of Artificial Sequence: Synthetic polypeptide
  VL of XENP018247

SEQ ID NO: 13182 - protein, 11 aa, Artificial Sequence
  Description of Artificial Sequence: Synthetic peptide
  XENP018247 vlCDR1
RASQSVSNDVA

SEQ ID NO: 13183 - protein, 7 aa, Artificial Sequence
  Description of Artificial Sequence: Synthetic peptide
  XENP018247 vlCDR2
YASHRYT

SEQ ID NO: 13184 - protein, 9 aa, Artificial Sequence
  Description of Artificial Sequence: Synthetic peptide
  XENP018247 vlCDR3
QQDYSSPRT

SEQ ID NO: 13185 - protein, 451 aa, Artificial Sequence
  Description of Artificial Sequence: Synthetic polypeptide
  XENP018248 1G6_H1.147_L1_IgG1_PVA_/S267K Heavy Chain
EVQLVESGGGLVKPGGSLRLSCAASGFTFSNYWMNWVRQAPGKGLEWVGEIRLKSNNYATHYVEPVKGRFTISRDDSKSTVYLQMNSLKTEDTAVYYCTRYYGNYGGYFDVWGAGTLVTVSSASTKGPSVFPLAPSSKSTSGGTAALGCLVKDYFPEPVTVSWNSGALTSGVHTFPAVLQSSGLYSLSSVVTVPSSSLGTQTYICNVNHKPSNTKVDKKVEPKSCDKTHTCPPCPAPPVAGPSVFLFPPKPKDTLMISRTPEVTCVVVDVKHEDPEVKFNWYVDGVEVHNAKTKPREEQYNSTYRVVSVLTVLHQDWLNGKEYKCKVSNKALPAPIEKTISKAKGQPREPQVYTLPPSREEMTKNQVSLTCLVKGFYPSDIAVEWESNGQPENNYKTTPPVLDSDGSFFLYSKLTVDKSRWQQGNVFSCSVMHEALHNHYTQKSLSLSPGK

SEQ ID NO: 13186 - protein, 122 aa, Artificial Sequence; identical to SEQ ID NO: 7674
  Description of Artificial Sequence: Synthetic polypeptide
  VH of XENP018248

SEQ ID NO: 13187 - protein, 5 aa, Artificial Sequence
  Description of Artificial Sequence: Synthetic peptide
  XENP018248 vhCDR1
NYWMN

SEQ ID NO: 13188 - protein, 19 aa, Artificial Sequence
  Description of Artificial Sequence: Synthetic peptide
  XENP018248 vhCDR2
EIRLKSNNYATHYVEPVKG

SEQ ID NO: 13189 - protein, 11 aa, Artificial Sequence
  Description of Artificial Sequence: Synthetic peptide
  XENP018248 vhCDR3
YYGNYGGYFDV

SEQ ID NO: 13190 - protein, 214 aa, Artificial Sequence; identical to SEQ ID NO: 11550
  Description of Artificial Sequence: Synthetic polypeptide
  XENP018248 1G6_H1.147_L1_IgG1_PVA_/S267K Light Chain

SEQ ID NO: 13191 - protein, 107 aa, Artificial Sequence; identical to SEQ ID NO: 6247
  Description of Artificial Sequence: Synthetic polypeptide
  VL of XENP018248

SEQ ID NO: 13192 - protein, 11 aa, Artificial Sequence
  Description of Artificial Sequence: Synthetic peptide
  XENP018248 vlCDR1
RASQSVSNDVA

SEQ ID NO: 13193 - protein, 7 aa, Artificial Sequence
  Description of Artificial Sequence: Synthetic peptide
  XENP018248 vlCDR2
YASHRYT

SEQ ID NO: 13194 - protein, 9 aa, Artificial Sequence
  Description of Artificial Sequence: Synthetic peptide
  XENP018248 vlCDR3
QQDYSSPRT

SEQ ID NO: 13195 - protein, 451 aa, Artificial Sequence
  Description of Artificial Sequence: Synthetic polypeptide
  XENP018249 1G6_H1.148_L1_IgG1_PVA_/S267K Heavy Chain
EVQLVESGGGLVKPGGSLRLSCAASGFTFSNYWMNWVRQAPGKGLEWVGEIRLKSNNYATHYADPVKGRFTISRDDSKSTVYLQMNSLKTEDTAVYYCTRYYGNYGGYFDVWGAGTLVTVSSASTKGPSVFPLAPSSKSTSGGTAALGCLVKDYFPEPVTVSWNSGALTSGVHTFPAVLQSSGLYSLSSVVTVPSSSLGTQTYICNVNHKPSNTKVDKKVEPKSCDKTHTCPPCPAPPVAGPSVFLFPPKPKDTLMISRTPEVTCVVVDVKHEDPEVKFNWYVDGVEVHNAKTKPREEQYNSTYRVVSVLTVLHQDWLNGKEYKCKVSNKALPAPIEKTISKAKGQPREPQVYTLPPSREEMTKNQVSLTCLVKGFYPSDIAVEWESNGQPENNYKTTPPVLDSDGSFFLYSKLTVDKSRWQQGNVFSCSVMHEALHNHYTQKSLSLSPGK

SEQ ID NO: 13196 - protein, 122 aa, Artificial Sequence; identical to SEQ ID NO: 7683
  Description of Artificial Sequence: Synthetic polypeptide
  VH of XENP018249

SEQ ID NO: 13197 - protein, 5 aa, Artificial Sequence
  Description of Artificial Sequence: Synthetic peptide
  XENP018249 vhCDR1
NYWMN

SEQ ID NO: 13198 - protein, 19 aa, Artificial Sequence
  Description of Artificial Sequence: Synthetic peptide
  XENP018249 vhCDR2
EIRLKSNNYATHYADPVKG

SEQ ID NO: 13199 - protein, 11 aa, Artificial Sequence
  Description of Artificial Sequence: Synthetic peptide
  XENP018249 vhCDR3
YYGNYGGYFDV

SEQ ID NO: 13200 - protein, 214 aa, Artificial Sequence; identical to SEQ ID NO: 11550
  Description of Artificial Sequence: Synthetic polypeptide
  XENP018249 1G6_H1.148_L1_IgG1_PVA_/S267K Light Chain

SEQ ID NO: 13201 - protein, 107 aa, Artificial Sequence; identical to SEQ ID NO: 6247
  Description of Artificial Sequence: Synthetic polypeptide
  VL of XENP018249

SEQ ID NO: 13202 - protein, 11 aa, Artificial Sequence
  Description of Artificial Sequence: Synthetic peptide
  XENP018249 vlCDR1
RASQSVSNDVA

SEQ ID NO: 13203 - protein, 7 aa, Artificial Sequence
  Description of Artificial Sequence: Synthetic peptide
  XENP018249 vlCDR2
YASHRYT

SEQ ID NO: 13204 - protein, 9 aa, Artificial Sequence
  Description of Artificial Sequence: Synthetic peptide
  XENP018249 vlCDR3
QQDYSSPRT

SEQ ID NO: 13205 - protein, 451 aa, Artificial Sequence
  Description of Artificial Sequence: Synthetic polypeptide
  XENP018250 1G6_H1.149_L1_IgG1_PVA_/S267K Heavy Chain
EVQLVESGGGLVKPGGSLRLSCAASGFTFSNYWMNWVRQAPGKGLEWVGEIRLKSNNYATHYAGPVKGRFTISRDDSKSTVYLQMNSLKTEDTAVYYCTRYYGNYGGYFDVWGAGTLVTVSSASTKGPSVFPLAPSSKSTSGGTAALGCLVKDYFPEPVTVSWNSGALTSGVHTFPAVLQSSGLYSLSSVVTVPSSSLGTQTYICNVNHKPSNTKVDKKVEPKSCDKTHTCPPCPAPPVAGPSVFLFPPKPKDTLMISRTPEVTCVVVDVKHEDPEVKFNWYVDGVEVHNAKTKPREEQYNSTYRVVSVLTVLHQDWLNGKEYKCKVSNKALPAPIEKTISKAKGQPREPQVYTLPPSREEMTKNQVSLTCLVKGFYPSDIAVEWESNGQPENNYKTTPPVLDSDGSFFLYSKLTVDKSRWQQGNVFSCSVMHEALHNHYTQKSLSLSPGK

SEQ ID NO: 13206 - protein, 122 aa, Artificial Sequence; identical to SEQ ID NO: 7692
  Description of Artificial Sequence: Synthetic polypeptide
  VH of XENP018250

SEQ ID NO: 13207 - protein, 5 aa, Artificial Sequence
  Description of Artificial Sequence: Synthetic peptide
  XENP018250 vhCDR1
NYWMN

SEQ ID NO: 13208 - protein, 19 aa, Artificial Sequence
  Description of Artificial Sequence: Synthetic peptide
  XENP018250 vhCDR2
EIRLKSNNYATHYAGPVKG

SEQ ID NO: 13209 - protein, 11 aa, Artificial Sequence
  Description of Artificial Sequence: Synthetic peptide
  XENP018250 vhCDR3
YYGNYGGYFDV

SEQ ID NO: 13210 - protein, 214 aa, Artificial Sequence; identical to SEQ ID NO: 11550
  Description of Artificial Sequence: Synthetic polypeptide
  XENP018250 1G6_H1.149_L1_IgG1_PVA_/S267K Light Chain

SEQ ID NO: 13211 - protein, 107 aa, Artificial Sequence; identical to SEQ ID NO: 6247
  Description of Artificial Sequence: Synthetic polypeptide
  VL of XENP018250

SEQ ID NO: 13212 - protein, 11 aa, Artificial Sequence
  Description of Artificial Sequence: Synthetic peptide
  XENP018250 vlCDR1
RASQSVSNDVA

SEQ ID NO: 13213 - protein, 7 aa, Artificial Sequence
  Description of Artificial Sequence: Synthetic peptide
  XENP018250 vlCDR2
YASHRYT

SEQ ID NO: 13214 - protein, 9 aa, Artificial Sequence
  Description of Artificial Sequence: Synthetic peptide
  XENP018250 vlCDR3
QQDYSSPRT

SEQ ID NO: 13215 - protein, 451 aa, Artificial Sequence
  Description of Artificial Sequence: Synthetic polypeptide
  XENP018251 1G6_H1.150_L1_IgG1_PVA_/S267K Heavy Chain
EVQLVESGGGLVKPGGSLRLSCAASGFTFSNYWMNWVRQAPGKGLEWVGEIRLKSNNYATHYAAPVKGRFTISRDDSKSTVYLQMNSLKTEDTAVYYCTRYYGNYGGYFDVWGAGTLVTVSSASTKGPSVFPLAPSSKSTSGGTAALGCLVKDYFPEPVTVSWNSGALTSGVHTFPAVLQSSGLYSLSSVVTVPSSSLGTQTYICNVNHKPSNTKVDKKVEPKSCDKTHTCPPCPAPPVAGPSVFLFPPKPKDTLMISRTPEVTCVVVDVKHEDPEVKFNWYVDGVEVHNAKTKPREEQYNSTYRVVSVLTVLHQDWLNGKEYKCKVSNKALPAPIEKTISKAKGQPREPQVYTLPPSREEMTKNQVSLTCLVKGFYPSDIAVEWESNGQPENNYKTTPPVLDSDGSFFLYSKLTVDKSRWQQGNVFSCSVMHEALHNHYTQKSLSLSPGK

SEQ ID NO: 13216 - protein, 122 aa, Artificial Sequence; identical to SEQ ID NO: 7701
  Description of Artificial Sequence: Synthetic polypeptide
  VH of XENP018251

SEQ ID NO: 13217 - protein, 5 aa, Artificial Sequence
  Description of Artificial Sequence: Synthetic peptide
  XENP018251 vhCDR1
NYWMN

SEQ ID NO: 13218 - protein, 19 aa, Artificial Sequence
  Description of Artificial Sequence: Synthetic peptide
  XENP018251 vhCDR2
EIRLKSNNYATHYAAPVKG

SEQ ID NO: 13219 - protein, 11 aa, Artificial Sequence
  Description of Artificial Sequence: Synthetic peptide
  XENP018251 vhCDR3
YYGNYGGYFDV

SEQ ID NO: 13220 - protein, 214 aa, Artificial Sequence; identical to SEQ ID NO: 11550
  Description of Artificial Sequence: Synthetic polypeptide
  XENP018251 1G6_H1.150_L1_IgG1_PVA_/S267K Light Chain

SEQ ID NO: 13221 - protein, 107 aa, Artificial Sequence; identical to SEQ ID NO: 6247
  Description of Artificial Sequence: Synthetic polypeptide
  VL of XENP018251

SEQ ID NO: 13222 - protein, 11 aa, Artificial Sequence
  Description of Artificial Sequence: Synthetic peptide
  XENP018251 vlCDR1
RASQSVSNDVA

SEQ ID NO: 13223 - protein, 7 aa, Artificial Sequence
  Description of Artificial Sequence: Synthetic peptide
  XENP018251 vlCDR2
YASHRYT

SEQ ID NO: 13224 - protein, 9 aa, Artificial Sequence
  Description of Artificial Sequence: Synthetic peptide
  XENP018251 vlCDR3
QQDYSSPRT

SEQ ID NO: 13225 - protein, 451 aa, Artificial Sequence
  Description of Artificial Sequence: Synthetic polypeptide
  XENP018252 1G6_H1.151_L1_IgG1_PVA_/S267K Heavy Chain
EVQLVESGGGLVKPGGSLRLSCAASGFTFSNYWMNWVRQAPGKGLEWVGEIRLKSNNYATHYAESVKGRFTISRDDSKSTVYLQMNSLKTEDTAVYYCTRYYGNYGGYFDVWGAGTLVTVSSASTKGPSVFPLAPSSKSTSGGTAALGCLVKDYFPEPVTVSWNSGALTSGVHTFPAVLQSSGLYSLSSVVTVPSSSLGTQTYICNVNHKPSNTKVDKKVEPKSCDKTHTCPPCPAPPVAGPSVFLFPPKPKDTLMISRTPEVTCVVVDVKHEDPEVKFNWYVDGVEVHNAKTKPREEQYNSTYRVVSVLTVLHQDWLNGKEYKCKVSNKALPAPIEKTISKAKGQPREPQVYTLPPSREEMTKNQVSLTCLVKGFYPSDIAVEWESNGQPENNYKTTPPVLDSDGSFFLYSKLTVDKSRWQQGNVFSCSVMHEALHNHYTQKSLSLSPGK

SEQ ID NO: 13226 - protein, 122 aa, Artificial Sequence; identical to SEQ ID NO: 7710
  Description of Artificial Sequence: Synthetic polypeptide
  VH of XENP018252

SEQ ID NO: 13227 - protein, 5 aa, Artificial Sequence
  Description of Artificial Sequence: Synthetic peptide
  XENP018252 vhCDR1
NYWMN

SEQ ID NO: 13228 - protein, 19 aa, Artificial Sequence
  Description of Artificial Sequence: Synthetic peptide
  XENP018252 vhCDR2
EIRLKSNNYATHYAESVKG

SEQ ID NO: 13229 - protein, 11 aa, Artificial Sequence
  Description of Artificial Sequence: Synthetic peptide
  XENP018252 vhCDR3
YYGNYGGYFDV

SEQ ID NO: 13230 - protein, 214 aa, Artificial Sequence; identical to SEQ ID NO: 11550
  Description of Artificial Sequence: Synthetic polypeptide
  XENP018252 1G6_H1.151_L1_IgG1_PVA_/S267K Light Chain

SEQ ID NO: 13231 - protein, 107 aa, Artificial Sequence; identical to SEQ ID NO: 6247
  Description of Artificial Sequence: Synthetic polypeptide
  VL of XENP018252

SEQ ID NO: 13232 - protein, 11 aa, Artificial Sequence
  Description of Artificial Sequence: Synthetic peptide
  XENP018252 vlCDR1
RASQSVSNDVA

SEQ ID NO: 13233 - protein, 7 aa, Artificial Sequence
  Description of Artificial Sequence: Synthetic peptide
  XENP018252 vlCDR2
YASHRYT

SEQ ID NO: 13234 - protein, 9 aa, Artificial Sequence
  Description of Artificial Sequence: Synthetic peptide
  XENP018252 vlCDR3
QQDYSSPRT

SEQ ID NO: 13235 - protein, 451 aa, Artificial Sequence
  Description of Artificial Sequence: Synthetic polypeptide
  XENP018253 1G6_H1.152_L1_IgG1_PVA_/S267K Heavy Chain
EVQLVESGGGLVKPGGSLRLSCAASGFTFSNYWMNWVRQAPGKGLEWVGEIRLKSNNYATHYAEPVKGRFTISRDNSKSTVYLQMNSLKTEDTAVYYCTRYYGNYGGYFDVWGAGTLVTVSSASTKGPSVFPLAPSSKSTSGGTAALGCLVKDYFPEPVTVSWNSGALTSGVHTFPAVLQSSGLYSLSSVVTVPSSSLGTQTYICNVNHKPSNTKVDKKVEPKSCDKTHTCPPCPAPPVAGPSVFLFPPKPKDTLMISRTPEVTCVVVDVKHEDPEVKFNWYVDGVEVHNAKTKPREEQYNSTYRVVSVLTVLHQDWLNGKEYKCKVSNKALPAPIEKTISKAKGQPREPQVYTLPPSREEMTKNQVSLTCLVKGFYPSDIAVEWESNGQPENNYKTTPPVLDSDGSFFLYSKLTVDKSRWQQGNVFSCSVMHEALHNHYTQKSLSLSPGK

SEQ ID NO: 13236 - protein, 122 aa, Artificial Sequence; identical to SEQ ID NO: 7719
  Description of Artificial Sequence: Synthetic polypeptide
  VH of XENP018253

SEQ ID NO: 13237 - protein, 5 aa, Artificial Sequence
  Description of Artificial Sequence: Synthetic peptide
  XENP018253 vhCDR1
NYWMN

SEQ ID NO: 13238 - protein, 19 aa, Artificial Sequence
  Description of Artificial Sequence: Synthetic peptide
  XENP018253 vhCDR2
EIRLKSNNYATHYAEPVKG

SEQ ID NO: 13239 - protein, 11 aa, Artificial Sequence
  Description of Artificial Sequence: Synthetic peptide
  XENP018253 vhCDR3
YYGNYGGYFDV

SEQ ID NO: 13240 - protein, 214 aa, Artificial Sequence; identical to SEQ ID NO: 11550
  Description of Artificial Sequence: Synthetic polypeptide
  XENP018253 1G6_H1.152_L1_IgG1_PVA_/S267K Light Chain

SEQ ID NO: 13241 - protein, 107 aa, Artificial Sequence; identical to SEQ ID NO: 6247
  Description of Artificial Sequence: Synthetic polypeptide
  VL of XENP018253

SEQ ID NO: 13242 - protein, 11 aa, Artificial Sequence
  Description of Artificial Sequence: Synthetic peptide
  XENP018253 vlCDR1
RASQSVSNDVA

SEQ ID NO: 13243 - protein, 7 aa, Artificial Sequence
  Description of Artificial Sequence: Synthetic peptide
  XENP018253 vlCDR2
YASHRYT

SEQ ID NO: 13244 - protein, 9 aa, Artificial Sequence
  Description of Artificial Sequence: Synthetic peptide
  XENP018253 vlCDR3
QQDYSSPRT

SEQ ID NO: 13245 - protein, 451 aa, Artificial Sequence
  Description of Artificial Sequence: Synthetic polypeptide
  XENP018254 1G6_H1.153_L1_IgG1_PVA_/S267K Heavy Chain
EVQLVESGGGLVKPGGSLRLSCAASGFTFSNYWMNWVRQAPGKGLEWVGEIRLKSNNYATHYAEPVKGRFTISRDDSKNTVYLQMNSLKTEDTAVYYCTRYYGNYGGYFDVWGAGTLVTVSSASTKGPSVFPLAPSSKSTSGGTAALGCLVKDYFPEPVTVSWNSGALTSGVHTFPAVLQSSGLYSLSSVVTVPSSSLGTQTYICNVNHKPSNTKVDKKVEPKSCDKTHTCPPCPAPPVAGPSVFLFPPKPKDTLMISRTPEVTCVVVDVKHEDPEVKFNWYVDGVEVHNAKTKPREEQYNSTYRVVSVLTVLHQDWLNGKEYKCKVSNKALPAPIEKTISKAKGQPREPQVYTLPPSREEMTKNQVSLTCLVKGFYPSDIAVEWESNGQPENNYKTTPPVLDSDGSFFLYSKLTVDKSRWQQGNVFSCSVMHEALHNHYTQKSLSLSPGK

SEQ ID NO: 13246 - protein, 122 aa, Artificial Sequence; identical to SEQ ID NO: 7728
  Description of Artificial Sequence: Synthetic polypeptide
  VH of XENP018254

SEQ ID NO: 13247 - protein, 5 aa, Artificial Sequence
  Description of Artificial Sequence: Synthetic peptide
  XENP018254 vhCDR1
NYWMN

SEQ ID NO: 13248 - protein, 19 aa, Artificial Sequence
  Description of Artificial Sequence: Synthetic peptide
  XENP018254 vhCDR2
EIRLKSNNYATHYAEPVKG

SEQ ID NO: 13249 - protein, 11 aa, Artificial Sequence
  Description of Artificial Sequence: Synthetic peptide
  XENP018254 vhCDR3
YYGNYGGYFDV

SEQ ID NO: 13250 - protein, 214 aa, Artificial Sequence; identical to SEQ ID NO: 11550
  Description of Artificial Sequence: Synthetic polypeptide
  XENP018254 1G6_H1.153_L1_IgG1_PVA_/S267K Light Chain

SEQ ID NO: 13251 - protein, 107 aa, Artificial Sequence; identical to SEQ ID NO: 6247
  Description of Artificial Sequence: Synthetic polypeptide
  VL of XENP018254

SEQ ID NO: 13252 - protein, 11 aa, Artificial Sequence
  Description of Artificial Sequence: Synthetic peptide
  XENP018254 vlCDR1
RASQSVSNDVA

SEQ ID NO: 13253 - protein, 7 aa, Artificial Sequence
  Description of Artificial Sequence: Synthetic peptide
  XENP018254 vlCDR2
YASHRYT

SEQ ID NO: 13254 - protein, 9 aa, Artificial Sequence
  Description of Artificial Sequence: Synthetic peptide
  XENP018254 vlCDR3
QQDYSSPRT

SEQ ID NO: 13255 - protein, 451 aa, Artificial Sequence
  Description of Artificial Sequence: Synthetic polypeptide
  XENP018255 1G6_H1.154_L1_IgG1_PVA_/S267K Heavy Chain
EVQLVESGGGLVKPGGSLRLSCAASGFTFSNYWMNWVRQAPGKGLEWVGEIRLKSNNYATHYAEPVKGRFTISRDDSKSSVYLQMNSLKTEDTAVYYCTRYYGNYGGYFDVWGAGTLVTVSSASTKGPSVFPLAPSSKSTSGGTAALGCLVKDYFPEPVTVSWNSGALTSGVHTFPAVLQSSGLYSLSSVVTVPSSSLGTQTYICNVNHKPSNTKVDKKVEPKSCDKTHTCPPCPAPPVAGPSVFLFPPKPKDTLMISRTPEVTCVVVDVKHEDPEVKFNWYVDGVEVHNAKTKPREEQYNSTYRVVSVLTVLHQDWLNGKEYKCKVSNKALPAPIEKTISKAKGQPREPQVYTLPPSREEMTKNQVSLTCLVKGFYPSDIAVEWESNGQPENNYKTTPPVLDSDGSFFLYSKLTVDKSRWQQGNVFSCSVMHEALHNHYTQKSLSLSPGK

SEQ ID NO: 13256 - protein, 122 aa, Artificial Sequence; identical to SEQ ID NO: 7737
  Description of Artificial Sequence: Synthetic polypeptide
  VH of XENP018255

SEQ ID NO: 13257 - protein, 5 aa, Artificial Sequence
  Description of Artificial Sequence: Synthetic peptide
  XENP018255 vhCDR1
NYWMN

SEQ ID NO: 13258 - protein, 19 aa, Artificial Sequence
  Description of Artificial Sequence: Synthetic peptide
  XENP018255 vhCDR2
EIRLKSNNYATHYAEPVKG

SEQ ID NO: 13259 - protein, 11 aa, Artificial Sequence
  Description of Artificial Sequence: Synthetic peptide
  XENP018255 vhCDR3
YYGNYGGYFDV

SEQ ID NO: 13260 - protein, 214 aa, Artificial Sequence; identical to SEQ ID NO: 11550
  Description of Artificial Sequence: Synthetic polypeptide
  XENP018255 1G6_H1.154_L1_IgG1_PVA_/S267K Light Chain

SEQ ID NO: 13261 - protein, 107 aa, Artificial Sequence; identical to SEQ ID NO: 6247
  Description of Artificial Sequence: Synthetic polypeptide
  VL of XENP018255

SEQ ID NO: 13262 - protein, 11 aa, Artificial Sequence
  Description of Artificial Sequence: Synthetic peptide
  XENP018255 vlCDR1
RASQSVSNDVA

SEQ ID NO: 13263 - protein, 7 aa, Artificial Sequence
  Description of Artificial Sequence: Synthetic peptide
  XENP018255 vlCDR2
YASHRYT

SEQ ID NO: 13264 - protein, 9 aa, Artificial Sequence
  Description of Artificial Sequence: Synthetic peptide
  XENP018255 vlCDR3
QQDYSSPRT

SEQ ID NO: 13265 - protein, 451 aa, Artificial Sequence
  Description of Artificial Sequence: Synthetic polypeptide
  XENP018256 1G6_H1.155_L1_IgG1_PVA_/S267K Heavy Chain
EVQLVESGGGLVKPGGSLRLSCAASGFTFSNYWMNWVRQAPGKGLEWVGEIRLKSNNYATHYAEPVKGRFTISRDDSKSTLYLQMNSLKTEDTAVYYCTRYYGNYGGYFDVWGAGTLVTVSSASTKGPSVFPLAPSSKSTSGGTAALGCLVKDYFPEPVTVSWNSGALTSGVHTFPAVLQSSGLYSLSSVVTVPSSSLGTQTYICNVNHKPSNTKVDKKVEPKSCDKTHTCPPCPAPPVAGPSVFLFPPKPKDTLMISRTPEVTCVVVDVKHEDPEVKFNWYVDGVEVHNAKTKPREEQYNSTYRVVSVLTVLHQDWLNGKEYKCKVSNKALPAPIEKTISKAKGQPREPQVYTLPPSREEMTKNQVSLTCLVKGFYPSDIAVEWESNGQPENNYKTTPPVLDSDGSFFLYSKLTVDKSRWQQGNVFSCSVMHEALHNHYTQKSLSLSPGK

SEQ ID NO: 13266 - protein, 122 aa, Artificial Sequence; identical to SEQ ID NO: 7746
  Description of Artificial Sequence: Synthetic polypeptide
  VH of XENP018256

SEQ ID NO: 13267 - protein, 5 aa, Artificial Sequence
  Description of Artificial Sequence: Synthetic peptide
  XENP018256 vhCDR1
NYWMN

SEQ ID NO: 13268 - protein, 19 aa, Artificial Sequence
  Description of Artificial Sequence: Synthetic peptide
  XENP018256 vhCDR2
EIRLKSNNYATHYAEPVKG

SEQ ID NO: 13269 - protein, 11 aa, Artificial Sequence
  Description of Artificial Sequence: Synthetic peptide
  XENP018256 vhCDR3
YYGNYGGYFDV

SEQ ID NO: 13270 - protein, 214 aa, Artificial Sequence; identical to SEQ ID NO: 11550
  Description of Artificial Sequence: Synthetic polypeptide
  XENP018256 1G6_H1.155_L1_IgG1_PVA_/S267K Light Chain

SEQ ID NO: 13271 - protein, 107 aa, Artificial Sequence; identical to SEQ ID NO: 6247
  Description of Artificial Sequence: Synthetic polypeptide
  VL of XENP018256

SEQ ID NO: 13272 - protein, 11 aa, Artificial Sequence
  Description of Artificial Sequence: Synthetic peptide
  XENP018256 vlCDR1
RASQSVSNDVA

SEQ ID NO: 13273 - protein, 7 aa, Artificial Sequence
  Description of Artificial Sequence: Synthetic peptide
  XENP018256 vlCDR2
YASHRYT

SEQ ID NO: 13274 - protein, 9 aa, Artificial Sequence
  Description of Artificial Sequence: Synthetic peptide
  XENP018256 vlCDR3
QQDYSSPRT

SEQ ID NO: 13275 - protein, 451 aa, Artificial Sequence
  Description of Artificial Sequence: Synthetic polypeptide
  XENP018257 1G6_H1.156_L1_IgG1_PVA_/S267K Heavy Chain
EVQLVESGGGLVKPGGSLRLSCAASGFTFSNYWMNWVRQAPGKGLEWVGEIRLKSNNYATHYAEPVKGRFTISRDDSKSTAYLQMNSLKTEDTAVYYCTRYYGNYGGYFDVWGAGTLVTVSSASTKGPSVFPLAPSSKSTSGGTAALGCLVKDYFPEPVTVSWNSGALTSGVHTFPAVLQSSGLYSLSSVVTVPSSSLGTQTYICNVNHKPSNTKVDKKVEPKSCDKTHTCPPCPAPPVAGPSVFLFPPKPKDTLMISRTPEVTCVVVDVKHEDPEVKFNWYVDGVEVHNAKTKPREEQYNSTYRVVSVLTVLHQDWLNGKEYKCKVSNKALPAPIEKTISKAKGQPREPQVYTLPPSREEMTKNQVSLTCLVKGFYPSDIAVEWESNGQPENNYKTTPPVLDSDGSFFLYSKLTVDKSRWQQGNVFSCSVMHEALHNHYTQKSLSLSPGK

SEQ ID NO: 13276 - protein, 122 aa, Artificial Sequence; identical to SEQ ID NO: 7755
  Description of Artificial Sequence: Synthetic polypeptide
  VH of XENP018257

SEQ ID NO: 13277 - protein, 5 aa, Artificial Sequence
  Description of Artificial Sequence: Synthetic peptide
  XENP018257 vhCDR1
NYWMN

SEQ ID NO: 13278 - protein, 19 aa, Artificial Sequence
  Description of Artificial Sequence: Synthetic peptide
  XENP018257 vhCDR2
EIRLKSNNYATHYAEPVKG

SEQ ID NO: 13279 - protein, 11 aa, Artificial Sequence
  Description of Artificial Sequence: Synthetic peptide
  XENP018257 vhCDR3
YYGNYGGYFDV

SEQ ID NO: 13280 - protein, 214 aa, Artificial Sequence; identical to SEQ ID NO: 11550
  Description of Artificial Sequence: Synthetic polypeptide
  XENP018257 1G6_H1.156_L1_IgG1_PVA_/S267K Light Chain

SEQ ID NO: 13281 - protein, 107 aa, Artificial Sequence; identical to SEQ ID NO: 6247
  Description of Artificial Sequence: Synthetic polypeptide
  VL of XENP018257

SEQ ID NO: 13282 - protein, 11 aa, Artificial Sequence
  Description of Artificial Sequence: Synthetic peptide
  XENP018257 vlCDR1
RASQSVSNDVA

SEQ ID NO: 13283 - protein, 7 aa, Artificial Sequence
  Description of Artificial Sequence: Synthetic peptide
  XENP018257 vlCDR2
YASHRYT

SEQ ID NO: 13284 - protein, 9 aa, Artificial Sequence
  Description of Artificial Sequence: Synthetic peptide
  XENP018257 vlCDR3
QQDYSSPRT

SEQ ID NO: 13285 - protein, 451 aa, Artificial Sequence
  Description of Artificial Sequence: Synthetic polypeptide
  XENP018258 1G6_H1.157_L1_IgG1_PVA_/S267K Heavy Chain
EVQLVESGGGLVKPGGSLRLSCAASGFTFSNYWMNWVRQAPGKGLEWVGEIRLKSNNYATHYAEPVKGRFTISRDDSKSTVYLQMNNLKTEDTAVYYCTRYYGNYGGYFDVWGAGTLVTVSSASTKGPSVFPLAPSSKSTSGGTAALGCLVKDYFPEPVTVSWNSGALTSGVHTFPAVLQSSGLYSLSSVVTVPSSSLGTQTYICNVNHKPSNTKVDKKVEPKSCDKTHTCPPCPAPPVAGPSVFLFPPKPKDTLMISRTPEVTCVVVDVKHEDPEVKFNWYVDGVEVHNAKTKPREEQYNSTYRVVSVLTVLHQDWLNGKEYKCKVSNKALPAPIEKTISKAKGQPREPQVYTLPPSREEMTKNQVSLTCLVKGFYPSDIAVEWESNGQPENNYKTTPPVLDSDGSFFLYSKLTVDKSRWQQGNVFSCSVMHEALHNHYTQKSLSLSPGK

SEQ ID NO: 13286 - protein, 122 aa, Artificial Sequence; identical to SEQ ID NO: 7764
  Description of Artificial Sequence: Synthetic polypeptide
  VH of XENP018258

SEQ ID NO: 13287 - protein, 5 aa, Artificial Sequence
  Description of Artificial Sequence: Synthetic peptide
  XENP018258 vhCDR1
NYWMN

SEQ ID NO: 13288 - protein, 19 aa, Artificial Sequence
  Description of Artificial Sequence: Synthetic peptide
  XENP018258 vhCDR2
EIRLKSNNYATHYAEPVKG

SEQ ID NO: 13289 - protein, 11 aa, Artificial Sequence
  Description of Artificial Sequence: Synthetic peptide
  XENP018258 vhCDR3
YYGNYGGYFDV

SEQ ID NO: 13290 - protein, 214 aa, Artificial Sequence; identical to SEQ ID NO: 11550
  Description of Artificial Sequence: Synthetic polypeptide
  XENP018258 1G6_H1.157_L1_IgG1_PVA_/S267K Light Chain

SEQ ID NO: 13291 - protein, 107 aa, Artificial Sequence; identical to SEQ ID NO: 6247
  Description of Artificial Sequence: Synthetic polypeptide
  VL of XENP018258

SEQ ID NO: 13292 - protein, 11 aa, Artificial Sequence
  Description of Artificial Sequence: Synthetic peptide
  XENP018258 vlCDR1
RASQSVSNDVA

SEQ ID NO: 13293 - protein, 7 aa, Artificial Sequence
  Description of Artificial Sequence: Synthetic peptide
  XENP018258 vlCDR2
YASHRYT

SEQ ID NO: 13294 - protein, 9 aa, Artificial Sequence
  Description of Artificial Sequence: Synthetic peptide
  XENP018258 vlCDR3
QQDYSSPRT

SEQ ID NO: 13295 - protein, 451 aa, Artificial Sequence
  Description of Artificial Sequence: Synthetic polypeptide
  XENP018259 1G6_H1.158_L1_IgG1_PVA_/S267K Heavy Chain
EVQLVESGGGLVKPGGSLRLSCAASGFTFSNYWMNWVRQAPGKGLEWVGEIRLKSNNYATHYAEPVKGRFTISRDDSKSTVYLQMNSLRTEDTAVYYCTRYYGNYGGYFDVWGAGTLVTVSSASTKGPSVFPLAPSSKSTSGGTAALGCLVKDYFPEPVTVSWNSGALTSGVHTFPAVLQSSGLYSLSSVVTVPSSSLGTQTYICNVNHKPSNTKVDKKVEPKSCDKTHTCPPCPAPPVAGPSVFLFPPKPKDTLMISRTPEVTCVVVDVKHEDPEVKFNWYVDGVEVHNAKTKPREEQYNSTYRVVSVLTVLHQDWLNGKEYKCKVSNKALPAPIEKTISKAKGQPREPQVYTLPPSREEMTKNQVSLTCLVKGFYPSDIAVEWESNGQPENNYKTTPPVLDSDGSFFLYSKLTVDKSRWQQGNVFSCSVMHEALHNHYTQKSLSLSPGK

SEQ ID NO: 13296 - protein, 122 aa, Artificial Sequence; identical to SEQ ID NO: 7773
  Description of Artificial Sequence: Synthetic polypeptide
  VH of XENP018259

SEQ ID NO: 13297 - protein, 5 aa, Artificial Sequence
  Description of Artificial Sequence: Synthetic peptide
  XENP018259 vhCDR1
NYWMN

SEQ ID NO: 13298 - protein, 19 aa, Artificial Sequence
  Description of Artificial Sequence: Synthetic peptide
  XENP018259 vhCDR2
EIRLKSNNYATHYAEPVKG

SEQ ID NO: 13299 - protein, 11 aa, Artificial Sequence
  Description of Artificial Sequence: Synthetic peptide
  XENP018259 vhCDR3
YYGNYGGYFDV

SEQ ID NO: 13300 - protein, 214 aa, Artificial Sequence; identical to SEQ ID NO: 11550
  Description of Artificial Sequence: Synthetic polypeptide
  XENP018259 1G6_H1.158_L1_IgG1_PVA_/S267K Light Chain

SEQ ID NO: 13301 - protein, 107 aa, Artificial Sequence; identical to SEQ ID NO: 6247
  Description of Artificial Sequence: Synthetic polypeptide
  VL of XENP018259

SEQ ID NO: 13302 - protein, 11 aa, Artificial Sequence
  Description of Artificial Sequence: Synthetic peptide
  XENP018259 vlCDR1
RASQSVSNDVA

SEQ ID NO: 13303 - protein, 7 aa, Artificial Sequence
  Description of Artificial Sequence: Synthetic peptide
  XENP018259 vlCDR2
YASHRYT

SEQ ID NO: 13304 - protein, 9 aa, Artificial Sequence
  Description of Artificial Sequence: Synthetic peptide
  XENP018259 vlCDR3
QQDYSSPRT

SEQ ID NO: 13305 - protein, 451 aa, Artificial Sequence
  Description of Artificial Sequence: Synthetic polypeptide
  XENP018260 1G6_H1.159_L1_IgG1_PVA_/S267K Heavy Chain
EVQLVESGGGLVKPGGSLRLSCAASGFTFSNYWMNWVRQAPGKGLEWVGEIRLKSNNYATHYAEPVKGRFTISRDDSKSTVYLQMNSLKAEDTAVYYCTRYYGNYGGYFDVWGAGTLVTVSSASTKGPSVFPLAPSSKSTSGGTAALGCLVKDYFPEPVTVSWNSGALTSGVHTFPAVLQSSGLYSLSSVVTVPSSSLGTQTYICNVNHKPSNTKVDKKVEPKSCDKTHTCPPCPAPPVAGPSVFLFPPKPKDTLMISRTPEVTCVVVDVKHEDPEVKFNWYVDGVEVHNAKTKPREEQYNSTYRVVSVLTVLHQDWLNGKEYKCKVSNKALPAPIEKTISKAKGQPREPQVYTLPPSREEMTKNQVSLTCLVKGFYPSDIAVEWESNGQPENNYKTTPPVLDSDGSFFLYSKLTVDKSRWQQGNVFSCSVMHEALHNHYTQKSLSLSPGK

SEQ ID NO: 13306 - protein, 122 aa, Artificial Sequence; identical to SEQ ID NO: 7782
  Description of Artificial Sequence: Synthetic polypeptide
  VH of XENP018260

SEQ ID NO: 13307 - protein, 5 aa, Artificial Sequence
  Description of Artificial Sequence: Synthetic peptide
  XENP018260 vhCDR1
NYWMN

SEQ ID NO: 13308 - protein, 19 aa, Artificial Sequence
  Description of Artificial Sequence: Synthetic peptide
  XENP018260 vhCDR2
EIRLKSNNYATHYAEPVKG

SEQ ID NO: 13309 - protein, 11 aa, Artificial Sequence
  Description of Artificial Sequence: Synthetic peptide
  XENP018260 vhCDR3
YYGNYGGYFDV

SEQ ID NO: 13310 - protein, 214 aa, Artificial Sequence; identical to SEQ ID NO: 11550
  Description of Artificial Sequence: Synthetic polypeptide
  XENP018260 1G6_H1.159_L1_IgG1_PVA_/S267K Light Chain

SEQ ID NO: 13311 - protein, 107 aa, Artificial Sequence; identical to SEQ ID NO: 6247
  Description of Artificial Sequence: Synthetic polypeptide
  VL of XENP018260

SEQ ID NO: 13312 - protein, 11 aa, Artificial Sequence
  Description of Artificial Sequence: Synthetic peptide
  XENP018260 vlCDR1
RASQSVSNDVA

SEQ ID NO: 13313 - protein, 7 aa, Artificial Sequence
  Description of Artificial Sequence: Synthetic peptide
  XENP018260 vlCDR2
YASHRYT

SEQ ID NO: 13314 - protein, 9 aa, Artificial Sequence
  Description of Artificial Sequence: Synthetic peptide
  XENP018260 vlCDR3
QQDYSSPRT

SEQ ID NO: 13315 - protein, 451 aa, Artificial Sequence
  Description of Artificial Sequence: Synthetic polypeptide
  XENP018261 1G6_H1.160_L1_IgG1_PVA_/S267K Heavy Chain
EVQLVESGGGLVKPGGSLRLSCAASGFTFSNYWMNWVRQAPGKGLEWVGEIRLKSNNYATHYAEPVKGRFTISRDDSKSTVYLQMNSLKTEDTGVYYCTRYYGNYGGYFDVWGAGTLVTVSSASTKGPSVFPLAPSSKSTSGGTAALGCLVKDYFPEPVTVSWNSGALTSGVHTFPAVLQSSGLYSLSSVVTVPSSSLGTQTYICNVNHKPSNTKVDKKVEPKSCDKTHTCPPCPAPPVAGPSVFLFPPKPKDTLMISRTPEVTCVVVDVKHEDPEVKFNWYVDGVEVHNAKTKPREEQYNSTYRVVSVLTVLHQDWLNGKEYKCKVSNKALPAPIEKTISKAKGQPREPQVYTLPPSREEMTKNQVSLTCLVKGFYPSDIAVEWESNGQPENNYKTTPPVLDSDGSFFLYSKLTVDKSRWQQGNVFSCSVMHEALHNHYTQKSLSLSPGK

SEQ ID NO: 13316 - protein, 122 aa, Artificial Sequence; identical to SEQ ID NO: 7791
  Description of Artificial Sequence: Synthetic polypeptide
  VH of XENP018261

SEQ ID NO: 13317 - protein, 5 aa, Artificial Sequence
  Description of Artificial Sequence: Synthetic peptide
  XENP018261 vhCDR1
NYWMN

SEQ ID NO: 13318 - protein, 19 aa, Artificial Sequence
  Description of Artificial Sequence: Synthetic peptide
  XENP018261 vhCDR2
EIRLKSNNYATHYAEPVKG

SEQ ID NO: 13319 - protein, 11 aa, Artificial Sequence
  Description of Artificial Sequence: Synthetic peptide
  XENP018261 vhCDR3
YYGNYGGYFDV

SEQ ID NO: 13320 - protein, 214 aa, Artificial Sequence; identical to SEQ ID NO: 11550
  Description of Artificial Sequence: Synthetic polypeptide
  XENP018261 1G6_H1.160_L1_IgG1_PVA_/S267K Light Chain

SEQ ID NO: 13321 - protein, 107 aa, Artificial Sequence; identical to SEQ ID NO: 6247
  Description of Artificial Sequence: Synthetic polypeptide
  VL of XENP018261

SEQ ID NO: 13322 - protein, 11 aa, Artificial Sequence
  Description of Artificial Sequence: Synthetic peptide
  XENP018261 vlCDR1
RASQSVSNDVA

SEQ ID NO: 13323 - protein, 7 aa, Artificial Sequence
  Description of Artificial Sequence: Synthetic peptide
  XENP018261 vlCDR2
YASHRYT

SEQ ID NO: 13324 - protein, 9 aa, Artificial Sequence
  Description of Artificial Sequence: Synthetic peptide
  XENP018261 vlCDR3
QQDYSSPRT

SEQ ID NO: 13325 - protein, 451 aa, Artificial Sequence
  Description of Artificial Sequence: Synthetic polypeptide
  XENP018262 1G6_H1.161_L1_IgG1_PVA_/S267K Heavy Chain
EVQLVESGGGLVKPGGSLRLSCAASGFTFSNYWMNWVRQAPGKGLEWVGEIRLKSNNYATHYAEPVKGRFTISRDDSKSTVYLQMNSLKTEDTAIYYCTRYYGNYGGYFDVWGAGTLVTVSSASTKGPSVFPLAPSSKSTSGGTAALGCLVKDYFPEPVTVSWNSGALTSGVHTFPAVLQSSGLYSLSSVVTVPSSSLGTQTYICNVNHKPSNTKVDKKVEPKSCDKTHTCPPCPAPPVAGPSVFLFPPKPKDTLMISRTPEVTCVVVDVKHEDPEVKFNWYVDGVEVHNAKTKPREEQYNSTYRVVSVLTVLHQDWLNGKEYKCKVSNKALPAPIEKTISKAKGQPREPQVYTLPPSREEMTKNQVSLTCLVKGFYPSDIAVEWESNGQPENNYKTTPPVLDSDGSFFLYSKLTVDKSRWQQGNVFSCSVMHEALHNHYTQKSLSLSPGK

SEQ ID NO: 13326 - protein, 122 aa, Artificial Sequence; identical to SEQ ID NO: 7800
  Description of Artificial Sequence: Synthetic polypeptide
  VH of XENP018262

SEQ ID NO: 13327 - protein, 5 aa, Artificial Sequence
  Description of Artificial Sequence: Synthetic peptide
  XENP018262 vhCDR1
NYWMN

SEQ ID NO: 13328 - protein, 19 aa, Artificial Sequence
  Description of Artificial Sequence: Synthetic peptide
  XENP018262 vhCDR2
EIRLKSNNYATHYAEPVKG

SEQ ID NO: 13329 - protein, 11 aa, Artificial Sequence
  Description of Artificial Sequence: Synthetic peptide
  XENP018262 vhCDR3
YYGNYGGYFDV

SEQ ID NO: 13330 - protein, 214 aa, Artificial Sequence; identical to SEQ ID NO: 11550
  Description of Artificial Sequence: Synthetic polypeptide
  XENP018262 1G6_H1.161_L1_IgG1_PVA_/S267K Light Chain

SEQ ID NO: 13331 - protein, 107 aa, Artificial Sequence; identical to SEQ ID NO: 6247
  Description of Artificial Sequence: Synthetic polypeptide
  VL of XENP018262

SEQ ID NO: 13332 - protein, 11 aa, Artificial Sequence
  Description of Artificial Sequence: Synthetic peptide
  XENP018262 vlCDR1
RASQSVSNDVA

SEQ ID NO: 13333 - protein, 7 aa, Artificial Sequence
  Description of Artificial Sequence: Synthetic peptide
  XENP018262 vlCDR2
YASHRYT

SEQ ID NO: 13334 - protein, 9 aa, Artificial Sequence
  Description of Artificial Sequence: Synthetic peptide
  XENP018262 vlCDR3
QQDYSSPRT

SEQ ID NO: 13335 - protein, 451 aa, Artificial Sequence
  Description of Artificial Sequence: Synthetic polypeptide
  XENP018263 1G6_H1.162_L1_IgG1_PVA_/S267K Heavy Chain
EVQLVESGGGLVKPGGSLRLSCAASGFTFSNYWMNWVRQAPGKGLEWVGEIRLKSNNYATHYAEPVKGRFTISRDDSKSTVYLQMNSLKTEDTAVYHCTRYYGNYGGYFDVWGAGTLVTVSSASTKGPSVFPLAPSSKSTSGGTAALGCLVKDYFPEPVTVSWNSGALTSGVHTFPAVLQSSGLYSLSSVVTVPSSSLGTQTYICNVNHKPSNTKVDKKVEPKSCDKTHTCPPCPAPPVAGPSVFLFPPKPKDTLMISRTPEVTCVVVDVKHEDPEVKFNWYVDGVEVHNAKTKPREEQYNSTYRVVSVLTVLHQDWLNGKEYKCKVSNKALPAPIEKTISKAKGQPREPQVYTLPPSREEMTKNQVSLTCLVKGFYPSDIAVEWESNGQPENNYKTTPPVLDSDGSFFLYSKLTVDKSRWQQGNVFSCSVMHEALHNHYTQKSLSLSPGK

SEQ ID NO: 13336 - protein, 122 aa, Artificial Sequence; identical to SEQ ID NO: 7809
  Description of Artificial Sequence: Synthetic polypeptide
  VH of XENP018263

SEQ ID NO: 13337 - protein, 5 aa, Artificial Sequence
  Description of Artificial Sequence: Synthetic peptide
  XENP018263 vhCDR1
NYWMN

SEQ ID NO: 13338 - protein, 19 aa, Artificial Sequence
  Description of Artificial Sequence: Synthetic peptide
  XENP018263 vhCDR2
EIRLKSNNYATHYAEPVKG

SEQ ID NO: 13339 - protein, 11 aa, Artificial Sequence
  Description of Artificial Sequence: Synthetic peptide
  XENP018263 vhCDR3
YYGNYGGYFDV

SEQ ID NO: 13340 - protein, 214 aa, Artificial Sequence; identical to SEQ ID NO: 11550
  Description of Artificial Sequence: Synthetic polypeptide
  XENP018263 1G6_H1.162_L1_IgG1_PVA_/S267K Light Chain

SEQ ID NO: 13341 - protein, 107 aa, Artificial Sequence; identical to SEQ ID NO: 6247
  Description of Artificial Sequence: Synthetic polypeptide
  VL of XENP018263

SEQ ID NO: 13342 - protein, 11 aa, Artificial Sequence
  Description of Artificial Sequence: Synthetic peptide
  XENP018263 vlCDR1
RASQSVSNDVA

SEQ ID NO: 13343 - protein, 7 aa, Artificial Sequence
  Description of Artificial Sequence: Synthetic peptide
  XENP018263 vlCDR2
YASHRYT

SEQ ID NO: 13344 - protein, 9 aa, Artificial Sequence
  Description of Artificial Sequence: Synthetic peptide
  XENP018263 vlCDR3
QQDYSSPRT

SEQ ID NO: 13345 - protein, 451 aa, Artificial Sequence
  Description of Artificial Sequence: Synthetic polypeptide
  XENP018264 1G6_H1.163_L1_IgG1_PVA_/S267K Heavy Chain
EVQLVESGGGLVKPGGSLRLSCAASGFTFSNYWMNWVRQAPGKGLEWVGEIRLKSNNYATHYAEPVKGRFTISRDDSKSTVYLQMNSLKTEDTAVYYCARYYGNYGGYFDVWGAGTLVTVSSASTKGPSVFPLAPSSKSTSGGTAALGCLVKDYFPEPVTVSWNSGALTSGVHTFPAVLQSSGLYSLSSVVTVPSSSLGTQTYICNVNHKPSNTKVDKKVEPKSCDKTHTCPPCPAPPVAGPSVFLFPPKPKDTLMISRTPEVTCVVVDVKHEDPEVKFNWYVDGVEVHNAKTKPREEQYNSTYRVVSVLTVLHQDWLNGKEYKCKVSNKALPAPIEKTISKAKGQPREPQVYTLPPSREEMTKNQVSLTCLVKGFYPSDIAVEWESNGQPENNYKTTPPVLDSDGSFFLYSKLTVDKSRWQQGNVFSCSVMHEALHNHYTQKSLSLSPGK

SEQ ID NO: 13346 - protein, 122 aa, Artificial Sequence; identical to SEQ ID NO: 7818
  Description of Artificial Sequence: Synthetic polypeptide
  VH of XENP018264

SEQ ID NO: 13347 - protein, 5 aa, Artificial Sequence
  Description of Artificial Sequence: Synthetic peptide
  XENP018264 vhCDR1
NYWMN

SEQ ID NO: 13348 - protein, 19 aa, Artificial Sequence
  Description of Artificial Sequence: Synthetic peptide
  XENP018264 vhCDR2
EIRLKSNNYATHYAEPVKG

SEQ ID NO: 13349 - protein, 11 aa, Artificial Sequence
  Description of Artificial Sequence: Synthetic peptide
  XENP018264 vhCDR3
YYGNYGGYFDV

SEQ ID NO: 13350 - protein, 214 aa, Artificial Sequence; identical to SEQ ID NO: 11550
  Description of Artificial Sequence: Synthetic polypeptide
  XENP018264 1G6_H1.163_L1_IgG1_PVA_/S267K Light Chain

SEQ ID NO: 13351 - protein, 107 aa, Artificial Sequence; identical to SEQ ID NO: 6247
  Description of Artificial Sequence: Synthetic polypeptide
  VL of XENP018264

SEQ ID NO: 13352 - protein, 11 aa, Artificial Sequence
  Description of Artificial Sequence: Synthetic peptide
  XENP018264 vlCDR1
RASQSVSNDVA

SEQ ID NO: 13353 - protein, 7 aa, Artificial Sequence
  Description of Artificial Sequence: Synthetic peptide
  XENP018264 vlCDR2
YASHRYT

SEQ ID NO: 13354 - protein, 9 aa, Artificial Sequence
  Description of Artificial Sequence: Synthetic peptide
  XENP018264 vlCDR3
QQDYSSPRT

SEQ ID NO: 13355 - protein, 451 aa, Artificial Sequence
  Description of Artificial Sequence: Synthetic polypeptide
  XENP018265 1G6_H1.164_L1_IgG1_PVA_/S267K Heavy Chain
EVQLVESGGGLVKPGGSLRLSCAASGFTFSNYWMNWVRQAPGKGLEWVGEIRLKSNNYATHYAEPVKGRFTISRDDSKSTVYLQMNSLKTEDTAVYYCVRYYGNYGGYFDVWGAGTLVTVSSASTKGPSVFPLAPSSKSTSGGTAALGCLVKDYFPEPVTVSWNSGALTSGVHTFPAVLQSSGLYSLSSVVTVPSSSLGTQTYICNVNHKPSNTKVDKKVEPKSCDKTHTCPPCPAPPVAGPSVFLFPPKPKDTLMISRTPEVTCVVVDVKHEDPEVKFNWYVDGVEVHNAKTKPREEQYNSTYRVVSVLTVLHQDWLNGKEYKCKVSNKALPAPIEKTISKAKGQPREPQVYTLPPSREEMTKNQVSLTCLVKGFYPSDIAVEWESNGQPENNYKTTPPVLDSDGSFFLYSKLTVDKSRWQQGNVFSCSVMHEALHNHYTQKSLSLSPGK

SEQ ID NO: 13356 - protein, 122 aa, Artificial Sequence; identical to SEQ ID NO: 7827
  Description of Artificial Sequence: Synthetic polypeptide
  VH of XENP018265

SEQ ID NO: 13357 - protein, 5 aa, Artificial Sequence
  Description of Artificial Sequence: Synthetic peptide
  XENP018265 vhCDR1
NYWMN

SEQ ID NO: 13358 - protein, 19 aa, Artificial Sequence
  Description of Artificial Sequence: Synthetic peptide
  XENP018265 vhCDR2
EIRLKSNNYATHYAEPVKG

SEQ ID NO: 13359 - protein, 11 aa, Artificial Sequence
  Description of Artificial Sequence: Synthetic peptide
  XENP018265 vhCDR3
YYGNYGGYFDV

SEQ ID NO: 13360 - protein, 214 aa, Artificial Sequence; identical to SEQ ID NO: 11550
  Description of Artificial Sequence: Synthetic polypeptide
  XENP018265 1G6_H1.164_L1_IgG1_PVA_/S267K Light Chain

SEQ ID NO: 13361 - protein, 107 aa, Artificial Sequence; identical to SEQ ID NO: 6247
  Description of Artificial Sequence: Synthetic polypeptide
  VL of XENP018265

SEQ ID NO: 13362 - protein, 11 aa, Artificial Sequence
  Description of Artificial Sequence: Synthetic peptide
  XENP018265 vlCDR1
RASQSVSNDVA

SEQ ID NO: 13363 - protein, 7 aa, Artificial Sequence
  Description of Artificial Sequence: Synthetic peptide
  XENP018265 vlCDR2
YASHRYT

SEQ ID NO: 13364 - protein, 9 aa, Artificial Sequence
  Description of Artificial Sequence: Synthetic peptide
  XENP018265 vlCDR3
QQDYSSPRT

SEQ ID NO: 13365 - protein, 451 aa, Artificial Sequence
  Description of Artificial Sequence: Synthetic polypeptide
  XENP018266 1G6_H1.165_L1_IgG1_PVA_/S267K Heavy Chain
EVQLVESGGGLVKPGGSLRLSCAASGFTFSNYWMNWVRQAPGKGLEWVGEIRLKSNNYATHYAEPVKGRFTISRDDSKSTVYLQMNSLKTEDTAVYYCTTYYGNYGGYFDVWGAGTLVTVSSASTKGPSVFPLAPSSKSTSGGTAALGCLVKDYFPEPVTVSWNSGALTSGVHTFPAVLQSSGLYSLSSVVTVPSSSLGTQTYICNVNHKPSNTKVDKKVEPKSCDKTHTCPPCPAPPVAGPSVFLFPPKPKDTLMISRTPEVTCVVVDVKHEDPEVKFNWYVDGVEVHNAKTKPREEQYNSTYRVVSVLTVLHQDWLNGKEYKCKVSNKALPAPIEKTISKAKGQPREPQVYTLPPSREEMTKNQVSLTCLVKGFYPSDIAVEWESNGQPENNYKTTPPVLDSDGSFFLYSKLTVDKSRWQQGNVFSCSVMHEALHNHYTQKSLSLSPGK

SEQ ID NO: 13366 - protein, 122 aa, Artificial Sequence; identical to SEQ ID NO: 7836
  Description of Artificial Sequence: Synthetic polypeptide
  VH of XENP018266

SEQ ID NO: 13367 - protein, 5 aa, Artificial Sequence
  Description of Artificial Sequence: Synthetic peptide
  XENP018266 vhCDR1
NYWMN

SEQ ID NO: 13368 - protein, 19 aa, Artificial Sequence
  Description of Artificial Sequence: Synthetic peptide
  XENP018266 vhCDR2
EIRLKSNNYATHYAEPVKG

SEQ ID NO: 13369 - protein, 11 aa, Artificial Sequence
  Description of Artificial Sequence: Synthetic peptide
  XENP018266 vhCDR3
YYGNYGGYFDV

SEQ ID NO: 13370 - protein, 214 aa, Artificial Sequence; identical to SEQ ID NO: 11550
  Description of Artificial Sequence: Synthetic polypeptide
  XENP018266 1G6_H1.165_L1_IgG1_PVA_/S267K Light Chain

SEQ ID NO: 13371 - protein, 107 aa, Artificial Sequence; identical to SEQ ID NO: 6247
  Description of Artificial Sequence: Synthetic polypeptide
  VL of XENP018266

SEQ ID NO: 13372 - protein, 11 aa, Artificial Sequence
  Description of Artificial Sequence: Synthetic peptide
  XENP018266 vlCDR1
RASQSVSNDVA

SEQ ID NO: 13373 - protein, 7 aa, Artificial Sequence
  Description of Artificial Sequence: Synthetic peptide
  XENP018266 vlCDR2
YASHRYT

SEQ ID NO: 13374 - protein, 9 aa, Artificial Sequence
  Description of Artificial Sequence: Synthetic peptide
  XENP018266 vlCDR3
QQDYSSPRT

SEQ ID NO: 13375 - protein, 451 aa, Artificial Sequence
  Description of Artificial Sequence: Synthetic polypeptide
  XENP018267 1G6_H1.166_L1_IgG1_PVA_/S267K Heavy Chain
EVQLVESGGGLVKPGGSLRLSCAASGFTFSNYWMNWVRQAPGKGLEWVGEIRLKSNNYATHYAEPVKGRFTISRDDSKSTVYLQMNSLKTEDTAVYYCTKYYGNYGGYFDVWGAGTLVTVSSASTKGPSVFPLAPSSKSTSGGTAALGCLVKDYFPEPVTVSWNSGALTSGVHTFPAVLQSSGLYSLSSVVTVPSSSLGTQTYICNVNHKPSNTKVDKKVEPKSCDKTHTCPPCPAPPVAGPSVFLFPPKPKDTLMISRTPEVTCVVVDVKHEDPEVKFNWYVDGVEVHNAKTKPREEQYNSTYRVVSVLTVLHQDWLNGKEYKCKVSNKALPAPIEKTISKAKGQPREPQVYTLPPSREEMTKNQVSLTCLVKGFYPSDIAVEWESNGQPENNYKTTPPVLDSDGSFFLYSKLTVDKSRWQQGNVFSCSVMHEALHNHYTQKSLSLSPGK

SEQ ID NO: 13376 - protein, 122 aa, Artificial Sequence; identical to SEQ ID NO: 7845
  Description of Artificial Sequence: Synthetic polypeptide
  VH of XENP018267

SEQ ID NO: 13377 - protein, 5 aa, Artificial Sequence
  Description of Artificial Sequence: Synthetic peptide
  XENP018267 vhCDR1
NYWMN

SEQ ID NO: 13378 - protein, 19 aa, Artificial Sequence
  Description of Artificial Sequence: Synthetic peptide
  XENP018267 vhCDR2
EIRLKSNNYATHYAEPVKG

SEQ ID NO: 13379 - protein, 11 aa, Artificial Sequence
  Description of Artificial Sequence: Synthetic peptide
  XENP018267 vhCDR3
YYGNYGGYFDV

SEQ ID NO: 13380 - protein, 214 aa, Artificial Sequence; identical to SEQ ID NO: 11550
  Description of Artificial Sequence: Synthetic polypeptide
  XENP018267 1G6_H1.166_L1_IgG1_PVA_/S267K Light Chain

SEQ ID NO: 13381 - protein, 107 aa, Artificial Sequence; identical to SEQ ID NO: 6247
  Description of Artificial Sequence: Synthetic polypeptide
  VL of XENP018267

SEQ ID NO: 13382 - protein, 11 aa, Artificial Sequence
  Description of Artificial Sequence: Synthetic peptide
  XENP018267 vlCDR1
RASQSVSNDVA

SEQ ID NO: 13383 - protein, 7 aa, Artificial Sequence
  Description of Artificial Sequence: Synthetic peptide
  XENP018267 vlCDR2
YASHRYT

SEQ ID NO: 13384 - protein, 9 aa, Artificial Sequence
  Description of Artificial Sequence: Synthetic peptide
  XENP018267 vlCDR3
QQDYSSPRT

SEQ ID NO: 13385 - protein, 451 aa, Artificial Sequence
  Description of Artificial Sequence: Synthetic polypeptide
  XENP018268 1G6_H1.167_L1_IgG1_PVA_/S267K Heavy Chain
EVQLVESGGGLVKPGGSLRLSCAASGFTFSNYWMNWVRQAPGKGLEWVGEIRLKSNNYATHYAEPVKGRFTISRDDSKSTVYLQMNSLKTEDTAVYYCTRFYGNYGGYFDVWGAGTLVTVSSASTKGPSVFPLAPSSKSTSGGTAALGCLVKDYFPEPVTVSWNSGALTSGVHTFPAVLQSSGLYSLSSVVTVPSSSLGTQTYICNVNHKPSNTKVDKKVEPKSCDKTHTCPPCPAPPVAGPSVFLFPPKPKDTLMISRTPEVTCVVVDVKHEDPEVKFNWYVDGVEVHNAKTKPREEQYNSTYRVVSVLTVLHQDWLNGKEYKCKVSNKALPAPIEKTISKAKGQPREPQVYTLPPSREEMTKNQVSLTCLVKGFYPSDIAVEWESNGQPENNYKTTPPVLDSDGSFFLYSKLTVDKSRWQQGNVFSCSVMHEALHNHYTQKSLSLSPGK

SEQ ID NO: 13386 - protein, 122 aa, Artificial Sequence; identical to SEQ ID NO: 7854
  Description of Artificial Sequence: Synthetic polypeptide
  VH of XENP018268

SEQ ID NO: 13387 - protein, 5 aa, Artificial Sequence
  Description of Artificial Sequence: Synthetic peptide
  XENP018268 vhCDR1
NYWMN

SEQ ID NO: 13388 - protein, 19 aa, Artificial Sequence
  Description of Artificial Sequence: Synthetic peptide
  XENP018268 vhCDR2
EIRLKSNNYATHYAEPVKG

SEQ ID NO: 13389 - protein, 11 aa, Artificial Sequence
  Description of Artificial Sequence: Synthetic peptide
  XENP018268 vhCDR3
FYGNYGGYFDV

SEQ ID NO: 13390 - protein, 214 aa, Artificial Sequence; identical to SEQ ID NO: 11550
  Description of Artificial Sequence: Synthetic polypeptide
  XENP018268 1G6_H1.167_L1_IgG1_PVA_/S267K Light Chain

SEQ ID NO: 13391 - protein, 107 aa, Artificial Sequence; identical to SEQ ID NO: 6247
  Description of Artificial Sequence: Synthetic polypeptide
  VL of XENP018268

SEQ ID NO: 13392 - protein, 11 aa, Artificial Sequence
  Description of Artificial Sequence: Synthetic peptide
  XENP018268 vlCDR1
RASQSVSNDVA

SEQ ID NO: 13393 - protein, 7 aa, Artificial Sequence
  Description of Artificial Sequence: Synthetic peptide
  XENP018268 vlCDR2
YASHRYT

SEQ ID NO: 13394 - protein, 9 aa, Artificial Sequence
  Description of Artificial Sequence: Synthetic peptide
  XENP018268 vlCDR3
QQDYSSPRT

SEQ ID NO: 13395 - protein, 451 aa, Artificial Sequence
  Description of Artificial Sequence: Synthetic polypeptide
  XENP018269 1G6_H1.168_L1_IgG1_PVA_/S267K Heavy Chain
EVQLVESGGGLVKPGGSLRLSCAASGFTFSNYWMNWVRQAPGKGLEWVGEIRLKSNNYATHYAEPVKGRFTISRDDSKSTVYLQMNSLKTEDTAVYYCTRHYGNYGGYFDVWGAGTLVTVSSASTKGPSVFPLAPSSKSTSGGTAALGCLVKDYFPEPVTVSWNSGALTSGVHTFPAVLQSSGLYSLSSVVTVPSSSLGTQTYICNVNHKPSNTKVDKKVEPKSCDKTHTCPPCPAPPVAGPSVFLFPPKPKDTLMISRTPEVTCVVVDVKHEDPEVKFNWYVDGVEVHNAKTKPREEQYNSTYRVVSVLTVLHQDWLNGKEYKCKVSNKALPAPIEKTISKAKGQPREPQVYTLPPSREEMTKNQVSLTCLVKGFYPSDIAVEWESNGQPENNYKTTPPVLDSDGSFFLYSKLTVDKSRWQQGNVFSCSVMHEALHNHYTQKSLSLSPGK

SEQ ID NO: 13396 - protein, 122 aa, Artificial Sequence; identical to SEQ ID NO: 7863
  Description of Artificial Sequence: Synthetic polypeptide
  VH of XENP018269

SEQ ID NO: 13397 - protein, 5 aa, Artificial Sequence
  Description of Artificial Sequence: Synthetic peptide
  XENP018269 vhCDR1
NYWMN

SEQ ID NO: 13398 - protein, 19 aa, Artificial Sequence
  Description of Artificial Sequence: Synthetic peptide
  XENP018269 vhCDR2
EIRLKSNNYATHYAEPVKG

SEQ ID NO: 13399 - protein, 11 aa, Artificial Sequence
  Description of Artificial Sequence: Synthetic peptide
  XENP018269 vhCDR3
HYGNYGGYFDV

SEQ ID NO: 13400 - protein, 214 aa, Artificial Sequence; identical to SEQ ID NO: 11550
  Description of Artificial Sequence: Synthetic polypeptide
  XENP018269 1G6_H1.168_L1_IgG1_PVA_/S267K Light Chain

SEQ ID NO: 13401 - protein, 107 aa, Artificial Sequence; identical to SEQ ID NO: 6247
  Description of Artificial Sequence: Synthetic polypeptide
  VL of XENP018269

SEQ ID NO: 13402 - protein, 11 aa, Artificial Sequence
  Description of Artificial Sequence: Synthetic peptide
  XENP018269 vlCDR1
RASQSVSNDVA

SEQ ID NO: 13403 - protein, 7 aa, Artificial Sequence
  Description of Artificial Sequence: Synthetic peptide
  XENP018269 vlCDR2
YASHRYT

SEQ ID NO: 13404 - protein, 9 aa, Artificial Sequence
  Description of Artificial Sequence: Synthetic peptide
  XENP018269 vlCDR3
QQDYSSPRT

SEQ ID NO: 13405 - protein, 451 aa, Artificial Sequence
  Description of Artificial Sequence: Synthetic polypeptide
  XENP018270 1G6_H1.169_L1_IgG1_PVA_/S267K Heavy Chain
EVQLVESGGGLVKPGGSLRLSCAASGFTFSNYWMNWVRQAPGKGLEWVGEIRLKSNNYATHYAEPVKGRFTISRDDSKSTVYLQMNSLKTEDTAVYYCTRLYGNYGGYFDVWGAGTLVTVSSASTKGPSVFPLAPSSKSTSGGTAALGCLVKDYFPEPVTVSWNSGALTSGVHTFPAVLQSSGLYSLSSVVTVPSSSLGTQTYICNVNHKPSNTKVDKKVEPKSCDKTHTCPPCPAPPVAGPSVFLFPPKPKDTLMISRTPEVTCVVVDVKHEDPEVKFNWYVDGVEVHNAKTKPREEQYNSTYRVVSVLTVLHQDWLNGKEYKCKVSNKALPAPIEKTISKAKGQPREPQVYTLPPSREEMTKNQVSLTCLVKGFYPSDIAVEWESNGQPENNYKTTPPVLDSDGSFFLYSKLTVDKSRWQQGNVFSCSVMHEALHNHYTQKSLSLSPGK

SEQ ID NO: 13406 - protein, 122 aa, Artificial Sequence; identical to SEQ ID NO: 7872
  Description of Artificial Sequence: Synthetic polypeptide
  VH of XENP018270

SEQ ID NO: 13407 - protein, 5 aa, Artificial Sequence
  Description of Artificial Sequence: Synthetic peptide
  XENP018270 vhCDR1
NYWMN

SEQ ID NO: 13408 - protein, 19 aa, Artificial Sequence
  Description of Artificial Sequence: Synthetic peptide
  XENP018270 vhCDR2
EIRLKSNNYATHYAEPVKG

SEQ ID NO: 13409 - protein, 11 aa, Artificial Sequence
  Description of Artificial Sequence: Synthetic peptide
  XENP018270 vhCDR3
LYGNYGGYFDV

SEQ ID NO: 13410 - protein, 214 aa, Artificial Sequence; identical to SEQ ID NO: 11550
  Description of Artificial Sequence: Synthetic polypeptide
  XENP018270 1G6_H1.169_L1_IgG1_PVA_/S267K Light Chain

SEQ ID NO: 13411 - protein, 107 aa, Artificial Sequence; identical to SEQ ID NO: 6247
  Description of Artificial Sequence: Synthetic polypeptide
  VL of XENP018270

SEQ ID NO: 13412 - protein, 11 aa, Artificial Sequence
  Description of Artificial Sequence: Synthetic peptide
  XENP018270 vlCDR1
RASQSVSNDVA

SEQ ID NO: 13413 - protein, 7 aa, Artificial Sequence
  Description of Artificial Sequence: Synthetic peptide
  XENP018270 vlCDR2
YASHRYT

SEQ ID NO: 13414 - protein, 9 aa, Artificial Sequence
  Description of Artificial Sequence: Synthetic peptide
  XENP018270 vlCDR3
QQDYSSPRT

SEQ ID NO: 13415 - protein, 451 aa, Artificial Sequence
  Description of Artificial Sequence: Synthetic polypeptide
  XENP018271 1G6_H1.170_L1_IgG1_PVA_/S267K Heavy Chain
EVQLVESGGGLVKPGGSLRLSCAASGFTFSNYWMNWVRQAPGKGLEWVGEIRLKSNNYATHYAEPVKGRFTISRDDSKSTVYLQMNSLKTEDTAVYYCTRWYGNYGGYFDVWGAGTLVTVSSASTKGPSVFPLAPSSKSTSGGTAALGCLVKDYFPEPVTVSWNSGALTSGVHTFPAVLQSSGLYSLSSVVTVPSSSLGTQTYICNVNHKPSNTKVDKKVEPKSCDKTHTCPPCPAPPVAGPSVFLFPPKPKDTLMISRTPEVTCVVVDVKHEDPEVKFNWYVDGVEVHNAKTKPREEQYNSTYRVVSVLTVLHQDWLNGKEYKCKVSNKALPAPIEKTISKAKGQPREPQVYTLPPSREEMTKNQVSLTCLVKGFYPSDIAVEWESNGQPENNYKTTPPVLDSDGSFFLYSKLTVDKSRWQQGNVFSCSVMHEALHNHYTQKSLSLSPGK

SEQ ID NO: 13416 - protein, 122 aa, Artificial Sequence; identical to SEQ ID NO: 7881
  Description of Artificial Sequence: Synthetic polypeptide
  VH of XENP018271

SEQ ID NO: 13417 - protein, 5 aa, Artificial Sequence
  Description of Artificial Sequence: Synthetic peptide
  XENP018271 vhCDR1
NYWMN

SEQ ID NO: 13418 - protein, 19 aa, Artificial Sequence
  Description of Artificial Sequence: Synthetic peptide
  XENP018271 vhCDR2
EIRLKSNNYATHYAEPVKG

SEQ ID NO: 13419 - protein, 11 aa, Artificial Sequence
  Description of Artificial Sequence: Synthetic peptide
  XENP018271 vhCDR3
WYGNYGGYFDV

SEQ ID NO: 13420 - protein, 214 aa, Artificial Sequence; identical to SEQ ID NO: 11550
  Description of Artificial Sequence: Synthetic polypeptide
  XENP018271 1G6_H1.170_L1_IgG1_PVA_/S267K Light Chain

SEQ ID NO: 13421 - protein, 107 aa, Artificial Sequence; identical to SEQ ID NO: 6247
  Description of Artificial Sequence: Synthetic polypeptide
  VL of XENP018271

SEQ ID NO: 13422 - protein, 11 aa, Artificial Sequence
  Description of Artificial Sequence: Synthetic peptide
  XENP018271 vlCDR1
RASQSVSNDVA

SEQ ID NO: 13423 - protein, 7 aa, Artificial Sequence
  Description of Artificial Sequence: Synthetic peptide
  XENP018271 vlCDR2
YASHRYT

SEQ ID NO: 13424 - protein, 9 aa, Artificial Sequence
  Description of Artificial Sequence: Synthetic peptide
  XENP018271 vlCDR3
QQDYSSPRT

SEQ ID NO: 13425 - protein, 451 aa, Artificial Sequence
  Description of Artificial Sequence: Synthetic polypeptide
  XENP018272 1G6_H1.171_L1_IgG1_PVA_/S267K Heavy Chain
EVQLVESGGGLVKPGGSLRLSCAASGFTFSNYWMNWVRQAPGKGLEWVGEIRLKSNNYATHYAEPVKGRFTISRDDSKSTVYLQMNSLKTEDTAVYYCTRVYGNYGGYFDVWGAGTLVTVSSASTKGPSVFPLAPSSKSTSGGTAALGCLVKDYFPEPVTVSWNSGALTSGVHTFPAVLQSSGLYSLSSVVTVPSSSLGTQTYICNVNHKPSNTKVDKKVEPKSCDKTHTCPPCPAPPVAGPSVFLFPPKPKDTLMISRTPEVTCVVVDVKHEDPEVKFNWYVDGVEVHNAKTKPREEQYNSTYRVVSVLTVLHQDWLNGKEYKCKVSNKALPAPIEKTISKAKGQPREPQVYTLPPSREEMTKNQVSLTCLVKGFYPSDIAVEWESNGQPENNYKTTPPVLDSDGSFFLYSKLTVDKSRWQQGNVFSCSVMHEALHNHYTQKSLSLSPGK

SEQ ID NO: 13426 - protein, 122 aa, Artificial Sequence; identical to SEQ ID NO: 7890
  Description of Artificial Sequence: Synthetic polypeptide
  VH of XENP018272

SEQ ID NO: 13427 - protein, 5 aa, Artificial Sequence
  Description of Artificial Sequence: Synthetic peptide
  XENP018272 vhCDR1
NYWMN

SEQ ID NO: 13428 - protein, 19 aa, Artificial Sequence
  Description of Artificial Sequence: Synthetic peptide
  XENP018272 vhCDR2
EIRLKSNNYATHYAEPVKG

SEQ ID NO: 13429 - protein, 11 aa, Artificial Sequence
  Description of Artificial Sequence: Synthetic peptide
  XENP018272 vhCDR3
VYGNYGGYFDV

SEQ ID NO: 13430 - protein, 214 aa, Artificial Sequence; identical to SEQ ID NO: 11550
  Description of Artificial Sequence: Synthetic polypeptide
  XENP018272 1G6_H1.171_L1_IgG1_PVA_/S267K Light Chain

SEQ ID NO: 13431 - protein, 107 aa, Artificial Sequence; identical to SEQ ID NO: 6247
  Description of Artificial Sequence: Synthetic polypeptide
  VL of XENP018272

SEQ ID NO: 13432 - protein, 11 aa, Artificial Sequence
  Description of Artificial Sequence: Synthetic peptide
  XENP018272 vlCDR1
RASQSVSNDVA

SEQ ID NO: 13433 - protein, 7 aa, Artificial Sequence
  Description of Artificial Sequence: Synthetic peptide
  XENP018272 vlCDR2
YASHRYT

SEQ ID NO: 13434 - protein, 9 aa, Artificial Sequence
  Description of Artificial Sequence: Synthetic peptide
  XENP018272 vlCDR3
QQDYSSPRT

SEQ ID NO: 13435 - protein, 451 aa, Artificial Sequence
  Description of Artificial Sequence: Synthetic polypeptide
  XENP018273 1G6_H1.172_L1_IgG1_PVA_/S267K Heavy Chain
EVQLVESGGGLVKPGGSLRLSCAASGFTFSNYWMNWVRQAPGKGLEWVGEIRLKSNNYATHYAEPVKGRFTISRDDSKSTVYLQMNSLKTEDTAVYYCTRAYGNYGGYFDVWGAGTLVTVSSASTKGPSVFPLAPSSKSTSGGTAALGCLVKDYFPEPVTVSWNSGALTSGVHTFPAVLQSSGLYSLSSVVTVPSSSLGTQTYICNVNHKPSNTKVDKKVEPKSCDKTHTCPPCPAPPVAGPSVFLFPPKPKDTLMISRTPEVTCVVVDVKHEDPEVKFNWYVDGVEVHNAKTKPREEQYNSTYRVVSVLTVLHQDWLNGKEYKCKVSNKALPAPIEKTISKAKGQPREPQVYTLPPSREEMTKNQVSLTCLVKGFYPSDIAVEWESNGQPENNYKTTPPVLDSDGSFFLYSKLTVDKSRWQQGNVFSCSVMHEALHNHYTQKSLSLSPGK

SEQ ID NO: 13436 - protein, 122 aa, Artificial Sequence; identical to SEQ ID NO: 7899
  Description of Artificial Sequence: Synthetic polypeptide
  VH of XENP018273

SEQ ID NO: 13437 - protein, 5 aa, Artificial Sequence
  Description of Artificial Sequence: Synthetic peptide
  XENP018273 vhCDR1
NYWMN

SEQ ID NO: 13438 - protein, 19 aa, Artificial Sequence
  Description of Artificial Sequence: Synthetic peptide
  XENP018273 vhCDR2
EIRLKSNNYATHYAEPVKG

SEQ ID NO: 13439 - protein, 11 aa, Artificial Sequence
  Description of Artificial Sequence: Synthetic peptide
  XENP018273 vhCDR3
AYGNYGGYFDV

SEQ ID NO: 13440 - protein, 214 aa, Artificial Sequence; identical to SEQ ID NO: 11550
  Description of Artificial Sequence: Synthetic polypeptide
  XENP018273 1G6_H1.172_L1_IgG1_PVA_/S267K Light Chain

SEQ ID NO: 13441 - protein, 107 aa, Artificial Sequence; identical to SEQ ID NO: 6247
  Description of Artificial Sequence: Synthetic polypeptide
  VL of XENP018273

SEQ ID NO: 13442 - protein, 11 aa, Artificial Sequence
  Description of Artificial Sequence: Synthetic peptide
  XENP018273 vlCDR1
RASQSVSNDVA

SEQ ID NO: 13443 - protein, 7 aa, Artificial Sequence
  Description of Artificial Sequence: Synthetic peptide
  XENP018273 vlCDR2
YASHRYT

SEQ ID NO: 13444 - protein, 9 aa, Artificial Sequence
  Description of Artificial Sequence: Synthetic peptide
  XENP018273 vlCDR3
QQDYSSPRT

SEQ ID NO: 13445 - protein, 451 aa, Artificial Sequence
  Description of Artificial Sequence: Synthetic polypeptide
  XENP018274 1G6_H1.173_L1_IgG1_PVA_/S267K Heavy Chain
EVQLVESGGGLVKPGGSLRLSCAASGFTFSNYWMNWVRQAPGKGLEWVGEIRLKSNNYATHYAEPVKGRFTISRDDSKSTVYLQMNSLKTEDTAVYYCTRQYGNYGGYFDVWGAGTLVTVSSASTKGPSVFPLAPSSKSTSGGTAALGCLVKDYFPEPVTVSWNSGALTSGVHTFPAVLQSSGLYSLSSVVTVPSSSLGTQTYICNVNHKPSNTKVDKKVEPKSCDKTHTCPPCPAPPVAGPSVFLFPPKPKDTLMISRTPEVTCVVVDVKHEDPEVKFNWYVDGVEVHNAKTKPREEQYNSTYRVVSVLTVLHQDWLNGKEYKCKVSNKALPAPIEKTISKAKGQPREPQVYTLPPSREEMTKNQVSLTCLVKGFYPSDIAVEWESNGQPENNYKTTPPVLDSDGSFFLYSKLTVDKSRWQQGNVFSCSVMHEALHNHYTQKSLSLSPGK

SEQ ID NO: 13446 - protein, 122 aa, Artificial Sequence; identical to SEQ ID NO: 7908
  Description of Artificial Sequence: Synthetic polypeptide
  VH of XENP018274

SEQ ID NO: 13447 - protein, 5 aa, Artificial Sequence
  Description of Artificial Sequence: Synthetic peptide
  XENP018274 vhCDR1
NYWMN

SEQ ID NO: 13448 - protein, 19 aa, Artificial Sequence
  Description of Artificial Sequence: Synthetic peptide
  XENP018274 vhCDR2
EIRLKSNNYATHYAEPVKG

SEQ ID NO: 13449 - protein, 11 aa, Artificial Sequence
  Description of Artificial Sequence: Synthetic peptide
  XENP018274 vhCDR3
QYGNYGGYFDV

SEQ ID NO: 13450 - protein, 214 aa, Artificial Sequence; identical to SEQ ID NO: 11550
  Description of Artificial Sequence: Synthetic polypeptide
  XENP018274 1G6_H1.173_L1_IgG1_PVA_/S267K Light Chain

SEQ ID NO: 13451 - protein, 107 aa, Artificial Sequence; identical to SEQ ID NO: 6247
  Description of Artificial Sequence: Synthetic polypeptide
  VL of XENP018274

SEQ ID NO: 13452 - protein, 11 aa, Artificial Sequence
  Description of Artificial Sequence: Synthetic peptide
  XENP018274 vlCDR1
RASQSVSNDVA

SEQ ID NO: 13453 - protein, 7 aa, Artificial Sequence
  Description of Artificial Sequence: Synthetic peptide
  XENP018274 vlCDR2
YASHRYT

SEQ ID NO: 13454 - protein, 9 aa, Artificial Sequence
  Description of Artificial Sequence: Synthetic peptide
  XENP018274 vlCDR3
QQDYSSPRT

SEQ ID NO: 13455 - protein, 451 aa, Artificial Sequence
  Description of Artificial Sequence: Synthetic polypeptide
  XENP018275 1G6_H1.174_L1_IgG1_PVA_/S267K Heavy Chain
EVQLVESGGGLVKPGGSLRLSCAASGFTFSNYWMNWVRQAPGKGLEWVGEIRLKSNNYATHYAEPVKGRFTISRDDSKSTVYLQMNSLKTEDTAVYYCTRDYGNYGGYFDVWGAGTLVTVSSASTKGPSVFPLAPSSKSTSGGTAALGCLVKDYFPEPVTVSWNSGALTSGVHTFPAVLQSSGLYSLSSVVTVPSSSLGTQTYICNVNHKPSNTKVDKKVEPKSCDKTHTCPPCPAPPVAGPSVFLFPPKPKDTLMISRTPEVTCVVVDVKHEDPEVKFNWYVDGVEVHNAKTKPREEQYNSTYRVVSVLTVLHQDWLNGKEYKCKVSNKALPAPIEKTISKAKGQPREPQVYTLPPSREEMTKNQVSLTCLVKGFYPSDIAVEWESNGQPENNYKTTPPVLDSDGSFFLYSKLTVDKSRWQQGNVFSCSVMHEALHNHYTQKSLSLSPGK

SEQ ID NO: 13456 - protein, 122 aa, Artificial Sequence; identical to SEQ ID NO: 7917
  Description of Artificial Sequence: Synthetic polypeptide
  VH of XENP018275

SEQ ID NO: 13457 - protein, 5 aa, Artificial Sequence
  Description of Artificial Sequence: Synthetic peptide
  XENP018275 vhCDR1
NYWMN

SEQ ID NO: 13458 - protein, 19 aa, Artificial Sequence
  Description of Artificial Sequence: Synthetic peptide
  XENP018275 vhCDR2
EIRLKSNNYATHYAEPVKG

SEQ ID NO: 13459 - protein, 11 aa, Artificial Sequence
  Description of Artificial Sequence: Synthetic peptide
  XENP018275 vhCDR3
DYGNYGGYFDV

SEQ ID NO: 13460 - protein, 214 aa, Artificial Sequence; identical to SEQ ID NO: 11550
  Description of Artificial Sequence: Synthetic polypeptide
  XENP018275 1G6_H1.174_L1_IgG1_PVA_/S267K Light Chain

SEQ ID NO: 13461 - protein, 107 aa, Artificial Sequence; identical to SEQ ID NO: 6247
  Description of Artificial Sequence: Synthetic polypeptide
  VL of XENP018275

SEQ ID NO: 13462 - protein, 11 aa, Artificial Sequence
  Description of Artificial Sequence: Synthetic peptide
  XENP018275 vlCDR1
RASQSVSNDVA

SEQ ID NO: 13463 - protein, 7 aa, Artificial Sequence
  Description of Artificial Sequence: Synthetic peptide
  XENP018275 vlCDR2
YASHRYT

SEQ ID NO: 13464 - protein, 9 aa, Artificial Sequence
  Description of Artificial Sequence: Synthetic peptide
  XENP018275 vlCDR3
QQDYSSPRT

SEQ ID NO: 13465 - protein, 451 aa, Artificial Sequence
  Description of Artificial Sequence: Synthetic polypeptide
  XENP018276 1G6_H1.175_L1_IgG1_PVA_/S267K Heavy Chain
EVQLVESGGGLVKPGGSLRLSCAASGFTFSNYWMNWVRQAPGKGLEWVGEIRLKSNNYATHYAEPVKGRFTISRDDSKSTVYLQMNSLKTEDTAVYYCTRKYGNYGGYFDVWGAGTLVTVSSASTKGPSVFPLAPSSKSTSGGTAALGCLVKDYFPEPVTVSWNSGALTSGVHTFPAVLQSSGLYSLSSVVTVPSSSLGTQTYICNVNHKPSNTKVDKKVEPKSCDKTHTCPPCPAPPVAGPSVFLFPPKPKDTLMISRTPEVTCVVVDVKHEDPEVKFNWYVDGVEVHNAKTKPREEQYNSTYRVVSVLTVLHQDWLNGKEYKCKVSNKALPAPIEKTISKAKGQPREPQVYTLPPSREEMTKNQVSLTCLVKGFYPSDIAVEWESNGQPENNYKTTPPVLDSDGSFFLYSKLTVDKSRWQQGNVFSCSVMHEALHNHYTQKSLSLSPGK

SEQ ID NO: 13466 - protein, 122 aa, Artificial Sequence; identical to SEQ ID NO: 7926
  Description of Artificial Sequence: Synthetic polypeptide
  VH of XENP018276

SEQ ID NO: 13467 - protein, 5 aa, Artificial Sequence
  Description of Artificial Sequence: Synthetic peptide
  XENP018276 vhCDR1
NYWMN

SEQ ID NO: 13468 - protein, 19 aa, Artificial Sequence
  Description of Artificial Sequence: Synthetic peptide
  XENP018276 vhCDR2
EIRLKSNNYATHYAEPVKG

SEQ ID NO: 13469 - protein, 11 aa, Artificial Sequence
  Description of Artificial Sequence: Synthetic peptide
  XENP018276 vhCDR3
KYGNYGGYFDV

SEQ ID NO: 13470 - protein, 214 aa, Artificial Sequence; identical to SEQ ID NO: 11550
  Description of Artificial Sequence: Synthetic polypeptide
  XENP018276 1G6_H1.175_L1_IgG1_PVA_/S267K Light Chain

SEQ ID NO: 13471 - protein, 107 aa, Artificial Sequence; identical to SEQ ID NO: 6247
  Description of Artificial Sequence: Synthetic polypeptide
  VL of XENP018276

SEQ ID NO: 13472 - protein, 11 aa, Artificial Sequence
  Description of Artificial Sequence: Synthetic peptide
  XENP018276 vlCDR1
RASQSVSNDVA

SEQ ID NO: 13473 - protein, 7 aa, Artificial Sequence
  Description of Artificial Sequence: Synthetic peptide
  XENP018276 vlCDR2
YASHRYT

SEQ ID NO: 13474 - protein, 9 aa, Artificial Sequence
  Description of Artificial Sequence: Synthetic peptide
  XENP018276 vlCDR3
QQDYSSPRT

SEQ ID NO: 13475 - protein, 451 aa, Artificial Sequence
  Description of Artificial Sequence: Synthetic polypeptide
  XENP018277 1G6_H1.176_L1_IgG1_PVA_/S267K Heavy Chain
EVQLVESGGGLVKPGGSLRLSCAASGFTFSNYWMNWVRQAPGKGLEWVGEIRLKSNNYATHYAEPVKGRFTISRDDSKSTVYLQMNSLKTEDTAVYYCTRYFGNYGGYFDVWGAGTLVTVSSASTKGPSVFPLAPSSKSTSGGTAALGCLVKDYFPEPVTVSWNSGALTSGVHTFPAVLQSSGLYSLSSVVTVPSSSLGTQTYICNVNHKPSNTKVDKKVEPKSCDKTHTCPPCPAPPVAGPSVFLFPPKPKDTLMISRTPEVTCVVVDVKHEDPEVKFNWYVDGVEVHNAKTKPREEQYNSTYRVVSVLTVLHQDWLNGKEYKCKVSNKALPAPIEKTISKAKGQPREPQVYTLPPSREEMTKNQVSLTCLVKGFYPSDIAVEWESNGQPENNYKTTPPVLDSDGSFFLYSKLTVDKSRWQQGNVFSCSVMHEALHNHYTQKSLSLSPGK

SEQ ID NO: 13476 - protein, 122 aa, Artificial Sequence; identical to SEQ ID NO: 7935
  Description of Artificial Sequence: Synthetic polypeptide
  VH of XENP018277

SEQ ID NO: 13477 - protein, 5 aa, Artificial Sequence
  Description of Artificial Sequence: Synthetic peptide
  XENP018277 vhCDR1
NYWMN

SEQ ID NO: 13478 - protein, 19 aa, Artificial Sequence
  Description of Artificial Sequence: Synthetic peptide
  XENP018277 vhCDR2
EIRLKSNNYATHYAEPVKG

SEQ ID NO: 13479 - protein, 11 aa, Artificial Sequence
  Description of Artificial Sequence: Synthetic peptide
  XENP018277 vhCDR3
YFGNYGGYFDV

SEQ ID NO: 13480 - protein, 214 aa, Artificial Sequence; identical to SEQ ID NO: 11550
  Description of Artificial Sequence: Synthetic polypeptide
  XENP018277 1G6_H1.176_L1_IgG1_PVA_/S267K Light Chain

SEQ ID NO: 13481 - protein, 107 aa, Artificial Sequence; identical to SEQ ID NO: 6247
  Description of Artificial Sequence: Synthetic polypeptide
  VL of XENP018277

SEQ ID NO: 13482 - protein, 11 aa, Artificial Sequence
  Description of Artificial Sequence: Synthetic peptide
  XENP018277 vlCDR1
RASQSVSNDVA

SEQ ID NO: 13483 - protein, 7 aa, Artificial Sequence
  Description of Artificial Sequence: Synthetic peptide
  XENP018277 vlCDR2
YASHRYT

SEQ ID NO: 13484 - protein, 9 aa, Artificial Sequence
  Description of Artificial Sequence: Synthetic peptide
  XENP018277 vlCDR3
QQDYSSPRT

SEQ ID NO: 13485 - protein, 451 aa, Artificial Sequence
  Description of Artificial Sequence: Synthetic polypeptide
  XENP018278 1G6_H1.177_L1_IgG1_PVA_/S267K Heavy Chain
EVQLVESGGGLVKPGGSLRLSCAASGFTFSNYWMNWVRQAPGKGLEWVGEIRLKSNNYATHYAEPVKGRFTISRDDSKSTVYLQMNSLKTEDTAVYYCTRYHGNYGGYFDVWGAGTLVTVSSASTKGPSVFPLAPSSKSTSGGTAALGCLVKDYFPEPVTVSWNSGALTSGVHTFPAVLQSSGLYSLSSVVTVPSSSLGTQTYICNVNHKPSNTKVDKKVEPKSCDKTHTCPPCPAPPVAGPSVFLFPPKPKDTLMISRTPEVTCVVVDVKHEDPEVKFNWYVDGVEVHNAKTKPREEQYNSTYRVVSVLTVLHQDWLNGKEYKCKVSNKALPAPIEKTISKAKGQPREPQVYTLPPSREEMTKNQVSLTCLVKGFYPSDIAVEWESNGQPENNYKTTPPVLDSDGSFFLYSKLTVDKSRWQQGNVFSCSVMHEALHNHYTQKSLSLSPGK

SEQ ID NO: 13486 - protein, 122 aa, Artificial Sequence; identical to SEQ ID NO: 7944
  Description of Artificial Sequence: Synthetic polypeptide
  VH of XENP018278

SEQ ID NO: 13487 - protein, 5 aa, Artificial Sequence
  Description of Artificial Sequence: Synthetic peptide
  XENP018278 vhCDR1
NYWMN

SEQ ID NO: 13488 - protein, 19 aa, Artificial Sequence
  Description of Artificial Sequence: Synthetic peptide
  XENP018278 vhCDR2
EIRLKSNNYATHYAEPVKG

SEQ ID NO: 13489 - protein, 11 aa, Artificial Sequence
  Description of Artificial Sequence: Synthetic peptide
  XENP018278 vhCDR3
YHGNYGGYFDV

SEQ ID NO: 13490 - protein, 214 aa, Artificial Sequence; identical to SEQ ID NO: 11550
  Description of Artificial Sequence: Synthetic polypeptide
  XENP018278 1G6_H1.177_L1_IgG1_PVA_/S267K Light Chain

SEQ ID NO: 13491 - protein, 107 aa, Artificial Sequence; identical to SEQ ID NO: 6247
  Description of Artificial Sequence: Synthetic polypeptide
  VL of XENP018278

SEQ ID NO: 13492 - protein, 11 aa, Artificial Sequence
  Description of Artificial Sequence: Synthetic peptide
  XENP018278 vlCDR1
RASQSVSNDVA

SEQ ID NO: 13493 - protein, 7 aa, Artificial Sequence
  Description of Artificial Sequence: Synthetic peptide
  XENP018278 vlCDR2
YASHRYT

SEQ ID NO: 13494 - protein, 9 aa, Artificial Sequence
  Description of Artificial Sequence: Synthetic peptide
  XENP018278 vlCDR3
QQDYSSPRT

SEQ ID NO: 13495 - protein, 451 aa, Artificial Sequence
  Description of Artificial Sequence: Synthetic polypeptide
  XENP018279 1G6_H1.178_L1_IgG1_PVA_/S267K Heavy Chain
EVQLVESGGGLVKPGGSLRLSCAASGFTFSNYWMNWVRQAPGKGLEWVGEIRLKSNNYATHYAEPVKGRFTISRDDSKSTVYLQMNSLKTEDTAVYYCTRYLGNYGGYFDVWGAGTLVTVSSASTKGPSVFPLAPSSKSTSGGTAALGCLVKDYFPEPVTVSWNSGALTSGVHTFPAVLQSSGLYSLSSVVTVPSSSLGTQTYICNVNHKPSNTKVDKKVEPKSCDKTHTCPPCPAPPVAGPSVFLFPPKPKDTLMISRTPEVTCVVVDVKHEDPEVKFNWYVDGVEVHNAKTKPREEQYNSTYRVVSVLTVLHQDWLNGKEYKCKVSNKALPAPIEKTISKAKGQPREPQVYTLPPSREEMTKNQVSLTCLVKGFYPSDIAVEWESNGQPENNYKTTPPVLDSDGSFFLYSKLTVDKSRWQQGNVFSCSVMHEALHNHYTQKSLSLSPGK

SEQ ID NO: 13496 - protein, 122 aa, Artificial Sequence; identical to SEQ ID NO: 7953
  Description of Artificial Sequence: Synthetic polypeptide
  VH of XENP018279

SEQ ID NO: 13497 - protein, 5 aa, Artificial Sequence
  Description of Artificial Sequence: Synthetic peptide
  XENP018279 vhCDR1
NYWMN

SEQ ID NO: 13498 - protein, 19 aa, Artificial Sequence
  Description of Artificial Sequence: Synthetic peptide
  XENP018279 vhCDR2
EIRLKSNNYATHYAEPVKG

SEQ ID NO: 13499 - protein, 11 aa, Artificial Sequence
  Description of Artificial Sequence: Synthetic peptide
  XENP018279 vhCDR3
YLGNYGGYFDV

SEQ ID NO: 13500 - protein, 214 aa, Artificial Sequence; identical to SEQ ID NO: 11550
  Description of Artificial Sequence: Synthetic polypeptide
  XENP018279 1G6_H1.178_L1_IgG1_PVA_/S267K Light Chain

SEQ ID NO: 13501 - protein, 107 aa, Artificial Sequence; identical to SEQ ID NO: 6247
  Description of Artificial Sequence: Synthetic polypeptide
  VL of XENP018279

SEQ ID NO: 13502 - protein, 11 aa, Artificial Sequence
  Description of Artificial Sequence: Synthetic peptide
  XENP018279 vlCDR1
RASQSVSNDVA

SEQ ID NO: 13503 - protein, 7 aa, Artificial Sequence
  Description of Artificial Sequence: Synthetic peptide
  XENP018279 vlCDR2
YASHRYT

SEQ ID NO: 13504 - protein, 9 aa, Artificial Sequence
  Description of Artificial Sequence: Synthetic peptide
  XENP018279 vlCDR3
QQDYSSPRT

SEQ ID NO: 13505 - protein, 451 aa, Artificial Sequence
  Description of Artificial Sequence: Synthetic polypeptide
  XENP018280 1G6_H1.179_L1_IgG1_PVA_/S267K Heavy Chain
EVQLVESGGGLVKPGGSLRLSCAASGFTFSNYWMNWVRQAPGKGLEWVGEIRLKSNNYATHYAEPVKGRFTISRDDSKSTVYLQMNSLKTEDTAVYYCTRYWGNYGGYFDVWGAGTLVTVSSASTKGPSVFPLAPSSKSTSGGTAALGCLVKDYFPEPVTVSWNSGALTSGVHTFPAVLQSSGLYSLSSVVTVPSSSLGTQTYICNVNHKPSNTKVDKKVEPKSCDKTHTCPPCPAPPVAGPSVFLFPPKPKDTLMISRTPEVTCVVVDVKHEDPEVKFNWYVDGVEVHNAKTKPREEQYNSTYRVVSVLTVLHQDWLNGKEYKCKVSNKALPAPIEKTISKAKGQPREPQVYTLPPSREEMTKNQVSLTCLVKGFYPSDIAVEWESNGQPENNYKTTPPVLDSDGSFFLYSKLTVDKSRWQQGNVFSCSVMHEALHNHYTQKSLSLSPGK

SEQ ID NO: 13506 - protein, 122 aa, Artificial Sequence; identical to SEQ ID NO: 7962
  Description of Artificial Sequence: Synthetic polypeptide
  VH of XENP018280

SEQ ID NO: 13507 - protein, 5 aa, Artificial Sequence
  Description of Artificial Sequence: Synthetic peptide
  XENP018280 vhCDR1
NYWMN

SEQ ID NO: 13508 - protein, 19 aa, Artificial Sequence
  Description of Artificial Sequence: Synthetic peptide
  XENP018280 vhCDR2
EIRLKSNNYATHYAEPVKG

SEQ ID NO: 13509 - protein, 11 aa, Artificial Sequence
  Description of Artificial Sequence: Synthetic peptide
  XENP018280 vhCDR3
YWGNYGGYFDV

SEQ ID NO: 13510 - protein, 214 aa, Artificial Sequence; identical to SEQ ID NO: 11550
  Description of Artificial Sequence: Synthetic polypeptide
  XENP018280 1G6_H1.179_L1_IgG1_PVA_/S267K Light Chain

SEQ ID NO: 13511 - protein, 107 aa, Artificial Sequence; identical to SEQ ID NO: 6247
  Description of Artificial Sequence: Synthetic polypeptide
  VL of XENP018280

SEQ ID NO: 13512 - protein, 11 aa, Artificial Sequence
  Description of Artificial Sequence: Synthetic peptide
  XENP018280 vlCDR1
RASQSVSNDVA

SEQ ID NO: 13513 - protein, 7 aa, Artificial Sequence
  Description of Artificial Sequence: Synthetic peptide
  XENP018280 vlCDR2
YASHRYT

SEQ ID NO: 13514 - protein, 9 aa, Artificial Sequence
  Description of Artificial Sequence: Synthetic peptide
  XENP018280 vlCDR3
QQDYSSPRT

SEQ ID NO: 13515 - protein, 451 aa, Artificial Sequence
  Description of Artificial Sequence: Synthetic polypeptide
  XENP018281 1G6_H1.180_L1_IgG1_PVA_/S267K Heavy Chain
EVQLVESGGGLVKPGGSLRLSCAASGFTFSNYWMNWVRQAPGKGLEWVGEIRLKSNNYATHYAEPVKGRFTISRDDSKSTVYLQMNSLKTEDTAVYYCTRYVGNYGGYFDVWGAGTLVTVSSASTKGPSVFPLAPSSKSTSGGTAALGCLVKDYFPEPVTVSWNSGALTSGVHTFPAVLQSSGLYSLSSVVTVPSSSLGTQTYICNVNHKPSNTKVDKKVEPKSCDKTHTCPPCPAPPVAGPSVFLFPPKPKDTLMISRTPEVTCVVVDVKHEDPEVKFNWYVDGVEVHNAKTKPREEQYNSTYRVVSVLTVLHQDWLNGKEYKCKVSNKALPAPIEKTISKAKGQPREPQVYTLPPSREEMTKNQVSLTCLVKGFYPSDIAVEWESNGQPENNYKTTPPVLDSDGSFFLYSKLTVDKSRWQQGNVFSCSVMHEALHNHYTQKSLSLSPGK

SEQ ID NO: 13516 - protein, 122 aa, Artificial Sequence; identical to SEQ ID NO: 7971
  Description of Artificial Sequence: Synthetic polypeptide
  VH of XENP018281

SEQ ID NO: 13517 - protein, 5 aa, Artificial Sequence
  Description of Artificial Sequence: Synthetic peptide
  XENP018281 vhCDR1
NYWMN

SEQ ID NO: 13518 - protein, 19 aa, Artificial Sequence
  Description of Artificial Sequence: Synthetic peptide
  XENP018281 vhCDR2
EIRLKSNNYATHYAEPVKG

SEQ ID NO: 13519 - protein, 11 aa, Artificial Sequence
  Description of Artificial Sequence: Synthetic peptide
  XENP018281 vhCDR3
YVGNYGGYFDV

SEQ ID NO: 13520 - protein, 214 aa, Artificial Sequence; identical to SEQ ID NO: 11550
  Description of Artificial Sequence: Synthetic polypeptide
  XENP018281 1G6_H1.180_L1_IgG1_PVA_/S267K Light Chain

SEQ ID NO: 13521 - protein, 107 aa, Artificial Sequence; identical to SEQ ID NO: 6247
  Description of Artificial Sequence: Synthetic polypeptide
  VL of XENP018281

SEQ ID NO: 13522 - protein, 11 aa, Artificial Sequence
  Description of Artificial Sequence: Synthetic peptide
  XENP018281 vlCDR1
RASQSVSNDVA

SEQ ID NO: 13523 - protein, 7 aa, Artificial Sequence
  Description of Artificial Sequence: Synthetic peptide
  XENP018281 vlCDR2
YASHRYT

SEQ ID NO: 13524 - protein, 9 aa, Artificial Sequence
  Description of Artificial Sequence: Synthetic peptide
  XENP018281 vlCDR3
QQDYSSPRT

SEQ ID NO: 13525 - protein, 451 aa, Artificial Sequence
  Description of Artificial Sequence: Synthetic polypeptide
  XENP018282 1G6_H1.181_L1_IgG1_PVA_/S267K Heavy Chain
EVQLVESGGGLVKPGGSLRLSCAASGFTFSNYWMNWVRQAPGKGLEWVGEIRLKSNNYATHYAEPVKGRFTISRDDSKSTVYLQMNSLKTEDTAVYYCTRYAGNYGGYFDVWGAGTLVTVSSASTKGPSVFPLAPSSKSTSGGTAALGCLVKDYFPEPVTVSWNSGALTSGVHTFPAVLQSSGLYSLSSVVTVPSSSLGTQTYICNVNHKPSNTKVDKKVEPKSCDKTHTCPPCPAPPVAGPSVFLFPPKPKDTLMISRTPEVTCVVVDVKHEDPEVKFNWYVDGVEVHNAKTKPREEQYNSTYRVVSVLTVLHQDWLNGKEYKCKVSNKALPAPIEKTISKAKGQPREPQVYTLPPSREEMTKNQVSLTCLVKGFYPSDIAVEWESNGQPENNYKTTPPVLDSDGSFFLYSKLTVDKSRWQQGNVFSCSVMHEALHNHYTQKSLSLSPGK

SEQ ID NO: 13526 - protein, 122 aa, Artificial Sequence; identical to SEQ ID NO: 7980
  Description of Artificial Sequence: Synthetic polypeptide
  VH of XENP018282

SEQ ID NO: 13527 - protein, 5 aa, Artificial Sequence
  Description of Artificial Sequence: Synthetic peptide
  XENP018282 vhCDR1
NYWMN

SEQ ID NO: 13528 - protein, 19 aa, Artificial Sequence
  Description of Artificial Sequence: Synthetic peptide
  XENP018282 vhCDR2
EIRLKSNNYATHYAEPVKG

SEQ ID NO: 13529 - protein, 11 aa, Artificial Sequence
  Description of Artificial Sequence: Synthetic peptide
  XENP018282 vhCDR3
YAGNYGGYFDV

SEQ ID NO: 13530 - protein, 214 aa, Artificial Sequence; identical to SEQ ID NO: 11550
  Description of Artificial Sequence: Synthetic polypeptide
  XENP018282 1G6_H1.181_L1_IgG1_PVA_/S267K Light Chain

SEQ ID NO: 13531 - protein, 107 aa, Artificial Sequence; identical to SEQ ID NO: 6247
  Description of Artificial Sequence: Synthetic polypeptide
  VL of XENP018282

SEQ ID NO: 13532 - protein, 11 aa, Artificial Sequence
  Description of Artificial Sequence: Synthetic peptide
  XENP018282 vlCDR1
RASQSVSNDVA

SEQ ID NO: 13533 - protein, 7 aa, Artificial Sequence
  Description of Artificial Sequence: Synthetic peptide
  XENP018282 vlCDR2
YASHRYT

SEQ ID NO: 13534 - protein, 9 aa, Artificial Sequence
  Description of Artificial Sequence: Synthetic peptide
  XENP018282 vlCDR3
QQDYSSPRT

SEQ ID NO: 13535 - protein, 451 aa, Artificial Sequence
  Description of Artificial Sequence: Synthetic polypeptide
  XENP018283 1G6_H1.182_L1_IgG1_PVA_/S267K Heavy Chain
EVQLVESGGGLVKPGGSLRLSCAASGFTFSNYWMNWVRQAPGKGLEWVGEIRLKSNNYATHYAEPVKGRFTISRDDSKSTVYLQMNSLKTEDTAVYYCTRYQGNYGGYFDVWGAGTLVTVSSASTKGPSVFPLAPSSKSTSGGTAALGCLVKDYFPEPVTVSWNSGALTSGVHTFPAVLQSSGLYSLSSVVTVPSSSLGTQTYICNVNHKPSNTKVDKKVEPKSCDKTHTCPPCPAPPVAGPSVFLFPPKPKDTLMISRTPEVTCVVVDVKHEDPEVKFNWYVDGVEVHNAKTKPREEQYNSTYRVVSVLTVLHQDWLNGKEYKCKVSNKALPAPIEKTISKAKGQPREPQVYTLPPSREEMTKNQVSLTCLVKGFYPSDIAVEWESNGQPENNYKTTPPVLDSDGSFFLYSKLTVDKSRWQQGNVFSCSVMHEALHNHYTQKSLSLSPGK

SEQ ID NO: 13536 - protein, 122 aa, Artificial Sequence; identical to SEQ ID NO: 7989
  Description of Artificial Sequence: Synthetic polypeptide
  VH of XENP018283

SEQ ID NO: 13537 - protein, 5 aa, Artificial Sequence
  Description of Artificial Sequence: Synthetic peptide
  XENP018283 vhCDR1
NYWMN

SEQ ID NO: 13538 - protein, 19 aa, Artificial Sequence
  Description of Artificial Sequence: Synthetic peptide
  XENP018283 vhCDR2
EIRLKSNNYATHYAEPVKG

SEQ ID NO: 13539 - protein, 11 aa, Artificial Sequence
  Description of Artificial Sequence: Synthetic peptide
  XENP018283 vhCDR3
YQGNYGGYFDV

SEQ ID NO: 13540 - protein, 214 aa, Artificial Sequence; identical to SEQ ID NO: 11550
  Description of Artificial Sequence: Synthetic polypeptide
  XENP018283 1G6_H1.182_L1_IgG1_PVA_/S267K Light Chain

SEQ ID NO: 13541 - protein, 107 aa, Artificial Sequence; identical to SEQ ID NO: 6247
  Description of Artificial Sequence: Synthetic polypeptide
  VL of XENP018283

SEQ ID NO: 13542 - protein, 11 aa, Artificial Sequence
  Description of Artificial Sequence: Synthetic peptide
  XENP018283 vlCDR1
RASQSVSNDVA

SEQ ID NO: 13543 - protein, 7 aa, Artificial Sequence
  Description of Artificial Sequence: Synthetic peptide
  XENP018283 vlCDR2
YASHRYT

SEQ ID NO: 13544 - protein, 9 aa, Artificial Sequence
  Description of Artificial Sequence: Synthetic peptide
  XENP018283 vlCDR3
QQDYSSPRT

SEQ ID NO: 13545 - protein, 451 aa, Artificial Sequence
  Description of Artificial Sequence: Synthetic polypeptide
  XENP018284 1G6_H1.183_L1_IgG1_PVA_/S267K Heavy Chain
EVQLVESGGGLVKPGGSLRLSCAASGFTFSNYWMNWVRQAPGKGLEWVGEIRLKSNNYATHYAEPVKGRFTISRDDSKSTVYLQMNSLKTEDTAVYYCTRYDGNYGGYFDVWGAGTLVTVSSASTKGPSVFPLAPSSKSTSGGTAALGCLVKDYFPEPVTVSWNSGALTSGVHTFPAVLQSSGLYSLSSVVTVPSSSLGTQTYICNVNHKPSNTKVDKKVEPKSCDKTHTCPPCPAPPVAGPSVFLFPPKPKDTLMISRTPEVTCVVVDVKHEDPEVKFNWYVDGVEVHNAKTKPREEQYNSTYRVVSVLTVLHQDWLNGKEYKCKVSNKALPAPIEKTISKAKGQPREPQVYTLPPSREEMTKNQVSLTCLVKGFYPSDIAVEWESNGQPENNYKTTPPVLDSDGSFFLYSKLTVDKSRWQQGNVFSCSVMHEALHNHYTQKSLSLSPGK

SEQ ID NO: 13546 - protein, 122 aa, Artificial Sequence; identical to SEQ ID NO: 7998
  Description of Artificial Sequence: Synthetic polypeptide
  VH of XENP018284

SEQ ID NO: 13547 - protein, 5 aa, Artificial Sequence
  Description of Artificial Sequence: Synthetic peptide
  XENP018284 vhCDR1
NYWMN

SEQ ID NO: 13548 - protein, 19 aa, Artificial Sequence
  Description of Artificial Sequence: Synthetic peptide
  XENP018284 vhCDR2
EIRLKSNNYATHYAEPVKG

SEQ ID NO: 13549 - protein, 11 aa, Artificial Sequence
  Description of Artificial Sequence: Synthetic peptide
  XENP018284 vhCDR3
YDGNYGGYFDV

SEQ ID NO: 13550 - protein, 214 aa, Artificial Sequence; identical to SEQ ID NO: 11550
  Description of Artificial Sequence: Synthetic polypeptide
  XENP018284 1G6_H1.183_L1_IgG1_PVA_/S267K Light Chain

SEQ ID NO: 13551 - protein, 107 aa, Artificial Sequence; identical to SEQ ID NO: 6247
  Description of Artificial Sequence: Synthetic polypeptide
  VL of XENP018284

SEQ ID NO: 13552 - protein, 11 aa, Artificial Sequence
  Description of Artificial Sequence: Synthetic peptide
  XENP018284 vlCDR1
RASQSVSNDVA

SEQ ID NO: 13553 - protein, 7 aa, Artificial Sequence
  Description of Artificial Sequence: Synthetic peptide
  XENP018284 vlCDR2
YASHRYT

SEQ ID NO: 13554 - protein, 9 aa, Artificial Sequence
  Description of Artificial Sequence: Synthetic peptide
  XENP018284 vlCDR3
QQDYSSPRT

SEQ ID NO: 13555 - protein, 451 aa, Artificial Sequence
  Description of Artificial Sequence: Synthetic polypeptide
  XENP018285 1G6_H1.184_L1_IgG1_PVA_/S267K Heavy Chain
EVQLVESGGGLVKPGGSLRLSCAASGFTFSNYWMNWVRQAPGKGLEWVGEIRLKSNNYATHYAEPVKGRFTISRDDSKSTVYLQMNSLKTEDTAVYYCTRYKGNYGGYFDVWGAGTLVTVSSASTKGPSVFPLAPSSKSTSGGTAALGCLVKDYFPEPVTVSWNSGALTSGVHTFPAVLQSSGLYSLSSVVTVPSSSLGTQTYICNVNHKPSNTKVDKKVEPKSCDKTHTCPPCPAPPVAGPSVFLFPPKPKDTLMISRTPEVTCVVVDVKHEDPEVKFNWYVDGVEVHNAKTKPREEQYNSTYRVVSVLTVLHQDWLNGKEYKCKVSNKALPAPIEKTISKAKGQPREPQVYTLPPSREEMTKNQVSLTCLVKGFYPSDIAVEWESNGQPENNYKTTPPVLDSDGSFFLYSKLTVDKSRWQQGNVFSCSVMHEALHNHYTQKSLSLSPGK

SEQ ID NO: 13556 - protein, 122 aa, Artificial Sequence; identical to SEQ ID NO: 8007
  Description of Artificial Sequence: Synthetic polypeptide
  VH of XENP018285

SEQ ID NO: 13557 - protein, 5 aa, Artificial Sequence
  Description of Artificial Sequence: Synthetic peptide
  XENP018285 vhCDR1
NYWMN

SEQ ID NO: 13558 - protein, 19 aa, Artificial Sequence
  Description of Artificial Sequence: Synthetic peptide
  XENP018285 vhCDR2
EIRLKSNNYATHYAEPVKG

SEQ ID NO: 13559 - protein, 11 aa, Artificial Sequence
  Description of Artificial Sequence: Synthetic peptide
  XENP018285 vhCDR3
YKGNYGGYFDV

SEQ ID NO: 13560 - protein, 214 aa, Artificial Sequence; identical to SEQ ID NO: 11550
  Description of Artificial Sequence: Synthetic polypeptide
  XENP018285 1G6_H1.184_L1_IgG1_PVA_/S267K Light Chain

SEQ ID NO: 13561 - protein, 107 aa, Artificial Sequence; identical to SEQ ID NO: 6247
  Description of Artificial Sequence: Synthetic polypeptide
  VL of XENP018285

SEQ ID NO: 13562 - protein, 11 aa, Artificial Sequence
  Description of Artificial Sequence: Synthetic peptide
  XENP018285 vlCDR1
RASQSVSNDVA

SEQ ID NO: 13563 - protein, 7 aa, Artificial Sequence
  Description of Artificial Sequence: Synthetic peptide
  XENP018285 vlCDR2
YASHRYT

SEQ ID NO: 13564 - protein, 9 aa, Artificial Sequence
  Description of Artificial Sequence: Synthetic peptide
  XENP018285 vlCDR3
QQDYSSPRT

SEQ ID NO: 13565 - protein, 451 aa, Artificial Sequence
  Description of Artificial Sequence: Synthetic polypeptide
  XENP018286 1G6_H1.185_L1_IgG1_PVA_/S267K Heavy Chain
EVQLVESGGGLVKPGGSLRLSCAASGFTFSNYWMNWVRQAPGKGLEWVGEIRLKSNNYATHYAEPVKGRFTISRDDSKSTVYLQMNSLKTEDTAVYYCTRYYANYGGYFDVWGAGTLVTVSSASTKGPSVFPLAPSSKSTSGGTAALGCLVKDYFPEPVTVSWNSGALTSGVHTFPAVLQSSGLYSLSSVVTVPSSSLGTQTYICNVNHKPSNTKVDKKVEPKSCDKTHTCPPCPAPPVAGPSVFLFPPKPKDTLMISRTPEVTCVVVDVKHEDPEVKFNWYVDGVEVHNAKTKPREEQYNSTYRVVSVLTVLHQDWLNGKEYKCKVSNKALPAPIEKTISKAKGQPREPQVYTLPPSREEMTKNQVSLTCLVKGFYPSDIAVEWESNGQPENNYKTTPPVLDSDGSFFLYSKLTVDKSRWQQGNVFSCSVMHEALHNHYTQKSLSLSPGK

SEQ ID NO: 13566 - protein, 122 aa, Artificial Sequence; identical to SEQ ID NO: 8016
  Description of Artificial Sequence: Synthetic polypeptide
  VH of XENP018286

SEQ ID NO: 13567 - protein, 5 aa, Artificial Sequence
  Description of Artificial Sequence: Synthetic peptide
  XENP018286 vhCDR1
NYWMN

SEQ ID NO: 13568 - protein, 19 aa, Artificial Sequence
  Description of Artificial Sequence: Synthetic peptide
  XENP018286 vhCDR2
EIRLKSNNYATHYAEPVKG

SEQ ID NO: 13569 - protein, 11 aa, Artificial Sequence
  Description of Artificial Sequence: Synthetic peptide
  XENP018286 vhCDR3
YYANYGGYFDV

SEQ ID NO: 13570 - protein, 214 aa, Artificial Sequence; identical to SEQ ID NO: 11550
  Description of Artificial Sequence: Synthetic polypeptide
  XENP018286 1G6_H1.185_L1_IgG1_PVA_/S267K Light Chain

SEQ ID NO: 13571 - protein, 107 aa, Artificial Sequence; identical to SEQ ID NO: 6247
  Description of Artificial Sequence: Synthetic polypeptide
  VL of XENP018286

SEQ ID NO: 13572 - protein, 11 aa, Artificial Sequence
  Description of Artificial Sequence: Synthetic peptide
  XENP018286 vlCDR1
RASQSVSNDVA

SEQ ID NO: 13573 - protein, 7 aa, Artificial Sequence
  Description of Artificial Sequence: Synthetic peptide
  XENP018286 vlCDR2
YASHRYT

SEQ ID NO: 13574 - protein, 9 aa, Artificial Sequence
  Description of Artificial Sequence: Synthetic peptide
  XENP018286 vlCDR3
QQDYSSPRT

SEQ ID NO: 13575 - protein, 451 aa, Artificial Sequence
  Description of Artificial Sequence: Synthetic polypeptide
  XENP018287 1G6_H1.186_L1_IgG1_PVA_/S267K Heavy Chain
EVQLVESGGGLVKPGGSLRLSCAASGFTFSNYWMNWVRQAPGKGLEWVGEIRLKSNNYATHYAEPVKGRFTISRDDSKSTVYLQMNSLKTEDTAVYYCTRYYSNYGGYFDVWGAGTLVTVSSASTKGPSVFPLAPSSKSTSGGTAALGCLVKDYFPEPVTVSWNSGALTSGVHTFPAVLQSSGLYSLSSVVTVPSSSLGTQTYICNVNHKPSNTKVDKKVEPKSCDKTHTCPPCPAPPVAGPSVFLFPPKPKDTLMISRTPEVTCVVVDVKHEDPEVKFNWYVDGVEVHNAKTKPREEQYNSTYRVVSVLTVLHQDWLNGKEYKCKVSNKALPAPIEKTISKAKGQPREPQVYTLPPSREEMTKNQVSLTCLVKGFYPSDIAVEWESNGQPENNYKTTPPVLDSDGSFFLYSKLTVDKSRWQQGNVFSCSVMHEALHNHYTQKSLSLSPGK

SEQ ID NO: 13576 - protein, 122 aa, Artificial Sequence; identical to SEQ ID NO: 8025
  Description of Artificial Sequence: Synthetic polypeptide
  VH of XENP018287

SEQ ID NO: 13577 - protein, 5 aa, Artificial Sequence
  Description of Artificial Sequence: Synthetic peptide
  XENP018287 vhCDR1
NYWMN

SEQ ID NO: 13578 - protein, 19 aa, Artificial Sequence
  Description of Artificial Sequence: Synthetic peptide
  XENP018287 vhCDR2
EIRLKSNNYATHYAEPVKG

SEQ ID NO: 13579 - protein, 11 aa, Artificial Sequence
  Description of Artificial Sequence: Synthetic peptide
  XENP018287 vhCDR3
YYSNYGGYFDV

SEQ ID NO: 13580 - protein, 214 aa, Artificial Sequence; identical to SEQ ID NO: 11550
  Description of Artificial Sequence: Synthetic polypeptide
  XENP018287 1G6_H1.186_L1_IgG1_PVA_/S267K Light Chain

SEQ ID NO: 13581 - protein, 107 aa, Artificial Sequence; identical to SEQ ID NO: 6247
  Description of Artificial Sequence: Synthetic polypeptide
  VL of XENP018287

SEQ ID NO: 13582 - protein, 11 aa, Artificial Sequence
  Description of Artificial Sequence: Synthetic peptide
  XENP018287 vlCDR1
RASQSVSNDVA

SEQ ID NO: 13583 - protein, 7 aa, Artificial Sequence
  Description of Artificial Sequence: Synthetic peptide
  XENP018287 vlCDR2
YASHRYT

SEQ ID NO: 13584 - protein, 9 aa, Artificial Sequence
  Description of Artificial Sequence: Synthetic peptide
  XENP018287 vlCDR3
QQDYSSPRT

SEQ ID NO: 13585 - protein, 451 aa, Artificial Sequence
  Description of Artificial Sequence: Synthetic polypeptide
  XENP018288 1G6_H1.187_L1_IgG1_PVA_/S267K Heavy Chain
EVQLVESGGGLVKPGGSLRLSCAASGFTFSNYWMNWVRQAPGKGLEWVGEIRLKSNNYATHYAEPVKGRFTISRDDSKSTVYLQMNSLKTEDTAVYYCTRYYTNYGGYFDVWGAGTLVTVSSASTKGPSVFPLAPSSKSTSGGTAALGCLVKDYFPEPVTVSWNSGALTSGVHTFPAVLQSSGLYSLSSVVTVPSSSLGTQTYICNVNHKPSNTKVDKKVEPKSCDKTHTCPPCPAPPVAGPSVFLFPPKPKDTLMISRTPEVTCVVVDVKHEDPEVKFNWYVDGVEVHNAKTKPREEQYNSTYRVVSVLTVLHQDWLNGKEYKCKVSNKALPAPIEKTISKAKGQPREPQVYTLPPSREEMTKNQVSLTCLVKGFYPSDIAVEWESNGQPENNYKTTPPVLDSDGSFFLYSKLTVDKSRWQQGNVFSCSVMHEALHNHYTQKSLSLSPGK

SEQ ID NO: 13586 - protein, 122 aa, Artificial Sequence; identical to SEQ ID NO: 8034
  Description of Artificial Sequence: Synthetic polypeptide
  VH of XENP018288

SEQ ID NO: 13587 - protein, 5 aa, Artificial Sequence
  Description of Artificial Sequence: Synthetic peptide
  XENP018288 vhCDR1
NYWMN

SEQ ID NO: 13588 - protein, 19 aa, Artificial Sequence
  Description of Artificial Sequence: Synthetic peptide
  XENP018288 vhCDR2
EIRLKSNNYATHYAEPVKG

SEQ ID NO: 13589 - protein, 11 aa, Artificial Sequence
  Description of Artificial Sequence: Synthetic peptide
  XENP018288 vhCDR3
YYTNYGGYFDV

SEQ ID NO: 13590 - protein, 214 aa, Artificial Sequence; identical to SEQ ID NO: 11550
  Description of Artificial Sequence: Synthetic polypeptide
  XENP018288 1G6_H1.187_L1_IgG1_PVA_/S267K Light Chain

SEQ ID NO: 13591 - protein, 107 aa, Artificial Sequence; identical to SEQ ID NO: 6247
  Description of Artificial Sequence: Synthetic polypeptide
  VL of XENP018288

SEQ ID NO: 13592 - protein, 11 aa, Artificial Sequence
  Description of Artificial Sequence: Synthetic peptide
  XENP018288 vlCDR1
RASQSVSNDVA

SEQ ID NO: 13593 - protein, 7 aa, Artificial Sequence
  Description of Artificial Sequence: Synthetic peptide
  XENP018288 vlCDR2
YASHRYT

SEQ ID NO: 13594 - protein, 9 aa, Artificial Sequence
  Description of Artificial Sequence: Synthetic peptide
  XENP018288 vlCDR3
QQDYSSPRT

SEQ ID NO: 13595 - protein, 451 aa, Artificial Sequence
  Description of Artificial Sequence: Synthetic polypeptide
  XENP018289 1G6_H1.188_L1_IgG1_PVA_/S267K Heavy Chain
EVQLVESGGGLVKPGGSLRLSCAASGFTFSNYWMNWVRQAPGKGLEWVGEIRLKSNNYATHYAEPVKGRFTISRDDSKSTVYLQMNSLKTEDTAVYYCTRYYQNYGGYFDVWGAGTLVTVSSASTKGPSVFPLAPSSKSTSGGTAALGCLVKDYFPEPVTVSWNSGALTSGVHTFPAVLQSSGLYSLSSVVTVPSSSLGTQTYICNVNHKPSNTKVDKKVEPKSCDKTHTCPPCPAPPVAGPSVFLFPPKPKDTLMISRTPEVTCVVVDVKHEDPEVKFNWYVDGVEVHNAKTKPREEQYNSTYRVVSVLTVLHQDWLNGKEYKCKVSNKALPAPIEKTISKAKGQPREPQVYTLPPSREEMTKNQVSLTCLVKGFYPSDIAVEWESNGQPENNYKTTPPVLDSDGSFFLYSKLTVDKSRWQQGNVFSCSVMHEALHNHYTQKSLSLSPGK

SEQ ID NO: 13596 - protein, 122 aa, Artificial Sequence; identical to SEQ ID NO: 8043
  Description of Artificial Sequence: Synthetic polypeptide
  VH of XENP018289

SEQ ID NO: 13597 - protein, 5 aa, Artificial Sequence
  Description of Artificial Sequence: Synthetic peptide
  XENP018289 vhCDR1
NYWMN

SEQ ID NO: 13598 - protein, 19 aa, Artificial Sequence
  Description of Artificial Sequence: Synthetic peptide
  XENP018289 vhCDR2
EIRLKSNNYATHYAEPVKG

SEQ ID NO: 13599 - protein, 11 aa, Artificial Sequence
  Description of Artificial Sequence: Synthetic peptide
  XENP018289 vhCDR3
YYQNYGGYFDV

SEQ ID NO: 13600 - protein, 214 aa, Artificial Sequence; identical to SEQ ID NO: 11550
  Description of Artificial Sequence: Synthetic polypeptide
  XENP018289 1G6_H1.188_L1_IgG1_PVA_/S267K Light Chain

SEQ ID NO: 13601 - protein, 107 aa, Artificial Sequence; identical to SEQ ID NO: 6247
  Description of Artificial Sequence: Synthetic polypeptide
  VL of XENP018289

SEQ ID NO: 13602 - protein, 11 aa, Artificial Sequence
  Description of Artificial Sequence: Synthetic peptide
  XENP018289 vlCDR1
RASQSVSNDVA

SEQ ID NO: 13603 - protein, 7 aa, Artificial Sequence
  Description of Artificial Sequence: Synthetic peptide
  XENP018289 vlCDR2
YASHRYT

SEQ ID NO: 13604 - protein, 9 aa, Artificial Sequence
  Description of Artificial Sequence: Synthetic peptide
  XENP018289 vlCDR3
QQDYSSPRT

SEQ ID NO: 13605 - protein, 451 aa, Artificial Sequence
  Description of Artificial Sequence: Synthetic polypeptide
  XENP018290 1G6_H1.189_L1_IgG1_PVA_/S267K Heavy Chain
EVQLVESGGGLVKPGGSLRLSCAASGFTFSNYWMNWVRQAPGKGLEWVGEIRLKSNNYATHYAEPVKGRFTISRDDSKSTVYLQMNSLKTEDTAVYYCTRYYHNYGGYFDVWGAGTLVTVSSASTKGPSVFPLAPSSKSTSGGTAALGCLVKDYFPEPVTVSWNSGALTSGVHTFPAVLQSSGLYSLSSVVTVPSSSLGTQTYICNVNHKPSNTKVDKKVEPKSCDKTHTCPPCPAPPVAGPSVFLFPPKPKDTLMISRTPEVTCVVVDVKHEDPEVKFNWYVDGVEVHNAKTKPREEQYNSTYRVVSVLTVLHQDWLNGKEYKCKVSNKALPAPIEKTISKAKGQPREPQVYTLPPSREEMTKNQVSLTCLVKGFYPSDIAVEWESNGQPENNYKTTPPVLDSDGSFFLYSKLTVDKSRWQQGNVFSCSVMHEALHNHYTQKSLSLSPGK

SEQ ID NO: 13606 - protein, 122 aa, Artificial Sequence; identical to SEQ ID NO: 8052
  Description of Artificial Sequence: Synthetic polypeptide
  VH of XENP018290

SEQ ID NO: 13607 - protein, 5 aa, Artificial Sequence
  Description of Artificial Sequence: Synthetic peptide
  XENP018290 vhCDR1
NYWMN

SEQ ID NO: 13608 - protein, 19 aa, Artificial Sequence
  Description of Artificial Sequence: Synthetic peptide
  XENP018290 vhCDR2
EIRLKSNNYATHYAEPVKG

SEQ ID NO: 13609 - protein, 11 aa, Artificial Sequence
  Description of Artificial Sequence: Synthetic peptide
  XENP018290 vhCDR3
YYHNYGGYFDV

SEQ ID NO: 13610 - protein, 214 aa, Artificial Sequence; identical to SEQ ID NO: 11550
  Description of Artificial Sequence: Synthetic polypeptide
  XENP018290 1G6_H1.189_L1_IgG1_PVA_/S267K Light Chain

SEQ ID NO: 13611 - protein, 107 aa, Artificial Sequence; identical to SEQ ID NO: 6247
  Description of Artificial Sequence: Synthetic polypeptide
  VL of XENP018290

SEQ ID NO: 13612 - protein, 11 aa, Artificial Sequence
  Description of Artificial Sequence: Synthetic peptide
  XENP018290 vlCDR1
RASQSVSNDVA

SEQ ID NO: 13613 - protein, 7 aa, Artificial Sequence
  Description of Artificial Sequence: Synthetic peptide
  XENP018290 vlCDR2
YASHRYT

SEQ ID NO: 13614 - protein, 9 aa, Artificial Sequence
  Description of Artificial Sequence: Synthetic peptide
  XENP018290 vlCDR3
QQDYSSPRT

SEQ ID NO: 13615 - protein, 451 aa, Artificial Sequence
  Description of Artificial Sequence: Synthetic polypeptide
  XENP018291 1G6_H1.190_L1_IgG1_PVA_/S267K Heavy Chain
EVQLVESGGGLVKPGGSLRLSCAASGFTFSNYWMNWVRQAPGKGLEWVGEIRLKSNNYATHYAEPVKGRFTISRDDSKSTVYLQMNSLKTEDTAVYYCTRYYDNYGGYFDVWGAGTLVTVSSASTKGPSVFPLAPSSKSTSGGTAALGCLVKDYFPEPVTVSWNSGALTSGVHTFPAVLQSSGLYSLSSVVTVPSSSLGTQTYICNVNHKPSNTKVDKKVEPKSCDKTHTCPPCPAPPVAGPSVFLFPPKPKDTLMISRTPEVTCVVVDVKHEDPEVKFNWYVDGVEVHNAKTKPREEQYNSTYRVVSVLTVLHQDWLNGKEYKCKVSNKALPAPIEKTISKAKGQPREPQVYTLPPSREEMTKNQVSLTCLVKGFYPSDIAVEWESNGQPENNYKTTPPVLDSDGSFFLYSKLTVDKSRWQQGNVFSCSVMHEALHNHYTQKSLSLSPGK

SEQ ID NO: 13616 - protein, 122 aa, Artificial Sequence; identical to SEQ ID NO: 8061
  Description of Artificial Sequence: Synthetic polypeptide
  VH of XENP018291

SEQ ID NO: 13617 - protein, 5 aa, Artificial Sequence
  Description of Artificial Sequence: Synthetic peptide
  XENP018291 vhCDR1
NYWMN

SEQ ID NO: 13618 - protein, 19 aa, Artificial Sequence
  Description of Artificial Sequence: Synthetic peptide
  XENP018291 vhCDR2
EIRLKSNNYATHYAEPVKG

SEQ ID NO: 13619 - protein, 11 aa, Artificial Sequence
  Description of Artificial Sequence: Synthetic peptide
  XENP018291 vhCDR3
YYDNYGGYFDV

SEQ ID NO: 13620 - protein, 214 aa, Artificial Sequence; identical to SEQ ID NO: 11550
  Description of Artificial Sequence: Synthetic polypeptide
  XENP018291 1G6_H1.190_L1_IgG1_PVA_/S267K Light Chain

SEQ ID NO: 13621 - protein, 107 aa, Artificial Sequence; identical to SEQ ID NO: 6247
  Description of Artificial Sequence: Synthetic polypeptide
  VL of XENP018291

SEQ ID NO: 13622 - protein, 11 aa, Artificial Sequence
  Description of Artificial Sequence: Synthetic peptide
  XENP018291 vlCDR1
RASQSVSNDVA

SEQ ID NO: 13623 - protein, 7 aa, Artificial Sequence
  Description of Artificial Sequence: Synthetic peptide
  XENP018291 vlCDR2
YASHRYT

SEQ ID NO: 13624 - protein, 9 aa, Artificial Sequence
  Description of Artificial Sequence: Synthetic peptide
  XENP018291 vlCDR3
QQDYSSPRT

SEQ ID NO: 13625 - protein, 451 aa, Artificial Sequence
  Description of Artificial Sequence: Synthetic polypeptide
  XENP018292 1G6_H1.191_L1_IgG1_PVA_/S267K Heavy Chain
EVQLVESGGGLVKPGGSLRLSCAASGFTFSNYWMNWVRQAPGKGLEWVGEIRLKSNNYATHYAEPVKGRFTISRDDSKSTVYLQMNSLKTEDTAVYYCTRYYKNYGGYFDVWGAGTLVTVSSASTKGPSVFPLAPSSKSTSGGTAALGCLVKDYFPEPVTVSWNSGALTSGVHTFPAVLQSSGLYSLSSVVTVPSSSLGTQTYICNVNHKPSNTKVDKKVEPKSCDKTHTCPPCPAPPVAGPSVFLFPPKPKDTLMISRTPEVTCVVVDVKHEDPEVKFNWYVDGVEVHNAKTKPREEQYNSTYRVVSVLTVLHQDWLNGKEYKCKVSNKALPAPIEKTISKAKGQPREPQVYTLPPSREEMTKNQVSLTCLVKGFYPSDIAVEWESNGQPENNYKTTPPVLDSDGSFFLYSKLTVDKSRWQQGNVFSCSVMHEALHNHYTQKSLSLSPGK

SEQ ID NO: 13626 - protein, 122 aa, Artificial Sequence; identical to SEQ ID NO: 8070
  Description of Artificial Sequence: Synthetic polypeptide
  VH of XENP018292

SEQ ID NO: 13627 - protein, 5 aa, Artificial Sequence
  Description of Artificial Sequence: Synthetic peptide
  XENP018292 vhCDR1
NYWMN

SEQ ID NO: 13628 - protein, 19 aa, Artificial Sequence
  Description of Artificial Sequence: Synthetic peptide
  XENP018292 vhCDR2
EIRLKSNNYATHYAEPVKG

SEQ ID NO: 13629 - protein, 11 aa, Artificial Sequence
  Description of Artificial Sequence: Synthetic peptide
  XENP018292 vhCDR3
YYKNYGGYFDV

SEQ ID NO: 13630 - protein, 214 aa, Artificial Sequence; identical to SEQ ID NO: 11550
  Description of Artificial Sequence: Synthetic polypeptide
  XENP018292 1G6_H1.191_L1_IgG1_PVA_/S267K Light Chain

SEQ ID NO: 13631 - protein, 107 aa, Artificial Sequence; identical to SEQ ID NO: 6247
  Description of Artificial Sequence: Synthetic polypeptide
  VL of XENP018292

SEQ ID NO: 13632 - protein, 11 aa, Artificial Sequence
  Description of Artificial Sequence: Synthetic peptide
  XENP018292 vlCDR1
RASQSVSNDVA

SEQ ID NO: 13633 - protein, 7 aa, Artificial Sequence
  Description of Artificial Sequence: Synthetic peptide
  XENP018292 vlCDR2
YASHRYT

SEQ ID NO: 13634 - protein, 9 aa, Artificial Sequence
  Description of Artificial Sequence: Synthetic peptide
  XENP018292 vlCDR3
QQDYSSPRT

SEQ ID NO: 13635 - protein, 451 aa, Artificial Sequence
  Description of Artificial Sequence: Synthetic polypeptide
  XENP018293 1G6_H1.192_L1_IgG1_PVA_/S267K Heavy Chain
EVQLVESGGGLVKPGGSLRLSCAASGFTFSNYWMNWVRQAPGKGLEWVGEIRLKSNNYATHYAEPVKGRFTISRDDSKSTVYLQMNSLKTEDTAVYYCTRYYLNYGGYFDVWGAGTLVTVSSASTKGPSVFPLAPSSKSTSGGTAALGCLVKDYFPEPVTVSWNSGALTSGVHTFPAVLQSSGLYSLSSVVTVPSSSLGTQTYICNVNHKPSNTKVDKKVEPKSCDKTHTCPPCPAPPVAGPSVFLFPPKPKDTLMISRTPEVTCVVVDVKHEDPEVKFNWYVDGVEVHNAKTKPREEQYNSTYRVVSVLTVLHQDWLNGKEYKCKVSNKALPAPIEKTISKAKGQPREPQVYTLPPSREEMTKNQVSLTCLVKGFYPSDIAVEWESNGQPENNYKTTPPVLDSDGSFFLYSKLTVDKSRWQQGNVFSCSVMHEALHNHYTQKSLSLSPGK

SEQ ID NO: 13636 - protein, 122 aa, Artificial Sequence; identical to SEQ ID NO: 8079
  Description of Artificial Sequence: Synthetic polypeptide
  VH of XENP018293

SEQ ID NO: 13637 - protein, 5 aa, Artificial Sequence
  Description of Artificial Sequence: Synthetic peptide
  XENP018293 vhCDR1
NYWMN

SEQ ID NO: 13638 - protein, 19 aa, Artificial Sequence
  Description of Artificial Sequence: Synthetic peptide
  XENP018293 vhCDR2
EIRLKSNNYATHYAEPVKG

SEQ ID NO: 13639 - protein, 11 aa, Artificial Sequence
  Description of Artificial Sequence: Synthetic peptide
  XENP018293 vhCDR3
YYLNYGGYFDV

SEQ ID NO: 13640 - protein, 214 aa, Artificial Sequence; identical to SEQ ID NO: 11550
  Description of Artificial Sequence: Synthetic polypeptide
  XENP018293 1G6_H1.192_L1_IgG1_PVA_/S267K Light Chain

SEQ ID NO: 13641 - protein, 107 aa, Artificial Sequence; identical to SEQ ID NO: 6247
  Description of Artificial Sequence: Synthetic polypeptide
  VL of XENP018293

SEQ ID NO: 13642 - protein, 11 aa, Artificial Sequence
  Description of Artificial Sequence: Synthetic peptide
  XENP018293 vlCDR1
RASQSVSNDVA

SEQ ID NO: 13643 - protein, 7 aa, Artificial Sequence
  Description of Artificial Sequence: Synthetic peptide
  XENP018293 vlCDR2
YASHRYT

SEQ ID NO: 13644 - protein, 9 aa, Artificial Sequence
  Description of Artificial Sequence: Synthetic peptide
  XENP018293 vlCDR3
QQDYSSPRT

SEQ ID NO: 13645 - protein, 451 aa, Artificial Sequence
  Description of Artificial Sequence: Synthetic polypeptide
  XENP018294 1G6_H1.193_L1_IgG1_PVA_/S267K Heavy Chain
EVQLVESGGGLVKPGGSLRLSCAASGFTFSNYWMNWVRQAPGKGLEWVGEIRLKSNNYATHYAEPVKGRFTISRDDSKSTVYLQMNSLKTEDTAVYYCTRYYFNYGGYFDVWGAGTLVTVSSASTKGPSVFPLAPSSKSTSGGTAALGCLVKDYFPEPVTVSWNSGALTSGVHTFPAVLQSSGLYSLSSVVTVPSSSLGTQTYICNVNHKPSNTKVDKKVEPKSCDKTHTCPPCPAPPVAGPSVFLFPPKPKDTLMISRTPEVTCVVVDVKHEDPEVKFNWYVDGVEVHNAKTKPREEQYNSTYRVVSVLTVLHQDWLNGKEYKCKVSNKALPAPIEKTISKAKGQPREPQVYTLPPSREEMTKNQVSLTCLVKGFYPSDIAVEWESNGQPENNYKTTPPVLDSDGSFFLYSKLTVDKSRWQQGNVFSCSVMHEALHNHYTQKSLSLSPGK

SEQ ID NO: 13646 - protein, 122 aa, Artificial Sequence; identical to SEQ ID NO: 8088
  Description of Artificial Sequence: Synthetic polypeptide
  VH of XENP018294

SEQ ID NO: 13647 - protein, 5 aa, Artificial Sequence
  Description of Artificial Sequence: Synthetic peptide
  XENP018294 vhCDR1
NYWMN

SEQ ID NO: 13648 - protein, 19 aa, Artificial Sequence
  Description of Artificial Sequence: Synthetic peptide
  XENP018294 vhCDR2
EIRLKSNNYATHYAEPVKG

SEQ ID NO: 13649 - protein, 11 aa, Artificial Sequence
  Description of Artificial Sequence: Synthetic peptide
  XENP018294 vhCDR3
YYFNYGGYFDV

SEQ ID NO: 13650 - protein, 214 aa, Artificial Sequence; identical to SEQ ID NO: 11550
  Description of Artificial Sequence: Synthetic polypeptide
  XENP018294 1G6_H1.193_L1_IgG1_PVA_/S267K Light Chain

SEQ ID NO: 13651 - protein, 107 aa, Artificial Sequence; identical to SEQ ID NO: 6247
  Description of Artificial Sequence: Synthetic polypeptide
  VL of XENP018294

SEQ ID NO: 13652 - protein, 11 aa, Artificial Sequence
  Description of Artificial Sequence: Synthetic peptide
  XENP018294 vlCDR1
RASQSVSNDVA

SEQ ID NO: 13653 - protein, 7 aa, Artificial Sequence
  Description of Artificial Sequence: Synthetic peptide
  XENP018294 vlCDR2
YASHRYT

SEQ ID NO: 13654 - protein, 9 aa, Artificial Sequence
  Description of Artificial Sequence: Synthetic peptide
  XENP018294 vlCDR3
QQDYSSPRT

SEQ ID NO: 13655 - protein, 451 aa, Artificial Sequence
  Description of Artificial Sequence: Synthetic polypeptide
  XENP018295 1G6_H1.194_L1_IgG1_PVA_/S267K Heavy Chain
EVQLVESGGGLVKPGGSLRLSCAASGFTFSNYWMNWVRQAPGKGLEWVGEIRLKSNNYATHYAEPVKGRFTISRDDSKSTVYLQMNSLKTEDTAVYYCTRYYGDYGGYFDVWGAGTLVTVSSASTKGPSVFPLAPSSKSTSGGTAALGCLVKDYFPEPVTVSWNSGALTSGVHTFPAVLQSSGLYSLSSVVTVPSSSLGTQTYICNVNHKPSNTKVDKKVEPKSCDKTHTCPPCPAPPVAGPSVFLFPPKPKDTLMISRTPEVTCVVVDVKHEDPEVKFNWYVDGVEVHNAKTKPREEQYNSTYRVVSVLTVLHQDWLNGKEYKCKVSNKALPAPIEKTISKAKGQPREPQVYTLPPSREEMTKNQVSLTCLVKGFYPSDIAVEWESNGQPENNYKTTPPVLDSDGSFFLYSKLTVDKSRWQQGNVFSCSVMHEALHNHYTQKSLSLSPGK

SEQ ID NO: 13656 - protein, 122 aa, Artificial Sequence; identical to SEQ ID NO: 8097
  Description of Artificial Sequence: Synthetic polypeptide
  VH of XENP018295

SEQ ID NO: 13657 - protein, 5 aa, Artificial Sequence
  Description of Artificial Sequence: Synthetic peptide
  XENP018295 vhCDR1
NYWMN

SEQ ID NO: 13658 - protein, 19 aa, Artificial Sequence
  Description of Artificial Sequence: Synthetic peptide
  XENP018295 vhCDR2
EIRLKSNNYATHYAEPVKG

SEQ ID NO: 13659 - protein, 11 aa, Artificial Sequence
  Description of Artificial Sequence: Synthetic peptide
  XENP018295 vhCDR3
YYGDYGGYFDV

SEQ ID NO: 13660 - protein, 214 aa, Artificial Sequence; identical to SEQ ID NO: 11550
  Description of Artificial Sequence: Synthetic polypeptide
  XENP018295 1G6_H1.194_L1_IgG1_PVA_/S267K Light Chain

SEQ ID NO: 13661 - protein, 107 aa, Artificial Sequence; identical to SEQ ID NO: 6247
  Description of Artificial Sequence: Synthetic polypeptide
  VL of XENP018295

SEQ ID NO: 13662 - protein, 11 aa, Artificial Sequence
  Description of Artificial Sequence: Synthetic peptide
  XENP018295 vlCDR1
RASQSVSNDVA

SEQ ID NO: 13663 - protein, 7 aa, Artificial Sequence
  Description of Artificial Sequence: Synthetic peptide
  XENP018295 vlCDR2
YASHRYT

SEQ ID NO: 13664 - protein, 9 aa, Artificial Sequence
  Description of Artificial Sequence: Synthetic peptide
  XENP018295 vlCDR3
QQDYSSPRT

SEQ ID NO: 13665 - protein, 451 aa, Artificial Sequence
  Description of Artificial Sequence: Synthetic polypeptide
  XENP018296 1G6_H1.195_L1_IgG1_PVA_/S267K Heavy Chain
EVQLVESGGGLVKPGGSLRLSCAASGFTFSNYWMNWVRQAPGKGLEWVGEIRLKSNNYATHYAEPVKGRFTISRDDSKSTVYLQMNSLKTEDTAVYYCTRYYGHYGGYFDVWGAGTLVTVSSASTKGPSVFPLAPSSKSTSGGTAALGCLVKDYFPEPVTVSWNSGALTSGVHTFPAVLQSSGLYSLSSVVTVPSSSLGTQTYICNVNHKPSNTKVDKKVEPKSCDKTHTCPPCPAPPVAGPSVFLFPPKPKDTLMISRTPEVTCVVVDVKHEDPEVKFNWYVDGVEVHNAKTKPREEQYNSTYRVVSVLTVLHQDWLNGKEYKCKVSNKALPAPIEKTISKAKGQPREPQVYTLPPSREEMTKNQVSLTCLVKGFYPSDIAVEWESNGQPENNYKTTPPVLDSDGSFFLYSKLTVDKSRWQQGNVFSCSVMHEALHNHYTQKSLSLSPGK

SEQ ID NO: 13666 - protein, 122 aa, Artificial Sequence; identical to SEQ ID NO: 8106
  Description of Artificial Sequence: Synthetic polypeptide
  VH of XENP018296

SEQ ID NO: 13667 - protein, 5 aa, Artificial Sequence
  Description of Artificial Sequence: Synthetic peptide
  XENP018296 vhCDR1
NYWMN

SEQ ID NO: 13668 - protein, 19 aa, Artificial Sequence
  Description of Artificial Sequence: Synthetic peptide
  XENP018296 vhCDR2
EIRLKSNNYATHYAEPVKG

SEQ ID NO: 13669 - protein, 11 aa, Artificial Sequence
  Description of Artificial Sequence: Synthetic peptide
  XENP018296 vhCDR3
YYGHYGGYFDV

SEQ ID NO: 13670 - protein, 214 aa, Artificial Sequence; identical to SEQ ID NO: 11550
  Description of Artificial Sequence: Synthetic polypeptide
  XENP018296 1G6_H1.195_L1_IgG1_PVA_/S267K Light Chain

SEQ ID NO: 13671 - protein, 107 aa, Artificial Sequence; identical to SEQ ID NO: 6247
  Description of Artificial Sequence: Synthetic polypeptide
  VL of XENP018296

SEQ ID NO: 13672 - protein, 11 aa, Artificial Sequence
  Description of Artificial Sequence: Synthetic peptide
  XENP018296 vlCDR1
RASQSVSNDVA

SEQ ID NO: 13673 - protein, 7 aa, Artificial Sequence
  Description of Artificial Sequence: Synthetic peptide
  XENP018296 vlCDR2
YASHRYT

SEQ ID NO: 13674 - protein, 9 aa, Artificial Sequence
  Description of Artificial Sequence: Synthetic peptide
  XENP018296 vlCDR3
QQDYSSPRT

SEQ ID NO: 13675 - protein, 451 aa, Artificial Sequence
  Description of Artificial Sequence: Synthetic polypeptide
  XENP018301 1G6_H1.196_L1_IgG1_PVA_/S267K Heavy Chain
EVQLVESGGGLVKPGGSLRLSCAASGFTFSNYWMNWVRQAPGKGLEWVGEIRLKSNNYATHYAEPVKGRFTISRDDSKSTVYLQMNSLKTEDTAVYYCTRYYGEYGGYFDVWGAGTLVTVSSASTKGPSVFPLAPSSKSTSGGTAALGCLVKDYFPEPVTVSWNSGALTSGVHTFPAVLQSSGLYSLSSVVTVPSSSLGTQTYICNVNHKPSNTKVDKKVEPKSCDKTHTCPPCPAPPVAGPSVFLFPPKPKDTLMISRTPEVTCVVVDVKHEDPEVKFNWYVDGVEVHNAKTKPREEQYNSTYRVVSVLTVLHQDWLNGKEYKCKVSNKALPAPIEKTISKAKGQPREPQVYTLPPSREEMTKNQVSLTCLVKGFYPSDIAVEWESNGQPENNYKTTPPVLDSDGSFFLYSKLTVDKSRWQQGNVFSCSVMHEALHNHYTQKSLSLSPGK

SEQ ID NO: 13676 - protein, 122 aa, Artificial Sequence; identical to SEQ ID NO: 8115
  Description of Artificial Sequence: Synthetic polypeptide
  VH of XENP018301

SEQ ID NO: 13677 - protein, 5 aa, Artificial Sequence
  Description of Artificial Sequence: Synthetic peptide
  XENP018301 vhCDR1
NYWMN

SEQ ID NO: 13678 - protein, 19 aa, Artificial Sequence
  Description of Artificial Sequence: Synthetic peptide
  XENP018301 vhCDR2
EIRLKSNNYATHYAEPVKG

SEQ ID NO: 13679 - protein, 11 aa, Artificial Sequence
  Description of Artificial Sequence: Synthetic peptide
  XENP018301 vhCDR3
YYGEYGGYFDV

SEQ ID NO: 13680 - protein, 214 aa, Artificial Sequence; identical to SEQ ID NO: 11550
  Description of Artificial Sequence: Synthetic polypeptide
  XENP018301 1G6_H1.196_L1_IgG1_PVA_/S267K Light Chain

SEQ ID NO: 13681 - protein, 107 aa, Artificial Sequence; identical to SEQ ID NO: 6247
  Description of Artificial Sequence: Synthetic polypeptide
  VL of XENP018301

SEQ ID NO: 13682 - protein, 11 aa, Artificial Sequence
  Description of Artificial Sequence: Synthetic peptide
  XENP018301 vlCDR1
RASQSVSNDVA

SEQ ID NO: 13683 - protein, 7 aa, Artificial Sequence
  Description of Artificial Sequence: Synthetic peptide
  XENP018301 vlCDR2
YASHRYT

SEQ ID NO: 13684 - protein, 9 aa, Artificial Sequence
  Description of Artificial Sequence: Synthetic peptide
  XENP018301 vlCDR3
QQDYSSPRT

SEQ ID NO: 13685 - protein, 451 aa, Artificial Sequence
  Description of Artificial Sequence: Synthetic polypeptide
  XENP018302 1G6_H1.197_L1_IgG1_PVA_/S267K Heavy Chain
EVQLVESGGGLVKPGGSLRLSCAASGFTFSNYWMNWVRQAPGKGLEWVGEIRLKSNNYATHYAEPVKGRFTISRDDSKSTVYLQMNSLKTEDTAVYYCTRYYGSYGGYFDVWGAGTLVTVSSASTKGPSVFPLAPSSKSTSGGTAALGCLVKDYFPEPVTVSWNSGALTSGVHTFPAVLQSSGLYSLSSVVTVPSSSLGTQTYICNVNHKPSNTKVDKKVEPKSCDKTHTCPPCPAPPVAGPSVFLFPPKPKDTLMISRTPEVTCVVVDVKHEDPEVKFNWYVDGVEVHNAKTKPREEQYNSTYRVVSVLTVLHQDWLNGKEYKCKVSNKALPAPIEKTISKAKGQPREPQVYTLPPSREEMTKNQVSLTCLVKGFYPSDIAVEWESNGQPENNYKTTPPVLDSDGSFFLYSKLTVDKSRWQQGNVFSCSVMHEALHNHYTQKSLSLSPGK

SEQ ID NO: 13686 - protein, 122 aa, Artificial Sequence; identical to SEQ ID NO: 8124
  Description of Artificial Sequence: Synthetic polypeptide
  VH of XENP018302

SEQ ID NO: 13687 - protein, 5 aa, Artificial Sequence
  Description of Artificial Sequence: Synthetic peptide
  XENP018302 vhCDR1
NYWMN

SEQ ID NO: 13688 - protein, 19 aa, Artificial Sequence
  Description of Artificial Sequence: Synthetic peptide
  XENP018302 vhCDR2
EIRLKSNNYATHYAEPVKG

SEQ ID NO: 13689 - protein, 11 aa, Artificial Sequence
  Description of Artificial Sequence: Synthetic peptide
  XENP018302 vhCDR3
YYGSYGGYFDV

SEQ ID NO: 13690 - protein, 214 aa, Artificial Sequence; identical to SEQ ID NO: 11550
  Description of Artificial Sequence: Synthetic polypeptide
  XENP018302 1G6_H1.197_L1_IgG1_PVA_/S267K Light Chain

SEQ ID NO: 13691 - protein, 107 aa, Artificial Sequence; identical to SEQ ID NO: 6247
  Description of Artificial Sequence: Synthetic polypeptide
  VL of XENP018302

SEQ ID NO: 13692 - protein, 11 aa, Artificial Sequence
  Description of Artificial Sequence: Synthetic peptide
  XENP018302 vlCDR1
RASQSVSNDVA

SEQ ID NO: 13693 - protein, 7 aa, Artificial Sequence
  Description of Artificial Sequence: Synthetic peptide
  XENP018302 vlCDR2
YASHRYT

SEQ ID NO: 13694 - protein, 9 aa, Artificial Sequence
  Description of Artificial Sequence: Synthetic peptide
  XENP018302 vlCDR3
QQDYSSPRT

SEQ ID NO: 13695 - protein, 451 aa, Artificial Sequence
  Description of Artificial Sequence: Synthetic polypeptide
  XENP018303 1G6_H1.198_L1_IgG1_PVA_/S267K Heavy Chain
EVQLVESGGGLVKPGGSLRLSCAASGFTFSNYWMNWVRQAPGKGLEWVGEIRLKSNNYATHYAEPVKGRFTISRDDSKSTVYLQMNSLKTEDTAVYYCTRYYGRYGGYFDVWGAGTLVTVSSASTKGPSVFPLAPSSKSTSGGTAALGCLVKDYFPEPVTVSWNSGALTSGVHTFPAVLQSSGLYSLSSVVTVPSSSLGTQTYICNVNHKPSNTKVDKKVEPKSCDKTHTCPPCPAPPVAGPSVFLFPPKPKDTLMISRTPEVTCVVVDVKHEDPEVKFNWYVDGVEVHNAKTKPREEQYNSTYRVVSVLTVLHQDWLNGKEYKCKVSNKALPAPIEKTISKAKGQPREPQVYTLPPSREEMTKNQVSLTCLVKGFYPSDIAVEWESNGQPENNYKTTPPVLDSDGSFFLYSKLTVDKSRWQQGNVFSCSVMHEALHNHYTQKSLSLSPGK

SEQ ID NO: 13696 - protein, 122 aa, Artificial Sequence; identical to SEQ ID NO: 8133
  Description of Artificial Sequence: Synthetic polypeptide
  VH of XENP018303

SEQ ID NO: 13697 - protein, 5 aa, Artificial Sequence
  Description of Artificial Sequence: Synthetic peptide
  XENP018303 vhCDR1
NYWMN

SEQ ID NO: 13698 - protein, 19 aa, Artificial Sequence
  Description of Artificial Sequence: Synthetic peptide
  XENP018303 vhCDR2
EIRLKSNNYATHYAEPVKG

SEQ ID NO: 13699 - protein, 11 aa, Artificial Sequence
  Description of Artificial Sequence: Synthetic peptide
  XENP018303 vhCDR3
YYGRYGGYFDV

SEQ ID NO: 13700 - protein, 214 aa, Artificial Sequence; identical to SEQ ID NO: 11550
  Description of Artificial Sequence: Synthetic polypeptide
  XENP018303 1G6_H1.198_L1_IgG1_PVA_/S267K Light Chain

SEQ ID NO: 13701 - protein, 107 aa, Artificial Sequence; identical to SEQ ID NO: 6247
  Description of Artificial Sequence: Synthetic polypeptide
  VL of XENP018303

SEQ ID NO: 13702 - protein, 11 aa, Artificial Sequence
  Description of Artificial Sequence: Synthetic peptide
  XENP018303 vlCDR1
RASQSVSNDVA

SEQ ID NO: 13703 - protein, 7 aa, Artificial Sequence
  Description of Artificial Sequence: Synthetic peptide
  XENP018303 vlCDR2
YASHRYT

SEQ ID NO: 13704 - protein, 9 aa, Artificial Sequence
  Description of Artificial Sequence: Synthetic peptide
  XENP018303 vlCDR3
QQDYSSPRT

SEQ ID NO: 13705 - protein, 451 aa, Artificial Sequence
  Description of Artificial Sequence: Synthetic polypeptide
  XENP018304 1G6_H1.199_L1_IgG1_PVA_/S267K Heavy Chain
EVQLVESGGGLVKPGGSLRLSCAASGFTFSNYWMNWVRQAPGKGLEWVGEIRLKSNNYATHYAEPVKGRFTISRDDSKSTVYLQMNSLKTEDTAVYYCTRYYGLYGGYFDVWGAGTLVTVSSASTKGPSVFPLAPSSKSTSGGTAALGCLVKDYFPEPVTVSWNSGALTSGVHTFPAVLQSSGLYSLSSVVTVPSSSLGTQTYICNVNHKPSNTKVDKKVEPKSCDKTHTCPPCPAPPVAGPSVFLFPPKPKDTLMISRTPEVTCVVVDVKHEDPEVKFNWYVDGVEVHNAKTKPREEQYNSTYRVVSVLTVLHQDWLNGKEYKCKVSNKALPAPIEKTISKAKGQPREPQVYTLPPSREEMTKNQVSLTCLVKGFYPSDIAVEWESNGQPENNYKTTPPVLDSDGSFFLYSKLTVDKSRWQQGNVFSCSVMHEALHNHYTQKSLSLSPGK

SEQ ID NO: 13706 - protein, 122 aa, Artificial Sequence; identical to SEQ ID NO: 8142
  Description of Artificial Sequence: Synthetic polypeptide
  VH of XENP018304

SEQ ID NO: 13707 - protein, 5 aa, Artificial Sequence
  Description of Artificial Sequence: Synthetic peptide
  XENP018304 vhCDR1
NYWMN

SEQ ID NO: 13708 - protein, 19 aa, Artificial Sequence
  Description of Artificial Sequence: Synthetic peptide
  XENP018304 vhCDR2
EIRLKSNNYATHYAEPVKG

SEQ ID NO: 13709 - protein, 11 aa, Artificial Sequence
  Description of Artificial Sequence: Synthetic peptide
  XENP018304 vhCDR3
YYGLYGGYFDV

SEQ ID NO: 13710 - protein, 214 aa, Artificial Sequence; identical to SEQ ID NO: 11550
  Description of Artificial Sequence: Synthetic polypeptide
  XENP018304 1G6_H1.199_L1_IgG1_PVA_/S267K Light Chain

SEQ ID NO: 13711 - protein, 107 aa, Artificial Sequence; identical to SEQ ID NO: 6247
  Description of Artificial Sequence: Synthetic polypeptide
  VL of XENP018304

SEQ ID NO: 13712 - protein, 11 aa, Artificial Sequence
  Description of Artificial Sequence: Synthetic peptide
  XENP018304 vlCDR1
RASQSVSNDVA

SEQ ID NO: 13713 - protein, 7 aa, Artificial Sequence
  Description of Artificial Sequence: Synthetic peptide
  XENP018304 vlCDR2
YASHRYT

SEQ ID NO: 13714 - protein, 9 aa, Artificial Sequence
  Description of Artificial Sequence: Synthetic peptide
  XENP018304 vlCDR3
QQDYSSPRT

SEQ ID NO: 13715 - protein, 451 aa, Artificial Sequence
  Description of Artificial Sequence: Synthetic polypeptide
  XENP018305 1G6_H1.200_L1_IgG1_PVA_/S267K Heavy Chain
EVQLVESGGGLVKPGGSLRLSCAASGFTFSNYWMNWVRQAPGKGLEWVGEIRLKSNNYATHYAEPVKGRFTISRDDSKSTVYLQMNSLKTEDTAVYYCTRYYGTYGGYFDVWGAGTLVTVSSASTKGPSVFPLAPSSKSTSGGTAALGCLVKDYFPEPVTVSWNSGALTSGVHTFPAVLQSSGLYSLSSVVTVPSSSLGTQTYICNVNHKPSNTKVDKKVEPKSCDKTHTCPPCPAPPVAGPSVFLFPPKPKDTLMISRTPEVTCVVVDVKHEDPEVKFNWYVDGVEVHNAKTKPREEQYNSTYRVVSVLTVLHQDWLNGKEYKCKVSNKALPAPIEKTISKAKGQPREPQVYTLPPSREEMTKNQVSLTCLVKGFYPSDIAVEWESNGQPENNYKTTPPVLDSDGSFFLYSKLTVDKSRWQQGNVFSCSVMHEALHNHYTQKSLSLSPGK

SEQ ID NO: 13716 - protein, 122 aa, Artificial Sequence; identical to SEQ ID NO: 8151
  Description of Artificial Sequence: Synthetic polypeptide
  VH of XENP018305

SEQ ID NO: 13717 - protein, 5 aa, Artificial Sequence
  Description of Artificial Sequence: Synthetic peptide
  XENP018305 vhCDR1
NYWMN

SEQ ID NO: 13718 - protein, 19 aa, Artificial Sequence
  Description of Artificial Sequence: Synthetic peptide
  XENP018305 vhCDR2
EIRLKSNNYATHYAEPVKG

SEQ ID NO: 13719 - protein, 11 aa, Artificial Sequence
  Description of Artificial Sequence: Synthetic peptide
  XENP018305 vhCDR3
YYGTYGGYFDV

SEQ ID NO: 13720 - protein, 214 aa, Artificial Sequence; identical to SEQ ID NO: 11550
  Description of Artificial Sequence: Synthetic polypeptide
  XENP018305 1G6_H1.200_L1_IgG1_PVA_/S267K Light Chain

SEQ ID NO: 13721 - protein, 107 aa, Artificial Sequence; identical to SEQ ID NO: 6247
  Description of Artificial Sequence: Synthetic polypeptide
  VL of XENP018305

SEQ ID NO: 13722 - protein, 11 aa, Artificial Sequence
  Description of Artificial Sequence: Synthetic peptide
  XENP018305 vlCDR1
RASQSVSNDVA

SEQ ID NO: 13723 - protein, 7 aa, Artificial Sequence
  Description of Artificial Sequence: Synthetic peptide
  XENP018305 vlCDR2
YASHRYT

SEQ ID NO: 13724 - protein, 9 aa, Artificial Sequence
  Description of Artificial Sequence: Synthetic peptide
  XENP018305 vlCDR3
QQDYSSPRT

SEQ ID NO: 13725 - protein, 451 aa, Artificial Sequence
  Description of Artificial Sequence: Synthetic polypeptide
  XENP018306 1G6_H1.201_L1_IgG1_PVA_/S267K Heavy Chain
EVQLVESGGGLVKPGGSLRLSCAASGFTFSNYWMNWVRQAPGKGLEWVGEIRLKSNNYATHYAEPVKGRFTISRDDSKSTVYLQMNSLKTEDTAVYYCTRYYGGYGGYFDVWGAGTLVTVSSASTKGPSVFPLAPSSKSTSGGTAALGCLVKDYFPEPVTVSWNSGALTSGVHTFPAVLQSSGLYSLSSVVTVPSSSLGTQTYICNVNHKPSNTKVDKKVEPKSCDKTHTCPPCPAPPVAGPSVFLFPPKPKDTLMISRTPEVTCVVVDVKHEDPEVKFNWYVDGVEVHNAKTKPREEQYNSTYRVVSVLTVLHQDWLNGKEYKCKVSNKALPAPIEKTISKAKGQPREPQVYTLPPSREEMTKNQVSLTCLVKGFYPSDIAVEWESNGQPENNYKTTPPVLDSDGSFFLYSKLTVDKSRWQQGNVFSCSVMHEALHNHYTQKSLSLSPGK

SEQ ID NO: 13726 - protein, 122 aa, Artificial Sequence; identical to SEQ ID NO: 8160
  Description of Artificial Sequence: Synthetic polypeptide
  VH of XENP018306

SEQ ID NO: 13727 - protein, 5 aa, Artificial Sequence
  Description of Artificial Sequence: Synthetic peptide
  XENP018306 vhCDR1
NYWMN

SEQ ID NO: 13728 - protein, 19 aa, Artificial Sequence
  Description of Artificial Sequence: Synthetic peptide
  XENP018306 vhCDR2
EIRLKSNNYATHYAEPVKG

SEQ ID NO: 13729 - protein, 11 aa, Artificial Sequence
  Description of Artificial Sequence: Synthetic peptide
  XENP018306 vhCDR3
YYGGYGGYFDV

SEQ ID NO: 13730 - protein, 214 aa, Artificial Sequence; identical to SEQ ID NO: 11550
  Description of Artificial Sequence: Synthetic polypeptide
  XENP018306 1G6_H1.201_L1_IgG1_PVA_/S267K Light Chain

SEQ ID NO: 13731 - protein, 107 aa, Artificial Sequence; identical to SEQ ID NO: 6247
  Description of Artificial Sequence: Synthetic polypeptide
  VL of XENP018306

SEQ ID NO: 13732 - protein, 11 aa, Artificial Sequence
  Description of Artificial Sequence: Synthetic peptide
  XENP018306 vlCDR1
RASQSVSNDVA

SEQ ID NO: 13733 - protein, 7 aa, Artificial Sequence
  Description of Artificial Sequence: Synthetic peptide
  XENP018306 vlCDR2
YASHRYT

SEQ ID NO: 13734 - protein, 9 aa, Artificial Sequence
  Description of Artificial Sequence: Synthetic peptide
  XENP018306 vlCDR3
QQDYSSPRT

SEQ ID NO: 13735 - protein, 451 aa, Artificial Sequence
  Description of Artificial Sequence: Synthetic polypeptide
  XENP018307 1G6_H1.202_L1_IgG1_PVA_/S267K Heavy Chain
EVQLVESGGGLVKPGGSLRLSCAASGFTFSNYWMNWVRQAPGKGLEWVGEIRLKSNNYATHYAEPVKGRFTISRDDSKSTVYLQMNSLKTEDTAVYYCTRYYGFYGGYFDVWGAGTLVTVSSASTKGPSVFPLAPSSKSTSGGTAALGCLVKDYFPEPVTVSWNSGALTSGVHTFPAVLQSSGLYSLSSVVTVPSSSLGTQTYICNVNHKPSNTKVDKKVEPKSCDKTHTCPPCPAPPVAGPSVFLFPPKPKDTLMISRTPEVTCVVVDVKHEDPEVKFNWYVDGVEVHNAKTKPREEQYNSTYRVVSVLTVLHQDWLNGKEYKCKVSNKALPAPIEKTISKAKGQPREPQVYTLPPSREEMTKNQVSLTCLVKGFYPSDIAVEWESNGQPENNYKTTPPVLDSDGSFFLYSKLTVDKSRWQQGNVFSCSVMHEALHNHYTQKSLSLSPGK

SEQ ID NO: 13736 - protein, 122 aa, Artificial Sequence; identical to SEQ ID NO: 8169
  Description of Artificial Sequence: Synthetic polypeptide
  VH of XENP018307

SEQ ID NO: 13737 - protein, 5 aa, Artificial Sequence
  Description of Artificial Sequence: Synthetic peptide
  XENP018307 vhCDR1
NYWMN

SEQ ID NO: 13738 - protein, 19 aa, Artificial Sequence
  Description of Artificial Sequence: Synthetic peptide
  XENP018307 vhCDR2
EIRLKSNNYATHYAEPVKG

SEQ ID NO: 13739 - protein, 11 aa, Artificial Sequence
  Description of Artificial Sequence: Synthetic peptide
  XENP018307 vhCDR3
YYGFYGGYFDV

SEQ ID NO: 13740 - protein, 214 aa, Artificial Sequence; identical to SEQ ID NO: 11550
  Description of Artificial Sequence: Synthetic polypeptide
  XENP018307 1G6_H1.202_L1_IgG1_PVA_/S267K Light Chain

SEQ ID NO: 13741 - protein, 107 aa, Artificial Sequence; identical to SEQ ID NO: 6247
  Description of Artificial Sequence: Synthetic polypeptide
  VL of XENP018307

SEQ ID NO: 13742 - protein, 11 aa, Artificial Sequence
  Description of Artificial Sequence: Synthetic peptide
  XENP018307 vlCDR1
RASQSVSNDVA

SEQ ID NO: 13743 - protein, 7 aa, Artificial Sequence
  Description of Artificial Sequence: Synthetic peptide
  XENP018307 vlCDR2
YASHRYT

SEQ ID NO: 13744 - protein, 9 aa, Artificial Sequence
  Description of Artificial Sequence: Synthetic peptide
  XENP018307 vlCDR3
QQDYSSPRT

SEQ ID NO: 13745 - protein, 451 aa, Artificial Sequence
  Description of Artificial Sequence: Synthetic polypeptide
  XENP018308 1G6_H1.203_L1_IgG1_PVA_/S267K Heavy Chain
EVQLVESGGGLVKPGGSLRLSCAASGFTFSNYWMNWVRQAPGKGLEWVGEIRLKSNNYATHYAEPVKGRFTISRDDSKSTVYLQMNSLKTEDTAVYYCTRYYGNFGGYFDVWGAGTLVTVSSASTKGPSVFPLAPSSKSTSGGTAALGCLVKDYFPEPVTVSWNSGALTSGVHTFPAVLQSSGLYSLSSVVTVPSSSLGTQTYICNVNHKPSNTKVDKKVEPKSCDKTHTCPPCPAPPVAGPSVFLFPPKPKDTLMISRTPEVTCVVVDVKHEDPEVKFNWYVDGVEVHNAKTKPREEQYNSTYRVVSVLTVLHQDWLNGKEYKCKVSNKALPAPIEKTISKAKGQPREPQVYTLPPSREEMTKNQVSLTCLVKGFYPSDIAVEWESNGQPENNYKTTPPVLDSDGSFFLYSKLTVDKSRWQQGNVFSCSVMHEALHNHYTQKSLSLSPGK

SEQ ID NO: 13746 - protein, 122 aa, Artificial Sequence; identical to SEQ ID NO: 8178
  Description of Artificial Sequence: Synthetic polypeptide
  VH of XENP018308

SEQ ID NO: 13747 - protein, 5 aa, Artificial Sequence
  Description of Artificial Sequence: Synthetic peptide
  XENP018308 vhCDR1
NYWMN

SEQ ID NO: 13748 - protein, 19 aa, Artificial Sequence
  Description of Artificial Sequence: Synthetic peptide
  XENP018308 vhCDR2
EIRLKSNNYATHYAEPVKG

SEQ ID NO: 13749 - protein, 11 aa, Artificial Sequence
  Description of Artificial Sequence: Synthetic peptide
  XENP018308 vhCDR3
YYGNFGGYFDV

SEQ ID NO: 13750 - protein, 214 aa, Artificial Sequence; identical to SEQ ID NO: 11550
  Description of Artificial Sequence: Synthetic polypeptide
  XENP018308 1G6_H1.203_L1_IgG1_PVA_/S267K Light Chain

SEQ ID NO: 13751 - protein, 107 aa, Artificial Sequence; identical to SEQ ID NO: 6247
  Description of Artificial Sequence: Synthetic polypeptide
  VL of XENP018308

SEQ ID NO: 13752 - protein, 11 aa, Artificial Sequence
  Description of Artificial Sequence: Synthetic peptide
  XENP018308 vlCDR1
RASQSVSNDVA

SEQ ID NO: 13753 - protein, 7 aa, Artificial Sequence
  Description of Artificial Sequence: Synthetic peptide
  XENP018308 vlCDR2
YASHRYT

SEQ ID NO: 13754 - protein, 9 aa, Artificial Sequence
  Description of Artificial Sequence: Synthetic peptide
  XENP018308 vlCDR3
QQDYSSPRT

SEQ ID NO: 13755 - protein, 451 aa, Artificial Sequence
  Description of Artificial Sequence: Synthetic polypeptide
  XENP018309 1G6_H1.204_L1_IgG1_PVA_/S267K Heavy Chain
EVQLVESGGGLVKPGGSLRLSCAASGFTFSNYWMNWVRQAPGKGLEWVGEIRLKSNNYATHYAEPVKGRFTISRDDSKSTVYLQMNSLKTEDTAVYYCTRYYGNHGGYFDVWGAGTLVTVSSASTKGPSVFPLAPSSKSTSGGTAALGCLVKDYFPEPVTVSWNSGALTSGVHTFPAVLQSSGLYSLSSVVTVPSSSLGTQTYICNVNHKPSNTKVDKKVEPKSCDKTHTCPPCPAPPVAGPSVFLFPPKPKDTLMISRTPEVTCVVVDVKHEDPEVKFNWYVDGVEVHNAKTKPREEQYNSTYRVVSVLTVLHQDWLNGKEYKCKVSNKALPAPIEKTISKAKGQPREPQVYTLPPSREEMTKNQVSLTCLVKGFYPSDIAVEWESNGQPENNYKTTPPVLDSDGSFFLYSKLTVDKSRWQQGNVFSCSVMHEALHNHYTQKSLSLSPGK

SEQ ID NO: 13756 - protein, 122 aa, Artificial Sequence; identical to SEQ ID NO: 8187
  Description of Artificial Sequence: Synthetic polypeptide
  VH of XENP018309

SEQ ID NO: 13757 - protein, 5 aa, Artificial Sequence
  Description of Artificial Sequence: Synthetic peptide
  XENP018309 vhCDR1
NYWMN

SEQ ID NO: 13758 - protein, 19 aa, Artificial Sequence
  Description of Artificial Sequence: Synthetic peptide
  XENP018309 vhCDR2
EIRLKSNNYATHYAEPVKG

SEQ ID NO: 13759 - protein, 11 aa, Artificial Sequence
  Description of Artificial Sequence: Synthetic peptide
  XENP018309 vhCDR3
YYGNHGGYFDV

SEQ ID NO: 13760 - protein, 214 aa, Artificial Sequence; identical to SEQ ID NO: 11550
  Description of Artificial Sequence: Synthetic polypeptide
  XENP018309 1G6_H1.204_L1_IgG1_PVA_/S267K Light Chain

SEQ ID NO: 13761 - protein, 107 aa, Artificial Sequence; identical to SEQ ID NO: 6247
  Description of Artificial Sequence: Synthetic polypeptide
  VL of XENP018309

SEQ ID NO: 13762 - protein, 11 aa, Artificial Sequence
  Description of Artificial Sequence: Synthetic peptide
  XENP018309 vlCDR1
RASQSVSNDVA

SEQ ID NO: 13763 - protein, 7 aa, Artificial Sequence
  Description of Artificial Sequence: Synthetic peptide
  XENP018309 vlCDR2
YASHRYT

SEQ ID NO: 13764 - protein, 9 aa, Artificial Sequence
  Description of Artificial Sequence: Synthetic peptide
  XENP018309 vlCDR3
QQDYSSPRT

SEQ ID NO: 13765 - protein, 451 aa, Artificial Sequence
  Description of Artificial Sequence: Synthetic polypeptide
  XENP018310 1G6_H1.205_L1_IgG1_PVA_/S267K Heavy Chain
EVQLVESGGGLVKPGGSLRLSCAASGFTFSNYWMNWVRQAPGKGLEWVGEIRLKSNNYATHYAEPVKGRFTISRDDSKSTVYLQMNSLKTEDTAVYYCTRYYGNLGGYFDVWGAGTLVTVSSASTKGPSVFPLAPSSKSTSGGTAALGCLVKDYFPEPVTVSWNSGALTSGVHTFPAVLQSSGLYSLSSVVTVPSSSLGTQTYICNVNHKPSNTKVDKKVEPKSCDKTHTCPPCPAPPVAGPSVFLFPPKPKDTLMISRTPEVTCVVVDVKHEDPEVKFNWYVDGVEVHNAKTKPREEQYNSTYRVVSVLTVLHQDWLNGKEYKCKVSNKALPAPIEKTISKAKGQPREPQVYTLPPSREEMTKNQVSLTCLVKGFYPSDIAVEWESNGQPENNYKTTPPVLDSDGSFFLYSKLTVDKSRWQQGNVFSCSVMHEALHNHYTQKSLSLSPGK

SEQ ID NO: 13766 - protein, 122 aa, Artificial Sequence; identical to SEQ ID NO: 8196
  Description of Artificial Sequence: Synthetic polypeptide
  VH of XENP018310

SEQ ID NO: 13767 - protein, 5 aa, Artificial Sequence
  Description of Artificial Sequence: Synthetic peptide
  XENP018310 vhCDR1
NYWMN

SEQ ID NO: 13768 - protein, 19 aa, Artificial Sequence
  Description of Artificial Sequence: Synthetic peptide
  XENP018310 vhCDR2
EIRLKSNNYATHYAEPVKG

SEQ ID NO: 13769 - protein, 11 aa, Artificial Sequence
  Description of Artificial Sequence: Synthetic peptide
  XENP018310 vhCDR3
YYGNLGGYFDV

SEQ ID NO: 13770 - protein, 214 aa, Artificial Sequence; identical to SEQ ID NO: 11550
  Description of Artificial Sequence: Synthetic polypeptide
  XENP018310 1G6_H1.205_L1_IgG1_PVA_/S267K Light Chain

SEQ ID NO: 13771 - protein, 107 aa, Artificial Sequence; identical to SEQ ID NO: 6247
  Description of Artificial Sequence: Synthetic polypeptide
  VL of XENP018310

SEQ ID NO: 13772 - protein, 11 aa, Artificial Sequence
  Description of Artificial Sequence: Synthetic peptide
  XENP018310 vlCDR1
RASQSVSNDVA

SEQ ID NO: 13773 - protein, 7 aa, Artificial Sequence
  Description of Artificial Sequence: Synthetic peptide
  XENP018310 vlCDR2
YASHRYT

SEQ ID NO: 13774 - protein, 9 aa, Artificial Sequence
  Description of Artificial Sequence: Synthetic peptide
  XENP018310 vlCDR3
QQDYSSPRT

SEQ ID NO: 13775 - protein, 451 aa, Artificial Sequence
  Description of Artificial Sequence: Synthetic polypeptide
  XENP018311 1G6_H1.206_L1_IgG1_PVA_/S267K Heavy Chain
EVQLVESGGGLVKPGGSLRLSCAASGFTFSNYWMNWVRQAPGKGLEWVGEIRLKSNNYATHYAEPVKGRFTISRDDSKSTVYLQMNSLKTEDTAVYYCTRYYGNWGGYFDVWGAGTLVTVSSASTKGPSVFPLAPSSKSTSGGTAALGCLVKDYFPEPVTVSWNSGALTSGVHTFPAVLQSSGLYSLSSVVTVPSSSLGTQTYICNVNHKPSNTKVDKKVEPKSCDKTHTCPPCPAPPVAGPSVFLFPPKPKDTLMISRTPEVTCVVVDVKHEDPEVKFNWYVDGVEVHNAKTKPREEQYNSTYRVVSVLTVLHQDWLNGKEYKCKVSNKALPAPIEKTISKAKGQPREPQVYTLPPSREEMTKNQVSLTCLVKGFYPSDIAVEWESNGQPENNYKTTPPVLDSDGSFFLYSKLTVDKSRWQQGNVFSCSVMHEALHNHYTQKSLSLSPGK

SEQ ID NO: 13776 - protein, 122 aa, Artificial Sequence; identical to SEQ ID NO: 8205
  Description of Artificial Sequence: Synthetic polypeptide
  VH of XENP018311

SEQ ID NO: 13777 - protein, 5 aa, Artificial Sequence
  Description of Artificial Sequence: Synthetic peptide
  XENP018311 vhCDR1
NYWMN

SEQ ID NO: 13778 - protein, 19 aa, Artificial Sequence
  Description of Artificial Sequence: Synthetic peptide
  XENP018311 vhCDR2
EIRLKSNNYATHYAEPVKG

SEQ ID NO: 13779 - protein, 11 aa, Artificial Sequence
  Description of Artificial Sequence: Synthetic peptide
  XENP018311 vhCDR3
YYGNWGGYFDV

SEQ ID NO: 13780 - protein, 214 aa, Artificial Sequence; identical to SEQ ID NO: 11550
  Description of Artificial Sequence: Synthetic polypeptide
  XENP018311 1G6_H1.206_L1_IgG1_PVA_/S267K Light Chain

SEQ ID NO: 13781 - protein, 107 aa, Artificial Sequence; identical to SEQ ID NO: 6247
  Description of Artificial Sequence: Synthetic polypeptide
  VL of XENP018311

SEQ ID NO: 13782 - protein, 11 aa, Artificial Sequence
  Description of Artificial Sequence: Synthetic peptide
  XENP018311 vlCDR1
RASQSVSNDVA

SEQ ID NO: 13783 - protein, 7 aa, Artificial Sequence
  Description of Artificial Sequence: Synthetic peptide
  XENP018311 vlCDR2
YASHRYT

SEQ ID NO: 13784 - protein, 9 aa, Artificial Sequence
  Description of Artificial Sequence: Synthetic peptide
  XENP018311 vlCDR3
QQDYSSPRT

SEQ ID NO: 13785 - protein, 451 aa, Artificial Sequence
  Description of Artificial Sequence: Synthetic polypeptide
  XENP018312 1G6_H1.207_L1_IgG1_PVA_/S267K Heavy Chain
EVQLVESGGGLVKPGGSLRLSCAASGFTFSNYWMNWVRQAPGKGLEWVGEIRLKSNNYATHYAEPVKGRFTISRDDSKSTVYLQMNSLKTEDTAVYYCTRYYGNVGGYFDVWGAGTLVTVSSASTKGPSVFPLAPSSKSTSGGTAALGCLVKDYFPEPVTVSWNSGALTSGVHTFPAVLQSSGLYSLSSVVTVPSSSLGTQTYICNVNHKPSNTKVDKKVEPKSCDKTHTCPPCPAPPVAGPSVFLFPPKPKDTLMISRTPEVTCVVVDVKHEDPEVKFNWYVDGVEVHNAKTKPREEQYNSTYRVVSVLTVLHQDWLNGKEYKCKVSNKALPAPIEKTISKAKGQPREPQVYTLPPSREEMTKNQVSLTCLVKGFYPSDIAVEWESNGQPENNYKTTPPVLDSDGSFFLYSKLTVDKSRWQQGNVFSCSVMHEALHNHYTQKSLSLSPGK

SEQ ID NO: 13786 - protein, 122 aa, Artificial Sequence; identical to SEQ ID NO: 8214
  Description of Artificial Sequence: Synthetic polypeptide
  VH of XENP018312

SEQ ID NO: 13787 - protein, 5 aa, Artificial Sequence
  Description of Artificial Sequence: Synthetic peptide
  XENP018312 vhCDR1
NYWMN

SEQ ID NO: 13788 - protein, 19 aa, Artificial Sequence
  Description of Artificial Sequence: Synthetic peptide
  XENP018312 vhCDR2
EIRLKSNNYATHYAEPVKG

SEQ ID NO: 13789 - protein, 11 aa, Artificial Sequence
  Description of Artificial Sequence: Synthetic peptide
  XENP018312 vhCDR3
YYGNVGGYFDV

SEQ ID NO: 13790 - protein, 214 aa, Artificial Sequence; identical to SEQ ID NO: 11550
  Description of Artificial Sequence: Synthetic polypeptide
  XENP018312 1G6_H1.207_L1_IgG1_PVA_/S267K Light Chain

SEQ ID NO: 13791 - protein, 107 aa, Artificial Sequence; identical to SEQ ID NO: 6247
  Description of Artificial Sequence: Synthetic polypeptide
  VL of XENP018312

SEQ ID NO: 13792 - protein, 11 aa, Artificial Sequence
  Description of Artificial Sequence: Synthetic peptide
  XENP018312 vlCDR1
RASQSVSNDVA

SEQ ID NO: 13793 - protein, 7 aa, Artificial Sequence
  Description of Artificial Sequence: Synthetic peptide
  XENP018312 vlCDR2
YASHRYT

SEQ ID NO: 13794 - protein, 9 aa, Artificial Sequence
  Description of Artificial Sequence: Synthetic peptide
  XENP018312 vlCDR3
QQDYSSPRT

SEQ ID NO: 13795 - protein, 451 aa, Artificial Sequence
  Description of Artificial Sequence: Synthetic polypeptide
  XENP018313 1G6_H1.208_L1_IgG1_PVA_/S267K Heavy Chain
EVQLVESGGGLVKPGGSLRLSCAASGFTFSNYWMNWVRQAPGKGLEWVGEIRLKSNNYATHYAEPVKGRFTISRDDSKSTVYLQMNSLKTEDTAVYYCTRYYGNAGGYFDVWGAGTLVTVSSASTKGPSVFPLAPSSKSTSGGTAALGCLVKDYFPEPVTVSWNSGALTSGVHTFPAVLQSSGLYSLSSVVTVPSSSLGTQTYICNVNHKPSNTKVDKKVEPKSCDKTHTCPPCPAPPVAGPSVFLFPPKPKDTLMISRTPEVTCVVVDVKHEDPEVKFNWYVDGVEVHNAKTKPREEQYNSTYRVVSVLTVLHQDWLNGKEYKCKVSNKALPAPIEKTISKAKGQPREPQVYTLPPSREEMTKNQVSLTCLVKGFYPSDIAVEWESNGQPENNYKTTPPVLDSDGSFFLYSKLTVDKSRWQQGNVFSCSVMHEALHNHYTQKSLSLSPGK

SEQ ID NO: 13796 - protein, 122 aa, Artificial Sequence; identical to SEQ ID NO: 8223
  Description of Artificial Sequence: Synthetic polypeptide
  VH of XENP018313

SEQ ID NO: 13797 - protein, 5 aa, Artificial Sequence
  Description of Artificial Sequence: Synthetic peptide
  XENP018313 vhCDR1
NYWMN

SEQ ID NO: 13798 - protein, 19 aa, Artificial Sequence
  Description of Artificial Sequence: Synthetic peptide
  XENP018313 vhCDR2
EIRLKSNNYATHYAEPVKG

SEQ ID NO: 13799 - protein, 11 aa, Artificial Sequence
  Description of Artificial Sequence: Synthetic peptide
  XENP018313 vhCDR3
YYGNAGGYFDV

SEQ ID NO: 13800 - protein, 214 aa, Artificial Sequence; identical to SEQ ID NO: 11550
  Description of Artificial Sequence: Synthetic polypeptide
  XENP018313 1G6_H1.208_L1_IgG1_PVA_/S267K Light Chain

SEQ ID NO: 13801 - protein, 107 aa, Artificial Sequence; identical to SEQ ID NO: 6247
  Description of Artificial Sequence: Synthetic polypeptide
  VL of XENP018313

SEQ ID NO: 13802 - protein, 11 aa, Artificial Sequence
  Description of Artificial Sequence: Synthetic peptide
  XENP018313 vlCDR1
RASQSVSNDVA

SEQ ID NO: 13803 - protein, 7 aa, Artificial Sequence
  Description of Artificial Sequence: Synthetic peptide
  XENP018313 vlCDR2
YASHRYT

SEQ ID NO: 13804 - protein, 9 aa, Artificial Sequence
  Description of Artificial Sequence: Synthetic peptide
  XENP018313 vlCDR3
QQDYSSPRT

SEQ ID NO: 13805 - protein, 451 aa, Artificial Sequence
  Description of Artificial Sequence: Synthetic polypeptide
  XENP018314 1G6_H1.209_L1_IgG1_PVA_/S267K Heavy Chain
EVQLVESGGGLVKPGGSLRLSCAASGFTFSNYWMNWVRQAPGKGLEWVGEIRLKSNNYATHYAEPVKGRFTISRDDSKSTVYLQMNSLKTEDTAVYYCTRYYGNQGGYFDVWGAGTLVTVSSASTKGPSVFPLAPSSKSTSGGTAALGCLVKDYFPEPVTVSWNSGALTSGVHTFPAVLQSSGLYSLSSVVTVPSSSLGTQTYICNVNHKPSNTKVDKKVEPKSCDKTHTCPPCPAPPVAGPSVFLFPPKPKDTLMISRTPEVTCVVVDVKHEDPEVKFNWYVDGVEVHNAKTKPREEQYNSTYRVVSVLTVLHQDWLNGKEYKCKVSNKALPAPIEKTISKAKGQPREPQVYTLPPSREEMTKNQVSLTCLVKGFYPSDIAVEWESNGQPENNYKTTPPVLDSDGSFFLYSKLTVDKSRWQQGNVFSCSVMHEALHNHYTQKSLSLSPGK

SEQ ID NO: 13806 - protein, 122 aa, Artificial Sequence; identical to SEQ ID NO: 8232
  Description of Artificial Sequence: Synthetic polypeptide
  VH of XENP018314

SEQ ID NO: 13807 - protein, 5 aa, Artificial Sequence
  Description of Artificial Sequence: Synthetic peptide
  XENP018314 vhCDR1
NYWMN

SEQ ID NO: 13808 - protein, 19 aa, Artificial Sequence
  Description of Artificial Sequence: Synthetic peptide
  XENP018314 vhCDR2
EIRLKSNNYATHYAEPVKG

SEQ ID NO: 13809 - protein, 11 aa, Artificial Sequence
  Description of Artificial Sequence: Synthetic peptide
  XENP018314 vhCDR3
YYGNQGGYFDV

SEQ ID NO: 13810 - protein, 214 aa, Artificial Sequence; identical to SEQ ID NO: 11550
  Description of Artificial Sequence: Synthetic polypeptide
  XENP018314 1G6_H1.209_L1_IgG1_PVA_/S267K Light Chain

SEQ ID NO: 13811 - protein, 107 aa, Artificial Sequence; identical to SEQ ID NO: 6247
  Description of Artificial Sequence: Synthetic polypeptide
  VL of XENP018314

SEQ ID NO: 13812 - protein, 11 aa, Artificial Sequence
  Description of Artificial Sequence: Synthetic peptide
  XENP018314 vlCDR1
RASQSVSNDVA

SEQ ID NO: 13813 - protein, 7 aa, Artificial Sequence
  Description of Artificial Sequence: Synthetic peptide
  XENP018314 vlCDR2
YASHRYT

SEQ ID NO: 13814 - protein, 9 aa, Artificial Sequence
  Description of Artificial Sequence: Synthetic peptide
  XENP018314 vlCDR3
QQDYSSPRT

SEQ ID NO: 13815 - protein, 451 aa, Artificial Sequence
  Description of Artificial Sequence: Synthetic polypeptide
  XENP018315 1G6_H1.210_L1_IgG1_PVA_/S267K Heavy Chain
EVQLVESGGGLVKPGGSLRLSCAASGFTFSNYWMNWVRQAPGKGLEWVGEIRLKSNNYATHYAEPVKGRFTISRDDSKSTVYLQMNSLKTEDTAVYYCTRYYGNEGGYFDVWGAGTLVTVSSASTKGPSVFPLAPSSKSTSGGTAALGCLVKDYFPEPVTVSWNSGALTSGVHTFPAVLQSSGLYSLSSVVTVPSSSLGTQTYICNVNHKPSNTKVDKKVEPKSCDKTHTCPPCPAPPVAGPSVFLFPPKPKDTLMISRTPEVTCVVVDVKHEDPEVKFNWYVDGVEVHNAKTKPREEQYNSTYRVVSVLTVLHQDWLNGKEYKCKVSNKALPAPIEKTISKAKGQPREPQVYTLPPSREEMTKNQVSLTCLVKGFYPSDIAVEWESNGQPENNYKTTPPVLDSDGSFFLYSKLTVDKSRWQQGNVFSCSVMHEALHNHYTQKSLSLSPGK

SEQ ID NO: 13816 - protein, 122 aa, Artificial Sequence; identical to SEQ ID NO: 8241
  Description of Artificial Sequence: Synthetic polypeptide
  VH of XENP018315

SEQ ID NO: 13817 - protein, 5 aa, Artificial Sequence
  Description of Artificial Sequence: Synthetic peptide
  XENP018315 vhCDR1
NYWMN

SEQ ID NO: 13818 - protein, 19 aa, Artificial Sequence
  Description of Artificial Sequence: Synthetic peptide
  XENP018315 vhCDR2
EIRLKSNNYATHYAEPVKG

SEQ ID NO: 13819 - protein, 11 aa, Artificial Sequence
  Description of Artificial Sequence: Synthetic peptide
  XENP018315 vhCDR3
YYGNEGGYFDV

SEQ ID NO: 13820 - protein, 214 aa, Artificial Sequence; identical to SEQ ID NO: 11550
  Description of Artificial Sequence: Synthetic polypeptide
  XENP018315 1G6_H1.210_L1_IgG1_PVA_/S267K Light Chain

SEQ ID NO: 13821 - protein, 107 aa, Artificial Sequence; identical to SEQ ID NO: 6247
  Description of Artificial Sequence: Synthetic polypeptide
  VL of XENP018315

SEQ ID NO: 13822 - protein, 11 aa, Artificial Sequence
  Description of Artificial Sequence: Synthetic peptide
  XENP018315 vlCDR1
RASQSVSNDVA

SEQ ID NO: 13823 - protein, 7 aa, Artificial Sequence
  Description of Artificial Sequence: Synthetic peptide
  XENP018315 vlCDR2
YASHRYT

SEQ ID NO: 13824 - protein, 9 aa, Artificial Sequence
  Description of Artificial Sequence: Synthetic peptide
  XENP018315 vlCDR3
QQDYSSPRT

SEQ ID NO: 13825 - protein, 451 aa, Artificial Sequence
  Description of Artificial Sequence: Synthetic polypeptide
  XENP018316 1G6_H1.211_L1_IgG1_PVA_/S267K Heavy Chain
EVQLVESGGGLVKPGGSLRLSCAASGFTFSNYWMNWVRQAPGKGLEWVGEIRLKSNNYATHYAEPVKGRFTISRDDSKSTVYLQMNSLKTEDTAVYYCTRYYGNKGGYFDVWGAGTLVTVSSASTKGPSVFPLAPSSKSTSGGTAALGCLVKDYFPEPVTVSWNSGALTSGVHTFPAVLQSSGLYSLSSVVTVPSSSLGTQTYICNVNHKPSNTKVDKKVEPKSCDKTHTCPPCPAPPVAGPSVFLFPPKPKDTLMISRTPEVTCVVVDVKHEDPEVKFNWYVDGVEVHNAKTKPREEQYNSTYRVVSVLTVLHQDWLNGKEYKCKVSNKALPAPIEKTISKAKGQPREPQVYTLPPSREEMTKNQVSLTCLVKGFYPSDIAVEWESNGQPENNYKTTPPVLDSDGSFFLYSKLTVDKSRWQQGNVFSCSVMHEALHNHYTQKSLSLSPGK

SEQ ID NO: 13826 - protein, 122 aa, Artificial Sequence; identical to SEQ ID NO: 8250
  Description of Artificial Sequence: Synthetic polypeptide
  VH of XENP018316

SEQ ID NO: 13827 - protein, 5 aa, Artificial Sequence
  Description of Artificial Sequence: Synthetic peptide
  XENP018316 vhCDR1
NYWMN

SEQ ID NO: 13828 - protein, 19 aa, Artificial Sequence
  Description of Artificial Sequence: Synthetic peptide
  XENP018316 vhCDR2
EIRLKSNNYATHYAEPVKG

SEQ ID NO: 13829 - protein, 11 aa, Artificial Sequence
  Description of Artificial Sequence: Synthetic peptide
  XENP018316 vhCDR3
YYGNKGGYFDV

SEQ ID NO: 13830 - protein, 214 aa, Artificial Sequence; identical to SEQ ID NO: 11550
  Description of Artificial Sequence: Synthetic polypeptide
  XENP018316 1G6_H1.211_L1_IgG1_PVA_/S267K Light Chain

SEQ ID NO: 13831 - protein, 107 aa, Artificial Sequence; identical to SEQ ID NO: 6247
  Description of Artificial Sequence: Synthetic polypeptide
  VL of XENP018316

SEQ ID NO: 13832 - protein, 11 aa, Artificial Sequence
  Description of Artificial Sequence: Synthetic peptide
  XENP018316 vlCDR1
RASQSVSNDVA

SEQ ID NO: 13833 - protein, 7 aa, Artificial Sequence
  Description of Artificial Sequence: Synthetic peptide
  XENP018316 vlCDR2
YASHRYT

SEQ ID NO: 13834 - protein, 9 aa, Artificial Sequence
  Description of Artificial Sequence: Synthetic peptide
  XENP018316 vlCDR3
QQDYSSPRT

SEQ ID NO: 13835 - protein, 451 aa, Artificial Sequence
  Description of Artificial Sequence: Synthetic polypeptide
  XENP018317 1G6_H1.212_L1_IgG1_PVA_/S267K Heavy Chain
EVQLVESGGGLVKPGGSLRLSCAASGFTFSNYWMNWVRQAPGKGLEWVGEIRLKSNNYATHYAEPVKGRFTISRDDSKSTVYLQMNSLKTEDTAVYYCTRYYGNYAGYFDVWGAGTLVTVSSASTKGPSVFPLAPSSKSTSGGTAALGCLVKDYFPEPVTVSWNSGALTSGVHTFPAVLQSSGLYSLSSVVTVPSSSLGTQTYICNVNHKPSNTKVDKKVEPKSCDKTHTCPPCPAPPVAGPSVFLFPPKPKDTLMISRTPEVTCVVVDVKHEDPEVKFNWYVDGVEVHNAKTKPREEQYNSTYRVVSVLTVLHQDWLNGKEYKCKVSNKALPAPIEKTISKAKGQPREPQVYTLPPSREEMTKNQVSLTCLVKGFYPSDIAVEWESNGQPENNYKTTPPVLDSDGSFFLYSKLTVDKSRWQQGNVFSCSVMHEALHNHYTQKSLSLSPGK

SEQ ID NO: 13836 - protein, 122 aa, Artificial Sequence; identical to SEQ ID NO: 8259
  Description of Artificial Sequence: Synthetic polypeptide
  VH of XENP018317

SEQ ID NO: 13837 - protein, 5 aa, Artificial Sequence
  Description of Artificial Sequence: Synthetic peptide
  XENP018317 vhCDR1
NYWMN

SEQ ID NO: 13838 - protein, 19 aa, Artificial Sequence
  Description of Artificial Sequence: Synthetic peptide
  XENP018317 vhCDR2
EIRLKSNNYATHYAEPVKG

SEQ ID NO: 13839 - protein, 11 aa, Artificial Sequence
  Description of Artificial Sequence: Synthetic peptide
  XENP018317 vhCDR3
YYGNYAGYFDV

SEQ ID NO: 13840 - protein, 214 aa, Artificial Sequence; identical to SEQ ID NO: 11550
  Description of Artificial Sequence: Synthetic polypeptide
  XENP018317 1G6_H1.212_L1_IgG1_PVA_/S267K Light Chain

SEQ ID NO: 13841 - protein, 107 aa, Artificial Sequence; identical to SEQ ID NO: 6247
  Description of Artificial Sequence: Synthetic polypeptide
  VL of XENP018317

SEQ ID NO: 13842 - protein, 11 aa, Artificial Sequence
  Description of Artificial Sequence: Synthetic peptide
  XENP018317 vlCDR1
RASQSVSNDVA

SEQ ID NO: 13843 - protein, 7 aa, Artificial Sequence
  Description of Artificial Sequence: Synthetic peptide
  XENP018317 vlCDR2
YASHRYT

SEQ ID NO: 13844 - protein, 9 aa, Artificial Sequence
  Description of Artificial Sequence: Synthetic peptide
  XENP018317 vlCDR3
QQDYSSPRT

SEQ ID NO: 13845 - protein, 451 aa, Artificial Sequence
  Description of Artificial Sequence: Synthetic polypeptide
  XENP018318 1G6_H1.213_L1_IgG1_PVA_/S267K Heavy Chain
EVQLVESGGGLVKPGGSLRLSCAASGFTFSNYWMNWVRQAPGKGLEWVGEIRLKSNNYATHYAEPVKGRFTISRDDSKSTVYLQMNSLKTEDTAVYYCTRYYGNYQGYFDVWGAGTLVTVSSASTKGPSVFPLAPSSKSTSGGTAALGCLVKDYFPEPVTVSWNSGALTSGVHTFPAVLQSSGLYSLSSVVTVPSSSLGTQTYICNVNHKPSNTKVDKKVEPKSCDKTHTCPPCPAPPVAGPSVFLFPPKPKDTLMISRTPEVTCVVVDVKHEDPEVKFNWYVDGVEVHNAKTKPREEQYNSTYRVVSVLTVLHQDWLNGKEYKCKVSNKALPAPIEKTISKAKGQPREPQVYTLPPSREEMTKNQVSLTCLVKGFYPSDIAVEWESNGQPENNYKTTPPVLDSDGSFFLYSKLTVDKSRWQQGNVFSCSVMHEALHNHYTQKSLSLSPGK

SEQ ID NO: 13846 - protein, 122 aa, Artificial Sequence; identical to SEQ ID NO: 8268
  Description of Artificial Sequence: Synthetic polypeptide
  VH of XENP018318

SEQ ID NO: 13847 - protein, 5 aa, Artificial Sequence
  Description of Artificial Sequence: Synthetic peptide
  XENP018318 vhCDR1
NYWMN

SEQ ID NO: 13848 - protein, 19 aa, Artificial Sequence
  Description of Artificial Sequence: Synthetic peptide
  XENP018318 vhCDR2
EIRLKSNNYATHYAEPVKG

SEQ ID NO: 13849 - protein, 11 aa, Artificial Sequence
  Description of Artificial Sequence: Synthetic peptide
  XENP018318 vhCDR3
YYGNYQGYFDV

SEQ ID NO: 13850 - protein, 214 aa, Artificial Sequence; identical to SEQ ID NO: 11550
  Description of Artificial Sequence: Synthetic polypeptide
  XENP018318 1G6_H1.213_L1_IgG1_PVA_/S267K Light Chain

SEQ ID NO: 13851 - protein, 107 aa, Artificial Sequence; identical to SEQ ID NO: 6247
  Description of Artificial Sequence: Synthetic polypeptide
  VL of XENP018318

SEQ ID NO: 13852 - protein, 11 aa, Artificial Sequence
  Description of Artificial Sequence: Synthetic peptide
  XENP018318 vlCDR1
RASQSVSNDVA

SEQ ID NO: 13853 - protein, 7 aa, Artificial Sequence
  Description of Artificial Sequence: Synthetic peptide
  XENP018318 vlCDR2
YASHRYT

SEQ ID NO: 13854 - protein, 9 aa, Artificial Sequence
  Description of Artificial Sequence: Synthetic peptide
  XENP018318 vlCDR3
QQDYSSPRT

SEQ ID NO: 13855 - protein, 451 aa, Artificial Sequence
  Description of Artificial Sequence: Synthetic polypeptide
  XENP018319 1G6_H1.214_L1_IgG1_PVA_/S267K Heavy Chain
EVQLVESGGGLVKPGGSLRLSCAASGFTFSNYWMNWVRQAPGKGLEWVGEIRLKSNNYATHYAEPVKGRFTISRDDSKSTVYLQMNSLKTEDTAVYYCTRYYGNYHGYFDVWGAGTLVTVSSASTKGPSVFPLAPSSKSTSGGTAALGCLVKDYFPEPVTVSWNSGALTSGVHTFPAVLQSSGLYSLSSVVTVPSSSLGTQTYICNVNHKPSNTKVDKKVEPKSCDKTHTCPPCPAPPVAGPSVFLFPPKPKDTLMISRTPEVTCVVVDVKHEDPEVKFNWYVDGVEVHNAKTKPREEQYNSTYRVVSVLTVLHQDWLNGKEYKCKVSNKALPAPIEKTISKAKGQPREPQVYTLPPSREEMTKNQVSLTCLVKGFYPSDIAVEWESNGQPENNYKTTPPVLDSDGSFFLYSKLTVDKSRWQQGNVFSCSVMHEALHNHYTQKSLSLSPGK

SEQ ID NO: 13856 - protein, 122 aa, Artificial Sequence; identical to SEQ ID NO: 8277
  Description of Artificial Sequence: Synthetic polypeptide
  VH of XENP018319

SEQ ID NO: 13857 - protein, 5 aa, Artificial Sequence
  Description of Artificial Sequence: Synthetic peptide
  XENP018319 vhCDR1
NYWMN

SEQ ID NO: 13858 - protein, 19 aa, Artificial Sequence
  Description of Artificial Sequence: Synthetic peptide
  XENP018319 vhCDR2
EIRLKSNNYATHYAEPVKG

SEQ ID NO: 13859 - protein, 11 aa, Artificial Sequence
  Description of Artificial Sequence: Synthetic peptide
  XENP018319 vhCDR3
YYGNYHGYFDV

SEQ ID NO: 13860 - protein, 214 aa, Artificial Sequence; identical to SEQ ID NO: 11550
  Description of Artificial Sequence: Synthetic polypeptide
  XENP018319 1G6_H1.214_L1_IgG1_PVA_/S267K Light Chain

SEQ ID NO: 13861 - protein, 107 aa, Artificial Sequence; identical to SEQ ID NO: 6247
  Description of Artificial Sequence: Synthetic polypeptide
  VL of XENP018319

SEQ ID NO: 13862 - protein, 11 aa, Artificial Sequence
  Description of Artificial Sequence: Synthetic peptide
  XENP018319 vlCDR1
RASQSVSNDVA

SEQ ID NO: 13863 - protein, 7 aa, Artificial Sequence
  Description of Artificial Sequence: Synthetic peptide
  XENP018319 vlCDR2
YASHRYT

SEQ ID NO: 13864 - protein, 9 aa, Artificial Sequence
  Description of Artificial Sequence: Synthetic peptide
  XENP018319 vlCDR3
QQDYSSPRT

SEQ ID NO: 13865 - protein, 451 aa, Artificial Sequence
  Description of Artificial Sequence: Synthetic polypeptide
  XENP018320 1G6_H1.215_L1_IgG1_PVA_/S267K Heavy Chain
EVQLVESGGGLVKPGGSLRLSCAASGFTFSNYWMNWVRQAPGKGLEWVGEIRLKSNNYATHYAEPVKGRFTISRDDSKSTVYLQMNSLKTEDTAVYYCTRYYGNYDGYFDVWGAGTLVTVSSASTKGPSVFPLAPSSKSTSGGTAALGCLVKDYFPEPVTVSWNSGALTSGVHTFPAVLQSSGLYSLSSVVTVPSSSLGTQTYICNVNHKPSNTKVDKKVEPKSCDKTHTCPPCPAPPVAGPSVFLFPPKPKDTLMISRTPEVTCVVVDVKHEDPEVKFNWYVDGVEVHNAKTKPREEQYNSTYRVVSVLTVLHQDWLNGKEYKCKVSNKALPAPIEKTISKAKGQPREPQVYTLPPSREEMTKNQVSLTCLVKGFYPSDIAVEWESNGQPENNYKTTPPVLDSDGSFFLYSKLTVDKSRWQQGNVFSCSVMHEALHNHYTQKSLSLSPGK

SEQ ID NO: 13866 - protein, 122 aa, Artificial Sequence; identical to SEQ ID NO: 8286
  Description of Artificial Sequence: Synthetic polypeptide
  VH of XENP018320

SEQ ID NO: 13867 - protein, 5 aa, Artificial Sequence
  Description of Artificial Sequence: Synthetic peptide
  XENP018320 vhCDR1
NYWMN

SEQ ID NO: 13868 - protein, 19 aa, Artificial Sequence
  Description of Artificial Sequence: Synthetic peptide
  XENP018320 vhCDR2
EIRLKSNNYATHYAEPVKG

SEQ ID NO: 13869 - protein, 11 aa, Artificial Sequence
  Description of Artificial Sequence: Synthetic peptide
  XENP018320 vhCDR3
YYGNYDGYFDV

SEQ ID NO: 13870 - protein, 214 aa, Artificial Sequence; identical to SEQ ID NO: 11550
  Description of Artificial Sequence: Synthetic polypeptide
  XENP018320 1G6_H1.215_L1_IgG1_PVA_/S267K Light Chain

SEQ ID NO: 13871 - protein, 107 aa, Artificial Sequence; identical to SEQ ID NO: 6247
  Description of Artificial Sequence: Synthetic polypeptide
  VL of XENP018320

SEQ ID NO: 13872 - protein, 11 aa, Artificial Sequence
  Description of Artificial Sequence: Synthetic peptide
  XENP018320 vlCDR1
RASQSVSNDVA

SEQ ID NO: 13873 - protein, 7 aa, Artificial Sequence
  Description of Artificial Sequence: Synthetic peptide
  XENP018320 vlCDR2
YASHRYT

SEQ ID NO: 13874 - protein, 9 aa, Artificial Sequence
  Description of Artificial Sequence: Synthetic peptide
  XENP018320 vlCDR3
QQDYSSPRT

SEQ ID NO: 13875 - protein, 451 aa, Artificial Sequence
  Description of Artificial Sequence: Synthetic polypeptide
  XENP018321 1G6_H1.216_L1_IgG1_PVA_/S267K Heavy Chain
EVQLVESGGGLVKPGGSLRLSCAASGFTFSNYWMNWVRQAPGKGLEWVGEIRLKSNNYATHYAEPVKGRFTISRDDSKSTVYLQMNSLKTEDTAVYYCTRYYGNYKGYFDVWGAGTLVTVSSASTKGPSVFPLAPSSKSTSGGTAALGCLVKDYFPEPVTVSWNSGALTSGVHTFPAVLQSSGLYSLSSVVTVPSSSLGTQTYICNVNHKPSNTKVDKKVEPKSCDKTHTCPPCPAPPVAGPSVFLFPPKPKDTLMISRTPEVTCVVVDVKHEDPEVKFNWYVDGVEVHNAKTKPREEQYNSTYRVVSVLTVLHQDWLNGKEYKCKVSNKALPAPIEKTISKAKGQPREPQVYTLPPSREEMTKNQVSLTCLVKGFYPSDIAVEWESNGQPENNYKTTPPVLDSDGSFFLYSKLTVDKSRWQQGNVFSCSVMHEALHNHYTQKSLSLSPGK

SEQ ID NO: 13876 - protein, 122 aa, Artificial Sequence; identical to SEQ ID NO: 8295
  Description of Artificial Sequence: Synthetic polypeptide
  VH of XENP018321

SEQ ID NO: 13877 - protein, 5 aa, Artificial Sequence
  Description of Artificial Sequence: Synthetic peptide
  XENP018321 vhCDR1
NYWMN

SEQ ID NO: 13878 - protein, 19 aa, Artificial Sequence
  Description of Artificial Sequence: Synthetic peptide
  XENP018321 vhCDR2
EIRLKSNNYATHYAEPVKG

SEQ ID NO: 13879 - protein, 11 aa, Artificial Sequence
  Description of Artificial Sequence: Synthetic peptide
  XENP018321 vhCDR3
YYGNYKGYFDV

SEQ ID NO: 13880 - protein, 214 aa, Artificial Sequence; identical to SEQ ID NO: 11550
  Description of Artificial Sequence: Synthetic polypeptide
  XENP018321 1G6_H1.216_L1_IgG1_PVA_/S267K Light Chain

SEQ ID NO: 13881 - protein, 107 aa, Artificial Sequence; identical to SEQ ID NO: 6247
  Description of Artificial Sequence: Synthetic polypeptide
  VL of XENP018321

SEQ ID NO: 13882 - protein, 11 aa, Artificial Sequence
  Description of Artificial Sequence: Synthetic peptide
  XENP018321 vlCDR1
RASQSVSNDVA

SEQ ID NO: 13883 - protein, 7 aa, Artificial Sequence
  Description of Artificial Sequence: Synthetic peptide
  XENP018321 vlCDR2
YASHRYT

SEQ ID NO: 13884 - protein, 9 aa, Artificial Sequence
  Description of Artificial Sequence: Synthetic peptide
  XENP018321 vlCDR3
QQDYSSPRT

SEQ ID NO: 13885 - protein, 451 aa, Artificial Sequence
  Description of Artificial Sequence: Synthetic polypeptide
  XENP018322 1G6_H1.217_L1_IgG1_PVA_/S267K Heavy Chain
EVQLVESGGGLVKPGGSLRLSCAASGFTFSNYWMNWVRQAPGKGLEWVGEIRLKSNNYATHYAEPVKGRFTISRDDSKSTVYLQMNSLKTEDTAVYYCTRYYGNYLGYFDVWGAGTLVTVSSASTKGPSVFPLAPSSKSTSGGTAALGCLVKDYFPEPVTVSWNSGALTSGVHTFPAVLQSSGLYSLSSVVTVPSSSLGTQTYICNVNHKPSNTKVDKKVEPKSCDKTHTCPPCPAPPVAGPSVFLFPPKPKDTLMISRTPEVTCVVVDVKHEDPEVKFNWYVDGVEVHNAKTKPREEQYNSTYRVVSVLTVLHQDWLNGKEYKCKVSNKALPAPIEKTISKAKGQPREPQVYTLPPSREEMTKNQVSLTCLVKGFYPSDIAVEWESNGQPENNYKTTPPVLDSDGSFFLYSKLTVDKSRWQQGNVFSCSVMHEALHNHYTQKSLSLSPGK

SEQ ID NO: 13886 - protein, 122 aa, Artificial Sequence; identical to SEQ ID NO: 8304
  Description of Artificial Sequence: Synthetic polypeptide
  VH of XENP018322

SEQ ID NO: 13887 - protein, 5 aa, Artificial Sequence
  Description of Artificial Sequence: Synthetic peptide
  XENP018322 vhCDR1
NYWMN

SEQ ID NO: 13888 - protein, 19 aa, Artificial Sequence
  Description of Artificial Sequence: Synthetic peptide
  XENP018322 vhCDR2
EIRLKSNNYATHYAEPVKG

SEQ ID NO: 13889 - protein, 11 aa, Artificial Sequence
  Description of Artificial Sequence: Synthetic peptide
  XENP018322 vhCDR3
YYGNYLGYFDV

SEQ ID NO: 13890 - protein, 214 aa, Artificial Sequence; identical to SEQ ID NO: 11550
  Description of Artificial Sequence: Synthetic polypeptide
  XENP018322 1G6_H1.217_L1_IgG1_PVA_/S267K Light Chain

SEQ ID NO: 13891 - protein, 107 aa, Artificial Sequence; identical to SEQ ID NO: 6247
  Description of Artificial Sequence: Synthetic polypeptide
  VL of XENP018322

SEQ ID NO: 13892 - protein, 11 aa, Artificial Sequence
  Description of Artificial Sequence: Synthetic peptide
  XENP018322 vlCDR1
RASQSVSNDVA

SEQ ID NO: 13893 - protein, 7 aa, Artificial Sequence
  Description of Artificial Sequence: Synthetic peptide
  XENP018322 vlCDR2
YASHRYT

SEQ ID NO: 13894 - protein, 9 aa, Artificial Sequence
  Description of Artificial Sequence: Synthetic peptide
  XENP018322 vlCDR3
QQDYSSPRT

SEQ ID NO: 13895 - protein, 451 aa, Artificial Sequence
  Description of Artificial Sequence: Synthetic polypeptide
  XENP018323 1G6_H1.218_L1_IgG1_PVA_/S267K Heavy Chain
EVQLVESGGGLVKPGGSLRLSCAASGFTFSNYWMNWVRQAPGKGLEWVGEIRLKSNNYATHYAEPVKGRFTISRDDSKSTVYLQMNSLKTEDTAVYYCTRYYGNYFGYFDVWGAGTLVTVSSASTKGPSVFPLAPSSKSTSGGTAALGCLVKDYFPEPVTVSWNSGALTSGVHTFPAVLQSSGLYSLSSVVTVPSSSLGTQTYICNVNHKPSNTKVDKKVEPKSCDKTHTCPPCPAPPVAGPSVFLFPPKPKDTLMISRTPEVTCVVVDVKHEDPEVKFNWYVDGVEVHNAKTKPREEQYNSTYRVVSVLTVLHQDWLNGKEYKCKVSNKALPAPIEKTISKAKGQPREPQVYTLPPSREEMTKNQVSLTCLVKGFYPSDIAVEWESNGQPENNYKTTPPVLDSDGSFFLYSKLTVDKSRWQQGNVFSCSVMHEALHNHYTQKSLSLSPGK

SEQ ID NO: 13896 - protein, 122 aa, Artificial Sequence; identical to SEQ ID NO: 8313
  Description of Artificial Sequence: Synthetic polypeptide
  VH of XENP018323

SEQ ID NO: 13897 - protein, 5 aa, Artificial Sequence
  Description of Artificial Sequence: Synthetic peptide
  XENP018323 vhCDR1
NYWMN

SEQ ID NO: 13898 - protein, 19 aa, Artificial Sequence
  Description of Artificial Sequence: Synthetic peptide
  XENP018323 vhCDR2
EIRLKSNNYATHYAEPVKG

SEQ ID NO: 13899 - protein, 11 aa, Artificial Sequence
  Description of Artificial Sequence: Synthetic peptide
  XENP018323 vhCDR3
YYGNYFGYFDV

SEQ ID NO: 13900 - protein, 214 aa, Artificial Sequence; identical to SEQ ID NO: 11550
  Description of Artificial Sequence: Synthetic polypeptide
  XENP018323 1G6_H1.218_L1_IgG1_PVA_/S267K Light Chain

SEQ ID NO: 13901 - protein, 107 aa, Artificial Sequence; identical to SEQ ID NO: 6247
  Description of Artificial Sequence: Synthetic polypeptide
  VL of XENP018323

SEQ ID NO: 13902 - protein, 11 aa, Artificial Sequence
  Description of Artificial Sequence: Synthetic peptide
  XENP018323 vlCDR1
RASQSVSNDVA

SEQ ID NO: 13903 - protein, 7 aa, Artificial Sequence
  Description of Artificial Sequence: Synthetic peptide
  XENP018323 vlCDR2
YASHRYT

SEQ ID NO: 13904 - protein, 9 aa, Artificial Sequence
  Description of Artificial Sequence: Synthetic peptide
  XENP018323 vlCDR3
QQDYSSPRT

SEQ ID NO: 13905 - protein, 451 aa, Artificial Sequence
  Description of Artificial Sequence: Synthetic polypeptide
  XENP018324 1G6_H1.219_L1_IgG1_PVA_/S267K Heavy Chain
EVQLVESGGGLVKPGGSLRLSCAASGFTFSNYWMNWVRQAPGKGLEWVGEIRLKSNNYATHYAEPVKGRFTISRDDSKSTVYLQMNSLKTEDTAVYYCTRYYGNYGAYFDVWGAGTLVTVSSASTKGPSVFPLAPSSKSTSGGTAALGCLVKDYFPEPVTVSWNSGALTSGVHTFPAVLQSSGLYSLSSVVTVPSSSLGTQTYICNVNHKPSNTKVDKKVEPKSCDKTHTCPPCPAPPVAGPSVFLFPPKPKDTLMISRTPEVTCVVVDVKHEDPEVKFNWYVDGVEVHNAKTKPREEQYNSTYRVVSVLTVLHQDWLNGKEYKCKVSNKALPAPIEKTISKAKGQPREPQVYTLPPSREEMTKNQVSLTCLVKGFYPSDIAVEWESNGQPENNYKTTPPVLDSDGSFFLYSKLTVDKSRWQQGNVFSCSVMHEALHNHYTQKSLSLSPGK

SEQ ID NO: 13906 - protein, 122 aa, Artificial Sequence; identical to SEQ ID NO: 8322
  Description of Artificial Sequence: Synthetic polypeptide
  VH of XENP018324

SEQ ID NO: 13907 - protein, 5 aa, Artificial Sequence
  Description of Artificial Sequence: Synthetic peptide
  XENP018324 vhCDR1
NYWMN

SEQ ID NO: 13908 - protein, 19 aa, Artificial Sequence
  Description of Artificial Sequence: Synthetic peptide
  XENP018324 vhCDR2
EIRLKSNNYATHYAEPVKG

SEQ ID NO: 13909 - protein, 11 aa, Artificial Sequence
  Description of Artificial Sequence: Synthetic peptide
  XENP018324 vhCDR3
YYGNYGAYFDV

SEQ ID NO: 13910 - protein, 214 aa, Artificial Sequence; identical to SEQ ID NO: 11550
  Description of Artificial Sequence: Synthetic polypeptide
  XENP018324 1G6_H1.219_L1_IgG1_PVA_/S267K Light Chain

SEQ ID NO: 13911 - protein, 107 aa, Artificial Sequence; identical to SEQ ID NO: 6247
  Description of Artificial Sequence: Synthetic polypeptide
  VL of XENP018324

SEQ ID NO: 13912 - protein, 11 aa, Artificial Sequence
  Description of Artificial Sequence: Synthetic peptide
  XENP018324 vlCDR1
RASQSVSNDVA

SEQ ID NO: 13913 - protein, 7 aa, Artificial Sequence
  Description of Artificial Sequence: Synthetic peptide
  XENP018324 vlCDR2
YASHRYT

SEQ ID NO: 13914 - protein, 9 aa, Artificial Sequence
  Description of Artificial Sequence: Synthetic peptide
  XENP018324 vlCDR3
QQDYSSPRT

SEQ ID NO: 13915 - protein, 451 aa, Artificial Sequence
  Description of Artificial Sequence: Synthetic polypeptide
  XENP018325 1G6_H1.220_L1_IgG1_PVA_/S267K Heavy Chain
EVQLVESGGGLVKPGGSLRLSCAASGFTFSNYWMNWVRQAPGKGLEWVGEIRLKSNNYATHYAEPVKGRFTISRDDSKSTVYLQMNSLKTEDTAVYYCTRYYGNYGSYFDVWGAGTLVTVSSASTKGPSVFPLAPSSKSTSGGTAALGCLVKDYFPEPVTVSWNSGALTSGVHTFPAVLQSSGLYSLSSVVTVPSSSLGTQTYICNVNHKPSNTKVDKKVEPKSCDKTHTCPPCPAPPVAGPSVFLFPPKPKDTLMISRTPEVTCVVVDVKHEDPEVKFNWYVDGVEVHNAKTKPREEQYNSTYRVVSVLTVLHQDWLNGKEYKCKVSNKALPAPIEKTISKAKGQPREPQVYTLPPSREEMTKNQVSLTCLVKGFYPSDIAVEWESNGQPENNYKTTPPVLDSDGSFFLYSKLTVDKSRWQQGNVFSCSVMHEALHNHYTQKSLSLSPGK

SEQ ID NO: 13916 - protein, 122 aa, Artificial Sequence; identical to SEQ ID NO: 8331
  Description of Artificial Sequence: Synthetic polypeptide
  VH of XENP018325

SEQ ID NO: 13917 - protein, 5 aa, Artificial Sequence
  Description of Artificial Sequence: Synthetic peptide
  XENP018325 vhCDR1
NYWMN

SEQ ID NO: 13918 - protein, 19 aa, Artificial Sequence
  Description of Artificial Sequence: Synthetic peptide
  XENP018325 vhCDR2
EIRLKSNNYATHYAEPVKG

SEQ ID NO: 13919 - protein, 11 aa, Artificial Sequence
  Description of Artificial Sequence: Synthetic peptide
  XENP018325 vhCDR3
YYGNYGSYFDV

SEQ ID NO: 13920 - protein, 214 aa, Artificial Sequence; identical to SEQ ID NO: 11550
  Description of Artificial Sequence: Synthetic polypeptide
  XENP018325 1G6_H1.220_L1_IgG1_PVA_/S267K Light Chain

SEQ ID NO: 13921 - protein, 107 aa, Artificial Sequence; identical to SEQ ID NO: 6247
  Description of Artificial Sequence: Synthetic polypeptide
  VL of XENP018325

SEQ ID NO: 13922 - protein, 11 aa, Artificial Sequence
  Description of Artificial Sequence: Synthetic peptide
  XENP018325 vlCDR1
RASQSVSNDVA

SEQ ID NO: 13923 - protein, 7 aa, Artificial Sequence
  Description of Artificial Sequence: Synthetic peptide
  XENP018325 vlCDR2
YASHRYT

SEQ ID NO: 13924 - protein, 9 aa, Artificial Sequence
  Description of Artificial Sequence: Synthetic peptide
  XENP018325 vlCDR3
QQDYSSPRT

SEQ ID NO: 13925 - protein, 451 aa, Artificial Sequence
  Description of Artificial Sequence: Synthetic polypeptide
  XENP018326 1G6_H1.221_L1_IgG1_PVA_/S267K Heavy Chain
EVQLVESGGGLVKPGGSLRLSCAASGFTFSNYWMNWVRQAPGKGLEWVGEIRLKSNNYATHYAEPVKGRFTISRDDSKSTVYLQMNSLKTEDTAVYYCTRYYGNYGTYFDVWGAGTLVTVSSASTKGPSVFPLAPSSKSTSGGTAALGCLVKDYFPEPVTVSWNSGALTSGVHTFPAVLQSSGLYSLSSVVTVPSSSLGTQTYICNVNHKPSNTKVDKKVEPKSCDKTHTCPPCPAPPVAGPSVFLFPPKPKDTLMISRTPEVTCVVVDVKHEDPEVKFNWYVDGVEVHNAKTKPREEQYNSTYRVVSVLTVLHQDWLNGKEYKCKVSNKALPAPIEKTISKAKGQPREPQVYTLPPSREEMTKNQVSLTCLVKGFYPSDIAVEWESNGQPENNYKTTPPVLDSDGSFFLYSKLTVDKSRWQQGNVFSCSVMHEALHNHYTQKSLSLSPGK

SEQ ID NO: 13926 - protein, 122 aa, Artificial Sequence; identical to SEQ ID NO: 8340
  Description of Artificial Sequence: Synthetic polypeptide
  VH of XENP018326

SEQ ID NO: 13927 - protein, 5 aa, Artificial Sequence
  Description of Artificial Sequence: Synthetic peptide
  XENP018326 vhCDR1
NYWMN

SEQ ID NO: 13928 - protein, 19 aa, Artificial Sequence
  Description of Artificial Sequence: Synthetic peptide
  XENP018326 vhCDR2
EIRLKSNNYATHYAEPVKG

SEQ ID NO: 13929 - protein, 11 aa, Artificial Sequence
  Description of Artificial Sequence: Synthetic peptide
  XENP018326 vhCDR3
YYGNYGTYFDV

SEQ ID NO: 13930 - protein, 214 aa, Artificial Sequence; identical to SEQ ID NO: 11550
  Description of Artificial Sequence: Synthetic polypeptide
  XENP018326 1G6_H1.221_L1_IgG1_PVA_/S267K Light Chain

SEQ ID NO: 13931 - protein, 107 aa, Artificial Sequence; identical to SEQ ID NO: 6247
  Description of Artificial Sequence: Synthetic polypeptide
  VL of XENP018326

SEQ ID NO: 13932 - protein, 11 aa, Artificial Sequence
  Description of Artificial Sequence: Synthetic peptide
  XENP018326 vlCDR1
RASQSVSNDVA

SEQ ID NO: 13933 - protein, 7 aa, Artificial Sequence
  Description of Artificial Sequence: Synthetic peptide
  XENP018326 vlCDR2
YASHRYT

SEQ ID NO: 13934 - protein, 9 aa, Artificial Sequence
  Description of Artificial Sequence: Synthetic peptide
  XENP018326 vlCDR3
QQDYSSPRT

SEQ ID NO: 13935 - protein, 451 aa, Artificial Sequence
  Description of Artificial Sequence: Synthetic polypeptide
  XENP018327 1G6_H1.222_L1_IgG1_PVA_/S267K Heavy Chain
EVQLVESGGGLVKPGGSLRLSCAASGFTFSNYWMNWVRQAPGKGLEWVGEIRLKSNNYATHYAEPVKGRFTISRDDSKSTVYLQMNSLKTEDTAVYYCTRYYGNYGNYFDVWGAGTLVTVSSASTKGPSVFPLAPSSKSTSGGTAALGCLVKDYFPEPVTVSWNSGALTSGVHTFPAVLQSSGLYSLSSVVTVPSSSLGTQTYICNVNHKPSNTKVDKKVEPKSCDKTHTCPPCPAPPVAGPSVFLFPPKPKDTLMISRTPEVTCVVVDVKHEDPEVKFNWYVDGVEVHNAKTKPREEQYNSTYRVVSVLTVLHQDWLNGKEYKCKVSNKALPAPIEKTISKAKGQPREPQVYTLPPSREEMTKNQVSLTCLVKGFYPSDIAVEWESNGQPENNYKTTPPVLDSDGSFFLYSKLTVDKSRWQQGNVFSCSVMHEALHNHYTQKSLSLSPGK

SEQ ID NO: 13936 - protein, 122 aa, Artificial Sequence; identical to SEQ ID NO: 8349
  Description of Artificial Sequence: Synthetic polypeptide
  VH of XENP018327

SEQ ID NO: 13937 - protein, 5 aa, Artificial Sequence
  Description of Artificial Sequence: Synthetic peptide
  XENP018327 vhCDR1
NYWMN

SEQ ID NO: 13938 - protein, 19 aa, Artificial Sequence
  Description of Artificial Sequence: Synthetic peptide
  XENP018327 vhCDR2
EIRLKSNNYATHYAEPVKG

SEQ ID NO: 13939 - protein, 11 aa, Artificial Sequence
  Description of Artificial Sequence: Synthetic peptide
  XENP018327 vhCDR3
YYGNYGNYFDV

SEQ ID NO: 13940 - protein, 214 aa, Artificial Sequence; identical to SEQ ID NO: 11550
  Description of Artificial Sequence: Synthetic polypeptide
  XENP018327 1G6_H1.222_L1_IgG1_PVA_/S267K Light Chain

SEQ ID NO: 13941 - protein, 107 aa, Artificial Sequence; identical to SEQ ID NO: 6247
  Description of Artificial Sequence: Synthetic polypeptide
  VL of XENP018327

SEQ ID NO: 13942 - protein, 11 aa, Artificial Sequence
  Description of Artificial Sequence: Synthetic peptide
  XENP018327 vlCDR1
RASQSVSNDVA

SEQ ID NO: 13943 - protein, 7 aa, Artificial Sequence
  Description of Artificial Sequence: Synthetic peptide
  XENP018327 vlCDR2
YASHRYT

SEQ ID NO: 13944 - protein, 9 aa, Artificial Sequence
  Description of Artificial Sequence: Synthetic peptide
  XENP018327 vlCDR3
QQDYSSPRT

SEQ ID NO: 13945 - protein, 451 aa, Artificial Sequence
  Description of Artificial Sequence: Synthetic polypeptide
  XENP018328 1G6_H1.223_L1_IgG1_PVA_/S267K Heavy Chain
EVQLVESGGGLVKPGGSLRLSCAASGFTFSNYWMNWVRQAPGKGLEWVGEIRLKSNNYATHYAEPVKGRFTISRDDSKSTVYLQMNSLKTEDTAVYYCTRYYGNYGHYFDVWGAGTLVTVSSASTKGPSVFPLAPSSKSTSGGTAALGCLVKDYFPEPVTVSWNSGALTSGVHTFPAVLQSSGLYSLSSVVTVPSSSLGTQTYICNVNHKPSNTKVDKKVEPKSCDKTHTCPPCPAPPVAGPSVFLFPPKPKDTLMISRTPEVTCVVVDVKHEDPEVKFNWYVDGVEVHNAKTKPREEQYNSTYRVVSVLTVLHQDWLNGKEYKCKVSNKALPAPIEKTISKAKGQPREPQVYTLPPSREEMTKNQVSLTCLVKGFYPSDIAVEWESNGQPENNYKTTPPVLDSDGSFFLYSKLTVDKSRWQQGNVFSCSVMHEALHNHYTQKSLSLSPGK

SEQ ID NO: 13946 - protein, 122 aa, Artificial Sequence; identical to SEQ ID NO: 8358
  Description of Artificial Sequence: Synthetic polypeptide
  VH of XENP018328

SEQ ID NO: 13947 - protein, 5 aa, Artificial Sequence
  Description of Artificial Sequence: Synthetic peptide
  XENP018328 vhCDR1
NYWMN

SEQ ID NO: 13948 - protein, 19 aa, Artificial Sequence
  Description of Artificial Sequence: Synthetic peptide
  XENP018328 vhCDR2
EIRLKSNNYATHYAEPVKG

SEQ ID NO: 13949 - protein, 11 aa, Artificial Sequence
  Description of Artificial Sequence: Synthetic peptide
  XENP018328 vhCDR3
YYGNYGHYFDV

SEQ ID NO: 13950 - protein, 214 aa, Artificial Sequence; identical to SEQ ID NO: 11550
  Description of Artificial Sequence: Synthetic polypeptide
  XENP018328 1G6_H1.223_L1_IgG1_PVA_/S267K Light Chain

SEQ ID NO: 13951 - protein, 107 aa, Artificial Sequence; identical to SEQ ID NO: 6247
  Description of Artificial Sequence: Synthetic polypeptide
  VL of XENP018328

SEQ ID NO: 13952 - protein, 11 aa, Artificial Sequence
  Description of Artificial Sequence: Synthetic peptide
  XENP018328 vlCDR1
RASQSVSNDVA

SEQ ID NO: 13953 - protein, 7 aa, Artificial Sequence
  Description of Artificial Sequence: Synthetic peptide
  XENP018328 vlCDR2
YASHRYT

SEQ ID NO: 13954 - protein, 9 aa, Artificial Sequence
  Description of Artificial Sequence: Synthetic peptide
  XENP018328 vlCDR3
QQDYSSPRT

SEQ ID NO: 13955 - protein, 451 aa, Artificial Sequence
  Description of Artificial Sequence: Synthetic polypeptide
  XENP018329 1G6_H1.224_L1_IgG1_PVA_/S267K Heavy Chain
EVQLVESGGGLVKPGGSLRLSCAASGFTFSNYWMNWVRQAPGKGLEWVGEIRLKSNNYATHYAEPVKGRFTISRDDSKSTVYLQMNSLKTEDTAVYYCTRYYGNYGDYFDVWGAGTLVTVSSASTKGPSVFPLAPSSKSTSGGTAALGCLVKDYFPEPVTVSWNSGALTSGVHTFPAVLQSSGLYSLSSVVTVPSSSLGTQTYICNVNHKPSNTKVDKKVEPKSCDKTHTCPPCPAPPVAGPSVFLFPPKPKDTLMISRTPEVTCVVVDVKHEDPEVKFNWYVDGVEVHNAKTKPREEQYNSTYRVVSVLTVLHQDWLNGKEYKCKVSNKALPAPIEKTISKAKGQPREPQVYTLPPSREEMTKNQVSLTCLVKGFYPSDIAVEWESNGQPENNYKTTPPVLDSDGSFFLYSKLTVDKSRWQQGNVFSCSVMHEALHNHYTQKSLSLSPGK

SEQ ID NO: 13956 - protein, 122 aa, Artificial Sequence; identical to SEQ ID NO: 8367
  Description of Artificial Sequence: Synthetic polypeptide
  VH of XENP018329

SEQ ID NO: 13957 - protein, 5 aa, Artificial Sequence
  Description of Artificial Sequence: Synthetic peptide
  XENP018329 vhCDR1
NYWMN

SEQ ID NO: 13958 - protein, 19 aa, Artificial Sequence
  Description of Artificial Sequence: Synthetic peptide
  XENP018329 vhCDR2
EIRLKSNNYATHYAEPVKG

SEQ ID NO: 13959 - protein, 11 aa, Artificial Sequence
  Description of Artificial Sequence: Synthetic peptide
  XENP018329 vhCDR3
YYGNYGDYFDV

SEQ ID NO: 13960 - protein, 214 aa, Artificial Sequence; identical to SEQ ID NO: 11550
  Description of Artificial Sequence: Synthetic polypeptide
  XENP018329 1G6_H1.224_L1_IgG1_PVA_/S267K Light Chain

SEQ ID NO: 13961 - protein, 107 aa, Artificial Sequence; identical to SEQ ID NO: 6247
  Description of Artificial Sequence: Synthetic polypeptide
  VL of XENP018329

SEQ ID NO: 13962 - protein, 11 aa, Artificial Sequence
  Description of Artificial Sequence: Synthetic peptide
  XENP018329 vlCDR1
RASQSVSNDVA

SEQ ID NO: 13963 - protein, 7 aa, Artificial Sequence
  Description of Artificial Sequence: Synthetic peptide
  XENP018329 vlCDR2
YASHRYT

SEQ ID NO: 13964 - protein, 9 aa, Artificial Sequence
  Description of Artificial Sequence: Synthetic peptide
  XENP018329 vlCDR3
QQDYSSPRT

SEQ ID NO: 13965 - protein, 451 aa, Artificial Sequence
  Description of Artificial Sequence: Synthetic polypeptide
  XENP018330 1G6_H1.225_L1_IgG1_PVA_/S267K Heavy Chain
EVQLVESGGGLVKPGGSLRLSCAASGFTFSNYWMNWVRQAPGKGLEWVGEIRLKSNNYATHYAEPVKGRFTISRDDSKSTVYLQMNSLKTEDTAVYYCTRYYGNYGKYFDVWGAGTLVTVSSASTKGPSVFPLAPSSKSTSGGTAALGCLVKDYFPEPVTVSWNSGALTSGVHTFPAVLQSSGLYSLSSVVTVPSSSLGTQTYICNVNHKPSNTKVDKKVEPKSCDKTHTCPPCPAPPVAGPSVFLFPPKPKDTLMISRTPEVTCVVVDVKHEDPEVKFNWYVDGVEVHNAKTKPREEQYNSTYRVVSVLTVLHQDWLNGKEYKCKVSNKALPAPIEKTISKAKGQPREPQVYTLPPSREEMTKNQVSLTCLVKGFYPSDIAVEWESNGQPENNYKTTPPVLDSDGSFFLYSKLTVDKSRWQQGNVFSCSVMHEALHNHYTQKSLSLSPGK

SEQ ID NO: 13966 - protein, 122 aa, Artificial Sequence; identical to SEQ ID NO: 8376
  Description of Artificial Sequence: Synthetic polypeptide
  VH of XENP018330

SEQ ID NO: 13967 - protein, 5 aa, Artificial Sequence
  Description of Artificial Sequence: Synthetic peptide
  XENP018330 vhCDR1
NYWMN

SEQ ID NO: 13968 - protein, 19 aa, Artificial Sequence
  Description of Artificial Sequence: Synthetic peptide
  XENP018330 vhCDR2
EIRLKSNNYATHYAEPVKG

SEQ ID NO: 13969 - protein, 11 aa, Artificial Sequence
  Description of Artificial Sequence: Synthetic peptide
  XENP018330 vhCDR3
YYGNYGKYFDV

SEQ ID NO: 13970 - protein, 214 aa, Artificial Sequence; identical to SEQ ID NO: 11550
  Description of Artificial Sequence: Synthetic polypeptide
  XENP018330 1G6_H1.225_L1_IgG1_PVA_/S267K Light Chain

SEQ ID NO: 13971 - protein, 107 aa, Artificial Sequence; identical to SEQ ID NO: 6247
  Description of Artificial Sequence: Synthetic polypeptide
  VL of XENP018330

SEQ ID NO: 13972 - protein, 11 aa, Artificial Sequence
  Description of Artificial Sequence: Synthetic peptide
  XENP018330 vlCDR1
RASQSVSNDVA

SEQ ID NO: 13973 - protein, 7 aa, Artificial Sequence
  Description of Artificial Sequence: Synthetic peptide
  XENP018330 vlCDR2
YASHRYT

SEQ ID NO: 13974 - protein, 9 aa, Artificial Sequence
  Description of Artificial Sequence: Synthetic peptide
  XENP018330 vlCDR3
QQDYSSPRT

SEQ ID NO: 13975 - protein, 451 aa, Artificial Sequence
  Description of Artificial Sequence: Synthetic polypeptide
  XENP018331 1G6_H1.226_L1_IgG1_PVA_/S267K Heavy Chain
EVQLVESGGGLVKPGGSLRLSCAASGFTFSNYWMNWVRQAPGKGLEWVGEIRLKSNNYATHYAEPVKGRFTISRDDSKSTVYLQMNSLKTEDTAVYYCTRYYGNYGLYFDVWGAGTLVTVSSASTKGPSVFPLAPSSKSTSGGTAALGCLVKDYFPEPVTVSWNSGALTSGVHTFPAVLQSSGLYSLSSVVTVPSSSLGTQTYICNVNHKPSNTKVDKKVEPKSCDKTHTCPPCPAPPVAGPSVFLFPPKPKDTLMISRTPEVTCVVVDVKHEDPEVKFNWYVDGVEVHNAKTKPREEQYNSTYRVVSVLTVLHQDWLNGKEYKCKVSNKALPAPIEKTISKAKGQPREPQVYTLPPSREEMTKNQVSLTCLVKGFYPSDIAVEWESNGQPENNYKTTPPVLDSDGSFFLYSKLTVDKSRWQQGNVFSCSVMHEALHNHYTQKSLSLSPGK

SEQ ID NO: 13976 - protein, 122 aa, Artificial Sequence; identical to SEQ ID NO: 8385
  Description of Artificial Sequence: Synthetic polypeptide
  VH of XENP018331

SEQ ID NO: 13977 - protein, 5 aa, Artificial Sequence
  Description of Artificial Sequence: Synthetic peptide
  XENP018331 vhCDR1
NYWMN

SEQ ID NO: 13978 - protein, 19 aa, Artificial Sequence
  Description of Artificial Sequence: Synthetic peptide
  XENP018331 vhCDR2
EIRLKSNNYATHYAEPVKG

SEQ ID NO: 13979 - protein, 11 aa, Artificial Sequence
  Description of Artificial Sequence: Synthetic peptide
  XENP018331 vhCDR3
YYGNYGLYFDV

SEQ ID NO: 13980 - protein, 214 aa, Artificial Sequence; identical to SEQ ID NO: 11550
  Description of Artificial Sequence: Synthetic polypeptide
  XENP018331 1G6_H1.226_L1_IgG1_PVA_/S267K Light Chain

SEQ ID NO: 13981 - protein, 107 aa, Artificial Sequence; identical to SEQ ID NO: 6247
  Description of Artificial Sequence: Synthetic polypeptide
  VL of XENP018331

SEQ ID NO: 13982 - protein, 11 aa, Artificial Sequence
  Description of Artificial Sequence: Synthetic peptide
  XENP018331 vlCDR1
RASQSVSNDVA

SEQ ID NO: 13983 - protein, 7 aa, Artificial Sequence
  Description of Artificial Sequence: Synthetic peptide
  XENP018331 vlCDR2
YASHRYT

SEQ ID NO: 13984 - protein, 9 aa, Artificial Sequence
  Description of Artificial Sequence: Synthetic peptide
  XENP018331 vlCDR3
QQDYSSPRT

SEQ ID NO: 13985 - protein, 451 aa, Artificial Sequence
  Description of Artificial Sequence: Synthetic polypeptide
  XENP018332 1G6_H1.227_L1_IgG1_PVA_/S267K Heavy Chain
EVQLVESGGGLVKPGGSLRLSCAASGFTFSNYWMNWVRQAPGKGLEWVGEIRLKSNNYATHYAEPVKGRFTISRDDSKSTVYLQMNSLKTEDTAVYYCTRYYGNYGFYFDVWGAGTLVTVSSASTKGPSVFPLAPSSKSTSGGTAALGCLVKDYFPEPVTVSWNSGALTSGVHTFPAVLQSSGLYSLSSVVTVPSSSLGTQTYICNVNHKPSNTKVDKKVEPKSCDKTHTCPPCPAPPVAGPSVFLFPPKPKDTLMISRTPEVTCVVVDVKHEDPEVKFNWYVDGVEVHNAKTKPREEQYNSTYRVVSVLTVLHQDWLNGKEYKCKVSNKALPAPIEKTISKAKGQPREPQVYTLPPSREEMTKNQVSLTCLVKGFYPSDIAVEWESNGQPENNYKTTPPVLDSDGSFFLYSKLTVDKSRWQQGNVFSCSVMHEALHNHYTQKSLSLSPGK

SEQ ID NO: 13986 - protein, 122 aa, Artificial Sequence; identical to SEQ ID NO: 8394
  Description of Artificial Sequence: Synthetic polypeptide
  VH of XENP018332

SEQ ID NO: 13987 - protein, 5 aa, Artificial Sequence
  Description of Artificial Sequence: Synthetic peptide
  XENP018332 vhCDR1
NYWMN

SEQ ID NO: 13988 - protein, 19 aa, Artificial Sequence
  Description of Artificial Sequence: Synthetic peptide
  XENP018332 vhCDR2
EIRLKSNNYATHYAEPVKG

SEQ ID NO: 13989 - protein, 11 aa, Artificial Sequence
  Description of Artificial Sequence: Synthetic peptide
  XENP018332 vhCDR3
YYGNYGFYFDV

SEQ ID NO: 13990 - protein, 214 aa, Artificial Sequence; identical to SEQ ID NO: 11550
  Description of Artificial Sequence: Synthetic polypeptide
  XENP018332 1G6_H1.227_L1_IgG1_PVA_/S267K Light Chain

SEQ ID NO: 13991 - protein, 107 aa, Artificial Sequence; identical to SEQ ID NO: 6247
  Description of Artificial Sequence: Synthetic polypeptide
  VL of XENP018332

SEQ ID NO: 13992 - protein, 11 aa, Artificial Sequence
  Description of Artificial Sequence: Synthetic peptide
  XENP018332 vlCDR1
RASQSVSNDVA

SEQ ID NO: 13993 - protein, 7 aa, Artificial Sequence
  Description of Artificial Sequence: Synthetic peptide
  XENP018332 vlCDR2
YASHRYT

SEQ ID NO: 13994 - protein, 9 aa, Artificial Sequence
  Description of Artificial Sequence: Synthetic peptide
  XENP018332 vlCDR3
QQDYSSPRT

SEQ ID NO: 13995 - protein, 451 aa, Artificial Sequence
  Description of Artificial Sequence: Synthetic polypeptide
  XENP018333 1G6_H1.228_L1_IgG1_PVA_/S267K Heavy Chain
EVQLVESGGGLVKPGGSLRLSCAASGFTFSNYWMNWVRQAPGKGLEWVGEIRLKSNNYATHYAEPVKGRFTISRDDSKSTVYLQMNSLKTEDTAVYYCTRYYGNYGGFFDVWGAGTLVTVSSASTKGPSVFPLAPSSKSTSGGTAALGCLVKDYFPEPVTVSWNSGALTSGVHTFPAVLQSSGLYSLSSVVTVPSSSLGTQTYICNVNHKPSNTKVDKKVEPKSCDKTHTCPPCPAPPVAGPSVFLFPPKPKDTLMISRTPEVTCVVVDVKHEDPEVKFNWYVDGVEVHNAKTKPREEQYNSTYRVVSVLTVLHQDWLNGKEYKCKVSNKALPAPIEKTISKAKGQPREPQVYTLPPSREEMTKNQVSLTCLVKGFYPSDIAVEWESNGQPENNYKTTPPVLDSDGSFFLYSKLTVDKSRWQQGNVFSCSVMHEALHNHYTQKSLSLSPGK

SEQ ID NO: 13996 - protein, 122 aa, Artificial Sequence; identical to SEQ ID NO: 8403
  Description of Artificial Sequence: Synthetic polypeptide
  VH of XENP018333

SEQ ID NO: 13997 - protein, 5 aa, Artificial Sequence
  Description of Artificial Sequence: Synthetic peptide
  XENP018333 vhCDR1
NYWMN

SEQ ID NO: 13998 - protein, 19 aa, Artificial Sequence
  Description of Artificial Sequence: Synthetic peptide
  XENP018333 vhCDR2
EIRLKSNNYATHYAEPVKG

SEQ ID NO: 13999 - protein, 11 aa, Artificial Sequence
  Description of Artificial Sequence: Synthetic peptide
  XENP018333 vhCDR3
YYGNYGGFFDV

SEQ ID NO: 14000 - protein, 214 aa, Artificial Sequence; identical to SEQ ID NO: 11550
  Description of Artificial Sequence: Synthetic polypeptide
  XENP018333 1G6_H1.228_L1_IgG1_PVA_/S267K Light Chain

SEQ ID NO: 14001 - protein, 107 aa, Artificial Sequence; identical to SEQ ID NO: 6247
  Description of Artificial Sequence: Synthetic polypeptide
  VL of XENP018333

SEQ ID NO: 14002 - protein, 11 aa, Artificial Sequence
  Description of Artificial Sequence: Synthetic peptide
  XENP018333 vlCDR1
RASQSVSNDVA

SEQ ID NO: 14003 - protein, 7 aa, Artificial Sequence
  Description of Artificial Sequence: Synthetic peptide
  XENP018333 vlCDR2
YASHRYT

SEQ ID NO: 14004 - protein, 9 aa, Artificial Sequence
  Description of Artificial Sequence: Synthetic peptide
  XENP018333 vlCDR3
QQDYSSPRT

SEQ ID NO: 14005 - protein, 451 aa, Artificial Sequence
  Description of Artificial Sequence: Synthetic polypeptide
  XENP018334 1G6_H1.229_L1_IgG1_PVA_/S267K Heavy Chain
EVQLVESGGGLVKPGGSLRLSCAASGFTFSNYWMNWVRQAPGKGLEWVGEIRLKSNNYATHYAEPVKGRFTISRDDSKSTVYLQMNSLKTEDTAVYYCTRYYGNYGGHFDVWGAGTLVTVSSASTKGPSVFPLAPSSKSTSGGTAALGCLVKDYFPEPVTVSWNSGALTSGVHTFPAVLQSSGLYSLSSVVTVPSSSLGTQTYICNVNHKPSNTKVDKKVEPKSCDKTHTCPPCPAPPVAGPSVFLFPPKPKDTLMISRTPEVTCVVVDVKHEDPEVKFNWYVDGVEVHNAKTKPREEQYNSTYRVVSVLTVLHQDWLNGKEYKCKVSNKALPAPIEKTISKAKGQPREPQVYTLPPSREEMTKNQVSLTCLVKGFYPSDIAVEWESNGQPENNYKTTPPVLDSDGSFFLYSKLTVDKSRWQQGNVFSCSVMHEALHNHYTQKSLSLSPGK

SEQ ID NO: 14006 - protein, 122 aa, Artificial Sequence; identical to SEQ ID NO: 8412
  Description of Artificial Sequence: Synthetic polypeptide
  VH of XENP018334

SEQ ID NO: 14007 - protein, 5 aa, Artificial Sequence
  Description of Artificial Sequence: Synthetic peptide
  XENP018334 vhCDR1
NYWMN

SEQ ID NO: 14008 - protein, 19 aa, Artificial Sequence
  Description of Artificial Sequence: Synthetic peptide
  XENP018334 vhCDR2
EIRLKSNNYATHYAEPVKG

SEQ ID NO: 14009 - protein, 11 aa, Artificial Sequence
  Description of Artificial Sequence: Synthetic peptide
  XENP018334 vhCDR3
YYGNYGGHFDV

SEQ ID NO: 14010 - protein, 214 aa, Artificial Sequence; identical to SEQ ID NO: 11550
  Description of Artificial Sequence: Synthetic polypeptide
  XENP018334 1G6_H1.229_L1_IgG1_PVA_/S267K Light Chain

SEQ ID NO: 14011 - protein, 107 aa, Artificial Sequence; identical to SEQ ID NO: 6247
  Description of Artificial Sequence: Synthetic polypeptide
  VL of XENP018334

SEQ ID NO: 14012 - protein, 11 aa, Artificial Sequence
  Description of Artificial Sequence: Synthetic peptide
  XENP018334 vlCDR1
RASQSVSNDVA

SEQ ID NO: 14013 - protein, 7 aa, Artificial Sequence
  Description of Artificial Sequence: Synthetic peptide
  XENP018334 vlCDR2
YASHRYT

SEQ ID NO: 14014 - protein, 9 aa, Artificial Sequence
  Description of Artificial Sequence: Synthetic peptide
  XENP018334 vlCDR3
QQDYSSPRT

SEQ ID NO: 14015 - protein, 451 aa, Artificial Sequence
  Description of Artificial Sequence: Synthetic polypeptide
  XENP018335 1G6_H1.230_L1_IgG1_PVA_/S267K Heavy Chain
EVQLVESGGGLVKPGGSLRLSCAASGFTFSNYWMNWVRQAPGKGLEWVGEIRLKSNNYATHYAEPVKGRFTISRDDSKSTVYLQMNSLKTEDTAVYYCTRYYGNYGGLFDVWGAGTLVTVSSASTKGPSVFPLAPSSKSTSGGTAALGCLVKDYFPEPVTVSWNSGALTSGVHTFPAVLQSSGLYSLSSVVTVPSSSLGTQTYICNVNHKPSNTKVDKKVEPKSCDKTHTCPPCPAPPVAGPSVFLFPPKPKDTLMISRTPEVTCVVVDVKHEDPEVKFNWYVDGVEVHNAKTKPREEQYNSTYRVVSVLTVLHQDWLNGKEYKCKVSNKALPAPIEKTISKAKGQPREPQVYTLPPSREEMTKNQVSLTCLVKGFYPSDIAVEWESNGQPENNYKTTPPVLDSDGSFFLYSKLTVDKSRWQQGNVFSCSVMHEALHNHYTQKSLSLSPGK

SEQ ID NO: 14016 - protein, 122 aa, Artificial Sequence; identical to SEQ ID NO: 8421
  Description of Artificial Sequence: Synthetic polypeptide
  VH of XENP018335

SEQ ID NO: 14017 - protein, 5 aa, Artificial Sequence
  Description of Artificial Sequence: Synthetic peptide
  XENP018335 vhCDR1
NYWMN

SEQ ID NO: 14018 - protein, 19 aa, Artificial Sequence
  Description of Artificial Sequence: Synthetic peptide
  XENP018335 vhCDR2
EIRLKSNNYATHYAEPVKG

SEQ ID NO: 14019 - protein, 11 aa, Artificial Sequence
  Description of Artificial Sequence: Synthetic peptide
  XENP018335 vhCDR3
YYGNYGGLFDV

SEQ ID NO: 14020 - protein, 214 aa, Artificial Sequence; identical to SEQ ID NO: 11550
  Description of Artificial Sequence: Synthetic polypeptide
  XENP018335 1G6_H1.230_L1_IgG1_PVA_/S267K Light Chain

SEQ ID NO: 14021 - protein, 107 aa, Artificial Sequence; identical to SEQ ID NO: 6247
  Description of Artificial Sequence: Synthetic polypeptide
  VL of XENP018335

SEQ ID NO: 14022 - protein, 11 aa, Artificial Sequence
  Description of Artificial Sequence: Synthetic peptide
  XENP018335 vlCDR1
RASQSVSNDVA

SEQ ID NO: 14023 - protein, 7 aa, Artificial Sequence
  Description of Artificial Sequence: Synthetic peptide
  XENP018335 vlCDR2
YASHRYT

SEQ ID NO: 14024 - protein, 9 aa, Artificial Sequence
  Description of Artificial Sequence: Synthetic peptide
  XENP018335 vlCDR3
QQDYSSPRT

SEQ ID NO: 14025 - protein, 451 aa, Artificial Sequence
  Description of Artificial Sequence: Synthetic polypeptide
  XENP018336 1G6_H1.231_L1_IgG1_PVA_/S267K Heavy Chain
EVQLVESGGGLVKPGGSLRLSCAASGFTFSNYWMNWVRQAPGKGLEWVGEIRLKSNNYATHYAEPVKGRFTISRDDSKSTVYLQMNSLKTEDTAVYYCTRYYGNYGGWFDVWGAGTLVTVSSASTKGPSVFPLAPSSKSTSGGTAALGCLVKDYFPEPVTVSWNSGALTSGVHTFPAVLQSSGLYSLSSVVTVPSSSLGTQTYICNVNHKPSNTKVDKKVEPKSCDKTHTCPPCPAPPVAGPSVFLFPPKPKDTLMISRTPEVTCVVVDVKHEDPEVKFNWYVDGVEVHNAKTKPREEQYNSTYRVVSVLTVLHQDWLNGKEYKCKVSNKALPAPIEKTISKAKGQPREPQVYTLPPSREEMTKNQVSLTCLVKGFYPSDIAVEWESNGQPENNYKTTPPVLDSDGSFFLYSKLTVDKSRWQQGNVFSCSVMHEALHNHYTQKSLSLSPGK

SEQ ID NO: 14026 - protein, 122 aa, Artificial Sequence; identical to SEQ ID NO: 8430
  Description of Artificial Sequence: Synthetic polypeptide
  VH of XENP018336

SEQ ID NO: 14027 - protein, 5 aa, Artificial Sequence
  Description of Artificial Sequence: Synthetic peptide
  XENP018336 vhCDR1
NYWMN

SEQ ID NO: 14028 - protein, 19 aa, Artificial Sequence
  Description of Artificial Sequence: Synthetic peptide
  XENP018336 vhCDR2
EIRLKSNNYATHYAEPVKG

SEQ ID NO: 14029 - protein, 11 aa, Artificial Sequence
  Description of Artificial Sequence: Synthetic peptide
  XENP018336 vhCDR3
YYGNYGGWFDV

SEQ ID NO: 14030 - protein, 214 aa, Artificial Sequence; identical to SEQ ID NO: 11550
  Description of Artificial Sequence: Synthetic polypeptide
  XENP018336 1G6_H1.231_L1_IgG1_PVA_/S267K Light Chain

SEQ ID NO: 14031 - protein, 107 aa, Artificial Sequence; identical to SEQ ID NO: 6247
  Description of Artificial Sequence: Synthetic polypeptide
  VL of XENP018336

SEQ ID NO: 14032 - protein, 11 aa, Artificial Sequence
  Description of Artificial Sequence: Synthetic peptide
  XENP018336 vlCDR1
RASQSVSNDVA

SEQ ID NO: 14033 - protein, 7 aa, Artificial Sequence
  Description of Artificial Sequence: Synthetic peptide
  XENP018336 vlCDR2
YASHRYT

SEQ ID NO: 14034 - protein, 9 aa, Artificial Sequence
  Description of Artificial Sequence: Synthetic peptide
  XENP018336 vlCDR3
QQDYSSPRT

SEQ ID NO: 14035 - protein, 451 aa, Artificial Sequence
  Description of Artificial Sequence: Synthetic polypeptide
  XENP018337 1G6_H1.232_L1_IgG1_PVA_/S267K Heavy Chain
EVQLVESGGGLVKPGGSLRLSCAASGFTFSNYWMNWVRQAPGKGLEWVGEIRLKSNNYATHYAEPVKGRFTISRDDSKSTVYLQMNSLKTEDTAVYYCTRYYGNYGGVFDVWGAGTLVTVSSASTKGPSVFPLAPSSKSTSGGTAALGCLVKDYFPEPVTVSWNSGALTSGVHTFPAVLQSSGLYSLSSVVTVPSSSLGTQTYICNVNHKPSNTKVDKKVEPKSCDKTHTCPPCPAPPVAGPSVFLFPPKPKDTLMISRTPEVTCVVVDVKHEDPEVKFNWYVDGVEVHNAKTKPREEQYNSTYRVVSVLTVLHQDWLNGKEYKCKVSNKALPAPIEKTISKAKGQPREPQVYTLPPSREEMTKNQVSLTCLVKGFYPSDIAVEWESNGQPENNYKTTPPVLDSDGSFFLYSKLTVDKSRWQQGNVFSCSVMHEALHNHYTQKSLSLSPGK

SEQ ID NO: 14036 - protein, 122 aa, Artificial Sequence; identical to SEQ ID NO: 8439
  Description of Artificial Sequence: Synthetic polypeptide
  VH of XENP018337

SEQ ID NO: 14037 - protein, 5 aa, Artificial Sequence
  Description of Artificial Sequence: Synthetic peptide
  XENP018337 vhCDR1
NYWMN

SEQ ID NO: 14038 - protein, 19 aa, Artificial Sequence
  Description of Artificial Sequence: Synthetic peptide
  XENP018337 vhCDR2
EIRLKSNNYATHYAEPVKG

SEQ ID NO: 14039 - protein, 11 aa, Artificial Sequence
  Description of Artificial Sequence: Synthetic peptide
  XENP018337 vhCDR3
YYGNYGGVFDV

SEQ ID NO: 14040 - protein, 214 aa, Artificial Sequence; identical to SEQ ID NO: 11550
  Description of Artificial Sequence: Synthetic polypeptide
  XENP018337 1G6_H1.232_L1_IgG1_PVA_/S267K Light Chain

SEQ ID NO: 14041 - protein, 107 aa, Artificial Sequence; identical to SEQ ID NO: 6247
  Description of Artificial Sequence: Synthetic polypeptide
  VL of XENP018337

SEQ ID NO: 14042 - protein, 11 aa, Artificial Sequence
  Description of Artificial Sequence: Synthetic peptide
  XENP018337 vlCDR1
RASQSVSNDVA

SEQ ID NO: 14043 - protein, 7 aa, Artificial Sequence
  Description of Artificial Sequence: Synthetic peptide
  XENP018337 vlCDR2
YASHRYT

SEQ ID NO: 14044 - protein, 9 aa, Artificial Sequence
  Description of Artificial Sequence: Synthetic peptide
  XENP018337 vlCDR3
QQDYSSPRT

SEQ ID NO: 14045 - protein, 451 aa, Artificial Sequence
  Description of Artificial Sequence: Synthetic polypeptide
  XENP018338 1G6_H1.233_L1_IgG1_PVA_/S267K Heavy Chain
EVQLVESGGGLVKPGGSLRLSCAASGFTFSNYWMNWVRQAPGKGLEWVGEIRLKSNNYATHYAEPVKGRFTISRDDSKSTVYLQMNSLKTEDTAVYYCTRYYGNYGGAFDVWGAGTLVTVSSASTKGPSVFPLAPSSKSTSGGTAALGCLVKDYFPEPVTVSWNSGALTSGVHTFPAVLQSSGLYSLSSVVTVPSSSLGTQTYICNVNHKPSNTKVDKKVEPKSCDKTHTCPPCPAPPVAGPSVFLFPPKPKDTLMISRTPEVTCVVVDVKHEDPEVKFNWYVDGVEVHNAKTKPREEQYNSTYRVVSVLTVLHQDWLNGKEYKCKVSNKALPAPIEKTISKAKGQPREPQVYTLPPSREEMTKNQVSLTCLVKGFYPSDIAVEWESNGQPENNYKTTPPVLDSDGSFFLYSKLTVDKSRWQQGNVFSCSVMHEALHNHYTQKSLSLSPGK

SEQ ID NO: 14046 - protein, 122 aa, Artificial Sequence; identical to SEQ ID NO: 8448
  Description of Artificial Sequence: Synthetic polypeptide
  VH of XENP018338

SEQ ID NO: 14047 - protein, 5 aa, Artificial Sequence
  Description of Artificial Sequence: Synthetic peptide
  XENP018338 vhCDR1
NYWMN

SEQ ID NO: 14048 - protein, 19 aa, Artificial Sequence
  Description of Artificial Sequence: Synthetic peptide
  XENP018338 vhCDR2
EIRLKSNNYATHYAEPVKG

SEQ ID NO: 14049 - protein, 11 aa, Artificial Sequence
  Description of Artificial Sequence: Synthetic peptide
  XENP018338 vhCDR3
YYGNYGGAFDV

SEQ ID NO: 14050 - protein, 214 aa, Artificial Sequence; identical to SEQ ID NO: 11550
  Description of Artificial Sequence: Synthetic polypeptide
  XENP018338 1G6_H1.233_L1_IgG1_PVA_/S267K Light Chain

SEQ ID NO: 14051 - protein, 107 aa, Artificial Sequence; identical to SEQ ID NO: 6247
  Description of Artificial Sequence: Synthetic polypeptide
  VL of XENP018338

SEQ ID NO: 14052 - protein, 11 aa, Artificial Sequence
  Description of Artificial Sequence: Synthetic peptide
  XENP018338 vlCDR1
RASQSVSNDVA

SEQ ID NO: 14053 - protein, 7 aa, Artificial Sequence
  Description of Artificial Sequence: Synthetic peptide
  XENP018338 vlCDR2
YASHRYT

SEQ ID NO: 14054 - protein, 9 aa, Artificial Sequence
  Description of Artificial Sequence: Synthetic peptide
  XENP018338 vlCDR3
QQDYSSPRT

SEQ ID NO: 14055 - protein, 451 aa, Artificial Sequence
  Description of Artificial Sequence: Synthetic polypeptide
  XENP018339 1G6_H1.234_L1_IgG1_PVA_/S267K Heavy Chain
EVQLVESGGGLVKPGGSLRLSCAASGFTFSNYWMNWVRQAPGKGLEWVGEIRLKSNNYATHYAEPVKGRFTISRDDSKSTVYLQMNSLKTEDTAVYYCTRYYGNYGGQFDVWGAGTLVTVSSASTKGPSVFPLAPSSKSTSGGTAALGCLVKDYFPEPVTVSWNSGALTSGVHTFPAVLQSSGLYSLSSVVTVPSSSLGTQTYICNVNHKPSNTKVDKKVEPKSCDKTHTCPPCPAPPVAGPSVFLFPPKPKDTLMISRTPEVTCVVVDVKHEDPEVKFNWYVDGVEVHNAKTKPREEQYNSTYRVVSVLTVLHQDWLNGKEYKCKVSNKALPAPIEKTISKAKGQPREPQVYTLPPSREEMTKNQVSLTCLVKGFYPSDIAVEWESNGQPENNYKTTPPVLDSDGSFFLYSKLTVDKSRWQQGNVFSCSVMHEALHNHYTQKSLSLSPGK

SEQ ID NO: 14056 - protein, 122 aa, Artificial Sequence; identical to SEQ ID NO: 8457
  Description of Artificial Sequence: Synthetic polypeptide
  VH of XENP018339

SEQ ID NO: 14057 - protein, 5 aa, Artificial Sequence
  Description of Artificial Sequence: Synthetic peptide
  XENP018339 vhCDR1
NYWMN

SEQ ID NO: 14058 - protein, 19 aa, Artificial Sequence
  Description of Artificial Sequence: Synthetic peptide
  XENP018339 vhCDR2
EIRLKSNNYATHYAEPVKG

SEQ ID NO: 14059 - protein, 11 aa, Artificial Sequence
  Description of Artificial Sequence: Synthetic peptide
  XENP018339 vhCDR3
YYGNYGGQFDV

SEQ ID NO: 14060 - protein, 214 aa, Artificial Sequence; identical to SEQ ID NO: 11550
  Description of Artificial Sequence: Synthetic polypeptide
  XENP018339 1G6_H1.234_L1_IgG1_PVA_/S267K Light Chain

SEQ ID NO: 14061 - protein, 107 aa, Artificial Sequence; identical to SEQ ID NO: 6247
  Description of Artificial Sequence: Synthetic polypeptide
  VL of XENP018339

SEQ ID NO: 14062 - protein, 11 aa, Artificial Sequence
  Description of Artificial Sequence: Synthetic peptide
  XENP018339 vlCDR1
RASQSVSNDVA

SEQ ID NO: 14063 - protein, 7 aa, Artificial Sequence
  Description of Artificial Sequence: Synthetic peptide
  XENP018339 vlCDR2
YASHRYT

SEQ ID NO: 14064 - protein, 9 aa, Artificial Sequence
  Description of Artificial Sequence: Synthetic peptide
  XENP018339 vlCDR3
QQDYSSPRT

SEQ ID NO: 14065 - protein, 451 aa, Artificial Sequence
  Description of Artificial Sequence: Synthetic polypeptide
  XENP018340 1G6_H1.235_L1_IgG1_PVA_/S267K Heavy Chain
EVQLVESGGGLVKPGGSLRLSCAASGFTFSNYWMNWVRQAPGKGLEWVGEIRLKSNNYATHYAEPVKGRFTISRDDSKSTVYLQMNSLKTEDTAVYYCTRYYGNYGGDFDVWGAGTLVTVSSASTKGPSVFPLAPSSKSTSGGTAALGCLVKDYFPEPVTVSWNSGALTSGVHTFPAVLQSSGLYSLSSVVTVPSSSLGTQTYICNVNHKPSNTKVDKKVEPKSCDKTHTCPPCPAPPVAGPSVFLFPPKPKDTLMISRTPEVTCVVVDVKHEDPEVKFNWYVDGVEVHNAKTKPREEQYNSTYRVVSVLTVLHQDWLNGKEYKCKVSNKALPAPIEKTISKAKGQPREPQVYTLPPSREEMTKNQVSLTCLVKGFYPSDIAVEWESNGQPENNYKTTPPVLDSDGSFFLYSKLTVDKSRWQQGNVFSCSVMHEALHNHYTQKSLSLSPGK

SEQ ID NO: 14066 - protein, 122 aa, Artificial Sequence; identical to SEQ ID NO: 8466
  Description of Artificial Sequence: Synthetic polypeptide
  VH of XENP018340

SEQ ID NO: 14067 - protein, 5 aa, Artificial Sequence
  Description of Artificial Sequence: Synthetic peptide
  XENP018340 vhCDR1
NYWMN

SEQ ID NO: 14068 - protein, 19 aa, Artificial Sequence
  Description of Artificial Sequence: Synthetic peptide
  XENP018340 vhCDR2
EIRLKSNNYATHYAEPVKG

SEQ ID NO: 14069 - protein, 11 aa, Artificial Sequence
  Description of Artificial Sequence: Synthetic peptide
  XENP018340 vhCDR3
YYGNYGGDFDV

SEQ ID NO: 14070 - protein, 214 aa, Artificial Sequence; identical to SEQ ID NO: 11550
  Description of Artificial Sequence: Synthetic polypeptide
  XENP018340 1G6_H1.235_L1_IgG1_PVA_/S267K Light Chain

SEQ ID NO: 14071 - protein, 107 aa, Artificial Sequence; identical to SEQ ID NO: 6247
  Description of Artificial Sequence: Synthetic polypeptide
  VL of XENP018340

SEQ ID NO: 14072 - protein, 11 aa, Artificial Sequence
  Description of Artificial Sequence: Synthetic peptide
  XENP018340 vlCDR1
RASQSVSNDVA

SEQ ID NO: 14073 - protein, 7 aa, Artificial Sequence
  Description of Artificial Sequence: Synthetic peptide
  XENP018340 vlCDR2
YASHRYT

SEQ ID NO: 14074 - protein, 9 aa, Artificial Sequence
  Description of Artificial Sequence: Synthetic peptide
  XENP018340 vlCDR3
QQDYSSPRT

SEQ ID NO: 14075 - protein, 451 aa, Artificial Sequence
  Description of Artificial Sequence: Synthetic polypeptide
  XENP018341 1G6_H1.236_L1_IgG1_PVA_/S267K Heavy Chain
EVQLVESGGGLVKPGGSLRLSCAASGFTFSNYWMNWVRQAPGKGLEWVGEIRLKSNNYATHYAEPVKGRFTISRDDSKSTVYLQMNSLKTEDTAVYYCTRYYGNYGGKFDVWGAGTLVTVSSASTKGPSVFPLAPSSKSTSGGTAALGCLVKDYFPEPVTVSWNSGALTSGVHTFPAVLQSSGLYSLSSVVTVPSSSLGTQTYICNVNHKPSNTKVDKKVEPKSCDKTHTCPPCPAPPVAGPSVFLFPPKPKDTLMISRTPEVTCVVVDVKHEDPEVKFNWYVDGVEVHNAKTKPREEQYNSTYRVVSVLTVLHQDWLNGKEYKCKVSNKALPAPIEKTISKAKGQPREPQVYTLPPSREEMTKNQVSLTCLVKGFYPSDIAVEWESNGQPENNYKTTPPVLDSDGSFFLYSKLTVDKSRWQQGNVFSCSVMHEALHNHYTQKSLSLSPGK

SEQ ID NO: 14076 - protein, 122 aa, Artificial Sequence; identical to SEQ ID NO: 8475
  Description of Artificial Sequence: Synthetic polypeptide
  VH of XENP018341

SEQ ID NO: 14077 - protein, 5 aa, Artificial Sequence
  Description of Artificial Sequence: Synthetic peptide
  XENP018341 vhCDR1
NYWMN

SEQ ID NO: 14078 - protein, 19 aa, Artificial Sequence
  Description of Artificial Sequence: Synthetic peptide
  XENP018341 vhCDR2
EIRLKSNNYATHYAEPVKG

SEQ ID NO: 14079 - protein, 11 aa, Artificial Sequence
  Description of Artificial Sequence: Synthetic peptide
  XENP018341 vhCDR3
YYGNYGGKFDV

SEQ ID NO: 14080 - protein, 214 aa, Artificial Sequence; identical to SEQ ID NO: 11550
  Description of Artificial Sequence: Synthetic polypeptide
  XENP018341 1G6_H1.236_L1_IgG1_PVA_/S267K Light Chain

SEQ ID NO: 14081 - protein, 107 aa, Artificial Sequence; identical to SEQ ID NO: 6247
  Description of Artificial Sequence: Synthetic polypeptide
  VL of XENP018341

SEQ ID NO: 14082 - protein, 11 aa, Artificial Sequence
  Description of Artificial Sequence: Synthetic peptide
  XENP018341 vlCDR1
RASQSVSNDVA

SEQ ID NO: 14083 - protein, 7 aa, Artificial Sequence
  Description of Artificial Sequence: Synthetic peptide
  XENP018341 vlCDR2
YASHRYT

SEQ ID NO: 14084 - protein, 9 aa, Artificial Sequence
  Description of Artificial Sequence: Synthetic peptide
  XENP018341 vlCDR3
QQDYSSPRT

SEQ ID NO: 14085 - protein, 451 aa, Artificial Sequence
  Description of Artificial Sequence: Synthetic polypeptide
  XENP018342 1G6_H1.237_L1_IgG1_PVA_/S267K Heavy Chain
EVQLVESGGGLVKPGGSLRLSCAASGFTFSNYWMNWVRQAPGKGLEWVGEIRLKSNNYATHYAEPVKGRFTISRDDSKSTVYLQMNSLKTEDTAVYYCTRYYGNYGGYFDYWGAGTLVTVSSASTKGPSVFPLAPSSKSTSGGTAALGCLVKDYFPEPVTVSWNSGALTSGVHTFPAVLQSSGLYSLSSVVTVPSSSLGTQTYICNVNHKPSNTKVDKKVEPKSCDKTHTCPPCPAPPVAGPSVFLFPPKPKDTLMISRTPEVTCVVVDVKHEDPEVKFNWYVDGVEVHNAKTKPREEQYNSTYRVVSVLTVLHQDWLNGKEYKCKVSNKALPAPIEKTISKAKGQPREPQVYTLPPSREEMTKNQVSLTCLVKGFYPSDIAVEWESNGQPENNYKTTPPVLDSDGSFFLYSKLTVDKSRWQQGNVFSCSVMHEALHNHYTQKSLSLSPGK

SEQ ID NO: 14086 - protein, 122 aa, Artificial Sequence; identical to SEQ ID NO: 8484
  Description of Artificial Sequence: Synthetic polypeptide
  VH of XENP018342

SEQ ID NO: 14087 - protein, 5 aa, Artificial Sequence
  Description of Artificial Sequence: Synthetic peptide
  XENP018342 vhCDR1
NYWMN

SEQ ID NO: 14088 - protein, 19 aa, Artificial Sequence
  Description of Artificial Sequence: Synthetic peptide
  XENP018342 vhCDR2
EIRLKSNNYATHYAEPVKG

SEQ ID NO: 14089 - protein, 11 aa, Artificial Sequence
  Description of Artificial Sequence: Synthetic peptide
  XENP018342 vhCDR3
YYGNYGGYFDY

SEQ ID NO: 14090 - protein, 214 aa, Artificial Sequence; identical to SEQ ID NO: 11550
  Description of Artificial Sequence: Synthetic polypeptide
  XENP018342 1G6_H1.237_L1_IgG1_PVA_/S267K Light Chain

SEQ ID NO: 14091 - protein, 107 aa, Artificial Sequence; identical to SEQ ID NO: 6247
  Description of Artificial Sequence: Synthetic polypeptide
  VL of XENP018342

SEQ ID NO: 14092 - protein, 11 aa, Artificial Sequence
  Description of Artificial Sequence: Synthetic peptide
  XENP018342 vlCDR1
RASQSVSNDVA

SEQ ID NO: 14093 - protein, 7 aa, Artificial Sequence
  Description of Artificial Sequence: Synthetic peptide
  XENP018342 vlCDR2
YASHRYT

SEQ ID NO: 14094 - protein, 9 aa, Artificial Sequence
  Description of Artificial Sequence: Synthetic peptide
  XENP018342 vlCDR3
QQDYSSPRT

SEQ ID NO: 14095 - protein, 451 aa, Artificial Sequence
  Description of Artificial Sequence: Synthetic polypeptide
  XENP018343 1G6_H1.238_L1_IgG1_PVA_/S267K Heavy Chain
EVQLVESGGGLVKPGGSLRLSCAASGFTFSNYWMNWVRQAPGKGLEWVGEIRLKSNNYATHYAEPVKGRFTISRDDSKSTVYLQMNSLKTEDTAVYYCTRYYGNYGGYFDVWGQGTLVTVSSASTKGPSVFPLAPSSKSTSGGTAALGCLVKDYFPEPVTVSWNSGALTSGVHTFPAVLQSSGLYSLSSVVTVPSSSLGTQTYICNVNHKPSNTKVDKKVEPKSCDKTHTCPPCPAPPVAGPSVFLFPPKPKDTLMISRTPEVTCVVVDVKHEDPEVKFNWYVDGVEVHNAKTKPREEQYNSTYRVVSVLTVLHQDWLNGKEYKCKVSNKALPAPIEKTISKAKGQPREPQVYTLPPSREEMTKNQVSLTCLVKGFYPSDIAVEWESNGQPENNYKTTPPVLDSDGSFFLYSKLTVDKSRWQQGNVFSCSVMHEALHNHYTQKSLSLSPGK

SEQ ID NO: 14096 - protein, 122 aa, Artificial Sequence; identical to SEQ ID NO: 8493
  Description of Artificial Sequence: Synthetic polypeptide
  VH of XENP018343

SEQ ID NO: 14097 - protein, 5 aa, Artificial Sequence
  Description of Artificial Sequence: Synthetic peptide
  XENP018343 vhCDR1
NYWMN

SEQ ID NO: 14098 - protein, 19 aa, Artificial Sequence
  Description of Artificial Sequence: Synthetic peptide
  XENP018343 vhCDR2
EIRLKSNNYATHYAEPVKG

SEQ ID NO: 14099 - protein, 11 aa, Artificial Sequence
  Description of Artificial Sequence: Synthetic peptide
  XENP018343 vhCDR3
YYGNYGGYFDV

SEQ ID NO: 14100 - protein, 214 aa, Artificial Sequence; identical to SEQ ID NO: 11550
  Description of Artificial Sequence: Synthetic polypeptide
  XENP018343 1G6_H1.238_L1_IgG1_PVA_/S267K Light Chain

SEQ ID NO: 14101 - protein, 107 aa, Artificial Sequence; identical to SEQ ID NO: 6247
  Description of Artificial Sequence: Synthetic polypeptide
  VL of XENP018343

SEQ ID NO: 14102 - protein, 11 aa, Artificial Sequence
  Description of Artificial Sequence: Synthetic peptide
  XENP018343 vlCDR1
RASQSVSNDVA

SEQ ID NO: 14103 - protein, 7 aa, Artificial Sequence
  Description of Artificial Sequence: Synthetic peptide
  XENP018343 vlCDR2
YASHRYT

SEQ ID NO: 14104 - protein, 9 aa, Artificial Sequence
  Description of Artificial Sequence: Synthetic peptide
  XENP018343 vlCDR3
QQDYSSPRT

SEQ ID NO: 14105 - protein, 451 aa, Artificial Sequence; identical to SEQ ID NO: 11545
  Description of Artificial Sequence: Synthetic polypeptide
  XENP018344 1G6_H1_L1.1_IgG1_PVA_/S267K Heavy Chain

SEQ ID NO: 14106 - protein, 122 aa, Artificial Sequence; identical to SEQ ID NO: 6246
  Description of Artificial Sequence: Synthetic polypeptide
  VH of XENP018344

SEQ ID NO: 14107 - protein, 5 aa, Artificial Sequence
  Description of Artificial Sequence: Synthetic peptide
  XENP018344 vhCDR1
NYWMN

SEQ ID NO: 14108 - protein, 19 aa, Artificial Sequence
  Description of Artificial Sequence: Synthetic peptide
  XENP018344 vhCDR2
EIRLKSNNYATHYAEPVKG

SEQ ID NO: 14109 - protein, 11 aa, Artificial Sequence
  Description of Artificial Sequence: Synthetic peptide
  XENP018344 vhCDR3
YYGNYGGYFDV

SEQ ID NO: 14110 - protein, 214 aa, Artificial Sequence
  Description of Artificial Sequence: Synthetic polypeptide
  XENP018344 1G6_H1_L1.1_IgG1_PVA_/S267K Light Chain
EIVMTQSPATLSVSPGERATLSCRASQSVSNDVAWYQQKPGQSPRLLINYASHRYTGVPDRFTGSGYGTEFTLTISSLQSEDFAVYFCQQDYSSPRTFGGGTKVEIKRTVAAPSVFIFPPSDEQLKSGTASVVCLLNNFYPREAKVQWKVDNALQSGNSQESVTEQDSKDSTYSLSSTLTLSKADYEKHKVYACEVTHQGLSSPVTKSFNRGEC

SEQ ID NO: 14111 - protein, 107 aa, Artificial Sequence; identical to SEQ ID NO: 8503
  Description of Artificial Sequence: Synthetic polypeptide
  VL of XENP018344

SEQ ID NO: 14112 - protein, 11 aa, Artificial Sequence
  Description of Artificial Sequence: Synthetic peptide
  XENP018344 vlCDR1
RASQSVSNDVA

SEQ ID NO: 14113 - protein, 7 aa, Artificial Sequence
  Description of Artificial Sequence: Synthetic peptide
  XENP018344 vlCDR2
YASHRYT

SEQ ID NO: 14114 - protein, 9 aa, Artificial Sequence
  Description of Artificial Sequence: Synthetic peptide
  XENP018344 vlCDR3
QQDYSSPRT

SEQ ID NO: 14115 - protein, 451 aa, Artificial Sequence; identical to SEQ ID NO: 11545
  Description of Artificial Sequence: Synthetic polypeptide
  XENP018345 1G6_H1_L1.2_IgG1_PVA_/S267K Heavy Chain

SEQ ID NO: 14116 - protein, 122 aa, Artificial Sequence; identical to SEQ ID NO: 6246
  Description of Artificial Sequence: Synthetic polypeptide
  VH of XENP018345

SEQ ID NO: 14117 - protein, 5 aa, Artificial Sequence
  Description of Artificial Sequence: Synthetic peptide
  XENP018345 vhCDR1
NYWMN

SEQ ID NO: 14118 - protein, 19 aa, Artificial Sequence
  Description of Artificial Sequence: Synthetic peptide
  XENP018345 vhCDR2
EIRLKSNNYATHYAEPVKG

SEQ ID NO: 14119 - protein, 11 aa, Artificial Sequence
  Description of Artificial Sequence: Synthetic peptide
  XENP018345 vhCDR3
YYGNYGGYFDV

SEQ ID NO: 14120 - protein, 214 aa, Artificial Sequence
  Description of Artificial Sequence: Synthetic polypeptide
  XENP018345 1G6_H1_L1.2_IgG1_PVA_/S267K Light Chain
DIVMTQSPATLSVSPGERATLSCRASQSVSNDVAWYQQKPGQSPRLLINYASHRYTGVPDRFTGSGYGTEFTLTISSLQSEDFAVYFCQQDYSSPRTFGGGTKVEIKRTVAAPSVFIFPPSDEQLKSGTASVVCLLNNFYPREAKVQWKVDNALQSGNSQESVTEQDSKDSTYSLSSTLTLSKADYEKHKVYACEVTHQGLSSPVTKSFNRGEC

SEQ ID NO: 14121 - protein, 107 aa, Artificial Sequence; identical to SEQ ID NO: 8512
  Description of Artificial Sequence: Synthetic polypeptide
  VL of XENP018345

SEQ ID NO: 14122 - protein, 11 aa, Artificial Sequence
  Description of Artificial Sequence: Synthetic peptide
  XENP018345 vlCDR1
RASQSVSNDVA

SEQ ID NO: 14123 - protein, 7 aa, Artificial Sequence
  Description of Artificial Sequence: Synthetic peptide
  XENP018345 vlCDR2
YASHRYT

SEQ ID NO: 14124 - protein, 9 aa, Artificial Sequence
  Description of Artificial Sequence: Synthetic peptide
  XENP018345 vlCDR3
QQDYSSPRT

SEQ ID NO: 14125 - protein, 451 aa, Artificial Sequence; identical to SEQ ID NO: 11545
  Description of Artificial Sequence: Synthetic polypeptide
  XENP018346 1G6_H1_L1.3_IgG1_PVA_/S267K Heavy Chain

SEQ ID NO: 14126 - protein, 122 aa, Artificial Sequence; identical to SEQ ID NO: 6246
  Description of Artificial Sequence: Synthetic polypeptide
  VH of XENP018346

SEQ ID NO: 14127 - protein, 5 aa, Artificial Sequence
  Description of Artificial Sequence: Synthetic peptide
  XENP018346 vhCDR1
NYWMN

SEQ ID NO: 14128 - protein, 19 aa, Artificial Sequence
  Description of Artificial Sequence: Synthetic peptide
  XENP018346 vhCDR2
EIRLKSNNYATHYAEPVKG

SEQ ID NO: 14129 - protein, 11 aa, Artificial Sequence
  Description of Artificial Sequence: Synthetic peptide
  XENP018346 vhCDR3
YYGNYGGYFDV

SEQ ID NO: 14130 - protein, 214 aa, Artificial Sequence
  Description of Artificial Sequence: Synthetic polypeptide
  XENP018346 1G6_H1_L1.3_IgG1_PVA_/S267K Light Chain
SVVMTQSPATLSVSPGERATLSCRASQSVSNDVAWYQQKPGQSPRLLINYASHRYTGVPDRFTGSGYGTEFTLTISSLQSEDFAVYFCQQDYSSPRTFGGGTKVEIKRTVAAPSVFIFPPSDEQLKSGTASVVCLLNNFYPREAKVQWKVDNALQSGNSQESVTEQDSKDSTYSLSSTLTLSKADYEKHKVYACEVTHQGLSSPVTKSFNRGEC

SEQ ID NO: 14131 - protein, 107 aa, Artificial Sequence; identical to SEQ ID NO: 8521
  Description of Artificial Sequence: Synthetic polypeptide
  VL of XENP018346

SEQ ID NO: 14132 - protein, 11 aa, Artificial Sequence
  Description of Artificial Sequence: Synthetic peptide
  XENP018346 vlCDR1
RASQSVSNDVA

SEQ ID NO: 14133 - protein, 7 aa, Artificial Sequence
  Description of Artificial Sequence: Synthetic peptide
  XENP018346 vlCDR2
YASHRYT

SEQ ID NO: 14134 - protein, 9 aa, Artificial Sequence
  Description of Artificial Sequence: Synthetic peptide
  XENP018346 vlCDR3
QQDYSSPRT

SEQ ID NO: 14135 - protein, 451 aa, Artificial Sequence; identical to SEQ ID NO: 11545
  Description of Artificial Sequence: Synthetic polypeptide
  XENP018347 1G6_H1_L1.4_IgG1_PVA_/S267K Heavy Chain

SEQ ID NO: 14136 - protein, 122 aa, Artificial Sequence; identical to SEQ ID NO: 6246
  Description of Artificial Sequence: Synthetic polypeptide
  VH of XENP018347

SEQ ID NO: 14137 - protein, 5 aa, Artificial Sequence
  Description of Artificial Sequence: Synthetic peptide
  XENP018347 vhCDR1
NYWMN

SEQ ID NO: 14138 - protein, 19 aa, Artificial Sequence
  Description of Artificial Sequence: Synthetic peptide
  XENP018347 vhCDR2
EIRLKSNNYATHYAEPVKG

SEQ ID NO: 14139 - protein, 11 aa, Artificial Sequence
  Description of Artificial Sequence: Synthetic peptide
  XENP018347 vhCDR3
YYGNYGGYFDV

SEQ ID NO: 14140 - protein, 214 aa, Artificial Sequence
  Description of Artificial Sequence: Synthetic polypeptide
  XENP018347 1G6_H1_L1.4_IgG1_PVA_/S267K Light Chain
SIVLTQSPATLSVSPGERATLSCRASQSVSNDVAWYQQKPGQSPRLLINYASHRYTGVPDRFTGSGYGTEFTLTISSLQSEDFAVYFCQQDYSSPRTFGGGTKVEIKRTVAAPSVFIFPPSDEQLKSGTASVVCLLNNFYPREAKVQWKVDNALQSGNSQESVTEQDSKDSTYSLSSTLTLSKADYEKHKVYACEVTHQGLSSPVTKSFNRGEC

SEQ ID NO: 14141 - protein, 107 aa, Artificial Sequence; identical to SEQ ID NO: 8530
  Description of Artificial Sequence: Synthetic polypeptide
  VL of XENP018347

SEQ ID NO: 14142 - protein, 11 aa, Artificial Sequence
  Description of Artificial Sequence: Synthetic peptide
  XENP018347 vlCDR1
RASQSVSNDVA

SEQ ID NO: 14143 - protein, 7 aa, Artificial Sequence
  Description of Artificial Sequence: Synthetic peptide
  XENP018347 vlCDR2
YASHRYT

SEQ ID NO: 14144 - protein, 9 aa, Artificial Sequence
  Description of Artificial Sequence: Synthetic peptide
  XENP018347 vlCDR3
QQDYSSPRT

SEQ ID NO: 14145 - protein, 451 aa, Artificial Sequence; identical to SEQ ID NO: 11545
  Description of Artificial Sequence: Synthetic polypeptide
  XENP018348 1G6_H1_L1.5_IgG1_PVA_/S267K Heavy Chain

SEQ ID NO: 14146 - protein, 122 aa, Artificial Sequence; identical to SEQ ID NO: 6246
  Description of Artificial Sequence: Synthetic polypeptide
  VH of XENP018348

SEQ ID NO: 14147 - protein, 5 aa, Artificial Sequence
  Description of Artificial Sequence: Synthetic peptide
  XENP018348 vhCDR1
NYWMN

SEQ ID NO: 14148 - protein, 19 aa, Artificial Sequence
  Description of Artificial Sequence: Synthetic peptide
  XENP018348 vhCDR2
EIRLKSNNYATHYAEPVKG

SEQ ID NO: 14149 - protein, 11 aa, Artificial Sequence
  Description of Artificial Sequence: Synthetic peptide
  XENP018348 vhCDR3
YYGNYGGYFDV

SEQ ID NO: 14150 - protein, 214 aa, Artificial Sequence
  Description of Artificial Sequence: Synthetic polypeptide
  XENP018348 1G6_H1_L1.5_IgG1_PVA_/S267K Light Chain
SIVMTQTPATLSVSPGERATLSCRASQSVSNDVAWYQQKPGQSPRLLINYASHRYTGVPDRFTGSGYGTEFTLTISSLQSEDFAVYFCQQDYSSPRTFGGGTKVEIKRTVAAPSVFIFPPSDEQLKSGTASVVCLLNNFYPREAKVQWKVDNALQSGNSQESVTEQDSKDSTYSLSSTLTLSKADYEKHKVYACEVTHQGLSSPVTKSFNRGEC

SEQ ID NO: 14151 - protein, 107 aa, Artificial Sequence; identical to SEQ ID NO: 8539
  Description of Artificial Sequence: Synthetic polypeptide
  VL of XENP018348

SEQ ID NO: 14152 - protein, 11 aa, Artificial Sequence
  Description of Artificial Sequence: Synthetic peptide
  XENP018348 vlCDR1
RASQSVSNDVA

SEQ ID NO: 14153 - protein, 7 aa, Artificial Sequence
  Description of Artificial Sequence: Synthetic peptide
  XENP018348 vlCDR2
YASHRYT

SEQ ID NO: 14154 - protein, 9 aa, Artificial Sequence
  Description of Artificial Sequence: Synthetic peptide
  XENP018348 vlCDR3
QQDYSSPRT

SEQ ID NO: 14155 - protein, 451 aa, Artificial Sequence; identical to SEQ ID NO: 11545
  Description of Artificial Sequence: Synthetic polypeptide
  XENP018349 1G6_H1_L1.6_IgG1_PVA_/S267K Heavy Chain

SEQ ID NO: 14156 - protein, 122 aa, Artificial Sequence; identical to SEQ ID NO: 6246
  Description of Artificial Sequence: Synthetic polypeptide
  VH of XENP018349

SEQ ID NO: 14157 - protein, 5 aa, Artificial Sequence
  Description of Artificial Sequence: Synthetic peptide
  XENP018349 vhCDR1
NYWMN

SEQ ID NO: 14158 - protein, 19 aa, Artificial Sequence
  Description of Artificial Sequence: Synthetic peptide
  XENP018349 vhCDR2
EIRLKSNNYATHYAEPVKG

SEQ ID NO: 14159 - protein, 11 aa, Artificial Sequence
  Description of Artificial Sequence: Synthetic peptide
  XENP018349 vhCDR3
YYGNYGGYFDV

SEQ ID NO: 14160 - protein, 214 aa, Artificial Sequence
  Description of Artificial Sequence: Synthetic polypeptide
  XENP018349 1G6_H1_L1.6_IgG1_PVA_/S267K Light Chain
SIVMTQSPKTLSVSPGERATLSCRASQSVSNDVAWYQQKPGQSPRLLINYASHRYTGVPDRFTGSGYGTEFTLTISSLQSEDFAVYFCQQDYSSPRTFGGGTKVEIKRTVAAPSVFIFPPSDEQLKSGTASVVCLLNNFYPREAKVQWKVDNALQSGNSQESVTEQDSKDSTYSLSSTLTLSKADYEKHKVYACEVTHQGLSSPVTKSFNRGEC

SEQ ID NO: 14161 - protein, 107 aa, Artificial Sequence; identical to SEQ ID NO: 8548
  Description of Artificial Sequence: Synthetic polypeptide
  VL of XENP018349

SEQ ID NO: 14162 - protein, 11 aa, Artificial Sequence
  Description of Artificial Sequence: Synthetic peptide
  XENP018349 vlCDR1
RASQSVSNDVA

SEQ ID NO: 14163 - protein, 7 aa, Artificial Sequence
  Description of Artificial Sequence: Synthetic peptide
  XENP018349 vlCDR2
YASHRYT

SEQ ID NO: 14164 - protein, 9 aa, Artificial Sequence
  Description of Artificial Sequence: Synthetic peptide
  XENP018349 vlCDR3
QQDYSSPRT

SEQ ID NO: 14165 - protein, 451 aa, Artificial Sequence; identical to SEQ ID NO: 11545
  Description of Artificial Sequence: Synthetic polypeptide
  XENP018350 1G6_H1_L1.7_IgG1_PVA_/S267K Heavy Chain

SEQ ID NO: 14166 - protein, 122 aa, Artificial Sequence; identical to SEQ ID NO: 6246
  Description of Artificial Sequence: Synthetic polypeptide
  VH of XENP018350

SEQ ID NO: 14167 - protein, 5 aa, Artificial Sequence
  Description of Artificial Sequence: Synthetic peptide
  XENP018350 vhCDR1
NYWMN

SEQ ID NO: 14168 - protein, 19 aa, Artificial Sequence
  Description of Artificial Sequence: Synthetic peptide
  XENP018350 vhCDR2
EIRLKSNNYATHYAEPVKG

SEQ ID NO: 14169 - protein, 11 aa, Artificial Sequence
  Description of Artificial Sequence: Synthetic peptide
  XENP018350 vhCDR3
YYGNYGGYFDV

SEQ ID NO: 14170 - protein, 214 aa, Artificial Sequence
  Description of Artificial Sequence: Synthetic polypeptide
  XENP018350 1G6_H1_L1.7_IgG1_PVA_/S267K Light Chain
SIVMTQSPASLSVSPGERATLSCRASQSVSNDVAWYQQKPGQSPRLLINYASHRYTGVPDRFTGSGYGTEFTLTISSLQSEDFAVYFCQQDYSSPRTFGGGTKVEIKRTVAAPSVFIFPPSDEQLKSGTASVVCLLNNFYPREAKVQWKVDNALQSGNSQESVTEQDSKDSTYSLSSTLTLSKADYEKHKVYACEVTHQGLSSPVTKSFNRGEC

SEQ ID NO: 14171 - protein, 107 aa, Artificial Sequence; identical to SEQ ID NO: 8557
  Description of Artificial Sequence: Synthetic polypeptide
  VL of XENP018350

SEQ ID NO: 14172 - protein, 11 aa, Artificial Sequence
  Description of Artificial Sequence: Synthetic peptide
  XENP018350 vlCDR1
RASQSVSNDVA

SEQ ID NO: 14173 - protein, 7 aa, Artificial Sequence
  Description of Artificial Sequence: Synthetic peptide
  XENP018350 vlCDR2
YASHRYT

SEQ ID NO: 14174 - protein, 9 aa, Artificial Sequence
  Description of Artificial Sequence: Synthetic peptide
  XENP018350 vlCDR3
QQDYSSPRT

SEQ ID NO: 14175 - protein, 451 aa, Artificial Sequence; identical to SEQ ID NO: 11545
  Description of Artificial Sequence: Synthetic polypeptide
  XENP018351 1G6_H1_L1.8_IgG1_PVA_/S267K Heavy Chain

SEQ ID NO: 14176 - protein, 122 aa, Artificial Sequence; identical to SEQ ID NO: 6246
  Description of Artificial Sequence: Synthetic polypeptide
  VH of XENP018351

SEQ ID NO: 14177 - protein, 5 aa, Artificial Sequence
  Description of Artificial Sequence: Synthetic peptide
  XENP018351 vhCDR1
NYWMN

SEQ ID NO: 14178 - protein, 19 aa, Artificial Sequence
  Description of Artificial Sequence: Synthetic peptide
  XENP018351 vhCDR2
EIRLKSNNYATHYAEPVKG

SEQ ID NO: 14179 - protein, 11 aa, Artificial Sequence
  Description of Artificial Sequence: Synthetic peptide
  XENP018351 vhCDR3
YYGNYGGYFDV

SEQ ID NO: 14180 - protein, 214 aa, Artificial Sequence
  Description of Artificial Sequence: Synthetic polypeptide
  XENP018351 1G6_H1_L1.8_IgG1_PVA_/S267K Light Chain
SIVMTQSPAFLSVSPGERATLSCRASQSVSNDVAWYQQKPGQSPRLLINYASHRYTGVPDRFTGSGYGTEFTLTISSLQSEDFAVYFCQQDYSSPRTFGGGTKVEIKRTVAAPSVFIFPPSDEQLKSGTASVVCLLNNFYPREAKVQWKVDNALQSGNSQESVTEQDSKDSTYSLSSTLTLSKADYEKHKVYACEVTHQGLSSPVTKSFNRGEC

SEQ ID NO: 14181 - protein, 107 aa, Artificial Sequence; identical to SEQ ID NO: 8566
  Description of Artificial Sequence: Synthetic polypeptide
  VL of XENP018351

SEQ ID NO: 14182 - protein, 11 aa, Artificial Sequence
  Description of Artificial Sequence: Synthetic peptide
  XENP018351 vlCDR1
RASQSVSNDVA

SEQ ID NO: 14183 - protein, 7 aa, Artificial Sequence
  Description of Artificial Sequence: Synthetic peptide
  XENP018351 vlCDR2
YASHRYT

SEQ ID NO: 14184 - protein, 9 aa, Artificial Sequence
  Description of Artificial Sequence: Synthetic peptide
  XENP018351 vlCDR3
QQDYSSPRT

SEQ ID NO: 14185 - protein, 451 aa, Artificial Sequence; identical to SEQ ID NO: 11545
  Description of Artificial Sequence: Synthetic polypeptide
  XENP018352 1G6_H1_L1.9_IgG1_PVA_/S267K Heavy Chain

SEQ ID NO: 14186 - protein, 122 aa, Artificial Sequence; identical to SEQ ID NO: 6246
  Description of Artificial Sequence: Synthetic polypeptide
  VH of XENP018352

SEQ ID NO: 14187 - protein, 5 aa, Artificial Sequence
  Description of Artificial Sequence: Synthetic peptide
  XENP018352 vhCDR1
NYWMN

SEQ ID NO: 14188 - protein, 19 aa, Artificial Sequence
  Description of Artificial Sequence: Synthetic peptide
  XENP018352 vhCDR2
EIRLKSNNYATHYAEPVKG

SEQ ID NO: 14189 - protein, 11 aa, Artificial Sequence
  Description of Artificial Sequence: Synthetic peptide
  XENP018352 vhCDR3
YYGNYGGYFDV

SEQ ID NO: 14190 - protein, 214 aa, Artificial Sequence
  Description of Artificial Sequence: Synthetic polypeptide
  XENP018352 1G6_H1_L1.9_IgG1_PVA_/S267K Light Chain
SIVMTQSPATLLVSPGERATLSCRASQSVSNDVAWYQQKPGQSPRLLINYASHRYTGVPDRFTGSGYGTEFTLTISSLQSEDFAVYFCQQDYSSPRTFGGGTKVEIKRTVAAPSVFIFPPSDEQLKSGTASVVCLLNNFYPREAKVQWKVDNALQSGNSQESVTEQDSKDSTYSLSSTLTLSKADYEKHKVYACEVTHQGLSSPVTKSFNRGEC

SEQ ID NO: 14191 - protein, 107 aa, Artificial Sequence; identical to SEQ ID NO: 8575
  Description of Artificial Sequence: Synthetic polypeptide
  VL of XENP018352

SEQ ID NO: 14192 - protein, 11 aa, Artificial Sequence
  Description of Artificial Sequence: Synthetic peptide
  XENP018352 vlCDR1
RASQSVSNDVA

SEQ ID NO: 14193 - protein, 7 aa, Artificial Sequence
  Description of Artificial Sequence: Synthetic peptide
  XENP018352 vlCDR2
YASHRYT

SEQ ID NO: 14194 - protein, 9 aa, Artificial Sequence
  Description of Artificial Sequence: Synthetic peptide
  XENP018352 vlCDR3
QQDYSSPRT

SEQ ID NO: 14195 - protein, 451 aa, Artificial Sequence; identical to SEQ ID NO: 11545
  Description of Artificial Sequence: Synthetic polypeptide
  XENP018353 1G6_H1_L1.10_IgG1_PVA_/S267K Heavy Chain

SEQ ID NO: 14196 - protein, 122 aa, Artificial Sequence; identical to SEQ ID NO: 6246
  Description of Artificial Sequence: Synthetic polypeptide
  VH of XENP018353

SEQ ID NO: 14197 - protein, 5 aa, Artificial Sequence
  Description of Artificial Sequence: Synthetic peptide
  XENP018353 vhCDR1
NYWMN

SEQ ID NO: 14198 - protein, 19 aa, Artificial Sequence
  Description of Artificial Sequence: Synthetic peptide
  XENP018353 vhCDR2
EIRLKSNNYATHYAEPVKG

SEQ ID NO: 14199 - protein, 11 aa, Artificial Sequence
  Description of Artificial Sequence: Synthetic peptide
  XENP018353 vhCDR3
YYGNYGGYFDV

SEQ ID NO: 14200 - protein, 214 aa, Artificial Sequence
  Description of Artificial Sequence: Synthetic polypeptide
  XENP018353 1G6_H1_L1.10_IgG1_PVA_/S267K Light Chain
SIVMTQSPATLSVSAGERATLSCRASQSVSNDVAWYQQKPGQSPRLLINYASHRYTGVPDRFTGSGYGTEFTLTISSLQSEDFAVYFCQQDYSSPRTFGGGTKVEIKRTVAAPSVFIFPPSDEQLKSGTASVVCLLNNFYPREAKVQWKVDNALQSGNSQESVTEQDSKDSTYSLSSTLTLSKADYEKHKVYACEVTHQGLSSPVTKSFNRGEC

SEQ ID NO: 14201 - protein, 107 aa, Artificial Sequence; identical to SEQ ID NO: 8584
  Description of Artificial Sequence: Synthetic polypeptide
  VL of XENP018353

SEQ ID NO: 14202 - protein, 11 aa, Artificial Sequence
  Description of Artificial Sequence: Synthetic peptide
  XENP018353 vlCDR1
RASQSVSNDVA

SEQ ID NO: 14203 - protein, 7 aa, Artificial Sequence
  Description of Artificial Sequence: Synthetic peptide
  XENP018353 vlCDR2
YASHRYT

SEQ ID NO: 14204 - protein, 9 aa, Artificial Sequence
  Description of Artificial Sequence: Synthetic peptide
  XENP018353 vlCDR3
QQDYSSPRT

SEQ ID NO: 14205 - protein, 451 aa, Artificial Sequence; identical to SEQ ID NO: 11545
  Description of Artificial Sequence: Synthetic polypeptide
  XENP018354 1G6_H1_L1.11_IgG1_PVA_/S267K Heavy Chain

SEQ ID NO: 14206 - protein, 122 aa, Artificial Sequence; identical to SEQ ID NO: 6246
  Description of Artificial Sequence: Synthetic polypeptide
  VH of XENP018354

SEQ ID NO: 14207 - protein, 5 aa, Artificial Sequence
  Description of Artificial Sequence: Synthetic peptide
  XENP018354 vhCDR1
NYWMN

SEQ ID NO: 14208 - protein, 19 aa, Artificial Sequence
  Description of Artificial Sequence: Synthetic peptide
  XENP018354 vhCDR2
EIRLKSNNYATHYAEPVKG

SEQ ID NO: 14209 - protein, 11 aa, Artificial Sequence
  Description of Artificial Sequence: Synthetic peptide
  XENP018354 vhCDR3
YYGNYGGYFDV

SEQ ID NO: 14210 - protein, 214 aa, Artificial Sequence
  Description of Artificial Sequence: Synthetic polypeptide
  XENP018354 1G6_H1_L1.11_IgG1_PVA_/S267K Light Chain
SIVMTQSPATLSVSPGDRATLSCRASQSVSNDVAWYQQKPGQSPRLLINYASHRYTGVPDRFTGSGYGTEFTLTISSLQSEDFAVYFCQQDYSSPRTFGGGTKVEIKRTVAAPSVFIFPPSDEQLKSGTASVVCLLNNFYPREAKVQWKVDNALQSGNSQESVTEQDSKDSTYSLSSTLTLSKADYEKHKVYACEVTHQGLSSPVTKSFNRGEC

SEQ ID NO: 14211 - protein, 107 aa, Artificial Sequence; identical to SEQ ID NO: 8593
  Description of Artificial Sequence: Synthetic polypeptide
  VL of XENP018354

SEQ ID NO: 14212 - protein, 11 aa, Artificial Sequence
  Description of Artificial Sequence: Synthetic peptide
  XENP018354 vlCDR1
RASQSVSNDVA

SEQ ID NO: 14213 - protein, 7 aa, Artificial Sequence
  Description of Artificial Sequence: Synthetic peptide
  XENP018354 vlCDR2
YASHRYT

SEQ ID NO: 14214 - protein, 9 aa, Artificial Sequence
  Description of Artificial Sequence: Synthetic peptide
  XENP018354 vlCDR3
QQDYSSPRT

SEQ ID NO: 14215 - protein, 451 aa, Artificial Sequence; identical to SEQ ID NO: 11545
  Description of Artificial Sequence: Synthetic polypeptide
  XENP018355 1G6_H1_L1.12_IgG1_PVA_/S267K Heavy Chain

SEQ ID NO: 14216 - protein, 122 aa, Artificial Sequence; identical to SEQ ID NO: 6246
  Description of Artificial Sequence: Synthetic polypeptide
  VH of XENP018355

SEQ ID NO: 14217 - protein, 5 aa, Artificial Sequence
  Description of Artificial Sequence: Synthetic peptide
  XENP018355 vhCDR1
NYWMN

SEQ ID NO: 14218 - protein, 19 aa, Artificial Sequence
  Description of Artificial Sequence: Synthetic peptide
  XENP018355 vhCDR2
EIRLKSNNYATHYAEPVKG

SEQ ID NO: 14219 - protein, 11 aa, Artificial Sequence
  Description of Artificial Sequence: Synthetic peptide
  XENP018355 vhCDR3
YYGNYGGYFDV

SEQ ID NO: 14220 - protein, 214 aa, Artificial Sequence
  Description of Artificial Sequence: Synthetic polypeptide
  XENP018355 1G6_H1_L1.12_IgG1_PVA_/S267K Light Chain
SIVMTQSPATLSVSPGERVTLSCRASQSVSNDVAWYQQKPGQSPRLLINYASHRYTGVPDRFTGSGYGTEFTLTISSLQSEDFAVYFCQQDYSSPRTFGGGTKVEIKRTVAAPSVFIFPPSDEQLKSGTASVVCLLNNFYPREAKVQWKVDNALQSGNSQESVTEQDSKDSTYSLSSTLTLSKADYEKHKVYACEVTHQGLSSPVTKSFNRGEC

SEQ ID NO: 14221 - protein, 107 aa, Artificial Sequence; identical to SEQ ID NO: 8602
  Description of Artificial Sequence: Synthetic polypeptide
  VL of XENP018355

SEQ ID NO: 14222 - protein, 11 aa, Artificial Sequence
  Description of Artificial Sequence: Synthetic peptide
  XENP018355 vlCDR1
RASQSVSNDVA

SEQ ID NO: 14223 - protein, 7 aa, Artificial Sequence
  Description of Artificial Sequence: Synthetic peptide
  XENP018355 vlCDR2
YASHRYT

SEQ ID NO: 14224 - protein, 9 aa, Artificial Sequence
  Description of Artificial Sequence: Synthetic peptide
  XENP018355 vlCDR3
QQDYSSPRT

SEQ ID NO: 14225 - protein, 451 aa, Artificial Sequence; identical to SEQ ID NO: 11545
  Description of Artificial Sequence: Synthetic polypeptide
  XENP018356 1G6_H1_L1.13_IgG1_PVA_/S267K Heavy Chain

SEQ ID NO: 14226 - protein, 122 aa, Artificial Sequence; identical to SEQ ID NO: 6246
  Description of Artificial Sequence: Synthetic polypeptide
  VH of XENP018356

SEQ ID NO: 14227 - protein, 5 aa, Artificial Sequence
  Description of Artificial Sequence: Synthetic peptide
  XENP018356 vhCDR1
NYWMN

SEQ ID NO: 14228 - protein, 19 aa, Artificial Sequence
  Description of Artificial Sequence: Synthetic peptide
  XENP018356 vhCDR2
EIRLKSNNYATHYAEPVKG

SEQ ID NO: 14229 - protein, 11 aa, Artificial Sequence
  Description of Artificial Sequence: Synthetic peptide
  XENP018356 vhCDR3
YYGNYGGYFDV

SEQ ID NO: 14230 - protein, 214 aa, Artificial Sequence
  Description of Artificial Sequence: Synthetic polypeptide
  XENP018356 1G6_H1_L1.13_IgG1_PVA_/S267K Light Chain
SIVMTQSPATLSVSPGERATISCRASQSVSNDVAWYQQKPGQSPRLLINYASHRYTGVPDRFTGSGYGTEFTLTISSLQSEDFAVYFCQQDYSSPRTFGGGTKVEIKRTVAAPSVFIFPPSDEQLKSGTASVVCLLNNFYPREAKVQWKVDNALQSGNSQESVTEQDSKDSTYSLSSTLTLSKADYEKHKVYACEVTHQGLSSPVTKSFNRGEC

SEQ ID NO: 14231 - protein, 107 aa, Artificial Sequence; identical to SEQ ID NO: 8611
  Description of Artificial Sequence: Synthetic polypeptide
  VL of XENP018356

SEQ ID NO: 14232 - protein, 11 aa, Artificial Sequence
  Description of Artificial Sequence: Synthetic peptide
  XENP018356 vlCDR1
RASQSVSNDVA

SEQ ID NO: 14233 - protein, 7 aa, Artificial Sequence
  Description of Artificial Sequence: Synthetic peptide
  XENP018356 vlCDR2
YASHRYT

SEQ ID NO: 14234 - protein, 9 aa, Artificial Sequence
  Description of Artificial Sequence: Synthetic peptide
  XENP018356 vlCDR3
QQDYSSPRT

SEQ ID NO: 14235 - protein, 451 aa, Artificial Sequence; identical to SEQ ID NO: 11545
  Description of Artificial Sequence: Synthetic polypeptide
  XENP018357 1G6_H1_L1.14_IgG1_PVA_/S267K Heavy Chain

SEQ ID NO: 14236 - protein, 122 aa, Artificial Sequence; identical to SEQ ID NO: 6246
  Description of Artificial Sequence: Synthetic polypeptide
  VH of XENP018357

SEQ ID NO: 14237 - protein, 5 aa, Artificial Sequence
  Description of Artificial Sequence: Synthetic peptide
  XENP018357 vhCDR1
NYWMN

SEQ ID NO: 14238 - protein, 19 aa, Artificial Sequence
  Description of Artificial Sequence: Synthetic peptide
  XENP018357 vhCDR2
EIRLKSNNYATHYAEPVKG

SEQ ID NO: 14239 - protein, 11 aa, Artificial Sequence
  Description of Artificial Sequence: Synthetic peptide
  XENP018357 vhCDR3
YYGNYGGYFDV

SEQ ID NO: 14240 - protein, 214 aa, Artificial Sequence
  Description of Artificial Sequence: Synthetic polypeptide
  XENP018357 1G6_H1_L1.14_IgG1_PVA_/S267K Light Chain
SIVMTQSPATLSVSPGERATLTCRASQSVSNDVAWYQQKPGQSPRLLINYASHRYTGVPDRFTGSGYGTEFTLTISSLQSEDFAVYFCQQDYSSPRTFGGGTKVEIKRTVAAPSVFIFPPSDEQLKSGTASVVCLLNNFYPREAKVQWKVDNALQSGNSQESVTEQDSKDSTYSLSSTLTLSKADYEKHKVYACEVTHQGLSSPVTKSFNRGEC

SEQ ID NO: 14241 - protein, 107 aa, Artificial Sequence; identical to SEQ ID NO: 8620
  Description of Artificial Sequence: Synthetic polypeptide
  VL of XENP018357

SEQ ID NO: 14242 - protein, 11 aa, Artificial Sequence
  Description of Artificial Sequence: Synthetic peptide
  XENP018357 vlCDR1
RASQSVSNDVA

SEQ ID NO: 14243 - protein, 7 aa, Artificial Sequence
  Description of Artificial Sequence: Synthetic peptide
  XENP018357 vlCDR2
YASHRYT

SEQ ID NO: 14244 - protein, 9 aa, Artificial Sequence
  Description of Artificial Sequence: Synthetic peptide
  XENP018357 vlCDR3
QQDYSSPRT

SEQ ID NO: 14245 - protein, 451 aa, Artificial Sequence; identical to SEQ ID NO: 11545
  Description of Artificial Sequence: Synthetic polypeptide
  XENP018358 1G6_H1_L1.15_IgG1_PVA_/S267K Heavy Chain

SEQ ID NO: 14246 - protein, 122 aa, Artificial Sequence; identical to SEQ ID NO: 6246
  Description of Artificial Sequence: Synthetic polypeptide
  VH of XENP018358

SEQ ID NO: 14247 - protein, 5 aa, Artificial Sequence
  Description of Artificial Sequence: Synthetic peptide
  XENP018358 vhCDR1
NYWMN

SEQ ID NO: 14248 - protein, 19 aa, Artificial Sequence
  Description of Artificial Sequence: Synthetic peptide
  XENP018358 vhCDR2
EIRLKSNNYATHYAEPVKG

SEQ ID NO: 14249 - protein, 11 aa, Artificial Sequence
  Description of Artificial Sequence: Synthetic peptide
  XENP018358 vhCDR3
YYGNYGGYFDV

SEQ ID NO: 14250 - protein, 214 aa, Artificial Sequence
  Description of Artificial Sequence: Synthetic polypeptide
  XENP018358 1G6_H1_L1.15_IgG1_PVA_/S267K Light Chain
SIVMTQSPATLSVSPGERATLSCKASQSVSNDVAWYQQKPGQSPRLLINYASHRYTGVPDRFTGSGYGTEFTLTISSLQSEDFAVYFCQQDYSSPRTFGGGTKVEIKRTVAAPSVFIFPPSDEQLKSGTASVVCLLNNFYPREAKVQWKVDNALQSGNSQESVTEQDSKDSTYSLSSTLTLSKADYEKHKVYACEVTHQGLSSPVTKSFNRGEC

SEQ ID NO: 14251 - protein, 107 aa, Artificial Sequence; identical to SEQ ID NO: 8629
  Description of Artificial Sequence: Synthetic polypeptide
  VL of XENP018358

SEQ ID NO: 14252 - protein, 11 aa, Artificial Sequence
  Description of Artificial Sequence: Synthetic peptide
  XENP018358 vlCDR1
KASQSVSNDVA

SEQ ID NO: 14253 - protein, 7 aa, Artificial Sequence
  Description of Artificial Sequence: Synthetic peptide
  XENP018358 vlCDR2
YASHRYT

SEQ ID NO: 14254 - protein, 9 aa, Artificial Sequence
  Description of Artificial Sequence: Synthetic peptide
  XENP018358 vlCDR3
QQDYSSPRT

SEQ ID NO: 14255 - protein, 451 aa, Artificial Sequence; identical to SEQ ID NO: 11545
  Description of Artificial Sequence: Synthetic polypeptide
  XENP018359 1G6_H1_L1.16_IgG1_PVA_/S267K Heavy Chain

SEQ ID NO: 14256 - protein, 122 aa, Artificial Sequence; identical to SEQ ID NO: 6246
  Description of Artificial Sequence: Synthetic polypeptide
  VH of XENP018359

SEQ ID NO: 14257 - protein, 5 aa, Artificial Sequence
  Description of Artificial Sequence: Synthetic peptide
  XENP018359 vhCDR1
NYWMN

SEQ ID NO: 14258 - protein, 19 aa, Artificial Sequence
  Description of Artificial Sequence: Synthetic peptide
  XENP018359 vhCDR2
EIRLKSNNYATHYAEPVKG

SEQ ID NO: 14259 - protein, 11 aa, Artificial Sequence
  Description of Artificial Sequence: Synthetic peptide
  XENP018359 vhCDR3
YYGNYGGYFDV

SEQ ID NO: 14260 - protein, 214 aa, Artificial Sequence
  Description of Artificial Sequence: Synthetic polypeptide
  XENP018359 1G6_H1_L1.16_IgG1_PVA_/S267K Light Chain
SIVMTQSPATLSVSPGERATLSCRASQDVSNDVAWYQQKPGQSPRLLINYASHRYTGVPDRFTGSGYGTEFTLTISSLQSEDFAVYFCQQDYSSPRTFGGGTKVEIKRTVAAPSVFIFPPSDEQLKSGTASVVCLLNNFYPREAKVQWKVDNALQSGNSQESVTEQDSKDSTYSLSSTLTLSKADYEKHKVYACEVTHQGLSSPVTKSFNRGEC

SEQ ID NO: 14261 - protein, 107 aa, Artificial Sequence; identical to SEQ ID NO: 8638
  Description of Artificial Sequence: Synthetic polypeptide
  VL of XENP018359

SEQ ID NO: 14262 - protein, 11 aa, Artificial Sequence
  Description of Artificial Sequence: Synthetic peptide
  XENP018359 vlCDR1
RASQDVSNDVA

SEQ ID NO: 14263 - protein, 7 aa, Artificial Sequence
  Description of Artificial Sequence: Synthetic peptide
  XENP018359 vlCDR2
YASHRYT

SEQ ID NO: 14264 - protein, 9 aa, Artificial Sequence
  Description of Artificial Sequence: Synthetic peptide
  XENP018359 vlCDR3
QQDYSSPRT

SEQ ID NO: 14265 - protein, 451 aa, Artificial Sequence; identical to SEQ ID NO: 11545
  Description of Artificial Sequence: Synthetic polypeptide
  XENP018360 1G6_H1_L1.17_IgG1_PVA_/S267K Heavy Chain

SEQ ID NO: 14266 - protein, 122 aa, Artificial Sequence; identical to SEQ ID NO: 6246
  Description of Artificial Sequence: Synthetic polypeptide
  VH of XENP018360

SEQ ID NO: 14267 - protein, 5 aa, Artificial Sequence
  Description of Artificial Sequence: Synthetic peptide
  XENP018360 vhCDR1
NYWMN

SEQ ID NO: 14268 - protein, 19 aa, Artificial Sequence
  Description of Artificial Sequence: Synthetic peptide
  XENP018360 vhCDR2
EIRLKSNNYATHYAEPVKG

SEQ ID NO: 14269 - protein, 11 aa, Artificial Sequence
  Description of Artificial Sequence: Synthetic peptide
  XENP018360 vhCDR3
YYGNYGGYFDV

SEQ ID NO: 14270 - protein, 214 aa, Artificial Sequence
  Description of Artificial Sequence: Synthetic polypeptide
  XENP018360 1G6_H1_L1.17_IgG1_PVA_/S267K Light Chain
SIVMTQSPATLSVSPGERATLSCRASQGVSNDVAWYQQKPGQSPRLLINYASHRYTGVPDRFTGSGYGTEFTLTISSLQSEDFAVYFCQQDYSSPRTFGGGTKVEIKRTVAAPSVFIFPPSDEQLKSGTASVVCLLNNFYPREAKVQWKVDNALQSGNSQESVTEQDSKDSTYSLSSTLTLSKADYEKHKVYACEVTHQGLSSPVTKSFNRGEC

SEQ ID NO: 14271 - protein, 107 aa, Artificial Sequence; identical to SEQ ID NO: 8647
  Description of Artificial Sequence: Synthetic polypeptide
  VL of XENP018360

SEQ ID NO: 14272 - protein, 11 aa, Artificial Sequence
  Description of Artificial Sequence: Synthetic peptide
  XENP018360 vlCDR1
RASQGVSNDVA

SEQ ID NO: 14273 - protein, 7 aa, Artificial Sequence
  Description of Artificial Sequence: Synthetic peptide
  XENP018360 vlCDR2
YASHRYT

SEQ ID NO: 14274 - protein, 9 aa, Artificial Sequence
  Description of Artificial Sequence: Synthetic peptide
  XENP018360 vlCDR3
QQDYSSPRT

SEQ ID NO: 14275 - protein, 451 aa, Artificial Sequence; identical to SEQ ID NO: 11545
  Description of Artificial Sequence: Synthetic polypeptide
  XENP018361 1G6_H1_L1.18_IgG1_PVA_/S267K Heavy Chain

SEQ ID NO: 14276 - protein, 122 aa, Artificial Sequence; identical to SEQ ID NO: 6246
  Description of Artificial Sequence: Synthetic polypeptide
  VH of XENP018361

SEQ ID NO: 14277 - protein, 5 aa, Artificial Sequence
  Description of Artificial Sequence: Synthetic peptide
  XENP018361 vhCDR1
NYWMN

SEQ ID NO: 14278 - protein, 19 aa, Artificial Sequence
  Description of Artificial Sequence: Synthetic peptide
  XENP018361 vhCDR2
EIRLKSNNYATHYAEPVKG

SEQ ID NO: 14279 - protein, 11 aa, Artificial Sequence
  Description of Artificial Sequence: Synthetic peptide
  XENP018361 vhCDR3
YYGNYGGYFDV

SEQ ID NO: 14280 - protein, 214 aa, Artificial Sequence
  Description of Artificial Sequence: Synthetic polypeptide
  XENP018361 1G6_H1_L1.18_IgG1_PVA_/S267K Light Chain
SIVMTQSPATLSVSPGERATLSCRASQSISNDVAWYQQKPGQSPRLLINYASHRYTGVPDRFTGSGYGTEFTLTISSLQSEDFAVYFCQQDYSSPRTFGGGTKVEIKRTVAAPSVFIFPPSDEQLKSGTASVVCLLNNFYPREAKVQWKVDNALQSGNSQESVTEQDSKDSTYSLSSTLTLSKADYEKHKVYACEVTHQGLSSPVTKSFNRGEC

SEQ ID NO: 14281 - protein, 107 aa, Artificial Sequence; identical to SEQ ID NO: 8656
  Description of Artificial Sequence: Synthetic polypeptide
  VL of XENP018361

SEQ ID NO: 14282 - protein, 11 aa, Artificial Sequence
  Description of Artificial Sequence: Synthetic peptide
  XENP018361 vlCDR1
RASQSISNDVA

SEQ ID NO: 14283 - protein, 7 aa, Artificial Sequence
  Description of Artificial Sequence: Synthetic peptide
  XENP018361 vlCDR2
YASHRYT

SEQ ID NO: 14284 - protein, 9 aa, Artificial Sequence
  Description of Artificial Sequence: Synthetic peptide
  XENP018361 vlCDR3
QQDYSSPRT

SEQ ID NO: 14285 - protein, 451 aa, Artificial Sequence; identical to SEQ ID NO: 11545
  Description of Artificial Sequence: Synthetic polypeptide
  XENP018362 1G6_H1_L1.19_IgG1_PVA_/S267K Heavy Chain

SEQ ID NO: 14286 - protein, 122 aa, Artificial Sequence; identical to SEQ ID NO: 6246
  Description of Artificial Sequence: Synthetic polypeptide
  VH of XENP018362

SEQ ID NO: 14287 - protein, 5 aa, Artificial Sequence
  Description of Artificial Sequence: Synthetic peptide
  XENP018362 vhCDR1
NYWMN

SEQ ID NO: 14288 - protein, 19 aa, Artificial Sequence
  Description of Artificial Sequence: Synthetic peptide
  XENP018362 vhCDR2
EIRLKSNNYATHYAEPVKG

SEQ ID NO: 14289 - protein, 11 aa, Artificial Sequence
  Description of Artificial Sequence: Synthetic peptide
  XENP018362 vhCDR3
YYGNYGGYFDV

SEQ ID NO: 14290 - protein, 214 aa, Artificial Sequence
  Description of Artificial Sequence: Synthetic polypeptide
  XENP018362 1G6_H1_L1.19_IgG1_PVA_/S267K Light Chain
SIVMTQSPATLSVSPGERATLSCRASQSLSNDVAWYQQKPGQSPRLLINYASHRYTGVPDRFTGSGYGTEFTLTISSLQSEDFAVYFCQQDYSSPRTFGGGTKVEIKRTVAAPSVFIFPPSDEQLKSGTASVVCLLNNFYPREAKVQWKVDNALQSGNSQESVTEQDSKDSTYSLSSTLTLSKADYEKHKVYACEVTHQGLSSPVTKSFNRGEC

SEQ ID NO: 14291 - protein, 107 aa, Artificial Sequence; identical to SEQ ID NO: 8665
  Description of Artificial Sequence: Synthetic polypeptide
  VL of XENP018362

SEQ ID NO: 14292 - protein, 11 aa, Artificial Sequence
  Description of Artificial Sequence: Synthetic peptide
  XENP018362 vlCDR1
RASQSLSNDVA

SEQ ID NO: 14293 - protein, 7 aa, Artificial Sequence
  Description of Artificial Sequence: Synthetic peptide
  XENP018362 vlCDR2
YASHRYT

SEQ ID NO: 14294 - protein, 9 aa, Artificial Sequence
  Description of Artificial Sequence: Synthetic peptide
  XENP018362 vlCDR3
QQDYSSPRT

SEQ ID NO: 14295 - protein, 451 aa, Artificial Sequence; identical to SEQ ID NO: 11545
  Description of Artificial Sequence: Synthetic polypeptide
  XENP018363 1G6_H1_L1.20_IgG1_PVA_/S267K Heavy Chain

SEQ ID NO: 14296 - protein, 122 aa, Artificial Sequence; identical to SEQ ID NO: 6246
  Description of Artificial Sequence: Synthetic polypeptide
  VH of XENP018363

SEQ ID NO: 14297 - protein, 5 aa, Artificial Sequence
  Description of Artificial Sequence: Synthetic peptide
  XENP018363 vhCDR1
NYWMN

SEQ ID NO: 14298 - protein, 19 aa, Artificial Sequence
  Description of Artificial Sequence: Synthetic peptide
  XENP018363 vhCDR2
EIRLKSNNYATHYAEPVKG

SEQ ID NO: 14299 - protein, 11 aa, Artificial Sequence
  Description of Artificial Sequence: Synthetic peptide
  XENP018363 vhCDR3
YYGNYGGYFDV

SEQ ID NO: 14300 - protein, 214 aa, Artificial Sequence
  Description of Artificial Sequence: Synthetic polypeptide
  XENP018363 1G6_H1_L1.20_IgG1_PVA_/S267K Light Chain
SIVMTQSPATLSVSPGERATLSCRASQSVTNDVAWYQQKPGQSPRLLINYASHRYTGVPDRFTGSGYGTEFTLTISSLQSEDFAVYFCQQDYSSPRTFGGGTKVEIKRTVAAPSVFIFPPSDEQLKSGTASVVCLLNNFYPREAKVQWKVDNALQSGNSQESVTEQDSKDSTYSLSSTLTLSKADYEKHKVYACEVTHQGLSSPVTKSFNRGEC

SEQ ID NO: 14301 - protein, 107 aa, Artificial Sequence; identical to SEQ ID NO: 8674
  Description of Artificial Sequence: Synthetic polypeptide
  VL of XENP018363

SEQ ID NO: 14302 - protein, 11 aa, Artificial Sequence
  Description of Artificial Sequence: Synthetic peptide
  XENP018363 vlCDR1
RASQSVTNDVA

SEQ ID NO: 14303 - protein, 7 aa, Artificial Sequence
  Description of Artificial Sequence: Synthetic peptide
  XENP018363 vlCDR2
YASHRYT

SEQ ID NO: 14304 - protein, 9 aa, Artificial Sequence
  Description of Artificial Sequence: Synthetic peptide
  XENP018363 vlCDR3
QQDYSSPRT

SEQ ID NO: 14305 - protein, 451 aa, Artificial Sequence; identical to SEQ ID NO: 11545
  Description of Artificial Sequence: Synthetic polypeptide
  XENP018364 1G6_H1_L1.21_IgG1_PVA_/S267K Heavy Chain

SEQ ID NO: 14306 - protein, 122 aa, Artificial Sequence; identical to SEQ ID NO: 6246
  Description of Artificial Sequence: Synthetic polypeptide
  VH of XENP018364

SEQ ID NO: 14307 - protein, 5 aa, Artificial Sequence
  Description of Artificial Sequence: Synthetic peptide
  XENP018364 vhCDR1
NYWMN

SEQ ID NO: 14308 - protein, 19 aa, Artificial Sequence
  Description of Artificial Sequence: Synthetic peptide
  XENP018364 vhCDR2
EIRLKSNNYATHYAEPVKG

SEQ ID NO: 14309 - protein, 11 aa, Artificial Sequence
  Description of Artificial Sequence: Synthetic peptide
  XENP018364 vhCDR3
YYGNYGGYFDV

SEQ ID NO: 14310 - protein, 214 aa, Artificial Sequence
  Description of Artificial Sequence: Synthetic polypeptide
  XENP018364 1G6_H1_L1.21_IgG1_PVA_/S267K Light Chain
SIVMTQSPATLSVSPGERATLSCRASQSVANDVAWYQQKPGQSPRLLINYASHRYTGVPDRFTGSGYGTEFTLTISSLQSEDFAVYFCQQDYSSPRTFGGGTKVEIKRTVAAPSVFIFPPSDEQLKSGTASVVCLLNNFYPREAKVQWKVDNALQSGNSQESVTEQDSKDSTYSLSSTLTLSKADYEKHKVYACEVTHQGLSSPVTKSFNRGEC

SEQ ID NO: 14311 - protein, 107 aa, Artificial Sequence; identical to SEQ ID NO: 8683
  Description of Artificial Sequence: Synthetic polypeptide
  VL of XENP018364

SEQ ID NO: 14312 - protein, 11 aa, Artificial Sequence
  Description of Artificial Sequence: Synthetic peptide
  XENP018364 vlCDR1
RASQSVANDVA

SEQ ID NO: 14313 - protein, 7 aa, Artificial Sequence
  Description of Artificial Sequence: Synthetic peptide
  XENP018364 vlCDR2
YASHRYT

SEQ ID NO: 14314 - protein, 9 aa, Artificial Sequence
  Description of Artificial Sequence: Synthetic peptide
  XENP018364 vlCDR3
QQDYSSPRT

SEQ ID NO: 14315 - protein, 451 aa, Artificial Sequence; identical to SEQ ID NO: 11545
  Description of Artificial Sequence: Synthetic polypeptide
  XENP018365 1G6_H1_L1.22_IgG1_PVA_/S267K Heavy Chain

SEQ ID NO: 14316 - protein, 122 aa, Artificial Sequence; identical to SEQ ID NO: 6246
  Description of Artificial Sequence: Synthetic polypeptide
  VH of XENP018365

SEQ ID NO: 14317 - protein, 5 aa, Artificial Sequence
  Description of Artificial Sequence: Synthetic peptide
  XENP018365 vhCDR1
NYWMN

SEQ ID NO: 14318 - protein, 19 aa, Artificial Sequence
  Description of Artificial Sequence: Synthetic peptide
  XENP018365 vhCDR2
EIRLKSNNYATHYAEPVKG

SEQ ID NO: 14319 - protein, 11 aa, Artificial Sequence
  Description of Artificial Sequence: Synthetic peptide
  XENP018365 vhCDR3
YYGNYGGYFDV

SEQ ID NO: 14320 - protein, 214 aa, Artificial Sequence
  Description of Artificial Sequence: Synthetic polypeptide
  XENP018365 1G6_H1_L1.22_IgG1_PVA_/S267K Light Chain
SIVMTQSPATLSVSPGERATLSCRASQSVQNDVAWYQQKPGQSPRLLINYASHRYTGVPDRFTGSGYGTEFTLTISSLQSEDFAVYFCQQDYSSPRTFGGGTKVEIKRTVAAPSVFIFPPSDEQLKSGTASVVCLLNNFYPREAKVQWKVDNALQSGNSQESVTEQDSKDSTYSLSSTLTLSKADYEKHKVYACEVTHQGLSSPVTKSFNRGEC

SEQ ID NO: 14321 - protein, 107 aa, Artificial Sequence; identical to SEQ ID NO: 8692
  Description of Artificial Sequence: Synthetic polypeptide
  VL of XENP018365

SEQ ID NO: 14322 - protein, 11 aa, Artificial Sequence
  Description of Artificial Sequence: Synthetic peptide
  XENP018365 vlCDR1
RASQSVQNDVA

SEQ ID NO: 14323 - protein, 7 aa, Artificial Sequence
  Description of Artificial Sequence: Synthetic peptide
  XENP018365 vlCDR2
YASHRYT

SEQ ID NO: 14324 - protein, 9 aa, Artificial Sequence
  Description of Artificial Sequence: Synthetic peptide
  XENP018365 vlCDR3
QQDYSSPRT

SEQ ID NO: 14325 - protein, 451 aa, Artificial Sequence; identical to SEQ ID NO: 11545
  Description of Artificial Sequence: Synthetic polypeptide
  XENP018366 1G6_H1_L1.23_IgG1_PVA_/S267K Heavy Chain

SEQ ID NO: 14326 - protein, 122 aa, Artificial Sequence; identical to SEQ ID NO: 6246
  Description of Artificial Sequence: Synthetic polypeptide
  VH of XENP018366

SEQ ID NO: 14327 - protein, 5 aa, Artificial Sequence
  Description of Artificial Sequence: Synthetic peptide
  XENP018366 vhCDR1
NYWMN

SEQ ID NO: 14328 - protein, 19 aa, Artificial Sequence
  Description of Artificial Sequence: Synthetic peptide
  XENP018366 vhCDR2
EIRLKSNNYATHYAEPVKG

SEQ ID NO: 14329 - protein, 11 aa, Artificial Sequence
  Description of Artificial Sequence: Synthetic peptide
  XENP018366 vhCDR3
YYGNYGGYFDV

SEQ ID NO: 14330 - protein, 214 aa, Artificial Sequence
  Description of Artificial Sequence: Synthetic polypeptide
  XENP018366 1G6_H1_L1.23_IgG1_PVA_/S267K Light Chain
SIVMTQSPATLSVSPGERATLSCRASQSVGNDVAWYQQKPGQSPRLLINYASHRYTGVPDRFTGSGYGTEFTLTISSLQSEDFAVYFCQQDYSSPRTFGGGTKVEIKRTVAAPSVFIFPPSDEQLKSGTASVVCLLNNFYPREAKVQWKVDNALQSGNSQESVTEQDSKDSTYSLSSTLTLSKADYEKHKVYACEVTHQGLSSPVTKSFNRGEC

SEQ ID NO: 14331 - protein, 107 aa, Artificial Sequence; identical to SEQ ID NO: 8701
  Description of Artificial Sequence: Synthetic polypeptide
  VL of XENP018366

SEQ ID NO: 14332 - protein, 11 aa, Artificial Sequence
  Description of Artificial Sequence: Synthetic peptide
  XENP018366 vlCDR1
RASQSVGNDVA

SEQ ID NO: 14333 - protein, 7 aa, Artificial Sequence
  Description of Artificial Sequence: Synthetic peptide
  XENP018366 vlCDR2
YASHRYT

SEQ ID NO: 14334 - protein, 9 aa, Artificial Sequence
  Description of Artificial Sequence: Synthetic peptide
  XENP018366 vlCDR3
QQDYSSPRT

SEQ ID NO: 14335 - protein, 451 aa, Artificial Sequence; identical to SEQ ID NO: 11545
  Description of Artificial Sequence: Synthetic polypeptide
  XENP018367 1G6_H1_L1.24_IgG1_PVA_/S267K Heavy Chain

SEQ ID NO: 14336 - protein, 122 aa, Artificial Sequence; identical to SEQ ID NO: 6246
  Description of Artificial Sequence: Synthetic polypeptide
  VH of XENP018367

SEQ ID NO: 14337 - protein, 5 aa, Artificial Sequence
  Description of Artificial Sequence: Synthetic peptide
  XENP018367 vhCDR1
NYWMN

SEQ ID NO: 14338 - protein, 19 aa, Artificial Sequence
  Description of Artificial Sequence: Synthetic peptide
  XENP018367 vhCDR2
EIRLKSNNYATHYAEPVKG

SEQ ID NO: 14339 - protein, 11 aa, Artificial Sequence
  Description of Artificial Sequence: Synthetic peptide
  XENP018367 vhCDR3
YYGNYGGYFDV

SEQ ID NO: 14340 - protein, 214 aa, Artificial Sequence
  Description of Artificial Sequence: Synthetic polypeptide
  XENP018367 1G6_H1_L1.24_IgG1_PVA_/S267K Light Chain
SIVMTQSPATLSVSPGERATLSCRASQSVVNDVAWYQQKPGQSPRLLINYASHRYTGVPDRFTGSGYGTEFTLTISSLQSEDFAVYFCQQDYSSPRTFGGGTKVEIKRTVAAPSVFIFPPSDEQLKSGTASVVCLLNNFYPREAKVQWKVDNALQSGNSQESVTEQDSKDSTYSLSSTLTLSKADYEKHKVYACEVTHQGLSSPVTKSFNRGEC

SEQ ID NO: 14341 - protein, 107 aa, Artificial Sequence; identical to SEQ ID NO: 8710
  Description of Artificial Sequence: Synthetic polypeptide
  VL of XENP018367

SEQ ID NO: 14342 - protein, 11 aa, Artificial Sequence
  Description of Artificial Sequence: Synthetic peptide
  XENP018367 vlCDR1
RASQSVVNDVA

SEQ ID NO: 14343 - protein, 7 aa, Artificial Sequence
  Description of Artificial Sequence: Synthetic peptide
  XENP018367 vlCDR2
YASHRYT

SEQ ID NO: 14344 - protein, 9 aa, Artificial Sequence
  Description of Artificial Sequence: Synthetic peptide
  XENP018367 vlCDR3
QQDYSSPRT

SEQ ID NO: 14345 - protein, 451 aa, Artificial Sequence; identical to SEQ ID NO: 11545
  Description of Artificial Sequence: Synthetic polypeptide
  XENP018368 1G6_H1_L1.25_IgG1_PVA_/S267K Heavy Chain

SEQ ID NO: 14346 - protein, 122 aa, Artificial Sequence; identical to SEQ ID NO: 6246
  Description of Artificial Sequence: Synthetic polypeptide
  VH of XENP018368

SEQ ID NO: 14347 - protein, 5 aa, Artificial Sequence
  Description of Artificial Sequence: Synthetic peptide
  XENP018368 vhCDR1
NYWMN

SEQ ID NO: 14348 - protein, 19 aa, Artificial Sequence
  Description of Artificial Sequence: Synthetic peptide
  XENP018368 vhCDR2
EIRLKSNNYATHYAEPVKG

SEQ ID NO: 14349 - protein, 11 aa, Artificial Sequence
  Description of Artificial Sequence: Synthetic peptide
  XENP018368 vhCDR3
YYGNYGGYFDV

SEQ ID NO: 14350 - protein, 214 aa, Artificial Sequence
  Description of Artificial Sequence: Synthetic polypeptide
  XENP018368 1G6_H1_L1.25_IgG1_PVA_/S267K Light Chain
SIVMTQSPATLSVSPGERATLSCRASQSVHNDVAWYQQKPGQSPRLLINYASHRYTGVPDRFTGSGYGTEFTLTISSLQSEDFAVYFCQQDYSSPRTFGGGTKVEIKRTVAAPSVFIFPPSDEQLKSGTASVVCLLNNFYPREAKVQWKVDNALQSGNSQESVTEQDSKDSTYSLSSTLTLSKADYEKHKVYACEVTHQGLSSPVTKSFNRGEC

SEQ ID NO: 14351 - protein, 107 aa, Artificial Sequence; identical to SEQ ID NO: 8719
  Description of Artificial Sequence: Synthetic polypeptide
  VL of XENP018368

SEQ ID NO: 14352 - protein, 11 aa, Artificial Sequence
  Description of Artificial Sequence: Synthetic peptide
  XENP018368 vlCDR1
RASQSVHNDVA

SEQ ID NO: 14353 - protein, 7 aa, Artificial Sequence
  Description of Artificial Sequence: Synthetic peptide
  XENP018368 vlCDR2
YASHRYT

SEQ ID NO: 14354 - protein, 9 aa, Artificial Sequence
  Description of Artificial Sequence: Synthetic peptide
  XENP018368 vlCDR3
QQDYSSPRT

SEQ ID NO: 14355 - protein, 451 aa, Artificial Sequence; identical to SEQ ID NO: 11545
  Description of Artificial Sequence: Synthetic polypeptide
  XENP018369 1G6_H1_L1.26_IgG1_PVA_/S267K Heavy Chain

SEQ ID NO: 14356 - protein, 122 aa, Artificial Sequence; identical to SEQ ID NO: 6246
  Description of Artificial Sequence: Synthetic polypeptide
  VH of XENP018369

SEQ ID NO: 14357 - protein, 5 aa, Artificial Sequence
  Description of Artificial Sequence: Synthetic peptide
  XENP018369 vhCDR1
NYWMN

SEQ ID NO: 14358 - protein, 19 aa, Artificial Sequence
  Description of Artificial Sequence: Synthetic peptide
  XENP018369 vhCDR2
EIRLKSNNYATHYAEPVKG

SEQ ID NO: 14359 - protein, 11 aa, Artificial Sequence
  Description of Artificial Sequence: Synthetic peptide
  XENP018369 vhCDR3
YYGNYGGYFDV

SEQ ID NO: 14360 - protein, 214 aa, Artificial Sequence
  Description of Artificial Sequence: Synthetic polypeptide
  XENP018369 1G6_H1_L1.26_IgG1_PVA_/S267K Light Chain
SIVMTQSPATLSVSPGERATLSCRASQSVDNDVAWYQQKPGQSPRLLINYASHRYTGVPDRFTGSGYGTEFTLTISSLQSEDFAVYFCQQDYSSPRTFGGGTKVEIKRTVAAPSVFIFPPSDEQLKSGTASVVCLLNNFYPREAKVQWKVDNALQSGNSQESVTEQDSKDSTYSLSSTLTLSKADYEKHKVYACEVTHQGLSSPVTKSFNRGEC

SEQ ID NO: 14361 - protein, 107 aa, Artificial Sequence; identical to SEQ ID NO: 8728
  Description of Artificial Sequence: Synthetic polypeptide
  VL of XENP018369

SEQ ID NO: 14362 - protein, 11 aa, Artificial Sequence
  Description of Artificial Sequence: Synthetic peptide
  XENP018369 vlCDR1
RASQSVDNDVA

SEQ ID NO: 14363 - protein, 7 aa, Artificial Sequence
  Description of Artificial Sequence: Synthetic peptide
  XENP018369 vlCDR2
YASHRYT

SEQ ID NO: 14364 - protein, 9 aa, Artificial Sequence
  Description of Artificial Sequence: Synthetic peptide
  XENP018369 vlCDR3
QQDYSSPRT

SEQ ID NO: 14365 - protein, 451 aa, Artificial Sequence; identical to SEQ ID NO: 11545
  Description of Artificial Sequence: Synthetic polypeptide
  XENP018370 1G6_H1_L1.27_IgG1_PVA_/S267K Heavy Chain

SEQ ID NO: 14366 - protein, 122 aa, Artificial Sequence; identical to SEQ ID NO: 6246
  Description of Artificial Sequence: Synthetic polypeptide
  VH of XENP018370

SEQ ID NO: 14367 - protein, 5 aa, Artificial Sequence
  Description of Artificial Sequence: Synthetic peptide
  XENP018370 vhCDR1
NYWMN

SEQ ID NO: 14368 - protein, 19 aa, Artificial Sequence
  Description of Artificial Sequence: Synthetic peptide
  XENP018370 vhCDR2
EIRLKSNNYATHYAEPVKG

SEQ ID NO: 14369 - protein, 11 aa, Artificial Sequence
  Description of Artificial Sequence: Synthetic peptide
  XENP018370 vhCDR3
YYGNYGGYFDV

SEQ ID NO: 14370 - protein, 214 aa, Artificial Sequence
  Description of Artificial Sequence: Synthetic polypeptide
  XENP018370 1G6_H1_L1.27_IgG1_PVA_/S267K Light Chain
SIVMTQSPATLSVSPGERATLSCRASQSVKNDVAWYQQKPGQSPRLLINYASHRYTGVPDRFTGSGYGTEFTLTISSLQSEDFAVYFCQQDYSSPRTFGGGTKVEIKRTVAAPSVFIFPPSDEQLKSGTASVVCLLNNFYPREAKVQWKVDNALQSGNSQESVTEQDSKDSTYSLSSTLTLSKADYEKHKVYACEVTHQGLSSPVTKSFNRGEC

SEQ ID NO: 14371 - protein, 107 aa, Artificial Sequence; identical to SEQ ID NO: 8737
  Description of Artificial Sequence: Synthetic polypeptide
  VL of XENP018370

SEQ ID NO: 14372 - protein, 11 aa, Artificial Sequence
  Description of Artificial Sequence: Synthetic peptide
  XENP018370 vlCDR1
RASQSVKNDVA

SEQ ID NO: 14373 - protein, 7 aa, Artificial Sequence
  Description of Artificial Sequence: Synthetic peptide
  XENP018370 vlCDR2
YASHRYT

SEQ ID NO: 14374 - protein, 9 aa, Artificial Sequence
  Description of Artificial Sequence: Synthetic peptide
  XENP018370 vlCDR3
QQDYSSPRT

SEQ ID NO: 14375 - protein, 451 aa, Artificial Sequence; identical to SEQ ID NO: 11545
  Description of Artificial Sequence: Synthetic polypeptide
  XENP018371 1G6_H1_L1.28_IgG1_PVA_/S267K Heavy Chain

SEQ ID NO: 14376 - protein, 122 aa, Artificial Sequence; identical to SEQ ID NO: 6246
  Description of Artificial Sequence: Synthetic polypeptide
  VH of XENP018371

SEQ ID NO: 14377 - protein, 5 aa, Artificial Sequence
  Description of Artificial Sequence: Synthetic peptide
  XENP018371 vhCDR1
NYWMN

SEQ ID NO: 14378 - protein, 19 aa, Artificial Sequence
  Description of Artificial Sequence: Synthetic peptide
  XENP018371 vhCDR2
EIRLKSNNYATHYAEPVKG

SEQ ID NO: 14379 - protein, 11 aa, Artificial Sequence
  Description of Artificial Sequence: Synthetic peptide
  XENP018371 vhCDR3
YYGNYGGYFDV

SEQ ID NO: 14380 - protein, 214 aa, Artificial Sequence
  Description of Artificial Sequence: Synthetic polypeptide
  XENP018371 1G6_H1_L1.28_IgG1_PVA_/S267K Light Chain
SIVMTQSPATLSVSPGERATLSCRASQSVYNDVAWYQQKPGQSPRLLINYASHRYTGVPDRFTGSGYGTEFTLTISSLQSEDFAVYFCQQDYSSPRTFGGGTKVEIKRTVAAPSVFIFPPSDEQLKSGTASVVCLLNNFYPREAKVQWKVDNALQSGNSQESVTEQDSKDSTYSLSSTLTLSKADYEKHKVYACEVTHQGLSSPVTKSFNRGEC

SEQ ID NO: 14381 - protein, 107 aa, Artificial Sequence; identical to SEQ ID NO: 8746
  Description of Artificial Sequence: Synthetic polypeptide
  VL of XENP018371

SEQ ID NO: 14382 - protein, 11 aa, Artificial Sequence
  Description of Artificial Sequence: Synthetic peptide
  XENP018371 vlCDR1
RASQSVYNDVA

SEQ ID NO: 14383 - protein, 7 aa, Artificial Sequence
  Description of Artificial Sequence: Synthetic peptide
  XENP018371 vlCDR2
YASHRYT

SEQ ID NO: 14384 - protein, 9 aa, Artificial Sequence
  Description of Artificial Sequence: Synthetic peptide
  XENP018371 vlCDR3
QQDYSSPRT

SEQ ID NO: 14385 - protein, 451 aa, Artificial Sequence; identical to SEQ ID NO: 11545
  Description of Artificial Sequence: Synthetic polypeptide
  XENP018372 1G6_H1_L1.29_IgG1_PVA_/S267K Heavy Chain

SEQ ID NO: 14386 - protein, 122 aa, Artificial Sequence; identical to SEQ ID NO: 6246
  Description of Artificial Sequence: Synthetic polypeptide
  VH of XENP018372

SEQ ID NO: 14387 - protein, 5 aa, Artificial Sequence
  Description of Artificial Sequence: Synthetic peptide
  XENP018372 vhCDR1
NYWMN

SEQ ID NO: 14388 - protein, 19 aa, Artificial Sequence
  Description of Artificial Sequence: Synthetic peptide
  XENP018372 vhCDR2
EIRLKSNNYATHYAEPVKG

SEQ ID NO: 14389 - protein, 11 aa, Artificial Sequence
  Description of Artificial Sequence: Synthetic peptide
  XENP018372 vhCDR3
YYGNYGGYFDV

SEQ ID NO: 14390 - protein, 214 aa, Artificial Sequence
  Description of Artificial Sequence: Synthetic polypeptide
  XENP018372 1G6_H1_L1.29_IgG1_PVA_/S267K Light Chain
SIVMTQSPATLSVSPGERATLSCRASQSVSDDVAWYQQKPGQSPRLLINYASHRYTGVPDRFTGSGYGTEFTLTISSLQSEDFAVYFCQQDYSSPRTFGGGTKVEIKRTVAAPSVFIFPPSDEQLKSGTASVVCLLNNFYPREAKVQWKVDNALQSGNSQESVTEQDSKDSTYSLSSTLTLSKADYEKHKVYACEVTHQGLSSPVTKSFNRGEC

SEQ ID NO: 14391 - protein, 107 aa, Artificial Sequence; identical to SEQ ID NO: 8755
  Description of Artificial Sequence: Synthetic polypeptide
  VL of XENP018372

SEQ ID NO: 14392 - protein, 11 aa, Artificial Sequence
  Description of Artificial Sequence: Synthetic peptide
  XENP018372 vlCDR1
RASQSVSDDVA

SEQ ID NO: 14393 - protein, 7 aa, Artificial Sequence
  Description of Artificial Sequence: Synthetic peptide
  XENP018372 vlCDR2
YASHRYT

SEQ ID NO: 14394 - protein, 9 aa, Artificial Sequence
  Description of Artificial Sequence: Synthetic peptide
  XENP018372 vlCDR3
QQDYSSPRT

SEQ ID NO: 14395 - protein, 451 aa, Artificial Sequence; identical to SEQ ID NO: 11545
  Description of Artificial Sequence: Synthetic polypeptide
  XENP018373 1G6_H1_L1.30_IgG1_PVA_/S267K Heavy Chain

SEQ ID NO: 14396 - protein, 122 aa, Artificial Sequence; identical to SEQ ID NO: 6246
  Description of Artificial Sequence: Synthetic polypeptide
  VH of XENP018373

SEQ ID NO: 14397 - protein, 5 aa, Artificial Sequence
  Description of Artificial Sequence: Synthetic peptide
  XENP018373 vhCDR1
NYWMN

SEQ ID NO: 14398 - protein, 19 aa, Artificial Sequence
  Description of Artificial Sequence: Synthetic peptide
  XENP018373 vhCDR2
EIRLKSNNYATHYAEPVKG

SEQ ID NO: 14399 - protein, 11 aa, Artificial Sequence
  Description of Artificial Sequence: Synthetic peptide
  XENP018373 vhCDR3
YYGNYGGYFDV

SEQ ID NO: 14400 - protein, 214 aa, Artificial Sequence
  Description of Artificial Sequence: Synthetic polypeptide
  XENP018373 1G6_H1_L1.30_IgG1_PVA_/S267K Light Chain
SIVMTQSPATLSVSPGERATLSCRASQSVSHDVAWYQQKPGQSPRLLINYASHRYTGVPDRFTGSGYGTEFTLTISSLQSEDFAVYFCQQDYSSPRTFGGGTKVEIKRTVAAPSVFIFPPSDEQLKSGTASVVCLLNNFYPREAKVQWKVDNALQSGNSQESVTEQDSKDSTYSLSSTLTLSKADYEKHKVYACEVTHQGLSSPVTKSFNRGEC

SEQ ID NO: 14401 - protein, 107 aa, Artificial Sequence; identical to SEQ ID NO: 8764
  Description of Artificial Sequence: Synthetic polypeptide
  VL of XENP018373

SEQ ID NO: 14402 - protein, 11 aa, Artificial Sequence
  Description of Artificial Sequence: Synthetic peptide
  XENP018373 vlCDR1
RASQSVSHDVA

SEQ ID NO: 14403 - protein, 7 aa, Artificial Sequence
  Description of Artificial Sequence: Synthetic peptide
  XENP018373 vlCDR2
YASHRYT

SEQ ID NO: 14404 - protein, 9 aa, Artificial Sequence
  Description of Artificial Sequence: Synthetic peptide
  XENP018373 vlCDR3
QQDYSSPRT

SEQ ID NO: 14405 - protein, 451 aa, Artificial Sequence; identical to SEQ ID NO: 11545
  Description of Artificial Sequence: Synthetic polypeptide
  XENP018374 1G6_H1_L1.31_IgG1_PVA_/S267K Heavy Chain

SEQ ID NO: 14406 - protein, 122 aa, Artificial Sequence; identical to SEQ ID NO: 6246
  Description of Artificial Sequence: Synthetic polypeptide
  VH of XENP018374

SEQ ID NO: 14407 - protein, 5 aa, Artificial Sequence
  Description of Artificial Sequence: Synthetic peptide
  XENP018374 vhCDR1
NYWMN

SEQ ID NO: 14408 - protein, 19 aa, Artificial Sequence
  Description of Artificial Sequence: Synthetic peptide
  XENP018374 vhCDR2
EIRLKSNNYATHYAEPVKG

SEQ ID NO: 14409 - protein, 11 aa, Artificial Sequence
  Description of Artificial Sequence: Synthetic peptide
  XENP018374 vhCDR3
YYGNYGGYFDV

SEQ ID NO: 14410 - protein, 214 aa, Artificial Sequence
  Description of Artificial Sequence: Synthetic polypeptide
  XENP018374 1G6_H1_L1.31_IgG1_PVA_/S267K Light Chain
SIVMTQSPATLSVSPGERATLSCRASQSVSEDVAWYQQKPGQSPRLLINYASHRYTGVPDRFTGSGYGTEFTLTISSLQSEDFAVYFCQQDYSSPRTFGGGTKVEIKRTVAAPSVFIFPPSDEQLKSGTASVVCLLNNFYPREAKVQWKVDNALQSGNSQESVTEQDSKDSTYSLSSTLTLSKADYEKHKVYACEVTHQGLSSPVTKSFNRGEC

SEQ ID NO: 14411 - protein, 107 aa, Artificial Sequence; identical to SEQ ID NO: 8773
  Description of Artificial Sequence: Synthetic polypeptide
  VL of XENP018374

SEQ ID NO: 14412 - protein, 11 aa, Artificial Sequence
  Description of Artificial Sequence: Synthetic peptide
  XENP018374 vlCDR1
RASQSVSEDVA

SEQ ID NO: 14413 - protein, 7 aa, Artificial Sequence
  Description of Artificial Sequence: Synthetic peptide
  XENP018374 vlCDR2
YASHRYT

SEQ ID NO: 14414 - protein, 9 aa, Artificial Sequence
  Description of Artificial Sequence: Synthetic peptide
  XENP018374 vlCDR3
QQDYSSPRT

SEQ ID NO: 14415 - protein, 451 aa, Artificial Sequence; identical to SEQ ID NO: 11545
  Description of Artificial Sequence: Synthetic polypeptide
  XENP018375 1G6_H1_L1.32_IgG1_PVA_/S267K Heavy Chain

SEQ ID NO: 14416 - protein, 122 aa, Artificial Sequence; identical to SEQ ID NO: 6246
  Description of Artificial Sequence: Synthetic polypeptide
  VH of XENP018375

SEQ ID NO: 14417 - protein, 5 aa, Artificial Sequence
  Description of Artificial Sequence: Synthetic peptide
  XENP018375 vhCDR1
NYWMN

SEQ ID NO: 14418 - protein, 19 aa, Artificial Sequence
  Description of Artificial Sequence: Synthetic peptide
  XENP018375 vhCDR2
EIRLKSNNYATHYAEPVKG

SEQ ID NO: 14419 - protein, 11 aa, Artificial Sequence
  Description of Artificial Sequence: Synthetic peptide
  XENP018375 vhCDR3
YYGNYGGYFDV

SEQ ID NO: 14420 - protein, 214 aa, Artificial Sequence
  Description of Artificial Sequence: Synthetic polypeptide
  XENP018375 1G6_H1_L1.32_IgG1_PVA_/S267K Light Chain
SIVMTQSPATLSVSPGERATLSCRASQSVSSDVAWYQQKPGQSPRLLINYASHRYTGVPDRFTGSGYGTEFTLTISSLQSEDFAVYFCQQDYSSPRTFGGGTKVEIKRTVAAPSVFIFPPSDEQLKSGTASVVCLLNNFYPREAKVQWKVDNALQSGNSQESVTEQDSKDSTYSLSSTLTLSKADYEKHKVYACEVTHQGLSSPVTKSFNRGEC

SEQ ID NO: 14421 - protein, 107 aa, Artificial Sequence; identical to SEQ ID NO: 8782
  Description of Artificial Sequence: Synthetic polypeptide
  VL of XENP018375

SEQ ID NO: 14422 - protein, 11 aa, Artificial Sequence
  Description of Artificial Sequence: Synthetic peptide
  XENP018375 vlCDR1
RASQSVSSDVA

SEQ ID NO: 14423 - protein, 7 aa, Artificial Sequence
  Description of Artificial Sequence: Synthetic peptide
  XENP018375 vlCDR2
YASHRYT

SEQ ID NO: 14424 - protein, 9 aa, Artificial Sequence
  Description of Artificial Sequence: Synthetic peptide
  XENP018375 vlCDR3
QQDYSSPRT

SEQ ID NO: 14425 - protein, 451 aa, Artificial Sequence; identical to SEQ ID NO: 11545
  Description of Artificial Sequence: Synthetic polypeptide
  XENP018376 1G6_H1_L1.33_IgG1_PVA_/S267K Heavy Chain

SEQ ID NO: 14426 - protein, 122 aa, Artificial Sequence; identical to SEQ ID NO: 6246
  Description of Artificial Sequence: Synthetic polypeptide
  VH of XENP018376

SEQ ID NO: 14427 - protein, 5 aa, Artificial Sequence
  Description of Artificial Sequence: Synthetic peptide
  XENP018376 vhCDR1
NYWMN

SEQ ID NO: 14428 - protein, 19 aa, Artificial Sequence
  Description of Artificial Sequence: Synthetic peptide
  XENP018376 vhCDR2
EIRLKSNNYATHYAEPVKG

SEQ ID NO: 14429 - protein, 11 aa, Artificial Sequence
  Description of Artificial Sequence: Synthetic peptide
  XENP018376 vhCDR3
YYGNYGGYFDV

SEQ ID NO: 14430 - protein, 214 aa, Artificial Sequence
  Description of Artificial Sequence: Synthetic polypeptide
  XENP018376 1G6_H1_L1.33_IgG1_PVA_/S267K Light Chain
SIVMTQSPATLSVSPGERATLSCRASQSVSRDVAWYQQKPGQSPRLLINYASHRYTGVPDRFTGSGYGTEFTLTISSLQSEDFAVYFCQQDYSSPRTFGGGTKVEIKRTVAAPSVFIFPPSDEQLKSGTASVVCLLNNFYPREAKVQWKVDNALQSGNSQESVTEQDSKDSTYSLSSTLTLSKADYEKHKVYACEVTHQGLSSPVTKSFNRGEC

SEQ ID NO: 14431 - protein, 107 aa, Artificial Sequence; identical to SEQ ID NO: 8791
  Description of Artificial Sequence: Synthetic polypeptide
  VL of XENP018376

SEQ ID NO: 14432 - protein, 11 aa, Artificial Sequence
  Description of Artificial Sequence: Synthetic peptide
  XENP018376 vlCDR1
RASQSVSRDVA

SEQ ID NO: 14433 - protein, 7 aa, Artificial Sequence
  Description of Artificial Sequence: Synthetic peptide
  XENP018376 vlCDR2
YASHRYT

SEQ ID NO: 14434 - protein, 9 aa, Artificial Sequence
  Description of Artificial Sequence: Synthetic peptide
  XENP018376 vlCDR3
QQDYSSPRT

SEQ ID NO: 14435 - protein, 451 aa, Artificial Sequence; identical to SEQ ID NO: 11545
  Description of Artificial Sequence: Synthetic polypeptide
  XENP018377 1G6_H1_L1.34_IgG1_PVA_/S267K Heavy Chain

SEQ ID NO: 14436 - protein, 122 aa, Artificial Sequence; identical to SEQ ID NO: 6246
  Description of Artificial Sequence: Synthetic polypeptide
  VH of XENP018377

SEQ ID NO: 14437 - protein, 5 aa, Artificial Sequence
  Description of Artificial Sequence: Synthetic peptide
  XENP018377 vhCDR1
NYWMN

SEQ ID NO: 14438 - protein, 19 aa, Artificial Sequence
  Description of Artificial Sequence: Synthetic peptide
  XENP018377 vhCDR2
EIRLKSNNYATHYAEPVKG

SEQ ID NO: 14439 - protein, 11 aa, Artificial Sequence
  Description of Artificial Sequence: Synthetic peptide
  XENP018377 vhCDR3
YYGNYGGYFDV

SEQ ID NO: 14440 - protein, 214 aa, Artificial Sequence
  Description of Artificial Sequence: Synthetic polypeptide
  XENP018377 1G6_H1_L1.34_IgG1_PVA_/S267K Light Chain
SIVMTQSPATLSVSPGERATLSCRASQSVSLDVAWYQQKPGQSPRLLINYASHRYTGVPDRFTGSGYGTEFTLTISSLQSEDFAVYFCQQDYSSPRTFGGGTKVEIKRTVAAPSVFIFPPSDEQLKSGTASVVCLLNNFYPREAKVQWKVDNALQSGNSQESVTEQDSKDSTYSLSSTLTLSKADYEKHKVYACEVTHQGLSSPVTKSFNRGEC

SEQ ID NO: 14441 - protein, 107 aa, Artificial Sequence; identical to SEQ ID NO: 8800
  Description of Artificial Sequence: Synthetic polypeptide
  VL of XENP018377

SEQ ID NO: 14442 - protein, 11 aa, Artificial Sequence
  Description of Artificial Sequence: Synthetic peptide
  XENP018377 vlCDR1
RASQSVSLDVA

SEQ ID NO: 14443 - protein, 7 aa, Artificial Sequence
  Description of Artificial Sequence: Synthetic peptide
  XENP018377 vlCDR2
YASHRYT

SEQ ID NO: 14444 - protein, 9 aa, Artificial Sequence
  Description of Artificial Sequence: Synthetic peptide
  XENP018377 vlCDR3
QQDYSSPRT

SEQ ID NO: 14445 - protein, 451 aa, Artificial Sequence; identical to SEQ ID NO: 11545
  Description of Artificial Sequence: Synthetic polypeptide
  XENP018378 1G6_H1_L1.35_IgG1_PVA_/S267K Heavy Chain

SEQ ID NO: 14446 - protein, 122 aa, Artificial Sequence; identical to SEQ ID NO: 6246
  Description of Artificial Sequence: Synthetic polypeptide
  VH of XENP018378

SEQ ID NO: 14447 - protein, 5 aa, Artificial Sequence
  Description of Artificial Sequence: Synthetic peptide
  XENP018378 vhCDR1
NYWMN

SEQ ID NO: 14448 - protein, 19 aa, Artificial Sequence
  Description of Artificial Sequence: Synthetic peptide
  XENP018378 vhCDR2
EIRLKSNNYATHYAEPVKG

SEQ ID NO: 14449 - protein, 11 aa, Artificial Sequence
  Description of Artificial Sequence: Synthetic peptide
  XENP018378 vhCDR3
YYGNYGGYFDV

SEQ ID NO: 14450 - protein, 214 aa, Artificial Sequence
  Description of Artificial Sequence: Synthetic polypeptide
  XENP018378 1G6_H1_L1.35_IgG1_PVA_/S267K Light Chain
SIVMTQSPATLSVSPGERATLSCRASQSVSTDVAWYQQKPGQSPRLLINYASHRYTGVPDRFTGSGYGTEFTLTISSLQSEDFAVYFCQQDYSSPRTFGGGTKVEIKRTVAAPSVFIFPPSDEQLKSGTASVVCLLNNFYPREAKVQWKVDNALQSGNSQESVTEQDSKDSTYSLSSTLTLSKADYEKHKVYACEVTHQGLSSPVTKSFNRGEC

SEQ ID NO: 14451 - protein, 107 aa, Artificial Sequence; identical to SEQ ID NO: 8809
  Description of Artificial Sequence: Synthetic polypeptide
  VL of XENP018378

SEQ ID NO: 14452 - protein, 11 aa, Artificial Sequence
  Description of Artificial Sequence: Synthetic peptide
  XENP018378 vlCDR1
RASQSVSTDVA

SEQ ID NO: 14453 - protein, 7 aa, Artificial Sequence
  Description of Artificial Sequence: Synthetic peptide
  XENP018378 vlCDR2
YASHRYT

SEQ ID NO: 14454 - protein, 9 aa, Artificial Sequence
  Description of Artificial Sequence: Synthetic peptide
  XENP018378 vlCDR3
QQDYSSPRT

SEQ ID NO: 14455 - protein, 451 aa, Artificial Sequence; identical to SEQ ID NO: 11545
  Description of Artificial Sequence: Synthetic polypeptide
  XENP018379 1G6_H1_L1.36_IgG1_PVA_/S267K Heavy Chain

SEQ ID NO: 14456 - protein, 122 aa, Artificial Sequence; identical to SEQ ID NO: 6246
  Description of Artificial Sequence: Synthetic polypeptide
  VH of XENP018379

SEQ ID NO: 14457 - protein, 5 aa, Artificial Sequence
  Description of Artificial Sequence: Synthetic peptide
  XENP018379 vhCDR1
NYWMN

SEQ ID NO: 14458 - protein, 19 aa, Artificial Sequence
  Description of Artificial Sequence: Synthetic peptide
  XENP018379 vhCDR2
EIRLKSNNYATHYAEPVKG

SEQ ID NO: 14459 - protein, 11 aa, Artificial Sequence
  Description of Artificial Sequence: Synthetic peptide
  XENP018379 vhCDR3
YYGNYGGYFDV

SEQ ID NO: 14460 - protein, 214 aa, Artificial Sequence
  Description of Artificial Sequence: Synthetic polypeptide
  XENP018379 1G6_H1_L1.36_IgG1_PVA_/S267K Light Chain
SIVMTQSPATLSVSPGERATLSCRASQSVSGDVAWYQQKPGQSPRLLINYASHRYTGVPDRFTGSGYGTEFTLTISSLQSEDFAVYFCQQDYSSPRTFGGGTKVEIKRTVAAPSVFIFPPSDEQLKSGTASVVCLLNNFYPREAKVQWKVDNALQSGNSQESVTEQDSKDSTYSLSSTLTLSKADYEKHKVYACEVTHQGLSSPVTKSFNRGEC

SEQ ID NO: 14461 - protein, 107 aa, Artificial Sequence; identical to SEQ ID NO: 8818
  Description of Artificial Sequence: Synthetic polypeptide
  VL of XENP018379

SEQ ID NO: 14462 - protein, 11 aa, Artificial Sequence
  Description of Artificial Sequence: Synthetic peptide
  XENP018379 vlCDR1
RASQSVSGDVA

SEQ ID NO: 14463 - protein, 7 aa, Artificial Sequence
  Description of Artificial Sequence: Synthetic peptide
  XENP018379 vlCDR2
YASHRYT

SEQ ID NO: 14464 - protein, 9 aa, Artificial Sequence
  Description of Artificial Sequence: Synthetic peptide
  XENP018379 vlCDR3
QQDYSSPRT

SEQ ID NO: 14465 - protein, 451 aa, Artificial Sequence; identical to SEQ ID NO: 11545
  Description of Artificial Sequence: Synthetic polypeptide
  XENP018380 1G6_H1_L1.37_IgG1_PVA_/S267K Heavy Chain

SEQ ID NO: 14466 - protein, 122 aa, Artificial Sequence; identical to SEQ ID NO: 6246
  Description of Artificial Sequence: Synthetic polypeptide
  VH of XENP018380

SEQ ID NO: 14467 - protein, 5 aa, Artificial Sequence
  Description of Artificial Sequence: Synthetic peptide
  XENP018380 vhCDR1
NYWMN

SEQ ID NO: 14468 - protein, 19 aa, Artificial Sequence
  Description of Artificial Sequence: Synthetic peptide
  XENP018380 vhCDR2
EIRLKSNNYATHYAEPVKG

SEQ ID NO: 14469 - protein, 11 aa, Artificial Sequence
  Description of Artificial Sequence: Synthetic peptide
  XENP018380 vhCDR3
YYGNYGGYFDV

SEQ ID NO: 14470 - protein, 214 aa, Artificial Sequence
  Description of Artificial Sequence: Synthetic polypeptide
  XENP018380 1G6_H1_L1.37_IgG1_PVA_/S267K Light Chain
SIVMTQSPATLSVSPGERATLSCRASQSVSYDVAWYQQKPGQSPRLLINYASHRYTGVPDRFTGSGYGTEFTLTISSLQSEDFAVYFCQQDYSSPRTFGGGTKVEIKRTVAAPSVFIFPPSDEQLKSGTASVVCLLNNFYPREAKVQWKVDNALQSGNSQESVTEQDSKDSTYSLSSTLTLSKADYEKHKVYACEVTHQGLSSPVTKSFNRGEC

SEQ ID NO: 14471 - protein, 107 aa, Artificial Sequence; identical to SEQ ID NO: 8827
  Description of Artificial Sequence: Synthetic polypeptide
  VL of XENP018380

SEQ ID NO: 14472 - protein, 11 aa, Artificial Sequence
  Description of Artificial Sequence: Synthetic peptide
  XENP018380 vlCDR1
RASQSVSYDVA

SEQ ID NO: 14473 - protein, 7 aa, Artificial Sequence
  Description of Artificial Sequence: Synthetic peptide
  XENP018380 vlCDR2
YASHRYT

SEQ ID NO: 14474 - protein, 9 aa, Artificial Sequence
  Description of Artificial Sequence: Synthetic peptide
  XENP018380 vlCDR3
QQDYSSPRT

SEQ ID NO: 14475 - protein, 451 aa, Artificial Sequence; identical to SEQ ID NO: 11545
  Description of Artificial Sequence: Synthetic polypeptide
  XENP018381 1G6_H1_L1.38_IgG1_PVA_/S267K Heavy Chain

SEQ ID NO: 14476 - protein, 122 aa, Artificial Sequence; identical to SEQ ID NO: 6246
  Description of Artificial Sequence: Synthetic polypeptide
  VH of XENP018381

SEQ ID NO: 14477 - protein, 5 aa, Artificial Sequence
  Description of Artificial Sequence: Synthetic peptide
  XENP018381 vhCDR1
NYWMN

SEQ ID NO: 14478 - protein, 19 aa, Artificial Sequence
  Description of Artificial Sequence: Synthetic peptide
  XENP018381 vhCDR2
EIRLKSNNYATHYAEPVKG

SEQ ID NO: 14479 - protein, 11 aa, Artificial Sequence
  Description of Artificial Sequence: Synthetic peptide
  XENP018381 vhCDR3
YYGNYGGYFDV

SEQ ID NO: 14480 - protein, 214 aa, Artificial Sequence
  Description of Artificial Sequence: Synthetic polypeptide
  XENP018381 1G6_H1_L1.38_IgG1_PVA_/S267K Light Chain
SIVMTQSPATLSVSPGERATLSCRASQSVSNNVAWYQQKPGQSPRLLINYASHRYTGVPDRFTGSGYGTEFTLTISSLQSEDFAVYFCQQDYSSPRTFGGGTKVEIKRTVAAPSVFIFPPSDEQLKSGTASVVCLLNNFYPREAKVQWKVDNALQSGNSQESVTEQDSKDSTYSLSSTLTLSKADYEKHKVYACEVTHQGLSSPVTKSFNRGEC

SEQ ID NO: 14481 - protein, 107 aa, Artificial Sequence; identical to SEQ ID NO: 8836
  Description of Artificial Sequence: Synthetic polypeptide
  VL of XENP018381

SEQ ID NO: 14482 - protein, 11 aa, Artificial Sequence
  Description of Artificial Sequence: Synthetic peptide
  XENP018381 vlCDR1
RASQSVSNNVA

SEQ ID NO: 14483 - protein, 7 aa, Artificial Sequence
  Description of Artificial Sequence: Synthetic peptide
  XENP018381 vlCDR2
YASHRYT

SEQ ID NO: 14484 - protein, 9 aa, Artificial Sequence
  Description of Artificial Sequence: Synthetic peptide
  XENP018381 vlCDR3
QQDYSSPRT

SEQ ID NO: 14485 - protein, 451 aa, Artificial Sequence; identical to SEQ ID NO: 11545
  Description of Artificial Sequence: Synthetic polypeptide
  XENP018382 1G6_H1_L1.39_IgG1_PVA_/S267K Heavy Chain

SEQ ID NO: 14486 - protein, 122 aa, Artificial Sequence; identical to SEQ ID NO: 6246
  Description of Artificial Sequence: Synthetic polypeptide
  VH of XENP018382

SEQ ID NO: 14487 - protein, 5 aa, Artificial Sequence
  Description of Artificial Sequence: Synthetic peptide
  XENP018382 vhCDR1
NYWMN

SEQ ID NO: 14488 - protein, 19 aa, Artificial Sequence
  Description of Artificial Sequence: Synthetic peptide
  XENP018382 vhCDR2
EIRLKSNNYATHYAEPVKG

SEQ ID NO: 14489 - protein, 11 aa, Artificial Sequence
  Description of Artificial Sequence: Synthetic peptide
  XENP018382 vhCDR3
YYGNYGGYFDV

SEQ ID NO: 14490 - protein, 214 aa, Artificial Sequence
  Description of Artificial Sequence: Synthetic polypeptide
  XENP018382 1G6_H1_L1.39_IgG1_PVA_/S267K Light Chain
SIVMTQSPATLSVSPGERATLSCRASQSVSNEVAWYQQKPGQSPRLLINYASHRYTGVPDRFTGSGYGTEFTLTISSLQSEDFAVYFCQQDYSSPRTFGGGTKVEIKRTVAAPSVFIFPPSDEQLKSGTASVVCLLNNFYPREAKVQWKVDNALQSGNSQESVTEQDSKDSTYSLSSTLTLSKADYEKHKVYACEVTHQGLSSPVTKSFNRGEC

SEQ ID NO: 14491 - protein, 107 aa, Artificial Sequence; identical to SEQ ID NO: 8845
  Description of Artificial Sequence: Synthetic polypeptide
  VL of XENP018382

SEQ ID NO: 14492 - protein, 11 aa, Artificial Sequence
  Description of Artificial Sequence: Synthetic peptide
  XENP018382 vlCDR1
RASQSVSNEVA

SEQ ID NO: 14493 - protein, 7 aa, Artificial Sequence
  Description of Artificial Sequence: Synthetic peptide
  XENP018382 vlCDR2
YASHRYT

SEQ ID NO: 14494 - protein, 9 aa, Artificial Sequence
  Description of Artificial Sequence: Synthetic peptide
  XENP018382 vlCDR3
QQDYSSPRT

SEQ ID NO: 14495 - protein, 451 aa, Artificial Sequence; identical to SEQ ID NO: 11545
  Description of Artificial Sequence: Synthetic polypeptide
  XENP018383 1G6_H1_L1.40_IgG1_PVA_/S267K Heavy Chain

SEQ ID NO: 14496 - protein, 122 aa, Artificial Sequence; identical to SEQ ID NO: 6246
  Description of Artificial Sequence: Synthetic polypeptide
  VH of XENP018383

SEQ ID NO: 14497 - protein, 5 aa, Artificial Sequence
  Description of Artificial Sequence: Synthetic peptide
  XENP018383 vhCDR1
NYWMN

SEQ ID NO: 14498 - protein, 19 aa, Artificial Sequence
  Description of Artificial Sequence: Synthetic peptide
  XENP018383 vhCDR2
EIRLKSNNYATHYAEPVKG

SEQ ID NO: 14499 - protein, 11 aa, Artificial Sequence
  Description of Artificial Sequence: Synthetic peptide
  XENP018383 vhCDR3
YYGNYGGYFDV

SEQ ID NO: 14500 - protein, 214 aa, Artificial Sequence
  Description of Artificial Sequence: Synthetic polypeptide
  XENP018383 1G6_H1_L1.40_IgG1_PVA_/S267K Light Chain
SIVMTQSPATLSVSPGERATLSCRASQSVSNHVAWYQQKPGQSPRLLINYASHRYTGVPDRFTGSGYGTEFTLTISSLQSEDFAVYFCQQDYSSPRTFGGGTKVEIKRTVAAPSVFIFPPSDEQLKSGTASVVCLLNNFYPREAKVQWKVDNALQSGNSQESVTEQDSKDSTYSLSSTLTLSKADYEKHKVYACEVTHQGLSSPVTKSFNRGEC

SEQ ID NO: 14501 - protein, 107 aa, Artificial Sequence; identical to SEQ ID NO: 8854
  Description of Artificial Sequence: Synthetic polypeptide
  VL of XENP018383

SEQ ID NO: 14502 - protein, 11 aa, Artificial Sequence
  Description of Artificial Sequence: Synthetic peptide
  XENP018383 vlCDR1
RASQSVSNHVA

SEQ ID NO: 14503 - protein, 7 aa, Artificial Sequence
  Description of Artificial Sequence: Synthetic peptide
  XENP018383 vlCDR2
YASHRYT

SEQ ID NO: 14504 - protein, 9 aa, Artificial Sequence
  Description of Artificial Sequence: Synthetic peptide
  XENP018383 vlCDR3
QQDYSSPRT

SEQ ID NO: 14505 - protein, 451 aa, Artificial Sequence; identical to SEQ ID NO: 11545
  Description of Artificial Sequence: Synthetic polypeptide
  XENP018384 1G6_H1_L1.41_IgG1_PVA_/S267K Heavy Chain

SEQ ID NO: 14506 - protein, 122 aa, Artificial Sequence; identical to SEQ ID NO: 6246
  Description of Artificial Sequence: Synthetic polypeptide
  VH of XENP018384

SEQ ID NO: 14507 - protein, 5 aa, Artificial Sequence
  Description of Artificial Sequence: Synthetic peptide
  XENP018384 vhCDR1
NYWMN

SEQ ID NO: 14508 - protein, 19 aa, Artificial Sequence
  Description of Artificial Sequence: Synthetic peptide
  XENP018384 vhCDR2
EIRLKSNNYATHYAEPVKG

SEQ ID NO: 14509 - protein, 11 aa, Artificial Sequence
  Description of Artificial Sequence: Synthetic peptide
  XENP018384 vhCDR3
YYGNYGGYFDV

SEQ ID NO: 14510 - protein, 214 aa, Artificial Sequence
  Description of Artificial Sequence: Synthetic polypeptide
  XENP018384 1G6_H1_L1.41_IgG1_PVA_/S267K Light Chain
SIVMTQSPATLSVSPGERATLSCRASQSVSNSVAWYQQKPGQSPRLLINYASHRYTGVPDRFTGSGYGTEFTLTISSLQSEDFAVYFCQQDYSSPRTFGGGTKVEIKRTVAAPSVFIFPPSDEQLKSGTASVVCLLNNFYPREAKVQWKVDNALQSGNSQESVTEQDSKDSTYSLSSTLTLSKADYEKHKVYACEVTHQGLSSPVTKSFNRGEC

SEQ ID NO: 14511 - protein, 107 aa, Artificial Sequence; identical to SEQ ID NO: 8863
  Description of Artificial Sequence: Synthetic polypeptide
  VL of XENP018384

SEQ ID NO: 14512 - protein, 11 aa, Artificial Sequence
  Description of Artificial Sequence: Synthetic peptide
  XENP018384 vlCDR1
RASQSVSNSVA

SEQ ID NO: 14513 - protein, 7 aa, Artificial Sequence
  Description of Artificial Sequence: Synthetic peptide
  XENP018384 vlCDR2
YASHRYT

SEQ ID NO: 14514 - protein, 9 aa, Artificial Sequence
  Description of Artificial Sequence: Synthetic peptide
  XENP018384 vlCDR3
QQDYSSPRT

SEQ ID NO: 14515 - protein, 451 aa, Artificial Sequence; identical to SEQ ID NO: 11545
  Description of Artificial Sequence: Synthetic polypeptide
  XENP018385 1G6_H1_L1.42_IgG1_PVA_/S267K Heavy Chain

SEQ ID NO: 14516 - protein, 122 aa, Artificial Sequence; identical to SEQ ID NO: 6246
  Description of Artificial Sequence: Synthetic polypeptide
  VH of XENP018385

SEQ ID NO: 14517 - protein, 5 aa, Artificial Sequence
  Description of Artificial Sequence: Synthetic peptide
  XENP018385 vhCDR1
NYWMN

SEQ ID NO: 14518 - protein, 19 aa, Artificial Sequence
  Description of Artificial Sequence: Synthetic peptide
  XENP018385 vhCDR2
EIRLKSNNYATHYAEPVKG

SEQ ID NO: 14519 - protein, 11 aa, Artificial Sequence
  Description of Artificial Sequence: Synthetic peptide
  XENP018385 vhCDR3
YYGNYGGYFDV

SEQ ID NO: 14520 - protein, 214 aa, Artificial Sequence
  Description of Artificial Sequence: Synthetic polypeptide
  XENP018385 1G6_H1_L1.42_IgG1_PVA_/S267K Light Chain
SIVMTQSPATLSVSPGERATLSCRASQSVSNRVAWYQQKPGQSPRLLINYASHRYTGVPDRFTGSGYGTEFTLTISSLQSEDFAVYFCQQDYSSPRTFGGGTKVEIKRTVAAPSVFIFPPSDEQLKSGTASVVCLLNNFYPREAKVQWKVDNALQSGNSQESVTEQDSKDSTYSLSSTLTLSKADYEKHKVYACEVTHQGLSSPVTKSFNRGEC

SEQ ID NO: 14521 - protein, 107 aa, Artificial Sequence; identical to SEQ ID NO: 8872
  Description of Artificial Sequence: Synthetic polypeptide
  VL of XENP018385

SEQ ID NO: 14522 - protein, 11 aa, Artificial Sequence
  Description of Artificial Sequence: Synthetic peptide
  XENP018385 vlCDR1
RASQSVSNRVA

SEQ ID NO: 14523 - protein, 7 aa, Artificial Sequence
  Description of Artificial Sequence: Synthetic peptide
  XENP018385 vlCDR2
YASHRYT

SEQ ID NO: 14524 - protein, 9 aa, Artificial Sequence
  Description of Artificial Sequence: Synthetic peptide
  XENP018385 vlCDR3
QQDYSSPRT

SEQ ID NO: 14525 - protein, 451 aa, Artificial Sequence; identical to SEQ ID NO: 11545
  Description of Artificial Sequence: Synthetic polypeptide
  XENP018386 1G6_H1_L1.43_IgG1_PVA_/S267K Heavy Chain

SEQ ID NO: 14526 - protein, 122 aa, Artificial Sequence; identical to SEQ ID NO: 6246
  Description of Artificial Sequence: Synthetic polypeptide
  VH of XENP018386

SEQ ID NO: 14527 - protein, 5 aa, Artificial Sequence
  Description of Artificial Sequence: Synthetic peptide
  XENP018386 vhCDR1
NYWMN

SEQ ID NO: 14528 - protein, 19 aa, Artificial Sequence
  Description of Artificial Sequence: Synthetic peptide
  XENP018386 vhCDR2
EIRLKSNNYATHYAEPVKG

SEQ ID NO: 14529 - protein, 11 aa, Artificial Sequence
  Description of Artificial Sequence: Synthetic peptide
  XENP018386 vhCDR3
YYGNYGGYFDV

SEQ ID NO: 14530 - protein, 214 aa, Artificial Sequence
  Description of Artificial Sequence: Synthetic polypeptide
  XENP018386 1G6_H1_L1.43_IgG1_PVA_/S267K Light Chain
SIVMTQSPATLSVSPGERATLSCRASQSVSNLVAWYQQKPGQSPRLLINYASHRYTGVPDRFTGSGYGTEFTLTISSLQSEDFAVYFCQQDYSSPRTFGGGTKVEIKRTVAAPSVFIFPPSDEQLKSGTASVVCLLNNFYPREAKVQWKVDNALQSGNSQESVTEQDSKDSTYSLSSTLTLSKADYEKHKVYACEVTHQGLSSPVTKSFNRGEC

SEQ ID NO: 14531 - protein, 107 aa, Artificial Sequence; identical to SEQ ID NO: 8881
  Description of Artificial Sequence: Synthetic polypeptide
  VL of XENP018386

SEQ ID NO: 14532 - protein, 11 aa, Artificial Sequence
  Description of Artificial Sequence: Synthetic peptide
  XENP018386 vlCDR1
RASQSVSNLVA

SEQ ID NO: 14533 - protein, 7 aa, Artificial Sequence
  Description of Artificial Sequence: Synthetic peptide
  XENP018386 vlCDR2
YASHRYT

SEQ ID NO: 14534 - protein, 9 aa, Artificial Sequence
  Description of Artificial Sequence: Synthetic peptide
  XENP018386 vlCDR3
QQDYSSPRT

SEQ ID NO: 14535 - protein, 451 aa, Artificial Sequence; identical to SEQ ID NO: 11545
  Description of Artificial Sequence: Synthetic polypeptide
  XENP018387 1G6_H1_L1.44_IgG1_PVA_/S267K Heavy Chain

SEQ ID NO: 14536 - protein, 122 aa, Artificial Sequence; identical to SEQ ID NO: 6246
  Description of Artificial Sequence: Synthetic polypeptide
  VH of XENP018387

SEQ ID NO: 14537 - protein, 5 aa, Artificial Sequence
  Description of Artificial Sequence: Synthetic peptide
  XENP018387 vhCDR1
NYWMN

SEQ ID NO: 14538 - protein, 19 aa, Artificial Sequence
  Description of Artificial Sequence: Synthetic peptide
  XENP018387 vhCDR2
EIRLKSNNYATHYAEPVKG

SEQ ID NO: 14539 - protein, 11 aa, Artificial Sequence
  Description of Artificial Sequence: Synthetic peptide
  XENP018387 vhCDR3
YYGNYGGYFDV

SEQ ID NO: 14540 - protein, 214 aa, Artificial Sequence
  Description of Artificial Sequence: Synthetic polypeptide
  XENP018387 1G6_H1_L1.44_IgG1_PVA_/S267K Light Chain
SIVMTQSPATLSVSPGERATLSCRASQSVSNTVAWYQQKPGQSPRLLINYASHRYTGVPDRFTGSGYGTEFTLTISSLQSEDFAVYFCQQDYSSPRTFGGGTKVEIKRTVAAPSVFIFPPSDEQLKSGTASVVCLLNNFYPREAKVQWKVDNALQSGNSQESVTEQDSKDSTYSLSSTLTLSKADYEKHKVYACEVTHQGLSSPVTKSFNRGEC

SEQ ID NO: 14541 - protein, 107 aa, Artificial Sequence; identical to SEQ ID NO: 8890
  Description of Artificial Sequence: Synthetic polypeptide
  VL of XENP018387

SEQ ID NO: 14542 - protein, 11 aa, Artificial Sequence
  Description of Artificial Sequence: Synthetic peptide
  XENP018387 vlCDR1
RASQSVSNTVA

SEQ ID NO: 14543 - protein, 7 aa, Artificial Sequence
  Description of Artificial Sequence: Synthetic peptide
  XENP018387 vlCDR2
YASHRYT

SEQ ID NO: 14544 - protein, 9 aa, Artificial Sequence
  Description of Artificial Sequence: Synthetic peptide
  XENP018387 vlCDR3
QQDYSSPRT

SEQ ID NO: 14545 - protein, 451 aa, Artificial Sequence; identical to SEQ ID NO: 11545
  Description of Artificial Sequence: Synthetic polypeptide
  XENP018388 1G6_H1_L1.45_IgG1_PVA_/S267K Heavy Chain

SEQ ID NO: 14546 - protein, 122 aa, Artificial Sequence; identical to SEQ ID NO: 6246
  Description of Artificial Sequence: Synthetic polypeptide
  VH of XENP018388

SEQ ID NO: 14547 - protein, 5 aa, Artificial Sequence
  Description of Artificial Sequence: Synthetic peptide
  XENP018388 vhCDR1
NYWMN

SEQ ID NO: 14548 - protein, 19 aa, Artificial Sequence
  Description of Artificial Sequence: Synthetic peptide
  XENP018388 vhCDR2
EIRLKSNNYATHYAEPVKG

SEQ ID NO: 14549 - protein, 11 aa, Artificial Sequence
  Description of Artificial Sequence: Synthetic peptide
  XENP018388 vhCDR3
YYGNYGGYFDV

SEQ ID NO: 14550 - protein, 214 aa, Artificial Sequence
  Description of Artificial Sequence: Synthetic polypeptide
  XENP018388 1G6_H1_L1.45_IgG1_PVA_/S267K Light Chain
SIVMTQSPATLSVSPGERATLSCRASQSVSNGVAWYQQKPGQSPRLLINYASHRYTGVPDRFTGSGYGTEFTLTISSLQSEDFAVYFCQQDYSSPRTFGGGTKVEIKRTVAAPSVFIFPPSDEQLKSGTASVVCLLNNFYPREAKVQWKVDNALQSGNSQESVTEQDSKDSTYSLSSTLTLSKADYEKHKVYACEVTHQGLSSPVTKSFNRGEC

SEQ ID NO: 14551 - protein, 107 aa, Artificial Sequence; identical to SEQ ID NO: 8899
  Description of Artificial Sequence: Synthetic polypeptide
  VL of XENP018388

SEQ ID NO: 14552 - protein, 11 aa, Artificial Sequence
  Description of Artificial Sequence: Synthetic peptide
  XENP018388 vlCDR1
RASQSVSNGVA

SEQ ID NO: 14553 - protein, 7 aa, Artificial Sequence
  Description of Artificial Sequence: Synthetic peptide
  XENP018388 vlCDR2
YASHRYT

SEQ ID NO: 14554 - protein, 9 aa, Artificial Sequence
  Description of Artificial Sequence: Synthetic peptide
  XENP018388 vlCDR3
QQDYSSPRT

SEQ ID NO: 14555 - protein, 451 aa, Artificial Sequence; identical to SEQ ID NO: 11545
  Description of Artificial Sequence: Synthetic polypeptide
  XENP018389 1G6_H1_L1.46_IgG1_PVA_/S267K Heavy Chain

SEQ ID NO: 14556 - protein, 122 aa, Artificial Sequence; identical to SEQ ID NO: 6246
  Description of Artificial Sequence: Synthetic polypeptide
  VH of XENP018389

SEQ ID NO: 14557 - protein, 5 aa, Artificial Sequence
  Description of Artificial Sequence: Synthetic peptide
  XENP018389 vhCDR1
NYWMN

SEQ ID NO: 14558 - protein, 19 aa, Artificial Sequence
  Description of Artificial Sequence: Synthetic peptide
  XENP018389 vhCDR2
EIRLKSNNYATHYAEPVKG

SEQ ID NO: 14559 - protein, 11 aa, Artificial Sequence
  Description of Artificial Sequence: Synthetic peptide
  XENP018389 vhCDR3
YYGNYGGYFDV

SEQ ID NO: 14560 - protein, 214 aa, Artificial Sequence
  Description of Artificial Sequence: Synthetic polypeptide
  XENP018389 1G6_H1_L1.46_IgG1_PVA_/S267K Light Chain
SIVMTQSPATLSVSPGERATLSCRASQSVSNYVAWYQQKPGQSPRLLINYASHRYTGVPDRFTGSGYGTEFTLTISSLQSEDFAVYFCQQDYSSPRTFGGGTKVEIKRTVAAPSVFIFPPSDEQLKSGTASVVCLLNNFYPREAKVQWKVDNALQSGNSQESVTEQDSKDSTYSLSSTLTLSKADYEKHKVYACEVTHQGLSSPVTKSFNRGEC

SEQ ID NO: 14561 - protein, 107 aa, Artificial Sequence; identical to SEQ ID NO: 8908
  Description of Artificial Sequence: Synthetic polypeptide
  VL of XENP018389

SEQ ID NO: 14562 - protein, 11 aa, Artificial Sequence
  Description of Artificial Sequence: Synthetic peptide
  XENP018389 vlCDR1
RASQSVSNYVA

SEQ ID NO: 14563 - protein, 7 aa, Artificial Sequence
  Description of Artificial Sequence: Synthetic peptide
  XENP018389 vlCDR2
YASHRYT

SEQ ID NO: 14564 - protein, 9 aa, Artificial Sequence
  Description of Artificial Sequence: Synthetic peptide
  XENP018389 vlCDR3
QQDYSSPRT

SEQ ID NO: 14565 - protein, 451 aa, Artificial Sequence; identical to SEQ ID NO: 11545
  Description of Artificial Sequence: Synthetic polypeptide
  XENP018390 1G6_H1_L1.47_IgG1_PVA_/S267K Heavy Chain

SEQ ID NO: 14566 - protein, 122 aa, Artificial Sequence; identical to SEQ ID NO: 6246
  Description of Artificial Sequence: Synthetic polypeptide
  VH of XENP018390

SEQ ID NO: 14567 - protein, 5 aa, Artificial Sequence
  Description of Artificial Sequence: Synthetic peptide
  XENP018390 vhCDR1
NYWMN

SEQ ID NO: 14568 - protein, 19 aa, Artificial Sequence
  Description of Artificial Sequence: Synthetic peptide
  XENP018390 vhCDR2
EIRLKSNNYATHYAEPVKG

SEQ ID NO: 14569 - protein, 11 aa, Artificial Sequence
  Description of Artificial Sequence: Synthetic peptide
  XENP018390 vhCDR3
YYGNYGGYFDV

SEQ ID NO: 14570 - protein, 214 aa, Artificial Sequence
  Description of Artificial Sequence: Synthetic polypeptide
  XENP018390 1G6_H1_L1.47_IgG1_PVA_/S267K Light Chain
SIVMTQSPATLSVSPGERATLSCRASQSVSNDLAWYQQKPGQSPRLLINYASHRYTGVPDRFTGSGYGTEFTLTISSLQSEDFAVYFCQQDYSSPRTFGGGTKVEIKRTVAAPSVFIFPPSDEQLKSGTASVVCLLNNFYPREAKVQWKVDNALQSGNSQESVTEQDSKDSTYSLSSTLTLSKADYEKHKVYACEVTHQGLSSPVTKSFNRGEC

SEQ ID NO: 14571 - protein, 107 aa, Artificial Sequence; identical to SEQ ID NO: 8917
  Description of Artificial Sequence: Synthetic polypeptide
  VL of XENP018390

SEQ ID NO: 14572 - protein, 11 aa, Artificial Sequence
  Description of Artificial Sequence: Synthetic peptide
  XENP018390 vlCDR1
RASQSVSNDLA

SEQ ID NO: 14573 - protein, 7 aa, Artificial Sequence
  Description of Artificial Sequence: Synthetic peptide
  XENP018390 vlCDR2
YASHRYT

SEQ ID NO: 14574 - protein, 9 aa, Artificial Sequence
  Description of Artificial Sequence: Synthetic peptide
  XENP018390 vlCDR3
QQDYSSPRT

SEQ ID NO: 14575 - protein, 451 aa, Artificial Sequence; identical to SEQ ID NO: 11545
  Description of Artificial Sequence: Synthetic polypeptide
  XENP018391 1G6_H1_L1.48_IgG1_PVA_/S267K Heavy Chain

SEQ ID NO: 14576 - protein, 122 aa, Artificial Sequence; identical to SEQ ID NO: 6246
  Description of Artificial Sequence: Synthetic polypeptide
  VH of XENP018391

SEQ ID NO: 14577 - protein, 5 aa, Artificial Sequence
  Description of Artificial Sequence: Synthetic peptide
  XENP018391 vhCDR1
NYWMN

SEQ ID NO: 14578 - protein, 19 aa, Artificial Sequence
  Description of Artificial Sequence: Synthetic peptide
  XENP018391 vhCDR2
EIRLKSNNYATHYAEPVKG

SEQ ID NO: 14579 - protein, 11 aa, Artificial Sequence
  Description of Artificial Sequence: Synthetic peptide
  XENP018391 vhCDR3
YYGNYGGYFDV

SEQ ID NO: 14580 - protein, 214 aa, Artificial Sequence
  Description of Artificial Sequence: Synthetic polypeptide
  XENP018391 1G6_H1_L1.48_IgG1_PVA_/S267K Light Chain
SIVMTQSPATLSVSPGERATLSCRASQSVSNDVSWYQQKPGQSPRLLINYASHRYTGVPDRFTGSGYGTEFTLTISSLQSEDFAVYFCQQDYSSPRTFGGGTKVEIKRTVAAPSVFIFPPSDEQLKSGTASVVCLLNNFYPREAKVQWKVDNALQSGNSQESVTEQDSKDSTYSLSSTLTLSKADYEKHKVYACEVTHQGLSSPVTKSFNRGEC

SEQ ID NO: 14581 - protein, 107 aa, Artificial Sequence; identical to SEQ ID NO: 8926
  Description of Artificial Sequence: Synthetic polypeptide
  VL of XENP018391

SEQ ID NO: 14582 - protein, 11 aa, Artificial Sequence
  Description of Artificial Sequence: Synthetic peptide
  XENP018391 vlCDR1
RASQSVSNDVS

SEQ ID NO: 14583 - protein, 7 aa, Artificial Sequence
  Description of Artificial Sequence: Synthetic peptide
  XENP018391 vlCDR2
YASHRYT

SEQ ID NO: 14584 - protein, 9 aa, Artificial Sequence
  Description of Artificial Sequence: Synthetic peptide
  XENP018391 vlCDR3
QQDYSSPRT

SEQ ID NO: 14585 - protein, 451 aa, Artificial Sequence; identical to SEQ ID NO: 11545
  Description of Artificial Sequence: Synthetic polypeptide
  XENP018392 1G6_H1_L1.49_IgG1_PVA_/S267K Heavy Chain

SEQ ID NO: 14586 - protein, 122 aa, Artificial Sequence; identical to SEQ ID NO: 6246
  Description of Artificial Sequence: Synthetic polypeptide
  VH of XENP018392

SEQ ID NO: 14587 - protein, 5 aa, Artificial Sequence
  Description of Artificial Sequence: Synthetic peptide
  XENP018392 vhCDR1
NYWMN

SEQ ID NO: 14588 - protein, 19 aa, Artificial Sequence
  Description of Artificial Sequence: Synthetic peptide
  XENP018392 vhCDR2
EIRLKSNNYATHYAEPVKG

SEQ ID NO: 14589 - protein, 11 aa, Artificial Sequence
  Description of Artificial Sequence: Synthetic peptide
  XENP018392 vhCDR3
YYGNYGGYFDV

SEQ ID NO: 14590 - protein, 214 aa, Artificial Sequence
  Description of Artificial Sequence: Synthetic polypeptide
  XENP018392 1G6_H1_L1.49_IgG1_PVA_/S267K Light Chain
SIVMTQSPATLSVSPGERATLSCRASQSVSNDVTWYQQKPGQSPRLLINYASHRYTGVPDRFTGSGYGTEFTLTISSLQSEDFAVYFCQQDYSSPRTFGGGTKVEIKRTVAAPSVFIFPPSDEQLKSGTASVVCLLNNFYPREAKVQWKVDNALQSGNSQESVTEQDSKDSTYSLSSTLTLSKADYEKHKVYACEVTHQGLSSPVTKSFNRGEC

SEQ ID NO: 14591 - protein, 107 aa, Artificial Sequence; identical to SEQ ID NO: 8935
  Description of Artificial Sequence: Synthetic polypeptide
  VL of XENP018392

SEQ ID NO: 14592 - protein, 11 aa, Artificial Sequence
  Description of Artificial Sequence: Synthetic peptide
  XENP018392 vlCDR1
RASQSVSNDVT

SEQ ID NO: 14593 - protein, 7 aa, Artificial Sequence
  Description of Artificial Sequence: Synthetic peptide
  XENP018392 vlCDR2
YASHRYT

SEQ ID NO: 14594 - protein, 9 aa, Artificial Sequence
  Description of Artificial Sequence: Synthetic peptide
  XENP018392 vlCDR3
QQDYSSPRT

SEQ ID NO: 14595 - protein, 451 aa, Artificial Sequence; identical to SEQ ID NO: 11545
  Description of Artificial Sequence: Synthetic polypeptide
  XENP018393 1G6_H1_L1.50_IgG1_PVA_/S267K Heavy Chain

SEQ ID NO: 14596 - protein, 122 aa, Artificial Sequence; identical to SEQ ID NO: 6246
  Description of Artificial Sequence: Synthetic polypeptide
  VH of XENP018393

SEQ ID NO: 14597 - protein, 5 aa, Artificial Sequence
  Description of Artificial Sequence: Synthetic peptide
  XENP018393 vhCDR1
NYWMN

SEQ ID NO: 14598 - protein, 19 aa, Artificial Sequence
  Description of Artificial Sequence: Synthetic peptide
  XENP018393 vhCDR2
EIRLKSNNYATHYAEPVKG

SEQ ID NO: 14599 - protein, 11 aa, Artificial Sequence
  Description of Artificial Sequence: Synthetic peptide
  XENP018393 vhCDR3
YYGNYGGYFDV

SEQ ID NO: 14600 - protein, 214 aa, Artificial Sequence
  Description of Artificial Sequence: Synthetic polypeptide
  XENP018393 1G6_H1_L1.50_IgG1_PVA_/S267K Light Chain
SIVMTQSPATLSVSPGERATLSCRASQSVSNDVAWYQQKPGQAPRLLINYASHRYTGVPDRFTGSGYGTEFTLTISSLQSEDFAVYFCQQDYSSPRTFGGGTKVEIKRTVAAPSVFIFPPSDEQLKSGTASVVCLLNNFYPREAKVQWKVDNALQSGNSQESVTEQDSKDSTYSLSSTLTLSKADYEKHKVYACEVTHQGLSSPVTKSFNRGEC

SEQ ID NO: 14601 - protein, 107 aa, Artificial Sequence; identical to SEQ ID NO: 8944
  Description of Artificial Sequence: Synthetic polypeptide
  VL of XENP018393

SEQ ID NO: 14602 - protein, 11 aa, Artificial Sequence
  Description of Artificial Sequence: Synthetic peptide
  XENP018393 vlCDR1
RASQSVSNDVA

SEQ ID NO: 14603 - protein, 7 aa, Artificial Sequence
  Description of Artificial Sequence: Synthetic peptide
  XENP018393 vlCDR2
YASHRYT

SEQ ID NO: 14604 - protein, 9 aa, Artificial Sequence
  Description of Artificial Sequence: Synthetic peptide
  XENP018393 vlCDR3
QQDYSSPRT

SEQ ID NO: 14605 - protein, 451 aa, Artificial Sequence; identical to SEQ ID NO: 11545
  Description of Artificial Sequence: Synthetic polypeptide
  XENP018394 1G6_H1_L1.51_IgG1_PVA_/S267K Heavy Chain

SEQ ID NO: 14606 - protein, 122 aa, Artificial Sequence; identical to SEQ ID NO: 6246
  Description of Artificial Sequence: Synthetic polypeptide
  VH of XENP018394

SEQ ID NO: 14607 - protein, 5 aa, Artificial Sequence
  Description of Artificial Sequence: Synthetic peptide
  XENP018394 vhCDR1
NYWMN

SEQ ID NO: 14608 - protein, 19 aa, Artificial Sequence
  Description of Artificial Sequence: Synthetic peptide
  XENP018394 vhCDR2
EIRLKSNNYATHYAEPVKG

SEQ ID NO: 14609 - protein, 11 aa, Artificial Sequence
  Description of Artificial Sequence: Synthetic peptide
  XENP018394 vhCDR3
YYGNYGGYFDV

SEQ ID NO: 14610 - protein, 214 aa, Artificial Sequence
  Description of Artificial Sequence: Synthetic polypeptide
  XENP018394 1G6_H1_L1.51_IgG1_PVA_/S267K Light Chain
SIVMTQSPATLSVSPGERATLSCRASQSVSNDVAWYQQKPGQSPKLLINYASHRYTGVPDRFTGSGYGTEFTLTISSLQSEDFAVYFCQQDYSSPRTFGGGTKVEIKRTVAAPSVFIFPPSDEQLKSGTASVVCLLNNFYPREAKVQWKVDNALQSGNSQESVTEQDSKDSTYSLSSTLTLSKADYEKHKVYACEVTHQGLSSPVTKSFNRGEC

SEQ ID NO: 14611 - protein, 107 aa, Artificial Sequence; identical to SEQ ID NO: 8953
  Description of Artificial Sequence: Synthetic polypeptide
  VL of XENP018394

SEQ ID NO: 14612 - protein, 11 aa, Artificial Sequence
  Description of Artificial Sequence: Synthetic peptide
  XENP018394 vlCDR1
RASQSVSNDVA

SEQ ID NO: 14613 - protein, 7 aa, Artificial Sequence
  Description of Artificial Sequence: Synthetic peptide
  XENP018394 vlCDR2
YASHRYT

SEQ ID NO: 14614 - protein, 9 aa, Artificial Sequence
  Description of Artificial Sequence: Synthetic peptide
  XENP018394 vlCDR3
QQDYSSPRT

SEQ ID NO: 14615 - protein, 451 aa, Artificial Sequence; identical to SEQ ID NO: 11545
  Description of Artificial Sequence: Synthetic polypeptide
  XENP018395 1G6_H1_L1.52_IgG1_PVA_/S267K Heavy Chain

SEQ ID NO: 14616 - protein, 122 aa, Artificial Sequence; identical to SEQ ID NO: 6246
  Description of Artificial Sequence: Synthetic polypeptide
  VH of XENP018395

SEQ ID NO: 14617 - protein, 5 aa, Artificial Sequence
  Description of Artificial Sequence: Synthetic peptide
  XENP018395 vhCDR1
NYWMN

SEQ ID NO: 14618 - protein, 19 aa, Artificial Sequence
  Description of Artificial Sequence: Synthetic peptide
  XENP018395 vhCDR2
EIRLKSNNYATHYAEPVKG

SEQ ID NO: 14619 - protein, 11 aa, Artificial Sequence
  Description of Artificial Sequence: Synthetic peptide
  XENP018395 vhCDR3
YYGNYGGYFDV

SEQ ID NO: 14620 - protein, 214 aa, Artificial Sequence
  Description of Artificial Sequence: Synthetic polypeptide
  XENP018395 1G6_H1_L1.52_IgG1_PVA_/S267K Light Chain
SIVMTQSPATLSVSPGERATLSCRASQSVSNDVAWYQQKPGQSPQLLINYASHRYTGVPDRFTGSGYGTEFTLTISSLQSEDFAVYFCQQDYSSPRTFGGGTKVEIKRTVAAPSVFIFPPSDEQLKSGTASVVCLLNNFYPREAKVQWKVDNALQSGNSQESVTEQDSKDSTYSLSSTLTLSKADYEKHKVYACEVTHQGLSSPVTKSFNRGEC

SEQ ID NO: 14621 - protein, 107 aa, Artificial Sequence; identical to SEQ ID NO: 8962
  Description of Artificial Sequence: Synthetic polypeptide
  VL of XENP018395

SEQ ID NO: 14622 - protein, 11 aa, Artificial Sequence
  Description of Artificial Sequence: Synthetic peptide
  XENP018395 vlCDR1
RASQSVSNDVA

SEQ ID NO: 14623 - protein, 7 aa, Artificial Sequence
  Description of Artificial Sequence: Synthetic peptide
  XENP018395 vlCDR2
YASHRYT

SEQ ID NO: 14624 - protein, 9 aa, Artificial Sequence
  Description of Artificial Sequence: Synthetic peptide
  XENP018395 vlCDR3
QQDYSSPRT

SEQ ID NO: 14625 - protein, 451 aa, Artificial Sequence; identical to SEQ ID NO: 11545
  Description of Artificial Sequence: Synthetic polypeptide
  XENP018396 1G6_H1_L1.53_IgG1_PVA_/S267K Heavy Chain

SEQ ID NO: 14626 - protein, 122 aa, Artificial Sequence; identical to SEQ ID NO: 6246
  Description of Artificial Sequence: Synthetic polypeptide
  VH of XENP018396

SEQ ID NO: 14627 - protein, 5 aa, Artificial Sequence
  Description of Artificial Sequence: Synthetic peptide
  XENP018396 vhCDR1
NYWMN

SEQ ID NO: 14628 - protein, 19 aa, Artificial Sequence
  Description of Artificial Sequence: Synthetic peptide
  XENP018396 vhCDR2
EIRLKSNNYATHYAEPVKG

SEQ ID NO: 14629 - protein, 11 aa, Artificial Sequence
  Description of Artificial Sequence: Synthetic peptide
  XENP018396 vhCDR3
YYGNYGGYFDV

SEQ ID NO: 14630 - protein, 214 aa, Artificial Sequence
  Description of Artificial Sequence: Synthetic polypeptide
  XENP018396 1G6_H1_L1.53_IgG1_PVA_/S267K Light Chain
SIVMTQSPATLSVSPGERATLSCRASQSVSNDVAWYQQKPGQSPILLINYASHRYTGVPDRFTGSGYGTEFTLTISSLQSEDFAVYFCQQDYSSPRTFGGGTKVEIKRTVAAPSVFIFPPSDEQLKSGTASVVCLLNNFYPREAKVQWKVDNALQSGNSQESVTEQDSKDSTYSLSSTLTLSKADYEKHKVYACEVTHQGLSSPVTKSFNRGEC

SEQ ID NO: 14631 - protein, 107 aa, Artificial Sequence; identical to SEQ ID NO: 8971
  Description of Artificial Sequence: Synthetic polypeptide
  VL of XENP018396

SEQ ID NO: 14632 - protein, 11 aa, Artificial Sequence
  Description of Artificial Sequence: Synthetic peptide
  XENP018396 vlCDR1
RASQSVSNDVA

SEQ ID NO: 14633 - protein, 7 aa, Artificial Sequence
  Description of Artificial Sequence: Synthetic peptide
  XENP018396 vlCDR2
YASHRYT

SEQ ID NO: 14634 - protein, 9 aa, Artificial Sequence
  Description of Artificial Sequence: Synthetic peptide
  XENP018396 vlCDR3
QQDYSSPRT

SEQ ID NO: 14635 - protein, 451 aa, Artificial Sequence; identical to SEQ ID NO: 11545
  Description of Artificial Sequence: Synthetic polypeptide
  XENP018401 1G6_H1_L1.54_IgG1_PVA_/S267K Heavy Chain

SEQ ID NO: 14636 - protein, 122 aa, Artificial Sequence; identical to SEQ ID NO: 6246
  Description of Artificial Sequence: Synthetic polypeptide
  VH of XENP018401

SEQ ID NO: 14637 - protein, 5 aa, Artificial Sequence
  Description of Artificial Sequence: Synthetic peptide
  XENP018401 vhCDR1
NYWMN

SEQ ID NO: 14638 - protein, 19 aa, Artificial Sequence
  Description of Artificial Sequence: Synthetic peptide
  XENP018401 vhCDR2
EIRLKSNNYATHYAEPVKG

SEQ ID NO: 14639 - protein, 11 aa, Artificial Sequence
  Description of Artificial Sequence: Synthetic peptide
  XENP018401 vhCDR3
YYGNYGGYFDV

SEQ ID NO: 14640 - protein, 214 aa, Artificial Sequence
  Description of Artificial Sequence: Synthetic polypeptide
  XENP018401 1G6_H1_L1.54_IgG1_PVA_/S267K Light Chain
SIVMTQSPATLSVSPGERATLSCRASQSVSNDVAWYQQKPGQSPRLLIYYASHRYTGVPDRFTGSGYGTEFTLTISSLQSEDFAVYFCQQDYSSPRTFGGGTKVEIKRTVAAPSVFIFPPSDEQLKSGTASVVCLLNNFYPREAKVQWKVDNALQSGNSQESVTEQDSKDSTYSLSSTLTLSKADYEKHKVYACEVTHQGLSSPVTKSFNRGEC

SEQ ID NO: 14641 - protein, 107 aa, Artificial Sequence; identical to SEQ ID NO: 8980
  Description of Artificial Sequence: Synthetic polypeptide
  VL of XENP018401

SEQ ID NO: 14642 - protein, 11 aa, Artificial Sequence
  Description of Artificial Sequence: Synthetic peptide
  XENP018401 vlCDR1
RASQSVSNDVA

SEQ ID NO: 14643 - protein, 7 aa, Artificial Sequence
  Description of Artificial Sequence: Synthetic peptide
  XENP018401 vlCDR2
YASHRYT

SEQ ID NO: 14644 - protein, 9 aa, Artificial Sequence
  Description of Artificial Sequence: Synthetic peptide
  XENP018401 vlCDR3
QQDYSSPRT

SEQ ID NO: 14645 - protein, 451 aa, Artificial Sequence; identical to SEQ ID NO: 11545
  Description of Artificial Sequence: Synthetic polypeptide
  XENP018402 1G6_H1_L1.55_IgG1_PVA_/S267K Heavy Chain

SEQ ID NO: 14646 - protein, 122 aa, Artificial Sequence; identical to SEQ ID NO: 6246
  Description of Artificial Sequence: Synthetic polypeptide
  VH of XENP018402

SEQ ID NO: 14647 - protein, 5 aa, Artificial Sequence
  Description of Artificial Sequence: Synthetic peptide
  XENP018402 vhCDR1
NYWMN

SEQ ID NO: 14648 - protein, 19 aa, Artificial Sequence
  Description of Artificial Sequence: Synthetic peptide
  XENP018402 vhCDR2
EIRLKSNNYATHYAEPVKG

SEQ ID NO: 14649 - protein, 11 aa, Artificial Sequence
  Description of Artificial Sequence: Synthetic peptide
  XENP018402 vhCDR3
YYGNYGGYFDV

SEQ ID NO: 14650 - protein, 214 aa, Artificial Sequence
  Description of Artificial Sequence: Synthetic polypeptide
  XENP018402 1G6_H1_L1.55_IgG1_PVA_/S267K Light Chain
SIVMTQSPATLSVSPGERATLSCRASQSVSNDVAWYQQKPGQSPRLLINFASHRYTGVPDRFTGSGYGTEFTLTISSLQSEDFAVYFCQQDYSSPRTFGGGTKVEIKRTVAAPSVFIFPPSDEQLKSGTASVVCLLNNFYPREAKVQWKVDNALQSGNSQESVTEQDSKDSTYSLSSTLTLSKADYEKHKVYACEVTHQGLSSPVTKSFNRGEC

SEQ ID NO: 14651 - protein, 107 aa, Artificial Sequence; identical to SEQ ID NO: 8989
  Description of Artificial Sequence: Synthetic polypeptide
  VL of XENP018402

SEQ ID NO: 14652 - protein, 11 aa, Artificial Sequence
  Description of Artificial Sequence: Synthetic peptide
  XENP018402 vlCDR1
RASQSVSNDVA

SEQ ID NO: 14653 - protein, 7 aa, Artificial Sequence
  Description of Artificial Sequence: Synthetic peptide
  XENP018402 vlCDR2
FASHRYT

SEQ ID NO: 14654 - protein, 9 aa, Artificial Sequence
  Description of Artificial Sequence: Synthetic peptide
  XENP018402 vlCDR3
QQDYSSPRT

SEQ ID NO: 14655 - protein, 451 aa, Artificial Sequence; identical to SEQ ID NO: 11545
  Description of Artificial Sequence: Synthetic polypeptide
  XENP018403 1G6_H1_L1.56_IgG1_PVA_/S267K Heavy Chain

SEQ ID NO: 14656 - protein, 122 aa, Artificial Sequence; identical to SEQ ID NO: 6246
  Description of Artificial Sequence: Synthetic polypeptide
  VH of XENP018403

SEQ ID NO: 14657 - protein, 5 aa, Artificial Sequence
  Description of Artificial Sequence: Synthetic peptide
  XENP018403 vhCDR1
NYWMN

SEQ ID NO: 14658 - protein, 19 aa, Artificial Sequence
  Description of Artificial Sequence: Synthetic peptide
  XENP018403 vhCDR2
EIRLKSNNYATHYAEPVKG

SEQ ID NO: 14659 - protein, 11 aa, Artificial Sequence
  Description of Artificial Sequence: Synthetic peptide
  XENP018403 vhCDR3
YYGNYGGYFDV

SEQ ID NO: 14660 - protein, 214 aa, Artificial Sequence
  Description of Artificial Sequence: Synthetic polypeptide
  XENP018403 1G6_H1_L1.56_IgG1_PVA_/S267K Light Chain
SIVMTQSPATLSVSPGERATLSCRASQSVSNDVAWYQQKPGQSPRLLINHASHRYTGVPDRFTGSGYGTEFTLTISSLQSEDFAVYFCQQDYSSPRTFGGGTKVEIKRTVAAPSVFIFPPSDEQLKSGTASVVCLLNNFYPREAKVQWKVDNALQSGNSQESVTEQDSKDSTYSLSSTLTLSKADYEKHKVYACEVTHQGLSSPVTKSFNRGEC

SEQ ID NO: 14661 - protein, 107 aa, Artificial Sequence; identical to SEQ ID NO: 8998
  Description of Artificial Sequence: Synthetic polypeptide
  VL of XENP018403

SEQ ID NO: 14662 - protein, 11 aa, Artificial Sequence
  Description of Artificial Sequence: Synthetic peptide
  XENP018403 vlCDR1
RASQSVSNDVA

SEQ ID NO: 14663 - protein, 7 aa, Artificial Sequence
  Description of Artificial Sequence: Synthetic peptide
  XENP018403 vlCDR2
HASHRYT

SEQ ID NO: 14664 - protein, 9 aa, Artificial Sequence
  Description of Artificial Sequence: Synthetic peptide
  XENP018403 vlCDR3
QQDYSSPRT

SEQ ID NO: 14665 - protein, 451 aa, Artificial Sequence; identical to SEQ ID NO: 11545
  Description of Artificial Sequence: Synthetic polypeptide
  XENP018404 1G6_H1_L1.57_IgG1_PVA_/S267K Heavy Chain

SEQ ID NO: 14666 - protein, 122 aa, Artificial Sequence; identical to SEQ ID NO: 6246
  Description of Artificial Sequence: Synthetic polypeptide
  VH of XENP018404

SEQ ID NO: 14667 - protein, 5 aa, Artificial Sequence
  Description of Artificial Sequence: Synthetic peptide
  XENP018404 vhCDR1
NYWMN

SEQ ID NO: 14668 - protein, 19 aa, Artificial Sequence
  Description of Artificial Sequence: Synthetic peptide
  XENP018404 vhCDR2
EIRLKSNNYATHYAEPVKG

SEQ ID NO: 14669 - protein, 11 aa, Artificial Sequence
  Description of Artificial Sequence: Synthetic peptide
  XENP018404 vhCDR3
YYGNYGGYFDV

SEQ ID NO: 14670 - protein, 214 aa, Artificial Sequence
  Description of Artificial Sequence: Synthetic polypeptide
  XENP018404 1G6_H1_L1.57_IgG1_PVA_/S267K Light Chain
SIVMTQSPATLSVSPGERATLSCRASQSVSNDVAWYQQKPGQSPRLLINLASHRYTGVPDRFTGSGYGTEFTLTISSLQSEDFAVYFCQQDYSSPRTFGGGTKVEIKRTVAAPSVFIFPPSDEQLKSGTASVVCLLNNFYPREAKVQWKVDNALQSGNSQESVTEQDSKDSTYSLSSTLTLSKADYEKHKVYACEVTHQGLSSPVTKSFNRGEC

SEQ ID NO: 14671 - protein, 107 aa, Artificial Sequence; identical to SEQ ID NO: 9007
  Description of Artificial Sequence: Synthetic polypeptide
  VL of XENP018404

SEQ ID NO: 14672 - protein, 11 aa, Artificial Sequence
  Description of Artificial Sequence: Synthetic peptide
  XENP018404 vlCDR1
RASQSVSNDVA

SEQ ID NO: 14673 - protein, 7 aa, Artificial Sequence
  Description of Artificial Sequence: Synthetic peptide
  XENP018404 vlCDR2
LASHRYT

SEQ ID NO: 14674 - protein, 9 aa, Artificial Sequence
  Description of Artificial Sequence: Synthetic peptide
  XENP018404 vlCDR3
QQDYSSPRT

SEQ ID NO: 14675 - protein, 451 aa, Artificial Sequence; identical to SEQ ID NO: 11545
  Description of Artificial Sequence: Synthetic polypeptide
  XENP018405 1G6_H1_L1.58_IgG1_PVA_/S267K Heavy Chain

SEQ ID NO: 14676 - protein, 122 aa, Artificial Sequence; identical to SEQ ID NO: 6246
  Description of Artificial Sequence: Synthetic polypeptide
  VH of XENP018405

SEQ ID NO: 14677 - protein, 5 aa, Artificial Sequence
  Description of Artificial Sequence: Synthetic peptide
  XENP018405 vhCDR1
NYWMN

SEQ ID NO: 14678 - protein, 19 aa, Artificial Sequence
  Description of Artificial Sequence: Synthetic peptide
  XENP018405 vhCDR2
EIRLKSNNYATHYAEPVKG

SEQ ID NO: 14679 - protein, 11 aa, Artificial Sequence
  Description of Artificial Sequence: Synthetic peptide
  XENP018405 vhCDR3
YYGNYGGYFDV

SEQ ID NO: 14680 - protein, 214 aa, Artificial Sequence
  Description of Artificial Sequence: Synthetic polypeptide
  XENP018405 1G6_H1_L1.58_IgG1_PVA_/S267K Light Chain
SIVMTQSPATLSVSPGERATLSCRASQSVSNDVAWYQQKPGQSPRLLINWASHRYTGVPDRFTGSGYGTEFTLTISSLQSEDFAVYFCQQDYSSPRTFGGGTKVEIKRTVAAPSVFIFPPSDEQLKSGTASVVCLLNNFYPREAKVQWKVDNALQSGNSQESVTEQDSKDSTYSLSSTLTLSKADYEKHKVYACEVTHQGLSSPVTKSFNRGEC

SEQ ID NO: 14681 - protein, 107 aa, Artificial Sequence; identical to SEQ ID NO: 9016
  Description of Artificial Sequence: Synthetic polypeptide
  VL of XENP018405

SEQ ID NO: 14682 - protein, 11 aa, Artificial Sequence
  Description of Artificial Sequence: Synthetic peptide
  XENP018405 vlCDR1
RASQSVSNDVA

SEQ ID NO: 14683 - protein, 7 aa, Artificial Sequence
  Description of Artificial Sequence: Synthetic peptide
  XENP018405 vlCDR2
WASHRYT

SEQ ID NO: 14684 - protein, 9 aa, Artificial Sequence
  Description of Artificial Sequence: Synthetic peptide
  XENP018405 vlCDR3
QQDYSSPRT

SEQ ID NO: 14685 - protein, 451 aa, Artificial Sequence; identical to SEQ ID NO: 11545
  Description of Artificial Sequence: Synthetic polypeptide
  XENP018406 1G6_H1_L1.59_IgG1_PVA_/S267K Heavy Chain

SEQ ID NO: 14686 - protein, 122 aa, Artificial Sequence; identical to SEQ ID NO: 6246
  Description of Artificial Sequence: Synthetic polypeptide
  VH of XENP018406

SEQ ID NO: 14687 - protein, 5 aa, Artificial Sequence
  Description of Artificial Sequence: Synthetic peptide
  XENP018406 vhCDR1
NYWMN

SEQ ID NO: 14688 - protein, 19 aa, Artificial Sequence
  Description of Artificial Sequence: Synthetic peptide
  XENP018406 vhCDR2
EIRLKSNNYATHYAEPVKG

SEQ ID NO: 14689 - protein, 11 aa, Artificial Sequence
  Description of Artificial Sequence: Synthetic peptide
  XENP018406 vhCDR3
YYGNYGGYFDV

SEQ ID NO: 14690 - protein, 214 aa, Artificial Sequence
  Description of Artificial Sequence: Synthetic polypeptide
  XENP018406 1G6_H1_L1.59_IgG1_PVA_/S267K Light Chain
SIVMTQSPATLSVSPGERATLSCRASQSVSNDVAWYQQKPGQSPRLLINVASHRYTGVPDRFTGSGYGTEFTLTISSLQSEDFAVYFCQQDYSSPRTFGGGTKVEIKRTVAAPSVFIFPPSDEQLKSGTASVVCLLNNFYPREAKVQWKVDNALQSGNSQESVTEQDSKDSTYSLSSTLTLSKADYEKHKVYACEVTHQGLSSPVTKSFNRGEC

SEQ ID NO: 14691 - protein, 107 aa, Artificial Sequence; identical to SEQ ID NO: 9025
  Description of Artificial Sequence: Synthetic polypeptide
  VL of XENP018406

SEQ ID NO: 14692 - protein, 11 aa, Artificial Sequence
  Description of Artificial Sequence: Synthetic peptide
  XENP018406 vlCDR1
RASQSVSNDVA

SEQ ID NO: 14693 - protein, 7 aa, Artificial Sequence
  Description of Artificial Sequence: Synthetic peptide
  XENP018406 vlCDR2
VASHRYT

SEQ ID NO: 14694 - protein, 9 aa, Artificial Sequence
  Description of Artificial Sequence: Synthetic peptide
  XENP018406 vlCDR3
QQDYSSPRT

SEQ ID NO: 14695 - protein, 451 aa, Artificial Sequence; identical to SEQ ID NO: 11545
  Description of Artificial Sequence: Synthetic polypeptide
  XENP018407 1G6_H1_L1.60_IgG1_PVA_/S267K Heavy Chain

SEQ ID NO: 14696 - protein, 122 aa, Artificial Sequence; identical to SEQ ID NO: 6246
  Description of Artificial Sequence: Synthetic polypeptide
  VH of XENP018407

SEQ ID NO: 14697 - protein, 5 aa, Artificial Sequence
  Description of Artificial Sequence: Synthetic peptide
  XENP018407 vhCDR1
NYWMN

SEQ ID NO: 14698 - protein, 19 aa, Artificial Sequence
  Description of Artificial Sequence: Synthetic peptide
  XENP018407 vhCDR2
EIRLKSNNYATHYAEPVKG

SEQ ID NO: 14699 - protein, 11 aa, Artificial Sequence
  Description of Artificial Sequence: Synthetic peptide
  XENP018407 vhCDR3
YYGNYGGYFDV

SEQ ID NO: 14700 - protein, 214 aa, Artificial Sequence
  Description of Artificial Sequence: Synthetic polypeptide
  XENP018407 1G6_H1_L1.60_IgG1_PVA_/S267K Light Chain
SIVMTQSPATLSVSPGERATLSCRASQSVSNDVAWYQQKPGQSPRLLINAASHRYTGVPDRFTGSGYGTEFTLTISSLQSEDFAVYFCQQDYSSPRTFGGGTKVEIKRTVAAPSVFIFPPSDEQLKSGTASVVCLLNNFYPREAKVQWKVDNALQSGNSQESVTEQDSKDSTYSLSSTLTLSKADYEKHKVYACEVTHQGLSSPVTKSFNRGEC

SEQ ID NO: 14701 - protein, 107 aa, Artificial Sequence; identical to SEQ ID NO: 9034
  Description of Artificial Sequence: Synthetic polypeptide
  VL of XENP018407

SEQ ID NO: 14702 - protein, 11 aa, Artificial Sequence
  Description of Artificial Sequence: Synthetic peptide
  XENP018407 vlCDR1
RASQSVSNDVA

SEQ ID NO: 14703 - protein, 7 aa, Artificial Sequence
  Description of Artificial Sequence: Synthetic peptide
  XENP018407 vlCDR2
AASHRYT

SEQ ID NO: 14704 - protein, 9 aa, Artificial Sequence
  Description of Artificial Sequence: Synthetic peptide
  XENP018407 vlCDR3
QQDYSSPRT

SEQ ID NO: 14705 - protein, 451 aa, Artificial Sequence; identical to SEQ ID NO: 11545
  Description of Artificial Sequence: Synthetic polypeptide
  XENP018408 1G6_H1_L1.61_IgG1_PVA_/S267K Heavy Chain

SEQ ID NO: 14706 - protein, 122 aa, Artificial Sequence; identical to SEQ ID NO: 6246
  Description of Artificial Sequence: Synthetic polypeptide
  VH of XENP018408

SEQ ID NO: 14707 - protein, 5 aa, Artificial Sequence
  Description of Artificial Sequence: Synthetic peptide
  XENP018408 vhCDR1
NYWMN

SEQ ID NO: 14708 - protein, 19 aa, Artificial Sequence
  Description of Artificial Sequence: Synthetic peptide
  XENP018408 vhCDR2
EIRLKSNNYATHYAEPVKG

SEQ ID NO: 14709 - protein, 11 aa, Artificial Sequence
  Description of Artificial Sequence: Synthetic peptide
  XENP018408 vhCDR3
YYGNYGGYFDV

SEQ ID NO: 14710 - protein, 214 aa, Artificial Sequence
  Description of Artificial Sequence: Synthetic polypeptide
  XENP018408 1G6_H1_L1.61_IgG1_PVA_/S267K Light Chain
SIVMTQSPATLSVSPGERATLSCRASQSVSNDVAWYQQKPGQSPRLLINQASHRYTGVPDRFTGSGYGTEFTLTISSLQSEDFAVYFCQQDYSSPRTFGGGTKVEIKRTVAAPSVFIFPPSDEQLKSGTASVVCLLNNFYPREAKVQWKVDNALQSGNSQESVTEQDSKDSTYSLSSTLTLSKADYEKHKVYACEVTHQGLSSPVTKSFNRGEC

SEQ ID NO: 14711 - protein, 107 aa, Artificial Sequence; identical to SEQ ID NO: 9043
  Description of Artificial Sequence: Synthetic polypeptide
  VL of XENP018408

SEQ ID NO: 14712 - protein, 11 aa, Artificial Sequence
  Description of Artificial Sequence: Synthetic peptide
  XENP018408 vlCDR1
RASQSVSNDVA

SEQ ID NO: 14713 - protein, 7 aa, Artificial Sequence
  Description of Artificial Sequence: Synthetic peptide
  XENP018408 vlCDR2
QASHRYT

SEQ ID NO: 14714 - protein, 9 aa, Artificial Sequence
  Description of Artificial Sequence: Synthetic peptide
  XENP018408 vlCDR3
QQDYSSPRT

SEQ ID NO: 14715 - protein, 451 aa, Artificial Sequence; identical to SEQ ID NO: 11545
  Description of Artificial Sequence: Synthetic polypeptide
  XENP018409 1G6_H1_L1.62_IgG1_PVA_/S267K Heavy Chain

SEQ ID NO: 14716 - protein, 122 aa, Artificial Sequence; identical to SEQ ID NO: 6246
  Description of Artificial Sequence: Synthetic polypeptide
  VH of XENP018409

SEQ ID NO: 14717 - protein, 5 aa, Artificial Sequence
  Description of Artificial Sequence: Synthetic peptide
  XENP018409 vhCDR1
NYWMN

SEQ ID NO: 14718 - protein, 19 aa, Artificial Sequence
  Description of Artificial Sequence: Synthetic peptide
  XENP018409 vhCDR2
EIRLKSNNYATHYAEPVKG

SEQ ID NO: 14719 - protein, 11 aa, Artificial Sequence
  Description of Artificial Sequence: Synthetic peptide
  XENP018409 vhCDR3
YYGNYGGYFDV

SEQ ID NO: 14720 - protein, 214 aa, Artificial Sequence
  Description of Artificial Sequence: Synthetic polypeptide
  XENP018409 1G6_H1_L1.62_IgG1_PVA_/S267K Light Chain
SIVMTQSPATLSVSPGERATLSCRASQSVSNDVAWYQQKPGQSPRLLINDASHRYTGVPDRFTGSGYGTEFTLTISSLQSEDFAVYFCQQDYSSPRTFGGGTKVEIKRTVAAPSVFIFPPSDEQLKSGTASVVCLLNNFYPREAKVQWKVDNALQSGNSQESVTEQDSKDSTYSLSSTLTLSKADYEKHKVYACEVTHQGLSSPVTKSFNRGEC

SEQ ID NO: 14721 - protein, 107 aa, Artificial Sequence; identical to SEQ ID NO: 9052
  Description of Artificial Sequence: Synthetic polypeptide
  VL of XENP018409

SEQ ID NO: 14722 - protein, 11 aa, Artificial Sequence
  Description of Artificial Sequence: Synthetic peptide
  XENP018409 vlCDR1
RASQSVSNDVA

SEQ ID NO: 14723 - protein, 7 aa, Artificial Sequence
  Description of Artificial Sequence: Synthetic peptide
  XENP018409 vlCDR2
DASHRYT

SEQ ID NO: 14724 - protein, 9 aa, Artificial Sequence
  Description of Artificial Sequence: Synthetic peptide
  XENP018409 vlCDR3
QQDYSSPRT

SEQ ID NO: 14725 - protein, 451 aa, Artificial Sequence; identical to SEQ ID NO: 11545
  Description of Artificial Sequence: Synthetic polypeptide
  XENP018410 1G6_H1_L1.63_IgG1_PVA_/S267K Heavy Chain

SEQ ID NO: 14726 - protein, 122 aa, Artificial Sequence; identical to SEQ ID NO: 6246
  Description of Artificial Sequence: Synthetic polypeptide
  VH of XENP018410

SEQ ID NO: 14727 - protein, 5 aa, Artificial Sequence
  Description of Artificial Sequence: Synthetic peptide
  XENP018410 vhCDR1
NYWMN

SEQ ID NO: 14728 - protein, 19 aa, Artificial Sequence
  Description of Artificial Sequence: Synthetic peptide
  XENP018410 vhCDR2
EIRLKSNNYATHYAEPVKG

SEQ ID NO: 14729 - protein, 11 aa, Artificial Sequence
  Description of Artificial Sequence: Synthetic peptide
  XENP018410 vhCDR3
YYGNYGGYFDV

SEQ ID NO: 14730 - protein, 214 aa, Artificial Sequence
  Description of Artificial Sequence: Synthetic polypeptide
  XENP018410 1G6_H1_L1.63_IgG1_PVA_/S267K Light Chain
SIVMTQSPATLSVSPGERATLSCRASQSVSNDVAWYQQKPGQSPRLLINKASHRYTGVPDRFTGSGYGTEFTLTISSLQSEDFAVYFCQQDYSSPRTFGGGTKVEIKRTVAAPSVFIFPPSDEQLKSGTASVVCLLNNFYPREAKVQWKVDNALQSGNSQESVTEQDSKDSTYSLSSTLTLSKADYEKHKVYACEVTHQGLSSPVTKSFNRGEC

SEQ ID NO: 14731 - protein, 107 aa, Artificial Sequence; identical to SEQ ID NO: 9061
  Description of Artificial Sequence: Synthetic polypeptide
  VL of XENP018410

SEQ ID NO: 14732 - protein, 11 aa, Artificial Sequence
  Description of Artificial Sequence: Synthetic peptide
  XENP018410 vlCDR1
RASQSVSNDVA

SEQ ID NO: 14733 - protein, 7 aa, Artificial Sequence
  Description of Artificial Sequence: Synthetic peptide
  XENP018410 vlCDR2
KASHRYT

SEQ ID NO: 14734 - protein, 9 aa, Artificial Sequence
  Description of Artificial Sequence: Synthetic peptide
  XENP018410 vlCDR3
QQDYSSPRT

SEQ ID NO: 14735 - protein, 451 aa, Artificial Sequence; identical to SEQ ID NO: 11545
  Description of Artificial Sequence: Synthetic polypeptide
  XENP018411 1G6_H1_L1.64_IgG1_PVA_/S267K Heavy Chain

SEQ ID NO: 14736 - protein, 122 aa, Artificial Sequence; identical to SEQ ID NO: 6246
  Description of Artificial Sequence: Synthetic polypeptide
  VH of XENP018411

SEQ ID NO: 14737 - protein, 5 aa, Artificial Sequence
  Description of Artificial Sequence: Synthetic peptide
  XENP018411 vhCDR1
NYWMN

SEQ ID NO: 14738 - protein, 19 aa, Artificial Sequence
  Description of Artificial Sequence: Synthetic peptide
  XENP018411 vhCDR2
EIRLKSNNYATHYAEPVKG

SEQ ID NO: 14739 - protein, 11 aa, Artificial Sequence
  Description of Artificial Sequence: Synthetic peptide
  XENP018411 vhCDR3
YYGNYGGYFDV

SEQ ID NO: 14740 - protein, 214 aa, Artificial Sequence
  Description of Artificial Sequence: Synthetic polypeptide
  XENP018411 1G6_H1_L1.64_IgG1_PVA_/S267K Light Chain
SIVMTQSPATLSVSPGERATLSCRASQSVSNDVAWYQQKPGQSPRLLINYASYRYTGVPDRFTGSGYGTEFTLTISSLQSEDFAVYFCQQDYSSPRTFGGGTKVEIKRTVAAPSVFIFPPSDEQLKSGTASVVCLLNNFYPREAKVQWKVDNALQSGNSQESVTEQDSKDSTYSLSSTLTLSKADYEKHKVYACEVTHQGLSSPVTKSFNRGEC

SEQ ID NO: 14741 - protein, 107 aa, Artificial Sequence; identical to SEQ ID NO: 9070
  Description of Artificial Sequence: Synthetic polypeptide
  VL of XENP018411

SEQ ID NO: 14742 - protein, 11 aa, Artificial Sequence
  Description of Artificial Sequence: Synthetic peptide
  XENP018411 vlCDR1
RASQSVSNDVA

SEQ ID NO: 14743 - protein, 7 aa, Artificial Sequence
  Description of Artificial Sequence: Synthetic peptide
  XENP018411 vlCDR2
YASYRYT

SEQ ID NO: 14744 - protein, 9 aa, Artificial Sequence
  Description of Artificial Sequence: Synthetic peptide
  XENP018411 vlCDR3
QQDYSSPRT

SEQ ID NO: 14745 - protein, 451 aa, Artificial Sequence; identical to SEQ ID NO: 11545
  Description of Artificial Sequence: Synthetic polypeptide
  XENP018412 1G6_H1_L1.65_IgG1_PVA_/S267K Heavy Chain

SEQ ID NO: 14746 - protein, 122 aa, Artificial Sequence; identical to SEQ ID NO: 6246
  Description of Artificial Sequence: Synthetic polypeptide
  VH of XENP018412

SEQ ID NO: 14747 - protein, 5 aa, Artificial Sequence
  Description of Artificial Sequence: Synthetic peptide
  XENP018412 vhCDR1
NYWMN

SEQ ID NO: 14748 - protein, 19 aa, Artificial Sequence
  Description of Artificial Sequence: Synthetic peptide
  XENP018412 vhCDR2
EIRLKSNNYATHYAEPVKG

SEQ ID NO: 14749 - protein, 11 aa, Artificial Sequence
  Description of Artificial Sequence: Synthetic peptide
  XENP018412 vhCDR3
YYGNYGGYFDV

SEQ ID NO: 14750 - protein, 214 aa, Artificial Sequence
  Description of Artificial Sequence: Synthetic polypeptide
  XENP018412 1G6_H1_L1.65_IgG1_PVA_/S267K Light Chain
SIVMTQSPATLSVSPGERATLSCRASQSVSNDVAWYQQKPGQSPRLLINYASQRYTGVPDRFTGSGYGTEFTLTISSLQSEDFAVYFCQQDYSSPRTFGGGTKVEIKRTVAAPSVFIFPPSDEQLKSGTASVVCLLNNFYPREAKVQWKVDNALQSGNSQESVTEQDSKDSTYSLSSTLTLSKADYEKHKVYACEVTHQGLSSPVTKSFNRGEC

SEQ ID NO: 14751 - protein, 107 aa, Artificial Sequence; identical to SEQ ID NO: 9079
  Description of Artificial Sequence: Synthetic polypeptide
  VL of XENP018412

SEQ ID NO: 14752 - protein, 11 aa, Artificial Sequence
  Description of Artificial Sequence: Synthetic peptide
  XENP018412 vlCDR1
RASQSVSNDVA

SEQ ID NO: 14753 - protein, 7 aa, Artificial Sequence
  Description of Artificial Sequence: Synthetic peptide
  XENP018412 vlCDR2
YASQRYT

SEQ ID NO: 14754 - protein, 9 aa, Artificial Sequence
  Description of Artificial Sequence: Synthetic peptide
  XENP018412 vlCDR3
QQDYSSPRT

SEQ ID NO: 14755 - protein, 451 aa, Artificial Sequence; identical to SEQ ID NO: 11545
  Description of Artificial Sequence: Synthetic polypeptide
  XENP018413 1G6_H1_L1.66_IgG1_PVA_/S267K Heavy Chain

SEQ ID NO: 14756 - protein, 122 aa, Artificial Sequence; identical to SEQ ID NO: 6246
  Description of Artificial Sequence: Synthetic polypeptide
  VH of XENP018413

SEQ ID NO: 14757 - protein, 5 aa, Artificial Sequence
  Description of Artificial Sequence: Synthetic peptide
  XENP018413 vhCDR1
NYWMN

SEQ ID NO: 14758 - protein, 19 aa, Artificial Sequence
  Description of Artificial Sequence: Synthetic peptide
  XENP018413 vhCDR2
EIRLKSNNYATHYAEPVKG

SEQ ID NO: 14759 - protein, 11 aa, Artificial Sequence
  Description of Artificial Sequence: Synthetic peptide
  XENP018413 vhCDR3
YYGNYGGYFDV

SEQ ID NO: 14760 - protein, 214 aa, Artificial Sequence
  Description of Artificial Sequence: Synthetic polypeptide
  XENP018413 1G6_H1_L1.66_IgG1_PVA_/S267K Light Chain
SIVMTQSPATLSVSPGERATLSCRASQSVSNDVAWYQQKPGQSPRLLINYASDRYTGVPDRFTGSGYGTEFTLTISSLQSEDFAVYFCQQDYSSPRTFGGGTKVEIKRTVAAPSVFIFPPSDEQLKSGTASVVCLLNNFYPREAKVQWKVDNALQSGNSQESVTEQDSKDSTYSLSSTLTLSKADYEKHKVYACEVTHQGLSSPVTKSFNRGEC

SEQ ID NO: 14761 - protein, 107 aa, Artificial Sequence; identical to SEQ ID NO: 9088
  Description of Artificial Sequence: Synthetic polypeptide
  VL of XENP018413

SEQ ID NO: 14762 - protein, 11 aa, Artificial Sequence
  Description of Artificial Sequence: Synthetic peptide
  XENP018413 vlCDR1
RASQSVSNDVA

SEQ ID NO: 14763 - protein, 7 aa, Artificial Sequence
  Description of Artificial Sequence: Synthetic peptide
  XENP018413 vlCDR2
YASDRYT

SEQ ID NO: 14764 - protein, 9 aa, Artificial Sequence
  Description of Artificial Sequence: Synthetic peptide
  XENP018413 vlCDR3
QQDYSSPRT

SEQ ID NO: 14765 - protein, 451 aa, Artificial Sequence; identical to SEQ ID NO: 11545
  Description of Artificial Sequence: Synthetic polypeptide
  XENP018414 1G6_H1_L1.67_IgG1_PVA_/S267K Heavy Chain

SEQ ID NO: 14766 - protein, 122 aa, Artificial Sequence; identical to SEQ ID NO: 6246
  Description of Artificial Sequence: Synthetic polypeptide
  VH of XENP018414

SEQ ID NO: 14767 - protein, 5 aa, Artificial Sequence
  Description of Artificial Sequence: Synthetic peptide
  XENP018414 vhCDR1
NYWMN

SEQ ID NO: 14768 - protein, 19 aa, Artificial Sequence
  Description of Artificial Sequence: Synthetic peptide
  XENP018414 vhCDR2
EIRLKSNNYATHYAEPVKG

SEQ ID NO: 14769 - protein, 11 aa, Artificial Sequence
  Description of Artificial Sequence: Synthetic peptide
  XENP018414 vhCDR3
YYGNYGGYFDV

SEQ ID NO: 14770 - protein, 214 aa, Artificial Sequence
  Description of Artificial Sequence: Synthetic polypeptide
  XENP018414 1G6_H1_L1.67_IgG1_PVA_/S267K Light Chain
SIVMTQSPATLSVSPGERATLSCRASQSVSNDVAWYQQKPGQSPRLLINYASWRYTGVPDRFTGSGYGTEFTLTISSLQSEDFAVYFCQQDYSSPRTFGGGTKVEIKRTVAAPSVFIFPPSDEQLKSGTASVVCLLNNFYPREAKVQWKVDNALQSGNSQESVTEQDSKDSTYSLSSTLTLSKADYEKHKVYACEVTHQGLSSPVTKSFNRGEC

SEQ ID NO: 14771 - protein, 107 aa, Artificial Sequence; identical to SEQ ID NO: 9097
  Description of Artificial Sequence: Synthetic polypeptide
  VL of XENP018414

SEQ ID NO: 14772 - protein, 11 aa, Artificial Sequence
  Description of Artificial Sequence: Synthetic peptide
  XENP018414 vlCDR1
RASQSVSNDVA

SEQ ID NO: 14773 - protein, 7 aa, Artificial Sequence
  Description of Artificial Sequence: Synthetic peptide
  XENP018414 vlCDR2
YASWRYT

SEQ ID NO: 14774 - protein, 9 aa, Artificial Sequence
  Description of Artificial Sequence: Synthetic peptide
  XENP018414 vlCDR3
QQDYSSPRT

SEQ ID NO: 14775 - protein, 451 aa, Artificial Sequence; identical to SEQ ID NO: 11545
  Description of Artificial Sequence: Synthetic polypeptide
  XENP018415 1G6_H1_L1.68_IgG1_PVA_/S267K Heavy Chain

SEQ ID NO: 14776 - protein, 122 aa, Artificial Sequence; identical to SEQ ID NO: 6246
  Description of Artificial Sequence: Synthetic polypeptide
  VH of XENP018415

SEQ ID NO: 14777 - protein, 5 aa, Artificial Sequence
  Description of Artificial Sequence: Synthetic peptide
  XENP018415 vhCDR1
NYWMN

SEQ ID NO: 14778 - protein, 19 aa, Artificial Sequence
  Description of Artificial Sequence: Synthetic peptide
  XENP018415 vhCDR2
EIRLKSNNYATHYAEPVKG

SEQ ID NO: 14779 - protein, 11 aa, Artificial Sequence
  Description of Artificial Sequence: Synthetic peptide
  XENP018415 vhCDR3
YYGNYGGYFDV

SEQ ID NO: 14780 - protein, 214 aa, Artificial Sequence
  Description of Artificial Sequence: Synthetic polypeptide
  XENP018415 1G6_H1_L1.68_IgG1_PVA_/S267K Light Chain
SIVMTQSPATLSVSPGERATLSCRASQSVSNDVAWYQQKPGQSPRLLINYASARYTGVPDRFTGSGYGTEFTLTISSLQSEDFAVYFCQQDYSSPRTFGGGTKVEIKRTVAAPSVFIFPPSDEQLKSGTASVVCLLNNFYPREAKVQWKVDNALQSGNSQESVTEQDSKDSTYSLSSTLTLSKADYEKHKVYACEVTHQGLSSPVTKSFNRGEC

SEQ ID NO: 14781 - protein, 107 aa, Artificial Sequence; identical to SEQ ID NO: 9106
  Description of Artificial Sequence: Synthetic polypeptide
  VL of XENP018415

SEQ ID NO: 14782 - protein, 11 aa, Artificial Sequence
  Description of Artificial Sequence: Synthetic peptide
  XENP018415 vlCDR1
RASQSVSNDVA

SEQ ID NO: 14783 - protein, 7 aa, Artificial Sequence
  Description of Artificial Sequence: Synthetic peptide
  XENP018415 vlCDR2
YASARYT

SEQ ID NO: 14784 - protein, 9 aa, Artificial Sequence
  Description of Artificial Sequence: Synthetic peptide
  XENP018415 vlCDR3
QQDYSSPRT

SEQ ID NO: 14785 - protein, 451 aa, Artificial Sequence; identical to SEQ ID NO: 11545
  Description of Artificial Sequence: Synthetic polypeptide
  XENP018416 1G6_H1_L1.69_IgG1_PVA_/S267K Heavy Chain

SEQ ID NO: 14786 - protein, 122 aa, Artificial Sequence; identical to SEQ ID NO: 6246
  Description of Artificial Sequence: Synthetic polypeptide
  VH of XENP018416

SEQ ID NO: 14787 - protein, 5 aa, Artificial Sequence
  Description of Artificial Sequence: Synthetic peptide
  XENP018416 vhCDR1
NYWMN

SEQ ID NO: 14788 - protein, 19 aa, Artificial Sequence
  Description of Artificial Sequence: Synthetic peptide
  XENP018416 vhCDR2
EIRLKSNNYATHYAEPVKG

SEQ ID NO: 14789 - protein, 11 aa, Artificial Sequence
  Description of Artificial Sequence: Synthetic peptide
  XENP018416 vhCDR3
YYGNYGGYFDV

SEQ ID NO: 14790 - protein, 214 aa, Artificial Sequence
  Description of Artificial Sequence: Synthetic polypeptide
  XENP018416 1G6_H1_L1.69_IgG1_PVA_/S267K Light Chain
SIVMTQSPATLSVSPGERATLSCRASQSVSNDVAWYQQKPGQSPRLLINYASTRYTGVPDRFTGSGYGTEFTLTISSLQSEDFAVYFCQQDYSSPRTFGGGTKVEIKRTVAAPSVFIFPPSDEQLKSGTASVVCLLNNFYPREAKVQWKVDNALQSGNSQESVTEQDSKDSTYSLSSTLTLSKADYEKHKVYACEVTHQGLSSPVTKSFNRGEC

SEQ ID NO: 14791 - protein, 107 aa, Artificial Sequence; identical to SEQ ID NO: 9115
  Description of Artificial Sequence: Synthetic polypeptide
  VL of XENP018416

SEQ ID NO: 14792 - protein, 11 aa, Artificial Sequence
  Description of Artificial Sequence: Synthetic peptide
  XENP018416 vlCDR1
RASQSVSNDVA

SEQ ID NO: 14793 - protein, 7 aa, Artificial Sequence
  Description of Artificial Sequence: Synthetic peptide
  XENP018416 vlCDR2
YASTRYT

SEQ ID NO: 14794 - protein, 9 aa, Artificial Sequence
  Description of Artificial Sequence: Synthetic peptide
  XENP018416 vlCDR3
QQDYSSPRT

SEQ ID NO: 14795 - protein, 451 aa, Artificial Sequence; identical to SEQ ID NO: 11545
  Description of Artificial Sequence: Synthetic polypeptide
  XENP018417 1G6_H1_L1.70_IgG1_PVA_/S267K Heavy Chain

SEQ ID NO: 14796 - protein, 122 aa, Artificial Sequence; identical to SEQ ID NO: 6246
  Description of Artificial Sequence: Synthetic polypeptide
  VH of XENP018417

SEQ ID NO: 14797 - protein, 5 aa, Artificial Sequence
  Description of Artificial Sequence: Synthetic peptide
  XENP018417 vhCDR1
NYWMN

SEQ ID NO: 14798 - protein, 19 aa, Artificial Sequence
  Description of Artificial Sequence: Synthetic peptide
  XENP018417 vhCDR2
EIRLKSNNYATHYAEPVKG

SEQ ID NO: 14799 - protein, 11 aa, Artificial Sequence
  Description of Artificial Sequence: Synthetic peptide
  XENP018417 vhCDR3
YYGNYGGYFDV

SEQ ID NO: 14800 - protein, 214 aa, Artificial Sequence
  Description of Artificial Sequence: Synthetic polypeptide
  XENP018417 1G6_H1_L1.70_IgG1_PVA_/S267K Light Chain
SIVMTQSPATLSVSPGERATLSCRASQSVSNDVAWYQQKPGQSPRLLINYASKRYTGVPDRFTGSGYGTEFTLTISSLQSEDFAVYFCQQDYSSPRTFGGGTKVEIKRTVAAPSVFIFPPSDEQLKSGTASVVCLLNNFYPREAKVQWKVDNALQSGNSQESVTEQDSKDSTYSLSSTLTLSKADYEKHKVYACEVTHQGLSSPVTKSFNRGEC

SEQ ID NO: 14801 - protein, 107 aa, Artificial Sequence; identical to SEQ ID NO: 9124
  Description of Artificial Sequence: Synthetic polypeptide
  VL of XENP018417

SEQ ID NO: 14802 - protein, 11 aa, Artificial Sequence
  Description of Artificial Sequence: Synthetic peptide
  XENP018417 vlCDR1
RASQSVSNDVA

SEQ ID NO: 14803 - protein, 7 aa, Artificial Sequence
  Description of Artificial Sequence: Synthetic peptide
  XENP018417 vlCDR2
YASKRYT

SEQ ID NO: 14804 - protein, 9 aa, Artificial Sequence
  Description of Artificial Sequence: Synthetic peptide
  XENP018417 vlCDR3
QQDYSSPRT

SEQ ID NO: 14805 - protein, 451 aa, Artificial Sequence; identical to SEQ ID NO: 11545
  Description of Artificial Sequence: Synthetic polypeptide
  XENP018418 1G6_H1_L1.71_IgG1_PVA_/S267K Heavy Chain

SEQ ID NO: 14806 - protein, 122 aa, Artificial Sequence; identical to SEQ ID NO: 6246
  Description of Artificial Sequence: Synthetic polypeptide
  VH of XENP018418

SEQ ID NO: 14807 - protein, 5 aa, Artificial Sequence
  Description of Artificial Sequence: Synthetic peptide
  XENP018418 vhCDR1
NYWMN

SEQ ID NO: 14808 - protein, 19 aa, Artificial Sequence
  Description of Artificial Sequence: Synthetic peptide
  XENP018418 vhCDR2
EIRLKSNNYATHYAEPVKG

SEQ ID NO: 14809 - protein, 11 aa, Artificial Sequence
  Description of Artificial Sequence: Synthetic peptide
  XENP018418 vhCDR3
YYGNYGGYFDV

SEQ ID NO: 14810 - protein, 214 aa, Artificial Sequence
  Description of Artificial Sequence: Synthetic polypeptide
  XENP018418 1G6_H1_L1.71_IgG1_PVA_/S267K Light Chain
SIVMTQSPATLSVSPGERATLSCRASQSVSNDVAWYQQKPGQSPRLLINYASGRYTGVPDRFTGSGYGTEFTLTISSLQSEDFAVYFCQQDYSSPRTFGGGTKVEIKRTVAAPSVFIFPPSDEQLKSGTASVVCLLNNFYPREAKVQWKVDNALQSGNSQESVTEQDSKDSTYSLSSTLTLSKADYEKHKVYACEVTHQGLSSPVTKSFNRGEC

SEQ ID NO: 14811 - protein, 107 aa, Artificial Sequence; identical to SEQ ID NO: 9133
  Description of Artificial Sequence: Synthetic polypeptide
  VL of XENP018418

SEQ ID NO: 14812 - protein, 11 aa, Artificial Sequence
  Description of Artificial Sequence: Synthetic peptide
  XENP018418 vlCDR1
RASQSVSNDVA

SEQ ID NO: 14813 - protein, 7 aa, Artificial Sequence
  Description of Artificial Sequence: Synthetic peptide
  XENP018418 vlCDR2
YASGRYT

SEQ ID NO: 14814 - protein, 9 aa, Artificial Sequence
  Description of Artificial Sequence: Synthetic peptide
  XENP018418 vlCDR3
QQDYSSPRT

SEQ ID NO: 14815 - protein, 451 aa, Artificial Sequence; identical to SEQ ID NO: 11545
  Description of Artificial Sequence: Synthetic polypeptide
  XENP018419 1G6_H1_L1.72_IgG1_PVA_/S267K Heavy Chain

SEQ ID NO: 14816 - protein, 122 aa, Artificial Sequence; identical to SEQ ID NO: 6246
  Description of Artificial Sequence: Synthetic polypeptide
  VH of XENP018419

SEQ ID NO: 14817 - protein, 5 aa, Artificial Sequence
  Description of Artificial Sequence: Synthetic peptide
  XENP018419 vhCDR1
NYWMN

SEQ ID NO: 14818 - protein, 19 aa, Artificial Sequence
  Description of Artificial Sequence: Synthetic peptide
  XENP018419 vhCDR2
EIRLKSNNYATHYAEPVKG

SEQ ID NO: 14819 - protein, 11 aa, Artificial Sequence
  Description of Artificial Sequence: Synthetic peptide
  XENP018419 vhCDR3
YYGNYGGYFDV

SEQ ID NO: 14820 - protein, 214 aa, Artificial Sequence
  Description of Artificial Sequence: Synthetic polypeptide
  XENP018419 1G6_H1_L1.72_IgG1_PVA_/S267K Light Chain
SIVMTQSPATLSVSPGERATLSCRASQSVSNDVAWYQQKPGQSPRLLINYASLRYTGVPDRFTGSGYGTEFTLTISSLQSEDFAVYFCQQDYSSPRTFGGGTKVEIKRTVAAPSVFIFPPSDEQLKSGTASVVCLLNNFYPREAKVQWKVDNALQSGNSQESVTEQDSKDSTYSLSSTLTLSKADYEKHKVYACEVTHQGLSSPVTKSFNRGEC

SEQ ID NO: 14821 - protein, 107 aa, Artificial Sequence; identical to SEQ ID NO: 9142
  Description of Artificial Sequence: Synthetic polypeptide
  VL of XENP018419

SEQ ID NO: 14822 - protein, 11 aa, Artificial Sequence
  Description of Artificial Sequence: Synthetic peptide
  XENP018419 vlCDR1
RASQSVSNDVA

SEQ ID NO: 14823 - protein, 7 aa, Artificial Sequence
  Description of Artificial Sequence: Synthetic peptide
  XENP018419 vlCDR2
YASLRYT

SEQ ID NO: 14824 - protein, 9 aa, Artificial Sequence
  Description of Artificial Sequence: Synthetic peptide
  XENP018419 vlCDR3
QQDYSSPRT

SEQ ID NO: 14825 - protein, 451 aa, Artificial Sequence; identical to SEQ ID NO: 11545
  Description of Artificial Sequence: Synthetic polypeptide
  XENP018420 1G6_H1_L1.73_IgG1_PVA_/S267K Heavy Chain

SEQ ID NO: 14826 - protein, 122 aa, Artificial Sequence; identical to SEQ ID NO: 6246
  Description of Artificial Sequence: Synthetic polypeptide
  VH of XENP018420

SEQ ID NO: 14827 - protein, 5 aa, Artificial Sequence
  Description of Artificial Sequence: Synthetic peptide
  XENP018420 vhCDR1
NYWMN

SEQ ID NO: 14828 - protein, 19 aa, Artificial Sequence
  Description of Artificial Sequence: Synthetic peptide
  XENP018420 vhCDR2
EIRLKSNNYATHYAEPVKG

SEQ ID NO: 14829 - protein, 11 aa, Artificial Sequence
  Description of Artificial Sequence: Synthetic peptide
  XENP018420 vhCDR3
YYGNYGGYFDV

SEQ ID NO: 14830 - protein, 214 aa, Artificial Sequence
  Description of Artificial Sequence: Synthetic polypeptide
  XENP018420 1G6_H1_L1.73_IgG1_PVA_/S267K Light Chain
SIVMTQSPATLSVSPGERATLSCRASQSVSNDVAWYQQKPGQSPRLLINYASHLYTGVPDRFTGSGYGTEFTLTISSLQSEDFAVYFCQQDYSSPRTFGGGTKVEIKRTVAAPSVFIFPPSDEQLKSGTASVVCLLNNFYPREAKVQWKVDNALQSGNSQESVTEQDSKDSTYSLSSTLTLSKADYEKHKVYACEVTHQGLSSPVTKSFNRGEC

SEQ ID NO: 14831 - protein, 107 aa, Artificial Sequence; identical to SEQ ID NO: 9151
  Description of Artificial Sequence: Synthetic polypeptide
  VL of XENP018420

SEQ ID NO: 14832 - protein, 11 aa, Artificial Sequence
  Description of Artificial Sequence: Synthetic peptide
  XENP018420 vlCDR1
RASQSVSNDVA

SEQ ID NO: 14833 - protein, 7 aa, Artificial Sequence
  Description of Artificial Sequence: Synthetic peptide
  XENP018420 vlCDR2
YASHLYT

SEQ ID NO: 14834 - protein, 9 aa, Artificial Sequence
  Description of Artificial Sequence: Synthetic peptide
  XENP018420 vlCDR3
QQDYSSPRT

SEQ ID NO: 14835 - protein, 451 aa, Artificial Sequence; identical to SEQ ID NO: 11545
  Description of Artificial Sequence: Synthetic polypeptide
  XENP018421 1G6_H1_L1.74_IgG1_PVA_/S267K Heavy Chain

SEQ ID NO: 14836 - protein, 122 aa, Artificial Sequence; identical to SEQ ID NO: 6246
  Description of Artificial Sequence: Synthetic polypeptide
  VH of XENP018421

SEQ ID NO: 14837 - protein, 5 aa, Artificial Sequence
  Description of Artificial Sequence: Synthetic peptide
  XENP018421 vhCDR1
NYWMN

SEQ ID NO: 14838 - protein, 19 aa, Artificial Sequence
  Description of Artificial Sequence: Synthetic peptide
  XENP018421 vhCDR2
EIRLKSNNYATHYAEPVKG

SEQ ID NO: 14839 - protein, 11 aa, Artificial Sequence
  Description of Artificial Sequence: Synthetic peptide
  XENP018421 vhCDR3
YYGNYGGYFDV

SEQ ID NO: 14840 - protein, 214 aa, Artificial Sequence
  Description of Artificial Sequence: Synthetic polypeptide
  XENP018421 1G6_H1_L1.74_IgG1_PVA_/S267K Light Chain
SIVMTQSPATLSVSPGERATLSCRASQSVSNDVAWYQQKPGQSPRLLINYASHWYTGVPDRFTGSGYGTEFTLTISSLQSEDFAVYFCQQDYSSPRTFGGGTKVEIKRTVAAPSVFIFPPSDEQLKSGTASVVCLLNNFYPREAKVQWKVDNALQSGNSQESVTEQDSKDSTYSLSSTLTLSKADYEKHKVYACEVTHQGLSSPVTKSFNRGEC

SEQ ID NO: 14841 - protein, 107 aa, Artificial Sequence; identical to SEQ ID NO: 9160
  Description of Artificial Sequence: Synthetic polypeptide
  VL of XENP018421

SEQ ID NO: 14842 - protein, 11 aa, Artificial Sequence
  Description of Artificial Sequence: Synthetic peptide
  XENP018421 vlCDR1
RASQSVSNDVA

SEQ ID NO: 14843 - protein, 7 aa, Artificial Sequence
  Description of Artificial Sequence: Synthetic peptide
  XENP018421 vlCDR2
YASHWYT

SEQ ID NO: 14844 - protein, 9 aa, Artificial Sequence
  Description of Artificial Sequence: Synthetic peptide
  XENP018421 vlCDR3
QQDYSSPRT

SEQ ID NO: 14845 - protein, 451 aa, Artificial Sequence; identical to SEQ ID NO: 11545
  Description of Artificial Sequence: Synthetic polypeptide
  XENP018422 1G6_H1_L1.75_IgG1_PVA_/S267K Heavy Chain

SEQ ID NO: 14846 - protein, 122 aa, Artificial Sequence; identical to SEQ ID NO: 6246
  Description of Artificial Sequence: Synthetic polypeptide
  VH of XENP018422

SEQ ID NO: 14847 - protein, 5 aa, Artificial Sequence
  Description of Artificial Sequence: Synthetic peptide
  XENP018422 vhCDR1
NYWMN

SEQ ID NO: 14848 - protein, 19 aa, Artificial Sequence
  Description of Artificial Sequence: Synthetic peptide
  XENP018422 vhCDR2
EIRLKSNNYATHYAEPVKG

SEQ ID NO: 14849 - protein, 11 aa, Artificial Sequence
  Description of Artificial Sequence: Synthetic peptide
  XENP018422 vhCDR3
YYGNYGGYFDV

SEQ ID NO: 14850 - protein, 214 aa, Artificial Sequence
  Description of Artificial Sequence: Synthetic polypeptide
  XENP018422 1G6_H1_L1.75_IgG1_PVA_/S267K Light Chain
SIVMTQSPATLSVSPGERATLSCRASQSVSNDVAWYQQKPGQSPRLLINYASHSYTGVPDRFTGSGYGTEFTLTISSLQSEDFAVYFCQQDYSSPRTFGGGTKVEIKRTVAAPSVFIFPPSDEQLKSGTASVVCLLNNFYPREAKVQWKVDNALQSGNSQESVTEQDSKDSTYSLSSTLTLSKADYEKHKVYACEVTHQGLSSPVTKSFNRGEC

SEQ ID NO: 14851 - protein, 107 aa, Artificial Sequence; identical to SEQ ID NO: 9169
  Description of Artificial Sequence: Synthetic polypeptide
  VL of XENP018422

SEQ ID NO: 14852 - protein, 11 aa, Artificial Sequence
  Description of Artificial Sequence: Synthetic peptide
  XENP018422 vlCDR1
RASQSVSNDVA

SEQ ID NO: 14853 - protein, 7 aa, Artificial Sequence
  Description of Artificial Sequence: Synthetic peptide
  XENP018422 vlCDR2
YASHSYT

SEQ ID NO: 14854 - protein, 9 aa, Artificial Sequence
  Description of Artificial Sequence: Synthetic peptide
  XENP018422 vlCDR3
QQDYSSPRT

SEQ ID NO: 14855 - protein, 451 aa, Artificial Sequence; identical to SEQ ID NO: 11545
  Description of Artificial Sequence: Synthetic polypeptide
  XENP018423 1G6_H1_L1.76_IgG1_PVA_/S267K Heavy Chain

SEQ ID NO: 14856 - protein, 122 aa, Artificial Sequence; identical to SEQ ID NO: 6246
  Description of Artificial Sequence: Synthetic polypeptide
  VH of XENP018423

SEQ ID NO: 14857 - protein, 5 aa, Artificial Sequence
  Description of Artificial Sequence: Synthetic peptide
  XENP018423 vhCDR1
NYWMN

SEQ ID NO: 14858 - protein, 19 aa, Artificial Sequence
  Description of Artificial Sequence: Synthetic peptide
  XENP018423 vhCDR2
EIRLKSNNYATHYAEPVKG

SEQ ID NO: 14859 - protein, 11 aa, Artificial Sequence
  Description of Artificial Sequence: Synthetic peptide
  XENP018423 vhCDR3
YYGNYGGYFDV

SEQ ID NO: 14860 - protein, 214 aa, Artificial Sequence
  Description of Artificial Sequence: Synthetic polypeptide
  XENP018423 1G6_H1_L1.76_IgG1_PVA_/S267K Light Chain
SIVMTQSPATLSVSPGERATLSCRASQSVSNDVAWYQQKPGQSPRLLINYASHRFTGVPDRFTGSGYGTEFTLTISSLQSEDFAVYFCQQDYSSPRTFGGGTKVEIKRTVAAPSVFIFPPSDEQLKSGTASVVCLLNNFYPREAKVQWKVDNALQSGNSQESVTEQDSKDSTYSLSSTLTLSKADYEKHKVYACEVTHQGLSSPVTKSFNRGEC

SEQ ID NO: 14861 - protein, 107 aa, Artificial Sequence; identical to SEQ ID NO: 9178
  Description of Artificial Sequence: Synthetic polypeptide
  VL of XENP018423

SEQ ID NO: 14862 - protein, 11 aa, Artificial Sequence
  Description of Artificial Sequence: Synthetic peptide
  XENP018423 vlCDR1
RASQSVSNDVA

SEQ ID NO: 14863 - protein, 7 aa, Artificial Sequence
  Description of Artificial Sequence: Synthetic peptide
  XENP018423 vlCDR2
YASHRFT

SEQ ID NO: 14864 - protein, 9 aa, Artificial Sequence
  Description of Artificial Sequence: Synthetic peptide
  XENP018423 vlCDR3
QQDYSSPRT

SEQ ID NO: 14865 - protein, 451 aa, Artificial Sequence; identical to SEQ ID NO: 11545
  Description of Artificial Sequence: Synthetic polypeptide
  XENP018424 1G6_H1_L1.77_IgG1_PVA_/S267K Heavy Chain

SEQ ID NO: 14866 - protein, 122 aa, Artificial Sequence; identical to SEQ ID NO: 6246
  Description of Artificial Sequence: Synthetic polypeptide
  VH of XENP018424

SEQ ID NO: 14867 - protein, 5 aa, Artificial Sequence
  Description of Artificial Sequence: Synthetic peptide
  XENP018424 vhCDR1
NYWMN

SEQ ID NO: 14868 - protein, 19 aa, Artificial Sequence
  Description of Artificial Sequence: Synthetic peptide
  XENP018424 vhCDR2
EIRLKSNNYATHYAEPVKG

SEQ ID NO: 14869 - protein, 11 aa, Artificial Sequence
  Description of Artificial Sequence: Synthetic peptide
  XENP018424 vhCDR3
YYGNYGGYFDV

SEQ ID NO: 14870 - protein, 214 aa, Artificial Sequence
  Description of Artificial Sequence: Synthetic polypeptide
  XENP018424 1G6_H1_L1.77_IgG1_PVA_/S267K Light Chain
SIVMTQSPATLSVSPGERATLSCRASQSVSNDVAWYQQKPGQSPRLLINYASHRHTGVPDRFTGSGYGTEFTLTISSLQSEDFAVYFCQQDYSSPRTFGGGTKVEIKRTVAAPSVFIFPPSDEQLKSGTASVVCLLNNFYPREAKVQWKVDNALQSGNSQESVTEQDSKDSTYSLSSTLTLSKADYEKHKVYACEVTHQGLSSPVTKSFNRGEC

SEQ ID NO: 14871 - protein, 107 aa, Artificial Sequence; identical to SEQ ID NO: 9187
  Description of Artificial Sequence: Synthetic polypeptide
  VL of XENP018424

SEQ ID NO: 14872 - protein, 11 aa, Artificial Sequence
  Description of Artificial Sequence: Synthetic peptide
  XENP018424 vlCDR1
RASQSVSNDVA

SEQ ID NO: 14873 - protein, 7 aa, Artificial Sequence
  Description of Artificial Sequence: Synthetic peptide
  XENP018424 vlCDR2
YASHRHT

SEQ ID NO: 14874 - protein, 9 aa, Artificial Sequence
  Description of Artificial Sequence: Synthetic peptide
  XENP018424 vlCDR3
QQDYSSPRT

SEQ ID NO: 14875 - protein, 451 aa, Artificial Sequence; identical to SEQ ID NO: 11545
  Description of Artificial Sequence: Synthetic polypeptide
  XENP018425 1G6_H1_L1.78_IgG1_PVA_/S267K Heavy Chain

SEQ ID NO: 14876 - protein, 122 aa, Artificial Sequence; identical to SEQ ID NO: 6246
  Description of Artificial Sequence: Synthetic polypeptide
  VH of XENP018425

SEQ ID NO: 14877 - protein, 5 aa, Artificial Sequence
  Description of Artificial Sequence: Synthetic peptide
  XENP018425 vhCDR1
NYWMN

SEQ ID NO: 14878 - protein, 19 aa, Artificial Sequence
  Description of Artificial Sequence: Synthetic peptide
  XENP018425 vhCDR2
EIRLKSNNYATHYAEPVKG

SEQ ID NO: 14879 - protein, 11 aa, Artificial Sequence
  Description of Artificial Sequence: Synthetic peptide
  XENP018425 vhCDR3
YYGNYGGYFDV

SEQ ID NO: 14880 - protein, 214 aa, Artificial Sequence
  Description of Artificial Sequence: Synthetic polypeptide
  XENP018425 1G6_H1_L1.78_IgG1_PVA_/S267K Light Chain
SIVMTQSPATLSVSPGERATLSCRASQSVSNDVAWYQQKPGQSPRLLINYASHRLTGVPDRFTGSGYGTEFTLTISSLQSEDFAVYFCQQDYSSPRTFGGGTKVEIKRTVAAPSVFIFPPSDEQLKSGTASVVCLLNNFYPREAKVQWKVDNALQSGNSQESVTEQDSKDSTYSLSSTLTLSKADYEKHKVYACEVTHQGLSSPVTKSFNRGEC

SEQ ID NO: 14881 - protein, 107 aa, Artificial Sequence; identical to SEQ ID NO: 9196
  Description of Artificial Sequence: Synthetic polypeptide
  VL of XENP018425

SEQ ID NO: 14882 - protein, 11 aa, Artificial Sequence
  Description of Artificial Sequence: Synthetic peptide
  XENP018425 vlCDR1
RASQSVSNDVA

SEQ ID NO: 14883 - protein, 7 aa, Artificial Sequence
  Description of Artificial Sequence: Synthetic peptide
  XENP018425 vlCDR2
YASHRLT

SEQ ID NO: 14884 - protein, 9 aa, Artificial Sequence
  Description of Artificial Sequence: Synthetic peptide
  XENP018425 vlCDR3
QQDYSSPRT

SEQ ID NO: 14885 - protein, 451 aa, Artificial Sequence; identical to SEQ ID NO: 11545
  Description of Artificial Sequence: Synthetic polypeptide
  XENP018426 1G6_H1_L1.79_IgG1_PVA_/S267K Heavy Chain

SEQ ID NO: 14886 - protein, 122 aa, Artificial Sequence; identical to SEQ ID NO: 6246
  Description of Artificial Sequence: Synthetic polypeptide
  VH of XENP018426

SEQ ID NO: 14887 - protein, 5 aa, Artificial Sequence
  Description of Artificial Sequence: Synthetic peptide
  XENP018426 vhCDR1
NYWMN

SEQ ID NO: 14888 - protein, 19 aa, Artificial Sequence
  Description of Artificial Sequence: Synthetic peptide
  XENP018426 vhCDR2
EIRLKSNNYATHYAEPVKG

SEQ ID NO: 14889 - protein, 11 aa, Artificial Sequence
  Description of Artificial Sequence: Synthetic peptide
  XENP018426 vhCDR3
YYGNYGGYFDV

SEQ ID NO: 14890 - protein, 214 aa, Artificial Sequence
  Description of Artificial Sequence: Synthetic polypeptide
  XENP018426 1G6_H1_L1.79_IgG1_PVA_/S267K Light Chain
SIVMTQSPATLSVSPGERATLSCRASQSVSNDVAWYQQKPGQSPRLLINYASHRWTGVPDRFTGSGYGTEFTLTISSLQSEDFAVYFCQQDYSSPRTFGGGTKVEIKRTVAAPSVFIFPPSDEQLKSGTASVVCLLNNFYPREAKVQWKVDNALQSGNSQESVTEQDSKDSTYSLSSTLTLSKADYEKHKVYACEVTHQGLSSPVTKSFNRGEC

SEQ ID NO: 14891 - protein, 107 aa, Artificial Sequence; identical to SEQ ID NO: 9205
  Description of Artificial Sequence: Synthetic polypeptide
  VL of XENP018426

SEQ ID NO: 14892 - protein, 11 aa, Artificial Sequence
  Description of Artificial Sequence: Synthetic peptide
  XENP018426 vlCDR1
RASQSVSNDVA

SEQ ID NO: 14893 - protein, 7 aa, Artificial Sequence
  Description of Artificial Sequence: Synthetic peptide
  XENP018426 vlCDR2
YASHRWT

SEQ ID NO: 14894 - protein, 9 aa, Artificial Sequence
  Description of Artificial Sequence: Synthetic peptide
  XENP018426 vlCDR3
QQDYSSPRT

SEQ ID NO: 14895 - protein, 451 aa, Artificial Sequence; identical to SEQ ID NO: 11545
  Description of Artificial Sequence: Synthetic polypeptide
  XENP018427 1G6_H1_L1.80_IgG1_PVA_/S267K Heavy Chain

SEQ ID NO: 14896 - protein, 122 aa, Artificial Sequence; identical to SEQ ID NO: 6246
  Description of Artificial Sequence: Synthetic polypeptide
  VH of XENP018427

SEQ ID NO: 14897 - protein, 5 aa, Artificial Sequence
  Description of Artificial Sequence: Synthetic peptide
  XENP018427 vhCDR1
NYWMN

SEQ ID NO: 14898 - protein, 19 aa, Artificial Sequence
  Description of Artificial Sequence: Synthetic peptide
  XENP018427 vhCDR2
EIRLKSNNYATHYAEPVKG

SEQ ID NO: 14899 - protein, 11 aa, Artificial Sequence
  Description of Artificial Sequence: Synthetic peptide
  XENP018427 vhCDR3
YYGNYGGYFDV

SEQ ID NO: 14900 - protein, 214 aa, Artificial Sequence
  Description of Artificial Sequence: Synthetic polypeptide
  XENP018427 1G6_H1_L1.80_IgG1_PVA_/S267K Light Chain
SIVMTQSPATLSVSPGERATLSCRASQSVSNDVAWYQQKPGQSPRLLINYASHRVTGVPDRFTGSGYGTEFTLTISSLQSEDFAVYFCQQDYSSPRTFGGGTKVEIKRTVAAPSVFIFPPSDEQLKSGTASVVCLLNNFYPREAKVQWKVDNALQSGNSQESVTEQDSKDSTYSLSSTLTLSKADYEKHKVYACEVTHQGLSSPVTKSFNRGEC

SEQ ID NO: 14901 - protein, 107 aa, Artificial Sequence; identical to SEQ ID NO: 9214
  Description of Artificial Sequence: Synthetic polypeptide
  VL of XENP018427

SEQ ID NO: 14902 - protein, 11 aa, Artificial Sequence
  Description of Artificial Sequence: Synthetic peptide
  XENP018427 vlCDR1
RASQSVSNDVA

SEQ ID NO: 14903 - protein, 7 aa, Artificial Sequence
  Description of Artificial Sequence: Synthetic peptide
  XENP018427 vlCDR2
YASHRVT

SEQ ID NO: 14904 - protein, 9 aa, Artificial Sequence
  Description of Artificial Sequence: Synthetic peptide
  XENP018427 vlCDR3
QQDYSSPRT

SEQ ID NO: 14905 - protein, 451 aa, Artificial Sequence; identical to SEQ ID NO: 11545
  Description of Artificial Sequence: Synthetic polypeptide
  XENP018428 1G6_H1_L1.81_IgG1_PVA_/S267K Heavy Chain

SEQ ID NO: 14906 - protein, 122 aa, Artificial Sequence; identical to SEQ ID NO: 6246
  Description of Artificial Sequence: Synthetic polypeptide
  VH of XENP018428

SEQ ID NO: 14907 - protein, 5 aa, Artificial Sequence
  Description of Artificial Sequence: Synthetic peptide
  XENP018428 vhCDR1
NYWMN

SEQ ID NO: 14908 - protein, 19 aa, Artificial Sequence
  Description of Artificial Sequence: Synthetic peptide
  XENP018428 vhCDR2
EIRLKSNNYATHYAEPVKG

SEQ ID NO: 14909 - protein, 11 aa, Artificial Sequence
  Description of Artificial Sequence: Synthetic peptide
  XENP018428 vhCDR3
YYGNYGGYFDV

SEQ ID NO: 14910 - protein, 214 aa, Artificial Sequence
  Description of Artificial Sequence: Synthetic polypeptide
  XENP018428 1G6_H1_L1.81_IgG1_PVA_/S267K Light Chain
SIVMTQSPATLSVSPGERATLSCRASQSVSNDVAWYQQKPGQSPRLLINYASHRATGVPDRFTGSGYGTEFTLTISSLQSEDFAVYFCQQDYSSPRTFGGGTKVEIKRTVAAPSVFIFPPSDEQLKSGTASVVCLLNNFYPREAKVQWKVDNALQSGNSQESVTEQDSKDSTYSLSSTLTLSKADYEKHKVYACEVTHQGLSSPVTKSFNRGEC

SEQ ID NO: 14911 - protein, 107 aa, Artificial Sequence; identical to SEQ ID NO: 9223
  Description of Artificial Sequence: Synthetic polypeptide
  VL of XENP018428

SEQ ID NO: 14912 - protein, 11 aa, Artificial Sequence
  Description of Artificial Sequence: Synthetic peptide
  XENP018428 vlCDR1
RASQSVSNDVA

SEQ ID NO: 14913 - protein, 7 aa, Artificial Sequence
  Description of Artificial Sequence: Synthetic peptide
  XENP018428 vlCDR2
YASHRAT

SEQ ID NO: 14914 - protein, 9 aa, Artificial Sequence
  Description of Artificial Sequence: Synthetic peptide
  XENP018428 vlCDR3
QQDYSSPRT

SEQ ID NO: 14915 - protein, 451 aa, Artificial Sequence; identical to SEQ ID NO: 11545
  Description of Artificial Sequence: Synthetic polypeptide
  XENP018429 1G6_H1_L1.82_IgG1_PVA_/S267K Heavy Chain

SEQ ID NO: 14916 - protein, 122 aa, Artificial Sequence; identical to SEQ ID NO: 6246
  Description of Artificial Sequence: Synthetic polypeptide
  VH of XENP018429

SEQ ID NO: 14917 - protein, 5 aa, Artificial Sequence
  Description of Artificial Sequence: Synthetic peptide
  XENP018429 vhCDR1
NYWMN

SEQ ID NO: 14918 - protein, 19 aa, Artificial Sequence
  Description of Artificial Sequence: Synthetic peptide
  XENP018429 vhCDR2
EIRLKSNNYATHYAEPVKG

SEQ ID NO: 14919 - protein, 11 aa, Artificial Sequence
  Description of Artificial Sequence: Synthetic peptide
  XENP018429 vhCDR3
YYGNYGGYFDV

SEQ ID NO: 14920 - protein, 214 aa, Artificial Sequence
  Description of Artificial Sequence: Synthetic polypeptide
  XENP018429 1G6_H1_L1.82_IgG1_PVA_/S267K Light Chain
SIVMTQSPATLSVSPGERATLSCRASQSVSNDVAWYQQKPGQSPRLLINYASHRQTGVPDRFTGSGYGTEFTLTISSLQSEDFAVYFCQQDYSSPRTFGGGTKVEIKRTVAAPSVFIFPPSDEQLKSGTASVVCLLNNFYPREAKVQWKVDNALQSGNSQESVTEQDSKDSTYSLSSTLTLSKADYEKHKVYACEVTHQGLSSPVTKSFNRGEC

SEQ ID NO: 14921 - protein, 107 aa, Artificial Sequence; identical to SEQ ID NO: 9232
  Description of Artificial Sequence: Synthetic polypeptide
  VL of XENP018429

SEQ ID NO: 14922 - protein, 11 aa, Artificial Sequence
  Description of Artificial Sequence: Synthetic peptide
  XENP018429 vlCDR1
RASQSVSNDVA

SEQ ID NO: 14923 - protein, 7 aa, Artificial Sequence
  Description of Artificial Sequence: Synthetic peptide
  XENP018429 vlCDR2
YASHRQT

SEQ ID NO: 14924 - protein, 9 aa, Artificial Sequence
  Description of Artificial Sequence: Synthetic peptide
  XENP018429 vlCDR3
QQDYSSPRT

SEQ ID NO: 14925 - protein, 451 aa, Artificial Sequence; identical to SEQ ID NO: 11545
  Description of Artificial Sequence: Synthetic polypeptide
  XENP018430 1G6_H1_L1.83_IgG1_PVA_/S267K Heavy Chain

SEQ ID NO: 14926 - protein, 122 aa, Artificial Sequence; identical to SEQ ID NO: 6246
  Description of Artificial Sequence: Synthetic polypeptide
  VH of XENP018430

SEQ ID NO: 14927 - protein, 5 aa, Artificial Sequence
  Description of Artificial Sequence: Synthetic peptide
  XENP018430 vhCDR1
NYWMN

SEQ ID NO: 14928 - protein, 19 aa, Artificial Sequence
  Description of Artificial Sequence: Synthetic peptide
  XENP018430 vhCDR2
EIRLKSNNYATHYAEPVKG

SEQ ID NO: 14929 - protein, 11 aa, Artificial Sequence
  Description of Artificial Sequence: Synthetic peptide
  XENP018430 vhCDR3
YYGNYGGYFDV

SEQ ID NO: 14930 - protein, 214 aa, Artificial Sequence
  Description of Artificial Sequence: Synthetic polypeptide
  XENP018430 1G6_H1_L1.83_IgG1_PVA_/S267K Light Chain
SIVMTQSPATLSVSPGERATLSCRASQSVSNDVAWYQQKPGQSPRLLINYASHRDTGVPDRFTGSGYGTEFTLTISSLQSEDFAVYFCQQDYSSPRTFGGGTKVEIKRTVAAPSVFIFPPSDEQLKSGTASVVCLLNNFYPREAKVQWKVDNALQSGNSQESVTEQDSKDSTYSLSSTLTLSKADYEKHKVYACEVTHQGLSSPVTKSFNRGEC

SEQ ID NO: 14931 - protein, 107 aa, Artificial Sequence; identical to SEQ ID NO: 9241
  Description of Artificial Sequence: Synthetic polypeptide
  VL of XENP018430

SEQ ID NO: 14932 - protein, 11 aa, Artificial Sequence
  Description of Artificial Sequence: Synthetic peptide
  XENP018430 vlCDR1
RASQSVSNDVA

SEQ ID NO: 14933 - protein, 7 aa, Artificial Sequence
  Description of Artificial Sequence: Synthetic peptide
  XENP018430 vlCDR2
YASHRDT

SEQ ID NO: 14934 - protein, 9 aa, Artificial Sequence
  Description of Artificial Sequence: Synthetic peptide
  XENP018430 vlCDR3
QQDYSSPRT

SEQ ID NO: 14935 - protein, 451 aa, Artificial Sequence; identical to SEQ ID NO: 11545
  Description of Artificial Sequence: Synthetic polypeptide
  XENP018431 1G6_H1_L1.84_IgG1_PVA_/S267K Heavy Chain

SEQ ID NO: 14936 - protein, 122 aa, Artificial Sequence; identical to SEQ ID NO: 6246
  Description of Artificial Sequence: Synthetic polypeptide
  VH of XENP018431

SEQ ID NO: 14937 - protein, 5 aa, Artificial Sequence
  Description of Artificial Sequence: Synthetic peptide
  XENP018431 vhCDR1
NYWMN

SEQ ID NO: 14938 - protein, 19 aa, Artificial Sequence
  Description of Artificial Sequence: Synthetic peptide
  XENP018431 vhCDR2
EIRLKSNNYATHYAEPVKG

SEQ ID NO: 14939 - protein, 11 aa, Artificial Sequence
  Description of Artificial Sequence: Synthetic peptide
  XENP018431 vhCDR3
YYGNYGGYFDV

SEQ ID NO: 14940 - protein, 214 aa, Artificial Sequence
  Description of Artificial Sequence: Synthetic polypeptide
  XENP018431 1G6_H1_L1.84_IgG1_PVA_/S267K Light Chain
SIVMTQSPATLSVSPGERATLSCRASQSVSNDVAWYQQKPGQSPRLLINYASHRKTGVPDRFTGSGYGTEFTLTISSLQSEDFAVYFCQQDYSSPRTFGGGTKVEIKRTVAAPSVFIFPPSDEQLKSGTASVVCLLNNFYPREAKVQWKVDNALQSGNSQESVTEQDSKDSTYSLSSTLTLSKADYEKHKVYACEVTHQGLSSPVTKSFNRGEC

SEQ ID NO: 14941 - protein, 107 aa, Artificial Sequence; identical to SEQ ID NO: 9250
  Description of Artificial Sequence: Synthetic polypeptide
  VL of XENP018431

SEQ ID NO: 14942 - protein, 11 aa, Artificial Sequence
  Description of Artificial Sequence: Synthetic peptide
  XENP018431 vlCDR1
RASQSVSNDVA

SEQ ID NO: 14943 - protein, 7 aa, Artificial Sequence
  Description of Artificial Sequence: Synthetic peptide
  XENP018431 vlCDR2
YASHRKT

SEQ ID NO: 14944 - protein, 9 aa, Artificial Sequence
  Description of Artificial Sequence: Synthetic peptide
  XENP018431 vlCDR3
QQDYSSPRT

SEQ ID NO: 14945 - protein, 451 aa, Artificial Sequence; identical to SEQ ID NO: 11545
  Description of Artificial Sequence: Synthetic polypeptide
  XENP018432 1G6_H1_L1.85_IgG1_PVA_/S267K Heavy Chain

SEQ ID NO: 14946 - protein, 122 aa, Artificial Sequence; identical to SEQ ID NO: 6246
  Description of Artificial Sequence: Synthetic polypeptide
  VH of XENP018432

SEQ ID NO: 14947 - protein, 5 aa, Artificial Sequence
  Description of Artificial Sequence: Synthetic peptide
  XENP018432 vhCDR1
NYWMN

SEQ ID NO: 14948 - protein, 19 aa, Artificial Sequence
  Description of Artificial Sequence: Synthetic peptide
  XENP018432 vhCDR2
EIRLKSNNYATHYAEPVKG

SEQ ID NO: 14949 - protein, 11 aa, Artificial Sequence
  Description of Artificial Sequence: Synthetic peptide
  XENP018432 vhCDR3
YYGNYGGYFDV

SEQ ID NO: 14950 - protein, 214 aa, Artificial Sequence
  Description of Artificial Sequence: Synthetic polypeptide
  XENP018432 1G6_H1_L1.85_IgG1_PVA_/S267K Light Chain
SIVMTQSPATLSVSPGERATLSCRASQSVSNDVAWYQQKPGQSPRLLINYASHRYVGVPDRFTGSGYGTEFTLTISSLQSEDFAVYFCQQDYSSPRTFGGGTKVEIKRTVAAPSVFIFPPSDEQLKSGTASVVCLLNNFYPREAKVQWKVDNALQSGNSQESVTEQDSKDSTYSLSSTLTLSKADYEKHKVYACEVTHQGLSSPVTKSFNRGEC

SEQ ID NO: 14951 - protein, 107 aa, Artificial Sequence; identical to SEQ ID NO: 9259
  Description of Artificial Sequence: Synthetic polypeptide
  VL of XENP018432

SEQ ID NO: 14952 - protein, 11 aa, Artificial Sequence
  Description of Artificial Sequence: Synthetic peptide
  XENP018432 vlCDR1
RASQSVSNDVA

SEQ ID NO: 14953 - protein, 7 aa, Artificial Sequence
  Description of Artificial Sequence: Synthetic peptide
  XENP018432 vlCDR2
YASHRYV

SEQ ID NO: 14954 - protein, 9 aa, Artificial Sequence
  Description of Artificial Sequence: Synthetic peptide
  XENP018432 vlCDR3
QQDYSSPRT

SEQ ID NO: 14955 - protein, 451 aa, Artificial Sequence; identical to SEQ ID NO: 11545
  Description of Artificial Sequence: Synthetic polypeptide
  XENP018433 1G6_H1_L1.86_IgG1_PVA_/S267K Heavy Chain

SEQ ID NO: 14956 - protein, 122 aa, Artificial Sequence; identical to SEQ ID NO: 6246
  Description of Artificial Sequence: Synthetic polypeptide
  VH of XENP018433

SEQ ID NO: 14957 - protein, 5 aa, Artificial Sequence
  Description of Artificial Sequence: Synthetic peptide
  XENP018433 vhCDR1
NYWMN

SEQ ID NO: 14958 - protein, 19 aa, Artificial Sequence
  Description of Artificial Sequence: Synthetic peptide
  XENP018433 vhCDR2
EIRLKSNNYATHYAEPVKG

SEQ ID NO: 14959 - protein, 11 aa, Artificial Sequence
  Description of Artificial Sequence: Synthetic peptide
  XENP018433 vhCDR3
YYGNYGGYFDV

SEQ ID NO: 14960 - protein, 214 aa, Artificial Sequence
  Description of Artificial Sequence: Synthetic polypeptide
  XENP018433 1G6_H1_L1.86_IgG1_PVA_/S267K Light Chain
SIVMTQSPATLSVSPGERATLSCRASQSVSNDVAWYQQKPGQSPRLLINYASHRYSGVPDRFTGSGYGTEFTLTISSLQSEDFAVYFCQQDYSSPRTFGGGTKVEIKRTVAAPSVFIFPPSDEQLKSGTASVVCLLNNFYPREAKVQWKVDNALQSGNSQESVTEQDSKDSTYSLSSTLTLSKADYEKHKVYACEVTHQGLSSPVTKSFNRGEC

SEQ ID NO: 14961 - protein, 107 aa, Artificial Sequence; identical to SEQ ID NO: 9268
  Description of Artificial Sequence: Synthetic polypeptide
  VL of XENP018433

SEQ ID NO: 14962 - protein, 11 aa, Artificial Sequence
  Description of Artificial Sequence: Synthetic peptide
  XENP018433 vlCDR1
RASQSVSNDVA

SEQ ID NO: 14963 - protein, 7 aa, Artificial Sequence
  Description of Artificial Sequence: Synthetic peptide
  XENP018433 vlCDR2
YASHRYS

SEQ ID NO: 14964 - protein, 9 aa, Artificial Sequence
  Description of Artificial Sequence: Synthetic peptide
  XENP018433 vlCDR3
QQDYSSPRT

SEQ ID NO: 14965 - protein, 451 aa, Artificial Sequence; identical to SEQ ID NO: 11545
  Description of Artificial Sequence: Synthetic polypeptide
  XENP018434 1G6_H1_L1.87_IgG1_PVA_/S267K Heavy Chain

SEQ ID NO: 14966 - protein, 122 aa, Artificial Sequence; identical to SEQ ID NO: 6246
  Description of Artificial Sequence: Synthetic polypeptide
  VH of XENP018434

SEQ ID NO: 14967 - protein, 5 aa, Artificial Sequence
  Description of Artificial Sequence: Synthetic peptide
  XENP018434 vhCDR1
NYWMN

SEQ ID NO: 14968 - protein, 19 aa, Artificial Sequence
  Description of Artificial Sequence: Synthetic peptide
  XENP018434 vhCDR2
EIRLKSNNYATHYAEPVKG

SEQ ID NO: 14969 - protein, 11 aa, Artificial Sequence
  Description of Artificial Sequence: Synthetic peptide
  XENP018434 vhCDR3
YYGNYGGYFDV

SEQ ID NO: 14970 - protein, 214 aa, Artificial Sequence
  Description of Artificial Sequence: Synthetic polypeptide
  XENP018434 1G6_H1_L1.87_IgG1_PVA_/S267K Light Chain
SIVMTQSPATLSVSPGERATLSCRASQSVSNDVAWYQQKPGQSPRLLINYASHRYAGVPDRFTGSGYGTEFTLTISSLQSEDFAVYFCQQDYSSPRTFGGGTKVEIKRTVAAPSVFIFPPSDEQLKSGTASVVCLLNNFYPREAKVQWKVDNALQSGNSQESVTEQDSKDSTYSLSSTLTLSKADYEKHKVYACEVTHQGLSSPVTKSFNRGEC

SEQ ID NO: 14971 - protein, 107 aa, Artificial Sequence; identical to SEQ ID NO: 9277
  Description of Artificial Sequence: Synthetic polypeptide
  VL of XENP018434

SEQ ID NO: 14972 - protein, 11 aa, Artificial Sequence
  Description of Artificial Sequence: Synthetic peptide
  XENP018434 vlCDR1
RASQSVSNDVA

SEQ ID NO: 14973 - protein, 7 aa, Artificial Sequence
  Description of Artificial Sequence: Synthetic peptide
  XENP018434 vlCDR2
YASHRYA

SEQ ID NO: 14974 - protein, 9 aa, Artificial Sequence
  Description of Artificial Sequence: Synthetic peptide
  XENP018434 vlCDR3
QQDYSSPRT

SEQ ID NO: 14975 - protein, 451 aa, Artificial Sequence; identical to SEQ ID NO: 11545
  Description of Artificial Sequence: Synthetic polypeptide
  XENP018435 1G6_H1_L1.88_IgG1_PVA_/S267K Heavy Chain

SEQ ID NO: 14976 - protein, 122 aa, Artificial Sequence; identical to SEQ ID NO: 6246
  Description of Artificial Sequence: Synthetic polypeptide
  VH of XENP018435

SEQ ID NO: 14977 - protein, 5 aa, Artificial Sequence
  Description of Artificial Sequence: Synthetic peptide
  XENP018435 vhCDR1
NYWMN

SEQ ID NO: 14978 - protein, 19 aa, Artificial Sequence
  Description of Artificial Sequence: Synthetic peptide
  XENP018435 vhCDR2
EIRLKSNNYATHYAEPVKG

SEQ ID NO: 14979 - protein, 11 aa, Artificial Sequence
  Description of Artificial Sequence: Synthetic peptide
  XENP018435 vhCDR3
YYGNYGGYFDV

SEQ ID NO: 14980 - protein, 214 aa, Artificial Sequence
  Description of Artificial Sequence: Synthetic polypeptide
  XENP018435 1G6_H1_L1.88_IgG1_PVA_/S267K Light Chain
SIVMTQSPATLSVSPGERATLSCRASQSVSNDVAWYQQKPGQSPRLLINYASHRYIGVPDRFTGSGYGTEFTLTISSLQSEDFAVYFCQQDYSSPRTFGGGTKVEIKRTVAAPSVFIFPPSDEQLKSGTASVVCLLNNFYPREAKVQWKVDNALQSGNSQESVTEQDSKDSTYSLSSTLTLSKADYEKHKVYACEVTHQGLSSPVTKSFNRGEC

SEQ ID NO: 14981 - protein, 107 aa, Artificial Sequence; identical to SEQ ID NO: 9286
  Description of Artificial Sequence: Synthetic polypeptide
  VL of XENP018435

SEQ ID NO: 14982 - protein, 11 aa, Artificial Sequence
  Description of Artificial Sequence: Synthetic peptide
  XENP018435 vlCDR1
RASQSVSNDVA

SEQ ID NO: 14983 - protein, 7 aa, Artificial Sequence
  Description of Artificial Sequence: Synthetic peptide
  XENP018435 vlCDR2
YASHRYI

SEQ ID NO: 14984 - protein, 9 aa, Artificial Sequence
  Description of Artificial Sequence: Synthetic peptide
  XENP018435 vlCDR3
QQDYSSPRT

SEQ ID NO: 14985 - protein, 451 aa, Artificial Sequence; identical to SEQ ID NO: 11545
  Description of Artificial Sequence: Synthetic polypeptide
  XENP018436 1G6_H1_L1.89_IgG1_PVA_/S267K Heavy Chain

SEQ ID NO: 14986 - protein, 122 aa, Artificial Sequence; identical to SEQ ID NO: 6246
  Description of Artificial Sequence: Synthetic polypeptide
  VH of XENP018436

SEQ ID NO: 14987 - protein, 5 aa, Artificial Sequence
  Description of Artificial Sequence: Synthetic peptide
  XENP018436 vhCDR1
NYWMN

SEQ ID NO: 14988 - protein, 19 aa, Artificial Sequence
  Description of Artificial Sequence: Synthetic peptide
  XENP018436 vhCDR2
EIRLKSNNYATHYAEPVKG

SEQ ID NO: 14989 - protein, 11 aa, Artificial Sequence
  Description of Artificial Sequence: Synthetic peptide
  XENP018436 vhCDR3
YYGNYGGYFDV

SEQ ID NO: 14990 - protein, 214 aa, Artificial Sequence
  Description of Artificial Sequence: Synthetic polypeptide
  XENP018436 1G6_H1_L1.89_IgG1_PVA_/S267K Light Chain
SIVMTQSPATLSVSPGERATLSCRASQSVSNDVAWYQQKPGQSPRLLINYASHRYQGVPDRFTGSGYGTEFTLTISSLQSEDFAVYFCQQDYSSPRTFGGGTKVEIKRTVAAPSVFIFPPSDEQLKSGTASVVCLLNNFYPREAKVQWKVDNALQSGNSQESVTEQDSKDSTYSLSSTLTLSKADYEKHKVYACEVTHQGLSSPVTKSFNRGEC

SEQ ID NO: 14991 - protein, 107 aa, Artificial Sequence; identical to SEQ ID NO: 9295
  Description of Artificial Sequence: Synthetic polypeptide
  VL of XENP018436

SEQ ID NO: 14992 - protein, 11 aa, Artificial Sequence
  Description of Artificial Sequence: Synthetic peptide
  XENP018436 vlCDR1
RASQSVSNDVA

SEQ ID NO: 14993 - protein, 7 aa, Artificial Sequence
  Description of Artificial Sequence: Synthetic peptide
  XENP018436 vlCDR2
YASHRYQ

SEQ ID NO: 14994 - protein, 9 aa, Artificial Sequence
  Description of Artificial Sequence: Synthetic peptide
  XENP018436 vlCDR3
QQDYSSPRT

SEQ ID NO: 14995 - protein, 451 aa, Artificial Sequence; identical to SEQ ID NO: 11545
  Description of Artificial Sequence: Synthetic polypeptide
  XENP018437 1G6_H1_L1.90_IgG1_PVA_/S267K Heavy Chain

SEQ ID NO: 14996 - protein, 122 aa, Artificial Sequence; identical to SEQ ID NO: 6246
  Description of Artificial Sequence: Synthetic polypeptide
  VH of XENP018437

SEQ ID NO: 14997 - protein, 5 aa, Artificial Sequence
  Description of Artificial Sequence: Synthetic peptide
  XENP018437 vhCDR1
NYWMN

SEQ ID NO: 14998 - protein, 19 aa, Artificial Sequence
  Description of Artificial Sequence: Synthetic peptide
  XENP018437 vhCDR2
EIRLKSNNYATHYAEPVKG

SEQ ID NO: 14999 - protein, 11 aa, Artificial Sequence
  Description of Artificial Sequence: Synthetic peptide
  XENP018437 vhCDR3
YYGNYGGYFDV

SEQ ID NO: 15000 - protein, 214 aa, Artificial Sequence
  Description of Artificial Sequence: Synthetic polypeptide
  XENP018437 1G6_H1_L1.90_IgG1_PVA_/S267K Light Chain
SIVMTQSPATLSVSPGERATLSCRASQSVSNDVAWYQQKPGQSPRLLINYASHRYHGVPDRFTGSGYGTEFTLTISSLQSEDFAVYFCQQDYSSPRTFGGGTKVEIKRTVAAPSVFIFPPSDEQLKSGTASVVCLLNNFYPREAKVQWKVDNALQSGNSQESVTEQDSKDSTYSLSSTLTLSKADYEKHKVYACEVTHQGLSSPVTKSFNRGEC

SEQ ID NO: 15001 - protein, 107 aa, Artificial Sequence; identical to SEQ ID NO: 9304
  Description of Artificial Sequence: Synthetic polypeptide
  VL of XENP018437

SEQ ID NO: 15002 - protein, 11 aa, Artificial Sequence
  Description of Artificial Sequence: Synthetic peptide
  XENP018437 vlCDR1
RASQSVSNDVA

SEQ ID NO: 15003 - protein, 7 aa, Artificial Sequence
  Description of Artificial Sequence: Synthetic peptide
  XENP018437 vlCDR2
YASHRYH

SEQ ID NO: 15004 - protein, 9 aa, Artificial Sequence
  Description of Artificial Sequence: Synthetic peptide
  XENP018437 vlCDR3
QQDYSSPRT

SEQ ID NO: 15005 - protein, 451 aa, Artificial Sequence; identical to SEQ ID NO: 11545
  Description of Artificial Sequence: Synthetic polypeptide
  XENP018438 1G6_H1_L1.91_IgG1_PVA_/S267K Heavy Chain

SEQ ID NO: 15006 - protein, 122 aa, Artificial Sequence; identical to SEQ ID NO: 6246
  Description of Artificial Sequence: Synthetic polypeptide
  VH of XENP018438

SEQ ID NO: 15007 - protein, 5 aa, Artificial Sequence
  Description of Artificial Sequence: Synthetic peptide
  XENP018438 vhCDR1
NYWMN

SEQ ID NO: 15008 - protein, 19 aa, Artificial Sequence
  Description of Artificial Sequence: Synthetic peptide
  XENP018438 vhCDR2
EIRLKSNNYATHYAEPVKG

SEQ ID NO: 15009 - protein, 11 aa, Artificial Sequence
  Description of Artificial Sequence: Synthetic peptide
  XENP018438 vhCDR3
YYGNYGGYFDV

SEQ ID NO: 15010 - protein, 214 aa, Artificial Sequence
  Description of Artificial Sequence: Synthetic polypeptide
  XENP018438 1G6_H1_L1.91_IgG1_PVA_/S267K Light Chain
SIVMTQSPATLSVSPGERATLSCRASQSVSNDVAWYQQKPGQSPRLLINYASHRYDGVPDRFTGSGYGTEFTLTISSLQSEDFAVYFCQQDYSSPRTFGGGTKVEIKRTVAAPSVFIFPPSDEQLKSGTASVVCLLNNFYPREAKVQWKVDNALQSGNSQESVTEQDSKDSTYSLSSTLTLSKADYEKHKVYACEVTHQGLSSPVTKSFNRGEC

SEQ ID NO: 15011 - protein, 107 aa, Artificial Sequence; identical to SEQ ID NO: 9313
  Description of Artificial Sequence: Synthetic polypeptide
  VL of XENP018438

SEQ ID NO: 15012 - protein, 11 aa, Artificial Sequence
  Description of Artificial Sequence: Synthetic peptide
  XENP018438 vlCDR1
RASQSVSNDVA

SEQ ID NO: 15013 - protein, 7 aa, Artificial Sequence
  Description of Artificial Sequence: Synthetic peptide
  XENP018438 vlCDR2
YASHRYD

SEQ ID NO: 15014 - protein, 9 aa, Artificial Sequence
  Description of Artificial Sequence: Synthetic peptide
  XENP018438 vlCDR3
QQDYSSPRT

SEQ ID NO: 15015 - protein, 451 aa, Artificial Sequence; identical to SEQ ID NO: 11545
  Description of Artificial Sequence: Synthetic polypeptide
  XENP018439 1G6_H1_L1.92_IgG1_PVA_/S267K Heavy Chain

SEQ ID NO: 15016 - protein, 122 aa, Artificial Sequence; identical to SEQ ID NO: 6246
  Description of Artificial Sequence: Synthetic polypeptide
  VH of XENP018439

SEQ ID NO: 15017 - protein, 5 aa, Artificial Sequence
  Description of Artificial Sequence: Synthetic peptide
  XENP018439 vhCDR1
NYWMN

SEQ ID NO: 15018 - protein, 19 aa, Artificial Sequence
  Description of Artificial Sequence: Synthetic peptide
  XENP018439 vhCDR2
EIRLKSNNYATHYAEPVKG

SEQ ID NO: 15019 - protein, 11 aa, Artificial Sequence
  Description of Artificial Sequence: Synthetic peptide
  XENP018439 vhCDR3
YYGNYGGYFDV

SEQ ID NO: 15020 - protein, 214 aa, Artificial Sequence
  Description of Artificial Sequence: Synthetic polypeptide
  XENP018439 1G6_H1_L1.92_IgG1_PVA_/S267K Light Chain
SIVMTQSPATLSVSPGERATLSCRASQSVSNDVAWYQQKPGQSPRLLINYASHRYKGVPDRFTGSGYGTEFTLTISSLQSEDFAVYFCQQDYSSPRTFGGGTKVEIKRTVAAPSVFIFPPSDEQLKSGTASVVCLLNNFYPREAKVQWKVDNALQSGNSQESVTEQDSKDSTYSLSSTLTLSKADYEKHKVYACEVTHQGLSSPVTKSFNRGEC

SEQ ID NO: 15021 - protein, 107 aa, Artificial Sequence; identical to SEQ ID NO: 9322
  Description of Artificial Sequence: Synthetic polypeptide
  VL of XENP018439

SEQ ID NO: 15022 - protein, 11 aa, Artificial Sequence
  Description of Artificial Sequence: Synthetic peptide
  XENP018439 vlCDR1
RASQSVSNDVA

SEQ ID NO: 15023 - protein, 7 aa, Artificial Sequence
  Description of Artificial Sequence: Synthetic peptide
  XENP018439 vlCDR2
YASHRYK

SEQ ID NO: 15024 - protein, 9 aa, Artificial Sequence
  Description of Artificial Sequence: Synthetic peptide
  XENP018439 vlCDR3
QQDYSSPRT

SEQ ID NO: 15025 - protein, 451 aa, Artificial Sequence; identical to SEQ ID NO: 11545
  Description of Artificial Sequence: Synthetic polypeptide
  XENP018440 1G6_H1_L1.93_IgG1_PVA_/S267K Heavy Chain

SEQ ID NO: 15026 - protein, 122 aa, Artificial Sequence; identical to SEQ ID NO: 6246
  Description of Artificial Sequence: Synthetic polypeptide
  VH of XENP018440

SEQ ID NO: 15027 - protein, 5 aa, Artificial Sequence
  Description of Artificial Sequence: Synthetic peptide
  XENP018440 vhCDR1
NYWMN

SEQ ID NO: 15028 - protein, 19 aa, Artificial Sequence
  Description of Artificial Sequence: Synthetic peptide
  XENP018440 vhCDR2
EIRLKSNNYATHYAEPVKG

SEQ ID NO: 15029 - protein, 11 aa, Artificial Sequence
  Description of Artificial Sequence: Synthetic peptide
  XENP018440 vhCDR3
YYGNYGGYFDV

SEQ ID NO: 15030 - protein, 214 aa, Artificial Sequence
  Description of Artificial Sequence: Synthetic polypeptide
  XENP018440 1G6_H1_L1.93_IgG1_PVA_/S267K Light Chain
SIVMTQSPATLSVSPGERATLSCRASQSVSNDVAWYQQKPGQSPRLLINYASHRYYGVPDRFTGSGYGTEFTLTISSLQSEDFAVYFCQQDYSSPRTFGGGTKVEIKRTVAAPSVFIFPPSDEQLKSGTASVVCLLNNFYPREAKVQWKVDNALQSGNSQESVTEQDSKDSTYSLSSTLTLSKADYEKHKVYACEVTHQGLSSPVTKSFNRGEC

SEQ ID NO: 15031 - protein, 107 aa, Artificial Sequence; identical to SEQ ID NO: 9331
  Description of Artificial Sequence: Synthetic polypeptide
  VL of XENP018440

SEQ ID NO: 15032 - protein, 11 aa, Artificial Sequence
  Description of Artificial Sequence: Synthetic peptide
  XENP018440 vlCDR1
RASQSVSNDVA

SEQ ID NO: 15033 - protein, 7 aa, Artificial Sequence
  Description of Artificial Sequence: Synthetic peptide
  XENP018440 vlCDR2
YASHRYY

SEQ ID NO: 15034 - protein, 9 aa, Artificial Sequence
  Description of Artificial Sequence: Synthetic peptide
  XENP018440 vlCDR3
QQDYSSPRT

SEQ ID NO: 15035 - protein, 451 aa, Artificial Sequence; identical to SEQ ID NO: 11545
  Description of Artificial Sequence: Synthetic polypeptide
  XENP018441 1G6_H1_L1.94_IgG1_PVA_/S267K Heavy Chain

SEQ ID NO: 15036 - protein, 122 aa, Artificial Sequence; identical to SEQ ID NO: 6246
  Description of Artificial Sequence: Synthetic polypeptide
  VH of XENP018441

SEQ ID NO: 15037 - protein, 5 aa, Artificial Sequence
  Description of Artificial Sequence: Synthetic peptide
  XENP018441 vhCDR1
NYWMN

SEQ ID NO: 15038 - protein, 19 aa, Artificial Sequence
  Description of Artificial Sequence: Synthetic peptide
  XENP018441 vhCDR2
EIRLKSNNYATHYAEPVKG

SEQ ID NO: 15039 - protein, 11 aa, Artificial Sequence
  Description of Artificial Sequence: Synthetic peptide
  XENP018441 vhCDR3
YYGNYGGYFDV

SEQ ID NO: 15040 - protein, 214 aa, Artificial Sequence
  Description of Artificial Sequence: Synthetic polypeptide
  XENP018441 1G6_H1_L1.94_IgG1_PVA_/S267K Light Chain
SIVMTQSPATLSVSPGERATLSCRASQSVSNDVAWYQQKPGQSPRLLINYASHRYTSVPDRFTGSGYGTEFTLTISSLQSEDFAVYFCQQDYSSPRTFGGGTKVEIKRTVAAPSVFIFPPSDEQLKSGTASVVCLLNNFYPREAKVQWKVDNALQSGNSQESVTEQDSKDSTYSLSSTLTLSKADYEKHKVYACEVTHQGLSSPVTKSFNRGEC

SEQ ID NO: 15041 - protein, 107 aa, Artificial Sequence; identical to SEQ ID NO: 9340
  Description of Artificial Sequence: Synthetic polypeptide
  VL of XENP018441

SEQ ID NO: 15042 - protein, 11 aa, Artificial Sequence
  Description of Artificial Sequence: Synthetic peptide
  XENP018441 vlCDR1
RASQSVSNDVA

SEQ ID NO: 15043 - protein, 7 aa, Artificial Sequence
  Description of Artificial Sequence: Synthetic peptide
  XENP018441 vlCDR2
YASHRYT

SEQ ID NO: 15044 - protein, 9 aa, Artificial Sequence
  Description of Artificial Sequence: Synthetic peptide
  XENP018441 vlCDR3
QQDYSSPRT

SEQ ID NO: 15045 - protein, 451 aa, Artificial Sequence; identical to SEQ ID NO: 11545
  Description of Artificial Sequence: Synthetic polypeptide
  XENP018442 1G6_H1_L1.95_IgG1_PVA_/S267K Heavy Chain

SEQ ID NO: 15046 - protein, 122 aa, Artificial Sequence; identical to SEQ ID NO: 6246
  Description of Artificial Sequence: Synthetic polypeptide
  VH of XENP018442

SEQ ID NO: 15047 - protein, 5 aa, Artificial Sequence
  Description of Artificial Sequence: Synthetic peptide
  XENP018442 vhCDR1
NYWMN

SEQ ID NO: 15048 - protein, 19 aa, Artificial Sequence
  Description of Artificial Sequence: Synthetic peptide
  XENP018442 vhCDR2
EIRLKSNNYATHYAEPVKG

SEQ ID NO: 15049 - protein, 11 aa, Artificial Sequence
  Description of Artificial Sequence: Synthetic peptide
  XENP018442 vhCDR3
YYGNYGGYFDV

SEQ ID NO: 15050 - protein, 214 aa, Artificial Sequence
  Description of Artificial Sequence: Synthetic polypeptide
  XENP018442 1G6_H1_L1.95_IgG1_PVA_/S267K Light Chain
SIVMTQSPATLSVSPGERATLSCRASQSVSNDVAWYQQKPGQSPRLLINYASHRYTGIPDRFTGSGYGTEFTLTISSLQSEDFAVYFCQQDYSSPRTFGGGTKVEIKRTVAAPSVFIFPPSDEQLKSGTASVVCLLNNFYPREAKVQWKVDNALQSGNSQESVTEQDSKDSTYSLSSTLTLSKADYEKHKVYACEVTHQGLSSPVTKSFNRGEC

SEQ ID NO: 15051 - protein, 107 aa, Artificial Sequence; identical to SEQ ID NO: 9349
  Description of Artificial Sequence: Synthetic polypeptide
  VL of XENP018442

SEQ ID NO: 15052 - protein, 11 aa, Artificial Sequence
  Description of Artificial Sequence: Synthetic peptide
  XENP018442 vlCDR1
RASQSVSNDVA

SEQ ID NO: 15053 - protein, 7 aa, Artificial Sequence
  Description of Artificial Sequence: Synthetic peptide
  XENP018442 vlCDR2
YASHRYT

SEQ ID NO: 15054 - protein, 9 aa, Artificial Sequence
  Description of Artificial Sequence: Synthetic peptide
  XENP018442 vlCDR3
QQDYSSPRT

SEQ ID NO: 15055 - protein, 451 aa, Artificial Sequence; identical to SEQ ID NO: 11545
  Description of Artificial Sequence: Synthetic polypeptide
  XENP018443 1G6_H1_L1.96_IgG1_PVA_/S267K Heavy Chain

SEQ ID NO: 15056 - protein, 122 aa, Artificial Sequence; identical to SEQ ID NO: 6246
  Description of Artificial Sequence: Synthetic polypeptide
  VH of XENP018443

SEQ ID NO: 15057 - protein, 5 aa, Artificial Sequence
  Description of Artificial Sequence: Synthetic peptide
  XENP018443 vhCDR1
NYWMN

SEQ ID NO: 15058 - protein, 19 aa, Artificial Sequence
  Description of Artificial Sequence: Synthetic peptide
  XENP018443 vhCDR2
EIRLKSNNYATHYAEPVKG

SEQ ID NO: 15059 - protein, 11 aa, Artificial Sequence
  Description of Artificial Sequence: Synthetic peptide
  XENP018443 vhCDR3
YYGNYGGYFDV

SEQ ID NO: 15060 - protein, 214 aa, Artificial Sequence
  Description of Artificial Sequence: Synthetic polypeptide
  XENP018443 1G6_H1_L1.96_IgG1_PVA_/S267K Light Chain
SIVMTQSPATLSVSPGERATLSCRASQSVSNDVAWYQQKPGQSPRLLINYASHRYTGVPARFTGSGYGTEFTLTISSLQSEDFAVYFCQQDYSSPRTFGGGTKVEIKRTVAAPSVFIFPPSDEQLKSGTASVVCLLNNFYPREAKVQWKVDNALQSGNSQESVTEQDSKDSTYSLSSTLTLSKADYEKHKVYACEVTHQGLSSPVTKSFNRGEC

SEQ ID NO: 15061 - protein, 107 aa, Artificial Sequence; identical to SEQ ID NO: 9358
  Description of Artificial Sequence: Synthetic polypeptide
  VL of XENP018443

SEQ ID NO: 15062 - protein, 11 aa, Artificial Sequence
  Description of Artificial Sequence: Synthetic peptide
  XENP018443 vlCDR1
RASQSVSNDVA

SEQ ID NO: 15063 - protein, 7 aa, Artificial Sequence
  Description of Artificial Sequence: Synthetic peptide
  XENP018443 vlCDR2
YASHRYT

SEQ ID NO: 15064 - protein, 9 aa, Artificial Sequence
  Description of Artificial Sequence: Synthetic peptide
  XENP018443 vlCDR3
QQDYSSPRT

SEQ ID NO: 15065 - protein, 451 aa, Artificial Sequence; identical to SEQ ID NO: 11545
  Description of Artificial Sequence: Synthetic polypeptide
  XENP018444 1G6_H1_L1.97_IgG1_PVA_/S267K Heavy Chain

SEQ ID NO: 15066 - protein, 122 aa, Artificial Sequence; identical to SEQ ID NO: 6246
  Description of Artificial Sequence: Synthetic polypeptide
  VH of XENP018444

SEQ ID NO: 15067 - protein, 5 aa, Artificial Sequence
  Description of Artificial Sequence: Synthetic peptide
  XENP018444 vhCDR1
NYWMN

SEQ ID NO: 15068 - protein, 19 aa, Artificial Sequence
  Description of Artificial Sequence: Synthetic peptide
  XENP018444 vhCDR2
EIRLKSNNYATHYAEPVKG

SEQ ID NO: 15069 - protein, 11 aa, Artificial Sequence
  Description of Artificial Sequence: Synthetic peptide
  XENP018444 vhCDR3
YYGNYGGYFDV

SEQ ID NO: 15070 - protein, 214 aa, Artificial Sequence
  Description of Artificial Sequence: Synthetic polypeptide
  XENP018444 1G6_H1_L1.97_IgG1_PVA_/S267K Light Chain
SIVMTQSPATLSVSPGERATLSCRASQSVSNDVAWYQQKPGQSPRLLINYASHRYTGVPDRFSGSGYGTEFTLTISSLQSEDFAVYFCQQDYSSPRTFGGGTKVEIKRTVAAPSVFIFPPSDEQLKSGTASVVCLLNNFYPREAKVQWKVDNALQSGNSQESVTEQDSKDSTYSLSSTLTLSKADYEKHKVYACEVTHQGLSSPVTKSFNRGEC

SEQ ID NO: 15071 - protein, 107 aa, Artificial Sequence; identical to SEQ ID NO: 9367
  Description of Artificial Sequence: Synthetic polypeptide
  VL of XENP018444

SEQ ID NO: 15072 - protein, 11 aa, Artificial Sequence
  Description of Artificial Sequence: Synthetic peptide
  XENP018444 vlCDR1
RASQSVSNDVA

SEQ ID NO: 15073 - protein, 7 aa, Artificial Sequence
  Description of Artificial Sequence: Synthetic peptide
  XENP018444 vlCDR2
YASHRYT

SEQ ID NO: 15074 - protein, 9 aa, Artificial Sequence
  Description of Artificial Sequence: Synthetic peptide
  XENP018444 vlCDR3
QQDYSSPRT

SEQ ID NO: 15075 - protein, 451 aa, Artificial Sequence; identical to SEQ ID NO: 11545
  Description of Artificial Sequence: Synthetic polypeptide
  XENP018445 1G6_H1_L1.98_IgG1_PVA_/S267K Heavy Chain

SEQ ID NO: 15076 - protein, 122 aa, Artificial Sequence; identical to SEQ ID NO: 6246
  Description of Artificial Sequence: Synthetic polypeptide
  VH of XENP018445

SEQ ID NO: 15077 - protein, 5 aa, Artificial Sequence
  Description of Artificial Sequence: Synthetic peptide
  XENP018445 vhCDR1
NYWMN

SEQ ID NO: 15078 - protein, 19 aa, Artificial Sequence
  Description of Artificial Sequence: Synthetic peptide
  XENP018445 vhCDR2
EIRLKSNNYATHYAEPVKG

SEQ ID NO: 15079 - protein, 11 aa, Artificial Sequence
  Description of Artificial Sequence: Synthetic peptide
  XENP018445 vhCDR3
YYGNYGGYFDV

SEQ ID NO: 15080 - protein, 214 aa, Artificial Sequence
  Description of Artificial Sequence: Synthetic polypeptide
  XENP018445 1G6_H1_L1.98_IgG1_PVA_/S267K Light Chain
SIVMTQSPATLSVSPGERATLSCRASQSVSNDVAWYQQKPGQSPRLLINYASHRYTGVPDRFTGSGSGTEFTLTISSLQSEDFAVYFCQQDYSSPRTFGGGTKVEIKRTVAAPSVFIFPPSDEQLKSGTASVVCLLNNFYPREAKVQWKVDNALQSGNSQESVTEQDSKDSTYSLSSTLTLSKADYEKHKVYACEVTHQGLSSPVTKSFNRGEC

SEQ ID NO: 15081 - protein, 107 aa, Artificial Sequence; identical to SEQ ID NO: 9376
  Description of Artificial Sequence: Synthetic polypeptide
  VL of XENP018445

SEQ ID NO: 15082 - protein, 11 aa, Artificial Sequence
  Description of Artificial Sequence: Synthetic peptide
  XENP018445 vlCDR1
RASQSVSNDVA

SEQ ID NO: 15083 - protein, 7 aa, Artificial Sequence
  Description of Artificial Sequence: Synthetic peptide
  XENP018445 vlCDR2
YASHRYT

SEQ ID NO: 15084 - protein, 9 aa, Artificial Sequence
  Description of Artificial Sequence: Synthetic peptide
  XENP018445 vlCDR3
QQDYSSPRT

SEQ ID NO: 15085 - protein, 451 aa, Artificial Sequence; identical to SEQ ID NO: 11545
  Description of Artificial Sequence: Synthetic polypeptide
  XENP018446 1G6_H1_L1.99_IgG1_PVA_/S267K Heavy Chain

SEQ ID NO: 15086 - protein, 122 aa, Artificial Sequence; identical to SEQ ID NO: 6246
  Description of Artificial Sequence: Synthetic polypeptide
  VH of XENP018446

SEQ ID NO: 15087 - protein, 5 aa, Artificial Sequence
  Description of Artificial Sequence: Synthetic peptide
  XENP018446 vhCDR1
NYWMN

SEQ ID NO: 15088 - protein, 19 aa, Artificial Sequence
  Description of Artificial Sequence: Synthetic peptide
  XENP018446 vhCDR2
EIRLKSNNYATHYAEPVKG

SEQ ID NO: 15089 - protein, 11 aa, Artificial Sequence
  Description of Artificial Sequence: Synthetic peptide
  XENP018446 vhCDR3
YYGNYGGYFDV

SEQ ID NO: 15090 - protein, 214 aa, Artificial Sequence
  Description of Artificial Sequence: Synthetic polypeptide
  XENP018446 1G6_H1_L1.99_IgG1_PVA_/S267K Light Chain
SIVMTQSPATLSVSPGERATLSCRASQSVSNDVAWYQQKPGQSPRLLINYASHRYTGVPDRFTGSGPGTEFTLTISSLQSEDFAVYFCQQDYSSPRTFGGGTKVEIKRTVAAPSVFIFPPSDEQLKSGTASVVCLLNNFYPREAKVQWKVDNALQSGNSQESVTEQDSKDSTYSLSSTLTLSKADYEKHKVYACEVTHQGLSSPVTKSFNRGEC

SEQ ID NO: 15091 - protein, 107 aa, Artificial Sequence; identical to SEQ ID NO: 9385
  Description of Artificial Sequence: Synthetic polypeptide
  VL of XENP018446

SEQ ID NO: 15092 - protein, 11 aa, Artificial Sequence
  Description of Artificial Sequence: Synthetic peptide
  XENP018446 vlCDR1
RASQSVSNDVA

SEQ ID NO: 15093 - protein, 7 aa, Artificial Sequence
  Description of Artificial Sequence: Synthetic peptide
  XENP018446 vlCDR2
YASHRYT

SEQ ID NO: 15094 - protein, 9 aa, Artificial Sequence
  Description of Artificial Sequence: Synthetic peptide
  XENP018446 vlCDR3
QQDYSSPRT

SEQ ID NO: 15095 - protein, 451 aa, Artificial Sequence; identical to SEQ ID NO: 11545
  Description of Artificial Sequence: Synthetic polypeptide
  XENP018447 1G6_H1_L1.100_IgG1_PVA_/S267K Heavy Chain

SEQ ID NO: 15096 - protein, 122 aa, Artificial Sequence; identical to SEQ ID NO: 6246
  Description of Artificial Sequence: Synthetic polypeptide
  VH of XENP018447

SEQ ID NO: 15097 - protein, 5 aa, Artificial Sequence
  Description of Artificial Sequence: Synthetic peptide
  XENP018447 vhCDR1
NYWMN

SEQ ID NO: 15098 - protein, 19 aa, Artificial Sequence
  Description of Artificial Sequence: Synthetic peptide
  XENP018447 vhCDR2
EIRLKSNNYATHYAEPVKG

SEQ ID NO: 15099 - protein, 11 aa, Artificial Sequence
  Description of Artificial Sequence: Synthetic peptide
  XENP018447 vhCDR3
YYGNYGGYFDV

SEQ ID NO: 15100 - protein, 214 aa, Artificial Sequence
  Description of Artificial Sequence: Synthetic polypeptide
  XENP018447 1G6_H1_L1.100_IgG1_PVA_/S267K Light Chain
SIVMTQSPATLSVSPGERATLSCRASQSVSNDVAWYQQKPGQSPRLLINYASHRYTGVPDRFTGSGYGTDFTLTISSLQSEDFAVYFCQQDYSSPRTFGGGTKVEIKRTVAAPSVFIFPPSDEQLKSGTASVVCLLNNFYPREAKVQWKVDNALQSGNSQESVTEQDSKDSTYSLSSTLTLSKADYEKHKVYACEVTHQGLSSPVTKSFNRGEC

SEQ ID NO: 15101 - protein, 107 aa, Artificial Sequence; identical to SEQ ID NO: 9394
  Description of Artificial Sequence: Synthetic polypeptide
  VL of XENP018447

SEQ ID NO: 15102 - protein, 11 aa, Artificial Sequence
  Description of Artificial Sequence: Synthetic peptide
  XENP018447 vlCDR1
RASQSVSNDVA

SEQ ID NO: 15103 - protein, 7 aa, Artificial Sequence
  Description of Artificial Sequence: Synthetic peptide
  XENP018447 vlCDR2
YASHRYT

SEQ ID NO: 15104 - protein, 9 aa, Artificial Sequence
  Description of Artificial Sequence: Synthetic peptide
  XENP018447 vlCDR3
QQDYSSPRT

SEQ ID NO: 15105 - protein, 451 aa, Artificial Sequence; identical to SEQ ID NO: 11545
  Description of Artificial Sequence: Synthetic polypeptide
  XENP018448 1G6_H1_L1.101_IgG1_PVA_/S267K Heavy Chain

SEQ ID NO: 15106 - protein, 122 aa, Artificial Sequence; identical to SEQ ID NO: 6246
  Description of Artificial Sequence: Synthetic polypeptide
  VH of XENP018448

SEQ ID NO: 15107 - protein, 5 aa, Artificial Sequence
  Description of Artificial Sequence: Synthetic peptide
  XENP018448 vhCDR1
NYWMN

SEQ ID NO: 15108 - protein, 19 aa, Artificial Sequence
  Description of Artificial Sequence: Synthetic peptide
  XENP018448 vhCDR2
EIRLKSNNYATHYAEPVKG

SEQ ID NO: 15109 - protein, 11 aa, Artificial Sequence
  Description of Artificial Sequence: Synthetic peptide
  XENP018448 vhCDR3
YYGNYGGYFDV

SEQ ID NO: 15110 - protein, 214 aa, Artificial Sequence
  Description of Artificial Sequence: Synthetic polypeptide
  XENP018448 1G6_H1_L1.101_IgG1_PVA_/S267K Light Chain
SIVMTQSPATLSVSPGERATLSCRASQSVSNDVAWYQQKPGQSPRLLINYASHRYTGVPDRFTGSGYGTEFTFTISSLQSEDFAVYFCQQDYSSPRTFGGGTKVEIKRTVAAPSVFIFPPSDEQLKSGTASVVCLLNNFYPREAKVQWKVDNALQSGNSQESVTEQDSKDSTYSLSSTLTLSKADYEKHKVYACEVTHQGLSSPVTKSFNRGEC

SEQ ID NO: 15111 - protein, 107 aa, Artificial Sequence; identical to SEQ ID NO: 9403
  Description of Artificial Sequence: Synthetic polypeptide
  VL of XENP018448

SEQ ID NO: 15112 - protein, 11 aa, Artificial Sequence
  Description of Artificial Sequence: Synthetic peptide
  XENP018448 vlCDR1
RASQSVSNDVA

SEQ ID NO: 15113 - protein, 7 aa, Artificial Sequence
  Description of Artificial Sequence: Synthetic peptide
  XENP018448 vlCDR2
YASHRYT

SEQ ID NO: 15114 - protein, 9 aa, Artificial Sequence
  Description of Artificial Sequence: Synthetic peptide
  XENP018448 vlCDR3
QQDYSSPRT

SEQ ID NO: 15115 - protein, 451 aa, Artificial Sequence; identical to SEQ ID NO: 11545
  Description of Artificial Sequence: Synthetic polypeptide
  XENP018449 1G6_H1_L1.102_IgG1_PVA_/S267K Heavy Chain

SEQ ID NO: 15116 - protein, 122 aa, Artificial Sequence; identical to SEQ ID NO: 6246
  Description of Artificial Sequence: Synthetic polypeptide
  VH of XENP018449

SEQ ID NO: 15117 - protein, 5 aa, Artificial Sequence
  Description of Artificial Sequence: Synthetic peptide
  XENP018449 vhCDR1
NYWMN

SEQ ID NO: 15118 - protein, 19 aa, Artificial Sequence
  Description of Artificial Sequence: Synthetic peptide
  XENP018449 vhCDR2
EIRLKSNNYATHYAEPVKG

SEQ ID NO: 15119 - protein, 11 aa, Artificial Sequence
  Description of Artificial Sequence: Synthetic peptide
  XENP018449 vhCDR3
YYGNYGGYFDV

SEQ ID NO: 15120 - protein, 214 aa, Artificial Sequence
  Description of Artificial Sequence: Synthetic polypeptide
  XENP018449 1G6_H1_L1.102_IgG1_PVA_/S267K Light Chain
SIVMTQSPATLSVSPGERATLSCRASQSVSNDVAWYQQKPGQSPRLLINYASHRYTGVPDRFTGSGYGTEFTLTISTLQSEDFAVYFCQQDYSSPRTFGGGTKVEIKRTVAAPSVFIFPPSDEQLKSGTASVVCLLNNFYPREAKVQWKVDNALQSGNSQESVTEQDSKDSTYSLSSTLTLSKADYEKHKVYACEVTHQGLSSPVTKSFNRGEC

SEQ ID NO: 15121 - protein, 107 aa, Artificial Sequence; identical to SEQ ID NO: 9412
  Description of Artificial Sequence: Synthetic polypeptide
  VL of XENP018449

SEQ ID NO: 15122 - protein, 11 aa, Artificial Sequence
  Description of Artificial Sequence: Synthetic peptide
  XENP018449 vlCDR1
RASQSVSNDVA

SEQ ID NO: 15123 - protein, 7 aa, Artificial Sequence
  Description of Artificial Sequence: Synthetic peptide
  XENP018449 vlCDR2
YASHRYT

SEQ ID NO: 15124 - protein, 9 aa, Artificial Sequence
  Description of Artificial Sequence: Synthetic peptide
  XENP018449 vlCDR3
QQDYSSPRT

SEQ ID NO: 15125 - protein, 451 aa, Artificial Sequence; identical to SEQ ID NO: 11545
  Description of Artificial Sequence: Synthetic polypeptide
  XENP018450 1G6_H1_L1.103_IgG1_PVA_/S267K Heavy Chain

SEQ ID NO: 15126 - protein, 122 aa, Artificial Sequence; identical to SEQ ID NO: 6246
  Description of Artificial Sequence: Synthetic polypeptide
  VH of XENP018450

SEQ ID NO: 15127 - protein, 5 aa, Artificial Sequence
  Description of Artificial Sequence: Synthetic peptide
  XENP018450 vhCDR1
NYWMN

SEQ ID NO: 15128 - protein, 19 aa, Artificial Sequence
  Description of Artificial Sequence: Synthetic peptide
  XENP018450 vhCDR2
EIRLKSNNYATHYAEPVKG

SEQ ID NO: 15129 - protein, 11 aa, Artificial Sequence
  Description of Artificial Sequence: Synthetic peptide
  XENP018450 vhCDR3
YYGNYGGYFDV

SEQ ID NO: 15130 - protein, 214 aa, Artificial Sequence
  Description of Artificial Sequence: Synthetic polypeptide
  XENP018450 1G6_H1_L1.103_IgG1_PVA_/S267K Light Chain
SIVMTQSPATLSVSPGERATLSCRASQSVSNDVAWYQQKPGQSPRLLINYASHRYTGVPDRFTGSGYGTEFTLTISSVQSEDFAVYFCQQDYSSPRTFGGGTKVEIKRTVAAPSVFIFPPSDEQLKSGTASVVCLLNNFYPREAKVQWKVDNALQSGNSQESVTEQDSKDSTYSLSSTLTLSKADYEKHKVYACEVTHQGLSSPVTKSFNRGEC

SEQ ID NO: 15131 - protein, 107 aa, Artificial Sequence; identical to SEQ ID NO: 9421
  Description of Artificial Sequence: Synthetic polypeptide
  VL of XENP018450

SEQ ID NO: 15132 - protein, 11 aa, Artificial Sequence
  Description of Artificial Sequence: Synthetic peptide
  XENP018450 vlCDR1
RASQSVSNDVA

SEQ ID NO: 15133 - protein, 7 aa, Artificial Sequence
  Description of Artificial Sequence: Synthetic peptide
  XENP018450 vlCDR2
YASHRYT

SEQ ID NO: 15134 - protein, 9 aa, Artificial Sequence
  Description of Artificial Sequence: Synthetic peptide
  XENP018450 vlCDR3
QQDYSSPRT

SEQ ID NO: 15135 - protein, 451 aa, Artificial Sequence; identical to SEQ ID NO: 11545
  Description of Artificial Sequence: Synthetic polypeptide
  XENP018451 1G6_H1_L1.104_IgG1_PVA_/S267K Heavy Chain

SEQ ID NO: 15136 - protein, 122 aa, Artificial Sequence; identical to SEQ ID NO: 6246
  Description of Artificial Sequence: Synthetic polypeptide
  VH of XENP018451

SEQ ID NO: 15137 - protein, 5 aa, Artificial Sequence
  Description of Artificial Sequence: Synthetic peptide
  XENP018451 vhCDR1
NYWMN

SEQ ID NO: 15138 - protein, 19 aa, Artificial Sequence
  Description of Artificial Sequence: Synthetic peptide
  XENP018451 vhCDR2
EIRLKSNNYATHYAEPVKG

SEQ ID NO: 15139 - protein, 11 aa, Artificial Sequence
  Description of Artificial Sequence: Synthetic peptide
  XENP018451 vhCDR3
YYGNYGGYFDV

SEQ ID NO: 15140 - protein, 214 aa, Artificial Sequence
  Description of Artificial Sequence: Synthetic polypeptide
  XENP018451 1G6_H1_L1.104_IgG1_PVA_/S267K Light Chain
SIVMTQSPATLSVSPGERATLSCRASQSVSNDVAWYQQKPGQSPRLLINYASHRYTGVPDRFTGSGYGTEFTLTISSLQAEDFAVYFCQQDYSSPRTFGGGTKVEIKRTVAAPSVFIFPPSDEQLKSGTASVVCLLNNFYPREAKVQWKVDNALQSGNSQESVTEQDSKDSTYSLSSTLTLSKADYEKHKVYACEVTHQGLSSPVTKSFNRGEC

SEQ ID NO: 15141 - protein, 107 aa, Artificial Sequence; identical to SEQ ID NO: 9430
  Description of Artificial Sequence: Synthetic polypeptide
  VL of XENP018451

SEQ ID NO: 15142 - protein, 11 aa, Artificial Sequence
  Description of Artificial Sequence: Synthetic peptide
  XENP018451 vlCDR1
RASQSVSNDVA

SEQ ID NO: 15143 - protein, 7 aa, Artificial Sequence
  Description of Artificial Sequence: Synthetic peptide
  XENP018451 vlCDR2
YASHRYT

SEQ ID NO: 15144 - protein, 9 aa, Artificial Sequence
  Description of Artificial Sequence: Synthetic peptide
  XENP018451 vlCDR3
QQDYSSPRT

SEQ ID NO: 15145 - protein, 451 aa, Artificial Sequence; identical to SEQ ID NO: 11545
  Description of Artificial Sequence: Synthetic polypeptide
  XENP018452 1G6_H1_L1.105_IgG1_PVA_/S267K Heavy Chain

SEQ ID NO: 15146 - protein, 122 aa, Artificial Sequence; identical to SEQ ID NO: 6246
  Description of Artificial Sequence: Synthetic polypeptide
  VH of XENP018452

SEQ ID NO: 15147 - protein, 5 aa, Artificial Sequence
  Description of Artificial Sequence: Synthetic peptide
  XENP018452 vhCDR1
NYWMN

SEQ ID NO: 15148 - protein, 19 aa, Artificial Sequence
  Description of Artificial Sequence: Synthetic peptide
  XENP018452 vhCDR2
EIRLKSNNYATHYAEPVKG

SEQ ID NO: 15149 - protein, 11 aa, Artificial Sequence
  Description of Artificial Sequence: Synthetic peptide
  XENP018452 vhCDR3
YYGNYGGYFDV

SEQ ID NO: 15150 - protein, 214 aa, Artificial Sequence
  Description of Artificial Sequence: Synthetic polypeptide
  XENP018452 1G6_H1_L1.105_IgG1_PVA_/S267K Light Chain
SIVMTQSPATLSVSPGERATLSCRASQSVSNDVAWYQQKPGQSPRLLINYASHRYTGVPDRFTGSGYGTEFTLTISSLQSEDLAVYFCQQDYSSPRTFGGGTKVEIKRTVAAPSVFIFPPSDEQLKSGTASVVCLLNNFYPREAKVQWKVDNALQSGNSQESVTEQDSKDSTYSLSSTLTLSKADYEKHKVYACEVTHQGLSSPVTKSFNRGEC

SEQ ID NO: 15151 - protein, 107 aa, Artificial Sequence; identical to SEQ ID NO: 9439
  Description of Artificial Sequence: Synthetic polypeptide
  VL of XENP018452

SEQ ID NO: 15152 - protein, 11 aa, Artificial Sequence
  Description of Artificial Sequence: Synthetic peptide
  XENP018452 vlCDR1
RASQSVSNDVA

SEQ ID NO: 15153 - protein, 7 aa, Artificial Sequence
  Description of Artificial Sequence: Synthetic peptide
  XENP018452 vlCDR2
YASHRYT

SEQ ID NO: 15154 - protein, 9 aa, Artificial Sequence
  Description of Artificial Sequence: Synthetic peptide
  XENP018452 vlCDR3
QQDYSSPRT

SEQ ID NO: 15155 - protein, 451 aa, Artificial Sequence; identical to SEQ ID NO: 11545
  Description of Artificial Sequence: Synthetic polypeptide
  XENP018453 1G6_H1_L1.106_IgG1_PVA_/S267K Heavy Chain

SEQ ID NO: 15156 - protein, 122 aa, Artificial Sequence; identical to SEQ ID NO: 6246
  Description of Artificial Sequence: Synthetic polypeptide
  VH of XENP018453

SEQ ID NO: 15157 - protein, 5 aa, Artificial Sequence
  Description of Artificial Sequence: Synthetic peptide
  XENP018453 vhCDR1
NYWMN

SEQ ID NO: 15158 - protein, 19 aa, Artificial Sequence
  Description of Artificial Sequence: Synthetic peptide
  XENP018453 vhCDR2
EIRLKSNNYATHYAEPVKG

SEQ ID NO: 15159 - protein, 11 aa, Artificial Sequence
  Description of Artificial Sequence: Synthetic peptide
  XENP018453 vhCDR3
YYGNYGGYFDV

SEQ ID NO: 15160 - protein, 214 aa, Artificial Sequence
  Description of Artificial Sequence: Synthetic polypeptide
  XENP018453 1G6_H1_L1.106_IgG1_PVA_/S267K Light Chain
SIVMTQSPATLSVSPGERATLSCRASQSVSNDVAWYQQKPGQSPRLLINYASHRYTGVPDRFTGSGYGTEFTLTISSLQSEDFAVYYCQQDYSSPRTFGGGTKVEIKRTVAAPSVFIFPPSDEQLKSGTASVVCLLNNFYPREAKVQWKVDNALQSGNSQESVTEQDSKDSTYSLSSTLTLSKADYEKHKVYACEVTHQGLSSPVTKSFNRGEC

SEQ ID NO: 15161 - protein, 107 aa, Artificial Sequence; identical to SEQ ID NO: 9448
  Description of Artificial Sequence: Synthetic polypeptide
  VL of XENP018453

SEQ ID NO: 15162 - protein, 11 aa, Artificial Sequence
  Description of Artificial Sequence: Synthetic peptide
  XENP018453 vlCDR1
RASQSVSNDVA

SEQ ID NO: 15163 - protein, 7 aa, Artificial Sequence
  Description of Artificial Sequence: Synthetic peptide
  XENP018453 vlCDR2
YASHRYT

SEQ ID NO: 15164 - protein, 9 aa, Artificial Sequence
  Description of Artificial Sequence: Synthetic peptide
  XENP018453 vlCDR3
QQDYSSPRT

SEQ ID NO: 15165 - protein, 451 aa, Artificial Sequence; identical to SEQ ID NO: 11545
  Description of Artificial Sequence: Synthetic polypeptide
  XENP018454 1G6_H1_L1.107_IgG1_PVA_/S267K Heavy Chain

SEQ ID NO: 15166 - protein, 122 aa, Artificial Sequence; identical to SEQ ID NO: 6246
  Description of Artificial Sequence: Synthetic polypeptide
  VH of XENP018454

SEQ ID NO: 15167 - protein, 5 aa, Artificial Sequence
  Description of Artificial Sequence: Synthetic peptide
  XENP018454 vhCDR1
NYWMN

SEQ ID NO: 15168 - protein, 19 aa, Artificial Sequence
  Description of Artificial Sequence: Synthetic peptide
  XENP018454 vhCDR2
EIRLKSNNYATHYAEPVKG

SEQ ID NO: 15169 - protein, 11 aa, Artificial Sequence
  Description of Artificial Sequence: Synthetic peptide
  XENP018454 vhCDR3
YYGNYGGYFDV

SEQ ID NO: 15170 - protein, 214 aa, Artificial Sequence
  Description of Artificial Sequence: Synthetic polypeptide
  XENP018454 1G6_H1_L1.107_IgG1_PVA_/S267K Light Chain
SIVMTQSPATLSVSPGERATLSCRASQSVSNDVAWYQQKPGQSPRLLINYASHRYTGVPDRFTGSGYGTEFTLTISSLQSEDFAVYFCQQQYSSPRTFGGGTKVEIKRTVAAPSVFIFPPSDEQLKSGTASVVCLLNNFYPREAKVQWKVDNALQSGNSQESVTEQDSKDSTYSLSSTLTLSKADYEKHKVYACEVTHQGLSSPVTKSFNRGEC

SEQ ID NO: 15171 - protein, 107 aa, Artificial Sequence; identical to SEQ ID NO: 9457
  Description of Artificial Sequence: Synthetic polypeptide
  VL of XENP018454

SEQ ID NO: 15172 - protein, 11 aa, Artificial Sequence
  Description of Artificial Sequence: Synthetic peptide
  XENP018454 vlCDR1
RASQSVSNDVA

SEQ ID NO: 15173 - protein, 7 aa, Artificial Sequence
  Description of Artificial Sequence: Synthetic peptide
  XENP018454 vlCDR2
YASHRYT

SEQ ID NO: 15174 - protein, 9 aa, Artificial Sequence
  Description of Artificial Sequence: Synthetic peptide
  XENP018454 vlCDR3
QQQYSSPRT

SEQ ID NO: 15175 - protein, 451 aa, Artificial Sequence; identical to SEQ ID NO: 11545
  Description of Artificial Sequence: Synthetic polypeptide
  XENP018455 1G6_H1_L1.108_IgG1_PVA_/S267K Heavy Chain

SEQ ID NO: 15176 - protein, 122 aa, Artificial Sequence; identical to SEQ ID NO: 6246
  Description of Artificial Sequence: Synthetic polypeptide
  VH of XENP018455

SEQ ID NO: 15177 - protein, 5 aa, Artificial Sequence
  Description of Artificial Sequence: Synthetic peptide
  XENP018455 vhCDR1
NYWMN

SEQ ID NO: 15178 - protein, 19 aa, Artificial Sequence
  Description of Artificial Sequence: Synthetic peptide
  XENP018455 vhCDR2
EIRLKSNNYATHYAEPVKG

SEQ ID NO: 15179 - protein, 11 aa, Artificial Sequence
  Description of Artificial Sequence: Synthetic peptide
  XENP018455 vhCDR3
YYGNYGGYFDV

SEQ ID NO: 15180 - protein, 214 aa, Artificial Sequence
  Description of Artificial Sequence: Synthetic polypeptide
  XENP018455 1G6_H1_L1.108_IgG1_PVA_/S267K Light Chain
SIVMTQSPATLSVSPGERATLSCRASQSVSNDVAWYQQKPGQSPRLLINYASHRYTGVPDRFTGSGYGTEFTLTISSLQSEDFAVYFCQQEYSSPRTFGGGTKVEIKRTVAAPSVFIFPPSDEQLKSGTASVVCLLNNFYPREAKVQWKVDNALQSGNSQESVTEQDSKDSTYSLSSTLTLSKADYEKHKVYACEVTHQGLSSPVTKSFNRGEC

SEQ ID NO: 15181 - protein, 107 aa, Artificial Sequence; identical to SEQ ID NO: 9466
  Description of Artificial Sequence: Synthetic polypeptide
  VL of XENP018455

SEQ ID NO: 15182 - protein, 11 aa, Artificial Sequence
  Description of Artificial Sequence: Synthetic peptide
  XENP018455 vlCDR1
RASQSVSNDVA

SEQ ID NO: 15183 - protein, 7 aa, Artificial Sequence
  Description of Artificial Sequence: Synthetic peptide
  XENP018455 vlCDR2
YASHRYT

SEQ ID NO: 15184 - protein, 9 aa, Artificial Sequence
  Description of Artificial Sequence: Synthetic peptide
  XENP018455 vlCDR3
QQEYSSPRT

SEQ ID NO: 15185 - protein, 451 aa, Artificial Sequence; identical to SEQ ID NO: 11545
  Description of Artificial Sequence: Synthetic polypeptide
  XENP018456 1G6_H1_L1.109_IgG1_PVA_/S267K Heavy Chain

SEQ ID NO: 15186 - protein, 122 aa, Artificial Sequence; identical to SEQ ID NO: 6246
  Description of Artificial Sequence: Synthetic polypeptide
  VH of XENP018456

SEQ ID NO: 15187 - protein, 5 aa, Artificial Sequence
  Description of Artificial Sequence: Synthetic peptide
  XENP018456 vhCDR1
NYWMN

SEQ ID NO: 15188 - protein, 19 aa, Artificial Sequence
  Description of Artificial Sequence: Synthetic peptide
  XENP018456 vhCDR2
EIRLKSNNYATHYAEPVKG

SEQ ID NO: 15189 - protein, 11 aa, Artificial Sequence
  Description of Artificial Sequence: Synthetic peptide
  XENP018456 vhCDR3
YYGNYGGYFDV

SEQ ID NO: 15190 - protein, 214 aa, Artificial Sequence
  Description of Artificial Sequence: Synthetic polypeptide
  XENP018456 1G6_H1_L1.109_IgG1_PVA_/S267K Light Chain
SIVMTQSPATLSVSPGERATLSCRASQSVSNDVAWYQQKPGQSPRLLINYASHRYTGVPDRFTGSGYGTEFTLTISSLQSEDFAVYFCQQHYSSPRTFGGGTKVEIKRTVAAPSVFIFPPSDEQLKSGTASVVCLLNNFYPREAKVQWKVDNALQSGNSQESVTEQDSKDSTYSLSSTLTLSKADYEKHKVYACEVTHQGLSSPVTKSFNRGEC

SEQ ID NO: 15191 - protein, 107 aa, Artificial Sequence; identical to SEQ ID NO: 9475
  Description of Artificial Sequence: Synthetic polypeptide
  VL of XENP018456

SEQ ID NO: 15192 - protein, 11 aa, Artificial Sequence
  Description of Artificial Sequence: Synthetic peptide
  XENP018456 vlCDR1
RASQSVSNDVA

SEQ ID NO: 15193 - protein, 7 aa, Artificial Sequence
  Description of Artificial Sequence: Synthetic peptide
  XENP018456 vlCDR2
YASHRYT

SEQ ID NO: 15194 - protein, 9 aa, Artificial Sequence
  Description of Artificial Sequence: Synthetic peptide
  XENP018456 vlCDR3
QQHYSSPRT

SEQ ID NO: 15195 - protein, 451 aa, Artificial Sequence; identical to SEQ ID NO: 11545
  Description of Artificial Sequence: Synthetic polypeptide
  XENP018457 1G6_H1_L1.110_IgG1_PVA_/S267K Heavy Chain

SEQ ID NO: 15196 - protein, 122 aa, Artificial Sequence; identical to SEQ ID NO: 6246
  Description of Artificial Sequence: Synthetic polypeptide
  VH of XENP018457

SEQ ID NO: 15197 - protein, 5 aa, Artificial Sequence
  Description of Artificial Sequence: Synthetic peptide
  XENP018457 vhCDR1
NYWMN

SEQ ID NO: 15198 - protein, 19 aa, Artificial Sequence
  Description of Artificial Sequence: Synthetic peptide
  XENP018457 vhCDR2
EIRLKSNNYATHYAEPVKG

SEQ ID NO: 15199 - protein, 11 aa, Artificial Sequence
  Description of Artificial Sequence: Synthetic peptide
  XENP018457 vhCDR3
YYGNYGGYFDV

SEQ ID NO: 15200 - protein, 214 aa, Artificial Sequence
  Description of Artificial Sequence: Synthetic polypeptide
  XENP018457 1G6_H1_L1.110_IgG1_PVA_/S267K Light Chain
SIVMTQSPATLSVSPGERATLSCRASQSVSNDVAWYQQKPGQSPRLLINYASHRYTGVPDRFTGSGYGTEFTLTISSLQSEDFAVYFCQQSYSSPRTFGGGTKVEIKRTVAAPSVFIFPPSDEQLKSGTASVVCLLNNFYPREAKVQWKVDNALQSGNSQESVTEQDSKDSTYSLSSTLTLSKADYEKHKVYACEVTHQGLSSPVTKSFNRGEC

SEQ ID NO: 15201 - protein, 107 aa, Artificial Sequence; identical to SEQ ID NO: 9484
  Description of Artificial Sequence: Synthetic polypeptide
  VL of XENP018457

SEQ ID NO: 15202 - protein, 11 aa, Artificial Sequence
  Description of Artificial Sequence: Synthetic peptide
  XENP018457 vlCDR1
RASQSVSNDVA

SEQ ID NO: 15203 - protein, 7 aa, Artificial Sequence
  Description of Artificial Sequence: Synthetic peptide
  XENP018457 vlCDR2
YASHRYT

SEQ ID NO: 15204 - protein, 9 aa, Artificial Sequence
  Description of Artificial Sequence: Synthetic peptide
  XENP018457 vlCDR3
QQSYSSPRT

SEQ ID NO: 15205 - protein, 451 aa, Artificial Sequence; identical to SEQ ID NO: 11545
  Description of Artificial Sequence: Synthetic polypeptide
  XENP018458 1G6_H1_L1.111_IgG1_PVA_/S267K Heavy Chain

SEQ ID NO: 15206 - protein, 122 aa, Artificial Sequence; identical to SEQ ID NO: 6246
  Description of Artificial Sequence: Synthetic polypeptide
  VH of XENP018458

SEQ ID NO: 15207 - protein, 5 aa, Artificial Sequence
  Description of Artificial Sequence: Synthetic peptide
  XENP018458 vhCDR1
NYWMN

SEQ ID NO: 15208 - protein, 19 aa, Artificial Sequence
  Description of Artificial Sequence: Synthetic peptide
  XENP018458 vhCDR2
EIRLKSNNYATHYAEPVKG

SEQ ID NO: 15209 - protein, 11 aa, Artificial Sequence
  Description of Artificial Sequence: Synthetic peptide
  XENP018458 vhCDR3
YYGNYGGYFDV

SEQ ID NO: 15210 - protein, 214 aa, Artificial Sequence
  Description of Artificial Sequence: Synthetic polypeptide
  XENP018458 1G6_H1_L1.111_IgG1_PVA_/S267K Light Chain
SIVMTQSPATLSVSPGERATLSCRASQSVSNDVAWYQQKPGQSPRLLINYASHRYTGVPDRFTGSGYGTEFTLTISSLQSEDFAVYFCQQRYSSPRTFGGGTKVEIKRTVAAPSVFIFPPSDEQLKSGTASVVCLLNNFYPREAKVQWKVDNALQSGNSQESVTEQDSKDSTYSLSSTLTLSKADYEKHKVYACEVTHQGLSSPVTKSFNRGEC

SEQ ID NO: 15211 - protein, 107 aa, Artificial Sequence; identical to SEQ ID NO: 9493
  Description of Artificial Sequence: Synthetic polypeptide
  VL of XENP018458

SEQ ID NO: 15212 - protein, 11 aa, Artificial Sequence
  Description of Artificial Sequence: Synthetic peptide
  XENP018458 vlCDR1
RASQSVSNDVA

SEQ ID NO: 15213 - protein, 7 aa, Artificial Sequence
  Description of Artificial Sequence: Synthetic peptide
  XENP018458 vlCDR2
YASHRYT

SEQ ID NO: 15214 - protein, 9 aa, Artificial Sequence
  Description of Artificial Sequence: Synthetic peptide
  XENP018458 vlCDR3
QQRYSSPRT

SEQ ID NO: 15215 - protein, 451 aa, Artificial Sequence; identical to SEQ ID NO: 11545
  Description of Artificial Sequence: Synthetic polypeptide
  XENP018459 1G6_H1_L1.112_IgG1_PVA_/S267K Heavy Chain

SEQ ID NO: 15216 - protein, 122 aa, Artificial Sequence; identical to SEQ ID NO: 6246
  Description of Artificial Sequence: Synthetic polypeptide
  VH of XENP018459

SEQ ID NO: 15217 - protein, 5 aa, Artificial Sequence
  Description of Artificial Sequence: Synthetic peptide
  XENP018459 vhCDR1
NYWMN

SEQ ID NO: 15218 - protein, 19 aa, Artificial Sequence
  Description of Artificial Sequence: Synthetic peptide
  XENP018459 vhCDR2
EIRLKSNNYATHYAEPVKG

SEQ ID NO: 15219 - protein, 11 aa, Artificial Sequence
  Description of Artificial Sequence: Synthetic peptide
  XENP018459 vhCDR3
YYGNYGGYFDV

SEQ ID NO: 15220 - protein, 214 aa, Artificial Sequence
  Description of Artificial Sequence: Synthetic polypeptide
  XENP018459 1G6_H1_L1.112_IgG1_PVA_/S267K Light Chain
SIVMTQSPATLSVSPGERATLSCRASQSVSNDVAWYQQKPGQSPRLLINYASHRYTGVPDRFTGSGYGTEFTLTISSLQSEDFAVYFCQQLYSSPRTFGGGTKVEIKRTVAAPSVFIFPPSDEQLKSGTASVVCLLNNFYPREAKVQWKVDNALQSGNSQESVTEQDSKDSTYSLSSTLTLSKADYEKHKVYACEVTHQGLSSPVTKSFNRGEC

SEQ ID NO: 15221 - protein, 107 aa, Artificial Sequence; identical to SEQ ID NO: 9502
  Description of Artificial Sequence: Synthetic polypeptide
  VL of XENP018459

SEQ ID NO: 15222 - protein, 11 aa, Artificial Sequence
  Description of Artificial Sequence: Synthetic peptide
  XENP018459 vlCDR1
RASQSVSNDVA

SEQ ID NO: 15223 - protein, 7 aa, Artificial Sequence
  Description of Artificial Sequence: Synthetic peptide
  XENP018459 vlCDR2
YASHRYT

SEQ ID NO: 15224 - protein, 9 aa, Artificial Sequence
  Description of Artificial Sequence: Synthetic peptide
  XENP018459 vlCDR3
QQLYSSPRT

SEQ ID NO: 15225 - protein, 451 aa, Artificial Sequence; identical to SEQ ID NO: 11545
  Description of Artificial Sequence: Synthetic polypeptide
  XENP018460 1G6_H1_L1.113_IgG1_PVA_/S267K Heavy Chain

SEQ ID NO: 15226 - protein, 122 aa, Artificial Sequence; identical to SEQ ID NO: 6246
  Description of Artificial Sequence: Synthetic polypeptide
  VH of XENP018460

SEQ ID NO: 15227 - protein, 5 aa, Artificial Sequence
  Description of Artificial Sequence: Synthetic peptide
  XENP018460 vhCDR1
NYWMN

SEQ ID NO: 15228 - protein, 19 aa, Artificial Sequence
  Description of Artificial Sequence: Synthetic peptide
  XENP018460 vhCDR2
EIRLKSNNYATHYAEPVKG

SEQ ID NO: 15229 - protein, 11 aa, Artificial Sequence
  Description of Artificial Sequence: Synthetic peptide
  XENP018460 vhCDR3
YYGNYGGYFDV

SEQ ID NO: 15230 - protein, 214 aa, Artificial Sequence
  Description of Artificial Sequence: Synthetic polypeptide
  XENP018460 1G6_H1_L1.113_IgG1_PVA_/S267K Light Chain
SIVMTQSPATLSVSPGERATLSCRASQSVSNDVAWYQQKPGQSPRLLINYASHRYTGVPDRFTGSGYGTEFTLTISSLQSEDFAVYFCQQTYSSPRTFGGGTKVEIKRTVAAPSVFIFPPSDEQLKSGTASVVCLLNNFYPREAKVQWKVDNALQSGNSQESVTEQDSKDSTYSLSSTLTLSKADYEKHKVYACEVTHQGLSSPVTKSFNRGEC

SEQ ID NO: 15231 - protein, 107 aa, Artificial Sequence; identical to SEQ ID NO: 9511
  Description of Artificial Sequence: Synthetic polypeptide
  VL of XENP018460

SEQ ID NO: 15232 - protein, 11 aa, Artificial Sequence
  Description of Artificial Sequence: Synthetic peptide
  XENP018460 vlCDR1
RASQSVSNDVA

SEQ ID NO: 15233 - protein, 7 aa, Artificial Sequence
  Description of Artificial Sequence: Synthetic peptide
  XENP018460 vlCDR2
YASHRYT

SEQ ID NO: 15234 - protein, 9 aa, Artificial Sequence
  Description of Artificial Sequence: Synthetic peptide
  XENP018460 vlCDR3
QQTYSSPRT

SEQ ID NO: 15235 - protein, 451 aa, Artificial Sequence; identical to SEQ ID NO: 11545
  Description of Artificial Sequence: Synthetic polypeptide
  XENP018461 1G6_H1_L1.114_IgG1_PVA_/S267K Heavy Chain

SEQ ID NO: 15236 - protein, 122 aa, Artificial Sequence; identical to SEQ ID NO: 6246
  Description of Artificial Sequence: Synthetic polypeptide
  VH of XENP018461

SEQ ID NO: 15237 - protein, 5 aa, Artificial Sequence
  Description of Artificial Sequence: Synthetic peptide
  XENP018461 vhCDR1
NYWMN

SEQ ID NO: 15238 - protein, 19 aa, Artificial Sequence
  Description of Artificial Sequence: Synthetic peptide
  XENP018461 vhCDR2
EIRLKSNNYATHYAEPVKG

SEQ ID NO: 15239 - protein, 11 aa, Artificial Sequence
  Description of Artificial Sequence: Synthetic peptide
  XENP018461 vhCDR3
YYGNYGGYFDV

SEQ ID NO: 15240 - protein, 214 aa, Artificial Sequence
  Description of Artificial Sequence: Synthetic polypeptide
  XENP018461 1G6_H1_L1.114_IgG1_PVA_/S267K Light Chain
SIVMTQSPATLSVSPGERATLSCRASQSVSNDVAWYQQKPGQSPRLLINYASHRYTGVPDRFTGSGYGTEFTLTISSLQSEDFAVYFCQQGYSSPRTFGGGTKVEIKRTVAAPSVFIFPPSDEQLKSGTASVVCLLNNFYPREAKVQWKVDNALQSGNSQESVTEQDSKDSTYSLSSTLTLSKADYEKHKVYACEVTHQGLSSPVTKSFNRGEC

SEQ ID NO: 15241 - protein, 107 aa, Artificial Sequence; identical to SEQ ID NO: 9520
  Description of Artificial Sequence: Synthetic polypeptide
  VL of XENP018461

SEQ ID NO: 15242 - protein, 11 aa, Artificial Sequence
  Description of Artificial Sequence: Synthetic peptide
  XENP018461 vlCDR1
RASQSVSNDVA

SEQ ID NO: 15243 - protein, 7 aa, Artificial Sequence
  Description of Artificial Sequence: Synthetic peptide
  XENP018461 vlCDR2
YASHRYT

SEQ ID NO: 15244 - protein, 9 aa, Artificial Sequence
  Description of Artificial Sequence: Synthetic peptide
  XENP018461 vlCDR3
QQGYSSPRT

SEQ ID NO: 15245 - protein, 451 aa, Artificial Sequence; identical to SEQ ID NO: 11545
  Description of Artificial Sequence: Synthetic polypeptide
  XENP018462 1G6_H1_L1.115_IgG1_PVA_/S267K Heavy Chain

SEQ ID NO: 15246 - protein, 122 aa, Artificial Sequence; identical to SEQ ID NO: 6246
  Description of Artificial Sequence: Synthetic polypeptide
  VH of XENP018462

SEQ ID NO: 15247 - protein, 5 aa, Artificial Sequence
  Description of Artificial Sequence: Synthetic peptide
  XENP018462 vhCDR1
NYWMN

SEQ ID NO: 15248 - protein, 19 aa, Artificial Sequence
  Description of Artificial Sequence: Synthetic peptide
  XENP018462 vhCDR2
EIRLKSNNYATHYAEPVKG

SEQ ID NO: 15249 - protein, 11 aa, Artificial Sequence
  Description of Artificial Sequence: Synthetic peptide
  XENP018462 vhCDR3
YYGNYGGYFDV

SEQ ID NO: 15250 - protein, 214 aa, Artificial Sequence
  Description of Artificial Sequence: Synthetic polypeptide
  XENP018462 1G6_H1_L1.115_IgG1_PVA_/S267K Light Chain
SIVMTQSPATLSVSPGERATLSCRASQSVSNDVAWYQQKPGQSPRLLINYASHRYTGVPDRFTGSGYGTEFTLTISSLQSEDFAVYFCQQYYSSPRTFGGGTKVEIKRTVAAPSVFIFPPSDEQLKSGTASVVCLLNNFYPREAKVQWKVDNALQSGNSQESVTEQDSKDSTYSLSSTLTLSKADYEKHKVYACEVTHQGLSSPVTKSFNRGEC

SEQ ID NO: 15251 - protein, 107 aa, Artificial Sequence; identical to SEQ ID NO: 9529
  Description of Artificial Sequence: Synthetic polypeptide
  VL of XENP018462

SEQ ID NO: 15252 - protein, 11 aa, Artificial Sequence
  Description of Artificial Sequence: Synthetic peptide
  XENP018462 vlCDR1
RASQSVSNDVA

SEQ ID NO: 15253 - protein, 7 aa, Artificial Sequence
  Description of Artificial Sequence: Synthetic peptide
  XENP018462 vlCDR2
YASHRYT

SEQ ID NO: 15254 - protein, 9 aa, Artificial Sequence
  Description of Artificial Sequence: Synthetic peptide
  XENP018462 vlCDR3
QQYYSSPRT

SEQ ID NO: 15255 - protein, 451 aa, Artificial Sequence; identical to SEQ ID NO: 11545
  Description of Artificial Sequence: Synthetic polypeptide
  XENP018463 1G6_H1_L1.116_IgG1_PVA_/S267K Heavy Chain

SEQ ID NO: 15256 - protein, 122 aa, Artificial Sequence; identical to SEQ ID NO: 6246
  Description of Artificial Sequence: Synthetic polypeptide
  VH of XENP018463

SEQ ID NO: 15257 - protein, 5 aa, Artificial Sequence
  Description of Artificial Sequence: Synthetic peptide
  XENP018463 vhCDR1
NYWMN

SEQ ID NO: 15258 - protein, 19 aa, Artificial Sequence
  Description of Artificial Sequence: Synthetic peptide
  XENP018463 vhCDR2
EIRLKSNNYATHYAEPVKG

SEQ ID NO: 15259 - protein, 11 aa, Artificial Sequence
  Description of Artificial Sequence: Synthetic peptide
  XENP018463 vhCDR3
YYGNYGGYFDV

SEQ ID NO: 15260 - protein, 214 aa, Artificial Sequence
  Description of Artificial Sequence: Synthetic polypeptide
  XENP018463 1G6_H1_L1.116_IgG1_PVA_/S267K Light Chain
SIVMTQSPATLSVSPGERATLSCRASQSVSNDVAWYQQKPGQSPRLLINYASHRYTGVPDRFTGSGYGTEFTLTISSLQSEDFAVYFCQQDFSSPRTFGGGTKVEIKRTVAAPSVFIFPPSDEQLKSGTASVVCLLNNFYPREAKVQWKVDNALQSGNSQESVTEQDSKDSTYSLSSTLTLSKADYEKHKVYACEVTHQGLSSPVTKSFNRGEC

SEQ ID NO: 15261 - protein, 107 aa, Artificial Sequence; identical to SEQ ID NO: 9538
  Description of Artificial Sequence: Synthetic polypeptide
  VL of XENP018463

SEQ ID NO: 15262 - protein, 11 aa, Artificial Sequence
  Description of Artificial Sequence: Synthetic peptide
  XENP018463 vlCDR1
RASQSVSNDVA

SEQ ID NO: 15263 - protein, 7 aa, Artificial Sequence
  Description of Artificial Sequence: Synthetic peptide
  XENP018463 vlCDR2
YASHRYT

SEQ ID NO: 15264 - protein, 9 aa, Artificial Sequence
  Description of Artificial Sequence: Synthetic peptide
  XENP018463 vlCDR3
QQDFSSPRT

SEQ ID NO: 15265 - protein, 451 aa, Artificial Sequence; identical to SEQ ID NO: 11545
  Description of Artificial Sequence: Synthetic polypeptide
  XENP018464 1G6_H1_L1.117_IgG1_PVA_/S267K Heavy Chain

SEQ ID NO: 15266 - protein, 122 aa, Artificial Sequence; identical to SEQ ID NO: 6246
  Description of Artificial Sequence: Synthetic polypeptide
  VH of XENP018464

SEQ ID NO: 15267 - protein, 5 aa, Artificial Sequence
  Description of Artificial Sequence: Synthetic peptide
  XENP018464 vhCDR1
NYWMN

SEQ ID NO: 15268 - protein, 19 aa, Artificial Sequence
  Description of Artificial Sequence: Synthetic peptide
  XENP018464 vhCDR2
EIRLKSNNYATHYAEPVKG

SEQ ID NO: 15269 - protein, 11 aa, Artificial Sequence
  Description of Artificial Sequence: Synthetic peptide
  XENP018464 vhCDR3
YYGNYGGYFDV

SEQ ID NO: 15270 - protein, 214 aa, Artificial Sequence
  Description of Artificial Sequence: Synthetic polypeptide
  XENP018464 1G6_H1_L1.117_IgG1_PVA_/S267K Light Chain
SIVMTQSPATLSVSPGERATLSCRASQSVSNDVAWYQQKPGQSPRLLINYASHRYTGVPDRFTGSGYGTEFTLTISSLQSEDFAVYFCQQDHSSPRTFGGGTKVEIKRTVAAPSVFIFPPSDEQLKSGTASVVCLLNNFYPREAKVQWKVDNALQSGNSQESVTEQDSKDSTYSLSSTLTLSKADYEKHKVYACEVTHQGLSSPVTKSFNRGEC

SEQ ID NO: 15271 - protein, 107 aa, Artificial Sequence; identical to SEQ ID NO: 9547
  Description of Artificial Sequence: Synthetic polypeptide
  VL of XENP018464

SEQ ID NO: 15272 - protein, 11 aa, Artificial Sequence
  Description of Artificial Sequence: Synthetic peptide
  XENP018464 vlCDR1
RASQSVSNDVA

SEQ ID NO: 15273 - protein, 7 aa, Artificial Sequence
  Description of Artificial Sequence: Synthetic peptide
  XENP018464 vlCDR2
YASHRYT

SEQ ID NO: 15274 - protein, 9 aa, Artificial Sequence
  Description of Artificial Sequence: Synthetic peptide
  XENP018464 vlCDR3
QQDHSSPRT

SEQ ID NO: 15275 - protein, 451 aa, Artificial Sequence; identical to SEQ ID NO: 11545
  Description of Artificial Sequence: Synthetic polypeptide
  XENP018465 1G6_H1_L1.118_IgG1_PVA_/S267K Heavy Chain

SEQ ID NO: 15276 - protein, 122 aa, Artificial Sequence; identical to SEQ ID NO: 6246
  Description of Artificial Sequence: Synthetic polypeptide
  VH of XENP018465

SEQ ID NO: 15277 - protein, 5 aa, Artificial Sequence
  Description of Artificial Sequence: Synthetic peptide
  XENP018465 vhCDR1
NYWMN

SEQ ID NO: 15278 - protein, 19 aa, Artificial Sequence
  Description of Artificial Sequence: Synthetic peptide
  XENP018465 vhCDR2
EIRLKSNNYATHYAEPVKG

SEQ ID NO: 15279 - protein, 11 aa, Artificial Sequence
  Description of Artificial Sequence: Synthetic peptide
  XENP018465 vhCDR3
YYGNYGGYFDV

SEQ ID NO: 15280 - protein, 214 aa, Artificial Sequence
  Description of Artificial Sequence: Synthetic polypeptide
  XENP018465 1G6_H1_L1.118_IgG1_PVA_/S267K Light Chain
SIVMTQSPATLSVSPGERATLSCRASQSVSNDVAWYQQKPGQSPRLLINYASHRYTGVPDRFTGSGYGTEFTLTISSLQSEDFAVYFCQQDLSSPRTFGGGTKVEIKRTVAAPSVFIFPPSDEQLKSGTASVVCLLNNFYPREAKVQWKVDNALQSGNSQESVTEQDSKDSTYSLSSTLTLSKADYEKHKVYACEVTHQGLSSPVTKSFNRGEC

SEQ ID NO: 15281 - protein, 107 aa, Artificial Sequence; identical to SEQ ID NO: 9556
  Description of Artificial Sequence: Synthetic polypeptide
  VL of XENP018465

SEQ ID NO: 15282 - protein, 11 aa, Artificial Sequence
  Description of Artificial Sequence: Synthetic peptide
  XENP018465 vlCDR1
RASQSVSNDVA

SEQ ID NO: 15283 - protein, 7 aa, Artificial Sequence
  Description of Artificial Sequence: Synthetic peptide
  XENP018465 vlCDR2
YASHRYT

SEQ ID NO: 15284 - protein, 9 aa, Artificial Sequence
  Description of Artificial Sequence: Synthetic peptide
  XENP018465 vlCDR3
QQDLSSPRT

SEQ ID NO: 15285 - protein, 451 aa, Artificial Sequence; identical to SEQ ID NO: 11545
  Description of Artificial Sequence: Synthetic polypeptide
  XENP018466 1G6_H1_L1.119_IgG1_PVA_/S267K Heavy Chain

SEQ ID NO: 15286 - protein, 122 aa, Artificial Sequence; identical to SEQ ID NO: 6246
  Description of Artificial Sequence: Synthetic polypeptide
  VH of XENP018466

SEQ ID NO: 15287 - protein, 5 aa, Artificial Sequence
  Description of Artificial Sequence: Synthetic peptide
  XENP018466 vhCDR1
NYWMN

SEQ ID NO: 15288 - protein, 19 aa, Artificial Sequence
  Description of Artificial Sequence: Synthetic peptide
  XENP018466 vhCDR2
EIRLKSNNYATHYAEPVKG

SEQ ID NO: 15289 - protein, 11 aa, Artificial Sequence
  Description of Artificial Sequence: Synthetic peptide
  XENP018466 vhCDR3
YYGNYGGYFDV

SEQ ID NO: 15290 - protein, 214 aa, Artificial Sequence
  Description of Artificial Sequence: Synthetic polypeptide
  XENP018466 1G6_H1_L1.119_IgG1_PVA_/S267K Light Chain
SIVMTQSPATLSVSPGERATLSCRASQSVSNDVAWYQQKPGQSPRLLINYASHRYTGVPDRFTGSGYGTEFTLTISSLQSEDFAVYFCQQDWSSPRTFGGGTKVEIKRTVAAPSVFIFPPSDEQLKSGTASVVCLLNNFYPREAKVQWKVDNALQSGNSQESVTEQDSKDSTYSLSSTLTLSKADYEKHKVYACEVTHQGLSSPVTKSFNRGEC

SEQ ID NO: 15291 - protein, 107 aa, Artificial Sequence; identical to SEQ ID NO: 9565
  Description of Artificial Sequence: Synthetic polypeptide
  VL of XENP018466

SEQ ID NO: 15292 - protein, 11 aa, Artificial Sequence
  Description of Artificial Sequence: Synthetic peptide
  XENP018466 vlCDR1
RASQSVSNDVA

SEQ ID NO: 15293 - protein, 7 aa, Artificial Sequence
  Description of Artificial Sequence: Synthetic peptide
  XENP018466 vlCDR2
YASHRYT

SEQ ID NO: 15294 - protein, 9 aa, Artificial Sequence
  Description of Artificial Sequence: Synthetic peptide
  XENP018466 vlCDR3
QQDWSSPRT

SEQ ID NO: 15295 - protein, 451 aa, Artificial Sequence; identical to SEQ ID NO: 11545
  Description of Artificial Sequence: Synthetic polypeptide
  XENP018467 1G6_H1_L1.120_IgG1_PVA_/S267K Heavy Chain

SEQ ID NO: 15296 - protein, 122 aa, Artificial Sequence; identical to SEQ ID NO: 6246
  Description of Artificial Sequence: Synthetic polypeptide
  VH of XENP018467

SEQ ID NO: 15297 - protein, 5 aa, Artificial Sequence
  Description of Artificial Sequence: Synthetic peptide
  XENP018467 vhCDR1
NYWMN

SEQ ID NO: 15298 - protein, 19 aa, Artificial Sequence
  Description of Artificial Sequence: Synthetic peptide
  XENP018467 vhCDR2
EIRLKSNNYATHYAEPVKG

SEQ ID NO: 15299 - protein, 11 aa, Artificial Sequence
  Description of Artificial Sequence: Synthetic peptide
  XENP018467 vhCDR3
YYGNYGGYFDV

SEQ ID NO: 15300 - protein, 214 aa, Artificial Sequence
  Description of Artificial Sequence: Synthetic polypeptide
  XENP018467 1G6_H1_L1.120_IgG1_PVA_/S267K Light Chain
SIVMTQSPATLSVSPGERATLSCRASQSVSNDVAWYQQKPGQSPRLLINYASHRYTGVPDRFTGSGYGTEFTLTISSLQSEDFAVYFCQQDVSSPRTFGGGTKVEIKRTVAAPSVFIFPPSDEQLKSGTASVVCLLNNFYPREAKVQWKVDNALQSGNSQESVTEQDSKDSTYSLSSTLTLSKADYEKHKVYACEVTHQGLSSPVTKSFNRGEC

SEQ ID NO: 15301 - protein, 107 aa, Artificial Sequence; identical to SEQ ID NO: 9574
  Description of Artificial Sequence: Synthetic polypeptide
  VL of XENP018467

SEQ ID NO: 15302 - protein, 11 aa, Artificial Sequence
  Description of Artificial Sequence: Synthetic peptide
  XENP018467 vlCDR1
RASQSVSNDVA

SEQ ID NO: 15303 - protein, 7 aa, Artificial Sequence
  Description of Artificial Sequence: Synthetic peptide
  XENP018467 vlCDR2
YASHRYT

SEQ ID NO: 15304 - protein, 9 aa, Artificial Sequence
  Description of Artificial Sequence: Synthetic peptide
  XENP018467 vlCDR3
QQDVSSPRT

SEQ ID NO: 15305 - protein, 451 aa, Artificial Sequence; identical to SEQ ID NO: 11545
  Description of Artificial Sequence: Synthetic polypeptide
  XENP018468 1G6_H1_L1.121_IgG1_PVA_/S267K Heavy Chain

SEQ ID NO: 15306 - protein, 122 aa, Artificial Sequence; identical to SEQ ID NO: 6246
  Description of Artificial Sequence: Synthetic polypeptide
  VH of XENP018468

SEQ ID NO: 15307 - protein, 5 aa, Artificial Sequence
  Description of Artificial Sequence: Synthetic peptide
  XENP018468 vhCDR1
NYWMN

SEQ ID NO: 15308 - protein, 19 aa, Artificial Sequence
  Description of Artificial Sequence: Synthetic peptide
  XENP018468 vhCDR2
EIRLKSNNYATHYAEPVKG

SEQ ID NO: 15309 - protein, 11 aa, Artificial Sequence
  Description of Artificial Sequence: Synthetic peptide
  XENP018468 vhCDR3
YYGNYGGYFDV

SEQ ID NO: 15310 - protein, 214 aa, Artificial Sequence
  Description of Artificial Sequence: Synthetic polypeptide
  XENP018468 1G6_H1_L1.121_IgG1_PVA_/S267K Light Chain
SIVMTQSPATLSVSPGERATLSCRASQSVSNDVAWYQQKPGQSPRLLINYASHRYTGVPDRFTGSGYGTEFTLTISSLQSEDFAVYFCQQDASSPRTFGGGTKVEIKRTVAAPSVFIFPPSDEQLKSGTASVVCLLNNFYPREAKVQWKVDNALQSGNSQESVTEQDSKDSTYSLSSTLTLSKADYEKHKVYACEVTHQGLSSPVTKSFNRGEC

SEQ ID NO: 15311 - protein, 107 aa, Artificial Sequence; identical to SEQ ID NO: 9583
  Description of Artificial Sequence: Synthetic polypeptide
  VL of XENP018468

SEQ ID NO: 15312 - protein, 11 aa, Artificial Sequence
  Description of Artificial Sequence: Synthetic peptide
  XENP018468 vlCDR1
RASQSVSNDVA

SEQ ID NO: 15313 - protein, 7 aa, Artificial Sequence
  Description of Artificial Sequence: Synthetic peptide
  XENP018468 vlCDR2
YASHRYT

SEQ ID NO: 15314 - protein, 9 aa, Artificial Sequence
  Description of Artificial Sequence: Synthetic peptide
  XENP018468 vlCDR3
QQDASSPRT

SEQ ID NO: 15315 - protein, 451 aa, Artificial Sequence; identical to SEQ ID NO: 11545
  Description of Artificial Sequence: Synthetic polypeptide
  XENP018469 1G6_H1_L1.122_IgG1_PVA_/S267K Heavy Chain

SEQ ID NO: 15316 - protein, 122 aa, Artificial Sequence; identical to SEQ ID NO: 6246
  Description of Artificial Sequence: Synthetic polypeptide
  VH of XENP018469

SEQ ID NO: 15317 - protein, 5 aa, Artificial Sequence
  Description of Artificial Sequence: Synthetic peptide
  XENP018469 vhCDR1
NYWMN

SEQ ID NO: 15318 - protein, 19 aa, Artificial Sequence
  Description of Artificial Sequence: Synthetic peptide
  XENP018469 vhCDR2
EIRLKSNNYATHYAEPVKG

SEQ ID NO: 15319 - protein, 11 aa, Artificial Sequence
  Description of Artificial Sequence: Synthetic peptide
  XENP018469 vhCDR3
YYGNYGGYFDV

SEQ ID NO: 15320 - protein, 214 aa, Artificial Sequence
  Description of Artificial Sequence: Synthetic polypeptide
  XENP018469 1G6_H1_L1.122_IgG1_PVA_/S267K Light Chain
SIVMTQSPATLSVSPGERATLSCRASQSVSNDVAWYQQKPGQSPRLLINYASHRYTGVPDRFTGSGYGTEFTLTISSLQSEDFAVYFCQQDQSSPRTFGGGTKVEIKRTVAAPSVFIFPPSDEQLKSGTASVVCLLNNFYPREAKVQWKVDNALQSGNSQESVTEQDSKDSTYSLSSTLTLSKADYEKHKVYACEVTHQGLSSPVTKSFNRGEC

SEQ ID NO: 15321 - protein, 107 aa, Artificial Sequence; identical to SEQ ID NO: 9592
  Description of Artificial Sequence: Synthetic polypeptide
  VL of XENP018469

SEQ ID NO: 15322 - protein, 11 aa, Artificial Sequence
  Description of Artificial Sequence: Synthetic peptide
  XENP018469 vlCDR1
RASQSVSNDVA

SEQ ID NO: 15323 - protein, 7 aa, Artificial Sequence
  Description of Artificial Sequence: Synthetic peptide
  XENP018469 vlCDR2
YASHRYT

SEQ ID NO: 15324 - protein, 9 aa, Artificial Sequence
  Description of Artificial Sequence: Synthetic peptide
  XENP018469 vlCDR3
QQDQSSPRT

SEQ ID NO: 15325 - protein, 451 aa, Artificial Sequence; identical to SEQ ID NO: 11545
  Description of Artificial Sequence: Synthetic polypeptide
  XENP018470 1G6_H1_L1.123_IgG1_PVA_/S267K Heavy Chain

SEQ ID NO: 15326 - protein, 122 aa, Artificial Sequence; identical to SEQ ID NO: 6246
  Description of Artificial Sequence: Synthetic polypeptide
  VH of XENP018470

SEQ ID NO: 15327 - protein, 5 aa, Artificial Sequence
  Description of Artificial Sequence: Synthetic peptide
  XENP018470 vhCDR1
NYWMN

SEQ ID NO: 15328 - protein, 19 aa, Artificial Sequence
  Description of Artificial Sequence: Synthetic peptide
  XENP018470 vhCDR2
EIRLKSNNYATHYAEPVKG

SEQ ID NO: 15329 - protein, 11 aa, Artificial Sequence
  Description of Artificial Sequence: Synthetic peptide
  XENP018470 vhCDR3
YYGNYGGYFDV

SEQ ID NO: 15330 - protein, 214 aa, Artificial Sequence
  Description of Artificial Sequence: Synthetic polypeptide
  XENP018470 1G6_H1_L1.123_IgG1_PVA_/S267K Light Chain
SIVMTQSPATLSVSPGERATLSCRASQSVSNDVAWYQQKPGQSPRLLINYASHRYTGVPDRFTGSGYGTEFTLTISSLQSEDFAVYFCQQDDSSPRTFGGGTKVEIKRTVAAPSVFIFPPSDEQLKSGTASVVCLLNNFYPREAKVQWKVDNALQSGNSQESVTEQDSKDSTYSLSSTLTLSKADYEKHKVYACEVTHQGLSSPVTKSFNRGEC

SEQ ID NO: 15331 - protein, 107 aa, Artificial Sequence; identical to SEQ ID NO: 9601
  Description of Artificial Sequence: Synthetic polypeptide
  VL of XENP018470

SEQ ID NO: 15332 - protein, 11 aa, Artificial Sequence
  Description of Artificial Sequence: Synthetic peptide
  XENP018470 vlCDR1
RASQSVSNDVA

SEQ ID NO: 15333 - protein, 7 aa, Artificial Sequence
  Description of Artificial Sequence: Synthetic peptide
  XENP018470 vlCDR2
YASHRYT

SEQ ID NO: 15334 - protein, 9 aa, Artificial Sequence
  Description of Artificial Sequence: Synthetic peptide
  XENP018470 vlCDR3
QQDDSSPRT

SEQ ID NO: 15335 - protein, 451 aa, Artificial Sequence; identical to SEQ ID NO: 11545
  Description of Artificial Sequence: Synthetic polypeptide
  XENP018471 1G6_H1_L1.124_IgG1_PVA_/S267K Heavy Chain

SEQ ID NO: 15336 - protein, 122 aa, Artificial Sequence; identical to SEQ ID NO: 6246
  Description of Artificial Sequence: Synthetic polypeptide
  VH of XENP018471

SEQ ID NO: 15337 - protein, 5 aa, Artificial Sequence
  Description of Artificial Sequence: Synthetic peptide
  XENP018471 vhCDR1
NYWMN

SEQ ID NO: 15338 - protein, 19 aa, Artificial Sequence
  Description of Artificial Sequence: Synthetic peptide
  XENP018471 vhCDR2
EIRLKSNNYATHYAEPVKG

SEQ ID NO: 15339 - protein, 11 aa, Artificial Sequence
  Description of Artificial Sequence: Synthetic peptide
  XENP018471 vhCDR3
YYGNYGGYFDV

SEQ ID NO: 15340 - protein, 214 aa, Artificial Sequence
  Description of Artificial Sequence: Synthetic polypeptide
  XENP018471 1G6_H1_L1.124_IgG1_PVA_/S267K Light Chain
SIVMTQSPATLSVSPGERATLSCRASQSVSNDVAWYQQKPGQSPRLLINYASHRYTGVPDRFTGSGYGTEFTLTISSLQSEDFAVYFCQQDKSSPRTFGGGTKVEIKRTVAAPSVFIFPPSDEQLKSGTASVVCLLNNFYPREAKVQWKVDNALQSGNSQESVTEQDSKDSTYSLSSTLTLSKADYEKHKVYACEVTHQGLSSPVTKSFNRGEC

SEQ ID NO: 15341 - protein, 107 aa, Artificial Sequence; identical to SEQ ID NO: 9610
  Description of Artificial Sequence: Synthetic polypeptide
  VL of XENP018471

SEQ ID NO: 15342 - protein, 11 aa, Artificial Sequence
  Description of Artificial Sequence: Synthetic peptide
  XENP018471 vlCDR1
RASQSVSNDVA

SEQ ID NO: 15343 - protein, 7 aa, Artificial Sequence
  Description of Artificial Sequence: Synthetic peptide
  XENP018471 vlCDR2
YASHRYT

SEQ ID NO: 15344 - protein, 9 aa, Artificial Sequence
  Description of Artificial Sequence: Synthetic peptide
  XENP018471 vlCDR3
QQDKSSPRT

SEQ ID NO: 15345 - protein, 451 aa, Artificial Sequence; identical to SEQ ID NO: 11545
  Description of Artificial Sequence: Synthetic polypeptide
  XENP018472 1G6_H1_L1.125_IgG1_PVA_/S267K Heavy Chain

SEQ ID NO: 15346 - protein, 122 aa, Artificial Sequence; identical to SEQ ID NO: 6246
  Description of Artificial Sequence: Synthetic polypeptide
  VH of XENP018472

SEQ ID NO: 15347 - protein, 5 aa, Artificial Sequence
  Description of Artificial Sequence: Synthetic peptide
  XENP018472 vhCDR1
NYWMN

SEQ ID NO: 15348 - protein, 19 aa, Artificial Sequence
  Description of Artificial Sequence: Synthetic peptide
  XENP018472 vhCDR2
EIRLKSNNYATHYAEPVKG

SEQ ID NO: 15349 - protein, 11 aa, Artificial Sequence
  Description of Artificial Sequence: Synthetic peptide
  XENP018472 vhCDR3
YYGNYGGYFDV

SEQ ID NO: 15350 - protein, 214 aa, Artificial Sequence
  Description of Artificial Sequence: Synthetic polypeptide
  XENP018472 1G6_H1_L1.125_IgG1_PVA_/S267K Light Chain
SIVMTQSPATLSVSPGERATLSCRASQSVSNDVAWYQQKPGQSPRLLINYASHRYTGVPDRFTGSGYGTEFTLTISSLQSEDFAVYFCQQDSSSPRTFGGGTKVEIKRTVAAPSVFIFPPSDEQLKSGTASVVCLLNNFYPREAKVQWKVDNALQSGNSQESVTEQDSKDSTYSLSSTLTLSKADYEKHKVYACEVTHQGLSSPVTKSFNRGEC

SEQ ID NO: 15351 - protein, 107 aa, Artificial Sequence; identical to SEQ ID NO: 9619
  Description of Artificial Sequence: Synthetic polypeptide
  VL of XENP018472

SEQ ID NO: 15352 - protein, 11 aa, Artificial Sequence
  Description of Artificial Sequence: Synthetic peptide
  XENP018472 vlCDR1
RASQSVSNDVA

SEQ ID NO: 15353 - protein, 7 aa, Artificial Sequence
  Description of Artificial Sequence: Synthetic peptide
  XENP018472 vlCDR2
YASHRYT

SEQ ID NO: 15354 - protein, 9 aa, Artificial Sequence
  Description of Artificial Sequence: Synthetic peptide
  XENP018472 vlCDR3
QQDSSSPRT

SEQ ID NO: 15355 - protein, 451 aa, Artificial Sequence; identical to SEQ ID NO: 11545
  Description of Artificial Sequence: Synthetic polypeptide
  XENP018473 1G6_H1_L1.126_IgG1_PVA_/S267K Heavy Chain

SEQ ID NO: 15356 - protein, 122 aa, Artificial Sequence; identical to SEQ ID NO: 6246
  Description of Artificial Sequence: Synthetic polypeptide
  VH of XENP018473

SEQ ID NO: 15357 - protein, 5 aa, Artificial Sequence
  Description of Artificial Sequence: Synthetic peptide
  XENP018473 vhCDR1
NYWMN

SEQ ID NO: 15358 - protein, 19 aa, Artificial Sequence
  Description of Artificial Sequence: Synthetic peptide
  XENP018473 vhCDR2
EIRLKSNNYATHYAEPVKG

SEQ ID NO: 15359 - protein, 11 aa, Artificial Sequence
  Description of Artificial Sequence: Synthetic peptide
  XENP018473 vhCDR3
YYGNYGGYFDV

SEQ ID NO: 15360 - protein, 214 aa, Artificial Sequence
  Description of Artificial Sequence: Synthetic polypeptide
  XENP018473 1G6_H1_L1.126_IgG1_PVA_/S267K Light Chain
SIVMTQSPATLSVSPGERATLSCRASQSVSNDVAWYQQKPGQSPRLLINYASHRYTGVPDRFTGSGYGTEFTLTISSLQSEDFAVYFCQQDGSSPRTFGGGTKVEIKRTVAAPSVFIFPPSDEQLKSGTASVVCLLNNFYPREAKVQWKVDNALQSGNSQESVTEQDSKDSTYSLSSTLTLSKADYEKHKVYACEVTHQGLSSPVTKSFNRGEC

SEQ ID NO: 15361 - protein, 107 aa, Artificial Sequence; identical to SEQ ID NO: 9628
  Description of Artificial Sequence: Synthetic polypeptide
  VL of XENP018473

SEQ ID NO: 15362 - protein, 11 aa, Artificial Sequence
  Description of Artificial Sequence: Synthetic peptide
  XENP018473 vlCDR1
RASQSVSNDVA

SEQ ID NO: 15363 - protein, 7 aa, Artificial Sequence
  Description of Artificial Sequence: Synthetic peptide
  XENP018473 vlCDR2
YASHRYT

SEQ ID NO: 15364 - protein, 9 aa, Artificial Sequence
  Description of Artificial Sequence: Synthetic peptide
  XENP018473 vlCDR3
QQDGSSPRT

SEQ ID NO: 15365 - protein, 451 aa, Artificial Sequence; identical to SEQ ID NO: 11545
  Description of Artificial Sequence: Synthetic polypeptide
  XENP018474 1G6_H1_L1.127_IgG1_PVA_/S267K Heavy Chain

SEQ ID NO: 15366 - protein, 122 aa, Artificial Sequence; identical to SEQ ID NO: 6246
  Description of Artificial Sequence: Synthetic polypeptide
  VH of XENP018474

SEQ ID NO: 15367 - protein, 5 aa, Artificial Sequence
  Description of Artificial Sequence: Synthetic peptide
  XENP018474 vhCDR1
NYWMN

SEQ ID NO: 15368 - protein, 19 aa, Artificial Sequence
  Description of Artificial Sequence: Synthetic peptide
  XENP018474 vhCDR2
EIRLKSNNYATHYAEPVKG

SEQ ID NO: 15369 - protein, 11 aa, Artificial Sequence
  Description of Artificial Sequence: Synthetic peptide
  XENP018474 vhCDR3
YYGNYGGYFDV

SEQ ID NO: 15370 - protein, 214 aa, Artificial Sequence
  Description of Artificial Sequence: Synthetic polypeptide
  XENP018474 1G6_H1_L1.127_IgG1_PVA_/S267K Light Chain
SIVMTQSPATLSVSPGERATLSCRASQSVSNDVAWYQQKPGQSPRLLINYASHRYTGVPDRFTGSGYGTEFTLTISSLQSEDFAVYFCQQDYTSPRTFGGGTKVEIKRTVAAPSVFIFPPSDEQLKSGTASVVCLLNNFYPREAKVQWKVDNALQSGNSQESVTEQDSKDSTYSLSSTLTLSKADYEKHKVYACEVTHQGLSSPVTKSFNRGEC

SEQ ID NO: 15371 - protein, 107 aa, Artificial Sequence; identical to SEQ ID NO: 9637
  Description of Artificial Sequence: Synthetic polypeptide
  VL of XENP018474

SEQ ID NO: 15372 - protein, 11 aa, Artificial Sequence
  Description of Artificial Sequence: Synthetic peptide
  XENP018474 vlCDR1
RASQSVSNDVA

SEQ ID NO: 15373 - protein, 7 aa, Artificial Sequence
  Description of Artificial Sequence: Synthetic peptide
  XENP018474 vlCDR2
YASHRYT

SEQ ID NO: 15374 - protein, 9 aa, Artificial Sequence
  Description of Artificial Sequence: Synthetic peptide
  XENP018474 vlCDR3
QQDYTSPRT

SEQ ID NO: 15375 - protein, 451 aa, Artificial Sequence; identical to SEQ ID NO: 11545
  Description of Artificial Sequence: Synthetic polypeptide
  XENP018475 1G6_H1_L1.128_IgG1_PVA_/S267K Heavy Chain

SEQ ID NO: 15376 - protein, 122 aa, Artificial Sequence; identical to SEQ ID NO: 6246
  Description of Artificial Sequence: Synthetic polypeptide
  VH of XENP018475

SEQ ID NO: 15377 - protein, 5 aa, Artificial Sequence
  Description of Artificial Sequence: Synthetic peptide
  XENP018475 vhCDR1
NYWMN

SEQ ID NO: 15378 - protein, 19 aa, Artificial Sequence
  Description of Artificial Sequence: Synthetic peptide
  XENP018475 vhCDR2
EIRLKSNNYATHYAEPVKG

SEQ ID NO: 15379 - protein, 11 aa, Artificial Sequence
  Description of Artificial Sequence: Synthetic peptide
  XENP018475 vhCDR3
YYGNYGGYFDV

SEQ ID NO: 15380 - protein, 214 aa, Artificial Sequence
  Description of Artificial Sequence: Synthetic polypeptide
  XENP018475 1G6_H1_L1.128_IgG1_PVA_/S267K Light Chain
SIVMTQSPATLSVSPGERATLSCRASQSVSNDVAWYQQKPGQSPRLLINYASHRYTGVPDRFTGSGYGTEFTLTISSLQSEDFAVYFCQQDYASPRTFGGGTKVEIKRTVAAPSVFIFPPSDEQLKSGTASVVCLLNNFYPREAKVQWKVDNALQSGNSQESVTEQDSKDSTYSLSSTLTLSKADYEKHKVYACEVTHQGLSSPVTKSFNRGEC

SEQ ID NO: 15381 - protein, 107 aa, Artificial Sequence; identical to SEQ ID NO: 9646
  Description of Artificial Sequence: Synthetic polypeptide
  VL of XENP018475

SEQ ID NO: 15382 - protein, 11 aa, Artificial Sequence
  Description of Artificial Sequence: Synthetic peptide
  XENP018475 vlCDR1
RASQSVSNDVA

SEQ ID NO: 15383 - protein, 7 aa, Artificial Sequence
  Description of Artificial Sequence: Synthetic peptide
  XENP018475 vlCDR2
YASHRYT

SEQ ID NO: 15384 - protein, 9 aa, Artificial Sequence
  Description of Artificial Sequence: Synthetic peptide
  XENP018475 vlCDR3
QQDYASPRT

SEQ ID NO: 15385 - protein, 451 aa, Artificial Sequence; identical to SEQ ID NO: 11545
  Description of Artificial Sequence: Synthetic polypeptide
  XENP018476 1G6_H1_L1.129_IgG1_PVA_/S267K Heavy Chain

SEQ ID NO: 15386 - protein, 122 aa, Artificial Sequence; identical to SEQ ID NO: 6246
  Description of Artificial Sequence: Synthetic polypeptide
  VH of XENP018476

SEQ ID NO: 15387 - protein, 5 aa, Artificial Sequence
  Description of Artificial Sequence: Synthetic peptide
  XENP018476 vhCDR1
NYWMN

SEQ ID NO: 15388 - protein, 19 aa, Artificial Sequence
  Description of Artificial Sequence: Synthetic peptide
  XENP018476 vhCDR2
EIRLKSNNYATHYAEPVKG

SEQ ID NO: 15389 - protein, 11 aa, Artificial Sequence
  Description of Artificial Sequence: Synthetic peptide
  XENP018476 vhCDR3
YYGNYGGYFDV

SEQ ID NO: 15390 - protein, 214 aa, Artificial Sequence
  Description of Artificial Sequence: Synthetic polypeptide
  XENP018476 1G6_H1_L1.129_IgG1_PVA_/S267K Light Chain
SIVMTQSPATLSVSPGERATLSCRASQSVSNDVAWYQQKPGQSPRLLINYASHRYTGVPDRFTGSGYGTEFTLTISSLQSEDFAVYFCQQDYQSPRTFGGGTKVEIKRTVAAPSVFIFPPSDEQLKSGTASVVCLLNNFYPREAKVQWKVDNALQSGNSQESVTEQDSKDSTYSLSSTLTLSKADYEKHKVYACEVTHQGLSSPVTKSFNRGEC

SEQ ID NO: 15391 - protein, 107 aa, Artificial Sequence; identical to SEQ ID NO: 9655
  Description of Artificial Sequence: Synthetic polypeptide
  VL of XENP018476

SEQ ID NO: 15392 - protein, 11 aa, Artificial Sequence
  Description of Artificial Sequence: Synthetic peptide
  XENP018476 vlCDR1
RASQSVSNDVA

SEQ ID NO: 15393 - protein, 7 aa, Artificial Sequence
  Description of Artificial Sequence: Synthetic peptide
  XENP018476 vlCDR2
YASHRYT

SEQ ID NO: 15394 - protein, 9 aa, Artificial Sequence
  Description of Artificial Sequence: Synthetic peptide
  XENP018476 vlCDR3
QQDYQSPRT

SEQ ID NO: 15395 - protein, 451 aa, Artificial Sequence; identical to SEQ ID NO: 11545
  Description of Artificial Sequence: Synthetic polypeptide
  XENP018477 1G6_H1_L1.130_IgG1_PVA_/S267K Heavy Chain

SEQ ID NO: 15396 - protein, 122 aa, Artificial Sequence; identical to SEQ ID NO: 6246
  Description of Artificial Sequence: Synthetic polypeptide
  VH of XENP018477

SEQ ID NO: 15397 - protein, 5 aa, Artificial Sequence
  Description of Artificial Sequence: Synthetic peptide
  XENP018477 vhCDR1
NYWMN

SEQ ID NO: 15398 - protein, 19 aa, Artificial Sequence
  Description of Artificial Sequence: Synthetic peptide
  XENP018477 vhCDR2
EIRLKSNNYATHYAEPVKG

SEQ ID NO: 15399 - protein, 11 aa, Artificial Sequence
  Description of Artificial Sequence: Synthetic peptide
  XENP018477 vhCDR3
YYGNYGGYFDV

SEQ ID NO: 15400 - protein, 214 aa, Artificial Sequence
  Description of Artificial Sequence: Synthetic polypeptide
  XENP018477 1G6_H1_L1.130_IgG1_PVA_/S267K Light Chain
SIVMTQSPATLSVSPGERATLSCRASQSVSNDVAWYQQKPGQSPRLLINYASHRYTGVPDRFTGSGYGTEFTLTISSLQSEDFAVYFCQQDYGSPRTFGGGTKVEIKRTVAAPSVFIFPPSDEQLKSGTASVVCLLNNFYPREAKVQWKVDNALQSGNSQESVTEQDSKDSTYSLSSTLTLSKADYEKHKVYACEVTHQGLSSPVTKSFNRGEC

SEQ ID NO: 15401 - protein, 107 aa, Artificial Sequence; identical to SEQ ID NO: 9664
  Description of Artificial Sequence: Synthetic polypeptide
  VL of XENP018477

SEQ ID NO: 15402 - protein, 11 aa, Artificial Sequence
  Description of Artificial Sequence: Synthetic peptide
  XENP018477 vlCDR1
RASQSVSNDVA

SEQ ID NO: 15403 - protein, 7 aa, Artificial Sequence
  Description of Artificial Sequence: Synthetic peptide
  XENP018477 vlCDR2
YASHRYT

SEQ ID NO: 15404 - protein, 9 aa, Artificial Sequence
  Description of Artificial Sequence: Synthetic peptide
  XENP018477 vlCDR3
QQDYGSPRT

SEQ ID NO: 15405 - protein, 451 aa, Artificial Sequence; identical to SEQ ID NO: 11545
  Description of Artificial Sequence: Synthetic polypeptide
  XENP018478 1G6_H1_L1.131_IgG1_PVA_/S267K Heavy Chain

SEQ ID NO: 15406 - protein, 122 aa, Artificial Sequence; identical to SEQ ID NO: 6246
  Description of Artificial Sequence: Synthetic polypeptide
  VH of XENP018478

SEQ ID NO: 15407 - protein, 5 aa, Artificial Sequence
  Description of Artificial Sequence: Synthetic peptide
  XENP018478 vhCDR1
NYWMN

SEQ ID NO: 15408 - protein, 19 aa, Artificial Sequence
  Description of Artificial Sequence: Synthetic peptide
  XENP018478 vhCDR2
EIRLKSNNYATHYAEPVKG

SEQ ID NO: 15409 - protein, 11 aa, Artificial Sequence
  Description of Artificial Sequence: Synthetic peptide
  XENP018478 vhCDR3
YYGNYGGYFDV

SEQ ID NO: 15410 - protein, 214 aa, Artificial Sequence
  Description of Artificial Sequence: Synthetic polypeptide
  XENP018478 1G6_H1_L1.131_IgG1_PVA_/S267K Light Chain
SIVMTQSPATLSVSPGERATLSCRASQSVSNDVAWYQQKPGQSPRLLINYASHRYTGVPDRFTGSGYGTEFTLTISSLQSEDFAVYFCQQDYVSPRTFGGGTKVEIKRTVAAPSVFIFPPSDEQLKSGTASVVCLLNNFYPREAKVQWKVDNALQSGNSQESVTEQDSKDSTYSLSSTLTLSKADYEKHKVYACEVTHQGLSSPVTKSFNRGEC

SEQ ID NO: 15411 - protein, 107 aa, Artificial Sequence; identical to SEQ ID NO: 9673
  Description of Artificial Sequence: Synthetic polypeptide
  VL of XENP018478

SEQ ID NO: 15412 - protein, 11 aa, Artificial Sequence
  Description of Artificial Sequence: Synthetic peptide
  XENP018478 vlCDR1
RASQSVSNDVA

SEQ ID NO: 15413 - protein, 7 aa, Artificial Sequence
  Description of Artificial Sequence: Synthetic peptide
  XENP018478 vlCDR2
YASHRYT

SEQ ID NO: 15414 - protein, 9 aa, Artificial Sequence
  Description of Artificial Sequence: Synthetic peptide
  XENP018478 vlCDR3
QQDYVSPRT

SEQ ID NO: 15415 - protein, 451 aa, Artificial Sequence; identical to SEQ ID NO: 11545
  Description of Artificial Sequence: Synthetic polypeptide
  XENP018479 1G6_H1_L1.132_IgG1_PVA_/S267K Heavy Chain

SEQ ID NO: 15416 - protein, 122 aa, Artificial Sequence; identical to SEQ ID NO: 6246
  Description of Artificial Sequence: Synthetic polypeptide
  VH of XENP018479

SEQ ID NO: 15417 - protein, 5 aa, Artificial Sequence
  Description of Artificial Sequence: Synthetic peptide
  XENP018479 vhCDR1
NYWMN

SEQ ID NO: 15418 - protein, 19 aa, Artificial Sequence
  Description of Artificial Sequence: Synthetic peptide
  XENP018479 vhCDR2
EIRLKSNNYATHYAEPVKG

SEQ ID NO: 15419 - protein, 11 aa, Artificial Sequence
  Description of Artificial Sequence: Synthetic peptide
  XENP018479 vhCDR3
YYGNYGGYFDV

SEQ ID NO: 15420 - protein, 214 aa, Artificial Sequence
  Description of Artificial Sequence: Synthetic polypeptide
  XENP018479 1G6_H1_L1.132_IgG1_PVA_/S267K Light Chain
SIVMTQSPATLSVSPGERATLSCRASQSVSNDVAWYQQKPGQSPRLLINYASHRYTGVPDRFTGSGYGTEFTLTISSLQSEDFAVYFCQQDYHSPRTFGGGTKVEIKRTVAAPSVFIFPPSDEQLKSGTASVVCLLNNFYPREAKVQWKVDNALQSGNSQESVTEQDSKDSTYSLSSTLTLSKADYEKHKVYACEVTHQGLSSPVTKSFNRGEC

SEQ ID NO: 15421 - protein, 107 aa, Artificial Sequence; identical to SEQ ID NO: 9682
  Description of Artificial Sequence: Synthetic polypeptide
  VL of XENP018479

SEQ ID NO: 15422 - protein, 11 aa, Artificial Sequence
  Description of Artificial Sequence: Synthetic peptide
  XENP018479 vlCDR1
RASQSVSNDVA

SEQ ID NO: 15423 - protein, 7 aa, Artificial Sequence
  Description of Artificial Sequence: Synthetic peptide
  XENP018479 vlCDR2
YASHRYT

SEQ ID NO: 15424 - protein, 9 aa, Artificial Sequence
  Description of Artificial Sequence: Synthetic peptide
  XENP018479 vlCDR3
QQDYHSPRT

SEQ ID NO: 15425 - protein, 451 aa, Artificial Sequence; identical to SEQ ID NO: 11545
  Description of Artificial Sequence: Synthetic polypeptide
  XENP018480 1G6_H1_L1.133_IgG1_PVA_/S267K Heavy Chain

SEQ ID NO: 15426 - protein, 122 aa, Artificial Sequence; identical to SEQ ID NO: 6246
  Description of Artificial Sequence: Synthetic polypeptide
  VH of XENP018480

SEQ ID NO: 15427 - protein, 5 aa, Artificial Sequence
  Description of Artificial Sequence: Synthetic peptide
  XENP018480 vhCDR1
NYWMN

SEQ ID NO: 15428 - protein, 19 aa, Artificial Sequence
  Description of Artificial Sequence: Synthetic peptide
  XENP018480 vhCDR2
EIRLKSNNYATHYAEPVKG

SEQ ID NO: 15429 - protein, 11 aa, Artificial Sequence
  Description of Artificial Sequence: Synthetic peptide
  XENP018480 vhCDR3
YYGNYGGYFDV

SEQ ID NO: 15430 - protein, 214 aa, Artificial Sequence
  Description of Artificial Sequence: Synthetic polypeptide
  XENP018480 1G6_H1_L1.133_IgG1_PVA_/S267K Light Chain
SIVMTQSPATLSVSPGERATLSCRASQSVSNDVAWYQQKPGQSPRLLINYASHRYTGVPDRFTGSGYGTEFTLTISSLQSEDFAVYFCQQDYDSPRTFGGGTKVEIKRTVAAPSVFIFPPSDEQLKSGTASVVCLLNNFYPREAKVQWKVDNALQSGNSQESVTEQDSKDSTYSLSSTLTLSKADYEKHKVYACEVTHQGLSSPVTKSFNRGEC

SEQ ID NO: 15431 - protein, 107 aa, Artificial Sequence; identical to SEQ ID NO: 9691
  Description of Artificial Sequence: Synthetic polypeptide
  VL of XENP018480

SEQ ID NO: 15432 - protein, 11 aa, Artificial Sequence
  Description of Artificial Sequence: Synthetic peptide
  XENP018480 vlCDR1
RASQSVSNDVA

SEQ ID NO: 15433 - protein, 7 aa, Artificial Sequence
  Description of Artificial Sequence: Synthetic peptide
  XENP018480 vlCDR2
YASHRYT

SEQ ID NO: 15434 - protein, 9 aa, Artificial Sequence
  Description of Artificial Sequence: Synthetic peptide
  XENP018480 vlCDR3
QQDYDSPRT

SEQ ID NO: 15435 - protein, 451 aa, Artificial Sequence; identical to SEQ ID NO: 11545
  Description of Artificial Sequence: Synthetic polypeptide
  XENP018481 1G6_H1_L1.134_IgG1_PVA_/S267K Heavy Chain

SEQ ID NO: 15436 - protein, 122 aa, Artificial Sequence; identical to SEQ ID NO: 6246
  Description of Artificial Sequence: Synthetic polypeptide
  VH of XENP018481

SEQ ID NO: 15437 - protein, 5 aa, Artificial Sequence
  Description of Artificial Sequence: Synthetic peptide
  XENP018481 vhCDR1
NYWMN

SEQ ID NO: 15438 - protein, 19 aa, Artificial Sequence
  Description of Artificial Sequence: Synthetic peptide
  XENP018481 vhCDR2
EIRLKSNNYATHYAEPVKG

SEQ ID NO: 15439 - protein, 11 aa, Artificial Sequence
  Description of Artificial Sequence: Synthetic peptide
  XENP018481 vhCDR3
YYGNYGGYFDV

SEQ ID NO: 15440 - protein, 214 aa, Artificial Sequence
  Description of Artificial Sequence: Synthetic polypeptide
  XENP018481 1G6_H1_L1.134_IgG1_PVA_/S267K Light Chain
SIVMTQSPATLSVSPGERATLSCRASQSVSNDVAWYQQKPGQSPRLLINYASHRYTGVPDRFTGSGYGTEFTLTISSLQSEDFAVYFCQQDYKSPRTFGGGTKVEIKRTVAAPSVFIFPPSDEQLKSGTASVVCLLNNFYPREAKVQWKVDNALQSGNSQESVTEQDSKDSTYSLSSTLTLSKADYEKHKVYACEVTHQGLSSPVTKSFNRGEC

SEQ ID NO: 15441 - protein, 107 aa, Artificial Sequence; identical to SEQ ID NO: 9700
  Description of Artificial Sequence: Synthetic polypeptide
  VL of XENP018481

SEQ ID NO: 15442 - protein, 11 aa, Artificial Sequence
  Description of Artificial Sequence: Synthetic peptide
  XENP018481 vlCDR1
RASQSVSNDVA

SEQ ID NO: 15443 - protein, 7 aa, Artificial Sequence
  Description of Artificial Sequence: Synthetic peptide
  XENP018481 vlCDR2
YASHRYT

SEQ ID NO: 15444 - protein, 9 aa, Artificial Sequence
  Description of Artificial Sequence: Synthetic peptide
  XENP018481 vlCDR3
QQDYKSPRT

SEQ ID NO: 15445 - protein, 451 aa, Artificial Sequence; identical to SEQ ID NO: 11545
  Description of Artificial Sequence: Synthetic polypeptide
  XENP018482 1G6_H1_L1.135_IgG1_PVA_/S267K Heavy Chain

SEQ ID NO: 15446 - protein, 122 aa, Artificial Sequence; identical to SEQ ID NO: 6246
  Description of Artificial Sequence: Synthetic polypeptide
  VH of XENP018482

SEQ ID NO: 15447 - protein, 5 aa, Artificial Sequence
  Description of Artificial Sequence: Synthetic peptide
  XENP018482 vhCDR1
NYWMN

SEQ ID NO: 15448 - protein, 19 aa, Artificial Sequence
  Description of Artificial Sequence: Synthetic peptide
  XENP018482 vhCDR2
EIRLKSNNYATHYAEPVKG

SEQ ID NO: 15449 - protein, 11 aa, Artificial Sequence
  Description of Artificial Sequence: Synthetic peptide
  XENP018482 vhCDR3
YYGNYGGYFDV

SEQ ID NO: 15450 - protein, 214 aa, Artificial Sequence
  Description of Artificial Sequence: Synthetic polypeptide
  XENP018482 1G6_H1_L1.135_IgG1_PVA_/S267K Light Chain
SIVMTQSPATLSVSPGERATLSCRASQSVSNDVAWYQQKPGQSPRLLINYASHRYTGVPDRFTGSGYGTEFTLTISSLQSEDFAVYFCQQDYFSPRTFGGGTKVEIKRTVAAPSVFIFPPSDEQLKSGTASVVCLLNNFYPREAKVQWKVDNALQSGNSQESVTEQDSKDSTYSLSSTLTLSKADYEKHKVYACEVTHQGLSSPVTKSFNRGEC

SEQ ID NO: 15451 - protein, 107 aa, Artificial Sequence; identical to SEQ ID NO: 9709
  Description of Artificial Sequence: Synthetic polypeptide
  VL of XENP018482

SEQ ID NO: 15452 - protein, 11 aa, Artificial Sequence
  Description of Artificial Sequence: Synthetic peptide
  XENP018482 vlCDR1
RASQSVSNDVA

SEQ ID NO: 15453 - protein, 7 aa, Artificial Sequence
  Description of Artificial Sequence: Synthetic peptide
  XENP018482 vlCDR2
YASHRYT

SEQ ID NO: 15454 - protein, 9 aa, Artificial Sequence
  Description of Artificial Sequence: Synthetic peptide
  XENP018482 vlCDR3
QQDYFSPRT

SEQ ID NO: 15455 - protein, 451 aa, Artificial Sequence; identical to SEQ ID NO: 11545
  Description of Artificial Sequence: Synthetic polypeptide
  XENP018483 1G6_H1_L1.136_IgG1_PVA_/S267K Heavy Chain

SEQ ID NO: 15456 - protein, 122 aa, Artificial Sequence; identical to SEQ ID NO: 6246
  Description of Artificial Sequence: Synthetic polypeptide
  VH of XENP018483

SEQ ID NO: 15457 - protein, 5 aa, Artificial Sequence
  Description of Artificial Sequence: Synthetic peptide
  XENP018483 vhCDR1
NYWMN

SEQ ID NO: 15458 - protein, 19 aa, Artificial Sequence
  Description of Artificial Sequence: Synthetic peptide
  XENP018483 vhCDR2
EIRLKSNNYATHYAEPVKG

SEQ ID NO: 15459 - protein, 11 aa, Artificial Sequence
  Description of Artificial Sequence: Synthetic peptide
  XENP018483 vhCDR3
YYGNYGGYFDV

SEQ ID NO: 15460 - protein, 214 aa, Artificial Sequence
  Description of Artificial Sequence: Synthetic polypeptide
  XENP018483 1G6_H1_L1.136_IgG1_PVA_/S267K Light Chain
SIVMTQSPATLSVSPGERATLSCRASQSVSNDVAWYQQKPGQSPRLLINYASHRYTGVPDRFTGSGYGTEFTLTISSLQSEDFAVYFCQQDYSTPRTFGGGTKVEIKRTVAAPSVFIFPPSDEQLKSGTASVVCLLNNFYPREAKVQWKVDNALQSGNSQESVTEQDSKDSTYSLSSTLTLSKADYEKHKVYACEVTHQGLSSPVTKSFNRGEC

SEQ ID NO: 15461 - protein, 107 aa, Artificial Sequence; identical to SEQ ID NO: 9718
  Description of Artificial Sequence: Synthetic polypeptide
  VL of XENP018483

SEQ ID NO: 15462 - protein, 11 aa, Artificial Sequence
  Description of Artificial Sequence: Synthetic peptide
  XENP018483 vlCDR1
RASQSVSNDVA

SEQ ID NO: 15463 - protein, 7 aa, Artificial Sequence
  Description of Artificial Sequence: Synthetic peptide
  XENP018483 vlCDR2
YASHRYT

SEQ ID NO: 15464 - protein, 9 aa, Artificial Sequence
  Description of Artificial Sequence: Synthetic peptide
  XENP018483 vlCDR3
QQDYSTPRT

SEQ ID NO: 15465 - protein, 451 aa, Artificial Sequence; identical to SEQ ID NO: 11545
  Description of Artificial Sequence: Synthetic polypeptide
  XENP018484 1G6_H1_L1.137_IgG1_PVA_/S267K Heavy Chain

SEQ ID NO: 15466 - protein, 122 aa, Artificial Sequence; identical to SEQ ID NO: 6246
  Description of Artificial Sequence: Synthetic polypeptide
  VH of XENP018484

SEQ ID NO: 15467 - protein, 5 aa, Artificial Sequence
  Description of Artificial Sequence: Synthetic peptide
  XENP018484 vhCDR1
NYWMN

SEQ ID NO: 15468 - protein, 19 aa, Artificial Sequence
  Description of Artificial Sequence: Synthetic peptide
  XENP018484 vhCDR2
EIRLKSNNYATHYAEPVKG

SEQ ID NO: 15469 - protein, 11 aa, Artificial Sequence
  Description of Artificial Sequence: Synthetic peptide
  XENP018484 vhCDR3
YYGNYGGYFDV

SEQ ID NO: 15470 - protein, 214 aa, Artificial Sequence
  Description of Artificial Sequence: Synthetic polypeptide
  XENP018484 1G6_H1_L1.137_IgG1_PVA_/S267K Light Chain
SIVMTQSPATLSVSPGERATLSCRASQSVSNDVAWYQQKPGQSPRLLINYASHRYTGVPDRFTGSGYGTEFTLTISSLQSEDFAVYFCQQDYSAPRTFGGGTKVEIKRTVAAPSVFIFPPSDEQLKSGTASVVCLLNNFYPREAKVQWKVDNALQSGNSQESVTEQDSKDSTYSLSSTLTLSKADYEKHKVYACEVTHQGLSSPVTKSFNRGEC

SEQ ID NO: 15471 - protein, 107 aa, Artificial Sequence; identical to SEQ ID NO: 9727
  Description of Artificial Sequence: Synthetic polypeptide
  VL of XENP018484

SEQ ID NO: 15472 - protein, 11 aa, Artificial Sequence
  Description of Artificial Sequence: Synthetic peptide
  XENP018484 vlCDR1
RASQSVSNDVA

SEQ ID NO: 15473 - protein, 7 aa, Artificial Sequence
  Description of Artificial Sequence: Synthetic peptide
  XENP018484 vlCDR2
YASHRYT

SEQ ID NO: 15474 - protein, 9 aa, Artificial Sequence
  Description of Artificial Sequence: Synthetic peptide
  XENP018484 vlCDR3
QQDYSAPRT

SEQ ID NO: 15475 - protein, 451 aa, Artificial Sequence; identical to SEQ ID NO: 11545
  Description of Artificial Sequence: Synthetic polypeptide
  XENP018485 1G6_H1_L1.138_IgG1_PVA_/S267K Heavy Chain

SEQ ID NO: 15476 - protein, 122 aa, Artificial Sequence; identical to SEQ ID NO: 6246
  Description of Artificial Sequence: Synthetic polypeptide
  VH of XENP018485

SEQ ID NO: 15477 - protein, 5 aa, Artificial Sequence
  Description of Artificial Sequence: Synthetic peptide
  XENP018485 vhCDR1
NYWMN

SEQ ID NO: 15478 - protein, 19 aa, Artificial Sequence
  Description of Artificial Sequence: Synthetic peptide
  XENP018485 vhCDR2
EIRLKSNNYATHYAEPVKG

SEQ ID NO: 15479 - protein, 11 aa, Artificial Sequence
  Description of Artificial Sequence: Synthetic peptide
  XENP018485 vhCDR3
YYGNYGGYFDV

SEQ ID NO: 15480 - protein, 214 aa, Artificial Sequence
  Description of Artificial Sequence: Synthetic polypeptide
  XENP018485 1G6_H1_L1.138_IgG1_PVA_/S267K Light Chain
SIVMTQSPATLSVSPGERATLSCRASQSVSNDVAWYQQKPGQSPRLLINYASHRYTGVPDRFTGSGYGTEFTLTISSLQSEDFAVYFCQQDYSNPRTFGGGTKVEIKRTVAAPSVFIFPPSDEQLKSGTASVVCLLNNFYPREAKVQWKVDNALQSGNSQESVTEQDSKDSTYSLSSTLTLSKADYEKHKVYACEVTHQGLSSPVTKSFNRGEC

SEQ ID NO: 15481 - protein, 107 aa, Artificial Sequence; identical to SEQ ID NO: 9736
  Description of Artificial Sequence: Synthetic polypeptide
  VL of XENP018485

SEQ ID NO: 15482 - protein, 11 aa, Artificial Sequence
  Description of Artificial Sequence: Synthetic peptide
  XENP018485 vlCDR1
RASQSVSNDVA

SEQ ID NO: 15483 - protein, 7 aa, Artificial Sequence
  Description of Artificial Sequence: Synthetic peptide
  XENP018485 vlCDR2
YASHRYT

SEQ ID NO: 15484 - protein, 9 aa, Artificial Sequence
  Description of Artificial Sequence: Synthetic peptide
  XENP018485 vlCDR3
QQDYSNPRT

SEQ ID NO: 15485 - protein, 451 aa, Artificial Sequence; identical to SEQ ID NO: 11545
  Description of Artificial Sequence: Synthetic polypeptide
  XENP018486 1G6_H1_L1.139_IgG1_PVA_/S267K Heavy Chain

SEQ ID NO: 15486 - protein, 122 aa, Artificial Sequence; identical to SEQ ID NO: 6246
  Description of Artificial Sequence: Synthetic polypeptide
  VH of XENP018486

SEQ ID NO: 15487 - protein, 5 aa, Artificial Sequence
  Description of Artificial Sequence: Synthetic peptide
  XENP018486 vhCDR1
NYWMN

SEQ ID NO: 15488 - protein, 19 aa, Artificial Sequence
  Description of Artificial Sequence: Synthetic peptide
  XENP018486 vhCDR2
EIRLKSNNYATHYAEPVKG

SEQ ID NO: 15489 - protein, 11 aa, Artificial Sequence
  Description of Artificial Sequence: Synthetic peptide
  XENP018486 vhCDR3
YYGNYGGYFDV

SEQ ID NO: 15490 - protein, 214 aa, Artificial Sequence
  Description of Artificial Sequence: Synthetic polypeptide
  XENP018486 1G6_H1_L1.139_IgG1_PVA_/S267K Light Chain
SIVMTQSPATLSVSPGERATLSCRASQSVSNDVAWYQQKPGQSPRLLINYASHRYTGVPDRFTGSGYGTEFTLTISSLQSEDFAVYFCQQDYSGPRTFGGGTKVEIKRTVAAPSVFIFPPSDEQLKSGTASVVCLLNNFYPREAKVQWKVDNALQSGNSQESVTEQDSKDSTYSLSSTLTLSKADYEKHKVYACEVTHQGLSSPVTKSFNRGEC

SEQ ID NO: 15491 - protein, 107 aa, Artificial Sequence; identical to SEQ ID NO: 9745
  Description of Artificial Sequence: Synthetic polypeptide
  VL of XENP018486

SEQ ID NO: 15492 - protein, 11 aa, Artificial Sequence
  Description of Artificial Sequence: Synthetic peptide
  XENP018486 vlCDR1
RASQSVSNDVA

SEQ ID NO: 15493 - protein, 7 aa, Artificial Sequence
  Description of Artificial Sequence: Synthetic peptide
  XENP018486 vlCDR2
YASHRYT

SEQ ID NO: 15494 - protein, 9 aa, Artificial Sequence
  Description of Artificial Sequence: Synthetic peptide
  XENP018486 vlCDR3
QQDYSGPRT

SEQ ID NO: 15495 - protein, 451 aa, Artificial Sequence; identical to SEQ ID NO: 11545
  Description of Artificial Sequence: Synthetic polypeptide
  XENP018487 1G6_H1_L1.140_IgG1_PVA_/S267K Heavy Chain

SEQ ID NO: 15496 - protein, 122 aa, Artificial Sequence; identical to SEQ ID NO: 6246
  Description of Artificial Sequence: Synthetic polypeptide
  VH of XENP018487

SEQ ID NO: 15497 - protein, 5 aa, Artificial Sequence
  Description of Artificial Sequence: Synthetic peptide
  XENP018487 vhCDR1
NYWMN

SEQ ID NO: 15498 - protein, 19 aa, Artificial Sequence
  Description of Artificial Sequence: Synthetic peptide
  XENP018487 vhCDR2
EIRLKSNNYATHYAEPVKG

SEQ ID NO: 15499 - protein, 11 aa, Artificial Sequence
  Description of Artificial Sequence: Synthetic peptide
  XENP018487 vhCDR3
YYGNYGGYFDV

SEQ ID NO: 15500 - protein, 214 aa, Artificial Sequence
  Description of Artificial Sequence: Synthetic polypeptide
  XENP018487 1G6_H1_L1.140_IgG1_PVA_/S267K Light Chain
SIVMTQSPATLSVSPGERATLSCRASQSVSNDVAWYQQKPGQSPRLLINYASHRYTGVPDRFTGSGYGTEFTLTISSLQSEDFAVYFCQQDYSVPRTFGGGTKVEIKRTVAAPSVFIFPPSDEQLKSGTASVVCLLNNFYPREAKVQWKVDNALQSGNSQESVTEQDSKDSTYSLSSTLTLSKADYEKHKVYACEVTHQGLSSPVTKSFNRGEC

SEQ ID NO: 15501 - protein, 107 aa, Artificial Sequence; identical to SEQ ID NO: 9754
  Description of Artificial Sequence: Synthetic polypeptide
  VL of XENP018487

SEQ ID NO: 15502 - protein, 11 aa, Artificial Sequence
  Description of Artificial Sequence: Synthetic peptide
  XENP018487 vlCDR1
RASQSVSNDVA

SEQ ID NO: 15503 - protein, 7 aa, Artificial Sequence
  Description of Artificial Sequence: Synthetic peptide
  XENP018487 vlCDR2
YASHRYT

(The sequence listing continues in the following parts.)
